United States Patent Application Publication US 2015/0232836 A1 - sequence listing, part 9

SEQ ID NO: 221702 - DNA, 15 bp, Homo sapiens
tgtagaagtgggtgc

SEQ ID NO: 221703 - DNA, 15 bp, Homo sapiens
ttgtagaagtgggtg

SEQ ID NO: 221704 - DNA, 15 bp, Homo sapiens
tttgtagaagtgggt

SEQ ID NO: 221705 - DNA, 15 bp, Homo sapiens
gtttgtagaagtggg

SEQ ID NO: 221706 - DNA, 15 bp, Homo sapiens
tgtttgtagaagtgg

SEQ ID NO: 221707 - DNA, 15 bp, Homo sapiens
ttgtttgtagaagtg

SEQ ID NO: 221708 - DNA, 15 bp, Homo sapiens
tttgtttgtagaagt

SEQ ID NO: 221709 - DNA, 15 bp, Homo sapiens
atttgtttgtagaag

SEQ ID NO: 221710 - DNA, 15 bp, Homo sapiens
aatttgtttgtagaa

SEQ ID NO: 221711 - DNA, 15 bp, Homo sapiens
aaatttgtttgtaga

SEQ ID NO: 221712 - DNA, 15 bp, Homo sapiens
gaaatttgtttgtag

SEQ ID NO: 221713 - DNA, 15 bp, Homo sapiens
agaaatttgtttgta

SEQ ID NO: 221714 - DNA, 15 bp, Homo sapiens
cagaaatttgtttgt

SEQ ID NO: 221715 - DNA, 15 bp, Homo sapiens
ccagaaatttgtttg

SEQ ID NO: 221716 - DNA, 15 bp, Homo sapiens
gccagaaatttgttt

SEQ ID NO: 221717 - DNA, 15 bp, Homo sapiens
ggccagaaatttgtt

SEQ ID NO: 221718 - DNA, 15 bp, Homo sapiens
gggccagaaatttgt

SEQ ID NO: 221719 - DNA, 15 bp, Homo sapiens
ggggccagaaatttg

SEQ ID NO: 221720 - DNA, 15 bp, Homo sapiens
tggggccagaaattt

SEQ ID NO: 221721 - DNA, 15 bp, Homo sapiens
ctggggccagaaatt

SEQ ID NO: 221722 - DNA, 15 bp, Homo sapiens
cctggggccagaaat

SEQ ID NO: 221723 - DNA, 15 bp, Homo sapiens
tcctggggccagaaa

SEQ ID NO: 221724 - DNA, 15 bp, Homo sapiens
atcctggggccagaa

SEQ ID NO: 221725 - DNA, 15 bp, Homo sapiens
tatcctggggccaga

SEQ ID NO: 221726 - DNA, 15 bp, Homo sapiens
ttatcctggggccag

SEQ ID NO: 221727 - DNA, 15 bp, Homo sapiens
gttatcctggggcca

SEQ ID NO: 221728 - DNA, 15 bp, Homo sapiens
tgttatcctggggcc

SEQ ID NO: 221729 - DNA, 15 bp, Homo sapiens
gtgttatcctggggc

SEQ ID NO: 221730 - DNA, 15 bp, Homo sapiens
tgtgttatcctgggg

SEQ ID NO: 221731 - DNA, 15 bp, Homo sapiens
ttgtgttatcctggg

SEQ ID NO: 221732 - DNA, 15 bp, Homo sapiens
tttgtgttatcctgg

SEQ ID NO: 221733 - DNA, 15 bp, Homo sapiens
ctttgtgttatcctg

SEQ ID NO: 221734 - DNA, 15 bp, Homo sapiens
tctttgtgttatcct

SEQ ID NO: 221735 - DNA, 15 bp, Homo sapiens
ctctttgtgttatcc

SEQ ID NO: 221736 - DNA, 15 bp, Homo sapiens
gctctttgtgttatc

SEQ ID NO: 221737 - DNA, 15 bp, Homo sapiens
ggctctttgtgttat

SEQ ID NO: 221738 - DNA, 15 bp, Homo sapiens
tggctctttgtgtta

SEQ ID NO: 221739 - DNA, 15 bp, Homo sapiens
ctggctctttgtgtt

SEQ ID NO: 221740 - DNA, 15 bp, Homo sapiens
tctggctctttgtgt

SEQ ID NO: 221741 - DNA, 15 bp, Homo sapiens
ctctggctctttgtg

SEQ ID NO: 221742 - DNA, 15 bp, Homo sapiens
actctggctctttgt

SEQ ID NO: 221743 - DNA, 15 bp, Homo sapiens
tactctggctctttg

SEQ ID NO: 221744 - DNA, 15 bp, Homo sapiens
ctactctggctcttt

SEQ ID NO: 221745 - DNA, 15 bp, Homo sapiens
cctactctggctctt

SEQ ID NO: 221746 - DNA, 15 bp, Homo sapiens
tcctactctggctct

SEQ ID NO: 221747 - DNA, 15 bp, Homo sapiens
atcctactctggctc

SEQ ID NO: 221748 - DNA, 15 bp, Homo sapiens
aatcctactctggct

SEQ ID NO: 221749 - DNA, 15 bp, Homo sapiens
aaatcctactctggc

SEQ ID NO: 221750 - DNA, 15 bp, Homo sapiens
gaaatcctactctgg

SEQ ID NO: 221751 - DNA, 15 bp, Homo sapiens
tgaaatcctactctg

SEQ ID NO: 221752 - DNA, 15 bp, Homo sapiens
ttgaaatcctactct

SEQ ID NO: 221753 - DNA, 15 bp, Homo sapiens
cttgaaatcctactc

SEQ ID NO: 221754 - DNA, 15 bp, Homo sapiens
gcttgaaatcctact

SEQ ID NO: 221755 - DNA, 15 bp, Homo sapiens
tgcttgaaatcctac

SEQ ID NO: 221756 - DNA, 15 bp, Homo sapiens
ctgcttgaaatccta

SEQ ID NO: 221757 - DNA, 15 bp, Homo sapiens
tctgcttgaaatcct

SEQ ID NO: 221758 - DNA, 15 bp, Homo sapiens
ttctgcttgaaatcc

SEQ ID NO: 221759 - DNA, 15 bp, Homo sapiens
gttctgcttgaaatc

SEQ ID NO: 221760 - DNA, 15 bp, Homo sapiens
agttctgcttgaaat

SEQ ID NO: 221761 - DNA, 15 bp, Homo sapiens
cagttctgcttgaaa

SEQ ID NO: 221762 - DNA, 15 bp, Homo sapiens
acagttctgcttgaa

SEQ ID NO: 221763 - DNA, 15 bp, Homo sapiens
cacagttctgcttga

SEQ ID NO: 221764 - DNA, 15 bp, Homo sapiens
acacagttctgcttg

SEQ ID NO: 221765 - DNA, 15 bp, Homo sapiens
aacacagttctgctt

SEQ ID NO: 221766 - DNA, 15 bp, Homo sapiens
aaacacagttctgct

SEQ ID NO: 221767 - DNA, 15 bp, Homo sapiens
aaaacacagttctgc

SEQ ID NO: 221768 - DNA, 15 bp, Homo sapiens
gaaaacacagttctg

SEQ ID NO: 221769 - DNA, 15 bp, Homo sapiens
tgaaaacacagttct

SEQ ID NO: 221770 - DNA, 15 bp, Homo sapiens
ctgaaaacacagttc

SEQ ID NO: 221771 - DNA, 15 bp, Homo sapiens
actgaaaacacagtt

SEQ ID NO: 221772 - DNA, 15 bp, Homo sapiens
aactgaaaacacagt

SEQ ID NO: 221773 - DNA, 15 bp, Homo sapiens
caactgaaaacacag

SEQ ID NO: 221774 - DNA, 15 bp, Homo sapiens
tcaactgaaaacaca

SEQ ID NO: 221775 - DNA, 15 bp, Homo sapiens
atcaactgaaaacac

SEQ ID NO: 221776 - DNA, 15 bp, Homo sapiens
catcaactgaaaaca

SEQ ID NO: 221777 - DNA, 15 bp, Homo sapiens
acatcaactgaaaac

SEQ ID NO: 221778 - DNA, 15 bp, Homo sapiens
cacatcaactgaaaa

SEQ ID NO: 221779 - DNA, 15 bp, Homo sapiens
acacatcaactgaaa

SEQ ID NO: 221780 - DNA, 15 bp, Homo sapiens
gacacatcaactgaa

SEQ ID NO: 221781 - DNA, 15 bp, Homo sapiens
tgacacatcaactga

SEQ ID NO: 221782 - DNA, 15 bp, Homo sapiens
ctgacacatcaactg

SEQ ID NO: 221783 - DNA, 15 bp, Homo sapiens
actgacacatcaact

SEQ ID NO: 221784 - DNA, 15 bp, Homo sapiens
gactgacacatcaac

SEQ ID NO: 221785 - DNA, 15 bp, Homo sapiens
ggactgacacatcaa

SEQ ID NO: 221786 - DNA, 15 bp, Homo sapiens
gggactgacacatca

SEQ ID NO: 221787 - DNA, 15 bp, Homo sapiens
ggggactgacacatc

SEQ ID NO: 221788 - DNA, 15 bp, Homo sapiens
aggggactgacacat

SEQ ID NO: 221789 - DNA, 15 bp, Homo sapiens
caggggactgacaca

SEQ ID NO: 221790 - DNA, 15 bp, Homo sapiens
tcaggggactgacac

SEQ ID NO: 221791 - DNA, 15 bp, Homo sapiens
ctcaggggactgaca

SEQ ID NO: 221792 - DNA, 15 bp, Homo sapiens
tctcaggggactgac

SEQ ID NO: 221793 - DNA, 15 bp, Homo sapiens
ctctcaggggactga

SEQ ID NO: 221794 - DNA, 15 bp, Homo sapiens
actctcaggggactg

SEQ ID NO: 221795 - DNA, 15 bp, Homo sapiens
gactctcaggggact

SEQ ID NO: 221796 - DNA, 15 bp, Homo sapiens
tgactctcaggggac

SEQ ID NO: 221797 - DNA, 15 bp, Homo sapiens
atgactctcagggga

SEQ ID NO: 221798 - DNA, 15 bp, Homo sapiens
catgactctcagggg

SEQ ID NO: 221799 - DNA, 15 bp, Homo sapiens
acatgactctcaggg

SEQ ID NO: 221800 - DNA, 15 bp, Homo sapiens
cacatgactctcagg

SEQ ID NO: 221801 - DNA, 15 bp, Homo sapiens
ccacatgactctcag

SEQ ID NO: 221802 - DNA, 15 bp, Homo sapiens
tccacatgactctca

SEQ ID NO: 221803 - DNA, 15 bp, Homo sapiens
ttccacatgactctc

SEQ ID NO: 221804 - DNA, 15 bp, Homo sapiens
tttccacatgactct

SEQ ID NO: 221805 - DNA, 15 bp, Homo sapiens
ttttccacatgactc

SEQ ID NO: 221806 - DNA, 15 bp, Homo sapiens
tttttccacatgact

SEQ ID NO: 221807 - DNA, 15 bp, Homo sapiens
ttttttccacatgac

SEQ ID NO: 221808 - DNA, 15 bp, Homo sapiens
tttttttccacatga

SEQ ID NO: 221809 - DNA, 15 bp, Homo sapiens
ttttttttccacatg

SEQ ID NO: 221810 - DNA, 15 bp, Homo sapiens
tttttttttccacat

SEQ ID NO: 221811 - DNA, 15 bp, Homo sapiens
ttttttttttccaca

SEQ ID NO: 221812 - DNA, 15 bp, Homo sapiens
tttttttttttccac

SEQ ID NO: 221813 - DNA, 15 bp, Homo sapiens
ttttttttttttcca

SEQ ID NO: 221814 - DNA, 15 bp, Homo sapiens
tttttttttttttcc

SEQ ID NO: 221815 - DNA, 15 bp, Homo sapiens
ctttttttttttttc

SEQ ID NO: 221816 - DNA, 15 bp, Homo sapiens
tcttttttttttttt

SEQ ID NO: 221817 - DNA, 15 bp, Homo sapiens
ttctttttttttttt

SEQ ID NO: 221818 - DNA, 15 bp, Homo sapiens
tttcttttttttttt

SEQ ID NO: 221819 - DNA, 15 bp, Homo sapiens
ttttctttttttttt

SEQ ID NO: 221820 - DNA, 15 bp, Homo sapiens
tttttcttttttttt

SEQ ID NO: 221821 - DNA, 15 bp, Homo sapiens
ttttttctttttttt

SEQ ID NO: 221822 - DNA, 15 bp, Homo sapiens
attttttcttttttt

SEQ ID NO: 221823 - DNA, 15 bp, Homo sapiens
aattttttctttttt

SEQ ID NO: 221824 - DNA, 15 bp, Homo sapiens
gaattttttcttttt

SEQ ID NO: 221825 - DNA, 15 bp, Homo sapiens
tgaattttttctttt

SEQ ID NO: 221826 - DNA, 15 bp, Homo sapiens
ttgaattttttcttt

SEQ ID NO: 221827 - DNA, 15 bp, Homo sapiens
cttgaattttttctt

SEQ ID NO: 221828 - DNA, 15 bp, Homo sapiens
ccttgaattttttct

SEQ ID NO: 221829 - DNA, 15 bp, Homo sapiens
accttgaattttttc

SEQ ID NO: 221830 - DNA, 15 bp, Homo sapiens
gaccttgaatttttt

SEQ ID NO: 221831 - DNA, 15 bp, Homo sapiens
ggaccttgaattttt

SEQ ID NO: 221832 - DNA, 15 bp, Homo sapiens
tggaccttgaatttt

SEQ ID NO: 221833 - DNA, 15 bp, Homo sapiens
ctggaccttgaattt

SEQ ID NO: 221834 - DNA, 15 bp, Homo sapiens
cctggaccttgaatt

SEQ ID NO: 221835 - DNA, 15 bp, Homo sapiens
acctggaccttgaat

SEQ ID NO: 221836 - DNA, 15 bp, Homo sapiens
aacctggaccttgaa

SEQ ID NO: 221837 - DNA, 15 bp, Homo sapiens
taacctggaccttga

SEQ ID NO: 221838 - DNA, 15 bp, Homo sapiens
ataacctggaccttg

SEQ ID NO: 221839 - DNA, 15 bp, Homo sapiens
aataacctggacctt

SEQ ID NO: 221840 - DNA, 15 bp, Homo sapiens
aaataacctggacct

SEQ ID NO: 221841 - DNA, 15 bp, Homo sapiens
gaaataacctggacc

SEQ ID NO: 221842 - DNA, 15 bp, Homo sapiens
ggaaataacctggac

SEQ ID NO: 221843 - DNA, 15 bp, Homo sapiens
tggaaataacctgga

SEQ ID NO: 221844 - DNA, 15 bp, Homo sapiens
gtggaaataacctgg

SEQ ID NO: 221845 - DNA, 15 bp, Homo sapiens
ggtggaaataacctg

SEQ ID NO: 221846 - DNA, 15 bp, Homo sapiens
tggtggaaataacct

SEQ ID NO: 221847 - DNA, 15 bp, Homo sapiens
gtggtggaaataacc

SEQ ID NO: 221848 - DNA, 15 bp, Homo sapiens
agtggtggaaataac

SEQ ID NO: 221849 - DNA, 15 bp, Homo sapiens
gagtggtggaaataa

SEQ ID NO: 221850 - DNA, 15 bp, Homo sapiens
ggagtggtggaaata

SEQ ID NO: 221851 - DNA, 15 bp, Homo sapiens
aggagtggtggaaat

SEQ ID NO: 221852 - DNA, 15 bp, Homo sapiens
caggagtggtggaaa

SEQ ID NO: 221853 - DNA, 15 bp, Homo sapiens
ccaggagtggtggaa

SEQ ID NO: 221854 - DNA, 15 bp, Homo sapiens
cccaggagtggtgga

SEQ ID NO: 221855 - DNA, 15 bp, Homo sapiens
tcccaggagtggtgg

SEQ ID NO: 221856 - DNA, 15 bp, Homo sapiens
ttcccaggagtggtg

SEQ ID NO: 221857 - DNA, 15 bp, Homo sapiens
tttcccaggagtggt

SEQ ID NO: 221858 - DNA, 15 bp, Homo sapiens
gtttcccaggagtgg

SEQ ID NO: 221859 - DNA, 15 bp, Homo sapiens
ggtttcccaggagtg

SEQ ID NO: 221860 - DNA, 15 bp, Homo sapiens
tggtttcccaggagt

SEQ ID NO: 221861 - DNA, 15 bp, Homo sapiens
ctggtttcccaggag

SEQ ID NO: 221862 - DNA, 15 bp, Homo sapiens
cctggtttcccagga

SEQ ID NO: 221863 - DNA, 15 bp, Homo sapiens
gcctggtttcccagg

SEQ ID NO: 221864 - DNA, 15 bp, Homo sapiens
ggcctggtttcccag

SEQ ID NO: 221865 - DNA, 15 bp, Homo sapiens
aggcctggtttccca

SEQ ID NO: 221866 - DNA, 15 bp, Homo sapiens
caggcctggtttccc

SEQ ID NO: 221867 - DNA, 15 bp, Homo sapiens
ccaggcctggtttcc

SEQ ID NO: 221868 - DNA, 15 bp, Homo sapiens
tccaggcctggtttc

SEQ ID NO: 221869 - DNA, 15 bp, Homo sapiens
ctccaggcctggttt

SEQ ID NO: 221870 - DNA, 15 bp, Homo sapiens
tctccaggcctggtt

SEQ ID NO: 221871 - DNA, 15 bp, Homo sapiens
ctctccaggcctggt

SEQ ID NO: 221872 - DNA, 15 bp, Homo sapiens
gctctccaggcctgg

SEQ ID NO: 221873 - DNA, 15 bp, Homo sapiens
agctctccaggcctg

SEQ ID NO: 221874 - DNA, 15 bp, Homo sapiens
gagctctccaggcct

SEQ ID NO: 221875 - DNA, 15 bp, Homo sapiens
agagctctccaggcc

SEQ ID NO: 221876 - DNA, 15 bp, Homo sapiens
gagagctctccaggc

SEQ ID NO: 221877 - DNA, 15 bp, Homo sapiens
agagagctctccagg

SEQ ID NO: 221878 - DNA, 15 bp, Homo sapiens
tagagagctctccag

SEQ ID NO: 221879 - DNA, 15 bp, Homo sapiens
ctagagagctctcca

SEQ ID NO: 221880 - DNA, 15 bp, Homo sapiens
cctagagagctctcc

SEQ ID NO: 221881 - DNA, 15 bp, Homo sapiens
ccctagagagctctc

SEQ ID NO: 221882 - DNA, 15 bp, Homo sapiens
tccctagagagctct

SEQ ID NO: 221883 - DNA, 15 bp, Homo sapiens
ttccctagagagctc

SEQ ID NO: 221884 - DNA, 15 bp, Homo sapiens
tttccctagagagct

SEQ ID NO: 221885 - DNA, 15 bp, Homo sapiens
ctttccctagagagc

SEQ ID NO: 221886 - DNA, 15 bp, Homo sapiens
tctttccctagagag

SEQ ID NO: 221887 - DNA, 15 bp, Homo sapiens
ctctttccctagaga

SEQ ID NO: 221888 - DNA, 15 bp, Homo sapiens
cctctttccctagag

SEQ ID NO: 221889 - DNA, 15 bp, Homo sapiens
acctctttccctaga

SEQ ID NO: 221890 - DNA, 15 bp, Homo sapiens
tacctctttccctag

SEQ ID NO: 221891 - DNA, 15 bp, Homo sapiens
atacctctttcccta

SEQ ID NO: 221892 - DNA, 15 bp, Homo sapiens
catacctctttccct

SEQ ID NO: 221893 - DNA, 15 bp, Homo sapiens
acatacctctttccc

SEQ ID NO: 221894 - DNA, 15 bp, Homo sapiens
gacatacctctttcc

SEQ ID NO: 221895 - DNA, 15 bp, Homo sapiens
agacatacctctttc

SEQ ID NO: 221896 - DNA, 15 bp, Homo sapiens
cagacatacctcttt

SEQ ID NO: 221897 - DNA, 15 bp, Homo sapiens
gcagacatacctctt

SEQ ID NO: 221898 - DNA, 15 bp, Homo sapiens
agcagacatacctct

SEQ ID NO: 221899 - DNA, 15 bp, Homo sapiens
gagcagacatacctc

SEQ ID NO: 221900 - DNA, 15 bp, Homo sapiens
agagcagacatacct

SEQ ID NO: 221901 - DNA, 15 bp, Homo sapiens
cagagcagacatacc

SEQ ID NO: 221902 - DNA, 15 bp, Homo sapiens
ccagagcagacatac

SEQ ID NO: 221903 - DNA, 15 bp, Homo sapiens
cccagagcagacata

SEQ ID NO: 221904 - DNA, 15 bp, Homo sapiens
gcccagagcagacat

SEQ ID NO: 221905 - DNA, 15 bp, Homo sapiens
agcccagagcagaca

SEQ ID NO: 221906 - DNA, 15 bp, Homo sapiens
aagcccagagcagac

SEQ ID NO: 221907 - DNA, 15 bp, Homo sapiens
aaagcccagagcaga

SEQ ID NO: 221908 - DNA, 15 bp, Homo sapiens
aaaagcccagagcag

SEQ ID NO: 221909 - DNA, 15 bp, Homo sapiens
caaaagcccagagca

SEQ ID NO: 221910 - DNA, 15 bp, Homo sapiens
gcaaaagcccagagc

SEQ ID NO: 221911 - DNA, 15 bp, Homo sapiens
tgcaaaagcccagag

SEQ ID NO: 221912 - DNA, 15 bp, Homo sapiens
ttgcaaaagcccaga

SEQ ID NO: 221913 - DNA, 15 bp, Homo sapiens
gttgcaaaagcccag

SEQ ID NO: 221914 - DNA, 15 bp, Homo sapiens
ggttgcaaaagccca

SEQ ID NO: 221915 - DNA, 15 bp, Homo sapiens
aggttgcaaaagccc

SEQ ID NO: 221916 - DNA, 15 bp, Homo sapiens
aaggttgcaaaagcc

SEQ ID NO: 221917 - DNA, 15 bp, Homo sapiens
taaggttgcaaaagc

SEQ ID NO: 221918 - DNA, 15 bp, Homo sapiens
ataaggttgcaaaag

SEQ ID NO: 221919 - DNA, 15 bp, Homo sapiens
aataaggttgcaaaa

SEQ ID NO: 221920 - DNA, 15 bp, Homo sapiens
aaataaggttgcaaa

SEQ ID NO: 221921 - DNA, 15 bp, Homo sapiens
aaaataaggttgcaa

SEQ ID NO: 221922 - DNA, 15 bp, Homo sapiens
taaaataaggttgca

SEQ ID NO: 221923 - DNA, 15 bp, Homo sapiens
ataaaataaggttgc

SEQ ID NO: 221924 - DNA, 15 bp, Homo sapiens
tataaaataaggttg

SEQ ID NO: 221925 - DNA, 15 bp, Homo sapiens
ttataaaataaggtt

SEQ ID NO: 221926 - DNA, 15 bp, Homo sapiens
attataaaataaggt

SEQ ID NO: 221927 - DNA, 15 bp, Homo sapiens
aattataaaataagg

SEQ ID NO: 221928 - DNA, 15 bp, Homo sapiens
gaattataaaataag

SEQ ID NO: 221929 - DNA, 15 bp, Homo sapiens
tgaattataaaataa

SEQ ID NO: 221930 - DNA, 15 bp, Homo sapiens
gtgaattataaaata

SEQ ID NO: 221931 - DNA, 15 bp, Homo sapiens
agtgaattataaaat

SEQ ID NO: 221932 - DNA, 15 bp, Homo sapiens
aagtgaattataaaa

SEQ ID NO: 221933 - DNA, 15 bp, Homo sapiens
aaagtgaattataaa

SEQ ID NO: 221934 - DNA, 15 bp, Homo sapiens
gaaagtgaattataa

SEQ ID NO: 221935 - DNA, 15 bp, Homo sapiens
agaaagtgaattata

SEQ ID NO: 221936 - DNA, 15 bp, Homo sapiens
aagaaagtgaattat

SEQ ID NO: 221937 - DNA, 15 bp, Homo sapiens
taagaaagtgaatta

SEQ ID NO: 221938 - DNA, 15 bp, Homo sapiens
ataagaaagtgaatt

SEQ ID NO: 221939 - DNA, 15 bp, Homo sapiens
gataagaaagtgaat

SEQ ID NO: 221940 - DNA, 15 bp, Homo sapiens
agataagaaagtgaa

SEQ ID NO: 221941 - DNA, 15 bp, Homo sapiens
tagataagaaagtga

SEQ ID NO: 221942 - DNA, 15 bp, Homo sapiens
gtagataagaaagtg

SEQ ID NO: 221943 - DNA, 15 bp, Homo sapiens
agtagataagaaagt

SEQ ID NO: 221944 - DNA, 15 bp, Homo sapiens
cagtagataagaaag

SEQ ID NO: 221945 - DNA, 15 bp, Homo sapiens
gcagtagataagaaa

SEQ ID NO: 221946 - DNA, 15 bp, Homo sapiens
agcagtagataagaa

SEQ ID NO: 221947 - DNA, 15 bp, Homo sapiens
aagcagtagataaga

SEQ ID NO: 221948 - DNA, 15 bp, Homo sapiens
gaagcagtagataag

SEQ ID NO: 221949 - DNA, 15 bp, Homo sapiens
tgaagcagtagataa

SEQ ID NO: 221950 - DNA, 15 bp, Homo sapiens
gtgaagcagtagata

SEQ ID NO: 221951 - DNA, 15 bp, Homo sapiens
tgtgaagcagtagat

SEQ ID NO: 221952 - DNA, 15 bp, Homo sapiens
ttgtgaagcagtaga

SEQ ID NO: 221953 - DNA, 15 bp, Homo sapiens
tttgtgaagcagtag

SEQ ID NO: 221954 - DNA, 15 bp, Homo sapiens
ttttgtgaagcagta

SEQ ID NO: 221955 - DNA, 15 bp, Homo sapiens
gttttgtgaagcagt

SEQ ID NO: 221956 - DNA, 15 bp, Homo sapiens
ggttttgtgaagcag

SEQ ID NO: 221957 - DNA, 15 bp, Homo sapiens
tggttttgtgaagca

SEQ ID NO: 221958 - DNA, 15 bp, Homo sapiens
ttggttttgtgaagc

SEQ ID NO: 221959 - DNA, 15 bp, Homo sapiens
tttggttttgtgaag

SEQ ID NO: 221960 - DNA, 15 bp, Homo sapiens
ctttggttttgtgaa

SEQ ID NO: 221961 - DNA, 15 bp, Homo sapiens
cctttggttttgtga

SEQ ID NO: 221962 - DNA, 15 bp, Homo sapiens
ccctttggttttgtg

SEQ ID NO: 221963 - DNA, 15 bp, Homo sapiens
tccctttggttttgt

SEQ ID NO: 221964 - DNA, 15 bp, Homo sapiens
ttccctttggttttg

SEQ ID NO: 221965 - DNA, 15 bp, Homo sapiens
tttccctttggtttt

SEQ ID NO: 221966 - DNA, 15 bp, Homo sapiens
atttccctttggttt

SEQ ID NO: 221967 - DNA, 15 bp, Homo sapiens
tatttccctttggtt

SEQ ID NO: 221968 - DNA, 15 bp, Homo sapiens
ctatttccctttggt

SEQ ID NO: 221969 - DNA, 15 bp, Homo sapiens
cctatttccctttgg

SEQ ID NO: 221970 - DNA, 15 bp, Homo sapiens
acctatttccctttg

SEQ ID NO: 221971 - DNA, 15 bp, Homo sapiens
tacctatttcccttt

SEQ ID NO: 221972 - DNA, 15 bp, Homo sapiens
gtacctatttccctt

SEQ ID NO: 221973 - DNA, 15 bp, Homo sapiens
tgtacctatttccct

SEQ ID NO: 221974 - DNA, 15 bp, Homo sapiens
ttgtacctatttccc

SEQ ID NO: 221975 - DNA, 15 bp, Homo sapiens
tttgtacctatttcc

SEQ ID NO: 221976 - DNA, 15 bp, Homo sapiens
gtttgtacctatttc

SEQ ID NO: 221977 - DNA, 15 bp, Homo sapiens
agtttgtacctattt

SEQ ID NO: 221978 - DNA, 15 bp, Homo sapiens
cagtttgtacctatt

SEQ ID NO: 221979 - DNA, 15 bp, Homo sapiens
acagtttgtacctat

SEQ ID NO: 221980 - DNA, 15 bp, Homo sapiens
tacagtttgtaccta

SEQ ID NO: 221981 - DNA, 15 bp, Homo sapiens
atacagtttgtacct

SEQ ID NO: 221982 - DNA, 15 bp, Homo sapiens
gatacagtttgtacc

SEQ ID NO: 221983 - DNA, 15 bp, Homo sapiens
cgatacagtttgtac

SEQ ID NO: 221984 - DNA, 15 bp, Homo sapiens
tcgatacagtttgta

SEQ ID NO: 221985 - DNA, 15 bp, Homo sapiens
gtcgatacagtttgt

SEQ ID NO: 221986 - DNA, 15 bp, Homo sapiens
tgtcgatacagtttg

SEQ ID NO: 221987 - DNA, 15 bp, Homo sapiens
ttgtcgatacagttt

SEQ ID NO: 221988 - DNA, 15 bp, Homo sapiens
tttgtcgatacagtt

SEQ ID NO: 221989 - DNA, 15 bp, Homo sapiens
ttttgtcgatacagt

SEQ ID NO: 221990 - DNA, 15 bp, Homo sapiens
cttttgtcgatacag

SEQ ID NO: 221991 - DNA, 15 bp, Homo sapiens
tcttttgtcgataca

SEQ ID NO: 221992 - DNA, 15 bp, Homo sapiens
atcttttgtcgatac

SEQ ID NO: 221993 - DNA, 15 bp, Homo sapiens
gatcttttgtcgata

SEQ ID NO: 221994 - DNA, 15 bp, Homo sapiens
tgatcttttgtcgat

SEQ ID NO: 221995 - DNA, 15 bp, Homo sapiens
ctgatcttttgtcga

SEQ ID NO: 221996 - DNA, 15 bp, Homo sapiens
tctgatcttttgtcg

SEQ ID NO: 221997 - DNA, 15 bp, Homo sapiens
ttctgatcttttgtc

SEQ ID NO: 221998 - DNA, 15 bp, Homo sapiens
gttctgatcttttgt

SEQ ID NO: 221999 - DNA, 15 bp, Homo sapiens
agttctgatcttttg

SEQ ID NO: 222000 - DNA, 15 bp, Homo sapiens
cagttctgatctttt

SEQ ID NO: 222001 - DNA, 15 bp, Homo sapiens
tcagttctgatcttt

SEQ ID NO: 222002 - DNA, 15 bp, Homo sapiens
ttcagttctgatctt

SEQ ID NO: 222003 - DNA, 15 bp, Homo sapiens
attcagttctgatct

SEQ ID NO: 222004 - DNA, 15 bp, Homo sapiens
aattcagttctgatc

SEQ ID NO: 222005 - DNA, 15 bp, Homo sapiens
gaattcagttctgat

SEQ ID NO: 222006 - DNA, 15 bp, Homo sapiens
agaattcagttctga

SEQ ID NO: 222007 - DNA, 15 bp, Homo sapiens
gagaattcagttctg

SEQ ID NO: 222008 - DNA, 15 bp, Homo sapiens
tgagaattcagttct

SEQ ID NO: 222009 - DNA, 15 bp, Homo sapiens
ttgagaattcagttc

SEQ ID NO: 222010 - DNA, 15 bp, Homo sapiens
attgagaattcagtt

SEQ ID NO: 222011 - DNA, 15 bp, Homo sapiens
cattgagaattcagt

SEQ ID NO: 222012 - DNA, 15 bp, Homo sapiens
ccattgagaattcag

SEQ ID NO: 222013 - DNA, 15 bp, Homo sapiens
gccattgagaattca

SEQ ID NO: 222014 - DNA, 15 bp, Homo sapiens
tgccattgagaattc

SEQ ID NO: 222015 - DNA, 15 bp, Homo sapiens
ttgccattgagaatt

SEQ ID NO: 222016 - DNA, 15 bp, Homo sapiens
tttgccattgagaat

SEQ ID NO: 222017 - DNA, 15 bp, Homo sapiens
ctttgccattgagaa

SEQ ID NO: 222018 - DNA, 15 bp, Homo sapiens
cctttgccattgaga

SEQ ID NO: 222019 - DNA, 15 bp, Homo sapiens
gcctttgccattgag

SEQ ID NO: 222020 - DNA, 15 bp, Homo sapiens
tgcctttgccattga

SEQ ID NO: 222021 - DNA, 15 bp, Homo sapiens
ttgcctttgccattg

SEQ ID NO: 222022 - DNA, 15 bp, Homo sapiens
cttgcctttgccatt

SEQ ID NO: 222023 - DNA, 15 bp, Homo sapiens
acttgcctttgccat

SEQ ID NO: 222024 - DNA, 15 bp, Homo sapiens
cacttgcctttgcca

SEQ ID NO: 222025 - DNA, 15 bp, Homo sapiens
acacttgcctttgcc

SEQ ID NO: 222026 - DNA, 15 bp, Homo sapiens
tacacttgcctttgc

SEQ ID NO: 222027 - DNA, 15 bp, Homo sapiens
gtacacttgcctttg

SEQ ID NO: 222028 - DNA, 15 bp, Homo sapiens
tgtacacttgccttt

SEQ ID NO: 222029 - DNA, 15 bp, Homo sapiens
atgtacacttgcctt

SEQ ID NO: 222030 - DNA, 15 bp, Homo sapiens
aatgtacacttgcct

SEQ ID NO: 222031 - DNA, 15 bp, Homo sapiens
taatgtacacttgcc

SEQ ID NO: 222032 - DNA, 15 bp, Homo sapiens
ataatgtacacttgc

SEQ ID NO: 222033 - DNA, 15 bp, Homo sapiens
tataatgtacacttg

SEQ ID NO: 222034 - DNA, 15 bp, Homo sapiens
ttataatgtacactt

SEQ ID NO: 222035 - DNA, 15 bp, Homo sapiens
tttataatgtacact

SEQ ID NO: 222036 - DNA, 15 bp, Homo sapiens
atttataatgtacac

SEQ ID NO: 222037 - DNA, 15 bp, Homo sapiens
tatttataatgtaca

SEQ ID NO: 222038 - DNA, 15 bp, Homo sapiens
ctatttataatgtac

SEQ ID NO: 222039 - DNA, 15 bp, Homo sapiens
gctatttataatgta

SEQ ID NO: 222040 - DNA, 15 bp, Homo sapiens
tgctatttataatgt

SEQ ID NO: 222041 - DNA, 15 bp, Homo sapiens
ttgctatttataatg

SEQ ID NO: 222042 - DNA, 15 bp, Homo sapiens
tttgctatttataat

SEQ ID NO: 222043 - DNA, 15 bp, Homo sapiens
ttttgctatttataa

SEQ ID NO: 222044 - DNA, 15 bp, Homo sapiens
gttttgctatttata

SEQ ID NO: 222045 - DNA, 15 bp, Homo sapiens
tgttttgctatttat

SEQ ID NO: 222046 - DNA, 15 bp, Homo sapiens
ctgttttgctattta

SEQ ID NO: 222047 - DNA, 15 bp, Homo sapiens
gctgttttgctattt

SEQ ID NO: 222048 - DNA, 15 bp, Homo sapiens
agctgttttgctatt

SEQ ID NO: 222049 - DNA, 15 bp, Homo sapiens
cagctgttttgctat

SEQ ID NO: 222050 - DNA, 15 bp, Homo sapiens
ccagctgttttgcta

SEQ ID NO: 222051 - DNA, 15 bp, Homo sapiens
gccagctgttttgct

SEQ ID NO: 222052 - DNA, 15 bp, Homo sapiens
agccagctgttttgc

SEQ ID NO: 222053 - DNA, 15 bp, Homo sapiens
aagccagctgttttg

SEQ ID NO: 222054 - DNA, 15 bp, Homo sapiens
caagccagctgtttt

SEQ ID NO: 222055 - DNA, 15 bp, Homo sapiens
ccaagccagctgttt

SEQ ID NO: 222056 - DNA, 15 bp, Homo sapiens
tccaagccagctgtt

SEQ ID NO: 222057 - DNA, 15 bp, Homo sapiens
gtccaagccagctgt

SEQ ID NO: 222058 - DNA, 15 bp, Homo sapiens
ggtccaagccagctg

SEQ ID NO: 222059 - DNA, 15 bp, Homo sapiens
tggtccaagccagct

SEQ ID NO: 222060 - DNA, 15 bp, Homo sapiens
atggtccaagccagc

SEQ ID NO: 222061 - DNA, 15 bp, Homo sapiens
catggtccaagccag

SEQ ID NO: 222062 - DNA, 15 bp, Homo sapiens
acatggtccaagcca

SEQ ID NO: 222063 - DNA, 15 bp, Homo sapiens
aacatggtccaagcc

SEQ ID NO: 222064 - DNA, 15 bp, Homo sapiens
caacatggtccaagc

SEQ ID NO: 222065 - DNA, 15 bp, Homo sapiens
gcaacatggtccaag

SEQ ID NO: 222066 - DNA, 15 bp, Homo sapiens
ggcaacatggtccaa

SEQ ID NO: 222067 - DNA, 15 bp, Homo sapiens
cggcaacatggtcca

SEQ ID NO: 222068 - DNA, 15 bp, Homo sapiens
ccggcaacatggtcc

SEQ ID NO: 222069 - DNA, 15 bp, Homo sapiens
gccggcaacatggtc

SEQ ID NO: 222070 - DNA, 15 bp, Homo sapiens
ggccggcaacatggt

SEQ ID NO: 222071 - DNA, 15 bp, Homo sapiens
tggccggcaacatgg

SEQ ID NO: 222072 - DNA, 15 bp, Homo sapiens
ctggccggcaacatg

SEQ ID NO: 222073 - DNA, 15 bp, Homo sapiens
actggccggcaacat

SEQ ID NO: 222074 - DNA, 15 bp, Homo sapiens
gactggccggcaaca

SEQ ID NO: 222075 - DNA, 15 bp, Homo sapiens
tgactggccggcaac

SEQ ID NO: 222076 - DNA, 15 bp, Homo sapiens
gtgactggccggcaa

SEQ ID NO: 222077 - DNA, 15 bp, Homo sapiens
ggtgactggccggca

SEQ ID NO: 222078 - DNA, 15 bp, Homo sapiens
gggtgactggccggc

SEQ ID NO: 222079 - DNA, 15 bp, Homo sapiens
tgggtgactggccgg

SEQ ID NO: 222080 - DNA, 15 bp, Homo sapiens
ctgggtgactggccg

SEQ ID NO: 222081 - DNA, 15 bp, Homo sapiens
actgggtgactggcc

SEQ ID NO: 222082 - DNA, 15 bp, Homo sapiens
aactgggtgactggc

SEQ ID NO: 222083 - DNA, 15 bp, Homo sapiens
caactgggtgactgg

SEQ ID NO: 222084 - DNA, 15 bp, Homo sapiens
tcaactgggtgactg

SEQ ID NO: 222085 - DNA, 15 bp, Homo sapiens
ctcaactgggtgact

SEQ ID NO: 222086 - DNA, 15 bp, Homo sapiens
cctcaactgggtgac

SEQ ID NO: 222087 - DNA, 15 bp, Homo sapiens
ccctcaactgggtga

SEQ ID NO: 222088 - DNA, 15 bp, Homo sapiens
tccctcaactgggtg

SEQ ID NO: 222089 - DNA, 15 bp, Homo sapiens
atccctcaactgggt

SEQ ID NO: 222090 - DNA, 15 bp, Homo sapiens
aatccctcaactggg

SEQ ID NO: 222091 - DNA, 15 bp, Homo sapiens
aaatccctcaactgg

SEQ ID NO: 222092 - DNA, 15 bp, Homo sapiens
caaatccctcaactg

SEQ ID NO: 222093 - DNA, 15 bp, Homo sapiens
tcaaatccctcaact

SEQ ID NO: 222094 - DNA, 15 bp, Homo sapiens
ttcaaatccctcaac

SEQ ID NO: 222095 - DNA, 15 bp, Homo sapiens
attcaaatccctcaa

SEQ ID NO: 222096 - DNA, 15 bp, Homo sapiens
cattcaaatccctca

SEQ ID NO: 222097 - DNA, 15 bp, Homo sapiens
tcattcaaatccctc

SEQ ID NO: 222098 - DNA, 15 bp, Homo sapiens
gtcattcaaatccct

SEQ ID NO: 222099 - DNA, 15 bp, Homo sapiens
tgtcattcaaatccc

SEQ ID NO: 222100 - DNA, 15 bp, Homo sapiens
atgtcattcaaatcc

SEQ ID NO: 222101 - DNA, 15 bp, Homo sapiens
gatgtcattcaaatc

SEQ ID NO: 222102 - DNA, 15 bp, Homo sapiens
tgatgtcattcaaat

SEQ ID NO: 222103 - DNA, 15 bp, Homo sapiens
atgatgtcattcaaa

SEQ ID NO: 222104 - DNA, 15 bp, Homo sapiens
tatgatgtcattcaa

SEQ ID NO: 222105 - DNA, 15 bp, Homo sapiens
ttatgatgtcattca

SEQ ID NO: 222106 - DNA, 15 bp, Homo sapiens
gttatgatgtcattc

SEQ ID NO: 222107 - DNA, 15 bp, Homo sapiens
ggttatgatgtcatt

SEQ ID NO: 222108 - DNA, 15 bp, Homo sapiens
gggttatgatgtcat

SEQ ID NO: 222109 - DNA, 15 bp, Homo sapiens
agggttatgatgtca

SEQ ID NO: 222110 - DNA, 15 bp, Homo sapiens
gagggttatgatgtc

SEQ ID NO: 222111 - DNA, 15 bp, Homo sapiens
cgagggttatgatgt

SEQ ID NO: 222112 - DNA, 15 bp, Homo sapiens
tcgagggttatgatg

SEQ ID NO: 222113 - DNA, 15 bp, Homo sapiens
ctcgagggttatgat

SEQ ID NO: 222114 - DNA, 15 bp, Homo sapiens
tctcgagggttatga

SEQ ID NO: 222115 - DNA, 15 bp, Homo sapiens
ctctcgagggttatg

SEQ ID NO: 222116 - DNA, 15 bp, Homo sapiens
cctctcgagggttat

SEQ ID NO: 222117 - DNA, 15 bp, Homo sapiens
ccctctcgagggtta

SEQ ID NO: 222118 - DNA, 15 bp, Homo sapiens
accctctcgagggtt

SEQ ID NO: 222119 - DNA, 15 bp, Homo sapiens
taccctctcgagggt

SEQ ID NO: 222120 - DNA, 15 bp, Homo sapiens
ataccctctcgaggg

SEQ ID NO: 222121 - DNA, 15 bp, Homo sapiens
aataccctctcgagg

SEQ ID NO: 222122 - DNA, 15 bp, Homo sapiens
caataccctctcgag

SEQ ID NO: 222123 - DNA, 15 bp, Homo sapiens
gcaataccctctcga

SEQ ID NO: 222124 - DNA, 15 bp, Homo sapiens
agcaataccctctcg

SEQ ID NO: 222125 - DNA, 15 bp, Homo sapiens
tagcaataccctctc

SEQ ID NO: 222126 - DNA, 15 bp, Homo sapiens
ctagcaataccctct

SEQ ID NO: 222127 - DNA, 15 bp, Homo sapiens
gctagcaataccctc

SEQ ID NO: 222128 - DNA, 15 bp, Homo sapiens
ggctagcaataccct

SEQ ID NO: 222129 - DNA, 15 bp, Homo sapiens
tggctagcaataccc

SEQ ID NO: 222130 - DNA, 15 bp, Homo sapiens
ctggctagcaatacc

SEQ ID NO: 222131 - DNA, 15 bp, Homo sapiens
gctggctagcaatac

SEQ ID NO: 222132 - DNA, 15 bp, Homo sapiens
agctggctagcaata

SEQ ID NO: 222133 - DNA, 15 bp, Homo sapiens
cagctggctagcaat

SEQ ID NO: 222134 - DNA, 15 bp, Homo sapiens
ccagctggctagcaa

SEQ ID NO: 222135 - DNA, 15 bp, Homo sapiens
accagctggctagca

SEQ ID NO: 222136 - DNA, 15 bp, Homo sapiens
caccagctggctagc

SEQ ID NO: 222137 - DNA, 15 bp, Homo sapiens
acaccagctggctag

SEQ ID NO: 222138 - DNA, 15 bp, Homo sapiens
aacaccagctggcta

SEQ ID NO: 222139 - DNA, 15 bp, Homo sapiens
taacaccagctggct

SEQ ID NO: 222140 - DNA, 15 bp, Homo sapiens
ataacaccagctggc

SEQ ID NO: 222141 - DNA, 15 bp, Homo sapiens
aataacaccagctgg

SEQ ID NO: 222142 - DNA, 15 bp, Homo sapiens
aaataacaccagctg

SEQ ID NO: 222143 - DNA, 15 bp, Homo sapiens
taaataacaccagct

SEQ ID NO: 222144 - DNA, 15 bp, Homo sapiens
ctaaataacaccagc

SEQ ID NO: 222145 - DNA, 15 bp, Homo sapiens
tctaaataacaccag

SEQ ID NO: 222146 - DNA, 15 bp, Homo sapiens
ttctaaataacacca

SEQ ID NO: 222147 - DNA, 15 bp, Homo sapiens
attctaaataacacc

SEQ ID NO: 222148 - DNA, 15 bp, Homo sapiens
tattctaaataacac

SEQ ID NO: 222149 - DNA, 15 bp, Homo sapiens
gtattctaaataaca

SEQ ID NO: 222150 - DNA, 15 bp, Homo sapiens
tgtattctaaataac

SEQ ID NO: 222151 - DNA, 15 bp, Homo sapiens
gtgtattctaaataa

SEQ ID NO: 222152 - DNA, 15 bp, Homo sapiens
tgtgtattctaaata

SEQ ID NO: 222153 - DNA, 15 bp, Homo sapiens
ttgtgtattctaaat

SEQ ID NO: 222154 - DNA, 15 bp, Homo sapiens
tttgtgtattctaaa

SEQ ID NO: 222155 - DNA, 15 bp, Homo sapiens
ttttgtgtattctaa

SEQ ID NO: 222156 - DNA, 15 bp, Homo sapiens
tttttgtgtattcta

SEQ ID NO: 222157 - DNA, 15 bp, Homo sapiens
atttttgtgtattct

SEQ ID NO: 222158 - DNA, 15 bp, Homo sapiens
gatttttgtgtattc

SEQ ID NO: 222159 - DNA, 15 bp, Homo sapiens
tgatttttgtgtatt

SEQ ID NO: 222160 - DNA, 15 bp, Homo sapiens
ctgatttttgtgtat

SEQ ID NO: 222161 - DNA, 15 bp, Homo sapiens
tctgatttttgtgta

SEQ ID NO: 222162 - DNA, 15 bp, Homo sapiens
ctctgatttttgtgt

SEQ ID NO: 222163 - DNA, 15 bp, Homo sapiens
tctctgatttttgtg

SEQ ID NO: 222164 - DNA, 15 bp, Homo sapiens
ttctctgatttttgt

SEQ ID NO: 222165 - DNA, 15 bp, Homo sapiens
tttctctgatttttg

SEQ ID NO: 222166 - DNA, 15 bp, Homo sapiens
ctttctctgattttt

SEQ ID NO: 222167 - DNA, 15 bp, Homo sapiens
tctttctctgatttt

SEQ ID NO: 222168 - DNA, 15 bp, Homo sapiens
ttctttctctgattt

SEQ ID NO: 222169 - DNA, 15 bp, Homo sapiens
tttctttctctgatt

SEQ ID NO: 222170 - DNA, 15 bp, Homo sapiens
ttttctttctctgat

SEQ ID NO: 222171 - DNA, 15 bp, Homo sapiens
gttttctttctctga

SEQ ID NO: 222172 - DNA, 15 bp, Homo sapiens
tgttttctttctctg

SEQ ID NO: 222173 - DNA, 15 bp, Homo sapiens
gtgttttctttctct

SEQ ID NO: 222174 - DNA, 15 bp, Homo sapiens
tgtgttttctttctc

SEQ ID NO: 222175 - DNA, 15 bp, Homo sapiens
gtgtgttttctttct

SEQ ID NO: 222176 - DNA, 15 bp, Homo sapiens
agtgtgttttctttc

SEQ ID NO: 222177 - DNA, 15 bp, Homo sapiens
gagtgtgttttcttt

SEQ ID NO: 222178 - DNA, 15 bp, Homo sapiens
agagtgtgttttctt

SEQ ID NO: 222179 - DNA, 15 bp, Homo sapiens
cagagtgtgttttct

SEQ ID NO: 222180 - DNA, 15 bp, Homo sapiens
ccagagtgtgttttc

SEQ ID NO: 222181 - DNA, 15 bp, Homo sapiens
gccagagtgtgtttt

SEQ ID NO: 222182 - DNA, 15 bp, Homo sapiens
tgccagagtgtgttt

SEQ ID NO: 222183 - DNA, 15 bp, Homo sapiens
gtgccagagtgtgtt

SEQ ID NO: 222184 - DNA, 15 bp, Homo sapiens
tgtgccagagtgtgt

SEQ ID NO: 222185 - DNA, 15 bp, Homo sapiens
ctgctgctcctgcaa

SEQ ID NO: 222186 - DNA, 15 bp, Homo sapiens
cctgctgctcctgca

SEQ ID NO: 222187 - DNA, 15 bp, Homo sapiens
gcctgctgctcctgc

SEQ ID NO: 222188 - DNA, 15 bp, Homo sapiens
tgcctgctgctcctg

SEQ ID NO: 222189 - DNA, 15 bp, Homo sapiens
ctgcctgctgctcct

SEQ ID NO: 222190 - DNA, 15 bp, Homo sapiens
actgcctgctgctcc

SEQ ID NO: 222191 - DNA, 15 bp, Homo sapiens
tactgcctgctgctc

SEQ ID NO: 222192 - DNA, 15 bp, Homo sapiens
ttactgcctgctgct

SEQ ID NO: 222193 - DNA, 15 bp, Homo sapiens
cttactgcctgctgc

SEQ ID NO: 222194 - DNA, 15 bp, Homo sapiens
tcttactgcctgctg

SEQ ID NO: 222195 - DNA, 15 bp, Homo sapiens
ctcttactgcctgct

SEQ ID NO: 222196 - DNA, 15 bp, Homo sapiens
actcttactgcctgc

SEQ ID NO: 222197 - DNA, 15 bp, Homo sapiens
cactcttactgcctg

SEQ ID NO: 222198 - DNA, 15 bp, Homo sapiens
ccactcttactgcct

SEQ ID NO: 222199 - DNA, 15 bp, Homo sapiens
cccactcttactgcc

SEQ ID NO: 222200 - DNA, 15 bp, Homo sapiens
tcccactcttactgc

SEQ ID NO: 222201 - DNA, 15 bp, Homo sapiens
ctcccactcttactg

SEQ ID NO: 222202 - DNA, 15 bp, Homo sapiens
cctcccactcttact

SEQ ID NO: 222203 - DNA, 15 bp, Homo sapiens
tcctcccactcttac

SEQ ID NO: 222204 - DNA, 15 bp, Homo sapiens
gtcctcccactctta

SEQ ID NO: 222205 - DNA, 15 bp, Homo sapiens
ggtcctcccactctt

SEQ ID NO: 222206 - DNA, 15 bp, Homo sapiens
aggtcctcccactct

SEQ ID NO: 222207 - DNA, 15 bp, Homo sapiens
caggtcctcccactc

SEQ ID NO: 222208 - DNA, 15 bp, Homo sapiens
tcaggtcctcccact

SEQ ID NO: 222209 - DNA, 15 bp, Homo sapiens
ctcaggtcctcccac

SEQ ID NO: 222210 - DNA, 15 bp, Homo sapiens
tctcaggtcctccca

SEQ ID NO: 222211 - DNA, 15 bp, Homo sapiens
atctcaggtcctccc

SEQ ID NO: 222212 - DNA, 15 bp, Homo sapiens
gatctcaggtcctcc

SEQ ID NO: 222213 - DNA, 15 bp, Homo sapiens
agatctcaggtcctc

SEQ ID NO: 222214 - DNA, 15 bp, Homo sapiens
tagatctcaggtcct

SEQ ID NO: 222215 - DNA, 15 bp, Homo sapiens
atagatctcaggtcc

SEQ ID NO: 222216 - DNA, 15 bp, Homo sapiens
catagatctcaggtc

SEQ ID NO: 222217 - DNA, 15 bp, Homo sapiens
tcatagatctcaggt

SEQ ID NO: 222218 - DNA, 15 bp, Homo sapiens
atcatagatctcagg

SEQ ID NO: 222219 - DNA, 15 bp, Homo sapiens
tatcatagatctcag

SEQ ID NO: 222220 - DNA, 15 bp, Homo sapiens
ctatcatagatctca

SEQ ID NO: 222221 - DNA, 15 bp, Homo sapiens
actatcatagatctc

SEQ ID NO: 222222 - DNA, 15 bp, Homo sapiens
cactatcatagatct

SEQ ID NO: 222223 - DNA, 15 bp, Homo sapiens
tcactatcatagatc

SEQ ID NO: 222224 - DNA, 15 bp, Homo sapiens
ttcactatcatagat

SEQ ID NO: 222225 - DNA, 15 bp, Homo sapiens
tttcactatcataga

SEQ ID NO: 222226 - DNA, 15 bp, Homo sapiens
ctttcactatcatag

SEQ ID NO: 222227 - DNA, 15 bp, Homo sapiens
tctttcactatcata

SEQ ID NO: 222228 - DNA, 15 bp, Homo sapiens
gtctttcactatcat

SEQ ID NO: 222229 - DNA, 15 bp, Homo sapiens
tgtctttcactatca

SEQ ID NO: 222230 - DNA, 15 bp, Homo sapiens
atgtctttcactatc

SEQ ID NO: 222231 - DNA, 15 bp, Homo sapiens
catgtctttcactat

SEQ ID NO: 222232 - DNA, 15 bp, Homo sapiens
tcatgtctttcacta

SEQ ID NO: 222233 - DNA, 15 bp, Homo sapiens
atcatgtctttcact

SEQ ID NO: 222234 - DNA, 15 bp, Homo sapiens
catcatgtctttcac

SEQ ID NO: 222235 - DNA, 15 bp, Homo sapiens
gcatcatgtctttca

SEQ ID NO: 222236 - DNA, 15 bp, Homo sapiens
tgcatcatgtctttc

SEQ ID NO: 222237 - DNA, 15 bp, Homo sapiens
ttgcatcatgtcttt

SEQ ID NO: 222238 - DNA, 15 bp, Homo sapiens
attgcatcatgtctt

SEQ ID NO: 222239 - DNA, 15 bp, Homo sapiens
tattgcatcatgtct

SEQ ID NO: 222240 - DNA, 15 bp, Homo sapiens
atattgcatcatgtc

SEQ ID NO: 222241 - DNA, 15 bp, Homo sapiens
tatattgcatcatgt

SEQ ID NO: 222242 - DNA, 15 bp, Homo sapiens
atatattgcatcatg

SEQ ID NO: 222243 - DNA, 15 bp, Homo sapiens
aatatattgcatcat

SEQ ID NO: 222244 - DNA, 15 bp, Homo sapiens
caatatattgcatca

SEQ ID NO: 222245 - DNA, 15 bp, Homo sapiens
gcaatatattgcatc

SEQ ID NO: 222246 - DNA, 15 bp, Homo sapiens
ggcaatatattgcat

SEQ ID NO: 222247 - DNA, 15 bp, Homo sapiens
aggcaatatattgca

SEQ ID NO: 222248 - DNA, 15 bp, Homo sapiens
caggcaatatattgc

SEQ ID NO: 222249 - DNA, 15 bp, Homo sapiens
gcaggcaatatattg

SEQ ID NO: 222250 - DNA, 15 bp, Homo sapiens
ggcaggcaatatatt

SEQ ID NO: 222251 - DNA, 15 bp, Homo sapiens
aggcaggcaatatat

SEQ ID NO: 222252 - DNA, 15 bp, Homo sapiens
caggcaggcaatata

SEQ ID NO: 222253 - DNA, 15 bp, Homo sapiens
ccaggcaggcaatat

SEQ ID NO: 222254 - DNA, 15 bp, Homo sapiens
accaggcaggcaata

SEQ ID NO: 222255 - DNA, 15 bp, Homo sapiens
aaccaggcaggcaat

SEQ ID NO: 222256 - DNA, 15 bp, Homo sapiens
taaccaggcaggcaa

SEQ ID NO: 222257 - DNA, 15 bp, Homo sapiens
ttaaccaggcaggca

SEQ ID NO: 222258 - DNA, 15 bp, Homo sapiens
tttaaccaggcaggc

SEQ ID NO: 222259 - DNA, 15 bp, Homo sapiens
ctttaaccaggcagg

SEQ ID NO: 222260 - DNA, 15 bp, Homo sapiens
cctttaaccaggcag

SEQ ID NO: 222261 - DNA, 15 bp, Homo sapiens
tcctttaaccaggca

SEQ ID NO: 222262 - DNA, 15 bp, Homo sapiens
ctcctttaaccaggc

SEQ ID NO: 222263 - DNA, 15 bp, Homo sapiens
actcctttaaccagg

SEQ ID NO: 222264 - DNA, 15 bp, Homo sapiens
tactcctttaaccag

SEQ ID NO: 222265 - DNA, 15 bp, Homo sapiens
ctactcctttaacca

SEQ ID NO: 222266 - DNA, 15 bp, Homo sapiens
tctactcctttaacc

SEQ ID NO: 222267 - DNA, 15 bp, Homo sapiens
ttctactcctttaac

SEQ ID NO: 222268 - DNA, 15 bp, Homo sapiens
tttctactcctttaa

SEQ ID NO: 222269 - DNA, 15 bp, Homo sapiens
ctttctactccttta

SEQ ID NO: 222270 - DNA, 15 bp, Homo sapiens
cctttctactccttt

SEQ ID NO: 222271 - DNA, 15 bp, Homo sapiens
tcctttctactcctt

SEQ ID NO: 222272 - DNA, 15 bp, Homo sapiens
ctcctttctactcct

SEQ ID NO: 222273 - DNA, 15 bp, Homo sapiens
actcctttctactcc

SEQ ID NO: 222274 - DNA, 15 bp, Homo sapiens
gactcctttctactc

SEQ ID NO: 222275 - DNA, 15 bp, Homo sapiens
tgactcctttctact

SEQ ID NO: 222276 - DNA, 15 bp, Homo sapiens
ttgactcctttctac

SEQ ID NO: 222277 - DNA, 15 bp, Homo sapiens
tttgactcctttcta

SEQ ID NO: 222278 - DNA, 15 bp, Homo sapiens
ctttgactcctttct

SEQ ID NO: 222279 - DNA, 15 bp, Homo sapiens
tctttgactcctttc

SEQ ID NO: 222280 - DNA, 15 bp, Homo sapiens
atctttgactccttt

SEQ ID NO: 222281 - DNA, 15 bp, Homo sapiens
catctttgactcctt

SEQ ID NO: 222282 - DNA, 15 bp, Homo sapiens
tcatctttgactcct

SEQ ID NO: 222283 - DNA, 15 bp, Homo sapiens
gtcatctttgactcc

SEQ ID NO: 222284 - DNA, 15 bp, Homo sapiens
agtcatctttgactc

SEQ ID NO: 222285 - DNA, 15 bp, Homo sapiens
cagtcatctttgact

SEQ ID NO: 222286 - DNA, 15 bp, Homo sapiens
acagtcatctttgac

SEQ ID NO: 222287 - DNA, 15 bp, Homo sapiens
tacagtcatctttga

SEQ ID NO: 222288 - DNA, 15 bp, Homo sapiens
ttacagtcatctttg

SEQ ID NO: 222289 - DNA, 15 bp, Homo sapiens
gttacagtcatcttt

SEQ ID NO: 222290 - DNA, 15 bp, Homo sapiens
tgttacagtcatctt

SEQ ID NO: 222291 - DNA, 15 bp, Homo sapiens
atgttacagtcatct

SEQ ID NO: 222292 - DNA, 15 bp, Homo sapiens
aatgttacagtcatc

SEQ ID NO: 222293 - DNA, 15 bp, Homo sapiens
aaatgttacagtcat

SEQ ID NO: 222294 - DNA, 15 bp, Homo sapiens
aaaatgttacagtca

SEQ ID NO: 222295 - DNA, 15 bp, Homo sapiens
caaaatgttacagtc

SEQ ID NO: 222296 - DNA, 15 bp, Homo sapiens
tcaaaatgttacagt

SEQ ID NO: 222297 - DNA, 15 bp, Homo sapiens
ctcaaaatgttacag

SEQ ID NO: 222298 - DNA, 15 bp, Homo sapiens
actcaaaatgttaca

SEQ ID NO: 222299 - DNA, 15 bp, Homo sapiens
gactcaaaatgttac

SEQ ID NO: 222300 - DNA, 15 bp, Homo sapiens
agactcaaaatgtta

SEQ ID NO: 222301 - DNA, 15 bp, Homo sapiens
cagactcaaaatgtt

SEQ ID NO: 222302 - DNA, 15 bp, Homo sapiens
tcagactcaaaatgt

SEQ ID NO: 222303 - DNA, 15 bp, Homo sapiens
ctcagactcaaaatg

SEQ ID NO: 222304 - DNA, 15 bp, Homo sapiens
actcagactcaaaat

SEQ ID NO: 222305 - DNA, 15 bp, Homo sapiens
tactcagactcaaaa

SEQ ID NO: 222306 - DNA, 15 bp, Homo sapiens
ttactcagactcaaa

SEQ ID NO: 222307 - DNA, 15 bp, Homo sapiens
cttactcagactcaa

SEQ ID NO: 222308 - DNA, 15 bp, Homo sapiens
gcttactcagactca

SEQ ID NO: 222309 - DNA, 15 bp, Homo sapiens
tgcttactcagactc

SEQ ID NO: 222310 - DNA, 15 bp, Homo sapiens
ttgcttactcagact

SEQ ID NO: 222311 - DNA, 15 bp, Homo sapiens
cttgcttactcagac

SEQ ID NO: 222312 - DNA, 15 bp, Homo sapiens
tcttgcttactcaga

SEQ ID NO: 222313 - DNA, 15 bp, Homo sapiens
ttcttgcttactcag

SEQ ID NO: 222314 - DNA, 15 bp, Homo sapiens
cttcttgcttactca

SEQ ID NO: 222315 - DNA, 15 bp, Homo sapiens
tcttcttgcttactc

SEQ ID NO: 222316 - DNA, 15 bp, Homo sapiens
atcttcttgcttact

SEQ ID NO: 222317 - DNA, 15 bp, Homo sapiens
tatcttcttgcttac

SEQ ID NO: 222318 - DNA, 15 bp, Homo sapiens
ttatcttcttgctta

SEQ ID NO: 222319 - DNA, 15 bp, Homo sapiens
attatcttcttgctt

SEQ ID NO: 222320 - DNA, 15 bp, Homo sapiens
cattatcttcttgct

SEQ ID NO: 222321 - DNA, 15 bp, Homo sapiens
ccattatcttcttgc

SEQ ID NO: 222322 - DNA, 15 bp, Homo sapiens
accattatcttcttg

SEQ ID NO: 222323 - DNA, 15 bp, Homo sapiens
caccattatcttctt

SEQ ID NO: 222324 - DNA, 15 bp, Homo sapiens
gcaccattatcttct

SEQ ID NO: 222325 - DNA, 15 bp, Homo sapiens
tgcaccattatcttc

SEQ ID NO: 222326 - DNA, 15 bp, Homo sapiens
ctgcaccattatctt

SEQ ID NO: 222327 - DNA, 15 bp, Homo sapiens
tctgcaccattatct

SEQ ID NO: 222328 - DNA, 15 bp, Homo sapiens
atctgcaccattatc

SEQ ID NO: 222329 - DNA, 15 bp, Homo sapiens
tatctgcaccattat

SEQ ID NO: 222330 - DNA, 15 bp, Homo sapiens
gtatctgcaccatta

SEQ ID NO: 222331 - DNA, 15 bp, Homo sapiens
ggtatctgcaccatt

SEQ ID NO: 222332 - DNA, 15 bp, Homo sapiens
tggtatctgcaccat

SEQ ID NO: 222333 - DNA, 15 bp, Homo sapiens
ctggtatctgcacca

SEQ ID NO: 222334 - DNA, 15 bp, Homo sapiens
gctggtatctgcacc

SEQ ID NO: 222335 - DNA, 15 bp, Homo sapiens
tgctggtatctgcac

SEQ ID NO: 222336 - DNA, 15 bp, Homo sapiens
ttgctggtatctgca

SEQ ID NO: 222337 - DNA, 15 bp, Homo sapiens
cttgctggtatctgc

SEQ ID NO: 222338 - DNA, 15 bp, Homo sapiens
acttgctggtatctg

SEQ ID NO: 222339 - DNA, 15 bp, Homo sapiens
gacttgctggtatct

SEQ ID NO: 222340 - DNA, 15 bp, Homo sapiens
ggacttgctggtatc

SEQ ID NO: 222341 - DNA, 15 bp, Homo sapiens
tggacttgctggtat

SEQ ID NO: 222342 - DNA, 15 bp, Homo sapiens
ctggacttgctggta

SEQ ID NO: 222343 - DNA, 15 bp, Homo sapiens
tctggacttgctggt

SEQ ID NO: 222344 - DNA, 15 bp, Homo sapiens
ctctggacttgctgg

SEQ ID NO: 222345 - DNA, 15 bp, Homo sapiens
cctctggacttgctg

SEQ ID NO: 222346 - DNA, 15 bp, Homo sapiens
tcctctggacttgct

SEQ ID NO: 222347 - DNA, 15 bp, Homo sapiens
ctcctctggacttgc

SEQ ID NO: 222348 - DNA, 15 bp, Homo sapiens
cctcctctggacttg

SEQ ID NO: 222349 - DNA, 15 bp, Homo sapiens
tcctcctctggactt

SEQ ID NO: 222350 - DNA, 15 bp, Homo sapiens
atcctcctctggact

SEQ ID NO: 222351 - DNA, 15 bp, Homo sapiens
aatcctcctctggac

SEQ ID NO: 222352 - DNA, 15 bp, Homo sapiens
aaatcctcctctgga

SEQ ID NO: 222353 - DNA, 15 bp, Homo sapiens
caaatcctcctctgg

SEQ ID NO: 222354 - DNA, 15 bp, Homo sapiens
tcaaatcctcctctg

SEQ ID NO: 222355 - DNA, 15 bp, Homo sapiens
gtcaaatcctcctct

SEQ ID NO: 222356 - DNA, 15 bp, Homo sapiens
agtcaaatcctcctc

SEQ ID NO: 222357 - DNA, 15 bp, Homo sapiens
aagtcaaatcctcct

SEQ ID NO: 222358 - DNA, 15 bp, Homo sapiens
aaagtcaaatcctcc

SEQ ID NO: 222359 - DNA, 15 bp, Homo sapiens
caaagtcaaatcctc

SEQ ID NO: 222360 - DNA, 15 bp, Homo sapiens
acaaagtcaaatcct

SEQ ID NO: 222361 - DNA, 15 bp, Homo sapiens
aacaaagtcaaatcc

SEQ ID NO: 222362 - DNA, 15 bp, Homo sapiens
caacaaagtcaaatc

SEQ ID NO: 222363 - DNA, 15 bp, Homo sapiens
tcaacaaagtcaaat

SEQ ID NO: 222364 - DNA, 15 bp, Homo sapiens
gtcaacaaagtcaaa

SEQ ID NO: 222365 - DNA, 15 bp, Homo sapiens
agtcaacaaagtcaa

SEQ ID NO: 222366 - DNA, 15 bp, Homo sapiens
aagtcaacaaagtca

SEQ ID NO: 222367 - DNA, 15 bp, Homo sapiens
caagtcaacaaagtc

SEQ ID NO: 222368 - DNA, 15 bp, Homo sapiens
tcaagtcaacaaagt

SEQ ID NO: 222369 - DNA, 15 bp, Homo sapiens
gtcaagtcaacaaag

SEQ ID NO: 222370 - DNA, 15 bp, Homo sapiens
agtcaagtcaacaaa

SEQ ID NO: 222371 - DNA, 15 bp, Homo sapiens
aagtcaagtcaacaa

SEQ ID NO: 222372 - DNA, 15 bp, Homo sapiens
aaagtcaagtcaaca

SEQ ID NO: 222373 - DNA, 15 bp, Homo sapiens
caaagtcaagtcaac

SEQ ID NO: 222374 - DNA, 15 bp, Homo sapiens
ccaaagtcaagtcaa

SEQ ID NO: 222375 - DNA, 15 bp, Homo sapiens
accaaagtcaagtca

SEQ ID NO: 222376 - DNA, 15 bp, Homo sapiens
aaccaaagtcaagtc

SEQ ID NO: 222377 - DNA, 15 bp, Homo sapiens
caaccaaagtcaagt

SEQ ID NO: 222378 - DNA, 15 bp, Homo sapiens
tcaaccaaagtcaag

SEQ ID NO: 222379 - DNA, 15 bp, Homo sapiens
gtcaaccaaagtcaa

SEQ ID NO: 222380 - DNA, 15 bp, Homo sapiens
tgtcaaccaaagtca

SEQ ID NO: 222381 - DNA, 15 bp, Homo sapiens
atgtcaaccaaagtc

SEQ ID NO: 222382 - DNA, 15 bp, Homo sapiens
aatgtcaaccaaagt

SEQ ID NO: 222383 - DNA, 15 bp, Homo sapiens
caatgtcaaccaaag

SEQ ID NO: 222384 - DNA, 15 bp, Homo sapiens
tcaatgtcaaccaaa

SEQ ID NO: 222385 - DNA, 15 bp, Homo sapiens
gtcaatgtcaaccaa

SEQ ID NO: 222386 - DNA, 15 bp, Homo sapiens
agtcaatgtcaacca

SEQ ID NO: 222387 - DNA, 15 bp, Homo sapiens
aagtcaatgtcaacc

SEQ ID NO: 222388 - DNA, 15 bp, Homo sapiens
aaagtcaatgtcaac

SEQ ID NO: 222389 - DNA, 15 bp, Homo sapiens
caaagtcaatgtcaa

SEQ ID NO: 222390 - DNA, 15 bp, Homo sapiens
ccaaagtcaatgtca

SEQ ID NO: 222391 - DNA, 15 bp, Homo sapiens
accaaagtcaatgtc

SEQ ID NO: 222392 - DNA, 15 bp, Homo sapiens
gaccaaagtcaatgt

SEQ ID NO: 222393 - DNA, 15 bp, Homo sapiens
tgaccaaagtcaatg

SEQ ID NO: 222394 - DNA, 15 bp, Homo sapiens
ttgaccaaagtcaat

SEQ ID NO: 222395 - DNA, 15 bp, Homo sapiens
attgaccaaagtcaa

SEQ ID NO: 222396 - DNA, 15 bp, Homo sapiens
cattgaccaaagtca

SEQ ID NO: 222397 - DNA, 15 bp, Homo sapiens
ccattgaccaaagtc

SEQ ID NO: 222398 - DNA, 15 bp, Homo sapiens
gccattgaccaaagt

SEQ ID NO: 222399 - DNA, 15 bp, Homo sapiens
tgccattgaccaaag

SEQ ID NO: 222400 - DNA, 15 bp, Homo sapiens
ttgccattgaccaaa

SEQ ID NO: 222401 - DNA, 15 bp, Homo sapiens
tttgccattgaccaa

SEQ ID NO: 222402 - DNA, 15 bp, Homo sapiens
ctttgccattgacca

SEQ ID NO: 222403 - DNA, 15 bp, Homo sapiens
tctttgccattgacc

SEQ ID NO: 222404 - DNA, 15 bp, Homo sapiens
atctttgccattgac

SEQ ID NO: 222405 - DNA, 15 bp, Homo sapiens
aatctttgccattga

SEQ ID NO: 222406 - DNA, 15 bp, Homo sapiens
caatctttgccattg

SEQ ID NO: 222407 - DNA, 15 bp, Homo sapiens
tcaatctttgccatt

SEQ ID NO: 222408 - DNA, 15 bp, Homo sapiens
gtcaatctttgccat

SEQ ID NO: 222409 - DNA, 15 bp, Homo sapiens
agtcaatctttgcca

SEQ ID NO: 222410 - DNA, 15 bp, Homo sapiens
aagtcaatctttgcc

SEQ ID NO: 222411 - DNA, 15 bp, Homo sapiens
aaagtcaatctttgc

SEQ ID NO: 222412 - DNA, 15 bp, Homo sapiens
caaagtcaatctttg

SEQ ID NO: 222413 - DNA, 15 bp, Homo sapiens
ccaaagtcaatcttt

SEQ ID NO: 222414 - DNA, 15 bp, Homo sapiens
accaaagtcaatctt

SEQ ID NO: 222415 - DNA, 15 bp, Homo sapiens
aaccaaagtcaatct

SEQ ID NO: 222416 - DNA, 15 bp, Homo sapiens
aaaccaaagtcaatc

SEQ ID NO: 222417 - DNA, 15 bp, Homo sapiens
gaaaccaaagtcaat

SEQ ID NO: 222418 - DNA, 15 bp, Homo sapiens
tgaaaccaaagtcaa

SEQ ID NO: 222419 - DNA, 15 bp, Homo sapiens
ctgaaaccaaagtca

SEQ ID NO: 222420 - DNA, 15 bp, Homo sapiens
tctgaaaccaaagtc

SEQ ID NO: 222421 - DNA, 15 bp, Homo sapiens
ctctgaaaccaaagt

SEQ ID NO: 222422 - DNA, 15 bp, Homo sapiens
tctctgaaaccaaag

SEQ ID NO: 222423 - DNA, 15 bp, Homo sapiens
gtctctgaaaccaaa

SEQ ID NO: 222424 - DNA, 15 bp, Homo sapiens
tgtctctgaaaccaa

SEQ ID NO: 222425 - DNA, 15 bp, Homo sapiens
gtgtctctgaaacca

SEQ ID NO: 222426 - DNA, 15 bp, Homo sapiens
agtgtctctgaaacc

SEQ ID NO: 222427 - DNA, 15 bp, Homo sapiens
cagtgtctctgaaac

SEQ ID NO: 222428 - DNA, 15 bp, Homo sapiens
tcagtgtctctgaaa

SEQ ID NO: 222429 - DNA, 15 bp, Homo sapiens
atcagtgtctctgaa

SEQ ID NO: 222430 - DNA, 15 bp, Homo sapiens
catcagtgtctctga

SEQ ID NO: 222431 - DNA, 15 bp, Homo sapiens
acatcagtgtctctg

SEQ ID NO: 222432 - DNA, 15 bp, Homo sapiens
tacatcagtgtctct

SEQ ID NO: 222433 - DNA, 15 bp, Homo sapiens
atacatcagtgtctc

SEQ ID NO: 222434 - DNA, 15 bp, Homo sapiens
tatacatcagtgtct

SEQ ID NO: 222435 - DNA, 15 bp, Homo sapiens
ttatacatcagtgtc

SEQ ID NO: 222436 - DNA, 15 bp, Homo sapiens
attatacatcagtgt

SEQ ID NO: 222437 - DNA, 15 bp, Homo sapiens
tattatacatcagtg

SEQ ID NO: 222438 - DNA, 15 bp, Homo sapiens
ctattatacatcagt

SEQ ID NO: 222439 - DNA, 15 bp, Homo sapiens
tctattatacatcag

SEQ ID NO: 222440 - DNA, 15 bp, Homo sapiens
ctctattatacatca

SEQ ID NO: 222441 - DNA, 15 bp, Homo sapiens
gctctattatacatc

SEQ ID NO: 222442 - DNA, 15 bp, Homo sapiens
agctctattatacat

SEQ ID NO: 222443 - DNA, 15 bp, Homo sapiens
aagctctattataca

SEQ ID NO: 222444 - DNA, 15 bp, Homo sapiens
aaagctctattatac

SEQ ID NO: 222445 - DNA, 15 bp, Homo sapiens
aaaagctctattata

SEQ ID NO: 222446 - DNA, 15 bp, Homo sapiens
taaaagctctattat

SEQ ID NO: 222447 - DNA, 15 bp, Homo sapiens
ctaaaagctctatta

SEQ ID NO: 222448 - DNA, 15 bp, Homo sapiens
tctaaaagctctatt

SEQ ID NO: 222449 - DNA, 15 bp, Homo sapiens
ttctaaaagctctat

SEQ ID NO: 222450 - DNA, 15 bp, Homo sapiens
tttctaaaagctcta

SEQ ID NO: 222451 - DNA, 15 bp, Homo sapiens
ttttctaaaagctct

SEQ ID NO: 222452 - DNA, 15 bp, Homo sapiens
attttctaaaagctc

SEQ ID NO: 222453 - DNA, 15 bp, Homo sapiens
tattttctaaaagct

SEQ ID NO: 222454 - DNA, 15 bp, Homo sapiens
ttattttctaaaagc

SEQ ID NO: 222455 - DNA, 15 bp, Homo sapiens
attattttctaaaag

SEQ ID NO: 222456 - DNA, 15 bp, Homo sapiens
aattattttctaaaa

SEQ ID NO: 222457 - DNA, 15 bp, Homo sapiens
gaattattttctaaa

SEQ ID NO: 222458 - DNA, 15 bp, Homo sapiens
ggaattattttctaa

SEQ ID NO: 222459 - DNA, 15 bp, Homo sapiens
gggaattattttcta

SEQ ID NO: 222460 - DNA, 15 bp, Homo sapiens
tgggaattattttct

SEQ ID NO: 222461 - DNA, 15 bp, Homo sapiens
atgggaattattttc

SEQ ID NO: 222462 - DNA, 15 bp, Homo sapiens
catgggaattatttt

SEQ ID NO: 222463 - DNA, 15 bp, Homo sapiens
tcatgggaattattt

SEQ ID NO: 222464 - DNA, 15 bp, Homo sapiens
ctcatgggaattatt

SEQ ID NO: 222465 - DNA, 15 bp, Homo sapiens
actcatgggaattat

SEQ ID NO: 222466 - DNA, 15 bp, Homo sapiens
gactcatgggaatta

SEQ ID NO: 222467 - DNA, 15 bp, Homo sapiens
tgactcatgggaatt

SEQ ID NO: 222468 - DNA, 15 bp, Homo sapiens
gtgactcatgggaat

SEQ ID NO: 222469 - DNA, 15 bp, Homo sapiens
agtgactcatgggaa

SEQ ID NO: 222470 - DNA, 15 bp, Homo sapiens
tagtgactcatggga

SEQ ID NO: 222471 - DNA, 15 bp, Homo sapiens
ctagtgactcatggg

SEQ ID NO: 222472 - DNA, 15 bp, Homo sapiens
cctagtgactcatgg

SEQ ID NO: 222473 - DNA, 15 bp, Homo sapiens
ccctagtgactcatg

SEQ ID NO: 222474 - DNA, 15 bp, Homo sapiens
accctagtgactcat

SEQ ID NO: 222475 - DNA, 15 bp, Homo sapiens
caccctagtgactca

SEQ ID NO: 222476 - DNA, 15 bp, Homo sapiens
gcaccctagtgactc

SEQ ID NO: 222477 - DNA, 15 bp, Homo sapiens
ggcaccctagtgact

SEQ ID NO: 222478 - DNA, 15 bp, Homo sapiens
aggcaccctagtgac

SEQ ID NO: 222479 - DNA, 15 bp, Homo sapiens
caggcaccctagtga

SEQ ID NO: 222480 - DNA, 15 bp, Homo sapiens
acaggcaccctagtg

SEQ ID NO: 222481 - DNA, 15 bp, Homo sapiens
gacaggcaccctagt

SEQ ID NO: 222482 - DNA, 15 bp, Homo sapiens
ggacaggcaccctag

SEQ ID NO: 222483 - DNA, 15 bp, Homo sapiens
tggacaggcacccta

SEQ ID NO: 222484 - DNA, 15 bp, Homo sapiens
ttggacaggcaccct

SEQ ID NO: 222485 - DNA, 15 bp, Homo sapiens
tttggacaggcaccc

SEQ ID NO: 222486 - DNA, 15 bp, Homo sapiens
ctttggacaggcacc

SEQ ID NO: 222487 - DNA, 15 bp, Homo sapiens
actttggacaggcac

SEQ ID NO: 222488 - DNA, 15 bp, Homo sapiens
cactttggacaggca

SEQ ID NO: 222489 - DNA, 15 bp, Homo sapiens
gcactttggacaggc

SEQ ID NO: 222490 - DNA, 15 bp, Homo sapiens
tgcactttggacagg

SEQ ID NO: 222491 - DNA, 15 bp, Homo sapiens
ctgcactttggacag

SEQ ID NO: 222492 - DNA, 15 bp, Homo sapiens
actgcactttggaca

SEQ ID NO: 222493 - DNA, 15 bp, Homo sapiens
cactgcactttggac

SEQ ID NO: 222494 - DNA, 15 bp, Homo sapiens
tcactgcactttgga

SEQ ID NO: 222495 - DNA, 15 bp, Homo sapiens
ttcactgcactttgg

SEQ ID NO: 222496 - DNA, 15 bp, Homo sapiens
cttcactgcactttg

SEQ ID NO: 222497 - DNA, 15 bp, Homo sapiens
ccttcactgcacttt

SEQ ID NO: 222498 - DNA, 15 bp, Homo sapiens
cccttcactgcactt

SEQ ID NO: 222499 - DNA, 15 bp, Homo sapiens
tcccttcactgcact

SEQ ID NO: 222500 - DNA, 15 bp, Homo sapiens
gtcccttcactgcac

SEQ ID NO: 222501 - DNA, 15 bp, Homo sapiens
agtcccttcactgca

SEQ ID NO: 222502 - DNA, 15 bp, Homo sapiens
cagtcccttcactgc

SEQ ID NO: 222503 - DNA, 15 bp, Homo sapiens
gcagtcccttcactg

SEQ ID NO: 222504 - DNA, 15 bp, Homo sapiens
tgcagtcccttcact

SEQ ID NO: 222505 - DNA, 15 bp, Homo sapiens
atgcagtcccttcac

SEQ ID NO: 222506 - DNA, 15 bp, Homo sapiens
tatgcagtcccttca

SEQ ID NO: 222507 - DNA, 15 bp, Homo sapiens
ctatgcagtcccttc

SEQ ID NO: 222508 - DNA, 15 bp, Homo sapiens
tctatgcagtccctt

SEQ ID NO: 222509 - DNA, 15 bp, Homo sapiens
ttctatgcagtccct

SEQ ID NO: 222510 - DNA, 15 bp, Homo sapiens
cttctatgcagtccc

SEQ ID NO: 222511 - DNA, 15 bp, Homo sapiens
tcttctatgcagtcc

SEQ ID NO: 222512 - DNA, 15 bp, Homo sapiens
ttcttctatgcagtc

SEQ ID NO: 222513 - DNA, 15 bp, Homo sapiens
cttcttctatgcagt

SEQ ID NO: 222514 - DNA, 15 bp, Homo sapiens
tcttcttctatgcag

SEQ ID NO: 222515 - DNA, 15 bp, Homo sapiens
ctcttcttctatgca

SEQ ID NO: 222516 - DNA, 15 bp, Homo sapiens
cctcttcttctatgc

SEQ ID NO: 222517 - DNA, 15 bp, Homo sapiens
gcctcttcttctatg

SEQ ID NO: 222518 - DNA, 15 bp, Homo sapiens
agcctcttcttctat

SEQ ID NO: 222519 - DNA, 15 bp, Homo sapiens
aagcctcttcttcta

SEQ ID NO: 222520 - DNA, 15 bp, Homo sapiens
caagcctcttcttct

SEQ ID NO: 222521 - DNA, 15 bp, Homo sapiens
ccaagcctcttcttc

SEQ ID NO: 222522 - DNA, 15 bp, Homo sapiens
tccaagcctcttctt

SEQ ID NO: 222523 - DNA, 15 bp, Homo sapiens
ctccaagcctcttct

SEQ ID NO: 222524 - DNA, 15 bp, Homo sapiens
tctccaagcctcttc

SEQ ID NO: 222525 - DNA, 15 bp, Homo sapiens
atctccaagcctctt

SEQ ID NO: 222526 - DNA, 15 bp, Homo sapiens
aatctccaagcctct

SEQ ID NO: 222527 - DNA, 15 bp, Homo sapiens
aaatctccaagcctc

SEQ ID NO: 222528 - DNA, 15 bp, Homo sapiens
gaaatctccaagcct

SEQ ID NO: 222529 - DNA, 15 bp, Homo sapiens
ggaaatctccaagcc

SEQ ID NO: 222530 - DNA, 15 bp, Homo sapiens
aggaaatctccaagc

SEQ ID NO: 222531 - DNA, 15 bp, Homo sapiens
aaggaaatctccaag

SEQ ID NO: 222532 - DNA, 15 bp, Homo sapiens
caaggaaatctccaa

SEQ ID NO: 222533 - DNA, 15 bp, Homo sapiens
acaaggaaatctcca

SEQ ID NO: 222534 - DNA, 15 bp, Homo sapiens
tacaaggaaatctcc

SEQ ID NO: 222535 - DNA, 15 bp, Homo sapiens
gtacaaggaaatctc

SEQ ID NO: 222536 - DNA, 15 bp, Homo sapiens
tgtacaaggaaatct

SEQ ID NO: 222537 - DNA, 15 bp, Homo sapiens
ctgtacaaggaaatc

SEQ ID NO: 222538 - DNA, 15 bp, Homo sapiens
cctgtacaaggaaat

SEQ ID NO: 222539 - DNA, 15 bp, Homo sapiens
ccctgtacaaggaaa

SEQ ID NO: 222540 - DNA, 15 bp, Homo sapiens
cccctgtacaaggaa

SEQ ID NO: 222541 - DNA, 15 bp, Homo sapiens
tcccctgtacaagga

SEQ ID NO: 222542 - DNA, 15 bp, Homo sapiens
atcccctgtacaagg

SEQ ID NO: 222543 - DNA, 15 bp, Homo sapiens
tatcccctgtacaag

SEQ ID NO: 222544 - DNA, 15 bp, Homo sapiens
ctatcccctgtacaa

SEQ ID NO: 222545 - DNA, 15 bp, Homo sapiens
gctatcccctgtaca

SEQ ID NO: 222546 - DNA, 15 bp, Homo sapiens
agctatcccctgtac

SEQ ID NO: 222547 - DNA, 15 bp, Homo sapiens
cagctatcccctgta

SEQ ID NO: 222548 - DNA, 15 bp, Homo sapiens
tcagctatcccctgt

SEQ ID NO: 222549 - DNA, 15 bp, Homo sapiens
ttcagctatcccctg

SEQ ID NO: 222550 - DNA, 15 bp, Homo sapiens
cttcagctatcccct

SEQ ID NO: 222551 - DNA, 15 bp, Homo sapiens
gcttcagctatcccc

SEQ ID NO: 222552 - DNA, 15 bp, Homo sapiens
tgcttcagctatccc

SEQ ID NO: 222553 - DNA, 15 bp, Homo sapiens
atgcttcagctatcc

SEQ ID NO: 222554 - DNA, 15 bp, Homo sapiens
tatgcttcagctatc

SEQ ID NO: 222555 - DNA, 15 bp, Homo sapiens
atatgcttcagctat

SEQ ID NO: 222556 - DNA, 15 bp, Homo sapiens
aatatgcttcagcta

SEQ ID NO: 222557 - DNA, 15 bp, Homo sapiens
gaatatgcttcagct

SEQ ID NO: 222558 - DNA, 15 bp, Homo sapiens
ggaatatgcttcagc

SEQ ID NO: 222559 - DNA, 15 bp, Homo sapiens
gggaatatgcttcag

SEQ ID NO: 222560 - DNA, 15 bp, Homo sapiens
ggggaatatgcttca

SEQ ID NO: 222561 - DNA, 15 bp, Homo sapiens
tggggaatatgcttc

SEQ ID NO: 222562 - DNA, 15 bp, Homo sapiens
ttggggaatatgctt

SEQ ID NO: 222563 - DNA, 15 bp, Homo sapiens
gttggggaatatgct

SEQ ID NO: 222564 - DNA, 15 bp, Homo sapiens
tgttggggaatatgc

SEQ ID NO: 222565 - DNA, 15 bp, Homo sapiens
gtgttggggaatatg

SEQ ID NO: 222566 - DNA, 15 bp, Homo sapiens
tgtgttggggaatat

SEQ ID NO: 222567 - DNA, 15 bp, Homo sapiens
ttgtgttggggaata

SEQ ID NO: 222568 - DNA, 15 bp, Homo sapiens
attgtgttggggaat

SEQ ID NO: 222569 - DNA, 15 bp, Homo sapiens
tattgtgttggggaa

SEQ ID NO: 222570 - DNA, 15 bp, Homo sapiens
atattgtgttgggga

SEQ ID NO: 222571 - DNA, 15 bp, Homo sapiens
aatattgtgttgggg

SEQ ID NO: 222572 - DNA, 15 bp, Homo sapiens
taatattgtgttggg

SEQ ID NO: 222573 - DNA, 15 bp, Homo sapiens
ttaatattgtgttgg

SEQ ID NO: 222574 - DNA, 15 bp, Homo sapiens
tttaatattgtgttg

SEQ ID NO: 222575 - DNA, 15 bp, Homo sapiens
atttaatattgtgtt

SEQ ID NO: 222576 - DNA, 15 bp, Homo sapiens
aatttaatattgtgt

SEQ ID NO: 222577 - DNA, 15 bp, Homo sapiens
aaatttaatattgtg

SEQ ID NO: 222578 - DNA, 15 bp, Homo sapiens
caaatttaatattgt

SEQ ID NO: 222579 - DNA, 15 bp, Homo sapiens
acaaatttaatattg

SEQ ID NO: 222580 - DNA, 15 bp, Homo sapiens
tacaaatttaatatt

SEQ ID NO: 222581 - DNA, 15 bp, Homo sapiens
ttacaaatttaatat

SEQ ID NO: 222582 - DNA, 15 bp, Homo sapiens
tttacaaatttaata

SEQ ID NO: 222583 - DNA, 15 bp, Homo sapiens
atttacaaatttaat

SEQ ID NO: 222584 - DNA, 15 bp, Homo sapiens
aatttacaaatttaa

SEQ ID NO: 222585 - DNA, 15 bp, Homo sapiens
taatttacaaattta

SEQ ID NO: 222586 - DNA, 15 bp, Homo sapiens
gtaatttacaaattt

SEQ ID NO: 222587 - DNA, 15 bp, Homo sapiens
ggtaatttacaaatt

SEQ ID NO: 222588 - DNA, 15 bp, Homo sapiens
aggtaatttacaaat

SEQ ID NO: 222589 - DNA, 15 bp, Homo sapiens
aaggtaatttacaaa

SEQ ID NO: 222590 - DNA, 15 bp, Homo sapiens
aaaggtaatttacaa

SEQ ID NO: 222591 - DNA, 15 bp, Homo sapiens
taaaggtaatttaca

SEQ ID NO: 222592 - DNA, 15 bp, Homo sapiens
ttaaaggtaatttac

SEQ ID NO: 222593 - DNA, 15 bp, Homo sapiens
tttaaaggtaattta

SEQ ID NO: 222594 - DNA, 15 bp, Homo sapiens
ttttaaaggtaattt

SEQ ID NO: 222595 - DNA, 15 bp, Homo sapiens
tttttaaaggtaatt

SEQ ID NO: 222596 - DNA, 15 bp, Homo sapiens
atttttaaaggtaat

SEQ ID NO: 222597 - DNA, 15 bp, Homo sapiens
tatttttaaaggtaa

SEQ ID NO: 222598 - DNA, 15 bp, Homo sapiens
ctatttttaaaggta

SEQ ID NO: 222599 - DNA, 15 bp, Homo sapiens
tctatttttaaaggt

SEQ ID NO: 222600 - DNA, 15 bp, Homo sapiens
ttctatttttaaagg

SEQ ID NO: 222601 - DNA, 15 bp, Homo sapiens
tttctatttttaaag

SEQ ID NO: 222602 - DNA, 15 bp, Homo sapiens
ctttctatttttaaa

SEQ ID NO: 222603 - DNA, 15 bp, Homo sapiens
tctttctatttttaa

SEQ ID NO: 222604 - DNA, 15 bp, Homo sapiens
ttctttctattttta

SEQ ID NO: 222605 - DNA, 15 bp, Homo sapiens
tttctttctattttt

SEQ ID NO: 222606 - DNA, 15 bp, Homo sapiens
ttttctttctatttt

SEQ ID NO: 222607 - DNA, 15 bp, Homo sapiens
attttctttctattt

SEQ ID NO: 222608 - DNA, 15 bp, Homo sapiens
aattttctttctatt

SEQ ID NO: 222609 - DNA, 15 bp, Homo sapiens
caattttctttctat

SEQ ID NO: 222610 - DNA, 15 bp, Homo sapiens
gcaattttctttcta

SEQ ID NO: 222611 - DNA, 15 bp, Homo sapiens
ggcaattttctttct

SEQ ID NO: 222612 - DNA, 15 bp, Homo sapiens
tggcaattttctttc

SEQ ID NO: 222613 - DNA, 15 bp, Homo sapiens
atggcaattttcttt

SEQ ID NO: 222614 - DNA, 15 bp, Homo sapiens
aatggcaattttctt

SEQ ID NO: 222615 - DNA, 15 bp, Homo sapiens
aaatggcaattttct

SEQ ID NO: 222616 - DNA, 15 bp, Homo sapiens
aaaatggcaattttc

SEQ ID NO: 222617 - DNA, 15 bp, Homo sapiens
taaaatggcaatttt

SEQ ID NO: 222618 - DNA, 15 bp, Homo sapiens
ctaaaatggcaattt

SEQ ID NO: 222619 - DNA, 15 bp, Homo sapiens
tctaaaatggcaatt

SEQ ID NO: 222620 - DNA, 15 bp, Homo sapiens
ctctaaaatggcaat

SEQ ID NO: 222621 - DNA, 15 bp, Homo sapiens
actctaaaatggcaa

SEQ ID NO: 222622 - DNA, 15 bp, Homo sapiens
gactctaaaatggca

SEQ ID NO: 222623 - DNA, 15 bp, Homo sapiens
agactctaaaatggc

SEQ ID NO: 222624 - DNA, 15 bp, Homo sapiens
gagactctaaaatgg

SEQ ID NO: 222625 - DNA, 15 bp, Homo sapiens
tgagactctaaaatg

SEQ ID NO: 222626 - DNA, 15 bp, Homo sapiens
ttgagactctaaaat

SEQ ID NO: 222627 - DNA, 15 bp, Homo sapiens
tttgagactctaaaa

SEQ ID NO: 222628 - DNA, 15 bp, Homo sapiens
ttttgagactctaaa

SEQ ID NO: 222629 - DNA, 15 bp, Homo sapiens
cttttgagactctaa

SEQ ID NO: 222630 - DNA, 15 bp, Homo sapiens
ccttttgagactcta

SEQ ID NO: 222631 - DNA, 15 bp, Homo sapiens
tccttttgagactct

SEQ ID NO: 222632 - DNA, 15 bp, Homo sapiens
gtccttttgagactc

SEQ ID NO: 222633 - DNA, 15 bp, Homo sapiens
agtccttttgagact

SEQ ID NO: 222634 - DNA, 15 bp, Homo sapiens
cagtccttttgagac

SEQ ID NO: 222635 - DNA, 15 bp, Homo sapiens
tcagtccttttgaga

SEQ ID NO: 222636 - DNA, 15 bp, Homo sapiens
ctcagtccttttgag

SEQ ID NO: 222637 - DNA, 15 bp, Homo sapiens
gctcagtccttttga

SEQ ID NO: 222638 - DNA, 15 bp, Homo sapiens
tgctcagtccttttg

SEQ ID NO: 222639 - DNA, 15 bp, Homo sapiens
gtgctcagtcctttt

SEQ ID NO: 222640 - DNA, 15 bp, Homo sapiens
ggtgctcagtccttt

SEQ ID NO: 222641 - DNA, 15 bp, Homo sapiens
tggtgctcagtcctt

SEQ ID NO: 222642 - DNA, 15 bp, Homo sapiens
atggtgctcagtcct

SEQ ID NO: 222643 - DNA, 15 bp, Homo sapiens
gatggtgctcagtcc

SEQ ID NO: 222644 - DNA, 15 bp, Homo sapiens
agatggtgctcagtc

SEQ ID NO: 222645 - DNA, 15 bp, Homo sapiens
tagatggtgctcagt

SEQ ID NO: 222646 - DNA, 15 bp, Homo sapiens
ttagatggtgctcag

SEQ ID NO: 222647 - DNA, 15 bp, Homo sapiens
attagatggtgctca

SEQ ID NO: 222648 - DNA, 15 bp, Homo sapiens
aattagatggtgctc

SEQ ID NO: 222649 - DNA, 15 bp, Homo sapiens
taattagatggtgct

SEQ ID NO: 222650 - DNA, 15 bp, Homo sapiens
gtaattagatggtgc

SEQ ID NO: 222651 - DNA, 15 bp, Homo sapiens
tgtaattagatggtg

SEQ ID NO: 222652 - DNA, 15 bp, Homo sapiens
atgtaattagatggt

SEQ ID NO: 222653 - DNA, 15 bp, Homo sapiens
gatgtaattagatgg

SEQ ID NO: 222654 - DNA, 15 bp, Homo sapiens
tgatgtaattagatg

SEQ ID NO: 222655 - DNA, 15 bp, Homo sapiens
gtgatgtaattagat

SEQ ID NO: 222656 - DNA, 15 bp, Homo sapiens
tgtgatgtaattaga

SEQ ID NO: 222657 - DNA, 15 bp, Homo sapiens
ttgtgatgtaattag

SEQ ID NO: 222658 - DNA, 15 bp, Homo sapiens
tttgtgatgtaatta

SEQ ID NO: 222659 - DNA, 15 bp, Homo sapiens
atttgtgatgtaatt

SEQ ID NO: 222660 - DNA, 15 bp, Homo sapiens
catttgtgatgtaat

SEQ ID NO: 222661 - DNA, 15 bp, Homo sapiens
tcatttgtgatgtaa

SEQ ID NO: 222662 - DNA, 15 bp, Homo sapiens
atcatttgtgatgta

SEQ ID NO: 222663 - DNA, 15 bp, Homo sapiens
gatcatttgtgatgt

SEQ ID NO: 222664 - DNA, 15 bp, Homo sapiens
agatcatttgtgatg

SEQ ID NO: 222665 - DNA, 15 bp, Homo sapiens
gagatcatttgtgat

SEQ ID NO: 222666 - DNA, 15 bp, Homo sapiens
ggagatcatttgtga

SEQ ID NO: 222667 - DNA, 15 bp, Homo sapiens
gggagatcatttgtg

SEQ ID NO: 222668 - DNA, 15 bp, Homo sapiens
tgggagatcatttgt

SEQ ID NO: 222669 - DNA, 15 bp, Homo sapiens
ttgggagatcatttg

SEQ ID NO: 222670 - DNA, 15 bp, Homo sapiens
tttgggagatcattt

SEQ ID NO: 222671 - DNA, 15 bp, Homo sapiens
ttttgggagatcatt

SEQ ID NO: 222672 - DNA, 15 bp, Homo sapiens
tttttgggagatcat

SEQ ID NO: 222673 - DNA, 15 bp, Homo sapiens
ttttttgggagatca

SEQ ID NO: 222674 - DNA, 15 bp, Homo sapiens
gttttttgggagatc

SEQ ID NO: 222675 - DNA, 15 bp, Homo sapiens
agttttttgggagat

SEQ ID NO: 222676 - DNA, 15 bp, Homo sapiens
gagttttttgggaga

SEQ ID NO: 222677 - DNA, 15 bp, Homo sapiens
tgagttttttgggag

SEQ ID NO: 222678 - DNA, 15 bp, Homo sapiens
atgagttttttggga

SEQ ID NO: 222679 - DNA, 15 bp, Homo sapiens
aatgagttttttggg

SEQ ID NO: 222680 - DNA, 15 bp, Homo sapiens
gaatgagttttttgg

SEQ ID NO: 222681 - DNA, 15 bp, Homo sapiens
ggaatgagttttttg

SEQ ID NO: 222682 - DNA, 15 bp, Homo sapiens
aggaatgagtttttt

SEQ ID NO: 222683 - DNA, 15 bp, Homo sapiens
aaggaatgagttttt

SEQ ID NO: 222684 - DNA, 15 bp, Homo sapiens
aaaggaatgagtttt

SEQ ID NO: 222685 - DNA, 15 bp, Homo sapiens
taaaggaatgagttt

SEQ ID NO: 222686 - DNA, 15 bp, Homo sapiens
ctaaaggaatgagtt

SEQ ID NO: 222687 - DNA, 15 bp, Homo sapiens
tctaaaggaatgagt

SEQ ID NO: 222688 - DNA, 15 bp, Homo sapiens
gtctaaaggaatgag

SEQ ID NO: 222689 - DNA, 15 bp, Homo sapiens
ggtctaaaggaatga

SEQ ID NO: 222690 - DNA, 15 bp, Homo sapiens
tggtctaaaggaatg

SEQ ID NO: 222691 - DNA, 15 bp, Homo sapiens
ctggtctaaaggaat

SEQ ID NO: 222692 - DNA, 15 bp, Homo sapiens
cctggtctaaaggaa

SEQ ID NO: 222693 - DNA, 15 bp, Homo sapiens
tcctggtctaaagga

SEQ ID NO: 222694 - DNA, 15 bp, Homo sapiens
ctcctggtctaaagg

SEQ ID NO: 222695 - DNA, 15 bp, Homo sapiens
tctcctggtctaaag

SEQ ID NO: 222696 - DNA, 15 bp, Homo sapiens
atctcctggtctaaa

SEQ ID NO: 222697 - DNA, 15 bp, Homo sapiens
catctcctggtctaa

SEQ ID NO: 222698 - DNA, 15 bp, Homo sapiens
tcatctcctggtcta

SEQ ID NO: 222699 - DNA, 15 bp, Homo sapiens
ctcatctcctggtct

SEQ ID NO: 222700 - DNA, 15 bp, Homo sapiens
actcatctcctggtc

SEQ ID NO: 222701 - DNA, 15 bp, Homo sapiens
aactcatctcctggt

SEQ ID NO: 222702 - DNA, 15 bp, Homo sapiens
aaactcatctcctgg

SEQ ID NO: 222703 - DNA, 15 bp, Homo sapiens
gaaactcatctcctg

SEQ ID NO: 222704 - DNA, 15 bp, Homo sapiens
agaaactcatctcct

SEQ ID NO: 222705 - DNA, 15 bp, Homo sapiens
tagaaactcatctcc

SEQ ID NO: 222706 - DNA, 15 bp, Homo sapiens
atagaaactcatctc

SEQ ID NO: 222707 - DNA, 15 bp, Homo sapiens
aatagaaactcatct

SEQ ID NO: 222708 - DNA, 15 bp, Homo sapiens
gaatagaaactcatc

SEQ ID NO: 222709 - DNA, 15 bp, Homo sapiens
tgaatagaaactcat

SEQ ID NO: 222710 - DNA, 15 bp, Homo sapiens
atgaatagaaactca

SEQ ID NO: 222711 - DNA, 15 bp, Homo sapiens
aatgaatagaaactc

SEQ ID NO: 222712 - DNA, 15 bp, Homo sapiens
taatgaatagaaact

SEQ ID NO: 222713 - DNA, 15 bp, Homo sapiens
ataatgaatagaaac

SEQ ID NO: 222714 - DNA, 15 bp, Homo sapiens
aataatgaatagaaa

SEQ ID NO: 222715 - DNA, 15 bp, Homo sapiens
taataatgaatagaa

SEQ ID NO: 222716 - DNA, 15 bp, Homo sapiens
ataataatgaataga

SEQ ID NO: 222717 - DNA, 15 bp, Homo sapiens
aataataatgaatag

SEQ ID NO: 222718 - DNA, 15 bp, Homo sapiens
aaataataatgaata

SEQ ID NO: 222719 - DNA, 15 bp, Homo sapiens
aaaataataatgaat

SEQ ID NO: 222720 - DNA, 15 bp, Homo sapiens
aaaaataataatgaa

SEQ ID NO: 222721 - DNA, 15 bp, Homo sapiens
caaaaataataatga

SEQ ID NO: 222722 - DNA, 15 bp, Homo sapiens
acaaaaataataatg

SEQ ID NO: 222723 - DNA, 15 bp, Homo sapiens
tacaaaaataataat

SEQ ID NO: 222724 - DNA, 15 bp, Homo sapiens
ctacaaaaataataa

SEQ ID NO: 222725 - DNA, 15 bp, Homo sapiens
gctacaaaaataata

SEQ ID NO: 222726 - DNA, 15 bp, Homo sapiens
agctacaaaaataat

SEQ ID NO: 222727 - DNA, 15 bp, Homo sapiens
tagctacaaaaataa

SEQ ID NO: 222728 - DNA, 15 bp, Homo sapiens
ttagctacaaaaata

SEQ ID NO: 222729 - DNA, 15 bp, Homo sapiens
tttagctacaaaaat

SEQ ID NO: 222730 - DNA, 15 bp, Homo sapiens
ttttagctacaaaaa

SEQ ID NO: 222731 - DNA, 15 bp, Homo sapiens
attttagctacaaaa

SEQ ID NO: 222732 - DNA, 15 bp, Homo sapiens
aattttagctacaaa

SEQ ID NO: 222733 - DNA, 15 bp, Homo sapiens
aaattttagctacaa

SEQ ID NO: 222734 - DNA, 15 bp, Homo sapiens
gaaattttagctaca

SEQ ID NO: 222735 - DNA, 15 bp, Homo sapiens
tgaaattttagctac

SEQ ID NO: 222736 - DNA, 15 bp, Homo sapiens
ttgaaattttagcta

SEQ ID NO: 222737 - DNA, 15 bp, Homo sapiens
tttgaaattttagct

SEQ ID NO: 222738 - DNA, 15 bp, Homo sapiens
atttgaaattttagc

SEQ ID NO: 222739 - DNA, 15 bp, Homo sapiens
gatttgaaattttag

SEQ ID NO: 222740 - DNA, 15 bp, Homo sapiens
tgatttgaaatttta

SEQ ID NO: 222741 - DNA, 15 bp, Homo sapiens
gtgatttgaaatttt

SEQ ID NO: 222742 - DNA, 15 bp, Homo sapiens
tgtgatttgaaattt

SEQ ID NO: 222743 - DNA, 15 bp, Homo sapiens
ctgtgatttgaaatt

SEQ ID NO: 222744 - DNA, 15 bp, Homo sapiens
tctgtgatttgaaat

SEQ ID NO: 222745 - DNA, 15 bp, Homo sapiens
ttctgtgatttgaaa

SEQ ID NO: 222746 - DNA, 15 bp, Homo sapiens
attctgtgatttgaa

SEQ ID NO: 222747 - DNA, 15 bp, Homo sapiens
gattctgtgatttga

SEQ ID NO: 222748 - DNA, 15 bp, Homo sapiens
tgattctgtgatttg

SEQ ID NO: 222749 - DNA, 15 bp, Homo sapiens
atgattctgtgattt

SEQ ID NO: 222750 - DNA, 15 bp, Homo sapiens
tatgattctgtgatt

SEQ ID NO: 222751 - DNA, 15 bp, Homo sapiens
ttatgattctgtgat

SEQ ID NO: 222752 - DNA, 15 bp, Homo sapiens
attatgattctgtga

SEQ ID NO: 222753 - DNA, 15 bp, Homo sapiens
tattatgattctgtg

SEQ ID NO: 222754 - DNA, 15 bp, Homo sapiens
atattatgattctgt

SEQ ID NO: 222755 - DNA, 15 bp, Homo sapiens
tatattatgattctg

SEQ ID NO: 222756 - DNA, 15 bp, Homo sapiens
atatattatgattct

SEQ ID NO: 222757 - DNA, 15 bp, Homo sapiens
aatatattatgattc

SEQ ID NO: 222758 - DNA, 15 bp, Homo sapiens
caatatattatgatt

SEQ ID NO: 222759 - DNA, 15 bp, Homo sapiens
gcaatatattatgat

SEQ ID NO: 222760 - DNA, 15 bp, Homo sapiens
tgcaatatattatga

SEQ ID NO: 222761 - DNA, 15 bp, Homo sapiens
ctgcaatatattatg

SEQ ID NO: 222762 - DNA, 15 bp, Homo sapiens
actgcaatatattat

SEQ ID NO: 222763 - DNA, 15 bp, Homo sapiens
aactgcaatatatta

SEQ ID NO: 222764 - DNA, 15 bp, Homo sapiens
aaactgcaatatatt

SEQ ID NO: 222765 - DNA, 15 bp, Homo sapiens
caaactgcaatatat

SEQ ID NO: 222766 - DNA, 15 bp, Homo sapiens
acaaactgcaatata

SEQ ID NO: 222767 - DNA, 15 bp, Homo sapiens
aacaaactgcaatat

SEQ ID NO: 222768 - DNA, 15 bp, Homo sapiens
aaacaaactgcaata

SEQ ID NO: 222769 - DNA, 15 bp, Homo sapiens
taaacaaactgcaat

SEQ ID NO: 222770 - DNA, 15 bp, Homo sapiens
ttaaacaaactgcaa

SEQ ID NO: 222771 - DNA, 15 bp, Homo sapiens
cttaaacaaactgca

SEQ ID NO: 222772 - DNA, 15 bp, Homo sapiens
gcttaaacaaactgc

SEQ ID NO: 222773 - DNA, 15 bp, Homo sapiens
ggcttaaacaaactg

SEQ ID NO: 222774 - DNA, 15 bp, Homo sapiens
aggcttaaacaaact

SEQ ID NO: 222775 - DNA, 15 bp, Homo sapiens
aaggcttaaacaaac

SEQ ID NO: 222776 - DNA, 15 bp, Homo sapiens
taaggcttaaacaaa

SEQ ID NO: 222777 - DNA, 15 bp, Homo sapiens
ttaaggcttaaacaa

SEQ ID NO: 222778 - DNA, 15 bp, Homo sapiens
tttaaggcttaaaca

SEQ ID NO: 222779 - DNA, 15 bp, Homo sapiens
ttttaaggcttaaac

SEQ ID NO: 222780 - DNA, 15 bp, Homo sapiens
attttaaggcttaaa

SEQ ID NO: 222781 - DNA, 15 bp, Homo sapiens
cattttaaggcttaa

SEQ ID NO: 222782 - DNA, 15 bp, Homo sapiens
acattttaaggctta

SEQ ID NO: 222783 - DNA, 15 bp, Homo sapiens
aacattttaaggctt

SEQ ID NO: 222784 - DNA, 15 bp, Homo sapiens
gaacattttaaggct

SEQ ID NO: 222785 - DNA, 15 bp, Homo sapiens
ggaacattttaaggc

SEQ ID NO: 222786 - DNA, 15 bp, Homo sapiens
aggaacattttaagg

SEQ ID NO: 222787 - DNA, 15 bp, Homo sapiens
caggaacattttaag

SEQ ID NO: 222788 - DNA, 15 bp, Homo sapiens
ccaggaacattttaa

SEQ ID NO: 222789 - DNA, 15 bp, Homo sapiens
gccaggaacatttta

SEQ ID NO: 222790 - DNA, 15 bp, Homo sapiens
ggccaggaacatttt

SEQ ID NO: 222791 - DNA, 15 bp, Homo sapiens
gggccaggaacattt

SEQ ID NO: 222792 - DNA, 15 bp, Homo sapiens
tgggccaggaacatt

SEQ ID NO: 222793 - DNA, 15 bp, Homo sapiens
ttgggccaggaacat

SEQ ID NO: 222794 - DNA, 15 bp, Homo sapiens
tttgggccaggaaca

SEQ ID NO: 222795 - DNA, 15 bp, Homo sapiens
atttgggccaggaac

SEQ ID NO: 222796 - DNA, 15 bp, Homo sapiens
catttgggccaggaa

SEQ ID NO: 222797 - DNA, 15 bp, Homo sapiens
gcatttgggccagga

SEQ ID NO: 222798 - DNA, 15 bp, Homo sapiens
ggcatttgggccagg

SEQ ID NO: 222799 - DNA, 15 bp, Homo sapiens
aggcatttgggccag

SEQ ID NO: 222800 - DNA, 15 bp, Homo sapiens
gaggcatttgggcca

SEQ ID NO: 222801 - DNA, 15 bp, Homo sapiens
tgaggcatttgggcc

SEQ ID NO: 222802 - DNA, 15 bp, Homo sapiens
gtgaggcatttgggc

SEQ ID NO: 222803 - DNA, 15 bp, Homo sapiens
agtgaggcatttggg

SEQ ID NO: 222804 - DNA, 15 bp, Homo sapiens
aagtgaggcatttgg

SEQ ID NO: 222805 - DNA, 15 bp, Homo sapiens
taagtgaggcatttg

SEQ ID NO: 222806 - DNA, 15 bp, Homo sapiens
ttaagtgaggcattt

SEQ ID NO: 222807 - DNA, 15 bp, Homo sapiens
tttaagtgaggcatt

SEQ ID NO: 222808 - DNA, 15 bp, Homo sapiens
atttaagtgaggcat

SEQ ID NO: 222809 - DNA, 15 bp, Homo sapiens
tatttaagtgaggca

SEQ ID NO: 222810 - DNA, 15 bp, Homo sapiens
gtatttaagtgaggc

SEQ ID NO: 222811 - DNA, 15 bp, Homo sapiens
cgtatttaagtgagg

SEQ ID NO: 222812 - DNA, 15 bp, Homo sapiens
ccgtatttaagtgag

SEQ ID NO: 222813 - DNA, 15 bp, Homo sapiens
cccgtatttaagtga

SEQ ID NO: 222814 - DNA, 15 bp, Homo sapiens
ccccgtatttaagtg

SEQ ID NO: 222815 - DNA, 15 bp, Homo sapiens
tccccgtatttaagt

SEQ ID NO: 222816 - DNA, 15 bp, Homo sapiens
ttccccgtatttaag

SEQ ID NO: 222817 - DNA, 15 bp, Homo sapiens
tttccccgtatttaa

SEQ ID NO: 222818 - DNA, 15 bp, Homo sapiens
gtttccccgtattta

SEQ ID NO: 222819 - DNA, 15 bp, Homo sapiens
agtttccccgtattt

SEQ ID NO: 222820 - DNA, 15 bp, Homo sapiens
cagtttccccgtatt

SEQ ID NO: 222821 - DNA, 15 bp, Homo sapiens
tcagtttccccgtat

SEQ ID NO: 222822 - DNA, 15 bp, Homo sapiens
gtcagtttccccgta

SEQ ID NO: 222823 - DNA, 15 bp, Homo sapiens
tgtcagtttccccgt

SEQ ID NO: 222824 - DNA, 15 bp, Homo sapiens
atgtcagtttccccg

SEQ ID NO: 222825 - DNA, 15 bp, Homo sapiens
catgtcagtttcccc

SEQ ID NO: 222826 - DNA, 15 bp, Homo sapiens
gcatgtcagtttccc

SEQ ID NO: 222827 - DNA, 15 bp, Homo sapiens
agcatgtcagtttcc

SEQ ID NO: 222828 - DNA, 15 bp, Homo sapiens
cagcatgtcagtttc

SEQ ID NO: 222829 - DNA, 15 bp, Homo sapiens
tcagcatgtcagttt

SEQ ID NO: 222830 - DNA, 15 bp, Homo sapiens
ttcagcatgtcagtt

SEQ ID NO: 222831 - DNA, 15 bp, Homo sapiens
cttcagcatgtcagt

SEQ ID NO: 222832 - DNA, 15 bp, Homo sapiens
tcttcagcatgtcag

SEQ ID NO: 222833 - DNA, 15 bp, Homo sapiens
ctcttcagcatgtca

SEQ ID NO: 222834 - DNA, 15 bp, Homo sapiens
actcttcagcatgtc

SEQ ID NO: 222835 - DNA, 15 bp, Homo sapiens
gactcttcagcatgt

SEQ ID NO: 222836 - DNA, 15 bp, Homo sapiens
agactcttcagcatg

SEQ ID NO: 222837 - DNA, 15 bp, Homo sapiens
cagactcttcagcat

SEQ ID NO: 222838 - DNA, 15 bp, Homo sapiens
tcagactcttcagca

SEQ ID NO: 222839 - DNA, 15 bp, Homo sapiens
ctcagactcttcagc

SEQ ID NO: 222840 - DNA, 15 bp, Homo sapiens
actcagactcttcag

SEQ ID NO: 222841 - DNA, 15 bp, Homo sapiens
cactcagactcttca

SEQ ID NO: 222842 - DNA, 15 bp, Homo sapiens
tcactcagactcttc

SEQ ID NO: 222843 - DNA, 15 bp, Homo sapiens
gtcactcagactctt

SEQ ID NO: 222844 - DNA, 15 bp, Homo sapiens
ggtcactcagactct

SEQ ID NO: 222845 - DNA, 15 bp, Homo sapiens
aggtcactcagactc

SEQ ID NO: 222846 - DNA, 15 bp, Homo sapiens
taggtcactcagact

SEQ ID NO: 222847 - DNA, 15 bp, Homo sapiens
ataggtcactcagac

SEQ ID NO: 222848 - DNA, 15 bp, Homo sapiens
gataggtcactcaga

SEQ ID NO: 222849 - DNA, 15 bp, Homo sapiens
ggataggtcactcag

SEQ ID NO: 222850 - DNA, 15 bp, Homo sapiens
aggataggtcactca

SEQ ID NO: 222851 - DNA, 15 bp, Homo sapiens
aaggataggtcactc

SEQ ID NO: 222852 - DNA, 15 bp, Homo sapiens
caaggataggtcact

SEQ ID NO: 222853 - DNA, 15 bp, Homo sapiens
acaaggataggtcac

SEQ ID NO: 222854 - DNA, 15 bp, Homo sapiens
aacaaggataggtca

SEQ ID NO: 222855 - DNA, 15 bp, Homo sapiens
gaacaaggataggtc

SEQ ID NO: 222856 - DNA, 15 bp, Homo sapiens
tgaacaaggataggt

SEQ ID NO: 222857 - DNA, 15 bp, Homo sapiens
gtgaacaaggatagg

SEQ ID NO: 222858 - DNA, 15 bp, Homo sapiens
agtgaacaaggatag

SEQ ID NO: 222859 - DNA, 15 bp, Homo sapiens
gagtgaacaaggata

SEQ ID NO: 222860 - DNA, 15 bp, Homo sapiens
tgagtgaacaaggat

SEQ ID NO: 222861 - DNA, 15 bp, Homo sapiens
ttgagtgaacaagga

SEQ ID NO: 222862 - DNA, 15 bp, Homo sapiens
cttgagtgaacaagg

SEQ ID NO: 222863 - DNA, 15 bp, Homo sapiens
acttgagtgaacaag

SEQ ID NO: 222864 - DNA, 15 bp, Homo sapiens
aacttgagtgaacaa

SEQ ID NO: 222865 - DNA, 15 bp, Homo sapiens
caacttgagtgaaca

SEQ ID NO: 222866 - DNA, 15 bp, Homo sapiens
tcaacttgagtgaac

SEQ ID NO: 222867 - DNA, 15 bp, Homo sapiens
ttcaacttgagtgaa

SEQ ID NO: 222868 - DNA, 15 bp, Homo sapiens
attcaacttgagtga

SEQ ID NO: 222869 - DNA, 15 bp, Homo sapiens
tattcaacttgagtg

SEQ ID NO: 222870 - DNA, 15 bp, Homo sapiens
ttattcaacttgagt

SEQ ID NO: 222871 - DNA, 15 bp, Homo sapiens
attattcaacttgag

SEQ ID NO: 222872 - DNA, 15 bp, Homo sapiens
cattattcaacttga

SEQ ID NO: 222873 - DNA, 15 bp, Homo sapiens
gcattattcaacttg

SEQ ID NO: 222874 - DNA, 15 bp, Homo sapiens
agcattattcaactt

SEQ ID NO: 222875 - DNA, 15 bp, Homo sapiens
cagcattattcaact

SEQ ID NO: 222876 - DNA, 15 bp, Homo sapiens
gcagcattattcaac

SEQ ID NO: 222877 - DNA, 15 bp, Homo sapiens
ggcagcattattcaa

SEQ ID NO: 222878 - DNA, 15 bp, Homo sapiens
tggcagcattattca

SEQ ID NO: 222879 - DNA, 15 bp, Homo sapiens
ctggcagcattattc

SEQ ID NO: 222880 - DNA, 15 bp, Homo sapiens
tctggcagcattatt

SEQ ID NO: 222881 - DNA, 15 bp, Homo sapiens
ttctggcagcattat

SEQ ID NO: 222882 - DNA, 15 bp, Homo sapiens
tttctggcagcatta

SEQ ID NO: 222883 - DNA, 15 bp, Homo sapiens
atttctggcagcatt

SEQ ID NO: 222884 - DNA, 15 bp, Homo sapiens
aatttctggcagcat

SEQ ID NO: 222885 - DNA, 15 bp, Homo sapiens
gaatttctggcagca

SEQ ID NO: 222886 - DNA, 15 bp, Homo sapiens
agaatttctggcagc

SEQ ID NO: 222887 - DNA, 15 bp, Homo sapiens
tagaatttctggcag

SEQ ID NO: 222888 - DNA, 15 bp, Homo sapiens
gtagaatttctggca

SEQ ID NO: 222889 - DNA, 15 bp, Homo sapiens
agtagaatttctggc

SEQ ID NO: 222890 - DNA, 15 bp, Homo sapiens
cagtagaatttctgg

SEQ ID NO: 222891 - DNA, 15 bp, Homo sapiens
acagtagaatttctg

SEQ ID NO: 222892 - DNA, 15 bp, Homo sapiens
aacagtagaatttct

SEQ ID NO: 222893 - DNA, 15 bp, Homo sapiens
taacagtagaatttc

SEQ ID NO: 222894 - DNA, 15 bp, Homo sapiens
ctaacagtagaattt

SEQ ID NO: 222895 - DNA, 15 bp, Homo sapiens
tctaacagtagaatt

SEQ ID NO: 222896 - DNA, 15 bp, Homo sapiens
ttctaacagtagaat

SEQ ID NO: 222897 - DNA, 15 bp, Homo sapiens
attctaacagtagaa

SEQ ID NO: 222898 - DNA, 15 bp, Homo sapiens
aattctaacagtaga

SEQ ID NO: 222899 - DNA, 15 bp, Homo sapiens
aaattctaacagtag

SEQ ID NO: 222900 - DNA, 15 bp, Homo sapiens
gaaattctaacagta

SEQ ID NO: 222901 - DNA, 15 bp, Homo sapiens
agaaattctaacagt

SEQ ID NO: 222902 - DNA, 15 bp, Homo sapiens
cagaaattctaacag

SEQ ID NO: 222903 - DNA, 15 bp, Homo sapiens
gcagaaattctaaca

SEQ ID NO: 222904 - DNA, 15 bp, Homo sapiens
agcagaaattctaac

SEQ ID NO: 222905 - DNA, 15 bp, Homo sapiens
gagcagaaattctaa

SEQ ID NO: 222906 - DNA, 15 bp, Homo sapiens
agagcagaaattcta

SEQ ID NO: 222907 - DNA, 15 bp, Homo sapiens
gagagcagaaattct

SEQ ID NO: 222908 - DNA, 15 bp, Homo sapiens
ggagagcagaaattc

SEQ ID NO: 222909 - DNA, 15 bp, Homo sapiens
gggagagcagaaatt

SEQ ID NO: 222910 - DNA, 15 bp, Homo sapiens
agggagagcagaaat

SEQ ID NO: 222911 - DNA, 15 bp, Homo sapiens
aagggagagcagaaa

SEQ ID NO: 222912 - DNA, 15 bp, Homo sapiens
caagggagagcagaa

SEQ ID NO: 222913 - DNA, 15 bp, Homo sapiens
gcaagggagagcaga

SEQ ID NO: 222914 - DNA, 15 bp, Homo sapiens
agcaagggagagcag

SEQ ID NO: 222915 - DNA, 15 bp, Homo sapiens
gagcaagggagagca

SEQ ID NO: 222916 - DNA, 15 bp, Homo sapiens
tgagcaagggagagc

SEQ ID NO: 222917 - DNA, 15 bp, Homo sapiens
atgagcaagggagag

SEQ ID NO: 222918 - DNA, 15 bp, Homo sapiens
aatgagcaagggaga

SEQ ID NO: 222919 - DNA, 15 bp, Homo sapiens
aaatgagcaagggag

SEQ ID NO: 222920 - DNA, 15 bp, Homo sapiens
aaaatgagcaaggga

SEQ ID NO: 222921 - DNA, 15 bp, Homo sapiens
aaaaatgagcaaggg

SEQ ID NO: 222922 - DNA, 15 bp, Homo sapiens
aaaaaatgagcaagg

SEQ ID NO: 222923 - DNA, 15 bp, Homo sapiens
gaaaaaatgagcaag

SEQ ID NO: 222924 - DNA, 15 bp, Homo sapiens
tgaaaaaatgagcaa

SEQ ID NO: 222925 - DNA, 15 bp, Homo sapiens
gtgaaaaaatgagca

SEQ ID NO: 222926 - DNA, 15 bp, Homo sapiens
ggtgaaaaaatgagc

SEQ ID NO: 222927 - DNA, 15 bp, Homo sapiens
aggtgaaaaaatgag

SEQ ID NO: 222928 - DNA, 15 bp, Homo sapiens
caggtgaaaaaatga

SEQ ID NO: 222929 - DNA, 15 bp, Homo sapiens
gcaggtgaaaaaatg

SEQ ID NO: 222930 - DNA, 15 bp, Homo sapiens
tgcaggtgaaaaaat

SEQ ID NO: 222931 - DNA, 15 bp, Homo sapiens
ctgcaggtgaaaaaa

SEQ ID NO: 222932 - DNA, 15 bp, Homo sapiens
actgcaggtgaaaaa

SEQ ID NO: 222933 - DNA, 15 bp, Homo sapiens
gactgcaggtgaaaa

SEQ ID NO: 222934 - DNA, 15 bp, Homo sapiens
ggactgcaggtgaaa

SEQ ID NO: 222935 - DNA, 15 bp, Homo sapiens
tggactgcaggtgaa

SEQ ID NO: 222936 - DNA, 15 bp, Homo sapiens
ctggactgcaggtga

SEQ ID NO: 222937 - DNA, 15 bp, Homo sapiens
gctggactgcaggtg

SEQ ID NO: 222938 - DNA, 15 bp, Homo sapiens
agctggactgcaggt

SEQ ID NO: 222939 - DNA, 15 bp, Homo sapiens
tagctggactgcagg

SEQ ID NO: 222940 - DNA, 15 bp, Homo sapiens
gtagctggactgcag

SEQ ID NO: 222941 - DNA, 15 bp, Homo sapiens
ggtagctggactgca

SEQ ID NO: 222942 - DNA, 15 bp, Homo sapiens
tggtagctggactgc

SEQ ID NO: 222943 - DNA, 15 bp, Homo sapiens
ttggtagctggactg

SEQ ID NO: 222944 - DNA, 15 bp, Homo sapiens
tttggtagctggact

SEQ ID NO: 222945 - DNA, 15 bp, Homo sapiens
ctttggtagctggac

SEQ ID NO: 222946 - DNA, 15 bp, Homo sapiens
tctttggtagctgga

SEQ ID NO: 222947 - DNA, 15 bp, Homo sapiens
atctttggtagctgg

SEQ ID NO: 222948 - DNA, 15 bp, Homo sapiens
tatctttggtagctg

SEQ ID NO: 222949 - DNA, 15 bp, Homo sapiens
ctatctttggtagct

SEQ ID NO: 222950 - DNA, 15 bp, Homo sapiens
cctatctttggtagc

SEQ ID NO: 222951 - DNA, 15 bp, Homo sapiens
tcctatctttggtag

SEQ ID NO: 222952 - DNA, 15 bp, Homo sapiens
atcctatctttggta

SEQ ID NO: 222953 - DNA, 15 bp, Homo sapiens
aatcctatctttggt

SEQ ID NO: 222954 - DNA, 15 bp, Homo sapiens
aaatcctatctttgg

SEQ ID NO: 222955 - DNA, 15 bp, Homo sapiens
aaaatcctatctttg

SEQ ID NO: 222956 - DNA, 15 bp, Homo sapiens
taaaatcctatcttt

SEQ ID NO: 222957 - DNA, 15 bp, Homo sapiens
ctaaaatcctatctt

SEQ ID NO: 222958 - DNA, 15 bp, Homo sapiens
tctaaaatcctatct

SEQ ID NO: 222959 - DNA, 15 bp, Homo sapiens
gtctaaaatcctatc

SEQ ID NO: 222960 - DNA, 15 bp, Homo sapiens
tgtctaaaatcctat

SEQ ID NO: 222961 - DNA, 15 bp, Homo sapiens
atgtctaaaatccta

SEQ ID NO: 222962 - DNA, 15 bp, Homo sapiens
aatgtctaaaatcct

SEQ ID NO: 222963 - DNA, 15 bp, Homo sapiens
gaatgtctaaaatcc

SEQ ID NO: 222964 - DNA, 15 bp, Homo sapiens
agaatgtctaaaatc

SEQ ID NO: 222965 - DNA, 15 bp, Homo sapiens
tagaatgtctaaaat

SEQ ID NO: 222966 - DNA, 15 bp, Homo sapiens
atagaatgtctaaaa

SEQ ID NO: 222967 - DNA, 15 bp, Homo sapiens
gatagaatgtctaaa

SEQ ID NO: 222968 - DNA, 15 bp, Homo sapiens
agatagaatgtctaa

SEQ ID NO: 222969 - DNA, 15 bp, Homo sapiens
tagatagaatgtcta

SEQ ID NO: 222970 - DNA, 15 bp, Homo sapiens
gtagatagaatgtct

SEQ ID NO: 222971 - DNA, 15 bp, Homo sapiens
tgtagatagaatgtc

SEQ ID NO: 222972 - DNA, 15 bp, Homo sapiens
atgtagatagaatgt

SEQ ID NO: 222973 - DNA, 15 bp, Homo sapiens
aatgtagatagaatg

SEQ ID NO: 222974 - DNA, 15 bp, Homo sapiens
aaatgtagatagaat

SEQ ID NO: 222975 - DNA, 15 bp, Homo sapiens
taaatgtagatagaa

SEQ ID NO: 222976 - DNA, 15 bp, Homo sapiens
ttaaatgtagataga

SEQ ID NO: 222977 - DNA, 15 bp, Homo sapiens
tttaaatgtagatag

SEQ ID NO: 222978 - DNA, 15 bp, Homo sapiens
ttttaaatgtagata

SEQ ID NO: 222979 - DNA, 15 bp, Homo sapiens
attttaaatgtagat

SEQ ID NO: 222980 - DNA, 15 bp, Homo sapiens
cattttaaatgtaga

SEQ ID NO: 222981 - DNA, 15 bp, Homo sapiens
acattttaaatgtag

SEQ ID NO: 222982 - DNA, 15 bp, Homo sapiens
aacattttaaatgta

SEQ ID NO: 222983 - DNA, 15 bp, Homo sapiens
gaacattttaaatgt

SEQ ID NO: 222984 - DNA, 15 bp, Homo sapiens
ggaacattttaaatg

SEQ ID NO: 222985 - DNA, 15 bp, Homo sapiens
aggaacattttaaat

SEQ ID NO: 222986 - DNA, 15 bp, Homo sapiens
aaggaacattttaaa

SEQ ID NO: 222987 - DNA, 15 bp, Homo sapiens
gaaggaacattttaa

SEQ ID NO: 222988 - DNA, 15 bp, Homo sapiens
agaaggaacatttta

SEQ ID NO: 222989 - DNA, 15 bp, Homo sapiens
tagaaggaacatttt

SEQ ID NO: 222990 - DNA, 15 bp, Homo sapiens
ttagaaggaacattt

SEQ ID NO: 222991 - DNA, 15 bp, Homo sapiens
gttagaaggaacatt

SEQ ID NO: 222992 - DNA, 15 bp, Homo sapiens
agttagaaggaacat

SEQ ID NO: 222993 - DNA, 15 bp, Homo sapiens
cagttagaaggaaca

SEQ ID NO: 222994 - DNA, 15 bp, Homo sapiens
gcagttagaaggaac

SEQ ID NO: 222995 - DNA, 15 bp, Homo sapiens
tgcagttagaaggaa

SEQ ID NO: 222996 - DNA, 15 bp, Homo sapiens
ctgcagttagaagga

SEQ ID NO: 222997 - DNA, 15 bp, Homo sapiens
gctgcagttagaagg

SEQ ID NO: 222998 - DNA, 15 bp, Homo sapiens
cgctgcagttagaag

SEQ ID NO: 222999 - DNA, 15 bp, Homo sapiens
ccgctgcagttagaa

SEQ ID NO: 223000 - DNA, 15 bp, Homo sapiens
tccgctgcagttaga

SEQ ID NO: 223001 - DNA, 15 bp, Homo sapiens
ttccgctgcagttag

SEQ ID NO: 223002 - DNA, 15 bp, Homo sapiens
tttccgctgcagtta

SEQ ID NO: 223003 - DNA, 15 bp, Homo sapiens
gtttccgctgcagtt

SEQ ID NO: 223004 - DNA, 15 bp, Homo sapiens
tgtttccgctgcagt

SEQ ID NO: 223005 - DNA, 15 bp, Homo sapiens
gtgtttccgctgcag

SEQ ID NO: 223006 - DNA, 15 bp, Homo sapiens
tgtgtttccgctgca

SEQ ID NO: 223007 - DNA, 15 bp, Homo sapiens
ctgtgtttccgctgc

SEQ ID NO: 223008 - DNA, 15 bp, Homo sapiens
cctgtgtttccgctg

SEQ ID NO: 223009 - DNA, 15 bp, Homo sapiens
acctgtgtttccgct

SEQ ID NO: 223010 - DNA, 15 bp, Homo sapiens
tacctgtgtttccgc

SEQ ID NO: 223011 - DNA, 15 bp, Homo sapiens
ctacctgtgtttccg

SEQ ID NO: 223012 - DNA, 15 bp, Homo sapiens
gctacctgtgtttcc

SEQ ID NO: 223013 - DNA, 15 bp, Homo sapiens
tgctacctgtgtttc

SEQ ID NO: 223014 - DNA, 15 bp, Homo sapiens
ttgctacctgtgttt

SEQ ID NO: 223015 - DNA, 15 bp, Homo sapiens
cttgctacctgtgtt

SEQ ID NO: 223016 - DNA, 15 bp, Homo sapiens
ccttgctacctgtgt

SEQ ID NO: 223017 - DNA, 15 bp, Homo sapiens
tccttgctacctgtg

SEQ ID NO: 223018 - DNA, 15 bp, Homo sapiens
ctccttgctacctgt

SEQ ID NO: 223019 - DNA, 15 bp, Homo sapiens
tctccttgctacctg

SEQ ID NO: 223020 - DNA, 15 bp, Homo sapiens
gtctccttgctacct

SEQ ID NO: 223021 - DNA, 15 bp, Homo sapiens
tgtctccttgctacc

SEQ ID NO: 223022 - DNA, 15 bp, Homo sapiens
ctgtctccttgctac

SEQ ID NO: 223023 - DNA, 15 bp, Homo sapiens
actgtctccttgcta

SEQ ID NO: 223024 - DNA, 15 bp, Homo sapiens
cactgtctccttgct

SEQ ID NO: 223025 - DNA, 15 bp, Homo sapiens
acactgtctccttgc

SEQ ID NO: 223026 - DNA, 15 bp, Homo sapiens
tacactgtctccttg

SEQ ID NO: 223027 - DNA, 15 bp, Homo sapiens
ctacactgtctcctt

SEQ ID NO: 223028 - DNA, 15 bp, Homo sapiens
tctacactgtctcct

SEQ ID NO: 223029 - DNA, 15 bp, Homo sapiens
ttctacactgtctcc

SEQ ID NO: 223030 - DNA, 15 bp, Homo sapiens
attctacactgtctc

SEQ ID NO: 223031 - DNA, 15 bp, Homo sapiens
tattctacactgtct

SEQ ID NO: 223032 - DNA, 15 bp, Homo sapiens
ttattctacactgtc

SEQ ID NO: 223033 - DNA, 15 bp, Homo sapiens
cttattctacactgt

SEQ ID NO: 223034 - DNA, 15 bp, Homo sapiens
ccttattctacactg

SEQ ID NO: 223035 - DNA, 15 bp, Homo sapiens
tccttattctacact

SEQ ID NO: 223036 - DNA, 15 bp, Homo sapiens
ctccttattctacac

SEQ ID NO: 223037 - DNA, 15 bp, Homo sapiens
gctccttattctaca

SEQ ID NO: 223038 - DNA, 15 bp, Homo sapiens
ggctccttattctac

SEQ ID NO: 223039 - DNA, 15 bp, Homo sapiens
tggctccttattcta

SEQ ID NO: 223040 - DNA, 15 bp, Homo sapiens
ctggctccttattct

SEQ ID NO: 223041 - DNA, 15 bp, Homo sapiens
tctggctccttattc

SEQ ID NO: 223042 - DNA, 15 bp, Homo sapiens
ctctggctccttatt

SEQ ID NO: 223043 - DNA, 15 bp, Homo sapiens
cctctggctccttat

SEQ ID NO: 223044 - DNA, 15 bp, Homo sapiens
gcctctggctcctta

SEQ ID NO: 223045 - DNA, 15 bp, Homo sapiens
ggcctctggctcctt

SEQ ID NO: 223046 - DNA, 15 bp, Homo sapiens
aggcctctggctcct

SEQ ID NO: 223047 - DNA, 15 bp, Homo sapiens
caggcctctggctcc

SEQ ID NO: 223048 - DNA, 15 bp, Homo sapiens
ccaggcctctggctc

SEQ ID NO: 223049 - DNA, 15 bp, Homo sapiens
tccaggcctctggct

SEQ ID NO: 223050 - DNA, 15 bp, Homo sapiens
atccaggcctctggc

SEQ ID NO: 223051 - DNA, 15 bp, Homo sapiens
aatccaggcctctgg

SEQ ID NO: 223052 - DNA, 15 bp, Homo sapiens
aaatccaggcctctg

SEQ ID NO: 223053 - DNA, 15 bp, Homo sapiens
aaaatccaggcctct

SEQ ID NO: 223054 - DNA, 15 bp, Homo sapiens
taaaatccaggcctc

SEQ ID NO: 223055 - DNA, 15 bp, Homo sapiens
ctaaaatccaggcct

SEQ ID NO: 223056 - DNA, 15 bp, Homo sapiens
actaaaatccaggcc

SEQ ID NO: 223057 - DNA, 15 bp, Homo sapiens
gactaaaatccaggc

SEQ ID NO: 223058 - DNA, 15 bp, Homo sapiens
ggactaaaatccagg

SEQ ID NO: 223059 - DNA, 15 bp, Homo sapiens
gggactaaaatccag

SEQ ID NO: 223060 - DNA, 15 bp, Homo sapiens
cgggactaaaatcca

SEQ ID NO: 223061 - DNA, 15 bp, Homo sapiens
acgggactaaaatcc

SEQ ID NO: 223062 - DNA, 15 bp, Homo sapiens
cacgggactaaaatc

SEQ ID NO: 223063 - DNA, 15 bp, Homo sapiens
ccacgggactaaaat

SEQ ID NO: 223064 - DNA, 15 bp, Homo sapiens
tccacgggactaaaa

SEQ ID NO: 223065 - DNA, 15 bp, Homo sapiens
ttccacgggactaaa

SEQ ID NO: 223066 - DNA, 15 bp, Homo sapiens
tttccacgggactaa

SEQ ID NO: 223067 - DNA, 15 bp, Homo sapiens
ttttccacgggacta

SEQ ID NO: 223068 - DNA, 15 bp, Homo sapiens
tttttccacgggact

SEQ ID NO: 223069 - DNA, 15 bp, Homo sapiens
ctttttccacgggac

SEQ ID NO: 223070 - DNA, 15 bp, Homo sapiens
tctttttccacggga

SEQ ID NO: 223071 - DNA, 15 bp, Homo sapiens
ttctttttccacggg

SEQ ID NO: 223072 - DNA, 15 bp, Homo sapiens
gttctttttccacgg

SEQ ID NO: 223073 - DNA, 15 bp, Homo sapiens
ggttctttttccacg

SEQ ID NO: 223074 - DNA, 15 bp, Homo sapiens
tggttctttttccac

SEQ ID NO: 223075 - DNA, 15 bp, Homo sapiens
ctggttctttttcca

SEQ ID NO: 223076 - DNA, 15 bp, Homo sapiens
gctggttctttttcc

SEQ ID NO: 223077 - DNA, 15 bp, Homo sapiens
ggctggttctttttc

SEQ ID NO: 223078 - DNA, 15 bp, Homo sapiens
cggctggttcttttt

SEQ ID NO: 223079 - DNA, 15 bp, Homo sapiens
gcggctggttctttt

SEQ ID NO: 223080 - DNA, 15 bp, Homo sapiens
tgcggctggttcttt

SEQ ID NO: 223081 - DNA, 15 bp, Homo sapiens
gtgcggctggttctt

SEQ ID NO: 223082 - DNA, 15 bp, Homo sapiens
agtgcggctggttct

SEQ ID NO: 223083 - DNA, 15 bp, Homo sapiens
tagtgcggctggttc

SEQ ID NO: 223084 - DNA, 15 bp, Homo sapiens
gtagtgcggctggtt

SEQ ID NO: 223085 - DNA, 15 bp, Homo sapiens
ggtagtgcggctggt

SEQ ID NO: 223086 - DNA, 15 bp, Homo sapiens
aggtagtgcggctgg

SEQ ID NO: 223087 - DNA, 15 bp, Homo sapiens
caggtagtgcggctg

SEQ ID NO: 223088 - DNA, 15 bp, Homo sapiens
ccaggtagtgcggct

SEQ ID NO: 223089 - DNA, 15 bp, Homo sapiens
tccaggtagtgcggc

SEQ ID NO: 223090 - DNA, 15 bp, Homo sapiens
ctccaggtagtgcgg

SEQ ID NO: 223091 - DNA, 15 bp, Homo sapiens
tctccaggtagtgcg

SEQ ID NO: 223092 - DNA, 15 bp, Homo sapiens
ctctccaggtagtgc

SEQ ID NO: 223093 - DNA, 15 bp, Homo sapiens
tctctccaggtagtg

SEQ ID NO: 223094 - DNA, 15 bp, Homo sapiens
ttctctccaggtagt

SEQ ID NO: 223095 - DNA, 15 bp, Homo sapiens
attctctccaggtag

SEQ ID NO: 223096 - DNA, 15 bp, Homo sapiens
gattctctccaggta

SEQ ID NO: 223097 - DNA, 15 bp, Homo sapiens
tgattctctccaggt

SEQ ID NO: 223098 - DNA, 15 bp, Homo sapiens
atgattctctccagg

SEQ ID NO: 223099 - DNA, 15 bp, Homo sapiens
aatgattctctccag

SEQ ID NO: 223100 - DNA, 15 bp, Homo sapiens
aaatgattctctcca

SEQ ID NO: 223101 - DNA, 15 bp, Homo sapiens
caaatgattctctcc

SEQ ID NO: 223102 - DNA, 15 bp, Homo sapiens
ccaaatgattctctc

SEQ ID NO: 223103 - DNA, 15 bp, Homo sapiens
accaaatgattctct

SEQ ID NO: 223104 - DNA, 15 bp, Homo sapiens
gaccaaatgattctc

SEQ ID NO: 223105 - DNA, 15 bp, Homo sapiens
agaccaaatgattct

SEQ ID NO: 223106 - DNA, 15 bp, Homo sapiens
aagaccaaatgattc

SEQ ID NO: 223107 - DNA, 15 bp, Homo sapiens
gaagaccaaatgatt

SEQ ID NO: 223108 - DNA, 15 bp, Homo sapiens
ggaagaccaaatgat

SEQ ID NO: 223109 - DNA, 15 bp, Homo sapiens
tggaagaccaaatga

SEQ ID NO: 223110 - DNA, 15 bp, Homo sapiens
ttggaagaccaaatg

SEQ ID NO: 223111 - DNA, 15 bp, Homo sapiens
cttggaagaccaaat

SEQ ID NO: 223112 - DNA, 15 bp, Homo sapiens
acttggaagaccaaa

SEQ ID NO: 223113 - DNA, 15 bp, Homo sapiens
aacttggaagaccaa

SEQ ID NO: 223114 - DNA, 15 bp, Homo sapiens
gaacttggaagacca

SEQ ID NO: 223115 - DNA, 15 bp, Homo sapiens
agaacttggaagacc

SEQ ID NO: 223116 - DNA, 15 bp, Homo sapiens
gagaacttggaagac

SEQ ID NO: 223117 - DNA, 15 bp, Homo sapiens
tgagaacttggaaga

SEQ ID NO: 223118 - DNA, 15 bp, Homo sapiens
ctgagaacttggaag

SEQ ID NO: 223119 - DNA, 15 bp, Homo sapiens
actgagaacttggaa

SEQ ID NO: 223120 - DNA, 15 bp, Homo sapiens
aactgagaacttgga

SEQ ID NO: 223121 - DNA, 15 bp, Homo sapiens
aaactgagaacttgg

SEQ ID NO: 223122 - DNA, 15 bp, Homo sapiens
gaaactgagaacttg

SEQ ID NO: 223123 - DNA, 15 bp, Homo sapiens
ggaaactgagaactt

SEQ ID NO: 223124 - DNA, 15 bp, Homo sapiens
aggaaactgagaact

SEQ ID NO: 223125 - DNA, 15 bp, Homo sapiens
caggaaactgagaac

SEQ ID NO: 223126 - DNA, 15 bp, Homo sapiens
tcaggaaactgagaa

SEQ ID NO: 223127 - DNA, 15 bp, Homo sapiens
atcaggaaactgaga

SEQ ID NO: 223128 - DNA, 15 bp, Homo sapiens
aatcaggaaactgag

SEQ ID NO: 223129 - DNA, 15 bp, Homo sapiens
aaatcaggaaactga

SEQ ID NO: 223130 - DNA, 15 bp, Homo sapiens
caaatcaggaaactg

SEQ ID NO: 223131 - DNA, 15 bp, Homo sapiens
tcaaatcaggaaact

SEQ ID NO: 223132 - DNA, 15 bp, Homo sapiens
ctcaaatcaggaaac

SEQ ID NO: 223133 - DNA, 15 bp, Homo sapiens
actcaaatcaggaaa

SEQ ID NO: 223134 - DNA, 15 bp, Homo sapiens
tactcaaatcaggaa

SEQ ID NO: 223135 - DNA, 15 bp, Homo sapiens
ctactcaaatcagga

SEQ ID NO: 223136 - DNA, 15 bp, Homo sapiens
gctactcaaatcagg

SEQ ID NO: 223137 - DNA, 15 bp, Homo sapiens
tgctactcaaatcag

SEQ ID NO: 223138 - DNA, 15 bp, Homo sapiens
ttgctactcaaatca

SEQ ID NO: 223139 - DNA, 15 bp, Homo sapiens
cttgctactcaaatc

SEQ ID NO: 223140 - DNA, 15 bp, Homo sapiens
ccttgctactcaaat

SEQ ID NO: 223141 - DNA, 15 bp, Homo sapiens
tccttgctactcaaa

SEQ ID NO: 223142 - DNA, 15 bp, Homo sapiens
ctccttgctactcaa

SEQ ID NO: 223143 - DNA, 15 bp, Homo sapiens
tctccttgctactca

SEQ ID NO: 223144 - DNA, 15 bp, Homo sapiens
atctccttgctactc

SEQ ID NO: 223145 - DNA, 15 bp, Homo sapiens
catctccttgctact

SEQ ID NO: 223146 - DNA, 15 bp, Homo sapiens
ccatctccttgctac

SEQ ID NO: 223147 - DNA, 15 bp, Homo sapiens
cccatctccttgcta

SEQ ID NO: 223148 - DNA, 15 bp, Homo sapiens
acccatctccttgct

SEQ ID NO: 223149 - DNA, 15 bp, Homo sapiens
gacccatctccttgc

SEQ ID NO: 223150 - DNA, 15 bp, Homo sapiens
agacccatctccttg

SEQ ID NO: 223151 - DNA, 15 bp, Homo sapiens
cagacccatctcctt

SEQ ID NO: 223152 - DNA, 15 bp, Homo sapiens
ccagacccatctcct

SEQ ID NO: 223153 - DNA, 15 bp, Homo sapiens
tccagacccatctcc

SEQ ID NO: 223154 - DNA, 15 bp, Homo sapiens
atccagacccatctc

SEQ ID NO: 223155 - DNA, 15 bp, Homo sapiens
aatccagacccatct

SEQ ID NO: 223156 - DNA, 15 bp, Homo sapiens
gaatccagacccatc

SEQ ID NO: 223157 - DNA, 15 bp, Homo sapiens
cgaatccagacccat

SEQ ID NO: 223158 - DNA, 15 bp, Homo sapiens
gcgaatccagaccca

SEQ ID NO: 223159 - DNA, 15 bp, Homo sapiens
agcgaatccagaccc

SEQ ID NO: 223160 - DNA, 15 bp, Homo sapiens
gagcgaatccagacc

SEQ ID NO: 223161 - DNA, 15 bp, Homo sapiens
agagcgaatccagac

SEQ ID NO: 223162 - DNA, 15 bp, Homo sapiens
cagagcgaatccaga

SEQ ID NO: 223163 - DNA, 15 bp, Homo sapiens
tcagagcgaatccag

SEQ ID NO: 223164 - DNA, 15 bp, Homo sapiens
ttcagagcgaatcca

SEQ ID NO: 223165 - DNA, 15 bp, Homo sapiens
tttcagagcgaatcc

SEQ ID NO: 223166 - DNA, 15 bp, Homo sapiens
atttcagagcgaatc

SEQ ID NO: 223167 - DNA, 15 bp, Homo sapiens
catttcagagcgaat

SEQ ID NO: 223168 - DNA, 15 bp, Homo sapiens
acatttcagagcgaa

SEQ ID NO: 223169 - DNA, 15 bp, Homo sapiens
gacatttcagagcga

SEQ ID NO: 223170 - DNA, 15 bp, Homo sapiens
agacatttcagagcg

SEQ ID NO: 223171 - DNA, 15 bp, Homo sapiens
aagacatttcagagc

SEQ ID NO: 223172 - DNA, 15 bp, Homo sapiens
caagacatttcagag

SEQ ID NO: 223173 - DNA, 15 bp, Homo sapiens
gcaagacatttcaga

SEQ ID NO: 223174 - DNA, 15 bp, Homo sapiens
tgcaagacatttcag

SEQ ID NO: 223175 - DNA, 15 bp, Homo sapiens
ctgcaagacatttca

SEQ ID NO: 223176 - DNA, 15 bp, Homo sapiens
gctgcaagacatttc

SEQ ID NO: 223177 - DNA, 15 bp, Homo sapiens
agctgcaagacattt

SEQ ID NO: 223178 - DNA, 15 bp, Homo sapiens
gagctgcaagacatt

SEQ ID NO: 223179 - DNA, 15 bp, Homo sapiens
agagctgcaagacat

SEQ ID NO: 223180 - DNA, 15 bp, Homo sapiens
cagagctgcaagaca

SEQ ID NO: 223181 - DNA, 15 bp, Homo sapiens
tcagagctgcaagac

SEQ ID NO: 223182 - DNA, 15 bp, Homo sapiens
gtcagagctgcaaga

SEQ ID NO: 223183 - DNA, 15 bp, Homo sapiens
tgtcagagctgcaag

SEQ ID NO: 223184 - DNA, 15 bp, Homo sapiens
atgtcagagctgcaa

SEQ ID NO: 223185 - DNA, 15 bp, Homo sapiens
aatgtcagagctgca

SEQ ID NO: 223186 - DNA, 15 bp, Homo sapiens
gaatgtcagagctgc

SEQ ID NO: 223187 - DNA, 15 bp, Homo sapiens
ggaatgtcagagctg

SEQ ID NO: 223188 - DNA, 15 bp, Homo sapiens
tggaatgtcagagct

SEQ ID NO: 223189 - DNA, 15 bp, Homo sapiens
atggaatgtcagagc

SEQ ID NO: 223190 - DNA, 15 bp, Homo sapiens
catggaatgtcagag

SEQ ID NO: 223191 - DNA, 15 bp, Homo sapiens
tcatggaatgtcaga

SEQ ID NO: 223192 - DNA, 15 bp, Homo sapiens
atcatggaatgtcag

SEQ ID NO: 223193 - DNA, 15 bp, Homo sapiens
aatcatggaatgtca

SEQ ID NO: 223194 - DNA, 15 bp, Homo sapiens
gaatcatggaatgtc

SEQ ID NO: 223195 - DNA, 15 bp, Homo sapiens
agaatcatggaatgt

SEQ ID NO: 223196 - DNA, 15 bp, Homo sapiens
aagaatcatggaatg

SEQ ID NO: 223197 - DNA, 15 bp, Homo sapiens
caagaatcatggaat

SEQ ID NO: 223198 - DNA, 15 bp, Homo sapiens
ccaagaatcatggaa

SEQ ID NO: 223199 - DNA, 15 bp, Homo sapiens
tccaagaatcatgga

SEQ ID NO: 223200 - DNA, 15 bp, Homo sapiens
ctccaagaatcatgg

SEQ ID NO: 223201 - DNA, 15 bp, Homo sapiens
tctccaagaatcatg

SEQ ID NO: 223202 - DNA, 15 bp, Homo sapiens
ttctccaagaatcat

SEQ ID NO: 223203 - DNA, 15 bp, Homo sapiens
tttctccaagaatca

SEQ ID NO: 223204 - DNA, 15 bp, Homo sapiens
atttctccaagaatc

SEQ ID NO: 223205 - DNA, 15 bp, Homo sapiens
gatttctccaagaat

SEQ ID NO: 223206 - DNA, 15 bp, Homo sapiens
cgatttctccaagaa

SEQ ID NO: 223207 - DNA, 15 bp, Homo sapiens
ccgatttctccaaga

SEQ ID NO: 223208 - DNA, 15 bp, Homo sapiens
gccgatttctccaag

SEQ ID NO: 223209 - DNA, 15 bp, Homo sapiens
agccgatttctccaa

SEQ ID NO: 223210 - DNA, 15 bp, Homo sapiens
tagccgatttctcca

SEQ ID NO: 223211 - DNA, 15 bp, Homo sapiens
atagccgatttctcc

SEQ ID NO: 223212 - DNA, 15 bp, Homo sapiens
gatagccgatttctc

SEQ ID NO: 223213 - DNA, 15 bp, Homo sapiens
agatagccgatttct

SEQ ID NO: 223214 - DNA, 15 bp, Homo sapiens
gagatagccgatttc

SEQ ID NO: 223215 - DNA, 15 bp, Homo sapiens
ggagatagccgattt

SEQ ID NO: 223216 - DNA, 15 bp, Homo sapiens
tggagatagccgatt

SEQ ID NO: 223217 - DNA, 15 bp, Homo sapiens
ttggagatagccgat

SEQ ID NO: 223218 - DNA, 15 bp, Homo sapiens
gttggagatagccga

SEQ ID NO: 223219 - DNA, 15 bp, Homo sapiens
agttggagatagccg

SEQ ID NO: 223220 - DNA, 15 bp, Homo sapiens
cagttggagatagcc

SEQ ID NO: 223221 - DNA, 15 bp, Homo sapiens
tcagttggagatagc

SEQ ID NO: 223222 - DNA, 15 bp, Homo sapiens
ttcagttggagatag

SEQ ID NO: 223223 - DNA, 15 bp, Homo sapiens
attcagttggagata

SEQ ID NO: 223224 - DNA, 15 bp, Homo sapiens
gattcagttggagat

SEQ ID NO: 223225 - DNA, 15 bp, Homo sapiens
ggattcagttggaga

SEQ ID NO: 223226 - DNA, 15 bp, Homo sapiens
tggattcagttggag

SEQ ID NO: 223227 - DNA, 15 bp, Homo sapiens
gtggattcagttgga

SEQ ID NO: 223228 - DNA, 15 bp, Homo sapiens
tgtggattcagttgg

SEQ ID NO: 223229 - DNA, 15 bp, Homo sapiens
atgtggattcagttg

SEQ ID NO: 223230 - DNA, 15 bp, Homo sapiens
gatgtggattcagtt

SEQ ID NO: 223231 - DNA, 15 bp, Homo sapiens
agatgtggattcagt

SEQ ID NO: 223232 - DNA, 15 bp, Homo sapiens
aagatgtggattcag

SEQ ID NO: 223233 - DNA, 15 bp, Homo sapiens
gaagatgtggattca

SEQ ID NO: 223234 - DNA, 15 bp, Homo sapiens
ggaagatgtggattc

SEQ ID NO: 223235 - DNA, 15 bp, Homo sapiens
tggaagatgtggatt

SEQ ID NO: 223236 - DNA, 15 bp, Homo sapiens
ttggaagatgtggat

SEQ ID NO: 223237 - DNA, 15 bp, Homo sapiens
attggaagatgtgga

SEQ ID NO: 223238 - DNA, 15 bp, Homo sapiens
gattggaagatgtgg

SEQ ID NO: 223239 - DNA, 15 bp, Homo sapiens
ggattggaagatgtg

SEQ ID NO: 223240 - DNA, 15 bp, Homo sapiens
gggattggaagatgt

SEQ ID NO: 223241 - DNA, 15 bp, Homo sapiens
tgggattggaagatg

SEQ ID NO: 223242 - DNA, 15 bp, Homo sapiens
gtgggattggaagat

SEQ ID NO: 223243 - DNA, 15 bp, Homo sapiens
tgtgggattggaaga

SEQ ID NO: 223244 - DNA, 15 bp, Homo sapiens
gtgtgggattggaag

SEQ ID NO: 223245 - DNA, 15 bp, Homo sapiens
tgtgtgggattggaa

SEQ ID NO: 223246 - DNA, 15 bp, Homo sapiens
ttgtgtgggattgga

SEQ ID NO: 223247 - DNA, 15 bp, Homo sapiens
cttgtgtgggattgg

SEQ ID NO: 223248 - DNA, 15 bp, Homo sapiens
tcttgtgtgggattg

SEQ ID NO: 223249 - DNA, 15 bp, Homo sapiens
atcttgtgtgggatt

SEQ ID NO: 223250 - DNA, 15 bp, Homo sapiens
catcttgtgtgggat

SEQ ID NO: 223251 - DNA, 15 bp, Homo sapiens
ccatcttgtgtggga

SEQ ID NO: 223252 - DNA, 15 bp, Homo sapiens
tccatcttgtgtggg

SEQ ID NO: 223253 - DNA, 15 bp, Homo sapiens
ctccatcttgtgtgg

SEQ ID NO: 223254 - DNA, 15 bp, Homo sapiens
tctccatcttgtgtg

SEQ ID NO: 223255 - DNA, 15 bp, Homo sapiens
ttctccatcttgtgt

SEQ ID NO: 223256 - DNA, 15 bp, Homo sapiens
cttctccatcttgtg

SEQ ID NO: 223257 - DNA, 15 bp, Homo sapiens
gcttctccatcttgt

SEQ ID NO: 223258 - DNA, 15 bp, Homo sapiens
tgcttctccatcttg

SEQ ID NO: 223259 - DNA, 15 bp, Homo sapiens
ctgcttctccatctt

SEQ ID NO: 223260 - DNA, 15 bp, Homo sapiens
cctgcttctccatct

SEQ ID NO: 223261 - DNA, 15 bp, Homo sapiens
gcctgcttctccatc

SEQ ID NO: 223262 - DNA, 15 bp, Homo sapiens
ggcctgcttctccat

SEQ ID NO: 223263 - DNA, 15 bp, Homo sapiens
gggcctgcttctcca

SEQ ID NO: 223264 - DNA, 15 bp, Homo sapiens
tgggcctgcttctcc

SEQ ID NO: 223265 - DNA, 15 bp, Homo sapiens
atgggcctgcttctc

SEQ ID NO: 223266 - DNA, 15 bp, Homo sapiens
gatgggcctgcttct

SEQ ID NO: 223267 - DNA, 15 bp, Homo sapiens
ggatgggcctgcttc

SEQ ID NO: 223268 - DNA, 15 bp, Homo sapiens
gggatgggcctgctt

SEQ ID NO: 223269 - DNA, 15 bp, Homo sapiens
tgggatgggcctgct

SEQ ID NO: 223270 - DNA, 15 bp, Homo sapiens
ctgggatgggcctgc

SEQ ID NO: 223271 - DNA, 15 bp, Homo sapiens
actgggatgggcctg

SEQ ID NO: 223272 - DNA, 15 bp, Homo sapiens
tactgggatgggcct

SEQ ID NO: 223273 - DNA, 15 bp, Homo sapiens
atactgggatgggcc

SEQ ID NO: 223274 - DNA, 15 bp, Homo sapiens
aatactgggatgggc

SEQ ID NO: 223275 - DNA, 15 bp, Homo sapiens
aaatactgggatggg

SEQ ID NO: 223276 - DNA, 15 bp, Homo sapiens
caaatactgggatgg

SEQ ID NO: 223277 - DNA, 15 bp, Homo sapiens
ccaaatactgggatg

SEQ ID NO: 223278 - DNA, 15 bp, Homo sapiens
cccaaatactgggat

SEQ ID NO: 223279 - DNA, 15 bp, Homo sapiens
ccccaaatactggga

SEQ ID NO: 223280 - DNA, 15 bp, Homo sapiens
tccccaaatactggg

SEQ ID NO: 223281 - DNA, 15 bp, Homo sapiens
ctccccaaatactgg

SEQ ID NO: 223282 - DNA, 15 bp, Homo sapiens
cctccccaaatactg

SEQ ID NO: 223283 - DNA, 15 bp, Homo sapiens
gcctccccaaatact

SEQ ID NO: 223284 - DNA, 15 bp, Homo sapiens
ggcctccccaaatac

SEQ ID NO: 223285 - DNA, 15 bp, Homo sapiens
gggcctccccaaata

SEQ ID NO: 223286 - DNA, 15 bp, Homo sapiens
tgggcctccccaaat

SEQ ID NO: 223287 - DNA, 15 bp, Homo sapiens
atgggcctccccaaa

SEQ ID NO: 223288 - DNA, 15 bp, Homo sapiens
gatgggcctccccaa

SEQ ID NO: 223289 - DNA, 15 bp, Homo sapiens
tgatgggcctcccca

SEQ ID NO: 223290 - DNA, 15 bp, Homo sapiens
ctgatgggcctcccc

SEQ ID NO: 223291 - DNA, 15 bp, Homo sapiens
cctgatgggcctccc

SEQ ID NO: 223292 - DNA, 15 bp, Homo sapiens
tcctgatgggcctcc

SEQ ID NO: 223293 - DNA, 15 bp, Homo sapiens
gtcctgatgggcctc

SEQ ID NO: 223294 - DNA, 15 bp, Homo sapiens
ggtcctgatgggcct

SEQ ID NO: 223295 - DNA, 15 bp, Homo sapiens
tggtcctgatgggcc

SEQ ID NO: 223296 - DNA, 15 bp, Homo sapiens
ttggtcctgatgggc

SEQ ID NO: 223297 - DNA, 15 bp, Homo sapiens
tttggtcctgatggg

SEQ ID NO: 223298 - DNA, 15 bp, Homo sapiens
ctttggtcctgatgg

SEQ ID NO: 223299 - DNA, 15 bp, Homo sapiens
gctttggtcctgatg

SEQ ID NO: 223300 - DNA, 15 bp, Homo sapiens
agctttggtcctgat

SEQ ID NO: 223301 - DNA, 15 bp, Homo sapiens
cagctttggtcctga

SEQ ID NO: 223302 - DNA, 15 bp, Homo sapiens
acagctttggtcctg

SEQ ID NO: 223303 - DNA, 15 bp, Homo sapiens
gacagctttggtcct

SEQ ID NO: 223304 - DNA, 15 bp, Homo sapiens
ggacagctttggtcc

SEQ ID NO: 223305 - DNA, 15 bp, Homo sapiens
aggacagctttggtc

SEQ ID NO: 223306 - DNA, 15 bp, Homo sapiens
gaggacagctttggt

SEQ ID NO: 223307 - DNA, 15 bp, Homo sapiens
agaggacagctttgg

SEQ ID NO: 223308 - DNA, 15 bp, Homo sapiens
gagaggacagctttg

SEQ ID NO: 223309 - DNA, 15 bp, Homo sapiens
agagaggacagcttt

SEQ ID NO: 223310 - DNA, 15 bp, Homo sapiens
gagagaggacagctt

SEQ ID NO: 223311 - DNA, 15 bp, Homo sapiens
agagagaggacagct

SEQ ID NO: 223312 - DNA, 15 bp, Homo sapiens
cagagagaggacagc

SEQ ID NO: 223313 - DNA, 15 bp, Homo sapiens
acagagagaggacag

SEQ ID NO: 223314 - DNA, 15 bp, Homo sapiens
cacagagagaggaca

SEQ ID NO: 223315 - DNA, 15 bp, Homo sapiens
ccacagagagaggac

SEQ ID NO: 223316 - DNA, 15 bp, Homo sapiens
cccacagagagagga

SEQ ID NO: 223317 - DNA, 15 bp, Homo sapiens
ccccacagagagagg

SEQ ID NO: 223318 - DNA, 15 bp, Homo sapiens
cccccacagagagag

SEQ ID NO: 223319 - DNA, 15 bp, Homo sapiens
gcccccacagagaga

SEQ ID NO: 223320 - DNA, 15 bp, Homo sapiens
agcccccacagagag

SEQ ID NO: 223321 - DNA, 15 bp, Homo sapiens
cagcccccacagaga

SEQ ID NO: 223322 - DNA, 15 bp, Homo sapiens
ccagcccccacagag

SEQ ID NO: 223323 - DNA, 15 bp, Homo sapiens
tccagcccccacaga

SEQ ID NO: 223324 - DNA, 15 bp, Homo sapiens
ctccagcccccacag

SEQ ID NO: 223325 - DNA, 15 bp, Homo sapiens
tctccagcccccaca

SEQ ID NO: 223326 - DNA, 15 bp, Homo sapiens
ttctccagcccccac

SEQ ID NO: 223327 - DNA, 15 bp, Homo sapiens
cttctccagccccca

SEQ ID NO: 223328 - DNA, 15 bp, Homo sapiens
ccttctccagccccc

SEQ ID NO: 223329 - DNA, 15 bp, Homo sapiens
cccttctccagcccc

SEQ ID NO: 223330 - DNA, 15 bp, Homo sapiens
tcccttctccagccc

SEQ ID NO: 223331 - DNA, 15 bp, Homo sapiens
ttcccttctccagcc

SEQ ID NO: 223332 - DNA, 15 bp, Homo sapiens
cttcccttctccagc

SEQ ID NO: 223333 - DNA, 15 bp, Homo sapiens
gcttcccttctccag

SEQ ID NO: 223334 - DNA, 15 bp, Homo sapiens
tgcttcccttctcca

SEQ ID NO: 223335 - DNA, 15 bp, Homo sapiens
ctgcttcccttctcc

SEQ ID NO: 223336 - DNA, 15 bp, Homo sapiens
gctgcttcccttctc

SEQ ID NO: 223337 - DNA, 15 bp, Homo sapiens
agctgcttcccttct

SEQ ID NO: 223338 - DNA, 15 bp, Homo sapiens
cagctgcttcccttc

SEQ ID NO: 223339 - DNA, 15 bp, Homo sapiens
tcagctgcttccctt

SEQ ID NO: 223340 - DNA, 15 bp, Homo sapiens
ctcagctgcttccct

SEQ ID NO: 223341 - DNA, 15 bp, Homo sapiens
cctcagctgcttccc

SEQ ID NO: 223342 - DNA, 15 bp, Homo sapiens
gcctcagctgcttcc

SEQ ID NO: 223343 - DNA, 15 bp, Homo sapiens
tgcctcagctgcttc

SEQ ID NO: 223344 - DNA, 15 bp, Homo sapiens
ttgcctcagctgctt

SEQ ID NO: 223345 - DNA, 15 bp, Homo sapiens
gttgcctcagctgct

SEQ ID NO: 223346 - DNA, 15 bp, Homo sapiens
tgttgcctcagctgc

SEQ ID NO: 223347 - DNA, 15 bp, Homo sapiens
gtgttgcctcagctg

SEQ ID NO: 223348 - DNA, 15 bp, Homo sapiens
tgtgttgcctcagct

SEQ ID NO: 223349 - DNA, 15 bp, Homo sapiens
ttgtgttgcctcagc

SEQ ID NO: 223350 - DNA, 15 bp, Homo sapiens
gttgtgttgcctcag

SEQ ID NO: 223351 - DNA, 15 bp, Homo sapiens
ggttgtgttgcctca

SEQ ID NO: 223352 - DNA, 15 bp, Homo sapiens
tggttgtgttgcctc

SEQ ID NO: 223353 - DNA, 15 bp, Homo sapiens
ctggttgtgttgcct

SEQ ID NO: 223354 - DNA, 15 bp, Homo sapiens
actggttgtgttgcc

SEQ ID NO: 223355 - DNA, 15 bp, Homo sapiens
aactggttgtgttgc

SEQ ID NO: 223356 - DNA, 15 bp, Homo sapiens
aaactggttgtgttg

SEQ ID NO: 223357 - DNA, 15 bp, Homo sapiens
gaaactggttgtgtt

SEQ ID NO: 223358 - DNA, 15 bp, Homo sapiens
ggaaactggttgtgt

SEQ ID NO: 223359 - DNA, 15 bp, Homo sapiens
aggaaactggttgtg

SEQ ID NO: 223360 - DNA, 15 bp, Homo sapiens
aaggaaactggttgt

SEQ ID NO: 223361 - DNA, 15 bp, Homo sapiens
gaaggaaactggttg

SEQ ID NO: 223362 - DNA, 15 bp, Homo sapiens
ggaaggaaactggtt

SEQ ID NO: 223363 - DNA, 15 bp, Homo sapiens
gggaaggaaactggt

SEQ ID NO: 223364 - DNA, 15 bp, Homo sapiens
tgggaaggaaactgg

SEQ ID NO: 223365 - DNA, 15 bp, Homo sapiens
atgggaaggaaactg

SEQ ID NO: 223366 - DNA, 15 bp, Homo sapiens
aatgggaaggaaact

SEQ ID NO: 223367 - DNA, 15 bp, Homo sapiens
gaatgggaaggaaac

SEQ ID NO: 223368 - DNA, 15 bp, Homo sapiens
tgaatgggaaggaaa

SEQ ID NO: 223369 - DNA, 15 bp, Homo sapiens
ctgaatgggaaggaa

SEQ ID NO: 223370 - DNA, 15 bp, Homo sapiens
tctgaatgggaagga

SEQ ID NO: 223371 - DNA, 15 bp, Homo sapiens
ttctgaatgggaagg

SEQ ID NO: 223372 - DNA, 15 bp, Homo sapiens
cttctgaatgggaag

SEQ ID NO: 223373 - DNA, 15 bp, Homo sapiens
tcttctgaatgggaa

SEQ ID NO: 223374 - DNA, 15 bp, Homo sapiens
ctcttctgaatggga

SEQ ID NO: 223375 - DNA, 15 bp, Homo sapiens
tctcttctgaatggg

SEQ ID NO: 223376 - DNA, 15 bp, Homo sapiens
ttctcttctgaatgg

SEQ ID NO: 223377 - DNA, 15 bp, Homo sapiens
gttctcttctgaatg

SEQ ID NO: 223378 - DNA, 15 bp, Homo sapiens
tgttctcttctgaat

SEQ ID NO: 223379 - DNA, 15 bp, Homo sapiens
ttgttctcttctgaa

SEQ ID NO: 223380 - DNA, 15 bp, Homo sapiens
attgttctcttctga

SEQ ID NO: 223381 - DNA, 15 bp, Homo sapiens
aattgttctcttctg

SEQ ID NO: 223382 - DNA, 15 bp, Homo sapiens
caattgttctcttct

SEQ ID NO: 223383 - DNA, 15 bp, Homo sapiens
tcaattgttctcttc

SEQ ID NO: 223384 - DNA, 15 bp, Homo sapiens
ctcaattgttctctt

SEQ ID NO: 223385 - DNA, 15 bp, Homo sapiens
gctcaattgttctct

SEQ ID NO: 223386 - DNA, 15 bp, Homo sapiens
agctcaattgttctc

SEQ ID NO: 223387 - DNA, 15 bp, Homo sapiens
gagctcaattgttct

SEQ ID NO: 223388 - DNA, 15 bp, Homo sapiens
ggagctcaattgttc

SEQ ID NO: 223389 - DNA, 15 bp, Homo sapiens
aggagctcaattgtt

SEQ ID NO: 223390 - DNA, 15 bp, Homo sapiens
gaggagctcaattgt

SEQ ID NO: 223391 - DNA, 15 bp, Homo sapiens
ggaggagctcaattg

SEQ ID NO: 223392 - DNA, 15 bp, Homo sapiens
gggaggagctcaatt

SEQ ID NO: 223393 - DNA, 15 bp, Homo sapiens
tgggaggagctcaat

SEQ ID NO: 223394 - DNA, 15 bp, Homo sapiens
ctgggaggagctcaa

SEQ ID NO: 223395 - DNA, 15 bp, Homo sapiens
cctgggaggagctca

SEQ ID NO: 223396 - DNA, 15 bp, Homo sapiens
ccctgggaggagctc

SEQ ID NO: 223397 - DNA, 15 bp, Homo sapiens
cccctgggaggagct

SEQ ID NO: 223398 - DNA, 15 bp, Homo sapiens
tcccctgggaggagc

SEQ ID NO: 223399 - DNA, 15 bp, Homo sapiens
ttcccctgggaggag

SEQ ID NO: 223400 - DNA, 15 bp, Homo sapiens
cttcccctgggagga

SEQ ID NO: 223401 - DNA, 15 bp, Homo sapiens
gcttcccctgggagg

SEQ ID NO: 223402 - DNA, 15 bp, Homo sapiens
ggcttcccctgggag

SEQ ID NO: 223403 - DNA, 15 bp, Homo sapiens
tggcttcccctggga

SEQ ID NO: 223404 - DNA, 15 bp, Homo sapiens
atggcttcccctggg

SEQ ID NO: 223405 - DNA, 15 bp, Homo sapiens
catggcttcccctgg

SEQ ID NO: 223406 - DNA, 15 bp, Homo sapiens
gcatggcttcccctg

SEQ ID NO: 223407 - DNA, 15 bp, Homo sapiens
cgcatggcttcccct

SEQ ID NO: 223408 - DNA, 15 bp, Homo sapiens
ccgcatggcttcccc

SEQ ID NO: 223409 - DNA, 15 bp, Homo sapiens
tccgcatggcttccc

SEQ ID NO: 223410 - DNA, 15 bp, Homo sapiens
atccgcatggcttcc

SEQ ID NO: 223411 - DNA, 15 bp, Homo sapiens
aatccgcatggcttc

SEQ ID NO: 223412 - DNA, 15 bp, Homo sapiens
aaatccgcatggctt

SEQ ID NO: 223413 - DNA, 15 bp, Homo sapiens
caaatccgcatggct

SEQ ID NO: 223414 - DNA, 15 bp, Homo sapiens
ccaaatccgcatggc

SEQ ID NO: 223415 - DNA, 15 bp, Homo sapiens
tccaaatccgcatgg

SEQ ID NO: 223416 - DNA, 15 bp, Homo sapiens
gtccaaatccgcatg

SEQ ID NO: 223417 - DNA, 15 bp, Homo sapiens
tgtccaaatccgcat

SEQ ID NO: 223418 - DNA, 15 bp, Homo sapiens
ctgtccaaatccgca

SEQ ID NO: 223419 - DNA, 15 bp, Homo sapiens
actgtccaaatccgc

SEQ ID NO: 223420 - DNA, 15 bp, Homo sapiens
cactgtccaaatccg

SEQ ID NO: 223421 - DNA, 15 bp, Homo sapiens
acactgtccaaatcc

SEQ ID NO: 223422 - DNA, 15 bp, Homo sapiens
cacactgtccaaatc

SEQ ID NO: 223423 - DNA, 15 bp, Homo sapiens
ccacactgtccaaat

SEQ ID NO: 223424 - DNA, 15 bp, Homo sapiens
cccacactgtccaaa

SEQ ID NO: 223425 - DNA, 15 bp, Homo sapiens
ccccacactgtccaa

SEQ ID NO: 223426 - DNA, 15 bp, Homo sapiens
accccacactgtcca

SEQ ID NO: 223427 - DNA, 15 bp, Homo sapiens
gaccccacactgtcc

SEQ ID NO: 223428 - DNA, 15 bp, Homo sapiens
agaccccacactgtc

SEQ ID NO: 223429 - DNA, 15 bp, Homo sapiens
cagaccccacactgt

SEQ ID NO: 223430 - DNA, 15 bp, Homo sapiens
acagaccccacactg

SEQ ID NO: 223431 - DNA, 15 bp, Homo sapiens
gacagaccccacact

SEQ ID NO: 223432 - DNA, 15 bp, Homo sapiens
agacagaccccacac

SEQ ID NO: 223433 - DNA, 15 bp, Homo sapiens
aagacagaccccaca

SEQ ID NO: 223434 - DNA, 15 bp, Homo sapiens
taagacagaccccac

SEQ ID NO: 223435 - DNA, 15 bp, Homo sapiens
ataagacagacccca

SEQ ID NO: 223436 - DNA, 15 bp, Homo sapiens
cataagacagacccc

SEQ ID NO: 223437 - DNA, 15 bp, Homo sapiens
tcataagacagaccc

SEQ ID NO: 223438 - DNA, 15 bp, Homo sapiens
gtcataagacagacc

SEQ ID NO: 223439 - DNA, 15 bp, Homo sapiens
tgtcataagacagac

SEQ ID NO: 223440 - DNA, 15 bp, Homo sapiens
ctgtcataagacaga

SEQ ID NO: 223441 - DNA, 15 bp, Homo sapiens
cctgtcataagacag

SEQ ID NO: 223442 - DNA, 15 bp, Homo sapiens
tcctgtcataagaca

SEQ ID NO: 223443 - DNA, 15 bp, Homo sapiens
ttcctgtcataagac

SEQ ID NO: 223444 - DNA, 15 bp, Homo sapiens
attcctgtcataaga

SEQ ID NO: 223445 - DNA, 15 bp, Homo sapiens
cattcctgtcataag

SEQ ID NO: 223446 - DNA, 15 bp, Homo sapiens
ccattcctgtcataa

SEQ ID NO: 223447 - DNA, 15 bp, Homo sapiens
tccattcctgtcata

SEQ ID NO: 223448 - DNA, 15 bp, Homo sapiens
ctccattcctgtcat

SEQ ID NO: 223449 - DNA, 15 bp, Homo sapiens
cctccattcctgtca

SEQ ID NO: 223450 - DNA, 15 bp, Homo sapiens
tcctccattcctgtc

SEQ ID NO: 223451 - DNA, 15 bp, Homo sapiens
atcctccattcctgt

SEQ ID NO: 223452 - DNA, 15 bp, Homo sapiens
aatcctccattcctg

SEQ ID NO: 223453 - DNA, 15 bp, Homo sapiens
aaatcctccattcct

SEQ ID NO: 223454 - DNA, 15 bp, Homo sapiens
gaaatcctccattcc

SEQ ID NO: 223455 - DNA, 15 bp, Homo sapiens
agaaatcctccattc

SEQ ID NO: 223456 - DNA, 15 bp, Homo sapiens
cagaaatcctccatt

SEQ ID NO: 223457 - DNA, 15 bp, Homo sapiens
acagaaatcctccat

SEQ ID NO: 223458 - DNA, 15 bp, Homo sapiens
tacagaaatcctcca

SEQ ID NO: 223459 - DNA, 15 bp, Homo sapiens
ctacagaaatcctcc

SEQ ID NO: 223460 - DNA, 15 bp, Homo sapiens
tctacagaaatcctc

SEQ ID NO: 223461 - DNA, 15 bp, Homo sapiens
ttctacagaaatcct

SEQ ID NO: 223462 - DNA, 15 bp, Homo sapiens
attctacagaaatcc

SEQ ID NO: 223463 - DNA, 15 bp, Homo sapiens
cattctacagaaatc

SEQ ID NO: 223464 - DNA, 15 bp, Homo sapiens
ccattctacagaaat

SEQ ID NO: 223465 - DNA, 15 bp, Homo sapiens
cccattctacagaaa

SEQ ID NO: 223466 - DNA, 15 bp, Homo sapiens
ccccattctacagaa

SEQ ID NO: 223467 - DNA, 15 bp, Homo sapiens
tccccattctacaga

SEQ ID NO: 223468 - DNA, 15 bp, Homo sapiens
atccccattctacag

SEQ ID NO: 223469 - DNA, 15 bp, Homo sapiens
catccccattctaca

SEQ ID NO: 223470 - DNA, 15 bp, Homo sapiens
gcatccccattctac

SEQ ID NO: 223471 - DNA, 15 bp, Homo sapiens
agcatccccattcta

SEQ ID NO: 223472 - DNA, 15 bp, Homo sapiens
aagcatccccattct

SEQ ID NO: 223473 - DNA, 15 bp, Homo sapiens
taagcatccccattc

SEQ ID NO: 223474 - DNA, 15 bp, Homo sapiens
ctaagcatccccatt

SEQ ID NO: 223475 - DNA, 15 bp, Homo sapiens
gctaagcatccccat

SEQ ID NO: 223476 - DNA, 15 bp, Homo sapiens
cgctaagcatcccca

SEQ ID NO: 223477 - DNA, 15 bp, Homo sapiens
ccgctaagcatcccc

SEQ ID NO: 223478 - DNA, 15 bp, Homo sapiens
gccgctaagcatccc

SEQ ID NO: 223479 - DNA, 15 bp, Homo sapiens
ggccgctaagcatcc

SEQ ID NO: 223480 - DNA, 15 bp, Homo sapiens
cggccgctaagcatc

SEQ ID NO: 223481 - DNA, 15 bp, Homo sapiens
acggccgctaagcat

SEQ ID NO: 223482 - DNA, 15 bp, Homo sapiens
tacggccgctaagca

SEQ ID NO: 223483 - DNA, 15 bp, Homo sapiens
ttacggccgctaagc

SEQ ID NO: 223484 - DNA, 15 bp, Homo sapiens
cttacggccgctaag

SEQ ID NO: 223485 - DNA, 15 bp, Homo sapiens
tcttacggccgctaa

SEQ ID NO: 223486 - DNA, 15 bp, Homo sapiens
ttcttacggccgcta

SEQ ID NO: 223487 - DNA, 15 bp, Homo sapiens
attcttacggccgct

SEQ ID NO: 223488 - DNA, 15 bp, Homo sapiens
gattcttacggccgc

SEQ ID NO: 223489 - DNA, 15 bp, Homo sapiens
tgattcttacggccg

SEQ ID NO: 223490 - DNA, 15 bp, Homo sapiens
ttgattcttacggcc

SEQ ID NO: 223491 - DNA, 15 bp, Homo sapiens
tttgattcttacggc

SEQ ID NO: 223492 - DNA, 15 bp, Homo sapiens
ctttgattcttacgg

SEQ ID NO: 223493 - DNA, 15 bp, Homo sapiens
tctttgattcttacg

SEQ ID NO: 223494 - DNA, 15 bp, Homo sapiens
atctttgattcttac

SEQ ID NO: 223495 - DNA, 15 bp, Homo sapiens
catctttgattctta

SEQ ID NO: 223496 - DNA, 15 bp, Homo sapiens
ccatctttgattctt

SEQ ID NO: 223497 - DNA, 15 bp, Homo sapiens
tccatctttgattct

SEQ ID NO: 223498 - DNA, 15 bp, Homo sapiens
ttccatctttgattc

SEQ ID NO: 223499 - DNA, 15 bp, Homo sapiens
cttccatctttgatt

SEQ ID NO: 223500 - DNA, 15 bp, Homo sapiens
ccttccatctttgat

SEQ ID NO: 223501 - DNA, 15 bp, Homo sapiens
tccttccatctttga

SEQ ID NO: 223502 - DNA, 15 bp, Homo sapiens
ttccttccatctttg

SEQ ID NO: 223503 - DNA, 15 bp, Homo sapiens
tttccttccatcttt

SEQ ID NO: 223504 - DNA, 15 bp, Homo sapiens
ctttccttccatctt

SEQ ID NO: 223505 - DNA, 15 bp, Homo sapiens
gctttccttccatct

SEQ ID NO: 223506 - DNA, 15 bp, Homo sapiens
ggctttccttccatc

SEQ ID NO: 223507 - DNA, 15 bp, Homo sapiens
tggctttccttccat

SEQ ID NO: 223508 - DNA, 15 bp, Homo sapiens
ttggctttccttcca

SEQ ID NO: 223509 - DNA, 15 bp, Homo sapiens
cttggctttccttcc

SEQ ID NO: 223510 - DNA, 15 bp, Homo sapiens
tcttggctttccttc

SEQ ID NO: 223511 - DNA, 15 bp, Homo sapiens
ctcttggctttcctt

SEQ ID NO: 223512 - DNA, 15 bp, Homo sapiens
cctcttggctttcct

SEQ ID NO: 223513 - DNA, 15 bp, Homo sapiens
acctcttggctttcc

SEQ ID NO: 223514 - DNA, 15 bp, Homo sapiens
gacctcttggctttc

SEQ ID NO: 223515 - DNA, 15 bp, Homo sapiens
ggacctcttggcttt

SEQ ID NO: 223516 - DNA, 15 bp, Homo sapiens
aggacctcttggctt

SEQ ID NO: 223517 - DNA, 15 bp, Homo sapiens
aaggacctcttggct

SEQ ID NO: 223518 - DNA, 15 bp, Homo sapiens
taaggacctcttggc

SEQ ID NO: 223519 - DNA, 15 bp, Homo sapiens
ctaaggacctcttgg

SEQ ID NO: 223520 - DNA, 15 bp, Homo sapiens
cctaaggacctcttg

SEQ ID NO: 223521 - DNA, 15 bp, Homo sapiens
acctaaggacctctt

SEQ ID NO: 223522 - DNA, 15 bp, Homo sapiens
gacctaaggacctct

SEQ ID NO: 223523 - DNA, 15 bp, Homo sapiens
ggacctaaggacctc

SEQ ID NO: 223524 - DNA, 15 bp, Homo sapiens
cggacctaaggacct

SEQ ID NO: 223525 - DNA, 15 bp, Homo sapiens
ccggacctaaggacc

SEQ ID NO: 223526 - DNA, 15 bp, Homo sapiens
accggacctaaggac

SEQ ID NO: 223527 - DNA, 15 bp, Homo sapiens
gaccggacctaagga

SEQ ID NO: 223528 - DNA, 15 bp, Homo sapiens
ggaccggacctaagg

SEQ ID NO: 223529 - DNA, 15 bp, Homo sapiens
gggaccggacctaag

SEQ ID NO: 223530 - DNA, 15 bp, Homo sapiens
agggaccggacctaa

SEQ ID NO: 223531 - DNA, 15 bp, Homo sapiens
aagggaccggaccta

SEQ ID NO: 223532 - DNA, 15 bp, Homo sapiens
caagggaccggacct

SEQ ID NO: 223533 - DNA, 15 bp, Homo sapiens
gcaagggaccggacc

SEQ ID NO: 223534 - DNA, 15 bp, Homo sapiens
ggcaagggaccggac

SEQ ID NO: 223535 - DNA, 15 bp, Homo sapiens
aggcaagggaccgga

SEQ ID NO: 223536 - DNA, 15 bp, Homo sapiens
gaggcaagggaccgg

SEQ ID NO: 223537 - DNA, 15 bp, Homo sapiens
agaggcaagggaccg

SEQ ID NO: 223538 - DNA, 15 bp, Homo sapiens
tagaggcaagggacc

SEQ ID NO: 223539 - DNA, 15 bp, Homo sapiens
ctagaggcaagggac

SEQ ID NO: 223540 - DNA, 15 bp, Homo sapiens
gctagaggcaaggga

SEQ ID NO: 223541 - DNA, 15 bp, Homo sapiens
agctagaggcaaggg

SEQ ID NO: 223542 - DNA, 15 bp, Homo sapiens
tagctagaggcaagg

SEQ ID NO: 223543 - DNA, 15 bp, Homo sapiens
ttagctagaggcaag

SEQ ID NO: 223544 - DNA, 15 bp, Homo sapiens
cttagctagaggcaa

SEQ ID NO: 223545 - DNA, 15 bp, Homo sapiens
gcttagctagaggca

SEQ ID NO: 223546 - DNA, 15 bp, Homo sapiens
ggcttagctagaggc

SEQ ID NO: 223547 - DNA, 15 bp, Homo sapiens
aggcttagctagagg

SEQ ID NO: 223548 - DNA, 15 bp, Homo sapiens
aaggcttagctagag

SEQ ID NO: 223549 - DNA, 15 bp, Homo sapiens
gaaggcttagctaga

SEQ ID NO: 223550 - DNA, 15 bp, Homo sapiens
ggaaggcttagctag

SEQ ID NO: 223551 - DNA, 15 bp, Homo sapiens
tggaaggcttagcta

SEQ ID NO: 223552 - DNA, 15 bp, Homo sapiens
ttggaaggcttagct

SEQ ID NO: 223553 - DNA, 15 bp, Homo sapiens
cttggaaggcttagc

SEQ ID NO: 223554 - DNA, 15 bp, Homo sapiens
ccttggaaggcttag

SEQ ID NO: 223555 - DNA, 15 bp, Homo sapiens
gccttggaaggctta

SEQ ID NO: 223556 - DNA, 15 bp, Homo sapiens
tgccttggaaggctt

SEQ ID NO: 223557 - DNA, 15 bp, Homo sapiens
ctgccttggaaggct

SEQ ID NO: 223558 - DNA, 15 bp, Homo sapiens
tctgccttggaaggc

SEQ ID NO: 223559 - DNA, 15 bp, Homo sapiens
atctgccttggaagg

SEQ ID NO: 223560 - DNA, 15 bp, Homo sapiens
catctgccttggaag

SEQ ID NO: 223561 - DNA, 15 bp, Homo sapiens
ccatctgccttggaa

SEQ ID NO: 223562 - DNA, 15 bp, Homo sapiens
accatctgccttgga

SEQ ID NO: 223563 - DNA, 15 bp, Homo sapiens
aaccatctgccttgg

SEQ ID NO: 223564 - DNA, 15 bp, Homo sapiens
caaccatctgccttg

SEQ ID NO: 223565 - DNA, 15 bp, Homo sapiens
acaaccatctgcctt

SEQ ID NO: 223566 - DNA, 15 bp, Homo sapiens
gacaaccatctgcct

SEQ ID NO: 223567 - DNA, 15 bp, Homo sapiens
tgacaaccatctgcc

SEQ ID NO: 223568 - DNA, 15 bp, Homo sapiens
atgacaaccatctgc

SEQ ID NO: 223569 - DNA, 15 bp, Homo sapiens
gatgacaaccatctg

SEQ ID NO: 223570 - DNA, 15 bp, Homo sapiens
ggatgacaaccatct

SEQ ID NO: 223571 - DNA, 15 bp, Homo sapiens
aggatgacaaccatc

SEQ ID NO: 223572 - DNA, 15 bp, Homo sapiens
taggatgacaaccat

SEQ ID NO: 223573 - DNA, 15 bp, Homo sapiens
gtaggatgacaacca

SEQ ID NO: 223574 - DNA, 15 bp, Homo sapiens
tgtaggatgacaacc

SEQ ID NO: 223575 - DNA, 15 bp, Homo sapiens
atgtaggatgacaac

SEQ ID NO: 223576 - DNA, 15 bp, Homo sapiens
aatgtaggatgacaa

SEQ ID NO: 223577 - DNA, 15 bp, Homo sapiens
aaatgtaggatgaca

SEQ ID NO: 223578 - DNA, 15 bp, Homo sapiens
taaatgtaggatgac

SEQ ID NO: 223579 - DNA, 15 bp, Homo sapiens
ttaaatgtaggatga

SEQ ID NO: 223580 - DNA, 15 bp, Homo sapiens
tttaaatgtaggatg

SEQ ID NO: 223581 - DNA, 15 bp, Homo sapiens
ctttaaatgtaggat

SEQ ID NO: 223582 - DNA, 15 bp, Homo sapiens
tctttaaatgtagga

SEQ ID NO: 223583 - DNA, 15 bp, Homo sapiens
atctttaaatgtagg

SEQ ID NO: 223584 - DNA, 15 bp, Homo sapiens
gatctttaaatgtag

SEQ ID NO: 223585 - DNA, 15 bp, Homo sapiens
agatctttaaatgta

SEQ ID NO: 223586 - DNA, 15 bp, Homo sapiens
gagatctttaaatgt

SEQ ID NO: 223587 - DNA, 15 bp, Homo sapiens
ggagatctttaaatg

SEQ ID NO: 223588 - DNA, 15 bp, Homo sapiens
tggagatctttaaat

SEQ ID NO: 223589 - DNA, 15 bp, Homo sapiens
ctggagatctttaaa

SEQ ID NO: 223590 - DNA, 15 bp, Homo sapiens
tctggagatctttaa

SEQ ID NO: 223591 - DNA, 15 bp, Homo sapiens
ctctggagatcttta

SEQ ID NO: 223592 - DNA, 15 bp, Homo sapiens
actctggagatcttt

SEQ ID NO: 223593 - DNA, 15 bp, Homo sapiens
tactctggagatctt

SEQ ID NO: 223594 - DNA, 15 bp, Homo sapiens
ctactctggagatct

SEQ ID NO: 223595 - DNA, 15 bp, Homo sapiens
gctactctggagatc

SEQ ID NO: 223596 - DNA, 15 bp, Homo sapiens
tgctactctggagat

SEQ ID NO: 223597 - DNA, 15 bp, Homo sapiens
ttgctactctggaga

SEQ ID NO: 223598 - DNA, 15 bp, Homo sapiens
attgctactctggag

SEQ ID NO: 223599 - DNA, 15 bp, Homo sapiens
aattgctactctgga

SEQ ID NO: 223600 - DNA, 15 bp, Homo sapiens
caattgctactctgg

SEQ ID NO: 223601 - DNA, 15 bp, Homo sapiens
gcaattgctactctg

SEQ ID NO: 223602 - DNA, 15 bp, Homo sapiens
agcaattgctactct

SEQ ID NO: 223603 - DNA, 15 bp, Homo sapiens
gagcaattgctactc

SEQ ID NO: 223604 - DNA, 15 bp, Homo sapiens
tgagcaattgctact

SEQ ID NO: 223605 - DNA, 15 bp, Homo sapiens
ctgagcaattgctac

SEQ ID NO: 223606 - DNA, 15 bp, Homo sapiens
gctgagcaattgcta

SEQ ID NO: 223607 - DNA, 15 bp, Homo sapiens
agctgagcaattgct

SEQ ID NO: 223608 - DNA, 15 bp, Homo sapiens
aagctgagcaattgc

SEQ ID NO: 223609 - DNA, 15 bp, Homo sapiens
gaagctgagcaattg

SEQ ID NO: 223610 - DNA, 15 bp, Homo sapiens
ggaagctgagcaatt

SEQ ID NO: 223611 - DNA, 15 bp, Homo sapiens
gggaagctgagcaat

SEQ ID NO: 223612 - DNA, 15 bp, Homo sapiens
tgggaagctgagcaa

SEQ ID NO: 223613 - DNA, 15 bp, Homo sapiens
gtgggaagctgagca

SEQ ID NO: 223614 - DNA, 15 bp, Homo sapiens
tgtgggaagctgagc

SEQ ID NO: 223615 - DNA, 15 bp, Homo sapiens
ctgtgggaagctgag

SEQ ID NO: 223616 - DNA, 15 bp, Homo sapiens
gctgtgggaagctga

SEQ ID NO: 223617 - DNA, 15 bp, Homo sapiens
cgctgtgggaagctg

SEQ ID NO: 223618 - DNA, 15 bp, Homo sapiens
gcgctgtgggaagct

SEQ ID NO: 223619 - DNA, 15 bp, Homo sapiens
ggcgctgtgggaagc

SEQ ID NO: 223620 - DNA, 15 bp, Homo sapiens
aggcgctgtgggaag

SEQ ID NO: 223621 - DNA, 15 bp, Homo sapiens
caggcgctgtgggaa

SEQ ID NO: 223622 - DNA, 15 bp, Homo sapiens
ccaggcgctgtggga

SEQ ID NO: 223623 - DNA, 15 bp, Homo sapiens
cccaggcgctgtggg

SEQ ID NO: 223624 - DNA, 15 bp, Homo sapiens
ccccaggcgctgtgg

SEQ ID NO: 223625 - DNA, 15 bp, Homo sapiens
accccaggcgctgtg

SEQ ID NO: 223626 - DNA, 15 bp, Homo sapiens
gaccccaggcgctgt

SEQ ID NO: 223627 - DNA, 15 bp, Homo sapiens
tgaccccaggcgctg

SEQ ID NO: 223628 - DNA, 15 bp, Homo sapiens
ctgaccccaggcgct

SEQ ID NO: 223629 - DNA, 15 bp, Homo sapiens
gctgaccccaggcgc

SEQ ID NO: 223630 - DNA, 15 bp, Homo sapiens
tgctgaccccaggcg

SEQ ID NO: 223631 - DNA, 15 bp, Homo sapiens
ttgctgaccccaggc

SEQ ID NO: 223632 - DNA, 15 bp, Homo sapiens
cttgctgaccccagg

SEQ ID NO: 223633 - DNA, 15 bp, Homo sapiens
acttgctgaccccag

SEQ ID NO: 223634 - DNA, 15 bp, Homo sapiens
aacttgctgacccca

SEQ ID NO: 223635 - DNA, 15 bp, Homo sapiens
aaacttgctgacccc

SEQ ID NO: 223636 - DNA, 15 bp, Homo sapiens
gaaacttgctgaccc

SEQ ID NO: 223637 - DNA, 15 bp, Homo sapiens
ggaaacttgctgacc

SEQ ID NO: 223638 - DNA, 15 bp, Homo sapiens
gggaaacttgctgac

SEQ ID NO: 223639 - DNA, 15 bp, Homo sapiens
ggggaaacttgctga

SEQ ID NO: 223640 - DNA, 15 bp, Homo sapiens
aggggaaacttgctg

SEQ ID NO: 223641 - DNA, 15 bp, Homo sapiens
aaggggaaacttgct

SEQ ID NO: 223642 - DNA, 15 bp, Homo sapiens
taaggggaaacttgc

SEQ ID NO: 223643 - DNA, 15 bp, Homo sapiens
ataaggggaaacttg

SEQ ID NO: 223644 - DNA, 15 bp, Homo sapiens
tataaggggaaactt

SEQ ID NO: 223645 - DNA, 15 bp, Homo sapiens
ttataaggggaaact

SEQ ID NO: 223646 - DNA, 15 bp, Homo sapiens
attataaggggaaac

SEQ ID NO: 223647 - DNA, 15 bp, Homo sapiens
gattataaggggaaa

SEQ ID NO: 223648 - DNA, 15 bp, Homo sapiens
tgattataaggggaa

SEQ ID NO: 223649 - DNA, 15 bp, Homo sapiens
ttgattataagggga

SEQ ID NO: 223650 - DNA, 15 bp, Homo sapiens
cttgattataagggg

SEQ ID NO: 223651 - DNA, 15 bp, Homo sapiens
tcttgattataaggg

SEQ ID NO: 223652 - DNA, 15 bp, Homo sapiens
ttcttgattataagg

SEQ ID NO: 223653 - DNA, 15 bp, Homo sapiens
tttcttgattataag

SEQ ID NO: 223654 - DNA, 15 bp, Homo sapiens
atttcttgattataa

SEQ ID NO: 223655 - DNA, 15 bp, Homo sapiens
aatttcttgattata

SEQ ID NO: 223656 - DNA, 15 bp, Homo sapiens
gaatttcttgattat

SEQ ID NO: 223657 - DNA, 15 bp, Homo sapiens
agaatttcttgatta

SEQ ID NO: 223658 - DNA, 15 bp, Homo sapiens
aagaatttcttgatt

SEQ ID NO: 223659 - DNA, 15 bp, Homo sapiens
gaagaatttcttgat

SEQ ID NO: 223660 - DNA, 15 bp, Homo sapiens
ggaagaatttcttga

SEQ ID NO: 223661 - DNA, 15 bp, Homo sapiens
gggaagaatttcttg

SEQ ID NO: 223662 - DNA, 15 bp, Homo sapiens
cgggaagaatttctt

SEQ ID NO: 223663 - DNA, 15 bp, Homo sapiens
tcgggaagaatttct

SEQ ID NO: 223664 - DNA, 15 bp, Homo sapiens
atcgggaagaatttc

SEQ ID NO: 223665 - DNA, 15 bp, Homo sapiens
catcgggaagaattt

SEQ ID NO: 223666 - DNA, 15 bp, Homo sapiens
acatcgggaagaatt

SEQ ID NO: 223667 - DNA, 15 bp, Homo sapiens
aacatcgggaagaat

SEQ ID NO: 223668 - DNA, 15 bp, Homo sapiens
aaacatcgggaagaa

SEQ ID NO: 223669 - DNA, 15 bp, Homo sapiens
taaacatcgggaaga

SEQ ID NO: 223670 - DNA, 15 bp, Homo sapiens
ttaaacatcgggaag

SEQ ID NO: 223671 - DNA, 15 bp, Homo sapiens
cttaaacatcgggaa

SEQ ID NO: 223672 - DNA, 15 bp, Homo sapiens
acttaaacatcggga

SEQ ID NO: 223673 - DNA, 15 bp, Homo sapiens
cacttaaacatcggg

SEQ ID NO: 223674 - DNA, 15 bp, Homo sapiens
ccacttaaacatcgg

SEQ ID NO: 223675 - DNA, 15 bp, Homo sapiens
tccacttaaacatcg

SEQ ID NO: 223676 - DNA, 15 bp, Homo sapiens
ttccacttaaacatc

SEQ ID NO: 223677 - DNA, 15 bp, Homo sapiens
tttccacttaaacat

SEQ ID NO: 223678 - DNA, 15 bp, Homo sapiens
atttccacttaaaca

SEQ ID NO: 223679 - DNA, 15 bp, Homo sapiens
catttccacttaaac

SEQ ID NO: 223680 - DNA, 15 bp, Homo sapiens
gcatttccacttaaa

SEQ ID NO: 223681 - DNA, 15 bp, Homo sapiens
agcatttccacttaa

SEQ ID NO: 223682 - DNA, 15 bp, Homo sapiens
aagcatttccactta

SEQ ID NO: 223683 - DNA, 15 bp, Homo sapiens
gaagcatttccactt

SEQ ID NO: 223684 - DNA, 15 bp, Homo sapiens
ggaagcatttccact

SEQ ID NO: 223685 - DNA, 15 bp, Homo sapiens
tggaagcatttccac

SEQ ID NO: 223686 - DNA, 15 bp, Homo sapiens
ttggaagcatttcca

SEQ ID NO: 223687 - DNA, 15 bp, Homo sapiens
attggaagcatttcc

SEQ ID NO: 223688 - DNA, 15 bp, Homo sapiens
cattggaagcatttc

SEQ ID NO: 223689 - DNA, 15 bp, Homo sapiens
acattggaagcattt

SEQ ID NO: 223690 - DNA, 15 bp, Homo sapiens
cacattggaagcatt

SEQ ID NO: 223691 - DNA, 15 bp, Homo sapiens
ccacattggaagcat

SEQ ID NO: 223692 - DNA, 15 bp, Homo sapiens
gccacattggaagca

SEQ ID NO: 223693 - DNA, 15 bp, Homo sapiens
ggccacattggaagc

SEQ ID NO: 223694 - DNA, 15 bp, Homo sapiens
gggccacattggaag

SEQ ID NO: 223695 - DNA, 15 bp, Homo sapiens
cgggccacattggaa

SEQ ID NO: 223696 - DNA, 15 bp, Homo sapiens
tcgggccacattgga

SEQ ID NO: 223697 - DNA, 15 bp, Homo sapiens
ctcgggccacattgg

SEQ ID NO: 223698 - DNA, 15 bp, Homo sapiens
actcgggccacattg

SEQ ID NO: 223699 - DNA, 15 bp, Homo sapiens
gactcgggccacatt

SEQ ID NO: 223700 - DNA, 15 bp, Homo sapiens
agactcgggccacat

SEQ ID NO: 223701 - DNA, 15 bp, Homo sapiens
cagactcgggccaca

SEQ ID NO: 223702 - DNA, 15 bp, Homo sapiens
acagactcgggccac

SEQ ID NO: 223703 - DNA, 15 bp, Homo sapiens
aacagactcgggcca

SEQ ID NO: 223704 - DNA, 15 bp, Homo sapiens
aaacagactcgggcc

SEQ ID NO: 223705 - DNA, 15 bp, Homo sapiens
taaacagactcgggc

SEQ ID NO: 223706 - DNA, 15 bp, Homo sapiens
gtaaacagactcggg

SEQ ID NO: 223707 - DNA, 15 bp, Homo sapiens
ggtaaacagactcgg

SEQ ID NO: 223708 - DNA, 15 bp, Homo sapiens
gggtaaacagactcg

SEQ ID NO: 223709 - DNA, 15 bp, Homo sapiens
agggtaaacagactc

SEQ ID NO: 223710 - DNA, 15 bp, Homo sapiens
aagggtaaacagact

SEQ ID NO: 223711 - DNA, 15 bp, Homo sapiens
caagggtaaacagac

SEQ ID NO: 223712 - DNA, 15 bp, Homo sapiens
acaagggtaaacaga

SEQ ID NO: 223713 - DNA, 15 bp, Homo sapiens
gacaagggtaaacag

SEQ ID NO: 223714 - DNA, 15 bp, Homo sapiens
agacaagggtaaaca

SEQ ID NO: 223715 - DNA, 15 bp, Homo sapiens
tagacaagggtaaac

SEQ ID NO: 223716 - DNA, 15 bp, Homo sapiens
ctagacaagggtaaa

SEQ ID NO: 223717 - DNA, 15 bp, Homo sapiens
actagacaagggtaa

SEQ ID NO: 223718 - DNA, 15 bp, Homo sapiens
gactagacaagggta

SEQ ID NO: 223719 - DNA, 15 bp, Homo sapiens
ggactagacaagggt

SEQ ID NO: 223720 - DNA, 15 bp, Homo sapiens
aggactagacaaggg

SEQ ID NO: 223721 - DNA, 15 bp, Homo sapiens
gaggactagacaagg

SEQ ID NO: 223722 - DNA, 15 bp, Homo sapiens
tgaggactagacaag

SEQ ID NO: 223723 - DNA, 15 bp, Homo sapiens
ctgaggactagacaa

SEQ ID NO: 223724 - DNA, 15 bp, Homo sapiens
tctgaggactagaca

SEQ ID NO: 223725 - DNA, 15 bp, Homo sapiens
ttctgaggactagac

SEQ ID NO: 223726 - DNA, 15 bp, Homo sapiens
cttctgaggactaga

SEQ ID NO: 223727 - DNA, 15 bp, Homo sapiens
tcttctgaggactag

SEQ ID NO: 223728 - DNA, 15 bp, Homo sapiens
ctcttctgaggacta

SEQ ID NO: 223729 - DNA, 15 bp, Homo sapiens
tctcttctgaggact

SEQ ID NO: 223730 - DNA, 15 bp, Homo sapiens
atctcttctgaggac

SEQ ID NO: 223731 - DNA, 15 bp, Homo sapiens
catctcttctgagga

SEQ ID NO: 223732 - DNA, 15 bp, Homo sapiens
tcatctcttctgagg

SEQ ID NO: 223733 - DNA, 15 bp, Homo sapiens
ctcatctcttctgag

SEQ ID NO: 223734 - DNA, 15 bp, Homo sapiens
cctcatctcttctga

SEQ ID NO: 223735 - DNA, 15 bp, Homo sapiens
tcctcatctcttctg

SEQ ID NO: 223736 - DNA, 15 bp, Homo sapiens
ttcctcatctcttct

SEQ ID NO: 223737 - DNA, 15 bp, Homo sapiens
attcctcatctcttc

SEQ ID NO: 223738 - DNA, 15 bp, Homo sapiens
tattcctcatctctt

SEQ ID NO: 223739 - DNA, 15 bp, Homo sapiens
ttattcctcatctct

SEQ ID NO: 223740 - DNA, 15 bp, Homo sapiens
attattcctcatctc

SEQ ID NO: 223741 - DNA, 15 bp, Homo sapiens
gattattcctcatct

SEQ ID NO: 223742 - DNA, 15 bp, Homo sapiens
agattattcctcatc

SEQ ID NO: 223743 - DNA, 15 bp, Homo sapiens
aagattattcctcat

SEQ ID NO: 223744 - DNA, 15 bp, Homo sapiens
gaagattattcctca

SEQ ID NO: 223745 - DNA, 15 bp, Homo sapiens
agaagattattcctc

SEQ ID NO: 223746 - DNA, 15 bp, Homo sapiens
cagaagattattcct

SEQ ID NO: 223747 - DNA, 15 bp, Homo sapiens
acagaagattattcc

SEQ ID NO: 223748 - DNA, 15 bp, Homo sapiens
cacagaagattattc

SEQ ID NO: 223749 - DNA, 15 bp, Homo sapiens
acacagaagattatt

SEQ ID NO: 223750 - DNA, 15 bp, Homo sapiens
tacacagaagattat

SEQ ID NO: 223751 - DNA, 15 bp, Homo sapiens
ttacacagaagatta

SEQ ID NO: 223752 - DNA, 15 bp, Homo sapiens
attacacagaagatt

SEQ ID NO: 223753 - DNA, 15 bp, Homo sapiens
tattacacagaagat

SEQ ID NO: 223754 - DNA, 15 bp, Homo sapiens
ttattacacagaaga

SEQ ID NO: 223755 - DNA, 15 bp, Homo sapiens
attattacacagaag

SEQ ID NO: 223756 - DNA, 15 bp, Homo sapiens
gattattacacagaa

SEQ ID NO: 223757 - DNA, 15 bp, Homo sapiens
tgattattacacaga

SEQ ID NO: 223758 - DNA, 15 bp, Homo sapiens
gtgattattacacag

SEQ ID NO: 223759 - DNA, 15 bp, Homo sapiens
agtgattattacaca

SEQ ID NO: 223760 - DNA, 15 bp, Homo sapiens
gagtgattattacac

SEQ ID NO: 223761 - DNA, 15 bp, Homo sapiens
agagtgattattaca

SEQ ID NO: 223762 - DNA, 15 bp, Homo sapiens
aagagtgattattac

SEQ ID NO: 223763 - DNA, 15 bp, Homo sapiens
gaagagtgattatta

SEQ ID NO: 223764 - DNA, 15 bp, Homo sapiens
agaagagtgattatt

SEQ ID NO: 223765 - DNA, 15 bp, Homo sapiens
aagaagagtgattat

SEQ ID NO: 223766 - DNA, 15 bp, Homo sapiens
taagaagagtgatta

SEQ ID NO: 223767 - DNA, 15 bp, Homo sapiens
ataagaagagtgatt

SEQ ID NO: 223768 - DNA, 15 bp, Homo sapiens
cataagaagagtgat

SEQ ID NO: 223769 - DNA, 15 bp, Homo sapiens
gcataagaagagtga

SEQ ID NO: 223770 - DNA, 15 bp, Homo sapiens
ggcataagaagagtg

SEQ ID NO: 223771 - DNA, 15 bp, Homo sapiens
aggcataagaagagt

SEQ ID NO: 223772 - DNA, 15 bp, Homo sapiens
caggcataagaagag

SEQ ID NO: 223773 - DNA, 15 bp, Homo sapiens
ccaggcataagaaga

SEQ ID NO: 223774 - DNA, 15 bp, Homo sapiens
accaggcataagaag

SEQ ID NO: 223775 - DNA, 15 bp, Homo sapiens
caccaggcataagaa

SEQ ID NO: 223776 - DNA, 15 bp, Homo sapiens
gcaccaggcataaga

SEQ ID NO: 223777 - DNA, 15 bp, Homo sapiens
agcaccaggcataag

SEQ ID NO: 223778 - DNA, 15 bp, Homo sapiens
cagcaccaggcataa

SEQ ID NO: 223779 - DNA, 15 bp, Homo sapiens
ccagcaccaggcata

SEQ ID NO: 223780 - DNA, 15 bp, Homo sapiens
accagcaccaggcat

SEQ ID NO: 223781 - DNA, 15 bp, Homo sapiens
caccagcaccaggca

SEQ ID NO: 223782 - DNA, 15 bp, Homo sapiens
tcaccagcaccaggc

SEQ ID NO: 223783 - DNA, 15 bp, Homo sapiens
atcaccagcaccagg

SEQ ID NO: 223784 - DNA, 15 bp, Homo sapiens
aatcaccagcaccag

SEQ ID NO: 223785 - DNA, 15 bp, Homo sapiens
taatcaccagcacca

SEQ ID NO: 223786 - DNA, 15 bp, Homo sapiens
ttaatcaccagcacc

SEQ ID NO: 223787 - DNA, 15 bp, Homo sapiens
cttaatcaccagcac

SEQ ID NO: 223788 - DNA, 15 bp, Homo sapiens
acttaatcaccagca

SEQ ID NO: 223789 - DNA, 15 bp, Homo sapiens
gacttaatcaccagc

SEQ ID NO: 223790 - DNA, 15 bp, Homo sapiens
tgacttaatcaccag

SEQ ID NO: 223791 - DNA, 15 bp, Homo sapiens
gtgacttaatcacca

SEQ ID NO: 223792 - DNA, 15 bp, Homo sapiens
agtgacttaatcacc

SEQ ID NO: 223793 - DNA, 15 bp, Homo sapiens
aagtgacttaatcac

SEQ ID NO: 223794 - DNA, 15 bp, Homo sapiens
gaagtgacttaatca

SEQ ID NO: 223795 - DNA, 15 bp, Homo sapiens
agaagtgacttaatc

SEQ ID NO: 223796 - DNA, 15 bp, Homo sapiens
aagaagtgacttaat

SEQ ID NO: 223797 - DNA, 15 bp, Homo sapiens
taagaagtgacttaa

SEQ ID NO: 223798 - DNA, 15 bp, Homo sapiens
ctaagaagtgactta

SEQ ID NO: 223799 - DNA, 15 bp, Homo sapiens
gctaagaagtgactt

SEQ ID NO: 223800 - DNA, 15 bp, Homo sapiens
ggctaagaagtgact

SEQ ID NO: 223801 - DNA, 15 bp, Homo sapiens
aggctaagaagtgac

SEQ ID NO: 223802 - DNA, 15 bp, Homo sapiens
aaggctaagaagtga

SEQ ID NO: 223803 - DNA, 15 bp, Homo sapiens
aaaggctaagaagtg

SEQ ID NO: 223804 - DNA, 15 bp, Homo sapiens
aaaaggctaagaagt

SEQ ID NO: 223805 - DNA, 15 bp, Homo sapiens
gaaaaggctaagaag

SEQ ID NO: 223806 - DNA, 15 bp, Homo sapiens
agaaaaggctaagaa

SEQ ID NO: 223807 - DNA, 15 bp, Homo sapiens
aagaaaaggctaaga

SEQ ID NO: 223808 - DNA, 15 bp, Homo sapiens
aaagaaaaggctaag

SEQ ID NO: 223809 - DNA, 15 bp, Homo sapiens
aaaagaaaaggctaa

SEQ ID NO: 223810 - DNA, 15 bp, Homo sapiens
aaaaagaaaaggcta

SEQ ID NO: 223811 - DNA, 15 bp, Homo sapiens
aaaaaagaaaaggct

SEQ ID NO: 223812 - DNA, 15 bp, Homo sapiens
caaaaaagaaaaggc

SEQ ID NO: 223813 - DNA, 15 bp, Homo sapiens
ccaaaaaagaaaagg

SEQ ID NO: 223814 - DNA, 15 bp, Homo sapiens
cccaaaaaagaaaag

SEQ ID NO: 223815 - DNA, 15 bp, Homo sapiens
gcccaaaaaagaaaa

SEQ ID NO: 223816 - DNA, 15 bp, Homo sapiens
agcccaaaaaagaaa

SEQ ID NO: 223817 - DNA, 15 bp, Homo sapiens
tagcccaaaaaagaa

SEQ ID NO: 223818 - DNA, 15 bp, Homo sapiens
ctagcccaaaaaaga

SEQ ID NO: 223819 - DNA, 15 bp, Homo sapiens
tctagcccaaaaaag

SEQ ID NO: 223820 - DNA, 15 bp, Homo sapiens
atctagcccaaaaaa

SEQ ID NO: 223821 - DNA, 15 bp, Homo sapiens
gatctagcccaaaaa

SEQ ID NO: 223822 - DNA, 15 bp, Homo sapiens
agatctagcccaaaa

SEQ ID NO: 223823 - DNA, 15 bp, Homo sapiens
aagatctagcccaaa

SEQ ID NO: 223824 - DNA, 15 bp, Homo sapiens
taagatctagcccaa

SEQ ID NO: 223825 - DNA, 15 bp, Homo sapiens
ttaagatctagccca

SEQ ID NO: 223826 - DNA, 15 bp, Homo sapiens
gttaagatctagccc

SEQ ID NO: 223827 - DNA, 15 bp, Homo sapiens
agttaagatctagcc

SEQ ID NO: 223828 - DNA, 15 bp, Homo sapiens
aagttaagatctagc

SEQ ID NO: 223829 - DNA, 15 bp, Homo sapiens
gaagttaagatctag

SEQ ID NO: 223830 - DNA, 15 bp, Homo sapiens
tgaagttaagatcta

SEQ ID NO: 223831 - DNA, 15 bp, Homo sapiens
atgaagttaagatct

SEQ ID NO: 223832 - DNA, 15 bp, Homo sapiens
aatgaagttaagatc

SEQ ID NO: 223833 - DNA, 15 bp, Homo sapiens
aaatgaagttaagat

SEQ ID NO: 223834 - DNA, 15 bp, Homo sapiens
aaaatgaagttaaga

SEQ ID NO: 223835 - DNA, 15 bp, Homo sapiens
gaaaatgaagttaag

SEQ ID NO: 223836 - DNA, 15 bp, Homo sapiens
ggaaaatgaagttaa

SEQ ID NO: 223837 - DNA, 15 bp, Homo sapiens
tggaaaatgaagtta

SEQ ID NO: 223838 - DNA, 15 bp, Homo sapiens
gtggaaaatgaagtt

SEQ ID NO: 223839 - DNA, 15 bp, Homo sapiens
ggtggaaaatgaagt

SEQ ID NO: 223840 - DNA, 15 bp, Homo sapiens
gggtggaaaatgaag

SEQ ID NO: 223841 - DNA, 15 bp, Homo sapiens
tgggtggaaaatgaa

SEQ ID NO: 223842 - DNA, 15 bp, Homo sapiens
ctgggtggaaaatga

SEQ ID NO: 223843 - DNA, 15 bp, Homo sapiens
actgggtggaaaatg

SEQ ID NO: 223844 - DNA, 15 bp, Homo sapiens
aactgggtggaaaat

SEQ ID NO: 223845 - DNA, 15 bp, Homo sapiens
taactgggtggaaaa

SEQ ID NO: 223846 - DNA, 15 bp, Homo sapiens
ttaactgggtggaaa

SEQ ID NO: 223847 - DNA, 15 bp, Homo sapiens
attaactgggtggaa

SEQ ID NO: 223848 - DNA, 15 bp, Homo sapiens
gattaactgggtgga

SEQ ID NO: 223849 - DNA, 15 bp, Homo sapiens
agattaactgggtgg

SEQ ID NO: 223850 - DNA, 15 bp, Homo sapiens
aagattaactgggtg

SEQ ID NO: 223851 - DNA, 15 bp, Homo sapiens
aaagattaactgggt

SEQ ID NO: 223852 - DNA, 15 bp, Homo sapiens
aaaagattaactggg

SEQ ID NO: 223853 - DNA, 15 bp, Homo sapiens
aaaaagattaactgg

SEQ ID NO: 223854 - DNA, 15 bp, Homo sapiens
aaaaaagattaactg

SEQ ID NO: 223855 - DNA, 15 bp, Homo sapiens
aaaaaaagattaact

SEQ ID NO: 223856 - DNA, 15 bp, Homo sapiens
aaaaaaaagattaac

SEQ ID NO: 223857 - DNA, 15 bp, Homo sapiens
aaaaaaaaagattaa

SEQ ID NO: 223858 - DNA, 15 bp, Homo sapiens
aaaaaaaaaagatta

SEQ ID NO: 223859 - DNA, 15 bp, Homo sapiens
aaaaaaaaaaagatt

SEQ ID NO: 223860 - DNA, 15 bp, Homo sapiens
aaggaaaaaaaaaaa

SEQ ID NO: 223861 - DNA, 15 bp, Homo sapiens
gaaggaaaaaaaaaa

SEQ ID NO: 223862 - DNA, 15 bp, Homo sapiens
agaaggaaaaaaaaa

SEQ ID NO: 223863 - DNA, 15 bp, Homo sapiens
gagaaggaaaaaaaa

SEQ ID NO: 223864 - DNA, 15 bp, Homo sapiens
ggagaaggaaaaaaa

SEQ ID NO: 223865 - DNA, 15 bp, Homo sapiens
aggagaaggaaaaaa

SEQ ID NO: 223866 - DNA, 15 bp, Homo sapiens
taggagaaggaaaaa

SEQ ID NO: 223867 - DNA, 15 bp, Homo sapiens
ctaggagaaggaaaa

SEQ ID NO: 223868 - DNA, 15 bp, Homo sapiens
gctaggagaaggaaa

SEQ ID NO: 223869 - DNA, 15 bp, Homo sapiens
agctaggagaaggaa

SEQ ID NO: 223870 - DNA, 15 bp, Homo sapiens
cagctaggagaagga

SEQ ID NO: 223871 - DNA, 15 bp, Homo sapiens
ccagctaggagaagg

SEQ ID NO: 223872 - DNA, 15 bp, Homo sapiens
tccagctaggagaag

SEQ ID NO: 223873 - DNA, 15 bp, Homo sapiens
atccagctaggagaa

SEQ ID NO: 223874 - DNA, 15 bp, Homo sapiens
gatccagctaggaga

SEQ ID NO: 223875 - DNA, 15 bp, Homo sapiens
agatccagctaggag

SEQ ID NO: 223876 - DNA, 15 bp, Homo sapiens
aagatccagctagga

SEQ ID NO: 223877 - DNA, 15 bp, Homo sapiens
aaagatccagctagg

SEQ ID NO: 223878 - DNA, 15 bp, Homo sapiens
aaaagatccagctag

SEQ ID NO: 223879 - DNA, 15 bp, Homo sapiens
gaaaagatccagcta

SEQ ID NO: 223880 - DNA, 15 bp, Homo sapiens
ggaaaagatccagct

SEQ ID NO: 223881 - DNA, 15 bp, Homo sapiens
tggaaaagatccagc

SEQ ID NO: 223882 - DNA, 15 bp, Homo sapiens
ctggaaaagatccag

SEQ ID NO: 223883 - DNA, 15 bp, Homo sapiens
cctggaaaagatcca

SEQ ID NO: 223884 - DNA, 15 bp, Homo sapiens
acctggaaaagatcc

SEQ ID NO: 223885 - DNA, 15 bp, Homo sapiens
aacctggaaaagatc

SEQ ID NO: 223886 - DNA, 15 bp, Homo sapiens
gaacctggaaaagat

SEQ ID NO: 223887 - DNA, 15 bp, Homo sapiens
agaacctggaaaaga

SEQ ID NO: 223888 - DNA, 15 bp, Homo sapiens
gagaacctggaaaag

SEQ ID NO: 223889 - DNA, 15 bp, Homo sapiens
ggagaacctggaaaa

SEQ ID NO: 223890 - DNA, 15 bp, Homo sapiens
tggagaacctggaaa

SEQ ID NO: 223891 - DNA, 15 bp, Homo sapiens
ttggagaacctggaa

SEQ ID NO: 223892 - DNA, 15 bp, Homo sapiens
tttggagaacctgga

SEQ ID NO: 223893 - DNA, 15 bp, Homo sapiens
atttggagaacctgg

SEQ ID NO: 223894 - DNA, 15 bp, Homo sapiens
catttggagaacctg

SEQ ID NO: 223895 - DNA, 15 bp, Homo sapiens
tcatttggagaacct

SEQ ID NO: 223896 - DNA, 15 bp, Homo sapiens
ctcatttggagaacc

SEQ ID NO: 223897 - DNA, 15 bp, Homo sapiens
gctcatttggagaac

SEQ ID NO: 223898 - DNA, 15 bp, Homo sapiens
ggctcatttggagaa

SEQ ID NO: 223899 - DNA, 15 bp, Homo sapiens
aggctcatttggaga

SEQ ID NO: 223900 - DNA, 15 bp, Homo sapiens
aaggctcatttggag

SEQ ID NO: 223901 - DNA, 15 bp, Homo sapiens
taaggctcatttgga

SEQ ID NO: 223902 - DNA, 15 bp, Homo sapiens
ttaaggctcatttgg

SEQ ID NO: 223903 - DNA, 15 bp, Homo sapiens
tttaaggctcatttg

SEQ ID NO: 223904 - DNA, 15 bp, Homo sapiens
ttttaaggctcattt

SEQ ID NO: 223905 - DNA, 15 bp, Homo sapiens
attttaaggctcatt

SEQ ID NO: 223906 - DNA, 15 bp, Homo sapiens
tattttaaggctcat

SEQ ID NO: 223907 - DNA, 15 bp, Homo sapiens
ctattttaaggctca

SEQ ID NO: 223908 - DNA, 15 bp, Homo sapiens
cctattttaaggctc

SEQ ID NO: 223909 - DNA, 15 bp, Homo sapiens
tcctattttaaggct

SEQ ID NO: 223910 - DNA, 15 bp, Homo sapiens
ctcctattttaaggc

SEQ ID NO: 223911 - DNA, 15 bp, Homo sapiens
tctcctattttaagg

SEQ ID NO: 223912 - DNA, 15 bp, Homo sapiens
ttctcctattttaag

SEQ ID NO: 223913 - DNA, 15 bp, Homo sapiens
attctcctattttaa

SEQ ID NO: 223914 - DNA, 15 bp, Homo sapiens
cattctcctatttta

SEQ ID NO: 223915 - DNA, 15 bp, Homo sapiens
tcattctcctatttt

SEQ ID NO: 223916 - DNA, 15 bp, Homo sapiens
ttcattctcctattt

SEQ ID NO: 223917 - DNA, 15 bp, Homo sapiens
tttcattctcctatt

SEQ ID NO: 223918 - DNA, 15 bp, Homo sapiens
atttcattctcctat

SEQ ID NO: 223919 - DNA, 15 bp, Homo sapiens
gatttcattctccta

SEQ ID NO: 223920 - DNA, 15 bp, Homo sapiens
agatttcattctcct

SEQ ID NO: 223921 - DNA, 15 bp, Homo sapiens
cagatttcattctcc

SEQ ID NO: 223922 - DNA, 15 bp, Homo sapiens
tcagatttcattctc

SEQ ID NO: 223923 - DNA, 15 bp, Homo sapiens
ctcagatttcattct

SEQ ID NO: 223924 - DNA, 15 bp, Homo sapiens
actcagatttcattc

SEQ ID NO: 223925 - DNA, 15 bp, Homo sapiens
aactcagatttcatt

SEQ ID NO: 223926 - DNA, 15 bp, Homo sapiens
gaactcagatttcat

SEQ ID NO: 223927 - DNA, 15 bp, Homo sapiens
ggaactcagatttca

SEQ ID NO: 223928 - DNA, 15 bp, Homo sapiens
gggaactcagatttc

SEQ ID NO: 223929 - DNA, 15 bp, Homo sapiens
tgggaactcagattt

SEQ ID NO: 223930 - DNA, 15 bp, Homo sapiens
gtgggaactcagatt

SEQ ID NO: 223931 - DNA, 15 bp, Homo sapiens
agtgggaactcagat

SEQ ID NO: 223932 - DNA, 15 bp, Homo sapiens
gagtgggaactcaga

SEQ ID NO: 223933 - DNA, 15 bp, Homo sapiens
agagtgggaactcag

SEQ ID NO: 223934 - DNA, 15 bp, Homo sapiens
tagagtgggaactca

SEQ ID NO: 223935 - DNA, 15 bp, Homo sapiens
ttagagtgggaactc

SEQ ID NO: 223936 - DNA, 15 bp, Homo sapiens
attagagtgggaact

SEQ ID NO: 223937 - DNA, 15 bp, Homo sapiens
aattagagtgggaac

SEQ ID NO: 223938 - DNA, 15 bp, Homo sapiens
taattagagtgggaa

SEQ ID NO: 223939 - DNA, 15 bp, Homo sapiens
ttaattagagtggga

SEQ ID NO: 223940 - DNA, 15 bp, Homo sapiens
tttaattagagtggg

SEQ ID NO: 223941 - DNA, 15 bp, Homo sapiens
ttttaattagagtgg

SEQ ID NO: 223942 - DNA, 15 bp, Homo sapiens
gttttaattagagtg

SEQ ID NO: 223943 - DNA, 15 bp, Homo sapiens
ggttttaattagagt

SEQ ID NO: 223944 - DNA, 15 bp, Homo sapiens
aggttttaattagag

SEQ ID NO: 223945 - DNA, 15 bp, Homo sapiens
gaggttttaattaga

SEQ ID NO: 223946 - DNA, 15 bp, Homo sapiens
tgaggttttaattag

SEQ ID NO: 223947 - DNA, 15 bp, Homo sapiens
ctgaggttttaatta

SEQ ID NO: 223948 - DNA, 15 bp, Homo sapiens
gctgaggttttaatt

SEQ ID NO: 223949 - DNA, 15 bp, Homo sapiens
tgctgaggttttaat

SEQ ID NO: 223950 - DNA, 15 bp, Homo sapiens
ttgctgaggttttaa

SEQ ID NO: 223951 - DNA, 15 bp, Homo sapiens
attgctgaggtttta

SEQ ID NO: 223952 - DNA, 15 bp, Homo sapiens
cattgctgaggtttt

SEQ ID NO: 223953 - DNA, 15 bp, Homo sapiens
gcattgctgaggttt

SEQ ID NO: 223954 - DNA, 15 bp, Homo sapiens
ggcattgctgaggtt

SEQ ID NO: 223955 - DNA, 15 bp, Homo sapiens
tggcattgctgaggt

SEQ ID NO: 223956 - DNA, 15 bp, Homo sapiens
ttggcattgctgagg

SEQ ID NO: 223957 - DNA, 15 bp, Homo sapiens
cttggcattgctgag

SEQ ID NO: 223958 - DNA, 15 bp, Homo sapiens
acttggcattgctga

SEQ ID NO: 223959 - DNA, 15 bp, Homo sapiens
aacttggcattgctg

SEQ ID NO: 223960 - DNA, 15 bp, Homo sapiens
aaacttggcattgct

SEQ ID NO: 223961 - DNA, 15 bp, Homo sapiens
aaaacttggcattgc

SEQ ID NO: 223962 - DNA, 15 bp, Homo sapiens
caaaacttggcattg

SEQ ID NO: 223963 - DNA, 15 bp, Homo sapiens
acaaaacttggcatt

SEQ ID NO: 223964 - DNA, 15 bp, Homo sapiens
cacaaaacttggcat

SEQ ID NO: 223965 - DNA, 15 bp, Homo sapiens
ccacaaaacttggca

SEQ ID NO: 223966 - DNA, 15 bp, Homo sapiens
tccacaaaacttggc

SEQ ID NO: 223967 - DNA, 15 bp, Homo sapiens
ttccacaaaacttgg

SEQ ID NO: 223968 - DNA, 15 bp, Homo sapiens
tttccacaaaacttg

SEQ ID NO: 223969 - DNA, 15 bp, Homo sapiens
ctttccacaaaactt

SEQ ID NO: 223970 - DNA, 15 bp, Homo sapiens
tctttccacaaaact

SEQ ID NO: 223971 - DNA, 15 bp, Homo sapiens
atctttccacaaaac

SEQ ID NO: 223972 - DNA, 15 bp, Homo sapiens
aatctttccacaaaa

SEQ ID NO: 223973 - DNA, 15 bp, Homo sapiens
taatctttccacaaa

SEQ ID NO: 223974 - DNA, 15 bp, Homo sapiens
gtaatctttccacaa

SEQ ID NO: 223975 - DNA, 15 bp, Homo sapiens
agtaatctttccaca

SEQ ID NO: 223976 - DNA, 15 bp, Homo sapiens
gagtaatctttccac

SEQ ID NO: 223977 - DNA, 15 bp, Homo sapiens
agagtaatctttcca

SEQ ID NO: 223978 - DNA, 15 bp, Homo sapiens
gagagtaatctttcc

SEQ ID NO: 223979 - DNA, 15 bp, Homo sapiens
agagagtaatctttc

SEQ ID NO: 223980 - DNA, 15 bp, Homo sapiens
tagagagtaatcttt

SEQ ID NO: 223981 - DNA, 15 bp, Homo sapiens
ctagagagtaatctt

SEQ ID NO: 223982 - DNA, 15 bp, Homo sapiens
cctagagagtaatct

SEQ ID NO: 223983 - DNA, 15 bp, Homo sapiens
gcctagagagtaatc

SEQ ID NO: 223984 - DNA, 15 bp, Homo sapiens
agcctagagagtaat

SEQ ID NO: 223985 - DNA, 15 bp, Homo sapiens
aagcctagagagtaa

SEQ ID NO: 223986 - DNA, 15 bp, Homo sapiens
aaagcctagagagta

SEQ ID NO: 223987 - DNA, 15 bp, Homo sapiens
gaaagcctagagagt

SEQ ID NO: 223988 - DNA, 15 bp, Homo sapiens
cgaaagcctagagag

SEQ ID NO: 223989 - DNA, 15 bp, Homo sapiens
acgaaagcctagaga

SEQ ID NO: 223990 - DNA, 15 bp, Homo sapiens
aacgaaagcctagag

SEQ ID NO: 223991 - DNA, 15 bp, Homo sapiens
aaacgaaagcctaga

SEQ ID NO: 223992 - DNA, 15 bp, Homo sapiens
gaaacgaaagcctag

SEQ ID NO: 223993 - DNA, 15 bp, Homo sapiens
tgaaacgaaagccta

SEQ ID NO: 223994 - DNA, 15 bp, Homo sapiens
atgaaacgaaagcct

SEQ ID NO: 223995 - DNA, 15 bp, Homo sapiens
tatgaaacgaaagcc

SEQ ID NO: 223996 - DNA, 15 bp, Homo sapiens
ttatgaaacgaaagc

SEQ ID NO: 223997 - DNA, 15 bp, Homo sapiens
attatgaaacgaaag

SEQ ID NO: 223998 - DNA, 15 bp, Homo sapiens
aattatgaaacgaaa

SEQ ID NO: 223999 - DNA, 15 bp, Homo sapiens
gaattatgaaacgaa

SEQ ID NO: 224000 - DNA, 15 bp, Homo sapiens
agaattatgaaacga

SEQ ID NO: 224001 - DNA, 15 bp, Homo sapiens
gagaattatgaaacg

SEQ ID NO: 224002 - DNA, 15 bp, Homo sapiens
agagaattatgaaac

SEQ ID NO: 224003 - DNA, 15 bp, Homo sapiens
tagagaattatgaaa

SEQ ID NO: 224004 - DNA, 15 bp, Homo sapiens
gtagagaattatgaa

SEQ ID NO: 224005 - DNA, 15 bp, Homo sapiens
tgtagagaattatga

SEQ ID NO: 224006 - DNA, 15 bp, Homo sapiens
atgtagagaattatg

SEQ ID NO: 224007 - DNA, 15 bp, Homo sapiens
tatgtagagaattat

SEQ ID NO: 224008 - DNA, 15 bp, Homo sapiens
gtatgtagagaatta

SEQ ID NO: 224009 - DNA, 15 bp, Homo sapiens
tgtatgtagagaatt

SEQ ID NO: 224010 - DNA, 15 bp, Homo sapiens
gtgtatgtagagaat

SEQ ID NO: 224011 - DNA, 15 bp, Homo sapiens
ggtgtatgtagagaa

SEQ ID NO: 224012 - DNA, 15 bp, Homo sapiens
gggtgtatgtagaga

SEQ ID NO: 224013 - DNA, 15 bp, Homo sapiens
cgggtgtatgtagag

SEQ ID NO: 224014 - DNA, 15 bp, Homo sapiens
gcgggtgtatgtaga

SEQ ID NO: 224015 - DNA, 15 bp, Homo sapiens
ggcgggtgtatgtag

SEQ ID NO: 224016 - DNA, 15 bp, Homo sapiens
aggcgggtgtatgta

SEQ ID NO: 224017 - DNA, 15 bp, Homo sapiens
gaggcgggtgtatgt

SEQ ID NO: 224018 - DNA, 15 bp, Homo sapiens
tgaggcgggtgtatg

SEQ ID NO: 224019 - DNA, 15 bp, Homo sapiens
atgaggcgggtgtat

SEQ ID NO: 224020 - DNA, 15 bp, Homo sapiens
tatgaggcgggtgta

SEQ ID NO: 224021 - DNA, 15 bp, Homo sapiens
atatgaggcgggtgt

SEQ ID NO: 224022 - DNA, 15 bp, Homo sapiens
aatatgaggcgggtg

SEQ ID NO: 224023 - DNA, 15 bp, Homo sapiens
taatatgaggcgggt

SEQ ID NO: 224024 - DNA, 15 bp, Homo sapiens
gtaatatgaggcggg

SEQ ID NO: 224025 - DNA, 15 bp, Homo sapiens
tgtaatatgaggcgg

SEQ ID NO: 224026 - DNA, 15 bp, Homo sapiens
ttgtaatatgaggcg

SEQ ID NO: 224027 - DNA, 15 bp, Homo sapiens
attgtaatatgaggc

SEQ ID NO: 224028 - DNA, 15 bp, Homo sapiens
aattgtaatatgagg

SEQ ID NO: 224029 - DNA, 15 bp, Homo sapiens
aaattgtaatatgag

SEQ ID NO: 224030 - DNA, 15 bp, Homo sapiens
caaattgtaatatga

SEQ ID NO: 224031 - DNA, 15 bp, Homo sapiens
acaaattgtaatatg

SEQ ID NO: 224032 - DNA, 15 bp, Homo sapiens
aacaaattgtaatat

SEQ ID NO: 224033 - DNA, 15 bp, Homo sapiens
caacaaattgtaata

SEQ ID NO: 224034 - DNA, 15 bp, Homo sapiens
acaacaaattgtaat

SEQ ID NO: 224035 - DNA, 15 bp, Homo sapiens
tacaacaaattgtaa

SEQ ID NO: 224036 - DNA, 15 bp, Homo sapiens
ctacaacaaattgta

SEQ ID NO: 224037 - DNA, 15 bp, Homo sapiens
actacaacaaattgt

SEQ ID NO: 224038 - DNA, 15 bp, Homo sapiens
tactacaacaaattg

SEQ ID NO: 224039 - DNA, 15 bp, Homo sapiens
gtactacaacaaatt

SEQ ID NO: 224040 - DNA, 15 bp, Homo sapiens
agtactacaacaaat

SEQ ID NO: 224041 - DNA, 15 bp, Homo sapiens
aagtactacaacaaa

SEQ ID NO: 224042 - DNA, 15 bp, Homo sapiens
aaagtactacaacaa

SEQ ID NO: 224043 - DNA, 15 bp, Homo sapiens
gaaagtactacaaca

SEQ ID NO: 224044 - DNA, 15 bp, Homo sapiens
ggaaagtactacaac

SEQ ID NO: 224045 - DNA, 15 bp, Homo sapiens
aggaaagtactacaa

SEQ ID NO: 224046 - DNA, 15 bp, Homo sapiens
caggaaagtactaca

SEQ ID NO: 224047 - DNA, 15 bp, Homo sapiens
gcaggaaagtactac

SEQ ID NO: 224048 - DNA, 15 bp, Homo sapiens
agcaggaaagtacta

SEQ ID NO: 224049 - DNA, 15 bp, Homo sapiens
gagcaggaaagtact

SEQ ID NO: 224050 - DNA, 15 bp, Homo sapiens
tgagcaggaaagtac

SEQ ID NO: 224051 - DNA, 15 bp, Homo sapiens
gtgagcaggaaagta

SEQ ID NO: 224052 - DNA, 15 bp, Homo sapiens
agtgagcaggaaagt

SEQ ID NO: 224053 - DNA, 15 bp, Homo sapiens
gagtgagcaggaaag

SEQ ID NO: 224054 - DNA, 15 bp, Homo sapiens
tgagtgagcaggaaa

SEQ ID NO: 224055 - DNA, 15 bp, Homo sapiens
ctgagtgagcaggaa

SEQ ID NO: 224056 - DNA, 15 bp, Homo sapiens
cctgagtgagcagga

SEQ ID NO: 224057 - DNA, 15 bp, Homo sapiens
ccctgagtgagcagg

SEQ ID NO: 224058 - DNA, 15 bp, Homo sapiens
gccctgagtgagcag

SEQ ID NO: 224059 - DNA, 15 bp, Homo sapiens
ggccctgagtgagca

SEQ ID NO: 224060 - DNA, 15 bp, Homo sapiens
gggccctgagtgagc

SEQ ID NO: 224061 - DNA, 15 bp, Homo sapiens
tgggccctgagtgag

SEQ ID NO: 224062 - DNA, 15 bp, Homo sapiens
gtgggccctgagtga

SEQ ID NO: 224063 - DNA, 15 bp, Homo sapiens
tgtgggccctgagtg

SEQ ID NO: 224064 - DNA, 15 bp, Homo sapiens
ctgtgggccctgagt

SEQ ID NO: 224065 - DNA, 15 bp, Homo sapiens
gctgtgggccctgag

SEQ ID NO: 224066 - DNA, 15 bp, Homo sapiens
agctgtgggccctga

SEQ ID NO: 224067 - DNA, 15 bp, Homo sapiens
tagctgtgggccctg

SEQ ID NO: 224068 - DNA, 15 bp, Homo sapiens
atagctgtgggccct

SEQ ID NO: 224069 - DNA, 15 bp, Homo sapiens
aatagctgtgggccc

SEQ ID NO: 224070 - DNA, 15 bp, Homo sapiens
aaatagctgtgggcc

SEQ ID NO: 224071 - DNA, 15 bp, Homo sapiens
aaaatagctgtgggc

SEQ ID NO: 224072 - DNA, 15 bp, Homo sapiens
caaaatagctgtggg

SEQ ID NO: 224073 - DNA, 15 bp, Homo sapiens
acaaaatagctgtgg

SEQ ID NO: 224074 - DNA, 15 bp, Homo sapiens
aacaaaatagctgtg

SEQ ID NO: 224075 - DNA, 15 bp, Homo sapiens
taacaaaatagctgt

SEQ ID NO: 224076 - DNA, 15 bp, Homo sapiens
ataacaaaatagctg

SEQ ID NO: 224077 - DNA, 15 bp, Homo sapiens
tataacaaaatagct

SEQ ID NO: 224078 - DNA, 15 bp, Homo sapiens
ctataacaaaatagc

SEQ ID NO: 224079 - DNA, 15 bp, Homo sapiens
actataacaaaatag

SEQ ID NO: 224080 - DNA, 15 bp, Homo sapiens
tactataacaaaata

SEQ ID NO: 224081 - DNA, 15 bp, Homo sapiens
gtactataacaaaat

SEQ ID NO: 224082 - DNA, 15 bp, Homo sapiens
agtactataacaaaa

SEQ ID NO: 224083 - DNA, 15 bp, Homo sapiens
aagtactataacaaa

SEQ ID NO: 224084 - DNA, 15 bp, Homo sapiens
caagtactataacaa

SEQ ID NO: 224085 - DNA, 15 bp, Homo sapiens
acaagtactataaca

SEQ ID NO: 224086 - DNA, 15 bp, Homo sapiens
gacaagtactataac

SEQ ID NO: 224087 - DNA, 15 bp, Homo sapiens
agacaagtactataa

SEQ ID NO: 224088 - DNA, 15 bp, Homo sapiens
gagacaagtactata

SEQ ID NO: 224089 - DNA, 15 bp, Homo sapiens
agagacaagtactat

SEQ ID NO: 224090 - DNA, 15 bp, Homo sapiens
cagagacaagtacta

SEQ ID NO: 224091 - DNA, 15 bp, Homo sapiens
gcagagacaagtact

SEQ ID NO: 224092 - DNA, 15 bp, Homo sapiens
ggcagagacaagtac

SEQ ID NO: 224093 - DNA, 15 bp, Homo sapiens
tggcagagacaagta

SEQ ID NO: 224094 - DNA, 15 bp, Homo sapiens
ctggcagagacaagt

SEQ ID NO: 224095 - DNA, 15 bp, Homo sapiens
tctggcagagacaag

SEQ ID NO: 224096 - DNA, 15 bp, Homo sapiens
atctggcagagacaa

SEQ ID NO: 224097 - DNA, 15 bp, Homo sapiens
catctggcagagaca

SEQ ID NO: 224098 - DNA, 15 bp, Homo sapiens
ccatctggcagagac

SEQ ID NO: 224099 - DNA, 15 bp, Homo sapiens
tccatctggcagaga

SEQ ID NO: 224100 - DNA, 15 bp, Homo sapiens
ctccatctggcagag

SEQ ID NO: 224101 - DNA, 15 bp, Homo sapiens
gctccatctggcaga

SEQ ID NO: 224102 - DNA, 15 bp, Homo sapiens
ggctccatctggcag

SEQ ID NO: 224103 - DNA, 15 bp, Homo sapiens
gggctccatctggca

SEQ ID NO: 224104 - DNA, 15 bp, Homo sapiens
tgggctccatctggc

SEQ ID NO: 224105 - DNA, 15 bp, Homo sapiens
atgggctccatctgg

SEQ ID NO: 224106 - DNA, 15 bp, Homo sapiens
aatgggctccatctg

SEQ ID NO: 224107 - DNA, 15 bp, Homo sapiens
aaatgggctccatct

SEQ ID NO: 224108 - DNA, 15 bp, Homo sapiens
aaaatgggctccatc

SEQ ID NO: 224109 - DNA, 15 bp, Homo sapiens
aaaaatgggctccat

SEQ ID NO: 224110 - DNA, 15 bp, Homo sapiens
caaaaatgggctcca

SEQ ID NO: 224111 - DNA, 15 bp, Homo sapiens
acaaaaatgggctcc

SEQ ID NO: 224112 - DNA, 15 bp, Homo sapiens
gacaaaaatgggctc

SEQ ID NO: 224113 - DNA, 15 bp, Homo sapiens
agacaaaaatgggct

SEQ ID NO: 224114 - DNA, 15 bp, Homo sapiens
tagacaaaaatgggc

SEQ ID NO: 224115 - DNA, 15 bp, Homo sapiens
atagacaaaaatggg

SEQ ID NO: 224116 - DNA, 15 bp, Homo sapiens
aatagacaaaaatgg

SEQ ID NO: 224117 - DNA, 15 bp, Homo sapiens
aaatagacaaaaatg

SEQ ID NO: 224118 - DNA, 15 bp, Homo sapiens
aaaatagacaaaaat

SEQ ID NO: 224119 - DNA, 15 bp, Homo sapiens
taaaatagacaaaaa

SEQ ID NO: 224120 - DNA, 15 bp, Homo sapiens
ttaaaatagacaaaa

SEQ ID NO: 224121 - DNA, 15 bp, Homo sapiens
tttaaaatagacaaa

SEQ ID NO: 224122 - DNA, 15 bp, Homo sapiens
gtttaaaatagacaa

SEQ ID NO: 224123 - DNA, 15 bp, Homo sapiens
tgtttaaaatagaca

SEQ ID NO: 224124 - DNA, 15 bp, Homo sapiens
atgtttaaaatagac

SEQ ID NO: 224125 - DNA, 15 bp, Homo sapiens
gatgtttaaaataga

SEQ ID NO: 224126 - DNA, 15 bp, Homo sapiens
agatgtttaaaatag

SEQ ID NO: 224127 - DNA, 15 bp, Homo sapiens
aagatgtttaaaata

SEQ ID NO: 224128 - DNA, 15 bp, Homo sapiens
aaagatgtttaaaat

SEQ ID NO: 224129 - DNA, 15 bp, Homo sapiens
gaaagatgtttaaaa

SEQ ID NO: 224130 - DNA, 15 bp, Homo sapiens
agaaagatgtttaaa

SEQ ID NO: 224131 - DNA, 15 bp, Homo sapiens
cagaaagatgtttaa

SEQ ID NO: 224132 - DNA, 15 bp, Homo sapiens
acagaaagatgttta

SEQ ID NO: 224133 - DNA, 15 bp, Homo sapiens
aacagaaagatgttt

SEQ ID NO: 224134 - DNA, 15 bp, Homo sapiens
aaacagaaagatgtt

SEQ ID NO: 224135 - DNA, 15 bp, Homo sapiens
aaaacagaaagatgt

SEQ ID NO: 224136 - DNA, 15 bp, Homo sapiens
aaaaacagaaagatg

SEQ ID NO: 224137 - DNA, 15 bp, Homo sapiens
taaaaacagaaagat

SEQ ID NO: 224138 - DNA, 15 bp, Homo sapiens
ttaaaaacagaaaga

SEQ ID NO: 224139 - DNA, 15 bp, Homo sapiens
attaaaaacagaaag

SEQ ID NO: 224140 - DNA, 15 bp, Homo sapiens
cattaaaaacagaaa

SEQ ID NO: 224141 - DNA, 15 bp, Homo sapiens
tcattaaaaacagaa

SEQ ID NO: 224142 - DNA, 15 bp, Homo sapiens
gtcattaaaaacaga

SEQ ID NO: 224143 - DNA, 15 bp, Homo sapiens
agtcattaaaaacag

SEQ ID NO: 224144 - DNA, 15 bp, Homo sapiens
aagtcattaaaaaca

SEQ ID NO: 224145 - DNA, 15 bp, Homo sapiens
gaagtcattaaaaac

SEQ ID NO: 224146 - DNA, 15 bp, Homo sapiens
agaagtcattaaaaa

SEQ ID NO: 224147 - DNA, 15 bp, Homo sapiens
gagaagtcattaaaa

SEQ ID NO: 224148 - DNA, 15 bp, Homo sapiens
cgagaagtcattaaa

SEQ ID NO: 224149 - DNA, 15 bp, Homo sapiens
acgagaagtcattaa

SEQ ID NO: 224150 - DNA, 15 bp, Homo sapiens
aacgagaagtcatta

SEQ ID NO: 224151 - DNA, 15 bp, Homo sapiens
aaacgagaagtcatt

SEQ ID NO: 224152 - DNA, 15 bp, Homo sapiens
gaaacgagaagtcat

SEQ ID NO: 224153 - DNA, 15 bp, Homo sapiens
agaaacgagaagtca

SEQ ID NO: 224154 - DNA, 15 bp, Homo sapiens
tagaaacgagaagtc

SEQ ID NO: 224155 - DNA, 15 bp, Homo sapiens
ttagaaacgagaagt

SEQ ID NO: 224156 - DNA, 15 bp, Homo sapiens
tttagaaacgagaag

SEQ ID NO: 224157 - DNA, 15 bp, Homo sapiens
atttagaaacgagaa

SEQ ID NO: 224158 - DNA, 15 bp, Homo sapiens
aatttagaaacgaga

SEQ ID NO: 224159 - DNA, 15 bp, Homo sapiens
caatttagaaacgag

SEQ ID NO: 224160 - DNA, 15 bp, Homo sapiens
acaatttagaaacga

SEQ ID NO: 224161 - DNA, 15 bp, Homo sapiens
aacaatttagaaacg

SEQ ID NO: 224162 - DNA, 15 bp, Homo sapiens
taacaatttagaaac

SEQ ID NO: 224163 - DNA, 15 bp, Homo sapiens
ttaacaatttagaaa

SEQ ID NO: 224164 - DNA, 15 bp, Homo sapiens
tttaacaatttagaa

SEQ ID NO: 224165 - DNA, 15 bp, Homo sapiens
ctttaacaatttaga

SEQ ID NO: 224166 - DNA, 15 bp, Homo sapiens
cctttaacaatttag

SEQ ID NO: 224167 - DNA, 15 bp, Homo sapiens
acctttaacaattta

SEQ ID NO: 224168 - DNA, 15 bp, Homo sapiens
gacctttaacaattt

SEQ ID NO: 224169 - DNA, 15 bp, Homo sapiens
agacctttaacaatt

SEQ ID NO: 224170 - DNA, 15 bp, Homo sapiens
gagacctttaacaat

SEQ ID NO: 224171 - DNA, 15 bp, Homo sapiens
ggagacctttaacaa

SEQ ID NO: 224172 - DNA, 15 bp, Homo sapiens
aggagacctttaaca

SEQ ID NO: 224173 - DNA, 15 bp, Homo sapiens
aaggagacctttaac

SEQ ID NO: 224174 - DNA, 15 bp, Homo sapiens
taaggagacctttaa

SEQ ID NO: 224175 - DNA, 15 bp, Homo sapiens
ttaaggagaccttta

SEQ ID NO: 224176 - DNA, 15 bp, Homo sapiens
tttaaggagaccttt

SEQ ID NO: 224177 - DNA, 15 bp, Homo sapiens
atttaaggagacctt

SEQ ID NO: 224178 - DNA, 15 bp, Homo sapiens
aatttaaggagacct

SEQ ID NO: 224179 - DNA, 15 bp, Homo sapiens
gaatttaaggagacc

SEQ ID NO: 224180 - DNA, 15 bp, Homo sapiens
tgaatttaaggagac

SEQ ID NO: 224181 - DNA, 15 bp, Homo sapiens
ttgaatttaaggaga

SEQ ID NO: 224182 - DNA, 15 bp, Homo sapiens
tttgaatttaaggag

SEQ ID NO: 224183 - DNA, 15 bp, Homo sapiens
atttgaatttaagga

SEQ ID NO: 224184 - DNA, 15 bp, Homo sapiens
gatttgaatttaagg

SEQ ID NO: 224185 - DNA, 15 bp, Homo sapiens
ggatttgaatttaag

SEQ ID NO: 224186 - DNA, 15 bp, Homo sapiens
aggatttgaatttaa

SEQ ID NO: 224187 - DNA, 15 bp, Homo sapiens
taggatttgaattta

SEQ ID NO: 224188 - DNA, 15 bp, Homo sapiens
gtaggatttgaattt

SEQ ID NO: 224189 - DNA, 15 bp, Homo sapiens
ggtaggatttgaatt

SEQ ID NO: 224190 - DNA, 15 bp, Homo sapiens
aggtaggatttgaat

SEQ ID NO: 224191 - DNA, 15 bp, Homo sapiens
aaggtaggatttgaa

SEQ ID NO: 224192 - DNA, 15 bp, Homo sapiens
gaaggtaggatttga

SEQ ID NO: 224193 - DNA, 15 bp, Homo sapiens
agaaggtaggatttg

SEQ ID NO: 224194 - DNA, 15 bp, Homo sapiens
tagaaggtaggattt

SEQ ID NO: 224195 - DNA, 15 bp, Homo sapiens
ttagaaggtaggatt

SEQ ID NO: 224196 - DNA, 15 bp, Homo sapiens
attagaaggtaggat

SEQ ID NO: 224197 - DNA, 15 bp, Homo sapiens
cattagaaggtagga

SEQ ID NO: 224198 - DNA, 15 bp, Homo sapiens
acattagaaggtagg

SEQ ID NO: 224199 - DNA, 15 bp, Homo sapiens
aacattagaaggtag

SEQ ID NO: 224200 - DNA, 15 bp, Homo sapiens
aaacattagaaggta

SEQ ID NO: 224201 - DNA, 15 bp, Homo sapiens
gaaacattagaaggt

SEQ ID NO: 224202 - DNA, 15 bp, Homo sapiens
agaaacattagaagg

SEQ ID NO: 224203 - DNA, 15 bp, Homo sapiens
aagaaacattagaag

SEQ ID NO: 224204 - DNA, 15 bp, Homo sapiens
aaagaaacattagaa

SEQ ID NO: 224205 - DNA, 15 bp, Homo sapiens
taaagaaacattaga

SEQ ID NO: 224206 - DNA, 15 bp, Homo sapiens
gtaaagaaacattag

SEQ ID NO: 224207 - DNA, 15 bp, Homo sapiens
ggtaaagaaacatta

SEQ ID NO: 224208 - DNA, 15 bp, Homo sapiens
aggtaaagaaacatt

SEQ ID NO: 224209 - DNA, 15 bp, Homo sapiens
caggtaaagaaacat

SEQ ID NO: 224210 - DNA, 15 bp, Homo sapiens
tcaggtaaagaaaca

SEQ ID NO: 224211 - DNA, 15 bp, Homo sapiens
gtcaggtaaagaaac

SEQ ID NO: 224212 - DNA, 15 bp, Homo sapiens
agtcaggtaaagaaa

SEQ ID NO: 224213 - DNA, 15 bp, Homo sapiens
aagtcaggtaaagaa

SEQ ID NO: 224214 - DNA, 15 bp, Homo sapiens
taagtcaggtaaaga

SEQ ID NO: 224215 - DNA, 15 bp, Homo sapiens
ctaagtcaggtaaag

SEQ ID NO: 224216 - DNA, 15 bp, Homo sapiens
actaagtcaggtaaa

SEQ ID NO: 224217 - DNA, 15 bp, Homo sapiens
cactaagtcaggtaa

SEQ ID NO: 224218 - DNA, 15 bp, Homo sapiens
gcactaagtcaggta

SEQ ID NO: 224219 - DNA, 15 bp, Homo sapiens
ggcactaagtcaggt

SEQ ID NO: 224220 - DNA, 15 bp, Homo sapiens
tggcactaagtcagg

SEQ ID NO: 224221 - DNA, 15 bp, Homo sapiens
atggcactaagtcag

SEQ ID NO: 224222 - DNA, 15 bp, Homo sapiens
gatggcactaagtca

SEQ ID NO: 224223 - DNA, 15 bp, Homo sapiens
agatggcactaagtc

SEQ ID NO: 224224 - DNA, 15 bp, Homo sapiens
cagatggcactaagt

SEQ ID NO: 224225 - DNA, 15 bp, Homo sapiens
tcagatggcactaag

SEQ ID NO: 224226 - DNA, 15 bp, Homo sapiens
ttcagatggcactaa

SEQ ID NO: 224227 - DNA, 15 bp, Homo sapiens
tttcagatggcacta

SEQ ID NO: 224228 - DNA, 15 bp, Homo sapiens
ttttcagatggcact

SEQ ID NO: 224229 - DNA, 15 bp, Homo sapiens
tttttcagatggcac

SEQ ID NO: 224230 - DNA, 15 bp, Homo sapiens
gtttttcagatggca

SEQ ID NO: 224231 - DNA, 15 bp, Homo sapiens
tgtttttcagatggc

SEQ ID NO: 224232 - DNA, 15 bp, Homo sapiens
atgtttttcagatgg

SEQ ID NO: 224233 - DNA, 15 bp, Homo sapiens
aatgtttttcagatg

SEQ ID NO: 224234 - DNA, 15 bp, Homo sapiens
gaatgtttttcagat

SEQ ID NO: 224235 - DNA, 15 bp, Homo sapiens
agaatgtttttcaga

SEQ ID NO: 224236 - DNA, 15 bp, Homo sapiens
tagaatgtttttcag

SEQ ID NO: 224237 - DNA, 15 bp, Homo sapiens
ctagaatgtttttca

SEQ ID NO: 224238 - DNA, 15 bp, Homo sapiens
actagaatgtttttc

SEQ ID NO: 224239 - DNA, 15 bp, Homo sapiens
gactagaatgttttt

SEQ ID NO: 224240 - DNA, 15 bp, Homo sapiens
ggactagaatgtttt

SEQ ID NO: 224241 - DNA, 15 bp, Homo sapiens
tggactagaatgttt

SEQ ID NO: 224242 - DNA, 15 bp, Homo sapiens
atggactagaatgtt

SEQ ID NO: 224243 - DNA, 15 bp, Homo sapiens
aatggactagaatgt

SEQ ID NO: 224244 - DNA, 15 bp, Homo sapiens
taatggactagaatg

SEQ ID NO: 224245 - DNA, 15 bp, Homo sapiens
gtaatggactagaat

SEQ ID NO: 224246 - DNA, 15 bp, Homo sapiens
agtaatggactagaa

SEQ ID NO: 224247 - DNA, 15 bp, Homo sapiens
gagtaatggactaga

SEQ ID NO: 224248 - DNA, 15 bp, Homo sapiens
tgagtaatggactag

SEQ ID NO: 224249 - DNA, 15 bp, Homo sapiens
atgagtaatggacta

SEQ ID NO: 224250 - DNA, 15 bp, Homo sapiens
gatgagtaatggact

SEQ ID NO: 224251 - DNA, 15 bp, Homo sapiens
tgatgagtaatggac

SEQ ID NO: 224252 - DNA, 15 bp, Homo sapiens
atgatgagtaatgga

SEQ ID NO: 224253 - DNA, 15 bp, Homo sapiens
aatgatgagtaatgg

SEQ ID NO: 224254 - DNA, 15 bp, Homo sapiens
caatgatgagtaatg

SEQ ID NO: 224255 - DNA, 15 bp, Homo sapiens
tcaatgatgagtaat

SEQ ID NO: 224256 - DNA, 15 bp, Homo sapiens
ctcaatgatgagtaa

SEQ ID NO: 224257 - DNA, 15 bp, Homo sapiens
cctcaatgatgagta

SEQ ID NO: 224258 - DNA, 15 bp, Homo sapiens
tcctcaatgatgagt

SEQ ID NO: 224259 - DNA, 15 bp, Homo sapiens
ttcctcaatgatgag

SEQ ID NO: 224260 - DNA, 15 bp, Homo sapiens
cttcctcaatgatga

SEQ ID NO: 224261 - DNA, 15 bp, Homo sapiens
ccttcctcaatgatg

SEQ ID NO: 224262 - DNA, 15 bp, Homo sapiens
tccttcctcaatgat

SEQ ID NO: 224263 - DNA, 15 bp, Homo sapiens
ttccttcctcaatga

SEQ ID NO: 224264 - DNA, 15 bp, Homo sapiens
tttccttcctcaatg

SEQ ID NO: 224265 - DNA, 15 bp, Homo sapiens
gtttccttcctcaat

SEQ ID NO: 224266 - DNA, 15 bp, Homo sapiens
agtttccttcctcaa

SEQ ID NO: 224267 - DNA, 15 bp, Homo sapiens
gagtttccttcctca

SEQ ID NO: 224268 - DNA, 15 bp, Homo sapiens
tgagtttccttcctc

SEQ ID NO: 224269 - DNA, 15 bp, Homo sapiens
ttgagtttccttcct

SEQ ID NO: 224270 - DNA, 15 bp, Homo sapiens
attgagtttccttcc

SEQ ID NO: 224271 - DNA, 15 bp, Homo sapiens
aattgagtttccttc

SEQ ID NO: 224272 - DNA, 15 bp, Homo sapiens
aaattgagtttcctt

SEQ ID NO: 224273 - DNA, 15 bp, Homo sapiens
aaaattgagtttcct

SEQ ID NO: 224274 - DNA, 15 bp, Homo sapiens
caaaattgagtttcc

SEQ ID NO: 224275 - DNA, 15 bp, Homo sapiens
acaaaattgagtttc

SEQ ID NO: 224276 - DNA, 15 bp, Homo sapiens
tacaaaattgagttt

SEQ ID NO: 224277 - DNA, 15 bp, Homo sapiens
atacaaaattgagtt

SEQ ID NO: 224278 - DNA, 15 bp, Homo sapiens
gatacaaaattgagt

SEQ ID NO: 224279 - DNA, 15 bp, Homo sapiens
tgatacaaaattgag

SEQ ID NO: 224280 - DNA, 15 bp, Homo sapiens
ttgatacaaaattga

SEQ ID NO: 224281 - DNA, 15 bp, Homo sapiens
attgatacaaaattg

SEQ ID NO: 224282 - DNA, 15 bp, Homo sapiens
gattgatacaaaatt

SEQ ID NO: 224283 - DNA, 15 bp, Homo sapiens
ggattgatacaaaat

SEQ ID NO: 224284 - DNA, 15 bp, Homo sapiens
cggattgatacaaaa

SEQ ID NO: 224285 - DNA, 15 bp, Homo sapiens
tcggattgatacaaa

SEQ ID NO: 224286 - DNA, 15 bp, Homo sapiens
ctcggattgatacaa

SEQ ID NO: 224287 - DNA, 15 bp, Homo sapiens
tctcggattgataca

SEQ ID NO: 224288 - DNA, 15 bp, Homo sapiens
ttctcggattgatac

SEQ ID NO: 224289 - DNA, 15 bp, Homo sapiens
cttctcggattgata

SEQ ID NO: 224290 - DNA, 15 bp, Homo sapiens
ccttctcggattgat

SEQ ID NO: 224291 - DNA, 15 bp, Homo sapiens
cccttctcggattga

SEQ ID NO: 224292 - DNA, 15 bp, Homo sapiens
gcccttctcggattg

SEQ ID NO: 224293 - DNA, 15 bp, Homo sapiens
ggcccttctcggatt

SEQ ID NO: 224294 - DNA, 15 bp, Homo sapiens
aggcccttctcggat

SEQ ID NO: 224295 - DNA, 15 bp, Homo sapiens
caggcccttctcgga

SEQ ID NO: 224296 - DNA, 15 bp, Homo sapiens
tcaggcccttctcgg

SEQ ID NO: 224297 - DNA, 15 bp, Homo sapiens
ttcaggcccttctcg

SEQ ID NO: 224298 - DNA, 15 bp, Homo sapiens
attcaggcccttctc

SEQ ID NO: 224299 - DNA, 15 bp, Homo sapiens
tattcaggcccttct

SEQ ID NO: 224300 - DNA, 15 bp, Homo sapiens
ctattcaggcccttc

SEQ ID NO: 224301 - DNA, 15 bp, Homo sapiens
gctattcaggccctt

SEQ ID NO: 224302 - DNA, 15 bp, Homo sapiens
tgctattcaggccct

SEQ ID NO: 224303 - DNA, 15 bp, Homo sapiens
gtgctattcaggccc

SEQ ID NO: 224304 - DNA, 15 bp, Homo sapiens
agtgctattcaggcc

SEQ ID NO: 224305 - DNA, 15 bp, Homo sapiens
gagtgctattcaggc

SEQ ID NO: 224306 - DNA, 15 bp, Homo sapiens
tgagtgctattcagg

SEQ ID NO: 224307 - DNA, 15 bp, Homo sapiens
atgagtgctattcag

SEQ ID NO: 224308 - DNA, 15 bp, Homo sapiens
aatgagtgctattca

SEQ ID NO: 224309 - DNA, 15 bp, Homo sapiens
aaatgagtgctattc

SEQ ID NO: 224310 - DNA, 15 bp, Homo sapiens
gaaatgagtgctatt

SEQ ID NO: 224311 - DNA, 15 bp, Homo sapiens
agaaatgagtgctat

SEQ ID NO: 224312 - DNA, 15 bp, Homo sapiens
gagaaatgagtgcta

SEQ ID NO: 224313 - DNA, 15 bp, Homo sapiens
ggagaaatgagtgct

SEQ ID NO: 224314 - DNA, 15 bp, Homo sapiens
gggagaaatgagtgc

SEQ ID NO: 224315 - DNA, 15 bp, Homo sapiens
tgggagaaatgagtg

SEQ ID NO: 224316 - DNA, 15 bp, Homo sapiens
ttgggagaaatgagt

SEQ ID NO: 224317 - DNA, 15 bp, Homo sapiens
attgggagaaatgag

SEQ ID NO: 224318 - DNA, 15 bp, Homo sapiens
tattgggagaaatga

SEQ ID NO: 224319 - DNA, 15 bp, Homo sapiens
gtattgggagaaatg

SEQ ID NO: 224320 - DNA, 15 bp, Homo sapiens
agtattgggagaaat

SEQ ID NO: 224321 - DNA, 15 bp, Homo sapiens
gagtattgggagaaa

SEQ ID NO: 224322 - DNA, 15 bp, Homo sapiens
tgagtattgggagaa

SEQ ID NO: 224323 - DNA, 15 bp, Homo sapiens
gtgagtattgggaga

SEQ ID NO: 224324 - DNA, 15 bp, Homo sapiens
tgtgagtattgggag

SEQ ID NO: 224325 - DNA, 15 bp, Homo sapiens
ttgtgagtattggga

SEQ ID NO: 224326 - DNA, 15 bp, Homo sapiens
cttgtgagtattggg

SEQ ID NO: 224327 - DNA, 15 bp, Homo sapiens
gcttgtgagtattgg

SEQ ID NO: 224328 - DNA, 15 bp, Homo sapiens
tgcttgtgagtattg

SEQ ID NO: 224329 - DNA, 15 bp, Homo sapiens
atgcttgtgagtatt

SEQ ID NO: 224330 - DNA, 15 bp, Homo sapiens
catgcttgtgagtat

SEQ ID NO: 224331 - DNA, 15 bp, Homo sapiens
gcatgcttgtgagta

SEQ ID NO: 224332 - DNA, 15 bp, Homo sapiens
agcatgcttgtgagt

SEQ ID NO: 224333 - DNA, 15 bp, Homo sapiens
aagcatgcttgtgag

SEQ ID NO: 224334 - DNA, 15 bp, Homo sapiens
aaagcatgcttgtga

SEQ ID NO: 224335 - DNA, 15 bp, Homo sapiens
caaagcatgcttgtg

SEQ ID NO: 224336 - DNA, 15 bp, Homo sapiens
tcaaagcatgcttgt

SEQ ID NO: 224337 - DNA, 15 bp, Homo sapiens
ctcaaagcatgcttg

SEQ ID NO: 224338 - DNA, 15 bp, Homo sapiens
gctcaaagcatgctt

SEQ ID NO: 224339 - DNA, 15 bp, Homo sapiens
tgctcaaagcatgct

SEQ ID NO: 224340 - DNA, 15 bp, Homo sapiens
atgctcaaagcatgc

SEQ ID NO: 224341 - DNA, 15 bp, Homo sapiens
catgctcaaagcatg

SEQ ID NO: 224342 - DNA, 15 bp, Homo sapiens
tcatgctcaaagcat

SEQ ID NO: 224343 - DNA, 15 bp, Homo sapiens
ttcatgctcaaagca

SEQ ID NO: 224344 - DNA, 15 bp, Homo sapiens
tttcatgctcaaagc

SEQ ID NO: 224345 - DNA, 15 bp, Homo sapiens
ttttcatgctcaaag

SEQ ID NO: 224346 - DNA, 15 bp, Homo sapiens
tttttcatgctcaaa

SEQ ID NO: 224347 - DNA, 15 bp, Homo sapiens
ttttttcatgctcaa

SEQ ID NO: 224348 - DNA, 15 bp, Homo sapiens
tttttttcatgctca

SEQ ID NO: 224349 - DNA, 15 bp, Homo sapiens
ttttttttcatgctc

SEQ ID NO: 224350 - DNA, 15 bp, Homo sapiens
attttttttcatgct

SEQ ID NO: 224351 - DNA, 15 bp, Homo sapiens
cattttttttcatgc

SEQ ID NO: 224352 - DNA, 15 bp, Homo sapiens
gcattttttttcatg

SEQ ID NO: 224353 - DNA, 15 bp, Homo sapiens
tgcattttttttcat

SEQ ID NO: 224354 - DNA, 15 bp, Homo sapiens
ctgcattttttttca

SEQ ID NO: 224355 - DNA, 15 bp, Homo sapiens
cctgcattttttttc

SEQ ID NO: 224356 - DNA, 15 bp, Homo sapiens
gcctgcatttttttt

SEQ ID NO: 224357 - DNA, 15 bp, Homo sapiens
ggcctgcattttttt

SEQ ID NO: 224358 - DNA, 15 bp, Homo sapiens
tggcctgcatttttt

SEQ ID NO: 224359 - DNA, 15 bp, Homo sapiens
gtggcctgcattttt

SEQ ID NO: 224360 - DNA, 15 bp, Homo sapiens
ggtggcctgcatttt

SEQ ID NO: 224361 - DNA, 15 bp, Homo sapiens
gggtggcctgcattt

SEQ ID NO: 224362 - DNA, 15 bp, Homo sapiens
ggggtggcctgcatt

SEQ ID NO: 224363 - DNA, 15 bp, Homo sapiens
aggggtggcctgcat

SEQ ID NO: 224364 - DNA, 15 bp, Homo sapiens
aaggggtggcctgca

SEQ ID NO: 224365 - DNA, 15 bp, Homo sapiens
gaaggggtggcctgc

SEQ ID NO: 224366 - DNA, 15 bp, Homo sapiens
agaaggggtggcctg

SEQ ID NO: 224367 - DNA, 15 bp, Homo sapiens
gagaaggggtggcct

SEQ ID NO: 224368 - DNA, 15 bp, Homo sapiens
ggagaaggggtggcc

SEQ ID NO: 224369 - DNA, 15 bp, Homo sapiens
tggagaaggggtggc

SEQ ID NO: 224370 - DNA, 15 bp, Homo sapiens
atggagaaggggtgg

SEQ ID NO: 224371 - DNA, 15 bp, Homo sapiens
aatggagaaggggtg

SEQ ID NO: 224372 - DNA, 15 bp, Homo sapiens
gaatggagaaggggt

SEQ ID NO: 224373 - DNA, 15 bp, Homo sapiens
tgaatggagaagggg

SEQ ID NO: 224374 - DNA, 15 bp, Homo sapiens
atgaatggagaaggg

SEQ ID NO: 224375 - DNA, 15 bp, Homo sapiens
aatgaatggagaagg

SEQ ID NO: 224376 - DNA, 15 bp, Homo sapiens
aaatgaatggagaag

SEQ ID NO: 224377 - DNA, 15 bp, Homo sapiens
taaatgaatggagaa

SEQ ID NO: 224378 - DNA, 15 bp, Homo sapiens
ataaatgaatggaga

SEQ ID NO: 224379 - DNA, 15 bp, Homo sapiens
aataaatgaatggag

SEQ ID NO: 224380 - DNA, 15 bp, Homo sapiens
gaataaatgaatgga

SEQ ID NO: 224381 - DNA, 15 bp, Homo sapiens
tgaataaatgaatgg

SEQ ID NO: 224382 - DNA, 15 bp, Homo sapiens
atgaataaatgaatg

SEQ ID NO: 224383 - DNA, 15 bp, Homo sapiens
catgaataaatgaat

SEQ ID NO: 224384 - DNA, 15 bp, Homo sapiens
tcatgaataaatgaa

SEQ ID NO: 224385 - DNA, 15 bp, Homo sapiens
ttcatgaataaatga

SEQ ID NO: 224386 - DNA, 15 bp, Homo sapiens
tttcatgaataaatg

SEQ ID NO: 224387 - DNA, 15 bp, Homo sapiens
gtttcatgaataaat

SEQ ID NO: 224388 - DNA, 15 bp, Homo sapiens
tgtttcatgaataaa

SEQ ID NO: 224389 - DNA, 15 bp, Homo sapiens
atgtttcatgaataa

SEQ ID NO: 224390 - DNA, 15 bp, Homo sapiens
gatgtttcatgaata

SEQ ID NO: 224391 - DNA, 15 bp, Homo sapiens
agatgtttcatgaat

SEQ ID NO: 224392 - DNA, 15 bp, Homo sapiens
aagatgtttcatgaa

SEQ ID NO: 224393 - DNA, 15 bp, Homo sapiens
aaagatgtttcatga

SEQ ID NO: 224394 - DNA, 15 bp, Homo sapiens
aaaagatgtttcatg

SEQ ID NO: 224395 - DNA, 15 bp, Homo sapiens
caaaagatgtttcat

SEQ ID NO: 224396 - DNA, 15 bp, Homo sapiens
tcaaaagatgtttca

SEQ ID NO: 224397 - DNA, 15 bp, Homo sapiens
ttcaaaagatgtttc

SEQ ID NO: 224398 - DNA, 15 bp, Homo sapiens
gttcaaaagatgttt

SEQ ID NO: 224399 - DNA, 15 bp, Homo sapiens
tgttcaaaagatgtt

SEQ ID NO: 224400 - DNA, 15 bp, Homo sapiens
ctgttcaaaagatgt

SEQ ID NO: 224401 - DNA, 15 bp, Homo sapiens
cctgttcaaaagatg

SEQ ID NO: 224402 - DNA, 15 bp, Homo sapiens
ccctgttcaaaagat

SEQ ID NO: 224403 - DNA, 15 bp, Homo sapiens
accctgttcaaaaga

SEQ ID NO: 224404 - DNA, 15 bp, Homo sapiens
taccctgttcaaaag

SEQ ID NO: 224405 - DNA, 15 bp, Homo sapiens
ctaccctgttcaaaa

SEQ ID NO: 224406 - DNA, 15 bp, Homo sapiens
tctaccctgttcaaa

SEQ ID NO: 224407 - DNA, 15 bp, Homo sapiens
gtctaccctgttcaa

SEQ ID NO: 224408 - DNA, 15 bp, Homo sapiens
tgtctaccctgttca

SEQ ID NO: 224409 - DNA, 15 bp, Homo sapiens
gtgtctaccctgttc

SEQ ID NO: 224410 - DNA, 15 bp, Homo sapiens
agtgtctaccctgtt

SEQ ID NO: 224411 - DNA, 15 bp, Homo sapiens
cagtgtctaccctgt

SEQ ID NO: 224412 - DNA, 15 bp, Homo sapiens
ccagtgtctaccctg

SEQ ID NO: 224413 - DNA, 15 bp, Homo sapiens
tccagtgtctaccct

SEQ ID NO: 224414 - DNA, 15 bp, Homo sapiens
gtccagtgtctaccc

SEQ ID NO: 224415 - DNA, 15 bp, Homo sapiens
tgtccagtgtctacc

SEQ ID NO: 224416 - DNA, 15 bp, Homo sapiens
gtgtccagtgtctac

SEQ ID NO: 224417 - DNA, 15 bp, Homo sapiens
tgtgtccagtgtcta

SEQ ID NO: 224418 - DNA, 15 bp, Homo sapiens
gtgtgtccagtgtct

SEQ ID NO: 224419 - DNA, 15 bp, Homo sapiens
tgtgtgtccagtgtc

SEQ ID NO: 224420 - DNA, 15 bp, Homo sapiens
ctgtgtgtccagtgt

SEQ ID NO: 224421 - DNA, 15 bp, Homo sapiens
actgtgtgtccagtg

SEQ ID NO: 224422 - DNA, 15 bp, Homo sapiens
cactgtgtgtccagt

SEQ ID NO: 224423 - DNA, 15 bp, Homo sapiens
tcactgtgtgtccag

SEQ ID NO: 224424 - DNA, 15 bp, Homo sapiens
atcactgtgtgtcca

SEQ ID NO: 224425 - DNA, 15 bp, Homo sapiens
catcactgtgtgtcc

SEQ ID NO: 224426 - DNA, 15 bp, Homo sapiens
tcatcactgtgtgtc

SEQ ID NO: 224427 - DNA, 15 bp, Homo sapiens
ttcatcactgtgtgt

SEQ ID NO: 224428 - DNA, 15 bp, Homo sapiens
gttcatcactgtgtg

SEQ ID NO: 224429 - DNA, 15 bp, Homo sapiens
tgttcatcactgtgt

SEQ ID NO: 224430 - DNA, 15 bp, Homo sapiens
ctgttcatcactgtg

SEQ ID NO: 224431 - DNA, 15 bp, Homo sapiens
actgttcatcactgt

SEQ ID NO: 224432 - DNA, 15 bp, Homo sapiens
aactgttcatcactg

SEQ ID NO: 224433 - DNA, 15 bp, Homo sapiens
aaactgttcatcact

SEQ ID NO: 224434 - DNA, 15 bp, Homo sapiens
gaaactgttcatcac

SEQ ID NO: 224435 - DNA, 15 bp, Homo sapiens
agaaactgttcatca

SEQ ID NO: 224436 - DNA, 15 bp, Homo sapiens
cagaaactgttcatc

SEQ ID NO: 224437 - DNA, 15 bp, Homo sapiens
acagaaactgttcat

SEQ ID NO: 224438 - DNA, 15 bp, Homo sapiens
tacagaaactgttca

SEQ ID NO: 224439 - DNA, 15 bp, Homo sapiens
atacagaaactgttc

SEQ ID NO: 224440 - DNA, 15 bp, Homo sapiens
gatacagaaactgtt

SEQ ID NO: 224441 - DNA, 15 bp, Homo sapiens
ggatacagaaactgt

SEQ ID NO: 224442 - DNA, 15 bp, Homo sapiens
tggatacagaaactg

SEQ ID NO: 224443 - DNA, 15 bp, Homo sapiens
atggatacagaaact

SEQ ID NO: 224444 - DNA, 15 bp, Homo sapiens
aatggatacagaaac

SEQ ID NO: 224445 - DNA, 15 bp, Homo sapiens
gaatggatacagaaa

SEQ ID NO: 224446 - DNA, 15 bp, Homo sapiens
tgaatggatacagaa

SEQ ID NO: 224447 - DNA, 15 bp, Homo sapiens
gtgaatggatacaga

SEQ ID NO: 224448 - DNA, 15 bp, Homo sapiens
agtgaatggatacag

SEQ ID NO: 224449 - DNA, 15 bp, Homo sapiens
tagtgaatggataca

SEQ ID NO: 224450 - DNA, 15 bp, Homo sapiens
ttagtgaatggatac

SEQ ID NO: 224451 - DNA, 15 bp, Homo sapiens
attagtgaatggata

SEQ ID NO: 224452 - DNA, 15 bp, Homo sapiens
cattagtgaatggat

SEQ ID NO: 224453 - DNA, 15 bp, Homo sapiens
acattagtgaatgga

SEQ ID NO: 224454 - DNA, 15 bp, Homo sapiens
cacattagtgaatgg

SEQ ID NO: 224455 - DNA, 15 bp, Homo sapiens
acacattagtgaatg

SEQ ID NO: 224456 - DNA, 15 bp, Homo sapiens
aacacattagtgaat

SEQ ID NO: 224457 - DNA, 15 bp, Homo sapiens
gaacacattagtgaa

SEQ ID NO: 224458 - DNA, 15 bp, Homo sapiens
ggaacacattagtga

SEQ ID NO: 224459 - DNA, 15 bp, Homo sapiens
aggaacacattagtg

SEQ ID NO: 224460 - DNA, 15 bp, Homo sapiens
taggaacacattagt

SEQ ID NO: 224461 - DNA, 15 bp, Homo sapiens
gtaggaacacattag

SEQ ID NO: 224462 - DNA, 15 bp, Homo sapiens
tgtaggaacacatta

SEQ ID NO: 224463 - DNA, 15 bp, Homo sapiens
atgtaggaacacatt

SEQ ID NO: 224464 - DNA, 15 bp, Homo sapiens
catgtaggaacacat

SEQ ID NO: 224465 - DNA, 15 bp, Homo sapiens
acatgtaggaacaca

SEQ ID NO: 224466 - DNA, 15 bp, Homo sapiens
cacatgtaggaacac

SEQ ID NO: 224467 - DNA, 15 bp, Homo sapiens
acacatgtaggaaca

SEQ ID NO: 224468 - DNA, 15 bp, Homo sapiens
tacacatgtaggaac

SEQ ID NO: 224469 - DNA, 15 bp, Homo sapiens
gtacacatgtaggaa

SEQ ID NO: 224470 - DNA, 15 bp, Homo sapiens
tgtacacatgtagga

SEQ ID NO: 224471 - DNA, 15 bp, Homo sapiens
ttgtacacatgtagg

SEQ ID NO: 224472 - DNA, 15 bp, Homo sapiens
tttgtacacatgtag

SEQ ID NO: 224473 - DNA, 15 bp, Homo sapiens
ttttgtacacatgta

SEQ ID NO: 224474 - DNA, 15 bp, Homo sapiens
attttgtacacatgt

SEQ ID NO: 224475 - DNA, 15 bp, Homo sapiens
cattttgtacacatg

SEQ ID NO: 224476 - DNA, 15 bp, Homo sapiens
acattttgtacacat

SEQ ID NO: 224477 - DNA, 15 bp, Homo sapiens
tacattttgtacaca

SEQ ID NO: 224478 - DNA, 15 bp, Homo sapiens
gtacattttgtacac

SEQ ID NO: 224479 - DNA, 15 bp, Homo sapiens
agtacattttgtaca

SEQ ID NO: 224480 - DNA, 15 bp, Homo sapiens
gagtacattttgtac

SEQ ID NO: 224481 - DNA, 15 bp, Homo sapiens
ggagtacattttgta

SEQ ID NO: 224482 - DNA, 15 bp, Homo sapiens
aggagtacattttgt

SEQ ID NO: 224483 - DNA, 15 bp, Homo sapiens
aaggagtacattttg

SEQ ID NO: 224484 - DNA, 15 bp, Homo sapiens
taaggagtacatttt

SEQ ID NO: 224485 - DNA, 15 bp, Homo sapiens
ttaaggagtacattt

SEQ ID NO: 224486 - DNA, 15 bp, Homo sapiens
cttaaggagtacatt

SEQ ID NO: 224487 - DNA, 15 bp, Homo sapiens
gcttaaggagtacat

SEQ ID NO: 224488 - DNA, 15 bp, Homo sapiens
tgcttaaggagtaca

SEQ ID NO: 224489 - DNA, 15 bp, Homo sapiens
gtgcttaaggagtac

SEQ ID NO: 224490 - DNA, 15 bp, Homo sapiens
agtgcttaaggagta

SEQ ID NO: 224491 - DNA, 15 bp, Homo sapiens
aagtgcttaaggagt

SEQ ID NO: 224492 - DNA, 15 bp, Homo sapiens
taagtgcttaaggag

SEQ ID NO: 224493 - DNA, 15 bp, Homo sapiens
gtaagtgcttaagga

SEQ ID NO: 224494 - DNA, 15 bp, Homo sapiens
agtaagtgcttaagg

SEQ ID NO: 224495 - DNA, 15 bp, Homo sapiens
gagtaagtgcttaag

SEQ ID NO: 224496 - DNA, 15 bp, Homo sapiens
agagtaagtgcttaa

SEQ ID NO: 224497 - DNA, 15 bp, Homo sapiens
cagagtaagtgctta

SEQ ID NO: 224498 - DNA, 15 bp, Homo sapiens
acagagtaagtgctt

SEQ ID NO: 224499 - DNA, 15 bp, Homo sapiens
cacagagtaagtgct

SEQ ID NO: 224500 - DNA, 15 bp, Homo sapiens
acacagagtaagtgc

SEQ ID NO: 224501 - DNA, 15 bp, Homo sapiens
tacacagagtaagtg

SEQ ID NO: 224502 - DNA, 15 bp, Homo sapiens
ttacacagagtaagt

SEQ ID NO: 224503 - DNA, 15 bp, Homo sapiens
tttacacagagtaag

SEQ ID NO: 224504 - DNA, 15 bp, Homo sapiens
ttttacacagagtaa

SEQ ID NO: 224505 - DNA, 15 bp, Homo sapiens
gttttacacagagta

SEQ ID NO: 224506 - DNA, 15 bp, Homo sapiens
ggttttacacagagt

SEQ ID NO: 224507 - DNA, 15 bp, Homo sapiens
cggttttacacagag

SEQ ID NO: 224508 - DNA, 15 bp, Homo sapiens
acggttttacacaga

SEQ ID NO: 224509 - DNA, 15 bp, Homo sapiens
aacggttttacacag

SEQ ID NO: 224510 - DNA, 15 bp, Homo sapiens
caacggttttacaca

SEQ ID NO: 224511 - DNA, 15 bp, Homo sapiens
gcaacggttttacac

SEQ ID NO: 224512 - DNA, 15 bp, Homo sapiens
tgcaacggttttaca

SEQ ID NO: 224513 - DNA, 15 bp, Homo sapiens
ttgcaacggttttac

SEQ ID NO: 224514 - DNA, 15 bp, Homo sapiens
cttgcaacggtttta

SEQ ID NO: 224515 - DNA, 15 bp, Homo sapiens
acttgcaacggtttt

SEQ ID NO: 224516 - DNA, 15 bp, Homo sapiens
cacttgcaacggttt

SEQ ID NO: 224517 - DNA, 15 bp, Homo sapiens
acacttgcaacggtt

SEQ ID NO: 224518 - DNA, 15 bp, Homo sapiens
aacacttgcaacggt

SEQ ID NO: 224519 - DNA, 15 bp, Homo sapiens
caacacttgcaacgg

SEQ ID NO: 224520 - DNA, 15 bp, Homo sapiens
acaacacttgcaacg

SEQ ID NO: 224521 - DNA, 15 bp, Homo sapiens
cacaacacttgcaac

SEQ ID NO: 224522 - DNA, 15 bp, Homo sapiens
ccacaacacttgcaa

SEQ ID NO: 224523 - DNA, 15 bp, Homo sapiens
gccacaacacttgca

SEQ ID NO: 224524 - DNA, 15 bp, Homo sapiens
agccacaacacttgc

SEQ ID NO: 224525 - DNA, 15 bp, Homo sapiens
tagccacaacacttg

SEQ ID NO: 224526 - DNA, 15 bp, Homo sapiens
gtagccacaacactt

SEQ ID NO: 224527 - DNA, 15 bp, Homo sapiens
tgtagccacaacact

SEQ ID NO: 224528 - DNA, 15 bp, Homo sapiens
ctgtagccacaacac

SEQ ID NO: 224529 - DNA, 15 bp, Homo sapiens
gctgtagccacaaca

SEQ ID NO: 224530 - DNA, 15 bp, Homo sapiens
tgctgtagccacaac

SEQ ID NO: 224531 - DNA, 15 bp, Homo sapiens
ctgctgtagccacaa

SEQ ID NO: 224532 - DNA, 15 bp, Homo sapiens
actgctgtagccaca

SEQ ID NO: 224533 - DNA, 15 bp, Homo sapiens
cactgctgtagccac

SEQ ID NO: 224534 - DNA, 15 bp, Homo sapiens
tcactgctgtagcca

SEQ ID NO: 224535 - DNA, 15 bp, Homo sapiens
ttcactgctgtagcc

SEQ ID NO: 224536 - DNA, 15 bp, Homo sapiens
attcactgctgtagc

SEQ ID NO: 224537 - DNA, 15 bp, Homo sapiens
tattcactgctgtag

SEQ ID NO: 224538 - DNA, 15 bp, Homo sapiens
ctattcactgctgta

SEQ ID NO: 224539 - DNA, 15 bp, Homo sapiens
cctattcactgctgt

SEQ ID NO: 224540 - DNA, 15 bp, Homo sapiens
ccctattcactgctg

SEQ ID NO: 224541 - DNA, 15 bp, Homo sapiens
tccctattcactgct

SEQ ID NO: 224542 - DNA, 15 bp, Homo sapiens
ttccctattcactgc

SEQ ID NO: 224543 - DNA, 15 bp, Homo sapiens
attccctattcactg

SEQ ID NO: 224544 - DNA, 15 bp, Homo sapiens
tattccctattcact

SEQ ID NO: 224545 - DNA, 15 bp, Homo sapiens
ttattccctattcac

SEQ ID NO: 224546 - DNA, 15 bp, Homo sapiens
tttattccctattca

SEQ ID NO: 224547 - DNA, 15 bp, Homo sapiens
ttttattccctattc

SEQ ID NO: 224548 - DNA, 15 bp, Homo sapiens
cttttattccctatt

SEQ ID NO: 224549 - DNA, 15 bp, Homo sapiens
ccttttattccctat

SEQ ID NO: 224550 - DNA, 15 bp, Homo sapiens
gccttttattcccta

SEQ ID NO: 224551 - DNA, 15 bp, Homo sapiens
agccttttattccct

SEQ ID NO: 224552 - DNA, 15 bp, Homo sapiens
tagccttttattccc

SEQ ID NO: 224553 - DNA, 15 bp, Homo sapiens
gtagccttttattcc

SEQ ID NO: 224554 - DNA, 15 bp, Homo sapiens
agtagccttttattc

SEQ ID NO: 224555 - DNA, 15 bp, Homo sapiens
cagtagccttttatt

SEQ ID NO: 224556 - DNA, 15 bp, Homo sapiens
ccagtagccttttat

SEQ ID NO: 224557 - DNA, 15 bp, Homo sapiens
gccagtagcctttta

SEQ ID NO: 224558 - DNA, 15 bp, Homo sapiens
agccagtagcctttt

SEQ ID NO: 224559 - DNA, 15 bp, Homo sapiens
aagccagtagccttt

SEQ ID NO: 224560 - DNA, 15 bp, Homo sapiens
gaagccagtagcctt

SEQ ID NO: 224561 - DNA, 15 bp, Homo sapiens
tgaagccagtagcct

SEQ ID NO: 224562 - DNA, 15 bp, Homo sapiens
atgaagccagtagcc

SEQ ID NO: 224563 - DNA, 15 bp, Homo sapiens
tatgaagccagtagc

SEQ ID NO: 224564 - DNA, 15 bp, Homo sapiens
ctatgaagccagtag

SEQ ID NO: 224565 - DNA, 15 bp, Homo sapiens
tctatgaagccagta

SEQ ID NO: 224566 - DNA, 15 bp, Homo sapiens
atctatgaagccagt

SEQ ID NO: 224567 - DNA, 15 bp, Homo sapiens
gatctatgaagccag

SEQ ID NO: 224568 - DNA, 15 bp, Homo sapiens
ggatctatgaagcca

SEQ ID NO: 224569 - DNA, 15 bp, Homo sapiens
gggatctatgaagcc

SEQ ID NO: 224570 - DNA, 15 bp, Homo sapiens
tgggatctatgaagc

SEQ ID NO: 224571 - DNA, 15 bp, Homo sapiens
gtgggatctatgaag

SEQ ID NO: 224572 - DNA, 15 bp, Homo sapiens
tgtgggatctatgaa

SEQ ID NO: 224573 - DNA, 15 bp, Homo sapiens
atgtgggatctatga

SEQ ID NO: 224574 - DNA, 15 bp, Homo sapiens
aatgtgggatctatg

SEQ ID NO: 224575 - DNA, 15 bp, Homo sapiens
gaatgtgggatctat

SEQ ID NO: 224576 - DNA, 15 bp, Homo sapiens
ggaatgtgggatcta

SEQ ID NO: 224577 - DNA, 15 bp, Homo sapiens
tggaatgtgggatct

SEQ ID NO: 224578 - DNA, 15 bp, Homo sapiens
ttggaatgtgggatc

SEQ ID NO: 224579 - DNA, 15 bp, Homo sapiens
attggaatgtgggat

SEQ ID NO: 224580 - DNA, 15 bp, Homo sapiens
cattggaatgtggga

SEQ ID NO: 224581 - DNA, 15 bp, Homo sapiens
ccattggaatgtggg

SEQ ID NO: 224582 - DNA, 15 bp, Homo sapiens
cccattggaatgtgg

SEQ ID NO: 224583 - DNA, 15 bp, Homo sapiens
acccattggaatgtg

SEQ ID NO: 224584 - DNA, 15 bp, Homo sapiens
tacccattggaatgt

SEQ ID NO: 224585 - DNA, 15 bp, Homo sapiens
atacccattggaatg

SEQ ID NO: 224586 - DNA, 15 bp, Homo sapiens
catacccattggaat

SEQ ID NO: 224587 - DNA, 15 bp, Homo sapiens
ccatacccattggaa

SEQ ID NO: 224588 - DNA, 15 bp, Homo sapiens
cccatacccattgga

SEQ ID NO: 224589 - DNA, 15 bp, Homo sapiens
ccccatacccattgg

SEQ ID NO: 224590 - DNA, 15 bp, Homo sapiens
cccccatacccattg

SEQ ID NO: 224591 - DNA, 15 bp, Homo sapiens
tcccccatacccatt

SEQ ID NO: 224592 - DNA, 15 bp, Homo sapiens
ctcccccatacccat

SEQ ID NO: 224593 - DNA, 15 bp, Homo sapiens
cctcccccataccca

SEQ ID NO: 224594 - DNA, 15 bp, Homo sapiens
tcctcccccataccc

SEQ ID NO: 224595 - DNA, 15 bp, Homo sapiens
gtcctcccccatacc

SEQ ID NO: 224596 - DNA, 15 bp, Homo sapiens
tgtcctcccccatac

SEQ ID NO: 224597 - DNA, 15 bp, Homo sapiens
ctgtcctcccccata

SEQ ID NO: 224598 - DNA, 15 bp, Homo sapiens
tctgtcctcccccat

SEQ ID NO: 224599 - DNA, 15 bp, Homo sapiens
ctctgtcctccccca

SEQ ID NO: 224600 - DNA, 15 bp, Homo sapiens
tctctgtcctccccc

SEQ ID NO: 224601 - DNA, 15 bp, Homo sapiens
ttctctgtcctcccc

SEQ ID NO: 224602 - DNA, 15 bp, Homo sapiens
tttctctgtcctccc

SEQ ID NO: 224603 - DNA, 15 bp, Homo sapiens
ttttctctgtcctcc

SEQ ID NO: 224604 - DNA, 15 bp, Homo sapiens
tttttctctgtcctc

SEQ ID NO: 224605 - DNA, 15 bp, Homo sapiens
atttttctctgtcct

SEQ ID NO: 224606 - DNA, 15 bp, Homo sapiens
aatttttctctgtcc

SEQ ID NO: 224607 - DNA, 15 bp, Homo sapiens
taatttttctctgtc

SEQ ID NO: 224608 - DNA, 15 bp, Homo sapiens
gtaatttttctctgt

SEQ ID NO: 224609 - DNA, 15 bp, Homo sapiens
tgtaatttttctctg

SEQ ID NO: 224610 - DNA, 15 bp, Homo sapiens
ttgtaatttttctct

SEQ ID NO: 224611 - DNA, 15 bp, Homo sapiens
cttgtaatttttctc

SEQ ID NO: 224612 - DNA, 15 bp, Homo sapiens
acttgtaatttttct

SEQ ID NO: 224613 - DNA, 15 bp, Homo sapiens
gacttgtaatttttc

SEQ ID NO: 224614 - DNA, 15 bp, Homo sapiens
tgacttgtaattttt

SEQ ID NO: 224615 - DNA, 15 bp, Homo sapiens
ttgacttgtaatttt

SEQ ID NO: 224616 - DNA, 15 bp, Homo sapiens
cttgacttgtaattt

SEQ ID NO: 224617 - DNA, 15 bp, Homo sapiens
gcttgacttgtaatt

SEQ ID NO: 224618 - DNA, 15 bp, Homo sapiens
tgcttgacttgtaat

SEQ ID NO: 224619 - DNA, 15 bp, Homo sapiens
ttgcttgacttgtaa

SEQ ID NO: 224620 - DNA, 15 bp, Homo sapiens
gttgcttgacttgta

SEQ ID NO: 224621 - DNA, 15 bp, Homo sapiens
tgttgcttgacttgt

SEQ ID NO: 224622 - DNA, 15 bp, Homo sapiens
ttgttgcttgacttg

SEQ ID NO: 224623 - DNA, 15 bp, Homo sapiens
tttgttgcttgactt

SEQ ID NO: 224624 - DNA, 15 bp, Homo sapiens
atttgttgcttgact

SEQ ID NO: 224625 - DNA, 15 bp, Homo sapiens
tatttgttgcttgac

SEQ ID NO: 224626 - DNA, 15 bp, Homo sapiens
ttatttgttgcttga

SEQ ID NO: 224627 - DNA, 15 bp, Homo sapiens
tttatttgttgcttg

SEQ ID NO: 224628 - DNA, 15 bp, Homo sapiens
gtttatttgttgctt

SEQ ID NO: 224629 - DNA, 15 bp, Homo sapiens
tgtttatttgttgct

SEQ ID NO: 224630 - DNA, 15 bp, Homo sapiens
ttgtttatttgttgc

SEQ ID NO: 224631 - DNA, 15 bp, Homo sapiens
cttgtttatttgttg

SEQ ID NO: 224632 - DNA, 15 bp, Homo sapiens
tcttgtttatttgtt

SEQ ID NO: 224633 - DNA, 15 bp, Homo sapiens
gtcttgtttatttgt

SEQ ID NO: 224634 - DNA, 15 bp, Homo sapiens
ggtcttgtttatttg

SEQ ID NO: 224635 - DNA, 15 bp, Homo sapiens
tggtcttgtttattt

SEQ ID NO: 224636 - DNA, 15 bp, Homo sapiens
atggtcttgtttatt

SEQ ID NO: 224637 - DNA, 15 bp, Homo sapiens
catggtcttgtttat

SEQ ID NO: 224638 - DNA, 15 bp, Homo sapiens
acatggtcttgttta

SEQ ID NO: 224639 - DNA, 15 bp, Homo sapiens
gacatggtcttgttt

SEQ ID NO: 224640 - DNA, 15 bp, Homo sapiens
tgacatggtcttgtt

SEQ ID NO: 224641 - DNA, 15 bp, Homo sapiens
ttgacatggtcttgt

SEQ ID NO: 224642 - DNA, 15 bp, Homo sapiens
tttgacatggtcttg

SEQ ID NO: 224643 - DNA, 15 bp, Homo sapiens
atttgacatggtctt

SEQ ID NO: 224644 - DNA, 15 bp, Homo sapiens
aatttgacatggtct

SEQ ID NO: 224645 - DNA, 15 bp, Homo sapiens
aaatttgacatggtc

SEQ ID NO: 224646 - DNA, 15 bp, Homo sapiens
caaatttgacatggt

SEQ ID NO: 224647 - DNA, 15 bp, Homo sapiens
tcaaatttgacatgg

SEQ ID NO: 224648 - DNA, 15 bp, Homo sapiens
atcaaatttgacatg

SEQ ID NO: 224649 - DNA, 15 bp, Homo sapiens
tatcaaatttgacat

SEQ ID NO: 224650 - DNA, 15 bp, Homo sapiens
ttatcaaatttgaca

SEQ ID NO: 224651 - DNA, 15 bp, Homo sapiens
tttatcaaatttgac

SEQ ID NO: 224652 - DNA, 15 bp, Homo sapiens
gtttatcaaatttga

SEQ ID NO: 224653 - DNA, 15 bp, Homo sapiens
cgtttatcaaatttg

SEQ ID NO: 224654 - DNA, 15 bp, Homo sapiens
acgtttatcaaattt

SEQ ID NO: 224655 - DNA, 15 bp, Homo sapiens
aacgtttatcaaatt

SEQ ID NO: 224656 - DNA, 15 bp, Homo sapiens
aaacgtttatcaaat

SEQ ID NO: 224657 - DNA, 15 bp, Homo sapiens
aaaacgtttatcaaa

SEQ ID NO: 224658 - DNA, 15 bp, Homo sapiens
caaaacgtttatcaa

SEQ ID NO: 224659 - DNA, 15 bp, Homo sapiens
tcaaaacgtttatca

SEQ ID NO: 224660 - DNA, 15 bp, Homo sapiens
ttcaaaacgtttatc

SEQ ID NO: 224661 - DNA, 15 bp, Homo sapiens
tttcaaaacgtttat

SEQ ID NO: 224662 - DNA, 15 bp, Homo sapiens
ctttcaaaacgttta

SEQ ID NO: 224663 - DNA, 15 bp, Homo sapiens
tctttcaaaacgttt

SEQ ID NO: 224664 - DNA, 15 bp, Homo sapiens
ttctttcaaaacgtt

SEQ ID NO: 224665 - DNA, 15 bp, Homo sapiens
tttctttcaaaacgt

SEQ ID NO: 224666 - DNA, 15 bp, Homo sapiens
atttctttcaaaacg

SEQ ID NO: 224667 - DNA, 15 bp, Homo sapiens
tatttctttcaaaac

SEQ ID NO: 224668 - DNA, 15 bp, Homo sapiens
ttatttctttcaaaa

SEQ ID NO: 224669 - DNA, 15 bp, Homo sapiens
attatttctttcaaa

SEQ ID NO: 224670 - DNA, 15 bp, Homo sapiens
tattatttctttcaa

SEQ ID NO: 224671 - DNA, 15 bp, Homo sapiens
ctattatttctttca

SEQ ID NO: 224672 - DNA, 15 bp, Homo sapiens
cctattatttctttc

SEQ ID NO: 224673 - DNA, 15 bp, Homo sapiens
tcctattatttcttt

SEQ ID NO: 224674 - DNA, 15 bp, Homo sapiens
atcctattatttctt

SEQ ID NO: 224675 - DNA, 15 bp, Homo sapiens
catcctattatttct

SEQ ID NO: 224676 - DNA, 15 bp, Homo sapiens
tcatcctattatttc

SEQ ID NO: 224677 - DNA, 15 bp, Homo sapiens
atcatcctattattt

SEQ ID NO: 224678 - DNA, 15 bp, Homo sapiens
catcatcctattatt

SEQ ID NO: 224679 - DNA, 15 bp, Homo sapiens
tcatcatcctattat

SEQ ID NO: 224680 - DNA, 15 bp, Homo sapiens
ttcatcatcctatta

SEQ ID NO: 224681 - DNA, 15 bp, Homo sapiens
gttcatcatcctatt

SEQ ID NO: 224682 - DNA, 15 bp, Homo sapiens
ggttcatcatcctat

SEQ ID NO: 224683 - DNA, 15 bp, Homo sapiens
aggttcatcatccta

SEQ ID NO: 224684 - DNA, 15 bp, Homo sapiens
caggttcatcatcct

SEQ ID NO: 224685 - DNA, 15 bp, Homo sapiens
tcaggttcatcatcc

SEQ ID NO: 224686 - DNA, 15 bp, Homo sapiens
ctcaggttcatcatc

SEQ ID NO: 224687 - DNA, 15 bp, Homo sapiens
cctcaggttcatcat

SEQ ID NO: 224688 - DNA, 15 bp, Homo sapiens
tcctcaggttcatca

SEQ ID NO: 224689 - DNA, 15 bp, Homo sapiens
atcctcaggttcatc

SEQ ID NO: 224690 - DNA, 15 bp, Homo sapiens
catcctcaggttcat

SEQ ID NO: 224691 - DNA, 15 bp, Homo sapiens
ccatcctcaggttca

SEQ ID NO: 224692 - DNA, 15 bp, Homo sapiens
accatcctcaggttc

SEQ ID NO: 224693 - DNA, 15 bp, Homo sapiens
taccatcctcaggtt

SEQ ID NO: 224694 - DNA, 15 bp, Homo sapiens
gtaccatcctcaggt

SEQ ID NO: 224695 - DNA, 15 bp, Homo sapiens
agtaccatcctcagg

SEQ ID NO: 224696 - DNA, 15 bp, Homo sapiens
cagtaccatcctcag

SEQ ID NO: 224697 - DNA, 15 bp, Homo sapiens
gcagtaccatcctca

SEQ ID NO: 224698 - DNA, 15 bp, Homo sapiens
ggcagtaccatcctc

SEQ ID NO: 224699 - DNA, 15 bp, Homo sapiens
aggcagtaccatcct

SEQ ID NO: 224700 - DNA, 15 bp, Homo sapiens
aaggcagtaccatcc

SEQ ID NO: 224701 - DNA, 15 bp, Homo sapiens
aaaggcagtaccatc

SEQ ID NO: 224702 - DNA, 15 bp, Homo sapiens
caaaggcagtaccat

SEQ ID NO: 224703 - DNA, 15 bp, Homo sapiens
tcaaaggcagtacca

SEQ ID NO: 224704 - DNA, 15 bp, Homo sapiens
atcaaaggcagtacc

SEQ ID NO: 224705 - DNA, 15 bp, Homo sapiens
catcaaaggcagtac

SEQ ID NO: 224706 - DNA, 15 bp, Homo sapiens
ccatcaaaggcagta

SEQ ID NO: 224707 - DNA, 15 bp, Homo sapiens
tccatcaaaggcagt

SEQ ID NO: 224708 - DNA, 15 bp, Homo sapiens
atccatcaaaggcag

SEQ ID NO: 224709 - DNA, 15 bp, Homo sapiens
aatccatcaaaggca

SEQ ID NO: 224710 - DNA, 15 bp, Homo sapiens
caatccatcaaaggc

SEQ ID NO: 224711 - DNA, 15 bp, Homo sapiens
ccaatccatcaaagg

SEQ ID NO: 224712 - DNA, 15 bp, Homo sapiens
tccaatccatcaaag

SEQ ID NO: 224713 - DNA, 15 bp, Homo sapiens
atccaatccatcaaa

SEQ ID NO: 224714 - DNA, 15 bp, Homo sapiens
catccaatccatcaa

SEQ ID NO: 224715 - DNA, 15 bp, Homo sapiens
ccatccaatccatca

SEQ ID NO: 224716 - DNA, 15 bp, Homo sapiens
cccatccaatccatc

SEQ ID NO: 224717 - DNA, 15 bp, Homo sapiens
ccccatccaatccat

SEQ ID NO: 224718 - DNA, 15 bp, Homo sapiens
cccccatccaatcca

SEQ ID NO: 224719 - DNA, 15 bp, Homo sapiens
tcccccatccaatcc

SEQ ID NO: 224720 - DNA, 15 bp, Homo sapiens
ctcccccatccaatc

SEQ ID NO: 224721 - DNA, 15 bp, Homo sapiens
cctcccccatccaat

SEQ ID NO: 224722 - DNA, 15 bp, Homo sapiens
acctcccccatccaa

SEQ ID NO: 224723 - DNA, 15 bp, Homo sapiens
gacctcccccatcca

SEQ ID NO: 224724 - DNA, 15 bp, Homo sapiens
ggacctcccccatcc

SEQ ID NO: 224725 - DNA, 15 bp, Homo sapiens
gggacctcccccatc

SEQ ID NO: 224726 - DNA, 15 bp, Homo sapiens
agggacctcccccat

SEQ ID NO: 224727 - DNA, 15 bp, Homo sapiens
gagggacctccccca

SEQ ID NO: 224728 - DNA, 15 bp, Homo sapiens
agagggacctccccc

SEQ ID NO: 224729 - DNA, 15 bp, Homo sapiens
gagagggacctcccc

SEQ ID NO: 224730 - DNA, 15 bp, Homo sapiens
tgagagggacctccc

SEQ ID NO: 224731 - DNA, 15 bp, Homo sapiens
ctgagagggacctcc

SEQ ID NO: 224732 - DNA, 15 bp, Homo sapiens
tctgagagggacctc

SEQ ID NO: 224733 - DNA, 15 bp, Homo sapiens
ctctgagagggacct

SEQ ID NO: 224734 - DNA, 15 bp, Homo sapiens
cctctgagagggacc

SEQ ID NO: 224735 - DNA, 15 bp, Homo sapiens
ccctctgagagggac

SEQ ID NO: 224736 - DNA, 15 bp, Homo sapiens
tccctctgagaggga

SEQ ID NO: 224737 - DNA, 15 bp, Homo sapiens
ctccctctgagaggg

SEQ ID NO: 224738 - DNA, 15 bp, Homo sapiens
tctccctctgagagg

SEQ ID NO: 224739 - DNA, 15 bp, Homo sapiens
gtctccctctgagag

SEQ ID NO: 224740 - DNA, 15 bp, Homo sapiens
ggtctccctctgaga

SEQ ID NO: 224741 - DNA, 15 bp, Homo sapiens
gggtctccctctgag

SEQ ID NO: 224742 - DNA, 15 bp, Homo sapiens
agggtctccctctga

SEQ ID NO: 224743 - DNA, 15 bp, Homo sapiens
cagggtctccctctg

SEQ ID NO: 224744 - DNA, 15 bp, Homo sapiens
tcagggtctccctct

SEQ ID NO: 224745 - DNA, 15 bp, Homo sapiens
ttcagggtctccctc

SEQ ID NO: 224746 - DNA, 15 bp, Homo sapiens
cttcagggtctccct

SEQ ID NO: 224747 - DNA, 15 bp, Homo sapiens
tcttcagggtctccc

SEQ ID NO: 224748 - DNA, 15 bp, Homo sapiens
gtcttcagggtctcc

SEQ ID NO: 224749 - DNA, 15 bp, Homo sapiens
ggtcttcagggtctc

SEQ ID NO: 224750 - DNA, 15 bp, Homo sapiens
aggtcttcagggtct

SEQ ID NO: 224751 - DNA, 15 bp, Homo sapiens
aaggtcttcagggtc

SEQ ID NO: 224752 - DNA, 15 bp, Homo sapiens
aaaggtcttcagggt

SEQ ID NO: 224753 - DNA, 15 bp, Homo sapiens
gaaaggtcttcaggg

SEQ ID NO: 224754 - DNA, 15 bp, Homo sapiens
tgaaaggtcttcagg

SEQ ID NO: 224755 - DNA, 15 bp, Homo sapiens
ctgaaaggtcttcag

SEQ ID NO: 224756 - DNA, 15 bp, Homo sapiens
actgaaaggtcttca

SEQ ID NO: 224757 - DNA, 15 bp, Homo sapiens
aactgaaaggtcttc

SEQ ID NO: 224758 - DNA, 15 bp, Homo sapiens
aaactgaaaggtctt

SEQ ID NO: 224759 - DNA, 15 bp, Homo sapiens
taaactgaaaggtct

SEQ ID NO: 224760 - DNA, 15 bp, Homo sapiens
ctaaactgaaaggtc

SEQ ID NO: 224761 - DNA, 15 bp, Homo sapiens
gctaaactgaaaggt

SEQ ID NO: 224762 - DNA, 15 bp, Homo sapiens
tgctaaactgaaagg

SEQ ID NO: 224763 - DNA, 15 bp, Homo sapiens
ctgctaaactgaaag

SEQ ID NO: 224764 - DNA, 15 bp, Homo sapiens
tctgctaaactgaaa

SEQ ID NO: 224765 - DNA, 15 bp, Homo sapiens
ctctgctaaactgaa

SEQ ID NO: 224766 - DNA, 15 bp, Homo sapiens
actctgctaaactga

SEQ ID NO: 224767 - DNA, 15 bp, Homo sapiens
aactctgctaaactg

SEQ ID NO: 224768 - DNA, 15 bp, Homo sapiens
taactctgctaaact

SEQ ID NO: 224769 - DNA, 15 bp, Homo sapiens
ataactctgctaaac

SEQ ID NO: 224770 - DNA, 15 bp, Homo sapiens
cataactctgctaaa

SEQ ID NO: 224771 - DNA, 15 bp, Homo sapiens
acataactctgctaa

SEQ ID NO: 224772 - DNA, 15 bp, Homo sapiens
aacataactctgcta

SEQ ID NO: 224773 - DNA, 15 bp, Homo sapiens
taacataactctgct

SEQ ID NO: 224774 - DNA, 15 bp, Homo sapiens
ataacataactctgc

SEQ ID NO: 224775 - DNA, 15 bp, Homo sapiens
aataacataactctg

SEQ ID NO: 224776 - DNA, 15 bp, Homo sapiens
gaataacataactct

SEQ ID NO: 224777 - DNA, 15 bp, Homo sapiens
agaataacataactc

SEQ ID NO: 224778 - DNA, 15 bp, Homo sapiens
cagaataacataact

SEQ ID NO: 224779 - DNA, 15 bp, Homo sapiens
tcagaataacataac

SEQ ID NO: 224780 - DNA, 15 bp, Homo sapiens
ttcagaataacataa

SEQ ID NO: 224781 - DNA, 15 bp, Homo sapiens
gttcagaataacata

SEQ ID NO: 224782 - DNA, 15 bp, Homo sapiens
ggttcagaataacat

SEQ ID NO: 224783 - DNA, 15 bp, Homo sapiens
tggttcagaataaca

SEQ ID NO: 224784 - DNA, 15 bp, Homo sapiens
ttggttcagaataac

SEQ ID NO: 224785 - DNA, 15 bp, Homo sapiens
attggttcagaataa

SEQ ID NO: 224786 - DNA, 15 bp, Homo sapiens
gattggttcagaata

SEQ ID NO: 224787 - DNA, 15 bp, Homo sapiens
ggattggttcagaat

SEQ ID NO: 224788 - DNA, 15 bp, Homo sapiens
gggattggttcagaa

SEQ ID NO: 224789 - DNA, 15 bp, Homo sapiens
tgggattggttcaga

SEQ ID NO: 224790 - DNA, 15 bp, Homo sapiens
atgggattggttcag

SEQ ID NO: 224791 - DNA, 15 bp, Homo sapiens
tatgggattggttca

SEQ ID NO: 224792 - DNA, 15 bp, Homo sapiens
ttatgggattggttc

SEQ ID NO: 224793 - DNA, 15 bp, Homo sapiens
tttatgggattggtt

SEQ ID NO: 224794 - DNA, 15 bp, Homo sapiens
ctttatgggattggt

SEQ ID NO: 224795 - DNA, 15 bp, Homo sapiens
gctttatgggattgg

SEQ ID NO: 224796 - DNA, 15 bp, Homo sapiens
tgctttatgggattg

SEQ ID NO: 224797 - DNA, 15 bp, Homo sapiens
ttgctttatgggatt

SEQ ID NO: 224798 - DNA, 15 bp, Homo sapiens
tttgctttatgggat

SEQ ID NO: 224799 - DNA, 15 bp, Homo sapiens
gtttgctttatggga

SEQ ID NO: 224800 - DNA, 15 bp, Homo sapiens
ggtttgctttatggg

SEQ ID NO: 224801 - DNA, 15 bp, Homo sapiens
gggtttgctttatgg

SEQ ID NO: 224802 - DNA, 15 bp, Homo sapiens
tgggtttgctttatg

SEQ ID NO: 224803 - DNA, 15 bp, Homo sapiens
gtgggtttgctttat

SEQ ID NO: 224804 - DNA, 15 bp, Homo sapiens
agtgggtttgcttta

SEQ ID NO: 224805 - DNA, 15 bp, Homo sapiens
aagtgggtttgcttt

SEQ ID NO: 224806 - DNA, 15 bp, Homo sapiens
gaagtgggtttgctt

SEQ ID NO: 224807 - DNA, 15 bp, Homo sapiens
ggaagtgggtttgct

SEQ ID NO: 224808 - DNA, 15 bp, Homo sapiens
gggaagtgggtttgc

SEQ ID NO: 224809 - DNA, 15 bp, Homo sapiens
agggaagtgggtttg

SEQ ID NO: 224810 - DNA, 15 bp, Homo sapiens
gagggaagtgggttt

SEQ ID NO: 224811 - DNA, 15 bp, Homo sapiens
tgagggaagtgggtt

SEQ ID NO: 224812 - DNA, 15 bp, Homo sapiens
atgagggaagtgggt

SEQ ID NO: 224813 - DNA, 15 bp, Homo sapiens
catgagggaagtggg

SEQ ID NO: 224814 - DNA, 15 bp, Homo sapiens
acatgagggaagtgg

SEQ ID NO: 224815 - DNA, 15 bp, Homo sapiens
aacatgagggaagtg

SEQ ID NO: 224816 - DNA, 15 bp, Homo sapiens
aaacatgagggaagt

SEQ ID NO: 224817 - DNA, 15 bp, Homo sapiens
aaaacatgagggaag

SEQ ID NO: 224818 - DNA, 15 bp, Homo sapiens
gaaaacatgagggaa

SEQ ID NO: 224819 - DNA, 15 bp, Homo sapiens
agaaaacatgaggga

SEQ ID NO: 224820 - DNA, 15 bp, Homo sapiens
aagaaaacatgaggg

SEQ ID NO: 224821 - DNA, 15 bp, Homo sapiens
gaagaaaacatgagg

SEQ ID NO: 224822 - DNA, 15 bp, Homo sapiens
agaagaaaacatgag

SEQ ID NO: 224823 - DNA, 15 bp, Homo sapiens
cagaagaaaacatga

SEQ ID NO: 224824 - DNA, 15 bp, Homo sapiens
tcagaagaaaacatg

SEQ ID NO: 224825 - DNA, 15 bp, Homo sapiens
gtcagaagaaaacat

SEQ ID NO: 224826 - DNA, 15 bp, Homo sapiens
tgtcagaagaaaaca

SEQ ID NO: 224827 - DNA, 15 bp, Homo sapiens
ctgtcagaagaaaac

SEQ ID NO: 224828 - DNA, 15 bp, Homo sapiens
tctgtcagaagaaaa

SEQ ID NO: 224829 - DNA, 15 bp, Homo sapiens
gtctgtcagaagaaa

SEQ ID NO: 224830 - DNA, 15 bp, Homo sapiens
ggtctgtcagaagaa

SEQ ID NO: 224831 - DNA, 15 bp, Homo sapiens
gggtctgtcagaaga

SEQ ID NO: 224832 - DNA, 15 bp, Homo sapiens
tgggtctgtcagaag

SEQ ID NO: 224833 - DNA, 15 bp, Homo sapiens
ctgggtctgtcagaa

SEQ ID NO: 224834 - DNA, 15 bp, Homo sapiens
gctgggtctgtcaga

SEQ ID NO: 224835 - DNA, 15 bp, Homo sapiens
tgctgggtctgtcag

SEQ ID NO: 224836 - DNA, 15 bp, Homo sapiens
gtgctgggtctgtca

SEQ ID NO: 224837 - DNA, 15 bp, Homo sapiens
agtgctgggtctgtc

SEQ ID NO: 224838 - DNA, 15 bp, Homo sapiens
tagtgctgggtctgt

SEQ ID NO: 224839 - DNA, 15 bp, Homo sapiens
ttagtgctgggtctg

SEQ ID NO: 224840 - DNA, 15 bp, Homo sapiens
gttagtgctgggtct

SEQ ID NO: 224841 - DNA, 15 bp, Homo sapiens
agttagtgctgggtc

SEQ ID NO: 224842 - DNA, 15 bp, Homo sapiens
aagttagtgctgggt

SEQ ID NO: 224843 - DNA, 15 bp, Homo sapiens
aaagttagtgctggg

SEQ ID NO: 224844 - DNA, 15 bp, Homo sapiens
aaaagttagtgctgg

SEQ ID NO: 224845 - DNA, 15 bp, Homo sapiens
aaaaagttagtgctg

SEQ ID NO: 224846 - DNA, 15 bp, Homo sapiens
gaaaaagttagtgct

SEQ ID NO: 224847 - DNA, 15 bp, Homo sapiens
agaaaaagttagtgc

SEQ ID NO: 224848 - DNA, 15 bp, Homo sapiens
cagaaaaagttagtg

SEQ ID NO: 224849 - DNA, 15 bp, Homo sapiens
ccagaaaaagttagt

SEQ ID NO: 224850 - DNA, 15 bp, Homo sapiens
cccagaaaaagttag

SEQ ID NO: 224851 - DNA, 15 bp, Homo sapiens
ccccagaaaaagtta

SEQ ID NO: 224852 - DNA, 15 bp, Homo sapiens
accccagaaaaagtt

SEQ ID NO: 224853 - DNA, 15 bp, Homo sapiens
caccccagaaaaagt

SEQ ID NO: 224854 - DNA, 15 bp, Homo sapiens
acaccccagaaaaag

SEQ ID NO: 224855 - DNA, 15 bp, Homo sapiens
aacaccccagaaaaa

SEQ ID NO: 224856 - DNA, 15 bp, Homo sapiens
gaacaccccagaaaa

SEQ ID NO: 224857 - DNA, 15 bp, Homo sapiens
tgaacaccccagaaa

SEQ ID NO: 224858 - DNA, 15 bp, Homo sapiens
gtgaacaccccagaa

SEQ ID NO: 224859 - DNA, 15 bp, Homo sapiens
cgtgaacaccccaga

SEQ ID NO: 224860 - DNA, 15 bp, Homo sapiens
ccgtgaacaccccag

SEQ ID NO: 224861 - DNA, 15 bp, Homo sapiens
accgtgaacacccca

SEQ ID NO: 224862 - DNA, 15 bp, Homo sapiens
aaccgtgaacacccc

SEQ ID NO: 224863 - DNA, 15 bp, Homo sapiens
aaaccgtgaacaccc

SEQ ID NO: 224864 - DNA, 15 bp, Homo sapiens
taaaccgtgaacacc

SEQ ID NO: 224865 - DNA, 15 bp, Homo sapiens
ataaaccgtgaacac

SEQ ID NO: 224866 - DNA, 15 bp, Homo sapiens
tataaaccgtgaaca

SEQ ID NO: 224867 - DNA, 15 bp, Homo sapiens
ttataaaccgtgaac

SEQ ID NO: 224868 - DNA, 15 bp, Homo sapiens
attataaaccgtgaa

SEQ ID NO: 224869 - DNA, 15 bp, Homo sapiens
cattataaaccgtga

SEQ ID NO: 224870 - DNA, 15 bp, Homo sapiens
gcattataaaccgtg

SEQ ID NO: 224871 - DNA, 15 bp, Homo sapiens
ggcattataaaccgt

SEQ ID NO: 224872 - DNA, 15 bp, Homo sapiens
aggcattataaaccg

SEQ ID NO: 224873 - DNA, 15 bp, Homo sapiens
aaggcattataaacc

SEQ ID NO: 224874 - DNA, 15 bp, Homo sapiens
caaggcattataaac

SEQ ID NO: 224875 - DNA, 15 bp, Homo sapiens
acaaggcattataaa

SEQ ID NO: 224876 - DNA, 15 bp, Homo sapiens
aacaaggcattataa

SEQ ID NO: 224877 - DNA, 15 bp, Homo sapiens
taacaaggcattata

SEQ ID NO: 224878 - DNA, 15 bp, Homo sapiens
gtaacaaggcattat

SEQ ID NO: 224879 - DNA, 15 bp, Homo sapiens
agtaacaaggcatta

SEQ ID NO: 224880 - DNA, 15 bp, Homo sapiens
gagtaacaaggcatt

SEQ ID NO: 224881 - DNA, 15 bp, Homo sapiens
tgagtaacaaggcat

SEQ ID NO: 224882 - DNA, 15 bp, Homo sapiens
ctgagtaacaaggca

SEQ ID NO: 224883 - DNA, 15 bp, Homo sapiens
actgagtaacaaggc

SEQ ID NO: 224884 - DNA, 15 bp, Homo sapiens
tactgagtaacaagg

SEQ ID NO: 224885 - DNA, 15 bp, Homo sapiens
ttactgagtaacaag

SEQ ID NO: 224886 - DNA, 15 bp, Homo sapiens
attactgagtaacaa

SEQ ID NO: 224887 - DNA, 15 bp, Homo sapiens
aattactgagtaaca

SEQ ID NO: 224888 - DNA, 15 bp, Homo sapiens
caattactgagtaac

SEQ ID NO: 224889 - DNA, 15 bp, Homo sapiens
acaattactgagtaa

SEQ ID NO: 224890 - DNA, 15 bp, Homo sapiens
aacaattactgagta

SEQ ID NO: 224891 - DNA, 15 bp, Homo sapiens
aaacaattactgagt

SEQ ID NO: 224892 - DNA, 15 bp, Homo sapiens
taaacaattactgag

SEQ ID NO: 224893 - DNA, 15 bp, Homo sapiens
gtaaacaattactga

SEQ ID NO: 224894 - DNA, 15 bp, Homo sapiens
tgtaaacaattactg

SEQ ID NO: 224895 - DNA, 15 bp, Homo sapiens
atgtaaacaattact

SEQ ID NO: 224896 - DNA, 15 bp, Homo sapiens
aatgtaaacaattac

SEQ ID NO: 224897 - DNA, 15 bp, Homo sapiens
gaatgtaaacaatta

SEQ ID NO: 224898 - DNA, 15 bp, Homo sapiens
ggaatgtaaacaatt

SEQ ID NO: 224899 - DNA, 15 bp, Homo sapiens
gggaatgtaaacaat

SEQ ID NO: 224900 - DNA, 15 bp, Homo sapiens
tgggaatgtaaacaa

SEQ ID NO: 224901 - DNA, 15 bp, Homo sapiens
ttgggaatgtaaaca

SEQ ID NO: 224902 - DNA, 15 bp, Homo sapiens
tttgggaatgtaaac

SEQ ID NO: 224903 - DNA, 15 bp, Homo sapiens
ctttgggaatgtaaa

SEQ ID NO: 224904 - DNA, 15 bp, Homo sapiens
cctttgggaatgtaa

SEQ ID NO: 224905 - DNA, 15 bp, Homo sapiens
tcctttgggaatgta

SEQ ID NO: 224906 - DNA, 15 bp, Homo sapiens
gtcctttgggaatgt

SEQ ID NO: 224907 - DNA, 15 bp, Homo sapiens
agtcctttgggaatg

SEQ ID NO: 224908 - DNA, 15 bp, Homo sapiens
gagtcctttgggaat

SEQ ID NO: 224909 - DNA, 15 bp, Homo sapiens
agagtcctttgggaa

SEQ ID NO: 224910 - DNA, 15 bp, Homo sapiens
gagagtcctttggga

SEQ ID NO: 224911 - DNA, 15 bp, Homo sapiens
agagagtcctttggg

SEQ ID NO: 224912 - DNA, 15 bp, Homo sapiens
gagagagtcctttgg

SEQ ID NO: 224913 - DNA, 15 bp, Homo sapiens
tgagagagtcctttg

SEQ ID NO: 224914 - DNA, 15 bp, Homo sapiens
atgagagagtccttt

SEQ ID NO: 224915 - DNA, 15 bp, Homo sapiens
catgagagagtcctt

SEQ ID NO: 224916 - DNA, 15 bp, Homo sapiens
acatgagagagtcct

SEQ ID NO: 224917 - DNA, 15 bp, Homo sapiens
aacatgagagagtcc

SEQ ID NO: 224918 - DNA, 15 bp, Homo sapiens
gaacatgagagagtc

SEQ ID NO: 224919 - DNA, 15 bp, Homo sapiens
agaacatgagagagt

SEQ ID NO: 224920 - DNA, 15 bp, Homo sapiens
aagaacatgagagag

SEQ ID NO: 224921 - DNA, 15 bp, Homo sapiens
aaagaacatgagaga

SEQ ID NO: 224922 - DNA, 15 bp, Homo sapiens
taaagaacatgagag

SEQ ID NO: 224923 - DNA, 15 bp, Homo sapiens
ttaaagaacatgaga

SEQ ID NO: 224924 - DNA, 15 bp, Homo sapiens
attaaagaacatgag

SEQ ID NO: 224925 - DNA, 15 bp, Homo sapiens
aattaaagaacatga

SEQ ID NO: 224926 - DNA, 15 bp, Homo sapiens
caattaaagaacatg

SEQ ID NO: 224927 - DNA, 15 bp, Homo sapiens
tcaattaaagaacat

SEQ ID NO: 224928 - DNA, 15 bp, Homo sapiens
ttcaattaaagaaca

SEQ ID NO: 224929 - DNA, 15 bp, Homo sapiens
tttcaattaaagaac

SEQ ID NO: 224930 - DNA, 15 bp, Homo sapiens
ctttcaattaaagaa

SEQ ID NO: 224931 - DNA, 15 bp, Homo sapiens
tctttcaattaaaga

SEQ ID NO: 224932 - DNA, 15 bp, Homo sapiens
ttctttcaattaaag

SEQ ID NO: 224933 - DNA, 15 bp, Homo sapiens
cttctttcaattaaa

SEQ ID NO: 224934 - DNA, 15 bp, Homo sapiens
tcttctttcaattaa

SEQ ID NO: 224935 - DNA, 15 bp, Homo sapiens
ctcttctttcaatta

SEQ ID NO: 224936 - DNA, 15 bp, Homo sapiens
tctcttctttcaatt

SEQ ID NO: 224937 - DNA, 15 bp, Homo sapiens
atctcttctttcaat

SEQ ID NO: 224938 - DNA, 15 bp, Homo sapiens
tatctcttctttcaa

SEQ ID NO: 224939 - DNA, 15 bp, Homo sapiens
ttatctcttctttca

SEQ ID NO: 224940 - DNA, 15 bp, Homo sapiens
tttatctcttctttc

SEQ ID NO: 224941 - DNA, 15 bp, Homo sapiens
ttttatctcttcttt

SEQ ID NO: 224942 - DNA, 15 bp, Homo sapiens
cttttatctcttctt

SEQ ID NO: 224943 - DNA, 15 bp, Homo sapiens
tcttttatctcttct

SEQ ID NO: 224944 - DNA, 15 bp, Homo sapiens
ttcttttatctcttc

SEQ ID NO: 224945 - DNA, 15 bp, Homo sapiens
cttcttttatctctt

SEQ ID NO: 224946 - DNA, 15 bp, Homo sapiens
ccttcttttatctct

SEQ ID NO: 224947 - DNA, 15 bp, Homo sapiens
tccttcttttatctc

SEQ ID NO: 224948 - DNA, 15 bp, Homo sapiens
ttccttcttttatct

SEQ ID NO: 224949 - DNA, 15 bp, Homo sapiens
attccttcttttatc

SEQ ID NO: 224950 - DNA, 15 bp, Homo sapiens
aattccttcttttat

SEQ ID NO: 224951 - DNA, 15 bp, Homo sapiens
aaattccttctttta

SEQ ID NO: 224952 - DNA, 15 bp, Homo sapiens
taaattccttctttt

SEQ ID NO: 224953 - DNA, 15 bp, Homo sapiens
ttaaattccttcttt

SEQ ID NO: 224954 - DNA, 15 bp, Homo sapiens
cttaaattccttctt

SEQ ID NO: 224955 - DNA, 15 bp, Homo sapiens
acttaaattccttct

SEQ ID NO: 224956 - DNA, 15 bp, Homo sapiens
tacttaaattccttc

SEQ ID NO: 224957 - DNA, 15 bp, Homo sapiens
atacttaaattcctt

SEQ ID NO: 224958 - DNA, 15 bp, Homo sapiens
tatacttaaattcct

SEQ ID NO: 224959 - DNA, 15 bp, Homo sapiens
gtatacttaaattcc

SEQ ID NO: 224960 - DNA, 15 bp, Homo sapiens
tgtatacttaaattc

SEQ ID NO: 224961 - DNA, 15 bp, Homo sapiens
ctgtatacttaaatt

SEQ ID NO: 224962 - DNA, 15 bp, Homo sapiens
cctgtatacttaaat

SEQ ID NO: 224963 - DNA, 15 bp, Homo sapiens
gcctgtatacttaaa

SEQ ID NO: 224964 - DNA, 15 bp, Homo sapiens
cgcctgtatacttaa

SEQ ID NO: 224965 - DNA, 15 bp, Homo sapiens
gcgcctgtatactta

SEQ ID NO: 224966 - DNA, 15 bp, Homo sapiens
ggcgcctgtatactt

SEQ ID NO: 224967 - DNA, 15 bp, Homo sapiens
aggcgcctgtatact

SEQ ID NO: 224968 - DNA, 15 bp, Homo sapiens
aaggcgcctgtatac

SEQ ID NO: 224969 - DNA, 15 bp, Homo sapiens
aaaggcgcctgtata

SEQ ID NO: 224970 - DNA, 15 bp, Homo sapiens
caaaggcgcctgtat

SEQ ID NO: 224971 - DNA, 15 bp, Homo sapiens
acaaaggcgcctgta

SEQ ID NO: 224972 - DNA, 15 bp, Homo sapiens
aacaaaggcgcctgt

SEQ ID NO: 224973 - DNA, 15 bp, Homo sapiens
gaacaaaggcgcctg

SEQ ID NO: 224974 - DNA, 15 bp, Homo sapiens
ggaacaaaggcgcct

SEQ ID NO: 224975 - DNA, 15 bp, Homo sapiens
aggaacaaaggcgcc

SEQ ID NO: 224976 - DNA, 15 bp, Homo sapiens
gaggaacaaaggcgc

SEQ ID NO: 224977 - DNA, 15 bp, Homo sapiens
tgaggaacaaaggcg

SEQ ID NO: 224978 - DNA, 15 bp, Homo sapiens
ctgaggaacaaaggc

SEQ ID NO: 224979 - DNA, 15 bp, Homo sapiens
cctgaggaacaaagg

SEQ ID NO: 224980 - DNA, 15 bp, Homo sapiens
tcctgaggaacaaag

SEQ ID NO: 224981 - DNA, 15 bp, Homo sapiens
ttcctgaggaacaaa

SEQ ID NO: 224982 - DNA, 15 bp, Homo sapiens
cttcctgaggaacaa

SEQ ID NO: 224983 - DNA, 15 bp, Homo sapiens
acttcctgaggaaca

SEQ ID NO: 224984 - DNA, 15 bp, Homo sapiens
aacttcctgaggaac

SEQ ID NO: 224985 - DNA, 15 bp, Homo sapiens
taacttcctgaggaa

SEQ ID NO: 224986 - DNA, 15 bp, Homo sapiens
ttaacttcctgagga

SEQ ID NO: 224987 - DNA, 15 bp, Homo sapiens
attaacttcctgagg

SEQ ID NO: 224988 - DNA, 15 bp, Homo sapiens
cattaacttcctgag

SEQ ID NO: 224989 - DNA, 15 bp, Homo sapiens
ccattaacttcctga

SEQ ID NO: 224990 - DNA, 15 bp, Homo sapiens
tccattaacttcctg

SEQ ID NO: 224991 - DNA, 15 bp, Homo sapiens
gtccattaacttcct

SEQ ID NO: 224992 - DNA, 15 bp, Homo sapiens
tgtccattaacttcc

SEQ ID NO: 224993 - DNA, 15 bp, Homo sapiens
atgtccattaacttc

SEQ ID NO: 224994 - DNA, 15 bp, Homo sapiens
aatgtccattaactt

SEQ ID NO: 224995 - DNA, 15 bp, Homo sapiens
gaatgtccattaact

SEQ ID NO: 224996 - DNA, 15 bp, Homo sapiens
ggaatgtccattaac

SEQ ID NO: 224997 - DNA, 15 bp, Homo sapiens
aggaatgtccattaa

SEQ ID NO: 224998 - DNA, 15 bp, Homo sapiens
caggaatgtccatta

SEQ ID NO: 224999 - DNA, 15 bp, Homo sapiens
ccaggaatgtccatt

SEQ ID NO: 225000 - DNA, 15 bp, Homo sapiens
tccaggaatgtccat

SEQ ID NO: 225001 - DNA, 15 bp, Homo sapiens
ttccaggaatgtcca

SEQ ID NO: 225002 - DNA, 15 bp, Homo sapiens
tttccaggaatgtcc

SEQ ID NO: 225003 - DNA, 15 bp, Homo sapiens
ttttccaggaatgtc

SEQ ID NO: 225004 - DNA, 15 bp, Homo sapiens
attttccaggaatgt

SEQ ID NO: 225005 - DNA, 15 bp, Homo sapiens
cattttccaggaatg

SEQ ID NO: 225006 - DNA, 15 bp, Homo sapiens
tcattttccaggaat

SEQ ID NO: 225007 - DNA, 15 bp, Homo sapiens
ctcattttccaggaa

SEQ ID NO: 225008 - DNA, 15 bp, Homo sapiens
tctcattttccagga

SEQ ID NO: 225009 - DNA, 15 bp, Homo sapiens
ctctcattttccagg

SEQ ID NO: 225010 - DNA, 15 bp, Homo sapiens
actctcattttccag

SEQ ID NO: 225011 - DNA, 15 bp, Homo sapiens
gactctcattttcca

SEQ ID NO: 225012 - DNA, 15 bp, Homo sapiens
ggactctcattttcc

SEQ ID NO: 225013 - DNA, 15 bp, Homo sapiens
cggactctcattttc

SEQ ID NO: 225014 - DNA, 15 bp, Homo sapiens
ccggactctcatttt

SEQ ID NO: 225015 - DNA, 15 bp, Homo sapiens
accggactctcattt

SEQ ID NO: 225016 - DNA, 15 bp, Homo sapiens
caccggactctcatt

SEQ ID NO: 225017 - DNA, 15 bp, Homo sapiens
ccaccggactctcat

SEQ ID NO: 225018 - DNA, 15 bp, Homo sapiens
accaccggactctca

SEQ ID NO: 225019 - DNA, 15 bp, Homo sapiens
gaccaccggactctc

SEQ ID NO: 225020 - DNA, 15 bp, Homo sapiens
agaccaccggactct

SEQ ID NO: 225021 - DNA, 15 bp, Homo sapiens
tagaccaccggactc

SEQ ID NO: 225022 - DNA, 15 bp, Homo sapiens
atagaccaccggact

SEQ ID NO: 225023 - DNA, 15 bp, Homo sapiens
aatagaccaccggac

SEQ ID NO: 225024 - DNA, 15 bp, Homo sapiens
caatagaccaccgga

SEQ ID NO: 225025 - DNA, 15 bp, Homo sapiens
acaatagaccaccgg

SEQ ID NO: 225026 - DNA, 15 bp, Homo sapiens
cacaatagaccaccg

SEQ ID NO: 225027 - DNA, 15 bp, Homo sapiens
acacaatagaccacc

SEQ ID NO: 225028 - DNA, 15 bp, Homo sapiens
cacacaatagaccac

SEQ ID NO: 225029 - DNA, 15 bp, Homo sapiens
ccacacaatagacca

SEQ ID NO: 225030 - DNA, 15 bp, Homo sapiens
tccacacaatagacc

SEQ ID NO: 225031 - DNA, 15 bp, Homo sapiens
ctccacacaatagac

SEQ ID NO: 225032 - DNA, 15 bp, Homo sapiens
tctccacacaataga

SEQ ID NO: 225033 - DNA, 15 bp, Homo sapiens
ttctccacacaatag

SEQ ID NO: 225034 - DNA, 15 bp, Homo sapiens
tttctccacacaata

SEQ ID NO: 225035 - DNA, 15 bp, Homo sapiens
ctttctccacacaat

SEQ ID NO: 225036 - DNA, 15 bp, Homo sapiens
actttctccacacaa

SEQ ID NO: 225037 - DNA, 15 bp, Homo sapiens
cactttctccacaca

SEQ ID NO: 225038 - DNA, 15 bp, Homo sapiens
ccactttctccacac

SEQ ID NO: 225039 - DNA, 15 bp, Homo sapiens
tccactttctccaca

SEQ ID NO: 225040 - DNA, 15 bp, Homo sapiens
gtccactttctccac

SEQ ID NO: 225041 - DNA, 15 bp, Homo sapiens
agtccactttctcca

SEQ ID NO: 225042 - DNA, 15 bp, Homo sapiens
aagtccactttctcc

SEQ ID NO: 225043 - DNA, 15 bp, Homo sapiens
gaagtccactttctc

SEQ ID NO: 225044 - DNA, 15 bp, Homo sapiens
tgaagtccactttct

SEQ ID NO: 225045 - DNA, 15 bp, Homo sapiens
ctgaagtccactttc

SEQ ID NO: 225046 - DNA, 15 bp, Homo sapiens
actgaagtccacttt

SEQ ID NO: 225047 - DNA, 15 bp, Homo sapiens
tactgaagtccactt

SEQ ID NO: 225048 - DNA, 15 bp, Homo sapiens
gtactgaagtccact

SEQ ID NO: 225049 - DNA, 15 bp, Homo sapiens
ggtactgaagtccac

SEQ ID NO: 225050 - DNA, 15 bp, Homo sapiens
tggtactgaagtcca

SEQ ID NO: 225051 - DNA, 15 bp, Homo sapiens
atggtactgaagtcc

SEQ ID NO: 225052 - DNA, 15 bp, Homo sapiens
catggtactgaagtc

SEQ ID NO: 225053 - DNA, 15 bp, Homo sapiens
tcatggtactgaagt

SEQ ID NO: 225054 - DNA, 15 bp, Homo sapiens
ttcatggtactgaag

SEQ ID NO: 225055 - DNA, 15 bp, Homo sapiens
tttcatggtactgaa

SEQ ID NO: 225056 - DNA, 15 bp, Homo sapiens
gtttcatggtactga

SEQ ID NO: 225057 - DNA, 15 bp, Homo sapiens
tgtttcatggtactg

SEQ ID NO: 225058 - DNA, 15 bp, Homo sapiens
ctgtttcatggtact

SEQ ID NO: 225059 - DNA, 15 bp, Homo sapiens
tctgtttcatggtac

SEQ ID NO: 225060 - DNA, 15 bp, Homo sapiens
atctgtttcatggta

SEQ ID NO: 225061 - DNA, 15 bp, Homo sapiens
aatctgtttcatggt

SEQ ID NO: 225062 - DNA, 15 bp, Homo sapiens
aaatctgtttcatgg

SEQ ID NO: 225063 - DNA, 15 bp, Homo sapiens
gaaatctgtttcatg

SEQ ID NO: 225064 - DNA, 15 bp, Homo sapiens
agaaatctgtttcat

SEQ ID NO: 225065 - DNA, 15 bp, Homo sapiens
aagaaatctgtttca

SEQ ID NO: 225066 - DNA, 15 bp, Homo sapiens
gaagaaatctgtttc

SEQ ID NO: 225067 - DNA, 15 bp, Homo sapiens
tgaagaaatctgttt

SEQ ID NO: 225068 - DNA, 15 bp, Homo sapiens
gtgaagaaatctgtt

SEQ ID NO: 225069 - DNA, 15 bp, Homo sapiens
agtgaagaaatctgt

SEQ ID NO: 225070 - DNA, 15 bp, Homo sapiens
cagtgaagaaatctg

SEQ ID NO: 225071 - DNA, 15 bp, Homo sapiens
acagtgaagaaatct

SEQ ID NO: 225072 - DNA, 15 bp, Homo sapiens
cacagtgaagaaatc

SEQ ID NO: 225073 - DNA, 15 bp, Homo sapiens
ccacagtgaagaaat

SEQ ID NO: 225074 - DNA, 15 bp, Homo sapiens
tccacagtgaagaaa

SEQ ID NO: 225075 - DNA, 15 bp, Homo sapiens
ttccacagtgaagaa

SEQ ID NO: 225076 - DNA, 15 bp, Homo sapiens
gttccacagtgaaga

SEQ ID NO: 225077 - DNA, 15 bp, Homo sapiens
agttccacagtgaag

SEQ ID NO: 225078 - DNA, 15 bp, Homo sapiens
aagttccacagtgaa

SEQ ID NO: 225079 - DNA, 15 bp, Homo sapiens
caagttccacagtga

SEQ ID NO: 225080 - DNA, 15 bp, Homo sapiens
tcaagttccacagtg

SEQ ID NO: 225081 - DNA, 15 bp, Homo sapiens
ttcaagttccacagt

SEQ ID NO: 225082 - DNA, 15 bp, Homo sapiens
attcaagttccacag

SEQ ID NO: 225083 - DNA, 15 bp, Homo sapiens
tattcaagttccaca

SEQ ID NO: 225084 - DNA, 15 bp, Homo sapiens
ctattcaagttccac

SEQ ID NO: 225085 - DNA, 15 bp, Homo sapiens
cctattcaagttcca

SEQ ID NO: 225086 - DNA, 15 bp, Homo sapiens
gcctattcaagttcc

SEQ ID NO: 225087 - DNA, 15 bp, Homo sapiens
agcctattcaagttc

SEQ ID NO: 225088 - DNA, 15 bp, Homo sapiens
cagcctattcaagtt

SEQ ID NO: 225089 - DNA, 15 bp, Homo sapiens
acagcctattcaagt

SEQ ID NO: 225090 - DNA, 15 bp, Homo sapiens
aacagcctattcaag

SEQ ID NO: 225091 - DNA, 15 bp, Homo sapiens
gaacagcctattcaa

SEQ ID NO: 225092 - DNA, 15 bp, Homo sapiens
ggaacagcctattca

SEQ ID NO: 225093 - DNA, 15 bp, Homo sapiens
aggaacagcctattc

SEQ ID NO: 225094 - DNA, 15 bp, Homo sapiens
gaggaacagcctatt

SEQ ID NO: 225095 - DNA, 15 bp, Homo sapiens
cgaggaacagcctat

SEQ ID NO: 225096 - DNA, 15 bp, Homo sapiens
tcgaggaacagccta

SEQ ID NO: 225097 - DNA, 15 bp, Homo sapiens
gtcgaggaacagcct

SEQ ID NO: 225098 - DNA, 15 bp, Homo sapiens
ggtcgaggaacagcc

SEQ ID NO: 225099 - DNA, 15 bp, Homo sapiens
tggtcgaggaacagc

SEQ ID NO: 225100 - DNA, 15 bp, Homo sapiens
atggtcgaggaacag

SEQ ID NO: 225101 - DNA, 15 bp, Homo sapiens
gatggtcgaggaaca

SEQ ID NO: 225102 - DNA, 15 bp, Homo sapiens
agatggtcgaggaac

SEQ ID NO: 225103 - DNA, 15 bp, Homo sapiens
aagatggtcgaggaa

SEQ ID NO: 225104 - DNA, 15 bp, Homo sapiens
caagatggtcgagga

SEQ ID NO: 225105 - DNA, 15 bp, Homo sapiens
tcaagatggtcgagg

SEQ ID NO: 225106 - DNA, 15 bp, Homo sapiens
ttcaagatggtcgag

SEQ ID NO: 225107 - DNA, 15 bp, Homo sapiens
attcaagatggtcga

SEQ ID NO: 225108 - DNA, 15 bp, Homo sapiens
tattcaagatggtcg

SEQ ID NO: 225109 - DNA, 15 bp, Homo sapiens
ctattcaagatggtc

SEQ ID NO: 225110 - DNA, 15 bp, Homo sapiens
cctattcaagatggt

SEQ ID NO: 225111 - DNA, 15 bp, Homo sapiens
gcctattcaagatgg

SEQ ID NO: 225112 - DNA, 15 bp, Homo sapiens
agcctattcaagatg

SEQ ID NO: 225113 - DNA, 15 bp, Homo sapiens
cagcctattcaagat

SEQ ID NO: 225114 - DNA, 15 bp, Homo sapiens
ccagcctattcaaga

SEQ ID NO: 225115 - DNA, 15 bp, Homo sapiens
accagcctattcaag

SEQ ID NO: 225116 - DNA, 15 bp, Homo sapiens
caccagcctattcaa

SEQ ID NO: 225117 - DNA, 15 bp, Homo sapiens
tcaccagcctattca

SEQ ID NO: 225118 - DNA, 15 bp, Homo sapiens
ttcaccagcctattc

SEQ ID NO: 225119 - DNA, 15 bp, Homo sapiens
gttcaccagcctatt

SEQ ID NO: 225120 - DNA, 15 bp, Homo sapiens
agttcaccagcctat

SEQ ID NO: 225121 - DNA, 15 bp, Homo sapiens
aagttcaccagccta

SEQ ID NO: 225122 - DNA, 15 bp, Homo sapiens
aaagttcaccagcct

SEQ ID NO: 225123 - DNA, 15 bp, Homo sapiens
taaagttcaccagcc

SEQ ID NO: 225124 - DNA, 15 bp, Homo sapiens
ttaaagttcaccagc

SEQ ID NO: 225125 - DNA, 15 bp, Homo sapiens
cttaaagttcaccag

SEQ ID NO: 225126 - DNA, 15 bp, Homo sapiens
tcttaaagttcacca

SEQ ID NO: 225127 - DNA, 15 bp, Homo sapiens
gtcttaaagttcacc

SEQ ID NO: 225128 - DNA, 15 bp, Homo sapiens
agtcttaaagttcac

SEQ ID NO: 225129 - DNA, 15 bp, Homo sapiens
gagtcttaaagttca

SEQ ID NO: 225130 - DNA, 15 bp, Homo sapiens
agagtcttaaagttc

SEQ ID NO: 225131 - DNA, 15 bp, Homo sapiens
cagagtcttaaagtt

SEQ ID NO: 225132 - DNA, 15 bp, Homo sapiens
gcagagtcttaaagt

SEQ ID NO: 225133 - DNA, 15 bp, Homo sapiens
tgcagagtcttaaag

SEQ ID NO: 225134 - DNA, 15 bp, Homo sapiens
ttgcagagtcttaaa

SEQ ID NO: 225135 - DNA, 15 bp, Homo sapiens
tttgcagagtcttaa

SEQ ID NO: 225136 - DNA, 15 bp, Homo sapiens
ttttgcagagtctta

SEQ ID NO: 225137 - DNA, 15 bp, Homo sapiens
attttgcagagtctt

SEQ ID NO: 225138 - DNA, 15 bp, Homo sapiens
tattttgcagagtct

SEQ ID NO: 225139 - DNA, 15 bp, Homo sapiens
ttattttgcagagtc

SEQ ID NO: 225140 - DNA, 15 bp, Homo sapiens
cttattttgcagagt

SEQ ID NO: 225141 - DNA, 15 bp, Homo sapiens
tcttattttgcagag

SEQ ID NO: 225142 - DNA, 15 bp, Homo sapiens
atcttattttgcaga

SEQ ID NO: 225143 - DNA, 15 bp, Homo sapiens
tatcttattttgcag

SEQ ID NO: 225144 - DNA, 15 bp, Homo sapiens
ttatcttattttgca

SEQ ID NO: 225145 - DNA, 15 bp, Homo sapiens
gttatcttattttgc

SEQ ID NO: 225146 - DNA, 15 bp, Homo sapiens
cgttatcttattttg

SEQ ID NO: 225147 - DNA, 15 bp, Homo sapiens
acgttatcttatttt

SEQ ID NO: 225148 - DNA, 15 bp, Homo sapiens
aacgttatcttattt

SEQ ID NO: 225149 - DNA, 15 bp, Homo sapiens
aaacgttatcttatt

SEQ ID NO: 225150 - DNA, 15 bp, Homo sapiens
taaacgttatcttat

SEQ ID NO: 225151 - DNA, 15 bp, Homo sapiens
gtaaacgttatctta

SEQ ID NO: 225152 - DNA, 15 bp, Homo sapiens
tgtaaacgttatctt

SEQ ID NO: 225153 - DNA, 15 bp, Homo sapiens
ctgtaaacgttatct

SEQ ID NO: 225154 - DNA, 15 bp, Homo sapiens
gctgtaaacgttatc

SEQ ID NO: 225155 - DNA, 15 bp, Homo sapiens
ggctgtaaacgttat

SEQ ID NO: 225156 - DNA, 15 bp, Homo sapiens
cggctgtaaacgtta

SEQ ID NO: 225157 - DNA, 15 bp, Homo sapiens
acggctgtaaacgtt

SEQ ID NO: 225158 - DNA, 15 bp, Homo sapiens
aacggctgtaaacgt

SEQ ID NO: 225159 - DNA, 15 bp, Homo sapiens
aaacggctgtaaacg

SEQ ID NO: 225160 - DNA, 15 bp, Homo sapiens
gaaacggctgtaaac

SEQ ID NO: 225161 - DNA, 15 bp, Homo sapiens
ggaaacggctgtaaa

SEQ ID NO: 225162 - DNA, 15 bp, Homo sapiens
aggaaacggctgtaa

SEQ ID NO: 225163 - DNA, 15 bp, Homo sapiens
taggaaacggctgta

SEQ ID NO: 225164 - DNA, 15 bp, Homo sapiens
ttaggaaacggctgt

SEQ ID NO: 225165 - DNA, 15 bp, Homo sapiens
cttaggaaacggctg

SEQ ID NO: 225166 - DNA, 15 bp, Homo sapiens
gcttaggaaacggct

SEQ ID NO: 225167 - DNA, 15 bp, Homo sapiens
agcttaggaaacggc

SEQ ID NO: 225168 - DNA, 15 bp, Homo sapiens
aagcttaggaaacgg

SEQ ID NO: 225169 - DNA, 15 bp, Homo sapiens
aaagcttaggaaacg

SEQ ID NO: 225170 - DNA, 15 bp, Homo sapiens
aaaagcttaggaaac

SEQ ID NO: 225171 - DNA, 15 bp, Homo sapiens
aaaaagcttaggaaa

SEQ ID NO: 225172 - DNA, 15 bp, Homo sapiens
caaaaagcttaggaa

SEQ ID NO: 225173 - DNA, 15 bp, Homo sapiens
gcaaaaagcttagga

SEQ ID NO: 225174 - DNA, 15 bp, Homo sapiens
tgcaaaaagcttagg

SEQ ID NO: 225175 - DNA, 15 bp, Homo sapiens
gtgcaaaaagcttag

SEQ ID NO: 225176 - DNA, 15 bp, Homo sapiens
cgtgcaaaaagctta

SEQ ID NO: 225177 - DNA, 15 bp, Homo sapiens
ccgtgcaaaaagctt

SEQ ID NO: 225178 - DNA, 15 bp, Homo sapiens
tccgtgcaaaaagct

SEQ ID NO: 225179 - DNA, 15 bp, Homo sapiens
ttccgtgcaaaaagc

SEQ ID NO: 225180 - DNA, 15 bp, Homo sapiens
gttccgtgcaaaaag

SEQ ID NO: 225181 - DNA, 15 bp, Homo sapiens
agttccgtgcaaaaa

SEQ ID NO: 225182 - DNA, 15 bp, Homo sapiens
aagttccgtgcaaaa

SEQ ID NO: 225183 - DNA, 15 bp, Homo sapiens
gaagttccgtgcaaa

SEQ ID NO: 225184 - DNA, 15 bp, Homo sapiens
agaagttccgtgcaa

SEQ ID NO: 225185 - DNA, 15 bp, Homo sapiens
aagaagttccgtgca

SEQ ID NO: 225186 - DNA, 15 bp, Homo sapiens
caagaagttccgtgc

SEQ ID NO: 225187 - DNA, 15 bp, Homo sapiens
tcaagaagttccgtg

SEQ ID NO: 225188 - DNA, 15 bp, Homo sapiens
ttcaagaagttccgt

SEQ ID NO: 225189 - DNA, 15 bp, Homo sapiens
gttcaagaagttccg

SEQ ID NO: 225190 - DNA, 15 bp, Homo sapiens
tgttcaagaagttcc

SEQ ID NO: 225191 - DNA, 15 bp, Homo sapiens
ttgttcaagaagttc

SEQ ID NO: 225192 - DNA, 15 bp, Homo sapiens
gttgttcaagaagtt

SEQ ID NO: 225193 - DNA, 15 bp, Homo sapiens
agttgttcaagaagt

SEQ ID NO: 225194 - DNA, 15 bp, Homo sapiens
gagttgttcaagaag

SEQ ID NO: 225195 - DNA, 15 bp, Homo sapiens
agagttgttcaagaa

SEQ ID NO: 225196 - DNA, 15 bp, Homo sapiens
aagagttgttcaaga

SEQ ID NO: 225197 - DNA, 15 bp, Homo sapiens
aaagagttgttcaag

SEQ ID NO: 225198 - DNA, 15 bp, Homo sapiens
caaagagttgttcaa

SEQ ID NO: 225199 - DNA, 15 bp, Homo sapiens
ccaaagagttgttca

SEQ ID NO: 225200 - DNA, 15 bp, Homo sapiens
accaaagagttgttc

SEQ ID NO: 225201 - DNA, 15 bp, Homo sapiens
caccaaagagttgtt

SEQ ID NO: 225202 - DNA, 15 bp, Homo sapiens
tcaccaaagagttgt

SEQ ID NO: 225203 - DNA, 15 bp, Homo sapiens
ttcaccaaagagttg

SEQ ID NO: 225204 - DNA, 15 bp, Homo sapiens
attcaccaaagagtt

SEQ ID NO: 225205 - DNA, 15 bp, Homo sapiens
cattcaccaaagagt

SEQ ID NO: 225206 - DNA, 15 bp, Homo sapiens
gcattcaccaaagag

SEQ ID NO: 225207 - DNA, 15 bp, Homo sapiens
agcattcaccaaaga

SEQ ID NO: 225208 - DNA, 15 bp, Homo sapiens
cagcattcaccaaag

SEQ ID NO: 225209 - DNA, 15 bp, Homo sapiens
tcagcattcaccaaa

SEQ ID NO: 225210 - DNA, 15 bp, Homo sapiens
ctcagcattcaccaa

SEQ ID NO: 225211 - DNA, 15 bp, Homo sapiens
gctcagcattcacca

SEQ ID NO: 225212 - DNA, 15 bp, Homo sapiens
agctcagcattcacc

SEQ ID NO: 225213 - DNA, 15 bp, Homo sapiens
cagctcagcattcac

SEQ ID NO: 225214 - DNA, 15 bp, Homo sapiens
tcagctcagcattca

SEQ ID NO: 225215 - DNA, 15 bp, Homo sapiens
ttcagctcagcattc

SEQ ID NO: 225216 - DNA, 15 bp, Homo sapiens
tttcagctcagcatt

SEQ ID NO: 225217 - DNA, 15 bp, Homo sapiens
ttttcagctcagcat

SEQ ID NO: 225218 - DNA, 15 bp, Homo sapiens
cttttcagctcagca

SEQ ID NO: 225219 - DNA, 15 bp, Homo sapiens
tcttttcagctcagc

SEQ ID NO: 225220 - DNA, 15 bp, Homo sapiens
atcttttcagctcag

SEQ ID NO: 225221 - DNA, 15 bp, Homo sapiens
gatcttttcagctca

SEQ ID NO: 225222 - DNA, 15 bp, Homo sapiens
agatcttttcagctc

SEQ ID NO: 225223 - DNA, 15 bp, Homo sapiens
gagatcttttcagct

SEQ ID NO: 225224 - DNA, 15 bp, Homo sapiens
agagatcttttcagc

SEQ ID NO: 225225 - DNA, 15 bp, Homo sapiens
aagagatcttttcag

SEQ ID NO: 225226 - DNA, 15 bp, Homo sapiens
caagagatcttttca

SEQ ID NO: 225227 - DNA, 15 bp, Homo sapiens
ccaagagatcttttc

SEQ ID NO: 225228 - DNA, 15 bp, Homo sapiens
tccaagagatctttt

SEQ ID NO: 225229 - DNA, 15 bp, Homo sapiens
atccaagagatcttt

SEQ ID NO: 225230 - DNA, 15 bp, Homo sapiens
gatccaagagatctt

SEQ ID NO: 225231 - DNA, 15 bp, Homo sapiens
ggatccaagagatct

SEQ ID NO: 225232 - DNA, 15 bp, Homo sapiens
aggatccaagagatc

SEQ ID NO: 225233 - DNA, 15 bp, Homo sapiens
aaggatccaagagat

SEQ ID NO: 225234 - DNA, 15 bp, Homo sapiens
taaggatccaagaga

SEQ ID NO: 225235 - DNA, 15 bp, Homo sapiens
ctaaggatccaagag

SEQ ID NO: 225236 - DNA, 15 bp, Homo sapiens
cctaaggatccaaga

SEQ ID NO: 225237 - DNA, 15 bp, Homo sapiens
acctaaggatccaag

SEQ ID NO: 225238 - DNA, 15 bp, Homo sapiens
cacctaaggatccaa

SEQ ID NO: 225239 - DNA, 15 bp, Homo sapiens
acacctaaggatcca

SEQ ID NO: 225240 - DNA, 15 bp, Homo sapiens
gacacctaaggatcc

SEQ ID NO: 225241 - DNA, 15 bp, Homo sapiens
ggacacctaaggatc

SEQ ID NO: 225242 - DNA, 15 bp, Homo sapiens
aggacacctaaggat

SEQ ID NO: 225243 - DNA, 15 bp, Homo sapiens
aaggacacctaagga

SEQ ID NO: 225244 - DNA, 15 bp, Homo sapiens
aaaggacacctaagg

SEQ ID NO: 225245 - DNA, 15 bp, Homo sapiens
caaaggacacctaag

SEQ ID NO: 225246 - DNA, 15 bp, Homo sapiens
tcaaaggacacctaa

SEQ ID NO: 225247 - DNA, 15 bp, Homo sapiens
gtcaaaggacaccta

SEQ ID NO: 225248 - DNA, 15 bp, Homo sapiens
tgtcaaaggacacct

SEQ ID NO: 225249 - DNA, 15 bp, Homo sapiens
atgtcaaaggacacc

SEQ ID NO: 225250 - DNA, 15 bp, Homo sapiens
tatgtcaaaggacac

SEQ ID NO: 225251 - DNA, 15 bp, Homo sapiens
ctatgtcaaaggaca

SEQ ID NO: 225252 - DNA, 15 bp, Homo sapiens
cctatgtcaaaggac

SEQ ID NO: 225253 - DNA, 15 bp, Homo sapiens
tcctatgtcaaagga

SEQ ID NO: 225254 - DNA, 15 bp, Homo sapiens
atcctatgtcaaagg

SEQ ID NO: 225255 - DNA, 15 bp, Homo sapiens
aatcctatgtcaaag

SEQ ID NO: 225256 - DNA, 15 bp, Homo sapiens
aaatcctatgtcaaa

SEQ ID NO: 225257 - DNA, 15 bp, Homo sapiens
caaatcctatgtcaa

SEQ ID NO: 225258 - DNA, 15 bp, Homo sapiens
ccaaatcctatgtca

SEQ ID NO: 225259 - DNA, 15 bp, Homo sapiens
gccaaatcctatgtc

SEQ ID NO: 225260 - DNA, 15 bp, Homo sapiens
tgccaaatcctatgt

SEQ ID NO: 225261 - DNA, 15 bp, Homo sapiens
atgccaaatcctatg

SEQ ID NO: 225262 - DNA, 15 bp, Homo sapiens
aatgccaaatcctat

SEQ ID NO: 225263 - DNA, 15 bp, Homo sapiens
aaatgccaaatccta

SEQ ID NO: 225264 - DNA, 15 bp, Homo sapiens
caaatgccaaatcct

SEQ ID NO: 225265 - DNA, 15 bp, Homo sapiens
ccaaatgccaaatcc

SEQ ID NO: 225266 - DNA, 15 bp, Homo sapiens
cccaaatgccaaatc

SEQ ID NO: 225267 - DNA, 15 bp, Homo sapiens
tcccaaatgccaaat

SEQ ID NO: 225268 - DNA, 15 bp, Homo sapiens
atcccaaatgccaaa

SEQ ID NO: 225269 - DNA, 15 bp, Homo sapiens
catcccaaatgccaa

SEQ ID NO: 225270 - DNA, 15 bp, Homo sapiens
acatcccaaatgcca

SEQ ID NO: 225271 - DNA, 15 bp, Homo sapiens
cacatcccaaatgcc

SEQ ID NO: 225272 - DNA, 15 bp, Homo sapiens
tcacatcccaaatgc

SEQ ID NO: 225273 - DNA, 15 bp, Homo sapiens
atcacatcccaaatg

SEQ ID NO: 225274 - DNA, 15 bp, Homo sapiens
aatcacatcccaaat

SEQ ID NO: 225275 - DNA, 15 bp, Homo sapiens
gaatcacatcccaaa

SEQ ID NO: 225276 - DNA, 15 bp, Homo sapiens
ggaatcacatcccaa

SEQ ID NO: 225277 - DNA, 15 bp, Homo sapiens
tggaatcacatccca

SEQ ID NO: 225278 - DNA, 15 bp, Homo sapiens
ttggaatcacatccc

SEQ ID NO: 225279 - DNA, 15 bp, Homo sapiens
tttggaatcacatcc

SEQ ID NO: 225280 - DNA, 15 bp, Homo sapiens
atttggaatcacatc

SEQ ID NO: 225281 - DNA, 15 bp, Homo sapiens
gatttggaatcacat

SEQ ID NO: 225282 - DNA, 15 bp, Homo sapiens
tgatttggaatcaca

SEQ ID NO: 225283 - DNA, 15 bp, Homo sapiens
gtgatttggaatcac

SEQ ID NO: 225284 - DNA, 15 bp, Homo sapiens
ggtgatttggaatca

SEQ ID NO: 225285 - DNA, 15 bp, Homo sapiens
tggtgatttggaatc

SEQ ID NO: 225286 - DNA, 15 bp, Homo sapiens
ctggtgatttggaat

SEQ ID NO: 225287 - DNA, 15 bp, Homo sapiens
gctggtgatttggaa

SEQ ID NO: 225288 - DNA, 15 bp, Homo sapiens
tgctggtgatttgga

SEQ ID NO: 225289 - DNA, 15 bp, Homo sapiens
ctgctggtgatttgg

SEQ ID NO: 225290 - DNA, 15 bp, Homo sapiens
gctgctggtgatttg

SEQ ID NO: 225291 - DNA, 15 bp, Homo sapiens
ggctgctggtgattt

SEQ ID NO: 225292 - DNA, 15 bp, Homo sapiens
tggctgctggtgatt

SEQ ID NO: 225293 - DNA, 15 bp, Homo sapiens
ttggctgctggtgat

SEQ ID NO: 225294 - DNA, 15 bp, Homo sapiens
attggctgctggtga

SEQ ID NO: 225295 - DNA, 15 bp, Homo sapiens
cattggctgctggtg

SEQ ID NO: 225296 - DNA, 15 bp, Homo sapiens
acattggctgctggt

SEQ ID NO: 225297 - DNA, 15 bp, Homo sapiens
cacattggctgctgg

SEQ ID NO: 225298 - DNA, 15 bp, Homo sapiens
gcacattggctgctg

SEQ ID NO: 225299 - DNA, 15 bp, Homo sapiens
tgcacattggctgct

SEQ ID NO: 225300 - DNA, 15 bp, Homo sapiens
ctgcacattggctgc

SEQ ID NO: 225301 - DNA, 15 bp, Homo sapiens
cctgcacattggctg

SEQ ID NO: 225302 - DNA, 15 bp, Homo sapiens
gcctgcacattggct

SEQ ID NO: 225303 - DNA, 15 bp, Homo sapiens
ggcctgcacattggc

SEQ ID NO: 225304 - DNA, 15 bp, Homo sapiens
tggcctgcacattgg

SEQ ID NO: 225305 - DNA, 15 bp, Homo sapiens
ctggcctgcacattg

SEQ ID NO: 225306 - DNA, 15 bp, Homo sapiens
actggcctgcacatt

SEQ ID NO: 225307 - DNA, 15 bp, Homo sapiens
gactggcctgcacat

SEQ ID NO: 225308 - DNA, 15 bp, Homo sapiens
cgactggcctgcaca

SEQ ID NO: 225309 - DNA, 15 bp, Homo sapiens
acgactggcctgcac

SEQ ID NO: 225310 - DNA, 15 bp, Homo sapiens
gacgactggcctgca

SEQ ID NO: 225311 - DNA, 15 bp, Homo sapiens
cgacgactggcctgc

SEQ ID NO: 225312 - DNA, 15 bp, Homo sapiens
tcgacgactggcctg

SEQ ID NO: 225313 - DNA, 15 bp, Homo sapiens
atcgacgactggcct

SEQ ID NO: 225314 - DNA, 15 bp, Homo sapiens
catcgacgactggcc

SEQ ID NO: 225315 - DNA, 15 bp, Homo sapiens
acatcgacgactggc

SEQ ID NO: 225316 - DNA, 15 bp, Homo sapiens
gacatcgacgactgg

SEQ ID NO: 225317 - DNA, 15 bp, Homo sapiens
agacatcgacgactg

SEQ ID NO: 225318 - DNA, 15 bp, Homo sapiens
gagacatcgacgact

SEQ ID NO: 225319 - DNA, 15 bp, Homo sapiens
agagacatcgacgac

SEQ ID NO: 225320 - DNA, 15 bp, Homo sapiens
cagagacatcgacga

SEQ ID NO: 225321 - DNA, 15 bp, Homo sapiens
tcagagacatcgacg

SEQ ID NO: 225322 - DNA, 15 bp, Homo sapiens
ttcagagacatcgac

SEQ ID NO: 225323 - DNA, 15 bp, Homo sapiens
cttcagagacatcga

SEQ ID NO: 225324 - DNA, 15 bp, Homo sapiens
tcttcagagacatcg

SEQ ID NO: 225325 - DNA, 15 bp, Homo sapiens
ctcttcagagacatc

SEQ ID NO: 225326 - DNA, 15 bp, Homo sapiens
actcttcagagacat

SEQ ID NO: 225327 - DNA, 15 bp, Homo sapiens
cactcttcagagaca

SEQ ID NO: 225328 - DNA, 15 bp, Homo sapiens
acactcttcagagac

SEQ ID NO: 225329 - DNA, 15 bp, Homo sapiens
cacactcttcagaga

SEQ ID NO: 225330 - DNA, 15 bp, Homo sapiens
tcacactcttcagag

SEQ ID NO: 225331 - DNA, 15 bp, Homo sapiens
atcacactcttcaga

SEQ ID NO: 225332 - DNA, 15 bp, Homo sapiens
tatcacactcttcag

SEQ ID NO: 225333 - DNA, 15 bp, Homo sapiens
ctatcacactcttca

SEQ ID NO: 225334 - DNA, 15 bp, Homo sapiens
tctatcacactcttc

SEQ ID NO: 225335 - DNA, 15 bp, Homo sapiens
ttctatcacactctt

SEQ ID NO: 225336 - DNA, 15 bp, Homo sapiens
tttctatcacactct

SEQ ID NO: 225337 - DNA, 15 bp, Homo sapiens
ctttctatcacactc

SEQ ID NO: 225338 - DNA, 15 bp, Homo sapiens
tctttctatcacact

SEQ ID NO: 225339 - DNA, 15 bp, Homo sapiens
ttctttctatcacac

SEQ ID NO: 225340 - DNA, 15 bp, Homo sapiens
cttctttctatcaca

SEQ ID NO: 225341 - DNA, 15 bp, Homo sapiens
tcttctttctatcac

SEQ ID NO: 225342 - DNA, 15 bp, Homo sapiens
gtcttctttctatca

SEQ ID NO: 225343 - DNA, 15 bp, Homo sapiens
ggtcttctttctatc

SEQ ID NO: 225344 - DNA, 15 bp, Homo sapiens
cggtcttctttctat

SEQ ID NO: 225345 - DNA, 15 bp, Homo sapiens
gcggtcttctttcta

SEQ ID NO: 225346 - DNA, 15 bp, Homo sapiens
tgcggtcttctttct

SEQ ID NO: 225347 - DNA, 15 bp, Homo sapiens
ctgcggtcttctttc

SEQ ID NO: 225348 - DNA, 15 bp, Homo sapiens
tctgcggtcttcttt

SEQ ID NO: 225349 - DNA, 15 bp, Homo sapiens
ctctgcggtcttctt

SEQ ID NO: 225350 - DNA, 15 bp, Homo sapiens
cctctgcggtcttct

SEQ ID NO: 225351 - DNA, 15 bp, Homo sapiens
tcctctgcggtcttc

SEQ ID NO: 225352 - DNA, 15 bp, Homo sapiens
ttcctctgcggtctt

SEQ ID NO: 225353 - DNA, 15 bp, Homo sapiens
cttcctctgcggtct

SEQ ID NO: 225354 - DNA, 15 bp, Homo sapiens
ccttcctctgcggtc

SEQ ID NO: 225355 - DNA, 15 bp, Homo sapiens
gccttcctctgcggt

SEQ ID NO: 225356 - DNA, 15 bp, Homo sapiens
tgccttcctctgcgg

SEQ ID NO: 225357 - DNA, 15 bp, Homo sapiens
ctgccttcctctgcg

SEQ ID NO: 225358 - DNA, 15 bp, Homo sapiens
cctgccttcctctgc

SEQ ID NO: 225359 - DNA, 15 bp, Homo sapiens
ccctgccttcctctg

SEQ ID NO: 225360 - DNA, 15 bp, Homo sapiens
tccctgccttcctct

SEQ ID NO: 225361 - DNA, 15 bp, Homo sapiens
ctccctgccttcctc

SEQ ID NO: 225362 - DNA, 15 bp, Homo sapiens
actccctgccttcct

SEQ ID NO: 225363 - DNA, 15 bp, Homo sapiens
gactccctgccttcc

SEQ ID NO: 225364 - DNA, 15 bp, Homo sapiens
ggactccctgccttc

SEQ ID NO: 225365 - DNA, 15 bp, Homo sapiens
aggactccctgcctt

SEQ ID NO: 225366 - DNA, 15 bp, Homo sapiens
aaggactccctgcct

SEQ ID NO: 225367 - DNA, 15 bp, Homo sapiens
gaaggactccctgcc

SEQ ID NO: 225368 - DNA, 15 bp, Homo sapiens
ggaaggactccctgc

SEQ ID NO: 225369 - DNA, 15 bp, Homo sapiens
aggaaggactccctg

SEQ ID NO: 225370 - DNA, 15 bp, Homo sapiens
caggaaggactccct

SEQ ID NO: 225371 - DNA, 15 bp, Homo sapiens
tcaggaaggactccc

SEQ ID NO: 225372 - DNA, 15 bp, Homo sapiens
gtcaggaaggactcc

SEQ ID NO: 225373 - DNA, 15 bp, Homo sapiens
agtcaggaaggactc

SEQ ID NO: 225374 - DNA, 15 bp, Homo sapiens
aagtcaggaaggact

SEQ ID NO: 225375 - DNA, 15 bp, Homo sapiens
aaagtcaggaaggac

SEQ ID NO: 225376 - DNA, 15 bp, Homo sapiens
caaagtcaggaagga

SEQ ID NO: 225377 - DNA, 15 bp, Homo sapiens
gcaaagtcaggaagg

SEQ ID NO: 225378 - DNA, 15 bp, Homo sapiens
ggcaaagtcaggaag

SEQ ID NO: 225379 - DNA, 15 bp, Homo sapiens
aggcaaagtcaggaa

SEQ ID NO: 225380 - DNA, 15 bp, Homo sapiens
gaggcaaagtcagga

SEQ ID NO: 225381 - DNA, 15 bp, Homo sapiens
tgaggcaaagtcagg

SEQ ID NO: 225382 - DNA, 15 bp, Homo sapiens
ctgaggcaaagtcag

SEQ ID NO: 225383 - DNA, 15 bp, Homo sapiens
gctgaggcaaagtca

SEQ ID NO: 225384 - DNA, 15 bp, Homo sapiens
agctgaggcaaagtc

SEQ ID NO: 225385 - DNA, 15 bp, Homo sapiens
aagctgaggcaaagt

SEQ ID NO: 225386 - DNA, 15 bp, Homo sapiens
gaagctgaggcaaag

SEQ ID NO: 225387 - DNA, 15 bp, Homo sapiens
agaagctgaggcaaa

SEQ ID NO: 225388 - DNA, 15 bp, Homo sapiens
gagaagctgaggcaa

SEQ ID NO: 225389 - DNA, 15 bp, Homo sapiens
agagaagctgaggca

SEQ ID NO: 225390 - DNA, 15 bp, Homo sapiens
aagagaagctgaggc

SEQ ID NO: 225391 - DNA, 15 bp, Homo sapiens
caagagaagctgagg

SEQ ID NO: 225392 - DNA, 15 bp, Homo sapiens
acaagagaagctgag

SEQ ID NO: 225393 - DNA, 15 bp, Homo sapiens
cacaagagaagctga

SEQ ID NO: 225394 - DNA, 15 bp, Homo sapiens
tcacaagagaagctg

SEQ ID NO: 225395 - DNA, 15 bp, Homo sapiens
gtcacaagagaagct

SEQ ID NO: 225396 - DNA, 15 bp, Homo sapiens
ggtcacaagagaagc

SEQ ID NO: 225397 - DNA, 15 bp, Homo sapiens
gggtcacaagagaag

SEQ ID NO: 225398 - DNA, 15 bp, Homo sapiens
agggtcacaagagaa

SEQ ID NO: 225399 - DNA, 15 bp, Homo sapiens
cagggtcacaagaga

SEQ ID NO: 225400 - DNA, 15 bp, Homo sapiens
ccagggtcacaagag

SEQ ID NO: 225401 - DNA, 15 bp, Homo sapiens
accagggtcacaaga

SEQ ID NO: 225402 - DNA, 15 bp, Homo sapiens
gaccagggtcacaag

SEQ ID NO: 225403 - DNA, 15 bp, Homo sapiens
tgaccagggtcacaa

SEQ ID NO: 225404 - DNA, 15 bp, Homo sapiens
gtgaccagggtcaca

SEQ ID NO: 225405 - DNA, 15 bp, Homo sapiens
cgtgaccagggtcac

SEQ ID NO: 225406 - DNA, 15 bp, Homo sapiens
acgtgaccagggtca

SEQ ID NO: 225407 - DNA, 15 bp, Homo sapiens
cacgtgaccagggtc

SEQ ID NO: 225408 - DNA, 15 bp, Homo sapiens
acacgtgaccagggt

SEQ ID NO: 225409 - DNA, 15 bp, Homo sapiens
cacacgtgaccaggg

SEQ ID NO: 225410 - DNA, 15 bp, Homo sapiens
tcacacgtgaccagg

SEQ ID NO: 225411 - DNA, 15 bp, Homo sapiens
ttcacacgtgaccag

SEQ ID NO: 225412 - DNA, 15 bp, Homo sapiens
gttcacacgtgacca

SEQ ID NO: 225413 - DNA, 15 bp, Homo sapiens
agttcacacgtgacc

SEQ ID NO: 225414 - DNA, 15 bp, Homo sapiens
tagttcacacgtgac

SEQ ID NO: 225415 - DNA, 15 bp, Homo sapiens
atagttcacacgtga

SEQ ID NO: 225416 - DNA, 15 bp, Homo sapiens
catagttcacacgtg

SEQ ID NO: 225417 - DNA, 15 bp, Homo sapiens
gcatagttcacacgt

SEQ ID NO: 225418 - DNA, 15 bp, Homo sapiens
agcatagttcacacg

SEQ ID NO: 225419 - DNA, 15 bp, Homo sapiens
aagcatagttcacac

SEQ ID NO: 225420 - DNA, 15 bp, Homo sapiens
gaagcatagttcaca

SEQ ID NO: 225421 - DNA, 15 bp, Homo sapiens
agaagcatagttcac

SEQ ID NO: 225422 - DNA, 15 bp, Homo sapiens
aagaagcatagttca

SEQ ID NO: 225423 - DNA, 15 bp, Homo sapiens
aaagaagcatagttc

SEQ ID NO: 225424 - DNA, 15 bp, Homo sapiens
taaagaagcatagtt

SEQ ID NO: 225425 - DNA, 15 bp, Homo sapiens
ctaaagaagcatagt

SEQ ID NO: 225426 - DNA, 15 bp, Homo sapiens
actaaagaagcatag

SEQ ID NO: 225427 - DNA, 15 bp, Homo sapiens
aactaaagaagcata

SEQ ID NO: 225428 - DNA, 15 bp, Homo sapiens
aaactaaagaagcat

SEQ ID NO: 225429 - DNA, 15 bp, Homo sapiens
aaaactaaagaagca

SEQ ID NO: 225430 - DNA, 15 bp, Homo sapiens
gaaaactaaagaagc

SEQ ID NO: 225431 - DNA, 15 bp, Homo sapiens
agaaaactaaagaag

SEQ ID NO: 225432 - DNA, 15 bp, Homo sapiens
gagaaaactaaagaa

SEQ ID NO: 225433 - DNA, 15 bp, Homo sapiens
tgagaaaactaaaga

SEQ ID NO: 225434 - DNA, 15 bp, Homo sapiens
ctgagaaaactaaag

SEQ ID NO: 225435 - DNA, 15 bp, Homo sapiens
tctgagaaaactaaa

SEQ ID NO: 225436 - DNA, 15 bp, Homo sapiens
atctgagaaaactaa

SEQ ID NO: 225437 - DNA, 15 bp, Homo sapiens
gatctgagaaaacta

SEQ ID NO: 225438 - DNA, 15 bp, Homo sapiens
tgatctgagaaaact

SEQ ID NO: 225439 - DNA, 15 bp, Homo sapiens
atgatctgagaaaac

SEQ ID NO: 225440 - DNA, 15 bp, Homo sapiens
catgatctgagaaaa

SEQ ID NO: 225441 - DNA, 15 bp, Homo sapiens
ccatgatctgagaaa

SEQ ID NO: 225442 - DNA, 15 bp, Homo sapiens
tccatgatctgagaa

SEQ ID NO: 225443 - DNA, 15 bp, Homo sapiens
ttccatgatctgaga

SEQ ID NO: 225444 - DNA, 15 bp, Homo sapiens
attccatgatctgag

SEQ ID NO: 225445 - DNA, 15 bp, Homo sapiens
gattccatgatctga

SEQ ID NO: 225446 - DNA, 15 bp, Homo sapiens
agattccatgatctg

SEQ ID NO: 225447 - DNA, 15 bp, Homo sapiens
aagattccatgatct

SEQ ID NO: 225448 - DNA, 15 bp, Homo sapiens
gaagattccatgatc

SEQ ID NO: 225449 - DNA, 15 bp, Homo sapiens
agaagattccatgat

SEQ ID NO: 225450 - DNA, 15 bp, Homo sapiens
cagaagattccatga

SEQ ID NO: 225451 - DNA, 15 bp, Homo sapiens
tcagaagattccatg

SEQ ID NO: 225452 - DNA, 15 bp, Homo sapiens
ctcagaagattccat

SEQ ID NO: 225453 - DNA, 15 bp, Homo sapiens
tctcagaagattcca

SEQ ID NO: 225454 - DNA, 15 bp, Homo sapiens
ttctcagaagattcc

SEQ ID NO: 225455 - DNA, 15 bp, Homo sapiens
attctcagaagattc

SEQ ID NO: 225456 - DNA, 15 bp, Homo sapiens
gattctcagaagatt

SEQ ID NO: 225457 - DNA, 15 bp, Homo sapiens
agattctcagaagat

SEQ ID NO: 225458 - DNA, 15 bp, Homo sapiens
aagattctcagaaga

SEQ ID NO: 225459 - DNA, 15 bp, Homo sapiens
gaagattctcagaag

SEQ ID NO: 225460 - DNA, 15 bp, Homo sapiens
agaagattctcagaa

SEQ ID NO: 225461 - DNA, 15 bp, Homo sapiens
cagaagattctcaga

SEQ ID NO: 225462 - DNA, 15 bp, Homo sapiens
tcagaagattctcag

SEQ ID NO: 225463 - DNA, 15 bp, Homo sapiens
ctcagaagattctca

SEQ ID NO: 225464 - DNA, 15 bp, Homo sapiens
actcagaagattctc

SEQ ID NO: 225465 - DNA, 15 bp, Homo sapiens
cactcagaagattct

SEQ ID NO: 225466 - DNA, 15 bp, Homo sapiens
acactcagaagattc

SEQ ID NO: 225467 - DNA, 15 bp, Homo sapiens
gacactcagaagatt

SEQ ID NO: 225468 - DNA, 15 bp, Homo sapiens
agacactcagaagat

SEQ ID NO: 225469 - DNA, 15 bp, Homo sapiens
tagacactcagaaga

SEQ ID NO: 225470 - DNA, 15 bp, Homo sapiens
ttagacactcagaag

SEQ ID NO: 225471 - DNA, 15 bp, Homo sapiens
tttagacactcagaa

SEQ ID NO: 225472 - DNA, 15 bp, Homo sapiens
atttagacactcaga

SEQ ID NO: 225473 - DNA, 15 bp, Homo sapiens
catttagacactcag

SEQ ID NO: 225474 - DNA, 15 bp, Homo sapiens
acatttagacactca

SEQ ID NO: 225475 - DNA, 15 bp, Homo sapiens
gacatttagacactc

SEQ ID NO: 225476 - DNA, 15 bp, Homo sapiens
ggacatttagacact

SEQ ID NO: 225477 - DNA, 15 bp, Homo sapiens
aggacatttagacac

SEQ ID NO: 225478 - DNA, 15 bp, Homo sapiens
gaggacatttagaca

SEQ ID NO: 225479 - DNA, 15 bp, Homo sapiens
agaggacatttagac

SEQ ID NO: 225480 - DNA, 15 bp, Homo sapiens
aagaggacatttaga

SEQ ID NO: 225481 - DNA, 15 bp, Homo sapiens
aaagaggacatttag

SEQ ID NO: 225482 - DNA, 15 bp, Homo sapiens
gaaagaggacattta

SEQ ID NO: 225483 - DNA, 15 bp, Homo sapiens
ggaaagaggacattt

SEQ ID NO: 225484 - DNA, 15 bp, Homo sapiens
tggaaagaggacatt

SEQ ID NO: 225485 - DNA, 15 bp, Homo sapiens
ctggaaagaggacat

SEQ ID NO: 225486 - DNA, 15 bp, Homo sapiens
cctggaaagaggaca

SEQ ID NO: 225487 - DNA, 15 bp, Homo sapiens
tcctggaaagaggac

SEQ ID NO: 225488 - DNA, 15 bp, Homo sapiens
ttcctggaaagagga

SEQ ID NO: 225489 - DNA, 15 bp, Homo sapiens
tttcctggaaagagg

SEQ ID NO: 225490 - DNA, 15 bp, Homo sapiens
ttttcctggaaagag

SEQ ID NO: 225491 - DNA, 15 bp, Homo sapiens
attttcctggaaaga

SEQ ID NO: 225492 - DNA, 15 bp, Homo sapiens
gattttcctggaaag

SEQ ID NO: 225493 - DNA, 15 bp, Homo sapiens
ggattttcctggaaa

SEQ ID NO: 225494 - DNA, 15 bp, Homo sapiens
tggattttcctggaa

SEQ ID NO: 225495 - DNA, 15 bp, Homo sapiens
gtggattttcctgga

SEQ ID NO: 225496 - DNA, 15 bp, Homo sapiens
tgtggattttcctgg

SEQ ID NO: 225497 - DNA, 15 bp, Homo sapiens
ttgtggattttcctg

SEQ ID NO: 225498 - DNA, 15 bp, Homo sapiens
tttgtggattttcct

SEQ ID NO: 225499 - DNA, 15 bp, Homo sapiens
gtttgtggattttcc

SEQ ID NO: 225500 - DNA, 15 bp, Homo sapiens
tgtttgtggattttc

SEQ ID NO: 225501 - DNA, 15 bp, Homo sapiens
atgtttgtggatttt

SEQ ID NO: 225502 - DNA, 15 bp, Homo sapiens
tatgtttgtggattt

SEQ ID NO: 225503 - DNA, 15 bp, Homo sapiens
gtatgtttgtggatt

SEQ ID NO: 225504 - DNA, 15 bp, Homo sapiens
tgtatgtttgtggat

SEQ ID NO: 225505 - DNA, 15 bp, Homo sapiens
atgtatgtttgtgga

SEQ ID NO: 225506 - DNA, 15 bp, Homo sapiens
tatgtatgtttgtgg

SEQ ID NO: 225507 - DNA, 15 bp, Homo sapiens
ttatgtatgtttgtg

SEQ ID NO: 225508 - DNA, 15 bp, Homo sapiens
attatgtatgtttgt

SEQ ID NO: 225509 - DNA, 15 bp, Homo sapiens
aattatgtatgtttg

SEQ ID NO: 225510 - DNA, 15 bp, Homo sapiens
taattatgtatgttt

SEQ ID NO: 225511 - DNA, 15 bp, Homo sapiens
ataattatgtatgtt

SEQ ID NO: 225512 - DNA, 15 bp, Homo sapiens
tataattatgtatgt

SEQ ID NO: 225513 - DNA, 15 bp, Homo sapiens
gtataattatgtatg

SEQ ID NO: 225514 - DNA, 15 bp, Homo sapiens
tgtataattatgtat

SEQ ID NO: 225515 - DNA, 15 bp, Homo sapiens
atgtataattatgta

SEQ ID NO: 225516 - DNA, 15 bp, Homo sapiens
gatgtataattatgt

SEQ ID NO: 225517 - DNA, 15 bp, Homo sapiens
tgatgtataattatg

SEQ ID NO: 225518 - DNA, 15 bp, Homo sapiens
atgatgtataattat

SEQ ID NO: 225519 - DNA, 15 bp, Homo sapiens
catgatgtataatta

SEQ ID NO: 225520 - DNA, 15 bp, Homo sapiens
gcatgatgtataatt

SEQ ID NO: 225521 - DNA, 15 bp, Homo sapiens
tgcatgatgtataat

SEQ ID NO: 225522 - DNA, 15 bp, Homo sapiens
ctgcatgatgtataa

SEQ ID NO: 225523 - DNA, 15 bp, Homo sapiens
tctgcatgatgtata

SEQ ID NO: 225524 - DNA, 15 bp, Homo sapiens
ctctgcatgatgtat

SEQ ID NO: 225525 - DNA, 15 bp, Homo sapiens
cctctgcatgatgta

SEQ ID NO: 225526 - DNA, 15 bp, Homo sapiens
ccctctgcatgatgt

SEQ ID NO: 225527 - DNA, 15 bp, Homo sapiens
accctctgcatgatg

SEQ ID NO: 225528 - DNA, 15 bp, Homo sapiens
aaccctctgcatgat

SEQ ID NO: 225529 - DNA, 15 bp, Homo sapiens
caaccctctgcatga

SEQ ID NO: 225530 - DNA, 15 bp, Homo sapiens
tcaaccctctgcatg

SEQ ID NO: 225531 - DNA, 15 bp, Homo sapiens
atcaaccctctgcat

SEQ ID NO: 225532 - DNA, 15 bp, Homo sapiens
tatcaaccctctgca

SEQ ID NO: 225533 - DNA, 15 bp, Homo sapiens
atatcaaccctctgc

SEQ ID NO: 225534 - DNA, 15 bp, Homo sapiens
catatcaaccctctg

SEQ ID NO: 225535 - DNA, 15 bp, Homo sapiens
gcatatcaaccctct

SEQ ID NO: 225536 - DNA, 15 bp, Homo sapiens
ggcatatcaaccctc

SEQ ID NO: 225537 - DNA, 15 bp, Homo sapiens
aggcatatcaaccct

SEQ ID NO: 225538 - DNA, 15 bp, Homo sapiens
gaggcatatcaaccc

SEQ ID NO: 225539 - DNA, 15 bp, Homo sapiens
ggaggcatatcaacc

SEQ ID NO: 225540 - DNA, 15 bp, Homo sapiens
aggaggcatatcaac

SEQ ID NO: 225541 - DNA, 15 bp, Homo sapiens
taggaggcatatcaa

SEQ ID NO: 225542 - DNA, 15 bp, Homo sapiens
gtaggaggcatatca

SEQ ID NO: 225543 - DNA, 15 bp, Homo sapiens
ggtaggaggcatatc

SEQ ID NO: 225544 - DNA, 15 bp, Homo sapiens
tggtaggaggcatat

SEQ ID NO: 225545 - DNA, 15 bp, Homo sapiens
ttggtaggaggcata

SEQ ID NO: 225546 - DNA, 15 bp, Homo sapiens
tttggtaggaggcat

SEQ ID NO: 225547 - DNA, 15 bp, Homo sapiens
ttttggtaggaggca

SEQ ID NO: 225548 - DNA, 15 bp, Homo sapiens
attttggtaggaggc

SEQ ID NO: 225549 - DNA, 15 bp, Homo sapiens
cattttggtaggagg

SEQ ID NO: 225550 - DNA, 15 bp, Homo sapiens
gcattttggtaggag

SEQ ID NO: 225551 - DNA, 15 bp, Homo sapiens
tgcattttggtagga

SEQ ID NO: 225552 - DNA, 15 bp, Homo sapiens
atgcattttggtagg

SEQ ID NO: 225553 - DNA, 15 bp, Homo sapiens
gatgcattttggtag

SEQ ID NO: 225554 - DNA, 15 bp, Homo sapiens
agatgcattttggta

SEQ ID NO: 225555 - DNA, 15 bp, Homo sapiens
gagatgcattttggt

SEQ ID NO: 225556 - DNA, 15 bp, Homo sapiens
agagatgcattttgg

SEQ ID NO: 225557 - DNA, 15 bp, Homo sapiens
cagagatgcattttg

SEQ ID NO: 225558 - DNA, 15 bp, Homo sapiens
tcagagatgcatttt

SEQ ID NO: 225559 - DNA, 15 bp, Homo sapiens
ttcagagatgcattt

SEQ ID NO: 225560 - DNA, 15 bp, Homo sapiens
gttcagagatgcatt

SEQ ID NO: 225561 - DNA, 15 bp, Homo sapiens
agttcagagatgcat

SEQ ID NO: 225562 - DNA, 15 bp, Homo sapiens
cagttcagagatgca

SEQ ID NO: 225563 - DNA, 15 bp, Homo sapiens
ccagttcagagatgc

SEQ ID NO: 225564 - DNA, 15 bp, Homo sapiens
tccagttcagagatg

SEQ ID NO: 225565 - DNA, 15 bp, Homo sapiens
ctccagttcagagat

SEQ ID NO: 225566 - DNA, 15 bp, Homo sapiens
cctccagttcagaga

SEQ ID NO: 225567 - DNA, 15 bp, Homo sapiens
tcctccagttcagag

SEQ ID NO: 225568 - DNA, 15 bp, Homo sapiens
atcctccagttcaga

SEQ ID NO: 225569 - DNA, 15 bp, Homo sapiens
aatcctccagttcag

SEQ ID NO: 225570 - DNA, 15 bp, Homo sapiens
aaatcctccagttca

SEQ ID NO: 225571 - DNA, 15 bp, Homo sapiens
gaaatcctccagttc

SEQ ID NO: 225572 - DNA, 15 bp, Homo sapiens
agaaatcctccagtt

SEQ ID NO: 225573 - DNA, 15 bp, Homo sapiens
tagaaatcctccagt

SEQ ID NO: 225574 - DNA, 15 bp, Homo sapiens
ttagaaatcctccag

SEQ ID NO: 225575 - DNA, 15 bp, Homo sapiens
cttagaaatcctcca

SEQ ID NO: 225576 - DNA, 15 bp, Homo sapiens
ccttagaaatcctcc

SEQ ID NO: 225577 - DNA, 15 bp, Homo sapiens
tccttagaaatcctc

SEQ ID NO: 225578 - DNA, 15 bp, Homo sapiens
atccttagaaatcct

SEQ ID NO: 225579 - DNA, 15 bp, Homo sapiens
gatccttagaaatcc

SEQ ID NO: 225580 - DNA, 15 bp, Homo sapiens
agatccttagaaatc

SEQ ID NO: 225581 - DNA, 15 bp, Homo sapiens
cagatccttagaaat

SEQ ID NO: 225582 - DNA, 15 bp, Homo sapiens
acagatccttagaaa

SEQ ID NO: 225583 - DNA, 15 bp, Homo sapiens
gacagatccttagaa

SEQ ID NO: 225584 - DNA, 15 bp, Homo sapiens
agacagatccttaga

SEQ ID NO: 225585 - DNA, 15 bp, Homo sapiens
cagacagatccttag

SEQ ID NO: 225586 - DNA, 15 bp, Homo sapiens
acagacagatcctta

SEQ ID NO: 225587 - DNA, 15 bp, Homo sapiens
gacagacagatcctt

SEQ ID NO: 225588 - DNA, 15 bp, Homo sapiens
ggacagacagatcct

SEQ ID NO: 225589 - DNA, 15 bp, Homo sapiens
tggacagacagatcc

SEQ ID NO: 225590 - DNA, 15 bp, Homo sapiens
ctggacagacagatc

SEQ ID NO: 225591 - DNA, 15 bp, Homo sapiens
actggacagacagat

SEQ ID NO: 225592 - DNA, 15 bp, Homo sapiens
cactggacagacaga

SEQ ID NO: 225593 - DNA, 15 bp, Homo sapiens
acactggacagacag

SEQ ID NO: 225594 - DNA, 15 bp, Homo sapiens
cacactggacagaca

SEQ ID NO: 225595 - DNA, 15 bp, Homo sapiens
tcacactggacagac

SEQ ID NO: 225596 - DNA, 15 bp, Homo sapiens
ttcacactggacaga

SEQ ID NO: 225597 - DNA, 15 bp, Homo sapiens
tttcacactggacag

SEQ ID NO: 225598 - DNA, 15 bp, Homo sapiens
ctttcacactggaca

SEQ ID NO: 225599 - DNA, 15 bp, Homo sapiens
actttcacactggac

SEQ ID NO: 225600 - DNA, 15 bp, Homo sapiens
aactttcacactgga

SEQ ID NO: 225601 - DNA, 15 bp, Homo sapiens
gaactttcacactgg

SEQ ID NO: 225602 - DNA, 15 bp, Homo sapiens
tgaactttcacactg

SEQ ID NO: 225603 - DNA, 15 bp, Homo sapiens
ttgaactttcacact

SEQ ID NO: 225604 - DNA, 15 bp, Homo sapiens
tttgaactttcacac

SEQ ID NO: 225605 - DNA, 15 bp, Homo sapiens
atttgaactttcaca

SEQ ID NO: 225606 - DNA, 15 bp, Homo sapiens
tatttgaactttcac

SEQ ID NO: 225607 - DNA, 15 bp, Homo sapiens
ctatttgaactttca

SEQ ID NO: 225608 - DNA, 15 bp, Homo sapiens
cctatttgaactttc

SEQ ID NO: 225609 - DNA, 15 bp, Homo sapiens
acctatttgaacttt

SEQ ID NO: 225610 - DNA, 15 bp, Homo sapiens
aacctatttgaactt

SEQ ID NO: 225611 - DNA, 15 bp, Homo sapiens
aaacctatttgaact

SEQ ID NO: 225612 - DNA, 15 bp, Homo sapiens
gaaacctatttgaac

SEQ ID NO: 225613 - DNA, 15 bp, Homo sapiens
agaaacctatttgaa

SEQ ID NO: 225614 - DNA, 15 bp, Homo sapiens
cagaaacctatttga

SEQ ID NO: 225615 - DNA, 15 bp, Homo sapiens
gcagaaacctatttg

SEQ ID NO: 225616 - DNA, 15 bp, Homo sapiens
agcagaaacctattt

SEQ ID NO: 225617 - DNA, 15 bp, Homo sapiens
gagcagaaacctatt

SEQ ID NO: 225618 - DNA, 15 bp, Homo sapiens
agagcagaaacctat

SEQ ID NO: 225619 - DNA, 15 bp, Homo sapiens
cagagcagaaaccta

SEQ ID NO: 225620 - DNA, 15 bp, Homo sapiens
ccagagcagaaacct

SEQ ID NO: 225621 - DNA, 15 bp, Homo sapiens
accagagcagaaacc

SEQ ID NO: 225622 - DNA, 15 bp, Homo sapiens
gaccagagcagaaac

SEQ ID NO: 225623 - DNA, 15 bp, Homo sapiens
tgaccagagcagaaa

SEQ ID NO: 225624 - DNA, 15 bp, Homo sapiens
atgaccagagcagaa

SEQ ID NO: 225625 - DNA, 15 bp, Homo sapiens
tatgaccagagcaga

SEQ ID NO: 225626 - DNA, 15 bp, Homo sapiens
atatgaccagagcag

SEQ ID NO: 225627 - DNA, 15 bp, Homo sapiens
aatatgaccagagca

SEQ ID NO: 225628 - DNA, 15 bp, Homo sapiens
caatatgaccagagc

SEQ ID NO: 225629 - DNA, 15 bp, Homo sapiens
tcaatatgaccagag

SEQ ID NO: 225630 - DNA, 15 bp, Homo sapiens
gtcaatatgaccaga

SEQ ID NO: 225631 - DNA, 15 bp, Homo sapiens
tgtcaatatgaccag

SEQ ID NO: 225632 - DNA, 15 bp, Homo sapiens
atgtcaatatgacca

SEQ ID NO: 225633 - DNA, 15 bp, Homo sapiens
gatgtcaatatgacc

SEQ ID NO: 225634 - DNA, 15 bp, Homo sapiens
agatgtcaatatgac

SEQ ID NO: 225635 - DNA, 15 bp, Homo sapiens
aagatgtcaatatga

SEQ ID NO: 225636 - DNA, 15 bp, Homo sapiens
caagatgtcaatatg

SEQ ID NO: 225637 - DNA, 15 bp, Homo sapiens
ccaagatgtcaatat

SEQ ID NO: 225638 - DNA, 15 bp, Homo sapiens
accaagatgtcaata

SEQ ID NO: 225639 - DNA, 15 bp, Homo sapiens
caccaagatgtcaat

SEQ ID NO: 225640 - DNA, 15 bp, Homo sapiens
acaccaagatgtcaa

SEQ ID NO: 225641 - DNA, 15 bp, Homo sapiens
aacaccaagatgtca

SEQ ID NO: 225642 - DNA, 15 bp, Homo sapiens
aaacaccaagatgtc

SEQ ID NO: 225643 - DNA, 15 bp, Homo sapiens
aaaacaccaagatgt

SEQ ID NO: 225644 - DNA, 15 bp, Homo sapiens
caaaacaccaagatg

SEQ ID NO: 225645 - DNA, 15 bp, Homo sapiens
ccaaaacaccaagat

SEQ ID NO: 225646 - DNA, 15 bp, Homo sapiens
accaaaacaccaaga

SEQ ID NO: 225647 - DNA, 15 bp, Homo sapiens
aaccaaaacaccaag

SEQ ID NO: 225648 - DNA, 15 bp, Homo sapiens
aaaccaaaacaccaa

SEQ ID NO: 225649 - DNA, 15 bp, Homo sapiens
caaaccaaaacacca

SEQ ID NO: 225650 - DNA, 15 bp, Homo sapiens
acaaaccaaaacacc

SEQ ID NO: 225651 - DNA, 15 bp, Homo sapiens
tacaaaccaaaacac

SEQ ID NO: 225652 - DNA, 15 bp, Homo sapiens
atacaaaccaaaaca

SEQ ID NO: 225653 - DNA, 15 bp, Homo sapiens
catacaaaccaaaac

SEQ ID NO: 225654 - DNA, 15 bp, Homo sapiens
gcatacaaaccaaaa

SEQ ID NO: 225655 - DNA, 15 bp, Homo sapiens
agcatacaaaccaaa

SEQ ID NO: 225656 - DNA, 15 bp, Homo sapiens
aagcatacaaaccaa

SEQ ID NO: 225657 - DNA, 15 bp, Homo sapiens
caagcatacaaacca

SEQ ID NO: 225658 - DNA, 15 bp, Homo sapiens
gcaagcatacaaacc

SEQ ID NO: 225659 - DNA, 15 bp, Homo sapiens
agcaagcatacaaac

SEQ ID NO: 225660 - DNA, 15 bp, Homo sapiens
aagcaagcatacaaa

SEQ ID NO: 225661 - DNA, 15 bp, Homo sapiens
aaagcaagcatacaa

SEQ ID NO: 225662 - DNA, 15 bp, Homo sapiens
aaaagcaagcataca

SEQ ID NO: 225663 - DNA, 15 bp, Homo sapiens
taaaagcaagcatac

SEQ ID NO: 225664 - DNA, 15 bp, Homo sapiens
ttaaaagcaagcata

SEQ ID NO: 225665 - DNA, 15 bp, Homo sapiens
attaaaagcaagcat

SEQ ID NO: 225666 - DNA, 15 bp, Homo sapiens
aattaaaagcaagca

SEQ ID NO: 225667 - DNA, 15 bp, Homo sapiens
caattaaaagcaagc

SEQ ID NO: 225668 - DNA, 15 bp, Homo sapiens
tcaattaaaagcaag

SEQ ID NO: 225669 - DNA, 15 bp, Homo sapiens
gtcaattaaaagcaa

SEQ ID NO: 225670 - DNA, 15 bp, Homo sapiens
tgtcaattaaaagca

SEQ ID NO: 225671 - DNA, 15 bp, Homo sapiens
gtgtcaattaaaagc

SEQ ID NO: 225672 - DNA, 15 bp, Homo sapiens
tgtgtcaattaaaag

SEQ ID NO: 225673 - DNA, 15 bp, Homo sapiens
atgtgtcaattaaaa

SEQ ID NO: 225674 - DNA, 15 bp, Homo sapiens
tatgtgtcaattaaa

SEQ ID NO: 225675 - DNA, 15 bp, Homo sapiens
ttatgtgtcaattaa

SEQ ID NO: 225676 - DNA, 15 bp, Homo sapiens
attatgtgtcaatta

SEQ ID NO: 225677 - DNA, 15 bp, Homo sapiens
tattatgtgtcaatt

SEQ ID NO: 225678 - DNA, 15 bp, Homo sapiens
ttattatgtgtcaat

SEQ ID NO: 225679 - DNA, 15 bp, Homo sapiens
attattatgtgtcaa

SEQ ID NO: 225680 - DNA, 15 bp, Homo sapiens
aattattatgtgtca

SEQ ID NO: 225681 - DNA, 15 bp, Homo sapiens
caattattatgtgtc

SEQ ID NO: 225682 - DNA, 15 bp, Homo sapiens
acaattattatgtgt

SEQ ID NO: 225683 - DNA, 15 bp, Homo sapiens
tacaattattatgtg

SEQ ID NO: 225684 - DNA, 15 bp, Homo sapiens
ttacaattattatgt

SEQ ID NO: 225685 - DNA, 15 bp, Homo sapiens
tttacaattattatg

SEQ ID NO: 225686 - DNA, 15 bp, Homo sapiens
atttacaattattat

SEQ ID NO: 225687 - DNA, 15 bp, Homo sapiens
tatttacaattatta

SEQ ID NO: 225688 - DNA, 15 bp, Homo sapiens
ttatttacaattatt

SEQ ID NO: 225689 - DNA, 15 bp, Homo sapiens
attatttacaattat

SEQ ID NO: 225690 - DNA, 15 bp, Homo sapiens
aattatttacaatta

SEQ ID NO: 225691 - DNA, 15 bp, Homo sapiens
taattatttacaatt

SEQ ID NO: 225692 - DNA, 15 bp, Homo sapiens
ataattatttacaat

SEQ ID NO: 225693 - DNA, 15 bp, Homo sapiens
cataattatttacaa

SEQ ID NO: 225694 - DNA, 15 bp, Homo sapiens
ccataattatttaca

SEQ ID NO: 225695 - DNA, 15 bp, Homo sapiens
cccataattatttac

SEQ ID NO: 225696 - DNA, 15 bp, Homo sapiens
ccccataattattta

SEQ ID NO: 225697 - DNA, 15 bp, Homo sapiens
accccataattattt

SEQ ID NO: 225698 - DNA, 15 bp, Homo sapiens
taccccataattatt

SEQ ID NO: 225699 - DNA, 15 bp, Homo sapiens
gtaccccataattat

SEQ ID NO: 225700 - DNA, 15 bp, Homo sapiens
tgtaccccataatta

SEQ ID NO: 225701 - DNA, 15 bp, Homo sapiens
gtgtaccccataatt

SEQ ID NO: 225702 - DNA, 15 bp, Homo sapiens
tgtgtaccccataat

SEQ ID NO: 225703 - DNA, 15 bp, Homo sapiens
atgtgtaccccataa

SEQ ID NO: 225704 - DNA, 15 bp, Homo sapiens
catgtgtaccccata

SEQ ID NO: 225705 - DNA, 15 bp, Homo sapiens
tcatgtgtaccccat

SEQ ID NO: 225706 - DNA, 15 bp, Homo sapiens
atcatgtgtacccca

SEQ ID NO: 225707 - DNA, 15 bp, Homo sapiens
catcatgtgtacccc

SEQ ID NO: 225708 - DNA, 15 bp, Homo sapiens
acatcatgtgtaccc

SEQ ID NO: 225709 - DNA, 15 bp, Homo sapiens
aacatcatgtgtacc

SEQ ID NO: 225710 - DNA, 15 bp, Homo sapiens
gaacatcatgtgtac

SEQ ID NO: 225711 - DNA, 15 bp, Homo sapiens
agaacatcatgtgta

SEQ ID NO: 225712 - DNA, 15 bp, Homo sapiens
cagaacatcatgtgt

SEQ ID NO: 225713 - DNA, 15 bp, Homo sapiens
tcagaacatcatgtg

SEQ ID NO: 225714 - DNA, 15 bp, Homo sapiens
atcagaacatcatgt

SEQ ID NO: 225715 - DNA, 15 bp, Homo sapiens
tatcagaacatcatg

SEQ ID NO: 225716 - DNA, 15 bp, Homo sapiens
gtatcagaacatcat

SEQ ID NO: 225717 - DNA, 15 bp, Homo sapiens
tgtatcagaacatca

SEQ ID NO: 225718 - DNA, 15 bp, Homo sapiens
atgtatcagaacatc

SEQ ID NO: 225719 - DNA, 15 bp, Homo sapiens
catgtatcagaacat

SEQ ID NO: 225720 - DNA, 15 bp, Homo sapiens
gcatgtatcagaaca

SEQ ID NO: 225721 - DNA, 15 bp, Homo sapiens
tgcatgtatcagaac

SEQ ID NO: 225722 - DNA, 15 bp, Homo sapiens
atgcatgtatcagaa

SEQ ID NO: 225723 - DNA, 15 bp, Homo sapiens
tatgcatgtatcaga

SEQ ID NO: 225724 - DNA, 15 bp, Homo sapiens
gtatgcatgtatcag

SEQ ID NO: 225725 - DNA, 15 bp, Homo sapiens
tgtatgcatgtatca

SEQ ID NO: 225726 - DNA, 15 bp, Homo sapiens
atgtatgcatgtatc

SEQ ID NO: 225727 - DNA, 15 bp, Homo sapiens
aatgtatgcatgtat

SEQ ID NO: 225728 - DNA, 15 bp, Homo sapiens
caatgtatgcatgta

SEQ ID NO: 225729 - DNA, 15 bp, Homo sapiens
acaatgtatgcatgt

SEQ ID NO: 225730 - DNA, 15 bp, Homo sapiens
cacaatgtatgcatg

SEQ ID NO: 225731 - DNA, 15 bp, Homo sapiens
acacaatgtatgcat

SEQ ID NO: 225732 - DNA, 15 bp, Homo sapiens
tacacaatgtatgca

SEQ ID NO: 225733 - DNA, 15 bp, Homo sapiens
ttacacaatgtatgc

SEQ ID NO: 225734 - DNA, 15 bp, Homo sapiens
tttacacaatgtatg

SEQ ID NO: 225735 - DNA, 15 bp, Homo sapiens
ttctgttttcttggt

SEQ ID NO: 225736 - DNA, 15 bp, Homo sapiens
tttctgttttcttgg

SEQ ID NO: 225737 - DNA, 15 bp, Homo sapiens
ctttctgttttcttg

SEQ ID NO: 225738 - DNA, 15 bp, Homo sapiens
tctttctgttttctt

SEQ ID NO: 225739 - DNA, 15 bp, Homo sapiens
ttctttctgttttct

SEQ ID NO: 225740 - DNA, 15 bp, Homo sapiens
attctttctgttttc

SEQ ID NO: 225741 - DNA, 15 bp, Homo sapiens
gattctttctgtttt

SEQ ID NO: 225742 - DNA, 15 bp, Homo sapiens
agattctttctgttt

SEQ ID NO: 225743 - DNA, 15 bp, Homo sapiens
tagattctttctgtt

SEQ ID NO: 225744 - DNA, 15 bp, Homo sapiens
atagattctttctgt

SEQ ID NO: 225745 - DNA, 15 bp, Homo sapiens
tatagattctttctg

SEQ ID NO: 225746 - DNA, 15 bp, Homo sapiens
atatagattctttct

SEQ ID NO: 225747 - DNA, 15 bp, Homo sapiens
aatatagattctttc

SEQ ID NO: 225748 - DNA, 15 bp, Homo sapiens
taatatagattcttt

SEQ ID NO: 225749 - DNA, 15 bp, Homo sapiens
ataatatagattctt

SEQ ID NO: 225750 - DNA, 15 bp, Homo sapiens
gataatatagattct

SEQ ID NO: 225751 - DNA, 15 bp, Homo sapiens
agataatatagattc

SEQ ID NO: 225752 - DNA, 15 bp, Homo sapiens
aagataatatagatt

SEQ ID NO: 225753 - DNA, 15 bp, Homo sapiens
aaagataatatagat

SEQ ID NO: 225754 - DNA, 15 bp, Homo sapiens
gaaagataatataga

SEQ ID NO: 225755 - DNA, 15 bp, Homo sapiens
ggaaagataatatag

SEQ ID NO: 225756 - DNA, 15 bp, Homo sapiens
tggaaagataatata

SEQ ID NO: 225757 - DNA, 15 bp, Homo sapiens
atggaaagataatat

SEQ ID NO: 225758 - DNA, 15 bp, Homo sapiens
aatggaaagataata

SEQ ID NO: 225759 - DNA, 15 bp, Homo sapiens
aaatggaaagataat

SEQ ID NO: 225760 - DNA, 15 bp, Homo sapiens
gaaatggaaagataa

SEQ ID NO: 225761 - DNA, 15 bp, Homo sapiens
ggaaatggaaagata

SEQ ID NO: 225762 - DNA, 15 bp, Homo sapiens
aggaaatggaaagat

SEQ ID NO: 225763 - DNA, 15 bp, Homo sapiens
aaggaaatggaaaga

SEQ ID NO: 225764 - DNA, 15 bp, Homo sapiens
gaaggaaatggaaag

SEQ ID NO: 225765 - DNA, 15 bp, Homo sapiens
agaaggaaatggaaa

SEQ ID NO: 225766 - DNA, 15 bp, Homo sapiens
aagaaggaaatggaa

SEQ ID NO: 225767 - DNA, 15 bp, Homo sapiens
aaagaaggaaatgga

SEQ ID NO: 225768 - DNA, 15 bp, Homo sapiens
gaaagaaggaaatgg

SEQ ID NO: 225769 - DNA, 15 bp, Homo sapiens
ggaaagaaggaaatg

SEQ ID NO: 225770 - DNA, 15 bp, Homo sapiens
tggaaagaaggaaat

SEQ ID NO: 225771 - DNA, 15 bp, Homo sapiens
ctggaaagaaggaaa

SEQ ID NO: 225772 - DNA, 15 bp, Homo sapiens
actggaaagaaggaa

SEQ ID NO: 225773 - DNA, 15 bp, Homo sapiens
tactggaaagaagga

SEQ ID NO: 225774 - DNA, 15 bp, Homo sapiens
atactggaaagaagg

SEQ ID NO: 225775 - DNA, 15 bp, Homo sapiens
gatactggaaagaag

SEQ ID NO: 225776 - DNA, 15 bp, Homo sapiens
tgatactggaaagaa

SEQ ID NO: 225777 - DNA, 15 bp, Homo sapiens
ttgatactggaaaga

SEQ ID NO: 225778 - DNA, 15 bp, Homo sapiens
attgatactggaaag

SEQ ID NO: 225779 - DNA, 15 bp, Homo sapiens
tattgatactggaaa

SEQ ID NO: 225780 - DNA, 15 bp, Homo sapiens
gtattgatactggaa

SEQ ID NO: 225781 - DNA, 15 bp, Homo sapiens
ggtattgatactgga

SEQ ID NO: 225782 - DNA, 15 bp, Homo sapiens
gggtattgatactgg

SEQ ID NO: 225783 - DNA, 15 bp, Homo sapiens
tgggtattgatactg

SEQ ID NO: 225784 - DNA, 15 bp, Homo sapiens
ttgggtattgatact

SEQ ID NO: 225785 - DNA, 15 bp, Homo sapiens
cttgggtattgatac

SEQ ID NO: 225786 - DNA, 15 bp, Homo sapiens
gcttgggtattgata

SEQ ID NO: 225787 - DNA, 15 bp, Homo sapiens
ggcttgggtattgat

SEQ ID NO: 225788 - DNA, 15 bp, Homo sapiens
aggcttgggtattga

SEQ ID NO: 225789 - DNA, 15 bp, Homo sapiens
gaggcttgggtattg

SEQ ID NO: 225790 - DNA, 15 bp, Homo sapiens
agaggcttgggtatt

SEQ ID NO: 225791 - DNA, 15 bp, Homo sapiens
tagaggcttgggtat

SEQ ID NO: 225792 - DNA, 15 bp, Homo sapiens
ctagaggcttgggta

SEQ ID NO: 225793 - DNA, 15 bp, Homo sapiens
actagaggcttgggt

SEQ ID NO: 225794 - DNA, 15 bp, Homo sapiens
cactagaggcttggg

SEQ ID NO: 225795 - DNA, 15 bp, Homo sapiens
tcactagaggcttgg

SEQ ID NO: 225796 - DNA, 15 bp, Homo sapiens
atcactagaggcttg

SEQ ID NO: 225797 - DNA, 15 bp, Homo sapiens
tatcactagaggctt

SEQ ID NO: 225798 - DNA, 15 bp, Homo sapiens
gtatcactagaggct

SEQ ID NO: 225799 - DNA, 15 bp, Homo sapiens
tgtatcactagaggc

SEQ ID NO: 225800 - DNA, 15 bp, Homo sapiens
atgtatcactagagg

SEQ ID NO: 225801 - DNA, 15 bp, Homo sapiens
catgtatcactagag

SEQ ID NO: 225802 - DNA, 15 bp, Homo sapiens
ccatgtatcactaga

SEQ ID NO: 225803 - DNA, 15 bp, Homo sapiens
gccatgtatcactag

SEQ ID NO: 225804 - DNA, 15 bp, Homo sapiens
tgccatgtatcacta

SEQ ID NO: 225805 - DNA, 15 bp, Homo sapiens
atgccatgtatcact

SEQ ID NO: 225806 - DNA, 15 bp, Homo sapiens
tatgccatgtatcac

SEQ ID NO: 225807 - DNA, 15 bp, Homo sapiens
atatgccatgtatca

SEQ ID NO: 225808 - DNA, 15 bp, Homo sapiens
tatatgccatgtatc

SEQ ID NO: 225809 - DNA, 15 bp, Homo sapiens
ttatatgccatgtat

SEQ ID NO: 225810 - DNA, 15 bp, Homo sapiens
attatatgccatgta

SEQ ID NO: 225811 - DNA, 15 bp, Homo sapiens
cattatatgccatgt

SEQ ID NO: 225812 - DNA, 15 bp, Homo sapiens
acattatatgccatg

SEQ ID NO: 225813 - DNA, 15 bp, Homo sapiens
aacattatatgccat

SEQ ID NO: 225814 - DNA, 15 bp, Homo sapiens
caacattatatgcca

SEQ ID NO: 225815 - DNA, 15 bp, Homo sapiens
ccaacattatatgcc

SEQ ID NO: 225816 - DNA, 15 bp, Homo sapiens
tccaacattatatgc

SEQ ID NO: 225817 - DNA, 15 bp, Homo sapiens
atccaacattatatg

SEQ ID NO: 225818 - DNA, 15 bp, Homo sapiens
catccaacattatat

SEQ ID NO: 225819 - DNA, 15 bp, Homo sapiens
ccatccaacattata

SEQ ID NO: 225820 - DNA, 15 bp, Homo sapiens
tccatccaacattat

SEQ ID NO: 225821 - DNA, 15 bp, Homo sapiens
atccatccaacatta

SEQ ID NO: 225822 - DNA, 15 bp, Homo sapiens
catccatccaacatt

SEQ ID NO: 225823 - DNA, 15 bp, Homo sapiens
ccatccatccaacat

SEQ ID NO: 225824 - DNA, 15 bp, Homo sapiens
tccatccatccaaca

SEQ ID NO: 225825 - DNA, 15 bp, Homo sapiens
atccatccatccaac

SEQ ID NO: 225826 - DNA, 15 bp, Homo sapiens
catccatccatccaa

SEQ ID NO: 225827 - DNA, 15 bp, Homo sapiens
ccatccatccatcca

SEQ ID NO: 225828 - DNA, 15 bp, Homo sapiens
tccatccatccatcc

SEQ ID NO: 225829 - DNA, 15 bp, Homo sapiens
atccatccatccatc

SEQ ID NO: 225830 - DNA, 15 bp, Homo sapiens
catccatccatccat

SEQ ID NO: 225831 - DNA, 15 bp, Homo sapiens
tcatccatccatcca

SEQ ID NO: 225832 - DNA, 15 bp, Homo sapiens
ttcatccatccatcc

SEQ ID NO: 225833 - DNA, 15 bp, Homo sapiens
attcatccatccatc

SEQ ID NO: 225834 - DNA, 15 bp, Homo sapiens
cattcatccatccat

SEQ ID NO: 225835 - DNA, 15 bp, Homo sapiens
ccattcatccatcca

SEQ ID NO: 225836 - DNA, 15 bp, Homo sapiens
tccattcatccatcc

SEQ ID NO: 225837 - DNA, 15 bp, Homo sapiens
atccattcatccatc

SEQ ID NO: 225838 - DNA, 15 bp, Homo sapiens
catccattcatccat

SEQ ID NO: 225839 - DNA, 15 bp, Homo sapiens
ccatccattcatcca

SEQ ID NO: 225840 - DNA, 15 bp, Homo sapiens
accatccattcatcc

SEQ ID NO: 225841 - DNA, 15 bp, Homo sapiens
aaccatccattcatc

SEQ ID NO: 225842 - DNA, 15 bp, Homo sapiens
caaccatccattcat

SEQ ID NO: 225843 - DNA, 15 bp, Homo sapiens
ccaaccatccattca

SEQ ID NO: 225844 - DNA, 15 bp, Homo sapiens
tccaaccatccattc

SEQ ID NO: 225845 - DNA, 15 bp, Homo sapiens
atccaaccatccatt

SEQ ID NO: 225846 - DNA, 15 bp, Homo sapiens
catccaaccatccat

SEQ ID NO: 225847 - DNA, 15 bp, Homo sapiens
ccatccaaccatcca

SEQ ID NO: 225848 - DNA, 15 bp, Homo sapiens
tccatccaaccatcc

SEQ ID NO: 225849 - DNA, 15 bp, Homo sapiens
gtccatccaaccatc

SEQ ID NO: 225850 - DNA, 15 bp, Homo sapiens
tgtccatccaaccat

SEQ ID NO: 225851 - DNA, 15 bp, Homo sapiens
ttgtccatccaacca

SEQ ID NO: 225852 - DNA, 15 bp, Homo sapiens
tttgtccatccaacc

SEQ ID NO: 225853 - DNA, 15 bp, Homo sapiens
atttgtccatccaac

SEQ ID NO: 225854 - DNA, 15 bp, Homo sapiens
catttgtccatccaa

SEQ ID NO: 225855 - DNA, 15 bp, Homo sapiens
tcatttgtccatcca

SEQ ID NO: 225856 - DNA, 15 bp, Homo sapiens
ctcatttgtccatcc

SEQ ID NO: 225857 - DNA, 15 bp, Homo sapiens
actcatttgtccatc

SEQ ID NO: 225858 - DNA, 15 bp, Homo sapiens
tactcatttgtccat

SEQ ID NO: 225859 - DNA, 15 bp, Homo sapiens
ttactcatttgtcca

SEQ ID NO: 225860 - DNA, 15 bp, Homo sapiens
gttactcatttgtcc

SEQ ID NO: 225861 - DNA, 15 bp, Homo sapiens
tgttactcatttgtc

SEQ ID NO: 225862 - DNA, 15 bp, Homo sapiens
atgttactcatttgt

SEQ ID NO: 225863 - DNA, 15 bp, Homo sapiens
tatgttactcatttg

SEQ ID NO: 225864 - DNA, 15 bp, Homo sapiens
ctatgttactcattt

SEQ ID NO: 225865 - DNA, 15 bp, Homo sapiens
cctatgttactcatt

SEQ ID NO: 225866 - DNA, 15 bp, Homo sapiens
gcctatgttactcat

SEQ ID NO: 225867 - DNA, 15 bp, Homo sapiens
agcctatgttactca

SEQ ID NO: 225868 - DNA, 15 bp, Homo sapiens
cagcctatgttactc

SEQ ID NO: 225869 - DNA, 15 bp, Homo sapiens
tcagcctatgttact

SEQ ID NO: 225870 - DNA, 15 bp, Homo sapiens
atcagcctatgttac

SEQ ID NO: 225871 - DNA, 15 bp, Homo sapiens
catcagcctatgtta

SEQ ID NO: 225872 - DNA, 15 bp, Homo sapiens
tcatcagcctatgtt

SEQ ID NO: 225873 - DNA, 15 bp, Homo sapiens
ttcatcagcctatgt

SEQ ID NO: 225874 - DNA, 15 bp, Homo sapiens
attcatcagcctatg

SEQ ID NO: 225875 - DNA, 15 bp, Homo sapiens
tattcatcagcctat

SEQ ID NO: 225876 - DNA, 15 bp, Homo sapiens
ctattcatcagccta

SEQ ID NO: 225877 - DNA, 15 bp, Homo sapiens
actattcatcagcct

SEQ ID NO: 225878 - DNA, 15 bp, Homo sapiens
cactattcatcagcc

SEQ ID NO: 225879 - DNA, 15 bp, Homo sapiens
ccactattcatcagc

SEQ ID NO: 225880 - DNA, 15 bp, Homo sapiens
accactattcatcag

SEQ ID NO: 225881 - DNA, 15 bp, Homo sapiens
taccactattcatca

SEQ ID NO: 225882 - DNA, 15 bp, Homo sapiens
ctaccactattcatc

SEQ ID NO: 225883 - DNA, 15 bp, Homo sapiens
tctaccactattcat

SEQ ID NO: 225884 - DNA, 15 bp, Homo sapiens
ttctaccactattca

SEQ ID NO: 225885 - DNA, 15 bp, Homo sapiens
tttctaccactattc

SEQ ID NO: 225886 - DNA, 15 bp, Homo sapiens
ctttctaccactatt

SEQ ID NO: 225887 - DNA, 15 bp, Homo sapiens
tctttctaccactat

SEQ ID NO: 225888 - DNA, 15 bp, Homo sapiens
gtctttctaccacta

SEQ ID NO: 225889 - DNA, 15 bp, Homo sapiens
tgtctttctaccact

SEQ ID NO: 225890 - DNA, 15 bp, Homo sapiens
gtgtctttctaccac

SEQ ID NO: 225891 - DNA, 15 bp, Homo sapiens
tgtgtctttctacca

SEQ ID NO: 225892 - DNA, 15 bp, Homo sapiens
gtgtgtctttctacc

SEQ ID NO: 225893 - DNA, 15 bp, Homo sapiens
ggtgtgtctttctac

SEQ ID NO: 225894 - DNA, 15 bp, Homo sapiens
tggtgtgtctttcta

SEQ ID NO: 225895 - DNA, 15 bp, Homo sapiens
atggtgtgtctttct

SEQ ID NO: 225896 - DNA, 15 bp, Homo sapiens
tatggtgtgtctttc

SEQ ID NO: 225897 - DNA, 15 bp, Homo sapiens
ttatggtgtgtcttt

SEQ ID NO: 225898 - DNA, 15 bp, Homo sapiens
tttatggtgtgtctt

SEQ ID NO: 225899 - DNA, 15 bp, Homo sapiens
ttttatggtgtgtct

SEQ ID NO: 225900 - DNA, 15 bp, Homo sapiens
tttttatggtgtgtc

SEQ ID NO: 225901 - DNA, 15 bp, Homo sapiens
gtttttatggtgtgt

SEQ ID NO: 225902 - DNA, 15 bp, Homo sapiens
tgtttttatggtgtg

SEQ ID NO: 225903 - DNA, 15 bp, Homo sapiens
ttgtttttatggtgt

SEQ ID NO: 225904 - DNA, 15 bp, Homo sapiens
cttgtttttatggtg

SEQ ID NO: 225905 - DNA, 15 bp, Homo sapiens
acttgtttttatggt

SEQ ID NO: 225906 - DNA, 15 bp, Homo sapiens
cacttgtttttatgg

SEQ ID NO: 225907 - DNA, 15 bp, Homo sapiens
ccacttgtttttatg

SEQ ID NO: 225908 - DNA, 15 bp, Homo sapiens
gccacttgtttttat

SEQ ID NO: 225909 - DNA, 15 bp, Homo sapiens
tgccacttgttttta

SEQ ID NO: 225910 - DNA, 15 bp, Homo sapiens
gtgccacttgttttt

SEQ ID NO: 225911 - DNA, 15 bp, Homo sapiens
agtgccacttgtttt

SEQ ID NO: 225912 - DNA, 15 bp, Homo sapiens
aagtgccacttgttt

SEQ ID NO: 225913 - DNA, 15 bp, Homo sapiens
gaagtgccacttgtt

SEQ ID NO: 225914 - DNA, 15 bp, Homo sapiens
agaagtgccacttgt

SEQ ID NO: 225915 - DNA, 15 bp, Homo sapiens
cagaagtgccacttg

SEQ ID NO: 225916 - DNA, 15 bp, Homo sapiens
tcagaagtgccactt

SEQ ID NO: 225917 - DNA, 15 bp, Homo sapiens
ctcagaagtgccact

SEQ ID NO: 225918 - DNA, 15 bp, Homo sapiens
tctcagaagtgccac

SEQ ID NO: 225919 - DNA, 15 bp, Homo sapiens
atctcagaagtgcca

SEQ ID NO: 225920 - DNA, 15 bp, Homo sapiens
catctcagaagtgcc

SEQ ID NO: 225921 - DNA, 15 bp, Homo sapiens
tcatctcagaagtgc

SEQ ID NO: 225922 - DNA, 15 bp, Homo sapiens
ttcatctcagaagtg

SEQ ID NO: 225923 - DNA, 15 bp, Homo sapiens
tttcatctcagaagt

SEQ ID NO: 225924 - DNA, 15 bp, Homo sapiens
atttcatctcagaag

SEQ ID NO: 225925 - DNA, 15 bp, Homo sapiens
catttcatctcagaa

SEQ ID NO: 225926 - DNA, 15 bp, Homo sapiens
tcatttcatctcaga

SEQ ID NO: 225927 - DNA, 15 bp, Homo sapiens
atcatttcatctcag

SEQ ID NO: 225928 - DNA, 15 bp, Homo sapiens
aatcatttcatctca

SEQ ID NO: 225929 - DNA, 15 bp, Homo sapiens
gaatcatttcatctc

SEQ ID NO: 225930 - DNA, 15 bp, Homo sapiens
ggaatcatttcatct

SEQ ID NO: 225931 - DNA, 15 bp, Homo sapiens
aggaatcatttcatc

SEQ ID NO: 225932 - DNA, 15 bp, Homo sapiens
taggaatcatttcat

SEQ ID NO: 225933 - DNA, 15 bp, Homo sapiens
ataggaatcatttca

SEQ ID NO: 225934 - DNA, 15 bp, Homo sapiens
aataggaatcatttc

SEQ ID NO: 225935 - DNA, 15 bp, Homo sapiens
gaataggaatcattt

SEQ ID NO: 225936 - DNA, 15 bp, Homo sapiens
agaataggaatcatt

SEQ ID NO: 225937 - DNA, 15 bp, Homo sapiens
gagaataggaatcat

SEQ ID NO: 225938 - DNA, 15 bp, Homo sapiens
ggagaataggaatca

SEQ ID NO: 225939 - DNA, 15 bp, Homo sapiens
aggagaataggaatc

SEQ ID NO: 225940 - DNA, 15 bp, Homo sapiens
taggagaataggaat

SEQ ID NO: 225941 - DNA, 15 bp, Homo sapiens
gtaggagaataggaa

SEQ ID NO: 225942 - DNA, 15 bp, Homo sapiens
tgtaggagaatagga

SEQ ID NO: 225943 - DNA, 15 bp, Homo sapiens
gtgtaggagaatagg

SEQ ID NO: 225944 - DNA, 15 bp, Homo sapiens
tgtgtaggagaatag

SEQ ID NO: 225945 - DNA, 15 bp, Homo sapiens
ttgtgtaggagaata

SEQ ID NO: 225946 - DNA, 15 bp, Homo sapiens
cttgtgtaggagaat

SEQ ID NO: 225947 - DNA, 15 bp, Homo sapiens
tcttgtgtaggagaa

SEQ ID NO: 225948 - DNA, 15 bp, Homo sapiens
gtcttgtgtaggaga

SEQ ID NO: 225949 - DNA, 15 bp, Homo sapiens
tgtcttgtgtaggag

SEQ ID NO: 225950 - DNA, 15 bp, Homo sapiens
ctgtcttgtgtagga

SEQ ID NO: 225951 - DNA, 15 bp, Homo sapiens
actgtcttgtgtagg

SEQ ID NO: 225952 - DNA, 15 bp, Homo sapiens
cactgtcttgtgtag

SEQ ID NO: 225953 - DNA, 15 bp, Homo sapiens
tcactgtcttgtgta

SEQ ID NO: 225954 - DNA, 15 bp, Homo sapiens
ctcactgtcttgtgt

SEQ ID NO: 225955 - DNA, 15 bp, Homo sapiens
cctcactgtcttgtg

SEQ ID NO: 225956 - DNA, 15 bp, Homo sapiens
gcctcactgtcttgt

SEQ ID NO: 225957 - DNA, 15 bp, Homo sapiens
tgcctcactgtcttg

SEQ ID NO: 225958 - DNA, 15 bp, Homo sapiens
ttgcctcactgtctt

SEQ ID NO: 225959 - DNA, 15 bp, Homo sapiens
cttgcctcactgtct

SEQ ID NO: 225960 - DNA, 15 bp, Homo sapiens
acttgcctcactgtc

SEQ ID NO: 225961 - DNA, 15 bp, Homo sapiens
tacttgcctcactgt

SEQ ID NO: 225962 - DNA, 15 bp, Homo sapiens
gtacttgcctcactg

SEQ ID NO: 225963 - DNA, 15 bp, Homo sapiens
tgtacttgcctcact

SEQ ID NO: 225964 - DNA, 15 bp, Homo sapiens
ctgtacttgcctcac

SEQ ID NO: 225965 - DNA, 15 bp, Homo sapiens
tctgtacttgcctca

SEQ ID NO: 225966 - DNA, 15 bp, Homo sapiens
ctctgtacttgcctc

SEQ ID NO: 225967 - DNA, 15 bp, Homo sapiens
actctgtacttgcct

SEQ ID NO: 225968 - DNA, 15 bp, Homo sapiens
tactctgtacttgcc

SEQ ID NO: 225969 - DNA, 15 bp, Homo sapiens
ttactctgtacttgc

SEQ ID NO: 225970 - DNA, 15 bp, Homo sapiens
tttactctgtacttg

SEQ ID NO: 225971 - DNA, 15 bp, Homo sapiens
ttttactctgtactt

SEQ ID NO: 225972 - DNA, 15 bp, Homo sapiens
tttttactctgtact

SEQ ID NO: 225973 - DNA, 15 bp, Homo sapiens
ttttttactctgtac

SEQ ID NO: 225974 - DNA, 15 bp, Homo sapiens
cttttttactctgta

SEQ ID NO: 225975 - DNA, 15 bp, Homo sapiens
ccttttttactctgt

SEQ ID NO: 225976 - DNA, 15 bp, Homo sapiens
tccttttttactctg

SEQ ID NO: 225977 - DNA, 15 bp, Homo sapiens
ttccttttttactct

SEQ ID NO: 225978 - DNA, 15 bp, Homo sapiens
tttccttttttactc

SEQ ID NO: 225979 - DNA, 15 bp, Homo sapiens
ctttccttttttact

SEQ ID NO: 225980 - DNA, 15 bp, Homo sapiens
cctttccttttttac

SEQ ID NO: 225981 - DNA, 15 bp, Homo sapiens
gcctttcctttttta

SEQ ID NO: 225982 - DNA, 15 bp, Homo sapiens
tgcctttcctttttt

SEQ ID NO: 225983 - DNA, 15 bp, Homo sapiens
atgcctttccttttt

SEQ ID NO: 225984 - DNA, 15 bp, Homo sapiens
tatgcctttcctttt

SEQ ID NO: 225985 - DNA, 15 bp, Homo sapiens
ctatgcctttccttt

SEQ ID NO: 225986 - DNA, 15 bp, Homo sapiens
cctatgcctttcctt

SEQ ID NO: 225987 - DNA, 15 bp, Homo sapiens
tcctatgcctttcct

SEQ ID NO: 225988 - DNA, 15 bp, Homo sapiens
ctcctatgcctttcc

SEQ ID NO: 225989 - DNA, 15 bp, Homo sapiens
gctcctatgcctttc

SEQ ID NO: 225990 - DNA, 15 bp, Homo sapiens
agctcctatgccttt

SEQ ID NO: 225991 - DNA, 15 bp, Homo sapiens
tagctcctatgcctt

SEQ ID NO: 225992 - DNA, 15 bp, Homo sapiens
atagctcctatgcct

SEQ ID NO: 225993 - DNA, 15 bp, Homo sapiens
catagctcctatgcc

SEQ ID NO: 225994 - DNA, 15 bp, Homo sapiens
gcatagctcctatgc

SEQ ID NO: 225995 - DNA, 15 bp, Homo sapiens
agcatagctcctatg

SEQ ID NO: 225996 - DNA, 15 bp, Homo sapiens
aagcatagctcctat

SEQ ID NO: 225997 - DNA, 15 bp, Homo sapiens
taagcatagctccta

SEQ ID NO: 225998 - DNA, 15 bp, Homo sapiens
ataagcatagctcct

SEQ ID NO: 225999 - DNA, 15 bp, Homo sapiens
tataagcatagctcc

SEQ ID NO: 226000 - DNA, 15 bp, Homo sapiens
gtataagcatagctc

SEQ ID NO: 226001 - DNA, 15 bp, Homo sapiens
tgtataagcatagct

SEQ ID NO: 226002 - DNA, 15 bp, Homo sapiens
ttgtataagcatagc

SEQ ID NO: 226003 - DNA, 15 bp, Homo sapiens
cttgtataagcatag

SEQ ID NO: 226004 - DNA, 15 bp, Homo sapiens
acttgtataagcata

SEQ ID NO: 226005 - DNA, 15 bp, Homo sapiens
tacttgtataagcat

SEQ ID NO: 226006 - DNA, 15 bp, Homo sapiens
atacttgtataagca

SEQ ID NO: 226007 - DNA, 15 bp, Homo sapiens
aatacttgtataagc

SEQ ID NO: 226008 - DNA, 15 bp, Homo sapiens
caatacttgtataag

SEQ ID NO: 226009 - DNA, 15 bp, Homo sapiens
acaatacttgtataa

SEQ ID NO: 226010 - DNA, 15 bp, Homo sapiens
tacaatacttgtata

SEQ ID NO: 226011 - DNA, 15 bp, Homo sapiens
atacaatacttgtat

SEQ ID NO: 226012 - DNA, 15 bp, Homo sapiens
catacaatacttgta

SEQ ID NO: 226013 - DNA, 15 bp, Homo sapiens
acatacaatacttgt

SEQ ID NO: 226014 - DNA, 15 bp, Homo sapiens
aacatacaatacttg

SEQ ID NO: 226015 - DNA, 15 bp, Homo sapiens
aaacatacaatactt

SEQ ID NO: 226016 - DNA, 15 bp, Homo sapiens
caaacatacaatact

SEQ ID NO: 226017 - DNA, 15 bp, Homo sapiens
ccaaacatacaatac

SEQ ID NO: 226018 - DNA, 15 bp, Homo sapiens
tccaaacatacaata

SEQ ID NO: 226019 - DNA, 15 bp, Homo sapiens
ttccaaacatacaat

SEQ ID NO: 226020 - DNA, 15 bp, Homo sapiens
attccaaacatacaa

SEQ ID NO: 226021 - DNA, 15 bp, Homo sapiens
aattccaaacataca

SEQ ID NO: 226022 - DNA, 15 bp, Homo sapiens
aaattccaaacatac

SEQ ID NO: 226023 - DNA, 15 bp, Homo sapiens
gaaattccaaacata

SEQ ID NO: 226024 - DNA, 15 bp, Homo sapiens
ggaaattccaaacat

SEQ ID NO: 226025 - DNA, 15 bp, Homo sapiens
aggaaattccaaaca

SEQ ID NO: 226026 - DNA, 15 bp, Homo sapiens
aaggaaattccaaac

SEQ ID NO: 226027 - DNA, 15 bp, Homo sapiens
gaaggaaattccaaa

SEQ ID NO: 226028 - DNA, 15 bp, Homo sapiens
cgaaggaaattccaa

SEQ ID NO: 226029 - DNA, 15 bp, Homo sapiens
gcgaaggaaattcca

SEQ ID NO: 226030 - DNA, 15 bp, Homo sapiens
agcgaaggaaattcc

SEQ ID NO: 226031 - DNA, 15 bp, Homo sapiens
cagcgaaggaaattc

SEQ ID NO: 226032 - DNA, 15 bp, Homo sapiens
ccagcgaaggaaatt

SEQ ID NO: 226033 - DNA, 15 bp, Homo sapiens
gccagcgaaggaaat

SEQ ID NO: 226034 - DNA, 15 bp, Homo sapiens
ggccagcgaaggaaa

SEQ ID NO: 226035 - DNA, 15 bp, Homo sapiens
tggccagcgaaggaa

SEQ ID NO: 226036 - DNA, 15 bp, Homo sapiens
ttggccagcgaagga

SEQ ID NO: 226037 - DNA, 15 bp, Homo sapiens
tttggccagcgaagg

SEQ ID NO: 226038 - DNA, 15 bp, Homo sapiens
atttggccagcgaag

SEQ ID NO: 226039 - DNA, 15 bp, Homo sapiens
aatttggccagcgaa

SEQ ID NO: 226040 - DNA, 15 bp, Homo sapiens
caatttggccagcga

SEQ ID NO: 226041 - DNA, 15 bp, Homo sapiens
tcaatttggccagcg

SEQ ID NO: 226042 - DNA, 15 bp, Homo sapiens
ttcaatttggccagc

SEQ ID NO: 226043 - DNA, 15 bp, Homo sapiens
tttcaatttggccag

SEQ ID NO: 226044 - DNA, 15 bp, Homo sapiens
atttcaatttggcca

SEQ ID NO: 226045 - DNA, 15 bp, Homo sapiens
aatttcaatttggcc

SEQ ID NO: 226046 - DNA, 15 bp, Homo sapiens
caatttcaatttggc

SEQ ID NO: 226047 - DNA, 15 bp, Homo sapiens
acaatttcaatttgg

SEQ ID NO: 226048 - DNA, 15 bp, Homo sapiens
aacaatttcaatttg

SEQ ID NO: 226049 - DNA, 15 bp, Homo sapiens
gaacaatttcaattt

SEQ ID NO: 226050 - DNA, 15 bp, Homo sapiens
tgaacaatttcaatt

SEQ ID NO: 226051 - DNA, 15 bp, Homo sapiens
ttgaacaatttcaat

SEQ ID NO: 226052 - DNA, 15 bp, Homo sapiens
cttgaacaatttcaa

SEQ ID NO: 226053 - DNA, 15 bp, Homo sapiens
ccttgaacaatttca

SEQ ID NO: 226054 - DNA, 15 bp, Homo sapiens
tccttgaacaatttc

SEQ ID NO: 226055 - DNA, 15 bp, Homo sapiens
gtccttgaacaattt

SEQ ID NO: 226056 - DNA, 15 bp, Homo sapiens
ggtccttgaacaatt

SEQ ID NO: 226057 - DNA, 15 bp, Homo sapiens
aggtccttgaacaat

SEQ ID NO: 226058 - DNA, 15 bp, Homo sapiens
taggtccttgaacaa

SEQ ID NO: 226059 - DNA, 15 bp, Homo sapiens
ataggtccttgaaca

SEQ ID NO: 226060 - DNA, 15 bp, Homo sapiens
aataggtccttgaac

SEQ ID NO: 226061 - DNA, 15 bp, Homo sapiens
caataggtccttgaa

SEQ ID NO: 226062 - DNA, 15 bp, Homo sapiens
gcaataggtccttga

SEQ ID NO: 226063 - DNA, 15 bp, Homo sapiens
agcaataggtccttg

SEQ ID NO: 226064 - DNA, 15 bp, Homo sapiens
tagcaataggtcctt

SEQ ID NO: 226065 - DNA, 15 bp, Homo sapiens
gtagcaataggtcct

SEQ ID NO: 226066 - DNA, 15 bp, Homo sapiens
tgtagcaataggtcc

SEQ ID NO: 226067 - DNA, 15 bp, Homo sapiens
ctgtagcaataggtc

SEQ ID NO: 226068 - DNA, 15 bp, Homo sapiens
cctgtagcaataggt

SEQ ID NO: 226069 - DNA, 15 bp, Homo sapiens
acctgtagcaatagg

SEQ ID NO: 226070 - DNA, 15 bp, Homo sapiens
cacctgtagcaatag

SEQ ID NO: 226071 - DNA, 15 bp, Homo sapiens
ccacctgtagcaata

SEQ ID NO: 226072 - DNA, 15 bp, Homo sapiens
gccacctgtagcaat

SEQ ID NO: 226073 - DNA, 15 bp, Homo sapiens
tgccacctgtagcaa

SEQ ID NO: 226074 - DNA, 15 bp, Homo sapiens
ttgccacctgtagca

SEQ ID NO: 226075 - DNA, 15 bp, Homo sapiens
gttgccacctgtagc

SEQ ID NO: 226076 - DNA, 15 bp, Homo sapiens
agttgccacctgtag

SEQ ID NO: 226077 - DNA, 15 bp, Homo sapiens
cagttgccacctgta

SEQ ID NO: 226078 - DNA, 15 bp, Homo sapiens
ccagttgccacctgt

SEQ ID NO: 226079 - DNA, 15 bp, Homo sapiens
gccagttgccacctg

SEQ ID NO: 226080 - DNA, 15 bp, Homo sapiens
agccagttgccacct

SEQ ID NO: 226081 - DNA, 15 bp, Homo sapiens
tagccagttgccacc

SEQ ID NO: 226082 - DNA, 15 bp, Homo sapiens
ttagccagttgccac

SEQ ID NO: 226083 - DNA, 15 bp, Homo sapiens
cttagccagttgcca

SEQ ID NO: 226084 - DNA, 15 bp, Homo sapiens
tcttagccagttgcc

SEQ ID NO: 226085 - DNA, 15 bp, Homo sapiens
ttcttagccagttgc

SEQ ID NO: 226086 - DNA, 15 bp, Homo sapiens
attcttagccagttg

SEQ ID NO: 226087 - DNA, 15 bp, Homo sapiens
aattcttagccagtt

SEQ ID NO: 226088 - DNA, 15 bp, Homo sapiens
aaattcttagccagt

SEQ ID NO: 226089 - DNA, 15 bp, Homo sapiens
gaaattcttagccag

SEQ ID NO: 226090 - DNA, 15 bp, Homo sapiens
tgaaattcttagcca

SEQ ID NO: 226091 - DNA, 15 bp, Homo sapiens
atgaaattcttagcc

SEQ ID NO: 226092 - DNA, 15 bp, Homo sapiens
tatgaaattcttagc

SEQ ID NO: 226093 - DNA, 15 bp, Homo sapiens
ctatgaaattcttag

SEQ ID NO: 226094 - DNA, 15 bp, Homo sapiens
actatgaaattctta

SEQ ID NO: 226095 - DNA, 15 bp, Homo sapiens
cactatgaaattctt

SEQ ID NO: 226096 - DNA, 15 bp, Homo sapiens
tcactatgaaattct

SEQ ID NO: 226097 - DNA, 15 bp, Homo sapiens
ttcactatgaaattc

SEQ ID NO: 226098 - DNA, 15 bp, Homo sapiens
attcactatgaaatt

SEQ ID NO: 226099 - DNA, 15 bp, Homo sapiens
tattcactatgaaat

SEQ ID NO: 226100 - DNA, 15 bp, Homo sapiens
atattcactatgaaa

SEQ ID NO: 226101 - DNA, 15 bp, Homo sapiens
aatattcactatgaa

SEQ ID NO: 226102 - DNA, 15 bp, Homo sapiens
taatattcactatga

SEQ ID NO: 226103 - DNA, 15 bp, Homo sapiens
ataatattcactatg

SEQ ID NO: 226104 - DNA, 15 bp, Homo sapiens
tataatattcactat

SEQ ID NO: 226105 - DNA, 15 bp, Homo sapiens
gtataatattcacta

SEQ ID NO: 226106 - DNA, 15 bp, Homo sapiens
tgtataatattcact

SEQ ID NO: 226107 - DNA, 15 bp, Homo sapiens
gtgtataatattcac

SEQ ID NO: 226108 - DNA, 15 bp, Homo sapiens
ggtgtataatattca

SEQ ID NO: 226109 - DNA, 15 bp, Homo sapiens
aggtgtataatattc

SEQ ID NO: 226110 - DNA, 15 bp, Homo sapiens
taggtgtataatatt

SEQ ID NO: 226111 - DNA, 15 bp, Homo sapiens
ataggtgtataatat

SEQ ID NO: 226112 - DNA, 15 bp, Homo sapiens
aataggtgtataata

SEQ ID NO: 226113 - DNA, 15 bp, Homo sapiens
taataggtgtataat

SEQ ID NO: 226114 - DNA, 15 bp, Homo sapiens
gtaataggtgtataa

SEQ ID NO: 226115 - DNA, 15 bp, Homo sapiens
agtaataggtgtata

SEQ ID NO: 226116 - DNA, 15 bp, Homo sapiens
gagtaataggtgtat

SEQ ID NO: 226117 - DNA, 15 bp, Homo sapiens
ggagtaataggtgta

SEQ ID NO: 226118 - DNA, 15 bp, Homo sapiens
gggagtaataggtgt

SEQ ID NO: 226119 - DNA, 15 bp, Homo sapiens
ggggagtaataggtg

SEQ ID NO: 226120 - DNA, 15 bp, Homo sapiens
aggggagtaataggt

SEQ ID NO: 226121 - DNA, 15 bp, Homo sapiens
aaggggagtaatagg

SEQ ID NO: 226122 - DNA, 15 bp, Homo sapiens
taaggggagtaatag

SEQ ID NO: 226123 - DNA, 15 bp, Homo sapiens
ttaaggggagtaata

SEQ ID NO: 226124 - DNA, 15 bp, Homo sapiens
attaaggggagtaat

SEQ ID NO: 226125 - DNA, 15 bp, Homo sapiens
cattaaggggagtaa

SEQ ID NO: 226126 - DNA, 15 bp, Homo sapiens
acattaaggggagta

SEQ ID NO: 226127 - DNA, 15 bp, Homo sapiens
aacattaaggggagt

SEQ ID NO: 226128 - DNA, 15 bp, Homo sapiens
aaacattaaggggag

SEQ ID NO: 226129 - DNA, 15 bp, Homo sapiens
gaaacattaagggga

SEQ ID NO: 226130 - DNA, 15 bp, Homo sapiens
agaaacattaagggg

SEQ ID NO: 226131 - DNA, 15 bp, Homo sapiens
aagaaacattaaggg

SEQ ID NO: 226132 - DNA, 15 bp, Homo sapiens
aaagaaacattaagg

SEQ ID NO: 226133 - DNA, 15 bp, Homo sapiens
caaagaaacattaag

SEQ ID NO: 226134 - DNA, 15 bp, Homo sapiens
tcaaagaaacattaa

SEQ ID NO: 226135 - DNA, 15 bp, Homo sapiens
ttcaaagaaacatta

SEQ ID NO: 226136 - DNA, 15 bp, Homo sapiens
cttcaaagaaacatt

SEQ ID NO: 226137 - DNA, 15 bp, Homo sapiens
acttcaaagaaacat

SEQ ID NO: 226138 - DNA, 15 bp, Homo sapiens
tacttcaaagaaaca

SEQ ID NO: 226139 - DNA, 15 bp, Homo sapiens
ttacttcaaagaaac

SEQ ID NO: 226140 - DNA, 15 bp, Homo sapiens
cttacttcaaagaaa

SEQ ID NO: 226141 - DNA, 15 bp, Homo sapiens
gcttacttcaaagaa

SEQ ID NO: 226142 - DNA, 15 bp, Homo sapiens
tgcttacttcaaaga

SEQ ID NO: 226143 - DNA, 15 bp, Homo sapiens
ctgcttacttcaaag

SEQ ID NO: 226144 - DNA, 15 bp, Homo sapiens
tctgcttacttcaaa

SEQ ID NO: 226145 - DNA, 15 bp, Homo sapiens
ttctgcttacttcaa

SEQ ID NO: 226146 - DNA, 15 bp, Homo sapiens
attctgcttacttca

SEQ ID NO: 226147 - DNA, 15 bp, Homo sapiens
tattctgcttacttc

SEQ ID NO: 226148 - DNA, 15 bp, Homo sapiens
atattctgcttactt

SEQ ID NO: 226149 - DNA, 15 bp, Homo sapiens
aatattctgcttact

SEQ ID NO: 226150 - DNA, 15 bp, Homo sapiens
taatattctgcttac

SEQ ID NO: 226151 - DNA, 15 bp, Homo sapiens
ttaatattctgctta

SEQ ID NO: 226152 - DNA, 15 bp, Homo sapiens
attaatattctgctt

SEQ ID NO: 226153 - DNA, 15 bp, Homo sapiens
tattaatattctgct

SEQ ID NO: 226154 - DNA, 15 bp, Homo sapiens
ttattaatattctgc

SEQ ID NO: 226155 - DNA, 15 bp, Homo sapiens
attattaatattctg

SEQ ID NO: 226156 - DNA, 15 bp, Homo sapiens
gattattaatattct

SEQ ID NO: 226157 - DNA, 15 bp, Homo sapiens
tgattattaatattc

SEQ ID NO: 226158 - DNA, 15 bp, Homo sapiens
atgattattaatatt

SEQ ID NO: 226159 - DNA, 15 bp, Homo sapiens
aatgattattaatat

SEQ ID NO: 226160 - DNA, 15 bp, Homo sapiens
aaatgattattaata

SEQ ID NO: 226161 - DNA, 15 bp, Homo sapiens
taaatgattattaat

SEQ ID NO: 226162 - DNA, 15 bp, Homo sapiens
ttaaatgattattaa

SEQ ID NO: 226163 - DNA, 15 bp, Homo sapiens
tttaaatgattatta

SEQ ID NO: 226164 - DNA, 15 bp, Homo sapiens
ttttaaatgattatt

SEQ ID NO: 226165 - DNA, 15 bp, Homo sapiens
attttaaatgattat

SEQ ID NO: 226166 - DNA, 15 bp, Homo sapiens
aattttaaatgatta

SEQ ID NO: 226167 - DNA, 15 bp, Homo sapiens
gaattttaaatgatt

SEQ ID NO: 226168 - DNA, 15 bp, Homo sapiens
ggaattttaaatgat

SEQ ID NO: 226169 - DNA, 15 bp, Homo sapiens
tggaattttaaatga

SEQ ID NO: 226170 - DNA, 15 bp, Homo sapiens
ctggaattttaaatg

SEQ ID NO: 226171 - DNA, 15 bp, Homo sapiens
actggaattttaaat

SEQ ID NO: 226172 - DNA, 15 bp, Homo sapiens
cactggaattttaaa

SEQ ID NO: 226173 - DNA, 15 bp, Homo sapiens
acactggaattttaa

SEQ ID NO: 226174 - DNA, 15 bp, Homo sapiens
aacactggaatttta

SEQ ID NO: 226175 - DNA, 15 bp, Homo sapiens
aaacactggaatttt

SEQ ID NO: 226176 - DNA, 15 bp, Homo sapiens
gaaacactggaattt

SEQ ID NO: 226177 - DNA, 15 bp, Homo sapiens
tgaaacactggaatt

SEQ ID NO: 226178 - DNA, 15 bp, Homo sapiens
ttgaaacactggaat

SEQ ID NO: 226179 - DNA, 15 bp, Homo sapiens
gttgaaacactggaa

SEQ ID NO: 226180 - DNA, 15 bp, Homo sapiens
agttgaaacactgga

SEQ ID NO: 226181 - DNA, 15 bp, Homo sapiens
aagttgaaacactgg

SEQ ID NO: 226182 - DNA, 15 bp, Homo sapiens
gaagttgaaacactg

SEQ ID NO: 226183 - DNA, 15 bp, Homo sapiens
tgaagttgaaacact

SEQ ID NO: 226184 - DNA, 15 bp, Homo sapiens
ttgaagttgaaacac

SEQ ID NO: 226185 - DNA, 15 bp, Homo sapiens
attgaagttgaaaca

SEQ ID NO: 226186 - DNA, 15 bp, Homo sapiens
aattgaagttgaaac

SEQ ID NO: 226187 - DNA, 15 bp, Homo sapiens
caattgaagttgaaa

SEQ ID NO: 226188 - DNA, 15 bp, Homo sapiens
acaattgaagttgaa

SEQ ID NO: 226189 - DNA, 15 bp, Homo sapiens
aacaattgaagttga

SEQ ID NO: 226190 - DNA, 15 bp, Homo sapiens
aaacaattgaagttg

SEQ ID NO: 226191 - DNA, 15 bp, Homo sapiens
gaaacaattgaagtt

SEQ ID NO: 226192 - DNA, 15 bp, Homo sapiens
ggaaacaattgaagt

SEQ ID NO: 226193 - DNA, 15 bp, Homo sapiens
aggaaacaattgaag

SEQ ID NO: 226194 - DNA, 15 bp, Homo sapiens
taggaaacaattgaa

SEQ ID NO: 226195 - DNA, 15 bp, Homo sapiens
ctaggaaacaattga

SEQ ID NO: 226196 - DNA, 15 bp, Homo sapiens
cctaggaaacaattg

SEQ ID NO: 226197 - DNA, 15 bp, Homo sapiens
ccctaggaaacaatt

SEQ ID NO: 226198 - DNA, 15 bp, Homo sapiens
gccctaggaaacaat

SEQ ID NO: 226199 - DNA, 15 bp, Homo sapiens
tgccctaggaaacaa

SEQ ID NO: 226200 - DNA, 15 bp, Homo sapiens
ttgccctaggaaaca

SEQ ID NO: 226201 - DNA, 15 bp, Homo sapiens
tttgccctaggaaac

SEQ ID NO: 226202 - DNA, 15 bp, Homo sapiens
atttgccctaggaaa

SEQ ID NO: 226203 - DNA, 15 bp, Homo sapiens
aatttgccctaggaa

SEQ ID NO: 226204 - DNA, 15 bp, Homo sapiens
caatttgccctagga

SEQ ID NO: 226205 - DNA, 15 bp, Homo sapiens
tcaatttgccctagg

SEQ ID NO: 226206 - DNA, 15 bp, Homo sapiens
atcaatttgccctag

SEQ ID NO: 226207 - DNA, 15 bp, Homo sapiens
tatcaatttgcccta

SEQ ID NO: 226208 - DNA, 15 bp, Homo sapiens
ttatcaatttgccct

SEQ ID NO: 226209 - DNA, 15 bp, Homo sapiens
attatcaatttgccc

SEQ ID NO: 226210 - DNA, 15 bp, Homo sapiens
aattatcaatttgcc

SEQ ID NO: 226211 - DNA, 15 bp, Homo sapiens
caattatcaatttgc

SEQ ID NO: 226212 - DNA, 15 bp, Homo sapiens
acaattatcaatttg

SEQ ID NO: 226213 - DNA, 15 bp, Homo sapiens
cacaattatcaattt

SEQ ID NO: 226214 - DNA, 15 bp, Homo sapiens
acacaattatcaatt

SEQ ID NO: 226215 - DNA, 15 bp, Homo sapiens
cacacaattatcaat

SEQ ID NO: 226216 - DNA, 15 bp, Homo sapiens
acacacaattatcaa

SEQ ID NO: 226217 - DNA, 15 bp, Homo sapiens
tacacacaattatca

SEQ ID NO: 226218 - DNA, 15 bp, Homo sapiens
ttacacacaattatc

SEQ ID NO: 226219 - DNA, 15 bp, Homo sapiens
tttacacacaattat

SEQ ID NO: 226220 - DNA, 15 bp, Homo sapiens
ttttacacacaatta

SEQ ID NO: 226221 - DNA, 15 bp, Homo sapiens
gttttacacacaatt

SEQ ID NO: 226222 - DNA, 15 bp, Homo sapiens
agttttacacacaat

SEQ ID NO: 226223 - DNA, 15 bp, Homo sapiens
tagttttacacacaa

SEQ ID NO: 226224 - DNA, 15 bp, Homo sapiens
ttagttttacacaca

SEQ ID NO: 226225 - DNA, 15 bp, Homo sapiens
attagttttacacac

SEQ ID NO: 226226 - DNA, 15 bp, Homo sapiens
aattagttttacaca

SEQ ID NO: 226227 - DNA, 15 bp, Homo sapiens
caattagttttacac

SEQ ID NO: 226228 - DNA, 15 bp, Homo sapiens
ccaattagttttaca

SEQ ID NO: 226229 - DNA, 15 bp, Homo sapiens
tccaattagttttac

SEQ ID NO: 226230 - DNA, 15 bp, Homo sapiens
ttccaattagtttta

SEQ ID NO: 226231 - DNA, 15 bp, Homo sapiens
attccaattagtttt

SEQ ID NO: 226232 - DNA, 15 bp, Homo sapiens
tattccaattagttt

SEQ ID NO: 226233 - DNA, 15 bp, Homo sapiens
atattccaattagtt

SEQ ID NO: 226234 - DNA, 15 bp, Homo sapiens
catattccaattagt

SEQ ID NO: 226235 - DNA, 15 bp, Homo sapiens
acatattccaattag

SEQ ID NO: 226236 - DNA, 15 bp, Homo sapiens
tacatattccaatta

SEQ ID NO: 226237 - DNA, 15 bp, Homo sapiens
atacatattccaatt

SEQ ID NO: 226238 - DNA, 15 bp, Homo sapiens
catacatattccaat

SEQ ID NO: 226239 - DNA, 15 bp, Homo sapiens
ccatacatattccaa

SEQ ID NO: 226240 - DNA, 15 bp, Homo sapiens
tccatacatattcca

SEQ ID NO: 226241 - DNA, 15 bp, Homo sapiens
ttccatacatattcc

SEQ ID NO: 226242 - DNA, 15 bp, Homo sapiens
attccatacatattc

SEQ ID NO: 226243 - DNA, 15 bp, Homo sapiens
tattccatacatatt

SEQ ID NO: 226244 - DNA, 15 bp, Homo sapiens
ttattccatacatat

SEQ ID NO: 226245 - DNA, 15 bp, Homo sapiens
attattccatacata

SEQ ID NO: 226246 - DNA, 15 bp, Homo sapiens
gattattccatacat

SEQ ID NO: 226247 - DNA, 15 bp, Homo sapiens
tgattattccataca

SEQ ID NO: 226248 - DNA, 15 bp, Homo sapiens
atgattattccatac

SEQ ID NO: 226249 - DNA, 15 bp, Homo sapiens
gatgattattccata

SEQ ID NO: 226250 - DNA, 15 bp, Homo sapiens
ggatgattattccat

SEQ ID NO: 226251 - DNA, 15 bp, Homo sapiens
aggatgattattcca

SEQ ID NO: 226252 - DNA, 15 bp, Homo sapiens
caggatgattattcc

SEQ ID NO: 226253 - DNA, 15 bp, Homo sapiens
tcaggatgattattc

SEQ ID NO: 226254 - DNA, 15 bp, Homo sapiens
ttcaggatgattatt

SEQ ID NO: 226255 - DNA, 15 bp, Homo sapiens
tttcaggatgattat

SEQ ID NO: 226256 - DNA, 15 bp, Homo sapiens
atttcaggatgatta

SEQ ID NO: 226257 - DNA, 15 bp, Homo sapiens
tatttcaggatgatt

SEQ ID NO: 226258 - DNA, 15 bp, Homo sapiens
ttatttcaggatgat

SEQ ID NO: 226259 - DNA, 15 bp, Homo sapiens
tttatttcaggatga

SEQ ID NO: 226260 - DNA, 15 bp, Homo sapiens
ttttatttcaggatg

SEQ ID NO: 226261 - DNA, 15 bp, Homo sapiens
attttatttcaggat

SEQ ID NO: 226262 - DNA, 15 bp, Homo sapiens
aattttatttcagga

SEQ ID NO: 226263 - DNA, 15 bp, Homo sapiens
caattttatttcagg

SEQ ID NO: 226264 - DNA, 15 bp, Homo sapiens
ccaattttatttcag

SEQ ID NO: 226265 - DNA, 15 bp, Homo sapiens
accaattttatttca

SEQ ID NO: 226266 - DNA, 15 bp, Homo sapiens
caccaattttatttc

SEQ ID NO: 226267 - DNA, 15 bp, Homo sapiens
tcaccaattttattt

SEQ ID NO: 226268 - DNA, 15 bp, Homo sapiens
ttcaccaattttatt

SEQ ID NO: 226269 - DNA, 15 bp, Homo sapiens
tttcaccaattttat

SEQ ID NO: 226270 - DNA, 15 bp, Homo sapiens
ttttcaccaatttta

SEQ ID NO: 226271 - DNA, 15 bp, Homo sapiens
cttttcaccaatttt

SEQ ID NO: 226272 - DNA, 15 bp, Homo sapiens
acttttcaccaattt

SEQ ID NO: 226273 - DNA, 15 bp, Homo sapiens
tacttttcaccaatt

SEQ ID NO: 226274 - DNA, 15 bp, Homo sapiens
atacttttcaccaat

SEQ ID NO: 226275 - DNA, 15 bp, Homo sapiens
aatacttttcaccaa

SEQ ID NO: 226276 - DNA, 15 bp, Homo sapiens
aaatacttttcacca

SEQ ID NO: 226277 - DNA, 15 bp, Homo sapiens
caaatacttttcacc

SEQ ID NO: 226278 - DNA, 15 bp, Homo sapiens
acaaatacttttcac

SEQ ID NO: 226279 - DNA, 15 bp, Homo sapiens
aacaaatacttttca

SEQ ID NO: 226280 - DNA, 15 bp, Homo sapiens
taacaaatacttttc

SEQ ID NO: 226281 - DNA, 15 bp, Homo sapiens
ataacaaatactttt

SEQ ID NO: 226282 - DNA, 15 bp, Homo sapiens
aataacaaatacttt

SEQ ID NO: 226283 - DNA, 15 bp, Homo sapiens
caataacaaatactt

SEQ ID NO: 226284 - DNA, 15 bp, Homo sapiens
ccaataacaaatact

SEQ ID NO: 226285 - DNA, 15 bp, Homo sapiens
cccaataacaaatac

SEQ ID NO: 226286 - DNA, 15 bp, Homo sapiens
gcccaataacaaata

SEQ ID NO: 226287 - DNA, 15 bp, Homo sapiens
tgcccaataacaaat

SEQ ID NO: 226288 - DNA, 15 bp, Homo sapiens
atgcccaataacaaa

SEQ ID NO: 226289 - DNA, 15 bp, Homo sapiens
gatgcccaataacaa

SEQ ID NO: 226290 - DNA, 15 bp, Homo sapiens
agatgcccaataaca

SEQ ID NO: 226291 - DNA, 15 bp, Homo sapiens
tagatgcccaataac

SEQ ID NO: 226292 - DNA, 15 bp, Homo sapiens
gtagatgcccaataa

SEQ ID NO: 226293 - DNA, 15 bp, Homo sapiens
tgtagatgcccaata

SEQ ID NO: 226294 - DNA, 15 bp, Homo sapiens
ttgtagatgcccaat

SEQ ID NO: 226295 - DNA, 15 bp, Homo sapiens
attgtagatgcccaa

SEQ ID NO: 226296 - DNA, 15 bp, Homo sapiens
cattgtagatgccca

SEQ ID NO: 226297 - DNA, 15 bp, Homo sapiens
acattgtagatgccc

SEQ ID NO: 226298 - DNA, 15 bp, Homo sapiens
cacattgtagatgcc

SEQ ID NO: 226299 - DNA, 15 bp, Homo sapiens
gcacattgtagatgc

SEQ ID NO: 226300 - DNA, 15 bp, Homo sapiens
tgcacattgtagatg

SEQ ID NO: 226301 - DNA, 15 bp, Homo sapiens
ttgcacattgtagat

SEQ ID NO: 226302 - DNA, 15 bp, Homo sapiens
tttgcacattgtaga

SEQ ID NO: 226303 - DNA, 15 bp, Homo sapiens
gtttgcacattgtag

SEQ ID NO: 226304 - DNA, 15 bp, Homo sapiens
ggtttgcacattgta

SEQ ID NO: 226305 - DNA, 15 bp, Homo sapiens
aggtttgcacattgt

SEQ ID NO: 226306 - DNA, 15 bp, Homo sapiens
gaggtttgcacattg

SEQ ID NO: 226307 - DNA, 15 bp, Homo sapiens
agaggtttgcacatt

SEQ ID NO: 226308 - DNA, 15 bp, Homo sapiens
cagaggtttgcacat

SEQ ID NO: 226309 - DNA, 15 bp, Homo sapiens
acagaggtttgcaca

SEQ ID NO: 226310 - DNA, 15 bp, Homo sapiens
tacagaggtttgcac

SEQ ID NO: 226311 - DNA, 15 bp, Homo sapiens
gtacagaggtttgca

SEQ ID NO: 226312 - DNA, 15 bp, Homo sapiens
agtacagaggtttgc

SEQ ID NO: 226313 - DNA, 15 bp, Homo sapiens
tagtacagaggtttg

SEQ ID NO: 226314 - DNA, 15 bp, Homo sapiens
ctagtacagaggttt

SEQ ID NO: 226315 - DNA, 15 bp, Homo sapiens
cctagtacagaggtt

SEQ ID NO: 226316 - DNA, 15 bp, Homo sapiens
gcctagtacagaggt

SEQ ID NO: 226317 - DNA, 15 bp, Homo sapiens
tgcctagtacagagg

SEQ ID NO: 226318 - DNA, 15 bp, Homo sapiens
atgcctagtacagag

SEQ ID NO: 226319 - DNA, 15 bp, Homo sapiens
catgcctagtacaga

SEQ ID NO: 226320 - DNA, 15 bp, Homo sapiens
tcatgcctagtacag

SEQ ID NO: 226321 - DNA, 15 bp, Homo sapiens
ttcatgcctagtaca

SEQ ID NO: 226322 - DNA, 15 bp, Homo sapiens
gttcatgcctagtac

SEQ ID NO: 226323 - DNA, 15 bp, Homo sapiens
tgttcatgcctagta

SEQ ID NO: 226324 - DNA, 15 bp, Homo sapiens
ttgttcatgcctagt

SEQ ID NO: 226325 - DNA, 15 bp, Homo sapiens
cttgttcatgcctag

SEQ ID NO: 226326 - DNA, 15 bp, Homo sapiens
tcttgttcatgccta

SEQ ID NO: 226327 - DNA, 15 bp, Homo sapiens
ctcttgttcatgcct

SEQ ID NO: 226328 - DNA, 15 bp, Homo sapiens
actcttgttcatgcc

SEQ ID NO: 226329 - DNA, 15 bp, Homo sapiens
aactcttgttcatgc

SEQ ID NO: 226330 - DNA, 15 bp, Homo sapiens
taactcttgttcatg

SEQ ID NO: 226331 - DNA, 15 bp, Homo sapiens
ataactcttgttcat

SEQ ID NO: 226332 - DNA, 15 bp, Homo sapiens
tataactcttgttca

SEQ ID NO: 226333 - DNA, 15 bp, Homo sapiens
ttataactcttgttc

SEQ ID NO: 226334 - DNA, 15 bp, Homo sapiens
cttataactcttgtt

SEQ ID NO: 226335 - DNA, 15 bp, Homo sapiens
gcttataactcttgt

SEQ ID NO: 226336 - DNA, 15 bp, Homo sapiens
tgcttataactcttg

SEQ ID NO: 226337 - DNA, 15 bp, Homo sapiens
atgcttataactctt

SEQ ID NO: 226338 - DNA, 15 bp, Homo sapiens
aatgcttataactct

SEQ ID NO: 226339 - DNA, 15 bp, Homo sapiens
caatgcttataactc

SEQ ID NO: 226340 - DNA, 15 bp, Homo sapiens
ccaatgcttataact

SEQ ID NO: 226341 - DNA, 15 bp, Homo sapiens
tccaatgcttataac

SEQ ID NO: 226342 - DNA, 15 bp, Homo sapiens
ctccaatgcttataa

SEQ ID NO: 226343 - DNA, 15 bp, Homo sapiens
tctccaatgcttata

SEQ ID NO: 226344 - DNA, 15 bp, Homo sapiens
ctctccaatgcttat

SEQ ID NO: 226345 - DNA, 15 bp, Homo sapiens
cctctccaatgctta

SEQ ID NO: 226346 - DNA, 15 bp, Homo sapiens
gcctctccaatgctt

SEQ ID NO: 226347 - DNA, 15 bp, Homo sapiens
agcctctccaatgct

SEQ ID NO: 226348 - DNA, 15 bp, Homo sapiens
tagcctctccaatgc

SEQ ID NO: 226349 - DNA, 15 bp, Homo sapiens
ttagcctctccaatg

SEQ ID NO: 226350 - DNA, 15 bp, Homo sapiens
tttagcctctccaat

SEQ ID NO: 226351 - DNA, 15 bp, Homo sapiens
ttttagcctctccaa

SEQ ID NO: 226352 - DNA, 15 bp, Homo sapiens
attttagcctctcca

SEQ ID NO: 226353 - DNA, 15 bp, Homo sapiens
tattttagcctctcc

SEQ ID NO: 226354 - DNA, 15 bp, Homo sapiens
atattttagcctctc

SEQ ID NO: 226355 - DNA, 15 bp, Homo sapiens
tatattttagcctct

SEQ ID NO: 226356 - DNA, 15 bp, Homo sapiens
ctatattttagcctc

SEQ ID NO: 226357 - DNA, 15 bp, Homo sapiens
actatattttagcct

SEQ ID NO: 226358 - DNA, 15 bp, Homo sapiens
gactatattttagcc

SEQ ID NO: 226359 - DNA, 15 bp, Homo sapiens
ggactatattttagc

SEQ ID NO: 226360 - DNA, 15 bp, Homo sapiens
aggactatattttag

SEQ ID NO: 226361 - DNA, 15 bp, Homo sapiens
aaggactatatttta

SEQ ID NO: 226362 - DNA, 15 bp, Homo sapiens
taaggactatatttt

SEQ ID NO: 226363 - DNA, 15 bp, Homo sapiens
ttaaggactatattt

SEQ ID NO: 226364 - DNA, 15 bp, Homo sapiens
cttaaggactatatt

SEQ ID NO: 226365 - DNA, 15 bp, Homo sapiens
ccttaaggactatat

SEQ ID NO: 226366 - DNA, 15 bp, Homo sapiens
gccttaaggactata

SEQ ID NO: 226367 - DNA, 15 bp, Homo sapiens
agccttaaggactat

SEQ ID NO: 226368 - DNA, 15 bp, Homo sapiens
cagccttaaggacta

SEQ ID NO: 226369 - DNA, 15 bp, Homo sapiens
ccagccttaaggact

SEQ ID NO: 226370 - DNA, 15 bp, Homo sapiens
cccagccttaaggac

SEQ ID NO: 226371 - DNA, 15 bp, Homo sapiens
gcccagccttaagga

SEQ ID NO: 226372 - DNA, 15 bp, Homo sapiens
tgcccagccttaagg

SEQ ID NO: 226373 - DNA, 15 bp, Homo sapiens
gtgcccagccttaag

SEQ ID NO: 226374 - DNA, 15 bp, Homo sapiens
tgtgcccagccttaa

SEQ ID NO: 226375 - DNA, 15 bp, Homo sapiens
ctgtgcccagcctta

SEQ ID NO: 226376 - DNA, 15 bp, Homo sapiens
actgtgcccagcctt

SEQ ID NO: 226377 - DNA, 15 bp, Homo sapiens
cactgtgcccagcct

SEQ ID NO: 226378 - DNA, 15 bp, Homo sapiens
ccactgtgcccagcc

SEQ ID NO: 226379 - DNA, 15 bp, Homo sapiens
gccactgtgcccagc

SEQ ID NO: 226380 - DNA, 15 bp, Homo sapiens
agccactgtgcccag

SEQ ID NO: 226381 - DNA, 15 bp, Homo sapiens
gagccactgtgccca

SEQ ID NO: 226382 - DNA, 15 bp, Homo sapiens
tgagccactgtgccc

SEQ ID NO: 226383 - DNA, 15 bp, Homo sapiens
atgagccactgtgcc

SEQ ID NO: 226384 - DNA, 15 bp, Homo sapiens
catgagccactgtgc

SEQ ID NO: 226385 - DNA, 15 bp, Homo sapiens
gcatgagccactgtg

SEQ ID NO: 226386 - DNA, 15 bp, Homo sapiens
ggcatgagccactgt

SEQ ID NO: 226387 - DNA, 15 bp, Homo sapiens
aggcatgagccactg

SEQ ID NO: 226388 - DNA, 15 bp, Homo sapiens
caggcatgagccact

SEQ ID NO: 226389 - DNA, 15 bp, Homo sapiens
ggattacaggcatga

SEQ ID NO: 226390 - DNA, 15 bp, Homo sapiens
aggattacaggcatg

SEQ ID NO: 226391 - DNA, 15 bp, Homo sapiens
taggattacaggcat

SEQ ID NO: 226392 - DNA, 15 bp, Homo sapiens
ctaggattacaggca

SEQ ID NO: 226393 - DNA, 15 bp, Homo sapiens
gctaggattacaggc

SEQ ID NO: 226394 - DNA, 15 bp, Homo sapiens
tgctaggattacagg

SEQ ID NO: 226395 - DNA, 15 bp, Homo sapiens
gtgctaggattacag

SEQ ID NO: 226396 - DNA, 15 bp, Homo sapiens
agtgctaggattaca

SEQ ID NO: 226397 - DNA, 15 bp, Homo sapiens
aagtgctaggattac

SEQ ID NO: 226398 - DNA, 15 bp, Homo sapiens
aaagtgctaggatta

SEQ ID NO: 226399 - DNA, 15 bp, Homo sapiens
caaagtgctaggatt

SEQ ID NO: 226400 - DNA, 15 bp, Homo sapiens
ccaaagtgctaggat

SEQ ID NO: 226401 - DNA, 15 bp, Homo sapiens
cccaaagtgctagga

SEQ ID NO: 226402 - DNA, 15 bp, Homo sapiens
tcccaaagtgctagg

SEQ ID NO: 226403 - DNA, 15 bp, Homo sapiens
ctcccaaagtgctag

SEQ ID NO: 226404 - DNA, 15 bp, Homo sapiens
cctcccaaagtgcta

SEQ ID NO: 226405 - DNA, 15 bp, Homo sapiens
gcctcccaaagtgct

SEQ ID NO: 226406 - DNA, 15 bp, Homo sapiens
ggcctcccaaagtgc

SEQ ID NO: 226407 - DNA, 15 bp, Homo sapiens
tggcctcccaaagtg

SEQ ID NO: 226408 - DNA, 15 bp, Homo sapiens
ttggcctcccaaagt

SEQ ID NO: 226409 - DNA, 15 bp, Homo sapiens
cttggcctcccaaag

SEQ ID NO: 226410 - DNA, 15 bp, Homo sapiens
ccttggcctcccaaa

SEQ ID NO: 226411 - DNA, 15 bp, Homo sapiens
gccttggcctcccaa

SEQ ID NO: 226412 - DNA, 15 bp, Homo sapiens
cgccttggcctccca

SEQ ID NO: 226413 - DNA, 15 bp, Homo sapiens
ccgccttggcctccc

SEQ ID NO: 226414 - DNA, 15 bp, Homo sapiens
cccgccttggcctcc

SEQ ID NO: 226415 - DNA, 15 bp, Homo sapiens
gcccgccttggcctc

SEQ ID NO: 226416 - DNA, 15 bp, Homo sapiens
tgcccgccttggcct

SEQ ID NO: 226417 - DNA, 15 bp, Homo sapiens
ctgcccgccttggcc

SEQ ID NO: 226418 - DNA, 15 bp, Homo sapiens
tctgcccgccttggc

SEQ ID NO: 226419 - DNA, 15 bp, Homo sapiens
atctgcccgccttgg

SEQ ID NO: 226420 - DNA, 15 bp, Homo sapiens
aatctgcccgccttg

SEQ ID NO: 226421 - DNA, 15 bp, Homo sapiens
caatctgcccgcctt

SEQ ID NO: 226422 - DNA, 15 bp, Homo sapiens
gcaatctgcccgcct

SEQ ID NO: 226423 - DNA, 15 bp, Homo sapiens
ggcaatctgcccgcc

SEQ ID NO: 226424 - DNA, 15 bp, Homo sapiens
aggcaatctgcccgc

SEQ ID NO: 226425 - DNA, 15 bp, Homo sapiens
caggcaatctgcccg

SEQ ID NO: 226426 - DNA, 15 bp, Homo sapiens
tcaggcaatctgccc

SEQ ID NO: 226427 - DNA, 15 bp, Homo sapiens
ctcaggcaatctgcc

SEQ ID NO: 226428 - DNA, 15 bp, Homo sapiens
gctcaggcaatctgc

SEQ ID NO: 226429 - DNA, 15 bp, Homo sapiens
agctcaggcaatctg

SEQ ID NO: 226430 - DNA, 15 bp, Homo sapiens
gagctcaggcaatct

SEQ ID NO: 226431 - DNA, 15 bp, Homo sapiens
tgagctcaggcaatc

SEQ ID NO: 226432 - DNA, 15 bp, Homo sapiens
ctgagctcaggcaat

SEQ ID NO: 226433 - DNA, 15 bp, Homo sapiens
cctgagctcaggcaa

SEQ ID NO: 226434 - DNA, 15 bp, Homo sapiens
tcctgagctcaggca

SEQ ID NO: 226435 - DNA, 15 bp, Homo sapiens
ctcctgagctcaggc

SEQ ID NO: 226436 - DNA, 15 bp, Homo sapiens
actcctgagctcagg

SEQ ID NO: 226437 - DNA, 15 bp, Homo sapiens
aactcctgagctcag

SEQ ID NO: 226438 - DNA, 15 bp, Homo sapiens
gaactcctgagctca

SEQ ID NO: 226439 - DNA, 15 bp, Homo sapiens
tgaactcctgagctc

SEQ ID NO: 226440 - DNA, 15 bp, Homo sapiens
ttgaactcctgagct

SEQ ID NO: 226441 - DNA, 15 bp, Homo sapiens
cttgaactcctgagc

SEQ ID NO: 226442 - DNA, 15 bp, Homo sapiens
tcttgaactcctgag

SEQ ID NO: 226443 - DNA, 15 bp, Homo sapiens
gtcttgaactcctga

SEQ ID NO: 226444 - DNA, 15 bp, Homo sapiens
ggtcttgaactcctg

SEQ ID NO: 226445 - DNA, 15 bp, Homo sapiens
tggtcttgaactcct

SEQ ID NO: 226446 - DNA, 15 bp, Homo sapiens
ctggtcttgaactcc

SEQ ID NO: 226447 - DNA, 15 bp, Homo sapiens
gctggtcttgaactc

SEQ ID NO: 226448 - DNA, 15 bp, Homo sapiens
ggctggtcttgaact

SEQ ID NO: 226449 - DNA, 15 bp, Homo sapiens
aggctggtcttgaac

SEQ ID NO: 226450 - DNA, 15 bp, Homo sapiens
caggctggtcttgaa

SEQ ID NO: 226451 - DNA, 15 bp, Homo sapiens
ccaggctggtcttga

SEQ ID NO: 226452 - DNA, 15 bp, Homo sapiens
cccaggctggtcttg

SEQ ID NO: 226453 - DNA, 15 bp, Homo sapiens
gcccaggctggtctt

SEQ ID NO: 226454 - DNA, 15 bp, Homo sapiens
tgcccaggctggtct

SEQ ID NO: 226455 - DNA, 15 bp, Homo sapiens
ttgcccaggctggtc

SEQ ID NO: 226456 - DNA, 15 bp, Homo sapiens
gttgcccaggctggt

SEQ ID NO: 226457 - DNA, 15 bp, Homo sapiens
atgttgcccaggctg

SEQ ID NO: 226458 - DNA, 15 bp, Homo sapiens
tatgttgcccaggct

SEQ ID NO: 226459 - DNA, 15 bp, Homo sapiens
ctatgttgcccaggc

SEQ ID NO: 226460 - DNA, 15 bp, Homo sapiens
gctatgttgcccagg

SEQ ID NO: 226461 - DNA, 15 bp, Homo sapiens
cgctatgttgcccag

SEQ ID NO: 226462 - DNA, 15 bp, Homo sapiens
tcgctatgttgccca

SEQ ID NO: 226463 - DNA, 15 bp, Homo sapiens
ttcgctatgttgccc

SEQ ID NO: 226464 - DNA, 15 bp, Homo sapiens
tttcgctatgttgcc

SEQ ID NO: 226465 - DNA, 15 bp, Homo sapiens
gtttcgctatgttgc

SEQ ID NO: 226466 - DNA, 15 bp, Homo sapiens
ggtttcgctatgttg

SEQ ID NO: 226467 - DNA, 15 bp, Homo sapiens
gggtttcgctatgtt

SEQ ID NO: 226468 - DNA, 15 bp, Homo sapiens
ggggtttcgctatgt

SEQ ID NO: 226469 - DNA, 15 bp, Homo sapiens
tggggtttcgctatg

SEQ ID NO: 226470 - DNA, 15 bp, Homo sapiens
atggggtttcgctat

SEQ ID NO: 226471 - DNA, 15 bp, Homo sapiens
gatggggtttcgcta

SEQ ID NO: 226472 - DNA, 15 bp, Homo sapiens
agatggggtttcgct

SEQ ID NO: 226473 - DNA, 15 bp, Homo sapiens
gagatggggtttcgc

SEQ ID NO: 226474 - DNA, 15 bp, Homo sapiens
agagatggggtttcg

SEQ ID NO: 226475 - DNA, 15 bp, Homo sapiens
tagagatggggtttc

SEQ ID NO: 226476 - DNA, 15 bp, Homo sapiens
gtagagatggggttt

SEQ ID NO: 226477 - DNA, 15 bp, Homo sapiens
agtagagatggggtt

SEQ ID NO: 226478 - DNA, 15 bp, Homo sapiens
tagtagagatggggt

SEQ ID NO: 226479 - DNA, 15 bp, Homo sapiens
ttagtagagatgggg

SEQ ID NO: 226480 - DNA, 15 bp, Homo sapiens
tttagtagagatggg

SEQ ID NO: 226481 - DNA, 15 bp, Homo sapiens
ttttagtagagatgg

SEQ ID NO: 226482 - DNA, 15 bp, Homo sapiens
tttttagtagagatg

SEQ ID NO: 226483 - DNA, 15 bp, Homo sapiens
atttttagtagagat

SEQ ID NO: 226484 - DNA, 15 bp, Homo sapiens
tatttttagtagaga

SEQ ID NO: 226485 - DNA, 15 bp, Homo sapiens
gtatttttagtagag

SEQ ID NO: 226486 - DNA, 15 bp, Homo sapiens
tgtatttttagtaga

SEQ ID NO: 226487 - DNA, 15 bp, Homo sapiens
ttgtatttttagtag

SEQ ID NO: 226488 - DNA, 15 bp, Homo sapiens
tttgtatttttagta

SEQ ID NO: 226489 - DNA, 15 bp, Homo sapiens
ttttgtatttttagt

SEQ ID NO: 226490 - DNA, 15 bp, Homo sapiens
tttttgtatttttag

SEQ ID NO: 226491 - DNA, 15 bp, Homo sapiens
ttttttgtattttta

SEQ ID NO: 226492 - DNA, 15 bp, Homo sapiens
tttttttgtattttt

SEQ ID NO: 226493 - DNA, 15 bp, Homo sapiens
atttttttgtatttt

SEQ ID NO: 226494 - DNA, 15 bp, Homo sapiens
aatttttttgtattt

SEQ ID NO: 226495 - DNA, 15 bp, Homo sapiens
taatttttttgtatt

SEQ ID NO: 226496 - DNA, 15 bp, Homo sapiens
gtaatttttttgtat

SEQ ID NO: 226497 - DNA, 15 bp, Homo sapiens
ggtaatttttttgta

SEQ ID NO: 226498 - DNA, 15 bp, Homo sapiens
aggtaatttttttgt

SEQ ID NO: 226499 - DNA, 15 bp, Homo sapiens
caggtaatttttttg

SEQ ID NO: 226500 - DNA, 15 bp, Homo sapiens
ccaggtaattttttt

SEQ ID NO: 226501 - DNA, 15 bp, Homo sapiens
cccaggtaatttttt

SEQ ID NO: 226502 - DNA, 15 bp, Homo sapiens
gcccaggtaattttt

SEQ ID NO: 226503 - DNA, 15 bp, Homo sapiens
tgcccaggtaatttt

SEQ ID NO: 226504 - DNA, 15 bp, Homo sapiens
atgcccaggtaattt

SEQ ID NO: 226505 - DNA, 15 bp, Homo sapiens
catgcccaggtaatt

SEQ ID NO: 226506 - DNA, 15 bp, Homo sapiens
ccatgcccaggtaat

SEQ ID NO: 226507 - DNA, 15 bp, Homo sapiens
accatgcccaggtaa

SEQ ID NO: 226508 - DNA, 15 bp, Homo sapiens
caccatgcccaggta

SEQ ID NO: 226509 - DNA, 15 bp, Homo sapiens
ccaccatgcccaggt

SEQ ID NO: 226510 - DNA, 15 bp, Homo sapiens
gccaccatgcccagg

SEQ ID NO: 226511 - DNA, 15 bp, Homo sapiens
tgccaccatgcccag

SEQ ID NO: 226512 - DNA, 15 bp, Homo sapiens
gtgccaccatgccca

SEQ ID NO: 226513 - DNA, 15 bp, Homo sapiens
cgtgccaccatgccc

SEQ ID NO: 226514 - DNA, 15 bp, Homo sapiens
gcgtgccaccatgcc

SEQ ID NO: 226515 - DNA, 15 bp, Homo sapiens
tgcgtgccaccatgc

SEQ ID NO: 226516 - DNA, 15 bp, Homo sapiens
gtgcgtgccaccatg

SEQ ID NO: 226517 - DNA, 15 bp, Homo sapiens
ggtgcgtgccaccat

SEQ ID NO: 226518 - DNA, 15 bp, Homo sapiens
aggtgcgtgccacca

SEQ ID NO: 226519 - DNA, 15 bp, Homo sapiens
caggtgcgtgccacc

SEQ ID NO: 226520 - DNA, 15 bp, Homo sapiens
acaggtgcgtgccac

SEQ ID NO: 226521 - DNA, 15 bp, Homo sapiens
tacaggtgcgtgcca

SEQ ID NO: 226522 - DNA, 15 bp, Homo sapiens
ttacaggtgcgtgcc

SEQ ID NO: 226523 - DNA, 15 bp, Homo sapiens
attacaggtgcgtgc

SEQ ID NO: 226524 - DNA, 15 bp, Homo sapiens
gattacaggtgcgtg

SEQ ID NO: 226525 - DNA, 15 bp, Homo sapiens
ggattacaggtgcgt

SEQ ID NO: 226526 - DNA, 15 bp, Homo sapiens
gggattacaggtgcg

SEQ ID NO: 226527 - DNA, 15 bp, Homo sapiens
tgggattacaggtgc

SEQ ID NO: 226528 - DNA, 15 bp, Homo sapiens
ctgggattacaggtg

SEQ ID NO: 226529 - DNA, 15 bp, Homo sapiens
gctgggattacaggt

SEQ ID NO: 226530 - DNA, 15 bp, Homo sapiens
agctgggattacagg

SEQ ID NO: 226531 - DNA, 15 bp, Homo sapiens
tagctgggattacag

SEQ ID NO: 226532 - DNA, 15 bp, Homo sapiens
gtagctgggattaca

SEQ ID NO: 226533 - DNA, 15 bp, Homo sapiens
agtagctgggattac

SEQ ID NO: 226534 - DNA, 15 bp, Homo sapiens
gagtagctgggatta

SEQ ID NO: 226535 - DNA, 15 bp, Homo sapiens
tgagtagctgggatt

SEQ ID NO: 226536 - DNA, 15 bp, Homo sapiens
ctgagtagctgggat

SEQ ID NO: 226537 - DNA, 15 bp, Homo sapiens
cctgagtagctggga

SEQ ID NO: 226538 - DNA, 15 bp, Homo sapiens
tcctgagtagctggg

SEQ ID NO: 226539 - DNA, 15 bp, Homo sapiens
ctcctgagtagctgg

SEQ ID NO: 226540 - DNA, 15 bp, Homo sapiens
cctcctgagtagctg

SEQ ID NO: 226541 - DNA, 15 bp, Homo sapiens
gcctcctgagtagct

SEQ ID NO: 226542 - DNA, 15 bp, Homo sapiens
agcctcctgagtagc

SEQ ID NO: 226543 - DNA, 15 bp, Homo sapiens
cagcctcctgagtag

SEQ ID NO: 226544 - DNA, 15 bp, Homo sapiens
tcagcctcctgagta

SEQ ID NO: 226545 - DNA, 15 bp, Homo sapiens
ctcagcctcctgagt

SEQ ID NO: 226546 - DNA, 15 bp, Homo sapiens
cctcagcctcctgag

SEQ ID NO: 226547 - DNA, 15 bp, Homo sapiens
gcctcagcctcctga

SEQ ID NO: 226548 - DNA, 15 bp, Homo sapiens
tgcctcagcctcctg

SEQ ID NO: 226549 - DNA, 15 bp, Homo sapiens
atgcctcagcctcct

SEQ ID NO: 226550 - DNA, 15 bp, Homo sapiens
catgcctcagcctcc

SEQ ID NO: 226551 - DNA, 15 bp, Homo sapiens
tcatgcctcagcctc

SEQ ID NO: 226552 - DNA, 15 bp, Homo sapiens
ctcatgcctcagcct

SEQ ID NO: 226553 - DNA, 15 bp, Homo sapiens
tctcatgcctcagcc

SEQ ID NO: 226554 - DNA, 15 bp, Homo sapiens
ttctcatgcctcagc

SEQ ID NO: 226555 - DNA, 15 bp, Homo sapiens
attctcatgcctcag

SEQ ID NO: 226556 - DNA, 15 bp, Homo sapiens
aattctcatgcctca

SEQ ID NO: 226557 - DNA, 15 bp, Homo sapiens
gaattctcatgcctc

SEQ ID NO: 226558 - DNA, 15 bp, Homo sapiens
ggaattctcatgcct

SEQ ID NO: 226559 - DNA, 15 bp, Homo sapiens
aggaattctcatgcc

SEQ ID NO: 226560 - DNA, 15 bp, Homo sapiens
aaggaattctcatgc

SEQ ID NO: 226561 - DNA, 15 bp, Homo sapiens
caaggaattctcatg

SEQ ID NO: 226562 - DNA, 15 bp, Homo sapiens
tcaaggaattctcat

SEQ ID NO: 226563 - DNA, 15 bp, Homo sapiens
ttcaaggaattctca

SEQ ID NO: 226564 - DNA, 15 bp, Homo sapiens
gttcaaggaattctc

SEQ ID NO: 226565 - DNA, 15 bp, Homo sapiens
ggttcaaggaattct

SEQ ID NO: 226566 - DNA, 15 bp, Homo sapiens
aggttcaaggaattc

SEQ ID NO: 226567 - DNA, 15 bp, Homo sapiens
caggttcaaggaatt

SEQ ID NO: 226568 - DNA, 15 bp, Homo sapiens
ccaggttcaaggaat

SEQ ID NO: 226569 - DNA, 15 bp, Homo sapiens
cccaggttcaaggaa

SEQ ID NO: 226570 - DNA, 15 bp, Homo sapiens
tcccaggttcaagga

SEQ ID NO: 226571 - DNA, 15 bp, Homo sapiens
ctcccaggttcaagg

SEQ ID NO: 226572 - DNA, 15 bp, Homo sapiens
cctcccaggttcaag

SEQ ID NO: 226573 - DNA, 15 bp, Homo sapiens
gcctcccaggttcaa

SEQ ID NO: 226574 - DNA, 15 bp, Homo sapiens
tgcctcccaggttca

SEQ ID NO: 226575 - DNA, 15 bp, Homo sapiens
ctgcctcccaggttc

SEQ ID NO: 226576 - DNA, 15 bp, Homo sapiens
tctgcctcccaggtt

SEQ ID NO: 226577 - DNA, 15 bp, Homo sapiens
ctctgcctcccaggt

SEQ ID NO: 226578 - DNA, 15 bp, Homo sapiens
cctctgcctcccagg

SEQ ID NO: 226579 - DNA, 15 bp, Homo sapiens
acctctgcctcccag

SEQ ID NO: 226580 - DNA, 15 bp, Homo sapiens
aacctctgcctccca

SEQ ID NO: 226581 - DNA, 15 bp, Homo sapiens
gctgcaacctctgcc

SEQ ID NO: 226582 - DNA, 15 bp, Homo sapiens
cgctgcaacctctgc

SEQ ID NO: 226583 - DNA, 15 bp, Homo sapiens
tcgctgcaacctctg

SEQ ID NO: 226584 - DNA, 15 bp, Homo sapiens
ctcgctgcaacctct

SEQ ID NO: 226585 - DNA, 15 bp, Homo sapiens
gctcgctgcaacctc

SEQ ID NO: 226586 - DNA, 15 bp, Homo sapiens
ggctcgctgcaacct

SEQ ID NO: 226587 - DNA, 15 bp, Homo sapiens
cggctcgctgcaacc

SEQ ID NO: 226588 - DNA, 15 bp, Homo sapiens
tcggctcgctgcaac

SEQ ID NO: 226589 - DNA, 15 bp, Homo sapiens
ctcggctcgctgcaa

SEQ ID NO: 226590 - DNA, 15 bp, Homo sapiens
tctcggctcgctgca

SEQ ID NO: 226591 - DNA, 15 bp, Homo sapiens
atctcggctcgctgc

SEQ ID NO: 226592 - DNA, 15 bp, Homo sapiens
gatctcggctcgctg

SEQ ID NO: 226593 - DNA, 15 bp, Homo sapiens
ggatctcggctcgct

SEQ ID NO: 226594 - DNA, 15 bp, Homo sapiens
aggatctcggctcgc

SEQ ID NO: 226595 - DNA, 15 bp, Homo sapiens
caggatctcggctcg

SEQ ID NO: 226596 - DNA, 15 bp, Homo sapiens
gcaggatctcggctc

SEQ ID NO: 226597 - DNA, 15 bp, Homo sapiens
ggcaggatctcggct

SEQ ID NO: 226598 - DNA, 15 bp, Homo sapiens
cggcaggatctcggc

SEQ ID NO: 226599 - DNA, 15 bp, Homo sapiens
gcggcaggatctcgg

SEQ ID NO: 226600 - DNA, 15 bp, Homo sapiens
agcggcaggatctcg

SEQ ID NO: 226601 - DNA, 15 bp, Homo sapiens
cagcggcaggatctc

SEQ ID NO: 226602 - DNA, 15 bp, Homo sapiens
gcagcggcaggatct

SEQ ID NO: 226603 - DNA, 15 bp, Homo sapiens
tgcagcggcaggatc

SEQ ID NO: 226604 - DNA, 15 bp, Homo sapiens
atgcagcggcaggat

SEQ ID NO: 226605 - DNA, 15 bp, Homo sapiens
gatgcagcggcagga

SEQ ID NO: 226606 - DNA, 15 bp, Homo sapiens
ggatgcagcggcagg

SEQ ID NO: 226607 - DNA, 15 bp, Homo sapiens
gggatgcagcggcag

SEQ ID NO: 226608 - DNA, 15 bp, Homo sapiens
tgggatgcagcggca

SEQ ID NO: 226609 - DNA, 15 bp, Homo sapiens
ctgggatgcagcggc

SEQ ID NO: 226610 - DNA, 15 bp, Homo sapiens
gctgggatgcagcgg

SEQ ID NO: 226611 - DNA, 15 bp, Homo sapiens
agctgggatgcagcg

SEQ ID NO: 226612 - DNA, 15 bp, Homo sapiens
aagctgggatgcagc

SEQ ID NO: 226613 - DNA, 15 bp, Homo sapiens
caagctgggatgcag

SEQ ID NO: 226614 - DNA, 15 bp, Homo sapiens
ccaagctgggatgca

SEQ ID NO: 226615 - DNA, 15 bp, Homo sapiens
cccaagctgggatgc

SEQ ID NO: 226616 - DNA, 15 bp, Homo sapiens
acccaagctgggatg

SEQ ID NO: 226617 - DNA, 15 bp, Homo sapiens
cacccaagctgggat

SEQ ID NO: 226618 - DNA, 15 bp, Homo sapiens
tcacccaagctggga

SEQ ID NO: 226619 - DNA, 15 bp, Homo sapiens
gtcacccaagctggg

SEQ ID NO: 226620 - DNA, 15 bp, Homo sapiens
tgtcacccaagctgg

SEQ ID NO: 226621 - DNA, 15 bp, Homo sapiens
ctgtcacccaagctg

SEQ ID NO: 226622 - DNA, 15 bp, Homo sapiens
tctgtcacccaagct

SEQ ID NO: 226623 - DNA, 15 bp, Homo sapiens
ctctgtcacccaagc

SEQ ID NO: 226624 - DNA, 15 bp, Homo sapiens
actctgtcacccaag

SEQ ID NO: 226625 - DNA, 15 bp, Homo sapiens
cactctgtcacccaa

SEQ ID NO: 226626 - DNA, 15 bp, Homo sapiens
tcactctgtcaccca

SEQ ID NO: 226627 - DNA, 15 bp, Homo sapiens
ctcactctgtcaccc

SEQ ID NO: 226628 - DNA, 15 bp, Homo sapiens
agtctcactctgtca

SEQ ID NO: 226629 - DNA, 15 bp, Homo sapiens
gagtctcactctgtc

SEQ ID NO: 226630 - DNA, 15 bp, Homo sapiens
agagtctcactctgt

SEQ ID NO: 226631 - DNA, 15 bp, Homo sapiens
cagagtctcactctg

SEQ ID NO: 226632 - DNA, 15 bp, Homo sapiens
acagagtctcactct

SEQ ID NO: 226633 - DNA, 15 bp, Homo sapiens
gacagagtctcactc

SEQ ID NO: 226634 - DNA, 15 bp, Homo sapiens
agacagagtctcact

SEQ ID NO: 226635 - DNA, 15 bp, Homo sapiens
gagacagagtctcac

SEQ ID NO: 226636 - DNA, 15 bp, Homo sapiens
tgagacagagtctca

SEQ ID NO: 226637 - DNA, 15 bp, Homo sapiens
ttgagacagagtctc

SEQ ID NO: 226638 - DNA, 15 bp, Homo sapiens
tttgagacagagtct

SEQ ID NO: 226639 - DNA, 15 bp, Homo sapiens
ttttgagacagagtc

SEQ ID NO: 226640 - DNA, 15 bp, Homo sapiens
tttttgagacagagt

SEQ ID NO: 226641 - DNA, 15 bp, Homo sapiens
ttttttgagacagag

SEQ ID NO: 226642 - DNA, 15 bp, Homo sapiens
tttttttgagacaga

SEQ ID NO: 226643 - DNA, 15 bp, Homo sapiens
atttttttttgagac

SEQ ID NO: 226644 - DNA, 15 bp, Homo sapiens
aatttttttttgaga

SEQ ID NO: 226645 - DNA, 15 bp, Homo sapiens
taatttttttttgag

SEQ ID NO: 226646 - DNA, 15 bp, Homo sapiens
ttaatttttttttga

SEQ ID NO: 226647 - DNA, 15 bp, Homo sapiens
tttaatttttttttg

SEQ ID NO: 226648 - DNA, 15 bp, Homo sapiens
atttaattttttttt

SEQ ID NO: 226649 - DNA, 15 bp, Homo sapiens
tatttaatttttttt

SEQ ID NO: 226650 - DNA, 15 bp, Homo sapiens
ttatttaattttttt

SEQ ID NO: 226651 - DNA, 15 bp, Homo sapiens
attatttaatttttt

SEQ ID NO: 226652 - DNA, 15 bp, Homo sapiens
tattatttaattttt

SEQ ID NO: 226653 - DNA, 15 bp, Homo sapiens
ttattatttaatttt

SEQ ID NO: 226654 - DNA, 15 bp, Homo sapiens
tttattatttaattt

SEQ ID NO: 226655 - DNA, 15 bp, Homo sapiens
atttattatttaatt

SEQ ID NO: 226656 - DNA, 15 bp, Homo sapiens
tatttattatttaat

SEQ ID NO: 226657 - DNA, 15 bp, Homo sapiens
ttatttattatttaa

SEQ ID NO: 226658 - DNA, 15 bp, Homo sapiens
tttatttattattta

SEQ ID NO: 226659 - DNA, 15 bp, Homo sapiens
atttatttattattt

SEQ ID NO: 226660 - DNA, 15 bp, Homo sapiens
tatttatttattatt

SEQ ID NO: 226661 - DNA, 15 bp, Homo sapiens
ctatttatttattat

SEQ ID NO: 226662 - DNA, 15 bp, Homo sapiens
actatttatttatta

SEQ ID NO: 226663 - DNA, 15 bp, Homo sapiens
tactatttatttatt

SEQ ID NO: 226664 - DNA, 15 bp, Homo sapiens
ttactatttatttat

SEQ ID NO: 226665 - DNA, 15 bp, Homo sapiens
tttactatttattta

SEQ ID NO: 226666 - DNA, 15 bp, Homo sapiens
ttttactatttattt

SEQ ID NO: 226667 - DNA, 15 bp, Homo sapiens
attttactatttatt

SEQ ID NO: 226668 - DNA, 15 bp, Homo sapiens
tattttactatttat

SEQ ID NO: 226669 - DNA, 15 bp, Homo sapiens
gtattttactattta

SEQ ID NO: 226670 - DNA, 15 bp, Homo sapiens
tgtattttactattt

SEQ ID NO: 226671 - DNA, 15 bp, Homo sapiens
ctgtattttactatt

SEQ ID NO: 226672 - DNA, 15 bp, Homo sapiens
actgtattttactat

SEQ ID NO: 226673 - DNA, 15 bp, Homo sapiens
gactgtattttacta

SEQ ID NO: 226674 - DNA, 15 bp, Homo sapiens
tgactgtattttact

SEQ ID NO: 226675 - DNA, 15 bp, Homo sapiens
atgactgtattttac

SEQ ID NO: 226676 - DNA, 15 bp, Homo sapiens
aatgactgtatttta

SEQ ID NO: 226677 - DNA, 15 bp, Homo sapiens
taatgactgtatttt

SEQ ID NO: 226678 - DNA, 15 bp, Homo sapiens
ttaatgactgtattt

SEQ ID NO: 226679 - DNA, 15 bp, Homo sapiens
cttaatgactgtatt

SEQ ID NO: 226680 - DNA, 15 bp, Homo sapiens
tcttaatgactgtat

SEQ ID NO: 226681 - DNA, 15 bp, Homo sapiens
ctcttaatgactgta

SEQ ID NO: 226682 - DNA, 15 bp, Homo sapiens
actcttaatgactgt

SEQ ID NO: 226683 - DNA, 15 bp, Homo sapiens
tactcttaatgactg

SEQ ID NO: 226684 - DNA, 15 bp, Homo sapiens
gtactcttaatgact

SEQ ID NO: 226685 - DNA, 15 bp, Homo sapiens
tgtactcttaatgac

SEQ ID NO: 226686 - DNA, 15 bp, Homo sapiens
ttgtactcttaatga

SEQ ID NO: 226687 - DNA, 15 bp, Homo sapiens
tttgtactcttaatg

SEQ ID NO: 226688 - DNA, 15 bp, Homo sapiens
ttttgtactcttaat

SEQ ID NO: 226689 - DNA, 15 bp, Homo sapiens
attttgtactcttaa

SEQ ID NO: 226690 - DNA, 15 bp, Homo sapiens
cattttgtactctta

SEQ ID NO: 226691 - DNA, 15 bp, Homo sapiens
acattttgtactctt

SEQ ID NO: 226692 - DNA, 15 bp, Homo sapiens
tacattttgtactct

SEQ ID NO: 226693 - DNA, 15 bp, Homo sapiens
ctacattttgtactc

SEQ ID NO: 226694 - DNA, 15 bp, Homo sapiens
tctacattttgtact

SEQ ID NO: 226695 - DNA, 15 bp, Homo sapiens
atctacattttgtac

SEQ ID NO: 226696 - DNA, 15 bp, Homo sapiens
aatctacattttgta

SEQ ID NO: 226697 - DNA, 15 bp, Homo sapiens
gaatctacattttgt

SEQ ID NO: 226698 - DNA, 15 bp, Homo sapiens
tgaatctacattttg

SEQ ID NO: 226699 - DNA, 15 bp, Homo sapiens
ctgaatctacatttt

SEQ ID NO: 226700 - DNA, 15 bp, Homo sapiens
tctgaatctacattt

SEQ ID NO: 226701 - DNA, 15 bp, Homo sapiens
gtctgaatctacatt

SEQ ID NO: 226702 - DNA, 15 bp, Homo sapiens
agtctgaatctacat

SEQ ID NO: 226703 - DNA, 15 bp, Homo sapiens
tagtctgaatctaca

SEQ ID NO: 226704 - DNA, 15 bp, Homo sapiens
gtagtctgaatctac

SEQ ID NO: 226705 - DNA, 15 bp, Homo sapiens
ggtagtctgaatcta

SEQ ID NO: 226706 - DNA, 15 bp, Homo sapiens
aggtagtctgaatct

SEQ ID NO: 226707 - DNA, 15 bp, Homo sapiens
caggtagtctgaatc

SEQ ID NO: 226708 - DNA, 15 bp, Homo sapiens
ccaggtagtctgaat

SEQ ID NO: 226709 - DNA, 15 bp, Homo sapiens
cccaggtagtctgaa

SEQ ID NO: 226710 - DNA, 15 bp, Homo sapiens
acccaggtagtctga

SEQ ID NO: 226711 - DNA, 15 bp, Homo sapiens
aacccaggtagtctg

SEQ ID NO: 226712 - DNA, 15 bp, Homo sapiens
gaacccaggtagtct

SEQ ID NO: 226713 - DNA, 15 bp, Homo sapiens
tgaacccaggtagtc

SEQ ID NO: 226714 - DNA, 15 bp, Homo sapiens
ttgaacccaggtagt

SEQ ID NO: 226715 - DNA, 15 bp, Homo sapiens
tttgaacccaggtag

SEQ ID NO: 226716 - DNA, 15 bp, Homo sapiens
atttgaacccaggta

SEQ ID NO: 226717 - DNA, 15 bp, Homo sapiens
gatttgaacccaggt

SEQ ID NO: 226718 - DNA, 15 bp, Homo sapiens
agatttgaacccagg

SEQ ID NO: 226719 - DNA, 15 bp, Homo sapiens
aagatttgaacccag

SEQ ID NO: 226720 - DNA, 15 bp, Homo sapiens
caagatttgaaccca

SEQ ID NO: 226721 - DNA, 15 bp, Homo sapiens
ccaagatttgaaccc

SEQ ID NO: 226722 - DNA, 15 bp, Homo sapiens
gccaagatttgaacc

SEQ ID NO: 226723 - DNA, 15 bp, Homo sapiens
agccaagatttgaac

SEQ ID NO: 226724 - DNA, 15 bp, Homo sapiens
gagccaagatttgaa

SEQ ID NO: 226725 - DNA, 15 bp, Homo sapiens
agagccaagatttga

SEQ ID NO: 226726 - DNA, 15 bp, Homo sapiens
aagagccaagatttg

SEQ ID NO: 226727 - DNA, 15 bp, Homo sapiens
taagagccaagattt

SEQ ID NO: 226728 - DNA, 15 bp, Homo sapiens
gtaagagccaagatt

SEQ ID NO: 226729 - DNA, 15 bp, Homo sapiens
agtaagagccaagat

SEQ ID NO: 226730 - DNA, 15 bp, Homo sapiens
aagtaagagccaaga

SEQ ID NO: 226731 - DNA, 15 bp, Homo sapiens
caagtaagagccaag

SEQ ID NO: 226732 - DNA, 15 bp, Homo sapiens
gcaagtaagagccaa

SEQ ID NO: 226733 - DNA, 15 bp, Homo sapiens
tgcaagtaagagcca

SEQ ID NO: 226734 - DNA, 15 bp, Homo sapiens
atgcaagtaagagcc

SEQ ID NO: 226735 - DNA, 15 bp, Homo sapiens
aatgcaagtaagagc

SEQ ID NO: 226736 - DNA, 15 bp, Homo sapiens
caatgcaagtaagag

SEQ ID NO: 226737 - DNA, 15 bp, Homo sapiens
acaatgcaagtaaga

SEQ ID NO: 226738 - DNA, 15 bp, Homo sapiens
cacaatgcaagtaag

SEQ ID NO: 226739 - DNA, 15 bp, Homo sapiens
ccacaatgcaagtaa

SEQ ID NO: 226740 - DNA, 15 bp, Homo sapiens
gccacaatgcaagta

SEQ ID NO: 226741 - DNA, 15 bp, Homo sapiens
agccacaatgcaagt

SEQ ID NO: 226742 - DNA, 15 bp, Homo sapiens
aagccacaatgcaag

SEQ ID NO: 226743 - DNA, 15 bp, Homo sapiens
aaagccacaatgcaa

SEQ ID NO: 226744 - DNA, 15 bp, Homo sapiens
caaagccacaatgca

SEQ ID NO: 226745 - DNA, 15 bp, Homo sapiens
ccaaagccacaatgc

SEQ ID NO: 226746 - DNA, 15 bp, Homo sapiens
cccaaagccacaatg

SEQ ID NO: 226747 - DNA, 15 bp, Homo sapiens
gcccaaagccacaat

SEQ ID NO: 226748 - DNA, 15 bp, Homo sapiens
tgcccaaagccacaa

SEQ ID NO: 226749 - DNA, 15 bp, Homo sapiens
ctgcccaaagccaca

SEQ ID NO: 226750 - DNA, 15 bp, Homo sapiens
tctgcccaaagccac

SEQ ID NO: 226751 - DNA, 15 bp, Homo sapiens
atctgcccaaagcca

SEQ ID NO: 226752 - DNA, 15 bp, Homo sapiens
gatctgcccaaagcc

SEQ ID NO: 226753 - DNA, 15 bp, Homo sapiens
tgatctgcccaaagc

SEQ ID NO: 226754 - DNA, 15 bp, Homo sapiens
atgatctgcccaaag

SEQ ID NO: 226755 - DNA, 15 bp, Homo sapiens
catgatctgcccaaa

SEQ ID NO: 226756 - DNA, 15 bp, Homo sapiens
acatgatctgcccaa

SEQ ID NO: 226757 - DNA, 15 bp, Homo sapiens
tacatgatctgccca

SEQ ID NO: 226758 - DNA, 15 bp, Homo sapiens
ttacatgatctgccc

SEQ ID NO: 226759 - DNA, 15 bp, Homo sapiens
gttacatgatctgcc

SEQ ID NO: 226760 - DNA, 15 bp, Homo sapiens
agttacatgatctgc

SEQ ID NO: 226761 - DNA, 15 bp, Homo sapiens
aagttacatgatctg

SEQ ID NO: 226762 - DNA, 15 bp, Homo sapiens
taagttacatgatct

SEQ ID NO: 226763 - DNA, 15 bp, Homo sapiens
ataagttacatgatc

SEQ ID NO: 226764 - DNA, 15 bp, Homo sapiens
cataagttacatgat

SEQ ID NO: 226765 - DNA, 15 bp, Homo sapiens
acataagttacatga

SEQ ID NO: 226766 - DNA, 15 bp, Homo sapiens
cacataagttacatg

SEQ ID NO: 226767 - DNA, 15 bp, Homo sapiens
acacataagttacat

SEQ ID NO: 226768 - DNA, 15 bp, Homo sapiens
cacacataagttaca

SEQ ID NO: 226769 - DNA, 15 bp, Homo sapiens
gcacacataagttac

SEQ ID NO: 226770 - DNA, 15 bp, Homo sapiens
ggcacacataagtta

SEQ ID NO: 226771 - DNA, 15 bp, Homo sapiens
aggcacacataagtt

SEQ ID NO: 226772 - DNA, 15 bp, Homo sapiens
gaggcacacataagt

SEQ ID NO: 226773 - DNA, 15 bp, Homo sapiens
tgaggcacacataag

SEQ ID NO: 226774 - DNA, 15 bp, Homo sapiens
ctgaggcacacataa

SEQ ID NO: 226775 - DNA, 15 bp, Homo sapiens
actgaggcacacata

SEQ ID NO: 226776 - DNA, 15 bp, Homo sapiens
aactgaggcacacat

SEQ ID NO: 226777 - DNA, 15 bp, Homo sapiens
aaactgaggcacaca

SEQ ID NO: 226778 - DNA, 15 bp, Homo sapiens
gaaactgaggcacac

SEQ ID NO: 226779 - DNA, 15 bp, Homo sapiens
ggaaactgaggcaca

SEQ ID NO: 226780 - DNA, 15 bp, Homo sapiens
aggaaactgaggcac

SEQ ID NO: 226781 - DNA, 15 bp, Homo sapiens
gaggaaactgaggca

SEQ ID NO: 226782 - DNA, 15 bp, Homo sapiens
tgaggaaactgaggc

SEQ ID NO: 226783 - DNA, 15 bp, Homo sapiens
atgaggaaactgagg

SEQ ID NO: 226784 - DNA, 15 bp, Homo sapiens
gatgaggaaactgag

SEQ ID NO: 226785 - DNA, 15 bp, Homo sapiens
agatgaggaaactga

SEQ ID NO: 226786 - DNA, 15 bp, Homo sapiens
cagatgaggaaactg

SEQ ID NO: 226787 - DNA, 15 bp, Homo sapiens
acagatgaggaaact

SEQ ID NO: 226788 - DNA, 15 bp, Homo sapiens
aacagatgaggaaac

SEQ ID NO: 226789 - DNA, 15 bp, Homo sapiens
taacagatgaggaaa

SEQ ID NO: 226790 - DNA, 15 bp, Homo sapiens
ttaacagatgaggaa

SEQ ID NO: 226791 - DNA, 15 bp, Homo sapiens
tttaacagatgagga

SEQ ID NO: 226792 - DNA, 15 bp, Homo sapiens
atttaacagatgagg

SEQ ID NO: 226793 - DNA, 15 bp, Homo sapiens
tatttaacagatgag

SEQ ID NO: 226794 - DNA, 15 bp, Homo sapiens
ctatttaacagatga

SEQ ID NO: 226795 - DNA, 15 bp, Homo sapiens
cctatttaacagatg

SEQ ID NO: 226796 - DNA, 15 bp, Homo sapiens
ccctatttaacagat

SEQ ID NO: 226797 - DNA, 15 bp, Homo sapiens
cccctatttaacaga

SEQ ID NO: 226798 - DNA, 15 bp, Homo sapiens
gcccctatttaacag

SEQ ID NO: 226799 - DNA, 15 bp, Homo sapiens
tgcccctatttaaca

SEQ ID NO: 226800 - DNA, 15 bp, Homo sapiens
ttgcccctatttaac

SEQ ID NO: 226801 - DNA, 15 bp, Homo sapiens
gttgcccctatttaa

SEQ ID NO: 226802 - DNA, 15 bp, Homo sapiens
tgttgcccctattta

SEQ ID NO: 226803 - DNA, 15 bp, Homo sapiens
ttgttgcccctattt

SEQ ID NO: 226804 - DNA, 15 bp, Homo sapiens
gttgttgcccctatt

SEQ ID NO: 226805 - DNA, 15 bp, Homo sapiens
agttgttgcccctat

SEQ ID NO: 226806 - DNA, 15 bp, Homo sapiens
cagttgttgccccta

SEQ ID NO: 226807 - DNA, 15 bp, Homo sapiens
tcagttgttgcccct

SEQ ID NO: 226808 - DNA, 15 bp, Homo sapiens
ttcagttgttgcccc

SEQ ID NO: 226809 - DNA, 15 bp, Homo sapiens
attcagttgttgccc

SEQ ID NO: 226810 - DNA, 15 bp, Homo sapiens
gattcagttgttgcc

SEQ ID NO: 226811 - DNA, 15 bp, Homo sapiens
agattcagttgttgc

SEQ ID NO: 226812 - DNA, 15 bp, Homo sapiens
tagattcagttgttg

SEQ ID NO: 226813 - DNA, 15 bp, Homo sapiens
gtagattcagttgtt

SEQ ID NO: 226814 - DNA, 15 bp, Homo sapiens
ggtagattcagttgt

SEQ ID NO: 226815 - DNA, 15 bp, Homo sapiens
aggtagattcagttg

SEQ ID NO: 226816 - DNA, 15 bp, Homo sapiens
aaggtagattcagtt

SEQ ID NO: 226817 - DNA, 15 bp, Homo sapiens
taaggtagattcagt

SEQ ID NO: 226818 - DNA, 15 bp, Homo sapiens
ataaggtagattcag

SEQ ID NO: 226819 - DNA, 15 bp, Homo sapiens
aataaggtagattca

SEQ ID NO: 226820 - DNA, 15 bp, Homo sapiens
gaataaggtagattc

SEQ ID NO: 226821 - DNA, 15 bp, Homo sapiens
tgaataaggtagatt

SEQ ID NO: 226822 - DNA, 15 bp, Homo sapiens
ctgaataaggtagat

SEQ ID NO: 226823 - DNA, 15 bp, Homo sapiens
actgaataaggtaga

SEQ ID NO: 226824 - DNA, 15 bp, Homo sapiens
aactgaataaggtag

SEQ ID NO: 226825 - DNA, 15 bp, Homo sapiens
caactgaataaggta

SEQ ID NO: 226826 - DNA, 15 bp, Homo sapiens
acaactgaataaggt

SEQ ID NO: 226827 - DNA, 15 bp, Homo sapiens
aacaactgaataagg

SEQ ID NO: 226828 - DNA, 15 bp, Homo sapiens
caacaactgaataag

SEQ ID NO: 226829 - DNA, 15 bp, Homo sapiens
acaacaactgaataa

SEQ ID NO: 226830 - DNA, 15 bp, Homo sapiens
cacaacaactgaata

SEQ ID NO: 226831 - DNA, 15 bp, Homo sapiens
tcacaacaactgaat

SEQ ID NO: 226832 - DNA, 15 bp, Homo sapiens
ctcacaacaactgaa

SEQ ID NO: 226833 - DNA, 15 bp, Homo sapiens
cctcacaacaactga

SEQ ID NO: 226834 - DNA, 15 bp, Homo sapiens
ccctcacaacaactg

SEQ ID NO: 226835 - DNA, 15 bp, Homo sapiens
accctcacaacaact

SEQ ID NO: 226836 - DNA, 15 bp, Homo sapiens
aaccctcacaacaac

SEQ ID NO: 226837 - DNA, 15 bp, Homo sapiens
aaaccctcacaacaa

SEQ ID NO: 226838 - DNA, 15 bp, Homo sapiens
taaaccctcacaaca

SEQ ID NO: 226839 - DNA, 15 bp, Homo sapiens
ataaaccctcacaac

SEQ ID NO: 226840 - DNA, 15 bp, Homo sapiens
aataaaccctcacaa

SEQ ID NO: 226841 - DNA, 15 bp, Homo sapiens
caataaaccctcaca

SEQ ID NO: 226842 - DNA, 15 bp, Homo sapiens
tcaataaaccctcac

SEQ ID NO: 226843 - DNA, 15 bp, Homo sapiens
ctcaataaaccctca

SEQ ID NO: 226844 - DNA, 15 bp, Homo sapiens
tctcaataaaccctc

SEQ ID NO: 226845 - DNA, 15 bp, Homo sapiens
atctcaataaaccct

SEQ ID NO: 226846 - DNA, 15 bp, Homo sapiens
aatctcaataaaccc

SEQ ID NO: 226847 - DNA, 15 bp, Homo sapiens
caatctcaataaacc

SEQ ID NO: 226848 - DNA, 15 bp, Homo sapiens
acaatctcaataaac

SEQ ID NO: 226849 - DNA, 15 bp, Homo sapiens
cacaatctcaataaa

SEQ ID NO: 226850 - DNA, 15 bp, Homo sapiens
acacaatctcaataa

SEQ ID NO: 226851 - DNA, 15 bp, Homo sapiens
cacacaatctcaata

SEQ ID NO: 226852 - DNA, 15 bp, Homo sapiens
acacacaatctcaat

SEQ ID NO: 226853 - DNA, 15 bp, Homo sapiens
cacacacaatctcaa

SEQ ID NO: 226854 - DNA, 15 bp, Homo sapiens
acacacacaatctca

SEQ ID NO: 226855 - DNA, 15 bp, Homo sapiens
cacacacacaatctc

SEQ ID NO: 226856 - DNA, 15 bp, Homo sapiens
acacacacacaatct

SEQ ID NO: 226857 - DNA, 15 bp, Homo sapiens
tacacacacacaatc

SEQ ID NO: 226858 - DNA, 15 bp, Homo sapiens
atacacacacacaat

SEQ ID NO: 226859 - DNA, 15 bp, Homo sapiens
catacacacacacaa

SEQ ID NO: 226860 - DNA, 15 bp, Homo sapiens
acatacacacacaca

SEQ ID NO: 226861 - DNA, 15 bp, Homo sapiens
cacatacacacacac

SEQ ID NO: 226862 - DNA, 15 bp, Homo sapiens
acacatacacacaca

SEQ ID NO: 226863 - DNA, 15 bp, Homo sapiens
cacacatacacacac

SEQ ID NO: 226864 - DNA, 15 bp, Homo sapiens
acacacatacacaca

SEQ ID NO: 226865 - DNA, 15 bp, Homo sapiens
cacacacatacacac

SEQ ID NO: 226866 - DNA, 15 bp, Homo sapiens
tcacacacatacaca

SEQ ID NO: 226867 - DNA, 15 bp, Homo sapiens
ctcacacacatacac

SEQ ID NO: 226868 - DNA, 15 bp, Homo sapiens
actcacacacataca

SEQ ID NO: 226869 - DNA, 15 bp, Homo sapiens
cactcacacacatac

SEQ ID NO: 226870 - DNA, 15 bp, Homo sapiens
acactcacacacata

SEQ ID NO: 226871 - DNA, 15 bp, Homo sapiens
tacactcacacacat

SEQ ID NO: 226872 - DNA, 15 bp, Homo sapiens
ctacactcacacaca

SEQ ID NO: 226873 - DNA, 15 bp, Homo sapiens
actacactcacacac

SEQ ID NO: 226874 - DNA, 15 bp, Homo sapiens
cactacactcacaca

SEQ ID NO: 226875 - DNA, 15 bp, Homo sapiens
acactacactcacac

SEQ ID NO: 226876 - DNA, 15 bp, Homo sapiens
cacactacactcaca

SEQ ID NO: 226877 - DNA, 15 bp, Homo sapiens
acacactacactcac

SEQ ID NO: 226878 - DNA, 15 bp, Homo sapiens
cacacactacactca

SEQ ID NO: 226879 - DNA, 15 bp, Homo sapiens
gcacacactacactc

SEQ ID NO: 226880 - DNA, 15 bp, Homo sapiens
tgcacacactacact

SEQ ID NO: 226881 - DNA, 15 bp, Homo sapiens
atgcacacactacac

SEQ ID NO: 226882 - DNA, 15 bp, Homo sapiens
catgcacacactaca

SEQ ID NO: 226883 - DNA, 15 bp, Homo sapiens
acatgcacacactac

SEQ ID NO: 226884 - DNA, 15 bp, Homo sapiens
cacatgcacacacta

SEQ ID NO: 226885 - DNA, 15 bp, Homo sapiens
acacatgcacacact

SEQ ID NO: 226886 - DNA, 15 bp, Homo sapiens
cacacatgcacacac

SEQ ID NO: 226887 - DNA, 15 bp, Homo sapiens
acacacatgcacaca

SEQ ID NO: 226888 - DNA, 15 bp, Homo sapiens
cacacacatgcacac

SEQ ID NO: 226889 - DNA, 15 bp, Homo sapiens
acacacacatgcaca

SEQ ID NO: 226890 - DNA, 15 bp, Homo sapiens
gacacacacatgcac

SEQ ID NO: 226891 - DNA, 15 bp, Homo sapiens
agacacacacatgca

SEQ ID NO: 226892 - DNA, 15 bp, Homo sapiens
cagacacacacatgc

SEQ ID NO: 226893 - DNA, 15 bp, Homo sapiens
acagacacacacatg

SEQ ID NO: 226894 - DNA, 15 bp, Homo sapiens
cacagacacacacat

SEQ ID NO: 226895 - DNA, 15 bp, Homo sapiens
gcacagacacacaca

SEQ ID NO: 226896 - DNA, 15 bp, Homo sapiens
tgcacagacacacac

SEQ ID NO: 226897 - DNA, 15 bp, Homo sapiens
ttgcacagacacaca

SEQ ID NO: 226898 - DNA, 15 bp, Homo sapiens
cttgcacagacacac

SEQ ID NO: 226899 - DNA, 15 bp, Homo sapiens
ccttgcacagacaca

SEQ ID NO: 226900 - DNA, 15 bp, Homo sapiens
tccttgcacagacac

SEQ ID NO: 226901 - DNA, 15 bp, Homo sapiens
ctccttgcacagaca

SEQ ID NO: 226902 - DNA, 15 bp, Homo sapiens
actccttgcacagac

SEQ ID NO: 226903 - DNA, 15 bp, Homo sapiens
cactccttgcacaga

SEQ ID NO: 226904 - DNA, 15 bp, Homo sapiens
ccactccttgcacag

SEQ ID NO: 226905 - DNA, 15 bp, Homo sapiens
cccactccttgcaca

SEQ ID NO: 226906 - DNA, 15 bp, Homo sapiens
tcccactccttgcac

SEQ ID NO: 226907 - DNA, 15 bp, Homo sapiens
ctcccactccttgca

SEQ ID NO: 226908 - DNA, 15 bp, Homo sapiens
cctcccactccttgc

SEQ ID NO: 226909 - DNA, 15 bp, Homo sapiens
acctcccactccttg

SEQ ID NO: 226910 - DNA, 15 bp, Homo sapiens
cacctcccactcctt

SEQ ID NO: 226911 - DNA, 15 bp, Homo sapiens
acacctcccactcct

SEQ ID NO: 226912 - DNA, 15 bp, Homo sapiens
tacacctcccactcc

SEQ ID NO: 226913 - DNA, 15 bp, Homo sapiens
atacacctcccactc

SEQ ID NO: 226914 - DNA, 15 bp, Homo sapiens
tatacacctcccact

SEQ ID NO: 226915 - DNA, 15 bp, Homo sapiens
atatacacctcccac

SEQ ID NO: 226916 - DNA, 15 bp, Homo sapiens
aatatacacctccca

SEQ ID NO: 226917 - DNA, 15 bp, Homo sapiens
gaatatacacctccc

SEQ ID NO: 226918 - DNA, 15 bp, Homo sapiens
tgaatatacacctcc

SEQ ID NO: 226919 - DNA, 15 bp, Homo sapiens
ctgaatatacacctc

SEQ ID NO: 226920 - DNA, 15 bp, Homo sapiens
tctgaatatacacct

SEQ ID NO: 226921 - DNA, 15 bp, Homo sapiens
ctctgaatatacacc

SEQ ID NO: 226922 - DNA, 15 bp, Homo sapiens
tctctgaatatacac

SEQ ID NO: 226923 - DNA, 15 bp, Homo sapiens
gtctctgaatataca

SEQ ID NO: 226924 - DNA, 15 bp, Homo sapiens
tgtctctgaatatac

SEQ ID NO: 226925 - DNA, 15 bp, Homo sapiens
gtgtctctgaatata

SEQ ID NO: 226926 - DNA, 15 bp, Homo sapiens
tgtgtctctgaatat

SEQ ID NO: 226927 - DNA, 15 bp, Homo sapiens
atgtgtctctgaata

SEQ ID NO: 226928 - DNA, 15 bp, Homo sapiens
tatgtgtctctgaat

SEQ ID NO: 226929 - DNA, 15 bp, Homo sapiens
atatgtgtctctgaa

SEQ ID NO: 226930 - DNA, 15 bp, Homo sapiens
aatatgtgtctctga

SEQ ID NO: 226931 - DNA, 15 bp, Homo sapiens
taatatgtgtctctg

SEQ ID NO: 226932 - DNA, 15 bp, Homo sapiens
gtaatatgtgtctct

SEQ ID NO: 226933 - DNA, 15 bp, Homo sapiens
tgtaatatgtgtctc

SEQ ID NO: 226934 - DNA, 15 bp, Homo sapiens
ctgtaatatgtgtct

SEQ ID NO: 226935 - DNA, 15 bp, Homo sapiens
gctgtaatatgtgtc

SEQ ID NO: 226936 - DNA, 15 bp, Homo sapiens
tgctgtaatatgtgt

SEQ ID NO: 226937 - DNA, 15 bp, Homo sapiens
gtgctgtaatatgtg

SEQ ID NO: 226938 - DNA, 15 bp, Homo sapiens
agtgctgtaatatgt

SEQ ID NO: 226939 - DNA, 15 bp, Homo sapiens
aagtgctgtaatatg

SEQ ID NO: 226940 - DNA, 15 bp, Homo sapiens
taagtgctgtaatat

SEQ ID NO: 226941 - DNA, 15 bp, Homo sapiens
ttaagtgctgtaata

SEQ ID NO: 226942 - DNA, 15 bp, Homo sapiens
tttaagtgctgtaat

SEQ ID NO: 226943 - DNA, 15 bp, Homo sapiens
ttttaagtgctgtaa

SEQ ID NO: 226944 - DNA, 15 bp, Homo sapiens
attttaagtgctgta

SEQ ID NO: 226945 - DNA, 15 bp, Homo sapiens
cattttaagtgctgt

SEQ ID NO: 226946 - DNA, 15 bp, Homo sapiens
ccattttaagtgctg

SEQ ID NO: 226947 - DNA, 15 bp, Homo sapiens
accattttaagtgct

SEQ ID NO: 226948 - DNA, 15 bp, Homo sapiens
taccattttaagtgc

SEQ ID NO: 226949 - DNA, 15 bp, Homo sapiens
ataccattttaagtg

SEQ ID NO: 226950 - DNA, 15 bp, Homo sapiens
gataccattttaagt

SEQ ID NO: 226951 - DNA, 15 bp, Homo sapiens
agataccattttaag

SEQ ID NO: 226952 - DNA, 15 bp, Homo sapiens
tagataccattttaa

SEQ ID NO: 226953 - DNA, 15 bp, Homo sapiens
ctagataccatttta

SEQ ID NO: 226954 - DNA, 15 bp, Homo sapiens
gctagataccatttt

SEQ ID NO: 226955 - DNA, 15 bp, Homo sapiens
tgctagataccattt

SEQ ID NO: 226956 - DNA, 15 bp, Homo sapiens
gtgctagataccatt

SEQ ID NO: 226957 - DNA, 15 bp, Homo sapiens
agtgctagataccat

SEQ ID NO: 226958 - DNA, 15 bp, Homo sapiens
aagtgctagatacca

SEQ ID NO: 226959 - DNA, 15 bp, Homo sapiens
taagtgctagatacc

SEQ ID NO: 226960 - DNA, 15 bp, Homo sapiens
ctaagtgctagatac

SEQ ID NO: 226961 - DNA, 15 bp, Homo sapiens
actaagtgctagata

SEQ ID NO: 226962 - DNA, 15 bp, Homo sapiens
tactaagtgctagat

SEQ ID NO: 226963 - DNA, 15 bp, Homo sapiens
ttactaagtgctaga

SEQ ID NO: 226964 - DNA, 15 bp, Homo sapiens
cttactaagtgctag

SEQ ID NO: 226965 - DNA, 15 bp, Homo sapiens
gcttactaagtgcta

SEQ ID NO: 226966 - DNA, 15 bp, Homo sapiens
tgcttactaagtgct

SEQ ID NO: 226967 - DNA, 15 bp, Homo sapiens
atgcttactaagtgc

SEQ ID NO: 226968 - DNA, 15 bp, Homo sapiens
aatgcttactaagtg

SEQ ID NO: 226969 - DNA, 15 bp, Homo sapiens
taatgcttactaagt

SEQ ID NO: 226970 - DNA, 15 bp, Homo sapiens
ataatgcttactaag

SEQ ID NO: 226971 - DNA, 15 bp, Homo sapiens
aataatgcttactaa

SEQ ID NO: 226972 - DNA, 15 bp, Homo sapiens
gaataatgcttacta

SEQ ID NO: 226973 - DNA, 15 bp, Homo sapiens
tgaataatgcttact

SEQ ID NO: 226974 - DNA, 15 bp, Homo sapiens
ttgaataatgcttac

SEQ ID NO: 226975 - DNA, 15 bp, Homo sapiens
cttgaataatgctta

SEQ ID NO: 226976 - DNA, 15 bp, Homo sapiens
acttgaataatgctt

SEQ ID NO: 226977 - DNA, 15 bp, Homo sapiens
aacttgaataatgct

SEQ ID NO: 226978 - DNA, 15 bp, Homo sapiens
aaacttgaataatgc

SEQ ID NO: 226979 - DNA, 15 bp, Homo sapiens
aaaacttgaataatg

SEQ ID NO: 226980 - DNA, 15 bp, Homo sapiens
taaaacttgaataat

SEQ ID NO: 226981 - DNA, 15 bp, Homo sapiens
ctaaaacttgaataa

SEQ ID NO: 226982 - DNA, 15 bp, Homo sapiens
actaaaacttgaata

SEQ ID NO: 226983 - DNA, 15 bp, Homo sapiens
aactaaaacttgaat

SEQ ID NO: 226984 - DNA, 15 bp, Homo sapiens
taactaaaacttgaa

SEQ ID NO: 226985 - DNA, 15 bp, Homo sapiens
ttaactaaaacttga

SEQ ID NO: 226986 - DNA, 15 bp, Homo sapiens
gttaactaaaacttg

SEQ ID NO: 226987 - DNA, 15 bp, Homo sapiens
tgttaactaaaactt

SEQ ID NO: 226988 - DNA, 15 bp, Homo sapiens
atgttaactaaaact

SEQ ID NO: 226989 - DNA, 15 bp, Homo sapiens
aatgttaactaaaac

SEQ ID NO: 226990 - DNA, 15 bp, Homo sapiens
taatgttaactaaaa

SEQ ID NO: 226991 - DNA, 15 bp, Homo sapiens
ataatgttaactaaa

SEQ ID NO: 226992 - DNA, 15 bp, Homo sapiens
aataatgttaactaa

SEQ ID NO: 226993 - DNA, 15 bp, Homo sapiens
aaataatgttaacta

SEQ ID NO: 226994 - DNA, 15 bp, Homo sapiens
aaaataatgttaact

SEQ ID NO: 226995 - DNA, 15 bp, Homo sapiens
taaaataatgttaac

SEQ ID NO: 226996 - DNA, 15 bp, Homo sapiens
gtaaaataatgttaa

SEQ ID NO: 226997 - DNA, 15 bp, Homo sapiens
agtaaaataatgtta

SEQ ID NO: 226998 - DNA, 15 bp, Homo sapiens
aagtaaaataatgtt

SEQ ID NO: 226999 - DNA, 15 bp, Homo sapiens
taagtaaaataatgt

SEQ ID NO: 227000 - DNA, 15 bp, Homo sapiens
gtaagtaaaataatg

SEQ ID NO: 227001 - DNA, 15 bp, Homo sapiens
ggtaagtaaaataat

SEQ ID NO: 227002 - DNA, 15 bp, Homo sapiens
aggtaagtaaaataa

SEQ ID NO: 227003 - DNA, 15 bp, Homo sapiens
gaggtaagtaaaata

SEQ ID NO: 227004 - DNA, 15 bp, Homo sapiens
agaggtaagtaaaat

SEQ ID NO: 227005 - DNA, 15 bp, Homo sapiens
cagaggtaagtaaaa

SEQ ID NO: 227006 - DNA, 15 bp, Homo sapiens
tcagaggtaagtaaa

SEQ ID NO: 227007 - DNA, 15 bp, Homo sapiens
ttcagaggtaagtaa

SEQ ID NO: 227008 - DNA, 15 bp, Homo sapiens
tttcagaggtaagta

SEQ ID NO: 227009 - DNA, 15 bp, Homo sapiens
ttttcagaggtaagt

SEQ ID NO: 227010 - DNA, 15 bp, Homo sapiens
attttcagaggtaag

SEQ ID NO: 227011 - DNA, 15 bp, Homo sapiens
aattttcagaggtaa

SEQ ID NO: 227012 - DNA, 15 bp, Homo sapiens
caattttcagaggta

SEQ ID NO: 227013 - DNA, 15 bp, Homo sapiens
ccaattttcagaggt

SEQ ID NO: 227014 - DNA, 15 bp, Homo sapiens
tccaattttcagagg

SEQ ID NO: 227015 - DNA, 15 bp, Homo sapiens
ctccaattttcagag

SEQ ID NO: 227016 - DNA, 15 bp, Homo sapiens
gctccaattttcaga

SEQ ID NO: 227017 - DNA, 15 bp, Homo sapiens
agctccaattttcag

SEQ ID NO: 227018 - DNA, 15 bp, Homo sapiens
tagctccaattttca

SEQ ID NO: 227019 - DNA, 15 bp, Homo sapiens
atagctccaattttc

SEQ ID NO: 227020 - DNA, 15 bp, Homo sapiens
catagctccaatttt

SEQ ID NO: 227021 - DNA, 15 bp, Homo sapiens
acatagctccaattt

SEQ ID NO: 227022 - DNA, 15 bp, Homo sapiens
cacatagctccaatt

SEQ ID NO: 227023 - DNA, 15 bp, Homo sapiens
tcacatagctccaat

SEQ ID NO: 227024 - DNA, 15 bp, Homo sapiens
ttcacatagctccaa

SEQ ID NO: 227025 - DNA, 15 bp, Homo sapiens
tttcacatagctcca

SEQ ID NO: 227026 - DNA, 15 bp, Homo sapiens
ttttcacatagctcc

SEQ ID NO: 227027 - DNA, 15 bp, Homo sapiens
tttttcacatagctc

SEQ ID NO: 227028 - DNA, 15 bp, Homo sapiens
ctttttcacatagct

SEQ ID NO: 227029 - DNA, 15 bp, Homo sapiens
tctttttcacatagc

SEQ ID NO: 227030 - DNA, 15 bp, Homo sapiens
ttctttttcacatag

SEQ ID NO: 227031 - DNA, 15 bp, Homo sapiens
cttctttttcacata

SEQ ID NO: 227032 - DNA, 15 bp, Homo sapiens
acttctttttcacat

SEQ ID NO: 227033 - DNA, 15 bp, Homo sapiens
aacttctttttcaca

SEQ ID NO: 227034 - DNA, 15 bp, Homo sapiens
caacttctttttcac

SEQ ID NO: 227035 - DNA, 15 bp, Homo sapiens
ccaacttctttttca

SEQ ID NO: 227036 - DNA, 15 bp, Homo sapiens
accaacttctttttc

SEQ ID NO: 227037 - DNA, 15 bp, Homo sapiens
gaccaacttcttttt

SEQ ID NO: 227038 - DNA, 15 bp, Homo sapiens
agaccaacttctttt

SEQ ID NO: 227039 - DNA, 15 bp, Homo sapiens
gagaccaacttcttt

SEQ ID NO: 227040 - DNA, 15 bp, Homo sapiens
ggagaccaacttctt

SEQ ID NO: 227041 - DNA, 15 bp, Homo sapiens
aggagaccaacttct

SEQ ID NO: 227042 - DNA, 15 bp, Homo sapiens
caggagaccaacttc

SEQ ID NO: 227043 - DNA, 15 bp, Homo sapiens
tcaggagaccaactt

SEQ ID NO: 227044 - DNA, 15 bp, Homo sapiens
ttcaggagaccaact

SEQ ID NO: 227045 - DNA, 15 bp, Homo sapiens
cttcaggagaccaac

SEQ ID NO: 227046 - DNA, 15 bp, Homo sapiens
acttcaggagaccaa

SEQ ID NO: 227047 - DNA, 15 bp, Homo sapiens
tacttcaggagacca

SEQ ID NO: 227048 - DNA, 15 bp, Homo sapiens
ctacttcaggagacc

SEQ ID NO: 227049 - DNA, 15 bp, Homo sapiens
tctacttcaggagac

SEQ ID NO: 227050 - DNA, 15 bp, Homo sapiens
ttctacttcaggaga

SEQ ID NO: 227051 - DNA, 15 bp, Homo sapiens
cttctacttcaggag

SEQ ID NO: 227052 - DNA, 15 bp, Homo sapiens
gcttctacttcagga

SEQ ID NO: 227053 - DNA, 15 bp, Homo sapiens
ggcttctacttcagg

SEQ ID NO: 227054 - DNA, 15 bp, Homo sapiens
tggcttctacttcag

SEQ ID NO: 227055 - DNA, 15 bp, Homo sapiens
ctggcttctacttca

SEQ ID NO: 227056 - DNA, 15 bp, Homo sapiens
actggcttctacttc

SEQ ID NO: 227057 - DNA, 15 bp, Homo sapiens
gactggcttctactt

SEQ ID NO: 227058 - DNA, 15 bp, Homo sapiens
agactggcttctact

SEQ ID NO: 227059 - DNA, 15 bp, Homo sapiens
aagactggcttctac

SEQ ID NO: 227060 - DNA, 15 bp, Homo sapiens
caagactggcttcta

SEQ ID NO: 227061 - DNA, 15 bp, Homo sapiens
acaagactggcttct

SEQ ID NO: 227062 - DNA, 15 bp, Homo sapiens
cacaagactggcttc

SEQ ID NO: 227063 - DNA, 15 bp, Homo sapiens
acacaagactggctt

SEQ ID NO: 227064 - DNA, 15 bp, Homo sapiens
gacacaagactggct

SEQ ID NO: 227065 - DNA, 15 bp, Homo sapiens
tgacacaagactggc

SEQ ID NO: 227066 - DNA, 15 bp, Homo sapiens
gtgacacaagactgg

SEQ ID NO: 227067 - DNA, 15 bp, Homo sapiens
ggtgacacaagactg

SEQ ID NO: 227068 - DNA, 15 bp, Homo sapiens
tggtgacacaagact

SEQ ID NO: 227069 - DNA, 15 bp, Homo sapiens
ttggtgacacaagac

SEQ ID NO: 227070 - DNA, 15 bp, Homo sapiens
tttggtgacacaaga

SEQ ID NO: 227071 - DNA, 15 bp, Homo sapiens
ttttggtgacacaag

SEQ ID NO: 227072 - DNA, 15 bp, Homo sapiens
tttttggtgacacaa

SEQ ID NO: 227073 - DNA, 15 bp, Homo sapiens
gtttttggtgacaca

SEQ ID NO: 227074 - DNA, 15 bp, Homo sapiens
agtttttggtgacac

SEQ ID NO: 227075 - DNA, 15 bp, Homo sapiens
aagtttttggtgaca

SEQ ID NO: 227076 - DNA, 15 bp, Homo sapiens
gaagtttttggtgac

SEQ ID NO: 227077 - DNA, 15 bp, Homo sapiens
tgaagtttttggtga

SEQ ID NO: 227078 - DNA, 15 bp, Homo sapiens
ttgaagtttttggtg

SEQ ID NO: 227079 - DNA, 15 bp, Homo sapiens
cttgaagtttttggt

SEQ ID NO: 227080 - DNA, 15 bp, Homo sapiens
gcttgaagtttttgg

SEQ ID NO: 227081 - DNA, 15 bp, Homo sapiens
ggcttgaagtttttg

SEQ ID NO: 227082 - DNA, 15 bp, Homo sapiens
gggcttgaagttttt

SEQ ID NO: 227083 - DNA, 15 bp, Homo sapiens
tgggcttgaagtttt

SEQ ID NO: 227084 - DNA, 15 bp, Homo sapiens
ttgggcttgaagttt

SEQ ID NO: 227085 - DNA, 15 bp, Homo sapiens
cttgggcttgaagtt

SEQ ID NO: 227086 - DNA, 15 bp, Homo sapiens
gcttgggcttgaagt

SEQ ID NO: 227087 - DNA, 15 bp, Homo sapiens
agcttgggcttgaag

SEQ ID NO: 227088 - DNA, 15 bp, Homo sapiens
aagcttgggcttgaa

SEQ ID NO: 227089 - DNA, 15 bp, Homo sapiens
caagcttgggcttga

SEQ ID NO: 227090 - DNA, 15 bp, Homo sapiens
gcaagcttgggcttg

SEQ ID NO: 227091 - DNA, 15 bp, Homo sapiens
ggcaagcttgggctt

SEQ ID NO: 227092 - DNA, 15 bp, Homo sapiens
tggcaagcttgggct

SEQ ID NO: 227093 - DNA, 15 bp, Homo sapiens
ttggcaagcttgggc

SEQ ID NO: 227094 - DNA, 15 bp, Homo sapiens
gttggcaagcttggg

SEQ ID NO: 227095 - DNA, 15 bp, Homo sapiens
cgttggcaagcttgg

SEQ ID NO: 227096 - DNA, 15 bp, Homo sapiens
gcgttggcaagcttg

SEQ ID NO: 227097 - DNA, 15 bp, Homo sapiens
agcgttggcaagctt

SEQ ID NO: 227098 - DNA, 15 bp, Homo sapiens
aagcgttggcaagct

SEQ ID NO: 227099 - DNA, 15 bp, Homo sapiens
aaagcgttggcaagc

SEQ ID NO: 227100 - DNA, 15 bp, Homo sapiens
aaaagcgttggcaag

SEQ ID NO: 227101 - DNA, 15 bp, Homo sapiens
gaaaagcgttggcaa

SEQ ID NO: 227102 - DNA, 15 bp, Homo sapiens
ggaaaagcgttggca

SEQ ID NO: 227103 - DNA, 15 bp, Homo sapiens
tggaaaagcgttggc

SEQ ID NO: 227104 - DNA, 15 bp, Homo sapiens
atggaaaagcgttgg

SEQ ID NO: 227105 - DNA, 15 bp, Homo sapiens
catggaaaagcgttg

SEQ ID NO: 227106 - DNA, 15 bp, Homo sapiens
tcatggaaaagcgtt

SEQ ID NO: 227107 - DNA, 15 bp, Homo sapiens
atcatggaaaagcgt

SEQ ID NO: 227108 - DNA, 15 bp, Homo sapiens
catcatggaaaagcg

SEQ ID NO: 227109 - DNA, 15 bp, Homo sapiens
acatcatggaaaagc

SEQ ID NO: 227110 - DNA, 15 bp, Homo sapiens
cacatcatggaaaag

SEQ ID NO: 227111 - DNA, 15 bp, Homo sapiens
ccacatcatggaaaa

SEQ ID NO: 227112 - DNA, 15 bp, Homo sapiens
accacatcatggaaa

SEQ ID NO: 227113 - DNA, 15 bp, Homo sapiens
taccacatcatggaa

SEQ ID NO: 227114 - DNA, 15 bp, Homo sapiens
ctaccacatcatgga

SEQ ID NO: 227115 - DNA, 15 bp, Homo sapiens
actaccacatcatgg

SEQ ID NO: 227116 - DNA, 15 bp, Homo sapiens
tactaccacatcatg

SEQ ID NO: 227117 - DNA, 15 bp, Homo sapiens
ctactaccacatcat

SEQ ID NO: 227118 - DNA, 15 bp, Homo sapiens
tctactaccacatca

SEQ ID NO: 227119 - DNA, 15 bp, Homo sapiens
ctctactaccacatc

SEQ ID NO: 227120 - DNA, 15 bp, Homo sapiens
actctactaccacat

SEQ ID NO: 227121 - DNA, 15 bp, Homo sapiens
aactctactaccaca

SEQ ID NO: 227122 - DNA, 15 bp, Homo sapiens
aaactctactaccac

SEQ ID NO: 227123 - DNA, 15 bp, Homo sapiens
gaaactctactacca

SEQ ID NO: 227124 - DNA, 15 bp, Homo sapiens
tgaaactctactacc

SEQ ID NO: 227125 - DNA, 15 bp, Homo sapiens
ttgaaactctactac

SEQ ID NO: 227126 - DNA, 15 bp, Homo sapiens
cttgaaactctacta

SEQ ID NO: 227127 - DNA, 15 bp, Homo sapiens
gcttgaaactctact

SEQ ID NO: 227128 - DNA, 15 bp, Homo sapiens
tgcttgaaactctac

SEQ ID NO: 227129 - DNA, 15 bp, Homo sapiens
atgcttgaaactcta

SEQ ID NO: 227130 - DNA, 15 bp, Homo sapiens
catgcttgaaactct

SEQ ID NO: 227131 - DNA, 15 bp, Homo sapiens
acatgcttgaaactc

SEQ ID NO: 227132 - DNA, 15 bp, Homo sapiens
cacatgcttgaaact

SEQ ID NO: 227133 - DNA, 15 bp, Homo sapiens
ccacatgcttgaaac

SEQ ID NO: 227134 - DNA, 15 bp, Homo sapiens
accacatgcttgaaa

SEQ ID NO: 227135 - DNA, 15 bp, Homo sapiens
taccacatgcttgaa

SEQ ID NO: 227136 - DNA, 15 bp, Homo sapiens
ctaccacatgcttga

SEQ ID NO: 227137 - DNA, 15 bp, Homo sapiens
cctaccacatgcttg

SEQ ID NO: 227138 - DNA, 15 bp, Homo sapiens
tcctaccacatgctt

SEQ ID NO: 227139 - DNA, 15 bp, Homo sapiens
atcctaccacatgct

SEQ ID NO: 227140 - DNA, 15 bp, Homo sapiens
tatcctaccacatgc

SEQ ID NO: 227141 - DNA, 15 bp, Homo sapiens
ttatcctaccacatg

SEQ ID NO: 227142 - DNA, 15 bp, Homo sapiens
cttatcctaccacat

SEQ ID NO: 227143 - DNA, 15 bp, Homo sapiens
tcttatcctaccaca

SEQ ID NO: 227144 - DNA, 15 bp, Homo sapiens
ctcttatcctaccac

SEQ ID NO: 227145 - DNA, 15 bp, Homo sapiens
tctcttatcctacca

SEQ ID NO: 227146 - DNA, 15 bp, Homo sapiens
ttctcttatcctacc

SEQ ID NO: 227147 - DNA, 15 bp, Homo sapiens
gttctcttatcctac

SEQ ID NO: 227148 - DNA, 15 bp, Homo sapiens
agttctcttatccta

SEQ ID NO: 227149 - DNA, 15 bp, Homo sapiens
gagttctcttatcct

SEQ ID NO: 227150 - DNA, 15 bp, Homo sapiens
tgagttctcttatcc

SEQ ID NO: 227151 - DNA, 15 bp, Homo sapiens
ttgagttctcttatc

SEQ ID NO: 227152 - DNA, 15 bp, Homo sapiens
attgagttctcttat

SEQ ID NO: 227153 - DNA, 15 bp, Homo sapiens
cattgagttctctta

SEQ ID NO: 227154 - DNA, 15 bp, Homo sapiens
tcattgagttctctt

SEQ ID NO: 227155 - DNA, 15 bp, Homo sapiens
gtcattgagttctct

SEQ ID NO: 227156 - DNA, 15 bp, Homo sapiens
ggtcattgagttctc

SEQ ID NO: 227157 - DNA, 15 bp, Homo sapiens
aggtcattgagttct

SEQ ID NO: 227158 - DNA, 15 bp, Homo sapiens
taggtcattgagttc

SEQ ID NO: 227159 - DNA, 15 bp, Homo sapiens
ttaggtcattgagtt

SEQ ID NO: 227160 - DNA, 15 bp, Homo sapiens
cttaggtcattgagt

SEQ ID NO: 227161 - DNA, 15 bp, Homo sapiens
tcttaggtcattgag

SEQ ID NO: 227162 - DNA, 15 bp, Homo sapiens
ttcttaggtcattga

SEQ ID NO: 227163 - DNA, 15 bp, Homo sapiens
gttcttaggtcattg

SEQ ID NO: 227164 - DNA, 15 bp, Homo sapiens
ggttcttaggtcatt

SEQ ID NO: 227165 - DNA, 15 bp, Homo sapiens
tggttcttaggtcat

SEQ ID NO: 227166 - DNA, 15 bp, Homo sapiens
atggttcttaggtca

SEQ ID NO: 227167 - DNA, 15 bp, Homo sapiens
aatggttcttaggtc

SEQ ID NO: 227168 - DNA, 15 bp, Homo sapiens
gaatggttcttaggt

SEQ ID NO: 227169 - DNA, 15 bp, Homo sapiens
ggaatggttcttagg

SEQ ID NO: 227170 - DNA, 15 bp, Homo sapiens
tggaatggttcttag

SEQ ID NO: 227171 - DNA, 15 bp, Homo sapiens
ttggaatggttctta

SEQ ID NO: 227172 - DNA, 15 bp, Homo sapiens
gttggaatggttctt

SEQ ID NO: 227173 - DNA, 15 bp, Homo sapiens
ggttggaatggttct

SEQ ID NO: 227174 - DNA, 15 bp, Homo sapiens
gggttggaatggttc

SEQ ID NO: 227175 - DNA, 15 bp, Homo sapiens
tgggttggaatggtt

SEQ ID NO: 227176 - DNA, 15 bp, Homo sapiens
ctgggttggaatggt

SEQ ID NO: 227177 - DNA, 15 bp, Homo sapiens
tctgggttggaatgg

SEQ ID NO: 227178 - DNA, 15 bp, Homo sapiens
ctctgggttggaatg

SEQ ID NO: 227179 - DNA, 15 bp, Homo sapiens
tctctgggttggaat

SEQ ID NO: 227180 - DNA, 15 bp, Homo sapiens
ttctctgggttggaa

SEQ ID NO: 227181 - DNA, 15 bp, Homo sapiens
gttctctgggttgga

SEQ ID NO: 227182 - DNA, 15 bp, Homo sapiens
ggttctctgggttgg

SEQ ID NO: 227183 - DNA, 15 bp, Homo sapiens
gggttctctgggttg

SEQ ID NO: 227184 - DNA, 15 bp, Homo sapiens
ggggttctctgggtt

SEQ ID NO: 227185 - DNA, 15 bp, Homo sapiens
aggggttctctgggt

SEQ ID NO: 227186 - DNA, 15 bp, Homo sapiens
caggggttctctggg

SEQ ID NO: 227187 - DNA, 15 bp, Homo sapiens
ccaggggttctctgg

SEQ ID NO: 227188 - DNA, 15 bp, Homo sapiens
accaggggttctctg

SEQ ID NO: 227189 - DNA, 15 bp, Homo sapiens
aaccaggggttctct

SEQ ID NO: 227190 - DNA, 15 bp, Homo sapiens
gaaccaggggttctc

SEQ ID NO: 227191 - DNA, 15 bp, Homo sapiens
agaaccaggggttct

SEQ ID NO: 227192 - DNA, 15 bp, Homo sapiens
tagaaccaggggttc

SEQ ID NO: 227193 - DNA, 15 bp, Homo sapiens
atagaaccaggggtt

SEQ ID NO: 227194 - DNA, 15 bp, Homo sapiens
catagaaccaggggt

SEQ ID NO: 227195 - DNA, 15 bp, Homo sapiens
tcatagaaccagggg

SEQ ID NO: 227196 - DNA, 15 bp, Homo sapiens
ttcatagaaccaggg

SEQ ID NO: 227197 - DNA, 15 bp, Homo sapiens
attcatagaaccagg

SEQ ID NO: 227198 - DNA, 15 bp, Homo sapiens
tattcatagaaccag

SEQ ID NO: 227199 - DNA, 15 bp, Homo sapiens
ttattcatagaacca

SEQ ID NO: 227200 - DNA, 15 bp, Homo sapiens
attattcatagaacc

SEQ ID NO: 227201 - DNA, 15 bp, Homo sapiens
aattattcatagaac

SEQ ID NO: 227202 - DNA, 15 bp, Homo sapiens
gaattattcatagaa

SEQ ID NO: 227203 - DNA, 15 bp, Homo sapiens
ggaattattcataga

SEQ ID NO: 227204 - DNA, 15 bp, Homo sapiens
tggaattattcatag

SEQ ID NO: 227205 - DNA, 15 bp, Homo sapiens
ttggaattattcata

SEQ ID NO: 227206 - DNA, 15 bp, Homo sapiens
gttggaattattcat

SEQ ID NO: 227207 - DNA, 15 bp, Homo sapiens
agttggaattattca

SEQ ID NO: 227208 - DNA, 15 bp, Homo sapiens
aagttggaattattc

SEQ ID NO: 227209 - DNA, 15 bp, Homo sapiens
taagttggaattatt

SEQ ID NO: 227210 - DNA, 15 bp, Homo sapiens
ttaagttggaattat

SEQ ID NO: 227211 - DNA, 15 bp, Homo sapiens
tttaagttggaatta

SEQ ID NO: 227212 - DNA, 15 bp, Homo sapiens
atttaagttggaatt

SEQ ID NO: 227213 - DNA, 15 bp, Homo sapiens
tatttaagttggaat

SEQ ID NO: 227214 - DNA, 15 bp, Homo sapiens
ctatttaagttggaa

SEQ ID NO: 227215 - DNA, 15 bp, Homo sapiens
cctatttaagttgga

SEQ ID NO: 227216 - DNA, 15 bp, Homo sapiens
acctatttaagttgg

SEQ ID NO: 227217 - DNA, 15 bp, Homo sapiens
tacctatttaagttg

SEQ ID NO: 227218 - DNA, 15 bp, Homo sapiens
ctacctatttaagtt

SEQ ID NO: 227219 - DNA, 15 bp, Homo sapiens
gctacctatttaagt

SEQ ID NO: 227220 - DNA, 15 bp, Homo sapiens
agctacctatttaag

SEQ ID NO: 227221 - DNA, 15 bp, Homo sapiens
aagctacctatttaa

SEQ ID NO: 227222 - DNA, 15 bp, Homo sapiens
caagctacctattta

SEQ ID NO: 227223 - DNA, 15 bp, Homo sapiens
ccaagctacctattt

SEQ ID NO: 227224 - DNA, 15 bp, Homo sapiens
gccaagctacctatt

SEQ ID NO: 227225 - DNA, 15 bp, Homo sapiens
agccaagctacctat

SEQ ID NO: 227226 - DNA, 15 bp, Homo sapiens
gagccaagctaccta

SEQ ID NO: 227227 - DNA, 15 bp, Homo sapiens
agagccaagctacct

SEQ ID NO: 227228 - DNA, 15 bp, Homo sapiens
gagagccaagctacc

SEQ ID NO: 227229 - DNA, 15 bp, Homo sapiens
ggagagccaagctac

SEQ ID NO: 227230 - DNA, 15 bp, Homo sapiens
gggagagccaagcta

SEQ ID NO: 227231 - DNA, 15 bp, Homo sapiens
tgggagagccaagct

SEQ ID NO: 227232 - DNA, 15 bp, Homo sapiens
ttgggagagccaagc

SEQ ID NO: 227233 - DNA, 15 bp, Homo sapiens
cttgggagagccaag

SEQ ID NO: 227234 - DNA, 15 bp, Homo sapiens
acttgggagagccaa

SEQ ID NO: 227235 - DNA, 15 bp, Homo sapiens
cacttgggagagcca

SEQ ID NO: 227236 - DNA, 15 bp, Homo sapiens
tcacttgggagagcc

SEQ ID NO: 227237 - DNA, 15 bp, Homo sapiens
ctcacttgggagagc

SEQ ID NO: 227238 - DNA, 15 bp, Homo sapiens
tctcacttgggagag

SEQ ID NO: 227239 - DNA, 15 bp, Homo sapiens
ctctcacttgggaga

SEQ ID NO: 227240 - DNA, 15 bp, Homo sapiens
gctctcacttgggag

SEQ ID NO: 227241 - DNA, 15 bp, Homo sapiens
ggctctcacttggga

SEQ ID NO: 227242 - DNA, 15 bp, Homo sapiens
tggctctcacttggg

SEQ ID NO: 227243 - DNA, 15 bp, Homo sapiens
atggctctcacttgg

SEQ ID NO: 227244 - DNA, 15 bp, Homo sapiens
aatggctctcacttg

SEQ ID NO: 227245 - DNA, 15 bp, Homo sapiens
caatggctctcactt

SEQ ID NO: 227246 - DNA, 15 bp, Homo sapiens
gcaatggctctcact

SEQ ID NO: 227247 - DNA, 15 bp, Homo sapiens
agcaatggctctcac

SEQ ID NO: 227248 - DNA, 15 bp, Homo sapiens
aagcaatggctctca

SEQ ID NO: 227249 - DNA, 15 bp, Homo sapiens
gaagcaatggctctc

SEQ ID NO: 227250 - DNA, 15 bp, Homo sapiens
agaagcaatggctct

SEQ ID NO: 227251 - DNA, 15 bp, Homo sapiens
cagaagcaatggctc

SEQ ID NO: 227252 - DNA, 15 bp, Homo sapiens
acagaagcaatggct

SEQ ID NO: 227253 - DNA, 15 bp, Homo sapiens
aacagaagcaatggc

SEQ ID NO: 227254 - DNA, 15 bp, Homo sapiens
aaacagaagcaatgg

SEQ ID NO: 227255 - DNA, 15 bp, Homo sapiens
gaaacagaagcaatg

SEQ ID NO: 227256 - DNA, 15 bp, Homo sapiens
ggaaacagaagcaat

SEQ ID NO: 227257 - DNA, 15 bp, Homo sapiens
cggaaacagaagcaa

SEQ ID NO: 227258 - DNA, 15 bp, Homo sapiens
ccggaaacagaagca

SEQ ID NO: 227259 - DNA, 15 bp, Homo sapiens
cccggaaacagaagc

SEQ ID NO: 227260 - DNA, 15 bp, Homo sapiens
acccggaaacagaag

SEQ ID NO: 227261 - DNA, 15 bp, Homo sapiens
gacccggaaacagaa

SEQ ID NO: 227262 - DNA, 15 bp, Homo sapiens
tgacccggaaacaga

SEQ ID NO: 227263 - DNA, 15 bp, Homo sapiens
atgacccggaaacag

SEQ ID NO: 227264 - DNA, 15 bp, Homo sapiens
tatgacccggaaaca

SEQ ID NO: 227265 - DNA, 15 bp, Homo sapiens
atatgacccggaaac

SEQ ID NO: 227266 - DNA, 15 bp, Homo sapiens
tatatgacccggaaa

SEQ ID NO: 227267 - DNA, 15 bp, Homo sapiens
ttatatgacccggaa

SEQ ID NO: 227268 - DNA, 15 bp, Homo sapiens
attatatgacccgga

SEQ ID NO: 227269 - DNA, 15 bp, Homo sapiens
cattatatgacccgg

SEQ ID NO: 227270 - DNA, 15 bp, Homo sapiens
tcattatatgacccg

SEQ ID NO: 227271 - DNA, 15 bp, Homo sapiens
ttcattatatgaccc

SEQ ID NO: 227272 - DNA, 15 bp, Homo sapiens
gttcattatatgacc

SEQ ID NO: 227273 - DNA, 15 bp, Homo sapiens
agttcattatatgac

SEQ ID NO: 227274 - DNA, 15 bp, Homo sapiens
aagttcattatatga

SEQ ID NO: 227275 - DNA, 15 bp, Homo sapiens
aaagttcattatatg

SEQ ID NO: 227276 - DNA, 15 bp, Homo sapiens
gaaagttcattatat

SEQ ID NO: 227277 - DNA, 15 bp, Homo sapiens
tgaaagttcattata

SEQ ID NO: 227278 - DNA, 15 bp, Homo sapiens
ctgaaagttcattat

SEQ ID NO: 227279 - DNA, 15 bp, Homo sapiens
tctgaaagttcatta

SEQ ID NO: 227280 - DNA, 15 bp, Homo sapiens
ttctgaaagttcatt

SEQ ID NO: 227281 - DNA, 15 bp, Homo sapiens
tttctgaaagttcat

SEQ ID NO: 227282 - DNA, 15 bp, Homo sapiens
ttttctgaaagttca

SEQ ID NO: 227283 - DNA, 15 bp, Homo sapiens
gttttctgaaagttc

SEQ ID NO: 227284 - DNA, 15 bp, Homo sapiens
ggttttctgaaagtt

SEQ ID NO: 227285 - DNA, 15 bp, Homo sapiens
tggttttctgaaagt

SEQ ID NO: 227286 - DNA, 15 bp, Homo sapiens
gtggttttctgaaag

SEQ ID NO: 227287 - DNA, 15 bp, Homo sapiens
ggtggttttctgaaa

SEQ ID NO: 227288 - DNA, 15 bp, Homo sapiens
tggtggttttctgaa

SEQ ID NO: 227289 - DNA, 15 bp, Homo sapiens
atggtggttttctga

SEQ ID NO: 227290 - DNA, 15 bp, Homo sapiens
aatggtggttttctg

SEQ ID NO: 227291 - DNA, 15 bp, Homo sapiens
aaatggtggttttct

SEQ ID NO: 227292 - DNA, 15 bp, Homo sapiens
aaaatggtggttttc

SEQ ID NO: 227293 - DNA, 15 bp, Homo sapiens
aaaaatggtggtttt

SEQ ID NO: 227294 - DNA, 15 bp, Homo sapiens
gaaaaatggtggttt

SEQ ID NO: 227295 - DNA, 15 bp, Homo sapiens
agaaaaatggtggtt

SEQ ID NO: 227296 - DNA, 15 bp, Homo sapiens
gagaaaaatggtggt

SEQ ID NO: 227297 - DNA, 15 bp, Homo sapiens
tgagaaaaatggtgg

SEQ ID NO: 227298 - DNA, 15 bp, Homo sapiens
ttgagaaaaatggtg

SEQ ID NO: 227299 - DNA, 15 bp, Homo sapiens
gttgagaaaaatggt

SEQ ID NO: 227300 - DNA, 15 bp, Homo sapiens
ggttgagaaaaatgg

SEQ ID NO: 227301 - DNA, 15 bp, Homo sapiens
tggttgagaaaaatg

SEQ ID NO: 227302 - DNA, 15 bp, Homo sapiens
ctggttgagaaaaat

SEQ ID NO: 227303 - DNA, 15 bp, Homo sapiens
actggttgagaaaaa

SEQ ID NO: 227304 - DNA, 15 bp, Homo sapiens
aactggttgagaaaa

SEQ ID NO: 227305 - DNA, 15 bp, Homo sapiens
taactggttgagaaa

SEQ ID NO: 227306 - DNA, 15 bp, Homo sapiens
ttaactggttgagaa

SEQ ID NO: 227307 - DNA, 15 bp, Homo sapiens
tttaactggttgaga

SEQ ID NO: 227308 - DNA, 15 bp, Homo sapiens
ttttaactggttgag

SEQ ID NO: 227309 - DNA, 15 bp, Homo sapiens
attttaactggttga

SEQ ID NO: 227310 - DNA, 15 bp, Homo sapiens
aattttaactggttg

SEQ ID NO: 227311 - DNA, 15 bp, Homo sapiens
taattttaactggtt

SEQ ID NO: 227312 - DNA, 15 bp, Homo sapiens
ttaattttaactggt

SEQ ID NO: 227313 - DNA, 15 bp, Homo sapiens
cttaattttaactgg

SEQ ID NO: 227314 - DNA, 15 bp, Homo sapiens
acttaattttaactg

SEQ ID NO: 227315 - DNA, 15 bp, Homo sapiens
cacttaattttaact

SEQ ID NO: 227316 - DNA, 15 bp, Homo sapiens
acacttaattttaac

SEQ ID NO: 227317 - DNA, 15 bp, Homo sapiens
tacacttaattttaa

SEQ ID NO: 227318 - DNA, 15 bp, Homo sapiens
ttacacttaatttta

SEQ ID NO: 227319 - DNA, 15 bp, Homo sapiens
attacacttaatttt

SEQ ID NO: 227320 - DNA, 15 bp, Homo sapiens
tattacacttaattt

SEQ ID NO: 227321 - DNA, 15 bp, Homo sapiens
gtattacacttaatt

SEQ ID NO: 227322 - DNA, 15 bp, Homo sapiens
cgtattacacttaat

SEQ ID NO: 227323 - DNA, 15 bp, Homo sapiens
acgtattacacttaa

SEQ ID NO: 227324 - DNA, 15 bp, Homo sapiens
cacgtattacactta

SEQ ID NO: 227325 - DNA, 15 bp, Homo sapiens
gcacgtattacactt

SEQ ID NO: 227326 - DNA, 15 bp, Homo sapiens
agcacgtattacact

SEQ ID NO: 227327 - DNA, 15 bp, Homo sapiens
aagcacgtattacac

SEQ ID NO: 227328 - DNA, 15 bp, Homo sapiens
aaagcacgtattaca

SEQ ID NO: 227329 - DNA, 15 bp, Homo sapiens
gaaagcacgtattac

SEQ ID NO: 227330 - DNA, 15 bp, Homo sapiens
tgaaagcacgtatta

SEQ ID NO: 227331 - DNA, 15 bp, Homo sapiens
atgaaagcacgtatt

SEQ ID NO: 227332 - DNA, 15 bp, Homo sapiens
aatgaaagcacgtat

SEQ ID NO: 227333 - DNA, 15 bp, Homo sapiens
aaatgaaagcacgta

SEQ ID NO: 227334 - DNA, 15 bp, Homo sapiens
gaaatgaaagcacgt

SEQ ID NO: 227335 - DNA, 15 bp, Homo sapiens
tgaaatgaaagcacg

SEQ ID NO: 227336 - DNA, 15 bp, Homo sapiens
atgaaatgaaagcac

SEQ ID NO: 227337 - DNA, 15 bp, Homo sapiens
catgaaatgaaagca

SEQ ID NO: 227338 - DNA, 15 bp, Homo sapiens
ccatgaaatgaaagc

SEQ ID NO: 227339 - DNA, 15 bp, Homo sapiens
accatgaaatgaaag

SEQ ID NO: 227340 - DNA, 15 bp, Homo sapiens
caccatgaaatgaaa

SEQ ID NO: 227341 - DNA, 15 bp, Homo sapiens
gcaccatgaaatgaa

SEQ ID NO: 227342 - DNA, 15 bp, Homo sapiens
ggcaccatgaaatga

SEQ ID NO: 227343 - DNA, 15 bp, Homo sapiens
aggcaccatgaaatg

SEQ ID NO: 227344 - DNA, 15 bp, Homo sapiens
caggcaccatgaaat

SEQ ID NO: 227345 - DNA, 15 bp, Homo sapiens
ccaggcaccatgaaa

SEQ ID NO: 227346 - DNA, 15 bp, Homo sapiens
cccaggcaccatgaa

SEQ ID NO: 227347 - DNA, 15 bp, Homo sapiens
ccccaggcaccatga

SEQ ID NO: 227348 - DNA, 15 bp, Homo sapiens
tccccaggcaccatg

SEQ ID NO: 227349 - DNA, 15 bp, Homo sapiens
ttccccaggcaccat

SEQ ID NO: 227350 - DNA, 15 bp, Homo sapiens
tttccccaggcacca

SEQ ID NO: 227351 - DNA, 15 bp, Homo sapiens
ttttccccaggcacc

SEQ ID NO: 227352 - DNA, 15 bp, Homo sapiens
attttccccaggcac

SEQ ID NO: 227353 - DNA, 15 bp, Homo sapiens
aattttccccaggca

SEQ ID NO: 227354 - DNA, 15 bp, Homo sapiens
aaattttccccaggc

SEQ ID NO: 227355 - DNA, 15 bp, Homo sapiens
taaattttccccagg

SEQ ID NO: 227356 - DNA, 15 bp, Homo sapiens
ttaaattttccccag

SEQ ID NO: 227357 - DNA, 15 bp, Homo sapiens
attaaattttcccca

SEQ ID NO: 227358 - DNA, 15 bp, Homo sapiens
aattaaattttcccc

SEQ ID NO: 227359 - DNA, 15 bp, Homo sapiens
caattaaattttccc

SEQ ID NO: 227360 - DNA, 15 bp, Homo sapiens
acaattaaattttcc

SEQ ID NO: 227361 - DNA, 15 bp, Homo sapiens
tacaattaaattttc

SEQ ID NO: 227362 - DNA, 15 bp, Homo sapiens
ctacaattaaatttt

SEQ ID NO: 227363 - DNA, 15 bp, Homo sapiens
actacaattaaattt

SEQ ID NO: 227364 - DNA, 15 bp, Homo sapiens
tactacaattaaatt

SEQ ID NO: 227365 - DNA, 15 bp, Homo sapiens
atactacaattaaat

SEQ ID NO: 227366 - DNA, 15 bp, Homo sapiens
catactacaattaaa

SEQ ID NO: 227367 - DNA, 15 bp, Homo sapiens
tcatactacaattaa

SEQ ID NO: 227368 - DNA, 15 bp, Homo sapiens
ttcatactacaatta

SEQ ID NO: 227369 - DNA, 15 bp, Homo sapiens
gttcatactacaatt

SEQ ID NO: 227370 - DNA, 15 bp, Homo sapiens
agttcatactacaat

SEQ ID NO: 227371 - DNA, 15 bp, Homo sapiens
gagttcatactacaa

SEQ ID NO: 227372 - DNA, 15 bp, Homo sapiens
ggagttcatactaca

SEQ ID NO: 227373 - DNA, 15 bp, Homo sapiens
tggagttcatactac

SEQ ID NO: 227374 - DNA, 15 bp, Homo sapiens
ctggagttcatacta

SEQ ID NO: 227375 - DNA, 15 bp, Homo sapiens
actggagttcatact

SEQ ID NO: 227376 - DNA, 15 bp, Homo sapiens
aactggagttcatac

SEQ ID NO: 227377 - DNA, 15 bp, Homo sapiens
taactggagttcata

SEQ ID NO: 227378 - DNA, 15 bp, Homo sapiens
ataactggagttcat

SEQ ID NO: 227379 - DNA, 15 bp, Homo sapiens
aataactggagttca

SEQ ID NO: 227380 - DNA, 15 bp, Homo sapiens
caataactggagttc

SEQ ID NO: 227381 - DNA, 15 bp, Homo sapiens
ccaataactggagtt

SEQ ID NO: 227382 - DNA, 15 bp, Homo sapiens
accaataactggagt

SEQ ID NO: 227383 - DNA, 15 bp, Homo sapiens
taccaataactggag

SEQ ID NO: 227384 - DNA, 15 bp, Homo sapiens
ctaccaataactgga

SEQ ID NO: 227385 - DNA, 15 bp, Homo sapiens
actaccaataactgg

SEQ ID NO: 227386 - DNA, 15 bp, Homo sapiens
gactaccaataactg

SEQ ID NO: 227387 - DNA, 15 bp, Homo sapiens
agactaccaataact

SEQ ID NO: 227388 - DNA, 15 bp, Homo sapiens
aagactaccaataac

SEQ ID NO: 227389 - DNA, 15 bp, Homo sapiens
taagactaccaataa

SEQ ID NO: 227390 - DNA, 15 bp, Homo sapiens
ttaagactaccaata

SEQ ID NO: 227391 - DNA, 15 bp, Homo sapiens
cttaagactaccaat

SEQ ID NO: 227392 - DNA, 15 bp, Homo sapiens
acttaagactaccaa

SEQ ID NO: 227393 - DNA, 15 bp, Homo sapiens
tacttaagactacca

SEQ ID NO: 227394 - DNA, 15 bp, Homo sapiens
ttacttaagactacc

SEQ ID NO: 227395 - DNA, 15 bp, Homo sapiens
tttacttaagactac

SEQ ID NO: 227396 - DNA, 15 bp, Homo sapiens
ttttacttaagacta

SEQ ID NO: 227397 - DNA, 15 bp, Homo sapiens
attttacttaagact

SEQ ID NO: 227398 - DNA, 15 bp, Homo sapiens
aattttacttaagac

SEQ ID NO: 227399 - DNA, 15 bp, Homo sapiens
caattttacttaaga

SEQ ID NO: 227400 - DNA, 15 bp, Homo sapiens
gcaattttacttaag

SEQ ID NO: 227401 - DNA, 15 bp, Homo sapiens
ggcaattttacttaa

SEQ ID NO: 227402 - DNA, 15 bp, Homo sapiens
tggcaattttactta

SEQ ID NO: 227403 - DNA, 15 bp, Homo sapiens
ttggcaattttactt

SEQ ID NO: 227404 - DNA, 15 bp, Homo sapiens
tttggcaattttact

SEQ ID NO: 227405 - DNA, 15 bp, Homo sapiens
ttttggcaattttac

SEQ ID NO: 227406 - DNA, 15 bp, Homo sapiens
attttggcaatttta

SEQ ID NO: 227407 - DNA, 15 bp, Homo sapiens
tattttggcaatttt

SEQ ID NO: 227408 - DNA, 15 bp, Homo sapiens
ttattttggcaattt

SEQ ID NO: 227409 - DNA, 15 bp, Homo sapiens
tttattttggcaatt

SEQ ID NO: 227410 - DNA, 15 bp, Homo sapiens
atttattttggcaat

SEQ ID NO: 227411 - DNA, 15 bp, Homo sapiens
tatttattttggcaa

SEQ ID NO: 227412 - DNA, 15 bp, Homo sapiens
ctatttattttggca

SEQ ID NO: 227413 - DNA, 15 bp, Homo sapiens
tctatttattttggc

SEQ ID NO: 227414 - DNA, 15 bp, Homo sapiens
ttctatttattttgg

SEQ ID NO: 227415 - DNA, 15 bp, Homo sapiens
tttctatttattttg

SEQ ID NO: 227416 - DNA, 15 bp, Homo sapiens
atttctatttatttt

SEQ ID NO: 227417 - DNA, 15 bp, Homo sapiens
catttctatttattt

SEQ ID NO: 227418 - DNA, 15 bp, Homo sapiens
gcatttctatttatt

SEQ ID NO: 227419 - DNA, 15 bp, Homo sapiens
tgcatttctatttat

SEQ ID NO: 227420 - DNA, 15 bp, Homo sapiens
ctgcatttctattta

SEQ ID NO: 227421 - DNA, 15 bp, Homo sapiens
cctgcatttctattt

SEQ ID NO: 227422 - DNA, 15 bp, Homo sapiens
tcctgcatttctatt

SEQ ID NO: 227423 - DNA, 15 bp, Homo sapiens
atcctgcatttctat

SEQ ID NO: 227424 - DNA, 15 bp, Homo sapiens
tatcctgcatttcta

SEQ ID NO: 227425 - DNA, 15 bp, Homo sapiens
atatcctgcatttct

SEQ ID NO: 227426 - DNA, 15 bp, Homo sapiens
aatatcctgcatttc

SEQ ID NO: 227427 - DNA, 15 bp, Homo sapiens
aaatatcctgcattt

SEQ ID NO: 227428 - DNA, 15 bp, Homo sapiens
gaaatatcctgcatt

SEQ ID NO: 227429 - DNA, 15 bp, Homo sapiens
agaaatatcctgcat

SEQ ID NO: 227430 - DNA, 15 bp, Homo sapiens
cagaaatatcctgca

SEQ ID NO: 227431 - DNA, 15 bp, Homo sapiens
ccagaaatatcctgc

SEQ ID NO: 227432 - DNA, 15 bp, Homo sapiens
cccagaaatatcctg

SEQ ID NO: 227433 - DNA, 15 bp, Homo sapiens
gcccagaaatatcct

SEQ ID NO: 227434 - DNA, 15 bp, Homo sapiens
agcccagaaatatcc

SEQ ID NO: 227435 - DNA, 15 bp, Homo sapiens
gagcccagaaatatc

SEQ ID NO: 227436 - DNA, 15 bp, Homo sapiens
tgagcccagaaatat

SEQ ID NO: 227437 - DNA, 15 bp, Homo sapiens
gtgagcccagaaata

SEQ ID NO: 227438 - DNA, 15 bp, Homo sapiens
tgtgagcccagaaat

SEQ ID NO: 227439 - DNA, 15 bp, Homo sapiens
gtgtgagcccagaaa

SEQ ID NO: 227440 - DNA, 15 bp, Homo sapiens
tgtgtgagcccagaa

SEQ ID NO: 227441 - DNA, 15 bp, Homo sapiens
ctgtgtgagcccaga

SEQ ID NO: 227442 - DNA, 15 bp, Homo sapiens
gctgtgtgagcccag

SEQ ID NO: 227443 - DNA, 15 bp, Homo sapiens
agctgtgtgagccca

SEQ ID NO: 227444 - DNA, 15 bp, Homo sapiens
aagctgtgtgagccc

SEQ ID NO: 227445 - DNA, 15 bp, Homo sapiens
gaagctgtgtgagcc

SEQ ID NO: 227446 - DNA, 15 bp, Homo sapiens
ggaagctgtgtgagc

SEQ ID NO: 227447 - DNA, 15 bp, Homo sapiens
cggaagctgtgtgag

SEQ ID NO: 227448 - DNA, 15 bp, Homo sapiens
ccggaagctgtgtga

SEQ ID NO: 227449 - DNA, 15 bp, Homo sapiens
cccggaagctgtgtg

SEQ ID NO: 227450 - DNA, 15 bp, Homo sapiens
tcccggaagctgtgt

SEQ ID NO: 227451 - DNA, 15 bp, Homo sapiens
gtcccggaagctgtg

SEQ ID NO: 227452 - DNA, 15 bp, Homo sapiens
tgtcccggaagctgt

SEQ ID NO: 227453 - DNA, 15 bp, Homo sapiens
gtgtcccggaagctg

SEQ ID NO: 227454 - DNA, 15 bp, Homo sapiens
agtgtcccggaagct

SEQ ID NO: 227455 - DNA, 15 bp, Homo sapiens
aagtgtcccggaagc

SEQ ID NO: 227456 - DNA, 15 bp, Homo sapiens
aaagtgtcccggaag

SEQ ID NO: 227457 - DNA, 15 bp, Homo sapiens
taaagtgtcccggaa

SEQ ID NO: 227458 - DNA, 15 bp, Homo sapiens
ctaaagtgtcccgga

SEQ ID NO: 227459 - DNA, 15 bp, Homo sapiens
actaaagtgtcccgg

SEQ ID NO: 227460 - DNA, 15 bp, Homo sapiens
aactaaagtgtcccg

SEQ ID NO: 227461 - DNA, 15 bp, Homo sapiens
aaactaaagtgtccc

SEQ ID NO: 227462 - DNA, 15 bp, Homo sapiens
gaaactaaagtgtcc

SEQ ID NO: 227463 - DNA, 15 bp, Homo sapiens
agaaactaaagtgtc

SEQ ID NO: 227464 - DNA, 15 bp, Homo sapiens
aagaaactaaagtgt

SEQ ID NO: 227465 - DNA, 15 bp, Homo sapiens
caagaaactaaagtg

SEQ ID NO: 227466 - DNA, 15 bp, Homo sapiens
ccaagaaactaaagt

SEQ ID NO: 227467 - DNA, 15 bp, Homo sapiens
cccaagaaactaaag

SEQ ID NO: 227468 - DNA, 15 bp, Homo sapiens
gcccaagaaactaaa

SEQ ID NO: 227469 - DNA, 15 bp, Homo sapiens
agcccaagaaactaa

SEQ ID NO: 227470 - DNA, 15 bp, Homo sapiens
cagcccaagaaacta

SEQ ID NO: 227471 - DNA, 15 bp, Homo sapiens
gcagcccaagaaact

SEQ ID NO: 227472 - DNA, 15 bp, Homo sapiens
ggcagcccaagaaac

SEQ ID NO: 227473 - DNA, 15 bp, Homo sapiens
tggcagcccaagaaa

SEQ ID NO: 227474 - DNA, 15 bp, Homo sapiens
ttggcagcccaagaa

SEQ ID NO: 227475 - DNA, 15 bp, Homo sapiens
attggcagcccaaga

SEQ ID NO: 227476 - DNA, 15 bp, Homo sapiens
gattggcagcccaag

SEQ ID NO: 227477 - DNA, 15 bp, Homo sapiens
ggattggcagcccaa

SEQ ID NO: 227478 - DNA, 15 bp, Homo sapiens
tggattggcagccca

SEQ ID NO: 227479 - DNA, 15 bp, Homo sapiens
ctggattggcagccc

SEQ ID NO: 227480 - DNA, 15 bp, Homo sapiens
actggattggcagcc

SEQ ID NO: 227481 - DNA, 15 bp, Homo sapiens
cactggattggcagc

SEQ ID NO: 227482 - DNA, 15 bp, Homo sapiens
gcactggattggcag

SEQ ID NO: 227483 - DNA, 15 bp, Homo sapiens
ggcactggattggca

SEQ ID NO: 227484 - DNA, 15 bp, Homo sapiens
aggcactggattggc

SEQ ID NO: 227485 - DNA, 15 bp, Homo sapiens
aaggcactggattgg

SEQ ID NO: 227486 - DNA, 15 bp, Homo sapiens
aaaggcactggattg

SEQ ID NO: 227487 - DNA, 15 bp, Homo sapiens
gaaaggcactggatt

SEQ ID NO: 227488 - DNA, 15 bp, Homo sapiens
tgaaaggcactggat

SEQ ID NO: 227489 - DNA, 15 bp, Homo sapiens
gtgaaaggcactgga

SEQ ID NO: 227490 - DNA, 15 bp, Homo sapiens
tgtgaaaggcactgg

SEQ ID NO: 227491 - DNA, 15 bp, Homo sapiens
ttgtgaaaggcactg

SEQ ID NO: 227492 - DNA, 15 bp, Homo sapiens
cttgtgaaaggcact

SEQ ID NO: 227493 - DNA, 15 bp, Homo sapiens
gcttgtgaaaggcac

SEQ ID NO: 227494 - DNA, 15 bp, Homo sapiens
tgcttgtgaaaggca

SEQ ID NO: 227495 - DNA, 15 bp, Homo sapiens
atgcttgtgaaaggc

SEQ ID NO: 227496 - DNA, 15 bp, Homo sapiens
aatgcttgtgaaagg

SEQ ID NO: 227497 - DNA, 15 bp, Homo sapiens
aaatgcttgtgaaag

SEQ ID NO: 227498 - DNA, 15 bp, Homo sapiens
caaatgcttgtgaaa

SEQ ID NO: 227499 - DNA, 15 bp, Homo sapiens
tcaaatgcttgtgaa

SEQ ID NO: 227500 - DNA, 15 bp, Homo sapiens
atcaaatgcttgtga

SEQ ID NO: 227501 - DNA, 15 bp, Homo sapiens
gatcaaatgcttgtg

SEQ ID NO: 227502 - DNA, 15 bp, Homo sapiens
agatcaaatgcttgt

SEQ ID NO: 227503 - DNA, 15 bp, Homo sapiens
aagatcaaatgcttg

SEQ ID NO: 227504 - DNA, 15 bp, Homo sapiens
aaagatcaaatgctt

SEQ ID NO: 227505 - DNA, 15 bp, Homo sapiens
aaaagatcaaatgct

SEQ ID NO: 227506 - DNA, 15 bp, Homo sapiens
aaaaagatcaaatgc

SEQ ID NO: 227507 - DNA, 15 bp, Homo sapiens
aaaaaagatcaaatg

SEQ ID NO: 227508 - DNA, 15 bp, Homo sapiens
gaaaaaagatcaaat

SEQ ID NO: 227509 - DNA, 15 bp, Homo sapiens
tgaaaaaagatcaaa

SEQ ID NO: 227510 - DNA, 15 bp, Homo sapiens
ttgaaaaaagatcaa

SEQ ID NO: 227511 - DNA, 15 bp, Homo sapiens
tttgaaaaaagatca

SEQ ID NO: 227512 - DNA, 15 bp, Homo sapiens
gtttgaaaaaagatc

SEQ ID NO: 227513 - DNA, 15 bp, Homo sapiens
tgtttgaaaaaagat

SEQ ID NO: 227514 - DNA, 15 bp, Homo sapiens
atgtttgaaaaaaga

SEQ ID NO: 227515 - DNA, 15 bp, Homo sapiens
gatgtttgaaaaaag

SEQ ID NO: 227516 - DNA, 15 bp, Homo sapiens
agatgtttgaaaaaa

SEQ ID NO: 227517 - DNA, 15 bp, Homo sapiens
gagatgtttgaaaaa

SEQ ID NO: 227518 - DNA, 15 bp, Homo sapiens
agagatgtttgaaaa

SEQ ID NO: 227519 - DNA, 15 bp, Homo sapiens
aagagatgtttgaaa

SEQ ID NO: 227520 - DNA, 15 bp, Homo sapiens
caagagatgtttgaa

SEQ ID NO: 227521 - DNA, 15 bp, Homo sapiens
tcaagagatgtttga

SEQ ID NO: 227522 - DNA, 15 bp, Homo sapiens
ttcaagagatgtttg

SEQ ID NO: 227523 - DNA, 15 bp, Homo sapiens
tttcaagagatgttt

SEQ ID NO: 227524 - DNA, 15 bp, Homo sapiens
ttttcaagagatgtt

SEQ ID NO: 227525 - DNA, 15 bp, Homo sapiens
gttttcaagagatgt

SEQ ID NO: 227526 - DNA, 15 bp, Homo sapiens
tgttttcaagagatg

SEQ ID NO: 227527 - DNA, 15 bp, Homo sapiens
ttgttttcaagagat

SEQ ID NO: 227528 - DNA, 15 bp, Homo sapiens
tttgttttcaagaga

SEQ ID NO: 227529 - DNA, 15 bp, Homo sapiens
gtttgttttcaagag

SEQ ID NO: 227530 - DNA, 15 bp, Homo sapiens
tgtttgttttcaaga

SEQ ID NO: 227531 - DNA, 15 bp, Homo sapiens
ttgtttgttttcaag

SEQ ID NO: 227532 - DNA, 15 bp, Homo sapiens
tttgtttgttttcaa

SEQ ID NO: 227533 - DNA, 15 bp, Homo sapiens
ttttgtttgttttca

SEQ ID NO: 227534 - DNA, 15 bp, Homo sapiens
gttttgtttgttttc

SEQ ID NO: 227535 - DNA, 15 bp, Homo sapiens
ggttttgtttgtttt

SEQ ID NO: 227536 - DNA, 15 bp, Homo sapiens
aggttttgtttgttt

SEQ ID NO: 227537 - DNA, 15 bp, Homo sapiens
gaggttttgtttgtt

SEQ ID NO: 227538 - DNA, 15 bp, Homo sapiens
tgaggttttgtttgt

SEQ ID NO: 227539 - DNA, 15 bp, Homo sapiens
gtgaggttttgtttg

SEQ ID NO: 227540 - DNA, 15 bp, Homo sapiens
tgtgaggttttgttt

SEQ ID NO: 227541 - DNA, 15 bp, Homo sapiens
gtgtgaggttttgtt

SEQ ID NO: 227542 - DNA, 15 bp, Homo sapiens
tgtgtgaggttttgt

SEQ ID NO: 227543 - DNA, 15 bp, Homo sapiens
ctgtgtgaggttttg

SEQ ID NO: 227544 - DNA, 15 bp, Homo sapiens
gctgtgtgaggtttt

SEQ ID NO: 227545 - DNA, 15 bp, Homo sapiens
agctgtgtgaggttt

SEQ ID NO: 227546 - DNA, 15 bp, Homo sapiens
aagctgtgtgaggtt

SEQ ID NO: 227547 - DNA, 15 bp, Homo sapiens
gaagctgtgtgaggt

SEQ ID NO: 227548 - DNA, 15 bp, Homo sapiens
agaagctgtgtgagg

SEQ ID NO: 227549 - DNA, 15 bp, Homo sapiens
tagaagctgtgtgag

SEQ ID NO: 227550 - DNA, 15 bp, Homo sapiens
ttagaagctgtgtga

SEQ ID NO: 227551 - DNA, 15 bp, Homo sapiens
attagaagctgtgtg

SEQ ID NO: 227552 - DNA, 15 bp, Homo sapiens
cattagaagctgtgt

SEQ ID NO: 227553 - DNA, 15 bp, Homo sapiens
acattagaagctgtg

SEQ ID NO: 227554 - DNA, 15 bp, Homo sapiens
cacattagaagctgt

SEQ ID NO: 227555 - DNA, 15 bp, Homo sapiens
acacattagaagctg

SEQ ID NO: 227556 - DNA, 15 bp, Homo sapiens
cacacattagaagct

SEQ ID NO: 227557 - DNA, 15 bp, Homo sapiens
gcacacattagaagc

SEQ ID NO: 227558 - DNA, 15 bp, Homo sapiens
tgcacacattagaag

SEQ ID NO: 227559 - DNA, 15 bp, Homo sapiens
gtgcacacattagaa

SEQ ID NO: 227560 - DNA, 15 bp, Homo sapiens
agtgcacacattaga

SEQ ID NO: 227561 - DNA, 15 bp, Homo sapiens
cagtgcacacattag

SEQ ID NO: 227562 - DNA, 15 bp, Homo sapiens
acagtgcacacatta

SEQ ID NO: 227563 - DNA, 15 bp, Homo sapiens
aacagtgcacacatt

SEQ ID NO: 227564 - DNA, 15 bp, Homo sapiens
gaacagtgcacacat

SEQ ID NO: 227565 - DNA, 15 bp, Homo sapiens
cgaacagtgcacaca

SEQ ID NO: 227566 - DNA, 15 bp, Homo sapiens
tcgaacagtgcacac

SEQ ID NO: 227567 - DNA, 15 bp, Homo sapiens
ttcgaacagtgcaca

SEQ ID NO: 227568 - DNA, 15 bp, Homo sapiens
attcgaacagtgcac

SEQ ID NO: 227569 - DNA, 15 bp, Homo sapiens
cattcgaacagtgca

SEQ ID NO: 227570 - DNA, 15 bp, Homo sapiens
acattcgaacagtgc

SEQ ID NO: 227571 - DNA, 15 bp, Homo sapiens
tacattcgaacagtg

SEQ ID NO: 227572 - DNA, 15 bp, Homo sapiens
ttacattcgaacagt

SEQ ID NO: 227573 - DNA, 15 bp, Homo sapiens
cttacattcgaacag

SEQ ID NO: 227574 - DNA, 15 bp, Homo sapiens
ccttacattcgaaca

SEQ ID NO: 227575 - DNA, 15 bp, Homo sapiens
cccttacattcgaac

SEQ ID NO: 227576 - DNA, 15 bp, Homo sapiens
acccttacattcgaa

SEQ ID NO: 227577 - DNA, 15 bp, Homo sapiens
cacccttacattcga

SEQ ID NO: 227578 - DNA, 15 bp, Homo sapiens
ccacccttacattcg

SEQ ID NO: 227579 - DNA, 15 bp, Homo sapiens
tccacccttacattc

SEQ ID NO: 227580 - DNA, 15 bp, Homo sapiens
ttccacccttacatt

SEQ ID NO: 227581 - DNA, 15 bp, Homo sapiens
tttccacccttacat

SEQ ID NO: 227582 - DNA, 15 bp, Homo sapiens
ttttccacccttaca

SEQ ID NO: 227583 - DNA, 15 bp, Homo sapiens
cttttccacccttac

SEQ ID NO: 227584 - DNA, 15 bp, Homo sapiens
ccttttccaccctta

SEQ ID NO: 227585 - DNA, 15 bp, Homo sapiens
tccttttccaccctt

SEQ ID NO: 227586 - DNA, 15 bp, Homo sapiens
ctccttttccaccct

SEQ ID NO: 227587 - DNA, 15 bp, Homo sapiens
cctccttttccaccc

SEQ ID NO: 227588 - DNA, 15 bp, Homo sapiens
gcctccttttccacc

SEQ ID NO: 227589 - DNA, 15 bp, Homo sapiens
tgcctccttttccac

SEQ ID NO: 227590 - DNA, 15 bp, Homo sapiens
ttgcctccttttcca

SEQ ID NO: 227591 - DNA, 15 bp, Homo sapiens
tttgcctccttttcc

SEQ ID NO: 227592 - DNA, 15 bp, Homo sapiens
ctttgcctccttttc

SEQ ID NO: 227593 - DNA, 15 bp, Homo sapiens
tctttgcctcctttt

SEQ ID NO: 227594 - DNA, 15 bp, Homo sapiens
ttctttgcctccttt

SEQ ID NO: 227595 - DNA, 15 bp, Homo sapiens
tttctttgcctcctt

SEQ ID NO: 227596 - DNA, 15 bp, Homo sapiens
atttctttgcctcct

SEQ ID NO: 227597 - DNA, 15 bp, Homo sapiens
catttctttgcctcc

SEQ ID NO: 227598 - DNA, 15 bp, Homo sapiens
tcatttctttgcctc

SEQ ID NO: 227599 - DNA, 15 bp, Homo sapiens
ctcatttctttgcct

SEQ ID NO: 227600 - DNA, 15 bp, Homo sapiens
gctcatttctttgcc

SEQ ID NO: 227601 - DNA, 15 bp, Homo sapiens
agctcatttctttgc

SEQ ID NO: 227602 - DNA, 15 bp, Homo sapiens
gagctcatttctttg

SEQ ID NO: 227603 - DNA, 15 bp, Homo sapiens
ggagctcatttcttt

SEQ ID NO: 227604 - DNA, 15 bp, Homo sapiens
gggagctcatttctt

SEQ ID NO: 227605 - DNA, 15 bp, Homo sapiens
tgggagctcatttct

SEQ ID NO: 227606 - DNA, 15 bp, Homo sapiens
ttgggagctcatttc

SEQ ID NO: 227607 - DNA, 15 bp, Homo sapiens
tttgggagctcattt

SEQ ID NO: 227608 - DNA, 15 bp, Homo sapiens
ctttgggagctcatt

SEQ ID NO: 227609 - DNA, 15 bp, Homo sapiens
tctttgggagctcat

SEQ ID NO: 227610 - DNA, 15 bp, Homo sapiens
ctctttgggagctca

SEQ ID NO: 227611 - DNA, 15 bp, Homo sapiens
gctctttgggagctc

SEQ ID NO: 227612 - DNA, 15 bp, Homo sapiens
tgctctttgggagct

SEQ ID NO: 227613 - DNA, 15 bp, Homo sapiens
ttgctctttgggagc

SEQ ID NO: 227614 - DNA, 15 bp, Homo sapiens
attgctctttgggag

SEQ ID NO: 227615 - DNA, 15 bp, Homo sapiens
aattgctctttggga

SEQ ID NO: 227616 - DNA, 15 bp, Homo sapiens
gaattgctctttggg

SEQ ID NO: 227617 - DNA, 15 bp, Homo sapiens
ggaattgctctttgg

SEQ ID NO: 227618 - DNA, 15 bp, Homo sapiens
gggaattgctctttg

SEQ ID NO: 227619 - DNA, 15 bp, Homo sapiens
ggggaattgctcttt

SEQ ID NO: 227620 - DNA, 15 bp, Homo sapiens
aggggaattgctctt

SEQ ID NO: 227621 - DNA, 15 bp, Homo sapiens
aaggggaattgctct

SEQ ID NO: 227622 - DNA, 15 bp, Homo sapiens
gaaggggaattgctc

SEQ ID NO: 227623 - DNA, 15 bp, Homo sapiens
agaaggggaattgct

SEQ ID NO: 227624 - DNA, 15 bp, Homo sapiens
gagaaggggaattgc

SEQ ID NO: 227625 - DNA, 15 bp, Homo sapiens
agagaaggggaattg

SEQ ID NO: 227626 - DNA, 15 bp, Homo sapiens
gagagaaggggaatt

SEQ ID NO: 227627 - DNA, 15 bp, Homo sapiens
cgagagaaggggaat

SEQ ID NO: 227628 - DNA, 15 bp, Homo sapiens
gcgagagaaggggaa

SEQ ID NO: 227629 - DNA, 15 bp, Homo sapiens
ggcgagagaagggga

SEQ ID NO: 227630 - DNA, 15 bp, Homo sapiens
aggcgagagaagggg

SEQ ID NO: 227631 - DNA, 15 bp, Homo sapiens
gaggcgagagaaggg

SEQ ID NO: 227632 - DNA, 15 bp, Homo sapiens
ggaggcgagagaagg

SEQ ID NO: 227633 - DNA, 15 bp, Homo sapiens
tggaggcgagagaag

SEQ ID NO: 227634 - DNA, 15 bp, Homo sapiens
atggaggcgagagaa

SEQ ID NO: 227635 - DNA, 15 bp, Homo sapiens
gatggaggcgagaga

SEQ ID NO: 227636 - DNA, 15 bp, Homo sapiens
ggatggaggcgagag

SEQ ID NO: 227637 - DNA, 15 bp, Homo sapiens
gggatggaggcgaga

SEQ ID NO: 227638 - DNA, 15 bp, Homo sapiens
agggatggaggcgag

SEQ ID NO: 227639 - DNA, 15 bp, Homo sapiens
aagggatggaggcga

SEQ ID NO: 227640 - DNA, 15 bp, Homo sapiens
caagggatggaggcg

SEQ ID NO: 227641 - DNA, 15 bp, Homo sapiens
tcaagggatggaggc

SEQ ID NO: 227642 - DNA, 15 bp, Homo sapiens
gtcaagggatggagg

SEQ ID NO: 227643 - DNA, 15 bp, Homo sapiens
cgtcaagggatggag

SEQ ID NO: 227644 - DNA, 15 bp, Homo sapiens
tcgtcaagggatgga

SEQ ID NO: 227645 - DNA, 15 bp, Homo sapiens
gtcgtcaagggatgg

SEQ ID NO: 227646 - DNA, 15 bp, Homo sapiens
ggtcgtcaagggatg

SEQ ID NO: 227647 - DNA, 15 bp, Homo sapiens
aggtcgtcaagggat

SEQ ID NO: 227648 - DNA, 15 bp, Homo sapiens
gaggtcgtcaaggga

SEQ ID NO: 227649 - DNA, 15 bp, Homo sapiens
ggaggtcgtcaaggg

SEQ ID NO: 227650 - DNA, 15 bp, Homo sapiens
gggaggtcgtcaagg

SEQ ID NO: 227651 - DNA, 15 bp, Homo sapiens
agggaggtcgtcaag

SEQ ID NO: 227652 - DNA, 15 bp, Homo sapiens
gagggaggtcgtcaa

SEQ ID NO: 227653 - DNA, 15 bp, Homo sapiens
ggagggaggtcgtca

SEQ ID NO: 227654 - DNA, 15 bp, Homo sapiens
gggagggaggtcgtc

SEQ ID NO: 227655 - DNA, 15 bp, Homo sapiens
tgggagggaggtcgt

SEQ ID NO: 227656 - DNA, 15 bp, Homo sapiens
gtgggagggaggtcg

SEQ ID NO: 227657 - DNA, 15 bp, Homo sapiens
agtgggagggaggtc

SEQ ID NO: 227658 - DNA, 15 bp, Homo sapiens
tagtgggagggaggt

SEQ ID NO: 227659 - DNA, 15 bp, Homo sapiens
ttagtgggagggagg

SEQ ID NO: 227660 - DNA, 15 bp, Homo sapiens
tttagtgggagggag

SEQ ID NO: 227661 - DNA, 15 bp, Homo sapiens
ctttagtgggaggga

SEQ ID NO: 227662 - DNA, 15 bp, Homo sapiens
cctttagtgggaggg

SEQ ID NO: 227663 - DNA, 15 bp, Homo sapiens
ccctttagtgggagg

SEQ ID NO: 227664 - DNA, 15 bp, Homo sapiens
tccctttagtgggag

SEQ ID NO: 227665 - DNA, 15 bp, Homo sapiens
ttccctttagtggga

SEQ ID NO: 227666 - DNA, 15 bp, Homo sapiens
tttccctttagtggg

SEQ ID NO: 227667 - DNA, 15 bp, Homo sapiens
gtttccctttagtgg

SEQ ID NO: 227668 - DNA, 15 bp, Homo sapiens
tgtttccctttagtg

SEQ ID NO: 227669 - DNA, 15 bp, Homo sapiens
atgtttccctttagt

SEQ ID NO: 227670 - DNA, 15 bp, Homo sapiens
aatgtttccctttag

SEQ ID NO: 227671 - DNA, 15 bp, Homo sapiens
caatgtttcccttta

SEQ ID NO: 227672 - DNA, 15 bp, Homo sapiens
acaatgtttcccttt

SEQ ID NO: 227673 - DNA, 15 bp, Homo sapiens
aacaatgtttccctt

SEQ ID NO: 227674 - DNA, 15 bp, Homo sapiens
aaacaatgtttccct

SEQ ID NO: 227675 - DNA, 15 bp, Homo sapiens
aaaacaatgtttccc

SEQ ID NO: 227676 - DNA, 15 bp, Homo sapiens
gaaaacaatgtttcc

SEQ ID NO: 227677 - DNA, 15 bp, Homo sapiens
agaaaacaatgtttc

SEQ ID NO: 227678 - DNA, 15 bp, Homo sapiens
aagaaaacaatgttt

SEQ ID NO: 227679 - DNA, 15 bp, Homo sapiens
taagaaaacaatgtt

SEQ ID NO: 227680 - DNA, 15 bp, Homo sapiens
ctaagaaaacaatgt

SEQ ID NO: 227681 - DNA, 15 bp, Homo sapiens
cctaagaaaacaatg

SEQ ID NO: 227682 - DNA, 15 bp, Homo sapiens
acctaagaaaacaat

SEQ ID NO: 227683 - DNA, 15 bp, Homo sapiens
tacctaagaaaacaa

SEQ ID NO: 227684 - DNA, 15 bp, Homo sapiens
ttacctaagaaaaca

SEQ ID NO: 227685 - DNA, 15 bp, Homo sapiens
attacctaagaaaac

SEQ ID NO: 227686 - DNA, 15 bp, Homo sapiens
tattacctaagaaaa

SEQ ID NO: 227687 - DNA, 15 bp, Homo sapiens
ttattacctaagaaa

SEQ ID NO: 227688 - DNA, 15 bp, Homo sapiens
tttattacctaagaa

SEQ ID NO: 227689 - DNA, 15 bp, Homo sapiens
atttattacctaaga

SEQ ID NO: 227690 - DNA, 15 bp, Homo sapiens
aatttattacctaag

SEQ ID NO: 227691 - DNA, 15 bp, Homo sapiens
gaatttattacctaa

SEQ ID NO: 227692 - DNA, 15 bp, Homo sapiens
agaatttattaccta

SEQ ID NO: 227693 - DNA, 15 bp, Homo sapiens
cagaatttattacct

SEQ ID NO: 227694 - DNA, 15 bp, Homo sapiens
gcagaatttattacc

SEQ ID NO: 227695 - DNA, 15 bp, Homo sapiens
tgcagaatttattac

SEQ ID NO: 227696 - DNA, 15 bp, Homo sapiens
ttgcagaatttatta

SEQ ID NO: 227697 - DNA, 15 bp, Homo sapiens
attgcagaatttatt

SEQ ID NO: 227698 - DNA, 15 bp, Homo sapiens
aattgcagaatttat

SEQ ID NO: 227699 - DNA, 15 bp, Homo sapiens
aaattgcagaattta

SEQ ID NO: 227700 - DNA, 15 bp, Homo sapiens
gaaattgcagaattt

SEQ ID NO: 227701 - DNA, 15 bp, Homo sapiens
agaaattgcagaatt

SEQ ID NO: 227702 - DNA, 15 bp, Homo sapiens
gagaaattgcagaat

SEQ ID NO: 227703 - DNA, 15 bp, Homo sapiens
tgagaaattgcagaa

SEQ ID NO: 227704 - DNA, 15 bp, Homo sapiens
ttgagaaattgcaga

SEQ ID NO: 227705 - DNA, 15 bp, Homo sapiens
cttgagaaattgcag

SEQ ID NO: 227706 - DNA, 15 bp, Homo sapiens
acttgagaaattgca

SEQ ID NO: 227707 - DNA, 15 bp, Homo sapiens
gacttgagaaattgc

SEQ ID NO: 227708 - DNA, 15 bp, Homo sapiens
ggacttgagaaattg

SEQ ID NO: 227709 - DNA, 15 bp, Homo sapiens
tggacttgagaaatt

SEQ ID NO: 227710 - DNA, 15 bp, Homo sapiens
atggacttgagaaat

SEQ ID NO: 227711 - DNA, 15 bp, Homo sapiens
aatggacttgagaaa

SEQ ID NO: 227712 - DNA, 15 bp, Homo sapiens
taatggacttgagaa

SEQ ID NO: 227713 - DNA, 15 bp, Homo sapiens
ttaatggacttgaga

SEQ ID NO: 227714 - DNA, 15 bp, Homo sapiens
gttaatggacttgag

SEQ ID NO: 227715 - DNA, 15 bp, Homo sapiens
tgttaatggacttga

SEQ ID NO: 227716 - DNA, 15 bp, Homo sapiens
atgttaatggacttg

SEQ ID NO: 227717 - DNA, 15 bp, Homo sapiens
gatgttaatggactt

SEQ ID NO: 227718 - DNA, 15 bp, Homo sapiens
ggatgttaatggact

SEQ ID NO: 227719 - DNA, 15 bp, Homo sapiens
tggatgttaatggac

SEQ ID NO: 227720 - DNA, 15 bp, Homo sapiens
gtggatgttaatgga

SEQ ID NO: 227721 - DNA, 15 bp, Homo sapiens
agtggatgttaatgg

SEQ ID NO: 227722 - DNA, 15 bp, Homo sapiens
cagtggatgttaatg

SEQ ID NO: 227723 - DNA, 15 bp, Homo sapiens
ccagtggatgttaat

SEQ ID NO: 227724 - DNA, 15 bp, Homo sapiens
cccagtggatgttaa

SEQ ID NO: 227725 - DNA, 15 bp, Homo sapiens
gcccagtggatgtta

SEQ ID NO: 227726 - DNA, 15 bp, Homo sapiens
tgcccagtggatgtt

SEQ ID NO: 227727 - DNA, 15 bp, Homo sapiens
ttgcccagtggatgt

SEQ ID NO: 227728 - DNA, 15 bp, Homo sapiens
cttgcccagtggatg

SEQ ID NO: 227729 - DNA, 15 bp, Homo sapiens
tcttgcccagtggat

SEQ ID NO: 227730 - DNA, 15 bp, Homo sapiens
atcttgcccagtgga

SEQ ID NO: 227731 - DNA, 15 bp, Homo sapiens
catcttgcccagtgg

SEQ ID NO: 227732 - DNA, 15 bp, Homo sapiens
tcatcttgcccagtg

SEQ ID NO: 227733 - DNA, 15 bp, Homo sapiens
ctcatcttgcccagt

SEQ ID NO: 227734 - DNA, 15 bp, Homo sapiens
tctcatcttgcccag

SEQ ID NO: 227735 - DNA, 15 bp, Homo sapiens
atctcatcttgccca

SEQ ID NO: 227736 - DNA, 15 bp, Homo sapiens
gatctcatcttgccc

SEQ ID NO: 227737 - DNA, 15 bp, Homo sapiens
agatctcatcttgcc

SEQ ID NO: 227738 - DNA, 15 bp, Homo sapiens
tagatctcatcttgc

SEQ ID NO: 227739 - DNA, 15 bp, Homo sapiens
atagatctcatcttg

SEQ ID NO: 227740 - DNA, 15 bp, Homo sapiens
aatagatctcatctt

SEQ ID NO: 227741 - DNA, 15 bp, Homo sapiens
gaatagatctcatct

SEQ ID NO: 227742 - DNA, 15 bp, Homo sapiens
agaatagatctcatc

SEQ ID NO: 227743 - DNA, 15 bp, Homo sapiens
aagaatagatctcat

SEQ ID NO: 227744 - DNA, 15 bp, Homo sapiens
aaagaatagatctca

SEQ ID NO: 227745 - DNA, 15 bp, Homo sapiens
aaaagaatagatctc

SEQ ID NO: 227746 - DNA, 15 bp, Homo sapiens
aaaaagaatagatct

SEQ ID NO: 227747 - DNA, 15 bp, Homo sapiens
taaaaagaatagatc

SEQ ID NO: 227748 - DNA, 15 bp, Homo sapiens
ataaaaagaatagat

SEQ ID NO: 227749 - DNA, 15 bp, Homo sapiens
aataaaaagaataga

SEQ ID NO: 227750 - DNA, 15 bp, Homo sapiens
aaataaaaagaatag

SEQ ID NO: 227751 - DNA, 15 bp, Homo sapiens
caaataaaaagaata

SEQ ID NO: 227752 - DNA, 15 bp, Homo sapiens
gcaaataaaaagaat

SEQ ID NO: 227753 - DNA, 15 bp, Homo sapiens
ggcaaataaaaagaa

SEQ ID NO: 227754 - DNA, 15 bp, Homo sapiens
gggcaaataaaaaga

SEQ ID NO: 227755 - DNA, 15 bp, Homo sapiens
tgggcaaataaaaag

SEQ ID NO: 227756 - DNA, 15 bp, Homo sapiens
atgggcaaataaaaa

SEQ ID NO: 227757 - DNA, 15 bp, Homo sapiens
tatgggcaaataaaa

SEQ ID NO: 227758 - DNA, 15 bp, Homo sapiens
ctatgggcaaataaa

SEQ ID NO: 227759 - DNA, 15 bp, Homo sapiens
cctatgggcaaataa

SEQ ID NO: 227760 - DNA, 15 bp, Homo sapiens
tcctatgggcaaata

SEQ ID NO: 227761 - DNA, 15 bp, Homo sapiens
ttcctatgggcaaat

SEQ ID NO: 227762 - DNA, 15 bp, Homo sapiens
tttcctatgggcaaa

SEQ ID NO: 227763 - DNA, 15 bp, Homo sapiens
ttttcctatgggcaa

SEQ ID NO: 227764 - DNA, 15 bp, Homo sapiens
cttttcctatgggca

SEQ ID NO: 227765 - DNA, 15 bp, Homo sapiens
tcttttcctatgggc

SEQ ID NO: 227766 - DNA, 15 bp, Homo sapiens
ttcttttcctatggg

SEQ ID NO: 227767 - DNA, 15 bp, Homo sapiens
attcttttcctatgg

SEQ ID NO: 227768 - DNA, 15 bp, Homo sapiens
tattcttttcctatg

SEQ ID NO: 227769 - DNA, 15 bp, Homo sapiens
ctattcttttcctat

SEQ ID NO: 227770 - DNA, 15 bp, Homo sapiens
actattcttttccta

SEQ ID NO: 227771 - DNA, 15 bp, Homo sapiens
cactattcttttcct

SEQ ID NO: 227772 - DNA, 15 bp, Homo sapiens
gcactattcttttcc

SEQ ID NO: 227773 - DNA, 15 bp, Homo sapiens
agcactattcttttc

SEQ ID NO: 227774 - DNA, 15 bp, Homo sapiens
aagcactattctttt

SEQ ID NO: 227775 - DNA, 15 bp, Homo sapiens
aaagcactattcttt

SEQ ID NO: 227776 - DNA, 15 bp, Homo sapiens
aaaagcactattctt

SEQ ID NO: 227777 - DNA, 15 bp, Homo sapiens
aaaaagcactattct

SEQ ID NO: 227778 - DNA, 15 bp, Homo sapiens
aaaaaagcactattc

SEQ ID NO: 227779 - DNA, 15 bp, Homo sapiens
caaaaaagcactatt

SEQ ID NO: 227780 - DNA, 15 bp, Homo sapiens
gcaaaaaagcactat

SEQ ID NO: 227781 - DNA, 15 bp, Homo sapiens
tgcaaaaaagcacta

SEQ ID NO: 227782 - DNA, 15 bp, Homo sapiens
ttgcaaaaaagcact

SEQ ID NO: 227783 - DNA, 15 bp, Homo sapiens
attgcaaaaaagcac

SEQ ID NO: 227784 - DNA, 15 bp, Homo sapiens
tattgcaaaaaagca

SEQ ID NO: 227785 - DNA, 15 bp, Homo sapiens
atattgcaaaaaagc

SEQ ID NO: 227786 - DNA, 15 bp, Homo sapiens
aatattgcaaaaaag

SEQ ID NO: 227787 - DNA, 15 bp, Homo sapiens
gaatattgcaaaaaa

SEQ ID NO: 227788 - DNA, 15 bp, Homo sapiens
tgaatattgcaaaaa

SEQ ID NO: 227789 - DNA, 15 bp, Homo sapiens
gtgaatattgcaaaa

SEQ ID NO: 227790 - DNA, 15 bp, Homo sapiens
agtgaatattgcaaa

SEQ ID NO: 227791 - DNA, 15 bp, Homo sapiens
tagtgaatattgcaa

SEQ ID NO: 227792 - DNA, 15 bp, Homo sapiens
ctagtgaatattgca

SEQ ID NO: 227793 - DNA, 15 bp, Homo sapiens
tctagtgaatattgc

SEQ ID NO: 227794 - DNA, 15 bp, Homo sapiens
atctagtgaatattg

SEQ ID NO: 227795 - DNA, 15 bp, Homo sapiens
tatctagtgaatatt

SEQ ID NO: 227796 - DNA, 15 bp, Homo sapiens
ttatctagtgaatat

SEQ ID NO: 227797 - DNA, 15 bp, Homo sapiens
gttatctagtgaata

SEQ ID NO: 227798 - DNA, 15 bp, Homo sapiens
tgttatctagtgaat

SEQ ID NO: 227799 - DNA, 15 bp, Homo sapiens
gtgttatctagtgaa

SEQ ID NO: 227800 - DNA, 15 bp, Homo sapiens
tgtgttatctagtga

SEQ ID NO: 227801 - DNA, 15 bp, Homo sapiens
ctgtgttatctagtg

SEQ ID NO: 227802 - DNA, 15 bp, Homo sapiens
tctgtgttatctagt

SEQ ID NO: 227803 - DNA, 15 bp, Homo sapiens
ctctgtgttatctag

SEQ ID NO: 227804 - DNA, 15 bp, Homo sapiens
actctgtgttatcta

SEQ ID NO: 227805 - DNA, 15 bp, Homo sapiens
aactctgtgttatct

SEQ ID NO: 227806 - DNA, 15 bp, Homo sapiens
caactctgtgttatc

SEQ ID NO: 227807 - DNA, 15 bp, Homo sapiens
tcaactctgtgttat

SEQ ID NO: 227808 - DNA, 15 bp, Homo sapiens
gtcaactctgtgtta

SEQ ID NO: 227809 - DNA, 15 bp, Homo sapiens
agtcaactctgtgtt

SEQ ID NO: 227810 - DNA, 15 bp, Homo sapiens
aagtcaactctgtgt

SEQ ID NO: 227811 - DNA, 15 bp, Homo sapiens
aaagtcaactctgtg

SEQ ID NO: 227812 - DNA, 15 bp, Homo sapiens
aaaagtcaactctgt

SEQ ID NO: 227813 - DNA, 15 bp, Homo sapiens
taaaagtcaactctg

SEQ ID NO: 227814 - DNA, 15 bp, Homo sapiens
ttaaaagtcaactct

SEQ ID NO: 227815 - DNA, 15 bp, Homo sapiens
attaaaagtcaactc

SEQ ID NO: 227816 - DNA, 15 bp, Homo sapiens
gattaaaagtcaact

SEQ ID NO: 227817 - DNA, 15 bp, Homo sapiens
ggattaaaagtcaac

SEQ ID NO: 227818 - DNA, 15 bp, Homo sapiens
tggattaaaagtcaa

SEQ ID NO: 227819 - DNA, 15 bp, Homo sapiens
ttggattaaaagtca

SEQ ID NO: 227820 - DNA, 15 bp, Homo sapiens
cttggattaaaagtc

SEQ ID NO: 227821 - DNA, 15 bp, Homo sapiens
ccttggattaaaagt

SEQ ID NO: 227822 - DNA, 15 bp, Homo sapiens
cccttggattaaaag

SEQ ID NO: 227823 - DNA, 15 bp, Homo sapiens
gcccttggattaaaa

SEQ ID NO: 227824 - DNA, 15 bp, Homo sapiens
tgcccttggattaaa

SEQ ID NO: 227825 - DNA, 15 bp, Homo sapiens
ttgcccttggattaa

SEQ ID NO: 227826 - DNA, 15 bp, Homo sapiens
gttgcccttggatta

SEQ ID NO: 227827 - DNA, 15 bp, Homo sapiens
tgttgcccttggatt

SEQ ID NO: 227828 - DNA, 15 bp, Homo sapiens
atgttgcccttggat

SEQ ID NO: 227829 - DNA, 15 bp, Homo sapiens
aatgttgcccttgga

SEQ ID NO: 227830 - DNA, 15 bp, Homo sapiens
caatgttgcccttgg

SEQ ID NO: 227831 - DNA, 15 bp, Homo sapiens
tcaatgttgcccttg

SEQ ID NO: 227832 - DNA, 15 bp, Homo sapiens
atcaatgttgccctt

SEQ ID NO: 227833 - DNA, 15 bp, Homo sapiens
tatcaatgttgccct

SEQ ID NO: 227834 - DNA, 15 bp, Homo sapiens
ctatcaatgttgccc

SEQ ID NO: 227835 - DNA, 15 bp, Homo sapiens
actatcaatgttgcc

SEQ ID NO: 227836 - DNA, 15 bp, Homo sapiens
gactatcaatgttgc

SEQ ID NO: 227837 - DNA, 15 bp, Homo sapiens
agactatcaatgttg

SEQ ID NO: 227838 - DNA, 15 bp, Homo sapiens
gagactatcaatgtt

SEQ ID NO: 227839 - DNA, 15 bp, Homo sapiens
agagactatcaatgt

SEQ ID NO: 227840 - DNA, 15 bp, Homo sapiens
tagagactatcaatg

SEQ ID NO: 227841 - DNA, 15 bp, Homo sapiens
ctagagactatcaat

SEQ ID NO: 227842 - DNA, 15 bp, Homo sapiens
actagagactatcaa

SEQ ID NO: 227843 - DNA, 15 bp, Homo sapiens
aactagagactatca

SEQ ID NO: 227844 - DNA, 15 bp, Homo sapiens
taactagagactatc

SEQ ID NO: 227845 - DNA, 15 bp, Homo sapiens
ttaactagagactat

SEQ ID NO: 227846 - DNA, 15 bp, Homo sapiens
tttaactagagacta

SEQ ID NO: 227847 - DNA, 15 bp, Homo sapiens
ctttaactagagact

SEQ ID NO: 227848 - DNA, 15 bp, Homo sapiens
cctttaactagagac

SEQ ID NO: 227849 - DNA, 15 bp, Homo sapiens
ccctttaactagaga

SEQ ID NO: 227850 - DNA, 15 bp, Homo sapiens
cccctttaactagag

SEQ ID NO: 227851 - DNA, 15 bp, Homo sapiens
tcccctttaactaga

SEQ ID NO: 227852 - DNA, 15 bp, Homo sapiens
ttcccctttaactag

SEQ ID NO: 227853 - DNA, 15 bp, Homo sapiens
cttcccctttaacta

SEQ ID NO: 227854 - DNA, 15 bp, Homo sapiens
gcttcccctttaact

SEQ ID NO: 227855 - DNA, 15 bp, Homo sapiens
ggcttcccctttaac

SEQ ID NO: 227856 - DNA, 15 bp, Homo sapiens
aggcttcccctttaa

SEQ ID NO: 227857 - DNA, 15 bp, Homo sapiens
aaggcttccccttta

SEQ ID NO: 227858 - DNA, 15 bp, Homo sapiens
gaaggcttccccttt

SEQ ID NO: 227859 - DNA, 15 bp, Homo sapiens
tgaaggcttcccctt

SEQ ID NO: 227860 - DNA, 15 bp, Homo sapiens
ctgaaggcttcccct

SEQ ID NO: 227861 - DNA, 15 bp, Homo sapiens
cctgaaggcttcccc

SEQ ID NO: 227862 - DNA, 15 bp, Homo sapiens
tcctgaaggcttccc

SEQ ID NO: 227863 - DNA, 15 bp, Homo sapiens
ctcctgaaggcttcc

SEQ ID NO: 227864 - DNA, 15 bp, Homo sapiens
gctcctgaaggcttc

SEQ ID NO: 227865 - DNA, 15 bp, Homo sapiens
tgctcctgaaggctt

SEQ ID NO: 227866 - DNA, 15 bp, Homo sapiens
ttgctcctgaaggct

SEQ ID NO: 227867 - DNA, 15 bp, Homo sapiens
attgctcctgaaggc

SEQ ID NO: 227868 - DNA, 15 bp, Homo sapiens
cattgctcctgaagg

SEQ ID NO: 227869 - DNA, 15 bp, Homo sapiens
tcattgctcctgaag

SEQ ID NO: 227870 - DNA, 15 bp, Homo sapiens
ttcattgctcctgaa

SEQ ID NO: 227871 - DNA, 15 bp, Homo sapiens
tttcattgctcctga

SEQ ID NO: 227872 - DNA, 15 bp, Homo sapiens
ttttcattgctcctg

SEQ ID NO: 227873 - DNA, 15 bp, Homo sapiens
cttttcattgctcct

SEQ ID NO: 227874 - DNA, 15 bp, Homo sapiens
tcttttcattgctcc

SEQ ID NO: 227875 - DNA, 15 bp, Homo sapiens
atcttttcattgctc

SEQ ID NO: 227876 - DNA, 15 bp, Homo sapiens
aatcttttcattgct

SEQ ID NO: 227877 - DNA, 15 bp, Homo sapiens
taatcttttcattgc

SEQ ID NO: 227878 - DNA, 15 bp, Homo sapiens
ttaatcttttcattg

SEQ ID NO: 227879 - DNA, 15 bp, Homo sapiens
attaatcttttcatt

SEQ ID NO: 227880 - DNA, 15 bp, Homo sapiens
tattaatcttttcat

SEQ ID NO: 227881 - DNA, 15 bp, Homo sapiens
ctattaatcttttca

SEQ ID NO: 227882 - DNA, 15 bp, Homo sapiens
actattaatcttttc

SEQ ID NO: 227883 - DNA, 15 bp, Homo sapiens
aactattaatctttt

SEQ ID NO: 227884 - DNA, 15 bp, Homo sapiens
aaactattaatcttt

SEQ ID NO: 227885 - DNA, 15 bp, Homo sapiens
aaaactattaatctt

SEQ ID NO: 227886 - DNA, 15 bp, Homo sapiens
taaaactattaatct

SEQ ID NO: 227887 - DNA, 15 bp, Homo sapiens
ctaaaactattaatc

SEQ ID NO: 227888 - DNA, 15 bp, Homo sapiens
tctaaaactattaat

SEQ ID NO: 227889 - DNA, 15 bp, Homo sapiens
atctaaaactattaa

SEQ ID NO: 227890 - DNA, 15 bp, Homo sapiens
catctaaaactatta

SEQ ID NO: 227891 - DNA, 15 bp, Homo sapiens
tcatctaaaactatt

SEQ ID NO: 227892 - DNA, 15 bp, Homo sapiens
ttcatctaaaactat

SEQ ID NO: 227893 - DNA, 15 bp, Homo sapiens
cttcatctaaaacta

SEQ ID NO: 227894 - DNA, 15 bp, Homo sapiens
gcttcatctaaaact

SEQ ID NO: 227895 - DNA, 15 bp, Homo sapiens
tgcttcatctaaaac

SEQ ID NO: 227896 - DNA, 15 bp, Homo sapiens
ctgcttcatctaaaa

SEQ ID NO: 227897 - DNA, 15 bp, Homo sapiens
tctgcttcatctaaa

SEQ ID NO: 227898 - DNA, 15 bp, Homo sapiens
ttctgcttcatctaa

SEQ ID NO: 227899 - DNA, 15 bp, Homo sapiens
attctgcttcatcta

SEQ ID NO: 227900 - DNA, 15 bp, Homo sapiens
gattctgcttcatct

SEQ ID NO: 227901 - DNA, 15 bp, Homo sapiens
ggattctgcttcatc

SEQ ID NO: 227902 - DNA, 15 bp, Homo sapiens
tggattctgcttcat

SEQ ID NO: 227903 - DNA, 15 bp, Homo sapiens
ttggattctgcttca

SEQ ID NO: 227904 - DNA, 15 bp, Homo sapiens
tttggattctgcttc

SEQ ID NO: 227905 - DNA, 15 bp, Homo sapiens
atttggattctgctt

SEQ ID NO: 227906 - DNA, 15 bp, Homo sapiens
gatttggattctgct

SEQ ID NO: 227907 - DNA, 15 bp, Homo sapiens
ggatttggattctgc

SEQ ID NO: 227908 - DNA, 15 bp, Homo sapiens
gggatttggattctg

SEQ ID NO: 227909 - DNA, 15 bp, Homo sapiens
agggatttggattct

SEQ ID NO: 227910 - DNA, 15 bp, Homo sapiens
aagggatttggattc

SEQ ID NO: 227911 - DNA, 15 bp, Homo sapiens
aaagggatttggatt

SEQ ID NO: 227912 - DNA, 15 bp, Homo sapiens
aaaagggatttggat

SEQ ID NO: 227913 - DNA, 15 bp, Homo sapiens
aaaaagggatttgga

SEQ ID NO: 227914 - DNA, 15 bp, Homo sapiens
taaaaagggatttgg

SEQ ID NO: 227915 - DNA, 15 bp, Homo sapiens
ataaaaagggatttg

SEQ ID NO: 227916 - DNA, 15 bp, Homo sapiens
cataaaaagggattt

SEQ ID NO: 227917 - DNA, 15 bp, Homo sapiens
tcataaaaagggatt

SEQ ID NO: 227918 - DNA, 15 bp, Homo sapiens
ctcataaaaagggat

SEQ ID NO: 227919 - DNA, 15 bp, Homo sapiens
actcataaaaaggga

SEQ ID NO: 227920 - DNA, 15 bp, Homo sapiens
aactcataaaaaggg

SEQ ID NO: 227921 - DNA, 15 bp, Homo sapiens
aaactcataaaaagg

SEQ ID NO: 227922 - DNA, 15 bp, Homo sapiens
aaaactcataaaaag

SEQ ID NO: 227923 - DNA, 15 bp, Homo sapiens
caaaactcataaaaa

SEQ ID NO: 227924 - DNA, 15 bp, Homo sapiens
tcaaaactcataaaa

SEQ ID NO: 227925 - DNA, 15 bp, Homo sapiens
ttcaaaactcataaa

SEQ ID NO: 227926 - DNA, 15 bp, Homo sapiens
tttcaaaactcataa

SEQ ID NO: 227927 - DNA, 15 bp, Homo sapiens
atttcaaaactcata

SEQ ID NO: 227928 - DNA, 15 bp, Homo sapiens
tatttcaaaactcat

SEQ ID NO: 227929 - DNA, 15 bp, Homo sapiens
atatttcaaaactca

SEQ ID NO: 227930 - DNA, 15 bp, Homo sapiens
gatatttcaaaactc

SEQ ID NO: 227931 - DNA, 15 bp, Homo sapiens
ggatatttcaaaact

SEQ ID NO: 227932 - DNA, 15 bp, Homo sapiens
tggatatttcaaaac

SEQ ID NO: 227933 - DNA, 15 bp, Homo sapiens
ctggatatttcaaaa

SEQ ID NO: 227934 - DNA, 15 bp, Homo sapiens
actggatatttcaaa

SEQ ID NO: 227935 - DNA, 15 bp, Homo sapiens
aactggatatttcaa

SEQ ID NO: 227936 - DNA, 15 bp, Homo sapiens
aaactggatatttca

SEQ ID NO: 227937 - DNA, 15 bp, Homo sapiens
caaactggatatttc

SEQ ID NO: 227938 - DNA, 15 bp, Homo sapiens
acaaactggatattt

SEQ ID NO: 227939 - DNA, 15 bp, Homo sapiens
tacaaactggatatt

SEQ ID NO: 227940 - DNA, 15 bp, Homo sapiens
atacaaactggatat

SEQ ID NO: 227941 - DNA, 15 bp, Homo sapiens
catacaaactggata

SEQ ID NO: 227942 - DNA, 15 bp, Homo sapiens
gcatacaaactggat

SEQ ID NO: 227943 - DNA, 15 bp, Homo sapiens
agcatacaaactgga

SEQ ID NO: 227944 - DNA, 15 bp, Homo sapiens
gagcatacaaactgg

SEQ ID NO: 227945 - DNA, 15 bp, Homo sapiens
tgagcatacaaactg

SEQ ID NO: 227946 - DNA, 15 bp, Homo sapiens
gtgagcatacaaact

SEQ ID NO: 227947 - DNA, 15 bp, Homo sapiens
ggtgagcatacaaac

SEQ ID NO: 227948 - DNA, 15 bp, Homo sapiens
aggtgagcatacaaa

SEQ ID NO: 227949 - DNA, 15 bp, Homo sapiens
gaggtgagcatacaa

SEQ ID NO: 227950 - DNA, 15 bp, Homo sapiens
tgaggtgagcataca

SEQ ID NO: 227951 - DNA, 15 bp, Homo sapiens
ttgaggtgagcatac

SEQ ID NO: 227952 - DNA, 15 bp, Homo sapiens
attgaggtgagcata

SEQ ID NO: 227953 - DNA, 15 bp, Homo sapiens
tattgaggtgagcat

SEQ ID NO: 227954 - DNA, 15 bp, Homo sapiens
gtattgaggtgagca

SEQ ID NO: 227955 - DNA, 15 bp, Homo sapiens
agtattgaggtgagc

SEQ ID NO: 227956 - DNA, 15 bp, Homo sapiens
aagtattgaggtgag

SEQ ID NO: 227957 - DNA, 15 bp, Homo sapiens
taagtattgaggtga

SEQ ID NO: 227958 - DNA, 15 bp, Homo sapiens
ttaagtattgaggtg

SEQ ID NO: 227959 - DNA, 15 bp, Homo sapiens
tttaagtattgaggt

SEQ ID NO: 227960 - DNA, 15 bp, Homo sapiens
ctttaagtattgagg

SEQ ID NO: 227961 - DNA, 15 bp, Homo sapiens
gctttaagtattgag

SEQ ID NO: 227962 - DNA, 15 bp, Homo sapiens
ggctttaagtattga

SEQ ID NO: 227963 - DNA, 15 bp, Homo sapiens
gggctttaagtattg

SEQ ID NO: 227964 - DNA, 15 bp, Homo sapiens
tgggctttaagtatt

SEQ ID NO: 227965 - DNA, 15 bp, Homo sapiens
ctgggctttaagtat

SEQ ID NO: 227966 - DNA, 15 bp, Homo sapiens
actgggctttaagta

SEQ ID NO: 227967 - DNA, 15 bp, Homo sapiens
aactgggctttaagt

SEQ ID NO: 227968 - DNA, 15 bp, Homo sapiens
taactgggctttaag

SEQ ID NO: 227969 - DNA, 15 bp, Homo sapiens
gtaactgggctttaa

SEQ ID NO: 227970 - DNA, 15 bp, Homo sapiens
agtaactgggcttta

SEQ ID NO: 227971 - DNA, 15 bp, Homo sapiens
cagtaactgggcttt

SEQ ID NO: 227972 - DNA, 15 bp, Homo sapiens
tcagtaactgggctt

SEQ ID NO: 227973 - DNA, 15 bp, Homo sapiens
atcagtaactgggct

SEQ ID NO: 227974 - DNA, 15 bp, Homo sapiens
aatcagtaactgggc

SEQ ID NO: 227975 - DNA, 15 bp, Homo sapiens
gaatcagtaactggg

SEQ ID NO: 227976 - DNA, 15 bp, Homo sapiens
ggaatcagtaactgg

SEQ ID NO: 227977 - DNA, 15 bp, Homo sapiens
aggaatcagtaactg

SEQ ID NO: 227978 - DNA, 15 bp, Homo sapiens
aaggaatcagtaact

SEQ ID NO: 227979 - DNA, 15 bp, Homo sapiens
aaaggaatcagtaac

SEQ ID NO: 227980 - DNA, 15 bp, Homo sapiens
caaaggaatcagtaa

SEQ ID NO: 227981 - DNA, 15 bp, Homo sapiens
ccaaaggaatcagta

SEQ ID NO: 227982 - DNA, 15 bp, Homo sapiens
gccaaaggaatcagt

SEQ ID NO: 227983 - DNA, 15 bp, Homo sapiens
ggccaaaggaatcag

SEQ ID NO: 227984 - DNA, 15 bp, Homo sapiens
aggccaaaggaatca

SEQ ID NO: 227985 - DNA, 15 bp, Homo sapiens
taggccaaaggaatc

SEQ ID NO: 227986 - DNA, 15 bp, Homo sapiens
ttaggccaaaggaat

SEQ ID NO: 227987 - DNA, 15 bp, Homo sapiens
cttaggccaaaggaa

SEQ ID NO: 227988 - DNA, 15 bp, Homo sapiens
gcttaggccaaagga

SEQ ID NO: 227989 - DNA, 15 bp, Homo sapiens
tgcttaggccaaagg

SEQ ID NO: 227990 - DNA, 15 bp, Homo sapiens
ttgcttaggccaaag

SEQ ID NO: 227991 - DNA, 15 bp, Homo sapiens
cttgcttaggccaaa

SEQ ID NO: 227992 - DNA, 15 bp, Homo sapiens
tcttgcttaggccaa

SEQ ID NO: 227993 - DNA, 15 bp, Homo sapiens
gtcttgcttaggcca

SEQ ID NO: 227994 - DNA, 15 bp, Homo sapiens
tgtcttgcttaggcc

SEQ ID NO: 227995 - DNA, 15 bp, Homo sapiens
ctgtcttgcttaggc

SEQ ID NO: 227996 - DNA, 15 bp, Homo sapiens
cctgtcttgcttagg

SEQ ID NO: 227997 - DNA, 15 bp, Homo sapiens
acctgtcttgcttag

SEQ ID NO: 227998 - DNA, 15 bp, Homo sapiens
gacctgtcttgctta

SEQ ID NO: 227999 - DNA, 15 bp, Homo sapiens
tgacctgtcttgctt

SEQ ID NO: 228000 - DNA, 15 bp, Homo sapiens
ttgacctgtcttgct

SEQ ID NO: 228001 - DNA, 15 bp, Homo sapiens
attgacctgtcttgc

SEQ ID NO: 228002 - DNA, 15 bp, Homo sapiens
aattgacctgtcttg

SEQ ID NO: 228003 - DNA, 15 bp, Homo sapiens
aaattgacctgtctt

SEQ ID NO: 228004 - DNA, 15 bp, Homo sapiens
aaaattgacctgtct

SEQ ID NO: 228005 - DNA, 15 bp, Homo sapiens
aaaaattgacctgtc

SEQ ID NO: 228006 - DNA, 15 bp, Homo sapiens
taaaaattgacctgt

SEQ ID NO: 228007 - DNA, 15 bp, Homo sapiens
ttaaaaattgacctg

SEQ ID NO: 228008 - DNA, 15 bp, Homo sapiens
tttaaaaattgacct

SEQ ID NO: 228009 - DNA, 15 bp, Homo sapiens
ctttaaaaattgacc

SEQ ID NO: 228010 - DNA, 15 bp, Homo sapiens
tctttaaaaattgac

SEQ ID NO: 228011 - DNA, 15 bp, Homo sapiens
ctctttaaaaattga

SEQ ID NO: 228012 - DNA, 15 bp, Homo sapiens
cctctttaaaaattg

SEQ ID NO: 228013 - DNA, 15 bp, Homo sapiens
ccctctttaaaaatt

SEQ ID NO: 228014 - DNA, 15 bp, Homo sapiens
tccctctttaaaaat

SEQ ID NO: 228015 - DNA, 15 bp, Homo sapiens
ctccctctttaaaaa

SEQ ID NO: 228016 - DNA, 15 bp, Homo sapiens
actccctctttaaaa

SEQ ID NO: 228017 - DNA, 15 bp, Homo sapiens
tactccctctttaaa

SEQ ID NO: 228018 - DNA, 15 bp, Homo sapiens
ctactccctctttaa

SEQ ID NO: 228019 - DNA, 15 bp, Homo sapiens
gctactccctcttta

SEQ ID NO: 228020 - DNA, 15 bp, Homo sapiens
agctactccctcttt

SEQ ID NO: 228021 - DNA, 15 bp, Homo sapiens
cagctactccctctt

SEQ ID NO: 228022 - DNA, 15 bp, Homo sapiens
tcagctactccctct

SEQ ID NO: 228023 - DNA, 15 bp, Homo sapiens
ctcagctactccctc

SEQ ID NO: 228024 - DNA, 15 bp, Homo sapiens
cctcagctactccct

SEQ ID NO: 228025 - DNA, 15 bp, Homo sapiens
acctcagctactccc

SEQ ID NO: 228026 - DNA, 15 bp, Homo sapiens
aacctcagctactcc

SEQ ID NO: 228027 - DNA, 15 bp, Homo sapiens
taacctcagctactc

SEQ ID NO: 228028 - DNA, 15 bp, Homo sapiens
ctaacctcagctact

SEQ ID NO: 228029 - DNA, 15 bp, Homo sapiens
gctaacctcagctac

SEQ ID NO: 228030 - DNA, 15 bp, Homo sapiens
tgctaacctcagcta

SEQ ID NO: 228031 - DNA, 15 bp, Homo sapiens
ttgctaacctcagct

SEQ ID NO: 228032 - DNA, 15 bp, Homo sapiens
tttgctaacctcagc

SEQ ID NO: 228033 - DNA, 15 bp, Homo sapiens
ttttgctaacctcag

SEQ ID NO: 228034 - DNA, 15 bp, Homo sapiens
tttttgctaacctca

SEQ ID NO: 228035 - DNA, 15 bp, Homo sapiens
atttttgctaacctc

SEQ ID NO: 228036 - DNA, 15 bp, Homo sapiens
aatttttgctaacct

SEQ ID NO: 228037 - DNA, 15 bp, Homo sapiens
gaatttttgctaacc

SEQ ID NO: 228038 - DNA, 15 bp, Homo sapiens
agaatttttgctaac

SEQ ID NO: 228039 - DNA, 15 bp, Homo sapiens
gagaatttttgctaa

SEQ ID NO: 228040 - DNA, 15 bp, Homo sapiens
ggagaatttttgcta

SEQ ID NO: 228041 - DNA, 15 bp, Homo sapiens
tggagaatttttgct

SEQ ID NO: 228042 - DNA, 15 bp, Homo sapiens
ctggagaatttttgc

SEQ ID NO: 228043 - DNA, 15 bp, Homo sapiens
cctggagaatttttg

SEQ ID NO: 228044 - DNA, 15 bp, Homo sapiens
acctggagaattttt

SEQ ID NO: 228045 - DNA, 15 bp, Homo sapiens
gacctggagaatttt

SEQ ID NO: 228046 - DNA, 15 bp, Homo sapiens
ggacctggagaattt

SEQ ID NO: 228047 - DNA, 15 bp, Homo sapiens
tggacctggagaatt

SEQ ID NO: 228048 - DNA, 15 bp, Homo sapiens
gtggacctggagaat

SEQ ID NO: 228049 - DNA, 15 bp, Homo sapiens
tgtggacctggagaa

SEQ ID NO: 228050 - DNA, 15 bp, Homo sapiens
ttgtggacctggaga

SEQ ID NO: 228051 - DNA, 15 bp, Homo sapiens
tttgtggacctggag

SEQ ID NO: 228052 - DNA, 15 bp, Homo sapiens
ttttgtggacctgga

SEQ ID NO: 228053 - DNA, 15 bp, Homo sapiens
gttttgtggacctgg

SEQ ID NO: 228054 - DNA, 15 bp, Homo sapiens
agttttgtggacctg

SEQ ID NO: 228055 - DNA, 15 bp, Homo sapiens
aagttttgtggacct

SEQ ID NO: 228056 - DNA, 15 bp, Homo sapiens
gaagttttgtggacc

SEQ ID NO: 228057 - DNA, 15 bp, Homo sapiens
ggaagttttgtggac

SEQ ID NO: 228058 - DNA, 15 bp, Homo sapiens
tggaagttttgtgga

SEQ ID NO: 228059 - DNA, 15 bp, Homo sapiens
ctggaagttttgtgg

SEQ ID NO: 228060 - DNA, 15 bp, Homo sapiens
tctggaagttttgtg

SEQ ID NO: 228061 - DNA, 15 bp, Homo sapiens
gtctggaagttttgt

SEQ ID NO: 228062 - DNA, 15 bp, Homo sapiens
ggtctggaagttttg

SEQ ID NO: 228063 - DNA, 15 bp, Homo sapiens
aggtctggaagtttt

SEQ ID NO: 228064 - DNA, 15 bp, Homo sapiens
caggtctggaagttt

SEQ ID NO: 228065 - DNA, 15 bp, Homo sapiens
gcaggtctggaagtt

SEQ ID NO: 228066 - DNA, 15 bp, Homo sapiens
tgcaggtctggaagt

SEQ ID NO: 228067 - DNA, 15 bp, Homo sapiens
ttgcaggtctggaag

SEQ ID NO: 228068 - DNA, 15 bp, Homo sapiens
cttgcaggtctggaa

SEQ ID NO: 228069 - DNA, 15 bp, Homo sapiens
ccttgcaggtctgga

SEQ ID NO: 228070 - DNA, 15 bp, Homo sapiens
accttgcaggtctgg

SEQ ID NO: 228071 - DNA, 15 bp, Homo sapiens
caccttgcaggtctg

SEQ ID NO: 228072 - DNA, 15 bp, Homo sapiens
tcaccttgcaggtct

SEQ ID NO: 228073 - DNA, 15 bp, Homo sapiens
ttcaccttgcaggtc

SEQ ID NO: 228074 - DNA, 15 bp, Homo sapiens
tttcaccttgcaggt

SEQ ID NO: 228075 - DNA, 15 bp, Homo sapiens
ttttcaccttgcagg

SEQ ID NO: 228076 - DNA, 15 bp, Homo sapiens
attttcaccttgcag

SEQ ID NO: 228077 - DNA, 15 bp, Homo sapiens
gattttcaccttgca

SEQ ID NO: 228078 - DNA, 15 bp, Homo sapiens
tgattttcaccttgc

SEQ ID NO: 228079 - DNA, 15 bp, Homo sapiens
ctgattttcaccttg

SEQ ID NO: 228080 - DNA, 15 bp, Homo sapiens
gctgattttcacctt

SEQ ID NO: 228081 - DNA, 15 bp, Homo sapiens
agctgattttcacct

SEQ ID NO: 228082 - DNA, 15 bp, Homo sapiens
aagctgattttcacc

SEQ ID NO: 228083 - DNA, 15 bp, Homo sapiens
aaagctgattttcac

SEQ ID NO: 228084 - DNA, 15 bp, Homo sapiens
aaaagctgattttca

SEQ ID NO: 228085 - DNA, 15 bp, Homo sapiens
gaaaagctgattttc

SEQ ID NO: 228086 - DNA, 15 bp, Homo sapiens
agaaaagctgatttt

SEQ ID NO: 228087 - DNA, 15 bp, Homo sapiens
cagaaaagctgattt

SEQ ID NO: 228088 - DNA, 15 bp, Homo sapiens
acagaaaagctgatt

SEQ ID NO: 228089 - DNA, 15 bp, Homo sapiens
gacagaaaagctgat

SEQ ID NO: 228090 - DNA, 15 bp, Homo sapiens
tgacagaaaagctga

SEQ ID NO: 228091 - DNA, 15 bp, Homo sapiens
atgacagaaaagctg

SEQ ID NO: 228092 - DNA, 15 bp, Homo sapiens
gatgacagaaaagct

SEQ ID NO: 228093 - DNA, 15 bp, Homo sapiens
ggatgacagaaaagc

SEQ ID NO: 228094 - DNA, 15 bp, Homo sapiens
gggatgacagaaaag

SEQ ID NO: 228095 - DNA, 15 bp, Homo sapiens
agggatgacagaaaa

SEQ ID NO: 228096 - DNA, 15 bp, Homo sapiens
tagggatgacagaaa

SEQ ID NO: 228097 - DNA, 15 bp, Homo sapiens
ttagggatgacagaa

SEQ ID NO: 228098 - DNA, 15 bp, Homo sapiens
tttagggatgacaga

SEQ ID NO: 228099 - DNA, 15 bp, Homo sapiens
ctttagggatgacag

SEQ ID NO: 228100 - DNA, 15 bp, Homo sapiens
cctttagggatgaca

SEQ ID NO: 228101 - DNA, 15 bp, Homo sapiens
gcctttagggatgac

SEQ ID NO: 228102 - DNA, 15 bp, Homo sapiens
ggcctttagggatga

SEQ ID NO: 228103 - DNA, 15 bp, Homo sapiens
aggcctttagggatg

SEQ ID NO: 228104 - DNA, 15 bp, Homo sapiens
taggcctttagggat

SEQ ID NO: 228105 - DNA, 15 bp, Homo sapiens
ttaggcctttaggga

SEQ ID NO: 228106 - DNA, 15 bp, Homo sapiens
gttaggcctttaggg

SEQ ID NO: 228107 - DNA, 15 bp, Homo sapiens
agttaggcctttagg

SEQ ID NO: 228108 - DNA, 15 bp, Homo sapiens
cagttaggcctttag

SEQ ID NO: 228109 - DNA, 15 bp, Homo sapiens
ccagttaggccttta

SEQ ID NO: 228110 - DNA, 15 bp, Homo sapiens
tccagttaggccttt

SEQ ID NO: 228111 - DNA, 15 bp, Homo sapiens
ttccagttaggcctt

SEQ ID NO: 228112 - DNA, 15 bp, Homo sapiens
attccagttaggcct

SEQ ID NO: 228113 - DNA, 15 bp, Homo sapiens
gattccagttaggcc

SEQ ID NO: 228114 - DNA, 15 bp, Homo sapiens
tgattccagttaggc

SEQ ID NO: 228115 - DNA, 15 bp, Homo sapiens
ctgattccagttagg

SEQ ID NO: 228116 - DNA, 15 bp, Homo sapiens
tctgattccagttag

SEQ ID NO: 228117 - DNA, 15 bp, Homo sapiens
ttctgattccagtta

SEQ ID NO: 228118 - DNA, 15 bp, Homo sapiens
gttctgattccagtt

SEQ ID NO: 228119 - DNA, 15 bp, Homo sapiens
agttctgattccagt

SEQ ID NO: 228120 - DNA, 15 bp, Homo sapiens
aagttctgattccag

SEQ ID NO: 228121 - DNA, 15 bp, Homo sapiens
aaagttctgattcca

SEQ ID NO: 228122 - DNA, 15 bp, Homo sapiens
aaaagttctgattcc

SEQ ID NO: 228123 - DNA, 15 bp, Homo sapiens
gaaaagttctgattc

SEQ ID NO: 228124 - DNA, 15 bp, Homo sapiens
ggaaaagttctgatt

SEQ ID NO: 228125 - DNA, 15 bp, Homo sapiens
gggaaaagttctgat

SEQ ID NO: 228126 - DNA, 15 bp, Homo sapiens
agggaaaagttctga

SEQ ID NO: 228127 - DNA, 15 bp, Homo sapiens
cagggaaaagttctg

SEQ ID NO: 228128 - DNA, 15 bp, Homo sapiens
tcagggaaaagttct

SEQ ID NO: 228129 - DNA, 15 bp, Homo sapiens
atcagggaaaagttc

SEQ ID NO: 228130 - DNA, 15 bp, Homo sapiens
catcagggaaaagtt

SEQ ID NO: 228131 - DNA, 15 bp, Homo sapiens
gcatcagggaaaagt

SEQ ID NO: 228132 - DNA, 15 bp, Homo sapiens
ggcatcagggaaaag

SEQ ID NO: 228133 - DNA, 15 bp, Homo sapiens
gggcatcagggaaaa

SEQ ID NO: 228134 - DNA, 15 bp, Homo sapiens
tgggcatcagggaaa

SEQ ID NO: 228135 - DNA, 15 bp, Homo sapiens
gtgggcatcagggaa

SEQ ID NO: 228136 - DNA, 15 bp, Homo sapiens
tgtgggcatcaggga

SEQ ID NO: 228137 - DNA, 15 bp, Homo sapiens
atgtgggcatcaggg

SEQ ID NO: 228138 - DNA, 15 bp, Homo sapiens
tatgtgggcatcagg

SEQ ID NO: 228139 - DNA, 15 bp, Homo sapiens
atatgtgggcatcag

SEQ ID NO: 228140 - DNA, 15 bp, Homo sapiens
aatatgtgggcatca

SEQ ID NO: 228141 - DNA, 15 bp, Homo sapiens
aaatatgtgggcatc

SEQ ID NO: 228142 - DNA, 15 bp, Homo sapiens
caaatatgtgggcat

SEQ ID NO: 228143 - DNA, 15 bp, Homo sapiens
ccaaatatgtgggca

SEQ ID NO: 228144 - DNA, 15 bp, Homo sapiens
tccaaatatgtgggc

SEQ ID NO: 228145 - DNA, 15 bp, Homo sapiens
ctccaaatatgtggg

SEQ ID NO: 228146 - DNA, 15 bp, Homo sapiens
cctccaaatatgtgg

SEQ ID NO: 228147 - DNA, 15 bp, Homo sapiens
acctccaaatatgtg

SEQ ID NO: 228148 - DNA, 15 bp, Homo sapiens
gacctccaaatatgt

SEQ ID NO: 228149 - DNA, 15 bp, Homo sapiens
ggacctccaaatatg

SEQ ID NO: 228150 - DNA, 15 bp, Homo sapiens
aggacctccaaatat

SEQ ID NO: 228151 - DNA, 15 bp, Homo sapiens
aaggacctccaaata

SEQ ID NO: 228152 - DNA, 15 bp, Homo sapiens
aaaggacctccaaat

SEQ ID NO: 228153 - DNA, 15 bp, Homo sapiens
aaaaggacctccaaa

SEQ ID NO: 228154 - DNA, 15 bp, Homo sapiens
aaaaaggacctccaa

SEQ ID NO: 228155 - DNA, 15 bp, Homo sapiens
aaaaaaggacctcca

SEQ ID NO: 228156 - DNA, 15 bp, Homo sapiens
taaaaaaggacctcc

SEQ ID NO: 228157 - DNA, 15 bp, Homo sapiens
ttaaaaaaggacctc

SEQ ID NO: 228158 - DNA, 15 bp, Homo sapiens
attaaaaaaggacct

SEQ ID NO: 228159 - DNA, 15 bp, Homo sapiens
cattaaaaaaggacc

SEQ ID NO: 228160 - DNA, 15 bp, Homo sapiens
ccattaaaaaaggac

SEQ ID NO: 228161 - DNA, 15 bp, Homo sapiens
cccattaaaaaagga

SEQ ID NO: 228162 - DNA, 15 bp, Homo sapiens
tcccattaaaaaagg

SEQ ID NO: 228163 - DNA, 15 bp, Homo sapiens
gtcccattaaaaaag

SEQ ID NO: 228164 - DNA, 15 bp, Homo sapiens
agtcccattaaaaaa

SEQ ID NO: 228165 - DNA, 15 bp, Homo sapiens
gagtcccattaaaaa

SEQ ID NO: 228166 - DNA, 15 bp, Homo sapiens
ggagtcccattaaaa

SEQ ID NO: 228167 - DNA, 15 bp, Homo sapiens
aggagtcccattaaa

SEQ ID NO: 228168 - DNA, 15 bp, Homo sapiens
aaggagtcccattaa

SEQ ID NO: 228169 - DNA, 15 bp, Homo sapiens
taaggagtcccatta

SEQ ID NO: 228170 - DNA, 15 bp, Homo sapiens
ttaaggagtcccatt

SEQ ID NO: 228171 - DNA, 15 bp, Homo sapiens
attaaggagtcccat

SEQ ID NO: 228172 - DNA, 15 bp, Homo sapiens
cattaaggagtccca

SEQ ID NO: 228173 - DNA, 15 bp, Homo sapiens
gcattaaggagtccc

SEQ ID NO: 228174 - DNA, 15 bp, Homo sapiens
ggcattaaggagtcc

SEQ ID NO: 228175 - DNA, 15 bp, Homo sapiens
aggcattaaggagtc

SEQ ID NO: 228176 - DNA, 15 bp, Homo sapiens
aaggcattaaggagt

SEQ ID NO: 228177 - DNA, 15 bp, Homo sapiens
aaaggcattaaggag

SEQ ID NO: 228178 - DNA, 15 bp, Homo sapiens
taaaggcattaagga

SEQ ID NO: 228179 - DNA, 15 bp, Homo sapiens
ctaaaggcattaagg

SEQ ID NO: 228180 - DNA, 15 bp, Homo sapiens
actaaaggcattaag

SEQ ID NO: 228181 - DNA, 15 bp, Homo sapiens
cactaaaggcattaa

SEQ ID NO: 228182 - DNA, 15 bp, Homo sapiens
gcactaaaggcatta

SEQ ID NO: 228183 - DNA, 15 bp, Homo sapiens
ggcactaaaggcatt

SEQ ID NO: 228184 - DNA, 15 bp, Homo sapiens
tggcactaaaggcat

SEQ ID NO: 228185 - DNA, 15 bp, Homo sapiens
atggcactaaaggca

SEQ ID NO: 228186 - DNA, 15 bp, Homo sapiens
gatggcactaaaggc

SEQ ID NO: 228187 - DNA, 15 bp, Homo sapiens
ggatggcactaaagg

SEQ ID NO: 228188 - DNA, 15 bp, Homo sapiens
gggatggcactaaag

SEQ ID NO: 228189 - DNA, 15 bp, Homo sapiens
tgggatggcactaaa

SEQ ID NO: 228190 - DNA, 15 bp, Homo sapiens
atgggatggcactaa

SEQ ID NO: 228191 - DNA, 15 bp, Homo sapiens
aatgggatggcacta

SEQ ID NO: 228192 - DNA, 15 bp, Homo sapiens
aaatgggatggcact

SEQ ID NO: 228193 - DNA, 15 bp, Homo sapiens
aaaatgggatggcac

SEQ ID NO: 228194 - DNA, 15 bp, Homo sapiens
gaaaatgggatggca

SEQ ID NO: 228195 - DNA, 15 bp, Homo sapiens
tgaaaatgggatggc

SEQ ID NO: 228196 - DNA, 15 bp, Homo sapiens
atgaaaatgggatgg

SEQ ID NO: 228197 - DNA, 15 bp, Homo sapiens
gatgaaaatgggatg

SEQ ID NO: 228198 - DNA, 15 bp, Homo sapiens
ggatgaaaatgggat

SEQ ID NO: 228199 - DNA, 15 bp, Homo sapiens
tggatgaaaatggga

SEQ ID NO: 228200 - DNA, 15 bp, Homo sapiens
ctggatgaaaatggg

SEQ ID NO: 228201 - DNA, 15 bp, Homo sapiens
actggatgaaaatgg

SEQ ID NO: 228202 - DNA, 15 bp, Homo sapiens
cactggatgaaaatg

SEQ ID NO: 228203 - DNA, 15 bp, Homo sapiens
acactggatgaaaat

SEQ ID NO: 228204 - DNA, 15 bp, Homo sapiens
gacactggatgaaaa

SEQ ID NO: 228205 - DNA, 15 bp, Homo sapiens
ggacactggatgaaa

SEQ ID NO: 228206 - DNA, 15 bp, Homo sapiens
tggacactggatgaa

SEQ ID NO: 228207 - DNA, 15 bp, Homo sapiens
ttggacactggatga

SEQ ID NO: 228208 - DNA, 15 bp, Homo sapiens
tttggacactggatg

SEQ ID NO: 228209 - DNA, 15 bp, Homo sapiens
ttttggacactggat

SEQ ID NO: 228210 - DNA, 15 bp, Homo sapiens
cttttggacactgga

SEQ ID NO: 228211 - DNA, 15 bp, Homo sapiens
tcttttggacactgg

SEQ ID NO: 228212 - DNA, 15 bp, Homo sapiens
ttcttttggacactg

SEQ ID NO: 228213 - DNA, 15 bp, Homo sapiens
tttcttttggacact

SEQ ID NO: 228214 - DNA, 15 bp, Homo sapiens
atttcttttggacac

SEQ ID NO: 228215 - DNA, 15 bp, Homo sapiens
catttcttttggaca

SEQ ID NO: 228216 - DNA, 15 bp, Homo sapiens
tcatttcttttggac

SEQ ID NO: 228217 - DNA, 15 bp, Homo sapiens
atcatttcttttgga

SEQ ID NO: 228218 - DNA, 15 bp, Homo sapiens
aatcatttcttttgg

SEQ ID NO: 228219 - DNA, 15 bp, Homo sapiens
aaatcatttcttttg

SEQ ID NO: 228220 - DNA, 15 bp, Homo sapiens
taaatcatttctttt

SEQ ID NO: 228221 - DNA, 15 bp, Homo sapiens
ttaaatcatttcttt

SEQ ID NO: 228222 - DNA, 15 bp, Homo sapiens
tttaaatcatttctt

SEQ ID NO: 228223 - DNA, 15 bp, Homo sapiens
ttttaaatcatttct

SEQ ID NO: 228224 - DNA, 15 bp, Homo sapiens
tttttaaatcatttc

SEQ ID NO: 228225 - DNA, 15 bp, Homo sapiens
atttttaaatcattt

SEQ ID NO: 228226 - DNA, 15 bp, Homo sapiens
tatttttaaatcatt

SEQ ID NO: 228227 - DNA, 15 bp, Homo sapiens
atatttttaaatcat

SEQ ID NO: 228228 - DNA, 15 bp, Homo sapiens
tatatttttaaatca

SEQ ID NO: 228229 - DNA, 15 bp, Homo sapiens
ttatatttttaaatc

SEQ ID NO: 228230 - DNA, 15 bp, Homo sapiens
tttatatttttaaat

SEQ ID NO: 228231 - DNA, 15 bp, Homo sapiens
gtttatatttttaaa

SEQ ID NO: 228232 - DNA, 15 bp, Homo sapiens
cgtttatatttttaa

SEQ ID NO: 228233 - DNA, 15 bp, Homo sapiens
acgtttatattttta

SEQ ID NO: 228234 - DNA, 15 bp, Homo sapiens
tacgtttatattttt

SEQ ID NO: 228235 - DNA, 15 bp, Homo sapiens
atacgtttatatttt

SEQ ID NO: 228236 - DNA, 15 bp, Homo sapiens
catacgtttatattt

SEQ ID NO: 228237 - DNA, 15 bp, Homo sapiens
acatacgtttatatt

SEQ ID NO: 228238 - DNA, 15 bp, Homo sapiens
aacatacgtttatat

SEQ ID NO: 228239 - DNA, 15 bp, Homo sapiens
aaacatacgtttata

SEQ ID NO: 228240 - DNA, 15 bp, Homo sapiens
taaacatacgtttat

SEQ ID NO: 228241 - DNA, 15 bp, Homo sapiens
ttaaacatacgttta

SEQ ID NO: 228242 - DNA, 15 bp, Homo sapiens
tttaaacatacgttt

SEQ ID NO: 228243 - DNA, 15 bp, Homo sapiens
atttaaacatacgtt

SEQ ID NO: 228244 - DNA, 15 bp, Homo sapiens
aatttaaacatacgt

SEQ ID NO: 228245 - DNA, 15 bp, Homo sapiens
gaatttaaacatacg

SEQ ID NO: 228246 - DNA, 15 bp, Homo sapiens
ggaatttaaacatac

SEQ ID NO: 228247 - DNA, 15 bp, Homo sapiens
tggaatttaaacata

SEQ ID NO: 228248 - DNA, 15 bp, Homo sapiens
ctggaatttaaacat

SEQ ID NO: 228249 - DNA, 15 bp, Homo sapiens
tctggaatttaaaca

SEQ ID NO: 228250 - DNA, 15 bp, Homo sapiens
ttctggaatttaaac

SEQ ID NO: 228251 - DNA, 15 bp, Homo sapiens
cttctggaatttaaa

SEQ ID NO: 228252 - DNA, 15 bp, Homo sapiens
tcttctggaatttaa

SEQ ID NO: 228253 - DNA, 15 bp, Homo sapiens
ctcttctggaattta

SEQ ID NO: 228254 - DNA, 15 bp, Homo sapiens
tctcttctggaattt

SEQ ID NO: 228255 - DNA, 15 bp, Homo sapiens
ctctcttctggaatt

SEQ ID NO: 228256 - DNA, 15 bp, Homo sapiens
tctctcttctggaat

SEQ ID NO: 228257 - DNA, 15 bp, Homo sapiens
ttctctcttctggaa

SEQ ID NO: 228258 - DNA, 15 bp, Homo sapiens
tttctctcttctgga

SEQ ID NO: 228259 - DNA, 15 bp, Homo sapiens
atttctctcttctgg

SEQ ID NO: 228260 - DNA, 15 bp, Homo sapiens
catttctctcttctg

SEQ ID NO: 228261 - DNA, 15 bp, Homo sapiens
ccatttctctcttct

SEQ ID NO: 228262 - DNA, 15 bp, Homo sapiens
tccatttctctcttc

SEQ ID NO: 228263 - DNA, 15 bp, Homo sapiens
ctccatttctctctt

SEQ ID NO: 228264 - DNA, 15 bp, Homo sapiens
tctccatttctctct

SEQ ID NO: 228265 - DNA, 15 bp, Homo sapiens
atctccatttctctc

SEQ ID NO: 228266 - DNA, 15 bp, Homo sapiens
aatctccatttctct

SEQ ID NO: 228267 - DNA, 15 bp, Homo sapiens
caatctccatttctc

SEQ ID NO: 228268 - DNA, 15 bp, Homo sapiens
tcaatctccatttct

SEQ ID NO: 228269 - DNA, 15 bp, Homo sapiens
ctcaatctccatttc

SEQ ID NO: 228270 - DNA, 15 bp, Homo sapiens
tctcaatctccattt

SEQ ID NO: 228271 - DNA, 15 bp, Homo sapiens
ttctcaatctccatt

SEQ ID NO: 228272 - DNA, 15 bp, Homo sapiens
gttctcaatctccat

SEQ ID NO: 228273 - DNA, 15 bp, Homo sapiens
tgttctcaatctcca

SEQ ID NO: 228274 - DNA, 15 bp, Homo sapiens
ttgttctcaatctcc

SEQ ID NO: 228275 - DNA, 15 bp, Homo sapiens
attgttctcaatctc

SEQ ID NO: 228276 - DNA, 15 bp, Homo sapiens
tattgttctcaatct

SEQ ID NO: 228277 - DNA, 15 bp, Homo sapiens
ctattgttctcaatc

SEQ ID NO: 228278 - DNA, 15 bp, Homo sapiens
cctattgttctcaat

SEQ ID NO: 228279 - DNA, 15 bp, Homo sapiens
ccctattgttctcaa

SEQ ID NO: 228280 - DNA, 15 bp, Homo sapiens
tccctattgttctca

SEQ ID NO: 228281 - DNA, 15 bp, Homo sapiens
ttccctattgttctc

SEQ ID NO: 228282 - DNA, 15 bp, Homo sapiens
tttccctattgttct

SEQ ID NO: 228283 - DNA, 15 bp, Homo sapiens
atttccctattgttc

SEQ ID NO: 228284 - DNA, 15 bp, Homo sapiens
catttccctattgtt

SEQ ID NO: 228285 - DNA, 15 bp, Homo sapiens
tcatttccctattgt

SEQ ID NO: 228286 - DNA, 15 bp, Homo sapiens
atcatttccctattg

SEQ ID NO: 228287 - DNA, 15 bp, Homo sapiens
catcatttccctatt

SEQ ID NO: 228288 - DNA, 15 bp, Homo sapiens
tcatcatttccctat

SEQ ID NO: 228289 - DNA, 15 bp, Homo sapiens
ctcatcatttcccta

SEQ ID NO: 228290 - DNA, 15 bp, Homo sapiens
tctcatcatttccct

SEQ ID NO: 228291 - DNA, 15 bp, Homo sapiens
ctctcatcatttccc

SEQ ID NO: 228292 - DNA, 15 bp, Homo sapiens
gctctcatcatttcc

SEQ ID NO: 228293 - DNA, 15 bp, Homo sapiens
agctctcatcatttc

SEQ ID NO: 228294 - DNA, 15 bp, Homo sapiens
tagctctcatcattt

SEQ ID NO: 228295 - DNA, 15 bp, Homo sapiens
atagctctcatcatt

SEQ ID NO: 228296 - DNA, 15 bp, Homo sapiens
catagctctcatcat

SEQ ID NO: 228297 - DNA, 15 bp, Homo sapiens
ccatagctctcatca

SEQ ID NO: 228298 - DNA, 15 bp, Homo sapiens
cccatagctctcatc

SEQ ID NO: 228299 - DNA, 15 bp, Homo sapiens
tcccatagctctcat

SEQ ID NO: 228300 - DNA, 15 bp, Homo sapiens
ttcccatagctctca

SEQ ID NO: 228301 - DNA, 15 bp, Homo sapiens
tttcccatagctctc

SEQ ID NO: 228302 - DNA, 15 bp, Homo sapiens
ttttcccatagctct

SEQ ID NO: 228303 - DNA, 15 bp, Homo sapiens
cttttcccatagctc

SEQ ID NO: 228304 - DNA, 15 bp, Homo sapiens
tcttttcccatagct

SEQ ID NO: 228305 - DNA, 15 bp, Homo sapiens
ctcttttcccatagc

SEQ ID NO: 228306 - DNA, 15 bp, Homo sapiens
cctcttttcccatag

SEQ ID NO: 228307 - DNA, 15 bp, Homo sapiens
acctcttttcccata

SEQ ID NO: 228308 - DNA, 15 bp, Homo sapiens
aacctcttttcccat

SEQ ID NO: 228309 - DNA, 15 bp, Homo sapiens
aaacctcttttccca

SEQ ID NO: 228310 - DNA, 15 bp, Homo sapiens
taaacctcttttccc

SEQ ID NO: 228311 - DNA, 15 bp, Homo sapiens
ataaacctcttttcc

SEQ ID NO: 228312 - DNA, 15 bp, Homo sapiens
cataaacctcttttc

SEQ ID NO: 228313 - DNA, 15 bp, Homo sapiens
tcataaacctctttt

SEQ ID NO: 228314 - DNA, 15 bp, Homo sapiens
ctcataaacctcttt

SEQ ID NO: 228315 - DNA, 15 bp, Homo sapiens
actcataaacctctt

SEQ ID NO: 228316 - DNA, 15 bp, Homo sapiens
gactcataaacctct

SEQ ID NO: 228317 - DNA, 15 bp, Homo sapiens
ggactcataaacctc

SEQ ID NO: 228318 - DNA, 15 bp, Homo sapiens
tggactcataaacct

SEQ ID NO: 228319 - DNA, 15 bp, Homo sapiens
atggactcataaacc

SEQ ID NO: 228320 - DNA, 15 bp, Homo sapiens
catggactcataaac

SEQ ID NO: 228321 - DNA, 15 bp, Homo sapiens
acatggactcataaa

SEQ ID NO: 228322 - DNA, 15 bp, Homo sapiens
gacatggactcataa

SEQ ID NO: 228323 - DNA, 15 bp, Homo sapiens
agacatggactcata

SEQ ID NO: 228324 - DNA, 15 bp, Homo sapiens
cagacatggactcat

SEQ ID NO: 228325 - DNA, 15 bp, Homo sapiens
tcagacatggactca

SEQ ID NO: 228326 - DNA, 15 bp, Homo sapiens
atcagacatggactc

SEQ ID NO: 228327 - DNA, 15 bp, Homo sapiens
aatcagacatggact

SEQ ID NO: 228328 - DNA, 15 bp, Homo sapiens
gaatcagacatggac

SEQ ID NO: 228329 - DNA, 15 bp, Homo sapiens
agaatcagacatgga

SEQ ID NO: 228330 - DNA, 15 bp, Homo sapiens
aagaatcagacatgg

SEQ ID NO: 228331 - DNA, 15 bp, Homo sapiens
gaagaatcagacatg

SEQ ID NO: 228332 - DNA, 15 bp, Homo sapiens
ggaagaatcagacat

SEQ ID NO: 228333 - DNA, 15 bp, Homo sapiens
tggaagaatcagaca

SEQ ID NO: 228334 - DNA, 15 bp, Homo sapiens
ctggaagaatcagac

SEQ ID NO: 228335 - DNA, 15 bp, Homo sapiens
tctggaagaatcaga

SEQ ID NO: 228336 - DNA, 15 bp, Homo sapiens
ctctggaagaatcag

SEQ ID NO: 228337 - DNA, 15 bp, Homo sapiens
tctctggaagaatca

SEQ ID NO: 228338 - DNA, 15 bp, Homo sapiens
ctctctggaagaatc

SEQ ID NO: 228339 - DNA, 15 bp, Homo sapiens
gctctctggaagaat

SEQ ID NO: 228340 - DNA, 15 bp, Homo sapiens
ggctctctggaagaa

SEQ ID NO: 228341 - DNA, 15 bp, Homo sapiens
gggctctctggaaga

SEQ ID NO: 228342 - DNA, 15 bp, Homo sapiens
ggggctctctggaag

SEQ ID NO: 228343 - DNA, 15 bp, Homo sapiens
aggggctctctggaa

SEQ ID NO: 228344 - DNA, 15 bp, Homo sapiens
taggggctctctgga

SEQ ID NO: 228345 - DNA, 15 bp, Homo sapiens
ttaggggctctctgg

SEQ ID NO: 228346 - DNA, 15 bp, Homo sapiens
cttaggggctctctg

SEQ ID NO: 228347 - DNA, 15 bp, Homo sapiens
tcttaggggctctct

SEQ ID NO: 228348 - DNA, 15 bp, Homo sapiens
ttcttaggggctctc

SEQ ID NO: 228349 - DNA, 15 bp, Homo sapiens
tttcttaggggctct

SEQ ID NO: 228350 - DNA, 15 bp, Homo sapiens
ctttcttaggggctc

SEQ ID NO: 228351 - DNA, 15 bp, Homo sapiens
actttcttaggggct

SEQ ID NO: 228352 - DNA, 15 bp, Homo sapiens
aactttcttaggggc

SEQ ID NO: 228353 - DNA, 15 bp, Homo sapiens
gaactttcttagggg

SEQ ID NO: 228354 - DNA, 15 bp, Homo sapiens
agaactttcttaggg

SEQ ID NO: 228355 - DNA, 15 bp, Homo sapiens
aagaactttcttagg

SEQ ID NO: 228356 - DNA, 15 bp, Homo sapiens
taagaactttcttag

SEQ ID NO: 228357 - DNA, 15 bp, Homo sapiens
ataagaactttctta

SEQ ID NO: 228358 - DNA, 15 bp, Homo sapiens
gataagaactttctt

SEQ ID NO: 228359 - DNA, 15 bp, Homo sapiens
tgataagaactttct

SEQ ID NO: 228360 - DNA, 15 bp, Homo sapiens
atgataagaactttc

SEQ ID NO: 228361 - DNA, 15 bp, Homo sapiens
tatgataagaacttt

SEQ ID NO: 228362 - DNA, 15 bp, Homo sapiens
gtatgataagaactt

SEQ ID NO: 228363 - DNA, 15 bp, Homo sapiens
ggtatgataagaact

SEQ ID NO: 228364 - DNA, 15 bp, Homo sapiens
tggtatgataagaac

SEQ ID NO: 228365 - DNA, 15 bp, Homo sapiens
ctggtatgataagaa

SEQ ID NO: 228366 - DNA, 15 bp, Homo sapiens
cctggtatgataaga

SEQ ID NO: 228367 - DNA, 15 bp, Homo sapiens
tcctggtatgataag

SEQ ID NO: 228368 - DNA, 15 bp, Homo sapiens
ttcctggtatgataa

SEQ ID NO: 228369 - DNA, 15 bp, Homo sapiens
gttcctggtatgata

SEQ ID NO: 228370 - DNA, 15 bp, Homo sapiens
agttcctggtatgat

SEQ ID NO: 228371 - DNA, 15 bp, Homo sapiens
gagttcctggtatga

SEQ ID NO: 228372 - DNA, 15 bp, Homo sapiens
tgagttcctggtatg

SEQ ID NO: 228373 - DNA, 15 bp, Homo sapiens
ttgagttcctggtat

SEQ ID NO: 228374 - DNA, 15 bp, Homo sapiens
attgagttcctggta

SEQ ID NO: 228375 - DNA, 15 bp, Homo sapiens
aattgagttcctggt

SEQ ID NO: 228376 - DNA, 15 bp, Homo sapiens
taattgagttcctgg

SEQ ID NO: 228377 - DNA, 15 bp, Homo sapiens
ataattgagttcctg

SEQ ID NO: 228378 - DNA, 15 bp, Homo sapiens
tataattgagttcct

SEQ ID NO: 228379 - DNA, 15 bp, Homo sapiens
ttataattgagttcc

SEQ ID NO: 228380 - DNA, 15 bp, Homo sapiens
gttataattgagttc

SEQ ID NO: 228381 - DNA, 15 bp, Homo sapiens
agttataattgagtt

SEQ ID NO: 228382 - DNA, 15 bp, Homo sapiens
aagttataattgagt

SEQ ID NO: 228383 - DNA, 15 bp, Homo sapiens
aaagttataattgag

SEQ ID NO: 228384 - DNA, 15 bp, Homo sapiens
gaaagttataattga

SEQ ID NO: 228385 - DNA, 15 bp, Homo sapiens
tgaaagttataattg

SEQ ID NO: 228386 - DNA, 15 bp, Homo sapiens
atgaaagttataatt

SEQ ID NO: 228387 - DNA, 15 bp, Homo sapiens
aatgaaagttataat

SEQ ID NO: 228388 - DNA, 15 bp, Homo sapiens
caatgaaagttataa

SEQ ID NO: 228389 - DNA, 15 bp, Homo sapiens
gcaatgaaagttata

SEQ ID NO: 228390 - DNA, 15 bp, Homo sapiens
ggcaatgaaagttat

SEQ ID NO: 228391 - DNA, 15 bp, Homo sapiens
aggcaatgaaagtta

SEQ ID NO: 228392 - DNA, 15 bp, Homo sapiens
taggcaatgaaagtt

SEQ ID NO: 228393 - DNA, 15 bp, Homo sapiens
ataggcaatgaaagt

SEQ ID NO: 228394 - DNA, 15 bp, Homo sapiens
aataggcaatgaaag

SEQ ID NO: 228395 - DNA, 15 bp, Homo sapiens
caataggcaatgaaa

SEQ ID NO: 228396 - DNA, 15 bp, Homo sapiens
acaataggcaatgaa

SEQ ID NO: 228397 - DNA, 15 bp, Homo sapiens
aacaataggcaatga

SEQ ID NO: 228398 - DNA, 15 bp, Homo sapiens
taacaataggcaatg

SEQ ID NO: 228399 - DNA, 15 bp, Homo sapiens
ctaacaataggcaat

SEQ ID NO: 228400 - DNA, 15 bp, Homo sapiens
tctaacaataggcaa

SEQ ID NO: 228401 - DNA, 15 bp, Homo sapiens
atctaacaataggca

SEQ ID NO: 228402 - DNA, 15 bp, Homo sapiens
catctaacaataggc

SEQ ID NO: 228403 - DNA, 15 bp, Homo sapiens
tcatctaacaatagg

SEQ ID NO: 228404 - DNA, 15 bp, Homo sapiens
ctcatctaacaatag

SEQ ID NO: 228405 - DNA, 15 bp, Homo sapiens
actcatctaacaata

SEQ ID NO: 228406 - DNA, 15 bp, Homo sapiens
tactcatctaacaat

SEQ ID NO: 228407 - DNA, 15 bp, Homo sapiens
ttactcatctaacaa

SEQ ID NO: 228408 - DNA, 15 bp, Homo sapiens
gttactcatctaaca

SEQ ID NO: 228409 - DNA, 15 bp, Homo sapiens
tgttactcatctaac

SEQ ID NO: 228410 - DNA, 15 bp, Homo sapiens
ctgttactcatctaa

SEQ ID NO: 228411 - DNA, 15 bp, Homo sapiens
cctgttactcatcta

SEQ ID NO: 228412 - DNA, 15 bp, Homo sapiens
tcctgttactcatct

SEQ ID NO: 228413 - DNA, 15 bp, Homo sapiens
ctcctgttactcatc

SEQ ID NO: 228414 - DNA, 15 bp, Homo sapiens
gctcctgttactcat

SEQ ID NO: 228415 - DNA, 15 bp, Homo sapiens
agctcctgttactca

SEQ ID NO: 228416 - DNA, 15 bp, Homo sapiens
tagctcctgttactc

SEQ ID NO: 228417 - DNA, 15 bp, Homo sapiens
ctagctcctgttact

SEQ ID NO: 228418 - DNA, 15 bp, Homo sapiens
tctagctcctgttac

SEQ ID NO: 228419 - DNA, 15 bp, Homo sapiens
ttctagctcctgtta

SEQ ID NO: 228420 - DNA, 15 bp, Homo sapiens
tttctagctcctgtt

SEQ ID NO: 228421 - DNA, 15 bp, Homo sapiens
ttttctagctcctgt

SEQ ID NO: 228422 - DNA, 15 bp, Homo sapiens
gttttctagctcctg

SEQ ID NO: 228423 - DNA, 15 bp, Homo sapiens
tgttttctagctcct

SEQ ID NO: 228424 - DNA, 15 bp, Homo sapiens
atgttttctagctcc

SEQ ID NO: 228425 - DNA, 15 bp, Homo sapiens
aatgttttctagctc

SEQ ID NO: 228426 - DNA, 15 bp, Homo sapiens
aaatgttttctagct

SEQ ID NO: 228427 - DNA, 15 bp, Homo sapiens
aaaatgttttctagc

SEQ ID NO: 228428 - DNA, 15 bp, Homo sapiens
caaaatgttttctag

SEQ ID NO: 228429 - DNA, 15 bp, Homo sapiens
ccaaaatgttttcta

SEQ ID NO: 228430 - DNA, 15 bp, Homo sapiens
tccaaaatgttttct

SEQ ID NO: 228431 - DNA, 15 bp, Homo sapiens
ttccaaaatgttttc

SEQ ID NO: 228432 - DNA, 15 bp, Homo sapiens
tttccaaaatgtttt

SEQ ID NO: 228433 - DNA, 15 bp, Homo sapiens
atttccaaaatgttt

SEQ ID NO: 228434 - DNA, 15 bp, Homo sapiens
aatttccaaaatgtt

SEQ ID NO: 228435 - DNA, 15 bp, Homo sapiens
gaatttccaaaatgt

SEQ ID NO: 228436 - DNA, 15 bp, Homo sapiens
ggaatttccaaaatg

SEQ ID NO: 228437 - DNA, 15 bp, Homo sapiens
gggaatttccaaaat

SEQ ID NO: 228438 - DNA, 15 bp, Homo sapiens
tgggaatttccaaaa

SEQ ID NO: 228439 - DNA, 15 bp, Homo sapiens
atgggaatttccaaa

SEQ ID NO: 228440 - DNA, 15 bp, Homo sapiens
gatgggaatttccaa

SEQ ID NO: 228441 - DNA, 15 bp, Homo sapiens
agatgggaatttcca

SEQ ID NO: 228442 - DNA, 15 bp, Homo sapiens
aagatgggaatttcc

SEQ ID NO: 228443 - DNA, 15 bp, Homo sapiens
aaagatgggaatttc

SEQ ID NO: 228444 - DNA, 15 bp, Homo sapiens
taaagatgggaattt

SEQ ID NO: 228445 - DNA, 15 bp, Homo sapiens
ataaagatgggaatt

SEQ ID NO: 228446 - DNA, 15 bp, Homo sapiens
aataaagatgggaat

SEQ ID NO: 228447 - DNA, 15 bp, Homo sapiens
aaataaagatgggaa

SEQ ID NO: 228448 - DNA, 15 bp, Homo sapiens
aaaataaagatggga

SEQ ID NO: 228449 - DNA, 15 bp, Homo sapiens
aaaaataaagatggg

SEQ ID NO: 228450 - DNA, 15 bp, Homo sapiens
aaaaaataaagatgg

SEQ ID NO: 228451 - DNA, 15 bp, Homo sapiens
aaaaaaataaagatg

SEQ ID NO: 228452 - DNA, 15 bp, Homo sapiens
taaaaaaataaagat

SEQ ID NO: 228453 - DNA, 15 bp, Homo sapiens
ttaaaaaaataaaga

SEQ ID NO: 228454 - DNA, 15 bp, Homo sapiens
gttaaaaaaataaag

SEQ ID NO: 228455 - DNA, 15 bp, Homo sapiens
agttaaaaaaataaa

SEQ ID NO: 228456 - DNA, 15 bp, Homo sapiens
tagttaaaaaaataa

SEQ ID NO: 228457 - DNA, 15 bp, Homo sapiens
ttagttaaaaaaata

SEQ ID NO: 228458 - DNA, 15 bp, Homo sapiens
attagttaaaaaaat

SEQ ID NO: 228459 - DNA, 15 bp, Homo sapiens
tattagttaaaaaaa

SEQ ID NO: 228460 - DNA, 15 bp, Homo sapiens
atattagttaaaaaa

SEQ ID NO: 228461 - DNA, 15 bp, Homo sapiens
catattagttaaaaa

SEQ ID NO: 228462 - DNA, 15 bp, Homo sapiens
tcatattagttaaaa

SEQ ID NO: 228463 - DNA, 15 bp, Homo sapiens
atcatattagttaaa

SEQ ID NO: 228464 - DNA, 15 bp, Homo sapiens
aatcatattagttaa

SEQ ID NO: 228465 - DNA, 15 bp, Homo sapiens
taatcatattagtta

SEQ ID NO: 228466 - DNA, 15 bp, Homo sapiens
ataatcatattagtt

SEQ ID NO: 228467 - DNA, 15 bp, Homo sapiens
tataatcatattagt

SEQ ID NO: 228468 - DNA, 15 bp, Homo sapiens
ctataatcatattag

SEQ ID NO: 228469 - DNA, 15 bp, Homo sapiens
actataatcatatta

SEQ ID NO: 228470 - DNA, 15 bp, Homo sapiens
aactataatcatatt

SEQ ID NO: 228471 - DNA, 15 bp, Homo sapiens
aaactataatcatat

SEQ ID NO: 228472 - DNA, 15 bp, Homo sapiens
aaaactataatcata

SEQ ID NO: 228473 - DNA, 15 bp, Homo sapiens
taaaactataatcat

SEQ ID NO: 228474 - DNA, 15 bp, Homo sapiens
ttaaaactataatca

SEQ ID NO: 228475 - DNA, 15 bp, Homo sapiens
cttaaaactataatc

SEQ ID NO: 228476 - DNA, 15 bp, Homo sapiens
tcttaaaactataat

SEQ ID NO: 228477 - DNA, 15 bp, Homo sapiens
ttcttaaaactataa

SEQ ID NO: 228478 - DNA, 15 bp, Homo sapiens
gttcttaaaactata

SEQ ID NO: 228479 - DNA, 15 bp, Homo sapiens
ggttcttaaaactat

SEQ ID NO: 228480 - DNA, 15 bp, Homo sapiens
tggttcttaaaacta

SEQ ID NO: 228481 - DNA, 15 bp, Homo sapiens
atggttcttaaaact

SEQ ID NO: 228482 - DNA, 15 bp, Homo sapiens
aatggttcttaaaac

SEQ ID NO: 228483 - DNA, 15 bp, Homo sapiens
caatggttcttaaaa

SEQ ID NO: 228484 - DNA, 15 bp, Homo sapiens
ccaatggttcttaaa

SEQ ID NO: 228485 - DNA, 15 bp, Homo sapiens
accaatggttcttaa

SEQ ID NO: 228486 - DNA, 15 bp, Homo sapiens
gaccaatggttctta

SEQ ID NO: 228487 - DNA, 15 bp, Homo sapiens
tgaccaatggttctt

SEQ ID NO: 228488 - DNA, 15 bp, Homo sapiens
ttgaccaatggttct

SEQ ID NO: 228489 - DNA, 15 bp, Homo sapiens
cttgaccaatggttc

SEQ ID NO: 228490 - DNA, 15 bp, Homo sapiens
tcttgaccaatggtt

SEQ ID NO: 228491 - DNA, 15 bp, Homo sapiens
ttcttgaccaatggt

SEQ ID NO: 228492 - DNA, 15 bp, Homo sapiens
cttcttgaccaatgg

SEQ ID NO: 228493 - DNA, 15 bp, Homo sapiens
gcttcttgaccaatg

SEQ ID NO: 228494 - DNA, 15 bp, Homo sapiens
agcttcttgaccaat

SEQ ID NO: 228495 - DNA, 15 bp, Homo sapiens
tagcttcttgaccaa

SEQ ID NO: 228496 - DNA, 15 bp, Homo sapiens
ttagcttcttgacca

SEQ ID NO: 228497 - DNA, 15 bp, Homo sapiens
gttagcttcttgacc

SEQ ID NO: 228498 - DNA, 15 bp, Homo sapiens
agttagcttcttgac

SEQ ID NO: 228499 - DNA, 15 bp, Homo sapiens
aagttagcttcttga

SEQ ID NO: 228500 - DNA, 15 bp, Homo sapiens
aaagttagcttcttg

SEQ ID NO: 228501 - DNA, 15 bp, Homo sapiens
aaaagttagcttctt

SEQ ID NO: 228502 - DNA, 15 bp, Homo sapiens
aaaaagttagcttct

SEQ ID NO: 228503 - DNA, 15 bp, Homo sapiens
taaaaagttagcttc

SEQ ID NO: 228504 - DNA, 15 bp, Homo sapiens
ttaaaaagttagctt

SEQ ID NO: 228505 - DNA, 15 bp, Homo sapiens
tttaaaaagttagct

SEQ ID NO: 228506 - DNA, 15 bp, Homo sapiens
ttttaaaaagttagc

SEQ ID NO: 228507 - DNA, 15 bp, Homo sapiens
tttttaaaaagttag

SEQ ID NO: 228508 - DNA, 15 bp, Homo sapiens
ctttttaaaaagtta

SEQ ID NO: 228509 - DNA, 15 bp, Homo sapiens
actttttaaaaagtt

SEQ ID NO: 228510 - DNA, 15 bp, Homo sapiens
cactttttaaaaagt

SEQ ID NO: 228511 - DNA, 15 bp, Homo sapiens
ccactttttaaaaag

SEQ ID NO: 228512 - DNA, 15 bp, Homo sapiens
tccactttttaaaaa

SEQ ID NO: 228513 - DNA, 15 bp, Homo sapiens
ttccactttttaaaa

SEQ ID NO: 228514 - DNA, 15 bp, Homo sapiens
cttccactttttaaa

SEQ ID NO: 228515 - DNA, 15 bp, Homo sapiens
acttccactttttaa

SEQ ID NO: 228516 - DNA, 15 bp, Homo sapiens
tacttccacttttta

SEQ ID NO: 228517 - DNA, 15 bp, Homo sapiens
atacttccacttttt

SEQ ID NO: 228518 - DNA, 15 bp, Homo sapiens
catacttccactttt

SEQ ID NO: 228519 - DNA, 15 bp, Homo sapiens
tcatacttccacttt

SEQ ID NO: 228520 - DNA, 15 bp, Homo sapiens
atcatacttccactt

SEQ ID NO: 228521 - DNA, 15 bp, Homo sapiens
catcatacttccact

SEQ ID NO: 228522 - DNA, 15 bp, Homo sapiens
ccatcatacttccac

SEQ ID NO: 228523 - DNA, 15 bp, Homo sapiens
accatcatacttcca

SEQ ID NO: 228524 - DNA, 15 bp, Homo sapiens
aaccatcatacttcc

SEQ ID NO: 228525 - DNA, 15 bp, Homo sapiens
taaccatcatacttc

SEQ ID NO: 228526 - DNA, 15 bp, Homo sapiens
ctaaccatcatactt

SEQ ID NO: 228527 - DNA, 15 bp, Homo sapiens
tctaaccatcatact

SEQ ID NO: 228528 - DNA, 15 bp, Homo sapiens
ttctaaccatcatac

SEQ ID NO: 228529 - DNA, 15 bp, Homo sapiens
tttctaaccatcata

SEQ ID NO: 228530 - DNA, 15 bp, Homo sapiens
atttctaaccatcat

SEQ ID NO: 228531 - DNA, 15 bp, Homo sapiens
tatttctaaccatca

SEQ ID NO: 228532 - DNA, 15 bp, Homo sapiens
ttatttctaaccatc

SEQ ID NO: 228533 - DNA, 15 bp, Homo sapiens
cttatttctaaccat

SEQ ID NO: 228534 - DNA, 15 bp, Homo sapiens
tcttatttctaacca

SEQ ID NO: 228535 - DNA, 15 bp, Homo sapiens
ttcttatttctaacc

SEQ ID NO: 228536 - DNA, 15 bp, Homo sapiens
attcttatttctaac

SEQ ID NO: 228537 - DNA, 15 bp, Homo sapiens
cattcttatttctaa

SEQ ID NO: 228538 - DNA, 15 bp, Homo sapiens
gcattcttatttcta

SEQ ID NO: 228539 - DNA, 15 bp, Homo sapiens
agcattcttatttct

SEQ ID NO: 228540 - DNA, 15 bp, Homo sapiens
tagcattcttatttc

SEQ ID NO: 228541 - DNA, 15 bp, Homo sapiens
ttagcattcttattt

SEQ ID NO: 228542 - DNA, 15 bp, Homo sapiens
tttagcattcttatt

SEQ ID NO: 228543 - DNA, 15 bp, Homo sapiens
ctttagcattcttat

SEQ ID NO: 228544 - DNA, 15 bp, Homo sapiens
cctttagcattctta

SEQ ID NO: 228545 - DNA, 15 bp, Homo sapiens
acctttagcattctt

SEQ ID NO: 228546 - DNA, 15 bp, Homo sapiens
cacctttagcattct

SEQ ID NO: 228547 - DNA, 15 bp, Homo sapiens
gcacctttagcattc

SEQ ID NO: 228548 - DNA, 15 bp, Homo sapiens
tgcacctttagcatt

SEQ ID NO: 228549 - DNA, 15 bp, Homo sapiens
atgcacctttagcat

SEQ ID NO: 228550 - DNA, 15 bp, Homo sapiens
gatgcacctttagca

SEQ ID NO: 228551 - DNA, 15 bp, Homo sapiens
tgatgcacctttagc

SEQ ID NO: 228552 - DNA, 15 bp, Homo sapiens
ttgatgcacctttag

SEQ ID NO: 228553 - DNA, 15 bp, Homo sapiens
cttgatgcaccttta

SEQ ID NO: 228554 - DNA, 15 bp, Homo sapiens
gcttgatgcaccttt

SEQ ID NO: 228555 - DNA, 15 bp, Homo sapiens
agcttgatgcacctt

SEQ ID NO: 228556 - DNA, 15 bp, Homo sapiens
cagcttgatgcacct

SEQ ID NO: 228557 - DNA, 15 bp, Homo sapiens
tcagcttgatgcacc

SEQ ID NO: 228558 - DNA, 15 bp, Homo sapiens
atcagcttgatgcac

SEQ ID NO: 228559 - DNA, 15 bp, Homo sapiens
aatcagcttgatgca

SEQ ID NO: 228560 - DNA, 15 bp, Homo sapiens
aaatcagcttgatgc

SEQ ID NO: 228561 - DNA, 15 bp, Homo sapiens
aaaatcagcttgatg

SEQ ID NO: 228562 - DNA, 15 bp, Homo sapiens
taaaatcagcttgat

SEQ ID NO: 228563 - DNA, 15 bp, Homo sapiens
ttaaaatcagcttga

SEQ ID NO: 228564 - DNA, 15 bp, Homo sapiens
attaaaatcagcttg

SEQ ID NO: 228565 - DNA, 15 bp, Homo sapiens
gaattaaaatcagct

SEQ ID NO: 228566 - DNA, 15 bp, Homo sapiens
agaattaaaatcagc

SEQ ID NO: 228567 - DNA, 15 bp, Homo sapiens
tagaattaaaatcag

SEQ ID NO: 228568 - DNA, 15 bp, Homo sapiens
ttagaattaaaatca

SEQ ID NO: 228569 - DNA, 15 bp, Homo sapiens
tttagaattaaaatc

SEQ ID NO: 228570 - DNA, 15 bp, Homo sapiens
atttagaattaaaat

SEQ ID NO: 228571 - DNA, 15 bp, Homo sapiens
catttagaattaaaa

SEQ ID NO: 228572 - DNA, 15 bp, Homo sapiens
acatttagaattaaa

SEQ ID NO: 228573 - DNA, 15 bp, Homo sapiens
gacatttagaattaa

SEQ ID NO: 228574 - DNA, 15 bp, Homo sapiens
ggacatttagaatta

SEQ ID NO: 228575 - DNA, 15 bp, Homo sapiens
aggacatttagaatt

SEQ ID NO: 228576 - DNA, 15 bp, Homo sapiens
aaggacatttagaat

SEQ ID NO: 228577 - DNA, 15 bp, Homo sapiens
caaggacatttagaa

SEQ ID NO: 228578 - DNA, 15 bp, Homo sapiens
ccaaggacatttaga

SEQ ID NO: 228579 - DNA, 15 bp, Homo sapiens
gccaaggacatttag

SEQ ID NO: 228580 - DNA, 15 bp, Homo sapiens
tgccaaggacattta

SEQ ID NO: 228581 - DNA, 15 bp, Homo sapiens
ctgccaaggacattt

SEQ ID NO: 228582 - DNA, 15 bp, Homo sapiens
gctgccaaggacatt

SEQ ID NO: 228583 - DNA, 15 bp, Homo sapiens
tgctgccaaggacat

SEQ ID NO: 228584 - DNA, 15 bp, Homo sapiens
ttgctgccaaggaca

SEQ ID NO: 228585 - DNA, 15 bp, Homo sapiens
attgctgccaaggac

SEQ ID NO: 228586 - DNA, 15 bp, Homo sapiens
aattgctgccaagga

SEQ ID NO: 228587 - DNA, 15 bp, Homo sapiens
aaattgctgccaagg

SEQ ID NO: 228588 - DNA, 15 bp, Homo sapiens
taaattgctgccaag

SEQ ID NO: 228589 - DNA, 15 bp, Homo sapiens
ctaaattgctgccaa

SEQ ID NO: 228590 - DNA, 15 bp, Homo sapiens
tctaaattgctgcca

SEQ ID NO: 228591 - DNA, 15 bp, Homo sapiens
ttctaaattgctgcc

SEQ ID NO: 228592 - DNA, 15 bp, Homo sapiens
attctaaattgctgc

SEQ ID NO: 228593 - DNA, 15 bp, Homo sapiens
gattctaaattgctg

SEQ ID NO: 228594 - DNA, 15 bp, Homo sapiens
agattctaaattgct

SEQ ID NO: 228595 - DNA, 15 bp, Homo sapiens
cagattctaaattgc

SEQ ID NO: 228596 - DNA, 15 bp, Homo sapiens
acagattctaaattg

SEQ ID NO: 228597 - DNA, 15 bp, Homo sapiens
tacagattctaaatt

SEQ ID NO: 228598 - DNA, 15 bp, Homo sapiens
ttacagattctaaat

SEQ ID NO: 228599 - DNA, 15 bp, Homo sapiens
attacagattctaaa

SEQ ID NO: 228600 - DNA, 15 bp, Homo sapiens
tattacagattctaa

SEQ ID NO: 228601 - DNA, 15 bp, Homo sapiens
ttattacagattcta

SEQ ID NO: 228602 - DNA, 15 bp, Homo sapiens
tttattacagattct

SEQ ID NO: 228603 - DNA, 15 bp, Homo sapiens
gtttattacagattc

SEQ ID NO: 228604 - DNA, 15 bp, Homo sapiens
agtttattacagatt

SEQ ID NO: 228605 - DNA, 15 bp, Homo sapiens
tagtttattacagat

SEQ ID NO: 228606 - DNA, 15 bp, Homo sapiens
gtagtttattacaga

SEQ ID NO: 228607 - DNA, 15 bp, Homo sapiens
tgtagtttattacag

SEQ ID NO: 228608 - DNA, 15 bp, Homo sapiens
gtgtagtttattaca

SEQ ID NO: 228609 - DNA, 15 bp, Homo sapiens
ggtgtagtttattac

SEQ ID NO: 228610 - DNA, 15 bp, Homo sapiens
tggtgtagtttatta

SEQ ID NO: 228611 - DNA, 15 bp, Homo sapiens
ttggtgtagtttatt

SEQ ID NO: 228612 - DNA, 15 bp, Homo sapiens
tttggtgtagtttat

SEQ ID NO: 228613 - DNA, 15 bp, Homo sapiens
gtttggtgtagttta

SEQ ID NO: 228614 - DNA, 15 bp, Homo sapiens
tgtttggtgtagttt

SEQ ID NO: 228615 - DNA, 15 bp, Homo sapiens
ctgtttggtgtagtt

SEQ ID NO: 228616 - DNA, 15 bp, Homo sapiens
actgtttggtgtagt

SEQ ID NO: 228617 - DNA, 15 bp, Homo sapiens
aactgtttggtgtag

SEQ ID NO: 228618 - DNA, 15 bp, Homo sapiens
aaactgtttggtgta

SEQ ID NO: 228619 - DNA, 15 bp, Homo sapiens
aaaactgtttggtgt

SEQ ID NO: 228620 - DNA, 15 bp, Homo sapiens
caaaactgtttggtg

SEQ ID NO: 228621 - DNA, 15 bp, Homo sapiens
tcaaaactgtttggt

SEQ ID NO: 228622 - DNA, 15 bp, Homo sapiens
ctcaaaactgtttgg

SEQ ID NO: 228623 - DNA, 15 bp, Homo sapiens
cctcaaaactgtttg

SEQ ID NO: 228624 - DNA, 15 bp, Homo sapiens
ccctcaaaactgttt

SEQ ID NO: 228625 - DNA, 15 bp, Homo sapiens
cccctcaaaactgtt

SEQ ID NO: 228626 - DNA, 15 bp, Homo sapiens
tcccctcaaaactgt

SEQ ID NO: 228627 - DNA, 15 bp, Homo sapiens
ttcccctcaaaactg

SEQ ID NO: 228628 - DNA, 15 bp, Homo sapiens
cttcccctcaaaact

SEQ ID NO: 228629 - DNA, 15 bp, Homo sapiens
ccttcccctcaaaac

SEQ ID NO: 228630 - DNA, 15 bp, Homo sapiens
cccttcccctcaaaa

SEQ ID NO: 228631 - DNA, 15 bp, Homo sapiens
ccccttcccctcaaa

SEQ ID NO: 228632 - DNA, 15 bp, Homo sapiens
tccccttcccctcaa

SEQ ID NO: 228633 - DNA, 15 bp, Homo sapiens
atccccttcccctca

SEQ ID NO: 228634 - DNA, 15 bp, Homo sapiens
aatccccttcccctc

SEQ ID NO: 228635 - DNA, 15 bp, Homo sapiens
taatccccttcccct

SEQ ID NO: 228636 - DNA, 15 bp, Homo sapiens
ctaatccccttcccc

SEQ ID NO: 228637 - DNA, 15 bp, Homo sapiens
actaatccccttccc

SEQ ID NO: 228638 - DNA, 15 bp, Homo sapiens
aactaatccccttcc

SEQ ID NO: 228639 - DNA, 15 bp, Homo sapiens
aaactaatccccttc

SEQ ID NO: 228640 - DNA, 15 bp, Homo sapiens
gaaactaatcccctt

SEQ ID NO: 228641 - DNA, 15 bp, Homo sapiens
agaaactaatcccct

SEQ ID NO: 228642 - DNA, 15 bp, Homo sapiens
gagaaactaatcccc

SEQ ID NO: 228643 - DNA, 15 bp, Homo sapiens
ggagaaactaatccc

SEQ ID NO: 228644 - DNA, 15 bp, Homo sapiens
gggagaaactaatcc

SEQ ID NO: 228645 - DNA, 15 bp, Homo sapiens
ggggagaaactaatc

SEQ ID NO: 228646 - DNA, 15 bp, Homo sapiens
aggggagaaactaat

SEQ ID NO: 228647 - DNA, 15 bp, Homo sapiens
aaggggagaaactaa

SEQ ID NO: 228648 - DNA, 15 bp, Homo sapiens
gaaggggagaaacta

SEQ ID NO: 228649 - DNA, 15 bp, Homo sapiens
ggaaggggagaaact

SEQ ID NO: 228650 - DNA, 15 bp, Homo sapiens
aggaaggggagaaac

SEQ ID NO: 228651 - DNA, 15 bp, Homo sapiens
aaggaaggggagaaa

SEQ ID NO: 228652 - DNA, 15 bp, Homo sapiens
gaaggaaggggagaa

SEQ ID NO: 228653 - DNA, 15 bp, Homo sapiens
cgaaggaaggggaga

SEQ ID NO: 228654 - DNA, 15 bp, Homo sapiens
acgaaggaaggggag

SEQ ID NO: 228655 - DNA, 15 bp, Homo sapiens
cacgaaggaagggga

SEQ ID NO: 228656 - DNA, 15 bp, Homo sapiens
acacgaaggaagggg

SEQ ID NO: 228657 - DNA, 15 bp, Homo sapiens
cacacgaaggaaggg

SEQ ID NO: 228658 - DNA, 15 bp, Homo sapiens
acacacgaaggaagg

SEQ ID NO: 228659 - DNA, 15 bp, Homo sapiens
cacacacgaaggaag

SEQ ID NO: 228660 - DNA, 15 bp, Homo sapiens
acacacacgaaggaa

SEQ ID NO: 228661 - DNA, 15 bp, Homo sapiens
cacacacacgaagga

SEQ ID NO: 228662 - DNA, 15 bp, Homo sapiens
acacacacacgaagg

SEQ ID NO: 228663 - DNA, 15 bp, Homo sapiens
cacacacacacgaag

SEQ ID NO: 228664 - DNA, 15 bp, Homo sapiens
acacacacacacgaa

SEQ ID NO: 228665 - DNA, 15 bp, Homo sapiens
cacacacacacacga

SEQ ID NO: 228666 - DNA, 15 bp, Homo sapiens
gcacacacacacacg

SEQ ID NO: 228667 - DNA, 15 bp, Homo sapiens
cgcacacacacacac

SEQ ID NO: 228668 - DNA, 15 bp, Homo sapiens
gcgcacacacacaca

SEQ ID NO: 228669 - DNA, 15 bp, Homo sapiens
cgcgcacacacacac

SEQ ID NO: 228670 - DNA, 15 bp, Homo sapiens
acgcgcacacacaca

SEQ ID NO: 228671 - DNA, 15 bp, Homo sapiens
cacgcgcacacacac

SEQ ID NO: 228672 - DNA, 15 bp, Homo sapiens
acacgcgcacacaca

SEQ ID NO: 228673 - DNA, 15 bp, Homo sapiens
cacacgcgcacacac

SEQ ID NO: 228674 - DNA, 15 bp, Homo sapiens
acacacgcgcacaca

SEQ ID NO: 228675 - DNA, 15 bp, Homo sapiens
cacacacgcgcacac

SEQ ID NO: 228676 - DNA, 15 bp, Homo sapiens
acacacacgcgcaca

SEQ ID NO: 228677 - DNA, 15 bp, Homo sapiens
cacacacacgcgcac

SEQ ID NO: 228678 - DNA, 15 bp, Homo sapiens
acacacacacgcgca

SEQ ID NO: 228679 - DNA, 15 bp, Homo sapiens
cacacacacacgcgc

SEQ ID NO: 228680 - DNA, 15 bp, Homo sapiens
acacacacacacgcg

SEQ ID NO: 228681 - DNA, 15 bp, Homo sapiens
cacacacacacacgc

SEQ ID NO: 228682 - DNA, 15 bp, Homo sapiens
tgcacacacacacac

SEQ ID NO: 228683 - DNA, 15 bp, Homo sapiens
gtgcacacacacaca

SEQ ID NO: 228684 - DNA, 15 bp, Homo sapiens
ggtgcacacacacac

SEQ ID NO: 228685 - DNA, 15 bp, Homo sapiens
aggtgcacacacaca

SEQ ID NO: 228686 - DNA, 15 bp, Homo sapiens
aaggtgcacacacac

SEQ ID NO: 228687 - DNA, 15 bp, Homo sapiens
aaaggtgcacacaca

SEQ ID NO: 228688 - DNA, 15 bp, Homo sapiens
caaaggtgcacacac

SEQ ID NO: 228689 - DNA, 15 bp, Homo sapiens
acaaaggtgcacaca

SEQ ID NO: 228690 - DNA, 15 bp, Homo sapiens
cacaaaggtgcacac

SEQ ID NO: 228691 - DNA, 15 bp, Homo sapiens
acacaaaggtgcaca

SEQ ID NO: 228692 - DNA, 15 bp, Homo sapiens
aacacaaaggtgcac

SEQ ID NO: 228693 - DNA, 15 bp, Homo sapiens
gaacacaaaggtgca

SEQ ID NO: 228694 - DNA, 15 bp, Homo sapiens
agaacacaaaggtgc

SEQ ID NO: 228695 - DNA, 15 bp, Homo sapiens
tagaacacaaaggtg

SEQ ID NO: 228696 - DNA, 15 bp, Homo sapiens
ctagaacacaaaggt

SEQ ID NO: 228697 - DNA, 15 bp, Homo sapiens
gctagaacacaaagg

SEQ ID NO: 228698 - DNA, 15 bp, Homo sapiens
tgctagaacacaaag

SEQ ID NO: 228699 - DNA, 15 bp, Homo sapiens
atgctagaacacaaa

SEQ ID NO: 228700 - DNA, 15 bp, Homo sapiens
aatgctagaacacaa

SEQ ID NO: 228701 - DNA, 15 bp, Homo sapiens
caatgctagaacaca

SEQ ID NO: 228702 - DNA, 15 bp, Homo sapiens
acaatgctagaacac

SEQ ID NO: 228703 - DNA, 15 bp, Homo sapiens
aacaatgctagaaca

SEQ ID NO: 228704 - DNA, 15 bp, Homo sapiens
caacaatgctagaac

SEQ ID NO: 228705 - DNA, 15 bp, Homo sapiens
gcaacaatgctagaa

SEQ ID NO: 228706 - DNA, 15 bp, Homo sapiens
tgcaacaatgctaga

SEQ ID NO: 228707 - DNA, 15 bp, Homo sapiens
gtgcaacaatgctag

SEQ ID NO: 228708 - DNA, 15 bp, Homo sapiens
ggtgcaacaatgcta

SEQ ID NO: 228709 - DNA, 15 bp, Homo sapiens
gggtgcaacaatgct

SEQ ID NO: 228710 - DNA, 15 bp, Homo sapiens
tgggtgcaacaatgc

SEQ ID NO: 228711 - DNA, 15 bp, Homo sapiens
atgggtgcaacaatg

SEQ ID NO: 228712 - DNA, 15 bp, Homo sapiens
aatgggtgcaacaat

SEQ ID NO: 228713 - DNA, 15 bp, Homo sapiens
taatgggtgcaacaa

SEQ ID NO: 228714 - DNA, 15 bp, Homo sapiens
gtaatgggtgcaaca

SEQ ID NO: 228715 - DNA, 15 bp, Homo sapiens
tgtaatgggtgcaac

SEQ ID NO: 228716 - DNA, 15 bp, Homo sapiens
ctgtaatgggtgcaa

SEQ ID NO: 228717 - DNA, 15 bp, Homo sapiens
tctgtaatgggtgca

SEQ ID NO: 228718 - DNA, 15 bp, Homo sapiens
ctctgtaatgggtgc

SEQ ID NO: 228719 - DNA, 15 bp, Homo sapiens
gctctgtaatgggtg

SEQ ID NO: 228720 - DNA, 15 bp, Homo sapiens
agctctgtaatgggt

SEQ ID NO: 228721 - DNA, 15 bp, Homo sapiens
cagctctgtaatggg

SEQ ID NO: 228722 - DNA, 15 bp, Homo sapiens
ccagctctgtaatgg

SEQ ID NO: 228723 - DNA, 15 bp, Homo sapiens
cccagctctgtaatg

SEQ ID NO: 228724 - DNA, 15 bp, Homo sapiens
ccccagctctgtaat

SEQ ID NO: 228725 - DNA, 15 bp, Homo sapiens
cccccagctctgtaa

SEQ ID NO: 228726 - DNA, 15 bp, Homo sapiens
ccccccagctctgta

SEQ ID NO: 228727 - DNA, 15 bp, Homo sapiens
tccccccagctctgt

SEQ ID NO: 228728 - DNA, 15 bp, Homo sapiens
ttccccccagctctg

SEQ ID NO: 228729 - DNA, 15 bp, Homo sapiens
gttccccccagctct

SEQ ID NO: 228730 - DNA, 15 bp, Homo sapiens
agttccccccagctc

SEQ ID NO: 228731 - DNA, 15 bp, Homo sapiens
tagttccccccagct

SEQ ID NO: 228732 - DNA, 15 bp, Homo sapiens
atagttccccccagc

SEQ ID NO: 228733 - DNA, 15 bp, Homo sapiens
aatagttccccccag

SEQ ID NO: 228734 - DNA, 15 bp, Homo sapiens
aaatagttcccccca

SEQ ID NO: 228735 - DNA, 15 bp, Homo sapiens
aaaatagttcccccc

SEQ ID NO: 228736 - DNA, 15 bp, Homo sapiens
gaaaatagttccccc

SEQ ID NO: 228737 - DNA, 15 bp, Homo sapiens
ggaaaatagttcccc

SEQ ID NO: 228738 - DNA, 15 bp, Homo sapiens
tggaaaatagttccc

SEQ ID NO: 228739 - DNA, 15 bp, Homo sapiens
ttggaaaatagttcc

SEQ ID NO: 228740 - DNA, 15 bp, Homo sapiens
tttggaaaatagttc

SEQ ID NO: 228741 - DNA, 15 bp, Homo sapiens
ttttggaaaatagtt

SEQ ID NO: 228742 - DNA, 15 bp, Homo sapiens
attttggaaaatagt

SEQ ID NO: 228743 - DNA, 15 bp, Homo sapiens
aattttggaaaatag

SEQ ID NO: 228744 - DNA, 15 bp, Homo sapiens
taattttggaaaata

SEQ ID NO: 228745 - DNA, 15 bp, Homo sapiens
ataattttggaaaat

SEQ ID NO: 228746 - DNA, 15 bp, Homo sapiens
tataattttggaaaa

SEQ ID NO: 228747 - DNA, 15 bp, Homo sapiens
ctataattttggaaa

SEQ ID NO: 228748 - DNA, 15 bp, Homo sapiens
cctataattttggaa

SEQ ID NO: 228749 - DNA, 15 bp, Homo sapiens
acctataattttgga

SEQ ID NO: 228750 - DNA, 15 bp, Homo sapiens
cacctataattttgg

SEQ ID NO: 228751 - DNA, 15 bp, Homo sapiens
tcacctataattttg

SEQ ID NO: 228752 - DNA, 15 bp, Homo sapiens
ctcacctataatttt

SEQ ID NO: 228753 - DNA, 15 bp, Homo sapiens
tctcacctataattt

SEQ ID NO: 228754 - DNA, 15 bp, Homo sapiens
ttctcacctataatt

SEQ ID NO: 228755 - DNA, 15 bp, Homo sapiens
gttctcacctataat

SEQ ID NO: 228756 - DNA, 15 bp, Homo sapiens
tgttctcacctataa

SEQ ID NO: 228757 - DNA, 15 bp, Homo sapiens
ctgttctcacctata

SEQ ID NO: 228758 - DNA, 15 bp, Homo sapiens
actgttctcacctat

SEQ ID NO: 228759 - DNA, 15 bp, Homo sapiens
aactgttctcaccta

SEQ ID NO: 228760 - DNA, 15 bp, Homo sapiens
aaactgttctcacct

SEQ ID NO: 228761 - DNA, 15 bp, Homo sapiens
gaaactgttctcacc

SEQ ID NO: 228762 - DNA, 15 bp, Homo sapiens
agaaactgttctcac

SEQ ID NO: 228763 - DNA, 15 bp, Homo sapiens
aagaaactgttctca

SEQ ID NO: 228764 - DNA, 15 bp, Homo sapiens
caagaaactgttctc

SEQ ID NO: 228765 - DNA, 15 bp, Homo sapiens
ccaagaaactgttct

SEQ ID NO: 228766 - DNA, 15 bp, Homo sapiens
tccaagaaactgttc

SEQ ID NO: 228767 - DNA, 15 bp, Homo sapiens
atccaagaaactgtt

SEQ ID NO: 228768 - DNA, 15 bp, Homo sapiens
aatccaagaaactgt

SEQ ID NO: 228769 - DNA, 15 bp, Homo sapiens
caatccaagaaactg

SEQ ID NO: 228770 - DNA, 15 bp, Homo sapiens
acaatccaagaaact

SEQ ID NO: 228771 - DNA, 15 bp, Homo sapiens
gacaatccaagaaac

SEQ ID NO: 228772 - DNA, 15 bp, Homo sapiens
agacaatccaagaaa

SEQ ID NO: 228773 - DNA, 15 bp, Homo sapiens
aagacaatccaagaa

SEQ ID NO: 228774 - DNA, 15 bp, Homo sapiens
aaagacaatccaaga

SEQ ID NO: 228775 - DNA, 15 bp, Homo sapiens
gaaagacaatccaag

SEQ ID NO: 228776 - DNA, 15 bp, Homo sapiens
tgaaagacaatccaa

SEQ ID NO: 228777 - DNA, 15 bp, Homo sapiens
ctgaaagacaatcca

SEQ ID NO: 228778 - DNA, 15 bp, Homo sapiens
actgaaagacaatcc

SEQ ID NO: 228779 - DNA, 15 bp, Homo sapiens
cactgaaagacaatc

SEQ ID NO: 228780 - DNA, 15 bp, Homo sapiens
tcactgaaagacaat

SEQ ID NO: 228781 - DNA, 15 bp, Homo sapiens
ttcactgaaagacaa

SEQ ID NO: 228782 - DNA, 15 bp, Homo sapiens
cttcactgaaagaca

SEQ ID NO: 228783 - DNA, 15 bp, Homo sapiens
ccttcactgaaagac

SEQ ID NO: 228784 - DNA, 15 bp, Homo sapiens
accttcactgaaaga

SEQ ID NO: 228785 - DNA, 15 bp, Homo sapiens
taccttcactgaaag

SEQ ID NO: 228786 - DNA, 15 bp, Homo sapiens
ttaccttcactgaaa

SEQ ID NO: 228787 - DNA, 15 bp, Homo sapiens
tttaccttcactgaa

SEQ ID NO: 228788 - DNA, 15 bp, Homo sapiens
atttaccttcactga

SEQ ID NO: 228789 - DNA, 15 bp, Homo sapiens
aatttaccttcactg

SEQ ID NO: 228790 - DNA, 15 bp, Homo sapiens
gaatttaccttcact

SEQ ID NO: 228791 - DNA, 15 bp, Homo sapiens
ggaatttaccttcac

SEQ ID NO: 228792 - DNA, 15 bp, Homo sapiens
aggaatttaccttca

SEQ ID NO: 228793 - DNA, 15 bp, Homo sapiens
gaggaatttaccttc

SEQ ID NO: 228794 - DNA, 15 bp, Homo sapiens
agaggaatttacctt

SEQ ID NO: 228795 - DNA, 15 bp, Homo sapiens
cagaggaatttacct

SEQ ID NO: 228796 - DNA, 15 bp, Homo sapiens
acagaggaatttacc

SEQ ID NO: 228797 - DNA, 15 bp, Homo sapiens
tacagaggaatttac

SEQ ID NO: 228798 - DNA, 15 bp, Homo sapiens
ttacagaggaattta

SEQ ID NO: 228799 - DNA, 15 bp, Homo sapiens
tttacagaggaattt

SEQ ID NO: 228800 - DNA, 15 bp, Homo sapiens
ttttacagaggaatt

SEQ ID NO: 228801 - DNA, 15 bp, Homo sapiens
tttttacagaggaat

SEQ ID NO: 228802 - DNA, 15 bp, Homo sapiens
gtttttacagaggaa

SEQ ID NO: 228803 - DNA, 15 bp, Homo sapiens
agtttttacagagga

SEQ ID NO: 228804 - DNA, 15 bp, Homo sapiens
tagtttttacagagg

SEQ ID NO: 228805 - DNA, 15 bp, Homo sapiens
ttagtttttacagag

SEQ ID NO: 228806 - DNA, 15 bp, Homo sapiens
gttagtttttacaga

SEQ ID NO: 228807 - DNA, 15 bp, Homo sapiens
ggttagtttttacag

SEQ ID NO: 228808 - DNA, 15 bp, Homo sapiens
tggttagtttttaca

SEQ ID NO: 228809 - DNA, 15 bp, Homo sapiens
atggttagtttttac

SEQ ID NO: 228810 - DNA, 15 bp, Homo sapiens
gatggttagttttta

SEQ ID NO: 228811 - DNA, 15 bp, Homo sapiens
tgatggttagttttt

SEQ ID NO: 228812 - DNA, 15 bp, Homo sapiens
atgatggttagtttt

SEQ ID NO: 228813 - DNA, 15 bp, Homo sapiens
aatgatggttagttt

SEQ ID NO: 228814 - DNA, 15 bp, Homo sapiens
gaatgatggttagtt

SEQ ID NO: 228815 - DNA, 15 bp, Homo sapiens
tgaatgatggttagt

SEQ ID NO: 228816 - DNA, 15 bp, Homo sapiens
ctgaatgatggttag

SEQ ID NO: 228817 - DNA, 15 bp, Homo sapiens
actgaatgatggtta

SEQ ID NO: 228818 - DNA, 15 bp, Homo sapiens
tactgaatgatggtt

SEQ ID NO: 228819 - DNA, 15 bp, Homo sapiens
ttactgaatgatggt

SEQ ID NO: 228820 - DNA, 15 bp, Homo sapiens
tttactgaatgatgg

SEQ ID NO: 228821 - DNA, 15 bp, Homo sapiens
ttttactgaatgatg

SEQ ID NO: 228822 - DNA, 15 bp, Homo sapiens
tttttactgaatgat

SEQ ID NO: 228823 - DNA, 15 bp, Homo sapiens
gtttttactgaatga

SEQ ID NO: 228824 - DNA, 15 bp, Homo sapiens
agtttttactgaatg

SEQ ID NO: 228825 - DNA, 15 bp, Homo sapiens
cagtttttactgaat

SEQ ID NO: 228826 - DNA, 15 bp, Homo sapiens
gcagtttttactgaa

SEQ ID NO: 228827 - DNA, 15 bp, Homo sapiens
tgcagtttttactga

SEQ ID NO: 228828 - DNA, 15 bp, Homo sapiens
ctgcagtttttactg

SEQ ID NO: 228829 - DNA, 15 bp, Homo sapiens
cctgcagtttttact

SEQ ID NO: 228830 - DNA, 15 bp, Homo sapiens
tcctgcagtttttac

SEQ ID NO: 228831 - DNA, 15 bp, Homo sapiens
atcctgcagttttta

SEQ ID NO: 228832 - DNA, 15 bp, Homo sapiens
aatcctgcagttttt

SEQ ID NO: 228833 - DNA, 15 bp, Homo sapiens
gaatcctgcagtttt

SEQ ID NO: 228834 - DNA, 15 bp, Homo sapiens
ggaatcctgcagttt

SEQ ID NO: 228835 - DNA, 15 bp, Homo sapiens
aggaatcctgcagtt

SEQ ID NO: 228836 - DNA, 15 bp, Homo sapiens
aaggaatcctgcagt

SEQ ID NO: 228837 - DNA, 15 bp, Homo sapiens
aaaggaatcctgcag

SEQ ID NO: 228838 - DNA, 15 bp, Homo sapiens
caaaggaatcctgca

SEQ ID NO: 228839 - DNA, 15 bp, Homo sapiens
acaaaggaatcctgc

SEQ ID NO: 228840 - DNA, 15 bp, Homo sapiens
gacaaaggaatcctg

SEQ ID NO: 228841 - DNA, 15 bp, Homo sapiens
agacaaaggaatcct

SEQ ID NO: 228842 - DNA, 15 bp, Homo sapiens
aagacaaaggaatcc

SEQ ID NO: 228843 - DNA, 15 bp, Homo sapiens
gaagacaaaggaatc

SEQ ID NO: 228844 - DNA, 15 bp, Homo sapiens
agaagacaaaggaat

SEQ ID NO: 228845 - DNA, 15 bp, Homo sapiens
gagaagacaaaggaa

SEQ ID NO: 228846 - DNA, 15 bp, Homo sapiens
tgagaagacaaagga

SEQ ID NO: 228847 - DNA, 15 bp, Homo sapiens
ttgagaagacaaagg

SEQ ID NO: 228848 - DNA, 15 bp, Homo sapiens
tttgagaagacaaag

SEQ ID NO: 228849 - DNA, 15 bp, Homo sapiens
ttttgagaagacaaa

SEQ ID NO: 228850 - DNA, 15 bp, Homo sapiens
cttttgagaagacaa

SEQ ID NO: 228851 - DNA, 15 bp, Homo sapiens
gcttttgagaagaca

SEQ ID NO: 228852 - DNA, 15 bp, Homo sapiens
ggcttttgagaagac

SEQ ID NO: 228853 - DNA, 15 bp, Homo sapiens
aggcttttgagaaga

SEQ ID NO: 228854 - DNA, 15 bp, Homo sapiens
caggcttttgagaag

SEQ ID NO: 228855 - DNA, 15 bp, Homo sapiens
acaggcttttgagaa

SEQ ID NO: 228856 - DNA, 15 bp, Homo sapiens
aacaggcttttgaga

SEQ ID NO: 228857 - DNA, 15 bp, Homo sapiens
aaacaggcttttgag

SEQ ID NO: 228858 - DNA, 15 bp, Homo sapiens
gaaacaggcttttga

SEQ ID NO: 228859 - DNA, 15 bp, Homo sapiens
agaaacaggcttttg

SEQ ID NO: 228860 - DNA, 15 bp, Homo sapiens
gagaaacaggctttt

SEQ ID NO: 228861 - DNA, 15 bp, Homo sapiens
tgagaaacaggcttt

SEQ ID NO: 228862 - DNA, 15 bp, Homo sapiens
atgagaaacaggctt

SEQ ID NO: 228863 - DNA, 15 bp, Homo sapiens
gatgagaaacaggct

SEQ ID NO: 228864 - DNA, 15 bp, Homo sapiens
ggatgagaaacaggc

SEQ ID NO: 228865 - DNA, 15 bp, Homo sapiens
aggatgagaaacagg

SEQ ID NO: 228866 - DNA, 15 bp, Homo sapiens
taggatgagaaacag

SEQ ID NO: 228867 - DNA, 15 bp, Homo sapiens
ttaggatgagaaaca

SEQ ID NO: 228868 - DNA, 15 bp, Homo sapiens
tttaggatgagaaac

SEQ ID NO: 228869 - DNA, 15 bp, Homo sapiens
atttaggatgagaaa

SEQ ID NO: 228870 - DNA, 15 bp, Homo sapiens
aatttaggatgagaa

SEQ ID NO: 228871 - DNA, 15 bp, Homo sapiens
taatttaggatgaga

SEQ ID NO: 228872 - DNA, 15 bp, Homo sapiens
ttaatttaggatgag

SEQ ID NO: 228873 - DNA, 15 bp, Homo sapiens
tttaatttaggatga

SEQ ID NO: 228874 - DNA, 15 bp, Homo sapiens
ttttaatttaggatg

SEQ ID NO: 228875 - DNA, 15 bp, Homo sapiens
tttttaatttaggat

SEQ ID NO: 228876 - DNA, 15 bp, Homo sapiens
atttttaatttagga

SEQ ID NO: 228877 - DNA, 15 bp, Homo sapiens
aatttttaatttagg

SEQ ID NO: 228878 - DNA, 15 bp, Homo sapiens
taatttttaatttag

SEQ ID NO: 228879 - DNA, 15 bp, Homo sapiens
ataatttttaattta

SEQ ID NO: 228880 - DNA, 15 bp, Homo sapiens
aataatttttaattt

SEQ ID NO: 228881 - DNA, 15 bp, Homo sapiens
gaataatttttaatt

SEQ ID NO: 228882 - DNA, 15 bp, Homo sapiens
tgaataatttttaat

SEQ ID NO: 228883 - DNA, 15 bp, Homo sapiens
ctgaataatttttaa

SEQ ID NO: 228884 - DNA, 15 bp, Homo sapiens
cctgaataattttta

SEQ ID NO: 228885 - DNA, 15 bp, Homo sapiens
tcctgaataattttt

SEQ ID NO: 228886 - DNA, 15 bp, Homo sapiens
ttcctgaataatttt

SEQ ID NO: 228887 - DNA, 15 bp, Homo sapiens
tttcctgaataattt

SEQ ID NO: 228888 - DNA, 15 bp, Homo sapiens
atttcctgaataatt

SEQ ID NO: 228889 - DNA, 15 bp, Homo sapiens
tatttcctgaataat

SEQ ID NO: 228890 - DNA, 15 bp, Homo sapiens
ctatttcctgaataa

SEQ ID NO: 228891 - DNA, 15 bp, Homo sapiens
tctatttcctgaata

SEQ ID NO: 228892 - DNA, 15 bp, Homo sapiens
ctctatttcctgaat

SEQ ID NO: 228893 - DNA, 15 bp, Homo sapiens
tctctatttcctgaa

SEQ ID NO: 228894 - DNA, 15 bp, Homo sapiens
ctctctatttcctga

SEQ ID NO: 228895 - DNA, 15 bp, Homo sapiens
cctctctatttcctg

SEQ ID NO: 228896 - DNA, 15 bp, Homo sapiens
tcctctctatttcct

SEQ ID NO: 228897 - DNA, 15 bp, Homo sapiens
gtcctctctatttcc

SEQ ID NO: 228898 - DNA, 15 bp, Homo sapiens
tgtcctctctatttc

SEQ ID NO: 228899 - DNA, 15 bp, Homo sapiens
atgtcctctctattt

SEQ ID NO: 228900 - DNA, 15 bp, Homo sapiens
aatgtcctctctatt

SEQ ID NO: 228901 - DNA, 15 bp, Homo sapiens
taatgtcctctctat

SEQ ID NO: 228902 - DNA, 15 bp, Homo sapiens
ataatgtcctctcta

SEQ ID NO: 228903 - DNA, 15 bp, Homo sapiens
aataatgtcctctct

SEQ ID NO: 228904 - DNA, 15 bp, Homo sapiens
caataatgtcctctc

SEQ ID NO: 228905 - DNA, 15 bp, Homo sapiens
ccaataatgtcctct

SEQ ID NO: 228906 - DNA, 15 bp, Homo sapiens
tccaataatgtcctc

SEQ ID NO: 228907 - DNA, 15 bp, Homo sapiens
ctccaataatgtcct

SEQ ID NO: 228908 - DNA, 15 bp, Homo sapiens
cctccaataatgtcc

SEQ ID NO: 228909 - DNA, 15 bp, Homo sapiens
ccctccaataatgtc

SEQ ID NO: 228910 - DNA, 15 bp, Homo sapiens
cccctccaataatgt

SEQ ID NO: 228911 - DNA, 15 bp, Homo sapiens
acccctccaataatg

SEQ ID NO: 228912 - DNA, 15 bp, Homo sapiens
cacccctccaataat

SEQ ID NO: 228913 - DNA, 15 bp, Homo sapiens
ccacccctccaataa

SEQ ID NO: 228914 - DNA, 15 bp, Homo sapiens
tccacccctccaata

SEQ ID NO: 228915 - DNA, 15 bp, Homo sapiens
ttccacccctccaat

SEQ ID NO: 228916 - DNA, 15 bp, Homo sapiens
tttccacccctccaa

SEQ ID NO: 228917 - DNA, 15 bp, Homo sapiens
atttccacccctcca

SEQ ID NO: 228918 - DNA, 15 bp, Homo sapiens
tatttccacccctcc

SEQ ID NO: 228919 - DNA, 15 bp, Homo sapiens
ttatttccacccctc

SEQ ID NO: 228920 - DNA, 15 bp, Homo sapiens
cttatttccacccct

SEQ ID NO: 228921 - DNA, 15 bp, Homo sapiens
acttatttccacccc

SEQ ID NO: 228922 - DNA, 15 bp, Homo sapiens
aacttatttccaccc

SEQ ID NO: 228923 - DNA, 15 bp, Homo sapiens
caacttatttccacc

SEQ ID NO: 228924 - DNA, 15 bp, Homo sapiens
ccaacttatttccac

SEQ ID NO: 228925 - DNA, 15 bp, Homo sapiens
accaacttatttcca

SEQ ID NO: 228926 - DNA, 15 bp, Homo sapiens
aaccaacttatttcc

SEQ ID NO: 228927 - DNA, 15 bp, Homo sapiens
aaaccaacttatttc

SEQ ID NO: 228928 - DNA, 15 bp, Homo sapiens
aaaaccaacttattt

SEQ ID NO: 228929 - DNA, 15 bp, Homo sapiens
gaaaaccaacttatt

SEQ ID NO: 228930 - DNA, 15 bp, Homo sapiens
agaaaaccaacttat

SEQ ID NO: 228931 - DNA, 15 bp, Homo sapiens
aagaaaaccaactta

SEQ ID NO: 228932 - DNA, 15 bp, Homo sapiens
aaagaaaaccaactt

SEQ ID NO: 228933 - DNA, 15 bp, Homo sapiens
aaaagaaaaccaact

SEQ ID NO: 228934 - DNA, 15 bp, Homo sapiens
aaaaagaaaaccaac

SEQ ID NO: 228935 - DNA, 15 bp, Homo sapiens
taaaaagaaaaccaa

SEQ ID NO: 228936 - DNA, 15 bp, Homo sapiens
ataaaaagaaaacca

SEQ ID NO: 228937 - DNA, 15 bp, Homo sapiens
aataaaaagaaaacc

SEQ ID NO: 228938 - DNA, 15 bp, Homo sapiens
caataaaaagaaaac

SEQ ID NO: 228939 - DNA, 15 bp, Homo sapiens
acaataaaaagaaaa

SEQ ID NO: 228940 - DNA, 15 bp, Homo sapiens
tacaataaaaagaaa

SEQ ID NO: 228941 - DNA, 15 bp, Homo sapiens
atacaataaaaagaa

SEQ ID NO: 228942 - DNA, 15 bp, Homo sapiens
gatacaataaaaaga

SEQ ID NO: 228943 - DNA, 15 bp, Homo sapiens
agatacaataaaaag

SEQ ID NO: 228944 - DNA, 15 bp, Homo sapiens
aagatacaataaaaa

SEQ ID NO: 228945 - DNA, 15 bp, Homo sapiens
aaagatacaataaaa

SEQ ID NO: 228946 - DNA, 15 bp, Homo sapiens
aaaagatacaataaa

SEQ ID NO: 228947 - DNA, 15 bp, Homo sapiens
caaaagatacaataa

SEQ ID NO: 228948 - DNA, 15 bp, Homo sapiens
tcaaaagatacaata

SEQ ID NO: 228949 - DNA, 15 bp, Homo sapiens
ctcaaaagatacaat

SEQ ID NO: 228950 - DNA, 15 bp, Homo sapiens
cctcaaaagatacaa

SEQ ID NO: 228951 - DNA, 15 bp, Homo sapiens
tcctcaaaagataca

SEQ ID NO: 228952 - DNA, 15 bp, Homo sapiens
atcctcaaaagatac

SEQ ID NO: 228953 - DNA, 15 bp, Homo sapiens
gatcctcaaaagata

SEQ ID NO: 228954 - DNA, 15 bp, Homo sapiens
ggatcctcaaaagat

SEQ ID NO: 228955 - DNA, 15 bp, Homo sapiens
tggatcctcaaaaga

SEQ ID NO: 228956 - DNA, 15 bp, Homo sapiens
ctggatcctcaaaag

SEQ ID NO: 228957 - DNA, 15 bp, Homo sapiens
cctggatcctcaaaa

SEQ ID NO: 228958 - DNA, 15 bp, Homo sapiens
ccctggatcctcaaa

SEQ ID NO: 228959 - DNA, 15 bp, Homo sapiens
tccctggatcctcaa

SEQ ID NO: 228960 - DNA, 15 bp, Homo sapiens
gtccctggatcctca

SEQ ID NO: 228961 - DNA, 15 bp, Homo sapiens
agtccctggatcctc

SEQ ID NO: 228962 - DNA, 15 bp, Homo sapiens
aagtccctggatcct

SEQ ID NO: 228963 - DNA, 15 bp, Homo sapiens
gaagtccctggatcc

SEQ ID NO: 228964 - DNA, 15 bp, Homo sapiens
agaagtccctggatc

SEQ ID NO: 228965 - DNA, 15 bp, Homo sapiens
tagaagtccctggat

SEQ ID NO: 228966 - DNA, 15 bp, Homo sapiens
gtagaagtccctgga

SEQ ID NO: 228967 - DNA, 15 bp, Homo sapiens
ggtagaagtccctgg

SEQ ID NO: 228968 - DNA, 15 bp, Homo sapiens
tggtagaagtccctg

SEQ ID NO: 228969 - DNA, 15 bp, Homo sapiens
atggtagaagtccct

SEQ ID NO: 228970 - DNA, 15 bp, Homo sapiens
aatggtagaagtccc

SEQ ID NO: 228971 - DNA, 15 bp, Homo sapiens
aaatggtagaagtcc

SEQ ID NO: 228972 - DNA, 15 bp, Homo sapiens
gaaatggtagaagtc

SEQ ID NO: 228973 - DNA, 15 bp, Homo sapiens
ggaaatggtagaagt

SEQ ID NO: 228974 - DNA, 15 bp, Homo sapiens
gggaaatggtagaag

SEQ ID NO: 228975 - DNA, 15 bp, Homo sapiens
tgggaaatggtagaa

SEQ ID NO: 228976 - DNA, 15 bp, Homo sapiens
atgggaaatggtaga

SEQ ID NO: 228977 - DNA, 15 bp, Homo sapiens
gatgggaaatggtag

SEQ ID NO: 228978 - DNA, 15 bp, Homo sapiens
agatgggaaatggta

SEQ ID NO: 228979 - DNA, 15 bp, Homo sapiens
tagatgggaaatggt

SEQ ID NO: 228980 - DNA, 15 bp, Homo sapiens
ttagatgggaaatgg

SEQ ID NO: 228981 - DNA, 15 bp, Homo sapiens
gttagatgggaaatg

SEQ ID NO: 228982 - DNA, 15 bp, Homo sapiens
tgttagatgggaaat

SEQ ID NO: 228983 - DNA, 15 bp, Homo sapiens
atgttagatgggaaa

SEQ ID NO: 228984 - DNA, 15 bp, Homo sapiens
tatgttagatgggaa

SEQ ID NO: 228985 - DNA, 15 bp, Homo sapiens
gtatgttagatggga

SEQ ID NO: 228986 - DNA, 15 bp, Homo sapiens
tgtatgttagatggg

SEQ ID NO: 228987 - DNA, 15 bp, Homo sapiens
ctgtatgttagatgg

SEQ ID NO: 228988 - DNA, 15 bp, Homo sapiens
tctgtatgttagatg

SEQ ID NO: 228989 - DNA, 15 bp, Homo sapiens
ctctgtatgttagat

SEQ ID NO: 228990 - DNA, 15 bp, Homo sapiens
tctctgtatgttaga

SEQ ID NO: 228991 - DNA, 15 bp, Homo sapiens
ttctctgtatgttag

SEQ ID NO: 228992 - DNA, 15 bp, Homo sapiens
cttctctgtatgtta

SEQ ID NO: 228993 - DNA, 15 bp, Homo sapiens
ccttctctgtatgtt

SEQ ID NO: 228994 - DNA, 15 bp, Homo sapiens
tccttctctgtatgt

SEQ ID NO: 228995 - DNA, 15 bp, Homo sapiens
atccttctctgtatg

SEQ ID NO: 228996 - DNA, 15 bp, Homo sapiens
aatccttctctgtat

SEQ ID NO: 228997 - DNA, 15 bp, Homo sapiens
gaatccttctctgta

SEQ ID NO: 228998 - DNA, 15 bp, Homo sapiens
agaatccttctctgt

SEQ ID NO: 228999 - DNA, 15 bp, Homo sapiens
gagaatccttctctg

SEQ ID NO: 229000 - DNA, 15 bp, Homo sapiens
agagaatccttctct

SEQ ID NO: 229001 - DNA, 15 bp, Homo sapiens
tagagaatccttctc

SEQ ID NO: 229002 - DNA, 15 bp, Homo sapiens
ctagagaatccttct

SEQ ID NO: 229003 - DNA, 15 bp, Homo sapiens
cctagagaatccttc

SEQ ID NO: 229004 - DNA, 15 bp, Homo sapiens
acctagagaatcctt

SEQ ID NO: 229005 - DNA, 15 bp, Homo sapiens
gacctagagaatcct

SEQ ID NO: 229006 - DNA, 15 bp, Homo sapiens
ggacctagagaatcc

SEQ ID NO: 229007 - DNA, 15 bp, Homo sapiens
gggacctagagaatc

SEQ ID NO: 229008 - DNA, 15 bp, Homo sapiens
agggacctagagaat

SEQ ID NO: 229009 - DNA, 15 bp, Homo sapiens
cagggacctagagaa

SEQ ID NO: 229010 - DNA, 15 bp, Homo sapiens
acagggacctagaga

SEQ ID NO: 229011 - DNA, 15 bp, Homo sapiens
gacagggacctagag

SEQ ID NO: 229012 - DNA, 15 bp, Homo sapiens
agacagggacctaga

SEQ ID NO: 229013 - DNA, 15 bp, Homo sapiens
tagacagggacctag

SEQ ID NO: 229014 - DNA, 15 bp, Homo sapiens
atagacagggaccta

SEQ ID NO: 229015 - DNA, 15 bp, Homo sapiens
tatagacagggacct

SEQ ID NO: 229016 - DNA, 15 bp, Homo sapiens
ctatagacagggacc

SEQ ID NO: 229017 - DNA, 15 bp, Homo sapiens
tctatagacagggac

SEQ ID NO: 229018 - DNA, 15 bp, Homo sapiens
gtctatagacaggga

SEQ ID NO: 229019 - DNA, 15 bp, Homo sapiens
agtctatagacaggg

SEQ ID NO: 229020 - DNA, 15 bp, Homo sapiens
cagtctatagacagg

SEQ ID NO: 229021 - DNA, 15 bp, Homo sapiens
gcagtctatagacag

SEQ ID NO: 229022 - DNA, 15 bp, Homo sapiens
tgcagtctatagaca

SEQ ID NO: 229023 - DNA, 15 bp, Homo sapiens
ctgcagtctatagac

SEQ ID NO: 229024 - DNA, 15 bp, Homo sapiens
actgcagtctataga

SEQ ID NO: 229025 - DNA, 15 bp, Homo sapiens
tactgcagtctatag

SEQ ID NO: 229026 - DNA, 15 bp, Homo sapiens
ttactgcagtctata

SEQ ID NO: 229027 - DNA, 15 bp, Homo sapiens
gttactgcagtctat

SEQ ID NO: 229028 - DNA, 15 bp, Homo sapiens
agttactgcagtcta

SEQ ID NO: 229029 - DNA, 15 bp, Homo sapiens
aagttactgcagtct

SEQ ID NO: 229030 - DNA, 15 bp, Homo sapiens
aaagttactgcagtc

SEQ ID NO: 229031 - DNA, 15 bp, Homo sapiens
gaaagttactgcagt

SEQ ID NO: 229032 - DNA, 15 bp, Homo sapiens
ggaaagttactgcag

SEQ ID NO: 229033 - DNA, 15 bp, Homo sapiens
aggaaagttactgca

SEQ ID NO: 229034 - DNA, 15 bp, Homo sapiens
taggaaagttactgc

SEQ ID NO: 229035 - DNA, 15 bp, Homo sapiens
ataggaaagttactg

SEQ ID NO: 229036 - DNA, 15 bp, Homo sapiens
tataggaaagttact

SEQ ID NO: 229037 - DNA, 15 bp, Homo sapiens
ctataggaaagttac

SEQ ID NO: 229038 - DNA, 15 bp, Homo sapiens
tctataggaaagtta

SEQ ID NO: 229039 - DNA, 15 bp, Homo sapiens
ttctataggaaagtt

SEQ ID NO: 229040 - DNA, 15 bp, Homo sapiens
gttctataggaaagt

SEQ ID NO: 229041 - DNA, 15 bp, Homo sapiens
ggttctataggaaag

SEQ ID NO: 229042 - DNA, 15 bp, Homo sapiens
tggttctataggaaa

SEQ ID NO: 229043 - DNA, 15 bp, Homo sapiens
ttggttctataggaa

SEQ ID NO: 229044 - DNA, 15 bp, Homo sapiens
attggttctatagga

SEQ ID NO: 229045 - DNA, 15 bp, Homo sapiens
aattggttctatagg

SEQ ID NO: 229046 - DNA, 15 bp, Homo sapiens
aaattggttctatag

SEQ ID NO: 229047 - DNA, 15 bp, Homo sapiens
caaattggttctata

SEQ ID NO: 229048 - DNA, 15 bp, Homo sapiens
gcaaattggttctat

SEQ ID NO: 229049 - DNA, 15 bp, Homo sapiens
tgcaaattggttcta

SEQ ID NO: 229050 - DNA, 15 bp, Homo sapiens
ttgcaaattggttct

SEQ ID NO: 229051 - DNA, 15 bp, Homo sapiens
attgcaaattggttc

SEQ ID NO: 229052 - DNA, 15 bp, Homo sapiens
aattgcaaattggtt

SEQ ID NO: 229053 - DNA, 15 bp, Homo sapiens
aaattgcaaattggt

SEQ ID NO: 229054 - DNA, 15 bp, Homo sapiens
aaaattgcaaattgg

SEQ ID NO: 229055 - DNA, 15 bp, Homo sapiens
taaaattgcaaattg

SEQ ID NO: 229056 - DNA, 15 bp, Homo sapiens
ctaaaattgcaaatt

SEQ ID NO: 229057 - DNA, 15 bp, Homo sapiens
tctaaaattgcaaat

SEQ ID NO: 229058 - DNA, 15 bp, Homo sapiens
ttctaaaattgcaaa

SEQ ID NO: 229059 - DNA, 15 bp, Homo sapiens
tttctaaaattgcaa

SEQ ID NO: 229060 - DNA, 15 bp, Homo sapiens
atttctaaaattgca

SEQ ID NO: 229061 - DNA, 15 bp, Homo sapiens
aatttctaaaattgc

SEQ ID NO: 229062 - DNA, 15 bp, Homo sapiens
aaatttctaaaattg

SEQ ID NO: 229063 - DNA, 15 bp, Homo sapiens
gaaatttctaaaatt

SEQ ID NO: 229064 - DNA, 15 bp, Homo sapiens
agaaatttctaaaat

SEQ ID NO: 229065 - DNA, 15 bp, Homo sapiens
tagaaatttctaaaa

SEQ ID NO: 229066 - DNA, 15 bp, Homo sapiens
ctagaaatttctaaa

SEQ ID NO: 229067 - DNA, 15 bp, Homo sapiens
cctagaaatttctaa

SEQ ID NO: 229068 - DNA, 15 bp, Homo sapiens
acctagaaatttcta

SEQ ID NO: 229069 - DNA, 15 bp, Homo sapiens
gacctagaaatttct

SEQ ID NO: 229070 - DNA, 15 bp, Homo sapiens
agacctagaaatttc

SEQ ID NO: 229071 - DNA, 15 bp, Homo sapiens
tagacctagaaattt

SEQ ID NO: 229072 - DNA, 15 bp, Homo sapiens
ttagacctagaaatt

SEQ ID NO: 229073 - DNA, 15 bp, Homo sapiens
attagacctagaaat

SEQ ID NO: 229074 - DNA, 15 bp, Homo sapiens
aattagacctagaaa

SEQ ID NO: 229075 - DNA, 15 bp, Homo sapiens
taattagacctagaa

SEQ ID NO: 229076 - DNA, 15 bp, Homo sapiens
ataattagacctaga

SEQ ID NO: 229077 - DNA, 15 bp, Homo sapiens
aataattagacctag

SEQ ID NO: 229078 - DNA, 15 bp, Homo sapiens
caataattagaccta

SEQ ID NO: 229079 - DNA, 15 bp, Homo sapiens
tcaataattagacct

SEQ ID NO: 229080 - DNA, 15 bp, Homo sapiens
gtcaataattagacc

SEQ ID NO: 229081 - DNA, 15 bp, Homo sapiens
ggtcaataattagac

SEQ ID NO: 229082 - DNA, 15 bp, Homo sapiens
gggtcaataattaga

SEQ ID NO: 229083 - DNA, 15 bp, Homo sapiens
tgggtcaataattag

SEQ ID NO: 229084 - DNA, 15 bp, Homo sapiens
atgggtcaataatta

SEQ ID NO: 229085 - DNA, 15 bp, Homo sapiens
aatgggtcaataatt

SEQ ID NO: 229086 - DNA, 15 bp, Homo sapiens
taatgggtcaataat

SEQ ID NO: 229087 - DNA, 15 bp, Homo sapiens
gtaatgggtcaataa

SEQ ID NO: 229088 - DNA, 15 bp, Homo sapiens
tgtaatgggtcaata

SEQ ID NO: 229089 - DNA, 15 bp, Homo sapiens
ttgtaatgggtcaat

SEQ ID NO: 229090 - DNA, 15 bp, Homo sapiens
gttgtaatgggtcaa

SEQ ID NO: 229091 - DNA, 15 bp, Homo sapiens
ggttgtaatgggtca

SEQ ID NO: 229092 - DNA, 15 bp, Homo sapiens
tggttgtaatgggtc

SEQ ID NO: 229093 - DNA, 15 bp, Homo sapiens
ttggttgtaatgggt

SEQ ID NO: 229094 - DNA, 15 bp, Homo sapiens
tttggttgtaatggg

SEQ ID NO: 229095 - DNA, 15 bp, Homo sapiens
ctttggttgtaatgg

SEQ ID NO: 229096 - DNA, 15 bp, Homo sapiens
cctttggttgtaatg

SEQ ID NO: 229097 - DNA, 15 bp, Homo sapiens
acctttggttgtaat

SEQ ID NO: 229098 - DNA, 15 bp, Homo sapiens
gacctttggttgtaa

SEQ ID NO: 229099 - DNA, 15 bp, Homo sapiens
tgacctttggttgta

SEQ ID NO: 229100 - DNA, 15 bp, Homo sapiens
ttgacctttggttgt

SEQ ID NO: 229101 - DNA, 15 bp, Homo sapiens
attgacctttggttg

SEQ ID NO: 229102 - DNA, 15 bp, Homo sapiens
cattgacctttggtt

SEQ ID NO: 229103 - DNA, 15 bp, Homo sapiens
gcattgacctttggt

SEQ ID NO: 229104 - DNA, 15 bp, Homo sapiens
tgcattgacctttgg

SEQ ID NO: 229105 - DNA, 15 bp, Homo sapiens
atgcattgacctttg

SEQ ID NO: 229106 - DNA, 15 bp, Homo sapiens
gatgcattgaccttt

SEQ ID NO: 229107 - DNA, 15 bp, Homo sapiens
ggatgcattgacctt

SEQ ID NO: 229108 - DNA, 15 bp, Homo sapiens
tggatgcattgacct

SEQ ID NO: 229109 - DNA, 15 bp, Homo sapiens
ctggatgcattgacc

SEQ ID NO: 229110 - DNA, 15 bp, Homo sapiens
gctggatgcattgac

SEQ ID NO: 229111 - DNA, 15 bp, Homo sapiens
ggctggatgcattga

SEQ ID NO: 229112 - DNA, 15 bp, Homo sapiens
tggctggatgcattg

SEQ ID NO: 229113 - DNA, 15 bp, Homo sapiens
ttggctggatgcatt

SEQ ID NO: 229114 - DNA, 15 bp, Homo sapiens
attggctggatgcat

SEQ ID NO: 229115 - DNA, 15 bp, Homo sapiens
gattggctggatgca

SEQ ID NO: 229116 - DNA, 15 bp, Homo sapiens
agattggctggatgc

SEQ ID NO: 229117 - DNA, 15 bp, Homo sapiens
aagattggctggatg

SEQ ID NO: 229118 - DNA, 15 bp, Homo sapiens
gaagattggctggat

SEQ ID NO: 229119 - DNA, 15 bp, Homo sapiens
ggaagattggctgga

SEQ ID NO: 229120 - DNA, 15 bp, Homo sapiens
aggaagattggctgg

SEQ ID NO: 229121 - DNA, 15 bp, Homo sapiens
aaggaagattggctg

SEQ ID NO: 229122 - DNA, 15 bp, Homo sapiens
gaaggaagattggct

SEQ ID NO: 229123 - DNA, 15 bp, Homo sapiens
agaaggaagattggc

SEQ ID NO: 229124 - DNA, 15 bp, Homo sapiens
tagaaggaagattgg

SEQ ID NO: 229125 - DNA, 15 bp, Homo sapiens
atagaaggaagattg

SEQ ID NO: 229126 - DNA, 15 bp, Homo sapiens
gatagaaggaagatt

SEQ ID NO: 229127 - DNA, 15 bp, Homo sapiens
tgatagaaggaagat

SEQ ID NO: 229128 - DNA, 15 bp, Homo sapiens
atgatagaaggaaga

SEQ ID NO: 229129 - DNA, 15 bp, Homo sapiens
gatgatagaaggaag

SEQ ID NO: 229130 - DNA, 15 bp, Homo sapiens
ggatgatagaaggaa

SEQ ID NO: 229131 - DNA, 15 bp, Homo sapiens
gggatgatagaagga

SEQ ID NO: 229132 - DNA, 15 bp, Homo sapiens
ggggatgatagaagg

SEQ ID NO: 229133 - DNA, 15 bp, Homo sapiens
aggggatgatagaag

SEQ ID NO: 229134 - DNA, 15 bp, Homo sapiens
caggggatgatagaa

SEQ ID NO: 229135 - DNA, 15 bp, Homo sapiens
gcaggggatgataga

SEQ ID NO: 229136 - DNA, 15 bp, Homo sapiens
ggcaggggatgatag

SEQ ID NO: 229137 - DNA, 15 bp, Homo sapiens
gggcaggggatgata

SEQ ID NO: 229138 - DNA, 15 bp, Homo sapiens
agggcaggggatgat

SEQ ID NO: 229139 - DNA, 15 bp, Homo sapiens
aagggcaggggatga

SEQ ID NO: 229140 - DNA, 15 bp, Homo sapiens
taagggcaggggatg

SEQ ID NO: 229141 - DNA, 15 bp, Homo sapiens
gtaagggcaggggat

SEQ ID NO: 229142 - DNA, 15 bp, Homo sapiens
agtaagggcagggga

SEQ ID NO: 229143 - DNA, 15 bp, Homo sapiens
aagtaagggcagggg

SEQ ID NO: 229144 - DNA, 15 bp, Homo sapiens
gaagtaagggcaggg

SEQ ID NO: 229145 - DNA, 15 bp, Homo sapiens
agaagtaagggcagg

SEQ ID NO: 229146 - DNA, 15 bp, Homo sapiens
tagaagtaagggcag

SEQ ID NO: 229147 - DNA, 15 bp, Homo sapiens
atagaagtaagggca

SEQ ID NO: 229148 - DNA, 15 bp, Homo sapiens
aatagaagtaagggc

SEQ ID NO: 229149 - DNA, 15 bp, Homo sapiens
taatagaagtaaggg

SEQ ID NO: 229150 - DNA, 15 bp, Homo sapiens
ctaatagaagtaagg

SEQ ID NO: 229151 - DNA, 15 bp, Homo sapiens
cctaatagaagtaag

SEQ ID NO: 229152 - DNA, 15 bp, Homo sapiens
ccctaatagaagtaa

SEQ ID NO: 229153 - DNA, 15 bp, Homo sapiens
tccctaatagaagta

SEQ ID NO: 229154 - DNA, 15 bp, Homo sapiens
gtccctaatagaagt

SEQ ID NO: 229155 - DNA, 15 bp, Homo sapiens
agtccctaatagaag

SEQ ID NO: 229156 - DNA, 15 bp, Homo sapiens
cagtccctaatagaa

SEQ ID NO: 229157 - DNA, 15 bp, Homo sapiens
ccagtccctaataga

SEQ ID NO: 229158 - DNA, 15 bp, Homo sapiens
cccagtccctaatag

SEQ ID NO: 229159 - DNA, 15 bp, Homo sapiens
tcccagtccctaata

SEQ ID NO: 229160 - DNA, 15 bp, Homo sapiens
atcccagtccctaat

SEQ ID NO: 229161 - DNA, 15 bp, Homo sapiens
aatcccagtccctaa

SEQ ID NO: 229162 - DNA, 15 bp, Homo sapiens
taatcccagtcccta

SEQ ID NO: 229163 - DNA, 15 bp, Homo sapiens
gtaatcccagtccct

SEQ ID NO: 229164 - DNA, 15 bp, Homo sapiens
tgtaatcccagtccc

SEQ ID NO: 229165 - DNA, 15 bp, Homo sapiens
ctgtaatcccagtcc

SEQ ID NO: 229166 - DNA, 15 bp, Homo sapiens
cctgtaatcccagtc

SEQ ID NO: 229167 - DNA, 15 bp, Homo sapiens
ttgcctgtaatccca

SEQ ID NO: 229168 - DNA, 15 bp, Homo sapiens
tttgcctgtaatccc

SEQ ID NO: 229169 - DNA, 15 bp, Homo sapiens
ttttgcctgtaatcc

SEQ ID NO: 229170 - DNA, 15 bp, Homo sapiens
gttttgcctgtaatc

SEQ ID NO: 229171 - DNA, 15 bp, Homo sapiens
ggttttgcctgtaat

SEQ ID NO: 229172 - DNA, 15 bp, Homo sapiens
gggttttgcctgtaa

SEQ ID NO: 229173 - DNA, 15 bp, Homo sapiens
tgggttttgcctgta

SEQ ID NO: 229174 - DNA, 15 bp, Homo sapiens
atgggttttgcctgt

SEQ ID NO: 229175 - DNA, 15 bp, Homo sapiens
gatgggttttgcctg

SEQ ID NO: 229176 - DNA, 15 bp, Homo sapiens
tgatgggttttgcct

SEQ ID NO: 229177 - DNA, 15 bp, Homo sapiens
ttgatgggttttgcc

SEQ ID NO: 229178 - DNA, 15 bp, Homo sapiens
tttgatgggttttgc

SEQ ID NO: 229179 - DNA, 15 bp, Homo sapiens
atttgatgggttttg

SEQ ID NO: 229180 - DNA, 15 bp, Homo sapiens
catttgatgggtttt

SEQ ID NO: 229181 - DNA, 15 bp, Homo sapiens
gcatttgatgggttt

SEQ ID NO: 229182 - DNA, 15 bp, Homo sapiens
ggcatttgatgggtt

SEQ ID NO: 229183 - DNA, 15 bp, Homo sapiens
aggcatttgatgggt

SEQ ID NO: 229184 - DNA, 15 bp, Homo sapiens
gaggcatttgatggg

SEQ ID NO: 229185 - DNA, 15 bp, Homo sapiens
agaggcatttgatgg

SEQ ID NO: 229186 - DNA, 15 bp, Homo sapiens
aagaggcatttgatg

SEQ ID NO: 229187 - DNA, 15 bp, Homo sapiens
gaagaggcatttgat

SEQ ID NO: 229188 - DNA, 15 bp, Homo sapiens
agaagaggcatttga

SEQ ID NO: 229189 - DNA, 15 bp, Homo sapiens
tagaagaggcatttg

SEQ ID NO: 229190 - DNA, 15 bp, Homo sapiens
gtagaagaggcattt

SEQ ID NO: 229191 - DNA, 15 bp, Homo sapiens
ggtagaagaggcatt

SEQ ID NO: 229192 - DNA, 15 bp, Homo sapiens
tggtagaagaggcat

SEQ ID NO: 229193 - DNA, 15 bp, Homo sapiens
gtggtagaagaggca

SEQ ID NO: 229194 - DNA, 15 bp, Homo sapiens
agtggtagaagaggc

SEQ ID NO: 229195 - DNA, 15 bp, Homo sapiens
aagtggtagaagagg

SEQ ID NO: 229196 - DNA, 15 bp, Homo sapiens
aaagtggtagaagag

SEQ ID NO: 229197 - DNA, 15 bp, Homo sapiens
gaaagtggtagaaga

SEQ ID NO: 229198 - DNA, 15 bp, Homo sapiens
ggaaagtggtagaag

SEQ ID NO: 229199 - DNA, 15 bp, Homo sapiens
gggaaagtggtagaa

SEQ ID NO: 229200 - DNA, 15 bp, Homo sapiens
tgggaaagtggtaga

SEQ ID NO: 229201 - DNA, 15 bp, Homo sapiens
atgggaaagtggtag

SEQ ID NO: 229202 - DNA, 15 bp, Homo sapiens
aatgggaaagtggta

SEQ ID NO: 229203 - DNA, 15 bp, Homo sapiens
aaatgggaaagtggt

SEQ ID NO: 229204 - DNA, 15 bp, Homo sapiens
gaaatgggaaagtgg

SEQ ID NO: 229205 - DNA, 15 bp, Homo sapiens
agaaatgggaaagtg

SEQ ID NO: 229206 - DNA, 15 bp, Homo sapiens
aagaaatgggaaagt

SEQ ID NO: 229207 - DNA, 15 bp, Homo sapiens
taagaaatgggaaag

SEQ ID NO: 229208 - DNA, 15 bp, Homo sapiens
ttaagaaatgggaaa

SEQ ID NO: 229209 - DNA, 15 bp, Homo sapiens
gttaagaaatgggaa

SEQ ID NO: 229210 - DNA, 15 bp, Homo sapiens
ggttaagaaatggga

SEQ ID NO: 229211 - DNA, 15 bp, Homo sapiens
tggttaagaaatggg

SEQ ID NO: 229212 - DNA, 15 bp, Homo sapiens
atggttaagaaatgg

SEQ ID NO: 229213 - DNA, 15 bp, Homo sapiens
aatggttaagaaatg

SEQ ID NO: 229214 - DNA, 15 bp, Homo sapiens
taatggttaagaaat

SEQ ID NO: 229215 - DNA, 15 bp, Homo sapiens
ctaatggttaagaaa

SEQ ID NO: 229216 - DNA, 15 bp, Homo sapiens
gctaatggttaagaa

SEQ ID NO: 229217 - DNA, 15 bp, Homo sapiens
ggctaatggttaaga

SEQ ID NO: 229218 - DNA, 15 bp, Homo sapiens
aggctaatggttaag

SEQ ID NO: 229219 - DNA, 15 bp, Homo sapiens
gaggctaatggttaa

SEQ ID NO: 229220 - DNA, 15 bp, Homo sapiens
agaggctaatggtta

SEQ ID NO: 229221 - DNA, 15 bp, Homo sapiens
tagaggctaatggtt

SEQ ID NO: 229222 - DNA, 15 bp, Homo sapiens
ttagaggctaatggt

SEQ ID NO: 229223 - DNA, 15 bp, Homo sapiens
gttagaggctaatgg

SEQ ID NO: 229224 - DNA, 15 bp, Homo sapiens
agttagaggctaatg

SEQ ID NO: 229225 - DNA, 15 bp, Homo sapiens
aagttagaggctaat

SEQ ID NO: 229226 - DNA, 15 bp, Homo sapiens
gaagttagaggctaa

SEQ ID NO: 229227 - DNA, 15 bp, Homo sapiens
ggaagttagaggcta

SEQ ID NO: 229228 - DNA, 15 bp, Homo sapiens
aggaagttagaggct

SEQ ID NO: 229229 - DNA, 15 bp, Homo sapiens
gaggaagttagaggc

SEQ ID NO: 229230 - DNA, 15 bp, Homo sapiens
agaggaagttagagg

SEQ ID NO: 229231 - DNA, 15 bp, Homo sapiens
tagaggaagttagag

SEQ ID NO: 229232 - DNA, 15 bp, Homo sapiens
atagaggaagttaga

SEQ ID NO: 229233 - DNA, 15 bp, Homo sapiens
aatagaggaagttag

SEQ ID NO: 229234 - DNA, 15 bp, Homo sapiens
gaatagaggaagtta

SEQ ID NO: 229235 - DNA, 15 bp, Homo sapiens
tgaatagaggaagtt

SEQ ID NO: 229236 - DNA, 15 bp, Homo sapiens
ctgaatagaggaagt

SEQ ID NO: 229237 - DNA, 15 bp, Homo sapiens
actgaatagaggaag

SEQ ID NO: 229238 - DNA, 15 bp, Homo sapiens
aactgaatagaggaa

SEQ ID NO: 229239 - DNA, 15 bp, Homo sapiens
aaactgaatagagga

SEQ ID NO: 229240 - DNA, 15 bp, Homo sapiens
gaaactgaatagagg

SEQ ID NO: 229241 - DNA, 15 bp, Homo sapiens
agaaactgaatagag

SEQ ID NO: 229242 - DNA, 15 bp, Homo sapiens
gagaaactgaataga

SEQ ID NO: 229243 - DNA, 15 bp, Homo sapiens
tgagaaactgaatag

SEQ ID NO: 229244 - DNA, 15 bp, Homo sapiens
atgagaaactgaata

SEQ ID NO: 229245 - DNA, 15 bp, Homo sapiens
tatgagaaactgaat

SEQ ID NO: 229246 - DNA, 15 bp, Homo sapiens
atatgagaaactgaa

SEQ ID NO: 229247 - DNA, 15 bp, Homo sapiens
catatgagaaactga

SEQ ID NO: 229248 - DNA, 15 bp, Homo sapiens
gcatatgagaaactg

SEQ ID NO: 229249 - DNA, 15 bp, Homo sapiens
agcatatgagaaact

SEQ ID NO: 229250 - DNA, 15 bp, Homo sapiens
aagcatatgagaaac

SEQ ID NO: 229251 - DNA, 15 bp, Homo sapiens
aaagcatatgagaaa

SEQ ID NO: 229252 - DNA, 15 bp, Homo sapiens
gaaagcatatgagaa

SEQ ID NO: 229253 - DNA, 15 bp, Homo sapiens
tgaaagcatatgaga

SEQ ID NO: 229254 - DNA, 15 bp, Homo sapiens
atgaaagcatatgag

SEQ ID NO: 229255 - DNA, 15 bp, Homo sapiens
catgaaagcatatga

SEQ ID NO: 229256 - DNA, 15 bp, Homo sapiens
gcatgaaagcatatg

SEQ ID NO: 229257 - DNA, 15 bp, Homo sapiens
ggcatgaaagcatat

SEQ ID NO: 229258 - DNA, 15 bp, Homo sapiens
gggcatgaaagcata

SEQ ID NO: 229259 - DNA, 15 bp, Homo sapiens
tgggcatgaaagcat

SEQ ID NO: 229260 - DNA, 15 bp, Homo sapiens
atgggcatgaaagca

SEQ ID NO: 229261 - DNA, 15 bp, Homo sapiens
aatgggcatgaaagc

SEQ ID NO: 229262 - DNA, 15 bp, Homo sapiens
caatgggcatgaaag

SEQ ID NO: 229263 - DNA, 15 bp, Homo sapiens
ccaatgggcatgaaa

SEQ ID NO: 229264 - DNA, 15 bp, Homo sapiens
cccaatgggcatgaa

SEQ ID NO: 229265 - DNA, 15 bp, Homo sapiens
acccaatgggcatga

SEQ ID NO: 229266 - DNA, 15 bp, Homo sapiens
gacccaatgggcatg

SEQ ID NO: 229267 - DNA, 15 bp, Homo sapiens
tgacccaatgggcat

SEQ ID NO: 229268 - DNA, 15 bp, Homo sapiens
ctgacccaatgggca

SEQ ID NO: 229269 - DNA, 15 bp, Homo sapiens
tctgacccaatgggc

SEQ ID NO: 229270 - DNA, 15 bp, Homo sapiens
atctgacccaatggg

SEQ ID NO: 229271 - DNA, 15 bp, Homo sapiens
tatctgacccaatgg

SEQ ID NO: 229272 - DNA, 15 bp, Homo sapiens
ttatctgacccaatg

SEQ ID NO: 229273 - DNA, 15 bp, Homo sapiens
tttatctgacccaat

SEQ ID NO: 229274 - DNA, 15 bp, Homo sapiens
ctttatctgacccaa

SEQ ID NO: 229275 - DNA, 15 bp, Homo sapiens
cctttatctgaccca

SEQ ID NO: 229276 - DNA, 15 bp, Homo sapiens
tcctttatctgaccc

SEQ ID NO: 229277 - DNA, 15 bp, Homo sapiens
ttcctttatctgacc

SEQ ID NO: 229278 - DNA, 15 bp, Homo sapiens
gttcctttatctgac

SEQ ID NO: 229279 - DNA, 15 bp, Homo sapiens
tgttcctttatctga

SEQ ID NO: 229280 - DNA, 15 bp, Homo sapiens
atgttcctttatctg

SEQ ID NO: 229281 - DNA, 15 bp, Homo sapiens
aatgttcctttatct

SEQ ID NO: 229282 - DNA, 15 bp, Homo sapiens
gaatgttcctttatc

SEQ ID NO: 229283 - DNA, 15 bp, Homo sapiens
tgaatgttcctttat

SEQ ID NO: 229284 - DNA, 15 bp, Homo sapiens
atgaatgttccttta

SEQ ID NO: 229285 - DNA, 15 bp, Homo sapiens
aatgaatgttccttt

SEQ ID NO: 229286 - DNA, 15 bp, Homo sapiens
aaatgaatgttcctt

SEQ ID NO: 229287 - DNA, 15 bp, Homo sapiens
taaatgaatgttcct

SEQ ID NO: 229288 - DNA, 15 bp, Homo sapiens
ataaatgaatgttcc

SEQ ID NO: 229289 - DNA, 15 bp, Homo sapiens
aataaatgaatgttc

SEQ ID NO: 229290 - DNA, 15 bp, Homo sapiens
aaataaatgaatgtt

SEQ ID NO: 229291 - DNA, 15 bp, Homo sapiens
caaataaatgaatgt

SEQ ID NO: 229292 - DNA, 15 bp, Homo sapiens
tcaaataaatgaatg

SEQ ID NO: 229293 - DNA, 15 bp, Homo sapiens
ctcaaataaatgaat

SEQ ID NO: 229294 - DNA, 15 bp, Homo sapiens
actcaaataaatgaa

SEQ ID NO: 229295 - DNA, 15 bp, Homo sapiens
tactcaaataaatga

SEQ ID NO: 229296 - DNA, 15 bp, Homo sapiens
ctactcaaataaatg

SEQ ID NO: 229297 - DNA, 15 bp, Homo sapiens
cctactcaaataaat

SEQ ID NO: 229298 - DNA, 15 bp, Homo sapiens
gcctactcaaataaa

SEQ ID NO: 229299 - DNA, 15 bp, Homo sapiens
tgcctactcaaataa

SEQ ID NO: 229300 - DNA, 15 bp, Homo sapiens
atgcctactcaaata

SEQ ID NO: 229301 - DNA, 15 bp, Homo sapiens
gatgcctactcaaat

SEQ ID NO: 229302 - DNA, 15 bp, Homo sapiens
agatgcctactcaaa

SEQ ID NO: 229303 - DNA, 15 bp, Homo sapiens
cagatgcctactcaa

SEQ ID NO: 229304 - DNA, 15 bp, Homo sapiens
acagatgcctactca

SEQ ID NO: 229305 - DNA, 15 bp, Homo sapiens
aacagatgcctactc

SEQ ID NO: 229306 - DNA, 15 bp, Homo sapiens
taacagatgcctact

SEQ ID NO: 229307 - DNA, 15 bp, Homo sapiens
ataacagatgcctac

SEQ ID NO: 229308 - DNA, 15 bp, Homo sapiens
cataacagatgccta

SEQ ID NO: 229309 - DNA, 15 bp, Homo sapiens
tcataacagatgcct

SEQ ID NO: 229310 - DNA, 15 bp, Homo sapiens
atcataacagatgcc

SEQ ID NO: 229311 - DNA, 15 bp, Homo sapiens
gatcataacagatgc

SEQ ID NO: 229312 - DNA, 15 bp, Homo sapiens
tgatcataacagatg

SEQ ID NO: 229313 - DNA, 15 bp, Homo sapiens
gtgatcataacagat

SEQ ID NO: 229314 - DNA, 15 bp, Homo sapiens
agtgatcataacaga

SEQ ID NO: 229315 - DNA, 15 bp, Homo sapiens
gagtgatcataacag

SEQ ID NO: 229316 - DNA, 15 bp, Homo sapiens
ggagtgatcataaca

SEQ ID NO: 229317 - DNA, 15 bp, Homo sapiens
cggagtgatcataac

SEQ ID NO: 229318 - DNA, 15 bp, Homo sapiens
ccggagtgatcataa

SEQ ID NO: 229319 - DNA, 15 bp, Homo sapiens
tccggagtgatcata

SEQ ID NO: 229320 - DNA, 15 bp, Homo sapiens
ttccggagtgatcat

SEQ ID NO: 229321 - DNA, 15 bp, Homo sapiens
tttccggagtgatca

SEQ ID NO: 229322 - DNA, 15 bp, Homo sapiens
ttttccggagtgatc

SEQ ID NO: 229323 - DNA, 15 bp, Homo sapiens
tttttccggagtgat

SEQ ID NO: 229324 - DNA, 15 bp, Homo sapiens
ttttttccggagtga

SEQ ID NO: 229325 - DNA, 15 bp, Homo sapiens
cttttttccggagtg

SEQ ID NO: 229326 - DNA, 15 bp, Homo sapiens
tcttttttccggagt

SEQ ID NO: 229327 - DNA, 15 bp, Homo sapiens
atcttttttccggag

SEQ ID NO: 229328 - DNA, 15 bp, Homo sapiens
catcttttttccgga

SEQ ID NO: 229329 - DNA, 15 bp, Homo sapiens
tcatcttttttccgg

SEQ ID NO: 229330 - DNA, 15 bp, Homo sapiens
gtcatcttttttccg

SEQ ID NO: 229331 - DNA, 15 bp, Homo sapiens
tgtcatcttttttcc

SEQ ID NO: 229332 - DNA, 15 bp, Homo sapiens
ttgtcatcttttttc

SEQ ID NO: 229333 - DNA, 15 bp, Homo sapiens
attgtcatctttttt

SEQ ID NO: 229334 - DNA, 15 bp, Homo sapiens
cattgtcatcttttt

SEQ ID NO: 229335 - DNA, 15 bp, Homo sapiens
ccattgtcatctttt

SEQ ID NO: 229336 - DNA, 15 bp, Homo sapiens
cccattgtcatcttt

SEQ ID NO: 229337 - DNA, 15 bp, Homo sapiens
acccattgtcatctt

SEQ ID NO: 229338 - DNA, 15 bp, Homo sapiens
aacccattgtcatct

SEQ ID NO: 229339 - DNA, 15 bp, Homo sapiens
taacccattgtcatc

SEQ ID NO: 229340 - DNA, 15 bp, Homo sapiens
gtaacccattgtcat

SEQ ID NO: 229341 - DNA, 15 bp, Homo sapiens
ggtaacccattgtca

SEQ ID NO: 229342 - DNA, 15 bp, Homo sapiens
aggtaacccattgtc

SEQ ID NO: 229343 - DNA, 15 bp, Homo sapiens
aaggtaacccattgt

SEQ ID NO: 229344 - DNA, 15 bp, Homo sapiens
caaggtaacccattg

SEQ ID NO: 229345 - DNA, 15 bp, Homo sapiens
acaaggtaacccatt

SEQ ID NO: 229346 - DNA, 15 bp, Homo sapiens
gacaaggtaacccat

SEQ ID NO: 229347 - DNA, 15 bp, Homo sapiens
ggacaaggtaaccca

SEQ ID NO: 229348 - DNA, 15 bp, Homo sapiens
aggacaaggtaaccc

SEQ ID NO: 229349 - DNA, 15 bp, Homo sapiens
gaggacaaggtaacc

SEQ ID NO: 229350 - DNA, 15 bp, Homo sapiens
ggaggacaaggtaac

SEQ ID NO: 229351 - DNA, 15 bp, Homo sapiens
aggaggacaaggtaa

SEQ ID NO: 229352 - DNA, 15 bp, Homo sapiens
caggaggacaaggta

SEQ ID NO: 229353 - DNA, 15 bp, Homo sapiens
ccaggaggacaaggt

SEQ ID NO: 229354 - DNA, 15 bp, Homo sapiens
cccaggaggacaagg

SEQ ID NO: 229355 - DNA, 15 bp, Homo sapiens
gcccaggaggacaag

SEQ ID NO: 229356 - DNA, 15 bp, Homo sapiens
agcccaggaggacaa

SEQ ID NO: 229357 - DNA, 15 bp, Homo sapiens
aagcccaggaggaca

SEQ ID NO: 229358 - DNA, 15 bp, Homo sapiens
gaagcccaggaggac

SEQ ID NO: 229359 - DNA, 15 bp, Homo sapiens
agaagcccaggagga

SEQ ID NO: 229360 - DNA, 15 bp, Homo sapiens
gagaagcccaggagg

SEQ ID NO: 229361 - DNA, 15 bp, Homo sapiens
agagaagcccaggag

SEQ ID NO: 229362 - DNA, 15 bp, Homo sapiens
tagagaagcccagga

SEQ ID NO: 229363 - DNA, 15 bp, Homo sapiens
ttagagaagcccagg

SEQ ID NO: 229364 - DNA, 15 bp, Homo sapiens
gttagagaagcccag

SEQ ID NO: 229365 - DNA, 15 bp, Homo sapiens
agttagagaagccca

SEQ ID NO: 229366 - DNA, 15 bp, Homo sapiens
cagttagagaagccc

SEQ ID NO: 229367 - DNA, 15 bp, Homo sapiens
tcagttagagaagcc

SEQ ID NO: 229368 - DNA, 15 bp, Homo sapiens
gtcagttagagaagc

SEQ ID NO: 229369 - DNA, 15 bp, Homo sapiens
tgtcagttagagaag

SEQ ID NO: 229370 - DNA, 15 bp, Homo sapiens
atgtcagttagagaa

SEQ ID NO: 229371 - DNA, 15 bp, Homo sapiens
catgtcagttagaga

SEQ ID NO: 229372 - DNA, 15 bp, Homo sapiens
ccatgtcagttagag

SEQ ID NO: 229373 - DNA, 15 bp, Homo sapiens
accatgtcagttaga

SEQ ID NO: 229374 - DNA, 15 bp, Homo sapiens
gaccatgtcagttag

SEQ ID NO: 229375 - DNA, 15 bp, Homo sapiens
tgaccatgtcagtta

SEQ ID NO: 229376 - DNA, 15 bp, Homo sapiens
ttgaccatgtcagtt

SEQ ID NO: 229377 - DNA, 15 bp, Homo sapiens
tttgaccatgtcagt

SEQ ID NO: 229378 - DNA, 15 bp, Homo sapiens
ttttgaccatgtcag

SEQ ID NO: 229379 - DNA, 15 bp, Homo sapiens
attttgaccatgtca

SEQ ID NO: 229380 - DNA, 15 bp, Homo sapiens
cattttgaccatgtc

SEQ ID NO: 229381 - DNA, 15 bp, Homo sapiens
gcattttgaccatgt

SEQ ID NO: 229382 - DNA, 15 bp, Homo sapiens
ggcattttgaccatg

SEQ ID NO: 229383 - DNA, 15 bp, Homo sapiens
gggcattttgaccat

SEQ ID NO: 229384 - DNA, 15 bp, Homo sapiens
tgggcattttgacca

SEQ ID NO: 229385 - DNA, 15 bp, Homo sapiens
atgggcattttgacc

SEQ ID NO: 229386 - DNA, 15 bp, Homo sapiens
tatgggcattttgac

SEQ ID NO: 229387 - DNA, 15 bp, Homo sapiens
atatgggcattttga

SEQ ID NO: 229388 - DNA, 15 bp, Homo sapiens
catatgggcattttg

SEQ ID NO: 229389 - DNA, 15 bp, Homo sapiens
tcatatgggcatttt

SEQ ID NO: 229390 - DNA, 15 bp, Homo sapiens
ttcatatgggcattt

SEQ ID NO: 229391 - DNA, 15 bp, Homo sapiens
cttcatatgggcatt

SEQ ID NO: 229392 - DNA, 15 bp, Homo sapiens
tcttcatatgggcat

SEQ ID NO: 229393 - DNA, 15 bp, Homo sapiens
atcttcatatgggca

SEQ ID NO: 229394 - DNA, 15 bp, Homo sapiens
tatcttcatatgggc

SEQ ID NO: 229395 - DNA, 15 bp, Homo sapiens
ttatcttcatatggg

SEQ ID NO: 229396 - DNA, 15 bp, Homo sapiens
cttatcttcatatgg

SEQ ID NO: 229397 - DNA, 15 bp, Homo sapiens
tcttatcttcatatg

SEQ ID NO: 229398 - DNA, 15 bp, Homo sapiens
atcttatcttcatat

SEQ ID NO: 229399 - DNA, 15 bp, Homo sapiens
catcttatcttcata

SEQ ID NO: 229400 - DNA, 15 bp, Homo sapiens
acatcttatcttcat

SEQ ID NO: 229401 - DNA, 15 bp, Homo sapiens
aacatcttatcttca

SEQ ID NO: 229402 - DNA, 15 bp, Homo sapiens
taacatcttatcttc

SEQ ID NO: 229403 - DNA, 15 bp, Homo sapiens
ttaacatcttatctt

SEQ ID NO: 229404 - DNA, 15 bp, Homo sapiens
cttaacatcttatct

SEQ ID NO: 229405 - DNA, 15 bp, Homo sapiens
tcttaacatcttatc

SEQ ID NO: 229406 - DNA, 15 bp, Homo sapiens
ctcttaacatcttat

SEQ ID NO: 229407 - DNA, 15 bp, Homo sapiens
gctcttaacatctta

SEQ ID NO: 229408 - DNA, 15 bp, Homo sapiens
tgctcttaacatctt

SEQ ID NO: 229409 - DNA, 15 bp, Homo sapiens
ttgctcttaacatct

SEQ ID NO: 229410 - DNA, 15 bp, Homo sapiens
cttgctcttaacatc

SEQ ID NO: 229411 - DNA, 15 bp, Homo sapiens
tcttgctcttaacat

SEQ ID NO: 229412 - DNA, 15 bp, Homo sapiens
atcttgctcttaaca

SEQ ID NO: 229413 - DNA, 15 bp, Homo sapiens
aatcttgctcttaac

SEQ ID NO: 229414 - DNA, 15 bp, Homo sapiens
aaatcttgctcttaa

SEQ ID NO: 229415 - DNA, 15 bp, Homo sapiens
taaatcttgctctta

SEQ ID NO: 229416 - DNA, 15 bp, Homo sapiens
ataaatcttgctctt

SEQ ID NO: 229417 - DNA, 15 bp, Homo sapiens
cataaatcttgctct

SEQ ID NO: 229418 - DNA, 15 bp, Homo sapiens
tcataaatcttgctc

SEQ ID NO: 229419 - DNA, 15 bp, Homo sapiens
ttcataaatcttgct

SEQ ID NO: 229420 - DNA, 15 bp, Homo sapiens
tttcataaatcttgc

SEQ ID NO: 229421 - DNA, 15 bp, Homo sapiens
ttttcataaatcttg

SEQ ID NO: 229422 - DNA, 15 bp, Homo sapiens
cttttcataaatctt

SEQ ID NO: 229423 - DNA, 15 bp, Homo sapiens
gcttttcataaatct

SEQ ID NO: 229424 - DNA, 15 bp, Homo sapiens
agcttttcataaatc

SEQ ID NO: 229425 - DNA, 15 bp, Homo sapiens
cagcttttcataaat

SEQ ID NO: 229426 - DNA, 15 bp, Homo sapiens
tcagcttttcataaa

SEQ ID NO: 229427 - DNA, 15 bp, Homo sapiens
ctcagcttttcataa

SEQ ID NO: 229428 - DNA, 15 bp, Homo sapiens
actcagcttttcata

SEQ ID NO: 229429 - DNA, 15 bp, Homo sapiens
tactcagcttttcat

SEQ ID NO: 229430 - DNA, 15 bp, Homo sapiens
atactcagcttttca

SEQ ID NO: 229431 - DNA, 15 bp, Homo sapiens
catactcagcttttc

SEQ ID NO: 229432 - DNA, 15 bp, Homo sapiens
tcatactcagctttt

SEQ ID NO: 229433 - DNA, 15 bp, Homo sapiens
atcatactcagcttt

SEQ ID NO: 229434 - DNA, 15 bp, Homo sapiens
catcatactcagctt

SEQ ID NO: 229435 - DNA, 15 bp, Homo sapiens
ccatcatactcagct

SEQ ID NO: 229436 - DNA, 15 bp, Homo sapiens
gccatcatactcagc

SEQ ID NO: 229437 - DNA, 15 bp, Homo sapiens
tgccatcatactcag

SEQ ID NO: 229438 - DNA, 15 bp, Homo sapiens
ctgccatcatactca

SEQ ID NO: 229439 - DNA, 15 bp, Homo sapiens
gctgccatcatactc

SEQ ID NO: 229440 - DNA, 15 bp, Homo sapiens
agctgccatcatact

SEQ ID NO: 229441 - DNA, 15 bp, Homo sapiens
gagctgccatcatac

SEQ ID NO: 229442 - DNA, 15 bp, Homo sapiens
agagctgccatcata

SEQ ID NO: 229443 - DNA, 15 bp, Homo sapiens
aagagctgccatcat

SEQ ID NO: 229444 - DNA, 15 bp, Homo sapiens
caagagctgccatca

SEQ ID NO: 229445 - DNA, 15 bp, Homo sapiens
acaagagctgccatc

SEQ ID NO: 229446 - DNA, 15 bp, Homo sapiens
gacaagagctgccat

SEQ ID NO: 229447 - DNA, 15 bp, Homo sapiens
agacaagagctgcca

SEQ ID NO: 229448 - DNA, 15 bp, Homo sapiens
gagacaagagctgcc

SEQ ID NO: 229449 - DNA, 15 bp, Homo sapiens
tgagacaagagctgc

SEQ ID NO: 229450 - DNA, 15 bp, Homo sapiens
atgagacaagagctg

SEQ ID NO: 229451 - DNA, 15 bp, Homo sapiens
tatgagacaagagct

SEQ ID NO: 229452 - DNA, 15 bp, Homo sapiens
ttatgagacaagagc

SEQ ID NO: 229453 - DNA, 15 bp, Homo sapiens
tttatgagacaagag

SEQ ID NO: 229454 - DNA, 15 bp, Homo sapiens
ttttatgagacaaga

SEQ ID NO: 229455 - DNA, 15 bp, Homo sapiens
attttatgagacaag

SEQ ID NO: 229456 - DNA, 15 bp, Homo sapiens
tattttatgagacaa

SEQ ID NO: 229457 - DNA, 15 bp, Homo sapiens
ttattttatgagaca

SEQ ID NO: 229458 - DNA, 15 bp, Homo sapiens
gttattttatgagac

SEQ ID NO: 229459 - DNA, 15 bp, Homo sapiens
agttattttatgaga

SEQ ID NO: 229460 - DNA, 15 bp, Homo sapiens
gagttattttatgag

SEQ ID NO: 229461 - DNA, 15 bp, Homo sapiens
cgagttattttatga

SEQ ID NO: 229462 - DNA, 15 bp, Homo sapiens
tcgagttattttatg

SEQ ID NO: 229463 - DNA, 15 bp, Homo sapiens
ttcgagttattttat

SEQ ID NO: 229464 - DNA, 15 bp, Homo sapiens
tttcgagttatttta

SEQ ID NO: 229465 - DNA, 15 bp, Homo sapiens
ctttcgagttatttt

SEQ ID NO: 229466 - DNA, 15 bp, Homo sapiens
actttcgagttattt

SEQ ID NO: 229467 - DNA, 15 bp, Homo sapiens
aactttcgagttatt

SEQ ID NO: 229468 - DNA, 15 bp, Homo sapiens
gaactttcgagttat

SEQ ID NO: 229469 - DNA, 15 bp, Homo sapiens
ggaactttcgagtta

SEQ ID NO: 229470 - DNA, 15 bp, Homo sapiens
gggaactttcgagtt

SEQ ID NO: 229471 - DNA, 15 bp, Homo sapiens
tgggaactttcgagt

SEQ ID NO: 229472 - DNA, 15 bp, Homo sapiens
ctgggaactttcgag

SEQ ID NO: 229473 - DNA, 15 bp, Homo sapiens
actgggaactttcga

SEQ ID NO: 229474 - DNA, 15 bp, Homo sapiens
cactgggaactttcg

SEQ ID NO: 229475 - DNA, 15 bp, Homo sapiens
tcactgggaactttc

SEQ ID NO: 229476 - DNA, 15 bp, Homo sapiens
ttcactgggaacttt

SEQ ID NO: 229477 - DNA, 15 bp, Homo sapiens
tttcactgggaactt

SEQ ID NO: 229478 - DNA, 15 bp, Homo sapiens
ctttcactgggaact

SEQ ID NO: 229479 - DNA, 15 bp, Homo sapiens
tctttcactgggaac

SEQ ID NO: 229480 - DNA, 15 bp, Homo sapiens
gtctttcactgggaa

SEQ ID NO: 229481 - DNA, 15 bp, Homo sapiens
ggtctttcactggga

SEQ ID NO: 229482 - DNA, 15 bp, Homo sapiens
tggtctttcactggg

SEQ ID NO: 229483 - DNA, 15 bp, Homo sapiens
ttggtctttcactgg

SEQ ID NO: 229484 - DNA, 15 bp, Homo sapiens
cttggtctttcactg

SEQ ID NO: 229485 - DNA, 15 bp, Homo sapiens
tcttggtctttcact

SEQ ID NO: 229486 - DNA, 15 bp, Homo sapiens
ttcttggtctttcac

SEQ ID NO: 229487 - DNA, 15 bp, Homo sapiens
tttcttggtctttca

SEQ ID NO: 229488 - DNA, 15 bp, Homo sapiens
atttcttggtctttc

SEQ ID NO: 229489 - DNA, 15 bp, Homo sapiens
aatttcttggtcttt

SEQ ID NO: 229490 - DNA, 15 bp, Homo sapiens
aaatttcttggtctt

SEQ ID NO: 229491 - DNA, 15 bp, Homo sapiens
aaaatttcttggtct

SEQ ID NO: 229492 - DNA, 15 bp, Homo sapiens
taaaatttcttggtc

SEQ ID NO: 229493 - DNA, 15 bp, Homo sapiens
gtaaaatttcttggt

SEQ ID NO: 229494 - DNA, 15 bp, Homo sapiens
tgtaaaatttcttgg

SEQ ID NO: 229495 - DNA, 15 bp, Homo sapiens
atgtaaaatttcttg

SEQ ID NO: 229496 - DNA, 15 bp, Homo sapiens
gatgtaaaatttctt

SEQ ID NO: 229497 - DNA, 15 bp, Homo sapiens
tgatgtaaaatttct

SEQ ID NO: 229498 - DNA, 15 bp, Homo sapiens
ttgatgtaaaatttc

SEQ ID NO: 229499 - DNA, 15 bp, Homo sapiens
tttgatgtaaaattt

SEQ ID NO: 229500 - DNA, 15 bp, Homo sapiens
gtttgatgtaaaatt

SEQ ID NO: 229501 - DNA, 15 bp, Homo sapiens
ggtttgatgtaaaat

SEQ ID NO: 229502 - DNA, 15 bp, Homo sapiens
gggtttgatgtaaaa

SEQ ID NO: 229503 - DNA, 15 bp, Homo sapiens
tgggtttgatgtaaa

SEQ ID NO: 229504 - DNA, 15 bp, Homo sapiens
ttgggtttgatgtaa

SEQ ID NO: 229505 - DNA, 15 bp, Homo sapiens
tttgggtttgatgta

SEQ ID NO: 229506 - DNA, 15 bp, Homo sapiens
gtttgggtttgatgt

SEQ ID NO: 229507 - DNA, 15 bp, Homo sapiens
ggtttgggtttgatg

SEQ ID NO: 229508 - DNA, 15 bp, Homo sapiens
cggtttgggtttgat

SEQ ID NO: 229509 - DNA, 15 bp, Homo sapiens
ccggtttgggtttga

SEQ ID NO: 229510 - DNA, 15 bp, Homo sapiens
gccggtttgggtttg

SEQ ID NO: 229511 - DNA, 15 bp, Homo sapiens
ggccggtttgggttt

SEQ ID NO: 229512 - DNA, 15 bp, Homo sapiens
tggccggtttgggtt

SEQ ID NO: 229513 - DNA, 15 bp, Homo sapiens
ttggccggtttgggt

SEQ ID NO: 229514 - DNA, 15 bp, Homo sapiens
tttggccggtttggg

SEQ ID NO: 229515 - DNA, 15 bp, Homo sapiens
atttggccggtttgg

SEQ ID NO: 229516 - DNA, 15 bp, Homo sapiens
catttggccggtttg

SEQ ID NO: 229517 - DNA, 15 bp, Homo sapiens
ccatttggccggttt

SEQ ID NO: 229518 - DNA, 15 bp, Homo sapiens
accatttggccggtt

SEQ ID NO: 229519 - DNA, 15 bp, Homo sapiens
gaccatttggccggt

SEQ ID NO: 229520 - DNA, 15 bp, Homo sapiens
ggaccatttggccgg

SEQ ID NO: 229521 - DNA, 15 bp, Homo sapiens
tggaccatttggccg

SEQ ID NO: 229522 - DNA, 15 bp, Homo sapiens
ttggaccatttggcc

SEQ ID NO: 229523 - DNA, 15 bp, Homo sapiens
cttggaccatttggc

SEQ ID NO: 229524 - DNA, 15 bp, Homo sapiens
gcttggaccatttgg

SEQ ID NO: 229525 - DNA, 15 bp, Homo sapiens
agcttggaccatttg

SEQ ID NO: 229526 - DNA, 15 bp, Homo sapiens
aagcttggaccattt

SEQ ID NO: 229527 - DNA, 15 bp, Homo sapiens
gaagcttggaccatt

SEQ ID NO: 229528 - DNA, 15 bp, Homo sapiens
ggaagcttggaccat

SEQ ID NO: 229529 - DNA, 15 bp, Homo sapiens
tggaagcttggacca

SEQ ID NO: 229530 - DNA, 15 bp, Homo sapiens
ttggaagcttggacc

SEQ ID NO: 229531 - DNA, 15 bp, Homo sapiens
cttggaagcttggac

SEQ ID NO: 229532 - DNA, 15 bp, Homo sapiens
gcttggaagcttgga

SEQ ID NO: 229533 - DNA, 15 bp, Homo sapiens
agcttggaagcttgg

SEQ ID NO: 229534 - DNA, 15 bp, Homo sapiens
cagcttggaagcttg

SEQ ID NO: 229535 - DNA, 15 bp, Homo sapiens
ccagcttggaagctt

SEQ ID NO: 229536 - DNA, 15 bp, Homo sapiens
cccagcttggaagct

SEQ ID NO: 229537 - DNA, 15 bp, Homo sapiens
tcccagcttggaagc

SEQ ID NO: 229538 - DNA, 15 bp, Homo sapiens
atcccagcttggaag

SEQ ID NO: 229539 - DNA, 15 bp, Homo sapiens
gatcccagcttggaa

SEQ ID NO: 229540 - DNA, 15 bp, Homo sapiens
ggatcccagcttgga

SEQ ID NO: 229541 - DNA, 15 bp, Homo sapiens
tggatcccagcttgg

SEQ ID NO: 229542 - DNA, 15 bp, Homo sapiens
atggatcccagcttg

SEQ ID NO: 229543 - DNA, 15 bp, Homo sapiens
catggatcccagctt

SEQ ID NO: 229544 - DNA, 15 bp, Homo sapiens
ccatggatcccagct

SEQ ID NO: 229545 - DNA, 15 bp, Homo sapiens
gccatggatcccagc

SEQ ID NO: 229546 - DNA, 15 bp, Homo sapiens
agccatggatcccag

SEQ ID NO: 229547 - DNA, 15 bp, Homo sapiens
tagccatggatccca

SEQ ID NO: 229548 - DNA, 15 bp, Homo sapiens
ttagccatggatccc

SEQ ID NO: 229549 - DNA, 15 bp, Homo sapiens
tttagccatggatcc

SEQ ID NO: 229550 - DNA, 15 bp, Homo sapiens
ctttagccatggatc

SEQ ID NO: 229551 - DNA, 15 bp, Homo sapiens
actttagccatggat

SEQ ID NO: 229552 - DNA, 15 bp, Homo sapiens
aactttagccatgga

SEQ ID NO: 229553 - DNA, 15 bp, Homo sapiens
aaactttagccatgg

SEQ ID NO: 229554 - DNA, 15 bp, Homo sapiens
gaaactttagccatg

SEQ ID NO: 229555 - DNA, 15 bp, Homo sapiens
agaaactttagccat

SEQ ID NO: 229556 - DNA, 15 bp, Homo sapiens
tagaaactttagcca

SEQ ID NO: 229557 - DNA, 15 bp, Homo sapiens
gtagaaactttagcc

SEQ ID NO: 229558 - DNA, 15 bp, Homo sapiens
tgtagaaactttagc

SEQ ID NO: 229559 - DNA, 15 bp, Homo sapiens
ttgtagaaactttag

SEQ ID NO: 229560 - DNA, 15 bp, Homo sapiens
tttgtagaaacttta

SEQ ID NO: 229561 - DNA, 15 bp, Homo sapiens
ttttgtagaaacttt

SEQ ID NO: 229562 - DNA, 15 bp, Homo sapiens
attttgtagaaactt

SEQ ID NO: 229563 - DNA, 15 bp, Homo sapiens
aattttgtagaaact

SEQ ID NO: 229564 - DNA, 15 bp, Homo sapiens
gaattttgtagaaac

SEQ ID NO: 229565 - DNA, 15 bp, Homo sapiens
agaattttgtagaaa

SEQ ID NO: 229566 - DNA, 15 bp, Homo sapiens
cagaattttgtagaa

SEQ ID NO: 229567 - DNA, 15 bp, Homo sapiens
ccagaattttgtaga

SEQ ID NO: 229568 - DNA, 15 bp, Homo sapiens
cccagaattttgtag

SEQ ID NO: 229569 - DNA, 15 bp, Homo sapiens
acccagaattttgta

SEQ ID NO: 229570 - DNA, 15 bp, Homo sapiens
tacccagaattttgt

SEQ ID NO: 229571 - DNA, 15 bp, Homo sapiens
gtacccagaattttg

SEQ ID NO: 229572 - DNA, 15 bp, Homo sapiens
tgtacccagaatttt

SEQ ID NO: 229573 - DNA, 15 bp, Homo sapiens
ttgtacccagaattt

SEQ ID NO: 229574 - DNA, 15 bp, Homo sapiens
attgtacccagaatt

SEQ ID NO: 229575 - DNA, 15 bp, Homo sapiens
cattgtacccagaat

SEQ ID NO: 229576 - DNA, 15 bp, Homo sapiens
acattgtacccagaa

SEQ ID NO: 229577 - DNA, 15 bp, Homo sapiens
tacattgtacccaga

SEQ ID NO: 229578 - DNA, 15 bp, Homo sapiens
atacattgtacccag

SEQ ID NO: 229579 - DNA, 15 bp, Homo sapiens
tatacattgtaccca

SEQ ID NO: 229580 - DNA, 15 bp, Homo sapiens
ttatacattgtaccc

SEQ ID NO: 229581 - DNA, 15 bp, Homo sapiens
tttatacattgtacc

SEQ ID NO: 229582 - DNA, 15 bp, Homo sapiens
gtttatacattgtac

SEQ ID NO: 229583 - DNA, 15 bp, Homo sapiens
tgtttatacattgta

SEQ ID NO: 229584 - DNA, 15 bp, Homo sapiens
atgtttatacattgt

SEQ ID NO: 229585 - DNA, 15 bp, Homo sapiens
aatgtttatacattg

SEQ ID NO: 229586 - DNA, 15 bp, Homo sapiens
gaatgtttatacatt

SEQ ID NO: 229587 - DNA, 15 bp, Homo sapiens
tgaatgtttatacat

SEQ ID NO: 229588 - DNA, 15 bp, Homo sapiens
gtgaatgtttataca

SEQ ID NO: 229589 - DNA, 15 bp, Homo sapiens
agtgaatgtttatac

SEQ ID NO: 229590 - DNA, 15 bp, Homo sapiens
aagtgaatgtttata

SEQ ID NO: 229591 - DNA, 15 bp, Homo sapiens
caagtgaatgtttat

SEQ ID NO: 229592 - DNA, 15 bp, Homo sapiens
ccaagtgaatgttta

SEQ ID NO: 229593 - DNA, 15 bp, Homo sapiens
cccaagtgaatgttt

SEQ ID NO: 229594 - DNA, 15 bp, Homo sapiens
ccccaagtgaatgtt

SEQ ID NO: 229595 - DNA, 15 bp, Homo sapiens
gccccaagtgaatgt

SEQ ID NO: 229596 - DNA, 15 bp, Homo sapiens
agccccaagtgaatg

SEQ ID NO: 229597 - DNA, 15 bp, Homo sapiens
aagccccaagtgaat

SEQ ID NO: 229598 - DNA, 15 bp, Homo sapiens
aaagccccaagtgaa

SEQ ID NO: 229599 - DNA, 15 bp, Homo sapiens
gaaagccccaagtga

SEQ ID NO: 229600 - DNA, 15 bp, Homo sapiens
agaaagccccaagtg

SEQ ID NO: 229601 - DNA, 15 bp, Homo sapiens
cagaaagccccaagt

SEQ ID NO: 229602 - DNA, 15 bp, Homo sapiens
acagaaagccccaag

SEQ ID NO: 229603 - DNA, 15 bp, Homo sapiens
gacagaaagccccaa

SEQ ID NO: 229604 - DNA, 15 bp, Homo sapiens
agacagaaagcccca

SEQ ID NO: 229605 - DNA, 15 bp, Homo sapiens
tagacagaaagcccc

SEQ ID NO: 229606 - DNA, 15 bp, Homo sapiens
ctagacagaaagccc

SEQ ID NO: 229607 - DNA, 15 bp, Homo sapiens
gctagacagaaagcc

SEQ ID NO: 229608 - DNA, 15 bp, Homo sapiens
ggctagacagaaagc

SEQ ID NO: 229609 - DNA, 15 bp, Homo sapiens
tggctagacagaaag

SEQ ID NO: 229610 - DNA, 15 bp, Homo sapiens
ctggctagacagaaa

SEQ ID NO: 229611 - DNA, 15 bp, Homo sapiens
gctggctagacagaa

SEQ ID NO: 229612 - DNA, 15 bp, Homo sapiens
tgctggctagacaga

SEQ ID NO: 229613 - DNA, 15 bp, Homo sapiens
gtgctggctagacag

SEQ ID NO: 229614 - DNA, 15 bp, Homo sapiens
ggtgctggctagaca

SEQ ID NO: 229615 - DNA, 15 bp, Homo sapiens
tggtgctggctagac

SEQ ID NO: 229616 - DNA, 15 bp, Homo sapiens
ttggtgctggctaga

SEQ ID NO: 229617 - DNA, 15 bp, Homo sapiens
cttggtgctggctag

SEQ ID NO: 229618 - DNA, 15 bp, Homo sapiens
tcttggtgctggcta

SEQ ID NO: 229619 - DNA, 15 bp, Homo sapiens
ctcttggtgctggct

SEQ ID NO: 229620 - DNA, 15 bp, Homo sapiens
cctcttggtgctggc

SEQ ID NO: 229621 - DNA, 15 bp, Homo sapiens
acctcttggtgctgg

SEQ ID NO: 229622 - DNA, 15 bp, Homo sapiens
gacctcttggtgctg

SEQ ID NO: 229623 - DNA, 15 bp, Homo sapiens
tgacctcttggtgct

SEQ ID NO: 229624 - DNA, 15 bp, Homo sapiens
ttgacctcttggtgc

SEQ ID NO: 229625 - DNA, 15 bp, Homo sapiens
cttgacctcttggtg

SEQ ID NO: 229626 - DNA, 15 bp, Homo sapiens
acttgacctcttggt

SEQ ID NO: 229627 - DNA, 15 bp, Homo sapiens
tacttgacctcttgg

SEQ ID NO: 229628 - DNA, 15 bp, Homo sapiens
ttacttgacctcttg

SEQ ID NO: 229629 - DNA, 15 bp, Homo sapiens
attacttgacctctt

SEQ ID NO: 229630 - DNA, 15 bp, Homo sapiens
gattacttgacctct

SEQ ID NO: 229631 - DNA, 15 bp, Homo sapiens
tgattacttgacctc

SEQ ID NO: 229632 - DNA, 15 bp, Homo sapiens
ttgattacttgacct

SEQ ID NO: 229633 - DNA, 15 bp, Homo sapiens
cttgattacttgacc

SEQ ID NO: 229634 - DNA, 15 bp, Homo sapiens
ccttgattacttgac

SEQ ID NO: 229635 - DNA, 15 bp, Homo sapiens
tccttgattacttga

SEQ ID NO: 229636 - DNA, 15 bp, Homo sapiens
gtccttgattacttg

SEQ ID NO: 229637 - DNA, 15 bp, Homo sapiens
ggtccttgattactt

SEQ ID NO: 229638 - DNA, 15 bp, Homo sapiens
tggtccttgattact

SEQ ID NO: 229639 - DNA, 15 bp, Homo sapiens
ttggtccttgattac

SEQ ID NO: 229640 - DNA, 15 bp, Homo sapiens
gttggtccttgatta

SEQ ID NO: 229641 - DNA, 15 bp, Homo sapiens
agttggtccttgatt

SEQ ID NO: 229642 - DNA, 15 bp, Homo sapiens
tagttggtccttgat

SEQ ID NO: 229643 - DNA, 15 bp, Homo sapiens
ctagttggtccttga

SEQ ID NO: 229644 - DNA, 15 bp, Homo sapiens
gctagttggtccttg

SEQ ID NO: 229645 - DNA, 15 bp, Homo sapiens
ggctagttggtcctt

SEQ ID NO: 229646 - DNA, 15 bp, Homo sapiens
gggctagttggtcct

SEQ ID NO: 229647 - DNA, 15 bp, Homo sapiens
agggctagttggtcc

SEQ ID NO: 229648 - DNA, 15 bp, Homo sapiens
cagggctagttggtc

SEQ ID NO: 229649 - DNA, 15 bp, Homo sapiens
gcagggctagttggt

SEQ ID NO: 229650 - DNA, 15 bp, Homo sapiens
ggcagggctagttgg

SEQ ID NO: 229651 - DNA, 15 bp, Homo sapiens
tggcagggctagttg

SEQ ID NO: 229652 - DNA, 15 bp, Homo sapiens
atggcagggctagtt

SEQ ID NO: 229653 - DNA, 15 bp, Homo sapiens
gatggcagggctagt

SEQ ID NO: 229654 - DNA, 15 bp, Homo sapiens
agatggcagggctag

SEQ ID NO: 229655 - DNA, 15 bp, Homo sapiens
cagatggcagggcta

SEQ ID NO: 229656 - DNA, 15 bp, Homo sapiens
acagatggcagggct

SEQ ID NO: 229657 - DNA, 15 bp, Homo sapiens
cacagatggcagggc

SEQ ID NO: 229658 - DNA, 15 bp, Homo sapiens
tcacagatggcaggg

SEQ ID NO: 229659 - DNA, 15 bp, Homo sapiens
ttcacagatggcagg

SEQ ID NO: 229660 - DNA, 15 bp, Homo sapiens
tttcacagatggcag

SEQ ID NO: 229661 - DNA, 15 bp, Homo sapiens
ttttcacagatggca

SEQ ID NO: 229662 - DNA, 15 bp, Homo sapiens
attttcacagatggc

SEQ ID NO: 229663 - DNA, 15 bp, Homo sapiens
tattttcacagatgg

SEQ ID NO: 229664 - DNA, 15 bp, Homo sapiens
atattttcacagatg

SEQ ID NO: 229665 - DNA, 15 bp, Homo sapiens
catattttcacagat

SEQ ID NO: 229666 - DNA, 15 bp, Homo sapiens
acatattttcacaga

SEQ ID NO: 229667 - DNA, 15 bp, Homo sapiens
cacatattttcacag

SEQ ID NO: 229668 - DNA, 15 bp, Homo sapiens
gcacatattttcaca

SEQ ID NO: 229669 - DNA, 15 bp, Homo sapiens
agcacatattttcac

SEQ ID NO: 229670 - DNA, 15 bp, Homo sapiens
tagcacatattttca

SEQ ID NO: 229671 - DNA, 15 bp, Homo sapiens
atagcacatattttc

SEQ ID NO: 229672 - DNA, 15 bp, Homo sapiens
aatagcacatatttt

SEQ ID NO: 229673 - DNA, 15 bp, Homo sapiens
aaatagcacatattt

SEQ ID NO: 229674 - DNA, 15 bp, Homo sapiens
aaaatagcacatatt

SEQ ID NO: 229675 - DNA, 15 bp, Homo sapiens
gaaaatagcacatat

SEQ ID NO: 229676 - DNA, 15 bp, Homo sapiens
tgaaaatagcacata

SEQ ID NO: 229677 - DNA, 15 bp, Homo sapiens
gtgaaaatagcacat

SEQ ID NO: 229678 - DNA, 15 bp, Homo sapiens
cgtgaaaatagcaca

SEQ ID NO: 229679 - DNA, 15 bp, Homo sapiens
ccgtgaaaatagcac

SEQ ID NO: 229680 - DNA, 15 bp, Homo sapiens
gccgtgaaaatagca

SEQ ID NO: 229681 - DNA, 15 bp, Homo sapiens
agccgtgaaaatagc

SEQ ID NO: 229682 - DNA, 15 bp, Homo sapiens
aagccgtgaaaatag

SEQ ID NO: 229683 - DNA, 15 bp, Homo sapiens
aaagccgtgaaaata

SEQ ID NO: 229684 - DNA, 15 bp, Homo sapiens
taaagccgtgaaaat

SEQ ID NO: 229685 - DNA, 15 bp, Homo sapiens
ctaaagccgtgaaaa

SEQ ID NO: 229686 - DNA, 15 bp, Homo sapiens
actaaagccgtgaaa

SEQ ID NO: 229687 - DNA, 15 bp, Homo sapiens
aactaaagccgtgaa

SEQ ID NO: 229688 - DNA, 15 bp, Homo sapiens
gaactaaagccgtga

SEQ ID NO: 229689 - DNA, 15 bp, Homo sapiens
tgaactaaagccgtg

SEQ ID NO: 229690 - DNA, 15 bp, Homo sapiens
gtgaactaaagccgt

SEQ ID NO: 229691 - DNA, 15 bp, Homo sapiens
tgtgaactaaagccg

SEQ ID NO: 229692 - DNA, 15 bp, Homo sapiens
ttgtgaactaaagcc

SEQ ID NO: 229693 - DNA, 15 bp, Homo sapiens
attgtgaactaaagc

SEQ ID NO: 229694 - DNA, 15 bp, Homo sapiens
aattgtgaactaaag

SEQ ID NO: 229695 - DNA, 15 bp, Homo sapiens
taattgtgaactaaa

SEQ ID NO: 229696 - DNA, 15 bp, Homo sapiens
ataattgtgaactaa

SEQ ID NO: 229697 - DNA, 15 bp, Homo sapiens
cataattgtgaacta

SEQ ID NO: 229698 - DNA, 15 bp, Homo sapiens
ccataattgtgaact

SEQ ID NO: 229699 - DNA, 15 bp, Homo sapiens
gccataattgtgaac

SEQ ID NO: 229700 - DNA, 15 bp, Homo sapiens
tgccataattgtgaa

SEQ ID NO: 229701 - DNA, 15 bp, Homo sapiens
ttgccataattgtga

SEQ ID NO: 229702 - DNA, 15 bp, Homo sapiens
cttgccataattgtg

SEQ ID NO: 229703 - DNA, 15 bp, Homo sapiens
tcttgccataattgt

SEQ ID NO: 229704 - DNA, 15 bp, Homo sapiens
gtcttgccataattg

SEQ ID NO: 229705 - DNA, 15 bp, Homo sapiens
tgtcttgccataatt

SEQ ID NO: 229706 - DNA, 15 bp, Homo sapiens
ttgtcttgccataat

SEQ ID NO: 229707 - DNA, 15 bp, Homo sapiens
tttgtcttgccataa

SEQ ID NO: 229708 - DNA, 15 bp, Homo sapiens
ttttgtcttgccata

SEQ ID NO: 229709 - DNA, 15 bp, Homo sapiens
cttttgtcttgccat

SEQ ID NO: 229710 - DNA, 15 bp, Homo sapiens
acttttgtcttgcca

SEQ ID NO: 229711 - DNA, 15 bp, Homo sapiens
aacttttgtcttgcc

SEQ ID NO: 229712 - DNA, 15 bp, Homo sapiens
gaacttttgtcttgc

SEQ ID NO: 229713 - DNA, 15 bp, Homo sapiens
ggaacttttgtcttg

SEQ ID NO: 229714 - DNA, 15 bp, Homo sapiens
tggaacttttgtctt

SEQ ID NO: 229715 - DNA, 15 bp, Homo sapiens
ttggaacttttgtct

SEQ ID NO: 229716 - DNA, 15 bp, Homo sapiens
tttggaacttttgtc

SEQ ID NO: 229717 - DNA, 15 bp, Homo sapiens
atttggaacttttgt

SEQ ID NO: 229718 - DNA, 15 bp, Homo sapiens
tatttggaacttttg

SEQ ID NO: 229719 - DNA, 15 bp, Homo sapiens
ttatttggaactttt

SEQ ID NO: 229720 - DNA, 15 bp, Homo sapiens
attatttggaacttt

SEQ ID NO: 229721 - DNA, 15 bp, Homo sapiens
aattatttggaactt

SEQ ID NO: 229722 - DNA, 15 bp, Homo sapiens
taattatttggaact

SEQ ID NO: 229723 - DNA, 15 bp, Homo sapiens
ctaattatttggaac

SEQ ID NO: 229724 - DNA, 15 bp, Homo sapiens
cctaattatttggaa

SEQ ID NO: 229725 - DNA, 15 bp, Homo sapiens
tcctaattatttgga

SEQ ID NO: 229726 - DNA, 15 bp, Homo sapiens
ctcctaattatttgg

SEQ ID NO: 229727 - DNA, 15 bp, Homo sapiens
gctcctaattatttg

SEQ ID NO: 229728 - DNA, 15 bp, Homo sapiens
tgctcctaattattt

SEQ ID NO: 229729 - DNA, 15 bp, Homo sapiens
ttgctcctaattatt

SEQ ID NO: 229730 - DNA, 15 bp, Homo sapiens
cttgctcctaattat

SEQ ID NO: 229731 - DNA, 15 bp, Homo sapiens
tcttgctcctaatta

SEQ ID NO: 229732 - DNA, 15 bp, Homo sapiens
gtcttgctcctaatt

SEQ ID NO: 229733 - DNA, 15 bp, Homo sapiens
ggtcttgctcctaat

SEQ ID NO: 229734 - DNA, 15 bp, Homo sapiens
tggtcttgctcctaa

SEQ ID NO: 229735 - DNA, 15 bp, Homo sapiens
atggtcttgctccta

SEQ ID NO: 229736 - DNA, 15 bp, Homo sapiens
catggtcttgctcct

SEQ ID NO: 229737 - DNA, 15 bp, Homo sapiens
ccatggtcttgctcc

SEQ ID NO: 229738 - DNA, 15 bp, Homo sapiens
gccatggtcttgctc

SEQ ID NO: 229739 - DNA, 15 bp, Homo sapiens
tgccatggtcttgct

SEQ ID NO: 229740 - DNA, 15 bp, Homo sapiens
atgtccctgctgtgt

SEQ ID NO: 229741 - DNA, 15 bp, Homo sapiens
gatgtccctgctgtg

SEQ ID NO: 229742 - DNA, 15 bp, Homo sapiens
ggatgtccctgctgt

SEQ ID NO: 229743 - DNA, 15 bp, Homo sapiens
tggatgtccctgctg

SEQ ID NO: 229744 - DNA, 15 bp, Homo sapiens
gtggatgtccctgct

SEQ ID NO: 229745 - DNA, 15 bp, Homo sapiens
tgtggatgtccctgc

SEQ ID NO: 229746 - DNA, 15 bp, Homo sapiens
ctgtggatgtccctg

SEQ ID NO: 229747 - DNA, 15 bp, Homo sapiens
cctgtggatgtccct

SEQ ID NO: 229748 - DNA, 15 bp, Homo sapiens
ccctgtggatgtccc

SEQ ID NO: 229749 - DNA, 15 bp, Homo sapiens
accctgtggatgtcc

SEQ ID NO: 229750 - DNA, 15 bp, Homo sapiens
caccctgtggatgtc

SEQ ID NO: 229751 - DNA, 15 bp, Homo sapiens
ccaccctgtggatgt

SEQ ID NO: 229752 - DNA, 15 bp, Homo sapiens
cccaccctgtggatg

SEQ ID NO: 229753 - DNA, 15 bp, Homo sapiens
gcccaccctgtggat

SEQ ID NO: 229754 - DNA, 15 bp, Homo sapiens
cgcccaccctgtgga

SEQ ID NO: 229755 - DNA, 15 bp, Homo sapiens
acgcccaccctgtgg

SEQ ID NO: 229756 - DNA, 15 bp, Homo sapiens
cacgcccaccctgtg

SEQ ID NO: 229757 - DNA, 15 bp, Homo sapiens
ccacgcccaccctgt

SEQ ID NO: 229758 - DNA, 15 bp, Homo sapiens
cccacgcccaccctg

SEQ ID NO: 229759 - DNA, 15 bp, Homo sapiens
gcccacgcccaccct

SEQ ID NO: 229760 - DNA, 15 bp, Homo sapiens
ggcccacgcccaccc

SEQ ID NO: 229761 - DNA, 15 bp, Homo sapiens
gggcccacgcccacc

SEQ ID NO: 229762 - DNA, 15 bp, Homo sapiens
agggcccacgcccac

SEQ ID NO: 229763 - DNA, 15 bp, Homo sapiens
gagggcccacgccca

SEQ ID NO: 229764 - DNA, 15 bp, Homo sapiens
agagggcccacgccc

SEQ ID NO: 229765 - DNA, 15 bp, Homo sapiens
gagagggcccacgcc

SEQ ID NO: 229766 - DNA, 15 bp, Homo sapiens
tgagagggcccacgc

SEQ ID NO: 229767 - DNA, 15 bp, Homo sapiens
atgagagggcccacg

SEQ ID NO: 229768 - DNA, 15 bp, Homo sapiens
gatgagagggcccac

SEQ ID NO: 229769 - DNA, 15 bp, Homo sapiens
ggatgagagggccca

SEQ ID NO: 229770 - DNA, 15 bp, Homo sapiens
gggatgagagggccc

SEQ ID NO: 229771 - DNA, 15 bp, Homo sapiens
agggatgagagggcc

SEQ ID NO: 229772 - DNA, 15 bp, Homo sapiens
gagggatgagagggc

SEQ ID NO: 229773 - DNA, 15 bp, Homo sapiens
ggagggatgagaggg

SEQ ID NO: 229774 - DNA, 15 bp, Homo sapiens
gggagggatgagagg

SEQ ID NO: 229775 - DNA, 15 bp, Homo sapiens
agggagggatgagag

SEQ ID NO: 229776 - DNA, 15 bp, Homo sapiens
gagggagggatgaga

SEQ ID NO: 229777 - DNA, 15 bp, Homo sapiens
ggagggagggatgag

SEQ ID NO: 229778 - DNA, 15 bp, Homo sapiens
gggagggagggatga

SEQ ID NO: 229779 - DNA, 15 bp, Homo sapiens
tgggagggagggatg

SEQ ID NO: 229780 - DNA, 15 bp, Homo sapiens
gtgggagggagggat

SEQ ID NO: 229781 - DNA, 15 bp, Homo sapiens
agtgggagggaggga

SEQ ID NO: 229782 - DNA, 15 bp, Homo sapiens
gagtgggagggaggg

SEQ ID NO: 229783 - DNA, 15 bp, Homo sapiens
tgagtgggagggagg

SEQ ID NO: 229784 - DNA, 15 bp, Homo sapiens
gtgagtgggagggag

SEQ ID NO: 229785 - DNA, 15 bp, Homo sapiens
agtgagtgggaggga

SEQ ID NO: 229786 - DNA, 15 bp, Homo sapiens
aagtgagtgggaggg

SEQ ID NO: 229787 - DNA, 15 bp, Homo sapiens
gaagtgagtgggagg

SEQ ID NO: 229788 - DNA, 15 bp, Homo sapiens
tgaagtgagtgggag

SEQ ID NO: 229789 - DNA, 15 bp, Homo sapiens
gtgaagtgagtggga

SEQ ID NO: 229790 - DNA, 15 bp, Homo sapiens
cgtgaagtgagtggg

SEQ ID NO: 229791 - DNA, 15 bp, Homo sapiens
gcgtgaagtgagtgg

SEQ ID NO: 229792 - DNA, 15 bp, Homo sapiens
agcgtgaagtgagtg

SEQ ID NO: 229793 - DNA, 15 bp, Homo sapiens
cagcgtgaagtgagt

SEQ ID NO: 229794 - DNA, 15 bp, Homo sapiens
ccagcgtgaagtgag

SEQ ID NO: 229795 - DNA, 15 bp, Homo sapiens
gccagcgtgaagtga

SEQ ID NO: 229796 - DNA, 15 bp, Homo sapiens
agccagcgtgaagtg

SEQ ID NO: 229797 - DNA, 15 bp, Homo sapiens
cagccagcgtgaagt

SEQ ID NO: 229798 - DNA, 15 bp, Homo sapiens
ccagccagcgtgaag

SEQ ID NO: 229799 - DNA, 15 bp, Homo sapiens
cccagccagcgtgaa

SEQ ID NO: 229800 - DNA, 15 bp, Homo sapiens
gcccagccagcgtga

SEQ ID NO: 229801 - DNA, 15 bp, Homo sapiens
ggcccagccagcgtg

SEQ ID NO: 229802 - DNA, 15 bp, Homo sapiens
gggcccagccagcgt

SEQ ID NO: 229803 - DNA, 15 bp, Homo sapiens
ggggcccagccagcg

SEQ ID NO: 229804 - DNA, 15 bp, Homo sapiens
tggggcccagccagc

SEQ ID NO: 229805 - DNA, 15 bp, Homo sapiens
ttggggcccagccag

SEQ ID NO: 229806 - DNA, 15 bp, Homo sapiens
cttggggcccagcca

SEQ ID NO: 229807 - DNA, 15 bp, Homo sapiens
ccttggggcccagcc

SEQ ID NO: 229808 - DNA, 15 bp, Homo sapiens
accttggggcccagc

SEQ ID NO: 229809 - DNA, 15 bp, Homo sapiens
caccttggggcccag

SEQ ID NO: 229810 - DNA, 15 bp, Homo sapiens
acaccttggggccca

SEQ ID NO: 229811 - DNA, 15 bp, Homo sapiens
aacaccttggggccc

SEQ ID NO: 229812 - DNA, 15 bp, Homo sapiens
aaacaccttggggcc

SEQ ID NO: 229813 - DNA, 15 bp, Homo sapiens
caaacaccttggggc

SEQ ID NO: 229814 - DNA, 15 bp, Homo sapiens
gcaaacaccttgggg

SEQ ID NO: 229815 - DNA, 15 bp, Homo sapiens
tgcaaacaccttggg

SEQ ID NO: 229816 - DNA, 15 bp, Homo sapiens
gtgcaaacaccttgg

SEQ ID NO: 229817 - DNA, 15 bp, Homo sapiens
ggtgcaaacaccttg

SEQ ID NO: 229818 - DNA, 15 bp, Homo sapiens
gggtgcaaacacctt

SEQ ID NO: 229819 - DNA, 15 bp, Homo sapiens
ggggtgcaaacacct

SEQ ID NO: 229820 - DNA, 15 bp, Homo sapiens
aggggtgcaaacacc

SEQ ID NO: 229821 - DNA, 15 bp, Homo sapiens
aaggggtgcaaacac

SEQ ID NO: 229822 - DNA, 15 bp, Homo sapiens
caaggggtgcaaaca

SEQ ID NO: 229823 - DNA, 15 bp, Homo sapiens
gcaaggggtgcaaac

SEQ ID NO: 229824 - DNA, 15 bp, Homo sapiens
tgcaaggggtgcaaa

SEQ ID NO: 229825 - DNA, 15 bp, Homo sapiens
ctgcaaggggtgcaa

SEQ ID NO: 229826 - DNA, 15 bp, Homo sapiens
actgcaaggggtgca

SEQ ID NO: 229827 - DNA, 15 bp, Homo sapiens
cactgcaaggggtgc

SEQ ID NO: 229828 - DNA, 15 bp, Homo sapiens
tcactgcaaggggtg

SEQ ID NO: 229829 - DNA, 15 bp, Homo sapiens
ctcactgcaaggggt

SEQ ID NO: 229830 - DNA, 15 bp, Homo sapiens
actcactgcaagggg

SEQ ID NO: 229831 - DNA, 15 bp, Homo sapiens
cactcactgcaaggg

SEQ ID NO: 229832 - DNA, 15 bp, Homo sapiens
tcactcactgcaagg

SEQ ID NO: 229833 - DNA, 15 bp, Homo sapiens
gtcactcactgcaag

SEQ ID NO: 229834 - DNA, 15 bp, Homo sapiens
ggtcactcactgcaa

SEQ ID NO: 229835 - DNA, 15 bp, Homo sapiens
aggtcactcactgca

SEQ ID NO: 229836 - DNA, 15 bp, Homo sapiens
aaggtcactcactgc

SEQ ID NO: 229837 - DNA, 15 bp, Homo sapiens
gaaggtcactcactg

SEQ ID NO: 229838 - DNA, 15 bp, Homo sapiens
agaaggtcactcact

SEQ ID NO: 229839 - DNA, 15 bp, Homo sapiens
gagaaggtcactcac

SEQ ID NO: 229840 - DNA, 15 bp, Homo sapiens
agagaaggtcactca

SEQ ID NO: 229841 - DNA, 15 bp, Homo sapiens
tagagaaggtcactc

SEQ ID NO: 229842 - DNA, 15 bp, Homo sapiens
ctagagaaggtcact

SEQ ID NO: 229843 - DNA, 15 bp, Homo sapiens
actagagaaggtcac

SEQ ID NO: 229844 - DNA, 15 bp, Homo sapiens
cactagagaaggtca

SEQ ID NO: 229845 - DNA, 15 bp, Homo sapiens
gcactagagaaggtc

SEQ ID NO: 229846 - DNA, 15 bp, Homo sapiens
tgcactagagaaggt

SEQ ID NO: 229847 - DNA, 15 bp, Homo sapiens
ctgcactagagaagg

SEQ ID NO: 229848 - DNA, 15 bp, Homo sapiens
gctgcactagagaag

SEQ ID NO: 229849 - DNA, 15 bp, Homo sapiens
tgctgcactagagaa

SEQ ID NO: 229850 - DNA, 15 bp, Homo sapiens
ttgctgcactagaga

SEQ ID NO: 229851 - DNA, 15 bp, Homo sapiens
cttgctgcactagag

SEQ ID NO: 229852 - DNA, 15 bp, Homo sapiens
gcttgctgcactaga

SEQ ID NO: 229853 - DNA, 15 bp, Homo sapiens
agcttgctgcactag

SEQ ID NO: 229854 - DNA, 15 bp, Homo sapiens
gagcttgctgcacta

SEQ ID NO: 229855 - DNA, 15 bp, Homo sapiens
tgagcttgctgcact

SEQ ID NO: 229856 - DNA, 15 bp, Homo sapiens
ctgagcttgctgcac

SEQ ID NO: 229857 - DNA, 15 bp, Homo sapiens
tctgagcttgctgca

SEQ ID NO: 229858 - DNA, 15 bp, Homo sapiens
ttctgagcttgctgc

SEQ ID NO: 229859 - DNA, 15 bp, Homo sapiens
gttctgagcttgctg

SEQ ID NO: 229860 - DNA, 15 bp, Homo sapiens
ggttctgagcttgct

SEQ ID NO: 229861 - DNA, 15 bp, Homo sapiens
aggttctgagcttgc

SEQ ID NO: 229862 - DNA, 15 bp, Homo sapiens
caggttctgagcttg

SEQ ID NO: 229863 - DNA, 15 bp, Homo sapiens
gcaggttctgagctt

SEQ ID NO: 229864 - DNA, 15 bp, Homo sapiens
agcaggttctgagct

SEQ ID NO: 229865 - DNA, 15 bp, Homo sapiens
cagcaggttctgagc

SEQ ID NO: 229866 - DNA, 15 bp, Homo sapiens
gcagcaggttctgag

SEQ ID NO: 229867 - DNA, 15 bp, Homo sapiens
ggcagcaggttctga

SEQ ID NO: 229868 - DNA, 15 bp, Homo sapiens
tggcagcaggttctg

SEQ ID NO: 229869 - DNA, 15 bp, Homo sapiens
gtggcagcaggttct

SEQ ID NO: 229870 - DNA, 15 bp, Homo sapiens
agtggcagcaggttc

SEQ ID NO: 229871 - DNA, 15 bp, Homo sapiens
cagtggcagcaggtt

SEQ ID NO: 229872 - DNA, 15 bp, Homo sapiens
ccagtggcagcaggt

SEQ ID NO: 229873 - DNA, 15 bp, Homo sapiens
tccagtggcagcagg

SEQ ID NO: 229874 - DNA, 15 bp, Homo sapiens
ctccagtggcagcag

SEQ ID NO: 229875 - DNA, 15 bp, Homo sapiens
actccagtggcagca

SEQ ID NO: 229876 - DNA, 15 bp, Homo sapiens
aactccagtggcagc

SEQ ID NO: 229877 - DNA, 15 bp, Homo sapiens
caactccagtggcag

SEQ ID NO: 229878 - DNA, 15 bp, Homo sapiens
acaactccagtggca

SEQ ID NO: 229879 - DNA, 15 bp, Homo sapiens
gacaactccagtggc

SEQ ID NO: 229880 - DNA, 15 bp, Homo sapiens
ggacaactccagtgg

SEQ ID NO: 229881 - DNA, 15 bp, Homo sapiens
gggacaactccagtg

SEQ ID NO: 229882 - DNA, 15 bp, Homo sapiens
tgggacaactccagt

SEQ ID NO: 229883 - DNA, 15 bp, Homo sapiens
atgggacaactccag

SEQ ID NO: 229884 - DNA, 15 bp, Homo sapiens
aatgggacaactcca

SEQ ID NO: 229885 - DNA, 15 bp, Homo sapiens
caatgggacaactcc

SEQ ID NO: 229886 - DNA, 15 bp, Homo sapiens
gcaatgggacaactc

SEQ ID NO: 229887 - DNA, 15 bp, Homo sapiens
agcaatgggacaact

SEQ ID NO: 229888 - DNA, 15 bp, Homo sapiens
cagcaatgggacaac

SEQ ID NO: 229889 - DNA, 15 bp, Homo sapiens
tcagcaatgggacaa

SEQ ID NO: 229890 - DNA, 15 bp, Homo sapiens
atcagcaatgggaca

SEQ ID NO: 229891 - DNA, 15 bp, Homo sapiens
catcagcaatgggac

SEQ ID NO: 229892 - DNA, 15 bp, Homo sapiens
gcatcagcaatggga

SEQ ID NO: 229893 - DNA, 15 bp, Homo sapiens
tgcatcagcaatggg

SEQ ID NO: 229894 - DNA, 15 bp, Homo sapiens
ctgcatcagcaatgg

SEQ ID NO: 229895 - DNA, 15 bp, Homo sapiens
tctgcatcagcaatg

SEQ ID NO: 229896 - DNA, 15 bp, Homo sapiens
ttctgcatcagcaat

SEQ ID NO: 229897 - DNA, 15 bp, Homo sapiens
tttctgcatcagcaa

SEQ ID NO: 229898 - DNA, 15 bp, Homo sapiens
ctttctgcatcagca

SEQ ID NO: 229899 - DNA, 15 bp, Homo sapiens
cctttctgcatcagc

SEQ ID NO: 229900 - DNA, 15 bp, Homo sapiens
acctttctgcatcag

SEQ ID NO: 229901 - DNA, 15 bp, Homo sapiens
cacctttctgcatca

SEQ ID NO: 229902 - DNA, 15 bp, Homo sapiens
tcacctttctgcatc

SEQ ID NO: 229903 - DNA, 15 bp, Homo sapiens
ttcacctttctgcat

SEQ ID NO: 229904 - DNA, 15 bp, Homo sapiens
cttcacctttctgca

SEQ ID NO: 229905 - DNA, 15 bp, Homo sapiens
tcttcacctttctgc

SEQ ID NO: 229906 - DNA, 15 bp, Homo sapiens
ttcttcacctttctg

SEQ ID NO: 229907 - DNA, 15 bp, Homo sapiens
gttcttcacctttct

SEQ ID NO: 229908 - DNA, 15 bp, Homo sapiens
agttcttcacctttc

SEQ ID NO: 229909 - DNA, 15 bp, Homo sapiens
tagttcttcaccttt

SEQ ID NO: 229910 - DNA, 15 bp, Homo sapiens
ctagttcttcacctt

SEQ ID NO: 229911 - DNA, 15 bp, Homo sapiens
gctagttcttcacct

SEQ ID NO: 229912 - DNA, 15 bp, Homo sapiens
tgctagttcttcacc

SEQ ID NO: 229913 - DNA, 15 bp, Homo sapiens
ctgctagttcttcac

SEQ ID NO: 229914 - DNA, 15 bp, Homo sapiens
tctgctagttcttca

SEQ ID NO: 229915 - DNA, 15 bp, Homo sapiens
ttctgctagttcttc

SEQ ID NO: 229916 - DNA, 15 bp, Homo sapiens
gttctgctagttctt

SEQ ID NO: 229917 - DNA, 15 bp, Homo sapiens
tgttctgctagttct

SEQ ID NO: 229918 - DNA, 15 bp, Homo sapiens
gtgttctgctagttc

SEQ ID NO: 229919 - DNA, 15 bp, Homo sapiens
agtgttctgctagtt

SEQ ID NO: 229920 - DNA, 15 bp, Homo sapiens
cagtgttctgctagt

SEQ ID NO: 229921 - DNA, 15 bp, Homo sapiens
ccagtgttctgctag

SEQ ID NO: 229922 - DNA, 15 bp, Homo sapiens
tccagtgttctgcta

SEQ ID NO: 229923 - DNA, 15 bp, Homo sapiens
ttccagtgttctgct

SEQ ID NO: 229924 - DNA, 15 bp, Homo sapiens
tttccagtgttctgc

SEQ ID NO: 229925 - DNA, 15 bp, Homo sapiens
atttccagtgttctg

SEQ ID NO: 229926 - DNA, 15 bp, Homo sapiens
catttccagtgttct

SEQ ID NO: 229927 - DNA, 15 bp, Homo sapiens
gcatttccagtgttc

SEQ ID NO: 229928 - DNA, 15 bp, Homo sapiens
ggcatttccagtgtt

SEQ ID NO: 229929 - DNA, 15 bp, Homo sapiens
gggcatttccagtgt

SEQ ID NO: 229930 - DNA, 15 bp, Homo sapiens
agggcatttccagtg

SEQ ID NO: 229931 - DNA, 15 bp, Homo sapiens
gagggcatttccagt

SEQ ID NO: 229932 - DNA, 15 bp, Homo sapiens
ggagggcatttccag

SEQ ID NO: 229933 - DNA, 15 bp, Homo sapiens
tggagggcatttcca

SEQ ID NO: 229934 - DNA, 15 bp, Homo sapiens
atggagggcatttcc

SEQ ID NO: 229935 - DNA, 15 bp, Homo sapiens
gatggagggcatttc

SEQ ID NO: 229936 - DNA, 15 bp, Homo sapiens
agatggagggcattt

SEQ ID NO: 229937 - DNA, 15 bp, Homo sapiens
cagatggagggcatt

SEQ ID NO: 229938 - DNA, 15 bp, Homo sapiens
ccagatggagggcat

SEQ ID NO: 229939 - DNA, 15 bp, Homo sapiens
cccagatggagggca

SEQ ID NO: 229940 - DNA, 15 bp, Homo sapiens
acccagatggagggc

SEQ ID NO: 229941 - DNA, 15 bp, Homo sapiens
gacccagatggaggg

SEQ ID NO: 229942 - DNA, 15 bp, Homo sapiens
ggacccagatggagg

SEQ ID NO: 229943 - DNA, 15 bp, Homo sapiens
tggacccagatggag

SEQ ID NO: 229944 - DNA, 15 bp, Homo sapiens
atggacccagatgga

SEQ ID NO: 229945 - DNA, 15 bp, Homo sapiens
catggacccagatgg

SEQ ID NO: 229946 - DNA, 15 bp, Homo sapiens
ccatggacccagatg

SEQ ID NO: 229947 - DNA, 15 bp, Homo sapiens
gccatggacccagat

SEQ ID NO: 229948 - DNA, 15 bp, Homo sapiens
agccatggacccaga

SEQ ID NO: 229949 - DNA, 15 bp, Homo sapiens
tagccatggacccag

SEQ ID NO: 229950 - DNA, 15 bp, Homo sapiens
gtagccatggaccca

SEQ ID NO: 229951 - DNA, 15 bp, Homo sapiens
agtagccatggaccc

SEQ ID NO: 229952 - DNA, 15 bp, Homo sapiens
aagtagccatggacc

SEQ ID NO: 229953 - DNA, 15 bp, Homo sapiens
taagtagccatggac

SEQ ID NO: 229954 - DNA, 15 bp, Homo sapiens
ttaagtagccatgga

SEQ ID NO: 229955 - DNA, 15 bp, Homo sapiens
cttaagtagccatgg

SEQ ID NO: 229956 - DNA, 15 bp, Homo sapiens
gcttaagtagccatg

SEQ ID NO: 229957 - DNA, 15 bp, Homo sapiens
agcttaagtagccat

SEQ ID NO: 229958 - DNA, 15 bp, Homo sapiens
gagcttaagtagcca

SEQ ID NO: 229959 - DNA, 15 bp, Homo sapiens
tgagcttaagtagcc

SEQ ID NO: 229960 - DNA, 15 bp, Homo sapiens
ttgagcttaagtagc

SEQ ID NO: 229961 - DNA, 15 bp, Homo sapiens
attgagcttaagtag

SEQ ID NO: 229962 - DNA, 15 bp, Homo sapiens
cattgagcttaagta

SEQ ID NO: 229963 - DNA, 15 bp, Homo sapiens
gcattgagcttaagt

SEQ ID NO: 229964 - DNA, 15 bp, Homo sapiens
agcattgagcttaag

SEQ ID NO: 229965 - DNA, 15 bp, Homo sapiens
gagcattgagcttaa

SEQ ID NO: 229966 - DNA, 15 bp, Homo sapiens
ggagcattgagctta

SEQ ID NO: 229967 - DNA, 15 bp, Homo sapiens
gggagcattgagctt

SEQ ID NO: 229968 - DNA, 15 bp, Homo sapiens
agggagcattgagct

SEQ ID NO: 229969 - DNA, 15 bp, Homo sapiens
cagggagcattgagc

SEQ ID NO: 229970 - DNA, 15 bp, Homo sapiens
ccagggagcattgag

SEQ ID NO: 229971 - DNA, 15 bp, Homo sapiens
gccagggagcattga

SEQ ID NO: 229972 - DNA, 15 bp, Homo sapiens
tgccagggagcattg

SEQ ID NO: 229973 - DNA, 15 bp, Homo sapiens
ctgccagggagcatt

SEQ ID NO: 229974 - DNA, 15 bp, Homo sapiens
cctgccagggagcat

SEQ ID NO: 229975 - DNA, 15 bp, Homo sapiens
gcctgccagggagca

SEQ ID NO: 229976 - DNA, 15 bp, Homo sapiens
tgcctgccagggagc

SEQ ID NO: 229977 - DNA, 15 bp, Homo sapiens
ctgcctgccagggag

SEQ ID NO: 229978 - DNA, 15 bp, Homo sapiens
cctgcctgccaggga

SEQ ID NO: 229979 - DNA, 15 bp, Homo sapiens
tcctgcctgccaggg

SEQ ID NO: 229980 - DNA, 15 bp, Homo sapiens
ctcctgcctgccagg

SEQ ID NO: 229981 - DNA, 15 bp, Homo sapiens
cctcctgcctgccag

SEQ ID NO: 229982 - DNA, 15 bp, Homo sapiens
tcctcctgcctgcca

SEQ ID NO: 229983 - DNA, 15 bp, Homo sapiens
gtcctcctgcctgcc

SEQ ID NO: 229984 - DNA, 15 bp, Homo sapiens
tgtcctcctgcctgc

SEQ ID NO: 229985 - DNA, 15 bp, Homo sapiens
ctgtcctcctgcctg

SEQ ID NO: 229986 - DNA, 15 bp, Homo sapiens
cctgtcctcctgcct

SEQ ID NO: 229987 - DNA, 15 bp, Homo sapiens
acctgtcctcctgcc

SEQ ID NO: 229988 - DNA, 15 bp, Homo sapiens
cacctgtcctcctgc

SEQ ID NO: 229989 - DNA, 15 bp, Homo sapiens
gcacctgtcctcctg

SEQ ID NO: 229990 - DNA, 15 bp, Homo sapiens
agcacctgtcctcct

SEQ ID NO: 229991 - DNA, 15 bp, Homo sapiens
tagcacctgtcctcc

SEQ ID NO: 229992 - DNA, 15 bp, Homo sapiens
atagcacctgtcctc

SEQ ID NO: 229993 - DNA, 15 bp, Homo sapiens
aatagcacctgtcct

SEQ ID NO: 229994 - DNA, 15 bp, Homo sapiens
caatagcacctgtcc

SEQ ID NO: 229995 - DNA, 15 bp, Homo sapiens
gcaatagcacctgtc

SEQ ID NO: 229996 - DNA, 15 bp, Homo sapiens
ggcaatagcacctgt

SEQ ID NO: 229997 - DNA, 15 bp, Homo sapiens
gggcaatagcacctg

SEQ ID NO: 229998 - DNA, 15 bp, Homo sapiens
agggcaatagcacct

SEQ ID NO: 229999 - DNA, 15 bp, Homo sapiens
cagggcaatagcacc

SEQ ID NO: 230000 - DNA, 15 bp, Homo sapiens
acagggcaatagcac

SEQ ID NO: 230001 - DNA, 15 bp, Homo sapiens
aacagggcaatagca

SEQ ID NO: 230002 - DNA, 15 bp, Homo sapiens
caacagggcaatagc

SEQ ID NO: 230003 - DNA, 15 bp, Homo sapiens
ccaacagggcaatag

SEQ ID NO: 230004 - DNA, 15 bp, Homo sapiens
cccaacagggcaata

SEQ ID NO: 230005 - DNA, 15 bp, Homo sapiens
tcccaacagggcaat

SEQ ID NO: 230006 - DNA, 15 bp, Homo sapiens
gtcccaacagggcaa

SEQ ID NO: 230007 - DNA, 15 bp, Homo sapiens
tgtcccaacagggca

SEQ ID NO: 230008 - DNA, 15 bp, Homo sapiens
ctgtcccaacagggc

SEQ ID NO: 230009 - DNA, 15 bp, Homo sapiens
tctgtcccaacaggg

SEQ ID NO: 230010 - DNA, 15 bp, Homo sapiens
atctgtcccaacagg

SEQ ID NO: 230011 - DNA, 15 bp, Homo sapiens
catctgtcccaacag

SEQ ID NO: 230012 - DNA, 15 bp, Homo sapiens
tcatctgtcccaaca

SEQ ID NO: 230013 - DNA, 15 bp, Homo sapiens
ttcatctgtcccaac

SEQ ID NO: 230014 - DNA, 15 bp, Homo sapiens
tttcatctgtcccaa

SEQ ID NO: 230015 - DNA, 15 bp, Homo sapiens
ttttcatctgtccca

SEQ ID NO: 230016 - DNA, 15 bp, Homo sapiens
tttttcatctgtccc

SEQ ID NO: 230017 - DNA, 15 bp, Homo sapiens
gtttttcatctgtcc

SEQ ID NO: 230018 - DNA, 15 bp, Homo sapiens
tgtttttcatctgtc

SEQ ID NO: 230019 - DNA, 15 bp, Homo sapiens
ctgtttttcatctgt

SEQ ID NO: 230020 - DNA, 15 bp, Homo sapiens
tctgtttttcatctg

SEQ ID NO: 230021 - DNA, 15 bp, Homo sapiens
gtctgtttttcatct

SEQ ID NO: 230022 - DNA, 15 bp, Homo sapiens
tgtctgtttttcatc

SEQ ID NO: 230023 - DNA, 15 bp, Homo sapiens
gtgtctgtttttcat

SEQ ID NO: 230024 - DNA, 15 bp, Homo sapiens
tgtgtctgtttttca

SEQ ID NO: 230025 - DNA, 15 bp, Homo sapiens
ctgtgtctgtttttc

SEQ ID NO: 230026 - DNA, 15 bp, Homo sapiens
cctgtgtctgttttt

SEQ ID NO: 230027 - DNA, 15 bp, Homo sapiens
ccctgtgtctgtttt

SEQ ID NO: 230028 - DNA, 15 bp, Homo sapiens
tccctgtgtctgttt

SEQ ID NO: 230029 - DNA, 15 bp, Homo sapiens
ctccctgtgtctgtt

SEQ ID NO: 230030 - DNA, 15 bp, Homo sapiens
cctccctgtgtctgt

SEQ ID NO: 230031 - DNA, 15 bp, Homo sapiens
tcctccctgtgtctg

SEQ ID NO: 230032 - DNA, 15 bp, Homo sapiens
atcctccctgtgtct

SEQ ID NO: 230033 - DNA, 15 bp, Homo sapiens
catcctccctgtgtc

SEQ ID NO: 230034 - DNA, 15 bp, Homo sapiens
tcatcctccctgtgt

SEQ ID NO: 230035 - DNA, 15 bp, Homo sapiens
ctcatcctccctgtg

SEQ ID NO: 230036 - DNA, 15 bp, Homo sapiens
actcatcctccctgt

SEQ ID NO: 230037 - DNA, 15 bp, Homo sapiens
cactcatcctccctg

SEQ ID NO: 230038 - DNA, 15 bp, Homo sapiens
tcactcatcctccct

SEQ ID NO: 230039 - DNA, 15 bp, Homo sapiens
atcactcatcctccc

SEQ ID NO: 230040 - DNA, 15 bp, Homo sapiens
aatcactcatcctcc

SEQ ID NO: 230041 - DNA, 15 bp, Homo sapiens
aaatcactcatcctc

SEQ ID NO: 230042 - DNA, 15 bp, Homo sapiens
caaatcactcatcct

SEQ ID NO: 230043 - DNA, 15 bp, Homo sapiens
gcaaatcactcatcc

SEQ ID NO: 230044 - DNA, 15 bp, Homo sapiens
ggcaaatcactcatc

SEQ ID NO: 230045 - DNA, 15 bp, Homo sapiens
gggcaaatcactcat

SEQ ID NO: 230046 - DNA, 15 bp, Homo sapiens
agggcaaatcactca

SEQ ID NO: 230047 - DNA, 15 bp, Homo sapiens
cagggcaaatcactc

SEQ ID NO: 230048 - DNA, 15 bp, Homo sapiens
tcagggcaaatcact

SEQ ID NO: 230049 - DNA, 15 bp, Homo sapiens
gtcagggcaaatcac

SEQ ID NO: 230050 - DNA, 15 bp, Homo sapiens
agtcagggcaaatca

SEQ ID NO: 230051 - DNA, 15 bp, Homo sapiens
tagtcagggcaaatc

SEQ ID NO: 230052 - DNA, 15 bp, Homo sapiens
atagtcagggcaaat

SEQ ID NO: 230053 - DNA, 15 bp, Homo sapiens
tatagtcagggcaaa

SEQ ID NO: 230054 - DNA, 15 bp, Homo sapiens
ctatagtcagggcaa

SEQ ID NO: 230055 - DNA, 15 bp, Homo sapiens
tctatagtcagggca

SEQ ID NO: 230056 - DNA, 15 bp, Homo sapiens
ctctatagtcagggc

SEQ ID NO: 230057 - DNA, 15 bp, Homo sapiens
actctatagtcaggg

SEQ ID NO: 230058 - DNA, 15 bp, Homo sapiens
cactctatagtcagg

SEQ ID NO: 230059 - DNA, 15 bp, Homo sapiens
ccactctatagtcag

SEQ ID NO: 230060 - DNA, 15 bp, Homo sapiens
gccactctatagtca

SEQ ID NO: 230061 - DNA, 15 bp, Homo sapiens
tgccactctatagtc

SEQ ID NO: 230062 - DNA, 15 bp, Homo sapiens
ctgccactctatagt

SEQ ID NO: 230063 - DNA, 15 bp, Homo sapiens
cctgccactctatag

SEQ ID NO: 230064 - DNA, 15 bp, Homo sapiens
ccctgccactctata

SEQ ID NO: 230065 - DNA, 15 bp, Homo sapiens
gccctgccactctat

SEQ ID NO: 230066 - DNA, 15 bp, Homo sapiens
ggccctgccactcta

SEQ ID NO: 230067 - DNA, 15 bp, Homo sapiens
tggccctgccactct

SEQ ID NO: 230068 - DNA, 15 bp, Homo sapiens
ttggccctgccactc

SEQ ID NO: 230069 - DNA, 15 bp, Homo sapiens
cttggccctgccact

SEQ ID NO: 230070 - DNA, 15 bp, Homo sapiens
ccttggccctgccac

SEQ ID NO: 230071 - DNA, 15 bp, Homo sapiens
gccttggccctgcca

SEQ ID NO: 230072 - DNA, 15 bp, Homo sapiens
tgccttggccctgcc

SEQ ID NO: 230073 - DNA, 15 bp, Homo sapiens
ctgccttggccctgc

SEQ ID NO: 230074 - DNA, 15 bp, Homo sapiens
tctgccttggccctg

SEQ ID NO: 230075 - DNA, 15 bp, Homo sapiens
ctctgccttggccct

SEQ ID NO: 230076 - DNA, 15 bp, Homo sapiens
gctctgccttggccc

SEQ ID NO: 230077 - DNA, 15 bp, Homo sapiens
ggctctgccttggcc

SEQ ID NO: 230078 - DNA, 15 bp, Homo sapiens
gggctctgccttggc

SEQ ID NO: 230079 - DNA, 15 bp, Homo sapiens
tgggctctgccttgg

SEQ ID NO: 230080 - DNA, 15 bp, Homo sapiens
ctgggctctgccttg

SEQ ID NO: 230081 - DNA, 15 bp, Homo sapiens
cctgggctctgcctt

SEQ ID NO: 230082 - DNA, 15 bp, Homo sapiens
gcctgggctctgcct

SEQ ID NO: 230083 - DNA, 15 bp, Homo sapiens
ggcctgggctctgcc

SEQ ID NO: 230084 - DNA, 15 bp, Homo sapiens
aggcctgggctctgc

SEQ ID NO: 230085 - DNA, 15 bp, Homo sapiens
gaggcctgggctctg

SEQ ID NO: 230086 - DNA, 15 bp, Homo sapiens
ggaggcctgggctct

SEQ ID NO: 230087 - DNA, 15 bp, Homo sapiens
aggaggcctgggctc

SEQ ID NO: 230088 - DNA, 15 bp, Homo sapiens
caggaggcctgggct

SEQ ID NO: 230089 - DNA, 15 bp, Homo sapiens
gcaggaggcctgggc

SEQ ID NO: 230090 - DNA, 15 bp, Homo sapiens
tgcaggaggcctggg

SEQ ID NO: 230091 - DNA, 15 bp, Homo sapiens
gtgcaggaggcctgg

SEQ ID NO: 230092 - DNA, 15 bp, Homo sapiens
ggtgcaggaggcctg

SEQ ID NO: 230093 - DNA, 15 bp, Homo sapiens
aggtgcaggaggcct

SEQ ID NO: 230094 - DNA, 15 bp, Homo sapiens
taggtgcaggaggcc

SEQ ID NO: 230095 - DNA, 15 bp, Homo sapiens
ctaggtgcaggaggc

SEQ ID NO: 230096 - DNA, 15 bp, Homo sapiens
cctaggtgcaggagg

SEQ ID NO: 230097 - DNA, 15 bp, Homo sapiens
acctaggtgcaggag

SEQ ID NO: 230098 - DNA, 15 bp, Homo sapiens
gacctaggtgcagga

SEQ ID NO: 230099 - DNA, 15 bp, Homo sapiens
tgacctaggtgcagg

SEQ ID NO: 230100 - DNA, 15 bp, Homo sapiens
ctgacctaggtgcag

SEQ ID NO: 230101 - DNA, 15 bp, Homo sapiens
actgacctaggtgca

SEQ ID NO: 230102 - DNA, 15 bp, Homo sapiens
cactgacctaggtgc

SEQ ID NO: 230103 - DNA, 15 bp, Homo sapiens
acactgacctaggtg

SEQ ID NO: 230104 - DNA, 15 bp, Homo sapiens
aacactgacctaggt

SEQ ID NO: 230105 - DNA, 15 bp, Homo sapiens
gaacactgacctagg

SEQ ID NO: 230106 - DNA, 15 bp, Homo sapiens
ggaacactgacctag

SEQ ID NO: 230107 - DNA, 15 bp, Homo sapiens
aggaacactgaccta

SEQ ID NO: 230108 - DNA, 15 bp, Homo sapiens
gaggaacactgacct

SEQ ID NO: 230109 - DNA, 15 bp, Homo sapiens
ggaggaacactgacc

SEQ ID NO: 230110 - DNA, 15 bp, Homo sapiens
gggaggaacactgac

SEQ ID NO: 230111 - DNA, 15 bp, Homo sapiens
tgggaggaacactga

SEQ ID NO: 230112 - DNA, 15 bp, Homo sapiens
ctgggaggaacactg

SEQ ID NO: 230113 - DNA, 15 bp, Homo sapiens
actgggaggaacact

SEQ ID NO: 230114 - DNA, 15 bp, Homo sapiens
aactgggaggaacac

SEQ ID NO: 230115 - DNA, 15 bp, Homo sapiens
taactgggaggaaca

SEQ ID NO: 230116 - DNA, 15 bp, Homo sapiens
gtaactgggaggaac

SEQ ID NO: 230117 - DNA, 15 bp, Homo sapiens
tgtaactgggaggaa

SEQ ID NO: 230118 - DNA, 15 bp, Homo sapiens
ctgtaactgggagga

SEQ ID NO: 230119 - DNA, 15 bp, Homo sapiens
actgtaactgggagg

SEQ ID NO: 230120 - DNA, 15 bp, Homo sapiens
gactgtaactgggag

SEQ ID NO: 230121 - DNA, 15 bp, Homo sapiens
agactgtaactggga

SEQ ID NO: 230122 - DNA, 15 bp, Homo sapiens
tagactgtaactggg

SEQ ID NO: 230123 - DNA, 15 bp, Homo sapiens
ttagactgtaactgg

SEQ ID NO: 230124 - DNA, 15 bp, Homo sapiens
tttagactgtaactg

SEQ ID NO: 230125 - DNA, 15 bp, Homo sapiens
gtttagactgtaact

SEQ ID NO: 230126 - DNA, 15 bp, Homo sapiens
agtttagactgtaac

SEQ ID NO: 230127 - DNA, 15 bp, Homo sapiens
cagtttagactgtaa

SEQ ID NO: 230128 - DNA, 15 bp, Homo sapiens
ccagtttagactgta

SEQ ID NO: 230129 - DNA, 15 bp, Homo sapiens
tccagtttagactgt

SEQ ID NO: 230130 - DNA, 15 bp, Homo sapiens
ttccagtttagactg

SEQ ID NO: 230131 - DNA, 15 bp, Homo sapiens
attccagtttagact

SEQ ID NO: 230132 - DNA, 15 bp, Homo sapiens
cattccagtttagac

SEQ ID NO: 230133 - DNA, 15 bp, Homo sapiens
ccattccagtttaga

SEQ ID NO: 230134 - DNA, 15 bp, Homo sapiens
gccattccagtttag

SEQ ID NO: 230135 - DNA, 15 bp, Homo sapiens
tgccattccagttta

SEQ ID NO: 230136 - DNA, 15 bp, Homo sapiens
ctgccattccagttt

SEQ ID NO: 230137 - DNA, 15 bp, Homo sapiens
cctgccattccagtt

SEQ ID NO: 230138 - DNA, 15 bp, Homo sapiens
gcctgccattccagt

SEQ ID NO: 230139 - DNA, 15 bp, Homo sapiens
tgcctgccattccag

SEQ ID NO: 230140 - DNA, 15 bp, Homo sapiens
ttgcctgccattcca

SEQ ID NO: 230141 - DNA, 15 bp, Homo sapiens
tttgcctgccattcc

SEQ ID NO: 230142 - DNA, 15 bp, Homo sapiens
ctttgcctgccattc

SEQ ID NO: 230143 - DNA, 15 bp, Homo sapiens
gctttgcctgccatt

SEQ ID NO: 230144 - DNA, 15 bp, Homo sapiens
ggctttgcctgccat

SEQ ID NO: 230145 - DNA, 15 bp, Homo sapiens
gggctttgcctgcca

SEQ ID NO: 230146 - DNA, 15 bp, Homo sapiens
ggggctttgcctgcc

SEQ ID NO: 230147 - DNA, 15 bp, Homo sapiens
aggggctttgcctgc

SEQ ID NO: 230148 - DNA, 15 bp, Homo sapiens
caggggctttgcctg

SEQ ID NO: 230149 - DNA, 15 bp, Homo sapiens
acaggggctttgcct

SEQ ID NO: 230150 - DNA, 15 bp, Homo sapiens
cacaggggctttgcc

SEQ ID NO: 230151 - DNA, 15 bp, Homo sapiens
ccacaggggctttgc

SEQ ID NO: 230152 - DNA, 15 bp, Homo sapiens
tccacaggggctttg

SEQ ID NO: 230153 - DNA, 15 bp, Homo sapiens
ttccacaggggcttt

SEQ ID NO: 230154 - DNA, 15 bp, Homo sapiens
cttccacaggggctt

SEQ ID NO: 230155 - DNA, 15 bp, Homo sapiens
ccttccacaggggct

SEQ ID NO: 230156 - DNA, 15 bp, Homo sapiens
cccttccacaggggc

SEQ ID NO: 230157 - DNA, 15 bp, Homo sapiens
ccccttccacagggg

SEQ ID NO: 230158 - DNA, 15 bp, Homo sapiens
tccccttccacaggg

SEQ ID NO: 230159 - DNA, 15 bp, Homo sapiens
ttccccttccacagg

SEQ ID NO: 230160 - DNA, 15 bp, Homo sapiens
cttccccttccacag

SEQ ID NO: 230161 - DNA, 15 bp, Homo sapiens
ccttccccttccaca

SEQ ID NO: 230162 - DNA, 15 bp, Homo sapiens
accttccccttccac

SEQ ID NO: 230163 - DNA, 15 bp, Homo sapiens
caccttccccttcca

SEQ ID NO: 230164 - DNA, 15 bp, Homo sapiens
tcaccttccccttcc

SEQ ID NO: 230165 - DNA, 15 bp, Homo sapiens
ttcaccttccccttc

SEQ ID NO: 230166 - DNA, 15 bp, Homo sapiens
cttcaccttcccctt

SEQ ID NO: 230167 - DNA, 15 bp, Homo sapiens
ccttcaccttcccct

SEQ ID NO: 230168 - DNA, 15 bp, Homo sapiens
gccttcaccttcccc

SEQ ID NO: 230169 - DNA, 15 bp, Homo sapiens
agccttcaccttccc

SEQ ID NO: 230170 - DNA, 15 bp, Homo sapiens
gagccttcaccttcc

SEQ ID NO: 230171 - DNA, 15 bp, Homo sapiens
tgagccttcaccttc

SEQ ID NO: 230172 - DNA, 15 bp, Homo sapiens
ttgagccttcacctt

SEQ ID NO: 230173 - DNA, 15 bp, Homo sapiens
attgagccttcacct

SEQ ID NO: 230174 - DNA, 15 bp, Homo sapiens
gattgagccttcacc

SEQ ID NO: 230175 - DNA, 15 bp, Homo sapiens
tgattgagccttcac

SEQ ID NO: 230176 - DNA, 15 bp, Homo sapiens
ttgattgagccttca

SEQ ID NO: 230177 - DNA, 15 bp, Homo sapiens
tttgattgagccttc

SEQ ID NO: 230178 - DNA, 15 bp, Homo sapiens
ctttgattgagcctt

SEQ ID NO: 230179 - DNA, 15 bp, Homo sapiens
cctttgattgagcct

SEQ ID NO: 230180 - DNA, 15 bp, Homo sapiens
tcctttgattgagcc

SEQ ID NO: 230181 - DNA, 15 bp, Homo sapiens
atcctttgattgagc

SEQ ID NO: 230182 - DNA, 15 bp, Homo sapiens
gatcctttgattgag

SEQ ID NO: 230183 - DNA, 15 bp, Homo sapiens
ggatcctttgattga

SEQ ID NO: 230184 - DNA, 15 bp, Homo sapiens
gggatcctttgattg

SEQ ID NO: 230185 - DNA, 15 bp, Homo sapiens
ggggatcctttgatt

SEQ ID NO: 230186 - DNA, 15 bp, Homo sapiens
tggggatcctttgat

SEQ ID NO: 230187 - DNA, 15 bp, Homo sapiens
ctggggatcctttga

SEQ ID NO: 230188 - DNA, 15 bp, Homo sapiens
tctggggatcctttg

SEQ ID NO: 230189 - DNA, 15 bp, Homo sapiens
ctctggggatccttt

SEQ ID NO: 230190 - DNA, 15 bp, Homo sapiens
tctctggggatcctt

SEQ ID NO: 230191 - DNA, 15 bp, Homo sapiens
gtctctggggatcct

SEQ ID NO: 230192 - DNA, 15 bp, Homo sapiens
agtctctggggatcc

SEQ ID NO: 230193 - DNA, 15 bp, Homo sapiens
aagtctctggggatc

SEQ ID NO: 230194 - DNA, 15 bp, Homo sapiens
aaagtctctggggat

SEQ ID NO: 230195 - DNA, 15 bp, Homo sapiens
gaaagtctctgggga

SEQ ID NO: 230196 - DNA, 15 bp, Homo sapiens
ggaaagtctctgggg

SEQ ID NO: 230197 - DNA, 15 bp, Homo sapiens
tggaaagtctctggg

SEQ ID NO: 230198 - DNA, 15 bp, Homo sapiens
ctggaaagtctctgg

SEQ ID NO: 230199 - DNA, 15 bp, Homo sapiens
tctggaaagtctctg

SEQ ID NO: 230200 - DNA, 15 bp, Homo sapiens
atctggaaagtctct

SEQ ID NO: 230201 - DNA, 15 bp, Homo sapiens
tatctggaaagtctc

SEQ ID NO: 230202 - DNA, 15 bp, Homo sapiens
atatctggaaagtct

SEQ ID NO: 230203 - DNA, 15 bp, Homo sapiens
gatatctggaaagtc

SEQ ID NO: 230204 - DNA, 15 bp, Homo sapiens
agatatctggaaagt

SEQ ID NO: 230205 - DNA, 15 bp, Homo sapiens
cagatatctggaaag

SEQ ID NO: 230206 - DNA, 15 bp, Homo sapiens
tcagatatctggaaa

SEQ ID NO: 230207 - DNA, 15 bp, Homo sapiens
ttcagatatctggaa

SEQ ID NO: 230208 - DNA, 15 bp, Homo sapiens
cttcagatatctgga

SEQ ID NO: 230209 - DNA, 15 bp, Homo sapiens
tcttcagatatctgg

SEQ ID NO: 230210 - DNA, 15 bp, Homo sapiens
ttcttcagatatctg

SEQ ID NO: 230211 - DNA, 15 bp, Homo sapiens
cttcttcagatatct

SEQ ID NO: 230212 - DNA, 15 bp, Homo sapiens
acttcttcagatatc

SEQ ID NO: 230213 - DNA, 15 bp, Homo sapiens
gacttcttcagatat

SEQ ID NO: 230214 - DNA, 15 bp, Homo sapiens
ggacttcttcagata

SEQ ID NO: 230215 - DNA, 15 bp, Homo sapiens
aggacttcttcagat

SEQ ID NO: 230216 - DNA, 15 bp, Homo sapiens
caggacttcttcaga

SEQ ID NO: 230217 - DNA, 15 bp, Homo sapiens
tcaggacttcttcag

SEQ ID NO: 230218 - DNA, 15 bp, Homo sapiens
atcaggacttcttca

SEQ ID NO: 230219 - DNA, 15 bp, Homo sapiens
catcaggacttcttc

SEQ ID NO: 230220 - DNA, 15 bp, Homo sapiens
acatcaggacttctt

SEQ ID NO: 230221 - DNA, 15 bp, Homo sapiens
gacatcaggacttct

SEQ ID NO: 230222 - DNA, 15 bp, Homo sapiens
tgacatcaggacttc

SEQ ID NO: 230223 - DNA, 15 bp, Homo sapiens
gtgacatcaggactt

SEQ ID NO: 230224 - DNA, 15 bp, Homo sapiens
agtgacatcaggact

SEQ ID NO: 230225 - DNA, 15 bp, Homo sapiens
cagtgacatcaggac

SEQ ID NO: 230226 - DNA, 15 bp, Homo sapiens
gcagtgacatcagga

SEQ ID NO: 230227 - DNA, 15 bp, Homo sapiens
ggcagtgacatcagg

SEQ ID NO: 230228 - DNA, 15 bp, Homo sapiens
gggcagtgacatcag

SEQ ID NO: 230229 - DNA, 15 bp, Homo sapiens
ggggcagtgacatca

SEQ ID NO: 230230 - DNA, 15 bp, Homo sapiens
cggggcagtgacatc

SEQ ID NO: 230231 - DNA, 15 bp, Homo sapiens
ccggggcagtgacat

SEQ ID NO: 230232 - DNA, 15 bp, Homo sapiens
accggggcagtgaca

SEQ ID NO: 230233 - DNA, 15 bp, Homo sapiens
gaccggggcagtgac

SEQ ID NO: 230234 - DNA, 15 bp, Homo sapiens
ggaccggggcagtga

SEQ ID NO: 230235 - DNA, 15 bp, Homo sapiens
aggaccggggcagtg

SEQ ID NO: 230236 - DNA, 15 bp, Homo sapiens
aaggaccggggcagt

SEQ ID NO: 230237 - DNA, 15 bp, Homo sapiens
gaaggaccggggcag

SEQ ID NO: 230238 - DNA, 15 bp, Homo sapiens
ggaaggaccggggca

SEQ ID NO: 230239 - DNA, 15 bp, Homo sapiens
gggaaggaccggggc

SEQ ID NO: 230240 - DNA, 15 bp, Homo sapiens
ggggaaggaccgggg

SEQ ID NO: 230241 - DNA, 15 bp, Homo sapiens
tggggaaggaccggg

SEQ ID NO: 230242 - DNA, 15 bp, Homo sapiens
ctggggaaggaccgg

SEQ ID NO: 230243 - DNA, 15 bp, Homo sapiens
cctggggaaggaccg

SEQ ID NO: 230244 - DNA, 15 bp, Homo sapiens
acctggggaaggacc

SEQ ID NO: 230245 - DNA, 15 bp, Homo sapiens
tacctggggaaggac

SEQ ID NO: 230246 - DNA, 15 bp, Homo sapiens
ctacctggggaagga

SEQ ID NO: 230247 - DNA, 15 bp, Homo sapiens
tctacctggggaagg

SEQ ID NO: 230248 - DNA, 15 bp, Homo sapiens
ctctacctggggaag

SEQ ID NO: 230249 - DNA, 15 bp, Homo sapiens
gctctacctggggaa

SEQ ID NO: 230250 - DNA, 15 bp, Homo sapiens
tgctctacctgggga

SEQ ID NO: 230251 - DNA, 15 bp, Homo sapiens
ttgctctacctgggg

SEQ ID NO: 230252 - DNA, 15 bp, Homo sapiens
gttgctctacctggg

SEQ ID NO: 230253 - DNA, 15 bp, Homo sapiens
tgttgctctacctgg

SEQ ID NO: 230254 - DNA, 15 bp, Homo sapiens
gtgttgctctacctg

SEQ ID NO: 230255 - DNA, 15 bp, Homo sapiens
agtgttgctctacct

SEQ ID NO: 230256 - DNA, 15 bp, Homo sapiens
gagtgttgctctacc

SEQ ID NO: 230257 - DNA, 15 bp, Homo sapiens
ggagtgttgctctac

SEQ ID NO: 230258 - DNA, 15 bp, Homo sapiens
aggagtgttgctcta

SEQ ID NO: 230259 - DNA, 15 bp, Homo sapiens
gaggagtgttgctct

SEQ ID NO: 230260 - DNA, 15 bp, Homo sapiens
cgaggagtgttgctc

SEQ ID NO: 230261 - DNA, 15 bp, Homo sapiens
gcgaggagtgttgct

SEQ ID NO: 230262 - DNA, 15 bp, Homo sapiens
ggcgaggagtgttgc

SEQ ID NO: 230263 - DNA, 15 bp, Homo sapiens
cggcgaggagtgttg

SEQ ID NO: 230264 - DNA, 15 bp, Homo sapiens
gcggcgaggagtgtt

SEQ ID NO: 230265 - DNA, 15 bp, Homo sapiens
tgcggcgaggagtgt

SEQ ID NO: 230266 - DNA, 15 bp, Homo sapiens
ttgcggcgaggagtg

SEQ ID NO: 230267 - DNA, 15 bp, Homo sapiens
gttgcggcgaggagt

SEQ ID NO: 230268 - DNA, 15 bp, Homo sapiens
ggttgcggcgaggag

SEQ ID NO: 230269 - DNA, 15 bp, Homo sapiens
gggttgcggcgagga

SEQ ID NO: 230270 - DNA, 15 bp, Homo sapiens
tgggttgcggcgagg

SEQ ID NO: 230271 - DNA, 15 bp, Homo sapiens
ttgggttgcggcgag

SEQ ID NO: 230272 - DNA, 15 bp, Homo sapiens
gttgggttgcggcga

SEQ ID NO: 230273 - DNA, 15 bp, Homo sapiens
agttgggttgcggcg

SEQ ID NO: 230274 - DNA, 15 bp, Homo sapiens
cagttgggttgcggc

SEQ ID NO: 230275 - DNA, 15 bp, Homo sapiens
ccagttgggttgcgg

SEQ ID NO: 230276 - DNA, 15 bp, Homo sapiens
gccagttgggttgcg

SEQ ID NO: 230277 - DNA, 15 bp, Homo sapiens
agccagttgggttgc

SEQ ID NO: 230278 - DNA, 15 bp, Homo sapiens
gagccagttgggttg

SEQ ID NO: 230279 - DNA, 15 bp, Homo sapiens
ggagccagttgggtt

SEQ ID NO: 230280 - DNA, 15 bp, Homo sapiens
gggagccagttgggt

SEQ ID NO: 230281 - DNA, 15 bp, Homo sapiens
ggggagccagttggg

SEQ ID NO: 230282 - DNA, 15 bp, Homo sapiens
aggggagccagttgg

SEQ ID NO: 230283 - DNA, 15 bp, Homo sapiens
aaggggagccagttg

SEQ ID NO: 230284 - DNA, 15 bp, Homo sapiens
taaggggagccagtt

SEQ ID NO: 230285 - DNA, 15 bp, Homo sapiens
gtaaggggagccagt

SEQ ID NO: 230286 - DNA, 15 bp, Homo sapiens
ggtaaggggagccag

SEQ ID NO: 230287 - DNA, 15 bp, Homo sapiens
aggtaaggggagcca

SEQ ID NO: 230288 - DNA, 15 bp, Homo sapiens
aaggtaaggggagcc

SEQ ID NO: 230289 - DNA, 15 bp, Homo sapiens
gaaggtaaggggagc

SEQ ID NO: 230290 - DNA, 15 bp, Homo sapiens
agaaggtaaggggag

SEQ ID NO: 230291 - DNA, 15 bp, Homo sapiens
tagaaggtaagggga

SEQ ID NO: 230292 - DNA, 15 bp, Homo sapiens
gtagaaggtaagggg

SEQ ID NO: 230293 - DNA, 15 bp, Homo sapiens
tgtagaaggtaaggg

SEQ ID NO: 230294 - DNA, 15 bp, Homo sapiens
gtgtagaaggtaagg

SEQ ID NO: 230295 - DNA, 15 bp, Homo sapiens
tgtgtagaaggtaag

SEQ ID NO: 230296 - DNA, 15 bp, Homo sapiens
gtgtgtagaaggtaa

SEQ ID NO: 230297 - DNA, 15 bp, Homo sapiens
tgtgtgtagaaggta

SEQ ID NO: 230298 - DNA, 15 bp, Homo sapiens
gtgtgtgtagaaggt

SEQ ID NO: 230299 - DNA, 15 bp, Homo sapiens
tgtgtgtgtagaagg

SEQ ID NO: 230300 - DNA, 15 bp, Homo sapiens
gtgtgtgtgtagaag

SEQ ID NO: 230301 - DNA, 15 bp, Homo sapiens
tgtgtgtgtgtagaa

SEQ ID NO: 230302 - DNA, 15 bp, Homo sapiens
gtgtgtgtgtgtaga

SEQ ID NO: 230303 - DNA, 15 bp, Homo sapiens
tgtgtgtgtgtgtag

SEQ ID NO: 230304 - DNA, 15 bp, Homo sapiens
gtgtgtgtgtgtgta

SEQ ID NO: 230305 - DNA, 15 bp, Homo sapiens
ttgtgtgtgtgtgtg

SEQ ID NO: 230306 - DNA, 15 bp, Homo sapiens
tttgtgtgtgtgtgt

SEQ ID NO: 230307 - DNA, 15 bp, Homo sapiens
atttgtgtgtgtgtg

SEQ ID NO: 230308 - DNA, 15 bp, Homo sapiens
gatttgtgtgtgtgt

SEQ ID NO: 230309 - DNA, 15 bp, Homo sapiens
ggatttgtgtgtgtg

SEQ ID NO: 230310 - DNA, 15 bp, Homo sapiens
tggatttgtgtgtgt

SEQ ID NO: 230311 - DNA, 15 bp, Homo sapiens
ttggatttgtgtgtg

SEQ ID NO: 230312 - DNA, 15 bp, Homo sapiens
cttggatttgtgtgt

SEQ ID NO: 230313 - DNA, 15 bp, Homo sapiens
tcttggatttgtgtg

SEQ ID NO: 230314 - DNA, 15 bp, Homo sapiens
gtcttggatttgtgt

SEQ ID NO: 230315 - DNA, 15 bp, Homo sapiens
tgtcttggatttgtg

SEQ ID NO: 230316 - DNA, 15 bp, Homo sapiens
ttgtcttggatttgt

SEQ ID NO: 230317 - DNA, 15 bp, Homo sapiens
gttgtcttggatttg

SEQ ID NO: 230318 - DNA, 15 bp, Homo sapiens
tgttgtcttggattt

SEQ ID NO: 230319 - DNA, 15 bp, Homo sapiens
gtgttgtcttggatt

SEQ ID NO: 230320 - DNA, 15 bp, Homo sapiens
agtgttgtcttggat

SEQ ID NO: 230321 - DNA, 15 bp, Homo sapiens
tagtgttgtcttgga

SEQ ID NO: 230322 - DNA, 15 bp, Homo sapiens
gtagtgttgtcttgg

SEQ ID NO: 230323 - DNA, 15 bp, Homo sapiens
agtagtgttgtcttg

SEQ ID NO: 230324 - DNA, 15 bp, Homo sapiens
tagtagtgttgtctt

SEQ ID NO: 230325 - DNA, 15 bp, Homo sapiens
ttagtagtgttgtct

SEQ ID NO: 230326 - DNA, 15 bp, Homo sapiens
cttagtagtgttgtc

SEQ ID NO: 230327 - DNA, 15 bp, Homo sapiens
ccttagtagtgttgt

SEQ ID NO: 230328 - DNA, 15 bp, Homo sapiens
gccttagtagtgttg

SEQ ID NO: 230329 - DNA, 15 bp, Homo sapiens
agccttagtagtgtt

SEQ ID NO: 230330 - DNA, 15 bp, Homo sapiens
aagccttagtagtgt

SEQ ID NO: 230331 - DNA, 15 bp, Homo sapiens
gaagccttagtagtg

SEQ ID NO: 230332 - DNA, 15 bp, Homo sapiens
agaagccttagtagt

SEQ ID NO: 230333 - DNA, 15 bp, Homo sapiens
aagaagccttagtag

SEQ ID NO: 230334 - DNA, 15 bp, Homo sapiens
aaagaagccttagta

SEQ ID NO: 230335 - DNA, 15 bp, Homo sapiens
caaagaagccttagt

SEQ ID NO: 230336 - DNA, 15 bp, Homo sapiens
ccaaagaagccttag

SEQ ID NO: 230337 - DNA, 15 bp, Homo sapiens
cccaaagaagcctta

SEQ ID NO: 230338 - DNA, 15 bp, Homo sapiens
tcccaaagaagcctt

SEQ ID NO: 230339 - DNA, 15 bp, Homo sapiens
ttcccaaagaagcct

SEQ ID NO: 230340 - DNA, 15 bp, Homo sapiens
cttcccaaagaagcc

SEQ ID NO: 230341 - DNA, 15 bp, Homo sapiens
ccttcccaaagaagc

SEQ ID NO: 230342 - DNA, 15 bp, Homo sapiens
cccttcccaaagaag

SEQ ID NO: 230343 - DNA, 15 bp, Homo sapiens
ccccttcccaaagaa

SEQ ID NO: 230344 - DNA, 15 bp, Homo sapiens
tccccttcccaaaga

SEQ ID NO: 230345 - DNA, 15 bp, Homo sapiens
ttccccttcccaaag

SEQ ID NO: 230346 - DNA, 15 bp, Homo sapiens
cttccccttcccaaa

SEQ ID NO: 230347 - DNA, 15 bp, Homo sapiens
acttccccttcccaa

SEQ ID NO: 230348 - DNA, 15 bp, Homo sapiens
tacttccccttccca

SEQ ID NO: 230349 - DNA, 15 bp, Homo sapiens
ctacttccccttccc

SEQ ID NO: 230350 - DNA, 15 bp, Homo sapiens
cctacttccccttcc

SEQ ID NO: 230351 - DNA, 15 bp, Homo sapiens
ccctacttccccttc

SEQ ID NO: 230352 - DNA, 15 bp, Homo sapiens
tccctacttcccctt

SEQ ID NO: 230353 - DNA, 15 bp, Homo sapiens
atccctacttcccct

SEQ ID NO: 230354 - DNA, 15 bp, Homo sapiens
tatccctacttcccc

SEQ ID NO: 230355 - DNA, 15 bp, Homo sapiens
ctatccctacttccc

SEQ ID NO: 230356 - DNA, 15 bp, Homo sapiens
cctatccctacttcc

SEQ ID NO: 230357 - DNA, 15 bp, Homo sapiens
acctatccctacttc

SEQ ID NO: 230358 - DNA, 15 bp, Homo sapiens
tacctatccctactt

SEQ ID NO: 230359 - DNA, 15 bp, Homo sapiens
ttacctatccctact

SEQ ID NO: 230360 - DNA, 15 bp, Homo sapiens
cttacctatccctac

SEQ ID NO: 230361 - DNA, 15 bp, Homo sapiens
tcttacctatcccta

SEQ ID NO: 230362 - DNA, 15 bp, Homo sapiens
ctcttacctatccct

SEQ ID NO: 230363 - DNA, 15 bp, Homo sapiens
cctcttacctatccc

SEQ ID NO: 230364 - DNA, 15 bp, Homo sapiens
tcctcttacctatcc

SEQ ID NO: 230365 - DNA, 15 bp, Homo sapiens
ttcctcttacctatc

SEQ ID NO: 230366 - DNA, 15 bp, Homo sapiens
tttcctcttacctat

SEQ ID NO: 230367 - DNA, 15 bp, Homo sapiens
ctttcctcttaccta

SEQ ID NO: 230368 - DNA, 15 bp, Homo sapiens
actttcctcttacct

SEQ ID NO: 230369 - DNA, 15 bp, Homo sapiens
tactttcctcttacc

SEQ ID NO: 230370 - DNA, 15 bp, Homo sapiens
ttactttcctcttac

SEQ ID NO: 230371 - DNA, 15 bp, Homo sapiens
cttactttcctctta

SEQ ID NO: 230372 - DNA, 15 bp, Homo sapiens
ccttactttcctctt

SEQ ID NO: 230373 - DNA, 15 bp, Homo sapiens
cccttactttcctct

SEQ ID NO: 230374 - DNA, 15 bp, Homo sapiens
tcccttactttcctc

SEQ ID NO: 230375 - DNA, 15 bp, Homo sapiens
gtcccttactttcct

SEQ ID NO: 230376 - DNA, 15 bp, Homo sapiens
ggtcccttactttcc

SEQ ID NO: 230377 - DNA, 15 bp, Homo sapiens
aggtcccttactttc

SEQ ID NO: 230378 - DNA, 15 bp, Homo sapiens
gaggtcccttacttt

SEQ ID NO: 230379 - DNA, 15 bp, Homo sapiens
ggaggtcccttactt

SEQ ID NO: 230380 - DNA, 15 bp, Homo sapiens
aggaggtcccttact

SEQ ID NO: 230381 - DNA, 15 bp, Homo sapiens
taggaggtcccttac

SEQ ID NO: 230382 - DNA, 15 bp, Homo sapiens
ataggaggtccctta

SEQ ID NO: 230383 - DNA, 15 bp, Homo sapiens
gataggaggtccctt

SEQ ID NO: 230384 - DNA, 15 bp, Homo sapiens
ggataggaggtccct

SEQ ID NO: 230385 - DNA, 15 bp, Homo sapiens
tggataggaggtccc

SEQ ID NO: 230386 - DNA, 15 bp, Homo sapiens
ctggataggaggtcc

SEQ ID NO: 230387 - DNA, 15 bp, Homo sapiens
gctggataggaggtc

SEQ ID NO: 230388 - DNA, 15 bp, Homo sapiens
ggctggataggaggt

SEQ ID NO: 230389 - DNA, 15 bp, Homo sapiens
aggctggataggagg

SEQ ID NO: 230390 - DNA, 15 bp, Homo sapiens
gaggctggataggag

SEQ ID NO: 230391 - DNA, 15 bp, Homo sapiens
ggaggctggatagga

SEQ ID NO: 230392 - DNA, 15 bp, Homo sapiens
tggaggctggatagg

SEQ ID NO: 230393 - DNA, 15 bp, Homo sapiens
atggaggctggatag

SEQ ID NO: 230394 - DNA, 15 bp, Homo sapiens
catggaggctggata

SEQ ID NO: 230395 - DNA, 15 bp, Homo sapiens
ccatggaggctggat

SEQ ID NO: 230396 - DNA, 15 bp, Homo sapiens
tccatggaggctgga

SEQ ID NO: 230397 - DNA, 15 bp, Homo sapiens
ttccatggaggctgg

SEQ ID NO: 230398 - DNA, 15 bp, Homo sapiens
attccatggaggctg

SEQ ID NO: 230399 - DNA, 15 bp, Homo sapiens
gattccatggaggct

SEQ ID NO: 230400 - DNA, 15 bp, Homo sapiens
ggattccatggaggc

SEQ ID NO: 230401 - DNA, 15 bp, Homo sapiens
aggattccatggagg

SEQ ID NO: 230402 - DNA, 15 bp, Homo sapiens
caggattccatggag

SEQ ID NO: 230403 - DNA, 15 bp, Homo sapiens
tcaggattccatgga

SEQ ID NO: 230404 - DNA, 15 bp, Homo sapiens
gtcaggattccatgg

SEQ ID NO: 230405 - DNA, 15 bp, Homo sapiens
agtcaggattccatg

SEQ ID NO: 230406 - DNA, 15 bp, Homo sapiens
aagtcaggattccat

SEQ ID NO: 230407 - DNA, 15 bp, Homo sapiens
gaagtcaggattcca

SEQ ID NO: 230408 - DNA, 15 bp, Homo sapiens
agaagtcaggattcc

SEQ ID NO: 230409 - DNA, 15 bp, Homo sapiens
aagaagtcaggattc

SEQ ID NO: 230410 - DNA, 15 bp, Homo sapiens
aaagaagtcaggatt

SEQ ID NO: 230411 - DNA, 15 bp, Homo sapiens
aaaagaagtcaggat

SEQ ID NO: 230412 - DNA, 15 bp, Homo sapiens
gaaaagaagtcagga

SEQ ID NO: 230413 - DNA, 15 bp, Homo sapiens
ggaaaagaagtcagg

SEQ ID NO: 230414 - DNA, 15 bp, Homo sapiens
aggaaaagaagtcag

SEQ ID NO: 230415 - DNA, 15 bp, Homo sapiens
aaggaaaagaagtca

SEQ ID NO: 230416 - DNA, 15 bp, Homo sapiens
caaggaaaagaagtc

SEQ ID NO: 230417 - DNA, 15 bp, Homo sapiens
acaaggaaaagaagt

SEQ ID NO: 230418 - DNA, 15 bp, Homo sapiens
aacaaggaaaagaag

SEQ ID NO: 230419 - DNA, 15 bp, Homo sapiens
taacaaggaaaagaa

SEQ ID NO: 230420 - DNA, 15 bp, Homo sapiens
ataacaaggaaaaga

SEQ ID NO: 230421 - DNA, 15 bp, Homo sapiens
aataacaaggaaaag

SEQ ID NO: 230422 - DNA, 15 bp, Homo sapiens
aaataacaaggaaaa

SEQ ID NO: 230423 - DNA, 15 bp, Homo sapiens
gaaataacaaggaaa

SEQ ID NO: 230424 - DNA, 15 bp, Homo sapiens
tgaaataacaaggaa

SEQ ID NO: 230425 - DNA, 15 bp, Homo sapiens
ttgaaataacaagga

SEQ ID NO: 230426 - DNA, 15 bp, Homo sapiens
gttgaaataacaagg

SEQ ID NO: 230427 - DNA, 15 bp, Homo sapiens
agttgaaataacaag

SEQ ID NO: 230428 - DNA, 15 bp, Homo sapiens
aagttgaaataacaa

SEQ ID NO: 230429 - DNA, 15 bp, Homo sapiens
gaagttgaaataaca

SEQ ID NO: 230430 - DNA, 15 bp, Homo sapiens
agaagttgaaataac

SEQ ID NO: 230431 - DNA, 15 bp, Homo sapiens
aagaagttgaaataa

SEQ ID NO: 230432 - DNA, 15 bp, Homo sapiens
gaagaagttgaaata

SEQ ID NO: 230433 - DNA, 15 bp, Homo sapiens
ggaagaagttgaaat

SEQ ID NO: 230434 - DNA, 15 bp, Homo sapiens
tggaagaagttgaaa

SEQ ID NO: 230435 - DNA, 15 bp, Homo sapiens
gtggaagaagttgaa

SEQ ID NO: 230436 - DNA, 15 bp, Homo sapiens
ggtggaagaagttga

SEQ ID NO: 230437 - DNA, 15 bp, Homo sapiens
gggtggaagaagttg

SEQ ID NO: 230438 - DNA, 15 bp, Homo sapiens
ggggtggaagaagtt

SEQ ID NO: 230439 - DNA, 15 bp, Homo sapiens
tggggtggaagaagt

SEQ ID NO: 230440 - DNA, 15 bp, Homo sapiens
atggggtggaagaag

SEQ ID NO: 230441 - DNA, 15 bp, Homo sapiens
gatggggtggaagaa

SEQ ID NO: 230442 - DNA, 15 bp, Homo sapiens
agatggggtggaaga

SEQ ID NO: 230443 - DNA, 15 bp, Homo sapiens
aagatggggtggaag

SEQ ID NO: 230444 - DNA, 15 bp, Homo sapiens
aaagatggggtggaa

SEQ ID NO: 230445 - DNA, 15 bp, Homo sapiens
aaaagatggggtgga

SEQ ID NO: 230446 - DNA, 15 bp, Homo sapiens
taaaagatggggtgg

SEQ ID NO: 230447 - DNA, 15 bp, Homo sapiens
ttaaaagatggggtg

SEQ ID NO: 230448 - DNA, 15 bp, Homo sapiens
tttaaaagatggggt

SEQ ID NO: 230449 - DNA, 15 bp, Homo sapiens
gtttaaaagatgggg

SEQ ID NO: 230450 - DNA, 15 bp, Homo sapiens
agtttaaaagatggg

SEQ ID NO: 230451 - DNA, 15 bp, Homo sapiens
aagtttaaaagatgg

SEQ ID NO: 230452 - DNA, 15 bp, Homo sapiens
aaagtttaaaagatg

SEQ ID NO: 230453 - DNA, 15 bp, Homo sapiens
taaagtttaaaagat

SEQ ID NO: 230454 - DNA, 15 bp, Homo sapiens
ctaaagtttaaaaga

SEQ ID NO: 230455 - DNA, 15 bp, Homo sapiens
tctaaagtttaaaag

SEQ ID NO: 230456 - DNA, 15 bp, Homo sapiens
gtctaaagtttaaaa

SEQ ID NO: 230457 - DNA, 15 bp, Homo sapiens
agtctaaagtttaaa

SEQ ID NO: 230458 - DNA, 15 bp, Homo sapiens
gagtctaaagtttaa

SEQ ID NO: 230459 - DNA, 15 bp, Homo sapiens
ggagtctaaagttta

SEQ ID NO: 230460 - DNA, 15 bp, Homo sapiens
tggagtctaaagttt

SEQ ID NO: 230461 - DNA, 15 bp, Homo sapiens
ctggagtctaaagtt

SEQ ID NO: 230462 - DNA, 15 bp, Homo sapiens
gctggagtctaaagt

SEQ ID NO: 230463 - DNA, 15 bp, Homo sapiens
ggctggagtctaaag

SEQ ID NO: 230464 - DNA, 15 bp, Homo sapiens
tggctggagtctaaa

SEQ ID NO: 230465 - DNA, 15 bp, Homo sapiens
gtggctggagtctaa

SEQ ID NO: 230466 - DNA, 15 bp, Homo sapiens
tgtggctggagtcta

SEQ ID NO: 230467 - DNA, 15 bp, Homo sapiens
ctgtggctggagtct

SEQ ID NO: 230468 - DNA, 15 bp, Homo sapiens
tctgtggctggagtc

SEQ ID NO: 230469 - DNA, 15 bp, Homo sapiens
ttctgtggctggagt

SEQ ID NO: 230470 - DNA, 15 bp, Homo sapiens
cttctgtggctggag

SEQ ID NO: 230471 - DNA, 15 bp, Homo sapiens
gcttctgtggctgga

SEQ ID NO: 230472 - DNA, 15 bp, Homo sapiens
agcttctgtggctgg

SEQ ID NO: 230473 - DNA, 15 bp, Homo sapiens
aagcttctgtggctg

SEQ ID NO: 230474 - DNA, 15 bp, Homo sapiens
taagcttctgtggct

SEQ ID NO: 230475 - DNA, 15 bp, Homo sapiens
gtaagcttctgtggc

SEQ ID NO: 230476 - DNA, 15 bp, Homo sapiens
tgtaagcttctgtgg

SEQ ID NO: 230477 - DNA, 15 bp, Homo sapiens
ttgtaagcttctgtg

SEQ ID NO: 230478 - DNA, 15 bp, Homo sapiens
gttgtaagcttctgt

SEQ ID NO: 230479 - DNA, 15 bp, Homo sapiens
agttgtaagcttctg

SEQ ID NO: 230480 - DNA, 15 bp, Homo sapiens
tagttgtaagcttct

SEQ ID NO: 230481 - DNA, 15 bp, Homo sapiens
ttagttgtaagcttc

SEQ ID NO: 230482 - DNA, 15 bp, Homo sapiens
tttagttgtaagctt

SEQ ID NO: 230483 - DNA, 15 bp, Homo sapiens
ttttagttgtaagct

SEQ ID NO: 230484 - DNA, 15 bp, Homo sapiens
cttttagttgtaagc

SEQ ID NO: 230485 - DNA, 15 bp, Homo sapiens
tcttttagttgtaag

SEQ ID NO: 230486 - DNA, 15 bp, Homo sapiens
ttcttttagttgtaa

SEQ ID NO: 230487 - DNA, 15 bp, Homo sapiens
tttcttttagttgta

SEQ ID NO: 230488 - DNA, 15 bp, Homo sapiens
gtttcttttagttgt

SEQ ID NO: 230489 - DNA, 15 bp, Homo sapiens
agtttcttttagttg

SEQ ID NO: 230490 - DNA, 15 bp, Homo sapiens
gagtttcttttagtt

SEQ ID NO: 230491 - DNA, 15 bp, Homo sapiens
agagtttcttttagt

SEQ ID NO: 230492 - DNA, 15 bp, Homo sapiens
tagagtttcttttag

SEQ ID NO: 230493 - DNA, 15 bp, Homo sapiens
ttagagtttctttta

SEQ ID NO: 230494 - DNA, 15 bp, Homo sapiens
cttagagtttctttt

SEQ ID NO: 230495 - DNA, 15 bp, Homo sapiens
ccttagagtttcttt

SEQ ID NO: 230496 - DNA, 15 bp, Homo sapiens
gccttagagtttctt

SEQ ID NO: 230497 - DNA, 15 bp, Homo sapiens
ggccttagagtttct

SEQ ID NO: 230498 - DNA, 15 bp, Homo sapiens
tggccttagagtttc

SEQ ID NO: 230499 - DNA, 15 bp, Homo sapiens
ttggccttagagttt

SEQ ID NO: 230500 - DNA, 15 bp, Homo sapiens
attggccttagagtt

SEQ ID NO: 230501 - DNA, 15 bp, Homo sapiens
aattggccttagagt

SEQ ID NO: 230502 - DNA, 15 bp, Homo sapiens
aaattggccttagag

SEQ ID NO: 230503 - DNA, 15 bp, Homo sapiens
taaattggccttaga

SEQ ID NO: 230504 - DNA, 15 bp, Homo sapiens
ttaaattggccttag

SEQ ID NO: 230505 - DNA, 15 bp, Homo sapiens
attaaattggcctta

SEQ ID NO: 230506 - DNA, 15 bp, Homo sapiens
gattaaattggcctt

SEQ ID NO: 230507 - DNA, 15 bp, Homo sapiens
ggattaaattggcct

SEQ ID NO: 230508 - DNA, 15 bp, Homo sapiens
tggattaaattggcc

SEQ ID NO: 230509 - DNA, 15 bp, Homo sapiens
ttggattaaattggc

SEQ ID NO: 230510 - DNA, 15 bp, Homo sapiens
cttggattaaattgg

SEQ ID NO: 230511 - DNA, 15 bp, Homo sapiens
ccttggattaaattg

SEQ ID NO: 230512 - DNA, 15 bp, Homo sapiens
accttggattaaatt

SEQ ID NO: 230513 - DNA, 15 bp, Homo sapiens
aaccttggattaaat

SEQ ID NO: 230514 - DNA, 15 bp, Homo sapiens
aaaccttggattaaa

SEQ ID NO: 230515 - DNA, 15 bp, Homo sapiens
gaaaccttggattaa

SEQ ID NO: 230516 - DNA, 15 bp, Homo sapiens
tgaaaccttggatta

SEQ ID NO: 230517 - DNA, 15 bp, Homo sapiens
atgaaaccttggatt

SEQ ID NO: 230518 - DNA, 15 bp, Homo sapiens
aatgaaaccttggat

SEQ ID NO: 230519 - DNA, 15 bp, Homo sapiens
gaatgaaaccttgga

SEQ ID NO: 230520 - DNA, 15 bp, Homo sapiens
agaatgaaaccttgg

SEQ ID NO: 230521 - DNA, 15 bp, Homo sapiens
tagaatgaaaccttg

SEQ ID NO: 230522 - DNA, 15 bp, Homo sapiens
atagaatgaaacctt

SEQ ID NO: 230523 - DNA, 15 bp, Homo sapiens
catagaatgaaacct

SEQ ID NO: 230524 - DNA, 15 bp, Homo sapiens
acatagaatgaaacc

SEQ ID NO: 230525 - DNA, 15 bp, Homo sapiens
cacatagaatgaaac

SEQ ID NO: 230526 - DNA, 15 bp, Homo sapiens
gcacatagaatgaaa

SEQ ID NO: 230527 - DNA, 15 bp, Homo sapiens
agcacatagaatgaa

SEQ ID NO: 230528 - DNA, 15 bp, Homo sapiens
cagcacatagaatga

SEQ ID NO: 230529 - DNA, 15 bp, Homo sapiens
ccagcacatagaatg

SEQ ID NO: 230530 - DNA, 15 bp, Homo sapiens
tccagcacatagaat

SEQ ID NO: 230531 - DNA, 15 bp, Homo sapiens
ctccagcacatagaa

SEQ ID NO: 230532 - DNA, 15 bp, Homo sapiens
tctccagcacataga

SEQ ID NO: 230533 - DNA, 15 bp, Homo sapiens
atctccagcacatag

SEQ ID NO: 230534 - DNA, 15 bp, Homo sapiens
catctccagcacata

SEQ ID NO: 230535 - DNA, 15 bp, Homo sapiens
ccatctccagcacat

SEQ ID NO: 230536 - DNA, 15 bp, Homo sapiens
accatctccagcaca

SEQ ID NO: 230537 - DNA, 15 bp, Homo sapiens
caccatctccagcac

SEQ ID NO: 230538 - DNA, 15 bp, Homo sapiens
acaccatctccagca

SEQ ID NO: 230539 - DNA, 15 bp, Homo sapiens
tacaccatctccagc

SEQ ID NO: 230540 - DNA, 15 bp, Homo sapiens
gtacaccatctccag

SEQ ID NO: 230541 - DNA, 15 bp, Homo sapiens
tgtacaccatctcca

SEQ ID NO: 230542 - DNA, 15 bp, Homo sapiens
ctgtacaccatctcc

SEQ ID NO: 230543 - DNA, 15 bp, Homo sapiens
actgtacaccatctc

SEQ ID NO: 230544 - DNA, 15 bp, Homo sapiens
tactgtacaccatct

SEQ ID NO: 230545 - DNA, 15 bp, Homo sapiens
ctactgtacaccatc

SEQ ID NO: 230546 - DNA, 15 bp, Homo sapiens
cctactgtacaccat

SEQ ID NO: 230547 - DNA, 15 bp, Homo sapiens
ccctactgtacacca

SEQ ID NO: 230548 - DNA, 15 bp, Homo sapiens
accctactgtacacc

SEQ ID NO: 230549 - DNA, 15 bp, Homo sapiens
caccctactgtacac

SEQ ID NO: 230550 - DNA, 15 bp, Homo sapiens
tcaccctactgtaca

SEQ ID NO: 230551 - DNA, 15 bp, Homo sapiens
ctcaccctactgtac

SEQ ID NO: 230552 - DNA, 15 bp, Homo sapiens
cctcaccctactgta

SEQ ID NO: 230553 - DNA, 15 bp, Homo sapiens
tcctcaccctactgt

SEQ ID NO: 230554 - DNA, 15 bp, Homo sapiens
ttcctcaccctactg

SEQ ID NO: 230555 - DNA, 15 bp, Homo sapiens
tttcctcaccctact

SEQ ID NO: 230556 - DNA, 15 bp, Homo sapiens
gtttcctcaccctac

SEQ ID NO: 230557 - DNA, 15 bp, Homo sapiens
ggtttcctcacccta

SEQ ID NO: 230558 - DNA, 15 bp, Homo sapiens
tggtttcctcaccct

SEQ ID NO: 230559 - DNA, 15 bp, Homo sapiens
ttggtttcctcaccc

SEQ ID NO: 230560 - DNA, 15 bp, Homo sapiens
tttggtttcctcacc

SEQ ID NO: 230561 - DNA, 15 bp, Homo sapiens
atttggtttcctcac

SEQ ID NO: 230562 - DNA, 15 bp, Homo sapiens
aatttggtttcctca

SEQ ID NO: 230563 - DNA, 15 bp, Homo sapiens
gaatttggtttcctc

SEQ ID NO: 230564 - DNA, 15 bp, Homo sapiens
agaatttggtttcct

SEQ ID NO: 230565 - DNA, 15 bp, Homo sapiens
gagaatttggtttcc

SEQ ID NO: 230566 - DNA, 15 bp, Homo sapiens
tgagaatttggtttc

SEQ ID NO: 230567 - DNA, 15 bp, Homo sapiens
ctgagaatttggttt

SEQ ID NO: 230568 - DNA, 15 bp, Homo sapiens
actgagaatttggtt

SEQ ID NO: 230569 - DNA, 15 bp, Homo sapiens
aactgagaatttggt

SEQ ID NO: 230570 - DNA, 15 bp, Homo sapiens
caactgagaatttgg

SEQ ID NO: 230571 - DNA, 15 bp, Homo sapiens
ccaactgagaatttg

SEQ ID NO: 230572 - DNA, 15 bp, Homo sapiens
gccaactgagaattt

SEQ ID NO: 230573 - DNA, 15 bp, Homo sapiens
tgccaactgagaatt

SEQ ID NO: 230574 - DNA, 15 bp, Homo sapiens
gtgccaactgagaat

SEQ ID NO: 230575 - DNA, 15 bp, Homo sapiens
agtgccaactgagaa

SEQ ID NO: 230576 - DNA, 15 bp, Homo sapiens
cagtgccaactgaga

SEQ ID NO: 230577 - DNA, 15 bp, Homo sapiens
ccagtgccaactgag

SEQ ID NO: 230578 - DNA, 15 bp, Homo sapiens
accagtgccaactga

SEQ ID NO: 230579 - DNA, 15 bp, Homo sapiens
caccagtgccaactg

SEQ ID NO: 230580 - DNA, 15 bp, Homo sapiens
acaccagtgccaact

SEQ ID NO: 230581 - DNA, 15 bp, Homo sapiens
tacaccagtgccaac

SEQ ID NO: 230582 - DNA, 15 bp, Homo sapiens
gtacaccagtgccaa

SEQ ID NO: 230583 - DNA, 15 bp, Homo sapiens
ggtacaccagtgcca

SEQ ID NO: 230584 - DNA, 15 bp, Homo sapiens
gggtacaccagtgcc

SEQ ID NO: 230585 - DNA, 15 bp, Homo sapiens
agggtacaccagtgc

SEQ ID NO: 230586 - DNA, 15 bp, Homo sapiens
aagggtacaccagtg

SEQ ID NO: 230587 - DNA, 15 bp, Homo sapiens
caagggtacaccagt

SEQ ID NO: 230588 - DNA, 15 bp, Homo sapiens
acaagggtacaccag

SEQ ID NO: 230589 - DNA, 15 bp, Homo sapiens
tacaagggtacacca

SEQ ID NO: 230590 - DNA, 15 bp, Homo sapiens
gtacaagggtacacc

SEQ ID NO: 230591 - DNA, 15 bp, Homo sapiens
tgtacaagggtacac

SEQ ID NO: 230592 - DNA, 15 bp, Homo sapiens
ctgtacaagggtaca

SEQ ID NO: 230593 - DNA, 15 bp, Homo sapiens
cctgtacaagggtac

SEQ ID NO: 230594 - DNA, 15 bp, Homo sapiens
acctgtacaagggta

SEQ ID NO: 230595 - DNA, 15 bp, Homo sapiens
cacctgtacaagggt

SEQ ID NO: 230596 - DNA, 15 bp, Homo sapiens
tcacctgtacaaggg

SEQ ID NO: 230597 - DNA, 15 bp, Homo sapiens
atcacctgtacaagg

SEQ ID NO: 230598 - DNA, 15 bp, Homo sapiens
catcacctgtacaag

SEQ ID NO: 230599 - DNA, 15 bp, Homo sapiens
acatcacctgtacaa

SEQ ID NO: 230600 - DNA, 15 bp, Homo sapiens
tacatcacctgtaca

SEQ ID NO: 230601 - DNA, 15 bp, Homo sapiens
ttacatcacctgtac

SEQ ID NO: 230602 - DNA, 15 bp, Homo sapiens
attacatcacctgta

SEQ ID NO: 230603 - DNA, 15 bp, Homo sapiens
tattacatcacctgt

SEQ ID NO: 230604 - DNA, 15 bp, Homo sapiens
atattacatcacctg

SEQ ID NO: 230605 - DNA, 15 bp, Homo sapiens
gatattacatcacct

SEQ ID NO: 230606 - DNA, 15 bp, Homo sapiens
agatattacatcacc

SEQ ID NO: 230607 - DNA, 15 bp, Homo sapiens
gagatattacatcac

SEQ ID NO: 230608 - DNA, 15 bp, Homo sapiens
agagatattacatca

SEQ ID NO: 230609 - DNA, 15 bp, Homo sapiens
cagagatattacatc

SEQ ID NO: 230610 - DNA, 15 bp, Homo sapiens
acagagatattacat

SEQ ID NO: 230611 - DNA, 15 bp, Homo sapiens
cacagagatattaca

SEQ ID NO: 230612 - DNA, 15 bp, Homo sapiens
gcacagagatattac

SEQ ID NO: 230613 - DNA, 15 bp, Homo sapiens
ggcacagagatatta

SEQ ID NO: 230614 - DNA, 15 bp, Homo sapiens
aggcacagagatatt

SEQ ID NO: 230615 - DNA, 15 bp, Homo sapiens
gaggcacagagatat

SEQ ID NO: 230616 - DNA, 15 bp, Homo sapiens
tgaggcacagagata

SEQ ID NO: 230617 - DNA, 15 bp, Homo sapiens
ctgaggcacagagat

SEQ ID NO: 230618 - DNA, 15 bp, Homo sapiens
actgaggcacagaga

SEQ ID NO: 230619 - DNA, 15 bp, Homo sapiens
aactgaggcacagag

SEQ ID NO: 230620 - DNA, 15 bp, Homo sapiens
aaactgaggcacaga

SEQ ID NO: 230621 - DNA, 15 bp, Homo sapiens
caaactgaggcacag

SEQ ID NO: 230622 - DNA, 15 bp, Homo sapiens
gcaaactgaggcaca

SEQ ID NO: 230623 - DNA, 15 bp, Homo sapiens
agcaaactgaggcac

SEQ ID NO: 230624 - DNA, 15 bp, Homo sapiens
gagcaaactgaggca

SEQ ID NO: 230625 - DNA, 15 bp, Homo sapiens
tgagcaaactgaggc

SEQ ID NO: 230626 - DNA, 15 bp, Homo sapiens
gtgagcaaactgagg

SEQ ID NO: 230627 - DNA, 15 bp, Homo sapiens
agtgagcaaactgag

SEQ ID NO: 230628 - DNA, 15 bp, Homo sapiens
tagtgagcaaactga

SEQ ID NO: 230629 - DNA, 15 bp, Homo sapiens
atagtgagcaaactg

SEQ ID NO: 230630 - DNA, 15 bp, Homo sapiens
tatagtgagcaaact

SEQ ID NO: 230631 - DNA, 15 bp, Homo sapiens
ttatagtgagcaaac

SEQ ID NO: 230632 - DNA, 15 bp, Homo sapiens
tttatagtgagcaaa

SEQ ID NO: 230633 - DNA, 15 bp, Homo sapiens
ttttatagtgagcaa

SEQ ID NO: 230634 - DNA, 15 bp, Homo sapiens
attttatagtgagca

SEQ ID NO: 230635 - DNA, 15 bp, Homo sapiens
tattttatagtgagc

SEQ ID NO: 230636 - DNA, 15 bp, Homo sapiens
ctattttatagtgag

SEQ ID NO: 230637 - DNA, 15 bp, Homo sapiens
tctattttatagtga

SEQ ID NO: 230638 - DNA, 15 bp, Homo sapiens
ctctattttatagtg

SEQ ID NO: 230639 - DNA, 15 bp, Homo sapiens
tctctattttatagt

SEQ ID NO: 230640 - DNA, 15 bp, Homo sapiens
gtctctattttatag

SEQ ID NO: 230641 - DNA, 15 bp, Homo sapiens
cgtctctattttata

SEQ ID NO: 230642 - DNA, 15 bp, Homo sapiens
ccgtctctattttat

SEQ ID NO: 230643 - DNA, 15 bp, Homo sapiens
accgtctctatttta

SEQ ID NO: 230644 - DNA, 15 bp, Homo sapiens
taccgtctctatttt

SEQ ID NO: 230645 - DNA, 15 bp, Homo sapiens
ctaccgtctctattt

SEQ ID NO: 230646 - DNA, 15 bp, Homo sapiens
cctaccgtctctatt

SEQ ID NO: 230647 - DNA, 15 bp, Homo sapiens
ccctaccgtctctat

SEQ ID NO: 230648 - DNA, 15 bp, Homo sapiens
cccctaccgtctcta

SEQ ID NO: 230649 - DNA, 15 bp, Homo sapiens
acccctaccgtctct

SEQ ID NO: 230650 - DNA, 15 bp, Homo sapiens
gacccctaccgtctc

SEQ ID NO: 230651 - DNA, 15 bp, Homo sapiens
tgacccctaccgtct

SEQ ID NO: 230652 - DNA, 15 bp, Homo sapiens
atgacccctaccgtc

SEQ ID NO: 230653 - DNA, 15 bp, Homo sapiens
catgacccctaccgt

SEQ ID NO: 230654 - DNA, 15 bp, Homo sapiens
ccatgacccctaccg

SEQ ID NO: 230655 - DNA, 15 bp, Homo sapiens
accatgacccctacc

SEQ ID NO: 230656 - DNA, 15 bp, Homo sapiens
caccatgacccctac

SEQ ID NO: 230657 - DNA, 15 bp, Homo sapiens
tcaccatgaccccta

SEQ ID NO: 230658 - DNA, 15 bp, Homo sapiens
ctcaccatgacccct

SEQ ID NO: 230659 - DNA, 15 bp, Homo sapiens
gctcaccatgacccc

SEQ ID NO: 230660 - DNA, 15 bp, Homo sapiens
tgctcaccatgaccc

SEQ ID NO: 230661 - DNA, 15 bp, Homo sapiens
gtgctcaccatgacc

SEQ ID NO: 230662 - DNA, 15 bp, Homo sapiens
agtgctcaccatgac

SEQ ID NO: 230663 - DNA, 15 bp, Homo sapiens
tagtgctcaccatga

SEQ ID NO: 230664 - DNA, 15 bp, Homo sapiens
gtagtgctcaccatg

SEQ ID NO: 230665 - DNA, 15 bp, Homo sapiens
ggtagtgctcaccat

SEQ ID NO: 230666 - DNA, 15 bp, Homo sapiens
aggtagtgctcacca

SEQ ID NO: 230667 - DNA, 15 bp, Homo sapiens
caggtagtgctcacc

SEQ ID NO: 230668 - DNA, 15 bp, Homo sapiens
tcaggtagtgctcac

SEQ ID NO: 230669 - DNA, 15 bp, Homo sapiens
gtcaggtagtgctca

SEQ ID NO: 230670 - DNA, 15 bp, Homo sapiens
agtcaggtagtgctc

SEQ ID NO: 230671 - DNA, 15 bp, Homo sapiens
tagtcaggtagtgct

SEQ ID NO: 230672 - DNA, 15 bp, Homo sapiens
ctagtcaggtagtgc

SEQ ID NO: 230673 - DNA, 15 bp, Homo sapiens
gctagtcaggtagtg

SEQ ID NO: 230674 - DNA, 15 bp, Homo sapiens
tgctagtcaggtagt

SEQ ID NO: 230675 - DNA, 15 bp, Homo sapiens
atgctagtcaggtag

SEQ ID NO: 230676 - DNA, 15 bp, Homo sapiens
tatgctagtcaggta

SEQ ID NO: 230677 - DNA, 15 bp, Homo sapiens
atatgctagtcaggt

SEQ ID NO: 230678 - DNA, 15 bp, Homo sapiens
tatatgctagtcagg

SEQ ID NO: 230679 - DNA, 15 bp, Homo sapiens
ttatatgctagtcag

SEQ ID NO: 230680 - DNA, 15 bp, Homo sapiens
cttatatgctagtca

SEQ ID NO: 230681 - DNA, 15 bp, Homo sapiens
tcttatatgctagtc

SEQ ID NO: 230682 - DNA, 15 bp, Homo sapiens
ttcttatatgctagt

SEQ ID NO: 230683 - DNA, 15 bp, Homo sapiens
cttcttatatgctag

SEQ ID NO: 230684 - DNA, 15 bp, Homo sapiens
gcttcttatatgcta

SEQ ID NO: 230685 - DNA, 15 bp, Homo sapiens
agcttcttatatgct

SEQ ID NO: 230686 - DNA, 15 bp, Homo sapiens
aagcttcttatatgc

SEQ ID NO: 230687 - DNA, 15 bp, Homo sapiens
aaagcttcttatatg

SEQ ID NO: 230688 - DNA, 15 bp, Homo sapiens
gaaagcttcttatat

SEQ ID NO: 230689 - DNA, 15 bp, Homo sapiens
tgaaagcttcttata

SEQ ID NO: 230690 - DNA, 15 bp, Homo sapiens
ctgaaagcttcttat

SEQ ID NO: 230691 - DNA, 15 bp, Homo sapiens
gctgaaagcttctta

SEQ ID NO: 230692 - DNA, 15 bp, Homo sapiens
tgctgaaagcttctt

SEQ ID NO: 230693 - DNA, 15 bp, Homo sapiens
ttgctgaaagcttct

SEQ ID NO: 230694 - DNA, 15 bp, Homo sapiens
cttgctgaaagcttc

SEQ ID NO: 230695 - DNA, 15 bp, Homo sapiens
acttgctgaaagctt

SEQ ID NO: 230696 - DNA, 15 bp, Homo sapiens
cacttgctgaaagct

SEQ ID NO: 230697 - DNA, 15 bp, Homo sapiens
gcacttgctgaaagc

SEQ ID NO: 230698 - DNA, 15 bp, Homo sapiens
tgcacttgctgaaag

SEQ ID NO: 230699 - DNA, 15 bp, Homo sapiens
ctgcacttgctgaaa

SEQ ID NO: 230700 - DNA, 15 bp, Homo sapiens
tctgcacttgctgaa

SEQ ID NO: 230701 - DNA, 15 bp, Homo sapiens
gtctgcacttgctga

SEQ ID NO: 230702 - DNA, 15 bp, Homo sapiens
agtctgcacttgctg

SEQ ID NO: 230703 - DNA, 15 bp, Homo sapiens
tagtctgcacttgct

SEQ ID NO: 230704 - DNA, 15 bp, Homo sapiens
gtagtctgcacttgc

SEQ ID NO: 230705 - DNA, 15 bp, Homo sapiens
agtagtctgcacttg

SEQ ID NO: 230706 - DNA, 15 bp, Homo sapiens
gagtagtctgcactt

SEQ ID NO: 230707 - DNA, 15 bp, Homo sapiens
agagtagtctgcact

SEQ ID NO: 230708 - DNA, 15 bp, Homo sapiens
aagagtagtctgcac

SEQ ID NO: 230709 - DNA, 15 bp, Homo sapiens
taagagtagtctgca

SEQ ID NO: 230710 - DNA, 15 bp, Homo sapiens
gtaagagtagtctgc

SEQ ID NO: 230711 - DNA, 15 bp, Homo sapiens
ggtaagagtagtctg

SEQ ID NO: 230712 - DNA, 15 bp, Homo sapiens
gggtaagagtagtct

SEQ ID NO: 230713 - DNA, 15 bp, Homo sapiens
tgggtaagagtagtc

SEQ ID NO: 230714 - DNA, 15 bp, Homo sapiens
gtgggtaagagtagt

SEQ ID NO: 230715 - DNA, 15 bp, Homo sapiens
agtgggtaagagtag

SEQ ID NO: 230716 - DNA, 15 bp, Homo sapiens
aagtgggtaagagta

SEQ ID NO: 230717 - DNA, 15 bp, Homo sapiens
gaagtgggtaagagt

SEQ ID NO: 230718 - DNA, 15 bp, Homo sapiens
ggaagtgggtaagag

SEQ ID NO: 230719 - DNA, 15 bp, Homo sapiens
gggaagtgggtaaga

SEQ ID NO: 230720 - DNA, 15 bp, Homo sapiens
ggggaagtgggtaag

SEQ ID NO: 230721 - DNA, 15 bp, Homo sapiens
gggggaagtgggtaa

SEQ ID NO: 230722 - DNA, 15 bp, Homo sapiens
tgggggaagtgggta

SEQ ID NO: 230723 - DNA, 15 bp, Homo sapiens
ttgggggaagtgggt

SEQ ID NO: 230724 - DNA, 15 bp, Homo sapiens
cttgggggaagtggg

SEQ ID NO: 230725 - DNA, 15 bp, Homo sapiens
gcttgggggaagtgg

SEQ ID NO: 230726 - DNA, 15 bp, Homo sapiens
tgcttgggggaagtg

SEQ ID NO: 230727 - DNA, 15 bp, Homo sapiens
gtgcttgggggaagt

SEQ ID NO: 230728 - DNA, 15 bp, Homo sapiens
tgtgcttgggggaag

SEQ ID NO: 230729 - DNA, 15 bp, Homo sapiens
ctgtgcttgggggaa

SEQ ID NO: 230730 - DNA, 15 bp, Homo sapiens
actgtgcttggggga

SEQ ID NO: 230731 - DNA, 15 bp, Homo sapiens
aactgtgcttggggg

SEQ ID NO: 230732 - DNA, 15 bp, Homo sapiens
caactgtgcttgggg

SEQ ID NO: 230733 - DNA, 15 bp, Homo sapiens
ccaactgtgcttggg

SEQ ID NO: 230734 - DNA, 15 bp, Homo sapiens
cccaactgtgcttgg

SEQ ID NO: 230735 - DNA, 15 bp, Homo sapiens
ccccaactgtgcttg

SEQ ID NO: 230736 - DNA, 15 bp, Homo sapiens
accccaactgtgctt

SEQ ID NO: 230737 - DNA, 15 bp, Homo sapiens
caccccaactgtgct

SEQ ID NO: 230738 - DNA, 15 bp, Homo sapiens
ccaccccaactgtgc

SEQ ID NO: 230739 - DNA, 15 bp, Homo sapiens
cccaccccaactgtg

SEQ ID NO: 230740 - DNA, 15 bp, Homo sapiens
ccccaccccaactgt

SEQ ID NO: 230741 - DNA, 15 bp, Homo sapiens
cccccaccccaactg

SEQ ID NO: 230742 - DNA, 15 bp, Homo sapiens
tcccccaccccaact

SEQ ID NO: 230743 - DNA, 15 bp, Homo sapiens
gtcccccaccccaac

SEQ ID NO: 230744 - DNA, 15 bp, Homo sapiens
tgtcccccaccccaa

SEQ ID NO: 230745 - DNA, 15 bp, Homo sapiens
ctgtcccccacccca

SEQ ID NO: 230746 - DNA, 15 bp, Homo sapiens
gctgtcccccacccc

SEQ ID NO: 230747 - DNA, 15 bp, Homo sapiens
agctgtcccccaccc

SEQ ID NO: 230748 - DNA, 15 bp, Homo sapiens
cagctgtcccccacc

SEQ ID NO: 230749 - DNA, 15 bp, Homo sapiens
tcagctgtcccccac

SEQ ID NO: 230750 - DNA, 15 bp, Homo sapiens
ttcagctgtccccca

SEQ ID NO: 230751 - DNA, 15 bp, Homo sapiens
cttcagctgtccccc

SEQ ID NO: 230752 - DNA, 15 bp, Homo sapiens
tcttcagctgtcccc

SEQ ID NO: 230753 - DNA, 15 bp, Homo sapiens
ctcttcagctgtccc

SEQ ID NO: 230754 - DNA, 15 bp, Homo sapiens
cctcttcagctgtcc

SEQ ID NO: 230755 - DNA, 15 bp, Homo sapiens
acctcttcagctgtc

SEQ ID NO: 230756 - DNA, 15 bp, Homo sapiens
cacctcttcagctgt

SEQ ID NO: 230757 - DNA, 15 bp, Homo sapiens
ccacctcttcagctg

SEQ ID NO: 230758 - DNA, 15 bp, Homo sapiens
tccacctcttcagct

SEQ ID NO: 230759 - DNA, 15 bp, Homo sapiens
ttccacctcttcagc

SEQ ID NO: 230760 - DNA, 15 bp, Homo sapiens
tttccacctcttcag

SEQ ID NO: 230761 - DNA, 15 bp, Homo sapiens
gtttccacctcttca

SEQ ID NO: 230762 - DNA, 15 bp, Homo sapiens
tgtttccacctcttc

SEQ ID NO: 230763 - DNA, 15 bp, Homo sapiens
atgtttccacctctt

SEQ ID NO: 230764 - DNA, 15 bp, Homo sapiens
catgtttccacctct

SEQ ID NO: 230765 - DNA, 15 bp, Homo sapiens
acatgtttccacctc

SEQ ID NO: 230766 - DNA, 15 bp, Homo sapiens
cacatgtttccacct

SEQ ID NO: 230767 - DNA, 15 bp, Homo sapiens
gcacatgtttccacc

SEQ ID NO: 230768 - DNA, 15 bp, Homo sapiens
ggcacatgtttccac

SEQ ID NO: 230769 - DNA, 15 bp, Homo sapiens
aggcacatgtttcca

SEQ ID NO: 230770 - DNA, 15 bp, Homo sapiens
caggcacatgtttcc

SEQ ID NO: 230771 - DNA, 15 bp, Homo sapiens
tcaggcacatgtttc

SEQ ID NO: 230772 - DNA, 15 bp, Homo sapiens
ctcaggcacatgttt

SEQ ID NO: 230773 - DNA, 15 bp, Homo sapiens
tctcaggcacatgtt

SEQ ID NO: 230774 - DNA, 15 bp, Homo sapiens
ttctcaggcacatgt

SEQ ID NO: 230775 - DNA, 15 bp, Homo sapiens
attctcaggcacatg

SEQ ID NO: 230776 - DNA, 15 bp, Homo sapiens
gattctcaggcacat

SEQ ID NO: 230777 - DNA, 15 bp, Homo sapiens
ggattctcaggcaca

SEQ ID NO: 230778 - DNA, 15 bp, Homo sapiens
aggattctcaggcac

SEQ ID NO: 230779 - DNA, 15 bp, Homo sapiens
taggattctcaggca

SEQ ID NO: 230780 - DNA, 15 bp, Homo sapiens
ttaggattctcaggc

SEQ ID NO: 230781 - DNA, 15 bp, Homo sapiens
attaggattctcagg

SEQ ID NO: 230782 - DNA, 15 bp, Homo sapiens
cattaggattctcag

SEQ ID NO: 230783 - DNA, 15 bp, Homo sapiens
tcattaggattctca

SEQ ID NO: 230784 - DNA, 15 bp, Homo sapiens
ttcattaggattctc

SEQ ID NO: 230785 - DNA, 15 bp, Homo sapiens
tttcattaggattct

SEQ ID NO: 230786 - DNA, 15 bp, Homo sapiens
atttcattaggattc

SEQ ID NO: 230787 - DNA, 15 bp, Homo sapiens
gatttcattaggatt

SEQ ID NO: 230788 - DNA, 15 bp, Homo sapiens
cgatttcattaggat

SEQ ID NO: 230789 - DNA, 15 bp, Homo sapiens
ccgatttcattagga

SEQ ID NO: 230790 - DNA, 15 bp, Homo sapiens
cccgatttcattagg

SEQ ID NO: 230791 - DNA, 15 bp, Homo sapiens
ccccgatttcattag

SEQ ID NO: 230792 - DNA, 15 bp, Homo sapiens
accccgatttcatta

SEQ ID NO: 230793 - DNA, 15 bp, Homo sapiens
taccccgatttcatt

SEQ ID NO: 230794 - DNA, 15 bp, Homo sapiens
ttaccccgatttcat

SEQ ID NO: 230795 - DNA, 15 bp, Homo sapiens
tttaccccgatttca

SEQ ID NO: 230796 - DNA, 15 bp, Homo sapiens
ctttaccccgatttc

SEQ ID NO: 230797 - DNA, 15 bp, Homo sapiens
cctttaccccgattt

SEQ ID NO: 230798 - DNA, 15 bp, Homo sapiens
tcctttaccccgatt

SEQ ID NO: 230799 - DNA, 15 bp, Homo sapiens
ctcctttaccccgat

SEQ ID NO: 230800 - DNA, 15 bp, Homo sapiens
gctcctttaccccga

SEQ ID NO: 230801 - DNA, 15 bp, Homo sapiens
ggctcctttaccccg

SEQ ID NO: 230802 - DNA, 15 bp, Homo sapiens
aggctcctttacccc

SEQ ID NO: 230803 - DNA, 15 bp, Homo sapiens
caggctcctttaccc

SEQ ID NO: 230804 - DNA, 15 bp, Homo sapiens
ccaggctcctttacc

SEQ ID NO: 230805 - DNA, 15 bp, Homo sapiens
tccaggctcctttac

SEQ ID NO: 230806 - DNA, 15 bp, Homo sapiens
ttccaggctccttta

SEQ ID NO: 230807 - DNA, 15 bp, Homo sapiens
gttccaggctccttt

SEQ ID NO: 230808 - DNA, 15 bp, Homo sapiens
tgttccaggctcctt

SEQ ID NO: 230809 - DNA, 15 bp, Homo sapiens
gtgttccaggctcct

SEQ ID NO: 230810 - DNA, 15 bp, Homo sapiens
tgtgttccaggctcc

SEQ ID NO: 230811 - DNA, 15 bp, Homo sapiens
atgtgttccaggctc

SEQ ID NO: 230812 - DNA, 15 bp, Homo sapiens
gatgtgttccaggct

SEQ ID NO: 230813 - DNA, 15 bp, Homo sapiens
ggatgtgttccaggc

SEQ ID NO: 230814 - DNA, 15 bp, Homo sapiens
aggatgtgttccagg

SEQ ID NO: 230815 - DNA, 15 bp, Homo sapiens
caggatgtgttccag

SEQ ID NO: 230816 - DNA, 15 bp, Homo sapiens
acaggatgtgttcca

SEQ ID NO: 230817 - DNA, 15 bp, Homo sapiens
cacaggatgtgttcc

SEQ ID NO: 230818 - DNA, 15 bp, Homo sapiens
tcacaggatgtgttc

SEQ ID NO: 230819 - DNA, 15 bp, Homo sapiens
gtcacaggatgtgtt

SEQ ID NO: 230820 - DNA, 15 bp, Homo sapiens
ggtcacaggatgtgt

SEQ ID NO: 230821 - DNA, 15 bp, Homo sapiens
gggtcacaggatgtg

SEQ ID NO: 230822 - DNA, 15 bp, Homo sapiens
ggggtcacaggatgt

SEQ ID NO: 230823 - DNA, 15 bp, Homo sapiens
cggggtcacaggatg

SEQ ID NO: 230824 - DNA, 15 bp, Homo sapiens
gcggggtcacaggat

SEQ ID NO: 230825 - DNA, 15 bp, Homo sapiens
ggcggggtcacagga

SEQ ID NO: 230826 - DNA, 15 bp, Homo sapiens
aggcggggtcacagg

SEQ ID NO: 230827 - DNA, 15 bp, Homo sapiens
caggcggggtcacag

SEQ ID NO: 230828 - DNA, 15 bp, Homo sapiens
acaggcggggtcaca

SEQ ID NO: 230829 - DNA, 15 bp, Homo sapiens
tacaggcggggtcac

SEQ ID NO: 230830 - DNA, 15 bp, Homo sapiens
gtacaggcggggtca

SEQ ID NO: 230831 - DNA, 15 bp, Homo sapiens
agtacaggcggggtc

SEQ ID NO: 230832 - DNA, 15 bp, Homo sapiens
cagtacaggcggggt

SEQ ID NO: 230833 - DNA, 15 bp, Homo sapiens
acagtacaggcgggg

SEQ ID NO: 230834 - DNA, 15 bp, Homo sapiens
tacagtacaggcggg

SEQ ID NO: 230835 - DNA, 15 bp, Homo sapiens
ctacagtacaggcgg

SEQ ID NO: 230836 - DNA, 15 bp, Homo sapiens
cctacagtacaggcg

SEQ ID NO: 230837 - DNA, 15 bp, Homo sapiens
tcctacagtacaggc

SEQ ID NO: 230838 - DNA, 15 bp, Homo sapiens
ttcctacagtacagg

SEQ ID NO: 230839 - DNA, 15 bp, Homo sapiens
cttcctacagtacag

SEQ ID NO: 230840 - DNA, 15 bp, Homo sapiens
gcttcctacagtaca

SEQ ID NO: 230841 - DNA, 15 bp, Homo sapiens
ggcttcctacagtac

SEQ ID NO: 230842 - DNA, 15 bp, Homo sapiens
tggcttcctacagta

SEQ ID NO: 230843 - DNA, 15 bp, Homo sapiens
ctggcttcctacagt

SEQ ID NO: 230844 - DNA, 15 bp, Homo sapiens
actggcttcctacag

SEQ ID NO: 230845 - DNA, 15 bp, Homo sapiens
gactggcttcctaca

SEQ ID NO: 230846 - DNA, 15 bp, Homo sapiens
agactggcttcctac

SEQ ID NO: 230847 - DNA, 15 bp, Homo sapiens
gagactggcttccta

SEQ ID NO: 230848 - DNA, 15 bp, Homo sapiens
agagactggcttcct

SEQ ID NO: 230849 - DNA, 15 bp, Homo sapiens
cagagactggcttcc

SEQ ID NO: 230850 - DNA, 15 bp, Homo sapiens
ccagagactggcttc

SEQ ID NO: 230851 - DNA, 15 bp, Homo sapiens
tccagagactggctt

SEQ ID NO: 230852 - DNA, 15 bp, Homo sapiens
ttccagagactggct

SEQ ID NO: 230853 - DNA, 15 bp, Homo sapiens
tttccagagactggc

SEQ ID NO: 230854 - DNA, 15 bp, Homo sapiens
ctttccagagactgg

SEQ ID NO: 230855 - DNA, 15 bp, Homo sapiens
actttccagagactg

SEQ ID NO: 230856 - DNA, 15 bp, Homo sapiens
tactttccagagact

SEQ ID NO: 230857 - DNA, 15 bp, Homo sapiens
ttactttccagagac

SEQ ID NO: 230858 - DNA, 15 bp, Homo sapiens
tttactttccagaga

SEQ ID NO: 230859 - DNA, 15 bp, Homo sapiens
ttttactttccagag

SEQ ID NO: 230860 - DNA, 15 bp, Homo sapiens
attttactttccaga

SEQ ID NO: 230861 - DNA, 15 bp, Homo sapiens
cattttactttccag

SEQ ID NO: 230862 - DNA, 15 bp, Homo sapiens
ccattttactttcca

SEQ ID NO: 230863 - DNA, 15 bp, Homo sapiens
tccattttactttcc

SEQ ID NO: 230864 - DNA, 15 bp, Homo sapiens
ttccattttactttc

SEQ ID NO: 230865 - DNA, 15 bp, Homo sapiens
cttccattttacttt

SEQ ID NO: 230866 - DNA, 15 bp, Homo sapiens
ccttccattttactt

SEQ ID NO: 230867 - DNA, 15 bp, Homo sapiens
cccttccattttact

SEQ ID NO: 230868 - DNA, 15 bp, Homo sapiens
gcccttccattttac

SEQ ID NO: 230869 - DNA, 15 bp, Homo sapiens
agcccttccatttta

SEQ ID NO: 230870 - DNA, 15 bp, Homo sapiens
cagcccttccatttt

SEQ ID NO: 230871 - DNA, 15 bp, Homo sapiens
gcagcccttccattt

SEQ ID NO: 230872 - DNA, 15 bp, Homo sapiens
agcagcccttccatt

SEQ ID NO: 230873 - DNA, 15 bp, Homo sapiens
aagcagcccttccat

SEQ ID NO: 230874 - DNA, 15 bp, Homo sapiens
caagcagcccttcca

SEQ ID NO: 230875 - DNA, 15 bp, Homo sapiens
ccaagcagcccttcc

SEQ ID NO: 230876 - DNA, 15 bp, Homo sapiens
cccaagcagcccttc

SEQ ID NO: 230877 - DNA, 15 bp, Homo sapiens
tcccaagcagccctt

SEQ ID NO: 230878 - DNA, 15 bp, Homo sapiens
ttcccaagcagccct

SEQ ID NO: 230879 - DNA, 15 bp, Homo sapiens
gttcccaagcagccc

SEQ ID NO: 230880 - DNA, 15 bp, Homo sapiens
agttcccaagcagcc

SEQ ID NO: 230881 - DNA, 15 bp, Homo sapiens
aagttcccaagcagc

SEQ ID NO: 230882 - DNA, 15 bp, Homo sapiens
aaagttcccaagcag

SEQ ID NO: 230883 - DNA, 15 bp, Homo sapiens
caaagttcccaagca

SEQ ID NO: 230884 - DNA, 15 bp, Homo sapiens
tcaaagttcccaagc

SEQ ID NO: 230885 - DNA, 15 bp, Homo sapiens
ctcaaagttcccaag

SEQ ID NO: 230886 - DNA, 15 bp, Homo sapiens
cctcaaagttcccaa

SEQ ID NO: 230887 - DNA, 15 bp, Homo sapiens
tcctcaaagttccca

SEQ ID NO: 230888 - DNA, 15 bp, Homo sapiens
atcctcaaagttccc

SEQ ID NO: 230889 - DNA, 15 bp, Homo sapiens
tatcctcaaagttcc

SEQ ID NO: 230890 - DNA, 15 bp, Homo sapiens
atatcctcaaagttc

SEQ ID NO: 230891 - DNA, 15 bp, Homo sapiens
aatatcctcaaagtt

SEQ ID NO: 230892 - DNA, 15 bp, Homo sapiens
aaatatcctcaaagt

SEQ ID NO: 230893 - DNA, 15 bp, Homo sapiens
taaatatcctcaaag

SEQ ID NO: 230894 - DNA, 15 bp, Homo sapiens
ctaaatatcctcaaa

SEQ ID NO: 230895 - DNA, 15 bp, Homo sapiens
gctaaatatcctcaa

SEQ ID NO: 230896 - DNA, 15 bp, Homo sapiens
ggctaaatatcctca

SEQ ID NO: 230897 - DNA, 15 bp, Homo sapiens
gggctaaatatcctc

SEQ ID NO: 230898 - DNA, 15 bp, Homo sapiens
tgggctaaatatcct

SEQ ID NO: 230899 - DNA, 15 bp, Homo sapiens
gtgggctaaatatcc

SEQ ID NO: 230900 - DNA, 15 bp, Homo sapiens
ggtgggctaaatatc

SEQ ID NO: 230901 - DNA, 15 bp, Homo sapiens
gggtgggctaaatat

SEQ ID NO: 230902 - DNA, 15 bp, Homo sapiens
ggggtgggctaaata

SEQ ID NO: 230903 - DNA, 15 bp, Homo sapiens
gggggtgggctaaat

SEQ ID NO: 230904 - DNA, 15 bp, Homo sapiens
agggggtgggctaaa

SEQ ID NO: 230905 - DNA, 15 bp, Homo sapiens
gagggggtgggctaa

SEQ ID NO: 230906 - DNA, 15 bp, Homo sapiens
tgagggggtgggcta

SEQ ID NO: 230907 - DNA, 15 bp, Homo sapiens
atgagggggtgggct

SEQ ID NO: 230908 - DNA, 15 bp, Homo sapiens
aatgagggggtgggc

SEQ ID NO: 230909 - DNA, 15 bp, Homo sapiens
aaatgagggggtggg

SEQ ID NO: 230910 - DNA, 15 bp, Homo sapiens
aaaatgagggggtgg

SEQ ID NO: 230911 - DNA, 15 bp, Homo sapiens
aaaaatgagggggtg

SEQ ID NO: 230912 - DNA, 15 bp, Homo sapiens
taaaaatgagggggt

SEQ ID NO: 230913 - DNA, 15 bp, Homo sapiens
gtaaaaatgaggggg

SEQ ID NO: 230914 - DNA, 15 bp, Homo sapiens
agtaaaaatgagggg

SEQ ID NO: 230915 - DNA, 15 bp, Homo sapiens
aagtaaaaatgaggg

SEQ ID NO: 230916 - DNA, 15 bp, Homo sapiens
caagtaaaaatgagg

SEQ ID NO: 230917 - DNA, 15 bp, Homo sapiens
ccaagtaaaaatgag

SEQ ID NO: 230918 - DNA, 15 bp, Homo sapiens
cccaagtaaaaatga

SEQ ID NO: 230919 - DNA, 15 bp, Homo sapiens
ccccaagtaaaaatg

SEQ ID NO: 230920 - DNA, 15 bp, Homo sapiens
tccccaagtaaaaat

SEQ ID NO: 230921 - DNA, 15 bp, Homo sapiens
ttccccaagtaaaaa

SEQ ID NO: 230922 - DNA, 15 bp, Homo sapiens
tttccccaagtaaaa

SEQ ID NO: 230923 - DNA, 15 bp, Homo sapiens
gtttccccaagtaaa

SEQ ID NO: 230924 - DNA, 15 bp, Homo sapiens
agtttccccaagtaa

SEQ ID NO: 230925 - DNA, 15 bp, Homo sapiens
tagtttccccaagta

SEQ ID NO: 230926 - DNA, 15 bp, Homo sapiens
ttagtttccccaagt

SEQ ID NO: 230927 - DNA, 15 bp, Homo sapiens
cttagtttccccaag

SEQ ID NO: 230928 - DNA, 15 bp, Homo sapiens
ccttagtttccccaa

SEQ ID NO: 230929 - DNA, 15 bp, Homo sapiens
gccttagtttcccca

SEQ ID NO: 230930 - DNA, 15 bp, Homo sapiens
ggccttagtttcccc

SEQ ID NO: 230931 - DNA, 15 bp, Homo sapiens
gggccttagtttccc

SEQ ID NO: 230932 - DNA, 15 bp, Homo sapiens
tgggccttagtttcc

SEQ ID NO: 230933 - DNA, 15 bp, Homo sapiens
ctgggccttagtttc

SEQ ID NO: 230934 - DNA, 15 bp, Homo sapiens
tctgggccttagttt

SEQ ID NO: 230935 - DNA, 15 bp, Homo sapiens
ctctgggccttagtt

SEQ ID NO: 230936 - DNA, 15 bp, Homo sapiens
tctctgggccttagt

SEQ ID NO: 230937 - DNA, 15 bp, Homo sapiens
gtctctgggccttag

SEQ ID NO: 230938 - DNA, 15 bp, Homo sapiens
ggtctctgggcctta

SEQ ID NO: 230939 - DNA, 15 bp, Homo sapiens
aggtctctgggcctt

SEQ ID NO: 230940 - DNA, 15 bp, Homo sapiens
taggtctctgggcct

SEQ ID NO: 230941 - DNA, 15 bp, Homo sapiens
ttaggtctctgggcc

SEQ ID NO: 230942 - DNA, 15 bp, Homo sapiens
cttaggtctctgggc

SEQ ID NO: 230943 - DNA, 15 bp, Homo sapiens
ccttaggtctctggg

SEQ ID NO: 230944 - DNA, 15 bp, Homo sapiens
accttaggtctctgg

SEQ ID NO: 230945 - DNA, 15 bp, Homo sapiens
caccttaggtctctg

SEQ ID NO: 230946 - DNA, 15 bp, Homo sapiens
tcaccttaggtctct

SEQ ID NO: 230947 - DNA, 15 bp, Homo sapiens
gtcaccttaggtctc

SEQ ID NO: 230948 - DNA, 15 bp, Homo sapiens
agtcaccttaggtct

SEQ ID NO: 230949 - DNA, 15 bp, Homo sapiens
cagtcaccttaggtc

SEQ ID NO: 230950 - DNA, 15 bp, Homo sapiens
gcagtcaccttaggt

SEQ ID NO: 230951 - DNA, 15 bp, Homo sapiens
ggcagtcaccttagg

SEQ ID NO: 230952 - DNA, 15 bp, Homo sapiens
aggcagtcaccttag

SEQ ID NO: 230953 - DNA, 15 bp, Homo sapiens
taggcagtcacctta

SEQ ID NO: 230954 - DNA, 15 bp, Homo sapiens
ttaggcagtcacctt

SEQ ID NO: 230955 - DNA, 15 bp, Homo sapiens
cttaggcagtcacct

SEQ ID NO: 230956 - DNA, 15 bp, Homo sapiens
acttaggcagtcacc

SEQ ID NO: 230957 - DNA, 15 bp, Homo sapiens
aacttaggcagtcac

SEQ ID NO: 230958 - DNA, 15 bp, Homo sapiens
taacttaggcagtca

SEQ ID NO: 230959 - DNA, 15 bp, Homo sapiens
ctaacttaggcagtc

SEQ ID NO: 230960 - DNA, 15 bp, Homo sapiens
gctaacttaggcagt

SEQ ID NO: 230961 - DNA, 15 bp, Homo sapiens
tgctaacttaggcag

SEQ ID NO: 230962 - DNA, 15 bp, Homo sapiens
ttgctaacttaggca

SEQ ID NO: 230963 - DNA, 15 bp, Homo sapiens
cttgctaacttaggc

SEQ ID NO: 230964 - DNA, 15 bp, Homo sapiens
ccttgctaacttagg

SEQ ID NO: 230965 - DNA, 15 bp, Homo sapiens
tccttgctaacttag

SEQ ID NO: 230966 - DNA, 15 bp, Homo sapiens
ctccttgctaactta

SEQ ID NO: 230967 - DNA, 15 bp, Homo sapiens
tctccttgctaactt

SEQ ID NO: 230968 - DNA, 15 bp, Homo sapiens
ttctccttgctaact

SEQ ID NO: 230969 - DNA, 15 bp, Homo sapiens
cttctccttgctaac

SEQ ID NO: 230970 - DNA, 15 bp, Homo sapiens
acttctccttgctaa

SEQ ID NO: 230971 - DNA, 15 bp, Homo sapiens
gacttctccttgcta

SEQ ID NO: 230972 - DNA, 15 bp, Homo sapiens
agacttctccttgct

SEQ ID NO: 230973 - DNA, 15 bp, Homo sapiens
aagacttctccttgc

SEQ ID NO: 230974 - DNA, 15 bp, Homo sapiens
caagacttctccttg

SEQ ID NO: 230975 - DNA, 15 bp, Homo sapiens
ccaagacttctcctt

SEQ ID NO: 230976 - DNA, 15 bp, Homo sapiens
cccaagacttctcct

SEQ ID NO: 230977 - DNA, 15 bp, Homo sapiens
acccaagacttctcc

SEQ ID NO: 230978 - DNA, 15 bp, Homo sapiens
tacccaagacttctc

SEQ ID NO: 230979 - DNA, 15 bp, Homo sapiens
atacccaagacttct

SEQ ID NO: 230980 - DNA, 15 bp, Homo sapiens
aatacccaagacttc

SEQ ID NO: 230981 - DNA, 15 bp, Homo sapiens
gaatacccaagactt

SEQ ID NO: 230982 - DNA, 15 bp, Homo sapiens
tgaatacccaagact

SEQ ID NO: 230983 - DNA, 15 bp, Homo sapiens
atgaatacccaagac

SEQ ID NO: 230984 - DNA, 15 bp, Homo sapiens
gatgaatacccaaga

SEQ ID NO: 230985 - DNA, 15 bp, Homo sapiens
ggatgaatacccaag

SEQ ID NO: 230986 - DNA, 15 bp, Homo sapiens
gggatgaatacccaa

SEQ ID NO: 230987 - DNA, 15 bp, Homo sapiens
tgggatgaataccca

SEQ ID NO: 230988 - DNA, 15 bp, Homo sapiens
ctgggatgaataccc

SEQ ID NO: 230989 - DNA, 15 bp, Homo sapiens
cctgggatgaatacc

SEQ ID NO: 230990 - DNA, 15 bp, Homo sapiens
acctgggatgaatac

SEQ ID NO: 230991 - DNA, 15 bp, Homo sapiens
aacctgggatgaata

SEQ ID NO: 230992 - DNA, 15 bp, Homo sapiens
caacctgggatgaat

SEQ ID NO: 230993 - DNA, 15 bp, Homo sapiens
ccaacctgggatgaa

SEQ ID NO: 230994 - DNA, 15 bp, Homo sapiens
cccaacctgggatga

SEQ ID NO: 230995 - DNA, 15 bp, Homo sapiens
ccccaacctgggatg

SEQ ID NO: 230996 - DNA, 15 bp, Homo sapiens
cccccaacctgggat

SEQ ID NO: 230997 - DNA, 15 bp, Homo sapiens
ccccccaacctggga

SEQ ID NO: 230998 - DNA, 15 bp, Homo sapiens
tccccccaacctggg

SEQ ID NO: 230999 - DNA, 15 bp, Homo sapiens
gtccccccaacctgg

SEQ ID NO: 231000 - DNA, 15 bp, Homo sapiens
ggtccccccaacctg

SEQ ID NO: 231001 - DNA, 15 bp, Homo sapiens
gggtccccccaacct

SEQ ID NO: 231002 - DNA, 15 bp, Homo sapiens
tgggtccccccaacc

SEQ ID NO: 231003 - DNA, 15 bp, Homo sapiens
ttgggtccccccaac

SEQ ID NO: 231004 - DNA, 15 bp, Homo sapiens
attgggtccccccaa

SEQ ID NO: 231005 - DNA, 15 bp, Homo sapiens
aattgggtcccccca

SEQ ID NO: 231006 - DNA, 15 bp, Homo sapiens
taattgggtcccccc

SEQ ID NO: 231007 - DNA, 15 bp, Homo sapiens
ataattgggtccccc

SEQ ID NO: 231008 - DNA, 15 bp, Homo sapiens
aataattgggtcccc

SEQ ID NO: 231009 - DNA, 15 bp, Homo sapiens
aaataattgggtccc

SEQ ID NO: 231010 - DNA, 15 bp, Homo sapiens
gaaataattgggtcc

SEQ ID NO: 231011 - DNA, 15 bp, Homo sapiens
agaaataattgggtc

SEQ ID NO: 231012 - DNA, 15 bp, Homo sapiens
gagaaataattgggt

SEQ ID NO: 231013 - DNA, 15 bp, Homo sapiens
tgagaaataattggg

SEQ ID NO: 231014 - DNA, 15 bp, Homo sapiens
ttgagaaataattgg

SEQ ID NO: 231015 - DNA, 15 bp, Homo sapiens
attgagaaataattg

SEQ ID NO: 231016 - DNA, 15 bp, Homo sapiens
gattgagaaataatt

SEQ ID NO: 231017 - DNA, 15 bp, Homo sapiens
ggattgagaaataat

SEQ ID NO: 231018 - DNA, 15 bp, Homo sapiens
gggattgagaaataa

SEQ ID NO: 231019 - DNA, 15 bp, Homo sapiens
tgggattgagaaata

SEQ ID NO: 231020 - DNA, 15 bp, Homo sapiens
atgggattgagaaat

SEQ ID NO: 231021 - DNA, 15 bp, Homo sapiens
aatgggattgagaaa

SEQ ID NO: 231022 - DNA, 15 bp, Homo sapiens
caatgggattgagaa

SEQ ID NO: 231023 - DNA, 15 bp, Homo sapiens
acaatgggattgaga

SEQ ID NO: 231024 - DNA, 15 bp, Homo sapiens
tacaatgggattgag

SEQ ID NO: 231025 - DNA, 15 bp, Homo sapiens
atacaatgggattga

SEQ ID NO: 231026 - DNA, 15 bp, Homo sapiens
aatacaatgggattg

SEQ ID NO: 231027 - DNA, 15 bp, Homo sapiens
gaatacaatgggatt

SEQ ID NO: 231028 - DNA, 15 bp, Homo sapiens
agaatacaatgggat

SEQ ID NO: 231029 - DNA, 15 bp, Homo sapiens
cagaatacaatggga

SEQ ID NO: 231030 - DNA, 15 bp, Homo sapiens
ccagaatacaatggg

SEQ ID NO: 231031 - DNA, 15 bp, Homo sapiens
tccagaatacaatgg

SEQ ID NO: 231032 - DNA, 15 bp, Homo sapiens
ttccagaatacaatg

SEQ ID NO: 231033 - DNA, 15 bp, Homo sapiens
attccagaatacaat

SEQ ID NO: 231034 - DNA, 15 bp, Homo sapiens
cattccagaatacaa

SEQ ID NO: 231035 - DNA, 15 bp, Homo sapiens
ccattccagaataca

SEQ ID NO: 231036 - DNA, 15 bp, Homo sapiens
cccattccagaatac

SEQ ID NO: 231037 - DNA, 15 bp, Homo sapiens
gcccattccagaata

SEQ ID NO: 231038 - DNA, 15 bp, Homo sapiens
tgcccattccagaat

SEQ ID NO: 231039 - DNA, 15 bp, Homo sapiens
ttgcccattccagaa

SEQ ID NO: 231040 - DNA, 15 bp, Homo sapiens
attgcccattccaga

SEQ ID NO: 231041 - DNA, 15 bp, Homo sapiens
aattgcccattccag

SEQ ID NO: 231042 - DNA, 15 bp, Homo sapiens
aaattgcccattcca

SEQ ID NO: 231043 - DNA, 15 bp, Homo sapiens
caaattgcccattcc

SEQ ID NO: 231044 - DNA, 15 bp, Homo sapiens
acaaattgcccattc

SEQ ID NO: 231045 - DNA, 15 bp, Homo sapiens
gacaaattgcccatt

SEQ ID NO: 231046 - DNA, 15 bp, Homo sapiens
ggacaaattgcccat

SEQ ID NO: 231047 - DNA, 15 bp, Homo sapiens
tggacaaattgccca

SEQ ID NO: 231048 - DNA, 15 bp, Homo sapiens
gtggacaaattgccc

SEQ ID NO: 231049 - DNA, 15 bp, Homo sapiens
cgtggacaaattgcc

SEQ ID NO: 231050 - DNA, 15 bp, Homo sapiens
acgtggacaaattgc

SEQ ID NO: 231051 - DNA, 15 bp, Homo sapiens
gacgtggacaaattg

SEQ ID NO: 231052 - DNA, 15 bp, Homo sapiens
tgacgtggacaaatt

SEQ ID NO: 231053 - DNA, 15 bp, Homo sapiens
gtgacgtggacaaat

SEQ ID NO: 231054 - DNA, 15 bp, Homo sapiens
agtgacgtggacaaa

SEQ ID NO: 231055 - DNA, 15 bp, Homo sapiens
cagtgacgtggacaa

SEQ ID NO: 231056 - DNA, 15 bp, Homo sapiens
acagtgacgtggaca

SEQ ID NO: 231057 - DNA, 15 bp, Homo sapiens
cacagtgacgtggac

SEQ ID NO: 231058 - DNA, 15 bp, Homo sapiens
tcacagtgacgtgga

SEQ ID NO: 231059 - DNA, 15 bp, Homo sapiens
gtcacagtgacgtgg

SEQ ID NO: 231060 - DNA, 15 bp, Homo sapiens
ggtcacagtgacgtg

SEQ ID NO: 231061 - DNA, 15 bp, Homo sapiens
aggtcacagtgacgt

SEQ ID NO: 231062 - DNA, 15 bp, Homo sapiens
taggtcacagtgacg

SEQ ID NO: 231063 - DNA, 15 bp, Homo sapiens
ctaggtcacagtgac

SEQ ID NO: 231064 - DNA, 15 bp, Homo sapiens
cctaggtcacagtga

SEQ ID NO: 231065 - DNA, 15 bp, Homo sapiens
tcctaggtcacagtg

SEQ ID NO: 231066 - DNA, 15 bp, Homo sapiens
ttcctaggtcacagt

SEQ ID NO: 231067 - DNA, 15 bp, Homo sapiens
gttcctaggtcacag

SEQ ID NO: 231068 - DNA, 15 bp, Homo sapiens
tgttcctaggtcaca

SEQ ID NO: 231069 - DNA, 15 bp, Homo sapiens
gtgttcctaggtcac

SEQ ID NO: 231070 - DNA, 15 bp, Homo sapiens
cgtgttcctaggtca

SEQ ID NO: 231071 - DNA, 15 bp, Homo sapiens
gcgtgttcctaggtc

SEQ ID NO: 231072 - DNA, 15 bp, Homo sapiens
cgcgtgttcctaggt

SEQ ID NO: 231073 - DNA, 15 bp, Homo sapiens
tcgcgtgttcctagg

SEQ ID NO: 231074 - DNA, 15 bp, Homo sapiens
ttcgcgtgttcctag

SEQ ID NO: 231075 - DNA, 15 bp, Homo sapiens
attcgcgtgttccta

SEQ ID NO: 231076 - DNA, 15 bp, Homo sapiens
cattcgcgtgttcct

SEQ ID NO: 231077 - DNA, 15 bp, Homo sapiens
tcattcgcgtgttcc

SEQ ID NO: 231078 - DNA, 15 bp, Homo sapiens
ctcattcgcgtgttc

SEQ ID NO: 231079 - DNA, 15 bp, Homo sapiens
tctcattcgcgtgtt

SEQ ID NO: 231080 - DNA, 15 bp, Homo sapiens
ttctcattcgcgtgt

SEQ ID NO: 231081 - DNA, 15 bp, Homo sapiens
gttctcattcgcgtg

SEQ ID NO: 231082 - DNA, 15 bp, Homo sapiens
ggttctcattcgcgt

SEQ ID NO: 231083 - DNA, 15 bp, Homo sapiens
gggttctcattcgcg

SEQ ID NO: 231084 - DNA, 15 bp, Homo sapiens
tgggttctcattcgc

SEQ ID NO: 231085 - DNA, 15 bp, Homo sapiens
gtgggttctcattcg

SEQ ID NO: 231086 - DNA, 15 bp, Homo sapiens
tgtgggttctcattc

SEQ ID NO: 231087 - DNA, 15 bp, Homo sapiens
ctgtgggttctcatt

SEQ ID NO: 231088 - DNA, 15 bp, Homo sapiens
gctgtgggttctcat

SEQ ID NO: 231089 - DNA, 15 bp, Homo sapiens
agctgtgggttctca

SEQ ID NO: 231090 - DNA, 15 bp, Homo sapiens
cagctgtgggttctc

SEQ ID NO: 231091 - DNA, 15 bp, Homo sapiens
tcagctgtgggttct

SEQ ID NO: 231092 - DNA, 15 bp, Homo sapiens
ctcagctgtgggttc

SEQ ID NO: 231093 - DNA, 15 bp, Homo sapiens
cctcagctgtgggtt

SEQ ID NO: 231094 - DNA, 15 bp, Homo sapiens
ccctcagctgtgggt

SEQ ID NO: 231095 - DNA, 15 bp, Homo sapiens
gccctcagctgtggg

SEQ ID NO: 231096 - DNA, 15 bp, Homo sapiens
ggccctcagctgtgg

SEQ ID NO: 231097 - DNA, 15 bp, Homo sapiens
aggccctcagctgtg

SEQ ID NO: 231098 - DNA, 15 bp, Homo sapiens
gaggccctcagctgt

SEQ ID NO: 231099 - DNA, 15 bp, Homo sapiens
agaggccctcagctg

SEQ ID NO: 231100 - DNA, 15 bp, Homo sapiens
cagaggccctcagct

SEQ ID NO: 231101 - DNA, 15 bp, Homo sapiens
gcagaggccctcagc

SEQ ID NO: 231102 - DNA, 15 bp, Homo sapiens
cgcagaggccctcag

SEQ ID NO: 231103 - DNA, 15 bp, Homo sapiens
gcgcagaggccctca

SEQ ID NO: 231104 - DNA, 15 bp, Homo sapiens
tgcgcagaggccctc

SEQ ID NO: 231105 - DNA, 15 bp, Homo sapiens
gtgcgcagaggccct

SEQ ID NO: 231106 - DNA, 15 bp, Homo sapiens
tgtgcgcagaggccc

SEQ ID NO: 231107 - DNA, 15 bp, Homo sapiens
ctgtgcgcagaggcc

SEQ ID NO: 231108 - DNA, 15 bp, Homo sapiens
tctgtgcgcagaggc

SEQ ID NO: 231109 - DNA, 15 bp, Homo sapiens
ttctgtgcgcagagg

SEQ ID NO: 231110 - DNA, 15 bp, Homo sapiens
gttctgtgcgcagag

SEQ ID NO: 231111 - DNA, 15 bp, Homo sapiens
tgttctgtgcgcaga

SEQ ID NO: 231112 - DNA, 15 bp, Homo sapiens
ctgttctgtgcgcag

SEQ ID NO: 231113 - DNA, 15 bp, Homo sapiens
gctgttctgtgcgca

SEQ ID NO: 231114 - DNA, 15 bp, Homo sapiens
agctgttctgtgcgc

SEQ ID NO: 231115 - DNA, 15 bp, Homo sapiens
cagctgttctgtgcg

SEQ ID NO: 231116 - DNA, 15 bp, Homo sapiens
acagctgttctgtgc

SEQ ID NO: 231117 - DNA, 15 bp, Homo sapiens
aacagctgttctgtg

SEQ ID NO: 231118 - DNA, 15 bp, Homo sapiens
gaacagctgttctgt

SEQ ID NO: 231119 - DNA, 15 bp, Homo sapiens
agaacagctgttctg

SEQ ID NO: 231120 - DNA, 15 bp, Homo sapiens
gagaacagctgttct

SEQ ID NO: 231121 - DNA, 15 bp, Homo sapiens
ggagaacagctgttc

SEQ ID NO: 231122 - DNA, 15 bp, Homo sapiens
gggagaacagctgtt

SEQ ID NO: 231123 - DNA, 15 bp, Homo sapiens
ggggagaacagctgt

SEQ ID NO: 231124 - DNA, 15 bp, Homo sapiens
tggggagaacagctg

SEQ ID NO: 231125 - DNA, 15 bp, Homo sapiens
ctggggagaacagct

SEQ ID NO: 231126 - DNA, 15 bp, Homo sapiens
cctggggagaacagc

SEQ ID NO: 231127 - DNA, 15 bp, Homo sapiens
tcctggggagaacag

SEQ ID NO: 231128 - DNA, 15 bp, Homo sapiens
ttcctggggagaaca

SEQ ID NO: 231129 - DNA, 15 bp, Homo sapiens
tttcctggggagaac

SEQ ID NO: 231130 - DNA, 15 bp, Homo sapiens
atttcctggggagaa

SEQ ID NO: 231131 - DNA, 15 bp, Homo sapiens
gatttcctggggaga

SEQ ID NO: 231132 - DNA, 15 bp, Homo sapiens
tgatttcctggggag

SEQ ID NO: 231133 - DNA, 15 bp, Homo sapiens
ttgatttcctgggga

SEQ ID NO: 231134 - DNA, 15 bp, Homo sapiens
gttgatttcctgggg

SEQ ID NO: 231135 - DNA, 15 bp, Homo sapiens
agttgatttcctggg

SEQ ID NO: 231136 - DNA, 15 bp, Homo sapiens
aagttgatttcctgg

SEQ ID NO: 231137 - DNA, 15 bp, Homo sapiens
aaagttgatttcctg

SEQ ID NO: 231138 - DNA, 15 bp, Homo sapiens
aaaagttgatttcct

SEQ ID NO: 231139 - DNA, 15 bp, Homo sapiens
aaaaagttgatttcc

SEQ ID NO: 231140 - DNA, 15 bp, Homo sapiens
aaaaaagttgatttc

SEQ ID NO: 231141 - DNA, 15 bp, Homo sapiens
aaaaaaagttgattt

SEQ ID NO: 231142 - DNA, 15 bp, Homo sapiens
taaaaaaagttgatt

SEQ ID NO: 231143 - DNA, 15 bp, Homo sapiens
ttaaaaaaagttgat

SEQ ID NO: 231144 - DNA, 15 bp, Homo sapiens
attaaaaaaagttga

SEQ ID NO: 231145 - DNA, 15 bp, Homo sapiens
aattaaaaaaagttg

SEQ ID NO: 231146 - DNA, 15 bp, Homo sapiens
caattaaaaaaagtt

SEQ ID NO: 231147 - DNA, 15 bp, Homo sapiens
tcaattaaaaaaagt

SEQ ID NO: 231148 - DNA, 15 bp, Homo sapiens
ctcaattaaaaaaag

SEQ ID NO: 231149 - DNA, 15 bp, Homo sapiens
tctcaattaaaaaaa

SEQ ID NO: 231150 - DNA, 15 bp, Homo sapiens
ttctcaattaaaaaa

SEQ ID NO: 231151 - DNA, 15 bp, Homo sapiens
cttctcaattaaaaa

SEQ ID NO: 231152 - DNA, 15 bp, Homo sapiens
gcttctcaattaaaa

SEQ ID NO: 231153 - DNA, 15 bp, Homo sapiens
agcttctcaattaaa

SEQ ID NO: 231154 - DNA, 15 bp, Homo sapiens
tagcttctcaattaa

SEQ ID NO: 231155 - DNA, 15 bp, Homo sapiens
ttagcttctcaatta

SEQ ID NO: 231156 - DNA, 15 bp, Homo sapiens
tttagcttctcaatt

SEQ ID NO: 231157 - DNA, 15 bp, Homo sapiens
ttttagcttctcaat

SEQ ID NO: 231158 - DNA, 15 bp, Homo sapiens
tttttagcttctcaa

SEQ ID NO: 231159 - DNA, 15 bp, Homo sapiens
ttttttagcttctca

SEQ ID NO: 231160 - DNA, 15 bp, Homo sapiens
attttttagcttctc

SEQ ID NO: 231161 - DNA, 15 bp, Homo sapiens
aattttttagcttct

SEQ ID NO: 231162 - DNA, 15 bp, Homo sapiens
taattttttagcttc

SEQ ID NO: 231163 - DNA, 15 bp, Homo sapiens
ataattttttagctt

SEQ ID NO: 231164 - DNA, 15 bp, Homo sapiens
aataattttttagct

SEQ ID NO: 231165 - DNA, 15 bp, Homo sapiens
gaataattttttagc

SEQ ID NO: 231166 - DNA, 15 bp, Homo sapiens
agaataattttttag

SEQ ID NO: 231167 - DNA, 15 bp, Homo sapiens
tagaataatttttta

SEQ ID NO: 231168 - DNA, 15 bp, Homo sapiens
ttagaataatttttt

SEQ ID NO: 231169 - DNA, 15 bp, Homo sapiens
cttagaataattttt

SEQ ID NO: 231170 - DNA, 15 bp, Homo sapiens
tcttagaataatttt

SEQ ID NO: 231171 - DNA, 15 bp, Homo sapiens
ctcttagaataattt

SEQ ID NO: 231172 - DNA, 15 bp, Homo sapiens
tctcttagaataatt

SEQ ID NO: 231173 - DNA, 15 bp, Homo sapiens
ctctcttagaataat

SEQ ID NO: 231174 - DNA, 15 bp, Homo sapiens
cctctcttagaataa

SEQ ID NO: 231175 - DNA, 15 bp, Homo sapiens
acctctcttagaata

SEQ ID NO: 231176 - DNA, 15 bp, Homo sapiens
tacctctcttagaat

SEQ ID NO: 231177 - DNA, 15 bp, Homo sapiens
ctacctctcttagaa

SEQ ID NO: 231178 - DNA, 15 bp, Homo sapiens
gctacctctcttaga

SEQ ID NO: 231179 - DNA, 15 bp, Homo sapiens
ggctacctctcttag

SEQ ID NO: 231180 - DNA, 15 bp, Homo sapiens
gggctacctctctta

SEQ ID NO: 231181 - DNA, 15 bp, Homo sapiens
tgggctacctctctt

SEQ ID NO: 231182 - DNA, 15 bp, Homo sapiens
atgggctacctctct

SEQ ID NO: 231183 - DNA, 15 bp, Homo sapiens
gatgggctacctctc

SEQ ID NO: 231184 - DNA, 15 bp, Homo sapiens
ggatgggctacctct

SEQ ID NO: 231185 - DNA, 15 bp, Homo sapiens
aggatgggctacctc

SEQ ID NO: 231186 - DNA, 15 bp, Homo sapiens
taggatgggctacct

SEQ ID NO: 231187 - DNA, 15 bp, Homo sapiens
ttaggatgggctacc

SEQ ID NO: 231188 - DNA, 15 bp, Homo sapiens
tttaggatgggctac

SEQ ID NO: 231189 - DNA, 15 bp, Homo sapiens
ttttaggatgggcta

SEQ ID NO: 231190 - DNA, 15 bp, Homo sapiens
tttttaggatgggct

SEQ ID NO: 231191 - DNA, 15 bp, Homo sapiens
atttttaggatgggc

SEQ ID NO: 231192 - DNA, 15 bp, Homo sapiens
tatttttaggatggg

SEQ ID NO: 231193 - DNA, 15 bp, Homo sapiens
ctatttttaggatgg

SEQ ID NO: 231194 - DNA, 15 bp, Homo sapiens
gctatttttaggatg

SEQ ID NO: 231195 - DNA, 15 bp, Homo sapiens
agctatttttaggat

SEQ ID NO: 231196 - DNA, 15 bp, Homo sapiens
cagctatttttagga

SEQ ID NO: 231197 - DNA, 15 bp, Homo sapiens
acagctatttttagg

SEQ ID NO: 231198 - DNA, 15 bp, Homo sapiens
tacagctatttttag

SEQ ID NO: 231199 - DNA, 15 bp, Homo sapiens
ttacagctattttta

SEQ ID NO: 231200 - DNA, 15 bp, Homo sapiens
attacagctattttt

SEQ ID NO: 231201 - DNA, 15 bp, Homo sapiens
cattacagctatttt

SEQ ID NO: 231202 - DNA, 15 bp, Homo sapiens
gcattacagctattt

SEQ ID NO: 231203 - DNA, 15 bp, Homo sapiens
tgcattacagctatt

SEQ ID NO: 231204 - DNA, 15 bp, Homo sapiens
ctgcattacagctat

SEQ ID NO: 231205 - DNA, 15 bp, Homo sapiens
tctgcattacagcta

SEQ ID NO: 231206 - DNA, 15 bp, Homo sapiens
ttctgcattacagct

SEQ ID NO: 231207 - DNA, 15 bp, Homo sapiens
cttctgcattacagc

SEQ ID NO: 231208 - DNA, 15 bp, Homo sapiens
acttctgcattacag

SEQ ID NO: 231209 - DNA, 15 bp, Homo sapiens
aacttctgcattaca

SEQ ID NO: 231210 - DNA, 15 bp, Homo sapiens
gaacttctgcattac

SEQ ID NO: 231211 - DNA, 15 bp, Homo sapiens
tgaacttctgcatta

SEQ ID NO: 231212 - DNA, 15 bp, Homo sapiens
atgaacttctgcatt

SEQ ID NO: 231213 - DNA, 15 bp, Homo sapiens
catgaacttctgcat

SEQ ID NO: 231214 - DNA, 15 bp, Homo sapiens
acatgaacttctgca

SEQ ID NO: 231215 - DNA, 15 bp, Homo sapiens
aacatgaacttctgc

SEQ ID NO: 231216 - DNA, 15 bp, Homo sapiens
gaacatgaacttctg

SEQ ID NO: 231217 - DNA, 15 bp, Homo sapiens
tgaacatgaacttct

SEQ ID NO: 231218 - DNA, 15 bp, Homo sapiens
ttgaacatgaacttc

SEQ ID NO: 231219 - DNA, 15 bp, Homo sapiens
gttgaacatgaactt

SEQ ID NO: 231220 - DNA, 15 bp, Homo sapiens
ggttgaacatgaact

SEQ ID NO: 231221 - DNA, 15 bp, Homo sapiens
tggttgaacatgaac

SEQ ID NO: 231222 - DNA, 15 bp, Homo sapiens
ttggttgaacatgaa

SEQ ID NO: 231223 - DNA, 15 bp, Homo sapiens
attggttgaacatga

SEQ ID NO: 231224 - DNA, 15 bp, Homo sapiens
gattggttgaacatg

SEQ ID NO: 231225 - DNA, 15 bp, Homo sapiens
tgattggttgaacat

SEQ ID NO: 231226 - DNA, 15 bp, Homo sapiens
atgattggttgaaca

SEQ ID NO: 231227 - DNA, 15 bp, Homo sapiens
aatgattggttgaac

SEQ ID NO: 231228 - DNA, 15 bp, Homo sapiens
aaatgattggttgaa

SEQ ID NO: 231229 - DNA, 15 bp, Homo sapiens
aaaatgattggttga

SEQ ID NO: 231230 - DNA, 15 bp, Homo sapiens
aaaaatgattggttg

SEQ ID NO: 231231 - DNA, 15 bp, Homo sapiens
caaaaatgattggtt

SEQ ID NO: 231232 - DNA, 15 bp, Homo sapiens
gcaaaaatgattggt

SEQ ID NO: 231233 - DNA, 15 bp, Homo sapiens
agcaaaaatgattgg

SEQ ID NO: 231234 - DNA, 15 bp, Homo sapiens
aagcaaaaatgattg

SEQ ID NO: 231235 - DNA, 15 bp, Homo sapiens
taagcaaaaatgatt

SEQ ID NO: 231236 - DNA, 15 bp, Homo sapiens
gtaagcaaaaatgat

SEQ ID NO: 231237 - DNA, 15 bp, Homo sapiens
cgtaagcaaaaatga

SEQ ID NO: 231238 - DNA, 15 bp, Homo sapiens
tcgtaagcaaaaatg

SEQ ID NO: 231239 - DNA, 15 bp, Homo sapiens
atcgtaagcaaaaat

SEQ ID NO: 231240 - DNA, 15 bp, Homo sapiens
catcgtaagcaaaaa

SEQ ID NO: 231241 - DNA, 15 bp, Homo sapiens
gcatcgtaagcaaaa

SEQ ID NO: 231242 - DNA, 15 bp, Homo sapiens
tgcatcgtaagcaaa

SEQ ID NO: 231243 - DNA, 15 bp, Homo sapiens
ttgcatcgtaagcaa

SEQ ID NO: 231244 - DNA, 15 bp, Homo sapiens
tttgcatcgtaagca

SEQ ID NO: 231245 - DNA, 15 bp, Homo sapiens
ttttgcatcgtaagc

SEQ ID NO: 231246 - DNA, 15 bp, Homo sapiens
tttttgcatcgtaag

SEQ ID NO: 231247 - DNA, 15 bp, Homo sapiens
atttttgcatcgtaa

SEQ ID NO: 231248 - DNA, 15 bp, Homo sapiens
aatttttgcatcgta

SEQ ID NO: 231249 - DNA, 15 bp, Homo sapiens
caatttttgcatcgt

SEQ ID NO: 231250 - DNA, 15 bp, Homo sapiens
tcaatttttgcatcg

SEQ ID NO: 231251 - DNA, 15 bp, Homo sapiens
ttcaatttttgcatc

SEQ ID NO: 231252 - DNA, 15 bp, Homo sapiens
tttcaatttttgcat

SEQ ID NO: 231253 - DNA, 15 bp, Homo sapiens
ttttcaatttttgca

SEQ ID NO: 231254 - DNA, 15 bp, Homo sapiens
gttttcaatttttgc

SEQ ID NO: 231255 - DNA, 15 bp, Homo sapiens
agttttcaatttttg

SEQ ID NO: 231256 - DNA, 15 bp, Homo sapiens
tagttttcaattttt

SEQ ID NO: 231257 - DNA, 15 bp, Homo sapiens
ttagttttcaatttt

SEQ ID NO: 231258 - DNA, 15 bp, Homo sapiens
cttagttttcaattt

SEQ ID NO: 231259 - DNA, 15 bp, Homo sapiens
acttagttttcaatt

SEQ ID NO: 231260 - DNA, 15 bp, Homo sapiens
aacttagttttcaat

SEQ ID NO: 231261 - DNA, 15 bp, Homo sapiens
aaacttagttttcaa

SEQ ID NO: 231262 - DNA, 15 bp, Homo sapiens
taaacttagttttca

SEQ ID NO: 231263 - DNA, 15 bp, Homo sapiens
ataaacttagttttc

SEQ ID NO: 231264 - DNA, 15 bp, Homo sapiens
aataaacttagtttt

SEQ ID NO: 231265 - DNA, 15 bp, Homo sapiens
taataaacttagttt

SEQ ID NO: 231266 - DNA, 15 bp, Homo sapiens
ctaataaacttagtt

SEQ ID NO: 231267 - DNA, 15 bp, Homo sapiens
tctaataaacttagt

SEQ ID NO: 231268 - DNA, 15 bp, Homo sapiens
ctctaataaacttag

SEQ ID NO: 231269 - DNA, 15 bp, Homo sapiens
tctctaataaactta

SEQ ID NO: 231270 - DNA, 15 bp, Homo sapiens
ctctctaataaactt

SEQ ID NO: 231271 - DNA, 15 bp, Homo sapiens
cctctctaataaact

SEQ ID NO: 231272 - DNA, 15 bp, Homo sapiens
acctctctaataaac

SEQ ID NO: 231273 - DNA, 15 bp, Homo sapiens
aacctctctaataaa

SEQ ID NO: 231274 - DNA, 15 bp, Homo sapiens
taacctctctaataa

SEQ ID NO: 231275 - DNA, 15 bp, Homo sapiens
ctaacctctctaata

SEQ ID NO: 231276 - DNA, 15 bp, Homo sapiens
tctaacctctctaat

SEQ ID NO: 231277 - DNA, 15 bp, Homo sapiens
ctctaacctctctaa

SEQ ID NO: 231278 - DNA, 15 bp, Homo sapiens
tctctaacctctcta

SEQ ID NO: 231279 - DNA, 15 bp, Homo sapiens
ttctctaacctctct

SEQ ID NO: 231280 - DNA, 15 bp, Homo sapiens
cttctctaacctctc

SEQ ID NO: 231281 - DNA, 15 bp, Homo sapiens
ccttctctaacctct

SEQ ID NO: 231282 - DNA, 15 bp, Homo sapiens
tccttctctaacctc

SEQ ID NO: 231283 - DNA, 15 bp, Homo sapiens
ctccttctctaacct

SEQ ID NO: 231284 - DNA, 15 bp, Homo sapiens
cctccttctctaacc

SEQ ID NO: 231285 - DNA, 15 bp, Homo sapiens
tcctccttctctaac

SEQ ID NO: 231286 - DNA, 15 bp, Homo sapiens
ctcctccttctctaa

SEQ ID NO: 231287 - DNA, 15 bp, Homo sapiens
gctcctccttctcta

SEQ ID NO: 231288 - DNA, 15 bp, Homo sapiens
agctcctccttctct

SEQ ID NO: 231289 - DNA, 15 bp, Homo sapiens
gagctcctccttctc

SEQ ID NO: 231290 - DNA, 15 bp, Homo sapiens
agagctcctccttct

SEQ ID NO: 231291 - DNA, 15 bp, Homo sapiens
tagagctcctccttc

SEQ ID NO: 231292 - DNA, 15 bp, Homo sapiens
ttagagctcctcctt

SEQ ID NO: 231293 - DNA, 15 bp, Homo sapiens
cttagagctcctcct

SEQ ID NO: 231294 - DNA, 15 bp, Homo sapiens
gcttagagctcctcc

SEQ ID NO: 231295 - DNA, 15 bp, Homo sapiens
tgcttagagctcctc

SEQ ID NO: 231296 - DNA, 15 bp, Homo sapiens
ctgcttagagctcct

SEQ ID NO: 231297 - DNA, 15 bp, Homo sapiens
tctgcttagagctcc

SEQ ID NO: 231298 - DNA, 15 bp, Homo sapiens
ttctgcttagagctc

SEQ ID NO: 231299 - DNA, 15 bp, Homo sapiens
tttctgcttagagct

SEQ ID NO: 231300 - DNA, 15 bp, Homo sapiens
ttttctgcttagagc

SEQ ID NO: 231301 - DNA, 15 bp, Homo sapiens
tttttctgcttagag

SEQ ID NO: 231302 - DNA, 15 bp, Homo sapiens
ttttttctgcttaga

SEQ ID NO: 231303 - DNA, 15 bp, Homo sapiens
attttttctgcttag

SEQ ID NO: 231304 - DNA, 15 bp, Homo sapiens
gattttttctgctta

SEQ ID NO: 231305 - DNA, 15 bp, Homo sapiens
ggattttttctgctt

SEQ ID NO: 231306 - DNA, 15 bp, Homo sapiens
aggattttttctgct

SEQ ID NO: 231307 - DNA, 15 bp, Homo sapiens
caggattttttctgc

SEQ ID NO: 231308 - DNA, 15 bp, Homo sapiens
acaggattttttctg

SEQ ID NO: 231309 - DNA, 15 bp, Homo sapiens
cacaggattttttct

SEQ ID NO: 231310 - DNA, 15 bp, Homo sapiens
gcacaggattttttc

SEQ ID NO: 231311 - DNA, 15 bp, Homo sapiens
ggcacaggatttttt

SEQ ID NO: 231312 - DNA, 15 bp, Homo sapiens
cggcacaggattttt

SEQ ID NO: 231313 - DNA, 15 bp, Homo sapiens
ccggcacaggatttt

SEQ ID NO: 231314 - DNA, 15 bp, Homo sapiens
cccggcacaggattt

SEQ ID NO: 231315 - DNA, 15 bp, Homo sapiens
tcccggcacaggatt

SEQ ID NO: 231316 - DNA, 15 bp, Homo sapiens
ttcccggcacaggat

SEQ ID NO: 231317 - DNA, 15 bp, Homo sapiens
tttcccggcacagga

SEQ ID NO: 231318 - DNA, 15 bp, Homo sapiens
gtttcccggcacagg

SEQ ID NO: 231319 - DNA, 15 bp, Homo sapiens
ggtttcccggcacag

SEQ ID NO: 231320 - DNA, 15 bp, Homo sapiens
aggtttcccggcaca

SEQ ID NO: 231321 - DNA, 15 bp, Homo sapiens
aaggtttcccggcac

SEQ ID NO: 231322 - DNA, 15 bp, Homo sapiens
caaggtttcccggca

SEQ ID NO: 231323 - DNA, 15 bp, Homo sapiens
tcaaggtttcccggc

SEQ ID NO: 231324 - DNA, 15 bp, Homo sapiens
atcaaggtttcccgg

SEQ ID NO: 231325 - DNA, 15 bp, Homo sapiens
aatcaaggtttcccg

SEQ ID NO: 231326 - DNA, 15 bp, Homo sapiens
caatcaaggtttccc

SEQ ID NO: 231327 - DNA, 15 bp, Homo sapiens
acaatcaaggtttcc

SEQ ID NO: 231328 - DNA, 15 bp, Homo sapiens
cacaatcaaggtttc

SEQ ID NO: 231329 - DNA, 15 bp, Homo sapiens
ccacaatcaaggttt

SEQ ID NO: 231330 - DNA, 15 bp, Homo sapiens
gccacaatcaaggtt

SEQ ID NO: 231331 - DNA, 15 bp, Homo sapiens
agccacaatcaaggt

SEQ ID NO: 231332 - DNA, 15 bp, Homo sapiens
aagccacaatcaagg

SEQ ID NO: 231333 - DNA, 15 bp, Homo sapiens
aaagccacaatcaag

SEQ ID NO: 231334 - DNA, 15 bp, Homo sapiens
aaaagccacaatcaa

SEQ ID NO: 231335 - DNA, 15 bp, Homo sapiens
aaaaagccacaatca

SEQ ID NO: 231336 - DNA, 15 bp, Homo sapiens
taaaaagccacaatc

SEQ ID NO: 231337 - DNA, 15 bp, Homo sapiens
ttaaaaagccacaat

SEQ ID NO: 231338 - DNA, 15 bp, Homo sapiens
attaaaaagccacaa

SEQ ID NO: 231339 - DNA, 15 bp, Homo sapiens
cattaaaaagccaca

SEQ ID NO: 231340 - DNA, 15 bp, Homo sapiens
tcattaaaaagccac

SEQ ID NO: 231341 - DNA, 15 bp, Homo sapiens
ttcattaaaaagcca

SEQ ID NO: 231342 - DNA, 15 bp, Homo sapiens
attcattaaaaagcc

SEQ ID NO: 231343 - DNA, 15 bp, Homo sapiens
cattcattaaaaagc

SEQ ID NO: 231344 - DNA, 15 bp, Homo sapiens
tcattcattaaaaag

SEQ ID NO: 231345 - DNA, 15 bp, Homo sapiens
ttcattcattaaaaa

SEQ ID NO: 231346 - DNA, 15 bp, Homo sapiens
cttcattcattaaaa

SEQ ID NO: 231347 - DNA, 15 bp, Homo sapiens
tcttcattcattaaa

SEQ ID NO: 231348 - DNA, 15 bp, Homo sapiens
ctcttcattcattaa

SEQ ID NO: 231349 - DNA, 15 bp, Homo sapiens
cctcttcattcatta

SEQ ID NO: 231350 - DNA, 15 bp, Homo sapiens
gcctcttcattcatt

SEQ ID NO: 231351 - DNA, 15 bp, Homo sapiens
ggcctcttcattcat

SEQ ID NO: 231352 - DNA, 15 bp, Homo sapiens
aggcctcttcattca

SEQ ID NO: 231353 - DNA, 15 bp, Homo sapiens
gaggcctcttcattc

SEQ ID NO: 231354 - DNA, 15 bp, Homo sapiens
ggaggcctcttcatt

SEQ ID NO: 231355 - DNA, 15 bp, Homo sapiens
gggaggcctcttcat

SEQ ID NO: 231356 - DNA, 15 bp, Homo sapiens
agggaggcctcttca

SEQ ID NO: 231357 - DNA, 15 bp, Homo sapiens
cagggaggcctcttc

SEQ ID NO: 231358 - DNA, 15 bp, Homo sapiens
tcagggaggcctctt

SEQ ID NO: 231359 - DNA, 15 bp, Homo sapiens
ctcagggaggcctct

SEQ ID NO: 231360 - DNA, 15 bp, Homo sapiens
gctcagggaggcctc

SEQ ID NO: 231361 - DNA, 15 bp, Homo sapiens
agctcagggaggcct

SEQ ID NO: 231362 - DNA, 15 bp, Homo sapiens
aagctcagggaggcc

SEQ ID NO: 231363 - DNA, 15 bp, Homo sapiens
taagctcagggaggc

SEQ ID NO: 231364 - DNA, 15 bp, Homo sapiens
gtaagctcagggagg

SEQ ID NO: 231365 - DNA, 15 bp, Homo sapiens
tgtaagctcagggag

SEQ ID NO: 231366 - DNA, 15 bp, Homo sapiens
ttgtaagctcaggga

SEQ ID NO: 231367 - DNA, 15 bp, Homo sapiens
attgtaagctcaggg

SEQ ID NO: 231368 - DNA, 15 bp, Homo sapiens
tattgtaagctcagg

SEQ ID NO: 231369 - DNA, 15 bp, Homo sapiens
atattgtaagctcag

SEQ ID NO: 231370 - DNA, 15 bp, Homo sapiens
tatattgtaagctca

SEQ ID NO: 231371 - DNA, 15 bp, Homo sapiens
ttatattgtaagctc

SEQ ID NO: 231372 - DNA, 15 bp, Homo sapiens
tttatattgtaagct

SEQ ID NO: 231373 - DNA, 15 bp, Homo sapiens
ttttatattgtaagc

SEQ ID NO: 231374 - DNA, 15 bp, Homo sapiens
cttttatattgtaag

SEQ ID NO: 231375 - DNA, 15 bp, Homo sapiens
ccttttatattgtaa

SEQ ID NO: 231376 - DNA, 15 bp, Homo sapiens
cccttttatattgta

SEQ ID NO: 231377 - DNA, 15 bp, Homo sapiens
ccccttttatattgt

SEQ ID NO: 231378 - DNA, 15 bp, Homo sapiens
cccccttttatattg

SEQ ID NO: 231379 - DNA, 15 bp, Homo sapiens
tcccccttttatatt

SEQ ID NO: 231380 - DNA, 15 bp, Homo sapiens
gtcccccttttatat

SEQ ID NO: 231381 - DNA, 15 bp, Homo sapiens
tgtcccccttttata

SEQ ID NO: 231382 - DNA, 15 bp, Homo sapiens
ctgtcccccttttat

SEQ ID NO: 231383 - DNA, 15 bp, Homo sapiens
tctgtccccctttta

SEQ ID NO: 231384 - DNA, 15 bp, Homo sapiens
ctctgtccccctttt

SEQ ID NO: 231385 - DNA, 15 bp, Homo sapiens
tctctgtcccccttt

SEQ ID NO: 231386 - DNA, 15 bp, Homo sapiens
ctctctgtccccctt

SEQ ID NO: 231387 - DNA, 15 bp, Homo sapiens
cctctctgtccccct

SEQ ID NO: 231388 - DNA, 15 bp, Homo sapiens
acctctctgtccccc

SEQ ID NO: 231389 - DNA, 15 bp, Homo sapiens
cacctctctgtcccc

SEQ ID NO: 231390 - DNA, 15 bp, Homo sapiens
tcacctctctgtccc

SEQ ID NO: 231391 - DNA, 15 bp, Homo sapiens
ttcacctctctgtcc

SEQ ID NO: 231392 - DNA, 15 bp, Homo sapiens
cttcacctctctgtc

SEQ ID NO: 231393 - DNA, 15 bp, Homo sapiens
ccttcacctctctgt

SEQ ID NO: 231394 - DNA, 15 bp, Homo sapiens
accttcacctctctg

SEQ ID NO: 231395 - DNA, 15 bp, Homo sapiens
gaccttcacctctct

SEQ ID NO: 231396 - DNA, 15 bp, Homo sapiens
agaccttcacctctc

SEQ ID NO: 231397 - DNA, 15 bp, Homo sapiens
tagaccttcacctct

SEQ ID NO: 231398 - DNA, 15 bp, Homo sapiens
gtagaccttcacctc

SEQ ID NO: 231399 - DNA, 15 bp, Homo sapiens
tgtagaccttcacct

SEQ ID NO: 231400 - DNA, 15 bp, Homo sapiens
gtgtagaccttcacc

SEQ ID NO: 231401 - DNA, 15 bp, Homo sapiens
tgtgtagaccttcac

SEQ ID NO: 231402 - DNA, 15 bp, Homo sapiens
atgtgtagaccttca

SEQ ID NO: 231403 - DNA, 15 bp, Homo sapiens
gatgtgtagaccttc

SEQ ID NO: 231404 - DNA, 15 bp, Homo sapiens
tgatgtgtagacctt

SEQ ID NO: 231405 - DNA, 15 bp, Homo sapiens
ctgatgtgtagacct

SEQ ID NO: 231406 - DNA, 15 bp, Homo sapiens
cctgatgtgtagacc

SEQ ID NO: 231407 - DNA, 15 bp, Homo sapiens
ccctgatgtgtagac

SEQ ID NO: 231408 - DNA, 15 bp, Homo sapiens
cccctgatgtgtaga

SEQ ID NO: 231409 - DNA, 15 bp, Homo sapiens
gcccctgatgtgtag

SEQ ID NO: 231410 - DNA, 15 bp, Homo sapiens
agcccctgatgtgta

SEQ ID NO: 231411 - DNA, 15 bp, Homo sapiens
aagcccctgatgtgt

SEQ ID NO: 231412 - DNA, 15 bp, Homo sapiens
caagcccctgatgtg

SEQ ID NO: 231413 - DNA, 15 bp, Homo sapiens
gcaagcccctgatgt

SEQ ID NO: 231414 - DNA, 15 bp, Homo sapiens
agcaagcccctgatg

SEQ ID NO: 231415 - DNA, 15 bp, Homo sapiens
gagcaagcccctgat

SEQ ID NO: 231416 - DNA, 15 bp, Homo sapiens
agagcaagcccctga

SEQ ID NO: 231417 - DNA, 15 bp, Homo sapiens
aagagcaagcccctg

SEQ ID NO: 231418 - DNA, 15 bp, Homo sapiens
caagagcaagcccct

SEQ ID NO: 231419 - DNA, 15 bp, Homo sapiens
gcaagagcaagcccc

SEQ ID NO: 231420 - DNA, 15 bp, Homo sapiens
tgcaagagcaagccc

SEQ ID NO: 231421 - DNA, 15 bp, Homo sapiens
ttgcaagagcaagcc

SEQ ID NO: 231422 - DNA, 15 bp, Homo sapiens
tttgcaagagcaagc

SEQ ID NO: 231423 - DNA, 15 bp, Homo sapiens
ttttgcaagagcaag

SEQ ID NO: 231424 - DNA, 15 bp, Homo sapiens
gttttgcaagagcaa

SEQ ID NO: 231425 - DNA, 15 bp, Homo sapiens
ggttttgcaagagca

SEQ ID NO: 231426 - DNA, 15 bp, Homo sapiens
tggttttgcaagagc

SEQ ID NO: 231427 - DNA, 15 bp, Homo sapiens
ttggttttgcaagag

SEQ ID NO: 231428 - DNA, 15 bp, Homo sapiens
tttggttttgcaaga

SEQ ID NO: 231429 - DNA, 15 bp, Homo sapiens
gtttggttttgcaag

SEQ ID NO: 231430 - DNA, 15 bp, Homo sapiens
ggtttggttttgcaa

SEQ ID NO: 231431 - DNA, 15 bp, Homo sapiens
tggtttggttttgca

SEQ ID NO: 231432 - DNA, 15 bp, Homo sapiens
gtggtttggttttgc

SEQ ID NO: 231433 - DNA, 15 bp, Homo sapiens
tgtggtttggttttg

SEQ ID NO: 231434 - DNA, 15 bp, Homo sapiens
ttgtggtttggtttt

SEQ ID NO: 231435 - DNA, 15 bp, Homo sapiens
cttgtggtttggttt

SEQ ID NO: 231436 - DNA, 15 bp, Homo sapiens
tcttgtggtttggtt

SEQ ID NO: 231437 - DNA, 15 bp, Homo sapiens
gtcttgtggtttggt

SEQ ID NO: 231438 - DNA, 15 bp, Homo sapiens
tgtcttgtggtttgg

SEQ ID NO: 231439 - DNA, 15 bp, Homo sapiens
ctgtcttgtggtttg

SEQ ID NO: 231440 - DNA, 15 bp, Homo sapiens
tctgtcttgtggttt

SEQ ID NO: 231441 - DNA, 15 bp, Homo sapiens
gtctgtcttgtggtt

SEQ ID NO: 231442 - DNA, 15 bp, Homo sapiens
agtctgtcttgtggt

SEQ ID NO: 231443 - DNA, 15 bp, Homo sapiens
aagtctgtcttgtgg

SEQ ID NO: 231444 - DNA, 15 bp, Homo sapiens
caagtctgtcttgtg

SEQ ID NO: 231445 - DNA, 15 bp, Homo sapiens
gcaagtctgtcttgt

SEQ ID NO: 231446 - DNA, 15 bp, Homo sapiens
tgcaagtctgtcttg

SEQ ID NO: 231447 - DNA, 15 bp, Homo sapiens
ttgcaagtctgtctt

SEQ ID NO: 231448 - DNA, 15 bp, Homo sapiens
tttgcaagtctgtct

SEQ ID NO: 231449 - DNA, 15 bp, Homo sapiens
ttttgcaagtctgtc

SEQ ID NO: 231450 - DNA, 15 bp, Homo sapiens
cttttgcaagtctgt

SEQ ID NO: 231451 - DNA, 15 bp, Homo sapiens
tcttttgcaagtctg

SEQ ID NO: 231452 - DNA, 15 bp, Homo sapiens
ttcttttgcaagtct

SEQ ID NO: 231453 - DNA, 15 bp, Homo sapiens
cttcttttgcaagtc

SEQ ID NO: 231454 - DNA, 15 bp, Homo sapiens
ccttcttttgcaagt

SEQ ID NO: 231455 - DNA, 15 bp, Homo sapiens
gccttcttttgcaag

SEQ ID NO: 231456 - DNA, 15 bp, Homo sapiens
tgccttcttttgcaa

SEQ ID NO: 231457 - DNA, 15 bp, Homo sapiens
atgccttcttttgca

SEQ ID NO: 231458 - DNA, 15 bp, Homo sapiens
catgccttcttttgc

SEQ ID NO: 231459 - DNA, 15 bp, Homo sapiens
gcatgccttcttttg

SEQ ID NO: 231460 - DNA, 15 bp, Homo sapiens
tgcatgccttctttt

SEQ ID NO: 231461 - DNA, 15 bp, Homo sapiens
gtgcatgccttcttt

SEQ ID NO: 231462 - DNA, 15 bp, Homo sapiens
tgtgcatgccttctt

SEQ ID NO: 231463 - DNA, 15 bp, Homo sapiens
ctgtgcatgccttct

SEQ ID NO: 231464 - DNA, 15 bp, Homo sapiens
gctgtgcatgccttc

SEQ ID NO: 231465 - DNA, 15 bp, Homo sapiens
agctgtgcatgcctt

SEQ ID NO: 231466 - DNA, 15 bp, Homo sapiens
gagctgtgcatgcct

SEQ ID NO: 231467 - DNA, 15 bp, Homo sapiens
tgagctgtgcatgcc

SEQ ID NO: 231468 - DNA, 15 bp, Homo sapiens
ctgagctgtgcatgc

SEQ ID NO: 231469 - DNA, 15 bp, Homo sapiens
gctgagctgtgcatg

SEQ ID NO: 231470 - DNA, 15 bp, Homo sapiens
tgctgagctgtgcat

SEQ ID NO: 231471 - DNA, 15 bp, Homo sapiens
gtgctgagctgtgca

SEQ ID NO: 231472 - DNA, 15 bp, Homo sapiens
agtgctgagctgtgc

SEQ ID NO: 231473 - DNA, 15 bp, Homo sapiens
cagtgctgagctgtg

SEQ ID NO: 231474 - DNA, 15 bp, Homo sapiens
gcagtgctgagctgt

SEQ ID NO: 231475 - DNA, 15 bp, Homo sapiens
agcagtgctgagctg

SEQ ID NO: 231476 - DNA, 15 bp, Homo sapiens
gagcagtgctgagct

SEQ ID NO: 231477 - DNA, 15 bp, Homo sapiens
agagcagtgctgagc

SEQ ID NO: 231478 - DNA, 15 bp, Homo sapiens
cagagcagtgctgag

SEQ ID NO: 231479 - DNA, 15 bp, Homo sapiens
acagagcagtgctga

SEQ ID NO: 231480 - DNA, 15 bp, Homo sapiens
aacagagcagtgctg

SEQ ID NO: 231481 - DNA, 15 bp, Homo sapiens
caacagagcagtgct

SEQ ID NO: 231482 - DNA, 15 bp, Homo sapiens
gcaacagagcagtgc

SEQ ID NO: 231483 - DNA, 15 bp, Homo sapiens
ggcaacagagcagtg

SEQ ID NO: 231484 - DNA, 15 bp, Homo sapiens
aggcaacagagcagt

SEQ ID NO: 231485 - DNA, 15 bp, Homo sapiens
caggcaacagagcag

SEQ ID NO: 231486 - DNA, 15 bp, Homo sapiens
ccaggcaacagagca

SEQ ID NO: 231487 - DNA, 15 bp, Homo sapiens
accaggcaacagagc

SEQ ID NO: 231488 - DNA, 15 bp, Homo sapiens
gaccaggcaacagag

SEQ ID NO: 231489 - DNA, 15 bp, Homo sapiens
ggaccaggcaacaga

SEQ ID NO: 231490 - DNA, 15 bp, Homo sapiens
aggaccaggcaacag

SEQ ID NO: 231491 - DNA, 15 bp, Homo sapiens
gaggaccaggcaaca

SEQ ID NO: 231492 - DNA, 15 bp, Homo sapiens
ggaggaccaggcaac

SEQ ID NO: 231493 - DNA, 15 bp, Homo sapiens
aggaggaccaggcaa

SEQ ID NO: 231494 - DNA, 15 bp, Homo sapiens
caggaggaccaggca

SEQ ID NO: 231495 - DNA, 15 bp, Homo sapiens
tcaggaggaccaggc

SEQ ID NO: 231496 - DNA, 15 bp, Homo sapiens
gtcaggaggaccagg

SEQ ID NO: 231497 - DNA, 15 bp, Homo sapiens
agtcaggaggaccag

SEQ ID NO: 231498 - DNA, 15 bp, Homo sapiens
cagtcaggaggacca

SEQ ID NO: 231499 - DNA, 15 bp, Homo sapiens
ccagtcaggaggacc

SEQ ID NO: 231500 - DNA, 15 bp, Homo sapiens
cccagtcaggaggac

SEQ ID NO: 231501 - DNA, 15 bp, Homo sapiens
ccccagtcaggagga

SEQ ID NO: 231502 - DNA, 15 bp, Homo sapiens
accccagtcaggagg

SEQ ID NO: 231503 - DNA, 15 bp, Homo sapiens
caccccagtcaggag

SEQ ID NO: 231504 - DNA, 15 bp, Homo sapiens
tcaccccagtcagga

SEQ ID NO: 231505 - DNA, 15 bp, Homo sapiens
ctcaccccagtcagg

SEQ ID NO: 231506 - DNA, 15 bp, Homo sapiens
cctcaccccagtcag

SEQ ID NO: 231507 - DNA, 15 bp, Homo sapiens
ccctcaccccagtca

SEQ ID NO: 231508 - DNA, 15 bp, Homo sapiens
gccctcaccccagtc

SEQ ID NO: 231509 - DNA, 15 bp, Homo sapiens
ggccctcaccccagt

SEQ ID NO: 231510 - DNA, 15 bp, Homo sapiens
tggccctcaccccag

SEQ ID NO: 231511 - DNA, 15 bp, Homo sapiens
ctggccctcacccca

SEQ ID NO: 231512 - DNA, 15 bp, Homo sapiens
gctggccctcacccc

SEQ ID NO: 231513 - DNA, 15 bp, Homo sapiens
ggctggccctcaccc

SEQ ID NO: 231514 - DNA, 15 bp, Homo sapiens
gggctggccctcacc

SEQ ID NO: 231515 - DNA, 15 bp, Homo sapiens
tgggctggccctcac

SEQ ID NO: 231516 - DNA, 15 bp, Homo sapiens
ctgggctggccctca

SEQ ID NO: 231517 - DNA, 15 bp, Homo sapiens
cctgggctggccctc

SEQ ID NO: 231518 - DNA, 15 bp, Homo sapiens
gcctgggctggccct

SEQ ID NO: 231519 - DNA, 15 bp, Homo sapiens
ggcctgggctggccc

SEQ ID NO: 231520 - DNA, 15 bp, Homo sapiens
tggcctgggctggcc

SEQ ID NO: 231521 - DNA, 15 bp, Homo sapiens
ctggcctgggctggc

SEQ ID NO: 231522 - DNA, 15 bp, Homo sapiens
cctggcctgggctgg

SEQ ID NO: 231523 - DNA, 15 bp, Homo sapiens
ccctggcctgggctg

SEQ ID NO: 231524 - DNA, 15 bp, Homo sapiens
gccctggcctgggct

SEQ ID NO: 231525 - DNA, 15 bp, Homo sapiens
tgccctggcctgggc

SEQ ID NO: 231526 - DNA, 15 bp, Homo sapiens
gtgccctggcctggg

SEQ ID NO: 231527 - DNA, 15 bp, Homo sapiens
ggtgccctggcctgg

SEQ ID NO: 231528 - DNA, 15 bp, Homo sapiens
gggtgccctggcctg

SEQ ID NO: 231529 - DNA, 15 bp, Homo sapiens
tgggtgccctggcct

SEQ ID NO: 231530 - DNA, 15 bp, Homo sapiens
ctgggtgccctggcc

SEQ ID NO: 231531 - DNA, 15 bp, Homo sapiens
actgggtgccctggc

SEQ ID NO: 231532 - DNA, 15 bp, Homo sapiens
gactgggtgccctgg

SEQ ID NO: 231533 - DNA, 15 bp, Homo sapiens
agactgggtgccctg

SEQ ID NO: 231534 - DNA, 15 bp, Homo sapiens
cagactgggtgccct

SEQ ID NO: 231535 - DNA, 15 bp, Homo sapiens
tcagactgggtgccc

SEQ ID NO: 231536 - DNA, 15 bp, Homo sapiens
ctcagactgggtgcc

SEQ ID NO: 231537 - DNA, 15 bp, Homo sapiens
tctcagactgggtgc

SEQ ID NO: 231538 - DNA, 15 bp, Homo sapiens
ttctcagactgggtg

SEQ ID NO: 231539 - DNA, 15 bp, Homo sapiens
gttctcagactgggt

SEQ ID NO: 231540 - DNA, 15 bp, Homo sapiens
tgttctcagactggg

SEQ ID NO: 231541 - DNA, 15 bp, Homo sapiens
ctgttctcagactgg

SEQ ID NO: 231542 - DNA, 15 bp, Homo sapiens
gctgttctcagactg

SEQ ID NO: 231543 - DNA, 15 bp, Homo sapiens
agctgttctcagact

SEQ ID NO: 231544 - DNA, 15 bp, Homo sapiens
cagctgttctcagac

SEQ ID NO: 231545 - DNA, 15 bp, Homo sapiens
gcagctgttctcaga

SEQ ID NO: 231546 - DNA, 15 bp, Homo sapiens
tgcagctgttctcag

SEQ ID NO: 231547 - DNA, 15 bp, Homo sapiens
gtgcagctgttctca

SEQ ID NO: 231548 - DNA, 15 bp, Homo sapiens
ggtgcagctgttctc

SEQ ID NO: 231549 - DNA, 15 bp, Homo sapiens
gggtgcagctgttct

SEQ ID NO: 231550 - DNA, 15 bp, Homo sapiens
tgggtgcagctgttc

SEQ ID NO: 231551 - DNA, 15 bp, Homo sapiens
gtgggtgcagctgtt

SEQ ID NO: 231552 - DNA, 15 bp, Homo sapiens
agtgggtgcagctgt

SEQ ID NO: 231553 - DNA, 15 bp, Homo sapiens
aagtgggtgcagctg

SEQ ID NO: 231554 - DNA, 15 bp, Homo sapiens
gaagtgggtgcagct

SEQ ID NO: 231555 - DNA, 15 bp, Homo sapiens
ggaagtgggtgcagc

SEQ ID NO: 231556 - DNA, 15 bp, Homo sapiens
gggaagtgggtgcag

SEQ ID NO: 231557 - DNA, 15 bp, Homo sapiens
tgggaagtgggtgca

SEQ ID NO: 231558 - DNA, 15 bp, Homo sapiens
ctgggaagtgggtgc

SEQ ID NO: 231559 - DNA, 15 bp, Homo sapiens
cctgggaagtgggtg

SEQ ID NO: 231560 - DNA, 15 bp, Homo sapiens
gcctgggaagtgggt

SEQ ID NO: 231561 - DNA, 15 bp, Homo sapiens
tgcctgggaagtggg

SEQ ID NO: 231562 - DNA, 15 bp, Homo sapiens
ttgcctgggaagtgg

SEQ ID NO: 231563 - DNA, 15 bp, Homo sapiens
gttgcctgggaagtg

SEQ ID NO: 231564 - DNA, 15 bp, Homo sapiens
ggttgcctgggaagt

SEQ ID NO: 231565 - DNA, 15 bp, Homo sapiens
aggttgcctgggaag

SEQ ID NO: 231566 - DNA, 15 bp, Homo sapiens
caggttgcctgggaa

SEQ ID NO: 231567 - DNA, 15 bp, Homo sapiens
gcaggttgcctggga

SEQ ID NO: 231568 - DNA, 15 bp, Homo sapiens
ggcaggttgcctggg

SEQ ID NO: 231569 - DNA, 15 bp, Homo sapiens
aggcaggttgcctgg

SEQ ID NO: 231570 - DNA, 15 bp, Homo sapiens
taggcaggttgcctg

SEQ ID NO: 231571 - DNA, 15 bp, Homo sapiens
ttaggcaggttgcct

SEQ ID NO: 231572 - DNA, 15 bp, Homo sapiens
gttaggcaggttgcc

SEQ ID NO: 231573 - DNA, 15 bp, Homo sapiens
tgttaggcaggttgc

SEQ ID NO: 231574 - DNA, 15 bp, Homo sapiens
atgttaggcaggttg

SEQ ID NO: 231575 - DNA, 15 bp, Homo sapiens
catgttaggcaggtt

SEQ ID NO: 231576 - DNA, 15 bp, Homo sapiens
gcatgttaggcaggt

SEQ ID NO: 231577 - DNA, 15 bp, Homo sapiens
agcatgttaggcagg

SEQ ID NO: 231578 - DNA, 15 bp, Homo sapiens
aagcatgttaggcag

SEQ ID NO: 231579 - DNA, 15 bp, Homo sapiens
gaagcatgttaggca

SEQ ID NO: 231580 - DNA, 15 bp, Homo sapiens
cgaagcatgttaggc

SEQ ID NO: 231581 - DNA, 15 bp, Homo sapiens
tcgaagcatgttagg

SEQ ID NO: 231582 - DNA, 15 bp, Homo sapiens
ctcgaagcatgttag

SEQ ID NO: 231583 - DNA, 15 bp, Homo sapiens
tctcgaagcatgtta

SEQ ID NO: 231584 - DNA, 15 bp, Homo sapiens
atctcgaagcatgtt

SEQ ID NO: 231585 - DNA, 15 bp, Homo sapiens
gatctcgaagcatgt

SEQ ID NO: 231586 - DNA, 15 bp, Homo sapiens
agatctcgaagcatg

SEQ ID NO: 231587 - DNA, 15 bp, Homo sapiens
gagatctcgaagcat

SEQ ID NO: 231588 - DNA, 15 bp, Homo sapiens
ggagatctcgaagca

SEQ ID NO: 231589 - DNA, 15 bp, Homo sapiens
cggagatctcgaagc

SEQ ID NO: 231590 - DNA, 15 bp, Homo sapiens
tcggagatctcgaag

SEQ ID NO: 231591 - DNA, 15 bp, Homo sapiens
ctcggagatctcgaa

SEQ ID NO: 231592 - DNA, 15 bp, Homo sapiens
tctcggagatctcga

SEQ ID NO: 231593 - DNA, 15 bp, Homo sapiens
atctcggagatctcg

SEQ ID NO: 231594 - DNA, 15 bp, Homo sapiens
catctcggagatctc

SEQ ID NO: 231595 - DNA, 15 bp, Homo sapiens
gcatctcggagatct

SEQ ID NO: 231596 - DNA, 15 bp, Homo sapiens
ggcatctcggagatc

SEQ ID NO: 231597 - DNA, 15 bp, Homo sapiens
aggcatctcggagat

SEQ ID NO: 231598 - DNA, 15 bp, Homo sapiens
aaggcatctcggaga

SEQ ID NO: 231599 - DNA, 15 bp, Homo sapiens
gaaggcatctcggag

SEQ ID NO: 231600 - DNA, 15 bp, Homo sapiens
tgaaggcatctcgga

SEQ ID NO: 231601 - DNA, 15 bp, Homo sapiens
ctgaaggcatctcgg

SEQ ID NO: 231602 - DNA, 15 bp, Homo sapiens
gctgaaggcatctcg

SEQ ID NO: 231603 - DNA, 15 bp, Homo sapiens
tgctgaaggcatctc

SEQ ID NO: 231604 - DNA, 15 bp, Homo sapiens
ctgctgaaggcatct

SEQ ID NO: 231605 - DNA, 15 bp, Homo sapiens
tctgctgaaggcatc

SEQ ID NO: 231606 - DNA, 15 bp, Homo sapiens
ctctgctgaaggcat

SEQ ID NO: 231607 - DNA, 15 bp, Homo sapiens
actctgctgaaggca

SEQ ID NO: 231608 - DNA, 15 bp, Homo sapiens
cactctgctgaaggc

SEQ ID NO: 231609 - DNA, 15 bp, Homo sapiens
tcactctgctgaagg

SEQ ID NO: 231610 - DNA, 15 bp, Homo sapiens
ttcactctgctgaag

SEQ ID NO: 231611 - DNA, 15 bp, Homo sapiens
cttcactctgctgaa

SEQ ID NO: 231612 - DNA, 15 bp, Homo sapiens
tcttcactctgctga

SEQ ID NO: 231613 - DNA, 15 bp, Homo sapiens
gtcttcactctgctg

SEQ ID NO: 231614 - DNA, 15 bp, Homo sapiens
agtcttcactctgct

SEQ ID NO: 231615 - DNA, 15 bp, Homo sapiens
aagtcttcactctgc

SEQ ID NO: 231616 - DNA, 15 bp, Homo sapiens
aaagtcttcactctg

SEQ ID NO: 231617 - DNA, 15 bp, Homo sapiens
gaaagtcttcactct

SEQ ID NO: 231618 - DNA, 15 bp, Homo sapiens
agaaagtcttcactc

SEQ ID NO: 231619 - DNA, 15 bp, Homo sapiens
aagaaagtcttcact

SEQ ID NO: 231620 - DNA, 15 bp, Homo sapiens
aaagaaagtcttcac

SEQ ID NO: 231621 - DNA, 15 bp, Homo sapiens
caaagaaagtcttca

SEQ ID NO: 231622 - DNA, 15 bp, Homo sapiens
acaaagaaagtcttc

SEQ ID NO: 231623 - DNA, 15 bp, Homo sapiens
cacaaagaaagtctt

SEQ ID NO: 231624 - DNA, 15 bp, Homo sapiens
tcacaaagaaagtct

SEQ ID NO: 231625 - DNA, 15 bp, Homo sapiens
ctcacaaagaaagtc

SEQ ID NO: 231626 - DNA, 15 bp, Homo sapiens
actcacaaagaaagt

SEQ ID NO: 231627 - DNA, 15 bp, Homo sapiens
tactcacaaagaaag

SEQ ID NO: 231628 - DNA, 15 bp, Homo sapiens
atactcacaaagaaa

SEQ ID NO: 231629 - DNA, 15 bp, Homo sapiens
catactcacaaagaa

SEQ ID NO: 231630 - DNA, 15 bp, Homo sapiens
tcatactcacaaaga

SEQ ID NO: 231631 - DNA, 15 bp, Homo sapiens
atcatactcacaaag

SEQ ID NO: 231632 - DNA, 15 bp, Homo sapiens
aatcatactcacaaa

SEQ ID NO: 231633 - DNA, 15 bp, Homo sapiens
gaatcatactcacaa

SEQ ID NO: 231634 - DNA, 15 bp, Homo sapiens
ggaatcatactcaca

SEQ ID NO: 231635 - DNA, 15 bp, Homo sapiens
aggaatcatactcac

SEQ ID NO: 231636 - DNA, 15 bp, Homo sapiens
aaggaatcatactca

SEQ ID NO: 231637 - DNA, 15 bp, Homo sapiens
gaaggaatcatactc

SEQ ID NO: 231638 - DNA, 15 bp, Homo sapiens
ggaaggaatcatact

SEQ ID NO: 231639 - DNA, 15 bp, Homo sapiens
aggaaggaatcatac

SEQ ID NO: 231640 - DNA, 15 bp, Homo sapiens
caggaaggaatcata

SEQ ID NO: 231641 - DNA, 15 bp, Homo sapiens
acaggaaggaatcat

SEQ ID NO: 231642 - DNA, 15 bp, Homo sapiens
gacaggaaggaatca

SEQ ID NO: 231643 - DNA, 15 bp, Homo sapiens
ggacaggaaggaatc

SEQ ID NO: 231644 - DNA, 15 bp, Homo sapiens
aggacaggaaggaat

SEQ ID NO: 231645 - DNA, 15 bp, Homo sapiens
aaggacaggaaggaa

SEQ ID NO: 231646 - DNA, 15 bp, Homo sapiens
aaaggacaggaagga

SEQ ID NO: 231647 - DNA, 15 bp, Homo sapiens
gaaaggacaggaagg

SEQ ID NO: 231648 - DNA, 15 bp, Homo sapiens
agaaaggacaggaag

SEQ ID NO: 231649 - DNA, 15 bp, Homo sapiens
gagaaaggacaggaa

SEQ ID NO: 231650 - DNA, 15 bp, Homo sapiens
agagaaaggacagga

SEQ ID NO: 231651 - DNA, 15 bp, Homo sapiens
gagagaaaggacagg

SEQ ID NO: 231652 - DNA, 15 bp, Homo sapiens
agagagaaaggacag

SEQ ID NO: 231653 - DNA, 15 bp, Homo sapiens
aagagagaaaggaca

SEQ ID NO: 231654 - DNA, 15 bp, Homo sapiens
gaagagagaaaggac

SEQ ID NO: 231655 - DNA, 15 bp, Homo sapiens
ggaagagagaaagga

SEQ ID NO: 231656 - DNA, 15 bp, Homo sapiens
aggaagagagaaagg

SEQ ID NO: 231657 - DNA, 15 bp, Homo sapiens
caggaagagagaaag

SEQ ID NO: 231658 - DNA, 15 bp, Homo sapiens
ccaggaagagagaaa

SEQ ID NO: 231659 - DNA, 15 bp, Homo sapiens
cccaggaagagagaa

SEQ ID NO: 231660 - DNA, 15 bp, Homo sapiens
tcccaggaagagaga

SEQ ID NO: 231661 - DNA, 15 bp, Homo sapiens
gtcccaggaagagag

SEQ ID NO: 231662 - DNA, 15 bp, Homo sapiens
agtcccaggaagaga

SEQ ID NO: 231663 - DNA, 15 bp, Homo sapiens
cagtcccaggaagag

SEQ ID NO: 231664 - DNA, 15 bp, Homo sapiens
gcagtcccaggaaga

SEQ ID NO: 231665 - DNA, 15 bp, Homo sapiens
ggcagtcccaggaag

SEQ ID NO: 231666 - DNA, 15 bp, Homo sapiens
aggcagtcccaggaa

SEQ ID NO: 231667 - DNA, 15 bp, Homo sapiens
caggcagtcccagga

SEQ ID NO: 231668 - DNA, 15 bp, Homo sapiens
tcaggcagtcccagg

SEQ ID NO: 231669 - DNA, 15 bp, Homo sapiens
ttcaggcagtcccag

SEQ ID NO: 231670 - DNA, 15 bp, Homo sapiens
gttcaggcagtccca

SEQ ID NO: 231671 - DNA, 15 bp, Homo sapiens
agttcaggcagtccc

SEQ ID NO: 231672 - DNA, 15 bp, Homo sapiens
tagttcaggcagtcc

SEQ ID NO: 231673 - DNA, 15 bp, Homo sapiens
ctagttcaggcagtc

SEQ ID NO: 231674 - DNA, 15 bp, Homo sapiens
tctagttcaggcagt

SEQ ID NO: 231675 - DNA, 15 bp, Homo sapiens
gtctagttcaggcag

SEQ ID NO: 231676 - DNA, 15 bp, Homo sapiens
tgtctagttcaggca

SEQ ID NO: 231677 - DNA, 15 bp, Homo sapiens
atgtctagttcaggc

SEQ ID NO: 231678 - DNA, 15 bp, Homo sapiens
aatgtctagttcagg

SEQ ID NO: 231679 - DNA, 15 bp, Homo sapiens
gaatgtctagttcag

SEQ ID NO: 231680 - DNA, 15 bp, Homo sapiens
agaatgtctagttca

SEQ ID NO: 231681 - DNA, 15 bp, Homo sapiens
gagaatgtctagttc

SEQ ID NO: 231682 - DNA, 15 bp, Homo sapiens
ggagaatgtctagtt

SEQ ID NO: 231683 - DNA, 15 bp, Homo sapiens
aggagaatgtctagt

SEQ ID NO: 231684 - DNA, 15 bp, Homo sapiens
caggagaatgtctag

SEQ ID NO: 231685 - DNA, 15 bp, Homo sapiens
ccaggagaatgtcta

SEQ ID NO: 231686 - DNA, 15 bp, Homo sapiens
tccaggagaatgtct

SEQ ID NO: 231687 - DNA, 15 bp, Homo sapiens
ttccaggagaatgtc

SEQ ID NO: 231688 - DNA, 15 bp, Homo sapiens
gttccaggagaatgt

SEQ ID NO: 231689 - DNA, 15 bp, Homo sapiens
agttccaggagaatg

SEQ ID NO: 231690 - DNA, 15 bp, Homo sapiens
tagttccaggagaat

SEQ ID NO: 231691 - DNA, 15 bp, Homo sapiens
atagttccaggagaa

SEQ ID NO: 231692 - DNA, 15 bp, Homo sapiens
tatagttccaggaga

SEQ ID NO: 231693 - DNA, 15 bp, Homo sapiens
ttatagttccaggag

SEQ ID NO: 231694 - DNA, 15 bp, Homo sapiens
cttatagttccagga

SEQ ID NO: 231695 - DNA, 15 bp, Homo sapiens
tcttatagttccagg

SEQ ID NO: 231696 - DNA, 15 bp, Homo sapiens
ttcttatagttccag

SEQ ID NO: 231697 - DNA, 15 bp, Homo sapiens
gttcttatagttcca

SEQ ID NO: 231698 - DNA, 15 bp, Homo sapiens
ggttcttatagttcc

SEQ ID NO: 231699 - DNA, 15 bp, Homo sapiens
gggttcttatagttc

SEQ ID NO: 231700 - DNA, 15 bp, Homo sapiens
agggttcttatagtt

SEQ ID NO: 231701 - DNA, 15 bp, Homo sapiens
gagggttcttatagt

SEQ ID NO: 231702 - DNA, 15 bp, Homo sapiens
ggagggttcttatag

SEQ ID NO: 231703 - DNA, 15 bp, Homo sapiens
aggagggttcttata

SEQ ID NO: 231704 - DNA, 15 bp, Homo sapiens
gaggagggttcttat

SEQ ID NO: 231705 - DNA, 15 bp, Homo sapiens
ggaggagggttctta

SEQ ID NO: 231706 - DNA, 15 bp, Homo sapiens
aggaggagggttctt

SEQ ID NO: 231707 - DNA, 15 bp, Homo sapiens
caggaggagggttct

SEQ ID NO: 231708 - DNA, 15 bp, Homo sapiens
gcaggaggagggttc

SEQ ID NO: 231709 - DNA, 15 bp, Homo sapiens
cgcaggaggagggtt

SEQ ID NO: 231710 - DNA, 15 bp, Homo sapiens
gcgcaggaggagggt

SEQ ID NO: 231711 - DNA, 15 bp, Homo sapiens
ggcgcaggaggaggg

SEQ ID NO: 231712 - DNA, 15 bp, Homo sapiens
aggcgcaggaggagg

SEQ ID NO: 231713 - DNA, 15 bp, Homo sapiens
gaggcgcaggaggag

SEQ ID NO: 231714 - DNA, 15 bp, Homo sapiens
ggaggcgcaggagga

SEQ ID NO: 231715 - DNA, 15 bp, Homo sapiens
tggaggcgcaggagg

SEQ ID NO: 231716 - DNA, 15 bp, Homo sapiens
gtggaggcgcaggag

SEQ ID NO: 231717 - DNA, 15 bp, Homo sapiens
ggtggaggcgcagga

SEQ ID NO: 231718 - DNA, 15 bp, Homo sapiens
aggtggaggcgcagg

SEQ ID NO: 231719 - DNA, 15 bp, Homo sapiens
gaggtggaggcgcag

SEQ ID NO: 231720 - DNA, 15 bp, Homo sapiens
ggaggtggaggcgca

SEQ ID NO: 231721 - DNA, 15 bp, Homo sapiens
tggaggtggaggcgc

SEQ ID NO: 231722 - DNA, 15 bp, Homo sapiens
atggaggtggaggcg

SEQ ID NO: 231723 - DNA, 15 bp, Homo sapiens
gatggaggtggaggc

SEQ ID NO: 231724 - DNA, 15 bp, Homo sapiens
ggatggaggtggagg

SEQ ID NO: 231725 - DNA, 15 bp, Homo sapiens
gggatggaggtggag

SEQ ID NO: 231726 - DNA, 15 bp, Homo sapiens
ggggatggaggtgga

SEQ ID NO: 231727 - DNA, 15 bp, Homo sapiens
tggggatggaggtgg

SEQ ID NO: 231728 - DNA, 15 bp, Homo sapiens
attagcaatcaccta

SEQ ID NO: 231729 - DNA, 15 bp, Homo sapiens
aattagcaatcacct

SEQ ID NO: 231730 - DNA, 15 bp, Homo sapiens
taattagcaatcacc

SEQ ID NO: 231731 - DNA, 15 bp, Homo sapiens
gtaattagcaatcac

SEQ ID NO: 231732 - DNA, 15 bp, Homo sapiens
agtaattagcaatca

SEQ ID NO: 231733 - DNA, 15 bp, Homo sapiens
aagtaattagcaatc

SEQ ID NO: 231734 - DNA, 15 bp, Homo sapiens
gaagtaattagcaat

SEQ ID NO: 231735 - DNA, 15 bp, Homo sapiens
agaagtaattagcaa

SEQ ID NO: 231736 - DNA, 15 bp, Homo sapiens
aagaagtaattagca

SEQ ID NO: 231737 - DNA, 15 bp, Homo sapiens
aaagaagtaattagc

SEQ ID NO: 231738 - DNA, 15 bp, Homo sapiens
aaaagaagtaattag

SEQ ID NO: 231739 - DNA, 15 bp, Homo sapiens
aaaaagaagtaatta

SEQ ID NO: 231740 - DNA, 15 bp, Homo sapiens
aaaaaagaagtaatt

SEQ ID NO: 231741 - DNA, 15 bp, Homo sapiens
aaaaaaagaagtaat

SEQ ID NO: 231742 - DNA, 15 bp, Homo sapiens
aaaaaaaagaagtaa

SEQ ID NO: 231743 - DNA, 15 bp, Homo sapiens
aaaaaaaaagaagta

SEQ ID NO: 231744 - DNA, 15 bp, Homo sapiens
aaaaaaaaaagaagt

SEQ ID NO: 231745 - DNA, 15 bp, Homo sapiens
aaaaaaaaaaagaag

SEQ ID NO: 231746 - DNA, 15 bp, Homo sapiens
aaaaaaaaaaaaaag

SEQ ID NO: 231747 - DNA, 15 bp, Homo sapiens
cgtctcaaaaaaaaa

SEQ ID NO: 231748 - DNA, 15 bp, Homo sapiens
ccgtctcaaaaaaaa

SEQ ID NO: 231749 - DNA, 15 bp, Homo sapiens
tccgtctcaaaaaaa

SEQ ID NO: 231750 - DNA, 15 bp, Homo sapiens
ctccgtctcaaaaaa

SEQ ID NO: 231751 - DNA, 15 bp, Homo sapiens
actccgtctcaaaaa

SEQ ID NO: 231752 - DNA, 15 bp, Homo sapiens
gactccgtctcaaaa

SEQ ID NO: 231753 - DNA, 15 bp, Homo sapiens
agactccgtctcaaa

SEQ ID NO: 231754 - DNA, 15 bp, Homo sapiens
gagactccgtctcaa

SEQ ID NO: 231755 - DNA, 15 bp, Homo sapiens
tgagactccgtctca

SEQ ID NO: 231756 - DNA, 15 bp, Homo sapiens
gtgagactccgtctc

SEQ ID NO: 231757 - DNA, 15 bp, Homo sapiens
agtgagactccgtct

SEQ ID NO: 231758 - DNA, 15 bp, Homo sapiens
gagtgagactccgtc

SEQ ID NO: 231759 - DNA, 15 bp, Homo sapiens
agagtgagactccgt

SEQ ID NO: 231760 - DNA, 15 bp, Homo sapiens
cagagtgagactccg

SEQ ID NO: 231761 - DNA, 15 bp, Homo sapiens
acagagtgagactcc

SEQ ID NO: 231762 - DNA, 15 bp, Homo sapiens
gacagagtgagactc

SEQ ID NO: 231763 - DNA, 15 bp, Homo sapiens
tactccagcctgggc

SEQ ID NO: 231764 - DNA, 15 bp, Homo sapiens
gtactccagcctggg

SEQ ID NO: 231765 - DNA, 15 bp, Homo sapiens
tgtactccagcctgg

SEQ ID NO: 231766 - DNA, 15 bp, Homo sapiens
ctgtactccagcctg

SEQ ID NO: 231767 - DNA, 15 bp, Homo sapiens
actgtactccagcct

SEQ ID NO: 231768 - DNA, 15 bp, Homo sapiens
cactgtactccagcc

SEQ ID NO: 231769 - DNA, 15 bp, Homo sapiens
ccactgtactccagc

SEQ ID NO: 231770 - DNA, 15 bp, Homo sapiens
gccactgtactccag

SEQ ID NO: 231771 - DNA, 15 bp, Homo sapiens
cgccactgtactcca

SEQ ID NO: 231772 - DNA, 15 bp, Homo sapiens
gcgccactgtactcc

SEQ ID NO: 231773 - DNA, 15 bp, Homo sapiens
tgcgccactgtactc

SEQ ID NO: 231774 - DNA, 15 bp, Homo sapiens
ttgcgccactgtact

SEQ ID NO: 231775 - DNA, 15 bp, Homo sapiens
attgcgccactgtac

SEQ ID NO: 231776 - DNA, 15 bp, Homo sapiens
gattgcgccactgta

SEQ ID NO: 231777 - DNA, 15 bp, Homo sapiens
agattgcgccactgt

SEQ ID NO: 231778 - DNA, 15 bp, Homo sapiens
gagattgcgccactg

SEQ ID NO: 231779 - DNA, 15 bp, Homo sapiens
cgagattgcgccact

SEQ ID NO: 231780 - DNA, 15 bp, Homo sapiens
acgagattgcgccac

SEQ ID NO: 231781 - DNA, 15 bp, Homo sapiens
gacgagattgcgcca

SEQ ID NO: 231782 - DNA, 15 bp, Homo sapiens
agacgagattgcgcc

SEQ ID NO: 231783 - DNA, 15 bp, Homo sapiens
gagacgagattgcgc

SEQ ID NO: 231784 - DNA, 15 bp, Homo sapiens
tgagacgagattgcg

SEQ ID NO: 231785 - DNA, 15 bp, Homo sapiens
gtgagacgagattgc

SEQ ID NO: 231786 - DNA, 15 bp, Homo sapiens
agtgagacgagattg

SEQ ID NO: 231787 - DNA, 15 bp, Homo sapiens
cagtgagacgagatt

SEQ ID NO: 231788 - DNA, 15 bp, Homo sapiens
gcagtgagacgagat

SEQ ID NO: 231789 - DNA, 15 bp, Homo sapiens
tgcagtgagacgaga

SEQ ID NO: 231790 - DNA, 15 bp, Homo sapiens
ttgcagtgagacgag

SEQ ID NO: 231791 - DNA, 15 bp, Homo sapiens
tttgcagtgagacga

SEQ ID NO: 231792 - DNA, 15 bp, Homo sapiens
gtttgcagtgagacg

SEQ ID NO: 231793 - DNA, 15 bp, Homo sapiens
agtttgcagtgagac

SEQ ID NO: 231794 - DNA, 15 bp, Homo sapiens
gagtttgcagtgaga

SEQ ID NO: 231795 - DNA, 15 bp, Homo sapiens
ggagtttgcagtgag

SEQ ID NO: 231796 - DNA, 15 bp, Homo sapiens
tggagtttgcagtga

SEQ ID NO: 231797 - DNA, 15 bp, Homo sapiens
gtggagtttgcagtg

SEQ ID NO: 231798 - DNA, 15 bp, Homo sapiens
ggtggagtttgcagt

SEQ ID NO: 231799 - DNA, 15 bp, Homo sapiens
aggtggagtttgcag

SEQ ID NO: 231800 - DNA, 15 bp, Homo sapiens
gaggtggagtttgca

SEQ ID NO: 231801 - DNA, 15 bp, Homo sapiens
ggaggtggagtttgc

SEQ ID NO: 231802 - DNA, 15 bp, Homo sapiens
gggaggtggagtttg

SEQ ID NO: 231803 - DNA, 15 bp, Homo sapiens
cgggaggtggagttt

SEQ ID NO: 231804 - DNA, 15 bp, Homo sapiens
ccgggaggtggagtt

SEQ ID NO: 231805 - DNA, 15 bp, Homo sapiens
cccgggaggtggagt

SEQ ID NO: 231806 - DNA, 15 bp, Homo sapiens
acccgggaggtggag

SEQ ID NO: 231807 - DNA, 15 bp, Homo sapiens
aacccgggaggtgga

SEQ ID NO: 231808 - DNA, 15 bp, Homo sapiens
gaacccgggaggtgg

SEQ ID NO: 231809 - DNA, 15 bp, Homo sapiens
tgaacccgggaggtg

SEQ ID NO: 231810 - DNA, 15 bp, Homo sapiens
gtgaacccgggaggt

SEQ ID NO: 231811 - DNA, 15 bp, Homo sapiens
cgtgaacccgggagg

SEQ ID NO: 231812 - DNA, 15 bp, Homo sapiens
gcgtgaacccgggag

SEQ ID NO: 231813 - DNA, 15 bp, Homo sapiens
ggcgtgaacccggga

SEQ ID NO: 231814 - DNA, 15 bp, Homo sapiens
tggcgtgaacccggg

SEQ ID NO: 231815 - DNA, 15 bp, Homo sapiens
atggcgtgaacccgg

SEQ ID NO: 231816 - DNA, 15 bp, Homo sapiens
aatggcgtgaacccg

SEQ ID NO: 231817 - DNA, 15 bp, Homo sapiens
gaatggcgtgaaccc

SEQ ID NO: 231818 - DNA, 15 bp, Homo sapiens
agaatggcgtgaacc

SEQ ID NO: 231819 - DNA, 15 bp, Homo sapiens
gagaatggcgtgaac

SEQ ID NO: 231820 - DNA, 15 bp, Homo sapiens
ggagaatggcgtgaa

SEQ ID NO: 231821 - DNA, 15 bp, Homo sapiens
aggagaatggcgtga

SEQ ID NO: 231822 - DNA, 15 bp, Homo sapiens
caggagaatggcgtg

SEQ ID NO: 231823 - DNA, 15 bp, Homo sapiens
gcaggagaatggcgt

SEQ ID NO: 231824 - DNA, 15 bp, Homo sapiens
ggcaggagaatggcg

SEQ ID NO: 231825 - DNA, 15 bp, Homo sapiens
tgaggcaggagaatg

SEQ ID NO: 231826 - DNA, 15 bp, Homo sapiens
tgcctgtagtcccag

SEQ ID NO: 231827 - DNA, 15 bp, Homo sapiens
gtgcctgtagtccca

SEQ ID NO: 231828 - DNA, 15 bp, Homo sapiens
ggtgcctgtagtccc

SEQ ID NO: 231829 - DNA, 15 bp, Homo sapiens
gggtgcctgtagtcc

SEQ ID NO: 231830 - DNA, 15 bp, Homo sapiens
cgggtgcctgtagtc

SEQ ID NO: 231831 - DNA, 15 bp, Homo sapiens
gcgggtgcctgtagt

SEQ ID NO: 231832 - DNA, 15 bp, Homo sapiens
ggcgggtgcctgtag

SEQ ID NO: 231833 - DNA, 15 bp, Homo sapiens
tggcgggtgcctgta

SEQ ID NO: 231834 - DNA, 15 bp, Homo sapiens
gtggcgggtgcctgt

SEQ ID NO: 231835 - DNA, 15 bp, Homo sapiens
ggtggcgggtgcctg

SEQ ID NO: 231836 - DNA, 15 bp, Homo sapiens
tggtggcgggtgcct

SEQ ID NO: 231837 - DNA, 15 bp, Homo sapiens
gtggtggcgggtgcc

SEQ ID NO: 231838 - DNA, 15 bp, Homo sapiens
cgtggtggcgggtgc

SEQ ID NO: 231839 - DNA, 15 bp, Homo sapiens
gcgtggtggcgggtg

SEQ ID NO: 231840 - DNA, 15 bp, Homo sapiens
ggcgtggtggcgggt

SEQ ID NO: 231841 - DNA, 15 bp, Homo sapiens
gggcgtggtggcggg

SEQ ID NO: 231842 - DNA, 15 bp, Homo sapiens
cgggcgtggtggcgg

SEQ ID NO: 231843 - DNA, 15 bp, Homo sapiens
ccgggcgtggtggcg

SEQ ID NO: 231844 - DNA, 15 bp, Homo sapiens
caaaaaattagccgg

SEQ ID NO: 231845 - DNA, 15 bp, Homo sapiens
acaaaaaattagccg

SEQ ID NO: 231846 - DNA, 15 bp, Homo sapiens
taaaaaaaaatacaa

SEQ ID NO: 231847 - DNA, 15 bp, Homo sapiens
ctaaaaaaaaataca

SEQ ID NO: 231848 - DNA, 15 bp, Homo sapiens
actaaaaaaaaatac

SEQ ID NO: 231849 - DNA, 15 bp, Homo sapiens
tactaaaaaaaaata

SEQ ID NO: 231850 - DNA, 15 bp, Homo sapiens
ctactaaaaaaaaat

SEQ ID NO: 231851 - DNA, 15 bp, Homo sapiens
ctctactaaaaaaaa

SEQ ID NO: 231852 - DNA, 15 bp, Homo sapiens
cctctactaaaaaaa

SEQ ID NO: 231853 - DNA, 15 bp, Homo sapiens
acctctactaaaaaa

SEQ ID NO: 231854 - DNA, 15 bp, Homo sapiens
cacctctactaaaaa

SEQ ID NO: 231855 - DNA, 15 bp, Homo sapiens
ccacctctactaaaa

SEQ ID NO: 231856 - DNA, 15 bp, Homo sapiens
cccacctctactaaa

SEQ ID NO: 231857 - DNA, 15 bp, Homo sapiens
ccccacctctactaa

SEQ ID NO: 231858 - DNA, 15 bp, Homo sapiens
accccacctctacta

SEQ ID NO: 231859 - DNA, 15 bp, Homo sapiens
aaccccacctctact

SEQ ID NO: 231860 - DNA, 15 bp, Homo sapiens
aaaccccacctctac

SEQ ID NO: 231861 - DNA, 15 bp, Homo sapiens
gaaaccccacctcta

SEQ ID NO: 231862 - DNA, 15 bp, Homo sapiens
tgaaaccccacctct

SEQ ID NO: 231863 - DNA, 15 bp, Homo sapiens
gtgaaaccccacctc

SEQ ID NO: 231864 - DNA, 15 bp, Homo sapiens
agtgaaaccccacct

SEQ ID NO: 231865 - DNA, 15 bp, Homo sapiens
cagtgaaaccccacc

SEQ ID NO: 231866 - DNA, 15 bp, Homo sapiens
acagtgaaaccccac

SEQ ID NO: 231867 - DNA, 15 bp, Homo sapiens
cacagtgaaacccca

SEQ ID NO: 231868 - DNA, 15 bp, Homo sapiens
acacagtgaaacccc

SEQ ID NO: 231869 - DNA, 15 bp, Homo sapiens
aacacagtgaaaccc

SEQ ID NO: 231870 - DNA, 15 bp, Homo sapiens
taacacagtgaaacc

SEQ ID NO: 231871 - DNA, 15 bp, Homo sapiens
ataacacagtgaaac

SEQ ID NO: 231872 - DNA, 15 bp, Homo sapiens
gataacacagtgaaa

SEQ ID NO: 231873 - DNA, 15 bp, Homo sapiens
ggataacacagtgaa

SEQ ID NO: 231874 - DNA, 15 bp, Homo sapiens
tggataacacagtga

SEQ ID NO: 231875 - DNA, 15 bp, Homo sapiens
ctggataacacagtg

SEQ ID NO: 231876 - DNA, 15 bp, Homo sapiens
cctggataacacagt

SEQ ID NO: 231877 - DNA, 15 bp, Homo sapiens
tcctggataacacag

SEQ ID NO: 231878 - DNA, 15 bp, Homo sapiens
atcctggataacaca

SEQ ID NO: 231879 - DNA, 15 bp, Homo sapiens
catcctggataacac

SEQ ID NO: 231880 - DNA, 15 bp, Homo sapiens
ccatcctggataaca

SEQ ID NO: 231881 - DNA, 15 bp, Homo sapiens
accatcctggataac

SEQ ID NO: 231882 - DNA, 15 bp, Homo sapiens
gaccatcctggataa

SEQ ID NO: 231883 - DNA, 15 bp, Homo sapiens
agaccatcctggata

SEQ ID NO: 231884 - DNA, 15 bp, Homo sapiens
aagaccatcctggat

SEQ ID NO: 231885 - DNA, 15 bp, Homo sapiens
caagaccatcctgga

SEQ ID NO: 231886 - DNA, 15 bp, Homo sapiens
tcaagaccatcctgg

SEQ ID NO: 231887 - DNA, 15 bp, Homo sapiens
atcaagaccatcctg

SEQ ID NO: 231888 - DNA, 15 bp, Homo sapiens
gatcaagaccatcct

SEQ ID NO: 231889 - DNA, 15 bp, Homo sapiens
agatcaagaccatcc

SEQ ID NO: 231890 - DNA, 15 bp, Homo sapiens
gagatcaagaccatc

SEQ ID NO: 231891 - DNA, 15 bp, Homo sapiens
ggagatcaagaccat

SEQ ID NO: 231892 - DNA, 15 bp, Homo sapiens
aggagatcaagacca

SEQ ID NO: 231893 - DNA, 15 bp, Homo sapiens
caggagatcaagacc

SEQ ID NO: 231894 - DNA, 15 bp, Homo sapiens
tcaggagatcaagac

SEQ ID NO: 231895 - DNA, 15 bp, Homo sapiens
gtcaggagatcaaga

SEQ ID NO: 231896 - DNA, 15 bp, Homo sapiens
ggtcaggagatcaag

SEQ ID NO: 231897 - DNA, 15 bp, Homo sapiens
aggtcaggagatcaa

SEQ ID NO: 231898 - DNA, 15 bp, Homo sapiens
gaggtcaggagatca

SEQ ID NO: 231899 - DNA, 15 bp, Homo sapiens
aggtggatcacgagg

SEQ ID NO: 231900 - DNA, 15 bp, Homo sapiens
caggtggatcacgag

SEQ ID NO: 231901 - DNA, 15 bp, Homo sapiens
gcaggtggatcacga

SEQ ID NO: 231902 - DNA, 15 bp, Homo sapiens
tgaggcaggtggatc

SEQ ID NO: 231903 - DNA, 15 bp, Homo sapiens
ctgaggcaggtggat

SEQ ID NO: 231904 - DNA, 15 bp, Homo sapiens
gctgaggcaggtgga

SEQ ID NO: 231905 - DNA, 15 bp, Homo sapiens
ggctgaggcaggtgg

SEQ ID NO: 231906 - DNA, 15 bp, Homo sapiens
aggctgaggcaggtg

SEQ ID NO: 231907 - DNA, 15 bp, Homo sapiens
gaggctgaggcaggt

SEQ ID NO: 231908 - DNA, 15 bp, Homo sapiens
tggtggctcacgcct

SEQ ID NO: 231909 - DNA, 15 bp, Homo sapiens
atggtggctcacgcc

SEQ ID NO: 231910 - DNA, 15 bp, Homo sapiens
catggtggctcacgc

SEQ ID NO: 231911 - DNA, 15 bp, Homo sapiens
gcatggtggctcacg

SEQ ID NO: 231912 - DNA, 15 bp, Homo sapiens
ggcatggtggctcac

SEQ ID NO: 231913 - DNA, 15 bp, Homo sapiens
gggcatggtggctca

SEQ ID NO: 231914 - DNA, 15 bp, Homo sapiens
tgggcatggtggctc

SEQ ID NO: 231915 - DNA, 15 bp, Homo sapiens
ctgggcatggtggct

SEQ ID NO: 231916 - DNA, 15 bp, Homo sapiens
gctgggcatggtggc

SEQ ID NO: 231917 - DNA, 15 bp, Homo sapiens
ggctgggcatggtgg

SEQ ID NO: 231918 - DNA, 15 bp, Homo sapiens
gggctgggcatggtg

SEQ ID NO: 231919 - DNA, 15 bp, Homo sapiens
cgggctgggcatggt

SEQ ID NO: 231920 - DNA, 15 bp, Homo sapiens
gcgggctgggcatgg

SEQ ID NO: 231921 - DNA, 15 bp, Homo sapiens
agcgggctgggcatg

SEQ ID NO: 231922 - DNA, 15 bp, Homo sapiens
tagcgggctgggcat

SEQ ID NO: 231923 - DNA, 15 bp, Homo sapiens
ttagcgggctgggca

SEQ ID NO: 231924 - DNA, 15 bp, Homo sapiens
attagcgggctgggc

SEQ ID NO: 231925 - DNA, 15 bp, Homo sapiens
aattagcgggctggg

SEQ ID NO: 231926 - DNA, 15 bp, Homo sapiens
taattagcgggctgg

SEQ ID NO: 231927 - DNA, 15 bp, Homo sapiens
ataattagcgggctg

SEQ ID NO: 231928 - DNA, 15 bp, Homo sapiens
aataattagcgggct

SEQ ID NO: 231929 - DNA, 15 bp, Homo sapiens
aaataattagcgggc

SEQ ID NO: 231930 - DNA, 15 bp, Homo sapiens
gaaataattagcggg

SEQ ID NO: 231931 - DNA, 15 bp, Homo sapiens
tgaaataattagcgg

SEQ ID NO: 231932 - DNA, 15 bp, Homo sapiens
ttgaaataattagcg

SEQ ID NO: 231933 - DNA, 15 bp, Homo sapiens
attgaaataattagc

SEQ ID NO: 231934 - DNA, 15 bp, Homo sapiens
aattgaaataattag

SEQ ID NO: 231935 - DNA, 15 bp, Homo sapiens
aaattgaaataatta

SEQ ID NO: 231936 - DNA, 15 bp, Homo sapiens
caaattgaaataatt

SEQ ID NO: 231937 - DNA, 15 bp, Homo sapiens
tcaaattgaaataat

SEQ ID NO: 231938 - DNA, 15 bp, Homo sapiens
gtcaaattgaaataa

SEQ ID NO: 231939 - DNA, 15 bp, Homo sapiens
ggtcaaattgaaata

SEQ ID NO: 231940 - DNA, 15 bp, Homo sapiens
aggtcaaattgaaat

SEQ ID NO: 231941 - DNA, 15 bp, Homo sapiens
aaggtcaaattgaaa

SEQ ID NO: 231942 - DNA, 15 bp, Homo sapiens
caaggtcaaattgaa

SEQ ID NO: 231943 - DNA, 15 bp, Homo sapiens
tcaaggtcaaattga

SEQ ID NO: 231944 - DNA, 15 bp, Homo sapiens
gtcaaggtcaaattg

SEQ ID NO: 231945 - DNA, 15 bp, Homo sapiens
tgtcaaggtcaaatt

SEQ ID NO: 231946 - DNA, 15 bp, Homo sapiens
gtgtcaaggtcaaat

SEQ ID NO: 231947 - DNA, 15 bp, Homo sapiens
agtgtcaaggtcaaa

SEQ ID NO: 231948 - DNA, 15 bp, Homo sapiens
cagtgtcaaggtcaa

SEQ ID NO: 231949 - DNA, 15 bp, Homo sapiens
tcagtgtcaaggtca

SEQ ID NO: 231950 - DNA, 15 bp, Homo sapiens
ctcagtgtcaaggtc

SEQ ID NO: 231951 - DNA, 15 bp, Homo sapiens
gctcagtgtcaaggt

SEQ ID NO: 231952 - DNA, 15 bp, Homo sapiens
ggctcagtgtcaagg

SEQ ID NO: 231953 - DNA, 15 bp, Homo sapiens
aggctcagtgtcaag

SEQ ID NO: 231954 - DNA, 15 bp, Homo sapiens
caggctcagtgtcaa

SEQ ID NO: 231955 - DNA, 15 bp, Homo sapiens
gcaggctcagtgtca

SEQ ID NO: 231956 - DNA, 15 bp, Homo sapiens
ggcaggctcagtgtc

SEQ ID NO: 231957 - DNA, 15 bp, Homo sapiens
tggcaggctcagtgt

SEQ ID NO: 231958 - DNA, 15 bp, Homo sapiens
ttggcaggctcagtg

SEQ ID NO: 231959 - DNA, 15 bp, Homo sapiens
cttggcaggctcagt

SEQ ID NO: 231960 - DNA, 15 bp, Homo sapiens
acttggcaggctcag

SEQ ID NO: 231961 - DNA, 15 bp, Homo sapiens
tacttggcaggctca

SEQ ID NO: 231962 - DNA, 15 bp, Homo sapiens
ctacttggcaggctc

SEQ ID NO: 231963 - DNA, 15 bp, Homo sapiens
cctacttggcaggct

SEQ ID NO: 231964 - DNA, 15 bp, Homo sapiens
acctacttggcaggc

SEQ ID NO: 231965 - DNA, 15 bp, Homo sapiens
aacctacttggcagg

SEQ ID NO: 231966 - DNA, 15 bp, Homo sapiens
gaacctacttggcag

SEQ ID NO: 231967 - DNA, 15 bp, Homo sapiens
tgaacctacttggca

SEQ ID NO: 231968 - DNA, 15 bp, Homo sapiens
ttgaacctacttggc

SEQ ID NO: 231969 - DNA, 15 bp, Homo sapiens
cttgaacctacttgg

SEQ ID NO: 231970 - DNA, 15 bp, Homo sapiens
gcttgaacctacttg

SEQ ID NO: 231971 - DNA, 15 bp, Homo sapiens
tgcttgaacctactt

SEQ ID NO: 231972 - DNA, 15 bp, Homo sapiens
atgcttgaacctact

SEQ ID NO: 231973 - DNA, 15 bp, Homo sapiens
aatgcttgaacctac

SEQ ID NO: 231974 - DNA, 15 bp, Homo sapiens
aaatgcttgaaccta

SEQ ID NO: 231975 - DNA, 15 bp, Homo sapiens
aaaatgcttgaacct

SEQ ID NO: 231976 - DNA, 15 bp, Homo sapiens
caaaatgcttgaacc

SEQ ID NO: 231977 - DNA, 15 bp, Homo sapiens
tcaaaatgcttgaac

SEQ ID NO: 231978 - DNA, 15 bp, Homo sapiens
atcaaaatgcttgaa

SEQ ID NO: 231979 - DNA, 15 bp, Homo sapiens
catcaaaatgcttga

SEQ ID NO: 231980 - DNA, 15 bp, Homo sapiens
ccatcaaaatgcttg

SEQ ID NO: 231981 - DNA, 15 bp, Homo sapiens
gccatcaaaatgctt

SEQ ID NO: 231982 - DNA, 15 bp, Homo sapiens
ggccatcaaaatgct

SEQ ID NO: 231983 - DNA, 15 bp, Homo sapiens
gggccatcaaaatgc

SEQ ID NO: 231984 - DNA, 15 bp, Homo sapiens
ggggccatcaaaatg

SEQ ID NO: 231985 - DNA, 15 bp, Homo sapiens
aggggccatcaaaat

SEQ ID NO: 231986 - DNA, 15 bp, Homo sapiens
aaggggccatcaaaa

SEQ ID NO: 231987 - DNA, 15 bp, Homo sapiens
aaaggggccatcaaa

SEQ ID NO: 231988 - DNA, 15 bp, Homo sapiens
taaaggggccatcaa

SEQ ID NO: 231989 - DNA, 15 bp, Homo sapiens
gtaaaggggccatca

SEQ ID NO: 231990 - DNA, 15 bp, Homo sapiens
tgtaaaggggccatc

SEQ ID NO: 231991 - DNA, 15 bp, Homo sapiens
ctgtaaaggggccat

SEQ ID NO: 231992 - DNA, 15 bp, Homo sapiens
cctgtaaaggggcca

SEQ ID NO: 231993 - DNA, 15 bp, Homo sapiens
acctgtaaaggggcc

SEQ ID NO: 231994 - DNA, 15 bp, Homo sapiens
aacctgtaaaggggc

SEQ ID NO: 231995 - DNA, 15 bp, Homo sapiens
caacctgtaaagggg

SEQ ID NO: 231996 - DNA, 15 bp, Homo sapiens
ccaacctgtaaaggg

SEQ ID NO: 231997 - DNA, 15 bp, Homo sapiens
cccaacctgtaaagg

SEQ ID NO: 231998 - DNA, 15 bp, Homo sapiens
tcccaacctgtaaag

SEQ ID NO: 231999 - DNA, 15 bp, Homo sapiens
ttcccaacctgtaaa

SEQ ID NO: 232000 - DNA, 15 bp, Homo sapiens
tttcccaacctgtaa

SEQ ID NO: 232001 - DNA, 15 bp, Homo sapiens
ctttcccaacctgta

SEQ ID NO: 232002 - DNA, 15 bp, Homo sapiens
gctttcccaacctgt

SEQ ID NO: 232003 - DNA, 15 bp, Homo sapiens
agctttcccaacctg

SEQ ID NO: 232004 - DNA, 15 bp, Homo sapiens
tagctttcccaacct

SEQ ID NO: 232005 - DNA, 15 bp, Homo sapiens
ttagctttcccaacc

SEQ ID NO: 232006 - DNA, 15 bp, Homo sapiens
attagctttcccaac

SEQ ID NO: 232007 - DNA, 15 bp, Homo sapiens
aattagctttcccaa

SEQ ID NO: 232008 - DNA, 15 bp, Homo sapiens
aaattagctttccca

SEQ ID NO: 232009 - DNA, 15 bp, Homo sapiens
taaattagctttccc

SEQ ID NO: 232010 - DNA, 15 bp, Homo sapiens
ataaattagctttcc

SEQ ID NO: 232011 - DNA, 15 bp, Homo sapiens
gataaattagctttc

SEQ ID NO: 232012 - DNA, 15 bp, Homo sapiens
agataaattagcttt

SEQ ID NO: 232013 - DNA, 15 bp, Homo sapiens
cagataaattagctt

SEQ ID NO: 232014 - DNA, 15 bp, Homo sapiens
acagataaattagct

SEQ ID NO: 232015 - DNA, 15 bp, Homo sapiens
gacagataaattagc

SEQ ID NO: 232016 - DNA, 15 bp, Homo sapiens
ggacagataaattag

SEQ ID NO: 232017 - DNA, 15 bp, Homo sapiens
tggacagataaatta

SEQ ID NO: 232018 - DNA, 15 bp, Homo sapiens
ttggacagataaatt

SEQ ID NO: 232019 - DNA, 15 bp, Homo sapiens
cttggacagataaat

SEQ ID NO: 232020 - DNA, 15 bp, Homo sapiens
ccttggacagataaa

SEQ ID NO: 232021 - DNA, 15 bp, Homo sapiens
gccttggacagataa

SEQ ID NO: 232022 - DNA, 15 bp, Homo sapiens
ggccttggacagata

SEQ ID NO: 232023 - DNA, 15 bp, Homo sapiens
cggccttggacagat

SEQ ID NO: 232024 - DNA, 15 bp, Homo sapiens
tcggccttggacaga

SEQ ID NO: 232025 - DNA, 15 bp, Homo sapiens
ttcggccttggacag

SEQ ID NO: 232026 - DNA, 15 bp, Homo sapiens
attcggccttggaca

SEQ ID NO: 232027 - DNA, 15 bp, Homo sapiens
aattcggccttggac

SEQ ID NO: 232028 - DNA, 15 bp, Homo sapiens
gaattcggccttgga

SEQ ID NO: 232029 - DNA, 15 bp, Homo sapiens
agaattcggccttgg

SEQ ID NO: 232030 - DNA, 15 bp, Homo sapiens
cagaattcggccttg

SEQ ID NO: 232031 - DNA, 15 bp, Homo sapiens
tcagaattcggcctt

SEQ ID NO: 232032 - DNA, 15 bp, Homo sapiens
ttcagaattcggcct

SEQ ID NO: 232033 - DNA, 15 bp, Homo sapiens
tttcagaattcggcc

SEQ ID NO: 232034 - DNA, 15 bp, Homo sapiens
gtttcagaattcggc

SEQ ID NO: 232035 - DNA, 15 bp, Homo sapiens
agtttcagaattcgg

SEQ ID NO: 232036 - DNA, 15 bp, Homo sapiens
cagtttcagaattcg

SEQ ID NO: 232037 - DNA, 15 bp, Homo sapiens
tcagtttcagaattc

SEQ ID NO: 232038 - DNA, 15 bp, Homo sapiens
ctcagtttcagaatt

SEQ ID NO: 232039 - DNA, 15 bp, Homo sapiens
actcagtttcagaat

SEQ ID NO: 232040 - DNA, 15 bp, Homo sapiens
gactcagtttcagaa

SEQ ID NO: 232041 - DNA, 15 bp, Homo sapiens
agactcagtttcaga

SEQ ID NO: 232042 - DNA, 15 bp, Homo sapiens
aagactcagtttcag

SEQ ID NO: 232043 - DNA, 15 bp, Homo sapiens
taagactcagtttca

SEQ ID NO: 232044 - DNA, 15 bp, Homo sapiens
ttaagactcagtttc

SEQ ID NO: 232045 - DNA, 15 bp, Homo sapiens
gttaagactcagttt

SEQ ID NO: 232046 - DNA, 15 bp, Homo sapiens
agttaagactcagtt

SEQ ID NO: 232047 - DNA, 15 bp, Homo sapiens
cagttaagactcagt

SEQ ID NO: 232048 - DNA, 15 bp, Homo sapiens
gcagttaagactcag

SEQ ID NO: 232049 - DNA, 15 bp, Homo sapiens
ggcagttaagactca

SEQ ID NO: 232050 - DNA, 15 bp, Homo sapiens
tggcagttaagactc

SEQ ID NO: 232051 - DNA, 15 bp, Homo sapiens
ttggcagttaagact

SEQ ID NO: 232052 - DNA, 15 bp, Homo sapiens
tttggcagttaagac

SEQ ID NO: 232053 - DNA, 15 bp, Homo sapiens
ttttggcagttaaga

SEQ ID NO: 232054 - DNA, 15 bp, Homo sapiens
tttttggcagttaag

SEQ ID NO: 232055 - DNA, 15 bp, Homo sapiens
atttttggcagttaa

SEQ ID NO: 232056 - DNA, 15 bp, Homo sapiens
aatttttggcagtta

SEQ ID NO: 232057 - DNA, 15 bp, Homo sapiens
gaatttttggcagtt

SEQ ID NO: 232058 - DNA, 15 bp, Homo sapiens
agaatttttggcagt

SEQ ID NO: 232059 - DNA, 15 bp, Homo sapiens
aagaatttttggcag

SEQ ID NO: 232060 - DNA, 15 bp, Homo sapiens
taagaatttttggca

SEQ ID NO: 232061 - DNA, 15 bp, Homo sapiens
ataagaatttttggc

SEQ ID NO: 232062 - DNA, 15 bp, Homo sapiens
gataagaatttttgg

SEQ ID NO: 232063 - DNA, 15 bp, Homo sapiens
tgataagaatttttg

SEQ ID NO: 232064 - DNA, 15 bp, Homo sapiens
atgataagaattttt

SEQ ID NO: 232065 - DNA, 15 bp, Homo sapiens
gatgataagaatttt

SEQ ID NO: 232066 - DNA, 15 bp, Homo sapiens
tgatgataagaattt

SEQ ID NO: 232067 - DNA, 15 bp, Homo sapiens
ttgatgataagaatt

SEQ ID NO: 232068 - DNA, 15 bp, Homo sapiens
attgatgataagaat

SEQ ID NO: 232069 - DNA, 15 bp, Homo sapiens
aattgatgataagaa

SEQ ID NO: 232070 - DNA, 15 bp, Homo sapiens
aaattgatgataaga

SEQ ID NO: 232071 - DNA, 15 bp, Homo sapiens
gaaattgatgataag

SEQ ID NO: 232072 - DNA, 15 bp, Homo sapiens
agaaattgatgataa

SEQ ID NO: 232073 - DNA, 15 bp, Homo sapiens
aagaaattgatgata

SEQ ID NO: 232074 - DNA, 15 bp, Homo sapiens
gaagaaattgatgat

SEQ ID NO: 232075 - DNA, 15 bp, Homo sapiens
agaagaaattgatga

SEQ ID NO: 232076 - DNA, 15 bp, Homo sapiens
aagaagaaattgatg

SEQ ID NO: 232077 - DNA, 15 bp, Homo sapiens
gaagaagaaattgat

SEQ ID NO: 232078 - DNA, 15 bp, Homo sapiens
agaagaagaaattga

SEQ ID NO: 232079 - DNA, 15 bp, Homo sapiens
cagaagaagaaattg

SEQ ID NO: 232080 - DNA, 15 bp, Homo sapiens
ccagaagaagaaatt

SEQ ID NO: 232081 - DNA, 15 bp, Homo sapiens
cccagaagaagaaat

SEQ ID NO: 232082 - DNA, 15 bp, Homo sapiens
acccagaagaagaaa

SEQ ID NO: 232083 - DNA, 15 bp, Homo sapiens
aacccagaagaagaa

SEQ ID NO: 232084 - DNA, 15 bp, Homo sapiens
caacccagaagaaga

SEQ ID NO: 232085 - DNA, 15 bp, Homo sapiens
ccaacccagaagaag

SEQ ID NO: 232086 - DNA, 15 bp, Homo sapiens
cccaacccagaagaa

SEQ ID NO: 232087 - DNA, 15 bp, Homo sapiens
gcccaacccagaaga

SEQ ID NO: 232088 - DNA, 15 bp, Homo sapiens
tgcccaacccagaag

SEQ ID NO: 232089 - DNA, 15 bp, Homo sapiens
gtgcccaacccagaa

SEQ ID NO: 232090 - DNA, 15 bp, Homo sapiens
tgtgcccaacccaga

SEQ ID NO: 232091 - DNA, 15 bp, Homo sapiens
ctgtgcccaacccag

SEQ ID NO: 232092 - DNA, 15 bp, Homo sapiens
actgtgcccaaccca

SEQ ID NO: 232093 - DNA, 15 bp, Homo sapiens
cactgtgcccaaccc

SEQ ID NO: 232094 - DNA, 15 bp, Homo sapiens
ccactgtgcccaacc

SEQ ID NO: 232095 - DNA, 15 bp, Homo sapiens
gccactgtgcccaac

SEQ ID NO: 232096 - DNA, 15 bp, Homo sapiens
agccactgtgcccaa

SEQ ID NO: 232097 - DNA, 15 bp, Homo sapiens
gagccactgtgccca

SEQ ID NO: 232098 - DNA, 15 bp, Homo sapiens
tgagccactgtgccc

SEQ ID NO: 232099 - DNA, 15 bp, Homo sapiens
atgagccactgtgcc

SEQ ID NO: 232100 - DNA, 15 bp, Homo sapiens
catgagccactgtgc

SEQ ID NO: 232101 - DNA, 15 bp, Homo sapiens
gcatgagccactgtg

SEQ ID NO: 232102 - DNA, 15 bp, Homo sapiens
ggcatgagccactgt

SEQ ID NO: 232103 - DNA, 15 bp, Homo sapiens
aggcatgagccactg

SEQ ID NO: 232104 - DNA, 15 bp, Homo sapiens
caggcatgagccact

SEQ ID NO: 232105 - DNA, 15 bp, Homo sapiens
acaggcatgagccac

SEQ ID NO: 232106 - DNA, 15 bp, Homo sapiens
tacaggcatgagcca

SEQ ID NO: 232107 - DNA, 15 bp, Homo sapiens
ttacaggcatgagcc

SEQ ID NO: 232108 - DNA, 15 bp, Homo sapiens
tttacaggcatgagc

SEQ ID NO: 232109 - DNA, 15 bp, Homo sapiens
ctttacaggcatgag

SEQ ID NO: 232110 - DNA, 15 bp, Homo sapiens
gctttacaggcatga

SEQ ID NO: 232111 - DNA, 15 bp, Homo sapiens
ggctttacaggcatg

SEQ ID NO: 232112 - DNA, 15 bp, Homo sapiens
tggctttacaggcat

SEQ ID NO: 232113 - DNA, 15 bp, Homo sapiens
ctggctttacaggca

SEQ ID NO: 232114 - DNA, 15 bp, Homo sapiens
gctggctttacaggc

SEQ ID NO: 232115 - DNA, 15 bp, Homo sapiens
tgctggctttacagg

SEQ ID NO: 232116 - DNA, 15 bp, Homo sapiens
ttgctggctttacag

SEQ ID NO: 232117 - DNA, 15 bp, Homo sapiens
attgctggctttaca

SEQ ID NO: 232118 - DNA, 15 bp, Homo sapiens
aattgctggctttac

SEQ ID NO: 232119 - DNA, 15 bp, Homo sapiens
aaattgctggcttta

SEQ ID NO: 232120 - DNA, 15 bp, Homo sapiens
caaattgctggcttt

SEQ ID NO: 232121 - DNA, 15 bp, Homo sapiens
tcaaattgctggctt

SEQ ID NO: 232122 - DNA, 15 bp, Homo sapiens
ctcaaattgctggct

SEQ ID NO: 232123 - DNA, 15 bp, Homo sapiens
tctcaaattgctggc

SEQ ID NO: 232124 - DNA, 15 bp, Homo sapiens
ctctcaaattgctgg

SEQ ID NO: 232125 - DNA, 15 bp, Homo sapiens
cctctcaaattgctg

SEQ ID NO: 232126 - DNA, 15 bp, Homo sapiens
gcctctcaaattgct

SEQ ID NO: 232127 - DNA, 15 bp, Homo sapiens
tgcctctcaaattgc

SEQ ID NO: 232128 - DNA, 15 bp, Homo sapiens
atgcctctcaaattg

SEQ ID NO: 232129 - DNA, 15 bp, Homo sapiens
gatgcctctcaaatt

SEQ ID NO: 232130 - DNA, 15 bp, Homo sapiens
tgatgcctctcaaat

SEQ ID NO: 232131 - DNA, 15 bp, Homo sapiens
atgatgcctctcaaa

SEQ ID NO: 232132 - DNA, 15 bp, Homo sapiens
catgatgcctctcaa

SEQ ID NO: 232133 - DNA, 15 bp, Homo sapiens
tcatgatgcctctca

SEQ ID NO: 232134 - DNA, 15 bp, Homo sapiens
atcatgatgcctctc

SEQ ID NO: 232135 - DNA, 15 bp, Homo sapiens
catcatgatgcctct

SEQ ID NO: 232136 - DNA, 15 bp, Homo sapiens
gcatcatgatgcctc

SEQ ID NO: 232137 - DNA, 15 bp, Homo sapiens
tgcatcatgatgcct

SEQ ID NO: 232138 - DNA, 15 bp, Homo sapiens
ttgcatcatgatgcc

SEQ ID NO: 232139 - DNA, 15 bp, Homo sapiens
cttgcatcatgatgc

SEQ ID NO: 232140 - DNA, 15 bp, Homo sapiens
tcttgcatcatgatg

SEQ ID NO: 232141 - DNA, 15 bp, Homo sapiens
ctcttgcatcatgat

SEQ ID NO: 232142 - DNA, 15 bp, Homo sapiens
cctcttgcatcatga

SEQ ID NO: 232143 - DNA, 15 bp, Homo sapiens
tcctcttgcatcatg

SEQ ID NO: 232144 - DNA, 15 bp, Homo sapiens
ttcctcttgcatcat

SEQ ID NO: 232145 - DNA, 15 bp, Homo sapiens
cttcctcttgcatca

SEQ ID NO: 232146 - DNA, 15 bp, Homo sapiens
tcttcctcttgcatc

SEQ ID NO: 232147 - DNA, 15 bp, Homo sapiens
ctcttcctcttgcat

SEQ ID NO: 232148 - DNA, 15 bp, Homo sapiens
cctcttcctcttgca

SEQ ID NO: 232149 - DNA, 15 bp, Homo sapiens
tcctcttcctcttgc

SEQ ID NO: 232150 - DNA, 15 bp, Homo sapiens
atcctcttcctcttg

SEQ ID NO: 232151 - DNA, 15 bp, Homo sapiens
aatcctcttcctctt

SEQ ID NO: 232152 - DNA, 15 bp, Homo sapiens
caatcctcttcctct

SEQ ID NO: 232153 - DNA, 15 bp, Homo sapiens
tcaatcctcttcctc

SEQ ID NO: 232154 - DNA, 15 bp, Homo sapiens
ctcaatcctcttcct

SEQ ID NO: 232155 - DNA, 15 bp, Homo sapiens
actcaatcctcttcc

SEQ ID NO: 232156 - DNA, 15 bp, Homo sapiens
cactcaatcctcttc

SEQ ID NO: 232157 - DNA, 15 bp, Homo sapiens
tcactcaatcctctt

SEQ ID NO: 232158 - DNA, 15 bp, Homo sapiens
ttcactcaatcctct

SEQ ID NO: 232159 - DNA, 15 bp, Homo sapiens
cttcactcaatcctc

SEQ ID NO: 232160 - DNA, 15 bp, Homo sapiens
gcttcactcaatcct

SEQ ID NO: 232161 - DNA, 15 bp, Homo sapiens
agcttcactcaatcc

SEQ ID NO: 232162 - DNA, 15 bp, Homo sapiens
tagcttcactcaatc

SEQ ID NO: 232163 - DNA, 15 bp, Homo sapiens
ctagcttcactcaat

SEQ ID NO: 232164 - DNA, 15 bp, Homo sapiens
cctagcttcactcaa

SEQ ID NO: 232165 - DNA, 15 bp, Homo sapiens
tcctagcttcactca

SEQ ID NO: 232166 - DNA, 15 bp, Homo sapiens
ctcctagcttcactc

SEQ ID NO: 232167 - DNA, 15 bp, Homo sapiens
actcctagcttcact

SEQ ID NO: 232168 - DNA, 15 bp, Homo sapiens
aactcctagcttcac

SEQ ID NO: 232169 - DNA, 15 bp, Homo sapiens
aaactcctagcttca

SEQ ID NO: 232170 - DNA, 15 bp, Homo sapiens
caaactcctagcttc

SEQ ID NO: 232171 - DNA, 15 bp, Homo sapiens
ccaaactcctagctt

SEQ ID NO: 232172 - DNA, 15 bp, Homo sapiens
cccaaactcctagct

SEQ ID NO: 232173 - DNA, 15 bp, Homo sapiens
tcccaaactcctagc

SEQ ID NO: 232174 - DNA, 15 bp, Homo sapiens
gtcccaaactcctag

SEQ ID NO: 232175 - DNA, 15 bp, Homo sapiens
ggtcccaaactccta

SEQ ID NO: 232176 - DNA, 15 bp, Homo sapiens
tggtcccaaactcct

SEQ ID NO: 232177 - DNA, 15 bp, Homo sapiens
ctggtcccaaactcc

SEQ ID NO: 232178 - DNA, 15 bp, Homo sapiens
gctggtcccaaactc

SEQ ID NO: 232179 - DNA, 15 bp, Homo sapiens
ggctggtcccaaact

SEQ ID NO: 232180 - DNA, 15 bp, Homo sapiens
aggctggtcccaaac

SEQ ID NO: 232181 - DNA, 15 bp, Homo sapiens
caggctggtcccaaa

SEQ ID NO: 232182 - DNA, 15 bp, Homo sapiens
ccaggctggtcccaa

SEQ ID NO: 232183 - DNA, 15 bp, Homo sapiens
cccaggctggtccca

SEQ ID NO: 232184 - DNA, 15 bp, Homo sapiens
gcccaggctggtccc

SEQ ID NO: 232185 - DNA, 15 bp, Homo sapiens
tgcccaggctggtcc

SEQ ID NO: 232186 - DNA, 15 bp, Homo sapiens
ttgcccaggctggtc

SEQ ID NO: 232187 - DNA, 15 bp, Homo sapiens
gttgcccaggctggt

SEQ ID NO: 232188 - DNA, 15 bp, Homo sapiens
atgttgcccaggctg

SEQ ID NO: 232189 - DNA, 15 bp, Homo sapiens
tatgttgcccaggct

SEQ ID NO: 232190 - DNA, 15 bp, Homo sapiens
ctatgttgcccaggc

SEQ ID NO: 232191 - DNA, 15 bp, Homo sapiens
actatgttgcccagg

SEQ ID NO: 232192 - DNA, 15 bp, Homo sapiens
cactatgttgcccag

SEQ ID NO: 232193 - DNA, 15 bp, Homo sapiens
tcactatgttgccca

SEQ ID NO: 232194 - DNA, 15 bp, Homo sapiens
ctcactatgttgccc

SEQ ID NO: 232195 - DNA, 15 bp, Homo sapiens
tctcactatgttgcc

SEQ ID NO: 232196 - DNA, 15 bp, Homo sapiens
gtctcactatgttgc

SEQ ID NO: 232197 - DNA, 15 bp, Homo sapiens
ggtctcactatgttg

SEQ ID NO: 232198 - DNA, 15 bp, Homo sapiens
gggtctcactatgtt

SEQ ID NO: 232199 - DNA, 15 bp, Homo sapiens
ggggtctcactatgt

SEQ ID NO: 232200 - DNA, 15 bp, Homo sapiens
tggggtctcactatg

SEQ ID NO: 232201 - DNA, 15 bp, Homo sapiens
atggggtctcactat

SEQ ID NO: 232202 - DNA, 15 bp, Homo sapiens
gatggggtctcacta

SEQ ID NO: 232203 - DNA, 15 bp, Homo sapiens
agatggggtctcact

SEQ ID NO: 232204 - DNA, 15 bp, Homo sapiens
tagatggggtctcac

SEQ ID NO: 232205 - DNA, 15 bp, Homo sapiens
atagatggggtctca

SEQ ID NO: 232206 - DNA, 15 bp, Homo sapiens
tatagatggggtctc

SEQ ID NO: 232207 - DNA, 15 bp, Homo sapiens
ttatagatggggtct

SEQ ID NO: 232208 - DNA, 15 bp, Homo sapiens
tttatagatggggtc

SEQ ID NO: 232209 - DNA, 15 bp, Homo sapiens
ttttatagatggggt

SEQ ID NO: 232210 - DNA, 15 bp, Homo sapiens
tttttatagatgggg

SEQ ID NO: 232211 - DNA, 15 bp, Homo sapiens
ttttttatagatggg

SEQ ID NO: 232212 - DNA, 15 bp, Homo sapiens
tttttttatagatgg

SEQ ID NO: 232213 - DNA, 15 bp, Homo sapiens
ttttttttatagatg

SEQ ID NO: 232214 - DNA, 15 bp, Homo sapiens
tttttttttatagat

SEQ ID NO: 232215 - DNA, 15 bp, Homo sapiens
atttttttttataga

SEQ ID NO: 232216 - DNA, 15 bp, Homo sapiens
aatttttttttatag

SEQ ID NO: 232217 - DNA, 15 bp, Homo sapiens
taatttttttttata

SEQ ID NO: 232218 - DNA, 15 bp, Homo sapiens
ttaatttttttttat

SEQ ID NO: 232219 - DNA, 15 bp, Homo sapiens
tttaattttttttta

SEQ ID NO: 232220 - DNA, 15 bp, Homo sapiens
ttttaattttttttt

SEQ ID NO: 232221 - DNA, 15 bp, Homo sapiens
tttttaatttttttt

SEQ ID NO: 232222 - DNA, 15 bp, Homo sapiens
atttttaattttttt

SEQ ID NO: 232223 - DNA, 15 bp, Homo sapiens
aatttttaatttttt

SEQ ID NO: 232224 - DNA, 15 bp, Homo sapiens
taatttttaattttt

SEQ ID NO: 232225 - DNA, 15 bp, Homo sapiens
ctaatttttaatttt

SEQ ID NO: 232226 - DNA, 15 bp, Homo sapiens
actaatttttaattt

SEQ ID NO: 232227 - DNA, 15 bp, Homo sapiens
aactaatttttaatt

SEQ ID NO: 232228 - DNA, 15 bp, Homo sapiens
caactaatttttaat

SEQ ID NO: 232229 - DNA, 15 bp, Homo sapiens
ccaactaatttttaa

SEQ ID NO: 232230 - DNA, 15 bp, Homo sapiens
cccaactaattttta

SEQ ID NO: 232231 - DNA, 15 bp, Homo sapiens
gcccaactaattttt

SEQ ID NO: 232232 - DNA, 15 bp, Homo sapiens
tgcccaactaatttt

SEQ ID NO: 232233 - DNA, 15 bp, Homo sapiens
atgcccaactaattt

SEQ ID NO: 232234 - DNA, 15 bp, Homo sapiens
catgcccaactaatt

SEQ ID NO: 232235 - DNA, 15 bp, Homo sapiens
ccatgcccaactaat

SEQ ID NO: 232236 - DNA, 15 bp, Homo sapiens
accatgcccaactaa

SEQ ID NO: 232237 - DNA, 15 bp, Homo sapiens
caccatgcccaacta

SEQ ID NO: 232238 - DNA, 15 bp, Homo sapiens
ccaccatgcccaact

SEQ ID NO: 232239 - DNA, 15 bp, Homo sapiens
accaccatgcccaac

SEQ ID NO: 232240 - DNA, 15 bp, Homo sapiens
caccaccatgcccaa

SEQ ID NO: 232241 - DNA, 15 bp, Homo sapiens
gcaccaccatgccca

SEQ ID NO: 232242 - DNA, 15 bp, Homo sapiens
tgcaccaccatgccc

SEQ ID NO: 232243 - DNA, 15 bp, Homo sapiens
gtgcaccaccatgcc

SEQ ID NO: 232244 - DNA, 15 bp, Homo sapiens
agtgcaccaccatgc

SEQ ID NO: 232245 - DNA, 15 bp, Homo sapiens
gagtgcaccaccatg

SEQ ID NO: 232246 - DNA, 15 bp, Homo sapiens
ggagtgcaccaccat

SEQ ID NO: 232247 - DNA, 15 bp, Homo sapiens
aggagtgcaccacca

SEQ ID NO: 232248 - DNA, 15 bp, Homo sapiens
caggagtgcaccacc

SEQ ID NO: 232249 - DNA, 15 bp, Homo sapiens
acaggagtgcaccac

SEQ ID NO: 232250 - DNA, 15 bp, Homo sapiens
cacaggagtgcacca

SEQ ID NO: 232251 - DNA, 15 bp, Homo sapiens
ccacaggagtgcacc

SEQ ID NO: 232252 - DNA, 15 bp, Homo sapiens
accacaggagtgcac

SEQ ID NO: 232253 - DNA, 15 bp, Homo sapiens
gaccacaggagtgca

SEQ ID NO: 232254 - DNA, 15 bp, Homo sapiens
ggaccacaggagtgc

SEQ ID NO: 232255 - DNA, 15 bp, Homo sapiens
aggaccacaggagtg

SEQ ID NO: 232256 - DNA, 15 bp, Homo sapiens
taggaccacaggagt

SEQ ID NO: 232257 - DNA, 15 bp, Homo sapiens
ctaggaccacaggag

SEQ ID NO: 232258 - DNA, 15 bp, Homo sapiens
gctaggaccacagga

SEQ ID NO: 232259 - DNA, 15 bp, Homo sapiens
agctaggaccacagg

SEQ ID NO: 232260 - DNA, 15 bp, Homo sapiens
tagctaggaccacag

SEQ ID NO: 232261 - DNA, 15 bp, Homo sapiens
atagctaggaccaca

SEQ ID NO: 232262 - DNA, 15 bp, Homo sapiens
aatagctaggaccac

SEQ ID NO: 232263 - DNA, 15 bp, Homo sapiens
gaatagctaggacca

SEQ ID NO: 232264 - DNA, 15 bp, Homo sapiens
tgaatagctaggacc

SEQ ID NO: 232265 - DNA, 15 bp, Homo sapiens
ctgaatagctaggac

SEQ ID NO: 232266 - DNA, 15 bp, Homo sapiens
cctgaatagctagga

SEQ ID NO: 232267 - DNA, 15 bp, Homo sapiens
tcctgaatagctagg

SEQ ID NO: 232268 - DNA, 15 bp, Homo sapiens
ctcctgaatagctag

SEQ ID NO: 232269 - DNA, 15 bp, Homo sapiens
cctcctgaatagcta

SEQ ID NO: 232270 - DNA, 15 bp, Homo sapiens
gcctcctgaatagct

SEQ ID NO: 232271 - DNA, 15 bp, Homo sapiens
agcctcctgaatagc

SEQ ID NO: 232272 - DNA, 15 bp, Homo sapiens
cagcctcctgaatag

SEQ ID NO: 232273 - DNA, 15 bp, Homo sapiens
tcagcctcctgaata

SEQ ID NO: 232274 - DNA, 15 bp, Homo sapiens
ctcagcctcctgaat

SEQ ID NO: 232275 - DNA, 15 bp, Homo sapiens
cctcagcctcctgaa

SEQ ID NO: 232276 - DNA, 15 bp, Homo sapiens
acctcagcctcctga

SEQ ID NO: 232277 - DNA, 15 bp, Homo sapiens
cacctcagcctcctg

SEQ ID NO: 232278 - DNA, 15 bp, Homo sapiens
ccacctcagcctcct

SEQ ID NO: 232279 - DNA, 15 bp, Homo sapiens
cccacctcagcctcc

SEQ ID NO: 232280 - DNA, 15 bp, Homo sapiens
tcccacctcagcctc

SEQ ID NO: 232281 - DNA, 15 bp, Homo sapiens
ctcccacctcagcct

SEQ ID NO: 232282 - DNA, 15 bp, Homo sapiens
cctcccacctcagcc

SEQ ID NO: 232283 - DNA, 15 bp, Homo sapiens
tcctcccacctcagc

SEQ ID NO: 232284 - DNA, 15 bp, Homo sapiens
atcctcccacctcag

SEQ ID NO: 232285 - DNA, 15 bp, Homo sapiens
aatcctcccacctca

SEQ ID NO: 232286 - DNA, 15 bp, Homo sapiens
gaatcctcccacctc

SEQ ID NO: 232287 - DNA, 15 bp, Homo sapiens
ggaatcctcccacct

SEQ ID NO: 232288 - DNA, 15 bp, Homo sapiens
aggaatcctcccacc

SEQ ID NO: 232289 - DNA, 15 bp, Homo sapiens
aaggaatcctcccac

SEQ ID NO: 232290 - DNA, 15 bp, Homo sapiens
caaggaatcctccca

SEQ ID NO: 232291 - DNA, 15 bp, Homo sapiens
tcaaggaatcctccc

SEQ ID NO: 232292 - DNA, 15 bp, Homo sapiens
ctcaaggaatcctcc

SEQ ID NO: 232293 - DNA, 15 bp, Homo sapiens
gctcaaggaatcctc

SEQ ID NO: 232294 - DNA, 15 bp, Homo sapiens
ggctcaaggaatcct

SEQ ID NO: 232295 - DNA, 15 bp, Homo sapiens
gggctcaaggaatcc

SEQ ID NO: 232296 - DNA, 15 bp, Homo sapiens
tgggctcaaggaatc

SEQ ID NO: 232297 - DNA, 15 bp, Homo sapiens
ctgggctcaaggaat

SEQ ID NO: 232298 - DNA, 15 bp, Homo sapiens
cctgggctcaaggaa

SEQ ID NO: 232299 - DNA, 15 bp, Homo sapiens
ccctgggctcaagga

SEQ ID NO: 232300 - DNA, 15 bp, Homo sapiens
accctgggctcaagg

SEQ ID NO: 232301 - DNA, 15 bp, Homo sapiens
aaccctgggctcaag

SEQ ID NO: 232302 - DNA, 15 bp, Homo sapiens
caaccctgggctcaa

SEQ ID NO: 232303 - DNA, 15 bp, Homo sapiens
tcaaccctgggctca

SEQ ID NO: 232304 - DNA, 15 bp, Homo sapiens
gtcaaccctgggctc

SEQ ID NO: 232305 - DNA, 15 bp, Homo sapiens
cgtcaaccctgggct

SEQ ID NO: 232306 - DNA, 15 bp, Homo sapiens
gcgtcaaccctgggc

SEQ ID NO: 232307 - DNA, 15 bp, Homo sapiens
agcgtcaaccctggg

SEQ ID NO: 232308 - DNA, 15 bp, Homo sapiens
cagcgtcaaccctgg

SEQ ID NO: 232309 - DNA, 15 bp, Homo sapiens
gcagcgtcaaccctg

SEQ ID NO: 232310 - DNA, 15 bp, Homo sapiens
tgcagcgtcaaccct

SEQ ID NO: 232311 - DNA, 15 bp, Homo sapiens
ctgcagcgtcaaccc

SEQ ID NO: 232312 - DNA, 15 bp, Homo sapiens
tctgcagcgtcaacc

SEQ ID NO: 232313 - DNA, 15 bp, Homo sapiens
ctctgcagcgtcaac

SEQ ID NO: 232314 - DNA, 15 bp, Homo sapiens
tctctgcagcgtcaa

SEQ ID NO: 232315 - DNA, 15 bp, Homo sapiens
ctctctgcagcgtca

SEQ ID NO: 232316 - DNA, 15 bp, Homo sapiens
gctctctgcagcgtc

SEQ ID NO: 232317 - DNA, 15 bp, Homo sapiens
agctctctgcagcgt

SEQ ID NO: 232318 - DNA, 15 bp, Homo sapiens
cagctctctgcagcg

SEQ ID NO: 232319 - DNA, 15 bp, Homo sapiens
acagctctctgcagc

SEQ ID NO: 232320 - DNA, 15 bp, Homo sapiens
cacagctctctgcag

SEQ ID NO: 232321 - DNA, 15 bp, Homo sapiens
tcacagctctctgca

SEQ ID NO: 232322 - DNA, 15 bp, Homo sapiens
atcacagctctctgc

SEQ ID NO: 232323 - DNA, 15 bp, Homo sapiens
gatcacagctctctg

SEQ ID NO: 232324 - DNA, 15 bp, Homo sapiens
tgatcacagctctct

SEQ ID NO: 232325 - DNA, 15 bp, Homo sapiens
gtgatcacagctctc

SEQ ID NO: 232326 - DNA, 15 bp, Homo sapiens
cgtgatcacagctct

SEQ ID NO: 232327 - DNA, 15 bp, Homo sapiens
gcgtgatcacagctc

SEQ ID NO: 232328 - DNA, 15 bp, Homo sapiens
ggcgtgatcacagct

SEQ ID NO: 232329 - DNA, 15 bp, Homo sapiens
tggcgtgatcacagc

SEQ ID NO: 232330 - DNA, 15 bp, Homo sapiens
gtggcgtgatcacag

SEQ ID NO: 232331 - DNA, 15 bp, Homo sapiens
agtggcgtgatcaca

SEQ ID NO: 232332 - DNA, 15 bp, Homo sapiens
cagtggcgtgatcac

SEQ ID NO: 232333 - DNA, 15 bp, Homo sapiens
gcagtggcgtgatca

SEQ ID NO: 232334 - DNA, 15 bp, Homo sapiens
tgcagtggcgtgatc

SEQ ID NO: 232335 - DNA, 15 bp, Homo sapiens
ctgcagtggcgtgat

SEQ ID NO: 232336 - DNA, 15 bp, Homo sapiens
actgcagtggcgtga

SEQ ID NO: 232337 - DNA, 15 bp, Homo sapiens
gactgcagtggcgtg

SEQ ID NO: 232338 - DNA, 15 bp, Homo sapiens
ggactgcagtggcgt

SEQ ID NO: 232339 - DNA, 15 bp, Homo sapiens
tggactgcagtggcg

SEQ ID NO: 232340 - DNA, 15 bp, Homo sapiens
ctggactgcagtggc

SEQ ID NO: 232341 - DNA, 15 bp, Homo sapiens
gctggactgcagtgg

SEQ ID NO: 232342 - DNA, 15 bp, Homo sapiens
ggctggactgcagtg

SEQ ID NO: 232343 - DNA, 15 bp, Homo sapiens
aggctggactgcagt

SEQ ID NO: 232344 - DNA, 15 bp, Homo sapiens
caggctggactgcag

SEQ ID NO: 232345 - DNA, 15 bp, Homo sapiens
tcaggctggactgca

SEQ ID NO: 232346 - DNA, 15 bp, Homo sapiens
ctcaggctggactgc

SEQ ID NO: 232347 - DNA, 15 bp, Homo sapiens
actcaggctggactg

SEQ ID NO: 232348 - DNA, 15 bp, Homo sapiens
cactcaggctggact

SEQ ID NO: 232349 - DNA, 15 bp, Homo sapiens
tcactcaggctggac

SEQ ID NO: 232350 - DNA, 15 bp, Homo sapiens
gtcactcaggctgga

SEQ ID NO: 232351 - DNA, 15 bp, Homo sapiens
tgtcactcaggctgg

SEQ ID NO: 232352 - DNA, 15 bp, Homo sapiens
ctgtcactcaggctg

SEQ ID NO: 232353 - DNA, 15 bp, Homo sapiens
gctgtcactcaggct

SEQ ID NO: 232354 - DNA, 15 bp, Homo sapiens
agctgtcactcaggc

SEQ ID NO: 232355 - DNA, 15 bp, Homo sapiens
cagctgtcactcagg

SEQ ID NO: 232356 - DNA, 15 bp, Homo sapiens
ccagctgtcactcag

SEQ ID NO: 232357 - DNA, 15 bp, Homo sapiens
tccagctgtcactca

SEQ ID NO: 232358 - DNA, 15 bp, Homo sapiens
ttccagctgtcactc

SEQ ID NO: 232359 - DNA, 15 bp, Homo sapiens
tttccagctgtcact

SEQ ID NO: 232360 - DNA, 15 bp, Homo sapiens
atttccagctgtcac

SEQ ID NO: 232361 - DNA, 15 bp, Homo sapiens
tatttccagctgtca

SEQ ID NO: 232362 - DNA, 15 bp, Homo sapiens
ttatttccagctgtc

SEQ ID NO: 232363 - DNA, 15 bp, Homo sapiens
attatttccagctgt

SEQ ID NO: 232364 - DNA, 15 bp, Homo sapiens
cattatttccagctg

SEQ ID NO: 232365 - DNA, 15 bp, Homo sapiens
tcattatttccagct

SEQ ID NO: 232366 - DNA, 15 bp, Homo sapiens
atcattatttccagc

SEQ ID NO: 232367 - DNA, 15 bp, Homo sapiens
tatcattatttccag

SEQ ID NO: 232368 - DNA, 15 bp, Homo sapiens
ttatcattatttcca

SEQ ID NO: 232369 - DNA, 15 bp, Homo sapiens
tttatcattatttcc

SEQ ID NO: 232370 - DNA, 15 bp, Homo sapiens
atttatcattatttc

SEQ ID NO: 232371 - DNA, 15 bp, Homo sapiens
tatttatcattattt

SEQ ID NO: 232372 - DNA, 15 bp, Homo sapiens
ttatttatcattatt

SEQ ID NO: 232373 - DNA, 15 bp, Homo sapiens
tttatttatcattat

SEQ ID NO: 232374 - DNA, 15 bp, Homo sapiens
atttatttatcatta

SEQ ID NO: 232375 - DNA, 15 bp, Homo sapiens
tatttatttatcatt

SEQ ID NO: 232376 - DNA, 15 bp, Homo sapiens
ttatttatttatcat

SEQ ID NO: 232377 - DNA, 15 bp, Homo sapiens
attatttatttatca

SEQ ID NO: 232378 - DNA, 15 bp, Homo sapiens
tattatttatttatc

SEQ ID NO: 232379 - DNA, 15 bp, Homo sapiens
ttattatttatttat

SEQ ID NO: 232380 - DNA, 15 bp, Homo sapiens
tttattatttattta

SEQ ID NO: 232381 - DNA, 15 bp, Homo sapiens
atttattatttattt

SEQ ID NO: 232382 - DNA, 15 bp, Homo sapiens
tatttattatttatt

SEQ ID NO: 232383 - DNA, 15 bp, Homo sapiens
ttatttattatttat

SEQ ID NO: 232384 - DNA, 15 bp, Homo sapiens
attatttattattta

SEQ ID NO: 232385 - DNA, 15 bp, Homo sapiens
aattatttattattt

SEQ ID NO: 232386 - DNA, 15 bp, Homo sapiens
taattatttattatt

SEQ ID NO: 232387 - DNA, 15 bp, Homo sapiens
ataattatttattat

SEQ ID NO: 232388 - DNA, 15 bp, Homo sapiens
aataattatttatta

SEQ ID NO: 232389 - DNA, 15 bp, Homo sapiens
aaataattatttatt

SEQ ID NO: 232390 - DNA, 15 bp, Homo sapiens
taaataattatttat

SEQ ID NO: 232391 - DNA, 15 bp, Homo sapiens
ttaaataattattta

SEQ ID NO: 232392 - DNA, 15 bp, Homo sapiens
tttaaataattattt

SEQ ID NO: 232393 - DNA, 15 bp, Homo sapiens
ttttaaataattatt

SEQ ID NO: 232394 - DNA, 15 bp, Homo sapiens
tttttaaataattat

SEQ ID NO: 232395 - DNA, 15 bp, Homo sapiens
ttttttaaataatta

SEQ ID NO: 232396 - DNA, 15 bp, Homo sapiens
attttttaaataatt

SEQ ID NO: 232397 - DNA, 15 bp, Homo sapiens
aattttttaaataat

SEQ ID NO: 232398 - DNA, 15 bp, Homo sapiens
taattttttaaataa

SEQ ID NO: 232399 - DNA, 15 bp, Homo sapiens
ataattttttaaata

SEQ ID NO: 232400 - DNA, 15 bp, Homo sapiens
tataattttttaaat

SEQ ID NO: 232401 - DNA, 15 bp, Homo sapiens
ttataattttttaaa

SEQ ID NO: 232402 - DNA, 15 bp, Homo sapiens
attataattttttaa

SEQ ID NO: 232403 - DNA, 15 bp, Homo sapiens
tattataatttttta

SEQ ID NO: 232404 - DNA, 15 bp, Homo sapiens
ttattataatttttt

SEQ ID NO: 232405 - DNA, 15 bp, Homo sapiens
tttattataattttt

SEQ ID NO: 232406 - DNA, 15 bp, Homo sapiens
ttttattataatttt

SEQ ID NO: 232407 - DNA, 15 bp, Homo sapiens
tttttattataattt

SEQ ID NO: 232408 - DNA, 15 bp, Homo sapiens
atttttattataatt

SEQ ID NO: 232409 - DNA, 15 bp, Homo sapiens
tatttttattataat

SEQ ID NO: 232410 - DNA, 15 bp, Homo sapiens
ttatttttattataa

SEQ ID NO: 232411 - DNA, 15 bp, Homo sapiens
attatttttattata

SEQ ID NO: 232412 - DNA, 15 bp, Homo sapiens
aattatttttattat

SEQ ID NO: 232413 - DNA, 15 bp, Homo sapiens
taattatttttatta

SEQ ID NO: 232414 - DNA, 15 bp, Homo sapiens
ttaattatttttatt

SEQ ID NO: 232415 - DNA, 15 bp, Homo sapiens
tttaattatttttat

SEQ ID NO: 232416 - DNA, 15 bp, Homo sapiens
ttttaattattttta

SEQ ID NO: 232417 - DNA, 15 bp, Homo sapiens
tttttaattattttt

SEQ ID NO: 232418 - DNA, 15 bp, Homo sapiens
ttttttaattatttt

SEQ ID NO: 232419 - DNA, 15 bp, Homo sapiens
attttttaattattt

SEQ ID NO: 232420 - DNA, 15 bp, Homo sapiens
aattttttaattatt

SEQ ID NO: 232421 - DNA, 15 bp, Homo sapiens
taattttttaattat

SEQ ID NO: 232422 - DNA, 15 bp, Homo sapiens
ataattttttaatta

SEQ ID NO: 232423 - DNA, 15 bp, Homo sapiens
aataattttttaatt

SEQ ID NO: 232424 - DNA, 15 bp, Homo sapiens
aaataattttttaat

SEQ ID NO: 232425 - DNA, 15 bp, Homo sapiens
aaaataattttttaa

SEQ ID NO: 232426 - DNA, 15 bp, Homo sapiens
gaaaataatttttta

SEQ ID NO: 232427 - DNA, 15 bp, Homo sapiens
ggaaaataatttttt

SEQ ID NO: 232428 - DNA, 15 bp, Homo sapiens
gggaaaataattttt

SEQ ID NO: 232429 - DNA, 15 bp, Homo sapiens
agggaaaataatttt

SEQ ID NO: 232430 - DNA, 15 bp, Homo sapiens
cagggaaaataattt

SEQ ID NO: 232431 - DNA, 15 bp, Homo sapiens
tcagggaaaataatt

SEQ ID NO: 232432 - DNA, 15 bp, Homo sapiens
atcagggaaaataat

SEQ ID NO: 232433 - DNA, 15 bp, Homo sapiens
aatcagggaaaataa

SEQ ID NO: 232434 - DNA, 15 bp, Homo sapiens
taatcagggaaaata

SEQ ID NO: 232435 - DNA, 15 bp, Homo sapiens
ttaatcagggaaaat

SEQ ID NO: 232436 - DNA, 15 bp, Homo sapiens
attaatcagggaaaa

SEQ ID NO: 232437 - DNA, 15 bp, Homo sapiens
gattaatcagggaaa

SEQ ID NO: 232438 - DNA, 15 bp, Homo sapiens
agattaatcagggaa

SEQ ID NO: 232439 - DNA, 15 bp, Homo sapiens
aagattaatcaggga

SEQ ID NO: 232440 - DNA, 15 bp, Homo sapiens
aaagattaatcaggg

SEQ ID NO: 232441 - DNA, 15 bp, Homo sapiens
aaaagattaatcagg

SEQ ID NO: 232442 - DNA, 15 bp, Homo sapiens
aaaaagattaatcag

SEQ ID NO: 232443 - DNA, 15 bp, Homo sapiens
aaaaaagattaatca

SEQ ID NO: 232444 - DNA, 15 bp, Homo sapiens
aaaaaaagattaatc

SEQ ID NO: 232445 - DNA, 15 bp, Homo sapiens
aaaaaaaagattaat

SEQ ID NO: 232446 - DNA, 15 bp, Homo sapiens
aaaaaaaaagattaa

SEQ ID NO: 232447 - DNA, 15 bp, Homo sapiens
caaaaaaaaagatta

SEQ ID NO: 232448 - DNA, 15 bp, Homo sapiens
acaaaaaaaaagatt

SEQ ID NO: 232449 - DNA, 15 bp, Homo sapiens
gacaaaaaaaaagat

SEQ ID NO: 232450 - DNA, 15 bp, Homo sapiens
ggacaaaaaaaaaga

SEQ ID NO: 232451 - DNA, 15 bp, Homo sapiens
aggacaaaaaaaaag

SEQ ID NO: 232452 - DNA, 15 bp, Homo sapiens
aaggacaaaaaaaaa

SEQ ID NO: 232453 - DNA, 15 bp, Homo sapiens
gaaggacaaaaaaaa

SEQ ID NO: 232454 - DNA, 15 bp, Homo sapiens
agaaggacaaaaaaa

SEQ ID NO: 232455 - DNA, 15 bp, Homo sapiens
cagaaggacaaaaaa

SEQ ID NO: 232456 - DNA, 15 bp, Homo sapiens
tcagaaggacaaaaa

SEQ ID NO: 232457 - DNA, 15 bp, Homo sapiens
ctcagaaggacaaaa

SEQ ID NO: 232458 - DNA, 15 bp, Homo sapiens
tctcagaaggacaaa

SEQ ID NO: 232459 - DNA, 15 bp, Homo sapiens
ctctcagaaggacaa

SEQ ID NO: 232460 - DNA, 15 bp, Homo sapiens
actctcagaaggaca

SEQ ID NO: 232461 - DNA, 15 bp, Homo sapiens
aactctcagaaggac

SEQ ID NO: 232462 - DNA, 15 bp, Homo sapiens
gaactctcagaagga

SEQ ID NO: 232463 - DNA, 15 bp, Homo sapiens
tgaactctcagaagg

SEQ ID NO: 232464 - DNA, 15 bp, Homo sapiens
ttgaactctcagaag

SEQ ID NO: 232465 - DNA, 15 bp, Homo sapiens
attgaactctcagaa

SEQ ID NO: 232466 - DNA, 15 bp, Homo sapiens
aattgaactctcaga

SEQ ID NO: 232467 - DNA, 15 bp, Homo sapiens
aaattgaactctcag

SEQ ID NO: 232468 - DNA, 15 bp, Homo sapiens
caaattgaactctca

SEQ ID NO: 232469 - DNA, 15 bp, Homo sapiens
acaaattgaactctc

SEQ ID NO: 232470 - DNA, 15 bp, Homo sapiens
gacaaattgaactct

SEQ ID NO: 232471 - DNA, 15 bp, Homo sapiens
ggacaaattgaactc

SEQ ID NO: 232472 - DNA, 15 bp, Homo sapiens
gggacaaattgaact

SEQ ID NO: 232473 - DNA, 15 bp, Homo sapiens
agggacaaattgaac

SEQ ID NO: 232474 - DNA, 15 bp, Homo sapiens
aagggacaaattgaa

SEQ ID NO: 232475 - DNA, 15 bp, Homo sapiens
aaagggacaaattga

SEQ ID NO: 232476 - DNA, 15 bp, Homo sapiens
aaaagggacaaattg

SEQ ID NO: 232477 - DNA, 15 bp, Homo sapiens
gaaaagggacaaatt

SEQ ID NO: 232478 - DNA, 15 bp, Homo sapiens
agaaaagggacaaat

SEQ ID NO: 232479 - DNA, 15 bp, Homo sapiens
cagaaaagggacaaa

SEQ ID NO: 232480 - DNA, 15 bp, Homo sapiens
gcagaaaagggacaa

SEQ ID NO: 232481 - DNA, 15 bp, Homo sapiens
ggcagaaaagggaca

SEQ ID NO: 232482 - DNA, 15 bp, Homo sapiens
aggcagaaaagggac

SEQ ID NO: 232483 - DNA, 15 bp, Homo sapiens
caggcagaaaaggga

SEQ ID NO: 232484 - DNA, 15 bp, Homo sapiens
ccaggcagaaaaggg

SEQ ID NO: 232485 - DNA, 15 bp, Homo sapiens
accaggcagaaaagg

SEQ ID NO: 232486 - DNA, 15 bp, Homo sapiens
gaccaggcagaaaag

SEQ ID NO: 232487 - DNA, 15 bp, Homo sapiens
agaccaggcagaaaa

SEQ ID NO: 232488 - DNA, 15 bp, Homo sapiens
gagaccaggcagaaa

SEQ ID NO: 232489 - DNA, 15 bp, Homo sapiens
ggagaccaggcagaa

SEQ ID NO: 232490 - DNA, 15 bp, Homo sapiens
aggagaccaggcaga

SEQ ID NO: 232491 - DNA, 15 bp, Homo sapiens
taggagaccaggcag

SEQ ID NO: 232492 - DNA, 15 bp, Homo sapiens
ctaggagaccaggca

SEQ ID NO: 232493 - DNA, 15 bp, Homo sapiens
cctaggagaccaggc

SEQ ID NO: 232494 - DNA, 15 bp, Homo sapiens
acctaggagaccagg

SEQ ID NO: 232495 - DNA, 15 bp, Homo sapiens
aacctaggagaccag

SEQ ID NO: 232496 - DNA, 15 bp, Homo sapiens
aaacctaggagacca

SEQ ID NO: 232497 - DNA, 15 bp, Homo sapiens
gaaacctaggagacc

SEQ ID NO: 232498 - DNA, 15 bp, Homo sapiens
ggaaacctaggagac

SEQ ID NO: 232499 - DNA, 15 bp, Homo sapiens
gggaaacctaggaga

SEQ ID NO: 232500 - DNA, 15 bp, Homo sapiens
agggaaacctaggag

SEQ ID NO: 232501 - DNA, 15 bp, Homo sapiens
tagggaaacctagga

SEQ ID NO: 232502 - DNA, 15 bp, Homo sapiens
ttagggaaacctagg

SEQ ID NO: 232503 - DNA, 15 bp, Homo sapiens
tttagggaaacctag

SEQ ID NO: 232504 - DNA, 15 bp, Homo sapiens
ttttagggaaaccta

SEQ ID NO: 232505 - DNA, 15 bp, Homo sapiens
attttagggaaacct

SEQ ID NO: 232506 - DNA, 15 bp, Homo sapiens
gattttagggaaacc

SEQ ID NO: 232507 - DNA, 15 bp, Homo sapiens
ggattttagggaaac

SEQ ID NO: 232508 - DNA, 15 bp, Homo sapiens
aggattttagggaaa

SEQ ID NO: 232509 - DNA, 15 bp, Homo sapiens
caggattttagggaa

SEQ ID NO: 232510 - DNA, 15 bp, Homo sapiens
gcaggattttaggga

SEQ ID NO: 232511 - DNA, 15 bp, Homo sapiens
agcaggattttaggg

SEQ ID NO: 232512 - DNA, 15 bp, Homo sapiens
cagcaggattttagg

SEQ ID NO: 232513 - DNA, 15 bp, Homo sapiens
tcagcaggattttag

SEQ ID NO: 232514 - DNA, 15 bp, Homo sapiens
ctcagcaggatttta

SEQ ID NO: 232515 - DNA, 15 bp, Homo sapiens
tctcagcaggatttt

SEQ ID NO: 232516 - DNA, 15 bp, Homo sapiens
ctctcagcaggattt

SEQ ID NO: 232517 - DNA, 15 bp, Homo sapiens
cctctcagcaggatt

SEQ ID NO: 232518 - DNA, 15 bp, Homo sapiens
acctctcagcaggat

SEQ ID NO: 232519 - DNA, 15 bp, Homo sapiens
aacctctcagcagga

SEQ ID NO: 232520 - DNA, 15 bp, Homo sapiens
taacctctcagcagg

SEQ ID NO: 232521 - DNA, 15 bp, Homo sapiens
ctaacctctcagcag

SEQ ID NO: 232522 - DNA, 15 bp, Homo sapiens
gctaacctctcagca

SEQ ID NO: 232523 - DNA, 15 bp, Homo sapiens
tgctaacctctcagc

SEQ ID NO: 232524 - DNA, 15 bp, Homo sapiens
gtgctaacctctcag

SEQ ID NO: 232525 - DNA, 15 bp, Homo sapiens
agtgctaacctctca

SEQ ID NO: 232526 - DNA, 15 bp, Homo sapiens
cagtgctaacctctc

SEQ ID NO: 232527 - DNA, 15 bp, Homo sapiens
gcagtgctaacctct

SEQ ID NO: 232528 - DNA, 15 bp, Homo sapiens
ggcagtgctaacctc

SEQ ID NO: 232529 - DNA, 15 bp, Homo sapiens
aggcagtgctaacct

SEQ ID NO: 232530 - DNA, 15 bp, Homo sapiens
caggcagtgctaacc

SEQ ID NO: 232531 - DNA, 15 bp, Homo sapiens
gcaggcagtgctaac

SEQ ID NO: 232532 - DNA, 15 bp, Homo sapiens
ggcaggcagtgctaa

SEQ ID NO: 232533 - DNA, 15 bp, Homo sapiens
tggcaggcagtgcta

SEQ ID NO: 232534 - DNA, 15 bp, Homo sapiens
ttggcaggcagtgct

SEQ ID NO: 232535 - DNA, 15 bp, Homo sapiens
tttggcaggcagtgc

SEQ ID NO: 232536 - DNA, 15 bp, Homo sapiens
ctttggcaggcagtg

SEQ ID NO: 232537 - DNA, 15 bp, Homo sapiens
actttggcaggcagt

SEQ ID NO: 232538 - DNA, 15 bp, Homo sapiens
gactttggcaggcag

SEQ ID NO: 232539 - DNA, 15 bp, Homo sapiens
tgactttggcaggca

SEQ ID NO: 232540 - DNA, 15 bp, Homo sapiens
ctgactttggcaggc

SEQ ID NO: 232541 - DNA, 15 bp, Homo sapiens
actgactttggcagg

SEQ ID NO: 232542 - DNA, 15 bp, Homo sapiens
aactgactttggcag

SEQ ID NO: 232543 - DNA, 15 bp, Homo sapiens
aaactgactttggca

SEQ ID NO: 232544 - DNA, 15 bp, Homo sapiens
caaactgactttggc

SEQ ID NO: 232545 - DNA, 15 bp, Homo sapiens
gcaaactgactttgg

SEQ ID NO: 232546 - DNA, 15 bp, Homo sapiens
tgcaaactgactttg

SEQ ID NO: 232547 - DNA, 15 bp, Homo sapiens
ttgcaaactgacttt

SEQ ID NO: 232548 - DNA, 15 bp, Homo sapiens
tttgcaaactgactt

SEQ ID NO: 232549 - DNA, 15 bp, Homo sapiens
ttttgcaaactgact

SEQ ID NO: 232550 - DNA, 15 bp, Homo sapiens
attttgcaaactgac

SEQ ID NO: 232551 - DNA, 15 bp, Homo sapiens
gattttgcaaactga

SEQ ID NO: 232552 - DNA, 15 bp, Homo sapiens
ggattttgcaaactg

SEQ ID NO: 232553 - DNA, 15 bp, Homo sapiens
gggattttgcaaact

SEQ ID NO: 232554 - DNA, 15 bp, Homo sapiens
tgggattttgcaaac

SEQ ID NO: 232555 - DNA, 15 bp, Homo sapiens
ctgggattttgcaaa

SEQ ID NO: 232556 - DNA, 15 bp, Homo sapiens
tctgggattttgcaa

SEQ ID NO: 232557 - DNA, 15 bp, Homo sapiens
ctctgggattttgca

SEQ ID NO: 232558 - DNA, 15 bp, Homo sapiens
tctctgggattttgc

SEQ ID NO: 232559 - DNA, 15 bp, Homo sapiens
ttctctgggattttg

SEQ ID NO: 232560 - DNA, 15 bp, Homo sapiens
tttctctgggatttt

SEQ ID NO: 232561 - DNA, 15 bp, Homo sapiens
atttctctgggattt

SEQ ID NO: 232562 - DNA, 15 bp, Homo sapiens
gatttctctgggatt

SEQ ID NO: 232563 - DNA, 15 bp, Homo sapiens
ggatttctctgggat

SEQ ID NO: 232564 - DNA, 15 bp, Homo sapiens
tggatttctctggga

SEQ ID NO: 232565 - DNA, 15 bp, Homo sapiens
ctggatttctctggg

SEQ ID NO: 232566 - DNA, 15 bp, Homo sapiens
gctggatttctctgg

SEQ ID NO: 232567 - DNA, 15 bp, Homo sapiens
agctggatttctctg

SEQ ID NO: 232568 - DNA, 15 bp, Homo sapiens
aagctggatttctct

SEQ ID NO: 232569 - DNA, 15 bp, Homo sapiens
taagctggatttctc

SEQ ID NO: 232570 - DNA, 15 bp, Homo sapiens
ataagctggatttct

SEQ ID NO: 232571 - DNA, 15 bp, Homo sapiens
aataagctggatttc

SEQ ID NO: 232572 - DNA, 15 bp, Homo sapiens
gaataagctggattt

SEQ ID NO: 232573 - DNA, 15 bp, Homo sapiens
ggaataagctggatt

SEQ ID NO: 232574 - DNA, 15 bp, Homo sapiens
aggaataagctggat

SEQ ID NO: 232575 - DNA, 15 bp, Homo sapiens
caggaataagctgga

SEQ ID NO: 232576 - DNA, 15 bp, Homo sapiens
ccaggaataagctgg

SEQ ID NO: 232577 - DNA, 15 bp, Homo sapiens
cccaggaataagctg

SEQ ID NO: 232578 - DNA, 15 bp, Homo sapiens
ccccaggaataagct

SEQ ID NO: 232579 - DNA, 15 bp, Homo sapiens
cccccaggaataagc

SEQ ID NO: 232580 - DNA, 15 bp, Homo sapiens
tcccccaggaataag

SEQ ID NO: 232581 - DNA, 15 bp, Homo sapiens
ttcccccaggaataa

SEQ ID NO: 232582 - DNA, 15 bp, Homo sapiens
gttcccccaggaata

SEQ ID NO: 232583 - DNA, 15 bp, Homo sapiens
ggttcccccaggaat

SEQ ID NO: 232584 - DNA, 15 bp, Homo sapiens
cggttcccccaggaa

SEQ ID NO: 232585 - DNA, 15 bp, Homo sapiens
gcggttcccccagga

SEQ ID NO: 232586 - DNA, 15 bp, Homo sapiens
ggcggttcccccagg

SEQ ID NO: 232587 - DNA, 15 bp, Homo sapiens
tggcggttcccccag

SEQ ID NO: 232588 - DNA, 15 bp, Homo sapiens
ttggcggttccccca

SEQ ID NO: 232589 - DNA, 15 bp, Homo sapiens
cttggcggttccccc

SEQ ID NO: 232590 - DNA, 15 bp, Homo sapiens
tcttggcggttcccc

SEQ ID NO: 232591 - DNA, 15 bp, Homo sapiens
gtcttggcggttccc

SEQ ID NO: 232592 - DNA, 15 bp, Homo sapiens
agtcttggcggttcc

SEQ ID NO: 232593 - DNA, 15 bp, Homo sapiens
cagtcttggcggttc

SEQ ID NO: 232594 - DNA, 15 bp, Homo sapiens
gcagtcttggcggtt

SEQ ID NO: 232595 - DNA, 15 bp, Homo sapiens
ggcagtcttggcggt

SEQ ID NO: 232596 - DNA, 15 bp, Homo sapiens
gggcagtcttggcgg

SEQ ID NO: 232597 - DNA, 15 bp, Homo sapiens
tgggcagtcttggcg

SEQ ID NO: 232598 - DNA, 15 bp, Homo sapiens
ctgggcagtcttggc

SEQ ID NO: 232599 - DNA, 15 bp, Homo sapiens
gctgggcagtcttgg

SEQ ID NO: 232600 - DNA, 15 bp, Homo sapiens
ggctgggcagtcttg

SEQ ID NO: 232601 - DNA, 15 bp, Homo sapiens
gggctgggcagtctt

SEQ ID NO: 232602 - DNA, 15 bp, Homo sapiens
agggctgggcagtct

SEQ ID NO: 232603 - DNA, 15 bp, Homo sapiens
cagggctgggcagtc

SEQ ID NO: 232604 - DNA, 15 bp, Homo sapiens
acagggctgggcagt

SEQ ID NO: 232605 - DNA, 15 bp, Homo sapiens
cacagggctgggcag

SEQ ID NO: 232606 - DNA, 15 bp, Homo sapiens
acacagggctgggca

SEQ ID NO: 232607 - DNA, 15 bp, Homo sapiens
cacacagggctgggc

SEQ ID NO: 232608 - DNA, 15 bp, Homo sapiens
ccacacagggctggg

SEQ ID NO: 232609 - DNA, 15 bp, Homo sapiens
cccacacagggctgg

SEQ ID NO: 232610 - DNA, 15 bp, Homo sapiens
ccccacacagggctg

SEQ ID NO: 232611 - DNA, 15 bp, Homo sapiens
accccacacagggct

SEQ ID NO: 232612 - DNA, 15 bp, Homo sapiens
aaccccacacagggc

SEQ ID NO: 232613 - DNA, 15 bp, Homo sapiens
gaaccccacacaggg

SEQ ID NO: 232614 - DNA, 15 bp, Homo sapiens
tgaaccccacacagg

SEQ ID NO: 232615 - DNA, 15 bp, Homo sapiens
ctgaaccccacacag

SEQ ID NO: 232616 - DNA, 15 bp, Homo sapiens
cctgaaccccacaca

SEQ ID NO: 232617 - DNA, 15 bp, Homo sapiens
gcctgaaccccacac

SEQ ID NO: 232618 - DNA, 15 bp, Homo sapiens
tgcctgaaccccaca

SEQ ID NO: 232619 - DNA, 15 bp, Homo sapiens
ttgcctgaaccccac

SEQ ID NO: 232620 - DNA, 15 bp, Homo sapiens
cttgcctgaacccca

SEQ ID NO: 232621 - DNA, 15 bp, Homo sapiens
acttgcctgaacccc

SEQ ID NO: 232622 - DNA, 15 bp, Homo sapiens
aacttgcctgaaccc

SEQ ID NO: 232623 - DNA, 15 bp, Homo sapiens
aaacttgcctgaacc

SEQ ID NO: 232624 - DNA, 15 bp, Homo sapiens
gaaacttgcctgaac

SEQ ID NO: 232625 - DNA, 15 bp, Homo sapiens
agaaacttgcctgaa

SEQ ID NO: 232626 - DNA, 15 bp, Homo sapiens
gagaaacttgcctga

SEQ ID NO: 232627 - DNA, 15 bp, Homo sapiens
tgagaaacttgcctg

SEQ ID NO: 232628 - DNA, 15 bp, Homo sapiens
gtgagaaacttgcct

SEQ ID NO: 232629 - DNA, 15 bp, Homo sapiens
tgtgagaaacttgcc

SEQ ID NO: 232630 - DNA, 15 bp, Homo sapiens
atgtgagaaacttgc

SEQ ID NO: 232631 - DNA, 15 bp, Homo sapiens
catgtgagaaacttg

SEQ ID NO: 232632 - DNA, 15 bp, Homo sapiens
acatgtgagaaactt

SEQ ID NO: 232633 - DNA, 15 bp, Homo sapiens
cacatgtgagaaact

SEQ ID NO: 232634 - DNA, 15 bp, Homo sapiens
gcacatgtgagaaac

SEQ ID NO: 232635 - DNA, 15 bp, Homo sapiens
ggcacatgtgagaaa

SEQ ID NO: 232636 - DNA, 15 bp, Homo sapiens
aggcacatgtgagaa

SEQ ID NO: 232637 - DNA, 15 bp, Homo sapiens
aaggcacatgtgaga

SEQ ID NO: 232638 - DNA, 15 bp, Homo sapiens
aaaggcacatgtgag

SEQ ID NO: 232639 - DNA, 15 bp, Homo sapiens
aaaaggcacatgtga

SEQ ID NO: 232640 - DNA, 15 bp, Homo sapiens
aaaaaggcacatgtg

SEQ ID NO: 232641 - DNA, 15 bp, Homo sapiens
caaaaaggcacatgt

SEQ ID NO: 232642 - DNA, 15 bp, Homo sapiens
ccaaaaaggcacatg

SEQ ID NO: 232643 - DNA, 15 bp, Homo sapiens
gccaaaaaggcacat

SEQ ID NO: 232644 - DNA, 15 bp, Homo sapiens
tgccaaaaaggcaca

SEQ ID NO: 232645 - DNA, 15 bp, Homo sapiens
ttgccaaaaaggcac

SEQ ID NO: 232646 - DNA, 15 bp, Homo sapiens
cttgccaaaaaggca

SEQ ID NO: 232647 - DNA, 15 bp, Homo sapiens
tcttgccaaaaaggc

SEQ ID NO: 232648 - DNA, 15 bp, Homo sapiens
ctcttgccaaaaagg

SEQ ID NO: 232649 - DNA, 15 bp, Homo sapiens
cctcttgccaaaaag

SEQ ID NO: 232650 - DNA, 15 bp, Homo sapiens
gcctcttgccaaaaa

SEQ ID NO: 232651 - DNA, 15 bp, Homo sapiens
ggcctcttgccaaaa

SEQ ID NO: 232652 - DNA, 15 bp, Homo sapiens
aggcctcttgccaaa

SEQ ID NO: 232653 - DNA, 15 bp, Homo sapiens
gaggcctcttgccaa

SEQ ID NO: 232654 - DNA, 15 bp, Homo sapiens
agaggcctcttgcca

SEQ ID NO: 232655 - DNA, 15 bp, Homo sapiens
cagaggcctcttgcc

SEQ ID NO: 232656 - DNA, 15 bp, Homo sapiens
ccagaggcctcttgc

SEQ ID NO: 232657 - DNA, 15 bp, Homo sapiens
gccagaggcctcttg

SEQ ID NO: 232658 - DNA, 15 bp, Homo sapiens
tgccagaggcctctt

SEQ ID NO: 232659 - DNA, 15 bp, Homo sapiens
ttgccagaggcctct

SEQ ID NO: 232660 - DNA, 15 bp, Homo sapiens
gttgccagaggcctc

SEQ ID NO: 232661 - DNA, 15 bp, Homo sapiens
ggttgccagaggcct

SEQ ID NO: 232662 - DNA, 15 bp, Homo sapiens
gggttgccagaggcc

SEQ ID NO: 232663 - DNA, 15 bp, Homo sapiens
ggggttgccagaggc

SEQ ID NO: 232664 - DNA, 15 bp, Homo sapiens
tggggttgccagagg

SEQ ID NO: 232665 - DNA, 15 bp, Homo sapiens
atggggttgccagag

SEQ ID NO: 232666 - DNA, 15 bp, Homo sapiens
catggggttgccaga

SEQ ID NO: 232667 - DNA, 15 bp, Homo sapiens
tcatggggttgccag

SEQ ID NO: 232668 - DNA, 15 bp, Homo sapiens
ctcatggggttgcca

SEQ ID NO: 232669 - DNA, 15 bp, Homo sapiens
actcatggggttgcc

SEQ ID NO: 232670 - DNA, 15 bp, Homo sapiens
gactcatggggttgc

SEQ ID NO: 232671 - DNA, 15 bp, Homo sapiens
ggactcatggggttg

SEQ ID NO: 232672 - DNA, 15 bp, Homo sapiens
gggactcatggggtt

SEQ ID NO: 232673 - DNA, 15 bp, Homo sapiens
ggggactcatggggt

SEQ ID NO: 232674 - DNA, 15 bp, Homo sapiens
tggggactcatgggg

SEQ ID NO: 232675 - DNA, 15 bp, Homo sapiens
ttggggactcatggg

SEQ ID NO: 232676 - DNA, 15 bp, Homo sapiens
tttggggactcatgg

SEQ ID NO: 232677 - DNA, 15 bp, Homo sapiens
ctttggggactcatg

SEQ ID NO: 232678 - DNA, 15 bp, Homo sapiens
tctttggggactcat

SEQ ID NO: 232679 - DNA, 15 bp, Homo sapiens
ctctttggggactca

SEQ ID NO: 232680 - DNA, 15 bp, Homo sapiens
tctctttggggactc

SEQ ID NO: 232681 - DNA, 15 bp, Homo sapiens
gtctctttggggact

SEQ ID NO: 232682 - DNA, 15 bp, Homo sapiens
agtctctttggggac

SEQ ID NO: 232683 - DNA, 15 bp, Homo sapiens
gagtctctttgggga

SEQ ID NO: 232684 - DNA, 15 bp, Homo sapiens
tgagtctctttgggg

SEQ ID NO: 232685 - DNA, 15 bp, Homo sapiens
ttgagtctctttggg

SEQ ID NO: 232686 - DNA, 15 bp, Homo sapiens
attgagtctctttgg

SEQ ID NO: 232687 - DNA, 15 bp, Homo sapiens
aattgagtctctttg

SEQ ID NO: 232688 - DNA, 15 bp, Homo sapiens
gaattgagtctcttt

SEQ ID NO: 232689 - DNA, 15 bp, Homo sapiens
agaattgagtctctt

SEQ ID NO: 232690 - DNA, 15 bp, Homo sapiens
tagaattgagtctct

SEQ ID NO: 232691 - DNA, 15 bp, Homo sapiens
ttagaattgagtctc

SEQ ID NO: 232692 - DNA, 15 bp, Homo sapiens
tttagaattgagtct

SEQ ID NO: 232693 - DNA, 15 bp, Homo sapiens
ttttagaattgagtc

SEQ ID NO: 232694 - DNA, 15 bp, Homo sapiens
cttttagaattgagt

SEQ ID NO: 232695 - DNA, 15 bp, Homo sapiens
acttttagaattgag

SEQ ID NO: 232696 - DNA, 15 bp, Homo sapiens
aacttttagaattga

SEQ ID NO: 232697 - DNA, 15 bp, Homo sapiens
caacttttagaattg

SEQ ID NO: 232698 - DNA, 15 bp, Homo sapiens
ccaacttttagaatt

SEQ ID NO: 232699 - DNA, 15 bp, Homo sapiens
accaacttttagaat

SEQ ID NO: 232700 - DNA, 15 bp, Homo sapiens
gaccaacttttagaa

SEQ ID NO: 232701 - DNA, 15 bp, Homo sapiens
agaccaacttttaga

SEQ ID NO: 232702 - DNA, 15 bp, Homo sapiens
gagaccaacttttag

SEQ ID NO: 232703 - DNA, 15 bp, Homo sapiens
ggagaccaactttta

SEQ ID NO: 232704 - DNA, 15 bp, Homo sapiens
tggagaccaactttt

SEQ ID NO: 232705 - DNA, 15 bp, Homo sapiens
gtggagaccaacttt

SEQ ID NO: 232706 - DNA, 15 bp, Homo sapiens
ggtggagaccaactt

SEQ ID NO: 232707 - DNA, 15 bp, Homo sapiens
tggtggagaccaact

SEQ ID NO: 232708 - DNA, 15 bp, Homo sapiens
ctggtggagaccaac

SEQ ID NO: 232709 - DNA, 15 bp, Homo sapiens
gctggtggagaccaa

SEQ ID NO: 232710 - DNA, 15 bp, Homo sapiens
agctggtggagacca

SEQ ID NO: 232711 - DNA, 15 bp, Homo sapiens
gagctggtggagacc

SEQ ID NO: 232712 - DNA, 15 bp, Homo sapiens
agagctggtggagac

SEQ ID NO: 232713 - DNA, 15 bp, Homo sapiens
gagagctggtggaga

SEQ ID NO: 232714 - DNA, 15 bp, Homo sapiens
agagagctggtggag

SEQ ID NO: 232715 - DNA, 15 bp, Homo sapiens
cagagagctggtgga

SEQ ID NO: 232716 - DNA, 15 bp, Homo sapiens
acagagagctggtgg

SEQ ID NO: 232717 - DNA, 15 bp, Homo sapiens
cacagagagctggtg

SEQ ID NO: 232718 - DNA, 15 bp, Homo sapiens
ccacagagagctggt

SEQ ID NO: 232719 - DNA, 15 bp, Homo sapiens
gccacagagagctgg

SEQ ID NO: 232720 - DNA, 15 bp, Homo sapiens
agccacagagagctg

SEQ ID NO: 232721 - DNA, 15 bp, Homo sapiens
aagccacagagagct

SEQ ID NO: 232722 - DNA, 15 bp, Homo sapiens
taagccacagagagc

SEQ ID NO: 232723 - DNA, 15 bp, Homo sapiens
ctaagccacagagag

SEQ ID NO: 232724 - DNA, 15 bp, Homo sapiens
cctaagccacagaga

SEQ ID NO: 232725 - DNA, 15 bp, Homo sapiens
ccctaagccacagag

SEQ ID NO: 232726 - DNA, 15 bp, Homo sapiens
cccctaagccacaga

SEQ ID NO: 232727 - DNA, 15 bp, Homo sapiens
acccctaagccacag

SEQ ID NO: 232728 - DNA, 15 bp, Homo sapiens
aacccctaagccaca

SEQ ID NO: 232729 - DNA, 15 bp, Homo sapiens
gaacccctaagccac

SEQ ID NO: 232730 - DNA, 15 bp, Homo sapiens
tgaacccctaagcca

SEQ ID NO: 232731 - DNA, 15 bp, Homo sapiens
ttgaacccctaagcc

SEQ ID NO: 232732 - DNA, 15 bp, Homo sapiens
cttgaacccctaagc

SEQ ID NO: 232733 - DNA, 15 bp, Homo sapiens
acttgaacccctaag

SEQ ID NO: 232734 - DNA, 15 bp, Homo sapiens
aacttgaacccctaa

SEQ ID NO: 232735 - DNA, 15 bp, Homo sapiens
gaacttgaaccccta

SEQ ID NO: 232736 - DNA, 15 bp, Homo sapiens
tgaacttgaacccct

SEQ ID NO: 232737 - DNA, 15 bp, Homo sapiens
ttgaacttgaacccc

SEQ ID NO: 232738 - DNA, 15 bp, Homo sapiens
gttgaacttgaaccc

SEQ ID NO: 232739 - DNA, 15 bp, Homo sapiens
agttgaacttgaacc

SEQ ID NO: 232740 - DNA, 15 bp, Homo sapiens
cagttgaacttgaac

SEQ ID NO: 232741 - DNA, 15 bp, Homo sapiens
acagttgaacttgaa

SEQ ID NO: 232742 - DNA, 15 bp, Homo sapiens
cacagttgaacttga

SEQ ID NO: 232743 - DNA, 15 bp, Homo sapiens
tcacagttgaacttg

SEQ ID NO: 232744 - DNA, 15 bp, Homo sapiens
ttcacagttgaactt

SEQ ID NO: 232745 - DNA, 15 bp, Homo sapiens
tttcacagttgaact

SEQ ID NO: 232746 - DNA, 15 bp, Homo sapiens
ctttcacagttgaac

SEQ ID NO: 232747 - DNA, 15 bp, Homo sapiens
gctttcacagttgaa

SEQ ID NO: 232748 - DNA, 15 bp, Homo sapiens
ggctttcacagttga

SEQ ID NO: 232749 - DNA, 15 bp, Homo sapiens
gggctttcacagttg

SEQ ID NO: 232750 - DNA, 15 bp, Homo sapiens
agggctttcacagtt

SEQ ID NO: 232751 - DNA, 15 bp, Homo sapiens
cagggctttcacagt

SEQ ID NO: 232752 - DNA, 15 bp, Homo sapiens
acagggctttcacag

SEQ ID NO: 232753 - DNA, 15 bp, Homo sapiens
aacagggctttcaca

SEQ ID NO: 232754 - DNA, 15 bp, Homo sapiens
aaacagggctttcac

SEQ ID NO: 232755 - DNA, 15 bp, Homo sapiens
aaaacagggctttca

SEQ ID NO: 232756 - DNA, 15 bp, Homo sapiens
caaaacagggctttc

SEQ ID NO: 232757 - DNA, 15 bp, Homo sapiens
acaaaacagggcttt

SEQ ID NO: 232758 - DNA, 15 bp, Homo sapiens
aacaaaacagggctt

SEQ ID NO: 232759 - DNA, 15 bp, Homo sapiens
aaacaaaacagggct

SEQ ID NO: 232760 - DNA, 15 bp, Homo sapiens
aaaacaaaacagggc

SEQ ID NO: 232761 - DNA, 15 bp, Homo sapiens
caaaacaaaacaggg

SEQ ID NO: 232762 - DNA, 15 bp, Homo sapiens
tcaaaacaaaacagg

SEQ ID NO: 232763 - DNA, 15 bp, Homo sapiens
atcaaaacaaaacag

SEQ ID NO: 232764 - DNA, 15 bp, Homo sapiens
aatcaaaacaaaaca

SEQ ID NO: 232765 - DNA, 15 bp, Homo sapiens
aaatcaaaacaaaac

SEQ ID NO: 232766 - DNA, 15 bp, Homo sapiens
aaaatcaaaacaaaa

SEQ ID NO: 232767 - DNA, 15 bp, Homo sapiens
caaaatcaaaacaaa

SEQ ID NO: 232768 - DNA, 15 bp, Homo sapiens
gcaaaatcaaaacaa

SEQ ID NO: 232769 - DNA, 15 bp, Homo sapiens
agcaaaatcaaaaca

SEQ ID NO: 232770 - DNA, 15 bp, Homo sapiens
aagcaaaatcaaaac

SEQ ID NO: 232771 - DNA, 15 bp, Homo sapiens
aaagcaaaatcaaaa

SEQ ID NO: 232772 - DNA, 15 bp, Homo sapiens
caaagcaaaatcaaa

SEQ ID NO: 232773 - DNA, 15 bp, Homo sapiens
tcaaagcaaaatcaa

SEQ ID NO: 232774 - DNA, 15 bp, Homo sapiens
ctcaaagcaaaatca

SEQ ID NO: 232775 - DNA, 15 bp, Homo sapiens
cctcaaagcaaaatc

SEQ ID NO: 232776 - DNA, 15 bp, Homo sapiens
ccctcaaagcaaaat

SEQ ID NO: 232777 - DNA, 15 bp, Homo sapiens
tccctcaaagcaaaa

SEQ ID NO: 232778 - DNA, 15 bp, Homo sapiens
ctccctcaaagcaaa

SEQ ID NO: 232779 - DNA, 15 bp, Homo sapiens
tctccctcaaagcaa

SEQ ID NO: 232780 - DNA, 15 bp, Homo sapiens
ctctccctcaaagca

SEQ ID NO: 232781 - DNA, 15 bp, Homo sapiens
cctctccctcaaagc

SEQ ID NO: 232782 - DNA, 15 bp, Homo sapiens
tcctctccctcaaag

SEQ ID NO: 232783 - DNA, 15 bp, Homo sapiens
ttcctctccctcaaa

SEQ ID NO: 232784 - DNA, 15 bp, Homo sapiens
tttcctctccctcaa

SEQ ID NO: 232785 - DNA, 15 bp, Homo sapiens
gtttcctctccctca

SEQ ID NO: 232786 - DNA, 15 bp, Homo sapiens
ggtttcctctccctc

SEQ ID NO: 232787 - DNA, 15 bp, Homo sapiens
cggtttcctctccct

SEQ ID NO: 232788 - DNA, 15 bp, Homo sapiens
gcggtttcctctccc

SEQ ID NO: 232789 - DNA, 15 bp, Homo sapiens
ggcggtttcctctcc

SEQ ID NO: 232790 - DNA, 15 bp, Homo sapiens
gggcggtttcctctc

SEQ ID NO: 232791 - DNA, 15 bp, Homo sapiens
agggcggtttcctct

SEQ ID NO: 232792 - DNA, 15 bp, Homo sapiens
aagggcggtttcctc

SEQ ID NO: 232793 - DNA, 15 bp, Homo sapiens
gaagggcggtttcct

SEQ ID NO: 232794 - DNA, 15 bp, Homo sapiens
agaagggcggtttcc

SEQ ID NO: 232795 - DNA, 15 bp, Homo sapiens
cagaagggcggtttc

SEQ ID NO: 232796 - DNA, 15 bp, Homo sapiens
acagaagggcggttt

SEQ ID NO: 232797 - DNA, 15 bp, Homo sapiens
aacagaagggcggtt

SEQ ID NO: 232798 - DNA, 15 bp, Homo sapiens
aaacagaagggcggt

SEQ ID NO: 232799 - DNA, 15 bp, Homo sapiens
caaacagaagggcgg

SEQ ID NO: 232800 - DNA, 15 bp, Homo sapiens
acaaacagaagggcg

SEQ ID NO: 232801 - DNA, 15 bp, Homo sapiens
aacaaacagaagggc

SEQ ID NO: 232802 - DNA, 15 bp, Homo sapiens
gaacaaacagaaggg

SEQ ID NO: 232803 - DNA, 15 bp, Homo sapiens
tgaacaaacagaagg

SEQ ID NO: 232804 - DNA, 15 bp, Homo sapiens
ttgaacaaacagaag

SEQ ID NO: 232805 - DNA, 15 bp, Homo sapiens
gttgaacaaacagaa

SEQ ID NO: 232806 - DNA, 15 bp, Homo sapiens
agttgaacaaacaga

SEQ ID NO: 232807 - DNA, 15 bp, Homo sapiens
gagttgaacaaacag

SEQ ID NO: 232808 - DNA, 15 bp, Homo sapiens
ggagttgaacaaaca

SEQ ID NO: 232809 - DNA, 15 bp, Homo sapiens
aggagttgaacaaac

SEQ ID NO: 232810 - DNA, 15 bp, Homo sapiens
aaggagttgaacaaa

SEQ ID NO: 232811 - DNA, 15 bp, Homo sapiens
gaaggagttgaacaa

SEQ ID NO: 232812 - DNA, 15 bp, Homo sapiens
agaaggagttgaaca

SEQ ID NO: 232813 - DNA, 15 bp, Homo sapiens
gagaaggagttgaac

SEQ ID NO: 232814 - DNA, 15 bp, Homo sapiens
ggagaaggagttgaa

SEQ ID NO: 232815 - DNA, 15 bp, Homo sapiens
aggagaaggagttga

SEQ ID NO: 232816 - DNA, 15 bp, Homo sapiens
taggagaaggagttg

SEQ ID NO: 232817 - DNA, 15 bp, Homo sapiens
ttaggagaaggagtt

SEQ ID NO: 232818 - DNA, 15 bp, Homo sapiens
cttaggagaaggagt

SEQ ID NO: 232819 - DNA, 15 bp, Homo sapiens
ccttaggagaaggag

SEQ ID NO: 232820 - DNA, 15 bp, Homo sapiens
cccttaggagaagga

SEQ ID NO: 232821 - DNA, 15 bp, Homo sapiens
ccccttaggagaagg

SEQ ID NO: 232822 - DNA, 15 bp, Homo sapiens
tccccttaggagaag

SEQ ID NO: 232823 - DNA, 15 bp, Homo sapiens
ctccccttaggagaa

SEQ ID NO: 232824 - DNA, 15 bp, Homo sapiens
tctccccttaggaga

SEQ ID NO: 232825 - DNA, 15 bp, Homo sapiens
ttctccccttaggag

SEQ ID NO: 232826 - DNA, 15 bp, Homo sapiens
tttctccccttagga

SEQ ID NO: 232827 - DNA, 15 bp, Homo sapiens
atttctccccttagg

SEQ ID NO: 232828 - DNA, 15 bp, Homo sapiens
gatttctccccttag

SEQ ID NO: 232829 - DNA, 15 bp, Homo sapiens
tgatttctcccctta

SEQ ID NO: 232830 - DNA, 15 bp, Homo sapiens
ttgatttctcccctt

SEQ ID NO: 232831 - DNA, 15 bp, Homo sapiens
attgatttctcccct

SEQ ID NO: 232832 - DNA, 15 bp, Homo sapiens
tattgatttctcccc

SEQ ID NO: 232833 - DNA, 15 bp, Homo sapiens
atattgatttctccc

SEQ ID NO: 232834 - DNA, 15 bp, Homo sapiens
aatattgatttctcc

SEQ ID NO: 232835 - DNA, 15 bp, Homo sapiens
aaatattgatttctc

SEQ ID NO: 232836 - DNA, 15 bp, Homo sapiens
taaatattgatttct

SEQ ID NO: 232837 - DNA, 15 bp, Homo sapiens
gtaaatattgatttc

SEQ ID NO: 232838 - DNA, 15 bp, Homo sapiens
cgtaaatattgattt

SEQ ID NO: 232839 - DNA, 15 bp, Homo sapiens
acgtaaatattgatt

SEQ ID NO: 232840 - DNA, 15 bp, Homo sapiens
gacgtaaatattgat

SEQ ID NO: 232841 - DNA, 15 bp, Homo sapiens
ggacgtaaatattga

SEQ ID NO: 232842 - DNA, 15 bp, Homo sapiens
tggacgtaaatattg

SEQ ID NO: 232843 - DNA, 15 bp, Homo sapiens
ctggacgtaaatatt

SEQ ID NO: 232844 - DNA, 15 bp, Homo sapiens
tctggacgtaaatat

SEQ ID NO: 232845 - DNA, 15 bp, Homo sapiens
gtctggacgtaaata

SEQ ID NO: 232846 - DNA, 15 bp, Homo sapiens
agtctggacgtaaat

SEQ ID NO: 232847 - DNA, 15 bp, Homo sapiens
gagtctggacgtaaa

SEQ ID NO: 232848 - DNA, 15 bp, Homo sapiens
ggagtctggacgtaa

SEQ ID NO: 232849 - DNA, 15 bp, Homo sapiens
tggagtctggacgta

SEQ ID NO: 232850 - DNA, 15 bp, Homo sapiens
ctggagtctggacgt

SEQ ID NO: 232851 - DNA, 15 bp, Homo sapiens
cctggagtctggacg

SEQ ID NO: 232852 - DNA, 15 bp, Homo sapiens
acctggagtctggac

SEQ ID NO: 232853 - DNA, 15 bp, Homo sapiens
tacctggagtctgga

SEQ ID NO: 232854 - DNA, 15 bp, Homo sapiens
atacctggagtctgg

SEQ ID NO: 232855 - DNA, 15 bp, Homo sapiens
gatacctggagtctg

SEQ ID NO: 232856 - DNA, 15 bp, Homo sapiens
ggatacctggagtct

SEQ ID NO: 232857 - DNA, 15 bp, Homo sapiens
cggatacctggagtc

SEQ ID NO: 232858 - DNA, 15 bp, Homo sapiens
acggatacctggagt

SEQ ID NO: 232859 - DNA, 15 bp, Homo sapiens
tacggatacctggag

SEQ ID NO: 232860 - DNA, 15 bp, Homo sapiens
gtacggatacctgga

SEQ ID NO: 232861 - DNA, 15 bp, Homo sapiens
tgtacggatacctgg

SEQ ID NO: 232862 - DNA, 15 bp, Homo sapiens
ttgtacggatacctg

SEQ ID NO: 232863 - DNA, 15 bp, Homo sapiens
attgtacggatacct

SEQ ID NO: 232864 - DNA, 15 bp, Homo sapiens
aattgtacggatacc

SEQ ID NO: 232865 - DNA, 15 bp, Homo sapiens
caattgtacggatac

SEQ ID NO: 232866 - DNA, 15 bp, Homo sapiens
tcaattgtacggata

SEQ ID NO: 232867 - DNA, 15 bp, Homo sapiens
atcaattgtacggat

SEQ ID NO: 232868 - DNA, 15 bp, Homo sapiens
aatcaattgtacgga

SEQ ID NO: 232869 - DNA, 15 bp, Homo sapiens
aaatcaattgtacgg

SEQ ID NO: 232870 - DNA, 15 bp, Homo sapiens
aaaatcaattgtacg

SEQ ID NO: 232871 - DNA, 15 bp, Homo sapiens
aaaaatcaattgtac

SEQ ID NO: 232872 - DNA, 15 bp, Homo sapiens
gaaaaatcaattgta

SEQ ID NO: 232873 - DNA, 15 bp, Homo sapiens
tgaaaaatcaattgt

SEQ ID NO: 232874 - DNA, 15 bp, Homo sapiens
ctgaaaaatcaattg

SEQ ID NO: 232875 - DNA, 15 bp, Homo sapiens
tctgaaaaatcaatt

SEQ ID NO: 232876 - DNA, 15 bp, Homo sapiens
atctgaaaaatcaat

SEQ ID NO: 232877 - DNA, 15 bp, Homo sapiens
catctgaaaaatcaa

SEQ ID NO: 232878 - DNA, 15 bp, Homo sapiens
acatctgaaaaatca

SEQ ID NO: 232879 - DNA, 15 bp, Homo sapiens
aacatctgaaaaatc

SEQ ID NO: 232880 - DNA, 15 bp, Homo sapiens
aaacatctgaaaaat

SEQ ID NO: 232881 - DNA, 15 bp, Homo sapiens
taaacatctgaaaaa

SEQ ID NO: 232882 - DNA, 15 bp, Homo sapiens
ataaacatctgaaaa

SEQ ID NO: 232883 - DNA, 15 bp, Homo sapiens
tataaacatctgaaa

SEQ ID NO: 232884 - DNA, 15 bp, Homo sapiens
gtataaacatctgaa

SEQ ID NO: 232885 - DNA, 15 bp, Homo sapiens
agtataaacatctga

SEQ ID NO: 232886 - DNA, 15 bp, Homo sapiens
gagtataaacatctg

SEQ ID NO: 232887 - DNA, 15 bp, Homo sapiens
tgagtataaacatct

SEQ ID NO: 232888 - DNA, 15 bp, Homo sapiens
ctgagtataaacatc

SEQ ID NO: 232889 - DNA, 15 bp, Homo sapiens
gctgagtataaacat

SEQ ID NO: 232890 - DNA, 15 bp, Homo sapiens
ggctgagtataaaca

SEQ ID NO: 232891 - DNA, 15 bp, Homo sapiens
tggctgagtataaac

SEQ ID NO: 232892 - DNA, 15 bp, Homo sapiens
ttggctgagtataaa

SEQ ID NO: 232893 - DNA, 15 bp, Homo sapiens
tttggctgagtataa

SEQ ID NO: 232894 - DNA, 15 bp, Homo sapiens
ctttggctgagtata

SEQ ID NO: 232895 - DNA, 15 bp, Homo sapiens
cctttggctgagtat

SEQ ID NO: 232896 - DNA, 15 bp, Homo sapiens
gcctttggctgagta

SEQ ID NO: 232897 - DNA, 15 bp, Homo sapiens
cgcctttggctgagt

SEQ ID NO: 232898 - DNA, 15 bp, Homo sapiens
ccgcctttggctgag

SEQ ID NO: 232899 - DNA, 15 bp, Homo sapiens
cccgcctttggctga

SEQ ID NO: 232900 - DNA, 15 bp, Homo sapiens
tcccgcctttggctg

SEQ ID NO: 232901 - DNA, 15 bp, Homo sapiens
atcccgcctttggct

SEQ ID NO: 232902 - DNA, 15 bp, Homo sapiens
gatcccgcctttggc

SEQ ID NO: 232903 - DNA, 15 bp, Homo sapiens
ggatcccgcctttgg

SEQ ID NO: 232904 - DNA, 15 bp, Homo sapiens
gggatcccgcctttg

SEQ ID NO: 232905 - DNA, 15 bp, Homo sapiens
tgggatcccgccttt

SEQ ID NO: 232906 - DNA, 15 bp, Homo sapiens
gtgggatcccgcctt

SEQ ID NO: 232907 - DNA, 15 bp, Homo sapiens
tgtgggatcccgcct

SEQ ID NO: 232908 - DNA, 15 bp, Homo sapiens
ttgtgggatcccgcc

SEQ ID NO: 232909 - DNA, 15 bp, Homo sapiens
tttgtgggatcccgc

SEQ ID NO: 232910 - DNA, 15 bp, Homo sapiens
ttttgtgggatcccg

SEQ ID NO: 232911 - DNA, 15 bp, Homo sapiens
gttttgtgggatccc

SEQ ID NO: 232912 - DNA, 15 bp, Homo sapiens
tgttttgtgggatcc

SEQ ID NO: 232913 - DNA, 15 bp, Homo sapiens
ttgttttgtgggatc

SEQ ID NO: 232914 - DNA, 15 bp, Homo sapiens
tttgttttgtgggat

SEQ ID NO: 232915 - DNA, 15 bp, Homo sapiens
ttttgttttgtggga

SEQ ID NO: 232916 - DNA, 15 bp, Homo sapiens
tttttgttttgtggg

SEQ ID NO: 232917 - DNA, 15 bp, Homo sapiens
ttttttgttttgtgg

SEQ ID NO: 232918 - DNA, 15 bp, Homo sapiens
attttttgttttgtg

SEQ ID NO: 232919 - DNA, 15 bp, Homo sapiens
tattttttgttttgt

SEQ ID NO: 232920 - DNA, 15 bp, Homo sapiens
atattttttgttttg

SEQ ID NO: 232921 - DNA, 15 bp, Homo sapiens
aatattttttgtttt

SEQ ID NO: 232922 - DNA, 15 bp, Homo sapiens
aaatattttttgttt

SEQ ID NO: 232923 - DNA, 15 bp, Homo sapiens
aaaatattttttgtt

SEQ ID NO: 232924 - DNA, 15 bp, Homo sapiens
aaaaatattttttgt

SEQ ID NO: 232925 - DNA, 15 bp, Homo sapiens
aaaaaatattttttg

SEQ ID NO: 232926 - DNA, 15 bp, Homo sapiens
aaaaaaatatttttt

SEQ ID NO: 232927 - DNA, 15 bp, Homo sapiens
caaaaaaatattttt

SEQ ID NO: 232928 - DNA, 15 bp, Homo sapiens
ccaaaaaaatatttt

SEQ ID NO: 232929 - DNA, 15 bp, Homo sapiens
gccaaaaaaatattt

SEQ ID NO: 232930 - DNA, 15 bp, Homo sapiens
agccaaaaaaatatt

SEQ ID NO: 232931 - DNA, 15 bp, Homo sapiens
cagccaaaaaaatat

SEQ ID NO: 232932 - DNA, 15 bp, Homo sapiens
acagccaaaaaaata

SEQ ID NO: 232933 - DNA, 15 bp, Homo sapiens
tacagccaaaaaaat

SEQ ID NO: 232934 - DNA, 15 bp, Homo sapiens
gtacagccaaaaaaa

SEQ ID NO: 232935 - DNA, 15 bp, Homo sapiens
agtacagccaaaaaa

SEQ ID NO: 232936 - DNA, 15 bp, Homo sapiens
aagtacagccaaaaa

SEQ ID NO: 232937 - DNA, 15 bp, Homo sapiens
aaagtacagccaaaa

SEQ ID NO: 232938 - DNA, 15 bp, Homo sapiens
aaaagtacagccaaa

SEQ ID NO: 232939 - DNA, 15 bp, Homo sapiens
caaaagtacagccaa

SEQ ID NO: 232940 - DNA, 15 bp, Homo sapiens
acaaaagtacagcca

SEQ ID NO: 232941 - DNA, 15 bp, Homo sapiens
cacaaaagtacagcc

SEQ ID NO: 232942 - DNA, 15 bp, Homo sapiens
tcacaaaagtacagc

SEQ ID NO: 232943 - DNA, 15 bp, Homo sapiens
ttcacaaaagtacag

SEQ ID NO: 232944 - DNA, 15 bp, Homo sapiens
cttcacaaaagtaca

SEQ ID NO: 232945 - DNA, 15 bp, Homo sapiens
tcttcacaaaagtac

SEQ ID NO: 232946 - DNA, 15 bp, Homo sapiens
atcttcacaaaagta

SEQ ID NO: 232947 - DNA, 15 bp, Homo sapiens
aatcttcacaaaagt

SEQ ID NO: 232948 - DNA, 15 bp, Homo sapiens
aaatcttcacaaaag

SEQ ID NO: 232949 - DNA, 15 bp, Homo sapiens
aaaatcttcacaaaa

SEQ ID NO: 232950 - DNA, 15 bp, Homo sapiens
taaaatcttcacaaa

SEQ ID NO: 232951 - DNA, 15 bp, Homo sapiens
ataaaatcttcacaa

SEQ ID NO: 232952 - DNA, 15 bp, Homo sapiens
aataaaatcttcaca

SEQ ID NO: 232953 - DNA, 15 bp, Homo sapiens
aaataaaatcttcac

SEQ ID NO: 232954 - DNA, 15 bp, Homo sapiens
taaataaaatcttca

SEQ ID NO: 232955 - DNA, 15 bp, Homo sapiens
ttaaataaaatcttc

SEQ ID NO: 232956 - DNA, 15 bp, Homo sapiens
tttaaataaaatctt

SEQ ID NO: 232957 - DNA, 15 bp, Homo sapiens
atttaaataaaatct

SEQ ID NO: 232958 - DNA, 15 bp, Homo sapiens
aatttaaataaaatc

SEQ ID NO: 232959 - DNA, 15 bp, Homo sapiens
gaatttaaataaaat

SEQ ID NO: 232960 - DNA, 15 bp, Homo sapiens
ggaatttaaataaaa

SEQ ID NO: 232961 - DNA, 15 bp, Homo sapiens
aggaatttaaataaa

SEQ ID NO: 232962 - DNA, 15 bp, Homo sapiens
caggaatttaaataa

SEQ ID NO: 232963 - DNA, 15 bp, Homo sapiens
tcaggaatttaaata

SEQ ID NO: 232964 - DNA, 15 bp, Homo sapiens
atcaggaatttaaat

SEQ ID NO: 232965 - DNA, 15 bp, Homo sapiens
aatcaggaatttaaa

SEQ ID NO: 232966 - DNA, 15 bp, Homo sapiens
caatcaggaatttaa

SEQ ID NO: 232967 - DNA, 15 bp, Homo sapiens
tcaatcaggaattta

SEQ ID NO: 232968 - DNA, 15 bp, Homo sapiens
atcaatcaggaattt

SEQ ID NO: 232969 - DNA, 15 bp, Homo sapiens
gatcaatcaggaatt

SEQ ID NO: 232970 - DNA, 15 bp, Homo sapiens
tgatcaatcaggaat

SEQ ID NO: 232971 - DNA, 15 bp, Homo sapiens
ctgatcaatcaggaa

SEQ ID NO: 232972 - DNA, 15 bp, Homo sapiens
actgatcaatcagga

SEQ ID NO: 232973 - DNA, 15 bp, Homo sapiens
cactgatcaatcagg

SEQ ID NO: 232974 - DNA, 15 bp, Homo sapiens
acactgatcaatcag

SEQ ID NO: 232975 - DNA, 15 bp, Homo sapiens
gacactgatcaatca

SEQ ID NO: 232976 - DNA, 15 bp, Homo sapiens
agacactgatcaatc

SEQ ID NO: 232977 - DNA, 15 bp, Homo sapiens
tagacactgatcaat

SEQ ID NO: 232978 - DNA, 15 bp, Homo sapiens
atagacactgatcaa

SEQ ID NO: 232979 - DNA, 15 bp, Homo sapiens
aatagacactgatca

SEQ ID NO: 232980 - DNA, 15 bp, Homo sapiens
taatagacactgatc

SEQ ID NO: 232981 - DNA, 15 bp, Homo sapiens
ctaatagacactgat

SEQ ID NO: 232982 - DNA, 15 bp, Homo sapiens
cctaatagacactga

SEQ ID NO: 232983 - DNA, 15 bp, Homo sapiens
acctaatagacactg

SEQ ID NO: 232984 - DNA, 15 bp, Homo sapiens
cacctaatagacact

SEQ ID NO: 232985 - DNA, 15 bp, Homo sapiens
tcacctaatagacac

SEQ ID NO: 232986 - DNA, 15 bp, Homo sapiens
atcacctaatagaca

SEQ ID NO: 232987 - DNA, 15 bp, Homo sapiens
aatcacctaatagac

SEQ ID NO: 232988 - DNA, 15 bp, Homo sapiens
aaatcacctaataga

SEQ ID NO: 232989 - DNA, 15 bp, Homo sapiens
caaatcacctaatag

SEQ ID NO: 232990 - DNA, 15 bp, Homo sapiens
ccaaatcacctaata

SEQ ID NO: 232991 - DNA, 15 bp, Homo sapiens
tccaaatcacctaat

SEQ ID NO: 232992 - DNA, 15 bp, Homo sapiens
ttccaaatcacctaa

SEQ ID NO: 232993 - DNA, 15 bp, Homo sapiens
attccaaatcaccta

SEQ ID NO: 232994 - DNA, 15 bp, Homo sapiens
tattccaaatcacct

SEQ ID NO: 232995 - DNA, 15 bp, Homo sapiens
ttattccaaatcacc

SEQ ID NO: 232996 - DNA, 15 bp, Homo sapiens
gttattccaaatcac

SEQ ID NO: 232997 - DNA, 15 bp, Homo sapiens
tgttattccaaatca

SEQ ID NO: 232998 - DNA, 15 bp, Homo sapiens
ttgttattccaaatc

SEQ ID NO: 232999 - DNA, 15 bp, Homo sapiens
attgttattccaaat

SEQ ID NO: 233000 - DNA, 15 bp, Homo sapiens
cattgttattccaaa

SEQ ID NO: 233001 - DNA, 15 bp, Homo sapiens
acattgttattccaa

SEQ ID NO: 233002 - DNA, 15 bp, Homo sapiens
tacattgttattcca

SEQ ID NO: 233003 - DNA, 15 bp, Homo sapiens
ttacattgttattcc

SEQ ID NO: 233004 - DNA, 15 bp, Homo sapiens
tttacattgttattc

SEQ ID NO: 233005 - DNA, 15 bp, Homo sapiens
ttttacattgttatt

SEQ ID NO: 233006 - DNA, 15 bp, Homo sapiens
tttttacattgttat

SEQ ID NO: 233007 - DNA, 15 bp, Homo sapiens
gtttttacattgtta

SEQ ID NO: 233008 - DNA, 15 bp, Homo sapiens
tgtttttacattgtt

SEQ ID NO: 233009 - DNA, 15 bp, Homo sapiens
ttgtttttacattgt

SEQ ID NO: 233010 - DNA, 15 bp, Homo sapiens
attgtttttacattg

SEQ ID NO: 233011 - DNA, 15 bp, Homo sapiens
tattgtttttacatt

SEQ ID NO: 233012 - DNA, 15 bp, Homo sapiens
atattgtttttacat

SEQ ID NO: 233013 - DNA, 15 bp, Homo sapiens
tatattgtttttaca

SEQ ID NO: 233014 - DNA, 15 bp, Homo sapiens
gtatattgtttttac

SEQ ID NO: 233015 - DNA, 15 bp, Homo sapiens
tgtatattgttttta

SEQ ID NO: 233016 - DNA, 15 bp, Homo sapiens
ttgtatattgttttt

SEQ ID NO: 233017 - DNA, 15 bp, Homo sapiens
gttgtatattgtttt

SEQ ID NO: 233018 - DNA, 15 bp, Homo sapiens
cgttgtatattgttt

SEQ ID NO: 233019 - DNA, 15 bp, Homo sapiens
tcgttgtatattgtt

SEQ ID NO: 233020 - DNA, 15 bp, Homo sapiens
ttcgttgtatattgt

SEQ ID NO: 233021 - DNA, 15 bp, Homo sapiens
tttcgttgtatattg

SEQ ID NO: 233022 - DNA, 15 bp, Homo sapiens
ctttcgttgtatatt

SEQ ID NO: 233023 - DNA, 15 bp, Homo sapiens
cctttcgttgtatat

SEQ ID NO: 233024 - DNA, 15 bp, Homo sapiens
tcctttcgttgtata

SEQ ID NO: 233025 - DNA, 15 bp, Homo sapiens
ttcctttcgttgtat

SEQ ID NO: 233026 - DNA, 15 bp, Homo sapiens
cttcctttcgttgta

SEQ ID NO: 233027 - DNA, 15 bp, Homo sapiens
gcttcctttcgttgt

SEQ ID NO: 233028 - DNA, 15 bp, Homo sapiens
agcttcctttcgttg

SEQ ID NO: 233029 - DNA, 15 bp, Homo sapiens
tagcttcctttcgtt

SEQ ID NO: 233030 - DNA, 15 bp, Homo sapiens
ttagcttcctttcgt

SEQ ID NO: 233031 - DNA, 15 bp, Homo sapiens
tttagcttcctttcg

SEQ ID NO: 233032 - DNA, 15 bp, Homo sapiens
ttttagcttcctttc

SEQ ID NO: 233033 - DNA, 15 bp, Homo sapiens
tttttagcttccttt

SEQ ID NO: 233034 - DNA, 15 bp, Homo sapiens
atttttagcttcctt

SEQ ID NO: 233035 - DNA, 15 bp, Homo sapiens
gatttttagcttcct

SEQ ID NO: 233036 - DNA, 15 bp, Homo sapiens
agatttttagcttcc

SEQ ID NO: 233037 - DNA, 15 bp, Homo sapiens
tagatttttagcttc

SEQ ID NO: 233038 - DNA, 15 bp, Homo sapiens
atagatttttagctt

SEQ ID NO: 233039 - DNA, 15 bp, Homo sapiens
tatagatttttagct

SEQ ID NO: 233040 - DNA, 15 bp, Homo sapiens
gtatagatttttagc

SEQ ID NO: 233041 - DNA, 15 bp, Homo sapiens
tgtatagatttttag

SEQ ID NO: 233042 - DNA, 15 bp, Homo sapiens
gtgtatagattttta

SEQ ID NO: 233043 - DNA, 15 bp, Homo sapiens
tgtgtatagattttt

SEQ ID NO: 233044 - DNA, 15 bp, Homo sapiens
ttgtgtatagatttt

SEQ ID NO: 233045 - DNA, 15 bp, Homo sapiens
attgtgtatagattt

SEQ ID NO: 233046 - DNA, 15 bp, Homo sapiens
aattgtgtatagatt

SEQ ID NO: 233047 - DNA, 15 bp, Homo sapiens
gaattgtgtatagat

SEQ ID NO: 233048 - DNA, 15 bp, Homo sapiens
ggaattgtgtataga

SEQ ID NO: 233049 - DNA, 15 bp, Homo sapiens
aggaattgtgtatag

SEQ ID NO: 233050 - DNA, 15 bp, Homo sapiens
taggaattgtgtata

SEQ ID NO: 233051 - DNA, 15 bp, Homo sapiens
ctaggaattgtgtat

SEQ ID NO: 233052 - DNA, 15 bp, Homo sapiens
tctaggaattgtgta

SEQ ID NO: 233053 - DNA, 15 bp, Homo sapiens
ttctaggaattgtgt

SEQ ID NO: 233054 - DNA, 15 bp, Homo sapiens
tttctaggaattgtg

SEQ ID NO: 233055 - DNA, 15 bp, Homo sapiens
ctttctaggaattgt

SEQ ID NO: 233056 - DNA, 15 bp, Homo sapiens
cctttctaggaattg

SEQ ID NO: 233057 - DNA, 15 bp, Homo sapiens
tcctttctaggaatt

SEQ ID NO: 233058 - DNA, 15 bp, Homo sapiens
ttcctttctaggaat

SEQ ID NO: 233059 - DNA, 15 bp, Homo sapiens
tttcctttctaggaa

SEQ ID NO: 233060 - DNA, 15 bp, Homo sapiens
ttttcctttctagga

SEQ ID NO: 233061 - DNA, 15 bp, Homo sapiens
cttttcctttctagg

SEQ ID NO: 233062 - DNA, 15 bp, Homo sapiens
ccttttcctttctag

SEQ ID NO: 233063 - DNA, 15 bp, Homo sapiens
gccttttcctttcta

SEQ ID NO: 233064 - DNA, 15 bp, Homo sapiens
tgccttttcctttct

SEQ ID NO: 233065 - DNA, 15 bp, Homo sapiens
ttgccttttcctttc

SEQ ID NO: 233066 - DNA, 15 bp, Homo sapiens
tttgccttttccttt

SEQ ID NO: 233067 - DNA, 15 bp, Homo sapiens
atttgccttttcctt

SEQ ID NO: 233068 - DNA, 15 bp, Homo sapiens
tatttgccttttcct

SEQ ID NO: 233069 - DNA, 15 bp, Homo sapiens
atatttgccttttcc

SEQ ID NO: 233070 - DNA, 15 bp, Homo sapiens
tatatttgccttttc

SEQ ID NO: 233071 - DNA, 15 bp, Homo sapiens
ctatatttgcctttt

SEQ ID NO: 233072 - DNA, 15 bp, Homo sapiens
tctatatttgccttt

SEQ ID NO: 233073 - DNA, 15 bp, Homo sapiens
ttctatatttgcctt

SEQ ID NO: 233074 - DNA, 15 bp, Homo sapiens
tttctatatttgcct

SEQ ID NO: 233075 - DNA, 15 bp, Homo sapiens
ctttctatatttgcc

SEQ ID NO: 233076 - DNA, 15 bp, Homo sapiens
actttctatatttgc

SEQ ID NO: 233077 - DNA, 15 bp, Homo sapiens
cactttctatatttg

SEQ ID NO: 233078 - DNA, 15 bp, Homo sapiens
ccactttctatattt

SEQ ID NO: 233079 - DNA, 15 bp, Homo sapiens
gccactttctatatt

SEQ ID NO: 233080 - DNA, 15 bp, Homo sapiens
cgccactttctatat

SEQ ID NO: 233081 - DNA, 15 bp, Homo sapiens
ccgccactttctata

SEQ ID NO: 233082 - DNA, 15 bp, Homo sapiens
tccgccactttctat

SEQ ID NO: 233083 - DNA, 15 bp, Homo sapiens
ttccgccactttcta

SEQ ID NO: 233084 - DNA, 15 bp, Homo sapiens
cttccgccactttct

SEQ ID NO: 233085 - DNA, 15 bp, Homo sapiens
acttccgccactttc

SEQ ID NO: 233086 - DNA, 15 bp, Homo sapiens
aacttccgccacttt

SEQ ID NO: 233087 - DNA, 15 bp, Homo sapiens
gaacttccgccactt

SEQ ID NO: 233088 - DNA, 15 bp, Homo sapiens
ggaacttccgccact

SEQ ID NO: 233089 - DNA, 15 bp, Homo sapiens
gggaacttccgccac

SEQ ID NO: 233090 - DNA, 15 bp, Homo sapiens
tgggaacttccgcca

SEQ ID NO: 233091 - DNA, 15 bp, Homo sapiens
ttgggaacttccgcc

SEQ ID NO: 233092 - DNA, 15 bp, Homo sapiens
gttgggaacttccgc

SEQ ID NO: 233093 - DNA, 15 bp, Homo sapiens
tgttgggaacttccg

SEQ ID NO: 233094 - DNA, 15 bp, Homo sapiens
atgttgggaacttcc

SEQ ID NO: 233095 - DNA, 15 bp, Homo sapiens
aatgttgggaacttc

SEQ ID NO: 233096 - DNA, 15 bp, Homo sapiens
aaatgttgggaactt

SEQ ID NO: 233097 - DNA, 15 bp, Homo sapiens
aaaatgttgggaact

SEQ ID NO: 233098 - DNA, 15 bp, Homo sapiens
aaaaatgttgggaac

SEQ ID NO: 233099 - DNA, 15 bp, Homo sapiens
taaaaatgttgggaa

SEQ ID NO: 233100 - DNA, 15 bp, Homo sapiens
ctaaaaatgttggga

SEQ ID NO: 233101 - DNA, 15 bp, Homo sapiens
actaaaaatgttggg

SEQ ID NO: 233102 - DNA, 15 bp, Homo sapiens
cactaaaaatgttgg

SEQ ID NO: 233103 - DNA, 15 bp, Homo sapiens
acactaaaaatgttg

SEQ ID NO: 233104 - DNA, 15 bp, Homo sapiens
aacactaaaaatgtt

SEQ ID NO: 233105 - DNA, 15 bp, Homo sapiens
aaacactaaaaatgt

SEQ ID NO: 233106 - DNA, 15 bp, Homo sapiens
aaaacactaaaaatg

SEQ ID NO: 233107 - DNA, 15 bp, Homo sapiens
gaaaacactaaaaat

SEQ ID NO: 233108 - DNA, 15 bp, Homo sapiens
ggaaaacactaaaaa

SEQ ID NO: 233109 - DNA, 15 bp, Homo sapiens
aggaaaacactaaaa

SEQ ID NO: 233110 - DNA, 15 bp, Homo sapiens
aaggaaaacactaaa

SEQ ID NO: 233111 - DNA, 15 bp, Homo sapiens
aaaggaaaacactaa

SEQ ID NO: 233112 - DNA, 15 bp, Homo sapiens
aaaaggaaaacacta

SEQ ID NO: 233113 - DNA, 15 bp, Homo sapiens
caaaaggaaaacact

SEQ ID NO: 233114 - DNA, 15 bp, Homo sapiens
tcaaaaggaaaacac

SEQ ID NO: 233115 - DNA, 15 bp, Homo sapiens
ctcaaaaggaaaaca

SEQ ID NO: 233116 - DNA, 15 bp, Homo sapiens
cctcaaaaggaaaac

SEQ ID NO: 233117 - DNA, 15 bp, Homo sapiens
gcctcaaaaggaaaa

SEQ ID NO: 233118 - DNA, 15 bp, Homo sapiens
tgcctcaaaaggaaa

SEQ ID NO: 233119 - DNA, 15 bp, Homo sapiens
ctgcctcaaaaggaa

SEQ ID NO: 233120 - DNA, 15 bp, Homo sapiens
tctgcctcaaaagga

SEQ ID NO: 233121 - DNA, 15 bp, Homo sapiens
ctctgcctcaaaagg

SEQ ID NO: 233122 - DNA, 15 bp, Homo sapiens
tctctgcctcaaaag

SEQ ID NO: 233123 - DNA, 15 bp, Homo sapiens
ctctctgcctcaaaa

SEQ ID NO: 233124 - DNA, 15 bp, Homo sapiens
cctctctgcctcaaa

SEQ ID NO: 233125 - DNA, 15 bp, Homo sapiens
tcctctctgcctcaa

SEQ ID NO: 233126 - DNA, 15 bp, Homo sapiens
gtcctctctgcctca

SEQ ID NO: 233127 - DNA, 15 bp, Homo sapiens
tgtcctctctgcctc

SEQ ID NO: 233128 - DNA, 15 bp, Homo sapiens
ttgtcctctctgcct

SEQ ID NO: 233129 - DNA, 15 bp, Homo sapiens
attgtcctctctgcc

SEQ ID NO: 233130 - DNA, 15 bp, Homo sapiens
cattgtcctctctgc

SEQ ID NO: 233131 - DNA, 15 bp, Homo sapiens
ccattgtcctctctg

SEQ ID NO: 233132 - DNA, 15 bp, Homo sapiens
gccattgtcctctct

SEQ ID NO: 233133 - DNA, 15 bp, Homo sapiens
tgccattgtcctctc

SEQ ID NO: 233134 - DNA, 15 bp, Homo sapiens
atgccattgtcctct

SEQ ID NO: 233135 - DNA, 15 bp, Homo sapiens
aatgccattgtcctc

SEQ ID NO: 233136 - DNA, 15 bp, Homo sapiens
taatgccattgtcct

SEQ ID NO: 233137 - DNA, 15 bp, Homo sapiens
ctaatgccattgtcc

SEQ ID NO: 233138 - DNA, 15 bp, Homo sapiens
cctaatgccattgtc

SEQ ID NO: 233139 - DNA, 15 bp, Homo sapiens
gcctaatgccattgt

SEQ ID NO: 233140 - DNA, 15 bp, Homo sapiens
agcctaatgccattg

SEQ ID NO: 233141 - DNA, 15 bp, Homo sapiens
tagcctaatgccatt

SEQ ID NO: 233142 - DNA, 15 bp, Homo sapiens
atagcctaatgccat

SEQ ID NO: 233143 - DNA, 15 bp, Homo sapiens
aatagcctaatgcca

SEQ ID NO: 233144 - DNA, 15 bp, Homo sapiens
caatagcctaatgcc

SEQ ID NO: 233145 - DNA, 15 bp, Homo sapiens
ccaatagcctaatgc

SEQ ID NO: 233146 - DNA, 15 bp, Homo sapiens
tccaatagcctaatg

SEQ ID NO: 233147 - DNA, 15 bp, Homo sapiens
ctccaatagcctaat

SEQ ID NO: 233148 - DNA, 15 bp, Homo sapiens
cctccaatagcctaa

SEQ ID NO: 233149 - DNA, 15 bp, Homo sapiens
tcctccaatagccta

SEQ ID NO: 233150 - DNA, 15 bp, Homo sapiens
atcctccaatagcct

SEQ ID NO: 233151 - DNA, 15 bp, Homo sapiens
gatcctccaatagcc

SEQ ID NO: 233152 - DNA, 15 bp, Homo sapiens
agatcctccaatagc

SEQ ID NO: 233153 - DNA, 15 bp, Homo sapiens
aagatcctccaatag

SEQ ID NO: 233154 - DNA, 15 bp, Homo sapiens
caagatcctccaata

SEQ ID NO: 233155 - DNA, 15 bp, Homo sapiens
tcaagatcctccaat

SEQ ID NO: 233156 - DNA, 15 bp, Homo sapiens
ttcaagatcctccaa

SEQ ID NO: 233157 - DNA, 15 bp, Homo sapiens
tttcaagatcctcca

SEQ ID NO: 233158 - DNA, 15 bp, Homo sapiens
ctttcaagatcctcc

SEQ ID NO: 233159 - DNA, 15 bp, Homo sapiens
cctttcaagatcctc

SEQ ID NO: 233160 - DNA, 15 bp, Homo sapiens
gcctttcaagatcct

SEQ ID NO: 233161 - DNA, 15 bp, Homo sapiens
agcctttcaagatcc

SEQ ID NO: 233162 - DNA, 15 bp, Homo sapiens
cagcctttcaagatc

SEQ ID NO: 233163 - DNA, 15 bp, Homo sapiens
acagcctttcaagat

SEQ ID NO: 233164 - DNA, 15 bp, Homo sapiens
aacagcctttcaaga

SEQ ID NO: 233165 - DNA, 15 bp, Homo sapiens
caacagcctttcaag

SEQ ID NO: 233166 - DNA, 15 bp, Homo sapiens
acaacagcctttcaa

SEQ ID NO: 233167 - DNA, 15 bp, Homo sapiens
aacaacagcctttca

SEQ ID NO: 233168 - DNA, 15 bp, Homo sapiens
taacaacagcctttc

SEQ ID NO: 233169 - DNA, 15 bp, Homo sapiens
ataacaacagccttt

SEQ ID NO: 233170 - DNA, 15 bp, Homo sapiens
gataacaacagcctt

SEQ ID NO: 233171 - DNA, 15 bp, Homo sapiens
ggataacaacagcct

SEQ ID NO: 233172 - DNA, 15 bp, Homo sapiens
aggataacaacagcc

SEQ ID NO: 233173 - DNA, 15 bp, Homo sapiens
aaggataacaacagc

SEQ ID NO: 233174 - DNA, 15 bp, Homo sapiens
gaaggataacaacag

SEQ ID NO: 233175 - DNA, 15 bp, Homo sapiens
agaaggataacaaca

SEQ ID NO: 233176 - DNA, 15 bp, Homo sapiens
cagaaggataacaac

SEQ ID NO: 233177 - DNA, 15 bp, Homo sapiens
acagaaggataacaa

SEQ ID NO: 233178 - DNA, 15 bp, Homo sapiens
cacagaaggataaca

SEQ ID NO: 233179 - DNA, 15 bp, Homo sapiens
ccacagaaggataac

SEQ ID NO: 233180 - DNA, 15 bp, Homo sapiens
tccacagaaggataa

SEQ ID NO: 233181 - DNA, 15 bp, Homo sapiens
gtccacagaaggata

SEQ ID NO: 233182 - DNA, 15 bp, Homo sapiens
tgtccacagaaggat

SEQ ID NO: 233183 - DNA, 15 bp, Homo sapiens
ttgtccacagaagga

SEQ ID NO: 233184 - DNA, 15 bp, Homo sapiens
gttgtccacagaagg

SEQ ID NO: 233185 - DNA, 15 bp, Homo sapiens
tgttgtccacagaag

SEQ ID NO: 233186 - DNA, 15 bp, Homo sapiens
ttgttgtccacagaa

SEQ ID NO: 233187 - DNA, 15 bp, Homo sapiens
gttgttgtccacaga

SEQ ID NO: 233188 - DNA, 15 bp, Homo sapiens
tgttgttgtccacag

SEQ ID NO: 233189 - DNA, 15 bp, Homo sapiens
ctgttgttgtccaca

SEQ ID NO: 233190 - DNA, 15 bp, Homo sapiens
gctgttgttgtccac

SEQ ID NO: 233191 - DNA, 15 bp, Homo sapiens
tgctgttgttgtcca

SEQ ID NO: 233192 - DNA, 15 bp, Homo sapiens
ttgctgttgttgtcc

SEQ ID NO: 233193 - DNA, 15 bp, Homo sapiens
tttgctgttgttgtc

SEQ ID NO: 233194 - DNA, 15 bp, Homo sapiens
ttttgctgttgttgt

SEQ ID NO: 233195 - DNA, 15 bp, Homo sapiens
attttgctgttgttg

SEQ ID NO: 233196 - DNA, 15 bp, Homo sapiens
cattttgctgttgtt

SEQ ID NO: 233197 - DNA, 15 bp, Homo sapiens
acattttgctgttgt

SEQ ID NO: 233198 - DNA, 15 bp, Homo sapiens
aacattttgctgttg

SEQ ID NO: 233199 - DNA, 15 bp, Homo sapiens
taacattttgctgtt

SEQ ID NO: 233200 - DNA, 15 bp, Homo sapiens
ttaacattttgctgt

SEQ ID NO: 233201 - DNA, 15 bp, Homo sapiens
gttaacattttgctg

SEQ ID NO: 233202 - DNA, 15 bp, Homo sapiens
tgttaacattttgct

SEQ ID NO: 233203 - DNA, 15 bp, Homo sapiens
ctgttaacattttgc

SEQ ID NO: 233204 - DNA, 15 bp, Homo sapiens
actgttaacattttg

SEQ ID NO: 233205 - DNA, 15 bp, Homo sapiens
aactgttaacatttt

SEQ ID NO: 233206 - DNA, 15 bp, Homo sapiens
taactgttaacattt

SEQ ID NO: 233207 - DNA, 15 bp, Homo sapiens
ttaactgttaacatt

SEQ ID NO: 233208 - DNA, 15 bp, Homo sapiens
tttaactgttaacat

SEQ ID NO: 233209 - DNA, 15 bp, Homo sapiens
gtttaactgttaaca

SEQ ID NO: 233210 - DNA, 15 bp, Homo sapiens
tgtttaactgttaac

SEQ ID NO: 233211 - DNA, 15 bp, Homo sapiens
atgtttaactgttaa

SEQ ID NO: 233212 - DNA, 15 bp, Homo sapiens
gatgtttaactgtta

SEQ ID NO: 233213 - DNA, 15 bp, Homo sapiens
cgatgtttaactgtt

SEQ ID NO: 233214 - DNA, 15 bp, Homo sapiens
tcgatgtttaactgt

SEQ ID NO: 233215 - DNA, 15 bp, Homo sapiens
ctcgatgtttaactg

SEQ ID NO: 233216 - DNA, 15 bp, Homo sapiens
tctcgatgtttaact

SEQ ID NO: 233217 - DNA, 15 bp, Homo sapiens
ttctcgatgtttaac

SEQ ID NO: 233218 - DNA, 15 bp, Homo sapiens
tttctcgatgtttaa

SEQ ID NO: 233219 - DNA, 15 bp, Homo sapiens
atttctcgatgttta

SEQ ID NO: 233220 - DNA, 15 bp, Homo sapiens
aatttctcgatgttt

SEQ ID NO: 233221 - DNA, 15 bp, Homo sapiens
aaatttctcgatgtt

SEQ ID NO: 233222 - DNA, 15 bp, Homo sapiens
gaaatttctcgatgt

SEQ ID NO: 233223 - DNA, 15 bp, Homo sapiens
tgaaatttctcgatg

SEQ ID NO: 233224 - DNA, 15 bp, Homo sapiens
ctgaaatttctcgat

SEQ ID NO: 233225 - DNA, 15 bp, Homo sapiens
cctgaaatttctcga

SEQ ID NO: 233226 - DNA, 15 bp, Homo sapiens
tcctgaaatttctcg

SEQ ID NO: 233227 - DNA, 15 bp, Homo sapiens
ctcctgaaatttctc

SEQ ID NO: 233228 - DNA, 15 bp, Homo sapiens
cctcctgaaatttct

SEQ ID NO: 233229 - DNA, 15 bp, Homo sapiens
tcctcctgaaatttc

SEQ ID NO: 233230 - DNA, 15 bp, Homo sapiens
atcctcctgaaattt

SEQ ID NO: 233231 - DNA, 15 bp, Homo sapiens
gatcctcctgaaatt

SEQ ID NO: 233232 - DNA, 15 bp, Homo sapiens
agatcctcctgaaat

SEQ ID NO: 233233 - DNA, 15 bp, Homo sapiens
aagatcctcctgaaa

SEQ ID NO: 233234 - DNA, 15 bp, Homo sapiens
aaagatcctcctgaa

SEQ ID NO: 233235 - DNA, 15 bp, Homo sapiens
gaaagatcctcctga

SEQ ID NO: 233236 - DNA, 15 bp, Homo sapiens
tgaaagatcctcctg

SEQ ID NO: 233237 - DNA, 15 bp, Homo sapiens
ctgaaagatcctcct

SEQ ID NO: 233238 - DNA, 15 bp, Homo sapiens
tctgaaagatcctcc

SEQ ID NO: 233239 - DNA, 15 bp, Homo sapiens
ttctgaaagatcctc

SEQ ID NO: 233240 - DNA, 15 bp, Homo sapiens
cttctgaaagatcct

SEQ ID NO: 233241 - DNA, 15 bp, Homo sapiens
tcttctgaaagatcc

SEQ ID NO: 233242 - DNA, 15 bp, Homo sapiens
atcttctgaaagatc

SEQ ID NO: 233243 - DNA, 15 bp, Homo sapiens
catcttctgaaagat

SEQ ID NO: 233244 - DNA, 15 bp, Homo sapiens
gcatcttctgaaaga

SEQ ID NO: 233245 - DNA, 15 bp, Homo sapiens
cgcatcttctgaaag

SEQ ID NO: 233246 - DNA, 15 bp, Homo sapiens
acgcatcttctgaaa

SEQ ID NO: 233247 - DNA, 15 bp, Homo sapiens
aacgcatcttctgaa

SEQ ID NO: 233248 - DNA, 15 bp, Homo sapiens
aaacgcatcttctga

SEQ ID NO: 233249 - DNA, 15 bp, Homo sapiens
gaaacgcatcttctg

SEQ ID NO: 233250 - DNA, 15 bp, Homo sapiens
ggaaacgcatcttct

SEQ ID NO: 233251 - DNA, 15 bp, Homo sapiens
tggaaacgcatcttc

SEQ ID NO: 233252 - DNA, 15 bp, Homo sapiens
ttggaaacgcatctt

SEQ ID NO: 233253 - DNA, 15 bp, Homo sapiens
attggaaacgcatct

SEQ ID NO: 233254 - DNA, 15 bp, Homo sapiens
aattggaaacgcatc

SEQ ID NO: 233255 - DNA, 15 bp, Homo sapiens
aaattggaaacgcat

SEQ ID NO: 233256 - DNA, 15 bp, Homo sapiens
aaaattggaaacgca

SEQ ID NO: 233257 - DNA, 15 bp, Homo sapiens
caaaattggaaacgc

SEQ ID NO: 233258 - DNA, 15 bp, Homo sapiens
tcaaaattggaaacg

SEQ ID NO: 233259 - DNA, 15 bp, Homo sapiens
ctcaaaattggaaac

SEQ ID NO: 233260 - DNA, 15 bp, Homo sapiens
cctcaaaattggaaa

SEQ ID NO: 233261 - DNA, 15 bp, Homo sapiens
ccctcaaaattggaa

SEQ ID NO: 233262 - DNA, 15 bp, Homo sapiens
cccctcaaaattgga

SEQ ID NO: 233263 - DNA, 15 bp, Homo sapiens
ccccctcaaaattgg

SEQ ID NO: 233264 - DNA, 15 bp, Homo sapiens
gccccctcaaaattg

SEQ ID NO: 233265 - DNA, 15 bp, Homo sapiens
cgccccctcaaaatt

SEQ ID NO: 233266 - DNA, 15 bp, Homo sapiens
acgccccctcaaaat

SEQ ID NO: 233267 - DNA, 15 bp, Homo sapiens
gacgccccctcaaaa

SEQ ID NO: 233268 - DNA, 15 bp, Homo sapiens
tgacgccccctcaaa

SEQ ID NO: 233269 - DNA, 15 bp, Homo sapiens
ctgacgccccctcaa

SEQ ID NO: 233270 - DNA, 15 bp, Homo sapiens
gctgacgccccctca

SEQ ID NO: 233271 - DNA, 15 bp, Homo sapiens
agctgacgccccctc

SEQ ID NO: 233272 - DNA, 15 bp, Homo sapiens
gagctgacgccccct

SEQ ID NO: 233273 - DNA, 15 bp, Homo sapiens
agagctgacgccccc

SEQ ID NO: 233274 - DNA, 15 bp, Homo sapiens
aagagctgacgcccc

SEQ ID NO: 233275 - DNA, 15 bp, Homo sapiens
gaagagctgacgccc

SEQ ID NO: 233276 - DNA, 15 bp, Homo sapiens
tgaagagctgacgcc

SEQ ID NO: 233277 - DNA, 15 bp, Homo sapiens
gtgaagagctgacgc

SEQ ID NO: 233278 - DNA, 15 bp, Homo sapiens
ggtgaagagctgacg

SEQ ID NO: 233279 - DNA, 15 bp, Homo sapiens
cggtgaagagctgac

SEQ ID NO: 233280 - DNA, 15 bp, Homo sapiens
ccggtgaagagctga

SEQ ID NO: 233281 - DNA, 15 bp, Homo sapiens
tccggtgaagagctg

SEQ ID NO: 233282 - DNA, 15 bp, Homo sapiens
ctccggtgaagagct

SEQ ID NO: 233283 - DNA, 15 bp, Homo sapiens
tctccggtgaagagc

SEQ ID NO: 233284 - DNA, 15 bp, Homo sapiens
gtctccggtgaagag

SEQ ID NO: 233285 - DNA, 15 bp, Homo sapiens
ggtctccggtgaaga

SEQ ID NO: 233286 - DNA, 15 bp, Homo sapiens
gggtctccggtgaag

SEQ ID NO: 233287 - DNA, 15 bp, Homo sapiens
tgggtctccggtgaa

SEQ ID NO: 233288 - DNA, 15 bp, Homo sapiens
ttgggtctccggtga

SEQ ID NO: 233289 - DNA, 15 bp, Homo sapiens
tttgggtctccggtg

SEQ ID NO: 233290 - DNA, 15 bp, Homo sapiens
atttgggtctccggt

SEQ ID NO: 233291 - DNA, 15 bp, Homo sapiens
tatttgggtctccgg

SEQ ID NO: 233292 - DNA, 15 bp, Homo sapiens
gtatttgggtctccg

SEQ ID NO: 233293 - DNA, 15 bp, Homo sapiens
tgtatttgggtctcc

SEQ ID NO: 233294 - DNA, 15 bp, Homo sapiens
ttgtatttgggtctc

SEQ ID NO: 233295 - DNA, 15 bp, Homo sapiens
gttgtatttgggtct

SEQ ID NO: 233296 - DNA, 15 bp, Homo sapiens
tgttgtatttgggtc

SEQ ID NO: 233297 - DNA, 15 bp, Homo sapiens
ttgttgtatttgggt

SEQ ID NO: 233298 - DNA, 15 bp, Homo sapiens
tttgttgtatttggg

SEQ ID NO: 233299 - DNA, 15 bp, Homo sapiens
atttgttgtatttgg

SEQ ID NO: 233300 - DNA, 15 bp, Homo sapiens
gatttgttgtatttg

SEQ ID NO: 233301 - DNA, 15 bp, Homo sapiens
tgatttgttgtattt

SEQ ID NO: 233302 - DNA, 15 bp, Homo sapiens
ttgatttgttgtatt

SEQ ID NO: 233303 - DNA, 15 bp, Homo sapiens
cttgatttgttgtat

SEQ ID NO: 233304 - DNA, 15 bp, Homo sapiens
acttgatttgttgta

SEQ ID NO: 233305 - DNA, 15 bp, Homo sapiens
gacttgatttgttgt

SEQ ID NO: 233306 - DNA, 15 bp, Homo sapiens
cgacttgatttgttg

SEQ ID NO: 233307 - DNA, 15 bp, Homo sapiens
gcgacttgatttgtt

SEQ ID NO: 233308 - DNA, 15 bp, Homo sapiens
ggcgacttgatttgt

SEQ ID NO: 233309 - DNA, 15 bp, Homo sapiens
aggcgacttgatttg

SEQ ID NO: 233310 - DNA, 15 bp, Homo sapiens
caggcgacttgattt

SEQ ID NO: 233311 - DNA, 15 bp, Homo sapiens
gcaggcgacttgatt

SEQ ID NO: 233312 - DNA, 15 bp, Homo sapiens
ggcaggcgacttgat

SEQ ID NO: 233313 - DNA, 15 bp, Homo sapiens
gggcaggcgacttga

SEQ ID NO: 233314 - DNA, 15 bp, Homo sapiens
agggcaggcgacttg

SEQ ID NO: 233315 - DNA, 15 bp, Homo sapiens
cagggcaggcgactt

SEQ ID NO: 233316 - DNA, 15 bp, Homo sapiens
ccagggcaggcgact

SEQ ID NO: 233317 - DNA, 15 bp, Homo sapiens
gccagggcaggcgac

SEQ ID NO: 233318 - DNA, 15 bp, Homo sapiens
cgccagggcaggcga

SEQ ID NO: 233319 - DNA, 15 bp, Homo sapiens
tcgccagggcaggcg

SEQ ID NO: 233320 - DNA, 15 bp, Homo sapiens
gtcgccagggcaggc

SEQ ID NO: 233321 - DNA, 15 bp, Homo sapiens
tgtcgccagggcagg

SEQ ID NO: 233322 - DNA, 15 bp, Homo sapiens
gtgtcgccagggcag

SEQ ID NO: 233323 - DNA, 15 bp, Homo sapiens
agtgtcgccagggca

SEQ ID NO: 233324 - DNA, 15 bp, Homo sapiens
aagtgtcgccagggc

SEQ ID NO: 233325 - DNA, 15 bp, Homo sapiens
aaagtgtcgccaggg

SEQ ID NO: 233326 - DNA, 15 bp, Homo sapiens
gaaagtgtcgccagg

SEQ ID NO: 233327 - DNA, 15 bp, Homo sapiens
cgaaagtgtcgccag

SEQ ID NO: 233328 - DNA, 15 bp, Homo sapiens
tcgaaagtgtcgcca

SEQ ID NO: 233329 - DNA, 15 bp, Homo sapiens
ttcgaaagtgtcgcc

SEQ ID NO: 233330 - DNA, 15 bp, Homo sapiens
cttcgaaagtgtcgc

SEQ ID NO: 233331 - DNA, 15 bp, Homo sapiens
ccttcgaaagtgtcg

SEQ ID NO: 233332 - DNA, 15 bp, Homo sapiens
tccttcgaaagtgtc

SEQ ID NO: 233333 - DNA, 15 bp, Homo sapiens
gtccttcgaaagtgt

SEQ ID NO: 233334 - DNA, 15 bp, Homo sapiens
agtccttcgaaagtg

SEQ ID NO: 233335 - DNA, 15 bp, Homo sapiens
cagtccttcgaaagt

SEQ ID NO: 233336 - DNA, 15 bp, Homo sapiens
ccagtccttcgaaag

SEQ ID NO: 233337 - DNA, 15 bp, Homo sapiens
tccagtccttcgaaa

SEQ ID NO: 233338 - DNA, 15 bp, Homo sapiens
ctccagtccttcgaa

SEQ ID NO: 233339 - DNA, 15 bp, Homo sapiens
actccagtccttcga

SEQ ID NO: 233340 - DNA, 15 bp, Homo sapiens
cactccagtccttcg

SEQ ID NO: 233341 - DNA, 15 bp, Homo sapiens
ccactccagtccttc

SEQ ID NO: 233342 - DNA, 15 bp, Homo sapiens
cccactccagtcctt

SEQ ID NO: 233343 - DNA, 15 bp, Homo sapiens
tcccactccagtcct

SEQ ID NO: 233344 - DNA, 15 bp, Homo sapiens
ttcccactccagtcc

SEQ ID NO: 233345 - DNA, 15 bp, Homo sapiens
attcccactccagtc

SEQ ID NO: 233346 - DNA, 15 bp, Homo sapiens
gattcccactccagt

SEQ ID NO: 233347 - DNA, 15 bp, Homo sapiens
tgattcccactccag

SEQ ID NO: 233348 - DNA, 15 bp, Homo sapiens
ctgattcccactcca

SEQ ID NO: 233349 - DNA, 15 bp, Homo sapiens
tctgattcccactcc

SEQ ID NO: 233350 - DNA, 15 bp, Homo sapiens
ctctgattcccactc

SEQ ID NO: 233351 - DNA, 15 bp, Homo sapiens
gctctgattcccact

SEQ ID NO: 233352 - DNA, 15 bp, Homo sapiens
agctctgattcccac

SEQ ID NO: 233353 - DNA, 15 bp, Homo sapiens
aagctctgattccca

SEQ ID NO: 233354 - DNA, 15 bp, Homo sapiens
gaagctctgattccc

SEQ ID NO: 233355 - DNA, 15 bp, Homo sapiens
tgaagctctgattcc

SEQ ID NO: 233356 - DNA, 15 bp, Homo sapiens
gtgaagctctgattc

SEQ ID NO: 233357 - DNA, 15 bp, Homo sapiens
cgtgaagctctgatt

SEQ ID NO: 233358 - DNA, 15 bp, Homo sapiens
ccgtgaagctctgat

SEQ ID NO: 233359 - DNA, 15 bp, Homo sapiens
cccgtgaagctctga

SEQ ID NO: 233360 - DNA, 15 bp, Homo sapiens
acccgtgaagctctg

SEQ ID NO: 233361 - DNA, 15 bp, Homo sapiens
aacccgtgaagctct

SEQ ID NO: 233362 - DNA, 15 bp, Homo sapiens
taacccgtgaagctc

SEQ ID NO: 233363 - DNA, 15 bp, Homo sapiens
ttaacccgtgaagct

SEQ ID NO: 233364 - DNA, 15 bp, Homo sapiens
tttaacccgtgaagc

SEQ ID NO: 233365 - DNA, 15 bp, Homo sapiens
ttttaacccgtgaag

SEQ ID NO: 233366 - DNA, 15 bp, Homo sapiens
tttttaacccgtgaa

SEQ ID NO: 233367 - DNA, 15 bp, Homo sapiens
ctttttaacccgtga

SEQ ID NO: 233368 - DNA, 15 bp, Homo sapiens
gctttttaacccgtg

SEQ ID NO: 233369 - DNA, 15 bp, Homo sapiens
ggctttttaacccgt

SEQ ID NO: 233370 - DNA, 15 bp, Homo sapiens
cggctttttaacccg

SEQ ID NO: 233371 - DNA, 15 bp, Homo sapiens
tcggctttttaaccc

SEQ ID NO: 233372 - DNA, 15 bp, Homo sapiens
atcggctttttaacc

SEQ ID NO: 233373 - DNA, 15 bp, Homo sapiens
catcggctttttaac

SEQ ID NO: 233374 - DNA, 15 bp, Homo sapiens
acatcggctttttaa

SEQ ID NO: 233375 - DNA, 15 bp, Homo sapiens
gacatcggcttttta

SEQ ID NO: 233376 - DNA, 15 bp, Homo sapiens
tgacatcggcttttt

SEQ ID NO: 233377 - DNA, 15 bp, Homo sapiens
gtgacatcggctttt

SEQ ID NO: 233378 - DNA, 15 bp, Homo sapiens
tgtgacatcggcttt

SEQ ID NO: 233379 - DNA, 15 bp, Homo sapiens
atgtgacatcggctt

SEQ ID NO: 233380 - DNA, 15 bp, Homo sapiens
gatgtgacatcggct

SEQ ID NO: 233381 - DNA, 15 bp, Homo sapiens
cgatgtgacatcggc

SEQ ID NO: 233382 - DNA, 15 bp, Homo sapiens
ccgatgtgacatcgg

SEQ ID NO: 233383 - DNA, 15 bp, Homo sapiens
gccgatgtgacatcg

SEQ ID NO: 233384 - DNA, 15 bp, Homo sapiens
ggccgatgtgacatc

SEQ ID NO: 233385 - DNA, 15 bp, Homo sapiens
cggccgatgtgacat

SEQ ID NO: 233386 - DNA, 15 bp, Homo sapiens
acggccgatgtgaca

SEQ ID NO: 233387 - DNA, 15 bp, Homo sapiens
aacggccgatgtgac

SEQ ID NO: 233388 - DNA, 15 bp, Homo sapiens
gaacggccgatgtga

SEQ ID NO: 233389 - DNA, 15 bp, Homo sapiens
cgaacggccgatgtg

SEQ ID NO: 233390 - DNA, 15 bp, Homo sapiens
tcgaacggccgatgt

SEQ ID NO: 233391 - DNA, 15 bp, Homo sapiens
ttcgaacggccgatg

SEQ ID NO: 233392 - DNA, 15 bp, Homo sapiens
tttcgaacggccgat

SEQ ID NO: 233393 - DNA, 15 bp, Homo sapiens
gtttcgaacggccga

SEQ ID NO: 233394 - DNA, 15 bp, Homo sapiens
agtttcgaacggccg

SEQ ID NO: 233395 - DNA, 15 bp, Homo sapiens
gagtttcgaacggcc

SEQ ID NO: 233396 - DNA, 15 bp, Homo sapiens
ggagtttcgaacggc

SEQ ID NO: 233397 - DNA, 15 bp, Homo sapiens
aggagtttcgaacgg

SEQ ID NO: 233398 - DNA, 15 bp, Homo sapiens
gaggagtttcgaacg

SEQ ID NO: 233399 - DNA, 15 bp, Homo sapiens
ggaggagtttcgaac

SEQ ID NO: 233400 - DNA, 15 bp, Homo sapiens
aggaggagtttcgaa

SEQ ID NO: 233401 - DNA, 15 bp, Homo sapiens
gaggaggagtttcga

SEQ ID NO: 233402 - DNA, 15 bp, Homo sapiens
agaggaggagtttcg

SEQ ID NO: 233403 - DNA, 15 bp, Homo sapiens
aagaggaggagtttc

SEQ ID NO: 233404 - DNA, 15 bp, Homo sapiens
caagaggaggagttt

SEQ ID NO: 233405 - DNA, 15 bp, Homo sapiens
gcaagaggaggagtt

SEQ ID NO: 233406 - DNA, 15 bp, Homo sapiens
tgcaagaggaggagt

SEQ ID NO: 233407 - DNA, 15 bp, Homo sapiens
ctgcaagaggaggag

SEQ ID NO: 233408 - DNA, 15 bp, Homo sapiens
actgcaagaggagga

SEQ ID NO: 233409 - DNA, 15 bp, Homo sapiens
cactgcaagaggagg

SEQ ID NO: 233410 - DNA, 15 bp, Homo sapiens
tcactgcaagaggag

SEQ ID NO: 233411 - DNA, 15 bp, Homo sapiens
ctcactgcaagagga

SEQ ID NO: 233412 - DNA, 15 bp, Homo sapiens
cctcactgcaagagg

SEQ ID NO: 233413 - DNA, 15 bp, Homo sapiens
acctcactgcaagag

SEQ ID NO: 233414 - DNA, 15 bp, Homo sapiens
cacctcactgcaaga

SEQ ID NO: 233415 - DNA, 15 bp, Homo sapiens
tcacctcactgcaag

SEQ ID NO: 233416 - DNA, 15 bp, Homo sapiens
ttcacctcactgcaa

SEQ ID NO: 233417 - DNA, 15 bp, Homo sapiens
cttcacctcactgca

SEQ ID NO: 233418 - DNA, 15 bp, Homo sapiens
tcttcacctcactgc

SEQ ID NO: 233419 - DNA, 15 bp, Homo sapiens
gtcttcacctcactg

SEQ ID NO: 233420 - DNA, 15 bp, Homo sapiens
tgtcttcacctcact

SEQ ID NO: 233421 - DNA, 15 bp, Homo sapiens
atgtcttcacctcac

SEQ ID NO: 233422 - DNA, 15 bp, Homo sapiens
aatgtcttcacctca

SEQ ID NO: 233423 - DNA, 15 bp, Homo sapiens
aaatgtcttcacctc

SEQ ID NO: 233424 - DNA, 15 bp, Homo sapiens
caaatgtcttcacct

SEQ ID NO: 233425 - DNA, 15 bp, Homo sapiens
tcaaatgtcttcacc

SEQ ID NO: 233426 - DNA, 15 bp, Homo sapiens
ttcaaatgtcttcac

SEQ ID NO: 233427 - DNA, 15 bp, Homo sapiens
tttcaaatgtcttca

SEQ ID NO: 233428 - DNA, 15 bp, Homo sapiens
ttttcaaatgtcttc

SEQ ID NO: 233429 - DNA, 15 bp, Homo sapiens
attttcaaatgtctt

SEQ ID NO: 233430 - DNA, 15 bp, Homo sapiens
gattttcaaatgtct

SEQ ID NO: 233431 - DNA, 15 bp, Homo sapiens
tgattttcaaatgtc

SEQ ID NO: 233432 - DNA, 15 bp, Homo sapiens
gtgattttcaaatgt

SEQ ID NO: 233433 - DNA, 15 bp, Homo sapiens
ggtgattttcaaatg

SEQ ID NO: 233434 - DNA, 15 bp, Homo sapiens
gggtgattttcaaat

SEQ ID NO: 233435 - DNA, 15 bp, Homo sapiens
ggggtgattttcaaa

SEQ ID NO: 233436 - DNA, 15 bp, Homo sapiens
tggggtgattttcaa

SEQ ID NO: 233437 - DNA, 15 bp, Homo sapiens
gtggggtgattttca

SEQ ID NO: 233438 - DNA, 15 bp, Homo sapiens
agtggggtgattttc

SEQ ID NO: 233439 - DNA, 15 bp, Homo sapiens
cagtggggtgatttt

SEQ ID NO: 233440 - DNA, 15 bp, Homo sapiens
gcagtggggtgattt

SEQ ID NO: 233441 - DNA, 15 bp, Homo sapiens
tgcagtggggtgatt

SEQ ID NO: 233442 - DNA, 15 bp, Homo sapiens
ttgcagtggggtgat

SEQ ID NO: 233443 - DNA, 15 bp, Homo sapiens
tttgcagtggggtga

SEQ ID NO: 233444 - DNA, 15 bp, Homo sapiens
gtttgcagtggggtg

SEQ ID NO: 233445 - DNA, 15 bp, Homo sapiens
agtttgcagtggggt

SEQ ID NO: 233446 - DNA, 15 bp, Homo sapiens
gagtttgcagtgggg

SEQ ID NO: 233447 - DNA, 15 bp, Homo sapiens
ggagtttgcagtggg

SEQ ID NO: 233448 - DNA, 15 bp, Homo sapiens
aggagtttgcagtgg

SEQ ID NO: 233449 - DNA, 15 bp, Homo sapiens
gaggagtttgcagtg

SEQ ID NO: 233450 - DNA, 15 bp, Homo sapiens
ggaggagtttgcagt

SEQ ID NO: 233451 - DNA, 15 bp, Homo sapiens
gggaggagtttgcag

SEQ ID NO: 233452 - DNA, 15 bp, Homo sapiens
ggggaggagtttgca

SEQ ID NO: 233453 - DNA, 15 bp, Homo sapiens
gggggaggagtttgc

SEQ ID NO: 233454 - DNA, 15 bp, Homo sapiens
agggggaggagtttg

SEQ ID NO: 233455 - DNA, 15 bp, Homo sapiens
cagggggaggagttt

SEQ ID NO: 233456 - DNA, 15 bp, Homo sapiens
gcagggggaggagtt

SEQ ID NO: 233457 - DNA, 15 bp, Homo sapiens
agcagggggaggagt

SEQ ID NO: 233458 - DNA, 15 bp, Homo sapiens
tagcagggggaggag

SEQ ID NO: 233459 - DNA, 15 bp, Homo sapiens
ctagcagggggagga

SEQ ID NO: 233460 - DNA, 15 bp, Homo sapiens
tctagcagggggagg

SEQ ID NO: 233461 - DNA, 15 bp, Homo sapiens
ttctagcagggggag

SEQ ID NO: 233462 - DNA, 15 bp, Homo sapiens
tttctagcaggggga

SEQ ID NO: 233463 - DNA, 15 bp, Homo sapiens
gtttctagcaggggg

SEQ ID NO: 233464 - DNA, 15 bp, Homo sapiens
ggtttctagcagggg

SEQ ID NO: 233465 - DNA, 15 bp, Homo sapiens
aggtttctagcaggg

SEQ ID NO: 233466 - DNA, 15 bp, Homo sapiens
gaggtttctagcagg

SEQ ID NO: 233467 - DNA, 15 bp, Homo sapiens
tgaggtttctagcag

SEQ ID NO: 233468 - DNA, 15 bp, Homo sapiens
gtgaggtttctagca

SEQ ID NO: 233469 - DNA, 15 bp, Homo sapiens
tgtgaggtttctagc

SEQ ID NO: 233470 - DNA, 15 bp, Homo sapiens
atgtgaggtttctag

SEQ ID NO: 233471 - DNA, 15 bp, Homo sapiens
aatgtgaggtttcta

SEQ ID NO: 233472 - DNA, 15 bp, Homo sapiens
caatgtgaggtttct

SEQ ID NO: 233473 - DNA, 15 bp, Homo sapiens
tcaatgtgaggtttc

SEQ ID NO: 233474 - DNA, 15 bp, Homo sapiens
ttcaatgtgaggttt

SEQ ID NO: 233475 - DNA, 15 bp, Homo sapiens
tttcaatgtgaggtt

SEQ ID NO: 233476 - DNA, 15 bp, Homo sapiens
atttcaatgtgaggt

SEQ ID NO: 233477 - DNA, 15 bp, Homo sapiens
catttcaatgtgagg

SEQ ID NO: 233478 - DNA, 15 bp, Homo sapiens
gcatttcaatgtgag

SEQ ID NO: 233479 - DNA, 15 bp, Homo sapiens
agcatttcaatgtga

SEQ ID NO: 233480 - DNA, 15 bp, Homo sapiens
cagcatttcaatgtg

SEQ ID NO: 233481 - DNA, 15 bp, Homo sapiens
acagcatttcaatgt

SEQ ID NO: 233482 - DNA, 15 bp, Homo sapiens
tacagcatttcaatg

SEQ ID NO: 233483 - DNA, 15 bp, Homo sapiens
ttacagcatttcaat

SEQ ID NO: 233484 - DNA, 15 bp, Homo sapiens
tttacagcatttcaa

SEQ ID NO: 233485 - DNA, 15 bp, Homo sapiens
atttacagcatttca

SEQ ID NO: 233486 - DNA, 15 bp, Homo sapiens
catttacagcatttc

SEQ ID NO: 233487 - DNA, 15 bp, Homo sapiens
tcatttacagcattt

SEQ ID NO: 233488 - DNA, 15 bp, Homo sapiens
gtcatttacagcatt

SEQ ID NO: 233489 - DNA, 15 bp, Homo sapiens
cgtcatttacagcat

SEQ ID NO: 233490 - DNA, 15 bp, Homo sapiens
acgtcatttacagca

SEQ ID NO: 233491 - DNA, 15 bp, Homo sapiens
cacgtcatttacagc

SEQ ID NO: 233492 - DNA, 15 bp, Homo sapiens
ccacgtcatttacag

SEQ ID NO: 233493 - DNA, 15 bp, Homo sapiens
cccacgtcatttaca

SEQ ID NO: 233494 - DNA, 15 bp, Homo sapiens
gcccacgtcatttac

SEQ ID NO: 233495 - DNA, 15 bp, Homo sapiens
ggcccacgtcattta

SEQ ID NO: 233496 - DNA, 15 bp, Homo sapiens
gggcccacgtcattt

SEQ ID NO: 233497 - DNA, 15 bp, Homo sapiens
ggggcccacgtcatt

SEQ ID NO: 233498 - DNA, 15 bp, Homo sapiens
cggggcccacgtcat

SEQ ID NO: 233499 - DNA, 15 bp, Homo sapiens
tcggggcccacgtca

SEQ ID NO: 233500 - DNA, 15 bp, Homo sapiens
ctcggggcccacgtc

SEQ ID NO: 233501 - DNA, 15 bp, Homo sapiens
actcggggcccacgt

SEQ ID NO: 233502 - DNA, 15 bp, Homo sapiens
cactcggggcccacg

SEQ ID NO: 233503 - DNA, 15 bp, Homo sapiens
gcactcggggcccac

SEQ ID NO: 233504 - DNA, 15 bp, Homo sapiens
tgcactcggggccca

SEQ ID NO: 233505 - DNA, 15 bp, Homo sapiens
ttgcactcggggccc

SEQ ID NO: 233506 - DNA, 15 bp, Homo sapiens
attgcactcggggcc

SEQ ID NO: 233507 - DNA, 15 bp, Homo sapiens
gattgcactcggggc

SEQ ID NO: 233508 - DNA, 15 bp, Homo sapiens
cgattgcactcgggg

SEQ ID NO: 233509 - DNA, 15 bp, Homo sapiens
gcgattgcactcggg

SEQ ID NO: 233510 - DNA, 15 bp, Homo sapiens
cgcgattgcactcgg

SEQ ID NO: 233511 - DNA, 15 bp, Homo sapiens
ccgcgattgcactcg

SEQ ID NO: 233512 - DNA, 15 bp, Homo sapiens
cccgcgattgcactc

SEQ ID NO: 233513 - DNA, 15 bp, Homo sapiens
tcccgcgattgcact

SEQ ID NO: 233514 - DNA, 15 bp, Homo sapiens
ttcccgcgattgcac

SEQ ID NO: 233515 - DNA, 15 bp, Homo sapiens
cttcccgcgattgca

SEQ ID NO: 233516 - DNA, 15 bp, Homo sapiens
gcttcccgcgattgc

SEQ ID NO: 233517 - DNA, 15 bp, Homo sapiens
ggcttcccgcgattg

SEQ ID NO: 233518 - DNA, 15 bp, Homo sapiens
tggcttcccgcgatt

SEQ ID NO: 233519 - DNA, 15 bp, Homo sapiens
ctggcttcccgcgat

SEQ ID NO: 233520 - DNA, 15 bp, Homo sapiens
cctggcttcccgcga

SEQ ID NO: 233521 - DNA, 15 bp, Homo sapiens
ccctggcttcccgcg

SEQ ID NO: 233522 - DNA, 15 bp, Homo sapiens
accctggcttcccgc

SEQ ID NO: 233523 - DNA, 15 bp, Homo sapiens
aaccctggcttcccg

SEQ ID NO: 233524 - DNA, 15 bp, Homo sapiens
aaaccctggcttccc

SEQ ID NO: 233525 - DNA, 15 bp, Homo sapiens
gaaaccctggcttcc

SEQ ID NO: 233526 - DNA, 15 bp, Homo sapiens
ggaaaccctggcttc

SEQ ID NO: 233527 - DNA, 15 bp, Homo sapiens
tggaaaccctggctt

SEQ ID NO: 233528 - DNA, 15 bp, Homo sapiens
ctggaaaccctggct

SEQ ID NO: 233529 - DNA, 15 bp, Homo sapiens
gctggaaaccctggc

SEQ ID NO: 233530 - DNA, 15 bp, Homo sapiens
agctggaaaccctgg

SEQ ID NO: 233531 - DNA, 15 bp, Homo sapiens
tagctggaaaccctg

SEQ ID NO: 233532 - DNA, 15 bp, Homo sapiens
ctagctggaaaccct

SEQ ID NO: 233533 - DNA, 15 bp, Homo sapiens
cctagctggaaaccc

SEQ ID NO: 233534 - DNA, 15 bp, Homo sapiens
tcctagctggaaacc

SEQ ID NO: 233535 - DNA, 15 bp, Homo sapiens
gtcctagctggaaac

SEQ ID NO: 233536 - DNA, 15 bp, Homo sapiens
tgtcctagctggaaa

SEQ ID NO: 233537 - DNA, 15 bp, Homo sapiens
gtgtcctagctggaa

SEQ ID NO: 233538 - DNA, 15 bp, Homo sapiens
tgtgtcctagctgga

SEQ ID NO: 233539 - DNA, 15 bp, Homo sapiens
ctgtgtcctagctgg

SEQ ID NO: 233540 - DNA, 15 bp, Homo sapiens
gctgtgtcctagctg

SEQ ID NO: 233541 - DNA, 15 bp, Homo sapiens
tgctgtgtcctagct

SEQ ID NO: 233542 - DNA, 15 bp, Homo sapiens
ctgctgtgtcctagc

SEQ ID NO: 233543 - DNA, 15 bp, Homo sapiens
cctgctgtgtcctag

SEQ ID NO: 233544 - DNA, 15 bp, Homo sapiens
acctgctgtgtccta

SEQ ID NO: 233545 - DNA, 15 bp, Homo sapiens
gacctgctgtgtcct

SEQ ID NO: 233546 - DNA, 15 bp, Homo sapiens
cgacctgctgtgtcc

SEQ ID NO: 233547 - DNA, 15 bp, Homo sapiens
acgacctgctgtgtc

SEQ ID NO: 233548 - DNA, 15 bp, Homo sapiens
cacgacctgctgtgt

SEQ ID NO: 233549 - DNA, 15 bp, Homo sapiens
tcacgacctgctgtg

SEQ ID NO: 233550 - DNA, 15 bp, Homo sapiens
atcacgacctgctgt

SEQ ID NO: 233551 - DNA, 15 bp, Homo sapiens
gatcacgacctgctg

SEQ ID NO: 233552 - DNA, 15 bp, Homo sapiens
ggatcacgacctgct

SEQ ID NO: 233553 - DNA, 15 bp, Homo sapiens
cggatcacgacctgc

SEQ ID NO: 233554 - DNA, 15 bp, Homo sapiens
ccggatcacgacctg

SEQ ID NO: 233555 - DNA, 15 bp, Homo sapiens
cccggatcacgacct

SEQ ID NO: 233556 - DNA, 15 bp, Homo sapiens
acccggatcacgacc

SEQ ID NO: 233557 - DNA, 15 bp, Homo sapiens
gacccggatcacgac

SEQ ID NO: 233558 - DNA, 15 bp, Homo sapiens
cgacccggatcacga

SEQ ID NO: 233559 - DNA, 15 bp, Homo sapiens
ccgacccggatcacg

SEQ ID NO: 233560 - DNA, 15 bp, Homo sapiens
cccgacccggatcac

SEQ ID NO: 233561 - DNA, 15 bp, Homo sapiens
tcccgacccggatca

SEQ ID NO: 233562 - DNA, 15 bp, Homo sapiens
gtcccgacccggatc

SEQ ID NO: 233563 - DNA, 15 bp, Homo sapiens
tgtcccgacccggat

SEQ ID NO: 233564 - DNA, 15 bp, Homo sapiens
gtgtcccgacccgga

SEQ ID NO: 233565 - DNA, 15 bp, Homo sapiens
agtgtcccgacccgg

SEQ ID NO: 233566 - DNA, 15 bp, Homo sapiens
cagtgtcccgacccg

SEQ ID NO: 233567 - DNA, 15 bp, Homo sapiens
gcagtgtcccgaccc

SEQ ID NO: 233568 - DNA, 15 bp, Homo sapiens
ggcagtgtcccgacc

SEQ ID NO: 233569 - DNA, 15 bp, Homo sapiens
aggcagtgtcccgac

SEQ ID NO: 233570 - DNA, 15 bp, Homo sapiens
caggcagtgtcccga

SEQ ID NO: 233571 - DNA, 15 bp, Homo sapiens
ccaggcagtgtcccg

SEQ ID NO: 233572 - DNA, 15 bp, Homo sapiens
gccaggcagtgtccc

SEQ ID NO: 233573 - DNA, 15 bp, Homo sapiens
tgccaggcagtgtcc

SEQ ID NO: 233574 - DNA, 15 bp, Homo sapiens
ctgccaggcagtgtc

SEQ ID NO: 233575 - DNA, 15 bp, Homo sapiens
tctgccaggcagtgt

SEQ ID NO: 233576 - DNA, 15 bp, Homo sapiens
ctctgccaggcagtg

SEQ ID NO: 233577 - DNA, 15 bp, Homo sapiens
cctctgccaggcagt

SEQ ID NO: 233578 - DNA, 15 bp, Homo sapiens
gcctctgccaggcag

SEQ ID NO: 233579 - DNA, 15 bp, Homo sapiens
agcctctgccaggca

SEQ ID NO: 233580 - DNA, 15 bp, Homo sapiens
cagcctctgccaggc

SEQ ID NO: 233581 - DNA, 15 bp, Homo sapiens
gcagcctctgccagg

SEQ ID NO: 233582 - DNA, 15 bp, Homo sapiens
cgcagcctctgccag

SEQ ID NO: 233583 - DNA, 15 bp, Homo sapiens
tcgcagcctctgcca

SEQ ID NO: 233584 - DNA, 15 bp, Homo sapiens
ctcgcagcctctgcc

SEQ ID NO: 233585 - DNA, 15 bp, Homo sapiens
gctcgcagcctctgc

SEQ ID NO: 233586 - DNA, 15 bp, Homo sapiens
tgctcgcagcctctg

SEQ ID NO: 233587 - DNA, 15 bp, Homo sapiens
atgctcgcagcctct

SEQ ID NO: 233588 - DNA, 15 bp, Homo sapiens
catgctcgcagcctc

SEQ ID NO: 233589 - DNA, 15 bp, Homo sapiens
ccatgctcgcagcct

SEQ ID NO: 233590 - DNA, 15 bp, Homo sapiens
cccatgctcgcagcc

SEQ ID NO: 233591 - DNA, 15 bp, Homo sapiens
ccccatgctcgcagc

SEQ ID NO: 233592 - DNA, 15 bp, Homo sapiens
gccccatgctcgcag

SEQ ID NO: 233593 - DNA, 15 bp, Homo sapiens
ggccccatgctcgca

SEQ ID NO: 233594 - DNA, 15 bp, Homo sapiens
gggccccatgctcgc

SEQ ID NO: 233595 - DNA, 15 bp, Homo sapiens
agggccccatgctcg

SEQ ID NO: 233596 - DNA, 15 bp, Homo sapiens
cagggccccatgctc

SEQ ID NO: 233597 - DNA, 15 bp, Homo sapiens
ccagggccccatgct

SEQ ID NO: 233598 - DNA, 15 bp, Homo sapiens
cccagggccccatgc

SEQ ID NO: 233599 - DNA, 15 bp, Homo sapiens
ccccagggccccatg

SEQ ID NO: 233600 - DNA, 15 bp, Homo sapiens
gccccagggccccat

SEQ ID NO: 233601 - DNA, 15 bp, Homo sapiens
agccccagggcccca

SEQ ID NO: 233602 - DNA, 15 bp, Homo sapiens
cagccccagggcccc

SEQ ID NO: 233603 - DNA, 15 bp, Homo sapiens
ccagccccagggccc

SEQ ID NO: 233604 - DNA, 15 bp, Homo sapiens
tccagccccagggcc

SEQ ID NO: 233605 - DNA, 15 bp, Homo sapiens
ttccagccccagggc

SEQ ID NO: 233606 - DNA, 15 bp, Homo sapiens
tttccagccccaggg

SEQ ID NO: 233607 - DNA, 15 bp, Homo sapiens
atttccagccccagg

SEQ ID NO: 233608 - DNA, 15 bp, Homo sapiens
aatttccagccccag

SEQ ID NO: 233609 - DNA, 15 bp, Homo sapiens
caatttccagcccca

SEQ ID NO: 233610 - DNA, 15 bp, Homo sapiens
gcaatttccagcccc

SEQ ID NO: 233611 - DNA, 15 bp, Homo sapiens
cgcaatttccagccc

SEQ ID NO: 233612 - DNA, 15 bp, Homo sapiens
gcgcaatttccagcc

SEQ ID NO: 233613 - DNA, 15 bp, Homo sapiens
agcgcaatttccagc

SEQ ID NO: 233614 - DNA, 15 bp, Homo sapiens
cagcgcaatttccag

SEQ ID NO: 233615 - DNA, 15 bp, Homo sapiens
ccagcgcaatttcca

SEQ ID NO: 233616 - DNA, 15 bp, Homo sapiens
tccagcgcaatttcc

SEQ ID NO: 233617 - DNA, 15 bp, Homo sapiens
gtccagcgcaatttc

SEQ ID NO: 233618 - DNA, 15 bp, Homo sapiens
ggtccagcgcaattt

SEQ ID NO: 233619 - DNA, 15 bp, Homo sapiens
cggtccagcgcaatt

SEQ ID NO: 233620 - DNA, 15 bp, Homo sapiens
acggtccagcgcaat

SEQ ID NO: 233621 - DNA, 15 bp, Homo sapiens
gacggtccagcgcaa

SEQ ID NO: 233622 - DNA, 15 bp, Homo sapiens
cgacggtccagcgca

SEQ ID NO: 233623 - DNA, 15 bp, Homo sapiens
gcgacggtccagcgc

SEQ ID NO: 233624 - DNA, 15 bp, Homo sapiens
ggcgacggtccagcg

SEQ ID NO: 233625 - DNA, 15 bp, Homo sapiens
aggcgacggtccagc

SEQ ID NO: 233626 - DNA, 15 bp, Homo sapiens
aaggcgacggtccag

SEQ ID NO: 233627 - DNA, 15 bp, Homo sapiens
caaggcgacggtcca

SEQ ID NO: 233628 - DNA, 15 bp, Homo sapiens
gcaaggcgacggtcc

SEQ ID NO: 233629 - DNA, 15 bp, Homo sapiens
agcaaggcgacggtc

SEQ ID NO: 233630 - DNA, 15 bp, Homo sapiens
gagcaaggcgacggt

SEQ ID NO: 233631 - DNA, 15 bp, Homo sapiens
ggagcaaggcgacgg

SEQ ID NO: 233632 - DNA, 15 bp, Homo sapiens
aggagcaaggcgacg

SEQ ID NO: 233633 - DNA, 15 bp, Homo sapiens
gaggagcaaggcgac

SEQ ID NO: 233634 - DNA, 15 bp, Homo sapiens
cgaggagcaaggcga

SEQ ID NO: 233635 - DNA, 15 bp, Homo sapiens
gcgaggagcaaggcg

SEQ ID NO: 233636 - DNA, 15 bp, Homo sapiens
ggcgaggagcaaggc

SEQ ID NO: 233637 - DNA, 15 bp, Homo sapiens
cggcgaggagcaagg

SEQ ID NO: 233638 - DNA, 15 bp, Homo sapiens
gcggcgaggagcaag

SEQ ID NO: 233639 - DNA, 15 bp, Homo sapiens
cgcggcgaggagcaa

SEQ ID NO: 233640 - DNA, 15 bp, Homo sapiens
ccgcggcgaggagca

SEQ ID NO: 233641 - DNA, 15 bp, Homo sapiens
gccgcggcgaggagc

SEQ ID NO: 233642 - DNA, 15 bp, Homo sapiens
cgccgcggcgaggag

SEQ ID NO: 233643 - DNA, 15 bp, Homo sapiens
ccgccgcggcgagga

SEQ ID NO: 233644 - DNA, 15 bp, Homo sapiens
cccgccgcggcgagg

SEQ ID NO: 233645 - DNA, 15 bp, Homo sapiens
ccccgccgcggcgag

SEQ ID NO: 233646 - DNA, 15 bp, Homo sapiens
tccccgccgcggcga

SEQ ID NO: 233647 - DNA, 15 bp, Homo sapiens
gtccccgccgcggcg

SEQ ID NO: 233648 - DNA, 15 bp, Homo sapiens
agtccccgccgcggc

SEQ ID NO: 233649 - DNA, 15 bp, Homo sapiens
cagtccccgccgcgg

SEQ ID NO: 233650 - DNA, 15 bp, Homo sapiens
gcagtccccgccgcg

SEQ ID NO: 233651 - DNA, 15 bp, Homo sapiens
tgcagtccccgccgc

SEQ ID NO: 233652 - DNA, 15 bp, Homo sapiens
ctgcagtccccgccg

SEQ ID NO: 233653 - DNA, 15 bp, Homo sapiens
cctgcagtccccgcc

SEQ ID NO: 233654 - DNA, 15 bp, Homo sapiens
acctgcagtccccgc

SEQ ID NO: 233655 - DNA, 15 bp, Homo sapiens
tacctgcagtccccg

SEQ ID NO: 233656 - DNA, 15 bp, Homo sapiens
ttacctgcagtcccc

SEQ ID NO: 233657 - DNA, 15 bp, Homo sapiens
cttacctgcagtccc

SEQ ID NO: 233658 - DNA, 15 bp, Homo sapiens
ccttacctgcagtcc

SEQ ID NO: 233659 - DNA, 15 bp, Homo sapiens
gccttacctgcagtc

SEQ ID NO: 233660 - DNA, 15 bp, Homo sapiens
agccttacctgcagt

SEQ ID NO: 233661 - DNA, 15 bp, Homo sapiens
aagccttacctgcag

SEQ ID NO: 233662 - DNA, 15 bp, Homo sapiens
caagccttacctgca

SEQ ID NO: 233663 - DNA, 15 bp, Homo sapiens
gcaagccttacctgc

SEQ ID NO: 233664 - DNA, 15 bp, Homo sapiens
agcaagccttacctg

SEQ ID NO: 233665 - DNA, 15 bp, Homo sapiens
gagcaagccttacct

SEQ ID NO: 233666 - DNA, 15 bp, Homo sapiens
ggagcaagccttacc

SEQ ID NO: 233667 - DNA, 15 bp, Homo sapiens
tggagcaagccttac

SEQ ID NO: 233668 - DNA, 15 bp, Homo sapiens
ctggagcaagcctta

SEQ ID NO: 233669 - DNA, 15 bp, Homo sapiens
cctggagcaagcctt

SEQ ID NO: 233670 - DNA, 15 bp, Homo sapiens
gcctggagcaagcct

SEQ ID NO: 233671 - DNA, 15 bp, Homo sapiens
cgcctggagcaagcc

SEQ ID NO: 233672 - DNA, 15 bp, Homo sapiens
gcgcctggagcaagc

SEQ ID NO: 233673 - DNA, 15 bp, Homo sapiens
ggcgcctggagcaag

SEQ ID NO: 233674 - DNA, 15 bp, Homo sapiens
tggcgcctggagcaa

SEQ ID NO: 233675 - DNA, 15 bp, Homo sapiens
ctggcgcctggagca

SEQ ID NO: 233676 - DNA, 15 bp, Homo sapiens
tctggcgcctggagc

SEQ ID NO: 233677 - DNA, 15 bp, Homo sapiens
ttctggcgcctggag

SEQ ID NO: 233678 - DNA, 15 bp, Homo sapiens
attctggcgcctgga

SEQ ID NO: 233679 - DNA, 15 bp, Homo sapiens
tattctggcgcctgg

SEQ ID NO: 233680 - DNA, 15 bp, Homo sapiens
ctattctggcgcctg

SEQ ID NO: 233681 - DNA, 15 bp, Homo sapiens
cctattctggcgcct

SEQ ID NO: 233682 - DNA, 15 bp, Homo sapiens
acctattctggcgcc

SEQ ID NO: 233683 - DNA, 15 bp, Homo sapiens
aacctattctggcgc

SEQ ID NO: 233684 - DNA, 15 bp, Homo sapiens
caacctattctggcg

SEQ ID NO: 233685 - DNA, 15 bp, Homo sapiens
tcaacctattctggc

SEQ ID NO: 233686 - DNA, 15 bp, Homo sapiens
ctcaacctattctgg

SEQ ID NO: 233687 - DNA, 15 bp, Homo sapiens
tctcaacctattctg

SEQ ID NO: 233688 - DNA, 15 bp, Homo sapiens
ctctcaacctattct

SEQ ID NO: 233689 - DNA, 15 bp, Homo sapiens
cctctcaacctattc

SEQ ID NO: 233690 - DNA, 15 bp, Homo sapiens
ccctctcaacctatt

SEQ ID NO: 233691 - DNA, 15 bp, Homo sapiens
tccctctcaacctat

SEQ ID NO: 233692 - DNA, 15 bp, Homo sapiens
ctccctctcaaccta

SEQ ID NO: 233693 - DNA, 15 bp, Homo sapiens
gctccctctcaacct

SEQ ID NO: 233694 - DNA, 15 bp, Homo sapiens
ggctccctctcaacc

SEQ ID NO: 233695 - DNA, 15 bp, Homo sapiens
gggctccctctcaac

SEQ ID NO: 233696 - DNA, 15 bp, Homo sapiens
ggggctccctctcaa

SEQ ID NO: 233697 - DNA, 15 bp, Homo sapiens
gggggctccctctca

SEQ ID NO: 233698 - DNA, 15 bp, Homo sapiens
cgggggctccctctc

SEQ ID NO: 233699 - DNA, 15 bp, Homo sapiens
ccgggggctccctct

SEQ ID NO: 233700 - DNA, 15 bp, Homo sapiens
cccgggggctccctc

SEQ ID NO: 233701 - DNA, 15 bp, Homo sapiens
ccccgggggctccct

SEQ ID NO: 233702 - DNA, 15 bp, Homo sapiens
cccccgggggctccc

SEQ ID NO: 233703 - DNA, 15 bp, Homo sapiens
ccccccgggggctcc

SEQ ID NO: 233704 - DNA, 15 bp, Homo sapiens
gccccccgggggctc

SEQ ID NO: 233705 - DNA, 15 bp, Homo sapiens
ggccccccgggggct

SEQ ID NO: 233706 - DNA, 15 bp, Homo sapiens
gggccccccgggggc

SEQ ID NO: 233707 - DNA, 15 bp, Homo sapiens
agggccccccggggg

SEQ ID NO: 233708 - DNA, 15 bp, Homo sapiens
aagggccccccgggg

SEQ ID NO: 233709 - DNA, 15 bp, Homo sapiens
caagggccccccggg

SEQ ID NO: 233710 - DNA, 15 bp, Homo sapiens
ccaagggccccccgg

SEQ ID NO: 233711 - DNA, 15 bp, Homo sapiens
cccaagggccccccg

SEQ ID NO: 233712 - DNA, 15 bp, Homo sapiens
tcccaagggcccccc

SEQ ID NO: 233713 - DNA, 15 bp, Homo sapiens
ttcccaagggccccc

SEQ ID NO: 233714 - DNA, 15 bp, Homo sapiens
attcccaagggcccc

SEQ ID NO: 233715 - DNA, 15 bp, Homo sapiens
aattcccaagggccc

SEQ ID NO: 233716 - DNA, 15 bp, Homo sapiens
aaattcccaagggcc

SEQ ID NO: 233717 - DNA, 15 bp, Homo sapiens
taaattcccaagggc

SEQ ID NO: 233718 - DNA, 15 bp, Homo sapiens
ataaattcccaaggg

SEQ ID NO: 233719 - DNA, 15 bp, Homo sapiens
aataaattcccaagg

SEQ ID NO: 233720 - DNA, 15 bp, Homo sapiens
aaataaattcccaag

SEQ ID NO: 233721 - DNA, 15 bp, Homo sapiens
aaaataaattcccaa

SEQ ID NO: 233722 - DNA, 15 bp, Homo sapiens
aaaaataaattccca

SEQ ID NO: 233723 - DNA, 15 bp, Homo sapiens
aaaaaataaattccc

SEQ ID NO: 233724 - DNA, 15 bp, Homo sapiens
aaaaaaataaattcc

SEQ ID NO: 233725 - DNA, 15 bp, Homo sapiens
caaaaaaataaattc

SEQ ID NO: 233726 - DNA, 15 bp, Homo sapiens
ccaaaaaaataaatt

SEQ ID NO: 233727 - DNA, 15 bp, Homo sapiens
cccaaaaaaataaat

SEQ ID NO: 233728 - DNA, 15 bp, Homo sapiens
acccaaaaaaataaa

SEQ ID NO: 233729 - DNA, 15 bp, Homo sapiens
tacccaaaaaaataa

SEQ ID NO: 233730 - DNA, 15 bp, Homo sapiens
gtacccaaaaaaata

SEQ ID NO: 233731 - DNA, 15 bp, Homo sapiens
tgtacccaaaaaaat

SEQ ID NO: 233732 - DNA, 15 bp, Homo sapiens
ttgtacccaaaaaaa

SEQ ID NO: 233733 - DNA, 15 bp, Homo sapiens
tttgtacccaaaaaa

SEQ ID NO: 233734 - DNA, 15 bp, Homo sapiens
atttgtacccaaaaa

SEQ ID NO: 233735 - DNA, 15 bp, Homo sapiens
tatttgtacccaaaa

SEQ ID NO: 233736 - DNA, 15 bp, Homo sapiens
ttatttgtacccaaa

SEQ ID NO: 233737 - DNA, 15 bp, Homo sapiens
attatttgtacccaa

SEQ ID NO: 233738 - DNA, 15 bp, Homo sapiens
gattatttgtaccca

SEQ ID NO: 233739 - DNA, 15 bp, Homo sapiens
tgattatttgtaccc

SEQ ID NO: 233740 - DNA, 15 bp, Homo sapiens
gtgattatttgtacc

SEQ ID NO: 233741 - DNA, 15 bp, Homo sapiens
agtgattatttgtac

SEQ ID NO: 233742 - DNA, 15 bp, Homo sapiens
gagtgattatttgta

SEQ ID NO: 233743 - DNA, 15 bp, Homo sapiens
ggagtgattatttgt

SEQ ID NO: 233744 - DNA, 15 bp, Homo sapiens
tggagtgattatttg

SEQ ID NO: 233745 - DNA, 15 bp, Homo sapiens
atggagtgattattt

SEQ ID NO: 233746 - DNA, 15 bp, Homo sapiens
gatggagtgattatt

SEQ ID NO: 233747 - DNA, 15 bp, Homo sapiens
ggatggagtgattat

SEQ ID NO: 233748 - DNA, 15 bp, Homo sapiens
gggatggagtgatta

SEQ ID NO: 233749 - DNA, 15 bp, Homo sapiens
agggatggagtgatt

SEQ ID NO: 233750 - DNA, 15 bp, Homo sapiens
cagggatggagtgat

SEQ ID NO: 233751 - DNA, 15 bp, Homo sapiens
ccagggatggagtga

SEQ ID NO: 233752 - DNA, 15 bp, Homo sapiens
cccagggatggagtg

SEQ ID NO: 233753 - DNA, 15 bp, Homo sapiens
tcccagggatggagt

SEQ ID NO: 233754 - DNA, 15 bp, Homo sapiens
ctcccagggatggag

SEQ ID NO: 233755 - DNA, 15 bp, Homo sapiens
tctcccagggatgga

SEQ ID NO: 233756 - DNA, 15 bp, Homo sapiens
gtctcccagggatgg

SEQ ID NO: 233757 - DNA, 15 bp, Homo sapiens
agtctcccagggatg

SEQ ID NO: 233758 - DNA, 15 bp, Homo sapiens
aagtctcccagggat

SEQ ID NO: 233759 - DNA, 15 bp, Homo sapiens
caagtctcccaggga

SEQ ID NO: 233760 - DNA, 15 bp, Homo sapiens
acaagtctcccaggg

SEQ ID NO: 233761 - DNA, 15 bp, Homo sapiens
cacaagtctcccagg

SEQ ID NO: 233762 - DNA, 15 bp, Homo sapiens
ccacaagtctcccag

SEQ ID NO: 233763 - DNA, 15 bp, Homo sapiens
cccacaagtctccca

SEQ ID NO: 233764 - DNA, 15 bp, Homo sapiens
ccccacaagtctccc

SEQ ID NO: 233765 - DNA, 15 bp, Homo sapiens
accccacaagtctcc

SEQ ID NO: 233766 - DNA, 15 bp, Homo sapiens
taccccacaagtctc

SEQ ID NO: 233767 - DNA, 15 bp, Homo sapiens
ttaccccacaagtct

SEQ ID NO: 233768 - DNA, 15 bp, Homo sapiens
attaccccacaagtc

SEQ ID NO: 233769 - DNA, 15 bp, Homo sapiens
cattaccccacaagt

SEQ ID NO: 233770 - DNA, 15 bp, Homo sapiens
ccattaccccacaag

SEQ ID NO: 233771 - DNA, 15 bp, Homo sapiens
gccattaccccacaa

SEQ ID NO: 233772 - DNA, 15 bp, Homo sapiens
tgccattaccccaca

SEQ ID NO: 233773 - DNA, 15 bp, Homo sapiens
gtgccattaccccac

SEQ ID NO: 233774 - DNA, 15 bp, Homo sapiens
cgtgccattacccca

SEQ ID NO: 233775 - DNA, 15 bp, Homo sapiens
ccgtgccattacccc

SEQ ID NO: 233776 - DNA, 15 bp, Homo sapiens
cccgtgccattaccc

SEQ ID NO: 233777 - DNA, 15 bp, Homo sapiens
ccccgtgccattacc

SEQ ID NO: 233778 - DNA, 15 bp, Homo sapiens
accccgtgccattac

SEQ ID NO: 233779 - DNA, 15 bp, Homo sapiens
gaccccgtgccatta

SEQ ID NO: 233780 - DNA, 15 bp, Homo sapiens
ggaccccgtgccatt

SEQ ID NO: 233781 - DNA, 15 bp, Homo sapiens
aggaccccgtgccat

SEQ ID NO: 233782 - DNA, 15 bp, Homo sapiens
aaggaccccgtgcca

SEQ ID NO: 233783 - DNA, 15 bp, Homo sapiens
gaaggaccccgtgcc

SEQ ID NO: 233784 - DNA, 15 bp, Homo sapiens
ggaaggaccccgtgc

SEQ ID NO: 233785 - DNA, 15 bp, Homo sapiens
gggaaggaccccgtg

SEQ ID NO: 233786 - DNA, 15 bp, Homo sapiens
tgggaaggaccccgt

SEQ ID NO: 233787 - DNA, 15 bp, Homo sapiens
ttgggaaggaccccg

SEQ ID NO: 233788 - DNA, 15 bp, Homo sapiens
tttgggaaggacccc

SEQ ID NO: 233789 - DNA, 15 bp, Homo sapiens
gtttgggaaggaccc

SEQ ID NO: 233790 - DNA, 15 bp, Homo sapiens
cgtttgggaaggacc

SEQ ID NO: 233791 - DNA, 15 bp, Homo sapiens
ccgtttgggaaggac

SEQ ID NO: 233792 - DNA, 15 bp, Homo sapiens
gccgtttgggaagga

SEQ ID NO: 233793 - DNA, 15 bp, Homo sapiens
agccgtttgggaagg

SEQ ID NO: 233794 - DNA, 15 bp, Homo sapiens
cagccgtttgggaag

SEQ ID NO: 233795 - DNA, 15 bp, Homo sapiens
ccagccgtttgggaa

SEQ ID NO: 233796 - DNA, 15 bp, Homo sapiens
tccagccgtttggga

SEQ ID NO: 233797 - DNA, 15 bp, Homo sapiens
ctccagccgtttggg

SEQ ID NO: 233798 - DNA, 15 bp, Homo sapiens
cctccagccgtttgg

SEQ ID NO: 233799 - DNA, 15 bp, Homo sapiens
ccctccagccgtttg

SEQ ID NO: 233800 - DNA, 15 bp, Homo sapiens
cccctccagccgttt

SEQ ID NO: 233801 - DNA, 15 bp, Homo sapiens
ccccctccagccgtt

SEQ ID NO: 233802 - DNA, 15 bp, Homo sapiens
gccccctccagccgt

SEQ ID NO: 233803 - DNA, 15 bp, Homo sapiens
cgccccctccagccg

SEQ ID NO: 233804 - DNA, 15 bp, Homo sapiens
gcgccccctccagcc

SEQ ID NO: 233805 - DNA, 15 bp, Homo sapiens
agcgccccctccagc

SEQ ID NO: 233806 - DNA, 15 bp, Homo sapiens
cagcgccccctccag

SEQ ID NO: 233807 - DNA, 15 bp, Homo sapiens
ccagcgccccctcca

SEQ ID NO: 233808 - DNA, 15 bp, Homo sapiens
tccagcgccccctcc

SEQ ID NO: 233809 - DNA, 15 bp, Homo sapiens
ctccagcgccccctc

SEQ ID NO: 233810 - DNA, 15 bp, Homo sapiens
cctccagcgccccct

SEQ ID NO: 233811 - DNA, 15 bp, Homo sapiens
ccctccagcgccccc

SEQ ID NO: 233812 - DNA, 15 bp, Homo sapiens
cccctccagcgcccc

SEQ ID NO: 233813 - DNA, 15 bp, Homo sapiens
ccccctccagcgccc

SEQ ID NO: 233814 - DNA, 15 bp, Homo sapiens
cccccctccagcgcc

SEQ ID NO: 233815 - DNA, 15 bp, Homo sapiens
gcccccctccagcgc

SEQ ID NO: 233816 - DNA, 15 bp, Homo sapiens
cgcccccctccagcg

SEQ ID NO: 233817 - DNA, 15 bp, Homo sapiens
gcgcccccctccagc

SEQ ID NO: 233818 - DNA, 15 bp, Homo sapiens
agcgcccccctccag

SEQ ID NO: 233819 - DNA, 15 bp, Homo sapiens
cagcgcccccctcca

SEQ ID NO: 233820 - DNA, 15 bp, Homo sapiens
tcagcgcccccctcc

SEQ ID NO: 233821 - DNA, 15 bp, Homo sapiens
ctcagcgcccccctc

SEQ ID NO: 233822 - DNA, 15 bp, Homo sapiens
cctcagcgcccccct

SEQ ID NO: 233823 - DNA, 15 bp, Homo sapiens
ccctcagcgcccccc

SEQ ID NO: 233824 - DNA, 15 bp, Homo sapiens
cccctcagcgccccc

SEQ ID NO: 233825 - DNA, 15 bp, Homo sapiens
tcccctcagcgcccc

SEQ ID NO: 233826 - DNA, 15 bp, Homo sapiens
ctcccctcagcgccc

SEQ ID NO: 233827 - DNA, 15 bp, Homo sapiens
gctcccctcagcgcc

SEQ ID NO: 233828 - DNA, 15 bp, Homo sapiens
cgctcccctcagcgc

SEQ ID NO: 233829 - DNA, 15 bp, Homo sapiens
gcgctcccctcagcg

SEQ ID NO: 233830 - DNA, 15 bp, Homo sapiens
cgcgctcccctcagc

SEQ ID NO: 233831 - DNA, 15 bp, Homo sapiens
tcgcgctcccctcag

SEQ ID NO: 233832 - DNA, 15 bp, Homo sapiens
ctcgcgctcccctca

SEQ ID NO: 233833 - DNA, 15 bp, Homo sapiens
cctcgcgctcccctc

SEQ ID NO: 233834 - DNA, 15 bp, Homo sapiens
ccctcgcgctcccct

SEQ ID NO: 233835 - DNA, 15 bp, Homo sapiens
accctcgcgctcccc

SEQ ID NO: 233836 - DNA, 15 bp, Homo sapiens
gaccctcgcgctccc

SEQ ID NO: 233837 - DNA, 15 bp, Homo sapiens
cgaccctcgcgctcc

SEQ ID NO: 233838 - DNA, 15 bp, Homo sapiens
ccgaccctcgcgctc

SEQ ID NO: 233839 - DNA, 15 bp, Homo sapiens
cccgaccctcgcgct

SEQ ID NO: 233840 - DNA, 15 bp, Homo sapiens
tcccgaccctcgcgc

SEQ ID NO: 233841 - DNA, 15 bp, Homo sapiens
ctcccgaccctcgcg

SEQ ID NO: 233842 - DNA, 15 bp, Homo sapiens
cctcccgaccctcgc

SEQ ID NO: 233843 - DNA, 15 bp, Homo sapiens
tcctcccgaccctcg

SEQ ID NO: 233844 - DNA, 15 bp, Homo sapiens
ctcctcccgaccctc

SEQ ID NO: 233845 - DNA, 15 bp, Homo sapiens
actcctcccgaccct

SEQ ID NO: 233846 - DNA, 15 bp, Homo sapiens
gactcctcccgaccc

SEQ ID NO: 233847 - DNA, 15 bp, Homo sapiens
agactcctcccgacc

SEQ ID NO: 233848 - DNA, 15 bp, Homo sapiens
cagactcctcccgac

SEQ ID NO: 233849 - DNA, 15 bp, Homo sapiens
tcagactcctcccga

SEQ ID NO: 233850 - DNA, 15 bp, Homo sapiens
ctcagactcctcccg

SEQ ID NO: 233851 - DNA, 15 bp, Homo sapiens
cctcagactcctccc

SEQ ID NO: 233852 - DNA, 15 bp, Homo sapiens
ccctcagactcctcc

SEQ ID NO: 233853 - DNA, 15 bp, Homo sapiens
tccctcagactcctc

SEQ ID NO: 233854 - DNA, 15 bp, Homo sapiens
atccctcagactcct

SEQ ID NO: 233855 - DNA, 15 bp, Homo sapiens
aatccctcagactcc

SEQ ID NO: 233856 - DNA, 15 bp, Homo sapiens
aaatccctcagactc

SEQ ID NO: 233857 - DNA, 15 bp, Homo sapiens
taaatccctcagact

SEQ ID NO: 233858 - DNA, 15 bp, Homo sapiens
ttaaatccctcagac

SEQ ID NO: 233859 - DNA, 15 bp, Homo sapiens
cttaaatccctcaga

SEQ ID NO: 233860 - DNA, 15 bp, Homo sapiens
ccttaaatccctcag

SEQ ID NO: 233861 - DNA, 15 bp, Homo sapiens
cccttaaatccctca

SEQ ID NO: 233862 - DNA, 15 bp, Homo sapiens
tcccttaaatccctc

SEQ ID NO: 233863 - DNA, 15 bp, Homo sapiens
ttcccttaaatccct

SEQ ID NO: 233864 - DNA, 15 bp, Homo sapiens
tttcccttaaatccc

SEQ ID NO: 233865 - DNA, 15 bp, Homo sapiens
gtttcccttaaatcc

SEQ ID NO: 233866 - DNA, 15 bp, Homo sapiens
cgtttcccttaaatc

SEQ ID NO: 233867 - DNA, 15 bp, Homo sapiens
ccgtttcccttaaat

SEQ ID NO: 233868 - DNA, 15 bp, Homo sapiens
cccgtttcccttaaa

SEQ ID NO: 233869 - DNA, 15 bp, Homo sapiens
ccccgtttcccttaa

SEQ ID NO: 233870 - DNA, 15 bp, Homo sapiens
gccccgtttccctta

SEQ ID NO: 233871 - DNA, 15 bp, Homo sapiens
tgccccgtttccctt

SEQ ID NO: 233872 - DNA, 15 bp, Homo sapiens
gtgccccgtttccct

SEQ ID NO: 233873 - DNA, 15 bp, Homo sapiens
ggtgccccgtttccc

SEQ ID NO: 233874 - DNA, 15 bp, Homo sapiens
cggtgccccgtttcc

SEQ ID NO: 233875 - DNA, 15 bp, Homo sapiens
gcggtgccccgtttc

SEQ ID NO: 233876 - DNA, 15 bp, Homo sapiens
agcggtgccccgttt

SEQ ID NO: 233877 - DNA, 15 bp, Homo sapiens
cagcggtgccccgtt

SEQ ID NO: 233878 - DNA, 15 bp, Homo sapiens
acagcggtgccccgt

SEQ ID NO: 233879 - DNA, 15 bp, Homo sapiens
gacagcggtgccccg

SEQ ID NO: 233880 - DNA, 15 bp, Homo sapiens
ggacagcggtgcccc

SEQ ID NO: 233881 - DNA, 15 bp, Homo sapiens
gggacagcggtgccc

SEQ ID NO: 233882 - DNA, 15 bp, Homo sapiens
ggggacagcggtgcc

SEQ ID NO: 233883 - DNA, 15 bp, Homo sapiens
gggggacagcggtgc

SEQ ID NO: 233884 - DNA, 15 bp, Homo sapiens
tgggggacagcggtg

SEQ ID NO: 233885 - DNA, 15 bp, Homo sapiens
ttgggggacagcggt

SEQ ID NO: 233886 - DNA, 15 bp, Homo sapiens
cttgggggacagcgg

SEQ ID NO: 233887 - DNA, 15 bp, Homo sapiens
acttgggggacagcg

SEQ ID NO: 233888 - DNA, 15 bp, Homo sapiens
gacttgggggacagc

SEQ ID NO: 233889 - DNA, 15 bp, Homo sapiens
agacttgggggacag

SEQ ID NO: 233890 - DNA, 15 bp, Homo sapiens
gagacttgggggaca

SEQ ID NO: 233891 - DNA, 15 bp, Homo sapiens
ggagacttgggggac

SEQ ID NO: 233892 - DNA, 15 bp, Homo sapiens
tggagacttggggga

SEQ ID NO: 233893 - DNA, 15 bp, Homo sapiens
gtggagacttggggg

SEQ ID NO: 233894 - DNA, 15 bp, Homo sapiens
tgtggagacttgggg

SEQ ID NO: 233895 - DNA, 15 bp, Homo sapiens
ctgtggagacttggg

SEQ ID NO: 233896 - DNA, 15 bp, Homo sapiens
cctgtggagacttgg

SEQ ID NO: 233897 - DNA, 15 bp, Homo sapiens
ccctgtggagacttg

SEQ ID NO: 233898 - DNA, 15 bp, Homo sapiens
accctgtggagactt

SEQ ID NO: 233899 - DNA, 15 bp, Homo sapiens
caccctgtggagact

SEQ ID NO: 233900 - DNA, 15 bp, Homo sapiens
tcaccctgtggagac

SEQ ID NO: 233901 - DNA, 15 bp, Homo sapiens
ctcaccctgtggaga

SEQ ID NO: 233902 - DNA, 15 bp, Homo sapiens
cctcaccctgtggag

SEQ ID NO: 233903 - DNA, 15 bp, Homo sapiens
ccctcaccctgtgga

SEQ ID NO: 233904 - DNA, 15 bp, Homo sapiens
tccctcaccctgtgg

SEQ ID NO: 233905 - DNA, 15 bp, Homo sapiens
gtccctcaccctgtg

SEQ ID NO: 233906 - DNA, 15 bp, Homo sapiens
ggtccctcaccctgt

SEQ ID NO: 233907 - DNA, 15 bp, Homo sapiens
cggtccctcaccctg

SEQ ID NO: 233908 - DNA, 15 bp, Homo sapiens
gcggtccctcaccct

SEQ ID NO: 233909 - DNA, 15 bp, Homo sapiens
tgcggtccctcaccc

SEQ ID NO: 233910 - DNA, 15 bp, Homo sapiens
atgcggtccctcacc

SEQ ID NO: 233911 - DNA, 15 bp, Homo sapiens
gatgcggtccctcac

SEQ ID NO: 233912 - DNA, 15 bp, Homo sapiens
agatgcggtccctca

SEQ ID NO: 233913 - DNA, 15 bp, Homo sapiens
aagatgcggtccctc

SEQ ID NO: 233914 - DNA, 15 bp, Homo sapiens
gaagatgcggtccct

SEQ ID NO: 233915 - DNA, 15 bp, Homo sapiens
agaagatgcggtccc

SEQ ID NO: 233916 - DNA, 15 bp, Homo sapiens
aagaagatgcggtcc

SEQ ID NO: 233917 - DNA, 15 bp, Homo sapiens
aaagaagatgcggtc

SEQ ID NO: 233918 - DNA, 15 bp, Homo sapiens
caaagaagatgcggt

SEQ ID NO: 233919 - DNA, 15 bp, Homo sapiens
tcaaagaagatgcgg

SEQ ID NO: 233920 - DNA, 15 bp, Homo sapiens
ctcaaagaagatgcg

SEQ ID NO: 233921 - DNA, 15 bp, Homo sapiens
tctcaaagaagatgc

SEQ ID NO: 233922 - DNA, 15 bp, Homo sapiens
gtctcaaagaagatg

SEQ ID NO: 233923 - DNA, 15 bp, Homo sapiens
cgtctcaaagaagat

SEQ ID NO: 233924 - DNA, 15 bp, Homo sapiens
ccgtctcaaagaaga

SEQ ID NO: 233925 - DNA, 15 bp, Homo sapiens
tccgtctcaaagaag

SEQ ID NO: 233926 - DNA, 15 bp, Homo sapiens
ctccgtctcaaagaa

SEQ ID NO: 233927 - DNA, 15 bp, Homo sapiens
actccgtctcaaaga

SEQ ID NO: 233928 - DNA, 15 bp, Homo sapiens
gactccgtctcaaag

SEQ ID NO: 233929 - DNA, 15 bp, Homo sapiens
tagactccgtctcaa

SEQ ID NO: 233930 - DNA, 15 bp, Homo sapiens
ctagactccgtctca

SEQ ID NO: 233931 - DNA, 15 bp, Homo sapiens
gctagactccgtctc

SEQ ID NO: 233932 - DNA, 15 bp, Homo sapiens
agctagactccgtct

SEQ ID NO: 233933 - DNA, 15 bp, Homo sapiens
gagctagactccgtc

SEQ ID NO: 233934 - DNA, 15 bp, Homo sapiens
agagctagactccgt

SEQ ID NO: 233935 - DNA, 15 bp, Homo sapiens
cagagctagactccg

SEQ ID NO: 233936 - DNA, 15 bp, Homo sapiens
acagagctagactcc

SEQ ID NO: 233937 - DNA, 15 bp, Homo sapiens
gacagagctagactc

SEQ ID NO: 233938 - DNA, 15 bp, Homo sapiens
cgacagagctagact

SEQ ID NO: 233939 - DNA, 15 bp, Homo sapiens
gcgacagagctagac

SEQ ID NO: 233940 - DNA, 15 bp, Homo sapiens
ggcgacagagctaga

SEQ ID NO: 233941 - DNA, 15 bp, Homo sapiens
gggcgacagagctag

SEQ ID NO: 233942 - DNA, 15 bp, Homo sapiens
tgggcgacagagcta

SEQ ID NO: 233943 - DNA, 15 bp, Homo sapiens
ctgggcgacagagct

SEQ ID NO: 233944 - DNA, 15 bp, Homo sapiens
tcctgggcgacagag

SEQ ID NO: 233945 - DNA, 15 bp, Homo sapiens
atcctgggcgacaga

SEQ ID NO: 233946 - DNA, 15 bp, Homo sapiens
catcctgggcgacag

SEQ ID NO: 233947 - DNA, 15 bp, Homo sapiens
ccatcctgggcgaca

SEQ ID NO: 233948 - DNA, 15 bp, Homo sapiens
tccatcctgggcgac

SEQ ID NO: 233949 - DNA, 15 bp, Homo sapiens
ctccatcctgggcga

SEQ ID NO: 233950 - DNA, 15 bp, Homo sapiens
actccatcctgggcg

SEQ ID NO: 233951 - DNA, 15 bp, Homo sapiens
cactccatcctgggc

SEQ ID NO: 233952 - DNA, 15 bp, Homo sapiens
gcactccatcctggg

SEQ ID NO: 233953 - DNA, 15 bp, Homo sapiens
tgcactccatcctgg

SEQ ID NO: 233954 - DNA, 15 bp, Homo sapiens
ctgcactccatcctg

SEQ ID NO: 233955 - DNA, 15 bp, Homo sapiens
actgcactccatcct

SEQ ID NO: 233956 - DNA, 15 bp, Homo sapiens
cactgcactccatcc

SEQ ID NO: 233957 - DNA, 15 bp, Homo sapiens
ccactgcactccatc

SEQ ID NO: 233958 - DNA, 15 bp, Homo sapiens
gccactgcactccat

SEQ ID NO: 233959 - DNA, 15 bp, Homo sapiens
gtgccactgcactcc

SEQ ID NO: 233960 - DNA, 15 bp, Homo sapiens
cgtgccactgcactc

SEQ ID NO: 233961 - DNA, 15 bp, Homo sapiens
tcgtgccactgcact

SEQ ID NO: 233962 - DNA, 15 bp, Homo sapiens
atcgtgccactgcac

SEQ ID NO: 233963 - DNA, 15 bp, Homo sapiens
gatcgtgccactgca

SEQ ID NO: 233964 - DNA, 15 bp, Homo sapiens
agatcgtgccactgc

SEQ ID NO: 233965 - DNA, 15 bp, Homo sapiens
gagatcgtgccactg

SEQ ID NO: 233966 - DNA, 15 bp, Homo sapiens
tgagatcgtgccact

SEQ ID NO: 233967 - DNA, 15 bp, Homo sapiens
ctgagatcgtgccac

SEQ ID NO: 233968 - DNA, 15 bp, Homo sapiens
gctgagatcgtgcca

SEQ ID NO: 233969 - DNA, 15 bp, Homo sapiens
agctgagatcgtgcc

SEQ ID NO: 233970 - DNA, 15 bp, Homo sapiens
gagctgagatcgtgc

SEQ ID NO: 233971 - DNA, 15 bp, Homo sapiens
gttgcagtgagctga

SEQ ID NO: 233972 - DNA, 15 bp, Homo sapiens
ggttgcagtgagctg

SEQ ID NO: 233973 - DNA, 15 bp, Homo sapiens
aggttgcagtgagct

SEQ ID NO: 233974 - DNA, 15 bp, Homo sapiens
cggaggttgcagtga

SEQ ID NO: 233975 - DNA, 15 bp, Homo sapiens
gcggaggttgcagtg

SEQ ID NO: 233976 - DNA, 15 bp, Homo sapiens
ggcggaggttgcagt

SEQ ID NO: 233977 - DNA, 15 bp, Homo sapiens
aggcggaggttgcag

SEQ ID NO: 233978 - DNA, 15 bp, Homo sapiens
gaggcggaggttgca

SEQ ID NO: 233979 - DNA, 15 bp, Homo sapiens
ggaggcggaggttgc

SEQ ID NO: 233980 - DNA, 15 bp, Homo sapiens
gggaggcggaggttg

SEQ ID NO: 233981 - DNA, 15 bp, Homo sapiens
cgggaggcggaggtt

SEQ ID NO: 233982 - DNA, 15 bp, Homo sapiens
ccgggaggcggaggt

SEQ ID NO: 233983 - DNA, 15 bp, Homo sapiens
cccgggaggcggagg

SEQ ID NO: 233984 - DNA, 15 bp, Homo sapiens
acccgggaggcggag

SEQ ID NO: 233985 - DNA, 15 bp, Homo sapiens
aacccgggaggcgga

SEQ ID NO: 233986 - DNA, 15 bp, Homo sapiens
aaacccgggaggcgg

SEQ ID NO: 233987 - DNA, 15 bp, Homo sapiens
taaacccgggaggcg

SEQ ID NO: 233988 - DNA, 15 bp, Homo sapiens
ttaaacccgggaggc

SEQ ID NO: 233989 - DNA, 15 bp, Homo sapiens
cttaaacccgggagg

SEQ ID NO: 233990 - DNA, 15 bp, Homo sapiens
gcttaaacccgggag

SEQ ID NO: 233991 - DNA, 15 bp, Homo sapiens
cgcttaaacccggga

SEQ ID NO: 233992 - DNA, 15 bp, Homo sapiens
tcgcttaaacccggg

SEQ ID NO: 233993 - DNA, 15 bp, Homo sapiens
ctcgcttaaacccgg

SEQ ID NO: 233994 - DNA, 15 bp, Homo sapiens
actcgcttaaacccg

SEQ ID NO: 233995 - DNA, 15 bp, Homo sapiens
gactcgcttaaaccc

SEQ ID NO: 233996 - DNA, 15 bp, Homo sapiens
agactcgcttaaacc

SEQ ID NO: 233997 - DNA, 15 bp, Homo sapiens
gagactcgcttaaac

SEQ ID NO: 233998 - DNA, 15 bp, Homo sapiens
ggagactcgcttaaa

SEQ ID NO: 233999 - DNA, 15 bp, Homo sapiens
aggagactcgcttaa

SEQ ID NO: 234000 - DNA, 15 bp, Homo sapiens
gaggagactcgctta

SEQ ID NO: 234001 - DNA, 15 bp, Homo sapiens
agaggagactcgctt

SEQ ID NO: 234002 - DNA, 15 bp, Homo sapiens
gagaggagactcgct

SEQ ID NO: 234003 - DNA, 15 bp, Homo sapiens
agagaggagactcgc

SEQ ID NO: 234004 - DNA, 15 bp, Homo sapiens
gagagaggagactcg

SEQ ID NO: 234005 - DNA, 15 bp, Homo sapiens
tgagagaggagactc

SEQ ID NO: 234006 - DNA, 15 bp, Homo sapiens
ctgagagaggagact

SEQ ID NO: 234007 - DNA, 15 bp, Homo sapiens
gctgagagaggagac

SEQ ID NO: 234008 - DNA, 15 bp, Homo sapiens
ggctgagagaggaga

SEQ ID NO: 234009 - DNA, 15 bp, Homo sapiens
aggctgagagaggag

SEQ ID NO: 234010 - DNA, 15 bp, Homo sapiens
gaggctgagagagga

SEQ ID NO: 234011 - DNA, 15 bp, Homo sapiens
ggaggctgagagagg

SEQ ID NO: 234012 - DNA, 15 bp, Homo sapiens
gggaggctgagagag

SEQ ID NO: 234013 - DNA, 15 bp, Homo sapiens
cgggaggctgagaga

SEQ ID NO: 234014 - DNA, 15 bp, Homo sapiens
tcgggaggctgagag

SEQ ID NO: 234015 - DNA, 15 bp, Homo sapiens
ttcgggaggctgaga

SEQ ID NO: 234016 - DNA, 15 bp, Homo sapiens
attcgggaggctgag

SEQ ID NO: 234017 - DNA, 15 bp, Homo sapiens
tattcgggaggctga

SEQ ID NO: 234018 - DNA, 15 bp, Homo sapiens
ctattcgggaggctg

SEQ ID NO: 234019 - DNA, 15 bp, Homo sapiens
gctattcgggaggct

SEQ ID NO: 234020 - DNA, 15 bp, Homo sapiens
agctattcgggaggc

SEQ ID NO: 234021 - DNA, 15 bp, Homo sapiens
cagctattcgggagg

SEQ ID NO: 234022 - DNA, 15 bp, Homo sapiens
ccagctattcgggag

SEQ ID NO: 234023 - DNA, 15 bp, Homo sapiens
cccagctattcggga

SEQ ID NO: 234024 - DNA, 15 bp, Homo sapiens
tcccagctattcggg

SEQ ID NO: 234025 - DNA, 15 bp, Homo sapiens
atcccagctattcgg

SEQ ID NO: 234026 - DNA, 15 bp, Homo sapiens
aatcccagctattcg

SEQ ID NO: 234027 - DNA, 15 bp, Homo sapiens
taatcccagctattc

SEQ ID NO: 234028 - DNA, 15 bp, Homo sapiens
gtaatcccagctatt

SEQ ID NO: 234029 - DNA, 15 bp, Homo sapiens
tgtaatcccagctat

SEQ ID NO: 234030 - DNA, 15 bp, Homo sapiens
ggcgcctgtaatccc

SEQ ID NO: 234031 - DNA, 15 bp, Homo sapiens
gggcgcctgtaatcc

SEQ ID NO: 234032 - DNA, 15 bp, Homo sapiens
tgggcgcctgtaatc

SEQ ID NO: 234033 - DNA, 15 bp, Homo sapiens
ttgggcgcctgtaat

SEQ ID NO: 234034 - DNA, 15 bp, Homo sapiens
gttgggcgcctgtaa

SEQ ID NO: 234035 - DNA, 15 bp, Homo sapiens
ggttgggcgcctgta

SEQ ID NO: 234036 - DNA, 15 bp, Homo sapiens
tggttgggcgcctgt

SEQ ID NO: 234037 - DNA, 15 bp, Homo sapiens
gtggttgggcgcctg

SEQ ID NO: 234038 - DNA, 15 bp, Homo sapiens
ggtggttgggcgcct

SEQ ID NO: 234039 - DNA, 15 bp, Homo sapiens
tggtggttgggcgcc

SEQ ID NO: 234040 - DNA, 15 bp, Homo sapiens
gtggtggttgggcgc

SEQ ID NO: 234041 - DNA, 15 bp, Homo sapiens
cgtggtggttgggcg

SEQ ID NO: 234042 - DNA, 15 bp, Homo sapiens
gcgtggtggttgggc

SEQ ID NO: 234043 - DNA, 15 bp, Homo sapiens
ggcgtggtggttggg

SEQ ID NO: 234044 - DNA, 15 bp, Homo sapiens
gggcgtggtggttgg

SEQ ID NO: 234045 - DNA, 15 bp, Homo sapiens
cgggcgtggtggttg

SEQ ID NO: 234046 - DNA, 15 bp, Homo sapiens
gcgggcgtggtggtt

SEQ ID NO: 234047 - DNA, 15 bp, Homo sapiens
ggcgggcgtggtggt

SEQ ID NO: 234048 - DNA, 15 bp, Homo sapiens
aggcgggcgtggtgg

SEQ ID NO: 234049 - DNA, 15 bp, Homo sapiens
taggcgggcgtggtg

SEQ ID NO: 234050 - DNA, 15 bp, Homo sapiens
ttaggcgggcgtggt

SEQ ID NO: 234051 - DNA, 15 bp, Homo sapiens
attaggcgggcgtgg

SEQ ID NO: 234052 - DNA, 15 bp, Homo sapiens
aattaggcgggcgtg

SEQ ID NO: 234053 - DNA, 15 bp, Homo sapiens
aaattaggcgggcgt

SEQ ID NO: 234054 - DNA, 15 bp, Homo sapiens
aaaattaggcgggcg

SEQ ID NO: 234055 - DNA, 15 bp, Homo sapiens
aaaaattaggcgggc

SEQ ID NO: 234056 - DNA, 15 bp, Homo sapiens
caaaaattaggcggg

SEQ ID NO: 234057 - DNA, 15 bp, Homo sapiens
acaaaaattaggcgg

SEQ ID NO: 234058 - DNA, 15 bp, Homo sapiens
tacaaaaattaggcg

SEQ ID NO: 234059 - DNA, 15 bp, Homo sapiens
atacaaaaattaggc

SEQ ID NO: 234060 - DNA, 15 bp, Homo sapiens
aatacaaaaattagg

SEQ ID NO: 234061 - DNA, 15 bp, Homo sapiens
acccgtctctactaa

SEQ ID NO: 234062 - DNA, 15 bp, Homo sapiens
aacccgtctctacta

SEQ ID NO: 234063 - DNA, 15 bp, Homo sapiens
aaacccgtctctact

SEQ ID NO: 234064 - DNA, 15 bp, Homo sapiens
aaaacccgtctctac

SEQ ID NO: 234065 - DNA, 15 bp, Homo sapiens
gaaaacccgtctcta

SEQ ID NO: 234066 - DNA, 15 bp, Homo sapiens
tgaaaacccgtctct

SEQ ID NO: 234067 - DNA, 15 bp, Homo sapiens
gtgaaaacccgtctc

SEQ ID NO: 234068 - DNA, 15 bp, Homo sapiens
ggtgaaaacccgtct

SEQ ID NO: 234069 - DNA, 15 bp, Homo sapiens
tggtgaaaacccgtc

SEQ ID NO: 234070 - DNA, 15 bp, Homo sapiens
atggtgaaaacccgt

SEQ ID NO: 234071 - DNA, 15 bp, Homo sapiens
aatggtgaaaacccg

SEQ ID NO: 234072 - DNA, 15 bp, Homo sapiens
aaatggtgaaaaccc

SEQ ID NO: 234073 - DNA, 15 bp, Homo sapiens
aaaatggtgaaaacc

SEQ ID NO: 234074 - DNA, 15 bp, Homo sapiens
caaaatggtgaaaac

SEQ ID NO: 234075 - DNA, 15 bp, Homo sapiens
ccaaaatggtgaaaa

SEQ ID NO: 234076 - DNA, 15 bp, Homo sapiens
gccaaaatggtgaaa

SEQ ID NO: 234077 - DNA, 15 bp, Homo sapiens
ggccaaaatggtgaa

SEQ ID NO: 234078 - DNA, 15 bp, Homo sapiens
tggccaaaatggtga

SEQ ID NO: 234079 - DNA, 15 bp, Homo sapiens
ctggccaaaatggtg

SEQ ID NO: 234080 - DNA, 15 bp, Homo sapiens
cctggccaaaatggt

SEQ ID NO: 234081 - DNA, 15 bp, Homo sapiens
gcctggccaaaatgg

SEQ ID NO: 234082 - DNA, 15 bp, Homo sapiens
agcctggccaaaatg

SEQ ID NO: 234083 - DNA, 15 bp, Homo sapiens
cagcctggccaaaat

SEQ ID NO: 234084 - DNA, 15 bp, Homo sapiens
ccagcctggccaaaa

SEQ ID NO: 234085 - DNA, 15 bp, Homo sapiens
accagcctggccaaa

SEQ ID NO: 234086 - DNA, 15 bp, Homo sapiens
ggttcgagaccagcc

SEQ ID NO: 234087 - DNA, 15 bp, Homo sapiens
gggttcgagaccagc

SEQ ID NO: 234088 - DNA, 15 bp, Homo sapiens
ggggttcgagaccag

SEQ ID NO: 234089 - DNA, 15 bp, Homo sapiens
cggggttcgagacca

SEQ ID NO: 234090 - DNA, 15 bp, Homo sapiens
tcggggttcgagacc

SEQ ID NO: 234091 - DNA, 15 bp, Homo sapiens
gtcggggttcgagac

SEQ ID NO: 234092 - DNA, 15 bp, Homo sapiens
ggtcggggttcgaga

SEQ ID NO: 234093 - DNA, 15 bp, Homo sapiens
aggtcggggttcgag

SEQ ID NO: 234094 - DNA, 15 bp, Homo sapiens
gaggtcggggttcga

SEQ ID NO: 234095 - DNA, 15 bp, Homo sapiens
tgaggtcggggttcg

SEQ ID NO: 234096 - DNA, 15 bp, Homo sapiens
ctgaggtcggggttc

SEQ ID NO: 234097 - DNA, 15 bp, Homo sapiens
cctgaggtcggggtt

SEQ ID NO: 234098 - DNA, 15 bp, Homo sapiens
acctgaggtcggggt

SEQ ID NO: 234099 - DNA, 15 bp, Homo sapiens
cacctgaggtcgggg

SEQ ID NO: 234100 - DNA, 15 bp, Homo sapiens
tcacctgaggtcggg

SEQ ID NO: 234101 - DNA, 15 bp, Homo sapiens
atcacctgaggtcgg

SEQ ID NO: 234102 - DNA, 15 bp, Homo sapiens
gatcacctgaggtcg

SEQ ID NO: 234103 - DNA, 15 bp, Homo sapiens
agatcacctgaggtc

SEQ ID NO: 234104 - DNA, 15 bp, Homo sapiens
cagatcacctgaggt

SEQ ID NO: 234105 - DNA, 15 bp, Homo sapiens
gcagatcacctgagg

SEQ ID NO: 234106 - DNA, 15 bp, Homo sapiens
ggcagatcacctgag

SEQ ID NO: 234107 - DNA, 15 bp, Homo sapiens
gggcagatcacctga

SEQ ID NO: 234108 - DNA, 15 bp, Homo sapiens
tgggcagatcacctg

SEQ ID NO: 234109 - DNA, 15 bp, Homo sapiens
ttgggcagatcacct

SEQ ID NO: 234110 - DNA, 15 bp, Homo sapiens
tttgggcagatcacc

SEQ ID NO: 234111 - DNA, 15 bp, Homo sapiens
ttttgggcagatcac

SEQ ID NO: 234112 - DNA, 15 bp, Homo sapiens
cttttgggcagatca

SEQ ID NO: 234113 - DNA, 15 bp, Homo sapiens
acttttgggcagatc

SEQ ID NO: 234114 - DNA, 15 bp, Homo sapiens
cacttttgggcagat

SEQ ID NO: 234115 - DNA, 15 bp, Homo sapiens
gcacttttgggcaga

SEQ ID NO: 234116 - DNA, 15 bp, Homo sapiens
agcacttttgggcag

SEQ ID NO: 234117 - DNA, 15 bp, Homo sapiens
cagcacttttgggca

SEQ ID NO: 234118 - DNA, 15 bp, Homo sapiens
ccagcacttttgggc

SEQ ID NO: 234119 - DNA, 15 bp, Homo sapiens
cccagcacttttggg

SEQ ID NO: 234120 - DNA, 15 bp, Homo sapiens
tcccagcacttttgg

SEQ ID NO: 234121 - DNA, 15 bp, Homo sapiens
atcccagcacttttg

SEQ ID NO: 234122 - DNA, 15 bp, Homo sapiens
aatcccagcactttt

SEQ ID NO: 234123 - DNA, 15 bp, Homo sapiens
gacgcctgtaatccc

SEQ ID NO: 234124 - DNA, 15 bp, Homo sapiens
tgacgcctgtaatcc

SEQ ID NO: 234125 - DNA, 15 bp, Homo sapiens
ctgacgcctgtaatc

SEQ ID NO: 234126 - DNA, 15 bp, Homo sapiens
gctgacgcctgtaat

SEQ ID NO: 234127 - DNA, 15 bp, Homo sapiens
ggctgacgcctgtaa

SEQ ID NO: 234128 - DNA, 15 bp, Homo sapiens
tggctgacgcctgta

SEQ ID NO: 234129 - DNA, 15 bp, Homo sapiens
gtggctgacgcctgt

SEQ ID NO: 234130 - DNA, 15 bp, Homo sapiens
ggtggctgacgcctg

SEQ ID NO: 234131 - DNA, 15 bp, Homo sapiens
cggtggctgacgcct

SEQ ID NO: 234132 - DNA, 15 bp, Homo sapiens
gcggtggctgacgcc

SEQ ID NO: 234133 - DNA, 15 bp, Homo sapiens
cgcggtggctgacgc

SEQ ID NO: 234134 - DNA, 15 bp, Homo sapiens
gcgcggtggctgacg

SEQ ID NO: 234135 - DNA, 15 bp, Homo sapiens
ggcgcggtggctgac

SEQ ID NO: 234136 - DNA, 15 bp, Homo sapiens
gggcgcggtggctga

SEQ ID NO: 234137 - DNA, 15 bp, Homo sapiens
cgggcgcggtggctg

SEQ ID NO: 234138 - DNA, 15 bp, Homo sapiens
cggccgggcgcggtg

SEQ ID NO: 234139 - DNA, 15 bp, Homo sapiens
ccggccgggcgcggt

SEQ ID NO: 234140 - DNA, 15 bp, Homo sapiens
cccggccgggcgcgg

SEQ ID NO: 234141 - DNA, 15 bp, Homo sapiens
tcccggccgggcgcg

SEQ ID NO: 234142 - DNA, 15 bp, Homo sapiens
gtcccggccgggcgc

SEQ ID NO: 234143 - DNA, 15 bp, Homo sapiens
ggtcccggccgggcg

SEQ ID NO: 234144 - DNA, 15 bp, Homo sapiens
gggtcccggccgggc

SEQ ID NO: 234145 - DNA, 15 bp, Homo sapiens
agggtcccggccggg

SEQ ID NO: 234146 - DNA, 15 bp, Homo sapiens
gagggtcccggccgg

SEQ ID NO: 234147 - DNA, 15 bp, Homo sapiens
agagggtcccggccg

SEQ ID NO: 234148 - DNA, 15 bp, Homo sapiens
gagagggtcccggcc

SEQ ID NO: 234149 - DNA, 15 bp, Homo sapiens
agagagggtcccggc

SEQ ID NO: 234150 - DNA, 15 bp, Homo sapiens
aagagagggtcccgg

SEQ ID NO: 234151 - DNA, 15 bp, Homo sapiens
gaagagagggtcccg

SEQ ID NO: 234152 - DNA, 15 bp, Homo sapiens
agaagagagggtccc

SEQ ID NO: 234153 - DNA, 15 bp, Homo sapiens
tagaagagagggtcc

SEQ ID NO: 234154 - DNA, 15 bp, Homo sapiens
ttagaagagagggtc

SEQ ID NO: 234155 - DNA, 15 bp, Homo sapiens
gttagaagagagggt

SEQ ID NO: 234156 - DNA, 15 bp, Homo sapiens
agttagaagagaggg

SEQ ID NO: 234157 - DNA, 15 bp, Homo sapiens
gagttagaagagagg

SEQ ID NO: 234158 - DNA, 15 bp, Homo sapiens
cgagttagaagagag

SEQ ID NO: 234159 - DNA, 15 bp, Homo sapiens
ccgagttagaagaga

SEQ ID NO: 234160 - DNA, 15 bp, Homo sapiens
tccgagttagaagag

SEQ ID NO: 234161 - DNA, 15 bp, Homo sapiens
ctccgagttagaaga

SEQ ID NO: 234162 - DNA, 15 bp, Homo sapiens
gctccgagttagaag

SEQ ID NO: 234163 - DNA, 15 bp, Homo sapiens
agctccgagttagaa

SEQ ID NO: 234164 - DNA, 15 bp, Homo sapiens
cagctccgagttaga

SEQ ID NO: 234165 - DNA, 15 bp, Homo sapiens
ccagctccgagttag

SEQ ID NO: 234166 - DNA, 15 bp, Homo sapiens
cccagctccgagtta

SEQ ID NO: 234167 - DNA, 15 bp, Homo sapiens
acccagctccgagtt

SEQ ID NO: 234168 - DNA, 15 bp, Homo sapiens
cacccagctccgagt

SEQ ID NO: 234169 - DNA, 15 bp, Homo sapiens
acacccagctccgag

SEQ ID NO: 234170 - DNA, 15 bp, Homo sapiens
cacacccagctccga

SEQ ID NO: 234171 - DNA, 15 bp, Homo sapiens
ccacacccagctccg

SEQ ID NO: 234172 - DNA, 15 bp, Homo sapiens
cccacacccagctcc

SEQ ID NO: 234173 - DNA, 15 bp, Homo sapiens
ccccacacccagctc

SEQ ID NO: 234174 - DNA, 15 bp, Homo sapiens
tccccacacccagct

SEQ ID NO: 234175 - DNA, 15 bp, Homo sapiens
gtccccacacccagc

SEQ ID NO: 234176 - DNA, 15 bp, Homo sapiens
ggtccccacacccag

SEQ ID NO: 234177 - DNA, 15 bp, Homo sapiens
aggtccccacaccca

SEQ ID NO: 234178 - DNA, 15 bp, Homo sapiens
gaggtccccacaccc

SEQ ID NO: 234179 - DNA, 15 bp, Homo sapiens
ggaggtccccacacc

SEQ ID NO: 234180 - DNA, 15 bp, Homo sapiens
tggaggtccccacac

SEQ ID NO: 234181 - DNA, 15 bp, Homo sapiens
ctggaggtccccaca

SEQ ID NO: 234182 - DNA, 15 bp, Homo sapiens
actggaggtccccac

SEQ ID NO: 234183 - DNA, 15 bp, Homo sapiens
gactggaggtcccca

SEQ ID NO: 234184 - DNA, 15 bp, Homo sapiens
ggactggaggtcccc

SEQ ID NO: 234185 - DNA, 15 bp, Homo sapiens
aggactggaggtccc

SEQ ID NO: 234186 - DNA, 15 bp, Homo sapiens
taggactggaggtcc

SEQ ID NO: 234187 - DNA, 15 bp, Homo sapiens
ttaggactggaggtc

SEQ ID NO: 234188 - DNA, 15 bp, Homo sapiens
tttaggactggaggt

SEQ ID NO: 234189 - DNA, 15 bp, Homo sapiens
ttttaggactggagg

SEQ ID NO: 234190 - DNA, 15 bp, Homo sapiens
gttttaggactggag

SEQ ID NO: 234191 - DNA, 15 bp, Homo sapiens
tgttttaggactgga

SEQ ID NO: 234192 - DNA, 15 bp, Homo sapiens
ttgttttaggactgg

SEQ ID NO: 234193 - DNA, 15 bp, Homo sapiens
cttgttttaggactg

SEQ ID NO: 234194 - DNA, 15 bp, Homo sapiens
ccttgttttaggact

SEQ ID NO: 234195 - DNA, 15 bp, Homo sapiens
cccttgttttaggac

SEQ ID NO: 234196 - DNA, 15 bp, Homo sapiens
tcccttgttttagga

SEQ ID NO: 234197 - DNA, 15 bp, Homo sapiens
atcccttgttttagg

SEQ ID NO: 234198 - DNA, 15 bp, Homo sapiens
gatcccttgttttag

SEQ ID NO: 234199 - DNA, 15 bp, Homo sapiens
tgatcccttgtttta

SEQ ID NO: 234200 - DNA, 15 bp, Homo sapiens
gtgatcccttgtttt

SEQ ID NO: 234201 - DNA, 15 bp, Homo sapiens
agtgatcccttgttt

SEQ ID NO: 234202 - DNA, 15 bp, Homo sapiens
gagtgatcccttgtt

SEQ ID NO: 234203 - DNA, 15 bp, Homo sapiens
ggagtgatcccttgt

SEQ ID NO: 234204 - DNA, 15 bp, Homo sapiens
gggagtgatcccttg

SEQ ID NO: 234205 - DNA, 15 bp, Homo sapiens
tgggagtgatccctt

SEQ ID NO: 234206 - DNA, 15 bp, Homo sapiens
gtgggagtgatccct

SEQ ID NO: 234207 - DNA, 15 bp, Homo sapiens
ggtgggagtgatccc

SEQ ID NO: 234208 - DNA, 15 bp, Homo sapiens
gggtgggagtgatcc

SEQ ID NO: 234209 - DNA, 15 bp, Homo sapiens
ggggtgggagtgatc

SEQ ID NO: 234210 - DNA, 15 bp, Homo sapiens
gggggtgggagtgat

SEQ ID NO: 234211 - DNA, 15 bp, Homo sapiens
cgggggtgggagtga

SEQ ID NO: 234212 - DNA, 15 bp, Homo sapiens
gcgggggtgggagtg

SEQ ID NO: 234213 - DNA, 15 bp, Homo sapiens
ggcgggggtgggagt

SEQ ID NO: 234214 - DNA, 15 bp, Homo sapiens
aggcgggggtgggag

SEQ ID NO: 234215 - DNA, 15 bp, Homo sapiens
aaggcgggggtggga

SEQ ID NO: 234216 - DNA, 15 bp, Homo sapiens
taaggcgggggtggg

SEQ ID NO: 234217 - DNA, 15 bp, Homo sapiens
ttaaggcgggggtgg

SEQ ID NO: 234218 - DNA, 15 bp, Homo sapiens
cttaaggcgggggtg

SEQ ID NO: 234219 - DNA, 15 bp, Homo sapiens
acttaaggcgggggt

SEQ ID NO: 234220 - DNA, 15 bp, Homo sapiens
gacttaaggcggggg

SEQ ID NO: 234221 - DNA, 15 bp, Homo sapiens
ggacttaaggcgggg

SEQ ID NO: 234222 - DNA, 15 bp, Homo sapiens
aggacttaaggcggg

SEQ ID NO: 234223 - DNA, 15 bp, Homo sapiens
aaggacttaaggcgg

SEQ ID NO: 234224 - DNA, 15 bp, Homo sapiens
gaaggacttaaggcg

SEQ ID NO: 234225 - DNA, 15 bp, Homo sapiens
agaaggacttaaggc

SEQ ID NO: 234226 - DNA, 15 bp, Homo sapiens
cagaaggacttaagg

SEQ ID NO: 234227 - DNA, 15 bp, Homo sapiens
ccagaaggacttaag

SEQ ID NO: 234228 - DNA, 15 bp, Homo sapiens
cccagaaggacttaa

SEQ ID NO: 234229 - DNA, 15 bp, Homo sapiens
ccccagaaggactta

SEQ ID NO: 234230 - DNA, 15 bp, Homo sapiens
cccccagaaggactt

SEQ ID NO: 234231 - DNA, 15 bp, Homo sapiens
gcccccagaaggact

SEQ ID NO: 234232 - DNA, 15 bp, Homo sapiens
cgcccccagaaggac

SEQ ID NO: 234233 - DNA, 15 bp, Homo sapiens
tcgcccccagaagga

SEQ ID NO: 234234 - DNA, 15 bp, Homo sapiens
ctcgcccccagaagg

SEQ ID NO: 234235 - DNA, 15 bp, Homo sapiens
cctcgcccccagaag

SEQ ID NO: 234236 - DNA, 15 bp, Homo sapiens
ccctcgcccccagaa

SEQ ID NO: 234237 - DNA, 15 bp, Homo sapiens
gccctcgcccccaga

SEQ ID NO: 234238 - DNA, 15 bp, Homo sapiens
cgccctcgcccccag

SEQ ID NO: 234239 - DNA, 15 bp, Homo sapiens
tcgccctcgccccca

SEQ ID NO: 234240 - DNA, 15 bp, Homo sapiens
gtcgccctcgccccc

SEQ ID NO: 234241 - DNA, 15 bp, Homo sapiens
agtcgccctcgcccc

SEQ ID NO: 234242 - DNA, 15 bp, Homo sapiens
cagtcgccctcgccc

SEQ ID NO: 234243 - DNA, 15 bp, Homo sapiens
ccagtcgccctcgcc

SEQ ID NO: 234244 - DNA, 15 bp, Homo sapiens
tccagtcgccctcgc

SEQ ID NO: 234245 - DNA, 15 bp, Homo sapiens
ctccagtcgccctcg

SEQ ID NO: 234246 - DNA, 15 bp, Homo sapiens
tctccagtcgccctc

SEQ ID NO: 234247 - DNA, 15 bp, Homo sapiens
gtctccagtcgccct

SEQ ID NO: 234248 - DNA, 15 bp, Homo sapiens
ggtctccagtcgccc

SEQ ID NO: 234249 - DNA, 15 bp, Homo sapiens
gggtctccagtcgcc

SEQ ID NO: 234250 - DNA, 15 bp, Homo sapiens
cgggtctccagtcgc

SEQ ID NO: 234251 - DNA, 15 bp, Homo sapiens
ccgggtctccagtcg

SEQ ID NO: 234252 - DNA, 15 bp, Homo sapiens
tccgggtctccagtc

SEQ ID NO: 234253 - DNA, 15 bp, Homo sapiens
atccgggtctccagt

SEQ ID NO: 234254 - DNA, 15 bp, Homo sapiens
catccgggtctccag

SEQ ID NO: 234255 - DNA, 15 bp, Homo sapiens
acatccgggtctcca

SEQ ID NO: 234256 - DNA, 15 bp, Homo sapiens
gacatccgggtctcc

SEQ ID NO: 234257 - DNA, 15 bp, Homo sapiens
ggacatccgggtctc

SEQ ID NO: 234258 - DNA, 15 bp, Homo sapiens
tggacatccgggtct

SEQ ID NO: 234259 - DNA, 15 bp, Homo sapiens
ctggacatccgggtc

SEQ ID NO: 234260 - DNA, 15 bp, Homo sapiens
gctggacatccgggt

SEQ ID NO: 234261 - DNA, 15 bp, Homo sapiens
ggctggacatccggg

SEQ ID NO: 234262 - DNA, 15 bp, Homo sapiens
aggctggacatccgg

SEQ ID NO: 234263 - DNA, 15 bp, Homo sapiens
caggctggacatccg

SEQ ID NO: 234264 - DNA, 15 bp, Homo sapiens
ccaggctggacatcc

SEQ ID NO: 234265 - DNA, 15 bp, Homo sapiens
tccaggctggacatc

SEQ ID NO: 234266 - DNA, 15 bp, Homo sapiens
ctccaggctggacat

SEQ ID NO: 234267 - DNA, 15 bp, Homo sapiens
cctccaggctggaca

SEQ ID NO: 234268 - DNA, 15 bp, Homo sapiens
acctccaggctggac

SEQ ID NO: 234269 - DNA, 15 bp, Homo sapiens
gacctccaggctgga

SEQ ID NO: 234270 - DNA, 15 bp, Homo sapiens
tgacctccaggctgg

SEQ ID NO: 234271 - DNA, 15 bp, Homo sapiens
gtgacctccaggctg

SEQ ID NO: 234272 - DNA, 15 bp, Homo sapiens
ggtgacctccaggct

SEQ ID NO: 234273 - DNA, 15 bp, Homo sapiens
cggtgacctccaggc

SEQ ID NO: 234274 - DNA, 15 bp, Homo sapiens
gcggtgacctccagg

SEQ ID NO: 234275 - DNA, 15 bp, Homo sapiens
cgcggtgacctccag

SEQ ID NO: 234276 - DNA, 15 bp, Homo sapiens
ccgcggtgacctcca

SEQ ID NO: 234277 - DNA, 15 bp, Homo sapiens
cccgcggtgacctcc

SEQ ID NO: 234278 - DNA, 15 bp, Homo sapiens
gcccgcggtgacctc

SEQ ID NO: 234279 - DNA, 15 bp, Homo sapiens
agcccgcggtgacct

SEQ ID NO: 234280 - DNA, 15 bp, Homo sapiens
gagcccgcggtgacc

SEQ ID NO: 234281 - DNA, 15 bp, Homo sapiens
tgagcccgcggtgac

SEQ ID NO: 234282 - DNA, 15 bp, Homo sapiens
ctgagcccgcggtga

SEQ ID NO: 234283 - DNA, 15 bp, Homo sapiens
cctgagcccgcggtg

SEQ ID NO: 234284 - DNA, 15 bp, Homo sapiens
ccctgagcccgcggt

SEQ ID NO: 234285 - DNA, 15 bp, Homo sapiens
cccctgagcccgcgg

SEQ ID NO: 234286 - DNA, 15 bp, Homo sapiens
acccctgagcccgcg

SEQ ID NO: 234287 - DNA, 15 bp, Homo sapiens
gacccctgagcccgc

SEQ ID NO: 234288 - DNA, 15 bp, Homo sapiens
ggacccctgagcccg

SEQ ID NO: 234289 - DNA, 15 bp, Homo sapiens
gggacccctgagccc

SEQ ID NO: 234290 - DNA, 15 bp, Homo sapiens
cgggacccctgagcc

SEQ ID NO: 234291 - DNA, 15 bp, Homo sapiens
tcgggacccctgagc

SEQ ID NO: 234292 - DNA, 15 bp, Homo sapiens
atcgggacccctgag

SEQ ID NO: 234293 - DNA, 15 bp, Homo sapiens
gatcgggacccctga

SEQ ID NO: 234294 - DNA, 15 bp, Homo sapiens
ggatcgggacccctg

SEQ ID NO: 234295 - DNA, 15 bp, Homo sapiens
cggatcgggacccct

SEQ ID NO: 234296 - DNA, 15 bp, Homo sapiens
gcggatcgggacccc

SEQ ID NO: 234297 - DNA, 15 bp, Homo sapiens
agcggatcgggaccc

SEQ ID NO: 234298 - DNA, 15 bp, Homo sapiens
aagcggatcgggacc

SEQ ID NO: 234299 - DNA, 15 bp, Homo sapiens
aaagcggatcgggac

SEQ ID NO: 234300 - DNA, 15 bp, Homo sapiens
caaagcggatcggga

SEQ ID NO: 234301 - DNA, 15 bp, Homo sapiens
gcaaagcggatcggg

SEQ ID NO: 234302 - DNA, 15 bp, Homo sapiens
cgcaaagcggatcgg

SEQ ID NO: 234303 - DNA, 15 bp, Homo sapiens
gcgcaaagcggatcg

SEQ ID NO: 234304 - DNA, 15 bp, Homo sapiens
cgcgcaaagcggatc

SEQ ID NO: 234305 - DNA, 15 bp, Homo sapiens
tcgcgcaaagcggat

SEQ ID NO: 234306 - DNA, 15 bp, Homo sapiens
gtcgcgcaaagcgga

SEQ ID NO: 234307 - DNA, 15 bp, Homo sapiens
ggtcgcgcaaagcgg

SEQ ID NO: 234308 - DNA, 15 bp, Homo sapiens
gggtcgcgcaaagcg

SEQ ID NO: 234309 - DNA, 15 bp, Homo sapiens
ggggtcgcgcaaagc

SEQ ID NO: 234310 - DNA, 15 bp, Homo sapiens
tggggtcgcgcaaag

SEQ ID NO: 234311 - DNA, 15 bp, Homo sapiens
ctggggtcgcgcaaa

SEQ ID NO: 234312 - DNA, 15 bp, Homo sapiens
cctggggtcgcgcaa

SEQ ID NO: 234313 - DNA, 15 bp, Homo sapiens
ccctggggtcgcgca

SEQ ID NO: 234314 - DNA, 15 bp, Homo sapiens
gccctggggtcgcgc

SEQ ID NO: 234315 - DNA, 15 bp, Homo sapiens
cgccctggggtcgcg

SEQ ID NO: 234316 - DNA, 15 bp, Homo sapiens
gcgccctggggtcgc

SEQ ID NO: 234317 - DNA, 15 bp, Homo sapiens
ggcgccctggggtcg

SEQ ID NO: 234318 - DNA, 15 bp, Homo sapiens
tggcgccctggggtc

SEQ ID NO: 234319 - DNA, 15 bp, Homo sapiens
gtggcgccctggggt

SEQ ID NO: 234320 - DNA, 15 bp, Homo sapiens
agtggcgccctgggg

SEQ ID NO: 234321 - DNA, 15 bp, Homo sapiens
cagtggcgccctggg

SEQ ID NO: 234322 - DNA, 15 bp, Homo sapiens
gcagtggcgccctgg

SEQ ID NO: 234323 - DNA, 15 bp, Homo sapiens
ggcagtggcgccctg

SEQ ID NO: 234324 - DNA, 15 bp, Homo sapiens
tggcagtggcgccct

SEQ ID NO: 234325 - DNA, 15 bp, Homo sapiens
atggcagtggcgccc

SEQ ID NO: 234326 - DNA, 15 bp, Homo sapiens
gatggcagtggcgcc

SEQ ID NO: 234327 - DNA, 15 bp, Homo sapiens
ggatggcagtggcgc

SEQ ID NO: 234328 - DNA, 15 bp, Homo sapiens
aggatggcagtggcg

SEQ ID NO: 234329 - DNA, 15 bp, Homo sapiens
caggatggcagtggc

SEQ ID NO: 234330 - DNA, 15 bp, Homo sapiens
tcaggatggcagtgg

SEQ ID NO: 234331 - DNA, 15 bp, Homo sapiens
ctcaggatggcagtg

SEQ ID NO: 234332 - DNA, 15 bp, Homo sapiens
actcaggatggcagt

SEQ ID NO: 234333 - DNA, 15 bp, Homo sapiens
aactcaggatggcag

SEQ ID NO: 234334 - DNA, 15 bp, Homo sapiens
caactcaggatggca

SEQ ID NO: 234335 - DNA, 15 bp, Homo sapiens
ccaactcaggatggc

SEQ ID NO: 234336 - DNA, 15 bp, Homo sapiens
cccaactcaggatgg

SEQ ID NO: 234337 - DNA, 15 bp, Homo sapiens
acccaactcaggatg

SEQ ID NO: 234338 - DNA, 15 bp, Homo sapiens
cacccaactcaggat

SEQ ID NO: 234339 - DNA, 15 bp, Homo sapiens
gcacccaactcagga

SEQ ID NO: 234340 - DNA, 15 bp, Homo sapiens
tgcacccaactcagg

SEQ ID NO: 234341 - DNA, 15 bp, Homo sapiens
ctgcacccaactcag

SEQ ID NO: 234342 - DNA, 15 bp, Homo sapiens
actgcacccaactca

SEQ ID NO: 234343 - DNA, 15 bp, Homo sapiens
gactgcacccaactc

SEQ ID NO: 234344 - DNA, 15 bp, Homo sapiens
ggactgcacccaact

SEQ ID NO: 234345 - DNA, 15 bp, Homo sapiens
gggactgcacccaac

SEQ ID NO: 234346 - DNA, 15 bp, Homo sapiens
cgggactgcacccaa

SEQ ID NO: 234347 - DNA, 15 bp, Homo sapiens
ccgggactgcaccca

SEQ ID NO: 234348 - DNA, 15 bp, Homo sapiens
cccgggactgcaccc

SEQ ID NO: 234349 - DNA, 15 bp, Homo sapiens
tcccgggactgcacc

SEQ ID NO: 234350 - DNA, 15 bp, Homo sapiens
atcccgggactgcac

SEQ ID NO: 234351 - DNA, 15 bp, Homo sapiens
aatcccgggactgca

SEQ ID NO: 234352 - DNA, 15 bp, Homo sapiens
gaatcccgggactgc

SEQ ID NO: 234353 - DNA, 15 bp, Homo sapiens
ggaatcccgggactg

SEQ ID NO: 234354 - DNA, 15 bp, Homo sapiens
cggaatcccgggact

SEQ ID NO: 234355 - DNA, 15 bp, Homo sapiens
gcggaatcccgggac

SEQ ID NO: 234356 - DNA, 15 bp, Homo sapiens
ggcggaatcccggga

SEQ ID NO: 234357 - DNA, 15 bp, Homo sapiens
cggcggaatcccggg

SEQ ID NO: 234358 - DNA, 15 bp, Homo sapiens
gcggcggaatcccgg

SEQ ID NO: 234359 - DNA, 15 bp, Homo sapiens
cgcggcggaatcccg

SEQ ID NO: 234360 - DNA, 15 bp, Homo sapiens
acgcggcggaatccc

SEQ ID NO: 234361 - DNA, 15 bp, Homo sapiens
cacgcggcggaatcc

SEQ ID NO: 234362 - DNA, 15 bp, Homo sapiens
gcacgcggcggaatc

SEQ ID NO: 234363 - DNA, 15 bp, Homo sapiens
agcacgcggcggaat

SEQ ID NO: 234364 - DNA, 15 bp, Homo sapiens
gagcacgcggcggaa

SEQ ID NO: 234365 - DNA, 15 bp, Homo sapiens
ggagcacgcggcgga

SEQ ID NO: 234366 - DNA, 15 bp, Homo sapiens
cggagcacgcggcgg

SEQ ID NO: 234367 - DNA, 15 bp, Homo sapiens
ccggagcacgcggcg

SEQ ID NO: 234368 - DNA, 15 bp, Homo sapiens
cccggagcacgcggc

SEQ ID NO: 234369 - DNA, 15 bp, Homo sapiens
tcccggagcacgcgg

SEQ ID NO: 234370 - DNA, 15 bp, Homo sapiens
gtcccggagcacgcg

SEQ ID NO: 234371 - DNA, 15 bp, Homo sapiens
cgtcccggagcacgc

SEQ ID NO: 234372 - DNA, 15 bp, Homo sapiens
ccgtcccggagcacg

SEQ ID NO: 234373 - DNA, 15 bp, Homo sapiens
cccgtcccggagcac

SEQ ID NO: 234374 - DNA, 15 bp, Homo sapiens
ccccgtcccggagca

SEQ ID NO: 234375 - DNA, 15 bp, Homo sapiens
cccccgtcccggagc

SEQ ID NO: 234376 - DNA, 15 bp, Homo sapiens
gcccccgtcccggag

SEQ ID NO: 234377 - DNA, 15 bp, Homo sapiens
ggcccccgtcccgga

SEQ ID NO: 234378 - DNA, 15 bp, Homo sapiens
tggcccccgtcccgg

SEQ ID NO: 234379 - DNA, 15 bp, Homo sapiens
gtggcccccgtcccg

SEQ ID NO: 234380 - DNA, 15 bp, Homo sapiens
ggtggcccccgtccc

SEQ ID NO: 234381 - DNA, 15 bp, Homo sapiens
gggtggcccccgtcc

SEQ ID NO: 234382 - DNA, 15 bp, Homo sapiens
ggggtggcccccgtc

SEQ ID NO: 234383 - DNA, 15 bp, Homo sapiens
gggggtggcccccgt

SEQ ID NO: 234384 - DNA, 15 bp, Homo sapiens
agggggtggcccccg

SEQ ID NO: 234385 - DNA, 15 bp, Homo sapiens
gagggggtggccccc

SEQ ID NO: 234386 - DNA, 15 bp, Homo sapiens
ggagggggtggcccc

SEQ ID NO: 234387 - DNA, 15 bp, Homo sapiens
gggagggggtggccc

SEQ ID NO: 234388 - DNA, 15 bp, Homo sapiens
cgggagggggtggcc

SEQ ID NO: 234389 - DNA, 15 bp, Homo sapiens
gcgggagggggtggc

SEQ ID NO: 234390 - DNA, 15 bp, Homo sapiens
ggcgggagggggtgg

SEQ ID NO: 234391 - DNA, 15 bp, Homo sapiens
gggcgggagggggtg

SEQ ID NO: 234392 - DNA, 15 bp, Homo sapiens
ggggcgggagggggt

SEQ ID NO: 234393 - DNA, 15 bp, Homo sapiens
aggggcgggaggggg

SEQ ID NO: 234394 - DNA, 15 bp, Homo sapiens
caggggcgggagggg

SEQ ID NO: 234395 - DNA, 15 bp, Homo sapiens
gcaggggcgggaggg

SEQ ID NO: 234396 - DNA, 15 bp, Homo sapiens
ggcaggggcgggagg

SEQ ID NO: 234397 - DNA, 15 bp, Homo sapiens
gggcaggggcgggag

SEQ ID NO: 234398 - DNA, 15 bp, Homo sapiens
ggggcaggggcggga

SEQ ID NO: 234399 - DNA, 15 bp, Homo sapiens
gggggcaggggcggg

SEQ ID NO: 234400 - DNA, 15 bp, Homo sapiens
cgggggcaggggcgg

SEQ ID NO: 234401 - DNA, 15 bp, Homo sapiens
gcgggggcaggggcg

SEQ ID NO: 234402 - DNA, 15 bp, Homo sapiens
ggcgggggcaggggc

SEQ ID NO: 234403 - DNA, 15 bp, Homo sapiens
gggcgggggcagggg

SEQ ID NO: 234404 - DNA, 15 bp, Homo sapiens
ggggcgggggcaggg

SEQ ID NO: 234405 - DNA, 15 bp, Homo sapiens
aggggcgggggcagg

SEQ ID NO: 234406 - DNA, 15 bp, Homo sapiens
aaggggcgggggcag

SEQ ID NO: 234407 - DNA, 15 bp, Homo sapiens
aaaggggcgggggca

SEQ ID NO: 234408 - DNA, 15 bp, Homo sapiens
caaaggggcgggggc

SEQ ID NO: 234409 - DNA, 15 bp, Homo sapiens
ccaaaggggcggggg

SEQ ID NO: 234410 - DNA, 15 bp, Homo sapiens
gccaaaggggcgggg

SEQ ID NO: 234411 - DNA, 15 bp, Homo sapiens
ggccaaaggggcggg

SEQ ID NO: 234412 - DNA, 15 bp, Homo sapiens
gggccaaaggggcgg

SEQ ID NO: 234413 - DNA, 15 bp, Homo sapiens
cgggccaaaggggcg

SEQ ID NO: 234414 - DNA, 15 bp, Homo sapiens
gcgggccaaaggggc

SEQ ID NO: 234415 - DNA, 15 bp, Homo sapiens
ggcgggccaaagggg

SEQ ID NO: 234416 - DNA, 15 bp, Homo sapiens
gggcgggccaaaggg

SEQ ID NO: 234417 - DNA, 15 bp, Homo sapiens
ggggcgggccaaagg

SEQ ID NO: 234418 - DNA, 15 bp, Homo sapiens
gggggcgggccaaag

SEQ ID NO: 234419 - DNA, 15 bp, Homo sapiens
ggggggcgggccaaa

SEQ ID NO: 234420 - DNA, 15 bp, Homo sapiens
cggggggcgggccaa

SEQ ID NO: 234421 - DNA, 15 bp, Homo sapiens
tcggggggcgggcca

SEQ ID NO: 234422 - DNA, 15 bp, Homo sapiens
ttcggggggcgggcc

SEQ ID NO: 234423 - DNA, 15 bp, Homo sapiens
attcggggggcgggc

SEQ ID NO: 234424 - DNA, 15 bp, Homo sapiens
aattcggggggcggg

SEQ ID NO: 234425 - DNA, 15 bp, Homo sapiens
gaattcggggggcgg

SEQ ID NO: 234426 - DNA, 15 bp, Homo sapiens
ggaattcggggggcg

SEQ ID NO: 234427 - DNA, 15 bp, Homo sapiens
tggaattcggggggc

SEQ ID NO: 234428 - DNA, 15 bp, Homo sapiens
atggaattcgggggg

SEQ ID NO: 234429 - DNA, 15 bp, Homo sapiens
aatggaattcggggg

SEQ ID NO: 234430 - DNA, 15 bp, Homo sapiens
caatggaattcgggg

SEQ ID NO: 234431 - DNA, 15 bp, Homo sapiens
ccaatggaattcggg

SEQ ID NO: 234432 - DNA, 15 bp, Homo sapiens
cccaatggaattcgg

SEQ ID NO: 234433 - DNA, 15 bp, Homo sapiens
acccaatggaattcg

SEQ ID NO: 234434 - DNA, 15 bp, Homo sapiens
cacccaatggaattc

SEQ ID NO: 234435 - DNA, 15 bp, Homo sapiens
acacccaatggaatt

SEQ ID NO: 234436 - DNA, 15 bp, Homo sapiens
tacacccaatggaat

SEQ ID NO: 234437 - DNA, 15 bp, Homo sapiens
ctacacccaatggaa

SEQ ID NO: 234438 - DNA, 15 bp, Homo sapiens
actacacccaatgga

SEQ ID NO: 234439 - DNA, 15 bp, Homo sapiens
gactacacccaatgg

SEQ ID NO: 234440 - DNA, 15 bp, Homo sapiens
ggactacacccaatg

SEQ ID NO: 234441 - DNA, 15 bp, Homo sapiens
tggactacacccaat

SEQ ID NO: 234442 - DNA, 15 bp, Homo sapiens
ttggactacacccaa

SEQ ID NO: 234443 - DNA, 15 bp, Homo sapiens
gttggactacaccca

SEQ ID NO: 234444 - DNA, 15 bp, Homo sapiens
tgttggactacaccc

SEQ ID NO: 234445 - DNA, 15 bp, Homo sapiens
ctgttggactacacc

SEQ ID NO: 234446 - DNA, 15 bp, Homo sapiens
cctgttggactacac

SEQ ID NO: 234447 - DNA, 15 bp, Homo sapiens
gcctgttggactaca

SEQ ID NO: 234448 - DNA, 15 bp, Homo sapiens
ggcctgttggactac

SEQ ID NO: 234449 - DNA, 15 bp, Homo sapiens
tggcctgttggacta

SEQ ID NO: 234450 - DNA, 15 bp, Homo sapiens
gtggcctgttggact

SEQ ID NO: 234451 - DNA, 15 bp, Homo sapiens
ggtggcctgttggac

SEQ ID NO: 234452 - DNA, 15 bp, Homo sapiens
gggtggcctgttgga

SEQ ID NO: 234453 - DNA, 15 bp, Homo sapiens
agggtggcctgttgg

SEQ ID NO: 234454 - DNA, 15 bp, Homo sapiens
gagggtggcctgttg

SEQ ID NO: 234455 - DNA, 15 bp, Homo sapiens
cgagggtggcctgtt

SEQ ID NO: 234456 - DNA, 15 bp, Homo sapiens
tcgagggtggcctgt

SEQ ID NO: 234457 - DNA, 15 bp, Homo sapiens
ctcgagggtggcctg

SEQ ID NO: 234458 - DNA, 15 bp, Homo sapiens
gctcgagggtggcct

SEQ ID NO: 234459 - DNA, 15 bp, Homo sapiens
ggctcgagggtggcc

SEQ ID NO: 234460 - DNA, 15 bp, Homo sapiens
tggctcgagggtggc

SEQ ID NO: 234461 - DNA, 15 bp, Homo sapiens
gtggctcgagggtgg

SEQ ID NO: 234462 - DNA, 15 bp, Homo sapiens
agtggctcgagggtg

SEQ ID NO: 234463 - DNA, 15 bp, Homo sapiens
gagtggctcgagggt

SEQ ID NO: 234464 - DNA, 15 bp, Homo sapiens
ggagtggctcgaggg

SEQ ID NO: 234465 - DNA, 15 bp, Homo sapiens
gggagtggctcgagg

SEQ ID NO: 234466 - DNA, 15 bp, Homo sapiens
ggggagtggctcgag

SEQ ID NO: 234467 - DNA, 15 bp, Homo sapiens
aggggagtggctcga

SEQ ID NO: 234468 - DNA, 15 bp, Homo sapiens
aaggggagtggctcg

SEQ ID NO: 234469 - DNA, 15 bp, Homo sapiens
caaggggagtggctc

SEQ ID NO: 234470 - DNA, 15 bp, Homo sapiens
acaaggggagtggct

SEQ ID NO: 234471 - DNA, 15 bp, Homo sapiens
gacaaggggagtggc

SEQ ID NO: 234472 - DNA, 15 bp, Homo sapiens
ggacaaggggagtgg

SEQ ID NO: 234473 - DNA, 15 bp, Homo sapiens
tggacaaggggagtg

SEQ ID NO: 234474 - DNA, 15 bp, Homo sapiens
ttggacaaggggagt

SEQ ID NO: 234475 - DNA, 15 bp, Homo sapiens
attggacaaggggag

SEQ ID NO: 234476 - DNA, 15 bp, Homo sapiens
cattggacaagggga

SEQ ID NO: 234477 - DNA, 15 bp, Homo sapiens
acattggacaagggg

SEQ ID NO: 234478 - DNA, 15 bp, Homo sapiens
cacattggacaaggg

SEQ ID NO: 234479 - DNA, 15 bp, Homo sapiens
tcacattggacaagg

SEQ ID NO: 234480 - DNA, 15 bp, Homo sapiens
ctcacattggacaag

SEQ ID NO: 234481 - DNA, 15 bp, Homo sapiens
cctcacattggacaa

SEQ ID NO: 234482 - DNA, 15 bp, Homo sapiens
gcctcacattggaca

SEQ ID NO: 234483 - DNA, 15 bp, Homo sapiens
cgcctcacattggac

SEQ ID NO: 234484 - DNA, 15 bp, Homo sapiens
ccgcctcacattgga

SEQ ID NO: 234485 - DNA, 15 bp, Homo sapiens
accgcctcacattgg

SEQ ID NO: 234486 - DNA, 15 bp, Homo sapiens
caccgcctcacattg

SEQ ID NO: 234487 - DNA, 15 bp, Homo sapiens
ccaccgcctcacatt

SEQ ID NO: 234488 - DNA, 15 bp, Homo sapiens
tccaccgcctcacat

SEQ ID NO: 234489 - DNA, 15 bp, Homo sapiens
ctccaccgcctcaca

SEQ ID NO: 234490 - DNA, 15 bp, Homo sapiens
cctccaccgcctcac

SEQ ID NO: 234491 - DNA, 15 bp, Homo sapiens
gcctccaccgcctca

SEQ ID NO: 234492 - DNA, 15 bp, Homo sapiens
cgcctccaccgcctc

SEQ ID NO: 234493 - DNA, 15 bp, Homo sapiens
ccgcctccaccgcct

SEQ ID NO: 234494 - DNA, 15 bp, Homo sapiens
tccgcctccaccgcc

SEQ ID NO: 234495 - DNA, 15 bp, Homo sapiens
ctccgcctccaccgc

SEQ ID NO: 234496 - DNA, 15 bp, Homo sapiens
cctccgcctccaccg

SEQ ID NO: 234497 - DNA, 15 bp, Homo sapiens
gcctccgcctccacc

SEQ ID NO: 234498 - DNA, 15 bp, Homo sapiens
cgcctccgcctccac

SEQ ID NO: 234499 - DNA, 15 bp, Homo sapiens
ccgcctccgcctcca

SEQ ID NO: 234500 - DNA, 15 bp, Homo sapiens
cccgcctccgcctcc

SEQ ID NO: 234501 - DNA, 15 bp, Homo sapiens
gcccgcctccgcctc

SEQ ID NO: 234502 - DNA, 15 bp, Homo sapiens
cgcccgcctccgcct

SEQ ID NO: 234503 - DNA, 15 bp, Homo sapiens
acgcccgcctccgcc

SEQ ID NO: 234504 - DNA, 15 bp, Homo sapiens
gacgcccgcctccgc

SEQ ID NO: 234505 - DNA, 15 bp, Homo sapiens
cgacgcccgcctccg

SEQ ID NO: 234506 - DNA, 15 bp, Homo sapiens
ccgacgcccgcctcc

SEQ ID NO: 234507 - DNA, 15 bp, Homo sapiens
cccgacgcccgcctc

SEQ ID NO: 234508 - DNA, 15 bp, Homo sapiens
tcccgacgcccgcct

SEQ ID NO: 234509 - DNA, 15 bp, Homo sapiens
ctcccgacgcccgcc

SEQ ID NO: 234510 - DNA, 15 bp, Homo sapiens
cctcccgacgcccgc

SEQ ID NO: 234511 - DNA, 15 bp, Homo sapiens
tcctcccgacgcccg

SEQ ID NO: 234512 - DNA, 15 bp, Homo sapiens
gtcctcccgacgccc

SEQ ID NO: 234513 - DNA, 15 bp, Homo sapiens
cgtcctcccgacgcc

SEQ ID NO: 234514 - DNA, 15 bp, Homo sapiens
ccgtcctcccgacgc

SEQ ID NO: 234515 - DNA, 15 bp, Homo sapiens
cccgtcctcccgacg

SEQ ID NO: 234516 - DNA, 15 bp, Homo sapiens
ccccgtcctcccgac

SEQ ID NO: 234517 - DNA, 15 bp, Homo sapiens
gccccgtcctcccga

SEQ ID NO: 234518 - DNA, 15 bp, Homo sapiens
agccccgtcctcccg

SEQ ID NO: 234519 - DNA, 15 bp, Homo sapiens
aagccccgtcctccc

SEQ ID NO: 234520 - DNA, 15 bp, Homo sapiens
caagccccgtcctcc

SEQ ID NO: 234521 - DNA, 15 bp, Homo sapiens
acaagccccgtcctc

SEQ ID NO: 234522 - DNA, 15 bp, Homo sapiens
cacaagccccgtcct

SEQ ID NO: 234523 - DNA, 15 bp, Homo sapiens
acacaagccccgtcc

SEQ ID NO: 234524 - DNA, 15 bp, Homo sapiens
tacacaagccccgtc

SEQ ID NO: 234525 - DNA, 15 bp, Homo sapiens
gtacacaagccccgt

SEQ ID NO: 234526 - DNA, 15 bp, Homo sapiens
cgtacacaagccccg

SEQ ID NO: 234527 - DNA, 15 bp, Homo sapiens
tcgtacacaagcccc

SEQ ID NO: 234528 - DNA, 15 bp, Homo sapiens
ctcgtacacaagccc

SEQ ID NO: 234529 - DNA, 15 bp, Homo sapiens
gctcgtacacaagcc

SEQ ID NO: 234530 - DNA, 15 bp, Homo sapiens
cgctcgtacacaagc

SEQ ID NO: 234531 - DNA, 15 bp, Homo sapiens
ccgctcgtacacaag

SEQ ID NO: 234532 - DNA, 15 bp, Homo sapiens
cccgctcgtacacaa

SEQ ID NO: 234533 - DNA, 15 bp, Homo sapiens
ccccgctcgtacaca

SEQ ID NO: 234534 - DNA, 15 bp, Homo sapiens
gccccgctcgtacac

SEQ ID NO: 234535 - DNA, 15 bp, Homo sapiens
cgccccgctcgtaca

SEQ ID NO: 234536 - DNA, 15 bp, Homo sapiens
ccgccccgctcgtac

SEQ ID NO: 234537 - DNA, 15 bp, Homo sapiens
cccgccccgctcgta

SEQ ID NO: 234538 - DNA, 15 bp, Homo sapiens
ccccgccccgctcgt

SEQ ID NO: 234539 - DNA, 15 bp, Homo sapiens
gccccgccccgctcg

SEQ ID NO: 234540 - DNA, 15 bp, Homo sapiens
agccccgccccgctc

SEQ ID NO: 234541 - DNA, 15 bp, Homo sapiens
cagccccgccccgct

SEQ ID NO: 234542 - DNA, 15 bp, Homo sapiens
ccagccccgccccgc

SEQ ID NO: 234543 - DNA, 15 bp, Homo sapiens
gccagccccgccccg

SEQ ID NO: 234544 - DNA, 15 bp, Homo sapiens
cgccagccccgcccc

SEQ ID NO: 234545 - DNA, 15 bp, Homo sapiens
gcgccagccccgccc

SEQ ID NO: 234546 - DNA, 15 bp, Homo sapiens
cgcgccagccccgcc

SEQ ID NO: 234547 - DNA, 15 bp, Homo sapiens
ccgcgccagccccgc

SEQ ID NO: 234548 - DNA, 15 bp, Homo sapiens
tccgcgccagccccg

SEQ ID NO: 234549 - DNA, 15 bp, Homo sapiens
ttccgcgccagcccc

SEQ ID NO: 234550 - DNA, 15 bp, Homo sapiens
cttccgcgccagccc

SEQ ID NO: 234551 - DNA, 15 bp, Homo sapiens
acttccgcgccagcc

SEQ ID NO: 234552 - DNA, 15 bp, Homo sapiens
gacttccgcgccagc

SEQ ID NO: 234553 - DNA, 15 bp, Homo sapiens
agacttccgcgccag

SEQ ID NO: 234554 - DNA, 15 bp, Homo sapiens
cagacttccgcgcca

SEQ ID NO: 234555 - DNA, 15 bp, Homo sapiens
tcagacttccgcgcc

SEQ ID NO: 234556 - DNA, 15 bp, Homo sapiens
ctcagacttccgcgc

SEQ ID NO: 234557 - DNA, 15 bp, Homo sapiens
gctcagacttccgcg

SEQ ID NO: 234558 - DNA, 15 bp, Homo sapiens
ggctcagacttccgc

SEQ ID NO: 234559 - DNA, 15 bp, Homo sapiens
aggctcagacttccg

SEQ ID NO: 234560 - DNA, 15 bp, Homo sapiens
gaggctcagacttcc

SEQ ID NO: 234561 - DNA, 15 bp, Homo sapiens
tgaggctcagacttc

SEQ ID NO: 234562 - DNA, 15 bp, Homo sapiens
gtgaggctcagactt

SEQ ID NO: 234563 - DNA, 15 bp, Homo sapiens
ggtgaggctcagact

SEQ ID NO: 234564 - DNA, 15 bp, Homo sapiens
aggtgaggctcagac

SEQ ID NO: 234565 - DNA, 15 bp, Homo sapiens
aaggtgaggctcaga

SEQ ID NO: 234566 - DNA, 15 bp, Homo sapiens
caaggtgaggctcag

SEQ ID NO: 234567 - DNA, 15 bp, Homo sapiens
acaaggtgaggctca

SEQ ID NO: 234568 - DNA, 15 bp, Homo sapiens
gacaaggtgaggctc

SEQ ID NO: 234569 - DNA, 15 bp, Homo sapiens
ggacaaggtgaggct

SEQ ID NO: 234570 - DNA, 15 bp, Homo sapiens
cggacaaggtgaggc

SEQ ID NO: 234571 - DNA, 15 bp, Homo sapiens
ccggacaaggtgagg

SEQ ID NO: 234572 - DNA, 15 bp, Homo sapiens
cccggacaaggtgag

SEQ ID NO: 234573 - DNA, 15 bp, Homo sapiens
ccccggacaaggtga

SEQ ID NO: 234574 - DNA, 15 bp, Homo sapiens
gccccggacaaggtg

SEQ ID NO: 234575 - DNA, 15 bp, Homo sapiens
cgccccggacaaggt

SEQ ID NO: 234576 - DNA, 15 bp, Homo sapiens
tcgccccggacaagg

SEQ ID NO: 234577 - DNA, 15 bp, Homo sapiens
ctcgccccggacaag

SEQ ID NO: 234578 - DNA, 15 bp, Homo sapiens
cctcgccccggacaa

SEQ ID NO: 234579 - DNA, 15 bp, Homo sapiens
gcctcgccccggaca

SEQ ID NO: 234580 - DNA, 15 bp, Homo sapiens
cgcctcgccccggac

SEQ ID NO: 234581 - DNA, 15 bp, Homo sapiens
ccgcctcgccccgga

SEQ ID NO: 234582 - DNA, 15 bp, Homo sapiens
tccgcctcgccccgg

SEQ ID NO: 234583 - DNA, 15 bp, Homo sapiens
atccgcctcgccccg

SEQ ID NO: 234584 - DNA, 15 bp, Homo sapiens
catccgcctcgcccc

SEQ ID NO: 234585 - DNA, 15 bp, Homo sapiens
gcatccgcctcgccc

SEQ ID NO: 234586 - DNA, 15 bp, Homo sapiens
tgcatccgcctcgcc

SEQ ID NO: 234587 - DNA, 15 bp, Homo sapiens
ctgcatccgcctcgc

SEQ ID NO: 234588 - DNA, 15 bp, Homo sapiens
cctgcatccgcctcg

SEQ ID NO: 234589 - DNA, 15 bp, Homo sapiens
ccctgcatccgcctc

SEQ ID NO: 234590 - DNA, 15 bp, Homo sapiens
cccctgcatccgcct

SEQ ID NO: 234591 - DNA, 15 bp, Homo sapiens
tcccctgcatccgcc

SEQ ID NO: 234592 - DNA, 15 bp, Homo sapiens
ctcccctgcatccgc

SEQ ID NO: 234593 - DNA, 15 bp, Homo sapiens
cctcccctgcatccg

SEQ ID NO: 234594 - DNA, 15 bp, Homo sapiens
gcctcccctgcatcc

SEQ ID NO: 234595 - DNA, 15 bp, Homo sapiens
ggcctcccctgcatc

SEQ ID NO: 234596 - DNA, 15 bp, Homo sapiens
aggcctcccctgcat

SEQ ID NO: 234597 - DNA, 15 bp, Homo sapiens
caggcctcccctgca

SEQ ID NO: 234598 - DNA, 15 bp, Homo sapiens
ccaggcctcccctgc

SEQ ID NO: 234599 - DNA, 15 bp, Homo sapiens
gccaggcctcccctg

SEQ ID NO: 234600 - DNA, 15 bp, Homo sapiens
cgccaggcctcccct

SEQ ID NO: 234601 - DNA, 15 bp, Homo sapiens
acgccaggcctcccc

SEQ ID NO: 234602 - DNA, 15 bp, Homo sapiens
aacgccaggcctccc

SEQ ID NO: 234603 - DNA, 15 bp, Homo sapiens
gaacgccaggcctcc

SEQ ID NO: 234604 - DNA, 15 bp, Homo sapiens
ggaacgccaggcctc

SEQ ID NO: 234605 - DNA, 15 bp, Homo sapiens
aggaacgccaggcct

SEQ ID NO: 234606 - DNA, 15 bp, Homo sapiens
gaggaacgccaggcc

SEQ ID NO: 234607 - DNA, 15 bp, Homo sapiens
ggaggaacgccaggc

SEQ ID NO: 234608 - DNA, 15 bp, Homo sapiens
cggaggaacgccagg

SEQ ID NO: 234609 - DNA, 15 bp, Homo sapiens
gcggaggaacgccag

SEQ ID NO: 234610 - DNA, 15 bp, Homo sapiens
cgcggaggaacgcca

SEQ ID NO: 234611 - DNA, 15 bp, Homo sapiens
ccgcggaggaacgcc

SEQ ID NO: 234612 - DNA, 15 bp, Homo sapiens
accgcggaggaacgc

SEQ ID NO: 234613 - DNA, 15 bp, Homo sapiens
aaccgcggaggaacg

SEQ ID NO: 234614 - DNA, 15 bp, Homo sapiens
gaaccgcggaggaac

SEQ ID NO: 234615 - DNA, 15 bp, Homo sapiens
ggaaccgcggaggaa

SEQ ID NO: 234616 - DNA, 15 bp, Homo sapiens
aggaaccgcggagga

SEQ ID NO: 234617 - DNA, 15 bp, Homo sapiens
caggaaccgcggagg

SEQ ID NO: 234618 - DNA, 15 bp, Homo sapiens
acaggaaccgcggag

SEQ ID NO: 234619 - DNA, 15 bp, Homo sapiens
gacaggaaccgcgga

SEQ ID NO: 234620 - DNA, 15 bp, Homo sapiens
tgacaggaaccgcgg

SEQ ID NO: 234621 - DNA, 15 bp, Homo sapiens
gtgacaggaaccgcg

SEQ ID NO: 234622 - DNA, 15 bp, Homo sapiens
tgtgacaggaaccgc

SEQ ID NO: 234623 - DNA, 15 bp, Homo sapiens
ttgtgacaggaaccg

SEQ ID NO: 234624 - DNA, 15 bp, Homo sapiens
tttgtgacaggaacc

SEQ ID NO: 234625 - DNA, 15 bp, Homo sapiens
ctttgtgacaggaac

SEQ ID NO: 234626 - DNA, 15 bp, Homo sapiens
cctttgtgacaggaa

SEQ ID NO: 234627 - DNA, 15 bp, Homo sapiens
gcctttgtgacagga

SEQ ID NO: 234628 - DNA, 15 bp, Homo sapiens
cgcctttgtgacagg

SEQ ID NO: 234629 - DNA, 15 bp, Homo sapiens
tcgcctttgtgacag

SEQ ID NO: 234630 - DNA, 15 bp, Homo sapiens
gtcgcctttgtgaca

SEQ ID NO: 234631 - DNA, 15 bp, Homo sapiens
cgtcgcctttgtgac

SEQ ID NO: 234632 - DNA, 15 bp, Homo sapiens
tcgtcgcctttgtga

SEQ ID NO: 234633 - DNA, 15 bp, Homo sapiens
gtcgtcgcctttgtg

SEQ ID NO: 234634 - DNA, 15 bp, Homo sapiens
tgtcgtcgcctttgt

SEQ ID NO: 234635 - DNA, 15 bp, Homo sapiens
ttgtcgtcgcctttg

SEQ ID NO: 234636 - DNA, 15 bp, Homo sapiens
cttgtcgtcgccttt

SEQ ID NO: 234637 - DNA, 15 bp, Homo sapiens
acttgtcgtcgcctt

SEQ ID NO: 234638 - DNA, 15 bp, Homo sapiens
gacttgtcgtcgcct

SEQ ID NO: 234639 - DNA, 15 bp, Homo sapiens
ggacttgtcgtcgcc

SEQ ID NO: 234640 - DNA, 15 bp, Homo sapiens
gggacttgtcgtcgc

SEQ ID NO: 234641 - DNA, 15 bp, Homo sapiens
cgggacttgtcgtcg

SEQ ID NO: 234642 - DNA, 15 bp, Homo sapiens
ccgggacttgtcgtc

SEQ ID NO: 234643 - DNA, 15 bp, Homo sapiens
cccgggacttgtcgt

SEQ ID NO: 234644 - DNA, 15 bp, Homo sapiens
acccgggacttgtcg

SEQ ID NO: 234645 - DNA, 15 bp, Homo sapiens
gacccgggacttgtc

SEQ ID NO: 234646 - DNA, 15 bp, Homo sapiens
ggacccgggacttgt

SEQ ID NO: 234647 - DNA, 15 bp, Homo sapiens
gggacccgggacttg

SEQ ID NO: 234648 - DNA, 15 bp, Homo sapiens
ggggacccgggactt

SEQ ID NO: 234649 - DNA, 15 bp, Homo sapiens
cggggacccgggact

SEQ ID NO: 234650 - DNA, 15 bp, Homo sapiens
ccggggacccgggac

SEQ ID NO: 234651 - DNA, 15 bp, Homo sapiens
tccggggacccggga

SEQ ID NO: 234652 - DNA, 15 bp, Homo sapiens
ctccggggacccggg

SEQ ID NO: 234653 - DNA, 15 bp, Homo sapiens
gctccggggacccgg

SEQ ID NO: 234654 - DNA, 15 bp, Homo sapiens
ggctccggggacccg

SEQ ID NO: 234655 - DNA, 15 bp, Homo sapiens
cggctccggggaccc

SEQ ID NO: 234656 - DNA, 15 bp, Homo sapiens
gcggctccggggacc

SEQ ID NO: 234657 - DNA, 15 bp, Homo sapiens
ggcggctccggggac

SEQ ID NO: 234658 - DNA, 15 bp, Homo sapiens
aggcggctccgggga

SEQ ID NO: 234659 - DNA, 15 bp, Homo sapiens
gaggcggctccgggg

SEQ ID NO: 234660 - DNA, 15 bp, Homo sapiens
ggaggcggctccggg

SEQ ID NO: 234661 - DNA, 15 bp, Homo sapiens
cggaggcggctccgg

SEQ ID NO: 234662 - DNA, 15 bp, Homo sapiens
gcggaggcggctccg

SEQ ID NO: 234663 - DNA, 15 bp, Homo sapiens
cgcggaggcggctcc

SEQ ID NO: 234664 - DNA, 15 bp, Homo sapiens
tcgcggaggcggctc

SEQ ID NO: 234665 - DNA, 15 bp, Homo sapiens
gtcgcggaggcggct

SEQ ID NO: 234666 - DNA, 15 bp, Homo sapiens
tgtcgcggaggcggc

SEQ ID NO: 234667 - DNA, 15 bp, Homo sapiens
atgtcgcggaggcgg

SEQ ID NO: 234668 - DNA, 15 bp, Homo sapiens
tatgtcgcggaggcg

SEQ ID NO: 234669 - DNA, 15 bp, Homo sapiens
gtatgtcgcggaggc

SEQ ID NO: 234670 - DNA, 15 bp, Homo sapiens
tgtatgtcgcggagg

SEQ ID NO: 234671 - DNA, 15 bp, Homo sapiens
gtgtatgtcgcggag

SEQ ID NO: 234672 - DNA, 15 bp, Homo sapiens
cgtgtatgtcgcgga

SEQ ID NO: 234673 - DNA, 15 bp, Homo sapiens
tcgtgtatgtcgcgg

SEQ ID NO: 234674 - DNA, 15 bp, Homo sapiens
ctcgtgtatgtcgcg

SEQ ID NO: 234675 - DNA, 15 bp, Homo sapiens
actcgtgtatgtcgc

SEQ ID NO: 234676 - DNA, 15 bp, Homo sapiens
gactcgtgtatgtcg

SEQ ID NO: 234677 - DNA, 15 bp, Homo sapiens
cgactcgtgtatgtc

SEQ ID NO: 234678 - DNA, 15 bp, Homo sapiens
gcgactcgtgtatgt

SEQ ID NO: 234679 - DNA, 15 bp, Homo sapiens
ggcgactcgtgtatg

SEQ ID NO: 234680 - DNA, 15 bp, Homo sapiens
gggcgactcgtgtat

SEQ ID NO: 234681 - DNA, 15 bp, Homo sapiens
agggcgactcgtgta

SEQ ID NO: 234682 - DNA, 15 bp, Homo sapiens
gagggcgactcgtgt

SEQ ID NO: 234683 - DNA, 15 bp, Homo sapiens
ggagggcgactcgtg

SEQ ID NO: 234684 - DNA, 15 bp, Homo sapiens
cggagggcgactcgt

SEQ ID NO: 234685 - DNA, 15 bp, Homo sapiens
acggagggcgactcg

SEQ ID NO: 234686 - DNA, 15 bp, Homo sapiens
aacggagggcgactc

SEQ ID NO: 234687 - DNA, 15 bp, Homo sapiens
taacggagggcgact

SEQ ID NO: 234688 - DNA, 15 bp, Homo sapiens
ataacggagggcgac

SEQ ID NO: 234689 - DNA, 15 bp, Homo sapiens
gataacggagggcga

SEQ ID NO: 234690 - DNA, 15 bp, Homo sapiens
ggataacggagggcg

SEQ ID NO: 234691 - DNA, 15 bp, Homo sapiens
aggataacggagggc

SEQ ID NO: 234692 - DNA, 15 bp, Homo sapiens
caggataacggaggg

SEQ ID NO: 234693 - DNA, 15 bp, Homo sapiens
ccaggataacggagg

SEQ ID NO: 234694 - DNA, 15 bp, Homo sapiens
cccaggataacggag

SEQ ID NO: 234695 - DNA, 15 bp, Homo sapiens
gcccaggataacgga

SEQ ID NO: 234696 - DNA, 15 bp, Homo sapiens
ggcccaggataacgg

SEQ ID NO: 234697 - DNA, 15 bp, Homo sapiens
gggcccaggataacg

SEQ ID NO: 234698 - DNA, 15 bp, Homo sapiens
agggcccaggataac

SEQ ID NO: 234699 - DNA, 15 bp, Homo sapiens
gagggcccaggataa

SEQ ID NO: 234700 - DNA, 15 bp, Homo sapiens
ggagggcccaggata

SEQ ID NO: 234701 - DNA, 15 bp, Homo sapiens
aggagggcccaggat

SEQ ID NO: 234702 - DNA, 15 bp, Homo sapiens
caggagggcccagga

SEQ ID NO: 234703 - DNA, 15 bp, Homo sapiens
ccaggagggcccagg

SEQ ID NO: 234704 - DNA, 15 bp, Homo sapiens
gccaggagggcccag

SEQ ID NO: 234705 - DNA, 15 bp, Homo sapiens
cgccaggagggccca

SEQ ID NO: 234706 - DNA, 15 bp, Homo sapiens
tcgccaggagggccc

SEQ ID NO: 234707 - DNA, 15 bp, Homo sapiens
ttcgccaggagggcc

SEQ ID NO: 234708 - DNA, 15 bp, Homo sapiens
cttcgccaggagggc

SEQ ID NO: 234709 - DNA, 15 bp, Homo sapiens
acttcgccaggaggg

SEQ ID NO: 234710 - DNA, 15 bp, Homo sapiens
gacttcgccaggagg

SEQ ID NO: 234711 - DNA, 15 bp, Homo sapiens
ggacttcgccaggag

SEQ ID NO: 234712 - DNA, 15 bp, Homo sapiens
gggacttcgccagga

SEQ ID NO: 234713 - DNA, 15 bp, Homo sapiens
ggggacttcgccagg

SEQ ID NO: 234714 - DNA, 15 bp, Homo sapiens
cggggacttcgccag

SEQ ID NO: 234715 - DNA, 15 bp, Homo sapiens
ccggggacttcgcca

SEQ ID NO: 234716 - DNA, 15 bp, Homo sapiens
accggggacttcgcc

SEQ ID NO: 234717 - DNA, 15 bp, Homo sapiens
aaccggggacttcgc

SEQ ID NO: 234718 - DNA, 15 bp, Homo sapiens
aaaccggggacttcg

SEQ ID NO: 234719 - DNA, 15 bp, Homo sapiens
gaaaccggggacttc

SEQ ID NO: 234720 - DNA, 15 bp, Homo sapiens
ggaaaccggggactt

SEQ ID NO: 234721 - DNA, 15 bp, Homo sapiens
cggaaaccggggact

SEQ ID NO: 234722 - DNA, 15 bp, Homo sapiens
gcggaaaccggggac

SEQ ID NO: 234723 - DNA, 15 bp, Homo sapiens
agcggaaaccgggga

SEQ ID NO: 234724 - DNA, 15 bp, Homo sapiens
cagcggaaaccgggg

SEQ ID NO: 234725 - DNA, 15 bp, Homo sapiens
acagcggaaaccggg

SEQ ID NO: 234726 - DNA, 15 bp, Homo sapiens
cacagcggaaaccgg

SEQ ID NO: 234727 - DNA, 15 bp, Homo sapiens
gcacagcggaaaccg

SEQ ID NO: 234728 - DNA, 15 bp, Homo sapiens
agcacagcggaaacc

SEQ ID NO: 234729 - DNA, 15 bp, Homo sapiens
gagcacagcggaaac

SEQ ID NO: 234730 - DNA, 15 bp, Homo sapiens
agagcacagcggaaa

SEQ ID NO: 234731 - DNA, 15 bp, Homo sapiens
cagagcacagcggaa

SEQ ID NO: 234732 - DNA, 15 bp, Homo sapiens
acagagcacagcgga

SEQ ID NO: 234733 - DNA, 15 bp, Homo sapiens
cacagagcacagcgg

SEQ ID NO: 234734 - DNA, 15 bp, Homo sapiens
ccacagagcacagcg

SEQ ID NO: 234735 - DNA, 15 bp, Homo sapiens
gccacagagcacagc

SEQ ID NO: 234736 - DNA, 15 bp, Homo sapiens
cgccacagagcacag

SEQ ID NO: 234737 - DNA, 15 bp, Homo sapiens
tcgccacagagcaca

SEQ ID NO: 234738 - DNA, 15 bp, Homo sapiens
gtcgccacagagcac

SEQ ID NO: 234739 - DNA, 15 bp, Homo sapiens
tgtcgccacagagca

SEQ ID NO: 234740 - DNA, 15 bp, Homo sapiens
gtgtcgccacagagc

SEQ ID NO: 234741 - DNA, 15 bp, Homo sapiens
ggtgtcgccacagag

SEQ ID NO: 234742 - DNA, 15 bp, Homo sapiens
aggtgtcgccacaga

SEQ ID NO: 234743 - DNA, 15 bp, Homo sapiens
gaggtgtcgccacag

SEQ ID NO: 234744 - DNA, 15 bp, Homo sapiens
ggaggtgtcgccaca

SEQ ID NO: 234745 - DNA, 15 bp, Homo sapiens
cggaggtgtcgccac

SEQ ID NO: 234746 - DNA, 15 bp, Homo sapiens
acggaggtgtcgcca

SEQ ID NO: 234747 - DNA, 15 bp, Homo sapiens
gacggaggtgtcgcc

SEQ ID NO: 234748 - DNA, 15 bp, Homo sapiens
ggacggaggtgtcgc

SEQ ID NO: 234749 - DNA, 15 bp, Homo sapiens
gggacggaggtgtcg

SEQ ID NO: 234750 - DNA, 15 bp, Homo sapiens
ggggacggaggtgtc

SEQ ID NO: 234751 - DNA, 15 bp, Homo sapiens
tggggacggaggtgt

SEQ ID NO: 234752 - DNA, 15 bp, Homo sapiens
gtggggacggaggtg

SEQ ID NO: 234753 - DNA, 15 bp, Homo sapiens
ggtggggacggaggt

SEQ ID NO: 234754 - DNA, 15 bp, Homo sapiens
aggtggggacggagg

SEQ ID NO: 234755 - DNA, 15 bp, Homo sapiens
aaggtggggacggag

SEQ ID NO: 234756 - DNA, 15 bp, Homo sapiens
caaggtggggacgga

SEQ ID NO: 234757 - DNA, 15 bp, Homo sapiens
acaaggtggggacgg

SEQ ID NO: 234758 - DNA, 15 bp, Homo sapiens
gacaaggtggggacg

SEQ ID NO: 234759 - DNA, 15 bp, Homo sapiens
ggacaaggtggggac

SEQ ID NO: 234760 - DNA, 15 bp, Homo sapiens
aggacaaggtgggga

SEQ ID NO: 234761 - DNA, 15 bp, Homo sapiens
caggacaaggtgggg

SEQ ID NO: 234762 - DNA, 15 bp, Homo sapiens
ccaggacaaggtggg

SEQ ID NO: 234763 - DNA, 15 bp, Homo sapiens
cccaggacaaggtgg

SEQ ID NO: 234764 - DNA, 15 bp, Homo sapiens
ccccaggacaaggtg

SEQ ID NO: 234765 - DNA, 15 bp, Homo sapiens
cccccaggacaaggt

SEQ ID NO: 234766 - DNA, 15 bp, Homo sapiens
ccccccaggacaagg

SEQ ID NO: 234767 - DNA, 15 bp, Homo sapiens
gccccccaggacaag

SEQ ID NO: 234768 - DNA, 15 bp, Homo sapiens
cgccccccaggacaa

SEQ ID NO: 234769 - DNA, 15 bp, Homo sapiens
gcgccccccaggaca

SEQ ID NO: 234770 - DNA, 15 bp, Homo sapiens
ggcgccccccaggac

SEQ ID NO: 234771 - DNA, 15 bp, Homo sapiens
gggcgccccccagga

SEQ ID NO: 234772 - DNA, 15 bp, Homo sapiens
agggcgccccccagg

SEQ ID NO: 234773 - DNA, 15 bp, Homo sapiens
gagggcgccccccag

SEQ ID NO: 234774 - DNA, 15 bp, Homo sapiens
cgagggcgcccccca

SEQ ID NO: 234775 - DNA, 15 bp, Homo sapiens
gcgagggcgcccccc

SEQ ID NO: 234776 - DNA, 15 bp, Homo sapiens
ggcgagggcgccccc

SEQ ID NO: 234777 - DNA, 15 bp, Homo sapiens
gggcgagggcgcccc

SEQ ID NO: 234778 - DNA, 15 bp, Homo sapiens
ggggcgagggcgccc

SEQ ID NO: 234779 - DNA, 15 bp, Homo sapiens
tggggcgagggcgcc

SEQ ID NO: 234780 - DNA, 15 bp, Homo sapiens
gtggggcgagggcgc

SEQ ID NO: 234781 - DNA, 15 bp, Homo sapiens
ggtggggcgagggcg

SEQ ID NO: 234782 - DNA, 15 bp, Homo sapiens
tggtggggcgagggc

SEQ ID NO: 234783 - DNA, 15 bp, Homo sapiens
ctggtggggcgaggg

SEQ ID NO: 234784 - DNA, 15 bp, Homo sapiens
gctggtggggcgagg

SEQ ID NO: 234785 - DNA, 15 bp, Homo sapiens
ggctggtggggcgag

SEQ ID NO: 234786 - DNA, 15 bp, Homo sapiens
gggctggtggggcga

SEQ ID NO: 234787 - DNA, 15 bp, Homo sapiens
ggggctggtggggcg

SEQ ID NO: 234788 - DNA, 15 bp, Homo sapiens
cggggctggtggggc

SEQ ID NO: 234789 - DNA, 15 bp, Homo sapiens
tcggggctggtgggg

SEQ ID NO: 234790 - DNA, 15 bp, Homo sapiens
atcggggctggtggg

SEQ ID NO: 234791 - DNA, 15 bp, Homo sapiens
gatcggggctggtgg

SEQ ID NO: 234792 - DNA, 15 bp, Homo sapiens
tgatcggggctggtg

SEQ ID NO: 234793 - DNA, 15 bp, Homo sapiens
ttgatcggggctggt

SEQ ID NO: 234794 - DNA, 15 bp, Homo sapiens
cttgatcggggctgg

SEQ ID NO: 234795 - DNA, 15 bp, Homo sapiens
acttgatcggggctg

SEQ ID NO: 234796 - DNA, 15 bp, Homo sapiens
aacttgatcggggct

SEQ ID NO: 234797 - DNA, 15 bp, Homo sapiens
gaacttgatcggggc

SEQ ID NO: 234798 - DNA, 15 bp, Homo sapiens
tgaacttgatcgggg

SEQ ID NO: 234799 - DNA, 15 bp, Homo sapiens
gtgaacttgatcggg

SEQ ID NO: 234800 - DNA, 15 bp, Homo sapiens
tgtgaacttgatcgg

SEQ ID NO: 234801 - DNA, 15 bp, Homo sapiens
ctgtgaacttgatcg

SEQ ID NO: 234802 - DNA, 15 bp, Homo sapiens
tctgtgaacttgatc

SEQ ID NO: 234803 - DNA, 15 bp, Homo sapiens
ctctgtgaacttgat

SEQ ID NO: 234804 - DNA, 15 bp, Homo sapiens
cctctgtgaacttga

SEQ ID NO: 234805 - DNA, 15 bp, Homo sapiens
ccctctgtgaacttg

SEQ ID NO: 234806 - DNA, 15 bp, Homo sapiens
cccctctgtgaactt

SEQ ID NO: 234807 - DNA, 15 bp, Homo sapiens
gcccctctgtgaact

SEQ ID NO: 234808 - DNA, 15 bp, Homo sapiens
ggcccctctgtgaac

SEQ ID NO: 234809 - DNA, 15 bp, Homo sapiens
gggcccctctgtgaa

SEQ ID NO: 234810 - DNA, 15 bp, Homo sapiens
ggggcccctctgtga

SEQ ID NO: 234811 - DNA, 15 bp, Homo sapiens
gggggcccctctgtg

SEQ ID NO: 234812 - DNA, 15 bp, Homo sapiens
cgggggcccctctgt

SEQ ID NO: 234813 - DNA, 15 bp, Homo sapiens
ccgggggcccctctg

SEQ ID NO: 234814 - DNA, 15 bp, Homo sapiens
gccgggggcccctct

SEQ ID NO: 234815 - DNA, 15 bp, Homo sapiens
ggccgggggcccctc

SEQ ID NO: 234816 - DNA, 15 bp, Homo sapiens
tggccgggggcccct

SEQ ID NO: 234817 - DNA, 15 bp, Homo sapiens
gtggccgggggcccc

SEQ ID NO: 234818 - DNA, 15 bp, Homo sapiens
ggtggccgggggccc

SEQ ID NO: 234819 - DNA, 15 bp, Homo sapiens
gggtggccgggggcc

SEQ ID NO: 234820 - DNA, 15 bp, Homo sapiens
agggtggccgggggc

SEQ ID NO: 234821 - DNA, 15 bp, Homo sapiens
gagggtggccggggg

SEQ ID NO: 234822 - DNA, 15 bp, Homo sapiens
tgagggtggccgggg

SEQ ID NO: 234823 - DNA, 15 bp, Homo sapiens
ttgagggtggccggg

SEQ ID NO: 234824 - DNA, 15 bp, Homo sapiens
cttgagggtggccgg

SEQ ID NO: 234825 - DNA, 15 bp, Homo sapiens
ccttgagggtggccg

SEQ ID NO: 234826 - DNA, 15 bp, Homo sapiens
gccttgagggtggcc

SEQ ID NO: 234827 - DNA, 15 bp, Homo sapiens
ggccttgagggtggc

SEQ ID NO: 234828 - DNA, 15 bp, Homo sapiens
aggccttgagggtgg

SEQ ID NO: 234829 - DNA, 15 bp, Homo sapiens
gaggccttgagggtg

SEQ ID NO: 234830 - DNA, 15 bp, Homo sapiens
cgaggccttgagggt

SEQ ID NO: 234831 - DNA, 15 bp, Homo sapiens
ccgaggccttgaggg

SEQ ID NO: 234832 - DNA, 15 bp, Homo sapiens
accgaggccttgagg

SEQ ID NO: 234833 - DNA, 15 bp, Homo sapiens
aaccgaggccttgag

SEQ ID NO: 234834 - DNA, 15 bp, Homo sapiens
gaaccgaggccttga

SEQ ID NO: 234835 - DNA, 15 bp, Homo sapiens
ggaaccgaggccttg

SEQ ID NO: 234836 - DNA, 15 bp, Homo sapiens
aggaaccgaggcctt

SEQ ID NO: 234837 - DNA, 15 bp, Homo sapiens
aaggaaccgaggcct

SEQ ID NO: 234838 - DNA, 15 bp, Homo sapiens
taaggaaccgaggcc

SEQ ID NO: 234839 - DNA, 15 bp, Homo sapiens
gtaaggaaccgaggc

SEQ ID NO: 234840 - DNA, 15 bp, Homo sapiens
cgtaaggaaccgagg

SEQ ID NO: 234841 - DNA, 15 bp, Homo sapiens
tcgtaaggaaccgag

SEQ ID NO: 234842 - DNA, 15 bp, Homo sapiens
ctcgtaaggaaccga

SEQ ID NO: 234843 - DNA, 15 bp, Homo sapiens
cctcgtaaggaaccg

SEQ ID NO: 234844 - DNA, 15 bp, Homo sapiens
acctcgtaaggaacc

SEQ ID NO: 234845 - DNA, 15 bp, Homo sapiens
aacctcgtaaggaac

SEQ ID NO: 234846 - DNA, 15 bp, Homo sapiens
caacctcgtaaggaa

SEQ ID NO: 234847 - DNA, 15 bp, Homo sapiens
tcaacctcgtaagga

SEQ ID NO: 234848 - DNA, 15 bp, Homo sapiens
ttcaacctcgtaagg

SEQ ID NO: 234849 - DNA, 15 bp, Homo sapiens
tttcaacctcgtaag

SEQ ID NO: 234850 - DNA, 15 bp, Homo sapiens
gtttcaacctcgtaa

SEQ ID NO: 234851 - DNA, 15 bp, Homo sapiens
cgtttcaacctcgta

SEQ ID NO: 234852 - DNA, 15 bp, Homo sapiens
acgtttcaacctcgt

SEQ ID NO: 234853 - DNA, 15 bp, Homo sapiens
aacgtttcaacctcg

SEQ ID NO: 234854 - DNA, 15 bp, Homo sapiens
caacgtttcaacctc

SEQ ID NO: 234855 - DNA, 15 bp, Homo sapiens
gcaacgtttcaacct

SEQ ID NO: 234856 - DNA, 15 bp, Homo sapiens
ggcaacgtttcaacc

SEQ ID NO: 234857 - DNA, 15 bp, Homo sapiens
aggcaacgtttcaac

SEQ ID NO: 234858 - DNA, 15 bp, Homo sapiens
gaggcaacgtttcaa

SEQ ID NO: 234859 - DNA, 15 bp, Homo sapiens
tgaggcaacgtttca

SEQ ID NO: 234860 - DNA, 15 bp, Homo sapiens
ctgaggcaacgtttc

SEQ ID NO: 234861 - DNA, 15 bp, Homo sapiens
tctgaggcaacgttt

SEQ ID NO: 234862 - DNA, 15 bp, Homo sapiens
ttctgaggcaacgtt

SEQ ID NO: 234863 - DNA, 15 bp, Homo sapiens
attctgaggcaacgt

SEQ ID NO: 234864 - DNA, 15 bp, Homo sapiens
gattctgaggcaacg

SEQ ID NO: 234865 - DNA, 15 bp, Homo sapiens
agattctgaggcaac

SEQ ID NO: 234866 - DNA, 15 bp, Homo sapiens
gagattctgaggcaa

SEQ ID NO: 234867 - DNA, 15 bp, Homo sapiens
ggagattctgaggca

SEQ ID NO: 234868 - DNA, 15 bp, Homo sapiens
gggagattctgaggc

SEQ ID NO: 234869 - DNA, 15 bp, Homo sapiens
ggggagattctgagg

SEQ ID NO: 234870 - DNA, 15 bp, Homo sapiens
cggggagattctgag

SEQ ID NO: 234871 - DNA, 15 bp, Homo sapiens
gcggggagattctga

SEQ ID NO: 234872 - DNA, 15 bp, Homo sapiens
ggcggggagattctg

SEQ ID NO: 234873 - DNA, 15 bp, Homo sapiens
gggcggggagattct

SEQ ID NO: 234874 - DNA, 15 bp, Homo sapiens
ggggcggggagattc

SEQ ID NO: 234875 - DNA, 15 bp, Homo sapiens
aggggcggggagatt

SEQ ID NO: 234876 - DNA, 15 bp, Homo sapiens
gaggggcggggagat

SEQ ID NO: 234877 - DNA, 15 bp, Homo sapiens
ggaggggcggggaga

SEQ ID NO: 234878 - DNA, 15 bp, Homo sapiens
aggaggggcggggag

SEQ ID NO: 234879 - DNA, 15 bp, Homo sapiens
aaggaggggcgggga

SEQ ID NO: 234880 - DNA, 15 bp, Homo sapiens
caaggaggggcgggg

SEQ ID NO: 234881 - DNA, 15 bp, Homo sapiens
ccaaggaggggcggg

SEQ ID NO: 234882 - DNA, 15 bp, Homo sapiens
accaaggaggggcgg

SEQ ID NO: 234883 - DNA, 15 bp, Homo sapiens
gaccaaggaggggcg

SEQ ID NO: 234884 - DNA, 15 bp, Homo sapiens
agaccaaggaggggc

SEQ ID NO: 234885 - DNA, 15 bp, Homo sapiens
cagaccaaggagggg

SEQ ID NO: 234886 - DNA, 15 bp, Homo sapiens
gcagaccaaggaggg

SEQ ID NO: 234887 - DNA, 15 bp, Homo sapiens
tgcagaccaaggagg

SEQ ID NO: 234888 - DNA, 15 bp, Homo sapiens
ctgcagaccaaggag

SEQ ID NO: 234889 - DNA, 15 bp, Homo sapiens
gctgcagaccaagga

SEQ ID NO: 234890 - DNA, 15 bp, Homo sapiens
ggctgcagaccaagg

SEQ ID NO: 234891 - DNA, 15 bp, Homo sapiens
cggctgcagaccaag

SEQ ID NO: 234892 - DNA, 15 bp, Homo sapiens
tcggctgcagaccaa

SEQ ID NO: 234893 - DNA, 15 bp, Homo sapiens
ctcggctgcagacca

SEQ ID NO: 234894 - DNA, 15 bp, Homo sapiens
tctcggctgcagacc

SEQ ID NO: 234895 - DNA, 15 bp, Homo sapiens
atctcggctgcagac

SEQ ID NO: 234896 - DNA, 15 bp, Homo sapiens
gatctcggctgcaga

SEQ ID NO: 234897 - DNA, 15 bp, Homo sapiens
agatctcggctgcag

SEQ ID NO: 234898 - DNA, 15 bp, Homo sapiens
aagatctcggctgca

SEQ ID NO: 234899 - DNA, 15 bp, Homo sapiens
gaagatctcggctgc

SEQ ID NO: 234900 - DNA, 15 bp, Homo sapiens
tgaagatctcggctg

SEQ ID NO: 234901 - DNA, 15 bp, Homo sapiens
ctgaagatctcggct

SEQ ID NO: 234902 - DNA, 15 bp, Homo sapiens
gctgaagatctcggc

SEQ ID NO: 234903 - DNA, 15 bp, Homo sapiens
ggctgaagatctcgg

SEQ ID NO: 234904 - DNA, 15 bp, Homo sapiens
tggctgaagatctcg

SEQ ID NO: 234905 - DNA, 15 bp, Homo sapiens
gtggctgaagatctc

SEQ ID NO: 234906 - DNA, 15 bp, Homo sapiens
cgtggctgaagatct

SEQ ID NO: 234907 - DNA, 15 bp, Homo sapiens
ccgtggctgaagatc

SEQ ID NO: 234908 - DNA, 15 bp, Homo sapiens
accgtggctgaagat

SEQ ID NO: 234909 - DNA, 15 bp, Homo sapiens
caccgtggctgaaga

SEQ ID NO: 234910 - DNA, 15 bp, Homo sapiens
ccaccgtggctgaag

SEQ ID NO: 234911 - DNA, 15 bp, Homo sapiens
cccaccgtggctgaa

SEQ ID NO: 234912 - DNA, 15 bp, Homo sapiens
ccccaccgtggctga

SEQ ID NO: 234913 - DNA, 15 bp, Homo sapiens
gccccaccgtggctg

SEQ ID NO: 234914 - DNA, 15 bp, Homo sapiens
tgccccaccgtggct

SEQ ID NO: 234915 - DNA, 15 bp, Homo sapiens
ctgccccaccgtggc

SEQ ID NO: 234916 - DNA, 15 bp, Homo sapiens
gctgccccaccgtgg

SEQ ID NO: 234917 - DNA, 15 bp, Homo sapiens
agctgccccaccgtg

SEQ ID NO: 234918 - DNA, 15 bp, Homo sapiens
tagctgccccaccgt

SEQ ID NO: 234919 - DNA, 15 bp, Homo sapiens
atagctgccccaccg

SEQ ID NO: 234920 - DNA, 15 bp, Homo sapiens
gatagctgccccacc

SEQ ID NO: 234921 - DNA, 15 bp, Homo sapiens
ggatagctgccccac

SEQ ID NO: 234922 - DNA, 15 bp, Homo sapiens
gggatagctgcccca

SEQ ID NO: 234923 - DNA, 15 bp, Homo sapiens
ggggatagctgcccc

SEQ ID NO: 234924 - DNA, 15 bp, Homo sapiens
gggggatagctgccc

SEQ ID NO: 234925 - DNA, 15 bp, Homo sapiens
cgggggatagctgcc

SEQ ID NO: 234926 - DNA, 15 bp, Homo sapiens
ccgggggatagctgc

SEQ ID NO: 234927 - DNA, 15 bp, Homo sapiens
cccgggggatagctg

SEQ ID NO: 234928 - DNA, 15 bp, Homo sapiens
tcccgggggatagct

SEQ ID NO: 234929 - DNA, 15 bp, Homo sapiens
gtcccgggggatagc

SEQ ID NO: 234930 - DNA, 15 bp, Homo sapiens
ggtcccgggggatag

SEQ ID NO: 234931 - DNA, 15 bp, Homo sapiens
cggtcccgggggata

SEQ ID NO: 234932 - DNA, 15 bp, Homo sapiens
tcggtcccgggggat

SEQ ID NO: 234933 - DNA, 15 bp, Homo sapiens
gtcggtcccggggga

SEQ ID NO: 234934 - DNA, 15 bp, Homo sapiens
ggtcggtcccggggg

SEQ ID NO: 234935 - DNA, 15 bp, Homo sapiens
gggtcggtcccgggg

SEQ ID NO: 234936 - DNA, 15 bp, Homo sapiens
ggggtcggtcccggg

SEQ ID NO: 234937 - DNA, 15 bp, Homo sapiens
gggggtcggtcccgg

SEQ ID NO: 234938 - DNA, 15 bp, Homo sapiens
agggggtcggtcccg

SEQ ID NO: 234939 - DNA, 15 bp, Homo sapiens
cagggggtcggtccc

SEQ ID NO: 234940 - DNA, 15 bp, Homo sapiens
ccagggggtcggtcc

SEQ ID NO: 234941 - DNA, 15 bp, Homo sapiens
cccagggggtcggtc

SEQ ID NO: 234942 - DNA, 15 bp, Homo sapiens
ccccagggggtcggt

SEQ ID NO: 234943 - DNA, 15 bp, Homo sapiens
accccagggggtcgg

SEQ ID NO: 234944 - DNA, 15 bp, Homo sapiens
caccccagggggtcg

SEQ ID NO: 234945 - DNA, 15 bp, Homo sapiens
ccaccccagggggtc

SEQ ID NO: 234946 - DNA, 15 bp, Homo sapiens
gccaccccagggggt

SEQ ID NO: 234947 - DNA, 15 bp, Homo sapiens
ggccaccccaggggg

SEQ ID NO: 234948 - DNA, 15 bp, Homo sapiens
aggccaccccagggg

SEQ ID NO: 234949 - DNA, 15 bp, Homo sapiens
gaggccaccccaggg

SEQ ID NO: 234950 - DNA, 15 bp, Homo sapiens
cgaggccaccccagg

SEQ ID NO: 234951 - DNA, 15 bp, Homo sapiens
gcgaggccaccccag

SEQ ID NO: 234952 - DNA, 15 bp, Homo sapiens
agcgaggccacccca

SEQ ID NO: 234953 - DNA, 15 bp, Homo sapiens
aagcgaggccacccc

SEQ ID NO: 234954 - DNA, 15 bp, Homo sapiens
gaagcgaggccaccc

SEQ ID NO: 234955 - DNA, 15 bp, Homo sapiens
agaagcgaggccacc

SEQ ID NO: 234956 - DNA, 15 bp, Homo sapiens
aagaagcgaggccac

SEQ ID NO: 234957 - DNA, 15 bp, Homo sapiens
gaagaagcgaggcca

SEQ ID NO: 234958 - DNA, 15 bp, Homo sapiens
tgaagaagcgaggcc

SEQ ID NO: 234959 - DNA, 15 bp, Homo sapiens
ctgaagaagcgaggc

SEQ ID NO: 234960 - DNA, 15 bp, Homo sapiens
tctgaagaagcgagg

SEQ ID NO: 234961 - DNA, 15 bp, Homo sapiens
ctctgaagaagcgag

SEQ ID NO: 234962 - DNA, 15 bp, Homo sapiens
cctctgaagaagcga

SEQ ID NO: 234963 - DNA, 15 bp, Homo sapiens
gcctctgaagaagcg

SEQ ID NO: 234964 - DNA, 15 bp, Homo sapiens
agcctctgaagaagc

SEQ ID NO: 234965 - DNA, 15 bp, Homo sapiens
cagcctctgaagaag

SEQ ID NO: 234966 - DNA, 15 bp, Homo sapiens
acagcctctgaagaa

SEQ ID NO: 234967 - DNA, 15 bp, Homo sapiens
cacagcctctgaaga

SEQ ID NO: 234968 - DNA, 15 bp, Homo sapiens
tcacagcctctgaag

SEQ ID NO: 234969 - DNA, 15 bp, Homo sapiens
ttcacagcctctgaa

SEQ ID NO: 234970 - DNA, 15 bp, Homo sapiens
attcacagcctctga

SEQ ID NO: 234971 - DNA, 15 bp, Homo sapiens
cattcacagcctctg

SEQ ID NO: 234972 - DNA, 15 bp, Homo sapiens
ccattcacagcctct

SEQ ID NO: 234973 - DNA, 15 bp, Homo sapiens
gccattcacagcctc

SEQ ID NO: 234974 - DNA, 15 bp, Homo sapiens
agccattcacagcct

SEQ ID NO: 234975 - DNA, 15 bp, Homo sapiens
aagccattcacagcc

SEQ ID NO: 234976 - DNA, 15 bp, Homo sapiens
gaagccattcacagc

SEQ ID NO: 234977 - DNA, 15 bp, Homo sapiens
cgaagccattcacag

SEQ ID NO: 234978 - DNA, 15 bp, Homo sapiens
ccgaagccattcaca

SEQ ID NO: 234979 - DNA, 15 bp, Homo sapiens
accgaagccattcac

SEQ ID NO: 234980 - DNA, 15 bp, Homo sapiens
aaccgaagccattca

SEQ ID NO: 234981 - DNA, 15 bp, Homo sapiens
gaaccgaagccattc

SEQ ID NO: 234982 - DNA, 15 bp, Homo sapiens
tgaaccgaagccatt

SEQ ID NO: 234983 - DNA, 15 bp, Homo sapiens
ctgaaccgaagccat

SEQ ID NO: 234984 - DNA, 15 bp, Homo sapiens
gctgaaccgaagcca

SEQ ID NO: 234985 - DNA, 15 bp, Homo sapiens
agctgaaccgaagcc

SEQ ID NO: 234986 - DNA, 15 bp, Homo sapiens
cagctgaaccgaagc

SEQ ID NO: 234987 - DNA, 15 bp, Homo sapiens
acagctgaaccgaag

SEQ ID NO: 234988 - DNA, 15 bp, Homo sapiens
gacagctgaaccgaa

SEQ ID NO: 234989 - DNA, 15 bp, Homo sapiens
ggacagctgaaccga

SEQ ID NO: 234990 - DNA, 15 bp, Homo sapiens
tggacagctgaaccg

SEQ ID NO: 234991 - DNA, 15 bp, Homo sapiens
ttggacagctgaacc

SEQ ID NO: 234992 - DNA, 15 bp, Homo sapiens
cttggacagctgaac

SEQ ID NO: 234993 - DNA, 15 bp, Homo sapiens
gcttggacagctgaa

SEQ ID NO: 234994 - DNA, 15 bp, Homo sapiens
cgcttggacagctga

SEQ ID NO: 234995 - DNA, 15 bp, Homo sapiens
ccgcttggacagctg

SEQ ID NO: 234996 - DNA, 15 bp, Homo sapiens
gccgcttggacagct

SEQ ID NO: 234997 - DNA, 15 bp, Homo sapiens
cgccgcttggacagc

SEQ ID NO: 234998 - DNA, 15 bp, Homo sapiens
tcgccgcttggacag

SEQ ID NO: 234999 - DNA, 15 bp, Homo sapiens
atcgccgcttggaca

SEQ ID NO: 235000 - DNA, 15 bp, Homo sapiens
aatcgccgcttggac

SEQ ID NO: 235001 - DNA, 15 bp, Homo sapiens
aaatcgccgcttgga

SEQ ID NO: 235002 - DNA, 15 bp, Homo sapiens
aaaatcgccgcttgg

SEQ ID NO: 235003 - DNA, 15 bp, Homo sapiens
aaaaatcgccgcttg

SEQ ID NO: 235004 - DNA, 15 bp, Homo sapiens
gaaaaatcgccgctt

SEQ ID NO: 235005 - DNA, 15 bp, Homo sapiens
ggaaaaatcgccgct

SEQ ID NO: 235006 - DNA, 15 bp, Homo sapiens
aggaaaaatcgccgc

SEQ ID NO: 235007 - DNA, 15 bp, Homo sapiens
gaggaaaaatcgccg

SEQ ID NO: 235008 - DNA, 15 bp, Homo sapiens
agaggaaaaatcgcc

SEQ ID NO: 235009 - DNA, 15 bp, Homo sapiens
cagaggaaaaatcgc

SEQ ID NO: 235010 - DNA, 15 bp, Homo sapiens
ccagaggaaaaatcg

SEQ ID NO: 235011 - DNA, 15 bp, Homo sapiens
cccagaggaaaaatc

SEQ ID NO: 235012 - DNA, 15 bp, Homo sapiens
acccagaggaaaaat

SEQ ID NO: 235013 - DNA, 15 bp, Homo sapiens
cacccagaggaaaaa

SEQ ID NO: 235014 - DNA, 15 bp, Homo sapiens
tcacccagaggaaaa

SEQ ID NO: 235015 - DNA, 15 bp, Homo sapiens
ttcacccagaggaaa

SEQ ID NO: 235016 - DNA, 15 bp, Homo sapiens
tttcacccagaggaa

SEQ ID NO: 235017 - DNA, 15 bp, Homo sapiens
atttcacccagagga

SEQ ID NO: 235018 - DNA, 15 bp, Homo sapiens
catttcacccagagg

SEQ ID NO: 235019 - DNA, 15 bp, Homo sapiens
ccatttcacccagag

SEQ ID NO: 235020 - DNA, 15 bp, Homo sapiens
tccatttcacccaga

SEQ ID NO: 235021 - DNA, 15 bp, Homo sapiens
atccatttcacccag

SEQ ID NO: 235022 - DNA, 15 bp, Homo sapiens
aatccatttcaccca

SEQ ID NO: 235023 - DNA, 15 bp, Homo sapiens
taatccatttcaccc

SEQ ID NO: 235024 - DNA, 15 bp, Homo sapiens
ctaatccatttcacc

SEQ ID NO: 235025 - DNA, 15 bp, Homo sapiens
tctaatccatttcac

SEQ ID NO: 235026 - DNA, 15 bp, Homo sapiens
atctaatccatttca

SEQ ID NO: 235027 - DNA, 15 bp, Homo sapiens
aatctaatccatttc

SEQ ID NO: 235028 - DNA, 15 bp, Homo sapiens
aaatctaatccattt

SEQ ID NO: 235029 - DNA, 15 bp, Homo sapiens
aaaatctaatccatt

SEQ ID NO: 235030 - DNA, 15 bp, Homo sapiens
taaaatctaatccat

SEQ ID NO: 235031 - DNA, 15 bp, Homo sapiens
ctaaaatctaatcca

SEQ ID NO: 235032 - DNA, 15 bp, Homo sapiens
tctaaaatctaatcc

SEQ ID NO: 235033 - DNA, 15 bp, Homo sapiens
atctaaaatctaatc

SEQ ID NO: 235034 - DNA, 15 bp, Homo sapiens
aatctaaaatctaat

SEQ ID NO: 235035 - DNA, 15 bp, Homo sapiens
aaatctaaaatctaa

SEQ ID NO: 235036 - DNA, 15 bp, Homo sapiens
gaaatctaaaatcta

SEQ ID NO: 235037 - DNA, 15 bp, Homo sapiens
ggaaatctaaaatct

SEQ ID NO: 235038 - DNA, 15 bp, Homo sapiens
tggaaatctaaaatc

SEQ ID NO: 235039 - DNA, 15 bp, Homo sapiens
gtggaaatctaaaat

SEQ ID NO: 235040 - DNA, 15 bp, Homo sapiens
tgtggaaatctaaaa

SEQ ID NO: 235041 - DNA, 15 bp, Homo sapiens
ttgtggaaatctaaa

SEQ ID NO: 235042 - DNA, 15 bp, Homo sapiens
cttgtggaaatctaa

SEQ ID NO: 235043 - DNA, 15 bp, Homo sapiens
tcttgtggaaatcta

SEQ ID NO: 235044 - DNA, 15 bp, Homo sapiens
ctcttgtggaaatct

SEQ ID NO: 235045 - DNA, 15 bp, Homo sapiens
cctcttgtggaaatc

SEQ ID NO: 235046 - DNA, 15 bp, Homo sapiens
gcctcttgtggaaat

SEQ ID NO: 235047 - DNA, 15 bp, Homo sapiens
agcctcttgtggaaa

SEQ ID NO: 235048 - DNA, 15 bp, Homo sapiens
cagcctcttgtggaa

SEQ ID NO: 235049 - DNA, 15 bp, Homo sapiens
ccagcctcttgtgga

SEQ ID NO: 235050 - DNA, 15 bp, Homo sapiens
accagcctcttgtgg

SEQ ID NO: 235051 - DNA, 15 bp, Homo sapiens
aaccagcctcttgtg

SEQ ID NO: 235052 - DNA, 15 bp, Homo sapiens
taaccagcctcttgt

SEQ ID NO: 235053 - DNA, 15 bp, Homo sapiens
ctaaccagcctcttg

SEQ ID NO: 235054 - DNA, 15 bp, Homo sapiens
actaaccagcctctt

SEQ ID NO: 235055 - DNA, 15 bp, Homo sapiens
cactaaccagcctct

SEQ ID NO: 235056 - DNA, 15 bp, Homo sapiens
gcactaaccagcctc

SEQ ID NO: 235057 - DNA, 15 bp, Homo sapiens
tgcactaaccagcct

SEQ ID NO: 235058 - DNA, 15 bp, Homo sapiens
atgcactaaccagcc

SEQ ID NO: 235059 - DNA, 15 bp, Homo sapiens
catgcactaaccagc

SEQ ID NO: 235060 - DNA, 15 bp, Homo sapiens
tcatgcactaaccag

SEQ ID NO: 235061 - DNA, 15 bp, Homo sapiens
atcatgcactaacca

SEQ ID NO: 235062 - DNA, 15 bp, Homo sapiens
gatcatgcactaacc

SEQ ID NO: 235063 - DNA, 15 bp, Homo sapiens
ggatcatgcactaac

SEQ ID NO: 235064 - DNA, 15 bp, Homo sapiens
aggatcatgcactaa

SEQ ID NO: 235065 - DNA, 15 bp, Homo sapiens
caggatcatgcacta

SEQ ID NO: 235066 - DNA, 15 bp, Homo sapiens
tcaggatcatgcact

SEQ ID NO: 235067 - DNA, 15 bp, Homo sapiens
ctcaggatcatgcac

SEQ ID NO: 235068 - DNA, 15 bp, Homo sapiens
actcaggatcatgca

SEQ ID NO: 235069 - DNA, 15 bp, Homo sapiens
aactcaggatcatgc

SEQ ID NO: 235070 - DNA, 15 bp, Homo sapiens
taactcaggatcatg

SEQ ID NO: 235071 - DNA, 15 bp, Homo sapiens
ctaactcaggatcat

SEQ ID NO: 235072 - DNA, 15 bp, Homo sapiens
tctaactcaggatca

SEQ ID NO: 235073 - DNA, 15 bp, Homo sapiens
ctctaactcaggatc

SEQ ID NO: 235074 - DNA, 15 bp, Homo sapiens
gctctaactcaggat

SEQ ID NO: 235075 - DNA, 15 bp, Homo sapiens
agctctaactcagga

SEQ ID NO: 235076 - DNA, 15 bp, Homo sapiens
aagctctaactcagg

SEQ ID NO: 235077 - DNA, 15 bp, Homo sapiens
aaagctctaactcag

SEQ ID NO: 235078 - DNA, 15 bp, Homo sapiens
aaaagctctaactca

SEQ ID NO: 235079 - DNA, 15 bp, Homo sapiens
aaaaagctctaactc

SEQ ID NO: 235080 - DNA, 15 bp, Homo sapiens
taaaaagctctaact

SEQ ID NO: 235081 - DNA, 15 bp, Homo sapiens
ctaaaaagctctaac

SEQ ID NO: 235082 - DNA, 15 bp, Homo sapiens
cctaaaaagctctaa

SEQ ID NO: 235083 - DNA, 15 bp, Homo sapiens
acctaaaaagctcta

SEQ ID NO: 235084 - DNA, 15 bp, Homo sapiens
cacctaaaaagctct

SEQ ID NO: 235085 - DNA, 15 bp, Homo sapiens
ccacctaaaaagctc

SEQ ID NO: 235086 - DNA, 15 bp, Homo sapiens
gccacctaaaaagct

SEQ ID NO: 235087 - DNA, 15 bp, Homo sapiens
agccacctaaaaagc

SEQ ID NO: 235088 - DNA, 15 bp, Homo sapiens
aagccacctaaaaag

SEQ ID NO: 235089 - DNA, 15 bp, Homo sapiens
aaagccacctaaaaa

SEQ ID NO: 235090 - DNA, 15 bp, Homo sapiens
taaagccacctaaaa

SEQ ID NO: 235091 - DNA, 15 bp, Homo sapiens
ttaaagccacctaaa

SEQ ID NO: 235092 - DNA, 15 bp, Homo sapiens
tttaaagccacctaa

SEQ ID NO: 235093 - DNA, 15 bp, Homo sapiens
atttaaagccaccta

SEQ ID NO: 235094 - DNA, 15 bp, Homo sapiens
aatttaaagccacct

SEQ ID NO: 235095 - DNA, 15 bp, Homo sapiens
taatttaaagccacc

SEQ ID NO: 235096 - DNA, 15 bp, Homo sapiens
ctaatttaaagccac

SEQ ID NO: 235097 - DNA, 15 bp, Homo sapiens
actaatttaaagcca

SEQ ID NO: 235098 - DNA, 15 bp, Homo sapiens
aactaatttaaagcc

SEQ ID NO: 235099 - DNA, 15 bp, Homo sapiens
caactaatttaaagc

SEQ ID NO: 235100 - DNA, 15 bp, Homo sapiens
gcaactaatttaaag

SEQ ID NO: 235101 - DNA, 15 bp, Homo sapiens
tgcaactaatttaaa

SEQ ID NO: 235102 - DNA, 15 bp, Homo sapiens
ctgcaactaatttaa

SEQ ID NO: 235103 - DNA, 15 bp, Homo sapiens
tctgcaactaattta

SEQ ID NO: 235104 - DNA, 15 bp, Homo sapiens
ctctgcaactaattt

SEQ ID NO: 235105 - DNA, 15 bp, Homo sapiens
tctctgcaactaatt

SEQ ID NO: 235106 - DNA, 15 bp, Homo sapiens
ctctctgcaactaat

SEQ ID NO: 235107 - DNA, 15 bp, Homo sapiens
tctctctgcaactaa

SEQ ID NO: 235108 - DNA, 15 bp, Homo sapiens
gtctctctgcaacta

SEQ ID NO: 235109 - DNA, 15 bp, Homo sapiens
tgtctctctgcaact

SEQ ID NO: 235110 - DNA, 15 bp, Homo sapiens
ctgtctctctgcaac

SEQ ID NO: 235111 - DNA, 15 bp, Homo sapiens
gctgtctctctgcaa

SEQ ID NO: 235112 - DNA, 15 bp, Homo sapiens
ggctgtctctctgca

SEQ ID NO: 235113 - DNA, 15 bp, Homo sapiens
aggctgtctctctgc

SEQ ID NO: 235114 - DNA, 15 bp, Homo sapiens
gaggctgtctctctg

SEQ ID NO: 235115 - DNA, 15 bp, Homo sapiens
cgaggctgtctctct

SEQ ID NO: 235116 - DNA, 15 bp, Homo sapiens
gcgaggctgtctctc

SEQ ID NO: 235117 - DNA, 15 bp, Homo sapiens
ggcgaggctgtctct

SEQ ID NO: 235118 - DNA, 15 bp, Homo sapiens
gggcgaggctgtctc

SEQ ID NO: 235119 - DNA, 15 bp, Homo sapiens
agggcgaggctgtct

SEQ ID NO: 235120 - DNA, 15 bp, Homo sapiens
tagggcgaggctgtc

SEQ ID NO: 235121 - DNA, 15 bp, Homo sapiens
ctagggcgaggctgt

SEQ ID NO: 235122 - DNA, 15 bp, Homo sapiens
tctagggcgaggctg

SEQ ID NO: 235123 - DNA, 15 bp, Homo sapiens
gtctagggcgaggct

SEQ ID NO: 235124 - DNA, 15 bp, Homo sapiens
tgtctagggcgaggc

SEQ ID NO: 235125 - DNA, 15 bp, Homo sapiens
ttgtctagggcgagg

SEQ ID NO: 235126 - DNA, 15 bp, Homo sapiens
gttgtctagggcgag

SEQ ID NO: 235127 - DNA, 15 bp, Homo sapiens
tgttgtctagggcga

SEQ ID NO: 235128 - DNA, 15 bp, Homo sapiens
ctgttgtctagggcg

SEQ ID NO: 235129 - DNA, 15 bp, Homo sapiens
gctgttgtctagggc

SEQ ID NO: 235130 - DNA, 15 bp, Homo sapiens
agctgttgtctaggg

SEQ ID NO: 235131 - DNA, 15 bp, Homo sapiens
tagctgttgtctagg

SEQ ID NO: 235132 - DNA, 15 bp, Homo sapiens
gtagctgttgtctag

SEQ ID NO: 235133 - DNA, 15 bp, Homo sapiens
tgtagctgttgtcta

SEQ ID NO: 235134 - DNA, 15 bp, Homo sapiens
atgtagctgttgtct

SEQ ID NO: 235135 - DNA, 15 bp, Homo sapiens
catgtagctgttgtc

SEQ ID NO: 235136 - DNA, 15 bp, Homo sapiens
ccatgtagctgttgt

SEQ ID NO: 235137 - DNA, 15 bp, Homo sapiens
gccatgtagctgttg

SEQ ID NO: 235138 - DNA, 15 bp, Homo sapiens
ggccatgtagctgtt

SEQ ID NO: 235139 - DNA, 15 bp, Homo sapiens
gggccatgtagctgt

SEQ ID NO: 235140 - DNA, 15 bp, Homo sapiens
agggccatgtagctg

SEQ ID NO: 235141 - DNA, 15 bp, Homo sapiens
aagggccatgtagct

SEQ ID NO: 235142 - DNA, 15 bp, Homo sapiens
aaagggccatgtagc

SEQ ID NO: 235143 - DNA, 15 bp, Homo sapiens
gaaagggccatgtag

SEQ ID NO: 235144 - DNA, 15 bp, Homo sapiens
ggaaagggccatgta

SEQ ID NO: 235145 - DNA, 15 bp, Homo sapiens
gggaaagggccatgt

SEQ ID NO: 235146 - DNA, 15 bp, Homo sapiens
agggaaagggccatg

SEQ ID NO: 235147 - DNA, 15 bp, Homo sapiens
gagggaaagggccat

SEQ ID NO: 235148 - DNA, 15 bp, Homo sapiens
ggagggaaagggcca

SEQ ID NO: 235149 - DNA, 15 bp, Homo sapiens
aggagggaaagggcc

SEQ ID NO: 235150 - DNA, 15 bp, Homo sapiens
caggagggaaagggc

SEQ ID NO: 235151 - DNA, 15 bp, Homo sapiens
tcaggagggaaaggg

SEQ ID NO: 235152 - DNA, 15 bp, Homo sapiens
ctcaggagggaaagg

SEQ ID NO: 235153 - DNA, 15 bp, Homo sapiens
tctcaggagggaaag

SEQ ID NO: 235154 - DNA, 15 bp, Homo sapiens
ttctcaggagggaaa

SEQ ID NO: 235155 - DNA, 15 bp, Homo sapiens
gttctcaggagggaa

SEQ ID NO: 235156 - DNA, 15 bp, Homo sapiens
ggttctcaggaggga

SEQ ID NO: 235157 - DNA, 15 bp, Homo sapiens
tggttctcaggaggg

SEQ ID NO: 235158 - DNA, 15 bp, Homo sapiens
ctggttctcaggagg

SEQ ID NO: 235159 - DNA, 15 bp, Homo sapiens
gctggttctcaggag

SEQ ID NO: 235160 - DNA, 15 bp, Homo sapiens
ggctggttctcagga

SEQ ID NO: 235161 - DNA, 15 bp, Homo sapiens
aggctggttctcagg

SEQ ID NO: 235162 - DNA, 15 bp, Homo sapiens
taggctggttctcag

SEQ ID NO: 235163 - DNA, 15 bp, Homo sapiens
ctaggctggttctca

SEQ ID NO: 235164 - DNA, 15 bp, Homo sapiens
gctaggctggttctc

SEQ ID NO: 235165 - DNA, 15 bp, Homo sapiens
ggctaggctggttct

SEQ ID NO: 235166 - DNA, 15 bp, Homo sapiens
aggctaggctggttc

SEQ ID NO: 235167 - DNA, 15 bp, Homo sapiens
taggctaggctggtt

SEQ ID NO: 235168 - DNA, 15 bp, Homo sapiens
ctaggctaggctggt

SEQ ID NO: 235169 - DNA, 15 bp, Homo sapiens
tctaggctaggctgg

SEQ ID NO: 235170 - DNA, 15 bp, Homo sapiens
ttctaggctaggctg

SEQ ID NO: 235171 - DNA, 15 bp, Homo sapiens
tttctaggctaggct

SEQ ID NO: 235172 - DNA, 15 bp, Homo sapiens
ttttctaggctaggc

SEQ ID NO: 235173 - DNA, 15 bp, Homo sapiens
cttttctaggctagg

SEQ ID NO: 235174 - DNA, 15 bp, Homo sapiens
ccttttctaggctag

SEQ ID NO: 235175 - DNA, 15 bp, Homo sapiens
tccttttctaggcta

SEQ ID NO: 235176 - DNA, 15 bp, Homo sapiens
atccttttctaggct

SEQ ID NO: 235177 - DNA, 15 bp, Homo sapiens
aatccttttctaggc

SEQ ID NO: 235178 - DNA, 15 bp, Homo sapiens
caatccttttctagg

SEQ ID NO: 235179 - DNA, 15 bp, Homo sapiens
ccaatccttttctag

SEQ ID NO: 235180 - DNA, 15 bp, Homo sapiens
cccaatccttttcta

SEQ ID NO: 235181 - DNA, 15 bp, Homo sapiens
tcccaatccttttct

SEQ ID NO: 235182 - DNA, 15 bp, Homo sapiens
atcccaatccttttc

SEQ ID NO: 235183 - DNA, 15 bp, Homo sapiens
aatcccaatcctttt

SEQ ID NO: 235184 - DNA, 15 bp, Homo sapiens
caatcccaatccttt

SEQ ID NO: 235185 - DNA, 15 bp, Homo sapiens
gcaatcccaatcctt

SEQ ID NO: 235186 - DNA, 15 bp, Homo sapiens
ggcaatcccaatcct

SEQ ID NO: 235187 - DNA, 15 bp, Homo sapiens
aggcaatcccaatcc

SEQ ID NO: 235188 - DNA, 15 bp, Homo sapiens
caggcaatcccaatc

SEQ ID NO: 235189 - DNA, 15 bp, Homo sapiens
tcaggcaatcccaat

SEQ ID NO: 235190 - DNA, 15 bp, Homo sapiens
atcaggcaatcccaa

SEQ ID NO: 235191 - DNA, 15 bp, Homo sapiens
catcaggcaatccca

SEQ ID NO: 235192 - DNA, 15 bp, Homo sapiens
tcatcaggcaatccc

SEQ ID NO: 235193 - DNA, 15 bp, Homo sapiens
ttcatcaggcaatcc

SEQ ID NO: 235194 - DNA, 15 bp, Homo sapiens
gttcatcaggcaatc

SEQ ID NO: 235195 - DNA, 15 bp, Homo sapiens
tgttcatcaggcaat

SEQ ID NO: 235196 - DNA, 15 bp, Homo sapiens
gtgttcatcaggcaa

SEQ ID NO: 235197 - DNA, 15 bp, Homo sapiens
tgtgttcatcaggca

SEQ ID NO: 235198 - DNA, 15 bp, Homo sapiens
ttgtgttcatcaggc

SEQ ID NO: 235199 - DNA, 15 bp, Homo sapiens
cttgtgttcatcagg

SEQ ID NO: 235200 - DNA, 15 bp, Homo sapiens
ccttgtgttcatcag

SEQ ID NO: 235201 - DNA, 15 bp, Homo sapiens
tccttgtgttcatca

SEQ ID NO: 235202 - DNA, 15 bp, Homo sapiens
atccttgtgttcatc

SEQ ID NO: 235203 - DNA, 15 bp, Homo sapiens
aatccttgtgttcat

SEQ ID NO: 235204 - DNA, 15 bp, Homo sapiens
caatccttgtgttca

SEQ ID NO: 235205 - DNA, 15 bp, Homo sapiens
gcaatccttgtgttc

SEQ ID NO: 235206 - DNA, 15 bp, Homo sapiens
tgcaatccttgtgtt

SEQ ID NO: 235207 - DNA, 15 bp, Homo sapiens
ctgcaatccttgtgt

SEQ ID NO: 235208 - DNA, 15 bp, Homo sapiens
cctgcaatccttgtg

SEQ ID NO: 235209 - DNA, 15 bp, Homo sapiens
tcctgcaatccttgt

SEQ ID NO: 235210 - DNA, 15 bp, Homo sapiens
ttcctgcaatccttg

SEQ ID NO: 235211 - DNA, 15 bp, Homo sapiens
tttcctgcaatcctt

SEQ ID NO: 235212 - DNA, 15 bp, Homo sapiens
gtttcctgcaatcct

SEQ ID NO: 235213 - DNA, 15 bp, Homo sapiens
agtttcctgcaatcc

SEQ ID NO: 235214 - DNA, 15 bp, Homo sapiens
aagtttcctgcaatc

SEQ ID NO: 235215 - DNA, 15 bp, Homo sapiens
aaagtttcctgcaat

SEQ ID NO: 235216 - DNA, 15 bp, Homo sapiens
aaaagtttcctgcaa

SEQ ID NO: 235217 - DNA, 15 bp, Homo sapiens
aaaaagtttcctgca

SEQ ID NO: 235218 - DNA, 15 bp, Homo sapiens
aaaaaagtttcctgc

SEQ ID NO: 235219 - DNA, 15 bp, Homo sapiens
aaaaaaagtttcctg

SEQ ID NO: 235220 - DNA, 15 bp, Homo sapiens
aaaaaaaagtttcct

SEQ ID NO: 235221 - DNA, 15 bp, Homo sapiens
aaaaaaaaagtttcc

SEQ ID NO: 235222 - DNA, 15 bp, Homo sapiens
taaaaaaaaagtttc

SEQ ID NO: 235223 - DNA, 15 bp, Homo sapiens
ttaaaaaaaaagttt

SEQ ID NO: 235224 - DNA, 15 bp, Homo sapiens
attaaaaaaaaagtt

SEQ ID NO: 235225 - DNA, 15 bp, Homo sapiens
aattaaaaaaaaagt

SEQ ID NO: 235226 - DNA, 15 bp, Homo sapiens
caattaaaaaaaaag

SEQ ID NO: 235227 - DNA, 15 bp, Homo sapiens
ccaattaaaaaaaaa

SEQ ID NO: 235228 - DNA, 15 bp, Homo sapiens
gccaattaaaaaaaa

SEQ ID NO: 235229 - DNA, 15 bp, Homo sapiens
tgccaattaaaaaaa

SEQ ID NO: 235230 - DNA, 15 bp, Homo sapiens
ttgccaattaaaaaa

SEQ ID NO: 235231 - DNA, 15 bp, Homo sapiens
cttgccaattaaaaa

SEQ ID NO: 235232 - DNA, 15 bp, Homo sapiens
ccttgccaattaaaa

SEQ ID NO: 235233 - DNA, 15 bp, Homo sapiens
cccttgccaattaaa

SEQ ID NO: 235234 - DNA, 15 bp, Homo sapiens
ccccttgccaattaa

SEQ ID NO: 235235 - DNA, 15 bp, Homo sapiens
cccccttgccaatta

SEQ ID NO: 235236 - DNA, 15 bp, Homo sapiens
acccccttgccaatt

SEQ ID NO: 235237 - DNA, 15 bp, Homo sapiens
aacccccttgccaat

SEQ ID NO: 235238 - DNA, 15 bp, Homo sapiens
caacccccttgccaa

SEQ ID NO: 235239 - DNA, 15 bp, Homo sapiens
ccaacccccttgcca

SEQ ID NO: 235240 - DNA, 15 bp, Homo sapiens
gccaacccccttgcc

SEQ ID NO: 235241 - DNA, 15 bp, Homo sapiens
agccaacccccttgc

SEQ ID NO: 235242 - DNA, 15 bp, Homo sapiens
aagccaacccccttg

SEQ ID NO: 235243 - DNA, 15 bp, Homo sapiens
aaagccaaccccctt

SEQ ID NO: 235244 - DNA, 15 bp, Homo sapiens
caaagccaaccccct

SEQ ID NO: 235245 - DNA, 15 bp, Homo sapiens
tcaaagccaaccccc

SEQ ID NO: 235246 - DNA, 15 bp, Homo sapiens
gtcaaagccaacccc

SEQ ID NO: 235247 - DNA, 15 bp, Homo sapiens
agtcaaagccaaccc

SEQ ID NO: 235248 - DNA, 15 bp, Homo sapiens
cagtcaaagccaacc

SEQ ID NO: 235249 - DNA, 15 bp, Homo sapiens
ccagtcaaagccaac

SEQ ID NO: 235250 - DNA, 15 bp, Homo sapiens
tccagtcaaagccaa

SEQ ID NO: 235251 - DNA, 15 bp, Homo sapiens
atccagtcaaagcca

SEQ ID NO: 235252 - DNA, 15 bp, Homo sapiens
catccagtcaaagcc

SEQ ID NO: 235253 - DNA, 15 bp, Homo sapiens
ccatccagtcaaagc

SEQ ID NO: 235254 - DNA, 15 bp, Homo sapiens
tccatccagtcaaag

SEQ ID NO: 235255 - DNA, 15 bp, Homo sapiens
ctccatccagtcaaa

SEQ ID NO: 235256 - DNA, 15 bp, Homo sapiens
tctccatccagtcaa

SEQ ID NO: 235257 - DNA, 15 bp, Homo sapiens
ctctccatccagtca

SEQ ID NO: 235258 - DNA, 15 bp, Homo sapiens
gctctccatccagtc

SEQ ID NO: 235259 - DNA, 15 bp, Homo sapiens
agctctccatccagt

SEQ ID NO: 235260 - DNA, 15 bp, Homo sapiens
aagctctccatccag

SEQ ID NO: 235261 - DNA, 15 bp, Homo sapiens
aaagctctccatcca

SEQ ID NO: 235262 - DNA, 15 bp, Homo sapiens
caaagctctccatcc

SEQ ID NO: 235263 - DNA, 15 bp, Homo sapiens
tcaaagctctccatc

SEQ ID NO: 235264 - DNA, 15 bp, Homo sapiens
ttcaaagctctccat

SEQ ID NO: 235265 - DNA, 15 bp, Homo sapiens
gttcaaagctctcca

SEQ ID NO: 235266 - DNA, 15 bp, Homo sapiens
agttcaaagctctcc

SEQ ID NO: 235267 - DNA, 15 bp, Homo sapiens
cagttcaaagctctc

SEQ ID NO: 235268 - DNA, 15 bp, Homo sapiens
gcagttcaaagctct

SEQ ID NO: 235269 - DNA, 15 bp, Homo sapiens
ggcagttcaaagctc

SEQ ID NO: 235270 - DNA, 15 bp, Homo sapiens
aggcagttcaaagct

SEQ ID NO: 235271 - DNA, 15 bp, Homo sapiens
aaggcagttcaaagc

SEQ ID NO: 235272 - DNA, 15 bp, Homo sapiens
caaggcagttcaaag

SEQ ID NO: 235273 - DNA, 15 bp, Homo sapiens
tcaaggcagttcaaa

SEQ ID NO: 235274 - DNA, 15 bp, Homo sapiens
ttcaaggcagttcaa

SEQ ID NO: 235275 - DNA, 15 bp, Homo sapiens
tttcaaggcagttca

SEQ ID NO: 235276 - DNA, 15 bp, Homo sapiens
atttcaaggcagttc

SEQ ID NO: 235277 - DNA, 15 bp, Homo sapiens
aatttcaaggcagtt

SEQ ID NO: 235278 - DNA, 15 bp, Homo sapiens
gaatttcaaggcagt

SEQ ID NO: 235279 - DNA, 15 bp, Homo sapiens
tgaatttcaaggcag

SEQ ID NO: 235280 - DNA, 15 bp, Homo sapiens
gtgaatttcaaggca

SEQ ID NO: 235281 - DNA, 15 bp, Homo sapiens
cgtgaatttcaaggc

SEQ ID NO: 235282 - DNA, 15 bp, Homo sapiens
gcgtgaatttcaagg

SEQ ID NO: 235283 - DNA, 15 bp, Homo sapiens
agcgtgaatttcaag

SEQ ID NO: 235284 - DNA, 15 bp, Homo sapiens
cagcgtgaatttcaa

SEQ ID NO: 235285 - DNA, 15 bp, Homo sapiens
acagcgtgaatttca

SEQ ID NO: 235286 - DNA, 15 bp, Homo sapiens
tacagcgtgaatttc

SEQ ID NO: 235287 - DNA, 15 bp, Homo sapiens
ttacagcgtgaattt

SEQ ID NO: 235288 - DNA, 15 bp, Homo sapiens
gttacagcgtgaatt

SEQ ID NO: 235289 - DNA, 15 bp, Homo sapiens
agttacagcgtgaat

SEQ ID NO: 235290 - DNA, 15 bp, Homo sapiens
tagttacagcgtgaa

SEQ ID NO: 235291 - DNA, 15 bp, Homo sapiens
ttagttacagcgtga

SEQ ID NO: 235292 - DNA, 15 bp, Homo sapiens
gttagttacagcgtg

SEQ ID NO: 235293 - DNA, 15 bp, Homo sapiens
tgttagttacagcgt

SEQ ID NO: 235294 - DNA, 15 bp, Homo sapiens
gtgttagttacagcg

SEQ ID NO: 235295 - DNA, 15 bp, Homo sapiens
tgtgttagttacagc

SEQ ID NO: 235296 - DNA, 15 bp, Homo sapiens
gtgtgttagttacag

SEQ ID NO: 235297 - DNA, 15 bp, Homo sapiens
ggtgtgttagttaca

SEQ ID NO: 235298 - DNA, 15 bp, Homo sapiens
tggtgtgttagttac

SEQ ID NO: 235299 - DNA, 15 bp, Homo sapiens
ctggtgtgttagtta

SEQ ID NO: 235300 - DNA, 15 bp, Homo sapiens
actggtgtgttagtt

SEQ ID NO: 235301 - DNA, 15 bp, Homo sapiens
aactggtgtgttagt

SEQ ID NO: 235302 - DNA, 15 bp, Homo sapiens
aaactggtgtgttag

SEQ ID NO: 235303 - DNA, 15 bp, Homo sapiens
gaaactggtgtgtta

SEQ ID NO: 235304 - DNA, 15 bp, Homo sapiens
ggaaactggtgtgtt

SEQ ID NO: 235305 - DNA, 15 bp, Homo sapiens
aggaaactggtgtgt

SEQ ID NO: 235306 - DNA, 15 bp, Homo sapiens
gaggaaactggtgtg

SEQ ID NO: 235307 - DNA, 15 bp, Homo sapiens
agaggaaactggtgt

SEQ ID NO: 235308 - DNA, 15 bp, Homo sapiens
cagaggaaactggtg

SEQ ID NO: 235309 - DNA, 15 bp, Homo sapiens
ccagaggaaactggt

SEQ ID NO: 235310 - DNA, 15 bp, Homo sapiens
cccagaggaaactgg

SEQ ID NO: 235311 - DNA, 15 bp, Homo sapiens
tcccagaggaaactg

SEQ ID NO: 235312 - DNA, 15 bp, Homo sapiens
ctcccagaggaaact

SEQ ID NO: 235313 - DNA, 15 bp, Homo sapiens
cctcccagaggaaac

SEQ ID NO: 235314 - DNA, 15 bp, Homo sapiens
gcctcccagaggaaa

SEQ ID NO: 235315 - DNA, 15 bp, Homo sapiens
ggcctcccagaggaa

SEQ ID NO: 235316 - DNA, 15 bp, Homo sapiens
tggcctcccagagga

SEQ ID NO: 235317 - DNA, 15 bp, Homo sapiens
ctggcctcccagagg

SEQ ID NO: 235318 - DNA, 15 bp, Homo sapiens
tctggcctcccagag

SEQ ID NO: 235319 - DNA, 15 bp, Homo sapiens
ctctggcctcccaga

SEQ ID NO: 235320 - DNA, 15 bp, Homo sapiens
tctctggcctcccag

SEQ ID NO: 235321 - DNA, 15 bp, Homo sapiens
ctctctggcctccca

SEQ ID NO: 235322 - DNA, 15 bp, Homo sapiens
cctctctggcctccc

SEQ ID NO: 235323 - DNA, 15 bp, Homo sapiens
ccctctctggcctcc

SEQ ID NO: 235324 - DNA, 15 bp, Homo sapiens
tccctctctggcctc

SEQ ID NO: 235325 - DNA, 15 bp, Homo sapiens
ctccctctctggcct

SEQ ID NO: 235326 - DNA, 15 bp, Homo sapiens
cctccctctctggcc

SEQ ID NO: 235327 - DNA, 15 bp, Homo sapiens
ccctccctctctggc

SEQ ID NO: 235328 - DNA, 15 bp, Homo sapiens
tccctccctctctgg

SEQ ID NO: 235329 - DNA, 15 bp, Homo sapiens
ctccctccctctctg

SEQ ID NO: 235330 - DNA, 15 bp, Homo sapiens
cctccctccctctct

SEQ ID NO: 235331 - DNA, 15 bp, Homo sapiens
ccctccctccctctc

SEQ ID NO: 235332 - DNA, 15 bp, Homo sapiens
accctccctccctct

SEQ ID NO: 235333 - DNA, 15 bp, Homo sapiens
caccctccctccctc

SEQ ID NO: 235334 - DNA, 15 bp, Homo sapiens
acaccctccctccct

SEQ ID NO: 235335 - DNA, 15 bp, Homo sapiens
tacaccctccctccc

SEQ ID NO: 235336 - DNA, 15 bp, Homo sapiens
ttacaccctccctcc

SEQ ID NO: 235337 - DNA, 15 bp, Homo sapiens
attacaccctccctc

SEQ ID NO: 235338 - DNA, 15 bp, Homo sapiens
cattacaccctccct

SEQ ID NO: 235339 - DNA, 15 bp, Homo sapiens
tcattacaccctccc

SEQ ID NO: 235340 - DNA, 15 bp, Homo sapiens
ttcattacaccctcc

SEQ ID NO: 235341 - DNA, 15 bp, Homo sapiens
tttcattacaccctc

SEQ ID NO: 235342 - DNA, 15 bp, Homo sapiens
atttcattacaccct

SEQ ID NO: 235343 - DNA, 15 bp, Homo sapiens
tatttcattacaccc

SEQ ID NO: 235344 - DNA, 15 bp, Homo sapiens
gtatttcattacacc

SEQ ID NO: 235345 - DNA, 15 bp, Homo sapiens
cgtatttcattacac

SEQ ID NO: 235346 - DNA, 15 bp, Homo sapiens
ccgtatttcattaca

SEQ ID NO: 235347 - DNA, 15 bp, Homo sapiens
tccgtatttcattac

SEQ ID NO: 235348 - DNA, 15 bp, Homo sapiens
atccgtatttcatta

SEQ ID NO: 235349 - DNA, 15 bp, Homo sapiens
catccgtatttcatt

SEQ ID NO: 235350 - DNA, 15 bp, Homo sapiens
tcatccgtatttcat

SEQ ID NO: 235351 - DNA, 15 bp, Homo sapiens
atcatccgtatttca

SEQ ID NO: 235352 - DNA, 15 bp, Homo sapiens
aatcatccgtatttc

SEQ ID NO: 235353 - DNA, 15 bp, Homo sapiens
caatcatccgtattt

SEQ ID NO: 235354 - DNA, 15 bp, Homo sapiens
acaatcatccgtatt

SEQ ID NO: 235355 - DNA, 15 bp, Homo sapiens
aacaatcatccgtat

SEQ ID NO: 235356 - DNA, 15 bp, Homo sapiens
gaacaatcatccgta

SEQ ID NO: 235357 - DNA, 15 bp, Homo sapiens
agaacaatcatccgt

SEQ ID NO: 235358 - DNA, 15 bp, Homo sapiens
aagaacaatcatccg

SEQ ID NO: 235359 - DNA, 15 bp, Homo sapiens
aaagaacaatcatcc

SEQ ID NO: 235360 - DNA, 15 bp, Homo sapiens
aaaagaacaatcatc

SEQ ID NO: 235361 - DNA, 15 bp, Homo sapiens
taaaagaacaatcat

SEQ ID NO: 235362 - DNA, 15 bp, Homo sapiens
ataaaagaacaatca

SEQ ID NO: 235363 - DNA, 15 bp, Homo sapiens
aataaaagaacaatc

SEQ ID NO: 235364 - DNA, 15 bp, Homo sapiens
aaataaaagaacaat

SEQ ID NO: 235365 - DNA, 15 bp, Homo sapiens
aaaataaaagaacaa

SEQ ID NO: 235366 - DNA, 15 bp, Homo sapiens
aaaaataaaagaaca

SEQ ID NO: 235367 - DNA, 15 bp, Homo sapiens
taaaaataaaagaac

SEQ ID NO: 235368 - DNA, 15 bp, Homo sapiens
ataaaaataaaagaa

SEQ ID NO: 235369 - DNA, 15 bp, Homo sapiens
taaataaaaataaaa

SEQ ID NO: 235370 - DNA, 15 bp, Homo sapiens
gtaaataaaaataaa

SEQ ID NO: 235371 - DNA, 15 bp, Homo sapiens
agtaaataaaaataa

SEQ ID NO: 235372 - DNA, 15 bp, Homo sapiens
aagtaaataaaaata

SEQ ID NO: 235373 - DNA, 15 bp, Homo sapiens
taaataagtaaataa

SEQ ID NO: 235374 - DNA, 15 bp, Homo sapiens
ataaataagtaaata

SEQ ID NO: 235375 - DNA, 15 bp, Homo sapiens
aataaataagtaaat

SEQ ID NO: 235376 - DNA, 15 bp, Homo sapiens
aaataaataagtaaa

SEQ ID NO: 235377 - DNA, 15 bp, Homo sapiens
aaaataaataagtaa

SEQ ID NO: 235378 - DNA, 15 bp, Homo sapiens
aaaaataaataagta

SEQ ID NO: 235379 - DNA, 15 bp, Homo sapiens
aaaaaataaataagt

SEQ ID NO: 235380 - DNA, 15 bp, Homo sapiens
taaaaaataaataag

SEQ ID NO: 235381 - DNA, 15 bp, Homo sapiens
ttaaaaaataaataa

SEQ ID NO: 235382 - DNA, 15 bp, Homo sapiens
gttaaaaaataaata

SEQ ID NO: 235383 - DNA, 15 bp, Homo sapiens
agttaaaaaataaat

SEQ ID NO: 235384 - DNA, 15 bp, Homo sapiens
aagttaaaaaataaa

SEQ ID NO: 235385 - DNA, 15 bp, Homo sapiens
aaagttaaaaaataa

SEQ ID NO: 235386 - DNA, 15 bp, Homo sapiens
aaaagttaaaaaata

SEQ ID NO: 235387 - DNA, 15 bp, Homo sapiens
aaaaagttaaaaaat

SEQ ID NO: 235388 - DNA, 15 bp, Homo sapiens
caaaaagttaaaaaa

SEQ ID NO: 235389 - DNA, 15 bp, Homo sapiens
acaaaaagttaaaaa

SEQ ID NO: 235390 - DNA, 15 bp, Homo sapiens
tacaaaaagttaaaa

SEQ ID NO: 235391 - DNA, 15 bp, Homo sapiens
ctacaaaaagttaaa

SEQ ID NO: 235392 - DNA, 15 bp, Homo sapiens
tctacaaaaagttaa

SEQ ID NO: 235393 - DNA, 15 bp, Homo sapiens
ctctacaaaaagtta

SEQ ID NO: 235394 - DNA, 15 bp, Homo sapiens
tctctacaaaaagtt

SEQ ID NO: 235395 - DNA, 15 bp, Homo sapiens
atctctacaaaaagt

SEQ ID NO: 235396 - DNA, 15 bp, Homo sapiens
catctctacaaaaag

SEQ ID NO: 235397 - DNA, 15 bp, Homo sapiens
tcatctctacaaaaa

SEQ ID NO: 235398 - DNA, 15 bp, Homo sapiens
ctcatctctacaaaa

SEQ ID NO: 235399 - DNA, 15 bp, Homo sapiens
cctcatctctacaaa

SEQ ID NO: 235400 - DNA, 15 bp, Homo sapiens
acctcatctctacaa

SEQ ID NO: 235401 - DNA, 15 bp, Homo sapiens
gacctcatctctaca

SEQ ID NO: 235402 - DNA, 15 bp, Homo sapiens
agacctcatctctac

SEQ ID NO: 235403 - DNA, 15 bp, Homo sapiens
gagacctcatctcta

SEQ ID NO: 235404 - DNA, 15 bp, Homo sapiens
cgagacctcatctct

SEQ ID NO: 235405 - DNA, 15 bp, Homo sapiens
gcgagacctcatctc

SEQ ID NO: 235406 - DNA, 15 bp, Homo sapiens
agcgagacctcatct

SEQ ID NO: 235407 - DNA, 15 bp, Homo sapiens
aagcgagacctcatc

SEQ ID NO: 235408 - DNA, 15 bp, Homo sapiens
caagcgagacctcat

SEQ ID NO: 235409 - DNA, 15 bp, Homo sapiens
ccaagcgagacctca

SEQ ID NO: 235410 - DNA, 15 bp, Homo sapiens
accaagcgagacctc

SEQ ID NO: 235411 - DNA, 15 bp, Homo sapiens
aaccaagcgagacct

SEQ ID NO: 235412 - DNA, 15 bp, Homo sapiens
caaccaagcgagacc

SEQ ID NO: 235413 - DNA, 15 bp, Homo sapiens
gcaaccaagcgagac

SEQ ID NO: 235414 - DNA, 15 bp, Homo sapiens
agcaaccaagcgaga

SEQ ID NO: 235415 - DNA, 15 bp, Homo sapiens
gagcaaccaagcgag

SEQ ID NO: 235416 - DNA, 15 bp, Homo sapiens
tgagcaaccaagcga

SEQ ID NO: 235417 - DNA, 15 bp, Homo sapiens
ctgagcaaccaagcg

SEQ ID NO: 235418 - DNA, 15 bp, Homo sapiens
cctgagcaaccaagc

SEQ ID NO: 235419 - DNA, 15 bp, Homo sapiens
gcctgagcaaccaag

SEQ ID NO: 235420 - DNA, 15 bp, Homo sapiens
agcctgagcaaccaa

SEQ ID NO: 235421 - DNA, 15 bp, Homo sapiens
cagcctgagcaacca

SEQ ID NO: 235422 - DNA, 15 bp, Homo sapiens
ccagcctgagcaacc

SEQ ID NO: 235423 - DNA, 15 bp, Homo sapiens
accagcctgagcaac

SEQ ID NO: 235424 - DNA, 15 bp, Homo sapiens
gaccagcctgagcaa

SEQ ID NO: 235425 - DNA, 15 bp, Homo sapiens
agaccagcctgagca

SEQ ID NO: 235426 - DNA, 15 bp, Homo sapiens
aagaccagcctgagc

SEQ ID NO: 235427 - DNA, 15 bp, Homo sapiens
caagaccagcctgag

SEQ ID NO: 235428 - DNA, 15 bp, Homo sapiens
tcaagaccagcctga

SEQ ID NO: 235429 - DNA, 15 bp, Homo sapiens
ttcaagaccagcctg

SEQ ID NO: 235430 - DNA, 15 bp, Homo sapiens
gttcaagaccagcct

SEQ ID NO: 235431 - DNA, 15 bp, Homo sapiens
agttcaagaccagcc

SEQ ID NO: 235432 - DNA, 15 bp, Homo sapiens
gagttcaagaccagc

SEQ ID NO: 235433 - DNA, 15 bp, Homo sapiens
ggagttcaagaccag

SEQ ID NO: 235434 - DNA, 15 bp, Homo sapiens
aggagttcaagacca

SEQ ID NO: 235435 - DNA, 15 bp, Homo sapiens
caggagttcaagacc

SEQ ID NO: 235436 - DNA, 15 bp, Homo sapiens
ccaggagttcaagac

SEQ ID NO: 235437 - DNA, 15 bp, Homo sapiens
gccaggagttcaaga

SEQ ID NO: 235438 - DNA, 15 bp, Homo sapiens
ggccaggagttcaag

SEQ ID NO: 235439 - DNA, 15 bp, Homo sapiens
aggccaggagttcaa

SEQ ID NO: 235440 - DNA, 15 bp, Homo sapiens
gaggccaggagttca

SEQ ID NO: 235441 - DNA, 15 bp, Homo sapiens
tgaggccaggagttc

SEQ ID NO: 235442 - DNA, 15 bp, Homo sapiens
ttgaggccaggagtt

SEQ ID NO: 235443 - DNA, 15 bp, Homo sapiens
cttgaggccaggagt

SEQ ID NO: 235444 - DNA, 15 bp, Homo sapiens
gcttgaggccaggag

SEQ ID NO: 235445 - DNA, 15 bp, Homo sapiens
cgcttgaggccagga

SEQ ID NO: 235446 - DNA, 15 bp, Homo sapiens
tcgcttgaggccagg

SEQ ID NO: 235447 - DNA, 15 bp, Homo sapiens
atcgcttgaggccag

SEQ ID NO: 235448 - DNA, 15 bp, Homo sapiens
gatcgcttgaggcca

SEQ ID NO: 235449 - DNA, 15 bp, Homo sapiens
ggatcgcttgaggcc

SEQ ID NO: 235450 - DNA, 15 bp, Homo sapiens
aggatcgcttgaggc

SEQ ID NO: 235451 - DNA, 15 bp, Homo sapiens
gaggatcgcttgagg

SEQ ID NO: 235452 - DNA, 15 bp, Homo sapiens
ggaggatcgcttgag

SEQ ID NO: 235453 - DNA, 15 bp, Homo sapiens
aggaggatcgcttga

SEQ ID NO: 235454 - DNA, 15 bp, Homo sapiens
taggaggatcgcttg

SEQ ID NO: 235455 - DNA, 15 bp, Homo sapiens
gtaggaggatcgctt

SEQ ID NO: 235456 - DNA, 15 bp, Homo sapiens
ggtaggaggatcgct

SEQ ID NO: 235457 - DNA, 15 bp, Homo sapiens
aggtaggaggatcgc

SEQ ID NO: 235458 - DNA, 15 bp, Homo sapiens
gaggtaggaggatcg

SEQ ID NO: 235459 - DNA, 15 bp, Homo sapiens
tgaggtaggaggatc

SEQ ID NO: 235460 - DNA, 15 bp, Homo sapiens
gggaggctgaggtag

SEQ ID NO: 235461 - DNA, 15 bp, Homo sapiens
tgggaggctgaggta

SEQ ID NO: 235462 - DNA, 15 bp, Homo sapiens
acactttgggaggct

SEQ ID NO: 235463 - DNA, 15 bp, Homo sapiens
aacactttgggaggc

SEQ ID NO: 235464 - DNA, 15 bp, Homo sapiens
caacactttgggagg

SEQ ID NO: 235465 - DNA, 15 bp, Homo sapiens
ccaacactttgggag

SEQ ID NO: 235466 - DNA, 15 bp, Homo sapiens
cccaacactttggga

SEQ ID NO: 235467 - DNA, 15 bp, Homo sapiens
tcccaacactttggg

SEQ ID NO: 235468 - DNA, 15 bp, Homo sapiens
atcccaacactttgg

SEQ ID NO: 235469 - DNA, 15 bp, Homo sapiens
aatcccaacactttg

SEQ ID NO: 235470 - DNA, 15 bp, Homo sapiens
taatcccaacacttt

SEQ ID NO: 235471 - DNA, 15 bp, Homo sapiens
gtaatcccaacactt

SEQ ID NO: 235472 - DNA, 15 bp, Homo sapiens
tgtaatcccaacact

SEQ ID NO: 235473 - DNA, 15 bp, Homo sapiens
ctgtaatcccaacac

SEQ ID NO: 235474 - DNA, 15 bp, Homo sapiens
cctgtaatcccaaca

SEQ ID NO: 235475 - DNA, 15 bp, Homo sapiens
tcctgtaatcccaac

SEQ ID NO: 235476 - DNA, 15 bp, Homo sapiens
ctcctgtaatcccaa

SEQ ID NO: 235477 - DNA, 15 bp, Homo sapiens
actcctgtaatccca

SEQ ID NO: 235478 - DNA, 15 bp, Homo sapiens
cactcctgtaatccc

SEQ ID NO: 235479 - DNA, 15 bp, Homo sapiens
tcactcctgtaatcc

SEQ ID NO: 235480 - DNA, 15 bp, Homo sapiens
ctcactcctgtaatc

SEQ ID NO: 235481 - DNA, 15 bp, Homo sapiens
gctcactcctgtaat

SEQ ID NO: 235482 - DNA, 15 bp, Homo sapiens
ggctcactcctgtaa

SEQ ID NO: 235483 - DNA, 15 bp, Homo sapiens
tggctcactcctgta

SEQ ID NO: 235484 - DNA, 15 bp, Homo sapiens
ggggcgcggtggctc

SEQ ID NO: 235485 - DNA, 15 bp, Homo sapiens
tggggcgcggtggct

SEQ ID NO: 235486 - DNA, 15 bp, Homo sapiens
gtggggcgcggtggc

SEQ ID NO: 235487 - DNA, 15 bp, Homo sapiens
ggtggggcgcggtgg

SEQ ID NO: 235488 - DNA, 15 bp, Homo sapiens
cggtggggcgcggtg

SEQ ID NO: 235489 - DNA, 15 bp, Homo sapiens
ccggtggggcgcggt

SEQ ID NO: 235490 - DNA, 15 bp, Homo sapiens
cccggtggggcgcgg

SEQ ID NO: 235491 - DNA, 15 bp, Homo sapiens
ccccggtggggcgcg

SEQ ID NO: 235492 - DNA, 15 bp, Homo sapiens
tccccggtggggcgc

SEQ ID NO: 235493 - DNA, 15 bp, Homo sapiens
atccccggtggggcg

SEQ ID NO: 235494 - DNA, 15 bp, Homo sapiens
catccccggtggggc

SEQ ID NO: 235495 - DNA, 15 bp, Homo sapiens
tcatccccggtgggg

SEQ ID NO: 235496 - DNA, 15 bp, Homo sapiens
atcatccccggtggg

SEQ ID NO: 235497 - DNA, 15 bp, Homo sapiens
catcatccccggtgg

SEQ ID NO: 235498 - DNA, 15 bp, Homo sapiens
tcatcatccccggtg

SEQ ID NO: 235499 - DNA, 15 bp, Homo sapiens
atcatcatccccggt

SEQ ID NO: 235500 - DNA, 15 bp, Homo sapiens
catcatcatccccgg

SEQ ID NO: 235501 - DNA, 15 bp, Homo sapiens
tcatcatcatccccg

SEQ ID NO: 235502 - DNA, 15 bp, Homo sapiens
atcatcatcatcccc

SEQ ID NO: 235503 - DNA, 15 bp, Homo sapiens
aatcatcatcatccc

SEQ ID NO: 235504 - DNA, 15 bp, Homo sapiens
caatcatcatcatcc

SEQ ID NO: 235505 - DNA, 15 bp, Homo sapiens
gcaatcatcatcatc

SEQ ID NO: 235506 - DNA, 15 bp, Homo sapiens
tgcaatcatcatcat

SEQ ID NO: 235507 - DNA, 15 bp, Homo sapiens
ttgcaatcatcatca

SEQ ID NO: 235508 - DNA, 15 bp, Homo sapiens
tttgcaatcatcatc

SEQ ID NO: 235509 - DNA, 15 bp, Homo sapiens
gtttgcaatcatcat

SEQ ID NO: 235510 - DNA, 15 bp, Homo sapiens
tgtttgcaatcatca

SEQ ID NO: 235511 - DNA, 15 bp, Homo sapiens
atgtttgcaatcatc

SEQ ID NO: 235512 - DNA, 15 bp, Homo sapiens
aatgtttgcaatcat

SEQ ID NO: 235513 - DNA, 15 bp, Homo sapiens
gaatgtttgcaatca

SEQ ID NO: 235514 - DNA, 15 bp, Homo sapiens
agaatgtttgcaatc

SEQ ID NO: 235515 - DNA, 15 bp, Homo sapiens
cagaatgtttgcaat

SEQ ID NO: 235516 - DNA, 15 bp, Homo sapiens
gcagaatgtttgcaa

SEQ ID NO: 235517 - DNA, 15 bp, Homo sapiens
ggcagaatgtttgca

SEQ ID NO: 235518 - DNA, 15 bp, Homo sapiens
tggcagaatgtttgc

SEQ ID NO: 235519 - DNA, 15 bp, Homo sapiens
gtggcagaatgtttg

SEQ ID NO: 235520 - DNA, 15 bp, Homo sapiens
agtggcagaatgttt

SEQ ID NO: 235521 - DNA, 15 bp, Homo sapiens
gagtggcagaatgtt

SEQ ID NO: 235522 - DNA, 15 bp, Homo sapiens
tgagtggcagaatgt

SEQ ID NO: 235523 - DNA, 15 bp, Homo sapiens
ctgagtggcagaatg

SEQ ID NO: 235524 - DNA, 15 bp, Homo sapiens
actgagtggcagaat

SEQ ID NO: 235525 - DNA, 15 bp, Homo sapiens
aactgagtggcagaa

SEQ ID NO: 235526 - DNA, 15 bp, Homo sapiens
aaactgagtggcaga

SEQ ID NO: 235527 - DNA, 15 bp, Homo sapiens
aaaactgagtggcag

SEQ ID NO: 235528 - DNA, 15 bp, Homo sapiens
taaaactgagtggca

SEQ ID NO: 235529 - DNA, 15 bp, Homo sapiens
gtaaaactgagtggc

SEQ ID NO: 235530 - DNA, 15 bp, Homo sapiens
tgtaaaactgagtgg

SEQ ID NO: 235531 - DNA, 15 bp, Homo sapiens
ttgtaaaactgagtg

SEQ ID NO: 235532 - DNA, 15 bp, Homo sapiens
tttgtaaaactgagt

SEQ ID NO: 235533 - DNA, 15 bp, Homo sapiens
ttttgtaaaactgag

SEQ ID NO: 235534 - DNA, 15 bp, Homo sapiens
cttttgtaaaactga

SEQ ID NO: 235535 - DNA, 15 bp, Homo sapiens
tcttttgtaaaactg

SEQ ID NO: 235536 - DNA, 15 bp, Homo sapiens
ttcttttgtaaaact

SEQ ID NO: 235537 - DNA, 15 bp, Homo sapiens
tttcttttgtaaaac

SEQ ID NO: 235538 - DNA, 15 bp, Homo sapiens
ctttcttttgtaaaa

SEQ ID NO: 235539 - DNA, 15 bp, Homo sapiens
tctttcttttgtaaa

SEQ ID NO: 235540 - DNA, 15 bp, Homo sapiens
ctctttcttttgtaa

SEQ ID NO: 235541 - DNA, 15 bp, Homo sapiens
tctctttcttttgta

SEQ ID NO: 235542 - DNA, 15 bp, Homo sapiens
ctctctttcttttgt

SEQ ID NO: 235543 - DNA, 15 bp, Homo sapiens
cctctctttcttttg

SEQ ID NO: 235544 - DNA, 15 bp, Homo sapiens
gcctctctttctttt

SEQ ID NO: 235545 - DNA, 15 bp, Homo sapiens
tgcctctctttcttt

SEQ ID NO: 235546 - DNA, 15 bp, Homo sapiens
gtgcctctctttctt

SEQ ID NO: 235547 - DNA, 15 bp, Homo sapiens
agtgcctctctttct

SEQ ID NO: 235548 - DNA, 15 bp, Homo sapiens
cagtgcctctctttc

SEQ ID NO: 235549 - DNA, 15 bp, Homo sapiens
ccagtgcctctcttt

SEQ ID NO: 235550 - DNA, 15 bp, Homo sapiens
tccagtgcctctctt

SEQ ID NO: 235551 - DNA, 15 bp, Homo sapiens
atccagtgcctctct

SEQ ID NO: 235552 - DNA, 15 bp, Homo sapiens
aatccagtgcctctc

SEQ ID NO: 235553 - DNA, 15 bp, Homo sapiens
taatccagtgcctct

SEQ ID NO: 235554 - DNA, 15 bp, Homo sapiens
ttaatccagtgcctc

SEQ ID NO: 235555 - DNA, 15 bp, Homo sapiens
attaatccagtgcct

SEQ ID NO: 235556 - DNA, 15 bp, Homo sapiens
cattaatccagtgcc

SEQ ID NO: 235557 - DNA, 15 bp, Homo sapiens
acattaatccagtgc

SEQ ID NO: 235558 - DNA, 15 bp, Homo sapiens
cacattaatccagtg

SEQ ID NO: 235559 - DNA, 15 bp, Homo sapiens
acacattaatccagt

SEQ ID NO: 235560 - DNA, 15 bp, Homo sapiens
tacacattaatccag

SEQ ID NO: 235561 - DNA, 15 bp, Homo sapiens
atacacattaatcca

SEQ ID NO: 235562 - DNA, 15 bp, Homo sapiens
gatacacattaatcc

SEQ ID NO: 235563 - DNA, 15 bp, Homo sapiens
agatacacattaatc

SEQ ID NO: 235564 - DNA, 15 bp, Homo sapiens
gagatacacattaat

SEQ ID NO: 235565 - DNA, 15 bp, Homo sapiens
tgagatacacattaa

SEQ ID NO: 235566 - DNA, 15 bp, Homo sapiens
gtgagatacacatta

SEQ ID NO: 235567 - DNA, 15 bp, Homo sapiens
agtgagatacacatt

SEQ ID NO: 235568 - DNA, 15 bp, Homo sapiens
gagtgagatacacat

SEQ ID NO: 235569 - DNA, 15 bp, Homo sapiens
tgagtgagatacaca

SEQ ID NO: 235570 - DNA, 15 bp, Homo sapiens
gtgagtgagatacac

SEQ ID NO: 235571 - DNA, 15 bp, Homo sapiens
ggtgagtgagataca

SEQ ID NO: 235572 - DNA, 15 bp, Homo sapiens
tggtgagtgagatac

SEQ ID NO: 235573 - DNA, 15 bp, Homo sapiens
ttggtgagtgagata

SEQ ID NO: 235574 - DNA, 15 bp, Homo sapiens
attggtgagtgagat

SEQ ID NO: 235575 - DNA, 15 bp, Homo sapiens
gattggtgagtgaga

SEQ ID NO: 235576 - DNA, 15 bp, Homo sapiens
tgattggtgagtgag

SEQ ID NO: 235577 - DNA, 15 bp, Homo sapiens
ttgattggtgagtga

SEQ ID NO: 235578 - DNA, 15 bp, Homo sapiens
gttgattggtgagtg

SEQ ID NO: 235579 - DNA, 15 bp, Homo sapiens
ggttgattggtgagt

SEQ ID NO: 235580 - DNA, 15 bp, Homo sapiens
aggttgattggtgag

SEQ ID NO: 235581 - DNA, 15 bp, Homo sapiens
gaggttgattggtga

SEQ ID NO: 235582 - DNA, 15 bp, Homo sapiens
agaggttgattggtg

SEQ ID NO: 235583 - DNA, 15 bp, Homo sapiens
aagaggttgattggt

SEQ ID NO: 235584 - DNA, 15 bp, Homo sapiens
gaagaggttgattgg

SEQ ID NO: 235585 - DNA, 15 bp, Homo sapiens
ggaagaggttgattg

SEQ ID NO: 235586 - DNA, 15 bp, Homo sapiens
aggaagaggttgatt

SEQ ID NO: 235587 - DNA, 15 bp, Homo sapiens
aaggaagaggttgat

SEQ ID NO: 235588 - DNA, 15 bp, Homo sapiens
taaggaagaggttga

SEQ ID NO: 235589 - DNA, 15 bp, Homo sapiens
ttaaggaagaggttg

SEQ ID NO: 235590 - DNA, 15 bp, Homo sapiens
cttaaggaagaggtt

SEQ ID NO: 235591 - DNA, 15 bp, Homo sapiens
tcttaaggaagaggt

SEQ ID NO: 235592 - DNA, 15 bp, Homo sapiens
ctcttaaggaagagg

SEQ ID NO: 235593 - DNA, 15 bp, Homo sapiens
tctcttaaggaagag

SEQ ID NO: 235594 - DNA, 15 bp, Homo sapiens
ttctcttaaggaaga

SEQ ID NO: 235595 - DNA, 15 bp, Homo sapiens
tttctcttaaggaag

SEQ ID NO: 235596 - DNA, 15 bp, Homo sapiens
ttttctcttaaggaa

SEQ ID NO: 235597 - DNA, 15 bp, Homo sapiens
attttctcttaagga

SEQ ID NO: 235598 - DNA, 15 bp, Homo sapiens
cattttctcttaagg

SEQ ID NO: 235599 - DNA, 15 bp, Homo sapiens
acattttctcttaag

SEQ ID NO: 235600 - DNA, 15 bp, Homo sapiens
aacattttctcttaa

SEQ ID NO: 235601 - DNA, 15 bp, Homo sapiens
taacattttctctta

SEQ ID NO: 235602 - DNA, 15 bp, Homo sapiens
ttaacattttctctt

SEQ ID NO: 235603 - DNA, 15 bp, Homo sapiens
cttaacattttctct

SEQ ID NO: 235604 - DNA, 15 bp, Homo sapiens
ccttaacattttctc

SEQ ID NO: 235605 - DNA, 15 bp, Homo sapiens
tccttaacattttct

SEQ ID NO: 235606 - DNA, 15 bp, Homo sapiens
ttccttaacattttc

SEQ ID NO: 235607 - DNA, 15 bp, Homo sapiens
cttccttaacatttt

SEQ ID NO: 235608 - DNA, 15 bp, Homo sapiens
acttccttaacattt

SEQ ID NO: 235609 - DNA, 15 bp, Homo sapiens
gacttccttaacatt

SEQ ID NO: 235610 - DNA, 15 bp, Homo sapiens
agacttccttaacat

SEQ ID NO: 235611 - DNA, 15 bp, Homo sapiens
aagacttccttaaca

SEQ ID NO: 235612 - DNA, 15 bp, Homo sapiens
taagacttccttaac

SEQ ID NO: 235613 - DNA, 15 bp, Homo sapiens
ctaagacttccttaa

SEQ ID NO: 235614 - DNA, 15 bp, Homo sapiens
cctaagacttcctta

SEQ ID NO: 235615 - DNA, 15 bp, Homo sapiens
gcctaagacttcctt

SEQ ID NO: 235616 - DNA, 15 bp, Homo sapiens
tgcctaagacttcct

SEQ ID NO: 235617 - DNA, 15 bp, Homo sapiens
ttgcctaagacttcc

SEQ ID NO: 235618 - DNA, 15 bp, Homo sapiens
cttgcctaagacttc

SEQ ID NO: 235619 - DNA, 15 bp, Homo sapiens
ccttgcctaagactt

SEQ ID NO: 235620 - DNA, 15 bp, Homo sapiens
gccttgcctaagact

SEQ ID NO: 235621 - DNA, 15 bp, Homo sapiens
ggccttgcctaagac

SEQ ID NO: 235622 - DNA, 15 bp, Homo sapiens
aggccttgcctaaga

SEQ ID NO: 235623 - DNA, 15 bp, Homo sapiens
aaggccttgcctaag

SEQ ID NO: 235624 - DNA, 15 bp, Homo sapiens
caaggccttgcctaa

SEQ ID NO: 235625 - DNA, 15 bp, Homo sapiens
acaaggccttgccta

SEQ ID NO: 235626 - DNA, 15 bp, Homo sapiens
aacaaggccttgcct

SEQ ID NO: 235627 - DNA, 15 bp, Homo sapiens
aaacaaggccttgcc

SEQ ID NO: 235628 - DNA, 15 bp, Homo sapiens
caaacaaggccttgc

SEQ ID NO: 235629 - DNA, 15 bp, Homo sapiens
acaaacaaggccttg

SEQ ID NO: 235630 - DNA, 15 bp, Homo sapiens
aacaaacaaggcctt

SEQ ID NO: 235631 - DNA, 15 bp, Homo sapiens
gaacaaacaaggcct

SEQ ID NO: 235632 - DNA, 15 bp, Homo sapiens
tgaacaaacaaggcc

SEQ ID NO: 235633 - DNA, 15 bp, Homo sapiens
atgaacaaacaaggc

SEQ ID NO: 235634 - DNA, 15 bp, Homo sapiens
gatgaacaaacaagg

SEQ ID NO: 235635 - DNA, 15 bp, Homo sapiens
tgatgaacaaacaag

SEQ ID NO: 235636 - DNA, 15 bp, Homo sapiens
gtgatgaacaaacaa

SEQ ID NO: 235637 - DNA, 15 bp, Homo sapiens
agtgatgaacaaaca

SEQ ID NO: 235638 - DNA, 15 bp, Homo sapiens
aagtgatgaacaaac

SEQ ID NO: 235639 - DNA, 15 bp, Homo sapiens
aaagtgatgaacaaa

SEQ ID NO: 235640 - DNA, 15 bp, Homo sapiens
taaagtgatgaacaa

SEQ ID NO: 235641 - DNA, 15 bp, Homo sapiens
ctaaagtgatgaaca

SEQ ID NO: 235642 - DNA, 15 bp, Homo sapiens
actaaagtgatgaac

SEQ ID NO: 235643 - DNA, 15 bp, Homo sapiens
aactaaagtgatgaa

SEQ ID NO: 235644 - DNA, 15 bp, Homo sapiens
aaactaaagtgatga

SEQ ID NO: 235645 - DNA, 15 bp, Homo sapiens
gaaactaaagtgatg

SEQ ID NO: 235646 - DNA, 15 bp, Homo sapiens
agaaactaaagtgat

SEQ ID NO: 235647 - DNA, 15 bp, Homo sapiens
gagaaactaaagtga

SEQ ID NO: 235648 - DNA, 15 bp, Homo sapiens
agagaaactaaagtg

SEQ ID NO: 235649 - DNA, 15 bp, Homo sapiens
gagagaaactaaagt

SEQ ID NO: 235650 - DNA, 15 bp, Homo sapiens
agagagaaactaaag

SEQ ID NO: 235651 - DNA, 15 bp, Homo sapiens
gagagagaaactaaa

SEQ ID NO: 235652 - DNA, 15 bp, Homo sapiens
ggagagagaaactaa

SEQ ID NO: 235653 - DNA, 15 bp, Homo sapiens
gggagagagaaacta

SEQ ID NO: 235654 - DNA, 15 bp, Homo sapiens
cgggagagagaaact

SEQ ID NO: 235655 - DNA, 15 bp, Homo sapiens
ccgggagagagaaac

SEQ ID NO: 235656 - DNA, 15 bp, Homo sapiens
cccgggagagagaaa

SEQ ID NO: 235657 - DNA, 15 bp, Homo sapiens
tcccgggagagagaa

SEQ ID NO: 235658 - DNA, 15 bp, Homo sapiens
atcccgggagagaga

SEQ ID NO: 235659 - DNA, 15 bp, Homo sapiens
catcccgggagagag

SEQ ID NO: 235660 - DNA, 15 bp, Homo sapiens
ccatcccgggagaga

SEQ ID NO: 235661 - DNA, 15 bp, Homo sapiens
gccatcccgggagag

SEQ ID NO: 235662 - DNA, 15 bp, Homo sapiens
agccatcccgggaga

SEQ ID NO: 235663 - DNA, 15 bp, Homo sapiens
cagccatcccgggag

SEQ ID NO: 235664 - DNA, 15 bp, Homo sapiens
tcagccatcccggga

SEQ ID NO: 235665 - DNA, 15 bp, Homo sapiens
ctcagccatcccggg

SEQ ID NO: 235666 - DNA, 15 bp, Homo sapiens
tctcagccatcccgg

SEQ ID NO: 235667 - DNA, 15 bp, Homo sapiens
ttctcagccatcccg

SEQ ID NO: 235668 - DNA, 15 bp, Homo sapiens
attctcagccatccc

SEQ ID NO: 235669 - DNA, 15 bp, Homo sapiens
cattctcagccatcc

SEQ ID NO: 235670 - DNA, 15 bp, Homo sapiens
acattctcagccatc

SEQ ID NO: 235671 - DNA, 15 bp, Homo sapiens
cacattctcagccat

SEQ ID NO: 235672 - DNA, 15 bp, Homo sapiens
tcacattctcagcca

SEQ ID NO: 235673 - DNA, 15 bp, Homo sapiens
atcacattctcagcc

SEQ ID NO: 235674 - DNA, 15 bp, Homo sapiens
catcacattctcagc

SEQ ID NO: 235675 - DNA, 15 bp, Homo sapiens
acatcacattctcag

SEQ ID NO: 235676 - DNA, 15 bp, Homo sapiens
aacatcacattctca

SEQ ID NO: 235677 - DNA, 15 bp, Homo sapiens
aaacatcacattctc

SEQ ID NO: 235678 - DNA, 15 bp, Homo sapiens
gaaacatcacattct

SEQ ID NO: 235679 - DNA, 15 bp, Homo sapiens
ggaaacatcacattc

SEQ ID NO: 235680 - DNA, 15 bp, Homo sapiens
aggaaacatcacatt

SEQ ID NO: 235681 - DNA, 15 bp, Homo sapiens
gaggaaacatcacat

SEQ ID NO: 235682 - DNA, 15 bp, Homo sapiens
agaggaaacatcaca

SEQ ID NO: 235683 - DNA, 15 bp, Homo sapiens
cagaggaaacatcac

SEQ ID NO: 235684 - DNA, 15 bp, Homo sapiens
acagaggaaacatca

SEQ ID NO: 235685 - DNA, 15 bp, Homo sapiens
aacagaggaaacatc

SEQ ID NO: 235686 - DNA, 15 bp, Homo sapiens
caacagaggaaacat

SEQ ID NO: 235687 - DNA, 15 bp, Homo sapiens
acaacagaggaaaca

SEQ ID NO: 235688 - DNA, 15 bp, Homo sapiens
gacaacagaggaaac

SEQ ID NO: 235689 - DNA, 15 bp, Homo sapiens
tgacaacagaggaaa

SEQ ID NO: 235690 - DNA, 15 bp, Homo sapiens
ttgacaacagaggaa

SEQ ID NO: 235691 - DNA, 15 bp, Homo sapiens
cttgacaacagagga

SEQ ID NO: 235692 - DNA, 15 bp, Homo sapiens
ccttgacaacagagg

SEQ ID NO: 235693 - DNA, 15 bp, Homo sapiens
tccttgacaacagag

SEQ ID NO: 235694 - DNA, 15 bp, Homo sapiens
ctccttgacaacaga

SEQ ID NO: 235695 - DNA, 15 bp, Homo sapiens
tctccttgacaacag

SEQ ID NO: 235696 - DNA, 15 bp, Homo sapiens
gtctccttgacaaca

SEQ ID NO: 235697 - DNA, 15 bp, Homo sapiens
agtctccttgacaac

SEQ ID NO: 235698 - DNA, 15 bp, Homo sapiens
tagtctccttgacaa

SEQ ID NO: 235699 - DNA, 15 bp, Homo sapiens
gtagtctccttgaca

SEQ ID NO: 235700 - DNA, 15 bp, Homo sapiens
tgtagtctccttgac

SEQ ID NO: 235701 - DNA, 15 bp, Homo sapiens
gtgtagtctccttga

SEQ ID NO: 235702 - DNA, 15 bp, Homo sapiens
ggtgtagtctccttg

SEQ ID NO: 235703 - DNA, 15 bp, Homo sapiens
gggtgtagtctcctt

SEQ ID NO: 235704 - DNA, 15 bp, Homo sapiens
ggggtgtagtctcct

SEQ ID NO: 235705 - DNA, 15 bp, Homo sapiens
aggggtgtagtctcc

SEQ ID NO: 235706 - DNA, 15 bp, Homo sapiens
caggggtgtagtctc

SEQ ID NO: 235707 - DNA, 15 bp, Homo sapiens
tcaggggtgtagtct

SEQ ID NO: 235708 - DNA, 15 bp, Homo sapiens
atcaggggtgtagtc

SEQ ID NO: 235709 - DNA, 15 bp, Homo sapiens
catcaggggtgtagt

SEQ ID NO: 235710 - DNA, 15 bp, Homo sapiens
acatcaggggtgtag

SEQ ID NO: 235711 - DNA, 15 bp, Homo sapiens
aacatcaggggtgta

SEQ ID NO: 235712 - DNA, 15 bp, Homo sapiens
aaacatcaggggtgt

SEQ ID NO: 235713 - DNA, 15 bp, Homo sapiens
aaaacatcaggggtg

SEQ ID NO: 235714 - DNA, 15 bp, Homo sapiens
gaaaacatcaggggt

SEQ ID NO: 235715 - DNA, 15 bp, Homo sapiens
ggaaaacatcagggg

SEQ ID NO: 235716 - DNA, 15 bp, Homo sapiens
aggaaaacatcaggg

SEQ ID NO: 235717 - DNA, 15 bp, Homo sapiens
gaggaaaacatcagg

SEQ ID NO: 235718 - DNA, 15 bp, Homo sapiens
ggaggaaaacatcag

SEQ ID NO: 235719 - DNA, 15 bp, Homo sapiens
tggaggaaaacatca

SEQ ID NO: 235720 - DNA, 15 bp, Homo sapiens
ctggaggaaaacatc

SEQ ID NO: 235721 - DNA, 15 bp, Homo sapiens
tctggaggaaaacat

SEQ ID NO: 235722 - DNA, 15 bp, Homo sapiens
gtctggaggaaaaca

SEQ ID NO: 235723 - DNA, 15 bp, Homo sapiens
agtctggaggaaaac

SEQ ID NO: 235724 - DNA, 15 bp, Homo sapiens
aagtctggaggaaaa

SEQ ID NO: 235725 - DNA, 15 bp, Homo sapiens
gaagtctggaggaaa

SEQ ID NO: 235726 - DNA, 15 bp, Homo sapiens
agaagtctggaggaa

SEQ ID NO: 235727 - DNA, 15 bp, Homo sapiens
cagaagtctggagga

SEQ ID NO: 235728 - DNA, 15 bp, Homo sapiens
tcagaagtctggagg

SEQ ID NO: 235729 - DNA, 15 bp, Homo sapiens
ctcagaagtctggag

SEQ ID NO: 235730 - DNA, 15 bp, Homo sapiens
tctcagaagtctgga

SEQ ID NO: 235731 - DNA, 15 bp, Homo sapiens
ctctcagaagtctgg

SEQ ID NO: 235732 - DNA, 15 bp, Homo sapiens
gctctcagaagtctg

SEQ ID NO: 235733 - DNA, 15 bp, Homo sapiens
agctctcagaagtct

SEQ ID NO: 235734 - DNA, 15 bp, Homo sapiens
cagctctcagaagtc

SEQ ID NO: 235735 - DNA, 15 bp, Homo sapiens
ccagctctcagaagt

SEQ ID NO: 235736 - DNA, 15 bp, Homo sapiens
accagctctcagaag

SEQ ID NO: 235737 - DNA, 15 bp, Homo sapiens
caccagctctcagaa

SEQ ID NO: 235738 - DNA, 15 bp, Homo sapiens
acaccagctctcaga

SEQ ID NO: 235739 - DNA, 15 bp, Homo sapiens
cacaccagctctcag

SEQ ID NO: 235740 - DNA, 15 bp, Homo sapiens
acacaccagctctca

SEQ ID NO: 235741 - DNA, 15 bp, Homo sapiens
cacacaccagctctc

SEQ ID NO: 235742 - DNA, 15 bp, Homo sapiens
acacacaccagctct

SEQ ID NO: 235743 - DNA, 15 bp, Homo sapiens
aacacacaccagctc

SEQ ID NO: 235744 - DNA, 15 bp, Homo sapiens
aaacacacaccagct

SEQ ID NO: 235745 - DNA, 15 bp, Homo sapiens
gaaacacacaccagc

SEQ ID NO: 235746 - DNA, 15 bp, Homo sapiens
agaaacacacaccag

SEQ ID NO: 235747 - DNA, 15 bp, Homo sapiens
tagaaacacacacca

SEQ ID NO: 235748 - DNA, 15 bp, Homo sapiens
ctagaaacacacacc

SEQ ID NO: 235749 - DNA, 15 bp, Homo sapiens
gctagaaacacacac

SEQ ID NO: 235750 - DNA, 15 bp, Homo sapiens
tgctagaaacacaca

SEQ ID NO: 235751 - DNA, 15 bp, Homo sapiens
gtgctagaaacacac

SEQ ID NO: 235752 - DNA, 15 bp, Homo sapiens
agtgctagaaacaca

SEQ ID NO: 235753 - DNA, 15 bp, Homo sapiens
aagtgctagaaacac

SEQ ID NO: 235754 - DNA, 15 bp, Homo sapiens
aaagtgctagaaaca

SEQ ID NO: 235755 - DNA, 15 bp, Homo sapiens
gaaagtgctagaaac

SEQ ID NO: 235756 - DNA, 15 bp, Homo sapiens
agaaagtgctagaaa

SEQ ID NO: 235757 - DNA, 15 bp, Homo sapiens
tagaaagtgctagaa

SEQ ID NO: 235758 - DNA, 15 bp, Homo sapiens
ctagaaagtgctaga

SEQ ID NO: 235759 - DNA, 15 bp, Homo sapiens
gctagaaagtgctag

SEQ ID NO: 235760 - DNA, 15 bp, Homo sapiens
agctagaaagtgcta

SEQ ID NO: 235761 - DNA, 15 bp, Homo sapiens
cagctagaaagtgct

SEQ ID NO: 235762 - DNA, 15 bp, Homo sapiens
gcagctagaaagtgc

SEQ ID NO: 235763 - DNA, 15 bp, Homo sapiens
tgcagctagaaagtg

SEQ ID NO: 235764 - DNA, 15 bp, Homo sapiens
gtgcagctagaaagt

SEQ ID NO: 235765 - DNA, 15 bp, Homo sapiens
ggtgcagctagaaag

SEQ ID NO: 235766 - DNA, 15 bp, Homo sapiens
tggtgcagctagaaa

SEQ ID NO: 235767 - DNA, 15 bp, Homo sapiens
gtggtgcagctagaa

SEQ ID NO: 235768 - DNA, 15 bp, Homo sapiens
ggtggtgcagctaga

SEQ ID NO: 235769 - DNA, 15 bp, Homo sapiens
aggtggtgcagctag

SEQ ID NO: 235770 - DNA, 15 bp, Homo sapiens
gaggtggtgcagcta

SEQ ID NO: 235771 - DNA, 15 bp, Homo sapiens
tgaggtggtgcagct

SEQ ID NO: 235772 - DNA, 15 bp, Homo sapiens
gtgaggtggtgcagc

SEQ ID NO: 235773 - DNA, 15 bp, Homo sapiens
cgtgaggtggtgcag

SEQ ID NO: 235774 - DNA, 15 bp, Homo sapiens
gcgtgaggtggtgca

SEQ ID NO: 235775 - DNA, 15 bp, Homo sapiens
agcgtgaggtggtgc

SEQ ID NO: 235776 - DNA, 15 bp, Homo sapiens
cagcgtgaggtggtg

SEQ ID NO: 235777 - DNA, 15 bp, Homo sapiens
acagcgtgaggtggt

SEQ ID NO: 235778 - DNA, 15 bp, Homo sapiens
tacagcgtgaggtgg

SEQ ID NO: 235779 - DNA, 15 bp, Homo sapiens
ctacagcgtgaggtg

SEQ ID NO: 235780 - DNA, 15 bp, Homo sapiens
gctacagcgtgaggt

SEQ ID NO: 235781 - DNA, 15 bp, Homo sapiens
agctacagcgtgagg

SEQ ID NO: 235782 - DNA, 15 bp, Homo sapiens
cagctacagcgtgag

SEQ ID NO: 235783 - DNA, 15 bp, Homo sapiens
ccagctacagcgtga

SEQ ID NO: 235784 - DNA, 15 bp, Homo sapiens
gccagctacagcgtg

SEQ ID NO: 235785 - DNA, 15 bp, Homo sapiens
agccagctacagcgt

SEQ ID NO: 235786 - DNA, 15 bp, Homo sapiens
aagccagctacagcg

SEQ ID NO: 235787 - DNA, 15 bp, Homo sapiens
gaagccagctacagc

SEQ ID NO: 235788 - DNA, 15 bp, Homo sapiens
tgaagccagctacag

SEQ ID NO: 235789 - DNA, 15 bp, Homo sapiens
ttgaagccagctaca

SEQ ID NO: 235790 - DNA, 15 bp, Homo sapiens
cttgaagccagctac

SEQ ID NO: 235791 - DNA, 15 bp, Homo sapiens
ccttgaagccagcta

SEQ ID NO: 235792 - DNA, 15 bp, Homo sapiens
gccttgaagccagct

SEQ ID NO: 235793 - DNA, 15 bp, Homo sapiens
tgccttgaagccagc

SEQ ID NO: 235794 - DNA, 15 bp, Homo sapiens
atgccttgaagccag

SEQ ID NO: 235795 - DNA, 15 bp, Homo sapiens
tatgccttgaagcca

SEQ ID NO: 235796 - DNA, 15 bp, Homo sapiens
atatgccttgaagcc

SEQ ID NO: 235797 - DNA, 15 bp, Homo sapiens
gatatgccttgaagc

SEQ ID NO: 235798 - DNA, 15 bp, Homo sapiens
ggatatgccttgaag

SEQ ID NO: 235799 - DNA, 15 bp, Homo sapiens
tggatatgccttgaa

SEQ ID NO: 235800 - DNA, 15 bp, Homo sapiens
ctggatatgccttga

SEQ ID NO: 235801 - DNA, 15 bp, Homo sapiens
cctggatatgccttg

SEQ ID NO: 235802 - DNA, 15 bp, Homo sapiens
ccctggatatgcctt

SEQ ID NO: 235803 - DNA, 15 bp, Homo sapiens
cccctggatatgcct

SEQ ID NO: 235804 - DNA, 15 bp, Homo sapiens
ccccctggatatgcc

SEQ ID NO: 235805 - DNA, 15 bp, Homo sapiens
cccccctggatatgc

SEQ ID NO: 235806 - DNA, 15 bp, Homo sapiens
tcccccctggatatg

SEQ ID NO: 235807 - DNA, 15 bp, Homo sapiens
ctcccccctggatat

SEQ ID NO: 235808 - DNA, 15 bp, Homo sapiens
actcccccctggata

SEQ ID NO: 235809 - DNA, 15 bp, Homo sapiens
aactcccccctggat

SEQ ID NO: 235810 - DNA, 15 bp, Homo sapiens
aaactcccccctgga

SEQ ID NO: 235811 - DNA, 15 bp, Homo sapiens
gaaactcccccctgg

SEQ ID NO: 235812 - DNA, 15 bp, Homo sapiens
agaaactcccccctg

SEQ ID NO: 235813 - DNA, 15 bp, Homo sapiens
aagaaactcccccct

SEQ ID NO: 235814 - DNA, 15 bp, Homo sapiens
caagaaactcccccc

SEQ ID NO: 235815 - DNA, 15 bp, Homo sapiens
acaagaaactccccc

SEQ ID NO: 235816 - DNA, 15 bp, Homo sapiens
gacaagaaactcccc

SEQ ID NO: 235817 - DNA, 15 bp, Homo sapiens
ggacaagaaactccc

SEQ ID NO: 235818 - DNA, 15 bp, Homo sapiens
tggacaagaaactcc

SEQ ID NO: 235819 - DNA, 15 bp, Homo sapiens
atggacaagaaactc

SEQ ID NO: 235820 - DNA, 15 bp, Homo sapiens
aatggacaagaaact

SEQ ID NO: 235821 - DNA, 15 bp, Homo sapiens
aaatggacaagaaac

SEQ ID NO: 235822 - DNA, 15 bp, Homo sapiens
gaaatggacaagaaa

SEQ ID NO: 235823 - DNA, 15 bp, Homo sapiens
ggaaatggacaagaa

SEQ ID NO: 235824 - DNA, 15 bp, Homo sapiens
aggaaatggacaaga

SEQ ID NO: 235825 - DNA, 15 bp, Homo sapiens
aaggaaatggacaag

SEQ ID NO: 235826 - DNA, 15 bp, Homo sapiens
aaaggaaatggacaa

SEQ ID NO: 235827 - DNA, 15 bp, Homo sapiens
taaaggaaatggaca

SEQ ID NO: 235828 - DNA, 15 bp, Homo sapiens
gtaaaggaaatggac

SEQ ID NO: 235829 - DNA, 15 bp, Homo sapiens
tgtaaaggaaatgga

SEQ ID NO: 235830 - DNA, 15 bp, Homo sapiens
ttgtaaaggaaatgg

SEQ ID NO: 235831 - DNA, 15 bp, Homo sapiens
tttgtaaaggaaatg

SEQ ID NO: 235832 - DNA, 15 bp, Homo sapiens
ctttgtaaaggaaat

SEQ ID NO: 235833 - DNA, 15 bp, Homo sapiens
cctttgtaaaggaaa

SEQ ID NO: 235834 - DNA, 15 bp, Homo sapiens
ccctttgtaaaggaa

SEQ ID NO: 235835 - DNA, 15 bp, Homo sapiens
tccctttgtaaagga

SEQ ID NO: 235836 - DNA, 15 bp, Homo sapiens
ttccctttgtaaagg

SEQ ID NO: 235837 - DNA, 15 bp, Homo sapiens
cttccctttgtaaag

SEQ ID NO: 235838 - DNA, 15 bp, Homo sapiens
acttccctttgtaaa

SEQ ID NO: 235839 - DNA, 15 bp, Homo sapiens
aacttccctttgtaa

SEQ ID NO: 235840 - DNA, 15 bp, Homo sapiens
caacttccctttgta

SEQ ID NO: 235841 - DNA, 15 bp, Homo sapiens
acaacttccctttgt

SEQ ID NO: 235842 - DNA, 15 bp, Homo sapiens
aacaacttccctttg

SEQ ID NO: 235843 - DNA, 15 bp, Homo sapiens
caacaacttcccttt

SEQ ID NO: 235844 - DNA, 15 bp, Homo sapiens
ccaacaacttccctt

SEQ ID NO: 235845 - DNA, 15 bp, Homo sapiens
tccaacaacttccct

SEQ ID NO: 235846 - DNA, 15 bp, Homo sapiens
ttccaacaacttccc

SEQ ID NO: 235847 - DNA, 15 bp, Homo sapiens
attccaacaacttcc

SEQ ID NO: 235848 - DNA, 15 bp, Homo sapiens
gattccaacaacttc

SEQ ID NO: 235849 - DNA, 15 bp, Homo sapiens
agattccaacaactt

SEQ ID NO: 235850 - DNA, 15 bp, Homo sapiens
cagattccaacaact

SEQ ID NO: 235851 - DNA, 15 bp, Homo sapiens
tcagattccaacaac

SEQ ID NO: 235852 - DNA, 15 bp, Homo sapiens
ttcagattccaacaa

SEQ ID NO: 235853 - DNA, 15 bp, Homo sapiens
gttcagattccaaca

SEQ ID NO: 235854 - DNA, 15 bp, Homo sapiens
ggttcagattccaac

SEQ ID NO: 235855 - DNA, 15 bp, Homo sapiens
cggttcagattccaa

SEQ ID NO: 235856 - DNA, 15 bp, Homo sapiens
gcggttcagattcca

SEQ ID NO: 235857 - DNA, 15 bp, Homo sapiens
tgcggttcagattcc

SEQ ID NO: 235858 - DNA, 15 bp, Homo sapiens
ttgcggttcagattc

SEQ ID NO: 235859 - DNA, 15 bp, Homo sapiens
cttgcggttcagatt

SEQ ID NO: 235860 - DNA, 15 bp, Homo sapiens
gcttgcggttcagat

SEQ ID NO: 235861 - DNA, 15 bp, Homo sapiens
ggcttgcggttcaga

SEQ ID NO: 235862 - DNA, 15 bp, Homo sapiens
aggcttgcggttcag

SEQ ID NO: 235863 - DNA, 15 bp, Homo sapiens
aaggcttgcggttca

SEQ ID NO: 235864 - DNA, 15 bp, Homo sapiens
gaaggcttgcggttc

SEQ ID NO: 235865 - DNA, 15 bp, Homo sapiens
tgaaggcttgcggtt

SEQ ID NO: 235866 - DNA, 15 bp, Homo sapiens
gtgaaggcttgcggt

SEQ ID NO: 235867 - DNA, 15 bp, Homo sapiens
agtgaaggcttgcgg

SEQ ID NO: 235868 - DNA, 15 bp, Homo sapiens
aagtgaaggcttgcg

SEQ ID NO: 235869 - DNA, 15 bp, Homo sapiens
taagtgaaggcttgc

SEQ ID NO: 235870 - DNA, 15 bp, Homo sapiens
ctaagtgaaggcttg

SEQ ID NO: 235871 - DNA, 15 bp, Homo sapiens
tctaagtgaaggctt

SEQ ID NO: 235872 - DNA, 15 bp, Homo sapiens
gtctaagtgaaggct

SEQ ID NO: 235873 - DNA, 15 bp, Homo sapiens
ggtctaagtgaaggc

SEQ ID NO: 235874 - DNA, 15 bp, Homo sapiens
tggtctaagtgaagg

SEQ ID NO: 235875 - DNA, 15 bp, Homo sapiens
ttggtctaagtgaag

SEQ ID NO: 235876 - DNA, 15 bp, Homo sapiens
tttggtctaagtgaa

SEQ ID NO: 235877 - DNA, 15 bp, Homo sapiens
ttttggtctaagtga

SEQ ID NO: 235878 - DNA, 15 bp, Homo sapiens
attttggtctaagtg

SEQ ID NO: 235879 - DNA, 15 bp, Homo sapiens
gattttggtctaagt

SEQ ID NO: 235880 - DNA, 15 bp, Homo sapiens
tgattttggtctaag

SEQ ID NO: 235881 - DNA, 15 bp, Homo sapiens
ctgattttggtctaa

SEQ ID NO: 235882 - DNA, 15 bp, Homo sapiens
cctgattttggtcta

SEQ ID NO: 235883 - DNA, 15 bp, Homo sapiens
gcctgattttggtct

SEQ ID NO: 235884 - DNA, 15 bp, Homo sapiens
tgcctgattttggtc

SEQ ID NO: 235885 - DNA, 15 bp, Homo sapiens
ttgcctgattttggt

SEQ ID NO: 235886 - DNA, 15 bp, Homo sapiens
gttgcctgattttgg

SEQ ID NO: 235887 - DNA, 15 bp, Homo sapiens
tgttgcctgattttg

SEQ ID NO: 235888 - DNA, 15 bp, Homo sapiens
ctgttgcctgatttt

SEQ ID NO: 235889 - DNA, 15 bp, Homo sapiens
gctgttgcctgattt

SEQ ID NO: 235890 - DNA, 15 bp, Homo sapiens
cgctgttgcctgatt

SEQ ID NO: 235891 - DNA, 15 bp, Homo sapiens
ccgctgttgcctgat

SEQ ID NO: 235892 - DNA, 15 bp, Homo sapiens
accgctgttgcctga

SEQ ID NO: 235893 - DNA, 15 bp, Homo sapiens
caccgctgttgcctg

SEQ ID NO: 235894 - DNA, 15 bp, Homo sapiens
tcaccgctgttgcct

SEQ ID NO: 235895 - DNA, 15 bp, Homo sapiens
ctcaccgctgttgcc

SEQ ID NO: 235896 - DNA, 15 bp, Homo sapiens
gctcaccgctgttgc

SEQ ID NO: 235897 - DNA, 15 bp, Homo sapiens
cgctcaccgctgttg

SEQ ID NO: 235898 - DNA, 15 bp, Homo sapiens
gcgctcaccgctgtt

SEQ ID NO: 235899 - DNA, 15 bp, Homo sapiens
tgcgctcaccgctgt

SEQ ID NO: 235900 - DNA, 15 bp, Homo sapiens
ctgcgctcaccgctg

SEQ ID NO: 235901 - DNA, 15 bp, Homo sapiens
gctgcgctcaccgct

SEQ ID NO: 235902 - DNA, 15 bp, Homo sapiens
agctgcgctcaccgc

SEQ ID NO: 235903 - DNA, 15 bp, Homo sapiens
gagctgcgctcaccg

SEQ ID NO: 235904 - DNA, 15 bp, Homo sapiens
ggagctgcgctcacc

SEQ ID NO: 235905 - DNA, 15 bp, Homo sapiens
tggagctgcgctcac

SEQ ID NO: 235906 - DNA, 15 bp, Homo sapiens
ttggagctgcgctca

SEQ ID NO: 235907 - DNA, 15 bp, Homo sapiens
tttggagctgcgctc

SEQ ID NO: 235908 - DNA, 15 bp, Homo sapiens
gtttggagctgcgct

SEQ ID NO: 235909 - DNA, 15 bp, Homo sapiens
cgtttggagctgcgc

SEQ ID NO: 235910 - DNA, 15 bp, Homo sapiens
acgtttggagctgcg

SEQ ID NO: 235911 - DNA, 15 bp, Homo sapiens
cacgtttggagctgc

SEQ ID NO: 235912 - DNA, 15 bp, Homo sapiens
acacgtttggagctg

SEQ ID NO: 235913 - DNA, 15 bp, Homo sapiens
gacacgtttggagct

SEQ ID NO: 235914 - DNA, 15 bp, Homo sapiens
tgacacgtttggagc

SEQ ID NO: 235915 - DNA, 15 bp, Homo sapiens
ttgacacgtttggag

SEQ ID NO: 235916 - DNA, 15 bp, Homo sapiens
attgacacgtttgga

SEQ ID NO: 235917 - DNA, 15 bp, Homo sapiens
cattgacacgtttgg

SEQ ID NO: 235918 - DNA, 15 bp, Homo sapiens
tcattgacacgtttg

SEQ ID NO: 235919 - DNA, 15 bp, Homo sapiens
gtcattgacacgttt

SEQ ID NO: 235920 - DNA, 15 bp, Homo sapiens
agtcattgacacgtt

SEQ ID NO: 235921 - DNA, 15 bp, Homo sapiens
gagtcattgacacgt

SEQ ID NO: 235922 - DNA, 15 bp, Homo sapiens
tgagtcattgacacg

SEQ ID NO: 235923 - DNA, 15 bp, Homo sapiens
gtgagtcattgacac

SEQ ID NO: 235924 - DNA, 15 bp, Homo sapiens
ggtgagtcattgaca

SEQ ID NO: 235925 - DNA, 15 bp, Homo sapiens
gggtgagtcattgac

SEQ ID NO: 235926 - DNA, 15 bp, Homo sapiens
tgggtgagtcattga

SEQ ID NO: 235927 - DNA, 15 bp, Homo sapiens
ttgggtgagtcattg

SEQ ID NO: 235928 - DNA, 15 bp, Homo sapiens
tttgggtgagtcatt

SEQ ID NO: 235929 - DNA, 15 bp, Homo sapiens
atttgggtgagtcat

SEQ ID NO: 235930 - DNA, 15 bp, Homo sapiens
aatttgggtgagtca

SEQ ID NO: 235931 - DNA, 15 bp, Homo sapiens
aaatttgggtgagtc

SEQ ID NO: 235932 - DNA, 15 bp, Homo sapiens
caaatttgggtgagt

SEQ ID NO: 235933 - DNA, 15 bp, Homo sapiens
tcaaatttgggtgag

SEQ ID NO: 235934 - DNA, 15 bp, Homo sapiens
ctcaaatttgggtga

SEQ ID NO: 235935 - DNA, 15 bp, Homo sapiens
actcaaatttgggtg

SEQ ID NO: 235936 - DNA, 15 bp, Homo sapiens
tactcaaatttgggt

SEQ ID NO: 235937 - DNA, 15 bp, Homo sapiens
ttactcaaatttggg

SEQ ID NO: 235938 - DNA, 15 bp, Homo sapiens
cttactcaaatttgg

SEQ ID NO: 235939 - DNA, 15 bp, Homo sapiens
ccttactcaaatttg

SEQ ID NO: 235940 - DNA, 15 bp, Homo sapiens
cccttactcaaattt

SEQ ID NO: 235941 - DNA, 15 bp, Homo sapiens
tcccttactcaaatt

SEQ ID NO: 235942 - DNA, 15 bp, Homo sapiens
ctcccttactcaaat

SEQ ID NO: 235943 - DNA, 15 bp, Homo sapiens
actcccttactcaaa

SEQ ID NO: 235944 - DNA, 15 bp, Homo sapiens
aactcccttactcaa

SEQ ID NO: 235945 - DNA, 15 bp, Homo sapiens
caactcccttactca

SEQ ID NO: 235946 - DNA, 15 bp, Homo sapiens
ccaactcccttactc

SEQ ID NO: 235947 - DNA, 15 bp, Homo sapiens
gccaactcccttact

SEQ ID NO: 235948 - DNA, 15 bp, Homo sapiens
agccaactcccttac

SEQ ID NO: 235949 - DNA, 15 bp, Homo sapiens
cagccaactccctta

SEQ ID NO: 235950 - DNA, 15 bp, Homo sapiens
gcagccaactccctt

SEQ ID NO: 235951 - DNA, 15 bp, Homo sapiens
agcagccaactccct

SEQ ID NO: 235952 - DNA, 15 bp, Homo sapiens
aagcagccaactccc

SEQ ID NO: 235953 - DNA, 15 bp, Homo sapiens
aaagcagccaactcc

SEQ ID NO: 235954 - DNA, 15 bp, Homo sapiens
taaagcagccaactc

SEQ ID NO: 235955 - DNA, 15 bp, Homo sapiens
ttaaagcagccaact

SEQ ID NO: 235956 - DNA, 15 bp, Homo sapiens
gttaaagcagccaac

SEQ ID NO: 235957 - DNA, 15 bp, Homo sapiens
cgttaaagcagccaa

SEQ ID NO: 235958 - DNA, 15 bp, Homo sapiens
tcgttaaagcagcca

SEQ ID NO: 235959 - DNA, 15 bp, Homo sapiens
ctcgttaaagcagcc

SEQ ID NO: 235960 - DNA, 15 bp, Homo sapiens
gctcgttaaagcagc

SEQ ID NO: 235961 - DNA, 15 bp, Homo sapiens
ggctcgttaaagcag

SEQ ID NO: 235962 - DNA, 15 bp, Homo sapiens
cggctcgttaaagca

SEQ ID NO: 235963 - DNA, 15 bp, Homo sapiens
gcggctcgttaaagc

SEQ ID NO: 235964 - DNA, 15 bp, Homo sapiens
tgcggctcgttaaag

SEQ ID NO: 235965 - DNA, 15 bp, Homo sapiens
ctgcggctcgttaaa

SEQ ID NO: 235966 - DNA, 15 bp, Homo sapiens
cctgcggctcgttaa

SEQ ID NO: 235967 - DNA, 15 bp, Homo sapiens
ccctgcggctcgtta

SEQ ID NO: 235968 - DNA, 15 bp, Homo sapiens
accctgcggctcgtt

SEQ ID NO: 235969 - DNA, 15 bp, Homo sapiens
caccctgcggctcgt

SEQ ID NO: 235970 - DNA, 15 bp, Homo sapiens
tcaccctgcggctcg

SEQ ID NO: 235971 - DNA, 15 bp, Homo sapiens
atcaccctgcggctc

SEQ ID NO: 235972 - DNA, 15 bp, Homo sapiens
aatcaccctgcggct

SEQ ID NO: 235973 - DNA, 15 bp, Homo sapiens
gaatcaccctgcggc

SEQ ID NO: 235974 - DNA, 15 bp, Homo sapiens
ggaatcaccctgcgg

SEQ ID NO: 235975 - DNA, 15 bp, Homo sapiens
gggaatcaccctgcg

SEQ ID NO: 235976 - DNA, 15 bp, Homo sapiens
agggaatcaccctgc

SEQ ID NO: 235977 - DNA, 15 bp, Homo sapiens
aagggaatcaccctg

SEQ ID NO: 235978 - DNA, 15 bp, Homo sapiens
caagggaatcaccct

SEQ ID NO: 235979 - DNA, 15 bp, Homo sapiens
acaagggaatcaccc

SEQ ID NO: 235980 - DNA, 15 bp, Homo sapiens
gacaagggaatcacc

SEQ ID NO: 235981 - DNA, 15 bp, Homo sapiens
tgacaagggaatcac

SEQ ID NO: 235982 - DNA, 15 bp, Homo sapiens
atgacaagggaatca

SEQ ID NO: 235983 - DNA, 15 bp, Homo sapiens
aatgacaagggaatc

SEQ ID NO: 235984 - DNA, 15 bp, Homo sapiens
aaatgacaagggaat

SEQ ID NO: 235985 - DNA, 15 bp, Homo sapiens
gaaatgacaagggaa

SEQ ID NO: 235986 - DNA, 15 bp, Homo sapiens
ggaaatgacaaggga

SEQ ID NO: 235987 - DNA, 15 bp, Homo sapiens
cggaaatgacaaggg

SEQ ID NO: 235988 - DNA, 15 bp, Homo sapiens
ccggaaatgacaagg

SEQ ID NO: 235989 - DNA, 15 bp, Homo sapiens
tccggaaatgacaag

SEQ ID NO: 235990 - DNA, 15 bp, Homo sapiens
ttccggaaatgacaa

SEQ ID NO: 235991 - DNA, 15 bp, Homo sapiens
tttccggaaatgaca

SEQ ID NO: 235992 - DNA, 15 bp, Homo sapiens
atttccggaaatgac

SEQ ID NO: 235993 - DNA, 15 bp, Homo sapiens
tatttccggaaatga

SEQ ID NO: 235994 - DNA, 15 bp, Homo sapiens
gtatttccggaaatg

SEQ ID NO: 235995 - DNA, 15 bp, Homo sapiens
ggtatttccggaaat

SEQ ID NO: 235996 - DNA, 15 bp, Homo sapiens
aggtatttccggaaa

SEQ ID NO: 235997 - DNA, 15 bp, Homo sapiens
taggtatttccggaa

SEQ ID NO: 235998 - DNA, 15 bp, Homo sapiens
ataggtatttccgga

SEQ ID NO: 235999 - DNA, 15 bp, Homo sapiens
gataggtatttccgg

SEQ ID NO: 236000 - DNA, 15 bp, Homo sapiens
agataggtatttccg

SEQ ID NO: 236001 - DNA, 15 bp, Homo sapiens
aagataggtatttcc

SEQ ID NO: 236002 - DNA, 15 bp, Homo sapiens
gaagataggtatttc

SEQ ID NO: 236003 - DNA, 15 bp, Homo sapiens
ggaagataggtattt

SEQ ID NO: 236004 - DNA, 15 bp, Homo sapiens
tggaagataggtatt

SEQ ID NO: 236005 - DNA, 15 bp, Homo sapiens
ctggaagataggtat

SEQ ID NO: 236006 - DNA, 15 bp, Homo sapiens
cctggaagataggta

SEQ ID NO: 236007 - DNA, 15 bp, Homo sapiens
ccctggaagataggt

SEQ ID NO: 236008 - DNA, 15 bp, Homo sapiens
tccctggaagatagg

SEQ ID NO: 236009 - DNA, 15 bp, Homo sapiens
ttccctggaagatag

SEQ ID NO: 236010 - DNA, 15 bp, Homo sapiens
gttccctggaagata

SEQ ID NO: 236011 - DNA, 15 bp, Homo sapiens
tgttccctggaagat

SEQ ID NO: 236012 - DNA, 15 bp, Homo sapiens
gtgttccctggaaga

SEQ ID NO: 236013 - DNA, 15 bp, Homo sapiens
agtgttccctggaag

SEQ ID NO: 236014 - DNA, 15 bp, Homo sapiens
cagtgttccctggaa

SEQ ID NO: 236015 - DNA, 15 bp, Homo sapiens
ccagtgttccctgga

SEQ ID NO: 236016 - DNA, 15 bp, Homo sapiens
cccagtgttccctgg

SEQ ID NO: 236017 - DNA, 15 bp, Homo sapiens
tcccagtgttccctg

SEQ ID NO: 236018 - DNA, 15 bp, Homo sapiens
ttcccagtgttccct

SEQ ID NO: 236019 - DNA, 15 bp, Homo sapiens
tttcccagtgttccc

SEQ ID NO: 236020 - DNA, 15 bp, Homo sapiens
ttttcccagtgttcc

SEQ ID NO: 236021 - DNA, 15 bp, Homo sapiens
tttttcccagtgttc

SEQ ID NO: 236022 - DNA, 15 bp, Homo sapiens
ttttttcccagtgtt

SEQ ID NO: 236023 - DNA, 15 bp, Homo sapiens
gttttttcccagtgt

SEQ ID NO: 236024 - DNA, 15 bp, Homo sapiens
tgttttttcccagtg

SEQ ID NO: 236025 - DNA, 15 bp, Homo sapiens
ctgttttttcccagt

SEQ ID NO: 236026 - DNA, 15 bp, Homo sapiens
cctgttttttcccag

SEQ ID NO: 236027 - DNA, 15 bp, Homo sapiens
ccctgttttttccca

SEQ ID NO: 236028 - DNA, 15 bp, Homo sapiens
tccctgttttttccc

SEQ ID NO: 236029 - DNA, 15 bp, Homo sapiens
ctccctgttttttcc

SEQ ID NO: 236030 - DNA, 15 bp, Homo sapiens
tctccctgttttttc

SEQ ID NO: 236031 - DNA, 15 bp, Homo sapiens
gtctccctgtttttt

SEQ ID NO: 236032 - DNA, 15 bp, Homo sapiens
ggtctccctgttttt

SEQ ID NO: 236033 - DNA, 15 bp, Homo sapiens
aggtctccctgtttt

SEQ ID NO: 236034 - DNA, 15 bp, Homo sapiens
aaggtctccctgttt

SEQ ID NO: 236035 - DNA, 15 bp, Homo sapiens
aaaggtctccctgtt

SEQ ID NO: 236036 - DNA, 15 bp, Homo sapiens
caaaggtctccctgt

SEQ ID NO: 236037 - DNA, 15 bp, Homo sapiens
acaaaggtctccctg

SEQ ID NO: 236038 - DNA, 15 bp, Homo sapiens
aacaaaggtctccct

SEQ ID NO: 236039 - DNA, 15 bp, Homo sapiens
caacaaaggtctccc

SEQ ID NO: 236040 - DNA, 15 bp, Homo sapiens
tcaacaaaggtctcc

SEQ ID NO: 236041 - DNA, 15 bp, Homo sapiens
ctcaacaaaggtctc

SEQ ID NO: 236042 - DNA, 15 bp, Homo sapiens
tctcaacaaaggtct

SEQ ID NO: 236043 - DNA, 15 bp, Homo sapiens
gtctcaacaaaggtc

SEQ ID NO: 236044 - DNA, 15 bp, Homo sapiens
tgtctcaacaaaggt

SEQ ID NO: 236045 - DNA, 15 bp, Homo sapiens
ctgtctcaacaaagg

SEQ ID NO: 236046 - DNA, 15 bp, Homo sapiens
tctgtctcaacaaag

SEQ ID NO: 236047 - DNA, 15 bp, Homo sapiens
ttctgtctcaacaaa

SEQ ID NO: 236048 - DNA, 15 bp, Homo sapiens
tttctgtctcaacaa

SEQ ID NO: 236049 - DNA, 15 bp, Homo sapiens
ttttctgtctcaaca

SEQ ID NO: 236050 - DNA, 15 bp, Homo sapiens
gttttctgtctcaac

SEQ ID NO: 236051 - DNA, 15 bp, Homo sapiens
ggttttctgtctcaa

SEQ ID NO: 236052 - DNA, 15 bp, Homo sapiens
aggttttctgtctca

SEQ ID NO: 236053 - DNA, 15 bp, Homo sapiens
caggttttctgtctc

SEQ ID NO: 236054 - DNA, 15 bp, Homo sapiens
acaggttttctgtct

SEQ ID NO: 236055 - DNA, 15 bp, Homo sapiens
tacaggttttctgtc

SEQ ID NO: 236056 - DNA, 15 bp, Homo sapiens
ctacaggttttctgt

SEQ ID NO: 236057 - DNA, 15 bp, Homo sapiens
cctacaggttttctg

SEQ ID NO: 236058 - DNA, 15 bp, Homo sapiens
ccctacaggttttct

SEQ ID NO: 236059 - DNA, 15 bp, Homo sapiens
cccctacaggttttc

SEQ ID NO: 236060 - DNA, 15 bp, Homo sapiens
tcccctacaggtttt

SEQ ID NO: 236061 - DNA, 15 bp, Homo sapiens
ttcccctacaggttt

SEQ ID NO: 236062 - DNA, 15 bp, Homo sapiens
attcccctacaggtt

SEQ ID NO: 236063 - DNA, 15 bp, Homo sapiens
aattcccctacaggt

SEQ ID NO: 236064 - DNA, 15 bp, Homo sapiens
gaattcccctacagg

SEQ ID NO: 236065 - DNA, 15 bp, Homo sapiens
agaattcccctacag

SEQ ID NO: 236066 - DNA, 15 bp, Homo sapiens
cagaattcccctaca

SEQ ID NO: 236067 - DNA, 15 bp, Homo sapiens
acagaattcccctac

SEQ ID NO: 236068 - DNA, 15 bp, Homo sapiens
aacagaattccccta

SEQ ID NO: 236069 - DNA, 15 bp, Homo sapiens
gaacagaattcccct

SEQ ID NO: 236070 - DNA, 15 bp, Homo sapiens
ggaacagaattcccc

SEQ ID NO: 236071 - DNA, 15 bp, Homo sapiens
aggaacagaattccc

SEQ ID NO: 236072 - DNA, 15 bp, Homo sapiens
gaggaacagaattcc

SEQ ID NO: 236073 - DNA, 15 bp, Homo sapiens
tgaggaacagaattc

SEQ ID NO: 236074 - DNA, 15 bp, Homo sapiens
atgaggaacagaatt

SEQ ID NO: 236075 - DNA, 15 bp, Homo sapiens
aatgaggaacagaat

SEQ ID NO: 236076 - DNA, 15 bp, Homo sapiens
gaatgaggaacagaa

SEQ ID NO: 236077 - DNA, 15 bp, Homo sapiens
ggaatgaggaacaga

SEQ ID NO: 236078 - DNA, 15 bp, Homo sapiens
aggaatgaggaacag

SEQ ID NO: 236079 - DNA, 15 bp, Homo sapiens
caggaatgaggaaca

SEQ ID NO: 236080 - DNA, 15 bp, Homo sapiens
gcaggaatgaggaac

SEQ ID NO: 236081 - DNA, 15 bp, Homo sapiens
agcaggaatgaggaa

SEQ ID NO: 236082 - DNA, 15 bp, Homo sapiens
gagcaggaatgagga

SEQ ID NO: 236083 - DNA, 15 bp, Homo sapiens
agagcaggaatgagg

SEQ ID NO: 236084 - DNA, 15 bp, Homo sapiens
aagagcaggaatgag

SEQ ID NO: 236085 - DNA, 15 bp, Homo sapiens
taagagcaggaatga

SEQ ID NO: 236086 - DNA, 15 bp, Homo sapiens
ataagagcaggaatg

SEQ ID NO: 236087 - DNA, 15 bp, Homo sapiens
gataagagcaggaat

SEQ ID NO: 236088 - DNA, 15 bp, Homo sapiens
agataagagcaggaa

SEQ ID NO: 236089 - DNA, 15 bp, Homo sapiens
cagataagagcagga

SEQ ID NO: 236090 - DNA, 15 bp, Homo sapiens
acagataagagcagg

SEQ ID NO: 236091 - DNA, 15 bp, Homo sapiens
tacagataagagcag

SEQ ID NO: 236092 - DNA, 15 bp, Homo sapiens
ctacagataagagca

SEQ ID NO: 236093 - DNA, 15 bp, Homo sapiens
tctacagataagagc

SEQ ID NO: 236094 - DNA, 15 bp, Homo sapiens
gtctacagataagag

SEQ ID NO: 236095 - DNA, 15 bp, Homo sapiens
agtctacagataaga

SEQ ID NO: 236096 - DNA, 15 bp, Homo sapiens
aagtctacagataag

SEQ ID NO: 236097 - DNA, 15 bp, Homo sapiens
gaagtctacagataa

SEQ ID NO: 236098 - DNA, 15 bp, Homo sapiens
ggaagtctacagata

SEQ ID NO: 236099 - DNA, 15 bp, Homo sapiens
aggaagtctacagat

SEQ ID NO: 236100 - DNA, 15 bp, Homo sapiens
gaggaagtctacaga

SEQ ID NO: 236101 - DNA, 15 bp, Homo sapiens
ggaggaagtctacag

SEQ ID NO: 236102 - DNA, 15 bp, Homo sapiens
gggaggaagtctaca

SEQ ID NO: 236103 - DNA, 15 bp, Homo sapiens
agggaggaagtctac

SEQ ID NO: 236104 - DNA, 15 bp, Homo sapiens
cagggaggaagtcta

SEQ ID NO: 236105 - DNA, 15 bp, Homo sapiens
tcagggaggaagtct

SEQ ID NO: 236106 - DNA, 15 bp, Homo sapiens
atcagggaggaagtc

SEQ ID NO: 236107 - DNA, 15 bp, Homo sapiens
tatcagggaggaagt

SEQ ID NO: 236108 - DNA, 15 bp, Homo sapiens
ttatcagggaggaag

SEQ ID NO: 236109 - DNA, 15 bp, Homo sapiens
cttatcagggaggaa

SEQ ID NO: 236110 - DNA, 15 bp, Homo sapiens
tcttatcagggagga

SEQ ID NO: 236111 - DNA, 15 bp, Homo sapiens
atcttatcagggagg

SEQ ID NO: 236112 - DNA, 15 bp, Homo sapiens
gatcttatcagggag

SEQ ID NO: 236113 - DNA, 15 bp, Homo sapiens
ggatcttatcaggga

SEQ ID NO: 236114 - DNA, 15 bp, Homo sapiens
tggatcttatcaggg

SEQ ID NO: 236115 - DNA, 15 bp, Homo sapiens
ttggatcttatcagg

SEQ ID NO: 236116 - DNA, 15 bp, Homo sapiens
attggatcttatcag

SEQ ID NO: 236117 - DNA, 15 bp, Homo sapiens
aattggatcttatca

SEQ ID NO: 236118 - DNA, 15 bp, Homo sapiens
gaattggatcttatc

SEQ ID NO: 236119 - DNA, 15 bp, Homo sapiens
agaattggatcttat

SEQ ID NO: 236120 - DNA, 15 bp, Homo sapiens
tagaattggatctta

SEQ ID NO: 236121 - DNA, 15 bp, Homo sapiens
ctagaattggatctt

SEQ ID NO: 236122 - DNA, 15 bp, Homo sapiens
tctagaattggatct

SEQ ID NO: 236123 - DNA, 15 bp, Homo sapiens
atctagaattggatc

SEQ ID NO: 236124 - DNA, 15 bp, Homo sapiens
catctagaattggat

SEQ ID NO: 236125 - DNA, 15 bp, Homo sapiens
ccatctagaattgga

SEQ ID NO: 236126 - DNA, 15 bp, Homo sapiens
cccatctagaattgg

SEQ ID NO: 236127 - DNA, 15 bp, Homo sapiens
acccatctagaattg

SEQ ID NO: 236128 - DNA, 15 bp, Homo sapiens
gacccatctagaatt

SEQ ID NO: 236129 - DNA, 15 bp, Homo sapiens
cgacccatctagaat

SEQ ID NO: 236130 - DNA, 15 bp, Homo sapiens
ccgacccatctagaa

SEQ ID NO: 236131 - DNA, 15 bp, Homo sapiens
accgacccatctaga

SEQ ID NO: 236132 - DNA, 15 bp, Homo sapiens
aaccgacccatctag

SEQ ID NO: 236133 - DNA, 15 bp, Homo sapiens
caaccgacccatcta

SEQ ID NO: 236134 - DNA, 15 bp, Homo sapiens
gcaaccgacccatct

SEQ ID NO: 236135 - DNA, 15 bp, Homo sapiens
agcaaccgacccatc

SEQ ID NO: 236136 - DNA, 15 bp, Homo sapiens
gagcaaccgacccat

SEQ ID NO: 236137 - DNA, 15 bp, Homo sapiens
ggagcaaccgaccca

SEQ ID NO: 236138 - DNA, 15 bp, Homo sapiens
aggagcaaccgaccc

SEQ ID NO: 236139 - DNA, 15 bp, Homo sapiens
aaggagcaaccgacc

SEQ ID NO: 236140 - DNA, 15 bp, Homo sapiens
caaggagcaaccgac

SEQ ID NO: 236141 - DNA, 15 bp, Homo sapiens
gcaaggagcaaccga

SEQ ID NO: 236142 - DNA, 15 bp, Homo sapiens
agcaaggagcaaccg

SEQ ID NO: 236143 - DNA, 15 bp, Homo sapiens
aagcaaggagcaacc

SEQ ID NO: 236144 - DNA, 15 bp, Homo sapiens
aaagcaaggagcaac

SEQ ID NO: 236145 - DNA, 15 bp, Homo sapiens
caaagcaaggagcaa

SEQ ID NO: 236146 - DNA, 15 bp, Homo sapiens
tcaaagcaaggagca

SEQ ID NO: 236147 - DNA, 15 bp, Homo sapiens
atcaaagcaaggagc

SEQ ID NO: 236148 - DNA, 15 bp, Homo sapiens
catcaaagcaaggag

SEQ ID NO: 236149 - DNA, 15 bp, Homo sapiens
ccatcaaagcaagga

SEQ ID NO: 236150 - DNA, 15 bp, Homo sapiens
cccatcaaagcaagg

SEQ ID NO: 236151 - DNA, 15 bp, Homo sapiens
acccatcaaagcaag

SEQ ID NO: 236152 - DNA, 15 bp, Homo sapiens
cacccatcaaagcaa

SEQ ID NO: 236153 - DNA, 15 bp, Homo sapiens
gcacccatcaaagca

SEQ ID NO: 236154 - DNA, 15 bp, Homo sapiens
agcacccatcaaagc

SEQ ID NO: 236155 - DNA, 15 bp, Homo sapiens
aagcacccatcaaag

SEQ ID NO: 236156 - DNA, 15 bp, Homo sapiens
aaagcacccatcaaa

SEQ ID NO: 236157 - DNA, 15 bp, Homo sapiens
caaagcacccatcaa

SEQ ID NO: 236158 - DNA, 15 bp, Homo sapiens
tcaaagcacccatca

SEQ ID NO: 236159 - DNA, 15 bp, Homo sapiens
atcaaagcacccatc

SEQ ID NO: 236160 - DNA, 15 bp, Homo sapiens
catcaaagcacccat

SEQ ID NO: 236161 - DNA, 15 bp, Homo sapiens
ccatcaaagcaccca

SEQ ID NO: 236162 - DNA, 15 bp, Homo sapiens
cccatcaaagcaccc

SEQ ID NO: 236163 - DNA, 15 bp, Homo sapiens
gcccatcaaagcacc

SEQ ID NO: 236164 - DNA, 15 bp, Homo sapiens
agcccatcaaagcac

SEQ ID NO: 236165 - DNA, 15 bp, Homo sapiens
aagcccatcaaagca

SEQ ID NO: 236166 - DNA, 15 bp, Homo sapiens
aaagcccatcaaagc

SEQ ID NO: 236167 - DNA, 15 bp, Homo sapiens
taaagcccatcaaag

SEQ ID NO: 236168 - DNA, 15 bp, Homo sapiens
ataaagcccatcaaa

SEQ ID NO: 236169 - DNA, 15 bp, Homo sapiens
aataaagcccatcaa

SEQ ID NO: 236170 - DNA, 15 bp, Homo sapiens
taataaagcccatca

SEQ ID NO: 236171 - DNA, 15 bp, Homo sapiens
ataataaagcccatc

SEQ ID NO: 236172 - DNA, 15 bp, Homo sapiens
aataataaagcccat

SEQ ID NO: 236173 - DNA, 15 bp, Homo sapiens
taataataaagccca

SEQ ID NO: 236174 - DNA, 15 bp, Homo sapiens
ataataataaagccc

SEQ ID NO: 236175 - DNA, 15 bp, Homo sapiens
aataataataaagcc

SEQ ID NO: 236176 - DNA, 15 bp, Homo sapiens
taataataataaagc

SEQ ID NO: 236177 - DNA, 15 bp, Homo sapiens
ataataataataaag

SEQ ID NO: 236178 - DNA, 15 bp, Homo sapiens
aataataataataaa

SEQ ID NO: 236179 - DNA, 15 bp, Homo sapiens
taataataataataa

SEQ ID NO: 236180 - DNA, 15 bp, Homo sapiens
ataataataataata

SEQ ID NO: 236181 - DNA, 15 bp, Homo sapiens
aataataataataat

SEQ ID NO: 236182 - DNA, 15 bp, Homo sapiens
aaataataataataa

SEQ ID NO: 236183 - DNA, 15 bp, Homo sapiens
aaaataataataata

SEQ ID NO: 236184 - DNA, 15 bp, Homo sapiens
caaaataataataat

SEQ ID NO: 236185 - DNA, 15 bp, Homo sapiens
tcaaaataataataa

SEQ ID NO: 236186 - DNA, 15 bp, Homo sapiens
atcaaaataataata

SEQ ID NO: 236187 - DNA, 15 bp, Homo sapiens
catcaaaataataat

SEQ ID NO: 236188 - DNA, 15 bp, Homo sapiens
ccatcaaaataataa

SEQ ID NO: 236189 - DNA, 15 bp, Homo sapiens
cccatcaaaataata

SEQ ID NO: 236190 - DNA, 15 bp, Homo sapiens
gcccatcaaaataat

SEQ ID NO: 236191 - DNA, 15 bp, Homo sapiens
agcccatcaaaataa

SEQ ID NO: 236192 - DNA, 15 bp, Homo sapiens
aagcccatcaaaata

SEQ ID NO: 236193 - DNA, 15 bp, Homo sapiens
aaagcccatcaaaat

SEQ ID NO: 236194 - DNA, 15 bp, Homo sapiens
aaaagcccatcaaaa

SEQ ID NO: 236195 - DNA, 15 bp, Homo sapiens
aaaaagcccatcaaa

SEQ ID NO: 236196 - DNA, 15 bp, Homo sapiens
caaaaagcccatcaa

SEQ ID NO: 236197 - DNA, 15 bp, Homo sapiens
tcaaaaagcccatca

SEQ ID NO: 236198 - DNA, 15 bp, Homo sapiens
atcaaaaagcccatc

SEQ ID NO: 236199 - DNA, 15 bp, Homo sapiens
catcaaaaagcccat

SEQ ID NO: 236200 - DNA, 15 bp, Homo sapiens
acatcaaaaagccca

SEQ ID NO: 236201 - DNA, 15 bp, Homo sapiens
gacatcaaaaagccc

SEQ ID NO: 236202 - DNA, 15 bp, Homo sapiens
ggacatcaaaaagcc

SEQ ID NO: 236203 - DNA, 15 bp, Homo sapiens
gggacatcaaaaagc

SEQ ID NO: 236204 - DNA, 15 bp, Homo sapiens
agggacatcaaaaag

SEQ ID NO: 236205 - DNA, 15 bp, Homo sapiens
aagggacatcaaaaa

SEQ ID NO: 236206 - DNA, 15 bp, Homo sapiens
aaagggacatcaaaa

SEQ ID NO: 236207 - DNA, 15 bp, Homo sapiens
aaaagggacatcaaa

SEQ ID NO: 236208 - DNA, 15 bp, Homo sapiens
gaaaagggacatcaa

SEQ ID NO: 236209 - DNA, 15 bp, Homo sapiens
ggaaaagggacatca

SEQ ID NO: 236210 - DNA, 15 bp, Homo sapiens
aggaaaagggacatc

SEQ ID NO: 236211 - DNA, 15 bp, Homo sapiens
aaggaaaagggacat

SEQ ID NO: 236212 - DNA, 15 bp, Homo sapiens
gaaggaaaagggaca

SEQ ID NO: 236213 - DNA, 15 bp, Homo sapiens
ggaaggaaaagggac

SEQ ID NO: 236214 - DNA, 15 bp, Homo sapiens
tggaaggaaaaggga

SEQ ID NO: 236215 - DNA, 15 bp, Homo sapiens
gtggaaggaaaaggg

SEQ ID NO: 236216 - DNA, 15 bp, Homo sapiens
tgtggaaggaaaagg

SEQ ID NO: 236217 - DNA, 15 bp, Homo sapiens
gtgtggaaggaaaag

SEQ ID NO: 236218 - DNA, 15 bp, Homo sapiens
agtgtggaaggaaaa

SEQ ID NO: 236219 - DNA, 15 bp, Homo sapiens
gagtgtggaaggaaa

SEQ ID NO: 236220 - DNA, 15 bp, Homo sapiens
agagtgtggaaggaa

SEQ ID NO: 236221 - DNA, 15 bp, Homo sapiens
cagagtgtggaagga

SEQ ID NO: 236222 - DNA, 15 bp, Homo sapiens
acagagtgtggaagg

SEQ ID NO: 236223 - DNA, 15 bp, Homo sapiens
gacagagtgtggaag

SEQ ID NO: 236224 - DNA, 15 bp, Homo sapiens
ggacagagtgtggaa

SEQ ID NO: 236225 - DNA, 15 bp, Homo sapiens
gggacagagtgtgga

SEQ ID NO: 236226 - DNA, 15 bp, Homo sapiens
tgggacagagtgtgg

SEQ ID NO: 236227 - DNA, 15 bp, Homo sapiens
ttgggacagagtgtg

SEQ ID NO: 236228 - DNA, 15 bp, Homo sapiens
gttgggacagagtgt

SEQ ID NO: 236229 - DNA, 15 bp, Homo sapiens
agttgggacagagtg

SEQ ID NO: 236230 - DNA, 15 bp, Homo sapiens
cagttgggacagagt

SEQ ID NO: 236231 - DNA, 15 bp, Homo sapiens
acagttgggacagag

SEQ ID NO: 236232 - DNA, 15 bp, Homo sapiens
gacagttgggacaga

SEQ ID NO: 236233 - DNA, 15 bp, Homo sapiens
tgacagttgggacag

SEQ ID NO: 236234 - DNA, 15 bp, Homo sapiens
ttgacagttgggaca

SEQ ID NO: 236235 - DNA, 15 bp, Homo sapiens
cttgacagttgggac

SEQ ID NO: 236236 - DNA, 15 bp, Homo sapiens
gcttgacagttggga

SEQ ID NO: 236237 - DNA, 15 bp, Homo sapiens
tgcttgacagttggg

SEQ ID NO: 236238 - DNA, 15 bp, Homo sapiens
ttgcttgacagttgg

SEQ ID NO: 236239 - DNA, 15 bp, Homo sapiens
tttgcttgacagttg

SEQ ID NO: 236240 - DNA, 15 bp, Homo sapiens
atttgcttgacagtt

SEQ ID NO: 236241 - DNA, 15 bp, Homo sapiens
tatttgcttgacagt

SEQ ID NO: 236242 - DNA, 15 bp, Homo sapiens
ctatttgcttgacag

SEQ ID NO: 236243 - DNA, 15 bp, Homo sapiens
gctatttgcttgaca

SEQ ID NO: 236244 - DNA, 15 bp, Homo sapiens
ggctatttgcttgac

SEQ ID NO: 236245 - DNA, 15 bp, Homo sapiens
aggctatttgcttga

SEQ ID NO: 236246 - DNA, 15 bp, Homo sapiens
aaggctatttgcttg

SEQ ID NO: 236247 - DNA, 15 bp, Homo sapiens
aaaggctatttgctt

SEQ ID NO: 236248 - DNA, 15 bp, Homo sapiens
aaaaggctatttgct

SEQ ID NO: 236249 - DNA, 15 bp, Homo sapiens
caaaaggctatttgc

SEQ ID NO: 236250 - DNA, 15 bp, Homo sapiens
acaaaaggctatttg

SEQ ID NO: 236251 - DNA, 15 bp, Homo sapiens
aacaaaaggctattt

SEQ ID NO: 236252 - DNA, 15 bp, Homo sapiens
caacaaaaggctatt

SEQ ID NO: 236253 - DNA, 15 bp, Homo sapiens
gcaacaaaaggctat

SEQ ID NO: 236254 - DNA, 15 bp, Homo sapiens
agcaacaaaaggcta

SEQ ID NO: 236255 - DNA, 15 bp, Homo sapiens
tagcaacaaaaggct

SEQ ID NO: 236256 - DNA, 15 bp, Homo sapiens
ttagcaacaaaaggc

SEQ ID NO: 236257 - DNA, 15 bp, Homo sapiens
cttagcaacaaaagg

SEQ ID NO: 236258 - DNA, 15 bp, Homo sapiens
tcttagcaacaaaag

SEQ ID NO: 236259 - DNA, 15 bp, Homo sapiens
ctcttagcaacaaaa

SEQ ID NO: 236260 - DNA, 15 bp, Homo sapiens
tctcttagcaacaaa

SEQ ID NO: 236261 - DNA, 15 bp, Homo sapiens
gtctcttagcaacaa

SEQ ID NO: 236262 - DNA, 15 bp, Homo sapiens
agtctcttagcaaca

SEQ ID NO: 236263 - DNA, 15 bp, Homo sapiens
cagtctcttagcaac

SEQ ID NO: 236264 - DNA, 15 bp, Homo sapiens
gcagtctcttagcaa

SEQ ID NO: 236265 - DNA, 15 bp, Homo sapiens
tgcagtctcttagca

SEQ ID NO: 236266 - DNA, 15 bp, Homo sapiens
ctgcagtctcttagc

SEQ ID NO: 236267 - DNA, 15 bp, Homo sapiens
tctgcagtctcttag

SEQ ID NO: 236268 - DNA, 15 bp, Homo sapiens
atctgcagtctctta

SEQ ID NO: 236269 - DNA, 15 bp, Homo sapiens
catctgcagtctctt

SEQ ID NO: 236270 - DNA, 15 bp, Homo sapiens
acatctgcagtctct

SEQ ID NO: 236271 - DNA, 15 bp, Homo sapiens
tacatctgcagtctc

SEQ ID NO: 236272 - DNA, 15 bp, Homo sapiens
ttacatctgcagtct

SEQ ID NO: 236273 - DNA, 15 bp, Homo sapiens
gttacatctgcagtc

SEQ ID NO: 236274 - DNA, 15 bp, Homo sapiens
ggttacatctgcagt

SEQ ID NO: 236275 - DNA, 15 bp, Homo sapiens
cggttacatctgcag

SEQ ID NO: 236276 - DNA, 15 bp, Homo sapiens
tcggttacatctgca

SEQ ID NO: 236277 - DNA, 15 bp, Homo sapiens
gtcggttacatctgc

SEQ ID NO: 236278 - DNA, 15 bp, Homo sapiens
ggtcggttacatctg

SEQ ID NO: 236279 - DNA, 15 bp, Homo sapiens
tggtcggttacatct

SEQ ID NO: 236280 - DNA, 15 bp, Homo sapiens
ctggtcggttacatc

SEQ ID NO: 236281 - DNA, 15 bp, Homo sapiens
gctggtcggttacat

SEQ ID NO: 236282 - DNA, 15 bp, Homo sapiens
tgctggtcggttaca

SEQ ID NO: 236283 - DNA, 15 bp, Homo sapiens
ctgctggtcggttac

SEQ ID NO: 236284 - DNA, 15 bp, Homo sapiens
gctgctggtcggtta

SEQ ID NO: 236285 - DNA, 15 bp, Homo sapiens
tgctgctggtcggtt

SEQ ID NO: 236286 - DNA, 15 bp, Homo sapiens
ttgctgctggtcggt

SEQ ID NO: 236287 - DNA, 15 bp, Homo sapiens
tttgctgctggtcgg

SEQ ID NO: 236288 - DNA, 15 bp, Homo sapiens
gtttgctgctggtcg

SEQ ID NO: 236289 - DNA, 15 bp, Homo sapiens
tgtttgctgctggtc

SEQ ID NO: 236290 - DNA, 15 bp, Homo sapiens
ctgtttgctgctggt

SEQ ID NO: 236291 - DNA, 15 bp, Homo sapiens
actgtttgctgctgg

SEQ ID NO: 236292 - DNA, 15 bp, Homo sapiens
cactgtttgctgctg

SEQ ID NO: 236293 - DNA, 15 bp, Homo sapiens
tcactgtttgctgct

SEQ ID NO: 236294 - DNA, 15 bp, Homo sapiens
ctcactgtttgctgc

SEQ ID NO: 236295 - DNA, 15 bp, Homo sapiens
actcactgtttgctg

SEQ ID NO: 236296 - DNA, 15 bp, Homo sapiens
gactcactgtttgct

SEQ ID NO: 236297 - DNA, 15 bp, Homo sapiens
tgactcactgtttgc

SEQ ID NO: 236298 - DNA, 15 bp, Homo sapiens
ctgactcactgtttg

SEQ ID NO: 236299 - DNA, 15 bp, Homo sapiens
cctgactcactgttt

SEQ ID NO: 236300 - DNA, 15 bp, Homo sapiens
gcctgactcactgtt

SEQ ID NO: 236301 - DNA, 15 bp, Homo sapiens
agcctgactcactgt

SEQ ID NO: 236302 - DNA, 15 bp, Homo sapiens
gagcctgactcactg

SEQ ID NO: 236303 - DNA, 15 bp, Homo sapiens
agagcctgactcact

SEQ ID NO: 236304 - DNA, 15 bp, Homo sapiens
gagagcctgactcac

SEQ ID NO: 236305 - DNA, 15 bp, Homo sapiens
agagagcctgactca

SEQ ID NO: 236306 - DNA, 15 bp, Homo sapiens
gagagagcctgactc

SEQ ID NO: 236307 - DNA, 15 bp, Homo sapiens
agagagagcctgact

SEQ ID NO: 236308 - DNA, 15 bp, Homo sapiens
aagagagagcctgac

SEQ ID NO: 236309 - DNA, 15 bp, Homo sapiens
gaagagagagcctga

SEQ ID NO: 236310 - DNA, 15 bp, Homo sapiens
ggaagagagagcctg

SEQ ID NO: 236311 - DNA, 15 bp, Homo sapiens
cggaagagagagcct

SEQ ID NO: 236312 - DNA, 15 bp, Homo sapiens
ccggaagagagagcc

SEQ ID NO: 236313 - DNA, 15 bp, Homo sapiens
tccggaagagagagc

SEQ ID NO: 236314 - DNA, 15 bp, Homo sapiens
ttccggaagagagag

SEQ ID NO: 236315 - DNA, 15 bp, Homo sapiens
cttccggaagagaga

SEQ ID NO: 236316 - DNA, 15 bp, Homo sapiens
gcttccggaagagag

SEQ ID NO: 236317 - DNA, 15 bp, Homo sapiens
tgcttccggaagaga

SEQ ID NO: 236318 - DNA, 15 bp, Homo sapiens
ttgcttccggaagag

SEQ ID NO: 236319 - DNA, 15 bp, Homo sapiens
tttgcttccggaaga

SEQ ID NO: 236320 - DNA, 15 bp, Homo sapiens
ttttgcttccggaag

SEQ ID NO: 236321 - DNA, 15 bp, Homo sapiens
attttgcttccggaa

SEQ ID NO: 236322 - DNA, 15 bp, Homo sapiens
gattttgcttccgga

SEQ ID NO: 236323 - DNA, 15 bp, Homo sapiens
tgattttgcttccgg

SEQ ID NO: 236324 - DNA, 15 bp, Homo sapiens
ttgattttgcttccg

SEQ ID NO: 236325 - DNA, 15 bp, Homo sapiens
attgattttgcttcc

SEQ ID NO: 236326 - DNA, 15 bp, Homo sapiens
aattgattttgcttc

SEQ ID NO: 236327 - DNA, 15 bp, Homo sapiens
caattgattttgctt

SEQ ID NO: 236328 - DNA, 15 bp, Homo sapiens
gcaattgattttgct

SEQ ID NO: 236329 - DNA, 15 bp, Homo sapiens
agcaattgattttgc

SEQ ID NO: 236330 - DNA, 15 bp, Homo sapiens
cagcaattgattttg

SEQ ID NO: 236331 - DNA, 15 bp, Homo sapiens
tcagcaattgatttt

SEQ ID NO: 236332 - DNA, 15 bp, Homo sapiens
ctcagcaattgattt

SEQ ID NO: 236333 - DNA, 15 bp, Homo sapiens
tctcagcaattgatt

SEQ ID NO: 236334 - DNA, 15 bp, Homo sapiens
atctcagcaattgat

SEQ ID NO: 236335 - DNA, 15 bp, Homo sapiens
gatctcagcaattga

SEQ ID NO: 236336 - DNA, 15 bp, Homo sapiens
tgatctcagcaattg

SEQ ID NO: 236337 - DNA, 15 bp, Homo sapiens
gtgatctcagcaatt

SEQ ID NO: 236338 - DNA, 15 bp, Homo sapiens
agtgatctcagcaat

SEQ ID NO: 236339 - DNA, 15 bp, Homo sapiens
gagtgatctcagcaa

SEQ ID NO: 236340 - DNA, 15 bp, Homo sapiens
agagtgatctcagca

SEQ ID NO: 236341 - DNA, 15 bp, Homo sapiens
cagagtgatctcagc

SEQ ID NO: 236342 - DNA, 15 bp, Homo sapiens
ccagagtgatctcag

SEQ ID NO: 236343 - DNA, 15 bp, Homo sapiens
cccagagtgatctca

SEQ ID NO: 236344 - DNA, 15 bp, Homo sapiens
ccccagagtgatctc

SEQ ID NO: 236345 - DNA, 15 bp, Homo sapiens
tccccagagtgatct

SEQ ID NO: 236346 - DNA, 15 bp, Homo sapiens
ttccccagagtgatc

SEQ ID NO: 236347 - DNA, 15 bp, Homo sapiens
tttccccagagtgat

SEQ ID NO: 236348 - DNA, 15 bp, Homo sapiens
ttttccccagagtga

SEQ ID NO: 236349 - DNA, 15 bp, Homo sapiens
attttccccagagtg

SEQ ID NO: 236350 - DNA, 15 bp, Homo sapiens
tattttccccagagt

SEQ ID NO: 236351 - DNA, 15 bp, Homo sapiens
gtattttccccagag

SEQ ID NO: 236352 - DNA, 15 bp, Homo sapiens
ggtattttccccaga

SEQ ID NO: 236353 - DNA, 15 bp, Homo sapiens
gggtattttccccag

SEQ ID NO: 236354 - DNA, 15 bp, Homo sapiens
tgggtattttcccca

SEQ ID NO: 236355 - DNA, 15 bp, Homo sapiens
gtgggtattttcccc

SEQ ID NO: 236356 - DNA, 15 bp, Homo sapiens
ggtgggtattttccc

SEQ ID NO: 236357 - DNA, 15 bp, Homo sapiens
aggtgggtattttcc

SEQ ID NO: 236358 - DNA, 15 bp, Homo sapiens
aaggtgggtattttc

SEQ ID NO: 236359 - DNA, 15 bp, Homo sapiens
taaggtgggtatttt

SEQ ID NO: 236360 - DNA, 15 bp, Homo sapiens
ataaggtgggtattt

SEQ ID NO: 236361 - DNA, 15 bp, Homo sapiens
aataaggtgggtatt

SEQ ID NO: 236362 - DNA, 15 bp, Homo sapiens
aaataaggtgggtat

SEQ ID NO: 236363 - DNA, 15 bp, Homo sapiens
caaataaggtgggta

SEQ ID NO: 236364 - DNA, 15 bp, Homo sapiens
ccaaataaggtgggt

SEQ ID NO: 236365 - DNA, 15 bp, Homo sapiens
tccaaataaggtggg

SEQ ID NO: 236366 - DNA, 15 bp, Homo sapiens
ttccaaataaggtgg

SEQ ID NO: 236367 - DNA, 15 bp, Homo sapiens
tttccaaataaggtg

SEQ ID NO: 236368 - DNA, 15 bp, Homo sapiens
ctttccaaataaggt

SEQ ID NO: 236369 - DNA, 15 bp, Homo sapiens
tctttccaaataagg

SEQ ID NO: 236370 - DNA, 15 bp, Homo sapiens
ttctttccaaataag

SEQ ID NO: 236371 - DNA, 15 bp, Homo sapiens
cttctttccaaataa

SEQ ID NO: 236372 - DNA, 15 bp, Homo sapiens
gcttctttccaaata

SEQ ID NO: 236373 - DNA, 15 bp, Homo sapiens
tgcttctttccaaat

SEQ ID NO: 236374 - DNA, 15 bp, Homo sapiens
gtgcttctttccaaa

SEQ ID NO: 236375 - DNA, 15 bp, Homo sapiens
agtgcttctttccaa

SEQ ID NO: 236376 - DNA, 15 bp, Homo sapiens
cagtgcttctttcca

SEQ ID NO: 236377 - DNA, 15 bp, Homo sapiens
tcagtgcttctttcc

SEQ ID NO: 236378 - DNA, 15 bp, Homo sapiens
atcagtgcttctttc

SEQ ID NO: 236379 - DNA, 15 bp, Homo sapiens
gatcagtgcttcttt

SEQ ID NO: 236380 - DNA, 15 bp, Homo sapiens
tgatcagtgcttctt

SEQ ID NO: 236381 - DNA, 15 bp, Homo sapiens
ttgatcagtgcttct

SEQ ID NO: 236382 - DNA, 15 bp, Homo sapiens
attgatcagtgcttc

SEQ ID NO: 236383 - DNA, 15 bp, Homo sapiens
aattgatcagtgctt

SEQ ID NO: 236384 - DNA, 15 bp, Homo sapiens
caattgatcagtgct

SEQ ID NO: 236385 - DNA, 15 bp, Homo sapiens
tcaattgatcagtgc

SEQ ID NO: 236386 - DNA, 15 bp, Homo sapiens
atcaattgatcagtg

SEQ ID NO: 236387 - DNA, 15 bp, Homo sapiens
catcaattgatcagt

SEQ ID NO: 236388 - DNA, 15 bp, Homo sapiens
acatcaattgatcag

SEQ ID NO: 236389 - DNA, 15 bp, Homo sapiens
gacatcaattgatca

SEQ ID NO: 236390 - DNA, 15 bp, Homo sapiens
agacatcaattgatc

SEQ ID NO: 236391 - DNA, 15 bp, Homo sapiens
tagacatcaattgat

SEQ ID NO: 236392 - DNA, 15 bp, Homo sapiens
atagacatcaattga

SEQ ID NO: 236393 - DNA, 15 bp, Homo sapiens
aatagacatcaattg

SEQ ID NO: 236394 - DNA, 15 bp, Homo sapiens
aaatagacatcaatt

SEQ ID NO: 236395 - DNA, 15 bp, Homo sapiens
aaaatagacatcaat

SEQ ID NO: 236396 - DNA, 15 bp, Homo sapiens
aaaaatagacatcaa

SEQ ID NO: 236397 - DNA, 15 bp, Homo sapiens
aaaaaatagacatca

SEQ ID NO: 236398 - DNA, 15 bp, Homo sapiens
aaaaaaatagacatc

SEQ ID NO: 236399 - DNA, 15 bp, Homo sapiens
aaaaaaaatagacat

SEQ ID NO: 236400 - DNA, 15 bp, Homo sapiens
aaaaaaaaatagaca

SEQ ID NO: 236401 - DNA, 15 bp, Homo sapiens
aaaaaaaaaatagac

SEQ ID NO: 236402 - DNA, 15 bp, Homo sapiens
actcaaaaaaaaaaa

SEQ ID NO: 236403 - DNA, 15 bp, Homo sapiens
aactcaaaaaaaaaa

SEQ ID NO: 236404 - DNA, 15 bp, Homo sapiens
caactcaaaaaaaaa

SEQ ID NO: 236405 - DNA, 15 bp, Homo sapiens
ccaactcaaaaaaaa

SEQ ID NO: 236406 - DNA, 15 bp, Homo sapiens
tccaactcaaaaaaa

SEQ ID NO: 236407 - DNA, 15 bp, Homo sapiens
ctccaactcaaaaaa

SEQ ID NO: 236408 - DNA, 15 bp, Homo sapiens
actccaactcaaaaa

SEQ ID NO: 236409 - DNA, 15 bp, Homo sapiens
gactccaactcaaaa

SEQ ID NO: 236410 - DNA, 15 bp, Homo sapiens
agactccaactcaaa

SEQ ID NO: 236411 - DNA, 15 bp, Homo sapiens
gagactccaactcaa

SEQ ID NO: 236412 - DNA, 15 bp, Homo sapiens
cgagactccaactca

SEQ ID NO: 236413 - DNA, 15 bp, Homo sapiens
gcgagactccaactc

SEQ ID NO: 236414 - DNA, 15 bp, Homo sapiens
ggcgagactccaact

SEQ ID NO: 236415 - DNA, 15 bp, Homo sapiens
gggcgagactccaac

SEQ ID NO: 236416 - DNA, 15 bp, Homo sapiens
agggcgagactccaa

SEQ ID NO: 236417 - DNA, 15 bp, Homo sapiens
cagggcgagactcca

SEQ ID NO: 236418 - DNA, 15 bp, Homo sapiens
acagggcgagactcc

SEQ ID NO: 236419 - DNA, 15 bp, Homo sapiens
gacagggcgagactc

SEQ ID NO: 236420 - DNA, 15 bp, Homo sapiens
tgacagggcgagact

SEQ ID NO: 236421 - DNA, 15 bp, Homo sapiens
gtgacagggcgagac

SEQ ID NO: 236422 - DNA, 15 bp, Homo sapiens
ggtgacagggcgaga

SEQ ID NO: 236423 - DNA, 15 bp, Homo sapiens
gggtgacagggcgag

SEQ ID NO: 236424 - DNA, 15 bp, Homo sapiens
tgggtgacagggcga

SEQ ID NO: 236425 - DNA, 15 bp, Homo sapiens
ctgggtgacagggcg

SEQ ID NO: 236426 - DNA, 15 bp, Homo sapiens
cctgggtgacagggc

SEQ ID NO: 236427 - DNA, 15 bp, Homo sapiens
gcctgggtgacaggg

SEQ ID NO: 236428 - DNA, 15 bp, Homo sapiens
agcctgggtgacagg

SEQ ID NO: 236429 - DNA, 15 bp, Homo sapiens
ccagcctgggtgaca

SEQ ID NO: 236430 - DNA, 15 bp, Homo sapiens
tccagcctgggtgac

SEQ ID NO: 236431 - DNA, 15 bp, Homo sapiens
ctccagcctgggtga

SEQ ID NO: 236432 - DNA, 15 bp, Homo sapiens
actccagcctgggtg

SEQ ID NO: 236433 - DNA, 15 bp, Homo sapiens
cactccagcctgggt

SEQ ID NO: 236434 - DNA, 15 bp, Homo sapiens
gccattgcactccag

SEQ ID NO: 236435 - DNA, 15 bp, Homo sapiens
tgccattgcactcca

SEQ ID NO: 236436 - DNA, 15 bp, Homo sapiens
atgccattgcactcc

SEQ ID NO: 236437 - DNA, 15 bp, Homo sapiens
tatgccattgcactc

SEQ ID NO: 236438 - DNA, 15 bp, Homo sapiens
ttatgccattgcact

SEQ ID NO: 236439 - DNA, 15 bp, Homo sapiens
attatgccattgcac

SEQ ID NO: 236440 - DNA, 15 bp, Homo sapiens
gattatgccattgca

SEQ ID NO: 236441 - DNA, 15 bp, Homo sapiens
agattatgccattgc

SEQ ID NO: 236442 - DNA, 15 bp, Homo sapiens
gagattatgccattg

SEQ ID NO: 236443 - DNA, 15 bp, Homo sapiens
cgagattatgccatt

SEQ ID NO: 236444 - DNA, 15 bp, Homo sapiens
gcgagattatgccat

SEQ ID NO: 236445 - DNA, 15 bp, Homo sapiens
ggcgagattatgcca

SEQ ID NO: 236446 - DNA, 15 bp, Homo sapiens
aggcgagattatgcc

SEQ ID NO: 236447 - DNA, 15 bp, Homo sapiens
gaggcgagattatgc

SEQ ID NO: 236448 - DNA, 15 bp, Homo sapiens
tgaggcgagattatg

SEQ ID NO: 236449 - DNA, 15 bp, Homo sapiens
gtgaggcgagattat

SEQ ID NO: 236450 - DNA, 15 bp, Homo sapiens
agtgaggcgagatta

SEQ ID NO: 236451 - DNA, 15 bp, Homo sapiens
cagtgaggcgagatt

SEQ ID NO: 236452 - DNA, 15 bp, Homo sapiens
gcagtgaggcgagat

SEQ ID NO: 236453 - DNA, 15 bp, Homo sapiens
tgcagtgaggcgaga

SEQ ID NO: 236454 - DNA, 15 bp, Homo sapiens
ttgcagtgaggcgag

SEQ ID NO: 236455 - DNA, 15 bp, Homo sapiens
attgcagtgaggcga

SEQ ID NO: 236456 - DNA, 15 bp, Homo sapiens
gattgcagtgaggcg

SEQ ID NO: 236457 - DNA, 15 bp, Homo sapiens
ggattgcagtgaggc

SEQ ID NO: 236458 - DNA, 15 bp, Homo sapiens
gggattgcagtgagg

SEQ ID NO: 236459 - DNA, 15 bp, Homo sapiens
ggggattgcagtgag

SEQ ID NO: 236460 - DNA, 15 bp, Homo sapiens
cggggattgcagtga

SEQ ID NO: 236461 - DNA, 15 bp, Homo sapiens
gcggggattgcagtg

SEQ ID NO: 236462 - DNA, 15 bp, Homo sapiens
ggcggggattgcagt

SEQ ID NO: 236463 - DNA, 15 bp, Homo sapiens
aggcggggattgcag

SEQ ID NO: 236464 - DNA, 15 bp, Homo sapiens
gaggcggggattgca

SEQ ID NO: 236465 - DNA, 15 bp, Homo sapiens
ggaggcggggattgc

SEQ ID NO: 236466 - DNA, 15 bp, Homo sapiens
gggaggcggggattg

SEQ ID NO: 236467 - DNA, 15 bp, Homo sapiens
cgggaggcggggatt

SEQ ID NO: 236468 - DNA, 15 bp, Homo sapiens
ccgggaggcggggat

SEQ ID NO: 236469 - DNA, 15 bp, Homo sapiens
cccgggaggcgggga

SEQ ID NO: 236470 - DNA, 15 bp, Homo sapiens
acccgggaggcgggg

SEQ ID NO: 236471 - DNA, 15 bp, Homo sapiens
aacccgggaggcggg

SEQ ID NO: 236472 - DNA, 15 bp, Homo sapiens
gaacccgggaggcgg

SEQ ID NO: 236473 - DNA, 15 bp, Homo sapiens
ggaacccgggaggcg

SEQ ID NO: 236474 - DNA, 15 bp, Homo sapiens
tggaacccgggaggc

SEQ ID NO: 236475 - DNA, 15 bp, Homo sapiens
ctggaacccgggagg

SEQ ID NO: 236476 - DNA, 15 bp, Homo sapiens
gctggaacccgggag

SEQ ID NO: 236477 - DNA, 15 bp, Homo sapiens
tgctggaacccggga

SEQ ID NO: 236478 - DNA, 15 bp, Homo sapiens
ttgctggaacccggg

SEQ ID NO: 236479 - DNA, 15 bp, Homo sapiens
attgctggaacccgg

SEQ ID NO: 236480 - DNA, 15 bp, Homo sapiens
aattgctggaacccg

SEQ ID NO: 236481 - DNA, 15 bp, Homo sapiens
gaattgctggaaccc

SEQ ID NO: 236482 - DNA, 15 bp, Homo sapiens
agaattgctggaacc

SEQ ID NO: 236483 - DNA, 15 bp, Homo sapiens
gagaattgctggaac

SEQ ID NO: 236484 - DNA, 15 bp, Homo sapiens
ggagaattgctggaa

SEQ ID NO: 236485 - DNA, 15 bp, Homo sapiens
aggagaattgctgga

SEQ ID NO: 236486 - DNA, 15 bp, Homo sapiens
caggagaattgctgg

SEQ ID NO: 236487 - DNA, 15 bp, Homo sapiens
gcaggagaattgctg

SEQ ID NO: 236488 - DNA, 15 bp, Homo sapiens
tccagctactcagga

SEQ ID NO: 236489 - DNA, 15 bp, Homo sapiens
ttccagctactcagg

SEQ ID NO: 236490 - DNA, 15 bp, Homo sapiens
attccagctactcag

SEQ ID NO: 236491 - DNA, 15 bp, Homo sapiens
aattccagctactca

SEQ ID NO: 236492 - DNA, 15 bp, Homo sapiens
taattccagctactc

SEQ ID NO: 236493 - DNA, 15 bp, Homo sapiens
ataattccagctact

SEQ ID NO: 236494 - DNA, 15 bp, Homo sapiens
tataattccagctac

SEQ ID NO: 236495 - DNA, 15 bp, Homo sapiens
ctataattccagcta

SEQ ID NO: 236496 - DNA, 15 bp, Homo sapiens
cctataattccagct

SEQ ID NO: 236497 - DNA, 15 bp, Homo sapiens
gcctataattccagc

SEQ ID NO: 236498 - DNA, 15 bp, Homo sapiens
cgcctataattccag

SEQ ID NO: 236499 - DNA, 15 bp, Homo sapiens
gcgcctataattcca

SEQ ID NO: 236500 - DNA, 15 bp, Homo sapiens
ggcgcctataattcc

SEQ ID NO: 236501 - DNA, 15 bp, Homo sapiens
aggcgcctataattc

SEQ ID NO: 236502 - DNA, 15 bp, Homo sapiens
caggcgcctataatt

SEQ ID NO: 236503 - DNA, 15 bp, Homo sapiens
gcaggcgcctataat

SEQ ID NO: 236504 - DNA, 15 bp, Homo sapiens
ggcaggcgcctataa

SEQ ID NO: 236505 - DNA, 15 bp, Homo sapiens
tggcaggcgcctata

SEQ ID NO: 236506 - DNA, 15 bp, Homo sapiens
gtggcaggcgcctat

SEQ ID NO: 236507 - DNA, 15 bp, Homo sapiens
tgtggcaggcgccta

SEQ ID NO: 236508 - DNA, 15 bp, Homo sapiens
ttgtggcaggcgcct

SEQ ID NO: 236509 - DNA, 15 bp, Homo sapiens
gttgtggcaggcgcc

SEQ ID NO: 236510 - DNA, 15 bp, Homo sapiens
tgttgtggcaggcgc

SEQ ID NO: 236511 - DNA, 15 bp, Homo sapiens
gtgttgtggcaggcg

SEQ ID NO: 236512 - DNA, 15 bp, Homo sapiens
ggtgttgtggcaggc

SEQ ID NO: 236513 - DNA, 15 bp, Homo sapiens
gggtgttgtggcagg

SEQ ID NO: 236514 - DNA, 15 bp, Homo sapiens
cgggtgttgtggcag

SEQ ID NO: 236515 - DNA, 15 bp, Homo sapiens
ccgggtgttgtggca

SEQ ID NO: 236516 - DNA, 15 bp, Homo sapiens
gccgggtgttgtggc

SEQ ID NO: 236517 - DNA, 15 bp, Homo sapiens
agccgggtgttgtgg

SEQ ID NO: 236518 - DNA, 15 bp, Homo sapiens
tagccgggtgttgtg

SEQ ID NO: 236519 - DNA, 15 bp, Homo sapiens
ttagccgggtgttgt

SEQ ID NO: 236520 - DNA, 15 bp, Homo sapiens
attagccgggtgttg

SEQ ID NO: 236521 - DNA, 15 bp, Homo sapiens
aattagccgggtgtt

SEQ ID NO: 236522 - DNA, 15 bp, Homo sapiens
caaatacaaaaatta

SEQ ID NO: 236523 - DNA, 15 bp, Homo sapiens
acaaatacaaaaatt

SEQ ID NO: 236524 - DNA, 15 bp, Homo sapiens
tacaaatacaaaaat

SEQ ID NO: 236525 - DNA, 15 bp, Homo sapiens
ctacaaatacaaaaa

SEQ ID NO: 236526 - DNA, 15 bp, Homo sapiens
actacaaatacaaaa

SEQ ID NO: 236527 - DNA, 15 bp, Homo sapiens
tactacaaatacaaa

SEQ ID NO: 236528 - DNA, 15 bp, Homo sapiens
ctactacaaatacaa

SEQ ID NO: 236529 - DNA, 15 bp, Homo sapiens
tctactacaaataca

SEQ ID NO: 236530 - DNA, 15 bp, Homo sapiens
ctctactacaaatac

SEQ ID NO: 236531 - DNA, 15 bp, Homo sapiens
tctctactacaaata

SEQ ID NO: 236532 - DNA, 15 bp, Homo sapiens
atctctactacaaat

SEQ ID NO: 236533 - DNA, 15 bp, Homo sapiens
catctctactacaaa

SEQ ID NO: 236534 - DNA, 15 bp, Homo sapiens
ccatctctactacaa

SEQ ID NO: 236535 - DNA, 15 bp, Homo sapiens
cccatctctactaca

SEQ ID NO: 236536 - DNA, 15 bp, Homo sapiens
ccccatctctactac

SEQ ID NO: 236537 - DNA, 15 bp, Homo sapiens
tggtgaaaccccatc

SEQ ID NO: 236538 - DNA, 15 bp, Homo sapiens
gtggtgaaaccccat

SEQ ID NO: 236539 - DNA, 15 bp, Homo sapiens
cgtggtgaaacccca

SEQ ID NO: 236540 - DNA, 15 bp, Homo sapiens
ctggccaacgtggtg

SEQ ID NO: 236541 - DNA, 15 bp, Homo sapiens
cctggccaacgtggt

SEQ ID NO: 236542 - DNA, 15 bp, Homo sapiens
gcctggccaacgtgg

SEQ ID NO: 236543 - DNA, 15 bp, Homo sapiens
agcctggccaacgtg

SEQ ID NO: 236544 - DNA, 15 bp, Homo sapiens
cagcctggccaacgt

SEQ ID NO: 236545 - DNA, 15 bp, Homo sapiens
ccagcctggccaacg

SEQ ID NO: 236546 - DNA, 15 bp, Homo sapiens
cgaggtcaggagttc

SEQ ID NO: 236547 - DNA, 15 bp, Homo sapiens
acgaggtcaggagtt

SEQ ID NO: 236548 - DNA, 15 bp, Homo sapiens
cacgaggtcaggagt

SEQ ID NO: 236549 - DNA, 15 bp, Homo sapiens
gcgggtggatcacga

SEQ ID NO: 236550 - DNA, 15 bp, Homo sapiens
ggcgggtggatcacg

SEQ ID NO: 236551 - DNA, 15 bp, Homo sapiens
aggcgggtggatcac

SEQ ID NO: 236552 - DNA, 15 bp, Homo sapiens
gaggcgggtggatca

SEQ ID NO: 236553 - DNA, 15 bp, Homo sapiens
tgaggcgggtggatc

SEQ ID NO: 236554 - DNA, 15 bp, Homo sapiens
ctgaggcgggtggat

SEQ ID NO: 236555 - DNA, 15 bp, Homo sapiens
gctgaggcgggtgga

SEQ ID NO: 236556 - DNA, 15 bp, Homo sapiens
ggctgaggcgggtgg

SEQ ID NO: 236557 - DNA, 15 bp, Homo sapiens
aggctgaggcgggtg

SEQ ID NO: 236558 - DNA, 15 bp, Homo sapiens
gaggctgaggcgggt

SEQ ID NO: 236559 - DNA, 15 bp, Homo sapiens
gactttgggaggctg

SEQ ID NO: 236560 - DNA, 15 bp, Homo sapiens
ggactttgggaggct

SEQ ID NO: 236561 - DNA, 15 bp, Homo sapiens
tggactttgggaggc

SEQ ID NO: 236562 - DNA, 15 bp, Homo sapiens
ttggactttgggagg

SEQ ID NO: 236563 - DNA, 15 bp, Homo sapiens
cttggactttgggag

SEQ ID NO: 236564 - DNA, 15 bp, Homo sapiens
ccttggactttggga

SEQ ID NO: 236565 - DNA, 15 bp, Homo sapiens
tccttggactttggg

SEQ ID NO: 236566 - DNA, 15 bp, Homo sapiens
atccttggactttgg

SEQ ID NO: 236567 - DNA, 15 bp, Homo sapiens
aatccttggactttg

SEQ ID NO: 236568 - DNA, 15 bp, Homo sapiens
caatccttggacttt

SEQ ID NO: 236569 - DNA, 15 bp, Homo sapiens
gcaatccttggactt

SEQ ID NO: 236570 - DNA, 15 bp, Homo sapiens
tgcaatccttggact

SEQ ID NO: 236571 - DNA, 15 bp, Homo sapiens
ctgcaatccttggac

SEQ ID NO: 236572 - DNA, 15 bp, Homo sapiens
cctgcaatccttgga

SEQ ID NO: 236573 - DNA, 15 bp, Homo sapiens
gcctgcaatccttgg

SEQ ID NO: 236574 - DNA, 15 bp, Homo sapiens
cgcctgcaatccttg

SEQ ID NO: 236575 - DNA, 15 bp, Homo sapiens
acgcctgcaatcctt

SEQ ID NO: 236576 - DNA, 15 bp, Homo sapiens
cacgcctgcaatcct

SEQ ID NO: 236577 - DNA, 15 bp, Homo sapiens
tcacgcctgcaatcc

SEQ ID NO: 236578 - DNA, 15 bp, Homo sapiens
gtcacgcctgcaatc

SEQ ID NO: 236579 - DNA, 15 bp, Homo sapiens
ggtcacgcctgcaat

SEQ ID NO: 236580 - DNA, 15 bp, Homo sapiens
gggtcacgcctgcaa

SEQ ID NO: 236581 - DNA, 15 bp, Homo sapiens
tgggtcacgcctgca

SEQ ID NO: 236582 - DNA, 15 bp, Homo sapiens
gtgggtcacgcctgc

SEQ ID NO: 236583 - DNA, 15 bp, Homo sapiens
agtgggtcacgcctg

SEQ ID NO: 236584 - DNA, 15 bp, Homo sapiens
cagtgggtcacgcct

SEQ ID NO: 236585 - DNA, 15 bp, Homo sapiens
acagtgggtcacgcc

SEQ ID NO: 236586 - DNA, 15 bp, Homo sapiens
cacagtgggtcacgc

SEQ ID NO: 236587 - DNA, 15 bp, Homo sapiens
gcacagtgggtcacg

SEQ ID NO: 236588 - DNA, 15 bp, Homo sapiens
ggcacagtgggtcac

SEQ ID NO: 236589 - DNA, 15 bp, Homo sapiens
tggcacagtgggtca

SEQ ID NO: 236590 - DNA, 15 bp, Homo sapiens
ctggcacagtgggtc

SEQ ID NO: 236591 - DNA, 15 bp, Homo sapiens
gctggcacagtgggt

SEQ ID NO: 236592 - DNA, 15 bp, Homo sapiens
ggctggcacagtggg

SEQ ID NO: 236593 - DNA, 15 bp, Homo sapiens
tggctggcacagtgg

SEQ ID NO: 236594 - DNA, 15 bp, Homo sapiens
ttggctggcacagtg

SEQ ID NO: 236595 - DNA, 15 bp, Homo sapiens
attggctggcacagt

SEQ ID NO: 236596 - DNA, 15 bp, Homo sapiens
gattggctggcacag

SEQ ID NO: 236597 - DNA, 15 bp, Homo sapiens
tgattggctggcaca

SEQ ID NO: 236598 - DNA, 15 bp, Homo sapiens
ttgattggctggcac

SEQ ID NO: 236599 - DNA, 15 bp, Homo sapiens
attgattggctggca

SEQ ID NO: 236600 - DNA, 15 bp, Homo sapiens
aattgattggctggc

SEQ ID NO: 236601 - DNA, 15 bp, Homo sapiens
caattgattggctgg

SEQ ID NO: 236602 - DNA, 15 bp, Homo sapiens
tcaattgattggctg

SEQ ID NO: 236603 - DNA, 15 bp, Homo sapiens
atcaattgattggct

SEQ ID NO: 236604 - DNA, 15 bp, Homo sapiens
aatcaattgattggc

SEQ ID NO: 236605 - DNA, 15 bp, Homo sapiens
aaatcaattgattgg

SEQ ID NO: 236606 - DNA, 15 bp, Homo sapiens
gaaatcaattgattg

SEQ ID NO: 236607 - DNA, 15 bp, Homo sapiens
agaaatcaattgatt

SEQ ID NO: 236608 - DNA, 15 bp, Homo sapiens
gagaaatcaattgat

SEQ ID NO: 236609 - DNA, 15 bp, Homo sapiens
tgagaaatcaattga

SEQ ID NO: 236610 - DNA, 15 bp, Homo sapiens
atgagaaatcaattg

SEQ ID NO: 236611 - DNA, 15 bp, Homo sapiens
aatgagaaatcaatt

SEQ ID NO: 236612 - DNA, 15 bp, Homo sapiens
gaatgagaaatcaat

SEQ ID NO: 236613 - DNA, 15 bp, Homo sapiens
tgaatgagaaatcaa

SEQ ID NO: 236614 - DNA, 15 bp, Homo sapiens
atgaatgagaaatca

SEQ ID NO: 236615 - DNA, 15 bp, Homo sapiens
aatgaatgagaaatc

SEQ ID NO: 236616 - DNA, 15 bp, Homo sapiens
aaatgaatgagaaat

SEQ ID NO: 236617 - DNA, 15 bp, Homo sapiens
aaaatgaatgagaaa

SEQ ID NO: 236618 - DNA, 15 bp, Homo sapiens
gaaaatgaatgagaa

SEQ ID NO: 236619 - DNA, 15 bp, Homo sapiens
tgaaaatgaatgaga

SEQ ID NO: 236620 - DNA, 15 bp, Homo sapiens
ctgaaaatgaatgag

SEQ ID NO: 236621 - DNA, 15 bp, Homo sapiens
gctgaaaatgaatga

SEQ ID NO: 236622 - DNA, 15 bp, Homo sapiens
agctgaaaatgaatg

SEQ ID NO: 236623 - DNA, 15 bp, Homo sapiens
cagctgaaaatgaat

SEQ ID NO: 236624 - DNA, 15 bp, Homo sapiens
ccagctgaaaatgaa

SEQ ID NO: 236625 - DNA, 15 bp, Homo sapiens
gccagctgaaaatga

SEQ ID NO: 236626 - DNA, 15 bp, Homo sapiens
agccagctgaaaatg

SEQ ID NO: 236627 - DNA, 15 bp, Homo sapiens
gagccagctgaaaat

SEQ ID NO: 236628 - DNA, 15 bp, Homo sapiens
agagccagctgaaaa

SEQ ID NO: 236629 - DNA, 15 bp, Homo sapiens
cagagccagctgaaa

SEQ ID NO: 236630 - DNA, 15 bp, Homo sapiens
acagagccagctgaa

SEQ ID NO: 236631 - DNA, 15 bp, Homo sapiens
aacagagccagctga

SEQ ID NO: 236632 - DNA, 15 bp, Homo sapiens
gaacagagccagctg

SEQ ID NO: 236633 - DNA, 15 bp, Homo sapiens
ggaacagagccagct

SEQ ID NO: 236634 - DNA, 15 bp, Homo sapiens
gggaacagagccagc

SEQ ID NO: 236635 - DNA, 15 bp, Homo sapiens
agggaacagagccag

SEQ ID NO: 236636 - DNA, 15 bp, Homo sapiens
aagggaacagagcca

SEQ ID NO: 236637 - DNA, 15 bp, Homo sapiens
taagggaacagagcc

SEQ ID NO: 236638 - DNA, 15 bp, Homo sapiens
ttaagggaacagagc

SEQ ID NO: 236639 - DNA, 15 bp, Homo sapiens
cttaagggaacagag

SEQ ID NO: 236640 - DNA, 15 bp, Homo sapiens
gcttaagggaacaga

SEQ ID NO: 236641 - DNA, 15 bp, Homo sapiens
ggcttaagggaacag

SEQ ID NO: 236642 - DNA, 15 bp, Homo sapiens
tggcttaagggaaca

SEQ ID NO: 236643 - DNA, 15 bp, Homo sapiens
ctggcttaagggaac

SEQ ID NO: 236644 - DNA, 15 bp, Homo sapiens
cctggcttaagggaa

SEQ ID NO: 236645 - DNA, 15 bp, Homo sapiens
ccctggcttaaggga

SEQ ID NO: 236646 - DNA, 15 bp, Homo sapiens
cccctggcttaaggg

SEQ ID NO: 236647 - DNA, 15 bp, Homo sapiens
tcccctggcttaagg

SEQ ID NO: 236648 - DNA, 15 bp, Homo sapiens
atcccctggcttaag

SEQ ID NO: 236649 - DNA, 15 bp, Homo sapiens
aatcccctggcttaa

SEQ ID NO: 236650 - DNA, 15 bp, Homo sapiens
aaatcccctggctta

SEQ ID NO: 236651 - DNA, 15 bp, Homo sapiens
aaaatcccctggctt

SEQ ID NO: 236652 - DNA, 15 bp, Homo sapiens
gaaaatcccctggct

SEQ ID NO: 236653 - DNA, 15 bp, Homo sapiens
cgaaaatcccctggc

SEQ ID NO: 236654 - DNA, 15 bp, Homo sapiens
acgaaaatcccctgg

SEQ ID NO: 236655 - DNA, 15 bp, Homo sapiens
aacgaaaatcccctg

SEQ ID NO: 236656 - DNA, 15 bp, Homo sapiens
aaacgaaaatcccct

SEQ ID NO: 236657 - DNA, 15 bp, Homo sapiens
caaacgaaaatcccc

SEQ ID NO: 236658 - DNA, 15 bp, Homo sapiens
acaaacgaaaatccc

SEQ ID NO: 236659 - DNA, 15 bp, Homo sapiens
aacaaacgaaaatcc

SEQ ID NO: 236660 - DNA, 15 bp, Homo sapiens
aaacaaacgaaaatc

SEQ ID NO: 236661 - DNA, 15 bp, Homo sapiens
caaacaaacgaaaat

SEQ ID NO: 236662 - DNA, 15 bp, Homo sapiens
acaaacaaacgaaaa

SEQ ID NO: 236663 - DNA, 15 bp, Homo sapiens
aacaaacaaacgaaa

SEQ ID NO: 236664 - DNA, 15 bp, Homo sapiens
aaacaaacaaacgaa

SEQ ID NO: 236665 - DNA, 15 bp, Homo sapiens
gaaacaaacaaacga

SEQ ID NO: 236666 - DNA, 15 bp, Homo sapiens
ggaaacaaacaaacg

SEQ ID NO: 236667 - DNA, 15 bp, Homo sapiens
gggaaacaaacaaac

SEQ ID NO: 236668 - DNA, 15 bp, Homo sapiens
ggggaaacaaacaaa

SEQ ID NO: 236669 - DNA, 15 bp, Homo sapiens
aggggaaacaaacaa

SEQ ID NO: 236670 - DNA, 15 bp, Homo sapiens
aaggggaaacaaaca

SEQ ID NO: 236671 - DNA, 15 bp, Homo sapiens
gaaggggaaacaaac

SEQ ID NO: 236672 - DNA, 15 bp, Homo sapiens
tgaaggggaaacaaa

SEQ ID NO: 236673 - DNA, 15 bp, Homo sapiens
ttgaaggggaaacaa

SEQ ID NO: 236674 - DNA, 15 bp, Homo sapiens
cttgaaggggaaaca

SEQ ID NO: 236675 - DNA, 15 bp, Homo sapiens
ccttgaaggggaaac

SEQ ID NO: 236676 - DNA, 15 bp, Homo sapiens
tccttgaaggggaaa

SEQ ID NO: 236677 - DNA, 15 bp, Homo sapiens
ttccttgaaggggaa

SEQ ID NO: 236678 - DNA, 15 bp, Homo sapiens
tttccttgaagggga

SEQ ID NO: 236679 - DNA, 15 bp, Homo sapiens
atttccttgaagggg

SEQ ID NO: 236680 - DNA, 15 bp, Homo sapiens
catttccttgaaggg

SEQ ID NO: 236681 - DNA, 15 bp, Homo sapiens
tcatttccttgaagg

SEQ ID NO: 236682 - DNA, 15 bp, Homo sapiens
atcatttccttgaag

SEQ ID NO: 236683 - DNA, 15 bp, Homo sapiens
aatcatttccttgaa

SEQ ID NO: 236684 - DNA, 15 bp, Homo sapiens
gaatcatttccttga

SEQ ID NO: 236685 - DNA, 15 bp, Homo sapiens
agaatcatttccttg

SEQ ID NO: 236686 - DNA, 15 bp, Homo sapiens
tagaatcatttcctt

SEQ ID NO: 236687 - DNA, 15 bp, Homo sapiens
ctagaatcatttcct

SEQ ID NO: 236688 - DNA, 15 bp, Homo sapiens
gctagaatcatttcc

SEQ ID NO: 236689 - DNA, 15 bp, Homo sapiens
agctagaatcatttc

SEQ ID NO: 236690 - DNA, 15 bp, Homo sapiens
tagctagaatcattt

SEQ ID NO: 236691 - DNA, 15 bp, Homo sapiens
gtagctagaatcatt

SEQ ID NO: 236692 - DNA, 15 bp, Homo sapiens
tgtagctagaatcat

SEQ ID NO: 236693 - DNA, 15 bp, Homo sapiens
ctgtagctagaatca

SEQ ID NO: 236694 - DNA, 15 bp, Homo sapiens
actgtagctagaatc

SEQ ID NO: 236695 - DNA, 15 bp, Homo sapiens
aactgtagctagaat

SEQ ID NO: 236696 - DNA, 15 bp, Homo sapiens
aaactgtagctagaa

SEQ ID NO: 236697 - DNA, 15 bp, Homo sapiens
aaaactgtagctaga

SEQ ID NO: 236698 - DNA, 15 bp, Homo sapiens
caaaactgtagctag

SEQ ID NO: 236699 - DNA, 15 bp, Homo sapiens
tcaaaactgtagcta

SEQ ID NO: 236700 - DNA, 15 bp, Homo sapiens
atcaaaactgtagct

SEQ ID NO: 236701 - DNA, 15 bp, Homo sapiens
aatcaaaactgtagc

SEQ ID NO: 236702 - DNA, 15 bp, Homo sapiens
aaatcaaaactgtag

SEQ ID NO: 236703 - DNA, 15 bp, Homo sapiens
gaaatcaaaactgta

SEQ ID NO: 236704 - DNA, 15 bp, Homo sapiens
ggaaatcaaaactgt

SEQ ID NO: 236705 - DNA, 15 bp, Homo sapiens
aggaaatcaaaactg

SEQ ID NO: 236706 - DNA, 15 bp, Homo sapiens
aaggaaatcaaaact

SEQ ID NO: 236707 - DNA, 15 bp, Homo sapiens
caaggaaatcaaaac

SEQ ID NO: 236708 - DNA, 15 bp, Homo sapiens
acaaggaaatcaaaa

SEQ ID NO: 236709 - DNA, 15 bp, Homo sapiens
tacaaggaaatcaaa

SEQ ID NO: 236710 - DNA, 15 bp, Homo sapiens
gtacaaggaaatcaa

SEQ ID NO: 236711 - DNA, 15 bp, Homo sapiens
tgtacaaggaaatca

SEQ ID NO: 236712 - DNA, 15 bp, Homo sapiens
ttgtacaaggaaatc

SEQ ID NO: 236713 - DNA, 15 bp, Homo sapiens
gttgtacaaggaaat

SEQ ID NO: 236714 - DNA, 15 bp, Homo sapiens
agttgtacaaggaaa

SEQ ID NO: 236715 - DNA, 15 bp, Homo sapiens
cagttgtacaaggaa

SEQ ID NO: 236716 - DNA, 15 bp, Homo sapiens
acagttgtacaagga

SEQ ID NO: 236717 - DNA, 15 bp, Homo sapiens
aacagttgtacaagg

SEQ ID NO: 236718 - DNA, 15 bp, Homo sapiens
aaacagttgtacaag

SEQ ID NO: 236719 - DNA, 15 bp, Homo sapiens
aaaacagttgtacaa

SEQ ID NO: 236720 - DNA, 15 bp, Homo sapiens
gaaaacagttgtaca

SEQ ID NO: 236721 - DNA, 15 bp, Homo sapiens
tgaaaacagttgtac

SEQ ID NO: 236722 - DNA, 15 bp, Homo sapiens
ctgaaaacagttgta

SEQ ID NO: 236723 - DNA, 15 bp, Homo sapiens
actgaaaacagttgt

SEQ ID NO: 236724 - DNA, 15 bp, Homo sapiens
tactgaaaacagttg

SEQ ID NO: 236725 - DNA, 15 bp, Homo sapiens
ctactgaaaacagtt

SEQ ID NO: 236726 - DNA, 15 bp, Homo sapiens
gctactgaaaacagt

SEQ ID NO: 236727 - DNA, 15 bp, Homo sapiens
tgctactgaaaacag

SEQ ID NO: 236728 - DNA, 15 bp, Homo sapiens
gtgctactgaaaaca

SEQ ID NO: 236729 - DNA, 15 bp, Homo sapiens
tgtgctactgaaaac

SEQ ID NO: 236730 - DNA, 15 bp, Homo sapiens
ctgtgctactgaaaa

SEQ ID NO: 236731 - DNA, 15 bp, Homo sapiens
cctgtgctactgaaa

SEQ ID NO: 236732 - DNA, 15 bp, Homo sapiens
ccctgtgctactgaa

SEQ ID NO: 236733 - DNA, 15 bp, Homo sapiens
tccctgtgctactga

SEQ ID NO: 236734 - DNA, 15 bp, Homo sapiens
ttccctgtgctactg

SEQ ID NO: 236735 - DNA, 15 bp, Homo sapiens
tttccctgtgctact

SEQ ID NO: 236736 - DNA, 15 bp, Homo sapiens
ctttccctgtgctac

SEQ ID NO: 236737 - DNA, 15 bp, Homo sapiens
tctttccctgtgcta

SEQ ID NO: 236738 - DNA, 15 bp, Homo sapiens
ttctttccctgtgct

SEQ ID NO: 236739 - DNA, 15 bp, Homo sapiens
tttctttccctgtgc

SEQ ID NO: 236740 - DNA, 15 bp, Homo sapiens
ttttctttccctgtg

SEQ ID NO: 236741 - DNA, 15 bp, Homo sapiens
gttttctttccctgt

SEQ ID NO: 236742 - DNA, 15 bp, Homo sapiens
tgttttctttccctg

SEQ ID NO: 236743 - DNA, 15 bp, Homo sapiens
atgttttctttccct

SEQ ID NO: 236744 - DNA, 15 bp, Homo sapiens
gatgttttctttccc

SEQ ID NO: 236745 - DNA, 15 bp, Homo sapiens
cgatgttttctttcc

SEQ ID NO: 236746 - DNA, 15 bp, Homo sapiens
tcgatgttttctttc

SEQ ID NO: 236747 - DNA, 15 bp, Homo sapiens
ttcgatgttttcttt

SEQ ID NO: 236748 - DNA, 15 bp, Homo sapiens
tttcgatgttttctt

SEQ ID NO: 236749 - DNA, 15 bp, Homo sapiens
ctttcgatgttttct

SEQ ID NO: 236750 - DNA, 15 bp, Homo sapiens
gctttcgatgttttc

SEQ ID NO: 236751 - DNA, 15 bp, Homo sapiens
tgctttcgatgtttt

SEQ ID NO: 236752 - DNA, 15 bp, Homo sapiens
atgctttcgatgttt

SEQ ID NO: 236753 - DNA, 15 bp, Homo sapiens
aatgctttcgatgtt

SEQ ID NO: 236754 - DNA, 15 bp, Homo sapiens
gaatgctttcgatgt

SEQ ID NO: 236755 - DNA, 15 bp, Homo sapiens
tgaatgctttcgatg

SEQ ID NO: 236756 - DNA, 15 bp, Homo sapiens
gtgaatgctttcgat

SEQ ID NO: 236757 - DNA, 15 bp, Homo sapiens
ggtgaatgctttcga

SEQ ID NO: 236758 - DNA, 15 bp, Homo sapiens
tggtgaatgctttcg

SEQ ID NO: 236759 - DNA, 15 bp, Homo sapiens
gtggtgaatgctttc

SEQ ID NO: 236760 - DNA, 15 bp, Homo sapiens
ggtggtgaatgcttt

SEQ ID NO: 236761 - DNA, 15 bp, Homo sapiens
aggtggtgaatgctt

SEQ ID NO: 236762 - DNA, 15 bp, Homo sapiens
gaggtggtgaatgct

SEQ ID NO: 236763 - DNA, 15 bp, Homo sapiens
tgaggtggtgaatgc

SEQ ID NO: 236764 - DNA, 15 bp, Homo sapiens
atgaggtggtgaatg

SEQ ID NO: 236765 - DNA, 15 bp, Homo sapiens
aatgaggtggtgaat

SEQ ID NO: 236766 - DNA, 15 bp, Homo sapiens
aaatgaggtggtgaa

SEQ ID NO: 236767 - DNA, 15 bp, Homo sapiens
caaatgaggtggtga

SEQ ID NO: 236768 - DNA, 15 bp, Homo sapiens
acaaatgaggtggtg

SEQ ID NO: 236769 - DNA, 15 bp, Homo sapiens
cacaaatgaggtggt

SEQ ID NO: 236770 - DNA, 15 bp, Homo sapiens
acacaaatgaggtgg

SEQ ID NO: 236771 - DNA, 15 bp, Homo sapiens
cacacaaatgaggtg

SEQ ID NO: 236772 - DNA, 15 bp, Homo sapiens
gcacacaaatgaggt

SEQ ID NO: 236773 - DNA, 15 bp, Homo sapiens
agcacacaaatgagg

SEQ ID NO: 236774 - DNA, 15 bp, Homo sapiens
cagcacacaaatgag

SEQ ID NO: 236775 - DNA, 15 bp, Homo sapiens
ccagcacacaaatga

SEQ ID NO: 236776 - DNA, 15 bp, Homo sapiens
cccagcacacaaatg

SEQ ID NO: 236777 - DNA, 15 bp, Homo sapiens
ccccagcacacaaat

SEQ ID NO: 236778 - DNA, 15 bp, Homo sapiens
cccccagcacacaaa

SEQ ID NO: 236779 - DNA, 15 bp, Homo sapiens
tcccccagcacacaa

SEQ ID NO: 236780 - DNA, 15 bp, Homo sapiens
ttcccccagcacaca

SEQ ID NO: 236781 - DNA, 15 bp, Homo sapiens
tttcccccagcacac

SEQ ID NO: 236782 - DNA, 15 bp, Homo sapiens
ttttcccccagcaca

SEQ ID NO: 236783 - DNA, 15 bp, Homo sapiens
tttttcccccagcac

SEQ ID NO: 236784 - DNA, 15 bp, Homo sapiens
ctttttcccccagca

SEQ ID NO: 236785 - DNA, 15 bp, Homo sapiens
gctttttcccccagc

SEQ ID NO: 236786 - DNA, 15 bp, Homo sapiens
tgctttttcccccag

SEQ ID NO: 236787 - DNA, 15 bp, Homo sapiens
ctgctttttccccca

SEQ ID NO: 236788 - DNA, 15 bp, Homo sapiens
tctgctttttccccc

SEQ ID NO: 236789 - DNA, 15 bp, Homo sapiens
ttctgctttttcccc

SEQ ID NO: 236790 - DNA, 15 bp, Homo sapiens
tttctgctttttccc

SEQ ID NO: 236791 - DNA, 15 bp, Homo sapiens
atttctgctttttcc

SEQ ID NO: 236792 - DNA, 15 bp, Homo sapiens
catttctgctttttc

SEQ ID NO: 236793 - DNA, 15 bp, Homo sapiens
acatttctgcttttt

SEQ ID NO: 236794 - DNA, 15 bp, Homo sapiens
cacatttctgctttt

SEQ ID NO: 236795 - DNA, 15 bp, Homo sapiens
acacatttctgcttt

SEQ ID NO: 236796 - DNA, 15 bp, Homo sapiens
tacacatttctgctt

SEQ ID NO: 236797 - DNA, 15 bp, Homo sapiens
atacacatttctgct

SEQ ID NO: 236798 - DNA, 15 bp, Homo sapiens
aatacacatttctgc

SEQ ID NO: 236799 - DNA, 15 bp, Homo sapiens
gaatacacatttctg

SEQ ID NO: 236800 - DNA, 15 bp, Homo sapiens
agaatacacatttct

SEQ ID NO: 236801 - DNA, 15 bp, Homo sapiens
gagaatacacatttc

SEQ ID NO: 236802 - DNA, 15 bp, Homo sapiens
agagaatacacattt

SEQ ID NO: 236803 - DNA, 15 bp, Homo sapiens
aagagaatacacatt

SEQ ID NO: 236804 - DNA, 15 bp, Homo sapiens
aaagagaatacacat

SEQ ID NO: 236805 - DNA, 15 bp, Homo sapiens
aaaagagaatacaca

SEQ ID NO: 236806 - DNA, 15 bp, Homo sapiens
aaaaagagaatacac

SEQ ID NO: 236807 - DNA, 15 bp, Homo sapiens
aaaaaagagaataca

SEQ ID NO: 236808 - DNA, 15 bp, Homo sapiens
aaaaaaagagaatac

SEQ ID NO: 236809 - DNA, 15 bp, Homo sapiens
caaaaaaagagaata

SEQ ID NO: 236810 - DNA, 15 bp, Homo sapiens
acaaaaaaagagaat

SEQ ID NO: 236811 - DNA, 15 bp, Homo sapiens
aacaaaaaaagagaa

SEQ ID NO: 236812 - DNA, 15 bp, Homo sapiens
aaacaaaaaaagaga

SEQ ID NO: 236813 - DNA, 15 bp, Homo sapiens
gaaacaaaaaaagag

SEQ ID NO: 236814 - DNA, 15 bp, Homo sapiens
cgaaacaaaaaaaga

SEQ ID NO: 236815 - DNA, 15 bp, Homo sapiens
tcgaaacaaaaaaag

SEQ ID NO: 236816 - DNA, 15 bp, Homo sapiens
atcgaaacaaaaaaa

SEQ ID NO: 236817 - DNA, 15 bp, Homo sapiens
catcgaaacaaaaaa

SEQ ID NO: 236818 - DNA, 15 bp, Homo sapiens
tcatcgaaacaaaaa

SEQ ID NO: 236819 - DNA, 15 bp, Homo sapiens
gtcatcgaaacaaaa

SEQ ID NO: 236820 - DNA, 15 bp, Homo sapiens
ggtcatcgaaacaaa

SEQ ID NO: 236821 - DNA, 15 bp, Homo sapiens
aggtcatcgaaacaa

SEQ ID NO: 236822 - DNA, 15 bp, Homo sapiens
aaggtcatcgaaaca

SEQ ID NO: 236823 - DNA, 15 bp, Homo sapiens
caaggtcatcgaaac

SEQ ID NO: 236824 - DNA, 15 bp, Homo sapiens
acaaggtcatcgaaa

SEQ ID NO: 236825 - DNA, 15 bp, Homo sapiens
aacaaggtcatcgaa

SEQ ID NO: 236826 - DNA, 15 bp, Homo sapiens
gaacaaggtcatcga

SEQ ID NO: 236827 - DNA, 15 bp, Homo sapiens
ggaacaaggtcatcg

SEQ ID NO: 236828 - DNA, 15 bp, Homo sapiens
aggaacaaggtcatc

SEQ ID NO: 236829 - DNA, 15 bp, Homo sapiens
caggaacaaggtcat

SEQ ID NO: 236830 - DNA, 15 bp, Homo sapiens
tcaggaacaaggtca

SEQ ID NO: 236831 - DNA, 15 bp, Homo sapiens
gtcaggaacaaggtc

SEQ ID NO: 236832 - DNA, 15 bp, Homo sapiens
agtcaggaacaaggt

SEQ ID NO: 236833 - DNA, 15 bp, Homo sapiens
aagtcaggaacaagg

SEQ ID NO: 236834 - DNA, 15 bp, Homo sapiens
caagtcaggaacaag

SEQ ID NO: 236835 - DNA, 15 bp, Homo sapiens
acaagtcaggaacaa

SEQ ID NO: 236836 - DNA, 15 bp, Homo sapiens
aacaagtcaggaaca

SEQ ID NO: 236837 - DNA, 15 bp, Homo sapiens
taacaagtcaggaac

SEQ ID NO: 236838 - DNA, 15 bp, Homo sapiens
gtaacaagtcaggaa

SEQ ID NO: 236839 - DNA, 15 bp, Homo sapiens
agtaacaagtcagga

SEQ ID NO: 236840 - DNA, 15 bp, Homo sapiens
gagtaacaagtcagg

SEQ ID NO: 236841 - DNA, 15 bp, Homo sapiens
cgagtaacaagtcag

SEQ ID NO: 236842 - DNA, 15 bp, Homo sapiens
acgagtaacaagtca

SEQ ID NO: 236843 - DNA, 15 bp, Homo sapiens
cacgagtaacaagtc

SEQ ID NO: 236844 - DNA, 15 bp, Homo sapiens
tcacgagtaacaagt

SEQ ID NO: 236845 - DNA, 15 bp, Homo sapiens
gtcacgagtaacaag

SEQ ID NO: 236846 - DNA, 15 bp, Homo sapiens
agtcacgagtaacaa

SEQ ID NO: 236847 - DNA, 15 bp, Homo sapiens
aagtcacgagtaaca

SEQ ID NO: 236848 - DNA, 15 bp, Homo sapiens
caagtcacgagtaac

SEQ ID NO: 236849 - DNA, 15 bp, Homo sapiens
tcaagtcacgagtaa

SEQ ID NO: 236850 - DNA, 15 bp, Homo sapiens
ctcaagtcacgagta

SEQ ID NO: 236851 - DNA, 15 bp, Homo sapiens
tctcaagtcacgagt

SEQ ID NO: 236852 - DNA, 15 bp, Homo sapiens
ctctcaagtcacgag

SEQ ID NO: 236853 - DNA, 15 bp, Homo sapiens
tctctcaagtcacga

SEQ ID NO: 236854 - DNA, 15 bp, Homo sapiens
atctctcaagtcacg

SEQ ID NO: 236855 - DNA, 15 bp, Homo sapiens
gatctctcaagtcac

SEQ ID NO: 236856 - DNA, 15 bp, Homo sapiens
tgatctctcaagtca

SEQ ID NO: 236857 - DNA, 15 bp, Homo sapiens
ctgatctctcaagtc

SEQ ID NO: 236858 - DNA, 15 bp, Homo sapiens
tctgatctctcaagt

SEQ ID NO: 236859 - DNA, 15 bp, Homo sapiens
ctctgatctctcaag

SEQ ID NO: 236860 - DNA, 15 bp, Homo sapiens
cctctgatctctcaa

SEQ ID NO: 236861 - DNA, 15 bp, Homo sapiens
ccctctgatctctca

SEQ ID NO: 236862 - DNA, 15 bp, Homo sapiens
gccctctgatctctc

SEQ ID NO: 236863 - DNA, 15 bp, Homo sapiens
agccctctgatctct

SEQ ID NO: 236864 - DNA, 15 bp, Homo sapiens
tagccctctgatctc

SEQ ID NO: 236865 - DNA, 15 bp, Homo sapiens
ctagccctctgatct

SEQ ID NO: 236866 - DNA, 15 bp, Homo sapiens
tctagccctctgatc

SEQ ID NO: 236867 - DNA, 15 bp, Homo sapiens
ctctagccctctgat

SEQ ID NO: 236868 - DNA, 15 bp, Homo sapiens
cctctagccctctga

SEQ ID NO: 236869 - DNA, 15 bp, Homo sapiens
tcctctagccctctg

SEQ ID NO: 236870 - DNA, 15 bp, Homo sapiens
gtcctctagccctct

SEQ ID NO: 236871 - DNA, 15 bp, Homo sapiens
agtcctctagccctc

SEQ ID NO: 236872 - DNA, 15 bp, Homo sapiens
tagtcctctagccct

SEQ ID NO: 236873 - DNA, 15 bp, Homo sapiens
ctagtcctctagccc

SEQ ID NO: 236874 - DNA, 15 bp, Homo sapiens
tctagtcctctagcc

SEQ ID NO: 236875 - DNA, 15 bp, Homo sapiens
ttctagtcctctagc

SEQ ID NO: 236876 - DNA, 15 bp, Homo sapiens
attctagtcctctag

SEQ ID NO: 236877 - DNA, 15 bp, Homo sapiens
aattctagtcctcta

SEQ ID NO: 236878 - DNA, 15 bp, Homo sapiens
aaattctagtcctct

SEQ ID NO: 236879 - DNA, 15 bp, Homo sapiens
taaattctagtcctc

SEQ ID NO: 236880 - DNA, 15 bp, Homo sapiens
ataaattctagtcct

SEQ ID NO: 236881 - DNA, 15 bp, Homo sapiens
tataaattctagtcc

SEQ ID NO: 236882 - DNA, 15 bp, Homo sapiens
ctataaattctagtc

SEQ ID NO: 236883 - DNA, 15 bp, Homo sapiens
tctataaattctagt

SEQ ID NO: 236884 - DNA, 15 bp, Homo sapiens
ctctataaattctag

SEQ ID NO: 236885 - DNA, 15 bp, Homo sapiens
cctctataaattcta

SEQ ID NO: 236886 - DNA, 15 bp, Homo sapiens
acctctataaattct

SEQ ID NO: 236887 - DNA, 15 bp, Homo sapiens
cacctctataaattc

SEQ ID NO: 236888 - DNA, 15 bp, Homo sapiens
acacctctataaatt

SEQ ID NO: 236889 - DNA, 15 bp, Homo sapiens
aacacctctataaat

SEQ ID NO: 236890 - DNA, 15 bp, Homo sapiens
aaacacctctataaa

SEQ ID NO: 236891 - DNA, 15 bp, Homo sapiens
aaaacacctctataa

SEQ ID NO: 236892 - DNA, 15 bp, Homo sapiens
aaaaacacctctata

SEQ ID NO: 236893 - DNA, 15 bp, Homo sapiens
aaaaaacacctctat

SEQ ID NO: 236894 - DNA, 15 bp, Homo sapiens
aaaaaaacacctcta

SEQ ID NO: 236895 - DNA, 15 bp, Homo sapiens
aaaaaaaacacctct

SEQ ID NO: 236896 - DNA, 15 bp, Homo sapiens
caaaaaaaacacctc

SEQ ID NO: 236897 - DNA, 15 bp, Homo sapiens
acaaaaaaaacacct

SEQ ID NO: 236898 - DNA, 15 bp, Homo sapiens
aacaaaaaaaacacc

SEQ ID NO: 236899 - DNA, 15 bp, Homo sapiens
aaacaaaaaaaacac

SEQ ID NO: 236900 - DNA, 15 bp, Homo sapiens
caaacaaaaaaaaca

SEQ ID NO: 236901 - DNA, 15 bp, Homo sapiens
acaaacaaaaaaaac

SEQ ID NO: 236902 - DNA, 15 bp, Homo sapiens
aacaaacaaaaaaaa

SEQ ID NO: 236903 - DNA, 15 bp, Homo sapiens
aaacaaacaaaaaaa

SEQ ID NO: 236904 - DNA, 15 bp, Homo sapiens
taaacaaacaaaaaa

SEQ ID NO: 236905 - DNA, 15 bp, Homo sapiens
ataaacaaacaaaaa

SEQ ID NO: 236906 - DNA, 15 bp, Homo sapiens
aataaacaaacaaaa

SEQ ID NO: 236907 - DNA, 15 bp, Homo sapiens
aaataaacaaacaaa

SEQ ID NO: 236908 - DNA, 15 bp, Homo sapiens
aaaataaacaaacaa

SEQ ID NO: 236909 - DNA, 15 bp, Homo sapiens
aaaaataaacaaaca

SEQ ID NO: 236910 - DNA, 15 bp, Homo sapiens
caaaaataaacaaac

SEQ ID NO: 236911 - DNA, 15 bp, Homo sapiens
acaaaaataaacaaa

SEQ ID NO: 236912 - DNA, 15 bp, Homo sapiens
aacaaaaataaacaa

SEQ ID NO: 236913 - DNA, 15 bp, Homo sapiens
gaacaaaaataaaca

SEQ ID NO: 236914 - DNA, 15 bp, Homo sapiens
cgaacaaaaataaac

SEQ ID NO: 236915 - DNA, 15 bp, Homo sapiens
tcgaacaaaaataaa

SEQ ID NO: 236916 - DNA, 15 bp, Homo sapiens
ctcgaacaaaaataa

SEQ ID NO: 236917 - DNA, 15 bp, Homo sapiens
actcgaacaaaaata

SEQ ID NO: 236918 - DNA, 15 bp, Homo sapiens
aactcgaacaaaaat

SEQ ID NO: 236919 - DNA, 15 bp, Homo sapiens
caactcgaacaaaaa

SEQ ID NO: 236920 - DNA, 15 bp, Homo sapiens
gcaactcgaacaaaa

SEQ ID NO: 236921 - DNA, 15 bp, Homo sapiens
ggcaactcgaacaaa

SEQ ID NO: 236922 - DNA, 15 bp, Homo sapiens
gggcaactcgaacaa

SEQ ID NO: 236923 - DNA, 15 bp, Homo sapiens
tgggcaactcgaaca

SEQ ID NO: 236924 - DNA, 15 bp, Homo sapiens
ctgggcaactcgaac

SEQ ID NO: 236925 - DNA, 15 bp, Homo sapiens
cctgggcaactcgaa

SEQ ID NO: 236926 - DNA, 15 bp, Homo sapiens
gcctgggcaactcga

SEQ ID NO: 236927 - DNA, 15 bp, Homo sapiens
agcctgggcaactcg

SEQ ID NO: 236928 - DNA, 15 bp, Homo sapiens
cagcctgggcaactc

SEQ ID NO: 236929 - DNA, 15 bp, Homo sapiens
ccagcctgggcaact

SEQ ID NO: 236930 - DNA, 15 bp, Homo sapiens
tccagcctgggcaac

SEQ ID NO: 236931 - DNA, 15 bp, Homo sapiens
ccgagattgcgccac

SEQ ID NO: 236932 - DNA, 15 bp, Homo sapiens
gccgagattgcgcca

SEQ ID NO: 236933 - DNA, 15 bp, Homo sapiens
agccgagattgcgcc

SEQ ID NO: 236934 - DNA, 15 bp, Homo sapiens
gagccgagattgcgc

SEQ ID NO: 236935 - DNA, 15 bp, Homo sapiens
tgagccgagattgcg

SEQ ID NO: 236936 - DNA, 15 bp, Homo sapiens
gtgagccgagattgc

SEQ ID NO: 236937 - DNA, 15 bp, Homo sapiens
agtgagccgagattg

SEQ ID NO: 236938 - DNA, 15 bp, Homo sapiens
cagtgagccgagatt

SEQ ID NO: 236939 - DNA, 15 bp, Homo sapiens
gaagaatcgcttgaa

SEQ ID NO: 236940 - DNA, 15 bp, Homo sapiens
cgaagaatcgcttga

SEQ ID NO: 236941 - DNA, 15 bp, Homo sapiens
ccgaagaatcgcttg

SEQ ID NO: 236942 - DNA, 15 bp, Homo sapiens
gccgaagaatcgctt

SEQ ID NO: 236943 - DNA, 15 bp, Homo sapiens
ggccgaagaatcgct

SEQ ID NO: 236944 - DNA, 15 bp, Homo sapiens
aggccgaagaatcgc

SEQ ID NO: 236945 - DNA, 15 bp, Homo sapiens
gaggccgaagaatcg

SEQ ID NO: 236946 - DNA, 15 bp, Homo sapiens
tgaggccgaagaatc

SEQ ID NO: 236947 - DNA, 15 bp, Homo sapiens
ctgaggccgaagaat

SEQ ID NO: 236948 - DNA, 15 bp, Homo sapiens
gctgaggccgaagaa

SEQ ID NO: 236949 - DNA, 15 bp, Homo sapiens
ggctgaggccgaaga

SEQ ID NO: 236950 - DNA, 15 bp, Homo sapiens
aggctgaggccgaag

SEQ ID NO: 236951 - DNA, 15 bp, Homo sapiens
gaggctgaggccgaa

SEQ ID NO: 236952 - DNA, 15 bp, Homo sapiens
ggaggctgaggccga

SEQ ID NO: 236953 - DNA, 15 bp, Homo sapiens
aggaggctgaggccg

SEQ ID NO: 236954 - DNA, 15 bp, Homo sapiens
caggaggctgaggcc

SEQ ID NO: 236955 - DNA, 15 bp, Homo sapiens
gttccagctactcag

SEQ ID NO: 236956 - DNA, 15 bp, Homo sapiens
agttccagctactca

SEQ ID NO: 236957 - DNA, 15 bp, Homo sapiens
tagttccagctactc

SEQ ID NO: 236958 - DNA, 15 bp, Homo sapiens
gtagttccagctact

SEQ ID NO: 236959 - DNA, 15 bp, Homo sapiens
tgtagttccagctac

SEQ ID NO: 236960 - DNA, 15 bp, Homo sapiens
ctgtagttccagcta

SEQ ID NO: 236961 - DNA, 15 bp, Homo sapiens
cctgtagttccagct

SEQ ID NO: 236962 - DNA, 15 bp, Homo sapiens
gcctgtagttccagc

SEQ ID NO: 236963 - DNA, 15 bp, Homo sapiens
cgcctgtagttccag

SEQ ID NO: 236964 - DNA, 15 bp, Homo sapiens
gcgcctgtagttcca

SEQ ID NO: 236965 - DNA, 15 bp, Homo sapiens
ggcgcctgtagttcc

SEQ ID NO: 236966 - DNA, 15 bp, Homo sapiens
gggcgcctgtagttc

SEQ ID NO: 236967 - DNA, 15 bp, Homo sapiens
cgggcgcctgtagtt

SEQ ID NO: 236968 - DNA, 15 bp, Homo sapiens
tgggtgtggtggcgg

SEQ ID NO: 236969 - DNA, 15 bp, Homo sapiens
ctgggtgtggtggcg

SEQ ID NO: 236970 - DNA, 15 bp, Homo sapiens
gctgggtgtggtggc

SEQ ID NO: 236971 - DNA, 15 bp, Homo sapiens
agctgggtgtggtgg

SEQ ID NO: 236972 - DNA, 15 bp, Homo sapiens
tagctgggtgtggtg

SEQ ID NO: 236973 - DNA, 15 bp, Homo sapiens
ttagctgggtgtggt

SEQ ID NO: 236974 - DNA, 15 bp, Homo sapiens
attagctgggtgtgg

SEQ ID NO: 236975 - DNA, 15 bp, Homo sapiens
aattagctgggtgtg

SEQ ID NO: 236976 - DNA, 15 bp, Homo sapiens
aaattagctgggtgt

SEQ ID NO: 236977 - DNA, 15 bp, Homo sapiens
aaaattagctgggtg

SEQ ID NO: 236978 - DNA, 15 bp, Homo sapiens
aaaaattagctgggt

SEQ ID NO: 236979 - DNA, 15 bp, Homo sapiens
caaaaattagctggg

SEQ ID NO: 236980 - DNA, 15 bp, Homo sapiens
acaaaaattagctgg

SEQ ID NO: 236981 - DNA, 15 bp, Homo sapiens
tacaaaaattagctg

SEQ ID NO: 236982 - DNA, 15 bp, Homo sapiens
atacaaaaattagct

SEQ ID NO: 236983 - DNA, 15 bp, Homo sapiens
gaaaaatacaaaaat

SEQ ID NO: 236984 - DNA, 15 bp, Homo sapiens
tgaaaaatacaaaaa

SEQ ID NO: 236985 - DNA, 15 bp, Homo sapiens
ctgaaaaatacaaaa

SEQ ID NO: 236986 - DNA, 15 bp, Homo sapiens
actgaaaaatacaaa

SEQ ID NO: 236987 - DNA, 15 bp, Homo sapiens
tactgaaaaatacaa

SEQ ID NO: 236988 - DNA, 15 bp, Homo sapiens
ctactgaaaaataca

SEQ ID NO: 236989 - DNA, 15 bp, Homo sapiens
tctactgaaaaatac

SEQ ID NO: 236990 - DNA, 15 bp, Homo sapiens
ctctactgaaaaata

SEQ ID NO: 236991 - DNA, 15 bp, Homo sapiens
tctctactgaaaaat

SEQ ID NO: 236992 - DNA, 15 bp, Homo sapiens
atctctactgaaaaa

SEQ ID NO: 236993 - DNA, 15 bp, Homo sapiens
catctctactgaaaa

SEQ ID NO: 236994 - DNA, 15 bp, Homo sapiens
ccatctctactgaaa

SEQ ID NO: 236995 - DNA, 15 bp, Homo sapiens
cccatctctactgaa

SEQ ID NO: 236996 - DNA, 15 bp, Homo sapiens
tcccatctctactga

SEQ ID NO: 236997 - DNA, 15 bp, Homo sapiens
atcccatctctactg

SEQ ID NO: 236998 - DNA, 15 bp, Homo sapiens
aatcccatctctact

SEQ ID NO: 236999 - DNA, 15 bp, Homo sapiens
aaatcccatctctac

SEQ ID NO: 237000 - DNA, 15 bp, Homo sapiens
gaaatcccatctcta

SEQ ID NO: 237001 - DNA, 15 bp, Homo sapiens
tgaaatcccatctct

SEQ ID NO: 237002 - DNA, 15 bp, Homo sapiens
gtgaaatcccatctc

SEQ ID NO: 237003 - DNA, 15 bp, Homo sapiens
ggtgaaatcccatct

SEQ ID NO: 237004 - DNA, 15 bp, Homo sapiens
tggtgaaatcccatc

SEQ ID NO: 237005 - DNA, 15 bp, Homo sapiens
atggtgaaatcccat

SEQ ID NO: 237006 - DNA, 15 bp, Homo sapiens
tatggtgaaatccca

SEQ ID NO: 237007 - DNA, 15 bp, Homo sapiens
atatggtgaaatccc

SEQ ID NO: 237008 - DNA, 15 bp, Homo sapiens
aatatggtgaaatcc

SEQ ID NO: 237009 - DNA, 15 bp, Homo sapiens
caatatggtgaaatc

SEQ ID NO: 237010 - DNA, 15 bp, Homo sapiens
ccaatatggtgaaat

SEQ ID NO: 237011 - DNA, 15 bp, Homo sapiens
accaatatggtgaaa

SEQ ID NO: 237012 - DNA, 15 bp, Homo sapiens
gaccaatatggtgaa

SEQ ID NO: 237013 - DNA, 15 bp, Homo sapiens
tgaccaatatggtga

SEQ ID NO: 237014 - DNA, 15 bp, Homo sapiens
ttgaccaatatggtg

SEQ ID NO: 237015 - DNA, 15 bp, Homo sapiens
cttgaccaatatggt

SEQ ID NO: 237016 - DNA, 15 bp, Homo sapiens
gcttgaccaatatgg

SEQ ID NO: 237017 - DNA, 15 bp, Homo sapiens
agcttgaccaatatg

SEQ ID NO: 237018 - DNA, 15 bp, Homo sapiens
cagcttgaccaatat

SEQ ID NO: 237019 - DNA, 15 bp, Homo sapiens
ccagcttgaccaata

SEQ ID NO: 237020 - DNA, 15 bp, Homo sapiens
gccagcttgaccaat

SEQ ID NO: 237021 - DNA, 15 bp, Homo sapiens
ggccagcttgaccaa

SEQ ID NO: 237022 - DNA, 15 bp, Homo sapiens
aggccagcttgacca

SEQ ID NO: 237023 - DNA, 15 bp, Homo sapiens
gaggccagcttgacc

SEQ ID NO: 237024 - DNA, 15 bp, Homo sapiens
cgaggccagcttgac

SEQ ID NO: 237025 - DNA, 15 bp, Homo sapiens
tcgaggccagcttga

SEQ ID NO: 237026 - DNA, 15 bp, Homo sapiens
ttcgaggccagcttg

SEQ ID NO: 237027 - DNA, 15 bp, Homo sapiens
gttcgaggccagctt

SEQ ID NO: 237028 - DNA, 15 bp, Homo sapiens
agttcgaggccagct

SEQ ID NO: 237029 - DNA, 15 bp, Homo sapiens
gagttcgaggccagc

SEQ ID NO: 237030 - DNA, 15 bp, Homo sapiens
ggagttcgaggccag

SEQ ID NO: 237031 - DNA, 15 bp, Homo sapiens
aggagttcgaggcca

SEQ ID NO: 237032 - DNA, 15 bp, Homo sapiens
caggagttcgaggcc

SEQ ID NO: 237033 - DNA, 15 bp, Homo sapiens
tcaggagttcgaggc

SEQ ID NO: 237034 - DNA, 15 bp, Homo sapiens
gtcaggagttcgagg

SEQ ID NO: 237035 - DNA, 15 bp, Homo sapiens
actgaggcgggtgga

SEQ ID NO: 237036 - DNA, 15 bp, Homo sapiens
aactgaggcgggtgg

SEQ ID NO: 237037 - DNA, 15 bp, Homo sapiens
aaactgaggcgggtg

SEQ ID NO: 237038 - DNA, 15 bp, Homo sapiens
gaaactgaggcgggt

SEQ ID NO: 237039 - DNA, 15 bp, Homo sapiens
ggaaactgaggcggg

SEQ ID NO: 237040 - DNA, 15 bp, Homo sapiens
gggaaactgaggcgg

SEQ ID NO: 237041 - DNA, 15 bp, Homo sapiens
tgggaaactgaggcg

SEQ ID NO: 237042 - DNA, 15 bp, Homo sapiens
ttgggaaactgaggc

SEQ ID NO: 237043 - DNA, 15 bp, Homo sapiens
tttgggaaactgagg

SEQ ID NO: 237044 - DNA, 15 bp, Homo sapiens
ctttgggaaactgag

SEQ ID NO: 237045 - DNA, 15 bp, Homo sapiens
actttgggaaactga

SEQ ID NO: 237046 - DNA, 15 bp, Homo sapiens
cactttgggaaactg

SEQ ID NO: 237047 - DNA, 15 bp, Homo sapiens
gcactttgggaaact

SEQ ID NO: 237048 - DNA, 15 bp, Homo sapiens
agcactttgggaaac

SEQ ID NO: 237049 - DNA, 15 bp, Homo sapiens
cagcactttgggaaa

SEQ ID NO: 237050 - DNA, 15 bp, Homo sapiens
ccagcactttgggaa

SEQ ID NO: 237051 - DNA, 15 bp, Homo sapiens
ctcccagcactttgg

SEQ ID NO: 237052 - DNA, 15 bp, Homo sapiens
actcccagcactttg

SEQ ID NO: 237053 - DNA, 15 bp, Homo sapiens
tactcccagcacttt

SEQ ID NO: 237054 - DNA, 15 bp, Homo sapiens
gtactcccagcactt

SEQ ID NO: 237055 - DNA, 15 bp, Homo sapiens
tgtactcccagcact

SEQ ID NO: 237056 - DNA, 15 bp, Homo sapiens
ctgtactcccagcac

SEQ ID NO: 237057 - DNA, 15 bp, Homo sapiens
cctgtactcccagca

SEQ ID NO: 237058 - DNA, 15 bp, Homo sapiens
gcctgtactcccagc

SEQ ID NO: 237059 - DNA, 15 bp, Homo sapiens
cgcctgtactcccag

SEQ ID NO: 237060 - DNA, 15 bp, Homo sapiens
acgcctgtactccca

SEQ ID NO: 237061 - DNA, 15 bp, Homo sapiens
cacgcctgtactccc

SEQ ID NO: 237062 - DNA, 15 bp, Homo sapiens
tcacgcctgtactcc

SEQ ID NO: 237063 - DNA, 15 bp, Homo sapiens
ctcacgcctgtactc

SEQ ID NO: 237064 - DNA, 15 bp, Homo sapiens
gctcacgcctgtact

SEQ ID NO: 237065 - DNA, 15 bp, Homo sapiens
ggctcacgcctgtac

SEQ ID NO: 237066 - DNA, 15 bp, Homo sapiens
cggctcacgcctgta

SEQ ID NO: 237067 - DNA, 15 bp, Homo sapiens
gcggctcacgcctgt

SEQ ID NO: 237068 - DNA, 15 bp, Homo sapiens
ggcggctcacgcctg

SEQ ID NO: 237069 - DNA, 15 bp, Homo sapiens
cggcggctcacgcct

SEQ ID NO: 237070 - DNA, 15 bp, Homo sapiens
acggcggctcacgcc

SEQ ID NO: 237071 - DNA, 15 bp, Homo sapiens
cacggcggctcacgc

SEQ ID NO: 237072 - DNA, 15 bp, Homo sapiens
gcacggcggctcacg

SEQ ID NO: 237073 - DNA, 15 bp, Homo sapiens
ggcacggcggctcac

SEQ ID NO: 237074 - DNA, 15 bp, Homo sapiens
gggcacggcggctca

SEQ ID NO: 237075 - DNA, 15 bp, Homo sapiens
cgggcacggcggctc

SEQ ID NO: 237076 - DNA, 15 bp, Homo sapiens
ccgggcacggcggct

SEQ ID NO: 237077 - DNA, 15 bp, Homo sapiens
gccgggcacggcggc

SEQ ID NO: 237078 - DNA, 15 bp, Homo sapiens
ggccgggcacggcgg

SEQ ID NO: 237079 - DNA, 15 bp, Homo sapiens
aggccgggcacggcg

SEQ ID NO: 237080 - DNA, 15 bp, Homo sapiens
aaggccgggcacggc

SEQ ID NO: 237081 - DNA, 15 bp, Homo sapiens
aaaggccgggcacgg

SEQ ID NO: 237082 - DNA, 15 bp, Homo sapiens
aaaaggccgggcacg

SEQ ID NO: 237083 - DNA, 15 bp, Homo sapiens
aaaaaggccgggcac

SEQ ID NO: 237084 - DNA, 15 bp, Homo sapiens
caaaaaggccgggca

SEQ ID NO: 237085 - DNA, 15 bp, Homo sapiens
acaaaaaggccgggc

SEQ ID NO: 237086 - DNA, 15 bp, Homo sapiens
cacaaaaaggccggg

SEQ ID NO: 237087 - DNA, 15 bp, Homo sapiens
acacaaaaaggccgg

SEQ ID NO: 237088 - DNA, 15 bp, Homo sapiens
aacacaaaaaggccg

SEQ ID NO: 237089 - DNA, 15 bp, Homo sapiens
aaacacaaaaaggcc

SEQ ID NO: 237090 - DNA, 15 bp, Homo sapiens
aaaacacaaaaaggc

SEQ ID NO: 237091 - DNA, 15 bp, Homo sapiens
aaaaacacaaaaagg

SEQ ID NO: 237092 - DNA, 15 bp, Homo sapiens
caaaaacacaaaaag

SEQ ID NO: 237093 - DNA, 15 bp, Homo sapiens
acaaaaacacaaaaa

SEQ ID NO: 237094 - DNA, 15 bp, Homo sapiens
cacaaaaacacaaaa

SEQ ID NO: 237095 - DNA, 15 bp, Homo sapiens
acacaaaaacacaaa

SEQ ID NO: 237096 - DNA, 15 bp, Homo sapiens
aacacaaaaacacaa

SEQ ID NO: 237097 - DNA, 15 bp, Homo sapiens
aaacacaaaaacaca

SEQ ID NO: 237098 - DNA, 15 bp, Homo sapiens
aaaacacaaaaacac

SEQ ID NO: 237099 - DNA, 15 bp, Homo sapiens
aaaaacacaaaaaca

SEQ ID NO: 237100 - DNA, 15 bp, Homo sapiens
caaaaacacaaaaac

SEQ ID NO: 237101 - DNA, 15 bp, Homo sapiens
tcaaaaacacaaaaa

SEQ ID NO: 237102 - DNA, 15 bp, Homo sapiens
ctcaaaaacacaaaa

SEQ ID NO: 237103 - DNA, 15 bp, Homo sapiens
tctcaaaaacacaaa

SEQ ID NO: 237104 - DNA, 15 bp, Homo sapiens
ctctcaaaaacacaa

SEQ ID NO: 237105 - DNA, 15 bp, Homo sapiens
cctctcaaaaacaca

SEQ ID NO: 237106 - DNA, 15 bp, Homo sapiens
tcctctcaaaaacac

SEQ ID NO: 237107 - DNA, 15 bp, Homo sapiens
ctcctctcaaaaaca

SEQ ID NO: 237108 - DNA, 15 bp, Homo sapiens
gctcctctcaaaaac

SEQ ID NO: 237109 - DNA, 15 bp, Homo sapiens
agctcctctcaaaaa

SEQ ID NO: 237110 - DNA, 15 bp, Homo sapiens
gagctcctctcaaaa

SEQ ID NO: 237111 - DNA, 15 bp, Homo sapiens
tgagctcctctcaaa

SEQ ID NO: 237112 - DNA, 15 bp, Homo sapiens
atgagctcctctcaa

SEQ ID NO: 237113 - DNA, 15 bp, Homo sapiens
aatgagctcctctca

SEQ ID NO: 237114 - DNA, 15 bp, Homo sapiens
caatgagctcctctc

SEQ ID NO: 237115 - DNA, 15 bp, Homo sapiens
gcaatgagctcctct

SEQ ID NO: 237116 - DNA, 15 bp, Homo sapiens
agcaatgagctcctc

SEQ ID NO: 237117 - DNA, 15 bp, Homo sapiens
aagcaatgagctcct

SEQ ID NO: 237118 - DNA, 15 bp, Homo sapiens
aaagcaatgagctcc

SEQ ID NO: 237119 - DNA, 15 bp, Homo sapiens
aaaagcaatgagctc

SEQ ID NO: 237120 - DNA, 15 bp, Homo sapiens
aaaaagcaatgagct

SEQ ID NO: 237121 - DNA, 15 bp, Homo sapiens
taaaaagcaatgagc

SEQ ID NO: 237122 - DNA, 15 bp, Homo sapiens
ctaaaaagcaatgag

SEQ ID NO: 237123 - DNA, 15 bp, Homo sapiens
cctaaaaagcaatga

SEQ ID NO: 237124 - DNA, 15 bp, Homo sapiens
gcctaaaaagcaatg

SEQ ID NO: 237125 - DNA, 15 bp, Homo sapiens
agcctaaaaagcaat

SEQ ID NO: 237126 - DNA, 15 bp, Homo sapiens
aagcctaaaaagcaa

SEQ ID NO: 237127 - DNA, 15 bp, Homo sapiens
gaagcctaaaaagca

SEQ ID NO: 237128 - DNA, 15 bp, Homo sapiens
ggaagcctaaaaagc

SEQ ID NO: 237129 - DNA, 15 bp, Homo sapiens
gggaagcctaaaaag

SEQ ID NO: 237130 - DNA, 15 bp, Homo sapiens
agggaagcctaaaaa

SEQ ID NO: 237131 - DNA, 15 bp, Homo sapiens
tagggaagcctaaaa

SEQ ID NO: 237132 - DNA, 15 bp, Homo sapiens
ctagggaagcctaaa

SEQ ID NO: 237133 - DNA, 15 bp, Homo sapiens
gctagggaagcctaa

SEQ ID NO: 237134 - DNA, 15 bp, Homo sapiens
cgctagggaagccta

SEQ ID NO: 237135 - DNA, 15 bp, Homo sapiens
acgctagggaagcct

SEQ ID NO: 237136 - DNA, 15 bp, Homo sapiens
cacgctagggaagcc

SEQ ID NO: 237137 - DNA, 15 bp, Homo sapiens
tcacgctagggaagc

SEQ ID NO: 237138 - DNA, 15 bp, Homo sapiens
ctcacgctagggaag

SEQ ID NO: 237139 - DNA, 15 bp, Homo sapiens
tctcacgctagggaa

SEQ ID NO: 237140 - DNA, 15 bp, Homo sapiens
ttctcacgctaggga

SEQ ID NO: 237141 - DNA, 15 bp, Homo sapiens
tttctcacgctaggg

SEQ ID NO: 237142 - DNA, 15 bp, Homo sapiens
ttttctcacgctagg

SEQ ID NO: 237143 - DNA, 15 bp, Homo sapiens
attttctcacgctag

SEQ ID NO: 237144 - DNA, 15 bp, Homo sapiens
gattttctcacgcta

SEQ ID NO: 237145 - DNA, 15 bp, Homo sapiens
agattttctcacgct

SEQ ID NO: 237146 - DNA, 15 bp, Homo sapiens
cagattttctcacgc

SEQ ID NO: 237147 - DNA, 15 bp, Homo sapiens
ccagattttctcacg

SEQ ID NO: 237148 - DNA, 15 bp, Homo sapiens
cccagattttctcac

SEQ ID NO: 237149 - DNA, 15 bp, Homo sapiens
ccccagattttctca

SEQ ID NO: 237150 - DNA, 15 bp, Homo sapiens
tccccagattttctc

SEQ ID NO: 237151 - DNA, 15 bp, Homo sapiens
atccccagattttct

SEQ ID NO: 237152 - DNA, 15 bp, Homo sapiens
gatccccagattttc

SEQ ID NO: 237153 - DNA, 15 bp, Homo sapiens
ggatccccagatttt

SEQ ID NO: 237154 - DNA, 15 bp, Homo sapiens
tggatccccagattt

SEQ ID NO: 237155 - DNA, 15 bp, Homo sapiens
atggatccccagatt

SEQ ID NO: 237156 - DNA, 15 bp, Homo sapiens
catggatccccagat

SEQ ID NO: 237157 - DNA, 15 bp, Homo sapiens
gcatggatccccaga

SEQ ID NO: 237158 - DNA, 15 bp, Homo sapiens
agcatggatccccag

SEQ ID NO: 237159 - DNA, 15 bp, Homo sapiens
gagcatggatcccca

SEQ ID NO: 237160 - DNA, 15 bp, Homo sapiens
agagcatggatcccc

SEQ ID NO: 237161 - DNA, 15 bp, Homo sapiens
tagagcatggatccc

SEQ ID NO: 237162 - DNA, 15 bp, Homo sapiens
ctagagcatggatcc

SEQ ID NO: 237163 - DNA, 15 bp, Homo sapiens
actagagcatggatc

SEQ ID NO: 237164 - DNA, 15 bp, Homo sapiens
aactagagcatggat

SEQ ID NO: 237165 - DNA, 15 bp, Homo sapiens
aaactagagcatgga

SEQ ID NO: 237166 - DNA, 15 bp, Homo sapiens
taaactagagcatgg

SEQ ID NO: 237167 - DNA, 15 bp, Homo sapiens
gtaaactagagcatg

SEQ ID NO: 237168 - DNA, 15 bp, Homo sapiens
agtaaactagagcat

SEQ ID NO: 237169 - DNA, 15 bp, Homo sapiens
aagtaaactagagca

SEQ ID NO: 237170 - DNA, 15 bp, Homo sapiens
gaagtaaactagagc

SEQ ID NO: 237171 - DNA, 15 bp, Homo sapiens
ggaagtaaactagag

SEQ ID NO: 237172 - DNA, 15 bp, Homo sapiens
aggaagtaaactaga

SEQ ID NO: 237173 - DNA, 15 bp, Homo sapiens
aaggaagtaaactag

SEQ ID NO: 237174 - DNA, 15 bp, Homo sapiens
aaaggaagtaaacta

SEQ ID NO: 237175 - DNA, 15 bp, Homo sapiens
aaaaggaagtaaact

SEQ ID NO: 237176 - DNA, 15 bp, Homo sapiens
aaaaaggaagtaaac

SEQ ID NO: 237177 - DNA, 15 bp, Homo sapiens
aaaaaaggaagtaaa

SEQ ID NO: 237178 - DNA, 15 bp, Homo sapiens
aaaaaaaggaagtaa

SEQ ID NO: 237179 - DNA, 15 bp, Homo sapiens
aaaaaaaaggaagta

SEQ ID NO: 237180 - DNA, 15 bp, Homo sapiens
aaaaaaaaaggaagt

SEQ ID NO: 237181 - DNA, 15 bp, Homo sapiens
aaaaaaaaaaggaag

SEQ ID NO: 237182 - DNA, 15 bp, Homo sapiens
aaaaaaaaaaaggaa

SEQ ID NO: 237183 - DNA, 15 bp, Homo sapiens
aaaaaaaaaaaagga

SEQ ID NO: 237184 - DNA, 15 bp, Homo sapiens
aaaaaaaaaaaaagg

SEQ ID NO: 237185 - DNA, 15 bp, Homo sapiens
aagcgagactccatc

SEQ ID NO: 237186 - DNA, 15 bp, Homo sapiens
taagcgagactccat

SEQ ID NO: 237187 - DNA, 15 bp, Homo sapiens
ctaagcgagactcca

SEQ ID NO: 237188 - DNA, 15 bp, Homo sapiens
tctaagcgagactcc

SEQ ID NO: 237189 - DNA, 15 bp, Homo sapiens
atctaagcgagactc

SEQ ID NO: 237190 - DNA, 15 bp, Homo sapiens
aatctaagcgagact

SEQ ID NO: 237191 - DNA, 15 bp, Homo sapiens
caatctaagcgagac

SEQ ID NO: 237192 - DNA, 15 bp, Homo sapiens
gcaatctaagcgaga

SEQ ID NO: 237193 - DNA, 15 bp, Homo sapiens
ggcaatctaagcgag

SEQ ID NO: 237194 - DNA, 15 bp, Homo sapiens
aggcaatctaagcga

SEQ ID NO: 237195 - DNA, 15 bp, Homo sapiens
taggcaatctaagcg

SEQ ID NO: 237196 - DNA, 15 bp, Homo sapiens
ttaggcaatctaagc

SEQ ID NO: 237197 - DNA, 15 bp, Homo sapiens
attaggcaatctaag

SEQ ID NO: 237198 - DNA, 15 bp, Homo sapiens
gattaggcaatctaa

SEQ ID NO: 237199 - DNA, 15 bp, Homo sapiens
agattaggcaatcta

SEQ ID NO: 237200 - DNA, 15 bp, Homo sapiens
gagattaggcaatct

SEQ ID NO: 237201 - DNA, 15 bp, Homo sapiens
tgagattaggcaatc

SEQ ID NO: 237202 - DNA, 15 bp, Homo sapiens
ctgagattaggcaat

SEQ ID NO: 237203 - DNA, 15 bp, Homo sapiens
gctgagattaggcaa

SEQ ID NO: 237204 - DNA, 15 bp, Homo sapiens
agctgagattaggca

SEQ ID NO: 237205 - DNA, 15 bp, Homo sapiens
gagctgagattaggc

SEQ ID NO: 237206 - DNA, 15 bp, Homo sapiens
tgagctgagattagg

SEQ ID NO: 237207 - DNA, 15 bp, Homo sapiens
atgagctgagattag

SEQ ID NO: 237208 - DNA, 15 bp, Homo sapiens
aatgagctgagatta

SEQ ID NO: 237209 - DNA, 15 bp, Homo sapiens
caatgagctgagatt

SEQ ID NO: 237210 - DNA, 15 bp, Homo sapiens
gcaatgagctgagat

SEQ ID NO: 237211 - DNA, 15 bp, Homo sapiens
tgcaatgagctgaga

SEQ ID NO: 237212 - DNA, 15 bp, Homo sapiens
ttgcaatgagctgag

SEQ ID NO: 237213 - DNA, 15 bp, Homo sapiens
gttgcaatgagctga

SEQ ID NO: 237214 - DNA, 15 bp, Homo sapiens
agttgcaatgagctg

SEQ ID NO: 237215 - DNA, 15 bp, Homo sapiens
aagttgcaatgagct

SEQ ID NO: 237216 - DNA, 15 bp, Homo sapiens
gaagttgcaatgagc

SEQ ID NO: 237217 - DNA, 15 bp, Homo sapiens
agaagttgcaatgag

SEQ ID NO: 237218 - DNA, 15 bp, Homo sapiens
cagaagttgcaatga

SEQ ID NO: 237219 - DNA, 15 bp, Homo sapiens
gcagaagttgcaatg

SEQ ID NO: 237220 - DNA, 15 bp, Homo sapiens
ggcagaagttgcaat

SEQ ID NO: 237221 - DNA, 15 bp, Homo sapiens
aggcagaagttgcaa

SEQ ID NO: 237222 - DNA, 15 bp, Homo sapiens
gaggcagaagttgca

SEQ ID NO: 237223 - DNA, 15 bp, Homo sapiens
ggaggcagaagttgc

SEQ ID NO: 237224 - DNA, 15 bp, Homo sapiens
cggaggcagaagttg

SEQ ID NO: 237225 - DNA, 15 bp, Homo sapiens
ccggaggcagaagtt

SEQ ID NO: 237226 - DNA, 15 bp, Homo sapiens
cccggaggcagaagt

SEQ ID NO: 237227 - DNA, 15 bp, Homo sapiens
ccccggaggcagaag

SEQ ID NO: 237228 - DNA, 15 bp, Homo sapiens
accccggaggcagaa

SEQ ID NO: 237229 - DNA, 15 bp, Homo sapiens
aaccccggaggcaga

SEQ ID NO: 237230 - DNA, 15 bp, Homo sapiens
gaaccccggaggcag

SEQ ID NO: 237231 - DNA, 15 bp, Homo sapiens
tgaaccccggaggca

SEQ ID NO: 237232 - DNA, 15 bp, Homo sapiens
ttgaaccccggaggc

SEQ ID NO: 237233 - DNA, 15 bp, Homo sapiens
cttgaaccccggagg

SEQ ID NO: 237234 - DNA, 15 bp, Homo sapiens
ccttgaaccccggag

SEQ ID NO: 237235 - DNA, 15 bp, Homo sapiens
cccttgaaccccgga

SEQ ID NO: 237236 - DNA, 15 bp, Homo sapiens
tcccttgaaccccgg

SEQ ID NO: 237237 - DNA, 15 bp, Homo sapiens
atcccttgaaccccg

SEQ ID NO: 237238 - DNA, 15 bp, Homo sapiens
aatcccttgaacccc

SEQ ID NO: 237239 - DNA, 15 bp, Homo sapiens
gaatcccttgaaccc

SEQ ID NO: 237240 - DNA, 15 bp, Homo sapiens
agaatcccttgaacc

SEQ ID NO: 237241 - DNA, 15 bp, Homo sapiens
gagaatcccttgaac

SEQ ID NO: 237242 - DNA, 15 bp, Homo sapiens
cgagaatcccttgaa

SEQ ID NO: 237243 - DNA, 15 bp, Homo sapiens
acgagaatcccttga

SEQ ID NO: 237244 - DNA, 15 bp, Homo sapiens
cacgagaatcccttg

SEQ ID NO: 237245 - DNA, 15 bp, Homo sapiens
acacgagaatccctt

SEQ ID NO: 237246 - DNA, 15 bp, Homo sapiens
gacacgagaatccct

SEQ ID NO: 237247 - DNA, 15 bp, Homo sapiens
agacacgagaatccc

SEQ ID NO: 237248 - DNA, 15 bp, Homo sapiens
gagacacgagaatcc

SEQ ID NO: 237249 - DNA, 15 bp, Homo sapiens
tgagacacgagaatc

SEQ ID NO: 237250 - DNA, 15 bp, Homo sapiens
ctgagacacgagaat

SEQ ID NO: 237251 - DNA, 15 bp, Homo sapiens
gctgagacacgagaa

SEQ ID NO: 237252 - DNA, 15 bp, Homo sapiens
ggctgagacacgaga

SEQ ID NO: 237253 - DNA, 15 bp, Homo sapiens
aggctgagacacgag

SEQ ID NO: 237254 - DNA, 15 bp, Homo sapiens
gaggctgagacacga

SEQ ID NO: 237255 - DNA, 15 bp, Homo sapiens
ggaggctgagacacg

SEQ ID NO: 237256 - DNA, 15 bp, Homo sapiens
aggaggctgagacac

SEQ ID NO: 237257 - DNA, 15 bp, Homo sapiens
caggaggctgagaca

SEQ ID NO: 237258 - DNA, 15 bp, Homo sapiens
ccaggaggctgagac

SEQ ID NO: 237259 - DNA, 15 bp, Homo sapiens
cccaggaggctgaga

SEQ ID NO: 237260 - DNA, 15 bp, Homo sapiens
acccaggaggctgag

SEQ ID NO: 237261 - DNA, 15 bp, Homo sapiens
tacccaggaggctga

SEQ ID NO: 237262 - DNA, 15 bp, Homo sapiens
ctacccaggaggctg

SEQ ID NO: 237263 - DNA, 15 bp, Homo sapiens
gctacccaggaggct

SEQ ID NO: 237264 - DNA, 15 bp, Homo sapiens
agctacccaggaggc

SEQ ID NO: 237265 - DNA, 15 bp, Homo sapiens
tagctacccaggagg

SEQ ID NO: 237266 - DNA, 15 bp, Homo sapiens
ctagctacccaggag

SEQ ID NO: 237267 - DNA, 15 bp, Homo sapiens
cctagctacccagga

SEQ ID NO: 237268 - DNA, 15 bp, Homo sapiens
tcctagctacccagg

SEQ ID NO: 237269 - DNA, 15 bp, Homo sapiens
atcctagctacccag

SEQ ID NO: 237270 - DNA, 15 bp, Homo sapiens
tatcctagctaccca

SEQ ID NO: 237271 - DNA, 15 bp, Homo sapiens
gtatcctagctaccc

SEQ ID NO: 237272 - DNA, 15 bp, Homo sapiens
cgtatcctagctacc

SEQ ID NO: 237273 - DNA, 15 bp, Homo sapiens
ccgtatcctagctac

SEQ ID NO: 237274 - DNA, 15 bp, Homo sapiens
cccgtatcctagcta

SEQ ID NO: 237275 - DNA, 15 bp, Homo sapiens
gcccgtatcctagct

SEQ ID NO: 237276 - DNA, 15 bp, Homo sapiens
tgcccgtatcctagc

SEQ ID NO: 237277 - DNA, 15 bp, Homo sapiens
gtgcccgtatcctag

SEQ ID NO: 237278 - DNA, 15 bp, Homo sapiens
ggtgcccgtatccta

SEQ ID NO: 237279 - DNA, 15 bp, Homo sapiens
gggtgcccgtatcct

SEQ ID NO: 237280 - DNA, 15 bp, Homo sapiens
cgggtgcccgtatcc

SEQ ID NO: 237281 - DNA, 15 bp, Homo sapiens
gcgggtgcccgtatc

SEQ ID NO: 237282 - DNA, 15 bp, Homo sapiens
agcgggtgcccgtat

SEQ ID NO: 237283 - DNA, 15 bp, Homo sapiens
tagcgggtgcccgta

SEQ ID NO: 237284 - DNA, 15 bp, Homo sapiens
gtagcgggtgcccgt

SEQ ID NO: 237285 - DNA, 15 bp, Homo sapiens
ggtagcgggtgcccg

SEQ ID NO: 237286 - DNA, 15 bp, Homo sapiens
tggtagcgggtgccc

SEQ ID NO: 237287 - DNA, 15 bp, Homo sapiens
atggtagcgggtgcc

SEQ ID NO: 237288 - DNA, 15 bp, Homo sapiens
catggtagcgggtgc

SEQ ID NO: 237289 - DNA, 15 bp, Homo sapiens
gcatggtagcgggtg

SEQ ID NO: 237290 - DNA, 15 bp, Homo sapiens
ggcatggtagcgggt

SEQ ID NO: 237291 - DNA, 15 bp, Homo sapiens
aggcatggtagcggg

SEQ ID NO: 237292 - DNA, 15 bp, Homo sapiens
caggcatggtagcgg

SEQ ID NO: 237293 - DNA, 15 bp, Homo sapiens
ccaggcatggtagcg

SEQ ID NO: 237294 - DNA, 15 bp, Homo sapiens
caaaattagccaggc

SEQ ID NO: 237295 - DNA, 15 bp, Homo sapiens
acaaaattagccagg

SEQ ID NO: 237296 - DNA, 15 bp, Homo sapiens
tacaaaattagccag

SEQ ID NO: 237297 - DNA, 15 bp, Homo sapiens
gtacaaaattagcca

SEQ ID NO: 237298 - DNA, 15 bp, Homo sapiens
agtacaaaattagcc

SEQ ID NO: 237299 - DNA, 15 bp, Homo sapiens
aagtacaaaattagc

SEQ ID NO: 237300 - DNA, 15 bp, Homo sapiens
aaagtacaaaattag

SEQ ID NO: 237301 - DNA, 15 bp, Homo sapiens
aaaagtacaaaatta

SEQ ID NO: 237302 - DNA, 15 bp, Homo sapiens
taaaagtacaaaatt

SEQ ID NO: 237303 - DNA, 15 bp, Homo sapiens
ctaaaagtacaaaat

SEQ ID NO: 237304 - DNA, 15 bp, Homo sapiens
actaaaagtacaaaa

SEQ ID NO: 237305 - DNA, 15 bp, Homo sapiens
tactaaaagtacaaa

SEQ ID NO: 237306 - DNA, 15 bp, Homo sapiens
ctactaaaagtacaa

SEQ ID NO: 237307 - DNA, 15 bp, Homo sapiens
tctactaaaagtaca

SEQ ID NO: 237308 - DNA, 15 bp, Homo sapiens
ctctactaaaagtac

SEQ ID NO: 237309 - DNA, 15 bp, Homo sapiens
tctctactaaaagta

SEQ ID NO: 237310 - DNA, 15 bp, Homo sapiens
gtctctactaaaagt

SEQ ID NO: 237311 - DNA, 15 bp, Homo sapiens
tgtctctactaaaag

SEQ ID NO: 237312 - DNA, 15 bp, Homo sapiens
cgaaaccctgtctct

SEQ ID NO: 237313 - DNA, 15 bp, Homo sapiens
gcgaaaccctgtctc

SEQ ID NO: 237314 - DNA, 15 bp, Homo sapiens
ggcgaaaccctgtct

SEQ ID NO: 237315 - DNA, 15 bp, Homo sapiens
tggcgaaaccctgtc

SEQ ID NO: 237316 - DNA, 15 bp, Homo sapiens
gtggcgaaaccctgt

SEQ ID NO: 237317 - DNA, 15 bp, Homo sapiens
cgtggcgaaaccctg

SEQ ID NO: 237318 - DNA, 15 bp, Homo sapiens
acgtggcgaaaccct

SEQ ID NO: 237319 - DNA, 15 bp, Homo sapiens
aacgtggcgaaaccc

SEQ ID NO: 237320 - DNA, 15 bp, Homo sapiens
caacgtggcgaaacc

SEQ ID NO: 237321 - DNA, 15 bp, Homo sapiens
ccaacgtggcgaaac

SEQ ID NO: 237322 - DNA, 15 bp, Homo sapiens
gccaacgtggcgaaa

SEQ ID NO: 237323 - DNA, 15 bp, Homo sapiens
ggccaacgtggcgaa

SEQ ID NO: 237324 - DNA, 15 bp, Homo sapiens
tggccaacgtggcga

SEQ ID NO: 237325 - DNA, 15 bp, Homo sapiens
ctggccaacgtggcg

SEQ ID NO: 237326 - DNA, 15 bp, Homo sapiens
cctggccaacgtggc

SEQ ID NO: 237327 - DNA, 15 bp, Homo sapiens
ctcacctgaggtcag

SEQ ID NO: 237328 - DNA, 15 bp, Homo sapiens
gctcacctgaggtca

SEQ ID NO: 237329 - DNA, 15 bp, Homo sapiens
ggctcacctgaggtc

SEQ ID NO: 237330 - DNA, 15 bp, Homo sapiens
cggctcacctgaggt

SEQ ID NO: 237331 - DNA, 15 bp, Homo sapiens
gcggctcacctgagg

SEQ ID NO: 237332 - DNA, 15 bp, Homo sapiens
ggcggctcacctgag

SEQ ID NO: 237333 - DNA, 15 bp, Homo sapiens
aggcggctcacctga

SEQ ID NO: 237334 - DNA, 15 bp, Homo sapiens
caggcggctcacctg

SEQ ID NO: 237335 - DNA, 15 bp, Homo sapiens
gcaggcggctcacct

SEQ ID NO: 237336 - DNA, 15 bp, Homo sapiens
ggcaggcggctcacc

SEQ ID NO: 237337 - DNA, 15 bp, Homo sapiens
aggcaggcggctcac

SEQ ID NO: 237338 - DNA, 15 bp, Homo sapiens
aaggcaggcggctca

SEQ ID NO: 237339 - DNA, 15 bp, Homo sapiens
caaggcaggcggctc

SEQ ID NO: 237340 - DNA, 15 bp, Homo sapiens
ccaaggcaggcggct

SEQ ID NO: 237341 - DNA, 15 bp, Homo sapiens
gccaaggcaggcggc

SEQ ID NO: 237342 - DNA, 15 bp, Homo sapiens
ggccaaggcaggcgg

SEQ ID NO: 237343 - DNA, 15 bp, Homo sapiens
aggccaaggcaggcg

SEQ ID NO: 237344 - DNA, 15 bp, Homo sapiens
gaggccaaggcaggc

SEQ ID NO: 237345 - DNA, 15 bp, Homo sapiens
ggaggccaaggcagg

SEQ ID NO: 237346 - DNA, 15 bp, Homo sapiens
gggaggccaaggcag

SEQ ID NO: 237347 - DNA, 15 bp, Homo sapiens
tgggaggccaaggca

SEQ ID NO: 237348 - DNA, 15 bp, Homo sapiens
ttgggaggccaaggc

SEQ ID NO: 237349 - DNA, 15 bp, Homo sapiens
tttgggaggccaagg

SEQ ID NO: 237350 - DNA, 15 bp, Homo sapiens
ctttgggaggccaag

SEQ ID NO: 237351 - DNA, 15 bp, Homo sapiens
actttgggaggccaa

SEQ ID NO: 237352 - DNA, 15 bp, Homo sapiens
cactttgggaggcca

SEQ ID NO: 237353 - DNA, 15 bp, Homo sapiens
tcagcactttgggag

SEQ ID NO: 237354 - DNA, 15 bp, Homo sapiens
ctcagcactttggga

SEQ ID NO: 237355 - DNA, 15 bp, Homo sapiens
tctcagcactttggg

SEQ ID NO: 237356 - DNA, 15 bp, Homo sapiens
atctcagcactttgg

SEQ ID NO: 237357 - DNA, 15 bp, Homo sapiens
aatctcagcactttg

SEQ ID NO: 237358 - DNA, 15 bp, Homo sapiens
taatctcagcacttt

SEQ ID NO: 237359 - DNA, 15 bp, Homo sapiens
gtaatctcagcactt

SEQ ID NO: 237360 - DNA, 15 bp, Homo sapiens
tgtaatctcagcact

SEQ ID NO: 237361 - DNA, 15 bp, Homo sapiens
ctgtaatctcagcac

SEQ ID NO: 237362 - DNA, 15 bp, Homo sapiens
cctgtaatctcagca

SEQ ID NO: 237363 - DNA, 15 bp, Homo sapiens
gcctgtaatctcagc

SEQ ID NO: 237364 - DNA, 15 bp, Homo sapiens
cgcctgtaatctcag

SEQ ID NO: 237365 - DNA, 15 bp, Homo sapiens
acgcctgtaatctca

SEQ ID NO: 237366 - DNA, 15 bp, Homo sapiens
cacgcctgtaatctc

SEQ ID NO: 237367 - DNA, 15 bp, Homo sapiens
tcacgcctgtaatct

SEQ ID NO: 237368 - DNA, 15 bp, Homo sapiens
cgcggtggctcacgc

SEQ ID NO: 237369 - DNA, 15 bp, Homo sapiens
gcgcggtggctcacg

SEQ ID NO: 237370 - DNA, 15 bp, Homo sapiens
agcgcggtggctcac

SEQ ID NO: 237371 - DNA, 15 bp, Homo sapiens
aagcgcggtggctca

SEQ ID NO: 237372 - DNA, 15 bp, Homo sapiens
caagcgcggtggctc

SEQ ID NO: 237373 - DNA, 15 bp, Homo sapiens
ccaagcgcggtggct

SEQ ID NO: 237374 - DNA, 15 bp, Homo sapiens
gccaagcgcggtggc

SEQ ID NO: 237375 - DNA, 15 bp, Homo sapiens
ggccaagcgcggtgg

SEQ ID NO: 237376 - DNA, 15 bp, Homo sapiens
aggccaagcgcggtg

SEQ ID NO: 237377 - DNA, 15 bp, Homo sapiens
taggccaagcgcggt

SEQ ID NO: 237378 - DNA, 15 bp, Homo sapiens
ttaggccaagcgcgg

SEQ ID NO: 237379 - DNA, 15 bp, Homo sapiens
attaggccaagcgcg

SEQ ID NO: 237380 - DNA, 15 bp, Homo sapiens
aattaggccaagcgc

SEQ ID NO: 237381 - DNA, 15 bp, Homo sapiens
aaattaggccaagcg

SEQ ID NO: 237382 - DNA, 15 bp, Homo sapiens
caaattaggccaagc

SEQ ID NO: 237383 - DNA, 15 bp, Homo sapiens
gcaaattaggccaag

SEQ ID NO: 237384 - DNA, 15 bp, Homo sapiens
agcaaattaggccaa

SEQ ID NO: 237385 - DNA, 15 bp, Homo sapiens
aagcaaattaggcca

SEQ ID NO: 237386 - DNA, 15 bp, Homo sapiens
aaagcaaattaggcc

SEQ ID NO: 237387 - DNA, 15 bp, Homo sapiens
aaaagcaaattaggc

SEQ ID NO: 237388 - DNA, 15 bp, Homo sapiens
gaaaagcaaattagg

SEQ ID NO: 237389 - DNA, 15 bp, Homo sapiens
ggaaaagcaaattag

SEQ ID NO: 237390 - DNA, 15 bp, Homo sapiens
aggaaaagcaaatta

SEQ ID NO: 237391 - DNA, 15 bp, Homo sapiens
caggaaaagcaaatt

SEQ ID NO: 237392 - DNA, 15 bp, Homo sapiens
tcaggaaaagcaaat

SEQ ID NO: 237393 - DNA, 15 bp, Homo sapiens
ttcaggaaaagcaaa

SEQ ID NO: 237394 - DNA, 15 bp, Homo sapiens
tttcaggaaaagcaa

SEQ ID NO: 237395 - DNA, 15 bp, Homo sapiens
atttcaggaaaagca

SEQ ID NO: 237396 - DNA, 15 bp, Homo sapiens
aatttcaggaaaagc

SEQ ID NO: 237397 - DNA, 15 bp, Homo sapiens
gaatttcaggaaaag

SEQ ID NO: 237398 - DNA, 15 bp, Homo sapiens
tgaatttcaggaaaa

SEQ ID NO: 237399 - DNA, 15 bp, Homo sapiens
ttgaatttcaggaaa

SEQ ID NO: 237400 - DNA, 15 bp, Homo sapiens
tttgaatttcaggaa

SEQ ID NO: 237401 - DNA, 15 bp, Homo sapiens
atttgaatttcagga

SEQ ID NO: 237402 - DNA, 15 bp, Homo sapiens
catttgaatttcagg

SEQ ID NO: 237403 - DNA, 15 bp, Homo sapiens
ccatttgaatttcag

SEQ ID NO: 237404 - DNA, 15 bp, Homo sapiens
accatttgaatttca

SEQ ID NO: 237405 - DNA, 15 bp, Homo sapiens
gaccatttgaatttc

SEQ ID NO: 237406 - DNA, 15 bp, Homo sapiens
agaccatttgaattt

SEQ ID NO: 237407 - DNA, 15 bp, Homo sapiens
tagaccatttgaatt

SEQ ID NO: 237408 - DNA, 15 bp, Homo sapiens
ttagaccatttgaat

SEQ ID NO: 237409 - DNA, 15 bp, Homo sapiens
attagaccatttgaa

SEQ ID NO: 237410 - DNA, 15 bp, Homo sapiens
tattagaccatttga

SEQ ID NO: 237411 - DNA, 15 bp, Homo sapiens
atattagaccatttg

SEQ ID NO: 237412 - DNA, 15 bp, Homo sapiens
catattagaccattt

SEQ ID NO: 237413 - DNA, 15 bp, Homo sapiens
tcatattagaccatt

SEQ ID NO: 237414 - DNA, 15 bp, Homo sapiens
ttcatattagaccat

SEQ ID NO: 237415 - DNA, 15 bp, Homo sapiens
tttcatattagacca

SEQ ID NO: 237416 - DNA, 15 bp, Homo sapiens
ttttcatattagacc

SEQ ID NO: 237417 - DNA, 15 bp, Homo sapiens
tttttcatattagac

SEQ ID NO: 237418 - DNA, 15 bp, Homo sapiens
gtttttcatattaga

SEQ ID NO: 237419 - DNA, 15 bp, Homo sapiens
cgtttttcatattag

SEQ ID NO: 237420 - DNA, 15 bp, Homo sapiens
gcgtttttcatatta

SEQ ID NO: 237421 - DNA, 15 bp, Homo sapiens
ggcgtttttcatatt

SEQ ID NO: 237422 - DNA, 15 bp, Homo sapiens
tggcgtttttcatat

SEQ ID NO: 237423 - DNA, 15 bp, Homo sapiens
ttggcgtttttcata

SEQ ID NO: 237424 - DNA, 15 bp, Homo sapiens
gttggcgtttttcat

SEQ ID NO: 237425 - DNA, 15 bp, Homo sapiens
ggttggcgtttttca

SEQ ID NO: 237426 - DNA, 15 bp, Homo sapiens
aggttggcgtttttc

SEQ ID NO: 237427 - DNA, 15 bp, Homo sapiens
aaggttggcgttttt

SEQ ID NO: 237428 - DNA, 15 bp, Homo sapiens
caaggttggcgtttt

SEQ ID NO: 237429 - DNA, 15 bp, Homo sapiens
gcaaggttggcgttt

SEQ ID NO: 237430 - DNA, 15 bp, Homo sapiens
agcaaggttggcgtt

SEQ ID NO: 237431 - DNA, 15 bp, Homo sapiens
aagcaaggttggcgt

SEQ ID NO: 237432 - DNA, 15 bp, Homo sapiens
caagcaaggttggcg

SEQ ID NO: 237433 - DNA, 15 bp, Homo sapiens
tcaagcaaggttggc

SEQ ID NO: 237434 - DNA, 15 bp, Homo sapiens
ttcaagcaaggttgg

SEQ ID NO: 237435 - DNA, 15 bp, Homo sapiens
tttcaagcaaggttg

SEQ ID NO: 237436 - DNA, 15 bp, Homo sapiens
ctttcaagcaaggtt

SEQ ID NO: 237437 - DNA, 15 bp, Homo sapiens
tctttcaagcaaggt

SEQ ID NO: 237438 - DNA, 15 bp, Homo sapiens
ttctttcaagcaagg

SEQ ID NO: 237439 - DNA, 15 bp, Homo sapiens
attctttcaagcaag

SEQ ID NO: 237440 - DNA, 15 bp, Homo sapiens
tattctttcaagcaa

SEQ ID NO: 237441 - DNA, 15 bp, Homo sapiens
ttattctttcaagca

SEQ ID NO: 237442 - DNA, 15 bp, Homo sapiens
cttattctttcaagc

SEQ ID NO: 237443 - DNA, 15 bp, Homo sapiens
tcttattctttcaag

SEQ ID NO: 237444 - DNA, 15 bp, Homo sapiens
ttcttattctttcaa

SEQ ID NO: 237445 - DNA, 15 bp, Homo sapiens
tttcttattctttca

SEQ ID NO: 237446 - DNA, 15 bp, Homo sapiens
ctttcttattctttc

SEQ ID NO: 237447 - DNA, 15 bp, Homo sapiens
tctttcttattcttt

SEQ ID NO: 237448 - DNA, 15 bp, Homo sapiens
ctctttcttattctt

SEQ ID NO: 237449 - DNA, 15 bp, Homo sapiens
cctctttcttattct

SEQ ID NO: 237450 - DNA, 15 bp, Homo sapiens
acctctttcttattc

SEQ ID NO: 237451 - DNA, 15 bp, Homo sapiens
cacctctttcttatt

SEQ ID NO: 237452 - DNA, 15 bp, Homo sapiens
gcacctctttcttat

SEQ ID NO: 237453 - DNA, 15 bp, Homo sapiens
cgcacctctttctta

SEQ ID NO: 237454 - DNA, 15 bp, Homo sapiens
ccgcacctctttctt

SEQ ID NO: 237455 - DNA, 15 bp, Homo sapiens
accgcacctctttct

SEQ ID NO: 237456 - DNA, 15 bp, Homo sapiens
aaccgcacctctttc

SEQ ID NO: 237457 - DNA, 15 bp, Homo sapiens
aaaccgcacctcttt

SEQ ID NO: 237458 - DNA, 15 bp, Homo sapiens
gaaaccgcacctctt

SEQ ID NO: 237459 - DNA, 15 bp, Homo sapiens
cgaaaccgcacctct

SEQ ID NO: 237460 - DNA, 15 bp, Homo sapiens
acgaaaccgcacctc

SEQ ID NO: 237461 - DNA, 15 bp, Homo sapiens
aacgaaaccgcacct

SEQ ID NO: 237462 - DNA, 15 bp, Homo sapiens
caacgaaaccgcacc

SEQ ID NO: 237463 - DNA, 15 bp, Homo sapiens
ccaacgaaaccgcac

SEQ ID NO: 237464 - DNA, 15 bp, Homo sapiens
cccaacgaaaccgca

SEQ ID NO: 237465 - DNA, 15 bp, Homo sapiens
gcccaacgaaaccgc

SEQ ID NO: 237466 - DNA, 15 bp, Homo sapiens
ggcccaacgaaaccg

SEQ ID NO: 237467 - DNA, 15 bp, Homo sapiens
cggcccaacgaaacc

SEQ ID NO: 237468 - DNA, 15 bp, Homo sapiens
acggcccaacgaaac

SEQ ID NO: 237469 - DNA, 15 bp, Homo sapiens
aacggcccaacgaaa

SEQ ID NO: 237470 - DNA, 15 bp, Homo sapiens
caacggcccaacgaa

SEQ ID NO: 237471 - DNA, 15 bp, Homo sapiens
tcaacggcccaacga

SEQ ID NO: 237472 - DNA, 15 bp, Homo sapiens
atcaacggcccaacg

SEQ ID NO: 237473 - DNA, 15 bp, Homo sapiens
catcaacggcccaac

SEQ ID NO: 237474 - DNA, 15 bp, Homo sapiens
acatcaacggcccaa

SEQ ID NO: 237475 - DNA, 15 bp, Homo sapiens
aacatcaacggccca

SEQ ID NO: 237476 - DNA, 15 bp, Homo sapiens
aaacatcaacggccc

SEQ ID NO: 237477 - DNA, 15 bp, Homo sapiens
caaacatcaacggcc

SEQ ID NO: 237478 - DNA, 15 bp, Homo sapiens
ccaaacatcaacggc

SEQ ID NO: 237479 - DNA, 15 bp, Homo sapiens
tccaaacatcaacgg

SEQ ID NO: 237480 - DNA, 15 bp, Homo sapiens
ttccaaacatcaacg

SEQ ID NO: 237481 - DNA, 15 bp, Homo sapiens
gttccaaacatcaac

SEQ ID NO: 237482 - DNA, 15 bp, Homo sapiens
tgttccaaacatcaa

SEQ ID NO: 237483 - DNA, 15 bp, Homo sapiens
ctgttccaaacatca

SEQ ID NO: 237484 - DNA, 15 bp, Homo sapiens
cctgttccaaacatc

SEQ ID NO: 237485 - DNA, 15 bp, Homo sapiens
tcctgttccaaacat

SEQ ID NO: 237486 - DNA, 15 bp, Homo sapiens
gtcctgttccaaaca

SEQ ID NO: 237487 - DNA, 15 bp, Homo sapiens
agtcctgttccaaac

SEQ ID NO: 237488 - DNA, 15 bp, Homo sapiens
cagtcctgttccaaa

SEQ ID NO: 237489 - DNA, 15 bp, Homo sapiens
ccagtcctgttccaa

SEQ ID NO: 237490 - DNA, 15 bp, Homo sapiens
accagtcctgttcca

SEQ ID NO: 237491 - DNA, 15 bp, Homo sapiens
aaccagtcctgttcc

SEQ ID NO: 237492 - DNA, 15 bp, Homo sapiens
aaaccagtcctgttc

SEQ ID NO: 237493 - DNA, 15 bp, Homo sapiens
aaaaccagtcctgtt

SEQ ID NO: 237494 - DNA, 15 bp, Homo sapiens
caaaaccagtcctgt

SEQ ID NO: 237495 - DNA, 15 bp, Homo sapiens
acaaaaccagtcctg

SEQ ID NO: 237496 - DNA, 15 bp, Homo sapiens
gacaaaaccagtcct

SEQ ID NO: 237497 - DNA, 15 bp, Homo sapiens
ggacaaaaccagtcc

SEQ ID NO: 237498 - DNA, 15 bp, Homo sapiens
gggacaaaaccagtc

SEQ ID NO: 237499 - DNA, 15 bp, Homo sapiens
ggggacaaaaccagt

SEQ ID NO: 237500 - DNA, 15 bp, Homo sapiens
aggggacaaaaccag

SEQ ID NO: 237501 - DNA, 15 bp, Homo sapiens
aaggggacaaaacca

SEQ ID NO: 237502 - DNA, 15 bp, Homo sapiens
caaggggacaaaacc

SEQ ID NO: 237503 - DNA, 15 bp, Homo sapiens
gcaaggggacaaaac

SEQ ID NO: 237504 - DNA, 15 bp, Homo sapiens
agcaaggggacaaaa

SEQ ID NO: 237505 - DNA, 15 bp, Homo sapiens
gagcaaggggacaaa

SEQ ID NO: 237506 - DNA, 15 bp, Homo sapiens
cgagcaaggggacaa

SEQ ID NO: 237507 - DNA, 15 bp, Homo sapiens
ccgagcaaggggaca

SEQ ID NO: 237508 - DNA, 15 bp, Homo sapiens
tccgagcaaggggac

SEQ ID NO: 237509 - DNA, 15 bp, Homo sapiens
ttccgagcaagggga

SEQ ID NO: 237510 - DNA, 15 bp, Homo sapiens
tttccgagcaagggg

SEQ ID NO: 237511 - DNA, 15 bp, Homo sapiens
ctttccgagcaaggg

SEQ ID NO: 237512 - DNA, 15 bp, Homo sapiens
cctttccgagcaagg

SEQ ID NO: 237513 - DNA, 15 bp, Homo sapiens
ccctttccgagcaag

SEQ ID NO: 237514 - DNA, 15 bp, Homo sapiens
gccctttccgagcaa

SEQ ID NO: 237515 - DNA, 15 bp, Homo sapiens
tgccctttccgagca

SEQ ID NO: 237516 - DNA, 15 bp, Homo sapiens
ctgccctttccgagc

SEQ ID NO: 237517 - DNA, 15 bp, Homo sapiens
gctgccctttccgag

SEQ ID NO: 237518 - DNA, 15 bp, Homo sapiens
tgctgccctttccga

SEQ ID NO: 237519 - DNA, 15 bp, Homo sapiens
ttgctgccctttccg

SEQ ID NO: 237520 - DNA, 15 bp, Homo sapiens
gttgctgccctttcc

SEQ ID NO: 237521 - DNA, 15 bp, Homo sapiens
agttgctgccctttc

SEQ ID NO: 237522 - DNA, 15 bp, Homo sapiens
cagttgctgcccttt

SEQ ID NO: 237523 - DNA, 15 bp, Homo sapiens
acagttgctgccctt

SEQ ID NO: 237524 - DNA, 15 bp, Homo sapiens
cacagttgctgccct

SEQ ID NO: 237525 - DNA, 15 bp, Homo sapiens
tcacagttgctgccc

SEQ ID NO: 237526 - DNA, 15 bp, Homo sapiens
ctcacagttgctgcc

SEQ ID NO: 237527 - DNA, 15 bp, Homo sapiens
cctcacagttgctgc

SEQ ID NO: 237528 - DNA, 15 bp, Homo sapiens
tcctcacagttgctg

SEQ ID NO: 237529 - DNA, 15 bp, Homo sapiens
gtcctcacagttgct

SEQ ID NO: 237530 - DNA, 15 bp, Homo sapiens
tgtcctcacagttgc

SEQ ID NO: 237531 - DNA, 15 bp, Homo sapiens
ctgtcctcacagttg

SEQ ID NO: 237532 - DNA, 15 bp, Homo sapiens
gctgtcctcacagtt

SEQ ID NO: 237533 - DNA, 15 bp, Homo sapiens
agctgtcctcacagt

SEQ ID NO: 237534 - DNA, 15 bp, Homo sapiens
gagctgtcctcacag

SEQ ID NO: 237535 - DNA, 15 bp, Homo sapiens
ggagctgtcctcaca

SEQ ID NO: 237536 - DNA, 15 bp, Homo sapiens
gggagctgtcctcac

SEQ ID NO: 237537 - DNA, 15 bp, Homo sapiens
agggagctgtcctca

SEQ ID NO: 237538 - DNA, 15 bp, Homo sapiens
cagggagctgtcctc

SEQ ID NO: 237539 - DNA, 15 bp, Homo sapiens
tcagggagctgtcct

SEQ ID NO: 237540 - DNA, 15 bp, Homo sapiens
gtcagggagctgtcc

SEQ ID NO: 237541 - DNA, 15 bp, Homo sapiens
cgtcagggagctgtc

SEQ ID NO: 237542 - DNA, 15 bp, Homo sapiens
acgtcagggagctgt

SEQ ID NO: 237543 - DNA, 15 bp, Homo sapiens
cacgtcagggagctg

SEQ ID NO: 237544 - DNA, 15 bp, Homo sapiens
gcacgtcagggagct

SEQ ID NO: 237545 - DNA, 15 bp, Homo sapiens
agcacgtcagggagc

SEQ ID NO: 237546 - DNA, 15 bp, Homo sapiens
gagcacgtcagggag

SEQ ID NO: 237547 - DNA, 15 bp, Homo sapiens
agagcacgtcaggga

SEQ ID NO: 237548 - DNA, 15 bp, Homo sapiens
gagagcacgtcaggg

SEQ ID NO: 237549 - DNA, 15 bp, Homo sapiens
tgagagcacgtcagg

SEQ ID NO: 237550 - DNA, 15 bp, Homo sapiens
gtgagagcacgtcag

SEQ ID NO: 237551 - DNA, 15 bp, Homo sapiens
agtgagagcacgtca

SEQ ID NO: 237552 - DNA, 15 bp, Homo sapiens
gagtgagagcacgtc

SEQ ID NO: 237553 - DNA, 15 bp, Homo sapiens
tgagtgagagcacgt

SEQ ID NO: 237554 - DNA, 15 bp, Homo sapiens
ctgagtgagagcacg

SEQ ID NO: 237555 - DNA, 15 bp, Homo sapiens
gctgagtgagagcac

SEQ ID NO: 237556 - DNA, 15 bp, Homo sapiens
tgctgagtgagagca

SEQ ID NO: 237557 - DNA, 15 bp, Homo sapiens
gtgctgagtgagagc

SEQ ID NO: 237558 - DNA, 15 bp, Homo sapiens
agtgctgagtgagag

SEQ ID NO: 237559 - DNA, 15 bp, Homo sapiens
cagtgctgagtgaga

SEQ ID NO: 237560 - DNA, 15 bp, Homo sapiens
acagtgctgagtgag

SEQ ID NO: 237561 - DNA, 15 bp, Homo sapiens
aacagtgctgagtga

SEQ ID NO: 237562 - DNA, 15 bp, Homo sapiens
gaacagtgctgagtg

SEQ ID NO: 237563 - DNA, 15 bp, Homo sapiens
ggaacagtgctgagt

SEQ ID NO: 237564 - DNA, 15 bp, Homo sapiens
cggaacagtgctgag

SEQ ID NO: 237565 - DNA, 15 bp, Homo sapiens
acggaacagtgctga

SEQ ID NO: 237566 - DNA, 15 bp, Homo sapiens
aacggaacagtgctg

SEQ ID NO: 237567 - DNA, 15 bp, Homo sapiens
gaacggaacagtgct

SEQ ID NO: 237568 - DNA, 15 bp, Homo sapiens
ggaacggaacagtgc

SEQ ID NO: 237569 - DNA, 15 bp, Homo sapiens
aggaacggaacagtg

SEQ ID NO: 237570 - DNA, 15 bp, Homo sapiens
caggaacggaacagt

SEQ ID NO: 237571 - DNA, 15 bp, Homo sapiens
tcaggaacggaacag

SEQ ID NO: 237572 - DNA, 15 bp, Homo sapiens
ctcaggaacggaaca

SEQ ID NO: 237573 - DNA, 15 bp, Homo sapiens
gctcaggaacggaac

SEQ ID NO: 237574 - DNA, 15 bp, Homo sapiens
tgctcaggaacggaa

SEQ ID NO: 237575 - DNA, 15 bp, Homo sapiens
gtgctcaggaacgga

SEQ ID NO: 237576 - DNA, 15 bp, Homo sapiens
agtgctcaggaacgg

SEQ ID NO: 237577 - DNA, 15 bp, Homo sapiens
cagtgctcaggaacg

SEQ ID NO: 237578 - DNA, 15 bp, Homo sapiens
acagtgctcaggaac

SEQ ID NO: 237579 - DNA, 15 bp, Homo sapiens
gacagtgctcaggaa

SEQ ID NO: 237580 - DNA, 15 bp, Homo sapiens
ggacagtgctcagga

SEQ ID NO: 237581 - DNA, 15 bp, Homo sapiens
gggacagtgctcagg

SEQ ID NO: 237582 - DNA, 15 bp, Homo sapiens
ggggacagtgctcag

SEQ ID NO: 237583 - DNA, 15 bp, Homo sapiens
tggggacagtgctca

SEQ ID NO: 237584 - DNA, 15 bp, Homo sapiens
gtggggacagtgctc

SEQ ID NO: 237585 - DNA, 15 bp, Homo sapiens
agtggggacagtgct

SEQ ID NO: 237586 - DNA, 15 bp, Homo sapiens
tagtggggacagtgc

SEQ ID NO: 237587 - DNA, 15 bp, Homo sapiens
ctagtggggacagtg

SEQ ID NO: 237588 - DNA, 15 bp, Homo sapiens
gctagtggggacagt

SEQ ID NO: 237589 - DNA, 15 bp, Homo sapiens
agctagtggggacag

SEQ ID NO: 237590 - DNA, 15 bp, Homo sapiens
tagctagtggggaca

SEQ ID NO: 237591 - DNA, 15 bp, Homo sapiens
ctagctagtggggac

SEQ ID NO: 237592 - DNA, 15 bp, Homo sapiens
cctagctagtgggga

SEQ ID NO: 237593 - DNA, 15 bp, Homo sapiens
gcctagctagtgggg

SEQ ID NO: 237594 - DNA, 15 bp, Homo sapiens
ggcctagctagtggg

SEQ ID NO: 237595 - DNA, 15 bp, Homo sapiens
tggcctagctagtgg

SEQ ID NO: 237596 - DNA, 15 bp, Homo sapiens
ttggcctagctagtg

SEQ ID NO: 237597 - DNA, 15 bp, Homo sapiens
cttggcctagctagt

SEQ ID NO: 237598 - DNA, 15 bp, Homo sapiens
ccttggcctagctag

SEQ ID NO: 237599 - DNA, 15 bp, Homo sapiens
cccttggcctagcta

SEQ ID NO: 237600 - DNA, 15 bp, Homo sapiens
tcccttggcctagct

SEQ ID NO: 237601 - DNA, 15 bp, Homo sapiens
ctcccttggcctagc

SEQ ID NO: 237602 - DNA, 15 bp, Homo sapiens
gctcccttggcctag

SEQ ID NO: 237603 - DNA, 15 bp, Homo sapiens
agctcccttggccta

SEQ ID NO: 237604 - DNA, 15 bp, Homo sapiens
gagctcccttggcct

SEQ ID NO: 237605 - DNA, 15 bp, Homo sapiens
tgagctcccttggcc

SEQ ID NO: 237606 - DNA, 15 bp, Homo sapiens
atgagctcccttggc

SEQ ID NO: 237607 - DNA, 15 bp, Homo sapiens
aatgagctcccttgg

SEQ ID NO: 237608 - DNA, 15 bp, Homo sapiens
aaatgagctcccttg

SEQ ID NO: 237609 - DNA, 15 bp, Homo sapiens
caaatgagctccctt

SEQ ID NO: 237610 - DNA, 15 bp, Homo sapiens
ccaaatgagctccct

SEQ ID NO: 237611 - DNA, 15 bp, Homo sapiens
gccaaatgagctccc

SEQ ID NO: 237612 - DNA, 15 bp, Homo sapiens
tgccaaatgagctcc

SEQ ID NO: 237613 - DNA, 15 bp, Homo sapiens
ctgccaaatgagctc

SEQ ID NO: 237614 - DNA, 15 bp, Homo sapiens
cctgccaaatgagct

SEQ ID NO: 237615 - DNA, 15 bp, Homo sapiens
gcctgccaaatgagc

SEQ ID NO: 237616 - DNA, 15 bp, Homo sapiens
tgcctgccaaatgag

SEQ ID NO: 237617 - DNA, 15 bp, Homo sapiens
ttgcctgccaaatga

SEQ ID NO: 237618 - DNA, 15 bp, Homo sapiens
gttgcctgccaaatg

SEQ ID NO: 237619 - DNA, 15 bp, Homo sapiens
agttgcctgccaaat

SEQ ID NO: 237620 - DNA, 15 bp, Homo sapiens
cagttgcctgccaaa

SEQ ID NO: 237621 - DNA, 15 bp, Homo sapiens
gcagttgcctgccaa

SEQ ID NO: 237622 - DNA, 15 bp, Homo sapiens
agcagttgcctgcca

SEQ ID NO: 237623 - DNA, 15 bp, Homo sapiens
cagcagttgcctgcc

SEQ ID NO: 237624 - DNA, 15 bp, Homo sapiens
acagcagttgcctgc

SEQ ID NO: 237625 - DNA, 15 bp, Homo sapiens
gacagcagttgcctg

SEQ ID NO: 237626 - DNA, 15 bp, Homo sapiens
agacagcagttgcct

SEQ ID NO: 237627 - DNA, 15 bp, Homo sapiens
cagacagcagttgcc

SEQ ID NO: 237628 - DNA, 15 bp, Homo sapiens
ccagacagcagttgc

SEQ ID NO: 237629 - DNA, 15 bp, Homo sapiens
gccagacagcagttg

SEQ ID NO: 237630 - DNA, 15 bp, Homo sapiens
agccagacagcagtt

SEQ ID NO: 237631 - DNA, 15 bp, Homo sapiens
cagccagacagcagt

SEQ ID NO: 237632 - DNA, 15 bp, Homo sapiens
gcagccagacagcag

SEQ ID NO: 237633 - DNA, 15 bp, Homo sapiens
cgcagccagacagca

SEQ ID NO: 237634 - DNA, 15 bp, Homo sapiens
gcgcagccagacagc

SEQ ID NO: 237635 - DNA, 15 bp, Homo sapiens
ggcgcagccagacag

SEQ ID NO: 237636 - DNA, 15 bp, Homo sapiens
aggcgcagccagaca

SEQ ID NO: 237637 - DNA, 15 bp, Homo sapiens
caggcgcagccagac

SEQ ID NO: 237638 - DNA, 15 bp, Homo sapiens
acaggcgcagccaga

SEQ ID NO: 237639 - DNA, 15 bp, Homo sapiens
cacaggcgcagccag

SEQ ID NO: 237640 - DNA, 15 bp, Homo sapiens
ccacaggcgcagcca

SEQ ID NO: 237641 - DNA, 15 bp, Homo sapiens
gccacaggcgcagcc

SEQ ID NO: 237642 - DNA, 15 bp, Homo sapiens
tgccacaggcgcagc

SEQ ID NO: 237643 - DNA, 15 bp, Homo sapiens
ctgccacaggcgcag

SEQ ID NO: 237644 - DNA, 15 bp, Homo sapiens
actgccacaggcgca

SEQ ID NO: 237645 - DNA, 15 bp, Homo sapiens
tactgccacaggcgc

SEQ ID NO: 237646 - DNA, 15 bp, Homo sapiens
ttactgccacaggcg

SEQ ID NO: 237647 - DNA, 15 bp, Homo sapiens
tttactgccacaggc

SEQ ID NO: 237648 - DNA, 15 bp, Homo sapiens
ttttactgccacagg

SEQ ID NO: 237649 - DNA, 15 bp, Homo sapiens
attttactgccacag

SEQ ID NO: 237650 - DNA, 15 bp, Homo sapiens
gattttactgccaca

SEQ ID NO: 237651 - DNA, 15 bp, Homo sapiens
agattttactgccac

SEQ ID NO: 237652 - DNA, 15 bp, Homo sapiens
cagattttactgcca

SEQ ID NO: 237653 - DNA, 15 bp, Homo sapiens
gcagattttactgcc

SEQ ID NO: 237654 - DNA, 15 bp, Homo sapiens
ggcagattttactgc

SEQ ID NO: 237655 - DNA, 15 bp, Homo sapiens
aggcagattttactg

SEQ ID NO: 237656 - DNA, 15 bp, Homo sapiens
aaggcagattttact

SEQ ID NO: 237657 - DNA, 15 bp, Homo sapiens
aaaggcagattttac

SEQ ID NO: 237658 - DNA, 15 bp, Homo sapiens
taaaggcagatttta

SEQ ID NO: 237659 - DNA, 15 bp, Homo sapiens
ataaaggcagatttt

SEQ ID NO: 237660 - DNA, 15 bp, Homo sapiens
aataaaggcagattt

SEQ ID NO: 237661 - DNA, 15 bp, Homo sapiens
aaataaaggcagatt

SEQ ID NO: 237662 - DNA, 15 bp, Homo sapiens
aaaataaaggcagat

SEQ ID NO: 237663 - DNA, 15 bp, Homo sapiens
aaaaataaaggcaga

SEQ ID NO: 237664 - DNA, 15 bp, Homo sapiens
aaaaaataaaggcag

SEQ ID NO: 237665 - DNA, 15 bp, Homo sapiens
caaaaaataaaggca

SEQ ID NO: 237666 - DNA, 15 bp, Homo sapiens
ccaaaaaataaaggc

SEQ ID NO: 237667 - DNA, 15 bp, Homo sapiens
tccaaaaaataaagg

SEQ ID NO: 237668 - DNA, 15 bp, Homo sapiens
ctccaaaaaataaag

SEQ ID NO: 237669 - DNA, 15 bp, Homo sapiens
cctccaaaaaataaa

SEQ ID NO: 237670 - DNA, 15 bp, Homo sapiens
gcctccaaaaaataa

SEQ ID NO: 237671 - DNA, 15 bp, Homo sapiens
tgcctccaaaaaata

SEQ ID NO: 237672 - DNA, 15 bp, Homo sapiens
ctgcctccaaaaaat

SEQ ID NO: 237673 - DNA, 15 bp, Homo sapiens
cctgcctccaaaaaa

SEQ ID NO: 237674 - DNA, 15 bp, Homo sapiens
ccctgcctccaaaaa

SEQ ID NO: 237675 - DNA, 15 bp, Homo sapiens
accctgcctccaaaa

SEQ ID NO: 237676 - DNA, 15 bp, Homo sapiens
gaccctgcctccaaa

SEQ ID NO: 237677 - DNA, 15 bp, Homo sapiens
agaccctgcctccaa

SEQ ID NO: 237678 - DNA, 15 bp, Homo sapiens
aagaccctgcctcca

SEQ ID NO: 237679 - DNA, 15 bp, Homo sapiens
caagaccctgcctcc

SEQ ID NO: 237680 - DNA, 15 bp, Homo sapiens
gcaagaccctgcctc

SEQ ID NO: 237681 - DNA, 15 bp, Homo sapiens
ggcaagaccctgcct

SEQ ID NO: 237682 - DNA, 15 bp, Homo sapiens
gggcaagaccctgcc

SEQ ID NO: 237683 - DNA, 15 bp, Homo sapiens
agggcaagaccctgc

SEQ ID NO: 237684 - DNA, 15 bp, Homo sapiens
cagggcaagaccctg

SEQ ID NO: 237685 - DNA, 15 bp, Homo sapiens
acagggcaagaccct

SEQ ID NO: 237686 - DNA, 15 bp, Homo sapiens
gacagggcaagaccc

SEQ ID NO: 237687 - DNA, 15 bp, Homo sapiens
cgacagggcaagacc

SEQ ID NO: 237688 - DNA, 15 bp, Homo sapiens
gcgacagggcaagac

SEQ ID NO: 237689 - DNA, 15 bp, Homo sapiens
agcgacagggcaaga

SEQ ID NO: 237690 - DNA, 15 bp, Homo sapiens
gagcgacagggcaag

SEQ ID NO: 237691 - DNA, 15 bp, Homo sapiens
tgagcgacagggcaa

SEQ ID NO: 237692 - DNA, 15 bp, Homo sapiens
ctgagcgacagggca

SEQ ID NO: 237693 - DNA, 15 bp, Homo sapiens
cctgagcgacagggc

SEQ ID NO: 237694 - DNA, 15 bp, Homo sapiens
gcctgagcgacaggg

SEQ ID NO: 237695 - DNA, 15 bp, Homo sapiens
agcctgagcgacagg

SEQ ID NO: 237696 - DNA, 15 bp, Homo sapiens
cagcctgagcgacag

SEQ ID NO: 237697 - DNA, 15 bp, Homo sapiens
tcagcctgagcgaca

SEQ ID NO: 237698 - DNA, 15 bp, Homo sapiens
ttcagcctgagcgac

SEQ ID NO: 237699 - DNA, 15 bp, Homo sapiens
cttcagcctgagcga

SEQ ID NO: 237700 - DNA, 15 bp, Homo sapiens
acttcagcctgagcg

SEQ ID NO: 237701 - DNA, 15 bp, Homo sapiens
cacttcagcctgagc

SEQ ID NO: 237702 - DNA, 15 bp, Homo sapiens
acacttcagcctgag

SEQ ID NO: 237703 - DNA, 15 bp, Homo sapiens
cacacttcagcctga

SEQ ID NO: 237704 - DNA, 15 bp, Homo sapiens
gcacacttcagcctg

SEQ ID NO: 237705 - DNA, 15 bp, Homo sapiens
tgcacacttcagcct

SEQ ID NO: 237706 - DNA, 15 bp, Homo sapiens
ctgcacacttcagcc

SEQ ID NO: 237707 - DNA, 15 bp, Homo sapiens
actgcacacttcagc

SEQ ID NO: 237708 - DNA, 15 bp, Homo sapiens
aactgcacacttcag

SEQ ID NO: 237709 - DNA, 15 bp, Homo sapiens
taactgcacacttca

SEQ ID NO: 237710 - DNA, 15 bp, Homo sapiens
ataactgcacacttc

SEQ ID NO: 237711 - DNA, 15 bp, Homo sapiens
tataactgcacactt

SEQ ID NO: 237712 - DNA, 15 bp, Homo sapiens
ctataactgcacact

SEQ ID NO: 237713 - DNA, 15 bp, Homo sapiens
gctataactgcacac

SEQ ID NO: 237714 - DNA, 15 bp, Homo sapiens
agctataactgcaca

SEQ ID NO: 237715 - DNA, 15 bp, Homo sapiens
gagctataactgcac

SEQ ID NO: 237716 - DNA, 15 bp, Homo sapiens
tgagctataactgca

SEQ ID NO: 237717 - DNA, 15 bp, Homo sapiens
gtgagctataactgc

SEQ ID NO: 237718 - DNA, 15 bp, Homo sapiens
agtgagctataactg

SEQ ID NO: 237719 - DNA, 15 bp, Homo sapiens
cagtgagctataact

SEQ ID NO: 237720 - DNA, 15 bp, Homo sapiens
gcagtgagctataac

SEQ ID NO: 237721 - DNA, 15 bp, Homo sapiens
tgcagtgagctataa

SEQ ID NO: 237722 - DNA, 15 bp, Homo sapiens
ctgcagtgagctata

SEQ ID NO: 237723 - DNA, 15 bp, Homo sapiens
gctgcagtgagctat

SEQ ID NO: 237724 - DNA, 15 bp, Homo sapiens
ggctgcagtgagcta

SEQ ID NO: 237725 - DNA, 15 bp, Homo sapiens
aggctgcagtgagct

SEQ ID NO: 237726 - DNA, 15 bp, Homo sapiens
ggaggctgcagtgag

SEQ ID NO: 237727 - DNA, 15 bp, Homo sapiens
tggaggctgcagtga

SEQ ID NO: 237728 - DNA, 15 bp, Homo sapiens
ctggaggctgcagtg

SEQ ID NO: 237729 - DNA, 15 bp, Homo sapiens
gctggaggctgcagt

SEQ ID NO: 237730 - DNA, 15 bp, Homo sapiens
agctggaggctgcag

SEQ ID NO: 237731 - DNA, 15 bp, Homo sapiens
aagctggaggctgca

SEQ ID NO: 237732 - DNA, 15 bp, Homo sapiens
gaagctggaggctgc

SEQ ID NO: 237733 - DNA, 15 bp, Homo sapiens
agaagctggaggctg

SEQ ID NO: 237734 - DNA, 15 bp, Homo sapiens
cagaagctggaggct

SEQ ID NO: 237735 - DNA, 15 bp, Homo sapiens
acagaagctggaggc

SEQ ID NO: 237736 - DNA, 15 bp, Homo sapiens
tacagaagctggagg

SEQ ID NO: 237737 - DNA, 15 bp, Homo sapiens
gtacagaagctggag

SEQ ID NO: 237738 - DNA, 15 bp, Homo sapiens
agtacagaagctgga

SEQ ID NO: 237739 - DNA, 15 bp, Homo sapiens
gagtacagaagctgg

SEQ ID NO: 237740 - DNA, 15 bp, Homo sapiens
tgagtacagaagctg

SEQ ID NO: 237741 - DNA, 15 bp, Homo sapiens
ttgagtacagaagct

SEQ ID NO: 237742 - DNA, 15 bp, Homo sapiens
gttgagtacagaagc

SEQ ID NO: 237743 - DNA, 15 bp, Homo sapiens
agttgagtacagaag

SEQ ID NO: 237744 - DNA, 15 bp, Homo sapiens
cagttgagtacagaa

SEQ ID NO: 237745 - DNA, 15 bp, Homo sapiens
tcagttgagtacaga

SEQ ID NO: 237746 - DNA, 15 bp, Homo sapiens
atcagttgagtacag

SEQ ID NO: 237747 - DNA, 15 bp, Homo sapiens
gatcagttgagtaca

SEQ ID NO: 237748 - DNA, 15 bp, Homo sapiens
ggatcagttgagtac

SEQ ID NO: 237749 - DNA, 15 bp, Homo sapiens
aggatcagttgagta

SEQ ID NO: 237750 - DNA, 15 bp, Homo sapiens
gaggatcagttgagt

SEQ ID NO: 237751 - DNA, 15 bp, Homo sapiens
ggaggatcagttgag

SEQ ID NO: 237752 - DNA, 15 bp, Homo sapiens
aggaggatcagttga

SEQ ID NO: 237753 - DNA, 15 bp, Homo sapiens
gaggaggatcagttg

SEQ ID NO: 237754 - DNA, 15 bp, Homo sapiens
agaggaggatcagtt

SEQ ID NO: 237755 - DNA, 15 bp, Homo sapiens
gagaggaggatcagt

SEQ ID NO: 237756 - DNA, 15 bp, Homo sapiens
agagaggaggatcag

SEQ ID NO: 237757 - DNA, 15 bp, Homo sapiens
gagagaggaggatca

SEQ ID NO: 237758 - DNA, 15 bp, Homo sapiens
tgagagaggaggatc

SEQ ID NO: 237759 - DNA, 15 bp, Homo sapiens
ctgagagaggaggat

SEQ ID NO: 237760 - DNA, 15 bp, Homo sapiens
gctgagagaggagga

SEQ ID NO: 237761 - DNA, 15 bp, Homo sapiens
ggctgagagaggagg

SEQ ID NO: 237762 - DNA, 15 bp, Homo sapiens
aggaggctgagagag

SEQ ID NO: 237763 - DNA, 15 bp, Homo sapiens
caggaggctgagaga

SEQ ID NO: 237764 - DNA, 15 bp, Homo sapiens
tcaggaggctgagag

SEQ ID NO: 237765 - DNA, 15 bp, Homo sapiens
ctcaggaggctgaga

SEQ ID NO: 237766 - DNA, 15 bp, Homo sapiens
agtcccagctactca

SEQ ID NO: 237767 - DNA, 15 bp, Homo sapiens
atagtcccagctact

SEQ ID NO: 237768 - DNA, 15 bp, Homo sapiens
tatagtcccagctac

SEQ ID NO: 237769 - DNA, 15 bp, Homo sapiens
gtatagtcccagcta

SEQ ID NO: 237770 - DNA, 15 bp, Homo sapiens
cgtatagtcccagct

SEQ ID NO: 237771 - DNA, 15 bp, Homo sapiens
gcgtatagtcccagc

SEQ ID NO: 237772 - DNA, 15 bp, Homo sapiens
tgcgtatagtcccag

SEQ ID NO: 237773 - DNA, 15 bp, Homo sapiens
gtgcgtatagtccca

SEQ ID NO: 237774 - DNA, 15 bp, Homo sapiens
cgtgcgtatagtccc

SEQ ID NO: 237775 - DNA, 15 bp, Homo sapiens
acgtgcgtatagtcc

SEQ ID NO: 237776 - DNA, 15 bp, Homo sapiens
cacgtgcgtatagtc

SEQ ID NO: 237777 - DNA, 15 bp, Homo sapiens
acacgtgcgtatagt

SEQ ID NO: 237778 - DNA, 15 bp, Homo sapiens
aacacgtgcgtatag

SEQ ID NO: 237779 - DNA, 15 bp, Homo sapiens
taacacgtgcgtata

SEQ ID NO: 237780 - DNA, 15 bp, Homo sapiens
gtaacacgtgcgtat

SEQ ID NO: 237781 - DNA, 15 bp, Homo sapiens
ggtaacacgtgcgta

SEQ ID NO: 237782 - DNA, 15 bp, Homo sapiens
tggtaacacgtgcgt

SEQ ID NO: 237783 - DNA, 15 bp, Homo sapiens
gtggtaacacgtgcg

SEQ ID NO: 237784 - DNA, 15 bp, Homo sapiens
agtggtaacacgtgc

SEQ ID NO: 237785 - DNA, 15 bp, Homo sapiens
gagtggtaacacgtg

SEQ ID NO: 237786 - DNA, 15 bp, Homo sapiens
ggagtggtaacacgt

SEQ ID NO: 237787 - DNA, 15 bp, Homo sapiens
gggagtggtaacacg

SEQ ID NO: 237788 - DNA, 15 bp, Homo sapiens
tgggagtggtaacac

SEQ ID NO: 237789 - DNA, 15 bp, Homo sapiens
gtgggagtggtaaca

SEQ ID NO: 237790 - DNA, 15 bp, Homo sapiens
ggtgggagtggtaac

SEQ ID NO: 237791 - DNA, 15 bp, Homo sapiens
aggtgggagtggtaa

SEQ ID NO: 237792 - DNA, 15 bp, Homo sapiens
gaggtgggagtggta

SEQ ID NO: 237793 - DNA, 15 bp, Homo sapiens
tgaggtgggagtggt

SEQ ID NO: 237794 - DNA, 15 bp, Homo sapiens
ctgaggtgggagtgg

SEQ ID NO: 237795 - DNA, 15 bp, Homo sapiens
actgaggtgggagtg

SEQ ID NO: 237796 - DNA, 15 bp, Homo sapiens
aactgaggtgggagt

SEQ ID NO: 237797 - DNA, 15 bp, Homo sapiens
aaactgaggtgggag

SEQ ID NO: 237798 - DNA, 15 bp, Homo sapiens
caaactgaggtggga

SEQ ID NO: 237799 - DNA, 15 bp, Homo sapiens
acaaactgaggtggg

SEQ ID NO: 237800 - DNA, 15 bp, Homo sapiens
aacaaactgaggtgg

SEQ ID NO: 237801 - DNA, 15 bp, Homo sapiens
aaacaaactgaggtg

SEQ ID NO: 237802 - DNA, 15 bp, Homo sapiens
caaacaaactgaggt

SEQ ID NO: 237803 - DNA, 15 bp, Homo sapiens
acaaacaaactgagg

SEQ ID NO: 237804 - DNA, 15 bp, Homo sapiens
aacaaacaaactgag

SEQ ID NO: 237805 - DNA, 15 bp, Homo sapiens
aaacaaacaaactga

SEQ ID NO: 237806 - DNA, 15 bp, Homo sapiens
taaacaaacaaactg

SEQ ID NO: 237807 - DNA, 15 bp, Homo sapiens
ataaacaaacaaact

SEQ ID NO: 237808 - DNA, 15 bp, Homo sapiens
aataaacaaacaaac

SEQ ID NO: 237809 - DNA, 15 bp, Homo sapiens
taaataaacaaacaa

SEQ ID NO: 237810 - DNA, 15 bp, Homo sapiens
ataaataaacaaaca

SEQ ID NO: 237811 - DNA, 15 bp, Homo sapiens
aataaataaacaaac

SEQ ID NO: 237812 - DNA, 15 bp, Homo sapiens
aaataaataaacaaa

SEQ ID NO: 237813 - DNA, 15 bp, Homo sapiens
taaataaataaacaa

SEQ ID NO: 237814 - DNA, 15 bp, Homo sapiens
ataaataaataaaca

SEQ ID NO: 237815 - DNA, 15 bp, Homo sapiens
aataaataaataaac

SEQ ID NO: 237816 - DNA, 15 bp, Homo sapiens
aaataaataaataaa

SEQ ID NO: 237817 - DNA, 15 bp, Homo sapiens
taaataaataaataa

SEQ ID NO: 237818 - DNA, 15 bp, Homo sapiens
ataaataaataaata

SEQ ID NO: 237819 - DNA, 15 bp, Homo sapiens
aataaataaataaat

SEQ ID NO: 237820 - DNA, 15 bp, Homo sapiens
caataaataaataaa

SEQ ID NO: 237821 - DNA, 15 bp, Homo sapiens
tcaataaataaataa

SEQ ID NO: 237822 - DNA, 15 bp, Homo sapiens
ctcaataaataaata

SEQ ID NO: 237823 - DNA, 15 bp, Homo sapiens
tctcaataaataaat

SEQ ID NO: 237824 - DNA, 15 bp, Homo sapiens
atctcaataaataaa

SEQ ID NO: 237825 - DNA, 15 bp, Homo sapiens
catctcaataaataa

SEQ ID NO: 237826 - DNA, 15 bp, Homo sapiens
ccatctcaataaata

SEQ ID NO: 237827 - DNA, 15 bp, Homo sapiens
tccatctcaataaat

SEQ ID NO: 237828 - DNA, 15 bp, Homo sapiens
ctccatctcaataaa

SEQ ID NO: 237829 - DNA, 15 bp, Homo sapiens
actccatctcaataa

SEQ ID NO: 237830 - DNA, 15 bp, Homo sapiens
aactccatctcaata

SEQ ID NO: 237831 - DNA, 15 bp, Homo sapiens
aaactccatctcaat

SEQ ID NO: 237832 - DNA, 15 bp, Homo sapiens
aaaactccatctcaa

SEQ ID NO: 237833 - DNA, 15 bp, Homo sapiens
caaaactccatctca

SEQ ID NO: 237834 - DNA, 15 bp, Homo sapiens
gcaaaactccatctc

SEQ ID NO: 237835 - DNA, 15 bp, Homo sapiens
agcaaaactccatct

SEQ ID NO: 237836 - DNA, 15 bp, Homo sapiens
gagcaaaactccatc

SEQ ID NO: 237837 - DNA, 15 bp, Homo sapiens
agagcaaaactccat

SEQ ID NO: 237838 - DNA, 15 bp, Homo sapiens
aagagcaaaactcca

SEQ ID NO: 237839 - DNA, 15 bp, Homo sapiens
caagagcaaaactcc

SEQ ID NO: 237840 - DNA, 15 bp, Homo sapiens
gcaagagcaaaactc

SEQ ID NO: 237841 - DNA, 15 bp, Homo sapiens
agcaagagcaaaact

SEQ ID NO: 237842 - DNA, 15 bp, Homo sapiens
cagcaagagcaaaac

SEQ ID NO: 237843 - DNA, 15 bp, Homo sapiens
gcagcaagagcaaaa

SEQ ID NO: 237844 - DNA, 15 bp, Homo sapiens
ggcagcaagagcaaa

SEQ ID NO: 237845 - DNA, 15 bp, Homo sapiens
gggcagcaagagcaa

SEQ ID NO: 237846 - DNA, 15 bp, Homo sapiens
tgggcagcaagagca

SEQ ID NO: 237847 - DNA, 15 bp, Homo sapiens
ctgggcagcaagagc

SEQ ID NO: 237848 - DNA, 15 bp, Homo sapiens
cctgggcagcaagag

SEQ ID NO: 237849 - DNA, 15 bp, Homo sapiens
gcctgggcagcaaga

SEQ ID NO: 237850 - DNA, 15 bp, Homo sapiens
agcctgggcagcaag

SEQ ID NO: 237851 - DNA, 15 bp, Homo sapiens
cagcctgggcagcaa

SEQ ID NO: 237852 - DNA, 15 bp, Homo sapiens
ccagcctgggcagca

SEQ ID NO: 237853 - DNA, 15 bp, Homo sapiens
tccagcctgggcagc

SEQ ID NO: 237854 - DNA, 15 bp, Homo sapiens
ctccagcctgggcag

SEQ ID NO: 237855 - DNA, 15 bp, Homo sapiens
cgccattgcactcca

SEQ ID NO: 237856 - DNA, 15 bp, Homo sapiens
gcgccattgcactcc

SEQ ID NO: 237857 - DNA, 15 bp, Homo sapiens
cgcgccattgcactc

SEQ ID NO: 237858 - DNA, 15 bp, Homo sapiens
tcgcgccattgcact

SEQ ID NO: 237859 - DNA, 15 bp, Homo sapiens
atcgcgccattgcac

SEQ ID NO: 237860 - DNA, 15 bp, Homo sapiens
gatcgcgccattgca

SEQ ID NO: 237861 - DNA, 15 bp, Homo sapiens
agatcgcgccattgc

SEQ ID NO: 237862 - DNA, 15 bp, Homo sapiens
gagatcgcgccattg

SEQ ID NO: 237863 - DNA, 15 bp, Homo sapiens
cgagatcgcgccatt

SEQ ID NO: 237864 - DNA, 15 bp, Homo sapiens
ccgagatcgcgccat

SEQ ID NO: 237865 - DNA, 15 bp, Homo sapiens
gccgagatcgcgcca

SEQ ID NO: 237866 - DNA, 15 bp, Homo sapiens
agccgagatcgcgcc

SEQ ID NO: 237867 - DNA, 15 bp, Homo sapiens
gagccgagatcgcgc

SEQ ID NO: 237868 - DNA, 15 bp, Homo sapiens
tgagccgagatcgcg

SEQ ID NO: 237869 - DNA, 15 bp, Homo sapiens
ggtgagccgagatcg

SEQ ID NO: 237870 - DNA, 15 bp, Homo sapiens
cggtgagccgagatc

SEQ ID NO: 237871 - DNA, 15 bp, Homo sapiens
gcggtgagccgagat

SEQ ID NO: 237872 - DNA, 15 bp, Homo sapiens
tgcggtgagccgaga

SEQ ID NO: 237873 - DNA, 15 bp, Homo sapiens
ttgcggtgagccgag

SEQ ID NO: 237874 - DNA, 15 bp, Homo sapiens
gttgcggtgagccga

SEQ ID NO: 237875 - DNA, 15 bp, Homo sapiens
ggttgcggtgagccg

SEQ ID NO: 237876 - DNA, 15 bp, Homo sapiens
aggttgcggtgagcc

SEQ ID NO: 237877 - DNA, 15 bp, Homo sapiens
gaggttgcggtgagc

SEQ ID NO: 237878 - DNA, 15 bp, Homo sapiens
ggaggttgcggtgag

SEQ ID NO: 237879 - DNA, 15 bp, Homo sapiens
tggaggttgcggtga

SEQ ID NO: 237880 - DNA, 15 bp, Homo sapiens
gtggaggttgcggtg

SEQ ID NO: 237881 - DNA, 15 bp, Homo sapiens
ggtggaggttgcggt

SEQ ID NO: 237882 - DNA, 15 bp, Homo sapiens
aggtggaggttgcgg

SEQ ID NO: 237883 - DNA, 15 bp, Homo sapiens
gaggtggaggttgcg

SEQ ID NO: 237884 - DNA, 15 bp, Homo sapiens
ggaggtggaggttgc

SEQ ID NO: 237885 - DNA, 15 bp, Homo sapiens
aggaggtggaggttg

SEQ ID NO: 237886 - DNA, 15 bp, Homo sapiens
caggaggtggaggtt

SEQ ID NO: 237887 - DNA, 15 bp, Homo sapiens
ccaggaggtggaggt

SEQ ID NO: 237888 - DNA, 15 bp, Homo sapiens
accaggaggtggagg

SEQ ID NO: 237889 - DNA, 15 bp, Homo sapiens
aaccaggaggtggag

SEQ ID NO: 237890 - DNA, 15 bp, Homo sapiens
gaaccaggaggtgga

SEQ ID NO: 237891 - DNA, 15 bp, Homo sapiens
tgaaccaggaggtgg

SEQ ID NO: 237892 - DNA, 15 bp, Homo sapiens
ttgaaccaggaggtg

SEQ ID NO: 237893 - DNA, 15 bp, Homo sapiens
cttgaaccaggaggt

SEQ ID NO: 237894 - DNA, 15 bp, Homo sapiens
gcttgaaccaggagg

SEQ ID NO: 237895 - DNA, 15 bp, Homo sapiens
cgcttgaaccaggag

SEQ ID NO: 237896 - DNA, 15 bp, Homo sapiens
tcgcttgaaccagga

SEQ ID NO: 237897 - DNA, 15 bp, Homo sapiens
atcgcttgaaccagg

SEQ ID NO: 237898 - DNA, 15 bp, Homo sapiens
aatcgcttgaaccag

SEQ ID NO: 237899 - DNA, 15 bp, Homo sapiens
gaatcgcttgaacca

SEQ ID NO: 237900 - DNA, 15 bp, Homo sapiens
gcatgcctgtaatcc

SEQ ID NO: 237901 - DNA, 15 bp, Homo sapiens
tgcatgcctgtaatc

SEQ ID NO: 237902 - DNA, 15 bp, Homo sapiens
gtgcatgcctgtaat

SEQ ID NO: 237903 - DNA, 15 bp, Homo sapiens
ggtgcatgcctgtaa

SEQ ID NO: 237904 - DNA, 15 bp, Homo sapiens
tggtgcatgcctgta

SEQ ID NO: 237905 - DNA, 15 bp, Homo sapiens
gtggtgcatgcctgt

SEQ ID NO: 237906 - DNA, 15 bp, Homo sapiens
ggtggtgcatgcctg

SEQ ID NO: 237907 - DNA, 15 bp, Homo sapiens
tggtggtgcatgcct

SEQ ID NO: 237908 - DNA, 15 bp, Homo sapiens
gtggtggtgcatgcc

SEQ ID NO: 237909 - DNA, 15 bp, Homo sapiens
cgtggtggtgcatgc

SEQ ID NO: 237910 - DNA, 15 bp, Homo sapiens
gcgtggtggtgcatg

SEQ ID NO: 237911 - DNA, 15 bp, Homo sapiens
ggcgtggtggtgcat

SEQ ID NO: 237912 - DNA, 15 bp, Homo sapiens
gggcgtggtggtgca

SEQ ID NO: 237913 - DNA, 15 bp, Homo sapiens
cgggcgtggtggtgc

SEQ ID NO: 237914 - DNA, 15 bp, Homo sapiens
caaaattagccgggc

SEQ ID NO: 237915 - DNA, 15 bp, Homo sapiens
gaaaaatacaaaatt

SEQ ID NO: 237916 - DNA, 15 bp, Homo sapiens
cgaaaaatacaaaat

SEQ ID NO: 237917 - DNA, 15 bp, Homo sapiens
acgaaaaatacaaaa

SEQ ID NO: 237918 - DNA, 15 bp, Homo sapiens
tacgaaaaatacaaa

SEQ ID NO: 237919 - DNA, 15 bp, Homo sapiens
ctacgaaaaatacaa

SEQ ID NO: 237920 - DNA, 15 bp, Homo sapiens
tctacgaaaaataca

SEQ ID NO: 237921 - DNA, 15 bp, Homo sapiens
ctctacgaaaaatac

SEQ ID NO: 237922 - DNA, 15 bp, Homo sapiens
tctctacgaaaaata

SEQ ID NO: 237923 - DNA, 15 bp, Homo sapiens
atctctacgaaaaat

SEQ ID NO: 237924 - DNA, 15 bp, Homo sapiens
catctctacgaaaaa

SEQ ID NO: 237925 - DNA, 15 bp, Homo sapiens
ccatctctacgaaaa

SEQ ID NO: 237926 - DNA, 15 bp, Homo sapiens
cccatctctacgaaa

SEQ ID NO: 237927 - DNA, 15 bp, Homo sapiens
ccccatctctacgaa

SEQ ID NO: 237928 - DNA, 15 bp, Homo sapiens
accccatctctacga

SEQ ID NO: 237929 - DNA, 15 bp, Homo sapiens
aaccccatctctacg

SEQ ID NO: 237930 - DNA, 15 bp, Homo sapiens
agaaaccccatctct

SEQ ID NO: 237931 - DNA, 15 bp, Homo sapiens
gagaaaccccatctc

SEQ ID NO: 237932 - DNA, 15 bp, Homo sapiens
ggagaaaccccatct

SEQ ID NO: 237933 - DNA, 15 bp, Homo sapiens
tggagaaaccccatc

SEQ ID NO: 237934 - DNA, 15 bp, Homo sapiens
gtggagaaaccccat

SEQ ID NO: 237935 - DNA, 15 bp, Homo sapiens
tgtggagaaacccca

SEQ ID NO: 237936 - DNA, 15 bp, Homo sapiens
atgtggagaaacccc

SEQ ID NO: 237937 - DNA, 15 bp, Homo sapiens
aatgtggagaaaccc

SEQ ID NO: 237938 - DNA, 15 bp, Homo sapiens
caatgtggagaaacc

SEQ ID NO: 237939 - DNA, 15 bp, Homo sapiens
ccaatgtggagaaac

SEQ ID NO: 237940 - DNA, 15 bp, Homo sapiens
accaatgtggagaaa

SEQ ID NO: 237941 - DNA, 15 bp, Homo sapiens
aaccaatgtggagaa

SEQ ID NO: 237942 - DNA, 15 bp, Homo sapiens
gaaccaatgtggaga

SEQ ID NO: 237943 - DNA, 15 bp, Homo sapiens
tgaaccaatgtggag

SEQ ID NO: 237944 - DNA, 15 bp, Homo sapiens
ctgaaccaatgtgga

SEQ ID NO: 237945 - DNA, 15 bp, Homo sapiens
cctgaaccaatgtgg

SEQ ID NO: 237946 - DNA, 15 bp, Homo sapiens
gcctgaaccaatgtg

SEQ ID NO: 237947 - DNA, 15 bp, Homo sapiens
agcctgaaccaatgt

SEQ ID NO: 237948 - DNA, 15 bp, Homo sapiens
cagcctgaaccaatg

SEQ ID NO: 237949 - DNA, 15 bp, Homo sapiens
acagcctgaaccaat

SEQ ID NO: 237950 - DNA, 15 bp, Homo sapiens
aacagcctgaaccaa

SEQ ID NO: 237951 - DNA, 15 bp, Homo sapiens
gaacagcctgaacca

SEQ ID NO: 237952 - DNA, 15 bp, Homo sapiens
agaacagcctgaacc

SEQ ID NO: 237953 - DNA, 15 bp, Homo sapiens
gagaacagcctgaac

SEQ ID NO: 237954 - DNA, 15 bp, Homo sapiens
cgagaacagcctgaa

SEQ ID NO: 237955 - DNA, 15 bp, Homo sapiens
tcgagaacagcctga

SEQ ID NO: 237956 - DNA, 15 bp, Homo sapiens
ttcgagaacagcctg

SEQ ID NO: 237957 - DNA, 15 bp, Homo sapiens
gttcgagaacagcct

SEQ ID NO: 237958 - DNA, 15 bp, Homo sapiens
agttcgagaacagcc

SEQ ID NO: 237959 - DNA, 15 bp, Homo sapiens
gagttcgagaacagc

SEQ ID NO: 237960 - DNA, 15 bp, Homo sapiens
ggagttcgagaacag

SEQ ID NO: 237961 - DNA, 15 bp, Homo sapiens
gggagttcgagaaca

SEQ ID NO: 237962 - DNA, 15 bp, Homo sapiens
tgggagttcgagaac

SEQ ID NO: 237963 - DNA, 15 bp, Homo sapiens
ttgggagttcgagaa

SEQ ID NO: 237964 - DNA, 15 bp, Homo sapiens
gttgggagttcgaga

SEQ ID NO: 237965 - DNA, 15 bp, Homo sapiens
ggttgggagttcgag

SEQ ID NO: 237966 - DNA, 15 bp, Homo sapiens
aggttgggagttcga

SEQ ID NO: 237967 - DNA, 15 bp, Homo sapiens
gaggttgggagttcg

SEQ ID NO: 237968 - DNA, 15 bp, Homo sapiens
tgaggttgggagttc

SEQ ID NO: 237969 - DNA, 15 bp, Homo sapiens
ctgaggttgggagtt

SEQ ID NO: 237970 - DNA, 15 bp, Homo sapiens
cctgaggttgggagt

SEQ ID NO: 237971 - DNA, 15 bp, Homo sapiens
acctgaggttgggag

SEQ ID NO: 237972 - DNA, 15 bp, Homo sapiens
cacctgaggttggga

SEQ ID NO: 237973 - DNA, 15 bp, Homo sapiens
tcacctgaggttggg

SEQ ID NO: 237974 - DNA, 15 bp, Homo sapiens
atcacctgaggttgg

SEQ ID NO: 237975 - DNA, 15 bp, Homo sapiens
gatcacctgaggttg

SEQ ID NO: 237976 - DNA, 15 bp, Homo sapiens
ggatcacctgaggtt

SEQ ID NO: 237977 - DNA, 15 bp, Homo sapiens
tggatcacctgaggt

SEQ ID NO: 237978 - DNA, 15 bp, Homo sapiens
gtggatcacctgagg

SEQ ID NO: 237979 - DNA, 15 bp, Homo sapiens
ggtggatcacctgag

SEQ ID NO: 237980 - DNA, 15 bp, Homo sapiens
gggtggatcacctga

SEQ ID NO: 237981 - DNA, 15 bp, Homo sapiens
cgggtggatcacctg

SEQ ID NO: 237982 - DNA, 15 bp, Homo sapiens
gcgggtggatcacct

SEQ ID NO: 237983 - DNA, 15 bp, Homo sapiens
ggcgggtggatcacc

SEQ ID NO: 237984 - DNA, 15 bp, Homo sapiens
gcctataatcccagc

SEQ ID NO: 237985 - DNA, 15 bp, Homo sapiens
cgcctataatcccag

SEQ ID NO: 237986 - DNA, 15 bp, Homo sapiens
acgcctataatccca

SEQ ID NO: 237987 - DNA, 15 bp, Homo sapiens
cacgcctataatccc

SEQ ID NO: 237988 - DNA, 15 bp, Homo sapiens
tcacgcctataatcc

SEQ ID NO: 237989 - DNA, 15 bp, Homo sapiens
ctcacgcctataatc

SEQ ID NO: 237990 - DNA, 15 bp, Homo sapiens
gctcacgcctataat

SEQ ID NO: 237991 - DNA, 15 bp, Homo sapiens
ggctcacgcctataa

SEQ ID NO: 237992 - DNA, 15 bp, Homo sapiens
gggctcacgcctata

SEQ ID NO: 237993 - DNA, 15 bp, Homo sapiens
ggggctcacgcctat

SEQ ID NO: 237994 - DNA, 15 bp, Homo sapiens
gggggctcacgccta

SEQ ID NO: 237995 - DNA, 15 bp, Homo sapiens
cgggggctcacgcct

SEQ ID NO: 237996 - DNA, 15 bp, Homo sapiens
tcgggggctcacgcc

SEQ ID NO: 237997 - DNA, 15 bp, Homo sapiens
ttcgggggctcacgc

SEQ ID NO: 237998 - DNA, 15 bp, Homo sapiens
gttcgggggctcacg

SEQ ID NO: 237999 - DNA, 15 bp, Homo sapiens
ggttcgggggctcac

SEQ ID NO: 238000 - DNA, 15 bp, Homo sapiens
gggttcgggggctca

SEQ ID NO: 238001 - DNA, 15 bp, Homo sapiens
cgggttcgggggctc

SEQ ID NO: 238002 - DNA, 15 bp, Homo sapiens
ccgggttcgggggct

SEQ ID NO: 238003 - DNA, 15 bp, Homo sapiens
gccgggttcgggggc

SEQ ID NO: 238004 - DNA, 15 bp, Homo sapiens
ggccgggttcggggg

SEQ ID NO: 238005 - DNA, 15 bp, Homo sapiens
tggccgggttcgggg

SEQ ID NO: 238006 - DNA, 15 bp, Homo sapiens
gtggccgggttcggg

SEQ ID NO: 238007 - DNA, 15 bp, Homo sapiens
agtggccgggttcgg

SEQ ID NO: 238008 - DNA, 15 bp, Homo sapiens
gagtggccgggttcg

SEQ ID NO: 238009 - DNA, 15 bp, Homo sapiens
ggagtggccgggttc

SEQ ID NO: 238010 - DNA, 15 bp, Homo sapiens
gggagtggccgggtt

SEQ ID NO: 238011 - DNA, 15 bp, Homo sapiens
tgggagtggccgggt

SEQ ID NO: 238012 - DNA, 15 bp, Homo sapiens
ctgggagtggccggg

SEQ ID NO: 238013 - DNA, 15 bp, Homo sapiens
gctgggagtggccgg

SEQ ID NO: 238014 - DNA, 15 bp, Homo sapiens
agctgggagtggccg

SEQ ID NO: 238015 - DNA, 15 bp, Homo sapiens
tagctgggagtggcc

SEQ ID NO: 238016 - DNA, 15 bp, Homo sapiens
ttagctgggagtggc

SEQ ID NO: 238017 - DNA, 15 bp, Homo sapiens
cttagctgggagtgg

SEQ ID NO: 238018 - DNA, 15 bp, Homo sapiens
acttagctgggagtg

SEQ ID NO: 238019 - DNA, 15 bp, Homo sapiens
aacttagctgggagt

SEQ ID NO: 238020 - DNA, 15 bp, Homo sapiens
aaacttagctgggag

SEQ ID NO: 238021 - DNA, 15 bp, Homo sapiens
taaacttagctggga

SEQ ID NO: 238022 - DNA, 15 bp, Homo sapiens
ttaaacttagctggg

SEQ ID NO: 238023 - DNA, 15 bp, Homo sapiens
tttaaacttagctgg

SEQ ID NO: 238024 - DNA, 15 bp, Homo sapiens
atttaaacttagctg

SEQ ID NO: 238025 - DNA, 15 bp, Homo sapiens
aatttaaacttagct

SEQ ID NO: 238026 - DNA, 15 bp, Homo sapiens
aaatttaaacttagc

SEQ ID NO: 238027 - DNA, 15 bp, Homo sapiens
aaaatttaaacttag

SEQ ID NO: 238028 - DNA, 15 bp, Homo sapiens
aaaaatttaaactta

SEQ ID NO: 238029 - DNA, 15 bp, Homo sapiens
aaaaaatttaaactt

SEQ ID NO: 238030 - DNA, 15 bp, Homo sapiens
caaaaaatttaaact

SEQ ID NO: 238031 - DNA, 15 bp, Homo sapiens
acaaaaaatttaaac

SEQ ID NO: 238032 - DNA, 15 bp, Homo sapiens
aacaaaaaatttaaa

SEQ ID NO: 238033 - DNA, 15 bp, Homo sapiens
aaacaaaaaatttaa

SEQ ID NO: 238034 - DNA, 15 bp, Homo sapiens
caaacaaaaaattta

SEQ ID NO: 238035 - DNA, 15 bp, Homo sapiens
acaaacaaaaaattt

SEQ ID NO: 238036 - DNA, 15 bp, Homo sapiens
aacaaacaaaaaatt

SEQ ID NO: 238037 - DNA, 15 bp, Homo sapiens
aaacaaacaaaaaat

SEQ ID NO: 238038 - DNA, 15 bp, Homo sapiens
caaacaaacaaaaaa

SEQ ID NO: 238039 - DNA, 15 bp, Homo sapiens
acaaacaaacaaaaa

SEQ ID NO: 238040 - DNA, 15 bp, Homo sapiens
aacaaacaaacaaaa

SEQ ID NO: 238041 - DNA, 15 bp, Homo sapiens
gaacaaacaaacaaa

SEQ ID NO: 238042 - DNA, 15 bp, Homo sapiens
cgaacaaacaaacaa

SEQ ID NO: 238043 - DNA, 15 bp, Homo sapiens
acgaacaaacaaaca

SEQ ID NO: 238044 - DNA, 15 bp, Homo sapiens
aacgaacaaacaaac

SEQ ID NO: 238045 - DNA, 15 bp, Homo sapiens
aaacgaacaaacaaa

SEQ ID NO: 238046 - DNA, 15 bp, Homo sapiens
caaacgaacaaacaa

SEQ ID NO: 238047 - DNA, 15 bp, Homo sapiens
acaaacgaacaaaca

SEQ ID NO: 238048 - DNA, 15 bp, Homo sapiens
aacaaacgaacaaac

SEQ ID NO: 238049 - DNA, 15 bp, Homo sapiens
aaacaaacgaacaaa

SEQ ID NO: 238050 - DNA, 15 bp, Homo sapiens
aaaacaaacgaacaa

SEQ ID NO: 238051 - DNA, 15 bp, Homo sapiens
aaaaacaaacgaaca

SEQ ID NO: 238052 - DNA, 15 bp, Homo sapiens
taaaaacaaacgaac

SEQ ID NO: 238053 - DNA, 15 bp, Homo sapiens
ataaaaacaaacgaa

SEQ ID NO: 238054 - DNA, 15 bp, Homo sapiens
aataaaaacaaacga

SEQ ID NO: 238055 - DNA, 15 bp, Homo sapiens
aaataaaaacaaacg

SEQ ID NO: 238056 - DNA, 15 bp, Homo sapiens
aaaataaaaacaaac

SEQ ID NO: 238057 - DNA, 15 bp, Homo sapiens
aaaaataaaaacaaa

SEQ ID NO: 238058 - DNA, 15 bp, Homo sapiens
aaaaaataaaaacaa

SEQ ID NO: 238059 - DNA, 15 bp, Homo sapiens
caaaaaataaaaaca

SEQ ID NO: 238060 - DNA, 15 bp, Homo sapiens
tcaaaaaataaaaac

SEQ ID NO: 238061 - DNA, 15 bp, Homo sapiens
ctcaaaaaataaaaa

SEQ ID NO: 238062 - DNA, 15 bp, Homo sapiens
tctcaaaaaataaaa

SEQ ID NO: 238063 - DNA, 15 bp, Homo sapiens
gtctcaaaaaataaa

SEQ ID NO: 238064 - DNA, 15 bp, Homo sapiens
tgtctcaaaaaataa

SEQ ID NO: 238065 - DNA, 15 bp, Homo sapiens
ctgtctcaaaaaata

SEQ ID NO: 238066 - DNA, 15 bp, Homo sapiens
tctgtctcaaaaaat

SEQ ID NO: 238067 - DNA, 15 bp, Homo sapiens
ggagactctgtctca

SEQ ID NO: 238068 - DNA, 15 bp, Homo sapiens
gggagactctgtctc

SEQ ID NO: 238069 - DNA, 15 bp, Homo sapiens
cgggagactctgtct

SEQ ID NO: 238070 - DNA, 15 bp, Homo sapiens
gcgggagactctgtc

SEQ ID NO: 238071 - DNA, 15 bp, Homo sapiens
ggcgggagactctgt

SEQ ID NO: 238072 - DNA, 15 bp, Homo sapiens
gggcgggagactctg

SEQ ID NO: 238073 - DNA, 15 bp, Homo sapiens
tgggcgggagactct

SEQ ID NO: 238074 - DNA, 15 bp, Homo sapiens
ctgggcgggagactc

SEQ ID NO: 238075 - DNA, 15 bp, Homo sapiens
cctgggcgggagact

SEQ ID NO: 238076 - DNA, 15 bp, Homo sapiens
gcctgggcgggagac

SEQ ID NO: 238077 - DNA, 15 bp, Homo sapiens
agcctgggcgggaga

SEQ ID NO: 238078 - DNA, 15 bp, Homo sapiens
cagcctgggcgggag

SEQ ID NO: 238079 - DNA, 15 bp, Homo sapiens
ccagcctgggcggga

SEQ ID NO: 238080 - DNA, 15 bp, Homo sapiens
tccagcctgggcggg

SEQ ID NO: 238081 - DNA, 15 bp, Homo sapiens
ctccagcctgggcgg

SEQ ID NO: 238082 - DNA, 15 bp, Homo sapiens
gctccagcctgggcg

SEQ ID NO: 238083 - DNA, 15 bp, Homo sapiens
cgctccagcctgggc

SEQ ID NO: 238084 - DNA, 15 bp, Homo sapiens
gcgctccagcctggg

SEQ ID NO: 238085 - DNA, 15 bp, Homo sapiens
tgcgctccagcctgg

SEQ ID NO: 238086 - DNA, 15 bp, Homo sapiens
ctgcgctccagcctg

SEQ ID NO: 238087 - DNA, 15 bp, Homo sapiens
tctgcgctccagcct

SEQ ID NO: 238088 - DNA, 15 bp, Homo sapiens
atctgcgctccagcc

SEQ ID NO: 238089 - DNA, 15 bp, Homo sapiens
gatctgcgctccagc

SEQ ID NO: 238090 - DNA, 15 bp, Homo sapiens
tgatctgcgctccag

SEQ ID NO: 238091 - DNA, 15 bp, Homo sapiens
gtgatctgcgctcca

SEQ ID NO: 238092 - DNA, 15 bp, Homo sapiens
agtgatctgcgctcc

SEQ ID NO: 238093 - DNA, 15 bp, Homo sapiens
cagtgatctgcgctc

SEQ ID NO: 238094 - DNA, 15 bp, Homo sapiens
gcagtgatctgcgct

SEQ ID NO: 238095 - DNA, 15 bp, Homo sapiens
tgcagtgatctgcgc

SEQ ID NO: 238096 - DNA, 15 bp, Homo sapiens
atgcagtgatctgcg

SEQ ID NO: 238097 - DNA, 15 bp, Homo sapiens
gatgcagtgatctgc

SEQ ID NO: 238098 - DNA, 15 bp, Homo sapiens
ggatgcagtgatctg

SEQ ID NO: 238099 - DNA, 15 bp, Homo sapiens
aggatgcagtgatct

SEQ ID NO: 238100 - DNA, 15 bp, Homo sapiens
aaggatgcagtgatc

SEQ ID NO: 238101 - DNA, 15 bp, Homo sapiens
caaggatgcagtgat

SEQ ID NO: 238102 - DNA, 15 bp, Homo sapiens
tcaaggatgcagtga

SEQ ID NO: 238103 - DNA, 15 bp, Homo sapiens
gtcaaggatgcagtg

SEQ ID NO: 238104 - DNA, 15 bp, Homo sapiens
ggtcaaggatgcagt

SEQ ID NO: 238105 - DNA, 15 bp, Homo sapiens
aggtcaaggatgcag

SEQ ID NO: 238106 - DNA, 15 bp, Homo sapiens
gaggtcaaggatgca

SEQ ID NO: 238107 - DNA, 15 bp, Homo sapiens
ggaggtcaaggatgc

SEQ ID NO: 238108 - DNA, 15 bp, Homo sapiens
gggaggtcaaggatg

SEQ ID NO: 238109 - DNA, 15 bp, Homo sapiens
tgggaggtcaaggat

SEQ ID NO: 238110 - DNA, 15 bp, Homo sapiens
ctgggaggtcaagga

SEQ ID NO: 238111 - DNA, 15 bp, Homo sapiens
cctgggaggtcaagg

SEQ ID NO: 238112 - DNA, 15 bp, Homo sapiens
gcctgggaggtcaag

SEQ ID NO: 238113 - DNA, 15 bp, Homo sapiens
agcctgggaggtcaa

SEQ ID NO: 238114 - DNA, 15 bp, Homo sapiens
aagcctgggaggtca

SEQ ID NO: 238115 - DNA, 15 bp, Homo sapiens
taagcctgggaggtc

SEQ ID NO: 238116 - DNA, 15 bp, Homo sapiens
ttaagcctgggaggt

SEQ ID NO: 238117 - DNA, 15 bp, Homo sapiens
cttaagcctgggagg

SEQ ID NO: 238118 - DNA, 15 bp, Homo sapiens
gcttaagcctgggag

SEQ ID NO: 238119 - DNA, 15 bp, Homo sapiens
ggcttaagcctggga

SEQ ID NO: 238120 - DNA, 15 bp, Homo sapiens
tggcttaagcctggg

SEQ ID NO: 238121 - DNA, 15 bp, Homo sapiens
atggcttaagcctgg

SEQ ID NO: 238122 - DNA, 15 bp, Homo sapiens
gatggcttaagcctg

SEQ ID NO: 238123 - DNA, 15 bp, Homo sapiens
ggatggcttaagcct

SEQ ID NO: 238124 - DNA, 15 bp, Homo sapiens
aggatggcttaagcc

SEQ ID NO: 238125 - DNA, 15 bp, Homo sapiens
gaggatggcttaagc

SEQ ID NO: 238126 - DNA, 15 bp, Homo sapiens
ggaggatggcttaag

SEQ ID NO: 238127 - DNA, 15 bp, Homo sapiens
gggaggatggcttaa

SEQ ID NO: 238128 - DNA, 15 bp, Homo sapiens
ggggaggatggctta

SEQ ID NO: 238129 - DNA, 15 bp, Homo sapiens
tggggaggatggctt

SEQ ID NO: 238130 - DNA, 15 bp, Homo sapiens
gtggggaggatggct

SEQ ID NO: 238131 - DNA, 15 bp, Homo sapiens
agtggggaggatggc

SEQ ID NO: 238132 - DNA, 15 bp, Homo sapiens
gagtggggaggatgg

SEQ ID NO: 238133 - DNA, 15 bp, Homo sapiens
tgagtggggaggatg

SEQ ID NO: 238134 - DNA, 15 bp, Homo sapiens
ctgagtggggaggat

SEQ ID NO: 238135 - DNA, 15 bp, Homo sapiens
gctgagtggggagga

SEQ ID NO: 238136 - DNA, 15 bp, Homo sapiens
ggctgagtggggagg

SEQ ID NO: 238137 - DNA, 15 bp, Homo sapiens
aggctgagtggggag

SEQ ID NO: 238138 - DNA, 15 bp, Homo sapiens
gaggctgagtgggga

SEQ ID NO: 238139 - DNA, 15 bp, Homo sapiens
ggaggctgagtgggg

SEQ ID NO: 238140 - DNA, 15 bp, Homo sapiens
gggaggctgagtggg

SEQ ID NO: 238141 - DNA, 15 bp, Homo sapiens
tgggaggctgagtgg

SEQ ID NO: 238142 - DNA, 15 bp, Homo sapiens
ttgggaggctgagtg

SEQ ID NO: 238143 - DNA, 15 bp, Homo sapiens
atcccagctacttgg

SEQ ID NO: 238144 - DNA, 15 bp, Homo sapiens
aatcccagctacttg

SEQ ID NO: 238145 - DNA, 15 bp, Homo sapiens
taatcccagctactt

SEQ ID NO: 238146 - DNA, 15 bp, Homo sapiens
acacacctgtaatcc

SEQ ID NO: 238147 - DNA, 15 bp, Homo sapiens
cacacacctgtaatc

SEQ ID NO: 238148 - DNA, 15 bp, Homo sapiens
gcacacacctgtaat

SEQ ID NO: 238149 - DNA, 15 bp, Homo sapiens
ggcacacacctgtaa

SEQ ID NO: 238150 - DNA, 15 bp, Homo sapiens
tggcacacacctgta

SEQ ID NO: 238151 - DNA, 15 bp, Homo sapiens
gtggcacacacctgt

SEQ ID NO: 238152 - DNA, 15 bp, Homo sapiens
agtggcacacacctg

SEQ ID NO: 238153 - DNA, 15 bp, Homo sapiens
tagtggcacacacct

SEQ ID NO: 238154 - DNA, 15 bp, Homo sapiens
atagtggcacacacc

SEQ ID NO: 238155 - DNA, 15 bp, Homo sapiens
catagtggcacacac

SEQ ID NO: 238156 - DNA, 15 bp, Homo sapiens
gcatagtggcacaca

SEQ ID NO: 238157 - DNA, 15 bp, Homo sapiens
agcatagtggcacac

SEQ ID NO: 238158 - DNA, 15 bp, Homo sapiens
aagcatagtggcaca

SEQ ID NO: 238159 - DNA, 15 bp, Homo sapiens
caagcatagtggcac

SEQ ID NO: 238160 - DNA, 15 bp, Homo sapiens
ccaagcatagtggca

SEQ ID NO: 238161 - DNA, 15 bp, Homo sapiens
gccaagcatagtggc

SEQ ID NO: 238162 - DNA, 15 bp, Homo sapiens
agccaagcatagtgg

SEQ ID NO: 238163 - DNA, 15 bp, Homo sapiens
tagccaagcatagtg

SEQ ID NO: 238164 - DNA, 15 bp, Homo sapiens
ttagccaagcatagt

SEQ ID NO: 238165 - DNA, 15 bp, Homo sapiens
cttagccaagcatag

SEQ ID NO: 238166 - DNA, 15 bp, Homo sapiens
acttagccaagcata

SEQ ID NO: 238167 - DNA, 15 bp, Homo sapiens
aacttagccaagcat

SEQ ID NO: 238168 - DNA, 15 bp, Homo sapiens
caacttagccaagca

SEQ ID NO: 238169 - DNA, 15 bp, Homo sapiens
acaacttagccaagc

SEQ ID NO: 238170 - DNA, 15 bp, Homo sapiens
cacaacttagccaag

SEQ ID NO: 238171 - DNA, 15 bp, Homo sapiens
acacaacttagccaa

SEQ ID NO: 238172 - DNA, 15 bp, Homo sapiens
tacacaacttagcca

SEQ ID NO: 238173 - DNA, 15 bp, Homo sapiens
atacacaacttagcc

SEQ ID NO: 238174 - DNA, 15 bp, Homo sapiens
aatacacaacttagc

SEQ ID NO: 238175 - DNA, 15 bp, Homo sapiens
aaatacacaacttag

SEQ ID NO: 238176 - DNA, 15 bp, Homo sapiens
aaaatacacaactta

SEQ ID NO: 238177 - DNA, 15 bp, Homo sapiens
aaaaatacacaactt

SEQ ID NO: 238178 - DNA, 15 bp, Homo sapiens
aaaaaatacacaact

SEQ ID NO: 238179 - DNA, 15 bp, Homo sapiens
caaaaaatacacaac

SEQ ID NO: 238180 - DNA, 15 bp, Homo sapiens
acaaaaaatacacaa

SEQ ID NO: 238181 - DNA, 15 bp, Homo sapiens
tacaaaaaatacaca

SEQ ID NO: 238182 - DNA, 15 bp, Homo sapiens
ctacaaaaaatacac

SEQ ID NO: 238183 - DNA, 15 bp, Homo sapiens
atctctacaaaaaat

SEQ ID NO: 238184 - DNA, 15 bp, Homo sapiens
catctctacaaaaaa

SEQ ID NO: 238185 - DNA, 15 bp, Homo sapiens
ccatctctacaaaaa

SEQ ID NO: 238186 - DNA, 15 bp, Homo sapiens
cccatctctacaaaa

SEQ ID NO: 238187 - DNA, 15 bp, Homo sapiens
ccccatctctacaaa

SEQ ID NO: 238188 - DNA, 15 bp, Homo sapiens
accccatctctacaa

SEQ ID NO: 238189 - DNA, 15 bp, Homo sapiens
aaccccatctctaca

SEQ ID NO: 238190 - DNA, 15 bp, Homo sapiens
gaaccccatctctac

SEQ ID NO: 238191 - DNA, 15 bp, Homo sapiens
tgaaccccatctcta

SEQ ID NO: 238192 - DNA, 15 bp, Homo sapiens
ttgaaccccatctct

SEQ ID NO: 238193 - DNA, 15 bp, Homo sapiens
cttgaaccccatctc

SEQ ID NO: 238194 - DNA, 15 bp, Homo sapiens
ccttgaaccccatct

SEQ ID NO: 238195 - DNA, 15 bp, Homo sapiens
cccttgaaccccatc

SEQ ID NO: 238196 - DNA, 15 bp, Homo sapiens
tcccttgaaccccat

SEQ ID NO: 238197 - DNA, 15 bp, Homo sapiens
atcccttgaacccca

SEQ ID NO: 238198 - DNA, 15 bp, Homo sapiens
gcgagaatcccttga

SEQ ID NO: 238199 - DNA, 15 bp, Homo sapiens
agcgagaatcccttg

SEQ ID NO: 238200 - DNA, 15 bp, Homo sapiens
aagcgagaatccctt

SEQ ID NO: 238201 - DNA, 15 bp, Homo sapiens
aaagcgagaatccct

SEQ ID NO: 238202 - DNA, 15 bp, Homo sapiens
caaagcgagaatccc

SEQ ID NO: 238203 - DNA, 15 bp, Homo sapiens
acaaagcgagaatcc

SEQ ID NO: 238204 - DNA, 15 bp, Homo sapiens
aacaaagcgagaatc

SEQ ID NO: 238205 - DNA, 15 bp, Homo sapiens
caacaaagcgagaat

SEQ ID NO: 238206 - DNA, 15 bp, Homo sapiens
gcaacaaagcgagaa

SEQ ID NO: 238207 - DNA, 15 bp, Homo sapiens
ggcaacaaagcgaga

SEQ ID NO: 238208 - DNA, 15 bp, Homo sapiens
aggcaacaaagcgag

SEQ ID NO: 238209 - DNA, 15 bp, Homo sapiens
gaggcaacaaagcga

SEQ ID NO: 238210 - DNA, 15 bp, Homo sapiens
cgaggcaacaaagcg

SEQ ID NO: 238211 - DNA, 15 bp, Homo sapiens
ccgaggcaacaaagc

SEQ ID NO: 238212 - DNA, 15 bp, Homo sapiens
accgaggcaacaaag

SEQ ID NO: 238213 - DNA, 15 bp, Homo sapiens
aaccgaggcaacaaa

SEQ ID NO: 238214 - DNA, 15 bp, Homo sapiens
caaccgaggcaacaa

SEQ ID NO: 238215 - DNA, 15 bp, Homo sapiens
ccaaccgaggcaaca

SEQ ID NO: 238216 - DNA, 15 bp, Homo sapiens
accaaccgaggcaac

SEQ ID NO: 238217 - DNA, 15 bp, Homo sapiens
gaccaaccgaggcaa

SEQ ID NO: 238218 - DNA, 15 bp, Homo sapiens
agaccaaccgaggca

SEQ ID NO: 238219 - DNA, 15 bp, Homo sapiens
gagaccaaccgaggc

SEQ ID NO: 238220 - DNA, 15 bp, Homo sapiens
tgagaccaaccgagg

SEQ ID NO: 238221 - DNA, 15 bp, Homo sapiens
ttgagaccaaccgag

SEQ ID NO: 238222 - DNA, 15 bp, Homo sapiens
tttgagaccaaccga

SEQ ID NO: 238223 - DNA, 15 bp, Homo sapiens
gtttgagaccaaccg

SEQ ID NO: 238224 - DNA, 15 bp, Homo sapiens
agtttgagaccaacc

SEQ ID NO: 238225 - DNA, 15 bp, Homo sapiens
gagtttgagaccaac

SEQ ID NO: 238226 - DNA, 15 bp, Homo sapiens
ggagtttgagaccaa

SEQ ID NO: 238227 - DNA, 15 bp, Homo sapiens
ccaggagtttgagac

SEQ ID NO: 238228 - DNA, 15 bp, Homo sapiens
cccaggagtttgaga

SEQ ID NO: 238229 - DNA, 15 bp, Homo sapiens
gcccaggagtttgag

SEQ ID NO: 238230 - DNA, 15 bp, Homo sapiens
agcccaggagtttga

SEQ ID NO: 238231 - DNA, 15 bp, Homo sapiens
gagcccaggagtttg

SEQ ID NO: 238232 - DNA, 15 bp, Homo sapiens
tgagcccaggagttt

SEQ ID NO: 238233 - DNA, 15 bp, Homo sapiens
tgcttgagcccagga

SEQ ID NO: 238234 - DNA, 15 bp, Homo sapiens
ctgcttgagcccagg

SEQ ID NO: 238235 - DNA, 15 bp, Homo sapiens
actgcttgagcccag

SEQ ID NO: 238236 - DNA, 15 bp, Homo sapiens
gactgcttgagccca

SEQ ID NO: 238237 - DNA, 15 bp, Homo sapiens
ggactgcttgagccc

SEQ ID NO: 238238 - DNA, 15 bp, Homo sapiens
aggactgcttgagcc

SEQ ID NO: 238239 - DNA, 15 bp, Homo sapiens
gaggactgcttgagc

SEQ ID NO: 238240 - DNA, 15 bp, Homo sapiens
ggaggactgcttgag

SEQ ID NO: 238241 - DNA, 15 bp, Homo sapiens
gggaggactgcttga

SEQ ID NO: 238242 - DNA, 15 bp, Homo sapiens
agggaggactgcttg

SEQ ID NO: 238243 - DNA, 15 bp, Homo sapiens
gagggaggactgctt

SEQ ID NO: 238244 - DNA, 15 bp, Homo sapiens
ggagggaggactgct

SEQ ID NO: 238245 - DNA, 15 bp, Homo sapiens
aggagggaggactgc

SEQ ID NO: 238246 - DNA, 15 bp, Homo sapiens
gaggagggaggactg

SEQ ID NO: 238247 - DNA, 15 bp, Homo sapiens
tgaggagggaggact

SEQ ID NO: 238248 - DNA, 15 bp, Homo sapiens
ctgaggagggaggac

SEQ ID NO: 238249 - DNA, 15 bp, Homo sapiens
gctgaggagggagga

SEQ ID NO: 238250 - DNA, 15 bp, Homo sapiens
ggctgaggagggagg

SEQ ID NO: 238251 - DNA, 15 bp, Homo sapiens
aggctgaggagggag

SEQ ID NO: 238252 - DNA, 15 bp, Homo sapiens
gaggctgaggaggga

SEQ ID NO: 238253 - DNA, 15 bp, Homo sapiens
ggaggctgaggaggg

SEQ ID NO: 238254 - DNA, 15 bp, Homo sapiens
gggaggctgaggagg

SEQ ID NO: 238255 - DNA, 15 bp, Homo sapiens
tgggaggctgaggag

SEQ ID NO: 238256 - DNA, 15 bp, Homo sapiens
ttgggaggctgagga

SEQ ID NO: 238257 - DNA, 15 bp, Homo sapiens
ccttgggaggctgag

SEQ ID NO: 238258 - DNA, 15 bp, Homo sapiens
accttgggaggctga

SEQ ID NO: 238259 - DNA, 15 bp, Homo sapiens
caccttgggaggctg

SEQ ID NO: 238260 - DNA, 15 bp, Homo sapiens
gcaccttgggaggct

SEQ ID NO: 238261 - DNA, 15 bp, Homo sapiens
agcaccttgggaggc

SEQ ID NO: 238262 - DNA, 15 bp, Homo sapiens
cagcaccttgggagg

SEQ ID NO: 238263 - DNA, 15 bp, Homo sapiens
ccagcaccttgggag

SEQ ID NO: 238264 - DNA, 15 bp, Homo sapiens
cccagcaccttggga

SEQ ID NO: 238265 - DNA, 15 bp, Homo sapiens
ccccagcaccttggg

SEQ ID NO: 238266 - DNA, 15 bp, Homo sapiens
tccccagcaccttgg

SEQ ID NO: 238267 - DNA, 15 bp, Homo sapiens
ttccccagcaccttg

SEQ ID NO: 238268 - DNA, 15 bp, Homo sapiens
tttccccagcacctt

SEQ ID NO: 238269 - DNA, 15 bp, Homo sapiens
atttccccagcacct

SEQ ID NO: 238270 - DNA, 15 bp, Homo sapiens
gatttccccagcacc

SEQ ID NO: 238271 - DNA, 15 bp, Homo sapiens
ggatttccccagcac

SEQ ID NO: 238272 - DNA, 15 bp, Homo sapiens
tggatttccccagca

SEQ ID NO: 238273 - DNA, 15 bp, Homo sapiens
gtggatttccccagc

SEQ ID NO: 238274 - DNA, 15 bp, Homo sapiens
agtggatttccccag

SEQ ID NO: 238275 - DNA, 15 bp, Homo sapiens
aagtggatttcccca

SEQ ID NO: 238276 - DNA, 15 bp, Homo sapiens
aaagtggatttcccc

SEQ ID NO: 238277 - DNA, 15 bp, Homo sapiens
aaaagtggatttccc

SEQ ID NO: 238278 - DNA, 15 bp, Homo sapiens
caaaagtggatttcc

SEQ ID NO: 238279 - DNA, 15 bp, Homo sapiens
tcaaaagtggatttc

SEQ ID NO: 238280 - DNA, 15 bp, Homo sapiens
ttcaaaagtggattt

SEQ ID NO: 238281 - DNA, 15 bp, Homo sapiens
tttcaaaagtggatt

SEQ ID NO: 238282 - DNA, 15 bp, Homo sapiens
gtttcaaaagtggat

SEQ ID NO: 238283 - DNA, 15 bp, Homo sapiens
tgtttcaaaagtgga

SEQ ID NO: 238284 - DNA, 15 bp, Homo sapiens
atgtttcaaaagtgg

SEQ ID NO: 238285 - DNA, 15 bp, Homo sapiens
aatgtttcaaaagtg

SEQ ID NO: 238286 - DNA, 15 bp, Homo sapiens
caatgtttcaaaagt

SEQ ID NO: 238287 - DNA, 15 bp, Homo sapiens
acaatgtttcaaaag

SEQ ID NO: 238288 - DNA, 15 bp, Homo sapiens
gacaatgtttcaaaa

SEQ ID NO: 238289 - DNA, 15 bp, Homo sapiens
agacaatgtttcaaa

SEQ ID NO: 238290 - DNA, 15 bp, Homo sapiens
cagacaatgtttcaa

SEQ ID NO: 238291 - DNA, 15 bp, Homo sapiens
ccagacaatgtttca

SEQ ID NO: 238292 - DNA, 15 bp, Homo sapiens
tccagacaatgtttc

SEQ ID NO: 238293 - DNA, 15 bp, Homo sapiens
ctccagacaatgttt

SEQ ID NO: 238294 - DNA, 15 bp, Homo sapiens
tctccagacaatgtt

SEQ ID NO: 238295 - DNA, 15 bp, Homo sapiens
ctctccagacaatgt

SEQ ID NO: 238296 - DNA, 15 bp, Homo sapiens
actctccagacaatg

SEQ ID NO: 238297 - DNA, 15 bp, Homo sapiens
aactctccagacaat

SEQ ID NO: 238298 - DNA, 15 bp, Homo sapiens
caactctccagacaa

SEQ ID NO: 238299 - DNA, 15 bp, Homo sapiens
gcaactctccagaca

SEQ ID NO: 238300 - DNA, 15 bp, Homo sapiens
ggcaactctccagac

SEQ ID NO: 238301 - DNA, 15 bp, Homo sapiens
gggcaactctccaga

SEQ ID NO: 238302 - DNA, 15 bp, Homo sapiens
tgggcaactctccag

SEQ ID NO: 238303 - DNA, 15 bp, Homo sapiens
ctgggcaactctcca

SEQ ID NO: 238304 - DNA, 15 bp, Homo sapiens
cctgggcaactctcc

SEQ ID NO: 238305 - DNA, 15 bp, Homo sapiens
acctgggcaactctc

SEQ ID NO: 238306 - DNA, 15 bp, Homo sapiens
cacctgggcaactct

SEQ ID NO: 238307 - DNA, 15 bp, Homo sapiens
ccacctgggcaactc

SEQ ID NO: 238308 - DNA, 15 bp, Homo sapiens
accacctgggcaact

SEQ ID NO: 238309 - DNA, 15 bp, Homo sapiens
taccacctgggcaac

SEQ ID NO: 238310 - DNA, 15 bp, Homo sapiens
ctaccacctgggcaa

SEQ ID NO: 238311 - DNA, 15 bp, Homo sapiens
tctaccacctgggca

SEQ ID NO: 238312 - DNA, 15 bp, Homo sapiens
atctaccacctgggc

SEQ ID NO: 238313 - DNA, 15 bp, Homo sapiens
gatctaccacctggg

SEQ ID NO: 238314 - DNA, 15 bp, Homo sapiens
tgatctaccacctgg

SEQ ID NO: 238315 - DNA, 15 bp, Homo sapiens
gtgatctaccacctg

SEQ ID NO: 238316 - DNA, 15 bp, Homo sapiens
tgtgatctaccacct

SEQ ID NO: 238317 - DNA, 15 bp, Homo sapiens
ctgtgatctaccacc

SEQ ID NO: 238318 - DNA, 15 bp, Homo sapiens
tctgtgatctaccac

SEQ ID NO: 238319 - DNA, 15 bp, Homo sapiens
ttctgtgatctacca

SEQ ID NO: 238320 - DNA, 15 bp, Homo sapiens
tttctgtgatctacc

SEQ ID NO: 238321 - DNA, 15 bp, Homo sapiens
atttctgtgatctac

SEQ ID NO: 238322 - DNA, 15 bp, Homo sapiens
tatttctgtgatcta

SEQ ID NO: 238323 - DNA, 15 bp, Homo sapiens
ctatttctgtgatct

SEQ ID NO: 238324 - DNA, 15 bp, Homo sapiens
cctatttctgtgatc

SEQ ID NO: 238325 - DNA, 15 bp, Homo sapiens
acctatttctgtgat

SEQ ID NO: 238326 - DNA, 15 bp, Homo sapiens
gacctatttctgtga

SEQ ID NO: 238327 - DNA, 15 bp, Homo sapiens
tgacctatttctgtg

SEQ ID NO: 238328 - DNA, 15 bp, Homo sapiens
atgacctatttctgt

SEQ ID NO: 238329 - DNA, 15 bp, Homo sapiens
gatgacctatttctg

SEQ ID NO: 238330 - DNA, 15 bp, Homo sapiens
cgatgacctatttct

SEQ ID NO: 238331 - DNA, 15 bp, Homo sapiens
acgatgacctatttc

SEQ ID NO: 238332 - DNA, 15 bp, Homo sapiens
cacgatgacctattt

SEQ ID NO: 238333 - DNA, 15 bp, Homo sapiens
ccacgatgacctatt

SEQ ID NO: 238334 - DNA, 15 bp, Homo sapiens
cccacgatgacctat

SEQ ID NO: 238335 - DNA, 15 bp, Homo sapiens
ccccacgatgaccta

SEQ ID NO: 238336 - DNA, 15 bp, Homo sapiens
accccacgatgacct

SEQ ID NO: 238337 - DNA, 15 bp, Homo sapiens
gaccccacgatgacc

SEQ ID NO: 238338 - DNA, 15 bp, Homo sapiens
ggaccccacgatgac

SEQ ID NO: 238339 - DNA, 15 bp, Homo sapiens
aggaccccacgatga

SEQ ID NO: 238340 - DNA, 15 bp, Homo sapiens
aaggaccccacgatg

SEQ ID NO: 238341 - DNA, 15 bp, Homo sapiens
gaaggaccccacgat

SEQ ID NO: 238342 - DNA, 15 bp, Homo sapiens
ggaaggaccccacga

SEQ ID NO: 238343 - DNA, 15 bp, Homo sapiens
gggaaggaccccacg

SEQ ID NO: 238344 - DNA, 15 bp, Homo sapiens
tgggaaggaccccac

SEQ ID NO: 238345 - DNA, 15 bp, Homo sapiens
atgggaaggacccca

SEQ ID NO: 238346 - DNA, 15 bp, Homo sapiens
catgggaaggacccc

SEQ ID NO: 238347 - DNA, 15 bp, Homo sapiens
ccatgggaaggaccc

SEQ ID NO: 238348 - DNA, 15 bp, Homo sapiens
cccatgggaaggacc

SEQ ID NO: 238349 - DNA, 15 bp, Homo sapiens
acccatgggaaggac

SEQ ID NO: 238350 - DNA, 15 bp, Homo sapiens
cacccatgggaagga

SEQ ID NO: 238351 - DNA, 15 bp, Homo sapiens
gcacccatgggaagg

SEQ ID NO: 238352 - DNA, 15 bp, Homo sapiens
tgcacccatgggaag

SEQ ID NO: 238353 - DNA, 15 bp, Homo sapiens
ctgcacccatgggaa

SEQ ID NO: 238354 - DNA, 15 bp, Homo sapiens
actgcacccatggga

SEQ ID NO: 238355 - DNA, 15 bp, Homo sapiens
gactgcacccatggg

SEQ ID NO: 238356 - DNA, 15 bp, Homo sapiens
agactgcacccatgg

SEQ ID NO: 238357 - DNA, 15 bp, Homo sapiens
aagactgcacccatg

SEQ ID NO: 238358 - DNA, 15 bp, Homo sapiens
caagactgcacccat

SEQ ID NO: 238359 - DNA, 15 bp, Homo sapiens
tcaagactgcaccca

SEQ ID NO: 238360 - DNA, 15 bp, Homo sapiens
ctcaagactgcaccc

SEQ ID NO: 238361 - DNA, 15 bp, Homo sapiens
gctcaagactgcacc

SEQ ID NO: 238362 - DNA, 15 bp, Homo sapiens
ggctcaagactgcac

SEQ ID NO: 238363 - DNA, 15 bp, Homo sapiens
tggctcaagactgca

SEQ ID NO: 238364 - DNA, 15 bp, Homo sapiens
gtggctcaagactgc

SEQ ID NO: 238365 - DNA, 15 bp, Homo sapiens
ggtggctcaagactg

SEQ ID NO: 238366 - DNA, 15 bp, Homo sapiens
aggtggctcaagact

SEQ ID NO: 238367 - DNA, 15 bp, Homo sapiens
caggtggctcaagac

SEQ ID NO: 238368 - DNA, 15 bp, Homo sapiens
acaggtggctcaaga

SEQ ID NO: 238369 - DNA, 15 bp, Homo sapiens
cacaggtggctcaag

SEQ ID NO: 238370 - DNA, 15 bp, Homo sapiens
ccacaggtggctcaa

SEQ ID NO: 238371 - DNA, 15 bp, Homo sapiens
gccacaggtggctca

SEQ ID NO: 238372 - DNA, 15 bp, Homo sapiens
ggccacaggtggctc

SEQ ID NO: 238373 - DNA, 15 bp, Homo sapiens
tggccacaggtggct

SEQ ID NO: 238374 - DNA, 15 bp, Homo sapiens
ctggccacaggtggc

SEQ ID NO: 238375 - DNA, 15 bp, Homo sapiens
gctggccacaggtgg

SEQ ID NO: 238376 - DNA, 15 bp, Homo sapiens
tgctggccacaggtg

SEQ ID NO: 238377 - DNA, 15 bp, Homo sapiens
ttgctggccacaggt

SEQ ID NO: 238378 - DNA, 15 bp, Homo sapiens
tttgctggccacagg

SEQ ID NO: 238379 - DNA, 15 bp, Homo sapiens
atttgctggccacag

SEQ ID NO: 238380 - DNA, 15 bp, Homo sapiens
tatttgctggccaca

SEQ ID NO: 238381 - DNA, 15 bp, Homo sapiens
atatttgctggccac

SEQ ID NO: 238382 - DNA, 15 bp, Homo sapiens
aatatttgctggcca

SEQ ID NO: 238383 - DNA, 15 bp, Homo sapiens
aaatatttgctggcc

SEQ ID NO: 238384 - DNA, 15 bp, Homo sapiens
caaatatttgctggc

SEQ ID NO: 238385 - DNA, 15 bp, Homo sapiens
ccaaatatttgctgg

SEQ ID NO: 238386 - DNA, 15 bp, Homo sapiens
tccaaatatttgctg

SEQ ID NO: 238387 - DNA, 15 bp, Homo sapiens
ctccaaatatttgct

SEQ ID NO: 238388 - DNA, 15 bp, Homo sapiens
tctccaaatatttgc

SEQ ID NO: 238389 - DNA, 15 bp, Homo sapiens
ttctccaaatatttg

SEQ ID NO: 238390 - DNA, 15 bp, Homo sapiens
attctccaaatattt

SEQ ID NO: 238391 - DNA, 15 bp, Homo sapiens
tattctccaaatatt

SEQ ID NO: 238392 - DNA, 15 bp, Homo sapiens
ttattctccaaatat

SEQ ID NO: 238393 - DNA, 15 bp, Homo sapiens
attattctccaaata

SEQ ID NO: 238394 - DNA, 15 bp, Homo sapiens
tattattctccaaat

SEQ ID NO: 238395 - DNA, 15 bp, Homo sapiens
ctattattctccaaa

SEQ ID NO: 238396 - DNA, 15 bp, Homo sapiens
actattattctccaa

SEQ ID NO: 238397 - DNA, 15 bp, Homo sapiens
gactattattctcca

SEQ ID NO: 238398 - DNA, 15 bp, Homo sapiens
tgactattattctcc

SEQ ID NO: 238399 - DNA, 15 bp, Homo sapiens
ctgactattattctc

SEQ ID NO: 238400 - DNA, 15 bp, Homo sapiens
cctgactattattct

SEQ ID NO: 238401 - DNA, 15 bp, Homo sapiens
ccctgactattattc

SEQ ID NO: 238402 - DNA, 15 bp, Homo sapiens
cccctgactattatt

SEQ ID NO: 238403 - DNA, 15 bp, Homo sapiens
tcccctgactattat

SEQ ID NO: 238404 - DNA, 15 bp, Homo sapiens
ctcccctgactatta

SEQ ID NO: 238405 - DNA, 15 bp, Homo sapiens
tctcccctgactatt

SEQ ID NO: 238406 - DNA, 15 bp, Homo sapiens
ctctcccctgactat

SEQ ID NO: 238407 - DNA, 15 bp, Homo sapiens
gctctcccctgacta

SEQ ID NO: 238408 - DNA, 15 bp, Homo sapiens
agctctcccctgact

SEQ ID NO: 238409 - DNA, 15 bp, Homo sapiens
aagctctcccctgac

SEQ ID NO: 238410 - DNA, 15 bp, Homo sapiens
caagctctcccctga

SEQ ID NO: 238411 - DNA, 15 bp, Homo sapiens
tcaagctctcccctg

SEQ ID NO: 238412 - DNA, 15 bp, Homo sapiens
ctcaagctctcccct

SEQ ID NO: 238413 - DNA, 15 bp, Homo sapiens
cctcaagctctcccc

SEQ ID NO: 238414 - DNA, 15 bp, Homo sapiens
acctcaagctctccc

SEQ ID NO: 238415 - DNA, 15 bp, Homo sapiens
gacctcaagctctcc

SEQ ID NO: 238416 - DNA, 15 bp, Homo sapiens
ggacctcaagctctc

SEQ ID NO: 238417 - DNA, 15 bp, Homo sapiens
tggacctcaagctct

SEQ ID NO: 238418 - DNA, 15 bp, Homo sapiens
ctggacctcaagctc

SEQ ID NO: 238419 - DNA, 15 bp, Homo sapiens
cctggacctcaagct

SEQ ID NO: 238420 - DNA, 15 bp, Homo sapiens
ccctggacctcaagc

SEQ ID NO: 238421 - DNA, 15 bp, Homo sapiens
tccctggacctcaag

SEQ ID NO: 238422 - DNA, 15 bp, Homo sapiens
ttccctggacctcaa

SEQ ID NO: 238423 - DNA, 15 bp, Homo sapiens
tttccctggacctca

SEQ ID NO: 238424 - DNA, 15 bp, Homo sapiens
ctttccctggacctc

SEQ ID NO: 238425 - DNA, 15 bp, Homo sapiens
cctttccctggacct

SEQ ID NO: 238426 - DNA, 15 bp, Homo sapiens
acctttccctggacc

SEQ ID NO: 238427 - DNA, 15 bp, Homo sapiens
aacctttccctggac

SEQ ID NO: 238428 - DNA, 15 bp, Homo sapiens
aaacctttccctgga

SEQ ID NO: 238429 - DNA, 15 bp, Homo sapiens
aaaacctttccctgg

SEQ ID NO: 238430 - DNA, 15 bp, Homo sapiens
caaaacctttccctg

SEQ ID NO: 238431 - DNA, 15 bp, Homo sapiens
acaaaacctttccct

SEQ ID NO: 238432 - DNA, 15 bp, Homo sapiens
aacaaaacctttccc

SEQ ID NO: 238433 - DNA, 15 bp, Homo sapiens
aaacaaaacctttcc

SEQ ID NO: 238434 - DNA, 15 bp, Homo sapiens
aaaacaaaacctttc

SEQ ID NO: 238435 - DNA, 15 bp, Homo sapiens
aaaaacaaaaccttt

SEQ ID NO: 238436 - DNA, 15 bp, Homo sapiens
gaaaaacaaaacctt

SEQ ID NO: 238437 - DNA, 15 bp, Homo sapiens
agaaaaacaaaacct

SEQ ID NO: 238438 - DNA, 15 bp, Homo sapiens
aagaaaaacaaaacc

SEQ ID NO: 238439 - DNA, 15 bp, Homo sapiens
gaagaaaaacaaaac

SEQ ID NO: 238440 - DNA, 15 bp, Homo sapiens
tgaagaaaaacaaaa

SEQ ID NO: 238441 - DNA, 15 bp, Homo sapiens
ctgaagaaaaacaaa

SEQ ID NO: 238442 - DNA, 15 bp, Homo sapiens
cctgaagaaaaacaa

SEQ ID NO: 238443 - DNA, 15 bp, Homo sapiens
ccctgaagaaaaaca

SEQ ID NO: 238444 - DNA, 15 bp, Homo sapiens
tccctgaagaaaaac

SEQ ID NO: 238445 - DNA, 15 bp, Homo sapiens
ttccctgaagaaaaa

SEQ ID NO: 238446 - DNA, 15 bp, Homo sapiens
tttccctgaagaaaa

SEQ ID NO: 238447 - DNA, 15 bp, Homo sapiens
ctttccctgaagaaa

SEQ ID NO: 238448 - DNA, 15 bp, Homo sapiens
cctttccctgaagaa

SEQ ID NO: 238449 - DNA, 15 bp, Homo sapiens
acctttccctgaaga

SEQ ID NO: 238450 - DNA, 15 bp, Homo sapiens
aacctttccctgaag

SEQ ID NO: 238451 - DNA, 15 bp, Homo sapiens
aaacctttccctgaa

SEQ ID NO: 238452 - DNA, 15 bp, Homo sapiens
aaaacctttccctga

SEQ ID NO: 238453 - DNA, 15 bp, Homo sapiens
aaaaacctttccctg

SEQ ID NO: 238454 - DNA, 15 bp, Homo sapiens
taaaaacctttccct

SEQ ID NO: 238455 - DNA, 15 bp, Homo sapiens
ataaaaacctttccc

SEQ ID NO: 238456 - DNA, 15 bp, Homo sapiens
aataaaaacctttcc

SEQ ID NO: 238457 - DNA, 15 bp, Homo sapiens
caataaaaacctttc

SEQ ID NO: 238458 - DNA, 15 bp, Homo sapiens
acaataaaaaccttt

SEQ ID NO: 238459 - DNA, 15 bp, Homo sapiens
aacaataaaaacctt

SEQ ID NO: 238460 - DNA, 15 bp, Homo sapiens
gaacaataaaaacct

SEQ ID NO: 238461 - DNA, 15 bp, Homo sapiens
agaacaataaaaacc

SEQ ID NO: 238462 - DNA, 15 bp, Homo sapiens
aagaacaataaaaac

SEQ ID NO: 238463 - DNA, 15 bp, Homo sapiens
aaagaacaataaaaa

SEQ ID NO: 238464 - DNA, 15 bp, Homo sapiens
taaagaacaataaaa

SEQ ID NO: 238465 - DNA, 15 bp, Homo sapiens
ataaagaacaataaa

SEQ ID NO: 238466 - DNA, 15 bp, Homo sapiens
gataaagaacaataa

SEQ ID NO: 238467 - DNA, 15 bp, Homo sapiens
ggataaagaacaata

SEQ ID NO: 238468 - DNA, 15 bp, Homo sapiens
gggataaagaacaat

SEQ ID NO: 238469 - DNA, 15 bp, Homo sapiens
agggataaagaacaa

SEQ ID NO: 238470 - DNA, 15 bp, Homo sapiens
gagggataaagaaca

SEQ ID NO: 238471 - DNA, 15 bp, Homo sapiens
ggagggataaagaac

SEQ ID NO: 238472 - DNA, 15 bp, Homo sapiens
aggagggataaagaa

SEQ ID NO: 238473 - DNA, 15 bp, Homo sapiens
aaggagggataaaga

SEQ ID NO: 238474 - DNA, 15 bp, Homo sapiens
taaggagggataaag

SEQ ID NO: 238475 - DNA, 15 bp, Homo sapiens
ttaaggagggataaa

SEQ ID NO: 238476 - DNA, 15 bp, Homo sapiens
tttaaggagggataa

SEQ ID NO: 238477 - DNA, 15 bp, Homo sapiens
ctttaaggagggata

SEQ ID NO: 238478 - DNA, 15 bp, Homo sapiens
cctttaaggagggat

SEQ ID NO: 238479 - DNA, 15 bp, Homo sapiens
tcctttaaggaggga

SEQ ID NO: 238480 - DNA, 15 bp, Homo sapiens
gtcctttaaggaggg

SEQ ID NO: 238481 - DNA, 15 bp, Homo sapiens
ggtcctttaaggagg

SEQ ID NO: 238482 - DNA, 15 bp, Homo sapiens
aggtcctttaaggag

SEQ ID NO: 238483 - DNA, 15 bp, Homo sapiens
aaggtcctttaagga

SEQ ID NO: 238484 - DNA, 15 bp, Homo sapiens
gaaggtcctttaagg

SEQ ID NO: 238485 - DNA, 15 bp, Homo sapiens
tgaaggtcctttaag

SEQ ID NO: 238486 - DNA, 15 bp, Homo sapiens
ctgaaggtcctttaa

SEQ ID NO: 238487 - DNA, 15 bp, Homo sapiens
cctgaaggtccttta

SEQ ID NO: 238488 - DNA, 15 bp, Homo sapiens
acctgaaggtccttt

SEQ ID NO: 238489 - DNA, 15 bp, Homo sapiens
cacctgaaggtcctt

SEQ ID NO: 238490 - DNA, 15 bp, Homo sapiens
acacctgaaggtcct

SEQ ID NO: 238491 - DNA, 15 bp, Homo sapiens
aacacctgaaggtcc

SEQ ID NO: 238492 - DNA, 15 bp, Homo sapiens
taacacctgaaggtc

SEQ ID NO: 238493 - DNA, 15 bp, Homo sapiens
gtaacacctgaaggt

SEQ ID NO: 238494 - DNA, 15 bp, Homo sapiens
agtaacacctgaagg

SEQ ID NO: 238495 - DNA, 15 bp, Homo sapiens
cagtaacacctgaag

SEQ ID NO: 238496 - DNA, 15 bp, Homo sapiens
tcagtaacacctgaa

SEQ ID NO: 238497 - DNA, 15 bp, Homo sapiens
gtcagtaacacctga

SEQ ID NO: 238498 - DNA, 15 bp, Homo sapiens
tgtcagtaacacctg

SEQ ID NO: 238499 - DNA, 15 bp, Homo sapiens
atgtcagtaacacct

SEQ ID NO: 238500 - DNA, 15 bp, Homo sapiens
aatgtcagtaacacc

SEQ ID NO: 238501 - DNA, 15 bp, Homo sapiens
gaatgtcagtaacac

SEQ ID NO: 238502 - DNA, 15 bp, Homo sapiens
ggaatgtcagtaaca

SEQ ID NO: 238503 - DNA, 15 bp, Homo sapiens
gggaatgtcagtaac

SEQ ID NO: 238504 - DNA, 15 bp, Homo sapiens
cgggaatgtcagtaa

SEQ ID NO: 238505 - DNA, 15 bp, Homo sapiens
ccgggaatgtcagta

SEQ ID NO: 238506 - DNA, 15 bp, Homo sapiens
accgggaatgtcagt

SEQ ID NO: 238507 - DNA, 15 bp, Homo sapiens
gaccgggaatgtcag

SEQ ID NO: 238508 - DNA, 15 bp, Homo sapiens
agaccgggaatgtca

SEQ ID NO: 238509 - DNA, 15 bp, Homo sapiens
tagaccgggaatgtc

SEQ ID NO: 238510 - DNA, 15 bp, Homo sapiens
gtagaccgggaatgt

SEQ ID NO: 238511 - DNA, 15 bp, Homo sapiens
ggtagaccgggaatg

SEQ ID NO: 238512 - DNA, 15 bp, Homo sapiens
gggtagaccgggaat

SEQ ID NO: 238513 - DNA, 15 bp, Homo sapiens
tgggtagaccgggaa

SEQ ID NO: 238514 - DNA, 15 bp, Homo sapiens
ctgggtagaccggga

SEQ ID NO: 238515 - DNA, 15 bp, Homo sapiens
actgggtagaccggg

SEQ ID NO: 238516 - DNA, 15 bp, Homo sapiens
cactgggtagaccgg

SEQ ID NO: 238517 - DNA, 15 bp, Homo sapiens
ccactgggtagaccg

SEQ ID NO: 238518 - DNA, 15 bp, Homo sapiens
gccactgggtagacc

SEQ ID NO: 238519 - DNA, 15 bp, Homo sapiens
tgccactgggtagac

SEQ ID NO: 238520 - DNA, 15 bp, Homo sapiens
gtgccactgggtaga

SEQ ID NO: 238521 - DNA, 15 bp, Homo sapiens
tgtgccactgggtag

SEQ ID NO: 238522 - DNA, 15 bp, Homo sapiens
atgtgccactgggta

SEQ ID NO: 238523 - DNA, 15 bp, Homo sapiens
aatgtgccactgggt

SEQ ID NO: 238524 - DNA, 15 bp, Homo sapiens
aaatgtgccactggg

SEQ ID NO: 238525 - DNA, 15 bp, Homo sapiens
taaatgtgccactgg

SEQ ID NO: 238526 - DNA, 15 bp, Homo sapiens
ctaaatgtgccactg

SEQ ID NO: 238527 - DNA, 15 bp, Homo sapiens
actaaatgtgccact

SEQ ID NO: 238528 - DNA, 15 bp, Homo sapiens
aactaaatgtgccac

SEQ ID NO: 238529 - DNA, 15 bp, Homo sapiens
aaactaaatgtgcca

SEQ ID NO: 238530 - DNA, 15 bp, Homo sapiens
actctgtcacccagg

SEQ ID NO: 238531 - DNA, 15 bp, Homo sapiens
cactctgtcacccag

SEQ ID NO: 238532 - DNA, 15 bp, Homo sapiens
tcactctgtcaccca

SEQ ID NO: 238533 - DNA, 15 bp, Homo sapiens
ctcactctgtcaccc

SEQ ID NO: 238534 - DNA, 15 bp, Homo sapiens
tctcactctgtcacc

SEQ ID NO: 238535 - DNA, 15 bp, Homo sapiens
gtctcactctgtcac

SEQ ID NO: 238536 - DNA, 15 bp, Homo sapiens
agtctcactctgtca

SEQ ID NO: 238537 - DNA, 15 bp, Homo sapiens
gacagagtctcactc

SEQ ID NO: 238538 - DNA, 15 bp, Homo sapiens
agacagagtctcact

SEQ ID NO: 238539 - DNA, 15 bp, Homo sapiens
cagacagagtctcac

SEQ ID NO: 238540 - DNA, 15 bp, Homo sapiens
tcagacagagtctca

SEQ ID NO: 238541 - DNA, 15 bp, Homo sapiens
ttcagacagagtctc

SEQ ID NO: 238542 - DNA, 15 bp, Homo sapiens
tttcagacagagtct

SEQ ID NO: 238543 - DNA, 15 bp, Homo sapiens
ttttcagacagagtc

SEQ ID NO: 238544 - DNA, 15 bp, Homo sapiens
attttcagacagagt

SEQ ID NO: 238545 - DNA, 15 bp, Homo sapiens
tattttcagacagag

SEQ ID NO: 238546 - DNA, 15 bp, Homo sapiens
ttattttcagacaga

SEQ ID NO: 238547 - DNA, 15 bp, Homo sapiens
attattttcagacag

SEQ ID NO: 238548 - DNA, 15 bp, Homo sapiens
tattattttcagaca

SEQ ID NO: 238549 - DNA, 15 bp, Homo sapiens
ttattattttcagac

SEQ ID NO: 238550 - DNA, 15 bp, Homo sapiens
attattattttcaga

SEQ ID NO: 238551 - DNA, 15 bp, Homo sapiens
tattattattttcag

SEQ ID NO: 238552 - DNA, 15 bp, Homo sapiens
ttattattattttca

SEQ ID NO: 238553 - DNA, 15 bp, Homo sapiens
attattattattttc

SEQ ID NO: 238554 - DNA, 15 bp, Homo sapiens
tattattattatttt

SEQ ID NO: 238555 - DNA, 15 bp, Homo sapiens
ttattattattattt

SEQ ID NO: 238556 - DNA, 15 bp, Homo sapiens
attattattattatt

SEQ ID NO: 238557 - DNA, 15 bp, Homo sapiens
tattattattattat

SEQ ID NO: 238558 - DNA, 15 bp, Homo sapiens
ttattattattatta

SEQ ID NO: 238559 - DNA, 15 bp, Homo sapiens
aattattattattat

SEQ ID NO: 238560 - DNA, 15 bp, Homo sapiens
aaattattattatta

SEQ ID NO: 238561 - DNA, 15 bp, Homo sapiens
caaattattattatt

SEQ ID NO: 238562 - DNA, 15 bp, Homo sapiens
acaaattattattat

SEQ ID NO: 238563 - DNA, 15 bp, Homo sapiens
aacaaattattatta

SEQ ID NO: 238564 - DNA, 15 bp, Homo sapiens
taacaaattattatt

SEQ ID NO: 238565 - DNA, 15 bp, Homo sapiens
ataacaaattattat

SEQ ID NO: 238566 - DNA, 15 bp, Homo sapiens
aataacaaattatta

SEQ ID NO: 238567 - DNA, 15 bp, Homo sapiens
caataacaaattatt

SEQ ID NO: 238568 - DNA, 15 bp, Homo sapiens
agcaataacaaatta

SEQ ID NO: 238569 - DNA, 15 bp, Homo sapiens
aagcaataacaaatt

SEQ ID NO: 238570 - DNA, 15 bp, Homo sapiens
aaagcaataacaaat

SEQ ID NO: 238571 - DNA, 15 bp, Homo sapiens
aaaagcaataacaaa

SEQ ID NO: 238572 - DNA, 15 bp, Homo sapiens
taaaagcaataacaa

SEQ ID NO: 238573 - DNA, 15 bp, Homo sapiens
ataaaagcaataaca

SEQ ID NO: 238574 - DNA, 15 bp, Homo sapiens
aataaaagcaataac

SEQ ID NO: 238575 - DNA, 15 bp, Homo sapiens
caataaaagcaataa

SEQ ID NO: 238576 - DNA, 15 bp, Homo sapiens
gcaataaaagcaata

SEQ ID NO: 238577 - DNA, 15 bp, Homo sapiens
ggcaataaaagcaat

SEQ ID NO: 238578 - DNA, 15 bp, Homo sapiens
aggcaataaaagcaa

SEQ ID NO: 238579 - DNA, 15 bp, Homo sapiens
aaggcaataaaagca

SEQ ID NO: 238580 - DNA, 15 bp, Homo sapiens
taaggcaataaaagc

SEQ ID NO: 238581 - DNA, 15 bp, Homo sapiens
ctaaggcaataaaag

SEQ ID NO: 238582 - DNA, 15 bp, Homo sapiens
actaaggcaataaaa

SEQ ID NO: 238583 - DNA, 15 bp, Homo sapiens
aactaaggcaataaa

SEQ ID NO: 238584 - DNA, 15 bp, Homo sapiens
aaactaaggcaataa

SEQ ID NO: 238585 - DNA, 15 bp, Homo sapiens
taaactaaggcaata

SEQ ID NO: 238586 - DNA, 15 bp, Homo sapiens
gtaaactaaggcaat

SEQ ID NO: 238587 - DNA, 15 bp, Homo sapiens
tgtaaactaaggcaa

SEQ ID NO: 238588 - DNA, 15 bp, Homo sapiens
atgtaaactaaggca

SEQ ID NO: 238589 - DNA, 15 bp, Homo sapiens
tatgtaaactaaggc

SEQ ID NO: 238590 - DNA, 15 bp, Homo sapiens
ctatgtaaactaagg

SEQ ID NO: 238591 - DNA, 15 bp, Homo sapiens
cctatgtaaactaag

SEQ ID NO: 238592 - DNA, 15 bp, Homo sapiens
ccctatgtaaactaa

SEQ ID NO: 238593 - DNA, 15 bp, Homo sapiens
tccctatgtaaacta

SEQ ID NO: 238594 - DNA, 15 bp, Homo sapiens
ttccctatgtaaact

SEQ ID NO: 238595 - DNA, 15 bp, Homo sapiens
attccctatgtaaac

SEQ ID NO: 238596 - DNA, 15 bp, Homo sapiens
gattccctatgtaaa

SEQ ID NO: 238597 - DNA, 15 bp, Homo sapiens
tgattccctatgtaa

SEQ ID NO: 238598 - DNA, 15 bp, Homo sapiens
ttgattccctatgta

SEQ ID NO: 238599 - DNA, 15 bp, Homo sapiens
tttgattccctatgt

SEQ ID NO: 238600 - DNA, 15 bp, Homo sapiens
ctttgattccctatg

SEQ ID NO: 238601 - DNA, 15 bp, Homo sapiens
actttgattccctat

SEQ ID NO: 238602 - DNA, 15 bp, Homo sapiens
aactttgattcccta

SEQ ID NO: 238603 - DNA, 15 bp, Homo sapiens
aaactttgattccct

SEQ ID NO: 238604 - DNA, 15 bp, Homo sapiens
taaactttgattccc

SEQ ID NO: 238605 - DNA, 15 bp, Homo sapiens
ataaactttgattcc

SEQ ID NO: 238606 - DNA, 15 bp, Homo sapiens
tataaactttgattc

SEQ ID NO: 238607 - DNA, 15 bp, Homo sapiens
gtataaactttgatt

SEQ ID NO: 238608 - DNA, 15 bp, Homo sapiens
agtataaactttgat

SEQ ID NO: 238609 - DNA, 15 bp, Homo sapiens
aagtataaactttga

SEQ ID NO: 238610 - DNA, 15 bp, Homo sapiens
aaagtataaactttg

SEQ ID NO: 238611 - DNA, 15 bp, Homo sapiens
caaagtataaacttt

SEQ ID NO: 238612 - DNA, 15 bp, Homo sapiens
tcaaagtataaactt

SEQ ID NO: 238613 - DNA, 15 bp, Homo sapiens
atcaaagtataaact

SEQ ID NO: 238614 - DNA, 15 bp, Homo sapiens
aatcaaagtataaac

SEQ ID NO: 238615 - DNA, 15 bp, Homo sapiens
aaatcaaagtataaa

SEQ ID NO: 238616 - DNA, 15 bp, Homo sapiens
taaatcaaagtataa

SEQ ID NO: 238617 - DNA, 15 bp, Homo sapiens
ataaatcaaagtata

SEQ ID NO: 238618 - DNA, 15 bp, Homo sapiens
tataaatcaaagtat

SEQ ID NO: 238619 - DNA, 15 bp, Homo sapiens
ttataaatcaaagta

SEQ ID NO: 238620 - DNA, 15 bp, Homo sapiens
tttataaatcaaagt

SEQ ID NO: 238621 - DNA, 15 bp, Homo sapiens
ttttataaatcaaag

SEQ ID NO: 238622 - DNA, 15 bp, Homo sapiens
cttttataaatcaaa

SEQ ID NO: 238623 - DNA, 15 bp, Homo sapiens
acttttataaatcaa

SEQ ID NO: 238624 - DNA, 15 bp, Homo sapiens
aacttttataaatca

SEQ ID NO: 238625 - DNA, 15 bp, Homo sapiens
caacttttataaatc

SEQ ID NO: 238626 - DNA, 15 bp, Homo sapiens
gcaacttttataaat

SEQ ID NO: 238627 - DNA, 15 bp, Homo sapiens
agcaacttttataaa

SEQ ID NO: 238628 - DNA, 15 bp, Homo sapiens
aagcaacttttataa

SEQ ID NO: 238629 - DNA, 15 bp, Homo sapiens
aaagcaacttttata

SEQ ID NO: 238630 - DNA, 15 bp, Homo sapiens
caaagcaacttttat

SEQ ID NO: 238631 - DNA, 15 bp, Homo sapiens
tcaaagcaactttta

SEQ ID NO: 238632 - DNA, 15 bp, Homo sapiens
atcaaagcaactttt

SEQ ID NO: 238633 - DNA, 15 bp, Homo sapiens
aatcaaagcaacttt

SEQ ID NO: 238634 - DNA, 15 bp, Homo sapiens
gaatcaaagcaactt

SEQ ID NO: 238635 - DNA, 15 bp, Homo sapiens
agaatcaaagcaact

SEQ ID NO: 238636 - DNA, 15 bp, Homo sapiens
tagaatcaaagcaac

SEQ ID NO: 238637 - DNA, 15 bp, Homo sapiens
ctagaatcaaagcaa

SEQ ID NO: 238638 - DNA, 15 bp, Homo sapiens
actagaatcaaagca

SEQ ID NO: 238639 - DNA, 15 bp, Homo sapiens
aactagaatcaaagc

SEQ ID NO: 238640 - DNA, 15 bp, Homo sapiens
gaactagaatcaaag

SEQ ID NO: 238641 - DNA, 15 bp, Homo sapiens
tgaactagaatcaaa

SEQ ID NO: 238642 - DNA, 15 bp, Homo sapiens
gtgaactagaatcaa

SEQ ID NO: 238643 - DNA, 15 bp, Homo sapiens
tgtgaactagaatca

SEQ ID NO: 238644 - DNA, 15 bp, Homo sapiens
ctgtgaactagaatc

SEQ ID NO: 238645 - DNA, 15 bp, Homo sapiens
tctgtgaactagaat

SEQ ID NO: 238646 - DNA, 15 bp, Homo sapiens
ttctgtgaactagaa

SEQ ID NO: 238647 - DNA, 15 bp, Homo sapiens
gttctgtgaactaga

SEQ ID NO: 238648 - DNA, 15 bp, Homo sapiens
ggttctgtgaactag

SEQ ID NO: 238649 - DNA, 15 bp, Homo sapiens
tggttctgtgaacta

SEQ ID NO: 238650 - DNA, 15 bp, Homo sapiens
ctggttctgtgaact

SEQ ID NO: 238651 - DNA, 15 bp, Homo sapiens
tctggttctgtgaac

SEQ ID NO: 238652 - DNA, 15 bp, Homo sapiens
ttctggttctgtgaa

SEQ ID NO: 238653 - DNA, 15 bp, Homo sapiens
attctggttctgtga

SEQ ID NO: 238654 - DNA, 15 bp, Homo sapiens
gattctggttctgtg

SEQ ID NO: 238655 - DNA, 15 bp, Homo sapiens
agattctggttctgt

SEQ ID NO: 238656 - DNA, 15 bp, Homo sapiens
aagattctggttctg

SEQ ID NO: 238657 - DNA, 15 bp, Homo sapiens
aaagattctggttct

SEQ ID NO: 238658 - DNA, 15 bp, Homo sapiens
gaaagattctggttc

SEQ ID NO: 238659 - DNA, 15 bp, Homo sapiens
tgaaagattctggtt

SEQ ID NO: 238660 - DNA, 15 bp, Homo sapiens
atgaaagattctggt

SEQ ID NO: 238661 - DNA, 15 bp, Homo sapiens
tatgaaagattctgg

SEQ ID NO: 238662 - DNA, 15 bp, Homo sapiens
atatgaaagattctg

SEQ ID NO: 238663 - DNA, 15 bp, Homo sapiens
tatatgaaagattct

SEQ ID NO: 238664 - DNA, 15 bp, Homo sapiens
ttatatgaaagattc

SEQ ID NO: 238665 - DNA, 15 bp, Homo sapiens
tttatatgaaagatt

SEQ ID NO: 238666 - DNA, 15 bp, Homo sapiens
ctttatatgaaagat

SEQ ID NO: 238667 - DNA, 15 bp, Homo sapiens
cctttatatgaaaga

SEQ ID NO: 238668 - DNA, 15 bp, Homo sapiens
acctttatatgaaag

SEQ ID NO: 238669 - DNA, 15 bp, Homo sapiens
tacctttatatgaaa

SEQ ID NO: 238670 - DNA, 15 bp, Homo sapiens
atacctttatatgaa

SEQ ID NO: 238671 - DNA, 15 bp, Homo sapiens
aatacctttatatga

SEQ ID NO: 238672 - DNA, 15 bp, Homo sapiens
taatacctttatatg

SEQ ID NO: 238673 - DNA, 15 bp, Homo sapiens
ctaatacctttatat

SEQ ID NO: 238674 - DNA, 15 bp, Homo sapiens
tctaatacctttata

SEQ ID NO: 238675 - DNA, 15 bp, Homo sapiens
ctctaatacctttat

SEQ ID NO: 238676 - DNA, 15 bp, Homo sapiens
cctctaataccttta

SEQ ID NO: 238677 - DNA, 15 bp, Homo sapiens
ccctctaataccttt

SEQ ID NO: 238678 - DNA, 15 bp, Homo sapiens
gccctctaatacctt

SEQ ID NO: 238679 - DNA, 15 bp, Homo sapiens
ggccctctaatacct

SEQ ID NO: 238680 - DNA, 15 bp, Homo sapiens
gggccctctaatacc

SEQ ID NO: 238681 - DNA, 15 bp, Homo sapiens
tgggccctctaatac

SEQ ID NO: 238682 - DNA, 15 bp, Homo sapiens
ctgggccctctaata

SEQ ID NO: 238683 - DNA, 15 bp, Homo sapiens
actgggccctctaat

SEQ ID NO: 238684 - DNA, 15 bp, Homo sapiens
cactgggccctctaa

SEQ ID NO: 238685 - DNA, 15 bp, Homo sapiens
acactgggccctcta

SEQ ID NO: 238686 - DNA, 15 bp, Homo sapiens
cacactgggccctct

SEQ ID NO: 238687 - DNA, 15 bp, Homo sapiens
ccacactgggccctc

SEQ ID NO: 238688 - DNA, 15 bp, Homo sapiens
accacactgggccct

SEQ ID NO: 238689 - DNA, 15 bp, Homo sapiens
caccacactgggccc

SEQ ID NO: 238690 - DNA, 15 bp, Homo sapiens
ccaccacactgggcc

SEQ ID NO: 238691 - DNA, 15 bp, Homo sapiens
gccaccacactgggc

SEQ ID NO: 238692 - DNA, 15 bp, Homo sapiens
agccaccacactggg

SEQ ID NO: 238693 - DNA, 15 bp, Homo sapiens
gagccaccacactgg

SEQ ID NO: 238694 - DNA, 15 bp, Homo sapiens
tgagccaccacactg

SEQ ID NO: 238695 - DNA, 15 bp, Homo sapiens
atgagccaccacact

SEQ ID NO: 238696 - DNA, 15 bp, Homo sapiens
catgagccaccacac

SEQ ID NO: 238697 - DNA, 15 bp, Homo sapiens
gcatgagccaccaca

SEQ ID NO: 238698 - DNA, 15 bp, Homo sapiens
ggcatgagccaccac

SEQ ID NO: 238699 - DNA, 15 bp, Homo sapiens
aggcatgagccacca

SEQ ID NO: 238700 - DNA, 15 bp, Homo sapiens
caggcatgagccacc

SEQ ID NO: 238701 - DNA, 15 bp, Homo sapiens
attacaggcatgagc

SEQ ID NO: 238702 - DNA, 15 bp, Homo sapiens
gattacaggcatgag

SEQ ID NO: 238703 - DNA, 15 bp, Homo sapiens
ggattacaggcatga

SEQ ID NO: 238704 - DNA, 15 bp, Homo sapiens
atgctgggattacag

SEQ ID NO: 238705 - DNA, 15 bp, Homo sapiens
tatgctgggattaca

SEQ ID NO: 238706 - DNA, 15 bp, Homo sapiens
atatgctgggattac

SEQ ID NO: 238707 - DNA, 15 bp, Homo sapiens
aatatgctgggatta

SEQ ID NO: 238708 - DNA, 15 bp, Homo sapiens
caatatgctgggatt

SEQ ID NO: 238709 - DNA, 15 bp, Homo sapiens
ccaatatgctgggat

SEQ ID NO: 238710 - DNA, 15 bp, Homo sapiens
cccaatatgctggga

SEQ ID NO: 238711 - DNA, 15 bp, Homo sapiens
tcccaatatgctggg

SEQ ID NO: 238712 - DNA, 15 bp, Homo sapiens
ctcccaatatgctgg

SEQ ID NO: 238713 - DNA, 15 bp, Homo sapiens
cctcccaatatgctg

SEQ ID NO: 238714 - DNA, 15 bp, Homo sapiens
gcctcccaatatgct

SEQ ID NO: 238715 - DNA, 15 bp, Homo sapiens
agcctcccaatatgc

SEQ ID NO: 238716 - DNA, 15 bp, Homo sapiens
cagcctcccaatatg

SEQ ID NO: 238717 - DNA, 15 bp, Homo sapiens
tcagcctcccaatat

SEQ ID NO: 238718 - DNA, 15 bp, Homo sapiens
ctcagcctcccaata

SEQ ID NO: 238719 - DNA, 15 bp, Homo sapiens
cctcagcctcccaat

SEQ ID NO: 238720 - DNA, 15 bp, Homo sapiens
tcctcagcctcccaa

SEQ ID NO: 238721 - DNA, 15 bp, Homo sapiens
ctcctcagcctccca

SEQ ID NO: 238722 - DNA, 15 bp, Homo sapiens
cctcctcagcctccc

SEQ ID NO: 238723 - DNA, 15 bp, Homo sapiens
ccctcctcagcctcc

SEQ ID NO: 238724 - DNA, 15 bp, Homo sapiens
tccctcctcagcctc

SEQ ID NO: 238725 - DNA, 15 bp, Homo sapiens
ctccctcctcagcct

SEQ ID NO: 238726 - DNA, 15 bp, Homo sapiens
cctccctcctcagcc

SEQ ID NO: 238727 - DNA, 15 bp, Homo sapiens
tcctccctcctcagc

SEQ ID NO: 238728 - DNA, 15 bp, Homo sapiens
atcctccctcctcag

SEQ ID NO: 238729 - DNA, 15 bp, Homo sapiens
gatcctccctcctca

SEQ ID NO: 238730 - DNA, 15 bp, Homo sapiens
tgatcctccctcctc

SEQ ID NO: 238731 - DNA, 15 bp, Homo sapiens
gtgatcctccctcct

SEQ ID NO: 238732 - DNA, 15 bp, Homo sapiens
agtgatcctccctcc

SEQ ID NO: 238733 - DNA, 15 bp, Homo sapiens
aagtgatcctccctc

SEQ ID NO: 238734 - DNA, 15 bp, Homo sapiens
aaagtgatcctccct

SEQ ID NO: 238735 - DNA, 15 bp, Homo sapiens
taaagtgatcctccc

SEQ ID NO: 238736 - DNA, 15 bp, Homo sapiens
ctaaagtgatcctcc

SEQ ID NO: 238737 - DNA, 15 bp, Homo sapiens
cctaaagtgatcctc

SEQ ID NO: 238738 - DNA, 15 bp, Homo sapiens
tcctaaagtgatcct

SEQ ID NO: 238739 - DNA, 15 bp, Homo sapiens
ctcctaaagtgatcc

SEQ ID NO: 238740 - DNA, 15 bp, Homo sapiens
actcctaaagtgatc

SEQ ID NO: 238741 - DNA, 15 bp, Homo sapiens
aactcctaaagtgat

SEQ ID NO: 238742 - DNA, 15 bp, Homo sapiens
aaactcctaaagtga

SEQ ID NO: 238743 - DNA, 15 bp, Homo sapiens
caaactcctaaagtg

SEQ ID NO: 238744 - DNA, 15 bp, Homo sapiens
tcaaactcctaaagt

SEQ ID NO: 238745 - DNA, 15 bp, Homo sapiens
ctcaaactcctaaag

SEQ ID NO: 238746 - DNA, 15 bp, Homo sapiens
cctcaaactcctaaa

SEQ ID NO: 238747 - DNA, 15 bp, Homo sapiens
gcctcaaactcctaa

SEQ ID NO: 238748 - DNA, 15 bp, Homo sapiens
ggcctcaaactccta

SEQ ID NO: 238749 - DNA, 15 bp, Homo sapiens
tggcctcaaactcct

SEQ ID NO: 238750 - DNA, 15 bp, Homo sapiens
ctggcctcaaactcc

SEQ ID NO: 238751 - DNA, 15 bp, Homo sapiens
gctggcctcaaactc

SEQ ID NO: 238752 - DNA, 15 bp, Homo sapiens
ggctggcctcaaact

SEQ ID NO: 238753 - DNA, 15 bp, Homo sapiens
aggctggcctcaaac

SEQ ID NO: 238754 - DNA, 15 bp, Homo sapiens
taggctggcctcaaa

SEQ ID NO: 238755 - DNA, 15 bp, Homo sapiens
ctaggctggcctcaa

SEQ ID NO: 238756 - DNA, 15 bp, Homo sapiens
cctaggctggcctca

SEQ ID NO: 238757 - DNA, 15 bp, Homo sapiens
gcctaggctggcctc

SEQ ID NO: 238758 - DNA, 15 bp, Homo sapiens
tgcctaggctggcct

SEQ ID NO: 238759 - DNA, 15 bp, Homo sapiens
ttgcctaggctggcc

SEQ ID NO: 238760 - DNA, 15 bp, Homo sapiens
gttgcctaggctggc

SEQ ID NO: 238761 - DNA, 15 bp, Homo sapiens
tgttgcctaggctgg

SEQ ID NO: 238762 - DNA, 15 bp, Homo sapiens
atgttgcctaggctg

SEQ ID NO: 238763 - DNA, 15 bp, Homo sapiens
tatgttgcctaggct

SEQ ID NO: 238764 - DNA, 15 bp, Homo sapiens
ctatgttgcctaggc

SEQ ID NO: 238765 - DNA, 15 bp, Homo sapiens
actatgttgcctagg

SEQ ID NO: 238766 - DNA, 15 bp, Homo sapiens
cactatgttgcctag

SEQ ID NO: 238767 - DNA, 15 bp, Homo sapiens
tcactatgttgccta

SEQ ID NO: 238768 - DNA, 15 bp, Homo sapiens
ctcactatgttgcct

SEQ ID NO: 238769 - DNA, 15 bp, Homo sapiens
aggtctcactatgtt

SEQ ID NO: 238770 - DNA, 15 bp, Homo sapiens
aaggtctcactatgt

SEQ ID NO: 238771 - DNA, 15 bp, Homo sapiens
caaggtctcactatg

SEQ ID NO: 238772 - DNA, 15 bp, Homo sapiens
acaaggtctcactat

SEQ ID NO: 238773 - DNA, 15 bp, Homo sapiens
gacaaggtctcacta

SEQ ID NO: 238774 - DNA, 15 bp, Homo sapiens
agacaaggtctcact

SEQ ID NO: 238775 - DNA, 15 bp, Homo sapiens
gagacaaggtctcac

SEQ ID NO: 238776 - DNA, 15 bp, Homo sapiens
agagacaaggtctca

SEQ ID NO: 238777 - DNA, 15 bp, Homo sapiens
tagagacaaggtctc

SEQ ID NO: 238778 - DNA, 15 bp, Homo sapiens
gtagagacaaggtct

SEQ ID NO: 238779 - DNA, 15 bp, Homo sapiens
tgtagagacaaggtc

SEQ ID NO: 238780 - DNA, 15 bp, Homo sapiens
ttgtagagacaaggt

SEQ ID NO: 238781 - DNA, 15 bp, Homo sapiens
tttgtagagacaagg

SEQ ID NO: 238782 - DNA, 15 bp, Homo sapiens
ttttgtagagacaag

SEQ ID NO: 238783 - DNA, 15 bp, Homo sapiens
tttttgtagagacaa

SEQ ID NO: 238784 - DNA, 15 bp, Homo sapiens
ttttttgtagagaca

SEQ ID NO: 238785 - DNA, 15 bp, Homo sapiens
aattttttgtagaga

SEQ ID NO: 238786 - DNA, 15 bp, Homo sapiens
gaattttttgtagag

SEQ ID NO: 238787 - DNA, 15 bp, Homo sapiens
ggaattttttgtaga

SEQ ID NO: 238788 - DNA, 15 bp, Homo sapiens
tggaattttttgtag

SEQ ID NO: 238789 - DNA, 15 bp, Homo sapiens
ttggaattttttgta

SEQ ID NO: 238790 - DNA, 15 bp, Homo sapiens
gttggaattttttgt

SEQ ID NO: 238791 - DNA, 15 bp, Homo sapiens
tgttggaattttttg

SEQ ID NO: 238792 - DNA, 15 bp, Homo sapiens
atgttggaatttttt

SEQ ID NO: 238793 - DNA, 15 bp, Homo sapiens
aatgttggaattttt

SEQ ID NO: 238794 - DNA, 15 bp, Homo sapiens
taatgttggaatttt

SEQ ID NO: 238795 - DNA, 15 bp, Homo sapiens
ctaatgttggaattt

SEQ ID NO: 238796 - DNA, 15 bp, Homo sapiens
gctaatgttggaatt

SEQ ID NO: 238797 - DNA, 15 bp, Homo sapiens
agctaatgttggaat

SEQ ID NO: 238798 - DNA, 15 bp, Homo sapiens
cagctaatgttggaa

SEQ ID NO: 238799 - DNA, 15 bp, Homo sapiens
ccagctaatgttgga

SEQ ID NO: 238800 - DNA, 15 bp, Homo sapiens
cccagctaatgttgg

SEQ ID NO: 238801 - DNA, 15 bp, Homo sapiens
gcccagctaatgttg

SEQ ID NO: 238802 - DNA, 15 bp, Homo sapiens
tgcccagctaatgtt

SEQ ID NO: 238803 - DNA, 15 bp, Homo sapiens
atgcccagctaatgt

SEQ ID NO: 238804 - DNA, 15 bp, Homo sapiens
catgcccagctaatg

SEQ ID NO: 238805 - DNA, 15 bp, Homo sapiens
atgccaccatgccca

SEQ ID NO: 238806 - DNA, 15 bp, Homo sapiens
catgccaccatgccc

SEQ ID NO: 238807 - DNA, 15 bp, Homo sapiens
acatgccaccatgcc

SEQ ID NO: 238808 - DNA, 15 bp, Homo sapiens
cacatgccaccatgc

SEQ ID NO: 238809 - DNA, 15 bp, Homo sapiens
gcacatgccaccatg

SEQ ID NO: 238810 - DNA, 15 bp, Homo sapiens
ggcacatgccaccat

SEQ ID NO: 238811 - DNA, 15 bp, Homo sapiens
aggcacatgccacca

SEQ ID NO: 238812 - DNA, 15 bp, Homo sapiens
atgggactacaggca

SEQ ID NO: 238813 - DNA, 15 bp, Homo sapiens
aatgggactacaggc

SEQ ID NO: 238814 - DNA, 15 bp, Homo sapiens
aaatgggactacagg

SEQ ID NO: 238815 - DNA, 15 bp, Homo sapiens
taaatgggactacag

SEQ ID NO: 238816 - DNA, 15 bp, Homo sapiens
ataaatgggactaca

SEQ ID NO: 238817 - DNA, 15 bp, Homo sapiens
aataaatgggactac

SEQ ID NO: 238818 - DNA, 15 bp, Homo sapiens
aaataaatgggacta

SEQ ID NO: 238819 - DNA, 15 bp, Homo sapiens
caaataaatgggact

SEQ ID NO: 238820 - DNA, 15 bp, Homo sapiens
ccaaataaatgggac

SEQ ID NO: 238821 - DNA, 15 bp, Homo sapiens
cccaaataaatggga

SEQ ID NO: 238822 - DNA, 15 bp, Homo sapiens
ccccaaataaatggg

SEQ ID NO: 238823 - DNA, 15 bp, Homo sapiens
cccccaaataaatgg

SEQ ID NO: 238824 - DNA, 15 bp, Homo sapiens
ccccccaaataaatg

SEQ ID NO: 238825 - DNA, 15 bp, Homo sapiens
gccccccaaataaat

SEQ ID NO: 238826 - DNA, 15 bp, Homo sapiens
agccccccaaataaa

SEQ ID NO: 238827 - DNA, 15 bp, Homo sapiens
cagccccccaaataa

SEQ ID NO: 238828 - DNA, 15 bp, Homo sapiens
tcagccccccaaata

SEQ ID NO: 238829 - DNA, 15 bp, Homo sapiens
ctcagccccccaaat

SEQ ID NO: 238830 - DNA, 15 bp, Homo sapiens
gcctcagccccccaa

SEQ ID NO: 238831 - DNA, 15 bp, Homo sapiens
tgcctcagcccccca

SEQ ID NO: 238832 - DNA, 15 bp, Homo sapiens
ctgcctcagcccccc

SEQ ID NO: 238833 - DNA, 15 bp, Homo sapiens
cctgcctcagccccc

SEQ ID NO: 238834 - DNA, 15 bp, Homo sapiens
tcctgcctcagcccc

SEQ ID NO: 238835 - DNA, 15 bp, Homo sapiens
ctcctgcctcagccc

SEQ ID NO: 238836 - DNA, 15 bp, Homo sapiens
cctcctgcctcagcc

SEQ ID NO: 238837 - DNA, 15 bp, Homo sapiens
tcctcctgcctcagc

SEQ ID NO: 238838 - DNA, 15 bp, Homo sapiens
atcctcctgcctcag

SEQ ID NO: 238839 - DNA, 15 bp, Homo sapiens
gatcctcctgcctca

SEQ ID NO: 238840 - DNA, 15 bp, Homo sapiens
tgatcctcctgcctc

SEQ ID NO: 238841 - DNA, 15 bp, Homo sapiens
gtgatcctcctgcct

SEQ ID NO: 238842 - DNA, 15 bp, Homo sapiens
agtgatcctcctgcc

SEQ ID NO: 238843 - DNA, 15 bp, Homo sapiens
aagtgatcctcctgc

SEQ ID NO: 238844 - DNA, 15 bp, Homo sapiens
caagtgatcctcctg

SEQ ID NO: 238845 - DNA, 15 bp, Homo sapiens
tcaagtgatcctcct

SEQ ID NO: 238846 - DNA, 15 bp, Homo sapiens
ctcaagtgatcctcc

SEQ ID NO: 238847 - DNA, 15 bp, Homo sapiens
gctcaagtgatcctc

SEQ ID NO: 238848 - DNA, 15 bp, Homo sapiens
ggctcaagtgatcct

SEQ ID NO: 238849 - DNA, 15 bp, Homo sapiens
gggctcaagtgatcc

SEQ ID NO: 238850 - DNA, 15 bp, Homo sapiens
tgggctcaagtgatc

SEQ ID NO: 238851 - DNA, 15 bp, Homo sapiens
gtgggctcaagtgat

SEQ ID NO: 238852 - DNA, 15 bp, Homo sapiens
cgtgggctcaagtga

SEQ ID NO: 238853 - DNA, 15 bp, Homo sapiens
tcgtgggctcaagtg

SEQ ID NO: 238854 - DNA, 15 bp, Homo sapiens
ctcgtgggctcaagt

SEQ ID NO: 238855 - DNA, 15 bp, Homo sapiens
cctcgtgggctcaag

SEQ ID NO: 238856 - DNA, 15 bp, Homo sapiens
acctcgtgggctcaa

SEQ ID NO: 238857 - DNA, 15 bp, Homo sapiens
aacctcgtgggctca

SEQ ID NO: 238858 - DNA, 15 bp, Homo sapiens
gaacctcgtgggctc

SEQ ID NO: 238859 - DNA, 15 bp, Homo sapiens
tgaacctcgtgggct

SEQ ID NO: 238860 - DNA, 15 bp, Homo sapiens
ttgaacctcgtgggc

SEQ ID NO: 238861 - DNA, 15 bp, Homo sapiens
attgaacctcgtggg

SEQ ID NO: 238862 - DNA, 15 bp, Homo sapiens
gattgaacctcgtgg

SEQ ID NO: 238863 - DNA, 15 bp, Homo sapiens
ggattgaacctcgtg

SEQ ID NO: 238864 - DNA, 15 bp, Homo sapiens
tggattgaacctcgt

SEQ ID NO: 238865 - DNA, 15 bp, Homo sapiens
ctggattgaacctcg

SEQ ID NO: 238866 - DNA, 15 bp, Homo sapiens
cctggattgaacctc

SEQ ID NO: 238867 - DNA, 15 bp, Homo sapiens
acctggattgaacct

SEQ ID NO: 238868 - DNA, 15 bp, Homo sapiens
aacctggattgaacc

SEQ ID NO: 238869 - DNA, 15 bp, Homo sapiens
caacctggattgaac

SEQ ID NO: 238870 - DNA, 15 bp, Homo sapiens
gcaacctggattgaa

SEQ ID NO: 238871 - DNA, 15 bp, Homo sapiens
tgcaacctggattga

SEQ ID NO: 238872 - DNA, 15 bp, Homo sapiens
ctgcaacctggattg

SEQ ID NO: 238873 - DNA, 15 bp, Homo sapiens
actgcaacctggatt

SEQ ID NO: 238874 - DNA, 15 bp, Homo sapiens
tactgcaacctggat

SEQ ID NO: 238875 - DNA, 15 bp, Homo sapiens
ttactgcaacctgga

SEQ ID NO: 238876 - DNA, 15 bp, Homo sapiens
cttactgcaacctgg

SEQ ID NO: 238877 - DNA, 15 bp, Homo sapiens
gcttactgcaacctg

SEQ ID NO: 238878 - DNA, 15 bp, Homo sapiens
ggcttactgcaacct

SEQ ID NO: 238879 - DNA, 15 bp, Homo sapiens
tggcttactgcaacc

SEQ ID NO: 238880 - DNA, 15 bp, Homo sapiens
atggcttactgcaac

SEQ ID NO: 238881 - DNA, 15 bp, Homo sapiens
catggcttactgcaa

SEQ ID NO: 238882 - DNA, 15 bp, Homo sapiens
tcatggcttactgca

SEQ ID NO: 238883 - DNA, 15 bp, Homo sapiens
atcatggcttactgc

SEQ ID NO: 238884 - DNA, 15 bp, Homo sapiens
gatcatggcttactg

SEQ ID NO: 238885 - DNA, 15 bp, Homo sapiens
ggatcatggcttact

SEQ ID NO: 238886 - DNA, 15 bp, Homo sapiens
aggatcatggcttac

SEQ ID NO: 238887 - DNA, 15 bp, Homo sapiens
caggatcatggctta

SEQ ID NO: 238888 - DNA, 15 bp, Homo sapiens
gcaggatcatggctt

SEQ ID NO: 238889 - DNA, 15 bp, Homo sapiens
ggcaggatcatggct

SEQ ID NO: 238890 - DNA, 15 bp, Homo sapiens
tggcaggatcatggc

SEQ ID NO: 238891 - DNA, 15 bp, Homo sapiens
gtggcaggatcatgg

SEQ ID NO: 238892 - DNA, 15 bp, Homo sapiens
agtggcaggatcatg

SEQ ID NO: 238893 - DNA, 15 bp, Homo sapiens
cagtggcaggatcat

SEQ ID NO: 238894 - DNA, 15 bp, Homo sapiens
gcagtggcaggatca

SEQ ID NO: 238895 - DNA, 15 bp, Homo sapiens
tgcagtggcaggatc

SEQ ID NO: 238896 - DNA, 15 bp, Homo sapiens
gtgcagtggcaggat

SEQ ID NO: 238897 - DNA, 15 bp, Homo sapiens
agtgcagtggcagga

SEQ ID NO: 238898 - DNA, 15 bp, Homo sapiens
gagtgcagtggcagg

SEQ ID NO: 238899 - DNA, 15 bp, Homo sapiens
ggagtgcagtggcag

SEQ ID NO: 238900 - DNA, 15 bp, Homo sapiens
actggagtgcagtgg

SEQ ID NO: 238901 - DNA, 15 bp, Homo sapiens
aactggagtgcagtg

SEQ ID NO: 238902 - DNA, 15 bp, Homo sapiens
aaactggagtgcagt

SEQ ID NO: 238903 - DNA, 15 bp, Homo sapiens
caaactggagtgcag

SEQ ID NO: 238904 - DNA, 15 bp, Homo sapiens
ccaaactggagtgca

SEQ ID NO: 238905 - DNA, 15 bp, Homo sapiens
cccaaactggagtgc

SEQ ID NO: 238906 - DNA, 15 bp, Homo sapiens
acccaaactggagtg

SEQ ID NO: 238907 - DNA, 15 bp, Homo sapiens
tacccaaactggagt

SEQ ID NO: 238908 - DNA, 15 bp, Homo sapiens
ttacccaaactggag

SEQ ID NO: 238909 - DNA, 15 bp, Homo sapiens
gttacccaaactgga

SEQ ID NO: 238910 - DNA, 15 bp, Homo sapiens
tgttacccaaactgg

SEQ ID NO: 238911 - DNA, 15 bp, Homo sapiens
ctgttacccaaactg

SEQ ID NO: 238912 - DNA, 15 bp, Homo sapiens
tctgttacccaaact

SEQ ID NO: 238913 - DNA, 15 bp, Homo sapiens
ctctgttacccaaac

SEQ ID NO: 238914 - DNA, 15 bp, Homo sapiens
gctctgttacccaaa

SEQ ID NO: 238915 - DNA, 15 bp, Homo sapiens
cgctctgttacccaa

SEQ ID NO: 238916 - DNA, 15 bp, Homo sapiens
tcgctctgttaccca

SEQ ID NO: 238917 - DNA, 15 bp, Homo sapiens
ttcgctctgttaccc

SEQ ID NO: 238918 - DNA, 15 bp, Homo sapiens
cttcgctctgttacc

SEQ ID NO: 238919 - DNA, 15 bp, Homo sapiens
gcttcgctctgttac

SEQ ID NO: 238920 - DNA, 15 bp, Homo sapiens
agcttcgctctgtta

SEQ ID NO: 238921 - DNA, 15 bp, Homo sapiens
tagcttcgctctgtt

SEQ ID NO: 238922 - DNA, 15 bp, Homo sapiens
atagcttcgctctgt

SEQ ID NO: 238923 - DNA, 15 bp, Homo sapiens
catagcttcgctctg

SEQ ID NO: 238924 - DNA, 15 bp, Homo sapiens
acatagcttcgctct

SEQ ID NO: 238925 - DNA, 15 bp, Homo sapiens
gacatagcttcgctc

SEQ ID NO: 238926 - DNA, 15 bp, Homo sapiens
agacatagcttcgct

SEQ ID NO: 238927 - DNA, 15 bp, Homo sapiens
gagacatagcttcgc

SEQ ID NO: 238928 - DNA, 15 bp, Homo sapiens
tgagacatagcttcg

SEQ ID NO: 238929 - DNA, 15 bp, Homo sapiens
ttgagacatagcttc

SEQ ID NO: 238930 - DNA, 15 bp, Homo sapiens
tttgagacatagctt

SEQ ID NO: 238931 - DNA, 15 bp, Homo sapiens
ttttgagacatagct

SEQ ID NO: 238932 - DNA, 15 bp, Homo sapiens
tttttgagacatagc

SEQ ID NO: 238933 - DNA, 15 bp, Homo sapiens
ttttttgagacatag

SEQ ID NO: 238934 - DNA, 15 bp, Homo sapiens
tttttttgagacata

SEQ ID NO: 238935 - DNA, 15 bp, Homo sapiens
ctttttttgagacat

SEQ ID NO: 238936 - DNA, 15 bp, Homo sapiens
tctttttttgagaca

SEQ ID NO: 238937 - DNA, 15 bp, Homo sapiens
ttctttttttgagac

SEQ ID NO: 238938 - DNA, 15 bp, Homo sapiens
tttctttttttgaga

SEQ ID NO: 238939 - DNA, 15 bp, Homo sapiens
ttttctttttttgag

SEQ ID NO: 238940 - DNA, 15 bp, Homo sapiens
tttttctttttttga

SEQ ID NO: 238941 - DNA, 15 bp, Homo sapiens
ttttttctttttttg

SEQ ID NO: 238942 - DNA, 15 bp, Homo sapiens
ctttttttttctttt

SEQ ID NO: 238943 - DNA, 15 bp, Homo sapiens
actttttttttcttt

SEQ ID NO: 238944 - DNA, 15 bp, Homo sapiens
tactttttttttctt

SEQ ID NO: 238945 - DNA, 15 bp, Homo sapiens
atactttttttttct

SEQ ID NO: 238946 - DNA, 15 bp, Homo sapiens
aatactttttttttc

SEQ ID NO: 238947 - DNA, 15 bp, Homo sapiens
gaatacttttttttt

SEQ ID NO: 238948 - DNA, 15 bp, Homo sapiens
agaatactttttttt

SEQ ID NO: 238949 - DNA, 15 bp, Homo sapiens
tagaatacttttttt

SEQ ID NO: 238950 - DNA, 15 bp, Homo sapiens
ttagaatactttttt

SEQ ID NO: 238951 - DNA, 15 bp, Homo sapiens
tttagaatacttttt

SEQ ID NO: 238952 - DNA, 15 bp, Homo sapiens
atttagaatactttt

SEQ ID NO: 238953 - DNA, 15 bp, Homo sapiens
gatttagaatacttt

SEQ ID NO: 238954 - DNA, 15 bp, Homo sapiens
ggatttagaatactt

SEQ ID NO: 238955 - DNA, 15 bp, Homo sapiens
tggatttagaatact

SEQ ID NO: 238956 - DNA, 15 bp, Homo sapiens
ttggatttagaatac

SEQ ID NO: 238957 - DNA, 15 bp, Homo sapiens
tttggatttagaata

SEQ ID NO: 238958 - DNA, 15 bp, Homo sapiens
atttggatttagaat

SEQ ID NO: 238959 - DNA, 15 bp, Homo sapiens
aatttggatttagaa

SEQ ID NO: 238960 - DNA, 15 bp, Homo sapiens
aaatttggatttaga

SEQ ID NO: 238961 - DNA, 15 bp, Homo sapiens
taaatttggatttag

SEQ ID NO: 238962 - DNA, 15 bp, Homo sapiens
ttaaatttggattta

SEQ ID NO: 238963 - DNA, 15 bp, Homo sapiens
attaaatttggattt

SEQ ID NO: 238964 - DNA, 15 bp, Homo sapiens
tattaaatttggatt

SEQ ID NO: 238965 - DNA, 15 bp, Homo sapiens
atattaaatttggat

SEQ ID NO: 238966 - DNA, 15 bp, Homo sapiens
tatattaaatttgga

SEQ ID NO: 238967 - DNA, 15 bp, Homo sapiens
atatattaaatttgg

SEQ ID NO: 238968 - DNA, 15 bp, Homo sapiens
tatatattaaatttg

SEQ ID NO: 238969 - DNA, 15 bp, Homo sapiens
ttatatattaaattt

SEQ ID NO: 238970 - DNA, 15 bp, Homo sapiens
tttatatattaaatt

SEQ ID NO: 238971 - DNA, 15 bp, Homo sapiens
ttttatatattaaat

SEQ ID NO: 238972 - DNA, 15 bp, Homo sapiens
gttttatatattaaa

SEQ ID NO: 238973 - DNA, 15 bp, Homo sapiens
agttttatatattaa

SEQ ID NO: 238974 - DNA, 15 bp, Homo sapiens
tagttttatatatta

SEQ ID NO: 238975 - DNA, 15 bp, Homo sapiens
ttagttttatatatt

SEQ ID NO: 238976 - DNA, 15 bp, Homo sapiens
tttagttttatatat

SEQ ID NO: 238977 - DNA, 15 bp, Homo sapiens
atttagttttatata

SEQ ID NO: 238978 - DNA, 15 bp, Homo sapiens
catttagttttatat

SEQ ID NO: 238979 - DNA, 15 bp, Homo sapiens
gcatttagttttata

SEQ ID NO: 238980 - DNA, 15 bp, Homo sapiens
tgcatttagttttat

SEQ ID NO: 238981 - DNA, 15 bp, Homo sapiens
ctgcatttagtttta

SEQ ID NO: 238982 - DNA, 15 bp, Homo sapiens
cctgcatttagtttt

SEQ ID NO: 238983 - DNA, 15 bp, Homo sapiens
gcctgcatttagttt

SEQ ID NO: 238984 - DNA, 15 bp, Homo sapiens
ggcctgcatttagtt

SEQ ID NO: 238985 - DNA, 15 bp, Homo sapiens
tggcctgcatttagt

SEQ ID NO: 238986 - DNA, 15 bp, Homo sapiens
ttggcctgcatttag

SEQ ID NO: 238987 - DNA, 15 bp, Homo sapiens
cttggcctgcattta

SEQ ID NO: 238988 - DNA, 15 bp, Homo sapiens
acttggcctgcattt

SEQ ID NO: 238989 - DNA, 15 bp, Homo sapiens
cacttggcctgcatt

SEQ ID NO: 238990 - DNA, 15 bp, Homo sapiens
acacttggcctgcat

SEQ ID NO: 238991 - DNA, 15 bp, Homo sapiens
cacacttggcctgca

SEQ ID NO: 238992 - DNA, 15 bp, Homo sapiens
ccacacttggcctgc

SEQ ID NO: 238993 - DNA, 15 bp, Homo sapiens
accacacttggcctg

SEQ ID NO: 238994 - DNA, 15 bp, Homo sapiens
caccacacttggcct

SEQ ID NO: 238995 - DNA, 15 bp, Homo sapiens
ccaccacacttggcc

SEQ ID NO: 238996 - DNA, 15 bp, Homo sapiens
gccaccacacttggc

SEQ ID NO: 238997 - DNA, 15 bp, Homo sapiens
tgccaccacacttgg

SEQ ID NO: 238998 - DNA, 15 bp, Homo sapiens
atgccaccacacttg

SEQ ID NO: 238999 - DNA, 15 bp, Homo sapiens
tatgccaccacactt

SEQ ID NO: 239000 - DNA, 15 bp, Homo sapiens
atatgccaccacact

SEQ ID NO: 239001 - DNA, 15 bp, Homo sapiens
tatatgccaccacac

SEQ ID NO: 239002 - DNA, 15 bp, Homo sapiens
gtatatgccaccaca

SEQ ID NO: 239003 - DNA, 15 bp, Homo sapiens
ggtatatgccaccac

SEQ ID NO: 239004 - DNA, 15 bp, Homo sapiens
aggtatatgccacca

SEQ ID NO: 239005 - DNA, 15 bp, Homo sapiens
taggtatatgccacc

SEQ ID NO: 239006 - DNA, 15 bp, Homo sapiens
ataggtatatgccac

SEQ ID NO: 239007 - DNA, 15 bp, Homo sapiens
tataggtatatgcca

SEQ ID NO: 239008 - DNA, 15 bp, Homo sapiens
ttataggtatatgcc

SEQ ID NO: 239009 - DNA, 15 bp, Homo sapiens
attataggtatatgc

SEQ ID NO: 239010 - DNA, 15 bp, Homo sapiens
gattataggtatatg

SEQ ID NO: 239011 - DNA, 15 bp, Homo sapiens
tgattataggtatat

SEQ ID NO: 239012 - DNA, 15 bp, Homo sapiens
gtgattataggtata

SEQ ID NO: 239013 - DNA, 15 bp, Homo sapiens
tgtgattataggtat

SEQ ID NO: 239014 - DNA, 15 bp, Homo sapiens
ttgtgattataggta

SEQ ID NO: 239015 - DNA, 15 bp, Homo sapiens
gttgtgattataggt

SEQ ID NO: 239016 - DNA, 15 bp, Homo sapiens
tgttgtgattatagg

SEQ ID NO: 239017 - DNA, 15 bp, Homo sapiens
gtgttgtgattatag

SEQ ID NO: 239018 - DNA, 15 bp, Homo sapiens
agtgttgtgattata

SEQ ID NO: 239019 - DNA, 15 bp, Homo sapiens
aagtgttgtgattat

SEQ ID NO: 239020 - DNA, 15 bp, Homo sapiens
aaagtgttgtgatta

SEQ ID NO: 239021 - DNA, 15 bp, Homo sapiens
caaagtgttgtgatt

SEQ ID NO: 239022 - DNA, 15 bp, Homo sapiens
ccaaagtgttgtgat

SEQ ID NO: 239023 - DNA, 15 bp, Homo sapiens
cccaaagtgttgtga

SEQ ID NO: 239024 - DNA, 15 bp, Homo sapiens
tcccaaagtgttgtg

SEQ ID NO: 239025 - DNA, 15 bp, Homo sapiens
ctcccaaagtgttgt

SEQ ID NO: 239026 - DNA, 15 bp, Homo sapiens
cctcccaaagtgttg

SEQ ID NO: 239027 - DNA, 15 bp, Homo sapiens
gcctcccaaagtgtt

SEQ ID NO: 239028 - DNA, 15 bp, Homo sapiens
agcctcccaaagtgt

SEQ ID NO: 239029 - DNA, 15 bp, Homo sapiens
acctcagcctcccaa

SEQ ID NO: 239030 - DNA, 15 bp, Homo sapiens
cacctcagcctccca

SEQ ID NO: 239031 - DNA, 15 bp, Homo sapiens
ccacctcagcctccc

SEQ ID NO: 239032 - DNA, 15 bp, Homo sapiens
caatcctcccacctc

SEQ ID NO: 239033 - DNA, 15 bp, Homo sapiens
gcaatcctcccacct

SEQ ID NO: 239034 - DNA, 15 bp, Homo sapiens
agcaatcctcccacc

SEQ ID NO: 239035 - DNA, 15 bp, Homo sapiens
aagcaatcctcccac

SEQ ID NO: 239036 - DNA, 15 bp, Homo sapiens
caagcaatcctccca

SEQ ID NO: 239037 - DNA, 15 bp, Homo sapiens
tcaagcaatcctccc

SEQ ID NO: 239038 - DNA, 15 bp, Homo sapiens
gctcaagcaatcctc

SEQ ID NO: 239039 - DNA, 15 bp, Homo sapiens
ggctcaagcaatcct

SEQ ID NO: 239040 - DNA, 15 bp, Homo sapiens
gaactcttgggctca

SEQ ID NO: 239041 - DNA, 15 bp, Homo sapiens
tgaactcttgggctc

SEQ ID NO: 239042 - DNA, 15 bp, Homo sapiens
ttgaactcttgggct

SEQ ID NO: 239043 - DNA, 15 bp, Homo sapiens
cttgaactcttgggc

SEQ ID NO: 239044 - DNA, 15 bp, Homo sapiens
tcttgaactcttggg

SEQ ID NO: 239045 - DNA, 15 bp, Homo sapiens
gtcttgaactcttgg

SEQ ID NO: 239046 - DNA, 15 bp, Homo sapiens
ggtcttgaactcttg

SEQ ID NO: 239047 - DNA, 15 bp, Homo sapiens
tggtcttgaactctt

SEQ ID NO: 239048 - DNA, 15 bp, Homo sapiens
ctggtcttgaactct

SEQ ID NO: 239049 - DNA, 15 bp, Homo sapiens
taggctggtcttgaa

SEQ ID NO: 239050 - DNA, 15 bp, Homo sapiens
ctaggctggtcttga

SEQ ID NO: 239051 - DNA, 15 bp, Homo sapiens
cctaggctggtcttg

SEQ ID NO: 239052 - DNA, 15 bp, Homo sapiens
acctaggctggtctt

SEQ ID NO: 239053 - DNA, 15 bp, Homo sapiens
tacctaggctggtct

SEQ ID NO: 239054 - DNA, 15 bp, Homo sapiens
ttacctaggctggtc

SEQ ID NO: 239055 - DNA, 15 bp, Homo sapiens
gttacctaggctggt

SEQ ID NO: 239056 - DNA, 15 bp, Homo sapiens
tgttacctaggctgg

SEQ ID NO: 239057 - DNA, 15 bp, Homo sapiens
gtgttacctaggctg

SEQ ID NO: 239058 - DNA, 15 bp, Homo sapiens
tgtgttacctaggct

SEQ ID NO: 239059 - DNA, 15 bp, Homo sapiens
ctgtgttacctaggc

SEQ ID NO: 239060 - DNA, 15 bp, Homo sapiens
actgtgttacctagg

SEQ ID NO: 239061 - DNA, 15 bp, Homo sapiens
tactgtgttacctag

SEQ ID NO: 239062 - DNA, 15 bp, Homo sapiens
ttactgtgttaccta

SEQ ID NO: 239063 - DNA, 15 bp, Homo sapiens
cttactgtgttacct

SEQ ID NO: 239064 - DNA, 15 bp, Homo sapiens
tcttactgtgttacc

SEQ ID NO: 239065 - DNA, 15 bp, Homo sapiens
gtcttactgtgttac

SEQ ID NO: 239066 - DNA, 15 bp, Homo sapiens
ggtcttactgtgtta

SEQ ID NO: 239067 - DNA, 15 bp, Homo sapiens
gggtcttactgtgtt

SEQ ID NO: 239068 - DNA, 15 bp, Homo sapiens
ggggtcttactgtgt

SEQ ID NO: 239069 - DNA, 15 bp, Homo sapiens
tggggtcttactgtg

SEQ ID NO: 239070 - DNA, 15 bp, Homo sapiens
atggggtcttactgt

SEQ ID NO: 239071 - DNA, 15 bp, Homo sapiens
gatggggtcttactg

SEQ ID NO: 239072 - DNA, 15 bp, Homo sapiens
agatggggtcttact

SEQ ID NO: 239073 - DNA, 15 bp, Homo sapiens
gagatggggtcttac

SEQ ID NO: 239074 - DNA, 15 bp, Homo sapiens
agagatggggtctta

SEQ ID NO: 239075 - DNA, 15 bp, Homo sapiens
tagagatggggtctt

SEQ ID NO: 239076 - DNA, 15 bp, Homo sapiens
gtagagatggggtct

SEQ ID NO: 239077 - DNA, 15 bp, Homo sapiens
tgtagagatggggtc

SEQ ID NO: 239078 - DNA, 15 bp, Homo sapiens
ttgtagagatggggt

SEQ ID NO: 239079 - DNA, 15 bp, Homo sapiens
tttgtagagatgggg

SEQ ID NO: 239080 - DNA, 15 bp, Homo sapiens
ttttgtagagatggg

SEQ ID NO: 239081 - DNA, 15 bp, Homo sapiens
tttttgtagagatgg

SEQ ID NO: 239082 - DNA, 15 bp, Homo sapiens
ctttttgtagagatg

SEQ ID NO: 239083 - DNA, 15 bp, Homo sapiens
actttttgtagagat

SEQ ID NO: 239084 - DNA, 15 bp, Homo sapiens
tactttttgtagaga

SEQ ID NO: 239085 - DNA, 15 bp, Homo sapiens
ctactttttgtagag

SEQ ID NO: 239086 - DNA, 15 bp, Homo sapiens
tctactttttgtaga

SEQ ID NO: 239087 - DNA, 15 bp, Homo sapiens
ttctactttttgtag

SEQ ID NO: 239088 - DNA, 15 bp, Homo sapiens
tttctactttttgta

SEQ ID NO: 239089 - DNA, 15 bp, Homo sapiens
ttttctactttttgt

SEQ ID NO: 239090 - DNA, 15 bp, Homo sapiens
tttttctactttttg

SEQ ID NO: 239091 - DNA, 15 bp, Homo sapiens
atttttctacttttt

SEQ ID NO: 239092 - DNA, 15 bp, Homo sapiens
aatttttctactttt

SEQ ID NO: 239093 - DNA, 15 bp, Homo sapiens
taatttttctacttt

SEQ ID NO: 239094 - DNA, 15 bp, Homo sapiens
ctaatttttctactt

SEQ ID NO: 239095 - DNA, 15 bp, Homo sapiens
gctaatttttctact

SEQ ID NO: 239096 - DNA, 15 bp, Homo sapiens
ggctaatttttctac

SEQ ID NO: 239097 - DNA, 15 bp, Homo sapiens
aggctaatttttcta

SEQ ID NO: 239098 - DNA, 15 bp, Homo sapiens
caggctaatttttct

SEQ ID NO: 239099 - DNA, 15 bp, Homo sapiens
ccaggctaatttttc

SEQ ID NO: 239100 - DNA, 15 bp, Homo sapiens
gccaggctaattttt

SEQ ID NO: 239101 - DNA, 15 bp, Homo sapiens
tgccaggctaatttt

SEQ ID NO: 239102 - DNA, 15 bp, Homo sapiens
atgccaggctaattt

SEQ ID NO: 239103 - DNA, 15 bp, Homo sapiens
catgccaggctaatt

SEQ ID NO: 239104 - DNA, 15 bp, Homo sapiens
ccatgccaggctaat

SEQ ID NO: 239105 - DNA, 15 bp, Homo sapiens
accatgccaggctaa

SEQ ID NO: 239106 - DNA, 15 bp, Homo sapiens
caccatgccaggcta

SEQ ID NO: 239107 - DNA, 15 bp, Homo sapiens
ccaccatgccaggct

SEQ ID NO: 239108 - DNA, 15 bp, Homo sapiens
accaccatgccaggc

SEQ ID NO: 239109 - DNA, 15 bp, Homo sapiens
caccaccatgccagg

SEQ ID NO: 239110 - DNA, 15 bp, Homo sapiens
tcaccaccatgccag

SEQ ID NO: 239111 - DNA, 15 bp, Homo sapiens
ctcaccaccatgcca

SEQ ID NO: 239112 - DNA, 15 bp, Homo sapiens
actcaccaccatgcc

SEQ ID NO: 239113 - DNA, 15 bp, Homo sapiens
cactcaccaccatgc

SEQ ID NO: 239114 - DNA, 15 bp, Homo sapiens
gcactcaccaccatg

SEQ ID NO: 239115 - DNA, 15 bp, Homo sapiens
agcactcaccaccat

SEQ ID NO: 239116 - DNA, 15 bp, Homo sapiens
aagcactcaccacca

SEQ ID NO: 239117 - DNA, 15 bp, Homo sapiens
aaagcactcaccacc

SEQ ID NO: 239118 - DNA, 15 bp, Homo sapiens
aaaagcactcaccac

SEQ ID NO: 239119 - DNA, 15 bp, Homo sapiens
taaaagcactcacca

SEQ ID NO: 239120 - DNA, 15 bp, Homo sapiens
ttaaaagcactcacc

SEQ ID NO: 239121 - DNA, 15 bp, Homo sapiens
attaaaagcactcac

SEQ ID NO: 239122 - DNA, 15 bp, Homo sapiens
gattaaaagcactca

SEQ ID NO: 239123 - DNA, 15 bp, Homo sapiens
ggattaaaagcactc

SEQ ID NO: 239124 - DNA, 15 bp, Homo sapiens
gggattaaaagcact

SEQ ID NO: 239125 - DNA, 15 bp, Homo sapiens
tgggattaaaagcac

SEQ ID NO: 239126 - DNA, 15 bp, Homo sapiens
ttgggattaaaagca

SEQ ID NO: 239127 - DNA, 15 bp, Homo sapiens
gttgggattaaaagc

SEQ ID NO: 239128 - DNA, 15 bp, Homo sapiens
agttgggattaaaag

SEQ ID NO: 239129 - DNA, 15 bp, Homo sapiens
tagttgggattaaaa

SEQ ID NO: 239130 - DNA, 15 bp, Homo sapiens
gtagttgggattaaa

SEQ ID NO: 239131 - DNA, 15 bp, Homo sapiens
agtagttgggattaa

SEQ ID NO: 239132 - DNA, 15 bp, Homo sapiens
aagtagttgggatta

SEQ ID NO: 239133 - DNA, 15 bp, Homo sapiens
taagtagttgggatt

SEQ ID NO: 239134 - DNA, 15 bp, Homo sapiens
ctaagtagttgggat

SEQ ID NO: 239135 - DNA, 15 bp, Homo sapiens
cctaagtagttggga

SEQ ID NO: 239136 - DNA, 15 bp, Homo sapiens
ccctaagtagttggg

SEQ ID NO: 239137 - DNA, 15 bp, Homo sapiens
cccctaagtagttgg

SEQ ID NO: 239138 - DNA, 15 bp, Homo sapiens
ccccctaagtagttg

SEQ ID NO: 239139 - DNA, 15 bp, Homo sapiens
gccccctaagtagtt

SEQ ID NO: 239140 - DNA, 15 bp, Homo sapiens
agccccctaagtagt

SEQ ID NO: 239141 - DNA, 15 bp, Homo sapiens
cagccccctaagtag

SEQ ID NO: 239142 - DNA, 15 bp, Homo sapiens
tcagccccctaagta

SEQ ID NO: 239143 - DNA, 15 bp, Homo sapiens
ctcagccccctaagt

SEQ ID NO: 239144 - DNA, 15 bp, Homo sapiens
tctcagccccctaag

SEQ ID NO: 239145 - DNA, 15 bp, Homo sapiens
atctcagccccctaa

SEQ ID NO: 239146 - DNA, 15 bp, Homo sapiens
catctcagcccccta

SEQ ID NO: 239147 - DNA, 15 bp, Homo sapiens
ccatctcagccccct

SEQ ID NO: 239148 - DNA, 15 bp, Homo sapiens
cccatctcagccccc

SEQ ID NO: 239149 - DNA, 15 bp, Homo sapiens
tcccatctcagcccc

SEQ ID NO: 239150 - DNA, 15 bp, Homo sapiens
ttcccatctcagccc

SEQ ID NO: 239151 - DNA, 15 bp, Homo sapiens
cttcccatctcagcc

SEQ ID NO: 239152 - DNA, 15 bp, Homo sapiens
tcttcccatctcagc

SEQ ID NO: 239153 - DNA, 15 bp, Homo sapiens
atcttcccatctcag

SEQ ID NO: 239154 - DNA, 15 bp, Homo sapiens
aatcttcccatctca

SEQ ID NO: 239155 - DNA, 15 bp, Homo sapiens
caatcttcccatctc

SEQ ID NO: 239156 - DNA, 15 bp, Homo sapiens
gcaatcttcccatct

SEQ ID NO: 239157 - DNA, 15 bp, Homo sapiens
agcaatcttcccatc

SEQ ID NO: 239158 - DNA, 15 bp, Homo sapiens
aagcaatcttcccat

SEQ ID NO: 239159 - DNA, 15 bp, Homo sapiens
caagcaatcttccca

SEQ ID NO: 239160 - DNA, 15 bp, Homo sapiens
tcaagcaatcttccc

SEQ ID NO: 239161 - DNA, 15 bp, Homo sapiens
ctcaagcaatcttcc

SEQ ID NO: 239162 - DNA, 15 bp, Homo sapiens
gctcaagcaatcttc

SEQ ID NO: 239163 - DNA, 15 bp, Homo sapiens
ggctcaagcaatctt

SEQ ID NO: 239164 - DNA, 15 bp, Homo sapiens
aggctcaagcaatct

SEQ ID NO: 239165 - DNA, 15 bp, Homo sapiens
gaggctcaagcaatc

SEQ ID NO: 239166 - DNA, 15 bp, Homo sapiens
tgaggctcaagcaat

SEQ ID NO: 239167 - DNA, 15 bp, Homo sapiens
ctgaggctcaagcaa

SEQ ID NO: 239168 - DNA, 15 bp, Homo sapiens
tctgaggctcaagca

SEQ ID NO: 239169 - DNA, 15 bp, Homo sapiens
ctctgaggctcaagc

SEQ ID NO: 239170 - DNA, 15 bp, Homo sapiens
actctgaggctcaag

SEQ ID NO: 239171 - DNA, 15 bp, Homo sapiens
aactctgaggctcaa

SEQ ID NO: 239172 - DNA, 15 bp, Homo sapiens
aaactctgaggctca

SEQ ID NO: 239173 - DNA, 15 bp, Homo sapiens
caaactctgaggctc

SEQ ID NO: 239174 - DNA, 15 bp, Homo sapiens
tcaaactctgaggct

SEQ ID NO: 239175 - DNA, 15 bp, Homo sapiens
ctcaaactctgaggc

SEQ ID NO: 239176 - DNA, 15 bp, Homo sapiens
cctcaaactctgagg

SEQ ID NO: 239177 - DNA, 15 bp, Homo sapiens
gcctcaaactctgag

SEQ ID NO: 239178 - DNA, 15 bp, Homo sapiens
agcctcaaactctga

SEQ ID NO: 239179 - DNA, 15 bp, Homo sapiens
cagcctcaaactctg

SEQ ID NO: 239180 - DNA, 15 bp, Homo sapiens
gcagcctcaaactct

SEQ ID NO: 239181 - DNA, 15 bp, Homo sapiens
tgcagcctcaaactc

SEQ ID NO: 239182 - DNA, 15 bp, Homo sapiens
ctgcagcctcaaact

SEQ ID NO: 239183 - DNA, 15 bp, Homo sapiens
actgcagcctcaaac

SEQ ID NO: 239184 - DNA, 15 bp, Homo sapiens
cactgcagcctcaaa

SEQ ID NO: 239185 - DNA, 15 bp, Homo sapiens
ccactgcagcctcaa

SEQ ID NO: 239186 - DNA, 15 bp, Homo sapiens
cccactgcagcctca

SEQ ID NO: 239187 - DNA, 15 bp, Homo sapiens
gcccactgcagcctc

SEQ ID NO: 239188 - DNA, 15 bp, Homo sapiens
ggcccactgcagcct

SEQ ID NO: 239189 - DNA, 15 bp, Homo sapiens
cggcccactgcagcc

SEQ ID NO: 239190 - DNA, 15 bp, Homo sapiens
acggcccactgcagc

SEQ ID NO: 239191 - DNA, 15 bp, Homo sapiens
cacggcccactgcag

SEQ ID NO: 239192 - DNA, 15 bp, Homo sapiens
tcacggcccactgca

SEQ ID NO: 239193 - DNA, 15 bp, Homo sapiens
atcacggcccactgc

SEQ ID NO: 239194 - DNA, 15 bp, Homo sapiens
gatcacggcccactg

SEQ ID NO: 239195 - DNA, 15 bp, Homo sapiens
cgatcacggcccact

SEQ ID NO: 239196 - DNA, 15 bp, Homo sapiens
gcgatcacggcccac

SEQ ID NO: 239197 - DNA, 15 bp, Homo sapiens
agcgatcacggccca

SEQ ID NO: 239198 - DNA, 15 bp, Homo sapiens
gagcgatcacggccc

SEQ ID NO: 239199 - DNA, 15 bp, Homo sapiens
ggagcgatcacggcc

SEQ ID NO: 239200 - DNA, 15 bp, Homo sapiens
tggagcgatcacggc

SEQ ID NO: 239201 - DNA, 15 bp, Homo sapiens
gtggagcgatcacgg

SEQ ID NO: 239202 - DNA, 15 bp, Homo sapiens
agtggagcgatcacg

SEQ ID NO: 239203 - DNA, 15 bp, Homo sapiens
cagtggagcgatcac

SEQ ID NO: 239204 - DNA, 15 bp, Homo sapiens
tcagtggagcgatca

SEQ ID NO: 239205 - DNA, 15 bp, Homo sapiens
atcagtggagcgatc

SEQ ID NO: 239206 - DNA, 15 bp, Homo sapiens
gatcagtggagcgat

SEQ ID NO: 239207 - DNA, 15 bp, Homo sapiens
cgatcagtggagcga

SEQ ID NO: 239208 - DNA, 15 bp, Homo sapiens
gcgatcagtggagcg

SEQ ID NO: 239209 - DNA, 15 bp, Homo sapiens
agcgatcagtggagc

SEQ ID NO: 239210 - DNA, 15 bp, Homo sapiens
gagcgatcagtggag

SEQ ID NO: 239211 - DNA, 15 bp, Homo sapiens
agagcgatcagtgga

SEQ ID NO: 239212 - DNA, 15 bp, Homo sapiens
tagagcgatcagtgg

SEQ ID NO: 239213 - DNA, 15 bp, Homo sapiens
ttagagcgatcagtg

SEQ ID NO: 239214 - DNA, 15 bp, Homo sapiens
tttagagcgatcagt

SEQ ID NO: 239215 - DNA, 15 bp, Homo sapiens
ctttagagcgatcag

SEQ ID NO: 239216 - DNA, 15 bp, Homo sapiens
actttagagcgatca

SEQ ID NO: 239217 - DNA, 15 bp, Homo sapiens
cactttagagcgatc

SEQ ID NO: 239218 - DNA, 15 bp, Homo sapiens
tcactttagagcgat

SEQ ID NO: 239219 - DNA, 15 bp, Homo sapiens
ctcactttagagcga

SEQ ID NO: 239220 - DNA, 15 bp, Homo sapiens
tctcactttagagcg

SEQ ID NO: 239221 - DNA, 15 bp, Homo sapiens
gtctcactttagagc

SEQ ID NO: 239222 - DNA, 15 bp, Homo sapiens
ggtctcactttagag

SEQ ID NO: 239223 - DNA, 15 bp, Homo sapiens
gggtctcactttaga

SEQ ID NO: 239224 - DNA, 15 bp, Homo sapiens
agggtctcactttag

SEQ ID NO: 239225 - DNA, 15 bp, Homo sapiens
cagggtctcacttta

SEQ ID NO: 239226 - DNA, 15 bp, Homo sapiens
acagggtctcacttt

SEQ ID NO: 239227 - DNA, 15 bp, Homo sapiens
gacagggtctcactt

SEQ ID NO: 239228 - DNA, 15 bp, Homo sapiens
agacagggtctcact

SEQ ID NO: 239229 - DNA, 15 bp, Homo sapiens
gagacagggtctcac

SEQ ID NO: 239230 - DNA, 15 bp, Homo sapiens
tgagacagggtctca

SEQ ID NO: 239231 - DNA, 15 bp, Homo sapiens
ttgagacagggtctc

SEQ ID NO: 239232 - DNA, 15 bp, Homo sapiens
tttgagacagggtct

SEQ ID NO: 239233 - DNA, 15 bp, Homo sapiens
ttttgagacagggtc

SEQ ID NO: 239234 - DNA, 15 bp, Homo sapiens
tttttgagacagggt

SEQ ID NO: 239235 - DNA, 15 bp, Homo sapiens
ttttttgagacaggg

SEQ ID NO: 239236 - DNA, 15 bp, Homo sapiens
tttttttgagacagg

SEQ ID NO: 239237 - DNA, 15 bp, Homo sapiens
ctttttttttgagac

SEQ ID NO: 239238 - DNA, 15 bp, Homo sapiens
tctttttttttgaga

SEQ ID NO: 239239 - DNA, 15 bp, Homo sapiens
ttctttttttttgag

SEQ ID NO: 239240 - DNA, 15 bp, Homo sapiens
tttctttttttttga

SEQ ID NO: 239241 - DNA, 15 bp, Homo sapiens
ttttctttttttttg

SEQ ID NO: 239242 - DNA, 15 bp, Homo sapiens
attttcttttttttt

SEQ ID NO: 239243 - DNA, 15 bp, Homo sapiens
tattttctttttttt

SEQ ID NO: 239244 - DNA, 15 bp, Homo sapiens
ctattttcttttttt

SEQ ID NO: 239245 - DNA, 15 bp, Homo sapiens
tctattttctttttt

SEQ ID NO: 239246 - DNA, 15 bp, Homo sapiens
ttctattttcttttt

SEQ ID NO: 239247 - DNA, 15 bp, Homo sapiens
cttctattttctttt

SEQ ID NO: 239248 - DNA, 15 bp, Homo sapiens
tcttctattttcttt

SEQ ID NO: 239249 - DNA, 15 bp, Homo sapiens
ttcttctattttctt

SEQ ID NO: 239250 - DNA, 15 bp, Homo sapiens
tttcttctattttct

SEQ ID NO: 239251 - DNA, 15 bp, Homo sapiens
ttttcttctattttc

SEQ ID NO: 239252 - DNA, 15 bp, Homo sapiens
gttttcttctatttt

SEQ ID NO: 239253 - DNA, 15 bp, Homo sapiens
agttttcttctattt

SEQ ID NO: 239254 - DNA, 15 bp, Homo sapiens
tagttttcttctatt

SEQ ID NO: 239255 - DNA, 15 bp, Homo sapiens
ttagttttcttctat

SEQ ID NO: 239256 - DNA, 15 bp, Homo sapiens
tttagttttcttcta

SEQ ID NO: 239257 - DNA, 15 bp, Homo sapiens
atttagttttcttct

SEQ ID NO: 239258 - DNA, 15 bp, Homo sapiens
tatttagttttcttc

SEQ ID NO: 239259 - DNA, 15 bp, Homo sapiens
gtatttagttttctt

SEQ ID NO: 239260 - DNA, 15 bp, Homo sapiens
tgtatttagttttct

SEQ ID NO: 239261 - DNA, 15 bp, Homo sapiens
atgtatttagttttc

SEQ ID NO: 239262 - DNA, 15 bp, Homo sapiens
aatgtatttagtttt

SEQ ID NO: 239263 - DNA, 15 bp, Homo sapiens
gaatgtatttagttt

SEQ ID NO: 239264 - DNA, 15 bp, Homo sapiens
tgaatgtatttagtt

SEQ ID NO: 239265 - DNA, 15 bp, Homo sapiens
ttgaatgtatttagt

SEQ ID NO: 239266 - DNA, 15 bp, Homo sapiens
attgaatgtatttag

SEQ ID NO: 239267 - DNA, 15 bp, Homo sapiens
tattgaatgtattta

SEQ ID NO: 239268 - DNA, 15 bp, Homo sapiens
ttattgaatgtattt

SEQ ID NO: 239269 - DNA, 15 bp, Homo sapiens
cttattgaatgtatt

SEQ ID NO: 239270 - DNA, 15 bp, Homo sapiens
tcttattgaatgtat

SEQ ID NO: 239271 - DNA, 15 bp, Homo sapiens
gtcttattgaatgta

SEQ ID NO: 239272 - DNA, 15 bp, Homo sapiens
agtcttattgaatgt

SEQ ID NO: 239273 - DNA, 15 bp, Homo sapiens
aagtcttattgaatg

SEQ ID NO: 239274 - DNA, 15 bp, Homo sapiens
aaagtcttattgaat

SEQ ID NO: 239275 - DNA, 15 bp, Homo sapiens
caaagtcttattgaa

SEQ ID NO: 239276 - DNA, 15 bp, Homo sapiens
tcaaagtcttattga

SEQ ID NO: 239277 - DNA, 15 bp, Homo sapiens
atcaaagtcttattg

SEQ ID NO: 239278 - DNA, 15 bp, Homo sapiens
gatcaaagtcttatt

SEQ ID NO: 239279 - DNA, 15 bp, Homo sapiens
agatcaaagtcttat

SEQ ID NO: 239280 - DNA, 15 bp, Homo sapiens
gagatcaaagtctta

SEQ ID NO: 239281 - DNA, 15 bp, Homo sapiens
agagatcaaagtctt

SEQ ID NO: 239282 - DNA, 15 bp, Homo sapiens
aagagatcaaagtct

SEQ ID NO: 239283 - DNA, 15 bp, Homo sapiens
aaagagatcaaagtc

SEQ ID NO: 239284 - DNA, 15 bp, Homo sapiens
aaaagagatcaaagt

SEQ ID NO: 239285 - DNA, 15 bp, Homo sapiens
gaaaagagatcaaag

SEQ ID NO: 239286 - DNA, 15 bp, Homo sapiens
ggaaaagagatcaaa

SEQ ID NO: 239287 - DNA, 15 bp, Homo sapiens
tggaaaagagatcaa

SEQ ID NO: 239288 - DNA, 15 bp, Homo sapiens
ttggaaaagagatca

SEQ ID NO: 239289 - DNA, 15 bp, Homo sapiens
cttggaaaagagatc

SEQ ID NO: 239290 - DNA, 15 bp, Homo sapiens
ccttggaaaagagat

SEQ ID NO: 239291 - DNA, 15 bp, Homo sapiens
accttggaaaagaga

SEQ ID NO: 239292 - DNA, 15 bp, Homo sapiens
caccttggaaaagag

SEQ ID NO: 239293 - DNA, 15 bp, Homo sapiens
acaccttggaaaaga

SEQ ID NO: 239294 - DNA, 15 bp, Homo sapiens
tacaccttggaaaag

SEQ ID NO: 239295 - DNA, 15 bp, Homo sapiens
ttacaccttggaaaa

SEQ ID NO: 239296 - DNA, 15 bp, Homo sapiens
tttacaccttggaaa

SEQ ID NO: 239297 - DNA, 15 bp, Homo sapiens
atttacaccttggaa

SEQ ID NO: 239298 - DNA, 15 bp, Homo sapiens
tatttacaccttgga

SEQ ID NO: 239299 - DNA, 15 bp, Homo sapiens
atatttacaccttgg

SEQ ID NO: 239300 - DNA, 15 bp, Homo sapiens
tatatttacaccttg

SEQ ID NO: 239301 - DNA, 15 bp, Homo sapiens
atatatttacacctt

SEQ ID NO: 239302 - DNA, 15 bp, Homo sapiens
aatatatttacacct

SEQ ID NO: 239303 - DNA, 15 bp, Homo sapiens
aaatatatttacacc

SEQ ID NO: 239304 - DNA, 15 bp, Homo sapiens
aaaatatatttacac

SEQ ID NO: 239305 - DNA, 15 bp, Homo sapiens
caaaatatatttaca

SEQ ID NO: 239306 - DNA, 15 bp, Homo sapiens
ccaaaatatatttac

SEQ ID NO: 239307 - DNA, 15 bp, Homo sapiens
cccaaaatatattta

SEQ ID NO: 239308 - DNA, 15 bp, Homo sapiens
tcccaaaatatattt

SEQ ID NO: 239309 - DNA, 15 bp, Homo sapiens
ttcccaaaatatatt

SEQ ID NO: 239310 - DNA, 15 bp, Homo sapiens
tttcccaaaatatat

SEQ ID NO: 239311 - DNA, 15 bp, Homo sapiens
atttcccaaaatata

SEQ ID NO: 239312 - DNA, 15 bp, Homo sapiens
aatttcccaaaatat

SEQ ID NO: 239313 - DNA, 15 bp, Homo sapiens
aaatttcccaaaata

SEQ ID NO: 239314 - DNA, 15 bp, Homo sapiens
aaaatttcccaaaat

SEQ ID NO: 239315 - DNA, 15 bp, Homo sapiens
gaaaatttcccaaaa

SEQ ID NO: 239316 - DNA, 15 bp, Homo sapiens
ggaaaatttcccaaa

SEQ ID NO: 239317 - DNA, 15 bp, Homo sapiens
tggaaaatttcccaa

SEQ ID NO: 239318 - DNA, 15 bp, Homo sapiens
ctggaaaatttccca

SEQ ID NO: 239319 - DNA, 15 bp, Homo sapiens
actggaaaatttccc

SEQ ID NO: 239320 - DNA, 15 bp, Homo sapiens
aactggaaaatttcc

SEQ ID NO: 239321 - DNA, 15 bp, Homo sapiens
taactggaaaatttc

SEQ ID NO: 239322 - DNA, 15 bp, Homo sapiens
gtaactggaaaattt

SEQ ID NO: 239323 - DNA, 15 bp, Homo sapiens
agtaactggaaaatt

SEQ ID NO: 239324 - DNA, 15 bp, Homo sapiens
aagtaactggaaaat

SEQ ID NO: 239325 - DNA, 15 bp, Homo sapiens
aaagtaactggaaaa

SEQ ID NO: 239326 - DNA, 15 bp, Homo sapiens
caaagtaactggaaa

SEQ ID NO: 239327 - DNA, 15 bp, Homo sapiens
acaaagtaactggaa

SEQ ID NO: 239328 - DNA, 15 bp, Homo sapiens
aacaaagtaactgga

SEQ ID NO: 239329 - DNA, 15 bp, Homo sapiens
gaacaaagtaactgg

SEQ ID NO: 239330 - DNA, 15 bp, Homo sapiens
agaacaaagtaactg

SEQ ID NO: 239331 - DNA, 15 bp, Homo sapiens
gagaacaaagtaact

SEQ ID NO: 239332 - DNA, 15 bp, Homo sapiens
tgagaacaaagtaac

SEQ ID NO: 239333 - DNA, 15 bp, Homo sapiens
atgagaacaaagtaa

SEQ ID NO: 239334 - DNA, 15 bp, Homo sapiens
aatgagaacaaagta

SEQ ID NO: 239335 - DNA, 15 bp, Homo sapiens
aaatgagaacaaagt

SEQ ID NO: 239336 - DNA, 15 bp, Homo sapiens
aaaatgagaacaaag

SEQ ID NO: 239337 - DNA, 15 bp, Homo sapiens
taaaatgagaacaaa

SEQ ID NO: 239338 - DNA, 15 bp, Homo sapiens
ttaaaatgagaacaa

SEQ ID NO: 239339 - DNA, 15 bp, Homo sapiens
attaaaatgagaaca

SEQ ID NO: 239340 - DNA, 15 bp, Homo sapiens
cattaaaatgagaac

SEQ ID NO: 239341 - DNA, 15 bp, Homo sapiens
acattaaaatgagaa

SEQ ID NO: 239342 - DNA, 15 bp, Homo sapiens
tacattaaaatgaga

SEQ ID NO: 239343 - DNA, 15 bp, Homo sapiens
ttacattaaaatgag

SEQ ID NO: 239344 - DNA, 15 bp, Homo sapiens
attacattaaaatga

SEQ ID NO: 239345 - DNA, 15 bp, Homo sapiens
tattacattaaaatg

SEQ ID NO: 239346 - DNA, 15 bp, Homo sapiens
ttattacattaaaat

SEQ ID NO: 239347 - DNA, 15 bp, Homo sapiens
attattacattaaaa

SEQ ID NO: 239348 - DNA, 15 bp, Homo sapiens
gattattacattaaa

SEQ ID NO: 239349 - DNA, 15 bp, Homo sapiens
agattattacattaa

SEQ ID NO: 239350 - DNA, 15 bp, Homo sapiens
tagattattacatta

SEQ ID NO: 239351 - DNA, 15 bp, Homo sapiens
ttagattattacatt

SEQ ID NO: 239352 - DNA, 15 bp, Homo sapiens
cttagattattacat

SEQ ID NO: 239353 - DNA, 15 bp, Homo sapiens
acttagattattaca

SEQ ID NO: 239354 - DNA, 15 bp, Homo sapiens
gacttagattattac

SEQ ID NO: 239355 - DNA, 15 bp, Homo sapiens
agacttagattatta

SEQ ID NO: 239356 - DNA, 15 bp, Homo sapiens
aagacttagattatt

SEQ ID NO: 239357 - DNA, 15 bp, Homo sapiens
caagacttagattat

SEQ ID NO: 239358 - DNA, 15 bp, Homo sapiens
ccaagacttagatta

SEQ ID NO: 239359 - DNA, 15 bp, Homo sapiens
accaagacttagatt

SEQ ID NO: 239360 - DNA, 15 bp, Homo sapiens
aaccaagacttagat

SEQ ID NO: 239361 - DNA, 15 bp, Homo sapiens
aaaccaagacttaga

SEQ ID NO: 239362 - DNA, 15 bp, Homo sapiens
aaaaccaagacttag

SEQ ID NO: 239363 - DNA, 15 bp, Homo sapiens
gaaaaccaagactta

SEQ ID NO: 239364 - DNA, 15 bp, Homo sapiens
agaaaaccaagactt

SEQ ID NO: 239365 - DNA, 15 bp, Homo sapiens
tagaaaaccaagact

SEQ ID NO: 239366 - DNA, 15 bp, Homo sapiens
ttagaaaaccaagac

SEQ ID NO: 239367 - DNA, 15 bp, Homo sapiens
cttagaaaaccaaga

SEQ ID NO: 239368 - DNA, 15 bp, Homo sapiens
ccttagaaaaccaag

SEQ ID NO: 239369 - DNA, 15 bp, Homo sapiens
tccttagaaaaccaa

SEQ ID NO: 239370 - DNA, 15 bp, Homo sapiens
ttccttagaaaacca

SEQ ID NO: 239371 - DNA, 15 bp, Homo sapiens
tttccttagaaaacc

SEQ ID NO: 239372 - DNA, 15 bp, Homo sapiens
ttttccttagaaaac

SEQ ID NO: 239373 - DNA, 15 bp, Homo sapiens
cttttccttagaaaa

SEQ ID NO: 239374 - DNA, 15 bp, Homo sapiens
acttttccttagaaa

SEQ ID NO: 239375 - DNA, 15 bp, Homo sapiens
aacttttccttagaa

SEQ ID NO: 239376 - DNA, 15 bp, Homo sapiens
aaacttttccttaga

SEQ ID NO: 239377 - DNA, 15 bp, Homo sapiens
aaaacttttccttag

SEQ ID NO: 239378 - DNA, 15 bp, Homo sapiens
gaaaacttttcctta

SEQ ID NO: 239379 - DNA, 15 bp, Homo sapiens
agaaaacttttcctt

SEQ ID NO: 239380 - DNA, 15 bp, Homo sapiens
gagaaaacttttcct

SEQ ID NO: 239381 - DNA, 15 bp, Homo sapiens
agagaaaacttttcc

SEQ ID NO: 239382 - DNA, 15 bp, Homo sapiens
aagagaaaacttttc

SEQ ID NO: 239383 - DNA, 15 bp, Homo sapiens
taagagaaaactttt

SEQ ID NO: 239384 - DNA, 15 bp, Homo sapiens
ataagagaaaacttt

SEQ ID NO: 239385 - DNA, 15 bp, Homo sapiens
aataagagaaaactt

SEQ ID NO: 239386 - DNA, 15 bp, Homo sapiens
taataagagaaaact

SEQ ID NO: 239387 - DNA, 15 bp, Homo sapiens
ataataagagaaaac

SEQ ID NO: 239388 - DNA, 15 bp, Homo sapiens
tataataagagaaaa

SEQ ID NO: 239389 - DNA, 15 bp, Homo sapiens
atataataagagaaa

SEQ ID NO: 239390 - DNA, 15 bp, Homo sapiens
gatataataagagaa

SEQ ID NO: 239391 - DNA, 15 bp, Homo sapiens
agatataataagaga

SEQ ID NO: 239392 - DNA, 15 bp, Homo sapiens
aagatataataagag

SEQ ID NO: 239393 - DNA, 15 bp, Homo sapiens
aaagatataataaga

SEQ ID NO: 239394 - DNA, 15 bp, Homo sapiens
aaaagatataataag

SEQ ID NO: 239395 - DNA, 15 bp, Homo sapiens
caaaagatataataa

SEQ ID NO: 239396 - DNA, 15 bp, Homo sapiens
acaaaagatataata

SEQ ID NO: 239397 - DNA, 15 bp, Homo sapiens
aacaaaagatataat

SEQ ID NO: 239398 - DNA, 15 bp, Homo sapiens
taacaaaagatataa

SEQ ID NO: 239399 - DNA, 15 bp, Homo sapiens
ttaacaaaagatata

SEQ ID NO: 239400 - DNA, 15 bp, Homo sapiens
attaacaaaagatat

SEQ ID NO: 239401 - DNA, 15 bp, Homo sapiens
cattaacaaaagata

SEQ ID NO: 239402 - DNA, 15 bp, Homo sapiens
acattaacaaaagat

SEQ ID NO: 239403 - DNA, 15 bp, Homo sapiens
aacattaacaaaaga

SEQ ID NO: 239404 - DNA, 15 bp, Homo sapiens
aaacattaacaaaag

SEQ ID NO: 239405 - DNA, 15 bp, Homo sapiens
gaaacattaacaaaa

SEQ ID NO: 239406 - DNA, 15 bp, Homo sapiens
agaaacattaacaaa

SEQ ID NO: 239407 - DNA, 15 bp, Homo sapiens
gagaaacattaacaa

SEQ ID NO: 239408 - DNA, 15 bp, Homo sapiens
agagaaacattaaca

SEQ ID NO: 239409 - DNA, 15 bp, Homo sapiens
gagagaaacattaac

SEQ ID NO: 239410 - DNA, 15 bp, Homo sapiens
ggagagaaacattaa

SEQ ID NO: 239411 - DNA, 15 bp, Homo sapiens
gggagagaaacatta

SEQ ID NO: 239412 - DNA, 15 bp, Homo sapiens
tgggagagaaacatt

SEQ ID NO: 239413 - DNA, 15 bp, Homo sapiens
atgggagagaaacat

SEQ ID NO: 239414 - DNA, 15 bp, Homo sapiens
aatgggagagaaaca

SEQ ID NO: 239415 - DNA, 15 bp, Homo sapiens
aaatgggagagaaac

SEQ ID NO: 239416 - DNA, 15 bp, Homo sapiens
gaaatgggagagaaa

SEQ ID NO: 239417 - DNA, 15 bp, Homo sapiens
agaaatgggagagaa

SEQ ID NO: 239418 - DNA, 15 bp, Homo sapiens
aagaaatgggagaga

SEQ ID NO: 239419 - DNA, 15 bp, Homo sapiens
aaagaaatgggagag

SEQ ID NO: 239420 - DNA, 15 bp, Homo sapiens
aaaagaaatgggaga

SEQ ID NO: 239421 - DNA, 15 bp, Homo sapiens
caaaagaaatgggag

SEQ ID NO: 239422 - DNA, 15 bp, Homo sapiens
tcaaaagaaatggga

SEQ ID NO: 239423 - DNA, 15 bp, Homo sapiens
atcaaaagaaatggg

SEQ ID NO: 239424 - DNA, 15 bp, Homo sapiens
gatcaaaagaaatgg

SEQ ID NO: 239425 - DNA, 15 bp, Homo sapiens
agatcaaaagaaatg

SEQ ID NO: 239426 - DNA, 15 bp, Homo sapiens
cagatcaaaagaaat

SEQ ID NO: 239427 - DNA, 15 bp, Homo sapiens
tcagatcaaaagaaa

SEQ ID NO: 239428 - DNA, 15 bp, Homo sapiens
atcagatcaaaagaa

SEQ ID NO: 239429 - DNA, 15 bp, Homo sapiens
gatcagatcaaaaga

SEQ ID NO: 239430 - DNA, 15 bp, Homo sapiens
agatcagatcaaaag

SEQ ID NO: 239431 - DNA, 15 bp, Homo sapiens
aagatcagatcaaaa

SEQ ID NO: 239432 - DNA, 15 bp, Homo sapiens
gaagatcagatcaaa

SEQ ID NO: 239433 - DNA, 15 bp, Homo sapiens
tgaagatcagatcaa

SEQ ID NO: 239434 - DNA, 15 bp, Homo sapiens
ctgaagatcagatca

SEQ ID NO: 239435 - DNA, 15 bp, Homo sapiens
tctgaagatcagatc

SEQ ID NO: 239436 - DNA, 15 bp, Homo sapiens
atctgaagatcagat

SEQ ID NO: 239437 - DNA, 15 bp, Homo sapiens
tatctgaagatcaga

SEQ ID NO: 239438 - DNA, 15 bp, Homo sapiens
gtatctgaagatcag

SEQ ID NO: 239439 - DNA, 15 bp, Homo sapiens
tgtatctgaagatca

SEQ ID NO: 239440 - DNA, 15 bp, Homo sapiens
atgtatctgaagatc

SEQ ID NO: 239441 - DNA, 15 bp, Homo sapiens
catgtatctgaagat

SEQ ID NO: 239442 - DNA, 15 bp, Homo sapiens
tcatgtatctgaaga

SEQ ID NO: 239443 - DNA, 15 bp, Homo sapiens
atcatgtatctgaag

SEQ ID NO: 239444 - DNA, 15 bp, Homo sapiens
aatcatgtatctgaa

SEQ ID NO: 239445 - DNA, 15 bp, Homo sapiens
taatcatgtatctga

SEQ ID NO: 239446 - DNA, 15 bp, Homo sapiens
ataatcatgtatctg

SEQ ID NO: 239447 - DNA, 15 bp, Homo sapiens
gataatcatgtatct

SEQ ID NO: 239448 - DNA, 15 bp, Homo sapiens
agataatcatgtatc

SEQ ID NO: 239449 - DNA, 15 bp, Homo sapiens
aagataatcatgtat

SEQ ID NO: 239450 - DNA, 15 bp, Homo sapiens
gaagataatcatgta

SEQ ID NO: 239451 - DNA, 15 bp, Homo sapiens
tgaagataatcatgt

SEQ ID NO: 239452 - DNA, 15 bp, Homo sapiens
gtgaagataatcatg

SEQ ID NO: 239453 - DNA, 15 bp, Homo sapiens
agtgaagataatcat

SEQ ID NO: 239454 - DNA, 15 bp, Homo sapiens
cagtgaagataatca

SEQ ID NO: 239455 - DNA, 15 bp, Homo sapiens
gcagtgaagataatc

SEQ ID NO: 239456 - DNA, 15 bp, Homo sapiens
agcagtgaagataat

SEQ ID NO: 239457 - DNA, 15 bp, Homo sapiens
tagcagtgaagataa

SEQ ID NO: 239458 - DNA, 15 bp, Homo sapiens
ttagcagtgaagata

SEQ ID NO: 239459 - DNA, 15 bp, Homo sapiens
tttagcagtgaagat

SEQ ID NO: 239460 - DNA, 15 bp, Homo sapiens
atttagcagtgaaga

SEQ ID NO: 239461 - DNA, 15 bp, Homo sapiens
aatttagcagtgaag

SEQ ID NO: 239462 - DNA, 15 bp, Homo sapiens
aaatttagcagtgaa

SEQ ID NO: 239463 - DNA, 15 bp, Homo sapiens
caaatttagcagtga

SEQ ID NO: 239464 - DNA, 15 bp, Homo sapiens
acaaatttagcagtg

SEQ ID NO: 239465 - DNA, 15 bp, Homo sapiens
cacaaatttagcagt

SEQ ID NO: 239466 - DNA, 15 bp, Homo sapiens
acacaaatttagcag

SEQ ID NO: 239467 - DNA, 15 bp, Homo sapiens
aacacaaatttagca

SEQ ID NO: 239468 - DNA, 15 bp, Homo sapiens
gaacacaaatttagc

SEQ ID NO: 239469 - DNA, 15 bp, Homo sapiens
agaacacaaatttag

SEQ ID NO: 239470 - DNA, 15 bp, Homo sapiens
gagaacacaaattta

SEQ ID NO: 239471 - DNA, 15 bp, Homo sapiens
agagaacacaaattt

SEQ ID NO: 239472 - DNA, 15 bp, Homo sapiens
cagagaacacaaatt

SEQ ID NO: 239473 - DNA, 15 bp, Homo sapiens
ccagagaacacaaat

SEQ ID NO: 239474 - DNA, 15 bp, Homo sapiens
gccagagaacacaaa

SEQ ID NO: 239475 - DNA, 15 bp, Homo sapiens
ggccagagaacacaa

SEQ ID NO: 239476 - DNA, 15 bp, Homo sapiens
aggccagagaacaca

SEQ ID NO: 239477 - DNA, 15 bp, Homo sapiens
gaggccagagaacac

SEQ ID NO: 239478 - DNA, 15 bp, Homo sapiens
agaggccagagaaca

SEQ ID NO: 239479 - DNA, 15 bp, Homo sapiens
tagaggccagagaac

SEQ ID NO: 239480 - DNA, 15 bp, Homo sapiens
gtagaggccagagaa

SEQ ID NO: 239481 - DNA, 15 bp, Homo sapiens
tgtagaggccagaga

SEQ ID NO: 239482 - DNA, 15 bp, Homo sapiens
atgtagaggccagag

SEQ ID NO: 239483 - DNA, 15 bp, Homo sapiens
aatgtagaggccaga

SEQ ID NO: 239484 - DNA, 15 bp, Homo sapiens
aaatgtagaggccag

SEQ ID NO: 239485 - DNA, 15 bp, Homo sapiens
taaatgtagaggcca

SEQ ID NO: 239486 - DNA, 15 bp, Homo sapiens
ataaatgtagaggcc

SEQ ID NO: 239487 - DNA, 15 bp, Homo sapiens
tataaatgtagaggc

SEQ ID NO: 239488 - DNA, 15 bp, Homo sapiens
ttataaatgtagagg

SEQ ID NO: 239489 - DNA, 15 bp, Homo sapiens
attataaatgtagag

SEQ ID NO: 239490 - DNA, 15 bp, Homo sapiens
aattataaatgtaga

SEQ ID NO: 239491 - DNA, 15 bp, Homo sapiens
aaattataaatgtag

SEQ ID NO: 239492 - DNA, 15 bp, Homo sapiens
gaaattataaatgta

SEQ ID NO: 239493 - DNA, 15 bp, Homo sapiens
agaaattataaatgt

SEQ ID NO: 239494 - DNA, 15 bp, Homo sapiens
gagaaattataaatg

SEQ ID NO: 239495 - DNA, 15 bp, Homo sapiens
tgagaaattataaat

SEQ ID NO: 239496 - DNA, 15 bp, Homo sapiens
atgagaaattataaa

SEQ ID NO: 239497 - DNA, 15 bp, Homo sapiens
tatgagaaattataa

SEQ ID NO: 239498 - DNA, 15 bp, Homo sapiens
ttatgagaaattata

SEQ ID NO: 239499 - DNA, 15 bp, Homo sapiens
attatgagaaattat

SEQ ID NO: 239500 - DNA, 15 bp, Homo sapiens
aattatgagaaatta

SEQ ID NO: 239501 - DNA, 15 bp, Homo sapiens
gaattatgagaaatt

SEQ ID NO: 239502 - DNA, 15 bp, Homo sapiens
agaattatgagaaat

SEQ ID NO: 239503 - DNA, 15 bp, Homo sapiens
aagaattatgagaaa

SEQ ID NO: 239504 - DNA, 15 bp, Homo sapiens
aaagaattatgagaa

SEQ ID NO: 239505 - DNA, 15 bp, Homo sapiens
taaagaattatgaga

SEQ ID NO: 239506 - DNA, 15 bp, Homo sapiens
ataaagaattatgag

SEQ ID NO: 239507 - DNA, 15 bp, Homo sapiens
gataaagaattatga

SEQ ID NO: 239508 - DNA, 15 bp, Homo sapiens
agataaagaattatg

SEQ ID NO: 239509 - DNA, 15 bp, Homo sapiens
tagataaagaattat

SEQ ID NO: 239510 - DNA, 15 bp, Homo sapiens
ttagataaagaatta

SEQ ID NO: 239511 - DNA, 15 bp, Homo sapiens
cttagataaagaatt

SEQ ID NO: 239512 - DNA, 15 bp, Homo sapiens
acttagataaagaat

SEQ ID NO: 239513 - DNA, 15 bp, Homo sapiens
tacttagataaagaa

SEQ ID NO: 239514 - DNA, 15 bp, Homo sapiens
atacttagataaaga

SEQ ID NO: 239515 - DNA, 15 bp, Homo sapiens
aatacttagataaag

SEQ ID NO: 239516 - DNA, 15 bp, Homo sapiens
aaatacttagataaa

SEQ ID NO: 239517 - DNA, 15 bp, Homo sapiens
gaaatacttagataa

SEQ ID NO: 239518 - DNA, 15 bp, Homo sapiens
agaaatacttagata

SEQ ID NO: 239519 - DNA, 15 bp, Homo sapiens
aagaaatacttagat

SEQ ID NO: 239520 - DNA, 15 bp, Homo sapiens
gaagaaatacttaga

SEQ ID NO: 239521 - DNA, 15 bp, Homo sapiens
ggaagaaatacttag

SEQ ID NO: 239522 - DNA, 15 bp, Homo sapiens
gggaagaaatactta

SEQ ID NO: 239523 - DNA, 15 bp, Homo sapiens
agggaagaaatactt

SEQ ID NO: 239524 - DNA, 15 bp, Homo sapiens
tagggaagaaatact

SEQ ID NO: 239525 - DNA, 15 bp, Homo sapiens
gtagggaagaaatac

SEQ ID NO: 239526 - DNA, 15 bp, Homo sapiens
ggtagggaagaaata

SEQ ID NO: 239527 - DNA, 15 bp, Homo sapiens
aggtagggaagaaat

SEQ ID NO: 239528 - DNA, 15 bp, Homo sapiens
taggtagggaagaaa

SEQ ID NO: 239529 - DNA, 15 bp, Homo sapiens
gtaggtagggaagaa

SEQ ID NO: 239530 - DNA, 15 bp, Homo sapiens
agtaggtagggaaga

SEQ ID NO: 239531 - DNA, 15 bp, Homo sapiens
cagtaggtagggaag

SEQ ID NO: 239532 - DNA, 15 bp, Homo sapiens
tcagtaggtagggaa

SEQ ID NO: 239533 - DNA, 15 bp, Homo sapiens
ttcagtaggtaggga

SEQ ID NO: 239534 - DNA, 15 bp, Homo sapiens
cttcagtaggtaggg

SEQ ID NO: 239535 - DNA, 15 bp, Homo sapiens
tcttcagtaggtagg

SEQ ID NO: 239536 - DNA, 15 bp, Homo sapiens
ttcttcagtaggtag

SEQ ID NO: 239537 - DNA, 15 bp, Homo sapiens
tttcttcagtaggta

SEQ ID NO: 239538 - DNA, 15 bp, Homo sapiens
ttttcttcagtaggt

SEQ ID NO: 239539 - DNA, 15 bp, Homo sapiens
gttttcttcagtagg

SEQ ID NO: 239540 - DNA, 15 bp, Homo sapiens
agttttcttcagtag

SEQ ID NO: 239541 - DNA, 15 bp, Homo sapiens
gagttttcttcagta

SEQ ID NO: 239542 - DNA, 15 bp, Homo sapiens
tgagttttcttcagt

SEQ ID NO: 239543 - DNA, 15 bp, Homo sapiens
ttgagttttcttcag

SEQ ID NO: 239544 - DNA, 15 bp, Homo sapiens
cttgagttttcttca

SEQ ID NO: 239545 - DNA, 15 bp, Homo sapiens
acttgagttttcttc

SEQ ID NO: 239546 - DNA, 15 bp, Homo sapiens
aacttgagttttctt

SEQ ID NO: 239547 - DNA, 15 bp, Homo sapiens
aaacttgagttttct

SEQ ID NO: 239548 - DNA, 15 bp, Homo sapiens
aaaacttgagttttc

SEQ ID NO: 239549 - DNA, 15 bp, Homo sapiens
gaaaacttgagtttt

SEQ ID NO: 239550 - DNA, 15 bp, Homo sapiens
agaaaacttgagttt

SEQ ID NO: 239551 - DNA, 15 bp, Homo sapiens
aagaaaacttgagtt

SEQ ID NO: 239552 - DNA, 15 bp, Homo sapiens
gaagaaaacttgagt

SEQ ID NO: 239553 - DNA, 15 bp, Homo sapiens
ggaagaaaacttgag

SEQ ID NO: 239554 - DNA, 15 bp, Homo sapiens
tggaagaaaacttga

SEQ ID NO: 239555 - DNA, 15 bp, Homo sapiens
gtggaagaaaacttg

SEQ ID NO: 239556 - DNA, 15 bp, Homo sapiens
ggtggaagaaaactt

SEQ ID NO: 239557 - DNA, 15 bp, Homo sapiens
aggtggaagaaaact

SEQ ID NO: 239558 - DNA, 15 bp, Homo sapiens
aaggtggaagaaaac

SEQ ID NO: 239559 - DNA, 15 bp, Homo sapiens
taaggtggaagaaaa

SEQ ID NO: 239560 - DNA, 15 bp, Homo sapiens
ttaaggtggaagaaa

SEQ ID NO: 239561 - DNA, 15 bp, Homo sapiens
attaaggtggaagaa

SEQ ID NO: 239562 - DNA, 15 bp, Homo sapiens
cattaaggtggaaga

SEQ ID NO: 239563 - DNA, 15 bp, Homo sapiens
tcattaaggtggaag

SEQ ID NO: 239564 - DNA, 15 bp, Homo sapiens
atcattaaggtggaa

SEQ ID NO: 239565 - DNA, 15 bp, Homo sapiens
aatcattaaggtgga

SEQ ID NO: 239566 - DNA, 15 bp, Homo sapiens
taatcattaaggtgg

SEQ ID NO: 239567 - DNA, 15 bp, Homo sapiens
ataatcattaaggtg

SEQ ID NO: 239568 - DNA, 15 bp, Homo sapiens
cataatcattaaggt

SEQ ID NO: 239569 - DNA, 15 bp, Homo sapiens
gcataatcattaagg

SEQ ID NO: 239570 - DNA, 15 bp, Homo sapiens
agcataatcattaag

SEQ ID NO: 239571 - DNA, 15 bp, Homo sapiens
cagcataatcattaa

SEQ ID NO: 239572 - DNA, 15 bp, Homo sapiens
acagcataatcatta

SEQ ID NO: 239573 - DNA, 15 bp, Homo sapiens
cacagcataatcatt

SEQ ID NO: 239574 - DNA, 15 bp, Homo sapiens
acacagcataatcat

SEQ ID NO: 239575 - DNA, 15 bp, Homo sapiens
gacacagcataatca

SEQ ID NO: 239576 - DNA, 15 bp, Homo sapiens
agacacagcataatc

SEQ ID NO: 239577 - DNA, 15 bp, Homo sapiens
cagacacagcataat

SEQ ID NO: 239578 - DNA, 15 bp, Homo sapiens
acagacacagcataa

SEQ ID NO: 239579 - DNA, 15 bp, Homo sapiens
cacagacacagcata

SEQ ID NO: 239580 - DNA, 15 bp, Homo sapiens
tcacagacacagcat

SEQ ID NO: 239581 - DNA, 15 bp, Homo sapiens
ctcacagacacagca

SEQ ID NO: 239582 - DNA, 15 bp, Homo sapiens
actcacagacacagc

SEQ ID NO: 239583 - DNA, 15 bp, Homo sapiens
aactcacagacacag

SEQ ID NO: 239584 - DNA, 15 bp, Homo sapiens
aaactcacagacaca

SEQ ID NO: 239585 - DNA, 15 bp, Homo sapiens
aaaactcacagacac

SEQ ID NO: 239586 - DNA, 15 bp, Homo sapiens
gaaaactcacagaca

SEQ ID NO: 239587 - DNA, 15 bp, Homo sapiens
agaaaactcacagac

SEQ ID NO: 239588 - DNA, 15 bp, Homo sapiens
aagaaaactcacaga

SEQ ID NO: 239589 - DNA, 15 bp, Homo sapiens
gaagaaaactcacag

SEQ ID NO: 239590 - DNA, 15 bp, Homo sapiens
tgaagaaaactcaca

SEQ ID NO: 239591 - DNA, 15 bp, Homo sapiens
atgaagaaaactcac

SEQ ID NO: 239592 - DNA, 15 bp, Homo sapiens
catgaagaaaactca

SEQ ID NO: 239593 - DNA, 15 bp, Homo sapiens
tcatgaagaaaactc

SEQ ID NO: 239594 - DNA, 15 bp, Homo sapiens
gtcatgaagaaaact

SEQ ID NO: 239595 - DNA, 15 bp, Homo sapiens
agtcatgaagaaaac

SEQ ID NO: 239596 - DNA, 15 bp, Homo sapiens
gagtcatgaagaaaa

SEQ ID NO: 239597 - DNA, 15 bp, Homo sapiens
agagtcatgaagaaa

SEQ ID NO: 239598 - DNA, 15 bp, Homo sapiens
aagagtcatgaagaa

SEQ ID NO: 239599 - DNA, 15 bp, Homo sapiens
aaagagtcatgaaga

SEQ ID NO: 239600 - DNA, 15 bp, Homo sapiens
taaagagtcatgaag

SEQ ID NO: 239601 - DNA, 15 bp, Homo sapiens
gtaaagagtcatgaa

SEQ ID NO: 239602 - DNA, 15 bp, Homo sapiens
tgtaaagagtcatga

SEQ ID NO: 239603 - DNA, 15 bp, Homo sapiens
ctgtaaagagtcatg

SEQ ID NO: 239604 - DNA, 15 bp, Homo sapiens
actgtaaagagtcat

SEQ ID NO: 239605 - DNA, 15 bp, Homo sapiens
tactgtaaagagtca

SEQ ID NO: 239606 - DNA, 15 bp, Homo sapiens
gtactgtaaagagtc

SEQ ID NO: 239607 - DNA, 15 bp, Homo sapiens
tgtactgtaaagagt

SEQ ID NO: 239608 - DNA, 15 bp, Homo sapiens
ttgtactgtaaagag

SEQ ID NO: 239609 - DNA, 15 bp, Homo sapiens
cttgtactgtaaaga

SEQ ID NO: 239610 - DNA, 15 bp, Homo sapiens
acttgtactgtaaag

SEQ ID NO: 239611 - DNA, 15 bp, Homo sapiens
aacttgtactgtaaa

SEQ ID NO: 239612 - DNA, 15 bp, Homo sapiens
aaacttgtactgtaa

SEQ ID NO: 239613 - DNA, 15 bp, Homo sapiens
aaaacttgtactgta

SEQ ID NO: 239614 - DNA, 15 bp, Homo sapiens
aaaaacttgtactgt

SEQ ID NO: 239615 - DNA, 15 bp, Homo sapiens
aaaaaacttgtactg

SEQ ID NO: 239616 - DNA, 15 bp, Homo sapiens
caaaaaacttgtact

SEQ ID NO: 239617 - DNA, 15 bp, Homo sapiens
acaaaaaacttgtac

SEQ ID NO: 239618 - DNA, 15 bp, Homo sapiens
aacaaaaaacttgta

SEQ ID NO: 239619 - DNA, 15 bp, Homo sapiens
aaacaaaaaacttgt

SEQ ID NO: 239620 - DNA, 15 bp, Homo sapiens
aaaacaaaaaacttg

SEQ ID NO: 239621 - DNA, 15 bp, Homo sapiens
aaaaacaaaaaactt

SEQ ID NO: 239622 - DNA, 15 bp, Homo sapiens
caaaaacaaaaaact

SEQ ID NO: 239623 - DNA, 15 bp, Homo sapiens
acaaaaacaaaaaac

SEQ ID NO: 239624 - DNA, 15 bp, Homo sapiens
aaaaaacaaaaacaa

SEQ ID NO: 239625 - DNA, 15 bp, Homo sapiens
aaaaaaacaaaaaca

SEQ ID NO: 239626 - DNA, 15 bp, Homo sapiens
taaaaaaacaaaaac

SEQ ID NO: 239627 - DNA, 15 bp, Homo sapiens
ttaaaaaaacaaaaa

SEQ ID NO: 239628 - DNA, 15 bp, Homo sapiens
attaaaaaaacaaaa

SEQ ID NO: 239629 - DNA, 15 bp, Homo sapiens
cattaaaaaaacaaa

SEQ ID NO: 239630 - DNA, 15 bp, Homo sapiens
ccattaaaaaaacaa

SEQ ID NO: 239631 - DNA, 15 bp, Homo sapiens
accattaaaaaaaca

SEQ ID NO: 239632 - DNA, 15 bp, Homo sapiens
gaccattaaaaaaac

SEQ ID NO: 239633 - DNA, 15 bp, Homo sapiens
tgaccattaaaaaaa

SEQ ID NO: 239634 - DNA, 15 bp, Homo sapiens
ctgaccattaaaaaa

SEQ ID NO: 239635 - DNA, 15 bp, Homo sapiens
tctgaccattaaaaa

SEQ ID NO: 239636 - DNA, 15 bp, Homo sapiens
atctgaccattaaaa

SEQ ID NO: 239637 - DNA, 15 bp, Homo sapiens
catctgaccattaaa

SEQ ID NO: 239638 - DNA, 15 bp, Homo sapiens
ccatctgaccattaa

SEQ ID NO: 239639 - DNA, 15 bp, Homo sapiens
tccatctgaccatta

SEQ ID NO: 239640 - DNA, 15 bp, Homo sapiens
atccatctgaccatt

SEQ ID NO: 239641 - DNA, 15 bp, Homo sapiens
tatccatctgaccat

SEQ ID NO: 239642 - DNA, 15 bp, Homo sapiens
ctatccatctgacca

SEQ ID NO: 239643 - DNA, 15 bp, Homo sapiens
tctatccatctgacc

SEQ ID NO: 239644 - DNA, 15 bp, Homo sapiens
ttctatccatctgac

SEQ ID NO: 239645 - DNA, 15 bp, Homo sapiens
gttctatccatctga

SEQ ID NO: 239646 - DNA, 15 bp, Homo sapiens
tgttctatccatctg

SEQ ID NO: 239647 - DNA, 15 bp, Homo sapiens
ttgttctatccatct

SEQ ID NO: 239648 - DNA, 15 bp, Homo sapiens
gttgttctatccatc

SEQ ID NO: 239649 - DNA, 15 bp, Homo sapiens
tgttgttctatccat

SEQ ID NO: 239650 - DNA, 15 bp, Homo sapiens
gtgttgttctatcca

SEQ ID NO: 239651 - DNA, 15 bp, Homo sapiens
tgtgttgttctatcc

SEQ ID NO: 239652 - DNA, 15 bp, Homo sapiens
ctgtgttgttctatc

SEQ ID NO: 239653 - DNA, 15 bp, Homo sapiens
cctgtgttgttctat

SEQ ID NO: 239654 - DNA, 15 bp, Homo sapiens
acctgtgttgttcta

SEQ ID NO: 239655 - DNA, 15 bp, Homo sapiens
aacctgtgttgttct

SEQ ID NO: 239656 - DNA, 15 bp, Homo sapiens
aaacctgtgttgttc

SEQ ID NO: 239657 - DNA, 15 bp, Homo sapiens
aaaacctgtgttgtt

SEQ ID NO: 239658 - DNA, 15 bp, Homo sapiens
caaaacctgtgttgt

SEQ ID NO: 239659 - DNA, 15 bp, Homo sapiens
acaaaacctgtgttg

SEQ ID NO: 239660 - DNA, 15 bp, Homo sapiens
aacaaaacctgtgtt

SEQ ID NO: 239661 - DNA, 15 bp, Homo sapiens
aaacaaaacctgtgt

SEQ ID NO: 239662 - DNA, 15 bp, Homo sapiens
caaacaaaacctgtg

SEQ ID NO: 239663 - DNA, 15 bp, Homo sapiens
acaaacaaaacctgt

SEQ ID NO: 239664 - DNA, 15 bp, Homo sapiens
aacaaacaaaacctg

SEQ ID NO: 239665 - DNA, 15 bp, Homo sapiens
aaacaaacaaaacct

SEQ ID NO: 239666 - DNA, 15 bp, Homo sapiens
aaaacaaacaaaacc

SEQ ID NO: 239667 - DNA, 15 bp, Homo sapiens
caaaacaaacaaaac

SEQ ID NO: 239668 - DNA, 15 bp, Homo sapiens
acaaaacaaacaaaa

SEQ ID NO: 239669 - DNA, 15 bp, Homo sapiens
aacaaaacaaacaaa

SEQ ID NO: 239670 - DNA, 15 bp, Homo sapiens
aaacaaaacaaacaa

SEQ ID NO: 239671 - DNA, 15 bp, Homo sapiens
aaaacaaaacaaaca

SEQ ID NO: 239672 - DNA, 15 bp, Homo sapiens
taaaacaaaacaaac

SEQ ID NO: 239673 - DNA, 15 bp, Homo sapiens
ttaaaacaaaacaaa

SEQ ID NO: 239674 - DNA, 15 bp, Homo sapiens
gttaaaacaaaacaa

SEQ ID NO: 239675 - DNA, 15 bp, Homo sapiens
agttaaaacaaaaca

SEQ ID NO: 239676 - DNA, 15 bp, Homo sapiens
aagttaaaacaaaac

SEQ ID NO: 239677 - DNA, 15 bp, Homo sapiens
aaagttaaaacaaaa

SEQ ID NO: 239678 - DNA, 15 bp, Homo sapiens
aaaagttaaaacaaa

SEQ ID NO: 239679 - DNA, 15 bp, Homo sapiens
taaaagttaaaacaa

SEQ ID NO: 239680 - DNA, 15 bp, Homo sapiens
ttaaaagttaaaaca

SEQ ID NO: 239681 - DNA, 15 bp, Homo sapiens
tttaaaagttaaaac

SEQ ID NO: 239682 - DNA, 15 bp, Homo sapiens
ttttaaaagttaaaa

SEQ ID NO: 239683 - DNA, 15 bp, Homo sapiens
tttttaaaagttaaa

SEQ ID NO: 239684 - DNA, 15 bp, Homo sapiens
ttttttaaaagttaa

SEQ ID NO: 239685 - DNA, 15 bp, Homo sapiens
tttttttaaaagtta

SEQ ID NO: 239686 - DNA, 15 bp, Homo sapiens
atttttttaaaagtt

SEQ ID NO: 239687 - DNA, 15 bp, Homo sapiens
aatttttttaaaagt

SEQ ID NO: 239688 - DNA, 15 bp, Homo sapiens
taatttttttaaaag

SEQ ID NO: 239689 - DNA, 15 bp, Homo sapiens
ataatttttttaaaa

SEQ ID NO: 239690 - DNA, 15 bp, Homo sapiens
tataatttttttaaa

SEQ ID NO: 239691 - DNA, 15 bp, Homo sapiens
ttataatttttttaa

SEQ ID NO: 239692 - DNA, 15 bp, Homo sapiens
attataattttttta

SEQ ID NO: 239693 - DNA, 15 bp, Homo sapiens
tattataattttttt

SEQ ID NO: 239694 - DNA, 15 bp, Homo sapiens
ctattataatttttt

SEQ ID NO: 239695 - DNA, 15 bp, Homo sapiens
tctattataattttt

SEQ ID NO: 239696 - DNA, 15 bp, Homo sapiens
atctattataatttt

SEQ ID NO: 239697 - DNA, 15 bp, Homo sapiens
tatctattataattt

SEQ ID NO: 239698 - DNA, 15 bp, Homo sapiens
ttatctattataatt

SEQ ID NO: 239699 - DNA, 15 bp, Homo sapiens
tttatctattataat

SEQ ID NO: 239700 - DNA, 15 bp, Homo sapiens
ctttatctattataa

SEQ ID NO: 239701 - DNA, 15 bp, Homo sapiens
cctttatctattata

SEQ ID NO: 239702 - DNA, 15 bp, Homo sapiens
ccctttatctattat

SEQ ID NO: 239703 - DNA, 15 bp, Homo sapiens
accctttatctatta

SEQ ID NO: 239704 - DNA, 15 bp, Homo sapiens
gaccctttatctatt

SEQ ID NO: 239705 - DNA, 15 bp, Homo sapiens
agaccctttatctat

SEQ ID NO: 239706 - DNA, 15 bp, Homo sapiens
gagaccctttatcta

SEQ ID NO: 239707 - DNA, 15 bp, Homo sapiens
tgagaccctttatct

SEQ ID NO: 239708 - DNA, 15 bp, Homo sapiens
gtgagaccctttatc

SEQ ID NO: 239709 - DNA, 15 bp, Homo sapiens
agtgagaccctttat

SEQ ID NO: 239710 - DNA, 15 bp, Homo sapiens
tagtgagacccttta

SEQ ID NO: 239711 - DNA, 15 bp, Homo sapiens
gtagtgagacccttt

SEQ ID NO: 239712 - DNA, 15 bp, Homo sapiens
cgtagtgagaccctt

SEQ ID NO: 239713 - DNA, 15 bp, Homo sapiens
acgtagtgagaccct

SEQ ID NO: 239714 - DNA, 15 bp, Homo sapiens
aacgtagtgagaccc

SEQ ID NO: 239715 - DNA, 15 bp, Homo sapiens
caacgtagtgagacc

SEQ ID NO: 239716 - DNA, 15 bp, Homo sapiens
acaacgtagtgagac

SEQ ID NO: 239717 - DNA, 15 bp, Homo sapiens
gacaacgtagtgaga

SEQ ID NO: 239718 - DNA, 15 bp, Homo sapiens
ggacaacgtagtgag

SEQ ID NO: 239719 - DNA, 15 bp, Homo sapiens
tggacaacgtagtga

SEQ ID NO: 239720 - DNA, 15 bp, Homo sapiens
ctggacaacgtagtg

SEQ ID NO: 239721 - DNA, 15 bp, Homo sapiens
cctggacaacgtagt

SEQ ID NO: 239722 - DNA, 15 bp, Homo sapiens
gcctggacaacgtag

SEQ ID NO: 239723 - DNA, 15 bp, Homo sapiens
agcctggacaacgta

SEQ ID NO: 239724 - DNA, 15 bp, Homo sapiens
cagcctggacaacgt

SEQ ID NO: 239725 - DNA, 15 bp, Homo sapiens
tcagcctggacaacg

SEQ ID NO: 239726 - DNA, 15 bp, Homo sapiens
atcagcctggacaac

SEQ ID NO: 239727 - DNA, 15 bp, Homo sapiens
gatcagcctggacaa

SEQ ID NO: 239728 - DNA, 15 bp, Homo sapiens
agatcagcctggaca

SEQ ID NO: 239729 - DNA, 15 bp, Homo sapiens
gagatcagcctggac

SEQ ID NO: 239730 - DNA, 15 bp, Homo sapiens
tgagatcagcctgga

SEQ ID NO: 239731 - DNA, 15 bp, Homo sapiens
atgagatcagcctgg

SEQ ID NO: 239732 - DNA, 15 bp, Homo sapiens
tatgagatcagcctg

SEQ ID NO: 239733 - DNA, 15 bp, Homo sapiens
gtatgagatcagcct

SEQ ID NO: 239734 - DNA, 15 bp, Homo sapiens
agtatgagatcagcc

SEQ ID NO: 239735 - DNA, 15 bp, Homo sapiens
gagtatgagatcagc

SEQ ID NO: 239736 - DNA, 15 bp, Homo sapiens
ggagtatgagatcag

SEQ ID NO: 239737 - DNA, 15 bp, Homo sapiens
aggagtatgagatca

SEQ ID NO: 239738 - DNA, 15 bp, Homo sapiens
caggagtatgagatc

SEQ ID NO: 239739 - DNA, 15 bp, Homo sapiens
ccaggagtatgagat

SEQ ID NO: 239740 - DNA, 15 bp, Homo sapiens
cccaggagtatgaga

SEQ ID NO: 239741 - DNA, 15 bp, Homo sapiens
gcccaggagtatgag

SEQ ID NO: 239742 - DNA, 15 bp, Homo sapiens
agcccaggagtatga

SEQ ID NO: 239743 - DNA, 15 bp, Homo sapiens
gagcccaggagtatg

SEQ ID NO: 239744 - DNA, 15 bp, Homo sapiens
tgagcccaggagtat

SEQ ID NO: 239745 - DNA, 15 bp, Homo sapiens
ttgagcccaggagta

SEQ ID NO: 239746 - DNA, 15 bp, Homo sapiens
ttgcttgagcccagg

SEQ ID NO: 239747 - DNA, 15 bp, Homo sapiens
attgcttgagcccag

SEQ ID NO: 239748 - DNA, 15 bp, Homo sapiens
gattgcttgagccca

SEQ ID NO: 239749 - DNA, 15 bp, Homo sapiens
ggattgcttgagccc

SEQ ID NO: 239750 - DNA, 15 bp, Homo sapiens
tggattgcttgagcc

SEQ ID NO: 239751 - DNA, 15 bp, Homo sapiens
gtggattgcttgagc

SEQ ID NO: 239752 - DNA, 15 bp, Homo sapiens
ggtggattgcttgag

SEQ ID NO: 239753 - DNA, 15 bp, Homo sapiens
gggtggattgcttga

SEQ ID NO: 239754 - DNA, 15 bp, Homo sapiens
tgggtggattgcttg

SEQ ID NO: 239755 - DNA, 15 bp, Homo sapiens
gtgggtggattgctt

SEQ ID NO: 239756 - DNA, 15 bp, Homo sapiens
ggtgggtggattgct

SEQ ID NO: 239757 - DNA, 15 bp, Homo sapiens
aggtgggtggattgc

SEQ ID NO: 239758 - DNA, 15 bp, Homo sapiens
gaggtgggtggattg

SEQ ID NO: 239759 - DNA, 15 bp, Homo sapiens
agaggtgggtggatt

SEQ ID NO: 239760 - DNA, 15 bp, Homo sapiens
cagaggtgggtggat

SEQ ID NO: 239761 - DNA, 15 bp, Homo sapiens
gcagaggtgggtgga

SEQ ID NO: 239762 - DNA, 15 bp, Homo sapiens
ggcagaggtgggtgg

SEQ ID NO: 239763 - DNA, 15 bp, Homo sapiens
aggcagaggtgggtg

SEQ ID NO: 239764 - DNA, 15 bp, Homo sapiens
gaggcagaggtgggt

SEQ ID NO: 239765 - DNA, 15 bp, Homo sapiens
actgtaatcccagca

SEQ ID NO: 239766 - DNA, 15 bp, Homo sapiens
gactgtaatcccagc

SEQ ID NO: 239767 - DNA, 15 bp, Homo sapiens
tgactgtaatcccag

SEQ ID NO: 239768 - DNA, 15 bp, Homo sapiens
atgactgtaatccca

SEQ ID NO: 239769 - DNA, 15 bp, Homo sapiens
catgactgtaatccc

SEQ ID NO: 239770 - DNA, 15 bp, Homo sapiens
tcatgactgtaatcc

SEQ ID NO: 239771 - DNA, 15 bp, Homo sapiens
ctcatgactgtaatc

SEQ ID NO: 239772 - DNA, 15 bp, Homo sapiens
gctcatgactgtaat

SEQ ID NO: 239773 - DNA, 15 bp, Homo sapiens
ggctcatgactgtaa

SEQ ID NO: 239774 - DNA, 15 bp, Homo sapiens
tggctcatgactgta

SEQ ID NO: 239775 - DNA, 15 bp, Homo sapiens
ttggctcatgactgt

SEQ ID NO: 239776 - DNA, 15 bp, Homo sapiens
gttggctcatgactg

SEQ ID NO: 239777 - DNA, 15 bp, Homo sapiens
tgttggctcatgact

SEQ ID NO: 239778 - DNA, 15 bp, Homo sapiens
atgttggctcatgac

SEQ ID NO: 239779 - DNA, 15 bp, Homo sapiens
catgttggctcatga

SEQ ID NO: 239780 - DNA, 15 bp, Homo sapiens
gcatgttggctcatg

SEQ ID NO: 239781 - DNA, 15 bp, Homo sapiens
ggcatgttggctcat

SEQ ID NO: 239782 - DNA, 15 bp, Homo sapiens
aggcatgttggctca

SEQ ID NO: 239783 - DNA, 15 bp, Homo sapiens
caggcatgttggctc

SEQ ID NO: 239784 - DNA, 15 bp, Homo sapiens
ccaggcatgttggct

SEQ ID NO: 239785 - DNA, 15 bp, Homo sapiens
cccaggcatgttggc

SEQ ID NO: 239786 - DNA, 15 bp, Homo sapiens
gcccaggcatgttgg

SEQ ID NO: 239787 - DNA, 15 bp, Homo sapiens
tgcccaggcatgttg

SEQ ID NO: 239788 - DNA, 15 bp, Homo sapiens
ctgcccaggcatgtt

SEQ ID NO: 239789 - DNA, 15 bp, Homo sapiens
actgcccaggcatgt

SEQ ID NO: 239790 - DNA, 15 bp, Homo sapiens
tactgcccaggcatg

SEQ ID NO: 239791 - DNA, 15 bp, Homo sapiens
gtactgcccaggcat

SEQ ID NO: 239792 - DNA, 15 bp, Homo sapiens
tgtactgcccaggca

SEQ ID NO: 239793 - DNA, 15 bp, Homo sapiens
ctgtactgcccaggc

SEQ ID NO: 239794 - DNA, 15 bp, Homo sapiens
cctgtactgcccagg

SEQ ID NO: 239795 - DNA, 15 bp, Homo sapiens
acctgtactgcccag

SEQ ID NO: 239796 - DNA, 15 bp, Homo sapiens
aacctgtactgccca

SEQ ID NO: 239797 - DNA, 15 bp, Homo sapiens
aaacctgtactgccc

SEQ ID NO: 239798 - DNA, 15 bp, Homo sapiens
aaaacctgtactgcc

SEQ ID NO: 239799 - DNA, 15 bp, Homo sapiens
aaaaacctgtactgc

SEQ ID NO: 239800 - DNA, 15 bp, Homo sapiens
aaaaaacctgtactg

SEQ ID NO: 239801 - DNA, 15 bp, Homo sapiens
aaaaaaacctgtact

SEQ ID NO: 239802 - DNA, 15 bp, Homo sapiens
aaaaaaaacctgtac

SEQ ID NO: 239803 - DNA, 15 bp, Homo sapiens
caaaaaaaacctgta

SEQ ID NO: 239804 - DNA, 15 bp, Homo sapiens
tcaaaaaaaacctgt

SEQ ID NO: 239805 - DNA, 15 bp, Homo sapiens
ctcaaaaaaaacctg

SEQ ID NO: 239806 - DNA, 15 bp, Homo sapiens
tctcaaaaaaaacct

SEQ ID NO: 239807 - DNA, 15 bp, Homo sapiens
gtctcaaaaaaaacc

SEQ ID NO: 239808 - DNA, 15 bp, Homo sapiens
cgtctcaaaaaaaac

SEQ ID NO: 239809 - DNA, 15 bp, Homo sapiens
aactccgtctcaaaa

SEQ ID NO: 239810 - DNA, 15 bp, Homo sapiens
aaactccgtctcaaa

SEQ ID NO: 239811 - DNA, 15 bp, Homo sapiens
aaaactccgtctcaa

SEQ ID NO: 239812 - DNA, 15 bp, Homo sapiens
caaaactccgtctca

SEQ ID NO: 239813 - DNA, 15 bp, Homo sapiens
acaaaactccgtctc

SEQ ID NO: 239814 - DNA, 15 bp, Homo sapiens
aacaaaactccgtct

SEQ ID NO: 239815 - DNA, 15 bp, Homo sapiens
gaacaaaactccgtc

SEQ ID NO: 239816 - DNA, 15 bp, Homo sapiens
agaacaaaactccgt

SEQ ID NO: 239817 - DNA, 15 bp, Homo sapiens
aagaacaaaactccg

SEQ ID NO: 239818 - DNA, 15 bp, Homo sapiens
caagaacaaaactcc

SEQ ID NO: 239819 - DNA, 15 bp, Homo sapiens
acaagaacaaaactc

SEQ ID NO: 239820 - DNA, 15 bp, Homo sapiens
aacaagaacaaaact

SEQ ID NO: 239821 - DNA, 15 bp, Homo sapiens
caacaagaacaaaac

SEQ ID NO: 239822 - DNA, 15 bp, Homo sapiens
gcaacaagaacaaaa

SEQ ID NO: 239823 - DNA, 15 bp, Homo sapiens
ggcaacaagaacaaa

SEQ ID NO: 239824 - DNA, 15 bp, Homo sapiens
cggcaacaagaacaa

SEQ ID NO: 239825 - DNA, 15 bp, Homo sapiens
tcggcaacaagaaca

SEQ ID NO: 239826 - DNA, 15 bp, Homo sapiens
ctcggcaacaagaac

SEQ ID NO: 239827 - DNA, 15 bp, Homo sapiens
cctcggcaacaagaa

SEQ ID NO: 239828 - DNA, 15 bp, Homo sapiens
gcctcggcaacaaga

SEQ ID NO: 239829 - DNA, 15 bp, Homo sapiens
agcctcggcaacaag

SEQ ID NO: 239830 - DNA, 15 bp, Homo sapiens
cagcctcggcaacaa

SEQ ID NO: 239831 - DNA, 15 bp, Homo sapiens
ccagcctcggcaaca

SEQ ID NO: 239832 - DNA, 15 bp, Homo sapiens
tccagcctcggcaac

SEQ ID NO: 239833 - DNA, 15 bp, Homo sapiens
ctccagcctcggcaa

SEQ ID NO: 239834 - DNA, 15 bp, Homo sapiens
actccagcctcggca

SEQ ID NO: 239835 - DNA, 15 bp, Homo sapiens
cactccagcctcggc

SEQ ID NO: 239836 - DNA, 15 bp, Homo sapiens
gcactccagcctcgg

SEQ ID NO: 239837 - DNA, 15 bp, Homo sapiens
tgcactccagcctcg

SEQ ID NO: 239838 - DNA, 15 bp, Homo sapiens
ttgcactccagcctc

SEQ ID NO: 239839 - DNA, 15 bp, Homo sapiens
gtgccattgcactcc

SEQ ID NO: 239840 - DNA, 15 bp, Homo sapiens
tgtgccattgcactc

SEQ ID NO: 239841 - DNA, 15 bp, Homo sapiens
ttgtgccattgcact

SEQ ID NO: 239842 - DNA, 15 bp, Homo sapiens
attgtgccattgcac

SEQ ID NO: 239843 - DNA, 15 bp, Homo sapiens
gattgtgccattgca

SEQ ID NO: 239844 - DNA, 15 bp, Homo sapiens
agattgtgccattgc

SEQ ID NO: 239845 - DNA, 15 bp, Homo sapiens
aagattgtgccattg

SEQ ID NO: 239846 - DNA, 15 bp, Homo sapiens
caagattgtgccatt

SEQ ID NO: 239847 - DNA, 15 bp, Homo sapiens
ccaagattgtgccat

SEQ ID NO: 239848 - DNA, 15 bp, Homo sapiens
gccaagattgtgcca

SEQ ID NO: 239849 - DNA, 15 bp, Homo sapiens
agccaagattgtgcc

SEQ ID NO: 239850 - DNA, 15 bp, Homo sapiens
gagccaagattgtgc

SEQ ID NO: 239851 - DNA, 15 bp, Homo sapiens
tgagccaagattgtg

SEQ ID NO: 239852 - DNA, 15 bp, Homo sapiens
gtgagccaagattgt

SEQ ID NO: 239853 - DNA, 15 bp, Homo sapiens
ggtgagccaagattg

SEQ ID NO: 239854 - DNA, 15 bp, Homo sapiens
tggtgagccaagatt

SEQ ID NO: 239855 - DNA, 15 bp, Homo sapiens
gtggtgagccaagat

SEQ ID NO: 239856 - DNA, 15 bp, Homo sapiens
tgtggtgagccaaga

SEQ ID NO: 239857 - DNA, 15 bp, Homo sapiens
ttgtggtgagccaag

SEQ ID NO: 239858 - DNA, 15 bp, Homo sapiens
tttgtggtgagccaa

SEQ ID NO: 239859 - DNA, 15 bp, Homo sapiens
ctttgtggtgagcca

SEQ ID NO: 239860 - DNA, 15 bp, Homo sapiens
actttgtggtgagcc

SEQ ID NO: 239861 - DNA, 15 bp, Homo sapiens
gactttgtggtgagc

SEQ ID NO: 239862 - DNA, 15 bp, Homo sapiens
agactttgtggtgag

SEQ ID NO: 239863 - DNA, 15 bp, Homo sapiens
cagactttgtggtga

SEQ ID NO: 239864 - DNA, 15 bp, Homo sapiens
gcagactttgtggtg

SEQ ID NO: 239865 - DNA, 15 bp, Homo sapiens
ggcagactttgtggt

SEQ ID NO: 239866 - DNA, 15 bp, Homo sapiens
aggcagactttgtgg

SEQ ID NO: 239867 - DNA, 15 bp, Homo sapiens
gaggcagactttgtg

SEQ ID NO: 239868 - DNA, 15 bp, Homo sapiens
ggaggcagactttgt

SEQ ID NO: 239869 - DNA, 15 bp, Homo sapiens
gggaggcagactttg

SEQ ID NO: 239870 - DNA, 15 bp, Homo sapiens
tgggaggcagacttt

SEQ ID NO: 239871 - DNA, 15 bp, Homo sapiens
ctgggaggcagactt

SEQ ID NO: 239872 - DNA, 15 bp, Homo sapiens
cctgggaggcagact

SEQ ID NO: 239873 - DNA, 15 bp, Homo sapiens
acctgggaggcagac

SEQ ID NO: 239874 - DNA, 15 bp, Homo sapiens
acatgcctgtaatcc

SEQ ID NO: 239875 - DNA, 15 bp, Homo sapiens
cacatgcctgtaatc

SEQ ID NO: 239876 - DNA, 15 bp, Homo sapiens
gcacatgcctgtaat

SEQ ID NO: 239877 - DNA, 15 bp, Homo sapiens
ggcacatgcctgtaa

SEQ ID NO: 239878 - DNA, 15 bp, Homo sapiens
tggcacatgcctgta

SEQ ID NO: 239879 - DNA, 15 bp, Homo sapiens
gtggcacatgcctgt

SEQ ID NO: 239880 - DNA, 15 bp, Homo sapiens
ggtggcacatgcctg

SEQ ID NO: 239881 - DNA, 15 bp, Homo sapiens
tggtggcacatgcct

SEQ ID NO: 239882 - DNA, 15 bp, Homo sapiens
gtggtggcacatgcc

SEQ ID NO: 239883 - DNA, 15 bp, Homo sapiens
cgtggtggcacatgc

SEQ ID NO: 239884 - DNA, 15 bp, Homo sapiens
gcgtggtggcacatg

SEQ ID NO: 239885 - DNA, 15 bp, Homo sapiens
ggcgtggtggcacat

SEQ ID NO: 239886 - DNA, 15 bp, Homo sapiens
gggcgtggtggcaca

SEQ ID NO: 239887 - DNA, 15 bp, Homo sapiens
tgggcgtggtggcac

SEQ ID NO: 239888 - DNA, 15 bp, Homo sapiens
ctgggcgtggtggca

SEQ ID NO: 239889 - DNA, 15 bp, Homo sapiens
gctgggcgtggtggc

SEQ ID NO: 239890 - DNA, 15 bp, Homo sapiens
agctgggcgtggtgg

SEQ ID NO: 239891 - DNA, 15 bp, Homo sapiens
tagctgggcgtggtg

SEQ ID NO: 239892 - DNA, 15 bp, Homo sapiens
ttagctgggcgtggt

SEQ ID NO: 239893 - DNA, 15 bp, Homo sapiens
attagctgggcgtgg

SEQ ID NO: 239894 - DNA, 15 bp, Homo sapiens
aattagctgggcgtg

SEQ ID NO: 239895 - DNA, 15 bp, Homo sapiens
aaattagctgggcgt

SEQ ID NO: 239896 - DNA, 15 bp, Homo sapiens
aaaattagctgggcg

SEQ ID NO: 239897 - DNA, 15 bp, Homo sapiens
caaaattagctgggc

SEQ ID NO: 239898 - DNA, 15 bp, Homo sapiens
acaaaattagctggg

SEQ ID NO: 239899 - DNA, 15 bp, Homo sapiens
tacaaaattagctgg

SEQ ID NO: 239900 - DNA, 15 bp, Homo sapiens
atacaaaattagctg

SEQ ID NO: 239901 - DNA, 15 bp, Homo sapiens
aatacaaaattagct

SEQ ID NO: 239902 - DNA, 15 bp, Homo sapiens
aaccagcctggccaa

SEQ ID NO: 239903 - DNA, 15 bp, Homo sapiens
aaaccagcctggcca

SEQ ID NO: 239904 - DNA, 15 bp, Homo sapiens
gaaaccagcctggcc

SEQ ID NO: 239905 - DNA, 15 bp, Homo sapiens
cgaaaccagcctggc

SEQ ID NO: 239906 - DNA, 15 bp, Homo sapiens
tcgaaaccagcctgg

SEQ ID NO: 239907 - DNA, 15 bp, Homo sapiens
ttcgaaaccagcctg

SEQ ID NO: 239908 - DNA, 15 bp, Homo sapiens
gttcgaaaccagcct

SEQ ID NO: 239909 - DNA, 15 bp, Homo sapiens
agttcgaaaccagcc

SEQ ID NO: 239910 - DNA, 15 bp, Homo sapiens
cagttcgaaaccagc

SEQ ID NO: 239911 - DNA, 15 bp, Homo sapiens
gcagttcgaaaccag

SEQ ID NO: 239912 - DNA, 15 bp, Homo sapiens
agcagttcgaaacca

SEQ ID NO: 239913 - DNA, 15 bp, Homo sapiens
cagcagttcgaaacc

SEQ ID NO: 239914 - DNA, 15 bp, Homo sapiens
tcagcagttcgaaac

SEQ ID NO: 239915 - DNA, 15 bp, Homo sapiens
gtcagcagttcgaaa

SEQ ID NO: 239916 - DNA, 15 bp, Homo sapiens
ggtcagcagttcgaa

SEQ ID NO: 239917 - DNA, 15 bp, Homo sapiens
aggtcagcagttcga

SEQ ID NO: 239918 - DNA, 15 bp, Homo sapiens
gaggtcagcagttcg

SEQ ID NO: 239919 - DNA, 15 bp, Homo sapiens
tgaggtcagcagttc

SEQ ID NO: 239920 - DNA, 15 bp, Homo sapiens
ctgaggtcagcagtt

SEQ ID NO: 239921 - DNA, 15 bp, Homo sapiens
cctgaggtcagcagt

SEQ ID NO: 239922 - DNA, 15 bp, Homo sapiens
acctgaggtcagcag

SEQ ID NO: 239923 - DNA, 15 bp, Homo sapiens
cacctgaggtcagca

SEQ ID NO: 239924 - DNA, 15 bp, Homo sapiens
tcacctgaggtcagc

SEQ ID NO: 239925 - DNA, 15 bp, Homo sapiens
gtgggcagatcacct

SEQ ID NO: 239926 - DNA, 15 bp, Homo sapiens
ggtgggcagatcacc

SEQ ID NO: 239927 - DNA, 15 bp, Homo sapiens
aggtgggcagatcac

SEQ ID NO: 239928 - DNA, 15 bp, Homo sapiens
gaggtgggcagatca

SEQ ID NO: 239929 - DNA, 15 bp, Homo sapiens
cgaggtgggcagatc

SEQ ID NO: 239930 - DNA, 15 bp, Homo sapiens
ccgaggtgggcagat

SEQ ID NO: 239931 - DNA, 15 bp, Homo sapiens
gccgaggtgggcaga

SEQ ID NO: 239932 - DNA, 15 bp, Homo sapiens
ggccgaggtgggcag

SEQ ID NO: 239933 - DNA, 15 bp, Homo sapiens
aggccgaggtgggca

SEQ ID NO: 239934 - DNA, 15 bp, Homo sapiens
gaggccgaggtgggc

SEQ ID NO: 239935 - DNA, 15 bp, Homo sapiens
ggaggccgaggtggg

SEQ ID NO: 239936 - DNA, 15 bp, Homo sapiens
gggaggccgaggtgg

SEQ ID NO: 239937 - DNA, 15 bp, Homo sapiens
tgggaggccgaggtg

SEQ ID NO: 239938 - DNA, 15 bp, Homo sapiens
ttgggaggccgaggt

SEQ ID NO: 239939 - DNA, 15 bp, Homo sapiens
atggtggctcatgcc

SEQ ID NO: 239940 - DNA, 15 bp, Homo sapiens
catggtggctcatgc

SEQ ID NO: 239941 - DNA, 15 bp, Homo sapiens
gcatggtggctcatg

SEQ ID NO: 239942 - DNA, 15 bp, Homo sapiens
ggcatggtggctcat

SEQ ID NO: 239943 - DNA, 15 bp, Homo sapiens
agctgggcatggtgg

SEQ ID NO: 239944 - DNA, 15 bp, Homo sapiens
cagctgggcatggtg

SEQ ID NO: 239945 - DNA, 15 bp, Homo sapiens
acagctgggcatggt

SEQ ID NO: 239946 - DNA, 15 bp, Homo sapiens
tacagctgggcatgg

SEQ ID NO: 239947 - DNA, 15 bp, Homo sapiens
ctacagctgggcatg

SEQ ID NO: 239948 - DNA, 15 bp, Homo sapiens
actacagctgggcat

SEQ ID NO: 239949 - DNA, 15 bp, Homo sapiens
tactacagctgggca

SEQ ID NO: 239950 - DNA, 15 bp, Homo sapiens
gtactacagctgggc

SEQ ID NO: 239951 - DNA, 15 bp, Homo sapiens
tgtactacagctggg

SEQ ID NO: 239952 - DNA, 15 bp, Homo sapiens
ctgtactacagctgg

SEQ ID NO: 239953 - DNA, 15 bp, Homo sapiens
cctgtactacagctg

SEQ ID NO: 239954 - DNA, 15 bp, Homo sapiens
acctgtactacagct

SEQ ID NO: 239955 - DNA, 15 bp, Homo sapiens
aacctgtactacagc

SEQ ID NO: 239956 - DNA, 15 bp, Homo sapiens
aaacctgtactacag

SEQ ID NO: 239957 - DNA, 15 bp, Homo sapiens
aaaacctgtactaca

SEQ ID NO: 239958 - DNA, 15 bp, Homo sapiens
taaaacctgtactac

SEQ ID NO: 239959 - DNA, 15 bp, Homo sapiens
ttaaaacctgtacta

SEQ ID NO: 239960 - DNA, 15 bp, Homo sapiens
attaaaacctgtact

SEQ ID NO: 239961 - DNA, 15 bp, Homo sapiens
tattaaaacctgtac

SEQ ID NO: 239962 - DNA, 15 bp, Homo sapiens
atattaaaacctgta

SEQ ID NO: 239963 - DNA, 15 bp, Homo sapiens
catattaaaacctgt

SEQ ID NO: 239964 - DNA, 15 bp, Homo sapiens
gcatattaaaacctg

SEQ ID NO: 239965 - DNA, 15 bp, Homo sapiens
agcatattaaaacct

SEQ ID NO: 239966 - DNA, 15 bp, Homo sapiens
tagcatattaaaacc

SEQ ID NO: 239967 - DNA, 15 bp, Homo sapiens
ttagcatattaaaac

SEQ ID NO: 239968 - DNA, 15 bp, Homo sapiens
tttagcatattaaaa

SEQ ID NO: 239969 - DNA, 15 bp, Homo sapiens
atttagcatattaaa

SEQ ID NO: 239970 - DNA, 15 bp, Homo sapiens
tatttagcatattaa

SEQ ID NO: 239971 - DNA, 15 bp, Homo sapiens
gtatttagcatatta

SEQ ID NO: 239972 - DNA, 15 bp, Homo sapiens
agtatttagcatatt

SEQ ID NO: 239973 - DNA, 15 bp, Homo sapiens
gagtatttagcatat

SEQ ID NO: 239974 - DNA, 15 bp, Homo sapiens
agagtatttagcata

SEQ ID NO: 239975 - DNA, 15 bp, Homo sapiens
aagagtatttagcat

SEQ ID NO: 239976 - DNA, 15 bp, Homo sapiens
gaagagtatttagca

SEQ ID NO: 239977 - DNA, 15 bp, Homo sapiens
ggaagagtatttagc

SEQ ID NO: 239978 - DNA, 15 bp, Homo sapiens
aggaagagtatttag

SEQ ID NO: 239979 - DNA, 15 bp, Homo sapiens
aaggaagagtattta

SEQ ID NO: 239980 - DNA, 15 bp, Homo sapiens
aaaggaagagtattt

SEQ ID NO: 239981 - DNA, 15 bp, Homo sapiens
gaaaggaagagtatt

SEQ ID NO: 239982 - DNA, 15 bp, Homo sapiens
agaaaggaagagtat

SEQ ID NO: 239983 - DNA, 15 bp, Homo sapiens
aagaaaggaagagta

SEQ ID NO: 239984 - DNA, 15 bp, Homo sapiens
aaagaaaggaagagt

SEQ ID NO: 239985 - DNA, 15 bp, Homo sapiens
taaagaaaggaagag

SEQ ID NO: 239986 - DNA, 15 bp, Homo sapiens
ataaagaaaggaaga

SEQ ID NO: 239987 - DNA, 15 bp, Homo sapiens
aataaagaaaggaag

SEQ ID NO: 239988 - DNA, 15 bp, Homo sapiens
taataaagaaaggaa

SEQ ID NO: 239989 - DNA, 15 bp, Homo sapiens
ttaataaagaaagga

SEQ ID NO: 239990 - DNA, 15 bp, Homo sapiens
attaataaagaaagg

SEQ ID NO: 239991 - DNA, 15 bp, Homo sapiens
cattaataaagaaag

SEQ ID NO: 239992 - DNA, 15 bp, Homo sapiens
acattaataaagaaa

SEQ ID NO: 239993 - DNA, 15 bp, Homo sapiens
cacattaataaagaa

SEQ ID NO: 239994 - DNA, 15 bp, Homo sapiens
gcacattaataaaga

SEQ ID NO: 239995 - DNA, 15 bp, Homo sapiens
tgcacattaataaag

SEQ ID NO: 239996 - DNA, 15 bp, Homo sapiens
atgcacattaataaa

SEQ ID NO: 239997 - DNA, 15 bp, Homo sapiens
catgcacattaataa

SEQ ID NO: 239998 - DNA, 15 bp, Homo sapiens
ccatgcacattaata

SEQ ID NO: 239999 - DNA, 15 bp, Homo sapiens
tccatgcacattaat

SEQ ID NO: 240000 - DNA, 15 bp, Homo sapiens
ttccatgcacattaa

SEQ ID NO: 240001 - DNA, 15 bp, Homo sapiens
cttccatgcacatta

SEQ ID NO: 240002 - DNA, 15 bp, Homo sapiens
acttccatgcacatt

SEQ ID NO: 240003 - DNA, 15 bp, Homo sapiens
aacttccatgcacat

SEQ ID NO: 240004 - DNA, 15 bp, Homo sapiens
gaacttccatgcaca

SEQ ID NO: 240005 - DNA, 15 bp, Homo sapiens
agaacttccatgcac

SEQ ID NO: 240006 - DNA, 15 bp, Homo sapiens
tagaacttccatgca

SEQ ID NO: 240007 - DNA, 15 bp, Homo sapiens
ttagaacttccatgc

SEQ ID NO: 240008 - DNA, 15 bp, Homo sapiens
attagaacttccatg

SEQ ID NO: 240009 - DNA, 15 bp, Homo sapiens
tattagaacttccat

SEQ ID NO: 240010 - DNA, 15 bp, Homo sapiens
atattagaacttcca

SEQ ID NO: 240011 - DNA, 15 bp, Homo sapiens
aatattagaacttcc

SEQ ID NO: 240012 - DNA, 15 bp, Homo sapiens
aaatattagaacttc

SEQ ID NO: 240013 - DNA, 15 bp, Homo sapiens
aaaatattagaactt

SEQ ID NO: 240014 - DNA, 15 bp, Homo sapiens
aaaaatattagaact

SEQ ID NO: 240015 - DNA, 15 bp, Homo sapiens
aaaaaatattagaac

SEQ ID NO: 240016 - DNA, 15 bp, Homo sapiens
aaaaaaatattagaa

SEQ ID NO: 240017 - DNA, 15 bp, Homo sapiens
gaaaaaaatattaga

SEQ ID NO: 240018 - DNA, 15 bp, Homo sapiens
ggaaaaaaatattag

SEQ ID NO: 240019 - DNA, 15 bp, Homo sapiens
gggaaaaaaatatta

SEQ ID NO: 240020 - DNA, 15 bp, Homo sapiens
tgggaaaaaaatatt

SEQ ID NO: 240021 - DNA, 15 bp, Homo sapiens
atgggaaaaaaatat

SEQ ID NO: 240022 - DNA, 15 bp, Homo sapiens
tatgggaaaaaaata

SEQ ID NO: 240023 - DNA, 15 bp, Homo sapiens
gtatgggaaaaaaat

SEQ ID NO: 240024 - DNA, 15 bp, Homo sapiens
ggtatgggaaaaaaa

SEQ ID NO: 240025 - DNA, 15 bp, Homo sapiens
gggtatgggaaaaaa

SEQ ID NO: 240026 - DNA, 15 bp, Homo sapiens
ggggtatgggaaaaa

SEQ ID NO: 240027 - DNA, 15 bp, Homo sapiens
tggggtatgggaaaa

SEQ ID NO: 240028 - DNA, 15 bp, Homo sapiens
ctggggtatgggaaa

SEQ ID NO: 240029 - DNA, 15 bp, Homo sapiens
tctggggtatgggaa

SEQ ID NO: 240030 - DNA, 15 bp, Homo sapiens
ctctggggtatggga

SEQ ID NO: 240031 - DNA, 15 bp, Homo sapiens
tctctggggtatggg

SEQ ID NO: 240032 - DNA, 15 bp, Homo sapiens
ctctctggggtatgg

SEQ ID NO: 240033 - DNA, 15 bp, Homo sapiens
actctctggggtatg

SEQ ID NO: 240034 - DNA, 15 bp, Homo sapiens
gactctctggggtat

SEQ ID NO: 240035 - DNA, 15 bp, Homo sapiens
ggactctctggggta

SEQ ID NO: 240036 - DNA, 15 bp, Homo sapiens
tggactctctggggt

SEQ ID NO: 240037 - DNA, 15 bp, Homo sapiens
atggactctctgggg

SEQ ID NO: 240038 - DNA, 15 bp, Homo sapiens
tatggactctctggg

SEQ ID NO: 240039 - DNA, 15 bp, Homo sapiens
atatggactctctgg

SEQ ID NO: 240040 - DNA, 15 bp, Homo sapiens
aatatggactctctg

SEQ ID NO: 240041 - DNA, 15 bp, Homo sapiens
aaatatggactctct

SEQ ID NO: 240042 - DNA, 15 bp, Homo sapiens
aaaatatggactctc

SEQ ID NO: 240043 - DNA, 15 bp, Homo sapiens
caaaatatggactct

SEQ ID NO: 240044 - DNA, 15 bp, Homo sapiens
ccaaaatatggactc

SEQ ID NO: 240045 - DNA, 15 bp, Homo sapiens
tccaaaatatggact

SEQ ID NO: 240046 - DNA, 15 bp, Homo sapiens
ttccaaaatatggac

SEQ ID NO: 240047 - DNA, 15 bp, Homo sapiens
attccaaaatatgga

SEQ ID NO: 240048 - DNA, 15 bp, Homo sapiens
gattccaaaatatgg

SEQ ID NO: 240049 - DNA, 15 bp, Homo sapiens
tgattccaaaatatg

SEQ ID NO: 240050 - DNA, 15 bp, Homo sapiens
ttgattccaaaatat

SEQ ID NO: 240051 - DNA, 15 bp, Homo sapiens
gttgattccaaaata

SEQ ID NO: 240052 - DNA, 15 bp, Homo sapiens
tgttgattccaaaat

SEQ ID NO: 240053 - DNA, 15 bp, Homo sapiens
ttgttgattccaaaa

SEQ ID NO: 240054 - DNA, 15 bp, Homo sapiens
gttgttgattccaaa

SEQ ID NO: 240055 - DNA, 15 bp, Homo sapiens
tgttgttgattccaa

SEQ ID NO: 240056 - DNA, 15 bp, Homo sapiens
gtgttgttgattcca

SEQ ID NO: 240057 - DNA, 15 bp, Homo sapiens
agtgttgttgattcc

SEQ ID NO: 240058 - DNA, 15 bp, Homo sapiens
tagtgttgttgattc

SEQ ID NO: 240059 - DNA, 15 bp, Homo sapiens
ctagtgttgttgatt

SEQ ID NO: 240060 - DNA, 15 bp, Homo sapiens
gctagtgttgttgat

SEQ ID NO: 240061 - DNA, 15 bp, Homo sapiens
ggctagtgttgttga

SEQ ID NO: 240062 - DNA, 15 bp, Homo sapiens
aggctagtgttgttg

SEQ ID NO: 240063 - DNA, 15 bp, Homo sapiens
aaggctagtgttgtt

SEQ ID NO: 240064 - DNA, 15 bp, Homo sapiens
aaaggctagtgttgt

SEQ ID NO: 240065 - DNA, 15 bp, Homo sapiens
caaaggctagtgttg

SEQ ID NO: 240066 - DNA, 15 bp, Homo sapiens
acaaaggctagtgtt

SEQ ID NO: 240067 - DNA, 15 bp, Homo sapiens
aacaaaggctagtgt

SEQ ID NO: 240068 - DNA, 15 bp, Homo sapiens
caacaaaggctagtg

SEQ ID NO: 240069 - DNA, 15 bp, Homo sapiens
tcaacaaaggctagt

SEQ ID NO: 240070 - DNA, 15 bp, Homo sapiens
gtcaacaaaggctag

SEQ ID NO: 240071 - DNA, 15 bp, Homo sapiens
tgtcaacaaaggcta

SEQ ID NO: 240072 - DNA, 15 bp, Homo sapiens
ttgtcaacaaaggct

SEQ ID NO: 240073 - DNA, 15 bp, Homo sapiens
cttgtcaacaaaggc

SEQ ID NO: 240074 - DNA, 15 bp, Homo sapiens
acttgtcaacaaagg

SEQ ID NO: 240075 - DNA, 15 bp, Homo sapiens
cacttgtcaacaaag

SEQ ID NO: 240076 - DNA, 15 bp, Homo sapiens
acacttgtcaacaaa

SEQ ID NO: 240077 - DNA, 15 bp, Homo sapiens
gacacttgtcaacaa

SEQ ID NO: 240078 - DNA, 15 bp, Homo sapiens
agacacttgtcaaca

SEQ ID NO: 240079 - DNA, 15 bp, Homo sapiens
gagacacttgtcaac

SEQ ID NO: 240080 - DNA, 15 bp, Homo sapiens
agagacacttgtcaa

SEQ ID NO: 240081 - DNA, 15 bp, Homo sapiens
gagagacacttgtca

SEQ ID NO: 240082 - DNA, 15 bp, Homo sapiens
agagagacacttgtc

SEQ ID NO: 240083 - DNA, 15 bp, Homo sapiens
aagagagacacttgt

SEQ ID NO: 240084 - DNA, 15 bp, Homo sapiens
caagagagacacttg

SEQ ID NO: 240085 - DNA, 15 bp, Homo sapiens
ccaagagagacactt

SEQ ID NO: 240086 - DNA, 15 bp, Homo sapiens
cccaagagagacact

SEQ ID NO: 240087 - DNA, 15 bp, Homo sapiens
acccaagagagacac

SEQ ID NO: 240088 - DNA, 15 bp, Homo sapiens
aacccaagagagaca

SEQ ID NO: 240089 - DNA, 15 bp, Homo sapiens
gaacccaagagagac

SEQ ID NO: 240090 - DNA, 15 bp, Homo sapiens
ggaacccaagagaga

SEQ ID NO: 240091 - DNA, 15 bp, Homo sapiens
aggaacccaagagag

SEQ ID NO: 240092 - DNA, 15 bp, Homo sapiens
aaggaacccaagaga

SEQ ID NO: 240093 - DNA, 15 bp, Homo sapiens
gaaggaacccaagag

SEQ ID NO: 240094 - DNA, 15 bp, Homo sapiens
agaaggaacccaaga

SEQ ID NO: 240095 - DNA, 15 bp, Homo sapiens
aagaaggaacccaag

SEQ ID NO: 240096 - DNA, 15 bp, Homo sapiens
aaagaaggaacccaa

SEQ ID NO: 240097 - DNA, 15 bp, Homo sapiens
caaagaaggaaccca

SEQ ID NO: 240098 - DNA, 15 bp, Homo sapiens
acaaagaaggaaccc

SEQ ID NO: 240099 - DNA, 15 bp, Homo sapiens
cacaaagaaggaacc

SEQ ID NO: 240100 - DNA, 15 bp, Homo sapiens
acacaaagaaggaac

SEQ ID NO: 240101 - DNA, 15 bp, Homo sapiens
gacacaaagaaggaa

SEQ ID NO: 240102 - DNA, 15 bp, Homo sapiens
ggacacaaagaagga

SEQ ID NO: 240103 - DNA, 15 bp, Homo sapiens
aggacacaaagaagg

SEQ ID NO: 240104 - DNA, 15 bp, Homo sapiens
gaggacacaaagaag

SEQ ID NO: 240105 - DNA, 15 bp, Homo sapiens
ggaggacacaaagaa

SEQ ID NO: 240106 - DNA, 15 bp, Homo sapiens
tggaggacacaaaga

SEQ ID NO: 240107 - DNA, 15 bp, Homo sapiens
gtggaggacacaaag

SEQ ID NO: 240108 - DNA, 15 bp, Homo sapiens
agtggaggacacaaa

SEQ ID NO: 240109 - DNA, 15 bp, Homo sapiens
cagtggaggacacaa

SEQ ID NO: 240110 - DNA, 15 bp, Homo sapiens
tcagtggaggacaca

SEQ ID NO: 240111 - DNA, 15 bp, Homo sapiens
ttcagtggaggacac

SEQ ID NO: 240112 - DNA, 15 bp, Homo sapiens
attcagtggaggaca

SEQ ID NO: 240113 - DNA, 15 bp, Homo sapiens
aattcagtggaggac

SEQ ID NO: 240114 - DNA, 15 bp, Homo sapiens
aaattcagtggagga

SEQ ID NO: 240115 - DNA, 15 bp, Homo sapiens
aaaattcagtggagg

SEQ ID NO: 240116 - DNA, 15 bp, Homo sapiens
caaaattcagtggag

SEQ ID NO: 240117 - DNA, 15 bp, Homo sapiens
ccaaaattcagtgga

SEQ ID NO: 240118 - DNA, 15 bp, Homo sapiens
cccaaaattcagtgg

SEQ ID NO: 240119 - DNA, 15 bp, Homo sapiens
ccccaaaattcagtg

SEQ ID NO: 240120 - DNA, 15 bp, Homo sapiens
accccaaaattcagt

SEQ ID NO: 240121 - DNA, 15 bp, Homo sapiens
aaccccaaaattcag

SEQ ID NO: 240122 - DNA, 15 bp, Homo sapiens
gaaccccaaaattca

SEQ ID NO: 240123 - DNA, 15 bp, Homo sapiens
tgaaccccaaaattc

SEQ ID NO: 240124 - DNA, 15 bp, Homo sapiens
atgaaccccaaaatt

SEQ ID NO: 240125 - DNA, 15 bp, Homo sapiens
tatgaaccccaaaat

SEQ ID NO: 240126 - DNA, 15 bp, Homo sapiens
ttatgaaccccaaaa

SEQ ID NO: 240127 - DNA, 15 bp, Homo sapiens
tttatgaaccccaaa

SEQ ID NO: 240128 - DNA, 15 bp, Homo sapiens
ttttatgaaccccaa

SEQ ID NO: 240129 - DNA, 15 bp, Homo sapiens
attttatgaacccca

SEQ ID NO: 240130 - DNA, 15 bp, Homo sapiens
aattttatgaacccc

SEQ ID NO: 240131 - DNA, 15 bp, Homo sapiens
aaattttatgaaccc

SEQ ID NO: 240132 - DNA, 15 bp, Homo sapiens
gaaattttatgaacc

SEQ ID NO: 240133 - DNA, 15 bp, Homo sapiens
tgaaattttatgaac

SEQ ID NO: 240134 - DNA, 15 bp, Homo sapiens
atgaaattttatgaa

SEQ ID NO: 240135 - DNA, 15 bp, Homo sapiens
aatgaaattttatga

SEQ ID NO: 240136 - DNA, 15 bp, Homo sapiens
aaatgaaattttatg

SEQ ID NO: 240137 - DNA, 15 bp, Homo sapiens
caaatgaaattttat

SEQ ID NO: 240138 - DNA, 15 bp, Homo sapiens
acaaatgaaatttta

SEQ ID NO: 240139 - DNA, 15 bp, Homo sapiens
aacaaatgaaatttt

SEQ ID NO: 240140 - DNA, 15 bp, Homo sapiens
caacaaatgaaattt

SEQ ID NO: 240141 - DNA, 15 bp, Homo sapiens
acaacaaatgaaatt

SEQ ID NO: 240142 - DNA, 15 bp, Homo sapiens
cacaacaaatgaaat

SEQ ID NO: 240143 - DNA, 15 bp, Homo sapiens
gcacaacaaatgaaa

SEQ ID NO: 240144 - DNA, 15 bp, Homo sapiens
agcacaacaaatgaa

SEQ ID NO: 240145 - DNA, 15 bp, Homo sapiens
aagcacaacaaatga

SEQ ID NO: 240146 - DNA, 15 bp, Homo sapiens
caagcacaacaaatg

SEQ ID NO: 240147 - DNA, 15 bp, Homo sapiens
gcaagcacaacaaat

SEQ ID NO: 240148 - DNA, 15 bp, Homo sapiens
agcaagcacaacaaa

SEQ ID NO: 240149 - DNA, 15 bp, Homo sapiens
aagcaagcacaacaa

SEQ ID NO: 240150 - DNA, 15 bp, Homo sapiens
taagcaagcacaaca

SEQ ID NO: 240151 - DNA, 15 bp, Homo sapiens
ttaagcaagcacaac

SEQ ID NO: 240152 - DNA, 15 bp, Homo sapiens
attaagcaagcacaa

SEQ ID NO: 240153 - DNA, 15 bp, Homo sapiens
aattaagcaagcaca

SEQ ID NO: 240154 - DNA, 15 bp, Homo sapiens
gaattaagcaagcac

SEQ ID NO: 240155 - DNA, 15 bp, Homo sapiens
ggaattaagcaagca

SEQ ID NO: 240156 - DNA, 15 bp, Homo sapiens
gggaattaagcaagc

SEQ ID NO: 240157 - DNA, 15 bp, Homo sapiens
agggaattaagcaag

SEQ ID NO: 240158 - DNA, 15 bp, Homo sapiens
cagggaattaagcaa

SEQ ID NO: 240159 - DNA, 15 bp, Homo sapiens
ccagggaattaagca

SEQ ID NO: 240160 - DNA, 15 bp, Homo sapiens
cccagggaattaagc

SEQ ID NO: 240161 - DNA, 15 bp, Homo sapiens
tcccagggaattaag

SEQ ID NO: 240162 - DNA, 15 bp, Homo sapiens
ttcccagggaattaa

SEQ ID NO: 240163 - DNA, 15 bp, Homo sapiens
attcccagggaatta

SEQ ID NO: 240164 - DNA, 15 bp, Homo sapiens
gattcccagggaatt

SEQ ID NO: 240165 - DNA, 15 bp, Homo sapiens
tgattcccagggaat

SEQ ID NO: 240166 - DNA, 15 bp, Homo sapiens
ctgattcccagggaa

SEQ ID NO: 240167 - DNA, 15 bp, Homo sapiens
tctgattcccaggga

SEQ ID NO: 240168 - DNA, 15 bp, Homo sapiens
gtctgattcccaggg

SEQ ID NO: 240169 - DNA, 15 bp, Homo sapiens
agtctgattcccagg

SEQ ID NO: 240170 - DNA, 15 bp, Homo sapiens
cagtctgattcccag

SEQ ID NO: 240171 - DNA, 15 bp, Homo sapiens
acagtctgattccca

SEQ ID NO: 240172 - DNA, 15 bp, Homo sapiens
aacagtctgattccc

SEQ ID NO: 240173 - DNA, 15 bp, Homo sapiens
gaacagtctgattcc

SEQ ID NO: 240174 - DNA, 15 bp, Homo sapiens
ggaacagtctgattc

SEQ ID NO: 240175 - DNA, 15 bp, Homo sapiens
aggaacagtctgatt

SEQ ID NO: 240176 - DNA, 15 bp, Homo sapiens
caggaacagtctgat

SEQ ID NO: 240177 - DNA, 15 bp, Homo sapiens
tcaggaacagtctga

SEQ ID NO: 240178 - DNA, 15 bp, Homo sapiens
atcaggaacagtctg

SEQ ID NO: 240179 - DNA, 15 bp, Homo sapiens
gatcaggaacagtct

SEQ ID NO: 240180 - DNA, 15 bp, Homo sapiens
cgatcaggaacagtc

SEQ ID NO: 240181 - DNA, 15 bp, Homo sapiens
ccgatcaggaacagt

SEQ ID NO: 240182 - DNA, 15 bp, Homo sapiens
tccgatcaggaacag

SEQ ID NO: 240183 - DNA, 15 bp, Homo sapiens
atccgatcaggaaca

SEQ ID NO: 240184 - DNA, 15 bp, Homo sapiens
catccgatcaggaac

SEQ ID NO: 240185 - DNA, 15 bp, Homo sapiens
tcatccgatcaggaa

SEQ ID NO: 240186 - DNA, 15 bp, Homo sapiens
gtcatccgatcagga

SEQ ID NO: 240187 - DNA, 15 bp, Homo sapiens
tgtcatccgatcagg

SEQ ID NO: 240188 - DNA, 15 bp, Homo sapiens
atgtcatccgatcag

SEQ ID NO: 240189 - DNA, 15 bp, Homo sapiens
aatgtcatccgatca

SEQ ID NO: 240190 - DNA, 15 bp, Homo sapiens
aaatgtcatccgatc

SEQ ID NO: 240191 - DNA, 15 bp, Homo sapiens
gaaatgtcatccgat

SEQ ID NO: 240192 - DNA, 15 bp, Homo sapiens
agaaatgtcatccga

SEQ ID NO: 240193 - DNA, 15 bp, Homo sapiens
cagaaatgtcatccg

SEQ ID NO: 240194 - DNA, 15 bp, Homo sapiens
ccagaaatgtcatcc

SEQ ID NO: 240195 - DNA, 15 bp, Homo sapiens
accagaaatgtcatc

SEQ ID NO: 240196 - DNA, 15 bp, Homo sapiens
aaccagaaatgtcat

SEQ ID NO: 240197 - DNA, 15 bp, Homo sapiens
taaccagaaatgtca

SEQ ID NO: 240198 - DNA, 15 bp, Homo sapiens
ttaaccagaaatgtc

SEQ ID NO: 240199 - DNA, 15 bp, Homo sapiens
attaaccagaaatgt

SEQ ID NO: 240200 - DNA, 15 bp, Homo sapiens
aattaaccagaaatg

SEQ ID NO: 240201 - DNA, 15 bp, Homo sapiens
gaattaaccagaaat

SEQ ID NO: 240202 - DNA, 15 bp, Homo sapiens
agaattaaccagaaa

SEQ ID NO: 240203 - DNA, 15 bp, Homo sapiens
aagaattaaccagaa

SEQ ID NO: 240204 - DNA, 15 bp, Homo sapiens
aaagaattaaccaga

SEQ ID NO: 240205 - DNA, 15 bp, Homo sapiens
taaagaattaaccag

SEQ ID NO: 240206 - DNA, 15 bp, Homo sapiens
ctaaagaattaacca

SEQ ID NO: 240207 - DNA, 15 bp, Homo sapiens
actaaagaattaacc

SEQ ID NO: 240208 - DNA, 15 bp, Homo sapiens
aactaaagaattaac

SEQ ID NO: 240209 - DNA, 15 bp, Homo sapiens
caactaaagaattaa

SEQ ID NO: 240210 - DNA, 15 bp, Homo sapiens
ccaactaaagaatta

SEQ ID NO: 240211 - DNA, 15 bp, Homo sapiens
gccaactaaagaatt

SEQ ID NO: 240212 - DNA, 15 bp, Homo sapiens
tgccaactaaagaat

SEQ ID NO: 240213 - DNA, 15 bp, Homo sapiens
ctgccaactaaagaa

SEQ ID NO: 240214 - DNA, 15 bp, Homo sapiens
cctgccaactaaaga

SEQ ID NO: 240215 - DNA, 15 bp, Homo sapiens
tcctgccaactaaag

SEQ ID NO: 240216 - DNA, 15 bp, Homo sapiens
ttcctgccaactaaa

SEQ ID NO: 240217 - DNA, 15 bp, Homo sapiens
tttcctgccaactaa

SEQ ID NO: 240218 - DNA, 15 bp, Homo sapiens
atttcctgccaacta

SEQ ID NO: 240219 - DNA, 15 bp, Homo sapiens
tatttcctgccaact

SEQ ID NO: 240220 - DNA, 15 bp, Homo sapiens
ctatttcctgccaac

SEQ ID NO: 240221 - DNA, 15 bp, Homo sapiens
tctatttcctgccaa

SEQ ID NO: 240222 - DNA, 15 bp, Homo sapiens
gtctatttcctgcca

SEQ ID NO: 240223 - DNA, 15 bp, Homo sapiens
tgtctatttcctgcc

SEQ ID NO: 240224 - DNA, 15 bp, Homo sapiens
gtgtctatttcctgc

SEQ ID NO: 240225 - DNA, 15 bp, Homo sapiens
tgtgtctatttcctg

SEQ ID NO: 240226 - DNA, 15 bp, Homo sapiens
ctgtgtctatttcct

SEQ ID NO: 240227 - DNA, 15 bp, Homo sapiens
cctgtgtctatttcc

SEQ ID NO: 240228 - DNA, 15 bp, Homo sapiens
tcctgtgtctatttc

SEQ ID NO: 240229 - DNA, 15 bp, Homo sapiens
ttcctgtgtctattt

SEQ ID NO: 240230 - DNA, 15 bp, Homo sapiens
tttcctgtgtctatt

SEQ ID NO: 240231 - DNA, 15 bp, Homo sapiens
gtttcctgtgtctat

SEQ ID NO: 240232 - DNA, 15 bp, Homo sapiens
cgtttcctgtgtcta

SEQ ID NO: 240233 - DNA, 15 bp, Homo sapiens
acgtttcctgtgtct

SEQ ID NO: 240234 - DNA, 15 bp, Homo sapiens
cacgtttcctgtgtc

SEQ ID NO: 240235 - DNA, 15 bp, Homo sapiens
ccacgtttcctgtgt

SEQ ID NO: 240236 - DNA, 15 bp, Homo sapiens
accacgtttcctgtg

SEQ ID NO: 240237 - DNA, 15 bp, Homo sapiens
gaccacgtttcctgt

SEQ ID NO: 240238 - DNA, 15 bp, Homo sapiens
tgaccacgtttcctg

SEQ ID NO: 240239 - DNA, 15 bp, Homo sapiens
ctgaccacgtttcct

SEQ ID NO: 240240 - DNA, 15 bp, Homo sapiens
actgaccacgtttcc

SEQ ID NO: 240241 - DNA, 15 bp, Homo sapiens
aactgaccacgtttc

SEQ ID NO: 240242 - DNA, 15 bp, Homo sapiens
aaactgaccacgttt

SEQ ID NO: 240243 - DNA, 15 bp, Homo sapiens
gaaactgaccacgtt

SEQ ID NO: 240244 - DNA, 15 bp, Homo sapiens
agaaactgaccacgt

SEQ ID NO: 240245 - DNA, 15 bp, Homo sapiens
cagaaactgaccacg

SEQ ID NO: 240246 - DNA, 15 bp, Homo sapiens
tcagaaactgaccac

SEQ ID NO: 240247 - DNA, 15 bp, Homo sapiens
atcagaaactgacca

SEQ ID NO: 240248 - DNA, 15 bp, Homo sapiens
aatcagaaactgacc

SEQ ID NO: 240249 - DNA, 15 bp, Homo sapiens
gaatcagaaactgac

SEQ ID NO: 240250 - DNA, 15 bp, Homo sapiens
agaatcagaaactga

SEQ ID NO: 240251 - DNA, 15 bp, Homo sapiens
cagaatcagaaactg

SEQ ID NO: 240252 - DNA, 15 bp, Homo sapiens
ccagaatcagaaact

SEQ ID NO: 240253 - DNA, 15 bp, Homo sapiens
gccagaatcagaaac

SEQ ID NO: 240254 - DNA, 15 bp, Homo sapiens
cgccagaatcagaaa

SEQ ID NO: 240255 - DNA, 15 bp, Homo sapiens
acgccagaatcagaa

SEQ ID NO: 240256 - DNA, 15 bp, Homo sapiens
aacgccagaatcaga

SEQ ID NO: 240257 - DNA, 15 bp, Homo sapiens
caacgccagaatcag

SEQ ID NO: 240258 - DNA, 15 bp, Homo sapiens
tcaacgccagaatca

SEQ ID NO: 240259 - DNA, 15 bp, Homo sapiens
ctcaacgccagaatc

SEQ ID NO: 240260 - DNA, 15 bp, Homo sapiens
tctcaacgccagaat

SEQ ID NO: 240261 - DNA, 15 bp, Homo sapiens
ctctcaacgccagaa

SEQ ID NO: 240262 - DNA, 15 bp, Homo sapiens
tctctcaacgccaga

SEQ ID NO: 240263 - DNA, 15 bp, Homo sapiens
gtctctcaacgccag

SEQ ID NO: 240264 - DNA, 15 bp, Homo sapiens
ggtctctcaacgcca

SEQ ID NO: 240265 - DNA, 15 bp, Homo sapiens
gggtctctcaacgcc

SEQ ID NO: 240266 - DNA, 15 bp, Homo sapiens
agggtctctcaacgc

SEQ ID NO: 240267 - DNA, 15 bp, Homo sapiens
aagggtctctcaacg

SEQ ID NO: 240268 - DNA, 15 bp, Homo sapiens
aaagggtctctcaac

SEQ ID NO: 240269 - DNA, 15 bp, Homo sapiens
gaaagggtctctcaa

SEQ ID NO: 240270 - DNA, 15 bp, Homo sapiens
agaaagggtctctca

SEQ ID NO: 240271 - DNA, 15 bp, Homo sapiens
gagaaagggtctctc

SEQ ID NO: 240272 - DNA, 15 bp, Homo sapiens
ggagaaagggtctct

SEQ ID NO: 240273 - DNA, 15 bp, Homo sapiens
aggagaaagggtctc

SEQ ID NO: 240274 - DNA, 15 bp, Homo sapiens
aaggagaaagggtct

SEQ ID NO: 240275 - DNA, 15 bp, Homo sapiens
aaaggagaaagggtc

SEQ ID NO: 240276 - DNA, 15 bp, Homo sapiens
aaaaggagaaagggt

SEQ ID NO: 240277 - DNA, 15 bp, Homo sapiens
gaaaaggagaaaggg

SEQ ID NO: 240278 - DNA, 15 bp, Homo sapiens
ggaaaaggagaaagg

SEQ ID NO: 240279 - DNA, 15 bp, Homo sapiens
aggaaaaggagaaag

SEQ ID NO: 240280 - DNA, 15 bp, Homo sapiens
gaggaaaaggagaaa

SEQ ID NO: 240281 - DNA, 15 bp, Homo sapiens
agaggaaaaggagaa

SEQ ID NO: 240282 - DNA, 15 bp, Homo sapiens
gagaggaaaaggaga

SEQ ID NO: 240283 - DNA, 15 bp, Homo sapiens
agagaggaaaaggag

SEQ ID NO: 240284 - DNA, 15 bp, Homo sapiens
gagagaggaaaagga

SEQ ID NO: 240285 - DNA, 15 bp, Homo sapiens
agagagaggaaaagg

SEQ ID NO: 240286 - DNA, 15 bp, Homo sapiens
gagagagaggaaaag

SEQ ID NO: 240287 - DNA, 15 bp, Homo sapiens
tgagagagaggaaaa

SEQ ID NO: 240288 - DNA, 15 bp, Homo sapiens
ctgagagagaggaaa

SEQ ID NO: 240289 - DNA, 15 bp, Homo sapiens
actgagagagaggaa

SEQ ID NO: 240290 - DNA, 15 bp, Homo sapiens
cactgagagagagga

SEQ ID NO: 240291 - DNA, 15 bp, Homo sapiens
ccactgagagagagg

SEQ ID NO: 240292 - DNA, 15 bp, Homo sapiens
cccactgagagagag

SEQ ID NO: 240293 - DNA, 15 bp, Homo sapiens
gcccactgagagaga

SEQ ID NO: 240294 - DNA, 15 bp, Homo sapiens
cgcccactgagagag

SEQ ID NO: 240295 - DNA, 15 bp, Homo sapiens
tcgcccactgagaga

SEQ ID NO: 240296 - DNA, 15 bp, Homo sapiens
gtcgcccactgagag

SEQ ID NO: 240297 - DNA, 15 bp, Homo sapiens
tgtcgcccactgaga

SEQ ID NO: 240298 - DNA, 15 bp, Homo sapiens
ctgtcgcccactgag

SEQ ID NO: 240299 - DNA, 15 bp, Homo sapiens
tctgtcgcccactga

SEQ ID NO: 240300 - DNA, 15 bp, Homo sapiens
atctgtcgcccactg

SEQ ID NO: 240301 - DNA, 15 bp, Homo sapiens
catctgtcgcccact

SEQ ID NO: 240302 - DNA, 15 bp, Homo sapiens
gcatctgtcgcccac

SEQ ID NO: 240303 - DNA, 15 bp, Homo sapiens
cgcatctgtcgccca

SEQ ID NO: 240304 - DNA, 15 bp, Homo sapiens
tcgcatctgtcgccc

SEQ ID NO: 240305 - DNA, 15 bp, Homo sapiens
ttcgcatctgtcgcc

SEQ ID NO: 240306 - DNA, 15 bp, Homo sapiens
tttcgcatctgtcgc

SEQ ID NO: 240307 - DNA, 15 bp, Homo sapiens
ctttcgcatctgtcg

SEQ ID NO: 240308 - DNA, 15 bp, Homo sapiens
tctttcgcatctgtc

SEQ ID NO: 240309 - DNA, 15 bp, Homo sapiens
ttctttcgcatctgt

SEQ ID NO: 240310 - DNA, 15 bp, Homo sapiens
tttctttcgcatctg

SEQ ID NO: 240311 - DNA, 15 bp, Homo sapiens
gtttctttcgcatct

SEQ ID NO: 240312 - DNA, 15 bp, Homo sapiens
cgtttctttcgcatc

SEQ ID NO: 240313 - DNA, 15 bp, Homo sapiens
tcgtttctttcgcat

SEQ ID NO: 240314 - DNA, 15 bp, Homo sapiens
ctcgtttctttcgca

SEQ ID NO: 240315 - DNA, 15 bp, Homo sapiens
actcgtttctttcgc

SEQ ID NO: 240316 - DNA, 15 bp, Homo sapiens
aactcgtttctttcg

SEQ ID NO: 240317 - DNA, 15 bp, Homo sapiens
gaactcgtttctttc

SEQ ID NO: 240318 - DNA, 15 bp, Homo sapiens
ggaactcgtttcttt

SEQ ID NO: 240319 - DNA, 15 bp, Homo sapiens
tggaactcgtttctt

SEQ ID NO: 240320 - DNA, 15 bp, Homo sapiens
ctggaactcgtttct

SEQ ID NO: 240321 - DNA, 15 bp, Homo sapiens
actggaactcgtttc

SEQ ID NO: 240322 - DNA, 15 bp, Homo sapiens
cactggaactcgttt

SEQ ID NO: 240323 - DNA, 15 bp, Homo sapiens
gcactggaactcgtt

SEQ ID NO: 240324 - DNA, 15 bp, Homo sapiens
ggcactggaactcgt

SEQ ID NO: 240325 - DNA, 15 bp, Homo sapiens
tggcactggaactcg

SEQ ID NO: 240326 - DNA, 15 bp, Homo sapiens
ttggcactggaactc

SEQ ID NO: 240327 - DNA, 15 bp, Homo sapiens
cttggcactggaact

SEQ ID NO: 240328 - DNA, 15 bp, Homo sapiens
tcttggcactggaac

SEQ ID NO: 240329 - DNA, 15 bp, Homo sapiens
gtcttggcactggaa

SEQ ID NO: 240330 - DNA, 15 bp, Homo sapiens
cgtcttggcactgga

SEQ ID NO: 240331 - DNA, 15 bp, Homo sapiens
ccgtcttggcactgg

SEQ ID NO: 240332 - DNA, 15 bp, Homo sapiens
cccgtcttggcactg

SEQ ID NO: 240333 - DNA, 15 bp, Homo sapiens
tcccgtcttggcact

SEQ ID NO: 240334 - DNA, 15 bp, Homo sapiens
ttcccgtcttggcac

SEQ ID NO: 240335 - DNA, 15 bp, Homo sapiens
tttcccgtcttggca

SEQ ID NO: 240336 - DNA, 15 bp, Homo sapiens
atttcccgtcttggc

SEQ ID NO: 240337 - DNA, 15 bp, Homo sapiens
catttcccgtcttgg

SEQ ID NO: 240338 - DNA, 15 bp, Homo sapiens
gcatttcccgtcttg

SEQ ID NO: 240339 - DNA, 15 bp, Homo sapiens
tgcatttcccgtctt

SEQ ID NO: 240340 - DNA, 15 bp, Homo sapiens
atgcatttcccgtct

SEQ ID NO: 240341 - DNA, 15 bp, Homo sapiens
gatgcatttcccgtc

SEQ ID NO: 240342 - DNA, 15 bp, Homo sapiens
agatgcatttcccgt

SEQ ID NO: 240343 - DNA, 15 bp, Homo sapiens
gagatgcatttcccg

SEQ ID NO: 240344 - DNA, 15 bp, Homo sapiens
ggagatgcatttccc

SEQ ID NO: 240345 - DNA, 15 bp, Homo sapiens
aggagatgcatttcc

SEQ ID NO: 240346 - DNA, 15 bp, Homo sapiens
taggagatgcatttc

SEQ ID NO: 240347 - DNA, 15 bp, Homo sapiens
gtaggagatgcattt

SEQ ID NO: 240348 - DNA, 15 bp, Homo sapiens
tgtaggagatgcatt

SEQ ID NO: 240349 - DNA, 15 bp, Homo sapiens
ttgtaggagatgcat

SEQ ID NO: 240350 - DNA, 15 bp, Homo sapiens
cttgtaggagatgca

SEQ ID NO: 240351 - DNA, 15 bp, Homo sapiens
acttgtaggagatgc

SEQ ID NO: 240352 - DNA, 15 bp, Homo sapiens
cacttgtaggagatg

SEQ ID NO: 240353 - DNA, 15 bp, Homo sapiens
ccacttgtaggagat

SEQ ID NO: 240354 - DNA, 15 bp, Homo sapiens
cccacttgtaggaga

SEQ ID NO: 240355 - DNA, 15 bp, Homo sapiens
acccacttgtaggag

SEQ ID NO: 240356 - DNA, 15 bp, Homo sapiens
gacccacttgtagga

SEQ ID NO: 240357 - DNA, 15 bp, Homo sapiens
agacccacttgtagg

SEQ ID NO: 240358 - DNA, 15 bp, Homo sapiens
cagacccacttgtag

SEQ ID NO: 240359 - DNA, 15 bp, Homo sapiens
gcagacccacttgta

SEQ ID NO: 240360 - DNA, 15 bp, Homo sapiens
cgcagacccacttgt

SEQ ID NO: 240361 - DNA, 15 bp, Homo sapiens
tcgcagacccacttg

SEQ ID NO: 240362 - DNA, 15 bp, Homo sapiens
atcgcagacccactt

SEQ ID NO: 240363 - DNA, 15 bp, Homo sapiens
catcgcagacccact

SEQ ID NO: 240364 - DNA, 15 bp, Homo sapiens
ccatcgcagacccac

SEQ ID NO: 240365 - DNA, 15 bp, Homo sapiens
gccatcgcagaccca

SEQ ID NO: 240366 - DNA, 15 bp, Homo sapiens
tgccatcgcagaccc

SEQ ID NO: 240367 - DNA, 15 bp, Homo sapiens
ctgccatcgcagacc

SEQ ID NO: 240368 - DNA, 15 bp, Homo sapiens
gctgccatcgcagac

SEQ ID NO: 240369 - DNA, 15 bp, Homo sapiens
cgctgccatcgcaga

SEQ ID NO: 240370 - DNA, 15 bp, Homo sapiens
gcgctgccatcgcag

SEQ ID NO: 240371 - DNA, 15 bp, Homo sapiens
agcgctgccatcgca

SEQ ID NO: 240372 - DNA, 15 bp, Homo sapiens
cagcgctgccatcgc

SEQ ID NO: 240373 - DNA, 15 bp, Homo sapiens
tcagcgctgccatcg

SEQ ID NO: 240374 - DNA, 15 bp, Homo sapiens
ctcagcgctgccatc

SEQ ID NO: 240375 - DNA, 15 bp, Homo sapiens
actcagcgctgccat

SEQ ID NO: 240376 - DNA, 15 bp, Homo sapiens
cactcagcgctgcca

SEQ ID NO: 240377 - DNA, 15 bp, Homo sapiens
gcactcagcgctgcc

SEQ ID NO: 240378 - DNA, 15 bp, Homo sapiens
ggcactcagcgctgc

SEQ ID NO: 240379 - DNA, 15 bp, Homo sapiens
tggcactcagcgctg

SEQ ID NO: 240380 - DNA, 15 bp, Homo sapiens
ctggcactcagcgct

SEQ ID NO: 240381 - DNA, 15 bp, Homo sapiens
cctggcactcagcgc

SEQ ID NO: 240382 - DNA, 15 bp, Homo sapiens
tcctggcactcagcg

SEQ ID NO: 240383 - DNA, 15 bp, Homo sapiens
atcctggcactcagc

SEQ ID NO: 240384 - DNA, 15 bp, Homo sapiens
catcctggcactcag

SEQ ID NO: 240385 - DNA, 15 bp, Homo sapiens
ccatcctggcactca

SEQ ID NO: 240386 - DNA, 15 bp, Homo sapiens
gccatcctggcactc

SEQ ID NO: 240387 - DNA, 15 bp, Homo sapiens
agccatcctggcact

SEQ ID NO: 240388 - DNA, 15 bp, Homo sapiens
gagccatcctggcac

SEQ ID NO: 240389 - DNA, 15 bp, Homo sapiens
agagccatcctggca

SEQ ID NO: 240390 - DNA, 15 bp, Homo sapiens
cagagccatcctggc

SEQ ID NO: 240391 - DNA, 15 bp, Homo sapiens
tcagagccatcctgg

SEQ ID NO: 240392 - DNA, 15 bp, Homo sapiens
atcagagccatcctg

SEQ ID NO: 240393 - DNA, 15 bp, Homo sapiens
catcagagccatcct

SEQ ID NO: 240394 - DNA, 15 bp, Homo sapiens
tcatcagagccatcc

SEQ ID NO: 240395 - DNA, 15 bp, Homo sapiens
ctcatcagagccatc

SEQ ID NO: 240396 - DNA, 15 bp, Homo sapiens
actcatcagagccat

SEQ ID NO: 240397 - DNA, 15 bp, Homo sapiens
gactcatcagagcca

SEQ ID NO: 240398 - DNA, 15 bp, Homo sapiens
ggactcatcagagcc

SEQ ID NO: 240399 - DNA, 15 bp, Homo sapiens
gggactcatcagagc

SEQ ID NO: 240400 - DNA, 15 bp, Homo sapiens
tgggactcatcagag

SEQ ID NO: 240401 - DNA, 15 bp, Homo sapiens
ctgggactcatcaga

SEQ ID NO: 240402 - DNA, 15 bp, Homo sapiens
cctgggactcatcag

SEQ ID NO: 240403 - DNA, 15 bp, Homo sapiens
tcctgggactcatca

SEQ ID NO: 240404 - DNA, 15 bp, Homo sapiens
ctcctgggactcatc

SEQ ID NO: 240405 - DNA, 15 bp, Homo sapiens
tctcctgggactcat

SEQ ID NO: 240406 - DNA, 15 bp, Homo sapiens
gtctcctgggactca

SEQ ID NO: 240407 - DNA, 15 bp, Homo sapiens
cgtctcctgggactc

SEQ ID NO: 240408 - DNA, 15 bp, Homo sapiens
acgtctcctgggact

SEQ ID NO: 240409 - DNA, 15 bp, Homo sapiens
cacgtctcctgggac

SEQ ID NO: 240410 - DNA, 15 bp, Homo sapiens
gcacgtctcctggga

SEQ ID NO: 240411 - DNA, 15 bp, Homo sapiens
agcacgtctcctggg

SEQ ID NO: 240412 - DNA, 15 bp, Homo sapiens
cagcacgtctcctgg

SEQ ID NO: 240413 - DNA, 15 bp, Homo sapiens
acagcacgtctcctg

SEQ ID NO: 240414 - DNA, 15 bp, Homo sapiens
cacagcacgtctcct

SEQ ID NO: 240415 - DNA, 15 bp, Homo sapiens
tcacagcacgtctcc

SEQ ID NO: 240416 - DNA, 15 bp, Homo sapiens
ctcacagcacgtctc

SEQ ID NO: 240417 - DNA, 15 bp, Homo sapiens
actcacagcacgtct

SEQ ID NO: 240418 - DNA, 15 bp, Homo sapiens
gactcacagcacgtc

SEQ ID NO: 240419 - DNA, 15 bp, Homo sapiens
ggactcacagcacgt

SEQ ID NO: 240420 - DNA, 15 bp, Homo sapiens
gggactcacagcacg

SEQ ID NO: 240421 - DNA, 15 bp, Homo sapiens
ggggactcacagcac

SEQ ID NO: 240422 - DNA, 15 bp, Homo sapiens
aggggactcacagca

SEQ ID NO: 240423 - DNA, 15 bp, Homo sapiens
aaggggactcacagc

SEQ ID NO: 240424 - DNA, 15 bp, Homo sapiens
aaaggggactcacag

SEQ ID NO: 240425 - DNA, 15 bp, Homo sapiens
caaaggggactcaca

SEQ ID NO: 240426 - DNA, 15 bp, Homo sapiens
ccaaaggggactcac

SEQ ID NO: 240427 - DNA, 15 bp, Homo sapiens
cccaaaggggactca

SEQ ID NO: 240428 - DNA, 15 bp, Homo sapiens
gcccaaaggggactc

SEQ ID NO: 240429 - DNA, 15 bp, Homo sapiens
tgcccaaaggggact

SEQ ID NO: 240430 - DNA, 15 bp, Homo sapiens
atgcccaaaggggac

SEQ ID NO: 240431 - DNA, 15 bp, Homo sapiens
catgcccaaagggga

SEQ ID NO: 240432 - DNA, 15 bp, Homo sapiens
tcatgcccaaagggg

SEQ ID NO: 240433 - DNA, 15 bp, Homo sapiens
atcatgcccaaaggg

SEQ ID NO: 240434 - DNA, 15 bp, Homo sapiens
tatcatgcccaaagg

SEQ ID NO: 240435 - DNA, 15 bp, Homo sapiens
atatcatgcccaaag

SEQ ID NO: 240436 - DNA, 15 bp, Homo sapiens
catatcatgcccaaa

SEQ ID NO: 240437 - DNA, 15 bp, Homo sapiens
gcatatcatgcccaa

SEQ ID NO: 240438 - DNA, 15 bp, Homo sapiens
tgcatatcatgccca

SEQ ID NO: 240439 - DNA, 15 bp, Homo sapiens
atgcatatcatgccc

SEQ ID NO: 240440 - DNA, 15 bp, Homo sapiens
aatgcatatcatgcc

SEQ ID NO: 240441 - DNA, 15 bp, Homo sapiens
aaatgcatatcatgc

SEQ ID NO: 240442 - DNA, 15 bp, Homo sapiens
taaatgcatatcatg

SEQ ID NO: 240443 - DNA, 15 bp, Homo sapiens
ataaatgcatatcat

SEQ ID NO: 240444 - DNA, 15 bp, Homo sapiens
aataaatgcatatca

SEQ ID NO: 240445 - DNA, 15 bp, Homo sapiens
aaataaatgcatatc

SEQ ID NO: 240446 - DNA, 15 bp, Homo sapiens
aaaataaatgcatat

SEQ ID NO: 240447 - DNA, 15 bp, Homo sapiens
aaaaataaatgcata

SEQ ID NO: 240448 - DNA, 15 bp, Homo sapiens
caaaaataaatgcat

SEQ ID NO: 240449 - DNA, 15 bp, Homo sapiens
acaaaaataaatgca

SEQ ID NO: 240450 - DNA, 15 bp, Homo sapiens
tacaaaaataaatgc

SEQ ID NO: 240451 - DNA, 15 bp, Homo sapiens
ttacaaaaataaatg

SEQ ID NO: 240452 - DNA, 15 bp, Homo sapiens
attacaaaaataaat

SEQ ID NO: 240453 - DNA, 15 bp, Homo sapiens
tattacaaaaataaa

SEQ ID NO: 240454 - DNA, 15 bp, Homo sapiens
ctattacaaaaataa

SEQ ID NO: 240455 - DNA, 15 bp, Homo sapiens
tctattacaaaaata

SEQ ID NO: 240456 - DNA, 15 bp, Homo sapiens
ctctattacaaaaat

SEQ ID NO: 240457 - DNA, 15 bp, Homo sapiens
tctctattacaaaaa

SEQ ID NO: 240458 - DNA, 15 bp, Homo sapiens
gtctctattacaaaa

SEQ ID NO: 240459 - DNA, 15 bp, Homo sapiens
tgtctctattacaaa

SEQ ID NO: 240460 - DNA, 15 bp, Homo sapiens
ctgtctctattacaa

SEQ ID NO: 240461 - DNA, 15 bp, Homo sapiens
cctgtctctattaca

SEQ ID NO: 240462 - DNA, 15 bp, Homo sapiens
ccctgtctctattac

SEQ ID NO: 240463 - DNA, 15 bp, Homo sapiens
accctgtctctatta

SEQ ID NO: 240464 - DNA, 15 bp, Homo sapiens
gaccctgtctctatt

SEQ ID NO: 240465 - DNA, 15 bp, Homo sapiens
agaccctgtctctat

SEQ ID NO: 240466 - DNA, 15 bp, Homo sapiens
cgagaccctgtctct

SEQ ID NO: 240467 - DNA, 15 bp, Homo sapiens
gcgagaccctgtctc

SEQ ID NO: 240468 - DNA, 15 bp, Homo sapiens
ggcgagaccctgtct

SEQ ID NO: 240469 - DNA, 15 bp, Homo sapiens
tggcgagaccctgtc

SEQ ID NO: 240470 - DNA, 15 bp, Homo sapiens
atggcgagaccctgt

SEQ ID NO: 240471 - DNA, 15 bp, Homo sapiens
catggcgagaccctg

SEQ ID NO: 240472 - DNA, 15 bp, Homo sapiens
acatggcgagaccct

SEQ ID NO: 240473 - DNA, 15 bp, Homo sapiens
aacatggcgagaccc

SEQ ID NO: 240474 - DNA, 15 bp, Homo sapiens
caacatggcgagacc

SEQ ID NO: 240475 - DNA, 15 bp, Homo sapiens
ccaacatggcgagac

SEQ ID NO: 240476 - DNA, 15 bp, Homo sapiens
gccaacatggcgaga

SEQ ID NO: 240477 - DNA, 15 bp, Homo sapiens
ggccaacatggcgag

SEQ ID NO: 240478 - DNA, 15 bp, Homo sapiens
tggccaacatggcga

SEQ ID NO: 240479 - DNA, 15 bp, Homo sapiens
ctggccaacatggcg

SEQ ID NO: 240480 - DNA, 15 bp, Homo sapiens
aagaccagcctggcc

SEQ ID NO: 240481 - DNA, 15 bp, Homo sapiens
caagaccagcctggc

SEQ ID NO: 240482 - DNA, 15 bp, Homo sapiens
tcaagaccagcctgg

SEQ ID NO: 240483 - DNA, 15 bp, Homo sapiens
attcaagaccagcct

SEQ ID NO: 240484 - DNA, 15 bp, Homo sapiens
aattcaagaccagcc

SEQ ID NO: 240485 - DNA, 15 bp, Homo sapiens
aaattcaagaccagc

SEQ ID NO: 240486 - DNA, 15 bp, Homo sapiens
gaaattcaagaccag

SEQ ID NO: 240487 - DNA, 15 bp, Homo sapiens
agaaattcaagacca

SEQ ID NO: 240488 - DNA, 15 bp, Homo sapiens
cagaaattcaagacc

SEQ ID NO: 240489 - DNA, 15 bp, Homo sapiens
ccagaaattcaagac

SEQ ID NO: 240490 - DNA, 15 bp, Homo sapiens
accagaaattcaaga

SEQ ID NO: 240491 - DNA, 15 bp, Homo sapiens
gaccagaaattcaag

SEQ ID NO: 240492 - DNA, 15 bp, Homo sapiens
agaccagaaattcaa

SEQ ID NO: 240493 - DNA, 15 bp, Homo sapiens
gagaccagaaattca

SEQ ID NO: 240494 - DNA, 15 bp, Homo sapiens
tgagaccagaaattc

SEQ ID NO: 240495 - DNA, 15 bp, Homo sapiens
ttgagaccagaaatt

SEQ ID NO: 240496 - DNA, 15 bp, Homo sapiens
cttgagaccagaaat

SEQ ID NO: 240497 - DNA, 15 bp, Homo sapiens
acttgagaccagaaa

SEQ ID NO: 240498 - DNA, 15 bp, Homo sapiens
cacttgagaccagaa

SEQ ID NO: 240499 - DNA, 15 bp, Homo sapiens
tcacttgagaccaga

SEQ ID NO: 240500 - DNA, 15 bp, Homo sapiens
atcacttgagaccag

SEQ ID NO: 240501 - DNA, 15 bp, Homo sapiens
gatcacttgagacca

SEQ ID NO: 240502 - DNA, 15 bp, Homo sapiens
ggatcacttgagacc

SEQ ID NO: 240503 - DNA, 15 bp, Homo sapiens
cggatcacttgagac

SEQ ID NO: 240504 - DNA, 15 bp, Homo sapiens
gcggatcacttgaga

SEQ ID NO: 240505 - DNA, 15 bp, Homo sapiens
agcggatcacttgag

SEQ ID NO: 240506 - DNA, 15 bp, Homo sapiens
cagcggatcacttga

SEQ ID NO: 240507 - DNA, 15 bp, Homo sapiens
ccagcggatcacttg

SEQ ID NO: 240508 - DNA, 15 bp, Homo sapiens
gccagcggatcactt

SEQ ID NO: 240509 - DNA, 15 bp, Homo sapiens
ggccagcggatcact

SEQ ID NO: 240510 - DNA, 15 bp, Homo sapiens
aggccagcggatcac

SEQ ID NO: 240511 - DNA, 15 bp, Homo sapiens
gaggccagcggatca

SEQ ID NO: 240512 - DNA, 15 bp, Homo sapiens
cgaggccagcggatc

SEQ ID NO: 240513 - DNA, 15 bp, Homo sapiens
ccgaggccagcggat

SEQ ID NO: 240514 - DNA, 15 bp, Homo sapiens
gccgaggccagcgga

SEQ ID NO: 240515 - DNA, 15 bp, Homo sapiens
ggccgaggccagcgg

SEQ ID NO: 240516 - DNA, 15 bp, Homo sapiens
aggccgaggccagcg

SEQ ID NO: 240517 - DNA, 15 bp, Homo sapiens
gaggccgaggccagc

SEQ ID NO: 240518 - DNA, 15 bp, Homo sapiens
ggaggccgaggccag

SEQ ID NO: 240519 - DNA, 15 bp, Homo sapiens
gggaggccgaggcca

SEQ ID NO: 240520 - DNA, 15 bp, Homo sapiens
tgggaggccgaggcc

SEQ ID NO: 240521 - DNA, 15 bp, Homo sapiens
gtgcctgtaatccca

SEQ ID NO: 240522 - DNA, 15 bp, Homo sapiens
ggtgcctgtaatccc

SEQ ID NO: 240523 - DNA, 15 bp, Homo sapiens
tggtgcctgtaatcc

SEQ ID NO: 240524 - DNA, 15 bp, Homo sapiens
gtggtgcctgtaatc

SEQ ID NO: 240525 - DNA, 15 bp, Homo sapiens
cgtggtgcctgtaat

SEQ ID NO: 240526 - DNA, 15 bp, Homo sapiens
gcgtggtgcctgtaa

SEQ ID NO: 240527 - DNA, 15 bp, Homo sapiens
ggcgtggtgcctgta

SEQ ID NO: 240528 - DNA, 15 bp, Homo sapiens
aggcgtggtgcctgt

SEQ ID NO: 240529 - DNA, 15 bp, Homo sapiens
caggcgtggtgcctg

SEQ ID NO: 240530 - DNA, 15 bp, Homo sapiens
ccaggcgtggtgcct

SEQ ID NO: 240531 - DNA, 15 bp, Homo sapiens
gccaggcgtggtgcc

SEQ ID NO: 240532 - DNA, 15 bp, Homo sapiens
ggccaggcgtggtgc

SEQ ID NO: 240533 - DNA, 15 bp, Homo sapiens
aggccaggcgtggtg

SEQ ID NO: 240534 - DNA, 15 bp, Homo sapiens
caggccaggcgtggt

SEQ ID NO: 240535 - DNA, 15 bp, Homo sapiens
acaggccaggcgtgg

SEQ ID NO: 240536 - DNA, 15 bp, Homo sapiens
cacaggccaggcgtg

SEQ ID NO: 240537 - DNA, 15 bp, Homo sapiens
tcacaggccaggcgt

SEQ ID NO: 240538 - DNA, 15 bp, Homo sapiens
gtcacaggccaggcg

SEQ ID NO: 240539 - DNA, 15 bp, Homo sapiens
tgtcacaggccaggc

SEQ ID NO: 240540 - DNA, 15 bp, Homo sapiens
gtgtcacaggccagg

SEQ ID NO: 240541 - DNA, 15 bp, Homo sapiens
cgtgtcacaggccag

SEQ ID NO: 240542 - DNA, 15 bp, Homo sapiens
tcgtgtcacaggcca

SEQ ID NO: 240543 - DNA, 15 bp, Homo sapiens
atcgtgtcacaggcc

SEQ ID NO: 240544 - DNA, 15 bp, Homo sapiens
aatcgtgtcacaggc

SEQ ID NO: 240545 - DNA, 15 bp, Homo sapiens
gaatcgtgtcacagg

SEQ ID NO: 240546 - DNA, 15 bp, Homo sapiens
agaatcgtgtcacag

SEQ ID NO: 240547 - DNA, 15 bp, Homo sapiens
aagaatcgtgtcaca

SEQ ID NO: 240548 - DNA, 15 bp, Homo sapiens
taagaatcgtgtcac

SEQ ID NO: 240549 - DNA, 15 bp, Homo sapiens
ttaagaatcgtgtca

SEQ ID NO: 240550 - DNA, 15 bp, Homo sapiens
gttaagaatcgtgtc

SEQ ID NO: 240551 - DNA, 15 bp, Homo sapiens
ggttaagaatcgtgt

SEQ ID NO: 240552 - DNA, 15 bp, Homo sapiens
gggttaagaatcgtg

SEQ ID NO: 240553 - DNA, 15 bp, Homo sapiens
ggggttaagaatcgt

SEQ ID NO: 240554 - DNA, 15 bp, Homo sapiens
aggggttaagaatcg

SEQ ID NO: 240555 - DNA, 15 bp, Homo sapiens
aaggggttaagaatc

SEQ ID NO: 240556 - DNA, 15 bp, Homo sapiens
aaaggggttaagaat

SEQ ID NO: 240557 - DNA, 15 bp, Homo sapiens
aaaaggggttaagaa

SEQ ID NO: 240558 - DNA, 15 bp, Homo sapiens
aaaaaggggttaaga

SEQ ID NO: 240559 - DNA, 15 bp, Homo sapiens
caaaaaggggttaag

SEQ ID NO: 240560 - DNA, 15 bp, Homo sapiens
tcaaaaaggggttaa

SEQ ID NO: 240561 - DNA, 15 bp, Homo sapiens
atcaaaaaggggtta

SEQ ID NO: 240562 - DNA, 15 bp, Homo sapiens
catcaaaaaggggtt

SEQ ID NO: 240563 - DNA, 15 bp, Homo sapiens
tcatcaaaaaggggt

SEQ ID NO: 240564 - DNA, 15 bp, Homo sapiens
atcatcaaaaagggg

SEQ ID NO: 240565 - DNA, 15 bp, Homo sapiens
catcatcaaaaaggg

SEQ ID NO: 240566 - DNA, 15 bp, Homo sapiens
ccatcatcaaaaagg

SEQ ID NO: 240567 - DNA, 15 bp, Homo sapiens
gccatcatcaaaaag

SEQ ID NO: 240568 - DNA, 15 bp, Homo sapiens
cgccatcatcaaaaa

SEQ ID NO: 240569 - DNA, 15 bp, Homo sapiens
ccgccatcatcaaaa

SEQ ID NO: 240570 - DNA, 15 bp, Homo sapiens
gccgccatcatcaaa

SEQ ID NO: 240571 - DNA, 15 bp, Homo sapiens
agccgccatcatcaa

SEQ ID NO: 240572 - DNA, 15 bp, Homo sapiens
cagccgccatcatca

SEQ ID NO: 240573 - DNA, 15 bp, Homo sapiens
ccagccgccatcatc

SEQ ID NO: 240574 - DNA, 15 bp, Homo sapiens
tccagccgccatcat

SEQ ID NO: 240575 - DNA, 15 bp, Homo sapiens
ttccagccgccatca

SEQ ID NO: 240576 - DNA, 15 bp, Homo sapiens
tttccagccgccatc

SEQ ID NO: 240577 - DNA, 15 bp, Homo sapiens
ttttccagccgccat

SEQ ID NO: 240578 - DNA, 15 bp, Homo sapiens
cttttccagccgcca

SEQ ID NO: 240579 - DNA, 15 bp, Homo sapiens
acttttccagccgcc

SEQ ID NO: 240580 - DNA, 15 bp, Homo sapiens
cacttttccagccgc

SEQ ID NO: 240581 - DNA, 15 bp, Homo sapiens
ccacttttccagccg

SEQ ID NO: 240582 - DNA, 15 bp, Homo sapiens
gccacttttccagcc

SEQ ID NO: 240583 - DNA, 15 bp, Homo sapiens
ggccacttttccagc

SEQ ID NO: 240584 - DNA, 15 bp, Homo sapiens
tggccacttttccag

SEQ ID NO: 240585 - DNA, 15 bp, Homo sapiens
ctggccacttttcca

SEQ ID NO: 240586 - DNA, 15 bp, Homo sapiens
actggccacttttcc

SEQ ID NO: 240587 - DNA, 15 bp, Homo sapiens
cactggccacttttc

SEQ ID NO: 240588 - DNA, 15 bp, Homo sapiens
ccactggccactttt

SEQ ID NO: 240589 - DNA, 15 bp, Homo sapiens
tccactggccacttt

SEQ ID NO: 240590 - DNA, 15 bp, Homo sapiens
atccactggccactt

SEQ ID NO: 240591 - DNA, 15 bp, Homo sapiens
aatccactggccact

SEQ ID NO: 240592 - DNA, 15 bp, Homo sapiens
aaatccactggccac

SEQ ID NO: 240593 - DNA, 15 bp, Homo sapiens
aaaatccactggcca

SEQ ID NO: 240594 - DNA, 15 bp, Homo sapiens
caaaatccactggcc

SEQ ID NO: 240595 - DNA, 15 bp, Homo sapiens
tcaaaatccactggc

SEQ ID NO: 240596 - DNA, 15 bp, Homo sapiens
atcaaaatccactgg

SEQ ID NO: 240597 - DNA, 15 bp, Homo sapiens
catcaaaatccactg

SEQ ID NO: 240598 - DNA, 15 bp, Homo sapiens
acatcaaaatccact

SEQ ID NO: 240599 - DNA, 15 bp, Homo sapiens
tacatcaaaatccac

SEQ ID NO: 240600 - DNA, 15 bp, Homo sapiens
atacatcaaaatcca

SEQ ID NO: 240601 - DNA, 15 bp, Homo sapiens
aatacatcaaaatcc

SEQ ID NO: 240602 - DNA, 15 bp, Homo sapiens
gaatacatcaaaatc

SEQ ID NO: 240603 - DNA, 15 bp, Homo sapiens
tgaatacatcaaaat

SEQ ID NO: 240604 - DNA, 15 bp, Homo sapiens
ttgaatacatcaaaa

SEQ ID NO: 240605 - DNA, 15 bp, Homo sapiens
attgaatacatcaaa

SEQ ID NO: 240606 - DNA, 15 bp, Homo sapiens
gattgaatacatcaa

SEQ ID NO: 240607 - DNA, 15 bp, Homo sapiens
tgattgaatacatca

SEQ ID NO: 240608 - DNA, 15 bp, Homo sapiens
atgattgaatacatc

SEQ ID NO: 240609 - DNA, 15 bp, Homo sapiens
catgattgaatacat

SEQ ID NO: 240610 - DNA, 15 bp, Homo sapiens
tcatgattgaataca

SEQ ID NO: 240611 - DNA, 15 bp, Homo sapiens
ttcatgattgaatac

SEQ ID NO: 240612 - DNA, 15 bp, Homo sapiens
attcatgattgaata

SEQ ID NO: 240613 - DNA, 15 bp, Homo sapiens
aattcatgattgaat

SEQ ID NO: 240614 - DNA, 15 bp, Homo sapiens
taattcatgattgaa

SEQ ID NO: 240615 - DNA, 15 bp, Homo sapiens
ctaattcatgattga

SEQ ID NO: 240616 - DNA, 15 bp, Homo sapiens
cctaattcatgattg

SEQ ID NO: 240617 - DNA, 15 bp, Homo sapiens
tcctaattcatgatt

SEQ ID NO: 240618 - DNA, 15 bp, Homo sapiens
ctcctaattcatgat

SEQ ID NO: 240619 - DNA, 15 bp, Homo sapiens
cctcctaattcatga

SEQ ID NO: 240620 - DNA, 15 bp, Homo sapiens
acctcctaattcatg

SEQ ID NO: 240621 - DNA, 15 bp, Homo sapiens
cacctcctaattcat

SEQ ID NO: 240622 - DNA, 15 bp, Homo sapiens
ccacctcctaattca

SEQ ID NO: 240623 - DNA, 15 bp, Homo sapiens
cccacctcctaattc

SEQ ID NO: 240624 - DNA, 15 bp, Homo sapiens
ccccacctcctaatt

SEQ ID NO: 240625 - DNA, 15 bp, Homo sapiens
tccccacctcctaat

SEQ ID NO: 240626 - DNA, 15 bp, Homo sapiens
ctccccacctcctaa

SEQ ID NO: 240627 - DNA, 15 bp, Homo sapiens
tctccccacctccta

SEQ ID NO: 240628 - DNA, 15 bp, Homo sapiens
ctctccccacctcct

SEQ ID NO: 240629 - DNA, 15 bp, Homo sapiens
tctctccccacctcc

SEQ ID NO: 240630 - DNA, 15 bp, Homo sapiens
ttctctccccacctc

SEQ ID NO: 240631 - DNA, 15 bp, Homo sapiens
attctctccccacct

SEQ ID NO: 240632 - DNA, 15 bp, Homo sapiens
cattctctccccacc

SEQ ID NO: 240633 - DNA, 15 bp, Homo sapiens
tcattctctccccac

SEQ ID NO: 240634 - DNA, 15 bp, Homo sapiens
ttcattctctcccca

SEQ ID NO: 240635 - DNA, 15 bp, Homo sapiens
attcattctctcccc

SEQ ID NO: 240636 - DNA, 15 bp, Homo sapiens
aattcattctctccc

SEQ ID NO: 240637 - DNA, 15 bp, Homo sapiens
taattcattctctcc

SEQ ID NO: 240638 - DNA, 15 bp, Homo sapiens
ataattcattctctc

SEQ ID NO: 240639 - DNA, 15 bp, Homo sapiens
aataattcattctct

SEQ ID NO: 240640 - DNA, 15 bp, Homo sapiens
caataattcattctc

SEQ ID NO: 240641 - DNA, 15 bp, Homo sapiens
ccaataattcattct

SEQ ID NO: 240642 - DNA, 15 bp, Homo sapiens
tccaataattcattc

SEQ ID NO: 240643 - DNA, 15 bp, Homo sapiens
ctccaataattcatt

SEQ ID NO: 240644 - DNA, 15 bp, Homo sapiens
gctccaataattcat

SEQ ID NO: 240645 - DNA, 15 bp, Homo sapiens
agctccaataattca

SEQ ID NO: 240646 - DNA, 15 bp, Homo sapiens
aagctccaataattc

SEQ ID NO: 240647 - DNA, 15 bp, Homo sapiens
aaagctccaataatt

SEQ ID NO: 240648 - DNA, 15 bp, Homo sapiens
gaaagctccaataat

SEQ ID NO: 240649 - DNA, 15 bp, Homo sapiens
ggaaagctccaataa

SEQ ID NO: 240650 - DNA, 15 bp, Homo sapiens
aggaaagctccaata

SEQ ID NO: 240651 - DNA, 15 bp, Homo sapiens
aaggaaagctccaat

SEQ ID NO: 240652 - DNA, 15 bp, Homo sapiens
taaggaaagctccaa

SEQ ID NO: 240653 - DNA, 15 bp, Homo sapiens
ttaaggaaagctcca

SEQ ID NO: 240654 - DNA, 15 bp, Homo sapiens
tttaaggaaagctcc

SEQ ID NO: 240655 - DNA, 15 bp, Homo sapiens
ctttaaggaaagctc

SEQ ID NO: 240656 - DNA, 15 bp, Homo sapiens
gctttaaggaaagct

SEQ ID NO: 240657 - DNA, 15 bp, Homo sapiens
ggctttaaggaaagc

SEQ ID NO: 240658 - DNA, 15 bp, Homo sapiens
tggctttaaggaaag

SEQ ID NO: 240659 - DNA, 15 bp, Homo sapiens
atggctttaaggaaa

SEQ ID NO: 240660 - DNA, 15 bp, Homo sapiens
aatggctttaaggaa

SEQ ID NO: 240661 - DNA, 15 bp, Homo sapiens
taatggctttaagga

SEQ ID NO: 240662 - DNA, 15 bp, Homo sapiens
ttaatggctttaagg

SEQ ID NO: 240663 - DNA, 15 bp, Homo sapiens
tttaatggctttaag

SEQ ID NO: 240664 - DNA, 15 bp, Homo sapiens
atttaatggctttaa

SEQ ID NO: 240665 - DNA, 15 bp, Homo sapiens
catttaatggcttta

SEQ ID NO: 240666 - DNA, 15 bp, Homo sapiens
ccatttaatggcttt

SEQ ID NO: 240667 - DNA, 15 bp, Homo sapiens
gccatttaatggctt

SEQ ID NO: 240668 - DNA, 15 bp, Homo sapiens
agccatttaatggct

SEQ ID NO: 240669 - DNA, 15 bp, Homo sapiens
gagccatttaatggc

SEQ ID NO: 240670 - DNA, 15 bp, Homo sapiens
agagccatttaatgg

SEQ ID NO: 240671 - DNA, 15 bp, Homo sapiens
tagagccatttaatg

SEQ ID NO: 240672 - DNA, 15 bp, Homo sapiens
atagagccatttaat

SEQ ID NO: 240673 - DNA, 15 bp, Homo sapiens
aatagagccatttaa

SEQ ID NO: 240674 - DNA, 15 bp, Homo sapiens
caatagagccattta

SEQ ID NO: 240675 - DNA, 15 bp, Homo sapiens
acaatagagccattt

SEQ ID NO: 240676 - DNA, 15 bp, Homo sapiens
aacaatagagccatt

SEQ ID NO: 240677 - DNA, 15 bp, Homo sapiens
aaacaatagagccat

SEQ ID NO: 240678 - DNA, 15 bp, Homo sapiens
aaaacaatagagcca

SEQ ID NO: 240679 - DNA, 15 bp, Homo sapiens
aaaaacaatagagcc

SEQ ID NO: 240680 - DNA, 15 bp, Homo sapiens
aaaaaacaatagagc

SEQ ID NO: 240681 - DNA, 15 bp, Homo sapiens
gaaaaaacaatagag

SEQ ID NO: 240682 - DNA, 15 bp, Homo sapiens
tgaaaaaacaataga

SEQ ID NO: 240683 - DNA, 15 bp, Homo sapiens
ttgaaaaaacaatag

SEQ ID NO: 240684 - DNA, 15 bp, Homo sapiens
attgaaaaaacaata

SEQ ID NO: 240685 - DNA, 15 bp, Homo sapiens
aattgaaaaaacaat

SEQ ID NO: 240686 - DNA, 15 bp, Homo sapiens
caattgaaaaaacaa

SEQ ID NO: 240687 - DNA, 15 bp, Homo sapiens
tcaattgaaaaaaca

SEQ ID NO: 240688 - DNA, 15 bp, Homo sapiens
atcaattgaaaaaac

SEQ ID NO: 240689 - DNA, 15 bp, Homo sapiens
catcaattgaaaaaa

SEQ ID NO: 240690 - DNA, 15 bp, Homo sapiens
acatcaattgaaaaa

SEQ ID NO: 240691 - DNA, 15 bp, Homo sapiens
cacatcaattgaaaa

SEQ ID NO: 240692 - DNA, 15 bp, Homo sapiens
tcacatcaattgaaa

SEQ ID NO: 240693 - DNA, 15 bp, Homo sapiens
ttcacatcaattgaa

SEQ ID NO: 240694 - DNA, 15 bp, Homo sapiens
attcacatcaattga

SEQ ID NO: 240695 - DNA, 15 bp, Homo sapiens
aattcacatcaattg

SEQ ID NO: 240696 - DNA, 15 bp, Homo sapiens
aaattcacatcaatt

SEQ ID NO: 240697 - DNA, 15 bp, Homo sapiens
gaaattcacatcaat

SEQ ID NO: 240698 - DNA, 15 bp, Homo sapiens
tgaaattcacatcaa

SEQ ID NO: 240699 - DNA, 15 bp, Homo sapiens
gtgaaattcacatca

SEQ ID NO: 240700 - DNA, 15 bp, Homo sapiens
tgtgaaattcacatc

SEQ ID NO: 240701 - DNA, 15 bp, Homo sapiens
atgtgaaattcacat

SEQ ID NO: 240702 - DNA, 15 bp, Homo sapiens
tatgtgaaattcaca

SEQ ID NO: 240703 - DNA, 15 bp, Homo sapiens
ttatgtgaaattcac

SEQ ID NO: 240704 - DNA, 15 bp, Homo sapiens
gttatgtgaaattca

SEQ ID NO: 240705 - DNA, 15 bp, Homo sapiens
tgttatgtgaaattc

SEQ ID NO: 240706 - DNA, 15 bp, Homo sapiens
atgttatgtgaaatt

SEQ ID NO: 240707 - DNA, 15 bp, Homo sapiens
catgttatgtgaaat

SEQ ID NO: 240708 - DNA, 15 bp, Homo sapiens
tcatgttatgtgaaa

SEQ ID NO: 240709 - DNA, 15 bp, Homo sapiens
ttcatgttatgtgaa

SEQ ID NO: 240710 - DNA, 15 bp, Homo sapiens
tttcatgttatgtga

SEQ ID NO: 240711 - DNA, 15 bp, Homo sapiens
atttcatgttatgtg

SEQ ID NO: 240712 - DNA, 15 bp, Homo sapiens
aatttcatgttatgt

SEQ ID NO: 240713 - DNA, 15 bp, Homo sapiens
taatttcatgttatg

SEQ ID NO: 240714 - DNA, 15 bp, Homo sapiens
ttaatttcatgttat

SEQ ID NO: 240715 - DNA, 15 bp, Homo sapiens
gttaatttcatgtta

SEQ ID NO: 240716 - DNA, 15 bp, Homo sapiens
ggttaatttcatgtt

SEQ ID NO: 240717 - DNA, 15 bp, Homo sapiens
tggttaatttcatgt

SEQ ID NO: 240718 - DNA, 15 bp, Homo sapiens
ctggttaatttcatg

SEQ ID NO: 240719 - DNA, 15 bp, Homo sapiens
gctggttaatttcat

SEQ ID NO: 240720 - DNA, 15 bp, Homo sapiens
agctggttaatttca

SEQ ID NO: 240721 - DNA, 15 bp, Homo sapiens
gagctggttaatttc

SEQ ID NO: 240722 - DNA, 15 bp, Homo sapiens
tgagctggttaattt

SEQ ID NO: 240723 - DNA, 15 bp, Homo sapiens
ctgagctggttaatt

SEQ ID NO: 240724 - DNA, 15 bp, Homo sapiens
actgagctggttaat

SEQ ID NO: 240725 - DNA, 15 bp, Homo sapiens
cactgagctggttaa

SEQ ID NO: 240726 - DNA, 15 bp, Homo sapiens
ccactgagctggtta

SEQ ID NO: 240727 - DNA, 15 bp, Homo sapiens
gccactgagctggtt

SEQ ID NO: 240728 - DNA, 15 bp, Homo sapiens
tgccactgagctggt

SEQ ID NO: 240729 - DNA, 15 bp, Homo sapiens
atgccactgagctgg

SEQ ID NO: 240730 - DNA, 15 bp, Homo sapiens
aatgccactgagctg

SEQ ID NO: 240731 - DNA, 15 bp, Homo sapiens
taatgccactgagct

SEQ ID NO: 240732 - DNA, 15 bp, Homo sapiens
ttaatgccactgagc

SEQ ID NO: 240733 - DNA, 15 bp, Homo sapiens
attaatgccactgag

SEQ ID NO: 240734 - DNA, 15 bp, Homo sapiens
tattaatgccactga

SEQ ID NO: 240735 - DNA, 15 bp, Homo sapiens
gtattaatgccactg

SEQ ID NO: 240736 - DNA, 15 bp, Homo sapiens
tgtattaatgccact

SEQ ID NO: 240737 - DNA, 15 bp, Homo sapiens
atgtattaatgccac

SEQ ID NO: 240738 - DNA, 15 bp, Homo sapiens
gatgtattaatgcca

SEQ ID NO: 240739 - DNA, 15 bp, Homo sapiens
agatgtattaatgcc

SEQ ID NO: 240740 - DNA, 15 bp, Homo sapiens
cagatgtattaatgc

SEQ ID NO: 240741 - DNA, 15 bp, Homo sapiens
gcagatgtattaatg

SEQ ID NO: 240742 - DNA, 15 bp, Homo sapiens
tgcagatgtattaat

SEQ ID NO: 240743 - DNA, 15 bp, Homo sapiens
ttgcagatgtattaa

SEQ ID NO: 240744 - DNA, 15 bp, Homo sapiens
attgcagatgtatta

SEQ ID NO: 240745 - DNA, 15 bp, Homo sapiens
cattgcagatgtatt

SEQ ID NO: 240746 - DNA, 15 bp, Homo sapiens
gcattgcagatgtat

SEQ ID NO: 240747 - DNA, 15 bp, Homo sapiens
agcattgcagatgta

SEQ ID NO: 240748 - DNA, 15 bp, Homo sapiens
cagcattgcagatgt

SEQ ID NO: 240749 - DNA, 15 bp, Homo sapiens
acagcattgcagatg

SEQ ID NO: 240750 - DNA, 15 bp, Homo sapiens
cacagcattgcagat

SEQ ID NO: 240751 - DNA, 15 bp, Homo sapiens
acacagcattgcaga

SEQ ID NO: 240752 - DNA, 15 bp, Homo sapiens
cacacagcattgcag

SEQ ID NO: 240753 - DNA, 15 bp, Homo sapiens
ccacacagcattgca

SEQ ID NO: 240754 - DNA, 15 bp, Homo sapiens
gccacacagcattgc

SEQ ID NO: 240755 - DNA, 15 bp, Homo sapiens
ggccacacagcattg

SEQ ID NO: 240756 - DNA, 15 bp, Homo sapiens
tggccacacagcatt

SEQ ID NO: 240757 - DNA, 15 bp, Homo sapiens
gtggccacacagcat

SEQ ID NO: 240758 - DNA, 15 bp, Homo sapiens
ggtggccacacagca

SEQ ID NO: 240759 - DNA, 15 bp, Homo sapiens
tggtggccacacagc

SEQ ID NO: 240760 - DNA, 15 bp, Homo sapiens
gtggtggccacacag

SEQ ID NO: 240761 - DNA, 15 bp, Homo sapiens
ggtggtggccacaca

SEQ ID NO: 240762 - DNA, 15 bp, Homo sapiens
aggtggtggccacac

SEQ ID NO: 240763 - DNA, 15 bp, Homo sapiens
gaggtggtggccaca

SEQ ID NO: 240764 - DNA, 15 bp, Homo sapiens
agaggtggtggccac

SEQ ID NO: 240765 - DNA, 15 bp, Homo sapiens
tagaggtggtggcca

SEQ ID NO: 240766 - DNA, 15 bp, Homo sapiens
atagaggtggtggcc

SEQ ID NO: 240767 - DNA, 15 bp, Homo sapiens
gatagaggtggtggc

SEQ ID NO: 240768 - DNA, 15 bp, Homo sapiens
agatagaggtggtgg

SEQ ID NO: 240769 - DNA, 15 bp, Homo sapiens
aagatagaggtggtg

SEQ ID NO: 240770 - DNA, 15 bp, Homo sapiens
caagatagaggtggt

SEQ ID NO: 240771 - DNA, 15 bp, Homo sapiens
acaagatagaggtgg

SEQ ID NO: 240772 - DNA, 15 bp, Homo sapiens
aacaagatagaggtg

SEQ ID NO: 240773 - DNA, 15 bp, Homo sapiens
gaacaagatagaggt

SEQ ID NO: 240774 - DNA, 15 bp, Homo sapiens
ggaacaagatagagg

SEQ ID NO: 240775 - DNA, 15 bp, Homo sapiens
tggaacaagatagag

SEQ ID NO: 240776 - DNA, 15 bp, Homo sapiens
ttggaacaagataga

SEQ ID NO: 240777 - DNA, 15 bp, Homo sapiens
tttggaacaagatag

SEQ ID NO: 240778 - DNA, 15 bp, Homo sapiens
ttttggaacaagata

SEQ ID NO: 240779 - DNA, 15 bp, Homo sapiens
gttttggaacaagat

SEQ ID NO: 240780 - DNA, 15 bp, Homo sapiens
agttttggaacaaga

SEQ ID NO: 240781 - DNA, 15 bp, Homo sapiens
aagttttggaacaag

SEQ ID NO: 240782 - DNA, 15 bp, Homo sapiens
aaagttttggaacaa

SEQ ID NO: 240783 - DNA, 15 bp, Homo sapiens
caaagttttggaaca

SEQ ID NO: 240784 - DNA, 15 bp, Homo sapiens
gcaaagttttggaac

SEQ ID NO: 240785 - DNA, 15 bp, Homo sapiens
tgcaaagttttggaa

SEQ ID NO: 240786 - DNA, 15 bp, Homo sapiens
atgcaaagttttgga

SEQ ID NO: 240787 - DNA, 15 bp, Homo sapiens
tatgcaaagttttgg

SEQ ID NO: 240788 - DNA, 15 bp, Homo sapiens
ttatgcaaagttttg

SEQ ID NO: 240789 - DNA, 15 bp, Homo sapiens
gttatgcaaagtttt

SEQ ID NO: 240790 - DNA, 15 bp, Homo sapiens
ggttatgcaaagttt

SEQ ID NO: 240791 - DNA, 15 bp, Homo sapiens
aggttatgcaaagtt

SEQ ID NO: 240792 - DNA, 15 bp, Homo sapiens
taggttatgcaaagt

SEQ ID NO: 240793 - DNA, 15 bp, Homo sapiens
ttaggttatgcaaag

SEQ ID NO: 240794 - DNA, 15 bp, Homo sapiens
attaggttatgcaaa

SEQ ID NO: 240795 - DNA, 15 bp, Homo sapiens
cattaggttatgcaa

SEQ ID NO: 240796 - DNA, 15 bp, Homo sapiens
acattaggttatgca

SEQ ID NO: 240797 - DNA, 15 bp, Homo sapiens
gacattaggttatgc

SEQ ID NO: 240798 - DNA, 15 bp, Homo sapiens
agacattaggttatg

SEQ ID NO: 240799 - DNA, 15 bp, Homo sapiens
aagacattaggttat

SEQ ID NO: 240800 - DNA, 15 bp, Homo sapiens
aaagacattaggtta

SEQ ID NO: 240801 - DNA, 15 bp, Homo sapiens
aaaagacattaggtt

SEQ ID NO: 240802 - DNA, 15 bp, Homo sapiens
aaaaagacattaggt

SEQ ID NO: 240803 - DNA, 15 bp, Homo sapiens
aaaaaagacattagg

SEQ ID NO: 240804 - DNA, 15 bp, Homo sapiens
aaaaaaagacattag

SEQ ID NO: 240805 - DNA, 15 bp, Homo sapiens
aaaaaaaagacatta

SEQ ID NO: 240806 - DNA, 15 bp, Homo sapiens
aaaaaaaaagacatt

SEQ ID NO: 240807 - DNA, 15 bp, Homo sapiens
aaaaaaaaaagacat

SEQ ID NO: 240808 - DNA, 15 bp, Homo sapiens
aaaaaaaaaaagaca

SEQ ID NO: 240809 - DNA, 15 bp, Homo sapiens
aaaaaaaaaaaagac

SEQ ID NO: 240810 - DNA, 15 bp, Homo sapiens
cgagactccgtctca

SEQ ID NO: 240811 - DNA, 15 bp, Homo sapiens
acgagactccgtctc

SEQ ID NO: 240812 - DNA, 15 bp, Homo sapiens
aacgagactccgtct

SEQ ID NO: 240813 - DNA, 15 bp, Homo sapiens
gaacgagactccgtc

SEQ ID NO: 240814 - DNA, 15 bp, Homo sapiens
ggaacgagactccgt

SEQ ID NO: 240815 - DNA, 15 bp, Homo sapiens
tggaacgagactccg

SEQ ID NO: 240816 - DNA, 15 bp, Homo sapiens
atggaacgagactcc

SEQ ID NO: 240817 - DNA, 15 bp, Homo sapiens
gatggaacgagactc

SEQ ID NO: 240818 - DNA, 15 bp, Homo sapiens
tgatggaacgagact

SEQ ID NO: 240819 - DNA, 15 bp, Homo sapiens
gtgatggaacgagac

SEQ ID NO: 240820 - DNA, 15 bp, Homo sapiens
ggtgatggaacgaga

SEQ ID NO: 240821 - DNA, 15 bp, Homo sapiens
gggtgatggaacgag

SEQ ID NO: 240822 - DNA, 15 bp, Homo sapiens
tgggtgatggaacga

SEQ ID NO: 240823 - DNA, 15 bp, Homo sapiens
ctgggtgatggaacg

SEQ ID NO: 240824 - DNA, 15 bp, Homo sapiens
cctgggtgatggaac

SEQ ID NO: 240825 - DNA, 15 bp, Homo sapiens
gcctgggtgatggaa

SEQ ID NO: 240826 - DNA, 15 bp, Homo sapiens
agcctgggtgatgga

SEQ ID NO: 240827 - DNA, 15 bp, Homo sapiens
cagcctgggtgatgg

SEQ ID NO: 240828 - DNA, 15 bp, Homo sapiens
ccagcctgggtgatg

SEQ ID NO: 240829 - DNA, 15 bp, Homo sapiens
tccagcctgggtgat

SEQ ID NO: 240830 - DNA, 15 bp, Homo sapiens
caccactgcactcca

SEQ ID NO: 240831 - DNA, 15 bp, Homo sapiens
acaccactgcactcc

SEQ ID NO: 240832 - DNA, 15 bp, Homo sapiens
cacaccactgcactc

SEQ ID NO: 240833 - DNA, 15 bp, Homo sapiens
tcacaccactgcact

SEQ ID NO: 240834 - DNA, 15 bp, Homo sapiens
atcacaccactgcac

SEQ ID NO: 240835 - DNA, 15 bp, Homo sapiens
gatcacaccactgca

SEQ ID NO: 240836 - DNA, 15 bp, Homo sapiens
agatcacaccactgc

SEQ ID NO: 240837 - DNA, 15 bp, Homo sapiens
gagatcacaccactg

SEQ ID NO: 240838 - DNA, 15 bp, Homo sapiens
tgagatcacaccact

SEQ ID NO: 240839 - DNA, 15 bp, Homo sapiens
ctgagatcacaccac

SEQ ID NO: 240840 - DNA, 15 bp, Homo sapiens
gctgagatcacacca

SEQ ID NO: 240841 - DNA, 15 bp, Homo sapiens
agctgagatcacacc

SEQ ID NO: 240842 - DNA, 15 bp, Homo sapiens
gagctgagatcacac

SEQ ID NO: 240843 - DNA, 15 bp, Homo sapiens
tgagctgagatcaca

SEQ ID NO: 240844 - DNA, 15 bp, Homo sapiens
gtgagctgagatcac

SEQ ID NO: 240845 - DNA, 15 bp, Homo sapiens
agtgagctgagatca

SEQ ID NO: 240846 - DNA, 15 bp, Homo sapiens
tgggaggcggaggtt

SEQ ID NO: 240847 - DNA, 15 bp, Homo sapiens
ctgggaggcggaggt

SEQ ID NO: 240848 - DNA, 15 bp, Homo sapiens
cctgggaggcggagg

SEQ ID NO: 240849 - DNA, 15 bp, Homo sapiens
tgaacctgggaggcg

SEQ ID NO: 240850 - DNA, 15 bp, Homo sapiens
gtgaacctgggaggc

SEQ ID NO: 240851 - DNA, 15 bp, Homo sapiens
cgtgaacctgggagg

SEQ ID NO: 240852 - DNA, 15 bp, Homo sapiens
gcgtgaacctgggag

SEQ ID NO: 240853 - DNA, 15 bp, Homo sapiens
ggcgtgaacctggga

SEQ ID NO: 240854 - DNA, 15 bp, Homo sapiens
tggcgtgaacctggg

SEQ ID NO: 240855 - DNA, 15 bp, Homo sapiens
atggcgtgaacctgg

SEQ ID NO: 240856 - DNA, 15 bp, Homo sapiens
gatggcgtgaacctg

SEQ ID NO: 240857 - DNA, 15 bp, Homo sapiens
ggatggcgtgaacct

SEQ ID NO: 240858 - DNA, 15 bp, Homo sapiens
aggatggcgtgaacc

SEQ ID NO: 240859 - DNA, 15 bp, Homo sapiens
gaggatggcgtgaac

SEQ ID NO: 240860 - DNA, 15 bp, Homo sapiens
ggaggatggcgtgaa

SEQ ID NO: 240861 - DNA, 15 bp, Homo sapiens
aggaggatggcgtga

SEQ ID NO: 240862 - DNA, 15 bp, Homo sapiens
caggaggatggcgtg

SEQ ID NO: 240863 - DNA, 15 bp, Homo sapiens
gcaggaggatggcgt

SEQ ID NO: 240864 - DNA, 15 bp, Homo sapiens
ggcaggaggatggcg

SEQ ID NO: 240865 - DNA, 15 bp, Homo sapiens
aggcaggaggatggc

SEQ ID NO: 240866 - DNA, 15 bp, Homo sapiens
gaggcaggaggatgg

SEQ ID NO: 240867 - DNA, 15 bp, Homo sapiens
tgaggcaggaggatg

SEQ ID NO: 240868 - DNA, 15 bp, Homo sapiens
ctgaggcaggaggat

SEQ ID NO: 240869 - DNA, 15 bp, Homo sapiens
gctgaggcaggagga

SEQ ID NO: 240870 - DNA, 15 bp, Homo sapiens
ggctgaggcaggagg

SEQ ID NO: 240871 - DNA, 15 bp, Homo sapiens
agggtgcctgtagtc

SEQ ID NO: 240872 - DNA, 15 bp, Homo sapiens
gagggtgcctgtagt

SEQ ID NO: 240873 - DNA, 15 bp, Homo sapiens
ggagggtgcctgtag

SEQ ID NO: 240874 - DNA, 15 bp, Homo sapiens
tggagggtgcctgta

SEQ ID NO: 240875 - DNA, 15 bp, Homo sapiens
gtggagggtgcctgt

SEQ ID NO: 240876 - DNA, 15 bp, Homo sapiens
ggtggagggtgcctg

SEQ ID NO: 240877 - DNA, 15 bp, Homo sapiens
tggtggagggtgcct

SEQ ID NO: 240878 - DNA, 15 bp, Homo sapiens
gtggtggagggtgcc

SEQ ID NO: 240879 - DNA, 15 bp, Homo sapiens
tgtggtggagggtgc

SEQ ID NO: 240880 - DNA, 15 bp, Homo sapiens
atgtggtggagggtg

SEQ ID NO: 240881 - DNA, 15 bp, Homo sapiens
gatgtggtggagggt

SEQ ID NO: 240882 - DNA, 15 bp, Homo sapiens
ggatgtggtggaggg

SEQ ID NO: 240883 - DNA, 15 bp, Homo sapiens
cggatgtggtggagg

SEQ ID NO: 240884 - DNA, 15 bp, Homo sapiens
ccggatgtggtggag

SEQ ID NO: 240885 - DNA, 15 bp, Homo sapiens
gccggatgtggtgga

SEQ ID NO: 240886 - DNA, 15 bp, Homo sapiens
agccggatgtggtgg

SEQ ID NO: 240887 - DNA, 15 bp, Homo sapiens
tagccggatgtggtg

SEQ ID NO: 240888 - DNA, 15 bp, Homo sapiens
ttagccggatgtggt

SEQ ID NO: 240889 - DNA, 15 bp, Homo sapiens
attagccggatgtgg

SEQ ID NO: 240890 - DNA, 15 bp, Homo sapiens
aattagccggatgtg

SEQ ID NO: 240891 - DNA, 15 bp, Homo sapiens
aaattagccggatgt

SEQ ID NO: 240892 - DNA, 15 bp, Homo sapiens
aaaattagccggatg

SEQ ID NO: 240893 - DNA, 15 bp, Homo sapiens
aaaaattagccggat

SEQ ID NO: 240894 - DNA, 15 bp, Homo sapiens
aaaaaattagccgga

SEQ ID NO: 240895 - DNA, 15 bp, Homo sapiens
gatacaaaaaattag

SEQ ID NO: 240896 - DNA, 15 bp, Homo sapiens
agatacaaaaaatta

SEQ ID NO: 240897 - DNA, 15 bp, Homo sapiens
aagatacaaaaaatt

SEQ ID NO: 240898 - DNA, 15 bp, Homo sapiens
aaagatacaaaaaat

SEQ ID NO: 240899 - DNA, 15 bp, Homo sapiens
taaagatacaaaaaa

SEQ ID NO: 240900 - DNA, 15 bp, Homo sapiens
ctaaagatacaaaaa

SEQ ID NO: 240901 - DNA, 15 bp, Homo sapiens
actaaagatacaaaa

SEQ ID NO: 240902 - DNA, 15 bp, Homo sapiens
tactaaagatacaaa

SEQ ID NO: 240903 - DNA, 15 bp, Homo sapiens
ctactaaagatacaa

SEQ ID NO: 240904 - DNA, 15 bp, Homo sapiens
tctactaaagataca

SEQ ID NO: 240905 - DNA, 15 bp, Homo sapiens
ctctactaaagatac

SEQ ID NO: 240906 - DNA, 15 bp, Homo sapiens
tctctactaaagata

SEQ ID NO: 240907 - DNA, 15 bp, Homo sapiens
atctctactaaagat

SEQ ID NO: 240908 - DNA, 15 bp, Homo sapiens
catctctactaaaga

SEQ ID NO: 240909 - DNA, 15 bp, Homo sapiens
ccatctctactaaag

SEQ ID NO: 240910 - DNA, 15 bp, Homo sapiens
cggctaacatggtga

SEQ ID NO: 240911 - DNA, 15 bp, Homo sapiens
ccggctaacatggtg

SEQ ID NO: 240912 - DNA, 15 bp, Homo sapiens
cccggctaacatggt

SEQ ID NO: 240913 - DNA, 15 bp, Homo sapiens
tcccggctaacatgg

SEQ ID NO: 240914 - DNA, 15 bp, Homo sapiens
atcccggctaacatg

SEQ ID NO: 240915 - DNA, 15 bp, Homo sapiens
catcccggctaacat

SEQ ID NO: 240916 - DNA, 15 bp, Homo sapiens
ccatcccggctaaca

SEQ ID NO: 240917 - DNA, 15 bp, Homo sapiens
accatcccggctaac

SEQ ID NO: 240918 - DNA, 15 bp, Homo sapiens
gaccatcccggctaa

SEQ ID NO: 240919 - DNA, 15 bp, Homo sapiens
agaccatcccggcta

SEQ ID NO: 240920 - DNA, 15 bp, Homo sapiens
gagaccatcccggct

SEQ ID NO: 240921 - DNA, 15 bp, Homo sapiens
cgagaccatcccggc

SEQ ID NO: 240922 - DNA, 15 bp, Homo sapiens
tcgagaccatcccgg

SEQ ID NO: 240923 - DNA, 15 bp, Homo sapiens
atcgagaccatcccg

SEQ ID NO: 240924 - DNA, 15 bp, Homo sapiens
gatcgagaccatccc

SEQ ID NO: 240925 - DNA, 15 bp, Homo sapiens
ggaggcaggtggatc

SEQ ID NO: 240926 - DNA, 15 bp, Homo sapiens
cggaggcaggtggat

SEQ ID NO: 240927 - DNA, 15 bp, Homo sapiens
gcggaggcaggtgga

SEQ ID NO: 240928 - DNA, 15 bp, Homo sapiens
ggcggaggcaggtgg

SEQ ID NO: 240929 - DNA, 15 bp, Homo sapiens
aggcggaggcaggtg

SEQ ID NO: 240930 - DNA, 15 bp, Homo sapiens
gaggcggaggcaggt

SEQ ID NO: 240931 - DNA, 15 bp, Homo sapiens
ggaggcggaggcagg

SEQ ID NO: 240932 - DNA, 15 bp, Homo sapiens
gggaggcggaggcag

SEQ ID NO: 240933 - DNA, 15 bp, Homo sapiens
tgggaggcggaggca

SEQ ID NO: 240934 - DNA, 15 bp, Homo sapiens
ttgggaggcggaggc

SEQ ID NO: 240935 - DNA, 15 bp, Homo sapiens
tttgggaggcggagg

SEQ ID NO: 240936 - DNA, 15 bp, Homo sapiens
ctttgggaggcggag

SEQ ID NO: 240937 - DNA, 15 bp, Homo sapiens
actttgggaggcgga

SEQ ID NO: 240938 - DNA, 15 bp, Homo sapiens
cactttgggaggcgg

SEQ ID NO: 240939 - DNA, 15 bp, Homo sapiens
gcactttgggaggcg

SEQ ID NO: 240940 - DNA, 15 bp, Homo sapiens
gccagcactttggga

SEQ ID NO: 240941 - DNA, 15 bp, Homo sapiens
tgccagcactttggg

SEQ ID NO: 240942 - DNA, 15 bp, Homo sapiens
atgccagcactttgg

SEQ ID NO: 240943 - DNA, 15 bp, Homo sapiens
aatgccagcactttg

SEQ ID NO: 240944 - DNA, 15 bp, Homo sapiens
taatgccagcacttt

SEQ ID NO: 240945 - DNA, 15 bp, Homo sapiens
gtaatgccagcactt

SEQ ID NO: 240946 - DNA, 15 bp, Homo sapiens
tgtaatgccagcact

SEQ ID NO: 240947 - DNA, 15 bp, Homo sapiens
ctgtaatgccagcac

SEQ ID NO: 240948 - DNA, 15 bp, Homo sapiens
cgggcatggtggctc

SEQ ID NO: 240949 - DNA, 15 bp, Homo sapiens
ccgggcatggtggct

SEQ ID NO: 240950 - DNA, 15 bp, Homo sapiens
gccgggcatggtggc

SEQ ID NO: 240951 - DNA, 15 bp, Homo sapiens
ggccgggcatggtgg

SEQ ID NO: 240952 - DNA, 15 bp, Homo sapiens
aggccgggcatggtg

SEQ ID NO: 240953 - DNA, 15 bp, Homo sapiens
taggccgggcatggt

SEQ ID NO: 240954 - DNA, 15 bp, Homo sapiens
ataggccgggcatgg

SEQ ID NO: 240955 - DNA, 15 bp, Homo sapiens
aataggccgggcatg

SEQ ID NO: 240956 - DNA, 15 bp, Homo sapiens
aaataggccgggcat

SEQ ID NO: 240957 - DNA, 15 bp, Homo sapiens
aaaataggccgggca

SEQ ID NO: 240958 - DNA, 15 bp, Homo sapiens
aaaaataggccgggc

SEQ ID NO: 240959 - DNA, 15 bp, Homo sapiens
aaaaaataggccggg

SEQ ID NO: 240960 - DNA, 15 bp, Homo sapiens
aaaaaaataggccgg

SEQ ID NO: 240961 - DNA, 15 bp, Homo sapiens
aaaaaaaataggccg

SEQ ID NO: 240962 - DNA, 15 bp, Homo sapiens
aaaaaaaaataggcc

SEQ ID NO: 240963 - DNA, 15 bp, Homo sapiens
aaaaaaaaaataggc

SEQ ID NO: 240964 - DNA, 15 bp, Homo sapiens
aaaaaaaaaaatagg

SEQ ID NO: 240965 - DNA, 15 bp, Homo sapiens
taaaaaaaaaaatag

SEQ ID NO: 240966 - DNA, 15 bp, Homo sapiens
ttaaaaaaaaaaata

SEQ ID NO: 240967 - DNA, 15 bp, Homo sapiens
cttaaaaaaaaaaat

SEQ ID NO: 240968 - DNA, 15 bp, Homo sapiens
tcttaaaaaaaaaaa

SEQ ID NO: 240969 - DNA, 15 bp, Homo sapiens
ctcttaaaaaaaaaa

SEQ ID NO: 240970 - DNA, 15 bp, Homo sapiens
tctcttaaaaaaaaa

SEQ ID NO: 240971 - DNA, 15 bp, Homo sapiens
atctcttaaaaaaaa

SEQ ID NO: 240972 - DNA, 15 bp, Homo sapiens
catctcttaaaaaaa

SEQ ID NO: 240973 - DNA, 15 bp, Homo sapiens
ccatctcttaaaaaa

SEQ ID NO: 240974 - DNA, 15 bp, Homo sapiens
tccatctcttaaaaa

SEQ ID NO: 240975 - DNA, 15 bp, Homo sapiens
ctccatctcttaaaa

SEQ ID NO: 240976 - DNA, 15 bp, Homo sapiens
actccatctcttaaa

SEQ ID NO: 240977 - DNA, 15 bp, Homo sapiens
gactccatctcttaa

SEQ ID NO: 240978 - DNA, 15 bp, Homo sapiens
agactccatctctta

SEQ ID NO: 240979 - DNA, 15 bp, Homo sapiens
tagactccatctctt

SEQ ID NO: 240980 - DNA, 15 bp, Homo sapiens
ttagactccatctct

SEQ ID NO: 240981 - DNA, 15 bp, Homo sapiens
attagactccatctc

SEQ ID NO: 240982 - DNA, 15 bp, Homo sapiens
aattagactccatct

SEQ ID NO: 240983 - DNA, 15 bp, Homo sapiens
gaattagactccatc

SEQ ID NO: 240984 - DNA, 15 bp, Homo sapiens
agaattagactccat

SEQ ID NO: 240985 - DNA, 15 bp, Homo sapiens
cagaattagactcca

SEQ ID NO: 240986 - DNA, 15 bp, Homo sapiens
acagaattagactcc

SEQ ID NO: 240987 - DNA, 15 bp, Homo sapiens
aacagaattagactc

SEQ ID NO: 240988 - DNA, 15 bp, Homo sapiens
caacagaattagact

SEQ ID NO: 240989 - DNA, 15 bp, Homo sapiens
gcaacagaattagac

SEQ ID NO: 240990 - DNA, 15 bp, Homo sapiens
ggcaacagaattaga

SEQ ID NO: 240991 - DNA, 15 bp, Homo sapiens
gggcaacagaattag

SEQ ID NO: 240992 - DNA, 15 bp, Homo sapiens
tgggcaacagaatta

SEQ ID NO: 240993 - DNA, 15 bp, Homo sapiens
ctgggcaacagaatt

SEQ ID NO: 240994 - DNA, 15 bp, Homo sapiens
cctgggcaacagaat

SEQ ID NO: 240995 - DNA, 15 bp, Homo sapiens
gcctgggcaacagaa

SEQ ID NO: 240996 - DNA, 15 bp, Homo sapiens
gactccagcctgggc

SEQ ID NO: 240997 - DNA, 15 bp, Homo sapiens
ggactccagcctggg

SEQ ID NO: 240998 - DNA, 15 bp, Homo sapiens
tggactccagcctgg

SEQ ID NO: 240999 - DNA, 15 bp, Homo sapiens
ctggactccagcctg

SEQ ID NO: 241000 - DNA, 15 bp, Homo sapiens
actggactccagcct

SEQ ID NO: 241001 - DNA, 15 bp, Homo sapiens
cactggactccagcc

SEQ ID NO: 241002 - DNA, 15 bp, Homo sapiens
ccactggactccagc

SEQ ID NO: 241003 - DNA, 15 bp, Homo sapiens
accactggactccag

SEQ ID NO: 241004 - DNA, 15 bp, Homo sapiens
taccactggactcca

SEQ ID NO: 241005 - DNA, 15 bp, Homo sapiens
gtaccactggactcc

SEQ ID NO: 241006 - DNA, 15 bp, Homo sapiens
ggtaccactggactc

SEQ ID NO: 241007 - DNA, 15 bp, Homo sapiens
tggtaccactggact

SEQ ID NO: 241008 - DNA, 15 bp, Homo sapiens
atggtaccactggac

SEQ ID NO: 241009 - DNA, 15 bp, Homo sapiens
gatggtaccactgga

SEQ ID NO: 241010 - DNA, 15 bp, Homo sapiens
tgatggtaccactgg

SEQ ID NO: 241011 - DNA, 15 bp, Homo sapiens
atgatggtaccactg

SEQ ID NO: 241012 - DNA, 15 bp, Homo sapiens
tatgatggtaccact

SEQ ID NO: 241013 - DNA, 15 bp, Homo sapiens
gtatgatggtaccac

SEQ ID NO: 241014 - DNA, 15 bp, Homo sapiens
agtatgatggtacca

SEQ ID NO: 241015 - DNA, 15 bp, Homo sapiens
aagtatgatggtacc

SEQ ID NO: 241016 - DNA, 15 bp, Homo sapiens
gaagtatgatggtac

SEQ ID NO: 241017 - DNA, 15 bp, Homo sapiens
tgaagtatgatggta

SEQ ID NO: 241018 - DNA, 15 bp, Homo sapiens
gtgaagtatgatggt

SEQ ID NO: 241019 - DNA, 15 bp, Homo sapiens
agtgaagtatgatgg

SEQ ID NO: 241020 - DNA, 15 bp, Homo sapiens
cagtgaagtatgatg

SEQ ID NO: 241021 - DNA, 15 bp, Homo sapiens
gcagtgaagtatgat

SEQ ID NO: 241022 - DNA, 15 bp, Homo sapiens
tgcagtgaagtatga

SEQ ID NO: 241023 - DNA, 15 bp, Homo sapiens
ctgcagtgaagtatg

SEQ ID NO: 241024 - DNA, 15 bp, Homo sapiens
gctgcagtgaagtat

SEQ ID NO: 241025 - DNA, 15 bp, Homo sapiens
ggctgcagtgaagta

SEQ ID NO: 241026 - DNA, 15 bp, Homo sapiens
aggctgcagtgaagt

SEQ ID NO: 241027 - DNA, 15 bp, Homo sapiens
aaggctgcagtgaag

SEQ ID NO: 241028 - DNA, 15 bp, Homo sapiens
caaggctgcagtgaa

SEQ ID NO: 241029 - DNA, 15 bp, Homo sapiens
tcaaggctgcagtga

SEQ ID NO: 241030 - DNA, 15 bp, Homo sapiens
gtcaaggctgcagtg

SEQ ID NO: 241031 - DNA, 15 bp, Homo sapiens
ggtcaaggctgcagt

SEQ ID NO: 241032 - DNA, 15 bp, Homo sapiens
aggtcaaggctgcag

SEQ ID NO: 241033 - DNA, 15 bp, Homo sapiens
gaggtcaaggctgca

SEQ ID NO: 241034 - DNA, 15 bp, Homo sapiens
agaggtcaaggctgc

SEQ ID NO: 241035 - DNA, 15 bp, Homo sapiens
aagaggtcaaggctg

SEQ ID NO: 241036 - DNA, 15 bp, Homo sapiens
caagaggtcaaggct

SEQ ID NO: 241037 - DNA, 15 bp, Homo sapiens
ccaagaggtcaaggc

SEQ ID NO: 241038 - DNA, 15 bp, Homo sapiens
cccaagaggtcaagg

SEQ ID NO: 241039 - DNA, 15 bp, Homo sapiens
gcccaagaggtcaag

SEQ ID NO: 241040 - DNA, 15 bp, Homo sapiens
agcccaagaggtcaa

SEQ ID NO: 241041 - DNA, 15 bp, Homo sapiens
gagcccaagaggtca

SEQ ID NO: 241042 - DNA, 15 bp, Homo sapiens
tgagcccaagaggtc

SEQ ID NO: 241043 - DNA, 15 bp, Homo sapiens
ttgagcccaagaggt

SEQ ID NO: 241044 - DNA, 15 bp, Homo sapiens
cttgagcccaagagg

SEQ ID NO: 241045 - DNA, 15 bp, Homo sapiens
acttgagcccaagag

SEQ ID NO: 241046 - DNA, 15 bp, Homo sapiens
cacttgagcccaaga

SEQ ID NO: 241047 - DNA, 15 bp, Homo sapiens
tcacttgagcccaag

SEQ ID NO: 241048 - DNA, 15 bp, Homo sapiens
atcacttgagcccaa

SEQ ID NO: 241049 - DNA, 15 bp, Homo sapiens
aatcacttgagccca

SEQ ID NO: 241050 - DNA, 15 bp, Homo sapiens
gaatcacttgagccc

SEQ ID NO: 241051 - DNA, 15 bp, Homo sapiens
agaatcacttgagcc

SEQ ID NO: 241052 - DNA, 15 bp, Homo sapiens
gagaatcacttgagc

SEQ ID NO: 241053 - DNA, 15 bp, Homo sapiens
agagaatcacttgag

SEQ ID NO: 241054 - DNA, 15 bp, Homo sapiens
aagagaatcacttga

SEQ ID NO: 241055 - DNA, 15 bp, Homo sapiens
caagagaatcacttg

SEQ ID NO: 241056 - DNA, 15 bp, Homo sapiens
gcaagagaatcactt

SEQ ID NO: 241057 - DNA, 15 bp, Homo sapiens
ggcaagagaatcact

SEQ ID NO: 241058 - DNA, 15 bp, Homo sapiens
aggcaagagaatcac

SEQ ID NO: 241059 - DNA, 15 bp, Homo sapiens
gaggcaagagaatca

SEQ ID NO: 241060 - DNA, 15 bp, Homo sapiens
cgaggcaagagaatc

SEQ ID NO: 241061 - DNA, 15 bp, Homo sapiens
tcgaggcaagagaat

SEQ ID NO: 241062 - DNA, 15 bp, Homo sapiens
ttcgaggcaagagaa

SEQ ID NO: 241063 - DNA, 15 bp, Homo sapiens
gttcgaggcaagaga

SEQ ID NO: 241064 - DNA, 15 bp, Homo sapiens
agttcgaggcaagag

SEQ ID NO: 241065 - DNA, 15 bp, Homo sapiens
gagttcgaggcaaga

SEQ ID NO: 241066 - DNA, 15 bp, Homo sapiens
ggagttcgaggcaag

SEQ ID NO: 241067 - DNA, 15 bp, Homo sapiens
gggagttcgaggcaa

SEQ ID NO: 241068 - DNA, 15 bp, Homo sapiens
tgggagttcgaggca

SEQ ID NO: 241069 - DNA, 15 bp, Homo sapiens
ttgggagttcgaggc

SEQ ID NO: 241070 - DNA, 15 bp, Homo sapiens
tttgggagttcgagg

SEQ ID NO: 241071 - DNA, 15 bp, Homo sapiens
ctttgggagttcgag

SEQ ID NO: 241072 - DNA, 15 bp, Homo sapiens
actttgggagttcga

SEQ ID NO: 241073 - DNA, 15 bp, Homo sapiens
tactttgggagttcg

SEQ ID NO: 241074 - DNA, 15 bp, Homo sapiens
atactttgggagttc

SEQ ID NO: 241075 - DNA, 15 bp, Homo sapiens
aatactttgggagtt

SEQ ID NO: 241076 - DNA, 15 bp, Homo sapiens
caatactttgggagt

SEQ ID NO: 241077 - DNA, 15 bp, Homo sapiens
ccaatactttgggag

SEQ ID NO: 241078 - DNA, 15 bp, Homo sapiens
cccaatactttggga

SEQ ID NO: 241079 - DNA, 15 bp, Homo sapiens
tcccaatactttggg

SEQ ID NO: 241080 - DNA, 15 bp, Homo sapiens
atcccaatactttgg

SEQ ID NO: 241081 - DNA, 15 bp, Homo sapiens
aatcccaatactttg

SEQ ID NO: 241082 - DNA, 15 bp, Homo sapiens
taatcccaatacttt

SEQ ID NO: 241083 - DNA, 15 bp, Homo sapiens
gtaatcccaatactt

SEQ ID NO: 241084 - DNA, 15 bp, Homo sapiens
tgtaatcccaatact

SEQ ID NO: 241085 - DNA, 15 bp, Homo sapiens
ctgtaatcccaatac

SEQ ID NO: 241086 - DNA, 15 bp, Homo sapiens
cctgtaatcccaata

SEQ ID NO: 241087 - DNA, 15 bp, Homo sapiens
acctgtaatcccaat

SEQ ID NO: 241088 - DNA, 15 bp, Homo sapiens
cacctgtaatcccaa

SEQ ID NO: 241089 - DNA, 15 bp, Homo sapiens
gctcacacctgtaat

SEQ ID NO: 241090 - DNA, 15 bp, Homo sapiens
ggctcacacctgtaa

SEQ ID NO: 241091 - DNA, 15 bp, Homo sapiens
tggctcacacctgta

SEQ ID NO: 241092 - DNA, 15 bp, Homo sapiens
cggtggctcacacct

SEQ ID NO: 241093 - DNA, 15 bp, Homo sapiens
gcggtggctcacacc

SEQ ID NO: 241094 - DNA, 15 bp, Homo sapiens
tgcggtggctcacac

SEQ ID NO: 241095 - DNA, 15 bp, Homo sapiens
gtgcggtggctcaca

SEQ ID NO: 241096 - DNA, 15 bp, Homo sapiens
agtgcggtggctcac

SEQ ID NO: 241097 - DNA, 15 bp, Homo sapiens
gagtgcggtggctca

SEQ ID NO: 241098 - DNA, 15 bp, Homo sapiens
tgagtgcggtggctc

SEQ ID NO: 241099 - DNA, 15 bp, Homo sapiens
ctgagtgcggtggct

SEQ ID NO: 241100 - DNA, 15 bp, Homo sapiens
gctgagtgcggtggc

SEQ ID NO: 241101 - DNA, 15 bp, Homo sapiens
ggctgagtgcggtgg

SEQ ID NO: 241102 - DNA, 15 bp, Homo sapiens
aggctgagtgcggtg

SEQ ID NO: 241103 - DNA, 15 bp, Homo sapiens
taggctgagtgcggt

SEQ ID NO: 241104 - DNA, 15 bp, Homo sapiens
ttaggctgagtgcgg

SEQ ID NO: 241105 - DNA, 15 bp, Homo sapiens
attaggctgagtgcg

SEQ ID NO: 241106 - DNA, 15 bp, Homo sapiens
cattaggctgagtgc

SEQ ID NO: 241107 - DNA, 15 bp, Homo sapiens
acattaggctgagtg

SEQ ID NO: 241108 - DNA, 15 bp, Homo sapiens
gacattaggctgagt

SEQ ID NO: 241109 - DNA, 15 bp, Homo sapiens
ggacattaggctgag

SEQ ID NO: 241110 - DNA, 15 bp, Homo sapiens
tggacattaggctga

SEQ ID NO: 241111 - DNA, 15 bp, Homo sapiens
ctggacattaggctg

SEQ ID NO: 241112 - DNA, 15 bp, Homo sapiens
actggacattaggct

SEQ ID NO: 241113 - DNA, 15 bp, Homo sapiens
aactggacattaggc

SEQ ID NO: 241114 - DNA, 15 bp, Homo sapiens
aaactggacattagg

SEQ ID NO: 241115 - DNA, 15 bp, Homo sapiens
aaaactggacattag

SEQ ID NO: 241116 - DNA, 15 bp, Homo sapiens
aaaaactggacatta

SEQ ID NO: 241117 - DNA, 15 bp, Homo sapiens
taaaaactggacatt

SEQ ID NO: 241118 - DNA, 15 bp, Homo sapiens
ttaaaaactggacat

SEQ ID NO: 241119 - DNA, 15 bp, Homo sapiens
gttaaaaactggaca

SEQ ID NO: 241120 - DNA, 15 bp, Homo sapiens
tgttaaaaactggac

SEQ ID NO: 241121 - DNA, 15 bp, Homo sapiens
ttgttaaaaactgga

SEQ ID NO: 241122 - DNA, 15 bp, Homo sapiens
cttgttaaaaactgg

SEQ ID NO: 241123 - DNA, 15 bp, Homo sapiens
gcttgttaaaaactg

SEQ ID NO: 241124 - DNA, 15 bp, Homo sapiens
agcttgttaaaaact

SEQ ID NO: 241125 - DNA, 15 bp, Homo sapiens
gagcttgttaaaaac

SEQ ID NO: 241126 - DNA, 15 bp, Homo sapiens
ggagcttgttaaaaa

SEQ ID NO: 241127 - DNA, 15 bp, Homo sapiens
tggagcttgttaaaa

SEQ ID NO: 241128 - DNA, 15 bp, Homo sapiens
atggagcttgttaaa

SEQ ID NO: 241129 - DNA, 15 bp, Homo sapiens
aatggagcttgttaa

SEQ ID NO: 241130 - DNA, 15 bp, Homo sapiens
aaatggagcttgtta

SEQ ID NO: 241131 - DNA, 15 bp, Homo sapiens
taaatggagcttgtt

SEQ ID NO: 241132 - DNA, 15 bp, Homo sapiens
ttaaatggagcttgt

SEQ ID NO: 241133 - DNA, 15 bp, Homo sapiens
tttaaatggagcttg

SEQ ID NO: 241134 - DNA, 15 bp, Homo sapiens
atttaaatggagctt

SEQ ID NO: 241135 - DNA, 15 bp, Homo sapiens
catttaaatggagct

SEQ ID NO: 241136 - DNA, 15 bp, Homo sapiens
gcatttaaatggagc

SEQ ID NO: 241137 - DNA, 15 bp, Homo sapiens
ggcatttaaatggag

SEQ ID NO: 241138 - DNA, 15 bp, Homo sapiens
gggcatttaaatgga

SEQ ID NO: 241139 - DNA, 15 bp, Homo sapiens
agggcatttaaatgg

SEQ ID NO: 241140 - DNA, 15 bp, Homo sapiens
gagggcatttaaatg

SEQ ID NO: 241141 - DNA, 15 bp, Homo sapiens
ggagggcatttaaat

SEQ ID NO: 241142 - DNA, 15 bp, Homo sapiens
cggagggcatttaaa

SEQ ID NO: 241143 - DNA, 15 bp, Homo sapiens
acggagggcatttaa

SEQ ID NO: 241144 - DNA, 15 bp, Homo sapiens
aacggagggcattta

SEQ ID NO: 241145 - DNA, 15 bp, Homo sapiens
aaacggagggcattt

SEQ ID NO: 241146 - DNA, 15 bp, Homo sapiens
aaaacggagggcatt

SEQ ID NO: 241147 - DNA, 15 bp, Homo sapiens
caaaacggagggcat

SEQ ID NO: 241148 - DNA, 15 bp, Homo sapiens
tcaaaacggagggca

SEQ ID NO: 241149 - DNA, 15 bp, Homo sapiens
gtcaaaacggagggc

SEQ ID NO: 241150 - DNA, 15 bp, Homo sapiens
ggtcaaaacggaggg

SEQ ID NO: 241151 - DNA, 15 bp, Homo sapiens
gggtcaaaacggagg

SEQ ID NO: 241152 - DNA, 15 bp, Homo sapiens
tgggtcaaaacggag

SEQ ID NO: 241153 - DNA, 15 bp, Homo sapiens
atgggtcaaaacgga

SEQ ID NO: 241154 - DNA, 15 bp, Homo sapiens
tatgggtcaaaacgg

SEQ ID NO: 241155 - DNA, 15 bp, Homo sapiens
ttatgggtcaaaacg

SEQ ID NO: 241156 - DNA, 15 bp, Homo sapiens
tttatgggtcaaaac

SEQ ID NO: 241157 - DNA, 15 bp, Homo sapiens
ctttatgggtcaaaa

SEQ ID NO: 241158 - DNA, 15 bp, Homo sapiens
cctttatgggtcaaa

SEQ ID NO: 241159 - DNA, 15 bp, Homo sapiens
ccctttatgggtcaa

SEQ ID NO: 241160 - DNA, 15 bp, Homo sapiens
cccctttatgggtca

SEQ ID NO: 241161 - DNA, 15 bp, Homo sapiens
acccctttatgggtc

SEQ ID NO: 241162 - DNA, 15 bp, Homo sapiens
tacccctttatgggt

SEQ ID NO: 241163 - DNA, 15 bp, Homo sapiens
ctacccctttatggg

SEQ ID NO: 241164 - DNA, 15 bp, Homo sapiens
cctacccctttatgg

SEQ ID NO: 241165 - DNA, 15 bp, Homo sapiens
gcctacccctttatg

SEQ ID NO: 241166 - DNA, 15 bp, Homo sapiens
agcctacccctttat

SEQ ID NO: 241167 - DNA, 15 bp, Homo sapiens
aagcctaccccttta

SEQ ID NO: 241168 - DNA, 15 bp, Homo sapiens
caagcctaccccttt

SEQ ID NO: 241169 - DNA, 15 bp, Homo sapiens
ccaagcctacccctt

SEQ ID NO: 241170 - DNA, 15 bp, Homo sapiens
gccaagcctacccct

SEQ ID NO: 241171 - DNA, 15 bp, Homo sapiens
ggccaagcctacccc

SEQ ID NO: 241172 - DNA, 15 bp, Homo sapiens
cggccaagcctaccc

SEQ ID NO: 241173 - DNA, 15 bp, Homo sapiens
ccggccaagcctacc

SEQ ID NO: 241174 - DNA, 15 bp, Homo sapiens
cccggccaagcctac

SEQ ID NO: 241175 - DNA, 15 bp, Homo sapiens
gcccggccaagccta

SEQ ID NO: 241176 - DNA, 15 bp, Homo sapiens
tgcccggccaagcct

SEQ ID NO: 241177 - DNA, 15 bp, Homo sapiens
gtgcccggccaagcc

SEQ ID NO: 241178 - DNA, 15 bp, Homo sapiens
tgtgcccggccaagc

SEQ ID NO: 241179 - DNA, 15 bp, Homo sapiens
ttgtgcccggccaag

SEQ ID NO: 241180 - DNA, 15 bp, Homo sapiens
attgtgcccggccaa

SEQ ID NO: 241181 - DNA, 15 bp, Homo sapiens
cattgtgcccggcca

SEQ ID NO: 241182 - DNA, 15 bp, Homo sapiens
ccattgtgcccggcc

SEQ ID NO: 241183 - DNA, 15 bp, Homo sapiens
gccattgtgcccggc

SEQ ID NO: 241184 - DNA, 15 bp, Homo sapiens
agccattgtgcccgg

SEQ ID NO: 241185 - DNA, 15 bp, Homo sapiens
aagccattgtgcccg

SEQ ID NO: 241186 - DNA, 15 bp, Homo sapiens
caagccattgtgccc

SEQ ID NO: 241187 - DNA, 15 bp, Homo sapiens
acaagccattgtgcc

SEQ ID NO: 241188 - DNA, 15 bp, Homo sapiens
cacaagccattgtgc

SEQ ID NO: 241189 - DNA, 15 bp, Homo sapiens
acacaagccattgtg

SEQ ID NO: 241190 - DNA, 15 bp, Homo sapiens
gacacaagccattgt

SEQ ID NO: 241191 - DNA, 15 bp, Homo sapiens
agacacaagccattg

SEQ ID NO: 241192 - DNA, 15 bp, Homo sapiens
cagacacaagccatt

SEQ ID NO: 241193 - DNA, 15 bp, Homo sapiens
acagacacaagccat

SEQ ID NO: 241194 - DNA, 15 bp, Homo sapiens
tacagacacaagcca

SEQ ID NO: 241195 - DNA, 15 bp, Homo sapiens
ctacagacacaagcc

SEQ ID NO: 241196 - DNA, 15 bp, Homo sapiens
actacagacacaagc

SEQ ID NO: 241197 - DNA, 15 bp, Homo sapiens
gactacagacacaag

SEQ ID NO: 241198 - DNA, 15 bp, Homo sapiens
ggactacagacacaa

SEQ ID NO: 241199 - DNA, 15 bp, Homo sapiens
gggactacagacaca

SEQ ID NO: 241200 - DNA, 15 bp, Homo sapiens
tgggactacagacac

SEQ ID NO: 241201 - DNA, 15 bp, Homo sapiens
ctgggactacagaca

SEQ ID NO: 241202 - DNA, 15 bp, Homo sapiens
gctgggactacagac

SEQ ID NO: 241203 - DNA, 15 bp, Homo sapiens
agctgggactacaga

SEQ ID NO: 241204 - DNA, 15 bp, Homo sapiens
tctgcctcagcctcc

SEQ ID NO: 241205 - DNA, 15 bp, Homo sapiens
ttctgcctcagcctc

SEQ ID NO: 241206 - DNA, 15 bp, Homo sapiens
tttctgcctcagcct

SEQ ID NO: 241207 - DNA, 15 bp, Homo sapiens
ctttctgcctcagcc

SEQ ID NO: 241208 - DNA, 15 bp, Homo sapiens
cctttctgcctcagc

SEQ ID NO: 241209 - DNA, 15 bp, Homo sapiens
gcctttctgcctcag

SEQ ID NO: 241210 - DNA, 15 bp, Homo sapiens
tgcctttctgcctca

SEQ ID NO: 241211 - DNA, 15 bp, Homo sapiens
ctgcctttctgcctc

SEQ ID NO: 241212 - DNA, 15 bp, Homo sapiens
tctgcctttctgcct

SEQ ID NO: 241213 - DNA, 15 bp, Homo sapiens
ttctgcctttctgcc

SEQ ID NO: 241214 - DNA, 15 bp, Homo sapiens
tttctgcctttctgc

SEQ ID NO: 241215 - DNA, 15 bp, Homo sapiens
ctttctgcctttctg

SEQ ID NO: 241216 - DNA, 15 bp, Homo sapiens
tctttctgcctttct

SEQ ID NO: 241217 - DNA, 15 bp, Homo sapiens
atctttctgcctttc

SEQ ID NO: 241218 - DNA, 15 bp, Homo sapiens
aatctttctgccttt

SEQ ID NO: 241219 - DNA, 15 bp, Homo sapiens
caatctttctgcctt

SEQ ID NO: 241220 - DNA, 15 bp, Homo sapiens
gcaatctttctgcct

SEQ ID NO: 241221 - DNA, 15 bp, Homo sapiens
agcaatctttctgcc

SEQ ID NO: 241222 - DNA, 15 bp, Homo sapiens
aagcaatctttctgc

SEQ ID NO: 241223 - DNA, 15 bp, Homo sapiens
aaagcaatctttctg

SEQ ID NO: 241224 - DNA, 15 bp, Homo sapiens
taaagcaatctttct

SEQ ID NO: 241225 - DNA, 15 bp, Homo sapiens
ataaagcaatctttc

SEQ ID NO: 241226 - DNA, 15 bp, Homo sapiens
tataaagcaatcttt

SEQ ID NO: 241227 - DNA, 15 bp, Homo sapiens
ttataaagcaatctt

SEQ ID NO: 241228 - DNA, 15 bp, Homo sapiens
tttataaagcaatct

SEQ ID NO: 241229 - DNA, 15 bp, Homo sapiens
ctttataaagcaatc

SEQ ID NO: 241230 - DNA, 15 bp, Homo sapiens
gctttataaagcaat

SEQ ID NO: 241231 - DNA, 15 bp, Homo sapiens
ggctttataaagcaa

SEQ ID NO: 241232 - DNA, 15 bp, Homo sapiens
gggctttataaagca

SEQ ID NO: 241233 - DNA, 15 bp, Homo sapiens
tgggctttataaagc

SEQ ID NO: 241234 - DNA, 15 bp, Homo sapiens
ctgggctttataaag

SEQ ID NO: 241235 - DNA, 15 bp, Homo sapiens
cctgggctttataaa

SEQ ID NO: 241236 - DNA, 15 bp, Homo sapiens
tcctgggctttataa

SEQ ID NO: 241237 - DNA, 15 bp, Homo sapiens
ctcctgggctttata

SEQ ID NO: 241238 - DNA, 15 bp, Homo sapiens
actcctgggctttat

SEQ ID NO: 241239 - DNA, 15 bp, Homo sapiens
aactcctgggcttta

SEQ ID NO: 241240 - DNA, 15 bp, Homo sapiens
aaactcctgggcttt

SEQ ID NO: 241241 - DNA, 15 bp, Homo sapiens
caaactcctgggctt

SEQ ID NO: 241242 - DNA, 15 bp, Homo sapiens
tcaaactcctgggct

SEQ ID NO: 241243 - DNA, 15 bp, Homo sapiens
ctcaaactcctgggc

SEQ ID NO: 241244 - DNA, 15 bp, Homo sapiens
cctcaaactcctggg

SEQ ID NO: 241245 - DNA, 15 bp, Homo sapiens
ccctcaaactcctgg

SEQ ID NO: 241246 - DNA, 15 bp, Homo sapiens
gccctcaaactcctg

SEQ ID NO: 241247 - DNA, 15 bp, Homo sapiens
ggccctcaaactcct

SEQ ID NO: 241248 - DNA, 15 bp, Homo sapiens
tggccctcaaactcc

SEQ ID NO: 241249 - DNA, 15 bp, Homo sapiens
gtggccctcaaactc

SEQ ID NO: 241250 - DNA, 15 bp, Homo sapiens
ggtggccctcaaact

SEQ ID NO: 241251 - DNA, 15 bp, Homo sapiens
aggtggccctcaaac

SEQ ID NO: 241252 - DNA, 15 bp, Homo sapiens
caggtggccctcaaa

SEQ ID NO: 241253 - DNA, 15 bp, Homo sapiens
ccaggtggccctcaa

SEQ ID NO: 241254 - DNA, 15 bp, Homo sapiens
cccaggtggccctca

SEQ ID NO: 241255 - DNA, 15 bp, Homo sapiens
acccaggtggccctc

SEQ ID NO: 241256 - DNA, 15 bp, Homo sapiens
cacccaggtggccct

SEQ ID NO: 241257 - DNA, 15 bp, Homo sapiens
ccacccaggtggccc

SEQ ID NO: 241258 - DNA, 15 bp, Homo sapiens
gccacccaggtggcc

SEQ ID NO: 241259 - DNA, 15 bp, Homo sapiens
tgccacccaggtggc

SEQ ID NO: 241260 - DNA, 15 bp, Homo sapiens
atgccacccaggtgg

SEQ ID NO: 241261 - DNA, 15 bp, Homo sapiens
tatgccacccaggtg

SEQ ID NO: 241262 - DNA, 15 bp, Homo sapiens
ctatgccacccaggt

SEQ ID NO: 241263 - DNA, 15 bp, Homo sapiens
gctatgccacccagg

SEQ ID NO: 241264 - DNA, 15 bp, Homo sapiens
agctatgccacccag

SEQ ID NO: 241265 - DNA, 15 bp, Homo sapiens
tagctatgccaccca

SEQ ID NO: 241266 - DNA, 15 bp, Homo sapiens
ctagctatgccaccc

SEQ ID NO: 241267 - DNA, 15 bp, Homo sapiens
tctagctatgccacc

SEQ ID NO: 241268 - DNA, 15 bp, Homo sapiens
gtctagctatgccac

SEQ ID NO: 241269 - DNA, 15 bp, Homo sapiens
ggtctagctatgcca

SEQ ID NO: 241270 - DNA, 15 bp, Homo sapiens
aggtctagctatgcc

SEQ ID NO: 241271 - DNA, 15 bp, Homo sapiens
gaggtctagctatgc

SEQ ID NO: 241272 - DNA, 15 bp, Homo sapiens
tgaggtctagctatg

SEQ ID NO: 241273 - DNA, 15 bp, Homo sapiens
atgaggtctagctat

SEQ ID NO: 241274 - DNA, 15 bp, Homo sapiens
gatgaggtctagcta

SEQ ID NO: 241275 - DNA, 15 bp, Homo sapiens
agatgaggtctagct

SEQ ID NO: 241276 - DNA, 15 bp, Homo sapiens
gagatgaggtctagc

SEQ ID NO: 241277 - DNA, 15 bp, Homo sapiens
agagatgaggtctag

SEQ ID NO: 241278 - DNA, 15 bp, Homo sapiens
tagagatgaggtcta

SEQ ID NO: 241279 - DNA, 15 bp, Homo sapiens
ttagagatgaggtct

SEQ ID NO: 241280 - DNA, 15 bp, Homo sapiens
tttagagatgaggtc

SEQ ID NO: 241281 - DNA, 15 bp, Homo sapiens
ttttagagatgaggt

SEQ ID NO: 241282 - DNA, 15 bp, Homo sapiens
tttttagagatgagg

SEQ ID NO: 241283 - DNA, 15 bp, Homo sapiens
ttttttagagatgag

SEQ ID NO: 241284 - DNA, 15 bp, Homo sapiens
attttttagagatga

SEQ ID NO: 241285 - DNA, 15 bp, Homo sapiens
tattttttagagatg

SEQ ID NO: 241286 - DNA, 15 bp, Homo sapiens
ttattttttagagat

SEQ ID NO: 241287 - DNA, 15 bp, Homo sapiens
cttattttttagaga

SEQ ID NO: 241288 - DNA, 15 bp, Homo sapiens
acttattttttagag

SEQ ID NO: 241289 - DNA, 15 bp, Homo sapiens
tacttattttttaga

SEQ ID NO: 241290 - DNA, 15 bp, Homo sapiens
ttacttattttttag

SEQ ID NO: 241291 - DNA, 15 bp, Homo sapiens
attacttatttttta

SEQ ID NO: 241292 - DNA, 15 bp, Homo sapiens
tattacttatttttt

SEQ ID NO: 241293 - DNA, 15 bp, Homo sapiens
ttattacttattttt

SEQ ID NO: 241294 - DNA, 15 bp, Homo sapiens
tttattacttatttt

SEQ ID NO: 241295 - DNA, 15 bp, Homo sapiens
atttattacttattt

SEQ ID NO: 241296 - DNA, 15 bp, Homo sapiens
tatttattacttatt

SEQ ID NO: 241297 - DNA, 15 bp, Homo sapiens
ttatttattacttat

SEQ ID NO: 241298 - DNA, 15 bp, Homo sapiens
tttatttattactta

SEQ ID NO: 241299 - DNA, 15 bp, Homo sapiens
atttatttattactt

SEQ ID NO: 241300 - DNA, 15 bp, Homo sapiens
tatttatttattact

SEQ ID NO: 241301 - DNA, 15 bp, Homo sapiens
atatttatttattac

SEQ ID NO: 241302 - DNA, 15 bp, Homo sapiens
aatatttatttatta

SEQ ID NO: 241303 - DNA, 15 bp, Homo sapiens
aaatatttatttatt

SEQ ID NO: 241304 - DNA, 15 bp, Homo sapiens
caaatatttatttat

SEQ ID NO: 241305 - DNA, 15 bp, Homo sapiens
acaaatatttattta

SEQ ID NO: 241306 - DNA, 15 bp, Homo sapiens
aacaaatatttattt

SEQ ID NO: 241307 - DNA, 15 bp, Homo sapiens
aaacaaatatttatt

SEQ ID NO: 241308 - DNA, 15 bp, Homo sapiens
aaaacaaatatttat

SEQ ID NO: 241309 - DNA, 15 bp, Homo sapiens
aaaaacaaatattta

SEQ ID NO: 241310 - DNA, 15 bp, Homo sapiens
caaaaacaaatattt

SEQ ID NO: 241311 - DNA, 15 bp, Homo sapiens
acaaaaacaaatatt

SEQ ID NO: 241312 - DNA, 15 bp, Homo sapiens
aacaaaaacaaatat

SEQ ID NO: 241313 - DNA, 15 bp, Homo sapiens
aaacaaaaacaaata

SEQ ID NO: 241314 - DNA, 15 bp, Homo sapiens
aaaacaaaaacaaat

SEQ ID NO: 241315 - DNA, 15 bp, Homo sapiens
gaaaaaaacaaaaac

SEQ ID NO: 241316 - DNA, 15 bp, Homo sapiens
agaaaaaaacaaaaa

SEQ ID NO: 241317 - DNA, 15 bp, Homo sapiens
aagaaaaaaacaaaa

SEQ ID NO: 241318 - DNA, 15 bp, Homo sapiens
aaagaaaaaaacaaa

SEQ ID NO: 241319 - DNA, 15 bp, Homo sapiens
aaaagaaaaaaacaa

SEQ ID NO: 241320 - DNA, 15 bp, Homo sapiens
aaaaagaaaaaaaca

SEQ ID NO: 241321 - DNA, 15 bp, Homo sapiens
gaaaaagaaaaaaac

SEQ ID NO: 241322 - DNA, 15 bp, Homo sapiens
agaaaaagaaaaaaa

SEQ ID NO: 241323 - DNA, 15 bp, Homo sapiens
aagaaaaagaaaaaa

SEQ ID NO: 241324 - DNA, 15 bp, Homo sapiens
aaagaaaaagaaaaa

SEQ ID NO: 241325 - DNA, 15 bp, Homo sapiens
gaaaagaaaaagaaa

SEQ ID NO: 241326 - DNA, 15 bp, Homo sapiens
agaaaagaaaaagaa

SEQ ID NO: 241327 - DNA, 15 bp, Homo sapiens
aagaaaagaaaaaga

SEQ ID NO: 241328 - DNA, 15 bp, Homo sapiens
aaagaaaagaaaaag

SEQ ID NO: 241329 - DNA, 15 bp, Homo sapiens
aagactccgtctcaa

SEQ ID NO: 241330 - DNA, 15 bp, Homo sapiens
caagactccgtctca

SEQ ID NO: 241331 - DNA, 15 bp, Homo sapiens
gcaagactccgtctc

SEQ ID NO: 241332 - DNA, 15 bp, Homo sapiens
agcaagactccgtct

SEQ ID NO: 241333 - DNA, 15 bp, Homo sapiens
gagcaagactccgtc

SEQ ID NO: 241334 - DNA, 15 bp, Homo sapiens
agagcaagactccgt

SEQ ID NO: 241335 - DNA, 15 bp, Homo sapiens
cagagcaagactccg

SEQ ID NO: 241336 - DNA, 15 bp, Homo sapiens
acagagcaagactcc

SEQ ID NO: 241337 - DNA, 15 bp, Homo sapiens
aacagagcaagactc

SEQ ID NO: 241338 - DNA, 15 bp, Homo sapiens
caacagagcaagact

SEQ ID NO: 241339 - DNA, 15 bp, Homo sapiens
gcaacagagcaagac

SEQ ID NO: 241340 - DNA, 15 bp, Homo sapiens
ggcaacagagcaaga

SEQ ID NO: 241341 - DNA, 15 bp, Homo sapiens
gggcaacagagcaag

SEQ ID NO: 241342 - DNA, 15 bp, Homo sapiens
tgggcaacagagcaa

SEQ ID NO: 241343 - DNA, 15 bp, Homo sapiens
ctgggcaacagagca

SEQ ID NO: 241344 - DNA, 15 bp, Homo sapiens
atcgcgccactgcac

SEQ ID NO: 241345 - DNA, 15 bp, Homo sapiens
gatcgcgccactgca

SEQ ID NO: 241346 - DNA, 15 bp, Homo sapiens
agatcgcgccactgc

SEQ ID NO: 241347 - DNA, 15 bp, Homo sapiens
gagatcgcgccactg

SEQ ID NO: 241348 - DNA, 15 bp, Homo sapiens
tgagatcgcgccact

SEQ ID NO: 241349 - DNA, 15 bp, Homo sapiens
ctgagatcgcgccac

SEQ ID NO: 241350 - DNA, 15 bp, Homo sapiens
gctgagatcgcgcca

SEQ ID NO: 241351 - DNA, 15 bp, Homo sapiens
agctgagatcgcgcc

SEQ ID NO: 241352 - DNA, 15 bp, Homo sapiens
gagctgagatcgcgc

SEQ ID NO: 241353 - DNA, 15 bp, Homo sapiens
tgagctgagatcgcg

SEQ ID NO: 241354 - DNA, 15 bp, Homo sapiens
gtgagctgagatcgc

SEQ ID NO: 241355 - DNA, 15 bp, Homo sapiens
cagcttgcagtgagc

SEQ ID NO: 241356 - DNA, 15 bp, Homo sapiens
acagcttgcagtgag

SEQ ID NO: 241357 - DNA, 15 bp, Homo sapiens
cacagcttgcagtga

SEQ ID NO: 241358 - DNA, 15 bp, Homo sapiens
gcacagcttgcagtg

SEQ ID NO: 241359 - DNA, 15 bp, Homo sapiens
ggcacagcttgcagt

SEQ ID NO: 241360 - DNA, 15 bp, Homo sapiens
aggcacagcttgcag

SEQ ID NO: 241361 - DNA, 15 bp, Homo sapiens
gaggcacagcttgca

SEQ ID NO: 241362 - DNA, 15 bp, Homo sapiens
ggaggcacagcttgc

SEQ ID NO: 241363 - DNA, 15 bp, Homo sapiens
aggaggcacagcttg

SEQ ID NO: 241364 - DNA, 15 bp, Homo sapiens
caggaggcacagctt

SEQ ID NO: 241365 - DNA, 15 bp, Homo sapiens
ccaggaggcacagct

SEQ ID NO: 241366 - DNA, 15 bp, Homo sapiens
cccaggaggcacagc

SEQ ID NO: 241367 - DNA, 15 bp, Homo sapiens
acccaggaggcacag

SEQ ID NO: 241368 - DNA, 15 bp, Homo sapiens
aacccaggaggcaca

SEQ ID NO: 241369 - DNA, 15 bp, Homo sapiens
gaacccaggaggcac

SEQ ID NO: 241370 - DNA, 15 bp, Homo sapiens
agtgggcgcctgtag

SEQ ID NO: 241371 - DNA, 15 bp, Homo sapiens
tagtgggcgcctgta

SEQ ID NO: 241372 - DNA, 15 bp, Homo sapiens
gtagtgggcgcctgt

SEQ ID NO: 241373 - DNA, 15 bp, Homo sapiens
ggtagtgggcgcctg

SEQ ID NO: 241374 - DNA, 15 bp, Homo sapiens
tggtagtgggcgcct

SEQ ID NO: 241375 - DNA, 15 bp, Homo sapiens
gtggtagtgggcgcc

SEQ ID NO: 241376 - DNA, 15 bp, Homo sapiens
cgtggtagtgggcgc

SEQ ID NO: 241377 - DNA, 15 bp, Homo sapiens
gcgtggtagtgggcg

SEQ ID NO: 241378 - DNA, 15 bp, Homo sapiens
ggcgtggtagtgggc

SEQ ID NO: 241379 - DNA, 15 bp, Homo sapiens
gggcgtggtagtggg

SEQ ID NO: 241380 - DNA, 15 bp, Homo sapiens
tgggcgtggtagtgg

SEQ ID NO: 241381 - DNA, 15 bp, Homo sapiens
ctgggcgtggtagtg

SEQ ID NO: 241382 - DNA, 15 bp, Homo sapiens
gctgggcgtggtagt

SEQ ID NO: 241383 - DNA, 15 bp, Homo sapiens
agctgggcgtggtag

SEQ ID NO: 241384 - DNA, 15 bp, Homo sapiens
tagctgggcgtggta

SEQ ID NO: 241385 - DNA, 15 bp, Homo sapiens
caaaaaattagctgg

SEQ ID NO: 241386 - DNA, 15 bp, Homo sapiens
acaaaaaattagctg

SEQ ID NO: 241387 - DNA, 15 bp, Homo sapiens
tacaaaaaattagct

SEQ ID NO: 241388 - DNA, 15 bp, Homo sapiens
taacgtggtgaaacc

SEQ ID NO: 241389 - DNA, 15 bp, Homo sapiens
ctaacgtggtgaaac

SEQ ID NO: 241390 - DNA, 15 bp, Homo sapiens
gctaacgtggtgaaa

SEQ ID NO: 241391 - DNA, 15 bp, Homo sapiens
ggctaacgtggtgaa

SEQ ID NO: 241392 - DNA, 15 bp, Homo sapiens
tggctaacgtggtga

SEQ ID NO: 241393 - DNA, 15 bp, Homo sapiens
ctggctaacgtggtg

SEQ ID NO: 241394 - DNA, 15 bp, Homo sapiens
cctggctaacgtggt

SEQ ID NO: 241395 - DNA, 15 bp, Homo sapiens
tcctggctaacgtgg

SEQ ID NO: 241396 - DNA, 15 bp, Homo sapiens
atcctggctaacgtg

SEQ ID NO: 241397 - DNA, 15 bp, Homo sapiens
catcctggctaacgt

SEQ ID NO: 241398 - DNA, 15 bp, Homo sapiens
ccatcctggctaacg

SEQ ID NO: 241399 - DNA, 15 bp, Homo sapiens
tgagaccatcctggc

SEQ ID NO: 241400 - DNA, 15 bp, Homo sapiens
ttgagaccatcctgg

SEQ ID NO: 241401 - DNA, 15 bp, Homo sapiens
attgagaccatcctg

SEQ ID NO: 241402 - DNA, 15 bp, Homo sapiens
gattgagaccatcct

SEQ ID NO: 241403 - DNA, 15 bp, Homo sapiens
agattgagaccatcc

SEQ ID NO: 241404 - DNA, 15 bp, Homo sapiens
gagattgagaccatc

SEQ ID NO: 241405 - DNA, 15 bp, Homo sapiens
ggagattgagaccat

SEQ ID NO: 241406 - DNA, 15 bp, Homo sapiens
aggagattgagacca

SEQ ID NO: 241407 - DNA, 15 bp, Homo sapiens
caggagattgagacc

SEQ ID NO: 241408 - DNA, 15 bp, Homo sapiens
tcaggagattgagac

SEQ ID NO: 241409 - DNA, 15 bp, Homo sapiens
gtcaggagattgaga

SEQ ID NO: 241410 - DNA, 15 bp, Homo sapiens
ggtcaggagattgag

SEQ ID NO: 241411 - DNA, 15 bp, Homo sapiens
aggtcaggagattga

SEQ ID NO: 241412 - DNA, 15 bp, Homo sapiens
gaggtcaggagattg

SEQ ID NO: 241413 - DNA, 15 bp, Homo sapiens
cgaggtcaggagatt

SEQ ID NO: 241414 - DNA, 15 bp, Homo sapiens
tggcggatcacgagg

SEQ ID NO: 241415 - DNA, 15 bp, Homo sapiens
ctggcggatcacgag

SEQ ID NO: 241416 - DNA, 15 bp, Homo sapiens
gctggcggatcacga

SEQ ID NO: 241417 - DNA, 15 bp, Homo sapiens
agctggcggatcacg

SEQ ID NO: 241418 - DNA, 15 bp, Homo sapiens
aagctggcggatcac

SEQ ID NO: 241419 - DNA, 15 bp, Homo sapiens
aaagctggcggatca

SEQ ID NO: 241420 - DNA, 15 bp, Homo sapiens
caaagctggcggatc

SEQ ID NO: 241421 - DNA, 15 bp, Homo sapiens
ccaaagctggcggat

SEQ ID NO: 241422 - DNA, 15 bp, Homo sapiens
gccaaagctggcgga

SEQ ID NO: 241423 - DNA, 15 bp, Homo sapiens
ggccaaagctggcgg

SEQ ID NO: 241424 - DNA, 15 bp, Homo sapiens
aggccaaagctggcg

SEQ ID NO: 241425 - DNA, 15 bp, Homo sapiens
gaggccaaagctggc

SEQ ID NO: 241426 - DNA, 15 bp, Homo sapiens
ggaggccaaagctgg

SEQ ID NO: 241427 - DNA, 15 bp, Homo sapiens
gggaggccaaagctg

SEQ ID NO: 241428 - DNA, 15 bp, Homo sapiens
tgggaggccaaagct

SEQ ID NO: 241429 - DNA, 15 bp, Homo sapiens
ttgggaggccaaagc

SEQ ID NO: 241430 - DNA, 15 bp, Homo sapiens
tttgggaggccaaag

SEQ ID NO: 241431 - DNA, 15 bp, Homo sapiens
ctttgggaggccaaa

SEQ ID NO: 241432 - DNA, 15 bp, Homo sapiens
acactttgggaggcc

SEQ ID NO: 241433 - DNA, 15 bp, Homo sapiens
cgcctgtaatcccaa

SEQ ID NO: 241434 - DNA, 15 bp, Homo sapiens
tcagtggctcacgcc

SEQ ID NO: 241435 - DNA, 15 bp, Homo sapiens
ctcagtggctcacgc

SEQ ID NO: 241436 - DNA, 15 bp, Homo sapiens
gctcagtggctcacg

SEQ ID NO: 241437 - DNA, 15 bp, Homo sapiens
ggctcagtggctcac

SEQ ID NO: 241438 - DNA, 15 bp, Homo sapiens
gggctcagtggctca

SEQ ID NO: 241439 - DNA, 15 bp, Homo sapiens
cgggctcagtggctc

SEQ ID NO: 241440 - DNA, 15 bp, Homo sapiens
gcgggctcagtggct

SEQ ID NO: 241441 - DNA, 15 bp, Homo sapiens
ggcgggctcagtggc

SEQ ID NO: 241442 - DNA, 15 bp, Homo sapiens
gggcgggctcagtgg

SEQ ID NO: 241443 - DNA, 15 bp, Homo sapiens
ggggcgggctcagtg

SEQ ID NO: 241444 - DNA, 15 bp, Homo sapiens
tggggcgggctcagt

SEQ ID NO: 241445 - DNA, 15 bp, Homo sapiens
atggggcgggctcag

SEQ ID NO: 241446 - DNA, 15 bp, Homo sapiens
tatggggcgggctca

SEQ ID NO: 241447 - DNA, 15 bp, Homo sapiens
atatggggcgggctc

SEQ ID NO: 241448 - DNA, 15 bp, Homo sapiens
catatggggcgggct

SEQ ID NO: 241449 - DNA, 15 bp, Homo sapiens
acatatggggcgggc

SEQ ID NO: 241450 - DNA, 15 bp, Homo sapiens
tacatatggggcggg

SEQ ID NO: 241451 - DNA, 15 bp, Homo sapiens
atacatatggggcgg

SEQ ID NO: 241452 - DNA, 15 bp, Homo sapiens
catacatatggggcg

SEQ ID NO: 241453 - DNA, 15 bp, Homo sapiens
acatacatatggggc

SEQ ID NO: 241454 - DNA, 15 bp, Homo sapiens
tacatacatatgggg

SEQ ID NO: 241455 - DNA, 15 bp, Homo sapiens
atacatacatatggg

SEQ ID NO: 241456 - DNA, 15 bp, Homo sapiens
tatacatacatatgg

SEQ ID NO: 241457 - DNA, 15 bp, Homo sapiens
atatacatacatatg

SEQ ID NO: 241458 - DNA, 15 bp, Homo sapiens
tatatacatacatat

SEQ ID NO: 241459 - DNA, 15 bp, Homo sapiens
atatatacatacata

SEQ ID NO: 241460 - DNA, 15 bp, Homo sapiens
tatatatacatacat

SEQ ID NO: 241461 - DNA, 15 bp, Homo sapiens
atatatatacataca

SEQ ID NO: 241462 - DNA, 15 bp, Homo sapiens
tatatatatacatac

SEQ ID NO: 241463 - DNA, 15 bp, Homo sapiens
atatatatatacata

SEQ ID NO: 241464 - DNA, 15 bp, Homo sapiens
aatatatatatacat

SEQ ID NO: 241465 - DNA, 15 bp, Homo sapiens
aaatatatatataca

SEQ ID NO: 241466 - DNA, 15 bp, Homo sapiens
aaaatatatatatac

SEQ ID NO: 241467 - DNA, 15 bp, Homo sapiens
aaaaatatatatata

SEQ ID NO: 241468 - DNA, 15 bp, Homo sapiens
aaaaaatatatatat

SEQ ID NO: 241469 - DNA, 15 bp, Homo sapiens
aaaaaaatatatata

SEQ ID NO: 241470 - DNA, 15 bp, Homo sapiens
taaaaaaatatatat

SEQ ID NO: 241471 - DNA, 15 bp, Homo sapiens
ttaaaaaaatatata

SEQ ID NO: 241472 - DNA, 15 bp, Homo sapiens
tttaaaaaaatatat

SEQ ID NO: 241473 - DNA, 15 bp, Homo sapiens
ttttaaaaaaatata

SEQ ID NO: 241474 - DNA, 15 bp, Homo sapiens
attttaaaaaaatat

SEQ ID NO: 241475 - DNA, 15 bp, Homo sapiens
cattttaaaaaaata

SEQ ID NO: 241476 - DNA, 15 bp, Homo sapiens
ccattttaaaaaaat

SEQ ID NO: 241477 - DNA, 15 bp, Homo sapiens
cccattttaaaaaaa

SEQ ID NO: 241478 - DNA, 15 bp, Homo sapiens
tcccattttaaaaaa

SEQ ID NO: 241479 - DNA, 15 bp, Homo sapiens
ctcccattttaaaaa

SEQ ID NO: 241480 - DNA, 15 bp, Homo sapiens
tctcccattttaaaa

SEQ ID NO: 241481 - DNA, 15 bp, Homo sapiens
gtctcccattttaaa

SEQ ID NO: 241482 - DNA, 15 bp, Homo sapiens
ggtctcccattttaa

SEQ ID NO: 241483 - DNA, 15 bp, Homo sapiens
tggtctcccatttta

SEQ ID NO: 241484 - DNA, 15 bp, Homo sapiens
ctggtctcccatttt

SEQ ID NO: 241485 - DNA, 15 bp, Homo sapiens
cctggtctcccattt

SEQ ID NO: 241486 - DNA, 15 bp, Homo sapiens
gcctggtctcccatt

SEQ ID NO: 241487 - DNA, 15 bp, Homo sapiens
tgcctggtctcccat

SEQ ID NO: 241488 - DNA, 15 bp, Homo sapiens
atgcctggtctccca

SEQ ID NO: 241489 - DNA, 15 bp, Homo sapiens
catgcctggtctccc

SEQ ID NO: 241490 - DNA, 15 bp, Homo sapiens
ccatgcctggtctcc

SEQ ID NO: 241491 - DNA, 15 bp, Homo sapiens
accatgcctggtctc

SEQ ID NO: 241492 - DNA, 15 bp, Homo sapiens
caccatgcctggtct

SEQ ID NO: 241493 - DNA, 15 bp, Homo sapiens
ccaccatgcctggtc

SEQ ID NO: 241494 - DNA, 15 bp, Homo sapiens
gccaccatgcctggt

SEQ ID NO: 241495 - DNA, 15 bp, Homo sapiens
agccaccatgcctgg

SEQ ID NO: 241496 - DNA, 15 bp, Homo sapiens
gagccaccatgcctg

SEQ ID NO: 241497 - DNA, 15 bp, Homo sapiens
tgagccaccatgcct

SEQ ID NO: 241498 - DNA, 15 bp, Homo sapiens
atgagccaccatgcc

SEQ ID NO: 241499 - DNA, 15 bp, Homo sapiens
catgagccaccatgc

SEQ ID NO: 241500 - DNA, 15 bp, Homo sapiens
gcatgagccaccatg

SEQ ID NO: 241501 - DNA, 15 bp, Homo sapiens
ggcatgagccaccat

SEQ ID NO: 241502 - DNA, 15 bp, Homo sapiens
taggcatgagccacc

SEQ ID NO: 241503 - DNA, 15 bp, Homo sapiens
ctaggcatgagccac

SEQ ID NO: 241504 - DNA, 15 bp, Homo sapiens
tctaggcatgagcca

SEQ ID NO: 241505 - DNA, 15 bp, Homo sapiens
ttctaggcatgagcc

SEQ ID NO: 241506 - DNA, 15 bp, Homo sapiens
attctaggcatgagc

SEQ ID NO: 241507 - DNA, 15 bp, Homo sapiens
gattctaggcatgag

SEQ ID NO: 241508 - DNA, 15 bp, Homo sapiens
ggattctaggcatga

SEQ ID NO: 241509 - DNA, 15 bp, Homo sapiens
gggattctaggcatg

SEQ ID NO: 241510 - DNA, 15 bp, Homo sapiens
tgggattctaggcat

SEQ ID NO: 241511 - DNA, 15 bp, Homo sapiens
ctgggattctaggca

SEQ ID NO: 241512 - DNA, 15 bp, Homo sapiens
gctgggattctaggc

SEQ ID NO: 241513 - DNA, 15 bp, Homo sapiens
tgctgggattctagg

SEQ ID NO: 241514 - DNA, 15 bp, Homo sapiens
gtgctgggattctag

SEQ ID NO: 241515 - DNA, 15 bp, Homo sapiens
agtgctgggattcta

SEQ ID NO: 241516 - DNA, 15 bp, Homo sapiens
aagtgctgggattct

SEQ ID NO: 241517 - DNA, 15 bp, Homo sapiens
aaagtgctgggattc

SEQ ID NO: 241518 - DNA, 15 bp, Homo sapiens
ttcccaaagtgctgg

SEQ ID NO: 241519 - DNA, 15 bp, Homo sapiens
cttcccaaagtgctg

SEQ ID NO: 241520 - DNA, 15 bp, Homo sapiens
gcttcccaaagtgct

SEQ ID NO: 241521 - DNA, 15 bp, Homo sapiens
agcttcccaaagtgc

SEQ ID NO: 241522 - DNA, 15 bp, Homo sapiens
cagcttcccaaagtg

SEQ ID NO: 241523 - DNA, 15 bp, Homo sapiens
tcagcttcccaaagt

SEQ ID NO: 241524 - DNA, 15 bp, Homo sapiens
ctcagcttcccaaag

SEQ ID NO: 241525 - DNA, 15 bp, Homo sapiens
cctcagcttcccaaa

SEQ ID NO: 241526 - DNA, 15 bp, Homo sapiens
acctcagcttcccaa

SEQ ID NO: 241527 - DNA, 15 bp, Homo sapiens
tacctcagcttccca

SEQ ID NO: 241528 - DNA, 15 bp, Homo sapiens
ctacctcagcttccc

SEQ ID NO: 241529 - DNA, 15 bp, Homo sapiens
cctacctcagcttcc

SEQ ID NO: 241530 - DNA, 15 bp, Homo sapiens
gcctacctcagcttc

SEQ ID NO: 241531 - DNA, 15 bp, Homo sapiens
cgcctacctcagctt

SEQ ID NO: 241532 - DNA, 15 bp, Homo sapiens
ccgcctacctcagct

SEQ ID NO: 241533 - DNA, 15 bp, Homo sapiens
tccgcctacctcagc

SEQ ID NO: 241534 - DNA, 15 bp, Homo sapiens
atccgcctacctcag

SEQ ID NO: 241535 - DNA, 15 bp, Homo sapiens
gatccgcctacctca

SEQ ID NO: 241536 - DNA, 15 bp, Homo sapiens
tgatccgcctacctc

SEQ ID NO: 241537 - DNA, 15 bp, Homo sapiens
gtgatccgcctacct

SEQ ID NO: 241538 - DNA, 15 bp, Homo sapiens
agtgatccgcctacc

SEQ ID NO: 241539 - DNA, 15 bp, Homo sapiens
aagtgatccgcctac

SEQ ID NO: 241540 - DNA, 15 bp, Homo sapiens
caagtgatccgccta

SEQ ID NO: 241541 - DNA, 15 bp, Homo sapiens
tcaagtgatccgcct

SEQ ID NO: 241542 - DNA, 15 bp, Homo sapiens
ctcaagtgatccgcc

SEQ ID NO: 241543 - DNA, 15 bp, Homo sapiens
cctcaagtgatccgc

SEQ ID NO: 241544 - DNA, 15 bp, Homo sapiens
gcctcaagtgatccg

SEQ ID NO: 241545 - DNA, 15 bp, Homo sapiens
ggcctcaagtgatcc

SEQ ID NO: 241546 - DNA, 15 bp, Homo sapiens
tggcctcaagtgatc

SEQ ID NO: 241547 - DNA, 15 bp, Homo sapiens
atggcctcaagtgat

SEQ ID NO: 241548 - DNA, 15 bp, Homo sapiens
catggcctcaagtga

SEQ ID NO: 241549 - DNA, 15 bp, Homo sapiens
tcatggcctcaagtg

SEQ ID NO: 241550 - DNA, 15 bp, Homo sapiens
ctcatggcctcaagt

SEQ ID NO: 241551 - DNA, 15 bp, Homo sapiens
actcatggcctcaag

SEQ ID NO: 241552 - DNA, 15 bp, Homo sapiens
aactcatggcctcaa

SEQ ID NO: 241553 - DNA, 15 bp, Homo sapiens
aaactcatggcctca

SEQ ID NO: 241554 - DNA, 15 bp, Homo sapiens
caaactcatggcctc

SEQ ID NO: 241555 - DNA, 15 bp, Homo sapiens
tcaaactcatggcct

SEQ ID NO: 241556 - DNA, 15 bp, Homo sapiens
ctcaaactcatggcc

SEQ ID NO: 241557 - DNA, 15 bp, Homo sapiens
tctcaaactcatggc

SEQ ID NO: 241558 - DNA, 15 bp, Homo sapiens
gtctcaaactcatgg

SEQ ID NO: 241559 - DNA, 15 bp, Homo sapiens
ggtctcaaactcatg

SEQ ID NO: 241560 - DNA, 15 bp, Homo sapiens
tggtctcaaactcat

SEQ ID NO: 241561 - DNA, 15 bp, Homo sapiens
ctggtctcaaactca

SEQ ID NO: 241562 - DNA, 15 bp, Homo sapiens
gcaggctggtctcaa

SEQ ID NO: 241563 - DNA, 15 bp, Homo sapiens
agcaggctggtctca

SEQ ID NO: 241564 - DNA, 15 bp, Homo sapiens
gagcaggctggtctc

SEQ ID NO: 241565 - DNA, 15 bp, Homo sapiens
tgagcaggctggtct

SEQ ID NO: 241566 - DNA, 15 bp, Homo sapiens
ttgagcaggctggtc

SEQ ID NO: 241567 - DNA, 15 bp, Homo sapiens
gttgagcaggctggt

SEQ ID NO: 241568 - DNA, 15 bp, Homo sapiens
tgttgagcaggctgg

SEQ ID NO: 241569 - DNA, 15 bp, Homo sapiens
atgttgagcaggctg

SEQ ID NO: 241570 - DNA, 15 bp, Homo sapiens
catgttgagcaggct

SEQ ID NO: 241571 - DNA, 15 bp, Homo sapiens
tcatgttgagcaggc

SEQ ID NO: 241572 - DNA, 15 bp, Homo sapiens
atcatgttgagcagg

SEQ ID NO: 241573 - DNA, 15 bp, Homo sapiens
catcatgttgagcag

SEQ ID NO: 241574 - DNA, 15 bp, Homo sapiens
tcatcatgttgagca

SEQ ID NO: 241575 - DNA, 15 bp, Homo sapiens
ttcatcatgttgagc

SEQ ID NO: 241576 - DNA, 15 bp, Homo sapiens
tttcatcatgttgag

SEQ ID NO: 241577 - DNA, 15 bp, Homo sapiens
gtttcatcatgttga

SEQ ID NO: 241578 - DNA, 15 bp, Homo sapiens
agtttcatcatgttg

SEQ ID NO: 241579 - DNA, 15 bp, Homo sapiens
aagtttcatcatgtt

SEQ ID NO: 241580 - DNA, 15 bp, Homo sapiens
gaagtttcatcatgt

SEQ ID NO: 241581 - DNA, 15 bp, Homo sapiens
agaagtttcatcatg

SEQ ID NO: 241582 - DNA, 15 bp, Homo sapiens
tagaagtttcatcat

SEQ ID NO: 241583 - DNA, 15 bp, Homo sapiens
atagaagtttcatca

SEQ ID NO: 241584 - DNA, 15 bp, Homo sapiens
gatagaagtttcatc

SEQ ID NO: 241585 - DNA, 15 bp, Homo sapiens
agatagaagtttcat

SEQ ID NO: 241586 - DNA, 15 bp, Homo sapiens
gagatagaagtttca

SEQ ID NO: 241587 - DNA, 15 bp, Homo sapiens
agagatagaagtttc

SEQ ID NO: 241588 - DNA, 15 bp, Homo sapiens
tagagatagaagttt

SEQ ID NO: 241589 - DNA, 15 bp, Homo sapiens
gtagagatagaagtt

SEQ ID NO: 241590 - DNA, 15 bp, Homo sapiens
agtagagatagaagt

SEQ ID NO: 241591 - DNA, 15 bp, Homo sapiens
tagtagagatagaag

SEQ ID NO: 241592 - DNA, 15 bp, Homo sapiens
ttagtagagatagaa

SEQ ID NO: 241593 - DNA, 15 bp, Homo sapiens
tttagtagagataga

SEQ ID NO: 241594 - DNA, 15 bp, Homo sapiens
ttttagtagagatag

SEQ ID NO: 241595 - DNA, 15 bp, Homo sapiens
tttttagtagagata

SEQ ID NO: 241596 - DNA, 15 bp, Homo sapiens
ttttttagtagagat

SEQ ID NO: 241597 - DNA, 15 bp, Homo sapiens
tttttttagtagaga

SEQ ID NO: 241598 - DNA, 15 bp, Homo sapiens
ttttttttagtagag

SEQ ID NO: 241599 - DNA, 15 bp, Homo sapiens
tttttttttagtaga

SEQ ID NO: 241600 - DNA, 15 bp, Homo sapiens
ttttttttttagtag

SEQ ID NO: 241601 - DNA, 15 bp, Homo sapiens
cttttttttttagta

SEQ ID NO: 241602 - DNA, 15 bp, Homo sapiens
acttttttttttagt

SEQ ID NO: 241603 - DNA, 15 bp, Homo sapiens
cacttttttttttag

SEQ ID NO: 241604 - DNA, 15 bp, Homo sapiens
ccactttttttttta

SEQ ID NO: 241605 - DNA, 15 bp, Homo sapiens
cccactttttttttt

SEQ ID NO: 241606 - DNA, 15 bp, Homo sapiens
tcccacttttttttt

SEQ ID NO: 241607 - DNA, 15 bp, Homo sapiens
atcccactttttttt

SEQ ID NO: 241608 - DNA, 15 bp, Homo sapiens
aatcccacttttttt

SEQ ID NO: 241609 - DNA, 15 bp, Homo sapiens
taatcccactttttt

SEQ ID NO: 241610 - DNA, 15 bp, Homo sapiens
ctaatcccacttttt

SEQ ID NO: 241611 - DNA, 15 bp, Homo sapiens
cctaatcccactttt

SEQ ID NO: 241612 - DNA, 15 bp, Homo sapiens
acctaatcccacttt

SEQ ID NO: 241613 - DNA, 15 bp, Homo sapiens
gacctaatcccactt

SEQ ID NO: 241614 - DNA, 15 bp, Homo sapiens
tgacctaatcccact

SEQ ID NO: 241615 - DNA, 15 bp, Homo sapiens
ctgacctaatcccac

SEQ ID NO: 241616 - DNA, 15 bp, Homo sapiens
cctgacctaatccca

SEQ ID NO: 241617 - DNA, 15 bp, Homo sapiens
gcctgacctaatccc

SEQ ID NO: 241618 - DNA, 15 bp, Homo sapiens
tgcctgacctaatcc

SEQ ID NO: 241619 - DNA, 15 bp, Homo sapiens
gtgcctgacctaatc

SEQ ID NO: 241620 - DNA, 15 bp, Homo sapiens
cgtgcctgacctaat

SEQ ID NO: 241621 - DNA, 15 bp, Homo sapiens
ccgtgcctgacctaa

SEQ ID NO: 241622 - DNA, 15 bp, Homo sapiens
accgtgcctgaccta

SEQ ID NO: 241623 - DNA, 15 bp, Homo sapiens
caccgtgcctgacct

SEQ ID NO: 241624 - DNA, 15 bp, Homo sapiens
ccaccgtgcctgacc

SEQ ID NO: 241625 - DNA, 15 bp, Homo sapiens
gccaccgtgcctgac

SEQ ID NO: 241626 - DNA, 15 bp, Homo sapiens
agccaccgtgcctga

SEQ ID NO: 241627 - DNA, 15 bp, Homo sapiens
gagccaccgtgcctg

SEQ ID NO: 241628 - DNA, 15 bp, Homo sapiens
tgagccaccgtgcct

SEQ ID NO: 241629 - DNA, 15 bp, Homo sapiens
gaaagtgctgggatt

SEQ ID NO: 241630 - DNA, 15 bp, Homo sapiens
tgaaagtgctgggat

SEQ ID NO: 241631 - DNA, 15 bp, Homo sapiens
ctgaaagtgctggga

SEQ ID NO: 241632 - DNA, 15 bp, Homo sapiens
tctgaaagtgctggg

SEQ ID NO: 241633 - DNA, 15 bp, Homo sapiens
ctctgaaagtgctgg

SEQ ID NO: 241634 - DNA, 15 bp, Homo sapiens
cctctgaaagtgctg

SEQ ID NO: 241635 - DNA, 15 bp, Homo sapiens
gcctctgaaagtgct

SEQ ID NO: 241636 - DNA, 15 bp, Homo sapiens
ggcctctgaaagtgc

SEQ ID NO: 241637 - DNA, 15 bp, Homo sapiens
cggcctctgaaagtg

SEQ ID NO: 241638 - DNA, 15 bp, Homo sapiens
tcggcctctgaaagt

SEQ ID NO: 241639 - DNA, 15 bp, Homo sapiens
ctcggcctctgaaag

SEQ ID NO: 241640 - DNA, 15 bp, Homo sapiens
cctcggcctctgaaa

SEQ ID NO: 241641 - DNA, 15 bp, Homo sapiens
gcctcggcctctgaa

SEQ ID NO: 241642 - DNA, 15 bp, Homo sapiens
tgcctcggcctctga

SEQ ID NO: 241643 - DNA, 15 bp, Homo sapiens
ctgcctcggcctctg

SEQ ID NO: 241644 - DNA, 15 bp, Homo sapiens
cctgcctcggcctct

SEQ ID NO: 241645 - DNA, 15 bp, Homo sapiens
tcctgcctcggcctc

SEQ ID NO: 241646 - DNA, 15 bp, Homo sapiens
ctcctgcctcggcct

SEQ ID NO: 241647 - DNA, 15 bp, Homo sapiens
cctcctgcctcggcc

SEQ ID NO: 241648 - DNA, 15 bp, Homo sapiens
tcctcctgcctcggc

SEQ ID NO: 241649 - DNA, 15 bp, Homo sapiens
atcctcctgcctcgg

SEQ ID NO: 241650 - DNA, 15 bp, Homo sapiens
gatcctcctgcctcg

SEQ ID NO: 241651 - DNA, 15 bp, Homo sapiens
atgatcctcctgcct

SEQ ID NO: 241652 - DNA, 15 bp, Homo sapiens
catgatcctcctgcc

SEQ ID NO: 241653 - DNA, 15 bp, Homo sapiens
tcatgatcctcctgc

SEQ ID NO: 241654 - DNA, 15 bp, Homo sapiens
ctcatgatcctcctg

SEQ ID NO: 241655 - DNA, 15 bp, Homo sapiens
cctcatgatcctcct

SEQ ID NO: 241656 - DNA, 15 bp, Homo sapiens
acctcatgatcctcc

SEQ ID NO: 241657 - DNA, 15 bp, Homo sapiens
gacctcatgatcctc

SEQ ID NO: 241658 - DNA, 15 bp, Homo sapiens
tgacctcatgatcct

SEQ ID NO: 241659 - DNA, 15 bp, Homo sapiens
ctgacctcatgatcc

SEQ ID NO: 241660 - DNA, 15 bp, Homo sapiens
cctgacctcatgatc

SEQ ID NO: 241661 - DNA, 15 bp, Homo sapiens
tcctgacctcatgat

SEQ ID NO: 241662 - DNA, 15 bp, Homo sapiens
ctcctgacctcatga

SEQ ID NO: 241663 - DNA, 15 bp, Homo sapiens
tctcctgacctcatg

SEQ ID NO: 241664 - DNA, 15 bp, Homo sapiens
atctcctgacctcat

SEQ ID NO: 241665 - DNA, 15 bp, Homo sapiens
gatctcctgacctca

SEQ ID NO: 241666 - DNA, 15 bp, Homo sapiens
tggtctcgatctcct

SEQ ID NO: 241667 - DNA, 15 bp, Homo sapiens
atggtctcgatctcc

SEQ ID NO: 241668 - DNA, 15 bp, Homo sapiens
gatggtctcgatctc

SEQ ID NO: 241669 - DNA, 15 bp, Homo sapiens
ggatggtctcgatct

SEQ ID NO: 241670 - DNA, 15 bp, Homo sapiens
aggatggtctcgatc

SEQ ID NO: 241671 - DNA, 15 bp, Homo sapiens
caggatggtctcgat

SEQ ID NO: 241672 - DNA, 15 bp, Homo sapiens
ccaggatggtctcga

SEQ ID NO: 241673 - DNA, 15 bp, Homo sapiens
gccaggatggtctcg

SEQ ID NO: 241674 - DNA, 15 bp, Homo sapiens
agccaggatggtctc

SEQ ID NO: 241675 - DNA, 15 bp, Homo sapiens
gtgttagccaggatg

SEQ ID NO: 241676 - DNA, 15 bp, Homo sapiens
cgtgttagccaggat

SEQ ID NO: 241677 - DNA, 15 bp, Homo sapiens
caccgtgttagccag

SEQ ID NO: 241678 - DNA, 15 bp, Homo sapiens
tcaccgtgttagcca

SEQ ID NO: 241679 - DNA, 15 bp, Homo sapiens
ttcaccgtgttagcc

SEQ ID NO: 241680 - DNA, 15 bp, Homo sapiens
tttcaccgtgttagc

SEQ ID NO: 241681 - DNA, 15 bp, Homo sapiens
gtttcaccgtgttag

SEQ ID NO: 241682 - DNA, 15 bp, Homo sapiens
ggtttcaccgtgtta

SEQ ID NO: 241683 - DNA, 15 bp, Homo sapiens
gggtttcaccgtgtt

SEQ ID NO: 241684 - DNA, 15 bp, Homo sapiens
ggggtttcaccgtgt

SEQ ID NO: 241685 - DNA, 15 bp, Homo sapiens
cggggtttcaccgtg

SEQ ID NO: 241686 - DNA, 15 bp, Homo sapiens
acggggtttcaccgt

SEQ ID NO: 241687 - DNA, 15 bp, Homo sapiens
gacggggtttcaccg

SEQ ID NO: 241688 - DNA, 15 bp, Homo sapiens
ttttttagtagagac

SEQ ID NO: 241689 - DNA, 15 bp, Homo sapiens
atttttttagtagag

SEQ ID NO: 241690 - DNA, 15 bp, Homo sapiens
tatttttttagtaga

SEQ ID NO: 241691 - DNA, 15 bp, Homo sapiens
gtatttttttagtag

SEQ ID NO: 241692 - DNA, 15 bp, Homo sapiens
tgtatttttttagta

SEQ ID NO: 241693 - DNA, 15 bp, Homo sapiens
ttgtatttttttagt

SEQ ID NO: 241694 - DNA, 15 bp, Homo sapiens
tttgtatttttttag

SEQ ID NO: 241695 - DNA, 15 bp, Homo sapiens
ttttgtattttttta

SEQ ID NO: 241696 - DNA, 15 bp, Homo sapiens
cgccaccacgcctgg

SEQ ID NO: 241697 - DNA, 15 bp, Homo sapiens
ccgccaccacgcctg

SEQ ID NO: 241698 - DNA, 15 bp, Homo sapiens
cccgccaccacgcct

SEQ ID NO: 241699 - DNA, 15 bp, Homo sapiens
acccgccaccacgcc

SEQ ID NO: 241700 - DNA, 15 bp, Homo sapiens
cacccgccaccacgc

SEQ ID NO: 241701 - DNA, 15 bp, Homo sapiens
gcacccgccaccacg

SEQ ID NO: 241702 - DNA, 15 bp, Homo sapiens
ggcacccgccaccac

SEQ ID NO: 241703 - DNA, 15 bp, Homo sapiens
aggcacccgccacca

SEQ ID NO: 241704 - DNA, 15 bp, Homo sapiens
caggcacccgccacc

SEQ ID NO: 241705 - DNA, 15 bp, Homo sapiens
acaggcacccgccac

SEQ ID NO: 241706 - DNA, 15 bp, Homo sapiens
tacaggcacccgcca

SEQ ID NO: 241707 - DNA, 15 bp, Homo sapiens
ctacaggcacccgcc

SEQ ID NO: 241708 - DNA, 15 bp, Homo sapiens
actacaggcacccgc

SEQ ID NO: 241709 - DNA, 15 bp, Homo sapiens
gactacaggcacccg

SEQ ID NO: 241710 - DNA, 15 bp, Homo sapiens
ggactacaggcaccc

SEQ ID NO: 241711 - DNA, 15 bp, Homo sapiens
gggactacaggcacc

SEQ ID NO: 241712 - DNA, 15 bp, Homo sapiens
cattctcctgcctca

SEQ ID NO: 241713 - DNA, 15 bp, Homo sapiens
ccattctcctgcctc

SEQ ID NO: 241714 - DNA, 15 bp, Homo sapiens
gccattctcctgcct

SEQ ID NO: 241715 - DNA, 15 bp, Homo sapiens
cgccattctcctgcc

SEQ ID NO: 241716 - DNA, 15 bp, Homo sapiens
acgccattctcctgc

SEQ ID NO: 241717 - DNA, 15 bp, Homo sapiens
cacgccattctcctg

SEQ ID NO: 241718 - DNA, 15 bp, Homo sapiens
tcacgccattctcct

SEQ ID NO: 241719 - DNA, 15 bp, Homo sapiens
ttcacgccattctcc

SEQ ID NO: 241720 - DNA, 15 bp, Homo sapiens
gttcacgccattctc

SEQ ID NO: 241721 - DNA, 15 bp, Homo sapiens
ggttcacgccattct

SEQ ID NO: 241722 - DNA, 15 bp, Homo sapiens
gggttcacgccattc

SEQ ID NO: 241723 - DNA, 15 bp, Homo sapiens
cgggttcacgccatt

SEQ ID NO: 241724 - DNA, 15 bp, Homo sapiens
ccgggttcacgccat

SEQ ID NO: 241725 - DNA, 15 bp, Homo sapiens
cccgggttcacgcca

SEQ ID NO: 241726 - DNA, 15 bp, Homo sapiens
tcccgggttcacgcc

SEQ ID NO: 241727 - DNA, 15 bp, Homo sapiens
ctcccgggttcacgc

SEQ ID NO: 241728 - DNA, 15 bp, Homo sapiens
cctcccgggttcacg

SEQ ID NO: 241729 - DNA, 15 bp, Homo sapiens
gcctcccgggttcac

SEQ ID NO: 241730 - DNA, 15 bp, Homo sapiens
cgcctcccgggttca

SEQ ID NO: 241731 - DNA, 15 bp, Homo sapiens
ccgcctcccgggttc

SEQ ID NO: 241732 - DNA, 15 bp, Homo sapiens
tccgcctcccgggtt

SEQ ID NO: 241733 - DNA, 15 bp, Homo sapiens
ctccgcctcccgggt

SEQ ID NO: 241734 - DNA, 15 bp, Homo sapiens
gctccgcctcccggg

SEQ ID NO: 241735 - DNA, 15 bp, Homo sapiens
agctccgcctcccgg

SEQ ID NO: 241736 - DNA, 15 bp, Homo sapiens
aagctccgcctcccg

SEQ ID NO: 241737 - DNA, 15 bp, Homo sapiens
caagctccgcctccc

SEQ ID NO: 241738 - DNA, 15 bp, Homo sapiens
gcaagctccgcctcc

SEQ ID NO: 241739 - DNA, 15 bp, Homo sapiens
tgcaagctccgcctc

SEQ ID NO: 241740 - DNA, 15 bp, Homo sapiens
ctgcaagctccgcct

SEQ ID NO: 241741 - DNA, 15 bp, Homo sapiens
actgcaagctccgcc

SEQ ID NO: 241742 - DNA, 15 bp, Homo sapiens
cactgcaagctccgc

SEQ ID NO: 241743 - DNA, 15 bp, Homo sapiens
tcactgcaagctccg

SEQ ID NO: 241744 - DNA, 15 bp, Homo sapiens
tggctcactgcaagc

SEQ ID NO: 241745 - DNA, 15 bp, Homo sapiens
ttggctcactgcaag

SEQ ID NO: 241746 - DNA, 15 bp, Homo sapiens
gatcttggctcactg

SEQ ID NO: 241747 - DNA, 15 bp, Homo sapiens
cgatcttggctcact

SEQ ID NO: 241748 - DNA, 15 bp, Homo sapiens
acgatcttggctcac

SEQ ID NO: 241749 - DNA, 15 bp, Homo sapiens
cacgatcttggctca

SEQ ID NO: 241750 - DNA, 15 bp, Homo sapiens
gcacgatcttggctc

SEQ ID NO: 241751 - DNA, 15 bp, Homo sapiens
ggcacgatcttggct

SEQ ID NO: 241752 - DNA, 15 bp, Homo sapiens
tggcacgatcttggc

SEQ ID NO: 241753 - DNA, 15 bp, Homo sapiens
gtggcacgatcttgg

SEQ ID NO: 241754 - DNA, 15 bp, Homo sapiens
agtggcacgatcttg

SEQ ID NO: 241755 - DNA, 15 bp, Homo sapiens
cagtggcacgatctt

SEQ ID NO: 241756 - DNA, 15 bp, Homo sapiens
acagtggcacgatct

SEQ ID NO: 241757 - DNA, 15 bp, Homo sapiens
tacagtggcacgatc

SEQ ID NO: 241758 - DNA, 15 bp, Homo sapiens
gtacagtggcacgat

SEQ ID NO: 241759 - DNA, 15 bp, Homo sapiens
agtacagtggcacga

SEQ ID NO: 241760 - DNA, 15 bp, Homo sapiens
gagtacagtggcacg

SEQ ID NO: 241761 - DNA, 15 bp, Homo sapiens
ggagtacagtggcac

SEQ ID NO: 241762 - DNA, 15 bp, Homo sapiens
tggagtacagtggca

SEQ ID NO: 241763 - DNA, 15 bp, Homo sapiens
ctggagtacagtggc

SEQ ID NO: 241764 - DNA, 15 bp, Homo sapiens
gctggagtacagtgg

SEQ ID NO: 241765 - DNA, 15 bp, Homo sapiens
ggctggagtacagtg

SEQ ID NO: 241766 - DNA, 15 bp, Homo sapiens
aggctggagtacagt

SEQ ID NO: 241767 - DNA, 15 bp, Homo sapiens
caggctggagtacag

SEQ ID NO: 241768 - DNA, 15 bp, Homo sapiens
ccaggctggagtaca

SEQ ID NO: 241769 - DNA, 15 bp, Homo sapiens
cccaggctggagtac

SEQ ID NO: 241770 - DNA, 15 bp, Homo sapiens
gcccaggctggagta

SEQ ID NO: 241771 - DNA, 15 bp, Homo sapiens
gctctgtcgcccagg

SEQ ID NO: 241772 - DNA, 15 bp, Homo sapiens
tgctctgtcgcccag

SEQ ID NO: 241773 - DNA, 15 bp, Homo sapiens
ttgctctgtcgccca

SEQ ID NO: 241774 - DNA, 15 bp, Homo sapiens
cttgctctgtcgccc

SEQ ID NO: 241775 - DNA, 15 bp, Homo sapiens
tcttgctctgtcgcc

SEQ ID NO: 241776 - DNA, 15 bp, Homo sapiens
gtcttgctctgtcgc

SEQ ID NO: 241777 - DNA, 15 bp, Homo sapiens
agtcttgctctgtcg

SEQ ID NO: 241778 - DNA, 15 bp, Homo sapiens
acttttttttttttt

SEQ ID NO: 241779 - DNA, 15 bp, Homo sapiens
cactttttttttttt

SEQ ID NO: 241780 - DNA, 15 bp, Homo sapiens
ccacttttttttttt

SEQ ID NO: 241781 - DNA, 15 bp, Homo sapiens
caatcccactttttt

SEQ ID NO: 241782 - DNA, 15 bp, Homo sapiens
tcaatcccacttttt

SEQ ID NO: 241783 - DNA, 15 bp, Homo sapiens
gtcaatcccactttt

SEQ ID NO: 241784 - DNA, 15 bp, Homo sapiens
tgtcaatcccacttt

SEQ ID NO: 241785 - DNA, 15 bp, Homo sapiens
atgtcaatcccactt

SEQ ID NO: 241786 - DNA, 15 bp, Homo sapiens
aatgtcaatcccact

SEQ ID NO: 241787 - DNA, 15 bp, Homo sapiens
gaatgtcaatcccac

SEQ ID NO: 241788 - DNA, 15 bp, Homo sapiens
agaatgtcaatccca

SEQ ID NO: 241789 - DNA, 15 bp, Homo sapiens
gagaatgtcaatccc

SEQ ID NO: 241790 - DNA, 15 bp, Homo sapiens
agagaatgtcaatcc

SEQ ID NO: 241791 - DNA, 15 bp, Homo sapiens
aagagaatgtcaatc

SEQ ID NO: 241792 - DNA, 15 bp, Homo sapiens
gaagagaatgtcaat

SEQ ID NO: 241793 - DNA, 15 bp, Homo sapiens
tgaagagaatgtcaa

SEQ ID NO: 241794 - DNA, 15 bp, Homo sapiens
ttgaagagaatgtca

SEQ ID NO: 241795 - DNA, 15 bp, Homo sapiens
tttgaagagaatgtc

SEQ ID NO: 241796 - DNA, 15 bp, Homo sapiens
ctttgaagagaatgt

SEQ ID NO: 241797 - DNA, 15 bp, Homo sapiens
actttgaagagaatg

SEQ ID NO: 241798 - DNA, 15 bp, Homo sapiens
aactttgaagagaat

SEQ ID NO: 241799 - DNA, 15 bp, Homo sapiens
gaactttgaagagaa

SEQ ID NO: 241800 - DNA, 15 bp, Homo sapiens
agaactttgaagaga

SEQ ID NO: 241801 - DNA, 15 bp, Homo sapiens
cagaactttgaagag

SEQ ID NO: 241802 - DNA, 15 bp, Homo sapiens
ccagaactttgaaga

SEQ ID NO: 241803 - DNA, 15 bp, Homo sapiens
cccagaactttgaag

SEQ ID NO: 241804 - DNA, 15 bp, Homo sapiens
ccccagaactttgaa

SEQ ID NO: 241805 - DNA, 15 bp, Homo sapiens
accccagaactttga

SEQ ID NO: 241806 - DNA, 15 bp, Homo sapiens
aaccccagaactttg

SEQ ID NO: 241807 - DNA, 15 bp, Homo sapiens
aaaccccagaacttt

SEQ ID NO: 241808 - DNA, 15 bp, Homo sapiens
aaaaccccagaactt

SEQ ID NO: 241809 - DNA, 15 bp, Homo sapiens
gaaaaccccagaact

SEQ ID NO: 241810 - DNA, 15 bp, Homo sapiens
ggaaaaccccagaac

SEQ ID NO: 241811 - DNA, 15 bp, Homo sapiens
aggaaaaccccagaa

SEQ ID NO: 241812 - DNA, 15 bp, Homo sapiens
aaggaaaaccccaga

SEQ ID NO: 241813 - DNA, 15 bp, Homo sapiens
aaaggaaaaccccag

SEQ ID NO: 241814 - DNA, 15 bp, Homo sapiens
caaaggaaaacccca

SEQ ID NO: 241815 - DNA, 15 bp, Homo sapiens
gcaaaggaaaacccc

SEQ ID NO: 241816 - DNA, 15 bp, Homo sapiens
tgcaaaggaaaaccc

SEQ ID NO: 241817 - DNA, 15 bp, Homo sapiens
ttgcaaaggaaaacc

SEQ ID NO: 241818 - DNA, 15 bp, Homo sapiens
tttgcaaaggaaaac

SEQ ID NO: 241819 - DNA, 15 bp, Homo sapiens
ctttgcaaaggaaaa

SEQ ID NO: 241820 - DNA, 15 bp, Homo sapiens
tctttgcaaaggaaa

SEQ ID NO: 241821 - DNA, 15 bp, Homo sapiens
gtctttgcaaaggaa

SEQ ID NO: 241822 - DNA, 15 bp, Homo sapiens
tgtctttgcaaagga

SEQ ID NO: 241823 - DNA, 15 bp, Homo sapiens
ctgtctttgcaaagg

SEQ ID NO: 241824 - DNA, 15 bp, Homo sapiens
cctgtctttgcaaag

SEQ ID NO: 241825 - DNA, 15 bp, Homo sapiens
tcctgtctttgcaaa

SEQ ID NO: 241826 - DNA, 15 bp, Homo sapiens
atcctgtctttgcaa

SEQ ID NO: 241827 - DNA, 15 bp, Homo sapiens
aatcctgtctttgca

SEQ ID NO: 241828 - DNA, 15 bp, Homo sapiens
caatcctgtctttgc

SEQ ID NO: 241829 - DNA, 15 bp, Homo sapiens
ccaatcctgtctttg

SEQ ID NO: 241830 - DNA, 15 bp, Homo sapiens
gccaatcctgtcttt

SEQ ID NO: 241831 - DNA, 15 bp, Homo sapiens
tgccaatcctgtctt

SEQ ID NO: 241832 - DNA, 15 bp, Homo sapiens
ttgccaatcctgtct

SEQ ID NO: 241833 - DNA, 15 bp, Homo sapiens
cttgccaatcctgtc

SEQ ID NO: 241834 - DNA, 15 bp, Homo sapiens
ccttgccaatcctgt

SEQ ID NO: 241835 - DNA, 15 bp, Homo sapiens
gccttgccaatcctg

SEQ ID NO: 241836 - DNA, 15 bp, Homo sapiens
ggccttgccaatcct

SEQ ID NO: 241837 - DNA, 15 bp, Homo sapiens
tggccttgccaatcc

SEQ ID NO: 241838 - DNA, 15 bp, Homo sapiens
ctggccttgccaatc

SEQ ID NO: 241839 - DNA, 15 bp, Homo sapiens
actggccttgccaat

SEQ ID NO: 241840 - DNA, 15 bp, Homo sapiens
cactggccttgccaa

SEQ ID NO: 241841 - DNA, 15 bp, Homo sapiens
ccactggccttgcca

SEQ ID NO: 241842 - DNA, 15 bp, Homo sapiens
cccactggccttgcc

SEQ ID NO: 241843 - DNA, 15 bp, Homo sapiens
acccactggccttgc

SEQ ID NO: 241844 - DNA, 15 bp, Homo sapiens
gacccactggccttg

SEQ ID NO: 241845 - DNA, 15 bp, Homo sapiens
agacccactggcctt

SEQ ID NO: 241846 - DNA, 15 bp, Homo sapiens
aagacccactggcct

SEQ ID NO: 241847 - DNA, 15 bp, Homo sapiens
aaagacccactggcc

SEQ ID NO: 241848 - DNA, 15 bp, Homo sapiens
aaaagacccactggc

SEQ ID NO: 241849 - DNA, 15 bp, Homo sapiens
aaaaagacccactgg

SEQ ID NO: 241850 - DNA, 15 bp, Homo sapiens
aaaaaagacccactg

SEQ ID NO: 241851 - DNA, 15 bp, Homo sapiens
caaaaaagacccact

SEQ ID NO: 241852 - DNA, 15 bp, Homo sapiens
acaaaaaagacccac

SEQ ID NO: 241853 - DNA, 15 bp, Homo sapiens
cacaaaaaagaccca

SEQ ID NO: 241854 - DNA, 15 bp, Homo sapiens
acacaaaaaagaccc

SEQ ID NO: 241855 - DNA, 15 bp, Homo sapiens
cacacaaaaaagacc

SEQ ID NO: 241856 - DNA, 15 bp, Homo sapiens
acacacaaaaaagac

SEQ ID NO: 241857 - DNA, 15 bp, Homo sapiens
cacacacaaaaaaga

SEQ ID NO: 241858 - DNA, 15 bp, Homo sapiens
acacacacaaaaaag

SEQ ID NO: 241859 - DNA, 15 bp, Homo sapiens
cacacacacaaaaaa

SEQ ID NO: 241860 - DNA, 15 bp, Homo sapiens
acacacacacaaaaa

SEQ ID NO: 241861 - DNA, 15 bp, Homo sapiens
cacacacacacaaaa

SEQ ID NO: 241862 - DNA, 15 bp, Homo sapiens
acacacacacacaaa

SEQ ID NO: 241863 - DNA, 15 bp, Homo sapiens
cacacacacacacaa

SEQ ID NO: 241864 - DNA, 15 bp, Homo sapiens
acacacacacacaca

SEQ ID NO: 241865 - DNA, 15 bp, Homo sapiens
cacacacacacacac

SEQ ID NO: 241866 - DNA, 15 bp, Homo sapiens
tcacacacacacaca

SEQ ID NO: 241867 - DNA, 15 bp, Homo sapiens
gtcacacacacacac

SEQ ID NO: 241868 - DNA, 15 bp, Homo sapiens
cgtcacacacacaca

SEQ ID NO: 241869 - DNA, 15 bp, Homo sapiens
ccgtcacacacacac

SEQ ID NO: 241870 - DNA, 15 bp, Homo sapiens
tccgtcacacacaca

SEQ ID NO: 241871 - DNA, 15 bp, Homo sapiens
ctccgtcacacacac

SEQ ID NO: 241872 - DNA, 15 bp, Homo sapiens
actccgtcacacaca

SEQ ID NO: 241873 - DNA, 15 bp, Homo sapiens
gactccgtcacacac

SEQ ID NO: 241874 - DNA, 15 bp, Homo sapiens
agactccgtcacaca

SEQ ID NO: 241875 - DNA, 15 bp, Homo sapiens
gagactccgtcacac

SEQ ID NO: 241876 - DNA, 15 bp, Homo sapiens
tgagactccgtcaca

SEQ ID NO: 241877 - DNA, 15 bp, Homo sapiens
gtgagactccgtcac

SEQ ID NO: 241878 - DNA, 15 bp, Homo sapiens
agtgagactccgtca

SEQ ID NO: 241879 - DNA, 15 bp, Homo sapiens
gcgggaccacaggtg

SEQ ID NO: 241880 - DNA, 15 bp, Homo sapiens
ggcgggaccacaggt

SEQ ID NO: 241881 - DNA, 15 bp, Homo sapiens
tggcgggaccacagg

SEQ ID NO: 241882 - DNA, 15 bp, Homo sapiens
ctggcgggaccacag

SEQ ID NO: 241883 - DNA, 15 bp, Homo sapiens
gctggcgggaccaca

SEQ ID NO: 241884 - DNA, 15 bp, Homo sapiens
agctggcgggaccac

SEQ ID NO: 241885 - DNA, 15 bp, Homo sapiens
aagctggcgggacca

SEQ ID NO: 241886 - DNA, 15 bp, Homo sapiens
gaagctggcgggacc

SEQ ID NO: 241887 - DNA, 15 bp, Homo sapiens
ggaagctggcgggac

SEQ ID NO: 241888 - DNA, 15 bp, Homo sapiens
tggaagctggcggga

SEQ ID NO: 241889 - DNA, 15 bp, Homo sapiens
ctggaagctggcggg

SEQ ID NO: 241890 - DNA, 15 bp, Homo sapiens
actggaagctggcgg

SEQ ID NO: 241891 - DNA, 15 bp, Homo sapiens
cactggaagctggcg

SEQ ID NO: 241892 - DNA, 15 bp, Homo sapiens
gcactggaagctggc

SEQ ID NO: 241893 - DNA, 15 bp, Homo sapiens
tgcactggaagctgg

SEQ ID NO: 241894 - DNA, 15 bp, Homo sapiens
ttgcactggaagctg

SEQ ID NO: 241895 - DNA, 15 bp, Homo sapiens
gttgcactggaagct

SEQ ID NO: 241896 - DNA, 15 bp, Homo sapiens
tgttgcactggaagc

SEQ ID NO: 241897 - DNA, 15 bp, Homo sapiens
ctgttgcactggaag

SEQ ID NO: 241898 - DNA, 15 bp, Homo sapiens
gctgttgcactggaa

SEQ ID NO: 241899 - DNA, 15 bp, Homo sapiens
agctgttgcactgga

SEQ ID NO: 241900 - DNA, 15 bp, Homo sapiens
gagctgttgcactgg

SEQ ID NO: 241901 - DNA, 15 bp, Homo sapiens
ggagctgttgcactg

SEQ ID NO: 241902 - DNA, 15 bp, Homo sapiens
tggagctgttgcact

SEQ ID NO: 241903 - DNA, 15 bp, Homo sapiens
gtggagctgttgcac

SEQ ID NO: 241904 - DNA, 15 bp, Homo sapiens
ggtggagctgttgca

SEQ ID NO: 241905 - DNA, 15 bp, Homo sapiens
aggtggagctgttgc

SEQ ID NO: 241906 - DNA, 15 bp, Homo sapiens
caggtggagctgttg

SEQ ID NO: 241907 - DNA, 15 bp, Homo sapiens
gcaggtggagctgtt

SEQ ID NO: 241908 - DNA, 15 bp, Homo sapiens
tgcaggtggagctgt

SEQ ID NO: 241909 - DNA, 15 bp, Homo sapiens
atgcaggtggagctg

SEQ ID NO: 241910 - DNA, 15 bp, Homo sapiens
gatgcaggtggagct

SEQ ID NO: 241911 - DNA, 15 bp, Homo sapiens
ggatgcaggtggagc

SEQ ID NO: 241912 - DNA, 15 bp, Homo sapiens
gggatgcaggtggag

SEQ ID NO: 241913 - DNA, 15 bp, Homo sapiens
ggggatgcaggtgga

SEQ ID NO: 241914 - DNA, 15 bp, Homo sapiens
gggggatgcaggtgg

SEQ ID NO: 241915 - DNA, 15 bp, Homo sapiens
tgggggatgcaggtg

SEQ ID NO: 241916 - DNA, 15 bp, Homo sapiens
ctgggggatgcaggt

SEQ ID NO: 241917 - DNA, 15 bp, Homo sapiens
gctgggggatgcagg

SEQ ID NO: 241918 - DNA, 15 bp, Homo sapiens
agctgggggatgcag

SEQ ID NO: 241919 - DNA, 15 bp, Homo sapiens
cagctgggggatgca

SEQ ID NO: 241920 - DNA, 15 bp, Homo sapiens
acagctgggggatgc

SEQ ID NO: 241921 - DNA, 15 bp, Homo sapiens
cacagctgggggatg

SEQ ID NO: 241922 - DNA, 15 bp, Homo sapiens
ccacagctgggggat

SEQ ID NO: 241923 - DNA, 15 bp, Homo sapiens
cccacagctggggga

SEQ ID NO: 241924 - DNA, 15 bp, Homo sapiens
gcccacagctggggg

SEQ ID NO: 241925 - DNA, 15 bp, Homo sapiens
ggcccacagctgggg

SEQ ID NO: 241926 - DNA, 15 bp, Homo sapiens
aggcccacagctggg

SEQ ID NO: 241927 - DNA, 15 bp, Homo sapiens
caggcccacagctgg

SEQ ID NO: 241928 - DNA, 15 bp, Homo sapiens
gcaggcccacagctg

SEQ ID NO: 241929 - DNA, 15 bp, Homo sapiens
cgcaggcccacagct

SEQ ID NO: 241930 - DNA, 15 bp, Homo sapiens
tcgcaggcccacagc

SEQ ID NO: 241931 - DNA, 15 bp, Homo sapiens
gtcgcaggcccacag

SEQ ID NO: 241932 - DNA, 15 bp, Homo sapiens
tgtcgcaggcccaca

SEQ ID NO: 241933 - DNA, 15 bp, Homo sapiens
ttgtcgcaggcccac

SEQ ID NO: 241934 - DNA, 15 bp, Homo sapiens
gttgtcgcaggccca

SEQ ID NO: 241935 - DNA, 15 bp, Homo sapiens
cgttgtcgcaggccc

SEQ ID NO: 241936 - DNA, 15 bp, Homo sapiens
tcgttgtcgcaggcc

SEQ ID NO: 241937 - DNA, 15 bp, Homo sapiens
gtcgttgtcgcaggc

SEQ ID NO: 241938 - DNA, 15 bp, Homo sapiens
ggtcgttgtcgcagg

SEQ ID NO: 241939 - DNA, 15 bp, Homo sapiens
gggtcgttgtcgcag

SEQ ID NO: 241940 - DNA, 15 bp, Homo sapiens
ggggtcgttgtcgca

SEQ ID NO: 241941 - DNA, 15 bp, Homo sapiens
cggggtcgttgtcgc

SEQ ID NO: 241942 - DNA, 15 bp, Homo sapiens
tcggggtcgttgtcg

SEQ ID NO: 241943 - DNA, 15 bp, Homo sapiens
gtcggggtcgttgtc

SEQ ID NO: 241944 - DNA, 15 bp, Homo sapiens
agtcggggtcgttgt

SEQ ID NO: 241945 - DNA, 15 bp, Homo sapiens
cagtcggggtcgttg

SEQ ID NO: 241946 - DNA, 15 bp, Homo sapiens
gcagtcggggtcgtt

SEQ ID NO: 241947 - DNA, 15 bp, Homo sapiens
cgcagtcggggtcgt

SEQ ID NO: 241948 - DNA, 15 bp, Homo sapiens
tcgcagtcggggtcg

SEQ ID NO: 241949 - DNA, 15 bp, Homo sapiens
ttcgcagtcggggtc

SEQ ID NO: 241950 - DNA, 15 bp, Homo sapiens
cttcgcagtcggggt

SEQ ID NO: 241951 - DNA, 15 bp, Homo sapiens
tcttcgcagtcgggg

SEQ ID NO: 241952 - DNA, 15 bp, Homo sapiens
atcttcgcagtcggg

SEQ ID NO: 241953 - DNA, 15 bp, Homo sapiens
catcttcgcagtcgg

SEQ ID NO: 241954 - DNA, 15 bp, Homo sapiens
ccatcttcgcagtcg

SEQ ID NO: 241955 - DNA, 15 bp, Homo sapiens
gccatcttcgcagtc

SEQ ID NO: 241956 - DNA, 15 bp, Homo sapiens
agccatcttcgcagt

SEQ ID NO: 241957 - DNA, 15 bp, Homo sapiens
gagccatcttcgcag

SEQ ID NO: 241958 - DNA, 15 bp, Homo sapiens
cgagccatcttcgca

SEQ ID NO: 241959 - DNA, 15 bp, Homo sapiens
ccgagccatcttcgc

SEQ ID NO: 241960 - DNA, 15 bp, Homo sapiens
tccgagccatcttcg

SEQ ID NO: 241961 - DNA, 15 bp, Homo sapiens
atccgagccatcttc

SEQ ID NO: 241962 - DNA, 15 bp, Homo sapiens
catccgagccatctt

SEQ ID NO: 241963 - DNA, 15 bp, Homo sapiens
tcatccgagccatct

SEQ ID NO: 241964 - DNA, 15 bp, Homo sapiens
ctcatccgagccatc

SEQ ID NO: 241965 - DNA, 15 bp, Homo sapiens
actcatccgagccat

SEQ ID NO: 241966 - DNA, 15 bp, Homo sapiens
cactcatccgagcca

SEQ ID NO: 241967 - DNA, 15 bp, Homo sapiens
ccactcatccgagcc

SEQ ID NO: 241968 - DNA, 15 bp, Homo sapiens
gccactcatccgagc

SEQ ID NO: 241969 - DNA, 15 bp, Homo sapiens
ggccactcatccgag

SEQ ID NO: 241970 - DNA, 15 bp, Homo sapiens
cggccactcatccga

SEQ ID NO: 241971 - DNA, 15 bp, Homo sapiens
gcggccactcatccg

SEQ ID NO: 241972 - DNA, 15 bp, Homo sapiens
tgcggccactcatcc

SEQ ID NO: 241973 - DNA, 15 bp, Homo sapiens
ctgcggccactcatc

SEQ ID NO: 241974 - DNA, 15 bp, Homo sapiens
gctgcggccactcat

SEQ ID NO: 241975 - DNA, 15 bp, Homo sapiens
cgctgcggccactca

SEQ ID NO: 241976 - DNA, 15 bp, Homo sapiens
gcgctgcggccactc

SEQ ID NO: 241977 - DNA, 15 bp, Homo sapiens
agcgctgcggccact

SEQ ID NO: 241978 - DNA, 15 bp, Homo sapiens
cagcgctgcggccac

SEQ ID NO: 241979 - DNA, 15 bp, Homo sapiens
acagcgctgcggcca

SEQ ID NO: 241980 - DNA, 15 bp, Homo sapiens
tacagcgctgcggcc

SEQ ID NO: 241981 - DNA, 15 bp, Homo sapiens
ctacagcgctgcggc

SEQ ID NO: 241982 - DNA, 15 bp, Homo sapiens
cctacagcgctgcgg

SEQ ID NO: 241983 - DNA, 15 bp, Homo sapiens
ccctacagcgctgcg

SEQ ID NO: 241984 - DNA, 15 bp, Homo sapiens
cccctacagcgctgc

SEQ ID NO: 241985 - DNA, 15 bp, Homo sapiens
acccctacagcgctg

SEQ ID NO: 241986 - DNA, 15 bp, Homo sapiens
gacccctacagcgct

SEQ ID NO: 241987 - DNA, 15 bp, Homo sapiens
agacccctacagcgc

SEQ ID NO: 241988 - DNA, 15 bp, Homo sapiens
aagacccctacagcg

SEQ ID NO: 241989 - DNA, 15 bp, Homo sapiens
aaagacccctacagc

SEQ ID NO: 241990 - DNA, 15 bp, Homo sapiens
taaagacccctacag

SEQ ID NO: 241991 - DNA, 15 bp, Homo sapiens
gtaaagacccctaca

SEQ ID NO: 241992 - DNA, 15 bp, Homo sapiens
cgtaaagacccctac

SEQ ID NO: 241993 - DNA, 15 bp, Homo sapiens
acgtaaagaccccta

SEQ ID NO: 241994 - DNA, 15 bp, Homo sapiens
cacgtaaagacccct

SEQ ID NO: 241995 - DNA, 15 bp, Homo sapiens
acacgtaaagacccc

SEQ ID NO: 241996 - DNA, 15 bp, Homo sapiens
aacacgtaaagaccc

SEQ ID NO: 241997 - DNA, 15 bp, Homo sapiens
gaacacgtaaagacc

SEQ ID NO: 241998 - DNA, 15 bp, Homo sapiens
ggaacacgtaaagac

SEQ ID NO: 241999 - DNA, 15 bp, Homo sapiens
tggaacacgtaaaga

SEQ ID NO: 242000 - DNA, 15 bp, Homo sapiens
ttggaacacgtaaag

SEQ ID NO: 242001 - DNA, 15 bp, Homo sapiens
cttggaacacgtaaa

SEQ ID NO: 242002 - DNA, 15 bp, Homo sapiens
ccttggaacacgtaa

SEQ ID NO: 242003 - DNA, 15 bp, Homo sapiens
cccttggaacacgta

SEQ ID NO: 242004 - DNA, 15 bp, Homo sapiens
ccccttggaacacgt

SEQ ID NO: 242005 - DNA, 15 bp, Homo sapiens
tccccttggaacacg

SEQ ID NO: 242006 - DNA, 15 bp, Homo sapiens
gtccccttggaacac

SEQ ID NO: 242007 - DNA, 15 bp, Homo sapiens
tgtccccttggaaca

SEQ ID NO: 242008 - DNA, 15 bp, Homo sapiens
ctgtccccttggaac

SEQ ID NO: 242009 - DNA, 15 bp, Homo sapiens
actgtccccttggaa

SEQ ID NO: 242010 - DNA, 15 bp, Homo sapiens
tactgtccccttgga

SEQ ID NO: 242011 - DNA, 15 bp, Homo sapiens
ctactgtccccttgg

SEQ ID NO: 242012 - DNA, 15 bp, Homo sapiens
gctactgtccccttg

SEQ ID NO: 242013 - DNA, 15 bp, Homo sapiens
ggctactgtcccctt

SEQ ID NO: 242014 - DNA, 15 bp, Homo sapiens
gggctactgtcccct

SEQ ID NO: 242015 - DNA, 15 bp, Homo sapiens
ggggctactgtcccc

SEQ ID NO: 242016 - DNA, 15 bp, Homo sapiens
aggggctactgtccc

SEQ ID NO: 242017 - DNA, 15 bp, Homo sapiens
caggggctactgtcc

SEQ ID NO: 242018 - DNA, 15 bp, Homo sapiens
gcaggggctactgtc

SEQ ID NO: 242019 - DNA, 15 bp, Homo sapiens
agcaggggctactgt

SEQ ID NO: 242020 - DNA, 15 bp, Homo sapiens
gagcaggggctactg

SEQ ID NO: 242021 - DNA, 15 bp, Homo sapiens
cgagcaggggctact

SEQ ID NO: 242022 - DNA, 15 bp, Homo sapiens
ccgagcaggggctac

SEQ ID NO: 242023 - DNA, 15 bp, Homo sapiens
gccgagcaggggcta

SEQ ID NO: 242024 - DNA, 15 bp, Homo sapiens
ggccgagcaggggct

SEQ ID NO: 242025 - DNA, 15 bp, Homo sapiens
aggccgagcaggggc

SEQ ID NO: 242026 - DNA, 15 bp, Homo sapiens
aaggccgagcagggg

SEQ ID NO: 242027 - DNA, 15 bp, Homo sapiens
gaaggccgagcaggg

SEQ ID NO: 242028 - DNA, 15 bp, Homo sapiens
cgaaggccgagcagg

SEQ ID NO: 242029 - DNA, 15 bp, Homo sapiens
tcgaaggccgagcag

SEQ ID NO: 242030 - DNA, 15 bp, Homo sapiens
ctcgaaggccgagca

SEQ ID NO: 242031 - DNA, 15 bp, Homo sapiens
actcgaaggccgagc

SEQ ID NO: 242032 - DNA, 15 bp, Homo sapiens
aactcgaaggccgag

SEQ ID NO: 242033 - DNA, 15 bp, Homo sapiens
gaactcgaaggccga

SEQ ID NO: 242034 - DNA, 15 bp, Homo sapiens
ggaactcgaaggccg

SEQ ID NO: 242035 - DNA, 15 bp, Homo sapiens
tggaactcgaaggcc

SEQ ID NO: 242036 - DNA, 15 bp, Homo sapiens
gtggaactcgaaggc

SEQ ID NO: 242037 - DNA, 15 bp, Homo sapiens
agtggaactcgaagg

SEQ ID NO: 242038 - DNA, 15 bp, Homo sapiens
cagtggaactcgaag

SEQ ID NO: 242039 - DNA, 15 bp, Homo sapiens
gcagtggaactcgaa

SEQ ID NO: 242040 - DNA, 15 bp, Homo sapiens
ggcagtggaactcga

SEQ ID NO: 242041 - DNA, 15 bp, Homo sapiens
aggcagtggaactcg

SEQ ID NO: 242042 - DNA, 15 bp, Homo sapiens
taggcagtggaactc

SEQ ID NO: 242043 - DNA, 15 bp, Homo sapiens
ttaggcagtggaact

SEQ ID NO: 242044 - DNA, 15 bp, Homo sapiens
cttaggcagtggaac

SEQ ID NO: 242045 - DNA, 15 bp, Homo sapiens
acttaggcagtggaa

SEQ ID NO: 242046 - DNA, 15 bp, Homo sapiens
cacttaggcagtgga

SEQ ID NO: 242047 - DNA, 15 bp, Homo sapiens
ccacttaggcagtgg

SEQ ID NO: 242048 - DNA, 15 bp, Homo sapiens
gccacttaggcagtg

SEQ ID NO: 242049 - DNA, 15 bp, Homo sapiens
cgccacttaggcagt

SEQ ID NO: 242050 - DNA, 15 bp, Homo sapiens
tcgccacttaggcag

SEQ ID NO: 242051 - DNA, 15 bp, Homo sapiens
ctcgccacttaggca

SEQ ID NO: 242052 - DNA, 15 bp, Homo sapiens
actcgccacttaggc

SEQ ID NO: 242053 - DNA, 15 bp, Homo sapiens
cactcgccacttagg

SEQ ID NO: 242054 - DNA, 15 bp, Homo sapiens
gcactcgccacttag

SEQ ID NO: 242055 - DNA, 15 bp, Homo sapiens
tgcactcgccactta

SEQ ID NO: 242056 - DNA, 15 bp, Homo sapiens
atgcactcgccactt

SEQ ID NO: 242057 - DNA, 15 bp, Homo sapiens
gatgcactcgccact

SEQ ID NO: 242058 - DNA, 15 bp, Homo sapiens
ggatgcactcgccac

SEQ ID NO: 242059 - DNA, 15 bp, Homo sapiens
tggatgcactcgcca

SEQ ID NO: 242060 - DNA, 15 bp, Homo sapiens
gtggatgcactcgcc

SEQ ID NO: 242061 - DNA, 15 bp, Homo sapiens
agtggatgcactcgc

SEQ ID NO: 242062 - DNA, 15 bp, Homo sapiens
gagtggatgcactcg

SEQ ID NO: 242063 - DNA, 15 bp, Homo sapiens
ggagtggatgcactc

SEQ ID NO: 242064 - DNA, 15 bp, Homo sapiens
tggagtggatgcact

SEQ ID NO: 242065 - DNA, 15 bp, Homo sapiens
ctggagtggatgcac

SEQ ID NO: 242066 - DNA, 15 bp, Homo sapiens
gctggagtggatgca

SEQ ID NO: 242067 - DNA, 15 bp, Homo sapiens
agctggagtggatgc

SEQ ID NO: 242068 - DNA, 15 bp, Homo sapiens
cagctggagtggatg

SEQ ID NO: 242069 - DNA, 15 bp, Homo sapiens
ccagctggagtggat

SEQ ID NO: 242070 - DNA, 15 bp, Homo sapiens
gccagctggagtgga

SEQ ID NO: 242071 - DNA, 15 bp, Homo sapiens
cgccagctggagtgg

SEQ ID NO: 242072 - DNA, 15 bp, Homo sapiens
gcgccagctggagtg

SEQ ID NO: 242073 - DNA, 15 bp, Homo sapiens
agcgccagctggagt

SEQ ID NO: 242074 - DNA, 15 bp, Homo sapiens
cagcgccagctggag

SEQ ID NO: 242075 - DNA, 15 bp, Homo sapiens
acagcgccagctgga

SEQ ID NO: 242076 - DNA, 15 bp, Homo sapiens
cacagcgccagctgg

SEQ ID NO: 242077 - DNA, 15 bp, Homo sapiens
tcacagcgccagctg

SEQ ID NO: 242078 - DNA, 15 bp, Homo sapiens
atcacagcgccagct

SEQ ID NO: 242079 - DNA, 15 bp, Homo sapiens
catcacagcgccagc

SEQ ID NO: 242080 - DNA, 15 bp, Homo sapiens
ccatcacagcgccag

SEQ ID NO: 242081 - DNA, 15 bp, Homo sapiens
accatcacagcgcca

SEQ ID NO: 242082 - DNA, 15 bp, Homo sapiens
caccatcacagcgcc

SEQ ID NO: 242083 - DNA, 15 bp, Homo sapiens
ccaccatcacagcgc

SEQ ID NO: 242084 - DNA, 15 bp, Homo sapiens
gccaccatcacagcg

SEQ ID NO: 242085 - DNA, 15 bp, Homo sapiens
ggccaccatcacagc

SEQ ID NO: 242086 - DNA, 15 bp, Homo sapiens
gggccaccatcacag

SEQ ID NO: 242087 - DNA, 15 bp, Homo sapiens
ggggccaccatcaca

SEQ ID NO: 242088 - DNA, 15 bp, Homo sapiens
cggggccaccatcac

SEQ ID NO: 242089 - DNA, 15 bp, Homo sapiens
tcggggccaccatca

SEQ ID NO: 242090 - DNA, 15 bp, Homo sapiens
gtcggggccaccatc

SEQ ID NO: 242091 - DNA, 15 bp, Homo sapiens
agtcggggccaccat

SEQ ID NO: 242092 - DNA, 15 bp, Homo sapiens
cagtcggggccacca

SEQ ID NO: 242093 - DNA, 15 bp, Homo sapiens
gcagtcggggccacc

SEQ ID NO: 242094 - DNA, 15 bp, Homo sapiens
tgcagtcggggccac

SEQ ID NO: 242095 - DNA, 15 bp, Homo sapiens
ttgcagtcggggcca

SEQ ID NO: 242096 - DNA, 15 bp, Homo sapiens
cttgcagtcggggcc

SEQ ID NO: 242097 - DNA, 15 bp, Homo sapiens
ccttgcagtcggggc

SEQ ID NO: 242098 - DNA, 15 bp, Homo sapiens
tccttgcagtcgggg

SEQ ID NO: 242099 - DNA, 15 bp, Homo sapiens
gtccttgcagtcggg

SEQ ID NO: 242100 - DNA, 15 bp, Homo sapiens
tgtccttgcagtcgg

SEQ ID NO: 242101 - DNA, 15 bp, Homo sapiens
ttgtccttgcagtcg

SEQ ID NO: 242102 - DNA, 15 bp, Homo sapiens
tttgtccttgcagtc

SEQ ID NO: 242103 - DNA, 15 bp, Homo sapiens
atttgtccttgcagt

SEQ ID NO: 242104 - DNA, 15 bp, Homo sapiens
gatttgtccttgcag

SEQ ID NO: 242105 - DNA, 15 bp, Homo sapiens
agatttgtccttgca

SEQ ID NO: 242106 - DNA, 15 bp, Homo sapiens
cagatttgtccttgc

SEQ ID NO: 242107 - DNA, 15 bp, Homo sapiens
tcagatttgtccttg

SEQ ID NO: 242108 - DNA, 15 bp, Homo sapiens
gtcagatttgtcctt

SEQ ID NO: 242109 - DNA, 15 bp, Homo sapiens
cgtcagatttgtcct

SEQ ID NO: 242110 - DNA, 15 bp, Homo sapiens
tcgtcagatttgtcc

SEQ ID NO: 242111 - DNA, 15 bp, Homo sapiens
ctcgtcagatttgtc

SEQ ID NO: 242112 - DNA, 15 bp, Homo sapiens
cctcgtcagatttgt

SEQ ID NO: 242113 - DNA, 15 bp, Homo sapiens
tcctcgtcagatttg

SEQ ID NO: 242114 - DNA, 15 bp, Homo sapiens
ttcctcgtcagattt

SEQ ID NO: 242115 - DNA, 15 bp, Homo sapiens
tttcctcgtcagatt

SEQ ID NO: 242116 - DNA, 15 bp, Homo sapiens
ttttcctcgtcagat

SEQ ID NO: 242117 - DNA, 15 bp, Homo sapiens
gttttcctcgtcaga

SEQ ID NO: 242118 - DNA, 15 bp, Homo sapiens
agttttcctcgtcag

SEQ ID NO: 242119 - DNA, 15 bp, Homo sapiens
cagttttcctcgtca

SEQ ID NO: 242120 - DNA, 15 bp, Homo sapiens
gcagttttcctcgtc

SEQ ID NO: 242121 - DNA, 15 bp, Homo sapiens
cgcagttttcctcgt

SEQ ID NO: 242122 - DNA, 15 bp, Homo sapiens
ccgcagttttcctcg

SEQ ID NO: 242123 - DNA, 15 bp, Homo sapiens
accgcagttttcctc

SEQ ID NO: 242124 - DNA, 15 bp, Homo sapiens
taccgcagttttcct

SEQ ID NO: 242125 - DNA, 15 bp, Homo sapiens
ataccgcagttttcc

SEQ ID NO: 242126 - DNA, 15 bp, Homo sapiens
cataccgcagttttc

SEQ ID NO: 242127 - DNA, 15 bp, Homo sapiens
ccataccgcagtttt

SEQ ID NO: 242128 - DNA, 15 bp, Homo sapiens
cccataccgcagttt

SEQ ID NO: 242129 - DNA, 15 bp, Homo sapiens
gcccataccgcagtt

SEQ ID NO: 242130 - DNA, 15 bp, Homo sapiens
cgcccataccgcagt

SEQ ID NO: 242131 - DNA, 15 bp, Homo sapiens
ccgcccataccgcag

SEQ ID NO: 242132 - DNA, 15 bp, Homo sapiens
cccgcccataccgca

SEQ ID NO: 242133 - DNA, 15 bp, Homo sapiens
ccccgcccataccgc

SEQ ID NO: 242134 - DNA, 15 bp, Homo sapiens
gccccgcccataccg

SEQ ID NO: 242135 - DNA, 15 bp, Homo sapiens
ggccccgcccatacc

SEQ ID NO: 242136 - DNA, 15 bp, Homo sapiens
tggccccgcccatac

SEQ ID NO: 242137 - DNA, 15 bp, Homo sapiens
ctggccccgcccata

SEQ ID NO: 242138 - DNA, 15 bp, Homo sapiens
cctggccccgcccat

SEQ ID NO: 242139 - DNA, 15 bp, Homo sapiens
ccctggccccgccca

SEQ ID NO: 242140 - DNA, 15 bp, Homo sapiens
accctggccccgccc

SEQ ID NO: 242141 - DNA, 15 bp, Homo sapiens
caccctggccccgcc

SEQ ID NO: 242142 - DNA, 15 bp, Homo sapiens
ccaccctggccccgc

SEQ ID NO: 242143 - DNA, 15 bp, Homo sapiens
cccaccctggccccg

SEQ ID NO: 242144 - DNA, 15 bp, Homo sapiens
ccccaccctggcccc

SEQ ID NO: 242145 - DNA, 15 bp, Homo sapiens
cccccaccctggccc

SEQ ID NO: 242146 - DNA, 15 bp, Homo sapiens
gcccccaccctggcc

SEQ ID NO: 242147 - DNA, 15 bp, Homo sapiens
cgcccccaccctggc

SEQ ID NO: 242148 - DNA, 15 bp, Homo sapiens
ccgcccccaccctgg

SEQ ID NO: 242149 - DNA, 15 bp, Homo sapiens
cccgcccccaccctg

SEQ ID NO: 242150 - DNA, 15 bp, Homo sapiens
ccccgcccccaccct

SEQ ID NO: 242151 - DNA, 15 bp, Homo sapiens
gccccgcccccaccc

SEQ ID NO: 242152 - DNA, 15 bp, Homo sapiens
cgccccgcccccacc

SEQ ID NO: 242153 - DNA, 15 bp, Homo sapiens
acgccccgcccccac

SEQ ID NO: 242154 - DNA, 15 bp, Homo sapiens
gacgccccgccccca

SEQ ID NO: 242155 - DNA, 15 bp, Homo sapiens
ggacgccccgccccc

SEQ ID NO: 242156 - DNA, 15 bp, Homo sapiens
aggacgccccgcccc

SEQ ID NO: 242157 - DNA, 15 bp, Homo sapiens
taggacgccccgccc

SEQ ID NO: 242158 - DNA, 15 bp, Homo sapiens
ataggacgccccgcc

SEQ ID NO: 242159 - DNA, 15 bp, Homo sapiens
gataggacgccccgc

SEQ ID NO: 242160 - DNA, 15 bp, Homo sapiens
tgataggacgccccg

SEQ ID NO: 242161 - DNA, 15 bp, Homo sapiens
gtgataggacgcccc

SEQ ID NO: 242162 - DNA, 15 bp, Homo sapiens
ggtgataggacgccc

SEQ ID NO: 242163 - DNA, 15 bp, Homo sapiens
aggtgataggacgcc

SEQ ID NO: 242164 - DNA, 15 bp, Homo sapiens
caggtgataggacgc

SEQ ID NO: 242165 - DNA, 15 bp, Homo sapiens
acaggtgataggacg

SEQ ID NO: 242166 - DNA, 15 bp, Homo sapiens
gacaggtgataggac

SEQ ID NO: 242167 - DNA, 15 bp, Homo sapiens
ggacaggtgatagga

SEQ ID NO: 242168 - DNA, 15 bp, Homo sapiens
gggacaggtgatagg

SEQ ID NO: 242169 - DNA, 15 bp, Homo sapiens
agggacaggtgatag

SEQ ID NO: 242170 - DNA, 15 bp, Homo sapiens
cagggacaggtgata

SEQ ID NO: 242171 - DNA, 15 bp, Homo sapiens
ccagggacaggtgat

SEQ ID NO: 242172 - DNA, 15 bp, Homo sapiens
cccagggacaggtga

SEQ ID NO: 242173 - DNA, 15 bp, Homo sapiens
gcccagggacaggtg

SEQ ID NO: 242174 - DNA, 15 bp, Homo sapiens
agcccagggacaggt

SEQ ID NO: 242175 - DNA, 15 bp, Homo sapiens
gagcccagggacagg

SEQ ID NO: 242176 - DNA, 15 bp, Homo sapiens
ggagcccagggacag

SEQ ID NO: 242177 - DNA, 15 bp, Homo sapiens
gggagcccagggaca

SEQ ID NO: 242178 - DNA, 15 bp, Homo sapiens
ggggagcccagggac

SEQ ID NO: 242179 - DNA, 15 bp, Homo sapiens
gggggagcccaggga

SEQ ID NO: 242180 - DNA, 15 bp, Homo sapiens
tgggggagcccaggg

SEQ ID NO: 242181 - DNA, 15 bp, Homo sapiens
ctgggggagcccagg

SEQ ID NO: 242182 - DNA, 15 bp, Homo sapiens
cctgggggagcccag

SEQ ID NO: 242183 - DNA, 15 bp, Homo sapiens
acctgggggagccca

SEQ ID NO: 242184 - DNA, 15 bp, Homo sapiens
cacctgggggagccc

SEQ ID NO: 242185 - DNA, 15 bp, Homo sapiens
acacctgggggagcc

SEQ ID NO: 242186 - DNA, 15 bp, Homo sapiens
cacacctgggggagc

SEQ ID NO: 242187 - DNA, 15 bp, Homo sapiens
ccacacctgggggag

SEQ ID NO: 242188 - DNA, 15 bp, Homo sapiens
cccacacctggggga

SEQ ID NO: 242189 - DNA, 15 bp, Homo sapiens
tcccacacctggggg

SEQ ID NO: 242190 - DNA, 15 bp, Homo sapiens
gtcccacacctgggg

SEQ ID NO: 242191 - DNA, 15 bp, Homo sapiens
tgtcccacacctggg

SEQ ID NO: 242192 - DNA, 15 bp, Homo sapiens
atgtcccacacctgg

SEQ ID NO: 242193 - DNA, 15 bp, Homo sapiens
catgtcccacacctg

SEQ ID NO: 242194 - DNA, 15 bp, Homo sapiens
gcatgtcccacacct

SEQ ID NO: 242195 - DNA, 15 bp, Homo sapiens
tgcatgtcccacacc

SEQ ID NO: 242196 - DNA, 15 bp, Homo sapiens
ctgcatgtcccacac

SEQ ID NO: 242197 - DNA, 15 bp, Homo sapiens
actgcatgtcccaca

SEQ ID NO: 242198 - DNA, 15 bp, Homo sapiens
cactgcatgtcccac

SEQ ID NO: 242199 - DNA, 15 bp, Homo sapiens
tcactgcatgtccca

SEQ ID NO: 242200 - DNA, 15 bp, Homo sapiens
atcactgcatgtccc

SEQ ID NO: 242201 - DNA, 15 bp, Homo sapiens
aatcactgcatgtcc

SEQ ID NO: 242202 - DNA, 15 bp, Homo sapiens
aaatcactgcatgtc

SEQ ID NO: 242203 - DNA, 15 bp, Homo sapiens
taaatcactgcatgt

SEQ ID NO: 242204 - DNA, 15 bp, Homo sapiens
ctaaatcactgcatg

SEQ ID NO: 242205 - DNA, 15 bp, Homo sapiens
cctaaatcactgcat

SEQ ID NO: 242206 - DNA, 15 bp, Homo sapiens
acctaaatcactgca

SEQ ID NO: 242207 - DNA, 15 bp, Homo sapiens
cacctaaatcactgc

SEQ ID NO: 242208 - DNA, 15 bp, Homo sapiens
gcacctaaatcactg

SEQ ID NO: 242209 - DNA, 15 bp, Homo sapiens
ggcacctaaatcact

SEQ ID NO: 242210 - DNA, 15 bp, Homo sapiens
cggcacctaaatcac

SEQ ID NO: 242211 - DNA, 15 bp, Homo sapiens
tcggcacctaaatca

SEQ ID NO: 242212 - DNA, 15 bp, Homo sapiens
ttcggcacctaaatc

SEQ ID NO: 242213 - DNA, 15 bp, Homo sapiens
cttcggcacctaaat

SEQ ID NO: 242214 - DNA, 15 bp, Homo sapiens
acttcggcacctaaa

SEQ ID NO: 242215 - DNA, 15 bp, Homo sapiens
cacttcggcacctaa

SEQ ID NO: 242216 - DNA, 15 bp, Homo sapiens
ccacttcggcaccta

SEQ ID NO: 242217 - DNA, 15 bp, Homo sapiens
tccacttcggcacct

SEQ ID NO: 242218 - DNA, 15 bp, Homo sapiens
atccacttcggcacc

SEQ ID NO: 242219 - DNA, 15 bp, Homo sapiens
aatccacttcggcac

SEQ ID NO: 242220 - DNA, 15 bp, Homo sapiens
aaatccacttcggca

SEQ ID NO: 242221 - DNA, 15 bp, Homo sapiens
gaaatccacttcggc

SEQ ID NO: 242222 - DNA, 15 bp, Homo sapiens
ggaaatccacttcgg

SEQ ID NO: 242223 - DNA, 15 bp, Homo sapiens
tggaaatccacttcg

SEQ ID NO: 242224 - DNA, 15 bp, Homo sapiens
ttggaaatccacttc

SEQ ID NO: 242225 - DNA, 15 bp, Homo sapiens
gttggaaatccactt

SEQ ID NO: 242226 - DNA, 15 bp, Homo sapiens
tgttggaaatccact

SEQ ID NO: 242227 - DNA, 15 bp, Homo sapiens
ttgttggaaatccac

SEQ ID NO: 242228 - DNA, 15 bp, Homo sapiens
gttgttggaaatcca

SEQ ID NO: 242229 - DNA, 15 bp, Homo sapiens
tgttgttggaaatcc

SEQ ID NO: 242230 - DNA, 15 bp, Homo sapiens
atgttgttggaaatc

SEQ ID NO: 242231 - DNA, 15 bp, Homo sapiens
catgttgttggaaat

SEQ ID NO: 242232 - DNA, 15 bp, Homo sapiens
gcatgttgttggaaa

SEQ ID NO: 242233 - DNA, 15 bp, Homo sapiens
ggcatgttgttggaa

SEQ ID NO: 242234 - DNA, 15 bp, Homo sapiens
tggcatgttgttgga

SEQ ID NO: 242235 - DNA, 15 bp, Homo sapiens
ttggcatgttgttgg

SEQ ID NO: 242236 - DNA, 15 bp, Homo sapiens
cttggcatgttgttg

SEQ ID NO: 242237 - DNA, 15 bp, Homo sapiens
tcttggcatgttgtt

SEQ ID NO: 242238 - DNA, 15 bp, Homo sapiens
ttcttggcatgttgt

SEQ ID NO: 242239 - DNA, 15 bp, Homo sapiens
tttcttggcatgttg

SEQ ID NO: 242240 - DNA, 15 bp, Homo sapiens
ctttcttggcatgtt

SEQ ID NO: 242241 - DNA, 15 bp, Homo sapiens
actttcttggcatgt

SEQ ID NO: 242242 - DNA, 15 bp, Homo sapiens
tactttcttggcatg

SEQ ID NO: 242243 - DNA, 15 bp, Homo sapiens
atactttcttggcat

SEQ ID NO: 242244 - DNA, 15 bp, Homo sapiens
aatactttcttggca

SEQ ID NO: 242245 - DNA, 15 bp, Homo sapiens
gaatactttcttggc

SEQ ID NO: 242246 - DNA, 15 bp, Homo sapiens
ggaatactttcttgg

SEQ ID NO: 242247 - DNA, 15 bp, Homo sapiens
gggaatactttcttg

SEQ ID NO: 242248 - DNA, 15 bp, Homo sapiens
tgggaatactttctt

SEQ ID NO: 242249 - DNA, 15 bp, Homo sapiens
atgggaatactttct

SEQ ID NO: 242250 - DNA, 15 bp, Homo sapiens
aatgggaatactttc

SEQ ID NO: 242251 - DNA, 15 bp, Homo sapiens
aaatgggaatacttt

SEQ ID NO: 242252 - DNA, 15 bp, Homo sapiens
gaaatgggaatactt

SEQ ID NO: 242253 - DNA, 15 bp, Homo sapiens
tgaaatgggaatact

SEQ ID NO: 242254 - DNA, 15 bp, Homo sapiens
atgaaatgggaatac

SEQ ID NO: 242255 - DNA, 15 bp, Homo sapiens
catgaaatgggaata

SEQ ID NO: 242256 - DNA, 15 bp, Homo sapiens
acatgaaatgggaat

SEQ ID NO: 242257 - DNA, 15 bp, Homo sapiens
aacatgaaatgggaa

SEQ ID NO: 242258 - DNA, 15 bp, Homo sapiens
aaacatgaaatggga

SEQ ID NO: 242259 - DNA, 15 bp, Homo sapiens
caaacatgaaatggg

SEQ ID NO: 242260 - DNA, 15 bp, Homo sapiens
acaaacatgaaatgg

SEQ ID NO: 242261 - DNA, 15 bp, Homo sapiens
aacaaacatgaaatg

SEQ ID NO: 242262 - DNA, 15 bp, Homo sapiens
aaacaaacatgaaat

SEQ ID NO: 242263 - DNA, 15 bp, Homo sapiens
gaaacaaacatgaaa

SEQ ID NO: 242264 - DNA, 15 bp, Homo sapiens
agaaacaaacatgaa

SEQ ID NO: 242265 - DNA, 15 bp, Homo sapiens
aagaaacaaacatga

SEQ ID NO: 242266 - DNA, 15 bp, Homo sapiens
aaagaaacaaacatg

SEQ ID NO: 242267 - DNA, 15 bp, Homo sapiens
aaaagaaacaaacat

SEQ ID NO: 242268 - DNA, 15 bp, Homo sapiens
aaaaagaaacaaaca

SEQ ID NO: 242269 - DNA, 15 bp, Homo sapiens
aaaaaagaaacaaac

SEQ ID NO: 242270 - DNA, 15 bp, Homo sapiens
aaaaaaagaaacaaa

SEQ ID NO: 242271 - DNA, 15 bp, Homo sapiens
aaaaaaaagaaacaa

SEQ ID NO: 242272 - DNA, 15 bp, Homo sapiens
gaaaaaaaagaaaca

SEQ ID NO: 242273 - DNA, 15 bp, Homo sapiens
agaaaaaaaagaaac

SEQ ID NO: 242274 - DNA, 15 bp, Homo sapiens
aagaaaaaaaagaaa

SEQ ID NO: 242275 - DNA, 15 bp, Homo sapiens
aaagaaaaaaaagaa

SEQ ID NO: 242276 - DNA, 15 bp, Homo sapiens
aaaagaaaaaaaaga

SEQ ID NO: 242277 - DNA, 15 bp, Homo sapiens
gaaaagaaaaaaaag

SEQ ID NO: 242278 - DNA, 15 bp, Homo sapiens
agaaaagaaaaaaaa

SEQ ID NO: 242279 - DNA, 15 bp, Homo sapiens
aagaaaagaaaaaaa

SEQ ID NO: 242280 - DNA, 15 bp, Homo sapiens
gaaagaaaagaaaaa

SEQ ID NO: 242281 - DNA, 15 bp, Homo sapiens
agaaagaaaagaaaa

SEQ ID NO: 242282 - DNA, 15 bp, Homo sapiens
aagaaagaaaagaaa

SEQ ID NO: 242283 - DNA, 15 bp, Homo sapiens
aaagaaagaaaagaa

SEQ ID NO: 242284 - DNA, 15 bp, Homo sapiens
taaagaaagaaaaga

SEQ ID NO: 242285 - DNA, 15 bp, Homo sapiens
ataaagaaagaaaag

SEQ ID NO: 242286 - DNA, 15 bp, Homo sapiens
aataaagaaagaaaa

SEQ ID NO: 242287 - DNA, 15 bp, Homo sapiens
aaataaagaaagaaa

SEQ ID NO: 242288 - DNA, 15 bp, Homo sapiens
aaaataaagaaagaa

SEQ ID NO: 242289 - DNA, 15 bp, Homo sapiens
caaaataaagaaaga

SEQ ID NO: 242290 - DNA, 15 bp, Homo sapiens
acaaaataaagaaag

SEQ ID NO: 242291 - DNA, 15 bp, Homo sapiens
aacaaaataaagaaa

SEQ ID NO: 242292 - DNA, 15 bp, Homo sapiens
aaacaaaataaagaa

SEQ ID NO: 242293 - DNA, 15 bp, Homo sapiens
aaaacaaaataaaga

SEQ ID NO: 242294 - DNA, 15 bp, Homo sapiens
aaaaacaaaataaag

SEQ ID NO: 242295 - DNA, 15 bp, Homo sapiens
caaaaacaaaataaa

SEQ ID NO: 242296 - DNA, 15 bp, Homo sapiens
tcaaaaacaaaataa

SEQ ID NO: 242297 - DNA, 15 bp, Homo sapiens
ctcaaaaacaaaata

SEQ ID NO: 242298 - DNA, 15 bp, Homo sapiens
tctcaaaaacaaaat

SEQ ID NO: 242299 - DNA, 15 bp, Homo sapiens
atctcaaaaacaaaa

SEQ ID NO: 242300 - DNA, 15 bp, Homo sapiens
catctcaaaaacaaa

SEQ ID NO: 242301 - DNA, 15 bp, Homo sapiens
ccatctcaaaaacaa

SEQ ID NO: 242302 - DNA, 15 bp, Homo sapiens
tccatctcaaaaaca

SEQ ID NO: 242303 - DNA, 15 bp, Homo sapiens
ctccatctcaaaaac

SEQ ID NO: 242304 - DNA, 15 bp, Homo sapiens
cacagagtgagactc

SEQ ID NO: 242305 - DNA, 15 bp, Homo sapiens
tcacagagtgagact

SEQ ID NO: 242306 - DNA, 15 bp, Homo sapiens
atcacagagtgagac

SEQ ID NO: 242307 - DNA, 15 bp, Homo sapiens
aatcacagagtgaga

SEQ ID NO: 242308 - DNA, 15 bp, Homo sapiens
aaatcacagagtgag

SEQ ID NO: 242309 - DNA, 15 bp, Homo sapiens
aaaatcacagagtga

SEQ ID NO: 242310 - DNA, 15 bp, Homo sapiens
aaaaatcacagagtg

SEQ ID NO: 242311 - DNA, 15 bp, Homo sapiens
aaaaaatcacagagt

SEQ ID NO: 242312 - DNA, 15 bp, Homo sapiens
aaaaaaatcacagag

SEQ ID NO: 242313 - DNA, 15 bp, Homo sapiens
gaaaaaaatcacaga

SEQ ID NO: 242314 - DNA, 15 bp, Homo sapiens
tgaaaaaaatcacag

SEQ ID NO: 242315 - DNA, 15 bp, Homo sapiens
atgaaaaaaatcaca

SEQ ID NO: 242316 - DNA, 15 bp, Homo sapiens
gatgaaaaaaatcac

SEQ ID NO: 242317 - DNA, 15 bp, Homo sapiens
agatgaaaaaaatca

SEQ ID NO: 242318 - DNA, 15 bp, Homo sapiens
gagatgaaaaaaatc

SEQ ID NO: 242319 - DNA, 15 bp, Homo sapiens
agagatgaaaaaaat

SEQ ID NO: 242320 - DNA, 15 bp, Homo sapiens
tagagatgaaaaaaa

SEQ ID NO: 242321 - DNA, 15 bp, Homo sapiens
ttagagatgaaaaaa

SEQ ID NO: 242322 - DNA, 15 bp, Homo sapiens
tttagagatgaaaaa

SEQ ID NO: 242323 - DNA, 15 bp, Homo sapiens
atttagagatgaaaa

SEQ ID NO: 242324 - DNA, 15 bp, Homo sapiens
aatttagagatgaaa

SEQ ID NO: 242325 - DNA, 15 bp, Homo sapiens
aaatttagagatgaa

SEQ ID NO: 242326 - DNA, 15 bp, Homo sapiens
gaaatttagagatga

SEQ ID NO: 242327 - DNA, 15 bp, Homo sapiens
ggaaatttagagatg

SEQ ID NO: 242328 - DNA, 15 bp, Homo sapiens
aggaaatttagagat

SEQ ID NO: 242329 - DNA, 15 bp, Homo sapiens
taggaaatttagaga

SEQ ID NO: 242330 - DNA, 15 bp, Homo sapiens
gtaggaaatttagag

SEQ ID NO: 242331 - DNA, 15 bp, Homo sapiens
tgtaggaaatttaga

SEQ ID NO: 242332 - DNA, 15 bp, Homo sapiens
atgtaggaaatttag

SEQ ID NO: 242333 - DNA, 15 bp, Homo sapiens
gatgtaggaaattta

SEQ ID NO: 242334 - DNA, 15 bp, Homo sapiens
ggatgtaggaaattt

SEQ ID NO: 242335 - DNA, 15 bp, Homo sapiens
tggatgtaggaaatt

SEQ ID NO: 242336 - DNA, 15 bp, Homo sapiens
atggatgtaggaaat

SEQ ID NO: 242337 - DNA, 15 bp, Homo sapiens
tatggatgtaggaaa

SEQ ID NO: 242338 - DNA, 15 bp, Homo sapiens
atatggatgtaggaa

SEQ ID NO: 242339 - DNA, 15 bp, Homo sapiens
catatggatgtagga

SEQ ID NO: 242340 - DNA, 15 bp, Homo sapiens
ccatatggatgtagg

SEQ ID NO: 242341 - DNA, 15 bp, Homo sapiens
gccatatggatgtag

SEQ ID NO: 242342 - DNA, 15 bp, Homo sapiens
ggccatatggatgta

SEQ ID NO: 242343 - DNA, 15 bp, Homo sapiens
tggccatatggatgt

SEQ ID NO: 242344 - DNA, 15 bp, Homo sapiens
gtggccatatggatg

SEQ ID NO: 242345 - DNA, 15 bp, Homo sapiens
ggtggccatatggat

SEQ ID NO: 242346 - DNA, 15 bp, Homo sapiens
tggtggccatatgga

SEQ ID NO: 242347 - DNA, 15 bp, Homo sapiens
atggtggccatatgg

SEQ ID NO: 242348 - DNA, 15 bp, Homo sapiens
catggtggccatatg

SEQ ID NO: 242349 - DNA, 15 bp, Homo sapiens
tcatggtggccatat

SEQ ID NO: 242350 - DNA, 15 bp, Homo sapiens
ctcatggtggccata

SEQ ID NO: 242351 - DNA, 15 bp, Homo sapiens
cctcatggtggccat

SEQ ID NO: 242352 - DNA, 15 bp, Homo sapiens
gcctcatggtggcca

SEQ ID NO: 242353 - DNA, 15 bp, Homo sapiens
ggcctcatggtggcc

SEQ ID NO: 242354 - DNA, 15 bp, Homo sapiens
gggcctcatggtggc

SEQ ID NO: 242355 - DNA, 15 bp, Homo sapiens
ggggcctcatggtgg

SEQ ID NO: 242356 - DNA, 15 bp, Homo sapiens
tggggcctcatggtg

SEQ ID NO: 242357 - DNA, 15 bp, Homo sapiens
ctggggcctcatggt

SEQ ID NO: 242358 - DNA, 15 bp, Homo sapiens
cctggggcctcatgg

SEQ ID NO: 242359 - DNA, 15 bp, Homo sapiens
gcctggggcctcatg

SEQ ID NO: 242360 - DNA, 15 bp, Homo sapiens
agcctggggcctcat

SEQ ID NO: 242361 - DNA, 15 bp, Homo sapiens
cagcctggggcctca

SEQ ID NO: 242362 - DNA, 15 bp, Homo sapiens
ccagcctggggcctc

SEQ ID NO: 242363 - DNA, 15 bp, Homo sapiens
gccagcctggggcct

SEQ ID NO: 242364 - DNA, 15 bp, Homo sapiens
ggccagcctggggcc

SEQ ID NO: 242365 - DNA, 15 bp, Homo sapiens
cggccagcctggggc

SEQ ID NO: 242366 - DNA, 15 bp, Homo sapiens
tcggccagcctgggg

SEQ ID NO: 242367 - DNA, 15 bp, Homo sapiens
atcggccagcctggg

SEQ ID NO: 242368 - DNA, 15 bp, Homo sapiens
catcggccagcctgg

SEQ ID NO: 242369 - DNA, 15 bp, Homo sapiens
ccatcggccagcctg

SEQ ID NO: 242370 - DNA, 15 bp, Homo sapiens
accatcggccagcct

SEQ ID NO: 242371 - DNA, 15 bp, Homo sapiens
aaccatcggccagcc

SEQ ID NO: 242372 - DNA, 15 bp, Homo sapiens
caaccatcggccagc

SEQ ID NO: 242373 - DNA, 15 bp, Homo sapiens
gcaaccatcggccag

SEQ ID NO: 242374 - DNA, 15 bp, Homo sapiens
agcaaccatcggcca

SEQ ID NO: 242375 - DNA, 15 bp, Homo sapiens
cagcaaccatcggcc

SEQ ID NO: 242376 - DNA, 15 bp, Homo sapiens
acagcaaccatcggc

SEQ ID NO: 242377 - DNA, 15 bp, Homo sapiens
aacagcaaccatcgg

SEQ ID NO: 242378 - DNA, 15 bp, Homo sapiens
taacagcaaccatcg

SEQ ID NO: 242379 - DNA, 15 bp, Homo sapiens
ctaacagcaaccatc

SEQ ID NO: 242380 - DNA, 15 bp, Homo sapiens
gctaacagcaaccat

SEQ ID NO: 242381 - DNA, 15 bp, Homo sapiens
agctaacagcaacca

SEQ ID NO: 242382 - DNA, 15 bp, Homo sapiens
aagctaacagcaacc

SEQ ID NO: 242383 - DNA, 15 bp, Homo sapiens
taagctaacagcaac

SEQ ID NO: 242384 - DNA, 15 bp, Homo sapiens
ataagctaacagcaa

SEQ ID NO: 242385 - DNA, 15 bp, Homo sapiens
aataagctaacagca

SEQ ID NO: 242386 - DNA, 15 bp, Homo sapiens
caataagctaacagc

SEQ ID NO: 242387 - DNA, 15 bp, Homo sapiens
ccaataagctaacag

SEQ ID NO: 242388 - DNA, 15 bp, Homo sapiens
cccaataagctaaca

SEQ ID NO: 242389 - DNA, 15 bp, Homo sapiens
tcccaataagctaac

SEQ ID NO: 242390 - DNA, 15 bp, Homo sapiens
ttcccaataagctaa

SEQ ID NO: 242391 - DNA, 15 bp, Homo sapiens
tttcccaataagcta

SEQ ID NO: 242392 - DNA, 15 bp, Homo sapiens
atttcccaataagct

SEQ ID NO: 242393 - DNA, 15 bp, Homo sapiens
gatttcccaataagc

SEQ ID NO: 242394 - DNA, 15 bp, Homo sapiens
tgatttcccaataag

SEQ ID NO: 242395 - DNA, 15 bp, Homo sapiens
gtgatttcccaataa

SEQ ID NO: 242396 - DNA, 15 bp, Homo sapiens
agtgatttcccaata

SEQ ID NO: 242397 - DNA, 15 bp, Homo sapiens
cagtgatttcccaat

SEQ ID NO: 242398 - DNA, 15 bp, Homo sapiens
acagtgatttcccaa

SEQ ID NO: 242399 - DNA, 15 bp, Homo sapiens
aacagtgatttccca

SEQ ID NO: 242400 - DNA, 15 bp, Homo sapiens
aaacagtgatttccc

SEQ ID NO: 242401 - DNA, 15 bp, Homo sapiens
caaacagtgatttcc

SEQ ID NO: 242402 - DNA, 15 bp, Homo sapiens
ccaaacagtgatttc

SEQ ID NO: 242403 - DNA, 15 bp, Homo sapiens
tccaaacagtgattt

SEQ ID NO: 242404 - DNA, 15 bp, Homo sapiens
ttccaaacagtgatt

SEQ ID NO: 242405 - DNA, 15 bp, Homo sapiens
cttccaaacagtgat

SEQ ID NO: 242406 - DNA, 15 bp, Homo sapiens
ccttccaaacagtga

SEQ ID NO: 242407 - DNA, 15 bp, Homo sapiens
accttccaaacagtg

SEQ ID NO: 242408 - DNA, 15 bp, Homo sapiens
caccttccaaacagt

SEQ ID NO: 242409 - DNA, 15 bp, Homo sapiens
gcaccttccaaacag

SEQ ID NO: 242410 - DNA, 15 bp, Homo sapiens
agcaccttccaaaca

SEQ ID NO: 242411 - DNA, 15 bp, Homo sapiens
cagcaccttccaaac

SEQ ID NO: 242412 - DNA, 15 bp, Homo sapiens
ccagcaccttccaaa

SEQ ID NO: 242413 - DNA, 15 bp, Homo sapiens
accagcaccttccaa

SEQ ID NO: 242414 - DNA, 15 bp, Homo sapiens
aaccagcaccttcca

SEQ ID NO: 242415 - DNA, 15 bp, Homo sapiens
caaccagcaccttcc

SEQ ID NO: 242416 - DNA, 15 bp, Homo sapiens
acaaccagcaccttc

SEQ ID NO: 242417 - DNA, 15 bp, Homo sapiens
aacaaccagcacctt

SEQ ID NO: 242418 - DNA, 15 bp, Homo sapiens
aaacaaccagcacct

SEQ ID NO: 242419 - DNA, 15 bp, Homo sapiens
aaaacaaccagcacc

SEQ ID NO: 242420 - DNA, 15 bp, Homo sapiens
aaaaacaaccagcac

SEQ ID NO: 242421 - DNA, 15 bp, Homo sapiens
aaaaaacaaccagca

SEQ ID NO: 242422 - DNA, 15 bp, Homo sapiens
caaaaaacaaccagc

SEQ ID NO: 242423 - DNA, 15 bp, Homo sapiens
acaaaaaacaaccag

SEQ ID NO: 242424 - DNA, 15 bp, Homo sapiens
aacaaaaaacaacca

SEQ ID NO: 242425 - DNA, 15 bp, Homo sapiens
caacaaaaaacaacc

SEQ ID NO: 242426 - DNA, 15 bp, Homo sapiens
acaacaaaaaacaac

SEQ ID NO: 242427 - DNA, 15 bp, Homo sapiens
aacaacaaaaaacaa

SEQ ID NO: 242428 - DNA, 15 bp, Homo sapiens
aaacaacaaaaaaca

SEQ ID NO: 242429 - DNA, 15 bp, Homo sapiens
caaacaacaaaaaac

SEQ ID NO: 242430 - DNA, 15 bp, Homo sapiens
acaaacaacaaaaaa

SEQ ID NO: 242431 - DNA, 15 bp, Homo sapiens
aacaaacaacaaaaa

SEQ ID NO: 242432 - DNA, 15 bp, Homo sapiens
caacaaacaacaaaa

SEQ ID NO: 242433 - DNA, 15 bp, Homo sapiens
acaacaaacaacaaa

SEQ ID NO: 242434 - DNA, 15 bp, Homo sapiens
aacaacaaacaacaa

SEQ ID NO: 242435 - DNA, 15 bp, Homo sapiens
aaacaacaaacaaca

SEQ ID NO: 242436 - DNA, 15 bp, Homo sapiens
aaaacaacaaacaac

SEQ ID NO: 242437 - DNA, 15 bp, Homo sapiens
aaaaacaacaaacaa

SEQ ID NO: 242438 - DNA, 15 bp, Homo sapiens
caaaaacaacaaaca

SEQ ID NO: 242439 - DNA, 15 bp, Homo sapiens
acaaaaacaacaaac

SEQ ID NO: 242440 - DNA, 15 bp, Homo sapiens
aacaaaaacaacaaa

SEQ ID NO: 242441 - DNA, 15 bp, Homo sapiens
aaacaaaaacaacaa

SEQ ID NO: 242442 - DNA, 15 bp, Homo sapiens
aaaacaaaaacaaca

SEQ ID NO: 242443 - DNA, 15 bp, Homo sapiens
aaaaacaaaaacaac

SEQ ID NO: 242444 - DNA, 15 bp, Homo sapiens
acaaaaacaaaaaca

SEQ ID NO: 242445 - DNA, 15 bp, Homo sapiens
aacaaaaacaaaaac

SEQ ID NO: 242446 - DNA, 15 bp, Homo sapiens
caaaacaaaaacaaa

SEQ ID NO: 242447 - DNA, 15 bp, Homo sapiens
tcaaaacaaaaacaa

SEQ ID NO: 242448 - DNA, 15 bp, Homo sapiens
ctcaaaacaaaaaca

SEQ ID NO: 242449 - DNA, 15 bp, Homo sapiens
tctcaaaacaaaaac

SEQ ID NO: 242450 - DNA, 15 bp, Homo sapiens
gtctcaaaacaaaaa

SEQ ID NO: 242451 - DNA, 15 bp, Homo sapiens
cgtctcaaaacaaaa

SEQ ID NO: 242452 - DNA, 15 bp, Homo sapiens
ccgtctcaaaacaaa

SEQ ID NO: 242453 - DNA, 15 bp, Homo sapiens
tccgtctcaaaacaa

SEQ ID NO: 242454 - DNA, 15 bp, Homo sapiens
ctccgtctcaaaaca

SEQ ID NO: 242455 - DNA, 15 bp, Homo sapiens
actccgtctcaaaac

SEQ ID NO: 242456 - DNA, 15 bp, Homo sapiens
gcgagactccgtctc

SEQ ID NO: 242457 - DNA, 15 bp, Homo sapiens
agcgagactccgtct

SEQ ID NO: 242458 - DNA, 15 bp, Homo sapiens
gagcgagactccgtc

SEQ ID NO: 242459 - DNA, 15 bp, Homo sapiens
agagcgagactccgt

SEQ ID NO: 242460 - DNA, 15 bp, Homo sapiens
cagagcgagactccg

SEQ ID NO: 242461 - DNA, 15 bp, Homo sapiens
tggcgacagagcgag

SEQ ID NO: 242462 - DNA, 15 bp, Homo sapiens
ctggcgacagagcga

SEQ ID NO: 242463 - DNA, 15 bp, Homo sapiens
cctggcgacagagcg

SEQ ID NO: 242464 - DNA, 15 bp, Homo sapiens
ccctggcgacagagc

SEQ ID NO: 242465 - DNA, 15 bp, Homo sapiens
accctggcgacagag

SEQ ID NO: 242466 - DNA, 15 bp, Homo sapiens
caccctggcgacaga

SEQ ID NO: 242467 - DNA, 15 bp, Homo sapiens
ccaccctggcgacag

SEQ ID NO: 242468 - DNA, 15 bp, Homo sapiens
tccaccctggcgaca

SEQ ID NO: 242469 - DNA, 15 bp, Homo sapiens
ctccaccctggcgac

SEQ ID NO: 242470 - DNA, 15 bp, Homo sapiens
actccaccctggcga

SEQ ID NO: 242471 - DNA, 15 bp, Homo sapiens
cactccaccctggcg

SEQ ID NO: 242472 - DNA, 15 bp, Homo sapiens
gcactccaccctggc

SEQ ID NO: 242473 - DNA, 15 bp, Homo sapiens
tgcactccaccctgg

SEQ ID NO: 242474 - DNA, 15 bp, Homo sapiens
ctgcactccaccctg

SEQ ID NO: 242475 - DNA, 15 bp, Homo sapiens
actgcactccaccct

SEQ ID NO: 242476 - DNA, 15 bp, Homo sapiens
cactgcactccaccc

SEQ ID NO: 242477 - DNA, 15 bp, Homo sapiens
ccactgcactccacc

SEQ ID NO: 242478 - DNA, 15 bp, Homo sapiens
gccactgcactccac

SEQ ID NO: 242479 - DNA, 15 bp, Homo sapiens
tgatcgcgccactgc

SEQ ID NO: 242480 - DNA, 15 bp, Homo sapiens
ctgatcgcgccactg

SEQ ID NO: 242481 - DNA, 15 bp, Homo sapiens
gctgatcgcgccact

SEQ ID NO: 242482 - DNA, 15 bp, Homo sapiens
agctgatcgcgccac

SEQ ID NO: 242483 - DNA, 15 bp, Homo sapiens
gagctgatcgcgcca

SEQ ID NO: 242484 - DNA, 15 bp, Homo sapiens
tgagctgatcgcgcc

SEQ ID NO: 242485 - DNA, 15 bp, Homo sapiens
gtgagctgatcgcgc

SEQ ID NO: 242486 - DNA, 15 bp, Homo sapiens
agtgagctgatcgcg

SEQ ID NO: 242487 - DNA, 15 bp, Homo sapiens
cagtgagctgatcgc

SEQ ID NO: 242488 - DNA, 15 bp, Homo sapiens
gcagtgagctgatcg

SEQ ID NO: 242489 - DNA, 15 bp, Homo sapiens
tgcagtgagctgatc

SEQ ID NO: 242490 - DNA, 15 bp, Homo sapiens
ttgcagtgagctgat

SEQ ID NO: 242491 - DNA, 15 bp, Homo sapiens
agcggaggttgcagt

SEQ ID NO: 242492 - DNA, 15 bp, Homo sapiens
aagcggaggttgcag

SEQ ID NO: 242493 - DNA, 15 bp, Homo sapiens
gaagcggaggttgca

SEQ ID NO: 242494 - DNA, 15 bp, Homo sapiens
ggaagcggaggttgc

SEQ ID NO: 242495 - DNA, 15 bp, Homo sapiens
aggaagcggaggttg

SEQ ID NO: 242496 - DNA, 15 bp, Homo sapiens
caggaagcggaggtt

SEQ ID NO: 242497 - DNA, 15 bp, Homo sapiens
ccaggaagcggaggt

SEQ ID NO: 242498 - DNA, 15 bp, Homo sapiens
cccaggaagcggagg

SEQ ID NO: 242499 - DNA, 15 bp, Homo sapiens
acccaggaagcggag

SEQ ID NO: 242500 - DNA, 15 bp, Homo sapiens
aacccaggaagcgga

SEQ ID NO: 242501 - DNA, 15 bp, Homo sapiens
gaacccaggaagcgg

SEQ ID NO: 242502 - DNA, 15 bp, Homo sapiens
tgaacccaggaagcg

SEQ ID NO: 242503 - DNA, 15 bp, Homo sapiens
ttgaacccaggaagc

SEQ ID NO: 242504 - DNA, 15 bp, Homo sapiens
cttgaacccaggaag

SEQ ID NO: 242505 - DNA, 15 bp, Homo sapiens
gcttgaacccaggaa

SEQ ID NO: 242506 - DNA, 15 bp, Homo sapiens
ggcttgaacccagga

SEQ ID NO: 242507 - DNA, 15 bp, Homo sapiens
tggcttgaacccagg

SEQ ID NO: 242508 - DNA, 15 bp, Homo sapiens
atggcttgaacccag

SEQ ID NO: 242509 - DNA, 15 bp, Homo sapiens
aatggcttgaaccca

SEQ ID NO: 242510 - DNA, 15 bp, Homo sapiens
gaatggcttgaaccc

SEQ ID NO: 242511 - DNA, 15 bp, Homo sapiens
agaatggcttgaacc

SEQ ID NO: 242512 - DNA, 15 bp, Homo sapiens
gagaatggcttgaac

SEQ ID NO: 242513 - DNA, 15 bp, Homo sapiens
ggagaatggcttgaa

SEQ ID NO: 242514 - DNA, 15 bp, Homo sapiens
aggagaatggcttga

SEQ ID NO: 242515 - DNA, 15 bp, Homo sapiens
caggagaatggcttg

SEQ ID NO: 242516 - DNA, 15 bp, Homo sapiens
gcaggagaatggctt

SEQ ID NO: 242517 - DNA, 15 bp, Homo sapiens
ggcaggagaatggct

SEQ ID NO: 242518 - DNA, 15 bp, Homo sapiens
cgctacttgggaggc

SEQ ID NO: 242519 - DNA, 15 bp, Homo sapiens
gcgctacttgggagg

SEQ ID NO: 242520 - DNA, 15 bp, Homo sapiens
cgcgctacttgggag

SEQ ID NO: 242521 - DNA, 15 bp, Homo sapiens
ccgcgctacttggga

SEQ ID NO: 242522 - DNA, 15 bp, Homo sapiens
tccgcgctacttggg

SEQ ID NO: 242523 - DNA, 15 bp, Homo sapiens
atccgcgctacttgg

SEQ ID NO: 242524 - DNA, 15 bp, Homo sapiens
aatccgcgctacttg

SEQ ID NO: 242525 - DNA, 15 bp, Homo sapiens
taatccgcgctactt

SEQ ID NO: 242526 - DNA, 15 bp, Homo sapiens
gtaatccgcgctact

SEQ ID NO: 242527 - DNA, 15 bp, Homo sapiens
tgtaatccgcgctac

SEQ ID NO: 242528 - DNA, 15 bp, Homo sapiens
ctgtaatccgcgcta

SEQ ID NO: 242529 - DNA, 15 bp, Homo sapiens
cctgtaatccgcgct

SEQ ID NO: 242530 - DNA, 15 bp, Homo sapiens
gcctgtaatccgcgc

SEQ ID NO: 242531 - DNA, 15 bp, Homo sapiens
tgcctgtaatccgcg

SEQ ID NO: 242532 - DNA, 15 bp, Homo sapiens
atgcctgtaatccgc

SEQ ID NO: 242533 - DNA, 15 bp, Homo sapiens
catgcctgtaatccg

SEQ ID NO: 242534 - DNA, 15 bp, Homo sapiens
ggtggtggcacatgc

SEQ ID NO: 242535 - DNA, 15 bp, Homo sapiens
aggtggtggcacatg

SEQ ID NO: 242536 - DNA, 15 bp, Homo sapiens
gaggtggtggcacat

SEQ ID NO: 242537 - DNA, 15 bp, Homo sapiens
ggaggtggtggcaca

SEQ ID NO: 242538 - DNA, 15 bp, Homo sapiens
cggaggtggtggcac

SEQ ID NO: 242539 - DNA, 15 bp, Homo sapiens
ccggaggtggtggca

SEQ ID NO: 242540 - DNA, 15 bp, Homo sapiens
gccggaggtggtggc

SEQ ID NO: 242541 - DNA, 15 bp, Homo sapiens
agccggaggtggtgg

SEQ ID NO: 242542 - DNA, 15 bp, Homo sapiens
tagccggaggtggtg

SEQ ID NO: 242543 - DNA, 15 bp, Homo sapiens
atagccggaggtggt

SEQ ID NO: 242544 - DNA, 15 bp, Homo sapiens
aatagccggaggtgg

SEQ ID NO: 242545 - DNA, 15 bp, Homo sapiens
aaatagccggaggtg

SEQ ID NO: 242546 - DNA, 15 bp, Homo sapiens
aaaatagccggaggt

SEQ ID NO: 242547 - DNA, 15 bp, Homo sapiens
aaaaatagccggagg

SEQ ID NO: 242548 - DNA, 15 bp, Homo sapiens
aaaaaatagccggag

SEQ ID NO: 242549 - DNA, 15 bp, Homo sapiens
aaaaaaatagccgga

SEQ ID NO: 242550 - DNA, 15 bp, Homo sapiens
aaaaaaaatagccgg

SEQ ID NO: 242551 - DNA, 15 bp, Homo sapiens
aaaaaaaaatagccg

SEQ ID NO: 242552 - DNA, 15 bp, Homo sapiens
gaaaaaaaaatagcc

SEQ ID NO: 242553 - DNA, 15 bp, Homo sapiens
agaaaaaaaaatagc

SEQ ID NO: 242554 - DNA, 15 bp, Homo sapiens
tagaaaaaaaaatag

SEQ ID NO: 242555 - DNA, 15 bp, Homo sapiens
atagaaaaaaaaata

SEQ ID NO: 242556 - DNA, 15 bp, Homo sapiens
aatagaaaaaaaaat

SEQ ID NO: 242557 - DNA, 15 bp, Homo sapiens
aaatagaaaaaaaaa

SEQ ID NO: 242558 - DNA, 15 bp, Homo sapiens
taaatagaaaaaaaa

SEQ ID NO: 242559 - DNA, 15 bp, Homo sapiens
ctaaatagaaaaaaa

SEQ ID NO: 242560 - DNA, 15 bp, Homo sapiens
actaaatagaaaaaa

SEQ ID NO: 242561 - DNA, 15 bp, Homo sapiens
tactaaatagaaaaa

SEQ ID NO: 242562 - DNA, 15 bp, Homo sapiens
ctactaaatagaaaa

SEQ ID NO: 242563 - DNA, 15 bp, Homo sapiens
tctactaaatagaaa

SEQ ID NO: 242564 - DNA, 15 bp, Homo sapiens
ctctactaaatagaa

SEQ ID NO: 242565 - DNA, 15 bp, Homo sapiens
tctctactaaataga

SEQ ID NO: 242566 - DNA, 15 bp, Homo sapiens
atctctactaaatag

SEQ ID NO: 242567 - DNA, 15 bp, Homo sapiens
catctctactaaata

SEQ ID NO: 242568 - DNA, 15 bp, Homo sapiens
ccatctctactaaat

SEQ ID NO: 242569 - DNA, 15 bp, Homo sapiens
actaacatggtgaaa

SEQ ID NO: 242570 - DNA, 15 bp, Homo sapiens
gactaacatggtgaa

SEQ ID NO: 242571 - DNA, 15 bp, Homo sapiens
tgactaacatggtga

SEQ ID NO: 242572 - DNA, 15 bp, Homo sapiens
ctgactaacatggtg

SEQ ID NO: 242573 - DNA, 15 bp, Homo sapiens
cctgactaacatggt

SEQ ID NO: 242574 - DNA, 15 bp, Homo sapiens
gcctgactaacatgg

SEQ ID NO: 242575 - DNA, 15 bp, Homo sapiens
agcctgactaacatg

SEQ ID NO: 242576 - DNA, 15 bp, Homo sapiens
cagcctgactaacat

SEQ ID NO: 242577 - DNA, 15 bp, Homo sapiens
ccagcctgactaaca

SEQ ID NO: 242578 - DNA, 15 bp, Homo sapiens
accagcctgactaac

SEQ ID NO: 242579 - DNA, 15 bp, Homo sapiens
gaccagcctgactaa

SEQ ID NO: 242580 - DNA, 15 bp, Homo sapiens
tgaccagcctgacta

SEQ ID NO: 242581 - DNA, 15 bp, Homo sapiens
atgaccagcctgact

SEQ ID NO: 242582 - DNA, 15 bp, Homo sapiens
catgaccagcctgac

SEQ ID NO: 242583 - DNA, 15 bp, Homo sapiens
tcatgaccagcctga

SEQ ID NO: 242584 - DNA, 15 bp, Homo sapiens
ttcatgaccagcctg

SEQ ID NO: 242585 - DNA, 15 bp, Homo sapiens
gttcatgaccagcct

SEQ ID NO: 242586 - DNA, 15 bp, Homo sapiens
agttcatgaccagcc

SEQ ID NO: 242587 - DNA, 15 bp, Homo sapiens
gagttcatgaccagc

SEQ ID NO: 242588 - DNA, 15 bp, Homo sapiens
agagttcatgaccag

SEQ ID NO: 242589 - DNA, 15 bp, Homo sapiens
aagagttcatgacca

SEQ ID NO: 242590 - DNA, 15 bp, Homo sapiens
caagagttcatgacc

SEQ ID NO: 242591 - DNA, 15 bp, Homo sapiens
tcaagagttcatgac

SEQ ID NO: 242592 - DNA, 15 bp, Homo sapiens
gtcaagagttcatga

SEQ ID NO: 242593 - DNA, 15 bp, Homo sapiens
ggtcaagagttcatg

SEQ ID NO: 242594 - DNA, 15 bp, Homo sapiens
aggtcaagagttcat

SEQ ID NO: 242595 - DNA, 15 bp, Homo sapiens
gaggtcaagagttca

SEQ ID NO: 242596 - DNA, 15 bp, Homo sapiens
tgaggtcaagagttc

SEQ ID NO: 242597 - DNA, 15 bp, Homo sapiens
ctgaggtcaagagtt

SEQ ID NO: 242598 - DNA, 15 bp, Homo sapiens
cctgaggtcaagagt

SEQ ID NO: 242599 - DNA, 15 bp, Homo sapiens
acctgaggtcaagag

SEQ ID NO: 242600 - DNA, 15 bp, Homo sapiens
cacctgaggtcaaga

SEQ ID NO: 242601 - DNA, 15 bp, Homo sapiens
tcacctgaggtcaag

SEQ ID NO: 242602 - DNA, 15 bp, Homo sapiens
atcacctgaggtcaa

SEQ ID NO: 242603 - DNA, 15 bp, Homo sapiens
cgaggcgggtggatc

SEQ ID NO: 242604 - DNA, 15 bp, Homo sapiens
ccgaggcgggtggat

SEQ ID NO: 242605 - DNA, 15 bp, Homo sapiens
gccgaggcgggtgga

SEQ ID NO: 242606 - DNA, 15 bp, Homo sapiens
ggccgaggcgggtgg

SEQ ID NO: 242607 - DNA, 15 bp, Homo sapiens
aggccgaggcgggtg

SEQ ID NO: 242608 - DNA, 15 bp, Homo sapiens
gaggccgaggcgggt

SEQ ID NO: 242609 - DNA, 15 bp, Homo sapiens
ggaggccgaggcggg

SEQ ID NO: 242610 - DNA, 15 bp, Homo sapiens
gggaggccgaggcgg

SEQ ID NO: 242611 - DNA, 15 bp, Homo sapiens
tgggaggccgaggcg

SEQ ID NO: 242612 - DNA, 15 bp, Homo sapiens
agtgcacgcctgtaa

SEQ ID NO: 242613 - DNA, 15 bp, Homo sapiens
cagtgcacgcctgta

SEQ ID NO: 242614 - DNA, 15 bp, Homo sapiens
gcagtgcacgcctgt

SEQ ID NO: 242615 - DNA, 15 bp, Homo sapiens
agcagtgcacgcctg

SEQ ID NO: 242616 - DNA, 15 bp, Homo sapiens
cagcagtgcacgcct

SEQ ID NO: 242617 - DNA, 15 bp, Homo sapiens
gcagcagtgcacgcc

SEQ ID NO: 242618 - DNA, 15 bp, Homo sapiens
tgcagcagtgcacgc

SEQ ID NO: 242619 - DNA, 15 bp, Homo sapiens
gtgcagcagtgcacg

SEQ ID NO: 242620 - DNA, 15 bp, Homo sapiens
ggtgcagcagtgcac

SEQ ID NO: 242621 - DNA, 15 bp, Homo sapiens
gggtgcagcagtgca

SEQ ID NO: 242622 - DNA, 15 bp, Homo sapiens
tgggtgcagcagtgc

SEQ ID NO: 242623 - DNA, 15 bp, Homo sapiens
ctgggtgcagcagtg

SEQ ID NO: 242624 - DNA, 15 bp, Homo sapiens
gctgggtgcagcagt

SEQ ID NO: 242625 - DNA, 15 bp, Homo sapiens
ggctgggtgcagcag

SEQ ID NO: 242626 - DNA, 15 bp, Homo sapiens
aggctgggtgcagca

SEQ ID NO: 242627 - DNA, 15 bp, Homo sapiens
aaggctgggtgcagc

SEQ ID NO: 242628 - DNA, 15 bp, Homo sapiens
aaaggctgggtgcag

SEQ ID NO: 242629 - DNA, 15 bp, Homo sapiens
aaaaggctgggtgca

SEQ ID NO: 242630 - DNA, 15 bp, Homo sapiens
aaaaaggctgggtgc

SEQ ID NO: 242631 - DNA, 15 bp, Homo sapiens
aaaaaaggctgggtg

SEQ ID NO: 242632 - DNA, 15 bp, Homo sapiens
aaaaaaaggctgggt

SEQ ID NO: 242633 - DNA, 15 bp, Homo sapiens
caaaaaaaggctggg

SEQ ID NO: 242634 - DNA, 15 bp, Homo sapiens
acaaaaaaaggctgg

SEQ ID NO: 242635 - DNA, 15 bp, Homo sapiens
aacaaaaaaaggctg

SEQ ID NO: 242636 - DNA, 15 bp, Homo sapiens
aaacaaaaaaaggct

SEQ ID NO: 242637 - DNA, 15 bp, Homo sapiens
aaaacaaaaaaaggc

SEQ ID NO: 242638 - DNA, 15 bp, Homo sapiens
aaaaacaaaaaaagg

SEQ ID NO: 242639 - DNA, 15 bp, Homo sapiens
aaaaaacaaaaaaag

SEQ ID NO: 242640 - DNA, 15 bp, Homo sapiens
aaaaaaacaaaaaaa

SEQ ID NO: 242641 - DNA, 15 bp, Homo sapiens
caaaaaaacaaaaaa

SEQ ID NO: 242642 - DNA, 15 bp, Homo sapiens
tcaaaaaaacaaaaa

SEQ ID NO: 242643 - DNA, 15 bp, Homo sapiens
ctcaaaaaaacaaaa

SEQ ID NO: 242644 - DNA, 15 bp, Homo sapiens
tctcaaaaaaacaaa

SEQ ID NO: 242645 - DNA, 15 bp, Homo sapiens
gtctcaaaaaaacaa

SEQ ID NO: 242646 - DNA, 15 bp, Homo sapiens
tgtctcaaaaaaaca

SEQ ID NO: 242647 - DNA, 15 bp, Homo sapiens
ctgtctcaaaaaaac

SEQ ID NO: 242648 - DNA, 15 bp, Homo sapiens
aagaccctgtctcaa

SEQ ID NO: 242649 - DNA, 15 bp, Homo sapiens
caagaccctgtctca

SEQ ID NO: 242650 - DNA, 15 bp, Homo sapiens
gcaagaccctgtctc

SEQ ID NO: 242651 - DNA, 15 bp, Homo sapiens
agcaagaccctgtct

SEQ ID NO: 242652 - DNA, 15 bp, Homo sapiens
cagcaagaccctgtc

SEQ ID NO: 242653 - DNA, 15 bp, Homo sapiens
acagcaagaccctgt

SEQ ID NO: 242654 - DNA, 15 bp, Homo sapiens
gacagcaagaccctg

SEQ ID NO: 242655 - DNA, 15 bp, Homo sapiens
tgacagcaagaccct

SEQ ID NO: 242656 - DNA, 15 bp, Homo sapiens
gtgacagcaagaccc

SEQ ID NO: 242657 - DNA, 15 bp, Homo sapiens
ggtgacagcaagacc

SEQ ID NO: 242658 - DNA, 15 bp, Homo sapiens
gggtgacagcaagac

SEQ ID NO: 242659 - DNA, 15 bp, Homo sapiens
tgggtgacagcaaga

SEQ ID NO: 242660 - DNA, 15 bp, Homo sapiens
ctgggtgacagcaag

SEQ ID NO: 242661 - DNA, 15 bp, Homo sapiens
cctgggtgacagcaa

SEQ ID NO: 242662 - DNA, 15 bp, Homo sapiens
acctgggtgacagca

SEQ ID NO: 242663 - DNA, 15 bp, Homo sapiens
aacctgggtgacagc

SEQ ID NO: 242664 - DNA, 15 bp, Homo sapiens
caacctgggtgacag

SEQ ID NO: 242665 - DNA, 15 bp, Homo sapiens
tcaacctgggtgaca

SEQ ID NO: 242666 - DNA, 15 bp, Homo sapiens
ttcaacctgggtgac

SEQ ID NO: 242667 - DNA, 15 bp, Homo sapiens
cttcaacctgggtga

SEQ ID NO: 242668 - DNA, 15 bp, Homo sapiens
acttcaacctgggtg

SEQ ID NO: 242669 - DNA, 15 bp, Homo sapiens
tacttcaacctgggt

SEQ ID NO: 242670 - DNA, 15 bp, Homo sapiens
ttacttcaacctggg

SEQ ID NO: 242671 - DNA, 15 bp, Homo sapiens
cttacttcaacctgg

SEQ ID NO: 242672 - DNA, 15 bp, Homo sapiens
ccttacttcaacctg

SEQ ID NO: 242673 - DNA, 15 bp, Homo sapiens
accttacttcaacct

SEQ ID NO: 242674 - DNA, 15 bp, Homo sapiens
caccttacttcaacc

SEQ ID NO: 242675 - DNA, 15 bp, Homo sapiens
ccaccttacttcaac

SEQ ID NO: 242676 - DNA, 15 bp, Homo sapiens
gccaccttacttcaa

SEQ ID NO: 242677 - DNA, 15 bp, Homo sapiens
tgccaccttacttca

SEQ ID NO: 242678 - DNA, 15 bp, Homo sapiens
gtgccaccttacttc

SEQ ID NO: 242679 - DNA, 15 bp, Homo sapiens
cgtgccaccttactt

SEQ ID NO: 242680 - DNA, 15 bp, Homo sapiens
tcgtgccaccttact

SEQ ID NO: 242681 - DNA, 15 bp, Homo sapiens
atcgtgccaccttac

SEQ ID NO: 242682 - DNA, 15 bp, Homo sapiens
aatcgtgccacctta

SEQ ID NO: 242683 - DNA, 15 bp, Homo sapiens
taatcgtgccacctt

SEQ ID NO: 242684 - DNA, 15 bp, Homo sapiens
ataatcgtgccacct

SEQ ID NO: 242685 - DNA, 15 bp, Homo sapiens
cataatcgtgccacc

SEQ ID NO: 242686 - DNA, 15 bp, Homo sapiens
ccataatcgtgccac

SEQ ID NO: 242687 - DNA, 15 bp, Homo sapiens
gccataatcgtgcca

SEQ ID NO: 242688 - DNA, 15 bp, Homo sapiens
agccataatcgtgcc

SEQ ID NO: 242689 - DNA, 15 bp, Homo sapiens
gagccataatcgtgc

SEQ ID NO: 242690 - DNA, 15 bp, Homo sapiens
tgagccataatcgtg

SEQ ID NO: 242691 - DNA, 15 bp, Homo sapiens
gtgagccataatcgt

SEQ ID NO: 242692 - DNA, 15 bp, Homo sapiens
agtgagccataatcg

SEQ ID NO: 242693 - DNA, 15 bp, Homo sapiens
cagtgagccataatc

SEQ ID NO: 242694 - DNA, 15 bp, Homo sapiens
gcagtgagccataat

SEQ ID NO: 242695 - DNA, 15 bp, Homo sapiens
cgcagtgagccataa

SEQ ID NO: 242696 - DNA, 15 bp, Homo sapiens
ccgcagtgagccata

SEQ ID NO: 242697 - DNA, 15 bp, Homo sapiens
gccgcagtgagccat

SEQ ID NO: 242698 - DNA, 15 bp, Homo sapiens
ggccgcagtgagcca

SEQ ID NO: 242699 - DNA, 15 bp, Homo sapiens
aggccgcagtgagcc

SEQ ID NO: 242700 - DNA, 15 bp, Homo sapiens
aaggccgcagtgagc

SEQ ID NO: 242701 - DNA, 15 bp, Homo sapiens
caaggccgcagtgag

SEQ ID NO: 242702 - DNA, 15 bp, Homo sapiens
tcaaggccgcagtga

SEQ ID NO: 242703 - DNA, 15 bp, Homo sapiens
atcaaggccgcagtg

SEQ ID NO: 242704 - DNA, 15 bp, Homo sapiens
gatcaaggccgcagt

SEQ ID NO: 242705 - DNA, 15 bp, Homo sapiens
agatcaaggccgcag

SEQ ID NO: 242706 - DNA, 15 bp, Homo sapiens
gagatcaaggccgca

SEQ ID NO: 242707 - DNA, 15 bp, Homo sapiens
ggagatcaaggccgc

SEQ ID NO: 242708 - DNA, 15 bp, Homo sapiens
aggagatcaaggccg

SEQ ID NO: 242709 - DNA, 15 bp, Homo sapiens
aaggagatcaaggcc

SEQ ID NO: 242710 - DNA, 15 bp, Homo sapiens
caaggagatcaaggc

SEQ ID NO: 242711 - DNA, 15 bp, Homo sapiens
ccaaggagatcaagg

SEQ ID NO: 242712 - DNA, 15 bp, Homo sapiens
gccaaggagatcaag

SEQ ID NO: 242713 - DNA, 15 bp, Homo sapiens
agccaaggagatcaa

SEQ ID NO: 242714 - DNA, 15 bp, Homo sapiens
gagccaaggagatca

SEQ ID NO: 242715 - DNA, 15 bp, Homo sapiens
tgagccaaggagatc

SEQ ID NO: 242716 - DNA, 15 bp, Homo sapiens
ttgagccaaggagat

SEQ ID NO: 242717 - DNA, 15 bp, Homo sapiens
cttgagccaaggaga

SEQ ID NO: 242718 - DNA, 15 bp, Homo sapiens
cgcttgagccaagga

SEQ ID NO: 242719 - DNA, 15 bp, Homo sapiens
tcgcttgagccaagg

SEQ ID NO: 242720 - DNA, 15 bp, Homo sapiens
atcgcttgagccaag

SEQ ID NO: 242721 - DNA, 15 bp, Homo sapiens
gatcgcttgagccaa

SEQ ID NO: 242722 - DNA, 15 bp, Homo sapiens
ggatcgcttgagcca

SEQ ID NO: 242723 - DNA, 15 bp, Homo sapiens
aggatcgcttgagcc

SEQ ID NO: 242724 - DNA, 15 bp, Homo sapiens
gaggatcgcttgagc

SEQ ID NO: 242725 - DNA, 15 bp, Homo sapiens
agaggatcgcttgag

SEQ ID NO: 242726 - DNA, 15 bp, Homo sapiens
gagaggatcgcttga

SEQ ID NO: 242727 - DNA, 15 bp, Homo sapiens
tgagaggatcgcttg

SEQ ID NO: 242728 - DNA, 15 bp, Homo sapiens
gtgagaggatcgctt

SEQ ID NO: 242729 - DNA, 15 bp, Homo sapiens
agtgagaggatcgct

SEQ ID NO: 242730 - DNA, 15 bp, Homo sapiens
aagtgagaggatcgc

SEQ ID NO: 242731 - DNA, 15 bp, Homo sapiens
gaagtgagaggatcg

SEQ ID NO: 242732 - DNA, 15 bp, Homo sapiens
tgaagtgagaggatc

SEQ ID NO: 242733 - DNA, 15 bp, Homo sapiens
ctgaagtgagaggat

SEQ ID NO: 242734 - DNA, 15 bp, Homo sapiens
gctgaagtgagagga

SEQ ID NO: 242735 - DNA, 15 bp, Homo sapiens
ggctgaagtgagagg

SEQ ID NO: 242736 - DNA, 15 bp, Homo sapiens
aggctgaagtgagag

SEQ ID NO: 242737 - DNA, 15 bp, Homo sapiens
gaggctgaagtgaga

SEQ ID NO: 242738 - DNA, 15 bp, Homo sapiens
agaggctgaagtgag

SEQ ID NO: 242739 - DNA, 15 bp, Homo sapiens
gagaggctgaagtga

SEQ ID NO: 242740 - DNA, 15 bp, Homo sapiens
tgagaggctgaagtg

SEQ ID NO: 242741 - DNA, 15 bp, Homo sapiens
ttgagaggctgaagt

SEQ ID NO: 242742 - DNA, 15 bp, Homo sapiens
cttgagaggctgaag

SEQ ID NO: 242743 - DNA, 15 bp, Homo sapiens
gcttgagaggctgaa

SEQ ID NO: 242744 - DNA, 15 bp, Homo sapiens
tgcttgagaggctga

SEQ ID NO: 242745 - DNA, 15 bp, Homo sapiens
ctgcttgagaggctg

SEQ ID NO: 242746 - DNA, 15 bp, Homo sapiens
actgcttgagaggct

SEQ ID NO: 242747 - DNA, 15 bp, Homo sapiens
aactgcttgagaggc

SEQ ID NO: 242748 - DNA, 15 bp, Homo sapiens
caactgcttgagagg

SEQ ID NO: 242749 - DNA, 15 bp, Homo sapiens
ccaactgcttgagag

SEQ ID NO: 242750 - DNA, 15 bp, Homo sapiens
tccaactgcttgaga

SEQ ID NO: 242751 - DNA, 15 bp, Homo sapiens
ttccaactgcttgag

SEQ ID NO: 242752 - DNA, 15 bp, Homo sapiens
gttccaactgcttga

SEQ ID NO: 242753 - DNA, 15 bp, Homo sapiens
ggttccaactgcttg

SEQ ID NO: 242754 - DNA, 15 bp, Homo sapiens
tggttccaactgctt

SEQ ID NO: 242755 - DNA, 15 bp, Homo sapiens
gtggttccaactgct

SEQ ID NO: 242756 - DNA, 15 bp, Homo sapiens
tgtggttccaactgc

SEQ ID NO: 242757 - DNA, 15 bp, Homo sapiens
ctgtggttccaactg

SEQ ID NO: 242758 - DNA, 15 bp, Homo sapiens
cctgtggttccaact

SEQ ID NO: 242759 - DNA, 15 bp, Homo sapiens
gcctgtggttccaac

SEQ ID NO: 242760 - DNA, 15 bp, Homo sapiens
agcctgtggttccaa

SEQ ID NO: 242761 - DNA, 15 bp, Homo sapiens
cagcctgtggttcca

SEQ ID NO: 242762 - DNA, 15 bp, Homo sapiens
acagcctgtggttcc

SEQ ID NO: 242763 - DNA, 15 bp, Homo sapiens
tacagcctgtggttc

SEQ ID NO: 242764 - DNA, 15 bp, Homo sapiens
gtacagcctgtggtt

SEQ ID NO: 242765 - DNA, 15 bp, Homo sapiens
ggtacagcctgtggt

SEQ ID NO: 242766 - DNA, 15 bp, Homo sapiens
tggtacagcctgtgg

SEQ ID NO: 242767 - DNA, 15 bp, Homo sapiens
gtggtacagcctgtg

SEQ ID NO: 242768 - DNA, 15 bp, Homo sapiens
ggtggtacagcctgt

SEQ ID NO: 242769 - DNA, 15 bp, Homo sapiens
tggtggtacagcctg

SEQ ID NO: 242770 - DNA, 15 bp, Homo sapiens
ttggtggtacagcct

SEQ ID NO: 242771 - DNA, 15 bp, Homo sapiens
cttggtggtacagcc

SEQ ID NO: 242772 - DNA, 15 bp, Homo sapiens
gcttggtggtacagc

SEQ ID NO: 242773 - DNA, 15 bp, Homo sapiens
ggcttggtggtacag

SEQ ID NO: 242774 - DNA, 15 bp, Homo sapiens
aggcttggtggtaca

SEQ ID NO: 242775 - DNA, 15 bp, Homo sapiens
caggcttggtggtac

SEQ ID NO: 242776 - DNA, 15 bp, Homo sapiens
ccaggcttggtggta

SEQ ID NO: 242777 - DNA, 15 bp, Homo sapiens
gccaggcttggtggt

SEQ ID NO: 242778 - DNA, 15 bp, Homo sapiens
ggccaggcttggtgg

SEQ ID NO: 242779 - DNA, 15 bp, Homo sapiens
tggccaggcttggtg

SEQ ID NO: 242780 - DNA, 15 bp, Homo sapiens
ttggccaggcttggt

SEQ ID NO: 242781 - DNA, 15 bp, Homo sapiens
attggccaggcttgg

SEQ ID NO: 242782 - DNA, 15 bp, Homo sapiens
aattggccaggcttg

SEQ ID NO: 242783 - DNA, 15 bp, Homo sapiens
aaattggccaggctt

SEQ ID NO: 242784 - DNA, 15 bp, Homo sapiens
aaaattggccaggct

SEQ ID NO: 242785 - DNA, 15 bp, Homo sapiens
aaaaattggccaggc

SEQ ID NO: 242786 - DNA, 15 bp, Homo sapiens
aaaaaattggccagg

SEQ ID NO: 242787 - DNA, 15 bp, Homo sapiens
aaaaaaattggccag

SEQ ID NO: 242788 - DNA, 15 bp, Homo sapiens
caaaaaaattggcca

SEQ ID NO: 242789 - DNA, 15 bp, Homo sapiens
acaaaaaaattggcc

SEQ ID NO: 242790 - DNA, 15 bp, Homo sapiens
tacaaaaaaattggc

SEQ ID NO: 242791 - DNA, 15 bp, Homo sapiens
gtacaaaaaaattgg

SEQ ID NO: 242792 - DNA, 15 bp, Homo sapiens
tgtacaaaaaaattg

SEQ ID NO: 242793 - DNA, 15 bp, Homo sapiens
ctgtacaaaaaaatt

SEQ ID NO: 242794 - DNA, 15 bp, Homo sapiens
tctgtacaaaaaaat

SEQ ID NO: 242795 - DNA, 15 bp, Homo sapiens
gtctgtacaaaaaaa

SEQ ID NO: 242796 - DNA, 15 bp, Homo sapiens
tgtctgtacaaaaaa

SEQ ID NO: 242797 - DNA, 15 bp, Homo sapiens
gtgtctgtacaaaaa

SEQ ID NO: 242798 - DNA, 15 bp, Homo sapiens
tgtgtctgtacaaaa

SEQ ID NO: 242799 - DNA, 15 bp, Homo sapiens
ctgtgtctgtacaaa

SEQ ID NO: 242800 - DNA, 15 bp, Homo sapiens
cctgtgtctgtacaa

SEQ ID NO: 242801 - DNA, 15 bp, Homo sapiens
gcctgtgtctgtaca

SEQ ID NO: 242802 - DNA, 15 bp, Homo sapiens
agcctgtgtctgtac

SEQ ID NO: 242803 - DNA, 15 bp, Homo sapiens
cagcctgtgtctgta

SEQ ID NO: 242804 - DNA, 15 bp, Homo sapiens
ccagcctgtgtctgt

SEQ ID NO: 242805 - DNA, 15 bp, Homo sapiens
accagcctgtgtctg

SEQ ID NO: 242806 - DNA, 15 bp, Homo sapiens
gaccagcctgtgtct

SEQ ID NO: 242807 - DNA, 15 bp, Homo sapiens
agaccagcctgtgtc

SEQ ID NO: 242808 - DNA, 15 bp, Homo sapiens
aagaccagcctgtgt

SEQ ID NO: 242809 - DNA, 15 bp, Homo sapiens
caagaccagcctgtg

SEQ ID NO: 242810 - DNA, 15 bp, Homo sapiens
tcaagaccagcctgt

SEQ ID NO: 242811 - DNA, 15 bp, Homo sapiens
cccaggagttcaaga

SEQ ID NO: 242812 - DNA, 15 bp, Homo sapiens
gcccaggagttcaag

SEQ ID NO: 242813 - DNA, 15 bp, Homo sapiens
agcccaggagttcaa

SEQ ID NO: 242814 - DNA, 15 bp, Homo sapiens
gagcccaggagttca

SEQ ID NO: 242815 - DNA, 15 bp, Homo sapiens
tgagcccaggagttc

SEQ ID NO: 242816 - DNA, 15 bp, Homo sapiens
caggaggattgcttg

SEQ ID NO: 242817 - DNA, 15 bp, Homo sapiens
gcaggaggattgctt

SEQ ID NO: 242818 - DNA, 15 bp, Homo sapiens
ggcaggaggattgct

SEQ ID NO: 242819 - DNA, 15 bp, Homo sapiens
aggcaggaggattgc

SEQ ID NO: 242820 - DNA, 15 bp, Homo sapiens
aaggcaggaggattg

SEQ ID NO: 242821 - DNA, 15 bp, Homo sapiens
caaggcaggaggatt

SEQ ID NO: 242822 - DNA, 15 bp, Homo sapiens
ccaaggcaggaggat

SEQ ID NO: 242823 - DNA, 15 bp, Homo sapiens
gccaaggcaggagga

SEQ ID NO: 242824 - DNA, 15 bp, Homo sapiens
ggccaaggcaggagg

SEQ ID NO: 242825 - DNA, 15 bp, Homo sapiens
aggccaaggcaggag

SEQ ID NO: 242826 - DNA, 15 bp, Homo sapiens
gaggccaaggcagga

SEQ ID NO: 242827 - DNA, 15 bp, Homo sapiens
gaatcccagcacttt

SEQ ID NO: 242828 - DNA, 15 bp, Homo sapiens
ggaatcccagcactt

SEQ ID NO: 242829 - DNA, 15 bp, Homo sapiens
tggaatcccagcact

SEQ ID NO: 242830 - DNA, 15 bp, Homo sapiens
ctggaatcccagcac

SEQ ID NO: 242831 - DNA, 15 bp, Homo sapiens
cctggaatcccagca

SEQ ID NO: 242832 - DNA, 15 bp, Homo sapiens
gcctggaatcccagc

SEQ ID NO: 242833 - DNA, 15 bp, Homo sapiens
tgcctggaatcccag

SEQ ID NO: 242834 - DNA, 15 bp, Homo sapiens
atgcctggaatccca

SEQ ID NO: 242835 - DNA, 15 bp, Homo sapiens
catgcctggaatccc

SEQ ID NO: 242836 - DNA, 15 bp, Homo sapiens
tcatgcctggaatcc

SEQ ID NO: 242837 - DNA, 15 bp, Homo sapiens
ctcatgcctggaatc

SEQ ID NO: 242838 - DNA, 15 bp, Homo sapiens
gctcatgcctggaat

SEQ ID NO: 242839 - DNA, 15 bp, Homo sapiens
ggctcatgcctggaa

SEQ ID NO: 242840 - DNA, 15 bp, Homo sapiens
cggctcatgcctgga

SEQ ID NO: 242841 - DNA, 15 bp, Homo sapiens
gcggctcatgcctgg

SEQ ID NO: 242842 - DNA, 15 bp, Homo sapiens
agcggctcatgcctg

SEQ ID NO: 242843 - DNA, 15 bp, Homo sapiens
cagcggctcatgcct

SEQ ID NO: 242844 - DNA, 15 bp, Homo sapiens
gcagcggctcatgcc

SEQ ID NO: 242845 - DNA, 15 bp, Homo sapiens
tgcagcggctcatgc

SEQ ID NO: 242846 - DNA, 15 bp, Homo sapiens
gtgcagcggctcatg

SEQ ID NO: 242847 - DNA, 15 bp, Homo sapiens
ggtgcagcggctcat

SEQ ID NO: 242848 - DNA, 15 bp, Homo sapiens
gggtgcagcggctca

SEQ ID NO: 242849 - DNA, 15 bp, Homo sapiens
cgggtgcagcggctc

SEQ ID NO: 242850 - DNA, 15 bp, Homo sapiens
ccgggtgcagcggct

SEQ ID NO: 242851 - DNA, 15 bp, Homo sapiens
gccgggtgcagcggc

SEQ ID NO: 242852 - DNA, 15 bp, Homo sapiens
tgccgggtgcagcgg

SEQ ID NO: 242853 - DNA, 15 bp, Homo sapiens
ttgccgggtgcagcg

SEQ ID NO: 242854 - DNA, 15 bp, Homo sapiens
tttgccgggtgcagc

SEQ ID NO: 242855 - DNA, 15 bp, Homo sapiens
ttttgccgggtgcag

SEQ ID NO: 242856 - DNA, 15 bp, Homo sapiens
cttttgccgggtgca

SEQ ID NO: 242857 - DNA, 15 bp, Homo sapiens
ccttttgccgggtgc

SEQ ID NO: 242858 - DNA, 15 bp, Homo sapiens
gccttttgccgggtg

SEQ ID NO: 242859 - DNA, 15 bp, Homo sapiens
ggccttttgccgggt

SEQ ID NO: 242860 - DNA, 15 bp, Homo sapiens
gggccttttgccggg

SEQ ID NO: 242861 - DNA, 15 bp, Homo sapiens
agggccttttgccgg

SEQ ID NO: 242862 - DNA, 15 bp, Homo sapiens
cagggccttttgccg

SEQ ID NO: 242863 - DNA, 15 bp, Homo sapiens
gcagggccttttgcc

SEQ ID NO: 242864 - DNA, 15 bp, Homo sapiens
agcagggccttttgc

SEQ ID NO: 242865 - DNA, 15 bp, Homo sapiens
aagcagggccttttg

SEQ ID NO: 242866 - DNA, 15 bp, Homo sapiens
gaagcagggcctttt

SEQ ID NO: 242867 - DNA, 15 bp, Homo sapiens
agaagcagggccttt

SEQ ID NO: 242868 - DNA, 15 bp, Homo sapiens
aagaagcagggcctt

SEQ ID NO: 242869 - DNA, 15 bp, Homo sapiens
aaagaagcagggcct

SEQ ID NO: 242870 - DNA, 15 bp, Homo sapiens
aaaagaagcagggcc

SEQ ID NO: 242871 - DNA, 15 bp, Homo sapiens
aaaaagaagcagggc

SEQ ID NO: 242872 - DNA, 15 bp, Homo sapiens
gaaaaagaagcaggg

SEQ ID NO: 242873 - DNA, 15 bp, Homo sapiens
agaaaaagaagcagg

SEQ ID NO: 242874 - DNA, 15 bp, Homo sapiens
gagaaaaagaagcag

SEQ ID NO: 242875 - DNA, 15 bp, Homo sapiens
agagaaaaagaagca

SEQ ID NO: 242876 - DNA, 15 bp, Homo sapiens
cagagaaaaagaagc

SEQ ID NO: 242877 - DNA, 15 bp, Homo sapiens
ccagagaaaaagaag

SEQ ID NO: 242878 - DNA, 15 bp, Homo sapiens
accagagaaaaagaa

SEQ ID NO: 242879 - DNA, 15 bp, Homo sapiens
aaccagagaaaaaga

SEQ ID NO: 242880 - DNA, 15 bp, Homo sapiens
caaccagagaaaaag

SEQ ID NO: 242881 - DNA, 15 bp, Homo sapiens
acaaccagagaaaaa

SEQ ID NO: 242882 - DNA, 15 bp, Homo sapiens
gacaaccagagaaaa

SEQ ID NO: 242883 - DNA, 15 bp, Homo sapiens
agacaaccagagaaa

SEQ ID NO: 242884 - DNA, 15 bp, Homo sapiens
gagacaaccagagaa

SEQ ID NO: 242885 - DNA, 15 bp, Homo sapiens
agagacaaccagaga

SEQ ID NO: 242886 - DNA, 15 bp, Homo sapiens
aagagacaaccagag

SEQ ID NO: 242887 - DNA, 15 bp, Homo sapiens
gaagagacaaccaga

SEQ ID NO: 242888 - DNA, 15 bp, Homo sapiens
agaagagacaaccag

SEQ ID NO: 242889 - DNA, 15 bp, Homo sapiens
aagaagagacaacca

SEQ ID NO: 242890 - DNA, 15 bp, Homo sapiens
caagaagagacaacc

SEQ ID NO: 242891 - DNA, 15 bp, Homo sapiens
tcaagaagagacaac

SEQ ID NO: 242892 - DNA, 15 bp, Homo sapiens
ctcaagaagagacaa

SEQ ID NO: 242893 - DNA, 15 bp, Homo sapiens
tctcaagaagagaca

SEQ ID NO: 242894 - DNA, 15 bp, Homo sapiens
ttctcaagaagagac

SEQ ID NO: 242895 - DNA, 15 bp, Homo sapiens
tttctcaagaagaga

SEQ ID NO: 242896 - DNA, 15 bp, Homo sapiens
ttttctcaagaagag

SEQ ID NO: 242897 - DNA, 15 bp, Homo sapiens
attttctcaagaaga

SEQ ID NO: 242898 - DNA, 15 bp, Homo sapiens
gattttctcaagaag

SEQ ID NO: 242899 - DNA, 15 bp, Homo sapiens
tgattttctcaagaa

SEQ ID NO: 242900 - DNA, 15 bp, Homo sapiens
ttgattttctcaaga

SEQ ID NO: 242901 - DNA, 15 bp, Homo sapiens
gttgattttctcaag

SEQ ID NO: 242902 - DNA, 15 bp, Homo sapiens
tgttgattttctcaa

SEQ ID NO: 242903 - DNA, 15 bp, Homo sapiens
gtgttgattttctca

SEQ ID NO: 242904 - DNA, 15 bp, Homo sapiens
tgtgttgattttctc

SEQ ID NO: 242905 - DNA, 15 bp, Homo sapiens
gtgtgttgattttct

SEQ ID NO: 242906 - DNA, 15 bp, Homo sapiens
agtgtgttgattttc

SEQ ID NO: 242907 - DNA, 15 bp, Homo sapiens
gagtgtgttgatttt

SEQ ID NO: 242908 - DNA, 15 bp, Homo sapiens
agagtgtgttgattt

SEQ ID NO: 242909 - DNA, 15 bp, Homo sapiens
cagagtgtgttgatt

SEQ ID NO: 242910 - DNA, 15 bp, Homo sapiens
acagagtgtgttgat

SEQ ID NO: 242911 - DNA, 15 bp, Homo sapiens
gacagagtgtgttga

SEQ ID NO: 242912 - DNA, 15 bp, Homo sapiens
ggacagagtgtgttg

SEQ ID NO: 242913 - DNA, 15 bp, Homo sapiens
aggacagagtgtgtt

SEQ ID NO: 242914 - DNA, 15 bp, Homo sapiens
caggacagagtgtgt

SEQ ID NO: 242915 - DNA, 15 bp, Homo sapiens
acaggacagagtgtg

SEQ ID NO: 242916 - DNA, 15 bp, Homo sapiens
aacaggacagagtgt

SEQ ID NO: 242917 - DNA, 15 bp, Homo sapiens
aaacaggacagagtg

SEQ ID NO: 242918 - DNA, 15 bp, Homo sapiens
aaaacaggacagagt

SEQ ID NO: 242919 - DNA, 15 bp, Homo sapiens
gaaaacaggacagag

SEQ ID NO: 242920 - DNA, 15 bp, Homo sapiens
ggaaaacaggacaga

SEQ ID NO: 242921 - DNA, 15 bp, Homo sapiens
tggaaaacaggacag

SEQ ID NO: 242922 - DNA, 15 bp, Homo sapiens
ctggaaaacaggaca

SEQ ID NO: 242923 - DNA, 15 bp, Homo sapiens
gctggaaaacaggac

SEQ ID NO: 242924 - DNA, 15 bp, Homo sapiens
agctggaaaacagga

SEQ ID NO: 242925 - DNA, 15 bp, Homo sapiens
cagctggaaaacagg

SEQ ID NO: 242926 - DNA, 15 bp, Homo sapiens
acagctggaaaacag

SEQ ID NO: 242927 - DNA, 15 bp, Homo sapiens
cacagctggaaaaca

SEQ ID NO: 242928 - DNA, 15 bp, Homo sapiens
ccacagctggaaaac

SEQ ID NO: 242929 - DNA, 15 bp, Homo sapiens
gccacagctggaaaa

SEQ ID NO: 242930 - DNA, 15 bp, Homo sapiens
ggccacagctggaaa

SEQ ID NO: 242931 - DNA, 15 bp, Homo sapiens
tggccacagctggaa

SEQ ID NO: 242932 - DNA, 15 bp, Homo sapiens
gtggccacagctgga

SEQ ID NO: 242933 - DNA, 15 bp, Homo sapiens
ggtggccacagctgg

SEQ ID NO: 242934 - DNA, 15 bp, Homo sapiens
aggtggccacagctg

SEQ ID NO: 242935 - DNA, 15 bp, Homo sapiens
caggtggccacagct

SEQ ID NO: 242936 - DNA, 15 bp, Homo sapiens
acaggtggccacagc

SEQ ID NO: 242937 - DNA, 15 bp, Homo sapiens
gacaggtggccacag

SEQ ID NO: 242938 - DNA, 15 bp, Homo sapiens
cgacaggtggccaca

SEQ ID NO: 242939 - DNA, 15 bp, Homo sapiens
gcgacaggtggccac

SEQ ID NO: 242940 - DNA, 15 bp, Homo sapiens
ggcgacaggtggcca

SEQ ID NO: 242941 - DNA, 15 bp, Homo sapiens
gggcgacaggtggcc

SEQ ID NO: 242942 - DNA, 15 bp, Homo sapiens
agggcgacaggtggc

SEQ ID NO: 242943 - DNA, 15 bp, Homo sapiens
cagggcgacaggtgg

SEQ ID NO: 242944 - DNA, 15 bp, Homo sapiens
tcagggcgacaggtg

SEQ ID NO: 242945 - DNA, 15 bp, Homo sapiens
gtcagggcgacaggt

SEQ ID NO: 242946 - DNA, 15 bp, Homo sapiens
cgtcagggcgacagg

SEQ ID NO: 242947 - DNA, 15 bp, Homo sapiens
tcgtcagggcgacag

SEQ ID NO: 242948 - DNA, 15 bp, Homo sapiens
ttcgtcagggcgaca

SEQ ID NO: 242949 - DNA, 15 bp, Homo sapiens
attcgtcagggcgac

SEQ ID NO: 242950 - DNA, 15 bp, Homo sapiens
aattcgtcagggcga

SEQ ID NO: 242951 - DNA, 15 bp, Homo sapiens
gaattcgtcagggcg

SEQ ID NO: 242952 - DNA, 15 bp, Homo sapiens
ggaattcgtcagggc

SEQ ID NO: 242953 - DNA, 15 bp, Homo sapiens
tggaattcgtcaggg

SEQ ID NO: 242954 - DNA, 15 bp, Homo sapiens
ctggaattcgtcagg

SEQ ID NO: 242955 - DNA, 15 bp, Homo sapiens
actggaattcgtcag

SEQ ID NO: 242956 - DNA, 15 bp, Homo sapiens
cactggaattcgtca

SEQ ID NO: 242957 - DNA, 15 bp, Homo sapiens
gcactggaattcgtc

SEQ ID NO: 242958 - DNA, 15 bp, Homo sapiens
agcactggaattcgt

SEQ ID NO: 242959 - DNA, 15 bp, Homo sapiens
gagcactggaattcg

SEQ ID NO: 242960 - DNA, 15 bp, Homo sapiens
agagcactggaattc

SEQ ID NO: 242961 - DNA, 15 bp, Homo sapiens
cagagcactggaatt

SEQ ID NO: 242962 - DNA, 15 bp, Homo sapiens
tcagagcactggaat

SEQ ID NO: 242963 - DNA, 15 bp, Homo sapiens
atcagagcactggaa

SEQ ID NO: 242964 - DNA, 15 bp, Homo sapiens
catcagagcactgga

SEQ ID NO: 242965 - DNA, 15 bp, Homo sapiens
ccatcagagcactgg

SEQ ID NO: 242966 - DNA, 15 bp, Homo sapiens
tccatcagagcactg

SEQ ID NO: 242967 - DNA, 15 bp, Homo sapiens
ttccatcagagcact

SEQ ID NO: 242968 - DNA, 15 bp, Homo sapiens
tttccatcagagcac

SEQ ID NO: 242969 - DNA, 15 bp, Homo sapiens
gtttccatcagagca

SEQ ID NO: 242970 - DNA, 15 bp, Homo sapiens
agtttccatcagagc

SEQ ID NO: 242971 - DNA, 15 bp, Homo sapiens
cagtttccatcagag

SEQ ID NO: 242972 - DNA, 15 bp, Homo sapiens
gcagtttccatcaga

SEQ ID NO: 242973 - DNA, 15 bp, Homo sapiens
tgcagtttccatcag

SEQ ID NO: 242974 - DNA, 15 bp, Homo sapiens
atgcagtttccatca

SEQ ID NO: 242975 - DNA, 15 bp, Homo sapiens
gatgcagtttccatc

SEQ ID NO: 242976 - DNA, 15 bp, Homo sapiens
ggatgcagtttccat

SEQ ID NO: 242977 - DNA, 15 bp, Homo sapiens
tggatgcagtttcca

SEQ ID NO: 242978 - DNA, 15 bp, Homo sapiens
atggatgcagtttcc

SEQ ID NO: 242979 - DNA, 15 bp, Homo sapiens
catggatgcagtttc

SEQ ID NO: 242980 - DNA, 15 bp, Homo sapiens
ccatggatgcagttt

SEQ ID NO: 242981 - DNA, 15 bp, Homo sapiens
gccatggatgcagtt

SEQ ID NO: 242982 - DNA, 15 bp, Homo sapiens
tgccatggatgcagt

SEQ ID NO: 242983 - DNA, 15 bp, Homo sapiens
ctgccatggatgcag

SEQ ID NO: 242984 - DNA, 15 bp, Homo sapiens
gctgccatggatgca

SEQ ID NO: 242985 - DNA, 15 bp, Homo sapiens
ggctgccatggatgc

SEQ ID NO: 242986 - DNA, 15 bp, Homo sapiens
cggctgccatggatg

SEQ ID NO: 242987 - DNA, 15 bp, Homo sapiens
ccggctgccatggat

SEQ ID NO: 242988 - DNA, 15 bp, Homo sapiens
gccggctgccatgga

SEQ ID NO: 242989 - DNA, 15 bp, Homo sapiens
tgccggctgccatgg

SEQ ID NO: 242990 - DNA, 15 bp, Homo sapiens
ctgccggctgccatg

SEQ ID NO: 242991 - DNA, 15 bp, Homo sapiens
actgccggctgccat

SEQ ID NO: 242992 - DNA, 15 bp, Homo sapiens
cactgccggctgcca

SEQ ID NO: 242993 - DNA, 15 bp, Homo sapiens
acactgccggctgcc

SEQ ID NO: 242994 - DNA, 15 bp, Homo sapiens
cacactgccggctgc

SEQ ID NO: 242995 - DNA, 15 bp, Homo sapiens
tcacactgccggctg

SEQ ID NO: 242996 - DNA, 15 bp, Homo sapiens
gtcacactgccggct

SEQ ID NO: 242997 - DNA, 15 bp, Homo sapiens
ggtcacactgccggc

SEQ ID NO: 242998 - DNA, 15 bp, Homo sapiens
cggtcacactgccgg

SEQ ID NO: 242999 - DNA, 15 bp, Homo sapiens
ccggtcacactgccg

SEQ ID NO: 243000 - DNA, 15 bp, Homo sapiens
cccggtcacactgcc

SEQ ID NO: 243001 - DNA, 15 bp, Homo sapiens
tcccggtcacactgc

SEQ ID NO: 243002 - DNA, 15 bp, Homo sapiens
ttcccggtcacactg

SEQ ID NO: 243003 - DNA, 15 bp, Homo sapiens
attcccggtcacact

SEQ ID NO: 243004 - DNA, 15 bp, Homo sapiens
tattcccggtcacac

SEQ ID NO: 243005 - DNA, 15 bp, Homo sapiens
atattcccggtcaca

SEQ ID NO: 243006 - DNA, 15 bp, Homo sapiens
catattcccggtcac

SEQ ID NO: 243007 - DNA, 15 bp, Homo sapiens
tcatattcccggtca

SEQ ID NO: 243008 - DNA, 15 bp, Homo sapiens
gtcatattcccggtc

SEQ ID NO: 243009 - DNA, 15 bp, Homo sapiens
agtcatattcccggt

SEQ ID NO: 243010 - DNA, 15 bp, Homo sapiens
cagtcatattcccgg

SEQ ID NO: 243011 - DNA, 15 bp, Homo sapiens
gcagtcatattcccg

SEQ ID NO: 243012 - DNA, 15 bp, Homo sapiens
tgcagtcatattccc

SEQ ID NO: 243013 - DNA, 15 bp, Homo sapiens
ttgcagtcatattcc

SEQ ID NO: 243014 - DNA, 15 bp, Homo sapiens
cttgcagtcatattc

SEQ ID NO: 243015 - DNA, 15 bp, Homo sapiens
ccttgcagtcatatt

SEQ ID NO: 243016 - DNA, 15 bp, Homo sapiens
tccttgcagtcatat

SEQ ID NO: 243017 - DNA, 15 bp, Homo sapiens
gtccttgcagtcata

SEQ ID NO: 243018 - DNA, 15 bp, Homo sapiens
tgtccttgcagtcat

SEQ ID NO: 243019 - DNA, 15 bp, Homo sapiens
atgtccttgcagtca

SEQ ID NO: 243020 - DNA, 15 bp, Homo sapiens
catgtccttgcagtc

SEQ ID NO: 243021 - DNA, 15 bp, Homo sapiens
tcatgtccttgcagt

SEQ ID NO: 243022 - DNA, 15 bp, Homo sapiens
ctcatgtccttgcag

SEQ ID NO: 243023 - DNA, 15 bp, Homo sapiens
gctcatgtccttgca

SEQ ID NO: 243024 - DNA, 15 bp, Homo sapiens
cgctcatgtccttgc

SEQ ID NO: 243025 - DNA, 15 bp, Homo sapiens
tcgctcatgtccttg

SEQ ID NO: 243026 - DNA, 15 bp, Homo sapiens
atcgctcatgtcctt

SEQ ID NO: 243027 - DNA, 15 bp, Homo sapiens
catcgctcatgtcct

SEQ ID NO: 243028 - DNA, 15 bp, Homo sapiens
tcatcgctcatgtcc

SEQ ID NO: 243029 - DNA, 15 bp, Homo sapiens
ttcatcgctcatgtc

SEQ ID NO: 243030 - DNA, 15 bp, Homo sapiens
cttcatcgctcatgt

SEQ ID NO: 243031 - DNA, 15 bp, Homo sapiens
acttcatcgctcatg

SEQ ID NO: 243032 - DNA, 15 bp, Homo sapiens
aacttcatcgctcat

SEQ ID NO: 243033 - DNA, 15 bp, Homo sapiens
caacttcatcgctca

SEQ ID NO: 243034 - DNA, 15 bp, Homo sapiens
ccaacttcatcgctc

SEQ ID NO: 243035 - DNA, 15 bp, Homo sapiens
gccaacttcatcgct

SEQ ID NO: 243036 - DNA, 15 bp, Homo sapiens
agccaacttcatcgc

SEQ ID NO: 243037 - DNA, 15 bp, Homo sapiens
cagccaacttcatcg

SEQ ID NO: 243038 - DNA, 15 bp, Homo sapiens
gcagccaacttcatc

SEQ ID NO: 243039 - DNA, 15 bp, Homo sapiens
cgcagccaacttcat

SEQ ID NO: 243040 - DNA, 15 bp, Homo sapiens
acgcagccaacttca

SEQ ID NO: 243041 - DNA, 15 bp, Homo sapiens
aacgcagccaacttc

SEQ ID NO: 243042 - DNA, 15 bp, Homo sapiens
taacgcagccaactt

SEQ ID NO: 243043 - DNA, 15 bp, Homo sapiens
ttaacgcagccaact

SEQ ID NO: 243044 - DNA, 15 bp, Homo sapiens
attaacgcagccaac

SEQ ID NO: 243045 - DNA, 15 bp, Homo sapiens
cattaacgcagccaa

SEQ ID NO: 243046 - DNA, 15 bp, Homo sapiens
ccattaacgcagcca

SEQ ID NO: 243047 - DNA, 15 bp, Homo sapiens
accattaacgcagcc

SEQ ID NO: 243048 - DNA, 15 bp, Homo sapiens
caccattaacgcagc

SEQ ID NO: 243049 - DNA, 15 bp, Homo sapiens
tcaccattaacgcag

SEQ ID NO: 243050 - DNA, 15 bp, Homo sapiens
ctcaccattaacgca

SEQ ID NO: 243051 - DNA, 15 bp, Homo sapiens
gctcaccattaacgc

SEQ ID NO: 243052 - DNA, 15 bp, Homo sapiens
cgctcaccattaacg

SEQ ID NO: 243053 - DNA, 15 bp, Homo sapiens
gcgctcaccattaac

SEQ ID NO: 243054 - DNA, 15 bp, Homo sapiens
agcgctcaccattaa

SEQ ID NO: 243055 - DNA, 15 bp, Homo sapiens
cagcgctcaccatta

SEQ ID NO: 243056 - DNA, 15 bp, Homo sapiens
ccagcgctcaccatt

SEQ ID NO: 243057 - DNA, 15 bp, Homo sapiens
gccagcgctcaccat

SEQ ID NO: 243058 - DNA, 15 bp, Homo sapiens
ggccagcgctcacca

SEQ ID NO: 243059 - DNA, 15 bp, Homo sapiens
tggccagcgctcacc

SEQ ID NO: 243060 - DNA, 15 bp, Homo sapiens
atggccagcgctcac

SEQ ID NO: 243061 - DNA, 15 bp, Homo sapiens
gatggccagcgctca

SEQ ID NO: 243062 - DNA, 15 bp, Homo sapiens
agatggccagcgctc

SEQ ID NO: 243063 - DNA, 15 bp, Homo sapiens
cagatggccagcgct

SEQ ID NO: 243064 - DNA, 15 bp, Homo sapiens
ccagatggccagcgc

SEQ ID NO: 243065 - DNA, 15 bp, Homo sapiens
accagatggccagcg

SEQ ID NO: 243066 - DNA, 15 bp, Homo sapiens
aaccagatggccagc

SEQ ID NO: 243067 - DNA, 15 bp, Homo sapiens
aaaccagatggccag

SEQ ID NO: 243068 - DNA, 15 bp, Homo sapiens
aaaaccagatggcca

SEQ ID NO: 243069 - DNA, 15 bp, Homo sapiens
gaaaaccagatggcc

SEQ ID NO: 243070 - DNA, 15 bp, Homo sapiens
ggaaaaccagatggc

SEQ ID NO: 243071 - DNA, 15 bp, Homo sapiens
tggaaaaccagatgg

SEQ ID NO: 243072 - DNA, 15 bp, Homo sapiens
atggaaaaccagatg

SEQ ID NO: 243073 - DNA, 15 bp, Homo sapiens
gatggaaaaccagat

SEQ ID NO: 243074 - DNA, 15 bp, Homo sapiens
ggatggaaaaccaga

SEQ ID NO: 243075 - DNA, 15 bp, Homo sapiens
gggatggaaaaccag

SEQ ID NO: 243076 - DNA, 15 bp, Homo sapiens
ggggatggaaaacca

SEQ ID NO: 243077 - DNA, 15 bp, Homo sapiens
gggggatggaaaacc

SEQ ID NO: 243078 - DNA, 15 bp, Homo sapiens
tgggggatggaaaac

SEQ ID NO: 243079 - DNA, 15 bp, Homo sapiens
atgggggatggaaaa

SEQ ID NO: 243080 - DNA, 15 bp, Homo sapiens
aatgggggatggaaa

SEQ ID NO: 243081 - DNA, 15 bp, Homo sapiens
gaatgggggatggaa

SEQ ID NO: 243082 - DNA, 15 bp, Homo sapiens
agaatgggggatgga

SEQ ID NO: 243083 - DNA, 15 bp, Homo sapiens
gagaatgggggatgg

SEQ ID NO: 243084 - DNA, 15 bp, Homo sapiens
agagaatgggggatg

SEQ ID NO: 243085 - DNA, 15 bp, Homo sapiens
cagagaatgggggat

SEQ ID NO: 243086 - DNA, 15 bp, Homo sapiens
acagagaatggggga

SEQ ID NO: 243087 - DNA, 15 bp, Homo sapiens
cacagagaatggggg

SEQ ID NO: 243088 - DNA, 15 bp, Homo sapiens
gcacagagaatgggg

SEQ ID NO: 243089 - DNA, 15 bp, Homo sapiens
ggcacagagaatggg

SEQ ID NO: 243090 - DNA, 15 bp, Homo sapiens
aggcacagagaatgg

SEQ ID NO: 243091 - DNA, 15 bp, Homo sapiens
aaggcacagagaatg

SEQ ID NO: 243092 - DNA, 15 bp, Homo sapiens
caaggcacagagaat

SEQ ID NO: 243093 - DNA, 15 bp, Homo sapiens
gcaaggcacagagaa

SEQ ID NO: 243094 - DNA, 15 bp, Homo sapiens
agcaaggcacagaga

SEQ ID NO: 243095 - DNA, 15 bp, Homo sapiens
cagcaaggcacagag

SEQ ID NO: 243096 - DNA, 15 bp, Homo sapiens
gcagcaaggcacaga

SEQ ID NO: 243097 - DNA, 15 bp, Homo sapiens
agcagcaaggcacag

SEQ ID NO: 243098 - DNA, 15 bp, Homo sapiens
aagcagcaaggcaca

SEQ ID NO: 243099 - DNA, 15 bp, Homo sapiens
caagcagcaaggcac

SEQ ID NO: 243100 - DNA, 15 bp, Homo sapiens
gcaagcagcaaggca

SEQ ID NO: 243101 - DNA, 15 bp, Homo sapiens
tgcaagcagcaaggc

SEQ ID NO: 243102 - DNA, 15 bp, Homo sapiens
ttgcaagcagcaagg

SEQ ID NO: 243103 - DNA, 15 bp, Homo sapiens
tttgcaagcagcaag

SEQ ID NO: 243104 - DNA, 15 bp, Homo sapiens
atttgcaagcagcaa

SEQ ID NO: 243105 - DNA, 15 bp, Homo sapiens
catttgcaagcagca

SEQ ID NO: 243106 - DNA, 15 bp, Homo sapiens
tcatttgcaagcagc

SEQ ID NO: 243107 - DNA, 15 bp, Homo sapiens
atcatttgcaagcag

SEQ ID NO: 243108 - DNA, 15 bp, Homo sapiens
aatcatttgcaagca

SEQ ID NO: 243109 - DNA, 15 bp, Homo sapiens
aaatcatttgcaagc

SEQ ID NO: 243110 - DNA, 15 bp, Homo sapiens
caaatcatttgcaag

SEQ ID NO: 243111 - DNA, 15 bp, Homo sapiens
acaaatcatttgcaa

SEQ ID NO: 243112 - DNA, 15 bp, Homo sapiens
cacaaatcatttgca

SEQ ID NO: 243113 - DNA, 15 bp, Homo sapiens
tcacaaatcatttgc

SEQ ID NO: 243114 - DNA, 15 bp, Homo sapiens
ttcacaaatcatttg

SEQ ID NO: 243115 - DNA, 15 bp, Homo sapiens
cttcacaaatcattt

SEQ ID NO: 243116 - DNA, 15 bp, Homo sapiens
gcttcacaaatcatt

SEQ ID NO: 243117 - DNA, 15 bp, Homo sapiens
ggcttcacaaatcat

SEQ ID NO: 243118 - DNA, 15 bp, Homo sapiens
tggcttcacaaatca

SEQ ID NO: 243119 - DNA, 15 bp, Homo sapiens
ctggcttcacaaatc

SEQ ID NO: 243120 - DNA, 15 bp, Homo sapiens
tctggcttcacaaat

SEQ ID NO: 243121 - DNA, 15 bp, Homo sapiens
ctctggcttcacaaa

SEQ ID NO: 243122 - DNA, 15 bp, Homo sapiens
cctctggcttcacaa

SEQ ID NO: 243123 - DNA, 15 bp, Homo sapiens
ccctctggcttcaca

SEQ ID NO: 243124 - DNA, 15 bp, Homo sapiens
gccctctggcttcac

SEQ ID NO: 243125 - DNA, 15 bp, Homo sapiens
cgccctctggcttca

SEQ ID NO: 243126 - DNA, 15 bp, Homo sapiens
gcgccctctggcttc

SEQ ID NO: 243127 - DNA, 15 bp, Homo sapiens
agcgccctctggctt

SEQ ID NO: 243128 - DNA, 15 bp, Homo sapiens
aagcgccctctggct

SEQ ID NO: 243129 - DNA, 15 bp, Homo sapiens
gaagcgccctctggc

SEQ ID NO: 243130 - DNA, 15 bp, Homo sapiens
ggaagcgccctctgg

SEQ ID NO: 243131 - DNA, 15 bp, Homo sapiens
gggaagcgccctctg

SEQ ID NO: 243132 - DNA, 15 bp, Homo sapiens
agggaagcgccctct

SEQ ID NO: 243133 - DNA, 15 bp, Homo sapiens
cagggaagcgccctc

SEQ ID NO: 243134 - DNA, 15 bp, Homo sapiens
ccagggaagcgccct

SEQ ID NO: 243135 - DNA, 15 bp, Homo sapiens
accagggaagcgccc

SEQ ID NO: 243136 - DNA, 15 bp, Homo sapiens
gaccagggaagcgcc

SEQ ID NO: 243137 - DNA, 15 bp, Homo sapiens
tgaccagggaagcgc

SEQ ID NO: 243138 - DNA, 15 bp, Homo sapiens
ctgaccagggaagcg

SEQ ID NO: 243139 - DNA, 15 bp, Homo sapiens
gctgaccagggaagc

SEQ ID NO: 243140 - DNA, 15 bp, Homo sapiens
agctgaccagggaag

SEQ ID NO: 243141 - DNA, 15 bp, Homo sapiens
gagctgaccagggaa

SEQ ID NO: 243142 - DNA, 15 bp, Homo sapiens
agagctgaccaggga

SEQ ID NO: 243143 - DNA, 15 bp, Homo sapiens
cagagctgaccaggg

SEQ ID NO: 243144 - DNA, 15 bp, Homo sapiens
gcagagctgaccagg

SEQ ID NO: 243145 - DNA, 15 bp, Homo sapiens
tgcagagctgaccag

SEQ ID NO: 243146 - DNA, 15 bp, Homo sapiens
gtgcagagctgacca

SEQ ID NO: 243147 - DNA, 15 bp, Homo sapiens
ggtgcagagctgacc

SEQ ID NO: 243148 - DNA, 15 bp, Homo sapiens
tggtgcagagctgac

SEQ ID NO: 243149 - DNA, 15 bp, Homo sapiens
ctggtgcagagctga

SEQ ID NO: 243150 - DNA, 15 bp, Homo sapiens
gctggtgcagagctg

SEQ ID NO: 243151 - DNA, 15 bp, Homo sapiens
agctggtgcagagct

SEQ ID NO: 243152 - DNA, 15 bp, Homo sapiens
cagctggtgcagagc

SEQ ID NO: 243153 - DNA, 15 bp, Homo sapiens
acagctggtgcagag

SEQ ID NO: 243154 - DNA, 15 bp, Homo sapiens
cacagctggtgcaga

SEQ ID NO: 243155 - DNA, 15 bp, Homo sapiens
gcacagctggtgcag

SEQ ID NO: 243156 - DNA, 15 bp, Homo sapiens
cgcacagctggtgca

SEQ ID NO: 243157 - DNA, 15 bp, Homo sapiens
acgcacagctggtgc

SEQ ID NO: 243158 - DNA, 15 bp, Homo sapiens
gacgcacagctggtg

SEQ ID NO: 243159 - DNA, 15 bp, Homo sapiens
agacgcacagctggt

SEQ ID NO: 243160 - DNA, 15 bp, Homo sapiens
cagacgcacagctgg

SEQ ID NO: 243161 - DNA, 15 bp, Homo sapiens
acagacgcacagctg

SEQ ID NO: 243162 - DNA, 15 bp, Homo sapiens
cacagacgcacagct

SEQ ID NO: 243163 - DNA, 15 bp, Homo sapiens
ccacagacgcacagc

SEQ ID NO: 243164 - DNA, 15 bp, Homo sapiens
cccacagacgcacag

SEQ ID NO: 243165 - DNA, 15 bp, Homo sapiens
gcccacagacgcaca

SEQ ID NO: 243166 - DNA, 15 bp, Homo sapiens
tgcccacagacgcac

SEQ ID NO: 243167 - DNA, 15 bp, Homo sapiens
ttgcccacagacgca

SEQ ID NO: 243168 - DNA, 15 bp, Homo sapiens
cttgcccacagacgc

SEQ ID NO: 243169 - DNA, 15 bp, Homo sapiens
acttgcccacagacg

SEQ ID NO: 243170 - DNA, 15 bp, Homo sapiens
cacttgcccacagac

SEQ ID NO: 243171 - DNA, 15 bp, Homo sapiens
tcacttgcccacaga

SEQ ID NO: 243172 - DNA, 15 bp, Homo sapiens
gtcacttgcccacag

SEQ ID NO: 243173 - DNA, 15 bp, Homo sapiens
agtcacttgcccaca

SEQ ID NO: 243174 - DNA, 15 bp, Homo sapiens
aagtcacttgcccac

SEQ ID NO: 243175 - DNA, 15 bp, Homo sapiens
caagtcacttgccca

SEQ ID NO: 243176 - DNA, 15 bp, Homo sapiens
tcaagtcacttgccc

SEQ ID NO: 243177 - DNA, 15 bp, Homo sapiens
gtcaagtcacttgcc

SEQ ID NO: 243178 - DNA, 15 bp, Homo sapiens
agtcaagtcacttgc

SEQ ID NO: 243179 - DNA, 15 bp, Homo sapiens
aagtcaagtcacttg

SEQ ID NO: 243180 - DNA, 15 bp, Homo sapiens
gaagtcaagtcactt

SEQ ID NO: 243181 - DNA, 15 bp, Homo sapiens
agaagtcaagtcact

SEQ ID NO: 243182 - DNA, 15 bp, Homo sapiens
gagaagtcaagtcac

SEQ ID NO: 243183 - DNA, 15 bp, Homo sapiens
tgagaagtcaagtca

SEQ ID NO: 243184 - DNA, 15 bp, Homo sapiens
ctgagaagtcaagtc

SEQ ID NO: 243185 - DNA, 15 bp, Homo sapiens
tctgagaagtcaagt

SEQ ID NO: 243186 - DNA, 15 bp, Homo sapiens
ctctgagaagtcaag

SEQ ID NO: 243187 - DNA, 15 bp, Homo sapiens
gctctgagaagtcaa

SEQ ID NO: 243188 - DNA, 15 bp, Homo sapiens
ggctctgagaagtca

SEQ ID NO: 243189 - DNA, 15 bp, Homo sapiens
aggctctgagaagtc

SEQ ID NO: 243190 - DNA, 15 bp, Homo sapiens
gaggctctgagaagt

SEQ ID NO: 243191 - DNA, 15 bp, Homo sapiens
tgaggctctgagaag

SEQ ID NO: 243192 - DNA, 15 bp, Homo sapiens
gtgaggctctgagaa

SEQ ID NO: 243193 - DNA, 15 bp, Homo sapiens
agtgaggctctgaga

SEQ ID NO: 243194 - DNA, 15 bp, Homo sapiens
aagtgaggctctgag

SEQ ID NO: 243195 - DNA, 15 bp, Homo sapiens
gaagtgaggctctga

SEQ ID NO: 243196 - DNA, 15 bp, Homo sapiens
ggaagtgaggctctg

SEQ ID NO: 243197 - DNA, 15 bp, Homo sapiens
aggaagtgaggctct

SEQ ID NO: 243198 - DNA, 15 bp, Homo sapiens
aaggaagtgaggctc

SEQ ID NO: 243199 - DNA, 15 bp, Homo sapiens
aaaggaagtgaggct

SEQ ID NO: 243200 - DNA, 15 bp, Homo sapiens
aaaaggaagtgaggc

SEQ ID NO: 243201 - DNA, 15 bp, Homo sapiens
caaaaggaagtgagg

SEQ ID NO: 243202 - DNA, 15 bp, Homo sapiens
acaaaaggaagtgag

SEQ ID NO: 243203 - DNA, 15 bp, Homo sapiens
aacaaaaggaagtga

SEQ ID NO: 243204 - DNA, 15 bp, Homo sapiens
aaacaaaaggaagtg

SEQ ID NO: 243205 - DNA, 15 bp, Homo sapiens
aaaacaaaaggaagt

SEQ ID NO: 243206 - DNA, 15 bp, Homo sapiens
caaaacaaaaggaag

SEQ ID NO: 243207 - DNA, 15 bp, Homo sapiens
tcaaaacaaaaggaa

SEQ ID NO: 243208 - DNA, 15 bp, Homo sapiens
ctcaaaacaaaagga

SEQ ID NO: 243209 - DNA, 15 bp, Homo sapiens
tctcaaaacaaaagg

SEQ ID NO: 243210 - DNA, 15 bp, Homo sapiens
gtctcaaaacaaaag

SEQ ID NO: 243211 - DNA, 15 bp, Homo sapiens
tcagagcgagactcc

SEQ ID NO: 243212 - DNA, 15 bp, Homo sapiens
gtcagagcgagactc

SEQ ID NO: 243213 - DNA, 15 bp, Homo sapiens
tgtcagagcgagact

SEQ ID NO: 243214 - DNA, 15 bp, Homo sapiens
gtgtcagagcgagac

SEQ ID NO: 243215 - DNA, 15 bp, Homo sapiens
ggtgtcagagcgaga

SEQ ID NO: 243216 - DNA, 15 bp, Homo sapiens
gggtgtcagagcgag

SEQ ID NO: 243217 - DNA, 15 bp, Homo sapiens
tgggtgtcagagcga

SEQ ID NO: 243218 - DNA, 15 bp, Homo sapiens
ctgggtgtcagagcg

SEQ ID NO: 243219 - DNA, 15 bp, Homo sapiens
cctgggtgtcagagc

SEQ ID NO: 243220 - DNA, 15 bp, Homo sapiens
gcctgggtgtcagag

SEQ ID NO: 243221 - DNA, 15 bp, Homo sapiens
agcctgggtgtcaga

SEQ ID NO: 243222 - DNA, 15 bp, Homo sapiens
cagcctgggtgtcag

SEQ ID NO: 243223 - DNA, 15 bp, Homo sapiens
ccagcctgggtgtca

SEQ ID NO: 243224 - DNA, 15 bp, Homo sapiens
tccagcctgggtgtc

SEQ ID NO: 243225 - DNA, 15 bp, Homo sapiens
ctccagcctgggtgt

SEQ ID NO: 243226 - DNA, 15 bp, Homo sapiens
agcactccagcctgg

SEQ ID NO: 243227 - DNA, 15 bp, Homo sapiens
cagcactccagcctg

SEQ ID NO: 243228 - DNA, 15 bp, Homo sapiens
acagcactccagcct

SEQ ID NO: 243229 - DNA, 15 bp, Homo sapiens
cacagcactccagcc

SEQ ID NO: 243230 - DNA, 15 bp, Homo sapiens
ccacagcactccagc

SEQ ID NO: 243231 - DNA, 15 bp, Homo sapiens
gccacagcactccag

SEQ ID NO: 243232 - DNA, 15 bp, Homo sapiens
tgccacagcactcca

SEQ ID NO: 243233 - DNA, 15 bp, Homo sapiens
gtgccacagcactcc

SEQ ID NO: 243234 - DNA, 15 bp, Homo sapiens
tgtgccacagcactc

SEQ ID NO: 243235 - DNA, 15 bp, Homo sapiens
ttgtgccacagcact

SEQ ID NO: 243236 - DNA, 15 bp, Homo sapiens
attgtgccacagcac

SEQ ID NO: 243237 - DNA, 15 bp, Homo sapiens
gattgtgccacagca

SEQ ID NO: 243238 - DNA, 15 bp, Homo sapiens
tgattgtgccacagc

SEQ ID NO: 243239 - DNA, 15 bp, Homo sapiens
gtgattgtgccacag

SEQ ID NO: 243240 - DNA, 15 bp, Homo sapiens
tgtgattgtgccaca

SEQ ID NO: 243241 - DNA, 15 bp, Homo sapiens
ctgtgattgtgccac

SEQ ID NO: 243242 - DNA, 15 bp, Homo sapiens
gctgtgattgtgcca

SEQ ID NO: 243243 - DNA, 15 bp, Homo sapiens
agctgtgattgtgcc

SEQ ID NO: 243244 - DNA, 15 bp, Homo sapiens
gagctgtgattgtgc

SEQ ID NO: 243245 - DNA, 15 bp, Homo sapiens
tgagctgtgattgtg

SEQ ID NO: 243246 - DNA, 15 bp, Homo sapiens
gtgagctgtgattgt

SEQ ID NO: 243247 - DNA, 15 bp, Homo sapiens
cgtgagctgtgattg

SEQ ID NO: 243248 - DNA, 15 bp, Homo sapiens
ccgtgagctgtgatt

SEQ ID NO: 243249 - DNA, 15 bp, Homo sapiens
gccgtgagctgtgat

SEQ ID NO: 243250 - DNA, 15 bp, Homo sapiens
tgccgtgagctgtga

SEQ ID NO: 243251 - DNA, 15 bp, Homo sapiens
ctgccgtgagctgtg

SEQ ID NO: 243252 - DNA, 15 bp, Homo sapiens
gctgccgtgagctgt

SEQ ID NO: 243253 - DNA, 15 bp, Homo sapiens
ggctgccgtgagctg

SEQ ID NO: 243254 - DNA, 15 bp, Homo sapiens
aggctgccgtgagct

SEQ ID NO: 243255 - DNA, 15 bp, Homo sapiens
gaggctgccgtgagc

SEQ ID NO: 243256 - DNA, 15 bp, Homo sapiens
agaggctgccgtgag

SEQ ID NO: 243257 - DNA, 15 bp, Homo sapiens
cagaggctgccgtga

SEQ ID NO: 243258 - DNA, 15 bp, Homo sapiens
gcagaggctgccgtg

SEQ ID NO: 243259 - DNA, 15 bp, Homo sapiens
ggcagaggctgccgt

SEQ ID NO: 243260 - DNA, 15 bp, Homo sapiens
aggcagaggctgccg

SEQ ID NO: 243261 - DNA, 15 bp, Homo sapiens
gaggcagaggctgcc

SEQ ID NO: 243262 - DNA, 15 bp, Homo sapiens
agaggcagaggctgc

SEQ ID NO: 243263 - DNA, 15 bp, Homo sapiens
cagaggcagaggctg

SEQ ID NO: 243264 - DNA, 15 bp, Homo sapiens
tcagaggcagaggct

SEQ ID NO: 243265 - DNA, 15 bp, Homo sapiens
atcagaggcagaggc

SEQ ID NO: 243266 - DNA, 15 bp, Homo sapiens
catcagaggcagagg

SEQ ID NO: 243267 - DNA, 15 bp, Homo sapiens
acatcagaggcagag

SEQ ID NO: 243268 - DNA, 15 bp, Homo sapiens
gacatcagaggcaga

SEQ ID NO: 243269 - DNA, 15 bp, Homo sapiens
ggacatcagaggcag

SEQ ID NO: 243270 - DNA, 15 bp, Homo sapiens
tggacatcagaggca

SEQ ID NO: 243271 - DNA, 15 bp, Homo sapiens
ctggacatcagaggc

SEQ ID NO: 243272 - DNA, 15 bp, Homo sapiens
actggacatcagagg

SEQ ID NO: 243273 - DNA, 15 bp, Homo sapiens
cactggacatcagag

SEQ ID NO: 243274 - DNA, 15 bp, Homo sapiens
tcactggacatcaga

SEQ ID NO: 243275 - DNA, 15 bp, Homo sapiens
atcactggacatcag

SEQ ID NO: 243276 - DNA, 15 bp, Homo sapiens
aatcactggacatca

SEQ ID NO: 243277 - DNA, 15 bp, Homo sapiens
gaatcactggacatc

SEQ ID NO: 243278 - DNA, 15 bp, Homo sapiens
agaatcactggacat

SEQ ID NO: 243279 - DNA, 15 bp, Homo sapiens
gagaatcactggaca

SEQ ID NO: 243280 - DNA, 15 bp, Homo sapiens
ggagaatcactggac

SEQ ID NO: 243281 - DNA, 15 bp, Homo sapiens
aggagaatcactgga

SEQ ID NO: 243282 - DNA, 15 bp, Homo sapiens
caggagaatcactgg

SEQ ID NO: 243283 - DNA, 15 bp, Homo sapiens
gcaggagaatcactg

SEQ ID NO: 243284 - DNA, 15 bp, Homo sapiens
tcagctactcgggag

SEQ ID NO: 243285 - DNA, 15 bp, Homo sapiens
ctcagctactcggga

SEQ ID NO: 243286 - DNA, 15 bp, Homo sapiens
tctcagctactcggg

SEQ ID NO: 243287 - DNA, 15 bp, Homo sapiens
atctcagctactcgg

SEQ ID NO: 243288 - DNA, 15 bp, Homo sapiens
aatctcagctactcg

SEQ ID NO: 243289 - DNA, 15 bp, Homo sapiens
taatctcagctactc

SEQ ID NO: 243290 - DNA, 15 bp, Homo sapiens
ttaatctcagctact

SEQ ID NO: 243291 - DNA, 15 bp, Homo sapiens
tttaatctcagctac

SEQ ID NO: 243292 - DNA, 15 bp, Homo sapiens
ctttaatctcagcta

SEQ ID NO: 243293 - DNA, 15 bp, Homo sapiens
cctttaatctcagct

SEQ ID NO: 243294 - DNA, 15 bp, Homo sapiens
gcctttaatctcagc

SEQ ID NO: 243295 - DNA, 15 bp, Homo sapiens
cgcctttaatctcag

SEQ ID NO: 243296 - DNA, 15 bp, Homo sapiens
acgcctttaatctca

SEQ ID NO: 243297 - DNA, 15 bp, Homo sapiens
tacgcctttaatctc

SEQ ID NO: 243298 - DNA, 15 bp, Homo sapiens
atacgcctttaatct

SEQ ID NO: 243299 - DNA, 15 bp, Homo sapiens
tatacgcctttaatc

SEQ ID NO: 243300 - DNA, 15 bp, Homo sapiens
gtatacgcctttaat

SEQ ID NO: 243301 - DNA, 15 bp, Homo sapiens
ggtatacgcctttaa

SEQ ID NO: 243302 - DNA, 15 bp, Homo sapiens
tggtatacgccttta

SEQ ID NO: 243303 - DNA, 15 bp, Homo sapiens
gtggtatacgccttt

SEQ ID NO: 243304 - DNA, 15 bp, Homo sapiens
ggtggtatacgcctt

SEQ ID NO: 243305 - DNA, 15 bp, Homo sapiens
tggtggtatacgcct

SEQ ID NO: 243306 - DNA, 15 bp, Homo sapiens
gtggtggtatacgcc

SEQ ID NO: 243307 - DNA, 15 bp, Homo sapiens
cgtggtggtatacgc

SEQ ID NO: 243308 - DNA, 15 bp, Homo sapiens
gcgtggtggtatacg

SEQ ID NO: 243309 - DNA, 15 bp, Homo sapiens
ggcgtggtggtatac

SEQ ID NO: 243310 - DNA, 15 bp, Homo sapiens
gggcgtggtggtata

SEQ ID NO: 243311 - DNA, 15 bp, Homo sapiens
cgggcgtggtggtat

SEQ ID NO: 243312 - DNA, 15 bp, Homo sapiens
ccgggcgtggtggta

SEQ ID NO: 243313 - DNA, 15 bp, Homo sapiens
ataaaaatacaaaaa

SEQ ID NO: 243314 - DNA, 15 bp, Homo sapiens
aataaaaatacaaaa

SEQ ID NO: 243315 - DNA, 15 bp, Homo sapiens
taataaaaatacaaa

SEQ ID NO: 243316 - DNA, 15 bp, Homo sapiens
ctaataaaaatacaa

SEQ ID NO: 243317 - DNA, 15 bp, Homo sapiens
tctaataaaaataca

SEQ ID NO: 243318 - DNA, 15 bp, Homo sapiens
ctctaataaaaatac

SEQ ID NO: 243319 - DNA, 15 bp, Homo sapiens
tctctaataaaaata

SEQ ID NO: 243320 - DNA, 15 bp, Homo sapiens
gtctctaataaaaat

SEQ ID NO: 243321 - DNA, 15 bp, Homo sapiens
tgtctctaataaaaa

SEQ ID NO: 243322 - DNA, 15 bp, Homo sapiens
ctgtctctaataaaa

SEQ ID NO: 243323 - DNA, 15 bp, Homo sapiens
cctgtctctaataaa

SEQ ID NO: 243324 - DNA, 15 bp, Homo sapiens
ccctgtctctaataa

SEQ ID NO: 243325 - DNA, 15 bp, Homo sapiens
accctgtctctaata

SEQ ID NO: 243326 - DNA, 15 bp, Homo sapiens
aaccctgtctctaat

SEQ ID NO: 243327 - DNA, 15 bp, Homo sapiens
aaaccctgtctctaa

SEQ ID NO: 243328 - DNA, 15 bp, Homo sapiens
agaaaccctgtctct

SEQ ID NO: 243329 - DNA, 15 bp, Homo sapiens
gagaaaccctgtctc

SEQ ID NO: 243330 - DNA, 15 bp, Homo sapiens
ggagaaaccctgtct

SEQ ID NO: 243331 - DNA, 15 bp, Homo sapiens
tggagaaaccctgtc

SEQ ID NO: 243332 - DNA, 15 bp, Homo sapiens
atggagaaaccctgt

SEQ ID NO: 243333 - DNA, 15 bp, Homo sapiens
catggagaaaccctg

SEQ ID NO: 243334 - DNA, 15 bp, Homo sapiens
acatggagaaaccct

SEQ ID NO: 243335 - DNA, 15 bp, Homo sapiens
aacatggagaaaccc

SEQ ID NO: 243336 - DNA, 15 bp, Homo sapiens
caacatggagaaacc

SEQ ID NO: 243337 - DNA, 15 bp, Homo sapiens
ccaacatggagaaac

SEQ ID NO: 243338 - DNA, 15 bp, Homo sapiens
gccaacatggagaaa

SEQ ID NO: 243339 - DNA, 15 bp, Homo sapiens
ggccaacatggagaa

SEQ ID NO: 243340 - DNA, 15 bp, Homo sapiens
tggccaacatggaga

SEQ ID NO: 243341 - DNA, 15 bp, Homo sapiens
ctggccaacatggag

SEQ ID NO: 243342 - DNA, 15 bp, Homo sapiens
cctggccaacatgga

SEQ ID NO: 243343 - DNA, 15 bp, Homo sapiens
accaggagttcaaga

SEQ ID NO: 243344 - DNA, 15 bp, Homo sapiens
gaccaggagttcaag

SEQ ID NO: 243345 - DNA, 15 bp, Homo sapiens
agaccaggagttcaa

SEQ ID NO: 243346 - DNA, 15 bp, Homo sapiens
gagaccaggagttca

SEQ ID NO: 243347 - DNA, 15 bp, Homo sapiens
tgagaccaggagttc

SEQ ID NO: 243348 - DNA, 15 bp, Homo sapiens
ctgagaccaggagtt

SEQ ID NO: 243349 - DNA, 15 bp, Homo sapiens
cctgagaccaggagt

SEQ ID NO: 243350 - DNA, 15 bp, Homo sapiens
acctgagaccaggag

SEQ ID NO: 243351 - DNA, 15 bp, Homo sapiens
cacctgagaccagga

SEQ ID NO: 243352 - DNA, 15 bp, Homo sapiens
tcacctgagaccagg

SEQ ID NO: 243353 - DNA, 15 bp, Homo sapiens
atcacctgagaccag

SEQ ID NO: 243354 - DNA, 15 bp, Homo sapiens
gatcacctgagacca

SEQ ID NO: 243355 - DNA, 15 bp, Homo sapiens
ggatcacctgagacc

SEQ ID NO: 243356 - DNA, 15 bp, Homo sapiens
tggatcacctgagac

SEQ ID NO: 243357 - DNA, 15 bp, Homo sapiens
gtggatcacctgaga

SEQ ID NO: 243358 - DNA, 15 bp, Homo sapiens
tagcactttgggagg

SEQ ID NO: 243359 - DNA, 15 bp, Homo sapiens
ctagcactttgggag

SEQ ID NO: 243360 - DNA, 15 bp, Homo sapiens
cctagcactttggga

SEQ ID NO: 243361 - DNA, 15 bp, Homo sapiens
tcctagcactttggg

SEQ ID NO: 243362 - DNA, 15 bp, Homo sapiens
atcctagcactttgg

SEQ ID NO: 243363 - DNA, 15 bp, Homo sapiens
aatcctagcactttg

SEQ ID NO: 243364 - DNA, 15 bp, Homo sapiens
taatcctagcacttt

SEQ ID NO: 243365 - DNA, 15 bp, Homo sapiens
gtaatcctagcactt

SEQ ID NO: 243366 - DNA, 15 bp, Homo sapiens
tgtaatcctagcact

SEQ ID NO: 243367 - DNA, 15 bp, Homo sapiens
ctgtaatcctagcac

SEQ ID NO: 243368 - DNA, 15 bp, Homo sapiens
cctgtaatcctagca

SEQ ID NO: 243369 - DNA, 15 bp, Homo sapiens
acctgtaatcctagc

SEQ ID NO: 243370 - DNA, 15 bp, Homo sapiens
cacctgtaatcctag

SEQ ID NO: 243371 - DNA, 15 bp, Homo sapiens
acacctgtaatccta

SEQ ID NO: 243372 - DNA, 15 bp, Homo sapiens
cacacctgtaatcct

SEQ ID NO: 243373 - DNA, 15 bp, Homo sapiens
agtggctcacacctg

SEQ ID NO: 243374 - DNA, 15 bp, Homo sapiens
cagtggctcacacct

SEQ ID NO: 243375 - DNA, 15 bp, Homo sapiens
gcagtggctcacacc

SEQ ID NO: 243376 - DNA, 15 bp, Homo sapiens
cgcagtggctcacac

SEQ ID NO: 243377 - DNA, 15 bp, Homo sapiens
gcgcagtggctcaca

SEQ ID NO: 243378 - DNA, 15 bp, Homo sapiens
ggcgcagtggctcac

SEQ ID NO: 243379 - DNA, 15 bp, Homo sapiens
tggcgcagtggctca

SEQ ID NO: 243380 - DNA, 15 bp, Homo sapiens
ctggcgcagtggctc

SEQ ID NO: 243381 - DNA, 15 bp, Homo sapiens
cctggcgcagtggct

SEQ ID NO: 243382 - DNA, 15 bp, Homo sapiens
gcctggcgcagtggc

SEQ ID NO: 243383 - DNA, 15 bp, Homo sapiens
ggcctggcgcagtgg

SEQ ID NO: 243384 - DNA, 15 bp, Homo sapiens
aggcctggcgcagtg

SEQ ID NO: 243385 - DNA, 15 bp, Homo sapiens
taggcctggcgcagt

SEQ ID NO: 243386 - DNA, 15 bp, Homo sapiens
ttaggcctggcgcag

SEQ ID NO: 243387 - DNA, 15 bp, Homo sapiens
attaggcctggcgca

SEQ ID NO: 243388 - DNA, 15 bp, Homo sapiens
aattaggcctggcgc

SEQ ID NO: 243389 - DNA, 15 bp, Homo sapiens
aaattaggcctggcg

SEQ ID NO: 243390 - DNA, 15 bp, Homo sapiens
aaaattaggcctggc

SEQ ID NO: 243391 - DNA, 15 bp, Homo sapiens
aaaaattaggcctgg

SEQ ID NO: 243392 - DNA, 15 bp, Homo sapiens
aaaaaattaggcctg

SEQ ID NO: 243393 - DNA, 15 bp, Homo sapiens
aaaaaaattaggcct

SEQ ID NO: 243394 - DNA, 15 bp, Homo sapiens
caaaaaaattaggcc

SEQ ID NO: 243395 - DNA, 15 bp, Homo sapiens
acaaaaaaattaggc

SEQ ID NO: 243396 - DNA, 15 bp, Homo sapiens
tacaaaaaaattagg

SEQ ID NO: 243397 - DNA, 15 bp, Homo sapiens
aaaaccgcatctcta

SEQ ID NO: 243398 - DNA, 15 bp, Homo sapiens
caaaaccgcatctct

SEQ ID NO: 243399 - DNA, 15 bp, Homo sapiens
gcaaaaccgcatctc

SEQ ID NO: 243400 - DNA, 15 bp, Homo sapiens
ggcaaaaccgcatct

SEQ ID NO: 243401 - DNA, 15 bp, Homo sapiens
tggcaaaaccgcatc

SEQ ID NO: 243402 - DNA, 15 bp, Homo sapiens
atggcaaaaccgcat

SEQ ID NO: 243403 - DNA, 15 bp, Homo sapiens
tatggcaaaaccgca

SEQ ID NO: 243404 - DNA, 15 bp, Homo sapiens
atatggcaaaaccgc

SEQ ID NO: 243405 - DNA, 15 bp, Homo sapiens
aatatggcaaaaccg

SEQ ID NO: 243406 - DNA, 15 bp, Homo sapiens
caatatggcaaaacc

SEQ ID NO: 243407 - DNA, 15 bp, Homo sapiens
gcaatatggcaaaac

SEQ ID NO: 243408 - DNA, 15 bp, Homo sapiens
ggcaatatggcaaaa

SEQ ID NO: 243409 - DNA, 15 bp, Homo sapiens
gggcaatatggcaaa

SEQ ID NO: 243410 - DNA, 15 bp, Homo sapiens
tgggcaatatggcaa

SEQ ID NO: 243411 - DNA, 15 bp, Homo sapiens
ctgggcaatatggca

SEQ ID NO: 243412 - DNA, 15 bp, Homo sapiens
cctgggcaatatggc

SEQ ID NO: 243413 - DNA, 15 bp, Homo sapiens
gcctgggcaatatgg

SEQ ID NO: 243414 - DNA, 15 bp, Homo sapiens
agcctgggcaatatg

SEQ ID NO: 243415 - DNA, 15 bp, Homo sapiens
cagcctgggcaatat

SEQ ID NO: 243416 - DNA, 15 bp, Homo sapiens
ccagcctgggcaata

SEQ ID NO: 243417 - DNA, 15 bp, Homo sapiens
accagcctgggcaat

SEQ ID NO: 243418 - DNA, 15 bp, Homo sapiens
gaccagcctgggcaa

SEQ ID NO: 243419 - DNA, 15 bp, Homo sapiens
agaccagcctgggca

SEQ ID NO: 243420 - DNA, 15 bp, Homo sapiens
gagaccagcctgggc

SEQ ID NO: 243421 - DNA, 15 bp, Homo sapiens
cgagaccagcctggg

SEQ ID NO: 243422 - DNA, 15 bp, Homo sapiens
ccaggagttcgagac

SEQ ID NO: 243423 - DNA, 15 bp, Homo sapiens
cccaggagttcgaga

SEQ ID NO: 243424 - DNA, 15 bp, Homo sapiens
gcccaggagttcgag

SEQ ID NO: 243425 - DNA, 15 bp, Homo sapiens
agcccaggagttcga

SEQ ID NO: 243426 - DNA, 15 bp, Homo sapiens
gagcccaggagttcg

SEQ ID NO: 243427 - DNA, 15 bp, Homo sapiens
cgcttgagcccagga

SEQ ID NO: 243428 - DNA, 15 bp, Homo sapiens
tcgcttgagcccagg

SEQ ID NO: 243429 - DNA, 15 bp, Homo sapiens
atcgcttgagcccag

SEQ ID NO: 243430 - DNA, 15 bp, Homo sapiens
gatcgcttgagccca

SEQ ID NO: 243431 - DNA, 15 bp, Homo sapiens
agatcgcttgagccc

SEQ ID NO: 243432 - DNA, 15 bp, Homo sapiens
cagatcgcttgagcc

SEQ ID NO: 243433 - DNA, 15 bp, Homo sapiens
gcagatcgcttgagc

SEQ ID NO: 243434 - DNA, 15 bp, Homo sapiens
ggcagatcgcttgag

SEQ ID NO: 243435 - DNA, 15 bp, Homo sapiens
aggcagatcgcttga

SEQ ID NO: 243436 - DNA, 15 bp, Homo sapiens
caggcagatcgcttg

SEQ ID NO: 243437 - DNA, 15 bp, Homo sapiens
gcaggcagatcgctt

SEQ ID NO: 243438 - DNA, 15 bp, Homo sapiens
ggcaggcagatcgct

SEQ ID NO: 243439 - DNA, 15 bp, Homo sapiens
aggcaggcagatcgc

SEQ ID NO: 243440 - DNA, 15 bp, Homo sapiens
aaggcaggcagatcg

SEQ ID NO: 243441 - DNA, 15 bp, Homo sapiens
caaggcaggcagatc

SEQ ID NO: 243442 - DNA, 15 bp, Homo sapiens
ccaaggcaggcagat

SEQ ID NO: 243443 - DNA, 15 bp, Homo sapiens
gccaaggcaggcaga

SEQ ID NO: 243444 - DNA, 15 bp, Homo sapiens
ggccaaggcaggcag

SEQ ID NO: 243445 - DNA, 15 bp, Homo sapiens
aggccaaggcaggca

SEQ ID NO: 243446 - DNA, 15 bp, Homo sapiens
tgtgcctgtaatccc

SEQ ID NO: 243447 - DNA, 15 bp, Homo sapiens
ttgtgcctgtaatcc

SEQ ID NO: 243448 - DNA, 15 bp, Homo sapiens
tttgtgcctgtaatc

SEQ ID NO: 243449 - DNA, 15 bp, Homo sapiens
gtttgtgcctgtaat

SEQ ID NO: 243450 - DNA, 15 bp, Homo sapiens
ggtttgtgcctgtaa

SEQ ID NO: 243451 - DNA, 15 bp, Homo sapiens
tggtttgtgcctgta

SEQ ID NO: 243452 - DNA, 15 bp, Homo sapiens
gtggtttgtgcctgt

SEQ ID NO: 243453 - DNA, 15 bp, Homo sapiens
ggtggtttgtgcctg

SEQ ID NO: 243454 - DNA, 15 bp, Homo sapiens
cggtggtttgtgcct

SEQ ID NO: 243455 - DNA, 15 bp, Homo sapiens
acggtggtttgtgcc

SEQ ID NO: 243456 - DNA, 15 bp, Homo sapiens
cacggtggtttgtgc

SEQ ID NO: 243457 - DNA, 15 bp, Homo sapiens
gcacggtggtttgtg

SEQ ID NO: 243458 - DNA, 15 bp, Homo sapiens
ggcacggtggtttgt

SEQ ID NO: 243459 - DNA, 15 bp, Homo sapiens
gggcacggtggtttg

SEQ ID NO: 243460 - DNA, 15 bp, Homo sapiens
cgggcacggtggttt

SEQ ID NO: 243461 - DNA, 15 bp, Homo sapiens
tcgggcacggtggtt

SEQ ID NO: 243462 - DNA, 15 bp, Homo sapiens
gtcgggcacggtggt

SEQ ID NO: 243463 - DNA, 15 bp, Homo sapiens
cgtcgggcacggtgg

SEQ ID NO: 243464 - DNA, 15 bp, Homo sapiens
gcgtcgggcacggtg

SEQ ID NO: 243465 - DNA, 15 bp, Homo sapiens
cgcgtcgggcacggt

SEQ ID NO: 243466 - DNA, 15 bp, Homo sapiens
acgcgtcgggcacgg

SEQ ID NO: 243467 - DNA, 15 bp, Homo sapiens
aacgcgtcgggcacg

SEQ ID NO: 243468 - DNA, 15 bp, Homo sapiens
aaacgcgtcgggcac

SEQ ID NO: 243469 - DNA, 15 bp, Homo sapiens
aaaacgcgtcgggca

SEQ ID NO: 243470 - DNA, 15 bp, Homo sapiens
gaaaacgcgtcgggc

SEQ ID NO: 243471 - DNA, 15 bp, Homo sapiens
agaaaacgcgtcggg

SEQ ID NO: 243472 - DNA, 15 bp, Homo sapiens
aagaaaacgcgtcgg

SEQ ID NO: 243473 - DNA, 15 bp, Homo sapiens
taagaaaacgcgtcg

SEQ ID NO: 243474 - DNA, 15 bp, Homo sapiens
ttaagaaaacgcgtc

SEQ ID NO: 243475 - DNA, 15 bp, Homo sapiens
attaagaaaacgcgt

SEQ ID NO: 243476 - DNA, 15 bp, Homo sapiens
cattaagaaaacgcg

SEQ ID NO: 243477 - DNA, 15 bp, Homo sapiens
tcattaagaaaacgc

SEQ ID NO: 243478 - DNA, 15 bp, Homo sapiens
ttcattaagaaaacg

SEQ ID NO: 243479 - DNA, 15 bp, Homo sapiens
attcattaagaaaac

SEQ ID NO: 243480 - DNA, 15 bp, Homo sapiens
gattcattaagaaaa

SEQ ID NO: 243481 - DNA, 15 bp, Homo sapiens
ggattcattaagaaa

SEQ ID NO: 243482 - DNA, 15 bp, Homo sapiens
tggattcattaagaa

SEQ ID NO: 243483 - DNA, 15 bp, Homo sapiens
atggattcattaaga

SEQ ID NO: 243484 - DNA, 15 bp, Homo sapiens
aatggattcattaag

SEQ ID NO: 243485 - DNA, 15 bp, Homo sapiens
aaatggattcattaa

SEQ ID NO: 243486 - DNA, 15 bp, Homo sapiens
caaatggattcatta

SEQ ID NO: 243487 - DNA, 15 bp, Homo sapiens
gcaaatggattcatt

SEQ ID NO: 243488 - DNA, 15 bp, Homo sapiens
tgcaaatggattcat

SEQ ID NO: 243489 - DNA, 15 bp, Homo sapiens
atgcaaatggattca

SEQ ID NO: 243490 - DNA, 15 bp, Homo sapiens
catgcaaatggattc

SEQ ID NO: 243491 - DNA, 15 bp, Homo sapiens
gcatgcaaatggatt

SEQ ID NO: 243492 - DNA, 15 bp, Homo sapiens
cgcatgcaaatggat

SEQ ID NO: 243493 - DNA, 15 bp, Homo sapiens
acgcatgcaaatgga

SEQ ID NO: 243494 - DNA, 15 bp, Homo sapiens
aacgcatgcaaatgg

SEQ ID NO: 243495 - DNA, 15 bp, Homo sapiens
gaacgcatgcaaatg

SEQ ID NO: 243496 - DNA, 15 bp, Homo sapiens
agaacgcatgcaaat

SEQ ID NO: 243497 - DNA, 15 bp, Homo sapiens
aagaacgcatgcaaa

SEQ ID NO: 243498 - DNA, 15 bp, Homo sapiens
taagaacgcatgcaa

SEQ ID NO: 243499 - DNA, 15 bp, Homo sapiens
ataagaacgcatgca

SEQ ID NO: 243500 - DNA, 15 bp, Homo sapiens
cataagaacgcatgc

SEQ ID NO: 243501 - DNA, 15 bp, Homo sapiens
acataagaacgcatg

SEQ ID NO: 243502 - DNA, 15 bp, Homo sapiens
cacataagaacgcat

SEQ ID NO: 243503 - DNA, 15 bp, Homo sapiens
tcacataagaacgca

SEQ ID NO: 243504 - DNA, 15 bp, Homo sapiens
ttcacataagaacgc

SEQ ID NO: 243505 - DNA, 15 bp, Homo sapiens
attcacataagaacg

SEQ ID NO: 243506 - DNA, 15 bp, Homo sapiens
tattcacataagaac

SEQ ID NO: 243507 - DNA, 15 bp, Homo sapiens
ttattcacataagaa

SEQ ID NO: 243508 - DNA, 15 bp, Homo sapiens
tttattcacataaga

SEQ ID NO: 243509 - DNA, 15 bp, Homo sapiens
gtttattcacataag

SEQ ID NO: 243510 - DNA, 15 bp, Homo sapiens
agtttattcacataa

SEQ ID NO: 243511 - DNA, 15 bp, Homo sapiens
tagtttattcacata

SEQ ID NO: 243512 - DNA, 15 bp, Homo sapiens
atagtttattcacat

SEQ ID NO: 243513 - DNA, 15 bp, Homo sapiens
aatagtttattcaca

SEQ ID NO: 243514 - DNA, 15 bp, Homo sapiens
taatagtttattcac

SEQ ID NO: 243515 - DNA, 15 bp, Homo sapiens
ataatagtttattca

SEQ ID NO: 243516 - DNA, 15 bp, Homo sapiens
tataatagtttattc

SEQ ID NO: 243517 - DNA, 15 bp, Homo sapiens
atataatagtttatt

SEQ ID NO: 243518 - DNA, 15 bp, Homo sapiens
catataatagtttat

SEQ ID NO: 243519 - DNA, 15 bp, Homo sapiens
tcatataatagttta

SEQ ID NO: 243520 - DNA, 15 bp, Homo sapiens
ttcatataatagttt

SEQ ID NO: 243521 - DNA, 15 bp, Homo sapiens
attcatataatagtt

SEQ ID NO: 243522 - DNA, 15 bp, Homo sapiens
cattcatataatagt

SEQ ID NO: 243523 - DNA, 15 bp, Homo sapiens
tcattcatataatag

SEQ ID NO: 243524 - DNA, 15 bp, Homo sapiens
ctcattcatataata

SEQ ID NO: 243525 - DNA, 15 bp, Homo sapiens
actcattcatataat

SEQ ID NO: 243526 - DNA, 15 bp, Homo sapiens
cactcattcatataa

SEQ ID NO: 243527 - DNA, 15 bp, Homo sapiens
gcactcattcatata

SEQ ID NO: 243528 - DNA, 15 bp, Homo sapiens
ggcactcattcatat

SEQ ID NO: 243529 - DNA, 15 bp, Homo sapiens
tggcactcattcata

SEQ ID NO: 243530 - DNA, 15 bp, Homo sapiens
ttggcactcattcat

SEQ ID NO: 243531 - DNA, 15 bp, Homo sapiens
cttggcactcattca

SEQ ID NO: 243532 - DNA, 15 bp, Homo sapiens
gcttggcactcattc

SEQ ID NO: 243533 - DNA, 15 bp, Homo sapiens
tgcttggcactcatt

SEQ ID NO: 243534 - DNA, 15 bp, Homo sapiens
ttgcttggcactcat

SEQ ID NO: 243535 - DNA, 15 bp, Homo sapiens
tttgcttggcactca

SEQ ID NO: 243536 - DNA, 15 bp, Homo sapiens
gtttgcttggcactc

SEQ ID NO: 243537 - DNA, 15 bp, Homo sapiens
agtttgcttggcact

SEQ ID NO: 243538 - DNA, 15 bp, Homo sapiens
cagtttgcttggcac

SEQ ID NO: 243539 - DNA, 15 bp, Homo sapiens
tcagtttgcttggca

SEQ ID NO: 243540 - DNA, 15 bp, Homo sapiens
ctcagtttgcttggc

SEQ ID NO: 243541 - DNA, 15 bp, Homo sapiens
cctcagtttgcttgg

SEQ ID NO: 243542 - DNA, 15 bp, Homo sapiens
gcctcagtttgcttg

SEQ ID NO: 243543 - DNA, 15 bp, Homo sapiens
agcctcagtttgctt

SEQ ID NO: 243544 - DNA, 15 bp, Homo sapiens
gagcctcagtttgct

SEQ ID NO: 243545 - DNA, 15 bp, Homo sapiens
tgagcctcagtttgc

SEQ ID NO: 243546 - DNA, 15 bp, Homo sapiens
ctgagcctcagtttg

SEQ ID NO: 243547 - DNA, 15 bp, Homo sapiens
tctgagcctcagttt

SEQ ID NO: 243548 - DNA, 15 bp, Homo sapiens
gtctgagcctcagtt

SEQ ID NO: 243549 - DNA, 15 bp, Homo sapiens
tgtctgagcctcagt

SEQ ID NO: 243550 - DNA, 15 bp, Homo sapiens
gtgtctgagcctcag

SEQ ID NO: 243551 - DNA, 15 bp, Homo sapiens
tgtgtctgagcctca

SEQ ID NO: 243552 - DNA, 15 bp, Homo sapiens
gtgtgtctgagcctc

SEQ ID NO: 243553 - DNA, 15 bp, Homo sapiens
ggtgtgtctgagcct

SEQ ID NO: 243554 - DNA, 15 bp, Homo sapiens
aggtgtgtctgagcc

SEQ ID NO: 243555 - DNA, 15 bp, Homo sapiens
caggtgtgtctgagc

SEQ ID NO: 243556 - DNA, 15 bp, Homo sapiens
tcaggtgtgtctgag

SEQ ID NO: 243557 - DNA, 15 bp, Homo sapiens
gtcaggtgtgtctga

SEQ ID NO: 243558 - DNA, 15 bp, Homo sapiens
ggtcaggtgtgtctg

SEQ ID NO: 243559 - DNA, 15 bp, Homo sapiens
aggtcaggtgtgtct

SEQ ID NO: 243560 - DNA, 15 bp, Homo sapiens
aaggtcaggtgtgtc

SEQ ID NO: 243561 - DNA, 15 bp, Homo sapiens
gaaggtcaggtgtgt

SEQ ID NO: 243562 - DNA, 15 bp, Homo sapiens
ggaaggtcaggtgtg

SEQ ID NO: 243563 - DNA, 15 bp, Homo sapiens
aggaaggtcaggtgt

SEQ ID NO: 243564 - DNA, 15 bp, Homo sapiens
gaggaaggtcaggtg

SEQ ID NO: 243565 - DNA, 15 bp, Homo sapiens
ggaggaaggtcaggt

SEQ ID NO: 243566 - DNA, 15 bp, Homo sapiens
aggaggaaggtcagg

SEQ ID NO: 243567 - DNA, 15 bp, Homo sapiens
aaggaggaaggtcag

SEQ ID NO: 243568 - DNA, 15 bp, Homo sapiens
gaaggaggaaggtca

SEQ ID NO: 243569 - DNA, 15 bp, Homo sapiens
ggaaggaggaaggtc

SEQ ID NO: 243570 - DNA, 15 bp, Homo sapiens
aggaaggaggaaggt

SEQ ID NO: 243571 - DNA, 15 bp, Homo sapiens
gaggaaggaggaagg

SEQ ID NO: 243572 - DNA, 15 bp, Homo sapiens
agaggaaggaggaag

SEQ ID NO: 243573 - DNA, 15 bp, Homo sapiens
gagaggaaggaggaa

SEQ ID NO: 243574 - DNA, 15 bp, Homo sapiens
agagaggaaggagga

SEQ ID NO: 243575 - DNA, 15 bp, Homo sapiens
gagagaggaaggagg

SEQ ID NO: 243576 - DNA, 15 bp, Homo sapiens
agagagaggaaggag

SEQ ID NO: 243577 - DNA, 15 bp, Homo sapiens
cagagagaggaagga

SEQ ID NO: 243578 - DNA, 15 bp, Homo sapiens
ccagagagaggaagg

SEQ ID NO: 243579 - DNA, 15 bp, Homo sapiens
gccagagagaggaag

SEQ ID NO: 243580 - DNA, 15 bp, Homo sapiens
agccagagagaggaa

SEQ ID NO: 243581 - DNA, 15 bp, Homo sapiens
gagccagagagagga

SEQ ID NO: 243582 - DNA, 15 bp, Homo sapiens
agagccagagagagg

SEQ ID NO: 243583 - DNA, 15 bp, Homo sapiens
gagagccagagagag

SEQ ID NO: 243584 - DNA, 15 bp, Homo sapiens
tgagagccagagaga

SEQ ID NO: 243585 - DNA, 15 bp, Homo sapiens
gtgagagccagagag

SEQ ID NO: 243586 - DNA, 15 bp, Homo sapiens
tgtgagagccagaga

SEQ ID NO: 243587 - DNA, 15 bp, Homo sapiens
ctgtgagagccagag

SEQ ID NO: 243588 - DNA, 15 bp, Homo sapiens
actgtgagagccaga

SEQ ID NO: 243589 - DNA, 15 bp, Homo sapiens
cactgtgagagccag

SEQ ID NO: 243590 - DNA, 15 bp, Homo sapiens
tcactgtgagagcca

SEQ ID NO: 243591 - DNA, 15 bp, Homo sapiens
gtcactgtgagagcc

SEQ ID NO: 243592 - DNA, 15 bp, Homo sapiens
tgtcactgtgagagc

SEQ ID NO: 243593 - DNA, 15 bp, Homo sapiens
gtgtcactgtgagag

SEQ ID NO: 243594 - DNA, 15 bp, Homo sapiens
agtgtcactgtgaga

SEQ ID NO: 243595 - DNA, 15 bp, Homo sapiens
gagtgtcactgtgag

SEQ ID NO: 243596 - DNA, 15 bp, Homo sapiens
agagtgtcactgtga

SEQ ID NO: 243597 - DNA, 15 bp, Homo sapiens
cagagtgtcactgtg

SEQ ID NO: 243598 - DNA, 15 bp, Homo sapiens
gcagagtgtcactgt

SEQ ID NO: 243599 - DNA, 15 bp, Homo sapiens
cgcagagtgtcactg

SEQ ID NO: 243600 - DNA, 15 bp, Homo sapiens
tcgcagagtgtcact

SEQ ID NO: 243601 - DNA, 15 bp, Homo sapiens
ctcgcagagtgtcac

SEQ ID NO: 243602 - DNA, 15 bp, Homo sapiens
cctcgcagagtgtca

SEQ ID NO: 243603 - DNA, 15 bp, Homo sapiens
ccctcgcagagtgtc

SEQ ID NO: 243604 - DNA, 15 bp, Homo sapiens
tccctcgcagagtgt

SEQ ID NO: 243605 - DNA, 15 bp, Homo sapiens
gtccctcgcagagtg

SEQ ID NO: 243606 - DNA, 15 bp, Homo sapiens
ggtccctcgcagagt

SEQ ID NO: 243607 - DNA, 15 bp, Homo sapiens
gggtccctcgcagag

SEQ ID NO: 243608 - DNA, 15 bp, Homo sapiens
tgggtccctcgcaga

SEQ ID NO: 243609 - DNA, 15 bp, Homo sapiens
ttgggtccctcgcag

SEQ ID NO: 243610 - DNA, 15 bp, Homo sapiens
gttgggtccctcgca

SEQ ID NO: 243611 - DNA, 15 bp, Homo sapiens
tgttgggtccctcgc

SEQ ID NO: 243612 - DNA, 15 bp, Homo sapiens
ttgttgggtccctcg

SEQ ID NO: 243613 - DNA, 15 bp, Homo sapiens
cttgttgggtccctc

SEQ ID NO: 243614 - DNA, 15 bp, Homo sapiens
acttgttgggtccct

SEQ ID NO: 243615 - DNA, 15 bp, Homo sapiens
aacttgttgggtccc

SEQ ID NO: 243616 - DNA, 15 bp, Homo sapiens
gaacttgttgggtcc

SEQ ID NO: 243617 - DNA, 15 bp, Homo sapiens
tgaacttgttgggtc

SEQ ID NO: 243618 - DNA, 15 bp, Homo sapiens
ttgaacttgttgggt

SEQ ID NO: 243619 - DNA, 15 bp, Homo sapiens
cttgaacttgttggg

SEQ ID NO: 243620 - DNA, 15 bp, Homo sapiens
acttgaacttgttgg

SEQ ID NO: 243621 - DNA, 15 bp, Homo sapiens
cacttgaacttgttg

SEQ ID NO: 243622 - DNA, 15 bp, Homo sapiens
acacttgaacttgtt

SEQ ID NO: 243623 - DNA, 15 bp, Homo sapiens
gacacttgaacttgt

SEQ ID NO: 243624 - DNA, 15 bp, Homo sapiens
tgacacttgaacttg

SEQ ID NO: 243625 - DNA, 15 bp, Homo sapiens
gtgacacttgaactt

SEQ ID NO: 243626 - DNA, 15 bp, Homo sapiens
tgtgacacttgaact

SEQ ID NO: 243627 - DNA, 15 bp, Homo sapiens
ctgtgacacttgaac

SEQ ID NO: 243628 - DNA, 15 bp, Homo sapiens
gctgtgacacttgaa

SEQ ID NO: 243629 - DNA, 15 bp, Homo sapiens
cgctgtgacacttga

SEQ ID NO: 243630 - DNA, 15 bp, Homo sapiens
ccgctgtgacacttg

SEQ ID NO: 243631 - DNA, 15 bp, Homo sapiens
gccgctgtgacactt

SEQ ID NO: 243632 - DNA, 15 bp, Homo sapiens
cgccgctgtgacact

SEQ ID NO: 243633 - DNA, 15 bp, Homo sapiens
tcgccgctgtgacac

SEQ ID NO: 243634 - DNA, 15 bp, Homo sapiens
ttcgccgctgtgaca

SEQ ID NO: 243635 - DNA, 15 bp, Homo sapiens
attcgccgctgtgac

SEQ ID NO: 243636 - DNA, 15 bp, Homo sapiens
cattcgccgctgtga

SEQ ID NO: 243637 - DNA, 15 bp, Homo sapiens
gcattcgccgctgtg

SEQ ID NO: 243638 - DNA, 15 bp, Homo sapiens
tgcattcgccgctgt

SEQ ID NO: 243639 - DNA, 15 bp, Homo sapiens
atgcattcgccgctg

SEQ ID NO: 243640 - DNA, 15 bp, Homo sapiens
gatgcattcgccgct

SEQ ID NO: 243641 - DNA, 15 bp, Homo sapiens
tgatgcattcgccgc

SEQ ID NO: 243642 - DNA, 15 bp, Homo sapiens
gtgatgcattcgccg

SEQ ID NO: 243643 - DNA, 15 bp, Homo sapiens
ggtgatgcattcgcc

SEQ ID NO: 243644 - DNA, 15 bp, Homo sapiens
gggtgatgcattcgc

SEQ ID NO: 243645 - DNA, 15 bp, Homo sapiens
agggtgatgcattcg

SEQ ID NO: 243646 - DNA, 15 bp, Homo sapiens
cagggtgatgcattc

SEQ ID NO: 243647 - DNA, 15 bp, Homo sapiens
ccagggtgatgcatt

SEQ ID NO: 243648 - DNA, 15 bp, Homo sapiens
tccagggtgatgcat

SEQ ID NO: 243649 - DNA, 15 bp, Homo sapiens
gtccagggtgatgca

SEQ ID NO: 243650 - DNA, 15 bp, Homo sapiens
tgtccagggtgatgc

SEQ ID NO: 243651 - DNA, 15 bp, Homo sapiens
ttgtccagggtgatg

SEQ ID NO: 243652 - DNA, 15 bp, Homo sapiens
tttgtccagggtgat

SEQ ID NO: 243653 - DNA, 15 bp, Homo sapiens
ctttgtccagggtga

SEQ ID NO: 243654 - DNA, 15 bp, Homo sapiens
actttgtccagggtg

SEQ ID NO: 243655 - DNA, 15 bp, Homo sapiens
gactttgtccagggt

SEQ ID NO: 243656 - DNA, 15 bp, Homo sapiens
agactttgtccaggg

SEQ ID NO: 243657 - DNA, 15 bp, Homo sapiens
cagactttgtccagg

SEQ ID NO: 243658 - DNA, 15 bp, Homo sapiens
gcagactttgtccag

SEQ ID NO: 243659 - DNA, 15 bp, Homo sapiens
tgcagactttgtcca

SEQ ID NO: 243660 - DNA, 15 bp, Homo sapiens
ttgcagactttgtcc

SEQ ID NO: 243661 - DNA, 15 bp, Homo sapiens
gttgcagactttgtc

SEQ ID NO: 243662 - DNA, 15 bp, Homo sapiens
tgttgcagactttgt

SEQ ID NO: 243663 - DNA, 15 bp, Homo sapiens
atgttgcagactttg

SEQ ID NO: 243664 - DNA, 15 bp, Homo sapiens
catgttgcagacttt

SEQ ID NO: 243665 - DNA, 15 bp, Homo sapiens
ccatgttgcagactt

SEQ ID NO: 243666 - DNA, 15 bp, Homo sapiens
gccatgttgcagact

SEQ ID NO: 243667 - DNA, 15 bp, Homo sapiens
agccatgttgcagac

SEQ ID NO: 243668 - DNA, 15 bp, Homo sapiens
tagccatgttgcaga

SEQ ID NO: 243669 - DNA, 15 bp, Homo sapiens
ctagccatgttgcag

SEQ ID NO: 243670 - DNA, 15 bp, Homo sapiens
tctagccatgttgca

SEQ ID NO: 243671 - DNA, 15 bp, Homo sapiens
ctctagccatgttgc

SEQ ID NO: 243672 - DNA, 15 bp, Homo sapiens
tctctagccatgttg

SEQ ID NO: 243673 - DNA, 15 bp, Homo sapiens
gtctctagccatgtt

SEQ ID NO: 243674 - DNA, 15 bp, Homo sapiens
agtctctagccatgt

SEQ ID NO: 243675 - DNA, 15 bp, Homo sapiens
cagtctctagccatg

SEQ ID NO: 243676 - DNA, 15 bp, Homo sapiens
gcagtctctagccat

SEQ ID NO: 243677 - DNA, 15 bp, Homo sapiens
ggcagtctctagcca

SEQ ID NO: 243678 - DNA, 15 bp, Homo sapiens
cggcagtctctagcc

SEQ ID NO: 243679 - DNA, 15 bp, Homo sapiens
ccggcagtctctagc

SEQ ID NO: 243680 - DNA, 15 bp, Homo sapiens
cccggcagtctctag

SEQ ID NO: 243681 - DNA, 15 bp, Homo sapiens
tcccggcagtctcta

SEQ ID NO: 243682 - DNA, 15 bp, Homo sapiens
gtcccggcagtctct

SEQ ID NO: 243683 - DNA, 15 bp, Homo sapiens
agtcccggcagtctc

SEQ ID NO: 243684 - DNA, 15 bp, Homo sapiens
cagtcccggcagtct

SEQ ID NO: 243685 - DNA, 15 bp, Homo sapiens
ccagtcccggcagtc

SEQ ID NO: 243686 - DNA, 15 bp, Homo sapiens
accagtcccggcagt

SEQ ID NO: 243687 - DNA, 15 bp, Homo sapiens
gaccagtcccggcag

SEQ ID NO: 243688 - DNA, 15 bp, Homo sapiens
tgaccagtcccggca

SEQ ID NO: 243689 - DNA, 15 bp, Homo sapiens
ctgaccagtcccggc

SEQ ID NO: 243690 - DNA, 15 bp, Homo sapiens
tctgaccagtcccgg

SEQ ID NO: 243691 - DNA, 15 bp, Homo sapiens
atctgaccagtcccg

SEQ ID NO: 243692 - DNA, 15 bp, Homo sapiens
catctgaccagtccc

SEQ ID NO: 243693 - DNA, 15 bp, Homo sapiens
tcatctgaccagtcc

SEQ ID NO: 243694 - DNA, 15 bp, Homo sapiens
ttcatctgaccagtc

SEQ ID NO: 243695 - DNA, 15 bp, Homo sapiens
gttcatctgaccagt

SEQ ID NO: 243696 - DNA, 15 bp, Homo sapiens
ggttcatctgaccag

SEQ ID NO: 243697 - DNA, 15 bp, Homo sapiens
gggttcatctgacca

SEQ ID NO: 243698 - DNA, 15 bp, Homo sapiens
tgggttcatctgacc

SEQ ID NO: 243699 - DNA, 15 bp, Homo sapiens
atgggttcatctgac

SEQ ID NO: 243700 - DNA, 15 bp, Homo sapiens
gatgggttcatctga

SEQ ID NO: 243701 - DNA, 15 bp, Homo sapiens
tgatgggttcatctg

SEQ ID NO: 243702 - DNA, 15 bp, Homo sapiens
ttgatgggttcatct

SEQ ID NO: 243703 - DNA, 15 bp, Homo sapiens
tttgatgggttcatc

SEQ ID NO: 243704 - DNA, 15 bp, Homo sapiens
ctttgatgggttcat

SEQ ID NO: 243705 - DNA, 15 bp, Homo sapiens
tctttgatgggttca

SEQ ID NO: 243706 - DNA, 15 bp, Homo sapiens
ctctttgatgggttc

SEQ ID NO: 243707 - DNA, 15 bp, Homo sapiens
actctttgatgggtt

SEQ ID NO: 243708 - DNA, 15 bp, Homo sapiens
cactctttgatgggt

SEQ ID NO: 243709 - DNA, 15 bp, Homo sapiens
gcactctttgatggg

SEQ ID NO: 243710 - DNA, 15 bp, Homo sapiens
cgcactctttgatgg

SEQ ID NO: 243711 - DNA, 15 bp, Homo sapiens
ccgcactctttgatg

SEQ ID NO: 243712 - DNA, 15 bp, Homo sapiens
accgcactctttgat

SEQ ID NO: 243713 - DNA, 15 bp, Homo sapiens
caccgcactctttga

SEQ ID NO: 243714 - DNA, 15 bp, Homo sapiens
tcaccgcactctttg

SEQ ID NO: 243715 - DNA, 15 bp, Homo sapiens
ctcaccgcactcttt

SEQ ID NO: 243716 - DNA, 15 bp, Homo sapiens
actcaccgcactctt

SEQ ID NO: 243717 - DNA, 15 bp, Homo sapiens
gactcaccgcactct

SEQ ID NO: 243718 - DNA, 15 bp, Homo sapiens
agactcaccgcactc

SEQ ID NO: 243719 - DNA, 15 bp, Homo sapiens
gagactcaccgcact

SEQ ID NO: 243720 - DNA, 15 bp, Homo sapiens
cgagactcaccgcac

SEQ ID NO: 243721 - DNA, 15 bp, Homo sapiens
ccgagactcaccgca

SEQ ID NO: 243722 - DNA, 15 bp, Homo sapiens
accgagactcaccgc

SEQ ID NO: 243723 - DNA, 15 bp, Homo sapiens
caccgagactcaccg

SEQ ID NO: 243724 - DNA, 15 bp, Homo sapiens
gcaccgagactcacc

SEQ ID NO: 243725 - DNA, 15 bp, Homo sapiens
tgcaccgagactcac

SEQ ID NO: 243726 - DNA, 15 bp, Homo sapiens
ctgcaccgagactca

SEQ ID NO: 243727 - DNA, 15 bp, Homo sapiens
cctgcaccgagactc

SEQ ID NO: 243728 - DNA, 15 bp, Homo sapiens
gcctgcaccgagact

SEQ ID NO: 243729 - DNA, 15 bp, Homo sapiens
cgcctgcaccgagac

SEQ ID NO: 243730 - DNA, 15 bp, Homo sapiens
ccgcctgcaccgaga

SEQ ID NO: 243731 - DNA, 15 bp, Homo sapiens
gccgcctgcaccgag

SEQ ID NO: 243732 - DNA, 15 bp, Homo sapiens
agccgcctgcaccga

SEQ ID NO: 243733 - DNA, 15 bp, Homo sapiens
aagccgcctgcaccg

SEQ ID NO: 243734 - DNA, 15 bp, Homo sapiens
caagccgcctgcacc

SEQ ID NO: 243735 - DNA, 15 bp, Homo sapiens
gcaagccgcctgcac

SEQ ID NO: 243736 - DNA, 15 bp, Homo sapiens
tgcaagccgcctgca

SEQ ID NO: 243737 - DNA, 15 bp, Homo sapiens
ctgcaagccgcctgc

SEQ ID NO: 243738 - DNA, 15 bp, Homo sapiens
tctgcaagccgcctg

SEQ ID NO: 243739 - DNA, 15 bp, Homo sapiens
ctctgcaagccgcct

SEQ ID NO: 243740 - DNA, 15 bp, Homo sapiens
actctgcaagccgcc

SEQ ID NO: 243741 - DNA, 15 bp, Homo sapiens
aactctgcaagccgc

SEQ ID NO: 243742 - DNA, 15 bp, Homo sapiens
aaactctgcaagccg

SEQ ID NO: 243743 - DNA, 15 bp, Homo sapiens
caaactctgcaagcc

SEQ ID NO: 243744 - DNA, 15 bp, Homo sapiens
acaaactctgcaagc

SEQ ID NO: 243745 - DNA, 15 bp, Homo sapiens
cacaaactctgcaag

SEQ ID NO: 243746 - DNA, 15 bp, Homo sapiens
ccacaaactctgcaa

SEQ ID NO: 243747 - DNA, 15 bp, Homo sapiens
cccacaaactctgca

SEQ ID NO: 243748 - DNA, 15 bp, Homo sapiens
ccccacaaactctgc

SEQ ID NO: 243749 - DNA, 15 bp, Homo sapiens
tccccacaaactctg

SEQ ID NO: 243750 - DNA, 15 bp, Homo sapiens
ctccccacaaactct

SEQ ID NO: 243751 - DNA, 15 bp, Homo sapiens
gctccccacaaactc

SEQ ID NO: 243752 - DNA, 15 bp, Homo sapiens
ggctccccacaaact

SEQ ID NO: 243753 - DNA, 15 bp, Homo sapiens
tggctccccacaaac

SEQ ID NO: 243754 - DNA, 15 bp, Homo sapiens
ctggctccccacaaa

SEQ ID NO: 243755 - DNA, 15 bp, Homo sapiens
cctggctccccacaa

SEQ ID NO: 243756 - DNA, 15 bp, Homo sapiens
tcctggctccccaca

SEQ ID NO: 243757 - DNA, 15 bp, Homo sapiens
ttcctggctccccac

SEQ ID NO: 243758 - DNA, 15 bp, Homo sapiens
tttcctggctcccca

SEQ ID NO: 243759 - DNA, 15 bp, Homo sapiens
ctttcctggctcccc

SEQ ID NO: 243760 - DNA, 15 bp, Homo sapiens
cctttcctggctccc

SEQ ID NO: 243761 - DNA, 15 bp, Homo sapiens
ccctttcctggctcc

SEQ ID NO: 243762 - DNA, 15 bp, Homo sapiens
tccctttcctggctc

SEQ ID NO: 243763 - DNA, 15 bp, Homo sapiens
gtccctttcctggct

SEQ ID NO: 243764 - DNA, 15 bp, Homo sapiens
agtccctttcctggc

SEQ ID NO: 243765 - DNA, 15 bp, Homo sapiens
cagtccctttcctgg

SEQ ID NO: 243766 - DNA, 15 bp, Homo sapiens
tcagtccctttcctg

SEQ ID NO: 243767 - DNA, 15 bp, Homo sapiens
ctcagtccctttcct

SEQ ID NO: 243768 - DNA, 15 bp, Homo sapiens
tctcagtccctttcc

SEQ ID NO: 243769 - DNA, 15 bp, Homo sapiens
gtctcagtccctttc

SEQ ID NO: 243770 - DNA, 15 bp, Homo sapiens
tgtctcagtcccttt

SEQ ID NO: 243771 - DNA, 15 bp, Homo sapiens
atgtctcagtccctt

SEQ ID NO: 243772 - DNA, 15 bp, Homo sapiens
catgtctcagtccct

SEQ ID NO: 243773 - DNA, 15 bp, Homo sapiens
tcatgtctcagtccc

SEQ ID NO: 243774 - DNA, 15 bp, Homo sapiens
ctcatgtctcagtcc

SEQ ID NO: 243775 - DNA, 15 bp, Homo sapiens
actcatgtctcagtc

SEQ ID NO: 243776 - DNA, 15 bp, Homo sapiens
cactcatgtctcagt

SEQ ID NO: 243777 - DNA, 15 bp, Homo sapiens
gcactcatgtctcag

SEQ ID NO: 243778 - DNA, 15 bp, Homo sapiens
agcactcatgtctca

SEQ ID NO: 243779 - DNA, 15 bp, Homo sapiens
cagcactcatgtctc

SEQ ID NO: 243780 - DNA, 15 bp, Homo sapiens
acagcactcatgtct

SEQ ID NO: 243781 - DNA, 15 bp, Homo sapiens
tacagcactcatgtc

SEQ ID NO: 243782 - DNA, 15 bp, Homo sapiens
ctacagcactcatgt

SEQ ID NO: 243783 - DNA, 15 bp, Homo sapiens
cctacagcactcatg

SEQ ID NO: 243784 - DNA, 15 bp, Homo sapiens
ccctacagcactcat

SEQ ID NO: 243785 - DNA, 15 bp, Homo sapiens
accctacagcactca

SEQ ID NO: 243786 - DNA, 15 bp, Homo sapiens
aaccctacagcactc

SEQ ID NO: 243787 - DNA, 15 bp, Homo sapiens
aaaccctacagcact

SEQ ID NO: 243788 - DNA, 15 bp, Homo sapiens
aaaaccctacagcac

SEQ ID NO: 243789 - DNA, 15 bp, Homo sapiens
caaaaccctacagca

SEQ ID NO: 243790 - DNA, 15 bp, Homo sapiens
ccaaaaccctacagc

SEQ ID NO: 243791 - DNA, 15 bp, Homo sapiens
cccaaaaccctacag

SEQ ID NO: 243792 - DNA, 15 bp, Homo sapiens
tcccaaaaccctaca

SEQ ID NO: 243793 - DNA, 15 bp, Homo sapiens
ttcccaaaaccctac

SEQ ID NO: 243794 - DNA, 15 bp, Homo sapiens
gttcccaaaacccta

SEQ ID NO: 243795 - DNA, 15 bp, Homo sapiens
agttcccaaaaccct

SEQ ID NO: 243796 - DNA, 15 bp, Homo sapiens
gagttcccaaaaccc

SEQ ID NO: 243797 - DNA, 15 bp, Homo sapiens
ggagttcccaaaacc

SEQ ID NO: 243798 - DNA, 15 bp, Homo sapiens
tggagttcccaaaac

SEQ ID NO: 243799 - DNA, 15 bp, Homo sapiens
gtggagttcccaaaa

SEQ ID NO: 243800 - DNA, 15 bp, Homo sapiens
agtggagttcccaaa

SEQ ID NO: 243801 - DNA, 15 bp, Homo sapiens
gagtggagttcccaa

SEQ ID NO: 243802 - DNA, 15 bp, Homo sapiens
agagtggagttccca

SEQ ID NO: 243803 - DNA, 15 bp, Homo sapiens
cagagtggagttccc

SEQ ID NO: 243804 - DNA, 15 bp, Homo sapiens
gcagagtggagttcc

SEQ ID NO: 243805 - DNA, 15 bp, Homo sapiens
ggcagagtggagttc

SEQ ID NO: 243806 - DNA, 15 bp, Homo sapiens
gggcagagtggagtt

SEQ ID NO: 243807 - DNA, 15 bp, Homo sapiens
tgggcagagtggagt

SEQ ID NO: 243808 - DNA, 15 bp, Homo sapiens
gtgggcagagtggag

SEQ ID NO: 243809 - DNA, 15 bp, Homo sapiens
ggtgggcagagtgga

SEQ ID NO: 243810 - DNA, 15 bp, Homo sapiens
gggtgggcagagtgg

SEQ ID NO: 243811 - DNA, 15 bp, Homo sapiens
agggtgggcagagtg

SEQ ID NO: 243812 - DNA, 15 bp, Homo sapiens
cagggtgggcagagt

SEQ ID NO: 243813 - DNA, 15 bp, Homo sapiens
acagggtgggcagag

SEQ ID NO: 243814 - DNA, 15 bp, Homo sapiens
cacagggtgggcaga

SEQ ID NO: 243815 - DNA, 15 bp, Homo sapiens
gcacagggtgggcag

SEQ ID NO: 243816 - DNA, 15 bp, Homo sapiens
tgcacagggtgggca

SEQ ID NO: 243817 - DNA, 15 bp, Homo sapiens
ttgcacagggtgggc

SEQ ID NO: 243818 - DNA, 15 bp, Homo sapiens
tttgcacagggtggg

SEQ ID NO: 243819 - DNA, 15 bp, Homo sapiens
ctttgcacagggtgg

SEQ ID NO: 243820 - DNA, 15 bp, Homo sapiens
cctttgcacagggtg

SEQ ID NO: 243821 - DNA, 15 bp, Homo sapiens
ccctttgcacagggt

SEQ ID NO: 243822 - DNA, 15 bp, Homo sapiens
gccctttgcacaggg

SEQ ID NO: 243823 - DNA, 15 bp, Homo sapiens
agccctttgcacagg

SEQ ID NO: 243824 - DNA, 15 bp, Homo sapiens
gagccctttgcacag

SEQ ID NO: 243825 - DNA, 15 bp, Homo sapiens
ggagccctttgcaca

SEQ ID NO: 243826 - DNA, 15 bp, Homo sapiens
aggagccctttgcac

SEQ ID NO: 243827 - DNA, 15 bp, Homo sapiens
aaggagccctttgca

SEQ ID NO: 243828 - DNA, 15 bp, Homo sapiens
aaaggagccctttgc

SEQ ID NO: 243829 - DNA, 15 bp, Homo sapiens
aaaaggagccctttg

SEQ ID NO: 243830 - DNA, 15 bp, Homo sapiens
aaaaaggagcccttt

SEQ ID NO: 243831 - DNA, 15 bp, Homo sapiens
aaaaaaggagccctt

SEQ ID NO: 243832 - DNA, 15 bp, Homo sapiens
gaaaaaaggagccct

SEQ ID NO: 243833 - DNA, 15 bp, Homo sapiens
tgaaaaaaggagccc

SEQ ID NO: 243834 - DNA, 15 bp, Homo sapiens
atgaaaaaaggagcc

SEQ ID NO: 243835 - DNA, 15 bp, Homo sapiens
aatgaaaaaaggagc

SEQ ID NO: 243836 - DNA, 15 bp, Homo sapiens
aaatgaaaaaaggag

SEQ ID NO: 243837 - DNA, 15 bp, Homo sapiens
aaaatgaaaaaagga

SEQ ID NO: 243838 - DNA, 15 bp, Homo sapiens
caaaatgaaaaaagg

SEQ ID NO: 243839 - DNA, 15 bp, Homo sapiens
tcaaaatgaaaaaag

SEQ ID NO: 243840 - DNA, 15 bp, Homo sapiens
ctcaaaatgaaaaaa

SEQ ID NO: 243841 - DNA, 15 bp, Homo sapiens
tctcaaaatgaaaaa

SEQ ID NO: 243842 - DNA, 15 bp, Homo sapiens
gtctcaaaatgaaaa

SEQ ID NO: 243843 - DNA, 15 bp, Homo sapiens
tgtctcaaaatgaaa

SEQ ID NO: 243844 - DNA, 15 bp, Homo sapiens
ctgtctcaaaatgaa

SEQ ID NO: 243845 - DNA, 15 bp, Homo sapiens
actgtctcaaaatga

SEQ ID NO: 243846 - DNA, 15 bp, Homo sapiens
gactgtctcaaaatg

SEQ ID NO: 243847 - DNA, 15 bp, Homo sapiens
agactgtctcaaaat

SEQ ID NO: 243848 - DNA, 15 bp, Homo sapiens
gagactgtctcaaaa

SEQ ID NO: 243849 - DNA, 15 bp, Homo sapiens
cgagactgtctcaaa

SEQ ID NO: 243850 - DNA, 15 bp, Homo sapiens
gcgagactgtctcaa

SEQ ID NO: 243851 - DNA, 15 bp, Homo sapiens
tgcgagactgtctca

SEQ ID NO: 243852 - DNA, 15 bp, Homo sapiens
gtgcgagactgtctc

SEQ ID NO: 243853 - DNA, 15 bp, Homo sapiens
cgtgcgagactgtct

SEQ ID NO: 243854 - DNA, 15 bp, Homo sapiens
ccgtgcgagactgtc

SEQ ID NO: 243855 - DNA, 15 bp, Homo sapiens
accgtgcgagactgt

SEQ ID NO: 243856 - DNA, 15 bp, Homo sapiens
gaccgtgcgagactg

SEQ ID NO: 243857 - DNA, 15 bp, Homo sapiens
cgaccgtgcgagact

SEQ ID NO: 243858 - DNA, 15 bp, Homo sapiens
gcgaccgtgcgagac

SEQ ID NO: 243859 - DNA, 15 bp, Homo sapiens
ggcgaccgtgcgaga

SEQ ID NO: 243860 - DNA, 15 bp, Homo sapiens
gggcgaccgtgcgag

SEQ ID NO: 243861 - DNA, 15 bp, Homo sapiens
tgggcgaccgtgcga

SEQ ID NO: 243862 - DNA, 15 bp, Homo sapiens
ctgggcgaccgtgcg

SEQ ID NO: 243863 - DNA, 15 bp, Homo sapiens
cctgggcgaccgtgc

SEQ ID NO: 243864 - DNA, 15 bp, Homo sapiens
gcctgggcgaccgtg

SEQ ID NO: 243865 - DNA, 15 bp, Homo sapiens
agcctgggcgaccgt

SEQ ID NO: 243866 - DNA, 15 bp, Homo sapiens
cagcctgggcgaccg

SEQ ID NO: 243867 - DNA, 15 bp, Homo sapiens
ccagcctgggcgacc

SEQ ID NO: 243868 - DNA, 15 bp, Homo sapiens
ttgcgctccagcctg

SEQ ID NO: 243869 - DNA, 15 bp, Homo sapiens
attgcgctccagcct

SEQ ID NO: 243870 - DNA, 15 bp, Homo sapiens
cattgcgctccagcc

SEQ ID NO: 243871 - DNA, 15 bp, Homo sapiens
ccattgcgctccagc

SEQ ID NO: 243872 - DNA, 15 bp, Homo sapiens
gccattgcgctccag

SEQ ID NO: 243873 - DNA, 15 bp, Homo sapiens
cgccattgcgctcca

SEQ ID NO: 243874 - DNA, 15 bp, Homo sapiens
gcgccattgcgctcc

SEQ ID NO: 243875 - DNA, 15 bp, Homo sapiens
cgcgccattgcgctc

SEQ ID NO: 243876 - DNA, 15 bp, Homo sapiens
tcgcgccattgcgct

SEQ ID NO: 243877 - DNA, 15 bp, Homo sapiens
atcgcgccattgcgc

SEQ ID NO: 243878 - DNA, 15 bp, Homo sapiens
gatcgcgccattgcg

SEQ ID NO: 243879 - DNA, 15 bp, Homo sapiens
gtgggcgcctgtaat

SEQ ID NO: 243880 - DNA, 15 bp, Homo sapiens
ggtgggcgcctgtaa

SEQ ID NO: 243881 - DNA, 15 bp, Homo sapiens
ttggtggtgggcgcc

SEQ ID NO: 243882 - DNA, 15 bp, Homo sapiens
cttggtggtgggcgc

SEQ ID NO: 243883 - DNA, 15 bp, Homo sapiens
gcttggtggtgggcg

SEQ ID NO: 243884 - DNA, 15 bp, Homo sapiens
ggcttggtggtgggc

SEQ ID NO: 243885 - DNA, 15 bp, Homo sapiens
gggcttggtggtggg

SEQ ID NO: 243886 - DNA, 15 bp, Homo sapiens
cgggcttggtggtgg

SEQ ID NO: 243887 - DNA, 15 bp, Homo sapiens
ccgggcttggtggtg

SEQ ID NO: 243888 - DNA, 15 bp, Homo sapiens
cccgggcttggtggt

SEQ ID NO: 243889 - DNA, 15 bp, Homo sapiens
acccgggcttggtgg

SEQ ID NO: 243890 - DNA, 15 bp, Homo sapiens
tacccgggcttggtg

SEQ ID NO: 243891 - DNA, 15 bp, Homo sapiens
ttacccgggcttggt

SEQ ID NO: 243892 - DNA, 15 bp, Homo sapiens
attacccgggcttgg

SEQ ID NO: 243893 - DNA, 15 bp, Homo sapiens
aattacccgggcttg

SEQ ID NO: 243894 - DNA, 15 bp, Homo sapiens
aaattacccgggctt

SEQ ID NO: 243895 - DNA, 15 bp, Homo sapiens
aaaattacccgggct

SEQ ID NO: 243896 - DNA, 15 bp, Homo sapiens
aaaaattacccgggc

SEQ ID NO: 243897 - DNA, 15 bp, Homo sapiens
aaaaaattacccggg

SEQ ID NO: 243898 - DNA, 15 bp, Homo sapiens
caaaaaattacccgg

SEQ ID NO: 243899 - DNA, 15 bp, Homo sapiens
acaaaaaattacccg

SEQ ID NO: 243900 - DNA, 15 bp, Homo sapiens
tacaaaaaattaccc

SEQ ID NO: 243901 - DNA, 15 bp, Homo sapiens
atacaaaaaattacc

SEQ ID NO: 243902 - DNA, 15 bp, Homo sapiens
catacaaaaaattac

SEQ ID NO: 243903 - DNA, 15 bp, Homo sapiens
acatacaaaaaatta

SEQ ID NO: 243904 - DNA, 15 bp, Homo sapiens
aacatacaaaaaatt

SEQ ID NO: 243905 - DNA, 15 bp, Homo sapiens
aaacatacaaaaaat

SEQ ID NO: 243906 - DNA, 15 bp, Homo sapiens
taaacatacaaaaaa

SEQ ID NO: 243907 - DNA, 15 bp, Homo sapiens
ctaaacatacaaaaa

SEQ ID NO: 243908 - DNA, 15 bp, Homo sapiens
actaaacatacaaaa

SEQ ID NO: 243909 - DNA, 15 bp, Homo sapiens
tactaaacatacaaa

SEQ ID NO: 243910 - DNA, 15 bp, Homo sapiens
ctactaaacatacaa

SEQ ID NO: 243911 - DNA, 15 bp, Homo sapiens
tctactaaacataca

SEQ ID NO: 243912 - DNA, 15 bp, Homo sapiens
ctctactaaacatac

SEQ ID NO: 243913 - DNA, 15 bp, Homo sapiens
tctctactaaacata

SEQ ID NO: 243914 - DNA, 15 bp, Homo sapiens
atctctactaaacat

SEQ ID NO: 243915 - DNA, 15 bp, Homo sapiens
catctctactaaaca

SEQ ID NO: 243916 - DNA, 15 bp, Homo sapiens
ccatctctactaaac

SEQ ID NO: 243917 - DNA, 15 bp, Homo sapiens
agtgaaaccccatct

SEQ ID NO: 243918 - DNA, 15 bp, Homo sapiens
tagtgaaaccccatc

SEQ ID NO: 243919 - DNA, 15 bp, Homo sapiens
atagtgaaaccccat

SEQ ID NO: 243920 - DNA, 15 bp, Homo sapiens
catagtgaaacccca

SEQ ID NO: 243921 - DNA, 15 bp, Homo sapiens
acatagtgaaacccc

SEQ ID NO: 243922 - DNA, 15 bp, Homo sapiens
gcctggccaacatag

SEQ ID NO: 243923 - DNA, 15 bp, Homo sapiens
agcctggccaacata

SEQ ID NO: 243924 - DNA, 15 bp, Homo sapiens
caccagcctggccaa

SEQ ID NO: 243925 - DNA, 15 bp, Homo sapiens
acaccagcctggcca

SEQ ID NO: 243926 - DNA, 15 bp, Homo sapiens
aacaccagcctggcc

SEQ ID NO: 243927 - DNA, 15 bp, Homo sapiens
caacaccagcctggc

SEQ ID NO: 243928 - DNA, 15 bp, Homo sapiens
tcaacaccagcctgg

SEQ ID NO: 243929 - DNA, 15 bp, Homo sapiens
ttcaacaccagcctg

SEQ ID NO: 243930 - DNA, 15 bp, Homo sapiens
gttcaacaccagcct

SEQ ID NO: 243931 - DNA, 15 bp, Homo sapiens
agttcaacaccagcc

SEQ ID NO: 243932 - DNA, 15 bp, Homo sapiens
gagttcaacaccagc

SEQ ID NO: 243933 - DNA, 15 bp, Homo sapiens
ggagttcaacaccag

SEQ ID NO: 243934 - DNA, 15 bp, Homo sapiens
aggagttcaacacca

SEQ ID NO: 243935 - DNA, 15 bp, Homo sapiens
caggagttcaacacc

SEQ ID NO: 243936 - DNA, 15 bp, Homo sapiens
tcaggagttcaacac

SEQ ID NO: 243937 - DNA, 15 bp, Homo sapiens
gtcaggagttcaaca

SEQ ID NO: 243938 - DNA, 15 bp, Homo sapiens
ggtcaggagttcaac

SEQ ID NO: 243939 - DNA, 15 bp, Homo sapiens
atgaggtcaggagtt

SEQ ID NO: 243940 - DNA, 15 bp, Homo sapiens
catgaggtcaggagt

SEQ ID NO: 243941 - DNA, 15 bp, Homo sapiens
tcatgaggtcaggag

SEQ ID NO: 243942 - DNA, 15 bp, Homo sapiens
atcatgaggtcagga

SEQ ID NO: 243943 - DNA, 15 bp, Homo sapiens
gatcatgaggtcagg

SEQ ID NO: 243944 - DNA, 15 bp, Homo sapiens
ggatcatgaggtcag

SEQ ID NO: 243945 - DNA, 15 bp, Homo sapiens
cggatcatgaggtca

SEQ ID NO: 243946 - DNA, 15 bp, Homo sapiens
gcggatcatgaggtc

SEQ ID NO: 243947 - DNA, 15 bp, Homo sapiens
ggcggatcatgaggt

SEQ ID NO: 243948 - DNA, 15 bp, Homo sapiens
gggcggatcatgagg

SEQ ID NO: 243949 - DNA, 15 bp, Homo sapiens
tgggcggatcatgag

SEQ ID NO: 243950 - DNA, 15 bp, Homo sapiens
gtgggcggatcatga

SEQ ID NO: 243951 - DNA, 15 bp, Homo sapiens
ggtgggcggatcatg

SEQ ID NO: 243952 - DNA, 15 bp, Homo sapiens
aggtgggcggatcat

SEQ ID NO: 243953 - DNA, 15 bp, Homo sapiens
cgaggtgggcggatc

SEQ ID NO: 243954 - DNA, 15 bp, Homo sapiens
ccgaggtgggcggat

SEQ ID NO: 243955 - DNA, 15 bp, Homo sapiens
gccgaggtgggcgga

SEQ ID NO: 243956 - DNA, 15 bp, Homo sapiens
ggccgaggtgggcgg

SEQ ID NO: 243957 - DNA, 15 bp, Homo sapiens
aggccgaggtgggcg

SEQ ID NO: 243958 - DNA, 15 bp, Homo sapiens
gtcacgcctgtaatc

SEQ ID NO: 243959 - DNA, 15 bp, Homo sapiens
ggtcacgcctgtaat

SEQ ID NO: 243960 - DNA, 15 bp, Homo sapiens
gggtcacgcctgtaa

SEQ ID NO: 243961 - DNA, 15 bp, Homo sapiens
tgggtcacgcctgta

SEQ ID NO: 243962 - DNA, 15 bp, Homo sapiens
gtgggtcacgcctgt

SEQ ID NO: 243963 - DNA, 15 bp, Homo sapiens
ggtgggtcacgcctg

SEQ ID NO: 243964 - DNA, 15 bp, Homo sapiens
gggtgggtcacgcct

SEQ ID NO: 243965 - DNA, 15 bp, Homo sapiens
ggggtgggtcacgcc

SEQ ID NO: 243966 - DNA, 15 bp, Homo sapiens
tggggtgggtcacgc

SEQ ID NO: 243967 - DNA, 15 bp, Homo sapiens
atggggtgggtcacg

SEQ ID NO: 243968 - DNA, 15 bp, Homo sapiens
catggggtgggtcac

SEQ ID NO: 243969 - DNA, 15 bp, Homo sapiens
tcatggggtgggtca

SEQ ID NO: 243970 - DNA, 15 bp, Homo sapiens
ttcatggggtgggtc

SEQ ID NO: 243971 - DNA, 15 bp, Homo sapiens
tttcatggggtgggt

SEQ ID NO: 243972 - DNA, 15 bp, Homo sapiens
ttttcatggggtggg

SEQ ID NO: 243973 - DNA, 15 bp, Homo sapiens
tttttcatggggtgg

SEQ ID NO: 243974 - DNA, 15 bp, Homo sapiens
ttttttcatggggtg

SEQ ID NO: 243975 - DNA, 15 bp, Homo sapiens
tttttttcatggggt

SEQ ID NO: 243976 - DNA, 15 bp, Homo sapiens
ttttttttcatgggg

SEQ ID NO: 243977 - DNA, 15 bp, Homo sapiens
attttttttcatggg

SEQ ID NO: 243978 - DNA, 15 bp, Homo sapiens
aattttttttcatgg

SEQ ID NO: 243979 - DNA, 15 bp, Homo sapiens
taattttttttcatg

SEQ ID NO: 243980 - DNA, 15 bp, Homo sapiens
ttaattttttttcat

SEQ ID NO: 243981 - DNA, 15 bp, Homo sapiens
tttaattttttttca

SEQ ID NO: 243982 - DNA, 15 bp, Homo sapiens
ttttaattttttttc

SEQ ID NO: 243983 - DNA, 15 bp, Homo sapiens
ttttttaattttttt

SEQ ID NO: 243984 - DNA, 15 bp, Homo sapiens
attttttaatttttt

SEQ ID NO: 243985 - DNA, 15 bp, Homo sapiens
cattttttaattttt

SEQ ID NO: 243986 - DNA, 15 bp, Homo sapiens
tcattttttaatttt

SEQ ID NO: 243987 - DNA, 15 bp, Homo sapiens
ttcattttttaattt

SEQ ID NO: 243988 - DNA, 15 bp, Homo sapiens
cttcattttttaatt

SEQ ID NO: 243989 - DNA, 15 bp, Homo sapiens
gcttcattttttaat

SEQ ID NO: 243990 - DNA, 15 bp, Homo sapiens
cgcttcattttttaa

SEQ ID NO: 243991 - DNA, 15 bp, Homo sapiens
tcgcttcatttttta

SEQ ID NO: 243992 - DNA, 15 bp, Homo sapiens
atcgcttcatttttt

SEQ ID NO: 243993 - DNA, 15 bp, Homo sapiens
catcgcttcattttt

SEQ ID NO: 243994 - DNA, 15 bp, Homo sapiens
gcatcgcttcatttt

SEQ ID NO: 243995 - DNA, 15 bp, Homo sapiens
agcatcgcttcattt

SEQ ID NO: 243996 - DNA, 15 bp, Homo sapiens
cagcatcgcttcatt

SEQ ID NO: 243997 - DNA, 15 bp, Homo sapiens
ccagcatcgcttcat

SEQ ID NO: 243998 - DNA, 15 bp, Homo sapiens
cccagcatcgcttca

SEQ ID NO: 243999 - DNA, 15 bp, Homo sapiens
gcccagcatcgcttc

SEQ ID NO: 244000 - DNA, 15 bp, Homo sapiens
cgcccagcatcgctt

SEQ ID NO: 244001 - DNA, 15 bp, Homo sapiens
gcgcccagcatcgct

SEQ ID NO: 244002 - DNA, 15 bp, Homo sapiens
cgcgcccagcatcgc

SEQ ID NO: 244003 - DNA, 15 bp, Homo sapiens
ccgcgcccagcatcg

SEQ ID NO: 244004 - DNA, 15 bp, Homo sapiens
accgcgcccagcatc

SEQ ID NO: 244005 - DNA, 15 bp, Homo sapiens
caccgcgcccagcat

SEQ ID NO: 244006 - DNA, 15 bp, Homo sapiens
ccaccgcgcccagca

SEQ ID NO: 244007 - DNA, 15 bp, Homo sapiens
tccaccgcgcccagc

SEQ ID NO: 244008 - DNA, 15 bp, Homo sapiens
atccaccgcgcccag

SEQ ID NO: 244009 - DNA, 15 bp, Homo sapiens
gatccaccgcgccca

SEQ ID NO: 244010 - DNA, 15 bp, Homo sapiens
tgatccaccgcgccc

SEQ ID NO: 244011 - DNA, 15 bp, Homo sapiens
gtgatccaccgcgcc

SEQ ID NO: 244012 - DNA, 15 bp, Homo sapiens
cgtgatccaccgcgc

SEQ ID NO: 244013 - DNA, 15 bp, Homo sapiens
gcgtgatccaccgcg

SEQ ID NO: 244014 - DNA, 15 bp, Homo sapiens
ggcgtgatccaccgc

SEQ ID NO: 244015 - DNA, 15 bp, Homo sapiens
aggcgtgatccaccg

SEQ ID NO: 244016 - DNA, 15 bp, Homo sapiens
caggcgtgatccacc

SEQ ID NO: 244017 - DNA, 15 bp, Homo sapiens
acaggcgtgatccac

SEQ ID NO: 244018 - DNA, 15 bp, Homo sapiens
tacaggcgtgatcca

SEQ ID NO: 244019 - DNA, 15 bp, Homo sapiens
ttacaggcgtgatcc

SEQ ID NO: 244020 - DNA, 15 bp, Homo sapiens
attacaggcgtgatc

SEQ ID NO: 244021 - DNA, 15 bp, Homo sapiens
gattacaggcgtgat

SEQ ID NO: 244022 - DNA, 15 bp, Homo sapiens
gcctcagcttcccaa

SEQ ID NO: 244023 - DNA, 15 bp, Homo sapiens
tgcctcagcttccca

SEQ ID NO: 244024 - DNA, 15 bp, Homo sapiens
ctgcctcagcttccc

SEQ ID NO: 244025 - DNA, 15 bp, Homo sapiens
cctgcctcagcttcc

SEQ ID NO: 244026 - DNA, 15 bp, Homo sapiens
gcctgcctcagcttc

SEQ ID NO: 244027 - DNA, 15 bp, Homo sapiens
tgcctgcctcagctt

SEQ ID NO: 244028 - DNA, 15 bp, Homo sapiens
ctgcctgcctcagct

SEQ ID NO: 244029 - DNA, 15 bp, Homo sapiens
cgtgatctgcctgcc

SEQ ID NO: 244030 - DNA, 15 bp, Homo sapiens
tcgtgatctgcctgc

SEQ ID NO: 244031 - DNA, 15 bp, Homo sapiens
ctcgtgatctgcctg

SEQ ID NO: 244032 - DNA, 15 bp, Homo sapiens
cctcgtgatctgcct

SEQ ID NO: 244033 - DNA, 15 bp, Homo sapiens
ccctcgtgatctgcc

SEQ ID NO: 244034 - DNA, 15 bp, Homo sapiens
gccctcgtgatctgc

SEQ ID NO: 244035 - DNA, 15 bp, Homo sapiens
tgccctcgtgatctg

SEQ ID NO: 244036 - DNA, 15 bp, Homo sapiens
ctgccctcgtgatct

SEQ ID NO: 244037 - DNA, 15 bp, Homo sapiens
cctgccctcgtgatc

SEQ ID NO: 244038 - DNA, 15 bp, Homo sapiens
tcctgccctcgtgat

SEQ ID NO: 244039 - DNA, 15 bp, Homo sapiens
ctcctgccctcgtga

SEQ ID NO: 244040 - DNA, 15 bp, Homo sapiens
tctcctgccctcgtg

SEQ ID NO: 244041 - DNA, 15 bp, Homo sapiens
atctcctgccctcgt

SEQ ID NO: 244042 - DNA, 15 bp, Homo sapiens
aatctcctgccctcg

SEQ ID NO: 244043 - DNA, 15 bp, Homo sapiens
caatctcctgccctc

SEQ ID NO: 244044 - DNA, 15 bp, Homo sapiens
tcaatctcctgccct

SEQ ID NO: 244045 - DNA, 15 bp, Homo sapiens
ctcaatctcctgccc

SEQ ID NO: 244046 - DNA, 15 bp, Homo sapiens
tctcaatctcctgcc

SEQ ID NO: 244047 - DNA, 15 bp, Homo sapiens
gtctcaatctcctgc

SEQ ID NO: 244048 - DNA, 15 bp, Homo sapiens
ggtctcaatctcctg

SEQ ID NO: 244049 - DNA, 15 bp, Homo sapiens
tggtctcaatctcct

SEQ ID NO: 244050 - DNA, 15 bp, Homo sapiens
atggtctcaatctcc

SEQ ID NO: 244051 - DNA, 15 bp, Homo sapiens
gatggtctcaatctc

SEQ ID NO: 244052 - DNA, 15 bp, Homo sapiens
ggatggtctcaatct

SEQ ID NO: 244053 - DNA, 15 bp, Homo sapiens
aggatggtctcaatc

SEQ ID NO: 244054 - DNA, 15 bp, Homo sapiens
caggatggtctcaat

SEQ ID NO: 244055 - DNA, 15 bp, Homo sapiens
ccaggatggtctcaa

SEQ ID NO: 244056 - DNA, 15 bp, Homo sapiens
gccaggatggtctca

SEQ ID NO: 244057 - DNA, 15 bp, Homo sapiens
attagccaggatggt

SEQ ID NO: 244058 - DNA, 15 bp, Homo sapiens
tattagccaggatgg

SEQ ID NO: 244059 - DNA, 15 bp, Homo sapiens
gtattagccaggatg

SEQ ID NO: 244060 - DNA, 15 bp, Homo sapiens
cgtattagccaggat

SEQ ID NO: 244061 - DNA, 15 bp, Homo sapiens
ccgtattagccagga

SEQ ID NO: 244062 - DNA, 15 bp, Homo sapiens
accgtattagccagg

SEQ ID NO: 244063 - DNA, 15 bp, Homo sapiens
caccgtattagccag

SEQ ID NO: 244064 - DNA, 15 bp, Homo sapiens
tcaccgtattagcca

SEQ ID NO: 244065 - DNA, 15 bp, Homo sapiens
ttcaccgtattagcc

SEQ ID NO: 244066 - DNA, 15 bp, Homo sapiens
tttcaccgtattagc

SEQ ID NO: 244067 - DNA, 15 bp, Homo sapiens
gtttcaccgtattag

SEQ ID NO: 244068 - DNA, 15 bp, Homo sapiens
ggtttcaccgtatta

SEQ ID NO: 244069 - DNA, 15 bp, Homo sapiens
gggtttcaccgtatt

SEQ ID NO: 244070 - DNA, 15 bp, Homo sapiens
ggggtttcaccgtat

SEQ ID NO: 244071 - DNA, 15 bp, Homo sapiens
tggggtttcaccgta

SEQ ID NO: 244072 - DNA, 15 bp, Homo sapiens
gttttagtagagatg

SEQ ID NO: 244073 - DNA, 15 bp, Homo sapiens
agttttagtagagat

SEQ ID NO: 244074 - DNA, 15 bp, Homo sapiens
tagttttagtagaga

SEQ ID NO: 244075 - DNA, 15 bp, Homo sapiens
gtagttttagtagag

SEQ ID NO: 244076 - DNA, 15 bp, Homo sapiens
tgtagttttagtaga

SEQ ID NO: 244077 - DNA, 15 bp, Homo sapiens
ttgtagttttagtag

SEQ ID NO: 244078 - DNA, 15 bp, Homo sapiens
tttgtagttttagta

SEQ ID NO: 244079 - DNA, 15 bp, Homo sapiens
ttttgtagttttagt

SEQ ID NO: 244080 - DNA, 15 bp, Homo sapiens
tttttgtagttttag

SEQ ID NO: 244081 - DNA, 15 bp, Homo sapiens
ttttttgtagtttta

SEQ ID NO: 244082 - DNA, 15 bp, Homo sapiens
attttttgtagtttt

SEQ ID NO: 244083 - DNA, 15 bp, Homo sapiens
aattttttgtagttt

SEQ ID NO: 244084 - DNA, 15 bp, Homo sapiens
taattttttgtagtt

SEQ ID NO: 244085 - DNA, 15 bp, Homo sapiens
ctaattttttgtagt

SEQ ID NO: 244086 - DNA, 15 bp, Homo sapiens
gctaattttttgtag

SEQ ID NO: 244087 - DNA, 15 bp, Homo sapiens
cggctaattttttgt

SEQ ID NO: 244088 - DNA, 15 bp, Homo sapiens
ccggctaattttttg

SEQ ID NO: 244089 - DNA, 15 bp, Homo sapiens
cccggctaatttttt

SEQ ID NO: 244090 - DNA, 15 bp, Homo sapiens
ccaccacacccggct

SEQ ID NO: 244091 - DNA, 15 bp, Homo sapiens
gccaccacacccggc

SEQ ID NO: 244092 - DNA, 15 bp, Homo sapiens
tgccaccacacccgg

SEQ ID NO: 244093 - DNA, 15 bp, Homo sapiens
ctgccaccacacccg

SEQ ID NO: 244094 - DNA, 15 bp, Homo sapiens
cctgccaccacaccc

SEQ ID NO: 244095 - DNA, 15 bp, Homo sapiens
gcctgccaccacacc

SEQ ID NO: 244096 - DNA, 15 bp, Homo sapiens
tgcctgccaccacac

SEQ ID NO: 244097 - DNA, 15 bp, Homo sapiens
gtgcctgccaccaca

SEQ ID NO: 244098 - DNA, 15 bp, Homo sapiens
ggtgcctgccaccac

SEQ ID NO: 244099 - DNA, 15 bp, Homo sapiens
aggtgcctgccacca

SEQ ID NO: 244100 - DNA, 15 bp, Homo sapiens
caggtgcctgccacc

SEQ ID NO: 244101 - DNA, 15 bp, Homo sapiens
acaggtgcctgccac

SEQ ID NO: 244102 - DNA, 15 bp, Homo sapiens
cacaggtgcctgcca

SEQ ID NO: 244103 - DNA, 15 bp, Homo sapiens
tcacaggtgcctgcc

SEQ ID NO: 244104 - DNA, 15 bp, Homo sapiens
atcacaggtgcctgc

SEQ ID NO: 244105 - DNA, 15 bp, Homo sapiens
gatcacaggtgcctg

SEQ ID NO: 244106 - DNA, 15 bp, Homo sapiens
ggatcacaggtgcct

SEQ ID NO: 244107 - DNA, 15 bp, Homo sapiens
gggatcacaggtgcc

SEQ ID NO: 244108 - DNA, 15 bp, Homo sapiens
tgggatcacaggtgc

SEQ ID NO: 244109 - DNA, 15 bp, Homo sapiens
ctgggatcacaggtg

SEQ ID NO: 244110 - DNA, 15 bp, Homo sapiens
gctgggatcacaggt

SEQ ID NO: 244111 - DNA, 15 bp, Homo sapiens
agctgggatcacagg

SEQ ID NO: 244112 - DNA, 15 bp, Homo sapiens
tagctgggatcacag

SEQ ID NO: 244113 - DNA, 15 bp, Homo sapiens
gtagctgggatcaca

SEQ ID NO: 244114 - DNA, 15 bp, Homo sapiens
agtagctgggatcac

SEQ ID NO: 244115 - DNA, 15 bp, Homo sapiens
gagtagctgggatca

SEQ ID NO: 244116 - DNA, 15 bp, Homo sapiens
tgagtagctgggatc

SEQ ID NO: 244117 - DNA, 15 bp, Homo sapiens
ctgagtagctgggat

SEQ ID NO: 244118 - DNA, 15 bp, Homo sapiens
tgggttcaagcgatt

SEQ ID NO: 244119 - DNA, 15 bp, Homo sapiens
ctgggttcaagcgat

SEQ ID NO: 244120 - DNA, 15 bp, Homo sapiens
cctgggttcaagcga

SEQ ID NO: 244121 - DNA, 15 bp, Homo sapiens
tcctgggttcaagcg

SEQ ID NO: 244122 - DNA, 15 bp, Homo sapiens
ctcctgggttcaagc

SEQ ID NO: 244123 - DNA, 15 bp, Homo sapiens
cctcctgggttcaag

SEQ ID NO: 244124 - DNA, 15 bp, Homo sapiens
acctcctgggttcaa

SEQ ID NO: 244125 - DNA, 15 bp, Homo sapiens
cacctcctgggttca

SEQ ID NO: 244126 - DNA, 15 bp, Homo sapiens
ccacctcctgggttc

SEQ ID NO: 244127 - DNA, 15 bp, Homo sapiens
tccacctcctgggtt

SEQ ID NO: 244128 - DNA, 15 bp, Homo sapiens
ctccacctcctgggt

SEQ ID NO: 244129 - DNA, 15 bp, Homo sapiens
cctccacctcctggg

SEQ ID NO: 244130 - DNA, 15 bp, Homo sapiens
acctccacctcctgg

SEQ ID NO: 244131 - DNA, 15 bp, Homo sapiens
aacctccacctcctg

SEQ ID NO: 244132 - DNA, 15 bp, Homo sapiens
caacctccacctcct

SEQ ID NO: 244133 - DNA, 15 bp, Homo sapiens
gcaacctccacctcc

SEQ ID NO: 244134 - DNA, 15 bp, Homo sapiens
tgcaacctccacctc

SEQ ID NO: 244135 - DNA, 15 bp, Homo sapiens
ctgcaacctccacct

SEQ ID NO: 244136 - DNA, 15 bp, Homo sapiens
actgcaacctccacc

SEQ ID NO: 244137 - DNA, 15 bp, Homo sapiens
cactgcaacctccac

SEQ ID NO: 244138 - DNA, 15 bp, Homo sapiens
tcactgcaacctcca

SEQ ID NO: 244139 - DNA, 15 bp, Homo sapiens
ccggctcactgcaac

SEQ ID NO: 244140 - DNA, 15 bp, Homo sapiens
cccggctcactgcaa

SEQ ID NO: 244141 - DNA, 15 bp, Homo sapiens
tcccggctcactgca

SEQ ID NO: 244142 - DNA, 15 bp, Homo sapiens
atcccggctcactgc

SEQ ID NO: 244143 - DNA, 15 bp, Homo sapiens
gatcccggctcactg

SEQ ID NO: 244144 - DNA, 15 bp, Homo sapiens
tgatcccggctcact

SEQ ID NO: 244145 - DNA, 15 bp, Homo sapiens
gtgatcccggctcac

SEQ ID NO: 244146 - DNA, 15 bp, Homo sapiens
tgtgatcccggctca

SEQ ID NO: 244147 - DNA, 15 bp, Homo sapiens
gtgtgatcccggctc

SEQ ID NO: 244148 - DNA, 15 bp, Homo sapiens
ggtgtgatcccggct

SEQ ID NO: 244149 - DNA, 15 bp, Homo sapiens
tggtgtgatcccggc

SEQ ID NO: 244150 - DNA, 15 bp, Homo sapiens
atggtgtgatcccgg

SEQ ID NO: 244151 - DNA, 15 bp, Homo sapiens
aatggtgtgatcccg

SEQ ID NO: 244152 - DNA, 15 bp, Homo sapiens
caatggtgtgatccc

SEQ ID NO: 244153 - DNA, 15 bp, Homo sapiens
gcaatggtgtgatcc

SEQ ID NO: 244154 - DNA, 15 bp, Homo sapiens
tgcaatggtgtgatc

SEQ ID NO: 244155 - DNA, 15 bp, Homo sapiens
gtgcaatggtgtgat

SEQ ID NO: 244156 - DNA, 15 bp, Homo sapiens
agtgcaatggtgtga

SEQ ID NO: 244157 - DNA, 15 bp, Homo sapiens
gagtgcaatggtgtg

SEQ ID NO: 244158 - DNA, 15 bp, Homo sapiens
ggagtgcaatggtgt

SEQ ID NO: 244159 - DNA, 15 bp, Homo sapiens
tggagtgcaatggtg

SEQ ID NO: 244160 - DNA, 15 bp, Homo sapiens
gagacagagtctcac

SEQ ID NO: 244161 - DNA, 15 bp, Homo sapiens
cgctttttttttttt

SEQ ID NO: 244162 - DNA, 15 bp, Homo sapiens
tcgcttttttttttt

SEQ ID NO: 244163 - DNA, 15 bp, Homo sapiens
ttcgctttttttttt

SEQ ID NO: 244164 - DNA, 15 bp, Homo sapiens
attcgcttttttttt

SEQ ID NO: 244165 - DNA, 15 bp, Homo sapiens
aattcgctttttttt

SEQ ID NO: 244166 - DNA, 15 bp, Homo sapiens
gaattcgcttttttt

SEQ ID NO: 244167 - DNA, 15 bp, Homo sapiens
agaattcgctttttt

SEQ ID NO: 244168 - DNA, 15 bp, Homo sapiens
cagaattcgcttttt

SEQ ID NO: 244169 - DNA, 15 bp, Homo sapiens
tcagaattcgctttt

SEQ ID NO: 244170 - DNA, 15 bp, Homo sapiens
ttcagaattcgcttt

SEQ ID NO: 244171 - DNA, 15 bp, Homo sapiens
tttcagaattcgctt

SEQ ID NO: 244172 - DNA, 15 bp, Homo sapiens
atttcagaattcgct

SEQ ID NO: 244173 - DNA, 15 bp, Homo sapiens
tatttcagaattcgc

SEQ ID NO: 244174 - DNA, 15 bp, Homo sapiens
gtatttcagaattcg

SEQ ID NO: 244175 - DNA, 15 bp, Homo sapiens
tgtatttcagaattc

SEQ ID NO: 244176 - DNA, 15 bp, Homo sapiens
atgtatttcagaatt

SEQ ID NO: 244177 - DNA, 15 bp, Homo sapiens
catgtatttcagaat

SEQ ID NO: 244178 - DNA, 15 bp, Homo sapiens
tcatgtatttcagaa

SEQ ID NO: 244179 - DNA, 15 bp, Homo sapiens
ttcatgtatttcaga

SEQ ID NO: 244180 - DNA, 15 bp, Homo sapiens
attcatgtatttcag

SEQ ID NO: 244181 - DNA, 15 bp, Homo sapiens
aattcatgtatttca

SEQ ID NO: 244182 - DNA, 15 bp, Homo sapiens
gaattcatgtatttc

SEQ ID NO: 244183 - DNA, 15 bp, Homo sapiens
agaattcatgtattt

SEQ ID NO: 244184 - DNA, 15 bp, Homo sapiens
aagaattcatgtatt

SEQ ID NO: 244185 - DNA, 15 bp, Homo sapiens
aaagaattcatgtat

SEQ ID NO: 244186 - DNA, 15 bp, Homo sapiens
aaaagaattcatgta

SEQ ID NO: 244187 - DNA, 15 bp, Homo sapiens
gaaaagaattcatgt

SEQ ID NO: 244188 - DNA, 15 bp, Homo sapiens
ggaaaagaattcatg

SEQ ID NO: 244189 - DNA, 15 bp, Homo sapiens
aggaaaagaattcat

SEQ ID NO: 244190 - DNA, 15 bp, Homo sapiens
aaggaaaagaattca

SEQ ID NO: 244191 - DNA, 15 bp, Homo sapiens
taaggaaaagaattc

SEQ ID NO: 244192 - DNA, 15 bp, Homo sapiens
ctaaggaaaagaatt

SEQ ID NO: 244193 - DNA, 15 bp, Homo sapiens
tctaaggaaaagaat

SEQ ID NO: 244194 - DNA, 15 bp, Homo sapiens
atctaaggaaaagaa

SEQ ID NO: 244195 - DNA, 15 bp, Homo sapiens
catctaaggaaaaga

SEQ ID NO: 244196 - DNA, 15 bp, Homo sapiens
gcatctaaggaaaag

SEQ ID NO: 244197 - DNA, 15 bp, Homo sapiens
ggcatctaaggaaaa

SEQ ID NO: 244198 - DNA, 15 bp, Homo sapiens
aggcatctaaggaaa

SEQ ID NO: 244199 - DNA, 15 bp, Homo sapiens
caggcatctaaggaa

SEQ ID NO: 244200 - DNA, 15 bp, Homo sapiens
gcaggcatctaagga

SEQ ID NO: 244201 - DNA, 15 bp, Homo sapiens
agcaggcatctaagg

SEQ ID NO: 244202 - DNA, 15 bp, Homo sapiens
aagcaggcatctaag

SEQ ID NO: 244203 - DNA, 15 bp, Homo sapiens
gaagcaggcatctaa

SEQ ID NO: 244204 - DNA, 15 bp, Homo sapiens
agaagcaggcatcta

SEQ ID NO: 244205 - DNA, 15 bp, Homo sapiens
cagaagcaggcatct

SEQ ID NO: 244206 - DNA, 15 bp, Homo sapiens
acagaagcaggcatc

SEQ ID NO: 244207 - DNA, 15 bp, Homo sapiens
gacagaagcaggcat

SEQ ID NO: 244208 - DNA, 15 bp, Homo sapiens
agacagaagcaggca

SEQ ID NO: 244209 - DNA, 15 bp, Homo sapiens
aagacagaagcaggc

SEQ ID NO: 244210 - DNA, 15 bp, Homo sapiens
caagacagaagcagg

SEQ ID NO: 244211 - DNA, 15 bp, Homo sapiens
tcaagacagaagcag

SEQ ID NO: 244212 - DNA, 15 bp, Homo sapiens
ctcaagacagaagca

SEQ ID NO: 244213 - DNA, 15 bp, Homo sapiens
cctcaagacagaagc

SEQ ID NO: 244214 - DNA, 15 bp, Homo sapiens
acctcaagacagaag

SEQ ID NO: 244215 - DNA, 15 bp, Homo sapiens
aacctcaagacagaa

SEQ ID NO: 244216 - DNA, 15 bp, Homo sapiens
aaacctcaagacaga

SEQ ID NO: 244217 - DNA, 15 bp, Homo sapiens
caaacctcaagacag

SEQ ID NO: 244218 - DNA, 15 bp, Homo sapiens
acaaacctcaagaca

SEQ ID NO: 244219 - DNA, 15 bp, Homo sapiens
aacaaacctcaagac

SEQ ID NO: 244220 - DNA, 15 bp, Homo sapiens
caacaaacctcaaga

SEQ ID NO: 244221 - DNA, 15 bp, Homo sapiens
acaacaaacctcaag

SEQ ID NO: 244222 - DNA, 15 bp, Homo sapiens
aacaacaaacctcaa

SEQ ID NO: 244223 - DNA, 15 bp, Homo sapiens
caacaacaaacctca

SEQ ID NO: 244224 - DNA, 15 bp, Homo sapiens
acaacaacaaacctc

SEQ ID NO: 244225 - DNA, 15 bp, Homo sapiens
aacaacaacaaacct

SEQ ID NO: 244226 - DNA, 15 bp, Homo sapiens
taacaacaacaaacc

SEQ ID NO: 244227 - DNA, 15 bp, Homo sapiens
ataacaacaacaaac

SEQ ID NO: 244228 - DNA, 15 bp, Homo sapiens
aataacaacaacaaa

SEQ ID NO: 244229 - DNA, 15 bp, Homo sapiens
aaataacaacaacaa

SEQ ID NO: 244230 - DNA, 15 bp, Homo sapiens
gaaataacaacaaca

SEQ ID NO: 244231 - DNA, 15 bp, Homo sapiens
cgaaataacaacaac

SEQ ID NO: 244232 - DNA, 15 bp, Homo sapiens
tcgaaataacaacaa

SEQ ID NO: 244233 - DNA, 15 bp, Homo sapiens
ttcgaaataacaaca

SEQ ID NO: 244234 - DNA, 15 bp, Homo sapiens
tttcgaaataacaac

SEQ ID NO: 244235 - DNA, 15 bp, Homo sapiens
gtttcgaaataacaa

SEQ ID NO: 244236 - DNA, 15 bp, Homo sapiens
tgtttcgaaataaca

SEQ ID NO: 244237 - DNA, 15 bp, Homo sapiens
ctgtttcgaaataac

SEQ ID NO: 244238 - DNA, 15 bp, Homo sapiens
tctgtttcgaaataa

SEQ ID NO: 244239 - DNA, 15 bp, Homo sapiens
ctctgtttcgaaata

SEQ ID NO: 244240 - DNA, 15 bp, Homo sapiens
actctgtttcgaaat

SEQ ID NO: 244241 - DNA, 15 bp, Homo sapiens
gactctgtttcgaaa

SEQ ID NO: 244242 - DNA, 15 bp, Homo sapiens
agactctgtttcgaa

SEQ ID NO: 244243 - DNA, 15 bp, Homo sapiens
aagactctgtttcga

SEQ ID NO: 244244 - DNA, 15 bp, Homo sapiens
caagactctgtttcg

SEQ ID NO: 244245 - DNA, 15 bp, Homo sapiens
gcaagactctgtttc

SEQ ID NO: 244246 - DNA, 15 bp, Homo sapiens
agcaagactctgttt

SEQ ID NO: 244247 - DNA, 15 bp, Homo sapiens
gagcaagactctgtt

SEQ ID NO: 244248 - DNA, 15 bp, Homo sapiens
agagcaagactctgt

SEQ ID NO: 244249 - DNA, 15 bp, Homo sapiens
cagagcaagactctg

SEQ ID NO: 244250 - DNA, 15 bp, Homo sapiens
acagagcaagactct

SEQ ID NO: 244251 - DNA, 15 bp, Homo sapiens
gacagagcaagactc

SEQ ID NO: 244252 - DNA, 15 bp, Homo sapiens
cgacagagcaagact

SEQ ID NO: 244253 - DNA, 15 bp, Homo sapiens
gcgacagagcaagac

SEQ ID NO: 244254 - DNA, 15 bp, Homo sapiens
agcgacagagcaaga

SEQ ID NO: 244255 - DNA, 15 bp, Homo sapiens
gagcgacagagcaag

SEQ ID NO: 244256 - DNA, 15 bp, Homo sapiens
tgagcgacagagcaa

SEQ ID NO: 244257 - DNA, 15 bp, Homo sapiens
ctgagcgacagagca

SEQ ID NO: 244258 - DNA, 15 bp, Homo sapiens
cctgagcgacagagc

SEQ ID NO: 244259 - DNA, 15 bp, Homo sapiens
gcctgagcgacagag

SEQ ID NO: 244260 - DNA, 15 bp, Homo sapiens
agcctgagcgacaga

SEQ ID NO: 244261 - DNA, 15 bp, Homo sapiens
ccagcctgagcgaca

SEQ ID NO: 244262 - DNA, 15 bp, Homo sapiens
tccagcctgagcgac

SEQ ID NO: 244263 - DNA, 15 bp, Homo sapiens
ctccagcctgagcga

SEQ ID NO: 244264 - DNA, 15 bp, Homo sapiens
actccagcctgagcg

SEQ ID NO: 244265 - DNA, 15 bp, Homo sapiens
cactccagcctgagc

SEQ ID NO: 244266 - DNA, 15 bp, Homo sapiens
gcactccagcctgag

SEQ ID NO: 244267 - DNA, 15 bp, Homo sapiens
tgcactccagcctga

SEQ ID NO: 244268 - DNA, 15 bp, Homo sapiens
ggtgagccaagatca

SEQ ID NO: 244269 - DNA, 15 bp, Homo sapiens
tggtgagccaagatc

SEQ ID NO: 244270 - DNA, 15 bp, Homo sapiens
gttgtggtgagccaa

SEQ ID NO: 244271 - DNA, 15 bp, Homo sapiens
ggttgtggtgagcca

SEQ ID NO: 244272 - DNA, 15 bp, Homo sapiens
aggttgtggtgagcc

SEQ ID NO: 244273 - DNA, 15 bp, Homo sapiens
gaggttgtggtgagc

SEQ ID NO: 244274 - DNA, 15 bp, Homo sapiens
ggaggttgtggtgag

SEQ ID NO: 244275 - DNA, 15 bp, Homo sapiens
cggaggttgtggtga

SEQ ID NO: 244276 - DNA, 15 bp, Homo sapiens
ccggaggttgtggtg

SEQ ID NO: 244277 - DNA, 15 bp, Homo sapiens
gccggaggttgtggt

SEQ ID NO: 244278 - DNA, 15 bp, Homo sapiens
agccggaggttgtgg

SEQ ID NO: 244279 - DNA, 15 bp, Homo sapiens
gagccggaggttgtg

SEQ ID NO: 244280 - DNA, 15 bp, Homo sapiens
ggagccggaggttgt

SEQ ID NO: 244281 - DNA, 15 bp, Homo sapiens
gggagccggaggttg

SEQ ID NO: 244282 - DNA, 15 bp, Homo sapiens
tgggagccggaggtt

SEQ ID NO: 244283 - DNA, 15 bp, Homo sapiens
ctgggagccggaggt

SEQ ID NO: 244284 - DNA, 15 bp, Homo sapiens
cctgggagccggagg

SEQ ID NO: 244285 - DNA, 15 bp, Homo sapiens
acctgggagccggag

SEQ ID NO: 244286 - DNA, 15 bp, Homo sapiens
aacctgggagccgga

SEQ ID NO: 244287 - DNA, 15 bp, Homo sapiens
gaacctgggagccgg

SEQ ID NO: 244288 - DNA, 15 bp, Homo sapiens
tgaacctgggagccg

SEQ ID NO: 244289 - DNA, 15 bp, Homo sapiens
ttgaacctgggagcc

SEQ ID NO: 244290 - DNA, 15 bp, Homo sapiens
cttgaacctgggagc

SEQ ID NO: 244291 - DNA, 15 bp, Homo sapiens
agaagaatcgcttga

SEQ ID NO: 244292 - DNA, 15 bp, Homo sapiens
cagaagaatcgcttg

SEQ ID NO: 244293 - DNA, 15 bp, Homo sapiens
gcagaagaatcgctt

SEQ ID NO: 244294 - DNA, 15 bp, Homo sapiens
ggcagaagaatcgct

SEQ ID NO: 244295 - DNA, 15 bp, Homo sapiens
aggcagaagaatcgc

SEQ ID NO: 244296 - DNA, 15 bp, Homo sapiens
gaggcagaagaatcg

SEQ ID NO: 244297 - DNA, 15 bp, Homo sapiens
tgaggcagaagaatc

SEQ ID NO: 244298 - DNA, 15 bp, Homo sapiens
ctgaggcagaagaat

SEQ ID NO: 244299 - DNA, 15 bp, Homo sapiens
gctgaggcagaagaa

SEQ ID NO: 244300 - DNA, 15 bp, Homo sapiens
ggctgaggcagaaga

SEQ ID NO: 244301 - DNA, 15 bp, Homo sapiens
aggctgaggcagaag

SEQ ID NO: 244302 - DNA, 15 bp, Homo sapiens
gaggctgaggcagaa

SEQ ID NO: 244303 - DNA, 15 bp, Homo sapiens
ggaggctgaggcaga

SEQ ID NO: 244304 - DNA, 15 bp, Homo sapiens
gctgtaatcccagct

SEQ ID NO: 244305 - DNA, 15 bp, Homo sapiens
agctgtaatcccagc

SEQ ID NO: 244306 - DNA, 15 bp, Homo sapiens
cagctgtaatcccag

SEQ ID NO: 244307 - DNA, 15 bp, Homo sapiens
tcagctgtaatccca

SEQ ID NO: 244308 - DNA, 15 bp, Homo sapiens
ttcagctgtaatccc

SEQ ID NO: 244309 - DNA, 15 bp, Homo sapiens
attcagctgtaatcc

SEQ ID NO: 244310 - DNA, 15 bp, Homo sapiens
cattcagctgtaatc

SEQ ID NO: 244311 - DNA, 15 bp, Homo sapiens
gcattcagctgtaat

SEQ ID NO: 244312 - DNA, 15 bp, Homo sapiens
ggcattcagctgtaa

SEQ ID NO: 244313 - DNA, 15 bp, Homo sapiens
tggcattcagctgta

SEQ ID NO: 244314 - DNA, 15 bp, Homo sapiens
gtggcattcagctgt

SEQ ID NO: 244315 - DNA, 15 bp, Homo sapiens
ggtggcattcagctg

SEQ ID NO: 244316 - DNA, 15 bp, Homo sapiens
aggtggcattcagct

SEQ ID NO: 244317 - DNA, 15 bp, Homo sapiens
aaggtggcattcagc

SEQ ID NO: 244318 - DNA, 15 bp, Homo sapiens
caaggtggcattcag

SEQ ID NO: 244319 - DNA, 15 bp, Homo sapiens
gcaaggtggcattca

SEQ ID NO: 244320 - DNA, 15 bp, Homo sapiens
agcaaggtggcattc

SEQ ID NO: 244321 - DNA, 15 bp, Homo sapiens
cagcaaggtggcatt

SEQ ID NO: 244322 - DNA, 15 bp, Homo sapiens
ccagcaaggtggcat

SEQ ID NO: 244323 - DNA, 15 bp, Homo sapiens
cccagcaaggtggca

SEQ ID NO: 244324 - DNA, 15 bp, Homo sapiens
gcccagcaaggtggc

SEQ ID NO: 244325 - DNA, 15 bp, Homo sapiens
agcccagcaaggtgg

SEQ ID NO: 244326 - DNA, 15 bp, Homo sapiens
tagcccagcaaggtg

SEQ ID NO: 244327 - DNA, 15 bp, Homo sapiens
ttagcccagcaaggt

SEQ ID NO: 244328 - DNA, 15 bp, Homo sapiens
attagcccagcaagg

SEQ ID NO: 244329 - DNA, 15 bp, Homo sapiens
aattagcccagcaag

SEQ ID NO: 244330 - DNA, 15 bp, Homo sapiens
aaattagcccagcaa

SEQ ID NO: 244331 - DNA, 15 bp, Homo sapiens
aaaattagcccagca

SEQ ID NO: 244332 - DNA, 15 bp, Homo sapiens
aaaaattagcccagc

SEQ ID NO: 244333 - DNA, 15 bp, Homo sapiens
caaaaattagcccag

SEQ ID NO: 244334 - DNA, 15 bp, Homo sapiens
acaaaaattagccca

SEQ ID NO: 244335 - DNA, 15 bp, Homo sapiens
tacaaaaattagccc

SEQ ID NO: 244336 - DNA, 15 bp, Homo sapiens
gccagcctggccaac

SEQ ID NO: 244337 - DNA, 15 bp, Homo sapiens
ggccagcctggccaa

SEQ ID NO: 244338 - DNA, 15 bp, Homo sapiens
aggccagcctggcca

SEQ ID NO: 244339 - DNA, 15 bp, Homo sapiens
gaggccagcctggcc

SEQ ID NO: 244340 - DNA, 15 bp, Homo sapiens
cgaggccagcctggc

SEQ ID NO: 244341 - DNA, 15 bp, Homo sapiens
tcgaggccagcctgg

SEQ ID NO: 244342 - DNA, 15 bp, Homo sapiens
ttcgaggccagcctg

SEQ ID NO: 244343 - DNA, 15 bp, Homo sapiens
gttcgaggccagcct

SEQ ID NO: 244344 - DNA, 15 bp, Homo sapiens
agttcgaggccagcc

SEQ ID NO: 244345 - DNA, 15 bp, Homo sapiens
tcgaggtcaggagtt

SEQ ID NO: 244346 - DNA, 15 bp, Homo sapiens
ctcgaggtcaggagt

SEQ ID NO: 244347 - DNA, 15 bp, Homo sapiens
actcgaggtcaggag

SEQ ID NO: 244348 - DNA, 15 bp, Homo sapiens
cactcgaggtcagga

SEQ ID NO: 244349 - DNA, 15 bp, Homo sapiens
tcactcgaggtcagg

SEQ ID NO: 244350 - DNA, 15 bp, Homo sapiens
atcactcgaggtcag

SEQ ID NO: 244351 - DNA, 15 bp, Homo sapiens
gatcactcgaggtca

SEQ ID NO: 244352 - DNA, 15 bp, Homo sapiens
agatcactcgaggtc

SEQ ID NO: 244353 - DNA, 15 bp, Homo sapiens
cagatcactcgaggt

SEQ ID NO: 244354 - DNA, 15 bp, Homo sapiens
gcagatcactcgagg

SEQ ID NO: 244355 - DNA, 15 bp, Homo sapiens
ggcagatcactcgag

SEQ ID NO: 244356 - DNA, 15 bp, Homo sapiens
gggcagatcactcga

SEQ ID NO: 244357 - DNA, 15 bp, Homo sapiens
cgggcagatcactcg

SEQ ID NO: 244358 - DNA, 15 bp, Homo sapiens
gcgggcagatcactc

SEQ ID NO: 244359 - DNA, 15 bp, Homo sapiens
ggcgggcagatcact

SEQ ID NO: 244360 - DNA, 15 bp, Homo sapiens
aggcgggcagatcac

SEQ ID NO: 244361 - DNA, 15 bp, Homo sapiens
gaggcgggcagatca

SEQ ID NO: 244362 - DNA, 15 bp, Homo sapiens
ggaggcgggcagatc

SEQ ID NO: 244363 - DNA, 15 bp, Homo sapiens
aggaggcgggcagat

SEQ ID NO: 244364 - DNA, 15 bp, Homo sapiens
caggaggcgggcaga

SEQ ID NO: 244365 - DNA, 15 bp, Homo sapiens
tcaggaggcgggcag

SEQ ID NO: 244366 - DNA, 15 bp, Homo sapiens
ttcaggaggcgggca

SEQ ID NO: 244367 - DNA, 15 bp, Homo sapiens
cttcaggaggcgggc

SEQ ID NO: 244368 - DNA, 15 bp, Homo sapiens
acttcaggaggcggg

SEQ ID NO: 244369 - DNA, 15 bp, Homo sapiens
cacttcaggaggcgg

SEQ ID NO: 244370 - DNA, 15 bp, Homo sapiens
gcacttcaggaggcg

SEQ ID NO: 244371 - DNA, 15 bp, Homo sapiens
agcacttcaggaggc

SEQ ID NO: 244372 - DNA, 15 bp, Homo sapiens
cagcacttcaggagg

SEQ ID NO: 244373 - DNA, 15 bp, Homo sapiens
ccagcacttcaggag

SEQ ID NO: 244374 - DNA, 15 bp, Homo sapiens
cccagcacttcagga

SEQ ID NO: 244375 - DNA, 15 bp, Homo sapiens
tcccagcacttcagg

SEQ ID NO: 244376 - DNA, 15 bp, Homo sapiens
aggtggctcacgcct

SEQ ID NO: 244377 - DNA, 15 bp, Homo sapiens
gaggtggctcacgcc

SEQ ID NO: 244378 - DNA, 15 bp, Homo sapiens
cgaggtggctcacgc

SEQ ID NO: 244379 - DNA, 15 bp, Homo sapiens
acgaggtggctcacg

SEQ ID NO: 244380 - DNA, 15 bp, Homo sapiens
gacgaggtggctcac

SEQ ID NO: 244381 - DNA, 15 bp, Homo sapiens
ggacgaggtggctca

SEQ ID NO: 244382 - DNA, 15 bp, Homo sapiens
aggacgaggtggctc

SEQ ID NO: 244383 - DNA, 15 bp, Homo sapiens
caggacgaggtggct

SEQ ID NO: 244384 - DNA, 15 bp, Homo sapiens
ccaggacgaggtggc

SEQ ID NO: 244385 - DNA, 15 bp, Homo sapiens
accaggacgaggtgg

SEQ ID NO: 244386 - DNA, 15 bp, Homo sapiens
caccaggacgaggtg

SEQ ID NO: 244387 - DNA, 15 bp, Homo sapiens
tcaccaggacgaggt

SEQ ID NO: 244388 - DNA, 15 bp, Homo sapiens
ctcaccaggacgagg

SEQ ID NO: 244389 - DNA, 15 bp, Homo sapiens
cctcaccaggacgag

SEQ ID NO: 244390 - DNA, 15 bp, Homo sapiens
ccctcaccaggacga

SEQ ID NO: 244391 - DNA, 15 bp, Homo sapiens
accctcaccaggacg

SEQ ID NO: 244392 - DNA, 15 bp, Homo sapiens
aaccctcaccaggac

SEQ ID NO: 244393 - DNA, 15 bp, Homo sapiens
aaaccctcaccagga

SEQ ID NO: 244394 - DNA, 15 bp, Homo sapiens
aaaaccctcaccagg

SEQ ID NO: 244395 - DNA, 15 bp, Homo sapiens
aaaaaccctcaccag

SEQ ID NO: 244396 - DNA, 15 bp, Homo sapiens
aaaaaaccctcacca

SEQ ID NO: 244397 - DNA, 15 bp, Homo sapiens
aaaaaaaccctcacc

SEQ ID NO: 244398 - DNA, 15 bp, Homo sapiens
aaaaaaaaccctcac

SEQ ID NO: 244399 - DNA, 15 bp, Homo sapiens
aaaaaaaaaccctca

SEQ ID NO: 244400 - DNA, 15 bp, Homo sapiens
aaaaaaaaaaccctc

SEQ ID NO: 244401 - DNA, 15 bp, Homo sapiens
aaaaaaaaaaaccct

SEQ ID NO: 244402 - DNA, 15 bp, Homo sapiens
gaaaaaaaaaaaccc

SEQ ID NO: 244403 - DNA, 15 bp, Homo sapiens
ggaaaaaaaaaaacc

SEQ ID NO: 244404 - DNA, 15 bp, Homo sapiens
gggaaaaaaaaaaac

SEQ ID NO: 244405 - DNA, 15 bp, Homo sapiens
ggggaaaaaaaaaaa

SEQ ID NO: 244406 - DNA, 15 bp, Homo sapiens
tggggaaaaaaaaaa

SEQ ID NO: 244407 - DNA, 15 bp, Homo sapiens
ttggggaaaaaaaaa

SEQ ID NO: 244408 - DNA, 15 bp, Homo sapiens
gttggggaaaaaaaa

SEQ ID NO: 244409 - DNA, 15 bp, Homo sapiens
ggttggggaaaaaaa

SEQ ID NO: 244410 - DNA, 15 bp, Homo sapiens
gggttggggaaaaaa

SEQ ID NO: 244411 - DNA, 15 bp, Homo sapiens
agggttggggaaaaa

SEQ ID NO: 244412 - DNA, 15 bp, Homo sapiens
gagggttggggaaaa

SEQ ID NO: 244413 - DNA, 15 bp, Homo sapiens
agagggttggggaaa

SEQ ID NO: 244414 - DNA, 15 bp, Homo sapiens
cagagggttggggaa

SEQ ID NO: 244415 - DNA, 15 bp, Homo sapiens
acagagggttgggga

SEQ ID NO: 244416 - DNA, 15 bp, Homo sapiens
cacagagggttgggg

SEQ ID NO: 244417 - DNA, 15 bp, Homo sapiens
ccacagagggttggg

SEQ ID NO: 244418 - DNA, 15 bp, Homo sapiens
accacagagggttgg

SEQ ID NO: 244419 - DNA, 15 bp, Homo sapiens
caccacagagggttg

SEQ ID NO: 244420 - DNA, 15 bp, Homo sapiens
ccaccacagagggtt

SEQ ID NO: 244421 - DNA, 15 bp, Homo sapiens
tccaccacagagggt

SEQ ID NO: 244422 - DNA, 15 bp, Homo sapiens
atccaccacagaggg

SEQ ID NO: 244423 - DNA, 15 bp, Homo sapiens
tatccaccacagagg

SEQ ID NO: 244424 - DNA, 15 bp, Homo sapiens
gtatccaccacagag

SEQ ID NO: 244425 - DNA, 15 bp, Homo sapiens
agtatccaccacaga

SEQ ID NO: 244426 - DNA, 15 bp, Homo sapiens
cagtatccaccacag

SEQ ID NO: 244427 - DNA, 15 bp, Homo sapiens
tcagtatccaccaca

SEQ ID NO: 244428 - DNA, 15 bp, Homo sapiens
ttcagtatccaccac

SEQ ID NO: 244429 - DNA, 15 bp, Homo sapiens
tttcagtatccacca

SEQ ID NO: 244430 - DNA, 15 bp, Homo sapiens
ctttcagtatccacc

SEQ ID NO: 244431 - DNA, 15 bp, Homo sapiens
tctttcagtatccac

SEQ ID NO: 244432 - DNA, 15 bp, Homo sapiens
gtctttcagtatcca

SEQ ID NO: 244433 - DNA, 15 bp, Homo sapiens
ggtctttcagtatcc

SEQ ID NO: 244434 - DNA, 15 bp, Homo sapiens
tggtctttcagtatc

SEQ ID NO: 244435 - DNA, 15 bp, Homo sapiens
atggtctttcagtat

SEQ ID NO: 244436 - DNA, 15 bp, Homo sapiens
tatggtctttcagta

SEQ ID NO: 244437 - DNA, 15 bp, Homo sapiens
atatggtctttcagt

SEQ ID NO: 244438 - DNA, 15 bp, Homo sapiens
aatatggtctttcag

SEQ ID NO: 244439 - DNA, 15 bp, Homo sapiens
taatatggtctttca

SEQ ID NO: 244440 - DNA, 15 bp, Homo sapiens
ctaatatggtctttc

SEQ ID NO: 244441 - DNA, 15 bp, Homo sapiens
cctaatatggtcttt

SEQ ID NO: 244442 - DNA, 15 bp, Homo sapiens
tcctaatatggtctt

SEQ ID NO: 244443 - DNA, 15 bp, Homo sapiens
atcctaatatggtct

SEQ ID NO: 244444 - DNA, 15 bp, Homo sapiens
tatcctaatatggtc

SEQ ID NO: 244445 - DNA, 15 bp, Homo sapiens
ttatcctaatatggt

SEQ ID NO: 244446 - DNA, 15 bp, Homo sapiens
gttatcctaatatgg

SEQ ID NO: 244447 - DNA, 15 bp, Homo sapiens
agttatcctaatatg

SEQ ID NO: 244448 - DNA, 15 bp, Homo sapiens
cagttatcctaatat

SEQ ID NO: 244449 - DNA, 15 bp, Homo sapiens
acagttatcctaata

SEQ ID NO: 244450 - DNA, 15 bp, Homo sapiens
tacagttatcctaat

SEQ ID NO: 244451 - DNA, 15 bp, Homo sapiens
gtacagttatcctaa

SEQ ID NO: 244452 - DNA, 15 bp, Homo sapiens
tgtacagttatccta

SEQ ID NO: 244453 - DNA, 15 bp, Homo sapiens
ctgtacagttatcct

SEQ ID NO: 244454 - DNA, 15 bp, Homo sapiens
actgtacagttatcc

SEQ ID NO: 244455 - DNA, 15 bp, Homo sapiens
tactgtacagttatc

SEQ ID NO: 244456 - DNA, 15 bp, Homo sapiens
atactgtacagttat

SEQ ID NO: 244457 - DNA, 15 bp, Homo sapiens
tatactgtacagtta

SEQ ID NO: 244458 - DNA, 15 bp, Homo sapiens
ctatactgtacagtt

SEQ ID NO: 244459 - DNA, 15 bp, Homo sapiens
tctatactgtacagt

SEQ ID NO: 244460 - DNA, 15 bp, Homo sapiens
ctctatactgtacag

SEQ ID NO: 244461 - DNA, 15 bp, Homo sapiens
tctctatactgtaca

SEQ ID NO: 244462 - DNA, 15 bp, Homo sapiens
ttctctatactgtac

SEQ ID NO: 244463 - DNA, 15 bp, Homo sapiens
cttctctatactgta

SEQ ID NO: 244464 - DNA, 15 bp, Homo sapiens
ccttctctatactgt

SEQ ID NO: 244465 - DNA, 15 bp, Homo sapiens
gccttctctatactg

SEQ ID NO: 244466 - DNA, 15 bp, Homo sapiens
tgccttctctatact

SEQ ID NO: 244467 - DNA, 15 bp, Homo sapiens
ctgccttctctatac

SEQ ID NO: 244468 - DNA, 15 bp, Homo sapiens
actgccttctctata

SEQ ID NO: 244469 - DNA, 15 bp, Homo sapiens
cactgccttctctat

SEQ ID NO: 244470 - DNA, 15 bp, Homo sapiens
ccactgccttctcta

SEQ ID NO: 244471 - DNA, 15 bp, Homo sapiens
gccactgccttctct

SEQ ID NO: 244472 - DNA, 15 bp, Homo sapiens
tgccactgccttctc

SEQ ID NO: 244473 - DNA, 15 bp, Homo sapiens
ttgccactgccttct

SEQ ID NO: 244474 - DNA, 15 bp, Homo sapiens
cttgccactgccttc

SEQ ID NO: 244475 - DNA, 15 bp, Homo sapiens
acttgccactgcctt

SEQ ID NO: 244476 - DNA, 15 bp, Homo sapiens
aacttgccactgcct

SEQ ID NO: 244477 - DNA, 15 bp, Homo sapiens
aaacttgccactgcc

SEQ ID NO: 244478 - DNA, 15 bp, Homo sapiens
aaaacttgccactgc

SEQ ID NO: 244479 - DNA, 15 bp, Homo sapiens
gaaaacttgccactg

SEQ ID NO: 244480 - DNA, 15 bp, Homo sapiens
agaaaacttgccact

SEQ ID NO: 244481 - DNA, 15 bp, Homo sapiens
gagaaaacttgccac

SEQ ID NO: 244482 - DNA, 15 bp, Homo sapiens
agagaaaacttgcca

SEQ ID NO: 244483 - DNA, 15 bp, Homo sapiens
cagagaaaacttgcc

SEQ ID NO: 244484 - DNA, 15 bp, Homo sapiens
acagagaaaacttgc

SEQ ID NO: 244485 - DNA, 15 bp, Homo sapiens
gacagagaaaacttg

SEQ ID NO: 244486 - DNA, 15 bp, Homo sapiens
tgacagagaaaactt

SEQ ID NO: 244487 - DNA, 15 bp, Homo sapiens
atgacagagaaaact

SEQ ID NO: 244488 - DNA, 15 bp, Homo sapiens
tatgacagagaaaac

SEQ ID NO: 244489 - DNA, 15 bp, Homo sapiens
atatgacagagaaaa

SEQ ID NO: 244490 - DNA, 15 bp, Homo sapiens
tatatgacagagaaa

SEQ ID NO: 244491 - DNA, 15 bp, Homo sapiens
gtatatgacagagaa

SEQ ID NO: 244492 - DNA, 15 bp, Homo sapiens
ggtatatgacagaga

SEQ ID NO: 244493 - DNA, 15 bp, Homo sapiens
tggtatatgacagag

SEQ ID NO: 244494 - DNA, 15 bp, Homo sapiens
ctggtatatgacaga

SEQ ID NO: 244495 - DNA, 15 bp, Homo sapiens
tctggtatatgacag

SEQ ID NO: 244496 - DNA, 15 bp, Homo sapiens
ctctggtatatgaca

SEQ ID NO: 244497 - DNA, 15 bp, Homo sapiens
actctggtatatgac

SEQ ID NO: 244498 - DNA, 15 bp, Homo sapiens
cactctggtatatga

SEQ ID NO: 244499 - DNA, 15 bp, Homo sapiens
ccactctggtatatg

SEQ ID NO: 244500 - DNA, 15 bp, Homo sapiens
cccactctggtatat

SEQ ID NO: 244501 - DNA, 15 bp, Homo sapiens
gcccactctggtata

SEQ ID NO: 244502 - DNA, 15 bp, Homo sapiens
agcccactctggtat

SEQ ID NO: 244503 - DNA, 15 bp, Homo sapiens
aagcccactctggta

SEQ ID NO: 244504 - DNA, 15 bp, Homo sapiens
caagcccactctggt

SEQ ID NO: 244505 - DNA, 15 bp, Homo sapiens
ccaagcccactctgg

SEQ ID NO: 244506 - DNA, 15 bp, Homo sapiens
cccaagcccactctg

SEQ ID NO: 244507 - DNA, 15 bp, Homo sapiens
gcccaagcccactct

SEQ ID NO: 244508 - DNA, 15 bp, Homo sapiens
tgcccaagcccactc

SEQ ID NO: 244509 - DNA, 15 bp, Homo sapiens
atgcccaagcccact

SEQ ID NO: 244510 - DNA, 15 bp, Homo sapiens
catgcccaagcccac

SEQ ID NO: 244511 - DNA, 15 bp, Homo sapiens
ccatgcccaagccca

SEQ ID NO: 244512 - DNA, 15 bp, Homo sapiens
accatgcccaagccc

SEQ ID NO: 244513 - DNA, 15 bp, Homo sapiens
caccatgcccaagcc

SEQ ID NO: 244514 - DNA, 15 bp, Homo sapiens
ccaccatgcccaagc

SEQ ID NO: 244515 - DNA, 15 bp, Homo sapiens
gccaccatgcccaag

SEQ ID NO: 244516 - DNA, 15 bp, Homo sapiens
tgccaccatgcccaa

SEQ ID NO: 244517 - DNA, 15 bp, Homo sapiens
tatgccaccatgccc

SEQ ID NO: 244518 - DNA, 15 bp, Homo sapiens
gtatgccaccatgcc

SEQ ID NO: 244519 - DNA, 15 bp, Homo sapiens
agtatgccaccatgc

SEQ ID NO: 244520 - DNA, 15 bp, Homo sapiens
gagtatgccaccatg

SEQ ID NO: 244521 - DNA, 15 bp, Homo sapiens
ggagtatgccaccat

SEQ ID NO: 244522 - DNA, 15 bp, Homo sapiens
aggagtatgccacca

SEQ ID NO: 244523 - DNA, 15 bp, Homo sapiens
caggagtatgccacc

SEQ ID NO: 244524 - DNA, 15 bp, Homo sapiens
acaggagtatgccac

SEQ ID NO: 244525 - DNA, 15 bp, Homo sapiens
tacaggagtatgcca

SEQ ID NO: 244526 - DNA, 15 bp, Homo sapiens
ctacaggagtatgcc

SEQ ID NO: 244527 - DNA, 15 bp, Homo sapiens
actacaggagtatgc

SEQ ID NO: 244528 - DNA, 15 bp, Homo sapiens
gactacaggagtatg

SEQ ID NO: 244529 - DNA, 15 bp, Homo sapiens
agactacaggagtat

SEQ ID NO: 244530 - DNA, 15 bp, Homo sapiens
gagactacaggagta

SEQ ID NO: 244531 - DNA, 15 bp, Homo sapiens
tgagactacaggagt

SEQ ID NO: 244532 - DNA, 15 bp, Homo sapiens
ctgagactacaggag

SEQ ID NO: 244533 - DNA, 15 bp, Homo sapiens
gctgagactacagga

SEQ ID NO: 244534 - DNA, 15 bp, Homo sapiens
agctgagactacagg

SEQ ID NO: 244535 - DNA, 15 bp, Homo sapiens
tagctgagactacag

SEQ ID NO: 244536 - DNA, 15 bp, Homo sapiens
ttagctgagactaca

SEQ ID NO: 244537 - DNA, 15 bp, Homo sapiens
attagctgagactac

SEQ ID NO: 244538 - DNA, 15 bp, Homo sapiens
gattagctgagacta

SEQ ID NO: 244539 - DNA, 15 bp, Homo sapiens
tgattagctgagact

SEQ ID NO: 244540 - DNA, 15 bp, Homo sapiens
ctgattagctgagac

SEQ ID NO: 244541 - DNA, 15 bp, Homo sapiens
cctgattagctgaga

SEQ ID NO: 244542 - DNA, 15 bp, Homo sapiens
tcctgattagctgag

SEQ ID NO: 244543 - DNA, 15 bp, Homo sapiens
ctcctgattagctga

SEQ ID NO: 244544 - DNA, 15 bp, Homo sapiens
cctcctgattagctg

SEQ ID NO: 244545 - DNA, 15 bp, Homo sapiens
gcctcctgattagct

SEQ ID NO: 244546 - DNA, 15 bp, Homo sapiens
agcctcctgattagc

SEQ ID NO: 244547 - DNA, 15 bp, Homo sapiens
cagcctcctgattag

SEQ ID NO: 244548 - DNA, 15 bp, Homo sapiens
tcagcctcctgatta

SEQ ID NO: 244549 - DNA, 15 bp, Homo sapiens
ctcagcctcctgatt

SEQ ID NO: 244550 - DNA, 15 bp, Homo sapiens
cctcagcctcctgat

SEQ ID NO: 244551 - DNA, 15 bp, Homo sapiens
tcctcagcctcctga

SEQ ID NO: 244552 - DNA, 15 bp, Homo sapiens
ttcctcagcctcctg

SEQ ID NO: 244553 - DNA, 15 bp, Homo sapiens
cttcctcagcctcct

SEQ ID NO: 244554 - DNA, 15 bp, Homo sapiens
cctccttcctcagcc

SEQ ID NO: 244555 - DNA, 15 bp, Homo sapiens
tcctccttcctcagc

SEQ ID NO: 244556 - DNA, 15 bp, Homo sapiens
atcctccttcctcag

SEQ ID NO: 244557 - DNA, 15 bp, Homo sapiens
gatcctccttcctca

SEQ ID NO: 244558 - DNA, 15 bp, Homo sapiens
cgatcctccttcctc

SEQ ID NO: 244559 - DNA, 15 bp, Homo sapiens
gcgatcctccttcct

SEQ ID NO: 244560 - DNA, 15 bp, Homo sapiens
agcgatcctccttcc

SEQ ID NO: 244561 - DNA, 15 bp, Homo sapiens
aagcgatcctccttc

SEQ ID NO: 244562 - DNA, 15 bp, Homo sapiens
caagcgatcctcctt

SEQ ID NO: 244563 - DNA, 15 bp, Homo sapiens
ccaagcgatcctcct

SEQ ID NO: 244564 - DNA, 15 bp, Homo sapiens
cccaagcgatcctcc

SEQ ID NO: 244565 - DNA, 15 bp, Homo sapiens
gcccaagcgatcctc

SEQ ID NO: 244566 - DNA, 15 bp, Homo sapiens
ggcccaagcgatcct

SEQ ID NO: 244567 - DNA, 15 bp, Homo sapiens
gggcccaagcgatcc

SEQ ID NO: 244568 - DNA, 15 bp, Homo sapiens
tgggcccaagcgatc

SEQ ID NO: 244569 - DNA, 15 bp, Homo sapiens
ctgggcccaagcgat

SEQ ID NO: 244570 - DNA, 15 bp, Homo sapiens
cctgggcccaagcga

SEQ ID NO: 244571 - DNA, 15 bp, Homo sapiens
tcctgggcccaagcg

SEQ ID NO: 244572 - DNA, 15 bp, Homo sapiens
ctcctgggcccaagc

SEQ ID NO: 244573 - DNA, 15 bp, Homo sapiens
actcctgggcccaag

SEQ ID NO: 244574 - DNA, 15 bp, Homo sapiens
aactcctgggcccaa

SEQ ID NO: 244575 - DNA, 15 bp, Homo sapiens
caactcctgggccca

SEQ ID NO: 244576 - DNA, 15 bp, Homo sapiens
ccaactcctgggccc

SEQ ID NO: 244577 - DNA, 15 bp, Homo sapiens
tccaactcctgggcc

SEQ ID NO: 244578 - DNA, 15 bp, Homo sapiens
ctccaactcctgggc

SEQ ID NO: 244579 - DNA, 15 bp, Homo sapiens
tctccaactcctggg

SEQ ID NO: 244580 - DNA, 15 bp, Homo sapiens
gtctccaactcctgg

SEQ ID NO: 244581 - DNA, 15 bp, Homo sapiens
agtctccaactcctg

SEQ ID NO: 244582 - DNA, 15 bp, Homo sapiens
cagtctccaactcct

SEQ ID NO: 244583 - DNA, 15 bp, Homo sapiens
acagtctccaactcc

SEQ ID NO: 244584 - DNA, 15 bp, Homo sapiens
tacagtctccaactc

SEQ ID NO: 244585 - DNA, 15 bp, Homo sapiens
ctacagtctccaact

SEQ ID NO: 244586 - DNA, 15 bp, Homo sapiens
actacagtctccaac

SEQ ID NO: 244587 - DNA, 15 bp, Homo sapiens
cactacagtctccaa

SEQ ID NO: 244588 - DNA, 15 bp, Homo sapiens
tcactacagtctcca

SEQ ID NO: 244589 - DNA, 15 bp, Homo sapiens
ctcactacagtctcc

SEQ ID NO: 244590 - DNA, 15 bp, Homo sapiens
gctcactacagtctc

SEQ ID NO: 244591 - DNA, 15 bp, Homo sapiens
agctcactacagtct

SEQ ID NO: 244592 - DNA, 15 bp, Homo sapiens
cagctcactacagtc

SEQ ID NO: 244593 - DNA, 15 bp, Homo sapiens
acagctcactacagt

SEQ ID NO: 244594 - DNA, 15 bp, Homo sapiens
cacagctcactacag

SEQ ID NO: 244595 - DNA, 15 bp, Homo sapiens
tcacagctcactaca

SEQ ID NO: 244596 - DNA, 15 bp, Homo sapiens
atcacagctcactac

SEQ ID NO: 244597 - DNA, 15 bp, Homo sapiens
gatcacagctcacta

SEQ ID NO: 244598 - DNA, 15 bp, Homo sapiens
tgatcacagctcact

SEQ ID NO: 244599 - DNA, 15 bp, Homo sapiens
gtgatcacagctcac

SEQ ID NO: 244600 - DNA, 15 bp, Homo sapiens
tgtgatcacagctca

SEQ ID NO: 244601 - DNA, 15 bp, Homo sapiens
gtgtgatcacagctc

SEQ ID NO: 244602 - DNA, 15 bp, Homo sapiens
ggtgtgatcacagct

SEQ ID NO: 244603 - DNA, 15 bp, Homo sapiens
tggtgtgatcacagc

SEQ ID NO: 244604 - DNA, 15 bp, Homo sapiens
gtggtgtgatcacag

SEQ ID NO: 244605 - DNA, 15 bp, Homo sapiens
ggtggtgtgatcaca

SEQ ID NO: 244606 - DNA, 15 bp, Homo sapiens
tggtggtgtgatcac

SEQ ID NO: 244607 - DNA, 15 bp, Homo sapiens
gtggtggtgtgatca

SEQ ID NO: 244608 - DNA, 15 bp, Homo sapiens
tgtggtggtgtgatc

SEQ ID NO: 244609 - DNA, 15 bp, Homo sapiens
gtgtggtggtgtgat

SEQ ID NO: 244610 - DNA, 15 bp, Homo sapiens
agtgtggtggtgtga

SEQ ID NO: 244611 - DNA, 15 bp, Homo sapiens
aagtgtggtggtgtg

SEQ ID NO: 244612 - DNA, 15 bp, Homo sapiens
gaagtgtggtggtgt

SEQ ID NO: 244613 - DNA, 15 bp, Homo sapiens
tgaagtgtggtggtg

SEQ ID NO: 244614 - DNA, 15 bp, Homo sapiens
ttgaagtgtggtggt

SEQ ID NO: 244615 - DNA, 15 bp, Homo sapiens
attgaagtgtggtgg

SEQ ID NO: 244616 - DNA, 15 bp, Homo sapiens
gattgaagtgtggtg

SEQ ID NO: 244617 - DNA, 15 bp, Homo sapiens
agattgaagtgtggt

SEQ ID NO: 244618 - DNA, 15 bp, Homo sapiens
cagattgaagtgtgg

SEQ ID NO: 244619 - DNA, 15 bp, Homo sapiens
ccagattgaagtgtg

SEQ ID NO: 244620 - DNA, 15 bp, Homo sapiens
cccagattgaagtgt

SEQ ID NO: 244621 - DNA, 15 bp, Homo sapiens
gcccagattgaagtg

SEQ ID NO: 244622 - DNA, 15 bp, Homo sapiens
tgcccagattgaagt

SEQ ID NO: 244623 - DNA, 15 bp, Homo sapiens
ttgcccagattgaag

SEQ ID NO: 244624 - DNA, 15 bp, Homo sapiens
gttgcccagattgaa

SEQ ID NO: 244625 - DNA, 15 bp, Homo sapiens
tgttgcccagattga

SEQ ID NO: 244626 - DNA, 15 bp, Homo sapiens
ctgttgcccagattg

SEQ ID NO: 244627 - DNA, 15 bp, Homo sapiens
tctgttgcccagatt

SEQ ID NO: 244628 - DNA, 15 bp, Homo sapiens
ctctgttgcccagat

SEQ ID NO: 244629 - DNA, 15 bp, Homo sapiens
gctctgttgcccaga

SEQ ID NO: 244630 - DNA, 15 bp, Homo sapiens
tgctctgttgcccag

SEQ ID NO: 244631 - DNA, 15 bp, Homo sapiens
ttgctctgttgccca

SEQ ID NO: 244632 - DNA, 15 bp, Homo sapiens
cttgctctgttgccc

SEQ ID NO: 244633 - DNA, 15 bp, Homo sapiens
ctcttgctctgttgc

SEQ ID NO: 244634 - DNA, 15 bp, Homo sapiens
tctcttgctctgttg

SEQ ID NO: 244635 - DNA, 15 bp, Homo sapiens
gtctcttgctctgtt

SEQ ID NO: 244636 - DNA, 15 bp, Homo sapiens
ggtctcttgctctgt

SEQ ID NO: 244637 - DNA, 15 bp, Homo sapiens
gggtctcttgctctg

SEQ ID NO: 244638 - DNA, 15 bp, Homo sapiens
agggtctcttgctct

SEQ ID NO: 244639 - DNA, 15 bp, Homo sapiens
tagggtctcttgctc

SEQ ID NO: 244640 - DNA, 15 bp, Homo sapiens
atagggtctcttgct

SEQ ID NO: 244641 - DNA, 15 bp, Homo sapiens
gatagggtctcttgc

SEQ ID NO: 244642 - DNA, 15 bp, Homo sapiens
agatagggtctcttg

SEQ ID NO: 244643 - DNA, 15 bp, Homo sapiens
gagatagggtctctt

SEQ ID NO: 244644 - DNA, 15 bp, Homo sapiens
agagatagggtctct

SEQ ID NO: 244645 - DNA, 15 bp, Homo sapiens
tagagatagggtctc

SEQ ID NO: 244646 - DNA, 15 bp, Homo sapiens
ttagagatagggtct

SEQ ID NO: 244647 - DNA, 15 bp, Homo sapiens
tttagagatagggtc

SEQ ID NO: 244648 - DNA, 15 bp, Homo sapiens
ttttagagatagggt

SEQ ID NO: 244649 - DNA, 15 bp, Homo sapiens
tttttagagataggg

SEQ ID NO: 244650 - DNA, 15 bp, Homo sapiens
ttttttagagatagg

SEQ ID NO: 244651 - DNA, 15 bp, Homo sapiens
tttttttagagatag

SEQ ID NO: 244652 - DNA, 15 bp, Homo sapiens
ttttttttagagata

SEQ ID NO: 244653 - DNA, 15 bp, Homo sapiens
cttttttttagagat

SEQ ID NO: 244654 - DNA, 15 bp, Homo sapiens
acttttttttagaga

SEQ ID NO: 244655 - DNA, 15 bp, Homo sapiens
tacttttttttagag

SEQ ID NO: 244656 - DNA, 15 bp, Homo sapiens
ttacttttttttaga

SEQ ID NO: 244657 - DNA, 15 bp, Homo sapiens
cttacttttttttag

SEQ ID NO: 244658 - DNA, 15 bp, Homo sapiens
acttactttttttta

SEQ ID NO: 244659 - DNA, 15 bp, Homo sapiens
tacttactttttttt

SEQ ID NO: 244660 - DNA, 15 bp, Homo sapiens
atacttacttttttt

SEQ ID NO: 244661 - DNA, 15 bp, Homo sapiens
aatacttactttttt

SEQ ID NO: 244662 - DNA, 15 bp, Homo sapiens
aaatacttacttttt

SEQ ID NO: 244663 - DNA, 15 bp, Homo sapiens
gaaatacttactttt

SEQ ID NO: 244664 - DNA, 15 bp, Homo sapiens
cgaaatacttacttt

SEQ ID NO: 244665 - DNA, 15 bp, Homo sapiens
ccgaaatacttactt

SEQ ID NO: 244666 - DNA, 15 bp, Homo sapiens
tccgaaatacttact

SEQ ID NO: 244667 - DNA, 15 bp, Homo sapiens
gtccgaaatacttac

SEQ ID NO: 244668 - DNA, 15 bp, Homo sapiens
tgtccgaaatactta

SEQ ID NO: 244669 - DNA, 15 bp, Homo sapiens
gtgtccgaaatactt

SEQ ID NO: 244670 - DNA, 15 bp, Homo sapiens
agtgtccgaaatact

SEQ ID NO: 244671 - DNA, 15 bp, Homo sapiens
cagtgtccgaaatac

SEQ ID NO: 244672 - DNA, 15 bp, Homo sapiens
acagtgtccgaaata

SEQ ID NO: 244673 - DNA, 15 bp, Homo sapiens
cacagtgtccgaaat

SEQ ID NO: 244674 - DNA, 15 bp, Homo sapiens
ccacagtgtccgaaa

SEQ ID NO: 244675 - DNA, 15 bp, Homo sapiens
cccacagtgtccgaa

SEQ ID NO: 244676 - DNA, 15 bp, Homo sapiens
gcccacagtgtccga

SEQ ID NO: 244677 - DNA, 15 bp, Homo sapiens
ggcccacagtgtccg

SEQ ID NO: 244678 - DNA, 15 bp, Homo sapiens
tggcccacagtgtcc

SEQ ID NO: 244679 - DNA, 15 bp, Homo sapiens
atggcccacagtgtc

SEQ ID NO: 244680 - DNA, 15 bp, Homo sapiens
tatggcccacagtgt

SEQ ID NO: 244681 - DNA, 15 bp, Homo sapiens
gtatggcccacagtg

SEQ ID NO: 244682 - DNA, 15 bp, Homo sapiens
cgtatggcccacagt

SEQ ID NO: 244683 - DNA, 15 bp, Homo sapiens
ccgtatggcccacag

SEQ ID NO: 244684 - DNA, 15 bp, Homo sapiens
accgtatggcccaca

SEQ ID NO: 244685 - DNA, 15 bp, Homo sapiens
gaccgtatggcccac

SEQ ID NO: 244686 - DNA, 15 bp, Homo sapiens
agaccgtatggccca

SEQ ID NO: 244687 - DNA, 15 bp, Homo sapiens
gagaccgtatggccc

SEQ ID NO: 244688 - DNA, 15 bp, Homo sapiens
agagaccgtatggcc

SEQ ID NO: 244689 - DNA, 15 bp, Homo sapiens
cagagaccgtatggc

SEQ ID NO: 244690 - DNA, 15 bp, Homo sapiens
ccagagaccgtatgg

SEQ ID NO: 244691 - DNA, 15 bp, Homo sapiens
accagagaccgtatg

SEQ ID NO: 244692 - DNA, 15 bp, Homo sapiens
caccagagaccgtat

SEQ ID NO: 244693 - DNA, 15 bp, Homo sapiens
gcaccagagaccgta

SEQ ID NO: 244694 - DNA, 15 bp, Homo sapiens
tgcaccagagaccgt

SEQ ID NO: 244695 - DNA, 15 bp, Homo sapiens
ctgcaccagagaccg

SEQ ID NO: 244696 - DNA, 15 bp, Homo sapiens
actgcaccagagacc

SEQ ID NO: 244697 - DNA, 15 bp, Homo sapiens
aactgcaccagagac

SEQ ID NO: 244698 - DNA, 15 bp, Homo sapiens
aaactgcaccagaga

SEQ ID NO: 244699 - DNA, 15 bp, Homo sapiens
gaaactgcaccagag

SEQ ID NO: 244700 - DNA, 15 bp, Homo sapiens
agaaactgcaccaga

SEQ ID NO: 244701 - DNA, 15 bp, Homo sapiens
gagaaactgcaccag

SEQ ID NO: 244702 - DNA, 15 bp, Homo sapiens
tgagaaactgcacca

SEQ ID NO: 244703 - DNA, 15 bp, Homo sapiens
ttgagaaactgcacc

SEQ ID NO: 244704 - DNA, 15 bp, Homo sapiens
gttgagaaactgcac

SEQ ID NO: 244705 - DNA, 15 bp, Homo sapiens
tgttgagaaactgca

SEQ ID NO: 244706 - DNA, 15 bp, Homo sapiens
atgttgagaaactgc

SEQ ID NO: 244707 - DNA, 15 bp, Homo sapiens
catgttgagaaactg

SEQ ID NO: 244708 - DNA, 15 bp, Homo sapiens
ccatgttgagaaact

SEQ ID NO: 244709 - DNA, 15 bp, Homo sapiens
gccatgttgagaaac

SEQ ID NO: 244710 - DNA, 15 bp, Homo sapiens
agccatgttgagaaa

SEQ ID NO: 244711 - DNA, 15 bp, Homo sapiens
cagccatgttgagaa

SEQ ID NO: 244712 - DNA, 15 bp, Homo sapiens
acagccatgttgaga

SEQ ID NO: 244713 - DNA, 15 bp, Homo sapiens
aacagccatgttgag

SEQ ID NO: 244714 - DNA, 15 bp, Homo sapiens
caacagccatgttga

SEQ ID NO: 244715 - DNA, 15 bp, Homo sapiens
ccaacagccatgttg

SEQ ID NO: 244716 - DNA, 15 bp, Homo sapiens
cccaacagccatgtt

SEQ ID NO: 244717 - DNA, 15 bp, Homo sapiens
acccaacagccatgt

SEQ ID NO: 244718 - DNA, 15 bp, Homo sapiens
cacccaacagccatg

SEQ ID NO: 244719 - DNA, 15 bp, Homo sapiens
tcacccaacagccat

SEQ ID NO: 244720 - DNA, 15 bp, Homo sapiens
ttcacccaacagcca

SEQ ID NO: 244721 - DNA, 15 bp, Homo sapiens
gttcacccaacagcc

SEQ ID NO: 244722 - DNA, 15 bp, Homo sapiens
tgttcacccaacagc

SEQ ID NO: 244723 - DNA, 15 bp, Homo sapiens
gtgttcacccaacag

SEQ ID NO: 244724 - DNA, 15 bp, Homo sapiens
tgtgttcacccaaca

SEQ ID NO: 244725 - DNA, 15 bp, Homo sapiens
ttgtgttcacccaac

SEQ ID NO: 244726 - DNA, 15 bp, Homo sapiens
gttgtgttcacccaa

SEQ ID NO: 244727 - DNA, 15 bp, Homo sapiens
ggttgtgttcaccca

SEQ ID NO: 244728 - DNA, 15 bp, Homo sapiens
tggttgtgttcaccc

SEQ ID NO: 244729 - DNA, 15 bp, Homo sapiens
gtggttgtgttcacc

SEQ ID NO: 244730 - DNA, 15 bp, Homo sapiens
cgtggttgtgttcac

SEQ ID NO: 244731 - DNA, 15 bp, Homo sapiens
gcgtggttgtgttca

SEQ ID NO: 244732 - DNA, 15 bp, Homo sapiens
tgcgtggttgtgttc

SEQ ID NO: 244733 - DNA, 15 bp, Homo sapiens
gtgcgtggttgtgtt

SEQ ID NO: 244734 - DNA, 15 bp, Homo sapiens
tgtgcgtggttgtgt

SEQ ID NO: 244735 - DNA, 15 bp, Homo sapiens
ctgtgcgtggttgtg

SEQ ID NO: 244736 - DNA, 15 bp, Homo sapiens
tctgtgcgtggttgt

SEQ ID NO: 244737 - DNA, 15 bp, Homo sapiens
ttctgtgcgtggttg

SEQ ID NO: 244738 - DNA, 15 bp, Homo sapiens
gttctgtgcgtggtt

SEQ ID NO: 244739 - DNA, 15 bp, Homo sapiens
cgttctgtgcgtggt

SEQ ID NO: 244740 - DNA, 15 bp, Homo sapiens
gcgttctgtgcgtgg

SEQ ID NO: 244741 - DNA, 15 bp, Homo sapiens
tgcgttctgtgcgtg

SEQ ID NO: 244742 - DNA, 15 bp, Homo sapiens
ttgcgttctgtgcgt

SEQ ID NO: 244743 - DNA, 15 bp, Homo sapiens
tttgcgttctgtgcg

SEQ ID NO: 244744 - DNA, 15 bp, Homo sapiens
gtttgcgttctgtgc

SEQ ID NO: 244745 - DNA, 15 bp, Homo sapiens
ggtttgcgttctgtg

SEQ ID NO: 244746 - DNA, 15 bp, Homo sapiens
tggtttgcgttctgt

SEQ ID NO: 244747 - DNA, 15 bp, Homo sapiens
ttggtttgcgttctg

SEQ ID NO: 244748 - DNA, 15 bp, Homo sapiens
attggtttgcgttct

SEQ ID NO: 244749 - DNA, 15 bp, Homo sapiens
tattggtttgcgttc

SEQ ID NO: 244750 - DNA, 15 bp, Homo sapiens
gtattggtttgcgtt

SEQ ID NO: 244751 - DNA, 15 bp, Homo sapiens
tgtattggtttgcgt

SEQ ID NO: 244752 - DNA, 15 bp, Homo sapiens
gtgtattggtttgcg

SEQ ID NO: 244753 - DNA, 15 bp, Homo sapiens
cgtgtattggtttgc

SEQ ID NO: 244754 - DNA, 15 bp, Homo sapiens
acgtgtattggtttg

SEQ ID NO: 244755 - DNA, 15 bp, Homo sapiens
cacgtgtattggttt

SEQ ID NO: 244756 - DNA, 15 bp, Homo sapiens
ccacgtgtattggtt

SEQ ID NO: 244757 - DNA, 15 bp, Homo sapiens
gccacgtgtattggt

SEQ ID NO: 244758 - DNA, 15 bp, Homo sapiens
agccacgtgtattgg

SEQ ID NO: 244759 - DNA, 15 bp, Homo sapiens
cagccacgtgtattg

SEQ ID NO: 244760 - DNA, 15 bp, Homo sapiens
acagccacgtgtatt

SEQ ID NO: 244761 - DNA, 15 bp, Homo sapiens
cacagccacgtgtat

SEQ ID NO: 244762 - DNA, 15 bp, Homo sapiens
ccacagccacgtgta

SEQ ID NO: 244763 - DNA, 15 bp, Homo sapiens
cccacagccacgtgt

SEQ ID NO: 244764 - DNA, 15 bp, Homo sapiens
gcccacagccacgtg

SEQ ID NO: 244765 - DNA, 15 bp, Homo sapiens
ggcccacagccacgt

SEQ ID NO: 244766 - DNA, 15 bp, Homo sapiens
gggcccacagccacg

SEQ ID NO: 244767 - DNA, 15 bp, Homo sapiens
tgggcccacagccac

SEQ ID NO: 244768 - DNA, 15 bp, Homo sapiens
ctgggcccacagcca

SEQ ID NO: 244769 - DNA, 15 bp, Homo sapiens
tctgggcccacagcc

SEQ ID NO: 244770 - DNA, 15 bp, Homo sapiens
ttctgggcccacagc

SEQ ID NO: 244771 - DNA, 15 bp, Homo sapiens
tttctgggcccacag

SEQ ID NO: 244772 - DNA, 15 bp, Homo sapiens
ttttctgggcccaca

SEQ ID NO: 244773 - DNA, 15 bp, Homo sapiens
attttctgggcccac

SEQ ID NO: 244774 - DNA, 15 bp, Homo sapiens
cattttctgggccca

SEQ ID NO: 244775 - DNA, 15 bp, Homo sapiens
acattttctgggccc

SEQ ID NO: 244776 - DNA, 15 bp, Homo sapiens
aacattttctgggcc

SEQ ID NO: 244777 - DNA, 15 bp, Homo sapiens
taacattttctgggc

SEQ ID NO: 244778 - DNA, 15 bp, Homo sapiens
ataacattttctggg

SEQ ID NO: 244779 - DNA, 15 bp, Homo sapiens
aataacattttctgg

SEQ ID NO: 244780 - DNA, 15 bp, Homo sapiens
aaataacattttctg

SEQ ID NO: 244781 - DNA, 15 bp, Homo sapiens
taaataacattttct

SEQ ID NO: 244782 - DNA, 15 bp, Homo sapiens
ataaataacattttc

SEQ ID NO: 244783 - DNA, 15 bp, Homo sapiens
cataaataacatttt

SEQ ID NO: 244784 - DNA, 15 bp, Homo sapiens
ccataaataacattt

SEQ ID NO: 244785 - DNA, 15 bp, Homo sapiens
tccataaataacatt

SEQ ID NO: 244786 - DNA, 15 bp, Homo sapiens
gtccataaataacat

SEQ ID NO: 244787 - DNA, 15 bp, Homo sapiens
tgtccataaataaca

SEQ ID NO: 244788 - DNA, 15 bp, Homo sapiens
gtgtccataaataac

SEQ ID NO: 244789 - DNA, 15 bp, Homo sapiens
tgtgtccataaataa

SEQ ID NO: 244790 - DNA, 15 bp, Homo sapiens
ttgtgtccataaata

SEQ ID NO: 244791 - DNA, 15 bp, Homo sapiens
tttgtgtccataaat

SEQ ID NO: 244792 - DNA, 15 bp, Homo sapiens
ttttgtgtccataaa

SEQ ID NO: 244793 - DNA, 15 bp, Homo sapiens
tttttgtgtccataa

SEQ ID NO: 244794 - DNA, 15 bp, Homo sapiens
atttttgtgtccata

SEQ ID NO: 244795 - DNA, 15 bp, Homo sapiens
aatttttgtgtccat

SEQ ID NO: 244796 - DNA, 15 bp, Homo sapiens
caatttttgtgtcca

SEQ ID NO: 244797 - DNA, 15 bp, Homo sapiens
ccaatttttgtgtcc

SEQ ID NO: 244798 - DNA, 15 bp, Homo sapiens
tccaatttttgtgtc

SEQ ID NO: 244799 - DNA, 15 bp, Homo sapiens
ttccaatttttgtgt

SEQ ID NO: 244800 - DNA, 15 bp, Homo sapiens
attccaatttttgtg

SEQ ID NO: 244801 - DNA, 15 bp, Homo sapiens
aattccaatttttgt

SEQ ID NO: 244802 - DNA, 15 bp, Homo sapiens
aaattccaatttttg

SEQ ID NO: 244803 - DNA, 15 bp, Homo sapiens
gaaattccaattttt

SEQ ID NO: 244804 - DNA, 15 bp, Homo sapiens
tgaaattccaatttt

SEQ ID NO: 244805 - DNA, 15 bp, Homo sapiens
atgaaattccaattt

SEQ ID NO: 244806 - DNA, 15 bp, Homo sapiens
tatgaaattccaatt

SEQ ID NO: 244807 - DNA, 15 bp, Homo sapiens
atatgaaattccaat

SEQ ID NO: 244808 - DNA, 15 bp, Homo sapiens
tatatgaaattccaa

SEQ ID NO: 244809 - DNA, 15 bp, Homo sapiens
ttatatgaaattcca

SEQ ID NO: 244810 - DNA, 15 bp, Homo sapiens
gttatatgaaattcc

SEQ ID NO: 244811 - DNA, 15 bp, Homo sapiens
agttatatgaaattc

SEQ ID NO: 244812 - DNA, 15 bp, Homo sapiens
cagttatatgaaatt

SEQ ID NO: 244813 - DNA, 15 bp, Homo sapiens
acagttatatgaaat

SEQ ID NO: 244814 - DNA, 15 bp, Homo sapiens
aacagttatatgaaa

SEQ ID NO: 244815 - DNA, 15 bp, Homo sapiens
aaacagttatatgaa

SEQ ID NO: 244816 - DNA, 15 bp, Homo sapiens
aaaacagttatatga

SEQ ID NO: 244817 - DNA, 15 bp, Homo sapiens
caaaacagttatatg

SEQ ID NO: 244818 - DNA, 15 bp, Homo sapiens
acaaaacagttatat

SEQ ID NO: 244819 - DNA, 15 bp, Homo sapiens
cacaaaacagttata

SEQ ID NO: 244820 - DNA, 15 bp, Homo sapiens
acacaaaacagttat

SEQ ID NO: 244821 - DNA, 15 bp, Homo sapiens
gacacaaaacagtta

SEQ ID NO: 244822 - DNA, 15 bp, Homo sapiens
tgacacaaaacagtt

SEQ ID NO: 244823 - DNA, 15 bp, Homo sapiens
atgacacaaaacagt

SEQ ID NO: 244824 - DNA, 15 bp, Homo sapiens
catgacacaaaacag

SEQ ID NO: 244825 - DNA, 15 bp, Homo sapiens
tcatgacacaaaaca

SEQ ID NO: 244826 - DNA, 15 bp, Homo sapiens
ttcatgacacaaaac

SEQ ID NO: 244827 - DNA, 15 bp, Homo sapiens
tttcatgacacaaaa

SEQ ID NO: 244828 - DNA, 15 bp, Homo sapiens
ttttcatgacacaaa

SEQ ID NO: 244829 - DNA, 15 bp, Homo sapiens
attttcatgacacaa

SEQ ID NO: 244830 - DNA, 15 bp, Homo sapiens
cattttcatgacaca

SEQ ID NO: 244831 - DNA, 15 bp, Homo sapiens
tcattttcatgacac

SEQ ID NO: 244832 - DNA, 15 bp, Homo sapiens
atcattttcatgaca

SEQ ID NO: 244833 - DNA, 15 bp, Homo sapiens
aatcattttcatgac

SEQ ID NO: 244834 - DNA, 15 bp, Homo sapiens
aaatcattttcatga

SEQ ID NO: 244835 - DNA, 15 bp, Homo sapiens
gaaatcattttcatg

SEQ ID NO: 244836 - DNA, 15 bp, Homo sapiens
ggaaatcattttcat

SEQ ID NO: 244837 - DNA, 15 bp, Homo sapiens
gggaaatcattttca

SEQ ID NO: 244838 - DNA, 15 bp, Homo sapiens
agggaaatcattttc

SEQ ID NO: 244839 - DNA, 15 bp, Homo sapiens
aagggaaatcatttt

SEQ ID NO: 244840 - DNA, 15 bp, Homo sapiens
aaagggaaatcattt

SEQ ID NO: 244841 - DNA, 15 bp, Homo sapiens
aaaagggaaatcatt

SEQ ID NO: 244842 - DNA, 15 bp, Homo sapiens
aaaaagggaaatcat

SEQ ID NO: 244843 - DNA, 15 bp, Homo sapiens
taaaaagggaaatca

SEQ ID NO: 244844 - DNA, 15 bp, Homo sapiens
ataaaaagggaaatc

SEQ ID NO: 244845 - DNA, 15 bp, Homo sapiens
aataaaaagggaaat

SEQ ID NO: 244846 - DNA, 15 bp, Homo sapiens
aaataaaaagggaaa

SEQ ID NO: 244847 - DNA, 15 bp, Homo sapiens
aaaataaaaagggaa

SEQ ID NO: 244848 - DNA, 15 bp, Homo sapiens
aaaaataaaaaggga

SEQ ID NO: 244849 - DNA, 15 bp, Homo sapiens
taaaaataaaaaggg

SEQ ID NO: 244850 - DNA, 15 bp, Homo sapiens
ataaaaataaaaagg

SEQ ID NO: 244851 - DNA, 15 bp, Homo sapiens
aataaaaataaaaag

SEQ ID NO: 244852 - DNA, 15 bp, Homo sapiens
aaataaaaataaaaa

SEQ ID NO: 244853 - DNA, 15 bp, Homo sapiens
gaaaaataaaaataa

SEQ ID NO: 244854 - DNA, 15 bp, Homo sapiens
agaaaaataaaaata

SEQ ID NO: 244855 - DNA, 15 bp, Homo sapiens
aagaaaaataaaaat

SEQ ID NO: 244856 - DNA, 15 bp, Homo sapiens
gaagaaaaataaaaa

SEQ ID NO: 244857 - DNA, 15 bp, Homo sapiens
agaagaaaaataaaa

SEQ ID NO: 244858 - DNA, 15 bp, Homo sapiens
gagaagaaaaataaa

SEQ ID NO: 244859 - DNA, 15 bp, Homo sapiens
tgagaagaaaaataa

SEQ ID NO: 244860 - DNA, 15 bp, Homo sapiens
ttgagaagaaaaata

SEQ ID NO: 244861 - DNA, 15 bp, Homo sapiens
cttgagaagaaaaat

SEQ ID NO: 244862 - DNA, 15 bp, Homo sapiens
acttgagaagaaaaa

SEQ ID NO: 244863 - DNA, 15 bp, Homo sapiens
tacttgagaagaaaa

SEQ ID NO: 244864 - DNA, 15 bp, Homo sapiens
atacttgagaagaaa

SEQ ID NO: 244865 - DNA, 15 bp, Homo sapiens
aatacttgagaagaa

SEQ ID NO: 244866 - DNA, 15 bp, Homo sapiens
aaatacttgagaaga

SEQ ID NO: 244867 - DNA, 15 bp, Homo sapiens
taaatacttgagaag

SEQ ID NO: 244868 - DNA, 15 bp, Homo sapiens
ttaaatacttgagaa

SEQ ID NO: 244869 - DNA, 15 bp, Homo sapiens
tttaaatacttgaga

SEQ ID NO: 244870 - DNA, 15 bp, Homo sapiens
atttaaatacttgag

SEQ ID NO: 244871 - DNA, 15 bp, Homo sapiens
tatttaaatacttga

SEQ ID NO: 244872 - DNA, 15 bp, Homo sapiens
atatttaaatacttg

SEQ ID NO: 244873 - DNA, 15 bp, Homo sapiens
catatttaaatactt

SEQ ID NO: 244874 - DNA, 15 bp, Homo sapiens
acatatttaaatact

SEQ ID NO: 244875 - DNA, 15 bp, Homo sapiens
tacatatttaaatac

SEQ ID NO: 244876 - DNA, 15 bp, Homo sapiens
ttacatatttaaata

SEQ ID NO: 244877 - DNA, 15 bp, Homo sapiens
tttacatatttaaat

SEQ ID NO: 244878 - DNA, 15 bp, Homo sapiens
ttttacatatttaaa

SEQ ID NO: 244879 - DNA, 15 bp, Homo sapiens
cttttacatatttaa

SEQ ID NO: 244880 - DNA, 15 bp, Homo sapiens
gcttttacatattta

SEQ ID NO: 244881 - DNA, 15 bp, Homo sapiens
ggcttttacatattt

SEQ ID NO: 244882 - DNA, 15 bp, Homo sapiens
tggcttttacatatt

SEQ ID NO: 244883 - DNA, 15 bp, Homo sapiens
atggcttttacatat

SEQ ID NO: 244884 - DNA, 15 bp, Homo sapiens
aatggcttttacata

SEQ ID NO: 244885 - DNA, 15 bp, Homo sapiens
aaatggcttttacat

SEQ ID NO: 244886 - DNA, 15 bp, Homo sapiens
aaaatggcttttaca

SEQ ID NO: 244887 - DNA, 15 bp, Homo sapiens
aaaaatggcttttac

SEQ ID NO: 244888 - DNA, 15 bp, Homo sapiens
taaaaatggctttta

SEQ ID NO: 244889 - DNA, 15 bp, Homo sapiens
ctaaaaatggctttt

SEQ ID NO: 244890 - DNA, 15 bp, Homo sapiens
cctaaaaatggcttt

SEQ ID NO: 244891 - DNA, 15 bp, Homo sapiens
gcctaaaaatggctt

SEQ ID NO: 244892 - DNA, 15 bp, Homo sapiens
ggcctaaaaatggct

SEQ ID NO: 244893 - DNA, 15 bp, Homo sapiens
aggcctaaaaatggc

SEQ ID NO: 244894 - DNA, 15 bp, Homo sapiens
caggcctaaaaatgg

SEQ ID NO: 244895 - DNA, 15 bp, Homo sapiens
ccaggcctaaaaatg

SEQ ID NO: 244896 - DNA, 15 bp, Homo sapiens
gccaggcctaaaaat

SEQ ID NO: 244897 - DNA, 15 bp, Homo sapiens
tgccaggcctaaaaa

SEQ ID NO: 244898 - DNA, 15 bp, Homo sapiens
ctgccaggcctaaaa

SEQ ID NO: 244899 - DNA, 15 bp, Homo sapiens
cctgccaggcctaaa

SEQ ID NO: 244900 - DNA, 15 bp, Homo sapiens
tcctgccaggcctaa

SEQ ID NO: 244901 - DNA, 15 bp, Homo sapiens
atcctgccaggccta

SEQ ID NO: 244902 - DNA, 15 bp, Homo sapiens
catcctgccaggcct

SEQ ID NO: 244903 - DNA, 15 bp, Homo sapiens
ccatcctgccaggcc

SEQ ID NO: 244904 - DNA, 15 bp, Homo sapiens
accatcctgccaggc

SEQ ID NO: 244905 - DNA, 15 bp, Homo sapiens
aaccatcctgccagg

SEQ ID NO: 244906 - DNA, 15 bp, Homo sapiens
gaaccatcctgccag

SEQ ID NO: 244907 - DNA, 15 bp, Homo sapiens
tgaaccatcctgcca

SEQ ID NO: 244908 - DNA, 15 bp, Homo sapiens
gtgaaccatcctgcc

SEQ ID NO: 244909 - DNA, 15 bp, Homo sapiens
tgtgaaccatcctgc

SEQ ID NO: 244910 - DNA, 15 bp, Homo sapiens
ctgtgaaccatcctg

SEQ ID NO: 244911 - DNA, 15 bp, Homo sapiens
gctgtgaaccatcct

SEQ ID NO: 244912 - DNA, 15 bp, Homo sapiens
agctgtgaaccatcc

SEQ ID NO: 244913 - DNA, 15 bp, Homo sapiens
cagctgtgaaccatc

SEQ ID NO: 244914 - DNA, 15 bp, Homo sapiens
acagctgtgaaccat

SEQ ID NO: 244915 - DNA, 15 bp, Homo sapiens
tacagctgtgaacca

SEQ ID NO: 244916 - DNA, 15 bp, Homo sapiens
ttacagctgtgaacc

SEQ ID NO: 244917 - DNA, 15 bp, Homo sapiens
attacagctgtgaac

SEQ ID NO: 244918 - DNA, 15 bp, Homo sapiens
gattacagctgtgaa

SEQ ID NO: 244919 - DNA, 15 bp, Homo sapiens
ggattacagctgtga

SEQ ID NO: 244920 - DNA, 15 bp, Homo sapiens
gggattacagctgtg

SEQ ID NO: 244921 - DNA, 15 bp, Homo sapiens
tgggattacagctgt

SEQ ID NO: 244922 - DNA, 15 bp, Homo sapiens
ctgggattacagctg

SEQ ID NO: 244923 - DNA, 15 bp, Homo sapiens
gctgggattacagct

SEQ ID NO: 244924 - DNA, 15 bp, Homo sapiens
tgctgggattacagc

SEQ ID NO: 244925 - DNA, 15 bp, Homo sapiens
acctcccaaagtgct

SEQ ID NO: 244926 - DNA, 15 bp, Homo sapiens
gacctcccaaagtgc

SEQ ID NO: 244927 - DNA, 15 bp, Homo sapiens
cgacctcccaaagtg

SEQ ID NO: 244928 - DNA, 15 bp, Homo sapiens
tcgacctcccaaagt

SEQ ID NO: 244929 - DNA, 15 bp, Homo sapiens
ctcgacctcccaaag

SEQ ID NO: 244930 - DNA, 15 bp, Homo sapiens
cctcgacctcccaaa

SEQ ID NO: 244931 - DNA, 15 bp, Homo sapiens
gcctcgacctcccaa

SEQ ID NO: 244932 - DNA, 15 bp, Homo sapiens
cgcctcgacctccca

SEQ ID NO: 244933 - DNA, 15 bp, Homo sapiens
ccgcctcgacctccc

SEQ ID NO: 244934 - DNA, 15 bp, Homo sapiens
cccgcctcgacctcc

SEQ ID NO: 244935 - DNA, 15 bp, Homo sapiens
tcccgcctcgacctc

SEQ ID NO: 244936 - DNA, 15 bp, Homo sapiens
ctcccgcctcgacct

SEQ ID NO: 244937 - DNA, 15 bp, Homo sapiens
cctcccgcctcgacc

SEQ ID NO: 244938 - DNA, 15 bp, Homo sapiens
tcctcccgcctcgac

SEQ ID NO: 244939 - DNA, 15 bp, Homo sapiens
atcctcccgcctcga

SEQ ID NO: 244940 - DNA, 15 bp, Homo sapiens
gatcctcccgcctcg

SEQ ID NO: 244941 - DNA, 15 bp, Homo sapiens
tgatcctcccgcctc

SEQ ID NO: 244942 - DNA, 15 bp, Homo sapiens
gtgatcctcccgcct

SEQ ID NO: 244943 - DNA, 15 bp, Homo sapiens
cgtgatcctcccgcc

SEQ ID NO: 244944 - DNA, 15 bp, Homo sapiens
tcgtgatcctcccgc

SEQ ID NO: 244945 - DNA, 15 bp, Homo sapiens
ctcgtgatcctcccg

SEQ ID NO: 244946 - DNA, 15 bp, Homo sapiens
cctcgtgatcctccc

SEQ ID NO: 244947 - DNA, 15 bp, Homo sapiens
acctcgtgatcctcc

SEQ ID NO: 244948 - DNA, 15 bp, Homo sapiens
gacctcgtgatcctc

SEQ ID NO: 244949 - DNA, 15 bp, Homo sapiens
tgacctcgtgatcct

SEQ ID NO: 244950 - DNA, 15 bp, Homo sapiens
ggccaggatggtctc

SEQ ID NO: 244951 - DNA, 15 bp, Homo sapiens
tggccaggatggtct

SEQ ID NO: 244952 - DNA, 15 bp, Homo sapiens
ttggccaggatggtc

SEQ ID NO: 244953 - DNA, 15 bp, Homo sapiens
gttggccaggatggt

SEQ ID NO: 244954 - DNA, 15 bp, Homo sapiens
gtgttggccaggatg

SEQ ID NO: 244955 - DNA, 15 bp, Homo sapiens
tgtgttggccaggat

SEQ ID NO: 244956 - DNA, 15 bp, Homo sapiens
ctgtgttggccagga

SEQ ID NO: 244957 - DNA, 15 bp, Homo sapiens
actgtgttggccagg

SEQ ID NO: 244958 - DNA, 15 bp, Homo sapiens
cactgtgttggccag

SEQ ID NO: 244959 - DNA, 15 bp, Homo sapiens
tcactgtgttggcca

SEQ ID NO: 244960 - DNA, 15 bp, Homo sapiens
ttcactgtgttggcc

SEQ ID NO: 244961 - DNA, 15 bp, Homo sapiens
tttcactgtgttggc

SEQ ID NO: 244962 - DNA, 15 bp, Homo sapiens
gtttcactgtgttgg

SEQ ID NO: 244963 - DNA, 15 bp, Homo sapiens
ggtttcactgtgttg

SEQ ID NO: 244964 - DNA, 15 bp, Homo sapiens
gggtttcactgtgtt

SEQ ID NO: 244965 - DNA, 15 bp, Homo sapiens
ggggtttcactgtgt

SEQ ID NO: 244966 - DNA, 15 bp, Homo sapiens
cggggtttcactgtg

SEQ ID NO: 244967 - DNA, 15 bp, Homo sapiens
acggggtttcactgt

SEQ ID NO: 244968 - DNA, 15 bp, Homo sapiens
gacggggtttcactg

SEQ ID NO: 244969 - DNA, 15 bp, Homo sapiens
ttaattttttgtatt

SEQ ID NO: 244970 - DNA, 15 bp, Homo sapiens
gttaattttttgtat

SEQ ID NO: 244971 - DNA, 15 bp, Homo sapiens
ggttaattttttgta

SEQ ID NO: 244972 - DNA, 15 bp, Homo sapiens
tggttaattttttgt

SEQ ID NO: 244973 - DNA, 15 bp, Homo sapiens
ctggttaattttttg

SEQ ID NO: 244974 - DNA, 15 bp, Homo sapiens
cctggttaatttttt

SEQ ID NO: 244975 - DNA, 15 bp, Homo sapiens
gcctggttaattttt

SEQ ID NO: 244976 - DNA, 15 bp, Homo sapiens
agcctggttaatttt

SEQ ID NO: 244977 - DNA, 15 bp, Homo sapiens
aagcctggttaattt

SEQ ID NO: 244978 - DNA, 15 bp, Homo sapiens
caagcctggttaatt

SEQ ID NO: 244979 - DNA, 15 bp, Homo sapiens
ccaagcctggttaat

SEQ ID NO: 244980 - DNA, 15 bp, Homo sapiens
accaagcctggttaa

SEQ ID NO: 244981 - DNA, 15 bp, Homo sapiens
caccaagcctggtta

SEQ ID NO: 244982 - DNA, 15 bp, Homo sapiens
ccaccaagcctggtt

SEQ ID NO: 244983 - DNA, 15 bp, Homo sapiens
gccaccaagcctggt

SEQ ID NO: 244984 - DNA, 15 bp, Homo sapiens
cgccaccaagcctgg

SEQ ID NO: 244985 - DNA, 15 bp, Homo sapiens
gcgccaccaagcctg

SEQ ID NO: 244986 - DNA, 15 bp, Homo sapiens
cgcgccaccaagcct

SEQ ID NO: 244987 - DNA, 15 bp, Homo sapiens
gcgcgccaccaagcc

SEQ ID NO: 244988 - DNA, 15 bp, Homo sapiens
cgcgcgccaccaagc

SEQ ID NO: 244989 - DNA, 15 bp, Homo sapiens
acgcgcgccaccaag

SEQ ID NO: 244990 - DNA, 15 bp, Homo sapiens
gacgcgcgccaccaa

SEQ ID NO: 244991 - DNA, 15 bp, Homo sapiens
agacgcgcgccacca

SEQ ID NO: 244992 - DNA, 15 bp, Homo sapiens
cagacgcgcgccacc

SEQ ID NO: 244993 - DNA, 15 bp, Homo sapiens
acagacgcgcgccac

SEQ ID NO: 244994 - DNA, 15 bp, Homo sapiens
tacagacgcgcgcca

SEQ ID NO: 244995 - DNA, 15 bp, Homo sapiens
ctacagacgcgcgcc

SEQ ID NO: 244996 - DNA, 15 bp, Homo sapiens
actacagacgcgcgc

SEQ ID NO: 244997 - DNA, 15 bp, Homo sapiens
gactacagacgcgcg

SEQ ID NO: 244998 - DNA, 15 bp, Homo sapiens
ggactacagacgcgc

SEQ ID NO: 244999 - DNA, 15 bp, Homo sapiens
gggactacagacgcg

SEQ ID NO: 245000 - DNA, 15 bp, Homo sapiens
tgggactacagacgc

SEQ ID NO: 245001 - DNA, 15 bp, Homo sapiens
ctgggactacagacg

SEQ ID NO: 245002 - DNA, 15 bp, Homo sapiens
cagctgggactacag

SEQ ID NO: 245003 - DNA, 15 bp, Homo sapiens
gcagctgggactaca

SEQ ID NO: 245004 - DNA, 15 bp, Homo sapiens
agcagctgggactac

SEQ ID NO: 245005 - DNA, 15 bp, Homo sapiens
gagcagctgggacta

SEQ ID NO: 245006 - DNA, 15 bp, Homo sapiens
tgagcagctgggact

SEQ ID NO: 245007 - DNA, 15 bp, Homo sapiens
ctgagcagctgggac

SEQ ID NO: 245008 - DNA, 15 bp, Homo sapiens
cctgagcagctggga

SEQ ID NO: 245009 - DNA, 15 bp, Homo sapiens
tcctgagcagctggg

SEQ ID NO: 245010 - DNA, 15 bp, Homo sapiens
ctcctgagcagctgg

SEQ ID NO: 245011 - DNA, 15 bp, Homo sapiens
cctcctgagcagctg

SEQ ID NO: 245012 - DNA, 15 bp, Homo sapiens
gcctcctgagcagct

SEQ ID NO: 245013 - DNA, 15 bp, Homo sapiens
agcctcctgagcagc

SEQ ID NO: 245014 - DNA, 15 bp, Homo sapiens
cagcctcctgagcag

SEQ ID NO: 245015 - DNA, 15 bp, Homo sapiens
tcagcctcctgagca

SEQ ID NO: 245016 - DNA, 15 bp, Homo sapiens
ctcagcctcctgagc

SEQ ID NO: 245017 - DNA, 15 bp, Homo sapiens
attcaagcgattctc

SEQ ID NO: 245018 - DNA, 15 bp, Homo sapiens
cattcaagcgattct

SEQ ID NO: 245019 - DNA, 15 bp, Homo sapiens
gcattcaagcgattc

SEQ ID NO: 245020 - DNA, 15 bp, Homo sapiens
tgcattcaagcgatt

SEQ ID NO: 245021 - DNA, 15 bp, Homo sapiens
ctgcattcaagcgat

SEQ ID NO: 245022 - DNA, 15 bp, Homo sapiens
cctgcattcaagcga

SEQ ID NO: 245023 - DNA, 15 bp, Homo sapiens
tcctgcattcaagcg

SEQ ID NO: 245024 - DNA, 15 bp, Homo sapiens
ctcctgcattcaagc

SEQ ID NO: 245025 - DNA, 15 bp, Homo sapiens
cctcctgcattcaag

SEQ ID NO: 245026 - DNA, 15 bp, Homo sapiens
gcctcctgcattcaa

SEQ ID NO: 245027 - DNA, 15 bp, Homo sapiens
cgcctcctgcattca

SEQ ID NO: 245028 - DNA, 15 bp, Homo sapiens
ccgcctcctgcattc

SEQ ID NO: 245029 - DNA, 15 bp, Homo sapiens
tccgcctcctgcatt

SEQ ID NO: 245030 - DNA, 15 bp, Homo sapiens
ctccgcctcctgcat

SEQ ID NO: 245031 - DNA, 15 bp, Homo sapiens
cctccgcctcctgca

SEQ ID NO: 245032 - DNA, 15 bp, Homo sapiens
acctccgcctcctgc

SEQ ID NO: 245033 - DNA, 15 bp, Homo sapiens
aacctccgcctcctg

SEQ ID NO: 245034 - DNA, 15 bp, Homo sapiens
caacctccgcctcct

SEQ ID NO: 245035 - DNA, 15 bp, Homo sapiens
acaacctccgcctcc

SEQ ID NO: 245036 - DNA, 15 bp, Homo sapiens
tacaacctccgcctc

SEQ ID NO: 245037 - DNA, 15 bp, Homo sapiens
ctacaacctccgcct

SEQ ID NO: 245038 - DNA, 15 bp, Homo sapiens
actacaacctccgcc

SEQ ID NO: 245039 - DNA, 15 bp, Homo sapiens
cactacaacctccgc

SEQ ID NO: 245040 - DNA, 15 bp, Homo sapiens
tcactacaacctccg

SEQ ID NO: 245041 - DNA, 15 bp, Homo sapiens
ctcactacaacctcc

SEQ ID NO: 245042 - DNA, 15 bp, Homo sapiens
gctcactacaacctc

SEQ ID NO: 245043 - DNA, 15 bp, Homo sapiens
ggctcactacaacct

SEQ ID NO: 245044 - DNA, 15 bp, Homo sapiens
cggctcactacaacc

SEQ ID NO: 245045 - DNA, 15 bp, Homo sapiens
tcggctcactacaac

SEQ ID NO: 245046 - DNA, 15 bp, Homo sapiens
ctcggctcactacaa

SEQ ID NO: 245047 - DNA, 15 bp, Homo sapiens
cctcggctcactaca

SEQ ID NO: 245048 - DNA, 15 bp, Homo sapiens
acctcggctcactac

SEQ ID NO: 245049 - DNA, 15 bp, Homo sapiens
aacctcggctcacta

SEQ ID NO: 245050 - DNA, 15 bp, Homo sapiens
caacctcggctcact

SEQ ID NO: 245051 - DNA, 15 bp, Homo sapiens
gcaacctcggctcac

SEQ ID NO: 245052 - DNA, 15 bp, Homo sapiens
tgcaacctcggctca

SEQ ID NO: 245053 - DNA, 15 bp, Homo sapiens
gtgcaacctcggctc

SEQ ID NO: 245054 - DNA, 15 bp, Homo sapiens
ggtgcaacctcggct

SEQ ID NO: 245055 - DNA, 15 bp, Homo sapiens
tggtgcaacctcggc

SEQ ID NO: 245056 - DNA, 15 bp, Homo sapiens
gtggtgcaacctcgg

SEQ ID NO: 245057 - DNA, 15 bp, Homo sapiens
agtggtgcaacctcg

SEQ ID NO: 245058 - DNA, 15 bp, Homo sapiens
cagtggtgcaacctc

SEQ ID NO: 245059 - DNA, 15 bp, Homo sapiens
gcagtggtgcaacct

SEQ ID NO: 245060 - DNA, 15 bp, Homo sapiens
tgcagtggtgcaacc

SEQ ID NO: 245061 - DNA, 15 bp, Homo sapiens
gtgcagtggtgcaac

SEQ ID NO: 245062 - DNA, 15 bp, Homo sapiens
tcaggctggagtgca

SEQ ID NO: 245063 - DNA, 15 bp, Homo sapiens
ctcaggctggagtgc

SEQ ID NO: 245064 - DNA, 15 bp, Homo sapiens
gctcaggctggagtg

SEQ ID NO: 245065 - DNA, 15 bp, Homo sapiens
cgctcaggctggagt

SEQ ID NO: 245066 - DNA, 15 bp, Homo sapiens
tcgctcaggctggag

SEQ ID NO: 245067 - DNA, 15 bp, Homo sapiens
gtcgctcaggctgga

SEQ ID NO: 245068 - DNA, 15 bp, Homo sapiens
tgtcgctcaggctgg

SEQ ID NO: 245069 - DNA, 15 bp, Homo sapiens
ctgtcgctcaggctg

SEQ ID NO: 245070 - DNA, 15 bp, Homo sapiens
tctgtcgctcaggct

SEQ ID NO: 245071 - DNA, 15 bp, Homo sapiens
ctctgtcgctcaggc

SEQ ID NO: 245072 - DNA, 15 bp, Homo sapiens
actctgtcgctcagg

SEQ ID NO: 245073 - DNA, 15 bp, Homo sapiens
cactctgtcgctcag

SEQ ID NO: 245074 - DNA, 15 bp, Homo sapiens
tcactctgtcgctca

SEQ ID NO: 245075 - DNA, 15 bp, Homo sapiens
ctcactctgtcgctc

SEQ ID NO: 245076 - DNA, 15 bp, Homo sapiens
tctcactctgtcgct

SEQ ID NO: 245077 - DNA, 15 bp, Homo sapiens
ctctcactctgtcgc

SEQ ID NO: 245078 - DNA, 15 bp, Homo sapiens
actctcactctgtcg

SEQ ID NO: 245079 - DNA, 15 bp, Homo sapiens
gactctcactctgtc

SEQ ID NO: 245080 - DNA, 15 bp, Homo sapiens
ggactctcactctgt

SEQ ID NO: 245081 - DNA, 15 bp, Homo sapiens
cggactctcactctg

SEQ ID NO: 245082 - DNA, 15 bp, Homo sapiens
gcggactctcactct

SEQ ID NO: 245083 - DNA, 15 bp, Homo sapiens
ggcggactctcactc

SEQ ID NO: 245084 - DNA, 15 bp, Homo sapiens
aggcggactctcact

SEQ ID NO: 245085 - DNA, 15 bp, Homo sapiens
gaggcggactctcac

SEQ ID NO: 245086 - DNA, 15 bp, Homo sapiens
tgaggcggactctca

SEQ ID NO: 245087 - DNA, 15 bp, Homo sapiens
ttgaggcggactctc

SEQ ID NO: 245088 - DNA, 15 bp, Homo sapiens
tttgaggcggactct

SEQ ID NO: 245089 - DNA, 15 bp, Homo sapiens
gtttgaggcggactc

SEQ ID NO: 245090 - DNA, 15 bp, Homo sapiens
tgtttgaggcggact

SEQ ID NO: 245091 - DNA, 15 bp, Homo sapiens
ttgtttgaggcggac

SEQ ID NO: 245092 - DNA, 15 bp, Homo sapiens
tttgtttgaggcgga

SEQ ID NO: 245093 - DNA, 15 bp, Homo sapiens
ttttgtttgaggcgg

SEQ ID NO: 245094 - DNA, 15 bp, Homo sapiens
tttttgtttgaggcg

SEQ ID NO: 245095 - DNA, 15 bp, Homo sapiens
ttttttgtttgaggc

SEQ ID NO: 245096 - DNA, 15 bp, Homo sapiens
tttttttgtttgagg

SEQ ID NO: 245097 - DNA, 15 bp, Homo sapiens
atttttttgtttgag

SEQ ID NO: 245098 - DNA, 15 bp, Homo sapiens
catttttttgtttga

SEQ ID NO: 245099 - DNA, 15 bp, Homo sapiens
acatttttttgtttg

SEQ ID NO: 245100 - DNA, 15 bp, Homo sapiens
aacatttttttgttt

SEQ ID NO: 245101 - DNA, 15 bp, Homo sapiens
aaacatttttttgtt

SEQ ID NO: 245102 - DNA, 15 bp, Homo sapiens
caaacatttttttgt

SEQ ID NO: 245103 - DNA, 15 bp, Homo sapiens
gcaaacatttttttg

SEQ ID NO: 245104 - DNA, 15 bp, Homo sapiens
ggcaaacattttttt

SEQ ID NO: 245105 - DNA, 15 bp, Homo sapiens
gggcaaacatttttt

SEQ ID NO: 245106 - DNA, 15 bp, Homo sapiens
tgggcaaacattttt

SEQ ID NO: 245107 - DNA, 15 bp, Homo sapiens
atgggcaaacatttt

SEQ ID NO: 245108 - DNA, 15 bp, Homo sapiens
catgggcaaacattt

SEQ ID NO: 245109 - DNA, 15 bp, Homo sapiens
gcatgggcaaacatt

SEQ ID NO: 245110 - DNA, 15 bp, Homo sapiens
agcatgggcaaacat

SEQ ID NO: 245111 - DNA, 15 bp, Homo sapiens
cagcatgggcaaaca

SEQ ID NO: 245112 - DNA, 15 bp, Homo sapiens
ccagcatgggcaaac

SEQ ID NO: 245113 - DNA, 15 bp, Homo sapiens
accagcatgggcaaa

SEQ ID NO: 245114 - DNA, 15 bp, Homo sapiens
gaccagcatgggcaa

SEQ ID NO: 245115 - DNA, 15 bp, Homo sapiens
agaccagcatgggca

SEQ ID NO: 245116 - DNA, 15 bp, Homo sapiens
aagaccagcatgggc

SEQ ID NO: 245117 - DNA, 15 bp, Homo sapiens
caagaccagcatggg

SEQ ID NO: 245118 - DNA, 15 bp, Homo sapiens
tcaagaccagcatgg

SEQ ID NO: 245119 - DNA, 15 bp, Homo sapiens
ttcaagaccagcatg

SEQ ID NO: 245120 - DNA, 15 bp, Homo sapiens
gttcaagaccagcat

SEQ ID NO: 245121 - DNA, 15 bp, Homo sapiens
agttcaagaccagca

SEQ ID NO: 245122 - DNA, 15 bp, Homo sapiens
agcttgagcccagga

SEQ ID NO: 245123 - DNA, 15 bp, Homo sapiens
tagcttgagcccagg

SEQ ID NO: 245124 - DNA, 15 bp, Homo sapiens
atagcttgagcccag

SEQ ID NO: 245125 - DNA, 15 bp, Homo sapiens
gatagcttgagccca

SEQ ID NO: 245126 - DNA, 15 bp, Homo sapiens
agatagcttgagccc

SEQ ID NO: 245127 - DNA, 15 bp, Homo sapiens
cagatagcttgagcc

SEQ ID NO: 245128 - DNA, 15 bp, Homo sapiens
gcagatagcttgagc

SEQ ID NO: 245129 - DNA, 15 bp, Homo sapiens
ggcagatagcttgag

SEQ ID NO: 245130 - DNA, 15 bp, Homo sapiens
aggcagatagcttga

SEQ ID NO: 245131 - DNA, 15 bp, Homo sapiens
caggcagatagcttg

SEQ ID NO: 245132 - DNA, 15 bp, Homo sapiens
gcaggcagatagctt

SEQ ID NO: 245133 - DNA, 15 bp, Homo sapiens
ggcaggcagatagct

SEQ ID NO: 245134 - DNA, 15 bp, Homo sapiens
aggcaggcagatagc

SEQ ID NO: 245135 - DNA, 15 bp, Homo sapiens
aaggcaggcagatag

SEQ ID NO: 245136 - DNA, 15 bp, Homo sapiens
caaggcaggcagata

SEQ ID NO: 245137 - DNA, 15 bp, Homo sapiens
accaaggcaggcaga

SEQ ID NO: 245138 - DNA, 15 bp, Homo sapiens
gaccaaggcaggcag

SEQ ID NO: 245139 - DNA, 15 bp, Homo sapiens
agaccaaggcaggca

SEQ ID NO: 245140 - DNA, 15 bp, Homo sapiens
gagaccaaggcaggc

SEQ ID NO: 245141 - DNA, 15 bp, Homo sapiens
ggagaccaaggcagg

SEQ ID NO: 245142 - DNA, 15 bp, Homo sapiens
gggagaccaaggcag

SEQ ID NO: 245143 - DNA, 15 bp, Homo sapiens
tgggagaccaaggca

SEQ ID NO: 245144 - DNA, 15 bp, Homo sapiens
ttgggagaccaaggc

SEQ ID NO: 245145 - DNA, 15 bp, Homo sapiens
tttgggagaccaagg

SEQ ID NO: 245146 - DNA, 15 bp, Homo sapiens
ctttgggagaccaag

SEQ ID NO: 245147 - DNA, 15 bp, Homo sapiens
actttgggagaccaa

SEQ ID NO: 245148 - DNA, 15 bp, Homo sapiens
aactttgggagacca

SEQ ID NO: 245149 - DNA, 15 bp, Homo sapiens
gaactttgggagacc

SEQ ID NO: 245150 - DNA, 15 bp, Homo sapiens
agaactttgggagac

SEQ ID NO: 245151 - DNA, 15 bp, Homo sapiens
cagaactttgggaga

SEQ ID NO: 245152 - DNA, 15 bp, Homo sapiens
ccagaactttgggag

SEQ ID NO: 245153 - DNA, 15 bp, Homo sapiens
cccagaactttggga

SEQ ID NO: 245154 - DNA, 15 bp, Homo sapiens
tcccagaactttggg

SEQ ID NO: 245155 - DNA, 15 bp, Homo sapiens
atcccagaactttgg

SEQ ID NO: 245156 - DNA, 15 bp, Homo sapiens
aatcccagaactttg

SEQ ID NO: 245157 - DNA, 15 bp, Homo sapiens
taatcccagaacttt

SEQ ID NO: 245158 - DNA, 15 bp, Homo sapiens
gtaatcccagaactt

SEQ ID NO: 245159 - DNA, 15 bp, Homo sapiens
tgtaatcccagaact

SEQ ID NO: 245160 - DNA, 15 bp, Homo sapiens
ctgtaatcccagaac

SEQ ID NO: 245161 - DNA, 15 bp, Homo sapiens
cctgtaatcccagaa

SEQ ID NO: 245162 - DNA, 15 bp, Homo sapiens
gcctgtaatcccaga

SEQ ID NO: 245163 - DNA, 15 bp, Homo sapiens
agctcatgcctgtaa

SEQ ID NO: 245164 - DNA, 15 bp, Homo sapiens
tagctcatgcctgta

SEQ ID NO: 245165 - DNA, 15 bp, Homo sapiens
gtagctcatgcctgt

SEQ ID NO: 245166 - DNA, 15 bp, Homo sapiens
tgtagctcatgcctg

SEQ ID NO: 245167 - DNA, 15 bp, Homo sapiens
ctgtagctcatgcct

SEQ ID NO: 245168 - DNA, 15 bp, Homo sapiens
gctgtagctcatgcc

SEQ ID NO: 245169 - DNA, 15 bp, Homo sapiens
cgctgtagctcatgc

SEQ ID NO: 245170 - DNA, 15 bp, Homo sapiens
gcgctgtagctcatg

SEQ ID NO: 245171 - DNA, 15 bp, Homo sapiens
ggcgctgtagctcat

SEQ ID NO: 245172 - DNA, 15 bp, Homo sapiens
gggcgctgtagctca

SEQ ID NO: 245173 - DNA, 15 bp, Homo sapiens
cgggcgctgtagctc

SEQ ID NO: 245174 - DNA, 15 bp, Homo sapiens
ccgggcgctgtagct

SEQ ID NO: 245175 - DNA, 15 bp, Homo sapiens
tccgggcgctgtagc

SEQ ID NO: 245176 - DNA, 15 bp, Homo sapiens
gtccgggcgctgtag

SEQ ID NO: 245177 - DNA, 15 bp, Homo sapiens
agtccgggcgctgta

SEQ ID NO: 245178 - DNA, 15 bp, Homo sapiens
aagtccgggcgctgt

SEQ ID NO: 245179 - DNA, 15 bp, Homo sapiens
aaagtccgggcgctg

SEQ ID NO: 245180 - DNA, 15 bp, Homo sapiens
aaaagtccgggcgct

SEQ ID NO: 245181 - DNA, 15 bp, Homo sapiens
caaaagtccgggcgc

SEQ ID NO: 245182 - DNA, 15 bp, Homo sapiens
acaaaagtccgggcg

SEQ ID NO: 245183 - DNA, 15 bp, Homo sapiens
aacaaaagtccgggc

SEQ ID NO: 245184 - DNA, 15 bp, Homo sapiens
caacaaaagtccggg

SEQ ID NO: 245185 - DNA, 15 bp, Homo sapiens
acaacaaaagtccgg

SEQ ID NO: 245186 - DNA, 15 bp, Homo sapiens
aacaacaaaagtccg

SEQ ID NO: 245187 - DNA, 15 bp, Homo sapiens
aaacaacaaaagtcc

SEQ ID NO: 245188 - DNA, 15 bp, Homo sapiens
aaaacaacaaaagtc

SEQ ID NO: 245189 - DNA, 15 bp, Homo sapiens
taaaacaacaaaagt

SEQ ID NO: 245190 - DNA, 15 bp, Homo sapiens
ataaaacaacaaaag

SEQ ID NO: 245191 - DNA, 15 bp, Homo sapiens
tataaaacaacaaaa

SEQ ID NO: 245192 - DNA, 15 bp, Homo sapiens
atataaaacaacaaa

SEQ ID NO: 245193 - DNA, 15 bp, Homo sapiens
gatataaaacaacaa

SEQ ID NO: 245194 - DNA, 15 bp, Homo sapiens
agatataaaacaaca

SEQ ID NO: 245195 - DNA, 15 bp, Homo sapiens
tagatataaaacaac

SEQ ID NO: 245196 - DNA, 15 bp, Homo sapiens
atagatataaaacaa

SEQ ID NO: 245197 - DNA, 15 bp, Homo sapiens
tatagatataaaaca

SEQ ID NO: 245198 - DNA, 15 bp, Homo sapiens
atatagatataaaac

SEQ ID NO: 245199 - DNA, 15 bp, Homo sapiens
tatatagatataaaa

SEQ ID NO: 245200 - DNA, 15 bp, Homo sapiens
atatatagatataaa

SEQ ID NO: 245201 - DNA, 15 bp, Homo sapiens
gatatatagatataa

SEQ ID NO: 245202 - DNA, 15 bp, Homo sapiens
agatatatagatata

SEQ ID NO: 245203 - DNA, 15 bp, Homo sapiens
tagatatatagatat

SEQ ID NO: 245204 - DNA, 15 bp, Homo sapiens
atagatatatagata

SEQ ID NO: 245205 - DNA, 15 bp, Homo sapiens
tatagatatatagat

SEQ ID NO: 245206 - DNA, 15 bp, Homo sapiens
atatagatatataga

SEQ ID NO: 245207 - DNA, 15 bp, Homo sapiens
tatatagatatatag

SEQ ID NO: 245208 - DNA, 15 bp, Homo sapiens
atatatagatatata

SEQ ID NO: 245209 - DNA, 15 bp, Homo sapiens
tatatatagatatat

SEQ ID NO: 245210 - DNA, 15 bp, Homo sapiens
ttatatatagatata

SEQ ID NO: 245211 - DNA, 15 bp, Homo sapiens
gttatatatagatat

SEQ ID NO: 245212 - DNA, 15 bp, Homo sapiens
agttatatatagata

SEQ ID NO: 245213 - DNA, 15 bp, Homo sapiens
aagttatatatagat

SEQ ID NO: 245214 - DNA, 15 bp, Homo sapiens
caagttatatataga

SEQ ID NO: 245215 - DNA, 15 bp, Homo sapiens
acaagttatatatag

SEQ ID NO: 245216 - DNA, 15 bp, Homo sapiens
aacaagttatatata

SEQ ID NO: 245217 - DNA, 15 bp, Homo sapiens
aaacaagttatatat

SEQ ID NO: 245218 - DNA, 15 bp, Homo sapiens
aaaacaagttatata

SEQ ID NO: 245219 - DNA, 15 bp, Homo sapiens
taaaacaagttatat

SEQ ID NO: 245220 - DNA, 15 bp, Homo sapiens
ataaaacaagttata

SEQ ID NO: 245221 - DNA, 15 bp, Homo sapiens
cataaaacaagttat

SEQ ID NO: 245222 - DNA, 15 bp, Homo sapiens
acataaaacaagtta

SEQ ID NO: 245223 - DNA, 15 bp, Homo sapiens
tacataaaacaagtt

SEQ ID NO: 245224 - DNA, 15 bp, Homo sapiens
atacataaaacaagt

SEQ ID NO: 245225 - DNA, 15 bp, Homo sapiens
tatacataaaacaag

SEQ ID NO: 245226 - DNA, 15 bp, Homo sapiens
atatacataaaacaa

SEQ ID NO: 245227 - DNA, 15 bp, Homo sapiens
tatatacataaaaca

SEQ ID NO: 245228 - DNA, 15 bp, Homo sapiens
atatatacataaaac

SEQ ID NO: 245229 - DNA, 15 bp, Homo sapiens
tatatatacataaaa

SEQ ID NO: 245230 - DNA, 15 bp, Homo sapiens
atatatatacataaa

SEQ ID NO: 245231 - DNA, 15 bp, Homo sapiens
tatatatatacataa

SEQ ID NO: 245232 - DNA, 15 bp, Homo sapiens
ttatatatatacata

SEQ ID NO: 245233 - DNA, 15 bp, Homo sapiens
gttatatatatacat

SEQ ID NO: 245234 - DNA, 15 bp, Homo sapiens
agttatatatataca

SEQ ID NO: 245235 - DNA, 15 bp, Homo sapiens
aagttatatatatac

SEQ ID NO: 245236 - DNA, 15 bp, Homo sapiens
caagttatatatata

SEQ ID NO: 245237 - DNA, 15 bp, Homo sapiens
acaagttatatatat

SEQ ID NO: 245238 - DNA, 15 bp, Homo sapiens
tataaaacaagttat

SEQ ID NO: 245239 - DNA, 15 bp, Homo sapiens
atataaaacaagtta

SEQ ID NO: 245240 - DNA, 15 bp, Homo sapiens
tatataaaacaagtt

SEQ ID NO: 245241 - DNA, 15 bp, Homo sapiens
atatataaaacaagt

SEQ ID NO: 245242 - DNA, 15 bp, Homo sapiens
tatatataaaacaag

SEQ ID NO: 245243 - DNA, 15 bp, Homo sapiens
atatatataaaacaa

SEQ ID NO: 245244 - DNA, 15 bp, Homo sapiens
tatatatataaaaca

SEQ ID NO: 245245 - DNA, 15 bp, Homo sapiens
gtatatatataaaac

SEQ ID NO: 245246 - DNA, 15 bp, Homo sapiens
tgtatatatataaaa

SEQ ID NO: 245247 - DNA, 15 bp, Homo sapiens
atgtatatatataaa

SEQ ID NO: 245248 - DNA, 15 bp, Homo sapiens
tatgtatatatataa

SEQ ID NO: 245249 - DNA, 15 bp, Homo sapiens
ttatgtatatatata

SEQ ID NO: 245250 - DNA, 15 bp, Homo sapiens
tttatgtatatatat

SEQ ID NO: 245251 - DNA, 15 bp, Homo sapiens
gtttatgtatatata

SEQ ID NO: 245252 - DNA, 15 bp, Homo sapiens
agtttatgtatatat

SEQ ID NO: 245253 - DNA, 15 bp, Homo sapiens
cagtttatgtatata

SEQ ID NO: 245254 - DNA, 15 bp, Homo sapiens
gcagtttatgtatat

SEQ ID NO: 245255 - DNA, 15 bp, Homo sapiens
tgcagtttatgtata

SEQ ID NO: 245256 - DNA, 15 bp, Homo sapiens
ctgcagtttatgtat

SEQ ID NO: 245257 - DNA, 15 bp, Homo sapiens
actgcagtttatgta

SEQ ID NO: 245258 - DNA, 15 bp, Homo sapiens
tactgcagtttatgt

SEQ ID NO: 245259 - DNA, 15 bp, Homo sapiens
ttactgcagtttatg

SEQ ID NO: 245260 - DNA, 15 bp, Homo sapiens
tttactgcagtttat

SEQ ID NO: 245261 - DNA, 15 bp, Homo sapiens
ttttactgcagttta

SEQ ID NO: 245262 - DNA, 15 bp, Homo sapiens
tttttactgcagttt

SEQ ID NO: 245263 - DNA, 15 bp, Homo sapiens
ttttttactgcagtt

SEQ ID NO: 245264 - DNA, 15 bp, Homo sapiens
gttttttactgcagt

SEQ ID NO: 245265 - DNA, 15 bp, Homo sapiens
tgttttttactgcag

SEQ ID NO: 245266 - DNA, 15 bp, Homo sapiens
atgttttttactgca

SEQ ID NO: 245267 - DNA, 15 bp, Homo sapiens
catgttttttactgc

SEQ ID NO: 245268 - DNA, 15 bp, Homo sapiens
acatgttttttactg

SEQ ID NO: 245269 - DNA, 15 bp, Homo sapiens
tacatgttttttact

SEQ ID NO: 245270 - DNA, 15 bp, Homo sapiens
ttacatgttttttac

SEQ ID NO: 245271 - DNA, 15 bp, Homo sapiens
gttacatgtttttta

SEQ ID NO: 245272 - DNA, 15 bp, Homo sapiens
tgttacatgtttttt

SEQ ID NO: 245273 - DNA, 15 bp, Homo sapiens
atgttacatgttttt

SEQ ID NO: 245274 - DNA, 15 bp, Homo sapiens
tatgttacatgtttt

SEQ ID NO: 245275 - DNA, 15 bp, Homo sapiens
ttatgttacatgttt

SEQ ID NO: 245276 - DNA, 15 bp, Homo sapiens
tttatgttacatgtt

SEQ ID NO: 245277 - DNA, 15 bp, Homo sapiens
ttttatgttacatgt

SEQ ID NO: 245278 - DNA, 15 bp, Homo sapiens
attttatgttacatg

SEQ ID NO: 245279 - DNA, 15 bp, Homo sapiens
aattttatgttacat

SEQ ID NO: 245280 - DNA, 15 bp, Homo sapiens
aaattttatgttaca

SEQ ID NO: 245281 - DNA, 15 bp, Homo sapiens
taaattttatgttac

SEQ ID NO: 245282 - DNA, 15 bp, Homo sapiens
gtaaattttatgtta

SEQ ID NO: 245283 - DNA, 15 bp, Homo sapiens
ggtaaattttatgtt

SEQ ID NO: 245284 - DNA, 15 bp, Homo sapiens
aggtaaattttatgt

SEQ ID NO: 245285 - DNA, 15 bp, Homo sapiens
aaggtaaattttatg

SEQ ID NO: 245286 - DNA, 15 bp, Homo sapiens
gaaggtaaattttat

SEQ ID NO: 245287 - DNA, 15 bp, Homo sapiens
agaaggtaaatttta

SEQ ID NO: 245288 - DNA, 15 bp, Homo sapiens
gagaaggtaaatttt

SEQ ID NO: 245289 - DNA, 15 bp, Homo sapiens
tgagaaggtaaattt

SEQ ID NO: 245290 - DNA, 15 bp, Homo sapiens
ttgagaaggtaaatt

SEQ ID NO: 245291 - DNA, 15 bp, Homo sapiens
tttgagaaggtaaat

SEQ ID NO: 245292 - DNA, 15 bp, Homo sapiens
gtttgagaaggtaaa

SEQ ID NO: 245293 - DNA, 15 bp, Homo sapiens
ggtttgagaaggtaa

SEQ ID NO: 245294 - DNA, 15 bp, Homo sapiens
aggtttgagaaggta

SEQ ID NO: 245295 - DNA, 15 bp, Homo sapiens
aaggtttgagaaggt

SEQ ID NO: 245296 - DNA, 15 bp, Homo sapiens
taaggtttgagaagg

SEQ ID NO: 245297 - DNA, 15 bp, Homo sapiens
ataaggtttgagaag

SEQ ID NO: 245298 - DNA, 15 bp, Homo sapiens
aataaggtttgagaa

SEQ ID NO: 245299 - DNA, 15 bp, Homo sapiens
taataaggtttgaga

SEQ ID NO: 245300 - DNA, 15 bp, Homo sapiens
ttaataaggtttgag

SEQ ID NO: 245301 - DNA, 15 bp, Homo sapiens
cttaataaggtttga

SEQ ID NO: 245302 - DNA, 15 bp, Homo sapiens
acttaataaggtttg

SEQ ID NO: 245303 - DNA, 15 bp, Homo sapiens
cacttaataaggttt

SEQ ID NO: 245304 - DNA, 15 bp, Homo sapiens
gcacttaataaggtt

SEQ ID NO: 245305 - DNA, 15 bp, Homo sapiens
tgcacttaataaggt

SEQ ID NO: 245306 - DNA, 15 bp, Homo sapiens
gtgcacttaataagg

SEQ ID NO: 245307 - DNA, 15 bp, Homo sapiens
tgtgcacttaataag

SEQ ID NO: 245308 - DNA, 15 bp, Homo sapiens
ctgtgcacttaataa

SEQ ID NO: 245309 - DNA, 15 bp, Homo sapiens
actgtgcacttaata

SEQ ID NO: 245310 - DNA, 15 bp, Homo sapiens
aactgtgcacttaat

SEQ ID NO: 245311 - DNA, 15 bp, Homo sapiens
gaactgtgcacttaa

SEQ ID NO: 245312 - DNA, 15 bp, Homo sapiens
agaactgtgcactta

SEQ ID NO: 245313 - DNA, 15 bp, Homo sapiens
cagaactgtgcactt

SEQ ID NO: 245314 - DNA, 15 bp, Homo sapiens
acagaactgtgcact

SEQ ID NO: 245315 - DNA, 15 bp, Homo sapiens
cacagaactgtgcac

SEQ ID NO: 245316 - DNA, 15 bp, Homo sapiens
gcacagaactgtgca

SEQ ID NO: 245317 - DNA, 15 bp, Homo sapiens
ggcacagaactgtgc

SEQ ID NO: 245318 - DNA, 15 bp, Homo sapiens
tggcacagaactgtg

SEQ ID NO: 245319 - DNA, 15 bp, Homo sapiens
atggcacagaactgt

SEQ ID NO: 245320 - DNA, 15 bp, Homo sapiens
aatggcacagaactg

SEQ ID NO: 245321 - DNA, 15 bp, Homo sapiens
taatggcacagaact

SEQ ID NO: 245322 - DNA, 15 bp, Homo sapiens
ctaatggcacagaac

SEQ ID NO: 245323 - DNA, 15 bp, Homo sapiens
gctaatggcacagaa

SEQ ID NO: 245324 - DNA, 15 bp, Homo sapiens
tgctaatggcacaga

SEQ ID NO: 245325 - DNA, 15 bp, Homo sapiens
ttgctaatggcacag

SEQ ID NO: 245326 - DNA, 15 bp, Homo sapiens
tttgctaatggcaca

SEQ ID NO: 245327 - DNA, 15 bp, Homo sapiens
atttgctaatggcac

SEQ ID NO: 245328 - DNA, 15 bp, Homo sapiens
aatttgctaatggca

SEQ ID NO: 245329 - DNA, 15 bp, Homo sapiens
gaatttgctaatggc

SEQ ID NO: 245330 - DNA, 15 bp, Homo sapiens
tgaatttgctaatgg

SEQ ID NO: 245331 - DNA, 15 bp, Homo sapiens
gtgaatttgctaatg

SEQ ID NO: 245332 - DNA, 15 bp, Homo sapiens
tgtgaatttgctaat

SEQ ID NO: 245333 - DNA, 15 bp, Homo sapiens
gtgtgaatttgctaa

SEQ ID NO: 245334 - DNA, 15 bp, Homo sapiens
agtgtgaatttgcta

SEQ ID NO: 245335 - DNA, 15 bp, Homo sapiens
cagtgtgaatttgct

SEQ ID NO: 245336 - DNA, 15 bp, Homo sapiens
acagtgtgaatttgc

SEQ ID NO: 245337 - DNA, 15 bp, Homo sapiens
aacagtgtgaatttg

SEQ ID NO: 245338 - DNA, 15 bp, Homo sapiens
caacagtgtgaattt

SEQ ID NO: 245339 - DNA, 15 bp, Homo sapiens
acaacagtgtgaatt

SEQ ID NO: 245340 - DNA, 15 bp, Homo sapiens
tacaacagtgtgaat

SEQ ID NO: 245341 - DNA, 15 bp, Homo sapiens
gtacaacagtgtgaa

SEQ ID NO: 245342 - DNA, 15 bp, Homo sapiens
tgtacaacagtgtga

SEQ ID NO: 245343 - DNA, 15 bp, Homo sapiens
ttgtacaacagtgtg

SEQ ID NO: 245344 - DNA, 15 bp, Homo sapiens
gttgtacaacagtgt

SEQ ID NO: 245345 - DNA, 15 bp, Homo sapiens
tgttgtacaacagtg

SEQ ID NO: 245346 - DNA, 15 bp, Homo sapiens
atgttgtacaacagt

SEQ ID NO: 245347 - DNA, 15 bp, Homo sapiens
gatgttgtacaacag

SEQ ID NO: 245348 - DNA, 15 bp, Homo sapiens
tgatgttgtacaaca

SEQ ID NO: 245349 - DNA, 15 bp, Homo sapiens
gtgatgttgtacaac

SEQ ID NO: 245350 - DNA, 15 bp, Homo sapiens
tgtgatgttgtacaa

SEQ ID NO: 245351 - DNA, 15 bp, Homo sapiens
ttgtgatgttgtaca

SEQ ID NO: 245352 - DNA, 15 bp, Homo sapiens
gttgtgatgttgtac

SEQ ID NO: 245353 - DNA, 15 bp, Homo sapiens
ggttgtgatgttgta

SEQ ID NO: 245354 - DNA, 15 bp, Homo sapiens
tggttgtgatgttgt

SEQ ID NO: 245355 - DNA, 15 bp, Homo sapiens
gtggttgtgatgttg

SEQ ID NO: 245356 - DNA, 15 bp, Homo sapiens
ggtggttgtgatgtt

SEQ ID NO: 245357 - DNA, 15 bp, Homo sapiens
tggtggttgtgatgt

SEQ ID NO: 245358 - DNA, 15 bp, Homo sapiens
atggtggttgtgatg

SEQ ID NO: 245359 - DNA, 15 bp, Homo sapiens
gatggtggttgtgat

SEQ ID NO: 245360 - DNA, 15 bp, Homo sapiens
agatggtggttgtga

SEQ ID NO: 245361 - DNA, 15 bp, Homo sapiens
gagatggtggttgtg

SEQ ID NO: 245362 - DNA, 15 bp, Homo sapiens
ggagatggtggttgt

SEQ ID NO: 245363 - DNA, 15 bp, Homo sapiens
tggagatggtggttg

SEQ ID NO: 245364 - DNA, 15 bp, Homo sapiens
ctggagatggtggtt

SEQ ID NO: 245365 - DNA, 15 bp, Homo sapiens
tctggagatggtggt

SEQ ID NO: 245366 - DNA, 15 bp, Homo sapiens
ttctggagatggtgg

SEQ ID NO: 245367 - DNA, 15 bp, Homo sapiens
gttctggagatggtg

SEQ ID NO: 245368 - DNA, 15 bp, Homo sapiens
agttctggagatggt

SEQ ID NO: 245369 - DNA, 15 bp, Homo sapiens
aagttctggagatgg

SEQ ID NO: 245370 - DNA, 15 bp, Homo sapiens
aaagttctggagatg

SEQ ID NO: 245371 - DNA, 15 bp, Homo sapiens
aaaagttctggagat

SEQ ID NO: 245372 - DNA, 15 bp, Homo sapiens
aaaaagttctggaga

SEQ ID NO: 245373 - DNA, 15 bp, Homo sapiens
aaaaaagttctggag

SEQ ID NO: 245374 - DNA, 15 bp, Homo sapiens
aaaaaaagttctgga

SEQ ID NO: 245375 - DNA, 15 bp, Homo sapiens
aaaaaaaagttctgg

SEQ ID NO: 245376 - DNA, 15 bp, Homo sapiens
aaaaaaaaagttctg

SEQ ID NO: 245377 - DNA, 15 bp, Homo sapiens
aaaaaaaaaagttct

SEQ ID NO: 245378 - DNA, 15 bp, Homo sapiens
aaaaaaaaaaagttc

SEQ ID NO: 245379 - DNA, 15 bp, Homo sapiens
aaaaaaaaaaaagtt

SEQ ID NO: 245380 - DNA, 15 bp, Homo sapiens
aaaaaaaaaaaaagt

SEQ ID NO: 245381 - DNA, 15 bp, Homo sapiens
taaaaaaaaaaaaaa

SEQ ID NO: 245382 - DNA, 15 bp, Homo sapiens
ataaaaaaaaaaaaa

SEQ ID NO: 245383 - DNA, 15 bp, Homo sapiens
aataaaaaaaaaaaa

SEQ ID NO: 245384 - DNA, 15 bp, Homo sapiens
gaataaaaaaaaaaa

SEQ ID NO: 245385 - DNA, 15 bp, Homo sapiens
agaataaaaaaaaaa

SEQ ID NO: 245386 - DNA, 15 bp, Homo sapiens
aagaataaaaaaaaa

SEQ ID NO: 245387 - DNA, 15 bp, Homo sapiens
aaagaataaaaaaaa

SEQ ID NO: 245388 - DNA, 15 bp, Homo sapiens
aaaagaataaaaaaa

SEQ ID NO: 245389 - DNA, 15 bp, Homo sapiens
aaaaagaataaaaaa

SEQ ID NO: 245390 - DNA, 15 bp, Homo sapiens
caaaaagaataaaaa

SEQ ID NO: 245391 - DNA, 15 bp, Homo sapiens
tcaaaaagaataaaa

SEQ ID NO: 245392 - DNA, 15 bp, Homo sapiens
ctcaaaaagaataaa

SEQ ID NO: 245393 - DNA, 15 bp, Homo sapiens
tctcaaaaagaataa

SEQ ID NO: 245394 - DNA, 15 bp, Homo sapiens
gtctcaaaaagaata

SEQ ID NO: 245395 - DNA, 15 bp, Homo sapiens
tgtctcaaaaagaat

SEQ ID NO: 245396 - DNA, 15 bp, Homo sapiens
ctgtctcaaaaagaa

SEQ ID NO: 245397 - DNA, 15 bp, Homo sapiens
tctgtctcaaaaaga

SEQ ID NO: 245398 - DNA, 15 bp, Homo sapiens
ctctgtctcaaaaag

SEQ ID NO: 245399 - DNA, 15 bp, Homo sapiens
tgagactctgtctca

SEQ ID NO: 245400 - DNA, 15 bp, Homo sapiens
gtgagactctgtctc

SEQ ID NO: 245401 - DNA, 15 bp, Homo sapiens
agtgagactctgtct

SEQ ID NO: 245402 - DNA, 15 bp, Homo sapiens
gagtgagactctgtc

SEQ ID NO: 245403 - DNA, 15 bp, Homo sapiens
cgagtgagactctgt

SEQ ID NO: 245404 - DNA, 15 bp, Homo sapiens
acgagtgagactctg

SEQ ID NO: 245405 - DNA, 15 bp, Homo sapiens
gacgagtgagactct

SEQ ID NO: 245406 - DNA, 15 bp, Homo sapiens
cgacgagtgagactc

SEQ ID NO: 245407 - DNA, 15 bp, Homo sapiens
gcgacgagtgagact

SEQ ID NO: 245408 - DNA, 15 bp, Homo sapiens
tgcgacgagtgagac

SEQ ID NO: 245409 - DNA, 15 bp, Homo sapiens
gtgcgacgagtgaga

SEQ ID NO: 245410 - DNA, 15 bp, Homo sapiens
cgtgcgacgagtgag

SEQ ID NO: 245411 - DNA, 15 bp, Homo sapiens
ccgtgcgacgagtga

SEQ ID NO: 245412 - DNA, 15 bp, Homo sapiens
cccgtgcgacgagtg

SEQ ID NO: 245413 - DNA, 15 bp, Homo sapiens
gcccgtgcgacgagt

SEQ ID NO: 245414 - DNA, 15 bp, Homo sapiens
agcccgtgcgacgag

SEQ ID NO: 245415 - DNA, 15 bp, Homo sapiens
cagcccgtgcgacga

SEQ ID NO: 245416 - DNA, 15 bp, Homo sapiens
ccagcccgtgcgacg

SEQ ID NO: 245417 - DNA, 15 bp, Homo sapiens
tccagcccgtgcgac

SEQ ID NO: 245418 - DNA, 15 bp, Homo sapiens
ctccagcccgtgcga

SEQ ID NO: 245419 - DNA, 15 bp, Homo sapiens
actccagcccgtgcg

SEQ ID NO: 245420 - DNA, 15 bp, Homo sapiens
cactccagcccgtgc

SEQ ID NO: 245421 - DNA, 15 bp, Homo sapiens
gcactccagcccgtg

SEQ ID NO: 245422 - DNA, 15 bp, Homo sapiens
tgcactccagcccgt

SEQ ID NO: 245423 - DNA, 15 bp, Homo sapiens
ctgcactccagcccg

SEQ ID NO: 245424 - DNA, 15 bp, Homo sapiens
gcaccactgcactcc

SEQ ID NO: 245425 - DNA, 15 bp, Homo sapiens
cgcaccactgcactc

SEQ ID NO: 245426 - DNA, 15 bp, Homo sapiens
tcgcaccactgcact

SEQ ID NO: 245427 - DNA, 15 bp, Homo sapiens
atcgcaccactgcac

SEQ ID NO: 245428 - DNA, 15 bp, Homo sapiens
gatcgcaccactgca

SEQ ID NO: 245429 - DNA, 15 bp, Homo sapiens
accgagatcgcacca

SEQ ID NO: 245430 - DNA, 15 bp, Homo sapiens
aaccgagatcgcacc

SEQ ID NO: 245431 - DNA, 15 bp, Homo sapiens
gaaccgagatcgcac

SEQ ID NO: 245432 - DNA, 15 bp, Homo sapiens
tgaaccgagatcgca

SEQ ID NO: 245433 - DNA, 15 bp, Homo sapiens
gtgaaccgagatcgc

SEQ ID NO: 245434 - DNA, 15 bp, Homo sapiens
agtgaaccgagatcg

SEQ ID NO: 245435 - DNA, 15 bp, Homo sapiens
cagtgaaccgagatc

SEQ ID NO: 245436 - DNA, 15 bp, Homo sapiens
gcagtgaaccgagat

SEQ ID NO: 245437 - DNA, 15 bp, Homo sapiens
tgcagtgaaccgaga

SEQ ID NO: 245438 - DNA, 15 bp, Homo sapiens
ttgcagtgaaccgag

SEQ ID NO: 245439 - DNA, 15 bp, Homo sapiens
gttgcagtgaaccga

SEQ ID NO: 245440 - DNA, 15 bp, Homo sapiens
ggttgcagtgaaccg

SEQ ID NO: 245441 - DNA, 15 bp, Homo sapiens
aggttgcagtgaacc

SEQ ID NO: 245442 - DNA, 15 bp, Homo sapiens
gaggttgcagtgaac

SEQ ID NO: 245443 - DNA, 15 bp, Homo sapiens
ggaggttgcagtgaa

SEQ ID NO: 245444 - DNA, 15 bp, Homo sapiens
taggtggaggttgca

SEQ ID NO: 245445 - DNA, 15 bp, Homo sapiens
gtaggtggaggttgc

SEQ ID NO: 245446 - DNA, 15 bp, Homo sapiens
ggtaggtggaggttg

SEQ ID NO: 245447 - DNA, 15 bp, Homo sapiens
tggtaggtggaggtt

SEQ ID NO: 245448 - DNA, 15 bp, Homo sapiens
ctggtaggtggaggt

SEQ ID NO: 245449 - DNA, 15 bp, Homo sapiens
cctggtaggtggagg

SEQ ID NO: 245450 - DNA, 15 bp, Homo sapiens
acctggtaggtggag

SEQ ID NO: 245451 - DNA, 15 bp, Homo sapiens
aacctggtaggtgga

SEQ ID NO: 245452 - DNA, 15 bp, Homo sapiens
gaacctggtaggtgg

SEQ ID NO: 245453 - DNA, 15 bp, Homo sapiens
tgaacctggtaggtg

SEQ ID NO: 245454 - DNA, 15 bp, Homo sapiens
ttgaacctggtaggt

SEQ ID NO: 245455 - DNA, 15 bp, Homo sapiens
cttgaacctggtagg

SEQ ID NO: 245456 - DNA, 15 bp, Homo sapiens
gcttgaacctggtag

SEQ ID NO: 245457 - DNA, 15 bp, Homo sapiens
tgcttgaacctggta

SEQ ID NO: 245458 - DNA, 15 bp, Homo sapiens
ttgcttgaacctggt

SEQ ID NO: 245459 - DNA, 15 bp, Homo sapiens
attgcttgaacctgg

SEQ ID NO: 245460 - DNA, 15 bp, Homo sapiens
aattgcttgaacctg

SEQ ID NO: 245461 - DNA, 15 bp, Homo sapiens
gaattgcttgaacct

SEQ ID NO: 245462 - DNA, 15 bp, Homo sapiens
agaattgcttgaacc

SEQ ID NO: 245463 - DNA, 15 bp, Homo sapiens
gagaattgcttgaac

SEQ ID NO: 245464 - DNA, 15 bp, Homo sapiens
ggagaattgcttgaa

SEQ ID NO: 245465 - DNA, 15 bp, Homo sapiens
gggctgaggcaggag

SEQ ID NO: 245466 - DNA, 15 bp, Homo sapiens
ggggctgaggcagga

SEQ ID NO: 245467 - DNA, 15 bp, Homo sapiens
gggggctgaggcagg

SEQ ID NO: 245468 - DNA, 15 bp, Homo sapiens
agggggctgaggcag

SEQ ID NO: 245469 - DNA, 15 bp, Homo sapiens
gagggggctgaggca

SEQ ID NO: 245470 - DNA, 15 bp, Homo sapiens
tgagggggctgaggc

SEQ ID NO: 245471 - DNA, 15 bp, Homo sapiens
ctgagggggctgagg

SEQ ID NO: 245472 - DNA, 15 bp, Homo sapiens
actgagggggctgag

SEQ ID NO: 245473 - DNA, 15 bp, Homo sapiens
tactgagggggctga

SEQ ID NO: 245474 - DNA, 15 bp, Homo sapiens
ctactgagggggctg

SEQ ID NO: 245475 - DNA, 15 bp, Homo sapiens
gctactgagggggct

SEQ ID NO: 245476 - DNA, 15 bp, Homo sapiens
agctactgagggggc

SEQ ID NO: 245477 - DNA, 15 bp, Homo sapiens
cagctactgaggggg

SEQ ID NO: 245478 - DNA, 15 bp, Homo sapiens
ccagctactgagggg

SEQ ID NO: 245479 - DNA, 15 bp, Homo sapiens
cccagctactgaggg

SEQ ID NO: 245480 - DNA, 15 bp, Homo sapiens
tcccagctactgagg

SEQ ID NO: 245481 - DNA, 15 bp, Homo sapiens
atcccagctactgag

SEQ ID NO: 245482 - DNA, 15 bp, Homo sapiens
aatcccagctactga

SEQ ID NO: 245483 - DNA, 15 bp, Homo sapiens
taatcccagctactg

SEQ ID NO: 245484 - DNA, 15 bp, Homo sapiens
gggcacctgtaatcc

SEQ ID NO: 245485 - DNA, 15 bp, Homo sapiens
cgggcacctgtaatc

SEQ ID NO: 245486 - DNA, 15 bp, Homo sapiens
acgggcacctgtaat

SEQ ID NO: 245487 - DNA, 15 bp, Homo sapiens
gacgggcacctgtaa

SEQ ID NO: 245488 - DNA, 15 bp, Homo sapiens
ggacgggcacctgta

SEQ ID NO: 245489 - DNA, 15 bp, Homo sapiens
aggacgggcacctgt

SEQ ID NO: 245490 - DNA, 15 bp, Homo sapiens
taggacgggcacctg

SEQ ID NO: 245491 - DNA, 15 bp, Homo sapiens
gtaggacgggcacct

SEQ ID NO: 245492 - DNA, 15 bp, Homo sapiens
ggtaggacgggcacc

SEQ ID NO: 245493 - DNA, 15 bp, Homo sapiens
tggtaggacgggcac

SEQ ID NO: 245494 - DNA, 15 bp, Homo sapiens
gtggtaggacgggca

SEQ ID NO: 245495 - DNA, 15 bp, Homo sapiens
cgtggtaggacgggc

SEQ ID NO: 245496 - DNA, 15 bp, Homo sapiens
gcgtggtaggacggg

SEQ ID NO: 245497 - DNA, 15 bp, Homo sapiens
ggcgtggtaggacgg

SEQ ID NO: 245498 - DNA, 15 bp, Homo sapiens
gggcgtggtaggacg

SEQ ID NO: 245499 - DNA, 15 bp, Homo sapiens
tgggcgtggtaggac

SEQ ID NO: 245500 - DNA, 15 bp, Homo sapiens
ctgggcgtggtagga

SEQ ID NO: 245501 - DNA, 15 bp, Homo sapiens
gctgggcgtggtagg

SEQ ID NO: 245502 - DNA, 15 bp, Homo sapiens
gaaaatacaaaaatt

SEQ ID NO: 245503 - DNA, 15 bp, Homo sapiens
tgaaaatacaaaaat

SEQ ID NO: 245504 - DNA, 15 bp, Homo sapiens
ctgaaaatacaaaaa

SEQ ID NO: 245505 - DNA, 15 bp, Homo sapiens
actgaaaatacaaaa

SEQ ID NO: 245506 - DNA, 15 bp, Homo sapiens
tactgaaaatacaaa

SEQ ID NO: 245507 - DNA, 15 bp, Homo sapiens
ctactgaaaatacaa

SEQ ID NO: 245508 - DNA, 15 bp, Homo sapiens
tctactgaaaataca

SEQ ID NO: 245509 - DNA, 15 bp, Homo sapiens
ctctactgaaaatac

SEQ ID NO: 245510 - DNA, 15 bp, Homo sapiens
tctctactgaaaata

SEQ ID NO: 245511 - DNA, 15 bp, Homo sapiens
gtctctactgaaaat

SEQ ID NO: 245512 - DNA, 15 bp, Homo sapiens
agtctctactgaaaa

SEQ ID NO: 245513 - DNA, 15 bp, Homo sapiens
cagtctctactgaaa

SEQ ID NO: 245514 - DNA, 15 bp, Homo sapiens
tcagtctctactgaa

SEQ ID NO: 245515 - DNA, 15 bp, Homo sapiens
gtcagtctctactga

SEQ ID NO: 245516 - DNA, 15 bp, Homo sapiens
agtcagtctctactg

SEQ ID NO: 245517 - DNA, 15 bp, Homo sapiens
cagtcagtctctact

SEQ ID NO: 245518 - DNA, 15 bp, Homo sapiens
ccagtcagtctctac

SEQ ID NO: 245519 - DNA, 15 bp, Homo sapiens
cccagtcagtctcta

SEQ ID NO: 245520 - DNA, 15 bp, Homo sapiens
acccagtcagtctct

SEQ ID NO: 245521 - DNA, 15 bp, Homo sapiens
aacccagtcagtctc

SEQ ID NO: 245522 - DNA, 15 bp, Homo sapiens
aaacccagtcagtct

SEQ ID NO: 245523 - DNA, 15 bp, Homo sapiens
gaaacccagtcagtc

SEQ ID NO: 245524 - DNA, 15 bp, Homo sapiens
tgaaacccagtcagt

SEQ ID NO: 245525 - DNA, 15 bp, Homo sapiens
gtgaaacccagtcag

SEQ ID NO: 245526 - DNA, 15 bp, Homo sapiens
ggtgaaacccagtca

SEQ ID NO: 245527 - DNA, 15 bp, Homo sapiens
tggtgaaacccagtc

SEQ ID NO: 245528 - DNA, 15 bp, Homo sapiens
atggtgaaacccagt

SEQ ID NO: 245529 - DNA, 15 bp, Homo sapiens
catggtgaaacccag

SEQ ID NO: 245530 - DNA, 15 bp, Homo sapiens
acatggtgaaaccca

SEQ ID NO: 245531 - DNA, 15 bp, Homo sapiens
ttcccagcactttgg

SEQ ID NO: 245532 - DNA, 15 bp, Homo sapiens
attcccagcactttg

SEQ ID NO: 245533 - DNA, 15 bp, Homo sapiens
tattcccagcacttt

SEQ ID NO: 245534 - DNA, 15 bp, Homo sapiens
gtattcccagcactt

SEQ ID NO: 245535 - DNA, 15 bp, Homo sapiens
tgtattcccagcact

SEQ ID NO: 245536 - DNA, 15 bp, Homo sapiens
ctgtattcccagcac

SEQ ID NO: 245537 - DNA, 15 bp, Homo sapiens
cctgtattcccagca

SEQ ID NO: 245538 - DNA, 15 bp, Homo sapiens
gcctgtattcccagc

SEQ ID NO: 245539 - DNA, 15 bp, Homo sapiens
tgcctgtattcccag

SEQ ID NO: 245540 - DNA, 15 bp, Homo sapiens
atgcctgtattccca

SEQ ID NO: 245541 - DNA, 15 bp, Homo sapiens
catgcctgtattccc

SEQ ID NO: 245542 - DNA, 15 bp, Homo sapiens
tcatgcctgtattcc

SEQ ID NO: 245543 - DNA, 15 bp, Homo sapiens
ctcatgcctgtattc

SEQ ID NO: 245544 - DNA, 15 bp, Homo sapiens
gctcatgcctgtatt

SEQ ID NO: 245545 - DNA, 15 bp, Homo sapiens
ggctcatgcctgtat

SEQ ID NO: 245546 - DNA, 15 bp, Homo sapiens
cgcagtggctcatgc

SEQ ID NO: 245547 - DNA, 15 bp, Homo sapiens
gcgcagtggctcatg

SEQ ID NO: 245548 - DNA, 15 bp, Homo sapiens
ggcgcagtggctcat

SEQ ID NO: 245549 - DNA, 15 bp, Homo sapiens
gggcgcagtggctca

SEQ ID NO: 245550 - DNA, 15 bp, Homo sapiens
cgggcgcagtggctc

SEQ ID NO: 245551 - DNA, 15 bp, Homo sapiens
ccgggcgcagtggct

SEQ ID NO: 245552 - DNA, 15 bp, Homo sapiens
gccgggcgcagtggc

SEQ ID NO: 245553 - DNA, 15 bp, Homo sapiens
ggccgggcgcagtgg

SEQ ID NO: 245554 - DNA, 15 bp, Homo sapiens
gggccgggcgcagtg

SEQ ID NO: 245555 - DNA, 15 bp, Homo sapiens
ggggccgggcgcagt

SEQ ID NO: 245556 - DNA, 15 bp, Homo sapiens
tggggccgggcgcag

SEQ ID NO: 245557 - DNA, 15 bp, Homo sapiens
ctggggccgggcgca

SEQ ID NO: 245558 - DNA, 15 bp, Homo sapiens
tctggggccgggcgc

SEQ ID NO: 245559 - DNA, 15 bp, Homo sapiens
ttctggggccgggcg

SEQ ID NO: 245560 - DNA, 15 bp, Homo sapiens
gttctggggccgggc

SEQ ID NO: 245561 - DNA, 15 bp, Homo sapiens
agttctggggccggg

SEQ ID NO: 245562 - DNA, 15 bp, Homo sapiens
gagttctggggccgg

SEQ ID NO: 245563 - DNA, 15 bp, Homo sapiens
agagttctggggccg

SEQ ID NO: 245564 - DNA, 15 bp, Homo sapiens
aagagttctggggcc

SEQ ID NO: 245565 - DNA, 15 bp, Homo sapiens
aaagagttctggggc

SEQ ID NO: 245566 - DNA, 15 bp, Homo sapiens
aaaagagttctgggg

SEQ ID NO: 245567 - DNA, 15 bp, Homo sapiens
taaaagagttctggg

SEQ ID NO: 245568 - DNA, 15 bp, Homo sapiens
ataaaagagttctgg

SEQ ID NO: 245569 - DNA, 15 bp, Homo sapiens
gataaaagagttctg

SEQ ID NO: 245570 - DNA, 15 bp, Homo sapiens
agataaaagagttct

SEQ ID NO: 245571 - DNA, 15 bp, Homo sapiens
aagataaaagagttc

SEQ ID NO: 245572 - DNA, 15 bp, Homo sapiens
gaagataaaagagtt

SEQ ID NO: 245573 - DNA, 15 bp, Homo sapiens
ggaagataaaagagt

SEQ ID NO: 245574 - DNA, 15 bp, Homo sapiens
gggaagataaaagag

SEQ ID NO: 245575 - DNA, 15 bp, Homo sapiens
tgggaagataaaaga

SEQ ID NO: 245576 - DNA, 15 bp, Homo sapiens
ttgggaagataaaag

SEQ ID NO: 245577 - DNA, 15 bp, Homo sapiens
tttgggaagataaaa

SEQ ID NO: 245578 - DNA, 15 bp, Homo sapiens
gtttgggaagataaa

SEQ ID NO: 245579 - DNA, 15 bp, Homo sapiens
agtttgggaagataa

SEQ ID NO: 245580 - DNA, 15 bp, Homo sapiens
cagtttgggaagata

SEQ ID NO: 245581 - DNA, 15 bp, Homo sapiens
tcagtttgggaagat

SEQ ID NO: 245582 - DNA, 15 bp, Homo sapiens
ttcagtttgggaaga

SEQ ID NO: 245583 - DNA, 15 bp, Homo sapiens
cttcagtttgggaag

SEQ ID NO: 245584 - DNA, 15 bp, Homo sapiens
gcttcagtttgggaa

SEQ ID NO: 245585 - DNA, 15 bp, Homo sapiens
agcttcagtttggga

SEQ ID NO: 245586 - DNA, 15 bp, Homo sapiens
gagcttcagtttggg

SEQ ID NO: 245587 - DNA, 15 bp, Homo sapiens
agagcttcagtttgg

SEQ ID NO: 245588 - DNA, 15 bp, Homo sapiens
cagagcttcagtttg

SEQ ID NO: 245589 - DNA, 15 bp, Homo sapiens
acagagcttcagttt

SEQ ID NO: 245590 - DNA, 15 bp, Homo sapiens
gacagagcttcagtt

SEQ ID NO: 245591 - DNA, 15 bp, Homo sapiens
ggacagagcttcagt

SEQ ID NO: 245592 - DNA, 15 bp, Homo sapiens
gggacagagcttcag

SEQ ID NO: 245593 - DNA, 15 bp, Homo sapiens
ggggacagagcttca

SEQ ID NO: 245594 - DNA, 15 bp, Homo sapiens
tggggacagagcttc

SEQ ID NO: 245595 - DNA, 15 bp, Homo sapiens
atggggacagagctt

SEQ ID NO: 245596 - DNA, 15 bp, Homo sapiens
catggggacagagct

SEQ ID NO: 245597 - DNA, 15 bp, Homo sapiens
tcatggggacagagc

SEQ ID NO: 245598 - DNA, 15 bp, Homo sapiens
ttcatggggacagag

SEQ ID NO: 245599 - DNA, 15 bp, Homo sapiens
tttcatggggacaga

SEQ ID NO: 245600 - DNA, 15 bp, Homo sapiens
gtttcatggggacag

SEQ ID NO: 245601 - DNA, 15 bp, Homo sapiens
tgtttcatggggaca

SEQ ID NO: 245602 - DNA, 15 bp, Homo sapiens
gtgtttcatggggac

SEQ ID NO: 245603 - DNA, 15 bp, Homo sapiens
agtgtttcatgggga

SEQ ID NO: 245604 - DNA, 15 bp, Homo sapiens
gagtgtttcatgggg

SEQ ID NO: 245605 - DNA, 15 bp, Homo sapiens
tgagtgtttcatggg

SEQ ID NO: 245606 - DNA, 15 bp, Homo sapiens
gtgagtgtttcatgg

SEQ ID NO: 245607 - DNA, 15 bp, Homo sapiens
agtgagtgtttcatg

SEQ ID NO: 245608 - DNA, 15 bp, Homo sapiens
gagtgagtgtttcat

SEQ ID NO: 245609 - DNA, 15 bp, Homo sapiens
agagtgagtgtttca

SEQ ID NO: 245610 - DNA, 15 bp, Homo sapiens
gagagtgagtgtttc

SEQ ID NO: 245611 - DNA, 15 bp, Homo sapiens
ggagagtgagtgttt

SEQ ID NO: 245612 - DNA, 15 bp, Homo sapiens
tggagagtgagtgtt

SEQ ID NO: 245613 - DNA, 15 bp, Homo sapiens
atggagagtgagtgt

SEQ ID NO: 245614 - DNA, 15 bp, Homo sapiens
gatggagagtgagtg

SEQ ID NO: 245615 - DNA, 15 bp, Homo sapiens
ggatggagagtgagt

SEQ ID NO: 245616 - DNA, 15 bp, Homo sapiens
gggatggagagtgag

SEQ ID NO: 245617 - DNA, 15 bp, Homo sapiens
ggggatggagagtga

SEQ ID NO: 245618 - DNA, 15 bp, Homo sapiens
aggggatggagagtg

SEQ ID NO: 245619 - DNA, 15 bp, Homo sapiens
gaggggatggagagt

SEQ ID NO: 245620 - DNA, 15 bp, Homo sapiens
ggaggggatggagag

SEQ ID NO: 245621 - DNA, 15 bp, Homo sapiens
gggaggggatggaga

SEQ ID NO: 245622 - DNA, 15 bp, Homo sapiens
ggggaggggatggag

SEQ ID NO: 245623 - DNA, 15 bp, Homo sapiens
tggggaggggatgga

SEQ ID NO: 245624 - DNA, 15 bp, Homo sapiens
ttggggaggggatgg

SEQ ID NO: 245625 - DNA, 15 bp, Homo sapiens
gttggggaggggatg

SEQ ID NO: 245626 - DNA, 15 bp, Homo sapiens
agttggggaggggat

SEQ ID NO: 245627 - DNA, 15 bp, Homo sapiens
gagttggggagggga

SEQ ID NO: 245628 - DNA, 15 bp, Homo sapiens
ggagttggggagggg

SEQ ID NO: 245629 - DNA, 15 bp, Homo sapiens
aggagttggggaggg

SEQ ID NO: 245630 - DNA, 15 bp, Homo sapiens
caggagttggggagg

SEQ ID NO: 245631 - DNA, 15 bp, Homo sapiens
ccaggagttggggag

SEQ ID NO: 245632 - DNA, 15 bp, Homo sapiens
gccaggagttgggga

SEQ ID NO: 245633 - DNA, 15 bp, Homo sapiens
tgccaggagttgggg

SEQ ID NO: 245634 - DNA, 15 bp, Homo sapiens
gtgccaggagttggg

SEQ ID NO: 245635 - DNA, 15 bp, Homo sapiens
ggtgccaggagttgg

SEQ ID NO: 245636 - DNA, 15 bp, Homo sapiens
gggtgccaggagttg

SEQ ID NO: 245637 - DNA, 15 bp, Homo sapiens
tgggtgccaggagtt

SEQ ID NO: 245638 - DNA, 15 bp, Homo sapiens
gtgggtgccaggagt

SEQ ID NO: 245639 - DNA, 15 bp, Homo sapiens
ggtgggtgccaggag

SEQ ID NO: 245640 - DNA, 15 bp, Homo sapiens
tggtgggtgccagga

SEQ ID NO: 245641 - DNA, 15 bp, Homo sapiens
atggtgggtgccagg

SEQ ID NO: 245642 - DNA, 15 bp, Homo sapiens
aatggtgggtgccag

SEQ ID NO: 245643 - DNA, 15 bp, Homo sapiens
gaatggtgggtgcca

SEQ ID NO: 245644 - DNA, 15 bp, Homo sapiens
agaatggtgggtgcc

SEQ ID NO: 245645 - DNA, 15 bp, Homo sapiens
tagaatggtgggtgc

SEQ ID NO: 245646 - DNA, 15 bp, Homo sapiens
gtagaatggtgggtg

SEQ ID NO: 245647 - DNA, 15 bp, Homo sapiens
agtagaatggtgggt

SEQ ID NO: 245648 - DNA, 15 bp, Homo sapiens
aagtagaatggtggg

SEQ ID NO: 245649 - DNA, 15 bp, Homo sapiens
aaagtagaatggtgg

SEQ ID NO: 245650 - DNA, 15 bp, Homo sapiens
gaaagtagaatggtg

SEQ ID NO: 245651 - DNA, 15 bp, Homo sapiens
agaaagtagaatggt

SEQ ID NO: 245652 - DNA, 15 bp, Homo sapiens
cagaaagtagaatgg

SEQ ID NO: 245653 - DNA, 15 bp, Homo sapiens
acagaaagtagaatg

SEQ ID NO: 245654 - DNA, 15 bp, Homo sapiens
gacagaaagtagaat

SEQ ID NO: 245655 - DNA, 15 bp, Homo sapiens
ggacagaaagtagaa

SEQ ID NO: 245656 - DNA, 15 bp, Homo sapiens
gggacagaaagtaga

SEQ ID NO: 245657 - DNA, 15 bp, Homo sapiens
agggacagaaagtag

SEQ ID NO: 245658 - DNA, 15 bp, Homo sapiens
tagggacagaaagta

SEQ ID NO: 245659 - DNA, 15 bp, Homo sapiens
atagggacagaaagt

SEQ ID NO: 245660 - DNA, 15 bp, Homo sapiens
catagggacagaaag

SEQ ID NO: 245661 - DNA, 15 bp, Homo sapiens
tcatagggacagaaa

SEQ ID NO: 245662 - DNA, 15 bp, Homo sapiens
ttcatagggacagaa

SEQ ID NO: 245663 - DNA, 15 bp, Homo sapiens
attcatagggacaga

SEQ ID NO: 245664 - DNA, 15 bp, Homo sapiens
cattcatagggacag

SEQ ID NO: 245665 - DNA, 15 bp, Homo sapiens
acattcatagggaca

SEQ ID NO: 245666 - DNA, 15 bp, Homo sapiens
cacattcatagggac

SEQ ID NO: 245667 - DNA, 15 bp, Homo sapiens
tcacattcataggga

SEQ ID NO: 245668 - DNA, 15 bp, Homo sapiens
atcacattcataggg

SEQ ID NO: 245669 - DNA, 15 bp, Homo sapiens
catcacattcatagg

SEQ ID NO: 245670 - DNA, 15 bp, Homo sapiens
ccatcacattcatag

SEQ ID NO: 245671 - DNA, 15 bp, Homo sapiens
gccatcacattcata

SEQ ID NO: 245672 - DNA, 15 bp, Homo sapiens
agccatcacattcat

SEQ ID NO: 245673 - DNA, 15 bp, Homo sapiens
gagccatcacattca

SEQ ID NO: 245674 - DNA, 15 bp, Homo sapiens
agagccatcacattc

SEQ ID NO: 245675 - DNA, 15 bp, Homo sapiens
tagagccatcacatt

SEQ ID NO: 245676 - DNA, 15 bp, Homo sapiens
ctagagccatcacat

SEQ ID NO: 245677 - DNA, 15 bp, Homo sapiens
cctagagccatcaca

SEQ ID NO: 245678 - DNA, 15 bp, Homo sapiens
ccctagagccatcac

SEQ ID NO: 245679 - DNA, 15 bp, Homo sapiens
tccctagagccatca

SEQ ID NO: 245680 - DNA, 15 bp, Homo sapiens
gtccctagagccatc

SEQ ID NO: 245681 - DNA, 15 bp, Homo sapiens
ggtccctagagccat

SEQ ID NO: 245682 - DNA, 15 bp, Homo sapiens
aggtccctagagcca

SEQ ID NO: 245683 - DNA, 15 bp, Homo sapiens
gaggtccctagagcc

SEQ ID NO: 245684 - DNA, 15 bp, Homo sapiens
ggaggtccctagagc

SEQ ID NO: 245685 - DNA, 15 bp, Homo sapiens
aggaggtccctagag

SEQ ID NO: 245686 - DNA, 15 bp, Homo sapiens
gaggaggtccctaga

SEQ ID NO: 245687 - DNA, 15 bp, Homo sapiens
agaggaggtccctag

SEQ ID NO: 245688 - DNA, 15 bp, Homo sapiens
cagaggaggtcccta

SEQ ID NO: 245689 - DNA, 15 bp, Homo sapiens
tcagaggaggtccct

SEQ ID NO: 245690 - DNA, 15 bp, Homo sapiens
ctcagaggaggtccc

SEQ ID NO: 245691 - DNA, 15 bp, Homo sapiens
actcagaggaggtcc

SEQ ID NO: 245692 - DNA, 15 bp, Homo sapiens
cactcagaggaggtc

SEQ ID NO: 245693 - DNA, 15 bp, Homo sapiens
ccactcagaggaggt

SEQ ID NO: 245694 - DNA, 15 bp, Homo sapiens
tccactcagaggagg

SEQ ID NO: 245695 - DNA, 15 bp, Homo sapiens
ttccactcagaggag

SEQ ID NO: 245696 - DNA, 15 bp, Homo sapiens
attccactcagagga

SEQ ID NO: 245697 - DNA, 15 bp, Homo sapiens
gattccactcagagg

SEQ ID NO: 245698 - DNA, 15 bp, Homo sapiens
tgattccactcagag

SEQ ID NO: 245699 - DNA, 15 bp, Homo sapiens
ctgattccactcaga

SEQ ID NO: 245700 - DNA, 15 bp, Homo sapiens
tctgattccactcag

SEQ ID NO: 245701 - DNA, 15 bp, Homo sapiens
gtctgattccactca

SEQ ID NO: 245702 - DNA, 15 bp, Homo sapiens
tgtctgattccactc

SEQ ID NO: 245703 - DNA, 15 bp, Homo sapiens
ctgtctgattccact

SEQ ID NO: 245704 - DNA, 15 bp, Homo sapiens
gctgtctgattccac

SEQ ID NO: 245705 - DNA, 15 bp, Homo sapiens
tgctgtctgattcca

SEQ ID NO: 245706 - DNA, 15 bp, Homo sapiens
atgctgtctgattcc

SEQ ID NO: 245707 - DNA, 15 bp, Homo sapiens
aatgctgtctgattc

SEQ ID NO: 245708 - DNA, 15 bp, Homo sapiens
aaatgctgtctgatt

SEQ ID NO: 245709 - DNA, 15 bp, Homo sapiens
aaaatgctgtctgat

SEQ ID NO: 245710 - DNA, 15 bp, Homo sapiens
gaaaatgctgtctga

SEQ ID NO: 245711 - DNA, 15 bp, Homo sapiens
ggaaaatgctgtctg

SEQ ID NO: 245712 - DNA, 15 bp, Homo sapiens
aggaaaatgctgtct

SEQ ID NO: 245713 - DNA, 15 bp, Homo sapiens
aaggaaaatgctgtc

SEQ ID NO: 245714 - DNA, 15 bp, Homo sapiens
aaaggaaaatgctgt

SEQ ID NO: 245715 - DNA, 15 bp, Homo sapiens
aaaaggaaaatgctg

SEQ ID NO: 245716 - DNA, 15 bp, Homo sapiens
aaaaaggaaaatgct

SEQ ID NO: 245717 - DNA, 15 bp, Homo sapiens
aaaaaaggaaaatgc

SEQ ID NO: 245718 - DNA, 15 bp, Homo sapiens
caaaaaaggaaaatg

SEQ ID NO: 245719 - DNA, 15 bp, Homo sapiens
tcaaaaaaggaaaat

SEQ ID NO: 245720 - DNA, 15 bp, Homo sapiens
gtcaaaaaaggaaaa

SEQ ID NO: 245721 - DNA, 15 bp, Homo sapiens
agtcaaaaaaggaaa

SEQ ID NO: 245722 - DNA, 15 bp, Homo sapiens
cagtcaaaaaaggaa

SEQ ID NO: 245723 - DNA, 15 bp, Homo sapiens
ccagtcaaaaaagga

SEQ ID NO: 245724 - DNA, 15 bp, Homo sapiens
gccagtcaaaaaagg

SEQ ID NO: 245725 - DNA, 15 bp, Homo sapiens
agccagtcaaaaaag

SEQ ID NO: 245726 - DNA, 15 bp, Homo sapiens
aagccagtcaaaaaa

SEQ ID NO: 245727 - DNA, 15 bp, Homo sapiens
taagccagtcaaaaa

SEQ ID NO: 245728 - DNA, 15 bp, Homo sapiens
ataagccagtcaaaa

SEQ ID NO: 245729 - DNA, 15 bp, Homo sapiens
aataagccagtcaaa

SEQ ID NO: 245730 - DNA, 15 bp, Homo sapiens
aaataagccagtcaa

SEQ ID NO: 245731 - DNA, 15 bp, Homo sapiens
cagtgaaataagcca

SEQ ID NO: 245732 - DNA, 15 bp, Homo sapiens
tcagtgaaataagcc

SEQ ID NO: 245733 - DNA, 15 bp, Homo sapiens
ctcagtgaaataagc

SEQ ID NO: 245734 - DNA, 15 bp, Homo sapiens
gctcagtgaaataag

SEQ ID NO: 245735 - DNA, 15 bp, Homo sapiens
ggctcagtgaaataa

SEQ ID NO: 245736 - DNA, 15 bp, Homo sapiens
tggctcagtgaaata

SEQ ID NO: 245737 - DNA, 15 bp, Homo sapiens
ttggctcagtgaaat

SEQ ID NO: 245738 - DNA, 15 bp, Homo sapiens
cttggctcagtgaaa

SEQ ID NO: 245739 - DNA, 15 bp, Homo sapiens
acttggctcagtgaa

SEQ ID NO: 245740 - DNA, 15 bp, Homo sapiens
cacttggctcagtga

SEQ ID NO: 245741 - DNA, 15 bp, Homo sapiens
gcacttggctcagtg

SEQ ID NO: 245742 - DNA, 15 bp, Homo sapiens
cgcacttggctcagt

SEQ ID NO: 245743 - DNA, 15 bp, Homo sapiens
ccgcacttggctcag

SEQ ID NO: 245744 - DNA, 15 bp, Homo sapiens
accgcacttggctca

SEQ ID NO: 245745 - DNA, 15 bp, Homo sapiens
caccgcacttggctc

SEQ ID NO: 245746 - DNA, 15 bp, Homo sapiens
ccaccgcacttggct

SEQ ID NO: 245747 - DNA, 15 bp, Homo sapiens
gccaccgcacttggc

SEQ ID NO: 245748 - DNA, 15 bp, Homo sapiens
tgccaccgcacttgg

SEQ ID NO: 245749 - DNA, 15 bp, Homo sapiens
gtgccaccgcacttg

SEQ ID NO: 245750 - DNA, 15 bp, Homo sapiens
tgtgccaccgcactt

SEQ ID NO: 245751 - DNA, 15 bp, Homo sapiens
gtgtgccaccgcact

SEQ ID NO: 245752 - DNA, 15 bp, Homo sapiens
cgtgtgccaccgcac

SEQ ID NO: 245753 - DNA, 15 bp, Homo sapiens
gcgtgtgccaccgca

SEQ ID NO: 245754 - DNA, 15 bp, Homo sapiens
ggcgtgtgccaccgc

SEQ ID NO: 245755 - DNA, 15 bp, Homo sapiens
aggcgtgtgccaccg

SEQ ID NO: 245756 - DNA, 15 bp, Homo sapiens
caggcgtgtgccacc

SEQ ID NO: 245757 - DNA, 15 bp, Homo sapiens
acaggcgtgtgccac

SEQ ID NO: 245758 - DNA, 15 bp, Homo sapiens
tacaggcgtgtgcca

SEQ ID NO: 245759 - DNA, 15 bp, Homo sapiens
ttacaggcgtgtgcc

SEQ ID NO: 245760 - DNA, 15 bp, Homo sapiens
attacaggcgtgtgc

SEQ ID NO: 245761 - DNA, 15 bp, Homo sapiens
gattacaggcgtgtg

SEQ ID NO: 245762 - DNA, 15 bp, Homo sapiens
ggattacaggcgtgt

SEQ ID NO: 245763 - DNA, 15 bp, Homo sapiens
ttgggattacaggcg

SEQ ID NO: 245764 - DNA, 15 bp, Homo sapiens
tttgggattacaggc

SEQ ID NO: 245765 - DNA, 15 bp, Homo sapiens
ttttgggattacagg

SEQ ID NO: 245766 - DNA, 15 bp, Homo sapiens
gttttgggattacag

SEQ ID NO: 245767 - DNA, 15 bp, Homo sapiens
agttttgggattaca

SEQ ID NO: 245768 - DNA, 15 bp, Homo sapiens
aagttttgggattac

SEQ ID NO: 245769 - DNA, 15 bp, Homo sapiens
aaagttttgggatta

SEQ ID NO: 245770 - DNA, 15 bp, Homo sapiens
caaagttttgggatt

SEQ ID NO: 245771 - DNA, 15 bp, Homo sapiens
ccaaagttttgggat

SEQ ID NO: 245772 - DNA, 15 bp, Homo sapiens
cccaaagttttggga

SEQ ID NO: 245773 - DNA, 15 bp, Homo sapiens
tcccaaagttttggg

SEQ ID NO: 245774 - DNA, 15 bp, Homo sapiens
ctcccaaagttttgg

SEQ ID NO: 245775 - DNA, 15 bp, Homo sapiens
tctcccaaagttttg

SEQ ID NO: 245776 - DNA, 15 bp, Homo sapiens
gtctcccaaagtttt

SEQ ID NO: 245777 - DNA, 15 bp, Homo sapiens
ggtctcccaaagttt

SEQ ID NO: 245778 - DNA, 15 bp, Homo sapiens
cggtctcccaaagtt

SEQ ID NO: 245779 - DNA, 15 bp, Homo sapiens
tcggtctcccaaagt

SEQ ID NO: 245780 - DNA, 15 bp, Homo sapiens
ctcggtctcccaaag

SEQ ID NO: 245781 - DNA, 15 bp, Homo sapiens
cctcggtctcccaaa

SEQ ID NO: 245782 - DNA, 15 bp, Homo sapiens
gcctcggtctcccaa

SEQ ID NO: 245783 - DNA, 15 bp, Homo sapiens
cgcctcggtctccca

SEQ ID NO: 245784 - DNA, 15 bp, Homo sapiens
ccgcctcggtctccc

SEQ ID NO: 245785 - DNA, 15 bp, Homo sapiens
cccgcctcggtctcc

SEQ ID NO: 245786 - DNA, 15 bp, Homo sapiens
gcccgcctcggtctc

SEQ ID NO: 245787 - DNA, 15 bp, Homo sapiens
cgcccgcctcggtct

SEQ ID NO: 245788 - DNA, 15 bp, Homo sapiens
gcgcccgcctcggtc

SEQ ID NO: 245789 - DNA, 15 bp, Homo sapiens
tgcgcccgcctcggt

SEQ ID NO: 245790 - DNA, 15 bp, Homo sapiens
atgcgcccgcctcgg

SEQ ID NO: 245791 - DNA, 15 bp, Homo sapiens
gatgcgcccgcctcg

SEQ ID NO: 245792 - DNA, 15 bp, Homo sapiens
tgatgcgcccgcctc

SEQ ID NO: 245793 - DNA, 15 bp, Homo sapiens
gtgatgcgcccgcct

SEQ ID NO: 245794 - DNA, 15 bp, Homo sapiens
ggtgatgcgcccgcc

SEQ ID NO: 245795 - DNA, 15 bp, Homo sapiens
aggtgatgcgcccgc

SEQ ID NO: 245796 - DNA, 15 bp, Homo sapiens
caggtgatgcgcccg

SEQ ID NO: 245797 - DNA, 15 bp, Homo sapiens
tcaggtgatgcgccc

SEQ ID NO: 245798 - DNA, 15 bp, Homo sapiens
ctcaggtgatgcgcc

SEQ ID NO: 245799 - DNA, 15 bp, Homo sapiens
cctcaggtgatgcgc

SEQ ID NO: 245800 - DNA, 15 bp, Homo sapiens
acctcaggtgatgcg

SEQ ID NO: 245801 - DNA, 15 bp, Homo sapiens
gacctcaggtgatgc

SEQ ID NO: 245802 - DNA, 15 bp, Homo sapiens
tgacctcaggtgatg

SEQ ID NO: 245803 - DNA, 15 bp, Homo sapiens
ggccgggctggtctc

SEQ ID NO: 245804 - DNA, 15 bp, Homo sapiens
tggccgggctggtct

SEQ ID NO: 245805 - DNA, 15 bp, Homo sapiens
ttggccgggctggtc

SEQ ID NO: 245806 - DNA, 15 bp, Homo sapiens
gttggccgggctggt

SEQ ID NO: 245807 - DNA, 15 bp, Homo sapiens
tgttggccgggctgg

SEQ ID NO: 245808 - DNA, 15 bp, Homo sapiens
atgttggccgggctg

SEQ ID NO: 245809 - DNA, 15 bp, Homo sapiens
catgttggccgggct

SEQ ID NO: 245810 - DNA, 15 bp, Homo sapiens
ccatgttggccgggc

SEQ ID NO: 245811 - DNA, 15 bp, Homo sapiens
accatgttggccggg

SEQ ID NO: 245812 - DNA, 15 bp, Homo sapiens
caccatgttggccgg

SEQ ID NO: 245813 - DNA, 15 bp, Homo sapiens
tcaccatgttggccg

SEQ ID NO: 245814 - DNA, 15 bp, Homo sapiens
tggggtttcaccatg

SEQ ID NO: 245815 - DNA, 15 bp, Homo sapiens
atggggtttcaccat

SEQ ID NO: 245816 - DNA, 15 bp, Homo sapiens
gatggggtttcacca

SEQ ID NO: 245817 - DNA, 15 bp, Homo sapiens
ctagagatggggttt

SEQ ID NO: 245818 - DNA, 15 bp, Homo sapiens
actagagatggggtt

SEQ ID NO: 245819 - DNA, 15 bp, Homo sapiens
tactagagatggggt

SEQ ID NO: 245820 - DNA, 15 bp, Homo sapiens
ttactagagatgggg

SEQ ID NO: 245821 - DNA, 15 bp, Homo sapiens
tttactagagatggg

SEQ ID NO: 245822 - DNA, 15 bp, Homo sapiens
ttttactagagatgg

SEQ ID NO: 245823 - DNA, 15 bp, Homo sapiens
tttttactagagatg

SEQ ID NO: 245824 - DNA, 15 bp, Homo sapiens
atttttactagagat

SEQ ID NO: 245825 - DNA, 15 bp, Homo sapiens
tatttttactagaga

SEQ ID NO: 245826 - DNA, 15 bp, Homo sapiens
gtatttttactagag

SEQ ID NO: 245827 - DNA, 15 bp, Homo sapiens
tgtatttttactaga

SEQ ID NO: 245828 - DNA, 15 bp, Homo sapiens
ttgtatttttactag

SEQ ID NO: 245829 - DNA, 15 bp, Homo sapiens
tttgtatttttacta

SEQ ID NO: 245830 - DNA, 15 bp, Homo sapiens
ttttgtatttttact

SEQ ID NO: 245831 - DNA, 15 bp, Homo sapiens
tttttgtatttttac

SEQ ID NO: 245832 - DNA, 15 bp, Homo sapiens
aggctaattttttgt

SEQ ID NO: 245833 - DNA, 15 bp, Homo sapiens
caggctaattttttg

SEQ ID NO: 245834 - DNA, 15 bp, Homo sapiens
acaggctaatttttt

SEQ ID NO: 245835 - DNA, 15 bp, Homo sapiens
gacaggctaattttt

SEQ ID NO: 245836 - DNA, 15 bp, Homo sapiens
tgacaggctaatttt

SEQ ID NO: 245837 - DNA, 15 bp, Homo sapiens
atgacaggctaattt

SEQ ID NO: 245838 - DNA, 15 bp, Homo sapiens
catgacaggctaatt

SEQ ID NO: 245839 - DNA, 15 bp, Homo sapiens
ccatgacaggctaat

SEQ ID NO: 245840 - DNA, 15 bp, Homo sapiens
accatgacaggctaa

SEQ ID NO: 245841 - DNA, 15 bp, Homo sapiens
gaccatgacaggcta

SEQ ID NO: 245842 - DNA, 15 bp, Homo sapiens
cgaccatgacaggct

SEQ ID NO: 245843 - DNA, 15 bp, Homo sapiens
acgaccatgacaggc

SEQ ID NO: 245844 - DNA, 15 bp, Homo sapiens
cacgaccatgacagg

SEQ ID NO: 245845 - DNA, 15 bp, Homo sapiens
ccacgaccatgacag

SEQ ID NO: 245846 - DNA, 15 bp, Homo sapiens
cccacgaccatgaca

SEQ ID NO: 245847 - DNA, 15 bp, Homo sapiens
acccacgaccatgac

SEQ ID NO: 245848 - DNA, 15 bp, Homo sapiens
cacccacgaccatga

SEQ ID NO: 245849 - DNA, 15 bp, Homo sapiens
gcacccacgaccatg

SEQ ID NO: 245850 - DNA, 15 bp, Homo sapiens
ggcacccacgaccat

SEQ ID NO: 245851 - DNA, 15 bp, Homo sapiens
aggcacccacgacca

SEQ ID NO: 245852 - DNA, 15 bp, Homo sapiens
caggcacccacgacc

SEQ ID NO: 245853 - DNA, 15 bp, Homo sapiens
acaggcacccacgac

SEQ ID NO: 245854 - DNA, 15 bp, Homo sapiens
tacaggcacccacga

SEQ ID NO: 245855 - DNA, 15 bp, Homo sapiens
ttacaggcacccacg

SEQ ID NO: 245856 - DNA, 15 bp, Homo sapiens
attacaggcacccac

SEQ ID NO: 245857 - DNA, 15 bp, Homo sapiens
gattacaggcaccca

SEQ ID NO: 245858 - DNA, 15 bp, Homo sapiens
ggattacaggcaccc

SEQ ID NO: 245859 - DNA, 15 bp, Homo sapiens
ttagctgggattaca

SEQ ID NO: 245860 - DNA, 15 bp, Homo sapiens
cttagctgggattac

SEQ ID NO: 245861 - DNA, 15 bp, Homo sapiens
acttagctgggatta

SEQ ID NO: 245862 - DNA, 15 bp, Homo sapiens
cacttagctgggatt

SEQ ID NO: 245863 - DNA, 15 bp, Homo sapiens
ccacttagctgggat

SEQ ID NO: 245864 - DNA, 15 bp, Homo sapiens
cccacttagctggga

SEQ ID NO: 245865 - DNA, 15 bp, Homo sapiens
tcccacttagctggg

SEQ ID NO: 245866 - DNA, 15 bp, Homo sapiens
ctcccacttagctgg

SEQ ID NO: 245867 - DNA, 15 bp, Homo sapiens
cctcccacttagctg

SEQ ID NO: 245868 - DNA, 15 bp, Homo sapiens
gcctcccacttagct

SEQ ID NO: 245869 - DNA, 15 bp, Homo sapiens
agcctcccacttagc

SEQ ID NO: 245870 - DNA, 15 bp, Homo sapiens
cagcctcccacttag

SEQ ID NO: 245871 - DNA, 15 bp, Homo sapiens
tcagcctcccactta

SEQ ID NO: 245872 - DNA, 15 bp, Homo sapiens
ctcagcctcccactt

SEQ ID NO: 245873 - DNA, 15 bp, Homo sapiens
cctcagcctcccact

SEQ ID NO: 245874 - DNA, 15 bp, Homo sapiens
gcctcagcctcccac

SEQ ID NO: 245875 - DNA, 15 bp, Homo sapiens
acaagcgattctcct

SEQ ID NO: 245876 - DNA, 15 bp, Homo sapiens
tacaagcgattctcc

SEQ ID NO: 245877 - DNA, 15 bp, Homo sapiens
gtacaagcgattctc

SEQ ID NO: 245878 - DNA, 15 bp, Homo sapiens
ggtacaagcgattct

SEQ ID NO: 245879 - DNA, 15 bp, Homo sapiens
gggtacaagcgattc

SEQ ID NO: 245880 - DNA, 15 bp, Homo sapiens
tgggtacaagcgatt

SEQ ID NO: 245881 - DNA, 15 bp, Homo sapiens
ctgggtacaagcgat

SEQ ID NO: 245882 - DNA, 15 bp, Homo sapiens
cctgggtacaagcga

SEQ ID NO: 245883 - DNA, 15 bp, Homo sapiens
tcctgggtacaagcg

SEQ ID NO: 245884 - DNA, 15 bp, Homo sapiens
ctcctgggtacaagc

SEQ ID NO: 245885 - DNA, 15 bp, Homo sapiens
cctcctgggtacaag

SEQ ID NO: 245886 - DNA, 15 bp, Homo sapiens
gcctcctgggtacaa

SEQ ID NO: 245887 - DNA, 15 bp, Homo sapiens
cgcctcctgggtaca

SEQ ID NO: 245888 - DNA, 15 bp, Homo sapiens
ccgcctcctgggtac

SEQ ID NO: 245889 - DNA, 15 bp, Homo sapiens
tccgcctcctgggta

SEQ ID NO: 245890 - DNA, 15 bp, Homo sapiens
ctccgcctcctgggt

SEQ ID NO: 245891 - DNA, 15 bp, Homo sapiens
cctccgcctcctggg

SEQ ID NO: 245892 - DNA, 15 bp, Homo sapiens
acctccgcctcctgg

SEQ ID NO: 245893 - DNA, 15 bp, Homo sapiens
gacctccgcctcctg

SEQ ID NO: 245894 - DNA, 15 bp, Homo sapiens
cgacctccgcctcct

SEQ ID NO: 245895 - DNA, 15 bp, Homo sapiens
gcgacctccgcctcc

SEQ ID NO: 245896 - DNA, 15 bp, Homo sapiens
tgcgacctccgcctc

SEQ ID NO: 245897 - DNA, 15 bp, Homo sapiens
ctgcgacctccgcct

SEQ ID NO: 245898 - DNA, 15 bp, Homo sapiens
actgcgacctccgcc

SEQ ID NO: 245899 - DNA, 15 bp, Homo sapiens
cactgcgacctccgc

SEQ ID NO: 245900 - DNA, 15 bp, Homo sapiens
tcactgcgacctccg

SEQ ID NO: 245901 - DNA, 15 bp, Homo sapiens
ctcactgcgacctcc

SEQ ID NO: 245902 - DNA, 15 bp, Homo sapiens
gctcactgcgacctc

SEQ ID NO: 245903 - DNA, 15 bp, Homo sapiens
ggctcactgcgacct

SEQ ID NO: 245904 - DNA, 15 bp, Homo sapiens
cggctcactgcgacc

SEQ ID NO: 245905 - DNA, 15 bp, Homo sapiens
tcggctcactgcgac

SEQ ID NO: 245906 - DNA, 15 bp, Homo sapiens
ctcggctcactgcga

SEQ ID NO: 245907 - DNA, 15 bp, Homo sapiens
tctcggctcactgcg

SEQ ID NO: 245908 - DNA, 15 bp, Homo sapiens
acgatctcggctcac

SEQ ID NO: 245909 - DNA, 15 bp, Homo sapiens
cacgatctcggctca

SEQ ID NO: 245910 - DNA, 15 bp, Homo sapiens
gcacgatctcggctc

SEQ ID NO: 245911 - DNA, 15 bp, Homo sapiens
ggcacgatctcggct

SEQ ID NO: 245912 - DNA, 15 bp, Homo sapiens
tggcacgatctcggc

SEQ ID NO: 245913 - DNA, 15 bp, Homo sapiens
atggcacgatctcgg

SEQ ID NO: 245914 - DNA, 15 bp, Homo sapiens
aatggcacgatctcg

SEQ ID NO: 245915 - DNA, 15 bp, Homo sapiens
taatggcacgatctc

SEQ ID NO: 245916 - DNA, 15 bp, Homo sapiens
gtaatggcacgatct

SEQ ID NO: 245917 - DNA, 15 bp, Homo sapiens
tgtaatggcacgatc

SEQ ID NO: 245918 - DNA, 15 bp, Homo sapiens
gtgtaatggcacgat

SEQ ID NO: 245919 - DNA, 15 bp, Homo sapiens
agtgtaatggcacga

SEQ ID NO: 245920 - DNA, 15 bp, Homo sapiens
gagtgtaatggcacg

SEQ ID NO: 245921 - DNA, 15 bp, Homo sapiens
ggagtgtaatggcac

SEQ ID NO: 245922 - DNA, 15 bp, Homo sapiens
tggagtgtaatggca

SEQ ID NO: 245923 - DNA, 15 bp, Homo sapiens
ctggagtgtaatggc

SEQ ID NO: 245924 - DNA, 15 bp, Homo sapiens
gctggagtgtaatgg

SEQ ID NO: 245925 - DNA, 15 bp, Homo sapiens
ggctggagtgtaatg

SEQ ID NO: 245926 - DNA, 15 bp, Homo sapiens
aggctggagtgtaat

SEQ ID NO: 245927 - DNA, 15 bp, Homo sapiens
caggctggagtgtaa

SEQ ID NO: 245928 - DNA, 15 bp, Homo sapiens
ccaggctggagtgta

SEQ ID NO: 245929 - DNA, 15 bp, Homo sapiens
cccaggctggagtgt

SEQ ID NO: 245930 - DNA, 15 bp, Homo sapiens
ttgttgcccaggctg

SEQ ID NO: 245931 - DNA, 15 bp, Homo sapiens
cttgttgcccaggct

SEQ ID NO: 245932 - DNA, 15 bp, Homo sapiens
tcttgttgcccaggc

SEQ ID NO: 245933 - DNA, 15 bp, Homo sapiens
ctcttgttgcccagg

SEQ ID NO: 245934 - DNA, 15 bp, Homo sapiens
actcttgttgcccag

SEQ ID NO: 245935 - DNA, 15 bp, Homo sapiens
cactcttgttgccca

SEQ ID NO: 245936 - DNA, 15 bp, Homo sapiens
tcactcttgttgccc

SEQ ID NO: 245937 - DNA, 15 bp, Homo sapiens
ttcactcttgttgcc

SEQ ID NO: 245938 - DNA, 15 bp, Homo sapiens
tttcactcttgttgc

SEQ ID NO: 245939 - DNA, 15 bp, Homo sapiens
gtttcactcttgttg

SEQ ID NO: 245940 - DNA, 15 bp, Homo sapiens
agtttcactcttgtt

SEQ ID NO: 245941 - DNA, 15 bp, Homo sapiens
gagtttcactcttgt

SEQ ID NO: 245942 - DNA, 15 bp, Homo sapiens
ggagtttcactcttg

SEQ ID NO: 245943 - DNA, 15 bp, Homo sapiens
cggagtttcactctt

SEQ ID NO: 245944 - DNA, 15 bp, Homo sapiens
acggagtttcactct

SEQ ID NO: 245945 - DNA, 15 bp, Homo sapiens
gacggagtttcactc

SEQ ID NO: 245946 - DNA, 15 bp, Homo sapiens
agacggagtttcact

SEQ ID NO: 245947 - DNA, 15 bp, Homo sapiens
gagacggagtttcac

SEQ ID NO: 245948 - DNA, 15 bp, Homo sapiens
agagacggagtttca

SEQ ID NO: 245949 - DNA, 15 bp, Homo sapiens
gagagacggagtttc

SEQ ID NO: 245950 - DNA, 15 bp, Homo sapiens
ggagagacggagttt

SEQ ID NO: 245951 - DNA, 15 bp, Homo sapiens
aggagagacggagtt

SEQ ID NO: 245952 - DNA, 15 bp, Homo sapiens
taggagagacggagt

SEQ ID NO: 245953 - DNA, 15 bp, Homo sapiens
ttaggagagacggag

SEQ ID NO: 245954 - DNA, 15 bp, Homo sapiens
tttaggagagacgga

SEQ ID NO: 245955 - DNA, 15 bp, Homo sapiens
ttttaggagagacgg

SEQ ID NO: 245956 - DNA, 15 bp, Homo sapiens
tttttaggagagacg

SEQ ID NO: 245957 - DNA, 15 bp, Homo sapiens
atttttaggagagac

SEQ ID NO: 245958 - DNA, 15 bp, Homo sapiens
tatttttaggagaga

SEQ ID NO: 245959 - DNA, 15 bp, Homo sapiens
gtatttttaggagag

SEQ ID NO: 245960 - DNA, 15 bp, Homo sapiens
tgtatttttaggaga

SEQ ID NO: 245961 - DNA, 15 bp, Homo sapiens
ttgtatttttaggag

SEQ ID NO: 245962 - DNA, 15 bp, Homo sapiens
tttgtatttttagga

SEQ ID NO: 245963 - DNA, 15 bp, Homo sapiens
ttttgtatttttagg

SEQ ID NO: 245964 - DNA, 15 bp, Homo sapiens
agctaatttttttgt

SEQ ID NO: 245965 - DNA, 15 bp, Homo sapiens
cagctaatttttttg

SEQ ID NO: 245966 - DNA, 15 bp, Homo sapiens
ccagctaattttttt

SEQ ID NO: 245967 - DNA, 15 bp, Homo sapiens
cccagctaatttttt

SEQ ID NO: 245968 - DNA, 15 bp, Homo sapiens
gtgccaccatgccca

SEQ ID NO: 245969 - DNA, 15 bp, Homo sapiens
tgtgccaccatgccc

SEQ ID NO: 245970 - DNA, 15 bp, Homo sapiens
atgtgccaccatgcc

SEQ ID NO: 245971 - DNA, 15 bp, Homo sapiens
catgtgccaccatgc

SEQ ID NO: 245972 - DNA, 15 bp, Homo sapiens
gcatgtgccaccatg

SEQ ID NO: 245973 - DNA, 15 bp, Homo sapiens
ggcatgtgccaccat

SEQ ID NO: 245974 - DNA, 15 bp, Homo sapiens
aggcatgtgccacca

SEQ ID NO: 245975 - DNA, 15 bp, Homo sapiens
caggcatgtgccacc

SEQ ID NO: 245976 - DNA, 15 bp, Homo sapiens
acaggcatgtgccac

SEQ ID NO: 245977 - DNA, 15 bp, Homo sapiens
tacaggcatgtgcca

SEQ ID NO: 245978 - DNA, 15 bp, Homo sapiens
ctacaggcatgtgcc

SEQ ID NO: 245979 - DNA, 15 bp, Homo sapiens
actacaggcatgtgc

SEQ ID NO: 245980 - DNA, 15 bp, Homo sapiens
gactacaggcatgtg

SEQ ID NO: 245981 - DNA, 15 bp, Homo sapiens
ggactacaggcatgt

SEQ ID NO: 245982 - DNA, 15 bp, Homo sapiens
gggactacaggcatg

SEQ ID NO: 245983 - DNA, 15 bp, Homo sapiens
tgggactacaggcat

SEQ ID NO: 245984 - DNA, 15 bp, Homo sapiens
cgggttcaagtgatt

SEQ ID NO: 245985 - DNA, 15 bp, Homo sapiens
ccgggttcaagtgat

SEQ ID NO: 245986 - DNA, 15 bp, Homo sapiens
cccgggttcaagtga

SEQ ID NO: 245987 - DNA, 15 bp, Homo sapiens
tcccgggttcaagtg

SEQ ID NO: 245988 - DNA, 15 bp, Homo sapiens
ctcccgggttcaagt

SEQ ID NO: 245989 - DNA, 15 bp, Homo sapiens
ctccacctcccgggt

SEQ ID NO: 245990 - DNA, 15 bp, Homo sapiens
cctccacctcccggg

SEQ ID NO: 245991 - DNA, 15 bp, Homo sapiens
acctccacctcccgg

SEQ ID NO: 245992 - DNA, 15 bp, Homo sapiens
aacctccacctcccg

SEQ ID NO: 245993 - DNA, 15 bp, Homo sapiens
caacctccacctccc

SEQ ID NO: 245994 - DNA, 15 bp, Homo sapiens
acaacctccacctcc

SEQ ID NO: 245995 - DNA, 15 bp, Homo sapiens
tacaacctccacctc

SEQ ID NO: 245996 - DNA, 15 bp, Homo sapiens
ttacaacctccacct

SEQ ID NO: 245997 - DNA, 15 bp, Homo sapiens
attacaacctccacc

SEQ ID NO: 245998 - DNA, 15 bp, Homo sapiens
cattacaacctccac

SEQ ID NO: 245999 - DNA, 15 bp, Homo sapiens
tcattacaacctcca

SEQ ID NO: 246000 - DNA, 15 bp, Homo sapiens
ctcattacaacctcc

SEQ ID NO: 246001 - DNA, 15 bp, Homo sapiens
gctcattacaacctc

SEQ ID NO: 246002 - DNA, 15 bp, Homo sapiens
ggctcattacaacct

SEQ ID NO: 246003 - DNA, 15 bp, Homo sapiens
tggctcattacaacc

SEQ ID NO: 246004 - DNA, 15 bp, Homo sapiens
ttggctcattacaac

SEQ ID NO: 246005 - DNA, 15 bp, Homo sapiens
cttggctcattacaa

SEQ ID NO: 246006 - DNA, 15 bp, Homo sapiens
ccttggctcattaca

SEQ ID NO: 246007 - DNA, 15 bp, Homo sapiens
accttggctcattac

SEQ ID NO: 246008 - DNA, 15 bp, Homo sapiens
aaccttggctcatta

SEQ ID NO: 246009 - DNA, 15 bp, Homo sapiens
caaccttggctcatt

SEQ ID NO: 246010 - DNA, 15 bp, Homo sapiens
ccaaccttggctcat

SEQ ID NO: 246011 - DNA, 15 bp, Homo sapiens
gccaaccttggctca

SEQ ID NO: 246012 - DNA, 15 bp, Homo sapiens
cgccaaccttggctc

SEQ ID NO: 246013 - DNA, 15 bp, Homo sapiens
ccgccaaccttggct

SEQ ID NO: 246014 - DNA, 15 bp, Homo sapiens
gccgccaaccttggc

SEQ ID NO: 246015 - DNA, 15 bp, Homo sapiens
cgccgccaaccttgg

SEQ ID NO: 246016 - DNA, 15 bp, Homo sapiens
tcgccgccaaccttg

SEQ ID NO: 246017 - DNA, 15 bp, Homo sapiens
ttcgccgccaacctt

SEQ ID NO: 246018 - DNA, 15 bp, Homo sapiens
cttcgccgccaacct

SEQ ID NO: 246019 - DNA, 15 bp, Homo sapiens
ccttcgccgccaacc

SEQ ID NO: 246020 - DNA, 15 bp, Homo sapiens
cccttcgccgccaac

SEQ ID NO: 246021 - DNA, 15 bp, Homo sapiens
tcccttcgccgccaa

SEQ ID NO: 246022 - DNA, 15 bp, Homo sapiens
atcccttcgccgcca

SEQ ID NO: 246023 - DNA, 15 bp, Homo sapiens
catcccttcgccgcc

SEQ ID NO: 246024 - DNA, 15 bp, Homo sapiens
ccatcccttcgccgc

SEQ ID NO: 246025 - DNA, 15 bp, Homo sapiens
cccatcccttcgccg

SEQ ID NO: 246026 - DNA, 15 bp, Homo sapiens
acccatcccttcgcc

SEQ ID NO: 246027 - DNA, 15 bp, Homo sapiens
tacccatcccttcgc

SEQ ID NO: 246028 - DNA, 15 bp, Homo sapiens
ctacccatcccttcg

SEQ ID NO: 246029 - DNA, 15 bp, Homo sapiens
cctacccatcccttc

SEQ ID NO: 246030 - DNA, 15 bp, Homo sapiens
ccctacccatccctt

SEQ ID NO: 246031 - DNA, 15 bp, Homo sapiens
cccctacccatccct

SEQ ID NO: 246032 - DNA, 15 bp, Homo sapiens
gcccctacccatccc

SEQ ID NO: 246033 - DNA, 15 bp, Homo sapiens
ggcccctacccatcc

SEQ ID NO: 246034 - DNA, 15 bp, Homo sapiens
gggcccctacccatc

SEQ ID NO: 246035 - DNA, 15 bp, Homo sapiens
cgggcccctacccat

SEQ ID NO: 246036 - DNA, 15 bp, Homo sapiens
tcgggcccctaccca

SEQ ID NO: 246037 - DNA, 15 bp, Homo sapiens
ctcgggcccctaccc

SEQ ID NO: 246038 - DNA, 15 bp, Homo sapiens
tctcgggcccctacc

SEQ ID NO: 246039 - DNA, 15 bp, Homo sapiens
ctctcgggcccctac

SEQ ID NO: 246040 - DNA, 15 bp, Homo sapiens
actctcgggccccta

SEQ ID NO: 246041 - DNA, 15 bp, Homo sapiens
cactctcgggcccct

SEQ ID NO: 246042 - DNA, 15 bp, Homo sapiens
tcactctcgggcccc

SEQ ID NO: 246043 - DNA, 15 bp, Homo sapiens
gtcactctcgggccc

SEQ ID NO: 246044 - DNA, 15 bp, Homo sapiens
ggtcactctcgggcc

SEQ ID NO: 246045 - DNA, 15 bp, Homo sapiens
tggtcactctcgggc

SEQ ID NO: 246046 - DNA, 15 bp, Homo sapiens
ctggtcactctcggg

SEQ ID NO: 246047 - DNA, 15 bp, Homo sapiens
actggtcactctcgg

SEQ ID NO: 246048 - DNA, 15 bp, Homo sapiens
gactggtcactctcg

SEQ ID NO: 246049 - DNA, 15 bp, Homo sapiens
agactggtcactctc

SEQ ID NO: 246050 - DNA, 15 bp, Homo sapiens
cagactggtcactct

SEQ ID NO: 246051 - DNA, 15 bp, Homo sapiens
gcagactggtcactc

SEQ ID NO: 246052 - DNA, 15 bp, Homo sapiens
tgcagactggtcact

SEQ ID NO: 246053 - DNA, 15 bp, Homo sapiens
atgcagactggtcac

SEQ ID NO: 246054 - DNA, 15 bp, Homo sapiens
gatgcagactggtca

SEQ ID NO: 246055 - DNA, 15 bp, Homo sapiens
ggatgcagactggtc

SEQ ID NO: 246056 - DNA, 15 bp, Homo sapiens
gggatgcagactggt

SEQ ID NO: 246057 - DNA, 15 bp, Homo sapiens
ggggatgcagactgg

SEQ ID NO: 246058 - DNA, 15 bp, Homo sapiens
aggggatgcagactg

SEQ ID NO: 246059 - DNA, 15 bp, Homo sapiens
caggggatgcagact

SEQ ID NO: 246060 - DNA, 15 bp, Homo sapiens
ccaggggatgcagac

SEQ ID NO: 246061 - DNA, 15 bp, Homo sapiens
gccaggggatgcaga

SEQ ID NO: 246062 - DNA, 15 bp, Homo sapiens
ggccaggggatgcag

SEQ ID NO: 246063 - DNA, 15 bp, Homo sapiens
gggccaggggatgca

SEQ ID NO: 246064 - DNA, 15 bp, Homo sapiens
agggccaggggatgc

SEQ ID NO: 246065 - DNA, 15 bp, Homo sapiens
cagggccaggggatg

SEQ ID NO: 246066 - DNA, 15 bp, Homo sapiens
gcagggccaggggat

SEQ ID NO: 246067 - DNA, 15 bp, Homo sapiens
cgcagggccagggga

SEQ ID NO: 246068 - DNA, 15 bp, Homo sapiens
gcgcagggccagggg

SEQ ID NO: 246069 - DNA, 15 bp, Homo sapiens
tgcgcagggccaggg

SEQ ID NO: 246070 - DNA, 15 bp, Homo sapiens
ctgcgcagggccagg

SEQ ID NO: 246071 - DNA, 15 bp, Homo sapiens
cctgcgcagggccag

SEQ ID NO: 246072 - DNA, 15 bp, Homo sapiens
ccctgcgcagggcca

SEQ ID NO: 246073 - DNA, 15 bp, Homo sapiens
tccctgcgcagggcc

SEQ ID NO: 246074 - DNA, 15 bp, Homo sapiens
gtccctgcgcagggc

SEQ ID NO: 246075 - DNA, 15 bp, Homo sapiens
ggtccctgcgcaggg

SEQ ID NO: 246076 - DNA, 15 bp, Homo sapiens
tggtccctgcgcagg

SEQ ID NO: 246077 - DNA, 15 bp, Homo sapiens
ttggtccctgcgcag

SEQ ID NO: 246078 - DNA, 15 bp, Homo sapiens
gttggtccctgcgca

SEQ ID NO: 246079 - DNA, 15 bp, Homo sapiens
cgttggtccctgcgc

SEQ ID NO: 246080 - DNA, 15 bp, Homo sapiens
tcgttggtccctgcg

SEQ ID NO: 246081 - DNA, 15 bp, Homo sapiens
ttcgttggtccctgc

SEQ ID NO: 246082 - DNA, 15 bp, Homo sapiens
attcgttggtccctg

SEQ ID NO: 246083 - DNA, 15 bp, Homo sapiens
cattcgttggtccct

SEQ ID NO: 246084 - DNA, 15 bp, Homo sapiens
gcattcgttggtccc

SEQ ID NO: 246085 - DNA, 15 bp, Homo sapiens
agcattcgttggtcc

SEQ ID NO: 246086 - DNA, 15 bp, Homo sapiens
aagcattcgttggtc

SEQ ID NO: 246087 - DNA, 15 bp, Homo sapiens
caagcattcgttggt

SEQ ID NO: 246088 - DNA, 15 bp, Homo sapiens
ccaagcattcgttgg

SEQ ID NO: 246089 - DNA, 15 bp, Homo sapiens
tccaagcattcgttg

SEQ ID NO: 246090 - DNA, 15 bp, Homo sapiens
gtccaagcattcgtt

SEQ ID NO: 246091 - DNA, 15 bp, Homo sapiens
tgtccaagcattcgt

SEQ ID NO: 246092 - DNA, 15 bp, Homo sapiens
ttgtccaagcattcg

SEQ ID NO: 246093 - DNA, 15 bp, Homo sapiens
gttgtccaagcattc

SEQ ID NO: 246094 - DNA, 15 bp, Homo sapiens
tgttgtccaagcatt

SEQ ID NO: 246095 - DNA, 15 bp, Homo sapiens
ttgttgtccaagcat

SEQ ID NO: 246096 - DNA, 15 bp, Homo sapiens
gttgttgtccaagca

SEQ ID NO: 246097 - DNA, 15 bp, Homo sapiens
cgttgttgtccaagc

SEQ ID NO: 246098 - DNA, 15 bp, Homo sapiens
ccgttgttgtccaag

SEQ ID NO: 246099 - DNA, 15 bp, Homo sapiens
gccgttgttgtccaa

SEQ ID NO: 246100 - DNA, 15 bp, Homo sapiens
cgccgttgttgtcca

SEQ ID NO: 246101 - DNA, 15 bp, Homo sapiens
ccgccgttgttgtcc

SEQ ID NO: 246102 - DNA, 15 bp, Homo sapiens
gccgccgttgttgtc

SEQ ID NO: 246103 - DNA, 15 bp, Homo sapiens
agccgccgttgttgt

SEQ ID NO: 246104 - DNA, 15 bp, Homo sapiens
cagccgccgttgttg

SEQ ID NO: 246105 - DNA, 15 bp, Homo sapiens
acagccgccgttgtt

SEQ ID NO: 246106 - DNA, 15 bp, Homo sapiens
aacagccgccgttgt

SEQ ID NO: 246107 - DNA, 15 bp, Homo sapiens
gaacagccgccgttg

SEQ ID NO: 246108 - DNA, 15 bp, Homo sapiens
ggaacagccgccgtt

SEQ ID NO: 246109 - DNA, 15 bp, Homo sapiens
gggaacagccgccgt

SEQ ID NO: 246110 - DNA, 15 bp, Homo sapiens
tgggaacagccgccg

SEQ ID NO: 246111 - DNA, 15 bp, Homo sapiens
gtgggaacagccgcc

SEQ ID NO: 246112 - DNA, 15 bp, Homo sapiens
cgtgggaacagccgc

SEQ ID NO: 246113 - DNA, 15 bp, Homo sapiens
acgtgggaacagccg

SEQ ID NO: 246114 - DNA, 15 bp, Homo sapiens
gacgtgggaacagcc

SEQ ID NO: 246115 - DNA, 15 bp, Homo sapiens
agacgtgggaacagc

SEQ ID NO: 246116 - DNA, 15 bp, Homo sapiens
cagacgtgggaacag

SEQ ID NO: 246117 - DNA, 15 bp, Homo sapiens
gcagacgtgggaaca

SEQ ID NO: 246118 - DNA, 15 bp, Homo sapiens
tgcagacgtgggaac

SEQ ID NO: 246119 - DNA, 15 bp, Homo sapiens
ttgcagacgtgggaa

SEQ ID NO: 246120 - DNA, 15 bp, Homo sapiens
attgcagacgtggga

SEQ ID NO: 246121 - DNA, 15 bp, Homo sapiens
cattgcagacgtggg

SEQ ID NO: 246122 - DNA, 15 bp, Homo sapiens
tcattgcagacgtgg

SEQ ID NO: 246123 - DNA, 15 bp, Homo sapiens
gtcattgcagacgtg

SEQ ID NO: 246124 - DNA, 15 bp, Homo sapiens
ggtcattgcagacgt

SEQ ID NO: 246125 - DNA, 15 bp, Homo sapiens
aggtcattgcagacg

SEQ ID NO: 246126 - DNA, 15 bp, Homo sapiens
aaggtcattgcagac

SEQ ID NO: 246127 - DNA, 15 bp, Homo sapiens
taaggtcattgcaga

SEQ ID NO: 246128 - DNA, 15 bp, Homo sapiens
ttaaggtcattgcag

SEQ ID NO: 246129 - DNA, 15 bp, Homo sapiens
cttaaggtcattgca

SEQ ID NO: 246130 - DNA, 15 bp, Homo sapiens
tcttaaggtcattgc

SEQ ID NO: 246131 - DNA, 15 bp, Homo sapiens
atcttaaggtcattg

SEQ ID NO: 246132 - DNA, 15 bp, Homo sapiens
gatcttaaggtcatt

SEQ ID NO: 246133 - DNA, 15 bp, Homo sapiens
cgatcttaaggtcat

SEQ ID NO: 246134 - DNA, 15 bp, Homo sapiens
ccgatcttaaggtca

SEQ ID NO: 246135 - DNA, 15 bp, Homo sapiens
gccgatcttaaggtc

SEQ ID NO: 246136 - DNA, 15 bp, Homo sapiens
agccgatcttaaggt

SEQ ID NO: 246137 - DNA, 15 bp, Homo sapiens
tagccgatcttaagg

SEQ ID NO: 246138 - DNA, 15 bp, Homo sapiens
gtagccgatcttaag

SEQ ID NO: 246139 - DNA, 15 bp, Homo sapiens
cgtagccgatcttaa

SEQ ID NO: 246140 - DNA, 15 bp, Homo sapiens
tcgtagccgatctta

SEQ ID NO: 246141 - DNA, 15 bp, Homo sapiens
ctcgtagccgatctt

SEQ ID NO: 246142 - DNA, 15 bp, Homo sapiens
actcgtagccgatct

SEQ ID NO: 246143 - DNA, 15 bp, Homo sapiens
cactcgtagccgatc

SEQ ID NO: 246144 - DNA, 15 bp, Homo sapiens
gcactcgtagccgat

SEQ ID NO: 246145 - DNA, 15 bp, Homo sapiens
ggcactcgtagccga

SEQ ID NO: 246146 - DNA, 15 bp, Homo sapiens
aggcactcgtagccg

SEQ ID NO: 246147 - DNA, 15 bp, Homo sapiens
caggcactcgtagcc

SEQ ID NO: 246148 - DNA, 15 bp, Homo sapiens
acaggcactcgtagc

SEQ ID NO: 246149 - DNA, 15 bp, Homo sapiens
cacaggcactcgtag

SEQ ID NO: 246150 - DNA, 15 bp, Homo sapiens
gcacaggcactcgta

SEQ ID NO: 246151 - DNA, 15 bp, Homo sapiens
ggcacaggcactcgt

SEQ ID NO: 246152 - DNA, 15 bp, Homo sapiens
gggcacaggcactcg

SEQ ID NO: 246153 - DNA, 15 bp, Homo sapiens
ggggcacaggcactc

SEQ ID NO: 246154 - DNA, 15 bp, Homo sapiens
cggggcacaggcact

SEQ ID NO: 246155 - DNA, 15 bp, Homo sapiens
tcggggcacaggcac

SEQ ID NO: 246156 - DNA, 15 bp, Homo sapiens
gtcggggcacaggca

SEQ ID NO: 246157 - DNA, 15 bp, Homo sapiens
cgtcggggcacaggc

SEQ ID NO: 246158 - DNA, 15 bp, Homo sapiens
ccgtcggggcacagg

SEQ ID NO: 246159 - DNA, 15 bp, Homo sapiens
gccgtcggggcacag

SEQ ID NO: 246160 - DNA, 15 bp, Homo sapiens
agccgtcggggcaca

SEQ ID NO: 246161 - DNA, 15 bp, Homo sapiens
aagccgtcggggcac

SEQ ID NO: 246162 - DNA, 15 bp, Homo sapiens
gaagccgtcggggca

SEQ ID NO: 246163 - DNA, 15 bp, Homo sapiens
ggaagccgtcggggc

SEQ ID NO: 246164 - DNA, 15 bp, Homo sapiens
tggaagccgtcgggg

SEQ ID NO: 246165 - DNA, 15 bp, Homo sapiens
ctggaagccgtcggg

SEQ ID NO: 246166 - DNA, 15 bp, Homo sapiens
gctggaagccgtcgg

SEQ ID NO: 246167 - DNA, 15 bp, Homo sapiens
agctggaagccgtcg

SEQ ID NO: 246168 - DNA, 15 bp, Homo sapiens
cagctggaagccgtc

SEQ ID NO: 246169 - DNA, 15 bp, Homo sapiens
ccagctggaagccgt

SEQ ID NO: 246170 - DNA, 15 bp, Homo sapiens
accagctggaagccg

SEQ ID NO: 246171 - DNA, 15 bp, Homo sapiens
caccagctggaagcc

SEQ ID NO: 246172 - DNA, 15 bp, Homo sapiens
ccaccagctggaagc

SEQ ID NO: 246173 - DNA, 15 bp, Homo sapiens
gccaccagctggaag

SEQ ID NO: 246174 - DNA, 15 bp, Homo sapiens
ggccaccagctggaa

SEQ ID NO: 246175 - DNA, 15 bp, Homo sapiens
gggccaccagctgga

SEQ ID NO: 246176 - DNA, 15 bp, Homo sapiens
tgggccaccagctgg

SEQ ID NO: 246177 - DNA, 15 bp, Homo sapiens
ctgggccaccagctg

SEQ ID NO: 246178 - DNA, 15 bp, Homo sapiens
gctgggccaccagct

SEQ ID NO: 246179 - DNA, 15 bp, Homo sapiens
cgctgggccaccagc

SEQ ID NO: 246180 - DNA, 15 bp, Homo sapiens
tcgctgggccaccag

SEQ ID NO: 246181 - DNA, 15 bp, Homo sapiens
ttcgctgggccacca

SEQ ID NO: 246182 - DNA, 15 bp, Homo sapiens
cttcgctgggccacc

SEQ ID NO: 246183 - DNA, 15 bp, Homo sapiens
tcttcgctgggccac

SEQ ID NO: 246184 - DNA, 15 bp, Homo sapiens
atcttcgctgggcca

SEQ ID NO: 246185 - DNA, 15 bp, Homo sapiens
catcttcgctgggcc

SEQ ID NO: 246186 - DNA, 15 bp, Homo sapiens
gcatcttcgctgggc

SEQ ID NO: 246187 - DNA, 15 bp, Homo sapiens
cgcatcttcgctggg

SEQ ID NO: 246188 - DNA, 15 bp, Homo sapiens
tcgcatcttcgctgg

SEQ ID NO: 246189 - DNA, 15 bp, Homo sapiens
ttcgcatcttcgctg

SEQ ID NO: 246190 - DNA, 15 bp, Homo sapiens
cttcgcatcttcgct

SEQ ID NO: 246191 - DNA, 15 bp, Homo sapiens
ccttcgcatcttcgc

SEQ ID NO: 246192 - DNA, 15 bp, Homo sapiens
accttcgcatcttcg

SEQ ID NO: 246193 - DNA, 15 bp, Homo sapiens
caccttcgcatcttc

SEQ ID NO: 246194 - DNA, 15 bp, Homo sapiens
tcaccttcgcatctt

SEQ ID NO: 246195 - DNA, 15 bp, Homo sapiens
atcaccttcgcatct

SEQ ID NO: 246196 - DNA, 15 bp, Homo sapiens
aatcaccttcgcatc

SEQ ID NO: 246197 - DNA, 15 bp, Homo sapiens
aaatcaccttcgcat

SEQ ID NO: 246198 - DNA, 15 bp, Homo sapiens
gaaatcaccttcgca

SEQ ID NO: 246199 - DNA, 15 bp, Homo sapiens
ggaaatcaccttcgc

SEQ ID NO: 246200 - DNA, 15 bp, Homo sapiens
cggaaatcaccttcg

SEQ ID NO: 246201 - DNA, 15 bp, Homo sapiens
ccggaaatcaccttc

SEQ ID NO: 246202 - DNA, 15 bp, Homo sapiens
cccggaaatcacctt

SEQ ID NO: 246203 - DNA, 15 bp, Homo sapiens
acccggaaatcacct

SEQ ID NO: 246204 - DNA, 15 bp, Homo sapiens
cacccggaaatcacc

SEQ ID NO: 246205 - DNA, 15 bp, Homo sapiens
ccacccggaaatcac

SEQ ID NO: 246206 - DNA, 15 bp, Homo sapiens
cccacccggaaatca

SEQ ID NO: 246207 - DNA, 15 bp, Homo sapiens
tcccacccggaaatc

SEQ ID NO: 246208 - DNA, 15 bp, Homo sapiens
gtcccacccggaaat

SEQ ID NO: 246209 - DNA, 15 bp, Homo sapiens
agtcccacccggaaa

SEQ ID NO: 246210 - DNA, 15 bp, Homo sapiens
cagtcccacccggaa

SEQ ID NO: 246211 - DNA, 15 bp, Homo sapiens
tcagtcccacccgga

SEQ ID NO: 246212 - DNA, 15 bp, Homo sapiens
ctcagtcccacccgg

SEQ ID NO: 246213 - DNA, 15 bp, Homo sapiens
gctcagtcccacccg

SEQ ID NO: 246214 - DNA, 15 bp, Homo sapiens
ggctcagtcccaccc

SEQ ID NO: 246215 - DNA, 15 bp, Homo sapiens
gggctcagtcccacc

SEQ ID NO: 246216 - DNA, 15 bp, Homo sapiens
agggctcagtcccac

SEQ ID NO: 246217 - DNA, 15 bp, Homo sapiens
cagggctcagtccca

SEQ ID NO: 246218 - DNA, 15 bp, Homo sapiens
ccagggctcagtccc

SEQ ID NO: 246219 - DNA, 15 bp, Homo sapiens
cccagggctcagtcc

SEQ ID NO: 246220 - DNA, 15 bp, Homo sapiens
gcccagggctcagtc

SEQ ID NO: 246221 - DNA, 15 bp, Homo sapiens
ggcccagggctcagt

SEQ ID NO: 246222 - DNA, 15 bp, Homo sapiens
gggcccagggctcag

SEQ ID NO: 246223 - DNA, 15 bp, Homo sapiens
ggggcccagggctca

SEQ ID NO: 246224 - DNA, 15 bp, Homo sapiens
gggggcccagggctc

SEQ ID NO: 246225 - DNA, 15 bp, Homo sapiens
agggggcccagggct

SEQ ID NO: 246226 - DNA, 15 bp, Homo sapiens
gagggggcccagggc

SEQ ID NO: 246227 - DNA, 15 bp, Homo sapiens
agagggggcccaggg

SEQ ID NO: 246228 - DNA, 15 bp, Homo sapiens
cagagggggcccagg

SEQ ID NO: 246229 - DNA, 15 bp, Homo sapiens
gcagagggggcccag

SEQ ID NO: 246230 - DNA, 15 bp, Homo sapiens
cgcagagggggccca

SEQ ID NO: 246231 - DNA, 15 bp, Homo sapiens
gcgcagagggggccc

SEQ ID NO: 246232 - DNA, 15 bp, Homo sapiens
agcgcagagggggcc

SEQ ID NO: 246233 - DNA, 15 bp, Homo sapiens
aagcgcagagggggc

SEQ ID NO: 246234 - DNA, 15 bp, Homo sapiens
gaagcgcagaggggg

SEQ ID NO: 246235 - DNA, 15 bp, Homo sapiens
ggaagcgcagagggg

SEQ ID NO: 246236 - DNA, 15 bp, Homo sapiens
aggaagcgcagaggg

SEQ ID NO: 246237 - DNA, 15 bp, Homo sapiens
caggaagcgcagagg

SEQ ID NO: 246238 - DNA, 15 bp, Homo sapiens
tcaggaagcgcagag

SEQ ID NO: 246239 - DNA, 15 bp, Homo sapiens
gtcaggaagcgcaga

SEQ ID NO: 246240 - DNA, 15 bp, Homo sapiens
tgtcaggaagcgcag

SEQ ID NO: 246241 - DNA, 15 bp, Homo sapiens
atgtcaggaagcgca

SEQ ID NO: 246242 - DNA, 15 bp, Homo sapiens
catgtcaggaagcgc

SEQ ID NO: 246243 - DNA, 15 bp, Homo sapiens
ccatgtcaggaagcg

SEQ ID NO: 246244 - DNA, 15 bp, Homo sapiens
gccatgtcaggaagc

SEQ ID NO: 246245 - DNA, 15 bp, Homo sapiens
tgccatgtcaggaag

SEQ ID NO: 246246 - DNA, 15 bp, Homo sapiens
ttgccatgtcaggaa

SEQ ID NO: 246247 - DNA, 15 bp, Homo sapiens
gttgccatgtcagga

SEQ ID NO: 246248 - DNA, 15 bp, Homo sapiens
ggttgccatgtcagg

SEQ ID NO: 246249 - DNA, 15 bp, Homo sapiens
tggttgccatgtcag

SEQ ID NO: 246250 - DNA, 15 bp, Homo sapiens
ttggttgccatgtca

SEQ ID NO: 246251 - DNA, 15 bp, Homo sapiens
tttggttgccatgtc

SEQ ID NO: 246252 - DNA, 15 bp, Homo sapiens
gtttggttgccatgt

SEQ ID NO: 246253 - DNA, 15 bp, Homo sapiens
ggtttggttgccatg

SEQ ID NO: 246254 - DNA, 15 bp, Homo sapiens
gggtttggttgccat

SEQ ID NO: 246255 - DNA, 15 bp, Homo sapiens
ggggtttggttgcca

SEQ ID NO: 246256 - DNA, 15 bp, Homo sapiens
aggggtttggttgcc

SEQ ID NO: 246257 - DNA, 15 bp, Homo sapiens
gaggggtttggttgc

SEQ ID NO: 246258 - DNA, 15 bp, Homo sapiens
tgaggggtttggttg

SEQ ID NO: 246259 - DNA, 15 bp, Homo sapiens
atgaggggtttggtt

SEQ ID NO: 246260 - DNA, 15 bp, Homo sapiens
catgaggggtttggt

SEQ ID NO: 246261 - DNA, 15 bp, Homo sapiens
gcatgaggggtttgg

SEQ ID NO: 246262 - DNA, 15 bp, Homo sapiens
ggcatgaggggtttg

SEQ ID NO: 246263 - DNA, 15 bp, Homo sapiens
aggcatgaggggttt

SEQ ID NO: 246264 - DNA, 15 bp, Homo sapiens
gaggcatgaggggtt

SEQ ID NO: 246265 - DNA, 15 bp, Homo sapiens
tgaggcatgaggggt

SEQ ID NO: 246266 - DNA, 15 bp, Homo sapiens
ctgaggcatgagggg

SEQ ID NO: 246267 - DNA, 15 bp, Homo sapiens
actgaggcatgaggg

SEQ ID NO: 246268 - DNA, 15 bp, Homo sapiens
aactgaggcatgagg

SEQ ID NO: 246269 - DNA, 15 bp, Homo sapiens
aaactgaggcatgag

SEQ ID NO: 246270 - DNA, 15 bp, Homo sapiens
gaaactgaggcatga

SEQ ID NO: 246271 - DNA, 15 bp, Homo sapiens
ggaaactgaggcatg

SEQ ID NO: 246272 - DNA, 15 bp, Homo sapiens
gggaaactgaggcat

SEQ ID NO: 246273 - DNA, 15 bp, Homo sapiens
ggggaaactgaggca

SEQ ID NO: 246274 - DNA, 15 bp, Homo sapiens
tggggaaactgaggc

SEQ ID NO: 246275 - DNA, 15 bp, Homo sapiens
atggggaaactgagg

SEQ ID NO: 246276 - DNA, 15 bp, Homo sapiens
gatggggaaactgag

SEQ ID NO: 246277 - DNA, 15 bp, Homo sapiens
agatggggaaactga

SEQ ID NO: 246278 - DNA, 15 bp, Homo sapiens
cagatggggaaactg

SEQ ID NO: 246279 - DNA, 15 bp, Homo sapiens
acagatggggaaact

SEQ ID NO: 246280 - DNA, 15 bp, Homo sapiens
aacagatggggaaac

SEQ ID NO: 246281 - DNA, 15 bp, Homo sapiens
taacagatggggaaa

SEQ ID NO: 246282 - DNA, 15 bp, Homo sapiens
ttaacagatggggaa

SEQ ID NO: 246283 - DNA, 15 bp, Homo sapiens
cttaacagatgggga

SEQ ID NO: 246284 - DNA, 15 bp, Homo sapiens
acttaacagatgggg

SEQ ID NO: 246285 - DNA, 15 bp, Homo sapiens
cacttaacagatggg

SEQ ID NO: 246286 - DNA, 15 bp, Homo sapiens
acacttaacagatgg

SEQ ID NO: 246287 - DNA, 15 bp, Homo sapiens
cacacttaacagatg

SEQ ID NO: 246288 - DNA, 15 bp, Homo sapiens
gcacacttaacagat

SEQ ID NO: 246289 - DNA, 15 bp, Homo sapiens
agcacacttaacaga

SEQ ID NO: 246290 - DNA, 15 bp, Homo sapiens
aagcacacttaacag

SEQ ID NO: 246291 - DNA, 15 bp, Homo sapiens
caagcacacttaaca

SEQ ID NO: 246292 - DNA, 15 bp, Homo sapiens
tcaagcacacttaac

SEQ ID NO: 246293 - DNA, 15 bp, Homo sapiens
ttcaagcacacttaa

SEQ ID NO: 246294 - DNA, 15 bp, Homo sapiens
tttcaagcacactta

SEQ ID NO: 246295 - DNA, 15 bp, Homo sapiens
ctttcaagcacactt

SEQ ID NO: 246296 - DNA, 15 bp, Homo sapiens
gctttcaagcacact

SEQ ID NO: 246297 - DNA, 15 bp, Homo sapiens
tgctttcaagcacac

SEQ ID NO: 246298 - DNA, 15 bp, Homo sapiens
ctgctttcaagcaca

SEQ ID NO: 246299 - DNA, 15 bp, Homo sapiens
actgctttcaagcac

SEQ ID NO: 246300 - DNA, 15 bp, Homo sapiens
aactgctttcaagca

SEQ ID NO: 246301 - DNA, 15 bp, Homo sapiens
taactgctttcaagc

SEQ ID NO: 246302 - DNA, 15 bp, Homo sapiens
ctaactgctttcaag

SEQ ID NO: 246303 - DNA, 15 bp, Homo sapiens
cctaactgctttcaa

SEQ ID NO: 246304 - DNA, 15 bp, Homo sapiens
tcctaactgctttca

SEQ ID NO: 246305 - DNA, 15 bp, Homo sapiens
ctcctaactgctttc

SEQ ID NO: 246306 - DNA, 15 bp, Homo sapiens
cctcctaactgcttt

SEQ ID NO: 246307 - DNA, 15 bp, Homo sapiens
ccctcctaactgctt

SEQ ID NO: 246308 - DNA, 15 bp, Homo sapiens
accctcctaactgct

SEQ ID NO: 246309 - DNA, 15 bp, Homo sapiens
aaccctcctaactgc

SEQ ID NO: 246310 - DNA, 15 bp, Homo sapiens
aaaccctcctaactg

SEQ ID NO: 246311 - DNA, 15 bp, Homo sapiens
gaaaccctcctaact

SEQ ID NO: 246312 - DNA, 15 bp, Homo sapiens
tgaaaccctcctaac

SEQ ID NO: 246313 - DNA, 15 bp, Homo sapiens
atgaaaccctcctaa

SEQ ID NO: 246314 - DNA, 15 bp, Homo sapiens
catgaaaccctccta

SEQ ID NO: 246315 - DNA, 15 bp, Homo sapiens
tcatgaaaccctcct

SEQ ID NO: 246316 - DNA, 15 bp, Homo sapiens
ctcatgaaaccctcc

SEQ ID NO: 246317 - DNA, 15 bp, Homo sapiens
tctcatgaaaccctc

SEQ ID NO: 246318 - DNA, 15 bp, Homo sapiens
atctcatgaaaccct

SEQ ID NO: 246319 - DNA, 15 bp, Homo sapiens
aatctcatgaaaccc

SEQ ID NO: 246320 - DNA, 15 bp, Homo sapiens
gaatctcatgaaacc

SEQ ID NO: 246321 - DNA, 15 bp, Homo sapiens
ggaatctcatgaaac

SEQ ID NO: 246322 - DNA, 15 bp, Homo sapiens
tggaatctcatgaaa

SEQ ID NO: 246323 - DNA, 15 bp, Homo sapiens
gtggaatctcatgaa

SEQ ID NO: 246324 - DNA, 15 bp, Homo sapiens
ggtggaatctcatga

SEQ ID NO: 246325 - DNA, 15 bp, Homo sapiens
aggtggaatctcatg

SEQ ID NO: 246326 - DNA, 15 bp, Homo sapiens
caggtggaatctcat

SEQ ID NO: 246327 - DNA, 15 bp, Homo sapiens
gcaggtggaatctca

SEQ ID NO: 246328 - DNA, 15 bp, Homo sapiens
tgcaggtggaatctc

SEQ ID NO: 246329 - DNA, 15 bp, Homo sapiens
atgcaggtggaatct

SEQ ID NO: 246330 - DNA, 15 bp, Homo sapiens
catgcaggtggaatc

SEQ ID NO: 246331 - DNA, 15 bp, Homo sapiens
ccatgcaggtggaat

SEQ ID NO: 246332 - DNA, 15 bp, Homo sapiens
tccatgcaggtggaa

SEQ ID NO: 246333 - DNA, 15 bp, Homo sapiens
ttccatgcaggtgga

SEQ ID NO: 246334 - DNA, 15 bp, Homo sapiens
tttccatgcaggtgg

SEQ ID NO: 246335 - DNA, 15 bp, Homo sapiens
ttttccatgcaggtg

SEQ ID NO: 246336 - DNA, 15 bp, Homo sapiens
gttttccatgcaggt

SEQ ID NO: 246337 - DNA, 15 bp, Homo sapiens
agttttccatgcagg

SEQ ID NO: 246338 - DNA, 15 bp, Homo sapiens
tagttttccatgcag

SEQ ID NO: 246339 - DNA, 15 bp, Homo sapiens
atagttttccatgca

SEQ ID NO: 246340 - DNA, 15 bp, Homo sapiens
gatagttttccatgc

SEQ ID NO: 246341 - DNA, 15 bp, Homo sapiens
tgatagttttccatg

SEQ ID NO: 246342 - DNA, 15 bp, Homo sapiens
atgatagttttccat

SEQ ID NO: 246343 - DNA, 15 bp, Homo sapiens
aatgatagttttcca

SEQ ID NO: 246344 - DNA, 15 bp, Homo sapiens
caatgatagttttcc

SEQ ID NO: 246345 - DNA, 15 bp, Homo sapiens
ccaatgatagttttc

SEQ ID NO: 246346 - DNA, 15 bp, Homo sapiens
gccaatgatagtttt

SEQ ID NO: 246347 - DNA, 15 bp, Homo sapiens
agccaatgatagttt

SEQ ID NO: 246348 - DNA, 15 bp, Homo sapiens
cagccaatgatagtt

SEQ ID NO: 246349 - DNA, 15 bp, Homo sapiens
ccagccaatgatagt

SEQ ID NO: 246350 - DNA, 15 bp, Homo sapiens
gccagccaatgatag

SEQ ID NO: 246351 - DNA, 15 bp, Homo sapiens
ggccagccaatgata

SEQ ID NO: 246352 - DNA, 15 bp, Homo sapiens
tggccagccaatgat

SEQ ID NO: 246353 - DNA, 15 bp, Homo sapiens
ctggccagccaatga

SEQ ID NO: 246354 - DNA, 15 bp, Homo sapiens
tctggccagccaatg

SEQ ID NO: 246355 - DNA, 15 bp, Homo sapiens
ctctggccagccaat

SEQ ID NO: 246356 - DNA, 15 bp, Homo sapiens
actctggccagccaa

SEQ ID NO: 246357 - DNA, 15 bp, Homo sapiens
aactctggccagcca

SEQ ID NO: 246358 - DNA, 15 bp, Homo sapiens
aaactctggccagcc

SEQ ID NO: 246359 - DNA, 15 bp, Homo sapiens
gaaactctggccagc

SEQ ID NO: 246360 - DNA, 15 bp, Homo sapiens
agaaactctggccag

SEQ ID NO: 246361 - DNA, 15 bp, Homo sapiens
aagaaactctggcca

SEQ ID NO: 246362 - DNA, 15 bp, Homo sapiens
caagaaactctggcc

SEQ ID NO: 246363 - DNA, 15 bp, Homo sapiens
gcaagaaactctggc

SEQ ID NO: 246364 - DNA, 15 bp, Homo sapiens
ggcaagaaactctgg

SEQ ID NO: 246365 - DNA, 15 bp, Homo sapiens
aggcaagaaactctg

SEQ ID NO: 246366 - DNA, 15 bp, Homo sapiens
gaggcaagaaactct

SEQ ID NO: 246367 - DNA, 15 bp, Homo sapiens
agaggcaagaaactc

SEQ ID NO: 246368 - DNA, 15 bp, Homo sapiens
cagaggcaagaaact

SEQ ID NO: 246369 - DNA, 15 bp, Homo sapiens
ccagaggcaagaaac

SEQ ID NO: 246370 - DNA, 15 bp, Homo sapiens
cccagaggcaagaaa

SEQ ID NO: 246371 - DNA, 15 bp, Homo sapiens
ccccagaggcaagaa

SEQ ID NO: 246372 - DNA, 15 bp, Homo sapiens
tccccagaggcaaga

SEQ ID NO: 246373 - DNA, 15 bp, Homo sapiens
atccccagaggcaag

SEQ ID NO: 246374 - DNA, 15 bp, Homo sapiens
aatccccagaggcaa

SEQ ID NO: 246375 - DNA, 15 bp, Homo sapiens
taatccccagaggca

SEQ ID NO: 246376 - DNA, 15 bp, Homo sapiens
ctaatccccagaggc

SEQ ID NO: 246377 - DNA, 15 bp, Homo sapiens
actaatccccagagg

SEQ ID NO: 246378 - DNA, 15 bp, Homo sapiens
tactaatccccagag

SEQ ID NO: 246379 - DNA, 15 bp, Homo sapiens
ttactaatccccaga

SEQ ID NO: 246380 - DNA, 15 bp, Homo sapiens
attactaatccccag

SEQ ID NO: 246381 - DNA, 15 bp, Homo sapiens
aattactaatcccca

SEQ ID NO: 246382 - DNA, 15 bp, Homo sapiens
taattactaatcccc

SEQ ID NO: 246383 - DNA, 15 bp, Homo sapiens
ttaattactaatccc

SEQ ID NO: 246384 - DNA, 15 bp, Homo sapiens
cttaattactaatcc

SEQ ID NO: 246385 - DNA, 15 bp, Homo sapiens
tcttaattactaatc

SEQ ID NO: 246386 - DNA, 15 bp, Homo sapiens
ttcttaattactaat

SEQ ID NO: 246387 - DNA, 15 bp, Homo sapiens
tttcttaattactaa

SEQ ID NO: 246388 - DNA, 15 bp, Homo sapiens
atttcttaattacta

SEQ ID NO: 246389 - DNA, 15 bp, Homo sapiens
aatttcttaattact

SEQ ID NO: 246390 - DNA, 15 bp, Homo sapiens
aaatttcttaattac

SEQ ID NO: 246391 - DNA, 15 bp, Homo sapiens
gaaatttcttaatta

SEQ ID NO: 246392 - DNA, 15 bp, Homo sapiens
tgaaatttcttaatt

SEQ ID NO: 246393 - DNA, 15 bp, Homo sapiens
ctgaaatttcttaat

SEQ ID NO: 246394 - DNA, 15 bp, Homo sapiens
cctgaaatttcttaa

SEQ ID NO: 246395 - DNA, 15 bp, Homo sapiens
gcctgaaatttctta

SEQ ID NO: 246396 - DNA, 15 bp, Homo sapiens
ggcctgaaatttctt

SEQ ID NO: 246397 - DNA, 15 bp, Homo sapiens
cggcctgaaatttct

SEQ ID NO: 246398 - DNA, 15 bp, Homo sapiens
ccggcctgaaatttc

SEQ ID NO: 246399 - DNA, 15 bp, Homo sapiens
cccggcctgaaattt

SEQ ID NO: 246400 - DNA, 15 bp, Homo sapiens
acccggcctgaaatt

SEQ ID NO: 246401 - DNA, 15 bp, Homo sapiens
cacccggcctgaaat

SEQ ID NO: 246402 - DNA, 15 bp, Homo sapiens
gcacccggcctgaaa

SEQ ID NO: 246403 - DNA, 15 bp, Homo sapiens
cgcacccggcctgaa

SEQ ID NO: 246404 - DNA, 15 bp, Homo sapiens
acgcacccggcctga

SEQ ID NO: 246405 - DNA, 15 bp, Homo sapiens
tacgcacccggcctg

SEQ ID NO: 246406 - DNA, 15 bp, Homo sapiens
ttacgcacccggcct

SEQ ID NO: 246407 - DNA, 15 bp, Homo sapiens
attacgcacccggcc

SEQ ID NO: 246408 - DNA, 15 bp, Homo sapiens
gattacgcacccggc

SEQ ID NO: 246409 - DNA, 15 bp, Homo sapiens
ggattacgcacccgg

SEQ ID NO: 246410 - DNA, 15 bp, Homo sapiens
gggattacgcacccg

SEQ ID NO: 246411 - DNA, 15 bp, Homo sapiens
agggattacgcaccc

SEQ ID NO: 246412 - DNA, 15 bp, Homo sapiens
cagggattacgcacc

SEQ ID NO: 246413 - DNA, 15 bp, Homo sapiens
acagggattacgcac

SEQ ID NO: 246414 - DNA, 15 bp, Homo sapiens
tacagggattacgca

SEQ ID NO: 246415 - DNA, 15 bp, Homo sapiens
ttacagggattacgc

SEQ ID NO: 246416 - DNA, 15 bp, Homo sapiens
attacagggattacg

SEQ ID NO: 246417 - DNA, 15 bp, Homo sapiens
gattacagggattac

SEQ ID NO: 246418 - DNA, 15 bp, Homo sapiens
ggattacagggatta

SEQ ID NO: 246419 - DNA, 15 bp, Homo sapiens
gggattacagggatt

SEQ ID NO: 246420 - DNA, 15 bp, Homo sapiens
tgggattacagggat

SEQ ID NO: 246421 - DNA, 15 bp, Homo sapiens
ttgggattacaggga

SEQ ID NO: 246422 - DNA, 15 bp, Homo sapiens
gttgggattacaggg

SEQ ID NO: 246423 - DNA, 15 bp, Homo sapiens
ggtgttgggattaca

SEQ ID NO: 246424 - DNA, 15 bp, Homo sapiens
aggtgttgggattac

SEQ ID NO: 246425 - DNA, 15 bp, Homo sapiens
aaggtgttgggatta

SEQ ID NO: 246426 - DNA, 15 bp, Homo sapiens
caaggtgttgggatt

SEQ ID NO: 246427 - DNA, 15 bp, Homo sapiens
ccaaggtgttgggat

SEQ ID NO: 246428 - DNA, 15 bp, Homo sapiens
cccaaggtgttggga

SEQ ID NO: 246429 - DNA, 15 bp, Homo sapiens
tcccaaggtgttggg

SEQ ID NO: 246430 - DNA, 15 bp, Homo sapiens
gtcccaaggtgttgg

SEQ ID NO: 246431 - DNA, 15 bp, Homo sapiens
cgtcccaaggtgttg

SEQ ID NO: 246432 - DNA, 15 bp, Homo sapiens
gcgtcccaaggtgtt

SEQ ID NO: 246433 - DNA, 15 bp, Homo sapiens
ggcgtcccaaggtgt

SEQ ID NO: 246434 - DNA, 15 bp, Homo sapiens
cggcgtcccaaggtg

SEQ ID NO: 246435 - DNA, 15 bp, Homo sapiens
tcggcgtcccaaggt

SEQ ID NO: 246436 - DNA, 15 bp, Homo sapiens
ctcggcgtcccaagg

SEQ ID NO: 246437 - DNA, 15 bp, Homo sapiens
cctcggcgtcccaag

SEQ ID NO: 246438 - DNA, 15 bp, Homo sapiens
gcctcggcgtcccaa

SEQ ID NO: 246439 - DNA, 15 bp, Homo sapiens
cgcctcggcgtccca

SEQ ID NO: 246440 - DNA, 15 bp, Homo sapiens
ccgcctcggcgtccc

SEQ ID NO: 246441 - DNA, 15 bp, Homo sapiens
cccgcctcggcgtcc

SEQ ID NO: 246442 - DNA, 15 bp, Homo sapiens
gcccgcctcggcgtc

SEQ ID NO: 246443 - DNA, 15 bp, Homo sapiens
tgcccgcctcggcgt

SEQ ID NO: 246444 - DNA, 15 bp, Homo sapiens
ctgcccgcctcggcg

SEQ ID NO: 246445 - DNA, 15 bp, Homo sapiens
tctgcccgcctcggc

SEQ ID NO: 246446 - DNA, 15 bp, Homo sapiens
atctgcccgcctcgg

SEQ ID NO: 246447 - DNA, 15 bp, Homo sapiens
gatctgcccgcctcg

SEQ ID NO: 246448 - DNA, 15 bp, Homo sapiens
ggtgatctgcccgcc

SEQ ID NO: 246449 - DNA, 15 bp, Homo sapiens
aggtgatctgcccgc

SEQ ID NO: 246450 - DNA, 15 bp, Homo sapiens
caggtgatctgcccg

SEQ ID NO: 246451 - DNA, 15 bp, Homo sapiens
tcaggtgatctgccc

SEQ ID NO: 246452 - DNA, 15 bp, Homo sapiens
ctcaggtgatctgcc

SEQ ID NO: 246453 - DNA, 15 bp, Homo sapiens
cctcaggtgatctgc

SEQ ID NO: 246454 - DNA, 15 bp, Homo sapiens
acctcaggtgatctg

SEQ ID NO: 246455 - DNA, 15 bp, Homo sapiens
gacctcaggtgatct

SEQ ID NO: 246456 - DNA, 15 bp, Homo sapiens
cgacctcaggtgatc

SEQ ID NO: 246457 - DNA, 15 bp, Homo sapiens
ccgacctcaggtgat

SEQ ID NO: 246458 - DNA, 15 bp, Homo sapiens
cccgacctcaggtga

SEQ ID NO: 246459 - DNA, 15 bp, Homo sapiens
tcccgacctcaggtg

SEQ ID NO: 246460 - DNA, 15 bp, Homo sapiens
ctcccgacctcaggt

SEQ ID NO: 246461 - DNA, 15 bp, Homo sapiens
actcccgacctcagg

SEQ ID NO: 246462 - DNA, 15 bp, Homo sapiens
aactcccgacctcag

SEQ ID NO: 246463 - DNA, 15 bp, Homo sapiens
gaactcccgacctca

SEQ ID NO: 246464 - DNA, 15 bp, Homo sapiens
ggaactcccgacctc

SEQ ID NO: 246465 - DNA, 15 bp, Homo sapiens
tggaactcccgacct

SEQ ID NO: 246466 - DNA, 15 bp, Homo sapiens
ctggaactcccgacc

SEQ ID NO: 246467 - DNA, 15 bp, Homo sapiens
tctggaactcccgac

SEQ ID NO: 246468 - DNA, 15 bp, Homo sapiens
gtctggaactcccga

SEQ ID NO: 246469 - DNA, 15 bp, Homo sapiens
ggtctggaactcccg

SEQ ID NO: 246470 - DNA, 15 bp, Homo sapiens
tggtctggaactccc

SEQ ID NO: 246471 - DNA, 15 bp, Homo sapiens
ctggtctggaactcc

SEQ ID NO: 246472 - DNA, 15 bp, Homo sapiens
gctggtctggaactc

SEQ ID NO: 246473 - DNA, 15 bp, Homo sapiens
ggctggtctggaact

SEQ ID NO: 246474 - DNA, 15 bp, Homo sapiens
aggctggtctggaac

SEQ ID NO: 246475 - DNA, 15 bp, Homo sapiens
caggctggtctggaa

SEQ ID NO: 246476 - DNA, 15 bp, Homo sapiens
tcaggctggtctgga

SEQ ID NO: 246477 - DNA, 15 bp, Homo sapiens
gtcaggctggtctgg

SEQ ID NO: 246478 - DNA, 15 bp, Homo sapiens
ggtcaggctggtctg

SEQ ID NO: 246479 - DNA, 15 bp, Homo sapiens
gttggtcaggctggt

SEQ ID NO: 246480 - DNA, 15 bp, Homo sapiens
tgttggtcaggctgg

SEQ ID NO: 246481 - DNA, 15 bp, Homo sapiens
atgttggtcaggctg

SEQ ID NO: 246482 - DNA, 15 bp, Homo sapiens
catgttggtcaggct

SEQ ID NO: 246483 - DNA, 15 bp, Homo sapiens
ccatgttggtcaggc

SEQ ID NO: 246484 - DNA, 15 bp, Homo sapiens
tccatgttggtcagg

SEQ ID NO: 246485 - DNA, 15 bp, Homo sapiens
ctccatgttggtcag

SEQ ID NO: 246486 - DNA, 15 bp, Homo sapiens
tctccatgttggtca

SEQ ID NO: 246487 - DNA, 15 bp, Homo sapiens
ttctccatgttggtc

SEQ ID NO: 246488 - DNA, 15 bp, Homo sapiens
tttctccatgttggt

SEQ ID NO: 246489 - DNA, 15 bp, Homo sapiens
gtttctccatgttgg

SEQ ID NO: 246490 - DNA, 15 bp, Homo sapiens
ggtttctccatgttg

SEQ ID NO: 246491 - DNA, 15 bp, Homo sapiens
gggtttctccatgtt

SEQ ID NO: 246492 - DNA, 15 bp, Homo sapiens
ggggtttctccatgt

SEQ ID NO: 246493 - DNA, 15 bp, Homo sapiens
cggggtttctccatg

SEQ ID NO: 246494 - DNA, 15 bp, Homo sapiens
acggggtttctccat

SEQ ID NO: 246495 - DNA, 15 bp, Homo sapiens
gacggggtttctcca

SEQ ID NO: 246496 - DNA, 15 bp, Homo sapiens
agacggggtttctcc

SEQ ID NO: 246497 - DNA, 15 bp, Homo sapiens
gagacggggtttctc

SEQ ID NO: 246498 - DNA, 15 bp, Homo sapiens
agagacggggtttct

SEQ ID NO: 246499 - DNA, 15 bp, Homo sapiens
attttgtatttttag

SEQ ID NO: 246500 - DNA, 15 bp, Homo sapiens
aattttgtattttta

SEQ ID NO: 246501 - DNA, 15 bp, Homo sapiens
taattttgtattttt

SEQ ID NO: 246502 - DNA, 15 bp, Homo sapiens
ctaattttgtatttt

SEQ ID NO: 246503 - DNA, 15 bp, Homo sapiens
gctaattttgtattt

SEQ ID NO: 246504 - DNA, 15 bp, Homo sapiens
ggctaattttgtatt

SEQ ID NO: 246505 - DNA, 15 bp, Homo sapiens
cggctaattttgtat

SEQ ID NO: 246506 - DNA, 15 bp, Homo sapiens
ccggctaattttgta

SEQ ID NO: 246507 - DNA, 15 bp, Homo sapiens
cccggctaattttgt

SEQ ID NO: 246508 - DNA, 15 bp, Homo sapiens
gcccggctaattttg

SEQ ID NO: 246509 - DNA, 15 bp, Homo sapiens
agcccggctaatttt

SEQ ID NO: 246510 - DNA, 15 bp, Homo sapiens
aagcccggctaattt

SEQ ID NO: 246511 - DNA, 15 bp, Homo sapiens
caagcccggctaatt

SEQ ID NO: 246512 - DNA, 15 bp, Homo sapiens
ccaagcccggctaat

SEQ ID NO: 246513 - DNA, 15 bp, Homo sapiens
accaagcccggctaa

SEQ ID NO: 246514 - DNA, 15 bp, Homo sapiens
caccaagcccggcta

SEQ ID NO: 246515 - DNA, 15 bp, Homo sapiens
ccaccaagcccggct

SEQ ID NO: 246516 - DNA, 15 bp, Homo sapiens
accaccaagcccggc

SEQ ID NO: 246517 - DNA, 15 bp, Homo sapiens
caccaccaagcccgg

SEQ ID NO: 246518 - DNA, 15 bp, Homo sapiens
gcaccaccaagcccg

SEQ ID NO: 246519 - DNA, 15 bp, Homo sapiens
tgcaccaccaagccc

SEQ ID NO: 246520 - DNA, 15 bp, Homo sapiens
atgcaccaccaagcc

SEQ ID NO: 246521 - DNA, 15 bp, Homo sapiens
catgcaccaccaagc

SEQ ID NO: 246522 - DNA, 15 bp, Homo sapiens
gcatgcaccaccaag

SEQ ID NO: 246523 - DNA, 15 bp, Homo sapiens
ggcatgcaccaccaa

SEQ ID NO: 246524 - DNA, 15 bp, Homo sapiens
aggcatgcaccacca

SEQ ID NO: 246525 - DNA, 15 bp, Homo sapiens
taggcatgcaccacc

SEQ ID NO: 246526 - DNA, 15 bp, Homo sapiens
ataggcatgcaccac

SEQ ID NO: 246527 - DNA, 15 bp, Homo sapiens
tataggcatgcacca

SEQ ID NO: 246528 - DNA, 15 bp, Homo sapiens
ttataggcatgcacc

SEQ ID NO: 246529 - DNA, 15 bp, Homo sapiens
attataggcatgcac

SEQ ID NO: 246530 - DNA, 15 bp, Homo sapiens
gattataggcatgca

SEQ ID NO: 246531 - DNA, 15 bp, Homo sapiens
ggattataggcatgc

SEQ ID NO: 246532 - DNA, 15 bp, Homo sapiens
gggattataggcatg

SEQ ID NO: 246533 - DNA, 15 bp, Homo sapiens
tgggattataggcat

SEQ ID NO: 246534 - DNA, 15 bp, Homo sapiens
ctgggattataggca

SEQ ID NO: 246535 - DNA, 15 bp, Homo sapiens
agctgggattatagg

SEQ ID NO: 246536 - DNA, 15 bp, Homo sapiens
tagctgggattatag

SEQ ID NO: 246537 - DNA, 15 bp, Homo sapiens
gtagctgggattata

SEQ ID NO: 246538 - DNA, 15 bp, Homo sapiens
agtagctgggattat

SEQ ID NO: 246539 - DNA, 15 bp, Homo sapiens
tgagtagctgggatt

SEQ ID NO: 246540 - DNA, 15 bp, Homo sapiens
acctcccaggttcaa

SEQ ID NO: 246541 - DNA, 15 bp, Homo sapiens
acctccacctcccag

SEQ ID NO: 246542 - DNA, 15 bp, Homo sapiens
aacctccacctccca

SEQ ID NO: 246543 - DNA, 15 bp, Homo sapiens
cacaacctccacctc

SEQ ID NO: 246544 - DNA, 15 bp, Homo sapiens
ccacaacctccacct

SEQ ID NO: 246545 - DNA, 15 bp, Homo sapiens
accacaacctccacc

SEQ ID NO: 246546 - DNA, 15 bp, Homo sapiens
caccacaacctccac

SEQ ID NO: 246547 - DNA, 15 bp, Homo sapiens
tcaccacaacctcca

SEQ ID NO: 246548 - DNA, 15 bp, Homo sapiens
ctcaccacaacctcc

SEQ ID NO: 246549 - DNA, 15 bp, Homo sapiens
gctcaccacaacctc

SEQ ID NO: 246550 - DNA, 15 bp, Homo sapiens
ggctcaccacaacct

SEQ ID NO: 246551 - DNA, 15 bp, Homo sapiens
tggctcaccacaacc

SEQ ID NO: 246552 - DNA, 15 bp, Homo sapiens
ttggctcaccacaac

SEQ ID NO: 246553 - DNA, 15 bp, Homo sapiens
cttggctcaccacaa

SEQ ID NO: 246554 - DNA, 15 bp, Homo sapiens
tcttggctcaccaca

SEQ ID NO: 246555 - DNA, 15 bp, Homo sapiens
atcttggctcaccac

SEQ ID NO: 246556 - DNA, 15 bp, Homo sapiens
gatcttggctcacca

SEQ ID NO: 246557 - DNA, 15 bp, Homo sapiens
cgatcttggctcacc

SEQ ID NO: 246558 - DNA, 15 bp, Homo sapiens
atggcacgatcttgg

SEQ ID NO: 246559 - DNA, 15 bp, Homo sapiens
aatggcacgatcttg

SEQ ID NO: 246560 - DNA, 15 bp, Homo sapiens
caatggcacgatctt

SEQ ID NO: 246561 - DNA, 15 bp, Homo sapiens
gcaatggcacgatct

SEQ ID NO: 246562 - DNA, 15 bp, Homo sapiens
tgcaatggcacgatc

SEQ ID NO: 246563 - DNA, 15 bp, Homo sapiens
gtgcaatggcacgat

SEQ ID NO: 246564 - DNA, 15 bp, Homo sapiens
agtgcaatggcacga

SEQ ID NO: 246565 - DNA, 15 bp, Homo sapiens
gagtgcaatggcacg

SEQ ID NO: 246566 - DNA, 15 bp, Homo sapiens
tggagtttcactctt

SEQ ID NO: 246567 - DNA, 15 bp, Homo sapiens
atggagtttcactct

SEQ ID NO: 246568 - DNA, 15 bp, Homo sapiens
gatggagtttcactc

SEQ ID NO: 246569 - DNA, 15 bp, Homo sapiens
ggatggagtttcact

SEQ ID NO: 246570 - DNA, 15 bp, Homo sapiens
tggatggagtttcac

SEQ ID NO: 246571 - DNA, 15 bp, Homo sapiens
ttggatggagtttca

SEQ ID NO: 246572 - DNA, 15 bp, Homo sapiens
tttggatggagtttc

SEQ ID NO: 246573 - DNA, 15 bp, Homo sapiens
ttttggatggagttt

SEQ ID NO: 246574 - DNA, 15 bp, Homo sapiens
tttttggatggagtt

SEQ ID NO: 246575 - DNA, 15 bp, Homo sapiens
ttttttggatggagt

SEQ ID NO: 246576 - DNA, 15 bp, Homo sapiens
tttttttggatggag

SEQ ID NO: 246577 - DNA, 15 bp, Homo sapiens
ttttttttggatgga

SEQ ID NO: 246578 - DNA, 15 bp, Homo sapiens
tttttttttggatgg

SEQ ID NO: 246579 - DNA, 15 bp, Homo sapiens
ttttttttttggatg

SEQ ID NO: 246580 - DNA, 15 bp, Homo sapiens
cttttttttttggat

SEQ ID NO: 246581 - DNA, 15 bp, Homo sapiens
tcttttttttttgga

SEQ ID NO: 246582 - DNA, 15 bp, Homo sapiens
ttcttttttttttgg

SEQ ID NO: 246583 - DNA, 15 bp, Homo sapiens
tttcttttttttttg

SEQ ID NO: 246584 - DNA, 15 bp, Homo sapiens
cttttcttttttttt

SEQ ID NO: 246585 - DNA, 15 bp, Homo sapiens
tcttttctttttttt

SEQ ID NO: 246586 - DNA, 15 bp, Homo sapiens
ttcttttcttttttt

SEQ ID NO: 246587 - DNA, 15 bp, Homo sapiens
tttcttttctttttt

SEQ ID NO: 246588 - DNA, 15 bp, Homo sapiens
ttttcttttcttttt

SEQ ID NO: 246589 - DNA, 15 bp, Homo sapiens
cttttcttttctttt

SEQ ID NO: 246590 - DNA, 15 bp, Homo sapiens
tcttttcttttcttt

SEQ ID NO: 246591 - DNA, 15 bp, Homo sapiens
ttcttttcttttctt

SEQ ID NO: 246592 - DNA, 15 bp, Homo sapiens
tttcttttcttttct

SEQ ID NO: 246593 - DNA, 15 bp, Homo sapiens
ttttcttttcttttc

SEQ ID NO: 246594 - DNA, 15 bp, Homo sapiens
tttttcttttctttt

SEQ ID NO: 246595 - DNA, 15 bp, Homo sapiens
ttttttcttttcttt

SEQ ID NO: 246596 - DNA, 15 bp, Homo sapiens
tttttttcttttctt

SEQ ID NO: 246597 - DNA, 15 bp, Homo sapiens
ttttttttcttttct

SEQ ID NO: 246598 - DNA, 15 bp, Homo sapiens
cttttttttcttttc

SEQ ID NO: 246599 - DNA, 15 bp, Homo sapiens
tcttttttttctttt

SEQ ID NO: 246600 - DNA, 15 bp, Homo sapiens
ttcttttttttcttt

SEQ ID NO: 246601 - DNA, 15 bp, Homo sapiens
tttcttttttttctt

SEQ ID NO: 246602 - DNA, 15 bp, Homo sapiens
ttttcttttttttct

SEQ ID NO: 246603 - DNA, 15 bp, Homo sapiens
cttttcttttttttc

SEQ ID NO: 246604 - DNA, 15 bp, Homo sapiens
atttcttttcttttt

SEQ ID NO: 246605 - DNA, 15 bp, Homo sapiens
aatttcttttctttt

SEQ ID NO: 246606 - DNA, 15 bp, Homo sapiens
aaatttcttttcttt

SEQ ID NO: 246607 - DNA, 15 bp, Homo sapiens
gaaatttcttttctt

SEQ ID NO: 246608 - DNA, 15 bp, Homo sapiens
tgaaatttcttttct

SEQ ID NO: 246609 - DNA, 15 bp, Homo sapiens
ctgaaatttcttttc

SEQ ID NO: 246610 - DNA, 15 bp, Homo sapiens
gctgaaatttctttt

SEQ ID NO: 246611 - DNA, 15 bp, Homo sapiens
agctgaaatttcttt

SEQ ID NO: 246612 - DNA, 15 bp, Homo sapiens
cagctgaaatttctt

SEQ ID NO: 246613 - DNA, 15 bp, Homo sapiens
tcagctgaaatttct

SEQ ID NO: 246614 - DNA, 15 bp, Homo sapiens
gtcagctgaaatttc

SEQ ID NO: 246615 - DNA, 15 bp, Homo sapiens
tgtcagctgaaattt

SEQ ID NO: 246616 - DNA, 15 bp, Homo sapiens
gtgtcagctgaaatt

SEQ ID NO: 246617 - DNA, 15 bp, Homo sapiens
tgtgtcagctgaaat

SEQ ID NO: 246618 - DNA, 15 bp, Homo sapiens
ctgtgtcagctgaaa

SEQ ID NO: 246619 - DNA, 15 bp, Homo sapiens
gctgtgtcagctgaa

SEQ ID NO: 246620 - DNA, 15 bp, Homo sapiens
agctgtgtcagctga

SEQ ID NO: 246621 - DNA, 15 bp, Homo sapiens
aagctgtgtcagctg

SEQ ID NO: 246622 - DNA, 15 bp, Homo sapiens
gaagctgtgtcagct

SEQ ID NO: 246623 - DNA, 15 bp, Homo sapiens
tgaagctgtgtcagc

SEQ ID NO: 246624 - DNA, 15 bp, Homo sapiens
gtgaagctgtgtcag

SEQ ID NO: 246625 - DNA, 15 bp, Homo sapiens
tgtgaagctgtgtca

SEQ ID NO: 246626 - DNA, 15 bp, Homo sapiens
gtgtgaagctgtgtc

SEQ ID NO: 246627 - DNA, 15 bp, Homo sapiens
agtgtgaagctgtgt

SEQ ID NO: 246628 - DNA, 15 bp, Homo sapiens
gagtgtgaagctgtg

SEQ ID NO: 246629 - DNA, 15 bp, Homo sapiens
agagtgtgaagctgt

SEQ ID NO: 246630 - DNA, 15 bp, Homo sapiens
aagagtgtgaagctg

SEQ ID NO: 246631 - DNA, 15 bp, Homo sapiens
caagagtgtgaagct

SEQ ID NO: 246632 - DNA, 15 bp, Homo sapiens
ccaagagtgtgaagc

SEQ ID NO: 246633 - DNA, 15 bp, Homo sapiens
accaagagtgtgaag

SEQ ID NO: 246634 - DNA, 15 bp, Homo sapiens
aaccaagagtgtgaa

SEQ ID NO: 246635 - DNA, 15 bp, Homo sapiens
caaccaagagtgtga

SEQ ID NO: 246636 - DNA, 15 bp, Homo sapiens
ccaaccaagagtgtg

SEQ ID NO: 246637 - DNA, 15 bp, Homo sapiens
cccaaccaagagtgt

SEQ ID NO: 246638 - DNA, 15 bp, Homo sapiens
acccaaccaagagtg

SEQ ID NO: 246639 - DNA, 15 bp, Homo sapiens
aacccaaccaagagt

SEQ ID NO: 246640 - DNA, 15 bp, Homo sapiens
gaacccaaccaagag

SEQ ID NO: 246641 - DNA, 15 bp, Homo sapiens
ggaacccaaccaaga

SEQ ID NO: 246642 - DNA, 15 bp, Homo sapiens
gggaacccaaccaag

SEQ ID NO: 246643 - DNA, 15 bp, Homo sapiens
cgggaacccaaccaa

SEQ ID NO: 246644 - DNA, 15 bp, Homo sapiens
acgggaacccaacca

SEQ ID NO: 246645 - DNA, 15 bp, Homo sapiens
cacgggaacccaacc

SEQ ID NO: 246646 - DNA, 15 bp, Homo sapiens
ccacgggaacccaac

SEQ ID NO: 246647 - DNA, 15 bp, Homo sapiens
accacgggaacccaa

SEQ ID NO: 246648 - DNA, 15 bp, Homo sapiens
caccacgggaaccca

SEQ ID NO: 246649 - DNA, 15 bp, Homo sapiens
tcaccacgggaaccc

SEQ ID NO: 246650 - DNA, 15 bp, Homo sapiens
ttcaccacgggaacc

SEQ ID NO: 246651 - DNA, 15 bp, Homo sapiens
attcaccacgggaac

SEQ ID NO: 246652 - DNA, 15 bp, Homo sapiens
cattcaccacgggaa

SEQ ID NO: 246653 - DNA, 15 bp, Homo sapiens
tcattcaccacggga

SEQ ID NO: 246654 - DNA, 15 bp, Homo sapiens
atcattcaccacggg

SEQ ID NO: 246655 - DNA, 15 bp, Homo sapiens
catcattcaccacgg

SEQ ID NO: 246656 - DNA, 15 bp, Homo sapiens
tcatcattcaccacg

SEQ ID NO: 246657 - DNA, 15 bp, Homo sapiens
ctcatcattcaccac

SEQ ID NO: 246658 - DNA, 15 bp, Homo sapiens
cctcatcattcacca

SEQ ID NO: 246659 - DNA, 15 bp, Homo sapiens
acctcatcattcacc

SEQ ID NO: 246660 - DNA, 15 bp, Homo sapiens
gacctcatcattcac

SEQ ID NO: 246661 - DNA, 15 bp, Homo sapiens
tgacctcatcattca

SEQ ID NO: 246662 - DNA, 15 bp, Homo sapiens
ctgacctcatcattc

SEQ ID NO: 246663 - DNA, 15 bp, Homo sapiens
cctgacctcatcatt

SEQ ID NO: 246664 - DNA, 15 bp, Homo sapiens
acctgacctcatcat

SEQ ID NO: 246665 - DNA, 15 bp, Homo sapiens
cacctgacctcatca

SEQ ID NO: 246666 - DNA, 15 bp, Homo sapiens
tcacctgacctcatc

SEQ ID NO: 246667 - DNA, 15 bp, Homo sapiens
atcacctgacctcat

SEQ ID NO: 246668 - DNA, 15 bp, Homo sapiens
catcacctgacctca

SEQ ID NO: 246669 - DNA, 15 bp, Homo sapiens
tcatcacctgacctc

SEQ ID NO: 246670 - DNA, 15 bp, Homo sapiens
gtcatcacctgacct

SEQ ID NO: 246671 - DNA, 15 bp, Homo sapiens
agtcatcacctgacc

SEQ ID NO: 246672 - DNA, 15 bp, Homo sapiens
cagtcatcacctgac

SEQ ID NO: 246673 - DNA, 15 bp, Homo sapiens
ccagtcatcacctga

SEQ ID NO: 246674 - DNA, 15 bp, Homo sapiens
cccagtcatcacctg

SEQ ID NO: 246675 - DNA, 15 bp, Homo sapiens
ccccagtcatcacct

SEQ ID NO: 246676 - DNA, 15 bp, Homo sapiens
tccccagtcatcacc

SEQ ID NO: 246677 - DNA, 15 bp, Homo sapiens
atccccagtcatcac

SEQ ID NO: 246678 - DNA, 15 bp, Homo sapiens
catccccagtcatca

SEQ ID NO: 246679 - DNA, 15 bp, Homo sapiens
tcatccccagtcatc

SEQ ID NO: 246680 - DNA, 15 bp, Homo sapiens
gtcatccccagtcat

SEQ ID NO: 246681 - DNA, 15 bp, Homo sapiens
tgtcatccccagtca

SEQ ID NO: 246682 - DNA, 15 bp, Homo sapiens
gtgtcatccccagtc

SEQ ID NO: 246683 - DNA, 15 bp, Homo sapiens
ggtgtcatccccagt

SEQ ID NO: 246684 - DNA, 15 bp, Homo sapiens
aggtgtcatccccag

SEQ ID NO: 246685 - DNA, 15 bp, Homo sapiens
caggtgtcatcccca

SEQ ID NO: 246686 - DNA, 15 bp, Homo sapiens
ccaggtgtcatcccc

SEQ ID NO: 246687 - DNA, 15 bp, Homo sapiens
gccaggtgtcatccc

SEQ ID NO: 246688 - DNA, 15 bp, Homo sapiens
agccaggtgtcatcc

SEQ ID NO: 246689 - DNA, 15 bp, Homo sapiens
cagccaggtgtcatc

SEQ ID NO: 246690 - DNA, 15 bp, Homo sapiens
acagccaggtgtcat

SEQ ID NO: 246691 - DNA, 15 bp, Homo sapiens
aacagccaggtgtca

SEQ ID NO: 246692 - DNA, 15 bp, Homo sapiens
aaacagccaggtgtc

SEQ ID NO: 246693 - DNA, 15 bp, Homo sapiens
gaaacagccaggtgt

SEQ ID NO: 246694 - DNA, 15 bp, Homo sapiens
ggaaacagccaggtg

SEQ ID NO: 246695 - DNA, 15 bp, Homo sapiens
aggaaacagccaggt

SEQ ID NO: 246696 - DNA, 15 bp, Homo sapiens
aaggaaacagccagg

SEQ ID NO: 246697 - DNA, 15 bp, Homo sapiens
caaggaaacagccag

SEQ ID NO: 246698 - DNA, 15 bp, Homo sapiens
tcaaggaaacagcca

SEQ ID NO: 246699 - DNA, 15 bp, Homo sapiens
atcaaggaaacagcc

SEQ ID NO: 246700 - DNA, 15 bp, Homo sapiens
aatcaaggaaacagc

SEQ ID NO: 246701 - DNA, 15 bp, Homo sapiens
taatcaaggaaacag

SEQ ID NO: 246702 - DNA, 15 bp, Homo sapiens
gtaatcaaggaaaca

SEQ ID NO: 246703 - DNA, 15 bp, Homo sapiens
tgtaatcaaggaaac

SEQ ID NO: 246704 - DNA, 15 bp, Homo sapiens
atgtaatcaaggaaa

SEQ ID NO: 246705 - DNA, 15 bp, Homo sapiens
gatgtaatcaaggaa

SEQ ID NO: 246706 - DNA, 15 bp, Homo sapiens
agatgtaatcaagga

SEQ ID NO: 246707 - DNA, 15 bp, Homo sapiens
gagatgtaatcaagg

SEQ ID NO: 246708 - DNA, 15 bp, Homo sapiens
ggagatgtaatcaag

SEQ ID NO: 246709 - DNA, 15 bp, Homo sapiens
gggagatgtaatcaa

SEQ ID NO: 246710 - DNA, 15 bp, Homo sapiens
cgggagatgtaatca

SEQ ID NO: 246711 - DNA, 15 bp, Homo sapiens
tcgggagatgtaatc

SEQ ID NO: 246712 - DNA, 15 bp, Homo sapiens
ctcgggagatgtaat

SEQ ID NO: 246713 - DNA, 15 bp, Homo sapiens
tctcgggagatgtaa

SEQ ID NO: 246714 - DNA, 15 bp, Homo sapiens
ctctcgggagatgta

SEQ ID NO: 246715 - DNA, 15 bp, Homo sapiens
cctctcgggagatgt

SEQ ID NO: 246716 - DNA, 15 bp, Homo sapiens
gcctctcgggagatg

SEQ ID NO: 246717 - DNA, 15 bp, Homo sapiens
agcctctcgggagat

SEQ ID NO: 246718 - DNA, 15 bp, Homo sapiens
cagcctctcgggaga

SEQ ID NO: 246719 - DNA, 15 bp, Homo sapiens
ccagcctctcgggag

SEQ ID NO: 246720 - DNA, 15 bp, Homo sapiens
cccagcctctcggga

SEQ ID NO: 246721 - DNA, 15 bp, Homo sapiens
gcccagcctctcggg

SEQ ID NO: 246722 - DNA, 15 bp, Homo sapiens
agcccagcctctcgg

SEQ ID NO: 246723 - DNA, 15 bp, Homo sapiens
cagcccagcctctcg

SEQ ID NO: 246724 - DNA, 15 bp, Homo sapiens
acagcccagcctctc

SEQ ID NO: 246725 - DNA, 15 bp, Homo sapiens
gacagcccagcctct

SEQ ID NO: 246726 - DNA, 15 bp, Homo sapiens
agacagcccagcctc

SEQ ID NO: 246727 - DNA, 15 bp, Homo sapiens
gagacagcccagcct

SEQ ID NO: 246728 - DNA, 15 bp, Homo sapiens
ggagacagcccagcc

SEQ ID NO: 246729 - DNA, 15 bp, Homo sapiens
aggagacagcccagc

SEQ ID NO: 246730 - DNA, 15 bp, Homo sapiens
caggagacagcccag

SEQ ID NO: 246731 - DNA, 15 bp, Homo sapiens
ccaggagacagccca

SEQ ID NO: 246732 - DNA, 15 bp, Homo sapiens
gccaggagacagccc

SEQ ID NO: 246733 - DNA, 15 bp, Homo sapiens
agccaggagacagcc

SEQ ID NO: 246734 - DNA, 15 bp, Homo sapiens
cagccaggagacagc

SEQ ID NO: 246735 - DNA, 15 bp, Homo sapiens
gcagccaggagacag

SEQ ID NO: 246736 - DNA, 15 bp, Homo sapiens
ggcagccaggagaca

SEQ ID NO: 246737 - DNA, 15 bp, Homo sapiens
aggcagccaggagac

SEQ ID NO: 246738 - DNA, 15 bp, Homo sapiens
aaggcagccaggaga

SEQ ID NO: 246739 - DNA, 15 bp, Homo sapiens
gaaggcagccaggag

SEQ ID NO: 246740 - DNA, 15 bp, Homo sapiens
cgaaggcagccagga

SEQ ID NO: 246741 - DNA, 15 bp, Homo sapiens
tcgaaggcagccagg

SEQ ID NO: 246742 - DNA, 15 bp, Homo sapiens
ttcgaaggcagccag

SEQ ID NO: 246743 - DNA, 15 bp, Homo sapiens
cttcgaaggcagcca

SEQ ID NO: 246744 - DNA, 15 bp, Homo sapiens
ccttcgaaggcagcc

SEQ ID NO: 246745 - DNA, 15 bp, Homo sapiens
accttcgaaggcagc

SEQ ID NO: 246746 - DNA, 15 bp, Homo sapiens
caccttcgaaggcag

SEQ ID NO: 246747 - DNA, 15 bp, Homo sapiens
acaccttcgaaggca

SEQ ID NO: 246748 - DNA, 15 bp, Homo sapiens
cacaccttcgaaggc

SEQ ID NO: 246749 - DNA, 15 bp, Homo sapiens
ccacaccttcgaagg

SEQ ID NO: 246750 - DNA, 15 bp, Homo sapiens
cccacaccttcgaag

SEQ ID NO: 246751 - DNA, 15 bp, Homo sapiens
acccacaccttcgaa

SEQ ID NO: 246752 - DNA, 15 bp, Homo sapiens
aacccacaccttcga

SEQ ID NO: 246753 - DNA, 15 bp, Homo sapiens
aaacccacaccttcg

SEQ ID NO: 246754 - DNA, 15 bp, Homo sapiens
aaaacccacaccttc

SEQ ID NO: 246755 - DNA, 15 bp, Homo sapiens
caaaacccacacctt

SEQ ID NO: 246756 - DNA, 15 bp, Homo sapiens
ccaaaacccacacct

SEQ ID NO: 246757 - DNA, 15 bp, Homo sapiens
gccaaaacccacacc

SEQ ID NO: 246758 - DNA, 15 bp, Homo sapiens
ggccaaaacccacac

SEQ ID NO: 246759 - DNA, 15 bp, Homo sapiens
aggccaaaacccaca

SEQ ID NO: 246760 - DNA, 15 bp, Homo sapiens
caggccaaaacccac

SEQ ID NO: 246761 - DNA, 15 bp, Homo sapiens
ccaggccaaaaccca

SEQ ID NO: 246762 - DNA, 15 bp, Homo sapiens
cccaggccaaaaccc

SEQ ID NO: 246763 - DNA, 15 bp, Homo sapiens
gcccaggccaaaacc

SEQ ID NO: 246764 - DNA, 15 bp, Homo sapiens
ggcccaggccaaaac

SEQ ID NO: 246765 - DNA, 15 bp, Homo sapiens
gggcccaggccaaaa

SEQ ID NO: 246766 - DNA, 15 bp, Homo sapiens
ggggcccaggccaaa

SEQ ID NO: 246767 - DNA, 15 bp, Homo sapiens
tggggcccaggccaa

SEQ ID NO: 246768 - DNA, 15 bp, Homo sapiens
atggggcccaggcca

SEQ ID NO: 246769 - DNA, 15 bp, Homo sapiens
gatggggcccaggcc

SEQ ID NO: 246770 - DNA, 15 bp, Homo sapiens
cgatggggcccaggc

SEQ ID NO: 246771 - DNA, 15 bp, Homo sapiens
gcgatggggcccagg

SEQ ID NO: 246772 - DNA, 15 bp, Homo sapiens
agcgatggggcccag

SEQ ID NO: 246773 - DNA, 15 bp, Homo sapiens
gagcgatggggccca

SEQ ID NO: 246774 - DNA, 15 bp, Homo sapiens
ggagcgatggggccc

SEQ ID NO: 246775 - DNA, 15 bp, Homo sapiens
cggagcgatggggcc

SEQ ID NO: 246776 - DNA, 15 bp, Homo sapiens
acggagcgatggggc

SEQ ID NO: 246777 - DNA, 15 bp, Homo sapiens
gacggagcgatgggg

SEQ ID NO: 246778 - DNA, 15 bp, Homo sapiens
agacggagcgatggg

SEQ ID NO: 246779 - DNA, 15 bp, Homo sapiens
gagacggagcgatgg

SEQ ID NO: 246780 - DNA, 15 bp, Homo sapiens
agagacggagcgatg

SEQ ID NO: 246781 - DNA, 15 bp, Homo sapiens
tagagacggagcgat

SEQ ID NO: 246782 - DNA, 15 bp, Homo sapiens
ctagagacggagcga

SEQ ID NO: 246783 - DNA, 15 bp, Homo sapiens
gctagagacggagcg

SEQ ID NO: 246784 - DNA, 15 bp, Homo sapiens
ggctagagacggagc

SEQ ID NO: 246785 - DNA, 15 bp, Homo sapiens
tggctagagacggag

SEQ ID NO: 246786 - DNA, 15 bp, Homo sapiens
atggctagagacgga

SEQ ID NO: 246787 - DNA, 15 bp, Homo sapiens
aatggctagagacgg

SEQ ID NO: 246788 - DNA, 15 bp, Homo sapiens
caatggctagagacg

SEQ ID NO: 246789 - DNA, 15 bp, Homo sapiens
ccaatggctagagac

SEQ ID NO: 246790 - DNA, 15 bp, Homo sapiens
cccaatggctagaga

SEQ ID NO: 246791 - DNA, 15 bp, Homo sapiens
ccccaatggctagag

SEQ ID NO: 246792 - DNA, 15 bp, Homo sapiens
tccccaatggctaga

SEQ ID NO: 246793 - DNA, 15 bp, Homo sapiens
ttccccaatggctag

SEQ ID NO: 246794 - DNA, 15 bp, Homo sapiens
cttccccaatggcta

SEQ ID NO: 246795 - DNA, 15 bp, Homo sapiens
tcttccccaatggct

SEQ ID NO: 246796 - DNA, 15 bp, Homo sapiens
ctcttccccaatggc

SEQ ID NO: 246797 - DNA, 15 bp, Homo sapiens
gctcttccccaatgg

SEQ ID NO: 246798 - DNA, 15 bp, Homo sapiens
ggctcttccccaatg

SEQ ID NO: 246799 - DNA, 15 bp, Homo sapiens
aggctcttccccaat

SEQ ID NO: 246800 - DNA, 15 bp, Homo sapiens
gaggctcttccccaa

SEQ ID NO: 246801 - DNA, 15 bp, Homo sapiens
ggaggctcttcccca

SEQ ID NO: 246802 - DNA, 15 bp, Homo sapiens
gggaggctcttcccc

SEQ ID NO: 246803 - DNA, 15 bp, Homo sapiens
ggggaggctcttccc

SEQ ID NO: 246804 - DNA, 15 bp, Homo sapiens
tggggaggctcttcc

SEQ ID NO: 246805 - DNA, 15 bp, Homo sapiens
gtggggaggctcttc

SEQ ID NO: 246806 - DNA, 15 bp, Homo sapiens
ggtggggaggctctt

SEQ ID NO: 246807 - DNA, 15 bp, Homo sapiens
tggtggggaggctct

SEQ ID NO: 246808 - DNA, 15 bp, Homo sapiens
ttggtggggaggctc

SEQ ID NO: 246809 - DNA, 15 bp, Homo sapiens
cttggtggggaggct

SEQ ID NO: 246810 - DNA, 15 bp, Homo sapiens
gcttggtggggaggc

SEQ ID NO: 246811 - DNA, 15 bp, Homo sapiens
ggcttggtggggagg

SEQ ID NO: 246812 - DNA, 15 bp, Homo sapiens
aggcttggtggggag

SEQ ID NO: 246813 - DNA, 15 bp, Homo sapiens
gaggcttggtgggga

SEQ ID NO: 246814 - DNA, 15 bp, Homo sapiens
agaggcttggtgggg

SEQ ID NO: 246815 - DNA, 15 bp, Homo sapiens
aagaggcttggtggg

SEQ ID NO: 246816 - DNA, 15 bp, Homo sapiens
aaagaggcttggtgg

SEQ ID NO: 246817 - DNA, 15 bp, Homo sapiens
gaaagaggcttggtg

SEQ ID NO: 246818 - DNA, 15 bp, Homo sapiens
agaaagaggcttggt

SEQ ID NO: 246819 - DNA, 15 bp, Homo sapiens
gagaaagaggcttgg

SEQ ID NO: 246820 - DNA, 15 bp, Homo sapiens
agagaaagaggcttg

SEQ ID NO: 246821 - DNA, 15 bp, Homo sapiens
gagagaaagaggctt

SEQ ID NO: 246822 - DNA, 15 bp, Homo sapiens
agagagaaagaggct

SEQ ID NO: 246823 - DNA, 15 bp, Homo sapiens
gagagagaaagaggc

SEQ ID NO: 246824 - DNA, 15 bp, Homo sapiens
agagagagaaagagg

SEQ ID NO: 246825 - DNA, 15 bp, Homo sapiens
aagagagagaaagag

SEQ ID NO: 246826 - DNA, 15 bp, Homo sapiens
gaagagagagaaaga

SEQ ID NO: 246827 - DNA, 15 bp, Homo sapiens
ggaagagagagaaag

SEQ ID NO: 246828 - DNA, 15 bp, Homo sapiens
tggaagagagagaaa

SEQ ID NO: 246829 - DNA, 15 bp, Homo sapiens
ctggaagagagagaa

SEQ ID NO: 246830 - DNA, 15 bp, Homo sapiens
tctggaagagagaga

SEQ ID NO: 246831 - DNA, 15 bp, Homo sapiens
atctggaagagagag

SEQ ID NO: 246832 - DNA, 15 bp, Homo sapiens
tatctggaagagaga

SEQ ID NO: 246833 - DNA, 15 bp, Homo sapiens
atatctggaagagag

SEQ ID NO: 246834 - DNA, 15 bp, Homo sapiens
gatatctggaagaga

SEQ ID NO: 246835 - DNA, 15 bp, Homo sapiens
cgatatctggaagag

SEQ ID NO: 246836 - DNA, 15 bp, Homo sapiens
tcgatatctggaaga

SEQ ID NO: 246837 - DNA, 15 bp, Homo sapiens
atcgatatctggaag

SEQ ID NO: 246838 - DNA, 15 bp, Homo sapiens
catcgatatctggaa

SEQ ID NO: 246839 - DNA, 15 bp, Homo sapiens
tcatcgatatctgga

SEQ ID NO: 246840 - DNA, 15 bp, Homo sapiens
ctcatcgatatctgg

SEQ ID NO: 246841 - DNA, 15 bp, Homo sapiens
actcatcgatatctg

SEQ ID NO: 246842 - DNA, 15 bp, Homo sapiens
cactcatcgatatct

SEQ ID NO: 246843 - DNA, 15 bp, Homo sapiens
acactcatcgatatc

SEQ ID NO: 246844 - DNA, 15 bp, Homo sapiens
gacactcatcgatat

SEQ ID NO: 246845 - DNA, 15 bp, Homo sapiens
tgacactcatcgata

SEQ ID NO: 246846 - DNA, 15 bp, Homo sapiens
ctgacactcatcgat

SEQ ID NO: 246847 - DNA, 15 bp, Homo sapiens
cctgacactcatcga

SEQ ID NO: 246848 - DNA, 15 bp, Homo sapiens
tcctgacactcatcg

SEQ ID NO: 246849 - DNA, 15 bp, Homo sapiens
atcctgacactcatc

SEQ ID NO: 246850 - DNA, 15 bp, Homo sapiens
gatcctgacactcat

SEQ ID NO: 246851 - DNA, 15 bp, Homo sapiens
ggatcctgacactca

SEQ ID NO: 246852 - DNA, 15 bp, Homo sapiens
gggatcctgacactc

SEQ ID NO: 246853 - DNA, 15 bp, Homo sapiens
cgggatcctgacact

SEQ ID NO: 246854 - DNA, 15 bp, Homo sapiens
tcgggatcctgacac

SEQ ID NO: 246855 - DNA, 15 bp, Homo sapiens
gtcgggatcctgaca

SEQ ID NO: 246856 - DNA, 15 bp, Homo sapiens
tgtcgggatcctgac

SEQ ID NO: 246857 - DNA, 15 bp, Homo sapiens
gtgtcgggatcctga

SEQ ID NO: 246858 - DNA, 15 bp, Homo sapiens
ggtgtcgggatcctg

SEQ ID NO: 246859 - DNA, 15 bp, Homo sapiens
aggtgtcgggatcct

SEQ ID NO: 246860 - DNA, 15 bp, Homo sapiens
caggtgtcgggatcc

SEQ ID NO: 246861 - DNA, 15 bp, Homo sapiens
gcaggtgtcgggatc

SEQ ID NO: 246862 - DNA, 15 bp, Homo sapiens
tgcaggtgtcgggat

SEQ ID NO: 246863 - DNA, 15 bp, Homo sapiens
ctgcaggtgtcggga

SEQ ID NO: 246864 - DNA, 15 bp, Homo sapiens
gctgcaggtgtcggg

SEQ ID NO: 246865 - DNA, 15 bp, Homo sapiens
ggctgcaggtgtcgg

SEQ ID NO: 246866 - DNA, 15 bp, Homo sapiens
tggctgcaggtgtcg

SEQ ID NO: 246867 - DNA, 15 bp, Homo sapiens
ctggctgcaggtgtc

SEQ ID NO: 246868 - DNA, 15 bp, Homo sapiens
gctggctgcaggtgt

SEQ ID NO: 246869 - DNA, 15 bp, Homo sapiens
agctggctgcaggtg

SEQ ID NO: 246870 - DNA, 15 bp, Homo sapiens
gagctggctgcaggt

SEQ ID NO: 246871 - DNA, 15 bp, Homo sapiens
agagctggctgcagg

SEQ ID NO: 246872 - DNA, 15 bp, Homo sapiens
cagagctggctgcag

SEQ ID NO: 246873 - DNA, 15 bp, Homo sapiens
gcagagctggctgca

SEQ ID NO: 246874 - DNA, 15 bp, Homo sapiens
cgcagagctggctgc

SEQ ID NO: 246875 - DNA, 15 bp, Homo sapiens
acgcagagctggctg

SEQ ID NO: 246876 - DNA, 15 bp, Homo sapiens
cacgcagagctggct

SEQ ID NO: 246877 - DNA, 15 bp, Homo sapiens
tcacgcagagctggc

SEQ ID NO: 246878 - DNA, 15 bp, Homo sapiens
ttcacgcagagctgg

SEQ ID NO: 246879 - DNA, 15 bp, Homo sapiens
gttcacgcagagctg

SEQ ID NO: 246880 - DNA, 15 bp, Homo sapiens
ggttcacgcagagct

SEQ ID NO: 246881 - DNA, 15 bp, Homo sapiens
aggttcacgcagagc

SEQ ID NO: 246882 - DNA, 15 bp, Homo sapiens
caggttcacgcagag

SEQ ID NO: 246883 - DNA, 15 bp, Homo sapiens
ccaggttcacgcaga

SEQ ID NO: 246884 - DNA, 15 bp, Homo sapiens
tccaggttcacgcag

SEQ ID NO: 246885 - DNA, 15 bp, Homo sapiens
ctccaggttcacgca

SEQ ID NO: 246886 - DNA, 15 bp, Homo sapiens
cctccaggttcacgc

SEQ ID NO: 246887 - DNA, 15 bp, Homo sapiens
ccctccaggttcacg

SEQ ID NO: 246888 - DNA, 15 bp, Homo sapiens
accctccaggttcac

SEQ ID NO: 246889 - DNA, 15 bp, Homo sapiens
caccctccaggttca

SEQ ID NO: 246890 - DNA, 15 bp, Homo sapiens
ccaccctccaggttc

SEQ ID NO: 246891 - DNA, 15 bp, Homo sapiens
gccaccctccaggtt

SEQ ID NO: 246892 - DNA, 15 bp, Homo sapiens
agccaccctccaggt

SEQ ID NO: 246893 - DNA, 15 bp, Homo sapiens
tagccaccctccagg

SEQ ID NO: 246894 - DNA, 15 bp, Homo sapiens
gtagccaccctccag

SEQ ID NO: 246895 - DNA, 15 bp, Homo sapiens
tgtagccaccctcca

SEQ ID NO: 246896 - DNA, 15 bp, Homo sapiens
ttgtagccaccctcc

SEQ ID NO: 246897 - DNA, 15 bp, Homo sapiens
cttgtagccaccctc

SEQ ID NO: 246898 - DNA, 15 bp, Homo sapiens
acttgtagccaccct

SEQ ID NO: 246899 - DNA, 15 bp, Homo sapiens
cacttgtagccaccc

SEQ ID NO: 246900 - DNA, 15 bp, Homo sapiens
gcacttgtagccacc

SEQ ID NO: 246901 - DNA, 15 bp, Homo sapiens
ggcacttgtagccac

SEQ ID NO: 246902 - DNA, 15 bp, Homo sapiens
tggcacttgtagcca

SEQ ID NO: 246903 - DNA, 15 bp, Homo sapiens
ctggcacttgtagcc

SEQ ID NO: 246904 - DNA, 15 bp, Homo sapiens
actggcacttgtagc

SEQ ID NO: 246905 - DNA, 15 bp, Homo sapiens
cactggcacttgtag

SEQ ID NO: 246906 - DNA, 15 bp, Homo sapiens
acactggcacttgta

SEQ ID NO: 246907 - DNA, 15 bp, Homo sapiens
cacactggcacttgt

SEQ ID NO: 246908 - DNA, 15 bp, Homo sapiens
tcacactggcacttg

SEQ ID NO: 246909 - DNA, 15 bp, Homo sapiens
ctcacactggcactt

SEQ ID NO: 246910 - DNA, 15 bp, Homo sapiens
cctcacactggcact

SEQ ID NO: 246911 - DNA, 15 bp, Homo sapiens
tcctcacactggcac

SEQ ID NO: 246912 - DNA, 15 bp, Homo sapiens
ttcctcacactggca

SEQ ID NO: 246913 - DNA, 15 bp, Homo sapiens
cttcctcacactggc

SEQ ID NO: 246914 - DNA, 15 bp, Homo sapiens
ccttcctcacactgg

SEQ ID NO: 246915 - DNA, 15 bp, Homo sapiens
gccttcctcacactg

SEQ ID NO: 246916 - DNA, 15 bp, Homo sapiens
agccttcctcacact

SEQ ID NO: 246917 - DNA, 15 bp, Homo sapiens
aagccttcctcacac

SEQ ID NO: 246918 - DNA, 15 bp, Homo sapiens
gaagccttcctcaca

SEQ ID NO: 246919 - DNA, 15 bp, Homo sapiens
ggaagccttcctcac

SEQ ID NO: 246920 - DNA, 15 bp, Homo sapiens
tggaagccttcctca

SEQ ID NO: 246921 - DNA, 15 bp, Homo sapiens
ctggaagccttcctc

SEQ ID NO: 246922 - DNA, 15 bp, Homo sapiens
gctggaagccttcct

SEQ ID NO: 246923 - DNA, 15 bp, Homo sapiens
agctggaagccttcc

SEQ ID NO: 246924 - DNA, 15 bp, Homo sapiens
cagctggaagccttc

SEQ ID NO: 246925 - DNA, 15 bp, Homo sapiens
ccagctggaagcctt

SEQ ID NO: 246926 - DNA, 15 bp, Homo sapiens
tccagctggaagcct

SEQ ID NO: 246927 - DNA, 15 bp, Homo sapiens
gtccagctggaagcc

SEQ ID NO: 246928 - DNA, 15 bp, Homo sapiens
ggtccagctggaagc

SEQ ID NO: 246929 - DNA, 15 bp, Homo sapiens
gggtccagctggaag

SEQ ID NO: 246930 - DNA, 15 bp, Homo sapiens
ggggtccagctggaa

SEQ ID NO: 246931 - DNA, 15 bp, Homo sapiens
gggggtccagctgga

SEQ ID NO: 246932 - DNA, 15 bp, Homo sapiens
tgggggtccagctgg

SEQ ID NO: 246933 - DNA, 15 bp, Homo sapiens
gtgggggtccagctg

SEQ ID NO: 246934 - DNA, 15 bp, Homo sapiens
tgtgggggtccagct

SEQ ID NO: 246935 - DNA, 15 bp, Homo sapiens
gtgtgggggtccagc

SEQ ID NO: 246936 - DNA, 15 bp, Homo sapiens
cgtgtgggggtccag

SEQ ID NO: 246937 - DNA, 15 bp, Homo sapiens
tcgtgtgggggtcca

SEQ ID NO: 246938 - DNA, 15 bp, Homo sapiens
ttcgtgtgggggtcc

SEQ ID NO: 246939 - DNA, 15 bp, Homo sapiens
cttcgtgtgggggtc

SEQ ID NO: 246940 - DNA, 15 bp, Homo sapiens
ccttcgtgtgggggt

SEQ ID NO: 246941 - DNA, 15 bp, Homo sapiens
gccttcgtgtggggg

SEQ ID NO: 246942 - DNA, 15 bp, Homo sapiens
ggccttcgtgtgggg

SEQ ID NO: 246943 - DNA, 15 bp, Homo sapiens
aggccttcgtgtggg

SEQ ID NO: 246944 - DNA, 15 bp, Homo sapiens
caggccttcgtgtgg

SEQ ID NO: 246945 - DNA, 15 bp, Homo sapiens
gcaggccttcgtgtg

SEQ ID NO: 246946 - DNA, 15 bp, Homo sapiens
tgcaggccttcgtgt

SEQ ID NO: 246947 - DNA, 15 bp, Homo sapiens
ttgcaggccttcgtg

SEQ ID NO: 246948 - DNA, 15 bp, Homo sapiens
cttgcaggccttcgt

SEQ ID NO: 246949 - DNA, 15 bp, Homo sapiens
ccttgcaggccttcg

SEQ ID NO: 246950 - DNA, 15 bp, Homo sapiens
gccttgcaggccttc

SEQ ID NO: 246951 - DNA, 15 bp, Homo sapiens
agccttgcaggcctt

SEQ ID NO: 246952 - DNA, 15 bp, Homo sapiens
cagccttgcaggcct

SEQ ID NO: 246953 - DNA, 15 bp, Homo sapiens
acagccttgcaggcc

SEQ ID NO: 246954 - DNA, 15 bp, Homo sapiens
cacagccttgcaggc

SEQ ID NO: 246955 - DNA, 15 bp, Homo sapiens
ccacagccttgcagg

SEQ ID NO: 246956 - DNA, 15 bp, Homo sapiens
cccacagccttgcag

SEQ ID NO: 246957 - DNA, 15 bp, Homo sapiens
acccacagccttgca

SEQ ID NO: 246958 - DNA, 15 bp, Homo sapiens
cacccacagccttgc

SEQ ID NO: 246959 - DNA, 15 bp, Homo sapiens
tcacccacagccttg

SEQ ID NO: 246960 - DNA, 15 bp, Homo sapiens
ctcacccacagcctt

SEQ ID NO: 246961 - DNA, 15 bp, Homo sapiens
gctcacccacagcct

SEQ ID NO: 246962 - DNA, 15 bp, Homo sapiens
tgctcacccacagcc

SEQ ID NO: 246963 - DNA, 15 bp, Homo sapiens
gtgctcacccacagc

SEQ ID NO: 246964 - DNA, 15 bp, Homo sapiens
cgtgctcacccacag

SEQ ID NO: 246965 - DNA, 15 bp, Homo sapiens
ccgtgctcacccaca

SEQ ID NO: 246966 - DNA, 15 bp, Homo sapiens
cccgtgctcacccac

SEQ ID NO: 246967 - DNA, 15 bp, Homo sapiens
tcccgtgctcaccca

SEQ ID NO: 246968 - DNA, 15 bp, Homo sapiens
ttcccgtgctcaccc

SEQ ID NO: 246969 - DNA, 15 bp, Homo sapiens
cttcccgtgctcacc

SEQ ID NO: 246970 - DNA, 15 bp, Homo sapiens
ccttcccgtgctcac

SEQ ID NO: 246971 - DNA, 15 bp, Homo sapiens
gccttcccgtgctca

SEQ ID NO: 246972 - DNA, 15 bp, Homo sapiens
cgccttcccgtgctc

SEQ ID NO: 246973 - DNA, 15 bp, Homo sapiens
ccgccttcccgtgct

SEQ ID NO: 246974 - DNA, 15 bp, Homo sapiens
gccgccttcccgtgc

SEQ ID NO: 246975 - DNA, 15 bp, Homo sapiens
cgccgccttcccgtg

SEQ ID NO: 246976 - DNA, 15 bp, Homo sapiens
ccgccgccttcccgt

SEQ ID NO: 246977 - DNA, 15 bp, Homo sapiens
cccgccgccttcccg

SEQ ID NO: 246978 - DNA, 15 bp, Homo sapiens
acccgccgccttccc

SEQ ID NO: 246979 - DNA, 15 bp, Homo sapiens
cacccgccgccttcc

SEQ ID NO: 246980 - DNA, 15 bp, Homo sapiens
ccacccgccgccttc

SEQ ID NO: 246981 - DNA, 15 bp, Homo sapiens
cccacccgccgcctt

SEQ ID NO: 246982 - DNA, 15 bp, Homo sapiens
ccccacccgccgcct

SEQ ID NO: 246983 - DNA, 15 bp, Homo sapiens
cccccacccgccgcc

SEQ ID NO: 246984 - DNA, 15 bp, Homo sapiens
gcccccacccgccgc

SEQ ID NO: 246985 - DNA, 15 bp, Homo sapiens
cgcccccacccgccg

SEQ ID NO: 246986 - DNA, 15 bp, Homo sapiens
ccgcccccacccgcc

SEQ ID NO: 246987 - DNA, 15 bp, Homo sapiens
gccgcccccacccgc

SEQ ID NO: 246988 - DNA, 15 bp, Homo sapiens
ggccgcccccacccg

SEQ ID NO: 246989 - DNA, 15 bp, Homo sapiens
aggccgcccccaccc

SEQ ID NO: 246990 - DNA, 15 bp, Homo sapiens
gaggccgcccccacc

SEQ ID NO: 246991 - DNA, 15 bp, Homo sapiens
tgaggccgcccccac

SEQ ID NO: 246992 - DNA, 15 bp, Homo sapiens
gtgaggccgccccca

SEQ ID NO: 246993 - DNA, 15 bp, Homo sapiens
ggtgaggccgccccc

SEQ ID NO: 246994 - DNA, 15 bp, Homo sapiens
gggtgaggccgcccc

SEQ ID NO: 246995 - DNA, 15 bp, Homo sapiens
ggggtgaggccgccc

SEQ ID NO: 246996 - DNA, 15 bp, Homo sapiens
aggggtgaggccgcc

SEQ ID NO: 246997 - DNA, 15 bp, Homo sapiens
aaggggtgaggccgc

SEQ ID NO: 246998 - DNA, 15 bp, Homo sapiens
caaggggtgaggccg

SEQ ID NO: 246999 - DNA, 15 bp, Homo sapiens
gcaaggggtgaggcc

SEQ ID NO: 247000 - DNA, 15 bp, Homo sapiens
tgcaaggggtgaggc

SEQ ID NO: 247001 - DNA, 15 bp, Homo sapiens
ctgcaaggggtgagg

SEQ ID NO: 247002 - DNA, 15 bp, Homo sapiens
cctgcaaggggtgag

SEQ ID NO: 247003 - DNA, 15 bp, Homo sapiens
gcctgcaaggggtga

SEQ ID NO: 247004 - DNA, 15 bp, Homo sapiens
tgcctgcaaggggtg

SEQ ID NO: 247005 - DNA, 15 bp, Homo sapiens
ctgcctgcaaggggt

SEQ ID NO: 247006 - DNA, 15 bp, Homo sapiens
gctgcctgcaagggg

SEQ ID NO: 247007 - DNA, 15 bp, Homo sapiens
tgctgcctgcaaggg

SEQ ID NO: 247008 - DNA, 15 bp, Homo sapiens
ctgctgcctgcaagg

SEQ ID NO: 247009 - DNA, 15 bp, Homo sapiens
actgctgcctgcaag

SEQ ID NO: 247010 - DNA, 15 bp, Homo sapiens
cactgctgcctgcaa

SEQ ID NO: 247011 - DNA, 15 bp, Homo sapiens
ccactgctgcctgca

SEQ ID NO: 247012 - DNA, 15 bp, Homo sapiens
accactgctgcctgc

SEQ ID NO: 247013 - DNA, 15 bp, Homo sapiens
caccactgctgcctg

SEQ ID NO: 247014 - DNA, 15 bp, Homo sapiens
ccaccactgctgcct

SEQ ID NO: 247015 - DNA, 15 bp, Homo sapiens
cccaccactgctgcc

SEQ ID NO: 247016 - DNA, 15 bp, Homo sapiens
ccccaccactgctgc

SEQ ID NO: 247017 - DNA, 15 bp, Homo sapiens
cccccaccactgctg

SEQ ID NO: 247018 - DNA, 15 bp, Homo sapiens
tcccccaccactgct

SEQ ID NO: 247019 - DNA, 15 bp, Homo sapiens
ctcccccaccactgc

SEQ ID NO: 247020 - DNA, 15 bp, Homo sapiens
actcccccaccactg

SEQ ID NO: 247021 - DNA, 15 bp, Homo sapiens
aactcccccaccact

SEQ ID NO: 247022 - DNA, 15 bp, Homo sapiens
aaactcccccaccac

SEQ ID NO: 247023 - DNA, 15 bp, Homo sapiens
gaaactcccccacca

SEQ ID NO: 247024 - DNA, 15 bp, Homo sapiens
tgaaactcccccacc

SEQ ID NO: 247025 - DNA, 15 bp, Homo sapiens
atgaaactcccccac

SEQ ID NO: 247026 - DNA, 15 bp, Homo sapiens
gatgaaactccccca

SEQ ID NO: 247027 - DNA, 15 bp, Homo sapiens
ggatgaaactccccc

SEQ ID NO: 247028 - DNA, 15 bp, Homo sapiens
aggatgaaactcccc

SEQ ID NO: 247029 - DNA, 15 bp, Homo sapiens
gaggatgaaactccc

SEQ ID NO: 247030 - DNA, 15 bp, Homo sapiens
agaggatgaaactcc

SEQ ID NO: 247031 - DNA, 15 bp, Homo sapiens
cagaggatgaaactc

SEQ ID NO: 247032 - DNA, 15 bp, Homo sapiens
tcagaggatgaaact

SEQ ID NO: 247033 - DNA, 15 bp, Homo sapiens
ttcagaggatgaaac

SEQ ID NO: 247034 - DNA, 15 bp, Homo sapiens
gttcagaggatgaaa

SEQ ID NO: 247035 - DNA, 15 bp, Homo sapiens
agttcagaggatgaa

SEQ ID NO: 247036 - DNA, 15 bp, Homo sapiens
aagttcagaggatga

SEQ ID NO: 247037 - DNA, 15 bp, Homo sapiens
aaagttcagaggatg

SEQ ID NO: 247038 - DNA, 15 bp, Homo sapiens
caaagttcagaggat

SEQ ID NO: 247039 - DNA, 15 bp, Homo sapiens
gcaaagttcagagga

SEQ ID NO: 247040 - DNA, 15 bp, Homo sapiens
tgcaaagttcagagg

SEQ ID NO: 247041 - DNA, 15 bp, Homo sapiens
gtgcaaagttcagag

SEQ ID NO: 247042 - DNA, 15 bp, Homo sapiens
tgtgcaaagttcaga

SEQ ID NO: 247043 - DNA, 15 bp, Homo sapiens
ctgtgcaaagttcag

SEQ ID NO: 247044 - DNA, 15 bp, Homo sapiens
tctgtgcaaagttca

SEQ ID NO: 247045 - DNA, 15 bp, Homo sapiens
gtctgtgcaaagttc

SEQ ID NO: 247046 - DNA, 15 bp, Homo sapiens
agtctgtgcaaagtt

SEQ ID NO: 247047 - DNA, 15 bp, Homo sapiens
gagtctgtgcaaagt

SEQ ID NO: 247048 - DNA, 15 bp, Homo sapiens
tgagtctgtgcaaag

SEQ ID NO: 247049 - DNA, 15 bp, Homo sapiens
atgagtctgtgcaaa

SEQ ID NO: 247050 - DNA, 15 bp, Homo sapiens
tatgagtctgtgcaa

SEQ ID NO: 247051 - DNA, 15 bp, Homo sapiens
atatgagtctgtgca

SEQ ID NO: 247052 - DNA, 15 bp, Homo sapiens
gatatgagtctgtgc

SEQ ID NO: 247053 - DNA, 15 bp, Homo sapiens
ggatatgagtctgtg

SEQ ID NO: 247054 - DNA, 15 bp, Homo sapiens
gggatatgagtctgt

SEQ ID NO: 247055 - DNA, 15 bp, Homo sapiens
ggggatatgagtctg

SEQ ID NO: 247056 - DNA, 15 bp, Homo sapiens
aggggatatgagtct

SEQ ID NO: 247057 - DNA, 15 bp, Homo sapiens
caggggatatgagtc

SEQ ID NO: 247058 - DNA, 15 bp, Homo sapiens
tcaggggatatgagt

SEQ ID NO: 247059 - DNA, 15 bp, Homo sapiens
gtcaggggatatgag

SEQ ID NO: 247060 - DNA, 15 bp, Homo sapiens
ggtcaggggatatga

SEQ ID NO: 247061 - DNA, 15 bp, Homo sapiens
cggtcaggggatatg

SEQ ID NO: 247062 - DNA, 15 bp, Homo sapiens
ccggtcaggggatat

SEQ ID NO: 247063 - DNA, 15 bp, Homo sapiens
cccggtcaggggata

SEQ ID NO: 247064 - DNA, 15 bp, Homo sapiens
tcccggtcaggggat

SEQ ID NO: 247065 - DNA, 15 bp, Homo sapiens
ctcccggtcagggga

SEQ ID NO: 247066 - DNA, 15 bp, Homo sapiens
cctcccggtcagggg

SEQ ID NO: 247067 - DNA, 15 bp, Homo sapiens
gcctcccggtcaggg

SEQ ID NO: 247068 - DNA, 15 bp, Homo sapiens
agcctcccggtcagg

SEQ ID NO: 247069 - DNA, 15 bp, Homo sapiens
cagcctcccggtcag

SEQ ID NO: 247070 - DNA, 15 bp, Homo sapiens
acagcctcccggtca

SEQ ID NO: 247071 - DNA, 15 bp, Homo sapiens
aacagcctcccggtc

SEQ ID NO: 247072 - DNA, 15 bp, Homo sapiens
aaacagcctcccggt

SEQ ID NO: 247073 - DNA, 15 bp, Homo sapiens
caaacagcctcccgg

SEQ ID NO: 247074 - DNA, 15 bp, Homo sapiens
gcaaacagcctcccg

SEQ ID NO: 247075 - DNA, 15 bp, Homo sapiens
agcaaacagcctccc

SEQ ID NO: 247076 - DNA, 15 bp, Homo sapiens
gagcaaacagcctcc

SEQ ID NO: 247077 - DNA, 15 bp, Homo sapiens
ggagcaaacagcctc

SEQ ID NO: 247078 - DNA, 15 bp, Homo sapiens
aggagcaaacagcct

SEQ ID NO: 247079 - DNA, 15 bp, Homo sapiens
caggagcaaacagcc

SEQ ID NO: 247080 - DNA, 15 bp, Homo sapiens
tcaggagcaaacagc

SEQ ID NO: 247081 - DNA, 15 bp, Homo sapiens
ctcaggagcaaacag

SEQ ID NO: 247082 - DNA, 15 bp, Homo sapiens
cctcaggagcaaaca

SEQ ID NO: 247083 - DNA, 15 bp, Homo sapiens
ccctcaggagcaaac

SEQ ID NO: 247084 - DNA, 15 bp, Homo sapiens
gccctcaggagcaaa

SEQ ID NO: 247085 - DNA, 15 bp, Homo sapiens
agccctcaggagcaa

SEQ ID NO: 247086 - DNA, 15 bp, Homo sapiens
gagccctcaggagca

SEQ ID NO: 247087 - DNA, 15 bp, Homo sapiens
agagccctcaggagc

SEQ ID NO: 247088 - DNA, 15 bp, Homo sapiens
cagagccctcaggag

SEQ ID NO: 247089 - DNA, 15 bp, Homo sapiens
ccagagccctcagga

SEQ ID NO: 247090 - DNA, 15 bp, Homo sapiens
gccagagccctcagg

SEQ ID NO: 247091 - DNA, 15 bp, Homo sapiens
tgccagagccctcag

SEQ ID NO: 247092 - DNA, 15 bp, Homo sapiens
ctgccagagccctca

SEQ ID NO: 247093 - DNA, 15 bp, Homo sapiens
cctgccagagccctc

SEQ ID NO: 247094 - DNA, 15 bp, Homo sapiens
ccctgccagagccct

SEQ ID NO: 247095 - DNA, 15 bp, Homo sapiens
cccctgccagagccc

SEQ ID NO: 247096 - DNA, 15 bp, Homo sapiens
tcccctgccagagcc

SEQ ID NO: 247097 - DNA, 15 bp, Homo sapiens
ctcccctgccagagc

SEQ ID NO: 247098 - DNA, 15 bp, Homo sapiens
actcccctgccagag

SEQ ID NO: 247099 - DNA, 15 bp, Homo sapiens
gactcccctgccaga

SEQ ID NO: 247100 - DNA, 15 bp, Homo sapiens
agactcccctgccag

SEQ ID NO: 247101 - DNA, 15 bp, Homo sapiens
cagactcccctgcca

SEQ ID NO: 247102 - DNA, 15 bp, Homo sapiens
gcagactcccctgcc

SEQ ID NO: 247103 - DNA, 15 bp, Homo sapiens
ggcagactcccctgc

SEQ ID NO: 247104 - DNA, 15 bp, Homo sapiens
cggcagactcccctg

SEQ ID NO: 247105 - DNA, 15 bp, Homo sapiens
gcggcagactcccct

SEQ ID NO: 247106 - DNA, 15 bp, Homo sapiens
ggcggcagactcccc

SEQ ID NO: 247107 - DNA, 15 bp, Homo sapiens
gggcggcagactccc

SEQ ID NO: 247108 - DNA, 15 bp, Homo sapiens
agggcggcagactcc

SEQ ID NO: 247109 - DNA, 15 bp, Homo sapiens
cagggcggcagactc

SEQ ID NO: 247110 - DNA, 15 bp, Homo sapiens
acagggcggcagact

SEQ ID NO: 247111 - DNA, 15 bp, Homo sapiens
aacagggcggcagac

SEQ ID NO: 247112 - DNA, 15 bp, Homo sapiens
taacagggcggcaga

SEQ ID NO: 247113 - DNA, 15 bp, Homo sapiens
ctaacagggcggcag

SEQ ID NO: 247114 - DNA, 15 bp, Homo sapiens
cctaacagggcggca

SEQ ID NO: 247115 - DNA, 15 bp, Homo sapiens
tcctaacagggcggc

SEQ ID NO: 247116 - DNA, 15 bp, Homo sapiens
gtcctaacagggcgg

SEQ ID NO: 247117 - DNA, 15 bp, Homo sapiens
agtcctaacagggcg

SEQ ID NO: 247118 - DNA, 15 bp, Homo sapiens
aagtcctaacagggc

SEQ ID NO: 247119 - DNA, 15 bp, Homo sapiens
caagtcctaacaggg

SEQ ID NO: 247120 - DNA, 15 bp, Homo sapiens
ccaagtcctaacagg

SEQ ID NO: 247121 - DNA, 15 bp, Homo sapiens
cccaagtcctaacag

SEQ ID NO: 247122 - DNA, 15 bp, Homo sapiens
gcccaagtcctaaca

SEQ ID NO: 247123 - DNA, 15 bp, Homo sapiens
agcccaagtcctaac

SEQ ID NO: 247124 - DNA, 15 bp, Homo sapiens
aagcccaagtcctaa

SEQ ID NO: 247125 - DNA, 15 bp, Homo sapiens
caagcccaagtccta

SEQ ID NO: 247126 - DNA, 15 bp, Homo sapiens
gcaagcccaagtcct

SEQ ID NO: 247127 - DNA, 15 bp, Homo sapiens
ggcaagcccaagtcc

SEQ ID NO: 247128 - DNA, 15 bp, Homo sapiens
tggcaagcccaagtc

SEQ ID NO: 247129 - DNA, 15 bp, Homo sapiens
ctggcaagcccaagt

SEQ ID NO: 247130 - DNA, 15 bp, Homo sapiens
cctggcaagcccaag

SEQ ID NO: 247131 - DNA, 15 bp, Homo sapiens
ccctggcaagcccaa

SEQ ID NO: 247132 - DNA, 15 bp, Homo sapiens
cccctggcaagccca

SEQ ID NO: 247133 - DNA, 15 bp, Homo sapiens
ccccctggcaagccc

SEQ ID NO: 247134 - DNA, 15 bp, Homo sapiens
tccccctggcaagcc

SEQ ID NO: 247135 - DNA, 15 bp, Homo sapiens
atccccctggcaagc

SEQ ID NO: 247136 - DNA, 15 bp, Homo sapiens
catccccctggcaag

SEQ ID NO: 247137 - DNA, 15 bp, Homo sapiens
gcatccccctggcaa

SEQ ID NO: 247138 - DNA, 15 bp, Homo sapiens
ggcatccccctggca

SEQ ID NO: 247139 - DNA, 15 bp, Homo sapiens
aggcatccccctggc

SEQ ID NO: 247140 - DNA, 15 bp, Homo sapiens
caggcatccccctgg

SEQ ID NO: 247141 - DNA, 15 bp, Homo sapiens
gcaggcatccccctg

SEQ ID NO: 247142 - DNA, 15 bp, Homo sapiens
tgcaggcatccccct

SEQ ID NO: 247143 - DNA, 15 bp, Homo sapiens
atgcaggcatccccc

SEQ ID NO: 247144 - DNA, 15 bp, Homo sapiens
tatgcaggcatcccc

SEQ ID NO: 247145 - DNA, 15 bp, Homo sapiens
atatgcaggcatccc

SEQ ID NO: 247146 - DNA, 15 bp, Homo sapiens
catatgcaggcatcc

SEQ ID NO: 247147 - DNA, 15 bp, Homo sapiens
acatatgcaggcatc

SEQ ID NO: 247148 - DNA, 15 bp, Homo sapiens
gacatatgcaggcat

SEQ ID NO: 247149 - DNA, 15 bp, Homo sapiens
ggacatatgcaggca

SEQ ID NO: 247150 - DNA, 15 bp, Homo sapiens
aggacatatgcaggc

SEQ ID NO: 247151 - DNA, 15 bp, Homo sapiens
taggacatatgcagg

SEQ ID NO: 247152 - DNA, 15 bp, Homo sapiens
ctaggacatatgcag

SEQ ID NO: 247153 - DNA, 15 bp, Homo sapiens
actaggacatatgca

SEQ ID NO: 247154 - DNA, 15 bp, Homo sapiens
aactaggacatatgc

SEQ ID NO: 247155 - DNA, 15 bp, Homo sapiens
aaactaggacatatg

SEQ ID NO: 247156 - DNA, 15 bp, Homo sapiens
aaaactaggacatat

SEQ ID NO: 247157 - DNA, 15 bp, Homo sapiens
aaaaactaggacata

SEQ ID NO: 247158 - DNA, 15 bp, Homo sapiens
caaaaactaggacat

SEQ ID NO: 247159 - DNA, 15 bp, Homo sapiens
ccaaaaactaggaca

SEQ ID NO: 247160 - DNA, 15 bp, Homo sapiens
cccaaaaactaggac

SEQ ID NO: 247161 - DNA, 15 bp, Homo sapiens
tcccaaaaactagga

SEQ ID NO: 247162 - DNA, 15 bp, Homo sapiens
ttcccaaaaactagg

SEQ ID NO: 247163 - DNA, 15 bp, Homo sapiens
attcccaaaaactag

SEQ ID NO: 247164 - DNA, 15 bp, Homo sapiens
tattcccaaaaacta

SEQ ID NO: 247165 - DNA, 15 bp, Homo sapiens
atattcccaaaaact

SEQ ID NO: 247166 - DNA, 15 bp, Homo sapiens
gatattcccaaaaac

SEQ ID NO: 247167 - DNA, 15 bp, Homo sapiens
ggatattcccaaaaa

SEQ ID NO: 247168 - DNA, 15 bp, Homo sapiens
tggatattcccaaaa

SEQ ID NO: 247169 - DNA, 15 bp, Homo sapiens
ctggatattcccaaa

SEQ ID NO: 247170 - DNA, 15 bp, Homo sapiens
actggatattcccaa

SEQ ID NO: 247171 - DNA, 15 bp, Homo sapiens
aactggatattccca

SEQ ID NO: 247172 - DNA, 15 bp, Homo sapiens
taactggatattccc

SEQ ID NO: 247173 - DNA, 15 bp, Homo sapiens
ttaactggatattcc

SEQ ID NO: 247174 - DNA, 15 bp, Homo sapiens
gttaactggatattc

SEQ ID NO: 247175 - DNA, 15 bp, Homo sapiens
cgttaactggatatt

SEQ ID NO: 247176 - DNA, 15 bp, Homo sapiens
ccgttaactggatat

SEQ ID NO: 247177 - DNA, 15 bp, Homo sapiens
tccgttaactggata

SEQ ID NO: 247178 - DNA, 15 bp, Homo sapiens
ttccgttaactggat

SEQ ID NO: 247179 - DNA, 15 bp, Homo sapiens
gttccgttaactgga

SEQ ID NO: 247180 - DNA, 15 bp, Homo sapiens
ggttccgttaactgg

SEQ ID NO: 247181 - DNA, 15 bp, Homo sapiens
gggttccgttaactg

SEQ ID NO: 247182 - DNA, 15 bp, Homo sapiens
agggttccgttaact

SEQ ID NO: 247183 - DNA, 15 bp, Homo sapiens
gagggttccgttaac

SEQ ID NO: 247184 - DNA, 15 bp, Homo sapiens
tgagggttccgttaa

SEQ ID NO: 247185 - DNA, 15 bp, Homo sapiens
ctgagggttccgtta

SEQ ID NO: 247186 - DNA, 15 bp, Homo sapiens
gctgagggttccgtt

SEQ ID NO: 247187 - DNA, 15 bp, Homo sapiens
ggctgagggttccgt

SEQ ID NO: 247188 - DNA, 15 bp, Homo sapiens
gggctgagggttccg

SEQ ID NO: 247189 - DNA, 15 bp, Homo sapiens
agggctgagggttcc

SEQ ID NO: 247190 - DNA, 15 bp, Homo sapiens
tagggctgagggttc

SEQ ID NO: 247191 - DNA, 15 bp, Homo sapiens
gtagggctgagggtt

SEQ ID NO: 247192 - DNA, 15 bp, Homo sapiens
agtagggctgagggt

SEQ ID NO: 247193 - DNA, 15 bp, Homo sapiens
cagtagggctgaggg

SEQ ID NO: 247194 - DNA, 15 bp, Homo sapiens
ccagtagggctgagg

SEQ ID NO: 247195 - DNA, 15 bp, Homo sapiens
accagtagggctgag

SEQ ID NO: 247196 - DNA, 15 bp, Homo sapiens
caccagtagggctga

SEQ ID NO: 247197 - DNA, 15 bp, Homo sapiens
ccaccagtagggctg

SEQ ID NO: 247198 - DNA, 15 bp, Homo sapiens
tccaccagtagggct

SEQ ID NO: 247199 - DNA, 15 bp, Homo sapiens
ttccaccagtagggc

SEQ ID NO: 247200 - DNA, 15 bp, Homo sapiens
gttccaccagtaggg

SEQ ID NO: 247201 - DNA, 15 bp, Homo sapiens
tgttccaccagtagg

SEQ ID NO: 247202 - DNA, 15 bp, Homo sapiens
ctgttccaccagtag

SEQ ID NO: 247203 - DNA, 15 bp, Homo sapiens
cctgttccaccagta

SEQ ID NO: 247204 - DNA, 15 bp, Homo sapiens
tcctgttccaccagt

SEQ ID NO: 247205 - DNA, 15 bp, Homo sapiens
ttcctgttccaccag

SEQ ID NO: 247206 - DNA, 15 bp, Homo sapiens
gttcctgttccacca

SEQ ID NO: 247207 - DNA, 15 bp, Homo sapiens
ggttcctgttccacc

SEQ ID NO: 247208 - DNA, 15 bp, Homo sapiens
cggttcctgttccac

SEQ ID NO: 247209 - DNA, 15 bp, Homo sapiens
ccggttcctgttcca

SEQ ID NO: 247210 - DNA, 15 bp, Homo sapiens
gccggttcctgttcc

SEQ ID NO: 247211 - DNA, 15 bp, Homo sapiens
agccggttcctgttc

SEQ ID NO: 247212 - DNA, 15 bp, Homo sapiens
aagccggttcctgtt

SEQ ID NO: 247213 - DNA, 15 bp, Homo sapiens
aaagccggttcctgt

SEQ ID NO: 247214 - DNA, 15 bp, Homo sapiens
gaaagccggttcctg

SEQ ID NO: 247215 - DNA, 15 bp, Homo sapiens
ggaaagccggttcct

SEQ ID NO: 247216 - DNA, 15 bp, Homo sapiens
aggaaagccggttcc

SEQ ID NO: 247217 - DNA, 15 bp, Homo sapiens
aaggaaagccggttc

SEQ ID NO: 247218 - DNA, 15 bp, Homo sapiens
aaaggaaagccggtt

SEQ ID NO: 247219 - DNA, 15 bp, Homo sapiens
gaaaggaaagccggt

SEQ ID NO: 247220 - DNA, 15 bp, Homo sapiens
tgaaaggaaagccgg

SEQ ID NO: 247221 - DNA, 15 bp, Homo sapiens
ctgaaaggaaagccg

SEQ ID NO: 247222 - DNA, 15 bp, Homo sapiens
cctgaaaggaaagcc

SEQ ID NO: 247223 - DNA, 15 bp, Homo sapiens
ccctgaaaggaaagc

SEQ ID NO: 247224 - DNA, 15 bp, Homo sapiens
tccctgaaaggaaag

SEQ ID NO: 247225 - DNA, 15 bp, Homo sapiens
gtccctgaaaggaaa

SEQ ID NO: 247226 - DNA, 15 bp, Homo sapiens
tgtccctgaaaggaa

SEQ ID NO: 247227 - DNA, 15 bp, Homo sapiens
ttgtccctgaaagga

SEQ ID NO: 247228 - DNA, 15 bp, Homo sapiens
gttgtccctgaaagg

SEQ ID NO: 247229 - DNA, 15 bp, Homo sapiens
ggttgtccctgaaag

SEQ ID NO: 247230 - DNA, 15 bp, Homo sapiens
aggttgtccctgaaa

SEQ ID NO: 247231 - DNA, 15 bp, Homo sapiens
caggttgtccctgaa

SEQ ID NO: 247232 - DNA, 15 bp, Homo sapiens
ccaggttgtccctga

SEQ ID NO: 247233 - DNA, 15 bp, Homo sapiens
cccaggttgtccctg

SEQ ID NO: 247234 - DNA, 15 bp, Homo sapiens
ccccaggttgtccct

SEQ ID NO: 247235 - DNA, 15 bp, Homo sapiens
tccccaggttgtccc

SEQ ID NO: 247236 - DNA, 15 bp, Homo sapiens
ctccccaggttgtcc

SEQ ID NO: 247237 - DNA, 15 bp, Homo sapiens
actccccaggttgtc

SEQ ID NO: 247238 - DNA, 15 bp, Homo sapiens
cactccccaggttgt

SEQ ID NO: 247239 - DNA, 15 bp, Homo sapiens
tcactccccaggttg

SEQ ID NO: 247240 - DNA, 15 bp, Homo sapiens
gtcactccccaggtt

SEQ ID NO: 247241 - DNA, 15 bp, Homo sapiens
agtcactccccaggt

SEQ ID NO: 247242 - DNA, 15 bp, Homo sapiens
aagtcactccccagg

SEQ ID NO: 247243 - DNA, 15 bp, Homo sapiens
gaagtcactccccag

SEQ ID NO: 247244 - DNA, 15 bp, Homo sapiens
tgaagtcactcccca

SEQ ID NO: 247245 - DNA, 15 bp, Homo sapiens
ttgaagtcactcccc

SEQ ID NO: 247246 - DNA, 15 bp, Homo sapiens
cttgaagtcactccc

SEQ ID NO: 247247 - DNA, 15 bp, Homo sapiens
ccttgaagtcactcc

SEQ ID NO: 247248 - DNA, 15 bp, Homo sapiens
cccttgaagtcactc

SEQ ID NO: 247249 - DNA, 15 bp, Homo sapiens
ccccttgaagtcact

SEQ ID NO: 247250 - DNA, 15 bp, Homo sapiens
accccttgaagtcac

SEQ ID NO: 247251 - DNA, 15 bp, Homo sapiens
aaccccttgaagtca

SEQ ID NO: 247252 - DNA, 15 bp, Homo sapiens
taaccccttgaagtc

SEQ ID NO: 247253 - DNA, 15 bp, Homo sapiens
ttaaccccttgaagt

SEQ ID NO: 247254 - DNA, 15 bp, Homo sapiens
tttaaccccttgaag

SEQ ID NO: 247255 - DNA, 15 bp, Homo sapiens
ctttaaccccttgaa

SEQ ID NO: 247256 - DNA, 15 bp, Homo sapiens
tctttaaccccttga

SEQ ID NO: 247257 - DNA, 15 bp, Homo sapiens
ttctttaaccccttg

SEQ ID NO: 247258 - DNA, 15 bp, Homo sapiens
tttctttaacccctt

SEQ ID NO: 247259 - DNA, 15 bp, Homo sapiens
ttttctttaacccct

SEQ ID NO: 247260 - DNA, 15 bp, Homo sapiens
tttttctttaacccc

SEQ ID NO: 247261 - DNA, 15 bp, Homo sapiens
ttttttctttaaccc

SEQ ID NO: 247262 - DNA, 15 bp, Homo sapiens
tttttttctttaacc

SEQ ID NO: 247263 - DNA, 15 bp, Homo sapiens
ttttttttctttaac

SEQ ID NO: 247264 - DNA, 15 bp, Homo sapiens
attttttttctttaa

SEQ ID NO: 247265 - DNA, 15 bp, Homo sapiens
aattttttttcttta

SEQ ID NO: 247266 - DNA, 15 bp, Homo sapiens
taattttttttcttt

SEQ ID NO: 247267 - DNA, 15 bp, Homo sapiens
ctaattttttttctt

SEQ ID NO: 247268 - DNA, 15 bp, Homo sapiens
gctaattttttttct

SEQ ID NO: 247269 - DNA, 15 bp, Homo sapiens
agctaattttttttc

SEQ ID NO: 247270 - DNA, 15 bp, Homo sapiens
cagctaatttttttt

SEQ ID NO: 247271 - DNA, 15 bp, Homo sapiens
gcaccatgcccagct

SEQ ID NO: 247272 - DNA, 15 bp, Homo sapiens
ggcaccatgcccagc

SEQ ID NO: 247273 - DNA, 15 bp, Homo sapiens
tggcaccatgcccag

SEQ ID NO: 247274 - DNA, 15 bp, Homo sapiens
gtggcaccatgccca

SEQ ID NO: 247275 - DNA, 15 bp, Homo sapiens
tgtggcaccatgccc

SEQ ID NO: 247276 - DNA, 15 bp, Homo sapiens
gtgtggcaccatgcc

SEQ ID NO: 247277 - DNA, 15 bp, Homo sapiens
tgtgtggcaccatgc

SEQ ID NO: 247278 - DNA, 15 bp, Homo sapiens
gtgtgtggcaccatg

SEQ ID NO: 247279 - DNA, 15 bp, Homo sapiens
ggtgtgtggcaccat

SEQ ID NO: 247280 - DNA, 15 bp, Homo sapiens
aggtgtgtggcacca

SEQ ID NO: 247281 - DNA, 15 bp, Homo sapiens
caggtgtgtggcacc

SEQ ID NO: 247282 - DNA, 15 bp, Homo sapiens
acaggtgtgtggcac

SEQ ID NO: 247283 - DNA, 15 bp, Homo sapiens
cacaggtgtgtggca

SEQ ID NO: 247284 - DNA, 15 bp, Homo sapiens
ccacaggtgtgtggc

SEQ ID NO: 247285 - DNA, 15 bp, Homo sapiens
accacaggtgtgtgg

SEQ ID NO: 247286 - DNA, 15 bp, Homo sapiens
gaccacaggtgtgtg

SEQ ID NO: 247287 - DNA, 15 bp, Homo sapiens
ggaccacaggtgtgt

SEQ ID NO: 247288 - DNA, 15 bp, Homo sapiens
gggaccacaggtgtg

SEQ ID NO: 247289 - DNA, 15 bp, Homo sapiens
tgggaccacaggtgt

SEQ ID NO: 247290 - DNA, 15 bp, Homo sapiens
ctgggaccacaggtg

SEQ ID NO: 247291 - DNA, 15 bp, Homo sapiens
gctgggaccacaggt

SEQ ID NO: 247292 - DNA, 15 bp, Homo sapiens
agctgggaccacagg

SEQ ID NO: 247293 - DNA, 15 bp, Homo sapiens
tagctgggaccacag

SEQ ID NO: 247294 - DNA, 15 bp, Homo sapiens
gtagctgggaccaca

SEQ ID NO: 247295 - DNA, 15 bp, Homo sapiens
agtagctgggaccac

SEQ ID NO: 247296 - DNA, 15 bp, Homo sapiens
gagtagctgggacca

SEQ ID NO: 247297 - DNA, 15 bp, Homo sapiens
tgagtagctgggacc

SEQ ID NO: 247298 - DNA, 15 bp, Homo sapiens
tctgagtagctggga

SEQ ID NO: 247299 - DNA, 15 bp, Homo sapiens
ttctgagtagctggg

SEQ ID NO: 247300 - DNA, 15 bp, Homo sapiens
cttctgagtagctgg

SEQ ID NO: 247301 - DNA, 15 bp, Homo sapiens
ccttctgagtagctg

SEQ ID NO: 247302 - DNA, 15 bp, Homo sapiens
gccttctgagtagct

SEQ ID NO: 247303 - DNA, 15 bp, Homo sapiens
agccttctgagtagc

SEQ ID NO: 247304 - DNA, 15 bp, Homo sapiens
cagccttctgagtag

SEQ ID NO: 247305 - DNA, 15 bp, Homo sapiens
tcagccttctgagta

SEQ ID NO: 247306 - DNA, 15 bp, Homo sapiens
ctcagccttctgagt

SEQ ID NO: 247307 - DNA, 15 bp, Homo sapiens
cctcagccttctgag

SEQ ID NO: 247308 - DNA, 15 bp, Homo sapiens
gcctcagccttctga

SEQ ID NO: 247309 - DNA, 15 bp, Homo sapiens
cgcctcagccttctg

SEQ ID NO: 247310 - DNA, 15 bp, Homo sapiens
ccgcctcagccttct

SEQ ID NO: 247311 - DNA, 15 bp, Homo sapiens
cccgcctcagccttc

SEQ ID NO: 247312 - DNA, 15 bp, Homo sapiens
tcccgcctcagcctt

SEQ ID NO: 247313 - DNA, 15 bp, Homo sapiens
ctcccgcctcagcct

SEQ ID NO: 247314 - DNA, 15 bp, Homo sapiens
cctcccgcctcagcc

SEQ ID NO: 247315 - DNA, 15 bp, Homo sapiens
tcctcccgcctcagc

SEQ ID NO: 247316 - DNA, 15 bp, Homo sapiens
atcctcccgcctcag

SEQ ID NO: 247317 - DNA, 15 bp, Homo sapiens
aatcctcccgcctca

SEQ ID NO: 247318 - DNA, 15 bp, Homo sapiens
caatcctcccgcctc

SEQ ID NO: 247319 - DNA, 15 bp, Homo sapiens
gcaatcctcccgcct

SEQ ID NO: 247320 - DNA, 15 bp, Homo sapiens
agcaatcctcccgcc

SEQ ID NO: 247321 - DNA, 15 bp, Homo sapiens
aagcaatcctcccgc

SEQ ID NO: 247322 - DNA, 15 bp, Homo sapiens
caagcaatcctcccg

SEQ ID NO: 247323 - DNA, 15 bp, Homo sapiens
cctcaagcaatcctc

SEQ ID NO: 247324 - DNA, 15 bp, Homo sapiens
ccctcaagcaatcct

SEQ ID NO: 247325 - DNA, 15 bp, Homo sapiens
gccctcaagcaatcc

SEQ ID NO: 247326 - DNA, 15 bp, Homo sapiens
tgccctcaagcaatc

SEQ ID NO: 247327 - DNA, 15 bp, Homo sapiens
ctgccctcaagcaat

SEQ ID NO: 247328 - DNA, 15 bp, Homo sapiens
cctgccctcaagcaa

SEQ ID NO: 247329 - DNA, 15 bp, Homo sapiens
tcctgccctcaagca

SEQ ID NO: 247330 - DNA, 15 bp, Homo sapiens
ctcctgccctcaagc

SEQ ID NO: 247331 - DNA, 15 bp, Homo sapiens
cctcctgccctcaag

SEQ ID NO: 247332 - DNA, 15 bp, Homo sapiens
tcctcctgccctcaa

SEQ ID NO: 247333 - DNA, 15 bp, Homo sapiens
atcctcctgccctca

SEQ ID NO: 247334 - DNA, 15 bp, Homo sapiens
aatcctcctgccctc

SEQ ID NO: 247335 - DNA, 15 bp, Homo sapiens
caatcctcctgccct

SEQ ID NO: 247336 - DNA, 15 bp, Homo sapiens
ccaatcctcctgccc

SEQ ID NO: 247337 - DNA, 15 bp, Homo sapiens
accaatcctcctgcc

SEQ ID NO: 247338 - DNA, 15 bp, Homo sapiens
aaccaatcctcctgc

SEQ ID NO: 247339 - DNA, 15 bp, Homo sapiens
caaccaatcctcctg

SEQ ID NO: 247340 - DNA, 15 bp, Homo sapiens
tcaaccaatcctcct

SEQ ID NO: 247341 - DNA, 15 bp, Homo sapiens
atcaaccaatcctcc

SEQ ID NO: 247342 - DNA, 15 bp, Homo sapiens
gatcaaccaatcctc

SEQ ID NO: 247343 - DNA, 15 bp, Homo sapiens
ggatcaaccaatcct

SEQ ID NO: 247344 - DNA, 15 bp, Homo sapiens
aggatcaaccaatcc

SEQ ID NO: 247345 - DNA, 15 bp, Homo sapiens
gaggatcaaccaatc

SEQ ID NO: 247346 - DNA, 15 bp, Homo sapiens
ggaggatcaaccaat

SEQ ID NO: 247347 - DNA, 15 bp, Homo sapiens
gggaggatcaaccaa

SEQ ID NO: 247348 - DNA, 15 bp, Homo sapiens
tgggaggatcaacca

SEQ ID NO: 247349 - DNA, 15 bp, Homo sapiens
gtgggaggatcaacc

SEQ ID NO: 247350 - DNA, 15 bp, Homo sapiens
ggtgggaggatcaac

SEQ ID NO: 247351 - DNA, 15 bp, Homo sapiens
aggtgggaggatcaa

SEQ ID NO: 247352 - DNA, 15 bp, Homo sapiens
cggaggctgaggtgg

SEQ ID NO: 247353 - DNA, 15 bp, Homo sapiens
ccggaggctgaggtg

SEQ ID NO: 247354 - DNA, 15 bp, Homo sapiens
tccggaggctgaggt

SEQ ID NO: 247355 - DNA, 15 bp, Homo sapiens
ctccggaggctgagg

SEQ ID NO: 247356 - DNA, 15 bp, Homo sapiens
actccggaggctgag

SEQ ID NO: 247357 - DNA, 15 bp, Homo sapiens
tactccggaggctga

SEQ ID NO: 247358 - DNA, 15 bp, Homo sapiens
ctactccggaggctg

SEQ ID NO: 247359 - DNA, 15 bp, Homo sapiens
gctactccggaggct

SEQ ID NO: 247360 - DNA, 15 bp, Homo sapiens
agctactccggaggc

SEQ ID NO: 247361 - DNA, 15 bp, Homo sapiens
cagctactccggagg

SEQ ID NO: 247362 - DNA, 15 bp, Homo sapiens
ccagctactccggag

SEQ ID NO: 247363 - DNA, 15 bp, Homo sapiens
cccagctactccgga

SEQ ID NO: 247364 - DNA, 15 bp, Homo sapiens
tcccagctactccgg

SEQ ID NO: 247365 - DNA, 15 bp, Homo sapiens
gtcccagctactccg

SEQ ID NO: 247366 - DNA, 15 bp, Homo sapiens
ggtcccagctactcc

SEQ ID NO: 247367 - DNA, 15 bp, Homo sapiens
aggtcccagctactc

SEQ ID NO: 247368 - DNA, 15 bp, Homo sapiens
gaggtcccagctact

SEQ ID NO: 247369 - DNA, 15 bp, Homo sapiens
tgaggtcccagctac

SEQ ID NO: 247370 - DNA, 15 bp, Homo sapiens
ctgaggtcccagcta

SEQ ID NO: 247371 - DNA, 15 bp, Homo sapiens
cctgaggtcccagct

SEQ ID NO: 247372 - DNA, 15 bp, Homo sapiens
acctgaggtcccagc

SEQ ID NO: 247373 - DNA, 15 bp, Homo sapiens
cacctgaggtcccag

SEQ ID NO: 247374 - DNA, 15 bp, Homo sapiens
gcacctgaggtccca

SEQ ID NO: 247375 - DNA, 15 bp, Homo sapiens
tgcacctgaggtccc

SEQ ID NO: 247376 - DNA, 15 bp, Homo sapiens
atgcacctgaggtcc

SEQ ID NO: 247377 - DNA, 15 bp, Homo sapiens
catgcacctgaggtc

SEQ ID NO: 247378 - DNA, 15 bp, Homo sapiens
gcatgcacctgaggt

SEQ ID NO: 247379 - DNA, 15 bp, Homo sapiens
ggcatgcacctgagg

SEQ ID NO: 247380 - DNA, 15 bp, Homo sapiens
tggcatgcacctgag

SEQ ID NO: 247381 - DNA, 15 bp, Homo sapiens
gtggcatgcacctga

SEQ ID NO: 247382 - DNA, 15 bp, Homo sapiens
agtggcatgcacctg

SEQ ID NO: 247383 - DNA, 15 bp, Homo sapiens
tagtggcatgcacct

SEQ ID NO: 247384 - DNA, 15 bp, Homo sapiens
atagtggcatgcacc

SEQ ID NO: 247385 - DNA, 15 bp, Homo sapiens
catagtggcatgcac

SEQ ID NO: 247386 - DNA, 15 bp, Homo sapiens
gcatagtggcatgca

SEQ ID NO: 247387 - DNA, 15 bp, Homo sapiens
ggcatagtggcatgc

SEQ ID NO: 247388 - DNA, 15 bp, Homo sapiens
aggcatagtggcatg

SEQ ID NO: 247389 - DNA, 15 bp, Homo sapiens
caggcatagtggcat

SEQ ID NO: 247390 - DNA, 15 bp, Homo sapiens
ccaggcatagtggca

SEQ ID NO: 247391 - DNA, 15 bp, Homo sapiens
gccaggcatagtggc

SEQ ID NO: 247392 - DNA, 15 bp, Homo sapiens
agccaggcatagtgg

SEQ ID NO: 247393 - DNA, 15 bp, Homo sapiens
tagccaggcatagtg

SEQ ID NO: 247394 - DNA, 15 bp, Homo sapiens
ttagccaggcatagt

SEQ ID NO: 247395 - DNA, 15 bp, Homo sapiens
attagccaggcatag

SEQ ID NO: 247396 - DNA, 15 bp, Homo sapiens
aattagccaggcata

SEQ ID NO: 247397 - DNA, 15 bp, Homo sapiens
gaaaattagccaggc

SEQ ID NO: 247398 - DNA, 15 bp, Homo sapiens
agaaaattagccagg

SEQ ID NO: 247399 - DNA, 15 bp, Homo sapiens
aagaaaattagccag

SEQ ID NO: 247400 - DNA, 15 bp, Homo sapiens
aaagaaaattagcca

SEQ ID NO: 247401 - DNA, 15 bp, Homo sapiens
aaaagaaaattagcc

SEQ ID NO: 247402 - DNA, 15 bp, Homo sapiens
aaaaagaaaattagc

SEQ ID NO: 247403 - DNA, 15 bp, Homo sapiens
aaaaaagaaaattag

SEQ ID NO: 247404 - DNA, 15 bp, Homo sapiens
gaaaaaagaaaatta

SEQ ID NO: 247405 - DNA, 15 bp, Homo sapiens
agaaaaaagaaaatt

SEQ ID NO: 247406 - DNA, 15 bp, Homo sapiens
aagaaaaaagaaaat

SEQ ID NO: 247407 - DNA, 15 bp, Homo sapiens
aaagaaaaaagaaaa

SEQ ID NO: 247408 - DNA, 15 bp, Homo sapiens
aaaagaaaaaagaaa

SEQ ID NO: 247409 - DNA, 15 bp, Homo sapiens
aaaaagaaaaaagaa

SEQ ID NO: 247410 - DNA, 15 bp, Homo sapiens
aaaaaagaaaaaaga

SEQ ID NO: 247411 - DNA, 15 bp, Homo sapiens
aaaaaaagaaaaaag

SEQ ID NO: 247412 - DNA, 15 bp, Homo sapiens
gaaaaaaaaaaaaaa

SEQ ID NO: 247413 - DNA, 15 bp, Homo sapiens
cgaaaaaaaaaaaaa

SEQ ID NO: 247414 - DNA, 15 bp, Homo sapiens
tcgaaaaaaaaaaaa

SEQ ID NO: 247415 - DNA, 15 bp, Homo sapiens
ctcgaaaaaaaaaaa

SEQ ID NO: 247416 - DNA, 15 bp, Homo sapiens
tctcgaaaaaaaaaa

SEQ ID NO: 247417 - DNA, 15 bp, Homo sapiens
gtctcgaaaaaaaaa

SEQ ID NO: 247418 - DNA, 15 bp, Homo sapiens
cgtctcgaaaaaaaa

SEQ ID NO: 247419 - DNA, 15 bp, Homo sapiens
ccgtctcgaaaaaaa

SEQ ID NO: 247420 - DNA, 15 bp, Homo sapiens
tccgtctcgaaaaaa

SEQ ID NO: 247421 - DNA, 15 bp, Homo sapiens
ctccgtctcgaaaaa

SEQ ID NO: 247422 - DNA, 15 bp, Homo sapiens
actccgtctcgaaaa

SEQ ID NO: 247423 - DNA, 15 bp, Homo sapiens
gactccgtctcgaaa

SEQ ID NO: 247424 - DNA, 15 bp, Homo sapiens
agactccgtctcgaa

SEQ ID NO: 247425 - DNA, 15 bp, Homo sapiens
gagactccgtctcga

SEQ ID NO: 247426 - DNA, 15 bp, Homo sapiens
cgagactccgtctcg

SEQ ID NO: 247427 - DNA, 15 bp, Homo sapiens
ctgccactgcactcc

SEQ ID NO: 247428 - DNA, 15 bp, Homo sapiens
cctgccactgcactc

SEQ ID NO: 247429 - DNA, 15 bp, Homo sapiens
tcctgccactgcact

SEQ ID NO: 247430 - DNA, 15 bp, Homo sapiens
atcctgccactgcac

SEQ ID NO: 247431 - DNA, 15 bp, Homo sapiens
gatcctgccactgca

SEQ ID NO: 247432 - DNA, 15 bp, Homo sapiens
agatcctgccactgc

SEQ ID NO: 247433 - DNA, 15 bp, Homo sapiens
gagatcctgccactg

SEQ ID NO: 247434 - DNA, 15 bp, Homo sapiens
cgagatcctgccact

SEQ ID NO: 247435 - DNA, 15 bp, Homo sapiens
ccgagatcctgccac

SEQ ID NO: 247436 - DNA, 15 bp, Homo sapiens
agtgagccgagatcc

SEQ ID NO: 247437 - DNA, 15 bp, Homo sapiens
cgggaggcggagctt

SEQ ID NO: 247438 - DNA, 15 bp, Homo sapiens
ccgggaggcggagct

SEQ ID NO: 247439 - DNA, 15 bp, Homo sapiens
cccgggaggcggagc

SEQ ID NO: 247440 - DNA, 15 bp, Homo sapiens
gtgaacccgggaggc

SEQ ID NO: 247441 - DNA, 15 bp, Homo sapiens
ggggaggctgaggca

SEQ ID NO: 247442 - DNA, 15 bp, Homo sapiens
tggggaggctgaggc

SEQ ID NO: 247443 - DNA, 15 bp, Homo sapiens
ctggggaggctgagg

SEQ ID NO: 247444 - DNA, 15 bp, Homo sapiens
actggggaggctgag

SEQ ID NO: 247445 - DNA, 15 bp, Homo sapiens
tactggggaggctga

SEQ ID NO: 247446 - DNA, 15 bp, Homo sapiens
ctactggggaggctg

SEQ ID NO: 247447 - DNA, 15 bp, Homo sapiens
gctactggggaggct

SEQ ID NO: 247448 - DNA, 15 bp, Homo sapiens
agctactggggaggc

SEQ ID NO: 247449 - DNA, 15 bp, Homo sapiens
cagctactggggagg

SEQ ID NO: 247450 - DNA, 15 bp, Homo sapiens
ccagctactggggag

SEQ ID NO: 247451 - DNA, 15 bp, Homo sapiens
cccagctactgggga

SEQ ID NO: 247452 - DNA, 15 bp, Homo sapiens
tcccagctactgggg

SEQ ID NO: 247453 - DNA, 15 bp, Homo sapiens
gtcccagctactggg

SEQ ID NO: 247454 - DNA, 15 bp, Homo sapiens
agtcccagctactgg

SEQ ID NO: 247455 - DNA, 15 bp, Homo sapiens
tagtcccagctactg

SEQ ID NO: 247456 - DNA, 15 bp, Homo sapiens
tcctgtagtcccagc

SEQ ID NO: 247457 - DNA, 15 bp, Homo sapiens
ctcctgtagtcccag

SEQ ID NO: 247458 - DNA, 15 bp, Homo sapiens
gctcctgtagtccca

SEQ ID NO: 247459 - DNA, 15 bp, Homo sapiens
ggctcctgtagtccc

SEQ ID NO: 247460 - DNA, 15 bp, Homo sapiens
gggctcctgtagtcc

SEQ ID NO: 247461 - DNA, 15 bp, Homo sapiens
cgggctcctgtagtc

SEQ ID NO: 247462 - DNA, 15 bp, Homo sapiens
gcgggctcctgtagt

SEQ ID NO: 247463 - DNA, 15 bp, Homo sapiens
ggcgggctcctgtag

SEQ ID NO: 247464 - DNA, 15 bp, Homo sapiens
tggcgggctcctgta

SEQ ID NO: 247465 - DNA, 15 bp, Homo sapiens
gtggcgggctcctgt

SEQ ID NO: 247466 - DNA, 15 bp, Homo sapiens
agtggcgggctcctg

SEQ ID NO: 247467 - DNA, 15 bp, Homo sapiens
cagtggcgggctcct

SEQ ID NO: 247468 - DNA, 15 bp, Homo sapiens
gcagtggcgggctcc

SEQ ID NO: 247469 - DNA, 15 bp, Homo sapiens
tgcagtggcgggctc

SEQ ID NO: 247470 - DNA, 15 bp, Homo sapiens
gtgcagtggcgggct

SEQ ID NO: 247471 - DNA, 15 bp, Homo sapiens
ggtgcagtggcgggc

SEQ ID NO: 247472 - DNA, 15 bp, Homo sapiens
tggtgcagtggcggg

SEQ ID NO: 247473 - DNA, 15 bp, Homo sapiens
ctggtgcagtggcgg

SEQ ID NO: 247474 - DNA, 15 bp, Homo sapiens
cctggtgcagtggcg

SEQ ID NO: 247475 - DNA, 15 bp, Homo sapiens
gcctggtgcagtggc

SEQ ID NO: 247476 - DNA, 15 bp, Homo sapiens
ggcctggtgcagtgg

SEQ ID NO: 247477 - DNA, 15 bp, Homo sapiens
tggcctggtgcagtg

SEQ ID NO: 247478 - DNA, 15 bp, Homo sapiens
ttggcctggtgcagt

SEQ ID NO: 247479 - DNA, 15 bp, Homo sapiens
attggcctggtgcag

SEQ ID NO: 247480 - DNA, 15 bp, Homo sapiens
aattggcctggtgca

SEQ ID NO: 247481 - DNA, 15 bp, Homo sapiens
aaattggcctggtgc

SEQ ID NO: 247482 - DNA, 15 bp, Homo sapiens
aaaattggcctggtg

SEQ ID NO: 247483 - DNA, 15 bp, Homo sapiens
aaaaattggcctggt

SEQ ID NO: 247484 - DNA, 15 bp, Homo sapiens
aaaaaattggcctgg

SEQ ID NO: 247485 - DNA, 15 bp, Homo sapiens
aaaaaaattggcctg

SEQ ID NO: 247486 - DNA, 15 bp, Homo sapiens
caaaaaaattggcct

SEQ ID NO: 247487 - DNA, 15 bp, Homo sapiens
atacaaaaaaattgg

SEQ ID NO: 247488 - DNA, 15 bp, Homo sapiens
aatacaaaaaaattg

SEQ ID NO: 247489 - DNA, 15 bp, Homo sapiens
agtgaaaccccgtct

SEQ ID NO: 247490 - DNA, 15 bp, Homo sapiens
cagtgaaaccccgtc

SEQ ID NO: 247491 - DNA, 15 bp, Homo sapiens
acagtgaaaccccgt

SEQ ID NO: 247492 - DNA, 15 bp, Homo sapiens
cacagtgaaaccccg

SEQ ID NO: 247493 - DNA, 15 bp, Homo sapiens
ctaacacagtgaaac

SEQ ID NO: 247494 - DNA, 15 bp, Homo sapiens
gctaacacagtgaaa

SEQ ID NO: 247495 - DNA, 15 bp, Homo sapiens
ggctaacacagtgaa

SEQ ID NO: 247496 - DNA, 15 bp, Homo sapiens
tggctaacacagtga

SEQ ID NO: 247497 - DNA, 15 bp, Homo sapiens
ctggctaacacagtg

SEQ ID NO: 247498 - DNA, 15 bp, Homo sapiens
cctggctaacacagt

SEQ ID NO: 247499 - DNA, 15 bp, Homo sapiens
tcctggctaacacag

SEQ ID NO: 247500 - DNA, 15 bp, Homo sapiens
atcctggctaacaca

SEQ ID NO: 247501 - DNA, 15 bp, Homo sapiens
catcctggctaacac

SEQ ID NO: 247502 - DNA, 15 bp, Homo sapiens
agtcaggagatcgag

SEQ ID NO: 247503 - DNA, 15 bp, Homo sapiens
aagtcaggagatcga

SEQ ID NO: 247504 - DNA, 15 bp, Homo sapiens
gaagtcaggagatcg

SEQ ID NO: 247505 - DNA, 15 bp, Homo sapiens
cgaagtcaggagatc

SEQ ID NO: 247506 - DNA, 15 bp, Homo sapiens
acgaagtcaggagat

SEQ ID NO: 247507 - DNA, 15 bp, Homo sapiens
cacgaagtcaggaga

SEQ ID NO: 247508 - DNA, 15 bp, Homo sapiens
tcacgaagtcaggag

SEQ ID NO: 247509 - DNA, 15 bp, Homo sapiens
atcacgaagtcagga

SEQ ID NO: 247510 - DNA, 15 bp, Homo sapiens
gatcacgaagtcagg

SEQ ID NO: 247511 - DNA, 15 bp, Homo sapiens
ggatcacgaagtcag

SEQ ID NO: 247512 - DNA, 15 bp, Homo sapiens
cggatcacgaagtca

SEQ ID NO: 247513 - DNA, 15 bp, Homo sapiens
gcggatcacgaagtc

SEQ ID NO: 247514 - DNA, 15 bp, Homo sapiens
ggcggatcacgaagt

SEQ ID NO: 247515 - DNA, 15 bp, Homo sapiens
gggcggatcacgaag

SEQ ID NO: 247516 - DNA, 15 bp, Homo sapiens
tgggcggatcacgaa

SEQ ID NO: 247517 - DNA, 15 bp, Homo sapiens
gtgggcggatcacga

SEQ ID NO: 247518 - DNA, 15 bp, Homo sapiens
ggtgggcggatcacg

SEQ ID NO: 247519 - DNA, 15 bp, Homo sapiens
aaggccgaggtgggc

SEQ ID NO: 247520 - DNA, 15 bp, Homo sapiens
gaaggccgaggtggg

SEQ ID NO: 247521 - DNA, 15 bp, Homo sapiens
ggaaggccgaggtgg

SEQ ID NO: 247522 - DNA, 15 bp, Homo sapiens
tggaaggccgaggtg

SEQ ID NO: 247523 - DNA, 15 bp, Homo sapiens
ttggaaggccgaggt

SEQ ID NO: 247524 - DNA, 15 bp, Homo sapiens
tttggaaggccgagg

SEQ ID NO: 247525 - DNA, 15 bp, Homo sapiens
ctttggaaggccgag

SEQ ID NO: 247526 - DNA, 15 bp, Homo sapiens
actttggaaggccga

SEQ ID NO: 247527 - DNA, 15 bp, Homo sapiens
cactttggaaggccg

SEQ ID NO: 247528 - DNA, 15 bp, Homo sapiens
gagcactttggaagg

SEQ ID NO: 247529 - DNA, 15 bp, Homo sapiens
cgagcactttggaag

SEQ ID NO: 247530 - DNA, 15 bp, Homo sapiens
ccgagcactttggaa

SEQ ID NO: 247531 - DNA, 15 bp, Homo sapiens
tccgagcactttgga

SEQ ID NO: 247532 - DNA, 15 bp, Homo sapiens
atccgagcactttgg

SEQ ID NO: 247533 - DNA, 15 bp, Homo sapiens
aatccgagcactttg

SEQ ID NO: 247534 - DNA, 15 bp, Homo sapiens
taatccgagcacttt

SEQ ID NO: 247535 - DNA, 15 bp, Homo sapiens
gtaatccgagcactt

SEQ ID NO: 247536 - DNA, 15 bp, Homo sapiens
tgtaatccgagcact

SEQ ID NO: 247537 - DNA, 15 bp, Homo sapiens
ctgtaatccgagcac

SEQ ID NO: 247538 - DNA, 15 bp, Homo sapiens
cctgtaatccgagca

SEQ ID NO: 247539 - DNA, 15 bp, Homo sapiens
gcctgtaatccgagc

SEQ ID NO: 247540 - DNA, 15 bp, Homo sapiens
cgcctgtaatccgag

SEQ ID NO: 247541 - DNA, 15 bp, Homo sapiens
acgcctgtaatccga

SEQ ID NO: 247542 - DNA, 15 bp, Homo sapiens
cacgcctgtaatccg

SEQ ID NO: 247543 - DNA, 15 bp, Homo sapiens
cgcagtggctcacgc

SEQ ID NO: 247544 - DNA, 15 bp, Homo sapiens
gcgcagtggctcacg

SEQ ID NO: 247545 - DNA, 15 bp, Homo sapiens
tgggcgcagtggctc

SEQ ID NO: 247546 - DNA, 15 bp, Homo sapiens
ctgggcgcagtggct

SEQ ID NO: 247547 - DNA, 15 bp, Homo sapiens
gctgggcgcagtggc

SEQ ID NO: 247548 - DNA, 15 bp, Homo sapiens
ggctgggcgcagtgg

SEQ ID NO: 247549 - DNA, 15 bp, Homo sapiens
cggctgggcgcagtg

SEQ ID NO: 247550 - DNA, 15 bp, Homo sapiens
gcggctgggcgcagt

SEQ ID NO: 247551 - DNA, 15 bp, Homo sapiens
agcggctgggcgcag

SEQ ID NO: 247552 - DNA, 15 bp, Homo sapiens
tagcggctgggcgca

SEQ ID NO: 247553 - DNA, 15 bp, Homo sapiens
ttagcggctgggcgc

SEQ ID NO: 247554 - DNA, 15 bp, Homo sapiens
attagcggctgggcg

SEQ ID NO: 247555 - DNA, 15 bp, Homo sapiens
aattagcggctgggc

SEQ ID NO: 247556 - DNA, 15 bp, Homo sapiens
aaattagcggctggg

SEQ ID NO: 247557 - DNA, 15 bp, Homo sapiens
aaaattagcggctgg

SEQ ID NO: 247558 - DNA, 15 bp, Homo sapiens
gaaaattagcggctg

SEQ ID NO: 247559 - DNA, 15 bp, Homo sapiens
tgaaaattagcggct

SEQ ID NO: 247560 - DNA, 15 bp, Homo sapiens
atgaaaattagcggc

SEQ ID NO: 247561 - DNA, 15 bp, Homo sapiens
tatgaaaattagcgg

SEQ ID NO: 247562 - DNA, 15 bp, Homo sapiens
atatgaaaattagcg

SEQ ID NO: 247563 - DNA, 15 bp, Homo sapiens
aatatgaaaattagc

SEQ ID NO: 247564 - DNA, 15 bp, Homo sapiens
aaatatgaaaattag

SEQ ID NO: 247565 - DNA, 15 bp, Homo sapiens
aaaatatgaaaatta

SEQ ID NO: 247566 - DNA, 15 bp, Homo sapiens
aaaaatatgaaaatt

SEQ ID NO: 247567 - DNA, 15 bp, Homo sapiens
taaaaatatgaaaat

SEQ ID NO: 247568 - DNA, 15 bp, Homo sapiens
ctaaaaatatgaaaa

SEQ ID NO: 247569 - DNA, 15 bp, Homo sapiens
actaaaaatatgaaa

SEQ ID NO: 247570 - DNA, 15 bp, Homo sapiens
tactaaaaatatgaa

SEQ ID NO: 247571 - DNA, 15 bp, Homo sapiens
ttactaaaaatatga

SEQ ID NO: 247572 - DNA, 15 bp, Homo sapiens
tttactaaaaatatg

SEQ ID NO: 247573 - DNA, 15 bp, Homo sapiens
ttttactaaaaatat

SEQ ID NO: 247574 - DNA, 15 bp, Homo sapiens
tttttactaaaaata

SEQ ID NO: 247575 - DNA, 15 bp, Homo sapiens
gtttttactaaaaat

SEQ ID NO: 247576 - DNA, 15 bp, Homo sapiens
tgtttttactaaaaa

SEQ ID NO: 247577 - DNA, 15 bp, Homo sapiens
ctgtttttactaaaa

SEQ ID NO: 247578 - DNA, 15 bp, Homo sapiens
cctgtttttactaaa

SEQ ID NO: 247579 - DNA, 15 bp, Homo sapiens
ccctgtttttactaa

SEQ ID NO: 247580 - DNA, 15 bp, Homo sapiens
accctgtttttacta

SEQ ID NO: 247581 - DNA, 15 bp, Homo sapiens
aaccctgtttttact

SEQ ID NO: 247582 - DNA, 15 bp, Homo sapiens
aaaccctgtttttac

SEQ ID NO: 247583 - DNA, 15 bp, Homo sapiens
gaaaccctgttttta

SEQ ID NO: 247584 - DNA, 15 bp, Homo sapiens
tgaaaccctgttttt

SEQ ID NO: 247585 - DNA, 15 bp, Homo sapiens
gtgaaaccctgtttt

SEQ ID NO: 247586 - DNA, 15 bp, Homo sapiens
ggtgaaaccctgttt

SEQ ID NO: 247587 - DNA, 15 bp, Homo sapiens
tggtgaaaccctgtt

SEQ ID NO: 247588 - DNA, 15 bp, Homo sapiens
atggtgaaaccctgt

SEQ ID NO: 247589 - DNA, 15 bp, Homo sapiens
catggtgaaaccctg

SEQ ID NO: 247590 - DNA, 15 bp, Homo sapiens
acatggtgaaaccct

SEQ ID NO: 247591 - DNA, 15 bp, Homo sapiens
tagcctggccaacat

SEQ ID NO: 247592 - DNA, 15 bp, Homo sapiens
ctagcctggccaaca

SEQ ID NO: 247593 - DNA, 15 bp, Homo sapiens
actagcctggccaac

SEQ ID NO: 247594 - DNA, 15 bp, Homo sapiens
gactagcctggccaa

SEQ ID NO: 247595 - DNA, 15 bp, Homo sapiens
agactagcctggcca

SEQ ID NO: 247596 - DNA, 15 bp, Homo sapiens
aagactagcctggcc

SEQ ID NO: 247597 - DNA, 15 bp, Homo sapiens
caagactagcctggc

SEQ ID NO: 247598 - DNA, 15 bp, Homo sapiens
ttcaggagttcaaga

SEQ ID NO: 247599 - DNA, 15 bp, Homo sapiens
gttcaggagttcaag

SEQ ID NO: 247600 - DNA, 15 bp, Homo sapiens
ggttcaggagttcaa

SEQ ID NO: 247601 - DNA, 15 bp, Homo sapiens
gggttcaggagttca

SEQ ID NO: 247602 - DNA, 15 bp, Homo sapiens
tgggttcaggagttc

SEQ ID NO: 247603 - DNA, 15 bp, Homo sapiens
ttgggttcaggagtt

SEQ ID NO: 247604 - DNA, 15 bp, Homo sapiens
cttgggttcaggagt

SEQ ID NO: 247605 - DNA, 15 bp, Homo sapiens
acttgggttcaggag

SEQ ID NO: 247606 - DNA, 15 bp, Homo sapiens
cacttgggttcagga

SEQ ID NO: 247607 - DNA, 15 bp, Homo sapiens
tcacttgggttcagg

SEQ ID NO: 247608 - DNA, 15 bp, Homo sapiens
atcacttgggttcag

SEQ ID NO: 247609 - DNA, 15 bp, Homo sapiens
gatcacttgggttca

SEQ ID NO: 247610 - DNA, 15 bp, Homo sapiens
ggatcacttgggttc

SEQ ID NO: 247611 - DNA, 15 bp, Homo sapiens
aggatcacttgggtt

SEQ ID NO: 247612 - DNA, 15 bp, Homo sapiens
gaggatcacttgggt

SEQ ID NO: 247613 - DNA, 15 bp, Homo sapiens
ggaggatcacttggg

SEQ ID NO: 247614 - DNA, 15 bp, Homo sapiens
aggaggatcacttgg

SEQ ID NO: 247615 - DNA, 15 bp, Homo sapiens
caggaggatcacttg

SEQ ID NO: 247616 - DNA, 15 bp, Homo sapiens
gcaggaggatcactt

SEQ ID NO: 247617 - DNA, 15 bp, Homo sapiens
ggcaggaggatcact

SEQ ID NO: 247618 - DNA, 15 bp, Homo sapiens
aggcaggaggatcac

SEQ ID NO: 247619 - DNA, 15 bp, Homo sapiens
aaggcaggaggatca

SEQ ID NO: 247620 - DNA, 15 bp, Homo sapiens
caaggcaggaggatc

SEQ ID NO: 247621 - DNA, 15 bp, Homo sapiens
tctgtaatcccagca

SEQ ID NO: 247622 - DNA, 15 bp, Homo sapiens
gtctgtaatcccagc

SEQ ID NO: 247623 - DNA, 15 bp, Homo sapiens
tgtctgtaatcccag

SEQ ID NO: 247624 - DNA, 15 bp, Homo sapiens
gtgtctgtaatccca

SEQ ID NO: 247625 - DNA, 15 bp, Homo sapiens
ggtgtctgtaatccc

SEQ ID NO: 247626 - DNA, 15 bp, Homo sapiens
tggtgtctgtaatcc

SEQ ID NO: 247627 - DNA, 15 bp, Homo sapiens
gtggtgtctgtaatc

SEQ ID NO: 247628 - DNA, 15 bp, Homo sapiens
tgtggtgtctgtaat

SEQ ID NO: 247629 - DNA, 15 bp, Homo sapiens
gtgtggtgtctgtaa

SEQ ID NO: 247630 - DNA, 15 bp, Homo sapiens
ggtgtggtgtctgta

SEQ ID NO: 247631 - DNA, 15 bp, Homo sapiens
aggtgtggtgtctgt

SEQ ID NO: 247632 - DNA, 15 bp, Homo sapiens
caggtgtggtgtctg

SEQ ID NO: 247633 - DNA, 15 bp, Homo sapiens
ccaggtgtggtgtct

SEQ ID NO: 247634 - DNA, 15 bp, Homo sapiens
gccaggtgtggtgtc

SEQ ID NO: 247635 - DNA, 15 bp, Homo sapiens
agccaggtgtggtgt

SEQ ID NO: 247636 - DNA, 15 bp, Homo sapiens
atagccaggtgtggt

SEQ ID NO: 247637 - DNA, 15 bp, Homo sapiens
aatagccaggtgtgg

SEQ ID NO: 247638 - DNA, 15 bp, Homo sapiens
taatagccaggtgtg

SEQ ID NO: 247639 - DNA, 15 bp, Homo sapiens
ataatagccaggtgt

SEQ ID NO: 247640 - DNA, 15 bp, Homo sapiens
aataatagccaggtg

SEQ ID NO: 247641 - DNA, 15 bp, Homo sapiens
taataatagccaggt

SEQ ID NO: 247642 - DNA, 15 bp, Homo sapiens
ataataatagccagg

SEQ ID NO: 247643 - DNA, 15 bp, Homo sapiens
aataataatagccag

SEQ ID NO: 247644 - DNA, 15 bp, Homo sapiens
aaataataatagcca

SEQ ID NO: 247645 - DNA, 15 bp, Homo sapiens
aaaataataatagcc

SEQ ID NO: 247646 - DNA, 15 bp, Homo sapiens
aaaaataataatagc

SEQ ID NO: 247647 - DNA, 15 bp, Homo sapiens
aaaaaataataatag

SEQ ID NO: 247648 - DNA, 15 bp, Homo sapiens
taaaaaataataata

SEQ ID NO: 247649 - DNA, 15 bp, Homo sapiens
ctaaaaaataataat

SEQ ID NO: 247650 - DNA, 15 bp, Homo sapiens
tctaaaaaataataa

SEQ ID NO: 247651 - DNA, 15 bp, Homo sapiens
ctctaaaaaataata

SEQ ID NO: 247652 - DNA, 15 bp, Homo sapiens
tctctaaaaaataat

SEQ ID NO: 247653 - DNA, 15 bp, Homo sapiens
gtctctaaaaaataa

SEQ ID NO: 247654 - DNA, 15 bp, Homo sapiens
tgtctctaaaaaata

SEQ ID NO: 247655 - DNA, 15 bp, Homo sapiens
ctgtctctaaaaaat

SEQ ID NO: 247656 - DNA, 15 bp, Homo sapiens
cctgtctctaaaaaa

SEQ ID NO: 247657 - DNA, 15 bp, Homo sapiens
ccctgtctctaaaaa

SEQ ID NO: 247658 - DNA, 15 bp, Homo sapiens
accctgtctctaaaa

SEQ ID NO: 247659 - DNA, 15 bp, Homo sapiens
caccctgtctctaaa

SEQ ID NO: 247660 - DNA, 15 bp, Homo sapiens
gcaccctgtctctaa

SEQ ID NO: 247661 - DNA, 15 bp, Homo sapiens
agcaccctgtctcta

SEQ ID NO: 247662 - DNA, 15 bp, Homo sapiens
cagcaccctgtctct

SEQ ID NO: 247663 - DNA, 15 bp, Homo sapiens
gcagcaccctgtctc

SEQ ID NO: 247664 - DNA, 15 bp, Homo sapiens
agcagcaccctgtct

SEQ ID NO: 247665 - DNA, 15 bp, Homo sapiens
gagcagcaccctgtc

SEQ ID NO: 247666 - DNA, 15 bp, Homo sapiens
agagcagcaccctgt

SEQ ID NO: 247667 - DNA, 15 bp, Homo sapiens
tagagcagcaccctg

SEQ ID NO: 247668 - DNA, 15 bp, Homo sapiens
atagagcagcaccct

SEQ ID NO: 247669 - DNA, 15 bp, Homo sapiens
gatagagcagcaccc

SEQ ID NO: 247670 - DNA, 15 bp, Homo sapiens
agatagagcagcacc

SEQ ID NO: 247671 - DNA, 15 bp, Homo sapiens
aagatagagcagcac

SEQ ID NO: 247672 - DNA, 15 bp, Homo sapiens
gaagatagagcagca

SEQ ID NO: 247673 - DNA, 15 bp, Homo sapiens
ggaagatagagcagc

SEQ ID NO: 247674 - DNA, 15 bp, Homo sapiens
tggaagatagagcag

SEQ ID NO: 247675 - DNA, 15 bp, Homo sapiens
ctggaagatagagca

SEQ ID NO: 247676 - DNA, 15 bp, Homo sapiens
gctggaagatagagc

SEQ ID NO: 247677 - DNA, 15 bp, Homo sapiens
ggctggaagatagag

SEQ ID NO: 247678 - DNA, 15 bp, Homo sapiens
aggctggaagataga

SEQ ID NO: 247679 - DNA, 15 bp, Homo sapiens
caggctggaagatag

SEQ ID NO: 247680 - DNA, 15 bp, Homo sapiens
acaggctggaagata

SEQ ID NO: 247681 - DNA, 15 bp, Homo sapiens
tacaggctggaagat

SEQ ID NO: 247682 - DNA, 15 bp, Homo sapiens
ctacaggctggaaga

SEQ ID NO: 247683 - DNA, 15 bp, Homo sapiens
actacaggctggaag

SEQ ID NO: 247684 - DNA, 15 bp, Homo sapiens
cactacaggctggaa

SEQ ID NO: 247685 - DNA, 15 bp, Homo sapiens
gcactacaggctgga

SEQ ID NO: 247686 - DNA, 15 bp, Homo sapiens
tgcactacaggctgg

SEQ ID NO: 247687 - DNA, 15 bp, Homo sapiens
ctgcactacaggctg

SEQ ID NO: 247688 - DNA, 15 bp, Homo sapiens
actgcactacaggct

SEQ ID NO: 247689 - DNA, 15 bp, Homo sapiens
cactgcactacaggc

SEQ ID NO: 247690 - DNA, 15 bp, Homo sapiens
gcactgcactacagg

SEQ ID NO: 247691 - DNA, 15 bp, Homo sapiens
tgcactgcactacag

SEQ ID NO: 247692 - DNA, 15 bp, Homo sapiens
ctgcactgcactaca

SEQ ID NO: 247693 - DNA, 15 bp, Homo sapiens
gctgcactgcactac

SEQ ID NO: 247694 - DNA, 15 bp, Homo sapiens
ggctgcactgcacta

SEQ ID NO: 247695 - DNA, 15 bp, Homo sapiens
aggctgcactgcact

SEQ ID NO: 247696 - DNA, 15 bp, Homo sapiens
gaggctgcactgcac

SEQ ID NO: 247697 - DNA, 15 bp, Homo sapiens
ggaggctgcactgca

SEQ ID NO: 247698 - DNA, 15 bp, Homo sapiens
tggaggctgcactgc

SEQ ID NO: 247699 - DNA, 15 bp, Homo sapiens
atggaggctgcactg

SEQ ID NO: 247700 - DNA, 15 bp, Homo sapiens
gatggaggctgcact

SEQ ID NO: 247701 - DNA, 15 bp, Homo sapiens
tgatggaggctgcac

SEQ ID NO: 247702 - DNA, 15 bp, Homo sapiens
atgatggaggctgca

SEQ ID NO: 247703 - DNA, 15 bp, Homo sapiens
tatgatggaggctgc

SEQ ID NO: 247704 - DNA, 15 bp, Homo sapiens
ctatgatggaggctg

SEQ ID NO: 247705 - DNA, 15 bp, Homo sapiens
gctatgatggaggct

SEQ ID NO: 247706 - DNA, 15 bp, Homo sapiens
agctatgatggaggc

SEQ ID NO: 247707 - DNA, 15 bp, Homo sapiens
gagctatgatggagg

SEQ ID NO: 247708 - DNA, 15 bp, Homo sapiens
cgagctatgatggag

SEQ ID NO: 247709 - DNA, 15 bp, Homo sapiens
gcgagctatgatgga

SEQ ID NO: 247710 - DNA, 15 bp, Homo sapiens
agcgagctatgatgg

SEQ ID NO: 247711 - DNA, 15 bp, Homo sapiens
cagcgagctatgatg

SEQ ID NO: 247712 - DNA, 15 bp, Homo sapiens
gcagcgagctatgat

SEQ ID NO: 247713 - DNA, 15 bp, Homo sapiens
tgcagcgagctatga

SEQ ID NO: 247714 - DNA, 15 bp, Homo sapiens
ctgcagcgagctatg

SEQ ID NO: 247715 - DNA, 15 bp, Homo sapiens
gctgcagcgagctat

SEQ ID NO: 247716 - DNA, 15 bp, Homo sapiens
ggctgcagcgagcta

SEQ ID NO: 247717 - DNA, 15 bp, Homo sapiens
aggctgcagcgagct

SEQ ID NO: 247718 - DNA, 15 bp, Homo sapiens
aaggctgcagcgagc

SEQ ID NO: 247719 - DNA, 15 bp, Homo sapiens
caaggctgcagcgag

SEQ ID NO: 247720 - DNA, 15 bp, Homo sapiens
tcaaggctgcagcga

SEQ ID NO: 247721 - DNA, 15 bp, Homo sapiens
gtcaaggctgcagcg

SEQ ID NO: 247722 - DNA, 15 bp, Homo sapiens
ggtcaaggctgcagc

SEQ ID NO: 247723 - DNA, 15 bp, Homo sapiens
ggaggtcaaggctgc

SEQ ID NO: 247724 - DNA, 15 bp, Homo sapiens
aggaggtcaaggctg

SEQ ID NO: 247725 - DNA, 15 bp, Homo sapiens
caggaggtcaaggct

SEQ ID NO: 247726 - DNA, 15 bp, Homo sapiens
ccaggaggtcaaggc

SEQ ID NO: 247727 - DNA, 15 bp, Homo sapiens
cccaggaggtcaagg

SEQ ID NO: 247728 - DNA, 15 bp, Homo sapiens
acccaggaggtcaag

SEQ ID NO: 247729 - DNA, 15 bp, Homo sapiens
aacccaggaggtcaa

SEQ ID NO: 247730 - DNA, 15 bp, Homo sapiens
gaacccaggaggtca

SEQ ID NO: 247731 - DNA, 15 bp, Homo sapiens
tgaacccaggaggtc

SEQ ID NO: 247732 - DNA, 15 bp, Homo sapiens
gtgaacccaggaggt

SEQ ID NO: 247733 - DNA, 15 bp, Homo sapiens
cgtgaacccaggagg

SEQ ID NO: 247734 - DNA, 15 bp, Homo sapiens
acgtgaacccaggag

SEQ ID NO: 247735 - DNA, 15 bp, Homo sapiens
cacgtgaacccagga

SEQ ID NO: 247736 - DNA, 15 bp, Homo sapiens
tcacgtgaacccagg

SEQ ID NO: 247737 - DNA, 15 bp, Homo sapiens
atcacgtgaacccag

SEQ ID NO: 247738 - DNA, 15 bp, Homo sapiens
gatcacgtgaaccca

SEQ ID NO: 247739 - DNA, 15 bp, Homo sapiens
cgatcacgtgaaccc

SEQ ID NO: 247740 - DNA, 15 bp, Homo sapiens
acgatcacgtgaacc

SEQ ID NO: 247741 - DNA, 15 bp, Homo sapiens
gacgatcacgtgaac

SEQ ID NO: 247742 - DNA, 15 bp, Homo sapiens
ggacgatcacgtgaa

SEQ ID NO: 247743 - DNA, 15 bp, Homo sapiens
gggacgatcacgtga

SEQ ID NO: 247744 - DNA, 15 bp, Homo sapiens
cgggacgatcacgtg

SEQ ID NO: 247745 - DNA, 15 bp, Homo sapiens
gcgggacgatcacgt

SEQ ID NO: 247746 - DNA, 15 bp, Homo sapiens
ggcgggacgatcacg

SEQ ID NO: 247747 - DNA, 15 bp, Homo sapiens
aggcgggacgatcac

SEQ ID NO: 247748 - DNA, 15 bp, Homo sapiens
taggcgggacgatca

SEQ ID NO: 247749 - DNA, 15 bp, Homo sapiens
ttaggcgggacgatc

SEQ ID NO: 247750 - DNA, 15 bp, Homo sapiens
cttaggcgggacgat

SEQ ID NO: 247751 - DNA, 15 bp, Homo sapiens
gcttaggcgggacga

SEQ ID NO: 247752 - DNA, 15 bp, Homo sapiens
ggcttaggcgggacg

SEQ ID NO: 247753 - DNA, 15 bp, Homo sapiens
aggcttaggcgggac

SEQ ID NO: 247754 - DNA, 15 bp, Homo sapiens
gaggcttaggcggga

SEQ ID NO: 247755 - DNA, 15 bp, Homo sapiens
agaggcttaggcggg

SEQ ID NO: 247756 - DNA, 15 bp, Homo sapiens
cagaggcttaggcgg

SEQ ID NO: 247757 - DNA, 15 bp, Homo sapiens
ccagaggcttaggcg

SEQ ID NO: 247758 - DNA, 15 bp, Homo sapiens
tccagaggcttaggc

SEQ ID NO: 247759 - DNA, 15 bp, Homo sapiens
ctccagaggcttagg

SEQ ID NO: 247760 - DNA, 15 bp, Homo sapiens
cctccagaggcttag

SEQ ID NO: 247761 - DNA, 15 bp, Homo sapiens
tcctccagaggctta

SEQ ID NO: 247762 - DNA, 15 bp, Homo sapiens
ctcctccagaggctt

SEQ ID NO: 247763 - DNA, 15 bp, Homo sapiens
gctcctccagaggct

SEQ ID NO: 247764 - DNA, 15 bp, Homo sapiens
agctcctccagaggc

SEQ ID NO: 247765 - DNA, 15 bp, Homo sapiens
cagctcctccagagg

SEQ ID NO: 247766 - DNA, 15 bp, Homo sapiens
ccagctcctccagag

SEQ ID NO: 247767 - DNA, 15 bp, Homo sapiens
cccagctcctccaga

SEQ ID NO: 247768 - DNA, 15 bp, Homo sapiens
tcccagctcctccag

SEQ ID NO: 247769 - DNA, 15 bp, Homo sapiens
ctcccagctcctcca

SEQ ID NO: 247770 - DNA, 15 bp, Homo sapiens
actcccagctcctcc

SEQ ID NO: 247771 - DNA, 15 bp, Homo sapiens
tactcccagctcctc

SEQ ID NO: 247772 - DNA, 15 bp, Homo sapiens
gtactcccagctcct

SEQ ID NO: 247773 - DNA, 15 bp, Homo sapiens
agtactcccagctcc

SEQ ID NO: 247774 - DNA, 15 bp, Homo sapiens
cagtactcccagctc

SEQ ID NO: 247775 - DNA, 15 bp, Homo sapiens
ccagtactcccagct

SEQ ID NO: 247776 - DNA, 15 bp, Homo sapiens
gccagtactcccagc

SEQ ID NO: 247777 - DNA, 15 bp, Homo sapiens
tgccagtactcccag

SEQ ID NO: 247778 - DNA, 15 bp, Homo sapiens
atgccagtactccca

SEQ ID NO: 247779 - DNA, 15 bp, Homo sapiens
catgccagtactccc

SEQ ID NO: 247780 - DNA, 15 bp, Homo sapiens
acatgccagtactcc

SEQ ID NO: 247781 - DNA, 15 bp, Homo sapiens
cacatgccagtactc

SEQ ID NO: 247782 - DNA, 15 bp, Homo sapiens
gcacatgccagtact

SEQ ID NO: 247783 - DNA, 15 bp, Homo sapiens
ggcacatgccagtac

SEQ ID NO: 247784 - DNA, 15 bp, Homo sapiens
tggcacatgccagta

SEQ ID NO: 247785 - DNA, 15 bp, Homo sapiens
gtggcacatgccagt

SEQ ID NO: 247786 - DNA, 15 bp, Homo sapiens
ggtggcacatgccag

SEQ ID NO: 247787 - DNA, 15 bp, Homo sapiens
tggtggcacatgcca

SEQ ID NO: 247788 - DNA, 15 bp, Homo sapiens
atggtggcacatgcc

SEQ ID NO: 247789 - DNA, 15 bp, Homo sapiens
catggtggcacatgc

SEQ ID NO: 247790 - DNA, 15 bp, Homo sapiens
gcatggtggcacatg

SEQ ID NO: 247791 - DNA, 15 bp, Homo sapiens
ggcatggtggcacat

SEQ ID NO: 247792 - DNA, 15 bp, Homo sapiens
aggcatggtggcaca

SEQ ID NO: 247793 - DNA, 15 bp, Homo sapiens
caggcatggtggcac

SEQ ID NO: 247794 - DNA, 15 bp, Homo sapiens
ccaggcatggtggca

SEQ ID NO: 247795 - DNA, 15 bp, Homo sapiens
accaggcatggtggc

SEQ ID NO: 247796 - DNA, 15 bp, Homo sapiens
aaccaggcatggtgg

SEQ ID NO: 247797 - DNA, 15 bp, Homo sapiens
taaccaggcatggtg

SEQ ID NO: 247798 - DNA, 15 bp, Homo sapiens
ttaaccaggcatggt

SEQ ID NO: 247799 - DNA, 15 bp, Homo sapiens
attaaccaggcatgg

SEQ ID NO: 247800 - DNA, 15 bp, Homo sapiens
aattaaccaggcatg

SEQ ID NO: 247801 - DNA, 15 bp, Homo sapiens
aaattaaccaggcat

SEQ ID NO: 247802 - DNA, 15 bp, Homo sapiens
aaaattaaccaggca

SEQ ID NO: 247803 - DNA, 15 bp, Homo sapiens
aaaaattaaccaggc

SEQ ID NO: 247804 - DNA, 15 bp, Homo sapiens
aaaaaattaaccagg

SEQ ID NO: 247805 - DNA, 15 bp, Homo sapiens
aaaaaaattaaccag

SEQ ID NO: 247806 - DNA, 15 bp, Homo sapiens
aaaaaaaattaacca

SEQ ID NO: 247807 - DNA, 15 bp, Homo sapiens
aaaaaaaaattaacc

SEQ ID NO: 247808 - DNA, 15 bp, Homo sapiens
aaaaaaaaaattaac

SEQ ID NO: 247809 - DNA, 15 bp, Homo sapiens
aaaaaaaaaaattaa

SEQ ID NO: 247810 - DNA, 15 bp, Homo sapiens
aaaaaaaaaaaatta

SEQ ID NO: 247811 - DNA, 15 bp, Homo sapiens
atgagactctgtctc

SEQ ID NO: 247812 - DNA, 15 bp, Homo sapiens
aatgagactctgtct

SEQ ID NO: 247813 - DNA, 15 bp, Homo sapiens
gaatgagactctgtc

SEQ ID NO: 247814 - DNA, 15 bp, Homo sapiens
agaatgagactctgt

SEQ ID NO: 247815 - DNA, 15 bp, Homo sapiens
cagaatgagactctg

SEQ ID NO: 247816 - DNA, 15 bp, Homo sapiens
acagaatgagactct

SEQ ID NO: 247817 - DNA, 15 bp, Homo sapiens
gacagaatgagactc

SEQ ID NO: 247818 - DNA, 15 bp, Homo sapiens
tgacagaatgagact

SEQ ID NO: 247819 - DNA, 15 bp, Homo sapiens
gtgacagaatgagac

SEQ ID NO: 247820 - DNA, 15 bp, Homo sapiens
ggtgacagaatgaga

SEQ ID NO: 247821 - DNA, 15 bp, Homo sapiens
gggtgacagaatgag

SEQ ID NO: 247822 - DNA, 15 bp, Homo sapiens
tgggtgacagaatga

SEQ ID NO: 247823 - DNA, 15 bp, Homo sapiens
ctgggtgacagaatg

SEQ ID NO: 247824 - DNA, 15 bp, Homo sapiens
cctgggtgacagaat

SEQ ID NO: 247825 - DNA, 15 bp, Homo sapiens
gcctgggtgacagaa

SEQ ID NO: 247826 - DNA, 15 bp, Homo sapiens
cgcactccagcctgg

SEQ ID NO: 247827 - DNA, 15 bp, Homo sapiens
ccgcactccagcctg

SEQ ID NO: 247828 - DNA, 15 bp, Homo sapiens
accgcactccagcct

SEQ ID NO: 247829 - DNA, 15 bp, Homo sapiens
caccgcactccagcc

SEQ ID NO: 247830 - DNA, 15 bp, Homo sapiens
ccaccgcactccagc

SEQ ID NO: 247831 - DNA, 15 bp, Homo sapiens
accaccgcactccag

SEQ ID NO: 247832 - DNA, 15 bp, Homo sapiens
caccaccgcactcca

SEQ ID NO: 247833 - DNA, 15 bp, Homo sapiens
gcaccaccgcactcc

SEQ ID NO: 247834 - DNA, 15 bp, Homo sapiens
cgcaccaccgcactc

SEQ ID NO: 247835 - DNA, 15 bp, Homo sapiens
tcgcaccaccgcact

SEQ ID NO: 247836 - DNA, 15 bp, Homo sapiens
atcgcaccaccgcac

SEQ ID NO: 247837 - DNA, 15 bp, Homo sapiens
gatcgcaccaccgca

SEQ ID NO: 247838 - DNA, 15 bp, Homo sapiens
agatcgcaccaccgc

SEQ ID NO: 247839 - DNA, 15 bp, Homo sapiens
aagatcgcaccaccg

SEQ ID NO: 247840 - DNA, 15 bp, Homo sapiens
caagatcgcaccacc

SEQ ID NO: 247841 - DNA, 15 bp, Homo sapiens
ccaagatcgcaccac

SEQ ID NO: 247842 - DNA, 15 bp, Homo sapiens
gccaagatcgcacca

SEQ ID NO: 247843 - DNA, 15 bp, Homo sapiens
agccaagatcgcacc

SEQ ID NO: 247844 - DNA, 15 bp, Homo sapiens
aagccaagatcgcac

SEQ ID NO: 247845 - DNA, 15 bp, Homo sapiens
taagccaagatcgca

SEQ ID NO: 247846 - DNA, 15 bp, Homo sapiens
gtaagccaagatcgc

SEQ ID NO: 247847 - DNA, 15 bp, Homo sapiens
agtaagccaagatcg

SEQ ID NO: 247848 - DNA, 15 bp, Homo sapiens
cagtaagccaagatc

SEQ ID NO: 247849 - DNA, 15 bp, Homo sapiens
tcagtaagccaagat

SEQ ID NO: 247850 - DNA, 15 bp, Homo sapiens
ttcagtaagccaaga

SEQ ID NO: 247851 - DNA, 15 bp, Homo sapiens
tttcagtaagccaag

SEQ ID NO: 247852 - DNA, 15 bp, Homo sapiens
gtttcagtaagccaa

SEQ ID NO: 247853 - DNA, 15 bp, Homo sapiens
ggtttcagtaagcca

SEQ ID NO: 247854 - DNA, 15 bp, Homo sapiens
aggtttcagtaagcc

SEQ ID NO: 247855 - DNA, 15 bp, Homo sapiens
gaggtttcagtaagc

SEQ ID NO: 247856 - DNA, 15 bp, Homo sapiens
ggaggtttcagtaag

SEQ ID NO: 247857 - DNA, 15 bp, Homo sapiens
tggaggtttcagtaa

SEQ ID NO: 247858 - DNA, 15 bp, Homo sapiens
gtggaggtttcagta

SEQ ID NO: 247859 - DNA, 15 bp, Homo sapiens
ggtggaggtttcagt

SEQ ID NO: 247860 - DNA, 15 bp, Homo sapiens
aggtggaggtttcag

SEQ ID NO: 247861 - DNA, 15 bp, Homo sapiens
gaggtggaggtttca

SEQ ID NO: 247862 - DNA, 15 bp, Homo sapiens
ggaggtggaggtttc

SEQ ID NO: 247863 - DNA, 15 bp, Homo sapiens
gggaggtggaggttt

SEQ ID NO: 247864 - DNA, 15 bp, Homo sapiens
tgggaggtggaggtt

SEQ ID NO: 247865 - DNA, 15 bp, Homo sapiens
ctgggaggtggaggt

SEQ ID NO: 247866 - DNA, 15 bp, Homo sapiens
cctgggaggtggagg

SEQ ID NO: 247867 - DNA, 15 bp, Homo sapiens
acctgggaggtggag

SEQ ID NO: 247868 - DNA, 15 bp, Homo sapiens
aacctgggaggtgga

SEQ ID NO: 247869 - DNA, 15 bp, Homo sapiens
gaacctgggaggtgg

SEQ ID NO: 247870 - DNA, 15 bp, Homo sapiens
ggaacctgggaggtg

SEQ ID NO: 247871 - DNA, 15 bp, Homo sapiens
tggaacctgggaggt

SEQ ID NO: 247872 - DNA, 15 bp, Homo sapiens
ctggaacctgggagg

SEQ ID NO: 247873 - DNA, 15 bp, Homo sapiens
gctggaacctgggag

SEQ ID NO: 247874 - DNA, 15 bp, Homo sapiens
tgctggaacctggga

SEQ ID NO: 247875 - DNA, 15 bp, Homo sapiens
ttgctggaacctggg

SEQ ID NO: 247876 - DNA, 15 bp, Homo sapiens
attgctggaacctgg

SEQ ID NO: 247877 - DNA, 15 bp, Homo sapiens
aattgctggaacctg

SEQ ID NO: 247878 - DNA, 15 bp, Homo sapiens
gaattgctggaacct

SEQ ID NO: 247879 - DNA, 15 bp, Homo sapiens
gtgaggcaggagaat

SEQ ID NO: 247880 - DNA, 15 bp, Homo sapiens
ggtgaggcaggagaa

SEQ ID NO: 247881 - DNA, 15 bp, Homo sapiens
gggtgaggcaggaga

SEQ ID NO: 247882 - DNA, 15 bp, Homo sapiens
agggtgaggcaggag

SEQ ID NO: 247883 - DNA, 15 bp, Homo sapiens
aagggtgaggcagga

SEQ ID NO: 247884 - DNA, 15 bp, Homo sapiens
gaagggtgaggcagg

SEQ ID NO: 247885 - DNA, 15 bp, Homo sapiens
agaagggtgaggcag

SEQ ID NO: 247886 - DNA, 15 bp, Homo sapiens
cagaagggtgaggca

SEQ ID NO: 247887 - DNA, 15 bp, Homo sapiens
tcagaagggtgaggc

SEQ ID NO: 247888 - DNA, 15 bp, Homo sapiens
ctcagaagggtgagg

SEQ ID NO: 247889 - DNA, 15 bp, Homo sapiens
actcagaagggtgag

SEQ ID NO: 247890 - DNA, 15 bp, Homo sapiens
tactcagaagggtga

SEQ ID NO: 247891 - DNA, 15 bp, Homo sapiens
ctactcagaagggtg

SEQ ID NO: 247892 - DNA, 15 bp, Homo sapiens
gctactcagaagggt

SEQ ID NO: 247893 - DNA, 15 bp, Homo sapiens
agctactcagaaggg

SEQ ID NO: 247894 - DNA, 15 bp, Homo sapiens
cagctactcagaagg

SEQ ID NO: 247895 - DNA, 15 bp, Homo sapiens
ccagctactcagaag

SEQ ID NO: 247896 - DNA, 15 bp, Homo sapiens
cccagctactcagaa

SEQ ID NO: 247897 - DNA, 15 bp, Homo sapiens
tcccagctactcaga

SEQ ID NO: 247898 - DNA, 15 bp, Homo sapiens
aacctgtaatcccag

SEQ ID NO: 247899 - DNA, 15 bp, Homo sapiens
gaacctgtaatccca

SEQ ID NO: 247900 - DNA, 15 bp, Homo sapiens
ggaacctgtaatccc

SEQ ID NO: 247901 - DNA, 15 bp, Homo sapiens
cggaacctgtaatcc

SEQ ID NO: 247902 - DNA, 15 bp, Homo sapiens
ccggaacctgtaatc

SEQ ID NO: 247903 - DNA, 15 bp, Homo sapiens
gccggaacctgtaat

SEQ ID NO: 247904 - DNA, 15 bp, Homo sapiens
agccggaacctgtaa

SEQ ID NO: 247905 - DNA, 15 bp, Homo sapiens
tagccggaacctgta

SEQ ID NO: 247906 - DNA, 15 bp, Homo sapiens
gtagccggaacctgt

SEQ ID NO: 247907 - DNA, 15 bp, Homo sapiens
ggtagccggaacctg

SEQ ID NO: 247908 - DNA, 15 bp, Homo sapiens
tggtagccggaacct

SEQ ID NO: 247909 - DNA, 15 bp, Homo sapiens
ttggtagccggaacc

SEQ ID NO: 247910 - DNA, 15 bp, Homo sapiens
tttggtagccggaac

SEQ ID NO: 247911 - DNA, 15 bp, Homo sapiens
gtttggtagccggaa

SEQ ID NO: 247912 - DNA, 15 bp, Homo sapiens
ggtttggtagccgga

SEQ ID NO: 247913 - DNA, 15 bp, Homo sapiens
aggtttggtagccgg

SEQ ID NO: 247914 - DNA, 15 bp, Homo sapiens
caggtttggtagccg

SEQ ID NO: 247915 - DNA, 15 bp, Homo sapiens
ccaggtttggtagcc

SEQ ID NO: 247916 - DNA, 15 bp, Homo sapiens
gccaggtttggtagc

SEQ ID NO: 247917 - DNA, 15 bp, Homo sapiens
agccaggtttggtag

SEQ ID NO: 247918 - DNA, 15 bp, Homo sapiens
tagccaggtttggta

SEQ ID NO: 247919 - DNA, 15 bp, Homo sapiens
ctagccaggtttggt

SEQ ID NO: 247920 - DNA, 15 bp, Homo sapiens
actagccaggtttgg

SEQ ID NO: 247921 - DNA, 15 bp, Homo sapiens
aactagccaggtttg

SEQ ID NO: 247922 - DNA, 15 bp, Homo sapiens
aaactagccaggttt

SEQ ID NO: 247923 - DNA, 15 bp, Homo sapiens
aaaactagccaggtt

SEQ ID NO: 247924 - DNA, 15 bp, Homo sapiens
aaaaactagccaggt

SEQ ID NO: 247925 - DNA, 15 bp, Homo sapiens
caaaaactagccagg

SEQ ID NO: 247926 - DNA, 15 bp, Homo sapiens
acaaaaactagccag

SEQ ID NO: 247927 - DNA, 15 bp, Homo sapiens
tacaaaaactagcca

SEQ ID NO: 247928 - DNA, 15 bp, Homo sapiens
atacaaaaactagcc

SEQ ID NO: 247929 - DNA, 15 bp, Homo sapiens
catacaaaaactagc

SEQ ID NO: 247930 - DNA, 15 bp, Homo sapiens
acatacaaaaactag

SEQ ID NO: 247931 - DNA, 15 bp, Homo sapiens
aacatacaaaaacta

SEQ ID NO: 247932 - DNA, 15 bp, Homo sapiens
aaacatacaaaaact

SEQ ID NO: 247933 - DNA, 15 bp, Homo sapiens
taaacatacaaaaac

SEQ ID NO: 247934 - DNA, 15 bp, Homo sapiens
gtctctactaaacat

SEQ ID NO: 247935 - DNA, 15 bp, Homo sapiens
tgtctctactaaaca

SEQ ID NO: 247936 - DNA, 15 bp, Homo sapiens
ctgtctctactaaac

SEQ ID NO: 247937 - DNA, 15 bp, Homo sapiens
ggtgaaaccctgtct

SEQ ID NO: 247938 - DNA, 15 bp, Homo sapiens
tggtgaaaccctgtc

SEQ ID NO: 247939 - DNA, 15 bp, Homo sapiens
accaacatggtgaaa

SEQ ID NO: 247940 - DNA, 15 bp, Homo sapiens
caccaacatggtgaa

SEQ ID NO: 247941 - DNA, 15 bp, Homo sapiens
tcaccaacatggtga

SEQ ID NO: 247942 - DNA, 15 bp, Homo sapiens
ctcaccaacatggtg

SEQ ID NO: 247943 - DNA, 15 bp, Homo sapiens
cctcaccaacatggt

SEQ ID NO: 247944 - DNA, 15 bp, Homo sapiens
gcctcaccaacatgg

SEQ ID NO: 247945 - DNA, 15 bp, Homo sapiens
agcctcaccaacatg

SEQ ID NO: 247946 - DNA, 15 bp, Homo sapiens
cagcctcaccaacat

SEQ ID NO: 247947 - DNA, 15 bp, Homo sapiens
ccagcctcaccaaca

SEQ ID NO: 247948 - DNA, 15 bp, Homo sapiens
accagcctcaccaac

SEQ ID NO: 247949 - DNA, 15 bp, Homo sapiens
gaccagcctcaccaa

SEQ ID NO: 247950 - DNA, 15 bp, Homo sapiens
agaccagcctcacca

SEQ ID NO: 247951 - DNA, 15 bp, Homo sapiens
gagaccagcctcacc

SEQ ID NO: 247952 - DNA, 15 bp, Homo sapiens
cgagaccagcctcac

SEQ ID NO: 247953 - DNA, 15 bp, Homo sapiens
tcgagaccagcctca

SEQ ID NO: 247954 - DNA, 15 bp, Homo sapiens
atcgagaccagcctc

SEQ ID NO: 247955 - DNA, 15 bp, Homo sapiens
aatcgagaccagcct

SEQ ID NO: 247956 - DNA, 15 bp, Homo sapiens
gaatcgagaccagcc

SEQ ID NO: 247957 - DNA, 15 bp, Homo sapiens
agaatcgagaccagc

SEQ ID NO: 247958 - DNA, 15 bp, Homo sapiens
gagaatcgagaccag

SEQ ID NO: 247959 - DNA, 15 bp, Homo sapiens
ggagaatcgagacca

SEQ ID NO: 247960 - DNA, 15 bp, Homo sapiens
gggagaatcgagacc

SEQ ID NO: 247961 - DNA, 15 bp, Homo sapiens
cgggagaatcgagac

SEQ ID NO: 247962 - DNA, 15 bp, Homo sapiens
gcgggagaatcgaga

SEQ ID NO: 247963 - DNA, 15 bp, Homo sapiens
ggcgggagaatcgag

SEQ ID NO: 247964 - DNA, 15 bp, Homo sapiens
aggcgggagaatcga

SEQ ID NO: 247965 - DNA, 15 bp, Homo sapiens
gaggcgggagaatcg

SEQ ID NO: 247966 - DNA, 15 bp, Homo sapiens
tgaggcgggagaatc

SEQ ID NO: 247967 - DNA, 15 bp, Homo sapiens
ctgaggcgggagaat

SEQ ID NO: 247968 - DNA, 15 bp, Homo sapiens
gctgaggcgggagaa

SEQ ID NO: 247969 - DNA, 15 bp, Homo sapiens
ggctgaggcgggaga

SEQ ID NO: 247970 - DNA, 15 bp, Homo sapiens
agcctgtaatcccag

SEQ ID NO: 247971 - DNA, 15 bp, Homo sapiens
aagcctgtaatccca

SEQ ID NO: 247972 - DNA, 15 bp, Homo sapiens
caagcctgtaatccc

SEQ ID NO: 247973 - DNA, 15 bp, Homo sapiens
tcaagcctgtaatcc

SEQ ID NO: 247974 - DNA, 15 bp, Homo sapiens
ctcaagcctgtaatc

SEQ ID NO: 247975 - DNA, 15 bp, Homo sapiens
gctcaagcctgtaat

SEQ ID NO: 247976 - DNA, 15 bp, Homo sapiens
ggctcaagcctgtaa

SEQ ID NO: 247977 - DNA, 15 bp, Homo sapiens
tggctcaagcctgta

SEQ ID NO: 247978 - DNA, 15 bp, Homo sapiens
gtggctcaagcctgt

SEQ ID NO: 247979 - DNA, 15 bp, Homo sapiens
ggtggctcaagcctg

SEQ ID NO: 247980 - DNA, 15 bp, Homo sapiens
cggtggctcaagcct

SEQ ID NO: 247981 - DNA, 15 bp, Homo sapiens
acggtggctcaagcc

SEQ ID NO: 247982 - DNA, 15 bp, Homo sapiens
cacggtggctcaagc

SEQ ID NO: 247983 - DNA, 15 bp, Homo sapiens
gcacggtggctcaag

SEQ ID NO: 247984 - DNA, 15 bp, Homo sapiens
ggcacggtggctcaa

SEQ ID NO: 247985 - DNA, 15 bp, Homo sapiens
aggcacggtggctca

SEQ ID NO: 247986 - DNA, 15 bp, Homo sapiens
caggcacggtggctc

SEQ ID NO: 247987 - DNA, 15 bp, Homo sapiens
ccaggcacggtggct

SEQ ID NO: 247988 - DNA, 15 bp, Homo sapiens
gccaggcacggtggc

SEQ ID NO: 247989 - DNA, 15 bp, Homo sapiens
agccaggcacggtgg

SEQ ID NO: 247990 - DNA, 15 bp, Homo sapiens
aagccaggcacggtg

SEQ ID NO: 247991 - DNA, 15 bp, Homo sapiens
aaagccaggcacggt

SEQ ID NO: 247992 - DNA, 15 bp, Homo sapiens
aaaagccaggcacgg

SEQ ID NO: 247993 - DNA, 15 bp, Homo sapiens
aaaaagccaggcacg

SEQ ID NO: 247994 - DNA, 15 bp, Homo sapiens
aaaaaagccaggcac

SEQ ID NO: 247995 - DNA, 15 bp, Homo sapiens
aaaaaaagccaggca

SEQ ID NO: 247996 - DNA, 15 bp, Homo sapiens
aaaaaaaagccaggc

SEQ ID NO: 247997 - DNA, 15 bp, Homo sapiens
aaaaaaaaagccagg

SEQ ID NO: 247998 - DNA, 15 bp, Homo sapiens
aaaaaaaaaagccag

SEQ ID NO: 247999 - DNA, 15 bp, Homo sapiens
aaaaaaaaaaagcca

SEQ ID NO: 248000 - DNA, 15 bp, Homo sapiens
aaaaaaaaaaaagcc

SEQ ID NO: 248001 - DNA, 15 bp, Homo sapiens
aaaaaaaaaaaaagc

SEQ ID NO: 248002 - DNA, 15 bp, Homo sapiens
cacaaaaaaaaaaaa

SEQ ID NO: 248003 - DNA, 15 bp, Homo sapiens
ccacaaaaaaaaaaa

SEQ ID NO: 248004 - DNA, 15 bp, Homo sapiens
gccacaaaaaaaaaa

SEQ ID NO: 248005 - DNA, 15 bp, Homo sapiens
tgccacaaaaaaaaa

SEQ ID NO: 248006 - DNA, 15 bp, Homo sapiens
ttgccacaaaaaaaa

SEQ ID NO: 248007 - DNA, 15 bp, Homo sapiens
attgccacaaaaaaa

SEQ ID NO: 248008 - DNA, 15 bp, Homo sapiens
tattgccacaaaaaa

SEQ ID NO: 248009 - DNA, 15 bp, Homo sapiens
ttattgccacaaaaa

SEQ ID NO: 248010 - DNA, 15 bp, Homo sapiens
cttattgccacaaaa

SEQ ID NO: 248011 - DNA, 15 bp, Homo sapiens
ccttattgccacaaa

SEQ ID NO: 248012 - DNA, 15 bp, Homo sapiens
accttattgccacaa

SEQ ID NO: 248013 - DNA, 15 bp, Homo sapiens
gaccttattgccaca

SEQ ID NO: 248014 - DNA, 15 bp, Homo sapiens
agaccttattgccac

SEQ ID NO: 248015 - DNA, 15 bp, Homo sapiens
gagaccttattgcca

SEQ ID NO: 248016 - DNA, 15 bp, Homo sapiens
tgagaccttattgcc

SEQ ID NO: 248017 - DNA, 15 bp, Homo sapiens
atgagaccttattgc

SEQ ID NO: 248018 - DNA, 15 bp, Homo sapiens
aatgagaccttattg

SEQ ID NO: 248019 - DNA, 15 bp, Homo sapiens
caatgagaccttatt

SEQ ID NO: 248020 - DNA, 15 bp, Homo sapiens
acaatgagaccttat

SEQ ID NO: 248021 - DNA, 15 bp, Homo sapiens
gacaatgagacctta

SEQ ID NO: 248022 - DNA, 15 bp, Homo sapiens
agacaatgagacctt

SEQ ID NO: 248023 - DNA, 15 bp, Homo sapiens
aagacaatgagacct

SEQ ID NO: 248024 - DNA, 15 bp, Homo sapiens
caagacaatgagacc

SEQ ID NO: 248025 - DNA, 15 bp, Homo sapiens
gcaagacaatgagac

SEQ ID NO: 248026 - DNA, 15 bp, Homo sapiens
ggcaagacaatgaga

SEQ ID NO: 248027 - DNA, 15 bp, Homo sapiens
gggcaagacaatgag

SEQ ID NO: 248028 - DNA, 15 bp, Homo sapiens
tgggcaagacaatga

SEQ ID NO: 248029 - DNA, 15 bp, Homo sapiens
ctgggcaagacaatg

SEQ ID NO: 248030 - DNA, 15 bp, Homo sapiens
cctgggcaagacaat

SEQ ID NO: 248031 - DNA, 15 bp, Homo sapiens
gcctgggcaagacaa

SEQ ID NO: 248032 - DNA, 15 bp, Homo sapiens
agcctgggcaagaca

SEQ ID NO: 248033 - DNA, 15 bp, Homo sapiens
tagcctgggcaagac

SEQ ID NO: 248034 - DNA, 15 bp, Homo sapiens
ctagcctgggcaaga

SEQ ID NO: 248035 - DNA, 15 bp, Homo sapiens
gctagcctgggcaag

SEQ ID NO: 248036 - DNA, 15 bp, Homo sapiens
ggctagcctgggcaa

SEQ ID NO: 248037 - DNA, 15 bp, Homo sapiens
aggctagcctgggca

SEQ ID NO: 248038 - DNA, 15 bp, Homo sapiens
aaggctagcctgggc

SEQ ID NO: 248039 - DNA, 15 bp, Homo sapiens
taaggctagcctggg

SEQ ID NO: 248040 - DNA, 15 bp, Homo sapiens
ataaggctagcctgg

SEQ ID NO: 248041 - DNA, 15 bp, Homo sapiens
cataaggctagcctg

SEQ ID NO: 248042 - DNA, 15 bp, Homo sapiens
gcataaggctagcct

SEQ ID NO: 248043 - DNA, 15 bp, Homo sapiens
agcataaggctagcc

SEQ ID NO: 248044 - DNA, 15 bp, Homo sapiens
gagcataaggctagc

SEQ ID NO: 248045 - DNA, 15 bp, Homo sapiens
ggagcataaggctag

SEQ ID NO: 248046 - DNA, 15 bp, Homo sapiens
aggagcataaggcta

SEQ ID NO: 248047 - DNA, 15 bp, Homo sapiens
taggagcataaggct

SEQ ID NO: 248048 - DNA, 15 bp, Homo sapiens
ctaggagcataaggc

SEQ ID NO: 248049 - DNA, 15 bp, Homo sapiens
gctaggagcataagg

SEQ ID NO: 248050 - DNA, 15 bp, Homo sapiens
ggctaggagcataag

SEQ ID NO: 248051 - DNA, 15 bp, Homo sapiens
aggctaggagcataa

SEQ ID NO: 248052 - DNA, 15 bp, Homo sapiens
gaggctaggagcata

SEQ ID NO: 248053 - DNA, 15 bp, Homo sapiens
tgaggctaggagcat

SEQ ID NO: 248054 - DNA, 15 bp, Homo sapiens
ttgaggctaggagca

SEQ ID NO: 248055 - DNA, 15 bp, Homo sapiens
cttgaggctaggagc

SEQ ID NO: 248056 - DNA, 15 bp, Homo sapiens
acttgaggctaggag

SEQ ID NO: 248057 - DNA, 15 bp, Homo sapiens
cacttgaggctagga

SEQ ID NO: 248058 - DNA, 15 bp, Homo sapiens
tcacttgaggctagg

SEQ ID NO: 248059 - DNA, 15 bp, Homo sapiens
atcacttgaggctag

SEQ ID NO: 248060 - DNA, 15 bp, Homo sapiens
gatcacttgaggcta

SEQ ID NO: 248061 - DNA, 15 bp, Homo sapiens
ggatcacttgaggct

SEQ ID NO: 248062 - DNA, 15 bp, Homo sapiens
aggatcacttgaggc

SEQ ID NO: 248063 - DNA, 15 bp, Homo sapiens
aggaggatcacttga

SEQ ID NO: 248064 - DNA, 15 bp, Homo sapiens
gaggaggatcacttg

SEQ ID NO: 248065 - DNA, 15 bp, Homo sapiens
ggaggaggatcactt

SEQ ID NO: 248066 - DNA, 15 bp, Homo sapiens
gggaggaggatcact

SEQ ID NO: 248067 - DNA, 15 bp, Homo sapiens
agggaggaggatcac

SEQ ID NO: 248068 - DNA, 15 bp, Homo sapiens
gagggaggaggatca

SEQ ID NO: 248069 - DNA, 15 bp, Homo sapiens
tgagggaggaggatc

SEQ ID NO: 248070 - DNA, 15 bp, Homo sapiens
ctgagggaggaggat

SEQ ID NO: 248071 - DNA, 15 bp, Homo sapiens
gctgagggaggagga

SEQ ID NO: 248072 - DNA, 15 bp, Homo sapiens
ggctgagggaggagg

SEQ ID NO: 248073 - DNA, 15 bp, Homo sapiens
aggctgagggaggag

SEQ ID NO: 248074 - DNA, 15 bp, Homo sapiens
gaggctgagggagga

SEQ ID NO: 248075 - DNA, 15 bp, Homo sapiens
ggaggctgagggagg

SEQ ID NO: 248076 - DNA, 15 bp, Homo sapiens
gggaggctgagggag

SEQ ID NO: 248077 - DNA, 15 bp, Homo sapiens
tgggaggctgaggga

SEQ ID NO: 248078 - DNA, 15 bp, Homo sapiens
ttgggaggctgaggg

SEQ ID NO: 248079 - DNA, 15 bp, Homo sapiens
ccacctgtaatccca

SEQ ID NO: 248080 - DNA, 15 bp, Homo sapiens
cccacctgtaatccc

SEQ ID NO: 248081 - DNA, 15 bp, Homo sapiens
gcccacctgtaatcc

SEQ ID NO: 248082 - DNA, 15 bp, Homo sapiens
cgcccacctgtaatc

SEQ ID NO: 248083 - DNA, 15 bp, Homo sapiens
gcgcccacctgtaat

SEQ ID NO: 248084 - DNA, 15 bp, Homo sapiens
ggcgcccacctgtaa

SEQ ID NO: 248085 - DNA, 15 bp, Homo sapiens
tggcgcccacctgta

SEQ ID NO: 248086 - DNA, 15 bp, Homo sapiens
gtggcgcccacctgt

SEQ ID NO: 248087 - DNA, 15 bp, Homo sapiens
agtggcgcccacctg

SEQ ID NO: 248088 - DNA, 15 bp, Homo sapiens
cagtggcgcccacct

SEQ ID NO: 248089 - DNA, 15 bp, Homo sapiens
acagtggcgcccacc

SEQ ID NO: 248090 - DNA, 15 bp, Homo sapiens
cacagtggcgcccac

SEQ ID NO: 248091 - DNA, 15 bp, Homo sapiens
gcacagtggcgccca

SEQ ID NO: 248092 - DNA, 15 bp, Homo sapiens
ggcacagtggcgccc

SEQ ID NO: 248093 - DNA, 15 bp, Homo sapiens
aggcacagtggcgcc

SEQ ID NO: 248094 - DNA, 15 bp, Homo sapiens
caggcacagtggcgc

SEQ ID NO: 248095 - DNA, 15 bp, Homo sapiens
acaggcacagtggcg

SEQ ID NO: 248096 - DNA, 15 bp, Homo sapiens
aacaggcacagtggc

SEQ ID NO: 248097 - DNA, 15 bp, Homo sapiens
gaacaggcacagtgg

SEQ ID NO: 248098 - DNA, 15 bp, Homo sapiens
ggaacaggcacagtg

SEQ ID NO: 248099 - DNA, 15 bp, Homo sapiens
gggaacaggcacagt

SEQ ID NO: 248100 - DNA, 15 bp, Homo sapiens
cgggaacaggcacag

SEQ ID NO: 248101 - DNA, 15 bp, Homo sapiens
acgggaacaggcaca

SEQ ID NO: 248102 - DNA, 15 bp, Homo sapiens
aacgggaacaggcac

SEQ ID NO: 248103 - DNA, 15 bp, Homo sapiens
caacgggaacaggca

SEQ ID NO: 248104 - DNA, 15 bp, Homo sapiens
ccaacgggaacaggc

SEQ ID NO: 248105 - DNA, 15 bp, Homo sapiens
cccaacgggaacagg

SEQ ID NO: 248106 - DNA, 15 bp, Homo sapiens
tcccaacgggaacag

SEQ ID NO: 248107 - DNA, 15 bp, Homo sapiens
ctcccaacgggaaca

SEQ ID NO: 248108 - DNA, 15 bp, Homo sapiens
cctcccaacgggaac

SEQ ID NO: 248109 - DNA, 15 bp, Homo sapiens
acctcccaacgggaa

SEQ ID NO: 248110 - DNA, 15 bp, Homo sapiens
gacctcccaacggga

SEQ ID NO: 248111 - DNA, 15 bp, Homo sapiens
agacctcccaacggg

SEQ ID NO: 248112 - DNA, 15 bp, Homo sapiens
aagacctcccaacgg

SEQ ID NO: 248113 - DNA, 15 bp, Homo sapiens
aaagacctcccaacg

SEQ ID NO: 248114 - DNA, 15 bp, Homo sapiens
aaaagacctcccaac

SEQ ID NO: 248115 - DNA, 15 bp, Homo sapiens
gaaaagacctcccaa

SEQ ID NO: 248116 - DNA, 15 bp, Homo sapiens
ggaaaagacctccca

SEQ ID NO: 248117 - DNA, 15 bp, Homo sapiens
tggaaaagacctccc

SEQ ID NO: 248118 - DNA, 15 bp, Homo sapiens
gtggaaaagacctcc

SEQ ID NO: 248119 - DNA, 15 bp, Homo sapiens
ggtggaaaagacctc

SEQ ID NO: 248120 - DNA, 15 bp, Homo sapiens
gggtggaaaagacct

SEQ ID NO: 248121 - DNA, 15 bp, Homo sapiens
agggtggaaaagacc

SEQ ID NO: 248122 - DNA, 15 bp, Homo sapiens
gagggtggaaaagac

SEQ ID NO: 248123 - DNA, 15 bp, Homo sapiens
agagggtggaaaaga

SEQ ID NO: 248124 - DNA, 15 bp, Homo sapiens
aagagggtggaaaag

SEQ ID NO: 248125 - DNA, 15 bp, Homo sapiens
aaagagggtggaaaa

SEQ ID NO: 248126 - DNA, 15 bp, Homo sapiens
aaaagagggtggaaa

SEQ ID NO: 248127 - DNA, 15 bp, Homo sapiens
aaaaagagggtggaa

SEQ ID NO: 248128 - DNA, 15 bp, Homo sapiens
gaaaaagagggtgga

SEQ ID NO: 248129 - DNA, 15 bp, Homo sapiens
agaaaaagagggtgg

SEQ ID NO: 248130 - DNA, 15 bp, Homo sapiens
cagaaaaagagggtg

SEQ ID NO: 248131 - DNA, 15 bp, Homo sapiens
ccagaaaaagagggt

SEQ ID NO: 248132 - DNA, 15 bp, Homo sapiens
cccagaaaaagaggg

SEQ ID NO: 248133 - DNA, 15 bp, Homo sapiens
acccagaaaaagagg

SEQ ID NO: 248134 - DNA, 15 bp, Homo sapiens
cacccagaaaaagag

SEQ ID NO: 248135 - DNA, 15 bp, Homo sapiens
gcacccagaaaaaga

SEQ ID NO: 248136 - DNA, 15 bp, Homo sapiens
ggcacccagaaaaag

SEQ ID NO: 248137 - DNA, 15 bp, Homo sapiens
aggcacccagaaaaa

SEQ ID NO: 248138 - DNA, 15 bp, Homo sapiens
gaggcacccagaaaa

SEQ ID NO: 248139 - DNA, 15 bp, Homo sapiens
ggaggcacccagaaa

SEQ ID NO: 248140 - DNA, 15 bp, Homo sapiens
aggaggcacccagaa

SEQ ID NO: 248141 - DNA, 15 bp, Homo sapiens
gaggaggcacccaga

SEQ ID NO: 248142 - DNA, 15 bp, Homo sapiens
agaggaggcacccag

SEQ ID NO: 248143 - DNA, 15 bp, Homo sapiens
cagaggaggcaccca

SEQ ID NO: 248144 - DNA, 15 bp, Homo sapiens
ccagaggaggcaccc

SEQ ID NO: 248145 - DNA, 15 bp, Homo sapiens
gccagaggaggcacc

SEQ ID NO: 248146 - DNA, 15 bp, Homo sapiens
agccagaggaggcac

SEQ ID NO: 248147 - DNA, 15 bp, Homo sapiens
gagccagaggaggca

SEQ ID NO: 248148 - DNA, 15 bp, Homo sapiens
tgagccagaggaggc

SEQ ID NO: 248149 - DNA, 15 bp, Homo sapiens
ctgagccagaggagg

SEQ ID NO: 248150 - DNA, 15 bp, Homo sapiens
gctgagccagaggag

SEQ ID NO: 248151 - DNA, 15 bp, Homo sapiens
ggctgagccagagga

SEQ ID NO: 248152 - DNA, 15 bp, Homo sapiens
cggctgagccagagg

SEQ ID NO: 248153 - DNA, 15 bp, Homo sapiens
gcggctgagccagag

SEQ ID NO: 248154 - DNA, 15 bp, Homo sapiens
tgcggctgagccaga

SEQ ID NO: 248155 - DNA, 15 bp, Homo sapiens
gtgcggctgagccag

SEQ ID NO: 248156 - DNA, 15 bp, Homo sapiens
ggtgcggctgagcca

SEQ ID NO: 248157 - DNA, 15 bp, Homo sapiens
gggtgcggctgagcc

SEQ ID NO: 248158 - DNA, 15 bp, Homo sapiens
agggtgcggctgagc

SEQ ID NO: 248159 - DNA, 15 bp, Homo sapiens
cagggtgcggctgag

SEQ ID NO: 248160 - DNA, 15 bp, Homo sapiens
gcagggtgcggctga

SEQ ID NO: 248161 - DNA, 15 bp, Homo sapiens
tgcagggtgcggctg

SEQ ID NO: 248162 - DNA, 15 bp, Homo sapiens
ctgcagggtgcggct

SEQ ID NO: 248163 - DNA, 15 bp, Homo sapiens
cctgcagggtgcggc

SEQ ID NO: 248164 - DNA, 15 bp, Homo sapiens
tcctgcagggtgcgg

SEQ ID NO: 248165 - DNA, 15 bp, Homo sapiens
atcctgcagggtgcg

SEQ ID NO: 248166 - DNA, 15 bp, Homo sapiens
catcctgcagggtgc

SEQ ID NO: 248167 - DNA, 15 bp, Homo sapiens
tcatcctgcagggtg

SEQ ID NO: 248168 - DNA, 15 bp, Homo sapiens
gtcatcctgcagggt

SEQ ID NO: 248169 - DNA, 15 bp, Homo sapiens
tgtcatcctgcaggg

SEQ ID NO: 248170 - DNA, 15 bp, Homo sapiens
gtgtcatcctgcagg

SEQ ID NO: 248171 - DNA, 15 bp, Homo sapiens
tgtgtcatcctgcag

SEQ ID NO: 248172 - DNA, 15 bp, Homo sapiens
ttgtgtcatcctgca

SEQ ID NO: 248173 - DNA, 15 bp, Homo sapiens
cttgtgtcatcctgc

SEQ ID NO: 248174 - DNA, 15 bp, Homo sapiens
ccttgtgtcatcctg

SEQ ID NO: 248175 - DNA, 15 bp, Homo sapiens
cccttgtgtcatcct

SEQ ID NO: 248176 - DNA, 15 bp, Homo sapiens
ccccttgtgtcatcc

SEQ ID NO: 248177 - DNA, 15 bp, Homo sapiens
tccccttgtgtcatc

SEQ ID NO: 248178 - DNA, 15 bp, Homo sapiens
atccccttgtgtcat

SEQ ID NO: 248179 - DNA, 15 bp, Homo sapiens
catccccttgtgtca

SEQ ID NO: 248180 - DNA, 15 bp, Homo sapiens
ccatccccttgtgtc

SEQ ID NO: 248181 - DNA, 15 bp, Homo sapiens
cccatccccttgtgt

SEQ ID NO: 248182 - DNA, 15 bp, Homo sapiens
ccccatccccttgtg

SEQ ID NO: 248183 - DNA, 15 bp, Homo sapiens
tccccatccccttgt

SEQ ID NO: 248184 - DNA, 15 bp, Homo sapiens
ctccccatccccttg

SEQ ID NO: 248185 - DNA, 15 bp, Homo sapiens
cctccccatcccctt

SEQ ID NO: 248186 - DNA, 15 bp, Homo sapiens
gcctccccatcccct

SEQ ID NO: 248187 - DNA, 15 bp, Homo sapiens
tgcctccccatcccc

SEQ ID NO: 248188 - DNA, 15 bp, Homo sapiens
gtgcctccccatccc

SEQ ID NO: 248189 - DNA, 15 bp, Homo sapiens
agtgcctccccatcc

SEQ ID NO: 248190 - DNA, 15 bp, Homo sapiens
gagtgcctccccatc

SEQ ID NO: 248191 - DNA, 15 bp, Homo sapiens
agagtgcctccccat

SEQ ID NO: 248192 - DNA, 15 bp, Homo sapiens
aagagtgcctcccca

SEQ ID NO: 248193 - DNA, 15 bp, Homo sapiens
caagagtgcctcccc

SEQ ID NO: 248194 - DNA, 15 bp, Homo sapiens
ccaagagtgcctccc

SEQ ID NO: 248195 - DNA, 15 bp, Homo sapiens
accaagagtgcctcc

SEQ ID NO: 248196 - DNA, 15 bp, Homo sapiens
aaccaagagtgcctc

SEQ ID NO: 248197 - DNA, 15 bp, Homo sapiens
gaaccaagagtgcct

SEQ ID NO: 248198 - DNA, 15 bp, Homo sapiens
ggaaccaagagtgcc

SEQ ID NO: 248199 - DNA, 15 bp, Homo sapiens
tggaaccaagagtgc

SEQ ID NO: 248200 - DNA, 15 bp, Homo sapiens
atggaaccaagagtg

SEQ ID NO: 248201 - DNA, 15 bp, Homo sapiens
gatggaaccaagagt

SEQ ID NO: 248202 - DNA, 15 bp, Homo sapiens
cgatggaaccaagag

SEQ ID NO: 248203 - DNA, 15 bp, Homo sapiens
tcgatggaaccaaga

SEQ ID NO: 248204 - DNA, 15 bp, Homo sapiens
gtcgatggaaccaag

SEQ ID NO: 248205 - DNA, 15 bp, Homo sapiens
cgtcgatggaaccaa

SEQ ID NO: 248206 - DNA, 15 bp, Homo sapiens
ccgtcgatggaacca

SEQ ID NO: 248207 - DNA, 15 bp, Homo sapiens
cccgtcgatggaacc

SEQ ID NO: 248208 - DNA, 15 bp, Homo sapiens
acccgtcgatggaac

SEQ ID NO: 248209 - DNA, 15 bp, Homo sapiens
gacccgtcgatggaa

SEQ ID NO: 248210 - DNA, 15 bp, Homo sapiens
ggacccgtcgatgga

SEQ ID NO: 248211 - DNA, 15 bp, Homo sapiens
gggacccgtcgatgg

SEQ ID NO: 248212 - DNA, 15 bp, Homo sapiens
ggggacccgtcgatg

SEQ ID NO: 248213 - DNA, 15 bp, Homo sapiens
aggggacccgtcgat

SEQ ID NO: 248214 - DNA, 15 bp, Homo sapiens
gaggggacccgtcga

SEQ ID NO: 248215 - DNA, 15 bp, Homo sapiens
agaggggacccgtcg

SEQ ID NO: 248216 - DNA, 15 bp, Homo sapiens
cagaggggacccgtc

SEQ ID NO: 248217 - DNA, 15 bp, Homo sapiens
tcagaggggacccgt

SEQ ID NO: 248218 - DNA, 15 bp, Homo sapiens
gtcagaggggacccg

SEQ ID NO: 248219 - DNA, 15 bp, Homo sapiens
ggtcagaggggaccc

SEQ ID NO: 248220 - DNA, 15 bp, Homo sapiens
gggtcagaggggacc

SEQ ID NO: 248221 - DNA, 15 bp, Homo sapiens
ggggtcagaggggac

SEQ ID NO: 248222 - DNA, 15 bp, Homo sapiens
gggggtcagagggga

SEQ ID NO: 248223 - DNA, 15 bp, Homo sapiens
agggggtcagagggg

SEQ ID NO: 248224 - DNA, 15 bp, Homo sapiens
cagggggtcagaggg

SEQ ID NO: 248225 - DNA, 15 bp, Homo sapiens
tcagggggtcagagg

SEQ ID NO: 248226 - DNA, 15 bp, Homo sapiens
gtcagggggtcagag

SEQ ID NO: 248227 - DNA, 15 bp, Homo sapiens
ggtcagggggtcaga

SEQ ID NO: 248228 - DNA, 15 bp, Homo sapiens
aggtcagggggtcag

SEQ ID NO: 248229 - DNA, 15 bp, Homo sapiens
gaggtcagggggtca

SEQ ID NO: 248230 - DNA, 15 bp, Homo sapiens
cgaggtcagggggtc

SEQ ID NO: 248231 - DNA, 15 bp, Homo sapiens
gcgaggtcagggggt

SEQ ID NO: 248232 - DNA, 15 bp, Homo sapiens
agcgaggtcaggggg

SEQ ID NO: 248233 - DNA, 15 bp, Homo sapiens
gagcgaggtcagggg

SEQ ID NO: 248234 - DNA, 15 bp, Homo sapiens
ggagcgaggtcaggg

SEQ ID NO: 248235 - DNA, 15 bp, Homo sapiens
gggagcgaggtcagg

SEQ ID NO: 248236 - DNA, 15 bp, Homo sapiens
ggggagcgaggtcag

SEQ ID NO: 248237 - DNA, 15 bp, Homo sapiens
cggggagcgaggtca

SEQ ID NO: 248238 - DNA, 15 bp, Homo sapiens
ccggggagcgaggtc

SEQ ID NO: 248239 - DNA, 15 bp, Homo sapiens
tccggggagcgaggt

SEQ ID NO: 248240 - DNA, 15 bp, Homo sapiens
gtccggggagcgagg

SEQ ID NO: 248241 - DNA, 15 bp, Homo sapiens
ggtccggggagcgag

SEQ ID NO: 248242 - DNA, 15 bp, Homo sapiens
gggtccggggagcga

SEQ ID NO: 248243 - DNA, 15 bp, Homo sapiens
ggggtccggggagcg

SEQ ID NO: 248244 - DNA, 15 bp, Homo sapiens
gggggtccggggagc

SEQ ID NO: 248245 - DNA, 15 bp, Homo sapiens
tgggggtccggggag

SEQ ID NO: 248246 - DNA, 15 bp, Homo sapiens
ctgggggtccgggga

SEQ ID NO: 248247 - DNA, 15 bp, Homo sapiens
cctgggggtccgggg

SEQ ID NO: 248248 - DNA, 15 bp, Homo sapiens
gcctgggggtccggg

SEQ ID NO: 248249 - DNA, 15 bp, Homo sapiens
agcctgggggtccgg

SEQ ID NO: 248250 - DNA, 15 bp, Homo sapiens
gagcctgggggtccg

SEQ ID NO: 248251 - DNA, 15 bp, Homo sapiens
ggagcctgggggtcc

SEQ ID NO: 248252 - DNA, 15 bp, Homo sapiens
tggagcctgggggtc

SEQ ID NO: 248253 - DNA, 15 bp, Homo sapiens
atggagcctgggggt

SEQ ID NO: 248254 - DNA, 15 bp, Homo sapiens
gatggagcctggggg

SEQ ID NO: 248255 - DNA, 15 bp, Homo sapiens
cgatggagcctgggg

SEQ ID NO: 248256 - DNA, 15 bp, Homo sapiens
gcgatggagcctggg

SEQ ID NO: 248257 - DNA, 15 bp, Homo sapiens
ggcgatggagcctgg

SEQ ID NO: 248258 - DNA, 15 bp, Homo sapiens
aggcgatggagcctg

SEQ ID NO: 248259 - DNA, 15 bp, Homo sapiens
taggcgatggagcct

SEQ ID NO: 248260 - DNA, 15 bp, Homo sapiens
gtaggcgatggagcc

SEQ ID NO: 248261 - DNA, 15 bp, Homo sapiens
ggtaggcgatggagc

SEQ ID NO: 248262 - DNA, 15 bp, Homo sapiens
aggtaggcgatggag

SEQ ID NO: 248263 - DNA, 15 bp, Homo sapiens
gaggtaggcgatgga

SEQ ID NO: 248264 - DNA, 15 bp, Homo sapiens
agaggtaggcgatgg

SEQ ID NO: 248265 - DNA, 15 bp, Homo sapiens
aagaggtaggcgatg

SEQ ID NO: 248266 - DNA, 15 bp, Homo sapiens
gaagaggtaggcgat

SEQ ID NO: 248267 - DNA, 15 bp, Homo sapiens
agaagaggtaggcga

SEQ ID NO: 248268 - DNA, 15 bp, Homo sapiens
aagaagaggtaggcg

SEQ ID NO: 248269 - DNA, 15 bp, Homo sapiens
gaagaagaggtaggc

SEQ ID NO: 248270 - DNA, 15 bp, Homo sapiens
tgaagaagaggtagg

SEQ ID NO: 248271 - DNA, 15 bp, Homo sapiens
gtgaagaagaggtag

SEQ ID NO: 248272 - DNA, 15 bp, Homo sapiens
ggtgaagaagaggta

SEQ ID NO: 248273 - DNA, 15 bp, Homo sapiens
tggtgaagaagaggt

SEQ ID NO: 248274 - DNA, 15 bp, Homo sapiens
ttggtgaagaagagg

SEQ ID NO: 248275 - DNA, 15 bp, Homo sapiens
gttggtgaagaagag

SEQ ID NO: 248276 - DNA, 15 bp, Homo sapiens
ggttggtgaagaaga

SEQ ID NO: 248277 - DNA, 15 bp, Homo sapiens
cggttggtgaagaag

SEQ ID NO: 248278 - DNA, 15 bp, Homo sapiens
ccggttggtgaagaa

SEQ ID NO: 248279 - DNA, 15 bp, Homo sapiens
gccggttggtgaaga

SEQ ID NO: 248280 - DNA, 15 bp, Homo sapiens
tgccggttggtgaag

SEQ ID NO: 248281 - DNA, 15 bp, Homo sapiens
gtgccggttggtgaa

SEQ ID NO: 248282 - DNA, 15 bp, Homo sapiens
cgtgccggttggtga

SEQ ID NO: 248283 - DNA, 15 bp, Homo sapiens
tcgtgccggttggtg

SEQ ID NO: 248284 - DNA, 15 bp, Homo sapiens
ctcgtgccggttggt

SEQ ID NO: 248285 - DNA, 15 bp, Homo sapiens
cctcgtgccggttgg

SEQ ID NO: 248286 - DNA, 15 bp, Homo sapiens
acctcgtgccggttg

SEQ ID NO: 248287 - DNA, 15 bp, Homo sapiens
gacctcgtgccggtt

SEQ ID NO: 248288 - DNA, 15 bp, Homo sapiens
tgacctcgtgccggt

SEQ ID NO: 248289 - DNA, 15 bp, Homo sapiens
ctgacctcgtgccgg

SEQ ID NO: 248290 - DNA, 15 bp, Homo sapiens
cctgacctcgtgccg

SEQ ID NO: 248291 - DNA, 15 bp, Homo sapiens
tcctgacctcgtgcc

SEQ ID NO: 248292 - DNA, 15 bp, Homo sapiens
ttcctgacctcgtgc

SEQ ID NO: 248293 - DNA, 15 bp, Homo sapiens
cttcctgacctcgtg

SEQ ID NO: 248294 - DNA, 15 bp, Homo sapiens
tcttcctgacctcgt

SEQ ID NO: 248295 - DNA, 15 bp, Homo sapiens
atcttcctgacctcg

SEQ ID NO: 248296 - DNA, 15 bp, Homo sapiens
catcttcctgacctc

SEQ ID NO: 248297 - DNA, 15 bp, Homo sapiens
tcatcttcctgacct

SEQ ID NO: 248298 - DNA, 15 bp, Homo sapiens
gtcatcttcctgacc

SEQ ID NO: 248299 - DNA, 15 bp, Homo sapiens
cgtcatcttcctgac

SEQ ID NO: 248300 - DNA, 15 bp, Homo sapiens
gcgtcatcttcctga

SEQ ID NO: 248301 - DNA, 15 bp, Homo sapiens
agcgtcatcttcctg

SEQ ID NO: 248302 - DNA, 15 bp, Homo sapiens
cagcgtcatcttcct

SEQ ID NO: 248303 - DNA, 15 bp, Homo sapiens
ccagcgtcatcttcc

SEQ ID NO: 248304 - DNA, 15 bp, Homo sapiens
tccagcgtcatcttc

SEQ ID NO: 248305 - DNA, 15 bp, Homo sapiens
gtccagcgtcatctt

SEQ ID NO: 248306 - DNA, 15 bp, Homo sapiens
ggtccagcgtcatct

SEQ ID NO: 248307 - DNA, 15 bp, Homo sapiens
cggtccagcgtcatc

SEQ ID NO: 248308 - DNA, 15 bp, Homo sapiens
ccggtccagcgtcat

SEQ ID NO: 248309 - DNA, 15 bp, Homo sapiens
tccggtccagcgtca

SEQ ID NO: 248310 - DNA, 15 bp, Homo sapiens
ctccggtccagcgtc

SEQ ID NO: 248311 - DNA, 15 bp, Homo sapiens
gctccggtccagcgt

SEQ ID NO: 248312 - DNA, 15 bp, Homo sapiens
cgctccggtccagcg

SEQ ID NO: 248313 - DNA, 15 bp, Homo sapiens
tcgctccggtccagc

SEQ ID NO: 248314 - DNA, 15 bp, Homo sapiens
ctcgctccggtccag

SEQ ID NO: 248315 - DNA, 15 bp, Homo sapiens
actcgctccggtcca

SEQ ID NO: 248316 - DNA, 15 bp, Homo sapiens
tactcgctccggtcc

SEQ ID NO: 248317 - DNA, 15 bp, Homo sapiens
gtactcgctccggtc

SEQ ID NO: 248318 - DNA, 15 bp, Homo sapiens
tgtactcgctccggt

SEQ ID NO: 248319 - DNA, 15 bp, Homo sapiens
gtgtactcgctccgg

SEQ ID NO: 248320 - DNA, 15 bp, Homo sapiens
ggtgtactcgctccg

SEQ ID NO: 248321 - DNA, 15 bp, Homo sapiens
tggtgtactcgctcc

SEQ ID NO: 248322 - DNA, 15 bp, Homo sapiens
ctggtgtactcgctc

SEQ ID NO: 248323 - DNA, 15 bp, Homo sapiens
gctggtgtactcgct

SEQ ID NO: 248324 - DNA, 15 bp, Homo sapiens
ggctggtgtactcgc

SEQ ID NO: 248325 - DNA, 15 bp, Homo sapiens
aggctggtgtactcg

SEQ ID NO: 248326 - DNA, 15 bp, Homo sapiens
gaggctggtgtactc

SEQ ID NO: 248327 - DNA, 15 bp, Homo sapiens
tgaggctggtgtact

SEQ ID NO: 248328 - DNA, 15 bp, Homo sapiens
atgaggctggtgtac

SEQ ID NO: 248329 - DNA, 15 bp, Homo sapiens
gatgaggctggtgta

SEQ ID NO: 248330 - DNA, 15 bp, Homo sapiens
ggatgaggctggtgt

SEQ ID NO: 248331 - DNA, 15 bp, Homo sapiens
gggatgaggctggtg

SEQ ID NO: 248332 - DNA, 15 bp, Homo sapiens
ggggatgaggctggt

SEQ ID NO: 248333 - DNA, 15 bp, Homo sapiens
tggggatgaggctgg

SEQ ID NO: 248334 - DNA, 15 bp, Homo sapiens
ttggggatgaggctg

SEQ ID NO: 248335 - DNA, 15 bp, Homo sapiens
gttggggatgaggct

SEQ ID NO: 248336 - DNA, 15 bp, Homo sapiens
ggttggggatgaggc

SEQ ID NO: 248337 - DNA, 15 bp, Homo sapiens
aggttggggatgagg

SEQ ID NO: 248338 - DNA, 15 bp, Homo sapiens
caggttggggatgag

SEQ ID NO: 248339 - DNA, 15 bp, Homo sapiens
tcaggttggggatga

SEQ ID NO: 248340 - DNA, 15 bp, Homo sapiens
ctcaggttggggatg

SEQ ID NO: 248341 - DNA, 15 bp, Homo sapiens
cctcaggttggggat

SEQ ID NO: 248342 - DNA, 15 bp, Homo sapiens
tcctcaggttgggga

SEQ ID NO: 248343 - DNA, 15 bp, Homo sapiens
ttcctcaggttgggg

SEQ ID NO: 248344 - DNA, 15 bp, Homo sapiens
gttcctcaggttggg

SEQ ID NO: 248345 - DNA, 15 bp, Homo sapiens
cgttcctcaggttgg

SEQ ID NO: 248346 - DNA, 15 bp, Homo sapiens
acgttcctcaggttg

SEQ ID NO: 248347 - DNA, 15 bp, Homo sapiens
cacgttcctcaggtt

SEQ ID NO: 248348 - DNA, 15 bp, Homo sapiens
ccacgttcctcaggt

SEQ ID NO: 248349 - DNA, 15 bp, Homo sapiens
accacgttcctcagg

SEQ ID NO: 248350 - DNA, 15 bp, Homo sapiens
gaccacgttcctcag

SEQ ID NO: 248351 - DNA, 15 bp, Homo sapiens
cgaccacgttcctca

SEQ ID NO: 248352 - DNA, 15 bp, Homo sapiens
gcgaccacgttcctc

SEQ ID NO: 248353 - DNA, 15 bp, Homo sapiens
agcgaccacgttcct

SEQ ID NO: 248354 - DNA, 15 bp, Homo sapiens
gagcgaccacgttcc

SEQ ID NO: 248355 - DNA, 15 bp, Homo sapiens
agagcgaccacgttc

SEQ ID NO: 248356 - DNA, 15 bp, Homo sapiens
cagagcgaccacgtt

SEQ ID NO: 248357 - DNA, 15 bp, Homo sapiens
ccagagcgaccacgt

SEQ ID NO: 248358 - DNA, 15 bp, Homo sapiens
tccagagcgaccacg

SEQ ID NO: 248359 - DNA, 15 bp, Homo sapiens
gtccagagcgaccac

SEQ ID NO: 248360 - DNA, 15 bp, Homo sapiens
tgtccagagcgacca

SEQ ID NO: 248361 - DNA, 15 bp, Homo sapiens
gtgtccagagcgacc

SEQ ID NO: 248362 - DNA, 15 bp, Homo sapiens
cgtgtccagagcgac

SEQ ID NO: 248363 - DNA, 15 bp, Homo sapiens
ccgtgtccagagcga

SEQ ID NO: 248364 - DNA, 15 bp, Homo sapiens
tccgtgtccagagcg

SEQ ID NO: 248365 - DNA, 15 bp, Homo sapiens
ctccgtgtccagagc

SEQ ID NO: 248366 - DNA, 15 bp, Homo sapiens
cctccgtgtccagag

SEQ ID NO: 248367 - DNA, 15 bp, Homo sapiens
acctccgtgtccaga

SEQ ID NO: 248368 - DNA, 15 bp, Homo sapiens
cacctccgtgtccag

SEQ ID NO: 248369 - DNA, 15 bp, Homo sapiens
ccacctccgtgtcca

SEQ ID NO: 248370 - DNA, 15 bp, Homo sapiens
gccacctccgtgtcc

SEQ ID NO: 248371 - DNA, 15 bp, Homo sapiens
ggccacctccgtgtc

SEQ ID NO: 248372 - DNA, 15 bp, Homo sapiens
tggccacctccgtgt

SEQ ID NO: 248373 - DNA, 15 bp, Homo sapiens
ctggccacctccgtg

SEQ ID NO: 248374 - DNA, 15 bp, Homo sapiens
gctggccacctccgt

SEQ ID NO: 248375 - DNA, 15 bp, Homo sapiens
tgctggccacctccg

SEQ ID NO: 248376 - DNA, 15 bp, Homo sapiens
ttgctggccacctcc

SEQ ID NO: 248377 - DNA, 15 bp, Homo sapiens
attgctggccacctc

SEQ ID NO: 248378 - DNA, 15 bp, Homo sapiens
tattgctggccacct

SEQ ID NO: 248379 - DNA, 15 bp, Homo sapiens
ctattgctggccacc

SEQ ID NO: 248380 - DNA, 15 bp, Homo sapiens
tctattgctggccac

SEQ ID NO: 248381 - DNA, 15 bp, Homo sapiens
ttctattgctggcca

SEQ ID NO: 248382 - DNA, 15 bp, Homo sapiens
attctattgctggcc

SEQ ID NO: 248383 - DNA, 15 bp, Homo sapiens
gattctattgctggc

SEQ ID NO: 248384 - DNA, 15 bp, Homo sapiens
agattctattgctgg

SEQ ID NO: 248385 - DNA, 15 bp, Homo sapiens
tagattctattgctg

SEQ ID NO: 248386 - DNA, 15 bp, Homo sapiens
gtagattctattgct

SEQ ID NO: 248387 - DNA, 15 bp, Homo sapiens
agtagattctattgc

SEQ ID NO: 248388 - DNA, 15 bp, Homo sapiens
cagtagattctattg

SEQ ID NO: 248389 - DNA, 15 bp, Homo sapiens
ccagtagattctatt

SEQ ID NO: 248390 - DNA, 15 bp, Homo sapiens
accagtagattctat

SEQ ID NO: 248391 - DNA, 15 bp, Homo sapiens
gaccagtagattcta

SEQ ID NO: 248392 - DNA, 15 bp, Homo sapiens
agaccagtagattct

SEQ ID NO: 248393 - DNA, 15 bp, Homo sapiens
cagaccagtagattc

SEQ ID NO: 248394 - DNA, 15 bp, Homo sapiens
tcagaccagtagatt

SEQ ID NO: 248395 - DNA, 15 bp, Homo sapiens
gtcagaccagtagat

SEQ ID NO: 248396 - DNA, 15 bp, Homo sapiens
ggtcagaccagtaga

SEQ ID NO: 248397 - DNA, 15 bp, Homo sapiens
aggtcagaccagtag

SEQ ID NO: 248398 - DNA, 15 bp, Homo sapiens
caggtcagaccagta

SEQ ID NO: 248399 - DNA, 15 bp, Homo sapiens
acaggtcagaccagt

SEQ ID NO: 248400 - DNA, 15 bp, Homo sapiens
gacaggtcagaccag

SEQ ID NO: 248401 - DNA, 15 bp, Homo sapiens
ggacaggtcagacca

SEQ ID NO: 248402 - DNA, 15 bp, Homo sapiens
gggacaggtcagacc

SEQ ID NO: 248403 - DNA, 15 bp, Homo sapiens
tgggacaggtcagac

SEQ ID NO: 248404 - DNA, 15 bp, Homo sapiens
ctgggacaggtcaga

SEQ ID NO: 248405 - DNA, 15 bp, Homo sapiens
tctgggacaggtcag

SEQ ID NO: 248406 - DNA, 15 bp, Homo sapiens
ctctgggacaggtca

SEQ ID NO: 248407 - DNA, 15 bp, Homo sapiens
tctctgggacaggtc

SEQ ID NO: 248408 - DNA, 15 bp, Homo sapiens
ttctctgggacaggt

SEQ ID NO: 248409 - DNA, 15 bp, Homo sapiens
attctctgggacagg

SEQ ID NO: 248410 - DNA, 15 bp, Homo sapiens
cattctctgggacag

SEQ ID NO: 248411 - DNA, 15 bp, Homo sapiens
tcattctctgggaca

SEQ ID NO: 248412 - DNA, 15 bp, Homo sapiens
atcattctctgggac

SEQ ID NO: 248413 - DNA, 15 bp, Homo sapiens
gatcattctctggga

SEQ ID NO: 248414 - DNA, 15 bp, Homo sapiens
agatcattctctggg

SEQ ID NO: 248415 - DNA, 15 bp, Homo sapiens
cagatcattctctgg

SEQ ID NO: 248416 - DNA, 15 bp, Homo sapiens
gcagatcattctctg

SEQ ID NO: 248417 - DNA, 15 bp, Homo sapiens
tgcagatcattctct

SEQ ID NO: 248418 - DNA, 15 bp, Homo sapiens
ctgcagatcattctc

SEQ ID NO: 248419 - DNA, 15 bp, Homo sapiens
cctgcagatcattct

SEQ ID NO: 248420 - DNA, 15 bp, Homo sapiens
acctgcagatcattc

SEQ ID NO: 248421 - DNA, 15 bp, Homo sapiens
cacctgcagatcatt

SEQ ID NO: 248422 - DNA, 15 bp, Homo sapiens
tcacctgcagatcat

SEQ ID NO: 248423 - DNA, 15 bp, Homo sapiens
ctcacctgcagatca

SEQ ID NO: 248424 - DNA, 15 bp, Homo sapiens
gctcacctgcagatc

SEQ ID NO: 248425 - DNA, 15 bp, Homo sapiens
cgctcacctgcagat

SEQ ID NO: 248426 - DNA, 15 bp, Homo sapiens
acgctcacctgcaga

SEQ ID NO: 248427 - DNA, 15 bp, Homo sapiens
gacgctcacctgcag

SEQ ID NO: 248428 - DNA, 15 bp, Homo sapiens
cgacgctcacctgca

SEQ ID NO: 248429 - DNA, 15 bp, Homo sapiens
gcgacgctcacctgc

SEQ ID NO: 248430 - DNA, 15 bp, Homo sapiens
ggcgacgctcacctg

SEQ ID NO: 248431 - DNA, 15 bp, Homo sapiens
gggcgacgctcacct

SEQ ID NO: 248432 - DNA, 15 bp, Homo sapiens
ggggcgacgctcacc

SEQ ID NO: 248433 - DNA, 15 bp, Homo sapiens
aggggcgacgctcac

SEQ ID NO: 248434 - DNA, 15 bp, Homo sapiens
caggggcgacgctca

SEQ ID NO: 248435 - DNA, 15 bp, Homo sapiens
gcaggggcgacgctc

SEQ ID NO: 248436 - DNA, 15 bp, Homo sapiens
ggcaggggcgacgct

SEQ ID NO: 248437 - DNA, 15 bp, Homo sapiens
aggcaggggcgacgc

SEQ ID NO: 248438 - DNA, 15 bp, Homo sapiens
caggcaggggcgacg

SEQ ID NO: 248439 - DNA, 15 bp, Homo sapiens
gcaggcaggggcgac

SEQ ID NO: 248440 - DNA, 15 bp, Homo sapiens
tgcaggcaggggcga

SEQ ID NO: 248441 - DNA, 15 bp, Homo sapiens
ctgcaggcaggggcg

SEQ ID NO: 248442 - DNA, 15 bp, Homo sapiens
gctgcaggcaggggc

SEQ ID NO: 248443 - DNA, 15 bp, Homo sapiens
ggctgcaggcagggg

SEQ ID NO: 248444 - DNA, 15 bp, Homo sapiens
aggctgcaggcaggg

SEQ ID NO: 248445 - DNA, 15 bp, Homo sapiens
aaggctgcaggcagg

SEQ ID NO: 248446 - DNA, 15 bp, Homo sapiens
caaggctgcaggcag

SEQ ID NO: 248447 - DNA, 15 bp, Homo sapiens
ccaaggctgcaggca

SEQ ID NO: 248448 - DNA, 15 bp, Homo sapiens
gccaaggctgcaggc

SEQ ID NO: 248449 - DNA, 15 bp, Homo sapiens
ggccaaggctgcagg

SEQ ID NO: 248450 - DNA, 15 bp, Homo sapiens
gggccaaggctgcag

SEQ ID NO: 248451 - DNA, 15 bp, Homo sapiens
cgggccaaggctgca

SEQ ID NO: 248452 - DNA, 15 bp, Homo sapiens
gcgggccaaggctgc

SEQ ID NO: 248453 - DNA, 15 bp, Homo sapiens
tgcgggccaaggctg

SEQ ID NO: 248454 - DNA, 15 bp, Homo sapiens
ctgcgggccaaggct

SEQ ID NO: 248455 - DNA, 15 bp, Homo sapiens
cctgcgggccaaggc

SEQ ID NO: 248456 - DNA, 15 bp, Homo sapiens
acctgcgggccaagg

SEQ ID NO: 248457 - DNA, 15 bp, Homo sapiens
cacctgcgggccaag

SEQ ID NO: 248458 - DNA, 15 bp, Homo sapiens
tcacctgcgggccaa

SEQ ID NO: 248459 - DNA, 15 bp, Homo sapiens
ctcacctgcgggcca

SEQ ID NO: 248460 - DNA, 15 bp, Homo sapiens
tctcacctgcgggcc

SEQ ID NO: 248461 - DNA, 15 bp, Homo sapiens
atctcacctgcgggc

SEQ ID NO: 248462 - DNA, 15 bp, Homo sapiens
catctcacctgcggg

SEQ ID NO: 248463 - DNA, 15 bp, Homo sapiens
tcatctcacctgcgg

SEQ ID NO: 248464 - DNA, 15 bp, Homo sapiens
ctcatctcacctgcg

SEQ ID NO: 248465 - DNA, 15 bp, Homo sapiens
cctcatctcacctgc

SEQ ID NO: 248466 - DNA, 15 bp, Homo sapiens
ccctcatctcacctg

SEQ ID NO: 248467 - DNA, 15 bp, Homo sapiens
gccctcatctcacct

SEQ ID NO: 248468 - DNA, 15 bp, Homo sapiens
agccctcatctcacc

SEQ ID NO: 248469 - DNA, 15 bp, Homo sapiens
gagccctcatctcac

SEQ ID NO: 248470 - DNA, 15 bp, Homo sapiens
ggagccctcatctca

SEQ ID NO: 248471 - DNA, 15 bp, Homo sapiens
aggagccctcatctc

SEQ ID NO: 248472 - DNA, 15 bp, Homo sapiens
caggagccctcatct

SEQ ID NO: 248473 - DNA, 15 bp, Homo sapiens
ccaggagccctcatc

SEQ ID NO: 248474 - DNA, 15 bp, Homo sapiens
gccaggagccctcat

SEQ ID NO: 248475 - DNA, 15 bp, Homo sapiens
cgccaggagccctca

SEQ ID NO: 248476 - DNA, 15 bp, Homo sapiens
gcgccaggagccctc

SEQ ID NO: 248477 - DNA, 15 bp, Homo sapiens
agcgccaggagccct

SEQ ID NO: 248478 - DNA, 15 bp, Homo sapiens
cagcgccaggagccc

SEQ ID NO: 248479 - DNA, 15 bp, Homo sapiens
tcagcgccaggagcc

SEQ ID NO: 248480 - DNA, 15 bp, Homo sapiens
atcagcgccaggagc

SEQ ID NO: 248481 - DNA, 15 bp, Homo sapiens
catcagcgccaggag

SEQ ID NO: 248482 - DNA, 15 bp, Homo sapiens
gcatcagcgccagga

SEQ ID NO: 248483 - DNA, 15 bp, Homo sapiens
ggcatcagcgccagg

SEQ ID NO: 248484 - DNA, 15 bp, Homo sapiens
gggcatcagcgccag

SEQ ID NO: 248485 - DNA, 15 bp, Homo sapiens
agggcatcagcgcca

SEQ ID NO: 248486 - DNA, 15 bp, Homo sapiens
aagggcatcagcgcc

SEQ ID NO: 248487 - DNA, 15 bp, Homo sapiens
gaagggcatcagcgc

SEQ ID NO: 248488 - DNA, 15 bp, Homo sapiens
agaagggcatcagcg

SEQ ID NO: 248489 - DNA, 15 bp, Homo sapiens
gagaagggcatcagc

SEQ ID NO: 248490 - DNA, 15 bp, Homo sapiens
agagaagggcatcag

SEQ ID NO: 248491 - DNA, 15 bp, Homo sapiens
gagagaagggcatca

SEQ ID NO: 248492 - DNA, 15 bp, Homo sapiens
ggagagaagggcatc

SEQ ID NO: 248493 - DNA, 15 bp, Homo sapiens
aggagagaagggcat

SEQ ID NO: 248494 - DNA, 15 bp, Homo sapiens
gaggagagaagggca

SEQ ID NO: 248495 - DNA, 15 bp, Homo sapiens
ggaggagagaagggc

SEQ ID NO: 248496 - DNA, 15 bp, Homo sapiens
aggaggagagaaggg

SEQ ID NO: 248497 - DNA, 15 bp, Homo sapiens
caggaggagagaagg

SEQ ID NO: 248498 - DNA, 15 bp, Homo sapiens
gcaggaggagagaag

SEQ ID NO: 248499 - DNA, 15 bp, Homo sapiens
ggcaggaggagagaa

SEQ ID NO: 248500 - DNA, 15 bp, Homo sapiens
aggcaggaggagaga

SEQ ID NO: 248501 - DNA, 15 bp, Homo sapiens
gaggcaggaggagag

SEQ ID NO: 248502 - DNA, 15 bp, Homo sapiens
tgaggcaggaggaga

SEQ ID NO: 248503 - DNA, 15 bp, Homo sapiens
ctgaggcaggaggag

SEQ ID NO: 248504 - DNA, 15 bp, Homo sapiens
tgctgaggcaggagg

SEQ ID NO: 248505 - DNA, 15 bp, Homo sapiens
gtgctgaggcaggag

SEQ ID NO: 248506 - DNA, 15 bp, Homo sapiens
ggtgctgaggcagga

SEQ ID NO: 248507 - DNA, 15 bp, Homo sapiens
gggtgctgaggcagg

SEQ ID NO: 248508 - DNA, 15 bp, Homo sapiens
tgggtgctgaggcag

SEQ ID NO: 248509 - DNA, 15 bp, Homo sapiens
ctgggtgctgaggca

SEQ ID NO: 248510 - DNA, 15 bp, Homo sapiens
gctgggtgctgaggc

SEQ ID NO: 248511 - DNA, 15 bp, Homo sapiens
agctgggtgctgagg

SEQ ID NO: 248512 - DNA, 15 bp, Homo sapiens
aagctgggtgctgag

SEQ ID NO: 248513 - DNA, 15 bp, Homo sapiens
caagctgggtgctga

SEQ ID NO: 248514 - DNA, 15 bp, Homo sapiens
tcaagctgggtgctg

SEQ ID NO: 248515 - DNA, 15 bp, Homo sapiens
gtcaagctgggtgct

SEQ ID NO: 248516 - DNA, 15 bp, Homo sapiens
tgtcaagctgggtgc

SEQ ID NO: 248517 - DNA, 15 bp, Homo sapiens
ctgtcaagctgggtg

SEQ ID NO: 248518 - DNA, 15 bp, Homo sapiens
tctgtcaagctgggt

SEQ ID NO: 248519 - DNA, 15 bp, Homo sapiens
ctctgtcaagctggg

SEQ ID NO: 248520 - DNA, 15 bp, Homo sapiens
gctctgtcaagctgg

SEQ ID NO: 248521 - DNA, 15 bp, Homo sapiens
ggctctgtcaagctg

SEQ ID NO: 248522 - DNA, 15 bp, Homo sapiens
gggctctgtcaagct

SEQ ID NO: 248523 - DNA, 15 bp, Homo sapiens
tgggctctgtcaagc

SEQ ID NO: 248524 - DNA, 15 bp, Homo sapiens
gtgggctctgtcaag

SEQ ID NO: 248525 - DNA, 15 bp, Homo sapiens
cgtgggctctgtcaa

SEQ ID NO: 248526 - DNA, 15 bp, Homo sapiens
ccgtgggctctgtca

SEQ ID NO: 248527 - DNA, 15 bp, Homo sapiens
gccgtgggctctgtc

SEQ ID NO: 248528 - DNA, 15 bp, Homo sapiens
cgccgtgggctctgt

SEQ ID NO: 248529 - DNA, 15 bp, Homo sapiens
acgccgtgggctctg

SEQ ID NO: 248530 - DNA, 15 bp, Homo sapiens
gacgccgtgggctct

SEQ ID NO: 248531 - DNA, 15 bp, Homo sapiens
agacgccgtgggctc

SEQ ID NO: 248532 - DNA, 15 bp, Homo sapiens
gagacgccgtgggct

SEQ ID NO: 248533 - DNA, 15 bp, Homo sapiens
agagacgccgtgggc

SEQ ID NO: 248534 - DNA, 15 bp, Homo sapiens
aagagacgccgtggg

SEQ ID NO: 248535 - DNA, 15 bp, Homo sapiens
gaagagacgccgtgg

SEQ ID NO: 248536 - DNA, 15 bp, Homo sapiens
ggaagagacgccgtg

SEQ ID NO: 248537 - DNA, 15 bp, Homo sapiens
aggaagagacgccgt

SEQ ID NO: 248538 - DNA, 15 bp, Homo sapiens
taggaagagacgccg

SEQ ID NO: 248539 - DNA, 15 bp, Homo sapiens
ataggaagagacgcc

SEQ ID NO: 248540 - DNA, 15 bp, Homo sapiens
cataggaagagacgc

SEQ ID NO: 248541 - DNA, 15 bp, Homo sapiens
tcataggaagagacg

SEQ ID NO: 248542 - DNA, 15 bp, Homo sapiens
gtcataggaagagac

SEQ ID NO: 248543 - DNA, 15 bp, Homo sapiens
tgtcataggaagaga

SEQ ID NO: 248544 - DNA, 15 bp, Homo sapiens
gtgtcataggaagag

SEQ ID NO: 248545 - DNA, 15 bp, Homo sapiens
ggtgtcataggaaga

SEQ ID NO: 248546 - DNA, 15 bp, Homo sapiens
cggtgtcataggaag

SEQ ID NO: 248547 - DNA, 15 bp, Homo sapiens
acggtgtcataggaa

SEQ ID NO: 248548 - DNA, 15 bp, Homo sapiens
gacggtgtcatagga

SEQ ID NO: 248549 - DNA, 15 bp, Homo sapiens
tgacggtgtcatagg

SEQ ID NO: 248550 - DNA, 15 bp, Homo sapiens
atgacggtgtcatag

SEQ ID NO: 248551 - DNA, 15 bp, Homo sapiens
gatgacggtgtcata

SEQ ID NO: 248552 - DNA, 15 bp, Homo sapiens
tgatgacggtgtcat

SEQ ID NO: 248553 - DNA, 15 bp, Homo sapiens
ctgatgacggtgtca

SEQ ID NO: 248554 - DNA, 15 bp, Homo sapiens
gctgatgacggtgtc

SEQ ID NO: 248555 - DNA, 15 bp, Homo sapiens
tgctgatgacggtgt

SEQ ID NO: 248556 - DNA, 15 bp, Homo sapiens
ctgctgatgacggtg

SEQ ID NO: 248557 - DNA, 15 bp, Homo sapiens
tctgctgatgacggt

SEQ ID NO: 248558 - DNA, 15 bp, Homo sapiens
ctctgctgatgacgg

SEQ ID NO: 248559 - DNA, 15 bp, Homo sapiens
tctctgctgatgacg

SEQ ID NO: 248560 - DNA, 15 bp, Homo sapiens
gtctctgctgatgac

SEQ ID NO: 248561 - DNA, 15 bp, Homo sapiens
tgtctctgctgatga

SEQ ID NO: 248562 - DNA, 15 bp, Homo sapiens
atgtctctgctgatg

SEQ ID NO: 248563 - DNA, 15 bp, Homo sapiens
gatgtctctgctgat

SEQ ID NO: 248564 - DNA, 15 bp, Homo sapiens
ggatgtctctgctga

SEQ ID NO: 248565 - DNA, 15 bp, Homo sapiens
tggatgtctctgctg

SEQ ID NO: 248566 - DNA, 15 bp, Homo sapiens
ctggatgtctctgct

SEQ ID NO: 248567 - DNA, 15 bp, Homo sapiens
cctggatgtctctgc

SEQ ID NO: 248568 - DNA, 15 bp, Homo sapiens
gcctggatgtctctg

SEQ ID NO: 248569 - DNA, 15 bp, Homo sapiens
ggcctggatgtctct

SEQ ID NO: 248570 - DNA, 15 bp, Homo sapiens
gggcctggatgtctc

SEQ ID NO: 248571 - DNA, 15 bp, Homo sapiens
ggggcctggatgtct

SEQ ID NO: 248572 - DNA, 15 bp, Homo sapiens
gggggcctggatgtc

SEQ ID NO: 248573 - DNA, 15 bp, Homo sapiens
cgggggcctggatgt

SEQ ID NO: 248574 - DNA, 15 bp, Homo sapiens
tcgggggcctggatg

SEQ ID NO: 248575 - DNA, 15 bp, Homo sapiens
gtcgggggcctggat

SEQ ID NO: 248576 - DNA, 15 bp, Homo sapiens
cgtcgggggcctgga

SEQ ID NO: 248577 - DNA, 15 bp, Homo sapiens
ccgtcgggggcctgg

SEQ ID NO: 248578 - DNA, 15 bp, Homo sapiens
cccgtcgggggcctg

SEQ ID NO: 248579 - DNA, 15 bp, Homo sapiens
gcccgtcgggggcct

SEQ ID NO: 248580 - DNA, 15 bp, Homo sapiens
agcccgtcgggggcc

SEQ ID NO: 248581 - DNA, 15 bp, Homo sapiens
cagcccgtcgggggc

SEQ ID NO: 248582 - DNA, 15 bp, Homo sapiens
ccagcccgtcggggg

SEQ ID NO: 248583 - DNA, 15 bp, Homo sapiens
gccagcccgtcgggg

SEQ ID NO: 248584 - DNA, 15 bp, Homo sapiens
agccagcccgtcggg

SEQ ID NO: 248585 - DNA, 15 bp, Homo sapiens
cagccagcccgtcgg

SEQ ID NO: 248586 - DNA, 15 bp, Homo sapiens
acagccagcccgtcg

SEQ ID NO: 248587 - DNA, 15 bp, Homo sapiens
cacagccagcccgtc

SEQ ID NO: 248588 - DNA, 15 bp, Homo sapiens
ccacagccagcccgt

SEQ ID NO: 248589 - DNA, 15 bp, Homo sapiens
tccacagccagcccg

SEQ ID NO: 248590 - DNA, 15 bp, Homo sapiens
gtccacagccagccc

SEQ ID NO: 248591 - DNA, 15 bp, Homo sapiens
agtccacagccagcc

SEQ ID NO: 248592 - DNA, 15 bp, Homo sapiens
cagtccacagccagc

SEQ ID NO: 248593 - DNA, 15 bp, Homo sapiens
ccagtccacagccag

SEQ ID NO: 248594 - DNA, 15 bp, Homo sapiens
tccagtccacagcca

SEQ ID NO: 248595 - DNA, 15 bp, Homo sapiens
atccagtccacagcc

SEQ ID NO: 248596 - DNA, 15 bp, Homo sapiens
gatccagtccacagc

SEQ ID NO: 248597 - DNA, 15 bp, Homo sapiens
ggatccagtccacag

SEQ ID NO: 248598 - DNA, 15 bp, Homo sapiens
tggatccagtccaca

SEQ ID NO: 248599 - DNA, 15 bp, Homo sapiens
gtggatccagtccac

SEQ ID NO: 248600 - DNA, 15 bp, Homo sapiens
tgtggatccagtcca

SEQ ID NO: 248601 - DNA, 15 bp, Homo sapiens
ctgtggatccagtcc

SEQ ID NO: 248602 - DNA, 15 bp, Homo sapiens
gctgtggatccagtc

SEQ ID NO: 248603 - DNA, 15 bp, Homo sapiens
tgctgtggatccagt

SEQ ID NO: 248604 - DNA, 15 bp, Homo sapiens
ttgctgtggatccag

SEQ ID NO: 248605 - DNA, 15 bp, Homo sapiens
gttgctgtggatcca

SEQ ID NO: 248606 - DNA, 15 bp, Homo sapiens
tgttgctgtggatcc

SEQ ID NO: 248607 - DNA, 15 bp, Homo sapiens
atgttgctgtggatc

SEQ ID NO: 248608 - DNA, 15 bp, Homo sapiens
gatgttgctgtggat

SEQ ID NO: 248609 - DNA, 15 bp, Homo sapiens
agatgttgctgtgga

SEQ ID NO: 248610 - DNA, 15 bp, Homo sapiens
tagatgttgctgtgg

SEQ ID NO: 248611 - DNA, 15 bp, Homo sapiens
gtagatgttgctgtg

SEQ ID NO: 248612 - DNA, 15 bp, Homo sapiens
agtagatgttgctgt

SEQ ID NO: 248613 - DNA, 15 bp, Homo sapiens
cagtagatgttgctg

SEQ ID NO: 248614 - DNA, 15 bp, Homo sapiens
ccagtagatgttgct

SEQ ID NO: 248615 - DNA, 15 bp, Homo sapiens
tccagtagatgttgc

SEQ ID NO: 248616 - DNA, 15 bp, Homo sapiens
gtccagtagatgttg

SEQ ID NO: 248617 - DNA, 15 bp, Homo sapiens
ggtccagtagatgtt

SEQ ID NO: 248618 - DNA, 15 bp, Homo sapiens
cggtccagtagatgt

SEQ ID NO: 248619 - DNA, 15 bp, Homo sapiens
tcggtccagtagatg

SEQ ID NO: 248620 - DNA, 15 bp, Homo sapiens
gtcggtccagtagat

SEQ ID NO: 248621 - DNA, 15 bp, Homo sapiens
agtcggtccagtaga

SEQ ID NO: 248622 - DNA, 15 bp, Homo sapiens
gagtcggtccagtag

SEQ ID NO: 248623 - DNA, 15 bp, Homo sapiens
agagtcggtccagta

SEQ ID NO: 248624 - DNA, 15 bp, Homo sapiens
cagagtcggtccagt

SEQ ID NO: 248625 - DNA, 15 bp, Homo sapiens
acagagtcggtccag

SEQ ID NO: 248626 - DNA, 15 bp, Homo sapiens
gacagagtcggtcca

SEQ ID NO: 248627 - DNA, 15 bp, Homo sapiens
ggacagagtcggtcc

SEQ ID NO: 248628 - DNA, 15 bp, Homo sapiens
aggacagagtcggtc

SEQ ID NO: 248629 - DNA, 15 bp, Homo sapiens
caggacagagtcggt

SEQ ID NO: 248630 - DNA, 15 bp, Homo sapiens
ccaggacagagtcgg

SEQ ID NO: 248631 - DNA, 15 bp, Homo sapiens
cccaggacagagtcg

SEQ ID NO: 248632 - DNA, 15 bp, Homo sapiens
gcccaggacagagtc

SEQ ID NO: 248633 - DNA, 15 bp, Homo sapiens
tgcccaggacagagt

SEQ ID NO: 248634 - DNA, 15 bp, Homo sapiens
gtgcccaggacagag

SEQ ID NO: 248635 - DNA, 15 bp, Homo sapiens
agtgcccaggacaga

SEQ ID NO: 248636 - DNA, 15 bp, Homo sapiens
cagtgcccaggacag

SEQ ID NO: 248637 - DNA, 15 bp, Homo sapiens
acagtgcccaggaca

SEQ ID NO: 248638 - DNA, 15 bp, Homo sapiens
gacagtgcccaggac

SEQ ID NO: 248639 - DNA, 15 bp, Homo sapiens
agacagtgcccagga

SEQ ID NO: 248640 - DNA, 15 bp, Homo sapiens
gagacagtgcccagg

SEQ ID NO: 248641 - DNA, 15 bp, Homo sapiens
agagacagtgcccag

SEQ ID NO: 248642 - DNA, 15 bp, Homo sapiens
cagagacagtgccca

SEQ ID NO: 248643 - DNA, 15 bp, Homo sapiens
acagagacagtgccc

SEQ ID NO: 248644 - DNA, 15 bp, Homo sapiens
aacagagacagtgcc

SEQ ID NO: 248645 - DNA, 15 bp, Homo sapiens
caacagagacagtgc

SEQ ID NO: 248646 - DNA, 15 bp, Homo sapiens
gcaacagagacagtg

SEQ ID NO: 248647 - DNA, 15 bp, Homo sapiens
cgcaacagagacagt

SEQ ID NO: 248648 - DNA, 15 bp, Homo sapiens
ccgcaacagagacag

SEQ ID NO: 248649 - DNA, 15 bp, Homo sapiens
tccgcaacagagaca

SEQ ID NO: 248650 - DNA, 15 bp, Homo sapiens
atccgcaacagagac

SEQ ID NO: 248651 - DNA, 15 bp, Homo sapiens
tatccgcaacagaga

SEQ ID NO: 248652 - DNA, 15 bp, Homo sapiens
gtatccgcaacagag

SEQ ID NO: 248653 - DNA, 15 bp, Homo sapiens
ggtatccgcaacaga

SEQ ID NO: 248654 - DNA, 15 bp, Homo sapiens
tggtatccgcaacag

SEQ ID NO: 248655 - DNA, 15 bp, Homo sapiens
ttggtatccgcaaca

SEQ ID NO: 248656 - DNA, 15 bp, Homo sapiens
cttggtatccgcaac

SEQ ID NO: 248657 - DNA, 15 bp, Homo sapiens
ccttggtatccgcaa

SEQ ID NO: 248658 - DNA, 15 bp, Homo sapiens
cccttggtatccgca

SEQ ID NO: 248659 - DNA, 15 bp, Homo sapiens
gcccttggtatccgc

SEQ ID NO: 248660 - DNA, 15 bp, Homo sapiens
cgcccttggtatccg

SEQ ID NO: 248661 - DNA, 15 bp, Homo sapiens
acgcccttggtatcc

SEQ ID NO: 248662 - DNA, 15 bp, Homo sapiens
cacgcccttggtatc

SEQ ID NO: 248663 - DNA, 15 bp, Homo sapiens
tcacgcccttggtat

SEQ ID NO: 248664 - DNA, 15 bp, Homo sapiens
ttcacgcccttggta

SEQ ID NO: 248665 - DNA, 15 bp, Homo sapiens
cttcacgcccttggt

SEQ ID NO: 248666 - DNA, 15 bp, Homo sapiens
tcttcacgcccttgg

SEQ ID NO: 248667 - DNA, 15 bp, Homo sapiens
ctcttcacgcccttg

SEQ ID NO: 248668 - DNA, 15 bp, Homo sapiens
cctcttcacgccctt

SEQ ID NO: 248669 - DNA, 15 bp, Homo sapiens
tcctcttcacgccct

SEQ ID NO: 248670 - DNA, 15 bp, Homo sapiens
ttcctcttcacgccc

SEQ ID NO: 248671 - DNA, 15 bp, Homo sapiens
tttcctcttcacgcc

SEQ ID NO: 248672 - DNA, 15 bp, Homo sapiens
ttttcctcttcacgc

SEQ ID NO: 248673 - DNA, 15 bp, Homo sapiens
gttttcctcttcacg

SEQ ID NO: 248674 - DNA, 15 bp, Homo sapiens
cgttttcctcttcac

SEQ ID NO: 248675 - DNA, 15 bp, Homo sapiens
acgttttcctcttca

SEQ ID NO: 248676 - DNA, 15 bp, Homo sapiens
aacgttttcctcttc

SEQ ID NO: 248677 - DNA, 15 bp, Homo sapiens
taacgttttcctctt

SEQ ID NO: 248678 - DNA, 15 bp, Homo sapiens
ataacgttttcctct

SEQ ID NO: 248679 - DNA, 15 bp, Homo sapiens
aataacgttttcctc

SEQ ID NO: 248680 - DNA, 15 bp, Homo sapiens
gaataacgttttcct

SEQ ID NO: 248681 - DNA, 15 bp, Homo sapiens
tgaataacgttttcc

SEQ ID NO: 248682 - DNA, 15 bp, Homo sapiens
ctgaataacgttttc

SEQ ID NO: 248683 - DNA, 15 bp, Homo sapiens
cctgaataacgtttt

SEQ ID NO: 248684 - DNA, 15 bp, Homo sapiens
ccctgaataacgttt

SEQ ID NO: 248685 - DNA, 15 bp, Homo sapiens
tccctgaataacgtt

SEQ ID NO: 248686 - DNA, 15 bp, Homo sapiens
ctccctgaataacgt

SEQ ID NO: 248687 - DNA, 15 bp, Homo sapiens
tctccctgaataacg

SEQ ID NO: 248688 - DNA, 15 bp, Homo sapiens
ttctccctgaataac

SEQ ID NO: 248689 - DNA, 15 bp, Homo sapiens
gttctccctgaataa

SEQ ID NO: 248690 - DNA, 15 bp, Homo sapiens
cgttctccctgaata

SEQ ID NO: 248691 - DNA, 15 bp, Homo sapiens
ccgttctccctgaat

SEQ ID NO: 248692 - DNA, 15 bp, Homo sapiens
gccgttctccctgaa

SEQ ID NO: 248693 - DNA, 15 bp, Homo sapiens
agccgttctccctga

SEQ ID NO: 248694 - DNA, 15 bp, Homo sapiens
gagccgttctccctg

SEQ ID NO: 248695 - DNA, 15 bp, Homo sapiens
ggagccgttctccct

SEQ ID NO: 248696 - DNA, 15 bp, Homo sapiens
tggagccgttctccc

SEQ ID NO: 248697 - DNA, 15 bp, Homo sapiens
ttggagccgttctcc

SEQ ID NO: 248698 - DNA, 15 bp, Homo sapiens
cttggagccgttctc

SEQ ID NO: 248699 - DNA, 15 bp, Homo sapiens
gcttggagccgttct

SEQ ID NO: 248700 - DNA, 15 bp, Homo sapiens
ggcttggagccgttc

SEQ ID NO: 248701 - DNA, 15 bp, Homo sapiens
tggcttggagccgtt

SEQ ID NO: 248702 - DNA, 15 bp, Homo sapiens
ttggcttggagccgt

SEQ ID NO: 248703 - DNA, 15 bp, Homo sapiens
cttggcttggagccg

SEQ ID NO: 248704 - DNA, 15 bp, Homo sapiens
ccttggcttggagcc

SEQ ID NO: 248705 - DNA, 15 bp, Homo sapiens
cccttggcttggagc

SEQ ID NO: 248706 - DNA, 15 bp, Homo sapiens
gcccttggcttggag

SEQ ID NO: 248707 - DNA, 15 bp, Homo sapiens
ggcccttggcttgga

SEQ ID NO: 248708 - DNA, 15 bp, Homo sapiens
tggcccttggcttgg

SEQ ID NO: 248709 - DNA, 15 bp, Homo sapiens
atggcccttggcttg

SEQ ID NO: 248710 - DNA, 15 bp, Homo sapiens
gatggcccttggctt

SEQ ID NO: 248711 - DNA, 15 bp, Homo sapiens
cgatggcccttggct

SEQ ID NO: 248712 - DNA, 15 bp, Homo sapiens
acgatggcccttggc

SEQ ID NO: 248713 - DNA, 15 bp, Homo sapiens
cacgatggcccttgg

SEQ ID NO: 248714 - DNA, 15 bp, Homo sapiens
ccacgatggcccttg

SEQ ID NO: 248715 - DNA, 15 bp, Homo sapiens
accacgatggccctt

SEQ ID NO: 248716 - DNA, 15 bp, Homo sapiens
caccacgatggccct

SEQ ID NO: 248717 - DNA, 15 bp, Homo sapiens
ccaccacgatggccc

SEQ ID NO: 248718 - DNA, 15 bp, Homo sapiens
tccaccacgatggcc

SEQ ID NO: 248719 - DNA, 15 bp, Homo sapiens
atccaccacgatggc

SEQ ID NO: 248720 - DNA, 15 bp, Homo sapiens
gatccaccacgatgg

SEQ ID NO: 248721 - DNA, 15 bp, Homo sapiens
ggatccaccacgatg

SEQ ID NO: 248722 - DNA, 15 bp, Homo sapiens
aggatccaccacgat

SEQ ID NO: 248723 - DNA, 15 bp, Homo sapiens
caggatccaccacga

SEQ ID NO: 248724 - DNA, 15 bp, Homo sapiens
acaggatccaccacg

SEQ ID NO: 248725 - DNA, 15 bp, Homo sapiens
aacaggatccaccac

SEQ ID NO: 248726 - DNA, 15 bp, Homo sapiens
gaacaggatccacca

SEQ ID NO: 248727 - DNA, 15 bp, Homo sapiens
tgaacaggatccacc

SEQ ID NO: 248728 - DNA, 15 bp, Homo sapiens
atgaacaggatccac

SEQ ID NO: 248729 - DNA, 15 bp, Homo sapiens
catgaacaggatcca

SEQ ID NO: 248730 - DNA, 15 bp, Homo sapiens
ccatgaacaggatcc

SEQ ID NO: 248731 - DNA, 15 bp, Homo sapiens
cccatgaacaggatc

SEQ ID NO: 248732 - DNA, 15 bp, Homo sapiens
acccatgaacaggat

SEQ ID NO: 248733 - DNA, 15 bp, Homo sapiens
cacccatgaacagga

SEQ ID NO: 248734 - DNA, 15 bp, Homo sapiens
gcacccatgaacagg

SEQ ID NO: 248735 - DNA, 15 bp, Homo sapiens
cgcacccatgaacag

SEQ ID NO: 248736 - DNA, 15 bp, Homo sapiens
acgcacccatgaaca

SEQ ID NO: 248737 - DNA, 15 bp, Homo sapiens
tacgcacccatgaac

SEQ ID NO: 248738 - DNA, 15 bp, Homo sapiens
atacgcacccatgaa

SEQ ID NO: 248739 - DNA, 15 bp, Homo sapiens
gatacgcacccatga

SEQ ID NO: 248740 - DNA, 15 bp, Homo sapiens
ggatacgcacccatg

SEQ ID NO: 248741 - DNA, 15 bp, Homo sapiens
tggatacgcacccat

SEQ ID NO: 248742 - DNA, 15 bp, Homo sapiens
gtggatacgcaccca

SEQ ID NO: 248743 - DNA, 15 bp, Homo sapiens
cgtggatacgcaccc

SEQ ID NO: 248744 - DNA, 15 bp, Homo sapiens
tcgtggatacgcacc

SEQ ID NO: 248745 - DNA, 15 bp, Homo sapiens
gtcgtggatacgcac

SEQ ID NO: 248746 - DNA, 15 bp, Homo sapiens
cgtcgtggatacgca

SEQ ID NO: 248747 - DNA, 15 bp, Homo sapiens
gcgtcgtggatacgc

SEQ ID NO: 248748 - DNA, 15 bp, Homo sapiens
agcgtcgtggatacg

SEQ ID NO: 248749 - DNA, 15 bp, Homo sapiens
cagcgtcgtggatac

SEQ ID NO: 248750 - DNA, 15 bp, Homo sapiens
tcagcgtcgtggata

SEQ ID NO: 248751 - DNA, 15 bp, Homo sapiens
ctcagcgtcgtggat

SEQ ID NO: 248752 - DNA, 15 bp, Homo sapiens
cctcagcgtcgtgga

SEQ ID NO: 248753 - DNA, 15 bp, Homo sapiens
ccctcagcgtcgtgg

SEQ ID NO: 248754 - DNA, 15 bp, Homo sapiens
gccctcagcgtcgtg

SEQ ID NO: 248755 - DNA, 15 bp, Homo sapiens
agccctcagcgtcgt

SEQ ID NO: 248756 - DNA, 15 bp, Homo sapiens
cagccctcagcgtcg

SEQ ID NO: 248757 - DNA, 15 bp, Homo sapiens
gcagccctcagcgtc

SEQ ID NO: 248758 - DNA, 15 bp, Homo sapiens
tgcagccctcagcgt

SEQ ID NO: 248759 - DNA, 15 bp, Homo sapiens
ctgcagccctcagcg

SEQ ID NO: 248760 - DNA, 15 bp, Homo sapiens
tctgcagccctcagc

SEQ ID NO: 248761 - DNA, 15 bp, Homo sapiens
ctctgcagccctcag

SEQ ID NO: 248762 - DNA, 15 bp, Homo sapiens
cctctgcagccctca

SEQ ID NO: 248763 - DNA, 15 bp, Homo sapiens
ccctctgcagccctc

SEQ ID NO: 248764 - DNA, 15 bp, Homo sapiens
tccctctgcagccct

SEQ ID NO: 248765 - DNA, 15 bp, Homo sapiens
ttccctctgcagccc

SEQ ID NO: 248766 - DNA, 15 bp, Homo sapiens
attccctctgcagcc

SEQ ID NO: 248767 - DNA, 15 bp, Homo sapiens
cattccctctgcagc

SEQ ID NO: 248768 - DNA, 15 bp, Homo sapiens
ccattccctctgcag

SEQ ID NO: 248769 - DNA, 15 bp, Homo sapiens
tccattccctctgca

SEQ ID NO: 248770 - DNA, 15 bp, Homo sapiens
ctccattccctctgc

SEQ ID NO: 248771 - DNA, 15 bp, Homo sapiens
cctccattccctctg

SEQ ID NO: 248772 - DNA, 15 bp, Homo sapiens
ccctccattccctct

SEQ ID NO: 248773 - DNA, 15 bp, Homo sapiens
tccctccattccctc

SEQ ID NO: 248774 - DNA, 15 bp, Homo sapiens
ctccctccattccct

SEQ ID NO: 248775 - DNA, 15 bp, Homo sapiens
gctccctccattccc

SEQ ID NO: 248776 - DNA, 15 bp, Homo sapiens
tgctccctccattcc

SEQ ID NO: 248777 - DNA, 15 bp, Homo sapiens
ctgctccctccattc

SEQ ID NO: 248778 - DNA, 15 bp, Homo sapiens
cctgctccctccatt

SEQ ID NO: 248779 - DNA, 15 bp, Homo sapiens
tcctgctccctccat

SEQ ID NO: 248780 - DNA, 15 bp, Homo sapiens
ttcctgctccctcca

SEQ ID NO: 248781 - DNA, 15 bp, Homo sapiens
cttcctgctccctcc

SEQ ID NO: 248782 - DNA, 15 bp, Homo sapiens
ccttcctgctccctc

SEQ ID NO: 248783 - DNA, 15 bp, Homo sapiens
tccttcctgctccct

SEQ ID NO: 248784 - DNA, 15 bp, Homo sapiens
ctccttcctgctccc

SEQ ID NO: 248785 - DNA, 15 bp, Homo sapiens
gctccttcctgctcc

SEQ ID NO: 248786 - DNA, 15 bp, Homo sapiens
agctccttcctgctc

SEQ ID NO: 248787 - DNA, 15 bp, Homo sapiens
aagctccttcctgct

SEQ ID NO: 248788 - DNA, 15 bp, Homo sapiens
gaagctccttcctgc

SEQ ID NO: 248789 - DNA, 15 bp, Homo sapiens
tgaagctccttcctg

SEQ ID NO: 248790 - DNA, 15 bp, Homo sapiens
ctgaagctccttcct

SEQ ID NO: 248791 - DNA, 15 bp, Homo sapiens
cctgaagctccttcc

SEQ ID NO: 248792 - DNA, 15 bp, Homo sapiens
tcctgaagctccttc

SEQ ID NO: 248793 - DNA, 15 bp, Homo sapiens
ttcctgaagctcctt

SEQ ID NO: 248794 - DNA, 15 bp, Homo sapiens
gttcctgaagctcct

SEQ ID NO: 248795 - DNA, 15 bp, Homo sapiens
agttcctgaagctcc

SEQ ID NO: 248796 - DNA, 15 bp, Homo sapiens
cagttcctgaagctc

SEQ ID NO: 248797 - DNA, 15 bp, Homo sapiens
ccagttcctgaagct

SEQ ID NO: 248798 - DNA, 15 bp, Homo sapiens
accagttcctgaagc

SEQ ID NO: 248799 - DNA, 15 bp, Homo sapiens
aaccagttcctgaag

SEQ ID NO: 248800 - DNA, 15 bp, Homo sapiens
taaccagttcctgaa

SEQ ID NO: 248801 - DNA, 15 bp, Homo sapiens
ctaaccagttcctga

SEQ ID NO: 248802 - DNA, 15 bp, Homo sapiens
actaaccagttcctg

SEQ ID NO: 248803 - DNA, 15 bp, Homo sapiens
cactaaccagttcct

SEQ ID NO: 248804 - DNA, 15 bp, Homo sapiens
ccactaaccagttcc

SEQ ID NO: 248805 - DNA, 15 bp, Homo sapiens
cccactaaccagttc

SEQ ID NO: 248806 - DNA, 15 bp, Homo sapiens
gcccactaaccagtt

SEQ ID NO: 248807 - DNA, 15 bp, Homo sapiens
agcccactaaccagt

SEQ ID NO: 248808 - DNA, 15 bp, Homo sapiens
cagcccactaaccag

SEQ ID NO: 248809 - DNA, 15 bp, Homo sapiens
ccagcccactaacca

SEQ ID NO: 248810 - DNA, 15 bp, Homo sapiens
cccagcccactaacc

SEQ ID NO: 248811 - DNA, 15 bp, Homo sapiens
gcccagcccactaac

SEQ ID NO: 248812 - DNA, 15 bp, Homo sapiens
tgcccagcccactaa

SEQ ID NO: 248813 - DNA, 15 bp, Homo sapiens
atgcccagcccacta

SEQ ID NO: 248814 - DNA, 15 bp, Homo sapiens
catgcccagcccact

SEQ ID NO: 248815 - DNA, 15 bp, Homo sapiens
ccatgcccagcccac

SEQ ID NO: 248816 - DNA, 15 bp, Homo sapiens
accatgcccagccca

SEQ ID NO: 248817 - DNA, 15 bp, Homo sapiens
caccatgcccagccc

SEQ ID NO: 248818 - DNA, 15 bp, Homo sapiens
ttgagccaccatgcc

SEQ ID NO: 248819 - DNA, 15 bp, Homo sapiens
tttgagccaccatgc

SEQ ID NO: 248820 - DNA, 15 bp, Homo sapiens
ctttgagccaccatg

SEQ ID NO: 248821 - DNA, 15 bp, Homo sapiens
gctttgagccaccat

SEQ ID NO: 248822 - DNA, 15 bp, Homo sapiens
tgctttgagccacca

SEQ ID NO: 248823 - DNA, 15 bp, Homo sapiens
gtgctttgagccacc

SEQ ID NO: 248824 - DNA, 15 bp, Homo sapiens
ggtgctttgagccac

SEQ ID NO: 248825 - DNA, 15 bp, Homo sapiens
aggtgctttgagcca

SEQ ID NO: 248826 - DNA, 15 bp, Homo sapiens
caggtgctttgagcc

SEQ ID NO: 248827 - DNA, 15 bp, Homo sapiens
acaggtgctttgagc

SEQ ID NO: 248828 - DNA, 15 bp, Homo sapiens
tacaggtgctttgag

SEQ ID NO: 248829 - DNA, 15 bp, Homo sapiens
ttacaggtgctttga

SEQ ID NO: 248830 - DNA, 15 bp, Homo sapiens
attacaggtgctttg

SEQ ID NO: 248831 - DNA, 15 bp, Homo sapiens
gattacaggtgcttt

SEQ ID NO: 248832 - DNA, 15 bp, Homo sapiens
ggattacaggtgctt

SEQ ID NO: 248833 - DNA, 15 bp, Homo sapiens
gggattacaggtgct

SEQ ID NO: 248834 - DNA, 15 bp, Homo sapiens
cacccaccttggcct

SEQ ID NO: 248835 - DNA, 15 bp, Homo sapiens
ccacccaccttggcc

SEQ ID NO: 248836 - DNA, 15 bp, Homo sapiens
tccacccaccttggc

SEQ ID NO: 248837 - DNA, 15 bp, Homo sapiens
atccacccaccttgg

SEQ ID NO: 248838 - DNA, 15 bp, Homo sapiens
gatccacccaccttg

SEQ ID NO: 248839 - DNA, 15 bp, Homo sapiens
tgatccacccacctt

SEQ ID NO: 248840 - DNA, 15 bp, Homo sapiens
atgatccacccacct

SEQ ID NO: 248841 - DNA, 15 bp, Homo sapiens
gatgatccacccacc

SEQ ID NO: 248842 - DNA, 15 bp, Homo sapiens
tgatgatccacccac

SEQ ID NO: 248843 - DNA, 15 bp, Homo sapiens
ttgatgatccaccca

SEQ ID NO: 248844 - DNA, 15 bp, Homo sapiens
cttgatgatccaccc

SEQ ID NO: 248845 - DNA, 15 bp, Homo sapiens
tcttgatgatccacc

SEQ ID NO: 248846 - DNA, 15 bp, Homo sapiens
gtcttgatgatccac

SEQ ID NO: 248847 - DNA, 15 bp, Homo sapiens
ggtcttgatgatcca

SEQ ID NO: 248848 - DNA, 15 bp, Homo sapiens
tggtcttgatgatcc

SEQ ID NO: 248849 - DNA, 15 bp, Homo sapiens
ctggtcttgatgatc

SEQ ID NO: 248850 - DNA, 15 bp, Homo sapiens
gctggtcttgatgat

SEQ ID NO: 248851 - DNA, 15 bp, Homo sapiens
ggctggtcttgatga

SEQ ID NO: 248852 - DNA, 15 bp, Homo sapiens
aggctggtcttgatg

SEQ ID NO: 248853 - DNA, 15 bp, Homo sapiens
caggctggtcttgat

SEQ ID NO: 248854 - DNA, 15 bp, Homo sapiens
tcaggctggtcttga

SEQ ID NO: 248855 - DNA, 15 bp, Homo sapiens
gtcaggctggtcttg

SEQ ID NO: 248856 - DNA, 15 bp, Homo sapiens
ggtcaggctggtctt

SEQ ID NO: 248857 - DNA, 15 bp, Homo sapiens
accatgttggtcagg

SEQ ID NO: 248858 - DNA, 15 bp, Homo sapiens
caccatgttggtcag

SEQ ID NO: 248859 - DNA, 15 bp, Homo sapiens
tcaccatgttggtca

SEQ ID NO: 248860 - DNA, 15 bp, Homo sapiens
ttcaccatgttggtc

SEQ ID NO: 248861 - DNA, 15 bp, Homo sapiens
tttcaccatgttggt

SEQ ID NO: 248862 - DNA, 15 bp, Homo sapiens
aggtttcaccatgtt

SEQ ID NO: 248863 - DNA, 15 bp, Homo sapiens
gaggtttcaccatgt

SEQ ID NO: 248864 - DNA, 15 bp, Homo sapiens
cgaggtttcaccatg

SEQ ID NO: 248865 - DNA, 15 bp, Homo sapiens
acgaggtttcaccat

SEQ ID NO: 248866 - DNA, 15 bp, Homo sapiens
gacgaggtttcacca

SEQ ID NO: 248867 - DNA, 15 bp, Homo sapiens
agacgaggtttcacc

SEQ ID NO: 248868 - DNA, 15 bp, Homo sapiens
gagacgaggtttcac

SEQ ID NO: 248869 - DNA, 15 bp, Homo sapiens
agagacgaggtttca

SEQ ID NO: 248870 - DNA, 15 bp, Homo sapiens
tagagacgaggtttc

SEQ ID NO: 248871 - DNA, 15 bp, Homo sapiens
gtagagacgaggttt

SEQ ID NO: 248872 - DNA, 15 bp, Homo sapiens
agtagagacgaggtt

SEQ ID NO: 248873 - DNA, 15 bp, Homo sapiens
tagtagagacgaggt

SEQ ID NO: 248874 - DNA, 15 bp, Homo sapiens
ttagtagagacgagg

SEQ ID NO: 248875 - DNA, 15 bp, Homo sapiens
tttagtagagacgag

SEQ ID NO: 248876 - DNA, 15 bp, Homo sapiens
ttttagtagagacga

SEQ ID NO: 248877 - DNA, 15 bp, Homo sapiens
accaccacacccggc

SEQ ID NO: 248878 - DNA, 15 bp, Homo sapiens
caccaccacacccgg

SEQ ID NO: 248879 - DNA, 15 bp, Homo sapiens
ccaccaccacacccg

SEQ ID NO: 248880 - DNA, 15 bp, Homo sapiens
cccaccaccacaccc

SEQ ID NO: 248881 - DNA, 15 bp, Homo sapiens
gcccaccaccacacc

SEQ ID NO: 248882 - DNA, 15 bp, Homo sapiens
tgcccaccaccacac

SEQ ID NO: 248883 - DNA, 15 bp, Homo sapiens
gtgcccaccaccaca

SEQ ID NO: 248884 - DNA, 15 bp, Homo sapiens
ggtgcccaccaccac

SEQ ID NO: 248885 - DNA, 15 bp, Homo sapiens
aggtgcccaccacca

SEQ ID NO: 248886 - DNA, 15 bp, Homo sapiens
caggtgcccaccacc

SEQ ID NO: 248887 - DNA, 15 bp, Homo sapiens
acaggtgcccaccac

SEQ ID NO: 248888 - DNA, 15 bp, Homo sapiens
tacaggtgcccacca

SEQ ID NO: 248889 - DNA, 15 bp, Homo sapiens
ttacaggtgcccacc

SEQ ID NO: 248890 - DNA, 15 bp, Homo sapiens
attacaggtgcccac

SEQ ID NO: 248891 - DNA, 15 bp, Homo sapiens
gattacaggtgccca

SEQ ID NO: 248892 - DNA, 15 bp, Homo sapiens
cagctgggattacag

SEQ ID NO: 248893 - DNA, 15 bp, Homo sapiens
gcagctgggattaca

SEQ ID NO: 248894 - DNA, 15 bp, Homo sapiens
agcagctgggattac

SEQ ID NO: 248895 - DNA, 15 bp, Homo sapiens
gagcagctgggatta

SEQ ID NO: 248896 - DNA, 15 bp, Homo sapiens
cgagcagctgggatt

SEQ ID NO: 248897 - DNA, 15 bp, Homo sapiens
ccgagcagctgggat

SEQ ID NO: 248898 - DNA, 15 bp, Homo sapiens
cccgagcagctggga

SEQ ID NO: 248899 - DNA, 15 bp, Homo sapiens
tcccgagcagctggg

SEQ ID NO: 248900 - DNA, 15 bp, Homo sapiens
ctcccgagcagctgg

SEQ ID NO: 248901 - DNA, 15 bp, Homo sapiens
cctcccgagcagctg

SEQ ID NO: 248902 - DNA, 15 bp, Homo sapiens
gcctcccgagcagct

SEQ ID NO: 248903 - DNA, 15 bp, Homo sapiens
agcctcccgagcagc

SEQ ID NO: 248904 - DNA, 15 bp, Homo sapiens
cagcctcccgagcag

SEQ ID NO: 248905 - DNA, 15 bp, Homo sapiens
tcagcctcccgagca

SEQ ID NO: 248906 - DNA, 15 bp, Homo sapiens
ctcagcctcccgagc

SEQ ID NO: 248907 - DNA, 15 bp, Homo sapiens
tctcccaggttcaag

SEQ ID NO: 248908 - DNA, 15 bp, Homo sapiens
atctcccaggttcaa

SEQ ID NO: 248909 - DNA, 15 bp, Homo sapiens
catctcccaggttca

SEQ ID NO: 248910 - DNA, 15 bp, Homo sapiens
ccatctcccaggttc

SEQ ID NO: 248911 - DNA, 15 bp, Homo sapiens
ctccatctcccaggt

SEQ ID NO: 248912 - DNA, 15 bp, Homo sapiens
cctccatctcccagg

SEQ ID NO: 248913 - DNA, 15 bp, Homo sapiens
acctccatctcccag

SEQ ID NO: 248914 - DNA, 15 bp, Homo sapiens
aacctccatctccca

SEQ ID NO: 248915 - DNA, 15 bp, Homo sapiens
caacctccatctccc

SEQ ID NO: 248916 - DNA, 15 bp, Homo sapiens
gcaacctccatctcc

SEQ ID NO: 248917 - DNA, 15 bp, Homo sapiens
tgcaacctccatctc

SEQ ID NO: 248918 - DNA, 15 bp, Homo sapiens
ctgcaacctccatct

SEQ ID NO: 248919 - DNA, 15 bp, Homo sapiens
actgcaacctccatc

SEQ ID NO: 248920 - DNA, 15 bp, Homo sapiens
cactgcaacctccat

SEQ ID NO: 248921 - DNA, 15 bp, Homo sapiens
gtcttggctcactgc

SEQ ID NO: 248922 - DNA, 15 bp, Homo sapiens
tgtcttggctcactg

SEQ ID NO: 248923 - DNA, 15 bp, Homo sapiens
ctgtcttggctcact

SEQ ID NO: 248924 - DNA, 15 bp, Homo sapiens
gctgtcttggctcac

SEQ ID NO: 248925 - DNA, 15 bp, Homo sapiens
ggctgtcttggctca

SEQ ID NO: 248926 - DNA, 15 bp, Homo sapiens
gggctgtcttggctc

SEQ ID NO: 248927 - DNA, 15 bp, Homo sapiens
ggggctgtcttggct

SEQ ID NO: 248928 - DNA, 15 bp, Homo sapiens
tggggctgtcttggc

SEQ ID NO: 248929 - DNA, 15 bp, Homo sapiens
gtggggctgtcttgg

SEQ ID NO: 248930 - DNA, 15 bp, Homo sapiens
agtggggctgtcttg

SEQ ID NO: 248931 - DNA, 15 bp, Homo sapiens
cagtggggctgtctt

SEQ ID NO: 248932 - DNA, 15 bp, Homo sapiens
gcagtggggctgtct

SEQ ID NO: 248933 - DNA, 15 bp, Homo sapiens
tgcagtggggctgtc

SEQ ID NO: 248934 - DNA, 15 bp, Homo sapiens
gtgcagtggggctgt

SEQ ID NO: 248935 - DNA, 15 bp, Homo sapiens
agtgcagtggggctg

SEQ ID NO: 248936 - DNA, 15 bp, Homo sapiens
gagtgcagtggggct

SEQ ID NO: 248937 - DNA, 15 bp, Homo sapiens
ggagtgcagtggggc

SEQ ID NO: 248938 - DNA, 15 bp, Homo sapiens
tggagtgcagtgggg

SEQ ID NO: 248939 - DNA, 15 bp, Homo sapiens
ctggagtgcagtggg

SEQ ID NO: 248940 - DNA, 15 bp, Homo sapiens
ggagtctcactctgt

SEQ ID NO: 248941 - DNA, 15 bp, Homo sapiens
cggagtctcactctg

SEQ ID NO: 248942 - DNA, 15 bp, Homo sapiens
acggagtctcactct

SEQ ID NO: 248943 - DNA, 15 bp, Homo sapiens
gacggagtctcactc

SEQ ID NO: 248944 - DNA, 15 bp, Homo sapiens
agacggagtctcact

SEQ ID NO: 248945 - DNA, 15 bp, Homo sapiens
gagacggagtctcac

SEQ ID NO: 248946 - DNA, 15 bp, Homo sapiens
tgagacggagtctca

SEQ ID NO: 248947 - DNA, 15 bp, Homo sapiens
gtttttttttttttt

SEQ ID NO: 248948 - DNA, 15 bp, Homo sapiens
agttttttttttttt

SEQ ID NO: 248949 - DNA, 15 bp, Homo sapiens
tagtttttttttttt

SEQ ID NO: 248950 - DNA, 15 bp, Homo sapiens
ttagttttttttttt

SEQ ID NO: 248951 - DNA, 15 bp, Homo sapiens
tttagtttttttttt

SEQ ID NO: 248952 - DNA, 15 bp, Homo sapiens
gtttagttttttttt

SEQ ID NO: 248953 - DNA, 15 bp, Homo sapiens
tgtttagtttttttt

SEQ ID NO: 248954 - DNA, 15 bp, Homo sapiens
ttgtttagttttttt

SEQ ID NO: 248955 - DNA, 15 bp, Homo sapiens
tttgtttagtttttt

SEQ ID NO: 248956 - DNA, 15 bp, Homo sapiens
ttttgtttagttttt

SEQ ID NO: 248957 - DNA, 15 bp, Homo sapiens
tttttgtttagtttt

SEQ ID NO: 248958 - DNA, 15 bp, Homo sapiens
ttttttgtttagttt

SEQ ID NO: 248959 - DNA, 15 bp, Homo sapiens
gttttttgtttagtt

SEQ ID NO: 248960 - DNA, 15 bp, Homo sapiens
agttttttgtttagt

SEQ ID NO: 248961 - DNA, 15 bp, Homo sapiens
cagttttttgtttag

SEQ ID NO: 248962 - DNA, 15 bp, Homo sapiens
ccagttttttgttta

SEQ ID NO: 248963 - DNA, 15 bp, Homo sapiens
accagttttttgttt

SEQ ID NO: 248964 - DNA, 15 bp, Homo sapiens
aaccagttttttgtt

SEQ ID NO: 248965 - DNA, 15 bp, Homo sapiens
taaccagttttttgt

SEQ ID NO: 248966 - DNA, 15 bp, Homo sapiens
ctaaccagttttttg

SEQ ID NO: 248967 - DNA, 15 bp, Homo sapiens
actaaccagtttttt

SEQ ID NO: 248968 - DNA, 15 bp, Homo sapiens
cactaaccagttttt

SEQ ID NO: 248969 - DNA, 15 bp, Homo sapiens
ccactaaccagtttt

SEQ ID NO: 248970 - DNA, 15 bp, Homo sapiens
gccactaaccagttt

SEQ ID NO: 248971 - DNA, 15 bp, Homo sapiens
agccactaaccagtt

SEQ ID NO: 248972 - DNA, 15 bp, Homo sapiens
tagccactaaccagt

SEQ ID NO: 248973 - DNA, 15 bp, Homo sapiens
ctagccactaaccag

SEQ ID NO: 248974 - DNA, 15 bp, Homo sapiens
tctagccactaacca

SEQ ID NO: 248975 - DNA, 15 bp, Homo sapiens
gtctagccactaacc

SEQ ID NO: 248976 - DNA, 15 bp, Homo sapiens
tgtctagccactaac

SEQ ID NO: 248977 - DNA, 15 bp, Homo sapiens
ttgtctagccactaa

SEQ ID NO: 248978 - DNA, 15 bp, Homo sapiens
gttgtctagccacta

SEQ ID NO: 248979 - DNA, 15 bp, Homo sapiens
tgttgtctagccact

SEQ ID NO: 248980 - DNA, 15 bp, Homo sapiens
ctgttgtctagccac

SEQ ID NO: 248981 - DNA, 15 bp, Homo sapiens
cctgttgtctagcca

SEQ ID NO: 248982 - DNA, 15 bp, Homo sapiens
tcctgttgtctagcc

SEQ ID NO: 248983 - DNA, 15 bp, Homo sapiens
atcctgttgtctagc

SEQ ID NO: 248984 - DNA, 15 bp, Homo sapiens
catcctgttgtctag

SEQ ID NO: 248985 - DNA, 15 bp, Homo sapiens
ccatcctgttgtcta

SEQ ID NO: 248986 - DNA, 15 bp, Homo sapiens
accatcctgttgtct

SEQ ID NO: 248987 - DNA, 15 bp, Homo sapiens
taccatcctgttgtc

SEQ ID NO: 248988 - DNA, 15 bp, Homo sapiens
ataccatcctgttgt

SEQ ID NO: 248989 - DNA, 15 bp, Homo sapiens
gataccatcctgttg

SEQ ID NO: 248990 - DNA, 15 bp, Homo sapiens
agataccatcctgtt

SEQ ID NO: 248991 - DNA, 15 bp, Homo sapiens
aagataccatcctgt

SEQ ID NO: 248992 - DNA, 15 bp, Homo sapiens
gaagataccatcctg

SEQ ID NO: 248993 - DNA, 15 bp, Homo sapiens
ggaagataccatcct

SEQ ID NO: 248994 - DNA, 15 bp, Homo sapiens
tggaagataccatcc

SEQ ID NO: 248995 - DNA, 15 bp, Homo sapiens
ttggaagataccatc

SEQ ID NO: 248996 - DNA, 15 bp, Homo sapiens
cttggaagataccat

SEQ ID NO: 248997 - DNA, 15 bp, Homo sapiens
gcttggaagatacca

SEQ ID NO: 248998 - DNA, 15 bp, Homo sapiens
ggcttggaagatacc

SEQ ID NO: 248999 - DNA, 15 bp, Homo sapiens
gggcttggaagatac

SEQ ID NO: 249000 - DNA, 15 bp, Homo sapiens
tgggcttggaagata

SEQ ID NO: 249001 - DNA, 15 bp, Homo sapiens
atgggcttggaagat

SEQ ID NO: 249002 - DNA, 15 bp, Homo sapiens
catgggcttggaaga

SEQ ID NO: 249003 - DNA, 15 bp, Homo sapiens
ccatgggcttggaag

SEQ ID NO: 249004 - DNA, 15 bp, Homo sapiens
gccatgggcttggaa

SEQ ID NO: 249005 - DNA, 15 bp, Homo sapiens
agccatgggcttgga

SEQ ID NO: 249006 - DNA, 15 bp, Homo sapiens
cagccatgggcttgg

SEQ ID NO: 249007 - DNA, 15 bp, Homo sapiens
tcagccatgggcttg

SEQ ID NO: 249008 - DNA, 15 bp, Homo sapiens
gtcagccatgggctt

SEQ ID NO: 249009 - DNA, 15 bp, Homo sapiens
agtcagccatgggct

SEQ ID NO: 249010 - DNA, 15 bp, Homo sapiens
gagtcagccatgggc

SEQ ID NO: 249011 - DNA, 15 bp, Homo sapiens
tgagtcagccatggg

SEQ ID NO: 249012 - DNA, 15 bp, Homo sapiens
ctgagtcagccatgg

SEQ ID NO: 249013 - DNA, 15 bp, Homo sapiens
gctgagtcagccatg

SEQ ID NO: 249014 - DNA, 15 bp, Homo sapiens
tgctgagtcagccat

SEQ ID NO: 249015 - DNA, 15 bp, Homo sapiens
ctgctgagtcagcca

SEQ ID NO: 249016 - DNA, 15 bp, Homo sapiens
gctgctgagtcagcc

SEQ ID NO: 249017 - DNA, 15 bp, Homo sapiens
agctgctgagtcagc

SEQ ID NO: 249018 - DNA, 15 bp, Homo sapiens
gagctgctgagtcag

SEQ ID NO: 249019 - DNA, 15 bp, Homo sapiens
ggagctgctgagtca

SEQ ID NO: 249020 - DNA, 15 bp, Homo sapiens
aggagctgctgagtc

SEQ ID NO: 249021 - DNA, 15 bp, Homo sapiens
caggagctgctgagt

SEQ ID NO: 249022 - DNA, 15 bp, Homo sapiens
ccaggagctgctgag

SEQ ID NO: 249023 - DNA, 15 bp, Homo sapiens
cccaggagctgctga

SEQ ID NO: 249024 - DNA, 15 bp, Homo sapiens
acccaggagctgctg

SEQ ID NO: 249025 - DNA, 15 bp, Homo sapiens
gacccaggagctgct

SEQ ID NO: 249026 - DNA, 15 bp, Homo sapiens
tgacccaggagctgc

SEQ ID NO: 249027 - DNA, 15 bp, Homo sapiens
ttgacccaggagctg

SEQ ID NO: 249028 - DNA, 15 bp, Homo sapiens
cttgacccaggagct

SEQ ID NO: 249029 - DNA, 15 bp, Homo sapiens
tcttgacccaggagc

SEQ ID NO: 249030 - DNA, 15 bp, Homo sapiens
gtcttgacccaggag

SEQ ID NO: 249031 - DNA, 15 bp, Homo sapiens
tgtcttgacccagga

SEQ ID NO: 249032 - DNA, 15 bp, Homo sapiens
gtgtcttgacccagg

SEQ ID NO: 249033 - DNA, 15 bp, Homo sapiens
agtgtcttgacccag

SEQ ID NO: 249034 - DNA, 15 bp, Homo sapiens
cagtgtcttgaccca

SEQ ID NO: 249035 - DNA, 15 bp, Homo sapiens
acagtgtcttgaccc

SEQ ID NO: 249036 - DNA, 15 bp, Homo sapiens
cacagtgtcttgacc

SEQ ID NO: 249037 - DNA, 15 bp, Homo sapiens
tcacagtgtcttgac

SEQ ID NO: 249038 - DNA, 15 bp, Homo sapiens
gtcacagtgtcttga

SEQ ID NO: 249039 - DNA, 15 bp, Homo sapiens
ggtcacagtgtcttg

SEQ ID NO: 249040 - DNA, 15 bp, Homo sapiens
aggtcacagtgtctt

SEQ ID NO: 249041 - DNA, 15 bp, Homo sapiens
caggtcacagtgtct

SEQ ID NO: 249042 - DNA, 15 bp, Homo sapiens
acaggtcacagtgtc

SEQ ID NO: 249043 - DNA, 15 bp, Homo sapiens
cacaggtcacagtgt

SEQ ID NO: 249044 - DNA, 15 bp, Homo sapiens
acacaggtcacagtg

SEQ ID NO: 249045 - DNA, 15 bp, Homo sapiens
gacacaggtcacagt

SEQ ID NO: 249046 - DNA, 15 bp, Homo sapiens
ggacacaggtcacag

SEQ ID NO: 249047 - DNA, 15 bp, Homo sapiens
gggacacaggtcaca

SEQ ID NO: 249048 - DNA, 15 bp, Homo sapiens
ggggacacaggtcac

SEQ ID NO: 249049 - DNA, 15 bp, Homo sapiens
aggggacacaggtca

SEQ ID NO: 249050 - DNA, 15 bp, Homo sapiens
caggggacacaggtc

SEQ ID NO: 249051 - DNA, 15 bp, Homo sapiens
ccaggggacacaggt

SEQ ID NO: 249052 - DNA, 15 bp, Homo sapiens
gccaggggacacagg

SEQ ID NO: 249053 - DNA, 15 bp, Homo sapiens
tgccaggggacacag

SEQ ID NO: 249054 - DNA, 15 bp, Homo sapiens
ctgccaggggacaca

SEQ ID NO: 249055 - DNA, 15 bp, Homo sapiens
cctgccaggggacac

SEQ ID NO: 249056 - DNA, 15 bp, Homo sapiens
tcctgccaggggaca

SEQ ID NO: 249057 - DNA, 15 bp, Homo sapiens
ttcctgccaggggac

SEQ ID NO: 249058 - DNA, 15 bp, Homo sapiens
cttcctgccagggga

SEQ ID NO: 249059 - DNA, 15 bp, Homo sapiens
gcttcctgccagggg

SEQ ID NO: 249060 - DNA, 15 bp, Homo sapiens
tgcttcctgccaggg

SEQ ID NO: 249061 - DNA, 15 bp, Homo sapiens
atgcttcctgccagg

SEQ ID NO: 249062 - DNA, 15 bp, Homo sapiens
gatgcttcctgccag

SEQ ID NO: 249063 - DNA, 15 bp, Homo sapiens
cgatgcttcctgcca

SEQ ID NO: 249064 - DNA, 15 bp, Homo sapiens
gcgatgcttcctgcc

SEQ ID NO: 249065 - DNA, 15 bp, Homo sapiens
ggcgatgcttcctgc

SEQ ID NO: 249066 - DNA, 15 bp, Homo sapiens
gggcgatgcttcctg

SEQ ID NO: 249067 - DNA, 15 bp, Homo sapiens
ggggcgatgcttcct

SEQ ID NO: 249068 - DNA, 15 bp, Homo sapiens
aggggcgatgcttcc

SEQ ID NO: 249069 - DNA, 15 bp, Homo sapiens
caggggcgatgcttc

SEQ ID NO: 249070 - DNA, 15 bp, Homo sapiens
gcaggggcgatgctt

SEQ ID NO: 249071 - DNA, 15 bp, Homo sapiens
ggcaggggcgatgct

SEQ ID NO: 249072 - DNA, 15 bp, Homo sapiens
tggcaggggcgatgc

SEQ ID NO: 249073 - DNA, 15 bp, Homo sapiens
gtggcaggggcgatg

SEQ ID NO: 249074 - DNA, 15 bp, Homo sapiens
ggtggcaggggcgat

SEQ ID NO: 249075 - DNA, 15 bp, Homo sapiens
aggtggcaggggcga

SEQ ID NO: 249076 - DNA, 15 bp, Homo sapiens
caggtggcaggggcg

SEQ ID NO: 249077 - DNA, 15 bp, Homo sapiens
gcaggtggcaggggc

SEQ ID NO: 249078 - DNA, 15 bp, Homo sapiens
ggcaggtggcagggg

SEQ ID NO: 249079 - DNA, 15 bp, Homo sapiens
gggcaggtggcaggg

SEQ ID NO: 249080 - DNA, 15 bp, Homo sapiens
cgggcaggtggcagg

SEQ ID NO: 249081 - DNA, 15 bp, Homo sapiens
ccgggcaggtggcag

SEQ ID NO: 249082 - DNA, 15 bp, Homo sapiens
accgggcaggtggca

SEQ ID NO: 249083 - DNA, 15 bp, Homo sapiens
caccgggcaggtggc

SEQ ID NO: 249084 - DNA, 15 bp, Homo sapiens
acaccgggcaggtgg

SEQ ID NO: 249085 - DNA, 15 bp, Homo sapiens
tacaccgggcaggtg

SEQ ID NO: 249086 - DNA, 15 bp, Homo sapiens
gtacaccgggcaggt

SEQ ID NO: 249087 - DNA, 15 bp, Homo sapiens
agtacaccgggcagg

SEQ ID NO: 249088 - DNA, 15 bp, Homo sapiens
gagtacaccgggcag

SEQ ID NO: 249089 - DNA, 15 bp, Homo sapiens
agagtacaccgggca

SEQ ID NO: 249090 - DNA, 15 bp, Homo sapiens
cagagtacaccgggc

SEQ ID NO: 249091 - DNA, 15 bp, Homo sapiens
acagagtacaccggg

SEQ ID NO: 249092 - DNA, 15 bp, Homo sapiens
tacagagtacaccgg

SEQ ID NO: 249093 - DNA, 15 bp, Homo sapiens
gtacagagtacaccg

SEQ ID NO: 249094 - DNA, 15 bp, Homo sapiens
ggtacagagtacacc

SEQ ID NO: 249095 - DNA, 15 bp, Homo sapiens
aggtacagagtacac

SEQ ID NO: 249096 - DNA, 15 bp, Homo sapiens
caggtacagagtaca

SEQ ID NO: 249097 - DNA, 15 bp, Homo sapiens
acaggtacagagtac

SEQ ID NO: 249098 - DNA, 15 bp, Homo sapiens
gacaggtacagagta

SEQ ID NO: 249099 - DNA, 15 bp, Homo sapiens
tgacaggtacagagt

SEQ ID NO: 249100 - DNA, 15 bp, Homo sapiens
ctgacaggtacagag

SEQ ID NO: 249101 - DNA, 15 bp, Homo sapiens
cctgacaggtacaga

SEQ ID NO: 249102 - DNA, 15 bp, Homo sapiens
acctgacaggtacag

SEQ ID NO: 249103 - DNA, 15 bp, Homo sapiens
cacctgacaggtaca

SEQ ID NO: 249104 - DNA, 15 bp, Homo sapiens
tcacctgacaggtac

SEQ ID NO: 249105 - DNA, 15 bp, Homo sapiens
gtcacctgacaggta

SEQ ID NO: 249106 - DNA, 15 bp, Homo sapiens
tgtcacctgacaggt

SEQ ID NO: 249107 - DNA, 15 bp, Homo sapiens
atgtcacctgacagg

SEQ ID NO: 249108 - DNA, 15 bp, Homo sapiens
gatgtcacctgacag

SEQ ID NO: 249109 - DNA, 15 bp, Homo sapiens
agatgtcacctgaca

SEQ ID NO: 249110 - DNA, 15 bp, Homo sapiens
cagatgtcacctgac

SEQ ID NO: 249111 - DNA, 15 bp, Homo sapiens
gcagatgtcacctga

SEQ ID NO: 249112 - DNA, 15 bp, Homo sapiens
agcagatgtcacctg

SEQ ID NO: 249113 - DNA, 15 bp, Homo sapiens
tagcagatgtcacct

SEQ ID NO: 249114 - DNA, 15 bp, Homo sapiens
gtagcagatgtcacc

SEQ ID NO: 249115 - DNA, 15 bp, Homo sapiens
ggtagcagatgtcac

SEQ ID NO: 249116 - DNA, 15 bp, Homo sapiens
aggtagcagatgtca

SEQ ID NO: 249117 - DNA, 15 bp, Homo sapiens
taggtagcagatgtc

SEQ ID NO: 249118 - DNA, 15 bp, Homo sapiens
ttaggtagcagatgt

SEQ ID NO: 249119 - DNA, 15 bp, Homo sapiens
cttaggtagcagatg

SEQ ID NO: 249120 - DNA, 15 bp, Homo sapiens
gcttaggtagcagat

SEQ ID NO: 249121 - DNA, 15 bp, Homo sapiens
tgcttaggtagcaga

SEQ ID NO: 249122 - DNA, 15 bp, Homo sapiens
gtgcttaggtagcag

SEQ ID NO: 249123 - DNA, 15 bp, Homo sapiens
cgtgcttaggtagca

SEQ ID NO: 249124 - DNA, 15 bp, Homo sapiens
acgtgcttaggtagc

SEQ ID NO: 249125 - DNA, 15 bp, Homo sapiens
cacgtgcttaggtag

SEQ ID NO: 249126 - DNA, 15 bp, Homo sapiens
tcacgtgcttaggta

SEQ ID NO: 249127 - DNA, 15 bp, Homo sapiens
ctcacgtgcttaggt

SEQ ID NO: 249128 - DNA, 15 bp, Homo sapiens
tctcacgtgcttagg

SEQ ID NO: 249129 - DNA, 15 bp, Homo sapiens
ctctcacgtgcttag

SEQ ID NO: 249130 - DNA, 15 bp, Homo sapiens
cctctcacgtgctta

SEQ ID NO: 249131 - DNA, 15 bp, Homo sapiens
acctctcacgtgctt

SEQ ID NO: 249132 - DNA, 15 bp, Homo sapiens
cacctctcacgtgct

SEQ ID NO: 249133 - DNA, 15 bp, Homo sapiens
ccacctctcacgtgc

SEQ ID NO: 249134 - DNA, 15 bp, Homo sapiens
gccacctctcacgtg

SEQ ID NO: 249135 - DNA, 15 bp, Homo sapiens
tgccacctctcacgt

SEQ ID NO: 249136 - DNA, 15 bp, Homo sapiens
atgccacctctcacg

SEQ ID NO: 249137 - DNA, 15 bp, Homo sapiens
aatgccacctctcac

SEQ ID NO: 249138 - DNA, 15 bp, Homo sapiens
aaatgccacctctca

SEQ ID NO: 249139 - DNA, 15 bp, Homo sapiens
gaaatgccacctctc

SEQ ID NO: 249140 - DNA, 15 bp, Homo sapiens
tgaaatgccacctct

SEQ ID NO: 249141 - DNA, 15 bp, Homo sapiens
gtgaaatgccacctc

SEQ ID NO: 249142 - DNA, 15 bp, Homo sapiens
tgtgaaatgccacct

SEQ ID NO: 249143 - DNA, 15 bp, Homo sapiens
ctgtgaaatgccacc

SEQ ID NO: 249144 - DNA, 15 bp, Homo sapiens
actgtgaaatgccac

SEQ ID NO: 249145 - DNA, 15 bp, Homo sapiens
aactgtgaaatgcca

SEQ ID NO: 249146 - DNA, 15 bp, Homo sapiens
aaactgtgaaatgcc

SEQ ID NO: 249147 - DNA, 15 bp, Homo sapiens
gaaactgtgaaatgc

SEQ ID NO: 249148 - DNA, 15 bp, Homo sapiens
tgaaactgtgaaatg

SEQ ID NO: 249149 - DNA, 15 bp, Homo sapiens
ctgaaactgtgaaat

SEQ ID NO: 249150 - DNA, 15 bp, Homo sapiens
actgaaactgtgaaa

SEQ ID NO: 249151 - DNA, 15 bp, Homo sapiens
cactgaaactgtgaa

SEQ ID NO: 249152 - DNA, 15 bp, Homo sapiens
acactgaaactgtga

SEQ ID NO: 249153 - DNA, 15 bp, Homo sapiens
cacactgaaactgtg

SEQ ID NO: 249154 - DNA, 15 bp, Homo sapiens
ccacactgaaactgt

SEQ ID NO: 249155 - DNA, 15 bp, Homo sapiens
accacactgaaactg

SEQ ID NO: 249156 - DNA, 15 bp, Homo sapiens
caccacactgaaact

SEQ ID NO: 249157 - DNA, 15 bp, Homo sapiens
gcaccacactgaaac

SEQ ID NO: 249158 - DNA, 15 bp, Homo sapiens
agcaccacactgaaa

SEQ ID NO: 249159 - DNA, 15 bp, Homo sapiens
cagcaccacactgaa

SEQ ID NO: 249160 - DNA, 15 bp, Homo sapiens
tcagcaccacactga

SEQ ID NO: 249161 - DNA, 15 bp, Homo sapiens
gtcagcaccacactg

SEQ ID NO: 249162 - DNA, 15 bp, Homo sapiens
tgtcagcaccacact

SEQ ID NO: 249163 - DNA, 15 bp, Homo sapiens
ttgtcagcaccacac

SEQ ID NO: 249164 - DNA, 15 bp, Homo sapiens
gttgtcagcaccaca

SEQ ID NO: 249165 - DNA, 15 bp, Homo sapiens
ggttgtcagcaccac

SEQ ID NO: 249166 - DNA, 15 bp, Homo sapiens
gggttgtcagcacca

SEQ ID NO: 249167 - DNA, 15 bp, Homo sapiens
cgggttgtcagcacc

SEQ ID NO: 249168 - DNA, 15 bp, Homo sapiens
ccgggttgtcagcac

SEQ ID NO: 249169 - DNA, 15 bp, Homo sapiens
cccgggttgtcagca

SEQ ID NO: 249170 - DNA, 15 bp, Homo sapiens
tcccgggttgtcagc

SEQ ID NO: 249171 - DNA, 15 bp, Homo sapiens
gtcccgggttgtcag

SEQ ID NO: 249172 - DNA, 15 bp, Homo sapiens
cgtcccgggttgtca

SEQ ID NO: 249173 - DNA, 15 bp, Homo sapiens
gcgtcccgggttgtc

SEQ ID NO: 249174 - DNA, 15 bp, Homo sapiens
tgcgtcccgggttgt

SEQ ID NO: 249175 - DNA, 15 bp, Homo sapiens
gtgcgtcccgggttg

SEQ ID NO: 249176 - DNA, 15 bp, Homo sapiens
tgtgcgtcccgggtt

SEQ ID NO: 249177 - DNA, 15 bp, Homo sapiens
gtgtgcgtcccgggt

SEQ ID NO: 249178 - DNA, 15 bp, Homo sapiens
agtgtgcgtcccggg

SEQ ID NO: 249179 - DNA, 15 bp, Homo sapiens
cagtgtgcgtcccgg

SEQ ID NO: 249180 - DNA, 15 bp, Homo sapiens
acagtgtgcgtcccg

SEQ ID NO: 249181 - DNA, 15 bp, Homo sapiens
gacagtgtgcgtccc

SEQ ID NO: 249182 - DNA, 15 bp, Homo sapiens
ggacagtgtgcgtcc

SEQ ID NO: 249183 - DNA, 15 bp, Homo sapiens
aggacagtgtgcgtc

SEQ ID NO: 249184 - DNA, 15 bp, Homo sapiens
aaggacagtgtgcgt

SEQ ID NO: 249185 - DNA, 15 bp, Homo sapiens
caaggacagtgtgcg

SEQ ID NO: 249186 - DNA, 15 bp, Homo sapiens
gcaaggacagtgtgc

SEQ ID NO: 249187 - DNA, 15 bp, Homo sapiens
tgcaaggacagtgtg

SEQ ID NO: 249188 - DNA, 15 bp, Homo sapiens
ctgcaaggacagtgt

SEQ ID NO: 249189 - DNA, 15 bp, Homo sapiens
gctgcaaggacagtg

SEQ ID NO: 249190 - DNA, 15 bp, Homo sapiens
agctgcaaggacagt

SEQ ID NO: 249191 - DNA, 15 bp, Homo sapiens
tagctgcaaggacag

SEQ ID NO: 249192 - DNA, 15 bp, Homo sapiens
gtagctgcaaggaca

SEQ ID NO: 249193 - DNA, 15 bp, Homo sapiens
tgtagctgcaaggac

SEQ ID NO: 249194 - DNA, 15 bp, Homo sapiens
ttgtagctgcaagga

SEQ ID NO: 249195 - DNA, 15 bp, Homo sapiens
attgtagctgcaagg

SEQ ID NO: 249196 - DNA, 15 bp, Homo sapiens
gattgtagctgcaag

SEQ ID NO: 249197 - DNA, 15 bp, Homo sapiens
tgattgtagctgcaa

SEQ ID NO: 249198 - DNA, 15 bp, Homo sapiens
ctgattgtagctgca

SEQ ID NO: 249199 - DNA, 15 bp, Homo sapiens
cctgattgtagctgc

SEQ ID NO: 249200 - DNA, 15 bp, Homo sapiens
tcctgattgtagctg

SEQ ID NO: 249201 - DNA, 15 bp, Homo sapiens
ctcctgattgtagct

SEQ ID NO: 249202 - DNA, 15 bp, Homo sapiens
cctcctgattgtagc

SEQ ID NO: 249203 - DNA, 15 bp, Homo sapiens
acctcctgattgtag

SEQ ID NO: 249204 - DNA, 15 bp, Homo sapiens
cacctcctgattgta

SEQ ID NO: 249205 - DNA, 15 bp, Homo sapiens
tcacctcctgattgt

SEQ ID NO: 249206 - DNA, 15 bp, Homo sapiens
ttcacctcctgattg

SEQ ID NO: 249207 - DNA, 15 bp, Homo sapiens
attcacctcctgatt

SEQ ID NO: 249208 - DNA, 15 bp, Homo sapiens
cattcacctcctgat

SEQ ID NO: 249209 - DNA, 15 bp, Homo sapiens
acattcacctcctga

SEQ ID NO: 249210 - DNA, 15 bp, Homo sapiens
aacattcacctcctg

SEQ ID NO: 249211 - DNA, 15 bp, Homo sapiens
caacattcacctcct

SEQ ID NO: 249212 - DNA, 15 bp, Homo sapiens
ccaacattcacctcc

SEQ ID NO: 249213 - DNA, 15 bp, Homo sapiens
cccaacattcacctc

SEQ ID NO: 249214 - DNA, 15 bp, Homo sapiens
acccaacattcacct

SEQ ID NO: 249215 - DNA, 15 bp, Homo sapiens
aacccaacattcacc

SEQ ID NO: 249216 - DNA, 15 bp, Homo sapiens
aaacccaacattcac

SEQ ID NO: 249217 - DNA, 15 bp, Homo sapiens
gaaacccaacattca

SEQ ID NO: 249218 - DNA, 15 bp, Homo sapiens
ggaaacccaacattc

SEQ ID NO: 249219 - DNA, 15 bp, Homo sapiens
tggaaacccaacatt

SEQ ID NO: 249220 - DNA, 15 bp, Homo sapiens
ctggaaacccaacat

SEQ ID NO: 249221 - DNA, 15 bp, Homo sapiens
gctggaaacccaaca

SEQ ID NO: 249222 - DNA, 15 bp, Homo sapiens
tgctggaaacccaac

SEQ ID NO: 249223 - DNA, 15 bp, Homo sapiens
ctgctggaaacccaa

SEQ ID NO: 249224 - DNA, 15 bp, Homo sapiens
tctgctggaaaccca

SEQ ID NO: 249225 - DNA, 15 bp, Homo sapiens
ctctgctggaaaccc

SEQ ID NO: 249226 - DNA, 15 bp, Homo sapiens
tctctgctggaaacc

SEQ ID NO: 249227 - DNA, 15 bp, Homo sapiens
ttctctgctggaaac

SEQ ID NO: 249228 - DNA, 15 bp, Homo sapiens
gttctctgctggaaa

SEQ ID NO: 249229 - DNA, 15 bp, Homo sapiens
tgttctctgctggaa

SEQ ID NO: 249230 - DNA, 15 bp, Homo sapiens
gtgttctctgctgga

SEQ ID NO: 249231 - DNA, 15 bp, Homo sapiens
agtgttctctgctgg

SEQ ID NO: 249232 - DNA, 15 bp, Homo sapiens
cagtgttctctgctg

SEQ ID NO: 249233 - DNA, 15 bp, Homo sapiens
ccagtgttctctgct

SEQ ID NO: 249234 - DNA, 15 bp, Homo sapiens
tccagtgttctctgc

SEQ ID NO: 249235 - DNA, 15 bp, Homo sapiens
ctccagtgttctctg

SEQ ID NO: 249236 - DNA, 15 bp, Homo sapiens
tctccagtgttctct

SEQ ID NO: 249237 - DNA, 15 bp, Homo sapiens
ttctccagtgttctc

SEQ ID NO: 249238 - DNA, 15 bp, Homo sapiens
cttctccagtgttct

SEQ ID NO: 249239 - DNA, 15 bp, Homo sapiens
ccttctccagtgttc

SEQ ID NO: 249240 - DNA, 15 bp, Homo sapiens
gccttctccagtgtt

SEQ ID NO: 249241 - DNA, 15 bp, Homo sapiens
tgccttctccagtgt

SEQ ID NO: 249242 - DNA, 15 bp, Homo sapiens
gtgccttctccagtg

SEQ ID NO: 249243 - DNA, 15 bp, Homo sapiens
tgtgccttctccagt

SEQ ID NO: 249244 - DNA, 15 bp, Homo sapiens
gtgtgccttctccag

SEQ ID NO: 249245 - DNA, 15 bp, Homo sapiens
agtgtgccttctcca

SEQ ID NO: 249246 - DNA, 15 bp, Homo sapiens
aagtgtgccttctcc

SEQ ID NO: 249247 - DNA, 15 bp, Homo sapiens
caagtgtgccttctc

SEQ ID NO: 249248 - DNA, 15 bp, Homo sapiens
ccaagtgtgccttct

SEQ ID NO: 249249 - DNA, 15 bp, Homo sapiens
accaagtgtgccttc

SEQ ID NO: 249250 - DNA, 15 bp, Homo sapiens
caccaagtgtgcctt

SEQ ID NO: 249251 - DNA, 15 bp, Homo sapiens
acaccaagtgtgcct

SEQ ID NO: 249252 - DNA, 15 bp, Homo sapiens
gacaccaagtgtgcc

SEQ ID NO: 249253 - DNA, 15 bp, Homo sapiens
agacaccaagtgtgc

SEQ ID NO: 249254 - DNA, 15 bp, Homo sapiens
cagacaccaagtgtg

SEQ ID NO: 249255 - DNA, 15 bp, Homo sapiens
ccagacaccaagtgt

SEQ ID NO: 249256 - DNA, 15 bp, Homo sapiens
tccagacaccaagtg

SEQ ID NO: 249257 - DNA, 15 bp, Homo sapiens
ttccagacaccaagt

SEQ ID NO: 249258 - DNA, 15 bp, Homo sapiens
cttccagacaccaag

SEQ ID NO: 249259 - DNA, 15 bp, Homo sapiens
ccttccagacaccaa

SEQ ID NO: 249260 - DNA, 15 bp, Homo sapiens
cccttccagacacca

SEQ ID NO: 249261 - DNA, 15 bp, Homo sapiens
tcccttccagacacc

SEQ ID NO: 249262 - DNA, 15 bp, Homo sapiens
ttcccttccagacac

SEQ ID NO: 249263 - DNA, 15 bp, Homo sapiens
tttcccttccagaca

SEQ ID NO: 249264 - DNA, 15 bp, Homo sapiens
ttttcccttccagac

SEQ ID NO: 249265 - DNA, 15 bp, Homo sapiens
cttttcccttccaga

SEQ ID NO: 249266 - DNA, 15 bp, Homo sapiens
gcttttcccttccag

SEQ ID NO: 249267 - DNA, 15 bp, Homo sapiens
tgcttttcccttcca

SEQ ID NO: 249268 - DNA, 15 bp, Homo sapiens
ctgcttttcccttcc

SEQ ID NO: 249269 - DNA, 15 bp, Homo sapiens
cctgcttttcccttc

SEQ ID NO: 249270 - DNA, 15 bp, Homo sapiens
ccctgcttttccctt

SEQ ID NO: 249271 - DNA, 15 bp, Homo sapiens
tccctgcttttccct

SEQ ID NO: 249272 - DNA, 15 bp, Homo sapiens
ttccctgcttttccc

SEQ ID NO: 249273 - DNA, 15 bp, Homo sapiens
cttccctgcttttcc

SEQ ID NO: 249274 - DNA, 15 bp, Homo sapiens
tcttccctgcttttc

SEQ ID NO: 249275 - DNA, 15 bp, Homo sapiens
ctcttccctgctttt

SEQ ID NO: 249276 - DNA, 15 bp, Homo sapiens
tctcttccctgcttt

SEQ ID NO: 249277 - DNA, 15 bp, Homo sapiens
ctctcttccctgctt

SEQ ID NO: 249278 - DNA, 15 bp, Homo sapiens
gctctcttccctgct

SEQ ID NO: 249279 - DNA, 15 bp, Homo sapiens
tgctctcttccctgc

SEQ ID NO: 249280 - DNA, 15 bp, Homo sapiens
atgctctcttccctg

SEQ ID NO: 249281 - DNA, 15 bp, Homo sapiens
gatgctctcttccct

SEQ ID NO: 249282 - DNA, 15 bp, Homo sapiens
tgatgctctcttccc

SEQ ID NO: 249283 - DNA, 15 bp, Homo sapiens
atgatgctctcttcc

SEQ ID NO: 249284 - DNA, 15 bp, Homo sapiens
gatgatgctctcttc

SEQ ID NO: 249285 - DNA, 15 bp, Homo sapiens
tgatgatgctctctt

SEQ ID NO: 249286 - DNA, 15 bp, Homo sapiens
ctgatgatgctctct

SEQ ID NO: 249287 - DNA, 15 bp, Homo sapiens
tctgatgatgctctc

SEQ ID NO: 249288 - DNA, 15 bp, Homo sapiens
atctgatgatgctct

SEQ ID NO: 249289 - DNA, 15 bp, Homo sapiens
catctgatgatgctc

SEQ ID NO: 249290 - DNA, 15 bp, Homo sapiens
gcatctgatgatgct

SEQ ID NO: 249291 - DNA, 15 bp, Homo sapiens
ggcatctgatgatgc

SEQ ID NO: 249292 - DNA, 15 bp, Homo sapiens
aggcatctgatgatg

SEQ ID NO: 249293 - DNA, 15 bp, Homo sapiens
caggcatctgatgat

SEQ ID NO: 249294 - DNA, 15 bp, Homo sapiens
gcaggcatctgatga

SEQ ID NO: 249295 - DNA, 15 bp, Homo sapiens
cgcaggcatctgatg

SEQ ID NO: 249296 - DNA, 15 bp, Homo sapiens
ccgcaggcatctgat

SEQ ID NO: 249297 - DNA, 15 bp, Homo sapiens
cccgcaggcatctga

SEQ ID NO: 249298 - DNA, 15 bp, Homo sapiens
acccgcaggcatctg

SEQ ID NO: 249299 - DNA, 15 bp, Homo sapiens
cacccgcaggcatct

SEQ ID NO: 249300 - DNA, 15 bp, Homo sapiens
tcacccgcaggcatc

SEQ ID NO: 249301 - DNA, 15 bp, Homo sapiens
ttcacccgcaggcat

SEQ ID NO: 249302 - DNA, 15 bp, Homo sapiens
cttcacccgcaggca

SEQ ID NO: 249303 - DNA, 15 bp, Homo sapiens
ccttcacccgcaggc

SEQ ID NO: 249304 - DNA, 15 bp, Homo sapiens
accttcacccgcagg

SEQ ID NO: 249305 - DNA, 15 bp, Homo sapiens
caccttcacccgcag

SEQ ID NO: 249306 - DNA, 15 bp, Homo sapiens
ccaccttcacccgca

SEQ ID NO: 249307 - DNA, 15 bp, Homo sapiens
cccaccttcacccgc

SEQ ID NO: 249308 - DNA, 15 bp, Homo sapiens
gcccaccttcacccg

SEQ ID NO: 249309 - DNA, 15 bp, Homo sapiens
ggcccaccttcaccc

SEQ ID NO: 249310 - DNA, 15 bp, Homo sapiens
gggcccaccttcacc

SEQ ID NO: 249311 - DNA, 15 bp, Homo sapiens
cgggcccaccttcac

SEQ ID NO: 249312 - DNA, 15 bp, Homo sapiens
gcgggcccaccttca

SEQ ID NO: 249313 - DNA, 15 bp, Homo sapiens
agcgggcccaccttc

SEQ ID NO: 249314 - DNA, 15 bp, Homo sapiens
tagcgggcccacctt

SEQ ID NO: 249315 - DNA, 15 bp, Homo sapiens
atagcgggcccacct

SEQ ID NO: 249316 - DNA, 15 bp, Homo sapiens
catagcgggcccacc

SEQ ID NO: 249317 - DNA, 15 bp, Homo sapiens
ccatagcgggcccac

SEQ ID NO: 249318 - DNA, 15 bp, Homo sapiens
gccatagcgggccca

SEQ ID NO: 249319 - DNA, 15 bp, Homo sapiens
ggccatagcgggccc

SEQ ID NO: 249320 - DNA, 15 bp, Homo sapiens
tggccatagcgggcc

SEQ ID NO: 249321 - DNA, 15 bp, Homo sapiens
ctggccatagcgggc

SEQ ID NO: 249322 - DNA, 15 bp, Homo sapiens
gctggccatagcggg

SEQ ID NO: 249323 - DNA, 15 bp, Homo sapiens
cgctggccatagcgg

SEQ ID NO: 249324 - DNA, 15 bp, Homo sapiens
acgctggccatagcg

SEQ ID NO: 249325 - DNA, 15 bp, Homo sapiens
gacgctggccatagc

SEQ ID NO: 249326 - DNA, 15 bp, Homo sapiens
ggacgctggccatag

SEQ ID NO: 249327 - DNA, 15 bp, Homo sapiens
gggacgctggccata

SEQ ID NO: 249328 - DNA, 15 bp, Homo sapiens
agggacgctggccat

SEQ ID NO: 249329 - DNA, 15 bp, Homo sapiens
aagggacgctggcca

SEQ ID NO: 249330 - DNA, 15 bp, Homo sapiens
aaagggacgctggcc

SEQ ID NO: 249331 - DNA, 15 bp, Homo sapiens
aaaagggacgctggc

SEQ ID NO: 249332 - DNA, 15 bp, Homo sapiens
aaaaagggacgctgg

SEQ ID NO: 249333 - DNA, 15 bp, Homo sapiens
taaaaagggacgctg

SEQ ID NO: 249334 - DNA, 15 bp, Homo sapiens
ataaaaagggacgct

SEQ ID NO: 249335 - DNA, 15 bp, Homo sapiens
aataaaaagggacgc

SEQ ID NO: 249336 - DNA, 15 bp, Homo sapiens
aaataaaaagggacg

SEQ ID NO: 249337 - DNA, 15 bp, Homo sapiens
aaaataaaaagggac

SEQ ID NO: 249338 - DNA, 15 bp, Homo sapiens
ataaataaaaataaa

SEQ ID NO: 249339 - DNA, 15 bp, Homo sapiens
aataaataaaaataa

SEQ ID NO: 249340 - DNA, 15 bp, Homo sapiens
aaataaataaaaata

SEQ ID NO: 249341 - DNA, 15 bp, Homo sapiens
taaataaataaaaat

SEQ ID NO: 249342 - DNA, 15 bp, Homo sapiens
ataaataaataaaaa

SEQ ID NO: 249343 - DNA, 15 bp, Homo sapiens
aataaataaataaaa

SEQ ID NO: 249344 - DNA, 15 bp, Homo sapiens
caaataaataaataa

SEQ ID NO: 249345 - DNA, 15 bp, Homo sapiens
tcaaataaataaata

SEQ ID NO: 249346 - DNA, 15 bp, Homo sapiens
ctcaaataaataaat

SEQ ID NO: 249347 - DNA, 15 bp, Homo sapiens
tctcaaataaataaa

SEQ ID NO: 249348 - DNA, 15 bp, Homo sapiens
atctcaaataaataa

SEQ ID NO: 249349 - DNA, 15 bp, Homo sapiens
catctcaaataaata

SEQ ID NO: 249350 - DNA, 15 bp, Homo sapiens
ccatctcaaataaat

SEQ ID NO: 249351 - DNA, 15 bp, Homo sapiens
tccatctcaaataaa

SEQ ID NO: 249352 - DNA, 15 bp, Homo sapiens
ttccatctcaaataa

SEQ ID NO: 249353 - DNA, 15 bp, Homo sapiens
attccatctcaaata

SEQ ID NO: 249354 - DNA, 15 bp, Homo sapiens
gattccatctcaaat

SEQ ID NO: 249355 - DNA, 15 bp, Homo sapiens
agattccatctcaaa

SEQ ID NO: 249356 - DNA, 15 bp, Homo sapiens
gagattccatctcaa

SEQ ID NO: 249357 - DNA, 15 bp, Homo sapiens
cgagattccatctca

SEQ ID NO: 249358 - DNA, 15 bp, Homo sapiens
gcgagattccatctc

SEQ ID NO: 249359 - DNA, 15 bp, Homo sapiens
agcgagattccatct

SEQ ID NO: 249360 - DNA, 15 bp, Homo sapiens
gagcgagattccatc

SEQ ID NO: 249361 - DNA, 15 bp, Homo sapiens
agagcgagattccat

SEQ ID NO: 249362 - DNA, 15 bp, Homo sapiens
cagagcgagattcca

SEQ ID NO: 249363 - DNA, 15 bp, Homo sapiens
acagagcgagattcc

SEQ ID NO: 249364 - DNA, 15 bp, Homo sapiens
gacagagcgagattc

SEQ ID NO: 249365 - DNA, 15 bp, Homo sapiens
cgacagagcgagatt

SEQ ID NO: 249366 - DNA, 15 bp, Homo sapiens
gcgacagagcgagat

SEQ ID NO: 249367 - DNA, 15 bp, Homo sapiens
acagtctgggcgaca

SEQ ID NO: 249368 - DNA, 15 bp, Homo sapiens
tacagtctgggcgac

SEQ ID NO: 249369 - DNA, 15 bp, Homo sapiens
ctacagtctgggcga

SEQ ID NO: 249370 - DNA, 15 bp, Homo sapiens
actacagtctgggcg

SEQ ID NO: 249371 - DNA, 15 bp, Homo sapiens
cactacagtctgggc

SEQ ID NO: 249372 - DNA, 15 bp, Homo sapiens
gcactacagtctggg

SEQ ID NO: 249373 - DNA, 15 bp, Homo sapiens
tgcactacagtctgg

SEQ ID NO: 249374 - DNA, 15 bp, Homo sapiens
ctgcactacagtctg

SEQ ID NO: 249375 - DNA, 15 bp, Homo sapiens
actgcactacagtct

SEQ ID NO: 249376 - DNA, 15 bp, Homo sapiens
cactgcactacagtc

SEQ ID NO: 249377 - DNA, 15 bp, Homo sapiens
ccactgcactacagt

SEQ ID NO: 249378 - DNA, 15 bp, Homo sapiens
accactgcactacag

SEQ ID NO: 249379 - DNA, 15 bp, Homo sapiens
caccactgcactaca

SEQ ID NO: 249380 - DNA, 15 bp, Homo sapiens
gcaccactgcactac

SEQ ID NO: 249381 - DNA, 15 bp, Homo sapiens
cgcaccactgcacta

SEQ ID NO: 249382 - DNA, 15 bp, Homo sapiens
tgatcgcaccactgc

SEQ ID NO: 249383 - DNA, 15 bp, Homo sapiens
gtgatcgcaccactg

SEQ ID NO: 249384 - DNA, 15 bp, Homo sapiens
cgtgatcgcaccact

SEQ ID NO: 249385 - DNA, 15 bp, Homo sapiens
ccgtgatcgcaccac

SEQ ID NO: 249386 - DNA, 15 bp, Homo sapiens
gccgtgatcgcacca

SEQ ID NO: 249387 - DNA, 15 bp, Homo sapiens
agccgtgatcgcacc

SEQ ID NO: 249388 - DNA, 15 bp, Homo sapiens
gagccgtgatcgcac

SEQ ID NO: 249389 - DNA, 15 bp, Homo sapiens
tgagccgtgatcgca

SEQ ID NO: 249390 - DNA, 15 bp, Homo sapiens
gtgagccgtgatcgc

SEQ ID NO: 249391 - DNA, 15 bp, Homo sapiens
agtgagccgtgatcg

SEQ ID NO: 249392 - DNA, 15 bp, Homo sapiens
cagtgagccgtgatc

SEQ ID NO: 249393 - DNA, 15 bp, Homo sapiens
gcagtgagccgtgat

SEQ ID NO: 249394 - DNA, 15 bp, Homo sapiens
tgcagtgagccgtga

SEQ ID NO: 249395 - DNA, 15 bp, Homo sapiens
ttgcagtgagccgtg

SEQ ID NO: 249396 - DNA, 15 bp, Homo sapiens
cttgcagtgagccgt

SEQ ID NO: 249397 - DNA, 15 bp, Homo sapiens
tgaggcggagcttgc

SEQ ID NO: 249398 - DNA, 15 bp, Homo sapiens
gtgaggcggagcttg

SEQ ID NO: 249399 - DNA, 15 bp, Homo sapiens
tgtgaggcggagctt

SEQ ID NO: 249400 - DNA, 15 bp, Homo sapiens
ctgtgaggcggagct

SEQ ID NO: 249401 - DNA, 15 bp, Homo sapiens
cctgtgaggcggagc

SEQ ID NO: 249402 - DNA, 15 bp, Homo sapiens
acctgtgaggcggag

SEQ ID NO: 249403 - DNA, 15 bp, Homo sapiens
aacctgtgaggcgga

SEQ ID NO: 249404 - DNA, 15 bp, Homo sapiens
gaacctgtgaggcgg

SEQ ID NO: 249405 - DNA, 15 bp, Homo sapiens
tgaacctgtgaggcg

SEQ ID NO: 249406 - DNA, 15 bp, Homo sapiens
gtgaacctgtgaggc

SEQ ID NO: 249407 - DNA, 15 bp, Homo sapiens
cgtgaacctgtgagg

SEQ ID NO: 249408 - DNA, 15 bp, Homo sapiens
gcgtgaacctgtgag

SEQ ID NO: 249409 - DNA, 15 bp, Homo sapiens
ggcgtgaacctgtga

SEQ ID NO: 249410 - DNA, 15 bp, Homo sapiens
tggcgtgaacctgtg

SEQ ID NO: 249411 - DNA, 15 bp, Homo sapiens
atggcgtgaacctgt

SEQ ID NO: 249412 - DNA, 15 bp, Homo sapiens
aatggcgtgaacctg

SEQ ID NO: 249413 - DNA, 15 bp, Homo sapiens
gaatggcgtgaacct

SEQ ID NO: 249414 - DNA, 15 bp, Homo sapiens
accgggcgtggtggc

SEQ ID NO: 249415 - DNA, 15 bp, Homo sapiens
aaccgggcgtggtgg

SEQ ID NO: 249416 - DNA, 15 bp, Homo sapiens
taaccgggcgtggtg

SEQ ID NO: 249417 - DNA, 15 bp, Homo sapiens
ttaaccgggcgtggt

SEQ ID NO: 249418 - DNA, 15 bp, Homo sapiens
attaaccgggcgtgg

SEQ ID NO: 249419 - DNA, 15 bp, Homo sapiens
aattaaccgggcgtg

SEQ ID NO: 249420 - DNA, 15 bp, Homo sapiens
aaattaaccgggcgt

SEQ ID NO: 249421 - DNA, 15 bp, Homo sapiens
aaaattaaccgggcg

SEQ ID NO: 249422 - DNA, 15 bp, Homo sapiens
aaaaattaaccgggc

SEQ ID NO: 249423 - DNA, 15 bp, Homo sapiens
aaaaaattaaccggg

SEQ ID NO: 249424 - DNA, 15 bp, Homo sapiens
caaaaaattaaccgg

SEQ ID NO: 249425 - DNA, 15 bp, Homo sapiens
gcaaaaaattaaccg

SEQ ID NO: 249426 - DNA, 15 bp, Homo sapiens
tgcaaaaaattaacc

SEQ ID NO: 249427 - DNA, 15 bp, Homo sapiens
atgcaaaaaattaac

SEQ ID NO: 249428 - DNA, 15 bp, Homo sapiens
aatgcaaaaaattaa

SEQ ID NO: 249429 - DNA, 15 bp, Homo sapiens
aaatgcaaaaaatta

SEQ ID NO: 249430 - DNA, 15 bp, Homo sapiens
aaaatgcaaaaaatt

SEQ ID NO: 249431 - DNA, 15 bp, Homo sapiens
aaaaatgcaaaaaat

SEQ ID NO: 249432 - DNA, 15 bp, Homo sapiens
taaaaatgcaaaaaa

SEQ ID NO: 249433 - DNA, 15 bp, Homo sapiens
ataaaaatgcaaaaa

SEQ ID NO: 249434 - DNA, 15 bp, Homo sapiens
aataaaaatgcaaaa

SEQ ID NO: 249435 - DNA, 15 bp, Homo sapiens
taataaaaatgcaaa

SEQ ID NO: 249436 - DNA, 15 bp, Homo sapiens
ctaataaaaatgcaa

SEQ ID NO: 249437 - DNA, 15 bp, Homo sapiens
tctaataaaaatgca

SEQ ID NO: 249438 - DNA, 15 bp, Homo sapiens
ctctaataaaaatgc

SEQ ID NO: 249439 - DNA, 15 bp, Homo sapiens
tctctaataaaaatg

SEQ ID NO: 249440 - DNA, 15 bp, Homo sapiens
cgtctctaataaaaa

SEQ ID NO: 249441 - DNA, 15 bp, Homo sapiens
ccgtctctaataaaa

SEQ ID NO: 249442 - DNA, 15 bp, Homo sapiens
cccgtctctaataaa

SEQ ID NO: 249443 - DNA, 15 bp, Homo sapiens
ccccgtctctaataa

SEQ ID NO: 249444 - DNA, 15 bp, Homo sapiens
accccgtctctaata

SEQ ID NO: 249445 - DNA, 15 bp, Homo sapiens
aaccccgtctctaat

SEQ ID NO: 249446 - DNA, 15 bp, Homo sapiens
aaaccccgtctctaa

SEQ ID NO: 249447 - DNA, 15 bp, Homo sapiens
cggtgaaaccccgtc

SEQ ID NO: 249448 - DNA, 15 bp, Homo sapiens
gcggtgaaaccccgt

SEQ ID NO: 249449 - DNA, 15 bp, Homo sapiens
cgcggtgaaaccccg

SEQ ID NO: 249450 - DNA, 15 bp, Homo sapiens
acgcggtgaaacccc

SEQ ID NO: 249451 - DNA, 15 bp, Homo sapiens
aacgcggtgaaaccc

SEQ ID NO: 249452 - DNA, 15 bp, Homo sapiens
taacgcggtgaaacc

SEQ ID NO: 249453 - DNA, 15 bp, Homo sapiens
ctaacgcggtgaaac

SEQ ID NO: 249454 - DNA, 15 bp, Homo sapiens
gctaacgcggtgaaa

SEQ ID NO: 249455 - DNA, 15 bp, Homo sapiens
ggctaacgcggtgaa

SEQ ID NO: 249456 - DNA, 15 bp, Homo sapiens
tggctaacgcggtga

SEQ ID NO: 249457 - DNA, 15 bp, Homo sapiens
ctggctaacgcggtg

SEQ ID NO: 249458 - DNA, 15 bp, Homo sapiens
cctggctaacgcggt

SEQ ID NO: 249459 - DNA, 15 bp, Homo sapiens
tcctggctaacgcgg

SEQ ID NO: 249460 - DNA, 15 bp, Homo sapiens
atcctggctaacgcg

SEQ ID NO: 249461 - DNA, 15 bp, Homo sapiens
catcctggctaacgc

SEQ ID NO: 249462 - DNA, 15 bp, Homo sapiens
ttagaccatcctggc

SEQ ID NO: 249463 - DNA, 15 bp, Homo sapiens
tttagaccatcctgg

SEQ ID NO: 249464 - DNA, 15 bp, Homo sapiens
atttagaccatcctg

SEQ ID NO: 249465 - DNA, 15 bp, Homo sapiens
gatttagaccatcct

SEQ ID NO: 249466 - DNA, 15 bp, Homo sapiens
agatttagaccatcc

SEQ ID NO: 249467 - DNA, 15 bp, Homo sapiens
gagatttagaccatc

SEQ ID NO: 249468 - DNA, 15 bp, Homo sapiens
ggagatttagaccat

SEQ ID NO: 249469 - DNA, 15 bp, Homo sapiens
aggagatttagacca

SEQ ID NO: 249470 - DNA, 15 bp, Homo sapiens
caggagatttagacc

SEQ ID NO: 249471 - DNA, 15 bp, Homo sapiens
tcaggagatttagac

SEQ ID NO: 249472 - DNA, 15 bp, Homo sapiens
gtcaggagatttaga

SEQ ID NO: 249473 - DNA, 15 bp, Homo sapiens
ggtcaggagatttag

SEQ ID NO: 249474 - DNA, 15 bp, Homo sapiens
gggtcaggagattta

SEQ ID NO: 249475 - DNA, 15 bp, Homo sapiens
agggtcaggagattt

SEQ ID NO: 249476 - DNA, 15 bp, Homo sapiens
cagggtcaggagatt

SEQ ID NO: 249477 - DNA, 15 bp, Homo sapiens
acagggtcaggagat

SEQ ID NO: 249478 - DNA, 15 bp, Homo sapiens
cacagggtcaggaga

SEQ ID NO: 249479 - DNA, 15 bp, Homo sapiens
tcacagggtcaggag

SEQ ID NO: 249480 - DNA, 15 bp, Homo sapiens
atcacagggtcagga

SEQ ID NO: 249481 - DNA, 15 bp, Homo sapiens
gatcacagggtcagg

SEQ ID NO: 249482 - DNA, 15 bp, Homo sapiens
ggatcacagggtcag

SEQ ID NO: 249483 - DNA, 15 bp, Homo sapiens
tggatcacagggtca

SEQ ID NO: 249484 - DNA, 15 bp, Homo sapiens
gtggatcacagggtc

SEQ ID NO: 249485 - DNA, 15 bp, Homo sapiens
ggtggatcacagggt

SEQ ID NO: 249486 - DNA, 15 bp, Homo sapiens
gggtggatcacaggg

SEQ ID NO: 249487 - DNA, 15 bp, Homo sapiens
cgggtggatcacagg

SEQ ID NO: 249488 - DNA, 15 bp, Homo sapiens
gcgggtggatcacag

SEQ ID NO: 249489 - DNA, 15 bp, Homo sapiens
ggcgggtggatcaca

SEQ ID NO: 249490 - DNA, 15 bp, Homo sapiens
agggaggccgaggcg

SEQ ID NO: 249491 - DNA, 15 bp, Homo sapiens
tagggaggccgaggc

SEQ ID NO: 249492 - DNA, 15 bp, Homo sapiens
ttagggaggccgagg

SEQ ID NO: 249493 - DNA, 15 bp, Homo sapiens
cttagggaggccgag

SEQ ID NO: 249494 - DNA, 15 bp, Homo sapiens
acttagggaggccga

SEQ ID NO: 249495 - DNA, 15 bp, Homo sapiens
cacttagggaggccg

SEQ ID NO: 249496 - DNA, 15 bp, Homo sapiens
gcacttagggaggcc

SEQ ID NO: 249497 - DNA, 15 bp, Homo sapiens
agcacttagggaggc

SEQ ID NO: 249498 - DNA, 15 bp, Homo sapiens
aagcacttagggagg

SEQ ID NO: 249499 - DNA, 15 bp, Homo sapiens
caagcacttagggag

SEQ ID NO: 249500 - DNA, 15 bp, Homo sapiens
ccaagcacttaggga

SEQ ID NO: 249501 - DNA, 15 bp, Homo sapiens
tccaagcacttaggg

SEQ ID NO: 249502 - DNA, 15 bp, Homo sapiens
atccaagcacttagg

SEQ ID NO: 249503 - DNA, 15 bp, Homo sapiens
aatccaagcacttag

SEQ ID NO: 249504 - DNA, 15 bp, Homo sapiens
taatccaagcactta

SEQ ID NO: 249505 - DNA, 15 bp, Homo sapiens
gtaatccaagcactt

SEQ ID NO: 249506 - DNA, 15 bp, Homo sapiens
tgtaatccaagcact

SEQ ID NO: 249507 - DNA, 15 bp, Homo sapiens
ttgtaatccaagcac

SEQ ID NO: 249508 - DNA, 15 bp, Homo sapiens
cttgtaatccaagca

SEQ ID NO: 249509 - DNA, 15 bp, Homo sapiens
gcttgtaatccaagc

SEQ ID NO: 249510 - DNA, 15 bp, Homo sapiens
cgcttgtaatccaag

SEQ ID NO: 249511 - DNA, 15 bp, Homo sapiens
acgcttgtaatccaa

SEQ ID NO: 249512 - DNA, 15 bp, Homo sapiens
cacgcttgtaatcca

SEQ ID NO: 249513 - DNA, 15 bp, Homo sapiens
tcacgcttgtaatcc

SEQ ID NO: 249514 - DNA, 15 bp, Homo sapiens
ctcacgcttgtaatc

SEQ ID NO: 249515 - DNA, 15 bp, Homo sapiens
gctcacgcttgtaat

SEQ ID NO: 249516 - DNA, 15 bp, Homo sapiens
ggctcacgcttgtaa

SEQ ID NO: 249517 - DNA, 15 bp, Homo sapiens
tggctcacgcttgta

SEQ ID NO: 249518 - DNA, 15 bp, Homo sapiens
gtggctcacgcttgt

SEQ ID NO: 249519 - DNA, 15 bp, Homo sapiens
ggtggctcacgcttg

SEQ ID NO: 249520 - DNA, 15 bp, Homo sapiens
tggtggctcacgctt

SEQ ID NO: 249521 - DNA, 15 bp, Homo sapiens
gtggtggctcacgct

SEQ ID NO: 249522 - DNA, 15 bp, Homo sapiens
cgtggtggctcacgc

SEQ ID NO: 249523 - DNA, 15 bp, Homo sapiens
gcgtggtggctcacg

SEQ ID NO: 249524 - DNA, 15 bp, Homo sapiens
ggccgggcgtggtgg

SEQ ID NO: 249525 - DNA, 15 bp, Homo sapiens
gggccgggcgtggtg

SEQ ID NO: 249526 - DNA, 15 bp, Homo sapiens
ggggccgggcgtggt

SEQ ID NO: 249527 - DNA, 15 bp, Homo sapiens
gggggccgggcgtgg

SEQ ID NO: 249528 - DNA, 15 bp, Homo sapiens
agggggccgggcgtg

SEQ ID NO: 249529 - DNA, 15 bp, Homo sapiens
aagggggccgggcgt

SEQ ID NO: 249530 - DNA, 15 bp, Homo sapiens
aaagggggccgggcg

SEQ ID NO: 249531 - DNA, 15 bp, Homo sapiens
aaaagggggccgggc

SEQ ID NO: 249532 - DNA, 15 bp, Homo sapiens
aaaaagggggccggg

SEQ ID NO: 249533 - DNA, 15 bp, Homo sapiens
taaaaagggggccgg

SEQ ID NO: 249534 - DNA, 15 bp, Homo sapiens
ataaaaagggggccg

SEQ ID NO: 249535 - DNA, 15 bp, Homo sapiens
aataaaaagggggcc

SEQ ID NO: 249536 - DNA, 15 bp, Homo sapiens
aaataaaaagggggc

SEQ ID NO: 249537 - DNA, 15 bp, Homo sapiens
aaaataaaaaggggg

SEQ ID NO: 249538 - DNA, 15 bp, Homo sapiens
aaaaataaaaagggg

SEQ ID NO: 249539 - DNA, 15 bp, Homo sapiens
aaaaaataaaaaggg

SEQ ID NO: 249540 - DNA, 15 bp, Homo sapiens
taaaaaataaaaagg

SEQ ID NO: 249541 - DNA, 15 bp, Homo sapiens
ataaaaaataaaaag

SEQ ID NO: 249542 - DNA, 15 bp, Homo sapiens
caaaaaataaaaaat

SEQ ID NO: 249543 - DNA, 15 bp, Homo sapiens
tcaaaaaataaaaaa

SEQ ID NO: 249544 - DNA, 15 bp, Homo sapiens
cgtctcaaaaaataa

SEQ ID NO: 249545 - DNA, 15 bp, Homo sapiens
ccgtctcaaaaaata

SEQ ID NO: 249546 - DNA, 15 bp, Homo sapiens
tccgtctcaaaaaat

SEQ ID NO: 249547 - DNA, 15 bp, Homo sapiens
tagcctgggcgacag

SEQ ID NO: 249548 - DNA, 15 bp, Homo sapiens
atctagcctgggcga

SEQ ID NO: 249549 - DNA, 15 bp, Homo sapiens
aatctagcctgggcg

SEQ ID NO: 249550 - DNA, 15 bp, Homo sapiens
caatctagcctgggc

SEQ ID NO: 249551 - DNA, 15 bp, Homo sapiens
gcaatctagcctggg

SEQ ID NO: 249552 - DNA, 15 bp, Homo sapiens
tgcaatctagcctgg

SEQ ID NO: 249553 - DNA, 15 bp, Homo sapiens
ctgcaatctagcctg

SEQ ID NO: 249554 - DNA, 15 bp, Homo sapiens
actgcaatctagcct

SEQ ID NO: 249555 - DNA, 15 bp, Homo sapiens
cactgcaatctagcc

SEQ ID NO: 249556 - DNA, 15 bp, Homo sapiens
ccactgcaatctagc

SEQ ID NO: 249557 - DNA, 15 bp, Homo sapiens
gccactgcaatctag

SEQ ID NO: 249558 - DNA, 15 bp, Homo sapiens
cgccactgcaatcta

SEQ ID NO: 249559 - DNA, 15 bp, Homo sapiens
acgccactgcaatct

SEQ ID NO: 249560 - DNA, 15 bp, Homo sapiens
cacgccactgcaatc

SEQ ID NO: 249561 - DNA, 15 bp, Homo sapiens
tcacgccactgcaat

SEQ ID NO: 249562 - DNA, 15 bp, Homo sapiens
atcacgccactgcaa

SEQ ID NO: 249563 - DNA, 15 bp, Homo sapiens
gatcacgccactgca

SEQ ID NO: 249564 - DNA, 15 bp, Homo sapiens
agatcacgccactgc

SEQ ID NO: 249565 - DNA, 15 bp, Homo sapiens
gagatcacgccactg

SEQ ID NO: 249566 - DNA, 15 bp, Homo sapiens
gagccgagatcacgc

SEQ ID NO: 249567 - DNA, 15 bp, Homo sapiens
tgagccgagatcacg

SEQ ID NO: 249568 - DNA, 15 bp, Homo sapiens
gtgagccgagatcac

SEQ ID NO: 249569 - DNA, 15 bp, Homo sapiens
agtgagccgagatca

SEQ ID NO: 249570 - DNA, 15 bp, Homo sapiens
ctgcagtgagccgag

SEQ ID NO: 249571 - DNA, 15 bp, Homo sapiens
gctgcagtgagccga

SEQ ID NO: 249572 - DNA, 15 bp, Homo sapiens
ggctgcagtgagccg

SEQ ID NO: 249573 - DNA, 15 bp, Homo sapiens
tgggaggcggaggct

SEQ ID NO: 249574 - DNA, 15 bp, Homo sapiens
ctgggaggcggaggc

SEQ ID NO: 249575 - DNA, 15 bp, Homo sapiens
ttgaggcaggagaat

SEQ ID NO: 249576 - DNA, 15 bp, Homo sapiens
gttgaggcaggagaa

SEQ ID NO: 249577 - DNA, 15 bp, Homo sapiens
ggttgaggcaggaga

SEQ ID NO: 249578 - DNA, 15 bp, Homo sapiens
aggttgaggcaggag

SEQ ID NO: 249579 - DNA, 15 bp, Homo sapiens
gaggttgaggcagga

SEQ ID NO: 249580 - DNA, 15 bp, Homo sapiens
ggaggttgaggcagg

SEQ ID NO: 249581 - DNA, 15 bp, Homo sapiens
gggaggttgaggcag

SEQ ID NO: 249582 - DNA, 15 bp, Homo sapiens
tgggaggttgaggca

SEQ ID NO: 249583 - DNA, 15 bp, Homo sapiens
ttgggaggttgaggc

SEQ ID NO: 249584 - DNA, 15 bp, Homo sapiens
gttgggaggttgagg

SEQ ID NO: 249585 - DNA, 15 bp, Homo sapiens
agttgggaggttgag

SEQ ID NO: 249586 - DNA, 15 bp, Homo sapiens
tagttgggaggttga

SEQ ID NO: 249587 - DNA, 15 bp, Homo sapiens
ttagttgggaggttg

SEQ ID NO: 249588 - DNA, 15 bp, Homo sapiens
attagttgggaggtt

SEQ ID NO: 249589 - DNA, 15 bp, Homo sapiens
aattagttgggaggt

SEQ ID NO: 249590 - DNA, 15 bp, Homo sapiens
taattagttgggagg

SEQ ID NO: 249591 - DNA, 15 bp, Homo sapiens
ctaattagttgggag

SEQ ID NO: 249592 - DNA, 15 bp, Homo sapiens
cctaattagttggga

SEQ ID NO: 249593 - DNA, 15 bp, Homo sapiens
tcctaattagttggg

SEQ ID NO: 249594 - DNA, 15 bp, Homo sapiens
atcctaattagttgg

SEQ ID NO: 249595 - DNA, 15 bp, Homo sapiens
aatcctaattagttg

SEQ ID NO: 249596 - DNA, 15 bp, Homo sapiens
taatcctaattagtt

SEQ ID NO: 249597 - DNA, 15 bp, Homo sapiens
gtaatcctaattagt

SEQ ID NO: 249598 - DNA, 15 bp, Homo sapiens
tgtaatcctaattag

SEQ ID NO: 249599 - DNA, 15 bp, Homo sapiens
ttgtaatcctaatta

SEQ ID NO: 249600 - DNA, 15 bp, Homo sapiens
cttgtaatcctaatt

SEQ ID NO: 249601 - DNA, 15 bp, Homo sapiens
gcttgtaatcctaat

SEQ ID NO: 249602 - DNA, 15 bp, Homo sapiens
tgcttgtaatcctaa

SEQ ID NO: 249603 - DNA, 15 bp, Homo sapiens
atgcttgtaatccta

SEQ ID NO: 249604 - DNA, 15 bp, Homo sapiens
catgcttgtaatcct

SEQ ID NO: 249605 - DNA, 15 bp, Homo sapiens
acatgcttgtaatcc

SEQ ID NO: 249606 - DNA, 15 bp, Homo sapiens
tacatgcttgtaatc

SEQ ID NO: 249607 - DNA, 15 bp, Homo sapiens
gtacatgcttgtaat

SEQ ID NO: 249608 - DNA, 15 bp, Homo sapiens
ggtacatgcttgtaa

SEQ ID NO: 249609 - DNA, 15 bp, Homo sapiens
tggtacatgcttgta

SEQ ID NO: 249610 - DNA, 15 bp, Homo sapiens
gtggtacatgcttgt

SEQ ID NO: 249611 - DNA, 15 bp, Homo sapiens
ggtggtacatgcttg

SEQ ID NO: 249612 - DNA, 15 bp, Homo sapiens
tggtggtacatgctt

SEQ ID NO: 249613 - DNA, 15 bp, Homo sapiens
atggtggtacatgct

SEQ ID NO: 249614 - DNA, 15 bp, Homo sapiens
catggtggtacatgc

SEQ ID NO: 249615 - DNA, 15 bp, Homo sapiens
gcatggtggtacatg

SEQ ID NO: 249616 - DNA, 15 bp, Homo sapiens
ggcatggtggtacat

SEQ ID NO: 249617 - DNA, 15 bp, Homo sapiens
aggcatggtggtaca

SEQ ID NO: 249618 - DNA, 15 bp, Homo sapiens
caggcatggtggtac

SEQ ID NO: 249619 - DNA, 15 bp, Homo sapiens
tcaggcatggtggta

SEQ ID NO: 249620 - DNA, 15 bp, Homo sapiens
gtcaggcatggtggt

SEQ ID NO: 249621 - DNA, 15 bp, Homo sapiens
agtcaggcatggtgg

SEQ ID NO: 249622 - DNA, 15 bp, Homo sapiens
tagtcaggcatggtg

SEQ ID NO: 249623 - DNA, 15 bp, Homo sapiens
ttagtcaggcatggt

SEQ ID NO: 249624 - DNA, 15 bp, Homo sapiens
attagtcaggcatgg

SEQ ID NO: 249625 - DNA, 15 bp, Homo sapiens
aattagtcaggcatg

SEQ ID NO: 249626 - DNA, 15 bp, Homo sapiens
aaattagtcaggcat

SEQ ID NO: 249627 - DNA, 15 bp, Homo sapiens
aaaattagtcaggca

SEQ ID NO: 249628 - DNA, 15 bp, Homo sapiens
aaaaattagtcaggc

SEQ ID NO: 249629 - DNA, 15 bp, Homo sapiens
aaaaaattagtcagg

SEQ ID NO: 249630 - DNA, 15 bp, Homo sapiens
caaaaaattagtcag

SEQ ID NO: 249631 - DNA, 15 bp, Homo sapiens
acaaaaaattagtca

SEQ ID NO: 249632 - DNA, 15 bp, Homo sapiens
tacaaaaaattagtc

SEQ ID NO: 249633 - DNA, 15 bp, Homo sapiens
atacaaaaaattagt

SEQ ID NO: 249634 - DNA, 15 bp, Homo sapiens
agtctctactaaaaa

SEQ ID NO: 249635 - DNA, 15 bp, Homo sapiens
cagtctctactaaaa

SEQ ID NO: 249636 - DNA, 15 bp, Homo sapiens
ccagtctctactaaa

SEQ ID NO: 249637 - DNA, 15 bp, Homo sapiens
cccagtctctactaa

SEQ ID NO: 249638 - DNA, 15 bp, Homo sapiens
acccagtctctacta

SEQ ID NO: 249639 - DNA, 15 bp, Homo sapiens
aacccagtctctact

SEQ ID NO: 249640 - DNA, 15 bp, Homo sapiens
aaacccagtctctac

SEQ ID NO: 249641 - DNA, 15 bp, Homo sapiens
gaaacccagtctcta

SEQ ID NO: 249642 - DNA, 15 bp, Homo sapiens
tgaaacccagtctct

SEQ ID NO: 249643 - DNA, 15 bp, Homo sapiens
gtgaaacccagtctc

SEQ ID NO: 249644 - DNA, 15 bp, Homo sapiens
ggtgaaacccagtct

SEQ ID NO: 249645 - DNA, 15 bp, Homo sapiens
agccaacatggtgaa

SEQ ID NO: 249646 - DNA, 15 bp, Homo sapiens
tagccaacatggtga

SEQ ID NO: 249647 - DNA, 15 bp, Homo sapiens
ctagccaacatggtg

SEQ ID NO: 249648 - DNA, 15 bp, Homo sapiens
cctagccaacatggt

SEQ ID NO: 249649 - DNA, 15 bp, Homo sapiens
gcctagccaacatgg

SEQ ID NO: 249650 - DNA, 15 bp, Homo sapiens
agcctagccaacatg

SEQ ID NO: 249651 - DNA, 15 bp, Homo sapiens
cagcctagccaacat

SEQ ID NO: 249652 - DNA, 15 bp, Homo sapiens
ccagcctagccaaca

SEQ ID NO: 249653 - DNA, 15 bp, Homo sapiens
accagcctagccaac

SEQ ID NO: 249654 - DNA, 15 bp, Homo sapiens
gaccagcctagccaa

SEQ ID NO: 249655 - DNA, 15 bp, Homo sapiens
agaccagcctagcca

SEQ ID NO: 249656 - DNA, 15 bp, Homo sapiens
gagaccagcctagcc

SEQ ID NO: 249657 - DNA, 15 bp, Homo sapiens
cgagaccagcctagc

SEQ ID NO: 249658 - DNA, 15 bp, Homo sapiens
tcgagaccagcctag

SEQ ID NO: 249659 - DNA, 15 bp, Homo sapiens
ttcgagaccagccta

SEQ ID NO: 249660 - DNA, 15 bp, Homo sapiens
agggttcgagaccag

SEQ ID NO: 249661 - DNA, 15 bp, Homo sapiens
aagggttcgagacca

SEQ ID NO: 249662 - DNA, 15 bp, Homo sapiens
taagggttcgagacc

SEQ ID NO: 249663 - DNA, 15 bp, Homo sapiens
ctaagggttcgagac

SEQ ID NO: 249664 - DNA, 15 bp, Homo sapiens
gctaagggttcgaga

SEQ ID NO: 249665 - DNA, 15 bp, Homo sapiens
ggctaagggttcgag

SEQ ID NO: 249666 - DNA, 15 bp, Homo sapiens
aggctaagggttcga

SEQ ID NO: 249667 - DNA, 15 bp, Homo sapiens
gaggctaagggttcg

SEQ ID NO: 249668 - DNA, 15 bp, Homo sapiens
tgaggctaagggttc

SEQ ID NO: 249669 - DNA, 15 bp, Homo sapiens
ttgaggctaagggtt

SEQ ID NO: 249670 - DNA, 15 bp, Homo sapiens
cttgaggctaagggt

SEQ ID NO: 249671 - DNA, 15 bp, Homo sapiens
acttgaggctaaggg

SEQ ID NO: 249672 - DNA, 15 bp, Homo sapiens
tacttgaggctaagg

SEQ ID NO: 249673 - DNA, 15 bp, Homo sapiens
ttacttgaggctaag

SEQ ID NO: 249674 - DNA, 15 bp, Homo sapiens
attacttgaggctaa

SEQ ID NO: 249675 - DNA, 15 bp, Homo sapiens
gattacttgaggcta

SEQ ID NO: 249676 - DNA, 15 bp, Homo sapiens
agattacttgaggct

SEQ ID NO: 249677 - DNA, 15 bp, Homo sapiens
cagattacttgaggc

SEQ ID NO: 249678 - DNA, 15 bp, Homo sapiens
gcagattacttgagg

SEQ ID NO: 249679 - DNA, 15 bp, Homo sapiens
ggcagattacttgag

SEQ ID NO: 249680 - DNA, 15 bp, Homo sapiens
aggcagattacttga

SEQ ID NO: 249681 - DNA, 15 bp, Homo sapiens
caggcagattacttg

SEQ ID NO: 249682 - DNA, 15 bp, Homo sapiens
gcaggcagattactt

SEQ ID NO: 249683 - DNA, 15 bp, Homo sapiens
ggcaggcagattact

SEQ ID NO: 249684 - DNA, 15 bp, Homo sapiens
aggcaggcagattac

SEQ ID NO: 249685 - DNA, 15 bp, Homo sapiens
gaggcaggcagatta

SEQ ID NO: 249686 - DNA, 15 bp, Homo sapiens
tgaggcaggcagatt

SEQ ID NO: 249687 - DNA, 15 bp, Homo sapiens
ctgaggcaggcagat

SEQ ID NO: 249688 - DNA, 15 bp, Homo sapiens
gctgaggcaggcaga

SEQ ID NO: 249689 - DNA, 15 bp, Homo sapiens
ggctgaggcaggcag

SEQ ID NO: 249690 - DNA, 15 bp, Homo sapiens
aggctgaggcaggca

SEQ ID NO: 249691 - DNA, 15 bp, Homo sapiens
gaggctgaggcaggc

SEQ ID NO: 249692 - DNA, 15 bp, Homo sapiens
gtttgggaggctgag

SEQ ID NO: 249693 - DNA, 15 bp, Homo sapiens
tgtttgggaggctga

SEQ ID NO: 249694 - DNA, 15 bp, Homo sapiens
ctgtttgggaggctg

SEQ ID NO: 249695 - DNA, 15 bp, Homo sapiens
gctgtttgggaggct

SEQ ID NO: 249696 - DNA, 15 bp, Homo sapiens
cgctgtttgggaggc

SEQ ID NO: 249697 - DNA, 15 bp, Homo sapiens
ccgctgtttgggagg

SEQ ID NO: 249698 - DNA, 15 bp, Homo sapiens
cccgctgtttgggag

SEQ ID NO: 249699 - DNA, 15 bp, Homo sapiens
ccccgctgtttggga

SEQ ID NO: 249700 - DNA, 15 bp, Homo sapiens
tccccgctgtttggg

SEQ ID NO: 249701 - DNA, 15 bp, Homo sapiens
atccccgctgtttgg

SEQ ID NO: 249702 - DNA, 15 bp, Homo sapiens
aatccccgctgtttg

SEQ ID NO: 249703 - DNA, 15 bp, Homo sapiens
taatccccgctgttt

SEQ ID NO: 249704 - DNA, 15 bp, Homo sapiens
gtaatccccgctgtt

SEQ ID NO: 249705 - DNA, 15 bp, Homo sapiens
tgtaatccccgctgt

SEQ ID NO: 249706 - DNA, 15 bp, Homo sapiens
ctgtaatccccgctg

SEQ ID NO: 249707 - DNA, 15 bp, Homo sapiens
cctgtaatccccgct

SEQ ID NO: 249708 - DNA, 15 bp, Homo sapiens
gcctgtaatccccgc

SEQ ID NO: 249709 - DNA, 15 bp, Homo sapiens
tgcctgtaatccccg

SEQ ID NO: 249710 - DNA, 15 bp, Homo sapiens
gcacagtggctcatg

SEQ ID NO: 249711 - DNA, 15 bp, Homo sapiens
tgggcacagtggctc

SEQ ID NO: 249712 - DNA, 15 bp, Homo sapiens
ttgggcacagtggct

SEQ ID NO: 249713 - DNA, 15 bp, Homo sapiens
gttgggcacagtggc

SEQ ID NO: 249714 - DNA, 15 bp, Homo sapiens
ggttgggcacagtgg

SEQ ID NO: 249715 - DNA, 15 bp, Homo sapiens
gggttgggcacagtg

SEQ ID NO: 249716 - DNA, 15 bp, Homo sapiens
tgggttgggcacagt

SEQ ID NO: 249717 - DNA, 15 bp, Homo sapiens
ttgggttgggcacag

SEQ ID NO: 249718 - DNA, 15 bp, Homo sapiens
gttgggttgggcaca

SEQ ID NO: 249719 - DNA, 15 bp, Homo sapiens
ggttgggttgggcac

SEQ ID NO: 249720 - DNA, 15 bp, Homo sapiens
gggttgggttgggca

SEQ ID NO: 249721 - DNA, 15 bp, Homo sapiens
agggttgggttgggc

SEQ ID NO: 249722 - DNA, 15 bp, Homo sapiens
cagggttgggttggg

SEQ ID NO: 249723 - DNA, 15 bp, Homo sapiens
ccagggttgggttgg

SEQ ID NO: 249724 - DNA, 15 bp, Homo sapiens
tccagggttgggttg

SEQ ID NO: 249725 - DNA, 15 bp, Homo sapiens
atccagggttgggtt

SEQ ID NO: 249726 - DNA, 15 bp, Homo sapiens
gatccagggttgggt

SEQ ID NO: 249727 - DNA, 15 bp, Homo sapiens
agatccagggttggg

SEQ ID NO: 249728 - DNA, 15 bp, Homo sapiens
gagatccagggttgg

SEQ ID NO: 249729 - DNA, 15 bp, Homo sapiens
agagatccagggttg

SEQ ID NO: 249730 - DNA, 15 bp, Homo sapiens
aagagatccagggtt

SEQ ID NO: 249731 - DNA, 15 bp, Homo sapiens
aaagagatccagggt

SEQ ID NO: 249732 - DNA, 15 bp, Homo sapiens
aaaagagatccaggg

SEQ ID NO: 249733 - DNA, 15 bp, Homo sapiens
taaaagagatccagg

SEQ ID NO: 249734 - DNA, 15 bp, Homo sapiens
ttaaaagagatccag

SEQ ID NO: 249735 - DNA, 15 bp, Homo sapiens
tttaaaagagatcca

SEQ ID NO: 249736 - DNA, 15 bp, Homo sapiens
gtttaaaagagatcc

SEQ ID NO: 249737 - DNA, 15 bp, Homo sapiens
tgtttaaaagagatc

SEQ ID NO: 249738 - DNA, 15 bp, Homo sapiens
ttgtttaaaagagat

SEQ ID NO: 249739 - DNA, 15 bp, Homo sapiens
cttgtttaaaagaga

SEQ ID NO: 249740 - DNA, 15 bp, Homo sapiens
tcttgtttaaaagag

SEQ ID NO: 249741 - DNA, 15 bp, Homo sapiens
gtcttgtttaaaaga

SEQ ID NO: 249742 - DNA, 15 bp, Homo sapiens
tgtcttgtttaaaag

SEQ ID NO: 249743 - DNA, 15 bp, Homo sapiens
ttgtcttgtttaaaa

SEQ ID NO: 249744 - DNA, 15 bp, Homo sapiens
attgtcttgtttaaa

SEQ ID NO: 249745 - DNA, 15 bp, Homo sapiens
cattgtcttgtttaa

SEQ ID NO: 249746 - DNA, 15 bp, Homo sapiens
gcattgtcttgttta

SEQ ID NO: 249747 - DNA, 15 bp, Homo sapiens
agcattgtcttgttt

SEQ ID NO: 249748 - DNA, 15 bp, Homo sapiens
gagcattgtcttgtt

SEQ ID NO: 249749 - DNA, 15 bp, Homo sapiens
cgagcattgtcttgt

SEQ ID NO: 249750 - DNA, 15 bp, Homo sapiens
gcgagcattgtcttg

SEQ ID NO: 249751 - DNA, 15 bp, Homo sapiens
agcgagcattgtctt

SEQ ID NO: 249752 - DNA, 15 bp, Homo sapiens
cagcgagcattgtct

SEQ ID NO: 249753 - DNA, 15 bp, Homo sapiens
acagcgagcattgtc

SEQ ID NO: 249754 - DNA, 15 bp, Homo sapiens
aacagcgagcattgt

SEQ ID NO: 249755 - DNA, 15 bp, Homo sapiens
caacagcgagcattg

SEQ ID NO: 249756 - DNA, 15 bp, Homo sapiens
gcaacagcgagcatt

SEQ ID NO: 249757 - DNA, 15 bp, Homo sapiens
ggcaacagcgagcat

SEQ ID NO: 249758 - DNA, 15 bp, Homo sapiens
tggcaacagcgagca

SEQ ID NO: 249759 - DNA, 15 bp, Homo sapiens
gtggcaacagcgagc

SEQ ID NO: 249760 - DNA, 15 bp, Homo sapiens
tgtggcaacagcgag

SEQ ID NO: 249761 - DNA, 15 bp, Homo sapiens
ctgtggcaacagcga

SEQ ID NO: 249762 - DNA, 15 bp, Homo sapiens
tctgtggcaacagcg

SEQ ID NO: 249763 - DNA, 15 bp, Homo sapiens
ttctgtggcaacagc

SEQ ID NO: 249764 - DNA, 15 bp, Homo sapiens
gttctgtggcaacag

SEQ ID NO: 249765 - DNA, 15 bp, Homo sapiens
tgttctgtggcaaca

SEQ ID NO: 249766 - DNA, 15 bp, Homo sapiens
ttgttctgtggcaac

SEQ ID NO: 249767 - DNA, 15 bp, Homo sapiens
attgttctgtggcaa

SEQ ID NO: 249768 - DNA, 15 bp, Homo sapiens
cattgttctgtggca

SEQ ID NO: 249769 - DNA, 15 bp, Homo sapiens
ccattgttctgtggc

SEQ ID NO: 249770 - DNA, 15 bp, Homo sapiens
cccattgttctgtgg

SEQ ID NO: 249771 - DNA, 15 bp, Homo sapiens
acccattgttctgtg

SEQ ID NO: 249772 - DNA, 15 bp, Homo sapiens
cacccattgttctgt

SEQ ID NO: 249773 - DNA, 15 bp, Homo sapiens
ccacccattgttctg

SEQ ID NO: 249774 - DNA, 15 bp, Homo sapiens
cccacccattgttct

SEQ ID NO: 249775 - DNA, 15 bp, Homo sapiens
ccccacccattgttc

SEQ ID NO: 249776 - DNA, 15 bp, Homo sapiens
accccacccattgtt

SEQ ID NO: 249777 - DNA, 15 bp, Homo sapiens
taccccacccattgt

SEQ ID NO: 249778 - DNA, 15 bp, Homo sapiens
gtaccccacccattg

SEQ ID NO: 249779 - DNA, 15 bp, Homo sapiens
tgtaccccacccatt

SEQ ID NO: 249780 - DNA, 15 bp, Homo sapiens
atgtaccccacccat

SEQ ID NO: 249781 - DNA, 15 bp, Homo sapiens
catgtaccccaccca

SEQ ID NO: 249782 - DNA, 15 bp, Homo sapiens
acatgtaccccaccc

SEQ ID NO: 249783 - DNA, 15 bp, Homo sapiens
cacatgtaccccacc

SEQ ID NO: 249784 - DNA, 15 bp, Homo sapiens
ccacatgtaccccac

SEQ ID NO: 249785 - DNA, 15 bp, Homo sapiens
gccacatgtacccca

SEQ ID NO: 249786 - DNA, 15 bp, Homo sapiens
ggccacatgtacccc

SEQ ID NO: 249787 - DNA, 15 bp, Homo sapiens
gggccacatgtaccc

SEQ ID NO: 249788 - DNA, 15 bp, Homo sapiens
tgggccacatgtacc

SEQ ID NO: 249789 - DNA, 15 bp, Homo sapiens
ctgggccacatgtac

SEQ ID NO: 249790 - DNA, 15 bp, Homo sapiens
actgggccacatgta

SEQ ID NO: 249791 - DNA, 15 bp, Homo sapiens
cactgggccacatgt

SEQ ID NO: 249792 - DNA, 15 bp, Homo sapiens
acactgggccacatg

SEQ ID NO: 249793 - DNA, 15 bp, Homo sapiens
cacactgggccacat

SEQ ID NO: 249794 - DNA, 15 bp, Homo sapiens
acacactgggccaca

SEQ ID NO: 249795 - DNA, 15 bp, Homo sapiens
aacacactgggccac

SEQ ID NO: 249796 - DNA, 15 bp, Homo sapiens
aaacacactgggcca

SEQ ID NO: 249797 - DNA, 15 bp, Homo sapiens
caaacacactgggcc

SEQ ID NO: 249798 - DNA, 15 bp, Homo sapiens
ccaaacacactgggc

SEQ ID NO: 249799 - DNA, 15 bp, Homo sapiens
gccaaacacactggg

SEQ ID NO: 249800 - DNA, 15 bp, Homo sapiens
ggccaaacacactgg

SEQ ID NO: 249801 - DNA, 15 bp, Homo sapiens
tggccaaacacactg

SEQ ID NO: 249802 - DNA, 15 bp, Homo sapiens
gtggccaaacacact

SEQ ID NO: 249803 - DNA, 15 bp, Homo sapiens
tgtggccaaacacac

SEQ ID NO: 249804 - DNA, 15 bp, Homo sapiens
atgtggccaaacaca

SEQ ID NO: 249805 - DNA, 15 bp, Homo sapiens
tatgtggccaaacac

SEQ ID NO: 249806 - DNA, 15 bp, Homo sapiens
ttatgtggccaaaca

SEQ ID NO: 249807 - DNA, 15 bp, Homo sapiens
gttatgtggccaaac

SEQ ID NO: 249808 - DNA, 15 bp, Homo sapiens
agttatgtggccaaa

SEQ ID NO: 249809 - DNA, 15 bp, Homo sapiens
cagttatgtggccaa

SEQ ID NO: 249810 - DNA, 15 bp, Homo sapiens
gcagttatgtggcca

SEQ ID NO: 249811 - DNA, 15 bp, Homo sapiens
ggcagttatgtggcc

SEQ ID NO: 249812 - DNA, 15 bp, Homo sapiens
tggcagttatgtggc

SEQ ID NO: 249813 - DNA, 15 bp, Homo sapiens
ctggcagttatgtgg

SEQ ID NO: 249814 - DNA, 15 bp, Homo sapiens
cctggcagttatgtg

SEQ ID NO: 249815 - DNA, 15 bp, Homo sapiens
gcctggcagttatgt

SEQ ID NO: 249816 - DNA, 15 bp, Homo sapiens
ggcctggcagttatg

SEQ ID NO: 249817 - DNA, 15 bp, Homo sapiens
tggcctggcagttat

SEQ ID NO: 249818 - DNA, 15 bp, Homo sapiens
ctggcctggcagtta

SEQ ID NO: 249819 - DNA, 15 bp, Homo sapiens
tctggcctggcagtt

SEQ ID NO: 249820 - DNA, 15 bp, Homo sapiens
ctctggcctggcagt

SEQ ID NO: 249821 - DNA, 15 bp, Homo sapiens
cctctggcctggcag

SEQ ID NO: 249822 - DNA, 15 bp, Homo sapiens
ccctctggcctggca

SEQ ID NO: 249823 - DNA, 15 bp, Homo sapiens
tccctctggcctggc

SEQ ID NO: 249824 - DNA, 15 bp, Homo sapiens
ttccctctggcctgg

SEQ ID NO: 249825 - DNA, 15 bp, Homo sapiens
tttccctctggcctg

SEQ ID NO: 249826 - DNA, 15 bp, Homo sapiens
ctttccctctggcct

SEQ ID NO: 249827 - DNA, 15 bp, Homo sapiens
tctttccctctggcc

SEQ ID NO: 249828 - DNA, 15 bp, Homo sapiens
ctctttccctctggc

SEQ ID NO: 249829 - DNA, 15 bp, Homo sapiens
tctctttccctctgg

SEQ ID NO: 249830 - DNA, 15 bp, Homo sapiens
gtctctttccctctg

SEQ ID NO: 249831 - DNA, 15 bp, Homo sapiens
agtctctttccctct

SEQ ID NO: 249832 - DNA, 15 bp, Homo sapiens
gagtctctttccctc

SEQ ID NO: 249833 - DNA, 15 bp, Homo sapiens
agagtctctttccct

SEQ ID NO: 249834 - DNA, 15 bp, Homo sapiens
gagagtctctttccc

SEQ ID NO: 249835 - DNA, 15 bp, Homo sapiens
tgagagtctctttcc

SEQ ID NO: 249836 - DNA, 15 bp, Homo sapiens
ctgagagtctctttc

SEQ ID NO: 249837 - DNA, 15 bp, Homo sapiens
tctgagagtctcttt

SEQ ID NO: 249838 - DNA, 15 bp, Homo sapiens
gtctgagagtctctt

SEQ ID NO: 249839 - DNA, 15 bp, Homo sapiens
agtctgagagtctct

SEQ ID NO: 249840 - DNA, 15 bp, Homo sapiens
cagtctgagagtctc

SEQ ID NO: 249841 - DNA, 15 bp, Homo sapiens
acagtctgagagtct

SEQ ID NO: 249842 - DNA, 15 bp, Homo sapiens
gacagtctgagagtc

SEQ ID NO: 249843 - DNA, 15 bp, Homo sapiens
agacagtctgagagt

SEQ ID NO: 249844 - DNA, 15 bp, Homo sapiens
gagacagtctgagag

SEQ ID NO: 249845 - DNA, 15 bp, Homo sapiens
ggagacagtctgaga

SEQ ID NO: 249846 - DNA, 15 bp, Homo sapiens
tggagacagtctgag

SEQ ID NO: 249847 - DNA, 15 bp, Homo sapiens
gtggagacagtctga

SEQ ID NO: 249848 - DNA, 15 bp, Homo sapiens
agtggagacagtctg

SEQ ID NO: 249849 - DNA, 15 bp, Homo sapiens
gagtggagacagtct

SEQ ID NO: 249850 - DNA, 15 bp, Homo sapiens
tgagtggagacagtc

SEQ ID NO: 249851 - DNA, 15 bp, Homo sapiens
ctgagtggagacagt

SEQ ID NO: 249852 - DNA, 15 bp, Homo sapiens
tctgagtggagacag

SEQ ID NO: 249853 - DNA, 15 bp, Homo sapiens
atctgagtggagaca

SEQ ID NO: 249854 - DNA, 15 bp, Homo sapiens
tatctgagtggagac

SEQ ID NO: 249855 - DNA, 15 bp, Homo sapiens
gtatctgagtggaga

SEQ ID NO: 249856 - DNA, 15 bp, Homo sapiens
tgtatctgagtggag

SEQ ID NO: 249857 - DNA, 15 bp, Homo sapiens
ttgtatctgagtgga

SEQ ID NO: 249858 - DNA, 15 bp, Homo sapiens
tttgtatctgagtgg

SEQ ID NO: 249859 - DNA, 15 bp, Homo sapiens
atttgtatctgagtg

SEQ ID NO: 249860 - DNA, 15 bp, Homo sapiens
catttgtatctgagt

SEQ ID NO: 249861 - DNA, 15 bp, Homo sapiens
acatttgtatctgag

SEQ ID NO: 249862 - DNA, 15 bp, Homo sapiens
cacatttgtatctga

SEQ ID NO: 249863 - DNA, 15 bp, Homo sapiens
acacatttgtatctg

SEQ ID NO: 249864 - DNA, 15 bp, Homo sapiens
cacacatttgtatct

SEQ ID NO: 249865 - DNA, 15 bp, Homo sapiens
acacacatttgtatc

SEQ ID NO: 249866 - DNA, 15 bp, Homo sapiens
cacacacatttgtat

SEQ ID NO: 249867 - DNA, 15 bp, Homo sapiens
acacacacatttgta

SEQ ID NO: 249868 - DNA, 15 bp, Homo sapiens
aacacacacatttgt

SEQ ID NO: 249869 - DNA, 15 bp, Homo sapiens
caacacacacatttg

SEQ ID NO: 249870 - DNA, 15 bp, Homo sapiens
acaacacacacattt

SEQ ID NO: 249871 - DNA, 15 bp, Homo sapiens
cacaacacacacatt

SEQ ID NO: 249872 - DNA, 15 bp, Homo sapiens
acacaacacacacat

SEQ ID NO: 249873 - DNA, 15 bp, Homo sapiens
cacacaacacacaca

SEQ ID NO: 249874 - DNA, 15 bp, Homo sapiens
gcacacaacacacac

SEQ ID NO: 249875 - DNA, 15 bp, Homo sapiens
cgcacacaacacaca

SEQ ID NO: 249876 - DNA, 15 bp, Homo sapiens
acgcacacaacacac

SEQ ID NO: 249877 - DNA, 15 bp, Homo sapiens
cacgcacacaacaca

SEQ ID NO: 249878 - DNA, 15 bp, Homo sapiens
acacgcacacaacac

SEQ ID NO: 249879 - DNA, 15 bp, Homo sapiens
cacacgcacacaaca

SEQ ID NO: 249880 - DNA, 15 bp, Homo sapiens
acacacgcacacaac

SEQ ID NO: 249881 - DNA, 15 bp, Homo sapiens
aacacacgcacacaa

SEQ ID NO: 249882 - DNA, 15 bp, Homo sapiens
gaacacacgcacaca

SEQ ID NO: 249883 - DNA, 15 bp, Homo sapiens
agaacacacgcacac

SEQ ID NO: 249884 - DNA, 15 bp, Homo sapiens
cagaacacacgcaca

SEQ ID NO: 249885 - DNA, 15 bp, Homo sapiens
ccagaacacacgcac

SEQ ID NO: 249886 - DNA, 15 bp, Homo sapiens
accagaacacacgca

SEQ ID NO: 249887 - DNA, 15 bp, Homo sapiens
gaccagaacacacgc

SEQ ID NO: 249888 - DNA, 15 bp, Homo sapiens
agaccagaacacacg

SEQ ID NO: 249889 - DNA, 15 bp, Homo sapiens
gagaccagaacacac

SEQ ID NO: 249890 - DNA, 15 bp, Homo sapiens
tgagaccagaacaca

SEQ ID NO: 249891 - DNA, 15 bp, Homo sapiens
atgagaccagaacac

SEQ ID NO: 249892 - DNA, 15 bp, Homo sapiens
tatgagaccagaaca

SEQ ID NO: 249893 - DNA, 15 bp, Homo sapiens
atatgagaccagaac

SEQ ID NO: 249894 - DNA, 15 bp, Homo sapiens
aatatgagaccagaa

SEQ ID NO: 249895 - DNA, 15 bp, Homo sapiens
aaatatgagaccaga

SEQ ID NO: 249896 - DNA, 15 bp, Homo sapiens
caaatatgagaccag

SEQ ID NO: 249897 - DNA, 15 bp, Homo sapiens
acaaatatgagacca

SEQ ID NO: 249898 - DNA, 15 bp, Homo sapiens
aacaaatatgagacc

SEQ ID NO: 249899 - DNA, 15 bp, Homo sapiens
aaacaaatatgagac

SEQ ID NO: 249900 - DNA, 15 bp, Homo sapiens
caaacaaatatgaga

SEQ ID NO: 249901 - DNA, 15 bp, Homo sapiens
acaaacaaatatgag

SEQ ID NO: 249902 - DNA, 15 bp, Homo sapiens
aacaaacaaatatga

SEQ ID NO: 249903 - DNA, 15 bp, Homo sapiens
aaacaaacaaatatg

SEQ ID NO: 249904 - DNA, 15 bp, Homo sapiens
aaaacaaacaaatat

SEQ ID NO: 249905 - DNA, 15 bp, Homo sapiens
caaaacaaacaaata

SEQ ID NO: 249906 - DNA, 15 bp, Homo sapiens
tcaaaacaaacaaat

SEQ ID NO: 249907 - DNA, 15 bp, Homo sapiens
ctcaaaacaaacaaa

SEQ ID NO: 249908 - DNA, 15 bp, Homo sapiens
tctcaaaacaaacaa

SEQ ID NO: 249909 - DNA, 15 bp, Homo sapiens
gtctcaaaacaaaca

SEQ ID NO: 249910 - DNA, 15 bp, Homo sapiens
tgtctcaaaacaaac

SEQ ID NO: 249911 - DNA, 15 bp, Homo sapiens
ctgtctcaaaacaaa

SEQ ID NO: 249912 - DNA, 15 bp, Homo sapiens
cctgtctcaaaacaa

SEQ ID NO: 249913 - DNA, 15 bp, Homo sapiens
ccctgtctcaaaaca

SEQ ID NO: 249914 - DNA, 15 bp, Homo sapiens
accctgtctcaaaac

SEQ ID NO: 249915 - DNA, 15 bp, Homo sapiens
caccctgtctcaaaa

SEQ ID NO: 249916 - DNA, 15 bp, Homo sapiens
acaccctgtctcaaa

SEQ ID NO: 249917 - DNA, 15 bp, Homo sapiens
gacaccctgtctcaa

SEQ ID NO: 249918 - DNA, 15 bp, Homo sapiens
cgacaccctgtctca

SEQ ID NO: 249919 - DNA, 15 bp, Homo sapiens
gcgacaccctgtctc

SEQ ID NO: 249920 - DNA, 15 bp, Homo sapiens
agcgacaccctgtct

SEQ ID NO: 249921 - DNA, 15 bp, Homo sapiens
gagcgacaccctgtc

SEQ ID NO: 249922 - DNA, 15 bp, Homo sapiens
agagcgacaccctgt

SEQ ID NO: 249923 - DNA, 15 bp, Homo sapiens
cagagcgacaccctg

SEQ ID NO: 249924 - DNA, 15 bp, Homo sapiens
acagagcgacaccct

SEQ ID NO: 249925 - DNA, 15 bp, Homo sapiens
gacagagcgacaccc

SEQ ID NO: 249926 - DNA, 15 bp, Homo sapiens
tgacagagcgacacc

SEQ ID NO: 249927 - DNA, 15 bp, Homo sapiens
gtgacagagcgacac

SEQ ID NO: 249928 - DNA, 15 bp, Homo sapiens
agtgacagagcgaca

SEQ ID NO: 249929 - DNA, 15 bp, Homo sapiens
cagtgacagagcgac

SEQ ID NO: 249930 - DNA, 15 bp, Homo sapiens
tcagtgacagagcga

SEQ ID NO: 249931 - DNA, 15 bp, Homo sapiens
ctcagtgacagagcg

SEQ ID NO: 249932 - DNA, 15 bp, Homo sapiens
actcagtgacagagc

SEQ ID NO: 249933 - DNA, 15 bp, Homo sapiens
gactcagtgacagag

SEQ ID NO: 249934 - DNA, 15 bp, Homo sapiens
agactcagtgacaga

SEQ ID NO: 249935 - DNA, 15 bp, Homo sapiens
cagactcagtgacag

SEQ ID NO: 249936 - DNA, 15 bp, Homo sapiens
ccagactcagtgaca

SEQ ID NO: 249937 - DNA, 15 bp, Homo sapiens
tccagactcagtgac

SEQ ID NO: 249938 - DNA, 15 bp, Homo sapiens
ctccagactcagtga

SEQ ID NO: 249939 - DNA, 15 bp, Homo sapiens
actccagactcagtg

SEQ ID NO: 249940 - DNA, 15 bp, Homo sapiens
cactccagactcagt

SEQ ID NO: 249941 - DNA, 15 bp, Homo sapiens
gcactccagactcag

SEQ ID NO: 249942 - DNA, 15 bp, Homo sapiens
tgcactccagactca

SEQ ID NO: 249943 - DNA, 15 bp, Homo sapiens
ctgcactccagactc

SEQ ID NO: 249944 - DNA, 15 bp, Homo sapiens
actgcactccagact

SEQ ID NO: 249945 - DNA, 15 bp, Homo sapiens
cactgcactccagac

SEQ ID NO: 249946 - DNA, 15 bp, Homo sapiens
ccactgcactccaga

SEQ ID NO: 249947 - DNA, 15 bp, Homo sapiens
tgattgcgccactgc

SEQ ID NO: 249948 - DNA, 15 bp, Homo sapiens
ctgattgcgccactg

SEQ ID NO: 249949 - DNA, 15 bp, Homo sapiens
tctgattgcgccact

SEQ ID NO: 249950 - DNA, 15 bp, Homo sapiens
ctctgattgcgccac

SEQ ID NO: 249951 - DNA, 15 bp, Homo sapiens
actctgattgcgcca

SEQ ID NO: 249952 - DNA, 15 bp, Homo sapiens
aactctgattgcgcc

SEQ ID NO: 249953 - DNA, 15 bp, Homo sapiens
gaactctgattgcgc

SEQ ID NO: 249954 - DNA, 15 bp, Homo sapiens
tgaactctgattgcg

SEQ ID NO: 249955 - DNA, 15 bp, Homo sapiens
gtgaactctgattgc

SEQ ID NO: 249956 - DNA, 15 bp, Homo sapiens
agtgaactctgattg

SEQ ID NO: 249957 - DNA, 15 bp, Homo sapiens
cagtgaactctgatt

SEQ ID NO: 249958 - DNA, 15 bp, Homo sapiens
gcagtgaactctgat

SEQ ID NO: 249959 - DNA, 15 bp, Homo sapiens
tgcagtgaactctga

SEQ ID NO: 249960 - DNA, 15 bp, Homo sapiens
ctgcagtgaactctg

SEQ ID NO: 249961 - DNA, 15 bp, Homo sapiens
gctgcagtgaactct

SEQ ID NO: 249962 - DNA, 15 bp, Homo sapiens
ggctgcagtgaactc

SEQ ID NO: 249963 - DNA, 15 bp, Homo sapiens
tgaggctgcagtgaa

SEQ ID NO: 249964 - DNA, 15 bp, Homo sapiens
ttgaggctgcagtga

SEQ ID NO: 249965 - DNA, 15 bp, Homo sapiens
tttgaggctgcagtg

SEQ ID NO: 249966 - DNA, 15 bp, Homo sapiens
gtttgaggctgcagt

SEQ ID NO: 249967 - DNA, 15 bp, Homo sapiens
agtttgaggctgcag

SEQ ID NO: 249968 - DNA, 15 bp, Homo sapiens
gagtttgaggctgca

SEQ ID NO: 249969 - DNA, 15 bp, Homo sapiens
agagtttgaggctgc

SEQ ID NO: 249970 - DNA, 15 bp, Homo sapiens
aagagtttgaggctg

SEQ ID NO: 249971 - DNA, 15 bp, Homo sapiens
caagagtttgaggct

SEQ ID NO: 249972 - DNA, 15 bp, Homo sapiens
ccaagagtttgaggc

SEQ ID NO: 249973 - DNA, 15 bp, Homo sapiens
cccaagagtttgagg

SEQ ID NO: 249974 - DNA, 15 bp, Homo sapiens
gcccaagagtttgag

SEQ ID NO: 249975 - DNA, 15 bp, Homo sapiens
agcccaagagtttga

SEQ ID NO: 249976 - DNA, 15 bp, Homo sapiens
gagcccaagagtttg

SEQ ID NO: 249977 - DNA, 15 bp, Homo sapiens
tgagcccaagagttt

SEQ ID NO: 249978 - DNA, 15 bp, Homo sapiens
ctgagcccaagagtt

SEQ ID NO: 249979 - DNA, 15 bp, Homo sapiens
actgagcccaagagt

SEQ ID NO: 249980 - DNA, 15 bp, Homo sapiens
aactgagcccaagag

SEQ ID NO: 249981 - DNA, 15 bp, Homo sapiens
caactgagcccaaga

SEQ ID NO: 249982 - DNA, 15 bp, Homo sapiens
tcaactgagcccaag

SEQ ID NO: 249983 - DNA, 15 bp, Homo sapiens
atcaactgagcccaa

SEQ ID NO: 249984 - DNA, 15 bp, Homo sapiens
aatcaactgagccca

SEQ ID NO: 249985 - DNA, 15 bp, Homo sapiens
gaatcaactgagccc

SEQ ID NO: 249986 - DNA, 15 bp, Homo sapiens
agaatcaactgagcc

SEQ ID NO: 249987 - DNA, 15 bp, Homo sapiens
gagaatcaactgagc

SEQ ID NO: 249988 - DNA, 15 bp, Homo sapiens
ggagaatcaactgag

SEQ ID NO: 249989 - DNA, 15 bp, Homo sapiens
gggagaatcaactga

SEQ ID NO: 249990 - DNA, 15 bp, Homo sapiens
tgggagaatcaactg

SEQ ID NO: 249991 - DNA, 15 bp, Homo sapiens
gtgggagaatcaact

SEQ ID NO: 249992 - DNA, 15 bp, Homo sapiens
agtgggagaatcaac

SEQ ID NO: 249993 - DNA, 15 bp, Homo sapiens
aagtgggagaatcaa

SEQ ID NO: 249994 - DNA, 15 bp, Homo sapiens
gaagtgggagaatca

SEQ ID NO: 249995 - DNA, 15 bp, Homo sapiens
tgaagtgggagaatc

SEQ ID NO: 249996 - DNA, 15 bp, Homo sapiens
ctgaagtgggagaat

SEQ ID NO: 249997 - DNA, 15 bp, Homo sapiens
gctgaagtgggagaa

SEQ ID NO: 249998 - DNA, 15 bp, Homo sapiens
ggctgaagtgggaga

SEQ ID NO: 249999 - DNA, 15 bp, Homo sapiens
aggctgaagtgggag

SEQ ID NO: 250000 - DNA, 15 bp, Homo sapiens
gaggctgaagtggga

SEQ ID NO: 250001 - DNA, 15 bp, Homo sapiens
ggaggctgaagtggg

SEQ ID NO: 250002 - DNA, 15 bp, Homo sapiens
gggaggctgaagtgg

SEQ ID NO: 250003 - DNA, 15 bp, Homo sapiens
tgggaggctgaagtg

SEQ ID NO: 250004 - DNA, 15 bp, Homo sapiens
ttgggaggctgaagt

SEQ ID NO: 250005 - DNA, 15 bp, Homo sapiens
cttgggaggctgaag

SEQ ID NO: 250006 - DNA, 15 bp, Homo sapiens
acttgggaggctgaa

SEQ ID NO: 250007 - DNA, 15 bp, Homo sapiens
tccagctacttggga

SEQ ID NO: 250008 - DNA, 15 bp, Homo sapiens
ttccagctacttggg

SEQ ID NO: 250009 - DNA, 15 bp, Homo sapiens
gttccagctacttgg

SEQ ID NO: 250010 - DNA, 15 bp, Homo sapiens
agttccagctacttg

SEQ ID NO: 250011 - DNA, 15 bp, Homo sapiens
tagttccagctactt

SEQ ID NO: 250012 - DNA, 15 bp, Homo sapiens
acctgtagttccagc

SEQ ID NO: 250013 - DNA, 15 bp, Homo sapiens
cacctgtagttccag

SEQ ID NO: 250014 - DNA, 15 bp, Homo sapiens
tcacctgtagttcca

SEQ ID NO: 250015 - DNA, 15 bp, Homo sapiens
ttcacctgtagttcc

SEQ ID NO: 250016 - DNA, 15 bp, Homo sapiens
gttcacctgtagttc

SEQ ID NO: 250017 - DNA, 15 bp, Homo sapiens
tgttcacctgtagtt

SEQ ID NO: 250018 - DNA, 15 bp, Homo sapiens
gtgttcacctgtagt

SEQ ID NO: 250019 - DNA, 15 bp, Homo sapiens
ggtgttcacctgtag

SEQ ID NO: 250020 - DNA, 15 bp, Homo sapiens
tggtgttcacctgta

SEQ ID NO: 250021 - DNA, 15 bp, Homo sapiens
gtggtgttcacctgt

SEQ ID NO: 250022 - DNA, 15 bp, Homo sapiens
agtggtgttcacctg

SEQ ID NO: 250023 - DNA, 15 bp, Homo sapiens
cagtggtgttcacct

SEQ ID NO: 250024 - DNA, 15 bp, Homo sapiens
acagtggtgttcacc

SEQ ID NO: 250025 - DNA, 15 bp, Homo sapiens
cacagtggtgttcac

SEQ ID NO: 250026 - DNA, 15 bp, Homo sapiens
gcacagtggtgttca

SEQ ID NO: 250027 - DNA, 15 bp, Homo sapiens
ggcacagtggtgttc

SEQ ID NO: 250028 - DNA, 15 bp, Homo sapiens
gggcacagtggtgtt

SEQ ID NO: 250029 - DNA, 15 bp, Homo sapiens
tgggcacagtggtgt

SEQ ID NO: 250030 - DNA, 15 bp, Homo sapiens
ctgggcacagtggtg

SEQ ID NO: 250031 - DNA, 15 bp, Homo sapiens
gctgggcacagtggt

SEQ ID NO: 250032 - DNA, 15 bp, Homo sapiens
ttagctgggcacagt

SEQ ID NO: 250033 - DNA, 15 bp, Homo sapiens
attagctgggcacag

SEQ ID NO: 250034 - DNA, 15 bp, Homo sapiens
aattagctgggcaca

SEQ ID NO: 250035 - DNA, 15 bp, Homo sapiens
aaattagctgggcac

SEQ ID NO: 250036 - DNA, 15 bp, Homo sapiens
taaattagctgggca

SEQ ID NO: 250037 - DNA, 15 bp, Homo sapiens
ataaattagctgggc

SEQ ID NO: 250038 - DNA, 15 bp, Homo sapiens
aataaattagctggg

SEQ ID NO: 250039 - DNA, 15 bp, Homo sapiens
aaataaattagctgg

SEQ ID NO: 250040 - DNA, 15 bp, Homo sapiens
aaaataaattagctg

SEQ ID NO: 250041 - DNA, 15 bp, Homo sapiens
taaaataaattagct

SEQ ID NO: 250042 - DNA, 15 bp, Homo sapiens
ataaaataaattagc

SEQ ID NO: 250043 - DNA, 15 bp, Homo sapiens
aataaaataaattag

SEQ ID NO: 250044 - DNA, 15 bp, Homo sapiens
aaataaaataaatta

SEQ ID NO: 250045 - DNA, 15 bp, Homo sapiens
aaaataaaataaatt

SEQ ID NO: 250046 - DNA, 15 bp, Homo sapiens
aaaaataaaataaat

SEQ ID NO: 250047 - DNA, 15 bp, Homo sapiens
taaaaataaaataaa

SEQ ID NO: 250048 - DNA, 15 bp, Homo sapiens
ctaaaaataaaataa

SEQ ID NO: 250049 - DNA, 15 bp, Homo sapiens
actaaaaataaaata

SEQ ID NO: 250050 - DNA, 15 bp, Homo sapiens
tactaaaaataaaat

SEQ ID NO: 250051 - DNA, 15 bp, Homo sapiens
ctactaaaaataaaa

SEQ ID NO: 250052 - DNA, 15 bp, Homo sapiens
tctactaaaaataaa

SEQ ID NO: 250053 - DNA, 15 bp, Homo sapiens
ctctactaaaaataa

SEQ ID NO: 250054 - DNA, 15 bp, Homo sapiens
tcatctctactaaaa

SEQ ID NO: 250055 - DNA, 15 bp, Homo sapiens
ctcatctctactaaa

SEQ ID NO: 250056 - DNA, 15 bp, Homo sapiens
cctcatctctactaa

SEQ ID NO: 250057 - DNA, 15 bp, Homo sapiens
acctcatctctacta

SEQ ID NO: 250058 - DNA, 15 bp, Homo sapiens
gacctcatctctact

SEQ ID NO: 250059 - DNA, 15 bp, Homo sapiens
tgagacctcatctct

SEQ ID NO: 250060 - DNA, 15 bp, Homo sapiens
gtgagacctcatctc

SEQ ID NO: 250061 - DNA, 15 bp, Homo sapiens
agtgagacctcatct

SEQ ID NO: 250062 - DNA, 15 bp, Homo sapiens
tagtgagacctcatc

SEQ ID NO: 250063 - DNA, 15 bp, Homo sapiens
atagtgagacctcat

SEQ ID NO: 250064 - DNA, 15 bp, Homo sapiens
catagtgagacctca

SEQ ID NO: 250065 - DNA, 15 bp, Homo sapiens
acatagtgagacctc

SEQ ID NO: 250066 - DNA, 15 bp, Homo sapiens
aacatagtgagacct

SEQ ID NO: 250067 - DNA, 15 bp, Homo sapiens
caacatagtgagacc

SEQ ID NO: 250068 - DNA, 15 bp, Homo sapiens
gcaacatagtgagac

SEQ ID NO: 250069 - DNA, 15 bp, Homo sapiens
ggcaacatagtgaga

SEQ ID NO: 250070 - DNA, 15 bp, Homo sapiens
gggcaacatagtgag

SEQ ID NO: 250071 - DNA, 15 bp, Homo sapiens
tgggcaacatagtga

SEQ ID NO: 250072 - DNA, 15 bp, Homo sapiens
ctgggcaacatagtg

SEQ ID NO: 250073 - DNA, 15 bp, Homo sapiens
cctgggcaacatagt

SEQ ID NO: 250074 - DNA, 15 bp, Homo sapiens
gcctgggcaacatag

SEQ ID NO: 250075 - DNA, 15 bp, Homo sapiens
agcctgggcaacata

SEQ ID NO: 250076 - DNA, 15 bp, Homo sapiens
cagcctgggcaacat

SEQ ID NO: 250077 - DNA, 15 bp, Homo sapiens
accagcctgggcaac

SEQ ID NO: 250078 - DNA, 15 bp, Homo sapiens
aagaccagcctgggc

SEQ ID NO: 250079 - DNA, 15 bp, Homo sapiens
caagaccagcctggg

SEQ ID NO: 250080 - DNA, 15 bp, Homo sapiens
gtcaagaccagcctg

SEQ ID NO: 250081 - DNA, 15 bp, Homo sapiens
ggtcaagaccagcct

SEQ ID NO: 250082 - DNA, 15 bp, Homo sapiens
aggtcaagaccagcc

SEQ ID NO: 250083 - DNA, 15 bp, Homo sapiens
gaggtcaagaccagc

SEQ ID NO: 250084 - DNA, 15 bp, Homo sapiens
ggaggtcaagaccag

SEQ ID NO: 250085 - DNA, 15 bp, Homo sapiens
aggaggtcaagacca

SEQ ID NO: 250086 - DNA, 15 bp, Homo sapiens
taggaggtcaagacc

SEQ ID NO: 250087 - DNA, 15 bp, Homo sapiens
ctaggaggtcaagac

SEQ ID NO: 250088 - DNA, 15 bp, Homo sapiens
gctaggaggtcaaga

SEQ ID NO: 250089 - DNA, 15 bp, Homo sapiens
ggctaggaggtcaag

SEQ ID NO: 250090 - DNA, 15 bp, Homo sapiens
aggctaggaggtcaa

SEQ ID NO: 250091 - DNA, 15 bp, Homo sapiens
gaggctaggaggtca

SEQ ID NO: 250092 - DNA, 15 bp, Homo sapiens
tgaggctaggaggtc

SEQ ID NO: 250093 - DNA, 15 bp, Homo sapiens
ttgaggctaggaggt

SEQ ID NO: 250094 - DNA, 15 bp, Homo sapiens
cttgaggctaggagg

SEQ ID NO: 250095 - DNA, 15 bp, Homo sapiens
gcttgaggctaggag

SEQ ID NO: 250096 - DNA, 15 bp, Homo sapiens
tgcttgaggctagga

SEQ ID NO: 250097 - DNA, 15 bp, Homo sapiens
ttgcttgaggctagg

SEQ ID NO: 250098 - DNA, 15 bp, Homo sapiens
attgcttgaggctag

SEQ ID NO: 250099 - DNA, 15 bp, Homo sapiens
gattgcttgaggcta

SEQ ID NO: 250100 - DNA, 15 bp, Homo sapiens
ggattgcttgaggct

SEQ ID NO: 250101 - DNA, 15 bp, Homo sapiens
aggattgcttgaggc

SEQ ID NO: 250102 - DNA, 15 bp, Homo sapiens
gaggattgcttgagg

SEQ ID NO: 250103 - DNA, 15 bp, Homo sapiens
accaaggcaggagga

SEQ ID NO: 250104 - DNA, 15 bp, Homo sapiens
gaccaaggcaggagg

SEQ ID NO: 250105 - DNA, 15 bp, Homo sapiens
agaccaaggcaggag

SEQ ID NO: 250106 - DNA, 15 bp, Homo sapiens
gagaccaaggcagga

SEQ ID NO: 250107 - DNA, 15 bp, Homo sapiens
cactttgggagacca

SEQ ID NO: 250108 - DNA, 15 bp, Homo sapiens
gcactttgggagacc

SEQ ID NO: 250109 - DNA, 15 bp, Homo sapiens
agcactttgggagac

SEQ ID NO: 250110 - DNA, 15 bp, Homo sapiens
cagcactttgggaga

SEQ ID NO: 250111 - DNA, 15 bp, Homo sapiens
gtgtaatcccagcac

SEQ ID NO: 250112 - DNA, 15 bp, Homo sapiens
cgtgtaatcccagca

SEQ ID NO: 250113 - DNA, 15 bp, Homo sapiens
acgtgtaatcccagc

SEQ ID NO: 250114 - DNA, 15 bp, Homo sapiens
cacgtgtaatcccag

SEQ ID NO: 250115 - DNA, 15 bp, Homo sapiens
gcacgtgtaatccca

SEQ ID NO: 250116 - DNA, 15 bp, Homo sapiens
cgcacgtgtaatccc

SEQ ID NO: 250117 - DNA, 15 bp, Homo sapiens
tcgcacgtgtaatcc

SEQ ID NO: 250118 - DNA, 15 bp, Homo sapiens
ctcgcacgtgtaatc

SEQ ID NO: 250119 - DNA, 15 bp, Homo sapiens
gctcgcacgtgtaat

SEQ ID NO: 250120 - DNA, 15 bp, Homo sapiens
ggctcgcacgtgtaa

SEQ ID NO: 250121 - DNA, 15 bp, Homo sapiens
tggctcgcacgtgta

SEQ ID NO: 250122 - DNA, 15 bp, Homo sapiens
atggctcgcacgtgt

SEQ ID NO: 250123 - DNA, 15 bp, Homo sapiens
aatggctcgcacgtg

SEQ ID NO: 250124 - DNA, 15 bp, Homo sapiens
caatggctcgcacgt

SEQ ID NO: 250125 - DNA, 15 bp, Homo sapiens
gcaatggctcgcacg

SEQ ID NO: 250126 - DNA, 15 bp, Homo sapiens
cgcaatggctcgcac

SEQ ID NO: 250127 - DNA, 15 bp, Homo sapiens
gcgcaatggctcgca

SEQ ID NO: 250128 - DNA, 15 bp, Homo sapiens
tgcgcaatggctcgc

SEQ ID NO: 250129 - DNA, 15 bp, Homo sapiens
atgcgcaatggctcg

SEQ ID NO: 250130 - DNA, 15 bp, Homo sapiens
catgcgcaatggctc

SEQ ID NO: 250131 - DNA, 15 bp, Homo sapiens
ccatgcgcaatggct

SEQ ID NO: 250132 - DNA, 15 bp, Homo sapiens
gccatgcgcaatggc

SEQ ID NO: 250133 - DNA, 15 bp, Homo sapiens
agccatgcgcaatgg

SEQ ID NO: 250134 - DNA, 15 bp, Homo sapiens
aagccatgcgcaatg

SEQ ID NO: 250135 - DNA, 15 bp, Homo sapiens
caagccatgcgcaat

SEQ ID NO: 250136 - DNA, 15 bp, Homo sapiens
acaagccatgcgcaa

SEQ ID NO: 250137 - DNA, 15 bp, Homo sapiens
cacaagccatgcgca

SEQ ID NO: 250138 - DNA, 15 bp, Homo sapiens
acacaagccatgcgc

SEQ ID NO: 250139 - DNA, 15 bp, Homo sapiens
aacacaagccatgcg

SEQ ID NO: 250140 - DNA, 15 bp, Homo sapiens
gaacacaagccatgc

SEQ ID NO: 250141 - DNA, 15 bp, Homo sapiens
agaacacaagccatg

SEQ ID NO: 250142 - DNA, 15 bp, Homo sapiens
aagaacacaagccat

SEQ ID NO: 250143 - DNA, 15 bp, Homo sapiens
caagaacacaagcca

SEQ ID NO: 250144 - DNA, 15 bp, Homo sapiens
acaagaacacaagcc

SEQ ID NO: 250145 - DNA, 15 bp, Homo sapiens
cacaagaacacaagc

SEQ ID NO: 250146 - DNA, 15 bp, Homo sapiens
acacaagaacacaag

SEQ ID NO: 250147 - DNA, 15 bp, Homo sapiens
aacacaagaacacaa

SEQ ID NO: 250148 - DNA, 15 bp, Homo sapiens
aaacacaagaacaca

SEQ ID NO: 250149 - DNA, 15 bp, Homo sapiens
gaaacacaagaacac

SEQ ID NO: 250150 - DNA, 15 bp, Homo sapiens
agaaacacaagaaca

SEQ ID NO: 250151 - DNA, 15 bp, Homo sapiens
aagaaacacaagaac

SEQ ID NO: 250152 - DNA, 15 bp, Homo sapiens
gaagaaacacaagaa

SEQ ID NO: 250153 - DNA, 15 bp, Homo sapiens
ggaagaaacacaaga

SEQ ID NO: 250154 - DNA, 15 bp, Homo sapiens
aggaagaaacacaag

SEQ ID NO: 250155 - DNA, 15 bp, Homo sapiens
aaggaagaaacacaa

SEQ ID NO: 250156 - DNA, 15 bp, Homo sapiens
aaaggaagaaacaca

SEQ ID NO: 250157 - DNA, 15 bp, Homo sapiens
aaaaggaagaaacac

SEQ ID NO: 250158 - DNA, 15 bp, Homo sapiens
aaaaaggaagaaaca

SEQ ID NO: 250159 - DNA, 15 bp, Homo sapiens
gaaaaaggaagaaac

SEQ ID NO: 250160 - DNA, 15 bp, Homo sapiens
agaaaaaggaagaaa

SEQ ID NO: 250161 - DNA, 15 bp, Homo sapiens
aagaaaaaggaagaa

SEQ ID NO: 250162 - DNA, 15 bp, Homo sapiens
aaagaaaaaggaaga

SEQ ID NO: 250163 - DNA, 15 bp, Homo sapiens
gaaagaaaaaggaag

SEQ ID NO: 250164 - DNA, 15 bp, Homo sapiens
cgaaagaaaaaggaa

SEQ ID NO: 250165 - DNA, 15 bp, Homo sapiens
tcgaaagaaaaagga

SEQ ID NO: 250166 - DNA, 15 bp, Homo sapiens
ctcgaaagaaaaagg

SEQ ID NO: 250167 - DNA, 15 bp, Homo sapiens
tctcgaaagaaaaag

SEQ ID NO: 250168 - DNA, 15 bp, Homo sapiens
atctcgaaagaaaaa

SEQ ID NO: 250169 - DNA, 15 bp, Homo sapiens
catctcgaaagaaaa

SEQ ID NO: 250170 - DNA, 15 bp, Homo sapiens
ccatctcgaaagaaa

SEQ ID NO: 250171 - DNA, 15 bp, Homo sapiens
gccatctcgaaagaa

SEQ ID NO: 250172 - DNA, 15 bp, Homo sapiens
cgccatctcgaaaga

SEQ ID NO: 250173 - DNA, 15 bp, Homo sapiens
acgccatctcgaaag

SEQ ID NO: 250174 - DNA, 15 bp, Homo sapiens
gacgccatctcgaaa

SEQ ID NO: 250175 - DNA, 15 bp, Homo sapiens
agacgccatctcgaa

SEQ ID NO: 250176 - DNA, 15 bp, Homo sapiens
gagacgccatctcga

SEQ ID NO: 250177 - DNA, 15 bp, Homo sapiens
tgagacgccatctcg

SEQ ID NO: 250178 - DNA, 15 bp, Homo sapiens
ctgagacgccatctc

SEQ ID NO: 250179 - DNA, 15 bp, Homo sapiens
actgagacgccatct

SEQ ID NO: 250180 - DNA, 15 bp, Homo sapiens
gactgagacgccatc

SEQ ID NO: 250181 - DNA, 15 bp, Homo sapiens
agactgagacgccat

SEQ ID NO: 250182 - DNA, 15 bp, Homo sapiens
cagactgagacgcca

SEQ ID NO: 250183 - DNA, 15 bp, Homo sapiens
gcagactgagacgcc

SEQ ID NO: 250184 - DNA, 15 bp, Homo sapiens
ggcagactgagacgc

SEQ ID NO: 250185 - DNA, 15 bp, Homo sapiens
tggcagactgagacg

SEQ ID NO: 250186 - DNA, 15 bp, Homo sapiens
gtggcagactgagac

SEQ ID NO: 250187 - DNA, 15 bp, Homo sapiens
ggtggcagactgaga

SEQ ID NO: 250188 - DNA, 15 bp, Homo sapiens
gggtggcagactgag

SEQ ID NO: 250189 - DNA, 15 bp, Homo sapiens
tgggtggcagactga

SEQ ID NO: 250190 - DNA, 15 bp, Homo sapiens
ctgggtggcagactg

SEQ ID NO: 250191 - DNA, 15 bp, Homo sapiens
cctgggtggcagact

SEQ ID NO: 250192 - DNA, 15 bp, Homo sapiens
gcctgggtggcagac

SEQ ID NO: 250193 - DNA, 15 bp, Homo sapiens
acatggagaaactcc

SEQ ID NO: 250194 - DNA, 15 bp, Homo sapiens
aacatggagaaactc

SEQ ID NO: 250195 - DNA, 15 bp, Homo sapiens
caacatggagaaact

SEQ ID NO: 250196 - DNA, 15 bp, Homo sapiens
accaacatggagaaa

SEQ ID NO: 250197 - DNA, 15 bp, Homo sapiens
gaccaacatggagaa

SEQ ID NO: 250198 - DNA, 15 bp, Homo sapiens
tgaccaacatggaga

SEQ ID NO: 250199 - DNA, 15 bp, Homo sapiens
ctgaccaacatggag

SEQ ID NO: 250200 - DNA, 15 bp, Homo sapiens
cctgaccaacatgga

SEQ ID NO: 250201 - DNA, 15 bp, Homo sapiens
gcctgaccaacatgg

SEQ ID NO: 250202 - DNA, 15 bp, Homo sapiens
agcctgaccaacatg

SEQ ID NO: 250203 - DNA, 15 bp, Homo sapiens
cagcctgaccaacat

SEQ ID NO: 250204 - DNA, 15 bp, Homo sapiens
ccagcctgaccaaca

SEQ ID NO: 250205 - DNA, 15 bp, Homo sapiens
accagcctgaccaac

SEQ ID NO: 250206 - DNA, 15 bp, Homo sapiens
gaccagcctgaccaa

SEQ ID NO: 250207 - DNA, 15 bp, Homo sapiens
agaccagcctgacca

SEQ ID NO: 250208 - DNA, 15 bp, Homo sapiens
gagaccagcctgacc

SEQ ID NO: 250209 - DNA, 15 bp, Homo sapiens
cgagaccagcctgac

SEQ ID NO: 250210 - DNA, 15 bp, Homo sapiens
tcgagaccagcctga

SEQ ID NO: 250211 - DNA, 15 bp, Homo sapiens
gggagttcgagacca

SEQ ID NO: 250212 - DNA, 15 bp, Homo sapiens
cgggagttcgagacc

SEQ ID NO: 250213 - DNA, 15 bp, Homo sapiens
tcgggagttcgagac

SEQ ID NO: 250214 - DNA, 15 bp, Homo sapiens
gtcgggagttcgaga

SEQ ID NO: 250215 - DNA, 15 bp, Homo sapiens
ggtcgggagttcgag

SEQ ID NO: 250216 - DNA, 15 bp, Homo sapiens
aggtcgggagttcga

SEQ ID NO: 250217 - DNA, 15 bp, Homo sapiens
gaggtcgggagttcg

SEQ ID NO: 250218 - DNA, 15 bp, Homo sapiens
tgaggtcgggagttc

SEQ ID NO: 250219 - DNA, 15 bp, Homo sapiens
ctgaggtcgggagtt

SEQ ID NO: 250220 - DNA, 15 bp, Homo sapiens
cctgaggtcgggagt

SEQ ID NO: 250221 - DNA, 15 bp, Homo sapiens
acctgaggtcgggag

SEQ ID NO: 250222 - DNA, 15 bp, Homo sapiens
cacctgaggtcggga

SEQ ID NO: 250223 - DNA, 15 bp, Homo sapiens
aggcagatcacctga

SEQ ID NO: 250224 - DNA, 15 bp, Homo sapiens
caggcagatcacctg

SEQ ID NO: 250225 - DNA, 15 bp, Homo sapiens
gcaggcagatcacct

SEQ ID NO: 250226 - DNA, 15 bp, Homo sapiens
ggcaggcagatcacc

SEQ ID NO: 250227 - DNA, 15 bp, Homo sapiens
aggcaggcagatcac

SEQ ID NO: 250228 - DNA, 15 bp, Homo sapiens
gaggcaggcagatca

SEQ ID NO: 250229 - DNA, 15 bp, Homo sapiens
cgaggcaggcagatc

SEQ ID NO: 250230 - DNA, 15 bp, Homo sapiens
ccgaggcaggcagat

SEQ ID NO: 250231 - DNA, 15 bp, Homo sapiens
gccgaggcaggcaga

SEQ ID NO: 250232 - DNA, 15 bp, Homo sapiens
ggccgaggcaggcag

SEQ ID NO: 250233 - DNA, 15 bp, Homo sapiens
aggccgaggcaggca

SEQ ID NO: 250234 - DNA, 15 bp, Homo sapiens
agtctgtaatcccag

SEQ ID NO: 250235 - DNA, 15 bp, Homo sapiens
aagtctgtaatccca

SEQ ID NO: 250236 - DNA, 15 bp, Homo sapiens
caagtctgtaatccc

SEQ ID NO: 250237 - DNA, 15 bp, Homo sapiens
tcaagtctgtaatcc

SEQ ID NO: 250238 - DNA, 15 bp, Homo sapiens
ctcaagtctgtaatc

SEQ ID NO: 250239 - DNA, 15 bp, Homo sapiens
gctcaagtctgtaat

SEQ ID NO: 250240 - DNA, 15 bp, Homo sapiens
ggctcaagtctgtaa

SEQ ID NO: 250241 - DNA, 15 bp, Homo sapiens
tggctcaagtctgta

SEQ ID NO: 250242 - DNA, 15 bp, Homo sapiens
gtggctcaagtctgt

SEQ ID NO: 250243 - DNA, 15 bp, Homo sapiens
ggtggctcaagtctg

SEQ ID NO: 250244 - DNA, 15 bp, Homo sapiens
cggtggctcaagtct

SEQ ID NO: 250245 - DNA, 15 bp, Homo sapiens
gcggtggctcaagtc

SEQ ID NO: 250246 - DNA, 15 bp, Homo sapiens
cgcggtggctcaagt

SEQ ID NO: 250247 - DNA, 15 bp, Homo sapiens
gcgcggtggctcaag

SEQ ID NO: 250248 - DNA, 15 bp, Homo sapiens
ggcgcggtggctcaa

SEQ ID NO: 250249 - DNA, 15 bp, Homo sapiens
tgggcgcggtggctc

SEQ ID NO: 250250 - DNA, 15 bp, Homo sapiens
ctgggcgcggtggct

SEQ ID NO: 250251 - DNA, 15 bp, Homo sapiens
gctgggcgcggtggc

SEQ ID NO: 250252 - DNA, 15 bp, Homo sapiens
agctgggcgcggtgg

SEQ ID NO: 250253 - DNA, 15 bp, Homo sapiens
tagctgggcgcggtg

SEQ ID NO: 250254 - DNA, 15 bp, Homo sapiens
atagctgggcgcggt

SEQ ID NO: 250255 - DNA, 15 bp, Homo sapiens
aatagctgggcgcgg

SEQ ID NO: 250256 - DNA, 15 bp, Homo sapiens
aaatagctgggcgcg

SEQ ID NO: 250257 - DNA, 15 bp, Homo sapiens
gaaatagctgggcgc

SEQ ID NO: 250258 - DNA, 15 bp, Homo sapiens
agaaatagctgggcg

SEQ ID NO: 250259 - DNA, 15 bp, Homo sapiens
cagaaatagctgggc

SEQ ID NO: 250260 - DNA, 15 bp, Homo sapiens
acagaaatagctggg

SEQ ID NO: 250261 - DNA, 15 bp, Homo sapiens
aacagaaatagctgg

SEQ ID NO: 250262 - DNA, 15 bp, Homo sapiens
aaacagaaatagctg

SEQ ID NO: 250263 - DNA, 15 bp, Homo sapiens
aaaacagaaatagct

SEQ ID NO: 250264 - DNA, 15 bp, Homo sapiens
gaaaacagaaatagc

SEQ ID NO: 250265 - DNA, 15 bp, Homo sapiens
agaaaacagaaatag

SEQ ID NO: 250266 - DNA, 15 bp, Homo sapiens
aagaaaacagaaata

SEQ ID NO: 250267 - DNA, 15 bp, Homo sapiens
aaagaaaacagaaat

SEQ ID NO: 250268 - DNA, 15 bp, Homo sapiens
gaaagaaaacagaaa

SEQ ID NO: 250269 - DNA, 15 bp, Homo sapiens
agaaagaaaacagaa

SEQ ID NO: 250270 - DNA, 15 bp, Homo sapiens
aagaaagaaaacaga

SEQ ID NO: 250271 - DNA, 15 bp, Homo sapiens
aaagaaagaaaacag

SEQ ID NO: 250272 - DNA, 15 bp, Homo sapiens
gaaagaaagaaaaca

SEQ ID NO: 250273 - DNA, 15 bp, Homo sapiens
agaaagaaagaaaac

SEQ ID NO: 250274 - DNA, 15 bp, Homo sapiens
aagaaagaaagaaaa

SEQ ID NO: 250275 - DNA, 15 bp, Homo sapiens
gaagaaagaaagaaa

SEQ ID NO: 250276 - DNA, 15 bp, Homo sapiens
agaagaaagaaagaa

SEQ ID NO: 250277 - DNA, 15 bp, Homo sapiens
aagaagaaagaaaga

SEQ ID NO: 250278 - DNA, 15 bp, Homo sapiens
gaagaagaaagaaag

SEQ ID NO: 250279 - DNA, 15 bp, Homo sapiens
agaagaagaaagaaa

SEQ ID NO: 250280 - DNA, 15 bp, Homo sapiens
aagaagaagaaagaa

SEQ ID NO: 250281 - DNA, 15 bp, Homo sapiens
gaagaagaagaaaga

SEQ ID NO: 250282 - DNA, 15 bp, Homo sapiens
agaagaagaagaaag

SEQ ID NO: 250283 - DNA, 15 bp, Homo sapiens
aagaagaagaagaaa

SEQ ID NO: 250284 - DNA, 15 bp, Homo sapiens
aaagaagaagaagaa

SEQ ID NO: 250285 - DNA, 15 bp, Homo sapiens
aaaagaagaagaaga

SEQ ID NO: 250286 - DNA, 15 bp, Homo sapiens
aaaaagaagaagaag

SEQ ID NO: 250287 - DNA, 15 bp, Homo sapiens
aaaaaagaagaagaa

SEQ ID NO: 250288 - DNA, 15 bp, Homo sapiens
aaaaaaagaagaaga

SEQ ID NO: 250289 - DNA, 15 bp, Homo sapiens
aaaaaaaagaagaag

SEQ ID NO: 250290 - DNA, 15 bp, Homo sapiens
aaaaaaaaagaagaa

SEQ ID NO: 250291 - DNA, 15 bp, Homo sapiens
aaaaaaaaaagaaga

SEQ ID NO: 250292 - DNA, 15 bp, Homo sapiens
gaaaaaaaaaaagaa

SEQ ID NO: 250293 - DNA, 15 bp, Homo sapiens
agaaaaaaaaaaaga

SEQ ID NO: 250294 - DNA, 15 bp, Homo sapiens
tagaaaaaaaaaaag

SEQ ID NO: 250295 - DNA, 15 bp, Homo sapiens
ttagaaaaaaaaaaa

SEQ ID NO: 250296 - DNA, 15 bp, Homo sapiens
cttagaaaaaaaaaa

SEQ ID NO: 250297 - DNA, 15 bp, Homo sapiens
tcttagaaaaaaaaa

SEQ ID NO: 250298 - DNA, 15 bp, Homo sapiens
ctcttagaaaaaaaa

SEQ ID NO: 250299 - DNA, 15 bp, Homo sapiens
tctcttagaaaaaaa

SEQ ID NO: 250300 - DNA, 15 bp, Homo sapiens
gtctcttagaaaaaa

SEQ ID NO: 250301 - DNA, 15 bp, Homo sapiens
tgtctcttagaaaaa

SEQ ID NO: 250302 - DNA, 15 bp, Homo sapiens
ctgtctcttagaaaa

SEQ ID NO: 250303 - DNA, 15 bp, Homo sapiens
cctgtctcttagaaa

SEQ ID NO: 250304 - DNA, 15 bp, Homo sapiens
tcctgtctcttagaa

SEQ ID NO: 250305 - DNA, 15 bp, Homo sapiens
atcctgtctcttaga

SEQ ID NO: 250306 - DNA, 15 bp, Homo sapiens
gatcctgtctcttag

SEQ ID NO: 250307 - DNA, 15 bp, Homo sapiens
agatcctgtctctta

SEQ ID NO: 250308 - DNA, 15 bp, Homo sapiens
gagatcctgtctctt

SEQ ID NO: 250309 - DNA, 15 bp, Homo sapiens
tgagatcctgtctct

SEQ ID NO: 250310 - DNA, 15 bp, Homo sapiens
gtgagatcctgtctc

SEQ ID NO: 250311 - DNA, 15 bp, Homo sapiens
agtgagatcctgtct

SEQ ID NO: 250312 - DNA, 15 bp, Homo sapiens
gagtgagatcctgtc

SEQ ID NO: 250313 - DNA, 15 bp, Homo sapiens
agagtgagatcctgt

SEQ ID NO: 250314 - DNA, 15 bp, Homo sapiens
cagagtgagatcctg

SEQ ID NO: 250315 - DNA, 15 bp, Homo sapiens
acagagtgagatcct

SEQ ID NO: 250316 - DNA, 15 bp, Homo sapiens
gacagagtgagatcc

SEQ ID NO: 250317 - DNA, 15 bp, Homo sapiens
ggacagagtgagatc

SEQ ID NO: 250318 - DNA, 15 bp, Homo sapiens
gggacagagtgagat

SEQ ID NO: 250319 - DNA, 15 bp, Homo sapiens
ggggacagagtgaga

SEQ ID NO: 250320 - DNA, 15 bp, Homo sapiens
tggggacagagtgag

SEQ ID NO: 250321 - DNA, 15 bp, Homo sapiens
ctggggacagagtga

SEQ ID NO: 250322 - DNA, 15 bp, Homo sapiens
cctggggacagagtg

SEQ ID NO: 250323 - DNA, 15 bp, Homo sapiens
gcctggggacagagt

SEQ ID NO: 250324 - DNA, 15 bp, Homo sapiens
tgcctggggacagag

SEQ ID NO: 250325 - DNA, 15 bp, Homo sapiens
ctgcctggggacaga

SEQ ID NO: 250326 - DNA, 15 bp, Homo sapiens
cctgcctggggacag

SEQ ID NO: 250327 - DNA, 15 bp, Homo sapiens
tcctgcctggggaca

SEQ ID NO: 250328 - DNA, 15 bp, Homo sapiens
ctcctgcctggggac

SEQ ID NO: 250329 - DNA, 15 bp, Homo sapiens
actcctgcctgggga

SEQ ID NO: 250330 - DNA, 15 bp, Homo sapiens
cactcctgcctgggg

SEQ ID NO: 250331 - DNA, 15 bp, Homo sapiens
gcactcctgcctggg

SEQ ID NO: 250332 - DNA, 15 bp, Homo sapiens
tgcactcctgcctgg

SEQ ID NO: 250333 - DNA, 15 bp, Homo sapiens
ctgcactcctgcctg

SEQ ID NO: 250334 - DNA, 15 bp, Homo sapiens
actgcactcctgcct

SEQ ID NO: 250335 - DNA, 15 bp, Homo sapiens
cactgcactcctgcc

SEQ ID NO: 250336 - DNA, 15 bp, Homo sapiens
gcactgcactcctgc

SEQ ID NO: 250337 - DNA, 15 bp, Homo sapiens
agcactgcactcctg

SEQ ID NO: 250338 - DNA, 15 bp, Homo sapiens
cagcactgcactcct

SEQ ID NO: 250339 - DNA, 15 bp, Homo sapiens
acagcactgcactcc

SEQ ID NO: 250340 - DNA, 15 bp, Homo sapiens
cacagcactgcactc

SEQ ID NO: 250341 - DNA, 15 bp, Homo sapiens
tcacagcactgcact

SEQ ID NO: 250342 - DNA, 15 bp, Homo sapiens
atcacagcactgcac

SEQ ID NO: 250343 - DNA, 15 bp, Homo sapiens
gatcacagcactgca

SEQ ID NO: 250344 - DNA, 15 bp, Homo sapiens
tgatcacagcactgc

SEQ ID NO: 250345 - DNA, 15 bp, Homo sapiens
atgatcacagcactg

SEQ ID NO: 250346 - DNA, 15 bp, Homo sapiens
tatgatcacagcact

SEQ ID NO: 250347 - DNA, 15 bp, Homo sapiens
ctatgatcacagcac

SEQ ID NO: 250348 - DNA, 15 bp, Homo sapiens
gctatgatcacagca

SEQ ID NO: 250349 - DNA, 15 bp, Homo sapiens
agctatgatcacagc

SEQ ID NO: 250350 - DNA, 15 bp, Homo sapiens
gagctatgatcacag

SEQ ID NO: 250351 - DNA, 15 bp, Homo sapiens
gcagtgagctatgat

SEQ ID NO: 250352 - DNA, 15 bp, Homo sapiens
tgcagtgagctatga

SEQ ID NO: 250353 - DNA, 15 bp, Homo sapiens
ctgcagtgagctatg

SEQ ID NO: 250354 - DNA, 15 bp, Homo sapiens
aaggctgcagtgagc

SEQ ID NO: 250355 - DNA, 15 bp, Homo sapiens
taaggctgcagtgag

SEQ ID NO: 250356 - DNA, 15 bp, Homo sapiens
ttaaggctgcagtga

SEQ ID NO: 250357 - DNA, 15 bp, Homo sapiens
gttaaggctgcagtg

SEQ ID NO: 250358 - DNA, 15 bp, Homo sapiens
ggttaaggctgcagt

SEQ ID NO: 250359 - DNA, 15 bp, Homo sapiens
aggttaaggctgcag

SEQ ID NO: 250360 - DNA, 15 bp, Homo sapiens
gaggttaaggctgca

SEQ ID NO: 250361 - DNA, 15 bp, Homo sapiens
ggaggttaaggctgc

SEQ ID NO: 250362 - DNA, 15 bp, Homo sapiens
aggaggttaaggctg

SEQ ID NO: 250363 - DNA, 15 bp, Homo sapiens
caggaggttaaggct

SEQ ID NO: 250364 - DNA, 15 bp, Homo sapiens
ccaggaggttaaggc

SEQ ID NO: 250365 - DNA, 15 bp, Homo sapiens
cccaggaggttaagg

SEQ ID NO: 250366 - DNA, 15 bp, Homo sapiens
gcccaggaggttaag

SEQ ID NO: 250367 - DNA, 15 bp, Homo sapiens
agcccaggaggttaa

SEQ ID NO: 250368 - DNA, 15 bp, Homo sapiens
gagcccaggaggtta

SEQ ID NO: 250369 - DNA, 15 bp, Homo sapiens
tgagcccaggaggtt

SEQ ID NO: 250370 - DNA, 15 bp, Homo sapiens
agatcacttgagccc

SEQ ID NO: 250371 - DNA, 15 bp, Homo sapiens
aagatcacttgagcc

SEQ ID NO: 250372 - DNA, 15 bp, Homo sapiens
gaagatcacttgagc

SEQ ID NO: 250373 - DNA, 15 bp, Homo sapiens
ggaagatcacttgag

SEQ ID NO: 250374 - DNA, 15 bp, Homo sapiens
gggaagatcacttga

SEQ ID NO: 250375 - DNA, 15 bp, Homo sapiens
tgggaagatcacttg

SEQ ID NO: 250376 - DNA, 15 bp, Homo sapiens
gtgggaagatcactt

SEQ ID NO: 250377 - DNA, 15 bp, Homo sapiens
ggtgggaagatcact

SEQ ID NO: 250378 - DNA, 15 bp, Homo sapiens
aggtgggaagatcac

SEQ ID NO: 250379 - DNA, 15 bp, Homo sapiens
gaggtgggaagatca

SEQ ID NO: 250380 - DNA, 15 bp, Homo sapiens
tgaggtgggaagatc

SEQ ID NO: 250381 - DNA, 15 bp, Homo sapiens
ctgaggtgggaagat

SEQ ID NO: 250382 - DNA, 15 bp, Homo sapiens
gctgaggtgggaaga

SEQ ID NO: 250383 - DNA, 15 bp, Homo sapiens
ggctgaggtgggaag

SEQ ID NO: 250384 - DNA, 15 bp, Homo sapiens
aggctgaggtgggaa

SEQ ID NO: 250385 - DNA, 15 bp, Homo sapiens
gcacctgtagttcca

SEQ ID NO: 250386 - DNA, 15 bp, Homo sapiens
tgcacctgtagttcc

SEQ ID NO: 250387 - DNA, 15 bp, Homo sapiens
gtgcacctgtagttc

SEQ ID NO: 250388 - DNA, 15 bp, Homo sapiens
tgtgcacctgtagtt

SEQ ID NO: 250389 - DNA, 15 bp, Homo sapiens
gtgtgcacctgtagt

SEQ ID NO: 250390 - DNA, 15 bp, Homo sapiens
ggtgtgcacctgtag

SEQ ID NO: 250391 - DNA, 15 bp, Homo sapiens
tggtgtgcacctgta

SEQ ID NO: 250392 - DNA, 15 bp, Homo sapiens
gtggtgtgcacctgt

SEQ ID NO: 250393 - DNA, 15 bp, Homo sapiens
ggtggtgtgcacctg

SEQ ID NO: 250394 - DNA, 15 bp, Homo sapiens
tggtggtgtgcacct

SEQ ID NO: 250395 - DNA, 15 bp, Homo sapiens
atggtggtgtgcacc

SEQ ID NO: 250396 - DNA, 15 bp, Homo sapiens
catggtggtgtgcac

SEQ ID NO: 250397 - DNA, 15 bp, Homo sapiens
gcatggtggtgtgca

SEQ ID NO: 250398 - DNA, 15 bp, Homo sapiens
ggcatggtggtgtgc

SEQ ID NO: 250399 - DNA, 15 bp, Homo sapiens
gggcatggtggtgtg

SEQ ID NO: 250400 - DNA, 15 bp, Homo sapiens
tgggcatggtggtgt

SEQ ID NO: 250401 - DNA, 15 bp, Homo sapiens
ctgggcatggtggtg

SEQ ID NO: 250402 - DNA, 15 bp, Homo sapiens
gctgggcatggtggt

SEQ ID NO: 250403 - DNA, 15 bp, Homo sapiens
gagctgggcatggtg

SEQ ID NO: 250404 - DNA, 15 bp, Homo sapiens
tgagctgggcatggt

SEQ ID NO: 250405 - DNA, 15 bp, Homo sapiens
atgagctgggcatgg

SEQ ID NO: 250406 - DNA, 15 bp, Homo sapiens
aatgagctgggcatg

SEQ ID NO: 250407 - DNA, 15 bp, Homo sapiens
aaatgagctgggcat

SEQ ID NO: 250408 - DNA, 15 bp, Homo sapiens
aaaatgagctgggca

SEQ ID NO: 250409 - DNA, 15 bp, Homo sapiens
aaaaatgagctgggc

SEQ ID NO: 250410 - DNA, 15 bp, Homo sapiens
caaaaatgagctggg

SEQ ID NO: 250411 - DNA, 15 bp, Homo sapiens
acaaaaatgagctgg

SEQ ID NO: 250412 - DNA, 15 bp, Homo sapiens
tacaaaaatgagctg

SEQ ID NO: 250413 - DNA, 15 bp, Homo sapiens
atacaaaaatgagct

SEQ ID NO: 250414 - DNA, 15 bp, Homo sapiens
aatacaaaaatgagc

SEQ ID NO: 250415 - DNA, 15 bp, Homo sapiens
aaatacaaaaatgag

SEQ ID NO: 250416 - DNA, 15 bp, Homo sapiens
aaaatacaaaaatga

SEQ ID NO: 250417 - DNA, 15 bp, Homo sapiens
aaaaatacaaaaatg

SEQ ID NO: 250418 - DNA, 15 bp, Homo sapiens
actgtctcaaaaaaa

SEQ ID NO: 250419 - DNA, 15 bp, Homo sapiens
gactgtctcaaaaaa

SEQ ID NO: 250420 - DNA, 15 bp, Homo sapiens
agactgtctcaaaaa

SEQ ID NO: 250421 - DNA, 15 bp, Homo sapiens
acgagactgtctcaa

SEQ ID NO: 250422 - DNA, 15 bp, Homo sapiens
aacgagactgtctca

SEQ ID NO: 250423 - DNA, 15 bp, Homo sapiens
gaacgagactgtctc

SEQ ID NO: 250424 - DNA, 15 bp, Homo sapiens
agaacgagactgtct

SEQ ID NO: 250425 - DNA, 15 bp, Homo sapiens
cagaacgagactgtc

SEQ ID NO: 250426 - DNA, 15 bp, Homo sapiens
acagaacgagactgt

SEQ ID NO: 250427 - DNA, 15 bp, Homo sapiens
gacagaacgagactg

SEQ ID NO: 250428 - DNA, 15 bp, Homo sapiens
tgacagaacgagact

SEQ ID NO: 250429 - DNA, 15 bp, Homo sapiens
gtgacagaacgagac

SEQ ID NO: 250430 - DNA, 15 bp, Homo sapiens
ggtgacagaacgaga

SEQ ID NO: 250431 - DNA, 15 bp, Homo sapiens
gggtgacagaacgag

SEQ ID NO: 250432 - DNA, 15 bp, Homo sapiens
ggggtgacagaacga

SEQ ID NO: 250433 - DNA, 15 bp, Homo sapiens
cggggtgacagaacg

SEQ ID NO: 250434 - DNA, 15 bp, Homo sapiens
ccggggtgacagaac

SEQ ID NO: 250435 - DNA, 15 bp, Homo sapiens
gccggggtgacagaa

SEQ ID NO: 250436 - DNA, 15 bp, Homo sapiens
agccggggtgacaga

SEQ ID NO: 250437 - DNA, 15 bp, Homo sapiens
cagccggggtgacag

SEQ ID NO: 250438 - DNA, 15 bp, Homo sapiens
ccagccggggtgaca

SEQ ID NO: 250439 - DNA, 15 bp, Homo sapiens
tccagccggggtgac

SEQ ID NO: 250440 - DNA, 15 bp, Homo sapiens
ctccagccggggtga

SEQ ID NO: 250441 - DNA, 15 bp, Homo sapiens
actccagccggggtg

SEQ ID NO: 250442 - DNA, 15 bp, Homo sapiens
cactccagccggggt

SEQ ID NO: 250443 - DNA, 15 bp, Homo sapiens
gcactccagccgggg

SEQ ID NO: 250444 - DNA, 15 bp, Homo sapiens
tgcactccagccggg

SEQ ID NO: 250445 - DNA, 15 bp, Homo sapiens
ctgcactccagccgg

SEQ ID NO: 250446 - DNA, 15 bp, Homo sapiens
actgcactccagccg

SEQ ID NO: 250447 - DNA, 15 bp, Homo sapiens
attgtaccactgcac

SEQ ID NO: 250448 - DNA, 15 bp, Homo sapiens
gattgtaccactgca

SEQ ID NO: 250449 - DNA, 15 bp, Homo sapiens
agattgtaccactgc

SEQ ID NO: 250450 - DNA, 15 bp, Homo sapiens
aagattgtaccactg

SEQ ID NO: 250451 - DNA, 15 bp, Homo sapiens
caagattgtaccact

SEQ ID NO: 250452 - DNA, 15 bp, Homo sapiens
ccaagattgtaccac

SEQ ID NO: 250453 - DNA, 15 bp, Homo sapiens
gccaagattgtacca

SEQ ID NO: 250454 - DNA, 15 bp, Homo sapiens
agccaagattgtacc

SEQ ID NO: 250455 - DNA, 15 bp, Homo sapiens
gagccaagattgtac

SEQ ID NO: 250456 - DNA, 15 bp, Homo sapiens
tgagccaagattgta

SEQ ID NO: 250457 - DNA, 15 bp, Homo sapiens
actactcaggaggct

SEQ ID NO: 250458 - DNA, 15 bp, Homo sapiens
aactactcaggaggc

SEQ ID NO: 250459 - DNA, 15 bp, Homo sapiens
caactactcaggagg

SEQ ID NO: 250460 - DNA, 15 bp, Homo sapiens
tcaactactcaggag

SEQ ID NO: 250461 - DNA, 15 bp, Homo sapiens
ctcaactactcagga

SEQ ID NO: 250462 - DNA, 15 bp, Homo sapiens
tctcaactactcagg

SEQ ID NO: 250463 - DNA, 15 bp, Homo sapiens
atctcaactactcag

SEQ ID NO: 250464 - DNA, 15 bp, Homo sapiens
aatctcaactactca

SEQ ID NO: 250465 - DNA, 15 bp, Homo sapiens
taatctcaactactc

SEQ ID NO: 250466 - DNA, 15 bp, Homo sapiens
gtaatctcaactact

SEQ ID NO: 250467 - DNA, 15 bp, Homo sapiens
tgtaatctcaactac

SEQ ID NO: 250468 - DNA, 15 bp, Homo sapiens
ctgtaatctcaacta

SEQ ID NO: 250469 - DNA, 15 bp, Homo sapiens
cctgtaatctcaact

SEQ ID NO: 250470 - DNA, 15 bp, Homo sapiens
gcctgtaatctcaac

SEQ ID NO: 250471 - DNA, 15 bp, Homo sapiens
tgcctgtaatctcaa

SEQ ID NO: 250472 - DNA, 15 bp, Homo sapiens
atgcctgtaatctca

SEQ ID NO: 250473 - DNA, 15 bp, Homo sapiens
catgcctgtaatctc

SEQ ID NO: 250474 - DNA, 15 bp, Homo sapiens
acatgcctgtaatct

SEQ ID NO: 250475 - DNA, 15 bp, Homo sapiens
acacatgcctgtaat

SEQ ID NO: 250476 - DNA, 15 bp, Homo sapiens
cacacatgcctgtaa

SEQ ID NO: 250477 - DNA, 15 bp, Homo sapiens
gcacacatgcctgta

SEQ ID NO: 250478 - DNA, 15 bp, Homo sapiens
ggcacacatgcctgt

SEQ ID NO: 250479 - DNA, 15 bp, Homo sapiens
tggcacacatgcctg

SEQ ID NO: 250480 - DNA, 15 bp, Homo sapiens
atggcacacatgcct

SEQ ID NO: 250481 - DNA, 15 bp, Homo sapiens
gatggcacacatgcc

SEQ ID NO: 250482 - DNA, 15 bp, Homo sapiens
tgatggcacacatgc

SEQ ID NO: 250483 - DNA, 15 bp, Homo sapiens
atgatggcacacatg

SEQ ID NO: 250484 - DNA, 15 bp, Homo sapiens
tatgatggcacacat

SEQ ID NO: 250485 - DNA, 15 bp, Homo sapiens
gtatgatggcacaca

SEQ ID NO: 250486 - DNA, 15 bp, Homo sapiens
ggtatgatggcacac

SEQ ID NO: 250487 - DNA, 15 bp, Homo sapiens
aggtatgatggcaca

SEQ ID NO: 250488 - DNA, 15 bp, Homo sapiens
caggtatgatggcac

SEQ ID NO: 250489 - DNA, 15 bp, Homo sapiens
ccaggtatgatggca

SEQ ID NO: 250490 - DNA, 15 bp, Homo sapiens
gccaggtatgatggc

SEQ ID NO: 250491 - DNA, 15 bp, Homo sapiens
agccaggtatgatgg

SEQ ID NO: 250492 - DNA, 15 bp, Homo sapiens
cagccaggtatgatg

SEQ ID NO: 250493 - DNA, 15 bp, Homo sapiens
tcagccaggtatgat

SEQ ID NO: 250494 - DNA, 15 bp, Homo sapiens
atcagccaggtatga

SEQ ID NO: 250495 - DNA, 15 bp, Homo sapiens
aatcagccaggtatg

SEQ ID NO: 250496 - DNA, 15 bp, Homo sapiens
aaatcagccaggtat

SEQ ID NO: 250497 - DNA, 15 bp, Homo sapiens
aaaatcagccaggta

SEQ ID NO: 250498 - DNA, 15 bp, Homo sapiens
aaaaatcagccaggt

SEQ ID NO: 250499 - DNA, 15 bp, Homo sapiens
caaaaatcagccagg

SEQ ID NO: 250500 - DNA, 15 bp, Homo sapiens
acaaaaatcagccag

SEQ ID NO: 250501 - DNA, 15 bp, Homo sapiens
tacaaaaatcagcca

SEQ ID NO: 250502 - DNA, 15 bp, Homo sapiens
tctaaaaaaaaatac

SEQ ID NO: 250503 - DNA, 15 bp, Homo sapiens
ctctaaaaaaaaata

SEQ ID NO: 250504 - DNA, 15 bp, Homo sapiens
tctctaaaaaaaaat

SEQ ID NO: 250505 - DNA, 15 bp, Homo sapiens
atctctaaaaaaaaa

SEQ ID NO: 250506 - DNA, 15 bp, Homo sapiens
catctctaaaaaaaa

SEQ ID NO: 250507 - DNA, 15 bp, Homo sapiens
ccatctctaaaaaaa

SEQ ID NO: 250508 - DNA, 15 bp, Homo sapiens
cccatctctaaaaaa

SEQ ID NO: 250509 - DNA, 15 bp, Homo sapiens
ccccatctctaaaaa

SEQ ID NO: 250510 - DNA, 15 bp, Homo sapiens
accccatctctaaaa

SEQ ID NO: 250511 - DNA, 15 bp, Homo sapiens
gaccccatctctaaa

SEQ ID NO: 250512 - DNA, 15 bp, Homo sapiens
agaccccatctctaa

SEQ ID NO: 250513 - DNA, 15 bp, Homo sapiens
gagaccccatctcta

SEQ ID NO: 250514 - DNA, 15 bp, Homo sapiens
tgagaccccatctct

SEQ ID NO: 250515 - DNA, 15 bp, Homo sapiens
ctgagaccccatctc

SEQ ID NO: 250516 - DNA, 15 bp, Homo sapiens
actgagaccccatct

SEQ ID NO: 250517 - DNA, 15 bp, Homo sapiens
tactgagaccccatc

SEQ ID NO: 250518 - DNA, 15 bp, Homo sapiens
atactgagaccccat

SEQ ID NO: 250519 - DNA, 15 bp, Homo sapiens
catactgagacccca

SEQ ID NO: 250520 - DNA, 15 bp, Homo sapiens
acatactgagacccc

SEQ ID NO: 250521 - DNA, 15 bp, Homo sapiens
aacatactgagaccc

SEQ ID NO: 250522 - DNA, 15 bp, Homo sapiens
caacatactgagacc

SEQ ID NO: 250523 - DNA, 15 bp, Homo sapiens
tcaacatactgagac

SEQ ID NO: 250524 - DNA, 15 bp, Homo sapiens
gtcaacatactgaga

SEQ ID NO: 250525 - DNA, 15 bp, Homo sapiens
ggtcaacatactgag

SEQ ID NO: 250526 - DNA, 15 bp, Homo sapiens
tggtcaacatactga

SEQ ID NO: 250527 - DNA, 15 bp, Homo sapiens
ctggtcaacatactg

SEQ ID NO: 250528 - DNA, 15 bp, Homo sapiens
cctggtcaacatact

SEQ ID NO: 250529 - DNA, 15 bp, Homo sapiens
gcctggtcaacatac

SEQ ID NO: 250530 - DNA, 15 bp, Homo sapiens
agcctggtcaacata

SEQ ID NO: 250531 - DNA, 15 bp, Homo sapiens
aagcctggtcaacat

SEQ ID NO: 250532 - DNA, 15 bp, Homo sapiens
caagcctggtcaaca

SEQ ID NO: 250533 - DNA, 15 bp, Homo sapiens
acaagcctggtcaac

SEQ ID NO: 250534 - DNA, 15 bp, Homo sapiens
gacaagcctggtcaa

SEQ ID NO: 250535 - DNA, 15 bp, Homo sapiens
agacaagcctggtca

SEQ ID NO: 250536 - DNA, 15 bp, Homo sapiens
aagacaagcctggtc

SEQ ID NO: 250537 - DNA, 15 bp, Homo sapiens
taagacaagcctggt

SEQ ID NO: 250538 - DNA, 15 bp, Homo sapiens
ttaagacaagcctgg

SEQ ID NO: 250539 - DNA, 15 bp, Homo sapiens
tttaagacaagcctg

SEQ ID NO: 250540 - DNA, 15 bp, Homo sapiens
gtttaagacaagcct

SEQ ID NO: 250541 - DNA, 15 bp, Homo sapiens
agtttaagacaagcc

SEQ ID NO: 250542 - DNA, 15 bp, Homo sapiens
gagtttaagacaagc

SEQ ID NO: 250543 - DNA, 15 bp, Homo sapiens
ggagtttaagacaag

SEQ ID NO: 250544 - DNA, 15 bp, Homo sapiens
gggagtttaagacaa

SEQ ID NO: 250545 - DNA, 15 bp, Homo sapiens
cgggagtttaagaca

SEQ ID NO: 250546 - DNA, 15 bp, Homo sapiens
ccgggagtttaagac

SEQ ID NO: 250547 - DNA, 15 bp, Homo sapiens
gccgggagtttaaga

SEQ ID NO: 250548 - DNA, 15 bp, Homo sapiens
ggccgggagtttaag

SEQ ID NO: 250549 - DNA, 15 bp, Homo sapiens
aggccgggagtttaa

SEQ ID NO: 250550 - DNA, 15 bp, Homo sapiens
gaggccgggagttta

SEQ ID NO: 250551 - DNA, 15 bp, Homo sapiens
tgaggccgggagttt

SEQ ID NO: 250552 - DNA, 15 bp, Homo sapiens
ttgaggccgggagtt

SEQ ID NO: 250553 - DNA, 15 bp, Homo sapiens
cttgaggccgggagt

SEQ ID NO: 250554 - DNA, 15 bp, Homo sapiens
acttgaggccgggag

SEQ ID NO: 250555 - DNA, 15 bp, Homo sapiens
cacttgaggccggga

SEQ ID NO: 250556 - DNA, 15 bp, Homo sapiens
tcacttgaggccggg

SEQ ID NO: 250557 - DNA, 15 bp, Homo sapiens
atcacttgaggccgg

SEQ ID NO: 250558 - DNA, 15 bp, Homo sapiens
gatcacttgaggccg

SEQ ID NO: 250559 - DNA, 15 bp, Homo sapiens
ggatcacttgaggcc

SEQ ID NO: 250560 - DNA, 15 bp, Homo sapiens
agtgggaggatcact

SEQ ID NO: 250561 - DNA, 15 bp, Homo sapiens
aagtgggaggatcac

SEQ ID NO: 250562 - DNA, 15 bp, Homo sapiens
gaagtgggaggatca

SEQ ID NO: 250563 - DNA, 15 bp, Homo sapiens
tgaagtgggaggatc

SEQ ID NO: 250564 - DNA, 15 bp, Homo sapiens
ctgaagtgggaggat

SEQ ID NO: 250565 - DNA, 15 bp, Homo sapiens
actgaagtgggagga

SEQ ID NO: 250566 - DNA, 15 bp, Homo sapiens
gactgaagtgggagg

SEQ ID NO: 250567 - DNA, 15 bp, Homo sapiens
agactgaagtgggag

SEQ ID NO: 250568 - DNA, 15 bp, Homo sapiens
gagactgaagtggga

SEQ ID NO: 250569 - DNA, 15 bp, Homo sapiens
ggagactgaagtggg

SEQ ID NO: 250570 - DNA, 15 bp, Homo sapiens
gggagactgaagtgg

SEQ ID NO: 250571 - DNA, 15 bp, Homo sapiens
tgggagactgaagtg

SEQ ID NO: 250572 - DNA, 15 bp, Homo sapiens
ttgggagactgaagt

SEQ ID NO: 250573 - DNA, 15 bp, Homo sapiens
tttgggagactgaag

SEQ ID NO: 250574 - DNA, 15 bp, Homo sapiens
ctttgggagactgaa

SEQ ID NO: 250575 - DNA, 15 bp, Homo sapiens
actttgggagactga

SEQ ID NO: 250576 - DNA, 15 bp, Homo sapiens
cactttgggagactg

SEQ ID NO: 250577 - DNA, 15 bp, Homo sapiens
gcactttgggagact

SEQ ID NO: 250578 - DNA, 15 bp, Homo sapiens
ccgcagtggctcatg

SEQ ID NO: 250579 - DNA, 15 bp, Homo sapiens
gccgcagtggctcat

SEQ ID NO: 250580 - DNA, 15 bp, Homo sapiens
ggccgcagtggctca

SEQ ID NO: 250581 - DNA, 15 bp, Homo sapiens
cggccgcagtggctc

SEQ ID NO: 250582 - DNA, 15 bp, Homo sapiens
ccggccgcagtggct

SEQ ID NO: 250583 - DNA, 15 bp, Homo sapiens
accggccgcagtggc

SEQ ID NO: 250584 - DNA, 15 bp, Homo sapiens
aaccggccgcagtgg

SEQ ID NO: 250585 - DNA, 15 bp, Homo sapiens
aaaccggccgcagtg

SEQ ID NO: 250586 - DNA, 15 bp, Homo sapiens
caaaccggccgcagt

SEQ ID NO: 250587 - DNA, 15 bp, Homo sapiens
acaaaccggccgcag

SEQ ID NO: 250588 - DNA, 15 bp, Homo sapiens
aacaaaccggccgca

SEQ ID NO: 250589 - DNA, 15 bp, Homo sapiens
aaacaaaccggccgc

SEQ ID NO: 250590 - DNA, 15 bp, Homo sapiens
aaaacaaaccggccg

SEQ ID NO: 250591 - DNA, 15 bp, Homo sapiens
gaaaacaaaccggcc

SEQ ID NO: 250592 - DNA, 15 bp, Homo sapiens
agaaaacaaaccggc

SEQ ID NO: 250593 - DNA, 15 bp, Homo sapiens
aagaaaacaaaccgg

SEQ ID NO: 250594 - DNA, 15 bp, Homo sapiens
aaagaaaacaaaccg

SEQ ID NO: 250595 - DNA, 15 bp, Homo sapiens
aaaagaaaacaaacc

SEQ ID NO: 250596 - DNA, 15 bp, Homo sapiens
aaaaagaaaacaaac

SEQ ID NO: 250597 - DNA, 15 bp, Homo sapiens
aaaaaagaaaacaaa

SEQ ID NO: 250598 - DNA, 15 bp, Homo sapiens
aaaaaaagaaaacaa

SEQ ID NO: 250599 - DNA, 15 bp, Homo sapiens
aaaaaaaagaaaaca

SEQ ID NO: 250600 - DNA, 15 bp, Homo sapiens
aaaaaaaaagaaaac

SEQ ID NO: 250601 - DNA, 15 bp, Homo sapiens
gaaaaaaaaaagaaa

SEQ ID NO: 250602 - DNA, 15 bp, Homo sapiens
cgaaaaaaaaaagaa

SEQ ID NO: 250603 - DNA, 15 bp, Homo sapiens
acgaaaaaaaaaaga

SEQ ID NO: 250604 - DNA, 15 bp, Homo sapiens
aacgaaaaaaaaaag

SEQ ID NO: 250605 - DNA, 15 bp, Homo sapiens
aaacgaaaaaaaaaa

SEQ ID NO: 250606 - DNA, 15 bp, Homo sapiens
aaaacgaaaaaaaaa

SEQ ID NO: 250607 - DNA, 15 bp, Homo sapiens
aaaaacgaaaaaaaa

SEQ ID NO: 250608 - DNA, 15 bp, Homo sapiens
aaaaaacgaaaaaaa

SEQ ID NO: 250609 - DNA, 15 bp, Homo sapiens
caaaaaacgaaaaaa

SEQ ID NO: 250610 - DNA, 15 bp, Homo sapiens
ccaaaaaacgaaaaa

SEQ ID NO: 250611 - DNA, 15 bp, Homo sapiens
tccaaaaaacgaaaa

SEQ ID NO: 250612 - DNA, 15 bp, Homo sapiens
ctccaaaaaacgaaa

SEQ ID NO: 250613 - DNA, 15 bp, Homo sapiens
tctccaaaaaacgaa

SEQ ID NO: 250614 - DNA, 15 bp, Homo sapiens
gtctccaaaaaacga

SEQ ID NO: 250615 - DNA, 15 bp, Homo sapiens
cgtctccaaaaaacg

SEQ ID NO: 250616 - DNA, 15 bp, Homo sapiens
ccgtctccaaaaaac

SEQ ID NO: 250617 - DNA, 15 bp, Homo sapiens
tccgtctccaaaaaa

SEQ ID NO: 250618 - DNA, 15 bp, Homo sapiens
ttccgtctccaaaaa

SEQ ID NO: 250619 - DNA, 15 bp, Homo sapiens
attccgtctccaaaa

SEQ ID NO: 250620 - DNA, 15 bp, Homo sapiens
aattccgtctccaaa

SEQ ID NO: 250621 - DNA, 15 bp, Homo sapiens
aaattccgtctccaa

SEQ ID NO: 250622 - DNA, 15 bp, Homo sapiens
gaaattccgtctcca

SEQ ID NO: 250623 - DNA, 15 bp, Homo sapiens
tgaaattccgtctcc

SEQ ID NO: 250624 - DNA, 15 bp, Homo sapiens
gtgaaattccgtctc

SEQ ID NO: 250625 - DNA, 15 bp, Homo sapiens
ggtgaaattccgtct

SEQ ID NO: 250626 - DNA, 15 bp, Homo sapiens
aggtgaaattccgtc

SEQ ID NO: 250627 - DNA, 15 bp, Homo sapiens
aaggtgaaattccgt

SEQ ID NO: 250628 - DNA, 15 bp, Homo sapiens
aaaggtgaaattccg

SEQ ID NO: 250629 - DNA, 15 bp, Homo sapiens
caaaggtgaaattcc

SEQ ID NO: 250630 - DNA, 15 bp, Homo sapiens
acaaaggtgaaattc

SEQ ID NO: 250631 - DNA, 15 bp, Homo sapiens
aacaaaggtgaaatt

SEQ ID NO: 250632 - DNA, 15 bp, Homo sapiens
caacaaaggtgaaat

SEQ ID NO: 250633 - DNA, 15 bp, Homo sapiens
gcaacaaaggtgaaa

SEQ ID NO: 250634 - DNA, 15 bp, Homo sapiens
ggcaacaaaggtgaa

SEQ ID NO: 250635 - DNA, 15 bp, Homo sapiens
gggcaacaaaggtga

SEQ ID NO: 250636 - DNA, 15 bp, Homo sapiens
tgggcaacaaaggtg

SEQ ID NO: 250637 - DNA, 15 bp, Homo sapiens
ctgggcaacaaaggt

SEQ ID NO: 250638 - DNA, 15 bp, Homo sapiens
cctgggcaacaaagg

SEQ ID NO: 250639 - DNA, 15 bp, Homo sapiens
tcctgggcaacaaag

SEQ ID NO: 250640 - DNA, 15 bp, Homo sapiens
atcctgggcaacaaa

SEQ ID NO: 250641 - DNA, 15 bp, Homo sapiens
catcctgggcaacaa

SEQ ID NO: 250642 - DNA, 15 bp, Homo sapiens
ccatcctgggcaaca

SEQ ID NO: 250643 - DNA, 15 bp, Homo sapiens
tccatcctgggcaac

SEQ ID NO: 250644 - DNA, 15 bp, Homo sapiens
ctccatcctgggcaa

SEQ ID NO: 250645 - DNA, 15 bp, Homo sapiens
actccatcctgggca

SEQ ID NO: 250646 - DNA, 15 bp, Homo sapiens
ttgcactccatcctg

SEQ ID NO: 250647 - DNA, 15 bp, Homo sapiens
attgcactccatcct

SEQ ID NO: 250648 - DNA, 15 bp, Homo sapiens
cattgcactccatcc

SEQ ID NO: 250649 - DNA, 15 bp, Homo sapiens
ccattgcactccatc

SEQ ID NO: 250650 - DNA, 15 bp, Homo sapiens
gccattgcactccat

SEQ ID NO: 250651 - DNA, 15 bp, Homo sapiens
cgtgccattgcactc

SEQ ID NO: 250652 - DNA, 15 bp, Homo sapiens
tcgtgccattgcact

SEQ ID NO: 250653 - DNA, 15 bp, Homo sapiens
atcgtgccattgcac

SEQ ID NO: 250654 - DNA, 15 bp, Homo sapiens
tatcgtgccattgca

SEQ ID NO: 250655 - DNA, 15 bp, Homo sapiens
atatcgtgccattgc

SEQ ID NO: 250656 - DNA, 15 bp, Homo sapiens
gatatcgtgccattg

SEQ ID NO: 250657 - DNA, 15 bp, Homo sapiens
cgatatcgtgccatt

SEQ ID NO: 250658 - DNA, 15 bp, Homo sapiens
gcgatatcgtgccat

SEQ ID NO: 250659 - DNA, 15 bp, Homo sapiens
ggcgatatcgtgcca

SEQ ID NO: 250660 - DNA, 15 bp, Homo sapiens
aggcgatatcgtgcc

SEQ ID NO: 250661 - DNA, 15 bp, Homo sapiens
gaggcgatatcgtgc

SEQ ID NO: 250662 - DNA, 15 bp, Homo sapiens
tgaggcgatatcgtg

SEQ ID NO: 250663 - DNA, 15 bp, Homo sapiens
gtgaggcgatatcgt

SEQ ID NO: 250664 - DNA, 15 bp, Homo sapiens
ggtgaggcgatatcg

SEQ ID NO: 250665 - DNA, 15 bp, Homo sapiens
tggtgaggcgatatc

SEQ ID NO: 250666 - DNA, 15 bp, Homo sapiens
gtggtgaggcgatat

SEQ ID NO: 250667 - DNA, 15 bp, Homo sapiens
tgtggtgaggcgata

SEQ ID NO: 250668 - DNA, 15 bp, Homo sapiens
ttgtggtgaggcgat

SEQ ID NO: 250669 - DNA, 15 bp, Homo sapiens
gttgtggtgaggcga

SEQ ID NO: 250670 - DNA, 15 bp, Homo sapiens
ggttgtggtgaggcg

SEQ ID NO: 250671 - DNA, 15 bp, Homo sapiens
aggttgtggtgaggc

SEQ ID NO: 250672 - DNA, 15 bp, Homo sapiens
gaggttgtggtgagg

SEQ ID NO: 250673 - DNA, 15 bp, Homo sapiens
agaggttgtggtgag

SEQ ID NO: 250674 - DNA, 15 bp, Homo sapiens
cagaggttgtggtga

SEQ ID NO: 250675 - DNA, 15 bp, Homo sapiens
gcagaggttgtggtg

SEQ ID NO: 250676 - DNA, 15 bp, Homo sapiens
ggcagaggttgtggt

SEQ ID NO: 250677 - DNA, 15 bp, Homo sapiens
aggcagaggttgtgg

SEQ ID NO: 250678 - DNA, 15 bp, Homo sapiens
gaggcagaggttgtg

SEQ ID NO: 250679 - DNA, 15 bp, Homo sapiens
ggaggcagaggttgt

SEQ ID NO: 250680 - DNA, 15 bp, Homo sapiens
aggaggcagaggttg

SEQ ID NO: 250681 - DNA, 15 bp, Homo sapiens
caggaggcagaggtt

SEQ ID NO: 250682 - DNA, 15 bp, Homo sapiens
ccaggaggcagaggt

SEQ ID NO: 250683 - DNA, 15 bp, Homo sapiens
gtttgaacccaggag

SEQ ID NO: 250684 - DNA, 15 bp, Homo sapiens
ggtttgaacccagga

SEQ ID NO: 250685 - DNA, 15 bp, Homo sapiens
tggtttgaacccagg

SEQ ID NO: 250686 - DNA, 15 bp, Homo sapiens
atggtttgaacccag

SEQ ID NO: 250687 - DNA, 15 bp, Homo sapiens
aatggtttgaaccca

SEQ ID NO: 250688 - DNA, 15 bp, Homo sapiens
aaatggtttgaaccc

SEQ ID NO: 250689 - DNA, 15 bp, Homo sapiens
aaaatggtttgaacc

SEQ ID NO: 250690 - DNA, 15 bp, Homo sapiens
gaaaatggtttgaac

SEQ ID NO: 250691 - DNA, 15 bp, Homo sapiens
ggaaaatggtttgaa

SEQ ID NO: 250692 - DNA, 15 bp, Homo sapiens
aggaaaatggtttga

SEQ ID NO: 250693 - DNA, 15 bp, Homo sapiens
caggaaaatggtttg

SEQ ID NO: 250694 - DNA, 15 bp, Homo sapiens
gcaggaaaatggttt

SEQ ID NO: 250695 - DNA, 15 bp, Homo sapiens
ggcaggaaaatggtt

SEQ ID NO: 250696 - DNA, 15 bp, Homo sapiens
aggcaggaaaatggt

SEQ ID NO: 250697 - DNA, 15 bp, Homo sapiens
gaggcaggaaaatgg

SEQ ID NO: 250698 - DNA, 15 bp, Homo sapiens
tgaggcaggaaaatg

SEQ ID NO: 250699 - DNA, 15 bp, Homo sapiens
agaaggctgaggcag

SEQ ID NO: 250700 - DNA, 15 bp, Homo sapiens
aagaaggctgaggca

SEQ ID NO: 250701 - DNA, 15 bp, Homo sapiens
taagaaggctgaggc

SEQ ID NO: 250702 - DNA, 15 bp, Homo sapiens
ctaagaaggctgagg

SEQ ID NO: 250703 - DNA, 15 bp, Homo sapiens
actaagaaggctgag

SEQ ID NO: 250704 - DNA, 15 bp, Homo sapiens
tactaagaaggctga

SEQ ID NO: 250705 - DNA, 15 bp, Homo sapiens
ctactaagaaggctg

SEQ ID NO: 250706 - DNA, 15 bp, Homo sapiens
gctactaagaaggct

SEQ ID NO: 250707 - DNA, 15 bp, Homo sapiens
agctactaagaaggc

SEQ ID NO: 250708 - DNA, 15 bp, Homo sapiens
cagctactaagaagg

SEQ ID NO: 250709 - DNA, 15 bp, Homo sapiens
ccagctactaagaag

SEQ ID NO: 250710 - DNA, 15 bp, Homo sapiens
cccagctactaagaa

SEQ ID NO: 250711 - DNA, 15 bp, Homo sapiens
tcccagctactaaga

SEQ ID NO: 250712 - DNA, 15 bp, Homo sapiens
atcccagctactaag

SEQ ID NO: 250713 - DNA, 15 bp, Homo sapiens
aatcccagctactaa

SEQ ID NO: 250714 - DNA, 15 bp, Homo sapiens
taatcccagctacta

SEQ ID NO: 250715 - DNA, 15 bp, Homo sapiens
ttgtaatcccagcta

SEQ ID NO: 250716 - DNA, 15 bp, Homo sapiens
cttgtaatcccagct

SEQ ID NO: 250717 - DNA, 15 bp, Homo sapiens
gcttgtaatcccagc

SEQ ID NO: 250718 - DNA, 15 bp, Homo sapiens
tgcttgtaatcccag

SEQ ID NO: 250719 - DNA, 15 bp, Homo sapiens
atgcttgtaatccca

SEQ ID NO: 250720 - DNA, 15 bp, Homo sapiens
catgcttgtaatccc

SEQ ID NO: 250721 - DNA, 15 bp, Homo sapiens
cacatgcttgtaatc

SEQ ID NO: 250722 - DNA, 15 bp, Homo sapiens
gcacatgcttgtaat

SEQ ID NO: 250723 - DNA, 15 bp, Homo sapiens
ggcacatgcttgtaa

SEQ ID NO: 250724 - DNA, 15 bp, Homo sapiens
tggcacatgcttgta

SEQ ID NO: 250725 - DNA, 15 bp, Homo sapiens
gtggcacatgcttgt

SEQ ID NO: 250726 - DNA, 15 bp, Homo sapiens
ggtggcacatgcttg

SEQ ID NO: 250727 - DNA, 15 bp, Homo sapiens
tggtggcacatgctt

SEQ ID NO: 250728 - DNA, 15 bp, Homo sapiens
gtggtggcacatgct

SEQ ID NO: 250729 - DNA, 15 bp, Homo sapiens
cgggcgtggtggcac

SEQ ID NO: 250730 - DNA, 15 bp, Homo sapiens
ccgggcgtggtggca

SEQ ID NO: 250731 - DNA, 15 bp, Homo sapiens
cagccgggcgtggtg

SEQ ID NO: 250732 - DNA, 15 bp, Homo sapiens
caaaatcagccgggc

SEQ ID NO: 250733 - DNA, 15 bp, Homo sapiens
acaaaatcagccggg

SEQ ID NO: 250734 - DNA, 15 bp, Homo sapiens
tacaaaatcagccgg

SEQ ID NO: 250735 - DNA, 15 bp, Homo sapiens
atacaaaatcagccg

SEQ ID NO: 250736 - DNA, 15 bp, Homo sapiens
aatacaaaatcagcc

SEQ ID NO: 250737 - DNA, 15 bp, Homo sapiens
aaatacaaaatcagc

SEQ ID NO: 250738 - DNA, 15 bp, Homo sapiens
aaaatacaaaatcag

SEQ ID NO: 250739 - DNA, 15 bp, Homo sapiens
aaaaatacaaaatca

SEQ ID NO: 250740 - DNA, 15 bp, Homo sapiens
taaaaatacaaaatc

SEQ ID NO: 250741 - DNA, 15 bp, Homo sapiens
atggagaaaccccat

SEQ ID NO: 250742 - DNA, 15 bp, Homo sapiens
catggagaaacccca

SEQ ID NO: 250743 - DNA, 15 bp, Homo sapiens
acatggagaaacccc

SEQ ID NO: 250744 - DNA, 15 bp, Homo sapiens
gacctgaggtcagga

SEQ ID NO: 250745 - DNA, 15 bp, Homo sapiens
tgacctgaggtcagg

SEQ ID NO: 250746 - DNA, 15 bp, Homo sapiens
atgacctgaggtcag

SEQ ID NO: 250747 - DNA, 15 bp, Homo sapiens
aatgacctgaggtca

SEQ ID NO: 250748 - DNA, 15 bp, Homo sapiens
gaatgacctgaggtc

SEQ ID NO: 250749 - DNA, 15 bp, Homo sapiens
cgaatgacctgaggt

SEQ ID NO: 250750 - DNA, 15 bp, Homo sapiens
gcgaatgacctgagg

SEQ ID NO: 250751 - DNA, 15 bp, Homo sapiens
ggcgaatgacctgag

SEQ ID NO: 250752 - DNA, 15 bp, Homo sapiens
gggcgaatgacctga

SEQ ID NO: 250753 - DNA, 15 bp, Homo sapiens
tgggcgaatgacctg

SEQ ID NO: 250754 - DNA, 15 bp, Homo sapiens
gtgggcgaatgacct

SEQ ID NO: 250755 - DNA, 15 bp, Homo sapiens
ggtgggcgaatgacc

SEQ ID NO: 250756 - DNA, 15 bp, Homo sapiens
aggtgggcgaatgac

SEQ ID NO: 250757 - DNA, 15 bp, Homo sapiens
gaggtgggcgaatga

SEQ ID NO: 250758 - DNA, 15 bp, Homo sapiens
agaggtgggcgaatg

SEQ ID NO: 250759 - DNA, 15 bp, Homo sapiens
cagaggtgggcgaat

SEQ ID NO: 250760 - DNA, 15 bp, Homo sapiens
gcagaggtgggcgaa

SEQ ID NO: 250761 - DNA, 15 bp, Homo sapiens
ggcagaggtgggcga

SEQ ID NO: 250762 - DNA, 15 bp, Homo sapiens
acggtggctcacgcc

SEQ ID NO: 250763 - DNA, 15 bp, Homo sapiens
cacggtggctcacgc

SEQ ID NO: 250764 - DNA, 15 bp, Homo sapiens
gcacggtggctcacg

SEQ ID NO: 250765 - DNA, 15 bp, Homo sapiens
ggcacggtggctcac

SEQ ID NO: 250766 - DNA, 15 bp, Homo sapiens
gggcacggtggctca

SEQ ID NO: 250767 - DNA, 15 bp, Homo sapiens
cgggcacggtggctc

SEQ ID NO: 250768 - DNA, 15 bp, Homo sapiens
ccgggcacggtggct

SEQ ID NO: 250769 - DNA, 15 bp, Homo sapiens
accgggcacggtggc

SEQ ID NO: 250770 - DNA, 15 bp, Homo sapiens
caccgggcacggtgg

SEQ ID NO: 250771 - DNA, 15 bp, Homo sapiens
ccaccgggcacggtg

SEQ ID NO: 250772 - DNA, 15 bp, Homo sapiens
accaccgggcacggt

SEQ ID NO: 250773 - DNA, 15 bp, Homo sapiens
aaccaccgggcacgg

SEQ ID NO: 250774 - DNA, 15 bp, Homo sapiens
aaaccaccgggcacg

SEQ ID NO: 250775 - DNA, 15 bp, Homo sapiens
caaaccaccgggcac

SEQ ID NO: 250776 - DNA, 15 bp, Homo sapiens
acaaaccaccgggca

SEQ ID NO: 250777 - DNA, 15 bp, Homo sapiens
tacaaaccaccgggc

SEQ ID NO: 250778 - DNA, 15 bp, Homo sapiens
atacaaaccaccggg

SEQ ID NO: 250779 - DNA, 15 bp, Homo sapiens
aatacaaaccaccgg

SEQ ID NO: 250780 - DNA, 15 bp, Homo sapiens
gaatacaaaccaccg

SEQ ID NO: 250781 - DNA, 15 bp, Homo sapiens
agaatacaaaccacc

SEQ ID NO: 250782 - DNA, 15 bp, Homo sapiens
aagaatacaaaccac

SEQ ID NO: 250783 - DNA, 15 bp, Homo sapiens
aaagaatacaaacca

SEQ ID NO: 250784 - DNA, 15 bp, Homo sapiens
aaaagaatacaaacc

SEQ ID NO: 250785 - DNA, 15 bp, Homo sapiens
aaaaagaatacaaac

SEQ ID NO: 250786 - DNA, 15 bp, Homo sapiens
taaaaagaatacaaa

SEQ ID NO: 250787 - DNA, 15 bp, Homo sapiens
gtaaaaagaatacaa

SEQ ID NO: 250788 - DNA, 15 bp, Homo sapiens
agtaaaaagaataca

SEQ ID NO: 250789 - DNA, 15 bp, Homo sapiens
cagtaaaaagaatac

SEQ ID NO: 250790 - DNA, 15 bp, Homo sapiens
tcagtaaaaagaata

SEQ ID NO: 250791 - DNA, 15 bp, Homo sapiens
ctcagtaaaaagaat

SEQ ID NO: 250792 - DNA, 15 bp, Homo sapiens
tctcagtaaaaagaa

SEQ ID NO: 250793 - DNA, 15 bp, Homo sapiens
ctctcagtaaaaaga

SEQ ID NO: 250794 - DNA, 15 bp, Homo sapiens
actctcagtaaaaag

SEQ ID NO: 250795 - DNA, 15 bp, Homo sapiens
gactctcagtaaaaa

SEQ ID NO: 250796 - DNA, 15 bp, Homo sapiens
cgactctcagtaaaa

SEQ ID NO: 250797 - DNA, 15 bp, Homo sapiens
acgactctcagtaaa

SEQ ID NO: 250798 - DNA, 15 bp, Homo sapiens
cacgactctcagtaa

SEQ ID NO: 250799 - DNA, 15 bp, Homo sapiens
tcacgactctcagta

SEQ ID NO: 250800 - DNA, 15 bp, Homo sapiens
ttcacgactctcagt

SEQ ID NO: 250801 - DNA, 15 bp, Homo sapiens
tttcacgactctcag

SEQ ID NO: 250802 - DNA, 15 bp, Homo sapiens
ctttcacgactctca

SEQ ID NO: 250803 - DNA, 15 bp, Homo sapiens
cctttcacgactctc

SEQ ID NO: 250804 - DNA, 15 bp, Homo sapiens
gcctttcacgactct

SEQ ID NO: 250805 - DNA, 15 bp, Homo sapiens
tgcctttcacgactc

SEQ ID NO: 250806 - DNA, 15 bp, Homo sapiens
ctgcctttcacgact

SEQ ID NO: 250807 - DNA, 15 bp, Homo sapiens
actgcctttcacgac

SEQ ID NO: 250808 - DNA, 15 bp, Homo sapiens
cactgcctttcacga

SEQ ID NO: 250809 - DNA, 15 bp, Homo sapiens
tcactgcctttcacg

SEQ ID NO: 250810 - DNA, 15 bp, Homo sapiens
atcactgcctttcac

SEQ ID NO: 250811 - DNA, 15 bp, Homo sapiens
gatcactgcctttca

SEQ ID NO: 250812 - DNA, 15 bp, Homo sapiens
ggatcactgcctttc

SEQ ID NO: 250813 - DNA, 15 bp, Homo sapiens
aggatcactgccttt

SEQ ID NO: 250814 - DNA, 15 bp, Homo sapiens
gaggatcactgcctt

SEQ ID NO: 250815 - DNA, 15 bp, Homo sapiens
agaggatcactgcct

SEQ ID NO: 250816 - DNA, 15 bp, Homo sapiens
cagaggatcactgcc

SEQ ID NO: 250817 - DNA, 15 bp, Homo sapiens
acagaggatcactgc

SEQ ID NO: 250818 - DNA, 15 bp, Homo sapiens
gacagaggatcactg

SEQ ID NO: 250819 - DNA, 15 bp, Homo sapiens
tgacagaggatcact

SEQ ID NO: 250820 - DNA, 15 bp, Homo sapiens
gtgacagaggatcac

SEQ ID NO: 250821 - DNA, 15 bp, Homo sapiens
tgtgacagaggatca

SEQ ID NO: 250822 - DNA, 15 bp, Homo sapiens
atgtgacagaggatc

SEQ ID NO: 250823 - DNA, 15 bp, Homo sapiens
catgtgacagaggat

SEQ ID NO: 250824 - DNA, 15 bp, Homo sapiens
acatgtgacagagga

SEQ ID NO: 250825 - DNA, 15 bp, Homo sapiens
cacatgtgacagagg

SEQ ID NO: 250826 - DNA, 15 bp, Homo sapiens
tcacatgtgacagag

SEQ ID NO: 250827 - DNA, 15 bp, Homo sapiens
atcacatgtgacaga

SEQ ID NO: 250828 - DNA, 15 bp, Homo sapiens
gatcacatgtgacag

SEQ ID NO: 250829 - DNA, 15 bp, Homo sapiens
agatcacatgtgaca

SEQ ID NO: 250830 - DNA, 15 bp, Homo sapiens
aagatcacatgtgac

SEQ ID NO: 250831 - DNA, 15 bp, Homo sapiens
caagatcacatgtga

SEQ ID NO: 250832 - DNA, 15 bp, Homo sapiens
ccaagatcacatgtg

SEQ ID NO: 250833 - DNA, 15 bp, Homo sapiens
gccaagatcacatgt

SEQ ID NO: 250834 - DNA, 15 bp, Homo sapiens
agccaagatcacatg

SEQ ID NO: 250835 - DNA, 15 bp, Homo sapiens
gagccaagatcacat

SEQ ID NO: 250836 - DNA, 15 bp, Homo sapiens
agagccaagatcaca

SEQ ID NO: 250837 - DNA, 15 bp, Homo sapiens
gagagccaagatcac

SEQ ID NO: 250838 - DNA, 15 bp, Homo sapiens
tgagagccaagatca

SEQ ID NO: 250839 - DNA, 15 bp, Homo sapiens
ctgagagccaagatc

SEQ ID NO: 250840 - DNA, 15 bp, Homo sapiens
cctgagagccaagat

SEQ ID NO: 250841 - DNA, 15 bp, Homo sapiens
ccctgagagccaaga

SEQ ID NO: 250842 - DNA, 15 bp, Homo sapiens
cccctgagagccaag

SEQ ID NO: 250843 - DNA, 15 bp, Homo sapiens
tcccctgagagccaa

SEQ ID NO: 250844 - DNA, 15 bp, Homo sapiens
gtcccctgagagcca

SEQ ID NO: 250845 - DNA, 15 bp, Homo sapiens
tgtcccctgagagcc

SEQ ID NO: 250846 - DNA, 15 bp, Homo sapiens
atgtcccctgagagc

SEQ ID NO: 250847 - DNA, 15 bp, Homo sapiens
aatgtcccctgagag

SEQ ID NO: 250848 - DNA, 15 bp, Homo sapiens
aaatgtcccctgaga

SEQ ID NO: 250849 - DNA, 15 bp, Homo sapiens
caaatgtcccctgag

SEQ ID NO: 250850 - DNA, 15 bp, Homo sapiens
ccaaatgtcccctga

SEQ ID NO: 250851 - DNA, 15 bp, Homo sapiens
gccaaatgtcccctg

SEQ ID NO: 250852 - DNA, 15 bp, Homo sapiens
tgccaaatgtcccct

SEQ ID NO: 250853 - DNA, 15 bp, Homo sapiens
ttgccaaatgtcccc

SEQ ID NO: 250854 - DNA, 15 bp, Homo sapiens
attgccaaatgtccc

SEQ ID NO: 250855 - DNA, 15 bp, Homo sapiens
aattgccaaatgtcc

SEQ ID NO: 250856 - DNA, 15 bp, Homo sapiens
aaattgccaaatgtc

SEQ ID NO: 250857 - DNA, 15 bp, Homo sapiens
gaaattgccaaatgt

SEQ ID NO: 250858 - DNA, 15 bp, Homo sapiens
agaaattgccaaatg

SEQ ID NO: 250859 - DNA, 15 bp, Homo sapiens
tagaaattgccaaat

SEQ ID NO: 250860 - DNA, 15 bp, Homo sapiens
ctagaaattgccaaa

SEQ ID NO: 250861 - DNA, 15 bp, Homo sapiens
tctagaaattgccaa

SEQ ID NO: 250862 - DNA, 15 bp, Homo sapiens
ctctagaaattgcca

SEQ ID NO: 250863 - DNA, 15 bp, Homo sapiens
tctctagaaattgcc

SEQ ID NO: 250864 - DNA, 15 bp, Homo sapiens
atctctagaaattgc

SEQ ID NO: 250865 - DNA, 15 bp, Homo sapiens
aatctctagaaattg

SEQ ID NO: 250866 - DNA, 15 bp, Homo sapiens
aaatctctagaaatt

SEQ ID NO: 250867 - DNA, 15 bp, Homo sapiens
aaaatctctagaaat

SEQ ID NO: 250868 - DNA, 15 bp, Homo sapiens
aaaaatctctagaaa

SEQ ID NO: 250869 - DNA, 15 bp, Homo sapiens
aaaaaatctctagaa

SEQ ID NO: 250870 - DNA, 15 bp, Homo sapiens
caaaaaatctctaga

SEQ ID NO: 250871 - DNA, 15 bp, Homo sapiens
ccaaaaaatctctag

SEQ ID NO: 250872 - DNA, 15 bp, Homo sapiens
accaaaaaatctcta

SEQ ID NO: 250873 - DNA, 15 bp, Homo sapiens
aaccaaaaaatctct

SEQ ID NO: 250874 - DNA, 15 bp, Homo sapiens
caaccaaaaaatctc

SEQ ID NO: 250875 - DNA, 15 bp, Homo sapiens
acaaccaaaaaatct

SEQ ID NO: 250876 - DNA, 15 bp, Homo sapiens
gacaaccaaaaaatc

SEQ ID NO: 250877 - DNA, 15 bp, Homo sapiens
tgacaaccaaaaaat

SEQ ID NO: 250878 - DNA, 15 bp, Homo sapiens
gtgacaaccaaaaaa

SEQ ID NO: 250879 - DNA, 15 bp, Homo sapiens
tgtgacaaccaaaaa

SEQ ID NO: 250880 - DNA, 15 bp, Homo sapiens
ttgtgacaaccaaaa

SEQ ID NO: 250881 - DNA, 15 bp, Homo sapiens
cttgtgacaaccaaa

SEQ ID NO: 250882 - DNA, 15 bp, Homo sapiens
acttgtgacaaccaa

SEQ ID NO: 250883 - DNA, 15 bp, Homo sapiens
gacttgtgacaacca

SEQ ID NO: 250884 - DNA, 15 bp, Homo sapiens
tgacttgtgacaacc

SEQ ID NO: 250885 - DNA, 15 bp, Homo sapiens
ttgacttgtgacaac

SEQ ID NO: 250886 - DNA, 15 bp, Homo sapiens
attgacttgtgacaa

SEQ ID NO: 250887 - DNA, 15 bp, Homo sapiens
cattgacttgtgaca

SEQ ID NO: 250888 - DNA, 15 bp, Homo sapiens
ccattgacttgtgac

SEQ ID NO: 250889 - DNA, 15 bp, Homo sapiens
cccattgacttgtga

SEQ ID NO: 250890 - DNA, 15 bp, Homo sapiens
ccccattgacttgtg

SEQ ID NO: 250891 - DNA, 15 bp, Homo sapiens
tccccattgacttgt

SEQ ID NO: 250892 - DNA, 15 bp, Homo sapiens
ttccccattgacttg

SEQ ID NO: 250893 - DNA, 15 bp, Homo sapiens
cttccccattgactt

SEQ ID NO: 250894 - DNA, 15 bp, Homo sapiens
tcttccccattgact

SEQ ID NO: 250895 - DNA, 15 bp, Homo sapiens
gtcttccccattgac

SEQ ID NO: 250896 - DNA, 15 bp, Homo sapiens
agtcttccccattga

SEQ ID NO: 250897 - DNA, 15 bp, Homo sapiens
cagtcttccccattg

SEQ ID NO: 250898 - DNA, 15 bp, Homo sapiens
acagtcttccccatt

SEQ ID NO: 250899 - DNA, 15 bp, Homo sapiens
aacagtcttccccat

SEQ ID NO: 250900 - DNA, 15 bp, Homo sapiens
caacagtcttcccca

SEQ ID NO: 250901 - DNA, 15 bp, Homo sapiens
ccaacagtcttcccc

SEQ ID NO: 250902 - DNA, 15 bp, Homo sapiens
gccaacagtcttccc

SEQ ID NO: 250903 - DNA, 15 bp, Homo sapiens
tgccaacagtcttcc

SEQ ID NO: 250904 - DNA, 15 bp, Homo sapiens
atgccaacagtcttc

SEQ ID NO: 250905 - DNA, 15 bp, Homo sapiens
aatgccaacagtctt

SEQ ID NO: 250906 - DNA, 15 bp, Homo sapiens
aaatgccaacagtct

SEQ ID NO: 250907 - DNA, 15 bp, Homo sapiens
taaatgccaacagtc

SEQ ID NO: 250908 - DNA, 15 bp, Homo sapiens
ctaaatgccaacagt

SEQ ID NO: 250909 - DNA, 15 bp, Homo sapiens
actaaatgccaacag

SEQ ID NO: 250910 - DNA, 15 bp, Homo sapiens
cactaaatgccaaca

SEQ ID NO: 250911 - DNA, 15 bp, Homo sapiens
ccactaaatgccaac

SEQ ID NO: 250912 - DNA, 15 bp, Homo sapiens
cccactaaatgccaa

SEQ ID NO: 250913 - DNA, 15 bp, Homo sapiens
acccactaaatgcca

SEQ ID NO: 250914 - DNA, 15 bp, Homo sapiens
tacccactaaatgcc

SEQ ID NO: 250915 - DNA, 15 bp, Homo sapiens
ctacccactaaatgc

SEQ ID NO: 250916 - DNA, 15 bp, Homo sapiens
tctacccactaaatg

SEQ ID NO: 250917 - DNA, 15 bp, Homo sapiens
ctctacccactaaat

SEQ ID NO: 250918 - DNA, 15 bp, Homo sapiens
cctctacccactaaa

SEQ ID NO: 250919 - DNA, 15 bp, Homo sapiens
gcctctacccactaa

SEQ ID NO: 250920 - DNA, 15 bp, Homo sapiens
agcctctacccacta

SEQ ID NO: 250921 - DNA, 15 bp, Homo sapiens
cagcctctacccact

SEQ ID NO: 250922 - DNA, 15 bp, Homo sapiens
ccagcctctacccac

SEQ ID NO: 250923 - DNA, 15 bp, Homo sapiens
accagcctctaccca

SEQ ID NO: 250924 - DNA, 15 bp, Homo sapiens
caccagcctctaccc

SEQ ID NO: 250925 - DNA, 15 bp, Homo sapiens
tcaccagcctctacc

SEQ ID NO: 250926 - DNA, 15 bp, Homo sapiens
gtcaccagcctctac

SEQ ID NO: 250927 - DNA, 15 bp, Homo sapiens
cgtcaccagcctcta

SEQ ID NO: 250928 - DNA, 15 bp, Homo sapiens
gcgtcaccagcctct

SEQ ID NO: 250929 - DNA, 15 bp, Homo sapiens
agcgtcaccagcctc

SEQ ID NO: 250930 - DNA, 15 bp, Homo sapiens
cagcgtcaccagcct

SEQ ID NO: 250931 - DNA, 15 bp, Homo sapiens
gcagcgtcaccagcc

SEQ ID NO: 250932 - DNA, 15 bp, Homo sapiens
agcagcgtcaccagc

SEQ ID NO: 250933 - DNA, 15 bp, Homo sapiens
cagcagcgtcaccag

SEQ ID NO: 250934 - DNA, 15 bp, Homo sapiens
tcagcagcgtcacca

SEQ ID NO: 250935 - DNA, 15 bp, Homo sapiens
ttcagcagcgtcacc

SEQ ID NO: 250936 - DNA, 15 bp, Homo sapiens
gttcagcagcgtcac

SEQ ID NO: 250937 - DNA, 15 bp, Homo sapiens
tgttcagcagcgtca

SEQ ID NO: 250938 - DNA, 15 bp, Homo sapiens
gtgttcagcagcgtc

SEQ ID NO: 250939 - DNA, 15 bp, Homo sapiens
ggtgttcagcagcgt

SEQ ID NO: 250940 - DNA, 15 bp, Homo sapiens
gggtgttcagcagcg

SEQ ID NO: 250941 - DNA, 15 bp, Homo sapiens
tgggtgttcagcagc

SEQ ID NO: 250942 - DNA, 15 bp, Homo sapiens
ctgggtgttcagcag

SEQ ID NO: 250943 - DNA, 15 bp, Homo sapiens
tctgggtgttcagca

SEQ ID NO: 250944 - DNA, 15 bp, Homo sapiens
ttctgggtgttcagc

SEQ ID NO: 250945 - DNA, 15 bp, Homo sapiens
gttctgggtgttcag

SEQ ID NO: 250946 - DNA, 15 bp, Homo sapiens
tgttctgggtgttca

SEQ ID NO: 250947 - DNA, 15 bp, Homo sapiens
ctgttctgggtgttc

SEQ ID NO: 250948 - DNA, 15 bp, Homo sapiens
cctgttctgggtgtt

SEQ ID NO: 250949 - DNA, 15 bp, Homo sapiens
ccctgttctgggtgt

SEQ ID NO: 250950 - DNA, 15 bp, Homo sapiens
tccctgttctgggtg

SEQ ID NO: 250951 - DNA, 15 bp, Homo sapiens
ttccctgttctgggt

SEQ ID NO: 250952 - DNA, 15 bp, Homo sapiens
cttccctgttctggg

SEQ ID NO: 250953 - DNA, 15 bp, Homo sapiens
acttccctgttctgg

SEQ ID NO: 250954 - DNA, 15 bp, Homo sapiens
tacttccctgttctg

SEQ ID NO: 250955 - DNA, 15 bp, Homo sapiens
ctacttccctgttct

SEQ ID NO: 250956 - DNA, 15 bp, Homo sapiens
gctacttccctgttc

SEQ ID NO: 250957 - DNA, 15 bp, Homo sapiens
tgctacttccctgtt

SEQ ID NO: 250958 - DNA, 15 bp, Homo sapiens
ctgctacttccctgt

SEQ ID NO: 250959 - DNA, 15 bp, Homo sapiens
cctgctacttccctg

SEQ ID NO: 250960 - DNA, 15 bp, Homo sapiens
gcctgctacttccct

SEQ ID NO: 250961 - DNA, 15 bp, Homo sapiens
ggcctgctacttccc

SEQ ID NO: 250962 - DNA, 15 bp, Homo sapiens
gggcctgctacttcc

SEQ ID NO: 250963 - DNA, 15 bp, Homo sapiens
agggcctgctacttc

SEQ ID NO: 250964 - DNA, 15 bp, Homo sapiens
tagggcctgctactt

SEQ ID NO: 250965 - DNA, 15 bp, Homo sapiens
ctagggcctgctact

SEQ ID NO: 250966 - DNA, 15 bp, Homo sapiens
tctagggcctgctac

SEQ ID NO: 250967 - DNA, 15 bp, Homo sapiens
atctagggcctgcta

SEQ ID NO: 250968 - DNA, 15 bp, Homo sapiens
tatctagggcctgct

SEQ ID NO: 250969 - DNA, 15 bp, Homo sapiens
ctatctagggcctgc

SEQ ID NO: 250970 - DNA, 15 bp, Homo sapiens
tctatctagggcctg

SEQ ID NO: 250971 - DNA, 15 bp, Homo sapiens
ctctatctagggcct

SEQ ID NO: 250972 - DNA, 15 bp, Homo sapiens
gctctatctagggcc

SEQ ID NO: 250973 - DNA, 15 bp, Homo sapiens
ggctctatctagggc

SEQ ID NO: 250974 - DNA, 15 bp, Homo sapiens
tggctctatctaggg

SEQ ID NO: 250975 - DNA, 15 bp, Homo sapiens
atggctctatctagg

SEQ ID NO: 250976 - DNA, 15 bp, Homo sapiens
gatggctctatctag

SEQ ID NO: 250977 - DNA, 15 bp, Homo sapiens
cgatggctctatcta

SEQ ID NO: 250978 - DNA, 15 bp, Homo sapiens
acgatggctctatct

SEQ ID NO: 250979 - DNA, 15 bp, Homo sapiens
cacgatggctctatc

SEQ ID NO: 250980 - DNA, 15 bp, Homo sapiens
ccacgatggctctat

SEQ ID NO: 250981 - DNA, 15 bp, Homo sapiens
cccacgatggctcta

SEQ ID NO: 250982 - DNA, 15 bp, Homo sapiens
ccccacgatggctct

SEQ ID NO: 250983 - DNA, 15 bp, Homo sapiens
tccccacgatggctc

SEQ ID NO: 250984 - DNA, 15 bp, Homo sapiens
ttccccacgatggct

SEQ ID NO: 250985 - DNA, 15 bp, Homo sapiens
tttccccacgatggc

SEQ ID NO: 250986 - DNA, 15 bp, Homo sapiens
gtttccccacgatgg

SEQ ID NO: 250987 - DNA, 15 bp, Homo sapiens
ggtttccccacgatg

SEQ ID NO: 250988 - DNA, 15 bp, Homo sapiens
gggtttccccacgat

SEQ ID NO: 250989 - DNA, 15 bp, Homo sapiens
agggtttccccacga

SEQ ID NO: 250990 - DNA, 15 bp, Homo sapiens
cagggtttccccacg

SEQ ID NO: 250991 - DNA, 15 bp, Homo sapiens
gcagggtttccccac

SEQ ID NO: 250992 - DNA, 15 bp, Homo sapiens
agcagggtttcccca

SEQ ID NO: 250993 - DNA, 15 bp, Homo sapiens
gagcagggtttcccc

SEQ ID NO: 250994 - DNA, 15 bp, Homo sapiens
agagcagggtttccc

SEQ ID NO: 250995 - DNA, 15 bp, Homo sapiens
tagagcagggtttcc

SEQ ID NO: 250996 - DNA, 15 bp, Homo sapiens
ttagagcagggtttc

SEQ ID NO: 250997 - DNA, 15 bp, Homo sapiens
cttagagcagggttt

SEQ ID NO: 250998 - DNA, 15 bp, Homo sapiens
ccttagagcagggtt

SEQ ID NO: 250999 - DNA, 15 bp, Homo sapiens
tccttagagcagggt

SEQ ID NO: 251000 - DNA, 15 bp, Homo sapiens
ttccttagagcaggg

SEQ ID NO: 251001 - DNA, 15 bp, Homo sapiens
tttccttagagcagg

SEQ ID NO: 251002 - DNA, 15 bp, Homo sapiens
atttccttagagcag

SEQ ID NO: 251003 - DNA, 15 bp, Homo sapiens
catttccttagagca

SEQ ID NO: 251004 - DNA, 15 bp, Homo sapiens
ccatttccttagagc

SEQ ID NO: 251005 - DNA, 15 bp, Homo sapiens
gccatttccttagag

SEQ ID NO: 251006 - DNA, 15 bp, Homo sapiens
cgccatttccttaga

SEQ ID NO: 251007 - DNA, 15 bp, Homo sapiens
gcgccatttccttag

SEQ ID NO: 251008 - DNA, 15 bp, Homo sapiens
agcgccatttcctta

SEQ ID NO: 251009 - DNA, 15 bp, Homo sapiens
tagcgccatttcctt

SEQ ID NO: 251010 - DNA, 15 bp, Homo sapiens
atagcgccatttcct

SEQ ID NO: 251011 - DNA, 15 bp, Homo sapiens
aatagcgccatttcc

SEQ ID NO: 251012 - DNA, 15 bp, Homo sapiens
aaatagcgccatttc

SEQ ID NO: 251013 - DNA, 15 bp, Homo sapiens
aaaatagcgccattt

SEQ ID NO: 251014 - DNA, 15 bp, Homo sapiens
taaaatagcgccatt

SEQ ID NO: 251015 - DNA, 15 bp, Homo sapiens
ataaaatagcgccat

SEQ ID NO: 251016 - DNA, 15 bp, Homo sapiens
tataaaatagcgcca

SEQ ID NO: 251017 - DNA, 15 bp, Homo sapiens
ttataaaatagcgcc

SEQ ID NO: 251018 - DNA, 15 bp, Homo sapiens
gttataaaatagcgc

SEQ ID NO: 251019 - DNA, 15 bp, Homo sapiens
ggttataaaatagcg

SEQ ID NO: 251020 - DNA, 15 bp, Homo sapiens
gggttataaaatagc

SEQ ID NO: 251021 - DNA, 15 bp, Homo sapiens
ggggttataaaatag

SEQ ID NO: 251022 - DNA, 15 bp, Homo sapiens
tggggttataaaata

SEQ ID NO: 251023 - DNA, 15 bp, Homo sapiens
gtggggttataaaat

SEQ ID NO: 251024 - DNA, 15 bp, Homo sapiens
cgtggggttataaaa

SEQ ID NO: 251025 - DNA, 15 bp, Homo sapiens
acgtggggttataaa

SEQ ID NO: 251026 - DNA, 15 bp, Homo sapiens
aacgtggggttataa

SEQ ID NO: 251027 - DNA, 15 bp, Homo sapiens
gaacgtggggttata

SEQ ID NO: 251028 - DNA, 15 bp, Homo sapiens
ggaacgtggggttat

SEQ ID NO: 251029 - DNA, 15 bp, Homo sapiens
aggaacgtggggtta

SEQ ID NO: 251030 - DNA, 15 bp, Homo sapiens
caggaacgtggggtt

SEQ ID NO: 251031 - DNA, 15 bp, Homo sapiens
ccaggaacgtggggt

SEQ ID NO: 251032 - DNA, 15 bp, Homo sapiens
gccaggaacgtgggg

SEQ ID NO: 251033 - DNA, 15 bp, Homo sapiens
tgccaggaacgtggg

SEQ ID NO: 251034 - DNA, 15 bp, Homo sapiens
atgccaggaacgtgg

SEQ ID NO: 251035 - DNA, 15 bp, Homo sapiens
catgccaggaacgtg

SEQ ID NO: 251036 - DNA, 15 bp, Homo sapiens
tcatgccaggaacgt

SEQ ID NO: 251037 - DNA, 15 bp, Homo sapiens
atcatgccaggaacg

SEQ ID NO: 251038 - DNA, 15 bp, Homo sapiens
aatcatgccaggaac

SEQ ID NO: 251039 - DNA, 15 bp, Homo sapiens
taatcatgccaggaa

SEQ ID NO: 251040 - DNA, 15 bp, Homo sapiens
gtaatcatgccagga

SEQ ID NO: 251041 - DNA, 15 bp, Homo sapiens
ggtaatcatgccagg

SEQ ID NO: 251042 - DNA, 15 bp, Homo sapiens
tggtaatcatgccag

SEQ ID NO: 251043 - DNA, 15 bp, Homo sapiens
ttggtaatcatgcca

SEQ ID NO: 251044 - DNA, 15 bp, Homo sapiens
gttggtaatcatgcc

SEQ ID NO: 251045 - DNA, 15 bp, Homo sapiens
tgttggtaatcatgc

SEQ ID NO: 251046 - DNA, 15 bp, Homo sapiens
ctgttggtaatcatg

SEQ ID NO: 251047 - DNA, 15 bp, Homo sapiens
gctgttggtaatcat

SEQ ID NO: 251048 - DNA, 15 bp, Homo sapiens
ggctgttggtaatca

SEQ ID NO: 251049 - DNA, 15 bp, Homo sapiens
tggctgttggtaatc

SEQ ID NO: 251050 - DNA, 15 bp, Homo sapiens
ttggctgttggtaat

SEQ ID NO: 251051 - DNA, 15 bp, Homo sapiens
tttggctgttggtaa

SEQ ID NO: 251052 - DNA, 15 bp, Homo sapiens
ttttggctgttggta

SEQ ID NO: 251053 - DNA, 15 bp, Homo sapiens
cttttggctgttggt

SEQ ID NO: 251054 - DNA, 15 bp, Homo sapiens
acttttggctgttgg

SEQ ID NO: 251055 - DNA, 15 bp, Homo sapiens
cacttttggctgttg

SEQ ID NO: 251056 - DNA, 15 bp, Homo sapiens
ccacttttggctgtt

SEQ ID NO: 251057 - DNA, 15 bp, Homo sapiens
tccacttttggctgt

SEQ ID NO: 251058 - DNA, 15 bp, Homo sapiens
ctccacttttggctg

SEQ ID NO: 251059 - DNA, 15 bp, Homo sapiens
actccacttttggct

SEQ ID NO: 251060 - DNA, 15 bp, Homo sapiens
gactccacttttggc

SEQ ID NO: 251061 - DNA, 15 bp, Homo sapiens
ggactccacttttgg

SEQ ID NO: 251062 - DNA, 15 bp, Homo sapiens
gggactccacttttg

SEQ ID NO: 251063 - DNA, 15 bp, Homo sapiens
ggggactccactttt

SEQ ID NO: 251064 - DNA, 15 bp, Homo sapiens
gggggactccacttt

SEQ ID NO: 251065 - DNA, 15 bp, Homo sapiens
ggggggactccactt

SEQ ID NO: 251066 - DNA, 15 bp, Homo sapiens
tggggggactccact

SEQ ID NO: 251067 - DNA, 15 bp, Homo sapiens
ttggggggactccac

SEQ ID NO: 251068 - DNA, 15 bp, Homo sapiens
cttggggggactcca

SEQ ID NO: 251069 - DNA, 15 bp, Homo sapiens
acttggggggactcc

SEQ ID NO: 251070 - DNA, 15 bp, Homo sapiens
cacttggggggactc

SEQ ID NO: 251071 - DNA, 15 bp, Homo sapiens
acacttggggggact

SEQ ID NO: 251072 - DNA, 15 bp, Homo sapiens
cacacttggggggac

SEQ ID NO: 251073 - DNA, 15 bp, Homo sapiens
acacacttgggggga

SEQ ID NO: 251074 - DNA, 15 bp, Homo sapiens
aacacacttgggggg

SEQ ID NO: 251075 - DNA, 15 bp, Homo sapiens
gaacacacttggggg

SEQ ID NO: 251076 - DNA, 15 bp, Homo sapiens
cgaacacacttgggg

SEQ ID NO: 251077 - DNA, 15 bp, Homo sapiens
acgaacacacttggg

SEQ ID NO: 251078 - DNA, 15 bp, Homo sapiens
gacgaacacacttgg

SEQ ID NO: 251079 - DNA, 15 bp, Homo sapiens
ggacgaacacacttg

SEQ ID NO: 251080 - DNA, 15 bp, Homo sapiens
tggacgaacacactt

SEQ ID NO: 251081 - DNA, 15 bp, Homo sapiens
atggacgaacacact

SEQ ID NO: 251082 - DNA, 15 bp, Homo sapiens
aatggacgaacacac

SEQ ID NO: 251083 - DNA, 15 bp, Homo sapiens
aaatggacgaacaca

SEQ ID NO: 251084 - DNA, 15 bp, Homo sapiens
caaatggacgaacac

SEQ ID NO: 251085 - DNA, 15 bp, Homo sapiens
gcaaatggacgaaca

SEQ ID NO: 251086 - DNA, 15 bp, Homo sapiens
tgcaaatggacgaac

SEQ ID NO: 251087 - DNA, 15 bp, Homo sapiens
atgcaaatggacgaa

SEQ ID NO: 251088 - DNA, 15 bp, Homo sapiens
aatgcaaatggacga

SEQ ID NO: 251089 - DNA, 15 bp, Homo sapiens
caatgcaaatggacg

SEQ ID NO: 251090 - DNA, 15 bp, Homo sapiens
gcaatgcaaatggac

SEQ ID NO: 251091 - DNA, 15 bp, Homo sapiens
tgcaatgcaaatgga

SEQ ID NO: 251092 - DNA, 15 bp, Homo sapiens
ctgcaatgcaaatgg

SEQ ID NO: 251093 - DNA, 15 bp, Homo sapiens
actgcaatgcaaatg

SEQ ID NO: 251094 - DNA, 15 bp, Homo sapiens
tactgcaatgcaaat

SEQ ID NO: 251095 - DNA, 15 bp, Homo sapiens
ttactgcaatgcaaa

SEQ ID NO: 251096 - DNA, 15 bp, Homo sapiens
tttactgcaatgcaa

SEQ ID NO: 251097 - DNA, 15 bp, Homo sapiens
ctttactgcaatgca

SEQ ID NO: 251098 - DNA, 15 bp, Homo sapiens
cctttactgcaatgc

SEQ ID NO: 251099 - DNA, 15 bp, Homo sapiens
tcctttactgcaatg

SEQ ID NO: 251100 - DNA, 15 bp, Homo sapiens
ttcctttactgcaat

SEQ ID NO: 251101 - DNA, 15 bp, Homo sapiens
attcctttactgcaa

SEQ ID NO: 251102 - DNA, 15 bp, Homo sapiens
tattcctttactgca

SEQ ID NO: 251103 - DNA, 15 bp, Homo sapiens
ctattcctttactgc

SEQ ID NO: 251104 - DNA, 15 bp, Homo sapiens
gctattcctttactg

SEQ ID NO: 251105 - DNA, 15 bp, Homo sapiens
agctattcctttact

SEQ ID NO: 251106 - DNA, 15 bp, Homo sapiens
cagctattcctttac

SEQ ID NO: 251107 - DNA, 15 bp, Homo sapiens
tcagctattccttta

SEQ ID NO: 251108 - DNA, 15 bp, Homo sapiens
ctcagctattccttt

SEQ ID NO: 251109 - DNA, 15 bp, Homo sapiens
cctcagctattcctt

SEQ ID NO: 251110 - DNA, 15 bp, Homo sapiens
gcctcagctattcct

SEQ ID NO: 251111 - DNA, 15 bp, Homo sapiens
ggcctcagctattcc

SEQ ID NO: 251112 - DNA, 15 bp, Homo sapiens
cggcctcagctattc

SEQ ID NO: 251113 - DNA, 15 bp, Homo sapiens
ccggcctcagctatt

SEQ ID NO: 251114 - DNA, 15 bp, Homo sapiens
cccggcctcagctat

SEQ ID NO: 251115 - DNA, 15 bp, Homo sapiens
acccggcctcagcta

SEQ ID NO: 251116 - DNA, 15 bp, Homo sapiens
tacccggcctcagct

SEQ ID NO: 251117 - DNA, 15 bp, Homo sapiens
ttacccggcctcagc

SEQ ID NO: 251118 - DNA, 15 bp, Homo sapiens
attacccggcctcag

SEQ ID NO: 251119 - DNA, 15 bp, Homo sapiens
aattacccggcctca

SEQ ID NO: 251120 - DNA, 15 bp, Homo sapiens
aaattacccggcctc

SEQ ID NO: 251121 - DNA, 15 bp, Homo sapiens
taaattacccggcct

SEQ ID NO: 251122 - DNA, 15 bp, Homo sapiens
ataaattacccggcc

SEQ ID NO: 251123 - DNA, 15 bp, Homo sapiens
tataaattacccggc

SEQ ID NO: 251124 - DNA, 15 bp, Homo sapiens
ttataaattacccgg

SEQ ID NO: 251125 - DNA, 15 bp, Homo sapiens
tttataaattacccg

SEQ ID NO: 251126 - DNA, 15 bp, Homo sapiens
ctttataaattaccc

SEQ ID NO: 251127 - DNA, 15 bp, Homo sapiens
tctttataaattacc

SEQ ID NO: 251128 - DNA, 15 bp, Homo sapiens
ttctttataaattac

SEQ ID NO: 251129 - DNA, 15 bp, Homo sapiens
tttctttataaatta

SEQ ID NO: 251130 - DNA, 15 bp, Homo sapiens
ttttctttataaatt

SEQ ID NO: 251131 - DNA, 15 bp, Homo sapiens
cttttctttataaat

SEQ ID NO: 251132 - DNA, 15 bp, Homo sapiens
tcttttctttataaa

SEQ ID NO: 251133 - DNA, 15 bp, Homo sapiens
ctcttttctttataa

SEQ ID NO: 251134 - DNA, 15 bp, Homo sapiens
tctcttttctttata

SEQ ID NO: 251135 - DNA, 15 bp, Homo sapiens
atctcttttctttat

SEQ ID NO: 251136 - DNA, 15 bp, Homo sapiens
aatctcttttcttta

SEQ ID NO: 251137 - DNA, 15 bp, Homo sapiens
aaatctcttttcttt

SEQ ID NO: 251138 - DNA, 15 bp, Homo sapiens
taaatctcttttctt

SEQ ID NO: 251139 - DNA, 15 bp, Homo sapiens
ttaaatctcttttct

SEQ ID NO: 251140 - DNA, 15 bp, Homo sapiens
tttaaatctcttttc

SEQ ID NO: 251141 - DNA, 15 bp, Homo sapiens
gtttaaatctctttt

SEQ ID NO: 251142 - DNA, 15 bp, Homo sapiens
agtttaaatctcttt

SEQ ID NO: 251143 - DNA, 15 bp, Homo sapiens
cagtttaaatctctt

SEQ ID NO: 251144 - DNA, 15 bp, Homo sapiens
ccagtttaaatctct

SEQ ID NO: 251145 - DNA, 15 bp, Homo sapiens
cccagtttaaatctc

SEQ ID NO: 251146 - DNA, 15 bp, Homo sapiens
acccagtttaaatct

SEQ ID NO: 251147 - DNA, 15 bp, Homo sapiens
tacccagtttaaatc

SEQ ID NO: 251148 - DNA, 15 bp, Homo sapiens
atacccagtttaaat

SEQ ID NO: 251149 - DNA, 15 bp, Homo sapiens
catacccagtttaaa

SEQ ID NO: 251150 - DNA, 15 bp, Homo sapiens
ccatacccagtttaa

SEQ ID NO: 251151 - DNA, 15 bp, Homo sapiens
gccatacccagttta

SEQ ID NO: 251152 - DNA, 15 bp, Homo sapiens
tgccatacccagttt

SEQ ID NO: 251153 - DNA, 15 bp, Homo sapiens
ctgccatacccagtt

SEQ ID NO: 251154 - DNA, 15 bp, Homo sapiens
actgccatacccagt

SEQ ID NO: 251155 - DNA, 15 bp, Homo sapiens
aactgccatacccag

SEQ ID NO: 251156 - DNA, 15 bp, Homo sapiens
aaactgccataccca

SEQ ID NO: 251157 - DNA, 15 bp, Homo sapiens
taaactgccataccc

SEQ ID NO: 251158 - DNA, 15 bp, Homo sapiens
ataaactgccatacc

SEQ ID NO: 251159 - DNA, 15 bp, Homo sapiens
cataaactgccatac

SEQ ID NO: 251160 - DNA, 15 bp, Homo sapiens
gcataaactgccata

SEQ ID NO: 251161 - DNA, 15 bp, Homo sapiens
ggcataaactgccat

SEQ ID NO: 251162 - DNA, 15 bp, Homo sapiens
aggcataaactgcca

SEQ ID NO: 251163 - DNA, 15 bp, Homo sapiens
taggcataaactgcc

SEQ ID NO: 251164 - DNA, 15 bp, Homo sapiens
ataggcataaactgc

SEQ ID NO: 251165 - DNA, 15 bp, Homo sapiens
tataggcataaactg

SEQ ID NO: 251166 - DNA, 15 bp, Homo sapiens
ttataggcataaact

SEQ ID NO: 251167 - DNA, 15 bp, Homo sapiens
attataggcataaac

SEQ ID NO: 251168 - DNA, 15 bp, Homo sapiens
gattataggcataaa

SEQ ID NO: 251169 - DNA, 15 bp, Homo sapiens
ggattataggcataa

SEQ ID NO: 251170 - DNA, 15 bp, Homo sapiens
gggattataggcata

SEQ ID NO: 251171 - DNA, 15 bp, Homo sapiens
tctgggattataggc

SEQ ID NO: 251172 - DNA, 15 bp, Homo sapiens
ttctgggattatagg

SEQ ID NO: 251173 - DNA, 15 bp, Homo sapiens
gttctgggattatag

SEQ ID NO: 251174 - DNA, 15 bp, Homo sapiens
agttctgggattata

SEQ ID NO: 251175 - DNA, 15 bp, Homo sapiens
aagttctgggattat

SEQ ID NO: 251176 - DNA, 15 bp, Homo sapiens
aaagttctgggatta

SEQ ID NO: 251177 - DNA, 15 bp, Homo sapiens
caaagttctgggatt

SEQ ID NO: 251178 - DNA, 15 bp, Homo sapiens
ccaaagttctgggat

SEQ ID NO: 251179 - DNA, 15 bp, Homo sapiens
cccaaagttctggga

SEQ ID NO: 251180 - DNA, 15 bp, Homo sapiens
tcccaaagttctggg

SEQ ID NO: 251181 - DNA, 15 bp, Homo sapiens
ctcccaaagttctgg

SEQ ID NO: 251182 - DNA, 15 bp, Homo sapiens
cctcccaaagttctg

SEQ ID NO: 251183 - DNA, 15 bp, Homo sapiens
gcctcccaaagttct

SEQ ID NO: 251184 - DNA, 15 bp, Homo sapiens
agcctcccaaagttc

SEQ ID NO: 251185 - DNA, 15 bp, Homo sapiens
cagcctcccaaagtt

SEQ ID NO: 251186 - DNA, 15 bp, Homo sapiens
cgatcctcctgcctc

SEQ ID NO: 251187 - DNA, 15 bp, Homo sapiens
agcgatcctcctgcc

SEQ ID NO: 251188 - DNA, 15 bp, Homo sapiens
aagcgatcctcctgc

SEQ ID NO: 251189 - DNA, 15 bp, Homo sapiens
caagcgatcctcctg

SEQ ID NO: 251190 - DNA, 15 bp, Homo sapiens
tcaagcgatcctcct

SEQ ID NO: 251191 - DNA, 15 bp, Homo sapiens
ctcaagcgatcctcc

SEQ ID NO: 251192 - DNA, 15 bp, Homo sapiens
actcaagcgatcctc

SEQ ID NO: 251193 - DNA, 15 bp, Homo sapiens
gactcaagcgatcct

SEQ ID NO: 251194 - DNA, 15 bp, Homo sapiens
ggactcaagcgatcc

SEQ ID NO: 251195 - DNA, 15 bp, Homo sapiens
tggactcaagcgatc

SEQ ID NO: 251196 - DNA, 15 bp, Homo sapiens
ctggactcaagcgat

SEQ ID NO: 251197 - DNA, 15 bp, Homo sapiens
cctggactcaagcga

SEQ ID NO: 251198 - DNA, 15 bp, Homo sapiens
tcctggactcaagcg

SEQ ID NO: 251199 - DNA, 15 bp, Homo sapiens
cactcctggactcaa

SEQ ID NO: 251200 - DNA, 15 bp, Homo sapiens
acactcctggactca

SEQ ID NO: 251201 - DNA, 15 bp, Homo sapiens
cacactcctggactc

SEQ ID NO: 251202 - DNA, 15 bp, Homo sapiens
tcacactcctggact

SEQ ID NO: 251203 - DNA, 15 bp, Homo sapiens
ctcacactcctggac

SEQ ID NO: 251204 - DNA, 15 bp, Homo sapiens
tctcacactcctgga

SEQ ID NO: 251205 - DNA, 15 bp, Homo sapiens
gtctcacactcctgg

SEQ ID NO: 251206 - DNA, 15 bp, Homo sapiens
ggtctcacactcctg

SEQ ID NO: 251207 - DNA, 15 bp, Homo sapiens
cggtctcacactcct

SEQ ID NO: 251208 - DNA, 15 bp, Homo sapiens
tcggtctcacactcc

SEQ ID NO: 251209 - DNA, 15 bp, Homo sapiens
ctcggtctcacactc

SEQ ID NO: 251210 - DNA, 15 bp, Homo sapiens
tctcggtctcacact

SEQ ID NO: 251211 - DNA, 15 bp, Homo sapiens
gtctcggtctcacac

SEQ ID NO: 251212 - DNA, 15 bp, Homo sapiens
ggtctcggtctcaca

SEQ ID NO: 251213 - DNA, 15 bp, Homo sapiens
tggtctcggtctcac

SEQ ID NO: 251214 - DNA, 15 bp, Homo sapiens
ctggtctcggtctca

SEQ ID NO: 251215 - DNA, 15 bp, Homo sapiens
gctggtctcggtctc

SEQ ID NO: 251216 - DNA, 15 bp, Homo sapiens
ggctggtctcggtct

SEQ ID NO: 251217 - DNA, 15 bp, Homo sapiens
aggctggtctcggtc

SEQ ID NO: 251218 - DNA, 15 bp, Homo sapiens
caggctggtctcggt

SEQ ID NO: 251219 - DNA, 15 bp, Homo sapiens
ccaggctggtctcgg

SEQ ID NO: 251220 - DNA, 15 bp, Homo sapiens
tcatgttggccaggc

SEQ ID NO: 251221 - DNA, 15 bp, Homo sapiens
gtcatgttggccagg

SEQ ID NO: 251222 - DNA, 15 bp, Homo sapiens
cgtcatgttggccag

SEQ ID NO: 251223 - DNA, 15 bp, Homo sapiens
tcgtcatgttggcca

SEQ ID NO: 251224 - DNA, 15 bp, Homo sapiens
ttcgtcatgttggcc

SEQ ID NO: 251225 - DNA, 15 bp, Homo sapiens
tttcgtcatgttggc

SEQ ID NO: 251226 - DNA, 15 bp, Homo sapiens
gtttcgtcatgttgg

SEQ ID NO: 251227 - DNA, 15 bp, Homo sapiens
agtttcgtcatgttg

SEQ ID NO: 251228 - DNA, 15 bp, Homo sapiens
gagtttcgtcatgtt

SEQ ID NO: 251229 - DNA, 15 bp, Homo sapiens
agagtttcgtcatgt

SEQ ID NO: 251230 - DNA, 15 bp, Homo sapiens
cagagtttcgtcatg

SEQ ID NO: 251231 - DNA, 15 bp, Homo sapiens
acagagtttcgtcat

SEQ ID NO: 251232 - DNA, 15 bp, Homo sapiens
gacagagtttcgtca

SEQ ID NO: 251233 - DNA, 15 bp, Homo sapiens
agacagagtttcgtc

SEQ ID NO: 251234 - DNA, 15 bp, Homo sapiens
gagacagagtttcgt

SEQ ID NO: 251235 - DNA, 15 bp, Homo sapiens
agagacagagtttcg

SEQ ID NO: 251236 - DNA, 15 bp, Homo sapiens
tagagacagagtttc

SEQ ID NO: 251237 - DNA, 15 bp, Homo sapiens
gtagagacagagttt

SEQ ID NO: 251238 - DNA, 15 bp, Homo sapiens
tgtagagacagagtt

SEQ ID NO: 251239 - DNA, 15 bp, Homo sapiens
ttgtagagacagagt

SEQ ID NO: 251240 - DNA, 15 bp, Homo sapiens
tttgtagagacagag

SEQ ID NO: 251241 - DNA, 15 bp, Homo sapiens
ttttgtagagacaga

SEQ ID NO: 251242 - DNA, 15 bp, Homo sapiens
tttttgtagagacag

SEQ ID NO: 251243 - DNA, 15 bp, Homo sapiens
ctttttgtatttttt

SEQ ID NO: 251244 - DNA, 15 bp, Homo sapiens
cctactttttgtatt

SEQ ID NO: 251245 - DNA, 15 bp, Homo sapiens
gcctactttttgtat

SEQ ID NO: 251246 - DNA, 15 bp, Homo sapiens
ggcctactttttgta

SEQ ID NO: 251247 - DNA, 15 bp, Homo sapiens
tggcctactttttgt

SEQ ID NO: 251248 - DNA, 15 bp, Homo sapiens
ctggcctactttttg

SEQ ID NO: 251249 - DNA, 15 bp, Homo sapiens
cctggcctacttttt

SEQ ID NO: 251250 - DNA, 15 bp, Homo sapiens
gcctggcctactttt

SEQ ID NO: 251251 - DNA, 15 bp, Homo sapiens
tgcctggcctacttt

SEQ ID NO: 251252 - DNA, 15 bp, Homo sapiens
gtgcctggcctactt

SEQ ID NO: 251253 - DNA, 15 bp, Homo sapiens
cgtgcctggcctact

SEQ ID NO: 251254 - DNA, 15 bp, Homo sapiens
ccgtgcctggcctac

SEQ ID NO: 251255 - DNA, 15 bp, Homo sapiens
accgtgcctggccta

SEQ ID NO: 251256 - DNA, 15 bp, Homo sapiens
caccgtgcctggcct

SEQ ID NO: 251257 - DNA, 15 bp, Homo sapiens
ccaccgtgcctggcc

SEQ ID NO: 251258 - DNA, 15 bp, Homo sapiens
accaccgtgcctggc

SEQ ID NO: 251259 - DNA, 15 bp, Homo sapiens
aaccaccgtgcctgg

SEQ ID NO: 251260 - DNA, 15 bp, Homo sapiens
gaaccaccgtgcctg

SEQ ID NO: 251261 - DNA, 15 bp, Homo sapiens
tgaaccaccgtgcct

SEQ ID NO: 251262 - DNA, 15 bp, Homo sapiens
gtgaaccaccgtgcc

SEQ ID NO: 251263 - DNA, 15 bp, Homo sapiens
cgtgaaccaccgtgc

SEQ ID NO: 251264 - DNA, 15 bp, Homo sapiens
gcgtgaaccaccgtg

SEQ ID NO: 251265 - DNA, 15 bp, Homo sapiens
ggcgtgaaccaccgt

SEQ ID NO: 251266 - DNA, 15 bp, Homo sapiens
aggcgtgaaccaccg

SEQ ID NO: 251267 - DNA, 15 bp, Homo sapiens
caggcgtgaaccacc

SEQ ID NO: 251268 - DNA, 15 bp, Homo sapiens
acaggcgtgaaccac

SEQ ID NO: 251269 - DNA, 15 bp, Homo sapiens
tacaggcgtgaacca

SEQ ID NO: 251270 - DNA, 15 bp, Homo sapiens
ttacaggcgtgaacc

SEQ ID NO: 251271 - DNA, 15 bp, Homo sapiens
attacaggcgtgaac

SEQ ID NO: 251272 - DNA, 15 bp, Homo sapiens
gattacaggcgtgaa

SEQ ID NO: 251273 - DNA, 15 bp, Homo sapiens
cctcggcctcccaaa

SEQ ID NO: 251274 - DNA, 15 bp, Homo sapiens
gcctcggcctcccaa

SEQ ID NO: 251275 - DNA, 15 bp, Homo sapiens
cgcctcggcctccca

SEQ ID NO: 251276 - DNA, 15 bp, Homo sapiens
ccgcctcggcctccc

SEQ ID NO: 251277 - DNA, 15 bp, Homo sapiens
cccgcctcggcctcc

SEQ ID NO: 251278 - DNA, 15 bp, Homo sapiens
gcccgcctcggcctc

SEQ ID NO: 251279 - DNA, 15 bp, Homo sapiens
cgcccgcctcggcct

SEQ ID NO: 251280 - DNA, 15 bp, Homo sapiens
ccgcccgcctcggcc

SEQ ID NO: 251281 - DNA, 15 bp, Homo sapiens
tccgcccgcctcggc

SEQ ID NO: 251282 - DNA, 15 bp, Homo sapiens
atccgcccgcctcgg

SEQ ID NO: 251283 - DNA, 15 bp, Homo sapiens
gatccgcccgcctcg

SEQ ID NO: 251284 - DNA, 15 bp, Homo sapiens
gtttttgtattttta

SEQ ID NO: 251285 - DNA, 15 bp, Homo sapiens
tgtttttgtattttt

SEQ ID NO: 251286 - DNA, 15 bp, Homo sapiens
ttgtttttgtatttt

SEQ ID NO: 251287 - DNA, 15 bp, Homo sapiens
tttgtttttgtattt

SEQ ID NO: 251288 - DNA, 15 bp, Homo sapiens
ttttgtttttgtatt

SEQ ID NO: 251289 - DNA, 15 bp, Homo sapiens
attttgtttttgtat

SEQ ID NO: 251290 - DNA, 15 bp, Homo sapiens
aattttgtttttgta

SEQ ID NO: 251291 - DNA, 15 bp, Homo sapiens
taattttgtttttgt

SEQ ID NO: 251292 - DNA, 15 bp, Homo sapiens
ctaattttgtttttg

SEQ ID NO: 251293 - DNA, 15 bp, Homo sapiens
gctaattttgttttt

SEQ ID NO: 251294 - DNA, 15 bp, Homo sapiens
ggctaattttgtttt

SEQ ID NO: 251295 - DNA, 15 bp, Homo sapiens
cggctaattttgttt

SEQ ID NO: 251296 - DNA, 15 bp, Homo sapiens
ccggctaattttgtt

SEQ ID NO: 251297 - DNA, 15 bp, Homo sapiens
acccggctaattttg

SEQ ID NO: 251298 - DNA, 15 bp, Homo sapiens
cgcctgccaccacac

SEQ ID NO: 251299 - DNA, 15 bp, Homo sapiens
gcgcctgccaccaca

SEQ ID NO: 251300 - DNA, 15 bp, Homo sapiens
ggcgcctgccaccac

SEQ ID NO: 251301 - DNA, 15 bp, Homo sapiens
aggcgcctgccacca

SEQ ID NO: 251302 - DNA, 15 bp, Homo sapiens
caggcgcctgccacc

SEQ ID NO: 251303 - DNA, 15 bp, Homo sapiens
acaggcgcctgccac

SEQ ID NO: 251304 - DNA, 15 bp, Homo sapiens
tacaggcgcctgcca

SEQ ID NO: 251305 - DNA, 15 bp, Homo sapiens
ctacaggcgcctgcc

SEQ ID NO: 251306 - DNA, 15 bp, Homo sapiens
actacaggcgcctgc

SEQ ID NO: 251307 - DNA, 15 bp, Homo sapiens
gactacaggcgcctg

SEQ ID NO: 251308 - DNA, 15 bp, Homo sapiens
ggactacaggcgcct

SEQ ID NO: 251309 - DNA, 15 bp, Homo sapiens
cgcctcagcctcccg

SEQ ID NO: 251310 - DNA, 15 bp, Homo sapiens
tcccgcctcagcctc

SEQ ID NO: 251311 - DNA, 15 bp, Homo sapiens
tctcccgcctcagcc

SEQ ID NO: 251312 - DNA, 15 bp, Homo sapiens
ttctcccgcctcagc

SEQ ID NO: 251313 - DNA, 15 bp, Homo sapiens
attctcccgcctcag

SEQ ID NO: 251314 - DNA, 15 bp, Homo sapiens
cattctcccgcctca

SEQ ID NO: 251315 - DNA, 15 bp, Homo sapiens
ccattctcccgcctc

SEQ ID NO: 251316 - DNA, 15 bp, Homo sapiens
gccattctcccgcct

SEQ ID NO: 251317 - DNA, 15 bp, Homo sapiens
cgccattctcccgcc

SEQ ID NO: 251318 - DNA, 15 bp, Homo sapiens
acgccattctcccgc

SEQ ID NO: 251319 - DNA, 15 bp, Homo sapiens
cacgccattctcccg

SEQ ID NO: 251320 - DNA, 15 bp, Homo sapiens
tcacgccattctccc

SEQ ID NO: 251321 - DNA, 15 bp, Homo sapiens
gcgatcttggctcac

SEQ ID NO: 251322 - DNA, 15 bp, Homo sapiens
cgcgatcttggctca

SEQ ID NO: 251323 - DNA, 15 bp, Homo sapiens
gcgcgatcttggctc

SEQ ID NO: 251324 - DNA, 15 bp, Homo sapiens
ggcgcgatcttggct

SEQ ID NO: 251325 - DNA, 15 bp, Homo sapiens
tggcgcgatcttggc

SEQ ID NO: 251326 - DNA, 15 bp, Homo sapiens
gtggcgcgatcttgg

SEQ ID NO: 251327 - DNA, 15 bp, Homo sapiens
agtggcgcgatcttg

SEQ ID NO: 251328 - DNA, 15 bp, Homo sapiens
cagtggcgcgatctt

SEQ ID NO: 251329 - DNA, 15 bp, Homo sapiens
ggtcacccaggctgg

SEQ ID NO: 251330 - DNA, 15 bp, Homo sapiens
cggtcacccaggctg

SEQ ID NO: 251331 - DNA, 15 bp, Homo sapiens
tcggtcacccaggct

SEQ ID NO: 251332 - DNA, 15 bp, Homo sapiens
ctcggtcacccaggc

SEQ ID NO: 251333 - DNA, 15 bp, Homo sapiens
actcggtcacccagg

SEQ ID NO: 251334 - DNA, 15 bp, Homo sapiens
aactcggtcacccag

SEQ ID NO: 251335 - DNA, 15 bp, Homo sapiens
caactcggtcaccca

SEQ ID NO: 251336 - DNA, 15 bp, Homo sapiens
tcaactcggtcaccc

SEQ ID NO: 251337 - DNA, 15 bp, Homo sapiens
ctcaactcggtcacc

SEQ ID NO: 251338 - DNA, 15 bp, Homo sapiens
tctcaactcggtcac

SEQ ID NO: 251339 - DNA, 15 bp, Homo sapiens
gtctcaactcggtca

SEQ ID NO: 251340 - DNA, 15 bp, Homo sapiens
agtctcaactcggtc

SEQ ID NO: 251341 - DNA, 15 bp, Homo sapiens
gagtctcaactcggt

SEQ ID NO: 251342 - DNA, 15 bp, Homo sapiens
ggagtctcaactcgg

SEQ ID NO: 251343 - DNA, 15 bp, Homo sapiens
cggagtctcaactcg

SEQ ID NO: 251344 - DNA, 15 bp, Homo sapiens
acggagtctcaactc

SEQ ID NO: 251345 - DNA, 15 bp, Homo sapiens
gacggagtctcaact

SEQ ID NO: 251346 - DNA, 15 bp, Homo sapiens
agacggagtctcaac

SEQ ID NO: 251347 - DNA, 15 bp, Homo sapiens
gagacggagtctcaa

SEQ ID NO: 251348 - DNA, 15 bp, Homo sapiens
tggctactttttgta

SEQ ID NO: 251349 - DNA, 15 bp, Homo sapiens
ctggctactttttgt

SEQ ID NO: 251350 - DNA, 15 bp, Homo sapiens
cctggctactttttg

SEQ ID NO: 251351 - DNA, 15 bp, Homo sapiens
acctggctacttttt

SEQ ID NO: 251352 - DNA, 15 bp, Homo sapiens
cacctggctactttt

SEQ ID NO: 251353 - DNA, 15 bp, Homo sapiens
acacctggctacttt

SEQ ID NO: 251354 - DNA, 15 bp, Homo sapiens
cacacctggctactt

SEQ ID NO: 251355 - DNA, 15 bp, Homo sapiens
ccacacctggctact

SEQ ID NO: 251356 - DNA, 15 bp, Homo sapiens
accacacctggctac

SEQ ID NO: 251357 - DNA, 15 bp, Homo sapiens
tgccaccacacctgg

SEQ ID NO: 251358 - DNA, 15 bp, Homo sapiens
ctgccaccacacctg

SEQ ID NO: 251359 - DNA, 15 bp, Homo sapiens
cctgccaccacacct

SEQ ID NO: 251360 - DNA, 15 bp, Homo sapiens
tacaggtgcctgcca

SEQ ID NO: 251361 - DNA, 15 bp, Homo sapiens
ttacaggtgcctgcc

SEQ ID NO: 251362 - DNA, 15 bp, Homo sapiens
attacaggtgcctgc

SEQ ID NO: 251363 - DNA, 15 bp, Homo sapiens
gattacaggtgcctg

SEQ ID NO: 251364 - DNA, 15 bp, Homo sapiens
ggattacaggtgcct

SEQ ID NO: 251365 - DNA, 15 bp, Homo sapiens
aggattacaggtgcc

SEQ ID NO: 251366 - DNA, 15 bp, Homo sapiens
caggattacaggtgc

SEQ ID NO: 251367 - DNA, 15 bp, Homo sapiens
ccaggattacaggtg

SEQ ID NO: 251368 - DNA, 15 bp, Homo sapiens
cccaggattacaggt

SEQ ID NO: 251369 - DNA, 15 bp, Homo sapiens
acccaggattacagg

SEQ ID NO: 251370 - DNA, 15 bp, Homo sapiens
aacccaggattacag

SEQ ID NO: 251371 - DNA, 15 bp, Homo sapiens
gaacccaggattaca

SEQ ID NO: 251372 - DNA, 15 bp, Homo sapiens
agaacccaggattac

SEQ ID NO: 251373 - DNA, 15 bp, Homo sapiens
gagaacccaggatta

SEQ ID NO: 251374 - DNA, 15 bp, Homo sapiens
cgagaacccaggatt

SEQ ID NO: 251375 - DNA, 15 bp, Homo sapiens
tcgagaacccaggat

SEQ ID NO: 251376 - DNA, 15 bp, Homo sapiens
ctcgagaacccagga

SEQ ID NO: 251377 - DNA, 15 bp, Homo sapiens
tctcgagaacccagg

SEQ ID NO: 251378 - DNA, 15 bp, Homo sapiens
gtctcgagaacccag

SEQ ID NO: 251379 - DNA, 15 bp, Homo sapiens
ggtctcgagaaccca

SEQ ID NO: 251380 - DNA, 15 bp, Homo sapiens
cggtctcgagaaccc

SEQ ID NO: 251381 - DNA, 15 bp, Homo sapiens
tcggtctcgagaacc

SEQ ID NO: 251382 - DNA, 15 bp, Homo sapiens
ctcggtctcgagaac

SEQ ID NO: 251383 - DNA, 15 bp, Homo sapiens
cctcggtctcgagaa

SEQ ID NO: 251384 - DNA, 15 bp, Homo sapiens
gcctcggtctcgaga

SEQ ID NO: 251385 - DNA, 15 bp, Homo sapiens
tgcctcggtctcgag

SEQ ID NO: 251386 - DNA, 15 bp, Homo sapiens
atgcctcggtctcga

SEQ ID NO: 251387 - DNA, 15 bp, Homo sapiens
catgcctcggtctcg

SEQ ID NO: 251388 - DNA, 15 bp, Homo sapiens
tcatgcctcggtctc

SEQ ID NO: 251389 - DNA, 15 bp, Homo sapiens
ctcatgcctcggtct

SEQ ID NO: 251390 - DNA, 15 bp, Homo sapiens
tctcatgcctcggtc

SEQ ID NO: 251391 - DNA, 15 bp, Homo sapiens
ttctcatgcctcggt

SEQ ID NO: 251392 - DNA, 15 bp, Homo sapiens
attctcatgcctcgg

SEQ ID NO: 251393 - DNA, 15 bp, Homo sapiens
aattctcatgcctcg

SEQ ID NO: 251394 - DNA, 15 bp, Homo sapiens
caattctcatgcctc

SEQ ID NO: 251395 - DNA, 15 bp, Homo sapiens
gcaattctcatgcct

SEQ ID NO: 251396 - DNA, 15 bp, Homo sapiens
ggcaattctcatgcc

SEQ ID NO: 251397 - DNA, 15 bp, Homo sapiens
aggcaattctcatgc

SEQ ID NO: 251398 - DNA, 15 bp, Homo sapiens
caggcaattctcatg

SEQ ID NO: 251399 - DNA, 15 bp, Homo sapiens
tcaggcaattctcat

SEQ ID NO: 251400 - DNA, 15 bp, Homo sapiens
gtcaggcaattctca

SEQ ID NO: 251401 - DNA, 15 bp, Homo sapiens
ggtcaggcaattctc

SEQ ID NO: 251402 - DNA, 15 bp, Homo sapiens
gggtcaggcaattct

SEQ ID NO: 251403 - DNA, 15 bp, Homo sapiens
ggggtcaggcaattc

SEQ ID NO: 251404 - DNA, 15 bp, Homo sapiens
tggggtcaggcaatt

SEQ ID NO: 251405 - DNA, 15 bp, Homo sapiens
ctggggtcaggcaat

SEQ ID NO: 251406 - DNA, 15 bp, Homo sapiens
cctggggtcaggcaa

SEQ ID NO: 251407 - DNA, 15 bp, Homo sapiens
tcctggggtcaggca

SEQ ID NO: 251408 - DNA, 15 bp, Homo sapiens
ctcctggggtcaggc

SEQ ID NO: 251409 - DNA, 15 bp, Homo sapiens
cctcctggggtcagg

SEQ ID NO: 251410 - DNA, 15 bp, Homo sapiens
acctcctggggtcag

SEQ ID NO: 251411 - DNA, 15 bp, Homo sapiens
cacctcctggggtca

SEQ ID NO: 251412 - DNA, 15 bp, Homo sapiens
ccacctcctggggtc

SEQ ID NO: 251413 - DNA, 15 bp, Homo sapiens
tccacctcctggggt

SEQ ID NO: 251414 - DNA, 15 bp, Homo sapiens
ctccacctcctgggg

SEQ ID NO: 251415 - DNA, 15 bp, Homo sapiens
gcctccacctcctgg

SEQ ID NO: 251416 - DNA, 15 bp, Homo sapiens
agcctccacctcctg

SEQ ID NO: 251417 - DNA, 15 bp, Homo sapiens
cagcctccacctcct

SEQ ID NO: 251418 - DNA, 15 bp, Homo sapiens
gcagcctccacctcc

SEQ ID NO: 251419 - DNA, 15 bp, Homo sapiens
tgcagcctccacctc

SEQ ID NO: 251420 - DNA, 15 bp, Homo sapiens
ctgcagcctccacct

SEQ ID NO: 251421 - DNA, 15 bp, Homo sapiens
actgcagcctccacc

SEQ ID NO: 251422 - DNA, 15 bp, Homo sapiens
cactgcagcctccac

SEQ ID NO: 251423 - DNA, 15 bp, Homo sapiens
tcactgcagcctcca

SEQ ID NO: 251424 - DNA, 15 bp, Homo sapiens
ctcactgcagcctcc

SEQ ID NO: 251425 - DNA, 15 bp, Homo sapiens
gctcactgcagcctc

SEQ ID NO: 251426 - DNA, 15 bp, Homo sapiens
ggctcactgcagcct

SEQ ID NO: 251427 - DNA, 15 bp, Homo sapiens
tggctcactgcagcc

SEQ ID NO: 251428 - DNA, 15 bp, Homo sapiens
ttggctcactgcagc

SEQ ID NO: 251429 - DNA, 15 bp, Homo sapiens
cttggctcactgcag

SEQ ID NO: 251430 - DNA, 15 bp, Homo sapiens
tgatcttggctcact

SEQ ID NO: 251431 - DNA, 15 bp, Homo sapiens
atgatcttggctcac

SEQ ID NO: 251432 - DNA, 15 bp, Homo sapiens
catgatcttggctca

SEQ ID NO: 251433 - DNA, 15 bp, Homo sapiens
gcatgatcttggctc

SEQ ID NO: 251434 - DNA, 15 bp, Homo sapiens
ggcatgatcttggct

SEQ ID NO: 251435 - DNA, 15 bp, Homo sapiens
tggcatgatcttggc

SEQ ID NO: 251436 - DNA, 15 bp, Homo sapiens
gtggcatgatcttgg

SEQ ID NO: 251437 - DNA, 15 bp, Homo sapiens
agtggcatgatcttg

SEQ ID NO: 251438 - DNA, 15 bp, Homo sapiens
cagtggcatgatctt

SEQ ID NO: 251439 - DNA, 15 bp, Homo sapiens
gcagtggcatgatct

SEQ ID NO: 251440 - DNA, 15 bp, Homo sapiens
tgcagtggcatgatc

SEQ ID NO: 251441 - DNA, 15 bp, Homo sapiens
gtgcagtggcatgat

SEQ ID NO: 251442 - DNA, 15 bp, Homo sapiens
ccactctgtcgccca

SEQ ID NO: 251443 - DNA, 15 bp, Homo sapiens
cccactctgtcgccc

SEQ ID NO: 251444 - DNA, 15 bp, Homo sapiens
tcccactctgtcgcc

SEQ ID NO: 251445 - DNA, 15 bp, Homo sapiens
gtcccactctgtcgc

SEQ ID NO: 251446 - DNA, 15 bp, Homo sapiens
agtcccactctgtcg

SEQ ID NO: 251447 - DNA, 15 bp, Homo sapiens
gagtcccactctgtc

SEQ ID NO: 251448 - DNA, 15 bp, Homo sapiens
agagtcccactctgt

SEQ ID NO: 251449 - DNA, 15 bp, Homo sapiens
cagagtcccactctg

SEQ ID NO: 251450 - DNA, 15 bp, Homo sapiens
acagagtcccactct

SEQ ID NO: 251451 - DNA, 15 bp, Homo sapiens
gacagagtcccactc

SEQ ID NO: 251452 - DNA, 15 bp, Homo sapiens
agacagagtcccact

SEQ ID NO: 251453 - DNA, 15 bp, Homo sapiens
gagacagagtcccac

SEQ ID NO: 251454 - DNA, 15 bp, Homo sapiens
tgagacagagtccca

SEQ ID NO: 251455 - DNA, 15 bp, Homo sapiens
ttgagacagagtccc

SEQ ID NO: 251456 - DNA, 15 bp, Homo sapiens
tttgagacagagtcc

SEQ ID NO: 251457 - DNA, 15 bp, Homo sapiens
gttttttgagacaga

SEQ ID NO: 251458 - DNA, 15 bp, Homo sapiens
tgttttttgagacag

SEQ ID NO: 251459 - DNA, 15 bp, Homo sapiens
ttgttttttgagaca

SEQ ID NO: 251460 - DNA, 15 bp, Homo sapiens
gttgttttttgagac

SEQ ID NO: 251461 - DNA, 15 bp, Homo sapiens
tgttgttttttgaga

SEQ ID NO: 251462 - DNA, 15 bp, Homo sapiens
ttgttgttttttgag

SEQ ID NO: 251463 - DNA, 15 bp, Homo sapiens
tttgttgttttttga

SEQ ID NO: 251464 - DNA, 15 bp, Homo sapiens
ttttgttgttttttg

SEQ ID NO: 251465 - DNA, 15 bp, Homo sapiens
tttttgttgtttttt

SEQ ID NO: 251466 - DNA, 15 bp, Homo sapiens
ttttttgttgttttt

SEQ ID NO: 251467 - DNA, 15 bp, Homo sapiens
tttttttgttgtttt

SEQ ID NO: 251468 - DNA, 15 bp, Homo sapiens
ttttttttgttgttt

SEQ ID NO: 251469 - DNA, 15 bp, Homo sapiens
tttttttttgttgtt

SEQ ID NO: 251470 - DNA, 15 bp, Homo sapiens
ctttttttttgttgt

SEQ ID NO: 251471 - DNA, 15 bp, Homo sapiens
actttttttttgttg

SEQ ID NO: 251472 - DNA, 15 bp, Homo sapiens
aactttttttttgtt

SEQ ID NO: 251473 - DNA, 15 bp, Homo sapiens
gaactttttttttgt

SEQ ID NO: 251474 - DNA, 15 bp, Homo sapiens
agaactttttttttg

SEQ ID NO: 251475 - DNA, 15 bp, Homo sapiens
cagaacttttttttt

SEQ ID NO: 251476 - DNA, 15 bp, Homo sapiens
ccagaactttttttt

SEQ ID NO: 251477 - DNA, 15 bp, Homo sapiens
tccagaacttttttt

SEQ ID NO: 251478 - DNA, 15 bp, Homo sapiens
ttccagaactttttt

SEQ ID NO: 251479 - DNA, 15 bp, Homo sapiens
tttccagaacttttt

SEQ ID NO: 251480 - DNA, 15 bp, Homo sapiens
atttccagaactttt

SEQ ID NO: 251481 - DNA, 15 bp, Homo sapiens
catttccagaacttt

SEQ ID NO: 251482 - DNA, 15 bp, Homo sapiens
ccatttccagaactt

SEQ ID NO: 251483 - DNA, 15 bp, Homo sapiens
tccatttccagaact

SEQ ID NO: 251484 - DNA, 15 bp, Homo sapiens
atccatttccagaac

SEQ ID NO: 251485 - DNA, 15 bp, Homo sapiens
catccatttccagaa

SEQ ID NO: 251486 - DNA, 15 bp, Homo sapiens
ccatccatttccaga

SEQ ID NO: 251487 - DNA, 15 bp, Homo sapiens
accatccatttccag

SEQ ID NO: 251488 - DNA, 15 bp, Homo sapiens
caccatccatttcca

SEQ ID NO: 251489 - DNA, 15 bp, Homo sapiens
ccaccatccatttcc

SEQ ID NO: 251490 - DNA, 15 bp, Homo sapiens
accaccatccatttc

SEQ ID NO: 251491 - DNA, 15 bp, Homo sapiens
caccaccatccattt

SEQ ID NO: 251492 - DNA, 15 bp, Homo sapiens
tcaccaccatccatt

SEQ ID NO: 251493 - DNA, 15 bp, Homo sapiens
atcaccaccatccat

SEQ ID NO: 251494 - DNA, 15 bp, Homo sapiens
catcaccaccatcca

SEQ ID NO: 251495 - DNA, 15 bp, Homo sapiens
ccatcaccaccatcc

SEQ ID NO: 251496 - DNA, 15 bp, Homo sapiens
accatcaccaccatc

SEQ ID NO: 251497 - DNA, 15 bp, Homo sapiens
caccatcaccaccat

SEQ ID NO: 251498 - DNA, 15 bp, Homo sapiens
tcaccatcaccacca

SEQ ID NO: 251499 - DNA, 15 bp, Homo sapiens
atcaccatcaccacc

SEQ ID NO: 251500 - DNA, 15 bp, Homo sapiens
tatcaccatcaccac

SEQ ID NO: 251501 - DNA, 15 bp, Homo sapiens
gtatcaccatcacca

SEQ ID NO: 251502 - DNA, 15 bp, Homo sapiens
agtatcaccatcacc

SEQ ID NO: 251503 - DNA, 15 bp, Homo sapiens
aagtatcaccatcac

SEQ ID NO: 251504 - DNA, 15 bp, Homo sapiens
gaagtatcaccatca

SEQ ID NO: 251505 - DNA, 15 bp, Homo sapiens
ggaagtatcaccatc

SEQ ID NO: 251506 - DNA, 15 bp, Homo sapiens
tggaagtatcaccat

SEQ ID NO: 251507 - DNA, 15 bp, Homo sapiens
gtggaagtatcacca

SEQ ID NO: 251508 - DNA, 15 bp, Homo sapiens
tgtggaagtatcacc

SEQ ID NO: 251509 - DNA, 15 bp, Homo sapiens
ttgtggaagtatcac

SEQ ID NO: 251510 - DNA, 15 bp, Homo sapiens
gttgtggaagtatca

SEQ ID NO: 251511 - DNA, 15 bp, Homo sapiens
tgttgtggaagtatc

SEQ ID NO: 251512 - DNA, 15 bp, Homo sapiens
ctgttgtggaagtat

SEQ ID NO: 251513 - DNA, 15 bp, Homo sapiens
gctgttgtggaagta

SEQ ID NO: 251514 - DNA, 15 bp, Homo sapiens
cgctgttgtggaagt

SEQ ID NO: 251515 - DNA, 15 bp, Homo sapiens
acgctgttgtggaag

SEQ ID NO: 251516 - DNA, 15 bp, Homo sapiens
cacgctgttgtggaa

SEQ ID NO: 251517 - DNA, 15 bp, Homo sapiens
tcacgctgttgtgga

SEQ ID NO: 251518 - DNA, 15 bp, Homo sapiens
ttcacgctgttgtgg

SEQ ID NO: 251519 - DNA, 15 bp, Homo sapiens
attcacgctgttgtg

SEQ ID NO: 251520 - DNA, 15 bp, Homo sapiens
gattcacgctgttgt

SEQ ID NO: 251521 - DNA, 15 bp, Homo sapiens
agattcacgctgttg

SEQ ID NO: 251522 - DNA, 15 bp, Homo sapiens
cagattcacgctgtt

SEQ ID NO: 251523 - DNA, 15 bp, Homo sapiens
gcagattcacgctgt

SEQ ID NO: 251524 - DNA, 15 bp, Homo sapiens
agcagattcacgctg

SEQ ID NO: 251525 - DNA, 15 bp, Homo sapiens
aagcagattcacgct

SEQ ID NO: 251526 - DNA, 15 bp, Homo sapiens
taagcagattcacgc

SEQ ID NO: 251527 - DNA, 15 bp, Homo sapiens
ttaagcagattcacg

SEQ ID NO: 251528 - DNA, 15 bp, Homo sapiens
cttaagcagattcac

SEQ ID NO: 251529 - DNA, 15 bp, Homo sapiens
ccttaagcagattca

SEQ ID NO: 251530 - DNA, 15 bp, Homo sapiens
gccttaagcagattc

SEQ ID NO: 251531 - DNA, 15 bp, Homo sapiens
ggccttaagcagatt

SEQ ID NO: 251532 - DNA, 15 bp, Homo sapiens
tggccttaagcagat

SEQ ID NO: 251533 - DNA, 15 bp, Homo sapiens
gtggccttaagcaga

SEQ ID NO: 251534 - DNA, 15 bp, Homo sapiens
ggtggccttaagcag

SEQ ID NO: 251535 - DNA, 15 bp, Homo sapiens
cggtggccttaagca

SEQ ID NO: 251536 - DNA, 15 bp, Homo sapiens
tcggtggccttaagc

SEQ ID NO: 251537 - DNA, 15 bp, Homo sapiens
ttcggtggccttaag

SEQ ID NO: 251538 - DNA, 15 bp, Homo sapiens
gttcggtggccttaa

SEQ ID NO: 251539 - DNA, 15 bp, Homo sapiens
agttcggtggcctta

SEQ ID NO: 251540 - DNA, 15 bp, Homo sapiens
cagttcggtggcctt

SEQ ID NO: 251541 - DNA, 15 bp, Homo sapiens
acagttcggtggcct

SEQ ID NO: 251542 - DNA, 15 bp, Homo sapiens
cacagttcggtggcc

SEQ ID NO: 251543 - DNA, 15 bp, Homo sapiens
gcacagttcggtggc

SEQ ID NO: 251544 - DNA, 15 bp, Homo sapiens
tgcacagttcggtgg

SEQ ID NO: 251545 - DNA, 15 bp, Homo sapiens
gtgcacagttcggtg

SEQ ID NO: 251546 - DNA, 15 bp, Homo sapiens
agtgcacagttcggt

SEQ ID NO: 251547 - DNA, 15 bp, Homo sapiens
gagtgcacagttcgg

SEQ ID NO: 251548 - DNA, 15 bp, Homo sapiens
tgagtgcacagttcg

SEQ ID NO: 251549 - DNA, 15 bp, Homo sapiens
gtgagtgcacagttc

SEQ ID NO: 251550 - DNA, 15 bp, Homo sapiens
tgtgagtgcacagtt

SEQ ID NO: 251551 - DNA, 15 bp, Homo sapiens
ttgtgagtgcacagt

SEQ ID NO: 251552 - DNA, 15 bp, Homo sapiens
tttgtgagtgcacag

SEQ ID NO: 251553 - DNA, 15 bp, Homo sapiens
atttgtgagtgcaca

SEQ ID NO: 251554 - DNA, 15 bp, Homo sapiens
tatttgtgagtgcac

SEQ ID NO: 251555 - DNA, 15 bp, Homo sapiens
ctatttgtgagtgca

SEQ ID NO: 251556 - DNA, 15 bp, Homo sapiens
actatttgtgagtgc

SEQ ID NO: 251557 - DNA, 15 bp, Homo sapiens
gactatttgtgagtg

SEQ ID NO: 251558 - DNA, 15 bp, Homo sapiens
cgactatttgtgagt

SEQ ID NO: 251559 - DNA, 15 bp, Homo sapiens
tcgactatttgtgag

SEQ ID NO: 251560 - DNA, 15 bp, Homo sapiens
ctcgactatttgtga

SEQ ID NO: 251561 - DNA, 15 bp, Homo sapiens
tctcgactatttgtg

SEQ ID NO: 251562 - DNA, 15 bp, Homo sapiens
atctcgactatttgt

SEQ ID NO: 251563 - DNA, 15 bp, Homo sapiens
catctcgactatttg

SEQ ID NO: 251564 - DNA, 15 bp, Homo sapiens
ccatctcgactattt

SEQ ID NO: 251565 - DNA, 15 bp, Homo sapiens
accatctcgactatt

SEQ ID NO: 251566 - DNA, 15 bp, Homo sapiens
taccatctcgactat

SEQ ID NO: 251567 - DNA, 15 bp, Homo sapiens
gtaccatctcgacta

SEQ ID NO: 251568 - DNA, 15 bp, Homo sapiens
tgtaccatctcgact

SEQ ID NO: 251569 - DNA, 15 bp, Homo sapiens
atgtaccatctcgac

SEQ ID NO: 251570 - DNA, 15 bp, Homo sapiens
aatgtaccatctcga

SEQ ID NO: 251571 - DNA, 15 bp, Homo sapiens
aaatgtaccatctcg

SEQ ID NO: 251572 - DNA, 15 bp, Homo sapiens
aaaatgtaccatctc

SEQ ID NO: 251573 - DNA, 15 bp, Homo sapiens
taaaatgtaccatct

SEQ ID NO: 251574 - DNA, 15 bp, Homo sapiens
ataaaatgtaccatc

SEQ ID NO: 251575 - DNA, 15 bp, Homo sapiens
cataaaatgtaccat

SEQ ID NO: 251576 - DNA, 15 bp, Homo sapiens
acataaaatgtacca

SEQ ID NO: 251577 - DNA, 15 bp, Homo sapiens
aacataaaatgtacc

SEQ ID NO: 251578 - DNA, 15 bp, Homo sapiens
taacataaaatgtac

SEQ ID NO: 251579 - DNA, 15 bp, Homo sapiens
ataacataaaatgta

SEQ ID NO: 251580 - DNA, 15 bp, Homo sapiens
cataacataaaatgt

SEQ ID NO: 251581 - DNA, 15 bp, Homo sapiens
acataacataaaatg

SEQ ID NO: 251582 - DNA, 15 bp, Homo sapiens
cacataacataaaat

SEQ ID NO: 251583 - DNA, 15 bp, Homo sapiens
acacataacataaaa

SEQ ID NO: 251584 - DNA, 15 bp, Homo sapiens
tacacataacataaa

SEQ ID NO: 251585 - DNA, 15 bp, Homo sapiens
atacacataacataa

SEQ ID NO: 251586 - DNA, 15 bp, Homo sapiens
aatacacataacata

SEQ ID NO: 251587 - DNA, 15 bp, Homo sapiens
aaatacacataacat

SEQ ID NO: 251588 - DNA, 15 bp, Homo sapiens
gaaatacacataaca

SEQ ID NO: 251589 - DNA, 15 bp, Homo sapiens
tgaaatacacataac

SEQ ID NO: 251590 - DNA, 15 bp, Homo sapiens
gtgaaatacacataa

SEQ ID NO: 251591 - DNA, 15 bp, Homo sapiens
ggtgaaatacacata

SEQ ID NO: 251592 - DNA, 15 bp, Homo sapiens
tggtgaaatacacat

SEQ ID NO: 251593 - DNA, 15 bp, Homo sapiens
gtggtgaaatacaca

SEQ ID NO: 251594 - DNA, 15 bp, Homo sapiens
tgtggtgaaatacac

SEQ ID NO: 251595 - DNA, 15 bp, Homo sapiens
ttgtggtgaaataca

SEQ ID NO: 251596 - DNA, 15 bp, Homo sapiens
attgtggtgaaatac

SEQ ID NO: 251597 - DNA, 15 bp, Homo sapiens
aattgtggtgaaata

SEQ ID NO: 251598 - DNA, 15 bp, Homo sapiens
taattgtggtgaaat

SEQ ID NO: 251599 - DNA, 15 bp, Homo sapiens
ttaattgtggtgaaa

SEQ ID NO: 251600 - DNA, 15 bp, Homo sapiens
tttaattgtggtgaa

SEQ ID NO: 251601 - DNA, 15 bp, Homo sapiens
ttttaattgtggtga

SEQ ID NO: 251602 - DNA, 15 bp, Homo sapiens
tttttaattgtggtg

SEQ ID NO: 251603 - DNA, 15 bp, Homo sapiens
gtttttaattgtggt

SEQ ID NO: 251604 - DNA, 15 bp, Homo sapiens
agtttttaattgtgg

SEQ ID NO: 251605 - DNA, 15 bp, Homo sapiens
tagtttttaattgtg

SEQ ID NO: 251606 - DNA, 15 bp, Homo sapiens
ctagtttttaattgt

SEQ ID NO: 251607 - DNA, 15 bp, Homo sapiens
actagtttttaattg

SEQ ID NO: 251608 - DNA, 15 bp, Homo sapiens
aactagtttttaatt

SEQ ID NO: 251609 - DNA, 15 bp, Homo sapiens
caactagtttttaat

SEQ ID NO: 251610 - DNA, 15 bp, Homo sapiens
acaactagtttttaa

SEQ ID NO: 251611 - DNA, 15 bp, Homo sapiens
cacaactagttttta

SEQ ID NO: 251612 - DNA, 15 bp, Homo sapiens
ccacaactagttttt

SEQ ID NO: 251613 - DNA, 15 bp, Homo sapiens
cccacaactagtttt

SEQ ID NO: 251614 - DNA, 15 bp, Homo sapiens
gcccacaactagttt

SEQ ID NO: 251615 - DNA, 15 bp, Homo sapiens
ggcccacaactagtt

SEQ ID NO: 251616 - DNA, 15 bp, Homo sapiens
tggcccacaactagt

SEQ ID NO: 251617 - DNA, 15 bp, Homo sapiens
ctggcccacaactag

SEQ ID NO: 251618 - DNA, 15 bp, Homo sapiens
cctggcccacaacta

SEQ ID NO: 251619 - DNA, 15 bp, Homo sapiens
acctggcccacaact

SEQ ID NO: 251620 - DNA, 15 bp, Homo sapiens
cacctggcccacaac

SEQ ID NO: 251621 - DNA, 15 bp, Homo sapiens
acacctggcccacaa

SEQ ID NO: 251622 - DNA, 15 bp, Homo sapiens
cacacctggcccaca

SEQ ID NO: 251623 - DNA, 15 bp, Homo sapiens
ccacacctggcccac

SEQ ID NO: 251624 - DNA, 15 bp, Homo sapiens
accacacctggccca

SEQ ID NO: 251625 - DNA, 15 bp, Homo sapiens
caccacacctggccc

SEQ ID NO: 251626 - DNA, 15 bp, Homo sapiens
ccaccacacctggcc

SEQ ID NO: 251627 - DNA, 15 bp, Homo sapiens
accaccacacctggc

SEQ ID NO: 251628 - DNA, 15 bp, Homo sapiens
aaccaccacacctgg

SEQ ID NO: 251629 - DNA, 15 bp, Homo sapiens
gaaccaccacacctg

SEQ ID NO: 251630 - DNA, 15 bp, Homo sapiens
tgaaccaccacacct

SEQ ID NO: 251631 - DNA, 15 bp, Homo sapiens
atgaaccaccacacc

SEQ ID NO: 251632 - DNA, 15 bp, Homo sapiens
catgaaccaccacac

SEQ ID NO: 251633 - DNA, 15 bp, Homo sapiens
gcatgaaccaccaca

SEQ ID NO: 251634 - DNA, 15 bp, Homo sapiens
ggcatgaaccaccac

SEQ ID NO: 251635 - DNA, 15 bp, Homo sapiens
aggcatgaaccacca

SEQ ID NO: 251636 - DNA, 15 bp, Homo sapiens
caggcatgaaccacc

SEQ ID NO: 251637 - DNA, 15 bp, Homo sapiens
acaggcatgaaccac

SEQ ID NO: 251638 - DNA, 15 bp, Homo sapiens
tacaggcatgaacca

SEQ ID NO: 251639 - DNA, 15 bp, Homo sapiens
ttacaggcatgaacc

SEQ ID NO: 251640 - DNA, 15 bp, Homo sapiens
attacaggcatgaac

SEQ ID NO: 251641 - DNA, 15 bp, Homo sapiens
gattacaggcatgaa

SEQ ID NO: 251642 - DNA, 15 bp, Homo sapiens
tgacctcccaaagtg

SEQ ID NO: 251643 - DNA, 15 bp, Homo sapiens
ctgacctcccaaagt

SEQ ID NO: 251644 - DNA, 15 bp, Homo sapiens
tctgacctcccaaag

SEQ ID NO: 251645 - DNA, 15 bp, Homo sapiens
ctctgacctcccaaa

SEQ ID NO: 251646 - DNA, 15 bp, Homo sapiens
cctctgacctcccaa

SEQ ID NO: 251647 - DNA, 15 bp, Homo sapiens
ccctctgacctccca

SEQ ID NO: 251648 - DNA, 15 bp, Homo sapiens
tccctctgacctccc

SEQ ID NO: 251649 - DNA, 15 bp, Homo sapiens
ctccctctgacctcc

SEQ ID NO: 251650 - DNA, 15 bp, Homo sapiens
cctccctctgacctc

SEQ ID NO: 251651 - DNA, 15 bp, Homo sapiens
acctccctctgacct

SEQ ID NO: 251652 - DNA, 15 bp, Homo sapiens
cacctccctctgacc

SEQ ID NO: 251653 - DNA, 15 bp, Homo sapiens
ccacctccctctgac

SEQ ID NO: 251654 - DNA, 15 bp, Homo sapiens
tccacctccctctga

SEQ ID NO: 251655 - DNA, 15 bp, Homo sapiens
atccacctccctctg

SEQ ID NO: 251656 - DNA, 15 bp, Homo sapiens
gatccacctccctct

SEQ ID NO: 251657 - DNA, 15 bp, Homo sapiens
tgatccacctccctc

SEQ ID NO: 251658 - DNA, 15 bp, Homo sapiens
atgatccacctccct

SEQ ID NO: 251659 - DNA, 15 bp, Homo sapiens
catgatccacctccc

SEQ ID NO: 251660 - DNA, 15 bp, Homo sapiens
tcatgatccacctcc

SEQ ID NO: 251661 - DNA, 15 bp, Homo sapiens
ctcatgatccacctc

SEQ ID NO: 251662 - DNA, 15 bp, Homo sapiens
cctcatgatccacct

SEQ ID NO: 251663 - DNA, 15 bp, Homo sapiens
acctcatgatccacc

SEQ ID NO: 251664 - DNA, 15 bp, Homo sapiens
gacctcatgatccac

SEQ ID NO: 251665 - DNA, 15 bp, Homo sapiens
tgacctcatgatcca

SEQ ID NO: 251666 - DNA, 15 bp, Homo sapiens
gctgacctcatgatc

SEQ ID NO: 251667 - DNA, 15 bp, Homo sapiens
tgctgacctcatgat

SEQ ID NO: 251668 - DNA, 15 bp, Homo sapiens
ctgctgacctcatga

SEQ ID NO: 251669 - DNA, 15 bp, Homo sapiens
actgctgacctcatg

SEQ ID NO: 251670 - DNA, 15 bp, Homo sapiens
aactgctgacctcat

SEQ ID NO: 251671 - DNA, 15 bp, Homo sapiens
gaactgctgacctca

SEQ ID NO: 251672 - DNA, 15 bp, Homo sapiens
cgaactgctgacctc

SEQ ID NO: 251673 - DNA, 15 bp, Homo sapiens
tcgaactgctgacct

SEQ ID NO: 251674 - DNA, 15 bp, Homo sapiens
ctcgaactgctgacc

SEQ ID NO: 251675 - DNA, 15 bp, Homo sapiens
tctcgaactgctgac

SEQ ID NO: 251676 - DNA, 15 bp, Homo sapiens
gtctcgaactgctga

SEQ ID NO: 251677 - DNA, 15 bp, Homo sapiens
ggtctcgaactgctg

SEQ ID NO: 251678 - DNA, 15 bp, Homo sapiens
tggtctcgaactgct

SEQ ID NO: 251679 - DNA, 15 bp, Homo sapiens
ctggtctcgaactgc

SEQ ID NO: 251680 - DNA, 15 bp, Homo sapiens
gctggtctcgaactg

SEQ ID NO: 251681 - DNA, 15 bp, Homo sapiens
tggctggtctcgaac

SEQ ID NO: 251682 - DNA, 15 bp, Homo sapiens
ctggctggtctcgaa

SEQ ID NO: 251683 - DNA, 15 bp, Homo sapiens
cctggctggtctcga

SEQ ID NO: 251684 - DNA, 15 bp, Homo sapiens
gcctggctggtctcg

SEQ ID NO: 251685 - DNA, 15 bp, Homo sapiens
ggcctggctggtctc

SEQ ID NO: 251686 - DNA, 15 bp, Homo sapiens
tggcctggctggtct

SEQ ID NO: 251687 - DNA, 15 bp, Homo sapiens
ttggcctggctggtc

SEQ ID NO: 251688 - DNA, 15 bp, Homo sapiens
gttggcctggctggt

SEQ ID NO: 251689 - DNA, 15 bp, Homo sapiens
tgttggcctggctgg

SEQ ID NO: 251690 - DNA, 15 bp, Homo sapiens
atgttggcctggctg

SEQ ID NO: 251691 - DNA, 15 bp, Homo sapiens
catgttggcctggct

SEQ ID NO: 251692 - DNA, 15 bp, Homo sapiens
ccatgttggcctggc

SEQ ID NO: 251693 - DNA, 15 bp, Homo sapiens
accatgttggcctgg

SEQ ID NO: 251694 - DNA, 15 bp, Homo sapiens
caccatgttggcctg

SEQ ID NO: 251695 - DNA, 15 bp, Homo sapiens
tcaccatgttggcct

SEQ ID NO: 251696 - DNA, 15 bp, Homo sapiens
tttttagtagagatg

SEQ ID NO: 251697 - DNA, 15 bp, Homo sapiens
atttttagtagagat

SEQ ID NO: 251698 - DNA, 15 bp, Homo sapiens
tggctaatttttgta

SEQ ID NO: 251699 - DNA, 15 bp, Homo sapiens
ctggctaatttttgt

SEQ ID NO: 251700 - DNA, 15 bp, Homo sapiens
cctggctaatttttg

SEQ ID NO: 251701 - DNA, 15 bp, Homo sapiens
tgtgccaccacgcct

SEQ ID NO: 251702 - DNA, 15 bp, Homo sapiens
atgtgccaccacgcc

SEQ ID NO: 251703 - DNA, 15 bp, Homo sapiens
catgtgccaccacgc

SEQ ID NO: 251704 - DNA, 15 bp, Homo sapiens
gcatgtgccaccacg

SEQ ID NO: 251705 - DNA, 15 bp, Homo sapiens
ggcatgtgccaccac

SEQ ID NO: 251706 - DNA, 15 bp, Homo sapiens
tcaagtagctgggac

SEQ ID NO: 251707 - DNA, 15 bp, Homo sapiens
ctcaagtagctggga

SEQ ID NO: 251708 - DNA, 15 bp, Homo sapiens
tctcaagtagctggg

SEQ ID NO: 251709 - DNA, 15 bp, Homo sapiens
ctctcaagtagctgg

SEQ ID NO: 251710 - DNA, 15 bp, Homo sapiens
cctctcaagtagctg

SEQ ID NO: 251711 - DNA, 15 bp, Homo sapiens
gcctctcaagtagct

SEQ ID NO: 251712 - DNA, 15 bp, Homo sapiens
agcctctcaagtagc

SEQ ID NO: 251713 - DNA, 15 bp, Homo sapiens
cagcctctcaagtag

SEQ ID NO: 251714 - DNA, 15 bp, Homo sapiens
tcagcctctcaagta

SEQ ID NO: 251715 - DNA, 15 bp, Homo sapiens
ttcagcctctcaagt

SEQ ID NO: 251716 - DNA, 15 bp, Homo sapiens
cttcagcctctcaag

SEQ ID NO: 251717 - DNA, 15 bp, Homo sapiens
gcttcagcctctcaa

SEQ ID NO: 251718 - DNA, 15 bp, Homo sapiens
tgcttcagcctctca

SEQ ID NO: 251719 - DNA, 15 bp, Homo sapiens
ctgcttcagcctctc

SEQ ID NO: 251720 - DNA, 15 bp, Homo sapiens
cctgcttcagcctct

SEQ ID NO: 251721 - DNA, 15 bp, Homo sapiens
tctcctgcttcagcc

SEQ ID NO: 251722 - DNA, 15 bp, Homo sapiens
ttctcctgcttcagc

SEQ ID NO: 251723 - DNA, 15 bp, Homo sapiens
attctcctgcttcag

SEQ ID NO: 251724 - DNA, 15 bp, Homo sapiens
gattctcctgcttca

SEQ ID NO: 251725 - DNA, 15 bp, Homo sapiens
cgattctcctgcttc

SEQ ID NO: 251726 - DNA, 15 bp, Homo sapiens
gcgattctcctgctt

SEQ ID NO: 251727 - DNA, 15 bp, Homo sapiens
agcgattctcctgct

SEQ ID NO: 251728 - DNA, 15 bp, Homo sapiens
agcctcccaggttca

SEQ ID NO: 251729 - DNA, 15 bp, Homo sapiens
tagcctcccaggttc

SEQ ID NO: 251730 - DNA, 15 bp, Homo sapiens
ttagcctcccaggtt

SEQ ID NO: 251731 - DNA, 15 bp, Homo sapiens
cttagcctcccaggt

SEQ ID NO: 251732 - DNA, 15 bp, Homo sapiens
tcttagcctcccagg

SEQ ID NO: 251733 - DNA, 15 bp, Homo sapiens
atcttagcctcccag

SEQ ID NO: 251734 - DNA, 15 bp, Homo sapiens
aatcttagcctccca

SEQ ID NO: 251735 - DNA, 15 bp, Homo sapiens
caatcttagcctccc

SEQ ID NO: 251736 - DNA, 15 bp, Homo sapiens
gcaatcttagcctcc

SEQ ID NO: 251737 - DNA, 15 bp, Homo sapiens
tgcaatcttagcctc

SEQ ID NO: 251738 - DNA, 15 bp, Homo sapiens
ctgcaatcttagcct

SEQ ID NO: 251739 - DNA, 15 bp, Homo sapiens
actgcaatcttagcc

SEQ ID NO: 251740 - DNA, 15 bp, Homo sapiens
cactgcaatcttagc

SEQ ID NO: 251741 - DNA, 15 bp, Homo sapiens
tcactgcaatcttag

SEQ ID NO: 251742 - DNA, 15 bp, Homo sapiens
ctcactgcaatctta

SEQ ID NO: 251743 - DNA, 15 bp, Homo sapiens
gctcactgcaatctt

SEQ ID NO: 251744 - DNA, 15 bp, Homo sapiens
ggctcactgcaatct

SEQ ID NO: 251745 - DNA, 15 bp, Homo sapiens
cggctcactgcaatc

SEQ ID NO: 251746 - DNA, 15 bp, Homo sapiens
tcggctcactgcaat

SEQ ID NO: 251747 - DNA, 15 bp, Homo sapiens
gtggcacgatctcgg

SEQ ID NO: 251748 - DNA, 15 bp, Homo sapiens
agtggcacgatctcg

SEQ ID NO: 251749 - DNA, 15 bp, Homo sapiens
cagtggcacgatctc

SEQ ID NO: 251750 - DNA, 15 bp, Homo sapiens
tccaggctggagtgc

SEQ ID NO: 251751 - DNA, 15 bp, Homo sapiens
gtccaggctggagtg

SEQ ID NO: 251752 - DNA, 15 bp, Homo sapiens
cgtccaggctggagt

SEQ ID NO: 251753 - DNA, 15 bp, Homo sapiens
tcgtccaggctggag

SEQ ID NO: 251754 - DNA, 15 bp, Homo sapiens
gtcgtccaggctgga

SEQ ID NO: 251755 - DNA, 15 bp, Homo sapiens
tgtcgtccaggctgg

SEQ ID NO: 251756 - DNA, 15 bp, Homo sapiens
ctgtcgtccaggctg

SEQ ID NO: 251757 - DNA, 15 bp, Homo sapiens
tctgtcgtccaggct

SEQ ID NO: 251758 - DNA, 15 bp, Homo sapiens
ctctgtcgtccaggc

SEQ ID NO: 251759 - DNA, 15 bp, Homo sapiens
actctgtcgtccagg

SEQ ID NO: 251760 - DNA, 15 bp, Homo sapiens
cactctgtcgtccag

SEQ ID NO: 251761 - DNA, 15 bp, Homo sapiens
tcactctgtcgtcca

SEQ ID NO: 251762 - DNA, 15 bp, Homo sapiens
ctcactctgtcgtcc

SEQ ID NO: 251763 - DNA, 15 bp, Homo sapiens
tctcactctgtcgtc

SEQ ID NO: 251764 - DNA, 15 bp, Homo sapiens
gtctcactctgtcgt

SEQ ID NO: 251765 - DNA, 15 bp, Homo sapiens
aagtctcactctgtc

SEQ ID NO: 251766 - DNA, 15 bp, Homo sapiens
gaagtctcactctgt

SEQ ID NO: 251767 - DNA, 15 bp, Homo sapiens
cgaagtctcactctg

SEQ ID NO: 251768 - DNA, 15 bp, Homo sapiens
gttttttttttgaga

SEQ ID NO: 251769 - DNA, 15 bp, Homo sapiens
ggttttttttttgag

SEQ ID NO: 251770 - DNA, 15 bp, Homo sapiens
tggttttttttttga

SEQ ID NO: 251771 - DNA, 15 bp, Homo sapiens
ttggttttttttttg

SEQ ID NO: 251772 - DNA, 15 bp, Homo sapiens
tttggtttttttttt

SEQ ID NO: 251773 - DNA, 15 bp, Homo sapiens
ttttggttttttttt

SEQ ID NO: 251774 - DNA, 15 bp, Homo sapiens
tttttggtttttttt

SEQ ID NO: 251775 - DNA, 15 bp, Homo sapiens
ttttttggttttttt

SEQ ID NO: 251776 - DNA, 15 bp, Homo sapiens
tttttttggtttttt

SEQ ID NO: 251777 - DNA, 15 bp, Homo sapiens
ttttttttggttttt

SEQ ID NO: 251778 - DNA, 15 bp, Homo sapiens
tttttttttggtttt

SEQ ID NO: 251779 - DNA, 15 bp, Homo sapiens
ttttttttttggttt

SEQ ID NO: 251780 - DNA, 15 bp, Homo sapiens
attttttttttggtt

SEQ ID NO: 251781 - DNA, 15 bp, Homo sapiens
aattttttttttggt

SEQ ID NO: 251782 - DNA, 15 bp, Homo sapiens
taattttttttttgg

SEQ ID NO: 251783 - DNA, 15 bp, Homo sapiens
ctaattttttttttg

SEQ ID NO: 251784 - DNA, 15 bp, Homo sapiens
gctaatttttttttt

SEQ ID NO: 251785 - DNA, 15 bp, Homo sapiens
agctaattttttttt

SEQ ID NO: 251786 - DNA, 15 bp, Homo sapiens
acagctaattttttt

SEQ ID NO: 251787 - DNA, 15 bp, Homo sapiens
cacagctaatttttt

SEQ ID NO: 251788 - DNA, 15 bp, Homo sapiens
ccacagctaattttt

SEQ ID NO: 251789 - DNA, 15 bp, Homo sapiens
cccacagctaatttt

SEQ ID NO: 251790 - DNA, 15 bp, Homo sapiens
acccacagctaattt

SEQ ID NO: 251791 - DNA, 15 bp, Homo sapiens
gacccacagctaatt

SEQ ID NO: 251792 - DNA, 15 bp, Homo sapiens
tgacccacagctaat

SEQ ID NO: 251793 - DNA, 15 bp, Homo sapiens
ctgacccacagctaa

SEQ ID NO: 251794 - DNA, 15 bp, Homo sapiens
cctgacccacagcta

SEQ ID NO: 251795 - DNA, 15 bp, Homo sapiens
gcctgacccacagct

SEQ ID NO: 251796 - DNA, 15 bp, Homo sapiens
tgcctgacccacagc

SEQ ID NO: 251797 - DNA, 15 bp, Homo sapiens
gtgcctgacccacag

SEQ ID NO: 251798 - DNA, 15 bp, Homo sapiens
agtgcctgacccaca

SEQ ID NO: 251799 - DNA, 15 bp, Homo sapiens
cagtgcctgacccac

SEQ ID NO: 251800 - DNA, 15 bp, Homo sapiens
acagtgcctgaccca

SEQ ID NO: 251801 - DNA, 15 bp, Homo sapiens
cacagtgcctgaccc

SEQ ID NO: 251802 - DNA, 15 bp, Homo sapiens
ccacagtgcctgacc

SEQ ID NO: 251803 - DNA, 15 bp, Homo sapiens
gccacagtgcctgac

SEQ ID NO: 251804 - DNA, 15 bp, Homo sapiens
agccacagtgcctga

SEQ ID NO: 251805 - DNA, 15 bp, Homo sapiens
gagccacagtgcctg

SEQ ID NO: 251806 - DNA, 15 bp, Homo sapiens
tgagccacagtgcct

SEQ ID NO: 251807 - DNA, 15 bp, Homo sapiens
gtgagccacagtgcc

SEQ ID NO: 251808 - DNA, 15 bp, Homo sapiens
cgtgagccacagtgc

SEQ ID NO: 251809 - DNA, 15 bp, Homo sapiens
gcgtgagccacagtg

SEQ ID NO: 251810 - DNA, 15 bp, Homo sapiens
ggcgtgagccacagt

SEQ ID NO: 251811 - DNA, 15 bp, Homo sapiens
aggcgtgagccacag

SEQ ID NO: 251812 - DNA, 15 bp, Homo sapiens
caggcgtgagccaca

SEQ ID NO: 251813 - DNA, 15 bp, Homo sapiens
tctcccaaagtgctg

SEQ ID NO: 251814 - DNA, 15 bp, Homo sapiens
gtctcccaaagtgct

SEQ ID NO: 251815 - DNA, 15 bp, Homo sapiens
ggtctcccaaagtgc

SEQ ID NO: 251816 - DNA, 15 bp, Homo sapiens
cggtctcccaaagtg

SEQ ID NO: 251817 - DNA, 15 bp, Homo sapiens
acctcggtctcccaa

SEQ ID NO: 251818 - DNA, 15 bp, Homo sapiens
tacctcggtctccca

SEQ ID NO: 251819 - DNA, 15 bp, Homo sapiens
ctacctcggtctccc

SEQ ID NO: 251820 - DNA, 15 bp, Homo sapiens
cctacctcggtctcc

SEQ ID NO: 251821 - DNA, 15 bp, Homo sapiens
acctacctcggtctc

SEQ ID NO: 251822 - DNA, 15 bp, Homo sapiens
cacctacctcggtct

SEQ ID NO: 251823 - DNA, 15 bp, Homo sapiens
ccacctacctcggtc

SEQ ID NO: 251824 - DNA, 15 bp, Homo sapiens
tccacctacctcggt

SEQ ID NO: 251825 - DNA, 15 bp, Homo sapiens
atccacctacctcgg

SEQ ID NO: 251826 - DNA, 15 bp, Homo sapiens
catccacctacctcg

SEQ ID NO: 251827 - DNA, 15 bp, Homo sapiens
ccatccacctacctc

SEQ ID NO: 251828 - DNA, 15 bp, Homo sapiens
gccatccacctacct

SEQ ID NO: 251829 - DNA, 15 bp, Homo sapiens
ggccatccacctacc

SEQ ID NO: 251830 - DNA, 15 bp, Homo sapiens
aggccatccacctac

SEQ ID NO: 251831 - DNA, 15 bp, Homo sapiens
caggccatccaccta

SEQ ID NO: 251832 - DNA, 15 bp, Homo sapiens
tcaggccatccacct

SEQ ID NO: 251833 - DNA, 15 bp, Homo sapiens
ctcaggccatccacc

SEQ ID NO: 251834 - DNA, 15 bp, Homo sapiens
cctcaggccatccac

SEQ ID NO: 251835 - DNA, 15 bp, Homo sapiens
acctcaggccatcca

SEQ ID NO: 251836 - DNA, 15 bp, Homo sapiens
gacctcaggccatcc

SEQ ID NO: 251837 - DNA, 15 bp, Homo sapiens
tgacctcaggccatc

SEQ ID NO: 251838 - DNA, 15 bp, Homo sapiens
ctgacctcaggccat

SEQ ID NO: 251839 - DNA, 15 bp, Homo sapiens
cctgacctcaggcca

SEQ ID NO: 251840 - DNA, 15 bp, Homo sapiens
tcctgacctcaggcc

SEQ ID NO: 251841 - DNA, 15 bp, Homo sapiens
ctcctgacctcaggc

SEQ ID NO: 251842 - DNA, 15 bp, Homo sapiens
ttcgaactcctgacc

SEQ ID NO: 251843 - DNA, 15 bp, Homo sapiens
attcgaactcctgac

SEQ ID NO: 251844 - DNA, 15 bp, Homo sapiens
gattcgaactcctga

SEQ ID NO: 251845 - DNA, 15 bp, Homo sapiens
ggattcgaactcctg

SEQ ID NO: 251846 - DNA, 15 bp, Homo sapiens
tggattcgaactcct

SEQ ID NO: 251847 - DNA, 15 bp, Homo sapiens
ctggattcgaactcc

SEQ ID NO: 251848 - DNA, 15 bp, Homo sapiens
gctggattcgaactc

SEQ ID NO: 251849 - DNA, 15 bp, Homo sapiens
ggctggattcgaact

SEQ ID NO: 251850 - DNA, 15 bp, Homo sapiens
aggctggattcgaac

SEQ ID NO: 251851 - DNA, 15 bp, Homo sapiens
caggctggattcgaa

SEQ ID NO: 251852 - DNA, 15 bp, Homo sapiens
ccaggctggattcga

SEQ ID NO: 251853 - DNA, 15 bp, Homo sapiens
gccaggctggattcg

SEQ ID NO: 251854 - DNA, 15 bp, Homo sapiens
ggccaggctggattc

SEQ ID NO: 251855 - DNA, 15 bp, Homo sapiens
tggccaggctggatt

SEQ ID NO: 251856 - DNA, 15 bp, Homo sapiens
ttggccaggctggat

SEQ ID NO: 251857 - DNA, 15 bp, Homo sapiens
gttggccaggctgga

SEQ ID NO: 251858 - DNA, 15 bp, Homo sapiens
ctttcaccatgttgg

SEQ ID NO: 251859 - DNA, 15 bp, Homo sapiens
gctttcaccatgttg

SEQ ID NO: 251860 - DNA, 15 bp, Homo sapiens
ggctttcaccatgtt

SEQ ID NO: 251861 - DNA, 15 bp, Homo sapiens
gggctttcaccatgt

SEQ ID NO: 251862 - DNA, 15 bp, Homo sapiens
cgggctttcaccatg

SEQ ID NO: 251863 - DNA, 15 bp, Homo sapiens
acgggctttcaccat

SEQ ID NO: 251864 - DNA, 15 bp, Homo sapiens
gacgggctttcacca

SEQ ID NO: 251865 - DNA, 15 bp, Homo sapiens
agacgggctttcacc

SEQ ID NO: 251866 - DNA, 15 bp, Homo sapiens
gagacgggctttcac

SEQ ID NO: 251867 - DNA, 15 bp, Homo sapiens
agagacgggctttca

SEQ ID NO: 251868 - DNA, 15 bp, Homo sapiens
tagagacgggctttc

SEQ ID NO: 251869 - DNA, 15 bp, Homo sapiens
gtagagacgggcttt

SEQ ID NO: 251870 - DNA, 15 bp, Homo sapiens
agtagagacgggctt

SEQ ID NO: 251871 - DNA, 15 bp, Homo sapiens
tagtagagacgggct

SEQ ID NO: 251872 - DNA, 15 bp, Homo sapiens
ttagtagagacgggc

SEQ ID NO: 251873 - DNA, 15 bp, Homo sapiens
actaattttttgtat

SEQ ID NO: 251874 - DNA, 15 bp, Homo sapiens
gactaattttttgta

SEQ ID NO: 251875 - DNA, 15 bp, Homo sapiens
tgactaattttttgt

SEQ ID NO: 251876 - DNA, 15 bp, Homo sapiens
ctgactaattttttg

SEQ ID NO: 251877 - DNA, 15 bp, Homo sapiens
cctgactaatttttt

SEQ ID NO: 251878 - DNA, 15 bp, Homo sapiens
acctgactaattttt

SEQ ID NO: 251879 - DNA, 15 bp, Homo sapiens
tacctgactaatttt

SEQ ID NO: 251880 - DNA, 15 bp, Homo sapiens
atacctgactaattt

SEQ ID NO: 251881 - DNA, 15 bp, Homo sapiens
catacctgactaatt

SEQ ID NO: 251882 - DNA, 15 bp, Homo sapiens
acatacctgactaat

SEQ ID NO: 251883 - DNA, 15 bp, Homo sapiens
aacatacctgactaa

SEQ ID NO: 251884 - DNA, 15 bp, Homo sapiens
caacatacctgacta

SEQ ID NO: 251885 - DNA, 15 bp, Homo sapiens
ccaacatacctgact

SEQ ID NO: 251886 - DNA, 15 bp, Homo sapiens
gccaacatacctgac

SEQ ID NO: 251887 - DNA, 15 bp, Homo sapiens
tgccaacatacctga

SEQ ID NO: 251888 - DNA, 15 bp, Homo sapiens
gtgccaacatacctg

SEQ ID NO: 251889 - DNA, 15 bp, Homo sapiens
tgtgccaacatacct

SEQ ID NO: 251890 - DNA, 15 bp, Homo sapiens
gtgtgccaacatacc

SEQ ID NO: 251891 - DNA, 15 bp, Homo sapiens
ggtgtgccaacatac

SEQ ID NO: 251892 - DNA, 15 bp, Homo sapiens
aggtgtgccaacata

SEQ ID NO: 251893 - DNA, 15 bp, Homo sapiens
caggtgtgccaacat

SEQ ID NO: 251894 - DNA, 15 bp, Homo sapiens
acaggtgtgccaaca

SEQ ID NO: 251895 - DNA, 15 bp, Homo sapiens
tacaggtgtgccaac

SEQ ID NO: 251896 - DNA, 15 bp, Homo sapiens
ttacaggtgtgccaa

SEQ ID NO: 251897 - DNA, 15 bp, Homo sapiens
attacaggtgtgcca

SEQ ID NO: 251898 - DNA, 15 bp, Homo sapiens
gattacaggtgtgcc

SEQ ID NO: 251899 - DNA, 15 bp, Homo sapiens
ggattacaggtgtgc

SEQ ID NO: 251900 - DNA, 15 bp, Homo sapiens
cctcctggccctctg

SEQ ID NO: 251901 - DNA, 15 bp, Homo sapiens
ccctcctggccctct

SEQ ID NO: 251902 - DNA, 15 bp, Homo sapiens
tccctcctggccctc

SEQ ID NO: 251903 - DNA, 15 bp, Homo sapiens
ctccctcctggccct

SEQ ID NO: 251904 - DNA, 15 bp, Homo sapiens
cctccctcctggccc

SEQ ID NO: 251905 - DNA, 15 bp, Homo sapiens
tcctccctcctggcc

SEQ ID NO: 251906 - DNA, 15 bp, Homo sapiens
ttcctccctcctggc

SEQ ID NO: 251907 - DNA, 15 bp, Homo sapiens
cttcctccctcctgg

SEQ ID NO: 251908 - DNA, 15 bp, Homo sapiens
ccttcctccctcctg

SEQ ID NO: 251909 - DNA, 15 bp, Homo sapiens
cccttcctccctcct

SEQ ID NO: 251910 - DNA, 15 bp, Homo sapiens
tcccttcctccctcc

SEQ ID NO: 251911 - DNA, 15 bp, Homo sapiens
ctcccttcctccctc

SEQ ID NO: 251912 - DNA, 15 bp, Homo sapiens
tctcccttcctccct

SEQ ID NO: 251913 - DNA, 15 bp, Homo sapiens
ctctcccttcctccc

SEQ ID NO: 251914 - DNA, 15 bp, Homo sapiens
cctctcccttcctcc

SEQ ID NO: 251915 - DNA, 15 bp, Homo sapiens
tcctctcccttcctc

SEQ ID NO: 251916 - DNA, 15 bp, Homo sapiens
ctcctctcccttcct

SEQ ID NO: 251917 - DNA, 15 bp, Homo sapiens
cctcctctcccttcc

SEQ ID NO: 251918 - DNA, 15 bp, Homo sapiens
acctcctctcccttc

SEQ ID NO: 251919 - DNA, 15 bp, Homo sapiens
cacctcctctccctt

SEQ ID NO: 251920 - DNA, 15 bp, Homo sapiens
acacctcctctccct

SEQ ID NO: 251921 - DNA, 15 bp, Homo sapiens
aacacctcctctccc

SEQ ID NO: 251922 - DNA, 15 bp, Homo sapiens
aaacacctcctctcc

SEQ ID NO: 251923 - DNA, 15 bp, Homo sapiens
aaaacacctcctctc

SEQ ID NO: 251924 - DNA, 15 bp, Homo sapiens
taaaacacctcctct

SEQ ID NO: 251925 - DNA, 15 bp, Homo sapiens
ataaaacacctcctc

SEQ ID NO: 251926 - DNA, 15 bp, Homo sapiens
aataaaacacctcct

SEQ ID NO: 251927 - DNA, 15 bp, Homo sapiens
aaataaaacacctcc

SEQ ID NO: 251928 - DNA, 15 bp, Homo sapiens
aaaataaaacacctc

SEQ ID NO: 251929 - DNA, 15 bp, Homo sapiens
aaaaataaaacacct

SEQ ID NO: 251930 - DNA, 15 bp, Homo sapiens
aaaaaataaaacacc

SEQ ID NO: 251931 - DNA, 15 bp, Homo sapiens
aaaaaaataaaacac

SEQ ID NO: 251932 - DNA, 15 bp, Homo sapiens
caaaaaaataaaaca

SEQ ID NO: 251933 - DNA, 15 bp, Homo sapiens
gcaaaaaaataaaac

SEQ ID NO: 251934 - DNA, 15 bp, Homo sapiens
agcaaaaaaataaaa

SEQ ID NO: 251935 - DNA, 15 bp, Homo sapiens
aagcaaaaaaataaa

SEQ ID NO: 251936 - DNA, 15 bp, Homo sapiens
aaagcaaaaaaataa

SEQ ID NO: 251937 - DNA, 15 bp, Homo sapiens
aaaagcaaaaaaata

SEQ ID NO: 251938 - DNA, 15 bp, Homo sapiens
taaaagcaaaaaaat

SEQ ID NO: 251939 - DNA, 15 bp, Homo sapiens
ataaaagcaaaaaaa

SEQ ID NO: 251940 - DNA, 15 bp, Homo sapiens
aataaaagcaaaaaa

SEQ ID NO: 251941 - DNA, 15 bp, Homo sapiens
aaataaaagcaaaaa

SEQ ID NO: 251942 - DNA, 15 bp, Homo sapiens
aaaataaaagcaaaa

SEQ ID NO: 251943 - DNA, 15 bp, Homo sapiens
aaaaataaaagcaaa

SEQ ID NO: 251944 - DNA, 15 bp, Homo sapiens
aaaaaataaaagcaa

SEQ ID NO: 251945 - DNA, 15 bp, Homo sapiens
taaaaaataaaagca

SEQ ID NO: 251946 - DNA, 15 bp, Homo sapiens
ataaaaaataaaagc

SEQ ID NO: 251947 - DNA, 15 bp, Homo sapiens
aataaaaaataaaag

SEQ ID NO: 251948 - DNA, 15 bp, Homo sapiens
caaaataaaaaataa

SEQ ID NO: 251949 - DNA, 15 bp, Homo sapiens
tcaaaataaaaaata

SEQ ID NO: 251950 - DNA, 15 bp, Homo sapiens
ctcaaaataaaaaat

SEQ ID NO: 251951 - DNA, 15 bp, Homo sapiens
tctcaaaataaaaaa

SEQ ID NO: 251952 - DNA, 15 bp, Homo sapiens
gtctcaaaataaaaa

SEQ ID NO: 251953 - DNA, 15 bp, Homo sapiens
tgtctcaaaataaaa

SEQ ID NO: 251954 - DNA, 15 bp, Homo sapiens
ctgtctcaaaataaa

SEQ ID NO: 251955 - DNA, 15 bp, Homo sapiens
tctgtctcaaaataa

SEQ ID NO: 251956 - DNA, 15 bp, Homo sapiens
ctctgtctcaaaata

SEQ ID NO: 251957 - DNA, 15 bp, Homo sapiens
actctgtctcaaaat

SEQ ID NO: 251958 - DNA, 15 bp, Homo sapiens
gagagactctgtctc

SEQ ID NO: 251959 - DNA, 15 bp, Homo sapiens
agagagactctgtct

SEQ ID NO: 251960 - DNA, 15 bp, Homo sapiens
gagagagactctgtc

SEQ ID NO: 251961 - DNA, 15 bp, Homo sapiens
agagagagactctgt

SEQ ID NO: 251962 - DNA, 15 bp, Homo sapiens
cagagagagactctg

SEQ ID NO: 251963 - DNA, 15 bp, Homo sapiens
acagagagagactct

SEQ ID NO: 251964 - DNA, 15 bp, Homo sapiens
gacagagagagactc

SEQ ID NO: 251965 - DNA, 15 bp, Homo sapiens
tgacagagagagact

SEQ ID NO: 251966 - DNA, 15 bp, Homo sapiens
gtgacagagagagac

SEQ ID NO: 251967 - DNA, 15 bp, Homo sapiens
ggtgacagagagaga

SEQ ID NO: 251968 - DNA, 15 bp, Homo sapiens
gggtgacagagagag

SEQ ID NO: 251969 - DNA, 15 bp, Homo sapiens
tgggtgacagagaga

SEQ ID NO: 251970 - DNA, 15 bp, Homo sapiens
ctgggtgacagagag

SEQ ID NO: 251971 - DNA, 15 bp, Homo sapiens
acctgggtgacagag

SEQ ID NO: 251972 - DNA, 15 bp, Homo sapiens
aacctgggtgacaga

SEQ ID NO: 251973 - DNA, 15 bp, Homo sapiens
ccaacctgggtgaca

SEQ ID NO: 251974 - DNA, 15 bp, Homo sapiens
tccaacctgggtgac

SEQ ID NO: 251975 - DNA, 15 bp, Homo sapiens
ctccaacctgggtga

SEQ ID NO: 251976 - DNA, 15 bp, Homo sapiens
actccaacctgggtg

SEQ ID NO: 251977 - DNA, 15 bp, Homo sapiens
cactccaacctgggt

SEQ ID NO: 251978 - DNA, 15 bp, Homo sapiens
gcactgcactccaac

SEQ ID NO: 251979 - DNA, 15 bp, Homo sapiens
agcactgcactccaa

SEQ ID NO: 251980 - DNA, 15 bp, Homo sapiens
cagcactgcactcca

SEQ ID NO: 251981 - DNA, 15 bp, Homo sapiens
agatcacagcactgc

SEQ ID NO: 251982 - DNA, 15 bp, Homo sapiens
aagatcacagcactg

SEQ ID NO: 251983 - DNA, 15 bp, Homo sapiens
caagatcacagcact

SEQ ID NO: 251984 - DNA, 15 bp, Homo sapiens
ccaagatcacagcac

SEQ ID NO: 251985 - DNA, 15 bp, Homo sapiens
gccaagatcacagca

SEQ ID NO: 251986 - DNA, 15 bp, Homo sapiens
agccaagatcacagc

SEQ ID NO: 251987 - DNA, 15 bp, Homo sapiens
gagccaagatcacag

SEQ ID NO: 251988 - DNA, 15 bp, Homo sapiens
tgagccaagatcaca

SEQ ID NO: 251989 - DNA, 15 bp, Homo sapiens
gtgagccaagatcac

SEQ ID NO: 251990 - DNA, 15 bp, Homo sapiens
agttgcagtgagcca

SEQ ID NO: 251991 - DNA, 15 bp, Homo sapiens
aagttgcagtgagcc

SEQ ID NO: 251992 - DNA, 15 bp, Homo sapiens
gaagttgcagtgagc

SEQ ID NO: 251993 - DNA, 15 bp, Homo sapiens
agaagttgcagtgag

SEQ ID NO: 251994 - DNA, 15 bp, Homo sapiens
cagaagttgcagtga

SEQ ID NO: 251995 - DNA, 15 bp, Homo sapiens
gcagaagttgcagtg

SEQ ID NO: 251996 - DNA, 15 bp, Homo sapiens
ggcagaagttgcagt

SEQ ID NO: 251997 - DNA, 15 bp, Homo sapiens
aggcagaagttgcag

SEQ ID NO: 251998 - DNA, 15 bp, Homo sapiens
aggaggcagaagttg

SEQ ID NO: 251999 - DNA, 15 bp, Homo sapiens
caggaggcagaagtt

SEQ ID NO: 252000 - DNA, 15 bp, Homo sapiens
ccaggaggcagaagt

SEQ ID NO: 252001 - DNA, 15 bp, Homo sapiens
cccaggaggcagaag

SEQ ID NO: 252002 - DNA, 15 bp, Homo sapiens
acccaggaggcagaa

SEQ ID NO: 252003 - DNA, 15 bp, Homo sapiens
aagaattgcttgaac

SEQ ID NO: 252004 - DNA, 15 bp, Homo sapiens
taagaattgcttgaa

SEQ ID NO: 252005 - DNA, 15 bp, Homo sapiens
ataagaattgcttga

SEQ ID NO: 252006 - DNA, 15 bp, Homo sapiens
cataagaattgcttg

SEQ ID NO: 252007 - DNA, 15 bp, Homo sapiens
gcataagaattgctt

SEQ ID NO: 252008 - DNA, 15 bp, Homo sapiens
ggcataagaattgct

SEQ ID NO: 252009 - DNA, 15 bp, Homo sapiens
aggcataagaattgc

SEQ ID NO: 252010 - DNA, 15 bp, Homo sapiens
gaggcataagaattg

SEQ ID NO: 252011 - DNA, 15 bp, Homo sapiens
tgaggcataagaatt

SEQ ID NO: 252012 - DNA, 15 bp, Homo sapiens
tgaggctgaggcata

SEQ ID NO: 252013 - DNA, 15 bp, Homo sapiens
ctgaggctgaggcat

SEQ ID NO: 252014 - DNA, 15 bp, Homo sapiens
gctgaggctgaggca

SEQ ID NO: 252015 - DNA, 15 bp, Homo sapiens
ggctgaggctgaggc

SEQ ID NO: 252016 - DNA, 15 bp, Homo sapiens
aggctgaggctgagg

SEQ ID NO: 252017 - DNA, 15 bp, Homo sapiens
gaggctgaggctgag

SEQ ID NO: 252018 - DNA, 15 bp, Homo sapiens
ggaggctgaggctga

SEQ ID NO: 252019 - DNA, 15 bp, Homo sapiens
aggaggctgaggctg

SEQ ID NO: 252020 - DNA, 15 bp, Homo sapiens
caggaggctgaggct

SEQ ID NO: 252021 - DNA, 15 bp, Homo sapiens
gttgtaatcccagct

SEQ ID NO: 252022 - DNA, 15 bp, Homo sapiens
tgttgtaatcccagc

SEQ ID NO: 252023 - DNA, 15 bp, Homo sapiens
gtgttgtaatcccag

SEQ ID NO: 252024 - DNA, 15 bp, Homo sapiens
agtgttgtaatccca

SEQ ID NO: 252025 - DNA, 15 bp, Homo sapiens
tagtgttgtaatccc

SEQ ID NO: 252026 - DNA, 15 bp, Homo sapiens
atagtgttgtaatcc

SEQ ID NO: 252027 - DNA, 15 bp, Homo sapiens
catagtgttgtaatc

SEQ ID NO: 252028 - DNA, 15 bp, Homo sapiens
gcatagtgttgtaat

SEQ ID NO: 252029 - DNA, 15 bp, Homo sapiens
ggcatagtgttgtaa

SEQ ID NO: 252030 - DNA, 15 bp, Homo sapiens
gggcatagtgttgta

SEQ ID NO: 252031 - DNA, 15 bp, Homo sapiens
cgggcatagtgttgt

SEQ ID NO: 252032 - DNA, 15 bp, Homo sapiens
ccgggcatagtgttg

SEQ ID NO: 252033 - DNA, 15 bp, Homo sapiens
cccgggcatagtgtt

SEQ ID NO: 252034 - DNA, 15 bp, Homo sapiens
acccgggcatagtgt

SEQ ID NO: 252035 - DNA, 15 bp, Homo sapiens
tacccgggcatagtg

SEQ ID NO: 252036 - DNA, 15 bp, Homo sapiens
ttacccgggcatagt

SEQ ID NO: 252037 - DNA, 15 bp, Homo sapiens
attacccgggcatag

SEQ ID NO: 252038 - DNA, 15 bp, Homo sapiens
aattacccgggcata

SEQ ID NO: 252039 - DNA, 15 bp, Homo sapiens
aaattacccgggcat

SEQ ID NO: 252040 - DNA, 15 bp, Homo sapiens
aaaattacccgggca

SEQ ID NO: 252041 - DNA, 15 bp, Homo sapiens
caaaaattacccggg

SEQ ID NO: 252042 - DNA, 15 bp, Homo sapiens
acaaaaattacccgg

SEQ ID NO: 252043 - DNA, 15 bp, Homo sapiens
tacaaaaattacccg

SEQ ID NO: 252044 - DNA, 15 bp, Homo sapiens
atacaaaaattaccc

SEQ ID NO: 252045 - DNA, 15 bp, Homo sapiens
aatacaaaaattacc

SEQ ID NO: 252046 - DNA, 15 bp, Homo sapiens
aaatacaaaaattac

SEQ ID NO: 252047 - DNA, 15 bp, Homo sapiens
tcgtctctactaaaa

SEQ ID NO: 252048 - DNA, 15 bp, Homo sapiens
ctcgtctctactaaa

SEQ ID NO: 252049 - DNA, 15 bp, Homo sapiens
cctcgtctctactaa

SEQ ID NO: 252050 - DNA, 15 bp, Homo sapiens
acctcgtctctacta

SEQ ID NO: 252051 - DNA, 15 bp, Homo sapiens
aacctcgtctctact

SEQ ID NO: 252052 - DNA, 15 bp, Homo sapiens
aaacctcgtctctac

SEQ ID NO: 252053 - DNA, 15 bp, Homo sapiens
gaaacctcgtctcta

SEQ ID NO: 252054 - DNA, 15 bp, Homo sapiens
cgaaacctcgtctct

SEQ ID NO: 252055 - DNA, 15 bp, Homo sapiens
gcgaaacctcgtctc

SEQ ID NO: 252056 - DNA, 15 bp, Homo sapiens
ggcgaaacctcgtct

SEQ ID NO: 252057 - DNA, 15 bp, Homo sapiens
tggcgaaacctcgtc

SEQ ID NO: 252058 - DNA, 15 bp, Homo sapiens
atggcgaaacctcgt

SEQ ID NO: 252059 - DNA, 15 bp, Homo sapiens
catggcgaaacctcg

SEQ ID NO: 252060 - DNA, 15 bp, Homo sapiens
acatggcgaaacctc

SEQ ID NO: 252061 - DNA, 15 bp, Homo sapiens
aacatggcgaaacct

SEQ ID NO: 252062 - DNA, 15 bp, Homo sapiens
caacatggcgaaacc

SEQ ID NO: 252063 - DNA, 15 bp, Homo sapiens
gcaacatggcgaaac

SEQ ID NO: 252064 - DNA, 15 bp, Homo sapiens
ggcaacatggcgaaa

SEQ ID NO: 252065 - DNA, 15 bp, Homo sapiens
gggcaacatggcgaa

SEQ ID NO: 252066 - DNA, 15 bp, Homo sapiens
tgggcaacatggcga

SEQ ID NO: 252067 - DNA, 15 bp, Homo sapiens
ctgggcaacatggcg

SEQ ID NO: 252068 - DNA, 15 bp, Homo sapiens
tctgggcaacatggc

SEQ ID NO: 252069 - DNA, 15 bp, Homo sapiens
gtctgggcaacatgg

SEQ ID NO: 252070 - DNA, 15 bp, Homo sapiens
agtctgggcaacatg

SEQ ID NO: 252071 - DNA, 15 bp, Homo sapiens
cagtctgggcaacat

SEQ ID NO: 252072 - DNA, 15 bp, Homo sapiens
ccagtctgggcaaca

SEQ ID NO: 252073 - DNA, 15 bp, Homo sapiens
accagtctgggcaac

SEQ ID NO: 252074 - DNA, 15 bp, Homo sapiens
gaccagtctgggcaa

SEQ ID NO: 252075 - DNA, 15 bp, Homo sapiens
agaccagtctgggca

SEQ ID NO: 252076 - DNA, 15 bp, Homo sapiens
gagaccagtctgggc

SEQ ID NO: 252077 - DNA, 15 bp, Homo sapiens
cgagaccagtctggg

SEQ ID NO: 252078 - DNA, 15 bp, Homo sapiens
tcgagaccagtctgg

SEQ ID NO: 252079 - DNA, 15 bp, Homo sapiens
ttcgagaccagtctg

SEQ ID NO: 252080 - DNA, 15 bp, Homo sapiens
gttcgagaccagtct

SEQ ID NO: 252081 - DNA, 15 bp, Homo sapiens
agttcgagaccagtc

SEQ ID NO: 252082 - DNA, 15 bp, Homo sapiens
gagttcgagaccagt

SEQ ID NO: 252083 - DNA, 15 bp, Homo sapiens
tggatcacttgaggt

SEQ ID NO: 252084 - DNA, 15 bp, Homo sapiens
gtggatcacttgagg

SEQ ID NO: 252085 - DNA, 15 bp, Homo sapiens
ggtggatcacttgag

SEQ ID NO: 252086 - DNA, 15 bp, Homo sapiens
gggtggatcacttga

SEQ ID NO: 252087 - DNA, 15 bp, Homo sapiens
cgggtggatcacttg

SEQ ID NO: 252088 - DNA, 15 bp, Homo sapiens
gcgggtggatcactt

SEQ ID NO: 252089 - DNA, 15 bp, Homo sapiens
ggcgggtggatcact

SEQ ID NO: 252090 - DNA, 15 bp, Homo sapiens
ggggaggccaaggcg

SEQ ID NO: 252091 - DNA, 15 bp, Homo sapiens
tggggaggccaaggc

SEQ ID NO: 252092 - DNA, 15 bp, Homo sapiens
gtggggaggccaagg

SEQ ID NO: 252093 - DNA, 15 bp, Homo sapiens
cgtggggaggccaag

SEQ ID NO: 252094 - DNA, 15 bp, Homo sapiens
acgtggggaggccaa

SEQ ID NO: 252095 - DNA, 15 bp, Homo sapiens
cacgtggggaggcca

SEQ ID NO: 252096 - DNA, 15 bp, Homo sapiens
gcacgtggggaggcc

SEQ ID NO: 252097 - DNA, 15 bp, Homo sapiens
agcacgtggggaggc

SEQ ID NO: 252098 - DNA, 15 bp, Homo sapiens
cagcacgtggggagg

SEQ ID NO: 252099 - DNA, 15 bp, Homo sapiens
ccagcacgtggggag

SEQ ID NO: 252100 - DNA, 15 bp, Homo sapiens
cccagcacgtgggga

SEQ ID NO: 252101 - DNA, 15 bp, Homo sapiens
tcccagcacgtgggg

SEQ ID NO: 252102 - DNA, 15 bp, Homo sapiens
atcccagcacgtggg

SEQ ID NO: 252103 - DNA, 15 bp, Homo sapiens
aatcccagcacgtgg

SEQ ID NO: 252104 - DNA, 15 bp, Homo sapiens
caatcccagcacgtg

SEQ ID NO: 252105 - DNA, 15 bp, Homo sapiens
gcaatcccagcacgt

SEQ ID NO: 252106 - DNA, 15 bp, Homo sapiens
tgcaatcccagcacg

SEQ ID NO: 252107 - DNA, 15 bp, Homo sapiens
ctgcaatcccagcac

SEQ ID NO: 252108 - DNA, 15 bp, Homo sapiens
cctgcaatcccagca

SEQ ID NO: 252109 - DNA, 15 bp, Homo sapiens
gcctgcaatcccagc

SEQ ID NO: 252110 - DNA, 15 bp, Homo sapiens
cgcctgcaatcccag

SEQ ID NO: 252111 - DNA, 15 bp, Homo sapiens
acgcctgcaatccca

SEQ ID NO: 252112 - DNA, 15 bp, Homo sapiens
cacgcctgcaatccc

SEQ ID NO: 252113 - DNA, 15 bp, Homo sapiens
ctcacgcctgcaatc

SEQ ID NO: 252114 - DNA, 15 bp, Homo sapiens
gctcacgcctgcaat

SEQ ID NO: 252115 - DNA, 15 bp, Homo sapiens
ggctcacgcctgcaa

SEQ ID NO: 252116 - DNA, 15 bp, Homo sapiens
tggctcacgcctgca

SEQ ID NO: 252117 - DNA, 15 bp, Homo sapiens
gtggctcacgcctgc

SEQ ID NO: 252118 - DNA, 15 bp, Homo sapiens
gcgggcgcagtggct

SEQ ID NO: 252119 - DNA, 15 bp, Homo sapiens
ggcgggcgcagtggc

SEQ ID NO: 252120 - DNA, 15 bp, Homo sapiens
aggcgggcgcagtgg

SEQ ID NO: 252121 - DNA, 15 bp, Homo sapiens
aaggcgggcgcagtg

SEQ ID NO: 252122 - DNA, 15 bp, Homo sapiens
caaggcgggcgcagt

SEQ ID NO: 252123 - DNA, 15 bp, Homo sapiens
tcaaggcgggcgcag

SEQ ID NO: 252124 - DNA, 15 bp, Homo sapiens
atcaaggcgggcgca

SEQ ID NO: 252125 - DNA, 15 bp, Homo sapiens
gatcaaggcgggcgc

SEQ ID NO: 252126 - DNA, 15 bp, Homo sapiens
agatcaaggcgggcg

SEQ ID NO: 252127 - DNA, 15 bp, Homo sapiens
aagatcaaggcgggc

SEQ ID NO: 252128 - DNA, 15 bp, Homo sapiens
aaagatcaaggcggg

SEQ ID NO: 252129 - DNA, 15 bp, Homo sapiens
taaagatcaaggcgg

SEQ ID NO: 252130 - DNA, 15 bp, Homo sapiens
gtaaagatcaaggcg

SEQ ID NO: 252131 - DNA, 15 bp, Homo sapiens
tgtaaagatcaaggc

SEQ ID NO: 252132 - DNA, 15 bp, Homo sapiens
gtgtaaagatcaagg

SEQ ID NO: 252133 - DNA, 15 bp, Homo sapiens
tgtgtaaagatcaag

SEQ ID NO: 252134 - DNA, 15 bp, Homo sapiens
ttgtgtaaagatcaa

SEQ ID NO: 252135 - DNA, 15 bp, Homo sapiens
cttgtgtaaagatca

SEQ ID NO: 252136 - DNA, 15 bp, Homo sapiens
ccttgtgtaaagatc

SEQ ID NO: 252137 - DNA, 15 bp, Homo sapiens
cccttgtgtaaagat

SEQ ID NO: 252138 - DNA, 15 bp, Homo sapiens
ccccttgtgtaaaga

SEQ ID NO: 252139 - DNA, 15 bp, Homo sapiens
accccttgtgtaaag

SEQ ID NO: 252140 - DNA, 15 bp, Homo sapiens
aaccccttgtgtaaa

SEQ ID NO: 252141 - DNA, 15 bp, Homo sapiens
aaaccccttgtgtaa

SEQ ID NO: 252142 - DNA, 15 bp, Homo sapiens
taaaccccttgtgta

SEQ ID NO: 252143 - DNA, 15 bp, Homo sapiens
ctaaaccccttgtgt

SEQ ID NO: 252144 - DNA, 15 bp, Homo sapiens
cctaaaccccttgtg

SEQ ID NO: 252145 - DNA, 15 bp, Homo sapiens
ccctaaaccccttgt

SEQ ID NO: 252146 - DNA, 15 bp, Homo sapiens
accctaaaccccttg

SEQ ID NO: 252147 - DNA, 15 bp, Homo sapiens
taccctaaacccctt

SEQ ID NO: 252148 - DNA, 15 bp, Homo sapiens
ctaccctaaacccct

SEQ ID NO: 252149 - DNA, 15 bp, Homo sapiens
cctaccctaaacccc

SEQ ID NO: 252150 - DNA, 15 bp, Homo sapiens
acctaccctaaaccc

SEQ ID NO: 252151 - DNA, 15 bp, Homo sapiens
tacctaccctaaacc

SEQ ID NO: 252152 - DNA, 15 bp, Homo sapiens
ctacctaccctaaac

SEQ ID NO: 252153 - DNA, 15 bp, Homo sapiens
gctacctaccctaaa

SEQ ID NO: 252154 - DNA, 15 bp, Homo sapiens
ggctacctaccctaa

SEQ ID NO: 252155 - DNA, 15 bp, Homo sapiens
aggctacctacccta

SEQ ID NO: 252156 - DNA, 15 bp, Homo sapiens
aaggctacctaccct

SEQ ID NO: 252157 - DNA, 15 bp, Homo sapiens
gaaggctacctaccc

SEQ ID NO: 252158 - DNA, 15 bp, Homo sapiens
agaaggctacctacc

SEQ ID NO: 252159 - DNA, 15 bp, Homo sapiens
gagaaggctacctac

SEQ ID NO: 252160 - DNA, 15 bp, Homo sapiens
agagaaggctaccta

SEQ ID NO: 252161 - DNA, 15 bp, Homo sapiens
cagagaaggctacct

SEQ ID NO: 252162 - DNA, 15 bp, Homo sapiens
tcagagaaggctacc

SEQ ID NO: 252163 - DNA, 15 bp, Homo sapiens
ttcagagaaggctac

SEQ ID NO: 252164 - DNA, 15 bp, Homo sapiens
gttcagagaaggcta

SEQ ID NO: 252165 - DNA, 15 bp, Homo sapiens
ggttcagagaaggct

SEQ ID NO: 252166 - DNA, 15 bp, Homo sapiens
tggttcagagaaggc

SEQ ID NO: 252167 - DNA, 15 bp, Homo sapiens
ctggttcagagaagg

SEQ ID NO: 252168 - DNA, 15 bp, Homo sapiens
cctggttcagagaag

SEQ ID NO: 252169 - DNA, 15 bp, Homo sapiens
tcctggttcagagaa

SEQ ID NO: 252170 - DNA, 15 bp, Homo sapiens
ctcctggttcagaga

SEQ ID NO: 252171 - DNA, 15 bp, Homo sapiens
tctcctggttcagag

SEQ ID NO: 252172 - DNA, 15 bp, Homo sapiens
ttctcctggttcaga

SEQ ID NO: 252173 - DNA, 15 bp, Homo sapiens
gttctcctggttcag

SEQ ID NO: 252174 - DNA, 15 bp, Homo sapiens
tgttctcctggttca

SEQ ID NO: 252175 - DNA, 15 bp, Homo sapiens
ctgttctcctggttc

SEQ ID NO: 252176 - DNA, 15 bp, Homo sapiens
gctgttctcctggtt

SEQ ID NO: 252177 - DNA, 15 bp, Homo sapiens
ggctgttctcctggt

SEQ ID NO: 252178 - DNA, 15 bp, Homo sapiens
aggctgttctcctgg

SEQ ID NO: 252179 - DNA, 15 bp, Homo sapiens
caggctgttctcctg

SEQ ID NO: 252180 - DNA, 15 bp, Homo sapiens
acaggctgttctcct

SEQ ID NO: 252181 - DNA, 15 bp, Homo sapiens
cacaggctgttctcc

SEQ ID NO: 252182 - DNA, 15 bp, Homo sapiens
gcacaggctgttctc

SEQ ID NO: 252183 - DNA, 15 bp, Homo sapiens
cgcacaggctgttct

SEQ ID NO: 252184 - DNA, 15 bp, Homo sapiens
tcgcacaggctgttc

SEQ ID NO: 252185 - DNA, 15 bp, Homo sapiens
ttcgcacaggctgtt

SEQ ID NO: 252186 - DNA, 15 bp, Homo sapiens
cttcgcacaggctgt

SEQ ID NO: 252187 - DNA, 15 bp, Homo sapiens
ccttcgcacaggctg

SEQ ID NO: 252188 - DNA, 15 bp, Homo sapiens
gccttcgcacaggct

SEQ ID NO: 252189 - DNA, 15 bp, Homo sapiens
ggccttcgcacaggc

SEQ ID NO: 252190 - DNA, 15 bp, Homo sapiens
gggccttcgcacagg

SEQ ID NO: 252191 - DNA, 15 bp, Homo sapiens
agggccttcgcacag

SEQ ID NO: 252192 - DNA, 15 bp, Homo sapiens
cagggccttcgcaca

SEQ ID NO: 252193 - DNA, 15 bp, Homo sapiens
tcagggccttcgcac

SEQ ID NO: 252194 - DNA, 15 bp, Homo sapiens
ctcagggccttcgca

SEQ ID NO: 252195 - DNA, 15 bp, Homo sapiens
cctcagggccttcgc

SEQ ID NO: 252196 - DNA, 15 bp, Homo sapiens
gcctcagggccttcg

SEQ ID NO: 252197 - DNA, 15 bp, Homo sapiens
agcctcagggccttc

SEQ ID NO: 252198 - DNA, 15 bp, Homo sapiens
cagcctcagggcctt

SEQ ID NO: 252199 - DNA, 15 bp, Homo sapiens
ccagcctcagggcct

SEQ ID NO: 252200 - DNA, 15 bp, Homo sapiens
tccagcctcagggcc

SEQ ID NO: 252201 - DNA, 15 bp, Homo sapiens
gtccagcctcagggc

SEQ ID NO: 252202 - DNA, 15 bp, Homo sapiens
ggtccagcctcaggg

SEQ ID NO: 252203 - DNA, 15 bp, Homo sapiens
cggtccagcctcagg

SEQ ID NO: 252204 - DNA, 15 bp, Homo sapiens
acggtccagcctcag

SEQ ID NO: 252205 - DNA, 15 bp, Homo sapiens
cacggtccagcctca

SEQ ID NO: 252206 - DNA, 15 bp, Homo sapiens
gcacggtccagcctc

SEQ ID NO: 252207 - DNA, 15 bp, Homo sapiens
ggcacggtccagcct

SEQ ID NO: 252208 - DNA, 15 bp, Homo sapiens
aggcacggtccagcc

SEQ ID NO: 252209 - DNA, 15 bp, Homo sapiens
caggcacggtccagc

SEQ ID NO: 252210 - DNA, 15 bp, Homo sapiens
acaggcacggtccag

SEQ ID NO: 252211 - DNA, 15 bp, Homo sapiens
aacaggcacggtcca

SEQ ID NO: 252212 - DNA, 15 bp, Homo sapiens
caacaggcacggtcc

SEQ ID NO: 252213 - DNA, 15 bp, Homo sapiens
ccaacaggcacggtc

SEQ ID NO: 252214 - DNA, 15 bp, Homo sapiens
cccaacaggcacggt

SEQ ID NO: 252215 - DNA, 15 bp, Homo sapiens
acccaacaggcacgg

SEQ ID NO: 252216 - DNA, 15 bp, Homo sapiens
aacccaacaggcacg

SEQ ID NO: 252217 - DNA, 15 bp, Homo sapiens
aaacccaacaggcac

SEQ ID NO: 252218 - DNA, 15 bp, Homo sapiens
caaacccaacaggca

SEQ ID NO: 252219 - DNA, 15 bp, Homo sapiens
tcaaacccaacaggc

SEQ ID NO: 252220 - DNA, 15 bp, Homo sapiens
ctcaaacccaacagg

SEQ ID NO: 252221 - DNA, 15 bp, Homo sapiens
cctcaaacccaacag

SEQ ID NO: 252222 - DNA, 15 bp, Homo sapiens
gcctcaaacccaaca

SEQ ID NO: 252223 - DNA, 15 bp, Homo sapiens
ggcctcaaacccaac

SEQ ID NO: 252224 - DNA, 15 bp, Homo sapiens
cggcctcaaacccaa

SEQ ID NO: 252225 - DNA, 15 bp, Homo sapiens
acggcctcaaaccca

SEQ ID NO: 252226 - DNA, 15 bp, Homo sapiens
aacggcctcaaaccc

SEQ ID NO: 252227 - DNA, 15 bp, Homo sapiens
caacggcctcaaacc

SEQ ID NO: 252228 - DNA, 15 bp, Homo sapiens
acaacggcctcaaac

SEQ ID NO: 252229 - DNA, 15 bp, Homo sapiens
tacaacggcctcaaa

SEQ ID NO: 252230 - DNA, 15 bp, Homo sapiens
ctacaacggcctcaa

SEQ ID NO: 252231 - DNA, 15 bp, Homo sapiens
gctacaacggcctca

SEQ ID NO: 252232 - DNA, 15 bp, Homo sapiens
agctacaacggcctc

SEQ ID NO: 252233 - DNA, 15 bp, Homo sapiens
cagctacaacggcct

SEQ ID NO: 252234 - DNA, 15 bp, Homo sapiens
ccagctacaacggcc

SEQ ID NO: 252235 - DNA, 15 bp, Homo sapiens
tccagctacaacggc

SEQ ID NO: 252236 - DNA, 15 bp, Homo sapiens
ctccagctacaacgg

SEQ ID NO: 252237 - DNA, 15 bp, Homo sapiens
gctccagctacaacg

SEQ ID NO: 252238 - DNA, 15 bp, Homo sapiens
tgctccagctacaac

SEQ ID NO: 252239 - DNA, 15 bp, Homo sapiens
ttgctccagctacaa

SEQ ID NO: 252240 - DNA, 15 bp, Homo sapiens
tttgctccagctaca

SEQ ID NO: 252241 - DNA, 15 bp, Homo sapiens
gtttgctccagctac

SEQ ID NO: 252242 - DNA, 15 bp, Homo sapiens
tgtttgctccagcta

SEQ ID NO: 252243 - DNA, 15 bp, Homo sapiens
ctgtttgctccagct

SEQ ID NO: 252244 - DNA, 15 bp, Homo sapiens
tctgtttgctccagc

SEQ ID NO: 252245 - DNA, 15 bp, Homo sapiens
ctctgtttgctccag

SEQ ID NO: 252246 - DNA, 15 bp, Homo sapiens
tctctgtttgctcca

SEQ ID NO: 252247 - DNA, 15 bp, Homo sapiens
ctctctgtttgctcc

SEQ ID NO: 252248 - DNA, 15 bp, Homo sapiens
tctctctgtttgctc

SEQ ID NO: 252249 - DNA, 15 bp, Homo sapiens
ctctctctgtttgct

SEQ ID NO: 252250 - DNA, 15 bp, Homo sapiens
cctctctctgtttgc

SEQ ID NO: 252251 - DNA, 15 bp, Homo sapiens
ccctctctctgtttg

SEQ ID NO: 252252 - DNA, 15 bp, Homo sapiens
cccctctctctgttt

SEQ ID NO: 252253 - DNA, 15 bp, Homo sapiens
acccctctctctgtt

SEQ ID NO: 252254 - DNA, 15 bp, Homo sapiens
tacccctctctctgt

SEQ ID NO: 252255 - DNA, 15 bp, Homo sapiens
ttacccctctctctg

SEQ ID NO: 252256 - DNA, 15 bp, Homo sapiens
tttacccctctctct

SEQ ID NO: 252257 - DNA, 15 bp, Homo sapiens
ttttacccctctctc

SEQ ID NO: 252258 - DNA, 15 bp, Homo sapiens
tttttacccctctct

SEQ ID NO: 252259 - DNA, 15 bp, Homo sapiens
ctttttacccctctc

SEQ ID NO: 252260 - DNA, 15 bp, Homo sapiens
cctttttacccctct

SEQ ID NO: 252261 - DNA, 15 bp, Homo sapiens
gcctttttacccctc

SEQ ID NO: 252262 - DNA, 15 bp, Homo sapiens
tgcctttttacccct

SEQ ID NO: 252263 - DNA, 15 bp, Homo sapiens
ctgcctttttacccc

SEQ ID NO: 252264 - DNA, 15 bp, Homo sapiens
cctgcctttttaccc

SEQ ID NO: 252265 - DNA, 15 bp, Homo sapiens
tcctgcctttttacc

SEQ ID NO: 252266 - DNA, 15 bp, Homo sapiens
ctcctgcctttttac

SEQ ID NO: 252267 - DNA, 15 bp, Homo sapiens
cctcctgccttttta

SEQ ID NO: 252268 - DNA, 15 bp, Homo sapiens
gcctcctgccttttt

SEQ ID NO: 252269 - DNA, 15 bp, Homo sapiens
agcctcctgcctttt

SEQ ID NO: 252270 - DNA, 15 bp, Homo sapiens
tagcctcctgccttt

SEQ ID NO: 252271 - DNA, 15 bp, Homo sapiens
gtagcctcctgcctt

SEQ ID NO: 252272 - DNA, 15 bp, Homo sapiens
ggtagcctcctgcct

SEQ ID NO: 252273 - DNA, 15 bp, Homo sapiens
tggtagcctcctgcc

SEQ ID NO: 252274 - DNA, 15 bp, Homo sapiens
ctggtagcctcctgc

SEQ ID NO: 252275 - DNA, 15 bp, Homo sapiens
cctggtagcctcctg

SEQ ID NO: 252276 - DNA, 15 bp, Homo sapiens
gcctggtagcctcct

SEQ ID NO: 252277 - DNA, 15 bp, Homo sapiens
tgcctggtagcctcc

SEQ ID NO: 252278 - DNA, 15 bp, Homo sapiens
ctgcctggtagcctc

SEQ ID NO: 252279 - DNA, 15 bp, Homo sapiens
cctgcctggtagcct

SEQ ID NO: 252280 - DNA, 15 bp, Homo sapiens
acctgcctggtagcc

SEQ ID NO: 252281 - DNA, 15 bp, Homo sapiens
aacctgcctggtagc

SEQ ID NO: 252282 - DNA, 15 bp, Homo sapiens
caacctgcctggtag

SEQ ID NO: 252283 - DNA, 15 bp, Homo sapiens
acaacctgcctggta

SEQ ID NO: 252284 - DNA, 15 bp, Homo sapiens
cacaacctgcctggt

SEQ ID NO: 252285 - DNA, 15 bp, Homo sapiens
gcacaacctgcctgg

SEQ ID NO: 252286 - DNA, 15 bp, Homo sapiens
tgcacaacctgcctg

SEQ ID NO: 252287 - DNA, 15 bp, Homo sapiens
ctgcacaacctgcct

SEQ ID NO: 252288 - DNA, 15 bp, Homo sapiens
tctgcacaacctgcc

SEQ ID NO: 252289 - DNA, 15 bp, Homo sapiens
ctctgcacaacctgc

SEQ ID NO: 252290 - DNA, 15 bp, Homo sapiens
gctctgcacaacctg

SEQ ID NO: 252291 - DNA, 15 bp, Homo sapiens
ggctctgcacaacct

SEQ ID NO: 252292 - DNA, 15 bp, Homo sapiens
aggctctgcacaacc

SEQ ID NO: 252293 - DNA, 15 bp, Homo sapiens
aaggctctgcacaac

SEQ ID NO: 252294 - DNA, 15 bp, Homo sapiens
caaggctctgcacaa

SEQ ID NO: 252295 - DNA, 15 bp, Homo sapiens
acaaggctctgcaca

SEQ ID NO: 252296 - DNA, 15 bp, Homo sapiens
cacaaggctctgcac

SEQ ID NO: 252297 - DNA, 15 bp, Homo sapiens
ccacaaggctctgca

SEQ ID NO: 252298 - DNA, 15 bp, Homo sapiens
cccacaaggctctgc

SEQ ID NO: 252299 - DNA, 15 bp, Homo sapiens
gcccacaaggctctg

SEQ ID NO: 252300 - DNA, 15 bp, Homo sapiens
ggcccacaaggctct

SEQ ID NO: 252301 - DNA, 15 bp, Homo sapiens
tggcccacaaggctc

SEQ ID NO: 252302 - DNA, 15 bp, Homo sapiens
gtggcccacaaggct

SEQ ID NO: 252303 - DNA, 15 bp, Homo sapiens
agtggcccacaaggc

SEQ ID NO: 252304 - DNA, 15 bp, Homo sapiens
cagtggcccacaagg

SEQ ID NO: 252305 - DNA, 15 bp, Homo sapiens
ccagtggcccacaag

SEQ ID NO: 252306 - DNA, 15 bp, Homo sapiens
cccagtggcccacaa

SEQ ID NO: 252307 - DNA, 15 bp, Homo sapiens
ccccagtggcccaca

SEQ ID NO: 252308 - DNA, 15 bp, Homo sapiens
tccccagtggcccac

SEQ ID NO: 252309 - DNA, 15 bp, Homo sapiens
ctccccagtggccca

SEQ ID NO: 252310 - DNA, 15 bp, Homo sapiens
cctccccagtggccc

SEQ ID NO: 252311 - DNA, 15 bp, Homo sapiens
tcctccccagtggcc

SEQ ID NO: 252312 - DNA, 15 bp, Homo sapiens
gtcctccccagtggc

SEQ ID NO: 252313 - DNA, 15 bp, Homo sapiens
agtcctccccagtgg

SEQ ID NO: 252314 - DNA, 15 bp, Homo sapiens
aagtcctccccagtg

SEQ ID NO: 252315 - DNA, 15 bp, Homo sapiens
aaagtcctccccagt

SEQ ID NO: 252316 - DNA, 15 bp, Homo sapiens
caaagtcctccccag

SEQ ID NO: 252317 - DNA, 15 bp, Homo sapiens
ccaaagtcctcccca

SEQ ID NO: 252318 - DNA, 15 bp, Homo sapiens
gccaaagtcctcccc

SEQ ID NO: 252319 - DNA, 15 bp, Homo sapiens
agccaaagtcctccc

SEQ ID NO: 252320 - DNA, 15 bp, Homo sapiens
aagccaaagtcctcc

SEQ ID NO: 252321 - DNA, 15 bp, Homo sapiens
aaagccaaagtcctc

SEQ ID NO: 252322 - DNA, 15 bp, Homo sapiens
aaaagccaaagtcct

SEQ ID NO: 252323 - DNA, 15 bp, Homo sapiens
caaaagccaaagtcc

SEQ ID NO: 252324 - DNA, 15 bp, Homo sapiens
gcaaaagccaaagtc

SEQ ID NO: 252325 - DNA, 15 bp, Homo sapiens
ggcaaaagccaaagt

SEQ ID NO: 252326 - DNA, 15 bp, Homo sapiens
gggcaaaagccaaag

SEQ ID NO: 252327 - DNA, 15 bp, Homo sapiens
agggcaaaagccaaa

SEQ ID NO: 252328 - DNA, 15 bp, Homo sapiens
cagggcaaaagccaa

SEQ ID NO: 252329 - DNA, 15 bp, Homo sapiens
tcagggcaaaagcca

SEQ ID NO: 252330 - DNA, 15 bp, Homo sapiens
ctcagggcaaaagcc

SEQ ID NO: 252331 - DNA, 15 bp, Homo sapiens
tctcagggcaaaagc

SEQ ID NO: 252332 - DNA, 15 bp, Homo sapiens
ctctcagggcaaaag

SEQ ID NO: 252333 - DNA, 15 bp, Homo sapiens
gctctcagggcaaaa

SEQ ID NO: 252334 - DNA, 15 bp, Homo sapiens
cgctctcagggcaaa

SEQ ID NO: 252335 - DNA, 15 bp, Homo sapiens
ccgctctcagggcaa

SEQ ID NO: 252336 - DNA, 15 bp, Homo sapiens
accgctctcagggca

SEQ ID NO: 252337 - DNA, 15 bp, Homo sapiens
caccgctctcagggc

SEQ ID NO: 252338 - DNA, 15 bp, Homo sapiens
ccaccgctctcaggg

SEQ ID NO: 252339 - DNA, 15 bp, Homo sapiens
cccaccgctctcagg

SEQ ID NO: 252340 - DNA, 15 bp, Homo sapiens
tcccaccgctctcag

SEQ ID NO: 252341 - DNA, 15 bp, Homo sapiens
ttcccaccgctctca

SEQ ID NO: 252342 - DNA, 15 bp, Homo sapiens
cttcccaccgctctc

SEQ ID NO: 252343 - DNA, 15 bp, Homo sapiens
acttcccaccgctct

SEQ ID NO: 252344 - DNA, 15 bp, Homo sapiens
cacttcccaccgctc

SEQ ID NO: 252345 - DNA, 15 bp, Homo sapiens
tcacttcccaccgct

SEQ ID NO: 252346 - DNA, 15 bp, Homo sapiens
gtcacttcccaccgc

SEQ ID NO: 252347 - DNA, 15 bp, Homo sapiens
agtcacttcccaccg

SEQ ID NO: 252348 - DNA, 15 bp, Homo sapiens
cagtcacttcccacc

SEQ ID NO: 252349 - DNA, 15 bp, Homo sapiens
tcagtcacttcccac

SEQ ID NO: 252350 - DNA, 15 bp, Homo sapiens
ttcagtcacttccca

SEQ ID NO: 252351 - DNA, 15 bp, Homo sapiens
attcagtcacttccc

SEQ ID NO: 252352 - DNA, 15 bp, Homo sapiens
gattcagtcacttcc

SEQ ID NO: 252353 - DNA, 15 bp, Homo sapiens
ggattcagtcacttc

SEQ ID NO: 252354 - DNA, 15 bp, Homo sapiens
cggattcagtcactt

SEQ ID NO: 252355 - DNA, 15 bp, Homo sapiens
ccggattcagtcact

SEQ ID NO: 252356 - DNA, 15 bp, Homo sapiens
accggattcagtcac

SEQ ID NO: 252357 - DNA, 15 bp, Homo sapiens
taccggattcagtca

SEQ ID NO: 252358 - DNA, 15 bp, Homo sapiens
gtaccggattcagtc

SEQ ID NO: 252359 - DNA, 15 bp, Homo sapiens
agtaccggattcagt

SEQ ID NO: 252360 - DNA, 15 bp, Homo sapiens
gagtaccggattcag

SEQ ID NO: 252361 - DNA, 15 bp, Homo sapiens
tgagtaccggattca

SEQ ID NO: 252362 - DNA, 15 bp, Homo sapiens
gtgagtaccggattc

SEQ ID NO: 252363 - DNA, 15 bp, Homo sapiens
ggtgagtaccggatt

SEQ ID NO: 252364 - DNA, 15 bp, Homo sapiens
cggtgagtaccggat

SEQ ID NO: 252365 - DNA, 15 bp, Homo sapiens
acggtgagtaccgga

SEQ ID NO: 252366 - DNA, 15 bp, Homo sapiens
gacggtgagtaccgg

SEQ ID NO: 252367 - DNA, 15 bp, Homo sapiens
agacggtgagtaccg

SEQ ID NO: 252368 - DNA, 15 bp, Homo sapiens
gagacggtgagtacc

SEQ ID NO: 252369 - DNA, 15 bp, Homo sapiens
ggagacggtgagtac

SEQ ID NO: 252370 - DNA, 15 bp, Homo sapiens
gggagacggtgagta

SEQ ID NO: 252371 - DNA, 15 bp, Homo sapiens
agggagacggtgagt

SEQ ID NO: 252372 - DNA, 15 bp, Homo sapiens
gagggagacggtgag

SEQ ID NO: 252373 - DNA, 15 bp, Homo sapiens
agagggagacggtga

SEQ ID NO: 252374 - DNA, 15 bp, Homo sapiens
cagagggagacggtg

SEQ ID NO: 252375 - DNA, 15 bp, Homo sapiens
ccagagggagacggt

SEQ ID NO: 252376 - DNA, 15 bp, Homo sapiens
gccagagggagacgg

SEQ ID NO: 252377 - DNA, 15 bp, Homo sapiens
cgccagagggagacg

SEQ ID NO: 252378 - DNA, 15 bp, Homo sapiens
ccgccagagggagac

SEQ ID NO: 252379 - DNA, 15 bp, Homo sapiens
gccgccagagggaga

SEQ ID NO: 252380 - DNA, 15 bp, Homo sapiens
agccgccagagggag

SEQ ID NO: 252381 - DNA, 15 bp, Homo sapiens
gagccgccagaggga

SEQ ID NO: 252382 - DNA, 15 bp, Homo sapiens
ggagccgccagaggg

SEQ ID NO: 252383 - DNA, 15 bp, Homo sapiens
aggagccgccagagg

SEQ ID NO: 252384 - DNA, 15 bp, Homo sapiens
caggagccgccagag

SEQ ID NO: 252385 - DNA, 15 bp, Homo sapiens
ccaggagccgccaga

SEQ ID NO: 252386 - DNA, 15 bp, Homo sapiens
cccaggagccgccag

SEQ ID NO: 252387 - DNA, 15 bp, Homo sapiens
ccccaggagccgcca

SEQ ID NO: 252388 - DNA, 15 bp, Homo sapiens
cccccaggagccgcc

SEQ ID NO: 252389 - DNA, 15 bp, Homo sapiens
tcccccaggagccgc

SEQ ID NO: 252390 - DNA, 15 bp, Homo sapiens
ttcccccaggagccg

SEQ ID NO: 252391 - DNA, 15 bp, Homo sapiens
gttcccccaggagcc

SEQ ID NO: 252392 - DNA, 15 bp, Homo sapiens
tgttcccccaggagc

SEQ ID NO: 252393 - DNA, 15 bp, Homo sapiens
atgttcccccaggag

SEQ ID NO: 252394 - DNA, 15 bp, Homo sapiens
catgttcccccagga

SEQ ID NO: 252395 - DNA, 15 bp, Homo sapiens
gcatgttcccccagg

SEQ ID NO: 252396 - DNA, 15 bp, Homo sapiens
agcatgttcccccag

SEQ ID NO: 252397 - DNA, 15 bp, Homo sapiens
aagcatgttccccca

SEQ ID NO: 252398 - DNA, 15 bp, Homo sapiens
caagcatgttccccc

SEQ ID NO: 252399 - DNA, 15 bp, Homo sapiens
ccaagcatgttcccc

SEQ ID NO: 252400 - DNA, 15 bp, Homo sapiens
cccaagcatgttccc

SEQ ID NO: 252401 - DNA, 15 bp, Homo sapiens
ccccaagcatgttcc

SEQ ID NO: 252402 - DNA, 15 bp, Homo sapiens
tccccaagcatgttc

SEQ ID NO: 252403 - DNA, 15 bp, Homo sapiens
atccccaagcatgtt

SEQ ID NO: 252404 - DNA, 15 bp, Homo sapiens
gatccccaagcatgt

SEQ ID NO: 252405 - DNA, 15 bp, Homo sapiens
tgatccccaagcatg

SEQ ID NO: 252406 - DNA, 15 bp, Homo sapiens
ctgatccccaagcat

SEQ ID NO: 252407 - DNA, 15 bp, Homo sapiens
cctgatccccaagca

SEQ ID NO: 252408 - DNA, 15 bp, Homo sapiens
gcctgatccccaagc

SEQ ID NO: 252409 - DNA, 15 bp, Homo sapiens
agcctgatccccaag

SEQ ID NO: 252410 - DNA, 15 bp, Homo sapiens
cagcctgatccccaa

SEQ ID NO: 252411 - DNA, 15 bp, Homo sapiens
ccagcctgatcccca

SEQ ID NO: 252412 - DNA, 15 bp, Homo sapiens
cccagcctgatcccc

SEQ ID NO: 252413 - DNA, 15 bp, Homo sapiens
ccccagcctgatccc

SEQ ID NO: 252414 - DNA, 15 bp, Homo sapiens
cccccagcctgatcc

SEQ ID NO: 252415 - DNA, 15 bp, Homo sapiens
tcccccagcctgatc

SEQ ID NO: 252416 - DNA, 15 bp, Homo sapiens
ctcccccagcctgat

SEQ ID NO: 252417 - DNA, 15 bp, Homo sapiens
cctcccccagcctga

SEQ ID NO: 252418 - DNA, 15 bp, Homo sapiens
gcctcccccagcctg

SEQ ID NO: 252419 - DNA, 15 bp, Homo sapiens
agcctcccccagcct

SEQ ID NO: 252420 - DNA, 15 bp, Homo sapiens
cagcctcccccagcc

SEQ ID NO: 252421 - DNA, 15 bp, Homo sapiens
gcagcctcccccagc

SEQ ID NO: 252422 - DNA, 15 bp, Homo sapiens
ggcagcctcccccag

SEQ ID NO: 252423 - DNA, 15 bp, Homo sapiens
tggcagcctccccca

SEQ ID NO: 252424 - DNA, 15 bp, Homo sapiens
ctggcagcctccccc

SEQ ID NO: 252425 - DNA, 15 bp, Homo sapiens
cctggcagcctcccc

SEQ ID NO: 252426 - DNA, 15 bp, Homo sapiens
gcctggcagcctccc

SEQ ID NO: 252427 - DNA, 15 bp, Homo sapiens
ggcctggcagcctcc

SEQ ID NO: 252428 - DNA, 15 bp, Homo sapiens
gggcctggcagcctc

SEQ ID NO: 252429 - DNA, 15 bp, Homo sapiens
tgggcctggcagcct

SEQ ID NO: 252430 - DNA, 15 bp, Homo sapiens
ctgggcctggcagcc

SEQ ID NO: 252431 - DNA, 15 bp, Homo sapiens
cctgggcctggcagc

SEQ ID NO: 252432 - DNA, 15 bp, Homo sapiens
tcctgggcctggcag

SEQ ID NO: 252433 - DNA, 15 bp, Homo sapiens
ctcctgggcctggca

SEQ ID NO: 252434 - DNA, 15 bp, Homo sapiens
cctcctgggcctggc

SEQ ID NO: 252435 - DNA, 15 bp, Homo sapiens
acctcctgggcctgg

SEQ ID NO: 252436 - DNA, 15 bp, Homo sapiens
cacctcctgggcctg

SEQ ID NO: 252437 - DNA, 15 bp, Homo sapiens
tcacctcctgggcct

SEQ ID NO: 252438 - DNA, 15 bp, Homo sapiens
ctcacctcctgggcc

SEQ ID NO: 252439 - DNA, 15 bp, Homo sapiens
tctcacctcctgggc

SEQ ID NO: 252440 - DNA, 15 bp, Homo sapiens
ttctcacctcctggg

SEQ ID NO: 252441 - DNA, 15 bp, Homo sapiens
cttctcacctcctgg

SEQ ID NO: 252442 - DNA, 15 bp, Homo sapiens
acttctcacctcctg

SEQ ID NO: 252443 - DNA, 15 bp, Homo sapiens
tacttctcacctcct

SEQ ID NO: 252444 - DNA, 15 bp, Homo sapiens
ctacttctcacctcc

SEQ ID NO: 252445 - DNA, 15 bp, Homo sapiens
cctacttctcacctc

SEQ ID NO: 252446 - DNA, 15 bp, Homo sapiens
acctacttctcacct

SEQ ID NO: 252447 - DNA, 15 bp, Homo sapiens
cacctacttctcacc

SEQ ID NO: 252448 - DNA, 15 bp, Homo sapiens
ccacctacttctcac

SEQ ID NO: 252449 - DNA, 15 bp, Homo sapiens
gccacctacttctca

SEQ ID NO: 252450 - DNA, 15 bp, Homo sapiens
ggccacctacttctc

SEQ ID NO: 252451 - DNA, 15 bp, Homo sapiens
aggccacctacttct

SEQ ID NO: 252452 - DNA, 15 bp, Homo sapiens
gaggccacctacttc

SEQ ID NO: 252453 - DNA, 15 bp, Homo sapiens
ggaggccacctactt

SEQ ID NO: 252454 - DNA, 15 bp, Homo sapiens
tggaggccacctact

SEQ ID NO: 252455 - DNA, 15 bp, Homo sapiens
ctggaggccacctac

SEQ ID NO: 252456 - DNA, 15 bp, Homo sapiens
gctggaggccaccta

SEQ ID NO: 252457 - DNA, 15 bp, Homo sapiens
ggctggaggccacct

SEQ ID NO: 252458 - DNA, 15 bp, Homo sapiens
cggctggaggccacc

SEQ ID NO: 252459 - DNA, 15 bp, Homo sapiens
acggctggaggccac

SEQ ID NO: 252460 - DNA, 15 bp, Homo sapiens
cacggctggaggcca

SEQ ID NO: 252461 - DNA, 15 bp, Homo sapiens
acacggctggaggcc

SEQ ID NO: 252462 - DNA, 15 bp, Homo sapiens
aacacggctggaggc

SEQ ID NO: 252463 - DNA, 15 bp, Homo sapiens
aaacacggctggagg

SEQ ID NO: 252464 - DNA, 15 bp, Homo sapiens
gaaacacggctggag

SEQ ID NO: 252465 - DNA, 15 bp, Homo sapiens
ggaaacacggctgga

SEQ ID NO: 252466 - DNA, 15 bp, Homo sapiens
aggaaacacggctgg

SEQ ID NO: 252467 - DNA, 15 bp, Homo sapiens
caggaaacacggctg

SEQ ID NO: 252468 - DNA, 15 bp, Homo sapiens
tcaggaaacacggct

SEQ ID NO: 252469 - DNA, 15 bp, Homo sapiens
ttcaggaaacacggc

SEQ ID NO: 252470 - DNA, 15 bp, Homo sapiens
attcaggaaacacgg

SEQ ID NO: 252471 - DNA, 15 bp, Homo sapiens
cattcaggaaacacg

SEQ ID NO: 252472 - DNA, 15 bp, Homo sapiens
gcattcaggaaacac

SEQ ID NO: 252473 - DNA, 15 bp, Homo sapiens
agcattcaggaaaca

SEQ ID NO: 252474 - DNA, 15 bp, Homo sapiens
cagcattcaggaaac

SEQ ID NO: 252475 - DNA, 15 bp, Homo sapiens
ccagcattcaggaaa

SEQ ID NO: 252476 - DNA, 15 bp, Homo sapiens
tccagcattcaggaa

SEQ ID NO: 252477 - DNA, 15 bp, Homo sapiens
gtccagcattcagga

SEQ ID NO: 252478 - DNA, 15 bp, Homo sapiens
agtccagcattcagg

SEQ ID NO: 252479 - DNA, 15 bp, Homo sapiens
cagtccagcattcag

SEQ ID NO: 252480 - DNA, 15 bp, Homo sapiens
tcagtccagcattca

SEQ ID NO: 252481 - DNA, 15 bp, Homo sapiens
atcagtccagcattc

SEQ ID NO: 252482 - DNA, 15 bp, Homo sapiens
tatcagtccagcatt

SEQ ID NO: 252483 - DNA, 15 bp, Homo sapiens
ctatcagtccagcat

SEQ ID NO: 252484 - DNA, 15 bp, Homo sapiens
actatcagtccagca

SEQ ID NO: 252485 - DNA, 15 bp, Homo sapiens
aactatcagtccagc

SEQ ID NO: 252486 - DNA, 15 bp, Homo sapiens
aaactatcagtccag

SEQ ID NO: 252487 - DNA, 15 bp, Homo sapiens
gaaactatcagtcca

SEQ ID NO: 252488 - DNA, 15 bp, Homo sapiens
ggaaactatcagtcc

SEQ ID NO: 252489 - DNA, 15 bp, Homo sapiens
cggaaactatcagtc

SEQ ID NO: 252490 - DNA, 15 bp, Homo sapiens
gcggaaactatcagt

SEQ ID NO: 252491 - DNA, 15 bp, Homo sapiens
agcggaaactatcag

SEQ ID NO: 252492 - DNA, 15 bp, Homo sapiens
cagcggaaactatca

SEQ ID NO: 252493 - DNA, 15 bp, Homo sapiens
acagcggaaactatc

SEQ ID NO: 252494 - DNA, 15 bp, Homo sapiens
aacagcggaaactat

SEQ ID NO: 252495 - DNA, 15 bp, Homo sapiens
aaacagcggaaacta

SEQ ID NO: 252496 - DNA, 15 bp, Homo sapiens
taaacagcggaaact

SEQ ID NO: 252497 - DNA, 15 bp, Homo sapiens
gtaaacagcggaaac

SEQ ID NO: 252498 - DNA, 15 bp, Homo sapiens
ggtaaacagcggaaa

SEQ ID NO: 252499 - DNA, 15 bp, Homo sapiens
tggtaaacagcggaa

SEQ ID NO: 252500 - DNA, 15 bp, Homo sapiens
atggtaaacagcgga

SEQ ID NO: 252501 - DNA, 15 bp, Homo sapiens
aatggtaaacagcgg

SEQ ID NO: 252502 - DNA, 15 bp, Homo sapiens
aaatggtaaacagcg

SEQ ID NO: 252503 - DNA, 15 bp, Homo sapiens
caaatggtaaacagc

SEQ ID NO: 252504 - DNA, 15 bp, Homo sapiens
acaaatggtaaacag

SEQ ID NO: 252505 - DNA, 15 bp, Homo sapiens
aacaaatggtaaaca

SEQ ID NO: 252506 - DNA, 15 bp, Homo sapiens
caacaaatggtaaac

SEQ ID NO: 252507 - DNA, 15 bp, Homo sapiens
ccaacaaatggtaaa

SEQ ID NO: 252508 - DNA, 15 bp, Homo sapiens
gccaacaaatggtaa

SEQ ID NO: 252509 - DNA, 15 bp, Homo sapiens
tgccaacaaatggta

SEQ ID NO: 252510 - DNA, 15 bp, Homo sapiens
ctgccaacaaatggt

SEQ ID NO: 252511 - DNA, 15 bp, Homo sapiens
tctgccaacaaatgg

SEQ ID NO: 252512 - DNA, 15 bp, Homo sapiens
ctctgccaacaaatg

SEQ ID NO: 252513 - DNA, 15 bp, Homo sapiens
tctctgccaacaaat

SEQ ID NO: 252514 - DNA, 15 bp, Homo sapiens
gtctctgccaacaaa

SEQ ID NO: 252515 - DNA, 15 bp, Homo sapiens
tgtctctgccaacaa

SEQ ID NO: 252516 - DNA, 15 bp, Homo sapiens
ctgtctctgccaaca

SEQ ID NO: 252517 - DNA, 15 bp, Homo sapiens
tctgtctctgccaac

SEQ ID NO: 252518 - DNA, 15 bp, Homo sapiens
atctgtctctgccaa

SEQ ID NO: 252519 - DNA, 15 bp, Homo sapiens
catctgtctctgcca

SEQ ID NO: 252520 - DNA, 15 bp, Homo sapiens
ccatctgtctctgcc

SEQ ID NO: 252521 - DNA, 15 bp, Homo sapiens
accatctgtctctgc

SEQ ID NO: 252522 - DNA, 15 bp, Homo sapiens
gaccatctgtctctg

SEQ ID NO: 252523 - DNA, 15 bp, Homo sapiens
tgaccatctgtctct

SEQ ID NO: 252524 - DNA, 15 bp, Homo sapiens
ctgaccatctgtctc

SEQ ID NO: 252525 - DNA, 15 bp, Homo sapiens
actgaccatctgtct

SEQ ID NO: 252526 - DNA, 15 bp, Homo sapiens
gactgaccatctgtc

SEQ ID NO: 252527 - DNA, 15 bp, Homo sapiens
agactgaccatctgt

SEQ ID NO: 252528 - DNA, 15 bp, Homo sapiens
cagactgaccatctg

SEQ ID NO: 252529 - DNA, 15 bp, Homo sapiens
ccagactgaccatct

SEQ ID NO: 252530 - DNA, 15 bp, Homo sapiens
tccagactgaccatc

SEQ ID NO: 252531 - DNA, 15 bp, Homo sapiens
ctccagactgaccat

SEQ ID NO: 252532 - DNA, 15 bp, Homo sapiens
cctccagactgacca

SEQ ID NO: 252533 - DNA, 15 bp, Homo sapiens
tcctccagactgacc

SEQ ID NO: 252534 - DNA, 15 bp, Homo sapiens
atcctccagactgac

SEQ ID NO: 252535 - DNA, 15 bp, Homo sapiens
catcctccagactga

SEQ ID NO: 252536 - DNA, 15 bp, Homo sapiens
tcatcctccagactg

SEQ ID NO: 252537 - DNA, 15 bp, Homo sapiens
gtcatcctccagact

SEQ ID NO: 252538 - DNA, 15 bp, Homo sapiens
cgtcatcctccagac

SEQ ID NO: 252539 - DNA, 15 bp, Homo sapiens
acgtcatcctccaga

SEQ ID NO: 252540 - DNA, 15 bp, Homo sapiens
cacgtcatcctccag

SEQ ID NO: 252541 - DNA, 15 bp, Homo sapiens
ccacgtcatcctcca

SEQ ID NO: 252542 - DNA, 15 bp, Homo sapiens
gccacgtcatcctcc

SEQ ID NO: 252543 - DNA, 15 bp, Homo sapiens
cgccacgtcatcctc

SEQ ID NO: 252544 - DNA, 15 bp, Homo sapiens
acgccacgtcatcct

SEQ ID NO: 252545 - DNA, 15 bp, Homo sapiens
cacgccacgtcatcc

SEQ ID NO: 252546 - DNA, 15 bp, Homo sapiens
tcacgccacgtcatc

SEQ ID NO: 252547 - DNA, 15 bp, Homo sapiens
ttcacgccacgtcat

SEQ ID NO: 252548 - DNA, 15 bp, Homo sapiens
gttcacgccacgtca

SEQ ID NO: 252549 - DNA, 15 bp, Homo sapiens
tgttcacgccacgtc

SEQ ID NO: 252550 - DNA, 15 bp, Homo sapiens
atgttcacgccacgt

SEQ ID NO: 252551 - DNA, 15 bp, Homo sapiens
gatgttcacgccacg

SEQ ID NO: 252552 - DNA, 15 bp, Homo sapiens
agatgttcacgccac

SEQ ID NO: 252553 - DNA, 15 bp, Homo sapiens
cagatgttcacgcca

SEQ ID NO: 252554 - DNA, 15 bp, Homo sapiens
gcagatgttcacgcc

SEQ ID NO: 252555 - DNA, 15 bp, Homo sapiens
ggcagatgttcacgc

SEQ ID NO: 252556 - DNA, 15 bp, Homo sapiens
aggcagatgttcacg

SEQ ID NO: 252557 - DNA, 15 bp, Homo sapiens
caggcagatgttcac

SEQ ID NO: 252558 - DNA, 15 bp, Homo sapiens
ccaggcagatgttca

SEQ ID NO: 252559 - DNA, 15 bp, Homo sapiens
tccaggcagatgttc

SEQ ID NO: 252560 - DNA, 15 bp, Homo sapiens
ctccaggcagatgtt

SEQ ID NO: 252561 - DNA, 15 bp, Homo sapiens
actccaggcagatgt

SEQ ID NO: 252562 - DNA, 15 bp, Homo sapiens
gactccaggcagatg

SEQ ID NO: 252563 - DNA, 15 bp, Homo sapiens
ggactccaggcagat

SEQ ID NO: 252564 - DNA, 15 bp, Homo sapiens
gggactccaggcaga

SEQ ID NO: 252565 - DNA, 15 bp, Homo sapiens
cgggactccaggcag

SEQ ID NO: 252566 - DNA, 15 bp, Homo sapiens
acgggactccaggca

SEQ ID NO: 252567 - DNA, 15 bp, Homo sapiens
gacgggactccaggc

SEQ ID NO: 252568 - DNA, 15 bp, Homo sapiens
ggacgggactccagg

SEQ ID NO: 252569 - DNA, 15 bp, Homo sapiens
gggacgggactccag

SEQ ID NO: 252570 - DNA, 15 bp, Homo sapiens
agggacgggactcca

SEQ ID NO: 252571 - DNA, 15 bp, Homo sapiens
cagggacgggactcc

SEQ ID NO: 252572 - DNA, 15 bp, Homo sapiens
gcagggacgggactc

SEQ ID NO: 252573 - DNA, 15 bp, Homo sapiens
ggcagggacgggact

SEQ ID NO: 252574 - DNA, 15 bp, Homo sapiens
gggcagggacgggac

SEQ ID NO: 252575 - DNA, 15 bp, Homo sapiens
tgggcagggacggga

SEQ ID NO: 252576 - DNA, 15 bp, Homo sapiens
ctgggcagggacggg

SEQ ID NO: 252577 - DNA, 15 bp, Homo sapiens
tctgggcagggacgg

SEQ ID NO: 252578 - DNA, 15 bp, Homo sapiens
ttctgggcagggacg

SEQ ID NO: 252579 - DNA, 15 bp, Homo sapiens
gttctgggcagggac

SEQ ID NO: 252580 - DNA, 15 bp, Homo sapiens
ggttctgggcaggga

SEQ ID NO: 252581 - DNA, 15 bp, Homo sapiens
gggttctgggcaggg

SEQ ID NO: 252582 - DNA, 15 bp, Homo sapiens
agggttctgggcagg

SEQ ID NO: 252583 - DNA, 15 bp, Homo sapiens
aagggttctgggcag

SEQ ID NO: 252584 - DNA, 15 bp, Homo sapiens
gaagggttctgggca

SEQ ID NO: 252585 - DNA, 15 bp, Homo sapiens
ggaagggttctgggc

SEQ ID NO: 252586 - DNA, 15 bp, Homo sapiens
aggaagggttctggg

SEQ ID NO: 252587 - DNA, 15 bp, Homo sapiens
caggaagggttctgg

SEQ ID NO: 252588 - DNA, 15 bp, Homo sapiens
tcaggaagggttctg

SEQ ID NO: 252589 - DNA, 15 bp, Homo sapiens
ctcaggaagggttct

SEQ ID NO: 252590 - DNA, 15 bp, Homo sapiens
tctcaggaagggttc

SEQ ID NO: 252591 - DNA, 15 bp, Homo sapiens
gtctcaggaagggtt

SEQ ID NO: 252592 - DNA, 15 bp, Homo sapiens
ggtctcaggaagggt

SEQ ID NO: 252593 - DNA, 15 bp, Homo sapiens
aggtctcaggaaggg

SEQ ID NO: 252594 - DNA, 15 bp, Homo sapiens
gaggtctcaggaagg

SEQ ID NO: 252595 - DNA, 15 bp, Homo sapiens
cgaggtctcaggaag

SEQ ID NO: 252596 - DNA, 15 bp, Homo sapiens
gcgaggtctcaggaa

SEQ ID NO: 252597 - DNA, 15 bp, Homo sapiens
ggcgaggtctcagga

SEQ ID NO: 252598 - DNA, 15 bp, Homo sapiens
cggcgaggtctcagg

SEQ ID NO: 252599 - DNA, 15 bp, Homo sapiens
ccggcgaggtctcag

SEQ ID NO: 252600 - DNA, 15 bp, Homo sapiens
gccggcgaggtctca

SEQ ID NO: 252601 - DNA, 15 bp, Homo sapiens
ggccggcgaggtctc

SEQ ID NO: 252602 - DNA, 15 bp, Homo sapiens
aggccggcgaggtct

SEQ ID NO: 252603 - DNA, 15 bp, Homo sapiens
aaggccggcgaggtc

SEQ ID NO: 252604 - DNA, 15 bp, Homo sapiens
caaggccggcgaggt

SEQ ID NO: 252605 - DNA, 15 bp, Homo sapiens
acaaggccggcgagg

SEQ ID NO: 252606 - DNA, 15 bp, Homo sapiens
aacaaggccggcgag

SEQ ID NO: 252607 - DNA, 15 bp, Homo sapiens
aaacaaggccggcga

SEQ ID NO: 252608 - DNA, 15 bp, Homo sapiens
aaaacaaggccggcg

SEQ ID NO: 252609 - DNA, 15 bp, Homo sapiens
taaaacaaggccggc

SEQ ID NO: 252610 - DNA, 15 bp, Homo sapiens
ataaaacaaggccgg

SEQ ID NO: 252611 - DNA, 15 bp, Homo sapiens
aataaaacaaggccg

SEQ ID NO: 252612 - DNA, 15 bp, Homo sapiens
gaataaaacaaggcc

SEQ ID NO: 252613 - DNA, 15 bp, Homo sapiens
tgaataaaacaaggc

SEQ ID NO: 252614 - DNA, 15 bp, Homo sapiens
ttgaataaaacaagg

SEQ ID NO: 252615 - DNA, 15 bp, Homo sapiens
tttgaataaaacaag

SEQ ID NO: 252616 - DNA, 15 bp, Homo sapiens
ctttgaataaaacaa

SEQ ID NO: 252617 - DNA, 15 bp, Homo sapiens
tctttgaataaaaca

SEQ ID NO: 252618 - DNA, 15 bp, Homo sapiens
gtctttgaataaaac

SEQ ID NO: 252619 - DNA, 15 bp, Homo sapiens
tgtctttgaataaaa

SEQ ID NO: 252620 - DNA, 15 bp, Homo sapiens
ctgtctttgaataaa

SEQ ID NO: 252621 - DNA, 15 bp, Homo sapiens
tctgtctttgaataa

SEQ ID NO: 252622 - DNA, 15 bp, Homo sapiens
ctctgtctttgaata

SEQ ID NO: 252623 - DNA, 15 bp, Homo sapiens
tctctgtctttgaat

SEQ ID NO: 252624 - DNA, 15 bp, Homo sapiens
ttctctgtctttgaa

SEQ ID NO: 252625 - DNA, 15 bp, Homo sapiens
cttctctgtctttga

SEQ ID NO: 252626 - DNA, 15 bp, Homo sapiens
tcttctctgtctttg

SEQ ID NO: 252627 - DNA, 15 bp, Homo sapiens
gtcttctctgtcttt

SEQ ID NO: 252628 - DNA, 15 bp, Homo sapiens
ggtcttctctgtctt

SEQ ID NO: 252629 - DNA, 15 bp, Homo sapiens
tggtcttctctgtct

SEQ ID NO: 252630 - DNA, 15 bp, Homo sapiens
ttggtcttctctgtc

SEQ ID NO: 252631 - DNA, 15 bp, Homo sapiens
tttggtcttctctgt

SEQ ID NO: 252632 - DNA, 15 bp, Homo sapiens
ctttggtcttctctg

SEQ ID NO: 252633 - DNA, 15 bp, Homo sapiens
gctttggtcttctct

SEQ ID NO: 252634 - DNA, 15 bp, Homo sapiens
tgctttggtcttctc

SEQ ID NO: 252635 - DNA, 15 bp, Homo sapiens
atgctttggtcttct

SEQ ID NO: 252636 - DNA, 15 bp, Homo sapiens
aatgctttggtcttc

SEQ ID NO: 252637 - DNA, 15 bp, Homo sapiens
caatgctttggtctt

SEQ ID NO: 252638 - DNA, 15 bp, Homo sapiens
gcaatgctttggtct

SEQ ID NO: 252639 - DNA, 15 bp, Homo sapiens
ggcaatgctttggtc

SEQ ID NO: 252640 - DNA, 15 bp, Homo sapiens
aggcaatgctttggt

SEQ ID NO: 252641 - DNA, 15 bp, Homo sapiens
caggcaatgctttgg

SEQ ID NO: 252642 - DNA, 15 bp, Homo sapiens
gcaggcaatgctttg

SEQ ID NO: 252643 - DNA, 15 bp, Homo sapiens
ggcaggcaatgcttt

SEQ ID NO: 252644 - DNA, 15 bp, Homo sapiens
tggcaggcaatgctt

SEQ ID NO: 252645 - DNA, 15 bp, Homo sapiens
ctggcaggcaatgct

SEQ ID NO: 252646 - DNA, 15 bp, Homo sapiens
tctggcaggcaatgc

SEQ ID NO: 252647 - DNA, 15 bp, Homo sapiens
ctctggcaggcaatg

SEQ ID NO: 252648 - DNA, 15 bp, Homo sapiens
gctctggcaggcaat

SEQ ID NO: 252649 - DNA, 15 bp, Homo sapiens
agctctggcaggcaa

SEQ ID NO: 252650 - DNA, 15 bp, Homo sapiens
aagctctggcaggca

SEQ ID NO: 252651 - DNA, 15 bp, Homo sapiens
aaagctctggcaggc

SEQ ID NO: 252652 - DNA, 15 bp, Homo sapiens
caaagctctggcagg

SEQ ID NO: 252653 - DNA, 15 bp, Homo sapiens
acaaagctctggcag

SEQ ID NO: 252654 - DNA, 15 bp, Homo sapiens
aacaaagctctggca

SEQ ID NO: 252655 - DNA, 15 bp, Homo sapiens
aaacaaagctctggc

SEQ ID NO: 252656 - DNA, 15 bp, Homo sapiens
aaaacaaagctctgg

SEQ ID NO: 252657 - DNA, 15 bp, Homo sapiens
taaaacaaagctctg

SEQ ID NO: 252658 - DNA, 15 bp, Homo sapiens
ataaaacaaagctct

SEQ ID NO: 252659 - DNA, 15 bp, Homo sapiens
tataaaacaaagctc

SEQ ID NO: 252660 - DNA, 15 bp, Homo sapiens
atataaaacaaagct

SEQ ID NO: 252661 - DNA, 15 bp, Homo sapiens
tatataaaacaaagc

SEQ ID NO: 252662 - DNA, 15 bp, Homo sapiens
atatataaaacaaag

SEQ ID NO: 252663 - DNA, 15 bp, Homo sapiens
aatatataaaacaaa

SEQ ID NO: 252664 - DNA, 15 bp, Homo sapiens
aaatatataaaacaa

SEQ ID NO: 252665 - DNA, 15 bp, Homo sapiens
taaatatataaaaca

SEQ ID NO: 252666 - DNA, 15 bp, Homo sapiens
ataaatatataaaac

SEQ ID NO: 252667 - DNA, 15 bp, Homo sapiens
aataaatatataaaa

SEQ ID NO: 252668 - DNA, 15 bp, Homo sapiens
gaataaatatataaa

SEQ ID NO: 252669 - DNA, 15 bp, Homo sapiens
tgaataaatatataa

SEQ ID NO: 252670 - DNA, 15 bp, Homo sapiens
atgaataaatatata

SEQ ID NO: 252671 - DNA, 15 bp, Homo sapiens
gatgaataaatatat

SEQ ID NO: 252672 - DNA, 15 bp, Homo sapiens
agatgaataaatata

SEQ ID NO: 252673 - DNA, 15 bp, Homo sapiens
cagatgaataaatat

SEQ ID NO: 252674 - DNA, 15 bp, Homo sapiens
ccagatgaataaata

SEQ ID NO: 252675 - DNA, 15 bp, Homo sapiens
cccagatgaataaat

SEQ ID NO: 252676 - DNA, 15 bp, Homo sapiens
tcccagatgaataaa

SEQ ID NO: 252677 - DNA, 15 bp, Homo sapiens
ctcccagatgaataa

SEQ ID NO: 252678 - DNA, 15 bp, Homo sapiens
cctcccagatgaata

SEQ ID NO: 252679 - DNA, 15 bp, Homo sapiens
gcctcccagatgaat

SEQ ID NO: 252680 - DNA, 15 bp, Homo sapiens
tgcctcccagatgaa

SEQ ID NO: 252681 - DNA, 15 bp, Homo sapiens
ctgcctcccagatga

SEQ ID NO: 252682 - DNA, 15 bp, Homo sapiens
tctgcctcccagatg

SEQ ID NO: 252683 - DNA, 15 bp, Homo sapiens
ttctgcctcccagat

SEQ ID NO: 252684 - DNA, 15 bp, Homo sapiens
gttctgcctcccaga

SEQ ID NO: 252685 - DNA, 15 bp, Homo sapiens
tgttctgcctcccag

SEQ ID NO: 252686 - DNA, 15 bp, Homo sapiens
ctgttctgcctccca

SEQ ID NO: 252687 - DNA, 15 bp, Homo sapiens
cctgttctgcctccc

SEQ ID NO: 252688 - DNA, 15 bp, Homo sapiens
gcctgttctgcctcc

SEQ ID NO: 252689 - DNA, 15 bp, Homo sapiens
agcctgttctgcctc

SEQ ID NO: 252690 - DNA, 15 bp, Homo sapiens
aagcctgttctgcct

SEQ ID NO: 252691 - DNA, 15 bp, Homo sapiens
gaagcctgttctgcc

SEQ ID NO: 252692 - DNA, 15 bp, Homo sapiens
cgaagcctgttctgc

SEQ ID NO: 252693 - DNA, 15 bp, Homo sapiens
ccgaagcctgttctg

SEQ ID NO: 252694 - DNA, 15 bp, Homo sapiens
tccgaagcctgttct

SEQ ID NO: 252695 - DNA, 15 bp, Homo sapiens
gtccgaagcctgttc

SEQ ID NO: 252696 - DNA, 15 bp, Homo sapiens
tgtccgaagcctgtt

SEQ ID NO: 252697 - DNA, 15 bp, Homo sapiens
ctgtccgaagcctgt

SEQ ID NO: 252698 - DNA, 15 bp, Homo sapiens
actgtccgaagcctg

SEQ ID NO: 252699 - DNA, 15 bp, Homo sapiens
cactgtccgaagcct

SEQ ID NO: 252700 - DNA, 15 bp, Homo sapiens
gcactgtccgaagcc

SEQ ID NO: 252701 - DNA, 15 bp, Homo sapiens
ggcactgtccgaagc

SEQ ID NO: 252702 - DNA, 15 bp, Homo sapiens
gggcactgtccgaag

SEQ ID NO: 252703 - DNA, 15 bp, Homo sapiens
tgggcactgtccgaa

SEQ ID NO: 252704 - DNA, 15 bp, Homo sapiens
atgggcactgtccga

SEQ ID NO: 252705 - DNA, 15 bp, Homo sapiens
catgggcactgtccg

SEQ ID NO: 252706 - DNA, 15 bp, Homo sapiens
gcatgggcactgtcc

SEQ ID NO: 252707 - DNA, 15 bp, Homo sapiens
tgcatgggcactgtc

SEQ ID NO: 252708 - DNA, 15 bp, Homo sapiens
ttgcatgggcactgt

SEQ ID NO: 252709 - DNA, 15 bp, Homo sapiens
attgcatgggcactg

SEQ ID NO: 252710 - DNA, 15 bp, Homo sapiens
cattgcatgggcact

SEQ ID NO: 252711 - DNA, 15 bp, Homo sapiens
ccattgcatgggcac

SEQ ID NO: 252712 - DNA, 15 bp, Homo sapiens
gccattgcatgggca

SEQ ID NO: 252713 - DNA, 15 bp, Homo sapiens
agccattgcatgggc

SEQ ID NO: 252714 - DNA, 15 bp, Homo sapiens
aagccattgcatggg

SEQ ID NO: 252715 - DNA, 15 bp, Homo sapiens
caagccattgcatgg

SEQ ID NO: 252716 - DNA, 15 bp, Homo sapiens
ccaagccattgcatg

SEQ ID NO: 252717 - DNA, 15 bp, Homo sapiens
cccaagccattgcat

SEQ ID NO: 252718 - DNA, 15 bp, Homo sapiens
acccaagccattgca

SEQ ID NO: 252719 - DNA, 15 bp, Homo sapiens
aacccaagccattgc

SEQ ID NO: 252720 - DNA, 15 bp, Homo sapiens
caacccaagccattg

SEQ ID NO: 252721 - DNA, 15 bp, Homo sapiens
ccaacccaagccatt

SEQ ID NO: 252722 - DNA, 15 bp, Homo sapiens
cccaacccaagccat

SEQ ID NO: 252723 - DNA, 15 bp, Homo sapiens
tcccaacccaagcca

SEQ ID NO: 252724 - DNA, 15 bp, Homo sapiens
atcccaacccaagcc

SEQ ID NO: 252725 - DNA, 15 bp, Homo sapiens
aatcccaacccaagc

SEQ ID NO: 252726 - DNA, 15 bp, Homo sapiens
aaatcccaacccaag

SEQ ID NO: 252727 - DNA, 15 bp, Homo sapiens
aaaatcccaacccaa

SEQ ID NO: 252728 - DNA, 15 bp, Homo sapiens
caaaatcccaaccca

SEQ ID NO: 252729 - DNA, 15 bp, Homo sapiens
ccaaaatcccaaccc

SEQ ID NO: 252730 - DNA, 15 bp, Homo sapiens
accaaaatcccaacc

SEQ ID NO: 252731 - DNA, 15 bp, Homo sapiens
aaccaaaatcccaac

SEQ ID NO: 252732 - DNA, 15 bp, Homo sapiens
aaaccaaaatcccaa

SEQ ID NO: 252733 - DNA, 15 bp, Homo sapiens
gaaaccaaaatccca

SEQ ID NO: 252734 - DNA, 15 bp, Homo sapiens
agaaaccaaaatccc

SEQ ID NO: 252735 - DNA, 15 bp, Homo sapiens
aagaaaccaaaatcc

SEQ ID NO: 252736 - DNA, 15 bp, Homo sapiens
gaagaaaccaaaatc

SEQ ID NO: 252737 - DNA, 15 bp, Homo sapiens
ggaagaaaccaaaat

SEQ ID NO: 252738 - DNA, 15 bp, Homo sapiens
aggaagaaaccaaaa

SEQ ID NO: 252739 - DNA, 15 bp, Homo sapiens
aaggaagaaaccaaa

SEQ ID NO: 252740 - DNA, 15 bp, Homo sapiens
aaaggaagaaaccaa

SEQ ID NO: 252741 - DNA, 15 bp, Homo sapiens
gaaaggaagaaacca

SEQ ID NO: 252742 - DNA, 15 bp, Homo sapiens
ggaaaggaagaaacc

SEQ ID NO: 252743 - DNA, 15 bp, Homo sapiens
aggaaaggaagaaac

SEQ ID NO: 252744 - DNA, 15 bp, Homo sapiens
gaggaaaggaagaaa

SEQ ID NO: 252745 - DNA, 15 bp, Homo sapiens
cgaggaaaggaagaa

SEQ ID NO: 252746 - DNA, 15 bp, Homo sapiens
acgaggaaaggaaga

SEQ ID NO: 252747 - DNA, 15 bp, Homo sapiens
cacgaggaaaggaag

SEQ ID NO: 252748 - DNA, 15 bp, Homo sapiens
tcacgaggaaaggaa

SEQ ID NO: 252749 - DNA, 15 bp, Homo sapiens
ttcacgaggaaagga

SEQ ID NO: 252750 - DNA, 15 bp, Homo sapiens
cttcacgaggaaagg

SEQ ID NO: 252751 - DNA, 15 bp, Homo sapiens
ccttcacgaggaaag

SEQ ID NO: 252752 - DNA, 15 bp, Homo sapiens
tccttcacgaggaaa

SEQ ID NO: 252753 - DNA, 15 bp, Homo sapiens
atccttcacgaggaa

SEQ ID NO: 252754 - DNA, 15 bp, Homo sapiens
tatccttcacgagga

SEQ ID NO: 252755 - DNA, 15 bp, Homo sapiens
ttatccttcacgagg

SEQ ID NO: 252756 - DNA, 15 bp, Homo sapiens
cttatccttcacgag

SEQ ID NO: 252757 - DNA, 15 bp, Homo sapiens
tcttatccttcacga

SEQ ID NO: 252758 - DNA, 15 bp, Homo sapiens
ctcttatccttcacg

SEQ ID NO: 252759 - DNA, 15 bp, Homo sapiens
tctcttatccttcac

SEQ ID NO: 252760 - DNA, 15 bp, Homo sapiens
ttctcttatccttca

SEQ ID NO: 252761 - DNA, 15 bp, Homo sapiens
tttctcttatccttc

SEQ ID NO: 252762 - DNA, 15 bp, Homo sapiens
gtttctcttatcctt

SEQ ID NO: 252763 - DNA, 15 bp, Homo sapiens
tgtttctcttatcct

SEQ ID NO: 252764 - DNA, 15 bp, Homo sapiens
ctgtttctcttatcc

SEQ ID NO: 252765 - DNA, 15 bp, Homo sapiens
cctgtttctcttatc

SEQ ID NO: 252766 - DNA, 15 bp, Homo sapiens
gcctgtttctcttat

SEQ ID NO: 252767 - DNA, 15 bp, Homo sapiens
ggcctgtttctctta

SEQ ID NO: 252768 - DNA, 15 bp, Homo sapiens
gggcctgtttctctt

SEQ ID NO: 252769 - DNA, 15 bp, Homo sapiens
cgggcctgtttctct

SEQ ID NO: 252770 - DNA, 15 bp, Homo sapiens
ccgggcctgtttctc

SEQ ID NO: 252771 - DNA, 15 bp, Homo sapiens
cccgggcctgtttct

SEQ ID NO: 252772 - DNA, 15 bp, Homo sapiens
ccccgggcctgtttc

SEQ ID NO: 252773 - DNA, 15 bp, Homo sapiens
cccccgggcctgttt

SEQ ID NO: 252774 - DNA, 15 bp, Homo sapiens
ccccccgggcctgtt

SEQ ID NO: 252775 - DNA, 15 bp, Homo sapiens
tccccccgggcctgt

SEQ ID NO: 252776 - DNA, 15 bp, Homo sapiens
gtccccccgggcctg

SEQ ID NO: 252777 - DNA, 15 bp, Homo sapiens
ggtccccccgggcct

SEQ ID NO: 252778 - DNA, 15 bp, Homo sapiens
tggtccccccgggcc

SEQ ID NO: 252779 - DNA, 15 bp, Homo sapiens
ctggtccccccgggc

SEQ ID NO: 252780 - DNA, 15 bp, Homo sapiens
cctggtccccccggg

SEQ ID NO: 252781 - DNA, 15 bp, Homo sapiens
tcctggtccccccgg

SEQ ID NO: 252782 - DNA, 15 bp, Homo sapiens
atcctggtccccccg

SEQ ID NO: 252783 - DNA, 15 bp, Homo sapiens
catcctggtcccccc

SEQ ID NO: 252784 - DNA, 15 bp, Homo sapiens
tcatcctggtccccc

SEQ ID NO: 252785 - DNA, 15 bp, Homo sapiens
gtcatcctggtcccc

SEQ ID NO: 252786 - DNA, 15 bp, Homo sapiens
tgtcatcctggtccc

SEQ ID NO: 252787 - DNA, 15 bp, Homo sapiens
gtgtcatcctggtcc

SEQ ID NO: 252788 - DNA, 15 bp, Homo sapiens
ggtgtcatcctggtc

SEQ ID NO: 252789 - DNA, 15 bp, Homo sapiens
aggtgtcatcctggt

SEQ ID NO: 252790 - DNA, 15 bp, Homo sapiens
gaggtgtcatcctgg

SEQ ID NO: 252791 - DNA, 15 bp, Homo sapiens
ggaggtgtcatcctg

SEQ ID NO: 252792 - DNA, 15 bp, Homo sapiens
tggaggtgtcatcct

SEQ ID NO: 252793 - DNA, 15 bp, Homo sapiens
atggaggtgtcatcc

SEQ ID NO: 252794 - DNA, 15 bp, Homo sapiens
aatggaggtgtcatc

SEQ ID NO: 252795 - DNA, 15 bp, Homo sapiens
aaatggaggtgtcat

SEQ ID NO: 252796 - DNA, 15 bp, Homo sapiens
gaaatggaggtgtca

SEQ ID NO: 252797 - DNA, 15 bp, Homo sapiens
agaaatggaggtgtc

SEQ ID NO: 252798 - DNA, 15 bp, Homo sapiens
gagaaatggaggtgt

SEQ ID NO: 252799 - DNA, 15 bp, Homo sapiens
agagaaatggaggtg

SEQ ID NO: 252800 - DNA, 15 bp, Homo sapiens
gagagaaatggaggt

SEQ ID NO: 252801 - DNA, 15 bp, Homo sapiens
ggagagaaatggagg

SEQ ID NO: 252802 - DNA, 15 bp, Homo sapiens
tggagagaaatggag

SEQ ID NO: 252803 - DNA, 15 bp, Homo sapiens
ctggagagaaatgga

SEQ ID NO: 252804 - DNA, 15 bp, Homo sapiens
cctggagagaaatgg

SEQ ID NO: 252805 - DNA, 15 bp, Homo sapiens
tcctggagagaaatg

SEQ ID NO: 252806 - DNA, 15 bp, Homo sapiens
ttcctggagagaaat

SEQ ID NO: 252807 - DNA, 15 bp, Homo sapiens
cttcctggagagaaa

SEQ ID NO: 252808 - DNA, 15 bp, Homo sapiens
acttcctggagagaa

SEQ ID NO: 252809 - DNA, 15 bp, Homo sapiens
aacttcctggagaga

SEQ ID NO: 252810 - DNA, 15 bp, Homo sapiens
aaacttcctggagag

SEQ ID NO: 252811 - DNA, 15 bp, Homo sapiens
aaaacttcctggaga

SEQ ID NO: 252812 - DNA, 15 bp, Homo sapiens
caaaacttcctggag

SEQ ID NO: 252813 - DNA, 15 bp, Homo sapiens
tcaaaacttcctgga

SEQ ID NO: 252814 - DNA, 15 bp, Homo sapiens
ctcaaaacttcctgg

SEQ ID NO: 252815 - DNA, 15 bp, Homo sapiens
actcaaaacttcctg

SEQ ID NO: 252816 - DNA, 15 bp, Homo sapiens
aactcaaaacttcct

SEQ ID NO: 252817 - DNA, 15 bp, Homo sapiens
aaactcaaaacttcc

SEQ ID NO: 252818 - DNA, 15 bp, Homo sapiens
gaaactcaaaacttc

SEQ ID NO: 252819 - DNA, 15 bp, Homo sapiens
agaaactcaaaactt

SEQ ID NO: 252820 - DNA, 15 bp, Homo sapiens
gagaaactcaaaact

SEQ ID NO: 252821 - DNA, 15 bp, Homo sapiens
agagaaactcaaaac

SEQ ID NO: 252822 - DNA, 15 bp, Homo sapiens
gagagaaactcaaaa

SEQ ID NO: 252823 - DNA, 15 bp, Homo sapiens
ggagagaaactcaaa

SEQ ID NO: 252824 - DNA, 15 bp, Homo sapiens
tggagagaaactcaa

SEQ ID NO: 252825 - DNA, 15 bp, Homo sapiens
gtggagagaaactca

SEQ ID NO: 252826 - DNA, 15 bp, Homo sapiens
ggtggagagaaactc

SEQ ID NO: 252827 - DNA, 15 bp, Homo sapiens
cggtggagagaaact

SEQ ID NO: 252828 - DNA, 15 bp, Homo sapiens
acggtggagagaaac

SEQ ID NO: 252829 - DNA, 15 bp, Homo sapiens
cacggtggagagaaa

SEQ ID NO: 252830 - DNA, 15 bp, Homo sapiens
tcacggtggagagaa

SEQ ID NO: 252831 - DNA, 15 bp, Homo sapiens
gtcacggtggagaga

SEQ ID NO: 252832 - DNA, 15 bp, Homo sapiens
tgtcacggtggagag

SEQ ID NO: 252833 - DNA, 15 bp, Homo sapiens
gtgtcacggtggaga

SEQ ID NO: 252834 - DNA, 15 bp, Homo sapiens
tgtgtcacggtggag

SEQ ID NO: 252835 - DNA, 15 bp, Homo sapiens
ttgtgtcacggtgga

SEQ ID NO: 252836 - DNA, 15 bp, Homo sapiens
attgtgtcacggtgg

SEQ ID NO: 252837 - DNA, 15 bp, Homo sapiens
gattgtgtcacggtg

SEQ ID NO: 252838 - DNA, 15 bp, Homo sapiens
ggattgtgtcacggt

SEQ ID NO: 252839 - DNA, 15 bp, Homo sapiens
aggattgtgtcacgg

SEQ ID NO: 252840 - DNA, 15 bp, Homo sapiens
gaggattgtgtcacg

SEQ ID NO: 252841 - DNA, 15 bp, Homo sapiens
tgaggattgtgtcac

SEQ ID NO: 252842 - DNA, 15 bp, Homo sapiens
ttgaggattgtgtca

SEQ ID NO: 252843 - DNA, 15 bp, Homo sapiens
tttgaggattgtgtc

SEQ ID NO: 252844 - DNA, 15 bp, Homo sapiens
gtttgaggattgtgt

SEQ ID NO: 252845 - DNA, 15 bp, Homo sapiens
tgtttgaggattgtg

SEQ ID NO: 252846 - DNA, 15 bp, Homo sapiens
atgtttgaggattgt

SEQ ID NO: 252847 - DNA, 15 bp, Homo sapiens
catgtttgaggattg

SEQ ID NO: 252848 - DNA, 15 bp, Homo sapiens
ccatgtttgaggatt

SEQ ID NO: 252849 - DNA, 15 bp, Homo sapiens
tccatgtttgaggat

SEQ ID NO: 252850 - DNA, 15 bp, Homo sapiens
ttccatgtttgagga

SEQ ID NO: 252851 - DNA, 15 bp, Homo sapiens
cttccatgtttgagg

SEQ ID NO: 252852 - DNA, 15 bp, Homo sapiens
tcttccatgtttgag

SEQ ID NO: 252853 - DNA, 15 bp, Homo sapiens
atcttccatgtttga

SEQ ID NO: 252854 - DNA, 15 bp, Homo sapiens
catcttccatgtttg

SEQ ID NO: 252855 - DNA, 15 bp, Homo sapiens
tcatcttccatgttt

SEQ ID NO: 252856 - DNA, 15 bp, Homo sapiens
ttcatcttccatgtt

SEQ ID NO: 252857 - DNA, 15 bp, Homo sapiens
tttcatcttccatgt

SEQ ID NO: 252858 - DNA, 15 bp, Homo sapiens
ctttcatcttccatg

SEQ ID NO: 252859 - DNA, 15 bp, Homo sapiens
cctttcatcttccat

SEQ ID NO: 252860 - DNA, 15 bp, Homo sapiens
ccctttcatcttcca

SEQ ID NO: 252861 - DNA, 15 bp, Homo sapiens
cccctttcatcttcc

SEQ ID NO: 252862 - DNA, 15 bp, Homo sapiens
tcccctttcatcttc

SEQ ID NO: 252863 - DNA, 15 bp, Homo sapiens
ctcccctttcatctt

SEQ ID NO: 252864 - DNA, 15 bp, Homo sapiens
cctcccctttcatct

SEQ ID NO: 252865 - DNA, 15 bp, Homo sapiens
ccctcccctttcatc

SEQ ID NO: 252866 - DNA, 15 bp, Homo sapiens
cccctcccctttcat

SEQ ID NO: 252867 - DNA, 15 bp, Homo sapiens
tcccctcccctttca

SEQ ID NO: 252868 - DNA, 15 bp, Homo sapiens
atcccctcccctttc

SEQ ID NO: 252869 - DNA, 15 bp, Homo sapiens
catcccctccccttt

SEQ ID NO: 252870 - DNA, 15 bp, Homo sapiens
acatcccctcccctt

SEQ ID NO: 252871 - DNA, 15 bp, Homo sapiens
gacatcccctcccct

SEQ ID NO: 252872 - DNA, 15 bp, Homo sapiens
tgacatcccctcccc

SEQ ID NO: 252873 - DNA, 15 bp, Homo sapiens
ctgacatcccctccc

SEQ ID NO: 252874 - DNA, 15 bp, Homo sapiens
cctgacatcccctcc

SEQ ID NO: 252875 - DNA, 15 bp, Homo sapiens
gcctgacatcccctc

SEQ ID NO: 252876 - DNA, 15 bp, Homo sapiens
ggcctgacatcccct

SEQ ID NO: 252877 - DNA, 15 bp, Homo sapiens
gggcctgacatcccc

SEQ ID NO: 252878 - DNA, 15 bp, Homo sapiens
tgggcctgacatccc

SEQ ID NO: 252879 - DNA, 15 bp, Homo sapiens
ctgggcctgacatcc

SEQ ID NO: 252880 - DNA, 15 bp, Homo sapiens
tctgggcctgacatc

SEQ ID NO: 252881 - DNA, 15 bp, Homo sapiens
ctctgggcctgacat

SEQ ID NO: 252882 - DNA, 15 bp, Homo sapiens
tctctgggcctgaca

SEQ ID NO: 252883 - DNA, 15 bp, Homo sapiens
ttctctgggcctgac

SEQ ID NO: 252884 - DNA, 15 bp, Homo sapiens
cttctctgggcctga

SEQ ID NO: 252885 - DNA, 15 bp, Homo sapiens
gcttctctgggcctg

SEQ ID NO: 252886 - DNA, 15 bp, Homo sapiens
tgcttctctgggcct

SEQ ID NO: 252887 - DNA, 15 bp, Homo sapiens
ttgcttctctgggcc

SEQ ID NO: 252888 - DNA, 15 bp, Homo sapiens
cttgcttctctgggc

SEQ ID NO: 252889 - DNA, 15 bp, Homo sapiens
acttgcttctctggg

SEQ ID NO: 252890 - DNA, 15 bp, Homo sapiens
cacttgcttctctgg

SEQ ID NO: 252891 - DNA, 15 bp, Homo sapiens
ccacttgcttctctg

SEQ ID NO: 252892 - DNA, 15 bp, Homo sapiens
gccacttgcttctct

SEQ ID NO: 252893 - DNA, 15 bp, Homo sapiens
agccacttgcttctc

SEQ ID NO: 252894 - DNA, 15 bp, Homo sapiens
aagccacttgcttct

SEQ ID NO: 252895 - DNA, 15 bp, Homo sapiens
aaagccacttgcttc

SEQ ID NO: 252896 - DNA, 15 bp, Homo sapiens
gaaagccacttgctt

SEQ ID NO: 252897 - DNA, 15 bp, Homo sapiens
tgaaagccacttgct

SEQ ID NO: 252898 - DNA, 15 bp, Homo sapiens
ttgaaagccacttgc

SEQ ID NO: 252899 - DNA, 15 bp, Homo sapiens
gttgaaagccacttg

SEQ ID NO: 252900 - DNA, 15 bp, Homo sapiens
tgttgaaagccactt

SEQ ID NO: 252901 - DNA, 15 bp, Homo sapiens
gtgttgaaagccact

SEQ ID NO: 252902 - DNA, 15 bp, Homo sapiens
tgtgttgaaagccac

SEQ ID NO: 252903 - DNA, 15 bp, Homo sapiens
gtgtgttgaaagcca

SEQ ID NO: 252904 - DNA, 15 bp, Homo sapiens
tgtgtgttgaaagcc

SEQ ID NO: 252905 - DNA, 15 bp, Homo sapiens
ttgtgtgttgaaagc

SEQ ID NO: 252906 - DNA, 15 bp, Homo sapiens
gttgtgtgttgaaag

SEQ ID NO: 252907 - DNA, 15 bp, Homo sapiens
tgttgtgtgttgaaa

SEQ ID NO: 252908 - DNA, 15 bp, Homo sapiens
ctgttgtgtgttgaa

SEQ ID NO: 252909 - DNA, 15 bp, Homo sapiens
gctgttgtgtgttga

SEQ ID NO: 252910 - DNA, 15 bp, Homo sapiens
tgctgttgtgtgttg

SEQ ID NO: 252911 - DNA, 15 bp, Homo sapiens
ctgctgttgtgtgtt

SEQ ID NO: 252912 - DNA, 15 bp, Homo sapiens
tctgctgttgtgtgt

SEQ ID NO: 252913 - DNA, 15 bp, Homo sapiens
atctgctgttgtgtg

SEQ ID NO: 252914 - DNA, 15 bp, Homo sapiens
catctgctgttgtgt

SEQ ID NO: 252915 - DNA, 15 bp, Homo sapiens
ccatctgctgttgtg

SEQ ID NO: 252916 - DNA, 15 bp, Homo sapiens
gccatctgctgttgt

SEQ ID NO: 252917 - DNA, 15 bp, Homo sapiens
tgccatctgctgttg

SEQ ID NO: 252918 - DNA, 15 bp, Homo sapiens
gtgccatctgctgtt

SEQ ID NO: 252919 - DNA, 15 bp, Homo sapiens
ggtgccatctgctgt

SEQ ID NO: 252920 - DNA, 15 bp, Homo sapiens
tggtgccatctgctg

SEQ ID NO: 252921 - DNA, 15 bp, Homo sapiens
ttggtgccatctgct

SEQ ID NO: 252922 - DNA, 15 bp, Homo sapiens
gttggtgccatctgc

SEQ ID NO: 252923 - DNA, 15 bp, Homo sapiens
cgttggtgccatctg

SEQ ID NO: 252924 - DNA, 15 bp, Homo sapiens
ccgttggtgccatct

SEQ ID NO: 252925 - DNA, 15 bp, Homo sapiens
cccgttggtgccatc

SEQ ID NO: 252926 - DNA, 15 bp, Homo sapiens
tcccgttggtgccat

SEQ ID NO: 252927 - DNA, 15 bp, Homo sapiens
gtcccgttggtgcca

SEQ ID NO: 252928 - DNA, 15 bp, Homo sapiens
ggtcccgttggtgcc

SEQ ID NO: 252929 - DNA, 15 bp, Homo sapiens
gggtcccgttggtgc

SEQ ID NO: 252930 - DNA, 15 bp, Homo sapiens
ggggtcccgttggtg

SEQ ID NO: 252931 - DNA, 15 bp, Homo sapiens
gggggtcccgttggt

SEQ ID NO: 252932 - DNA, 15 bp, Homo sapiens
agggggtcccgttgg

SEQ ID NO: 252933 - DNA, 15 bp, Homo sapiens
cagggggtcccgttg

SEQ ID NO: 252934 - DNA, 15 bp, Homo sapiens
ccagggggtcccgtt

SEQ ID NO: 252935 - DNA, 15 bp, Homo sapiens
gccagggggtcccgt

SEQ ID NO: 252936 - DNA, 15 bp, Homo sapiens
ggccagggggtcccg

SEQ ID NO: 252937 - DNA, 15 bp, Homo sapiens
gggccagggggtccc

SEQ ID NO: 252938 - DNA, 15 bp, Homo sapiens
agggccagggggtcc

SEQ ID NO: 252939 - DNA, 15 bp, Homo sapiens
cagggccagggggtc

SEQ ID NO: 252940 - DNA, 15 bp, Homo sapiens
gcagggccagggggt

SEQ ID NO: 252941 - DNA, 15 bp, Homo sapiens
ggcagggccaggggg

SEQ ID NO: 252942 - DNA, 15 bp, Homo sapiens
aggcagggccagggg

SEQ ID NO: 252943 - DNA, 15 bp, Homo sapiens
gaggcagggccaggg

SEQ ID NO: 252944 - DNA, 15 bp, Homo sapiens
tgaggcagggccagg

SEQ ID NO: 252945 - DNA, 15 bp, Homo sapiens
atgaggcagggccag

SEQ ID NO: 252946 - DNA, 15 bp, Homo sapiens
gatgaggcagggcca

SEQ ID NO: 252947 - DNA, 15 bp, Homo sapiens
ggatgaggcagggcc

SEQ ID NO: 252948 - DNA, 15 bp, Homo sapiens
tggatgaggcagggc

SEQ ID NO: 252949 - DNA, 15 bp, Homo sapiens
gtggatgaggcaggg

SEQ ID NO: 252950 - DNA, 15 bp, Homo sapiens
ggtggatgaggcagg

SEQ ID NO: 252951 - DNA, 15 bp, Homo sapiens
tggtggatgaggcag

SEQ ID NO: 252952 - DNA, 15 bp, Homo sapiens
ttggtggatgaggca

SEQ ID NO: 252953 - DNA, 15 bp, Homo sapiens
attggtggatgaggc

SEQ ID NO: 252954 - DNA, 15 bp, Homo sapiens
gattggtggatgagg

SEQ ID NO: 252955 - DNA, 15 bp, Homo sapiens
agattggtggatgag

SEQ ID NO: 252956 - DNA, 15 bp, Homo sapiens
gagattggtggatga

SEQ ID NO: 252957 - DNA, 15 bp, Homo sapiens
agagattggtggatg

SEQ ID NO: 252958 - DNA, 15 bp, Homo sapiens
tagagattggtggat

SEQ ID NO: 252959 - DNA, 15 bp, Homo sapiens
ttagagattggtgga

SEQ ID NO: 252960 - DNA, 15 bp, Homo sapiens
cttagagattggtgg

SEQ ID NO: 252961 - DNA, 15 bp, Homo sapiens
gcttagagattggtg

SEQ ID NO: 252962 - DNA, 15 bp, Homo sapiens
ggcttagagattggt

SEQ ID NO: 252963 - DNA, 15 bp, Homo sapiens
tggcttagagattgg

SEQ ID NO: 252964 - DNA, 15 bp, Homo sapiens
ttggcttagagattg

SEQ ID NO: 252965 - DNA, 15 bp, Homo sapiens
tttggcttagagatt

SEQ ID NO: 252966 - DNA, 15 bp, Homo sapiens
tcatgatccacccgc

SEQ ID NO: 252967 - DNA, 15 bp, Homo sapiens
ctcatgatccacccg

SEQ ID NO: 252968 - DNA, 15 bp, Homo sapiens
cctcatgatccaccc

SEQ ID NO: 252969 - DNA, 15 bp, Homo sapiens
acgtgttagccagga

SEQ ID NO: 252970 - DNA, 15 bp, Homo sapiens
cacgtgttagccagg

SEQ ID NO: 252971 - DNA, 15 bp, Homo sapiens
tcacgtgttagccag

SEQ ID NO: 252972 - DNA, 15 bp, Homo sapiens
ttcacgtgttagcca

SEQ ID NO: 252973 - DNA, 15 bp, Homo sapiens
tttcacgtgttagcc

SEQ ID NO: 252974 - DNA, 15 bp, Homo sapiens
gtttcacgtgttagc

SEQ ID NO: 252975 - DNA, 15 bp, Homo sapiens
ggtttcacgtgttag

SEQ ID NO: 252976 - DNA, 15 bp, Homo sapiens
gggtttcacgtgtta

SEQ ID NO: 252977 - DNA, 15 bp, Homo sapiens
ggggtttcacgtgtt

SEQ ID NO: 252978 - DNA, 15 bp, Homo sapiens
cggggtttcacgtgt

SEQ ID NO: 252979 - DNA, 15 bp, Homo sapiens
acggggtttcacgtg

SEQ ID NO: 252980 - DNA, 15 bp, Homo sapiens
gacggggtttcacgt

SEQ ID NO: 252981 - DNA, 15 bp, Homo sapiens
agacggggtttcacg

SEQ ID NO: 252982 - DNA, 15 bp, Homo sapiens
cacgcccggctaatt

SEQ ID NO: 252983 - DNA, 15 bp, Homo sapiens
ccacgcccggctaat

SEQ ID NO: 252984 - DNA, 15 bp, Homo sapiens
accacgcccggctaa

SEQ ID NO: 252985 - DNA, 15 bp, Homo sapiens
caccacgcccggcta

SEQ ID NO: 252986 - DNA, 15 bp, Homo sapiens
ccaccacgcccggct

SEQ ID NO: 252987 - DNA, 15 bp, Homo sapiens
gccaccacgcccggc

SEQ ID NO: 252988 - DNA, 15 bp, Homo sapiens
cgccaccacgcccgg

SEQ ID NO: 252989 - DNA, 15 bp, Homo sapiens
ccgccaccacgcccg

SEQ ID NO: 252990 - DNA, 15 bp, Homo sapiens
cccgccaccacgccc

SEQ ID NO: 252991 - DNA, 15 bp, Homo sapiens
gcccgccaccacgcc

SEQ ID NO: 252992 - DNA, 15 bp, Homo sapiens
tgcccgccaccacgc

SEQ ID NO: 252993 - DNA, 15 bp, Homo sapiens
gtgcccgccaccacg

SEQ ID NO: 252994 - DNA, 15 bp, Homo sapiens
ggtgcccgccaccac

SEQ ID NO: 252995 - DNA, 15 bp, Homo sapiens
ctacaggtgcccgcc

SEQ ID NO: 252996 - DNA, 15 bp, Homo sapiens
actacaggtgcccgc

SEQ ID NO: 252997 - DNA, 15 bp, Homo sapiens
gactacaggtgcccg

SEQ ID NO: 252998 - DNA, 15 bp, Homo sapiens
ggactacaggtgccc

SEQ ID NO: 252999 - DNA, 15 bp, Homo sapiens
gggactacaggtgcc

SEQ ID NO: 253000 - DNA, 15 bp, Homo sapiens
tgggactacaggtgc

SEQ ID NO: 253001 - DNA, 15 bp, Homo sapiens
ctgggactacaggtg

SEQ ID NO: 253002 - DNA, 15 bp, Homo sapiens
gctgggactacaggt

SEQ ID NO: 253003 - DNA, 15 bp, Homo sapiens
accattctcctgcct

SEQ ID NO: 253004 - DNA, 15 bp, Homo sapiens
caccattctcctgcc

SEQ ID NO: 253005 - DNA, 15 bp, Homo sapiens
acaccattctcctgc

SEQ ID NO: 253006 - DNA, 15 bp, Homo sapiens
cacaccattctcctg

SEQ ID NO: 253007 - DNA, 15 bp, Homo sapiens
tcacaccattctcct

SEQ ID NO: 253008 - DNA, 15 bp, Homo sapiens
ttcacaccattctcc

SEQ ID NO: 253009 - DNA, 15 bp, Homo sapiens
gttcacaccattctc

SEQ ID NO: 253010 - DNA, 15 bp, Homo sapiens
ggttcacaccattct

SEQ ID NO: 253011 - DNA, 15 bp, Homo sapiens
gggttcacaccattc

SEQ ID NO: 253012 - DNA, 15 bp, Homo sapiens
cgggttcacaccatt

SEQ ID NO: 253013 - DNA, 15 bp, Homo sapiens
ccgggttcacaccat

SEQ ID NO: 253014 - DNA, 15 bp, Homo sapiens
cccgggttcacacca

SEQ ID NO: 253015 - DNA, 15 bp, Homo sapiens
tcccgggttcacacc

SEQ ID NO: 253016 - DNA, 15 bp, Homo sapiens
ttcccgggttcacac

SEQ ID NO: 253017 - DNA, 15 bp, Homo sapiens
cttcccgggttcaca

SEQ ID NO: 253018 - DNA, 15 bp, Homo sapiens
gcttcccgggttcac

SEQ ID NO: 253019 - DNA, 15 bp, Homo sapiens
cgcttcccgggttca

SEQ ID NO: 253020 - DNA, 15 bp, Homo sapiens
ccgcttcccgggttc

SEQ ID NO: 253021 - DNA, 15 bp, Homo sapiens
tccgcttcccgggtt

SEQ ID NO: 253022 - DNA, 15 bp, Homo sapiens
ctccgcttcccgggt

SEQ ID NO: 253023 - DNA, 15 bp, Homo sapiens
gctccgcttcccggg

SEQ ID NO: 253024 - DNA, 15 bp, Homo sapiens
agctccgcttcccgg

SEQ ID NO: 253025 - DNA, 15 bp, Homo sapiens
aagctccgcttcccg

SEQ ID NO: 253026 - DNA, 15 bp, Homo sapiens
caagctccgcttccc

SEQ ID NO: 253027 - DNA, 15 bp, Homo sapiens
gcaagctccgcttcc

SEQ ID NO: 253028 - DNA, 15 bp, Homo sapiens
tgcaagctccgcttc

SEQ ID NO: 253029 - DNA, 15 bp, Homo sapiens
ctgcaagctccgctt

SEQ ID NO: 253030 - DNA, 15 bp, Homo sapiens
actgcaagctccgct

SEQ ID NO: 253031 - DNA, 15 bp, Homo sapiens
ctgcagtggcgcaat

SEQ ID NO: 253032 - DNA, 15 bp, Homo sapiens
actgcagtggcgcaa

SEQ ID NO: 253033 - DNA, 15 bp, Homo sapiens
gactgcagtggcgca

SEQ ID NO: 253034 - DNA, 15 bp, Homo sapiens
ggactgcagtggcgc

SEQ ID NO: 253035 - DNA, 15 bp, Homo sapiens
cggactgcagtggcg

SEQ ID NO: 253036 - DNA, 15 bp, Homo sapiens
gcggactgcagtggc

SEQ ID NO: 253037 - DNA, 15 bp, Homo sapiens
tgcggactgcagtgg

SEQ ID NO: 253038 - DNA, 15 bp, Homo sapiens
ctgcggactgcagtg

SEQ ID NO: 253039 - DNA, 15 bp, Homo sapiens
actgcggactgcagt

SEQ ID NO: 253040 - DNA, 15 bp, Homo sapiens
gactgcggactgcag

SEQ ID NO: 253041 - DNA, 15 bp, Homo sapiens
agactgcggactgca

SEQ ID NO: 253042 - DNA, 15 bp, Homo sapiens
cagactgcggactgc

SEQ ID NO: 253043 - DNA, 15 bp, Homo sapiens
ccagactgcggactg

SEQ ID NO: 253044 - DNA, 15 bp, Homo sapiens
gccagactgcggact

SEQ ID NO: 253045 - DNA, 15 bp, Homo sapiens
ggccagactgcggac

SEQ ID NO: 253046 - DNA, 15 bp, Homo sapiens
aggccagactgcgga

SEQ ID NO: 253047 - DNA, 15 bp, Homo sapiens
caggccagactgcgg

SEQ ID NO: 253048 - DNA, 15 bp, Homo sapiens
ccaggccagactgcg

SEQ ID NO: 253049 - DNA, 15 bp, Homo sapiens
cccaggccagactgc

SEQ ID NO: 253050 - DNA, 15 bp, Homo sapiens
gcccaggccagactg

SEQ ID NO: 253051 - DNA, 15 bp, Homo sapiens
cgcccaggccagact

SEQ ID NO: 253052 - DNA, 15 bp, Homo sapiens
tcgcccaggccagac

SEQ ID NO: 253053 - DNA, 15 bp, Homo sapiens
gtcgcccaggccaga

SEQ ID NO: 253054 - DNA, 15 bp, Homo sapiens
tgtcgcccaggccag

SEQ ID NO: 253055 - DNA, 15 bp, Homo sapiens
ctgtcgcccaggcca

SEQ ID NO: 253056 - DNA, 15 bp, Homo sapiens
tctgtcgcccaggcc

SEQ ID NO: 253057 - DNA, 15 bp, Homo sapiens
cgctctgtcgcccag

SEQ ID NO: 253058 - DNA, 15 bp, Homo sapiens
tcgctctgtcgccca

SEQ ID NO: 253059 - DNA, 15 bp, Homo sapiens
ctcgctctgtcgccc

SEQ ID NO: 253060 - DNA, 15 bp, Homo sapiens
tctcgctctgtcgcc

SEQ ID NO: 253061 - DNA, 15 bp, Homo sapiens
gtctcgctctgtcgc

SEQ ID NO: 253062 - DNA, 15 bp, Homo sapiens
agtctcgctctgtcg

SEQ ID NO: 253063 - DNA, 15 bp, Homo sapiens
gagtctcgctctgtc

SEQ ID NO: 253064 - DNA, 15 bp, Homo sapiens
ggagtctcgctctgt

SEQ ID NO: 253065 - DNA, 15 bp, Homo sapiens
cggagtctcgctctg

SEQ ID NO: 253066 - DNA, 15 bp, Homo sapiens
acggagtctcgctct

SEQ ID NO: 253067 - DNA, 15 bp, Homo sapiens
gacggagtctcgctc

SEQ ID NO: 253068 - DNA, 15 bp, Homo sapiens
agacggagtctcgct

SEQ ID NO: 253069 - DNA, 15 bp, Homo sapiens
gagacggagtctcgc

SEQ ID NO: 253070 - DNA, 15 bp, Homo sapiens
tgagacggagtctcg

SEQ ID NO: 253071 - DNA, 15 bp, Homo sapiens
gttttttttttttga

SEQ ID NO: 253072 - DNA, 15 bp, Homo sapiens
tgttttttttttttg

SEQ ID NO: 253073 - DNA, 15 bp, Homo sapiens
ttgtttttttttttt

SEQ ID NO: 253074 - DNA, 15 bp, Homo sapiens
tttgttttttttttt

SEQ ID NO: 253075 - DNA, 15 bp, Homo sapiens
ttttgtttttttttt

SEQ ID NO: 253076 - DNA, 15 bp, Homo sapiens
gtttttttttgtttt

SEQ ID NO: 253077 - DNA, 15 bp, Homo sapiens
ggtttttttttgttt

SEQ ID NO: 253078 - DNA, 15 bp, Homo sapiens
tggtttttttttgtt

SEQ ID NO: 253079 - DNA, 15 bp, Homo sapiens
atggtttttttttgt

SEQ ID NO: 253080 - DNA, 15 bp, Homo sapiens
catggtttttttttg

SEQ ID NO: 253081 - DNA, 15 bp, Homo sapiens
gcatggttttttttt

SEQ ID NO: 253082 - DNA, 15 bp, Homo sapiens
tgcatggtttttttt

SEQ ID NO: 253083 - DNA, 15 bp, Homo sapiens
atgcatggttttttt

SEQ ID NO: 253084 - DNA, 15 bp, Homo sapiens
catgcatggtttttt

SEQ ID NO: 253085 - DNA, 15 bp, Homo sapiens
ccatgcatggttttt

SEQ ID NO: 253086 - DNA, 15 bp, Homo sapiens
accatgcatggtttt

SEQ ID NO: 253087 - DNA, 15 bp, Homo sapiens
caccatgcatggttt

SEQ ID NO: 253088 - DNA, 15 bp, Homo sapiens
gcaccatgcatggtt

SEQ ID NO: 253089 - DNA, 15 bp, Homo sapiens
tgcaccatgcatggt

SEQ ID NO: 253090 - DNA, 15 bp, Homo sapiens
atgcaccatgcatgg

SEQ ID NO: 253091 - DNA, 15 bp, Homo sapiens
gatgcaccatgcatg

SEQ ID NO: 253092 - DNA, 15 bp, Homo sapiens
tgatgcaccatgcat

SEQ ID NO: 253093 - DNA, 15 bp, Homo sapiens
ctgatgcaccatgca

SEQ ID NO: 253094 - DNA, 15 bp, Homo sapiens
gctgatgcaccatgc

SEQ ID NO: 253095 - DNA, 15 bp, Homo sapiens
tgctgatgcaccatg

SEQ ID NO: 253096 - DNA, 15 bp, Homo sapiens
ctgctgatgcaccat

SEQ ID NO: 253097 - DNA, 15 bp, Homo sapiens
gctgctgatgcacca

SEQ ID NO: 253098 - DNA, 15 bp, Homo sapiens
ggctgctgatgcacc

SEQ ID NO: 253099 - DNA, 15 bp, Homo sapiens
gggctgctgatgcac

SEQ ID NO: 253100 - DNA, 15 bp, Homo sapiens
tgggctgctgatgca

SEQ ID NO: 253101 - DNA, 15 bp, Homo sapiens
atgggctgctgatgc

SEQ ID NO: 253102 - DNA, 15 bp, Homo sapiens
catgggctgctgatg

SEQ ID NO: 253103 - DNA, 15 bp, Homo sapiens
ccatgggctgctgat

SEQ ID NO: 253104 - DNA, 15 bp, Homo sapiens
gccatgggctgctga

SEQ ID NO: 253105 - DNA, 15 bp, Homo sapiens
ggccatgggctgctg

SEQ ID NO: 253106 - DNA, 15 bp, Homo sapiens
aggccatgggctgct

SEQ ID NO: 253107 - DNA, 15 bp, Homo sapiens
gaggccatgggctgc

SEQ ID NO: 253108 - DNA, 15 bp, Homo sapiens
agaggccatgggctg

SEQ ID NO: 253109 - DNA, 15 bp, Homo sapiens
cagaggccatgggct

SEQ ID NO: 253110 - DNA, 15 bp, Homo sapiens
ccagaggccatgggc

SEQ ID NO: 253111 - DNA, 15 bp, Homo sapiens
gccagaggccatggg

SEQ ID NO: 253112 - DNA, 15 bp, Homo sapiens
ggccagaggccatgg

SEQ ID NO: 253113 - DNA, 15 bp, Homo sapiens
tggccagaggccatg

SEQ ID NO: 253114 - DNA, 15 bp, Homo sapiens
ctggccagaggccat

SEQ ID NO: 253115 - DNA, 15 bp, Homo sapiens
cctggccagaggcca

SEQ ID NO: 253116 - DNA, 15 bp, Homo sapiens
gcctggccagaggcc

SEQ ID NO: 253117 - DNA, 15 bp, Homo sapiens
tgcctggccagaggc

SEQ ID NO: 253118 - DNA, 15 bp, Homo sapiens
atgcctggccagagg

SEQ ID NO: 253119 - DNA, 15 bp, Homo sapiens
catgcctggccagag

SEQ ID NO: 253120 - DNA, 15 bp, Homo sapiens
ccatgcctggccaga

SEQ ID NO: 253121 - DNA, 15 bp, Homo sapiens
gccatgcctggccag

SEQ ID NO: 253122 - DNA, 15 bp, Homo sapiens
cgccatgcctggcca

SEQ ID NO: 253123 - DNA, 15 bp, Homo sapiens
tcgccatgcctggcc

SEQ ID NO: 253124 - DNA, 15 bp, Homo sapiens
ctcgccatgcctggc

SEQ ID NO: 253125 - DNA, 15 bp, Homo sapiens
cctcgccatgcctgg

SEQ ID NO: 253126 - DNA, 15 bp, Homo sapiens
gcctcgccatgcctg

SEQ ID NO: 253127 - DNA, 15 bp, Homo sapiens
agcctcgccatgcct

SEQ ID NO: 253128 - DNA, 15 bp, Homo sapiens
cagcctcgccatgcc

SEQ ID NO: 253129 - DNA, 15 bp, Homo sapiens
tcagcctcgccatgc

SEQ ID NO: 253130 - DNA, 15 bp, Homo sapiens
ctcagcctcgccatg

SEQ ID NO: 253131 - DNA, 15 bp, Homo sapiens
cctcagcctcgccat

SEQ ID NO: 253132 - DNA, 15 bp, Homo sapiens
acctcagcctcgcca

SEQ ID NO: 253133 - DNA, 15 bp, Homo sapiens
cacctcagcctcgcc

SEQ ID NO: 253134 - DNA, 15 bp, Homo sapiens
ccacctcagcctcgc

SEQ ID NO: 253135 - DNA, 15 bp, Homo sapiens
cccacctcagcctcg

SEQ ID NO: 253136 - DNA, 15 bp, Homo sapiens
catcctcccacctca

SEQ ID NO: 253137 - DNA, 15 bp, Homo sapiens
ccatcctcccacctc

SEQ ID NO: 253138 - DNA, 15 bp, Homo sapiens
accatcctcccacct

SEQ ID NO: 253139 - DNA, 15 bp, Homo sapiens
aaccatcctcccacc

SEQ ID NO: 253140 - DNA, 15 bp, Homo sapiens
aaaccatcctcccac

SEQ ID NO: 253141 - DNA, 15 bp, Homo sapiens
caaaccatcctccca

SEQ ID NO: 253142 - DNA, 15 bp, Homo sapiens
tcaaaccatcctccc

SEQ ID NO: 253143 - DNA, 15 bp, Homo sapiens
ctcaaaccatcctcc

SEQ ID NO: 253144 - DNA, 15 bp, Homo sapiens
gctcaaaccatcctc

SEQ ID NO: 253145 - DNA, 15 bp, Homo sapiens
agctcaaaccatcct

SEQ ID NO: 253146 - DNA, 15 bp, Homo sapiens
gagctcaaaccatcc

SEQ ID NO: 253147 - DNA, 15 bp, Homo sapiens
tgagctcaaaccatc

SEQ ID NO: 253148 - DNA, 15 bp, Homo sapiens
ctgagctcaaaccat

SEQ ID NO: 253149 - DNA, 15 bp, Homo sapiens
cctgagctcaaacca

SEQ ID NO: 253150 - DNA, 15 bp, Homo sapiens
gcctgagctcaaacc

SEQ ID NO: 253151 - DNA, 15 bp, Homo sapiens
tgcctgagctcaaac

SEQ ID NO: 253152 - DNA, 15 bp, Homo sapiens
atgcctgagctcaaa

SEQ ID NO: 253153 - DNA, 15 bp, Homo sapiens
aatgcctgagctcaa

SEQ ID NO: 253154 - DNA, 15 bp, Homo sapiens
aaatgcctgagctca

SEQ ID NO: 253155 - DNA, 15 bp, Homo sapiens
caaatgcctgagctc

SEQ ID NO: 253156 - DNA, 15 bp, Homo sapiens
tcaaatgcctgagct

SEQ ID NO: 253157 - DNA, 15 bp, Homo sapiens
ctcaaatgcctgagc

SEQ ID NO: 253158 - DNA, 15 bp, Homo sapiens
cctcaaatgcctgag

SEQ ID NO: 253159 - DNA, 15 bp, Homo sapiens
gcctcaaatgcctga

SEQ ID NO: 253160 - DNA, 15 bp, Homo sapiens
agcctcaaatgcctg

SEQ ID NO: 253161 - DNA, 15 bp, Homo sapiens
cagcctcaaatgcct

SEQ ID NO: 253162 - DNA, 15 bp, Homo sapiens
acagcctcaaatgcc

SEQ ID NO: 253163 - DNA, 15 bp, Homo sapiens
gacagcctcaaatgc

SEQ ID NO: 253164 - DNA, 15 bp, Homo sapiens
cgacagcctcaaatg

SEQ ID NO: 253165 - DNA, 15 bp, Homo sapiens
acgacagcctcaaat

SEQ ID NO: 253166 - DNA, 15 bp, Homo sapiens
cacgacagcctcaaa

SEQ ID NO: 253167 - DNA, 15 bp, Homo sapiens
tcacgacagcctcaa

SEQ ID NO: 253168 - DNA, 15 bp, Homo sapiens
ctcacgacagcctca

SEQ ID NO: 253169 - DNA, 15 bp, Homo sapiens
gctcacgacagcctc

SEQ ID NO: 253170 - DNA, 15 bp, Homo sapiens
agctcacgacagcct

SEQ ID NO: 253171 - DNA, 15 bp, Homo sapiens
tagctcacgacagcc

SEQ ID NO: 253172 - DNA, 15 bp, Homo sapiens
atagctcacgacagc

SEQ ID NO: 253173 - DNA, 15 bp, Homo sapiens
catagctcacgacag

SEQ ID NO: 253174 - DNA, 15 bp, Homo sapiens
tcatagctcacgaca

SEQ ID NO: 253175 - DNA, 15 bp, Homo sapiens
atcatagctcacgac

SEQ ID NO: 253176 - DNA, 15 bp, Homo sapiens
aatcatagctcacga

SEQ ID NO: 253177 - DNA, 15 bp, Homo sapiens
taatcatagctcacg

SEQ ID NO: 253178 - DNA, 15 bp, Homo sapiens
ataatcatagctcac

SEQ ID NO: 253179 - DNA, 15 bp, Homo sapiens
cataatcatagctca

SEQ ID NO: 253180 - DNA, 15 bp, Homo sapiens
gcataatcatagctc

SEQ ID NO: 253181 - DNA, 15 bp, Homo sapiens
ggcataatcatagct

SEQ ID NO: 253182 - DNA, 15 bp, Homo sapiens
tggcataatcatagc

SEQ ID NO: 253183 - DNA, 15 bp, Homo sapiens
gtggcataatcatag

SEQ ID NO: 253184 - DNA, 15 bp, Homo sapiens
agtggcataatcata

SEQ ID NO: 253185 - DNA, 15 bp, Homo sapiens
cagtggcataatcat

SEQ ID NO: 253186 - DNA, 15 bp, Homo sapiens
gcagtggcataatca

SEQ ID NO: 253187 - DNA, 15 bp, Homo sapiens
agcagtggcataatc

SEQ ID NO: 253188 - DNA, 15 bp, Homo sapiens
aagcagtggcataat

SEQ ID NO: 253189 - DNA, 15 bp, Homo sapiens
aaagcagtggcataa

SEQ ID NO: 253190 - DNA, 15 bp, Homo sapiens
gaaagcagtggcata

SEQ ID NO: 253191 - DNA, 15 bp, Homo sapiens
ggaaagcagtggcat

SEQ ID NO: 253192 - DNA, 15 bp, Homo sapiens
tggaaagcagtggca

SEQ ID NO: 253193 - DNA, 15 bp, Homo sapiens
ctggaaagcagtggc

SEQ ID NO: 253194 - DNA, 15 bp, Homo sapiens
gctggaaagcagtgg

SEQ ID NO: 253195 - DNA, 15 bp, Homo sapiens
ggctggaaagcagtg

SEQ ID NO: 253196 - DNA, 15 bp, Homo sapiens
aggctggaaagcagt

SEQ ID NO: 253197 - DNA, 15 bp, Homo sapiens
caggctggaaagcag

SEQ ID NO: 253198 - DNA, 15 bp, Homo sapiens
ccaggctggaaagca

SEQ ID NO: 253199 - DNA, 15 bp, Homo sapiens
cccaggctggaaagc

SEQ ID NO: 253200 - DNA, 15 bp, Homo sapiens
gcccaggctggaaag

SEQ ID NO: 253201 - DNA, 15 bp, Homo sapiens
tgcccaggctggaaa

SEQ ID NO: 253202 - DNA, 15 bp, Homo sapiens
ttgcccaggctggaa

SEQ ID NO: 253203 - DNA, 15 bp, Homo sapiens
tactatgttgcccag

SEQ ID NO: 253204 - DNA, 15 bp, Homo sapiens
ttactatgttgccca

SEQ ID NO: 253205 - DNA, 15 bp, Homo sapiens
cttactatgttgccc

SEQ ID NO: 253206 - DNA, 15 bp, Homo sapiens
tcttactatgttgcc

SEQ ID NO: 253207 - DNA, 15 bp, Homo sapiens
gtcttactatgttgc

SEQ ID NO: 253208 - DNA, 15 bp, Homo sapiens
ggtcttactatgttg

SEQ ID NO: 253209 - DNA, 15 bp, Homo sapiens
gggtcttactatgtt

SEQ ID NO: 253210 - DNA, 15 bp, Homo sapiens
ggggtcttactatgt

SEQ ID NO: 253211 - DNA, 15 bp, Homo sapiens
tggggtcttactatg

SEQ ID NO: 253212 - DNA, 15 bp, Homo sapiens
atggggtcttactat

SEQ ID NO: 253213 - DNA, 15 bp, Homo sapiens
gatggggtcttacta

SEQ ID NO: 253214 - DNA, 15 bp, Homo sapiens
aagagatggggtctt

SEQ ID NO: 253215 - DNA, 15 bp, Homo sapiens
taagagatggggtct

SEQ ID NO: 253216 - DNA, 15 bp, Homo sapiens
ttaagagatggggtc

SEQ ID NO: 253217 - DNA, 15 bp, Homo sapiens
tttaagagatggggt

SEQ ID NO: 253218 - DNA, 15 bp, Homo sapiens
ttttaagagatgggg

SEQ ID NO: 253219 - DNA, 15 bp, Homo sapiens
tttttaagagatggg

SEQ ID NO: 253220 - DNA, 15 bp, Homo sapiens
ttttttaagagatgg

SEQ ID NO: 253221 - DNA, 15 bp, Homo sapiens
attttttaagagatg

SEQ ID NO: 253222 - DNA, 15 bp, Homo sapiens
cattttttaagagat

SEQ ID NO: 253223 - DNA, 15 bp, Homo sapiens
tcattttttaagaga

SEQ ID NO: 253224 - DNA, 15 bp, Homo sapiens
ttcattttttaagag

SEQ ID NO: 253225 - DNA, 15 bp, Homo sapiens
attcattttttaaga

SEQ ID NO: 253226 - DNA, 15 bp, Homo sapiens
aattcattttttaag

SEQ ID NO: 253227 - DNA, 15 bp, Homo sapiens
aaattcattttttaa

SEQ ID NO: 253228 - DNA, 15 bp, Homo sapiens
caaattcatttttta

SEQ ID NO: 253229 - DNA, 15 bp, Homo sapiens
ccaaattcatttttt

SEQ ID NO: 253230 - DNA, 15 bp, Homo sapiens
gccaaattcattttt

SEQ ID NO: 253231 - DNA, 15 bp, Homo sapiens
ggccaaattcatttt

SEQ ID NO: 253232 - DNA, 15 bp, Homo sapiens
tggccaaattcattt

SEQ ID NO: 253233 - DNA, 15 bp, Homo sapiens
ctggccaaattcatt

SEQ ID NO: 253234 - DNA, 15 bp, Homo sapiens
tctggccaaattcat

SEQ ID NO: 253235 - DNA, 15 bp, Homo sapiens
gtctggccaaattca

SEQ ID NO: 253236 - DNA, 15 bp, Homo sapiens
tgtctggccaaattc

SEQ ID NO: 253237 - DNA, 15 bp, Homo sapiens
gtgtctggccaaatt

SEQ ID NO: 253238 - DNA, 15 bp, Homo sapiens
tgtgtctggccaaat

SEQ ID NO: 253239 - DNA, 15 bp, Homo sapiens
ctgtgtctggccaaa

SEQ ID NO: 253240 - DNA, 15 bp, Homo sapiens
cctgtgtctggccaa

SEQ ID NO: 253241 - DNA, 15 bp, Homo sapiens
acctgtgtctggcca

SEQ ID NO: 253242 - DNA, 15 bp, Homo sapiens
cacctgtgtctggcc

SEQ ID NO: 253243 - DNA, 15 bp, Homo sapiens
gcacctgtgtctggc

SEQ ID NO: 253244 - DNA, 15 bp, Homo sapiens
ggcacctgtgtctgg

SEQ ID NO: 253245 - DNA, 15 bp, Homo sapiens
aggcacctgtgtctg

SEQ ID NO: 253246 - DNA, 15 bp, Homo sapiens
gaggcacctgtgtct

SEQ ID NO: 253247 - DNA, 15 bp, Homo sapiens
tgaggcacctgtgtc

SEQ ID NO: 253248 - DNA, 15 bp, Homo sapiens
gtgaggcacctgtgt

SEQ ID NO: 253249 - DNA, 15 bp, Homo sapiens
cgtgaggcacctgtg

SEQ ID NO: 253250 - DNA, 15 bp, Homo sapiens
gcgtgaggcacctgt

SEQ ID NO: 253251 - DNA, 15 bp, Homo sapiens
ggcgtgaggcacctg

SEQ ID NO: 253252 - DNA, 15 bp, Homo sapiens
aggcgtgaggcacct

SEQ ID NO: 253253 - DNA, 15 bp, Homo sapiens
caggcgtgaggcacc

SEQ ID NO: 253254 - DNA, 15 bp, Homo sapiens
acaggcgtgaggcac

SEQ ID NO: 253255 - DNA, 15 bp, Homo sapiens
tacaggcgtgaggca

SEQ ID NO: 253256 - DNA, 15 bp, Homo sapiens
ttacaggcgtgaggc

SEQ ID NO: 253257 - DNA, 15 bp, Homo sapiens
attacaggcgtgagg

SEQ ID NO: 253258 - DNA, 15 bp, Homo sapiens
gctcagcctcccaaa

SEQ ID NO: 253259 - DNA, 15 bp, Homo sapiens
agctcagcctcccaa

SEQ ID NO: 253260 - DNA, 15 bp, Homo sapiens
cagctcagcctccca

SEQ ID NO: 253261 - DNA, 15 bp, Homo sapiens
ccagctcagcctccc

SEQ ID NO: 253262 - DNA, 15 bp, Homo sapiens
tccagctcagcctcc

SEQ ID NO: 253263 - DNA, 15 bp, Homo sapiens
atccagctcagcctc

SEQ ID NO: 253264 - DNA, 15 bp, Homo sapiens
gatccagctcagcct

SEQ ID NO: 253265 - DNA, 15 bp, Homo sapiens
tgatccagctcagcc

SEQ ID NO: 253266 - DNA, 15 bp, Homo sapiens
gtgatccagctcagc

SEQ ID NO: 253267 - DNA, 15 bp, Homo sapiens
agtgatccagctcag

SEQ ID NO: 253268 - DNA, 15 bp, Homo sapiens
aagtgatccagctca

SEQ ID NO: 253269 - DNA, 15 bp, Homo sapiens
caagtgatccagctc

SEQ ID NO: 253270 - DNA, 15 bp, Homo sapiens
tcaagtgatccagct

SEQ ID NO: 253271 - DNA, 15 bp, Homo sapiens
ctcaagtgatccagc

SEQ ID NO: 253272 - DNA, 15 bp, Homo sapiens
actcaagtgatccag

SEQ ID NO: 253273 - DNA, 15 bp, Homo sapiens
aactcaagtgatcca

SEQ ID NO: 253274 - DNA, 15 bp, Homo sapiens
gaactcaagtgatcc

SEQ ID NO: 253275 - DNA, 15 bp, Homo sapiens
tgaactcaagtgatc

SEQ ID NO: 253276 - DNA, 15 bp, Homo sapiens
ctgaactcaagtgat

SEQ ID NO: 253277 - DNA, 15 bp, Homo sapiens
cctgaactcaagtga

SEQ ID NO: 253278 - DNA, 15 bp, Homo sapiens
tcctgaactcaagtg

SEQ ID NO: 253279 - DNA, 15 bp, Homo sapiens
ctcctgaactcaagt

SEQ ID NO: 253280 - DNA, 15 bp, Homo sapiens
actcctgaactcaag

SEQ ID NO: 253281 - DNA, 15 bp, Homo sapiens
aactcctgaactcaa

SEQ ID NO: 253282 - DNA, 15 bp, Homo sapiens
caactcctgaactca

SEQ ID NO: 253283 - DNA, 15 bp, Homo sapiens
ccaactcctgaactc

SEQ ID NO: 253284 - DNA, 15 bp, Homo sapiens
tccaactcctgaact

SEQ ID NO: 253285 - DNA, 15 bp, Homo sapiens
ctccaactcctgaac

SEQ ID NO: 253286 - DNA, 15 bp, Homo sapiens
tctccaactcctgaa

SEQ ID NO: 253287 - DNA, 15 bp, Homo sapiens
gtctccaactcctga

SEQ ID NO: 253288 - DNA, 15 bp, Homo sapiens
ggtctccaactcctg

SEQ ID NO: 253289 - DNA, 15 bp, Homo sapiens
tggtctccaactcct

SEQ ID NO: 253290 - DNA, 15 bp, Homo sapiens
ctggtctccaactcc

SEQ ID NO: 253291 - DNA, 15 bp, Homo sapiens
cctggtctccaactc

SEQ ID NO: 253292 - DNA, 15 bp, Homo sapiens
gcctggtctccaact

SEQ ID NO: 253293 - DNA, 15 bp, Homo sapiens
ggcctggtctccaac

SEQ ID NO: 253294 - DNA, 15 bp, Homo sapiens
aggcctggtctccaa

SEQ ID NO: 253295 - DNA, 15 bp, Homo sapiens
caggcctggtctcca

SEQ ID NO: 253296 - DNA, 15 bp, Homo sapiens
tcaggcctggtctcc

SEQ ID NO: 253297 - DNA, 15 bp, Homo sapiens
ctcaggcctggtctc

SEQ ID NO: 253298 - DNA, 15 bp, Homo sapiens
gctcaggcctggtct

SEQ ID NO: 253299 - DNA, 15 bp, Homo sapiens
tgctcaggcctggtc

SEQ ID NO: 253300 - DNA, 15 bp, Homo sapiens
ttgctcaggcctggt

SEQ ID NO: 253301 - DNA, 15 bp, Homo sapiens
gttgctcaggcctgg

SEQ ID NO: 253302 - DNA, 15 bp, Homo sapiens
tgttgctcaggcctg

SEQ ID NO: 253303 - DNA, 15 bp, Homo sapiens
ttgttgctcaggcct

SEQ ID NO: 253304 - DNA, 15 bp, Homo sapiens
tttgttgctcaggcc

SEQ ID NO: 253305 - DNA, 15 bp, Homo sapiens
ctttgttgctcaggc

SEQ ID NO: 253306 - DNA, 15 bp, Homo sapiens
gctttgttgctcagg

SEQ ID NO: 253307 - DNA, 15 bp, Homo sapiens
cgctttgttgctcag

SEQ ID NO: 253308 - DNA, 15 bp, Homo sapiens
tcgctttgttgctca

SEQ ID NO: 253309 - DNA, 15 bp, Homo sapiens
ctcgctttgttgctc

SEQ ID NO: 253310 - DNA, 15 bp, Homo sapiens
tctcgctttgttgct

SEQ ID NO: 253311 - DNA, 15 bp, Homo sapiens
atctcgctttgttgc

SEQ ID NO: 253312 - DNA, 15 bp, Homo sapiens
gatctcgctttgttg

SEQ ID NO: 253313 - DNA, 15 bp, Homo sapiens
ggatctcgctttgtt

SEQ ID NO: 253314 - DNA, 15 bp, Homo sapiens
gggatctcgctttgt

SEQ ID NO: 253315 - DNA, 15 bp, Homo sapiens
tgggatctcgctttg

SEQ ID NO: 253316 - DNA, 15 bp, Homo sapiens
atgggatctcgcttt

SEQ ID NO: 253317 - DNA, 15 bp, Homo sapiens
gatgggatctcgctt

SEQ ID NO: 253318 - DNA, 15 bp, Homo sapiens
agatgggatctcgct

SEQ ID NO: 253319 - DNA, 15 bp, Homo sapiens
gagatgggatctcgc

SEQ ID NO: 253320 - DNA, 15 bp, Homo sapiens
agagatgggatctcg

SEQ ID NO: 253321 - DNA, 15 bp, Homo sapiens
tagagatgggatctc

SEQ ID NO: 253322 - DNA, 15 bp, Homo sapiens
gtagagatgggatct

SEQ ID NO: 253323 - DNA, 15 bp, Homo sapiens
tgtagagatgggatc

SEQ ID NO: 253324 - DNA, 15 bp, Homo sapiens
ttgtagagatgggat

SEQ ID NO: 253325 - DNA, 15 bp, Homo sapiens
tttgtagagatggga

SEQ ID NO: 253326 - DNA, 15 bp, Homo sapiens
gtttttgtagagatg

SEQ ID NO: 253327 - DNA, 15 bp, Homo sapiens
ggtttttgtagagat

SEQ ID NO: 253328 - DNA, 15 bp, Homo sapiens
tggtttttgtagaga

SEQ ID NO: 253329 - DNA, 15 bp, Homo sapiens
ttggtttttgtagag

SEQ ID NO: 253330 - DNA, 15 bp, Homo sapiens
tttggtttttgtaga

SEQ ID NO: 253331 - DNA, 15 bp, Homo sapiens
ttttggtttttgtag

SEQ ID NO: 253332 - DNA, 15 bp, Homo sapiens
tttttggtttttgta

SEQ ID NO: 253333 - DNA, 15 bp, Homo sapiens
ctttttggtttttgt

SEQ ID NO: 253334 - DNA, 15 bp, Homo sapiens
actttttggtttttg

SEQ ID NO: 253335 - DNA, 15 bp, Homo sapiens
aactttttggttttt

SEQ ID NO: 253336 - DNA, 15 bp, Homo sapiens
taactttttggtttt

SEQ ID NO: 253337 - DNA, 15 bp, Homo sapiens
ttaactttttggttt

SEQ ID NO: 253338 - DNA, 15 bp, Homo sapiens
tttaactttttggtt

SEQ ID NO: 253339 - DNA, 15 bp, Homo sapiens
ttttaactttttggt

SEQ ID NO: 253340 - DNA, 15 bp, Homo sapiens
tttttaactttttgg

SEQ ID NO: 253341 - DNA, 15 bp, Homo sapiens
atttttaactttttg

SEQ ID NO: 253342 - DNA, 15 bp, Homo sapiens
gatttttaacttttt

SEQ ID NO: 253343 - DNA, 15 bp, Homo sapiens
tgatttttaactttt

SEQ ID NO: 253344 - DNA, 15 bp, Homo sapiens
ctgatttttaacttt

SEQ ID NO: 253345 - DNA, 15 bp, Homo sapiens
gctgatttttaactt

SEQ ID NO: 253346 - DNA, 15 bp, Homo sapiens
agctgatttttaact

SEQ ID NO: 253347 - DNA, 15 bp, Homo sapiens
cagctgatttttaac

SEQ ID NO: 253348 - DNA, 15 bp, Homo sapiens
ccagctgatttttaa

SEQ ID NO: 253349 - DNA, 15 bp, Homo sapiens
cccagctgattttta

SEQ ID NO: 253350 - DNA, 15 bp, Homo sapiens
acccagctgattttt

SEQ ID NO: 253351 - DNA, 15 bp, Homo sapiens
tacccagctgatttt

SEQ ID NO: 253352 - DNA, 15 bp, Homo sapiens
gtacccagctgattt

SEQ ID NO: 253353 - DNA, 15 bp, Homo sapiens
cgtacccagctgatt

SEQ ID NO: 253354 - DNA, 15 bp, Homo sapiens
ccgtacccagctgat

SEQ ID NO: 253355 - DNA, 15 bp, Homo sapiens
accgtacccagctga

SEQ ID NO: 253356 - DNA, 15 bp, Homo sapiens
caccgtacccagctg

SEQ ID NO: 253357 - DNA, 15 bp, Homo sapiens
ccaccgtacccagct

SEQ ID NO: 253358 - DNA, 15 bp, Homo sapiens
gccaccgtacccagc

SEQ ID NO: 253359 - DNA, 15 bp, Homo sapiens
tgccaccgtacccag

SEQ ID NO: 253360 - DNA, 15 bp, Homo sapiens
gtgccaccgtaccca

SEQ ID NO: 253361 - DNA, 15 bp, Homo sapiens
cgtgccaccgtaccc

SEQ ID NO: 253362 - DNA, 15 bp, Homo sapiens
acgtgccaccgtacc

SEQ ID NO: 253363 - DNA, 15 bp, Homo sapiens
cacgtgccaccgtac

SEQ ID NO: 253364 - DNA, 15 bp, Homo sapiens
gcacgtgccaccgta

SEQ ID NO: 253365 - DNA, 15 bp, Homo sapiens
ggcacgtgccaccgt

SEQ ID NO: 253366 - DNA, 15 bp, Homo sapiens
aggcacgtgccaccg

SEQ ID NO: 253367 - DNA, 15 bp, Homo sapiens
tcacaggcacgtgcc

SEQ ID NO: 253368 - DNA, 15 bp, Homo sapiens
atcacaggcacgtgc

SEQ ID NO: 253369 - DNA, 15 bp, Homo sapiens
gatcacaggcacgtg

SEQ ID NO: 253370 - DNA, 15 bp, Homo sapiens
ggatcacaggcacgt

SEQ ID NO: 253371 - DNA, 15 bp, Homo sapiens
gggatcacaggcacg

SEQ ID NO: 253372 - DNA, 15 bp, Homo sapiens
tgggatcacaggcac

SEQ ID NO: 253373 - DNA, 15 bp, Homo sapiens
ctgggatcacaggca

SEQ ID NO: 253374 - DNA, 15 bp, Homo sapiens
gctgggatcacaggc

SEQ ID NO: 253375 - DNA, 15 bp, Homo sapiens
aagtagctgggatca

SEQ ID NO: 253376 - DNA, 15 bp, Homo sapiens
caagtagctgggatc

SEQ ID NO: 253377 - DNA, 15 bp, Homo sapiens
ggcgatcctcctgcc

SEQ ID NO: 253378 - DNA, 15 bp, Homo sapiens
aggcgatcctcctgc

SEQ ID NO: 253379 - DNA, 15 bp, Homo sapiens
caggcgatcctcctg

SEQ ID NO: 253380 - DNA, 15 bp, Homo sapiens
tcaggcgatcctcct

SEQ ID NO: 253381 - DNA, 15 bp, Homo sapiens
ctcaggcgatcctcc

SEQ ID NO: 253382 - DNA, 15 bp, Homo sapiens
gctcaggcgatcctc

SEQ ID NO: 253383 - DNA, 15 bp, Homo sapiens
ggctcaggcgatcct

SEQ ID NO: 253384 - DNA, 15 bp, Homo sapiens
gggctcaggcgatcc

SEQ ID NO: 253385 - DNA, 15 bp, Homo sapiens
tgggctcaggcgatc

SEQ ID NO: 253386 - DNA, 15 bp, Homo sapiens
ctgggctcaggcgat

SEQ ID NO: 253387 - DNA, 15 bp, Homo sapiens
cctgggctcaggcga

SEQ ID NO: 253388 - DNA, 15 bp, Homo sapiens
tcctgggctcaggcg

SEQ ID NO: 253389 - DNA, 15 bp, Homo sapiens
ctcctgggctcaggc

SEQ ID NO: 253390 - DNA, 15 bp, Homo sapiens
cctcctgggctcagg

SEQ ID NO: 253391 - DNA, 15 bp, Homo sapiens
acctcctgggctcag

SEQ ID NO: 253392 - DNA, 15 bp, Homo sapiens
cacctcctgggctca

SEQ ID NO: 253393 - DNA, 15 bp, Homo sapiens
ccacctcctgggctc

SEQ ID NO: 253394 - DNA, 15 bp, Homo sapiens
tccacctcctgggct

SEQ ID NO: 253395 - DNA, 15 bp, Homo sapiens
ctccacctcctgggc

SEQ ID NO: 253396 - DNA, 15 bp, Homo sapiens
atggctcactgcaac

SEQ ID NO: 253397 - DNA, 15 bp, Homo sapiens
catggctcactgcaa

SEQ ID NO: 253398 - DNA, 15 bp, Homo sapiens
tcatggctcactgca

SEQ ID NO: 253399 - DNA, 15 bp, Homo sapiens
atcatggctcactgc

SEQ ID NO: 253400 - DNA, 15 bp, Homo sapiens
gatcatggctcactg

SEQ ID NO: 253401 - DNA, 15 bp, Homo sapiens
cgatcatggctcact

SEQ ID NO: 253402 - DNA, 15 bp, Homo sapiens
tcgatcatggctcac

SEQ ID NO: 253403 - DNA, 15 bp, Homo sapiens
ctcgatcatggctca

SEQ ID NO: 253404 - DNA, 15 bp, Homo sapiens
gctcgatcatggctc

SEQ ID NO: 253405 - DNA, 15 bp, Homo sapiens
ggctcgatcatggct

SEQ ID NO: 253406 - DNA, 15 bp, Homo sapiens
tggctcgatcatggc

SEQ ID NO: 253407 - DNA, 15 bp, Homo sapiens
gtggctcgatcatgg

SEQ ID NO: 253408 - DNA, 15 bp, Homo sapiens
agtggctcgatcatg

SEQ ID NO: 253409 - DNA, 15 bp, Homo sapiens
cagtggctcgatcat

SEQ ID NO: 253410 - DNA, 15 bp, Homo sapiens
gcagtggctcgatca

SEQ ID NO: 253411 - DNA, 15 bp, Homo sapiens
tgcagtggctcgatc

SEQ ID NO: 253412 - DNA, 15 bp, Homo sapiens
gtgcagtggctcgat

SEQ ID NO: 253413 - DNA, 15 bp, Homo sapiens
agtgcagtggctcga

SEQ ID NO: 253414 - DNA, 15 bp, Homo sapiens
gagtgcagtggctcg

SEQ ID NO: 253415 - DNA, 15 bp, Homo sapiens
ggagtgcagtggctc

SEQ ID NO: 253416 - DNA, 15 bp, Homo sapiens
tggagtgcagtggct

SEQ ID NO: 253417 - DNA, 15 bp, Homo sapiens
atctgttgcccaggc

SEQ ID NO: 253418 - DNA, 15 bp, Homo sapiens
catctgttgcccagg

SEQ ID NO: 253419 - DNA, 15 bp, Homo sapiens
tcatctgttgcccag

SEQ ID NO: 253420 - DNA, 15 bp, Homo sapiens
ttcatctgttgccca

SEQ ID NO: 253421 - DNA, 15 bp, Homo sapiens
cttcatctgttgccc

SEQ ID NO: 253422 - DNA, 15 bp, Homo sapiens
tcttcatctgttgcc

SEQ ID NO: 253423 - DNA, 15 bp, Homo sapiens
gtcttcatctgttgc

SEQ ID NO: 253424 - DNA, 15 bp, Homo sapiens
ggtcttcatctgttg

SEQ ID NO: 253425 - DNA, 15 bp, Homo sapiens
gggtcttcatctgtt

SEQ ID NO: 253426 - DNA, 15 bp, Homo sapiens
agggtcttcatctgt

SEQ ID NO: 253427 - DNA, 15 bp, Homo sapiens
tagggtcttcatctg

SEQ ID NO: 253428 - DNA, 15 bp, Homo sapiens
atagggtcttcatct

SEQ ID NO: 253429 - DNA, 15 bp, Homo sapiens
aatagggtcttcatc

SEQ ID NO: 253430 - DNA, 15 bp, Homo sapiens
aaatagggtcttcat

SEQ ID NO: 253431 - DNA, 15 bp, Homo sapiens
gaaatagggtcttca

SEQ ID NO: 253432 - DNA, 15 bp, Homo sapiens
tgaaatagggtcttc

SEQ ID NO: 253433 - DNA, 15 bp, Homo sapiens
ctgaaatagggtctt

SEQ ID NO: 253434 - DNA, 15 bp, Homo sapiens
tctgaaatagggtct

SEQ ID NO: 253435 - DNA, 15 bp, Homo sapiens
ttctgaaatagggtc

SEQ ID NO: 253436 - DNA, 15 bp, Homo sapiens
tttctgaaatagggt

SEQ ID NO: 253437 - DNA, 15 bp, Homo sapiens
atttctgaaataggg

SEQ ID NO: 253438 - DNA, 15 bp, Homo sapiens
tatttctgaaatagg

SEQ ID NO: 253439 - DNA, 15 bp, Homo sapiens
gtatttctgaaatag

SEQ ID NO: 253440 - DNA, 15 bp, Homo sapiens
tgtatttctgaaata

SEQ ID NO: 253441 - DNA, 15 bp, Homo sapiens
ttgtatttctgaaat

SEQ ID NO: 253442 - DNA, 15 bp, Homo sapiens
gttgtatttctgaaa

SEQ ID NO: 253443 - DNA, 15 bp, Homo sapiens
agttgtatttctgaa

SEQ ID NO: 253444 - DNA, 15 bp, Homo sapiens
tagttgtatttctga

SEQ ID NO: 253445 - DNA, 15 bp, Homo sapiens
atagttgtatttctg

SEQ ID NO: 253446 - DNA, 15 bp, Homo sapiens
tatagttgtatttct

SEQ ID NO: 253447 - DNA, 15 bp, Homo sapiens
ttatagttgtatttc

SEQ ID NO: 253448 - DNA, 15 bp, Homo sapiens
tttatagttgtattt

SEQ ID NO: 253449 - DNA, 15 bp, Homo sapiens
ttttatagttgtatt

SEQ ID NO: 253450 - DNA, 15 bp, Homo sapiens
tttttatagttgtat

SEQ ID NO: 253451 - DNA, 15 bp, Homo sapiens
ttttttatagttgta

SEQ ID NO: 253452 - DNA, 15 bp, Homo sapiens
tttttttatagttgt

SEQ ID NO: 253453 - DNA, 15 bp, Homo sapiens
atttttttatagttg

SEQ ID NO: 253454 - DNA, 15 bp, Homo sapiens
tatttttttatagtt

SEQ ID NO: 253455 - DNA, 15 bp, Homo sapiens
ttatttttttatagt

SEQ ID NO: 253456 - DNA, 15 bp, Homo sapiens
tttatttttttatag

SEQ ID NO: 253457 - DNA, 15 bp, Homo sapiens
atttatttttttata

SEQ ID NO: 253458 - DNA, 15 bp, Homo sapiens
tatttatttttttat

SEQ ID NO: 253459 - DNA, 15 bp, Homo sapiens
ttatttattttttta

SEQ ID NO: 253460 - DNA, 15 bp, Homo sapiens
tttatttattttttt

SEQ ID NO: 253461 - DNA, 15 bp, Homo sapiens
atttatttatttttt

SEQ ID NO: 253462 - DNA, 15 bp, Homo sapiens
gatttatttattttt

SEQ ID NO: 253463 - DNA, 15 bp, Homo sapiens
ggatttatttatttt

SEQ ID NO: 253464 - DNA, 15 bp, Homo sapiens
aggatttatttattt

SEQ ID NO: 253465 - DNA, 15 bp, Homo sapiens
gaggatttatttatt

SEQ ID NO: 253466 - DNA, 15 bp, Homo sapiens
ggaggatttatttat

SEQ ID NO: 253467 - DNA, 15 bp, Homo sapiens
tggaggatttattta

SEQ ID NO: 253468 - DNA, 15 bp, Homo sapiens
ctggaggatttattt

SEQ ID NO: 253469 - DNA, 15 bp, Homo sapiens
actggaggatttatt

SEQ ID NO: 253470 - DNA, 15 bp, Homo sapiens
gactggaggatttat

SEQ ID NO: 253471 - DNA, 15 bp, Homo sapiens
agactggaggattta

SEQ ID NO: 253472 - DNA, 15 bp, Homo sapiens
cagactggaggattt

SEQ ID NO: 253473 - DNA, 15 bp, Homo sapiens
ccagactggaggatt

SEQ ID NO: 253474 - DNA, 15 bp, Homo sapiens
tccagactggaggat

SEQ ID NO: 253475 - DNA, 15 bp, Homo sapiens
atccagactggagga

SEQ ID NO: 253476 - DNA, 15 bp, Homo sapiens
gatccagactggagg

SEQ ID NO: 253477 - DNA, 15 bp, Homo sapiens
cgatccagactggag

SEQ ID NO: 253478 - DNA, 15 bp, Homo sapiens
acgatccagactgga

SEQ ID NO: 253479 - DNA, 15 bp, Homo sapiens
aacgatccagactgg

SEQ ID NO: 253480 - DNA, 15 bp, Homo sapiens
aaacgatccagactg

SEQ ID NO: 253481 - DNA, 15 bp, Homo sapiens
caaacgatccagact

SEQ ID NO: 253482 - DNA, 15 bp, Homo sapiens
tcaaacgatccagac

SEQ ID NO: 253483 - DNA, 15 bp, Homo sapiens
gtcaaacgatccaga

SEQ ID NO: 253484 - DNA, 15 bp, Homo sapiens
cgtcaaacgatccag

SEQ ID NO: 253485 - DNA, 15 bp, Homo sapiens
ccgtcaaacgatcca

SEQ ID NO: 253486 - DNA, 15 bp, Homo sapiens
cccgtcaaacgatcc

SEQ ID NO: 253487 - DNA, 15 bp, Homo sapiens
tcccgtcaaacgatc

SEQ ID NO: 253488 - DNA, 15 bp, Homo sapiens
gtcccgtcaaacgat

SEQ ID NO: 253489 - DNA, 15 bp, Homo sapiens
agtcccgtcaaacga

SEQ ID NO: 253490 - DNA, 15 bp, Homo sapiens
aagtcccgtcaaacg

SEQ ID NO: 253491 - DNA, 15 bp, Homo sapiens
gaagtcccgtcaaac

SEQ ID NO: 253492 - DNA, 15 bp, Homo sapiens
tgaagtcccgtcaaa

SEQ ID NO: 253493 - DNA, 15 bp, Homo sapiens
ctgaagtcccgtcaa

SEQ ID NO: 253494 - DNA, 15 bp, Homo sapiens
cctgaagtcccgtca

SEQ ID NO: 253495 - DNA, 15 bp, Homo sapiens
acctgaagtcccgtc

SEQ ID NO: 253496 - DNA, 15 bp, Homo sapiens
aacctgaagtcccgt

SEQ ID NO: 253497 - DNA, 15 bp, Homo sapiens
gaacctgaagtcccg

SEQ ID NO: 253498 - DNA, 15 bp, Homo sapiens
agaacctgaagtccc

SEQ ID NO: 253499 - DNA, 15 bp, Homo sapiens
aagaacctgaagtcc

SEQ ID NO: 253500 - DNA, 15 bp, Homo sapiens
aaagaacctgaagtc

SEQ ID NO: 253501 - DNA, 15 bp, Homo sapiens
gaaagaacctgaagt

SEQ ID NO: 253502 - DNA, 15 bp, Homo sapiens
agaaagaacctgaag

SEQ ID NO: 253503 - DNA, 15 bp, Homo sapiens
cagaaagaacctgaa

SEQ ID NO: 253504 - DNA, 15 bp, Homo sapiens
tcagaaagaacctga

SEQ ID NO: 253505 - DNA, 15 bp, Homo sapiens
ttcagaaagaacctg

SEQ ID NO: 253506 - DNA, 15 bp, Homo sapiens
tttcagaaagaacct

SEQ ID NO: 253507 - DNA, 15 bp, Homo sapiens
atttcagaaagaacc

SEQ ID NO: 253508 - DNA, 15 bp, Homo sapiens
gatttcagaaagaac

SEQ ID NO: 253509 - DNA, 15 bp, Homo sapiens
cgatttcagaaagaa

SEQ ID NO: 253510 - DNA, 15 bp, Homo sapiens
gcgatttcagaaaga

SEQ ID NO: 253511 - DNA, 15 bp, Homo sapiens
ggcgatttcagaaag

SEQ ID NO: 253512 - DNA, 15 bp, Homo sapiens
cggcgatttcagaaa

SEQ ID NO: 253513 - DNA, 15 bp, Homo sapiens
acggcgatttcagaa

SEQ ID NO: 253514 - DNA, 15 bp, Homo sapiens
cacggcgatttcaga

SEQ ID NO: 253515 - DNA, 15 bp, Homo sapiens
acacggcgatttcag

SEQ ID NO: 253516 - DNA, 15 bp, Homo sapiens
aacacggcgatttca

SEQ ID NO: 253517 - DNA, 15 bp, Homo sapiens
taacacggcgatttc

SEQ ID NO: 253518 - DNA, 15 bp, Homo sapiens
gtaacacggcgattt

SEQ ID NO: 253519 - DNA, 15 bp, Homo sapiens
agtaacacggcgatt

SEQ ID NO: 253520 - DNA, 15 bp, Homo sapiens
cagtaacacggcgat

SEQ ID NO: 253521 - DNA, 15 bp, Homo sapiens
acagtaacacggcga

SEQ ID NO: 253522 - DNA, 15 bp, Homo sapiens
aacagtaacacggcg

SEQ ID NO: 253523 - DNA, 15 bp, Homo sapiens
caacagtaacacggc

SEQ ID NO: 253524 - DNA, 15 bp, Homo sapiens
gcaacagtaacacgg

SEQ ID NO: 253525 - DNA, 15 bp, Homo sapiens
tgcaacagtaacacg

SEQ ID NO: 253526 - DNA, 15 bp, Homo sapiens
gtgcaacagtaacac

SEQ ID NO: 253527 - DNA, 15 bp, Homo sapiens
agtgcaacagtaaca

SEQ ID NO: 253528 - DNA, 15 bp, Homo sapiens
cagtgcaacagtaac

SEQ ID NO: 253529 - DNA, 15 bp, Homo sapiens
tcagtgcaacagtaa

SEQ ID NO: 253530 - DNA, 15 bp, Homo sapiens
atcagtgcaacagta

SEQ ID NO: 253531 - DNA, 15 bp, Homo sapiens
catcagtgcaacagt

SEQ ID NO: 253532 - DNA, 15 bp, Homo sapiens
acatcagtgcaacag

SEQ ID NO: 253533 - DNA, 15 bp, Homo sapiens
gacatcagtgcaaca

SEQ ID NO: 253534 - DNA, 15 bp, Homo sapiens
ggacatcagtgcaac

SEQ ID NO: 253535 - DNA, 15 bp, Homo sapiens
cggacatcagtgcaa

SEQ ID NO: 253536 - DNA, 15 bp, Homo sapiens
ccggacatcagtgca

SEQ ID NO: 253537 - DNA, 15 bp, Homo sapiens
tccggacatcagtgc

SEQ ID NO: 253538 - DNA, 15 bp, Homo sapiens
ctccggacatcagtg

SEQ ID NO: 253539 - DNA, 15 bp, Homo sapiens
tctccggacatcagt

SEQ ID NO: 253540 - DNA, 15 bp, Homo sapiens
ctctccggacatcag

SEQ ID NO: 253541 - DNA, 15 bp, Homo sapiens
tctctccggacatca

SEQ ID NO: 253542 - DNA, 15 bp, Homo sapiens
gtctctccggacatc

SEQ ID NO: 253543 - DNA, 15 bp, Homo sapiens
tgtctctccggacat

SEQ ID NO: 253544 - DNA, 15 bp, Homo sapiens
ctgtctctccggaca

SEQ ID NO: 253545 - DNA, 15 bp, Homo sapiens
actgtctctccggac

SEQ ID NO: 253546 - DNA, 15 bp, Homo sapiens
cactgtctctccgga

SEQ ID NO: 253547 - DNA, 15 bp, Homo sapiens
tcactgtctctccgg

SEQ ID NO: 253548 - DNA, 15 bp, Homo sapiens
gtcactgtctctccg

SEQ ID NO: 253549 - DNA, 15 bp, Homo sapiens
tgtcactgtctctcc

SEQ ID NO: 253550 - DNA, 15 bp, Homo sapiens
ctgtcactgtctctc

SEQ ID NO: 253551 - DNA, 15 bp, Homo sapiens
gctgtcactgtctct

SEQ ID NO: 253552 - DNA, 15 bp, Homo sapiens
ggctgtcactgtctc

SEQ ID NO: 253553 - DNA, 15 bp, Homo sapiens
aggctgtcactgtct

SEQ ID NO: 253554 - DNA, 15 bp, Homo sapiens
gaggctgtcactgtc

SEQ ID NO: 253555 - DNA, 15 bp, Homo sapiens
ggaggctgtcactgt

SEQ ID NO: 253556 - DNA, 15 bp, Homo sapiens
cggaggctgtcactg

SEQ ID NO: 253557 - DNA, 15 bp, Homo sapiens
acggaggctgtcact

SEQ ID NO: 253558 - DNA, 15 bp, Homo sapiens
gacggaggctgtcac

SEQ ID NO: 253559 - DNA, 15 bp, Homo sapiens
tgacggaggctgtca

SEQ ID NO: 253560 - DNA, 15 bp, Homo sapiens
ctgacggaggctgtc

SEQ ID NO: 253561 - DNA, 15 bp, Homo sapiens
tctgacggaggctgt

SEQ ID NO: 253562 - DNA, 15 bp, Homo sapiens
gtctgacggaggctg

SEQ ID NO: 253563 - DNA, 15 bp, Homo sapiens
agtctgacggaggct

SEQ ID NO: 253564 - DNA, 15 bp, Homo sapiens
gagtctgacggaggc

SEQ ID NO: 253565 - DNA, 15 bp, Homo sapiens
ggagtctgacggagg

SEQ ID NO: 253566 - DNA, 15 bp, Homo sapiens
gggagtctgacggag

SEQ ID NO: 253567 - DNA, 15 bp, Homo sapiens
cgggagtctgacgga

SEQ ID NO: 253568 - DNA, 15 bp, Homo sapiens
gcgggagtctgacgg

SEQ ID NO: 253569 - DNA, 15 bp, Homo sapiens
cgcgggagtctgacg

SEQ ID NO: 253570 - DNA, 15 bp, Homo sapiens
acgcgggagtctgac

SEQ ID NO: 253571 - DNA, 15 bp, Homo sapiens
cacgcgggagtctga

SEQ ID NO: 253572 - DNA, 15 bp, Homo sapiens
tcacgcgggagtctg

SEQ ID NO: 253573 - DNA, 15 bp, Homo sapiens
ttcacgcgggagtct

SEQ ID NO: 253574 - DNA, 15 bp, Homo sapiens
cttcacgcgggagtc

SEQ ID NO: 253575 - DNA, 15 bp, Homo sapiens
tcttcacgcgggagt

SEQ ID NO: 253576 - DNA, 15 bp, Homo sapiens
atcttcacgcgggag

SEQ ID NO: 253577 - DNA, 15 bp, Homo sapiens
catcttcacgcggga

SEQ ID NO: 253578 - DNA, 15 bp, Homo sapiens
acatcttcacgcggg

SEQ ID NO: 253579 - DNA, 15 bp, Homo sapiens
gacatcttcacgcgg

SEQ ID NO: 253580 - DNA, 15 bp, Homo sapiens
tgacatcttcacgcg

SEQ ID NO: 253581 - DNA, 15 bp, Homo sapiens
gtgacatcttcacgc

SEQ ID NO: 253582 - DNA, 15 bp, Homo sapiens
tgtgacatcttcacg

SEQ ID NO: 253583 - DNA, 15 bp, Homo sapiens
ttgtgacatcttcac

SEQ ID NO: 253584 - DNA, 15 bp, Homo sapiens
cttgtgacatcttca

SEQ ID NO: 253585 - DNA, 15 bp, Homo sapiens
ccttgtgacatcttc

SEQ ID NO: 253586 - DNA, 15 bp, Homo sapiens
cccttgtgacatctt

SEQ ID NO: 253587 - DNA, 15 bp, Homo sapiens
tcccttgtgacatct

SEQ ID NO: 253588 - DNA, 15 bp, Homo sapiens
atcccttgtgacatc

SEQ ID NO: 253589 - DNA, 15 bp, Homo sapiens
aatcccttgtgacat

SEQ ID NO: 253590 - DNA, 15 bp, Homo sapiens
caatcccttgtgaca

SEQ ID NO: 253591 - DNA, 15 bp, Homo sapiens
ccaatcccttgtgac

SEQ ID NO: 253592 - DNA, 15 bp, Homo sapiens
gccaatcccttgtga

SEQ ID NO: 253593 - DNA, 15 bp, Homo sapiens
tgccaatcccttgtg

SEQ ID NO: 253594 - DNA, 15 bp, Homo sapiens
ttgccaatcccttgt

SEQ ID NO: 253595 - DNA, 15 bp, Homo sapiens
attgccaatcccttg

SEQ ID NO: 253596 - DNA, 15 bp, Homo sapiens
aattgccaatccctt

SEQ ID NO: 253597 - DNA, 15 bp, Homo sapiens
caattgccaatccct

SEQ ID NO: 253598 - DNA, 15 bp, Homo sapiens
acaattgccaatccc

SEQ ID NO: 253599 - DNA, 15 bp, Homo sapiens
gacaattgccaatcc

SEQ ID NO: 253600 - DNA, 15 bp, Homo sapiens
ggacaattgccaatc

SEQ ID NO: 253601 - DNA, 15 bp, Homo sapiens
gggacaattgccaat

SEQ ID NO: 253602 - DNA, 15 bp, Homo sapiens
ggggacaattgccaa

SEQ ID NO: 253603 - DNA, 15 bp, Homo sapiens
tggggacaattgcca

SEQ ID NO: 253604 - DNA, 15 bp, Homo sapiens
ctggggacaattgcc

SEQ ID NO: 253605 - DNA, 15 bp, Homo sapiens
cctggggacaattgc

SEQ ID NO: 253606 - DNA, 15 bp, Homo sapiens
ccctggggacaattg

SEQ ID NO: 253607 - DNA, 15 bp, Homo sapiens
tccctggggacaatt

SEQ ID NO: 253608 - DNA, 15 bp, Homo sapiens
gtccctggggacaat

SEQ ID NO: 253609 - DNA, 15 bp, Homo sapiens
tgtccctggggacaa

SEQ ID NO: 253610 - DNA, 15 bp, Homo sapiens
ttgtccctggggaca

SEQ ID NO: 253611 - DNA, 15 bp, Homo sapiens
tttgtccctggggac

SEQ ID NO: 253612 - DNA, 15 bp, Homo sapiens
ttttgtccctgggga

SEQ ID NO: 253613 - DNA, 15 bp, Homo sapiens
gttttgtccctgggg

SEQ ID NO: 253614 - DNA, 15 bp, Homo sapiens
tgttttgtccctggg

SEQ ID NO: 253615 - DNA, 15 bp, Homo sapiens
gtgttttgtccctgg

SEQ ID NO: 253616 - DNA, 15 bp, Homo sapiens
agtgttttgtccctg

SEQ ID NO: 253617 - DNA, 15 bp, Homo sapiens
cagtgttttgtccct

SEQ ID NO: 253618 - DNA, 15 bp, Homo sapiens
acagtgttttgtccc

SEQ ID NO: 253619 - DNA, 15 bp, Homo sapiens
cacagtgttttgtcc

SEQ ID NO: 253620 - DNA, 15 bp, Homo sapiens
acacagtgttttgtc

SEQ ID NO: 253621 - DNA, 15 bp, Homo sapiens
gacacagtgttttgt

SEQ ID NO: 253622 - DNA, 15 bp, Homo sapiens
ggacacagtgttttg

SEQ ID NO: 253623 - DNA, 15 bp, Homo sapiens
gggacacagtgtttt

SEQ ID NO: 253624 - DNA, 15 bp, Homo sapiens
ggggacacagtgttt

SEQ ID NO: 253625 - DNA, 15 bp, Homo sapiens
gggggacacagtgtt

SEQ ID NO: 253626 - DNA, 15 bp, Homo sapiens
ggggggacacagtgt

SEQ ID NO: 253627 - DNA, 15 bp, Homo sapiens
gggggggacacagtg

SEQ ID NO: 253628 - DNA, 15 bp, Homo sapiens
tgggggggacacagt

SEQ ID NO: 253629 - DNA, 15 bp, Homo sapiens
ctgggggggacacag

SEQ ID NO: 253630 - DNA, 15 bp, Homo sapiens
actgggggggacaca

SEQ ID NO: 253631 - DNA, 15 bp, Homo sapiens
cactgggggggacac

SEQ ID NO: 253632 - DNA, 15 bp, Homo sapiens
gcactgggggggaca

SEQ ID NO: 253633 - DNA, 15 bp, Homo sapiens
tgcactgggggggac

SEQ ID NO: 253634 - DNA, 15 bp, Homo sapiens
ctgcactggggggga

SEQ ID NO: 253635 - DNA, 15 bp, Homo sapiens
cctgcactggggggg

SEQ ID NO: 253636 - DNA, 15 bp, Homo sapiens
ccctgcactgggggg

SEQ ID NO: 253637 - DNA, 15 bp, Homo sapiens
tccctgcactggggg

SEQ ID NO: 253638 - DNA, 15 bp, Homo sapiens
ttccctgcactgggg

SEQ ID NO: 253639 - DNA, 15 bp, Homo sapiens
gttccctgcactggg

SEQ ID NO: 253640 - DNA, 15 bp, Homo sapiens
ggttccctgcactgg

SEQ ID NO: 253641 - DNA, 15 bp, Homo sapiens
cggttccctgcactg

SEQ ID NO: 253642 - DNA, 15 bp, Homo sapiens
acggttccctgcact

SEQ ID NO: 253643 - DNA, 15 bp, Homo sapiens
cacggttccctgcac

SEQ ID NO: 253644 - DNA, 15 bp, Homo sapiens
tcacggttccctgca

SEQ ID NO: 253645 - DNA, 15 bp, Homo sapiens
atcacggttccctgc

SEQ ID NO: 253646 - DNA, 15 bp, Homo sapiens
tatcacggttccctg

SEQ ID NO: 253647 - DNA, 15 bp, Homo sapiens
ttatcacggttccct

SEQ ID NO: 253648 - DNA, 15 bp, Homo sapiens
cttatcacggttccc

SEQ ID NO: 253649 - DNA, 15 bp, Homo sapiens
gcttatcacggttcc

SEQ ID NO: 253650 - DNA, 15 bp, Homo sapiens
ggcttatcacggttc

SEQ ID NO: 253651 - DNA, 15 bp, Homo sapiens
aggcttatcacggtt

SEQ ID NO: 253652 - DNA, 15 bp, Homo sapiens
aaggcttatcacggt

SEQ ID NO: 253653 - DNA, 15 bp, Homo sapiens
aaaggcttatcacgg

SEQ ID NO: 253654 - DNA, 15 bp, Homo sapiens
gaaaggcttatcacg

SEQ ID NO: 253655 - DNA, 15 bp, Homo sapiens
agaaaggcttatcac

SEQ ID NO: 253656 - DNA, 15 bp, Homo sapiens
cagaaaggcttatca

SEQ ID NO: 253657 - DNA, 15 bp, Homo sapiens
ccagaaaggcttatc

SEQ ID NO: 253658 - DNA, 15 bp, Homo sapiens
accagaaaggcttat

SEQ ID NO: 253659 - DNA, 15 bp, Homo sapiens
aaccagaaaggctta

SEQ ID NO: 253660 - DNA, 15 bp, Homo sapiens
aaaccagaaaggctt

SEQ ID NO: 253661 - DNA, 15 bp, Homo sapiens
gaaaccagaaaggct

SEQ ID NO: 253662 - DNA, 15 bp, Homo sapiens
cgaaaccagaaaggc

SEQ ID NO: 253663 - DNA, 15 bp, Homo sapiens
ccgaaaccagaaagg

SEQ ID NO: 253664 - DNA, 15 bp, Homo sapiens
tccgaaaccagaaag

SEQ ID NO: 253665 - DNA, 15 bp, Homo sapiens
ctccgaaaccagaaa

SEQ ID NO: 253666 - DNA, 15 bp, Homo sapiens
gctccgaaaccagaa

SEQ ID NO: 253667 - DNA, 15 bp, Homo sapiens
tgctccgaaaccaga

SEQ ID NO: 253668 - DNA, 15 bp, Homo sapiens
gtgctccgaaaccag

SEQ ID NO: 253669 - DNA, 15 bp, Homo sapiens
cgtgctccgaaacca

SEQ ID NO: 253670 - DNA, 15 bp, Homo sapiens
acgtgctccgaaacc

SEQ ID NO: 253671 - DNA, 15 bp, Homo sapiens
tacgtgctccgaaac

SEQ ID NO: 253672 - DNA, 15 bp, Homo sapiens
ttacgtgctccgaaa

SEQ ID NO: 253673 - DNA, 15 bp, Homo sapiens
tttacgtgctccgaa

SEQ ID NO: 253674 - DNA, 15 bp, Homo sapiens
atttacgtgctccga

SEQ ID NO: 253675 - DNA, 15 bp, Homo sapiens
catttacgtgctccg

SEQ ID NO: 253676 - DNA, 15 bp, Homo sapiens
gcatttacgtgctcc

SEQ ID NO: 253677 - DNA, 15 bp, Homo sapiens
cgcatttacgtgctc

SEQ ID NO: 253678 - DNA, 15 bp, Homo sapiens
acgcatttacgtgct

SEQ ID NO: 253679 - DNA, 15 bp, Homo sapiens
gacgcatttacgtgc

SEQ ID NO: 253680 - DNA, 15 bp, Homo sapiens
ggacgcatttacgtg

SEQ ID NO: 253681 - DNA, 15 bp, Homo sapiens
gggacgcatttacgt

SEQ ID NO: 253682 - DNA, 15 bp, Homo sapiens
agggacgcatttacg

SEQ ID NO: 253683 - DNA, 15 bp, Homo sapiens
cagggacgcatttac

SEQ ID NO: 253684 - DNA, 15 bp, Homo sapiens
acagggacgcattta

SEQ ID NO: 253685 - DNA, 15 bp, Homo sapiens
tacagggacgcattt

SEQ ID NO: 253686 - DNA, 15 bp, Homo sapiens
gtacagggacgcatt

SEQ ID NO: 253687 - DNA, 15 bp, Homo sapiens
tgtacagggacgcat

SEQ ID NO: 253688 - DNA, 15 bp, Homo sapiens
ctgtacagggacgca

SEQ ID NO: 253689 - DNA, 15 bp, Homo sapiens
tctgtacagggacgc

SEQ ID NO: 253690 - DNA, 15 bp, Homo sapiens
atctgtacagggacg

SEQ ID NO: 253691 - DNA, 15 bp, Homo sapiens
tatctgtacagggac

SEQ ID NO: 253692 - DNA, 15 bp, Homo sapiens
ctatctgtacaggga

SEQ ID NO: 253693 - DNA, 15 bp, Homo sapiens
actatctgtacaggg

SEQ ID NO: 253694 - DNA, 15 bp, Homo sapiens
cactatctgtacagg

SEQ ID NO: 253695 - DNA, 15 bp, Homo sapiens
ccactatctgtacag

SEQ ID NO: 253696 - DNA, 15 bp, Homo sapiens
cccactatctgtaca

SEQ ID NO: 253697 - DNA, 15 bp, Homo sapiens
ccccactatctgtac

SEQ ID NO: 253698 - DNA, 15 bp, Homo sapiens
tccccactatctgta

SEQ ID NO: 253699 - DNA, 15 bp, Homo sapiens
atccccactatctgt

SEQ ID NO: 253700 - DNA, 15 bp, Homo sapiens
aatccccactatctg

SEQ ID NO: 253701 - DNA, 15 bp, Homo sapiens
aaatccccactatct

SEQ ID NO: 253702 - DNA, 15 bp, Homo sapiens
aaaatccccactatc

SEQ ID NO: 253703 - DNA, 15 bp, Homo sapiens
aaaaatccccactat

SEQ ID NO: 253704 - DNA, 15 bp, Homo sapiens
aaaaaatccccacta

SEQ ID NO: 253705 - DNA, 15 bp, Homo sapiens
caaaaaatccccact

SEQ ID NO: 253706 - DNA, 15 bp, Homo sapiens
acaaaaaatccccac

SEQ ID NO: 253707 - DNA, 15 bp, Homo sapiens
aacaaaaaatcccca

SEQ ID NO: 253708 - DNA, 15 bp, Homo sapiens
taacaaaaaatcccc

SEQ ID NO: 253709 - DNA, 15 bp, Homo sapiens
ataacaaaaaatccc

SEQ ID NO: 253710 - DNA, 15 bp, Homo sapiens
cataacaaaaaatcc

SEQ ID NO: 253711 - DNA, 15 bp, Homo sapiens
acataacaaaaaatc

SEQ ID NO: 253712 - DNA, 15 bp, Homo sapiens
aacataacaaaaaat

SEQ ID NO: 253713 - DNA, 15 bp, Homo sapiens
aaacataacaaaaaa

SEQ ID NO: 253714 - DNA, 15 bp, Homo sapiens
caaacataacaaaaa

SEQ ID NO: 253715 - DNA, 15 bp, Homo sapiens
gcaaacataacaaaa

SEQ ID NO: 253716 - DNA, 15 bp, Homo sapiens
tgcaaacataacaaa

SEQ ID NO: 253717 - DNA, 15 bp, Homo sapiens
gtgcaaacataacaa

SEQ ID NO: 253718 - DNA, 15 bp, Homo sapiens
agtgcaaacataaca

SEQ ID NO: 253719 - DNA, 15 bp, Homo sapiens
aagtgcaaacataac

SEQ ID NO: 253720 - DNA, 15 bp, Homo sapiens
aaagtgcaaacataa

SEQ ID NO: 253721 - DNA, 15 bp, Homo sapiens
caaagtgcaaacata

SEQ ID NO: 253722 - DNA, 15 bp, Homo sapiens
acaaagtgcaaacat

SEQ ID NO: 253723 - DNA, 15 bp, Homo sapiens
tacaaagtgcaaaca

SEQ ID NO: 253724 - DNA, 15 bp, Homo sapiens
atacaaagtgcaaac

SEQ ID NO: 253725 - DNA, 15 bp, Homo sapiens
tatacaaagtgcaaa

SEQ ID NO: 253726 - DNA, 15 bp, Homo sapiens
atatacaaagtgcaa

SEQ ID NO: 253727 - DNA, 15 bp, Homo sapiens
aatatacaaagtgca

SEQ ID NO: 253728 - DNA, 15 bp, Homo sapiens
caatatacaaagtgc

SEQ ID NO: 253729 - DNA, 15 bp, Homo sapiens
ccaatatacaaagtg

SEQ ID NO: 253730 - DNA, 15 bp, Homo sapiens
accaatatacaaagt

SEQ ID NO: 253731 - DNA, 15 bp, Homo sapiens
aaccaatatacaaag

SEQ ID NO: 253732 - DNA, 15 bp, Homo sapiens
caaccaatatacaaa

SEQ ID NO: 253733 - DNA, 15 bp, Homo sapiens
tcaaccaatatacaa

SEQ ID NO: 253734 - DNA, 15 bp, Homo sapiens
ttcaaccaatataca

SEQ ID NO: 253735 - DNA, 15 bp, Homo sapiens
tttcaaccaatatac

SEQ ID NO: 253736 - DNA, 15 bp, Homo sapiens
gtttcaaccaatata

SEQ ID NO: 253737 - DNA, 15 bp, Homo sapiens
agtttcaaccaatat

SEQ ID NO: 253738 - DNA, 15 bp, Homo sapiens
cagtttcaaccaata

SEQ ID NO: 253739 - DNA, 15 bp, Homo sapiens
acagtttcaaccaat

SEQ ID NO: 253740 - DNA, 15 bp, Homo sapiens
aacagtttcaaccaa

SEQ ID NO: 253741 - DNA, 15 bp, Homo sapiens
taacagtttcaacca

SEQ ID NO: 253742 - DNA, 15 bp, Homo sapiens
ataacagtttcaacc

SEQ ID NO: 253743 - DNA, 15 bp, Homo sapiens
gataacagtttcaac

SEQ ID NO: 253744 - DNA, 15 bp, Homo sapiens
tgataacagtttcaa

SEQ ID NO: 253745 - DNA, 15 bp, Homo sapiens
gtgataacagtttca

SEQ ID NO: 253746 - DNA, 15 bp, Homo sapiens
agtgataacagtttc

SEQ ID NO: 253747 - DNA, 15 bp, Homo sapiens
aagtgataacagttt

SEQ ID NO: 253748 - DNA, 15 bp, Homo sapiens
taagtgataacagtt

SEQ ID NO: 253749 - DNA, 15 bp, Homo sapiens
ataagtgataacagt

SEQ ID NO: 253750 - DNA, 15 bp, Homo sapiens
tataagtgataacag

SEQ ID NO: 253751 - DNA, 15 bp, Homo sapiens
atataagtgataaca

SEQ ID NO: 253752 - DNA, 15 bp, Homo sapiens
tatataagtgataac

SEQ ID NO: 253753 - DNA, 15 bp, Homo sapiens
atatataagtgataa

SEQ ID NO: 253754 - DNA, 15 bp, Homo sapiens
tatatataagtgata

SEQ ID NO: 253755 - DNA, 15 bp, Homo sapiens
atatatataagtgat

SEQ ID NO: 253756 - DNA, 15 bp, Homo sapiens
tatatatataagtga

SEQ ID NO: 253757 - DNA, 15 bp, Homo sapiens
atatatatataagtg

SEQ ID NO: 253758 - DNA, 15 bp, Homo sapiens
tatatatatataagt

SEQ ID NO: 253759 - DNA, 15 bp, Homo sapiens
atatatatatataag

SEQ ID NO: 253760 - DNA, 15 bp, Homo sapiens
tatatatatatataa

SEQ ID NO: 253761 - DNA, 15 bp, Homo sapiens
atatatatatatata

SEQ ID NO: 253762 - DNA, 15 bp, Homo sapiens
tatatatatatatat

SEQ ID NO: 253763 - DNA, 15 bp, Homo sapiens
gtatatatatatata

SEQ ID NO: 253764 - DNA, 15 bp, Homo sapiens
tgtatatatatatat

SEQ ID NO: 253765 - DNA, 15 bp, Homo sapiens
gtgtatatatatata

SEQ ID NO: 253766 - DNA, 15 bp, Homo sapiens
tgtgtatatatatat

SEQ ID NO: 253767 - DNA, 15 bp, Homo sapiens
gtgtgtatatatata

SEQ ID NO: 253768 - DNA, 15 bp, Homo sapiens
tgtgtgtatatatat

SEQ ID NO: 253769 - DNA, 15 bp, Homo sapiens
atgtgtgtatatata

SEQ ID NO: 253770 - DNA, 15 bp, Homo sapiens
tatgtgtgtatatat

SEQ ID NO: 253771 - DNA, 15 bp, Homo sapiens
atatgtgtgtatata

SEQ ID NO: 253772 - DNA, 15 bp, Homo sapiens
tatatgtgtgtatat

SEQ ID NO: 253773 - DNA, 15 bp, Homo sapiens
atatatgtgtgtata

SEQ ID NO: 253774 - DNA, 15 bp, Homo sapiens
tatatatgtgtgtat

SEQ ID NO: 253775 - DNA, 15 bp, Homo sapiens
atatatatgtgtgta

SEQ ID NO: 253776 - DNA, 15 bp, Homo sapiens
tatatatatgtgtgt

SEQ ID NO: 253777 - DNA, 15 bp, Homo sapiens
ttatatatatgtgtg

SEQ ID NO: 253778 - DNA, 15 bp, Homo sapiens
tttatatatatgtgt

SEQ ID NO: 253779 - DNA, 15 bp, Homo sapiens
ttttatatatatgtg

SEQ ID NO: 253780 - DNA, 15 bp, Homo sapiens
attttatatatatgt

SEQ ID NO: 253781 - DNA, 15 bp, Homo sapiens
gattttatatatatg

SEQ ID NO: 253782 - DNA, 15 bp, Homo sapiens
agattttatatatat

SEQ ID NO: 253783 - DNA, 15 bp, Homo sapiens
tagattttatatata

SEQ ID NO: 253784 - DNA, 15 bp, Homo sapiens
atagattttatatat

SEQ ID NO: 253785 - DNA, 15 bp, Homo sapiens
aatagattttatata

SEQ ID NO: 253786 - DNA, 15 bp, Homo sapiens
aaatagattttatat

SEQ ID NO: 253787 - DNA, 15 bp, Homo sapiens
taaatagattttata

SEQ ID NO: 253788 - DNA, 15 bp, Homo sapiens
ataaatagattttat

SEQ ID NO: 253789 - DNA, 15 bp, Homo sapiens
aataaatagatttta

SEQ ID NO: 253790 - DNA, 15 bp, Homo sapiens
aaataaatagatttt

SEQ ID NO: 253791 - DNA, 15 bp, Homo sapiens
aaaataaatagattt

SEQ ID NO: 253792 - DNA, 15 bp, Homo sapiens
aaaaataaatagatt

SEQ ID NO: 253793 - DNA, 15 bp, Homo sapiens
caaaaataaatagat

SEQ ID NO: 253794 - DNA, 15 bp, Homo sapiens
gcaaaaataaataga

SEQ ID NO: 253795 - DNA, 15 bp, Homo sapiens
tgcaaaaataaatag

SEQ ID NO: 253796 - DNA, 15 bp, Homo sapiens
ttgcaaaaataaata

SEQ ID NO: 253797 - DNA, 15 bp, Homo sapiens
tttgcaaaaataaat

SEQ ID NO: 253798 - DNA, 15 bp, Homo sapiens
gtttgcaaaaataaa

SEQ ID NO: 253799 - DNA, 15 bp, Homo sapiens
ggtttgcaaaaataa

SEQ ID NO: 253800 - DNA, 15 bp, Homo sapiens
gggtttgcaaaaata

SEQ ID NO: 253801 - DNA, 15 bp, Homo sapiens
agggtttgcaaaaat

SEQ ID NO: 253802 - DNA, 15 bp, Homo sapiens
cagggtttgcaaaaa

SEQ ID NO: 253803 - DNA, 15 bp, Homo sapiens
ccagggtttgcaaaa

SEQ ID NO: 253804 - DNA, 15 bp, Homo sapiens
accagggtttgcaaa

SEQ ID NO: 253805 - DNA, 15 bp, Homo sapiens
aaccagggtttgcaa

SEQ ID NO: 253806 - DNA, 15 bp, Homo sapiens
caaccagggtttgca

SEQ ID NO: 253807 - DNA, 15 bp, Homo sapiens
gcaaccagggtttgc

SEQ ID NO: 253808 - DNA, 15 bp, Homo sapiens
agcaaccagggtttg

SEQ ID NO: 253809 - DNA, 15 bp, Homo sapiens
cagcaaccagggttt

SEQ ID NO: 253810 - DNA, 15 bp, Homo sapiens
acagcaaccagggtt

SEQ ID NO: 253811 - DNA, 15 bp, Homo sapiens
tacagcaaccagggt

SEQ ID NO: 253812 - DNA, 15 bp, Homo sapiens
atacagcaaccaggg

SEQ ID NO: 253813 - DNA, 15 bp, Homo sapiens
aatacagcaaccagg

SEQ ID NO: 253814 - DNA, 15 bp, Homo sapiens
aaatacagcaaccag

SEQ ID NO: 253815 - DNA, 15 bp, Homo sapiens
caaatacagcaacca

SEQ ID NO: 253816 - DNA, 15 bp, Homo sapiens
acaaatacagcaacc

SEQ ID NO: 253817 - DNA, 15 bp, Homo sapiens
aacaaatacagcaac

SEQ ID NO: 253818 - DNA, 15 bp, Homo sapiens
gaacaaatacagcaa

SEQ ID NO: 253819 - DNA, 15 bp, Homo sapiens
tgaacaaatacagca

SEQ ID NO: 253820 - DNA, 15 bp, Homo sapiens
ctgaacaaatacagc

SEQ ID NO: 253821 - DNA, 15 bp, Homo sapiens
actgaacaaatacag

SEQ ID NO: 253822 - DNA, 15 bp, Homo sapiens
cactgaacaaataca

SEQ ID NO: 253823 - DNA, 15 bp, Homo sapiens
tcactgaacaaatac

SEQ ID NO: 253824 - DNA, 15 bp, Homo sapiens
gtcactgaacaaata

SEQ ID NO: 253825 - DNA, 15 bp, Homo sapiens
agtcactgaacaaat

SEQ ID NO: 253826 - DNA, 15 bp, Homo sapiens
tagtcactgaacaaa

SEQ ID NO: 253827 - DNA, 15 bp, Homo sapiens
atagtcactgaacaa

SEQ ID NO: 253828 - DNA, 15 bp, Homo sapiens
aatagtcactgaaca

SEQ ID NO: 253829 - DNA, 15 bp, Homo sapiens
gaatagtcactgaac

SEQ ID NO: 253830 - DNA, 15 bp, Homo sapiens
agaatagtcactgaa

SEQ ID NO: 253831 - DNA, 15 bp, Homo sapiens
gagaatagtcactga

SEQ ID NO: 253832 - DNA, 15 bp, Homo sapiens
cgagaatagtcactg

SEQ ID NO: 253833 - DNA, 15 bp, Homo sapiens
ccgagaatagtcact

SEQ ID NO: 253834 - DNA, 15 bp, Homo sapiens
cccgagaatagtcac

SEQ ID NO: 253835 - DNA, 15 bp, Homo sapiens
ccccgagaatagtca

SEQ ID NO: 253836 - DNA, 15 bp, Homo sapiens
gccccgagaatagtc

SEQ ID NO: 253837 - DNA, 15 bp, Homo sapiens
ggccccgagaatagt

SEQ ID NO: 253838 - DNA, 15 bp, Homo sapiens
gggccccgagaatag

SEQ ID NO: 253839 - DNA, 15 bp, Homo sapiens
agggccccgagaata

SEQ ID NO: 253840 - DNA, 15 bp, Homo sapiens
cagggccccgagaat

SEQ ID NO: 253841 - DNA, 15 bp, Homo sapiens
acagggccccgagaa

SEQ ID NO: 253842 - DNA, 15 bp, Homo sapiens
cacagggccccgaga

SEQ ID NO: 253843 - DNA, 15 bp, Homo sapiens
acacagggccccgag

SEQ ID NO: 253844 - DNA, 15 bp, Homo sapiens
tacacagggccccga

SEQ ID NO: 253845 - DNA, 15 bp, Homo sapiens
ctacacagggccccg

SEQ ID NO: 253846 - DNA, 15 bp, Homo sapiens
cctacacagggcccc

SEQ ID NO: 253847 - DNA, 15 bp, Homo sapiens
ccctacacagggccc

SEQ ID NO: 253848 - DNA, 15 bp, Homo sapiens
cccctacacagggcc

SEQ ID NO: 253849 - DNA, 15 bp, Homo sapiens
ccccctacacagggc

SEQ ID NO: 253850 - DNA, 15 bp, Homo sapiens
accccctacacaggg

SEQ ID NO: 253851 - DNA, 15 bp, Homo sapiens
aaccccctacacagg

SEQ ID NO: 253852 - DNA, 15 bp, Homo sapiens
taaccccctacacag

SEQ ID NO: 253853 - DNA, 15 bp, Homo sapiens
ataaccccctacaca

SEQ ID NO: 253854 - DNA, 15 bp, Homo sapiens
aataaccccctacac

SEQ ID NO: 253855 - DNA, 15 bp, Homo sapiens
caataaccccctaca

SEQ ID NO: 253856 - DNA, 15 bp, Homo sapiens
gcaataaccccctac

SEQ ID NO: 253857 - DNA, 15 bp, Homo sapiens
ggcaataacccccta

SEQ ID NO: 253858 - DNA, 15 bp, Homo sapiens
aggcaataaccccct

SEQ ID NO: 253859 - DNA, 15 bp, Homo sapiens
gaggcaataaccccc

SEQ ID NO: 253860 - DNA, 15 bp, Homo sapiens
agaggcaataacccc

SEQ ID NO: 253861 - DNA, 15 bp, Homo sapiens
cagaggcaataaccc

SEQ ID NO: 253862 - DNA, 15 bp, Homo sapiens
tcagaggcaataacc

SEQ ID NO: 253863 - DNA, 15 bp, Homo sapiens
ttcagaggcaataac

SEQ ID NO: 253864 - DNA, 15 bp, Homo sapiens
tttcagaggcaataa

SEQ ID NO: 253865 - DNA, 15 bp, Homo sapiens
atttcagaggcaata

SEQ ID NO: 253866 - DNA, 15 bp, Homo sapiens
catttcagaggcaat

SEQ ID NO: 253867 - DNA, 15 bp, Homo sapiens
gcatttcagaggcaa

SEQ ID NO: 253868 - DNA, 15 bp, Homo sapiens
ggcatttcagaggca

SEQ ID NO: 253869 - DNA, 15 bp, Homo sapiens
aggcatttcagaggc

SEQ ID NO: 253870 - DNA, 15 bp, Homo sapiens
gaggcatttcagagg

SEQ ID NO: 253871 - DNA, 15 bp, Homo sapiens
agaggcatttcagag

SEQ ID NO: 253872 - DNA, 15 bp, Homo sapiens
aagaggcatttcaga

SEQ ID NO: 253873 - DNA, 15 bp, Homo sapiens
gaagaggcatttcag

SEQ ID NO: 253874 - DNA, 15 bp, Homo sapiens
agaagaggcatttca

SEQ ID NO: 253875 - DNA, 15 bp, Homo sapiens
aagaagaggcatttc

SEQ ID NO: 253876 - DNA, 15 bp, Homo sapiens
aaagaagaggcattt

SEQ ID NO: 253877 - DNA, 15 bp, Homo sapiens
taaagaagaggcatt

SEQ ID NO: 253878 - DNA, 15 bp, Homo sapiens
ataaagaagaggcat

SEQ ID NO: 253879 - DNA, 15 bp, Homo sapiens
cataaagaagaggca

SEQ ID NO: 253880 - DNA, 15 bp, Homo sapiens
acataaagaagaggc

SEQ ID NO: 253881 - DNA, 15 bp, Homo sapiens
tacataaagaagagg

SEQ ID NO: 253882 - DNA, 15 bp, Homo sapiens
gtacataaagaagag

SEQ ID NO: 253883 - DNA, 15 bp, Homo sapiens
tgtacataaagaaga

SEQ ID NO: 253884 - DNA, 15 bp, Homo sapiens
ttgtacataaagaag

SEQ ID NO: 253885 - DNA, 15 bp, Homo sapiens
tttgtacataaagaa

SEQ ID NO: 253886 - DNA, 15 bp, Homo sapiens
ctttgtacataaaga

SEQ ID NO: 253887 - DNA, 15 bp, Homo sapiens
tctttgtacataaag

SEQ ID NO: 253888 - DNA, 15 bp, Homo sapiens
atctttgtacataaa

SEQ ID NO: 253889 - DNA, 15 bp, Homo sapiens
aatctttgtacataa

SEQ ID NO: 253890 - DNA, 15 bp, Homo sapiens
taatctttgtacata

SEQ ID NO: 253891 - DNA, 15 bp, Homo sapiens
ataatctttgtacat

SEQ ID NO: 253892 - DNA, 15 bp, Homo sapiens
aataatctttgtaca

SEQ ID NO: 253893 - DNA, 15 bp, Homo sapiens
aaataatctttgtac

SEQ ID NO: 253894 - DNA, 15 bp, Homo sapiens
caaataatctttgta

SEQ ID NO: 253895 - DNA, 15 bp, Homo sapiens
gcaaataatctttgt

SEQ ID NO: 253896 - DNA, 15 bp, Homo sapiens
tgcaaataatctttg

SEQ ID NO: 253897 - DNA, 15 bp, Homo sapiens
gtgcaaataatcttt

SEQ ID NO: 253898 - DNA, 15 bp, Homo sapiens
cgtgcaaataatctt

SEQ ID NO: 253899 - DNA, 15 bp, Homo sapiens
tcgtgcaaataatct

SEQ ID NO: 253900 - DNA, 15 bp, Homo sapiens
ttcgtgcaaataatc

SEQ ID NO: 253901 - DNA, 15 bp, Homo sapiens
gttcgtgcaaataat

SEQ ID NO: 253902 - DNA, 15 bp, Homo sapiens
agttcgtgcaaataa

SEQ ID NO: 253903 - DNA, 15 bp, Homo sapiens
cagttcgtgcaaata

SEQ ID NO: 253904 - DNA, 15 bp, Homo sapiens
ccagttcgtgcaaat

SEQ ID NO: 253905 - DNA, 15 bp, Homo sapiens
tccagttcgtgcaaa

SEQ ID NO: 253906 - DNA, 15 bp, Homo sapiens
gtccagttcgtgcaa

SEQ ID NO: 253907 - DNA, 15 bp, Homo sapiens
agtccagttcgtgca

SEQ ID NO: 253908 - DNA, 15 bp, Homo sapiens
cagtccagttcgtgc

SEQ ID NO: 253909 - DNA, 15 bp, Homo sapiens
acagtccagttcgtg

SEQ ID NO: 253910 - DNA, 15 bp, Homo sapiens
cacagtccagttcgt

SEQ ID NO: 253911 - DNA, 15 bp, Homo sapiens
acacagtccagttcg

SEQ ID NO: 253912 - DNA, 15 bp, Homo sapiens
cacacagtccagttc

SEQ ID NO: 253913 - DNA, 15 bp, Homo sapiens
gcacacagtccagtt

SEQ ID NO: 253914 - DNA, 15 bp, Homo sapiens
tgcacacagtccagt

SEQ ID NO: 253915 - DNA, 15 bp, Homo sapiens
ttgcacacagtccag

SEQ ID NO: 253916 - DNA, 15 bp, Homo sapiens
gttgcacacagtcca

SEQ ID NO: 253917 - DNA, 15 bp, Homo sapiens
cgttgcacacagtcc

SEQ ID NO: 253918 - DNA, 15 bp, Homo sapiens
gcgttgcacacagtc

SEQ ID NO: 253919 - DNA, 15 bp, Homo sapiens
agcgttgcacacagt

SEQ ID NO: 253920 - DNA, 15 bp, Homo sapiens
aagcgttgcacacag

SEQ ID NO: 253921 - DNA, 15 bp, Homo sapiens
aaagcgttgcacaca

SEQ ID NO: 253922 - DNA, 15 bp, Homo sapiens
aaaagcgttgcacac

SEQ ID NO: 253923 - DNA, 15 bp, Homo sapiens
aaaaagcgttgcaca

SEQ ID NO: 253924 - DNA, 15 bp, Homo sapiens
caaaaagcgttgcac

SEQ ID NO: 253925 - DNA, 15 bp, Homo sapiens
ccaaaaagcgttgca

SEQ ID NO: 253926 - DNA, 15 bp, Homo sapiens
cccaaaaagcgttgc

SEQ ID NO: 253927 - DNA, 15 bp, Homo sapiens
tcccaaaaagcgttg

SEQ ID NO: 253928 - DNA, 15 bp, Homo sapiens
ctcccaaaaagcgtt

SEQ ID NO: 253929 - DNA, 15 bp, Homo sapiens
tctcccaaaaagcgt

SEQ ID NO: 253930 - DNA, 15 bp, Homo sapiens
ttctcccaaaaagcg

SEQ ID NO: 253931 - DNA, 15 bp, Homo sapiens
attctcccaaaaagc

SEQ ID NO: 253932 - DNA, 15 bp, Homo sapiens
cattctcccaaaaag

SEQ ID NO: 253933 - DNA, 15 bp, Homo sapiens
tcattctcccaaaaa

SEQ ID NO: 253934 - DNA, 15 bp, Homo sapiens
atcattctcccaaaa

SEQ ID NO: 253935 - DNA, 15 bp, Homo sapiens
catcattctcccaaa

SEQ ID NO: 253936 - DNA, 15 bp, Homo sapiens
acatcattctcccaa

SEQ ID NO: 253937 - DNA, 15 bp, Homo sapiens
gacatcattctccca

SEQ ID NO: 253938 - DNA, 15 bp, Homo sapiens
ggacatcattctccc

SEQ ID NO: 253939 - DNA, 15 bp, Homo sapiens
gggacatcattctcc

SEQ ID NO: 253940 - DNA, 15 bp, Homo sapiens
ggggacatcattctc

SEQ ID NO: 253941 - DNA, 15 bp, Homo sapiens
cggggacatcattct

SEQ ID NO: 253942 - DNA, 15 bp, Homo sapiens
acggggacatcattc

SEQ ID NO: 253943 - DNA, 15 bp, Homo sapiens
aacggggacatcatt

SEQ ID NO: 253944 - DNA, 15 bp, Homo sapiens
caacggggacatcat

SEQ ID NO: 253945 - DNA, 15 bp, Homo sapiens
acaacggggacatca

SEQ ID NO: 253946 - DNA, 15 bp, Homo sapiens
tacaacggggacatc

SEQ ID NO: 253947 - DNA, 15 bp, Homo sapiens
atacaacggggacat

SEQ ID NO: 253948 - DNA, 15 bp, Homo sapiens
catacaacggggaca

SEQ ID NO: 253949 - DNA, 15 bp, Homo sapiens
acatacaacggggac

SEQ ID NO: 253950 - DNA, 15 bp, Homo sapiens
tacatacaacgggga

SEQ ID NO: 253951 - DNA, 15 bp, Homo sapiens
atacatacaacgggg

SEQ ID NO: 253952 - DNA, 15 bp, Homo sapiens
catacatacaacggg

SEQ ID NO: 253953 - DNA, 15 bp, Homo sapiens
tcatacatacaacgg

SEQ ID NO: 253954 - DNA, 15 bp, Homo sapiens
ctcatacatacaacg

SEQ ID NO: 253955 - DNA, 15 bp, Homo sapiens
actcatacatacaac

SEQ ID NO: 253956 - DNA, 15 bp, Homo sapiens
cactcatacatacaa

SEQ ID NO: 253957 - DNA, 15 bp, Homo sapiens
ccactcatacataca

SEQ ID NO: 253958 - DNA, 15 bp, Homo sapiens
gccactcatacatac

SEQ ID NO: 253959 - DNA, 15 bp, Homo sapiens
agccactcatacata

SEQ ID NO: 253960 - DNA, 15 bp, Homo sapiens
aagccactcatacat

SEQ ID NO: 253961 - DNA, 15 bp, Homo sapiens
gaagccactcataca

SEQ ID NO: 253962 - DNA, 15 bp, Homo sapiens
agaagccactcatac

SEQ ID NO: 253963 - DNA, 15 bp, Homo sapiens
cagaagccactcata

SEQ ID NO: 253964 - DNA, 15 bp, Homo sapiens
ccagaagccactcat

SEQ ID NO: 253965 - DNA, 15 bp, Homo sapiens
cccagaagccactca

SEQ ID NO: 253966 - DNA, 15 bp, Homo sapiens
tcccagaagccactc

SEQ ID NO: 253967 - DNA, 15 bp, Homo sapiens
ctcccagaagccact

SEQ ID NO: 253968 - DNA, 15 bp, Homo sapiens
tctcccagaagccac

SEQ ID NO: 253969 - DNA, 15 bp, Homo sapiens
atctcccagaagcca

SEQ ID NO: 253970 - DNA, 15 bp, Homo sapiens
catctcccagaagcc

SEQ ID NO: 253971 - DNA, 15 bp, Homo sapiens
ccatctcccagaagc

SEQ ID NO: 253972 - DNA, 15 bp, Homo sapiens
cccatctcccagaag

SEQ ID NO: 253973 - DNA, 15 bp, Homo sapiens
acccatctcccagaa

SEQ ID NO: 253974 - DNA, 15 bp, Homo sapiens
cacccatctcccaga

SEQ ID NO: 253975 - DNA, 15 bp, Homo sapiens
acacccatctcccag

SEQ ID NO: 253976 - DNA, 15 bp, Homo sapiens
gacacccatctccca

SEQ ID NO: 253977 - DNA, 15 bp, Homo sapiens
tgacacccatctccc

SEQ ID NO: 253978 - DNA, 15 bp, Homo sapiens
gtgacacccatctcc

SEQ ID NO: 253979 - DNA, 15 bp, Homo sapiens
agtgacacccatctc

SEQ ID NO: 253980 - DNA, 15 bp, Homo sapiens
aagtgacacccatct

SEQ ID NO: 253981 - DNA, 15 bp, Homo sapiens
aaagtgacacccatc

SEQ ID NO: 253982 - DNA, 15 bp, Homo sapiens
aaaagtgacacccat

SEQ ID NO: 253983 - DNA, 15 bp, Homo sapiens
aaaaagtgacaccca

SEQ ID NO: 253984 - DNA, 15 bp, Homo sapiens
taaaaagtgacaccc

SEQ ID NO: 253985 - DNA, 15 bp, Homo sapiens
ttaaaaagtgacacc

SEQ ID NO: 253986 - DNA, 15 bp, Homo sapiens
tttaaaaagtgacac

SEQ ID NO: 253987 - DNA, 15 bp, Homo sapiens
gtttaaaaagtgaca

SEQ ID NO: 253988 - DNA, 15 bp, Homo sapiens
ggtttaaaaagtgac

SEQ ID NO: 253989 - DNA, 15 bp, Homo sapiens
tggtttaaaaagtga

SEQ ID NO: 253990 - DNA, 15 bp, Homo sapiens
gtggtttaaaaagtg

SEQ ID NO: 253991 - DNA, 15 bp, Homo sapiens
agtggtttaaaaagt

SEQ ID NO: 253992 - DNA, 15 bp, Homo sapiens
cagtggtttaaaaag

SEQ ID NO: 253993 - DNA, 15 bp, Homo sapiens
acagtggtttaaaaa

SEQ ID NO: 253994 - DNA, 15 bp, Homo sapiens
tacagtggtttaaaa

SEQ ID NO: 253995 - DNA, 15 bp, Homo sapiens
atacagtggtttaaa

SEQ ID NO: 253996 - DNA, 15 bp, Homo sapiens
tatacagtggtttaa

SEQ ID NO: 253997 - DNA, 15 bp, Homo sapiens
ctatacagtggttta

SEQ ID NO: 253998 - DNA, 15 bp, Homo sapiens
tctatacagtggttt

SEQ ID NO: 253999 - DNA, 15 bp, Homo sapiens
ttctatacagtggtt

SEQ ID NO: 254000 - DNA, 15 bp, Homo sapiens
cttctatacagtggt

SEQ ID NO: 254001 - DNA, 15 bp, Homo sapiens
ccttctatacagtgg

SEQ ID NO: 254002 - DNA, 15 bp, Homo sapiens
accttctatacagtg

SEQ ID NO: 254003 - DNA, 15 bp, Homo sapiens
aaccttctatacagt

SEQ ID NO: 254004 - DNA, 15 bp, Homo sapiens
aaaccttctatacag

SEQ ID NO: 254005 - DNA, 15 bp, Homo sapiens
aaaaccttctataca

SEQ ID NO: 254006 - DNA, 15 bp, Homo sapiens
aaaaaccttctatac

SEQ ID NO: 254007 - DNA, 15 bp, Homo sapiens
caaaaaccttctata

SEQ ID NO: 254008 - DNA, 15 bp, Homo sapiens
acaaaaaccttctat

SEQ ID NO: 254009 - DNA, 15 bp, Homo sapiens
tacaaaaaccttcta

SEQ ID NO: 254010 - DNA, 15 bp, Homo sapiens
ctacaaaaaccttct

SEQ ID NO: 254011 - DNA, 15 bp, Homo sapiens
gctacaaaaaccttc

SEQ ID NO: 254012 - DNA, 15 bp, Homo sapiens
ggctacaaaaacctt

SEQ ID NO: 254013 - DNA, 15 bp, Homo sapiens
aggctacaaaaacct

SEQ ID NO: 254014 - DNA, 15 bp, Homo sapiens
caggctacaaaaacc

SEQ ID NO: 254015 - DNA, 15 bp, Homo sapiens
tcaggctacaaaaac

SEQ ID NO: 254016 - DNA, 15 bp, Homo sapiens
ttcaggctacaaaaa

SEQ ID NO: 254017 - DNA, 15 bp, Homo sapiens
attcaggctacaaaa

SEQ ID NO: 254018 - DNA, 15 bp, Homo sapiens
cattcaggctacaaa

SEQ ID NO: 254019 - DNA, 15 bp, Homo sapiens
acattcaggctacaa

SEQ ID NO: 254020 - DNA, 15 bp, Homo sapiens
gacattcaggctaca

SEQ ID NO: 254021 - DNA, 15 bp, Homo sapiens
agacattcaggctac

SEQ ID NO: 254022 - DNA, 15 bp, Homo sapiens
aagacattcaggcta

SEQ ID NO: 254023 - DNA, 15 bp, Homo sapiens
taagacattcaggct

SEQ ID NO: 254024 - DNA, 15 bp, Homo sapiens
gtaagacattcaggc

SEQ ID NO: 254025 - DNA, 15 bp, Homo sapiens
agtaagacattcagg

SEQ ID NO: 254026 - DNA, 15 bp, Homo sapiens
cagtaagacattcag

SEQ ID NO: 254027 - DNA, 15 bp, Homo sapiens
acagtaagacattca

SEQ ID NO: 254028 - DNA, 15 bp, Homo sapiens
cacagtaagacattc

SEQ ID NO: 254029 - DNA, 15 bp, Homo sapiens
tcacagtaagacatt

SEQ ID NO: 254030 - DNA, 15 bp, Homo sapiens
atcacagtaagacat

SEQ ID NO: 254031 - DNA, 15 bp, Homo sapiens
gatcacagtaagaca

SEQ ID NO: 254032 - DNA, 15 bp, Homo sapiens
tgatcacagtaagac

SEQ ID NO: 254033 - DNA, 15 bp, Homo sapiens
ttgatcacagtaaga

SEQ ID NO: 254034 - DNA, 15 bp, Homo sapiens
attgatcacagtaag

SEQ ID NO: 254035 - DNA, 15 bp, Homo sapiens
aattgatcacagtaa

SEQ ID NO: 254036 - DNA, 15 bp, Homo sapiens
taattgatcacagta

SEQ ID NO: 254037 - DNA, 15 bp, Homo sapiens
ttaattgatcacagt

SEQ ID NO: 254038 - DNA, 15 bp, Homo sapiens
tttaattgatcacag

SEQ ID NO: 254039 - DNA, 15 bp, Homo sapiens
atttaattgatcaca

SEQ ID NO: 254040 - DNA, 15 bp, Homo sapiens
aatttaattgatcac

SEQ ID NO: 254041 - DNA, 15 bp, Homo sapiens
aaatttaattgatca

SEQ ID NO: 254042 - DNA, 15 bp, Homo sapiens
gaaatttaattgatc

SEQ ID NO: 254043 - DNA, 15 bp, Homo sapiens
agaaatttaattgat

SEQ ID NO: 254044 - DNA, 15 bp, Homo sapiens
aagaaatttaattga

SEQ ID NO: 254045 - DNA, 15 bp, Homo sapiens
taagaaatttaattg

SEQ ID NO: 254046 - DNA, 15 bp, Homo sapiens
ttaagaaatttaatt

SEQ ID NO: 254047 - DNA, 15 bp, Homo sapiens
tttaagaaatttaat

SEQ ID NO: 254048 - DNA, 15 bp, Homo sapiens
atttaagaaatttaa

SEQ ID NO: 254049 - DNA, 15 bp, Homo sapiens
catttaagaaattta

SEQ ID NO: 254050 - DNA, 15 bp, Homo sapiens
tcatttaagaaattt

SEQ ID NO: 254051 - DNA, 15 bp, Homo sapiens
ttcatttaagaaatt

SEQ ID NO: 254052 - DNA, 15 bp, Homo sapiens
gttcatttaagaaat

SEQ ID NO: 254053 - DNA, 15 bp, Homo sapiens
ggttcatttaagaaa

SEQ ID NO: 254054 - DNA, 15 bp, Homo sapiens
tggttcatttaagaa

SEQ ID NO: 254055 - DNA, 15 bp, Homo sapiens
ttggttcatttaaga

SEQ ID NO: 254056 - DNA, 15 bp, Homo sapiens
attggttcatttaag

SEQ ID NO: 254057 - DNA, 15 bp, Homo sapiens
aattggttcatttaa

SEQ ID NO: 254058 - DNA, 15 bp, Homo sapiens
aaattggttcattta

SEQ ID NO: 254059 - DNA, 15 bp, Homo sapiens
caaattggttcattt

SEQ ID NO: 254060 - DNA, 15 bp, Homo sapiens
acaaattggttcatt

SEQ ID NO: 254061 - DNA, 15 bp, Homo sapiens
gacaaattggttcat

SEQ ID NO: 254062 - DNA, 15 bp, Homo sapiens
agacaaattggttca

SEQ ID NO: 254063 - DNA, 15 bp, Homo sapiens
tagacaaattggttc

SEQ ID NO: 254064 - DNA, 15 bp, Homo sapiens
ttagacaaattggtt

SEQ ID NO: 254065 - DNA, 15 bp, Homo sapiens
tttagacaaattggt

SEQ ID NO: 254066 - DNA, 15 bp, Homo sapiens
gtttagacaaattgg

SEQ ID NO: 254067 - DNA, 15 bp, Homo sapiens
agtttagacaaattg

SEQ ID NO: 254068 - DNA, 15 bp, Homo sapiens
gagtttagacaaatt

SEQ ID NO: 254069 - DNA, 15 bp, Homo sapiens
cgagtttagacaaat

SEQ ID NO: 254070 - DNA, 15 bp, Homo sapiens
tcgagtttagacaaa

SEQ ID NO: 254071 - DNA, 15 bp, Homo sapiens
atcgagtttagacaa

SEQ ID NO: 254072 - DNA, 15 bp, Homo sapiens
catcgagtttagaca

SEQ ID NO: 254073 - DNA, 15 bp, Homo sapiens
gcatcgagtttagac

SEQ ID NO: 254074 - DNA, 15 bp, Homo sapiens
tgcatcgagtttaga

SEQ ID NO: 254075 - DNA, 15 bp, Homo sapiens
gtgcatcgagtttag

SEQ ID NO: 254076 - DNA, 15 bp, Homo sapiens
cgtgcatcgagttta

SEQ ID NO: 254077 - DNA, 15 bp, Homo sapiens
acgtgcatcgagttt

SEQ ID NO: 254078 - DNA, 15 bp, Homo sapiens
aacgtgcatcgagtt

SEQ ID NO: 254079 - DNA, 15 bp, Homo sapiens
gaacgtgcatcgagt

SEQ ID NO: 254080 - DNA, 15 bp, Homo sapiens
agaacgtgcatcgag

SEQ ID NO: 254081 - DNA, 15 bp, Homo sapiens
aagaacgtgcatcga

SEQ ID NO: 254082 - DNA, 15 bp, Homo sapiens
gaagaacgtgcatcg

SEQ ID NO: 254083 - DNA, 15 bp, Homo sapiens
agaagaacgtgcatc

SEQ ID NO: 254084 - DNA, 15 bp, Homo sapiens
cagaagaacgtgcat

SEQ ID NO: 254085 - DNA, 15 bp, Homo sapiens
acagaagaacgtgca

SEQ ID NO: 254086 - DNA, 15 bp, Homo sapiens
aacagaagaacgtgc

SEQ ID NO: 254087 - DNA, 15 bp, Homo sapiens
gaacagaagaacgtg

SEQ ID NO: 254088 - DNA, 15 bp, Homo sapiens
cgaacagaagaacgt

SEQ ID NO: 254089 - DNA, 15 bp, Homo sapiens
gcgaacagaagaacg

SEQ ID NO: 254090 - DNA, 15 bp, Homo sapiens
cgcgaacagaagaac

SEQ ID NO: 254091 - DNA, 15 bp, Homo sapiens
gcgcgaacagaagaa

SEQ ID NO: 254092 - DNA, 15 bp, Homo sapiens
cgcgcgaacagaaga

SEQ ID NO: 254093 - DNA, 15 bp, Homo sapiens
gcgcgcgaacagaag

SEQ ID NO: 254094 - DNA, 15 bp, Homo sapiens
agcgcgcgaacagaa

SEQ ID NO: 254095 - DNA, 15 bp, Homo sapiens
aagcgcgcgaacaga

SEQ ID NO: 254096 - DNA, 15 bp, Homo sapiens
gaagcgcgcgaacag

SEQ ID NO: 254097 - DNA, 15 bp, Homo sapiens
agaagcgcgcgaaca

SEQ ID NO: 254098 - DNA, 15 bp, Homo sapiens
aagaagcgcgcgaac

SEQ ID NO: 254099 - DNA, 15 bp, Homo sapiens
aaagaagcgcgcgaa

SEQ ID NO: 254100 - DNA, 15 bp, Homo sapiens
aaaagaagcgcgcga

SEQ ID NO: 254101 - DNA, 15 bp, Homo sapiens
aaaaagaagcgcgcg

SEQ ID NO: 254102 - DNA, 15 bp, Homo sapiens
caaaaagaagcgcgc

SEQ ID NO: 254103 - DNA, 15 bp, Homo sapiens
acaaaaagaagcgcg

SEQ ID NO: 254104 - DNA, 15 bp, Homo sapiens
aacaaaaagaagcgc

SEQ ID NO: 254105 - DNA, 15 bp, Homo sapiens
aaacaaaaagaagcg

SEQ ID NO: 254106 - DNA, 15 bp, Homo sapiens
aaaacaaaaagaagc

SEQ ID NO: 254107 - DNA, 15 bp, Homo sapiens
aaaaacaaaaagaag

SEQ ID NO: 254108 - DNA, 15 bp, Homo sapiens
aaaaaacaaaaagaa

SEQ ID NO: 254109 - DNA, 15 bp, Homo sapiens
aaaaaaacaaaaaga

SEQ ID NO: 254110 - DNA, 15 bp, Homo sapiens
aaaaaaaacaaaaag

SEQ ID NO: 254111 - DNA, 15 bp, Homo sapiens
aaaaaaaaacaaaaa

SEQ ID NO: 254112 - DNA, 15 bp, Homo sapiens
aaaaaaaaaacaaaa

SEQ ID NO: 254113 - DNA, 15 bp, Homo sapiens
aaaaaaaaaaacaaa

SEQ ID NO: 254114 - DNA, 15 bp, Homo sapiens
gaaaaaaaaaaaaac

SEQ ID NO: 254115 - DNA, 15 bp, Homo sapiens
ggaaaaaaaaaaaaa

SEQ ID NO: 254116 - DNA, 15 bp, Homo sapiens
aggaaaaaaaaaaaa

SEQ ID NO: 254117 - DNA, 15 bp, Homo sapiens
caggaaaaaaaaaaa

SEQ ID NO: 254118 - DNA, 15 bp, Homo sapiens
tcaggaaaaaaaaaa

SEQ ID NO: 254119 - DNA, 15 bp, Homo sapiens
ctcaggaaaaaaaaa

SEQ ID NO: 254120 - DNA, 15 bp, Homo sapiens
tctcaggaaaaaaaa

SEQ ID NO: 254121 - DNA, 15 bp, Homo sapiens
atctcaggaaaaaaa

SEQ ID NO: 254122 - DNA, 15 bp, Homo sapiens
catctcaggaaaaaa

SEQ ID NO: 254123 - DNA, 15 bp, Homo sapiens
ccatctcaggaaaaa

SEQ ID NO: 254124 - DNA, 15 bp, Homo sapiens
tccatctcaggaaaa

SEQ ID NO: 254125 - DNA, 15 bp, Homo sapiens
ctccatctcaggaaa

SEQ ID NO: 254126 - DNA, 15 bp, Homo sapiens
gctccatctcaggaa

SEQ ID NO: 254127 - DNA, 15 bp, Homo sapiens
ggctccatctcagga

SEQ ID NO: 254128 - DNA, 15 bp, Homo sapiens
aggctccatctcagg

SEQ ID NO: 254129 - DNA, 15 bp, Homo sapiens
caggctccatctcag

SEQ ID NO: 254130 - DNA, 15 bp, Homo sapiens
ccaggctccatctca

SEQ ID NO: 254131 - DNA, 15 bp, Homo sapiens
gccaggctccatctc

SEQ ID NO: 254132 - DNA, 15 bp, Homo sapiens
agccaggctccatct

SEQ ID NO: 254133 - DNA, 15 bp, Homo sapiens
gagccaggctccatc

SEQ ID NO: 254134 - DNA, 15 bp, Homo sapiens
agagccaggctccat

SEQ ID NO: 254135 - DNA, 15 bp, Homo sapiens
cagagccaggctcca

SEQ ID NO: 254136 - DNA, 15 bp, Homo sapiens
acagagccaggctcc

SEQ ID NO: 254137 - DNA, 15 bp, Homo sapiens
gacagagccaggctc

SEQ ID NO: 254138 - DNA, 15 bp, Homo sapiens
tgacagagccaggct

SEQ ID NO: 254139 - DNA, 15 bp, Homo sapiens
gtgacagagccaggc

SEQ ID NO: 254140 - DNA, 15 bp, Homo sapiens
ggtgacagagccagg

SEQ ID NO: 254141 - DNA, 15 bp, Homo sapiens
gggtgacagagccag

SEQ ID NO: 254142 - DNA, 15 bp, Homo sapiens
ggggtgacagagcca

SEQ ID NO: 254143 - DNA, 15 bp, Homo sapiens
aggggtgacagagcc

SEQ ID NO: 254144 - DNA, 15 bp, Homo sapiens
caggggtgacagagc

SEQ ID NO: 254145 - DNA, 15 bp, Homo sapiens
ccaggggtgacagag

SEQ ID NO: 254146 - DNA, 15 bp, Homo sapiens
gccaggggtgacaga

SEQ ID NO: 254147 - DNA, 15 bp, Homo sapiens
agccaggggtgacag

SEQ ID NO: 254148 - DNA, 15 bp, Homo sapiens
cagccaggggtgaca

SEQ ID NO: 254149 - DNA, 15 bp, Homo sapiens
ccagccaggggtgac

SEQ ID NO: 254150 - DNA, 15 bp, Homo sapiens
tccagccaggggtga

SEQ ID NO: 254151 - DNA, 15 bp, Homo sapiens
ctccagccaggggtg

SEQ ID NO: 254152 - DNA, 15 bp, Homo sapiens
actccagccaggggt

SEQ ID NO: 254153 - DNA, 15 bp, Homo sapiens
cactccagccagggg

SEQ ID NO: 254154 - DNA, 15 bp, Homo sapiens
gcactccagccaggg

SEQ ID NO: 254155 - DNA, 15 bp, Homo sapiens
tgcactccagccagg

SEQ ID NO: 254156 - DNA, 15 bp, Homo sapiens
ctgcactccagccag

SEQ ID NO: 254157 - DNA, 15 bp, Homo sapiens
actgcactccagcca

SEQ ID NO: 254158 - DNA, 15 bp, Homo sapiens
gagatcatgccactg

SEQ ID NO: 254159 - DNA, 15 bp, Homo sapiens
cgagatcatgccact

SEQ ID NO: 254160 - DNA, 15 bp, Homo sapiens
ccgagatcatgccac

SEQ ID NO: 254161 - DNA, 15 bp, Homo sapiens
aagccgagatcatgc

SEQ ID NO: 254162 - DNA, 15 bp, Homo sapiens
taagccgagatcatg

SEQ ID NO: 254163 - DNA, 15 bp, Homo sapiens
gtaagccgagatcat

SEQ ID NO: 254164 - DNA, 15 bp, Homo sapiens
agtaagccgagatca

SEQ ID NO: 254165 - DNA, 15 bp, Homo sapiens
cagtaagccgagatc

SEQ ID NO: 254166 - DNA, 15 bp, Homo sapiens
gcagtaagccgagat

SEQ ID NO: 254167 - DNA, 15 bp, Homo sapiens
tgcagtaagccgaga

SEQ ID NO: 254168 - DNA, 15 bp, Homo sapiens
ttgcagtaagccgag

SEQ ID NO: 254169 - DNA, 15 bp, Homo sapiens
cttgcagtaagccga

SEQ ID NO: 254170 - DNA, 15 bp, Homo sapiens
gcttgcagtaagccg

SEQ ID NO: 254171 - DNA, 15 bp, Homo sapiens
agcttgcagtaagcc

SEQ ID NO: 254172 - DNA, 15 bp, Homo sapiens
gagcttgcagtaagc

SEQ ID NO: 254173 - DNA, 15 bp, Homo sapiens
ggagcttgcagtaag

SEQ ID NO: 254174 - DNA, 15 bp, Homo sapiens
cggagcttgcagtaa

SEQ ID NO: 254175 - DNA, 15 bp, Homo sapiens
gcggagcttgcagta

SEQ ID NO: 254176 - DNA, 15 bp, Homo sapiens
tgcttgaacctggga

SEQ ID NO: 254177 - DNA, 15 bp, Homo sapiens
ttgcttgaacctggg

SEQ ID NO: 254178 - DNA, 15 bp, Homo sapiens
tagctactagggagg

SEQ ID NO: 254179 - DNA, 15 bp, Homo sapiens
ctagctactagggag

SEQ ID NO: 254180 - DNA, 15 bp, Homo sapiens
cctagctactaggga

SEQ ID NO: 254181 - DNA, 15 bp, Homo sapiens
tcctagctactaggg

SEQ ID NO: 254182 - DNA, 15 bp, Homo sapiens
atcctagctactagg

SEQ ID NO: 254183 - DNA, 15 bp, Homo sapiens
aatcctagctactag

SEQ ID NO: 254184 - DNA, 15 bp, Homo sapiens
taatcctagctacta

SEQ ID NO: 254185 - DNA, 15 bp, Homo sapiens
gtaatcctagctact

SEQ ID NO: 254186 - DNA, 15 bp, Homo sapiens
tgtaatcctagctac

SEQ ID NO: 254187 - DNA, 15 bp, Homo sapiens
ctgtaatcctagcta

SEQ ID NO: 254188 - DNA, 15 bp, Homo sapiens
cctgtaatcctagct

SEQ ID NO: 254189 - DNA, 15 bp, Homo sapiens
tcacctgtaatccta

SEQ ID NO: 254190 - DNA, 15 bp, Homo sapiens
ctcacctgtaatcct

SEQ ID NO: 254191 - DNA, 15 bp, Homo sapiens
actcacctgtaatcc

SEQ ID NO: 254192 - DNA, 15 bp, Homo sapiens
cactcacctgtaatc

SEQ ID NO: 254193 - DNA, 15 bp, Homo sapiens
gcactcacctgtaat

SEQ ID NO: 254194 - DNA, 15 bp, Homo sapiens
ggcactcacctgtaa

SEQ ID NO: 254195 - DNA, 15 bp, Homo sapiens
tggcactcacctgta

SEQ ID NO: 254196 - DNA, 15 bp, Homo sapiens
gtggcactcacctgt

SEQ ID NO: 254197 - DNA, 15 bp, Homo sapiens
ggtggcactcacctg

SEQ ID NO: 254198 - DNA, 15 bp, Homo sapiens
tggtggcactcacct

SEQ ID NO: 254199 - DNA, 15 bp, Homo sapiens
gtggtggcactcacc

SEQ ID NO: 254200 - DNA, 15 bp, Homo sapiens
cgtggtggcactcac

SEQ ID NO: 254201 - DNA, 15 bp, Homo sapiens
gcgtggtggcactca

SEQ ID NO: 254202 - DNA, 15 bp, Homo sapiens
ggcgtggtggcactc

SEQ ID NO: 254203 - DNA, 15 bp, Homo sapiens
aggcgtggtggcact

SEQ ID NO: 254204 - DNA, 15 bp, Homo sapiens
caggcgtggtggcac

SEQ ID NO: 254205 - DNA, 15 bp, Homo sapiens
tggccaggcgtggtg

SEQ ID NO: 254206 - DNA, 15 bp, Homo sapiens
ttggccaggcgtggt

SEQ ID NO: 254207 - DNA, 15 bp, Homo sapiens
attggccaggcgtgg

SEQ ID NO: 254208 - DNA, 15 bp, Homo sapiens
aattggccaggcgtg

SEQ ID NO: 254209 - DNA, 15 bp, Homo sapiens
aaattggccaggcgt

SEQ ID NO: 254210 - DNA, 15 bp, Homo sapiens
aaaattggccaggcg

SEQ ID NO: 254211 - DNA, 15 bp, Homo sapiens
aaaaaaaattggcca

SEQ ID NO: 254212 - DNA, 15 bp, Homo sapiens
aaaaaaaaattggcc

SEQ ID NO: 254213 - DNA, 15 bp, Homo sapiens
aaaaaaaaaattggc

SEQ ID NO: 254214 - DNA, 15 bp, Homo sapiens
aaaaaaaaaaattgg

SEQ ID NO: 254215 - DNA, 15 bp, Homo sapiens
aaaaaaaaaaaattg

SEQ ID NO: 254216 - DNA, 15 bp, Homo sapiens
tgacagagcgagact

SEQ ID NO: 254217 - DNA, 15 bp, Homo sapiens
gtgacagagcgagac

SEQ ID NO: 254218 - DNA, 15 bp, Homo sapiens
ggtgacagagcgaga

SEQ ID NO: 254219 - DNA, 15 bp, Homo sapiens
gggtgacagagcgag

SEQ ID NO: 254220 - DNA, 15 bp, Homo sapiens
tgggtgacagagcga

SEQ ID NO: 254221 - DNA, 15 bp, Homo sapiens
ctgggtgacagagcg

SEQ ID NO: 254222 - DNA, 15 bp, Homo sapiens
cgagatcacaccact

SEQ ID NO: 254223 - DNA, 15 bp, Homo sapiens
ccgagatcacaccac

SEQ ID NO: 254224 - DNA, 15 bp, Homo sapiens
gggaggcagagcttg

SEQ ID NO: 254225 - DNA, 15 bp, Homo sapiens
tgggaggcagagctt

SEQ ID NO: 254226 - DNA, 15 bp, Homo sapiens
ctgggaggcagagct

SEQ ID NO: 254227 - DNA, 15 bp, Homo sapiens
cctgggaggcagagc

SEQ ID NO: 254228 - DNA, 15 bp, Homo sapiens
taacctgggaggcag

SEQ ID NO: 254229 - DNA, 15 bp, Homo sapiens
ttaacctgggaggca

SEQ ID NO: 254230 - DNA, 15 bp, Homo sapiens
attaacctgggaggc

SEQ ID NO: 254231 - DNA, 15 bp, Homo sapiens
cattaacctgggagg

SEQ ID NO: 254232 - DNA, 15 bp, Homo sapiens
gcattaacctgggag

SEQ ID NO: 254233 - DNA, 15 bp, Homo sapiens
ggcattaacctggga

SEQ ID NO: 254234 - DNA, 15 bp, Homo sapiens
tggcattaacctggg

SEQ ID NO: 254235 - DNA, 15 bp, Homo sapiens
atggcattaacctgg

SEQ ID NO: 254236 - DNA, 15 bp, Homo sapiens
aatggcattaacctg

SEQ ID NO: 254237 - DNA, 15 bp, Homo sapiens
gaatggcattaacct

SEQ ID NO: 254238 - DNA, 15 bp, Homo sapiens
agaatggcattaacc

SEQ ID NO: 254239 - DNA, 15 bp, Homo sapiens
gagaatggcattaac

SEQ ID NO: 254240 - DNA, 15 bp, Homo sapiens
ggagaatggcattaa

SEQ ID NO: 254241 - DNA, 15 bp, Homo sapiens
aggagaatggcatta

SEQ ID NO: 254242 - DNA, 15 bp, Homo sapiens
caggagaatggcatt

SEQ ID NO: 254243 - DNA, 15 bp, Homo sapiens
acaggagaatggcat

SEQ ID NO: 254244 - DNA, 15 bp, Homo sapiens
gacaggagaatggca

SEQ ID NO: 254245 - DNA, 15 bp, Homo sapiens
agacaggagaatggc

SEQ ID NO: 254246 - DNA, 15 bp, Homo sapiens
gagacaggagaatgg

SEQ ID NO: 254247 - DNA, 15 bp, Homo sapiens
tgagacaggagaatg

SEQ ID NO: 254248 - DNA, 15 bp, Homo sapiens
gctgagacaggagaa

SEQ ID NO: 254249 - DNA, 15 bp, Homo sapiens
ggctgagacaggaga

SEQ ID NO: 254250 - DNA, 15 bp, Homo sapiens
aggctgagacaggag

SEQ ID NO: 254251 - DNA, 15 bp, Homo sapiens
gaggctgagacagga

SEQ ID NO: 254252 - DNA, 15 bp, Homo sapiens
ggaggctgagacagg

SEQ ID NO: 254253 - DNA, 15 bp, Homo sapiens
aggaggctgagacag

SEQ ID NO: 254254 - DNA, 15 bp, Homo sapiens
tcaggaggctgagac

SEQ ID NO: 254255 - DNA, 15 bp, Homo sapiens
ccccagctactcagg

SEQ ID NO: 254256 - DNA, 15 bp, Homo sapiens
gccccagctactcag

SEQ ID NO: 254257 - DNA, 15 bp, Homo sapiens
ggccccagctactca

SEQ ID NO: 254258 - DNA, 15 bp, Homo sapiens
tggccccagctactc

SEQ ID NO: 254259 - DNA, 15 bp, Homo sapiens
gtggccccagctact

SEQ ID NO: 254260 - DNA, 15 bp, Homo sapiens
tgtggccccagctac

SEQ ID NO: 254261 - DNA, 15 bp, Homo sapiens
ctgtggccccagcta

SEQ ID NO: 254262 - DNA, 15 bp, Homo sapiens
cctgtggccccagct

SEQ ID NO: 254263 - DNA, 15 bp, Homo sapiens
gcctgtggccccagc

SEQ ID NO: 254264 - DNA, 15 bp, Homo sapiens
cgcctgtggccccag

SEQ ID NO: 254265 - DNA, 15 bp, Homo sapiens
gcgcctgtggcccca

SEQ ID NO: 254266 - DNA, 15 bp, Homo sapiens
ggcgcctgtggcccc

SEQ ID NO: 254267 - DNA, 15 bp, Homo sapiens
aggcgcctgtggccc

SEQ ID NO: 254268 - DNA, 15 bp, Homo sapiens
caggcgcctgtggcc

SEQ ID NO: 254269 - DNA, 15 bp, Homo sapiens
gcaggcgcctgtggc

SEQ ID NO: 254270 - DNA, 15 bp, Homo sapiens
ggcaggcgcctgtgg

SEQ ID NO: 254271 - DNA, 15 bp, Homo sapiens
tggcaggcgcctgtg

SEQ ID NO: 254272 - DNA, 15 bp, Homo sapiens
gtggcaggcgcctgt

SEQ ID NO: 254273 - DNA, 15 bp, Homo sapiens
ggtggcaggcgcctg

SEQ ID NO: 254274 - DNA, 15 bp, Homo sapiens
tggtggcaggcgcct

SEQ ID NO: 254275 - DNA, 15 bp, Homo sapiens
gtggtggcaggcgcc

SEQ ID NO: 254276 - DNA, 15 bp, Homo sapiens
cgtggtggcaggcgc

SEQ ID NO: 254277 - DNA, 15 bp, Homo sapiens
gcgtggtggcaggcg

SEQ ID NO: 254278 - DNA, 15 bp, Homo sapiens
ggcgtggtggcaggc

SEQ ID NO: 254279 - DNA, 15 bp, Homo sapiens
gggcgtggtggcagg

SEQ ID NO: 254280 - DNA, 15 bp, Homo sapiens
cgggcgtggtggcag

SEQ ID NO: 254281 - DNA, 15 bp, Homo sapiens
aaaaaaaattagccg

SEQ ID NO: 254282 - DNA, 15 bp, Homo sapiens
caaaaaaaaattagc

SEQ ID NO: 254283 - DNA, 15 bp, Homo sapiens
acaaaaaaaaattag

SEQ ID NO: 254284 - DNA, 15 bp, Homo sapiens
tacaaaaaaaaatta

SEQ ID NO: 254285 - DNA, 15 bp, Homo sapiens
gtacaaaaaaaaatt

SEQ ID NO: 254286 - DNA, 15 bp, Homo sapiens
agtacaaaaaaaaat

SEQ ID NO: 254287 - DNA, 15 bp, Homo sapiens
aagtacaaaaaaaaa

SEQ ID NO: 254288 - DNA, 15 bp, Homo sapiens
gaagtacaaaaaaaa

SEQ ID NO: 254289 - DNA, 15 bp, Homo sapiens
agaagtacaaaaaaa

SEQ ID NO: 254290 - DNA, 15 bp, Homo sapiens
aagaagtacaaaaaa

SEQ ID NO: 254291 - DNA, 15 bp, Homo sapiens
aaagaagtacaaaaa

SEQ ID NO: 254292 - DNA, 15 bp, Homo sapiens
aaaagaagtacaaaa

SEQ ID NO: 254293 - DNA, 15 bp, Homo sapiens
taaaagaagtacaaa

SEQ ID NO: 254294 - DNA, 15 bp, Homo sapiens
ctaaaagaagtacaa

SEQ ID NO: 254295 - DNA, 15 bp, Homo sapiens
actaaaagaagtaca

SEQ ID NO: 254296 - DNA, 15 bp, Homo sapiens
tactaaaagaagtac

SEQ ID NO: 254297 - DNA, 15 bp, Homo sapiens
gtactaaaagaagta

SEQ ID NO: 254298 - DNA, 15 bp, Homo sapiens
tgtactaaaagaagt

SEQ ID NO: 254299 - DNA, 15 bp, Homo sapiens
ctgtactaaaagaag

SEQ ID NO: 254300 - DNA, 15 bp, Homo sapiens
tctgtactaaaagaa

SEQ ID NO: 254301 - DNA, 15 bp, Homo sapiens
gtctgtactaaaaga

SEQ ID NO: 254302 - DNA, 15 bp, Homo sapiens
cgtctgtactaaaag

SEQ ID NO: 254303 - DNA, 15 bp, Homo sapiens
ccgtctgtactaaaa

SEQ ID NO: 254304 - DNA, 15 bp, Homo sapiens
cccgtctgtactaaa

SEQ ID NO: 254305 - DNA, 15 bp, Homo sapiens
ccccgtctgtactaa

SEQ ID NO: 254306 - DNA, 15 bp, Homo sapiens
accccgtctgtacta

SEQ ID NO: 254307 - DNA, 15 bp, Homo sapiens
aaccccgtctgtact

SEQ ID NO: 254308 - DNA, 15 bp, Homo sapiens
aaaccccgtctgtac

SEQ ID NO: 254309 - DNA, 15 bp, Homo sapiens
gaaaccccgtctgta

SEQ ID NO: 254310 - DNA, 15 bp, Homo sapiens
tgaaaccccgtctgt

SEQ ID NO: 254311 - DNA, 15 bp, Homo sapiens
gtgaaaccccgtctg

SEQ ID NO: 254312 - DNA, 15 bp, Homo sapiens
aaggtcaggagatcg

SEQ ID NO: 254313 - DNA, 15 bp, Homo sapiens
caaggtcaggagatc

SEQ ID NO: 254314 - DNA, 15 bp, Homo sapiens
acaaggtcaggagat

SEQ ID NO: 254315 - DNA, 15 bp, Homo sapiens
cacaaggtcaggaga

SEQ ID NO: 254316 - DNA, 15 bp, Homo sapiens
tcacaaggtcaggag

SEQ ID NO: 254317 - DNA, 15 bp, Homo sapiens
atcacaaggtcagga

SEQ ID NO: 254318 - DNA, 15 bp, Homo sapiens
gatcacaaggtcagg

SEQ ID NO: 254319 - DNA, 15 bp, Homo sapiens
ggatcacaaggtcag

SEQ ID NO: 254320 - DNA, 15 bp, Homo sapiens
tggatcacaaggtca

SEQ ID NO: 254321 - DNA, 15 bp, Homo sapiens
gtggatcacaaggtc

SEQ ID NO: 254322 - DNA, 15 bp, Homo sapiens
ggtggatcacaaggt

SEQ ID NO: 254323 - DNA, 15 bp, Homo sapiens
aggtggatcacaagg

SEQ ID NO: 254324 - DNA, 15 bp, Homo sapiens
caggtggatcacaag

SEQ ID NO: 254325 - DNA, 15 bp, Homo sapiens
gcaggtggatcacaa

SEQ ID NO: 254326 - DNA, 15 bp, Homo sapiens
agcaggtggatcaca

SEQ ID NO: 254327 - DNA, 15 bp, Homo sapiens
aagcaggtggatcac

SEQ ID NO: 254328 - DNA, 15 bp, Homo sapiens
gaagcaggtggatca

SEQ ID NO: 254329 - DNA, 15 bp, Homo sapiens
cgaagcaggtggatc

SEQ ID NO: 254330 - DNA, 15 bp, Homo sapiens
ccgaagcaggtggat

SEQ ID NO: 254331 - DNA, 15 bp, Homo sapiens
gccgaagcaggtgga

SEQ ID NO: 254332 - DNA, 15 bp, Homo sapiens
ggccgaagcaggtgg

SEQ ID NO: 254333 - DNA, 15 bp, Homo sapiens
aggccgaagcaggtg

SEQ ID NO: 254334 - DNA, 15 bp, Homo sapiens
gaggccgaagcaggt

SEQ ID NO: 254335 - DNA, 15 bp, Homo sapiens
ggaggccgaagcagg

SEQ ID NO: 254336 - DNA, 15 bp, Homo sapiens
gggaggccgaagcag

SEQ ID NO: 254337 - DNA, 15 bp, Homo sapiens
tgggaggccgaagca

SEQ ID NO: 254338 - DNA, 15 bp, Homo sapiens
ttgggaggccgaagc

SEQ ID NO: 254339 - DNA, 15 bp, Homo sapiens
ccgcggtggctcacg

SEQ ID NO: 254340 - DNA, 15 bp, Homo sapiens
cccgcggtggctcac

SEQ ID NO: 254341 - DNA, 15 bp, Homo sapiens
acccgcggtggctca

SEQ ID NO: 254342 - DNA, 15 bp, Homo sapiens
cacccgcggtggctc

SEQ ID NO: 254343 - DNA, 15 bp, Homo sapiens
ccacccgcggtggct

SEQ ID NO: 254344 - DNA, 15 bp, Homo sapiens
gccacccgcggtggc

SEQ ID NO: 254345 - DNA, 15 bp, Homo sapiens
ggccacccgcggtgg

SEQ ID NO: 254346 - DNA, 15 bp, Homo sapiens
tggccacccgcggtg

SEQ ID NO: 254347 - DNA, 15 bp, Homo sapiens
ttggccacccgcggt

SEQ ID NO: 254348 - DNA, 15 bp, Homo sapiens
gttggccacccgcgg

SEQ ID NO: 254349 - DNA, 15 bp, Homo sapiens
cgttggccacccgcg

SEQ ID NO: 254350 - DNA, 15 bp, Homo sapiens
gcgttggccacccgc

SEQ ID NO: 254351 - DNA, 15 bp, Homo sapiens
agcgttggccacccg

SEQ ID NO: 254352 - DNA, 15 bp, Homo sapiens
tagcgttggccaccc

SEQ ID NO: 254353 - DNA, 15 bp, Homo sapiens
ttagcgttggccacc

SEQ ID NO: 254354 - DNA, 15 bp, Homo sapiens
attagcgttggccac

SEQ ID NO: 254355 - DNA, 15 bp, Homo sapiens
aattagcgttggcca

SEQ ID NO: 254356 - DNA, 15 bp, Homo sapiens
aaattagcgttggcc

SEQ ID NO: 254357 - DNA, 15 bp, Homo sapiens
aaaattagcgttggc

SEQ ID NO: 254358 - DNA, 15 bp, Homo sapiens
aaaaattagcgttgg

SEQ ID NO: 254359 - DNA, 15 bp, Homo sapiens
aaaaaattagcgttg

SEQ ID NO: 254360 - DNA, 15 bp, Homo sapiens
aaaaaaattagcgtt

SEQ ID NO: 254361 - DNA, 15 bp, Homo sapiens
caaaaaaattagcgt

SEQ ID NO: 254362 - DNA, 15 bp, Homo sapiens
acaaaaaaattagcg

SEQ ID NO: 254363 - DNA, 15 bp, Homo sapiens
aacaaaaaaattagc

SEQ ID NO: 254364 - DNA, 15 bp, Homo sapiens
aaacaaaaaaattag

SEQ ID NO: 254365 - DNA, 15 bp, Homo sapiens
aaaacaaaaaaatta

SEQ ID NO: 254366 - DNA, 15 bp, Homo sapiens
aaaaacaaaaaaatt

SEQ ID NO: 254367 - DNA, 15 bp, Homo sapiens
aaaaaacaaaaaaat

SEQ ID NO: 254368 - DNA, 15 bp, Homo sapiens
taaaaaaacaaaaaa

SEQ ID NO: 254369 - DNA, 15 bp, Homo sapiens
ctaaaaaaacaaaaa

SEQ ID NO: 254370 - DNA, 15 bp, Homo sapiens
tctaaaaaaacaaaa

SEQ ID NO: 254371 - DNA, 15 bp, Homo sapiens
atctaaaaaaacaaa

SEQ ID NO: 254372 - DNA, 15 bp, Homo sapiens
catctaaaaaaacaa

SEQ ID NO: 254373 - DNA, 15 bp, Homo sapiens
ccatctaaaaaaaca

SEQ ID NO: 254374 - DNA, 15 bp, Homo sapiens
tccatctaaaaaaac

SEQ ID NO: 254375 - DNA, 15 bp, Homo sapiens
ctccatctaaaaaaa

SEQ ID NO: 254376 - DNA, 15 bp, Homo sapiens
actccatctaaaaaa

SEQ ID NO: 254377 - DNA, 15 bp, Homo sapiens
gactccatctaaaaa

SEQ ID NO: 254378 - DNA, 15 bp, Homo sapiens
agactccatctaaaa

SEQ ID NO: 254379 - DNA, 15 bp, Homo sapiens
aagactccatctaaa

SEQ ID NO: 254380 - DNA, 15 bp, Homo sapiens
caagactccatctaa

SEQ ID NO: 254381 - DNA, 15 bp, Homo sapiens
gcaagactccatcta

SEQ ID NO: 254382 - DNA, 15 bp, Homo sapiens
agcaagactccatct

SEQ ID NO: 254383 - DNA, 15 bp, Homo sapiens
gagcaagactccatc

SEQ ID NO: 254384 - DNA, 15 bp, Homo sapiens
agagcaagactccat

SEQ ID NO: 254385 - DNA, 15 bp, Homo sapiens
cagagcaagactcca

SEQ ID NO: 254386 - DNA, 15 bp, Homo sapiens
acgccactgcactcc

SEQ ID NO: 254387 - DNA, 15 bp, Homo sapiens
cacgccactgcactc

SEQ ID NO: 254388 - DNA, 15 bp, Homo sapiens
tcacgccactgcact

SEQ ID NO: 254389 - DNA, 15 bp, Homo sapiens
atcacgccactgcac

SEQ ID NO: 254390 - DNA, 15 bp, Homo sapiens
agagatcacgccact

SEQ ID NO: 254391 - DNA, 15 bp, Homo sapiens
cagagatcacgccac

SEQ ID NO: 254392 - DNA, 15 bp, Homo sapiens
gcagagatcacgcca

SEQ ID NO: 254393 - DNA, 15 bp, Homo sapiens
ggcagagatcacgcc

SEQ ID NO: 254394 - DNA, 15 bp, Homo sapiens
aggcagagatcacgc

SEQ ID NO: 254395 - DNA, 15 bp, Homo sapiens
taggcagagatcacg

SEQ ID NO: 254396 - DNA, 15 bp, Homo sapiens
gtaggcagagatcac

SEQ ID NO: 254397 - DNA, 15 bp, Homo sapiens
agtaggcagagatca

SEQ ID NO: 254398 - DNA, 15 bp, Homo sapiens
cagtaggcagagatc

SEQ ID NO: 254399 - DNA, 15 bp, Homo sapiens
gcagtaggcagagat

SEQ ID NO: 254400 - DNA, 15 bp, Homo sapiens
tgcagtaggcagaga

SEQ ID NO: 254401 - DNA, 15 bp, Homo sapiens
ttgcagtaggcagag

SEQ ID NO: 254402 - DNA, 15 bp, Homo sapiens
cttgcagtaggcaga

SEQ ID NO: 254403 - DNA, 15 bp, Homo sapiens
gcttgcagtaggcag

SEQ ID NO: 254404 - DNA, 15 bp, Homo sapiens
agcttgcagtaggca

SEQ ID NO: 254405 - DNA, 15 bp, Homo sapiens
gagcttgcagtaggc

SEQ ID NO: 254406 - DNA, 15 bp, Homo sapiens
ggagcttgcagtagg

SEQ ID NO: 254407 - DNA, 15 bp, Homo sapiens
cggagcttgcagtag

SEQ ID NO: 254408 - DNA, 15 bp, Homo sapiens
atgaacccgggaggc

SEQ ID NO: 254409 - DNA, 15 bp, Homo sapiens
catgaacccgggagg

SEQ ID NO: 254410 - DNA, 15 bp, Homo sapiens
gcatgaacccgggag

SEQ ID NO: 254411 - DNA, 15 bp, Homo sapiens
ggcatgaacccggga

SEQ ID NO: 254412 - DNA, 15 bp, Homo sapiens
tggcatgaacccggg

SEQ ID NO: 254413 - DNA, 15 bp, Homo sapiens
atggcatgaacccgg

SEQ ID NO: 254414 - DNA, 15 bp, Homo sapiens
aatggcatgaacccg

SEQ ID NO: 254415 - DNA, 15 bp, Homo sapiens
ttactcaggaggctg

SEQ ID NO: 254416 - DNA, 15 bp, Homo sapiens
gttactcaggaggct

SEQ ID NO: 254417 - DNA, 15 bp, Homo sapiens
agttactcaggaggc

SEQ ID NO: 254418 - DNA, 15 bp, Homo sapiens
cagttactcaggagg

SEQ ID NO: 254419 - DNA, 15 bp, Homo sapiens
ccagttactcaggag

SEQ ID NO: 254420 - DNA, 15 bp, Homo sapiens
cccagttactcagga

SEQ ID NO: 254421 - DNA, 15 bp, Homo sapiens
tcccagttactcagg

SEQ ID NO: 254422 - DNA, 15 bp, Homo sapiens
gtcccagttactcag

SEQ ID NO: 254423 - DNA, 15 bp, Homo sapiens
agtcccagttactca

SEQ ID NO: 254424 - DNA, 15 bp, Homo sapiens
tagtcccagttactc

SEQ ID NO: 254425 - DNA, 15 bp, Homo sapiens
gtagtcccagttact

SEQ ID NO: 254426 - DNA, 15 bp, Homo sapiens
tgtagtcccagttac

SEQ ID NO: 254427 - DNA, 15 bp, Homo sapiens
ctgtagtcccagtta

SEQ ID NO: 254428 - DNA, 15 bp, Homo sapiens
cctgtagtcccagtt

SEQ ID NO: 254429 - DNA, 15 bp, Homo sapiens
gcctgtagtcccagt

SEQ ID NO: 254430 - DNA, 15 bp, Homo sapiens
taacacggtgaaacc

SEQ ID NO: 254431 - DNA, 15 bp, Homo sapiens
ctaacacggtgaaac

SEQ ID NO: 254432 - DNA, 15 bp, Homo sapiens
gctaacacggtgaaa

SEQ ID NO: 254433 - DNA, 15 bp, Homo sapiens
ggctaacacggtgaa

SEQ ID NO: 254434 - DNA, 15 bp, Homo sapiens
tggctaacacggtga

SEQ ID NO: 254435 - DNA, 15 bp, Homo sapiens
ctggctaacacggtg

SEQ ID NO: 254436 - DNA, 15 bp, Homo sapiens
cctggctaacacggt

SEQ ID NO: 254437 - DNA, 15 bp, Homo sapiens
tcctggctaacacgg

SEQ ID NO: 254438 - DNA, 15 bp, Homo sapiens
atcctggctaacacg

SEQ ID NO: 254439 - DNA, 15 bp, Homo sapiens
aagaccatcctggct

SEQ ID NO: 254440 - DNA, 15 bp, Homo sapiens
caagaccatcctggc

SEQ ID NO: 254441 - DNA, 15 bp, Homo sapiens
aaggtcaggagatca

SEQ ID NO: 254442 - DNA, 15 bp, Homo sapiens
gggtggatcacaagg

SEQ ID NO: 254443 - DNA, 15 bp, Homo sapiens
cgggtggatcacaag

SEQ ID NO: 254444 - DNA, 15 bp, Homo sapiens
acgggtggatcacaa

SEQ ID NO: 254445 - DNA, 15 bp, Homo sapiens
gacgggtggatcaca

SEQ ID NO: 254446 - DNA, 15 bp, Homo sapiens
ctaatcccagcactt

SEQ ID NO: 254447 - DNA, 15 bp, Homo sapiens
tctaatcccagcact

SEQ ID NO: 254448 - DNA, 15 bp, Homo sapiens
ctctaatcccagcac

SEQ ID NO: 254449 - DNA, 15 bp, Homo sapiens
cctctaatcccagca

SEQ ID NO: 254450 - DNA, 15 bp, Homo sapiens
acctctaatcccagc

SEQ ID NO: 254451 - DNA, 15 bp, Homo sapiens
cacctctaatcccag

SEQ ID NO: 254452 - DNA, 15 bp, Homo sapiens
acacctctaatccca

SEQ ID NO: 254453 - DNA, 15 bp, Homo sapiens
cacacctctaatccc

SEQ ID NO: 254454 - DNA, 15 bp, Homo sapiens
tcacacctctaatcc

SEQ ID NO: 254455 - DNA, 15 bp, Homo sapiens
ctcacacctctaatc

SEQ ID NO: 254456 - DNA, 15 bp, Homo sapiens
gctcacacctctaat

SEQ ID NO: 254457 - DNA, 15 bp, Homo sapiens
ggctcacacctctaa

SEQ ID NO: 254458 - DNA, 15 bp, Homo sapiens
tggctcacacctcta

SEQ ID NO: 254459 - DNA, 15 bp, Homo sapiens
gtggctcacacctct

SEQ ID NO: 254460 - DNA, 15 bp, Homo sapiens
ggtggctcacacctc

SEQ ID NO: 254461 - DNA, 15 bp, Homo sapiens
tgtggtggctcacac

SEQ ID NO: 254462 - DNA, 15 bp, Homo sapiens
gtgtggtggctcaca

SEQ ID NO: 254463 - DNA, 15 bp, Homo sapiens
ggtgtggtggctcac

SEQ ID NO: 254464 - DNA, 15 bp, Homo sapiens
aggtgtggtggctca

SEQ ID NO: 254465 - DNA, 15 bp, Homo sapiens
caggtgtggtggctc

SEQ ID NO: 254466 - DNA, 15 bp, Homo sapiens
ccaggtgtggtggct

SEQ ID NO: 254467 - DNA, 15 bp, Homo sapiens
gccaggtgtggtggc

SEQ ID NO: 254468 - DNA, 15 bp, Homo sapiens
ggccaggtgtggtgg

SEQ ID NO: 254469 - DNA, 15 bp, Homo sapiens
aggccaggtgtggtg

SEQ ID NO: 254470 - DNA, 15 bp, Homo sapiens
taggccaggtgtggt

SEQ ID NO: 254471 - DNA, 15 bp, Homo sapiens
ctaggccaggtgtgg

SEQ ID NO: 254472 - DNA, 15 bp, Homo sapiens
gctaggccaggtgtg

SEQ ID NO: 254473 - DNA, 15 bp, Homo sapiens
ggctaggccaggtgt

SEQ ID NO: 254474 - DNA, 15 bp, Homo sapiens
aggctaggccaggtg

SEQ ID NO: 254475 - DNA, 15 bp, Homo sapiens
caggctaggccaggt

SEQ ID NO: 254476 - DNA, 15 bp, Homo sapiens
ccaggctaggccagg

SEQ ID NO: 254477 - DNA, 15 bp, Homo sapiens
gccaggctaggccag

SEQ ID NO: 254478 - DNA, 15 bp, Homo sapiens
agccaggctaggcca

SEQ ID NO: 254479 - DNA, 15 bp, Homo sapiens
tagccaggctaggcc

SEQ ID NO: 254480 - DNA, 15 bp, Homo sapiens
ttagccaggctaggc

SEQ ID NO: 254481 - DNA, 15 bp, Homo sapiens
attagccaggctagg

SEQ ID NO: 254482 - DNA, 15 bp, Homo sapiens
aattagccaggctag

SEQ ID NO: 254483 - DNA, 15 bp, Homo sapiens
aaattagccaggcta

SEQ ID NO: 254484 - DNA, 15 bp, Homo sapiens
aaaattagccaggct

SEQ ID NO: 254485 - DNA, 15 bp, Homo sapiens
caaaaatacaaaaat

SEQ ID NO: 254486 - DNA, 15 bp, Homo sapiens
ccaaaaatacaaaaa

SEQ ID NO: 254487 - DNA, 15 bp, Homo sapiens
accaaaaatacaaaa

SEQ ID NO: 254488 - DNA, 15 bp, Homo sapiens
taccaaaaatacaaa

SEQ ID NO: 254489 - DNA, 15 bp, Homo sapiens
ctaccaaaaatacaa

SEQ ID NO: 254490 - DNA, 15 bp, Homo sapiens
tctaccaaaaataca

SEQ ID NO: 254491 - DNA, 15 bp, Homo sapiens
ctctaccaaaaatac

SEQ ID NO: 254492 - DNA, 15 bp, Homo sapiens
tctctaccaaaaata

SEQ ID NO: 254493 - DNA, 15 bp, Homo sapiens
gtctctaccaaaaat

SEQ ID NO: 254494 - DNA, 15 bp, Homo sapiens
cgtctctaccaaaaa

SEQ ID NO: 254495 - DNA, 15 bp, Homo sapiens
ccgtctctaccaaaa

SEQ ID NO: 254496 - DNA, 15 bp, Homo sapiens
cccgtctctaccaaa

SEQ ID NO: 254497 - DNA, 15 bp, Homo sapiens
ccccgtctctaccaa

SEQ ID NO: 254498 - DNA, 15 bp, Homo sapiens
accccgtctctacca

SEQ ID NO: 254499 - DNA, 15 bp, Homo sapiens
aaccccgtctctacc

SEQ ID NO: 254500 - DNA, 15 bp, Homo sapiens
gaccaacatggtgaa

SEQ ID NO: 254501 - DNA, 15 bp, Homo sapiens
tgaccaacatggtga

SEQ ID NO: 254502 - DNA, 15 bp, Homo sapiens
ctgaccaacatggtg

SEQ ID NO: 254503 - DNA, 15 bp, Homo sapiens
cctgaccaacatggt

SEQ ID NO: 254504 - DNA, 15 bp, Homo sapiens
aagaccagcctgacc

SEQ ID NO: 254505 - DNA, 15 bp, Homo sapiens
caagaccagcctgac

SEQ ID NO: 254506 - DNA, 15 bp, Homo sapiens
aagttcaagaccagc

SEQ ID NO: 254507 - DNA, 15 bp, Homo sapiens
gaagttcaagaccag

SEQ ID NO: 254508 - DNA, 15 bp, Homo sapiens
agaagttcaagacca

SEQ ID NO: 254509 - DNA, 15 bp, Homo sapiens
cagaagttcaagacc

SEQ ID NO: 254510 - DNA, 15 bp, Homo sapiens
tcagaagttcaagac

SEQ ID NO: 254511 - DNA, 15 bp, Homo sapiens
gtcagaagttcaaga

SEQ ID NO: 254512 - DNA, 15 bp, Homo sapiens
ggtcagaagttcaag

SEQ ID NO: 254513 - DNA, 15 bp, Homo sapiens
aggtcagaagttcaa

SEQ ID NO: 254514 - DNA, 15 bp, Homo sapiens
gaggtcagaagttca

SEQ ID NO: 254515 - DNA, 15 bp, Homo sapiens
tgaggtcagaagttc

SEQ ID NO: 254516 - DNA, 15 bp, Homo sapiens
ctgaggtcagaagtt

SEQ ID NO: 254517 - DNA, 15 bp, Homo sapiens
cctgaggtcagaagt

SEQ ID NO: 254518 - DNA, 15 bp, Homo sapiens
acctgaggtcagaag

SEQ ID NO: 254519 - DNA, 15 bp, Homo sapiens
tacctgaggtcagaa

SEQ ID NO: 254520 - DNA, 15 bp, Homo sapiens
ttacctgaggtcaga

SEQ ID NO: 254521 - DNA, 15 bp, Homo sapiens
attacctgaggtcag

SEQ ID NO: 254522 - DNA, 15 bp, Homo sapiens
gattacctgaggtca

SEQ ID NO: 254523 - DNA, 15 bp, Homo sapiens
agattacctgaggtc

SEQ ID NO: 254524 - DNA, 15 bp, Homo sapiens
cagattacctgaggt

SEQ ID NO: 254525 - DNA, 15 bp, Homo sapiens
gcagattacctgagg

SEQ ID NO: 254526 - DNA, 15 bp, Homo sapiens
ggcagattacctgag

SEQ ID NO: 254527 - DNA, 15 bp, Homo sapiens
aggcagattacctga

SEQ ID NO: 254528 - DNA, 15 bp, Homo sapiens
caggcagattacctg

SEQ ID NO: 254529 - DNA, 15 bp, Homo sapiens
gcaggcagattacct

SEQ ID NO: 254530 - DNA, 15 bp, Homo sapiens
ggcaggcagattacc

SEQ ID NO: 254531 - DNA, 15 bp, Homo sapiens
actgaggcaggcaga

SEQ ID NO: 254532 - DNA, 15 bp, Homo sapiens
gactgaggcaggcag

SEQ ID NO: 254533 - DNA, 15 bp, Homo sapiens
agactgaggcaggca

SEQ ID NO: 254534 - DNA, 15 bp, Homo sapiens
gagactgaggcaggc

SEQ ID NO: 254535 - DNA, 15 bp, Homo sapiens
tgggagactgaggca

SEQ ID NO: 254536 - DNA, 15 bp, Homo sapiens
ttgggagactgaggc

SEQ ID NO: 254537 - DNA, 15 bp, Homo sapiens
tttgggagactgagg

SEQ ID NO: 254538 - DNA, 15 bp, Homo sapiens
ctttgggagactgag

SEQ ID NO: 254539 - DNA, 15 bp, Homo sapiens
gaggccaggcgcggt

SEQ ID NO: 254540 - DNA, 15 bp, Homo sapiens
tgaggccaggcgcgg

SEQ ID NO: 254541 - DNA, 15 bp, Homo sapiens
gtgaggccaggcgcg

SEQ ID NO: 254542 - DNA, 15 bp, Homo sapiens
agtgaggccaggcgc

SEQ ID NO: 254543 - DNA, 15 bp, Homo sapiens
aagtgaggccaggcg

SEQ ID NO: 254544 - DNA, 15 bp, Homo sapiens
gaagtgaggccaggc

SEQ ID NO: 254545 - DNA, 15 bp, Homo sapiens
ggaagtgaggccagg

SEQ ID NO: 254546 - DNA, 15 bp, Homo sapiens
aggaagtgaggccag

SEQ ID NO: 254547 - DNA, 15 bp, Homo sapiens
aaggaagtgaggcca

SEQ ID NO: 254548 - DNA, 15 bp, Homo sapiens
gaaggaagtgaggcc

SEQ ID NO: 254549 - DNA, 15 bp, Homo sapiens
agaaggaagtgaggc

SEQ ID NO: 254550 - DNA, 15 bp, Homo sapiens
cagaaggaagtgagg

SEQ ID NO: 254551 - DNA, 15 bp, Homo sapiens
acagaaggaagtgag

SEQ ID NO: 254552 - DNA, 15 bp, Homo sapiens
gacagaaggaagtga

SEQ ID NO: 254553 - DNA, 15 bp, Homo sapiens
tgacagaaggaagtg

SEQ ID NO: 254554 - DNA, 15 bp, Homo sapiens
atgacagaaggaagt

SEQ ID NO: 254555 - DNA, 15 bp, Homo sapiens
gatgacagaaggaag

SEQ ID NO: 254556 - DNA, 15 bp, Homo sapiens
agatgacagaaggaa

SEQ ID NO: 254557 - DNA, 15 bp, Homo sapiens
cagatgacagaagga

SEQ ID NO: 254558 - DNA, 15 bp, Homo sapiens
acagatgacagaagg

SEQ ID NO: 254559 - DNA, 15 bp, Homo sapiens
aacagatgacagaag

SEQ ID NO: 254560 - DNA, 15 bp, Homo sapiens
aaacagatgacagaa

SEQ ID NO: 254561 - DNA, 15 bp, Homo sapiens
caaacagatgacaga

SEQ ID NO: 254562 - DNA, 15 bp, Homo sapiens
acaaacagatgacag

SEQ ID NO: 254563 - DNA, 15 bp, Homo sapiens
cacaaacagatgaca

SEQ ID NO: 254564 - DNA, 15 bp, Homo sapiens
ccacaaacagatgac

SEQ ID NO: 254565 - DNA, 15 bp, Homo sapiens
tccacaaacagatga

SEQ ID NO: 254566 - DNA, 15 bp, Homo sapiens
atccacaaacagatg

SEQ ID NO: 254567 - DNA, 15 bp, Homo sapiens
aatccacaaacagat

SEQ ID NO: 254568 - DNA, 15 bp, Homo sapiens
caatccacaaacaga

SEQ ID NO: 254569 - DNA, 15 bp, Homo sapiens
ccaatccacaaacag

SEQ ID NO: 254570 - DNA, 15 bp, Homo sapiens
tccaatccacaaaca

SEQ ID NO: 254571 - DNA, 15 bp, Homo sapiens
gtccaatccacaaac

SEQ ID NO: 254572 - DNA, 15 bp, Homo sapiens
agtccaatccacaaa

SEQ ID NO: 254573 - DNA, 15 bp, Homo sapiens
gagtccaatccacaa

SEQ ID NO: 254574 - DNA, 15 bp, Homo sapiens
ggagtccaatccaca

SEQ ID NO: 254575 - DNA, 15 bp, Homo sapiens
gggagtccaatccac

SEQ ID NO: 254576 - DNA, 15 bp, Homo sapiens
ggggagtccaatcca

SEQ ID NO: 254577 - DNA, 15 bp, Homo sapiens
tggggagtccaatcc

SEQ ID NO: 254578 - DNA, 15 bp, Homo sapiens
ctggggagtccaatc

SEQ ID NO: 254579 - DNA, 15 bp, Homo sapiens
cctggggagtccaat

SEQ ID NO: 254580 - DNA, 15 bp, Homo sapiens
tcctggggagtccaa

SEQ ID NO: 254581 - DNA, 15 bp, Homo sapiens
ctcctggggagtcca

SEQ ID NO: 254582 - DNA, 15 bp, Homo sapiens
tctcctggggagtcc

SEQ ID NO: 254583 - DNA, 15 bp, Homo sapiens
ttctcctggggagtc

SEQ ID NO: 254584 - DNA, 15 bp, Homo sapiens
cttctcctggggagt

SEQ ID NO: 254585 - DNA, 15 bp, Homo sapiens
ccttctcctggggag

SEQ ID NO: 254586 - DNA, 15 bp, Homo sapiens
tccttctcctgggga

SEQ ID NO: 254587 - DNA, 15 bp, Homo sapiens
gtccttctcctgggg

SEQ ID NO: 254588 - DNA, 15 bp, Homo sapiens
ggtccttctcctggg

SEQ ID NO: 254589 - DNA, 15 bp, Homo sapiens
gggtccttctcctgg

SEQ ID NO: 254590 - DNA, 15 bp, Homo sapiens
tgggtccttctcctg

SEQ ID NO: 254591 - DNA, 15 bp, Homo sapiens
ctgggtccttctcct

SEQ ID NO: 254592 - DNA, 15 bp, Homo sapiens
tctgggtccttctcc

SEQ ID NO: 254593 - DNA, 15 bp, Homo sapiens
ttctgggtccttctc

SEQ ID NO: 254594 - DNA, 15 bp, Homo sapiens
cttctgggtccttct

SEQ ID NO: 254595 - DNA, 15 bp, Homo sapiens
ccttctgggtccttc

SEQ ID NO: 254596 - DNA, 15 bp, Homo sapiens
cccttctgggtcctt

SEQ ID NO: 254597 - DNA, 15 bp, Homo sapiens
ccccttctgggtcct

SEQ ID NO: 254598 - DNA, 15 bp, Homo sapiens
tccccttctgggtcc

SEQ ID NO: 254599 - DNA, 15 bp, Homo sapiens
ttccccttctgggtc

SEQ ID NO: 254600 - DNA, 15 bp, Homo sapiens
cttccccttctgggt

SEQ ID NO: 254601 - DNA, 15 bp, Homo sapiens
tcttccccttctggg

SEQ ID NO: 254602 - DNA, 15 bp, Homo sapiens
gtcttccccttctgg

SEQ ID NO: 254603 - DNA, 15 bp, Homo sapiens
agtcttccccttctg

SEQ ID NO: 254604 - DNA, 15 bp, Homo sapiens
gagtcttccccttct

SEQ ID NO: 254605 - DNA, 15 bp, Homo sapiens
ggagtcttccccttc

SEQ ID NO: 254606 - DNA, 15 bp, Homo sapiens
gggagtcttcccctt

SEQ ID NO: 254607 - DNA, 15 bp, Homo sapiens
tgggagtcttcccct

SEQ ID NO: 254608 - DNA, 15 bp, Homo sapiens
ctgggagtcttcccc

SEQ ID NO: 254609 - DNA, 15 bp, Homo sapiens
tctgggagtcttccc

SEQ ID NO: 254610 - DNA, 15 bp, Homo sapiens
ttctgggagtcttcc

SEQ ID NO: 254611 - DNA, 15 bp, Homo sapiens
gttctgggagtcttc

SEQ ID NO: 254612 - DNA, 15 bp, Homo sapiens
agttctgggagtctt

SEQ ID NO: 254613 - DNA, 15 bp, Homo sapiens
gagttctgggagtct

SEQ ID NO: 254614 - DNA, 15 bp, Homo sapiens
ggagttctgggagtc

SEQ ID NO: 254615 - DNA, 15 bp, Homo sapiens
cggagttctgggagt

SEQ ID NO: 254616 - DNA, 15 bp, Homo sapiens
ccggagttctgggag

SEQ ID NO: 254617 - DNA, 15 bp, Homo sapiens
cccggagttctggga

SEQ ID NO: 254618 - DNA, 15 bp, Homo sapiens
gcccggagttctggg

SEQ ID NO: 254619 - DNA, 15 bp, Homo sapiens
tgcccggagttctgg

SEQ ID NO: 254620 - DNA, 15 bp, Homo sapiens
ttgcccggagttctg

SEQ ID NO: 254621 - DNA, 15 bp, Homo sapiens
cttgcccggagttct

SEQ ID NO: 254622 - DNA, 15 bp, Homo sapiens
tcttgcccggagttc

SEQ ID NO: 254623 - DNA, 15 bp, Homo sapiens
atcttgcccggagtt

SEQ ID NO: 254624 - DNA, 15 bp, Homo sapiens
catcttgcccggagt

SEQ ID NO: 254625 - DNA, 15 bp, Homo sapiens
gcatcttgcccggag

SEQ ID NO: 254626 - DNA, 15 bp, Homo sapiens
tgcatcttgcccgga

SEQ ID NO: 254627 - DNA, 15 bp, Homo sapiens
ttgcatcttgcccgg

SEQ ID NO: 254628 - DNA, 15 bp, Homo sapiens
attgcatcttgcccg

SEQ ID NO: 254629 - DNA, 15 bp, Homo sapiens
gattgcatcttgccc

SEQ ID NO: 254630 - DNA, 15 bp, Homo sapiens
agattgcatcttgcc

SEQ ID NO: 254631 - DNA, 15 bp, Homo sapiens
gagattgcatcttgc

SEQ ID NO: 254632 - DNA, 15 bp, Homo sapiens
ggagattgcatcttg

SEQ ID NO: 254633 - DNA, 15 bp, Homo sapiens
cggagattgcatctt

SEQ ID NO: 254634 - DNA, 15 bp, Homo sapiens
acggagattgcatct

SEQ ID NO: 254635 - DNA, 15 bp, Homo sapiens
cacggagattgcatc

SEQ ID NO: 254636 - DNA, 15 bp, Homo sapiens
ccacggagattgcat

SEQ ID NO: 254637 - DNA, 15 bp, Homo sapiens
cccacggagattgca

SEQ ID NO: 254638 - DNA, 15 bp, Homo sapiens
gcccacggagattgc

SEQ ID NO: 254639 - DNA, 15 bp, Homo sapiens
agcccacggagattg

SEQ ID NO: 254640 - DNA, 15 bp, Homo sapiens
cagcccacggagatt

SEQ ID NO: 254641 - DNA, 15 bp, Homo sapiens
gcagcccacggagat

SEQ ID NO: 254642 - DNA, 15 bp, Homo sapiens
ggcagcccacggaga

SEQ ID NO: 254643 - DNA, 15 bp, Homo sapiens
tggcagcccacggag

SEQ ID NO: 254644 - DNA, 15 bp, Homo sapiens
gtggcagcccacgga

SEQ ID NO: 254645 - DNA, 15 bp, Homo sapiens
tgtggcagcccacgg

SEQ ID NO: 254646 - DNA, 15 bp, Homo sapiens
ctgtggcagcccacg

SEQ ID NO: 254647 - DNA, 15 bp, Homo sapiens
actgtggcagcccac

SEQ ID NO: 254648 - DNA, 15 bp, Homo sapiens
cactgtggcagccca

SEQ ID NO: 254649 - DNA, 15 bp, Homo sapiens
gcactgtggcagccc

SEQ ID NO: 254650 - DNA, 15 bp, Homo sapiens
ggcactgtggcagcc

SEQ ID NO: 254651 - DNA, 15 bp, Homo sapiens
aggcactgtggcagc

SEQ ID NO: 254652 - DNA, 15 bp, Homo sapiens
caggcactgtggcag

SEQ ID NO: 254653 - DNA, 15 bp, Homo sapiens
ccaggcactgtggca

SEQ ID NO: 254654 - DNA, 15 bp, Homo sapiens
gccaggcactgtggc

SEQ ID NO: 254655 - DNA, 15 bp, Homo sapiens
tgccaggcactgtgg

SEQ ID NO: 254656 - DNA, 15 bp, Homo sapiens
ctgccaggcactgtg

SEQ ID NO: 254657 - DNA, 15 bp, Homo sapiens
cctgccaggcactgt

SEQ ID NO: 254658 - DNA, 15 bp, Homo sapiens
acctgccaggcactg

SEQ ID NO: 254659 - DNA, 15 bp, Homo sapiens
cacctgccaggcact

SEQ ID NO: 254660 - DNA, 15 bp, Homo sapiens
gcacctgccaggcac

SEQ ID NO: 254661 - DNA, 15 bp, Homo sapiens
agcacctgccaggca

SEQ ID NO: 254662 - DNA, 15 bp, Homo sapiens
cagcacctgccaggc

SEQ ID NO: 254663 - DNA, 15 bp, Homo sapiens
acagcacctgccagg

SEQ ID NO: 254664 - DNA, 15 bp, Homo sapiens
cacagcacctgccag

SEQ ID NO: 254665 - DNA, 15 bp, Homo sapiens
tcacagcacctgcca

SEQ ID NO: 254666 - DNA, 15 bp, Homo sapiens
atcacagcacctgcc

SEQ ID NO: 254667 - DNA, 15 bp, Homo sapiens
catcacagcacctgc

SEQ ID NO: 254668 - DNA, 15 bp, Homo sapiens
ccatcacagcacctg

SEQ ID NO: 254669 - DNA, 15 bp, Homo sapiens
gccatcacagcacct

SEQ ID NO: 254670 - DNA, 15 bp, Homo sapiens
agccatcacagcacc

SEQ ID NO: 254671 - DNA, 15 bp, Homo sapiens
cagccatcacagcac

SEQ ID NO: 254672 - DNA, 15 bp, Homo sapiens
tcagccatcacagca

SEQ ID NO: 254673 - DNA, 15 bp, Homo sapiens
ctcagccatcacagc

SEQ ID NO: 254674 - DNA, 15 bp, Homo sapiens
gctcagccatcacag

SEQ ID NO: 254675 - DNA, 15 bp, Homo sapiens
agctcagccatcaca

SEQ ID NO: 254676 - DNA, 15 bp, Homo sapiens
cagctcagccatcac

SEQ ID NO: 254677 - DNA, 15 bp, Homo sapiens
ccagctcagccatca

SEQ ID NO: 254678 - DNA, 15 bp, Homo sapiens
accagctcagccatc

SEQ ID NO: 254679 - DNA, 15 bp, Homo sapiens
caccagctcagccat

SEQ ID NO: 254680 - DNA, 15 bp, Homo sapiens
tcaccagctcagcca

SEQ ID NO: 254681 - DNA, 15 bp, Homo sapiens
atcaccagctcagcc

SEQ ID NO: 254682 - DNA, 15 bp, Homo sapiens
aatcaccagctcagc

SEQ ID NO: 254683 - DNA, 15 bp, Homo sapiens
caatcaccagctcag

SEQ ID NO: 254684 - DNA, 15 bp, Homo sapiens
acaatcaccagctca

SEQ ID NO: 254685 - DNA, 15 bp, Homo sapiens
cacaatcaccagctc

SEQ ID NO: 254686 - DNA, 15 bp, Homo sapiens
acacaatcaccagct

SEQ ID NO: 254687 - DNA, 15 bp, Homo sapiens
aacacaatcaccagc

SEQ ID NO: 254688 - DNA, 15 bp, Homo sapiens
gaacacaatcaccag

SEQ ID NO: 254689 - DNA, 15 bp, Homo sapiens
agaacacaatcacca

SEQ ID NO: 254690 - DNA, 15 bp, Homo sapiens
gagaacacaatcacc

SEQ ID NO: 254691 - DNA, 15 bp, Homo sapiens
agagaacacaatcac

SEQ ID NO: 254692 - DNA, 15 bp, Homo sapiens
cagagaacacaatca

SEQ ID NO: 254693 - DNA, 15 bp, Homo sapiens
gcagagaacacaatc

SEQ ID NO: 254694 - DNA, 15 bp, Homo sapiens
agcagagaacacaat

SEQ ID NO: 254695 - DNA, 15 bp, Homo sapiens
cagcagagaacacaa

SEQ ID NO: 254696 - DNA, 15 bp, Homo sapiens
acagcagagaacaca

SEQ ID NO: 254697 - DNA, 15 bp, Homo sapiens
gacagcagagaacac

SEQ ID NO: 254698 - DNA, 15 bp, Homo sapiens
cgacagcagagaaca

SEQ ID NO: 254699 - DNA, 15 bp, Homo sapiens
gcgacagcagagaac

SEQ ID NO: 254700 - DNA, 15 bp, Homo sapiens
agcgacagcagagaa

SEQ ID NO: 254701 - DNA, 15 bp, Homo sapiens
aagcgacagcagaga

SEQ ID NO: 254702 - DNA, 15 bp, Homo sapiens
gaagcgacagcagag

SEQ ID NO: 254703 - DNA, 15 bp, Homo sapiens
agaagcgacagcaga

SEQ ID NO: 254704 - DNA, 15 bp, Homo sapiens
gagaagcgacagcag

SEQ ID NO: 254705 - DNA, 15 bp, Homo sapiens
agagaagcgacagca

SEQ ID NO: 254706 - DNA, 15 bp, Homo sapiens
cagagaagcgacagc

SEQ ID NO: 254707 - DNA, 15 bp, Homo sapiens
tcagagaagcgacag

SEQ ID NO: 254708 - DNA, 15 bp, Homo sapiens
ctcagagaagcgaca

SEQ ID NO: 254709 - DNA, 15 bp, Homo sapiens
actcagagaagcgac

SEQ ID NO: 254710 - DNA, 15 bp, Homo sapiens
aactcagagaagcga

SEQ ID NO: 254711 - DNA, 15 bp, Homo sapiens
caactcagagaagcg

SEQ ID NO: 254712 - DNA, 15 bp, Homo sapiens
ccaactcagagaagc

SEQ ID NO: 254713 - DNA, 15 bp, Homo sapiens
tccaactcagagaag

SEQ ID NO: 254714 - DNA, 15 bp, Homo sapiens
ctccaactcagagaa

SEQ ID NO: 254715 - DNA, 15 bp, Homo sapiens
tctccaactcagaga

SEQ ID NO: 254716 - DNA, 15 bp, Homo sapiens
atctccaactcagag

SEQ ID NO: 254717 - DNA, 15 bp, Homo sapiens
aatctccaactcaga

SEQ ID NO: 254718 - DNA, 15 bp, Homo sapiens
aaatctccaactcag

SEQ ID NO: 254719 - DNA, 15 bp, Homo sapiens
aaaatctccaactca

SEQ ID NO: 254720 - DNA, 15 bp, Homo sapiens
caaaatctccaactc

SEQ ID NO: 254721 - DNA, 15 bp, Homo sapiens
acaaaatctccaact

SEQ ID NO: 254722 - DNA, 15 bp, Homo sapiens
gacaaaatctccaac

SEQ ID NO: 254723 - DNA, 15 bp, Homo sapiens
tgacaaaatctccaa

SEQ ID NO: 254724 - DNA, 15 bp, Homo sapiens
ttgacaaaatctcca

SEQ ID NO: 254725 - DNA, 15 bp, Homo sapiens
cttgacaaaatctcc

SEQ ID NO: 254726 - DNA, 15 bp, Homo sapiens
acttgacaaaatctc

SEQ ID NO: 254727 - DNA, 15 bp, Homo sapiens
gacttgacaaaatct

SEQ ID NO: 254728 - DNA, 15 bp, Homo sapiens
ggacttgacaaaatc

SEQ ID NO: 254729 - DNA, 15 bp, Homo sapiens
gggacttgacaaaat

SEQ ID NO: 254730 - DNA, 15 bp, Homo sapiens
ggggacttgacaaaa

SEQ ID NO: 254731 - DNA, 15 bp, Homo sapiens
aggggacttgacaaa

SEQ ID NO: 254732 - DNA, 15 bp, Homo sapiens
caggggacttgacaa

SEQ ID NO: 254733 - DNA, 15 bp, Homo sapiens
gcaggggacttgaca

SEQ ID NO: 254734 - DNA, 15 bp, Homo sapiens
agcaggggacttgac

SEQ ID NO: 254735 - DNA, 15 bp, Homo sapiens
gagcaggggacttga

SEQ ID NO: 254736 - DNA, 15 bp, Homo sapiens
tgagcaggggacttg

SEQ ID NO: 254737 - DNA, 15 bp, Homo sapiens
atgagcaggggactt

SEQ ID NO: 254738 - DNA, 15 bp, Homo sapiens
gatgagcaggggact

SEQ ID NO: 254739 - DNA, 15 bp, Homo sapiens
ggatgagcaggggac

SEQ ID NO: 254740 - DNA, 15 bp, Homo sapiens
tggatgagcagggga

SEQ ID NO: 254741 - DNA, 15 bp, Homo sapiens
atggatgagcagggg

SEQ ID NO: 254742 - DNA, 15 bp, Homo sapiens
aatggatgagcaggg

SEQ ID NO: 254743 - DNA, 15 bp, Homo sapiens
gaatggatgagcagg

SEQ ID NO: 254744 - DNA, 15 bp, Homo sapiens
tgaatggatgagcag

SEQ ID NO: 254745 - DNA, 15 bp, Homo sapiens
atgaatggatgagca

SEQ ID NO: 254746 - DNA, 15 bp, Homo sapiens
tatgaatggatgagc

SEQ ID NO: 254747 - DNA, 15 bp, Homo sapiens
gtatgaatggatgag

SEQ ID NO: 254748 - DNA, 15 bp, Homo sapiens
tgtatgaatggatga

SEQ ID NO: 254749 - DNA, 15 bp, Homo sapiens
gtgtatgaatggatg

SEQ ID NO: 254750 - DNA, 15 bp, Homo sapiens
agtgtatgaatggat

SEQ ID NO: 254751 - DNA, 15 bp, Homo sapiens
gagtgtatgaatgga

SEQ ID NO: 254752 - DNA, 15 bp, Homo sapiens
cgagtgtatgaatgg

SEQ ID NO: 254753 - DNA, 15 bp, Homo sapiens
tcgagtgtatgaatg

SEQ ID NO: 254754 - DNA, 15 bp, Homo sapiens
gtcgagtgtatgaat

SEQ ID NO: 254755 - DNA, 15 bp, Homo sapiens
tgtcgagtgtatgaa

SEQ ID NO: 254756 - DNA, 15 bp, Homo sapiens
ttgtcgagtgtatga

SEQ ID NO: 254757 - DNA, 15 bp, Homo sapiens
tttgtcgagtgtatg

SEQ ID NO: 254758 - DNA, 15 bp, Homo sapiens
atttgtcgagtgtat

SEQ ID NO: 254759 - DNA, 15 bp, Homo sapiens
tatttgtcgagtgta

SEQ ID NO: 254760 - DNA, 15 bp, Homo sapiens
atatttgtcgagtgt

SEQ ID NO: 254761 - DNA, 15 bp, Homo sapiens
gatatttgtcgagtg

SEQ ID NO: 254762 - DNA, 15 bp, Homo sapiens
agatatttgtcgagt

SEQ ID NO: 254763 - DNA, 15 bp, Homo sapiens
cagatatttgtcgag

SEQ ID NO: 254764 - DNA, 15 bp, Homo sapiens
acagatatttgtcga

SEQ ID NO: 254765 - DNA, 15 bp, Homo sapiens
aacagatatttgtcg

SEQ ID NO: 254766 - DNA, 15 bp, Homo sapiens
caacagatatttgtc

SEQ ID NO: 254767 - DNA, 15 bp, Homo sapiens
tcaacagatatttgt

SEQ ID NO: 254768 - DNA, 15 bp, Homo sapiens
ctcaacagatatttg

SEQ ID NO: 254769 - DNA, 15 bp, Homo sapiens
actcaacagatattt

SEQ ID NO: 254770 - DNA, 15 bp, Homo sapiens
cactcaacagatatt

SEQ ID NO: 254771 - DNA, 15 bp, Homo sapiens
gcactcaacagatat

SEQ ID NO: 254772 - DNA, 15 bp, Homo sapiens
agcactcaacagata

SEQ ID NO: 254773 - DNA, 15 bp, Homo sapiens
tagcactcaacagat

SEQ ID NO: 254774 - DNA, 15 bp, Homo sapiens
ttagcactcaacaga

SEQ ID NO: 254775 - DNA, 15 bp, Homo sapiens
cttagcactcaacag

SEQ ID NO: 254776 - DNA, 15 bp, Homo sapiens
acttagcactcaaca

SEQ ID NO: 254777 - DNA, 15 bp, Homo sapiens
cacttagcactcaac

SEQ ID NO: 254778 - DNA, 15 bp, Homo sapiens
gcacttagcactcaa

SEQ ID NO: 254779 - DNA, 15 bp, Homo sapiens
cgcacttagcactca

SEQ ID NO: 254780 - DNA, 15 bp, Homo sapiens
tcgcacttagcactc

SEQ ID NO: 254781 - DNA, 15 bp, Homo sapiens
ttcgcacttagcact

SEQ ID NO: 254782 - DNA, 15 bp, Homo sapiens
gttcgcacttagcac

SEQ ID NO: 254783 - DNA, 15 bp, Homo sapiens
ggttcgcacttagca

SEQ ID NO: 254784 - DNA, 15 bp, Homo sapiens
tggttcgcacttagc

SEQ ID NO: 254785 - DNA, 15 bp, Homo sapiens
atggttcgcacttag

SEQ ID NO: 254786 - DNA, 15 bp, Homo sapiens
catggttcgcactta

SEQ ID NO: 254787 - DNA, 15 bp, Homo sapiens
gcatggttcgcactt

SEQ ID NO: 254788 - DNA, 15 bp, Homo sapiens
agcatggttcgcact

SEQ ID NO: 254789 - DNA, 15 bp, Homo sapiens
gagcatggttcgcac

SEQ ID NO: 254790 - DNA, 15 bp, Homo sapiens
agagcatggttcgca

SEQ ID NO: 254791 - DNA, 15 bp, Homo sapiens
cagagcatggttcgc

SEQ ID NO: 254792 - DNA, 15 bp, Homo sapiens
gcagagcatggttcg

SEQ ID NO: 254793 - DNA, 15 bp, Homo sapiens
ggcagagcatggttc

SEQ ID NO: 254794 - DNA, 15 bp, Homo sapiens
cggcagagcatggtt

SEQ ID NO: 254795 - DNA, 15 bp, Homo sapiens
acggcagagcatggt

SEQ ID NO: 254796 - DNA, 15 bp, Homo sapiens
tacggcagagcatgg

SEQ ID NO: 254797 - DNA, 15 bp, Homo sapiens
ctacggcagagcatg

SEQ ID NO: 254798 - DNA, 15 bp, Homo sapiens
cctacggcagagcat

SEQ ID NO: 254799 - DNA, 15 bp, Homo sapiens
gcctacggcagagca

SEQ ID NO: 254800 - DNA, 15 bp, Homo sapiens
agcctacggcagagc

SEQ ID NO: 254801 - DNA, 15 bp, Homo sapiens
aagcctacggcagag

SEQ ID NO: 254802 - DNA, 15 bp, Homo sapiens
caagcctacggcaga

SEQ ID NO: 254803 - DNA, 15 bp, Homo sapiens
acaagcctacggcag

SEQ ID NO: 254804 - DNA, 15 bp, Homo sapiens
cacaagcctacggca

SEQ ID NO: 254805 - DNA, 15 bp, Homo sapiens
ccacaagcctacggc

SEQ ID NO: 254806 - DNA, 15 bp, Homo sapiens
cccacaagcctacgg

SEQ ID NO: 254807 - DNA, 15 bp, Homo sapiens
tcccacaagcctacg

SEQ ID NO: 254808 - DNA, 15 bp, Homo sapiens
gtcccacaagcctac

SEQ ID NO: 254809 - DNA, 15 bp, Homo sapiens
tgtcccacaagccta

SEQ ID NO: 254810 - DNA, 15 bp, Homo sapiens
gtgtcccacaagcct

SEQ ID NO: 254811 - DNA, 15 bp, Homo sapiens
agtgtcccacaagcc

SEQ ID NO: 254812 - DNA, 15 bp, Homo sapiens
tagtgtcccacaagc

SEQ ID NO: 254813 - DNA, 15 bp, Homo sapiens
gtagtgtcccacaag

SEQ ID NO: 254814 - DNA, 15 bp, Homo sapiens
tgtagtgtcccacaa

SEQ ID NO: 254815 - DNA, 15 bp, Homo sapiens
ctgtagtgtcccaca

SEQ ID NO: 254816 - DNA, 15 bp, Homo sapiens
cctgtagtgtcccac

SEQ ID NO: 254817 - DNA, 15 bp, Homo sapiens
ccctgtagtgtccca

SEQ ID NO: 254818 - DNA, 15 bp, Homo sapiens
cccctgtagtgtccc

SEQ ID NO: 254819 - DNA, 15 bp, Homo sapiens
tcccctgtagtgtcc

SEQ ID NO: 254820 - DNA, 15 bp, Homo sapiens
atcccctgtagtgtc

SEQ ID NO: 254821 - DNA, 15 bp, Homo sapiens
tatcccctgtagtgt

SEQ ID NO: 254822 - DNA, 15 bp, Homo sapiens
atatcccctgtagtg

SEQ ID NO: 254823 - DNA, 15 bp, Homo sapiens
tatatcccctgtagt

SEQ ID NO: 254824 - DNA, 15 bp, Homo sapiens
ttatatcccctgtag

SEQ ID NO: 254825 - DNA, 15 bp, Homo sapiens
cttatatcccctgta

SEQ ID NO: 254826 - DNA, 15 bp, Homo sapiens
tcttatatcccctgt

SEQ ID NO: 254827 - DNA, 15 bp, Homo sapiens
ttcttatatcccctg

SEQ ID NO: 254828 - DNA, 15 bp, Homo sapiens
tttcttatatcccct

SEQ ID NO: 254829 - DNA, 15 bp, Homo sapiens
atttcttatatcccc

SEQ ID NO: 254830 - DNA, 15 bp, Homo sapiens
catttcttatatccc

SEQ ID NO: 254831 - DNA, 15 bp, Homo sapiens
tcatttcttatatcc

SEQ ID NO: 254832 - DNA, 15 bp, Homo sapiens
ttcatttcttatatc

SEQ ID NO: 254833 - DNA, 15 bp, Homo sapiens
tttcatttcttatat

SEQ ID NO: 254834 - DNA, 15 bp, Homo sapiens
ctttcatttcttata

SEQ ID NO: 254835 - DNA, 15 bp, Homo sapiens
gctttcatttcttat

SEQ ID NO: 254836 - DNA, 15 bp, Homo sapiens
ggctttcatttctta

SEQ ID NO: 254837 - DNA, 15 bp, Homo sapiens
cggctttcatttctt

SEQ ID NO: 254838 - DNA, 15 bp, Homo sapiens
ccggctttcatttct

SEQ ID NO: 254839 - DNA, 15 bp, Homo sapiens
cccggctttcatttc

SEQ ID NO: 254840 - DNA, 15 bp, Homo sapiens
acccggctttcattt

SEQ ID NO: 254841 - DNA, 15 bp, Homo sapiens
cacccggctttcatt

SEQ ID NO: 254842 - DNA, 15 bp, Homo sapiens
acacccggctttcat

SEQ ID NO: 254843 - DNA, 15 bp, Homo sapiens
cacacccggctttca

SEQ ID NO: 254844 - DNA, 15 bp, Homo sapiens
ccacacccggctttc

SEQ ID NO: 254845 - DNA, 15 bp, Homo sapiens
accacacccggcttt

SEQ ID NO: 254846 - DNA, 15 bp, Homo sapiens
caccacacccggctt

SEQ ID NO: 254847 - DNA, 15 bp, Homo sapiens
agccaccacacccgg

SEQ ID NO: 254848 - DNA, 15 bp, Homo sapiens
gagccaccacacccg

SEQ ID NO: 254849 - DNA, 15 bp, Homo sapiens
tgagccaccacaccc

SEQ ID NO: 254850 - DNA, 15 bp, Homo sapiens
gtgagccaccacacc

SEQ ID NO: 254851 - DNA, 15 bp, Homo sapiens
tgtgagccaccacac

SEQ ID NO: 254852 - DNA, 15 bp, Homo sapiens
gtgtgagccaccaca

SEQ ID NO: 254853 - DNA, 15 bp, Homo sapiens
aggattacaggtgtg

SEQ ID NO: 254854 - DNA, 15 bp, Homo sapiens
taggattacaggtgt

SEQ ID NO: 254855 - DNA, 15 bp, Homo sapiens
ctaggattacaggtg

SEQ ID NO: 254856 - DNA, 15 bp, Homo sapiens
gctaggattacaggt

SEQ ID NO: 254857 - DNA, 15 bp, Homo sapiens
ctgctaggattacag

SEQ ID NO: 254858 - DNA, 15 bp, Homo sapiens
actgctaggattaca

SEQ ID NO: 254859 - DNA, 15 bp, Homo sapiens
aactgctaggattac

SEQ ID NO: 254860 - DNA, 15 bp, Homo sapiens
aaactgctaggatta

SEQ ID NO: 254861 - DNA, 15 bp, Homo sapiens
caaactgctaggatt

SEQ ID NO: 254862 - DNA, 15 bp, Homo sapiens
ccaaactgctaggat

SEQ ID NO: 254863 - DNA, 15 bp, Homo sapiens
cccaaactgctagga

SEQ ID NO: 254864 - DNA, 15 bp, Homo sapiens
tcccaaactgctagg

SEQ ID NO: 254865 - DNA, 15 bp, Homo sapiens
ctcccaaactgctag

SEQ ID NO: 254866 - DNA, 15 bp, Homo sapiens
cctcccaaactgcta

SEQ ID NO: 254867 - DNA, 15 bp, Homo sapiens
gcctcccaaactgct

SEQ ID NO: 254868 - DNA, 15 bp, Homo sapiens
ggcctcccaaactgc

SEQ ID NO: 254869 - DNA, 15 bp, Homo sapiens
cggcctcccaaactg

SEQ ID NO: 254870 - DNA, 15 bp, Homo sapiens
tcggcctcccaaact

SEQ ID NO: 254871 - DNA, 15 bp, Homo sapiens
ctcggcctcccaaac

SEQ ID NO: 254872 - DNA, 15 bp, Homo sapiens
tgcccgcctcggcct

SEQ ID NO: 254873 - DNA, 15 bp, Homo sapiens
ctgcccgcctcggcc

SEQ ID NO: 254874 - DNA, 15 bp, Homo sapiens
atgatctgcccgcct

SEQ ID NO: 254875 - DNA, 15 bp, Homo sapiens
catgatctgcccgcc

SEQ ID NO: 254876 - DNA, 15 bp, Homo sapiens
tcatgatctgcccgc

SEQ ID NO: 254877 - DNA, 15 bp, Homo sapiens
ctcatgatctgcccg

SEQ ID NO: 254878 - DNA, 15 bp, Homo sapiens
cctcatgatctgccc

SEQ ID NO: 254879 - DNA, 15 bp, Homo sapiens
acctcatgatctgcc

SEQ ID NO: 254880 - DNA, 15 bp, Homo sapiens
gacctcatgatctgc

SEQ ID NO: 254881 - DNA, 15 bp, Homo sapiens
tgacctcatgatctg

SEQ ID NO: 254882 - DNA, 15 bp, Homo sapiens
ctgacctcatgatct

SEQ ID NO: 254883 - DNA, 15 bp, Homo sapiens
taggatggtctcgat

SEQ ID NO: 254884 - DNA, 15 bp, Homo sapiens
ctaggatggtctcga

SEQ ID NO: 254885 - DNA, 15 bp, Homo sapiens
gctaggatggtctcg

SEQ ID NO: 254886 - DNA, 15 bp, Homo sapiens
agctaggatggtctc

SEQ ID NO: 254887 - DNA, 15 bp, Homo sapiens
tagctaggatggtct

SEQ ID NO: 254888 - DNA, 15 bp, Homo sapiens
ttagctaggatggtc

SEQ ID NO: 254889 - DNA, 15 bp, Homo sapiens
gttagctaggatggt

SEQ ID NO: 254890 - DNA, 15 bp, Homo sapiens
tgttagctaggatgg

SEQ ID NO: 254891 - DNA, 15 bp, Homo sapiens
gtgttagctaggatg

SEQ ID NO: 254892 - DNA, 15 bp, Homo sapiens
tgtgttagctaggat

SEQ ID NO: 254893 - DNA, 15 bp, Homo sapiens
ctgtgttagctagga

SEQ ID NO: 254894 - DNA, 15 bp, Homo sapiens
actgtgttagctagg

SEQ ID NO: 254895 - DNA, 15 bp, Homo sapiens
cactgtgttagctag

SEQ ID NO: 254896 - DNA, 15 bp, Homo sapiens
tcactgtgttagcta

SEQ ID NO: 254897 - DNA, 15 bp, Homo sapiens
ttcactgtgttagct

SEQ ID NO: 254898 - DNA, 15 bp, Homo sapiens
tttcactgtgttagc

SEQ ID NO: 254899 - DNA, 15 bp, Homo sapiens
gtttcactgtgttag

SEQ ID NO: 254900 - DNA, 15 bp, Homo sapiens
ggtttcactgtgtta

SEQ ID NO: 254901 - DNA, 15 bp, Homo sapiens
tggggtttcactgtg

SEQ ID NO: 254902 - DNA, 15 bp, Homo sapiens
atggggtttcactgt

SEQ ID NO: 254903 - DNA, 15 bp, Homo sapiens
gatggggtttcactg

SEQ ID NO: 254904 - DNA, 15 bp, Homo sapiens
agatggggtttcact

SEQ ID NO: 254905 - DNA, 15 bp, Homo sapiens
ctacaggcgcccacc

SEQ ID NO: 254906 - DNA, 15 bp, Homo sapiens
actacaggcgcccac

SEQ ID NO: 254907 - DNA, 15 bp, Homo sapiens
gactacaggcgccca

SEQ ID NO: 254908 - DNA, 15 bp, Homo sapiens
aagcagctgggacta

SEQ ID NO: 254909 - DNA, 15 bp, Homo sapiens
caagcagctgggact

SEQ ID NO: 254910 - DNA, 15 bp, Homo sapiens
ccaagcagctgggac

SEQ ID NO: 254911 - DNA, 15 bp, Homo sapiens
cccaagcagctggga

SEQ ID NO: 254912 - DNA, 15 bp, Homo sapiens
tcccaagcagctggg

SEQ ID NO: 254913 - DNA, 15 bp, Homo sapiens
ctcccaagcagctgg

SEQ ID NO: 254914 - DNA, 15 bp, Homo sapiens
cctcccaagcagctg

SEQ ID NO: 254915 - DNA, 15 bp, Homo sapiens
gcctcccaagcagct

SEQ ID NO: 254916 - DNA, 15 bp, Homo sapiens
agcctcccaagcagc

SEQ ID NO: 254917 - DNA, 15 bp, Homo sapiens
cagcctcccaagcag

SEQ ID NO: 254918 - DNA, 15 bp, Homo sapiens
tcagcctcccaagca

SEQ ID NO: 254919 - DNA, 15 bp, Homo sapiens
ctcagcctcccaagc

SEQ ID NO: 254920 - DNA, 15 bp, Homo sapiens
tattctcctgcctca

SEQ ID NO: 254921 - DNA, 15 bp, Homo sapiens
ctattctcctgcctc

SEQ ID NO: 254922 - DNA, 15 bp, Homo sapiens
gctattctcctgcct

SEQ ID NO: 254923 - DNA, 15 bp, Homo sapiens
cgctattctcctgcc

SEQ ID NO: 254924 - DNA, 15 bp, Homo sapiens
acgctattctcctgc

SEQ ID NO: 254925 - DNA, 15 bp, Homo sapiens
cacgctattctcctg

SEQ ID NO: 254926 - DNA, 15 bp, Homo sapiens
tcacgctattctcct

SEQ ID NO: 254927 - DNA, 15 bp, Homo sapiens
ttcacgctattctcc

SEQ ID NO: 254928 - DNA, 15 bp, Homo sapiens
gttcacgctattctc

SEQ ID NO: 254929 - DNA, 15 bp, Homo sapiens
ggttcacgctattct

SEQ ID NO: 254930 - DNA, 15 bp, Homo sapiens
aggttcacgctattc

SEQ ID NO: 254931 - DNA, 15 bp, Homo sapiens
caggttcacgctatt

SEQ ID NO: 254932 - DNA, 15 bp, Homo sapiens
ccaggttcacgctat

SEQ ID NO: 254933 - DNA, 15 bp, Homo sapiens
cccaggttcacgcta

SEQ ID NO: 254934 - DNA, 15 bp, Homo sapiens
tcccaggttcacgct

SEQ ID NO: 254935 - DNA, 15 bp, Homo sapiens
ctcccaggttcacgc

SEQ ID NO: 254936 - DNA, 15 bp, Homo sapiens
actcccaggttcacg

SEQ ID NO: 254937 - DNA, 15 bp, Homo sapiens
aactcccaggttcac

SEQ ID NO: 254938 - DNA, 15 bp, Homo sapiens
caactcccaggttca

SEQ ID NO: 254939 - DNA, 15 bp, Homo sapiens
ccaactcccaggttc

SEQ ID NO: 254940 - DNA, 15 bp, Homo sapiens
tccaactcccaggtt

SEQ ID NO: 254941 - DNA, 15 bp, Homo sapiens
ctccaactcccaggt

SEQ ID NO: 254942 - DNA, 15 bp, Homo sapiens
gctccaactcccagg

SEQ ID NO: 254943 - DNA, 15 bp, Homo sapiens
agctccaactcccag

SEQ ID NO: 254944 - DNA, 15 bp, Homo sapiens
aagctccaactccca

SEQ ID NO: 254945 - DNA, 15 bp, Homo sapiens
caagctccaactccc

SEQ ID NO: 254946 - DNA, 15 bp, Homo sapiens
gcaagctccaactcc

SEQ ID NO: 254947 - DNA, 15 bp, Homo sapiens
tgcaagctccaactc

SEQ ID NO: 254948 - DNA, 15 bp, Homo sapiens
ctgcaagctccaact

SEQ ID NO: 254949 - DNA, 15 bp, Homo sapiens
actgcaagctccaac

SEQ ID NO: 254950 - DNA, 15 bp, Homo sapiens
cactgcaagctccaa

SEQ ID NO: 254951 - DNA, 15 bp, Homo sapiens
tgcgatctcggctca

SEQ ID NO: 254952 - DNA, 15 bp, Homo sapiens
gtgcgatctcggctc

SEQ ID NO: 254953 - DNA, 15 bp, Homo sapiens
ggtgcgatctcggct

SEQ ID NO: 254954 - DNA, 15 bp, Homo sapiens
tggtgcgatctcggc

SEQ ID NO: 254955 - DNA, 15 bp, Homo sapiens
gtggtgcgatctcgg

SEQ ID NO: 254956 - DNA, 15 bp, Homo sapiens
agtggtgcgatctcg

SEQ ID NO: 254957 - DNA, 15 bp, Homo sapiens
cagtggtgcgatctc

SEQ ID NO: 254958 - DNA, 15 bp, Homo sapiens
gcagtggtgcgatct

SEQ ID NO: 254959 - DNA, 15 bp, Homo sapiens
tgcagtggtgcgatc

SEQ ID NO: 254960 - DNA, 15 bp, Homo sapiens
gtgcagtggtgcgat

SEQ ID NO: 254961 - DNA, 15 bp, Homo sapiens
agtgcagtggtgcga

SEQ ID NO: 254962 - DNA, 15 bp, Homo sapiens
gagtgcagtggtgcg

SEQ ID NO: 254963 - DNA, 15 bp, Homo sapiens
agagtgcagtggtgc

SEQ ID NO: 254964 - DNA, 15 bp, Homo sapiens
tagagtgcagtggtg

SEQ ID NO: 254965 - DNA, 15 bp, Homo sapiens
ctagagtgcagtggt

SEQ ID NO: 254966 - DNA, 15 bp, Homo sapiens
gttgcccaggctaga

SEQ ID NO: 254967 - DNA, 15 bp, Homo sapiens
tgttgcccaggctag

SEQ ID NO: 254968 - DNA, 15 bp, Homo sapiens
ctgttgcccaggcta

SEQ ID NO: 254969 - DNA, 15 bp, Homo sapiens
gctctgttgcccagg

SEQ ID NO: 254970 - DNA, 15 bp, Homo sapiens
tggagtcttgctctg

SEQ ID NO: 254971 - DNA, 15 bp, Homo sapiens
atggagtcttgctct

SEQ ID NO: 254972 - DNA, 15 bp, Homo sapiens
gatggagtcttgctc

SEQ ID NO: 254973 - DNA, 15 bp, Homo sapiens
agatggagtcttgct

SEQ ID NO: 254974 - DNA, 15 bp, Homo sapiens
tagatggagtcttgc

SEQ ID NO: 254975 - DNA, 15 bp, Homo sapiens
gtagatggagtcttg

SEQ ID NO: 254976 - DNA, 15 bp, Homo sapiens
tgtagatggagtctt

SEQ ID NO: 254977 - DNA, 15 bp, Homo sapiens
ttgtagatggagtct

SEQ ID NO: 254978 - DNA, 15 bp, Homo sapiens
tttgtagatggagtc

SEQ ID NO: 254979 - DNA, 15 bp, Homo sapiens
ttttgtagatggagt

SEQ ID NO: 254980 - DNA, 15 bp, Homo sapiens
tttttgtagatggag

SEQ ID NO: 254981 - DNA, 15 bp, Homo sapiens
ttttttgtagatgga

SEQ ID NO: 254982 - DNA, 15 bp, Homo sapiens
tttttttgtagatgg

SEQ ID NO: 254983 - DNA, 15 bp, Homo sapiens
ttttttttgtagatg

SEQ ID NO: 254984 - DNA, 15 bp, Homo sapiens
tttttttttgtagat

SEQ ID NO: 254985 - DNA, 15 bp, Homo sapiens
ttttttttttgtaga

SEQ ID NO: 254986 - DNA, 15 bp, Homo sapiens
tttttttttttgtag

SEQ ID NO: 254987 - DNA, 15 bp, Homo sapiens
ttttttttttttgta

SEQ ID NO: 254988 - DNA, 15 bp, Homo sapiens
atttctttttttttt

SEQ ID NO: 254989 - DNA, 15 bp, Homo sapiens
catttcttttttttt

SEQ ID NO: 254990 - DNA, 15 bp, Homo sapiens
tcatttctttttttt

SEQ ID NO: 254991 - DNA, 15 bp, Homo sapiens
ttcatttcttttttt

SEQ ID NO: 254992 - DNA, 15 bp, Homo sapiens
cttcatttctttttt

SEQ ID NO: 254993 - DNA, 15 bp, Homo sapiens
acttcatttcttttt

SEQ ID NO: 254994 - DNA, 15 bp, Homo sapiens
gacttcatttctttt

SEQ ID NO: 254995 - DNA, 15 bp, Homo sapiens
agacttcatttcttt

SEQ ID NO: 254996 - DNA, 15 bp, Homo sapiens
aagacttcatttctt

SEQ ID NO: 254997 - DNA, 15 bp, Homo sapiens
caagacttcatttct

SEQ ID NO: 254998 - DNA, 15 bp, Homo sapiens
tcaagacttcatttc

SEQ ID NO: 254999 - DNA, 15 bp, Homo sapiens
atcaagacttcattt

SEQ ID NO: 255000 - DNA, 15 bp, Homo sapiens
tatcaagacttcatt

SEQ ID NO: 255001 - DNA, 15 bp, Homo sapiens
gtatcaagacttcat

SEQ ID NO: 255002 - DNA, 15 bp, Homo sapiens
cgtatcaagacttca

SEQ ID NO: 255003 - DNA, 15 bp, Homo sapiens
ccgtatcaagacttc

SEQ ID NO: 255004 - DNA, 15 bp, Homo sapiens
accgtatcaagactt

SEQ ID NO: 255005 - DNA, 15 bp, Homo sapiens
caccgtatcaagact

SEQ ID NO: 255006 - DNA, 15 bp, Homo sapiens
ccaccgtatcaagac

SEQ ID NO: 255007 - DNA, 15 bp, Homo sapiens
gccaccgtatcaaga

SEQ ID NO: 255008 - DNA, 15 bp, Homo sapiens
agccaccgtatcaag

SEQ ID NO: 255009 - DNA, 15 bp, Homo sapiens
gagccaccgtatcaa

SEQ ID NO: 255010 - DNA, 15 bp, Homo sapiens
tgagccaccgtatca

SEQ ID NO: 255011 - DNA, 15 bp, Homo sapiens
atgagccaccgtatc

SEQ ID NO: 255012 - DNA, 15 bp, Homo sapiens
catgagccaccgtat

SEQ ID NO: 255013 - DNA, 15 bp, Homo sapiens
gcatgagccaccgta

SEQ ID NO: 255014 - DNA, 15 bp, Homo sapiens
ggcatgagccaccgt

SEQ ID NO: 255015 - DNA, 15 bp, Homo sapiens
gccttggcctcccaa

SEQ ID NO: 255016 - DNA, 15 bp, Homo sapiens
tgccttggcctccca

SEQ ID NO: 255017 - DNA, 15 bp, Homo sapiens
ctgccttggcctccc

SEQ ID NO: 255018 - DNA, 15 bp, Homo sapiens
cctgccttggcctcc

SEQ ID NO: 255019 - DNA, 15 bp, Homo sapiens
gcctgccttggcctc

SEQ ID NO: 255020 - DNA, 15 bp, Homo sapiens
cgcctgccttggcct

SEQ ID NO: 255021 - DNA, 15 bp, Homo sapiens
ccgcctgccttggcc

SEQ ID NO: 255022 - DNA, 15 bp, Homo sapiens
tccgcctgccttggc

SEQ ID NO: 255023 - DNA, 15 bp, Homo sapiens
atccgcctgccttgg

SEQ ID NO: 255024 - DNA, 15 bp, Homo sapiens
gatccgcctgccttg

SEQ ID NO: 255025 - DNA, 15 bp, Homo sapiens
tgatccgcctgcctt

SEQ ID NO: 255026 - DNA, 15 bp, Homo sapiens
gtgatccgcctgcct

SEQ ID NO: 255027 - DNA, 15 bp, Homo sapiens
cgtgatccgcctgcc

SEQ ID NO: 255028 - DNA, 15 bp, Homo sapiens
tcgtgatccgcctgc

SEQ ID NO: 255029 - DNA, 15 bp, Homo sapiens
ctcgtgatccgcctg

SEQ ID NO: 255030 - DNA, 15 bp, Homo sapiens
gctcgtgatccgcct

SEQ ID NO: 255031 - DNA, 15 bp, Homo sapiens
agctcgtgatccgcc

SEQ ID NO: 255032 - DNA, 15 bp, Homo sapiens
gagctcgtgatccgc

SEQ ID NO: 255033 - DNA, 15 bp, Homo sapiens
tgagctcgtgatccg

SEQ ID NO: 255034 - DNA, 15 bp, Homo sapiens
ctgagctcgtgatcc

SEQ ID NO: 255035 - DNA, 15 bp, Homo sapiens
cctgagctcgtgatc

SEQ ID NO: 255036 - DNA, 15 bp, Homo sapiens
tcctgagctcgtgat

SEQ ID NO: 255037 - DNA, 15 bp, Homo sapiens
ctcctgagctcgtga

SEQ ID NO: 255038 - DNA, 15 bp, Homo sapiens
tctcctgagctcgtg

SEQ ID NO: 255039 - DNA, 15 bp, Homo sapiens
atctcctgagctcgt

SEQ ID NO: 255040 - DNA, 15 bp, Homo sapiens
gatctcctgagctcg

SEQ ID NO: 255041 - DNA, 15 bp, Homo sapiens
cgatctcctgagctc

SEQ ID NO: 255042 - DNA, 15 bp, Homo sapiens
tcgatctcctgagct

SEQ ID NO: 255043 - DNA, 15 bp, Homo sapiens
ctcgatctcctgagc

SEQ ID NO: 255044 - DNA, 15 bp, Homo sapiens
tctcgatctcctgag

SEQ ID NO: 255045 - DNA, 15 bp, Homo sapiens
cgttggccaggatgg

SEQ ID NO: 255046 - DNA, 15 bp, Homo sapiens
acgttggccaggatg

SEQ ID NO: 255047 - DNA, 15 bp, Homo sapiens
cacgttggccaggat

SEQ ID NO: 255048 - DNA, 15 bp, Homo sapiens
ccacgttggccagga

SEQ ID NO: 255049 - DNA, 15 bp, Homo sapiens
gccacgttggccagg

SEQ ID NO: 255050 - DNA, 15 bp, Homo sapiens
cgccacgttggccag

SEQ ID NO: 255051 - DNA, 15 bp, Homo sapiens
tcgccacgttggcca

SEQ ID NO: 255052 - DNA, 15 bp, Homo sapiens
ttcgccacgttggcc

SEQ ID NO: 255053 - DNA, 15 bp, Homo sapiens
tttcgccacgttggc

SEQ ID NO: 255054 - DNA, 15 bp, Homo sapiens
gtttcgccacgttgg

SEQ ID NO: 255055 - DNA, 15 bp, Homo sapiens
ggtttcgccacgttg

SEQ ID NO: 255056 - DNA, 15 bp, Homo sapiens
gggtttcgccacgtt

SEQ ID NO: 255057 - DNA, 15 bp, Homo sapiens
tgggtttcgccacgt

SEQ ID NO: 255058 - DNA, 15 bp, Homo sapiens
ctgggtttcgccacg

SEQ ID NO: 255059 - DNA, 15 bp, Homo sapiens
actgggtttcgccac

SEQ ID NO: 255060 - DNA, 15 bp, Homo sapiens
gactgggtttcgcca

SEQ ID NO: 255061 - DNA, 15 bp, Homo sapiens
agactgggtttcgcc

SEQ ID NO: 255062 - DNA, 15 bp, Homo sapiens
gagactgggtttcgc

SEQ ID NO: 255063 - DNA, 15 bp, Homo sapiens
agagactgggtttcg

SEQ ID NO: 255064 - DNA, 15 bp, Homo sapiens
tagagactgggtttc

SEQ ID NO: 255065 - DNA, 15 bp, Homo sapiens
gtagagactgggttt

SEQ ID NO: 255066 - DNA, 15 bp, Homo sapiens
agtagagactgggtt

SEQ ID NO: 255067 - DNA, 15 bp, Homo sapiens
tagtagagactgggt

SEQ ID NO: 255068 - DNA, 15 bp, Homo sapiens
ttagtagagactggg

SEQ ID NO: 255069 - DNA, 15 bp, Homo sapiens
tttagtagagactgg

SEQ ID NO: 255070 - DNA, 15 bp, Homo sapiens
ctttagtagagactg

SEQ ID NO: 255071 - DNA, 15 bp, Homo sapiens
tctttagtagagact

SEQ ID NO: 255072 - DNA, 15 bp, Homo sapiens
atctttagtagagac

SEQ ID NO: 255073 - DNA, 15 bp, Homo sapiens
tatctttagtagaga

SEQ ID NO: 255074 - DNA, 15 bp, Homo sapiens
gtatctttagtagag

SEQ ID NO: 255075 - DNA, 15 bp, Homo sapiens
tgtatctttagtaga

SEQ ID NO: 255076 - DNA, 15 bp, Homo sapiens
ttgtatctttagtag

SEQ ID NO: 255077 - DNA, 15 bp, Homo sapiens
tttgtatctttagta

SEQ ID NO: 255078 - DNA, 15 bp, Homo sapiens
ttttgtatctttagt

SEQ ID NO: 255079 - DNA, 15 bp, Homo sapiens
tttttgtatctttag

SEQ ID NO: 255080 - DNA, 15 bp, Homo sapiens
ttttttgtatcttta

SEQ ID NO: 255081 - DNA, 15 bp, Homo sapiens
attttttgtatcttt

SEQ ID NO: 255082 - DNA, 15 bp, Homo sapiens
aattttttgtatctt

SEQ ID NO: 255083 - DNA, 15 bp, Homo sapiens
taattttttgtatct

SEQ ID NO: 255084 - DNA, 15 bp, Homo sapiens
ctaattttttgtatc

SEQ ID NO: 255085 - DNA, 15 bp, Homo sapiens
tgcctggctaatttt

SEQ ID NO: 255086 - DNA, 15 bp, Homo sapiens
atgcctggctaattt

SEQ ID NO: 255087 - DNA, 15 bp, Homo sapiens
catgcctggctaatt

SEQ ID NO: 255088 - DNA, 15 bp, Homo sapiens
ccatgcctggctaat

SEQ ID NO: 255089 - DNA, 15 bp, Homo sapiens
accatgcctggctaa

SEQ ID NO: 255090 - DNA, 15 bp, Homo sapiens
caccatgcctggcta

SEQ ID NO: 255091 - DNA, 15 bp, Homo sapiens
ccaccatgcctggct

SEQ ID NO: 255092 - DNA, 15 bp, Homo sapiens
gccaccatgcctggc

SEQ ID NO: 255093 - DNA, 15 bp, Homo sapiens
cgccaccatgcctgg

SEQ ID NO: 255094 - DNA, 15 bp, Homo sapiens
ccgccaccatgcctg

SEQ ID NO: 255095 - DNA, 15 bp, Homo sapiens
cccgccaccatgcct

SEQ ID NO: 255096 - DNA, 15 bp, Homo sapiens
cgcccgccaccatgc

SEQ ID NO: 255097 - DNA, 15 bp, Homo sapiens
gcgcccgccaccatg

SEQ ID NO: 255098 - DNA, 15 bp, Homo sapiens
ggcgcccgccaccat

SEQ ID NO: 255099 - DNA, 15 bp, Homo sapiens
tgccattctcctgcc

SEQ ID NO: 255100 - DNA, 15 bp, Homo sapiens
atgccattctcctgc

SEQ ID NO: 255101 - DNA, 15 bp, Homo sapiens
catgccattctcctg

SEQ ID NO: 255102 - DNA, 15 bp, Homo sapiens
tcatgccattctcct

SEQ ID NO: 255103 - DNA, 15 bp, Homo sapiens
ttcatgccattctcc

SEQ ID NO: 255104 - DNA, 15 bp, Homo sapiens
gttcatgccattctc

SEQ ID NO: 255105 - DNA, 15 bp, Homo sapiens
ggttcatgccattct

SEQ ID NO: 255106 - DNA, 15 bp, Homo sapiens
gggttcatgccattc

SEQ ID NO: 255107 - DNA, 15 bp, Homo sapiens
tgggttcatgccatt

SEQ ID NO: 255108 - DNA, 15 bp, Homo sapiens
ctgggttcatgccat

SEQ ID NO: 255109 - DNA, 15 bp, Homo sapiens
cctgggttcatgcca

SEQ ID NO: 255110 - DNA, 15 bp, Homo sapiens
tcctgggttcatgcc

SEQ ID NO: 255111 - DNA, 15 bp, Homo sapiens
ctcctgggttcatgc

SEQ ID NO: 255112 - DNA, 15 bp, Homo sapiens
cctcctgggttcatg

SEQ ID NO: 255113 - DNA, 15 bp, Homo sapiens
gcctcctgggttcat

SEQ ID NO: 255114 - DNA, 15 bp, Homo sapiens
tgcctcctgggttca

SEQ ID NO: 255115 - DNA, 15 bp, Homo sapiens
ctgcctcctgggttc

SEQ ID NO: 255116 - DNA, 15 bp, Homo sapiens
tctgcctcctgggtt

SEQ ID NO: 255117 - DNA, 15 bp, Homo sapiens
ctctgcctcctgggt

SEQ ID NO: 255118 - DNA, 15 bp, Homo sapiens
gctctgcctcctggg

SEQ ID NO: 255119 - DNA, 15 bp, Homo sapiens
agctctgcctcctgg

SEQ ID NO: 255120 - DNA, 15 bp, Homo sapiens
aagctctgcctcctg

SEQ ID NO: 255121 - DNA, 15 bp, Homo sapiens
caagctctgcctcct

SEQ ID NO: 255122 - DNA, 15 bp, Homo sapiens
gcaagctctgcctcc

SEQ ID NO: 255123 - DNA, 15 bp, Homo sapiens
tgcaagctctgcctc

SEQ ID NO: 255124 - DNA, 15 bp, Homo sapiens
ctgcaagctctgcct

SEQ ID NO: 255125 - DNA, 15 bp, Homo sapiens
actgcaagctctgcc

SEQ ID NO: 255126 - DNA, 15 bp, Homo sapiens
cactgcaagctctgc

SEQ ID NO: 255127 - DNA, 15 bp, Homo sapiens
tcactgcaagctctg

SEQ ID NO: 255128 - DNA, 15 bp, Homo sapiens
ctcactgcaagctct

SEQ ID NO: 255129 - DNA, 15 bp, Homo sapiens
agagtctcgctctgt

SEQ ID NO: 255130 - DNA, 15 bp, Homo sapiens
cagagtctcgctctg

SEQ ID NO: 255131 - DNA, 15 bp, Homo sapiens
acagagtctcgctct

SEQ ID NO: 255132 - DNA, 15 bp, Homo sapiens
gacagagtctcgctc

SEQ ID NO: 255133 - DNA, 15 bp, Homo sapiens
agacagagtctcgct

SEQ ID NO: 255134 - DNA, 15 bp, Homo sapiens
gagacagagtctcgc

SEQ ID NO: 255135 - DNA, 15 bp, Homo sapiens
tgagacagagtctcg

SEQ ID NO: 255136 - DNA, 15 bp, Homo sapiens
tgttttttttttgag

SEQ ID NO: 255137 - DNA, 15 bp, Homo sapiens
ttgttttttttttga

SEQ ID NO: 255138 - DNA, 15 bp, Homo sapiens
tttgttttttttttg

SEQ ID NO: 255139 - DNA, 15 bp, Homo sapiens
tcttttttgtttttt

SEQ ID NO: 255140 - DNA, 15 bp, Homo sapiens
ttcttttttgttttt

SEQ ID NO: 255141 - DNA, 15 bp, Homo sapiens
tttcttttttgtttt

SEQ ID NO: 255142 - DNA, 15 bp, Homo sapiens
atttcttttttgttt

SEQ ID NO: 255143 - DNA, 15 bp, Homo sapiens
catttcttttttgtt

SEQ ID NO: 255144 - DNA, 15 bp, Homo sapiens
tcatttcttttttgt

SEQ ID NO: 255145 - DNA, 15 bp, Homo sapiens
ttcatttcttttttg

SEQ ID NO: 255146 - DNA, 15 bp, Homo sapiens
tttcatttctttttt

SEQ ID NO: 255147 - DNA, 15 bp, Homo sapiens
ttttcatttcttttt

SEQ ID NO: 255148 - DNA, 15 bp, Homo sapiens
attttcatttctttt

SEQ ID NO: 255149 - DNA, 15 bp, Homo sapiens
gattttcatttcttt

SEQ ID NO: 255150 - DNA, 15 bp, Homo sapiens
agattttcatttctt

SEQ ID NO: 255151 - DNA, 15 bp, Homo sapiens
gagattttcatttct

SEQ ID NO: 255152 - DNA, 15 bp, Homo sapiens
ggagattttcatttc

SEQ ID NO: 255153 - DNA, 15 bp, Homo sapiens
gggagattttcattt

SEQ ID NO: 255154 - DNA, 15 bp, Homo sapiens
agggagattttcatt

SEQ ID NO: 255155 - DNA, 15 bp, Homo sapiens
cagggagattttcat

SEQ ID NO: 255156 - DNA, 15 bp, Homo sapiens
acagggagattttca

SEQ ID NO: 255157 - DNA, 15 bp, Homo sapiens
gacagggagattttc

SEQ ID NO: 255158 - DNA, 15 bp, Homo sapiens
agacagggagatttt

SEQ ID NO: 255159 - DNA, 15 bp, Homo sapiens
cagacagggagattt

SEQ ID NO: 255160 - DNA, 15 bp, Homo sapiens
acagacagggagatt

SEQ ID NO: 255161 - DNA, 15 bp, Homo sapiens
gacagacagggagat

SEQ ID NO: 255162 - DNA, 15 bp, Homo sapiens
ggacagacagggaga

SEQ ID NO: 255163 - DNA, 15 bp, Homo sapiens
aggacagacagggag

SEQ ID NO: 255164 - DNA, 15 bp, Homo sapiens
aaggacagacaggga

SEQ ID NO: 255165 - DNA, 15 bp, Homo sapiens
taaggacagacaggg

SEQ ID NO: 255166 - DNA, 15 bp, Homo sapiens
ttaaggacagacagg

SEQ ID NO: 255167 - DNA, 15 bp, Homo sapiens
cttaaggacagacag

SEQ ID NO: 255168 - DNA, 15 bp, Homo sapiens
ccttaaggacagaca

SEQ ID NO: 255169 - DNA, 15 bp, Homo sapiens
tccttaaggacagac

SEQ ID NO: 255170 - DNA, 15 bp, Homo sapiens
gtccttaaggacaga

SEQ ID NO: 255171 - DNA, 15 bp, Homo sapiens
ggtccttaaggacag

SEQ ID NO: 255172 - DNA, 15 bp, Homo sapiens
aggtccttaaggaca

SEQ ID NO: 255173 - DNA, 15 bp, Homo sapiens
caggtccttaaggac

SEQ ID NO: 255174 - DNA, 15 bp, Homo sapiens
tcaggtccttaagga

SEQ ID NO: 255175 - DNA, 15 bp, Homo sapiens
gtcaggtccttaagg

SEQ ID NO: 255176 - DNA, 15 bp, Homo sapiens
tgtcaggtccttaag

SEQ ID NO: 255177 - DNA, 15 bp, Homo sapiens
atgtcaggtccttaa

SEQ ID NO: 255178 - DNA, 15 bp, Homo sapiens
gatgtcaggtcctta

SEQ ID NO: 255179 - DNA, 15 bp, Homo sapiens
tgatgtcaggtcctt

SEQ ID NO: 255180 - DNA, 15 bp, Homo sapiens
atgatgtcaggtcct

SEQ ID NO: 255181 - DNA, 15 bp, Homo sapiens
aatgatgtcaggtcc

SEQ ID NO: 255182 - DNA, 15 bp, Homo sapiens
aaatgatgtcaggtc

SEQ ID NO: 255183 - DNA, 15 bp, Homo sapiens
aaaatgatgtcaggt

SEQ ID NO: 255184 - DNA, 15 bp, Homo sapiens
taaaatgatgtcagg

SEQ ID NO: 255185 - DNA, 15 bp, Homo sapiens
ataaaatgatgtcag

SEQ ID NO: 255186 - DNA, 15 bp, Homo sapiens
aataaaatgatgtca

SEQ ID NO: 255187 - DNA, 15 bp, Homo sapiens
aaataaaatgatgtc

SEQ ID NO: 255188 - DNA, 15 bp, Homo sapiens
aaaataaaatgatgt

SEQ ID NO: 255189 - DNA, 15 bp, Homo sapiens
taaaataaaatgatg

SEQ ID NO: 255190 - DNA, 15 bp, Homo sapiens
ataaaataaaatgat

SEQ ID NO: 255191 - DNA, 15 bp, Homo sapiens
aataaaataaaatga

SEQ ID NO: 255192 - DNA, 15 bp, Homo sapiens
aaataaaataaaatg

SEQ ID NO: 255193 - DNA, 15 bp, Homo sapiens
taaataaaataaaat

SEQ ID NO: 255194 - DNA, 15 bp, Homo sapiens
ataaataaaataaaa

SEQ ID NO: 255195 - DNA, 15 bp, Homo sapiens
aataaataaaataaa

SEQ ID NO: 255196 - DNA, 15 bp, Homo sapiens
aaataaataaaataa

SEQ ID NO: 255197 - DNA, 15 bp, Homo sapiens
aaaataaataaaata

SEQ ID NO: 255198 - DNA, 15 bp, Homo sapiens
aaaaataaataaaat

SEQ ID NO: 255199 - DNA, 15 bp, Homo sapiens
aaaaaataaataaaa

SEQ ID NO: 255200 - DNA, 15 bp, Homo sapiens
aaaaaaataaataaa

SEQ ID NO: 255201 - DNA, 15 bp, Homo sapiens
caaaaaaataaataa

SEQ ID NO: 255202 - DNA, 15 bp, Homo sapiens
tcaaaaaaataaata

SEQ ID NO: 255203 - DNA, 15 bp, Homo sapiens
ctcaaaaaaataaat

SEQ ID NO: 255204 - DNA, 15 bp, Homo sapiens
tctcaaaaaaataaa

SEQ ID NO: 255205 - DNA, 15 bp, Homo sapiens
gtctcaaaaaaataa

SEQ ID NO: 255206 - DNA, 15 bp, Homo sapiens
tgtctcaaaaaaata

SEQ ID NO: 255207 - DNA, 15 bp, Homo sapiens
ttgtctcaaaaaaat

SEQ ID NO: 255208 - DNA, 15 bp, Homo sapiens
cttgtctcaaaaaaa

SEQ ID NO: 255209 - DNA, 15 bp, Homo sapiens
ccttgtctcaaaaaa

SEQ ID NO: 255210 - DNA, 15 bp, Homo sapiens
accttgtctcaaaaa

SEQ ID NO: 255211 - DNA, 15 bp, Homo sapiens
gaccttgtctcaaaa

SEQ ID NO: 255212 - DNA, 15 bp, Homo sapiens
agaccttgtctcaaa

SEQ ID NO: 255213 - DNA, 15 bp, Homo sapiens
aagaccttgtctcaa

SEQ ID NO: 255214 - DNA, 15 bp, Homo sapiens
caagaccttgtctca

SEQ ID NO: 255215 - DNA, 15 bp, Homo sapiens
gcaagaccttgtctc

SEQ ID NO: 255216 - DNA, 15 bp, Homo sapiens
agcaagaccttgtct

SEQ ID NO: 255217 - DNA, 15 bp, Homo sapiens
aagcaagaccttgtc

SEQ ID NO: 255218 - DNA, 15 bp, Homo sapiens
aaagcaagaccttgt

SEQ ID NO: 255219 - DNA, 15 bp, Homo sapiens
taaagcaagaccttg

SEQ ID NO: 255220 - DNA, 15 bp, Homo sapiens
ataaagcaagacctt

SEQ ID NO: 255221 - DNA, 15 bp, Homo sapiens
aataaagcaagacct

SEQ ID NO: 255222 - DNA, 15 bp, Homo sapiens
caataaagcaagacc

SEQ ID NO: 255223 - DNA, 15 bp, Homo sapiens
gcaataaagcaagac

SEQ ID NO: 255224 - DNA, 15 bp, Homo sapiens
ggcaataaagcaaga

SEQ ID NO: 255225 - DNA, 15 bp, Homo sapiens
gggcaataaagcaag

SEQ ID NO: 255226 - DNA, 15 bp, Homo sapiens
tgggcaataaagcaa

SEQ ID NO: 255227 - DNA, 15 bp, Homo sapiens
ctgggcaataaagca

SEQ ID NO: 255228 - DNA, 15 bp, Homo sapiens
cctgggcaataaagc

SEQ ID NO: 255229 - DNA, 15 bp, Homo sapiens
gcctgggcaataaag

SEQ ID NO: 255230 - DNA, 15 bp, Homo sapiens
agcctgggcaataaa

SEQ ID NO: 255231 - DNA, 15 bp, Homo sapiens
cagcctgggcaataa

SEQ ID NO: 255232 - DNA, 15 bp, Homo sapiens
tccagcctgggcaat

SEQ ID NO: 255233 - DNA, 15 bp, Homo sapiens
gcgaggccgagccag

SEQ ID NO: 255234 - DNA, 15 bp, Homo sapiens
tgcgaggccgagcca

SEQ ID NO: 255235 - DNA, 15 bp, Homo sapiens
ttgcgaggccgagcc

SEQ ID NO: 255236 - DNA, 15 bp, Homo sapiens
tttgcgaggccgagc

SEQ ID NO: 255237 - DNA, 15 bp, Homo sapiens
ctttgcgaggccgag

SEQ ID NO: 255238 - DNA, 15 bp, Homo sapiens
actttgcgaggccga

SEQ ID NO: 255239 - DNA, 15 bp, Homo sapiens
cactttgcgaggccg

SEQ ID NO: 255240 - DNA, 15 bp, Homo sapiens
gcactttgcgaggcc

SEQ ID NO: 255241 - DNA, 15 bp, Homo sapiens
agcactttgcgaggc

SEQ ID NO: 255242 - DNA, 15 bp, Homo sapiens
cagcactttgcgagg

SEQ ID NO: 255243 - DNA, 15 bp, Homo sapiens
ccagcactttgcgag

SEQ ID NO: 255244 - DNA, 15 bp, Homo sapiens
cccagcactttgcga

SEQ ID NO: 255245 - DNA, 15 bp, Homo sapiens
tcccagcactttgcg

SEQ ID NO: 255246 - DNA, 15 bp, Homo sapiens
atcccagcactttgc

SEQ ID NO: 255247 - DNA, 15 bp, Homo sapiens
acctgtaatcccagc

SEQ ID NO: 255248 - DNA, 15 bp, Homo sapiens
cacctgtaatcccag

SEQ ID NO: 255249 - DNA, 15 bp, Homo sapiens
acacctgtaatccca

SEQ ID NO: 255250 - DNA, 15 bp, Homo sapiens
cacacctgtaatccc

SEQ ID NO: 255251 - DNA, 15 bp, Homo sapiens
tcacacctgtaatcc

SEQ ID NO: 255252 - DNA, 15 bp, Homo sapiens
ctcacacctgtaatc

SEQ ID NO: 255253 - DNA, 15 bp, Homo sapiens
gctcacacctgtaat

SEQ ID NO: 255254 - DNA, 15 bp, Homo sapiens
ggctcacacctgtaa

SEQ ID NO: 255255 - DNA, 15 bp, Homo sapiens
tggctcacacctgta

SEQ ID NO: 255256 - DNA, 15 bp, Homo sapiens
gtggctcacacctgt

SEQ ID NO: 255257 - DNA, 15 bp, Homo sapiens
ggtggctcacacctg

SEQ ID NO: 255258 - DNA, 15 bp, Homo sapiens
cggtggctcacacct

SEQ ID NO: 255259 - DNA, 15 bp, Homo sapiens
acggtggctcacacc

SEQ ID NO: 255260 - DNA, 15 bp, Homo sapiens
cacggtggctcacac

SEQ ID NO: 255261 - DNA, 15 bp, Homo sapiens
gcacggtggctcaca

SEQ ID NO: 255262 - DNA, 15 bp, Homo sapiens
ggcacggtggctcac

SEQ ID NO: 255263 - DNA, 15 bp, Homo sapiens
gggcacggtggctca

SEQ ID NO: 255264 - DNA, 15 bp, Homo sapiens
tgggcacggtggctc

SEQ ID NO: 255265 - DNA, 15 bp, Homo sapiens
ctgggcacggtggct

SEQ ID NO: 255266 - DNA, 15 bp, Homo sapiens
gctgggcacggtggc

SEQ ID NO: 255267 - DNA, 15 bp, Homo sapiens
ggctgggcacggtgg

SEQ ID NO: 255268 - DNA, 15 bp, Homo sapiens
cggctgggcacggtg

SEQ ID NO: 255269 - DNA, 15 bp, Homo sapiens
acggctgggcacggt

SEQ ID NO: 255270 - DNA, 15 bp, Homo sapiens
aacggctgggcacgg

SEQ ID NO: 255271 - DNA, 15 bp, Homo sapiens
taacggctgggcacg

SEQ ID NO: 255272 - DNA, 15 bp, Homo sapiens
ctaacggctgggcac

SEQ ID NO: 255273 - DNA, 15 bp, Homo sapiens
gctaacggctgggca

SEQ ID NO: 255274 - DNA, 15 bp, Homo sapiens
agctaacggctgggc

SEQ ID NO: 255275 - DNA, 15 bp, Homo sapiens
gagctaacggctggg

SEQ ID NO: 255276 - DNA, 15 bp, Homo sapiens
tgagctaacggctgg

SEQ ID NO: 255277 - DNA, 15 bp, Homo sapiens
atgagctaacggctg

SEQ ID NO: 255278 - DNA, 15 bp, Homo sapiens
aatgagctaacggct

SEQ ID NO: 255279 - DNA, 15 bp, Homo sapiens
aaatgagctaacggc

SEQ ID NO: 255280 - DNA, 15 bp, Homo sapiens
aaaatgagctaacgg

SEQ ID NO: 255281 - DNA, 15 bp, Homo sapiens
taaaatgagctaacg

SEQ ID NO: 255282 - DNA, 15 bp, Homo sapiens
ttaaaatgagctaac

SEQ ID NO: 255283 - DNA, 15 bp, Homo sapiens
gttaaaatgagctaa

SEQ ID NO: 255284 - DNA, 15 bp, Homo sapiens
tgttaaaatgagcta

SEQ ID NO: 255285 - DNA, 15 bp, Homo sapiens
gtgttaaaatgagct

SEQ ID NO: 255286 - DNA, 15 bp, Homo sapiens
tgtgttaaaatgagc

SEQ ID NO: 255287 - DNA, 15 bp, Homo sapiens
atgtgttaaaatgag

SEQ ID NO: 255288 - DNA, 15 bp, Homo sapiens
gatgtgttaaaatga

SEQ ID NO: 255289 - DNA, 15 bp, Homo sapiens
ggatgtgttaaaatg

SEQ ID NO: 255290 - DNA, 15 bp, Homo sapiens
aggatgtgttaaaat

SEQ ID NO: 255291 - DNA, 15 bp, Homo sapiens
aaggatgtgttaaaa

SEQ ID NO: 255292 - DNA, 15 bp, Homo sapiens
taaggatgtgttaaa

SEQ ID NO: 255293 - DNA, 15 bp, Homo sapiens
ctaaggatgtgttaa

SEQ ID NO: 255294 - DNA, 15 bp, Homo sapiens
actaaggatgtgtta

SEQ ID NO: 255295 - DNA, 15 bp, Homo sapiens
gactaaggatgtgtt

SEQ ID NO: 255296 - DNA, 15 bp, Homo sapiens
ggactaaggatgtgt

SEQ ID NO: 255297 - DNA, 15 bp, Homo sapiens
tggactaaggatgtg

SEQ ID NO: 255298 - DNA, 15 bp, Homo sapiens
ctggactaaggatgt

SEQ ID NO: 255299 - DNA, 15 bp, Homo sapiens
gctggactaaggatg

SEQ ID NO: 255300 - DNA, 15 bp, Homo sapiens
ggctggactaaggat

SEQ ID NO: 255301 - DNA, 15 bp, Homo sapiens
aggctggactaagga

SEQ ID NO: 255302 - DNA, 15 bp, Homo sapiens
caggctggactaagg

SEQ ID NO: 255303 - DNA, 15 bp, Homo sapiens
acaggctggactaag

SEQ ID NO: 255304 - DNA, 15 bp, Homo sapiens
aacaggctggactaa

SEQ ID NO: 255305 - DNA, 15 bp, Homo sapiens
gaacaggctggacta

SEQ ID NO: 255306 - DNA, 15 bp, Homo sapiens
ggaacaggctggact

SEQ ID NO: 255307 - DNA, 15 bp, Homo sapiens
tggaacaggctggac

SEQ ID NO: 255308 - DNA, 15 bp, Homo sapiens
ttggaacaggctgga

SEQ ID NO: 255309 - DNA, 15 bp, Homo sapiens
tttggaacaggctgg

SEQ ID NO: 255310 - DNA, 15 bp, Homo sapiens
ttttggaacaggctg

SEQ ID NO: 255311 - DNA, 15 bp, Homo sapiens
tttttggaacaggct

SEQ ID NO: 255312 - DNA, 15 bp, Homo sapiens
ttttttggaacaggc

SEQ ID NO: 255313 - DNA, 15 bp, Homo sapiens
attttttggaacagg

SEQ ID NO: 255314 - DNA, 15 bp, Homo sapiens
gattttttggaacag

SEQ ID NO: 255315 - DNA, 15 bp, Homo sapiens
agattttttggaaca

SEQ ID NO: 255316 - DNA, 15 bp, Homo sapiens
tagattttttggaac

SEQ ID NO: 255317 - DNA, 15 bp, Homo sapiens
ttagattttttggaa

SEQ ID NO: 255318 - DNA, 15 bp, Homo sapiens
tttagattttttgga

SEQ ID NO: 255319 - DNA, 15 bp, Homo sapiens
ctttagattttttgg

SEQ ID NO: 255320 - DNA, 15 bp, Homo sapiens
actttagattttttg

SEQ ID NO: 255321 - DNA, 15 bp, Homo sapiens
gactttagatttttt

SEQ ID NO: 255322 - DNA, 15 bp, Homo sapiens
tgactttagattttt

SEQ ID NO: 255323 - DNA, 15 bp, Homo sapiens
ctgactttagatttt

SEQ ID NO: 255324 - DNA, 15 bp, Homo sapiens
tctgactttagattt

SEQ ID NO: 255325 - DNA, 15 bp, Homo sapiens
atctgactttagatt

SEQ ID NO: 255326 - DNA, 15 bp, Homo sapiens
tatctgactttagat

SEQ ID NO: 255327 - DNA, 15 bp, Homo sapiens
ctatctgactttaga

SEQ ID NO: 255328 - DNA, 15 bp, Homo sapiens
gctatctgactttag

SEQ ID NO: 255329 - DNA, 15 bp, Homo sapiens
agctatctgacttta

SEQ ID NO: 255330 - DNA, 15 bp, Homo sapiens
aagctatctgacttt

SEQ ID NO: 255331 - DNA, 15 bp, Homo sapiens
gaagctatctgactt

SEQ ID NO: 255332 - DNA, 15 bp, Homo sapiens
ggaagctatctgact

SEQ ID NO: 255333 - DNA, 15 bp, Homo sapiens
aggaagctatctgac

SEQ ID NO: 255334 - DNA, 15 bp, Homo sapiens
taggaagctatctga

SEQ ID NO: 255335 - DNA, 15 bp, Homo sapiens
ttaggaagctatctg

SEQ ID NO: 255336 - DNA, 15 bp, Homo sapiens
tttaggaagctatct

SEQ ID NO: 255337 - DNA, 15 bp, Homo sapiens
gtttaggaagctatc

SEQ ID NO: 255338 - DNA, 15 bp, Homo sapiens
ggtttaggaagctat

SEQ ID NO: 255339 - DNA, 15 bp, Homo sapiens
aggtttaggaagcta

SEQ ID NO: 255340 - DNA, 15 bp, Homo sapiens
gaggtttaggaagct

SEQ ID NO: 255341 - DNA, 15 bp, Homo sapiens
tgaggtttaggaagc

SEQ ID NO: 255342 - DNA, 15 bp, Homo sapiens
ttgaggtttaggaag

SEQ ID NO: 255343 - DNA, 15 bp, Homo sapiens
gttgaggtttaggaa

SEQ ID NO: 255344 - DNA, 15 bp, Homo sapiens
agttgaggtttagga

SEQ ID NO: 255345 - DNA, 15 bp, Homo sapiens
aagttgaggtttagg

SEQ ID NO: 255346 - DNA, 15 bp, Homo sapiens
aaagttgaggtttag

SEQ ID NO: 255347 - DNA, 15 bp, Homo sapiens
taaagttgaggttta

SEQ ID NO: 255348 - DNA, 15 bp, Homo sapiens
ataaagttgaggttt

SEQ ID NO: 255349 - DNA, 15 bp, Homo sapiens
aataaagttgaggtt

SEQ ID NO: 255350 - DNA, 15 bp, Homo sapiens
gaataaagttgaggt

SEQ ID NO: 255351 - DNA, 15 bp, Homo sapiens
ggaataaagttgagg

SEQ ID NO: 255352 - DNA, 15 bp, Homo sapiens
tggaataaagttgag

SEQ ID NO: 255353 - DNA, 15 bp, Homo sapiens
ttggaataaagttga

SEQ ID NO: 255354 - DNA, 15 bp, Homo sapiens
attggaataaagttg

SEQ ID NO: 255355 - DNA, 15 bp, Homo sapiens
aattggaataaagtt

SEQ ID NO: 255356 - DNA, 15 bp, Homo sapiens
caattggaataaagt

SEQ ID NO: 255357 - DNA, 15 bp, Homo sapiens
gcaattggaataaag

SEQ ID NO: 255358 - DNA, 15 bp, Homo sapiens
agcaattggaataaa

SEQ ID NO: 255359 - DNA, 15 bp, Homo sapiens
aagcaattggaataa

SEQ ID NO: 255360 - DNA, 15 bp, Homo sapiens
aaagcaattggaata

SEQ ID NO: 255361 - DNA, 15 bp, Homo sapiens
gaaagcaattggaat

SEQ ID NO: 255362 - DNA, 15 bp, Homo sapiens
ggaaagcaattggaa

SEQ ID NO: 255363 - DNA, 15 bp, Homo sapiens
aggaaagcaattgga

SEQ ID NO: 255364 - DNA, 15 bp, Homo sapiens
aaggaaagcaattgg

SEQ ID NO: 255365 - DNA, 15 bp, Homo sapiens
caaggaaagcaattg

SEQ ID NO: 255366 - DNA, 15 bp, Homo sapiens
ccaaggaaagcaatt

SEQ ID NO: 255367 - DNA, 15 bp, Homo sapiens
gccaaggaaagcaat

SEQ ID NO: 255368 - DNA, 15 bp, Homo sapiens
cgccaaggaaagcaa

SEQ ID NO: 255369 - DNA, 15 bp, Homo sapiens
tcgccaaggaaagca

SEQ ID NO: 255370 - DNA, 15 bp, Homo sapiens
ttcgccaaggaaagc

SEQ ID NO: 255371 - DNA, 15 bp, Homo sapiens
cttcgccaaggaaag

SEQ ID NO: 255372 - DNA, 15 bp, Homo sapiens
tcttcgccaaggaaa

SEQ ID NO: 255373 - DNA, 15 bp, Homo sapiens
ttcttcgccaaggaa

SEQ ID NO: 255374 - DNA, 15 bp, Homo sapiens
attcttcgccaagga

SEQ ID NO: 255375 - DNA, 15 bp, Homo sapiens
cattcttcgccaagg

SEQ ID NO: 255376 - DNA, 15 bp, Homo sapiens
acattcttcgccaag

SEQ ID NO: 255377 - DNA, 15 bp, Homo sapiens
tacattcttcgccaa

SEQ ID NO: 255378 - DNA, 15 bp, Homo sapiens
ctacattcttcgcca

SEQ ID NO: 255379 - DNA, 15 bp, Homo sapiens
actacattcttcgcc

SEQ ID NO: 255380 - DNA, 15 bp, Homo sapiens
tactacattcttcgc

SEQ ID NO: 255381 - DNA, 15 bp, Homo sapiens
ttactacattcttcg

SEQ ID NO: 255382 - DNA, 15 bp, Homo sapiens
cttactacattcttc

SEQ ID NO: 255383 - DNA, 15 bp, Homo sapiens
acttactacattctt

SEQ ID NO: 255384 - DNA, 15 bp, Homo sapiens
gacttactacattct

SEQ ID NO: 255385 - DNA, 15 bp, Homo sapiens
cgacttactacattc

SEQ ID NO: 255386 - DNA, 15 bp, Homo sapiens
ccgacttactacatt

SEQ ID NO: 255387 - DNA, 15 bp, Homo sapiens
gccgacttactacat

SEQ ID NO: 255388 - DNA, 15 bp, Homo sapiens
ggccgacttactaca

SEQ ID NO: 255389 - DNA, 15 bp, Homo sapiens
aggccgacttactac

SEQ ID NO: 255390 - DNA, 15 bp, Homo sapiens
aaggccgacttacta

SEQ ID NO: 255391 - DNA, 15 bp, Homo sapiens
gaaggccgacttact

SEQ ID NO: 255392 - DNA, 15 bp, Homo sapiens
ggaaggccgacttac

SEQ ID NO: 255393 - DNA, 15 bp, Homo sapiens
tggaaggccgactta

SEQ ID NO: 255394 - DNA, 15 bp, Homo sapiens
ctggaaggccgactt

SEQ ID NO: 255395 - DNA, 15 bp, Homo sapiens
gctggaaggccgact

SEQ ID NO: 255396 - DNA, 15 bp, Homo sapiens
ggctggaaggccgac

SEQ ID NO: 255397 - DNA, 15 bp, Homo sapiens
tggctggaaggccga

SEQ ID NO: 255398 - DNA, 15 bp, Homo sapiens
gtggctggaaggccg

SEQ ID NO: 255399 - DNA, 15 bp, Homo sapiens
ggtggctggaaggcc

SEQ ID NO: 255400 - DNA, 15 bp, Homo sapiens
tggtggctggaaggc

SEQ ID NO: 255401 - DNA, 15 bp, Homo sapiens
ctggtggctggaagg

SEQ ID NO: 255402 - DNA, 15 bp, Homo sapiens
gctggtggctggaag

SEQ ID NO: 255403 - DNA, 15 bp, Homo sapiens
ggctggtggctggaa

SEQ ID NO: 255404 - DNA, 15 bp, Homo sapiens
gggctggtggctgga

SEQ ID NO: 255405 - DNA, 15 bp, Homo sapiens
ggggctggtggctgg

SEQ ID NO: 255406 - DNA, 15 bp, Homo sapiens
aggggctggtggctg

SEQ ID NO: 255407 - DNA, 15 bp, Homo sapiens
aaggggctggtggct

SEQ ID NO: 255408 - DNA, 15 bp, Homo sapiens
gaaggggctggtggc

SEQ ID NO: 255409 - DNA, 15 bp, Homo sapiens
ggaaggggctggtgg

SEQ ID NO: 255410 - DNA, 15 bp, Homo sapiens
gggaaggggctggtg

SEQ ID NO: 255411 - DNA, 15 bp, Homo sapiens
agggaaggggctggt

SEQ ID NO: 255412 - DNA, 15 bp, Homo sapiens
aagggaaggggctgg

SEQ ID NO: 255413 - DNA, 15 bp, Homo sapiens
aaagggaaggggctg

SEQ ID NO: 255414 - DNA, 15 bp, Homo sapiens
caaagggaaggggct

SEQ ID NO: 255415 - DNA, 15 bp, Homo sapiens
ccaaagggaaggggc

SEQ ID NO: 255416 - DNA, 15 bp, Homo sapiens
accaaagggaagggg

SEQ ID NO: 255417 - DNA, 15 bp, Homo sapiens
gaccaaagggaaggg

SEQ ID NO: 255418 - DNA, 15 bp, Homo sapiens
agaccaaagggaagg

SEQ ID NO: 255419 - DNA, 15 bp, Homo sapiens
aagaccaaagggaag

SEQ ID NO: 255420 - DNA, 15 bp, Homo sapiens
aaagaccaaagggaa

SEQ ID NO: 255421 - DNA, 15 bp, Homo sapiens
gaaagaccaaaggga

SEQ ID NO: 255422 - DNA, 15 bp, Homo sapiens
tgaaagaccaaaggg

SEQ ID NO: 255423 - DNA, 15 bp, Homo sapiens
gtgaaagaccaaagg

SEQ ID NO: 255424 - DNA, 15 bp, Homo sapiens
agtgaaagaccaaag

SEQ ID NO: 255425 - DNA, 15 bp, Homo sapiens
gagtgaaagaccaaa

SEQ ID NO: 255426 - DNA, 15 bp, Homo sapiens
ggagtgaaagaccaa

SEQ ID NO: 255427 - DNA, 15 bp, Homo sapiens
cggagtgaaagacca

SEQ ID NO: 255428 - DNA, 15 bp, Homo sapiens
ccggagtgaaagacc

SEQ ID NO: 255429 - DNA, 15 bp, Homo sapiens
tccggagtgaaagac

SEQ ID NO: 255430 - DNA, 15 bp, Homo sapiens
ctccggagtgaaaga

SEQ ID NO: 255431 - DNA, 15 bp, Homo sapiens
cctccggagtgaaag

SEQ ID NO: 255432 - DNA, 15 bp, Homo sapiens
gcctccggagtgaaa

SEQ ID NO: 255433 - DNA, 15 bp, Homo sapiens
agcctccggagtgaa

SEQ ID NO: 255434 - DNA, 15 bp, Homo sapiens
gagcctccggagtga

SEQ ID NO: 255435 - DNA, 15 bp, Homo sapiens
agagcctccggagtg

SEQ ID NO: 255436 - DNA, 15 bp, Homo sapiens
aagagcctccggagt

SEQ ID NO: 255437 - DNA, 15 bp, Homo sapiens
taagagcctccggag

SEQ ID NO: 255438 - DNA, 15 bp, Homo sapiens
gtaagagcctccgga

SEQ ID NO: 255439 - DNA, 15 bp, Homo sapiens
ggtaagagcctccgg

SEQ ID NO: 255440 - DNA, 15 bp, Homo sapiens
gggtaagagcctccg

SEQ ID NO: 255441 - DNA, 15 bp, Homo sapiens
agggtaagagcctcc

SEQ ID NO: 255442 - DNA, 15 bp, Homo sapiens
tagggtaagagcctc

SEQ ID NO: 255443 - DNA, 15 bp, Homo sapiens
ctagggtaagagcct

SEQ ID NO: 255444 - DNA, 15 bp, Homo sapiens
tctagggtaagagcc

SEQ ID NO: 255445 - DNA, 15 bp, Homo sapiens
gtctagggtaagagc

SEQ ID NO: 255446 - DNA, 15 bp, Homo sapiens
tgtctagggtaagag

SEQ ID NO: 255447 - DNA, 15 bp, Homo sapiens
gtgtctagggtaaga

SEQ ID NO: 255448 - DNA, 15 bp, Homo sapiens
tgtgtctagggtaag

SEQ ID NO: 255449 - DNA, 15 bp, Homo sapiens
ttgtgtctagggtaa

SEQ ID NO: 255450 - DNA, 15 bp, Homo sapiens
attgtgtctagggta

SEQ ID NO: 255451 - DNA, 15 bp, Homo sapiens
cattgtgtctagggt

SEQ ID NO: 255452 - DNA, 15 bp, Homo sapiens
ccattgtgtctaggg

SEQ ID NO: 255453 - DNA, 15 bp, Homo sapiens
cccattgtgtctagg

SEQ ID NO: 255454 - DNA, 15 bp, Homo sapiens
tcccattgtgtctag

SEQ ID NO: 255455 - DNA, 15 bp, Homo sapiens
gtcccattgtgtcta

SEQ ID NO: 255456 - DNA, 15 bp, Homo sapiens
tgtcccattgtgtct

SEQ ID NO: 255457 - DNA, 15 bp, Homo sapiens
ctgtcccattgtgtc

SEQ ID NO: 255458 - DNA, 15 bp, Homo sapiens
cctgtcccattgtgt

SEQ ID NO: 255459 - DNA, 15 bp, Homo sapiens
ccctgtcccattgtg

SEQ ID NO: 255460 - DNA, 15 bp, Homo sapiens
tccctgtcccattgt

SEQ ID NO: 255461 - DNA, 15 bp, Homo sapiens
ctccctgtcccattg

SEQ ID NO: 255462 - DNA, 15 bp, Homo sapiens
gctccctgtcccatt

SEQ ID NO: 255463 - DNA, 15 bp, Homo sapiens
cgctccctgtcccat

SEQ ID NO: 255464 - DNA, 15 bp, Homo sapiens
ccgctccctgtccca

SEQ ID NO: 255465 - DNA, 15 bp, Homo sapiens
cccgctccctgtccc

SEQ ID NO: 255466 - DNA, 15 bp, Homo sapiens
ccccgctccctgtcc

SEQ ID NO: 255467 - DNA, 15 bp, Homo sapiens
cccccgctccctgtc

SEQ ID NO: 255468 - DNA, 15 bp, Homo sapiens
tcccccgctccctgt

SEQ ID NO: 255469 - DNA, 15 bp, Homo sapiens
atcccccgctccctg

SEQ ID NO: 255470 - DNA, 15 bp, Homo sapiens
catcccccgctccct

SEQ ID NO: 255471 - DNA, 15 bp, Homo sapiens
ccatcccccgctccc

SEQ ID NO: 255472 - DNA, 15 bp, Homo sapiens
cccatcccccgctcc

SEQ ID NO: 255473 - DNA, 15 bp, Homo sapiens
ccccatcccccgctc

SEQ ID NO: 255474 - DNA, 15 bp, Homo sapiens
cccccatcccccgct

SEQ ID NO: 255475 - DNA, 15 bp, Homo sapiens
tcccccatcccccgc

SEQ ID NO: 255476 - DNA, 15 bp, Homo sapiens
ttcccccatcccccg

SEQ ID NO: 255477 - DNA, 15 bp, Homo sapiens
attcccccatccccc

SEQ ID NO: 255478 - DNA, 15 bp, Homo sapiens
aattcccccatcccc

SEQ ID NO: 255479 - DNA, 15 bp, Homo sapiens
gaattcccccatccc

SEQ ID NO: 255480 - DNA, 15 bp, Homo sapiens
tgaattcccccatcc

SEQ ID NO: 255481 - DNA, 15 bp, Homo sapiens
ctgaattcccccatc

SEQ ID NO: 255482 - DNA, 15 bp, Homo sapiens
gctgaattcccccat

SEQ ID NO: 255483 - DNA, 15 bp, Homo sapiens
agctgaattccccca

SEQ ID NO: 255484 - DNA, 15 bp, Homo sapiens
gagctgaattccccc

SEQ ID NO: 255485 - DNA, 15 bp, Homo sapiens
tgagctgaattcccc

SEQ ID NO: 255486 - DNA, 15 bp, Homo sapiens
ctgagctgaattccc

SEQ ID NO: 255487 - DNA, 15 bp, Homo sapiens
cctgagctgaattcc

SEQ ID NO: 255488 - DNA, 15 bp, Homo sapiens
gcctgagctgaattc

SEQ ID NO: 255489 - DNA, 15 bp, Homo sapiens
agcctgagctgaatt

SEQ ID NO: 255490 - DNA, 15 bp, Homo sapiens
aagcctgagctgaat

SEQ ID NO: 255491 - DNA, 15 bp, Homo sapiens
aaagcctgagctgaa

SEQ ID NO: 255492 - DNA, 15 bp, Homo sapiens
aaaagcctgagctga

SEQ ID NO: 255493 - DNA, 15 bp, Homo sapiens
taaaagcctgagctg

SEQ ID NO: 255494 - DNA, 15 bp, Homo sapiens
ataaaagcctgagct

SEQ ID NO: 255495 - DNA, 15 bp, Homo sapiens
cataaaagcctgagc

SEQ ID NO: 255496 - DNA, 15 bp, Homo sapiens
gcataaaagcctgag

SEQ ID NO: 255497 - DNA, 15 bp, Homo sapiens
tgcataaaagcctga

SEQ ID NO: 255498 - DNA, 15 bp, Homo sapiens
ttgcataaaagcctg

SEQ ID NO: 255499 - DNA, 15 bp, Homo sapiens
tttgcataaaagcct

SEQ ID NO: 255500 - DNA, 15 bp, Homo sapiens
ctttgcataaaagcc

SEQ ID NO: 255501 - DNA, 15 bp, Homo sapiens
tctttgcataaaagc

SEQ ID NO: 255502 - DNA, 15 bp, Homo sapiens
gtctttgcataaaag

SEQ ID NO: 255503 - DNA, 15 bp, Homo sapiens
ggtctttgcataaaa

SEQ ID NO: 255504 - DNA, 15 bp, Homo sapiens
gggtctttgcataaa

SEQ ID NO: 255505 - DNA, 15 bp, Homo sapiens
ggggtctttgcataa

SEQ ID NO: 255506 - DNA, 15 bp, Homo sapiens
gggggtctttgcata

SEQ ID NO: 255507 - DNA, 15 bp, Homo sapiens
agggggtctttgcat

SEQ ID NO: 255508 - DNA, 15 bp, Homo sapiens
aagggggtctttgca

SEQ ID NO: 255509 - DNA, 15 bp, Homo sapiens
gaagggggtctttgc

SEQ ID NO: 255510 - DNA, 15 bp, Homo sapiens
agaagggggtctttg

SEQ ID NO: 255511 - DNA, 15 bp, Homo sapiens
cagaagggggtcttt

SEQ ID NO: 255512 - DNA, 15 bp, Homo sapiens
gcagaagggggtctt

SEQ ID NO: 255513 - DNA, 15 bp, Homo sapiens
tgcagaagggggtct

SEQ ID NO: 255514 - DNA, 15 bp, Homo sapiens
ttgcagaagggggtc

SEQ ID NO: 255515 - DNA, 15 bp, Homo sapiens
tttgcagaagggggt

SEQ ID NO: 255516 - DNA, 15 bp, Homo sapiens
ctttgcagaaggggg

SEQ ID NO: 255517 - DNA, 15 bp, Homo sapiens
tctttgcagaagggg

SEQ ID NO: 255518 - DNA, 15 bp, Homo sapiens
ttctttgcagaaggg

SEQ ID NO: 255519 - DNA, 15 bp, Homo sapiens
gttctttgcagaagg

SEQ ID NO: 255520 - DNA, 15 bp, Homo sapiens
tgttctttgcagaag

SEQ ID NO: 255521 - DNA, 15 bp, Homo sapiens
ttgttctttgcagaa

SEQ ID NO: 255522 - DNA, 15 bp, Homo sapiens
tttgttctttgcaga

SEQ ID NO: 255523 - DNA, 15 bp, Homo sapiens
ctttgttctttgcag

SEQ ID NO: 255524 - DNA, 15 bp, Homo sapiens
gctttgttctttgca

SEQ ID NO: 255525 - DNA, 15 bp, Homo sapiens
agctttgttctttgc

SEQ ID NO: 255526 - DNA, 15 bp, Homo sapiens
aagctttgttctttg

SEQ ID NO: 255527 - DNA, 15 bp, Homo sapiens
gaagctttgttcttt

SEQ ID NO: 255528 - DNA, 15 bp, Homo sapiens
agaagctttgttctt

SEQ ID NO: 255529 - DNA, 15 bp, Homo sapiens
cagaagctttgttct

SEQ ID NO: 255530 - DNA, 15 bp, Homo sapiens
ccagaagctttgttc

SEQ ID NO: 255531 - DNA, 15 bp, Homo sapiens
accagaagctttgtt

SEQ ID NO: 255532 - DNA, 15 bp, Homo sapiens
taccagaagctttgt

SEQ ID NO: 255533 - DNA, 15 bp, Homo sapiens
gtaccagaagctttg

SEQ ID NO: 255534 - DNA, 15 bp, Homo sapiens
ggtaccagaagcttt

SEQ ID NO: 255535 - DNA, 15 bp, Homo sapiens
aggtaccagaagctt

SEQ ID NO: 255536 - DNA, 15 bp, Homo sapiens
caggtaccagaagct

SEQ ID NO: 255537 - DNA, 15 bp, Homo sapiens
gcaggtaccagaagc

SEQ ID NO: 255538 - DNA, 15 bp, Homo sapiens
ggcaggtaccagaag

SEQ ID NO: 255539 - DNA, 15 bp, Homo sapiens
gggcaggtaccagaa

SEQ ID NO: 255540 - DNA, 15 bp, Homo sapiens
agggcaggtaccaga

SEQ ID NO: 255541 - DNA, 15 bp, Homo sapiens
aagggcaggtaccag

SEQ ID NO: 255542 - DNA, 15 bp, Homo sapiens
aaagggcaggtacca

SEQ ID NO: 255543 - DNA, 15 bp, Homo sapiens
caaagggcaggtacc

SEQ ID NO: 255544 - DNA, 15 bp, Homo sapiens
ccaaagggcaggtac

SEQ ID NO: 255545 - DNA, 15 bp, Homo sapiens
tccaaagggcaggta

SEQ ID NO: 255546 - DNA, 15 bp, Homo sapiens
ctccaaagggcaggt

SEQ ID NO: 255547 - DNA, 15 bp, Homo sapiens
tctccaaagggcagg

SEQ ID NO: 255548 - DNA, 15 bp, Homo sapiens
ctctccaaagggcag

SEQ ID NO: 255549 - DNA, 15 bp, Homo sapiens
gctctccaaagggca

SEQ ID NO: 255550 - DNA, 15 bp, Homo sapiens
agctctccaaagggc

SEQ ID NO: 255551 - DNA, 15 bp, Homo sapiens
cagctctccaaaggg

SEQ ID NO: 255552 - DNA, 15 bp, Homo sapiens
gcagctctccaaagg

SEQ ID NO: 255553 - DNA, 15 bp, Homo sapiens
cgcagctctccaaag

SEQ ID NO: 255554 - DNA, 15 bp, Homo sapiens
ccgcagctctccaaa

SEQ ID NO: 255555 - DNA, 15 bp, Homo sapiens
cccgcagctctccaa

SEQ ID NO: 255556 - DNA, 15 bp, Homo sapiens
gcccgcagctctcca

SEQ ID NO: 255557 - DNA, 15 bp, Homo sapiens
tgcccgcagctctcc

SEQ ID NO: 255558 - DNA, 15 bp, Homo sapiens
ttgcccgcagctctc

SEQ ID NO: 255559 - DNA, 15 bp, Homo sapiens
cttgcccgcagctct

SEQ ID NO: 255560 - DNA, 15 bp, Homo sapiens
gcttgcccgcagctc

SEQ ID NO: 255561 - DNA, 15 bp, Homo sapiens
agcttgcccgcagct

SEQ ID NO: 255562 - DNA, 15 bp, Homo sapiens
gagcttgcccgcagc

SEQ ID NO: 255563 - DNA, 15 bp, Homo sapiens
tgagcttgcccgcag

SEQ ID NO: 255564 - DNA, 15 bp, Homo sapiens
ctgagcttgcccgca

SEQ ID NO: 255565 - DNA, 15 bp, Homo sapiens
gctgagcttgcccgc

SEQ ID NO: 255566 - DNA, 15 bp, Homo sapiens
ggctgagcttgcccg

SEQ ID NO: 255567 - DNA, 15 bp, Homo sapiens
aggctgagcttgccc

SEQ ID NO: 255568 - DNA, 15 bp, Homo sapiens
gaggctgagcttgcc

SEQ ID NO: 255569 - DNA, 15 bp, Homo sapiens
cgaggctgagcttgc

SEQ ID NO: 255570 - DNA, 15 bp, Homo sapiens
ccgaggctgagcttg

SEQ ID NO: 255571 - DNA, 15 bp, Homo sapiens
accgaggctgagctt

SEQ ID NO: 255572 - DNA, 15 bp, Homo sapiens
caccgaggctgagct

SEQ ID NO: 255573 - DNA, 15 bp, Homo sapiens
tcaccgaggctgagc

SEQ ID NO: 255574 - DNA, 15 bp, Homo sapiens
ctcaccgaggctgag

SEQ ID NO: 255575 - DNA, 15 bp, Homo sapiens
actcaccgaggctga

SEQ ID NO: 255576 - DNA, 15 bp, Homo sapiens
gactcaccgaggctg

SEQ ID NO: 255577 - DNA, 15 bp, Homo sapiens
agactcaccgaggct

SEQ ID NO: 255578 - DNA, 15 bp, Homo sapiens
aagactcaccgaggc

SEQ ID NO: 255579 - DNA, 15 bp, Homo sapiens
caagactcaccgagg

SEQ ID NO: 255580 - DNA, 15 bp, Homo sapiens
ccaagactcaccgag

SEQ ID NO: 255581 - DNA, 15 bp, Homo sapiens
accaagactcaccga

SEQ ID NO: 255582 - DNA, 15 bp, Homo sapiens
caccaagactcaccg

SEQ ID NO: 255583 - DNA, 15 bp, Homo sapiens
ccaccaagactcacc

SEQ ID NO: 255584 - DNA, 15 bp, Homo sapiens
gccaccaagactcac

SEQ ID NO: 255585 - DNA, 15 bp, Homo sapiens
ggccaccaagactca

SEQ ID NO: 255586 - DNA, 15 bp, Homo sapiens
aggccaccaagactc

SEQ ID NO: 255587 - DNA, 15 bp, Homo sapiens
aaggccaccaagact

SEQ ID NO: 255588 - DNA, 15 bp, Homo sapiens
caaggccaccaagac

SEQ ID NO: 255589 - DNA, 15 bp, Homo sapiens
tcaaggccaccaaga

SEQ ID NO: 255590 - DNA, 15 bp, Homo sapiens
gtcaaggccaccaag

SEQ ID NO: 255591 - DNA, 15 bp, Homo sapiens
tgtcaaggccaccaa

SEQ ID NO: 255592 - DNA, 15 bp, Homo sapiens
ctgtcaaggccacca

SEQ ID NO: 255593 - DNA, 15 bp, Homo sapiens
gctgtcaaggccacc

SEQ ID NO: 255594 - DNA, 15 bp, Homo sapiens
ggctgtcaaggccac

SEQ ID NO: 255595 - DNA, 15 bp, Homo sapiens
gggctgtcaaggcca

SEQ ID NO: 255596 - DNA, 15 bp, Homo sapiens
ggggctgtcaaggcc

SEQ ID NO: 255597 - DNA, 15 bp, Homo sapiens
gggggctgtcaaggc

SEQ ID NO: 255598 - DNA, 15 bp, Homo sapiens
tgggggctgtcaagg

SEQ ID NO: 255599 - DNA, 15 bp, Homo sapiens
gtgggggctgtcaag

SEQ ID NO: 255600 - DNA, 15 bp, Homo sapiens
agtgggggctgtcaa

SEQ ID NO: 255601 - DNA, 15 bp, Homo sapiens
aagtgggggctgtca

SEQ ID NO: 255602 - DNA, 15 bp, Homo sapiens
taagtgggggctgtc

SEQ ID NO: 255603 - DNA, 15 bp, Homo sapiens
ttaagtgggggctgt

SEQ ID NO: 255604 - DNA, 15 bp, Homo sapiens
gttaagtgggggctg

SEQ ID NO: 255605 - DNA, 15 bp, Homo sapiens
tgttaagtgggggct

SEQ ID NO: 255606 - DNA, 15 bp, Homo sapiens
ttgttaagtgggggc

SEQ ID NO: 255607 - DNA, 15 bp, Homo sapiens
tttgttaagtggggg

SEQ ID NO: 255608 - DNA, 15 bp, Homo sapiens
gtttgttaagtgggg

SEQ ID NO: 255609 - DNA, 15 bp, Homo sapiens
agtttgttaagtggg

SEQ ID NO: 255610 - DNA, 15 bp, Homo sapiens
cagtttgttaagtgg

SEQ ID NO: 255611 - DNA, 15 bp, Homo sapiens
acagtttgttaagtg

SEQ ID NO: 255612 - DNA, 15 bp, Homo sapiens
cacagtttgttaagt

SEQ ID NO: 255613 - DNA, 15 bp, Homo sapiens
gcacagtttgttaag

SEQ ID NO: 255614 - DNA, 15 bp, Homo sapiens
agcacagtttgttaa

SEQ ID NO: 255615 - DNA, 15 bp, Homo sapiens
cagcacagtttgtta

SEQ ID NO: 255616 - DNA, 15 bp, Homo sapiens
tcagcacagtttgtt

SEQ ID NO: 255617 - DNA, 15 bp, Homo sapiens
atcagcacagtttgt

SEQ ID NO: 255618 - DNA, 15 bp, Homo sapiens
aatcagcacagtttg

SEQ ID NO: 255619 - DNA, 15 bp, Homo sapiens
taatcagcacagttt

SEQ ID NO: 255620 - DNA, 15 bp, Homo sapiens
ttaatcagcacagtt

SEQ ID NO: 255621 - DNA, 15 bp, Homo sapiens
cttaatcagcacagt

SEQ ID NO: 255622 - DNA, 15 bp, Homo sapiens
tcttaatcagcacag

SEQ ID NO: 255623 - DNA, 15 bp, Homo sapiens
ctcttaatcagcaca

SEQ ID NO: 255624 - DNA, 15 bp, Homo sapiens
tctcttaatcagcac

SEQ ID NO: 255625 - DNA, 15 bp, Homo sapiens
ctctcttaatcagca

SEQ ID NO: 255626 - DNA, 15 bp, Homo sapiens
tctctcttaatcagc

SEQ ID NO: 255627 - DNA, 15 bp, Homo sapiens
gtctctcttaatcag

SEQ ID NO: 255628 - DNA, 15 bp, Homo sapiens
tgtctctcttaatca

SEQ ID NO: 255629 - DNA, 15 bp, Homo sapiens
ctgtctctcttaatc

SEQ ID NO: 255630 - DNA, 15 bp, Homo sapiens
cctgtctctcttaat

SEQ ID NO: 255631 - DNA, 15 bp, Homo sapiens
tcctgtctctcttaa

SEQ ID NO: 255632 - DNA, 15 bp, Homo sapiens
ctcctgtctctctta

SEQ ID NO: 255633 - DNA, 15 bp, Homo sapiens
cctcctgtctctctt

SEQ ID NO: 255634 - DNA, 15 bp, Homo sapiens
ccctcctgtctctct

SEQ ID NO: 255635 - DNA, 15 bp, Homo sapiens
gccctcctgtctctc

SEQ ID NO: 255636 - DNA, 15 bp, Homo sapiens
tgccctcctgtctct

SEQ ID NO: 255637 - DNA, 15 bp, Homo sapiens
ttgccctcctgtctc

SEQ ID NO: 255638 - DNA, 15 bp, Homo sapiens
cttgccctcctgtct

SEQ ID NO: 255639 - DNA, 15 bp, Homo sapiens
acttgccctcctgtc

SEQ ID NO: 255640 - DNA, 15 bp, Homo sapiens
aacttgccctcctgt

SEQ ID NO: 255641 - DNA, 15 bp, Homo sapiens
aaacttgccctcctg

SEQ ID NO: 255642 - DNA, 15 bp, Homo sapiens
aaaacttgccctcct

SEQ ID NO: 255643 - DNA, 15 bp, Homo sapiens
aaaaacttgccctcc

SEQ ID NO: 255644 - DNA, 15 bp, Homo sapiens
gaaaaacttgccctc

SEQ ID NO: 255645 - DNA, 15 bp, Homo sapiens
ggaaaaacttgccct

SEQ ID NO: 255646 - DNA, 15 bp, Homo sapiens
gggaaaaacttgccc

SEQ ID NO: 255647 - DNA, 15 bp, Homo sapiens
agggaaaaacttgcc

SEQ ID NO: 255648 - DNA, 15 bp, Homo sapiens
aagggaaaaacttgc

SEQ ID NO: 255649 - DNA, 15 bp, Homo sapiens
gaagggaaaaacttg

SEQ ID NO: 255650 - DNA, 15 bp, Homo sapiens
agaagggaaaaactt

SEQ ID NO: 255651 - DNA, 15 bp, Homo sapiens
aagaagggaaaaact

SEQ ID NO: 255652 - DNA, 15 bp, Homo sapiens
aaagaagggaaaaac

SEQ ID NO: 255653 - DNA, 15 bp, Homo sapiens
aaaagaagggaaaaa

SEQ ID NO: 255654 - DNA, 15 bp, Homo sapiens
taaaagaagggaaaa

SEQ ID NO: 255655 - DNA, 15 bp, Homo sapiens
ttaaaagaagggaaa

SEQ ID NO: 255656 - DNA, 15 bp, Homo sapiens
tttaaaagaagggaa

SEQ ID NO: 255657 - DNA, 15 bp, Homo sapiens
ctttaaaagaaggga

SEQ ID NO: 255658 - DNA, 15 bp, Homo sapiens
tctttaaaagaaggg

SEQ ID NO: 255659 - DNA, 15 bp, Homo sapiens
ttctttaaaagaagg

SEQ ID NO: 255660 - DNA, 15 bp, Homo sapiens
tttctttaaaagaag

SEQ ID NO: 255661 - DNA, 15 bp, Homo sapiens
atttctttaaaagaa

SEQ ID NO: 255662 - DNA, 15 bp, Homo sapiens
gatttctttaaaaga

SEQ ID NO: 255663 - DNA, 15 bp, Homo sapiens
tgatttctttaaaag

SEQ ID NO: 255664 - DNA, 15 bp, Homo sapiens
atgatttctttaaaa

SEQ ID NO: 255665 - DNA, 15 bp, Homo sapiens
gatgatttctttaaa

SEQ ID NO: 255666 - DNA, 15 bp, Homo sapiens
ggatgatttctttaa

SEQ ID NO: 255667 - DNA, 15 bp, Homo sapiens
aggatgatttcttta

SEQ ID NO: 255668 - DNA, 15 bp, Homo sapiens
taggatgatttcttt

SEQ ID NO: 255669 - DNA, 15 bp, Homo sapiens
ataggatgatttctt

SEQ ID NO: 255670 - DNA, 15 bp, Homo sapiens
aataggatgatttct

SEQ ID NO: 255671 - DNA, 15 bp, Homo sapiens
aaataggatgatttc

SEQ ID NO: 255672 - DNA, 15 bp, Homo sapiens
gaaataggatgattt

SEQ ID NO: 255673 - DNA, 15 bp, Homo sapiens
ggaaataggatgatt

SEQ ID NO: 255674 - DNA, 15 bp, Homo sapiens
aggaaataggatgat

SEQ ID NO: 255675 - DNA, 15 bp, Homo sapiens
taggaaataggatga

SEQ ID NO: 255676 - DNA, 15 bp, Homo sapiens
gtaggaaataggatg

SEQ ID NO: 255677 - DNA, 15 bp, Homo sapiens
cgtaggaaataggat

SEQ ID NO: 255678 - DNA, 15 bp, Homo sapiens
tcgtaggaaatagga

SEQ ID NO: 255679 - DNA, 15 bp, Homo sapiens
ctcgtaggaaatagg

SEQ ID NO: 255680 - DNA, 15 bp, Homo sapiens
tctcgtaggaaatag

SEQ ID NO: 255681 - DNA, 15 bp, Homo sapiens
gtctcgtaggaaata

SEQ ID NO: 255682 - DNA, 15 bp, Homo sapiens
tgtctcgtaggaaat

SEQ ID NO: 255683 - DNA, 15 bp, Homo sapiens
atgtctcgtaggaaa

SEQ ID NO: 255684 - DNA, 15 bp, Homo sapiens
tatgtctcgtaggaa

SEQ ID NO: 255685 - DNA, 15 bp, Homo sapiens
ctatgtctcgtagga

SEQ ID NO: 255686 - DNA, 15 bp, Homo sapiens
tctatgtctcgtagg

SEQ ID NO: 255687 - DNA, 15 bp, Homo sapiens
gtctatgtctcgtag

SEQ ID NO: 255688 - DNA, 15 bp, Homo sapiens
agtctatgtctcgta

SEQ ID NO: 255689 - DNA, 15 bp, Homo sapiens
tagtctatgtctcgt

SEQ ID NO: 255690 - DNA, 15 bp, Homo sapiens
atagtctatgtctcg

SEQ ID NO: 255691 - DNA, 15 bp, Homo sapiens
gatagtctatgtctc

SEQ ID NO: 255692 - DNA, 15 bp, Homo sapiens
agatagtctatgtct

SEQ ID NO: 255693 - DNA, 15 bp, Homo sapiens
cagatagtctatgtc

SEQ ID NO: 255694 - DNA, 15 bp, Homo sapiens
gcagatagtctatgt

SEQ ID NO: 255695 - DNA, 15 bp, Homo sapiens
ggcagatagtctatg

SEQ ID NO: 255696 - DNA, 15 bp, Homo sapiens
aggcagatagtctat

SEQ ID NO: 255697 - DNA, 15 bp, Homo sapiens
caggcagatagtcta

SEQ ID NO: 255698 - DNA, 15 bp, Homo sapiens
tcaggcagatagtct

SEQ ID NO: 255699 - DNA, 15 bp, Homo sapiens
ttcaggcagatagtc

SEQ ID NO: 255700 - DNA, 15 bp, Homo sapiens
cttcaggcagatagt

SEQ ID NO: 255701 - DNA, 15 bp, Homo sapiens
gcttcaggcagatag

SEQ ID NO: 255702 - DNA, 15 bp, Homo sapiens
tgcttcaggcagata

SEQ ID NO: 255703 - DNA, 15 bp, Homo sapiens
atgcttcaggcagat

SEQ ID NO: 255704 - DNA, 15 bp, Homo sapiens
catgcttcaggcaga

SEQ ID NO: 255705 - DNA, 15 bp, Homo sapiens
tcatgcttcaggcag

SEQ ID NO: 255706 - DNA, 15 bp, Homo sapiens
atcatgcttcaggca

SEQ ID NO: 255707 - DNA, 15 bp, Homo sapiens
catcatgcttcaggc

SEQ ID NO: 255708 - DNA, 15 bp, Homo sapiens
acatcatgcttcagg

SEQ ID NO: 255709 - DNA, 15 bp, Homo sapiens
tacatcatgcttcag

SEQ ID NO: 255710 - DNA, 15 bp, Homo sapiens
gtacatcatgcttca

SEQ ID NO: 255711 - DNA, 15 bp, Homo sapiens
agtacatcatgcttc

SEQ ID NO: 255712 - DNA, 15 bp, Homo sapiens
tagtacatcatgctt

SEQ ID NO: 255713 - DNA, 15 bp, Homo sapiens
ctagtacatcatgct

SEQ ID NO: 255714 - DNA, 15 bp, Homo sapiens
gctagtacatcatgc

SEQ ID NO: 255715 - DNA, 15 bp, Homo sapiens
ggctagtacatcatg

SEQ ID NO: 255716 - DNA, 15 bp, Homo sapiens
gggctagtacatcat

SEQ ID NO: 255717 - DNA, 15 bp, Homo sapiens
ggggctagtacatca

SEQ ID NO: 255718 - DNA, 15 bp, Homo sapiens
tggggctagtacatc

SEQ ID NO: 255719 - DNA, 15 bp, Homo sapiens
gtggggctagtacat

SEQ ID NO: 255720 - DNA, 15 bp, Homo sapiens
agtggggctagtaca

SEQ ID NO: 255721 - DNA, 15 bp, Homo sapiens
gagtggggctagtac

SEQ ID NO: 255722 - DNA, 15 bp, Homo sapiens
tgagtggggctagta

SEQ ID NO: 255723 - DNA, 15 bp, Homo sapiens
gtgagtggggctagt

SEQ ID NO: 255724 - DNA, 15 bp, Homo sapiens
ggtgagtggggctag

SEQ ID NO: 255725 - DNA, 15 bp, Homo sapiens
cggtgagtggggcta

SEQ ID NO: 255726 - DNA, 15 bp, Homo sapiens
ccggtgagtggggct

SEQ ID NO: 255727 - DNA, 15 bp, Homo sapiens
gccggtgagtggggc

SEQ ID NO: 255728 - DNA, 15 bp, Homo sapiens
agccggtgagtgggg

SEQ ID NO: 255729 - DNA, 15 bp, Homo sapiens
gagccggtgagtggg

SEQ ID NO: 255730 - DNA, 15 bp, Homo sapiens
ggagccggtgagtgg

SEQ ID NO: 255731 - DNA, 15 bp, Homo sapiens
gggagccggtgagtg

SEQ ID NO: 255732 - DNA, 15 bp, Homo sapiens
agggagccggtgagt

SEQ ID NO: 255733 - DNA, 15 bp, Homo sapiens
cagggagccggtgag

SEQ ID NO: 255734 - DNA, 15 bp, Homo sapiens
tcagggagccggtga

SEQ ID NO: 255735 - DNA, 15 bp, Homo sapiens
atcagggagccggtg

SEQ ID NO: 255736 - DNA, 15 bp, Homo sapiens
catcagggagccggt

SEQ ID NO: 255737 - DNA, 15 bp, Homo sapiens
gcatcagggagccgg

SEQ ID NO: 255738 - DNA, 15 bp, Homo sapiens
ggcatcagggagccg

SEQ ID NO: 255739 - DNA, 15 bp, Homo sapiens
gggcatcagggagcc

SEQ ID NO: 255740 - DNA, 15 bp, Homo sapiens
ggggcatcagggagc

SEQ ID NO: 255741 - DNA, 15 bp, Homo sapiens
aggggcatcagggag

SEQ ID NO: 255742 - DNA, 15 bp, Homo sapiens
taggggcatcaggga

SEQ ID NO: 255743 - DNA, 15 bp, Homo sapiens
ataggggcatcaggg

SEQ ID NO: 255744 - DNA, 15 bp, Homo sapiens
cataggggcatcagg

SEQ ID NO: 255745 - DNA, 15 bp, Homo sapiens
gcataggggcatcag

SEQ ID NO: 255746 - DNA, 15 bp, Homo sapiens
agcataggggcatca

SEQ ID NO: 255747 - DNA, 15 bp, Homo sapiens
aagcataggggcatc

SEQ ID NO: 255748 - DNA, 15 bp, Homo sapiens
taagcataggggcat

SEQ ID NO: 255749 - DNA, 15 bp, Homo sapiens
ttaagcataggggca

SEQ ID NO: 255750 - DNA, 15 bp, Homo sapiens
attaagcataggggc

SEQ ID NO: 255751 - DNA, 15 bp, Homo sapiens
gattaagcatagggg

SEQ ID NO: 255752 - DNA, 15 bp, Homo sapiens
agattaagcataggg

SEQ ID NO: 255753 - DNA, 15 bp, Homo sapiens
aagattaagcatagg

SEQ ID NO: 255754 - DNA, 15 bp, Homo sapiens
gaagattaagcatag

SEQ ID NO: 255755 - DNA, 15 bp, Homo sapiens
agaagattaagcata

SEQ ID NO: 255756 - DNA, 15 bp, Homo sapiens
gagaagattaagcat

SEQ ID NO: 255757 - DNA, 15 bp, Homo sapiens
ggagaagattaagca

SEQ ID NO: 255758 - DNA, 15 bp, Homo sapiens
cggagaagattaagc

SEQ ID NO: 255759 - DNA, 15 bp, Homo sapiens
ccggagaagattaag

SEQ ID NO: 255760 - DNA, 15 bp, Homo sapiens
tccggagaagattaa

SEQ ID NO: 255761 - DNA, 15 bp, Homo sapiens
ttccggagaagatta

SEQ ID NO: 255762 - DNA, 15 bp, Homo sapiens
attccggagaagatt

SEQ ID NO: 255763 - DNA, 15 bp, Homo sapiens
cattccggagaagat

SEQ ID NO: 255764 - DNA, 15 bp, Homo sapiens
ccattccggagaaga

SEQ ID NO: 255765 - DNA, 15 bp, Homo sapiens
accattccggagaag

SEQ ID NO: 255766 - DNA, 15 bp, Homo sapiens
taccattccggagaa

SEQ ID NO: 255767 - DNA, 15 bp, Homo sapiens
ctaccattccggaga

SEQ ID NO: 255768 - DNA, 15 bp, Homo sapiens
actaccattccggag

SEQ ID NO: 255769 - DNA, 15 bp, Homo sapiens
gactaccattccgga

SEQ ID NO: 255770 - DNA, 15 bp, Homo sapiens
agactaccattccgg

SEQ ID NO: 255771 - DNA, 15 bp, Homo sapiens
cagactaccattccg

SEQ ID NO: 255772 - DNA, 15 bp, Homo sapiens
tcagactaccattcc

SEQ ID NO: 255773 - DNA, 15 bp, Homo sapiens
ctcagactaccattc

SEQ ID NO: 255774 - DNA, 15 bp, Homo sapiens
tctcagactaccatt

SEQ ID NO: 255775 - DNA, 15 bp, Homo sapiens
ttctcagactaccat

SEQ ID NO: 255776 - DNA, 15 bp, Homo sapiens
cttctcagactacca

SEQ ID NO: 255777 - DNA, 15 bp, Homo sapiens
tcttctcagactacc

SEQ ID NO: 255778 - DNA, 15 bp, Homo sapiens
ttcttctcagactac

SEQ ID NO: 255779 - DNA, 15 bp, Homo sapiens
tttcttctcagacta

SEQ ID NO: 255780 - DNA, 15 bp, Homo sapiens
ttttcttctcagact

SEQ ID NO: 255781 - DNA, 15 bp, Homo sapiens
tttttcttctcagac

SEQ ID NO: 255782 - DNA, 15 bp, Homo sapiens
ttttttcttctcaga

SEQ ID NO: 255783 - DNA, 15 bp, Homo sapiens
cttttttcttctcag

SEQ ID NO: 255784 - DNA, 15 bp, Homo sapiens
tcttttttcttctca

SEQ ID NO: 255785 - DNA, 15 bp, Homo sapiens
atcttttttcttctc

SEQ ID NO: 255786 - DNA, 15 bp, Homo sapiens
aatcttttttcttct

SEQ ID NO: 255787 - DNA, 15 bp, Homo sapiens
taatcttttttcttc

SEQ ID NO: 255788 - DNA, 15 bp, Homo sapiens
gtaatcttttttctt

SEQ ID NO: 255789 - DNA, 15 bp, Homo sapiens
cgtaatcttttttct

SEQ ID NO: 255790 - DNA, 15 bp, Homo sapiens
gcgtaatcttttttc

SEQ ID NO: 255791 - DNA, 15 bp, Homo sapiens
ggcgtaatctttttt

SEQ ID NO: 255792 - DNA, 15 bp, Homo sapiens
gggcgtaatcttttt

SEQ ID NO: 255793 - DNA, 15 bp, Homo sapiens
tgggcgtaatctttt

SEQ ID NO: 255794 - DNA, 15 bp, Homo sapiens
ttgggcgtaatcttt

SEQ ID NO: 255795 - DNA, 15 bp, Homo sapiens
attgggcgtaatctt

SEQ ID NO: 255796 - DNA, 15 bp, Homo sapiens
aattgggcgtaatct

SEQ ID NO: 255797 - DNA, 15 bp, Homo sapiens
aaattgggcgtaatc

SEQ ID NO: 255798 - DNA, 15 bp, Homo sapiens
gaaattgggcgtaat

SEQ ID NO: 255799 - DNA, 15 bp, Homo sapiens
tgaaattgggcgtaa

SEQ ID NO: 255800 - DNA, 15 bp, Homo sapiens
atgaaattgggcgta

SEQ ID NO: 255801 - DNA, 15 bp, Homo sapiens
aatgaaattgggcgt

SEQ ID NO: 255802 - DNA, 15 bp, Homo sapiens
aaatgaaattgggcg

SEQ ID NO: 255803 - DNA, 15 bp, Homo sapiens
gaaatgaaattgggc

SEQ ID NO: 255804 - DNA, 15 bp, Homo sapiens
ggaaatgaaattggg

SEQ ID NO: 255805 - DNA, 15 bp, Homo sapiens
aggaaatgaaattgg

SEQ ID NO: 255806 - DNA, 15 bp, Homo sapiens
aaggaaatgaaattg

SEQ ID NO: 255807 - DNA, 15 bp, Homo sapiens
caaggaaatgaaatt

SEQ ID NO: 255808 - DNA, 15 bp, Homo sapiens
acaaggaaatgaaat

SEQ ID NO: 255809 - DNA, 15 bp, Homo sapiens
aacaaggaaatgaaa

SEQ ID NO: 255810 - DNA, 15 bp, Homo sapiens
aaacaaggaaatgaa

SEQ ID NO: 255811 - DNA, 15 bp, Homo sapiens
gaaacaaggaaatga

SEQ ID NO: 255812 - DNA, 15 bp, Homo sapiens
tgaaacaaggaaatg

SEQ ID NO: 255813 - DNA, 15 bp, Homo sapiens
gtgaaacaaggaaat

SEQ ID NO: 255814 - DNA, 15 bp, Homo sapiens
tgtgaaacaaggaaa

SEQ ID NO: 255815 - DNA, 15 bp, Homo sapiens
atgtgaaacaaggaa

SEQ ID NO: 255816 - DNA, 15 bp, Homo sapiens
gatgtgaaacaagga

SEQ ID NO: 255817 - DNA, 15 bp, Homo sapiens
tgatgtgaaacaagg

SEQ ID NO: 255818 - DNA, 15 bp, Homo sapiens
ttgatgtgaaacaag

SEQ ID NO: 255819 - DNA, 15 bp, Homo sapiens
cttgatgtgaaacaa

SEQ ID NO: 255820 - DNA, 15 bp, Homo sapiens
gcttgatgtgaaaca

SEQ ID NO: 255821 - DNA, 15 bp, Homo sapiens
tgcttgatgtgaaac

SEQ ID NO: 255822 - DNA, 15 bp, Homo sapiens
ttgcttgatgtgaaa

SEQ ID NO: 255823 - DNA, 15 bp, Homo sapiens
attgcttgatgtgaa

SEQ ID NO: 255824 - DNA, 15 bp, Homo sapiens
tattgcttgatgtga

SEQ ID NO: 255825 - DNA, 15 bp, Homo sapiens
gtattgcttgatgtg

SEQ ID NO: 255826 - DNA, 15 bp, Homo sapiens
agtattgcttgatgt

SEQ ID NO: 255827 - DNA, 15 bp, Homo sapiens
aagtattgcttgatg

SEQ ID NO: 255828 - DNA, 15 bp, Homo sapiens
aaagtattgcttgat

SEQ ID NO: 255829 - DNA, 15 bp, Homo sapiens
aaaagtattgcttga

SEQ ID NO: 255830 - DNA, 15 bp, Homo sapiens
gaaaagtattgcttg

SEQ ID NO: 255831 - DNA, 15 bp, Homo sapiens
cgaaaagtattgctt

SEQ ID NO: 255832 - DNA, 15 bp, Homo sapiens
tcgaaaagtattgct

SEQ ID NO: 255833 - DNA, 15 bp, Homo sapiens
ctcgaaaagtattgc

SEQ ID NO: 255834 - DNA, 15 bp, Homo sapiens
actcgaaaagtattg

SEQ ID NO: 255835 - DNA, 15 bp, Homo sapiens
gactcgaaaagtatt

SEQ ID NO: 255836 - DNA, 15 bp, Homo sapiens
agactcgaaaagtat

SEQ ID NO: 255837 - DNA, 15 bp, Homo sapiens
aagactcgaaaagta

SEQ ID NO: 255838 - DNA, 15 bp, Homo sapiens
aaagactcgaaaagt

SEQ ID NO: 255839 - DNA, 15 bp, Homo sapiens
caaagactcgaaaag

SEQ ID NO: 255840 - DNA, 15 bp, Homo sapiens
gcaaagactcgaaaa

SEQ ID NO: 255841 - DNA, 15 bp, Homo sapiens
tgcaaagactcgaaa

SEQ ID NO: 255842 - DNA, 15 bp, Homo sapiens
atgcaaagactcgaa

SEQ ID NO: 255843 - DNA, 15 bp, Homo sapiens
aatgcaaagactcga

SEQ ID NO: 255844 - DNA, 15 bp, Homo sapiens
caatgcaaagactcg

SEQ ID NO: 255845 - DNA, 15 bp, Homo sapiens
acaatgcaaagactc

SEQ ID NO: 255846 - DNA, 15 bp, Homo sapiens
cacaatgcaaagact

SEQ ID NO: 255847 - DNA, 15 bp, Homo sapiens
tcacaatgcaaagac

SEQ ID NO: 255848 - DNA, 15 bp, Homo sapiens
ttcacaatgcaaaga

SEQ ID NO: 255849 - DNA, 15 bp, Homo sapiens
gttcacaatgcaaag

SEQ ID NO: 255850 - DNA, 15 bp, Homo sapiens
tgttcacaatgcaaa

SEQ ID NO: 255851 - DNA, 15 bp, Homo sapiens
ttgttcacaatgcaa

SEQ ID NO: 255852 - DNA, 15 bp, Homo sapiens
tttgttcacaatgca

SEQ ID NO: 255853 - DNA, 15 bp, Homo sapiens
ttttgttcacaatgc

SEQ ID NO: 255854 - DNA, 15 bp, Homo sapiens
cttttgttcacaatg

SEQ ID NO: 255855 - DNA, 15 bp, Homo sapiens
acttttgttcacaat

SEQ ID NO: 255856 - DNA, 15 bp, Homo sapiens
gacttttgttcacaa

SEQ ID NO: 255857 - DNA, 15 bp, Homo sapiens
tgacttttgttcaca

SEQ ID NO: 255858 - DNA, 15 bp, Homo sapiens
ctgacttttgttcac

SEQ ID NO: 255859 - DNA, 15 bp, Homo sapiens
gctgacttttgttca

SEQ ID NO: 255860 - DNA, 15 bp, Homo sapiens
agctgacttttgttc

SEQ ID NO: 255861 - DNA, 15 bp, Homo sapiens
aagctgacttttgtt

SEQ ID NO: 255862 - DNA, 15 bp, Homo sapiens
caagctgacttttgt

SEQ ID NO: 255863 - DNA, 15 bp, Homo sapiens
acaagctgacttttg

SEQ ID NO: 255864 - DNA, 15 bp, Homo sapiens
cacaagctgactttt

SEQ ID NO: 255865 - DNA, 15 bp, Homo sapiens
acacaagctgacttt

SEQ ID NO: 255866 - DNA, 15 bp, Homo sapiens
cacacaagctgactt

SEQ ID NO: 255867 - DNA, 15 bp, Homo sapiens
ccacacaagctgact

SEQ ID NO: 255868 - DNA, 15 bp, Homo sapiens
cccacacaagctgac

SEQ ID NO: 255869 - DNA, 15 bp, Homo sapiens
tcccacacaagctga

SEQ ID NO: 255870 - DNA, 15 bp, Homo sapiens
ctcccacacaagctg

SEQ ID NO: 255871 - DNA, 15 bp, Homo sapiens
gctcccacacaagct

SEQ ID NO: 255872 - DNA, 15 bp, Homo sapiens
tgctcccacacaagc

SEQ ID NO: 255873 - DNA, 15 bp, Homo sapiens
ttgctcccacacaag

SEQ ID NO: 255874 - DNA, 15 bp, Homo sapiens
tttgctcccacacaa

SEQ ID NO: 255875 - DNA, 15 bp, Homo sapiens
ctttgctcccacaca

SEQ ID NO: 255876 - DNA, 15 bp, Homo sapiens
gctttgctcccacac

SEQ ID NO: 255877 - DNA, 15 bp, Homo sapiens
ggctttgctcccaca

SEQ ID NO: 255878 - DNA, 15 bp, Homo sapiens
tggctttgctcccac

SEQ ID NO: 255879 - DNA, 15 bp, Homo sapiens
ctggctttgctccca

SEQ ID NO: 255880 - DNA, 15 bp, Homo sapiens
gctggctttgctccc

SEQ ID NO: 255881 - DNA, 15 bp, Homo sapiens
agctggctttgctcc

SEQ ID NO: 255882 - DNA, 15 bp, Homo sapiens
cagctggctttgctc

SEQ ID NO: 255883 - DNA, 15 bp, Homo sapiens
gcagctggctttgct

SEQ ID NO: 255884 - DNA, 15 bp, Homo sapiens
agcagctggctttgc

SEQ ID NO: 255885 - DNA, 15 bp, Homo sapiens
gagcagctggctttg

SEQ ID NO: 255886 - DNA, 15 bp, Homo sapiens
agagcagctggcttt

SEQ ID NO: 255887 - DNA, 15 bp, Homo sapiens
cagagcagctggctt

SEQ ID NO: 255888 - DNA, 15 bp, Homo sapiens
ccagagcagctggct

SEQ ID NO: 255889 - DNA, 15 bp, Homo sapiens
cccagagcagctggc

SEQ ID NO: 255890 - DNA, 15 bp, Homo sapiens
acccagagcagctgg

SEQ ID NO: 255891 - DNA, 15 bp, Homo sapiens
cacccagagcagctg

SEQ ID NO: 255892 - DNA, 15 bp, Homo sapiens
gcacccagagcagct

SEQ ID NO: 255893 - DNA, 15 bp, Homo sapiens
tgcacccagagcagc

SEQ ID NO: 255894 - DNA, 15 bp, Homo sapiens
ctgcacccagagcag

SEQ ID NO: 255895 - DNA, 15 bp, Homo sapiens
tctgcacccagagca

SEQ ID NO: 255896 - DNA, 15 bp, Homo sapiens
gtctgcacccagagc

SEQ ID NO: 255897 - DNA, 15 bp, Homo sapiens
ggtctgcacccagag

SEQ ID NO: 255898 - DNA, 15 bp, Homo sapiens
gggtctgcacccaga

SEQ ID NO: 255899 - DNA, 15 bp, Homo sapiens
tgggtctgcacccag

SEQ ID NO: 255900 - DNA, 15 bp, Homo sapiens
ctgggtctgcaccca

SEQ ID NO: 255901 - DNA, 15 bp, Homo sapiens
cctgggtctgcaccc

SEQ ID NO: 255902 - DNA, 15 bp, Homo sapiens
tcctgggtctgcacc

SEQ ID NO: 255903 - DNA, 15 bp, Homo sapiens
ctcctgggtctgcac

SEQ ID NO: 255904 - DNA, 15 bp, Homo sapiens
gctcctgggtctgca

SEQ ID NO: 255905 - DNA, 15 bp, Homo sapiens
tgctcctgggtctgc

SEQ ID NO: 255906 - DNA, 15 bp, Homo sapiens
ctgctcctgggtctg

SEQ ID NO: 255907 - DNA, 15 bp, Homo sapiens
tctgctcctgggtct

SEQ ID NO: 255908 - DNA, 15 bp, Homo sapiens
ctctgctcctgggtc

SEQ ID NO: 255909 - DNA, 15 bp, Homo sapiens
actctgctcctgggt

SEQ ID NO: 255910 - DNA, 15 bp, Homo sapiens
cactctgctcctggg

SEQ ID NO: 255911 - DNA, 15 bp, Homo sapiens
gcactctgctcctgg

SEQ ID NO: 255912 - DNA, 15 bp, Homo sapiens
tgcactctgctcctg

SEQ ID NO: 255913 - DNA, 15 bp, Homo sapiens
ctgcactctgctcct

SEQ ID NO: 255914 - DNA, 15 bp, Homo sapiens
tctgcactctgctcc

SEQ ID NO: 255915 - DNA, 15 bp, Homo sapiens
ctctgcactctgctc

SEQ ID NO: 255916 - DNA, 15 bp, Homo sapiens
cctctgcactctgct

SEQ ID NO: 255917 - DNA, 15 bp, Homo sapiens
tcctctgcactctgc

SEQ ID NO: 255918 - DNA, 15 bp, Homo sapiens
ctcctctgcactctg

SEQ ID NO: 255919 - DNA, 15 bp, Homo sapiens
tctcctctgcactct

SEQ ID NO: 255920 - DNA, 15 bp, Homo sapiens
ttctcctctgcactc

SEQ ID NO: 255921 - DNA, 15 bp, Homo sapiens
attctcctctgcact

SEQ ID NO: 255922 - DNA, 15 bp, Homo sapiens
cattctcctctgcac

SEQ ID NO: 255923 - DNA, 15 bp, Homo sapiens
tcattctcctctgca

SEQ ID NO: 255924 - DNA, 15 bp, Homo sapiens
ctcattctcctctgc

SEQ ID NO: 255925 - DNA, 15 bp, Homo sapiens
actcattctcctctg

SEQ ID NO: 255926 - DNA, 15 bp, Homo sapiens
gactcattctcctct

SEQ ID NO: 255927 - DNA, 15 bp, Homo sapiens
tgactcattctcctc

SEQ ID NO: 255928 - DNA, 15 bp, Homo sapiens
ttgactcattctcct

SEQ ID NO: 255929 - DNA, 15 bp, Homo sapiens
tttgactcattctcc

SEQ ID NO: 255930 - DNA, 15 bp, Homo sapiens
ctttgactcattctc

SEQ ID NO: 255931 - DNA, 15 bp, Homo sapiens
tctttgactcattct

SEQ ID NO: 255932 - DNA, 15 bp, Homo sapiens
ctctttgactcattc

SEQ ID NO: 255933 - DNA, 15 bp, Homo sapiens
actctttgactcatt

SEQ ID NO: 255934 - DNA, 15 bp, Homo sapiens
aactctttgactcat

SEQ ID NO: 255935 - DNA, 15 bp, Homo sapiens
aaactctttgactca

SEQ ID NO: 255936 - DNA, 15 bp, Homo sapiens
aaaactctttgactc

SEQ ID NO: 255937 - DNA, 15 bp, Homo sapiens
caaaactctttgact

SEQ ID NO: 255938 - DNA, 15 bp, Homo sapiens
acaaaactctttgac

SEQ ID NO: 255939 - DNA, 15 bp, Homo sapiens
gacaaaactctttga

SEQ ID NO: 255940 - DNA, 15 bp, Homo sapiens
agacaaaactctttg

SEQ ID NO: 255941 - DNA, 15 bp, Homo sapiens
aagacaaaactcttt

SEQ ID NO: 255942 - DNA, 15 bp, Homo sapiens
gaagacaaaactctt

SEQ ID NO: 255943 - DNA, 15 bp, Homo sapiens
tgaagacaaaactct

SEQ ID NO: 255944 - DNA, 15 bp, Homo sapiens
ttgaagacaaaactc

SEQ ID NO: 255945 - DNA, 15 bp, Homo sapiens
tttgaagacaaaact

SEQ ID NO: 255946 - DNA, 15 bp, Homo sapiens
ttttgaagacaaaac

SEQ ID NO: 255947 - DNA, 15 bp, Homo sapiens
tttttgaagacaaaa

SEQ ID NO: 255948 - DNA, 15 bp, Homo sapiens
atttttgaagacaaa

SEQ ID NO: 255949 - DNA, 15 bp, Homo sapiens
aatttttgaagacaa

SEQ ID NO: 255950 - DNA, 15 bp, Homo sapiens
taatttttgaagaca

SEQ ID NO: 255951 - DNA, 15 bp, Homo sapiens
gtaatttttgaagac

SEQ ID NO: 255952 - DNA, 15 bp, Homo sapiens
tgtaatttttgaaga

SEQ ID NO: 255953 - DNA, 15 bp, Homo sapiens
atgtaatttttgaag

SEQ ID NO: 255954 - DNA, 15 bp, Homo sapiens
tatgtaatttttgaa

SEQ ID NO: 255955 - DNA, 15 bp, Homo sapiens
ttatgtaatttttga

SEQ ID NO: 255956 - DNA, 15 bp, Homo sapiens
attatgtaatttttg

SEQ ID NO: 255957 - DNA, 15 bp, Homo sapiens
gattatgtaattttt

SEQ ID NO: 255958 - DNA, 15 bp, Homo sapiens
cgattatgtaatttt

SEQ ID NO: 255959 - DNA, 15 bp, Homo sapiens
ccgattatgtaattt

SEQ ID NO: 255960 - DNA, 15 bp, Homo sapiens
cccgattatgtaatt

SEQ ID NO: 255961 - DNA, 15 bp, Homo sapiens
tcccgattatgtaat

SEQ ID NO: 255962 - DNA, 15 bp, Homo sapiens
atcccgattatgtaa

SEQ ID NO: 255963 - DNA, 15 bp, Homo sapiens
aatcccgattatgta

SEQ ID NO: 255964 - DNA, 15 bp, Homo sapiens
aaatcccgattatgt

SEQ ID NO: 255965 - DNA, 15 bp, Homo sapiens
caaatcccgattatg

SEQ ID NO: 255966 - DNA, 15 bp, Homo sapiens
gcaaatcccgattat

SEQ ID NO: 255967 - DNA, 15 bp, Homo sapiens
agcaaatcccgatta

SEQ ID NO: 255968 - DNA, 15 bp, Homo sapiens
tagcaaatcccgatt

SEQ ID NO: 255969 - DNA, 15 bp, Homo sapiens
ttagcaaatcccgat

SEQ ID NO: 255970 - DNA, 15 bp, Homo sapiens
cttagcaaatcccga

SEQ ID NO: 255971 - DNA, 15 bp, Homo sapiens
tcttagcaaatcccg

SEQ ID NO: 255972 - DNA, 15 bp, Homo sapiens
ctcttagcaaatccc

SEQ ID NO: 255973 - DNA, 15 bp, Homo sapiens
actcttagcaaatcc

SEQ ID NO: 255974 - DNA, 15 bp, Homo sapiens
aactcttagcaaatc

SEQ ID NO: 255975 - DNA, 15 bp, Homo sapiens
aaactcttagcaaat

SEQ ID NO: 255976 - DNA, 15 bp, Homo sapiens
taaactcttagcaaa

SEQ ID NO: 255977 - DNA, 15 bp, Homo sapiens
gtaaactcttagcaa

SEQ ID NO: 255978 - DNA, 15 bp, Homo sapiens
agtaaactcttagca

SEQ ID NO: 255979 - DNA, 15 bp, Homo sapiens
aagtaaactcttagc

SEQ ID NO: 255980 - DNA, 15 bp, Homo sapiens
aaagtaaactcttag

SEQ ID NO: 255981 - DNA, 15 bp, Homo sapiens
aaaagtaaactctta

SEQ ID NO: 255982 - DNA, 15 bp, Homo sapiens
gaaaagtaaactctt

SEQ ID NO: 255983 - DNA, 15 bp, Homo sapiens
cgaaaagtaaactct

SEQ ID NO: 255984 - DNA, 15 bp, Homo sapiens
ccgaaaagtaaactc

SEQ ID NO: 255985 - DNA, 15 bp, Homo sapiens
accgaaaagtaaact

SEQ ID NO: 255986 - DNA, 15 bp, Homo sapiens
taccgaaaagtaaac

SEQ ID NO: 255987 - DNA, 15 bp, Homo sapiens
ataccgaaaagtaaa

SEQ ID NO: 255988 - DNA, 15 bp, Homo sapiens
cataccgaaaagtaa

SEQ ID NO: 255989 - DNA, 15 bp, Homo sapiens
ccataccgaaaagta

SEQ ID NO: 255990 - DNA, 15 bp, Homo sapiens
tccataccgaaaagt

SEQ ID NO: 255991 - DNA, 15 bp, Homo sapiens
ttccataccgaaaag

SEQ ID NO: 255992 - DNA, 15 bp, Homo sapiens
cttccataccgaaaa

SEQ ID NO: 255993 - DNA, 15 bp, Homo sapiens
tcttccataccgaaa

SEQ ID NO: 255994 - DNA, 15 bp, Homo sapiens
gtcttccataccgaa

SEQ ID NO: 255995 - DNA, 15 bp, Homo sapiens
agtcttccataccga

SEQ ID NO: 255996 - DNA, 15 bp, Homo sapiens
cagtcttccataccg

SEQ ID NO: 255997 - DNA, 15 bp, Homo sapiens
ccagtcttccatacc

SEQ ID NO: 255998 - DNA, 15 bp, Homo sapiens
tccagtcttccatac

SEQ ID NO: 255999 - DNA, 15 bp, Homo sapiens
ttccagtcttccata

SEQ ID NO: 256000 - DNA, 15 bp, Homo sapiens
tttccagtcttccat

SEQ ID NO: 256001 - DNA, 15 bp, Homo sapiens
ttttccagtcttcca

SEQ ID NO: 256002 - DNA, 15 bp, Homo sapiens
cttttccagtcttcc

SEQ ID NO: 256003 - DNA, 15 bp, Homo sapiens
tcttttccagtcttc

SEQ ID NO: 256004 - DNA, 15 bp, Homo sapiens
ctcttttccagtctt

SEQ ID NO: 256005 - DNA, 15 bp, Homo sapiens
tctcttttccagtct

SEQ ID NO: 256006 - DNA, 15 bp, Homo sapiens
ttctcttttccagtc

SEQ ID NO: 256007 - DNA, 15 bp, Homo sapiens
tttctcttttccagt

SEQ ID NO: 256008 - DNA, 15 bp, Homo sapiens
ctttctcttttccag

SEQ ID NO: 256009 - DNA, 15 bp, Homo sapiens
tctttctcttttcca

SEQ ID NO: 256010 - DNA, 15 bp, Homo sapiens
ttctttctcttttcc

SEQ ID NO: 256011 - DNA, 15 bp, Homo sapiens
tttctttctcttttc

SEQ ID NO: 256012 - DNA, 15 bp, Homo sapiens
atttctttctctttt

SEQ ID NO: 256013 - DNA, 15 bp, Homo sapiens
gatttctttctcttt

SEQ ID NO: 256014 - DNA, 15 bp, Homo sapiens
agatttctttctctt

SEQ ID NO: 256015 - DNA, 15 bp, Homo sapiens
aagatttctttctct

SEQ ID NO: 256016 - DNA, 15 bp, Homo sapiens
taagatttctttctc

SEQ ID NO: 256017 - DNA, 15 bp, Homo sapiens
ctaagatttctttct

SEQ ID NO: 256018 - DNA, 15 bp, Homo sapiens
cctaagatttctttc

SEQ ID NO: 256019 - DNA, 15 bp, Homo sapiens
acctaagatttcttt

SEQ ID NO: 256020 - DNA, 15 bp, Homo sapiens
aacctaagatttctt

SEQ ID NO: 256021 - DNA, 15 bp, Homo sapiens
aaacctaagatttct

SEQ ID NO: 256022 - DNA, 15 bp, Homo sapiens
gaaacctaagatttc

SEQ ID NO: 256023 - DNA, 15 bp, Homo sapiens
agaaacctaagattt

SEQ ID NO: 256024 - DNA, 15 bp, Homo sapiens
aagaaacctaagatt

SEQ ID NO: 256025 - DNA, 15 bp, Homo sapiens
caagaaacctaagat

SEQ ID NO: 256026 - DNA, 15 bp, Homo sapiens
tcaagaaacctaaga

SEQ ID NO: 256027 - DNA, 15 bp, Homo sapiens
ttcaagaaacctaag

SEQ ID NO: 256028 - DNA, 15 bp, Homo sapiens
attcaagaaacctaa

SEQ ID NO: 256029 - DNA, 15 bp, Homo sapiens
cattcaagaaaccta

SEQ ID NO: 256030 - DNA, 15 bp, Homo sapiens
acattcaagaaacct

SEQ ID NO: 256031 - DNA, 15 bp, Homo sapiens
aacattcaagaaacc

SEQ ID NO: 256032 - DNA, 15 bp, Homo sapiens
caacattcaagaaac

SEQ ID NO: 256033 - DNA, 15 bp, Homo sapiens
ccaacattcaagaaa

SEQ ID NO: 256034 - DNA, 15 bp, Homo sapiens
cccaacattcaagaa

SEQ ID NO: 256035 - DNA, 15 bp, Homo sapiens
acccaacattcaaga

SEQ ID NO: 256036 - DNA, 15 bp, Homo sapiens
aacccaacattcaag

SEQ ID NO: 256037 - DNA, 15 bp, Homo sapiens
aaacccaacattcaa

SEQ ID NO: 256038 - DNA, 15 bp, Homo sapiens
caaacccaacattca

SEQ ID NO: 256039 - DNA, 15 bp, Homo sapiens
ccaaacccaacattc

SEQ ID NO: 256040 - DNA, 15 bp, Homo sapiens
cccaaacccaacatt

SEQ ID NO: 256041 - DNA, 15 bp, Homo sapiens
tcccaaacccaacat

SEQ ID NO: 256042 - DNA, 15 bp, Homo sapiens
ttcccaaacccaaca

SEQ ID NO: 256043 - DNA, 15 bp, Homo sapiens
attcccaaacccaac

SEQ ID NO: 256044 - DNA, 15 bp, Homo sapiens
tattcccaaacccaa

SEQ ID NO: 256045 - DNA, 15 bp, Homo sapiens
ctattcccaaaccca

SEQ ID NO: 256046 - DNA, 15 bp, Homo sapiens
cctattcccaaaccc

SEQ ID NO: 256047 - DNA, 15 bp, Homo sapiens
tcctattcccaaacc

SEQ ID NO: 256048 - DNA, 15 bp, Homo sapiens
ttcctattcccaaac

SEQ ID NO: 256049 - DNA, 15 bp, Homo sapiens
cttcctattcccaaa

SEQ ID NO: 256050 - DNA, 15 bp, Homo sapiens
ccttcctattcccaa

SEQ ID NO: 256051 - DNA, 15 bp, Homo sapiens
tccttcctattccca

SEQ ID NO: 256052 - DNA, 15 bp, Homo sapiens
ttccttcctattccc

SEQ ID NO: 256053 - DNA, 15 bp, Homo sapiens
tttccttcctattcc

SEQ ID NO: 256054 - DNA, 15 bp, Homo sapiens
ttttccttcctattc

SEQ ID NO: 256055 - DNA, 15 bp, Homo sapiens
attttccttcctatt

SEQ ID NO: 256056 - DNA, 15 bp, Homo sapiens
gattttccttcctat

SEQ ID NO: 256057 - DNA, 15 bp, Homo sapiens
cgattttccttccta

SEQ ID NO: 256058 - DNA, 15 bp, Homo sapiens
tcgattttccttcct

SEQ ID NO: 256059 - DNA, 15 bp, Homo sapiens
ttcgattttccttcc

SEQ ID NO: 256060 - DNA, 15 bp, Homo sapiens
tttcgattttccttc

SEQ ID NO: 256061 - DNA, 15 bp, Homo sapiens
ttttcgattttcctt

SEQ ID NO: 256062 - DNA, 15 bp, Homo sapiens
gttttcgattttcct

SEQ ID NO: 256063 - DNA, 15 bp, Homo sapiens
agttttcgattttcc

SEQ ID NO: 256064 - DNA, 15 bp, Homo sapiens
cagttttcgattttc

SEQ ID NO: 256065 - DNA, 15 bp, Homo sapiens
acagttttcgatttt

SEQ ID NO: 256066 - DNA, 15 bp, Homo sapiens
tacagttttcgattt

SEQ ID NO: 256067 - DNA, 15 bp, Homo sapiens
ctacagttttcgatt

SEQ ID NO: 256068 - DNA, 15 bp, Homo sapiens
tctacagttttcgat

SEQ ID NO: 256069 - DNA, 15 bp, Homo sapiens
gtctacagttttcga

SEQ ID NO: 256070 - DNA, 15 bp, Homo sapiens
agtctacagttttcg

SEQ ID NO: 256071 - DNA, 15 bp, Homo sapiens
aagtctacagttttc

SEQ ID NO: 256072 - DNA, 15 bp, Homo sapiens
aaagtctacagtttt

SEQ ID NO: 256073 - DNA, 15 bp, Homo sapiens
caaagtctacagttt

SEQ ID NO: 256074 - DNA, 15 bp, Homo sapiens
acaaagtctacagtt

SEQ ID NO: 256075 - DNA, 15 bp, Homo sapiens
gacaaagtctacagt

SEQ ID NO: 256076 - DNA, 15 bp, Homo sapiens
ggacaaagtctacag

SEQ ID NO: 256077 - DNA, 15 bp, Homo sapiens
tggacaaagtctaca

SEQ ID NO: 256078 - DNA, 15 bp, Homo sapiens
atggacaaagtctac

SEQ ID NO: 256079 - DNA, 15 bp, Homo sapiens
tatggacaaagtcta

SEQ ID NO: 256080 - DNA, 15 bp, Homo sapiens
ttatggacaaagtct

SEQ ID NO: 256081 - DNA, 15 bp, Homo sapiens
tttatggacaaagtc

SEQ ID NO: 256082 - DNA, 15 bp, Homo sapiens
atttatggacaaagt

SEQ ID NO: 256083 - DNA, 15 bp, Homo sapiens
catttatggacaaag

SEQ ID NO: 256084 - DNA, 15 bp, Homo sapiens
acatttatggacaaa

SEQ ID NO: 256085 - DNA, 15 bp, Homo sapiens
aacatttatggacaa

SEQ ID NO: 256086 - DNA, 15 bp, Homo sapiens
taacatttatggaca

SEQ ID NO: 256087 - DNA, 15 bp, Homo sapiens
ctaacatttatggac

SEQ ID NO: 256088 - DNA, 15 bp, Homo sapiens
actaacatttatgga

SEQ ID NO: 256089 - DNA, 15 bp, Homo sapiens
cactaacatttatgg

SEQ ID NO: 256090 - DNA, 15 bp, Homo sapiens
gcactaacatttatg

SEQ ID NO: 256091 - DNA, 15 bp, Homo sapiens
agcactaacatttat

SEQ ID NO: 256092 - DNA, 15 bp, Homo sapiens
cagcactaacattta

SEQ ID NO: 256093 - DNA, 15 bp, Homo sapiens
ccagcactaacattt

SEQ ID NO: 256094 - DNA, 15 bp, Homo sapiens
tccagcactaacatt

SEQ ID NO: 256095 - DNA, 15 bp, Homo sapiens
ttccagcactaacat

SEQ ID NO: 256096 - DNA, 15 bp, Homo sapiens
gttccagcactaaca

SEQ ID NO: 256097 - DNA, 15 bp, Homo sapiens
ggttccagcactaac

SEQ ID NO: 256098 - DNA, 15 bp, Homo sapiens
gggttccagcactaa

SEQ ID NO: 256099 - DNA, 15 bp, Homo sapiens
ggggttccagcacta

SEQ ID NO: 256100 - DNA, 15 bp, Homo sapiens
tggggttccagcact

SEQ ID NO: 256101 - DNA, 15 bp, Homo sapiens
gtggggttccagcac

SEQ ID NO: 256102 - DNA, 15 bp, Homo sapiens
agtggggttccagca

SEQ ID NO: 256103 - DNA, 15 bp, Homo sapiens
gagtggggttccagc

SEQ ID NO: 256104 - DNA, 15 bp, Homo sapiens
agagtggggttccag

SEQ ID NO: 256105 - DNA, 15 bp, Homo sapiens
tagagtggggttcca

SEQ ID NO: 256106 - DNA, 15 bp, Homo sapiens
ttagagtggggttcc

SEQ ID NO: 256107 - DNA, 15 bp, Homo sapiens
tttagagtggggttc

SEQ ID NO: 256108 - DNA, 15 bp, Homo sapiens
ttttagagtggggtt

SEQ ID NO: 256109 - DNA, 15 bp, Homo sapiens
tttttagagtggggt

SEQ ID NO: 256110 - DNA, 15 bp, Homo sapiens
gtttttagagtgggg

SEQ ID NO: 256111 - DNA, 15 bp, Homo sapiens
agtttttagagtggg

SEQ ID NO: 256112 - DNA, 15 bp, Homo sapiens
aagtttttagagtgg

SEQ ID NO: 256113 - DNA, 15 bp, Homo sapiens
aaagtttttagagtg

SEQ ID NO: 256114 - DNA, 15 bp, Homo sapiens
caaagtttttagagt

SEQ ID NO: 256115 - DNA, 15 bp, Homo sapiens
acaaagtttttagag

SEQ ID NO: 256116 - DNA, 15 bp, Homo sapiens
aacaaagtttttaga

SEQ ID NO: 256117 - DNA, 15 bp, Homo sapiens
gaacaaagtttttag

SEQ ID NO: 256118 - DNA, 15 bp, Homo sapiens
ggaacaaagttttta

SEQ ID NO: 256119 - DNA, 15 bp, Homo sapiens
aggaacaaagttttt

SEQ ID NO: 256120 - DNA, 15 bp, Homo sapiens
aaggaacaaagtttt

SEQ ID NO: 256121 - DNA, 15 bp, Homo sapiens
aaaggaacaaagttt

SEQ ID NO: 256122 - DNA, 15 bp, Homo sapiens
caaaggaacaaagtt

SEQ ID NO: 256123 - DNA, 15 bp, Homo sapiens
ccaaaggaacaaagt

SEQ ID NO: 256124 - DNA, 15 bp, Homo sapiens
tccaaaggaacaaag

SEQ ID NO: 256125 - DNA, 15 bp, Homo sapiens
ttccaaaggaacaaa

SEQ ID NO: 256126 - DNA, 15 bp, Homo sapiens
tttccaaaggaacaa

SEQ ID NO: 256127 - DNA, 15 bp, Homo sapiens
ttttccaaaggaaca

SEQ ID NO: 256128 - DNA, 15 bp, Homo sapiens
gttttccaaaggaac

SEQ ID NO: 256129 - DNA, 15 bp, Homo sapiens
tgttttccaaaggaa

SEQ ID NO: 256130 - DNA, 15 bp, Homo sapiens
gtgttttccaaagga

SEQ ID NO: 256131 - DNA, 15 bp, Homo sapiens
ggtgttttccaaagg

SEQ ID NO: 256132 - DNA, 15 bp, Homo sapiens
aggtgttttccaaag

SEQ ID NO: 256133 - DNA, 15 bp, Homo sapiens
gaggtgttttccaaa

SEQ ID NO: 256134 - DNA, 15 bp, Homo sapiens
ggaggtgttttccaa

SEQ ID NO: 256135 - DNA, 15 bp, Homo sapiens
gggaggtgttttcca

SEQ ID NO: 256136 - DNA, 15 bp, Homo sapiens
agggaggtgttttcc

SEQ ID NO: 256137 - DNA, 15 bp, Homo sapiens
aagggaggtgttttc

SEQ ID NO: 256138 - DNA, 15 bp, Homo sapiens
gaagggaggtgtttt

SEQ ID NO: 256139 - DNA, 15 bp, Homo sapiens
ggaagggaggtgttt

SEQ ID NO: 256140 - DNA, 15 bp, Homo sapiens
gggaagggaggtgtt

SEQ ID NO: 256141 - DNA, 15 bp, Homo sapiens
ggggaagggaggtgt

SEQ ID NO: 256142 - DNA, 15 bp, Homo sapiens
gggggaagggaggtg

SEQ ID NO: 256143 - DNA, 15 bp, Homo sapiens
tgggggaagggaggt

SEQ ID NO: 256144 - DNA, 15 bp, Homo sapiens
ctgggggaagggagg

SEQ ID NO: 256145 - DNA, 15 bp, Homo sapiens
tctgggggaagggag

SEQ ID NO: 256146 - DNA, 15 bp, Homo sapiens
ttctgggggaaggga

SEQ ID NO: 256147 - DNA, 15 bp, Homo sapiens
tttctgggggaaggg

SEQ ID NO: 256148 - DNA, 15 bp, Homo sapiens
gtttctgggggaagg

SEQ ID NO: 256149 - DNA, 15 bp, Homo sapiens
tgtttctgggggaag

SEQ ID NO: 256150 - DNA, 15 bp, Homo sapiens
gtgtttctgggggaa

SEQ ID NO: 256151 - DNA, 15 bp, Homo sapiens
tgtgtttctggggga

SEQ ID NO: 256152 - DNA, 15 bp, Homo sapiens
gtgtgtttctggggg

SEQ ID NO: 256153 - DNA, 15 bp, Homo sapiens
tgtgtgtttctgggg

SEQ ID NO: 256154 - DNA, 15 bp, Homo sapiens
gtgtgtgtttctggg

SEQ ID NO: 256155 - DNA, 15 bp, Homo sapiens
tgtgtgtgtttctgg

SEQ ID NO: 256156 - DNA, 15 bp, Homo sapiens
gtgtgtgtgtttctg

SEQ ID NO: 256157 - DNA, 15 bp, Homo sapiens
ggtgtgtgtgtttct

SEQ ID NO: 256158 - DNA, 15 bp, Homo sapiens
gggtgtgtgtgtttc

SEQ ID NO: 256159 - DNA, 15 bp, Homo sapiens
tgggtgtgtgtgttt

SEQ ID NO: 256160 - DNA, 15 bp, Homo sapiens
gtgggtgtgtgtgtt

SEQ ID NO: 256161 - DNA, 15 bp, Homo sapiens
tgtgggtgtgtgtgt

SEQ ID NO: 256162 - DNA, 15 bp, Homo sapiens
gtgtgggtgtgtgtg

SEQ ID NO: 256163 - DNA, 15 bp, Homo sapiens
cgtgtgggtgtgtgt

SEQ ID NO: 256164 - DNA, 15 bp, Homo sapiens
tcgtgtgggtgtgtg

SEQ ID NO: 256165 - DNA, 15 bp, Homo sapiens
ctcgtgtgggtgtgt

SEQ ID NO: 256166 - DNA, 15 bp, Homo sapiens
tctcgtgtgggtgtg

SEQ ID NO: 256167 - DNA, 15 bp, Homo sapiens
atctcgtgtgggtgt

SEQ ID NO: 256168 - DNA, 15 bp, Homo sapiens
catctcgtgtgggtg

SEQ ID NO: 256169 - DNA, 15 bp, Homo sapiens
ccatctcgtgtgggt

SEQ ID NO: 256170 - DNA, 15 bp, Homo sapiens
cccatctcgtgtggg

SEQ ID NO: 256171 - DNA, 15 bp, Homo sapiens
gcccatctcgtgtgg

SEQ ID NO: 256172 - DNA, 15 bp, Homo sapiens
tgcccatctcgtgtg

SEQ ID NO: 256173 - DNA, 15 bp, Homo sapiens
gtgcccatctcgtgt

SEQ ID NO: 256174 - DNA, 15 bp, Homo sapiens
cgtgcccatctcgtg

SEQ ID NO: 256175 - DNA, 15 bp, Homo sapiens
ccgtgcccatctcgt

SEQ ID NO: 256176 - DNA, 15 bp, Homo sapiens
tccgtgcccatctcg

SEQ ID NO: 256177 - DNA, 15 bp, Homo sapiens
ctccgtgcccatctc

SEQ ID NO: 256178 - DNA, 15 bp, Homo sapiens
actccgtgcccatct

SEQ ID NO: 256179 - DNA, 15 bp, Homo sapiens
tactccgtgcccatc

SEQ ID NO: 256180 - DNA, 15 bp, Homo sapiens
ctactccgtgcccat

SEQ ID NO: 256181 - DNA, 15 bp, Homo sapiens
actactccgtgccca

SEQ ID NO: 256182 - DNA, 15 bp, Homo sapiens
gactactccgtgccc

SEQ ID NO: 256183 - DNA, 15 bp, Homo sapiens
agactactccgtgcc

SEQ ID NO: 256184 - DNA, 15 bp, Homo sapiens
aagactactccgtgc

SEQ ID NO: 256185 - DNA, 15 bp, Homo sapiens
caagactactccgtg

SEQ ID NO: 256186 - DNA, 15 bp, Homo sapiens
tcaagactactccgt

SEQ ID NO: 256187 - DNA, 15 bp, Homo sapiens
ttcaagactactccg

SEQ ID NO: 256188 - DNA, 15 bp, Homo sapiens
tttcaagactactcc

SEQ ID NO: 256189 - DNA, 15 bp, Homo sapiens
ctttcaagactactc

SEQ ID NO: 256190 - DNA, 15 bp, Homo sapiens
tctttcaagactact

SEQ ID NO: 256191 - DNA, 15 bp, Homo sapiens
gtctttcaagactac

SEQ ID NO: 256192 - DNA, 15 bp, Homo sapiens
tgtctttcaagacta

SEQ ID NO: 256193 - DNA, 15 bp, Homo sapiens
atgtctttcaagact

SEQ ID NO: 256194 - DNA, 15 bp, Homo sapiens
catgtctttcaagac

SEQ ID NO: 256195 - DNA, 15 bp, Homo sapiens
tcatgtctttcaaga

SEQ ID NO: 256196 - DNA, 15 bp, Homo sapiens
gtcatgtctttcaag

SEQ ID NO: 256197 - DNA, 15 bp, Homo sapiens
tgtcatgtctttcaa

SEQ ID NO: 256198 - DNA, 15 bp, Homo sapiens
ttgtcatgtctttca

SEQ ID NO: 256199 - DNA, 15 bp, Homo sapiens
tttgtcatgtctttc

SEQ ID NO: 256200 - DNA, 15 bp, Homo sapiens
atttgtcatgtcttt

SEQ ID NO: 256201 - DNA, 15 bp, Homo sapiens
gatttgtcatgtctt

SEQ ID NO: 256202 - DNA, 15 bp, Homo sapiens
tgatttgtcatgtct

SEQ ID NO: 256203 - DNA, 15 bp, Homo sapiens
gtgatttgtcatgtc

SEQ ID NO: 256204 - DNA, 15 bp, Homo sapiens
ggtgatttgtcatgt

SEQ ID NO: 256205 - DNA, 15 bp, Homo sapiens
tggtgatttgtcatg

SEQ ID NO: 256206 - DNA, 15 bp, Homo sapiens
ctggtgatttgtcat

SEQ ID NO: 256207 - DNA, 15 bp, Homo sapiens
tctggtgatttgtca

SEQ ID NO: 256208 - DNA, 15 bp, Homo sapiens
gtctggtgatttgtc

SEQ ID NO: 256209 - DNA, 15 bp, Homo sapiens
ggtctggtgatttgt

SEQ ID NO: 256210 - DNA, 15 bp, Homo sapiens
aggtctggtgatttg

SEQ ID NO: 256211 - DNA, 15 bp, Homo sapiens
caggtctggtgattt

SEQ ID NO: 256212 - DNA, 15 bp, Homo sapiens
ccaggtctggtgatt

SEQ ID NO: 256213 - DNA, 15 bp, Homo sapiens
cccaggtctggtgat

SEQ ID NO: 256214 - DNA, 15 bp, Homo sapiens
tcccaggtctggtga

SEQ ID NO: 256215 - DNA, 15 bp, Homo sapiens
ttcccaggtctggtg

SEQ ID NO: 256216 - DNA, 15 bp, Homo sapiens
cttcccaggtctggt

SEQ ID NO: 256217 - DNA, 15 bp, Homo sapiens
tcttcccaggtctgg

SEQ ID NO: 256218 - DNA, 15 bp, Homo sapiens
ttcttcccaggtctg

SEQ ID NO: 256219 - DNA, 15 bp, Homo sapiens
cttcttcccaggtct

SEQ ID NO: 256220 - DNA, 15 bp, Homo sapiens
gcttcttcccaggtc

SEQ ID NO: 256221 - DNA, 15 bp, Homo sapiens
agcttcttcccaggt

SEQ ID NO: 256222 - DNA, 15 bp, Homo sapiens
tagcttcttcccagg

SEQ ID NO: 256223 - DNA, 15 bp, Homo sapiens
ttagcttcttcccag

SEQ ID NO: 256224 - DNA, 15 bp, Homo sapiens
tttagcttcttccca

SEQ ID NO: 256225 - DNA, 15 bp, Homo sapiens
ctttagcttcttccc

SEQ ID NO: 256226 - DNA, 15 bp, Homo sapiens
tctttagcttcttcc

SEQ ID NO: 256227 - DNA, 15 bp, Homo sapiens
ctctttagcttcttc

SEQ ID NO: 256228 - DNA, 15 bp, Homo sapiens
gctctttagcttctt

SEQ ID NO: 256229 - DNA, 15 bp, Homo sapiens
ggctctttagcttct

SEQ ID NO: 256230 - DNA, 15 bp, Homo sapiens
tggctctttagcttc

SEQ ID NO: 256231 - DNA, 15 bp, Homo sapiens
ctggctctttagctt

SEQ ID NO: 256232 - DNA, 15 bp, Homo sapiens
tctggctctttagct

SEQ ID NO: 256233 - DNA, 15 bp, Homo sapiens
ctctggctctttagc

SEQ ID NO: 256234 - DNA, 15 bp, Homo sapiens
cctctggctctttag

SEQ ID NO: 256235 - DNA, 15 bp, Homo sapiens
ccctctggctcttta

SEQ ID NO: 256236 - DNA, 15 bp, Homo sapiens
tccctctggctcttt

SEQ ID NO: 256237 - DNA, 15 bp, Homo sapiens
ttccctctggctctt

SEQ ID NO: 256238 - DNA, 15 bp, Homo sapiens
tttccctctggctct

SEQ ID NO: 256239 - DNA, 15 bp, Homo sapiens
ttttccctctggctc

SEQ ID NO: 256240 - DNA, 15 bp, Homo sapiens
tttttccctctggct

SEQ ID NO: 256241 - DNA, 15 bp, Homo sapiens
ctttttccctctggc

SEQ ID NO: 256242 - DNA, 15 bp, Homo sapiens
gctttttccctctgg

SEQ ID NO: 256243 - DNA, 15 bp, Homo sapiens
ggctttttccctctg

SEQ ID NO: 256244 - DNA, 15 bp, Homo sapiens
tggctttttccctct

SEQ ID NO: 256245 - DNA, 15 bp, Homo sapiens
ctggctttttccctc

SEQ ID NO: 256246 - DNA, 15 bp, Homo sapiens
tctggctttttccct

SEQ ID NO: 256247 - DNA, 15 bp, Homo sapiens
ttctggctttttccc

SEQ ID NO: 256248 - DNA, 15 bp, Homo sapiens
cttctggctttttcc

SEQ ID NO: 256249 - DNA, 15 bp, Homo sapiens
acttctggctttttc

SEQ ID NO: 256250 - DNA, 15 bp, Homo sapiens
gacttctggcttttt

SEQ ID NO: 256251 - DNA, 15 bp, Homo sapiens
cgacttctggctttt

SEQ ID NO: 256252 - DNA, 15 bp, Homo sapiens
tcgacttctggcttt

SEQ ID NO: 256253 - DNA, 15 bp, Homo sapiens
gtcgacttctggctt

SEQ ID NO: 256254 - DNA, 15 bp, Homo sapiens
agtcgacttctggct

SEQ ID NO: 256255 - DNA, 15 bp, Homo sapiens
tagtcgacttctggc

SEQ ID NO: 256256 - DNA, 15 bp, Homo sapiens
gtagtcgacttctgg

SEQ ID NO: 256257 - DNA, 15 bp, Homo sapiens
ggtagtcgacttctg

SEQ ID NO: 256258 - DNA, 15 bp, Homo sapiens
aggtagtcgacttct

SEQ ID NO: 256259 - DNA, 15 bp, Homo sapiens
caggtagtcgacttc

SEQ ID NO: 256260 - DNA, 15 bp, Homo sapiens
ccaggtagtcgactt

SEQ ID NO: 256261 - DNA, 15 bp, Homo sapiens
cccaggtagtcgact

SEQ ID NO: 256262 - DNA, 15 bp, Homo sapiens
tcccaggtagtcgac

SEQ ID NO: 256263 - DNA, 15 bp, Homo sapiens
ctcccaggtagtcga

SEQ ID NO: 256264 - DNA, 15 bp, Homo sapiens
cctcccaggtagtcg

SEQ ID NO: 256265 - DNA, 15 bp, Homo sapiens
tcctcccaggtagtc

SEQ ID NO: 256266 - DNA, 15 bp, Homo sapiens
ctcctcccaggtagt

SEQ ID NO: 256267 - DNA, 15 bp, Homo sapiens
cctcctcccaggtag

SEQ ID NO: 256268 - DNA, 15 bp, Homo sapiens
ccctcctcccaggta

SEQ ID NO: 256269 - DNA, 15 bp, Homo sapiens
tccctcctcccaggt

SEQ ID NO: 256270 - DNA, 15 bp, Homo sapiens
atccctcctcccagg

SEQ ID NO: 256271 - DNA, 15 bp, Homo sapiens
tatccctcctcccag

SEQ ID NO: 256272 - DNA, 15 bp, Homo sapiens
ctatccctcctccca

SEQ ID NO: 256273 - DNA, 15 bp, Homo sapiens
tctatccctcctccc

SEQ ID NO: 256274 - DNA, 15 bp, Homo sapiens
gtctatccctcctcc

SEQ ID NO: 256275 - DNA, 15 bp, Homo sapiens
tgtctatccctcctc

SEQ ID NO: 256276 - DNA, 15 bp, Homo sapiens
ttgtctatccctcct

SEQ ID NO: 256277 - DNA, 15 bp, Homo sapiens
cttgtctatccctcc

SEQ ID NO: 256278 - DNA, 15 bp, Homo sapiens
tcttgtctatccctc

SEQ ID NO: 256279 - DNA, 15 bp, Homo sapiens
ttcttgtctatccct

SEQ ID NO: 256280 - DNA, 15 bp, Homo sapiens
tttcttgtctatccc

SEQ ID NO: 256281 - DNA, 15 bp, Homo sapiens
gtttcttgtctatcc

SEQ ID NO: 256282 - DNA, 15 bp, Homo sapiens
ggtttcttgtctatc

SEQ ID NO: 256283 - DNA, 15 bp, Homo sapiens
tggtttcttgtctat

SEQ ID NO: 256284 - DNA, 15 bp, Homo sapiens
ttggtttcttgtcta

SEQ ID NO: 256285 - DNA, 15 bp, Homo sapiens
tttggtttcttgtct

SEQ ID NO: 256286 - DNA, 15 bp, Homo sapiens
gtttggtttcttgtc

SEQ ID NO: 256287 - DNA, 15 bp, Homo sapiens
agtttggtttcttgt

SEQ ID NO: 256288 - DNA, 15 bp, Homo sapiens
tagtttggtttcttg

SEQ ID NO: 256289 - DNA, 15 bp, Homo sapiens
ttagtttggtttctt

SEQ ID NO: 256290 - DNA, 15 bp, Homo sapiens
tttagtttggtttct

SEQ ID NO: 256291 - DNA, 15 bp, Homo sapiens
ctttagtttggtttc

SEQ ID NO: 256292 - DNA, 15 bp, Homo sapiens
cctttagtttggttt

SEQ ID NO: 256293 - DNA, 15 bp, Homo sapiens
tcctttagtttggtt

SEQ ID NO: 256294 - DNA, 15 bp, Homo sapiens
ttcctttagtttggt

SEQ ID NO: 256295 - DNA, 15 bp, Homo sapiens
tttcctttagtttgg

SEQ ID NO: 256296 - DNA, 15 bp, Homo sapiens
gtttcctttagtttg

SEQ ID NO: 256297 - DNA, 15 bp, Homo sapiens
agtttcctttagttt

SEQ ID NO: 256298 - DNA, 15 bp, Homo sapiens
tagtttcctttagtt

SEQ ID NO: 256299 - DNA, 15 bp, Homo sapiens
ttagtttcctttagt

SEQ ID NO: 256300 - DNA, 15 bp, Homo sapiens
cttagtttcctttag

SEQ ID NO: 256301 - DNA, 15 bp, Homo sapiens
ccttagtttccttta

SEQ ID NO: 256302 - DNA, 15 bp, Homo sapiens
accttagtttccttt

SEQ ID NO: 256303 - DNA, 15 bp, Homo sapiens
taccttagtttcctt

SEQ ID NO: 256304 - DNA, 15 bp, Homo sapiens
ctaccttagtttcct

SEQ ID NO: 256305 - DNA, 15 bp, Homo sapiens
cctaccttagtttcc

SEQ ID NO: 256306 - DNA, 15 bp, Homo sapiens
acctaccttagtttc

SEQ ID NO: 256307 - DNA, 15 bp, Homo sapiens
cacctaccttagttt

SEQ ID NO: 256308 - DNA, 15 bp, Homo sapiens
gcacctaccttagtt

SEQ ID NO: 256309 - DNA, 15 bp, Homo sapiens
agcacctaccttagt

SEQ ID NO: 256310 - DNA, 15 bp, Homo sapiens
cagcacctaccttag

SEQ ID NO: 256311 - DNA, 15 bp, Homo sapiens
tcagcacctacctta

SEQ ID NO: 256312 - DNA, 15 bp, Homo sapiens
ttcagcacctacctt

SEQ ID NO: 256313 - DNA, 15 bp, Homo sapiens
tttcagcacctacct

SEQ ID NO: 256314 - DNA, 15 bp, Homo sapiens
ttttcagcacctacc

SEQ ID NO: 256315 - DNA, 15 bp, Homo sapiens
gttttcagcacctac

SEQ ID NO: 256316 - DNA, 15 bp, Homo sapiens
tgttttcagcaccta

SEQ ID NO: 256317 - DNA, 15 bp, Homo sapiens
ttgttttcagcacct

SEQ ID NO: 256318 - DNA, 15 bp, Homo sapiens
cttgttttcagcacc

SEQ ID NO: 256319 - DNA, 15 bp, Homo sapiens
acttgttttcagcac

SEQ ID NO: 256320 - DNA, 15 bp, Homo sapiens
tacttgttttcagca

SEQ ID NO: 256321 - DNA, 15 bp, Homo sapiens
gtacttgttttcagc

SEQ ID NO: 256322 - DNA, 15 bp, Homo sapiens
ggtacttgttttcag

SEQ ID NO: 256323 - DNA, 15 bp, Homo sapiens
tggtacttgttttca

SEQ ID NO: 256324 - DNA, 15 bp, Homo sapiens
atggtacttgttttc

SEQ ID NO: 256325 - DNA, 15 bp, Homo sapiens
aatggtacttgtttt

SEQ ID NO: 256326 - DNA, 15 bp, Homo sapiens
aaatggtacttgttt

SEQ ID NO: 256327 - DNA, 15 bp, Homo sapiens
aaaatggtacttgtt

SEQ ID NO: 256328 - DNA, 15 bp, Homo sapiens
gaaaatggtacttgt

SEQ ID NO: 256329 - DNA, 15 bp, Homo sapiens
tgaaaatggtacttg

SEQ ID NO: 256330 - DNA, 15 bp, Homo sapiens
ttgaaaatggtactt

SEQ ID NO: 256331 - DNA, 15 bp, Homo sapiens
gttgaaaatggtact

SEQ ID NO: 256332 - DNA, 15 bp, Homo sapiens
tgttgaaaatggtac

SEQ ID NO: 256333 - DNA, 15 bp, Homo sapiens
atgttgaaaatggta

SEQ ID NO: 256334 - DNA, 15 bp, Homo sapiens
aatgttgaaaatggt

SEQ ID NO: 256335 - DNA, 15 bp, Homo sapiens
taatgttgaaaatgg

SEQ ID NO: 256336 - DNA, 15 bp, Homo sapiens
ttaatgttgaaaatg

SEQ ID NO: 256337 - DNA, 15 bp, Homo sapiens
gttaatgttgaaaat

SEQ ID NO: 256338 - DNA, 15 bp, Homo sapiens
agttaatgttgaaaa

SEQ ID NO: 256339 - DNA, 15 bp, Homo sapiens
cagttaatgttgaaa

SEQ ID NO: 256340 - DNA, 15 bp, Homo sapiens
tcagttaatgttgaa

SEQ ID NO: 256341 - DNA, 15 bp, Homo sapiens
atcagttaatgttga

SEQ ID NO: 256342 - DNA, 15 bp, Homo sapiens
catcagttaatgttg

SEQ ID NO: 256343 - DNA, 15 bp, Homo sapiens
gcatcagttaatgtt

SEQ ID NO: 256344 - DNA, 15 bp, Homo sapiens
ggcatcagttaatgt

SEQ ID NO: 256345 - DNA, 15 bp, Homo sapiens
aggcatcagttaatg

SEQ ID NO: 256346 - DNA, 15 bp, Homo sapiens
aaggcatcagttaat

SEQ ID NO: 256347 - DNA, 15 bp, Homo sapiens
caaggcatcagttaa

SEQ ID NO: 256348 - DNA, 15 bp, Homo sapiens
ccaaggcatcagtta

SEQ ID NO: 256349 - DNA, 15 bp, Homo sapiens
gccaaggcatcagtt

SEQ ID NO: 256350 - DNA, 15 bp, Homo sapiens
agccaaggcatcagt

SEQ ID NO: 256351 - DNA, 15 bp, Homo sapiens
aagccaaggcatcag

SEQ ID NO: 256352 - DNA, 15 bp, Homo sapiens
gaagccaaggcatca

SEQ ID NO: 256353 - DNA, 15 bp, Homo sapiens
tgaagccaaggcatc

SEQ ID NO: 256354 - DNA, 15 bp, Homo sapiens
atgaagccaaggcat

SEQ ID NO: 256355 - DNA, 15 bp, Homo sapiens
catgaagccaaggca

SEQ ID NO: 256356 - DNA, 15 bp, Homo sapiens
gcatgaagccaaggc

SEQ ID NO: 256357 - DNA, 15 bp, Homo sapiens
agcatgaagccaagg

SEQ ID NO: 256358 - DNA, 15 bp, Homo sapiens
tagcatgaagccaag

SEQ ID NO: 256359 - DNA, 15 bp, Homo sapiens
atagcatgaagccaa

SEQ ID NO: 256360 - DNA, 15 bp, Homo sapiens
tatagcatgaagcca

SEQ ID NO: 256361 - DNA, 15 bp, Homo sapiens
ttatagcatgaagcc

SEQ ID NO: 256362 - DNA, 15 bp, Homo sapiens
attatagcatgaagc

SEQ ID NO: 256363 - DNA, 15 bp, Homo sapiens
cattatagcatgaag

SEQ ID NO: 256364 - DNA, 15 bp, Homo sapiens
gcattatagcatgaa

SEQ ID NO: 256365 - DNA, 15 bp, Homo sapiens
ggcattatagcatga

SEQ ID NO: 256366 - DNA, 15 bp, Homo sapiens
tggcattatagcatg

SEQ ID NO: 256367 - DNA, 15 bp, Homo sapiens
atggcattatagcat

SEQ ID NO: 256368 - DNA, 15 bp, Homo sapiens
catggcattatagca

SEQ ID NO: 256369 - DNA, 15 bp, Homo sapiens
acatggcattatagc

SEQ ID NO: 256370 - DNA, 15 bp, Homo sapiens
aacatggcattatag

SEQ ID NO: 256371 - DNA, 15 bp, Homo sapiens
caacatggcattata

SEQ ID NO: 256372 - DNA, 15 bp, Homo sapiens
acaacatggcattat

SEQ ID NO: 256373 - DNA, 15 bp, Homo sapiens
cacaacatggcatta

SEQ ID NO: 256374 - DNA, 15 bp, Homo sapiens
acacaacatggcatt

SEQ ID NO: 256375 - DNA, 15 bp, Homo sapiens
aacacaacatggcat

SEQ ID NO: 256376 - DNA, 15 bp, Homo sapiens
aaacacaacatggca

SEQ ID NO: 256377 - DNA, 15 bp, Homo sapiens
gaaacacaacatggc

SEQ ID NO: 256378 - DNA, 15 bp, Homo sapiens
tgaaacacaacatgg

SEQ ID NO: 256379 - DNA, 15 bp, Homo sapiens
gtgaaacacaacatg

SEQ ID NO: 256380 - DNA, 15 bp, Homo sapiens
agtgaaacacaacat

SEQ ID NO: 256381 - DNA, 15 bp, Homo sapiens
tagtgaaacacaaca

SEQ ID NO: 256382 - DNA, 15 bp, Homo sapiens
atagtgaaacacaac

SEQ ID NO: 256383 - DNA, 15 bp, Homo sapiens
tatagtgaaacacaa

SEQ ID NO: 256384 - DNA, 15 bp, Homo sapiens
ttatagtgaaacaca

SEQ ID NO: 256385 - DNA, 15 bp, Homo sapiens
gttatagtgaaacac

SEQ ID NO: 256386 - DNA, 15 bp, Homo sapiens
ggttatagtgaaaca

SEQ ID NO: 256387 - DNA, 15 bp, Homo sapiens
aggttatagtgaaac

SEQ ID NO: 256388 - DNA, 15 bp, Homo sapiens
gaggttatagtgaaa

SEQ ID NO: 256389 - DNA, 15 bp, Homo sapiens
tgaggttatagtgaa

SEQ ID NO: 256390 - DNA, 15 bp, Homo sapiens
ctgaggttatagtga

SEQ ID NO: 256391 - DNA, 15 bp, Homo sapiens
tctgaggttatagtg

SEQ ID NO: 256392 - DNA, 15 bp, Homo sapiens
ctctgaggttatagt

SEQ ID NO: 256393 - DNA, 15 bp, Homo sapiens
actctgaggttatag

SEQ ID NO: 256394 - DNA, 15 bp, Homo sapiens
cactctgaggttata

SEQ ID NO: 256395 - DNA, 15 bp, Homo sapiens
tcactctgaggttat

SEQ ID NO: 256396 - DNA, 15 bp, Homo sapiens
ttcactctgaggtta

SEQ ID NO: 256397 - DNA, 15 bp, Homo sapiens
attcactctgaggtt

SEQ ID NO: 256398 - DNA, 15 bp, Homo sapiens
cattcactctgaggt

SEQ ID NO: 256399 - DNA, 15 bp, Homo sapiens
tcattcactctgagg

SEQ ID NO: 256400 - DNA, 15 bp, Homo sapiens
ttcattcactctgag

SEQ ID NO: 256401 - DNA, 15 bp, Homo sapiens
tttcattcactctga

SEQ ID NO: 256402 - DNA, 15 bp, Homo sapiens
ctttcattcactctg

SEQ ID NO: 256403 - DNA, 15 bp, Homo sapiens
tctttcattcactct

SEQ ID NO: 256404 - DNA, 15 bp, Homo sapiens
ctctttcattcactc

SEQ ID NO: 256405 - DNA, 15 bp, Homo sapiens
cctctttcattcact

SEQ ID NO: 256406 - DNA, 15 bp, Homo sapiens
tcctctttcattcac

SEQ ID NO: 256407 - DNA, 15 bp, Homo sapiens
ttcctctttcattca

SEQ ID NO: 256408 - DNA, 15 bp, Homo sapiens
tttcctctttcattc

SEQ ID NO: 256409 - DNA, 15 bp, Homo sapiens
ttttcctctttcatt

SEQ ID NO: 256410 - DNA, 15 bp, Homo sapiens
attttcctctttcat

SEQ ID NO: 256411 - DNA, 15 bp, Homo sapiens
cattttcctctttca

SEQ ID NO: 256412 - DNA, 15 bp, Homo sapiens
ccattttcctctttc

SEQ ID NO: 256413 - DNA, 15 bp, Homo sapiens
tccattttcctcttt

SEQ ID NO: 256414 - DNA, 15 bp, Homo sapiens
ctccattttcctctt

SEQ ID NO: 256415 - DNA, 15 bp, Homo sapiens
gctccattttcctct

SEQ ID NO: 256416 - DNA, 15 bp, Homo sapiens
agctccattttcctc

SEQ ID NO: 256417 - DNA, 15 bp, Homo sapiens
tagctccattttcct

SEQ ID NO: 256418 - DNA, 15 bp, Homo sapiens
ctagctccattttcc

SEQ ID NO: 256419 - DNA, 15 bp, Homo sapiens
actagctccattttc

SEQ ID NO: 256420 - DNA, 15 bp, Homo sapiens
aactagctccatttt

SEQ ID NO: 256421 - DNA, 15 bp, Homo sapiens
caactagctccattt

SEQ ID NO: 256422 - DNA, 15 bp, Homo sapiens
tcaactagctccatt

SEQ ID NO: 256423 - DNA, 15 bp, Homo sapiens
ttcaactagctccat

SEQ ID NO: 256424 - DNA, 15 bp, Homo sapiens
tttcaactagctcca

SEQ ID NO: 256425 - DNA, 15 bp, Homo sapiens
atttcaactagctcc

SEQ ID NO: 256426 - DNA, 15 bp, Homo sapiens
aatttcaactagctc

SEQ ID NO: 256427 - DNA, 15 bp, Homo sapiens
aaatttcaactagct

SEQ ID NO: 256428 - DNA, 15 bp, Homo sapiens
gaaatttcaactagc

SEQ ID NO: 256429 - DNA, 15 bp, Homo sapiens
agaaatttcaactag

SEQ ID NO: 256430 - DNA, 15 bp, Homo sapiens
cagaaatttcaacta

SEQ ID NO: 256431 - DNA, 15 bp, Homo sapiens
gcagaaatttcaact

SEQ ID NO: 256432 - DNA, 15 bp, Homo sapiens
ggcagaaatttcaac

SEQ ID NO: 256433 - DNA, 15 bp, Homo sapiens
aggcagaaatttcaa

SEQ ID NO: 256434 - DNA, 15 bp, Homo sapiens
taggcagaaatttca

SEQ ID NO: 256435 - DNA, 15 bp, Homo sapiens
ttaggcagaaatttc

SEQ ID NO: 256436 - DNA, 15 bp, Homo sapiens
tttaggcagaaattt

SEQ ID NO: 256437 - DNA, 15 bp, Homo sapiens
gtttaggcagaaatt

SEQ ID NO: 256438 - DNA, 15 bp, Homo sapiens
agtttaggcagaaat

SEQ ID NO: 256439 - DNA, 15 bp, Homo sapiens
tagtttaggcagaaa

SEQ ID NO: 256440 - DNA, 15 bp, Homo sapiens
ctagtttaggcagaa

SEQ ID NO: 256441 - DNA, 15 bp, Homo sapiens
gctagtttaggcaga

SEQ ID NO: 256442 - DNA, 15 bp, Homo sapiens
ggctagtttaggcag

SEQ ID NO: 256443 - DNA, 15 bp, Homo sapiens
tggctagtttaggca

SEQ ID NO: 256444 - DNA, 15 bp, Homo sapiens
ctggctagtttaggc

SEQ ID NO: 256445 - DNA, 15 bp, Homo sapiens
tctggctagtttagg

SEQ ID NO: 256446 - DNA, 15 bp, Homo sapiens
atctggctagtttag

SEQ ID NO: 256447 - DNA, 15 bp, Homo sapiens
aatctggctagttta

SEQ ID NO: 256448 - DNA, 15 bp, Homo sapiens
aaatctggctagttt

SEQ ID NO: 256449 - DNA, 15 bp, Homo sapiens
aaaatctggctagtt

SEQ ID NO: 256450 - DNA, 15 bp, Homo sapiens
caaaatctggctagt

SEQ ID NO: 256451 - DNA, 15 bp, Homo sapiens
tcaaaatctggctag

SEQ ID NO: 256452 - DNA, 15 bp, Homo sapiens
ctcaaaatctggcta

SEQ ID NO: 256453 - DNA, 15 bp, Homo sapiens
tctcaaaatctggct

SEQ ID NO: 256454 - DNA, 15 bp, Homo sapiens
gtctcaaaatctggc

SEQ ID NO: 256455 - DNA, 15 bp, Homo sapiens
tgtctcaaaatctgg

SEQ ID NO: 256456 - DNA, 15 bp, Homo sapiens
gtgtctcaaaatctg

SEQ ID NO: 256457 - DNA, 15 bp, Homo sapiens
agtgtctcaaaatct

SEQ ID NO: 256458 - DNA, 15 bp, Homo sapiens
tagtgtctcaaaatc

SEQ ID NO: 256459 - DNA, 15 bp, Homo sapiens
ttagtgtctcaaaat

SEQ ID NO: 256460 - DNA, 15 bp, Homo sapiens
cttagtgtctcaaaa

SEQ ID NO: 256461 - DNA, 15 bp, Homo sapiens
acttagtgtctcaaa

SEQ ID NO: 256462 - DNA, 15 bp, Homo sapiens
aacttagtgtctcaa

SEQ ID NO: 256463 - DNA, 15 bp, Homo sapiens
taacttagtgtctca

SEQ ID NO: 256464 - DNA, 15 bp, Homo sapiens
ataacttagtgtctc

SEQ ID NO: 256465 - DNA, 15 bp, Homo sapiens
gataacttagtgtct

SEQ ID NO: 256466 - DNA, 15 bp, Homo sapiens
agataacttagtgtc

SEQ ID NO: 256467 - DNA, 15 bp, Homo sapiens
gagataacttagtgt

SEQ ID NO: 256468 - DNA, 15 bp, Homo sapiens
tgagataacttagtg

SEQ ID NO: 256469 - DNA, 15 bp, Homo sapiens
ttgagataacttagt

SEQ ID NO: 256470 - DNA, 15 bp, Homo sapiens
tttgagataacttag

SEQ ID NO: 256471 - DNA, 15 bp, Homo sapiens
atttgagataactta

SEQ ID NO: 256472 - DNA, 15 bp, Homo sapiens
gatttgagataactt

SEQ ID NO: 256473 - DNA, 15 bp, Homo sapiens
tgatttgagataact

SEQ ID NO: 256474 - DNA, 15 bp, Homo sapiens
ttgatttgagataac

SEQ ID NO: 256475 - DNA, 15 bp, Homo sapiens
cttgatttgagataa

SEQ ID NO: 256476 - DNA, 15 bp, Homo sapiens
tcttgatttgagata

SEQ ID NO: 256477 - DNA, 15 bp, Homo sapiens
ttcttgatttgagat

SEQ ID NO: 256478 - DNA, 15 bp, Homo sapiens
tttcttgatttgaga

SEQ ID NO: 256479 - DNA, 15 bp, Homo sapiens
atttcttgatttgag

SEQ ID NO: 256480 - DNA, 15 bp, Homo sapiens
gatttcttgatttga

SEQ ID NO: 256481 - DNA, 15 bp, Homo sapiens
tgatttcttgatttg

SEQ ID NO: 256482 - DNA, 15 bp, Homo sapiens
gtgatttcttgattt

SEQ ID NO: 256483 - DNA, 15 bp, Homo sapiens
ggtgatttcttgatt

SEQ ID NO: 256484 - DNA, 15 bp, Homo sapiens
gggtgatttcttgat

SEQ ID NO: 256485 - DNA, 15 bp, Homo sapiens
agggtgatttcttga

SEQ ID NO: 256486 - DNA, 15 bp, Homo sapiens
tagggtgatttcttg

SEQ ID NO: 256487 - DNA, 15 bp, Homo sapiens
ttagggtgatttctt

SEQ ID NO: 256488 - DNA, 15 bp, Homo sapiens
attagggtgatttct

SEQ ID NO: 256489 - DNA, 15 bp, Homo sapiens
cattagggtgatttc

SEQ ID NO: 256490 - DNA, 15 bp, Homo sapiens
tcattagggtgattt

SEQ ID NO: 256491 - DNA, 15 bp, Homo sapiens
ctcattagggtgatt

SEQ ID NO: 256492 - DNA, 15 bp, Homo sapiens
tctcattagggtgat

SEQ ID NO: 256493 - DNA, 15 bp, Homo sapiens
ttctcattagggtga

SEQ ID NO: 256494 - DNA, 15 bp, Homo sapiens
attctcattagggtg

SEQ ID NO: 256495 - DNA, 15 bp, Homo sapiens
aattctcattagggt

SEQ ID NO: 256496 - DNA, 15 bp, Homo sapiens
aaattctcattaggg

SEQ ID NO: 256497 - DNA, 15 bp, Homo sapiens
gaaattctcattagg

SEQ ID NO: 256498 - DNA, 15 bp, Homo sapiens
tgaaattctcattag

SEQ ID NO: 256499 - DNA, 15 bp, Homo sapiens
ttgaaattctcatta

SEQ ID NO: 256500 - DNA, 15 bp, Homo sapiens
attgaaattctcatt

SEQ ID NO: 256501 - DNA, 15 bp, Homo sapiens
tattgaaattctcat

SEQ ID NO: 256502 - DNA, 15 bp, Homo sapiens
ttattgaaattctca

SEQ ID NO: 256503 - DNA, 15 bp, Homo sapiens
gttattgaaattctc

SEQ ID NO: 256504 - DNA, 15 bp, Homo sapiens
ggttattgaaattct

SEQ ID NO: 256505 - DNA, 15 bp, Homo sapiens
aggttattgaaattc

SEQ ID NO: 256506 - DNA, 15 bp, Homo sapiens
gaggttattgaaatt

SEQ ID NO: 256507 - DNA, 15 bp, Homo sapiens
tgaggttattgaaat

SEQ ID NO: 256508 - DNA, 15 bp, Homo sapiens
ctgaggttattgaaa

SEQ ID NO: 256509 - DNA, 15 bp, Homo sapiens
cctgaggttattgaa

SEQ ID NO: 256510 - DNA, 15 bp, Homo sapiens
tcctgaggttattga

SEQ ID NO: 256511 - DNA, 15 bp, Homo sapiens
ttcctgaggttattg

SEQ ID NO: 256512 - DNA, 15 bp, Homo sapiens
attcctgaggttatt

SEQ ID NO: 256513 - DNA, 15 bp, Homo sapiens
aattcctgaggttat

SEQ ID NO: 256514 - DNA, 15 bp, Homo sapiens
aaattcctgaggtta

SEQ ID NO: 256515 - DNA, 15 bp, Homo sapiens
taaattcctgaggtt

SEQ ID NO: 256516 - DNA, 15 bp, Homo sapiens
ttaaattcctgaggt

SEQ ID NO: 256517 - DNA, 15 bp, Homo sapiens
cttaaattcctgagg

SEQ ID NO: 256518 - DNA, 15 bp, Homo sapiens
ccttaaattcctgag

SEQ ID NO: 256519 - DNA, 15 bp, Homo sapiens
accttaaattcctga

SEQ ID NO: 256520 - DNA, 15 bp, Homo sapiens
caccttaaattcctg

SEQ ID NO: 256521 - DNA, 15 bp, Homo sapiens
gcaccttaaattcct

SEQ ID NO: 256522 - DNA, 15 bp, Homo sapiens
tgcaccttaaattcc

SEQ ID NO: 256523 - DNA, 15 bp, Homo sapiens
atgcaccttaaattc

SEQ ID NO: 256524 - DNA, 15 bp, Homo sapiens
catgcaccttaaatt

SEQ ID NO: 256525 - DNA, 15 bp, Homo sapiens
gcatgcaccttaaat

SEQ ID NO: 256526 - DNA, 15 bp, Homo sapiens
tgcatgcaccttaaa

SEQ ID NO: 256527 - DNA, 15 bp, Homo sapiens
atgcatgcaccttaa

SEQ ID NO: 256528 - DNA, 15 bp, Homo sapiens
gatgcatgcacctta

SEQ ID NO: 256529 - DNA, 15 bp, Homo sapiens
ggatgcatgcacctt

SEQ ID NO: 256530 - DNA, 15 bp, Homo sapiens
gggatgcatgcacct

SEQ ID NO: 256531 - DNA, 15 bp, Homo sapiens
ggggatgcatgcacc

SEQ ID NO: 256532 - DNA, 15 bp, Homo sapiens
gggggatgcatgcac

SEQ ID NO: 256533 - DNA, 15 bp, Homo sapiens
tgggggatgcatgca

SEQ ID NO: 256534 - DNA, 15 bp, Homo sapiens
gtgggggatgcatgc

SEQ ID NO: 256535 - DNA, 15 bp, Homo sapiens
ggtgggggatgcatg

SEQ ID NO: 256536 - DNA, 15 bp, Homo sapiens
gggtgggggatgcat

SEQ ID NO: 256537 - DNA, 15 bp, Homo sapiens
ggggtgggggatgca

SEQ ID NO: 256538 - DNA, 15 bp, Homo sapiens
gggggtgggggatgc

SEQ ID NO: 256539 - DNA, 15 bp, Homo sapiens
ggggggtgggggatg

SEQ ID NO: 256540 - DNA, 15 bp, Homo sapiens
gggggggtgggggat

SEQ ID NO: 256541 - DNA, 15 bp, Homo sapiens
ggggggggtggggga

SEQ ID NO: 256542 - DNA, 15 bp, Homo sapiens
aggggggggtggggg

SEQ ID NO: 256543 - DNA, 15 bp, Homo sapiens
aaggggggggtgggg

SEQ ID NO: 256544 - DNA, 15 bp, Homo sapiens
aaaggggggggtggg

SEQ ID NO: 256545 - DNA, 15 bp, Homo sapiens
aaaaggggggggtgg

SEQ ID NO: 256546 - DNA, 15 bp, Homo sapiens
aaaaaggggggggtg

SEQ ID NO: 256547 - DNA, 15 bp, Homo sapiens
aaaaaaggggggggt

SEQ ID NO: 256548 - DNA, 15 bp, Homo sapiens
aaaaaaagggggggg

SEQ ID NO: 256549 - DNA, 15 bp, Homo sapiens
aaaaaaaaggggggg

SEQ ID NO: 256550 - DNA, 15 bp, Homo sapiens
aaaaaaaaagggggg

SEQ ID NO: 256551 - DNA, 15 bp, Homo sapiens
aaaaaaaaaaggggg

SEQ ID NO: 256552 - DNA, 15 bp, Homo sapiens
caaaaaaaaaagggg

SEQ ID NO: 256553 - DNA, 15 bp, Homo sapiens
tcaaaaaaaaaaggg

SEQ ID NO: 256554 - DNA, 15 bp, Homo sapiens
ctcaaaaaaaaaagg

SEQ ID NO: 256555 - DNA, 15 bp, Homo sapiens
tctcaaaaaaaaaag

SEQ ID NO: 256556 - DNA, 15 bp, Homo sapiens
acgtctcaaaaaaaa

SEQ ID NO: 256557 - DNA, 15 bp, Homo sapiens
tacgtctcaaaaaaa

SEQ ID NO: 256558 - DNA, 15 bp, Homo sapiens
ctacgtctcaaaaaa

SEQ ID NO: 256559 - DNA, 15 bp, Homo sapiens
actacgtctcaaaaa

SEQ ID NO: 256560 - DNA, 15 bp, Homo sapiens
gactacgtctcaaaa

SEQ ID NO: 256561 - DNA, 15 bp, Homo sapiens
ggactacgtctcaaa

SEQ ID NO: 256562 - DNA, 15 bp, Homo sapiens
gggactacgtctcaa

SEQ ID NO: 256563 - DNA, 15 bp, Homo sapiens
cgggactacgtctca

SEQ ID NO: 256564 - DNA, 15 bp, Homo sapiens
gcgggactacgtctc

SEQ ID NO: 256565 - DNA, 15 bp, Homo sapiens
agcgggactacgtct

SEQ ID NO: 256566 - DNA, 15 bp, Homo sapiens
gagcgggactacgtc

SEQ ID NO: 256567 - DNA, 15 bp, Homo sapiens
agagcgggactacgt

SEQ ID NO: 256568 - DNA, 15 bp, Homo sapiens
cagagcgggactacg

SEQ ID NO: 256569 - DNA, 15 bp, Homo sapiens
acagagcgggactac

SEQ ID NO: 256570 - DNA, 15 bp, Homo sapiens
aacagagcgggacta

SEQ ID NO: 256571 - DNA, 15 bp, Homo sapiens
caacagagcgggact

SEQ ID NO: 256572 - DNA, 15 bp, Homo sapiens
gcaacagagcgggac

SEQ ID NO: 256573 - DNA, 15 bp, Homo sapiens
ggcaacagagcggga

SEQ ID NO: 256574 - DNA, 15 bp, Homo sapiens
gggcaacagagcggg

SEQ ID NO: 256575 - DNA, 15 bp, Homo sapiens
tgggcaacagagcgg

SEQ ID NO: 256576 - DNA, 15 bp, Homo sapiens
ctgggcaacagagcg

SEQ ID NO: 256577 - DNA, 15 bp, Homo sapiens
cctgggcaacagagc

SEQ ID NO: 256578 - DNA, 15 bp, Homo sapiens
gcctgggcaacagag

SEQ ID NO: 256579 - DNA, 15 bp, Homo sapiens
agcctgggcaacaga

SEQ ID NO: 256580 - DNA, 15 bp, Homo sapiens
cagcctgggcaacag

SEQ ID NO: 256581 - DNA, 15 bp, Homo sapiens
actccagcctgggca

SEQ ID NO: 256582 - DNA, 15 bp, Homo sapiens
tactccagcctgggc

SEQ ID NO: 256583 - DNA, 15 bp, Homo sapiens
gtactccagcctggg

SEQ ID NO: 256584 - DNA, 15 bp, Homo sapiens
tgtactccagcctgg

SEQ ID NO: 256585 - DNA, 15 bp, Homo sapiens
ctgtactccagcctg

SEQ ID NO: 256586 - DNA, 15 bp, Homo sapiens
actgtactccagcct

SEQ ID NO: 256587 - DNA, 15 bp, Homo sapiens
cactgtactccagcc

SEQ ID NO: 256588 - DNA, 15 bp, Homo sapiens
ccactgtactccagc

SEQ ID NO: 256589 - DNA, 15 bp, Homo sapiens
gccactgtactccag

SEQ ID NO: 256590 - DNA, 15 bp, Homo sapiens
cgccactgtactcca

SEQ ID NO: 256591 - DNA, 15 bp, Homo sapiens
gcgccactgtactcc

SEQ ID NO: 256592 - DNA, 15 bp, Homo sapiens
cgcgccactgtactc

SEQ ID NO: 256593 - DNA, 15 bp, Homo sapiens
tcgcgccactgtact

SEQ ID NO: 256594 - DNA, 15 bp, Homo sapiens
atcgcgccactgtac

SEQ ID NO: 256595 - DNA, 15 bp, Homo sapiens
tatcgcgccactgta

SEQ ID NO: 256596 - DNA, 15 bp, Homo sapiens
atatcgcgccactgt

SEQ ID NO: 256597 - DNA, 15 bp, Homo sapiens
gatatcgcgccactg

SEQ ID NO: 256598 - DNA, 15 bp, Homo sapiens
cgatatcgcgccact

SEQ ID NO: 256599 - DNA, 15 bp, Homo sapiens
ccgatatcgcgccac

SEQ ID NO: 256600 - DNA, 15 bp, Homo sapiens
gccgatatcgcgcca

SEQ ID NO: 256601 - DNA, 15 bp, Homo sapiens
agccgatatcgcgcc

SEQ ID NO: 256602 - DNA, 15 bp, Homo sapiens
gagccgatatcgcgc

SEQ ID NO: 256603 - DNA, 15 bp, Homo sapiens
tgagccgatatcgcg

SEQ ID NO: 256604 - DNA, 15 bp, Homo sapiens
gtgagccgatatcgc

SEQ ID NO: 256605 - DNA, 15 bp, Homo sapiens
ggtgagccgatatcg

SEQ ID NO: 256606 - DNA, 15 bp, Homo sapiens
tggtgagccgatatc

SEQ ID NO: 256607 - DNA, 15 bp, Homo sapiens
gtggtgagccgatat

SEQ ID NO: 256608 - DNA, 15 bp, Homo sapiens
tgtggtgagccgata

SEQ ID NO: 256609 - DNA, 15 bp, Homo sapiens
ttgtggtgagccgat

SEQ ID NO: 256610 - DNA, 15 bp, Homo sapiens
gttgtggtgagccga

SEQ ID NO: 256611 - DNA, 15 bp, Homo sapiens
ggttgtggtgagccg

SEQ ID NO: 256612 - DNA, 15 bp, Homo sapiens
aggttgtggtgagcc

SEQ ID NO: 256613 - DNA, 15 bp, Homo sapiens
agaggttgtggtgag

SEQ ID NO: 256614 - DNA, 15 bp, Homo sapiens
cagaggttgtggtga

SEQ ID NO: 256615 - DNA, 15 bp, Homo sapiens
gcagaggttgtggtg

SEQ ID NO: 256616 - DNA, 15 bp, Homo sapiens
ggcagaggttgtggt

SEQ ID NO: 256617 - DNA, 15 bp, Homo sapiens
aggcagaggttgtgg

SEQ ID NO: 256618 - DNA, 15 bp, Homo sapiens
gaggcagaggttgtg

SEQ ID NO: 256619 - DNA, 15 bp, Homo sapiens
ggaggcagaggttgt

SEQ ID NO: 256620 - DNA, 15 bp, Homo sapiens
gggaggcagaggttg

SEQ ID NO: 256621 - DNA, 15 bp, Homo sapiens
tgggaggcagaggtt

SEQ ID NO: 256622 - DNA, 15 bp, Homo sapiens
ctgggaggcagaggt

SEQ ID NO: 256623 - DNA, 15 bp, Homo sapiens
cctgggaggcagagg

SEQ ID NO: 256624 - DNA, 15 bp, Homo sapiens
acctgggaggcagag

SEQ ID NO: 256625 - DNA, 15 bp, Homo sapiens
aacctgggaggcaga

SEQ ID NO: 256626 - DNA, 15 bp, Homo sapiens
gaacctgggaggcag

SEQ ID NO: 256627 - DNA, 15 bp, Homo sapiens
tgaacctgggaggca

SEQ ID NO: 256628 - DNA, 15 bp, Homo sapiens
ttgaacctgggaggc

SEQ ID NO: 256629 - DNA, 15 bp, Homo sapiens
cttgaacctgggagg

SEQ ID NO: 256630 - DNA, 15 bp, Homo sapiens
ccttgaacctgggag

SEQ ID NO: 256631 - DNA, 15 bp, Homo sapiens
cccttgaacctggga

SEQ ID NO: 256632 - DNA, 15 bp, Homo sapiens
tcccttgaacctggg

SEQ ID NO: 256633 - DNA, 15 bp, Homo sapiens
atcccttgaacctgg

SEQ ID NO: 256634 - DNA, 15 bp, Homo sapiens
aatcccttgaacctg

SEQ ID NO: 256635 - DNA, 15 bp, Homo sapiens
gaatcccttgaacct

SEQ ID NO: 256636 - DNA, 15 bp, Homo sapiens
agaatcccttgaacc

SEQ ID NO: 256637 - DNA, 15 bp, Homo sapiens
gagaatcccttgaac

SEQ ID NO: 256638 - DNA, 15 bp, Homo sapiens
ggagaatcccttgaa

SEQ ID NO: 256639 - DNA, 15 bp, Homo sapiens
gggagaatcccttga

SEQ ID NO: 256640 - DNA, 15 bp, Homo sapiens
cgggagaatcccttg

SEQ ID NO: 256641 - DNA, 15 bp, Homo sapiens
gcgggagaatccctt

SEQ ID NO: 256642 - DNA, 15 bp, Homo sapiens
ggcgggagaatccct

SEQ ID NO: 256643 - DNA, 15 bp, Homo sapiens
aggcgggagaatccc

SEQ ID NO: 256644 - DNA, 15 bp, Homo sapiens
gaggcgggagaatcc

SEQ ID NO: 256645 - DNA, 15 bp, Homo sapiens
tgaggcgggagaatc

SEQ ID NO: 256646 - DNA, 15 bp, Homo sapiens
ctgaggcgggagaat

SEQ ID NO: 256647 - DNA, 15 bp, Homo sapiens
gctgaggcgggagaa

SEQ ID NO: 256648 - DNA, 15 bp, Homo sapiens
agctgaggcgggaga

SEQ ID NO: 256649 - DNA, 15 bp, Homo sapiens
aagctgaggcgggag

SEQ ID NO: 256650 - DNA, 15 bp, Homo sapiens
gaagctgaggcggga

SEQ ID NO: 256651 - DNA, 15 bp, Homo sapiens
ggaagctgaggcggg

SEQ ID NO: 256652 - DNA, 15 bp, Homo sapiens
tggaagctgaggcgg

SEQ ID NO: 256653 - DNA, 15 bp, Homo sapiens
ctggaagctgaggcg

SEQ ID NO: 256654 - DNA, 15 bp, Homo sapiens
tctggaagctgaggc

SEQ ID NO: 256655 - DNA, 15 bp, Homo sapiens
ctctggaagctgagg

SEQ ID NO: 256656 - DNA, 15 bp, Homo sapiens
actctggaagctgag

SEQ ID NO: 256657 - DNA, 15 bp, Homo sapiens
tactctggaagctga

SEQ ID NO: 256658 - DNA, 15 bp, Homo sapiens
ctactctggaagctg

SEQ ID NO: 256659 - DNA, 15 bp, Homo sapiens
gctactctggaagct

SEQ ID NO: 256660 - DNA, 15 bp, Homo sapiens
agctactctggaagc

SEQ ID NO: 256661 - DNA, 15 bp, Homo sapiens
cagctactctggaag

SEQ ID NO: 256662 - DNA, 15 bp, Homo sapiens
ccagctactctggaa

SEQ ID NO: 256663 - DNA, 15 bp, Homo sapiens
cccagctactctgga

SEQ ID NO: 256664 - DNA, 15 bp, Homo sapiens
tcccagctactctgg

SEQ ID NO: 256665 - DNA, 15 bp, Homo sapiens
gtcccagctactctg

SEQ ID NO: 256666 - DNA, 15 bp, Homo sapiens
agtcccagctactct

SEQ ID NO: 256667 - DNA, 15 bp, Homo sapiens
tagtcccagctactc

SEQ ID NO: 256668 - DNA, 15 bp, Homo sapiens
gtagtcccagctact

SEQ ID NO: 256669 - DNA, 15 bp, Homo sapiens
tgtagtcccagctac

SEQ ID NO: 256670 - DNA, 15 bp, Homo sapiens
ctgtagtcccagcta

SEQ ID NO: 256671 - DNA, 15 bp, Homo sapiens
tctgtagtcccagct

SEQ ID NO: 256672 - DNA, 15 bp, Homo sapiens
gtctgtagtcccagc

SEQ ID NO: 256673 - DNA, 15 bp, Homo sapiens
tgtctgtagtcccag

SEQ ID NO: 256674 - DNA, 15 bp, Homo sapiens
gtgtctgtagtccca

SEQ ID NO: 256675 - DNA, 15 bp, Homo sapiens
ggtgtctgtagtccc

SEQ ID NO: 256676 - DNA, 15 bp, Homo sapiens
gggtgtctgtagtcc

SEQ ID NO: 256677 - DNA, 15 bp, Homo sapiens
tgggtgtctgtagtc

SEQ ID NO: 256678 - DNA, 15 bp, Homo sapiens
gtgggtgtctgtagt

SEQ ID NO: 256679 - DNA, 15 bp, Homo sapiens
ggtgggtgtctgtag

SEQ ID NO: 256680 - DNA, 15 bp, Homo sapiens
tggtgggtgtctgta

SEQ ID NO: 256681 - DNA, 15 bp, Homo sapiens
gtggtgggtgtctgt

SEQ ID NO: 256682 - DNA, 15 bp, Homo sapiens
ggtggtgggtgtctg

SEQ ID NO: 256683 - DNA, 15 bp, Homo sapiens
tggtggtgggtgtct

SEQ ID NO: 256684 - DNA, 15 bp, Homo sapiens
atggtggtgggtgtc

SEQ ID NO: 256685 - DNA, 15 bp, Homo sapiens
catggtggtgggtgt

SEQ ID NO: 256686 - DNA, 15 bp, Homo sapiens
gcatggtggtgggtg

SEQ ID NO: 256687 - DNA, 15 bp, Homo sapiens
cgcatggtggtgggt

SEQ ID NO: 256688 - DNA, 15 bp, Homo sapiens
acgcatggtggtggg

SEQ ID NO: 256689 - DNA, 15 bp, Homo sapiens
cacgcatggtggtgg

SEQ ID NO: 256690 - DNA, 15 bp, Homo sapiens
ccacgcatggtggtg

SEQ ID NO: 256691 - DNA, 15 bp, Homo sapiens
gccacgcatggtggt

SEQ ID NO: 256692 - DNA, 15 bp, Homo sapiens
agccacgcatggtgg

SEQ ID NO: 256693 - DNA, 15 bp, Homo sapiens
tagccacgcatggtg

SEQ ID NO: 256694 - DNA, 15 bp, Homo sapiens
ttagccacgcatggt

SEQ ID NO: 256695 - DNA, 15 bp, Homo sapiens
attagccacgcatgg

SEQ ID NO: 256696 - DNA, 15 bp, Homo sapiens
aattagccacgcatg

SEQ ID NO: 256697 - DNA, 15 bp, Homo sapiens
aaattagccacgcat

SEQ ID NO: 256698 - DNA, 15 bp, Homo sapiens
aaaattagccacgca

SEQ ID NO: 256699 - DNA, 15 bp, Homo sapiens
aaaaattagccacgc

SEQ ID NO: 256700 - DNA, 15 bp, Homo sapiens
caaaaattagccacg

SEQ ID NO: 256701 - DNA, 15 bp, Homo sapiens
acaaaaattagccac

SEQ ID NO: 256702 - DNA, 15 bp, Homo sapiens
ctctctactaaaaat

SEQ ID NO: 256703 - DNA, 15 bp, Homo sapiens
cctctctactaaaaa

SEQ ID NO: 256704 - DNA, 15 bp, Homo sapiens
ccctctctactaaaa

SEQ ID NO: 256705 - DNA, 15 bp, Homo sapiens
cccctctctactaaa

SEQ ID NO: 256706 - DNA, 15 bp, Homo sapiens
ccccctctctactaa

SEQ ID NO: 256707 - DNA, 15 bp, Homo sapiens
accccctctctacta

SEQ ID NO: 256708 - DNA, 15 bp, Homo sapiens
aaccccctctctact

SEQ ID NO: 256709 - DNA, 15 bp, Homo sapiens
aaaccccctctctac

SEQ ID NO: 256710 - DNA, 15 bp, Homo sapiens
gaaaccccctctcta

SEQ ID NO: 256711 - DNA, 15 bp, Homo sapiens
cgaaaccccctctct

SEQ ID NO: 256712 - DNA, 15 bp, Homo sapiens
gcgaaaccccctctc

SEQ ID NO: 256713 - DNA, 15 bp, Homo sapiens
ggcgaaaccccctct

SEQ ID NO: 256714 - DNA, 15 bp, Homo sapiens
tggcgaaaccccctc

SEQ ID NO: 256715 - DNA, 15 bp, Homo sapiens
atggcgaaaccccct

SEQ ID NO: 256716 - DNA, 15 bp, Homo sapiens
catggcgaaaccccc

SEQ ID NO: 256717 - DNA, 15 bp, Homo sapiens
acatggcgaaacccc

SEQ ID NO: 256718 - DNA, 15 bp, Homo sapiens
aacatggcgaaaccc

SEQ ID NO: 256719 - DNA, 15 bp, Homo sapiens
caacatggcgaaacc

SEQ ID NO: 256720 - DNA, 15 bp, Homo sapiens
ccaacatggcgaaac

SEQ ID NO: 256721 - DNA, 15 bp, Homo sapiens
gccaacatggcgaaa

SEQ ID NO: 256722 - DNA, 15 bp, Homo sapiens
ggccaacatggcgaa

SEQ ID NO: 256723 - DNA, 15 bp, Homo sapiens
tggccaacatggcga

SEQ ID NO: 256724 - DNA, 15 bp, Homo sapiens
ctggccaacatggcg

SEQ ID NO: 256725 - DNA, 15 bp, Homo sapiens
cctggccaacatggc

SEQ ID NO: 256726 - DNA, 15 bp, Homo sapiens
tgaaaccagcctggc

SEQ ID NO: 256727 - DNA, 15 bp, Homo sapiens
agtcaggagtttgaa

SEQ ID NO: 256728 - DNA, 15 bp, Homo sapiens
aagtcaggagtttga

SEQ ID NO: 256729 - DNA, 15 bp, Homo sapiens
gaagtcaggagtttg

SEQ ID NO: 256730 - DNA, 15 bp, Homo sapiens
tgaagtcaggagttt

SEQ ID NO: 256731 - DNA, 15 bp, Homo sapiens
ctgaagtcaggagtt

SEQ ID NO: 256732 - DNA, 15 bp, Homo sapiens
cctgaagtcaggagt

SEQ ID NO: 256733 - DNA, 15 bp, Homo sapiens
acctgaagtcaggag

SEQ ID NO: 256734 - DNA, 15 bp, Homo sapiens
cacctgaagtcagga

SEQ ID NO: 256735 - DNA, 15 bp, Homo sapiens
tcacctgaagtcagg

SEQ ID NO: 256736 - DNA, 15 bp, Homo sapiens
atcacctgaagtcag

SEQ ID NO: 256737 - DNA, 15 bp, Homo sapiens
gatcacctgaagtca

SEQ ID NO: 256738 - DNA, 15 bp, Homo sapiens
ggatcacctgaagtc

SEQ ID NO: 256739 - DNA, 15 bp, Homo sapiens
cggatcacctgaagt

SEQ ID NO: 256740 - DNA, 15 bp, Homo sapiens
gcggatcacctgaag

SEQ ID NO: 256741 - DNA, 15 bp, Homo sapiens
ggcggatcacctgaa

SEQ ID NO: 256742 - DNA, 15 bp, Homo sapiens
aggcggatcacctga

SEQ ID NO: 256743 - DNA, 15 bp, Homo sapiens
caggcggatcacctg

SEQ ID NO: 256744 - DNA, 15 bp, Homo sapiens
gcaggcggatcacct

SEQ ID NO: 256745 - DNA, 15 bp, Homo sapiens
ggcaggcggatcacc

SEQ ID NO: 256746 - DNA, 15 bp, Homo sapiens
tggcaggcggatcac

SEQ ID NO: 256747 - DNA, 15 bp, Homo sapiens
gtggcaggcggatca

SEQ ID NO: 256748 - DNA, 15 bp, Homo sapiens
cgtggcaggcggatc

SEQ ID NO: 256749 - DNA, 15 bp, Homo sapiens
ccgtggcaggcggat

SEQ ID NO: 256750 - DNA, 15 bp, Homo sapiens
gccgtggcaggcgga

SEQ ID NO: 256751 - DNA, 15 bp, Homo sapiens
ggccgtggcaggcgg

SEQ ID NO: 256752 - DNA, 15 bp, Homo sapiens
aggccgtggcaggcg

SEQ ID NO: 256753 - DNA, 15 bp, Homo sapiens
gaggccgtggcaggc

SEQ ID NO: 256754 - DNA, 15 bp, Homo sapiens
ggaggccgtggcagg

SEQ ID NO: 256755 - DNA, 15 bp, Homo sapiens
gggaggccgtggcag

SEQ ID NO: 256756 - DNA, 15 bp, Homo sapiens
tgggaggccgtggca

SEQ ID NO: 256757 - DNA, 15 bp, Homo sapiens
ttgggaggccgtggc

SEQ ID NO: 256758 - DNA, 15 bp, Homo sapiens
attgggaggccgtgg

SEQ ID NO: 256759 - DNA, 15 bp, Homo sapiens
aattgggaggccgtg

SEQ ID NO: 256760 - DNA, 15 bp, Homo sapiens
aaattgggaggccgt

SEQ ID NO: 256761 - DNA, 15 bp, Homo sapiens
taaattgggaggccg

SEQ ID NO: 256762 - DNA, 15 bp, Homo sapiens
gtaaattgggaggcc

SEQ ID NO: 256763 - DNA, 15 bp, Homo sapiens
agtaaattgggaggc

SEQ ID NO: 256764 - DNA, 15 bp, Homo sapiens
cagtaaattgggagg

SEQ ID NO: 256765 - DNA, 15 bp, Homo sapiens
ccagtaaattgggag

SEQ ID NO: 256766 - DNA, 15 bp, Homo sapiens
cccagtaaattggga

SEQ ID NO: 256767 - DNA, 15 bp, Homo sapiens
tcccagtaaattggg

SEQ ID NO: 256768 - DNA, 15 bp, Homo sapiens
atcccagtaaattgg

SEQ ID NO: 256769 - DNA, 15 bp, Homo sapiens
aatcccagtaaattg

SEQ ID NO: 256770 - DNA, 15 bp, Homo sapiens
taatcccagtaaatt

SEQ ID NO: 256771 - DNA, 15 bp, Homo sapiens
gtaatcccagtaaat

SEQ ID NO: 256772 - DNA, 15 bp, Homo sapiens
tgtaatcccagtaaa

SEQ ID NO: 256773 - DNA, 15 bp, Homo sapiens
ctgtaatcccagtaa

SEQ ID NO: 256774 - DNA, 15 bp, Homo sapiens
cctgtaatcccagta

SEQ ID NO: 256775 - DNA, 15 bp, Homo sapiens
ccctgtaatcccagt

SEQ ID NO: 256776 - DNA, 15 bp, Homo sapiens
cccctgtaatcccag

SEQ ID NO: 256777 - DNA, 15 bp, Homo sapiens
acccctgtaatccca

SEQ ID NO: 256778 - DNA, 15 bp, Homo sapiens
cacccctgtaatccc

SEQ ID NO: 256779 - DNA, 15 bp, Homo sapiens
ccacccctgtaatcc

SEQ ID NO: 256780 - DNA, 15 bp, Homo sapiens
cccacccctgtaatc

SEQ ID NO: 256781 - DNA, 15 bp, Homo sapiens
gcccacccctgtaat

SEQ ID NO: 256782 - DNA, 15 bp, Homo sapiens
ggcccacccctgtaa

SEQ ID NO: 256783 - DNA, 15 bp, Homo sapiens
tggcccacccctgta

SEQ ID NO: 256784 - DNA, 15 bp, Homo sapiens
gtggcccacccctgt

SEQ ID NO: 256785 - DNA, 15 bp, Homo sapiens
ggtggcccacccctg

SEQ ID NO: 256786 - DNA, 15 bp, Homo sapiens
cggtggcccacccct

SEQ ID NO: 256787 - DNA, 15 bp, Homo sapiens
gcggtggcccacccc

SEQ ID NO: 256788 - DNA, 15 bp, Homo sapiens
cgcggtggcccaccc

SEQ ID NO: 256789 - DNA, 15 bp, Homo sapiens
gcgcggtggcccacc

SEQ ID NO: 256790 - DNA, 15 bp, Homo sapiens
ggcgcggtggcccac

SEQ ID NO: 256791 - DNA, 15 bp, Homo sapiens
gggcgcggtggccca

SEQ ID NO: 256792 - DNA, 15 bp, Homo sapiens
cgggcgcggtggccc

SEQ ID NO: 256793 - DNA, 15 bp, Homo sapiens
ccgggcgcggtggcc

SEQ ID NO: 256794 - DNA, 15 bp, Homo sapiens
gccgggcgcggtggc

SEQ ID NO: 256795 - DNA, 15 bp, Homo sapiens
ggccgggcgcggtgg

SEQ ID NO: 256796 - DNA, 15 bp, Homo sapiens
aggccgggcgcggtg

SEQ ID NO: 256797 - DNA, 15 bp, Homo sapiens
aaggccgggcgcggt

SEQ ID NO: 256798 - DNA, 15 bp, Homo sapiens
aaaggccgggcgcgg

SEQ ID NO: 256799 - DNA, 15 bp, Homo sapiens
aaaaggccgggcgcg

SEQ ID NO: 256800 - DNA, 15 bp, Homo sapiens
aaaaaggccgggcgc

SEQ ID NO: 256801 - DNA, 15 bp, Homo sapiens
gaaaaaggccgggcg

SEQ ID NO: 256802 - DNA, 15 bp, Homo sapiens
agaaaaaggccgggc

SEQ ID NO: 256803 - DNA, 15 bp, Homo sapiens
aagaaaaaggccggg

SEQ ID NO: 256804 - DNA, 15 bp, Homo sapiens
taagaaaaaggccgg

SEQ ID NO: 256805 - DNA, 15 bp, Homo sapiens
ttaagaaaaaggccg

SEQ ID NO: 256806 - DNA, 15 bp, Homo sapiens
attaagaaaaaggcc

SEQ ID NO: 256807 - DNA, 15 bp, Homo sapiens
aattaagaaaaaggc

SEQ ID NO: 256808 - DNA, 15 bp, Homo sapiens
aaattaagaaaaagg

SEQ ID NO: 256809 - DNA, 15 bp, Homo sapiens
aaaattaagaaaaag

SEQ ID NO: 256810 - DNA, 15 bp, Homo sapiens
aaaaattaagaaaaa

SEQ ID NO: 256811 - DNA, 15 bp, Homo sapiens
taaaaattaagaaaa

SEQ ID NO: 256812 - DNA, 15 bp, Homo sapiens
ttaaaaattaagaaa

SEQ ID NO: 256813 - DNA, 15 bp, Homo sapiens
tttaaaaattaagaa

SEQ ID NO: 256814 - DNA, 15 bp, Homo sapiens
ttttaaaaattaaga

SEQ ID NO: 256815 - DNA, 15 bp, Homo sapiens
tttttaaaaattaag

SEQ ID NO: 256816 - DNA, 15 bp, Homo sapiens
atttttaaaaattaa

SEQ ID NO: 256817 - DNA, 15 bp, Homo sapiens
tatttttaaaaatta

SEQ ID NO: 256818 - DNA, 15 bp, Homo sapiens
atatttttaaaaatt

SEQ ID NO: 256819 - DNA, 15 bp, Homo sapiens
aatatttttaaaaat

SEQ ID NO: 256820 - DNA, 15 bp, Homo sapiens
taatatttttaaaaa

SEQ ID NO: 256821 - DNA, 15 bp, Homo sapiens
ttaatatttttaaaa

SEQ ID NO: 256822 - DNA, 15 bp, Homo sapiens
tttaatatttttaaa

SEQ ID NO: 256823 - DNA, 15 bp, Homo sapiens
ctttaatatttttaa

SEQ ID NO: 256824 - DNA, 15 bp, Homo sapiens
actttaatattttta

SEQ ID NO: 256825 - DNA, 15 bp, Homo sapiens
aactttaatattttt

SEQ ID NO: 256826 - DNA, 15 bp, Homo sapiens
aaactttaatatttt

SEQ ID NO: 256827 - DNA, 15 bp, Homo sapiens
aaaactttaatattt

SEQ ID NO: 256828 - DNA, 15 bp, Homo sapiens
taaaactttaatatt

SEQ ID NO: 256829 - DNA, 15 bp, Homo sapiens
ataaaactttaatat

SEQ ID NO: 256830 - DNA, 15 bp, Homo sapiens
gataaaactttaata

SEQ ID NO: 256831 - DNA, 15 bp, Homo sapiens
ggataaaactttaat

SEQ ID NO: 256832 - DNA, 15 bp, Homo sapiens
gggataaaactttaa

SEQ ID NO: 256833 - DNA, 15 bp, Homo sapiens
tgggataaaacttta

SEQ ID NO: 256834 - DNA, 15 bp, Homo sapiens
atgggataaaacttt

SEQ ID NO: 256835 - DNA, 15 bp, Homo sapiens
aatgggataaaactt

SEQ ID NO: 256836 - DNA, 15 bp, Homo sapiens
gaatgggataaaact

SEQ ID NO: 256837 - DNA, 15 bp, Homo sapiens
ggaatgggataaaac

SEQ ID NO: 256838 - DNA, 15 bp, Homo sapiens
aggaatgggataaaa

SEQ ID NO: 256839 - DNA, 15 bp, Homo sapiens
caggaatgggataaa

SEQ ID NO: 256840 - DNA, 15 bp, Homo sapiens
acaggaatgggataa

SEQ ID NO: 256841 - DNA, 15 bp, Homo sapiens
aacaggaatgggata

SEQ ID NO: 256842 - DNA, 15 bp, Homo sapiens
caacaggaatgggat

SEQ ID NO: 256843 - DNA, 15 bp, Homo sapiens
tcaacaggaatggga

SEQ ID NO: 256844 - DNA, 15 bp, Homo sapiens
ttcaacaggaatggg

SEQ ID NO: 256845 - DNA, 15 bp, Homo sapiens
gttcaacaggaatgg

SEQ ID NO: 256846 - DNA, 15 bp, Homo sapiens
ggttcaacaggaatg

SEQ ID NO: 256847 - DNA, 15 bp, Homo sapiens
tggttcaacaggaat

SEQ ID NO: 256848 - DNA, 15 bp, Homo sapiens
atggttcaacaggaa

SEQ ID NO: 256849 - DNA, 15 bp, Homo sapiens
tatggttcaacagga

SEQ ID NO: 256850 - DNA, 15 bp, Homo sapiens
atatggttcaacagg

SEQ ID NO: 256851 - DNA, 15 bp, Homo sapiens
aatatggttcaacag

SEQ ID NO: 256852 - DNA, 15 bp, Homo sapiens
gaatatggttcaaca

SEQ ID NO: 256853 - DNA, 15 bp, Homo sapiens
ggaatatggttcaac

SEQ ID NO: 256854 - DNA, 15 bp, Homo sapiens
aggaatatggttcaa

SEQ ID NO: 256855 - DNA, 15 bp, Homo sapiens
caggaatatggttca

SEQ ID NO: 256856 - DNA, 15 bp, Homo sapiens
tcaggaatatggttc

SEQ ID NO: 256857 - DNA, 15 bp, Homo sapiens
atcaggaatatggtt

SEQ ID NO: 256858 - DNA, 15 bp, Homo sapiens
aatcaggaatatggt

SEQ ID NO: 256859 - DNA, 15 bp, Homo sapiens
aaatcaggaatatgg

SEQ ID NO: 256860 - DNA, 15 bp, Homo sapiens
taaatcaggaatatg

SEQ ID NO: 256861 - DNA, 15 bp, Homo sapiens
ttaaatcaggaatat

SEQ ID NO: 256862 - DNA, 15 bp, Homo sapiens
tttaaatcaggaata

SEQ ID NO: 256863 - DNA, 15 bp, Homo sapiens
ttttaaatcaggaat

SEQ ID NO: 256864 - DNA, 15 bp, Homo sapiens
cttttaaatcaggaa

SEQ ID NO: 256865 - DNA, 15 bp, Homo sapiens
acttttaaatcagga

SEQ ID NO: 256866 - DNA, 15 bp, Homo sapiens
aacttttaaatcagg

SEQ ID NO: 256867 - DNA, 15 bp, Homo sapiens
caacttttaaatcag

SEQ ID NO: 256868 - DNA, 15 bp, Homo sapiens
ccaacttttaaatca

SEQ ID NO: 256869 - DNA, 15 bp, Homo sapiens
tccaacttttaaatc

SEQ ID NO: 256870 - DNA, 15 bp, Homo sapiens
ttccaacttttaaat

SEQ ID NO: 256871 - DNA, 15 bp, Homo sapiens
tttccaacttttaaa

SEQ ID NO: 256872 - DNA, 15 bp, Homo sapiens
gtttccaacttttaa

SEQ ID NO: 256873 - DNA, 15 bp, Homo sapiens
cgtttccaactttta

SEQ ID NO: 256874 - DNA, 15 bp, Homo sapiens
acgtttccaactttt

SEQ ID NO: 256875 - DNA, 15 bp, Homo sapiens
cacgtttccaacttt

SEQ ID NO: 256876 - DNA, 15 bp, Homo sapiens
ccacgtttccaactt

SEQ ID NO: 256877 - DNA, 15 bp, Homo sapiens
accacgtttccaact

SEQ ID NO: 256878 - DNA, 15 bp, Homo sapiens
caccacgtttccaac

SEQ ID NO: 256879 - DNA, 15 bp, Homo sapiens
tcaccacgtttccaa

SEQ ID NO: 256880 - DNA, 15 bp, Homo sapiens
ttcaccacgtttcca

SEQ ID NO: 256881 - DNA, 15 bp, Homo sapiens
gttcaccacgtttcc

SEQ ID NO: 256882 - DNA, 15 bp, Homo sapiens
ggttcaccacgtttc

SEQ ID NO: 256883 - DNA, 15 bp, Homo sapiens
aggttcaccacgttt

SEQ ID NO: 256884 - DNA, 15 bp, Homo sapiens
taggttcaccacgtt

SEQ ID NO: 256885 - DNA, 15 bp, Homo sapiens
ctaggttcaccacgt

SEQ ID NO: 256886 - DNA, 15 bp, Homo sapiens
tctaggttcaccacg

SEQ ID NO: 256887 - DNA, 15 bp, Homo sapiens
ttctaggttcaccac

SEQ ID NO: 256888 - DNA, 15 bp, Homo sapiens
cttctaggttcacca

SEQ ID NO: 256889 - DNA, 15 bp, Homo sapiens
acttctaggttcacc

SEQ ID NO: 256890 - DNA, 15 bp, Homo sapiens
tacttctaggttcac

SEQ ID NO: 256891 - DNA, 15 bp, Homo sapiens
atacttctaggttca

SEQ ID NO: 256892 - DNA, 15 bp, Homo sapiens
aatacttctaggttc

SEQ ID NO: 256893 - DNA, 15 bp, Homo sapiens
aaatacttctaggtt

SEQ ID NO: 256894 - DNA, 15 bp, Homo sapiens
caaatacttctaggt

SEQ ID NO: 256895 - DNA, 15 bp, Homo sapiens
acaaatacttctagg

SEQ ID NO: 256896 - DNA, 15 bp, Homo sapiens
aacaaatacttctag

SEQ ID NO: 256897 - DNA, 15 bp, Homo sapiens
caacaaatacttcta

SEQ ID NO: 256898 - DNA, 15 bp, Homo sapiens
gcaacaaatacttct

SEQ ID NO: 256899 - DNA, 15 bp, Homo sapiens
agcaacaaatacttc

SEQ ID NO: 256900 - DNA, 15 bp, Homo sapiens
cagcaacaaatactt

SEQ ID NO: 256901 - DNA, 15 bp, Homo sapiens
ccagcaacaaatact

SEQ ID NO: 256902 - DNA, 15 bp, Homo sapiens
cccagcaacaaatac

SEQ ID NO: 256903 - DNA, 15 bp, Homo sapiens
acccagcaacaaata

SEQ ID NO: 256904 - DNA, 15 bp, Homo sapiens
aacccagcaacaaat

SEQ ID NO: 256905 - DNA, 15 bp, Homo sapiens
aaacccagcaacaaa

SEQ ID NO: 256906 - DNA, 15 bp, Homo sapiens
caaacccagcaacaa

SEQ ID NO: 256907 - DNA, 15 bp, Homo sapiens
acaaacccagcaaca

SEQ ID NO: 256908 - DNA, 15 bp, Homo sapiens
gacaaacccagcaac

SEQ ID NO: 256909 - DNA, 15 bp, Homo sapiens
agacaaacccagcaa

SEQ ID NO: 256910 - DNA, 15 bp, Homo sapiens
aagacaaacccagca

SEQ ID NO: 256911 - DNA, 15 bp, Homo sapiens
gaagacaaacccagc

SEQ ID NO: 256912 - DNA, 15 bp, Homo sapiens
tgaagacaaacccag

SEQ ID NO: 256913 - DNA, 15 bp, Homo sapiens
ctgaagacaaaccca

SEQ ID NO: 256914 - DNA, 15 bp, Homo sapiens
cctgaagacaaaccc

SEQ ID NO: 256915 - DNA, 15 bp, Homo sapiens
acctgaagacaaacc

SEQ ID NO: 256916 - DNA, 15 bp, Homo sapiens
aacctgaagacaaac

SEQ ID NO: 256917 - DNA, 15 bp, Homo sapiens
gaacctgaagacaaa

SEQ ID NO: 256918 - DNA, 15 bp, Homo sapiens
agaacctgaagacaa

SEQ ID NO: 256919 - DNA, 15 bp, Homo sapiens
cagaacctgaagaca

SEQ ID NO: 256920 - DNA, 15 bp, Homo sapiens
acagaacctgaagac

SEQ ID NO: 256921 - DNA, 15 bp, Homo sapiens
aacagaacctgaaga

SEQ ID NO: 256922 - DNA, 15 bp, Homo sapiens
caacagaacctgaag

SEQ ID NO: 256923 - DNA, 15 bp, Homo sapiens
gcaacagaacctgaa

SEQ ID NO: 256924 - DNA, 15 bp, Homo sapiens
agcaacagaacctga

SEQ ID NO: 256925 - DNA, 15 bp, Homo sapiens
gagcaacagaacctg

SEQ ID NO: 256926 - DNA, 15 bp, Homo sapiens
cgagcaacagaacct

SEQ ID NO: 256927 - DNA, 15 bp, Homo sapiens
ccgagcaacagaacc

SEQ ID NO: 256928 - DNA, 15 bp, Homo sapiens
accgagcaacagaac

SEQ ID NO: 256929 - DNA, 15 bp, Homo sapiens
aaccgagcaacagaa

SEQ ID NO: 256930 - DNA, 15 bp, Homo sapiens
aaaccgagcaacaga

SEQ ID NO: 256931 - DNA, 15 bp, Homo sapiens
aaaaccgagcaacag

SEQ ID NO: 256932 - DNA, 15 bp, Homo sapiens
gaaaaccgagcaaca

SEQ ID NO: 256933 - DNA, 15 bp, Homo sapiens
agaaaaccgagcaac

SEQ ID NO: 256934 - DNA, 15 bp, Homo sapiens
tagaaaaccgagcaa

SEQ ID NO: 256935 - DNA, 15 bp, Homo sapiens
ctagaaaaccgagca

SEQ ID NO: 256936 - DNA, 15 bp, Homo sapiens
actagaaaaccgagc

SEQ ID NO: 256937 - DNA, 15 bp, Homo sapiens
aactagaaaaccgag

SEQ ID NO: 256938 - DNA, 15 bp, Homo sapiens
gaactagaaaaccga

SEQ ID NO: 256939 - DNA, 15 bp, Homo sapiens
ggaactagaaaaccg

SEQ ID NO: 256940 - DNA, 15 bp, Homo sapiens
gggaactagaaaacc

SEQ ID NO: 256941 - DNA, 15 bp, Homo sapiens
ggggaactagaaaac

SEQ ID NO: 256942 - DNA, 15 bp, Homo sapiens
tggggaactagaaaa

SEQ ID NO: 256943 - DNA, 15 bp, Homo sapiens
gtggggaactagaaa

SEQ ID NO: 256944 - DNA, 15 bp, Homo sapiens
ggtggggaactagaa

SEQ ID NO: 256945 - DNA, 15 bp, Homo sapiens
aggtggggaactaga

SEQ ID NO: 256946 - DNA, 15 bp, Homo sapiens
taggtggggaactag

SEQ ID NO: 256947 - DNA, 15 bp, Homo sapiens
ctaggtggggaacta

SEQ ID NO: 256948 - DNA, 15 bp, Homo sapiens
actaggtggggaact

SEQ ID NO: 256949 - DNA, 15 bp, Homo sapiens
gactaggtggggaac

SEQ ID NO: 256950 - DNA, 15 bp, Homo sapiens
agactaggtggggaa

SEQ ID NO: 256951 - DNA, 15 bp, Homo sapiens
cagactaggtgggga

SEQ ID NO: 256952 - DNA, 15 bp, Homo sapiens
ccagactaggtgggg

SEQ ID NO: 256953 - DNA, 15 bp, Homo sapiens
cccagactaggtggg

SEQ ID NO: 256954 - DNA, 15 bp, Homo sapiens
acccagactaggtgg

SEQ ID NO: 256955 - DNA, 15 bp, Homo sapiens
aacccagactaggtg

SEQ ID NO: 256956 - DNA, 15 bp, Homo sapiens
taacccagactaggt

SEQ ID NO: 256957 - DNA, 15 bp, Homo sapiens
gtaacccagactagg

SEQ ID NO: 256958 - DNA, 15 bp, Homo sapiens
agtaacccagactag

SEQ ID NO: 256959 - DNA, 15 bp, Homo sapiens
gagtaacccagacta

SEQ ID NO: 256960 - DNA, 15 bp, Homo sapiens
agagtaacccagact

SEQ ID NO: 256961 - DNA, 15 bp, Homo sapiens
cagagtaacccagac

SEQ ID NO: 256962 - DNA, 15 bp, Homo sapiens
gcagagtaacccaga

SEQ ID NO: 256963 - DNA, 15 bp, Homo sapiens
tgcagagtaacccag

SEQ ID NO: 256964 - DNA, 15 bp, Homo sapiens
ctgcagagtaaccca

SEQ ID NO: 256965 - DNA, 15 bp, Homo sapiens
gctgcagagtaaccc

SEQ ID NO: 256966 - DNA, 15 bp, Homo sapiens
agctgcagagtaacc

SEQ ID NO: 256967 - DNA, 15 bp, Homo sapiens
tagctgcagagtaac

SEQ ID NO: 256968 - DNA, 15 bp, Homo sapiens
gtagctgcagagtaa

SEQ ID NO: 256969 - DNA, 15 bp, Homo sapiens
agtagctgcagagta

SEQ ID NO: 256970 - DNA, 15 bp, Homo sapiens
aagtagctgcagagt

SEQ ID NO: 256971 - DNA, 15 bp, Homo sapiens
aaagtagctgcagag

SEQ ID NO: 256972 - DNA, 15 bp, Homo sapiens
aaaagtagctgcaga

SEQ ID NO: 256973 - DNA, 15 bp, Homo sapiens
caaaagtagctgcag

SEQ ID NO: 256974 - DNA, 15 bp, Homo sapiens
gcaaaagtagctgca

SEQ ID NO: 256975 - DNA, 15 bp, Homo sapiens
tgcaaaagtagctgc

SEQ ID NO: 256976 - DNA, 15 bp, Homo sapiens
atgcaaaagtagctg

SEQ ID NO: 256977 - DNA, 15 bp, Homo sapiens
aatgcaaaagtagct

SEQ ID NO: 256978 - DNA, 15 bp, Homo sapiens
taatgcaaaagtagc

SEQ ID NO: 256979 - DNA, 15 bp, Homo sapiens
gtaatgcaaaagtag

SEQ ID NO: 256980 - DNA, 15 bp, Homo sapiens
tgtaatgcaaaagta

SEQ ID NO: 256981 - DNA, 15 bp, Homo sapiens
ttgtaatgcaaaagt

SEQ ID NO: 256982 - DNA, 15 bp, Homo sapiens
attgtaatgcaaaag

SEQ ID NO: 256983 - DNA, 15 bp, Homo sapiens
cattgtaatgcaaaa

SEQ ID NO: 256984 - DNA, 15 bp, Homo sapiens
ccattgtaatgcaaa

SEQ ID NO: 256985 - DNA, 15 bp, Homo sapiens
gccattgtaatgcaa

SEQ ID NO: 256986 - DNA, 15 bp, Homo sapiens
ggccattgtaatgca

SEQ ID NO: 256987 - DNA, 15 bp, Homo sapiens
aggccattgtaatgc

SEQ ID NO: 256988 - DNA, 15 bp, Homo sapiens
aaggccattgtaatg

SEQ ID NO: 256989 - DNA, 15 bp, Homo sapiens
caaggccattgtaat

SEQ ID NO: 256990 - DNA, 15 bp, Homo sapiens
ccaaggccattgtaa

SEQ ID NO: 256991 - DNA, 15 bp, Homo sapiens
accaaggccattgta

SEQ ID NO: 256992 - DNA, 15 bp, Homo sapiens
caccaaggccattgt

SEQ ID NO: 256993 - DNA, 15 bp, Homo sapiens
tcaccaaggccattg

SEQ ID NO: 256994 - DNA, 15 bp, Homo sapiens
ctcaccaaggccatt

SEQ ID NO: 256995 - DNA, 15 bp, Homo sapiens
tctcaccaaggccat

SEQ ID NO: 256996 - DNA, 15 bp, Homo sapiens
gtctcaccaaggcca

SEQ ID NO: 256997 - DNA, 15 bp, Homo sapiens
agtctcaccaaggcc

SEQ ID NO: 256998 - DNA, 15 bp, Homo sapiens
cagtctcaccaaggc

SEQ ID NO: 256999 - DNA, 15 bp, Homo sapiens
ccagtctcaccaagg

SEQ ID NO: 257000 - DNA, 15 bp, Homo sapiens
accagtctcaccaag

SEQ ID NO: 257001 - DNA, 15 bp, Homo sapiens
taccagtctcaccaa

SEQ ID NO: 257002 - DNA, 15 bp, Homo sapiens
ctaccagtctcacca

SEQ ID NO: 257003 - DNA, 15 bp, Homo sapiens
tctaccagtctcacc

SEQ ID NO: 257004 - DNA, 15 bp, Homo sapiens
gtctaccagtctcac

SEQ ID NO: 257005 - DNA, 15 bp, Homo sapiens
cgtctaccagtctca

SEQ ID NO: 257006 - DNA, 15 bp, Homo sapiens
ccgtctaccagtctc

SEQ ID NO: 257007 - DNA, 15 bp, Homo sapiens
cccgtctaccagtct

SEQ ID NO: 257008 - DNA, 15 bp, Homo sapiens
tcccgtctaccagtc

SEQ ID NO: 257009 - DNA, 15 bp, Homo sapiens
atcccgtctaccagt

SEQ ID NO: 257010 - DNA, 15 bp, Homo sapiens
aatcccgtctaccag

SEQ ID NO: 257011 - DNA, 15 bp, Homo sapiens
taatcccgtctacca

SEQ ID NO: 257012 - DNA, 15 bp, Homo sapiens
ttaatcccgtctacc

SEQ ID NO: 257013 - DNA, 15 bp, Homo sapiens
gttaatcccgtctac

SEQ ID NO: 257014 - DNA, 15 bp, Homo sapiens
agttaatcccgtcta

SEQ ID NO: 257015 - DNA, 15 bp, Homo sapiens
cagttaatcccgtct

SEQ ID NO: 257016 - DNA, 15 bp, Homo sapiens
tcagttaatcccgtc

SEQ ID NO: 257017 - DNA, 15 bp, Homo sapiens
ctcagttaatcccgt

SEQ ID NO: 257018 - DNA, 15 bp, Homo sapiens
tctcagttaatcccg

SEQ ID NO: 257019 - DNA, 15 bp, Homo sapiens
ttctcagttaatccc

SEQ ID NO: 257020 - DNA, 15 bp, Homo sapiens
attctcagttaatcc

SEQ ID NO: 257021 - DNA, 15 bp, Homo sapiens
aattctcagttaatc

SEQ ID NO: 257022 - DNA, 15 bp, Homo sapiens
gaattctcagttaat

SEQ ID NO: 257023 - DNA, 15 bp, Homo sapiens
tgaattctcagttaa

SEQ ID NO: 257024 - DNA, 15 bp, Homo sapiens
gtgaattctcagtta

SEQ ID NO: 257025 - DNA, 15 bp, Homo sapiens
tgtgaattctcagtt

SEQ ID NO: 257026 - DNA, 15 bp, Homo sapiens
ttgtgaattctcagt

SEQ ID NO: 257027 - DNA, 15 bp, Homo sapiens
cttgtgaattctcag

SEQ ID NO: 257028 - DNA, 15 bp, Homo sapiens
ccttgtgaattctca

SEQ ID NO: 257029 - DNA, 15 bp, Homo sapiens
cccttgtgaattctc

SEQ ID NO: 257030 - DNA, 15 bp, Homo sapiens
acccttgtgaattct

SEQ ID NO: 257031 - DNA, 15 bp, Homo sapiens
cacccttgtgaattc

SEQ ID NO: 257032 - DNA, 15 bp, Homo sapiens
ccacccttgtgaatt

SEQ ID NO: 257033 - DNA, 15 bp, Homo sapiens
cccacccttgtgaat

SEQ ID NO: 257034 - DNA, 15 bp, Homo sapiens
acccacccttgtgaa

SEQ ID NO: 257035 - DNA, 15 bp, Homo sapiens
gacccacccttgtga

SEQ ID NO: 257036 - DNA, 15 bp, Homo sapiens
tgacccacccttgtg

SEQ ID NO: 257037 - DNA, 15 bp, Homo sapiens
ctgacccacccttgt

SEQ ID NO: 257038 - DNA, 15 bp, Homo sapiens
actgacccacccttg

SEQ ID NO: 257039 - DNA, 15 bp, Homo sapiens
tactgacccaccctt

SEQ ID NO: 257040 - DNA, 15 bp, Homo sapiens
ctactgacccaccct

SEQ ID NO: 257041 - DNA, 15 bp, Homo sapiens
cctactgacccaccc

SEQ ID NO: 257042 - DNA, 15 bp, Homo sapiens
ccctactgacccacc

SEQ ID NO: 257043 - DNA, 15 bp, Homo sapiens
cccctactgacccac

SEQ ID NO: 257044 - DNA, 15 bp, Homo sapiens
ccccctactgaccca

SEQ ID NO: 257045 - DNA, 15 bp, Homo sapiens
accccctactgaccc

SEQ ID NO: 257046 - DNA, 15 bp, Homo sapiens
caccccctactgacc

SEQ ID NO: 257047 - DNA, 15 bp, Homo sapiens
acaccccctactgac

SEQ ID NO: 257048 - DNA, 15 bp, Homo sapiens
cacaccccctactga

SEQ ID NO: 257049 - DNA, 15 bp, Homo sapiens
gcacaccccctactg

SEQ ID NO: 257050 - DNA, 15 bp, Homo sapiens
ggcacaccccctact

SEQ ID NO: 257051 - DNA, 15 bp, Homo sapiens
gggcacaccccctac

SEQ ID NO: 257052 - DNA, 15 bp, Homo sapiens
cgggcacacccccta

SEQ ID NO: 257053 - DNA, 15 bp, Homo sapiens
gcgggcacaccccct

SEQ ID NO: 257054 - DNA, 15 bp, Homo sapiens
ggcgggcacaccccc

SEQ ID NO: 257055 - DNA, 15 bp, Homo sapiens
tggcgggcacacccc

SEQ ID NO: 257056 - DNA, 15 bp, Homo sapiens
ctggcgggcacaccc

SEQ ID NO: 257057 - DNA, 15 bp, Homo sapiens
cctggcgggcacacc

SEQ ID NO: 257058 - DNA, 15 bp, Homo sapiens
tcctggcgggcacac

SEQ ID NO: 257059 - DNA, 15 bp, Homo sapiens
ctcctggcgggcaca

SEQ ID NO: 257060 - DNA, 15 bp, Homo sapiens
cctcctggcgggcac

SEQ ID NO: 257061 - DNA, 15 bp, Homo sapiens
ccctcctggcgggca

SEQ ID NO: 257062 - DNA, 15 bp, Homo sapiens
cccctcctggcgggc

SEQ ID NO: 257063 - DNA, 15 bp, Homo sapiens
acccctcctggcggg

SEQ ID NO: 257064 - DNA, 15 bp, Homo sapiens
cacccctcctggcgg

SEQ ID NO: 257065 - DNA, 15 bp, Homo sapiens
ccacccctcctggcg

SEQ ID NO: 257066 - DNA, 15 bp, Homo sapiens
cccacccctcctggc

SEQ ID NO: 257067 - DNA, 15 bp, Homo sapiens
acccacccctcctgg

SEQ ID NO: 257068 - DNA, 15 bp, Homo sapiens
gacccacccctcctg

SEQ ID NO: 257069 - DNA, 15 bp, Homo sapiens
agacccacccctcct

SEQ ID NO: 257070 - DNA, 15 bp, Homo sapiens
tagacccacccctcc

SEQ ID NO: 257071 - DNA, 15 bp, Homo sapiens
ttagacccacccctc

SEQ ID NO: 257072 - DNA, 15 bp, Homo sapiens
cttagacccacccct

SEQ ID NO: 257073 - DNA, 15 bp, Homo sapiens
ccttagacccacccc

SEQ ID NO: 257074 - DNA, 15 bp, Homo sapiens
accttagacccaccc

SEQ ID NO: 257075 - DNA, 15 bp, Homo sapiens
caccttagacccacc

SEQ ID NO: 257076 - DNA, 15 bp, Homo sapiens
tcaccttagacccac

SEQ ID NO: 257077 - DNA, 15 bp, Homo sapiens
atcaccttagaccca

SEQ ID NO: 257078 - DNA, 15 bp, Homo sapiens
tatcaccttagaccc

SEQ ID NO: 257079 - DNA, 15 bp, Homo sapiens
ctatcaccttagacc

SEQ ID NO: 257080 - DNA, 15 bp, Homo sapiens
tctatcaccttagac

SEQ ID NO: 257081 - DNA, 15 bp, Homo sapiens
ctctatcaccttaga

SEQ ID NO: 257082 - DNA, 15 bp, Homo sapiens
gctctatcaccttag

SEQ ID NO: 257083 - DNA, 15 bp, Homo sapiens
ggctctatcacctta

SEQ ID NO: 257084 - DNA, 15 bp, Homo sapiens
aggctctatcacctt

SEQ ID NO: 257085 - DNA, 15 bp, Homo sapiens
aaggctctatcacct

SEQ ID NO: 257086 - DNA, 15 bp, Homo sapiens
gaaggctctatcacc

SEQ ID NO: 257087 - DNA, 15 bp, Homo sapiens
tgaaggctctatcac

SEQ ID NO: 257088 - DNA, 15 bp, Homo sapiens
atgaaggctctatca

SEQ ID NO: 257089 - DNA, 15 bp, Homo sapiens
aatgaaggctctatc

SEQ ID NO: 257090 - DNA, 15 bp, Homo sapiens
taatgaaggctctat

SEQ ID NO: 257091 - DNA, 15 bp, Homo sapiens
ataatgaaggctcta

SEQ ID NO: 257092 - DNA, 15 bp, Homo sapiens
tataatgaaggctct

SEQ ID NO: 257093 - DNA, 15 bp, Homo sapiens
ttataatgaaggctc

SEQ ID NO: 257094 - DNA, 15 bp, Homo sapiens
tttataatgaaggct

SEQ ID NO: 257095 - DNA, 15 bp, Homo sapiens
atttataatgaaggc

SEQ ID NO: 257096 - DNA, 15 bp, Homo sapiens
gatttataatgaagg

SEQ ID NO: 257097 - DNA, 15 bp, Homo sapiens
agatttataatgaag

SEQ ID NO: 257098 - DNA, 15 bp, Homo sapiens
tagatttataatgaa

SEQ ID NO: 257099 - DNA, 15 bp, Homo sapiens
ctagatttataatga

SEQ ID NO: 257100 - DNA, 15 bp, Homo sapiens
tctagatttataatg

SEQ ID NO: 257101 - DNA, 15 bp, Homo sapiens
ctctagatttataat

SEQ ID NO: 257102 - DNA, 15 bp, Homo sapiens
tctctagatttataa

SEQ ID NO: 257103 - DNA, 15 bp, Homo sapiens
gtctctagatttata

SEQ ID NO: 257104 - DNA, 15 bp, Homo sapiens
agtctctagatttat

SEQ ID NO: 257105 - DNA, 15 bp, Homo sapiens
gagtctctagattta

SEQ ID NO: 257106 - DNA, 15 bp, Homo sapiens
ggagtctctagattt

SEQ ID NO: 257107 - DNA, 15 bp, Homo sapiens
tggagtctctagatt

SEQ ID NO: 257108 - DNA, 15 bp, Homo sapiens
ctggagtctctagat

SEQ ID NO: 257109 - DNA, 15 bp, Homo sapiens
cctggagtctctaga

SEQ ID NO: 257110 - DNA, 15 bp, Homo sapiens
tcctggagtctctag

SEQ ID NO: 257111 - DNA, 15 bp, Homo sapiens
atcctggagtctcta

SEQ ID NO: 257112 - DNA, 15 bp, Homo sapiens
aatcctggagtctct

SEQ ID NO: 257113 - DNA, 15 bp, Homo sapiens
aaatcctggagtctc

SEQ ID NO: 257114 - DNA, 15 bp, Homo sapiens
aaaatcctggagtct

SEQ ID NO: 257115 - DNA, 15 bp, Homo sapiens
taaaatcctggagtc

SEQ ID NO: 257116 - DNA, 15 bp, Homo sapiens
ttaaaatcctggagt

SEQ ID NO: 257117 - DNA, 15 bp, Homo sapiens
gttaaaatcctggag

SEQ ID NO: 257118 - DNA, 15 bp, Homo sapiens
cgttaaaatcctgga

SEQ ID NO: 257119 - DNA, 15 bp, Homo sapiens
acgttaaaatcctgg

SEQ ID NO: 257120 - DNA, 15 bp, Homo sapiens
aacgttaaaatcctg

SEQ ID NO: 257121 - DNA, 15 bp, Homo sapiens
gaacgttaaaatcct

SEQ ID NO: 257122 - DNA, 15 bp, Homo sapiens
agaacgttaaaatcc

SEQ ID NO: 257123 - DNA, 15 bp, Homo sapiens
cagaacgttaaaatc

SEQ ID NO: 257124 - DNA, 15 bp, Homo sapiens
gcagaacgttaaaat

SEQ ID NO: 257125 - DNA, 15 bp, Homo sapiens
agcagaacgttaaaa

SEQ ID NO: 257126 - DNA, 15 bp, Homo sapiens
cagcagaacgttaaa

SEQ ID NO: 257127 - DNA, 15 bp, Homo sapiens
ccagcagaacgttaa

SEQ ID NO: 257128 - DNA, 15 bp, Homo sapiens
tccagcagaacgtta

SEQ ID NO: 257129 - DNA, 15 bp, Homo sapiens
gtccagcagaacgtt

SEQ ID NO: 257130 - DNA, 15 bp, Homo sapiens
agtccagcagaacgt

SEQ ID NO: 257131 - DNA, 15 bp, Homo sapiens
cagtccagcagaacg

SEQ ID NO: 257132 - DNA, 15 bp, Homo sapiens
tcagtccagcagaac

SEQ ID NO: 257133 - DNA, 15 bp, Homo sapiens
ctcagtccagcagaa

SEQ ID NO: 257134 - DNA, 15 bp, Homo sapiens
gctcagtccagcaga

SEQ ID NO: 257135 - DNA, 15 bp, Homo sapiens
agctcagtccagcag

SEQ ID NO: 257136 - DNA, 15 bp, Homo sapiens
cagctcagtccagca

SEQ ID NO: 257137 - DNA, 15 bp, Homo sapiens
ccagctcagtccagc

SEQ ID NO: 257138 - DNA, 15 bp, Homo sapiens
accagctcagtccag

SEQ ID NO: 257139 - DNA, 15 bp, Homo sapiens
aaccagctcagtcca

SEQ ID NO: 257140 - DNA, 15 bp, Homo sapiens
caaccagctcagtcc

SEQ ID NO: 257141 - DNA, 15 bp, Homo sapiens
gcaaccagctcagtc

SEQ ID NO: 257142 - DNA, 15 bp, Homo sapiens
ggcaaccagctcagt

SEQ ID NO: 257143 - DNA, 15 bp, Homo sapiens
aggcaaccagctcag

SEQ ID NO: 257144 - DNA, 15 bp, Homo sapiens
gaggcaaccagctca

SEQ ID NO: 257145 - DNA, 15 bp, Homo sapiens
tgaggcaaccagctc

SEQ ID NO: 257146 - DNA, 15 bp, Homo sapiens
atgaggcaaccagct

SEQ ID NO: 257147 - DNA, 15 bp, Homo sapiens
catgaggcaaccagc

SEQ ID NO: 257148 - DNA, 15 bp, Homo sapiens
acatgaggcaaccag

SEQ ID NO: 257149 - DNA, 15 bp, Homo sapiens
aacatgaggcaacca

SEQ ID NO: 257150 - DNA, 15 bp, Homo sapiens
taacatgaggcaacc

SEQ ID NO: 257151 - DNA, 15 bp, Homo sapiens
ataacatgaggcaac

SEQ ID NO: 257152 - DNA, 15 bp, Homo sapiens
aataacatgaggcaa

SEQ ID NO: 257153 - DNA, 15 bp, Homo sapiens
taataacatgaggca

SEQ ID NO: 257154 - DNA, 15 bp, Homo sapiens
ataataacatgaggc

SEQ ID NO: 257155 - DNA, 15 bp, Homo sapiens
cataataacatgagg

SEQ ID NO: 257156 - DNA, 15 bp, Homo sapiens
gcataataacatgag

SEQ ID NO: 257157 - DNA, 15 bp, Homo sapiens
tgcataataacatga

SEQ ID NO: 257158 - DNA, 15 bp, Homo sapiens
ctgcataataacatg

SEQ ID NO: 257159 - DNA, 15 bp, Homo sapiens
cctgcataataacat

SEQ ID NO: 257160 - DNA, 15 bp, Homo sapiens
gcctgcataataaca

SEQ ID NO: 257161 - DNA, 15 bp, Homo sapiens
tgcctgcataataac

SEQ ID NO: 257162 - DNA, 15 bp, Homo sapiens
ttgcctgcataataa

SEQ ID NO: 257163 - DNA, 15 bp, Homo sapiens
gttgcctgcataata

SEQ ID NO: 257164 - DNA, 15 bp, Homo sapiens
agttgcctgcataat

SEQ ID NO: 257165 - DNA, 15 bp, Homo sapiens
gagttgcctgcataa

SEQ ID NO: 257166 - DNA, 15 bp, Homo sapiens
tgagttgcctgcata

SEQ ID NO: 257167 - DNA, 15 bp, Homo sapiens
gtgagttgcctgcat

SEQ ID NO: 257168 - DNA, 15 bp, Homo sapiens
agtgagttgcctgca

SEQ ID NO: 257169 - DNA, 15 bp, Homo sapiens
aagtgagttgcctgc

SEQ ID NO: 257170 - DNA, 15 bp, Homo sapiens
aaagtgagttgcctg

SEQ ID NO: 257171 - DNA, 15 bp, Homo sapiens
taaagtgagttgcct

SEQ ID NO: 257172 - DNA, 15 bp, Homo sapiens
ataaagtgagttgcc

SEQ ID NO: 257173 - DNA, 15 bp, Homo sapiens
gataaagtgagttgc

SEQ ID NO: 257174 - DNA, 15 bp, Homo sapiens
ggataaagtgagttg

SEQ ID NO: 257175 - DNA, 15 bp, Homo sapiens
gggataaagtgagtt

SEQ ID NO: 257176 - DNA, 15 bp, Homo sapiens
tgggataaagtgagt

SEQ ID NO: 257177 - DNA, 15 bp, Homo sapiens
ttgggataaagtgag

SEQ ID NO: 257178 - DNA, 15 bp, Homo sapiens
attgggataaagtga

SEQ ID NO: 257179 - DNA, 15 bp, Homo sapiens
aattgggataaagtg

SEQ ID NO: 257180 - DNA, 15 bp, Homo sapiens
aaattgggataaagt

SEQ ID NO: 257181 - DNA, 15 bp, Homo sapiens
gaaattgggataaag

SEQ ID NO: 257182 - DNA, 15 bp, Homo sapiens
agaaattgggataaa

SEQ ID NO: 257183 - DNA, 15 bp, Homo sapiens
aagaaattgggataa

SEQ ID NO: 257184 - DNA, 15 bp, Homo sapiens
caagaaattgggata

SEQ ID NO: 257185 - DNA, 15 bp, Homo sapiens
tcaagaaattgggat

SEQ ID NO: 257186 - DNA, 15 bp, Homo sapiens
atcaagaaattggga

SEQ ID NO: 257187 - DNA, 15 bp, Homo sapiens
tatcaagaaattggg

SEQ ID NO: 257188 - DNA, 15 bp, Homo sapiens
gtatcaagaaattgg

SEQ ID NO: 257189 - DNA, 15 bp, Homo sapiens
agtatcaagaaattg

SEQ ID NO: 257190 - DNA, 15 bp, Homo sapiens
aagtatcaagaaatt

SEQ ID NO: 257191 - DNA, 15 bp, Homo sapiens
aaagtatcaagaaat

SEQ ID NO: 257192 - DNA, 15 bp, Homo sapiens
aaaagtatcaagaaa

SEQ ID NO: 257193 - DNA, 15 bp, Homo sapiens
gaaaagtatcaagaa

SEQ ID NO: 257194 - DNA, 15 bp, Homo sapiens
ggaaaagtatcaaga

SEQ ID NO: 257195 - DNA, 15 bp, Homo sapiens
aggaaaagtatcaag

SEQ ID NO: 257196 - DNA, 15 bp, Homo sapiens
aaggaaaagtatcaa

SEQ ID NO: 257197 - DNA, 15 bp, Homo sapiens
gaaggaaaagtatca

SEQ ID NO: 257198 - DNA, 15 bp, Homo sapiens
agaaggaaaagtatc

SEQ ID NO: 257199 - DNA, 15 bp, Homo sapiens
cagaaggaaaagtat

SEQ ID NO: 257200 - DNA, 15 bp, Homo sapiens
ccagaaggaaaagta

SEQ ID NO: 257201 - DNA, 15 bp, Homo sapiens
tccagaaggaaaagt

SEQ ID NO: 257202 - DNA, 15 bp, Homo sapiens
ctccagaaggaaaag

SEQ ID NO: 257203 - DNA, 15 bp, Homo sapiens
cctccagaaggaaaa

SEQ ID NO: 257204 - DNA, 15 bp, Homo sapiens
acctccagaaggaaa

SEQ ID NO: 257205 - DNA, 15 bp, Homo sapiens
gacctccagaaggaa

SEQ ID NO: 257206 - DNA, 15 bp, Homo sapiens
ggacctccagaagga

SEQ ID NO: 257207 - DNA, 15 bp, Homo sapiens
aggacctccagaagg

SEQ ID NO: 257208 - DNA, 15 bp, Homo sapiens
taggacctccagaag

SEQ ID NO: 257209 - DNA, 15 bp, Homo sapiens
ataggacctccagaa

SEQ ID NO: 257210 - DNA, 15 bp, Homo sapiens
aataggacctccaga

SEQ ID NO: 257211 - DNA, 15 bp, Homo sapiens
aaataggacctccag

SEQ ID NO: 257212 - DNA, 15 bp, Homo sapiens
gaaataggacctcca

SEQ ID NO: 257213 - DNA, 15 bp, Homo sapiens
agaaataggacctcc

SEQ ID NO: 257214 - DNA, 15 bp, Homo sapiens
gagaaataggacctc

SEQ ID NO: 257215 - DNA, 15 bp, Homo sapiens
agagaaataggacct

SEQ ID NO: 257216 - DNA, 15 bp, Homo sapiens
tagagaaataggacc

SEQ ID NO: 257217 - DNA, 15 bp, Homo sapiens
ttagagaaataggac

SEQ ID NO: 257218 - DNA, 15 bp, Homo sapiens
gttagagaaatagga

SEQ ID NO: 257219 - DNA, 15 bp, Homo sapiens
tgttagagaaatagg

SEQ ID NO: 257220 - DNA, 15 bp, Homo sapiens
atgttagagaaatag

SEQ ID NO: 257221 - DNA, 15 bp, Homo sapiens
gatgttagagaaata

SEQ ID NO: 257222 - DNA, 15 bp, Homo sapiens
agatgttagagaaat

SEQ ID NO: 257223 - DNA, 15 bp, Homo sapiens
aagatgttagagaaa

SEQ ID NO: 257224 - DNA, 15 bp, Homo sapiens
gaagatgttagagaa

SEQ ID NO: 257225 - DNA, 15 bp, Homo sapiens
ggaagatgttagaga

SEQ ID NO: 257226 - DNA, 15 bp, Homo sapiens
tggaagatgttagag

SEQ ID NO: 257227 - DNA, 15 bp, Homo sapiens
ctggaagatgttaga

SEQ ID NO: 257228 - DNA, 15 bp, Homo sapiens
tctggaagatgttag

SEQ ID NO: 257229 - DNA, 15 bp, Homo sapiens
ttctggaagatgtta

SEQ ID NO: 257230 - DNA, 15 bp, Homo sapiens
tttctggaagatgtt

SEQ ID NO: 257231 - DNA, 15 bp, Homo sapiens
ttttctggaagatgt

SEQ ID NO: 257232 - DNA, 15 bp, Homo sapiens
cttttctggaagatg

SEQ ID NO: 257233 - DNA, 15 bp, Homo sapiens
acttttctggaagat

SEQ ID NO: 257234 - DNA, 15 bp, Homo sapiens
gacttttctggaaga

SEQ ID NO: 257235 - DNA, 15 bp, Homo sapiens
agacttttctggaag

SEQ ID NO: 257236 - DNA, 15 bp, Homo sapiens
aagacttttctggaa

SEQ ID NO: 257237 - DNA, 15 bp, Homo sapiens
taagacttttctgga

SEQ ID NO: 257238 - DNA, 15 bp, Homo sapiens
ttaagacttttctgg

SEQ ID NO: 257239 - DNA, 15 bp, Homo sapiens
tttaagacttttctg

SEQ ID NO: 257240 - DNA, 15 bp, Homo sapiens
ctttaagacttttct

SEQ ID NO: 257241 - DNA, 15 bp, Homo sapiens
gctttaagacttttc

SEQ ID NO: 257242 - DNA, 15 bp, Homo sapiens
agctttaagactttt

SEQ ID NO: 257243 - DNA, 15 bp, Homo sapiens
cagctttaagacttt

SEQ ID NO: 257244 - DNA, 15 bp, Homo sapiens
gcagctttaagactt

SEQ ID NO: 257245 - DNA, 15 bp, Homo sapiens
ggcagctttaagact

SEQ ID NO: 257246 - DNA, 15 bp, Homo sapiens
aggcagctttaagac

SEQ ID NO: 257247 - DNA, 15 bp, Homo sapiens
aaggcagctttaaga

SEQ ID NO: 257248 - DNA, 15 bp, Homo sapiens
taaggcagctttaag

SEQ ID NO: 257249 - DNA, 15 bp, Homo sapiens
ttaaggcagctttaa

SEQ ID NO: 257250 - DNA, 15 bp, Homo sapiens
gttaaggcagcttta

SEQ ID NO: 257251 - DNA, 15 bp, Homo sapiens
ggttaaggcagcttt

SEQ ID NO: 257252 - DNA, 15 bp, Homo sapiens
aggttaaggcagctt

SEQ ID NO: 257253 - DNA, 15 bp, Homo sapiens
aaggttaaggcagct

SEQ ID NO: 257254 - DNA, 15 bp, Homo sapiens
aaaggttaaggcagc

SEQ ID NO: 257255 - DNA, 15 bp, Homo sapiens
aaaaggttaaggcag

SEQ ID NO: 257256 - DNA, 15 bp, Homo sapiens
aaaaaggttaaggca

SEQ ID NO: 257257 - DNA, 15 bp, Homo sapiens
aaaaaaggttaaggc

SEQ ID NO: 257258 - DNA, 15 bp, Homo sapiens
gaaaaaaggttaagg

SEQ ID NO: 257259 - DNA, 15 bp, Homo sapiens
ggaaaaaaggttaag

SEQ ID NO: 257260 - DNA, 15 bp, Homo sapiens
tggaaaaaaggttaa

SEQ ID NO: 257261 - DNA, 15 bp, Homo sapiens
ctggaaaaaaggtta

SEQ ID NO: 257262 - DNA, 15 bp, Homo sapiens
actggaaaaaaggtt

SEQ ID NO: 257263 - DNA, 15 bp, Homo sapiens
gactggaaaaaaggt

SEQ ID NO: 257264 - DNA, 15 bp, Homo sapiens
ggactggaaaaaagg

SEQ ID NO: 257265 - DNA, 15 bp, Homo sapiens
tggactggaaaaaag

SEQ ID NO: 257266 - DNA, 15 bp, Homo sapiens
gtggactggaaaaaa

SEQ ID NO: 257267 - DNA, 15 bp, Homo sapiens
ggtggactggaaaaa

SEQ ID NO: 257268 - DNA, 15 bp, Homo sapiens
aggtggactggaaaa

SEQ ID NO: 257269 - DNA, 15 bp, Homo sapiens
tgcttcaaagcaagg

SEQ ID NO: 257270 - DNA, 15 bp, Homo sapiens
atgcttcaaagcaag

SEQ ID NO: 257271 - DNA, 15 bp, Homo sapiens
gatgcttcaaagcaa

SEQ ID NO: 257272 - DNA, 15 bp, Homo sapiens
ggatgcttcaaagca

SEQ ID NO: 257273 - DNA, 15 bp, Homo sapiens
cggatgcttcaaagc

SEQ ID NO: 257274 - DNA, 15 bp, Homo sapiens
tcggatgcttcaaag

SEQ ID NO: 257275 - DNA, 15 bp, Homo sapiens
gtcggatgcttcaaa

SEQ ID NO: 257276 - DNA, 15 bp, Homo sapiens
agtcggatgcttcaa

SEQ ID NO: 257277 - DNA, 15 bp, Homo sapiens
cagtcggatgcttca

SEQ ID NO: 257278 - DNA, 15 bp, Homo sapiens
acagtcggatgcttc

SEQ ID NO: 257279 - DNA, 15 bp, Homo sapiens
tacagtcggatgctt

SEQ ID NO: 257280 - DNA, 15 bp, Homo sapiens
ttacagtcggatgct

SEQ ID NO: 257281 - DNA, 15 bp, Homo sapiens
tttacagtcggatgc

SEQ ID NO: 257282 - DNA, 15 bp, Homo sapiens
ctttacagtcggatg

SEQ ID NO: 257283 - DNA, 15 bp, Homo sapiens
tctttacagtcggat

SEQ ID NO: 257284 - DNA, 15 bp, Homo sapiens
ttctttacagtcgga

SEQ ID NO: 257285 - DNA, 15 bp, Homo sapiens
attctttacagtcgg

SEQ ID NO: 257286 - DNA, 15 bp, Homo sapiens
gattctttacagtcg

SEQ ID NO: 257287 - DNA, 15 bp, Homo sapiens
agattctttacagtc

SEQ ID NO: 257288 - DNA, 15 bp, Homo sapiens
aagattctttacagt

SEQ ID NO: 257289 - DNA, 15 bp, Homo sapiens
gaagattctttacag

SEQ ID NO: 257290 - DNA, 15 bp, Homo sapiens
tgaagattctttaca

SEQ ID NO: 257291 - DNA, 15 bp, Homo sapiens
gtgaagattctttac

SEQ ID NO: 257292 - DNA, 15 bp, Homo sapiens
ggtgaagattcttta

SEQ ID NO: 257293 - DNA, 15 bp, Homo sapiens
aggtgaagattcttt

SEQ ID NO: 257294 - DNA, 15 bp, Homo sapiens
taggtgaagattctt

SEQ ID NO: 257295 - DNA, 15 bp, Homo sapiens
ataggtgaagattct

SEQ ID NO: 257296 - DNA, 15 bp, Homo sapiens
cataggtgaagattc

SEQ ID NO: 257297 - DNA, 15 bp, Homo sapiens
gcataggtgaagatt

SEQ ID NO: 257298 - DNA, 15 bp, Homo sapiens
ggcataggtgaagat

SEQ ID NO: 257299 - DNA, 15 bp, Homo sapiens
aggcataggtgaaga

SEQ ID NO: 257300 - DNA, 15 bp, Homo sapiens
caggcataggtgaag

SEQ ID NO: 257301 - DNA, 15 bp, Homo sapiens
acaggcataggtgaa

SEQ ID NO: 257302 - DNA, 15 bp, Homo sapiens
cacaggcataggtga

SEQ ID NO: 257303 - DNA, 15 bp, Homo sapiens
tcacaggcataggtg

SEQ ID NO: 257304 - DNA, 15 bp, Homo sapiens
atcacaggcataggt

SEQ ID NO: 257305 - DNA, 15 bp, Homo sapiens
aatcacaggcatagg

SEQ ID NO: 257306 - DNA, 15 bp, Homo sapiens
aaatcacaggcatag

SEQ ID NO: 257307 - DNA, 15 bp, Homo sapiens
caaatcacaggcata

SEQ ID NO: 257308 - DNA, 15 bp, Homo sapiens
acaaatcacaggcat

SEQ ID NO: 257309 - DNA, 15 bp, Homo sapiens
cacaaatcacaggca

SEQ ID NO: 257310 - DNA, 15 bp, Homo sapiens
ttgtctaaaattttt

SEQ ID NO: 257311 - DNA, 15 bp, Homo sapiens
tttgtctaaaatttt

SEQ ID NO: 257312 - DNA, 15 bp, Homo sapiens
ttttgtctaaaattt

SEQ ID NO: 257313 - DNA, 15 bp, Homo sapiens
cttttgtctaaaatt

SEQ ID NO: 257314 - DNA, 15 bp, Homo sapiens
acttttgtctaaaat

SEQ ID NO: 257315 - DNA, 15 bp, Homo sapiens
cacttttgtctaaaa

SEQ ID NO: 257316 - DNA, 15 bp, Homo sapiens
acacttttgtctaaa

SEQ ID NO: 257317 - DNA, 15 bp, Homo sapiens
gacacttttgtctaa

SEQ ID NO: 257318 - DNA, 15 bp, Homo sapiens
ggacacttttgtcta

SEQ ID NO: 257319 - DNA, 15 bp, Homo sapiens
aggacacttttgtct

SEQ ID NO: 257320 - DNA, 15 bp, Homo sapiens
aaggacacttttgtc

SEQ ID NO: 257321 - DNA, 15 bp, Homo sapiens
aaaggacacttttgt

SEQ ID NO: 257322 - DNA, 15 bp, Homo sapiens
aaaaggacacttttg

SEQ ID NO: 257323 - DNA, 15 bp, Homo sapiens
taaaaggacactttt

SEQ ID NO: 257324 - DNA, 15 bp, Homo sapiens
ataaaaggacacttt

SEQ ID NO: 257325 - DNA, 15 bp, Homo sapiens
aataaaaggacactt

SEQ ID NO: 257326 - DNA, 15 bp, Homo sapiens
aaataaaaggacact

SEQ ID NO: 257327 - DNA, 15 bp, Homo sapiens
caaataaaaggacac

SEQ ID NO: 257328 - DNA, 15 bp, Homo sapiens
acaaataaaaggaca

SEQ ID NO: 257329 - DNA, 15 bp, Homo sapiens
aacaaataaaaggac

SEQ ID NO: 257330 - DNA, 15 bp, Homo sapiens
gaacaaataaaagga

SEQ ID NO: 257331 - DNA, 15 bp, Homo sapiens
ggaacaaataaaagg

SEQ ID NO: 257332 - DNA, 15 bp, Homo sapiens
gggaacaaataaaag

SEQ ID NO: 257333 - DNA, 15 bp, Homo sapiens
tgggaacaaataaaa

SEQ ID NO: 257334 - DNA, 15 bp, Homo sapiens
ttgggaacaaataaa

SEQ ID NO: 257335 - DNA, 15 bp, Homo sapiens
gttgggaacaaataa

SEQ ID NO: 257336 - DNA, 15 bp, Homo sapiens
tgttgggaacaaata

SEQ ID NO: 257337 - DNA, 15 bp, Homo sapiens
ctgttgggaacaaat

SEQ ID NO: 257338 - DNA, 15 bp, Homo sapiens
actgttgggaacaaa

SEQ ID NO: 257339 - DNA, 15 bp, Homo sapiens
gactgttgggaacaa

SEQ ID NO: 257340 - DNA, 15 bp, Homo sapiens
agactgttgggaaca

SEQ ID NO: 257341 - DNA, 15 bp, Homo sapiens
gagactgttgggaac

SEQ ID NO: 257342 - DNA, 15 bp, Homo sapiens
agagactgttgggaa

SEQ ID NO: 257343 - DNA, 15 bp, Homo sapiens
gagagactgttggga

SEQ ID NO: 257344 - DNA, 15 bp, Homo sapiens
ggagagactgttggg

SEQ ID NO: 257345 - DNA, 15 bp, Homo sapiens
aggagagactgttgg

SEQ ID NO: 257346 - DNA, 15 bp, Homo sapiens
gaggagagactgttg

SEQ ID NO: 257347 - DNA, 15 bp, Homo sapiens
agaggagagactgtt

SEQ ID NO: 257348 - DNA, 15 bp, Homo sapiens
aagaggagagactgt

SEQ ID NO: 257349 - DNA, 15 bp, Homo sapiens
gaagaggagagactg

SEQ ID NO: 257350 - DNA, 15 bp, Homo sapiens
ggaagaggagagact

SEQ ID NO: 257351 - DNA, 15 bp, Homo sapiens
aggaagaggagagac

SEQ ID NO: 257352 - DNA, 15 bp, Homo sapiens
aaggaagaggagaga

SEQ ID NO: 257353 - DNA, 15 bp, Homo sapiens
gaaggaagaggagag

SEQ ID NO: 257354 - DNA, 15 bp, Homo sapiens
ggaaggaagaggaga

SEQ ID NO: 257355 - DNA, 15 bp, Homo sapiens
aggaaggaagaggag

SEQ ID NO: 257356 - DNA, 15 bp, Homo sapiens
gaggaaggaagagga

SEQ ID NO: 257357 - DNA, 15 bp, Homo sapiens
ggaggaaggaagagg

SEQ ID NO: 257358 - DNA, 15 bp, Homo sapiens
tggaggaaggaagag

SEQ ID NO: 257359 - DNA, 15 bp, Homo sapiens
atggaggaaggaaga

SEQ ID NO: 257360 - DNA, 15 bp, Homo sapiens
catggaggaaggaag

SEQ ID NO: 257361 - DNA, 15 bp, Homo sapiens
ccatggaggaaggaa

SEQ ID NO: 257362 - DNA, 15 bp, Homo sapiens
tccatggaggaagga

SEQ ID NO: 257363 - DNA, 15 bp, Homo sapiens
atccatggaggaagg

SEQ ID NO: 257364 - DNA, 15 bp, Homo sapiens
gatccatggaggaag

SEQ ID NO: 257365 - DNA, 15 bp, Homo sapiens
agatccatggaggaa

SEQ ID NO: 257366 - DNA, 15 bp, Homo sapiens
cagatccatggagga

SEQ ID NO: 257367 - DNA, 15 bp, Homo sapiens
gcagatccatggagg

SEQ ID NO: 257368 - DNA, 15 bp, Homo sapiens
agcagatccatggag

SEQ ID NO: 257369 - DNA, 15 bp, Homo sapiens
aagcagatccatgga

SEQ ID NO: 257370 - DNA, 15 bp, Homo sapiens
taagcagatccatgg

SEQ ID NO: 257371 - DNA, 15 bp, Homo sapiens
ataagcagatccatg

SEQ ID NO: 257372 - DNA, 15 bp, Homo sapiens
aataagcagatccat

SEQ ID NO: 257373 - DNA, 15 bp, Homo sapiens
gaataagcagatcca

SEQ ID NO: 257374 - DNA, 15 bp, Homo sapiens
tgaataagcagatcc

SEQ ID NO: 257375 - DNA, 15 bp, Homo sapiens
ctgaataagcagatc

SEQ ID NO: 257376 - DNA, 15 bp, Homo sapiens
cctgaataagcagat

SEQ ID NO: 257377 - DNA, 15 bp, Homo sapiens
tcctgaataagcaga

SEQ ID NO: 257378 - DNA, 15 bp, Homo sapiens
gtcctgaataagcag

SEQ ID NO: 257379 - DNA, 15 bp, Homo sapiens
tgtcctgaataagca

SEQ ID NO: 257380 - DNA, 15 bp, Homo sapiens
ctgtcctgaataagc

SEQ ID NO: 257381 - DNA, 15 bp, Homo sapiens
gctgtcctgaataag

SEQ ID NO: 257382 - DNA, 15 bp, Homo sapiens
ggctgtcctgaataa

SEQ ID NO: 257383 - DNA, 15 bp, Homo sapiens
gggctgtcctgaata

SEQ ID NO: 257384 - DNA, 15 bp, Homo sapiens
agggctgtcctgaat

SEQ ID NO: 257385 - DNA, 15 bp, Homo sapiens
cagggctgtcctgaa

SEQ ID NO: 257386 - DNA, 15 bp, Homo sapiens
tcagggctgtcctga

SEQ ID NO: 257387 - DNA, 15 bp, Homo sapiens
atcagggctgtcctg

SEQ ID NO: 257388 - DNA, 15 bp, Homo sapiens
aatcagggctgtcct

SEQ ID NO: 257389 - DNA, 15 bp, Homo sapiens
gaatcagggctgtcc

SEQ ID NO: 257390 - DNA, 15 bp, Homo sapiens
agaatcagggctgtc

SEQ ID NO: 257391 - DNA, 15 bp, Homo sapiens
aagaatcagggctgt

SEQ ID NO: 257392 - DNA, 15 bp, Homo sapiens
gaagaatcagggctg

SEQ ID NO: 257393 - DNA, 15 bp, Homo sapiens
ggaagaatcagggct

SEQ ID NO: 257394 - DNA, 15 bp, Homo sapiens
tggaagaatcagggc

SEQ ID NO: 257395 - DNA, 15 bp, Homo sapiens
gtggaagaatcaggg

SEQ ID NO: 257396 - DNA, 15 bp, Homo sapiens
ggtggaagaatcagg

SEQ ID NO: 257397 - DNA, 15 bp, Homo sapiens
tggtggaagaatcag

SEQ ID NO: 257398 - DNA, 15 bp, Homo sapiens
ctggtggaagaatca

SEQ ID NO: 257399 - DNA, 15 bp, Homo sapiens
actggtggaagaatc

SEQ ID NO: 257400 - DNA, 15 bp, Homo sapiens
gactggtggaagaat

SEQ ID NO: 257401 - DNA, 15 bp, Homo sapiens
ggactggtggaagaa

SEQ ID NO: 257402 - DNA, 15 bp, Homo sapiens
gggactggtggaaga

SEQ ID NO: 257403 - DNA, 15 bp, Homo sapiens
tgggactggtggaag

SEQ ID NO: 257404 - DNA, 15 bp, Homo sapiens
ttgggactggtggaa

SEQ ID NO: 257405 - DNA, 15 bp, Homo sapiens
tttgggactggtgga

SEQ ID NO: 257406 - DNA, 15 bp, Homo sapiens
ctttgggactggtgg

SEQ ID NO: 257407 - DNA, 15 bp, Homo sapiens
cctttgggactggtg

SEQ ID NO: 257408 - DNA, 15 bp, Homo sapiens
gcctttgggactggt

SEQ ID NO: 257409 - DNA, 15 bp, Homo sapiens
tgcctttgggactgg

SEQ ID NO: 257410 - DNA, 15 bp, Homo sapiens
ttgcctttgggactg

SEQ ID NO: 257411 - DNA, 15 bp, Homo sapiens
tttgcctttgggact

SEQ ID NO: 257412 - DNA, 15 bp, Homo sapiens
gtttgcctttgggac

SEQ ID NO: 257413 - DNA, 15 bp, Homo sapiens
tgtttgcctttggga

SEQ ID NO: 257414 - DNA, 15 bp, Homo sapiens
ttgtttgcctttggg

SEQ ID NO: 257415 - DNA, 15 bp, Homo sapiens
gttgtttgcctttgg

SEQ ID NO: 257416 - DNA, 15 bp, Homo sapiens
ggttgtttgcctttg

SEQ ID NO: 257417 - DNA, 15 bp, Homo sapiens
gggttgtttgccttt

SEQ ID NO: 257418 - DNA, 15 bp, Homo sapiens
tgggttgtttgcctt

SEQ ID NO: 257419 - DNA, 15 bp, Homo sapiens
gtgggttgtttgcct

SEQ ID NO: 257420 - DNA, 15 bp, Homo sapiens
agtgggttgtttgcc

SEQ ID NO: 257421 - DNA, 15 bp, Homo sapiens
aagtgggttgtttgc

SEQ ID NO: 257422 - DNA, 15 bp, Homo sapiens
gaagtgggttgtttg

SEQ ID NO: 257423 - DNA, 15 bp, Homo sapiens
agaagtgggttgttt

SEQ ID NO: 257424 - DNA, 15 bp, Homo sapiens
cagaagtgggttgtt

SEQ ID NO: 257425 - DNA, 15 bp, Homo sapiens
gcagaagtgggttgt

SEQ ID NO: 257426 - DNA, 15 bp, Homo sapiens
tgcagaagtgggttg

SEQ ID NO: 257427 - DNA, 15 bp, Homo sapiens
ctgcagaagtgggtt

SEQ ID NO: 257428 - DNA, 15 bp, Homo sapiens
tctgcagaagtgggt

SEQ ID NO: 257429 - DNA, 15 bp, Homo sapiens
ctctgcagaagtggg

SEQ ID NO: 257430 - DNA, 15 bp, Homo sapiens
tctctgcagaagtgg

SEQ ID NO: 257431 - DNA, 15 bp, Homo sapiens
ttctctgcagaagtg

SEQ ID NO: 257432 - DNA, 15 bp, Homo sapiens
cttctctgcagaagt

SEQ ID NO: 257433 - DNA, 15 bp, Homo sapiens
tcttctctgcagaag

SEQ ID NO: 257434 - DNA, 15 bp, Homo sapiens
ctcttctctgcagaa

SEQ ID NO: 257435 - DNA, 15 bp, Homo sapiens
actcttctctgcaga

SEQ ID NO: 257436 - DNA, 15 bp, Homo sapiens
cactcttctctgcag

SEQ ID NO: 257437 - DNA, 15 bp, Homo sapiens
acactcttctctgca

SEQ ID NO: 257438 - DNA, 15 bp, Homo sapiens
gacactcttctctgc

SEQ ID NO: 257439 - DNA, 15 bp, Homo sapiens
cgacactcttctctg

SEQ ID NO: 257440 - DNA, 15 bp, Homo sapiens
gcgacactcttctct

SEQ ID NO: 257441 - DNA, 15 bp, Homo sapiens
tgcgacactcttctc

SEQ ID NO: 257442 - DNA, 15 bp, Homo sapiens
ttgcgacactcttct

SEQ ID NO: 257443 - DNA, 15 bp, Homo sapiens
tttgcgacactcttc

SEQ ID NO: 257444 - DNA, 15 bp, Homo sapiens
ttttgcgacactctt

SEQ ID NO: 257445 - DNA, 15 bp, Homo sapiens
tttttgcgacactct

SEQ ID NO: 257446 - DNA, 15 bp, Homo sapiens
ttttttgcgacactc

SEQ ID NO: 257447 - DNA, 15 bp, Homo sapiens
cttttttgcgacact

SEQ ID NO: 257448 - DNA, 15 bp, Homo sapiens
ccttttttgcgacac

SEQ ID NO: 257449 - DNA, 15 bp, Homo sapiens
tccttttttgcgaca

SEQ ID NO: 257450 - DNA, 15 bp, Homo sapiens
ttccttttttgcgac

SEQ ID NO: 257451 - DNA, 15 bp, Homo sapiens
cttccttttttgcga

SEQ ID NO: 257452 - DNA, 15 bp, Homo sapiens
tcttccttttttgcg

SEQ ID NO: 257453 - DNA, 15 bp, Homo sapiens
gtcttccttttttgc

SEQ ID NO: 257454 - DNA, 15 bp, Homo sapiens
tgtcttccttttttg

SEQ ID NO: 257455 - DNA, 15 bp, Homo sapiens
ttgtcttcctttttt

SEQ ID NO: 257456 - DNA, 15 bp, Homo sapiens
cttgtcttccttttt

SEQ ID NO: 257457 - DNA, 15 bp, Homo sapiens
ccttgtcttcctttt

SEQ ID NO: 257458 - DNA, 15 bp, Homo sapiens
accttgtcttccttt

SEQ ID NO: 257459 - DNA, 15 bp, Homo sapiens
gaccttgtcttcctt

SEQ ID NO: 257460 - DNA, 15 bp, Homo sapiens
ggaccttgtcttcct

SEQ ID NO: 257461 - DNA, 15 bp, Homo sapiens
gggaccttgtcttcc

SEQ ID NO: 257462 - DNA, 15 bp, Homo sapiens
cgggaccttgtcttc

SEQ ID NO: 257463 - DNA, 15 bp, Homo sapiens
ccgggaccttgtctt

SEQ ID NO: 257464 - DNA, 15 bp, Homo sapiens
accgggaccttgtct

SEQ ID NO: 257465 - DNA, 15 bp, Homo sapiens
gaccgggaccttgtc

SEQ ID NO: 257466 - DNA, 15 bp, Homo sapiens
tgaccgggaccttgt

SEQ ID NO: 257467 - DNA, 15 bp, Homo sapiens
ttgaccgggaccttg

SEQ ID NO: 257468 - DNA, 15 bp, Homo sapiens
cttgaccgggacctt

SEQ ID NO: 257469 - DNA, 15 bp, Homo sapiens
tcttgaccgggacct

SEQ ID NO: 257470 - DNA, 15 bp, Homo sapiens
ttcttgaccgggacc

SEQ ID NO: 257471 - DNA, 15 bp, Homo sapiens
tttcttgaccgggac

SEQ ID NO: 257472 - DNA, 15 bp, Homo sapiens
gtttcttgaccggga

SEQ ID NO: 257473 - DNA, 15 bp, Homo sapiens
tgtttcttgaccggg

SEQ ID NO: 257474 - DNA, 15 bp, Homo sapiens
ctgtttcttgaccgg

SEQ ID NO: 257475 - DNA, 15 bp, Homo sapiens
tctgtttcttgaccg

SEQ ID NO: 257476 - DNA, 15 bp, Homo sapiens
ttctgtttcttgacc

SEQ ID NO: 257477 - DNA, 15 bp, Homo sapiens
cttctgtttcttgac

SEQ ID NO: 257478 - DNA, 15 bp, Homo sapiens
tcttctgtttcttga

SEQ ID NO: 257479 - DNA, 15 bp, Homo sapiens
gtcttctgtttcttg

SEQ ID NO: 257480 - DNA, 15 bp, Homo sapiens
ggtcttctgtttctt

SEQ ID NO: 257481 - DNA, 15 bp, Homo sapiens
tggtcttctgtttct

SEQ ID NO: 257482 - DNA, 15 bp, Homo sapiens
ctggtcttctgtttc

SEQ ID NO: 257483 - DNA, 15 bp, Homo sapiens
tctggtcttctgttt

SEQ ID NO: 257484 - DNA, 15 bp, Homo sapiens
ttctggtcttctgtt

SEQ ID NO: 257485 - DNA, 15 bp, Homo sapiens
gttctggtcttctgt

SEQ ID NO: 257486 - DNA, 15 bp, Homo sapiens
agttctggtcttctg

SEQ ID NO: 257487 - DNA, 15 bp, Homo sapiens
cagttctggtcttct

SEQ ID NO: 257488 - DNA, 15 bp, Homo sapiens
acagttctggtcttc

SEQ ID NO: 257489 - DNA, 15 bp, Homo sapiens
cacagttctggtctt

SEQ ID NO: 257490 - DNA, 15 bp, Homo sapiens
acacagttctggtct

SEQ ID NO: 257491 - DNA, 15 bp, Homo sapiens
aacacagttctggtc

SEQ ID NO: 257492 - DNA, 15 bp, Homo sapiens
gaacacagttctggt

SEQ ID NO: 257493 - DNA, 15 bp, Homo sapiens
agaacacagttctgg

SEQ ID NO: 257494 - DNA, 15 bp, Homo sapiens
gagaacacagttctg

SEQ ID NO: 257495 - DNA, 15 bp, Homo sapiens
agagaacacagttct

SEQ ID NO: 257496 - DNA, 15 bp, Homo sapiens
aagagaacacagttc

SEQ ID NO: 257497 - DNA, 15 bp, Homo sapiens
gaagagaacacagtt

SEQ ID NO: 257498 - DNA, 15 bp, Homo sapiens
ggaagagaacacagt

SEQ ID NO: 257499 - DNA, 15 bp, Homo sapiens
tggaagagaacacag

SEQ ID NO: 257500 - DNA, 15 bp, Homo sapiens
gtggaagagaacaca

SEQ ID NO: 257501 - DNA, 15 bp, Homo sapiens
ggtggaagagaacac

SEQ ID NO: 257502 - DNA, 15 bp, Homo sapiens
gggtggaagagaaca

SEQ ID NO: 257503 - DNA, 15 bp, Homo sapiens
tgggtggaagagaac

SEQ ID NO: 257504 - DNA, 15 bp, Homo sapiens
ctgggtggaagagaa

SEQ ID NO: 257505 - DNA, 15 bp, Homo sapiens
gctgggtggaagaga

SEQ ID NO: 257506 - DNA, 15 bp, Homo sapiens
agctgggtggaagag

SEQ ID NO: 257507 - DNA, 15 bp, Homo sapiens
cagctgggtggaaga

SEQ ID NO: 257508 - DNA, 15 bp, Homo sapiens
acagctgggtggaag

SEQ ID NO: 257509 - DNA, 15 bp, Homo sapiens
cacagctgggtggaa

SEQ ID NO: 257510 - DNA, 15 bp, Homo sapiens
acacagctgggtgga

SEQ ID NO: 257511 - DNA, 15 bp, Homo sapiens
cacacagctgggtgg

SEQ ID NO: 257512 - DNA, 15 bp, Homo sapiens
acacacagctgggtg

SEQ ID NO: 257513 - DNA, 15 bp, Homo sapiens
tacacacagctgggt

SEQ ID NO: 257514 - DNA, 15 bp, Homo sapiens
gtacacacagctggg

SEQ ID NO: 257515 - DNA, 15 bp, Homo sapiens
agtacacacagctgg

SEQ ID NO: 257516 - DNA, 15 bp, Homo sapiens
gagtacacacagctg

SEQ ID NO: 257517 - DNA, 15 bp, Homo sapiens
tgagtacacacagct

SEQ ID NO: 257518 - DNA, 15 bp, Homo sapiens
ttgagtacacacagc

SEQ ID NO: 257519 - DNA, 15 bp, Homo sapiens
attgagtacacacag

SEQ ID NO: 257520 - DNA, 15 bp, Homo sapiens
cattgagtacacaca

SEQ ID NO: 257521 - DNA, 15 bp, Homo sapiens
tcattgagtacacac

SEQ ID NO: 257522 - DNA, 15 bp, Homo sapiens
atcattgagtacaca

SEQ ID NO: 257523 - DNA, 15 bp, Homo sapiens
tatcattgagtacac

SEQ ID NO: 257524 - DNA, 15 bp, Homo sapiens
ctatcattgagtaca

SEQ ID NO: 257525 - DNA, 15 bp, Homo sapiens
tctatcattgagtac

SEQ ID NO: 257526 - DNA, 15 bp, Homo sapiens
atctatcattgagta

SEQ ID NO: 257527 - DNA, 15 bp, Homo sapiens
aatctatcattgagt

SEQ ID NO: 257528 - DNA, 15 bp, Homo sapiens
aaatctatcattgag

SEQ ID NO: 257529 - DNA, 15 bp, Homo sapiens
gaaatctatcattga

SEQ ID NO: 257530 - DNA, 15 bp, Homo sapiens
tgaaatctatcattg

SEQ ID NO: 257531 - DNA, 15 bp, Homo sapiens
ctgaaatctatcatt

SEQ ID NO: 257532 - DNA, 15 bp, Homo sapiens
tctgaaatctatcat

SEQ ID NO: 257533 - DNA, 15 bp, Homo sapiens
ctctgaaatctatca

SEQ ID NO: 257534 - DNA, 15 bp, Homo sapiens
tctctgaaatctatc

SEQ ID NO: 257535 - DNA, 15 bp, Homo sapiens
gtctctgaaatctat

SEQ ID NO: 257536 - DNA, 15 bp, Homo sapiens
tgtctctgaaatcta

SEQ ID NO: 257537 - DNA, 15 bp, Homo sapiens
ctgtctctgaaatct

SEQ ID NO: 257538 - DNA, 15 bp, Homo sapiens
tctgtctctgaaatc

SEQ ID NO: 257539 - DNA, 15 bp, Homo sapiens
ttctgtctctgaaat

SEQ ID NO: 257540 - DNA, 15 bp, Homo sapiens
tttctgtctctgaaa

SEQ ID NO: 257541 - DNA, 15 bp, Homo sapiens
atttctgtctctgaa

SEQ ID NO: 257542 - DNA, 15 bp, Homo sapiens
tatttctgtctctga

SEQ ID NO: 257543 - DNA, 15 bp, Homo sapiens
gtatttctgtctctg

SEQ ID NO: 257544 - DNA, 15 bp, Homo sapiens
ggtatttctgtctct

SEQ ID NO: 257545 - DNA, 15 bp, Homo sapiens
aggtatttctgtctc

SEQ ID NO: 257546 - DNA, 15 bp, Homo sapiens
gaggtatttctgtct

SEQ ID NO: 257547 - DNA, 15 bp, Homo sapiens
tgaggtatttctgtc

SEQ ID NO: 257548 - DNA, 15 bp, Homo sapiens
ctgaggtatttctgt

SEQ ID NO: 257549 - DNA, 15 bp, Homo sapiens
gctgaggtatttctg

SEQ ID NO: 257550 - DNA, 15 bp, Homo sapiens
ggctgaggtatttct

SEQ ID NO: 257551 - DNA, 15 bp, Homo sapiens
aggctgaggtatttc

SEQ ID NO: 257552 - DNA, 15 bp, Homo sapiens
gaggctgaggtattt

SEQ ID NO: 257553 - DNA, 15 bp, Homo sapiens
ggaggctgaggtatt

SEQ ID NO: 257554 - DNA, 15 bp, Homo sapiens
tggaggctgaggtat

SEQ ID NO: 257555 - DNA, 15 bp, Homo sapiens
ctggaggctgaggta

SEQ ID NO: 257556 - DNA, 15 bp, Homo sapiens
gctggaggctgaggt

SEQ ID NO: 257557 - DNA, 15 bp, Homo sapiens
tgctggaggctgagg

SEQ ID NO: 257558 - DNA, 15 bp, Homo sapiens
ctgctggaggctgag

SEQ ID NO: 257559 - DNA, 15 bp, Homo sapiens
tctgctggaggctga

SEQ ID NO: 257560 - DNA, 15 bp, Homo sapiens
atctgctggaggctg

SEQ ID NO: 257561 - DNA, 15 bp, Homo sapiens
catctgctggaggct

SEQ ID NO: 257562 - DNA, 15 bp, Homo sapiens
gcatctgctggaggc

SEQ ID NO: 257563 - DNA, 15 bp, Homo sapiens
tgcatctgctggagg

SEQ ID NO: 257564 - DNA, 15 bp, Homo sapiens
ttgcatctgctggag

SEQ ID NO: 257565 - DNA, 15 bp, Homo sapiens
cttgcatctgctgga

SEQ ID NO: 257566 - DNA, 15 bp, Homo sapiens
tcttgcatctgctgg

SEQ ID NO: 257567 - DNA, 15 bp, Homo sapiens
ttcttgcatctgctg

SEQ ID NO: 257568 - DNA, 15 bp, Homo sapiens
gttcttgcatctgct

SEQ ID NO: 257569 - DNA, 15 bp, Homo sapiens
agttcttgcatctgc

SEQ ID NO: 257570 - DNA, 15 bp, Homo sapiens
gagttcttgcatctg

SEQ ID NO: 257571 - DNA, 15 bp, Homo sapiens
agagttcttgcatct

SEQ ID NO: 257572 - DNA, 15 bp, Homo sapiens
gagagttcttgcatc

SEQ ID NO: 257573 - DNA, 15 bp, Homo sapiens
ggagagttcttgcat

SEQ ID NO: 257574 - DNA, 15 bp, Homo sapiens
tggagagttcttgca

SEQ ID NO: 257575 - DNA, 15 bp, Homo sapiens
ttggagagttcttgc

SEQ ID NO: 257576 - DNA, 15 bp, Homo sapiens
gttggagagttcttg

SEQ ID NO: 257577 - DNA, 15 bp, Homo sapiens
tgttggagagttctt

SEQ ID NO: 257578 - DNA, 15 bp, Homo sapiens
atgttggagagttct

SEQ ID NO: 257579 - DNA, 15 bp, Homo sapiens
gatgttggagagttc

SEQ ID NO: 257580 - DNA, 15 bp, Homo sapiens
ggatgttggagagtt

SEQ ID NO: 257581 - DNA, 15 bp, Homo sapiens
aggatgttggagagt

SEQ ID NO: 257582 - DNA, 15 bp, Homo sapiens
caggatgttggagag

SEQ ID NO: 257583 - DNA, 15 bp, Homo sapiens
tcaggatgttggaga

SEQ ID NO: 257584 - DNA, 15 bp, Homo sapiens
ttcaggatgttggag

SEQ ID NO: 257585 - DNA, 15 bp, Homo sapiens
gttcaggatgttgga

SEQ ID NO: 257586 - DNA, 15 bp, Homo sapiens
ggttcaggatgttgg

SEQ ID NO: 257587 - DNA, 15 bp, Homo sapiens
aggttcaggatgttg

SEQ ID NO: 257588 - DNA, 15 bp, Homo sapiens
gaggttcaggatgtt

SEQ ID NO: 257589 - DNA, 15 bp, Homo sapiens
tgaggttcaggatgt

SEQ ID NO: 257590 - DNA, 15 bp, Homo sapiens
ctgaggttcaggatg

SEQ ID NO: 257591 - DNA, 15 bp, Homo sapiens
gctgaggttcaggat

SEQ ID NO: 257592 - DNA, 15 bp, Homo sapiens
agctgaggttcagga

SEQ ID NO: 257593 - DNA, 15 bp, Homo sapiens
tagctgaggttcagg

SEQ ID NO: 257594 - DNA, 15 bp, Homo sapiens
gtagctgaggttcag

SEQ ID NO: 257595 - DNA, 15 bp, Homo sapiens
tgtagctgaggttca

SEQ ID NO: 257596 - DNA, 15 bp, Homo sapiens
ttgtagctgaggttc

SEQ ID NO: 257597 - DNA, 15 bp, Homo sapiens
tttgtagctgaggtt

SEQ ID NO: 257598 - DNA, 15 bp, Homo sapiens
gtttgtagctgaggt

SEQ ID NO: 257599 - DNA, 15 bp, Homo sapiens
tgtttgtagctgagg

SEQ ID NO: 257600 - DNA, 15 bp, Homo sapiens
ctgtttgtagctgag

SEQ ID NO: 257601 - DNA, 15 bp, Homo sapiens
cctgtttgtagctga

SEQ ID NO: 257602 - DNA, 15 bp, Homo sapiens
acctgtttgtagctg

SEQ ID NO: 257603 - DNA, 15 bp, Homo sapiens
tacctgtttgtagct

SEQ ID NO: 257604 - DNA, 15 bp, Homo sapiens
ctacctgtttgtagc

SEQ ID NO: 257605 - DNA, 15 bp, Homo sapiens
cctacctgtttgtag

SEQ ID NO: 257606 - DNA, 15 bp, Homo sapiens
gcctacctgtttgta

SEQ ID NO: 257607 - DNA, 15 bp, Homo sapiens
agcctacctgtttgt

SEQ ID NO: 257608 - DNA, 15 bp, Homo sapiens
aagcctacctgtttg

SEQ ID NO: 257609 - DNA, 15 bp, Homo sapiens
caagcctacctgttt

SEQ ID NO: 257610 - DNA, 15 bp, Homo sapiens
acaagcctacctgtt

SEQ ID NO: 257611 - DNA, 15 bp, Homo sapiens
aacaagcctacctgt

SEQ ID NO: 257612 - DNA, 15 bp, Homo sapiens
aaacaagcctacctg

SEQ ID NO: 257613 - DNA, 15 bp, Homo sapiens
aaaacaagcctacct

SEQ ID NO: 257614 - DNA, 15 bp, Homo sapiens
caaaacaagcctacc

SEQ ID NO: 257615 - DNA, 15 bp, Homo sapiens
acaaaacaagcctac

SEQ ID NO: 257616 - DNA, 15 bp, Homo sapiens
gacaaaacaagccta

SEQ ID NO: 257617 - DNA, 15 bp, Homo sapiens
ggacaaaacaagcct

SEQ ID NO: 257618 - DNA, 15 bp, Homo sapiens
aggacaaaacaagcc

SEQ ID NO: 257619 - DNA, 15 bp, Homo sapiens
aaggacaaaacaagc

SEQ ID NO: 257620 - DNA, 15 bp, Homo sapiens
caaggacaaaacaag

SEQ ID NO: 257621 - DNA, 15 bp, Homo sapiens
ccaaggacaaaacaa

SEQ ID NO: 257622 - DNA, 15 bp, Homo sapiens
tccaaggacaaaaca

SEQ ID NO: 257623 - DNA, 15 bp, Homo sapiens
ttccaaggacaaaac

SEQ ID NO: 257624 - DNA, 15 bp, Homo sapiens
attccaaggacaaaa

SEQ ID NO: 257625 - DNA, 15 bp, Homo sapiens
tattccaaggacaaa

SEQ ID NO: 257626 - DNA, 15 bp, Homo sapiens
ttattccaaggacaa

SEQ ID NO: 257627 - DNA, 15 bp, Homo sapiens
cttattccaaggaca

SEQ ID NO: 257628 - DNA, 15 bp, Homo sapiens
ccttattccaaggac

SEQ ID NO: 257629 - DNA, 15 bp, Homo sapiens
accttattccaagga

SEQ ID NO: 257630 - DNA, 15 bp, Homo sapiens
caccttattccaagg

SEQ ID NO: 257631 - DNA, 15 bp, Homo sapiens
tcaccttattccaag

SEQ ID NO: 257632 - DNA, 15 bp, Homo sapiens
ttcaccttattccaa

SEQ ID NO: 257633 - DNA, 15 bp, Homo sapiens
gttcaccttattcca

SEQ ID NO: 257634 - DNA, 15 bp, Homo sapiens
tgttcaccttattcc

SEQ ID NO: 257635 - DNA, 15 bp, Homo sapiens
ttgttcaccttattc

SEQ ID NO: 257636 - DNA, 15 bp, Homo sapiens
tttgttcaccttatt

SEQ ID NO: 257637 - DNA, 15 bp, Homo sapiens
ttttgttcaccttat

SEQ ID NO: 257638 - DNA, 15 bp, Homo sapiens
tttttgttcacctta

SEQ ID NO: 257639 - DNA, 15 bp, Homo sapiens
atttttgttcacctt

SEQ ID NO: 257640 - DNA, 15 bp, Homo sapiens
aatttttgttcacct

SEQ ID NO: 257641 - DNA, 15 bp, Homo sapiens
caatttttgttcacc

SEQ ID NO: 257642 - DNA, 15 bp, Homo sapiens
ccaatttttgttcac

SEQ ID NO: 257643 - DNA, 15 bp, Homo sapiens
tccaatttttgttca

SEQ ID NO: 257644 - DNA, 15 bp, Homo sapiens
gtccaatttttgttc

SEQ ID NO: 257645 - DNA, 15 bp, Homo sapiens
agtccaatttttgtt

SEQ ID NO: 257646 - DNA, 15 bp, Homo sapiens
tagtccaatttttgt

SEQ ID NO: 257647 - DNA, 15 bp, Homo sapiens
ttagtccaatttttg

SEQ ID NO: 257648 - DNA, 15 bp, Homo sapiens
attagtccaattttt

SEQ ID NO: 257649 - DNA, 15 bp, Homo sapiens
aattagtccaatttt

SEQ ID NO: 257650 - DNA, 15 bp, Homo sapiens
aaattagtccaattt

SEQ ID NO: 257651 - DNA, 15 bp, Homo sapiens
caaattagtccaatt

SEQ ID NO: 257652 - DNA, 15 bp, Homo sapiens
gcaaattagtccaat

SEQ ID NO: 257653 - DNA, 15 bp, Homo sapiens
tgcaaattagtccaa

SEQ ID NO: 257654 - DNA, 15 bp, Homo sapiens
atgcaaattagtcca

SEQ ID NO: 257655 - DNA, 15 bp, Homo sapiens
catgcaaattagtcc

SEQ ID NO: 257656 - DNA, 15 bp, Homo sapiens
ccatgcaaattagtc

SEQ ID NO: 257657 - DNA, 15 bp, Homo sapiens
gccatgcaaattagt

SEQ ID NO: 257658 - DNA, 15 bp, Homo sapiens
agccatgcaaattag

SEQ ID NO: 257659 - DNA, 15 bp, Homo sapiens
tagccatgcaaatta

SEQ ID NO: 257660 - DNA, 15 bp, Homo sapiens
ttagccatgcaaatt

SEQ ID NO: 257661 - DNA, 15 bp, Homo sapiens
cttagccatgcaaat

SEQ ID NO: 257662 - DNA, 15 bp, Homo sapiens
tcttagccatgcaaa

SEQ ID NO: 257663 - DNA, 15 bp, Homo sapiens
gtcttagccatgcaa

SEQ ID NO: 257664 - DNA, 15 bp, Homo sapiens
ggtcttagccatgca

SEQ ID NO: 257665 - DNA, 15 bp, Homo sapiens
aggtcttagccatgc

SEQ ID NO: 257666 - DNA, 15 bp, Homo sapiens
gaggtcttagccatg

SEQ ID NO: 257667 - DNA, 15 bp, Homo sapiens
agaggtcttagccat

SEQ ID NO: 257668 - DNA, 15 bp, Homo sapiens
cagaggtcttagcca

SEQ ID NO: 257669 - DNA, 15 bp, Homo sapiens
acagaggtcttagcc

SEQ ID NO: 257670 - DNA, 15 bp, Homo sapiens
cacagaggtcttagc

SEQ ID NO: 257671 - DNA, 15 bp, Homo sapiens
ccacagaggtcttag

SEQ ID NO: 257672 - DNA, 15 bp, Homo sapiens
tccacagaggtctta

SEQ ID NO: 257673 - DNA, 15 bp, Homo sapiens
atccacagaggtctt

SEQ ID NO: 257674 - DNA, 15 bp, Homo sapiens
catccacagaggtct

SEQ ID NO: 257675 - DNA, 15 bp, Homo sapiens
gcatccacagaggtc

SEQ ID NO: 257676 - DNA, 15 bp, Homo sapiens
tgcatccacagaggt

SEQ ID NO: 257677 - DNA, 15 bp, Homo sapiens
atgcatccacagagg

SEQ ID NO: 257678 - DNA, 15 bp, Homo sapiens
catgcatccacagag

SEQ ID NO: 257679 - DNA, 15 bp, Homo sapiens
acatgcatccacaga

SEQ ID NO: 257680 - DNA, 15 bp, Homo sapiens
tacatgcatccacag

SEQ ID NO: 257681 - DNA, 15 bp, Homo sapiens
ctacatgcatccaca

SEQ ID NO: 257682 - DNA, 15 bp, Homo sapiens
tctacatgcatccac

SEQ ID NO: 257683 - DNA, 15 bp, Homo sapiens
atctacatgcatcca

SEQ ID NO: 257684 - DNA, 15 bp, Homo sapiens
catctacatgcatcc

SEQ ID NO: 257685 - DNA, 15 bp, Homo sapiens
acatctacatgcatc

SEQ ID NO: 257686 - DNA, 15 bp, Homo sapiens
cacatctacatgcat

SEQ ID NO: 257687 - DNA, 15 bp, Homo sapiens
acacatctacatgca

SEQ ID NO: 257688 - DNA, 15 bp, Homo sapiens
cacacatctacatgc

SEQ ID NO: 257689 - DNA, 15 bp, Homo sapiens
acacacatctacatg

SEQ ID NO: 257690 - DNA, 15 bp, Homo sapiens
tacacacatctacat

SEQ ID NO: 257691 - DNA, 15 bp, Homo sapiens
gtacacacatctaca

SEQ ID NO: 257692 - DNA, 15 bp, Homo sapiens
agtacacacatctac

SEQ ID NO: 257693 - DNA, 15 bp, Homo sapiens
tagtacacacatcta

SEQ ID NO: 257694 - DNA, 15 bp, Homo sapiens
atagtacacacatct

SEQ ID NO: 257695 - DNA, 15 bp, Homo sapiens
catagtacacacatc

SEQ ID NO: 257696 - DNA, 15 bp, Homo sapiens
acatagtacacacat

SEQ ID NO: 257697 - DNA, 15 bp, Homo sapiens
cacatagtacacaca

SEQ ID NO: 257698 - DNA, 15 bp, Homo sapiens
acacatagtacacac

SEQ ID NO: 257699 - DNA, 15 bp, Homo sapiens
gacacatagtacaca

SEQ ID NO: 257700 - DNA, 15 bp, Homo sapiens
ggacacatagtacac

SEQ ID NO: 257701 - DNA, 15 bp, Homo sapiens
cggacacatagtaca

SEQ ID NO: 257702 - DNA, 15 bp, Homo sapiens
acggacacatagtac

SEQ ID NO: 257703 - DNA, 15 bp, Homo sapiens
tacggacacatagta

SEQ ID NO: 257704 - DNA, 15 bp, Homo sapiens
gtacggacacatagt

SEQ ID NO: 257705 - DNA, 15 bp, Homo sapiens
tgtacggacacatag

SEQ ID NO: 257706 - DNA, 15 bp, Homo sapiens
atgtacggacacata

SEQ ID NO: 257707 - DNA, 15 bp, Homo sapiens
gatgtacggacacat

SEQ ID NO: 257708 - DNA, 15 bp, Homo sapiens
cgatgtacggacaca

SEQ ID NO: 257709 - DNA, 15 bp, Homo sapiens
gcgatgtacggacac

SEQ ID NO: 257710 - DNA, 15 bp, Homo sapiens
ggcgatgtacggaca

SEQ ID NO: 257711 - DNA, 15 bp, Homo sapiens
aggcgatgtacggac

SEQ ID NO: 257712 - DNA, 15 bp, Homo sapiens
gaggcgatgtacgga

SEQ ID NO: 257713 - DNA, 15 bp, Homo sapiens
agaggcgatgtacgg

SEQ ID NO: 257714 - DNA, 15 bp, Homo sapiens
aagaggcgatgtacg

SEQ ID NO: 257715 - DNA, 15 bp, Homo sapiens
caagaggcgatgtac

SEQ ID NO: 257716 - DNA, 15 bp, Homo sapiens
gcaagaggcgatgta

SEQ ID NO: 257717 - DNA, 15 bp, Homo sapiens
tgcaagaggcgatgt

SEQ ID NO: 257718 - DNA, 15 bp, Homo sapiens
ttgcaagaggcgatg

SEQ ID NO: 257719 - DNA, 15 bp, Homo sapiens
tttgcaagaggcgat

SEQ ID NO: 257720 - DNA, 15 bp, Homo sapiens
atttgcaagaggcga

SEQ ID NO: 257721 - DNA, 15 bp, Homo sapiens
tatttgcaagaggcg

SEQ ID NO: 257722 - DNA, 15 bp, Homo sapiens
ttatttgcaagaggc

SEQ ID NO: 257723 - DNA, 15 bp, Homo sapiens
attatttgcaagagg

SEQ ID NO: 257724 - DNA, 15 bp, Homo sapiens
aattatttgcaagag

SEQ ID NO: 257725 - DNA, 15 bp, Homo sapiens
aaattatttgcaaga

SEQ ID NO: 257726 - DNA, 15 bp, Homo sapiens
taaattatttgcaag

SEQ ID NO: 257727 - DNA, 15 bp, Homo sapiens
ataaattatttgcaa

SEQ ID NO: 257728 - DNA, 15 bp, Homo sapiens
cataaattatttgca

SEQ ID NO: 257729 - DNA, 15 bp, Homo sapiens
tcataaattatttgc

SEQ ID NO: 257730 - DNA, 15 bp, Homo sapiens
ttcataaattatttg

SEQ ID NO: 257731 - DNA, 15 bp, Homo sapiens
cttcataaattattt

SEQ ID NO: 257732 - DNA, 15 bp, Homo sapiens
tcttcataaattatt

SEQ ID NO: 257733 - DNA, 15 bp, Homo sapiens
atcttcataaattat

SEQ ID NO: 257734 - DNA, 15 bp, Homo sapiens
catcttcataaatta

SEQ ID NO: 257735 - DNA, 15 bp, Homo sapiens
tcatcttcataaatt

SEQ ID NO: 257736 - DNA, 15 bp, Homo sapiens
ttcatcttcataaat

SEQ ID NO: 257737 - DNA, 15 bp, Homo sapiens
tttcatcttcataaa

SEQ ID NO: 257738 - DNA, 15 bp, Homo sapiens
atttcatcttcataa

SEQ ID NO: 257739 - DNA, 15 bp, Homo sapiens
catttcatcttcata

SEQ ID NO: 257740 - DNA, 15 bp, Homo sapiens
gcatttcatcttcat

SEQ ID NO: 257741 - DNA, 15 bp, Homo sapiens
agcatttcatcttca

SEQ ID NO: 257742 - DNA, 15 bp, Homo sapiens
aagcatttcatcttc

SEQ ID NO: 257743 - DNA, 15 bp, Homo sapiens
aaagcatttcatctt

SEQ ID NO: 257744 - DNA, 15 bp, Homo sapiens
aaaagcatttcatct

SEQ ID NO: 257745 - DNA, 15 bp, Homo sapiens
caaaagcatttcatc

SEQ ID NO: 257746 - DNA, 15 bp, Homo sapiens
acaaaagcatttcat

SEQ ID NO: 257747 - DNA, 15 bp, Homo sapiens
tacaaaagcatttca

SEQ ID NO: 257748 - DNA, 15 bp, Homo sapiens
ttacaaaagcatttc

SEQ ID NO: 257749 - DNA, 15 bp, Homo sapiens
gttacaaaagcattt

SEQ ID NO: 257750 - DNA, 15 bp, Homo sapiens
agttacaaaagcatt

SEQ ID NO: 257751 - DNA, 15 bp, Homo sapiens
aagttacaaaagcat

SEQ ID NO: 257752 - DNA, 15 bp, Homo sapiens
gaagttacaaaagca

SEQ ID NO: 257753 - DNA, 15 bp, Homo sapiens
ggaagttacaaaagc

SEQ ID NO: 257754 - DNA, 15 bp, Homo sapiens
aggaagttacaaaag

SEQ ID NO: 257755 - DNA, 15 bp, Homo sapiens
aaggaagttacaaaa

SEQ ID NO: 257756 - DNA, 15 bp, Homo sapiens
gaaggaagttacaaa

SEQ ID NO: 257757 - DNA, 15 bp, Homo sapiens
tgaaggaagttacaa

SEQ ID NO: 257758 - DNA, 15 bp, Homo sapiens
gtgaaggaagttaca

SEQ ID NO: 257759 - DNA, 15 bp, Homo sapiens
ggtgaaggaagttac

SEQ ID NO: 257760 - DNA, 15 bp, Homo sapiens
aggtgaaggaagtta

SEQ ID NO: 257761 - DNA, 15 bp, Homo sapiens
gaggtgaaggaagtt

SEQ ID NO: 257762 - DNA, 15 bp, Homo sapiens
agaggtgaaggaagt

SEQ ID NO: 257763 - DNA, 15 bp, Homo sapiens
aagaggtgaaggaag

SEQ ID NO: 257764 - DNA, 15 bp, Homo sapiens
aaagaggtgaaggaa

SEQ ID NO: 257765 - DNA, 15 bp, Homo sapiens
gaaagaggtgaagga

SEQ ID NO: 257766 - DNA, 15 bp, Homo sapiens
agaaagaggtgaagg

SEQ ID NO: 257767 - DNA, 15 bp, Homo sapiens
aagaaagaggtgaag

SEQ ID NO: 257768 - DNA, 15 bp, Homo sapiens
aaagaaagaggtgaa

SEQ ID NO: 257769 - DNA, 15 bp, Homo sapiens
gaaagaaagaggtga

SEQ ID NO: 257770 - DNA, 15 bp, Homo sapiens
ggaaagaaagaggtg

SEQ ID NO: 257771 - DNA, 15 bp, Homo sapiens
aggaaagaaagaggt

SEQ ID NO: 257772 - DNA, 15 bp, Homo sapiens
aaggaaagaaagagg

SEQ ID NO: 257773 - DNA, 15 bp, Homo sapiens
taaggaaagaaagag

SEQ ID NO: 257774 - DNA, 15 bp, Homo sapiens
ttaaggaaagaaaga

SEQ ID NO: 257775 - DNA, 15 bp, Homo sapiens
tttaaggaaagaaag

SEQ ID NO: 257776 - DNA, 15 bp, Homo sapiens
atttaaggaaagaaa

SEQ ID NO: 257777 - DNA, 15 bp, Homo sapiens
tatttaaggaaagaa

SEQ ID NO: 257778 - DNA, 15 bp, Homo sapiens
atatttaaggaaaga

SEQ ID NO: 257779 - DNA, 15 bp, Homo sapiens
aatatttaaggaaag

SEQ ID NO: 257780 - DNA, 15 bp, Homo sapiens
gaatatttaaggaaa

SEQ ID NO: 257781 - DNA, 15 bp, Homo sapiens
agaatatttaaggaa

SEQ ID NO: 257782 - DNA, 15 bp, Homo sapiens
tagaatatttaagga

SEQ ID NO: 257783 - DNA, 15 bp, Homo sapiens
atagaatatttaagg

SEQ ID NO: 257784 - DNA, 15 bp, Homo sapiens
aatagaatatttaag

SEQ ID NO: 257785 - DNA, 15 bp, Homo sapiens
taatagaatatttaa

SEQ ID NO: 257786 - DNA, 15 bp, Homo sapiens
ataatagaatattta

SEQ ID NO: 257787 - DNA, 15 bp, Homo sapiens
cataatagaatattt

SEQ ID NO: 257788 - DNA, 15 bp, Homo sapiens
acataatagaatatt

SEQ ID NO: 257789 - DNA, 15 bp, Homo sapiens
cacataatagaatat

SEQ ID NO: 257790 - DNA, 15 bp, Homo sapiens
tcacataatagaata

SEQ ID NO: 257791 - DNA, 15 bp, Homo sapiens
ttcacataatagaat

SEQ ID NO: 257792 - DNA, 15 bp, Homo sapiens
attcacataatagaa

SEQ ID NO: 257793 - DNA, 15 bp, Homo sapiens
tattcacataataga

SEQ ID NO: 257794 - DNA, 15 bp, Homo sapiens
ttattcacataatag

SEQ ID NO: 257795 - DNA, 15 bp, Homo sapiens
attattcacataata

SEQ ID NO: 257796 - DNA, 15 bp, Homo sapiens
aattattcacataat

SEQ ID NO: 257797 - DNA, 15 bp, Homo sapiens
taattattcacataa

SEQ ID NO: 257798 - DNA, 15 bp, Homo sapiens
ataattattcacata

SEQ ID NO: 257799 - DNA, 15 bp, Homo sapiens
cataattattcacat

SEQ ID NO: 257800 - DNA, 15 bp, Homo sapiens
acataattattcaca

SEQ ID NO: 257801 - DNA, 15 bp, Homo sapiens
gacataattattcac

SEQ ID NO: 257802 - DNA, 15 bp, Homo sapiens
tgacataattattca

SEQ ID NO: 257803 - DNA, 15 bp, Homo sapiens
atgacataattattc

SEQ ID NO: 257804 - DNA, 15 bp, Homo sapiens
tatgacataattatt

SEQ ID NO: 257805 - DNA, 15 bp, Homo sapiens
ttatgacataattat

SEQ ID NO: 257806 - DNA, 15 bp, Homo sapiens
attatgacataatta

SEQ ID NO: 257807 - DNA, 15 bp, Homo sapiens
aattatgacataatt

SEQ ID NO: 257808 - DNA, 15 bp, Homo sapiens
aaattatgacataat

SEQ ID NO: 257809 - DNA, 15 bp, Homo sapiens
taaattatgacataa

SEQ ID NO: 257810 - DNA, 15 bp, Homo sapiens
ttaaattatgacata

SEQ ID NO: 257811 - DNA, 15 bp, Homo sapiens
gttaaattatgacat

SEQ ID NO: 257812 - DNA, 15 bp, Homo sapiens
ggttaaattatgaca

SEQ ID NO: 257813 - DNA, 15 bp, Homo sapiens
tggttaaattatgac

SEQ ID NO: 257814 - DNA, 15 bp, Homo sapiens
gtggttaaattatga

SEQ ID NO: 257815 - DNA, 15 bp, Homo sapiens
agtggttaaattatg

SEQ ID NO: 257816 - DNA, 15 bp, Homo sapiens
aagtggttaaattat

SEQ ID NO: 257817 - DNA, 15 bp, Homo sapiens
aaagtggttaaatta

SEQ ID NO: 257818 - DNA, 15 bp, Homo sapiens
gaaagtggttaaatt

SEQ ID NO: 257819 - DNA, 15 bp, Homo sapiens
agaaagtggttaaat

SEQ ID NO: 257820 - DNA, 15 bp, Homo sapiens
aagaaagtggttaaa

SEQ ID NO: 257821 - DNA, 15 bp, Homo sapiens
caagaaagtggttaa

SEQ ID NO: 257822 - DNA, 15 bp, Homo sapiens
gcaagaaagtggtta

SEQ ID NO: 257823 - DNA, 15 bp, Homo sapiens
tgcaagaaagtggtt

SEQ ID NO: 257824 - DNA, 15 bp, Homo sapiens
gtgcaagaaagtggt

SEQ ID NO: 257825 - DNA, 15 bp, Homo sapiens
tgtgcaagaaagtgg

SEQ ID NO: 257826 - DNA, 15 bp, Homo sapiens
ctgtgcaagaaagtg

SEQ ID NO: 257827 - DNA, 15 bp, Homo sapiens
tctgtgcaagaaagt

SEQ ID NO: 257828 - DNA, 15 bp, Homo sapiens
gtctgtgcaagaaag

SEQ ID NO: 257829 - DNA, 15 bp, Homo sapiens
ggtctgtgcaagaaa

SEQ ID NO: 257830 - DNA, 15 bp, Homo sapiens
tggtctgtgcaagaa

SEQ ID NO: 257831 - DNA, 15 bp, Homo sapiens
ttggtctgtgcaaga

SEQ ID NO: 257832 - DNA, 15 bp, Homo sapiens
attggtctgtgcaag

SEQ ID NO: 257833 - DNA, 15 bp, Homo sapiens
tattggtctgtgcaa

SEQ ID NO: 257834 - DNA, 15 bp, Homo sapiens
atattggtctgtgca

SEQ ID NO: 257835 - DNA, 15 bp, Homo sapiens
aatattggtctgtgc

SEQ ID NO: 257836 - DNA, 15 bp, Homo sapiens
caatattggtctgtg

SEQ ID NO: 257837 - DNA, 15 bp, Homo sapiens
acaatattggtctgt

SEQ ID NO: 257838 - DNA, 15 bp, Homo sapiens
cacaatattggtctg

SEQ ID NO: 257839 - DNA, 15 bp, Homo sapiens
tcacaatattggtct

SEQ ID NO: 257840 - DNA, 15 bp, Homo sapiens
ttcacaatattggtc

SEQ ID NO: 257841 - DNA, 15 bp, Homo sapiens
tttcacaatattggt

SEQ ID NO: 257842 - DNA, 15 bp, Homo sapiens
ttttcacaatattgg

SEQ ID NO: 257843 - DNA, 15 bp, Homo sapiens
attttcacaatattg

SEQ ID NO: 257844 - DNA, 15 bp, Homo sapiens
gattttcacaatatt

SEQ ID NO: 257845 - DNA, 15 bp, Homo sapiens
agattttcacaatat

SEQ ID NO: 257846 - DNA, 15 bp, Homo sapiens
aagattttcacaata

SEQ ID NO: 257847 - DNA, 15 bp, Homo sapiens
aaagattttcacaat

SEQ ID NO: 257848 - DNA, 15 bp, Homo sapiens
gaaagattttcacaa

SEQ ID NO: 257849 - DNA, 15 bp, Homo sapiens
ggaaagattttcaca

SEQ ID NO: 257850 - DNA, 15 bp, Homo sapiens
tggaaagattttcac

SEQ ID NO: 257851 - DNA, 15 bp, Homo sapiens
ttggaaagattttca

SEQ ID NO: 257852 - DNA, 15 bp, Homo sapiens
gttggaaagattttc

SEQ ID NO: 257853 - DNA, 15 bp, Homo sapiens
cgttggaaagatttt

SEQ ID NO: 257854 - DNA, 15 bp, Homo sapiens
acgttggaaagattt

SEQ ID NO: 257855 - DNA, 15 bp, Homo sapiens
aacgttggaaagatt

SEQ ID NO: 257856 - DNA, 15 bp, Homo sapiens
aaacgttggaaagat

SEQ ID NO: 257857 - DNA, 15 bp, Homo sapiens
gaaacgttggaaaga

SEQ ID NO: 257858 - DNA, 15 bp, Homo sapiens
ggaaacgttggaaag

SEQ ID NO: 257859 - DNA, 15 bp, Homo sapiens
aggaaacgttggaaa

SEQ ID NO: 257860 - DNA, 15 bp, Homo sapiens
aaggaaacgttggaa

SEQ ID NO: 257861 - DNA, 15 bp, Homo sapiens
taaggaaacgttgga

SEQ ID NO: 257862 - DNA, 15 bp, Homo sapiens
ttaaggaaacgttgg

SEQ ID NO: 257863 - DNA, 15 bp, Homo sapiens
attaaggaaacgttg

SEQ ID NO: 257864 - DNA, 15 bp, Homo sapiens
tattaaggaaacgtt

SEQ ID NO: 257865 - DNA, 15 bp, Homo sapiens
ttattaaggaaacgt

SEQ ID NO: 257866 - DNA, 15 bp, Homo sapiens
tttattaaggaaacg

SEQ ID NO: 257867 - DNA, 15 bp, Homo sapiens
ttttattaaggaaac

SEQ ID NO: 257868 - DNA, 15 bp, Homo sapiens
tttttattaaggaaa

SEQ ID NO: 257869 - DNA, 15 bp, Homo sapiens
ttttttattaaggaa

SEQ ID NO: 257870 - DNA, 15 bp, Homo sapiens
cttttttattaagga

SEQ ID NO: 257871 - DNA, 15 bp, Homo sapiens
tcttttttattaagg

SEQ ID NO: 257872 - DNA, 15 bp, Homo sapiens
ttcttttttattaag

SEQ ID NO: 257873 - DNA, 15 bp, Homo sapiens
cttcttttttattaa

SEQ ID NO: 257874 - DNA, 15 bp, Homo sapiens
acttcttttttatta

SEQ ID NO: 257875 - DNA, 15 bp, Homo sapiens
tacttcttttttatt

SEQ ID NO: 257876 - DNA, 15 bp, Homo sapiens
atacttcttttttat

SEQ ID NO: 257877 - DNA, 15 bp, Homo sapiens
gatacttctttttta

SEQ ID NO: 257878 - DNA, 15 bp, Homo sapiens
agatacttctttttt

SEQ ID NO: 257879 - DNA, 15 bp, Homo sapiens
tagatacttcttttt

SEQ ID NO: 257880 - DNA, 15 bp, Homo sapiens
ttagatacttctttt

SEQ ID NO: 257881 - DNA, 15 bp, Homo sapiens
gttagatacttcttt

SEQ ID NO: 257882 - DNA, 15 bp, Homo sapiens
agttagatacttctt

SEQ ID NO: 257883 - DNA, 15 bp, Homo sapiens
gagttagatacttct

SEQ ID NO: 257884 - DNA, 15 bp, Homo sapiens
ggagttagatacttc

SEQ ID NO: 257885 - DNA, 15 bp, Homo sapiens
tggagttagatactt

SEQ ID NO: 257886 - DNA, 15 bp, Homo sapiens
gtggagttagatact

SEQ ID NO: 257887 - DNA, 15 bp, Homo sapiens
agtggagttagatac

SEQ ID NO: 257888 - DNA, 15 bp, Homo sapiens
aagtggagttagata

SEQ ID NO: 257889 - DNA, 15 bp, Homo sapiens
taagtggagttagat

SEQ ID NO: 257890 - DNA, 15 bp, Homo sapiens
gtaagtggagttaga

SEQ ID NO: 257891 - DNA, 15 bp, Homo sapiens
ggtaagtggagttag

SEQ ID NO: 257892 - DNA, 15 bp, Homo sapiens
tggtaagtggagtta

SEQ ID NO: 257893 - DNA, 15 bp, Homo sapiens
ctggtaagtggagtt

SEQ ID NO: 257894 - DNA, 15 bp, Homo sapiens
cctggtaagtggagt

SEQ ID NO: 257895 - DNA, 15 bp, Homo sapiens
ccctggtaagtggag

SEQ ID NO: 257896 - DNA, 15 bp, Homo sapiens
accctggtaagtgga

SEQ ID NO: 257897 - DNA, 15 bp, Homo sapiens
taccctggtaagtgg

SEQ ID NO: 257898 - DNA, 15 bp, Homo sapiens
ctaccctggtaagtg

SEQ ID NO: 257899 - DNA, 15 bp, Homo sapiens
cctaccctggtaagt

SEQ ID NO: 257900 - DNA, 15 bp, Homo sapiens
tcctaccctggtaag

SEQ ID NO: 257901 - DNA, 15 bp, Homo sapiens
ctcctaccctggtaa

SEQ ID NO: 257902 - DNA, 15 bp, Homo sapiens
tctcctaccctggta

SEQ ID NO: 257903 - DNA, 15 bp, Homo sapiens
ttctcctaccctggt

SEQ ID NO: 257904 - DNA, 15 bp, Homo sapiens
tttctcctaccctgg

SEQ ID NO: 257905 - DNA, 15 bp, Homo sapiens
gtttctcctaccctg

SEQ ID NO: 257906 - DNA, 15 bp, Homo sapiens
ggtttctcctaccct

SEQ ID NO: 257907 - DNA, 15 bp, Homo sapiens
gggtttctcctaccc

SEQ ID NO: 257908 - DNA, 15 bp, Homo sapiens
agggtttctcctacc

SEQ ID NO: 257909 - DNA, 15 bp, Homo sapiens
tagggtttctcctac

SEQ ID NO: 257910 - DNA, 15 bp, Homo sapiens
ttagggtttctccta

SEQ ID NO: 257911 - DNA, 15 bp, Homo sapiens
gttagggtttctcct

SEQ ID NO: 257912 - DNA, 15 bp, Homo sapiens
agttagggtttctcc

SEQ ID NO: 257913 - DNA, 15 bp, Homo sapiens
gagttagggtttctc

SEQ ID NO: 257914 - DNA, 15 bp, Homo sapiens
tgagttagggtttct

SEQ ID NO: 257915 - DNA, 15 bp, Homo sapiens
gtgagttagggtttc

SEQ ID NO: 257916 - DNA, 15 bp, Homo sapiens
tgtgagttagggttt

SEQ ID NO: 257917 - DNA, 15 bp, Homo sapiens
gtgtgagttagggtt

SEQ ID NO: 257918 - DNA, 15 bp, Homo sapiens
agtgtgagttagggt

SEQ ID NO: 257919 - DNA, 15 bp, Homo sapiens
cagtgtgagttaggg

SEQ ID NO: 257920 - DNA, 15 bp, Homo sapiens
ccagtgtgagttagg

SEQ ID NO: 257921 - DNA, 15 bp, Homo sapiens
accagtgtgagttag

SEQ ID NO: 257922 - DNA, 15 bp, Homo sapiens
aaccagtgtgagtta

SEQ ID NO: 257923 - DNA, 15 bp, Homo sapiens
gaaccagtgtgagtt

SEQ ID NO: 257924 - DNA, 15 bp, Homo sapiens
agaaccagtgtgagt

SEQ ID NO: 257925 - DNA, 15 bp, Homo sapiens
gagaaccagtgtgag

SEQ ID NO: 257926 - DNA, 15 bp, Homo sapiens
tgagaaccagtgtga

SEQ ID NO: 257927 - DNA, 15 bp, Homo sapiens
atgagaaccagtgtg

SEQ ID NO: 257928 - DNA, 15 bp, Homo sapiens
aatgagaaccagtgt

SEQ ID NO: 257929 - DNA, 15 bp, Homo sapiens
taatgagaaccagtg

SEQ ID NO: 257930 - DNA, 15 bp, Homo sapiens
ttaatgagaaccagt

SEQ ID NO: 257931 - DNA, 15 bp, Homo sapiens
tttaatgagaaccag

SEQ ID NO: 257932 - DNA, 15 bp, Homo sapiens
ttttaatgagaacca

SEQ ID NO: 257933 - DNA, 15 bp, Homo sapiens
attttaatgagaacc

SEQ ID NO: 257934 - DNA, 15 bp, Homo sapiens
tattttaatgagaac

SEQ ID NO: 257935 - DNA, 15 bp, Homo sapiens
ttattttaatgagaa

SEQ ID NO: 257936 - DNA, 15 bp, Homo sapiens
tttattttaatgaga

SEQ ID NO: 257937 - DNA, 15 bp, Homo sapiens
ttttattttaatgag

SEQ ID NO: 257938 - DNA, 15 bp, Homo sapiens
tttttattttaatga

SEQ ID NO: 257939 - DNA, 15 bp, Homo sapiens
gtttttattttaatg

SEQ ID NO: 257940 - DNA, 15 bp, Homo sapiens
agtttttattttaat

SEQ ID NO: 257941 - DNA, 15 bp, Homo sapiens
aagtttttattttaa

SEQ ID NO: 257942 - DNA, 15 bp, Homo sapiens
aaagtttttatttta

SEQ ID NO: 257943 - DNA, 15 bp, Homo sapiens
aaaagtttttatttt

SEQ ID NO: 257944 - DNA, 15 bp, Homo sapiens
aaaaagtttttattt

SEQ ID NO: 257945 - DNA, 15 bp, Homo sapiens
aaaaaagtttttatt

SEQ ID NO: 257946 - DNA, 15 bp, Homo sapiens
aaaaaaagtttttat

SEQ ID NO: 257947 - DNA, 15 bp, Homo sapiens
aaaaaaaagttttta

SEQ ID NO: 257948 - DNA, 15 bp, Homo sapiens
aaaaaaaaagttttt

SEQ ID NO: 257949 - DNA, 15 bp, Homo sapiens
gaaaaaaaaagtttt

SEQ ID NO: 257950 - DNA, 15 bp, Homo sapiens
ggaaaaaaaaagttt

SEQ ID NO: 257951 - DNA, 15 bp, Homo sapiens
aggaaaaaaaaagtt

SEQ ID NO: 257952 - DNA, 15 bp, Homo sapiens
aaggaaaaaaaaagt

SEQ ID NO: 257953 - DNA, 15 bp, Homo sapiens
aaaggaaaaaaaaag

SEQ ID NO: 257954 - DNA, 15 bp, Homo sapiens
aaaaggaaaaaaaaa

SEQ ID NO: 257955 - DNA, 15 bp, Homo sapiens
aaaaaggaaaaaaaa

SEQ ID NO: 257956 - DNA, 15 bp, Homo sapiens
aaaaaaggaaaaaaa

SEQ ID NO: 257957 - DNA, 15 bp, Homo sapiens
aaaaaaaggaaaaaa

SEQ ID NO: 257958 - DNA, 15 bp, Homo sapiens
gaaaaaaaggaaaaa

SEQ ID NO: 257959 - DNA, 15 bp, Homo sapiens
agaaaaaaaggaaaa

SEQ ID NO: 257960 - DNA, 15 bp, Homo sapiens
aagaaaaaaaggaaa

SEQ ID NO: 257961 - DNA, 15 bp, Homo sapiens
aaagaaaaaaaggaa

SEQ ID NO: 257962 - DNA, 15 bp, Homo sapiens
gaaagaaaaaaagga

SEQ ID NO: 257963 - DNA, 15 bp, Homo sapiens
agaaagaaaaaaagg

SEQ ID NO: 257964 - DNA, 15 bp, Homo sapiens
cagaaagaaaaaaag

SEQ ID NO: 257965 - DNA, 15 bp, Homo sapiens
gcagaaagaaaaaaa

SEQ ID NO: 257966 - DNA, 15 bp, Homo sapiens
ggcagaaagaaaaaa

SEQ ID NO: 257967 - DNA, 15 bp, Homo sapiens
tggcagaaagaaaaa

SEQ ID NO: 257968 - DNA, 15 bp, Homo sapiens
ctggcagaaagaaaa

SEQ ID NO: 257969 - DNA, 15 bp, Homo sapiens
gctggcagaaagaaa

SEQ ID NO: 257970 - DNA, 15 bp, Homo sapiens
tgctggcagaaagaa

SEQ ID NO: 257971 - DNA, 15 bp, Homo sapiens
ttgctggcagaaaga

SEQ ID NO: 257972 - DNA, 15 bp, Homo sapiens
gttgctggcagaaag

SEQ ID NO: 257973 - DNA, 15 bp, Homo sapiens
agttgctggcagaaa

SEQ ID NO: 257974 - DNA, 15 bp, Homo sapiens
gagttgctggcagaa

SEQ ID NO: 257975 - DNA, 15 bp, Homo sapiens
ggagttgctggcaga

SEQ ID NO: 257976 - DNA, 15 bp, Homo sapiens
tggagttgctggcag

SEQ ID NO: 257977 - DNA, 15 bp, Homo sapiens
ctggagttgctggca

SEQ ID NO: 257978 - DNA, 15 bp, Homo sapiens
gctggagttgctggc

SEQ ID NO: 257979 - DNA, 15 bp, Homo sapiens
agctggagttgctgg

SEQ ID NO: 257980 - DNA, 15 bp, Homo sapiens
aagctggagttgctg

SEQ ID NO: 257981 - DNA, 15 bp, Homo sapiens
caagctggagttgct

SEQ ID NO: 257982 - DNA, 15 bp, Homo sapiens
acaagctggagttgc

SEQ ID NO: 257983 - DNA, 15 bp, Homo sapiens
aacaagctggagttg

SEQ ID NO: 257984 - DNA, 15 bp, Homo sapiens
aaacaagctggagtt

SEQ ID NO: 257985 - DNA, 15 bp, Homo sapiens
aaaacaagctggagt

SEQ ID NO: 257986 - DNA, 15 bp, Homo sapiens
caaaacaagctggag

SEQ ID NO: 257987 - DNA, 15 bp, Homo sapiens
acaaaacaagctgga

SEQ ID NO: 257988 - DNA, 15 bp, Homo sapiens
aacaaaacaagctgg

SEQ ID NO: 257989 - DNA, 15 bp, Homo sapiens
aaacaaaacaagctg

SEQ ID NO: 257990 - DNA, 15 bp, Homo sapiens
aaaacaaaacaagct

SEQ ID NO: 257991 - DNA, 15 bp, Homo sapiens
aaaaacaaaacaagc

SEQ ID NO: 257992 - DNA, 15 bp, Homo sapiens
aaaaaacaaaacaag

SEQ ID NO: 257993 - DNA, 15 bp, Homo sapiens
taaaaaacaaaacaa

SEQ ID NO: 257994 - DNA, 15 bp, Homo sapiens
ataaaaaacaaaaca

SEQ ID NO: 257995 - DNA, 15 bp, Homo sapiens
gataaaaaacaaaac

SEQ ID NO: 257996 - DNA, 15 bp, Homo sapiens
agataaaaaacaaaa

SEQ ID NO: 257997 - DNA, 15 bp, Homo sapiens
cagataaaaaacaaa

SEQ ID NO: 257998 - DNA, 15 bp, Homo sapiens
acagataaaaaacaa

SEQ ID NO: 257999 - DNA, 15 bp, Homo sapiens
cacagataaaaaaca

SEQ ID NO: 258000 - DNA, 15 bp, Homo sapiens
acacagataaaaaac

SEQ ID NO: 258001 - DNA, 15 bp, Homo sapiens
cacacagataaaaaa

SEQ ID NO: 258002 - DNA, 15 bp, Homo sapiens
gcacacagataaaaa

SEQ ID NO: 258003 - DNA, 15 bp, Homo sapiens
tgcacacagataaaa

SEQ ID NO: 258004 - DNA, 15 bp, Homo sapiens
atgcacacagataaa

SEQ ID NO: 258005 - DNA, 15 bp, Homo sapiens
aatgcacacagataa

SEQ ID NO: 258006 - DNA, 15 bp, Homo sapiens
gaatgcacacagata

SEQ ID NO: 258007 - DNA, 15 bp, Homo sapiens
tgaatgcacacagat

SEQ ID NO: 258008 - DNA, 15 bp, Homo sapiens
ttgaatgcacacaga

SEQ ID NO: 258009 - DNA, 15 bp, Homo sapiens
attgaatgcacacag

SEQ ID NO: 258010 - DNA, 15 bp, Homo sapiens
tattgaatgcacaca

SEQ ID NO: 258011 - DNA, 15 bp, Homo sapiens
ttattgaatgcacac

SEQ ID NO: 258012 - DNA, 15 bp, Homo sapiens
cttattgaatgcaca

SEQ ID NO: 258013 - DNA, 15 bp, Homo sapiens
ccttattgaatgcac

SEQ ID NO: 258014 - DNA, 15 bp, Homo sapiens
gccttattgaatgca

SEQ ID NO: 258015 - DNA, 15 bp, Homo sapiens
ggccttattgaatgc

SEQ ID NO: 258016 - DNA, 15 bp, Homo sapiens
tggccttattgaatg

SEQ ID NO: 258017 - DNA, 15 bp, Homo sapiens
ttggccttattgaat

SEQ ID NO: 258018 - DNA, 15 bp, Homo sapiens
attggccttattgaa

SEQ ID NO: 258019 - DNA, 15 bp, Homo sapiens
gattggccttattga

SEQ ID NO: 258020 - DNA, 15 bp, Homo sapiens
tgattggccttattg

SEQ ID NO: 258021 - DNA, 15 bp, Homo sapiens
atgattggccttatt

SEQ ID NO: 258022 - DNA, 15 bp, Homo sapiens
aatgattggccttat

SEQ ID NO: 258023 - DNA, 15 bp, Homo sapiens
caatgattggcctta

SEQ ID NO: 258024 - DNA, 15 bp, Homo sapiens
acaatgattggcctt

SEQ ID NO: 258025 - DNA, 15 bp, Homo sapiens
aacaatgattggcct

SEQ ID NO: 258026 - DNA, 15 bp, Homo sapiens
aaacaatgattggcc

SEQ ID NO: 258027 - DNA, 15 bp, Homo sapiens
taaacaatgattggc

SEQ ID NO: 258028 - DNA, 15 bp, Homo sapiens
ataaacaatgattgg

SEQ ID NO: 258029 - DNA, 15 bp, Homo sapiens
aataaacaatgattg

SEQ ID NO: 258030 - DNA, 15 bp, Homo sapiens
taataaacaatgatt

SEQ ID NO: 258031 - DNA, 15 bp, Homo sapiens
gtaataaacaatgat

SEQ ID NO: 258032 - DNA, 15 bp, Homo sapiens
agtaataaacaatga

SEQ ID NO: 258033 - DNA, 15 bp, Homo sapiens
aagtaataaacaatg

SEQ ID NO: 258034 - DNA, 15 bp, Homo sapiens
caagtaataaacaat

SEQ ID NO: 258035 - DNA, 15 bp, Homo sapiens
acaagtaataaacaa

SEQ ID NO: 258036 - DNA, 15 bp, Homo sapiens
aacaagtaataaaca

SEQ ID NO: 258037 - DNA, 15 bp, Homo sapiens
caacaagtaataaac

SEQ ID NO: 258038 - DNA, 15 bp, Homo sapiens
ccaacaagtaataaa

SEQ ID NO: 258039 - DNA, 15 bp, Homo sapiens
gccaacaagtaataa

SEQ ID NO: 258040 - DNA, 15 bp, Homo sapiens
ggccaacaagtaata

SEQ ID NO: 258041 - DNA, 15 bp, Homo sapiens
tggccaacaagtaat

SEQ ID NO: 258042 - DNA, 15 bp, Homo sapiens
atggccaacaagtaa

SEQ ID NO: 258043 - DNA, 15 bp, Homo sapiens
aatggccaacaagta

SEQ ID NO: 258044 - DNA, 15 bp, Homo sapiens
aaatggccaacaagt

SEQ ID NO: 258045 - DNA, 15 bp, Homo sapiens
aaaatggccaacaag

SEQ ID NO: 258046 - DNA, 15 bp, Homo sapiens
gaaaatggccaacaa

SEQ ID NO: 258047 - DNA, 15 bp, Homo sapiens
ggaaaatggccaaca

SEQ ID NO: 258048 - DNA, 15 bp, Homo sapiens
aggaaaatggccaac

SEQ ID NO: 258049 - DNA, 15 bp, Homo sapiens
aaggaaaatggccaa

SEQ ID NO: 258050 - DNA, 15 bp, Homo sapiens
gaaggaaaatggcca

SEQ ID NO: 258051 - DNA, 15 bp, Homo sapiens
tgaaggaaaatggcc

SEQ ID NO: 258052 - DNA, 15 bp, Homo sapiens
atgaaggaaaatggc

SEQ ID NO: 258053 - DNA, 15 bp, Homo sapiens
aatgaaggaaaatgg

SEQ ID NO: 258054 - DNA, 15 bp, Homo sapiens
taatgaaggaaaatg

SEQ ID NO: 258055 - DNA, 15 bp, Homo sapiens
ttaatgaaggaaaat

SEQ ID NO: 258056 - DNA, 15 bp, Homo sapiens
attaatgaaggaaaa

SEQ ID NO: 258057 - DNA, 15 bp, Homo sapiens
aattaatgaaggaaa

SEQ ID NO: 258058 - DNA, 15 bp, Homo sapiens
caattaatgaaggaa

SEQ ID NO: 258059 - DNA, 15 bp, Homo sapiens
ccaattaatgaagga

SEQ ID NO: 258060 - DNA, 15 bp, Homo sapiens
gccaattaatgaagg

SEQ ID NO: 258061 - DNA, 15 bp, Homo sapiens
agccaattaatgaag

SEQ ID NO: 258062 - DNA, 15 bp, Homo sapiens
aagccaattaatgaa

SEQ ID NO: 258063 - DNA, 15 bp, Homo sapiens
taagccaattaatga

SEQ ID NO: 258064 - DNA, 15 bp, Homo sapiens
ataagccaattaatg

SEQ ID NO: 258065 - DNA, 15 bp, Homo sapiens
gataagccaattaat

SEQ ID NO: 258066 - DNA, 15 bp, Homo sapiens
ggataagccaattaa

SEQ ID NO: 258067 - DNA, 15 bp, Homo sapiens
aggataagccaatta

SEQ ID NO: 258068 - DNA, 15 bp, Homo sapiens
gaggataagccaatt

SEQ ID NO: 258069 - DNA, 15 bp, Homo sapiens
agaggataagccaat

SEQ ID NO: 258070 - DNA, 15 bp, Homo sapiens
aagaggataagccaa

SEQ ID NO: 258071 - DNA, 15 bp, Homo sapiens
gaagaggataagcca

SEQ ID NO: 258072 - DNA, 15 bp, Homo sapiens
agaagaggataagcc

SEQ ID NO: 258073 - DNA, 15 bp, Homo sapiens
tagaagaggataagc

SEQ ID NO: 258074 - DNA, 15 bp, Homo sapiens
ctagaagaggataag

SEQ ID NO: 258075 - DNA, 15 bp, Homo sapiens
cctagaagaggataa

SEQ ID NO: 258076 - DNA, 15 bp, Homo sapiens
gcctagaagaggata

SEQ ID NO: 258077 - DNA, 15 bp, Homo sapiens
agcctagaagaggat

SEQ ID NO: 258078 - DNA, 15 bp, Homo sapiens
aagcctagaagagga

SEQ ID NO: 258079 - DNA, 15 bp, Homo sapiens
aaagcctagaagagg

SEQ ID NO: 258080 - DNA, 15 bp, Homo sapiens
taaagcctagaagag

SEQ ID NO: 258081 - DNA, 15 bp, Homo sapiens
ataaagcctagaaga

SEQ ID NO: 258082 - DNA, 15 bp, Homo sapiens
aataaagcctagaag

SEQ ID NO: 258083 - DNA, 15 bp, Homo sapiens
aaataaagcctagaa

SEQ ID NO: 258084 - DNA, 15 bp, Homo sapiens
gaaataaagcctaga

SEQ ID NO: 258085 - DNA, 15 bp, Homo sapiens
ggaaataaagcctag

SEQ ID NO: 258086 - DNA, 15 bp, Homo sapiens
aggaaataaagccta

SEQ ID NO: 258087 - DNA, 15 bp, Homo sapiens
aaggaaataaagcct

SEQ ID NO: 258088 - DNA, 15 bp, Homo sapiens
gaaggaaataaagcc

SEQ ID NO: 258089 - DNA, 15 bp, Homo sapiens
agaaggaaataaagc

SEQ ID NO: 258090 - DNA, 15 bp, Homo sapiens
aagaaggaaataaag

SEQ ID NO: 258091 - DNA, 15 bp, Homo sapiens
aaagaaggaaataaa

SEQ ID NO: 258092 - DNA, 15 bp, Homo sapiens
aaaagaaggaaataa

SEQ ID NO: 258093 - DNA, 15 bp, Homo sapiens
gaaaagaaggaaata

SEQ ID NO: 258094 - DNA, 15 bp, Homo sapiens
agaaaagaaggaaat

SEQ ID NO: 258095 - DNA, 15 bp, Homo sapiens
aagaaaagaaggaaa

SEQ ID NO: 258096 - DNA, 15 bp, Homo sapiens
aaagaaaagaaggaa

SEQ ID NO: 258097 - DNA, 15 bp, Homo sapiens
aaaagaaaagaagga

SEQ ID NO: 258098 - DNA, 15 bp, Homo sapiens
caaaagaaaagaagg

SEQ ID NO: 258099 - DNA, 15 bp, Homo sapiens
acaaaagaaaagaag

SEQ ID NO: 258100 - DNA, 15 bp, Homo sapiens
aacaaaagaaaagaa

SEQ ID NO: 258101 - DNA, 15 bp, Homo sapiens
aaacaaaagaaaaga

SEQ ID NO: 258102 - DNA, 15 bp, Homo sapiens
taaacaaaagaaaag

SEQ ID NO: 258103 - DNA, 15 bp, Homo sapiens
ataaacaaaagaaaa

SEQ ID NO: 258104 - DNA, 15 bp, Homo sapiens
aataaacaaaagaaa

SEQ ID NO: 258105 - DNA, 15 bp, Homo sapiens
aaataaacaaaagaa

SEQ ID NO: 258106 - DNA, 15 bp, Homo sapiens
aaaataaacaaaaga

SEQ ID NO: 258107 - DNA, 15 bp, Homo sapiens
aaaaataaacaaaag

SEQ ID NO: 258108 - DNA, 15 bp, Homo sapiens
caaaaataaacaaaa

SEQ ID NO: 258109 - DNA, 15 bp, Homo sapiens
tcaaaaataaacaaa

SEQ ID NO: 258110 - DNA, 15 bp, Homo sapiens
ctcaaaaataaacaa

SEQ ID NO: 258111 - DNA, 15 bp, Homo sapiens
tctcaaaaataaaca

SEQ ID NO: 258112 - DNA, 15 bp, Homo sapiens
gtctcaaaaataaac

SEQ ID NO: 258113 - DNA, 15 bp, Homo sapiens
cgtctcaaaaataaa

SEQ ID NO: 258114 - DNA, 15 bp, Homo sapiens
ccgtctcaaaaataa

SEQ ID NO: 258115 - DNA, 15 bp, Homo sapiens
tccgtctcaaaaata

SEQ ID NO: 258116 - DNA, 15 bp, Homo sapiens
ctccgtctcaaaaat

SEQ ID NO: 258117 - DNA, 15 bp, Homo sapiens
gagactccgtctcaa

SEQ ID NO: 258118 - DNA, 15 bp, Homo sapiens
tgagactccgtctca

SEQ ID NO: 258119 - DNA, 15 bp, Homo sapiens
gtgagactccgtctc

SEQ ID NO: 258120 - DNA, 15 bp, Homo sapiens
agtgagactccgtct

SEQ ID NO: 258121 - DNA, 15 bp, Homo sapiens
gagtgagactccgtc

SEQ ID NO: 258122 - DNA, 15 bp, Homo sapiens
agagtgagactccgt

SEQ ID NO: 258123 - DNA, 15 bp, Homo sapiens
cagagtgagactccg

SEQ ID NO: 258124 - DNA, 15 bp, Homo sapiens
acagagtgagactcc

SEQ ID NO: 258125 - DNA, 15 bp, Homo sapiens
gacagagtgagactc

SEQ ID NO: 258126 - DNA, 15 bp, Homo sapiens
agacagagtgagact

SEQ ID NO: 258127 - DNA, 15 bp, Homo sapiens
gagacagagtgagac

SEQ ID NO: 258128 - DNA, 15 bp, Homo sapiens
ggagacagagtgaga

SEQ ID NO: 258129 - DNA, 15 bp, Homo sapiens
gggagacagagtgag

SEQ ID NO: 258130 - DNA, 15 bp, Homo sapiens
tgggagacagagtga

SEQ ID NO: 258131 - DNA, 15 bp, Homo sapiens
ctgggagacagagtg

SEQ ID NO: 258132 - DNA, 15 bp, Homo sapiens
cctgggagacagagt

SEQ ID NO: 258133 - DNA, 15 bp, Homo sapiens
gcctgggagacagag

SEQ ID NO: 258134 - DNA, 15 bp, Homo sapiens
agcctgggagacaga

SEQ ID NO: 258135 - DNA, 15 bp, Homo sapiens
cagcctgggagacag

SEQ ID NO: 258136 - DNA, 15 bp, Homo sapiens
ccagcctgggagaca

SEQ ID NO: 258137 - DNA, 15 bp, Homo sapiens
tccagcctgggagac

SEQ ID NO: 258138 - DNA, 15 bp, Homo sapiens
ctccagcctgggaga

SEQ ID NO: 258139 - DNA, 15 bp, Homo sapiens
actccagcctgggag

SEQ ID NO: 258140 - DNA, 15 bp, Homo sapiens
cactccagcctggga

SEQ ID NO: 258141 - DNA, 15 bp, Homo sapiens
ggccactgcactcca

SEQ ID NO: 258142 - DNA, 15 bp, Homo sapiens
aggccactgcactcc

SEQ ID NO: 258143 - DNA, 15 bp, Homo sapiens
gaggccactgcactc

SEQ ID NO: 258144 - DNA, 15 bp, Homo sapiens
tatgaggccactgca

SEQ ID NO: 258145 - DNA, 15 bp, Homo sapiens
ttatgaggccactgc

SEQ ID NO: 258146 - DNA, 15 bp, Homo sapiens
attatgaggccactg

SEQ ID NO: 258147 - DNA, 15 bp, Homo sapiens
cattatgaggccact

SEQ ID NO: 258148 - DNA, 15 bp, Homo sapiens
tcattatgaggccac

SEQ ID NO: 258149 - DNA, 15 bp, Homo sapiens
ctcattatgaggcca

SEQ ID NO: 258150 - DNA, 15 bp, Homo sapiens
tctcattatgaggcc

SEQ ID NO: 258151 - DNA, 15 bp, Homo sapiens
gtctcattatgaggc

SEQ ID NO: 258152 - DNA, 15 bp, Homo sapiens
tgtctcattatgagg

SEQ ID NO: 258153 - DNA, 15 bp, Homo sapiens
atgtctcattatgag

SEQ ID NO: 258154 - DNA, 15 bp, Homo sapiens
gatgtctcattatga

SEQ ID NO: 258155 - DNA, 15 bp, Homo sapiens
tgatgtctcattatg

SEQ ID NO: 258156 - DNA, 15 bp, Homo sapiens
atgatgtctcattat

SEQ ID NO: 258157 - DNA, 15 bp, Homo sapiens
tatgatgtctcatta

SEQ ID NO: 258158 - DNA, 15 bp, Homo sapiens
ttatgatgtctcatt

SEQ ID NO: 258159 - DNA, 15 bp, Homo sapiens
attatgatgtctcat

SEQ ID NO: 258160 - DNA, 15 bp, Homo sapiens
cattatgatgtctca

SEQ ID NO: 258161 - DNA, 15 bp, Homo sapiens
tcattatgatgtctc

SEQ ID NO: 258162 - DNA, 15 bp, Homo sapiens
gtcattatgatgtct

SEQ ID NO: 258163 - DNA, 15 bp, Homo sapiens
tgtcattatgatgtc

SEQ ID NO: 258164 - DNA, 15 bp, Homo sapiens
atgtcattatgatgt

SEQ ID NO: 258165 - DNA, 15 bp, Homo sapiens
aatgtcattatgatg

SEQ ID NO: 258166 - DNA, 15 bp, Homo sapiens
taatgtcattatgat

SEQ ID NO: 258167 - DNA, 15 bp, Homo sapiens
ctaatgtcattatga

SEQ ID NO: 258168 - DNA, 15 bp, Homo sapiens
gctaatgtcattatg

SEQ ID NO: 258169 - DNA, 15 bp, Homo sapiens
tgctaatgtcattat

SEQ ID NO: 258170 - DNA, 15 bp, Homo sapiens
atgctaatgtcatta

SEQ ID NO: 258171 - DNA, 15 bp, Homo sapiens
aatgctaatgtcatt

SEQ ID NO: 258172 - DNA, 15 bp, Homo sapiens
taatgctaatgtcat

SEQ ID NO: 258173 - DNA, 15 bp, Homo sapiens
gtaatgctaatgtca

SEQ ID NO: 258174 - DNA, 15 bp, Homo sapiens
agtaatgctaatgtc

SEQ ID NO: 258175 - DNA, 15 bp, Homo sapiens
aagtaatgctaatgt

SEQ ID NO: 258176 - DNA, 15 bp, Homo sapiens
caagtaatgctaatg

SEQ ID NO: 258177 - DNA, 15 bp, Homo sapiens
ccaagtaatgctaat

SEQ ID NO: 258178 - DNA, 15 bp, Homo sapiens
accaagtaatgctaa

SEQ ID NO: 258179 - DNA, 15 bp, Homo sapiens
aaccaagtaatgcta

SEQ ID NO: 258180 - DNA, 15 bp, Homo sapiens
aaaccaagtaatgct

SEQ ID NO: 258181 - DNA, 15 bp, Homo sapiens
taaaccaagtaatgc

SEQ ID NO: 258182 - DNA, 15 bp, Homo sapiens
ttaaaccaagtaatg

SEQ ID NO: 258183 - DNA, 15 bp, Homo sapiens
cttaaaccaagtaat

SEQ ID NO: 258184 - DNA, 15 bp, Homo sapiens
acttaaaccaagtaa

SEQ ID NO: 258185 - DNA, 15 bp, Homo sapiens
tacttaaaccaagta

SEQ ID NO: 258186 - DNA, 15 bp, Homo sapiens
gtacttaaaccaagt

SEQ ID NO: 258187 - DNA, 15 bp, Homo sapiens
tgtacttaaaccaag

SEQ ID NO: 258188 - DNA, 15 bp, Homo sapiens
ttgtacttaaaccaa

SEQ ID NO: 258189 - DNA, 15 bp, Homo sapiens
tttgtacttaaacca

SEQ ID NO: 258190 - DNA, 15 bp, Homo sapiens
atttgtacttaaacc

SEQ ID NO: 258191 - DNA, 15 bp, Homo sapiens
catttgtacttaaac

SEQ ID NO: 258192 - DNA, 15 bp, Homo sapiens
ccatttgtacttaaa

SEQ ID NO: 258193 - DNA, 15 bp, Homo sapiens
tccatttgtacttaa

SEQ ID NO: 258194 - DNA, 15 bp, Homo sapiens
atccatttgtactta

SEQ ID NO: 258195 - DNA, 15 bp, Homo sapiens
catccatttgtactt

SEQ ID NO: 258196 - DNA, 15 bp, Homo sapiens
tcatccatttgtact

SEQ ID NO: 258197 - DNA, 15 bp, Homo sapiens
ttcatccatttgtac

SEQ ID NO: 258198 - DNA, 15 bp, Homo sapiens
tttcatccatttgta

SEQ ID NO: 258199 - DNA, 15 bp, Homo sapiens
gtttcatccatttgt

SEQ ID NO: 258200 - DNA, 15 bp, Homo sapiens
ggtttcatccatttg

SEQ ID NO: 258201 - DNA, 15 bp, Homo sapiens
aggtttcatccattt

SEQ ID NO: 258202 - DNA, 15 bp, Homo sapiens
gaggtttcatccatt

SEQ ID NO: 258203 - DNA, 15 bp, Homo sapiens
ggaggtttcatccat

SEQ ID NO: 258204 - DNA, 15 bp, Homo sapiens
tggaggtttcatcca

SEQ ID NO: 258205 - DNA, 15 bp, Homo sapiens
gtggaggtttcatcc

SEQ ID NO: 258206 - DNA, 15 bp, Homo sapiens
ggtggaggtttcatc

SEQ ID NO: 258207 - DNA, 15 bp, Homo sapiens
aggtggaggtttcat

SEQ ID NO: 258208 - DNA, 15 bp, Homo sapiens
gaggtggaggtttca

SEQ ID NO: 258209 - DNA, 15 bp, Homo sapiens
ggaggtggaggtttc

SEQ ID NO: 258210 - DNA, 15 bp, Homo sapiens
aggaggtggaggttt

SEQ ID NO: 258211 - DNA, 15 bp, Homo sapiens
caggaggtggaggtt

SEQ ID NO: 258212 - DNA, 15 bp, Homo sapiens
ccaggaggtggaggt

SEQ ID NO: 258213 - DNA, 15 bp, Homo sapiens
cccaggaggtggagg

SEQ ID NO: 258214 - DNA, 15 bp, Homo sapiens
acccaggaggtggag

SEQ ID NO: 258215 - DNA, 15 bp, Homo sapiens
aacccaggaggtgga

SEQ ID NO: 258216 - DNA, 15 bp, Homo sapiens
gaacccaggaggtgg

SEQ ID NO: 258217 - DNA, 15 bp, Homo sapiens
tgaacccaggaggtg

SEQ ID NO: 258218 - DNA, 15 bp, Homo sapiens
ttgaacccaggaggt

SEQ ID NO: 258219 - DNA, 15 bp, Homo sapiens
ccttgaacccaggag

SEQ ID NO: 258220 - DNA, 15 bp, Homo sapiens
cccttgaacccagga

SEQ ID NO: 258221 - DNA, 15 bp, Homo sapiens
tcccttgaacccagg

SEQ ID NO: 258222 - DNA, 15 bp, Homo sapiens
atcccttgaacccag

SEQ ID NO: 258223 - DNA, 15 bp, Homo sapiens
aatcccttgaaccca

SEQ ID NO: 258224 - DNA, 15 bp, Homo sapiens
gaatcccttgaaccc

SEQ ID NO: 258225 - DNA, 15 bp, Homo sapiens
aggagaatcccttga

SEQ ID NO: 258226 - DNA, 15 bp, Homo sapiens
caggagaatcccttg

SEQ ID NO: 258227 - DNA, 15 bp, Homo sapiens
gcaggagaatccctt

SEQ ID NO: 258228 - DNA, 15 bp, Homo sapiens
ggcaggagaatccct

SEQ ID NO: 258229 - DNA, 15 bp, Homo sapiens
aggcaggagaatccc

SEQ ID NO: 258230 - DNA, 15 bp, Homo sapiens
gaggcaggagaatcc

SEQ ID NO: 258231 - DNA, 15 bp, Homo sapiens
ctacttgggaggctg

SEQ ID NO: 258232 - DNA, 15 bp, Homo sapiens
ccagctacttgggag

SEQ ID NO: 258233 - DNA, 15 bp, Homo sapiens
cccagctacttggga

SEQ ID NO: 258234 - DNA, 15 bp, Homo sapiens
tcccagctacttggg

SEQ ID NO: 258235 - DNA, 15 bp, Homo sapiens
atcccagctacttgg

SEQ ID NO: 258236 - DNA, 15 bp, Homo sapiens
aatcccagctacttg

SEQ ID NO: 258237 - DNA, 15 bp, Homo sapiens
taatcccagctactt

SEQ ID NO: 258238 - DNA, 15 bp, Homo sapiens
ggcgcctgtaatccc

SEQ ID NO: 258239 - DNA, 15 bp, Homo sapiens
gggcgcctgtaatcc

SEQ ID NO: 258240 - DNA, 15 bp, Homo sapiens
cgggcgcctgtaatc

SEQ ID NO: 258241 - DNA, 15 bp, Homo sapiens
gcgggcgcctgtaat

SEQ ID NO: 258242 - DNA, 15 bp, Homo sapiens
ggcgggcgcctgtaa

SEQ ID NO: 258243 - DNA, 15 bp, Homo sapiens
tggcgggcgcctgta

SEQ ID NO: 258244 - DNA, 15 bp, Homo sapiens
gtggcgggcgcctgt

SEQ ID NO: 258245 - DNA, 15 bp, Homo sapiens
agtggcgggcgcctg

SEQ ID NO: 258246 - DNA, 15 bp, Homo sapiens
tagtggcgggcgcct

SEQ ID NO: 258247 - DNA, 15 bp, Homo sapiens
gtagtggcgggcgcc

SEQ ID NO: 258248 - DNA, 15 bp, Homo sapiens
tgtagtggcgggcgc

SEQ ID NO: 258249 - DNA, 15 bp, Homo sapiens
gtgtagtggcgggcg

SEQ ID NO: 258250 - DNA, 15 bp, Homo sapiens
ggtgtagtggcgggc

SEQ ID NO: 258251 - DNA, 15 bp, Homo sapiens
aggtgtagtggcggg

SEQ ID NO: 258252 - DNA, 15 bp, Homo sapiens
caggtgtagtggcgg

SEQ ID NO: 258253 - DNA, 15 bp, Homo sapiens
ccaggtgtagtggcg

SEQ ID NO: 258254 - DNA, 15 bp, Homo sapiens
gccaggtgtagtggc

SEQ ID NO: 258255 - DNA, 15 bp, Homo sapiens
agccaggtgtagtgg

SEQ ID NO: 258256 - DNA, 15 bp, Homo sapiens
tagccaggtgtagtg

SEQ ID NO: 258257 - DNA, 15 bp, Homo sapiens
ttagccaggtgtagt

SEQ ID NO: 258258 - DNA, 15 bp, Homo sapiens
attagccaggtgtag

SEQ ID NO: 258259 - DNA, 15 bp, Homo sapiens
aattagccaggtgta

SEQ ID NO: 258260 - DNA, 15 bp, Homo sapiens
aaattagccaggtgt

SEQ ID NO: 258261 - DNA, 15 bp, Homo sapiens
aaaattagccaggtg

SEQ ID NO: 258262 - DNA, 15 bp, Homo sapiens
taaaattagccaggt

SEQ ID NO: 258263 - DNA, 15 bp, Homo sapiens
gtaaaattagccagg

SEQ ID NO: 258264 - DNA, 15 bp, Homo sapiens
agtaaaattagccag

SEQ ID NO: 258265 - DNA, 15 bp, Homo sapiens
cagtaaaattagcca

SEQ ID NO: 258266 - DNA, 15 bp, Homo sapiens
acagtaaaattagcc

SEQ ID NO: 258267 - DNA, 15 bp, Homo sapiens
tacagtaaaattagc

SEQ ID NO: 258268 - DNA, 15 bp, Homo sapiens
atacagtaaaattag

SEQ ID NO: 258269 - DNA, 15 bp, Homo sapiens
aatacagtaaaatta

SEQ ID NO: 258270 - DNA, 15 bp, Homo sapiens
aaatacagtaaaatt

SEQ ID NO: 258271 - DNA, 15 bp, Homo sapiens
aaaatacagtaaaat

SEQ ID NO: 258272 - DNA, 15 bp, Homo sapiens
aaaaatacagtaaaa

SEQ ID NO: 258273 - DNA, 15 bp, Homo sapiens
aaaaaatacagtaaa

SEQ ID NO: 258274 - DNA, 15 bp, Homo sapiens
taaaaaatacagtaa

SEQ ID NO: 258275 - DNA, 15 bp, Homo sapiens
ctaaaaaatacagta

SEQ ID NO: 258276 - DNA, 15 bp, Homo sapiens
actaaaaaatacagt

SEQ ID NO: 258277 - DNA, 15 bp, Homo sapiens
tactaaaaaatacag

SEQ ID NO: 258278 - DNA, 15 bp, Homo sapiens
ctactaaaaaataca

SEQ ID NO: 258279 - DNA, 15 bp, Homo sapiens
tctactaaaaaatac

SEQ ID NO: 258280 - DNA, 15 bp, Homo sapiens
ctctactaaaaaata

SEQ ID NO: 258281 - DNA, 15 bp, Homo sapiens
tctctactaaaaaat

SEQ ID NO: 258282 - DNA, 15 bp, Homo sapiens
atctctactaaaaaa

SEQ ID NO: 258283 - DNA, 15 bp, Homo sapiens
gccccatctctacta

SEQ ID NO: 258284 - DNA, 15 bp, Homo sapiens
agccccatctctact

SEQ ID NO: 258285 - DNA, 15 bp, Homo sapiens
aagccccatctctac

SEQ ID NO: 258286 - DNA, 15 bp, Homo sapiens
gaagccccatctcta

SEQ ID NO: 258287 - DNA, 15 bp, Homo sapiens
tgaagccccatctct

SEQ ID NO: 258288 - DNA, 15 bp, Homo sapiens
gtgaagccccatctc

SEQ ID NO: 258289 - DNA, 15 bp, Homo sapiens
ggtgaagccccatct

SEQ ID NO: 258290 - DNA, 15 bp, Homo sapiens
tggtgaagccccatc

SEQ ID NO: 258291 - DNA, 15 bp, Homo sapiens
atggtgaagccccat

SEQ ID NO: 258292 - DNA, 15 bp, Homo sapiens
catggtgaagcccca

SEQ ID NO: 258293 - DNA, 15 bp, Homo sapiens
acatggtgaagcccc

SEQ ID NO: 258294 - DNA, 15 bp, Homo sapiens
aacatggtgaagccc

SEQ ID NO: 258295 - DNA, 15 bp, Homo sapiens
caacatggtgaagcc

SEQ ID NO: 258296 - DNA, 15 bp, Homo sapiens
ccaacatggtgaagc

SEQ ID NO: 258297 - DNA, 15 bp, Homo sapiens
gccaacatggtgaag

SEQ ID NO: 258298 - DNA, 15 bp, Homo sapiens
aaaaccagcctggcc

SEQ ID NO: 258299 - DNA, 15 bp, Homo sapiens
gaaaaccagcctggc

SEQ ID NO: 258300 - DNA, 15 bp, Homo sapiens
tgaaaaccagcctgg

SEQ ID NO: 258301 - DNA, 15 bp, Homo sapiens
ttgaaaaccagcctg

SEQ ID NO: 258302 - DNA, 15 bp, Homo sapiens
gttgaaaaccagcct

SEQ ID NO: 258303 - DNA, 15 bp, Homo sapiens
agttgaaaaccagcc

SEQ ID NO: 258304 - DNA, 15 bp, Homo sapiens
gagttgaaaaccagc

SEQ ID NO: 258305 - DNA, 15 bp, Homo sapiens
ggagttgaaaaccag

SEQ ID NO: 258306 - DNA, 15 bp, Homo sapiens
aggagttgaaaacca

SEQ ID NO: 258307 - DNA, 15 bp, Homo sapiens
caggagttgaaaacc

SEQ ID NO: 258308 - DNA, 15 bp, Homo sapiens
tcaggagttgaaaac

SEQ ID NO: 258309 - DNA, 15 bp, Homo sapiens
gtcaggagttgaaaa

SEQ ID NO: 258310 - DNA, 15 bp, Homo sapiens
ggtcaggagttgaaa

SEQ ID NO: 258311 - DNA, 15 bp, Homo sapiens
tggatcacttgaggt

SEQ ID NO: 258312 - DNA, 15 bp, Homo sapiens
gtggatcacttgagg

SEQ ID NO: 258313 - DNA, 15 bp, Homo sapiens
cgtggatcacttgag

SEQ ID NO: 258314 - DNA, 15 bp, Homo sapiens
acgtggatcacttga

SEQ ID NO: 258315 - DNA, 15 bp, Homo sapiens
cacgtggatcacttg

SEQ ID NO: 258316 - DNA, 15 bp, Homo sapiens
gcacgtggatcactt

SEQ ID NO: 258317 - DNA, 15 bp, Homo sapiens
ggcacgtggatcact

SEQ ID NO: 258318 - DNA, 15 bp, Homo sapiens
aggcacgtggatcac

SEQ ID NO: 258319 - DNA, 15 bp, Homo sapiens
gaggcacgtggatca

SEQ ID NO: 258320 - DNA, 15 bp, Homo sapiens
agaggcacgtggatc

SEQ ID NO: 258321 - DNA, 15 bp, Homo sapiens
cagaggcacgtggat

SEQ ID NO: 258322 - DNA, 15 bp, Homo sapiens
gcagaggcacgtgga

SEQ ID NO: 258323 - DNA, 15 bp, Homo sapiens
ggcagaggcacgtgg

SEQ ID NO: 258324 - DNA, 15 bp, Homo sapiens
aggcagaggcacgtg

SEQ ID NO: 258325 - DNA, 15 bp, Homo sapiens
gaggcagaggcacgt

SEQ ID NO: 258326 - DNA, 15 bp, Homo sapiens
ggaggcagaggcacg

SEQ ID NO: 258327 - DNA, 15 bp, Homo sapiens
aggaggcagaggcac

SEQ ID NO: 258328 - DNA, 15 bp, Homo sapiens
taggaggcagaggca

SEQ ID NO: 258329 - DNA, 15 bp, Homo sapiens
ttaggaggcagaggc

SEQ ID NO: 258330 - DNA, 15 bp, Homo sapiens
tttaggaggcagagg

SEQ ID NO: 258331 - DNA, 15 bp, Homo sapiens
ctttaggaggcagag

SEQ ID NO: 258332 - DNA, 15 bp, Homo sapiens
actttaggaggcaga

SEQ ID NO: 258333 - DNA, 15 bp, Homo sapiens
cactttaggaggcag

SEQ ID NO: 258334 - DNA, 15 bp, Homo sapiens
gcactttaggaggca

SEQ ID NO: 258335 - DNA, 15 bp, Homo sapiens
agcactttaggaggc

SEQ ID NO: 258336 - DNA, 15 bp, Homo sapiens
tagcactttaggagg

SEQ ID NO: 258337 - DNA, 15 bp, Homo sapiens
ctagcactttaggag

SEQ ID NO: 258338 - DNA, 15 bp, Homo sapiens
cctagcactttagga

SEQ ID NO: 258339 - DNA, 15 bp, Homo sapiens
tcctagcactttagg

SEQ ID NO: 258340 - DNA, 15 bp, Homo sapiens
atcctagcactttag

SEQ ID NO: 258341 - DNA, 15 bp, Homo sapiens
aatcctagcacttta

SEQ ID NO: 258342 - DNA, 15 bp, Homo sapiens
taatcctagcacttt

SEQ ID NO: 258343 - DNA, 15 bp, Homo sapiens
gtaatcctagcactt

SEQ ID NO: 258344 - DNA, 15 bp, Homo sapiens
tgtaatcctagcact

SEQ ID NO: 258345 - DNA, 15 bp, Homo sapiens
ctgtaatcctagcac

SEQ ID NO: 258346 - DNA, 15 bp, Homo sapiens
cctgtaatcctagca

SEQ ID NO: 258347 - DNA, 15 bp, Homo sapiens
acctgtaatcctagc

SEQ ID NO: 258348 - DNA, 15 bp, Homo sapiens
cacctgtaatcctag

SEQ ID NO: 258349 - DNA, 15 bp, Homo sapiens
acacctgtaatccta

SEQ ID NO: 258350 - DNA, 15 bp, Homo sapiens
cacacctgtaatcct

SEQ ID NO: 258351 - DNA, 15 bp, Homo sapiens
ttcacacctgtaatc

SEQ ID NO: 258352 - DNA, 15 bp, Homo sapiens
gttcacacctgtaat

SEQ ID NO: 258353 - DNA, 15 bp, Homo sapiens
agttcacacctgtaa

SEQ ID NO: 258354 - DNA, 15 bp, Homo sapiens
tagttcacacctgta

SEQ ID NO: 258355 - DNA, 15 bp, Homo sapiens
gtagttcacacctgt

SEQ ID NO: 258356 - DNA, 15 bp, Homo sapiens
ggtagttcacacctg

SEQ ID NO: 258357 - DNA, 15 bp, Homo sapiens
tggtagttcacacct

SEQ ID NO: 258358 - DNA, 15 bp, Homo sapiens
gtggtagttcacacc

SEQ ID NO: 258359 - DNA, 15 bp, Homo sapiens
tgtggtagttcacac

SEQ ID NO: 258360 - DNA, 15 bp, Homo sapiens
gtgtggtagttcaca

SEQ ID NO: 258361 - DNA, 15 bp, Homo sapiens
ggtgtggtagttcac

SEQ ID NO: 258362 - DNA, 15 bp, Homo sapiens
gggtgtggtagttca

SEQ ID NO: 258363 - DNA, 15 bp, Homo sapiens
cgggtgtggtagttc

SEQ ID NO: 258364 - DNA, 15 bp, Homo sapiens
ccgggtgtggtagtt

SEQ ID NO: 258365 - DNA, 15 bp, Homo sapiens
gccgggtgtggtagt

SEQ ID NO: 258366 - DNA, 15 bp, Homo sapiens
ggccgggtgtggtag

SEQ ID NO: 258367 - DNA, 15 bp, Homo sapiens
gggccgggtgtggta

SEQ ID NO: 258368 - DNA, 15 bp, Homo sapiens
agggccgggtgtggt

SEQ ID NO: 258369 - DNA, 15 bp, Homo sapiens
aagggccgggtgtgg

SEQ ID NO: 258370 - DNA, 15 bp, Homo sapiens
caagggccgggtgtg

SEQ ID NO: 258371 - DNA, 15 bp, Homo sapiens
gcaagggccgggtgt

SEQ ID NO: 258372 - DNA, 15 bp, Homo sapiens
ggcaagggccgggtg

SEQ ID NO: 258373 - DNA, 15 bp, Homo sapiens
aggcaagggccgggt

SEQ ID NO: 258374 - DNA, 15 bp, Homo sapiens
aaggcaagggccggg

SEQ ID NO: 258375 - DNA, 15 bp, Homo sapiens
aaaggcaagggccgg

SEQ ID NO: 258376 - DNA, 15 bp, Homo sapiens
taaaggcaagggccg

SEQ ID NO: 258377 - DNA, 15 bp, Homo sapiens
ataaaggcaagggcc

SEQ ID NO: 258378 - DNA, 15 bp, Homo sapiens
aataaaggcaagggc

SEQ ID NO: 258379 - DNA, 15 bp, Homo sapiens
aaataaaggcaaggg

SEQ ID NO: 258380 - DNA, 15 bp, Homo sapiens
aaaataaaggcaagg

SEQ ID NO: 258381 - DNA, 15 bp, Homo sapiens
gaaaataaaggcaag

SEQ ID NO: 258382 - DNA, 15 bp, Homo sapiens
agaaaataaaggcaa

SEQ ID NO: 258383 - DNA, 15 bp, Homo sapiens
tagaaaataaaggca

SEQ ID NO: 258384 - DNA, 15 bp, Homo sapiens
atagaaaataaaggc

SEQ ID NO: 258385 - DNA, 15 bp, Homo sapiens
gatagaaaataaagg

SEQ ID NO: 258386 - DNA, 15 bp, Homo sapiens
ggatagaaaataaag

SEQ ID NO: 258387 - DNA, 15 bp, Homo sapiens
tggatagaaaataaa

SEQ ID NO: 258388 - DNA, 15 bp, Homo sapiens
ttggatagaaaataa

SEQ ID NO: 258389 - DNA, 15 bp, Homo sapiens
tttggatagaaaata

SEQ ID NO: 258390 - DNA, 15 bp, Homo sapiens
ttttggatagaaaat

SEQ ID NO: 258391 - DNA, 15 bp, Homo sapiens
attttggatagaaaa

SEQ ID NO: 258392 - DNA, 15 bp, Homo sapiens
cattttggatagaaa

SEQ ID NO: 258393 - DNA, 15 bp, Homo sapiens
acattttggatagaa

SEQ ID NO: 258394 - DNA, 15 bp, Homo sapiens
aacattttggataga

SEQ ID NO: 258395 - DNA, 15 bp, Homo sapiens
gaacattttggatag

SEQ ID NO: 258396 - DNA, 15 bp, Homo sapiens
tgaacattttggata

SEQ ID NO: 258397 - DNA, 15 bp, Homo sapiens
atgaacattttggat

SEQ ID NO: 258398 - DNA, 15 bp, Homo sapiens
aatgaacattttgga

SEQ ID NO: 258399 - DNA, 15 bp, Homo sapiens
aaatgaacattttgg

SEQ ID NO: 258400 - DNA, 15 bp, Homo sapiens
gaaatgaacattttg

SEQ ID NO: 258401 - DNA, 15 bp, Homo sapiens
agaaatgaacatttt

SEQ ID NO: 258402 - DNA, 15 bp, Homo sapiens
gagaaatgaacattt

SEQ ID NO: 258403 - DNA, 15 bp, Homo sapiens
agagaaatgaacatt

SEQ ID NO: 258404 - DNA, 15 bp, Homo sapiens
gagagaaatgaacat

SEQ ID NO: 258405 - DNA, 15 bp, Homo sapiens
agagagaaatgaaca

SEQ ID NO: 258406 - DNA, 15 bp, Homo sapiens
aagagagaaatgaac

SEQ ID NO: 258407 - DNA, 15 bp, Homo sapiens
aaagagagaaatgaa

SEQ ID NO: 258408 - DNA, 15 bp, Homo sapiens
aaaagagagaaatga

SEQ ID NO: 258409 - DNA, 15 bp, Homo sapiens
aaaaagagagaaatg

SEQ ID NO: 258410 - DNA, 15 bp, Homo sapiens
aaaaaagagagaaat

SEQ ID NO: 258411 - DNA, 15 bp, Homo sapiens
aaaaaaagagagaaa

SEQ ID NO: 258412 - DNA, 15 bp, Homo sapiens
gaaaaaaagagagaa

SEQ ID NO: 258413 - DNA, 15 bp, Homo sapiens
agaaaaaaagagaga

SEQ ID NO: 258414 - DNA, 15 bp, Homo sapiens
cagaaaaaaagagag

SEQ ID NO: 258415 - DNA, 15 bp, Homo sapiens
tcagaaaaaaagaga

SEQ ID NO: 258416 - DNA, 15 bp, Homo sapiens
ctcagaaaaaaagag

SEQ ID NO: 258417 - DNA, 15 bp, Homo sapiens
tctcagaaaaaaaga

SEQ ID NO: 258418 - DNA, 15 bp, Homo sapiens
gtctcagaaaaaaag

SEQ ID NO: 258419 - DNA, 15 bp, Homo sapiens
tgtctcagaaaaaaa

SEQ ID NO: 258420 - DNA, 15 bp, Homo sapiens
ctgtctcagaaaaaa

SEQ ID NO: 258421 - DNA, 15 bp, Homo sapiens
actgtctcagaaaaa

SEQ ID NO: 258422 - DNA, 15 bp, Homo sapiens
gactgtctcagaaaa

SEQ ID NO: 258423 - DNA, 15 bp, Homo sapiens
agactgtctcagaaa

SEQ ID NO: 258424 - DNA, 15 bp, Homo sapiens
cagactgtctcagaa

SEQ ID NO: 258425 - DNA, 15 bp, Homo sapiens
ccagactgtctcaga

SEQ ID NO: 258426 - DNA, 15 bp, Homo sapiens
accagactgtctcag

SEQ ID NO: 258427 - DNA, 15 bp, Homo sapiens
aaccagactgtctca

SEQ ID NO: 258428 - DNA, 15 bp, Homo sapiens
gaaccagactgtctc

SEQ ID NO: 258429 - DNA, 15 bp, Homo sapiens
agaaccagactgtct

SEQ ID NO: 258430 - DNA, 15 bp, Homo sapiens
cagaaccagactgtc

SEQ ID NO: 258431 - DNA, 15 bp, Homo sapiens
acagaaccagactgt

SEQ ID NO: 258432 - DNA, 15 bp, Homo sapiens
aacagaaccagactg

SEQ ID NO: 258433 - DNA, 15 bp, Homo sapiens
caacagaaccagact

SEQ ID NO: 258434 - DNA, 15 bp, Homo sapiens
acaacagaaccagac

SEQ ID NO: 258435 - DNA, 15 bp, Homo sapiens
gacaacagaaccaga

SEQ ID NO: 258436 - DNA, 15 bp, Homo sapiens
tgacaacagaaccag

SEQ ID NO: 258437 - DNA, 15 bp, Homo sapiens
gtgacaacagaacca

SEQ ID NO: 258438 - DNA, 15 bp, Homo sapiens
cgtgacaacagaacc

SEQ ID NO: 258439 - DNA, 15 bp, Homo sapiens
gcgtgacaacagaac

SEQ ID NO: 258440 - DNA, 15 bp, Homo sapiens
tgcgtgacaacagaa

SEQ ID NO: 258441 - DNA, 15 bp, Homo sapiens
ctgcgtgacaacaga

SEQ ID NO: 258442 - DNA, 15 bp, Homo sapiens
gctgcgtgacaacag

SEQ ID NO: 258443 - DNA, 15 bp, Homo sapiens
agctgcgtgacaaca

SEQ ID NO: 258444 - DNA, 15 bp, Homo sapiens
cagctgcgtgacaac

SEQ ID NO: 258445 - DNA, 15 bp, Homo sapiens
ccagctgcgtgacaa

SEQ ID NO: 258446 - DNA, 15 bp, Homo sapiens
tccagctgcgtgaca

SEQ ID NO: 258447 - DNA, 15 bp, Homo sapiens
ctccagctgcgtgac

SEQ ID NO: 258448 - DNA, 15 bp, Homo sapiens
actccagctgcgtga

SEQ ID NO: 258449 - DNA, 15 bp, Homo sapiens
cactccagctgcgtg

SEQ ID NO: 258450 - DNA, 15 bp, Homo sapiens
gcactccagctgcgt

SEQ ID NO: 258451 - DNA, 15 bp, Homo sapiens
tgcactccagctgcg

SEQ ID NO: 258452 - DNA, 15 bp, Homo sapiens
ctgcactccagctgc

SEQ ID NO: 258453 - DNA, 15 bp, Homo sapiens
actgcactccagctg

SEQ ID NO: 258454 - DNA, 15 bp, Homo sapiens
cactgcactccagct

SEQ ID NO: 258455 - DNA, 15 bp, Homo sapiens
tcactgcactccagc

SEQ ID NO: 258456 - DNA, 15 bp, Homo sapiens
atcactgcactccag

SEQ ID NO: 258457 - DNA, 15 bp, Homo sapiens
catcactgcactcca

SEQ ID NO: 258458 - DNA, 15 bp, Homo sapiens
gcatcactgcactcc

SEQ ID NO: 258459 - DNA, 15 bp, Homo sapiens
tgcatcactgcactc

SEQ ID NO: 258460 - DNA, 15 bp, Homo sapiens
ttgcatcactgcact

SEQ ID NO: 258461 - DNA, 15 bp, Homo sapiens
attgcatcactgcac

SEQ ID NO: 258462 - DNA, 15 bp, Homo sapiens
gattgcatcactgca

SEQ ID NO: 258463 - DNA, 15 bp, Homo sapiens
agattgcatcactgc

SEQ ID NO: 258464 - DNA, 15 bp, Homo sapiens
aagattgcatcactg

SEQ ID NO: 258465 - DNA, 15 bp, Homo sapiens
caagattgcatcact

SEQ ID NO: 258466 - DNA, 15 bp, Homo sapiens
ccaagattgcatcac

SEQ ID NO: 258467 - DNA, 15 bp, Homo sapiens
gccaagattgcatca

SEQ ID NO: 258468 - DNA, 15 bp, Homo sapiens
agccaagattgcatc

SEQ ID NO: 258469 - DNA, 15 bp, Homo sapiens
gagccaagattgcat

SEQ ID NO: 258470 - DNA, 15 bp, Homo sapiens
tgagccaagattgca

SEQ ID NO: 258471 - DNA, 15 bp, Homo sapiens
gtgagccaagattgc

SEQ ID NO: 258472 - DNA, 15 bp, Homo sapiens
agtgagccaagattg

SEQ ID NO: 258473 - DNA, 15 bp, Homo sapiens
cagtgagccaagatt

SEQ ID NO: 258474 - DNA, 15 bp, Homo sapiens
ctgcagtgagccaag

SEQ ID NO: 258475 - DNA, 15 bp, Homo sapiens
gctgcagtgagccaa

SEQ ID NO: 258476 - DNA, 15 bp, Homo sapiens
ggctgcagtgagcca

SEQ ID NO: 258477 - DNA, 15 bp, Homo sapiens
aggctgcagtgagcc

SEQ ID NO: 258478 - DNA, 15 bp, Homo sapiens
aaggctgcagtgagc

SEQ ID NO: 258479 - DNA, 15 bp, Homo sapiens
gaaggctgcagtgag

SEQ ID NO: 258480 - DNA, 15 bp, Homo sapiens
tgaaggctgcagtga

SEQ ID NO: 258481 - DNA, 15 bp, Homo sapiens
gtgaaggctgcagtg

SEQ ID NO: 258482 - DNA, 15 bp, Homo sapiens
agtgaaggctgcagt

SEQ ID NO: 258483 - DNA, 15 bp, Homo sapiens
aagtgaaggctgcag

SEQ ID NO: 258484 - DNA, 15 bp, Homo sapiens
gaagtgaaggctgca

SEQ ID NO: 258485 - DNA, 15 bp, Homo sapiens
ggaagtgaaggctgc

SEQ ID NO: 258486 - DNA, 15 bp, Homo sapiens
gggaagtgaaggctg

SEQ ID NO: 258487 - DNA, 15 bp, Homo sapiens
tgggaagtgaaggct

SEQ ID NO: 258488 - DNA, 15 bp, Homo sapiens
ctgggaagtgaaggc

SEQ ID NO: 258489 - DNA, 15 bp, Homo sapiens
cctgggaagtgaagg

SEQ ID NO: 258490 - DNA, 15 bp, Homo sapiens
acctgggaagtgaag

SEQ ID NO: 258491 - DNA, 15 bp, Homo sapiens
cacctgggaagtgaa

SEQ ID NO: 258492 - DNA, 15 bp, Homo sapiens
gcacctgggaagtga

SEQ ID NO: 258493 - DNA, 15 bp, Homo sapiens
tgcacctgggaagtg

SEQ ID NO: 258494 - DNA, 15 bp, Homo sapiens
ttgcacctgggaagt

SEQ ID NO: 258495 - DNA, 15 bp, Homo sapiens
cttgcacctgggaag

SEQ ID NO: 258496 - DNA, 15 bp, Homo sapiens
gcttgcacctgggaa

SEQ ID NO: 258497 - DNA, 15 bp, Homo sapiens
cgcttgcacctggga

SEQ ID NO: 258498 - DNA, 15 bp, Homo sapiens
tcgcttgcacctggg

SEQ ID NO: 258499 - DNA, 15 bp, Homo sapiens
atcgcttgcacctgg

SEQ ID NO: 258500 - DNA, 15 bp, Homo sapiens
gatcgcttgcacctg

SEQ ID NO: 258501 - DNA, 15 bp, Homo sapiens
ggatcgcttgcacct

SEQ ID NO: 258502 - DNA, 15 bp, Homo sapiens
aggatcgcttgcacc

SEQ ID NO: 258503 - DNA, 15 bp, Homo sapiens
gaggatcgcttgcac

SEQ ID NO: 258504 - DNA, 15 bp, Homo sapiens
ggaggatcgcttgca

SEQ ID NO: 258505 - DNA, 15 bp, Homo sapiens
gggaggatcgcttgc

SEQ ID NO: 258506 - DNA, 15 bp, Homo sapiens
cgggaggatcgcttg

SEQ ID NO: 258507 - DNA, 15 bp, Homo sapiens
acgggaggatcgctt

SEQ ID NO: 258508 - DNA, 15 bp, Homo sapiens
gacgggaggatcgct

SEQ ID NO: 258509 - DNA, 15 bp, Homo sapiens
agacgggaggatcgc

SEQ ID NO: 258510 - DNA, 15 bp, Homo sapiens
gagacgggaggatcg

SEQ ID NO: 258511 - DNA, 15 bp, Homo sapiens
tgagacgggaggatc

SEQ ID NO: 258512 - DNA, 15 bp, Homo sapiens
ctgagacgggaggat

SEQ ID NO: 258513 - DNA, 15 bp, Homo sapiens
gctgagacgggagga

SEQ ID NO: 258514 - DNA, 15 bp, Homo sapiens
ggctgagacgggagg

SEQ ID NO: 258515 - DNA, 15 bp, Homo sapiens
aggctgagacgggag

SEQ ID NO: 258516 - DNA, 15 bp, Homo sapiens
gaggctgagacggga

SEQ ID NO: 258517 - DNA, 15 bp, Homo sapiens
ggaggctgagacggg

SEQ ID NO: 258518 - DNA, 15 bp, Homo sapiens
aggaggctgagacgg

SEQ ID NO: 258519 - DNA, 15 bp, Homo sapiens
caggaggctgagacg

SEQ ID NO: 258520 - DNA, 15 bp, Homo sapiens
tcaggaggctgagac

SEQ ID NO: 258521 - DNA, 15 bp, Homo sapiens
ctcaggaggctgaga

SEQ ID NO: 258522 - DNA, 15 bp, Homo sapiens
tctcaggaggctgag

SEQ ID NO: 258523 - DNA, 15 bp, Homo sapiens
ttctcaggaggctga

SEQ ID NO: 258524 - DNA, 15 bp, Homo sapiens
cttctcaggaggctg

SEQ ID NO: 258525 - DNA, 15 bp, Homo sapiens
gcttctcaggaggct

SEQ ID NO: 258526 - DNA, 15 bp, Homo sapiens
agcttctcaggaggc

SEQ ID NO: 258527 - DNA, 15 bp, Homo sapiens
cagcttctcaggagg

SEQ ID NO: 258528 - DNA, 15 bp, Homo sapiens
ccagcttctcaggag

SEQ ID NO: 258529 - DNA, 15 bp, Homo sapiens
cccagcttctcagga

SEQ ID NO: 258530 - DNA, 15 bp, Homo sapiens
tcccagcttctcagg

SEQ ID NO: 258531 - DNA, 15 bp, Homo sapiens
gtcccagcttctcag

SEQ ID NO: 258532 - DNA, 15 bp, Homo sapiens
ggtcccagcttctca

SEQ ID NO: 258533 - DNA, 15 bp, Homo sapiens
tggtcccagcttctc

SEQ ID NO: 258534 - DNA, 15 bp, Homo sapiens
gtggtcccagcttct

SEQ ID NO: 258535 - DNA, 15 bp, Homo sapiens
tgtggtcccagcttc

SEQ ID NO: 258536 - DNA, 15 bp, Homo sapiens
ctgtggtcccagctt

SEQ ID NO: 258537 - DNA, 15 bp, Homo sapiens
tctgtggtcccagct

SEQ ID NO: 258538 - DNA, 15 bp, Homo sapiens
gtctgtggtcccagc

SEQ ID NO: 258539 - DNA, 15 bp, Homo sapiens
cgtctgtggtcccag

SEQ ID NO: 258540 - DNA, 15 bp, Homo sapiens
acgtctgtggtccca

SEQ ID NO: 258541 - DNA, 15 bp, Homo sapiens
cacgtctgtggtccc

SEQ ID NO: 258542 - DNA, 15 bp, Homo sapiens
gcacgtctgtggtcc

SEQ ID NO: 258543 - DNA, 15 bp, Homo sapiens
tgcacgtctgtggtc

SEQ ID NO: 258544 - DNA, 15 bp, Homo sapiens
ctgcacgtctgtggt

SEQ ID NO: 258545 - DNA, 15 bp, Homo sapiens
gctgcacgtctgtgg

SEQ ID NO: 258546 - DNA, 15 bp, Homo sapiens
tgctgcacgtctgtg

SEQ ID NO: 258547 - DNA, 15 bp, Homo sapiens
atgctgcacgtctgt

SEQ ID NO: 258548 - DNA, 15 bp, Homo sapiens
aatgctgcacgtctg

SEQ ID NO: 258549 - DNA, 15 bp, Homo sapiens
taatgctgcacgtct

SEQ ID NO: 258550 - DNA, 15 bp, Homo sapiens
gtaatgctgcacgtc

SEQ ID NO: 258551 - DNA, 15 bp, Homo sapiens
tgtaatgctgcacgt

SEQ ID NO: 258552 - DNA, 15 bp, Homo sapiens
gtgtaatgctgcacg

SEQ ID NO: 258553 - DNA, 15 bp, Homo sapiens
ggtgtaatgctgcac

SEQ ID NO: 258554 - DNA, 15 bp, Homo sapiens
gggtgtaatgctgca

SEQ ID NO: 258555 - DNA, 15 bp, Homo sapiens
cgggtgtaatgctgc

SEQ ID NO: 258556 - DNA, 15 bp, Homo sapiens
ccgggtgtaatgctg

SEQ ID NO: 258557 - DNA, 15 bp, Homo sapiens
gccgggtgtaatgct

SEQ ID NO: 258558 - DNA, 15 bp, Homo sapiens
agccgggtgtaatgc

SEQ ID NO: 258559 - DNA, 15 bp, Homo sapiens
tagccgggtgtaatg

SEQ ID NO: 258560 - DNA, 15 bp, Homo sapiens
ttagccgggtgtaat

SEQ ID NO: 258561 - DNA, 15 bp, Homo sapiens
attagccgggtgtaa

SEQ ID NO: 258562 - DNA, 15 bp, Homo sapiens
aattagccgggtgta

SEQ ID NO: 258563 - DNA, 15 bp, Homo sapiens
aaattagccgggtgt

SEQ ID NO: 258564 - DNA, 15 bp, Homo sapiens
aaaattagccgggtg

SEQ ID NO: 258565 - DNA, 15 bp, Homo sapiens
aaaaattagccgggt

SEQ ID NO: 258566 - DNA, 15 bp, Homo sapiens
aaaaaattagccggg

SEQ ID NO: 258567 - DNA, 15 bp, Homo sapiens
caaaaaattagccgg

SEQ ID NO: 258568 - DNA, 15 bp, Homo sapiens
acaaaaaattagccg

SEQ ID NO: 258569 - DNA, 15 bp, Homo sapiens
tacaaaaaattagcc

SEQ ID NO: 258570 - DNA, 15 bp, Homo sapiens
atacaaaaaattagc

SEQ ID NO: 258571 - DNA, 15 bp, Homo sapiens
aatacaaaaaattag

SEQ ID NO: 258572 - DNA, 15 bp, Homo sapiens
aaatacaaaaaatta

SEQ ID NO: 258573 - DNA, 15 bp, Homo sapiens
aaaatacaaaaaatt

SEQ ID NO: 258574 - DNA, 15 bp, Homo sapiens
aaaaatacaaaaaat

SEQ ID NO: 258575 - DNA, 15 bp, Homo sapiens
caaaaatacaaaaaa

SEQ ID NO: 258576 - DNA, 15 bp, Homo sapiens
acaaaaatacaaaaa

SEQ ID NO: 258577 - DNA, 15 bp, Homo sapiens
tacaaaaatacaaaa

SEQ ID NO: 258578 - DNA, 15 bp, Homo sapiens
ctacaaaaatacaaa

SEQ ID NO: 258579 - DNA, 15 bp, Homo sapiens
tctacaaaaatacaa

SEQ ID NO: 258580 - DNA, 15 bp, Homo sapiens
gtctacaaaaataca

SEQ ID NO: 258581 - DNA, 15 bp, Homo sapiens
tgtctacaaaaatac

SEQ ID NO: 258582 - DNA, 15 bp, Homo sapiens
gtgtctacaaaaata

SEQ ID NO: 258583 - DNA, 15 bp, Homo sapiens
cgtgtctacaaaaat

SEQ ID NO: 258584 - DNA, 15 bp, Homo sapiens
ccgtgtctacaaaaa

SEQ ID NO: 258585 - DNA, 15 bp, Homo sapiens
accgtgtctacaaaa

SEQ ID NO: 258586 - DNA, 15 bp, Homo sapiens
caccgtgtctacaaa

SEQ ID NO: 258587 - DNA, 15 bp, Homo sapiens
acaccgtgtctacaa

SEQ ID NO: 258588 - DNA, 15 bp, Homo sapiens
aacaccgtgtctaca

SEQ ID NO: 258589 - DNA, 15 bp, Homo sapiens
aaacaccgtgtctac

SEQ ID NO: 258590 - DNA, 15 bp, Homo sapiens
gaaacaccgtgtcta

SEQ ID NO: 258591 - DNA, 15 bp, Homo sapiens
ggaaacaccgtgtct

SEQ ID NO: 258592 - DNA, 15 bp, Homo sapiens
aggaaacaccgtgtc

SEQ ID NO: 258593 - DNA, 15 bp, Homo sapiens
gaggaaacaccgtgt

SEQ ID NO: 258594 - DNA, 15 bp, Homo sapiens
tgaggaaacaccgtg

SEQ ID NO: 258595 - DNA, 15 bp, Homo sapiens
atgaggaaacaccgt

SEQ ID NO: 258596 - DNA, 15 bp, Homo sapiens
catgaggaaacaccg

SEQ ID NO: 258597 - DNA, 15 bp, Homo sapiens
acatgaggaaacacc

SEQ ID NO: 258598 - DNA, 15 bp, Homo sapiens
aacatgaggaaacac

SEQ ID NO: 258599 - DNA, 15 bp, Homo sapiens
caacatgaggaaaca

SEQ ID NO: 258600 - DNA, 15 bp, Homo sapiens
ccaacatgaggaaac

SEQ ID NO: 258601 - DNA, 15 bp, Homo sapiens
gccaacatgaggaaa

SEQ ID NO: 258602 - DNA, 15 bp, Homo sapiens
agccaacatgaggaa

SEQ ID NO: 258603 - DNA, 15 bp, Homo sapiens
tagccaacatgagga

SEQ ID NO: 258604 - DNA, 15 bp, Homo sapiens
ctagccaacatgagg

SEQ ID NO: 258605 - DNA, 15 bp, Homo sapiens
gctagccaacatgag

SEQ ID NO: 258606 - DNA, 15 bp, Homo sapiens
ggctagccaacatga

SEQ ID NO: 258607 - DNA, 15 bp, Homo sapiens
aggctagccaacatg

SEQ ID NO: 258608 - DNA, 15 bp, Homo sapiens
caggctagccaacat

SEQ ID NO: 258609 - DNA, 15 bp, Homo sapiens
acaggctagccaaca

SEQ ID NO: 258610 - DNA, 15 bp, Homo sapiens
tacaggctagccaac

SEQ ID NO: 258611 - DNA, 15 bp, Homo sapiens
ctacaggctagccaa

SEQ ID NO: 258612 - DNA, 15 bp, Homo sapiens
gctacaggctagcca

SEQ ID NO: 258613 - DNA, 15 bp, Homo sapiens
cgctacaggctagcc

SEQ ID NO: 258614 - DNA, 15 bp, Homo sapiens
tcgctacaggctagc

SEQ ID NO: 258615 - DNA, 15 bp, Homo sapiens
ttcgctacaggctag

SEQ ID NO: 258616 - DNA, 15 bp, Homo sapiens
gttcgctacaggcta

SEQ ID NO: 258617 - DNA, 15 bp, Homo sapiens
agttcgctacaggct

SEQ ID NO: 258618 - DNA, 15 bp, Homo sapiens
gagttcgctacaggc

SEQ ID NO: 258619 - DNA, 15 bp, Homo sapiens
ggagttcgctacagg

SEQ ID NO: 258620 - DNA, 15 bp, Homo sapiens
aggagttcgctacag

SEQ ID NO: 258621 - DNA, 15 bp, Homo sapiens
caggagttcgctaca

SEQ ID NO: 258622 - DNA, 15 bp, Homo sapiens
ccaggagttcgctac

SEQ ID NO: 258623 - DNA, 15 bp, Homo sapiens
cccaggagttcgcta

SEQ ID NO: 258624 - DNA, 15 bp, Homo sapiens
gcccaggagttcgct

SEQ ID NO: 258625 - DNA, 15 bp, Homo sapiens
agcccaggagttcgc

SEQ ID NO: 258626 - DNA, 15 bp, Homo sapiens
gagcccaggagttcg

SEQ ID NO: 258627 - DNA, 15 bp, Homo sapiens
tgagcccaggagttc

SEQ ID NO: 258628 - DNA, 15 bp, Homo sapiens
ttgagcccaggagtt

SEQ ID NO: 258629 - DNA, 15 bp, Homo sapiens
cttgagcccaggagt

SEQ ID NO: 258630 - DNA, 15 bp, Homo sapiens
gcttgagcccaggag

SEQ ID NO: 258631 - DNA, 15 bp, Homo sapiens
tgcttgagcccagga

SEQ ID NO: 258632 - DNA, 15 bp, Homo sapiens
ttgcttgagcccagg

SEQ ID NO: 258633 - DNA, 15 bp, Homo sapiens
attgcttgagcccag

SEQ ID NO: 258634 - DNA, 15 bp, Homo sapiens
gattgcttgagccca

SEQ ID NO: 258635 - DNA, 15 bp, Homo sapiens
agattgcttgagccc

SEQ ID NO: 258636 - DNA, 15 bp, Homo sapiens
cagattgcttgagcc

SEQ ID NO: 258637 - DNA, 15 bp, Homo sapiens
gcagattgcttgagc

SEQ ID NO: 258638 - DNA, 15 bp, Homo sapiens
ggcagattgcttgag

SEQ ID NO: 258639 - DNA, 15 bp, Homo sapiens
gggcagattgcttga

SEQ ID NO: 258640 - DNA, 15 bp, Homo sapiens
cgggcagattgcttg

SEQ ID NO: 258641 - DNA, 15 bp, Homo sapiens
gcgggcagattgctt

SEQ ID NO: 258642 - DNA, 15 bp, Homo sapiens
ggcgggcagattgct

SEQ ID NO: 258643 - DNA, 15 bp, Homo sapiens
aggcgggcagattgc

SEQ ID NO: 258644 - DNA, 15 bp, Homo sapiens
aaggcgggcagattg

SEQ ID NO: 258645 - DNA, 15 bp, Homo sapiens
caaggcgggcagatt

SEQ ID NO: 258646 - DNA, 15 bp, Homo sapiens
ccaaggcgggcagat

SEQ ID NO: 258647 - DNA, 15 bp, Homo sapiens
gccaaggcgggcaga

SEQ ID NO: 258648 - DNA, 15 bp, Homo sapiens
ggccaaggcgggcag

SEQ ID NO: 258649 - DNA, 15 bp, Homo sapiens
aggccaaggcgggca

SEQ ID NO: 258650 - DNA, 15 bp, Homo sapiens
aaggccaaggcgggc

SEQ ID NO: 258651 - DNA, 15 bp, Homo sapiens
gaaggccaaggcggg

SEQ ID NO: 258652 - DNA, 15 bp, Homo sapiens
ggaaggccaaggcgg

SEQ ID NO: 258653 - DNA, 15 bp, Homo sapiens
tggaaggccaaggcg

SEQ ID NO: 258654 - DNA, 15 bp, Homo sapiens
ttggaaggccaaggc

SEQ ID NO: 258655 - DNA, 15 bp, Homo sapiens
tttggaaggccaagg

SEQ ID NO: 258656 - DNA, 15 bp, Homo sapiens
ctttggaaggccaag

SEQ ID NO: 258657 - DNA, 15 bp, Homo sapiens
actttggaaggccaa

SEQ ID NO: 258658 - DNA, 15 bp, Homo sapiens
cactttggaaggcca

SEQ ID NO: 258659 - DNA, 15 bp, Homo sapiens
acactttggaaggcc

SEQ ID NO: 258660 - DNA, 15 bp, Homo sapiens
aacactttggaaggc

SEQ ID NO: 258661 - DNA, 15 bp, Homo sapiens
caacactttggaagg

SEQ ID NO: 258662 - DNA, 15 bp, Homo sapiens
ccaacactttggaag

SEQ ID NO: 258663 - DNA, 15 bp, Homo sapiens
cccaacactttggaa

SEQ ID NO: 258664 - DNA, 15 bp, Homo sapiens
tcccaacactttgga

SEQ ID NO: 258665 - DNA, 15 bp, Homo sapiens
tctcatgcctgtaat

SEQ ID NO: 258666 - DNA, 15 bp, Homo sapiens
atctcatgcctgtaa

SEQ ID NO: 258667 - DNA, 15 bp, Homo sapiens
tatctcatgcctgta

SEQ ID NO: 258668 - DNA, 15 bp, Homo sapiens
atatctcatgcctgt

SEQ ID NO: 258669 - DNA, 15 bp, Homo sapiens
catatctcatgcctg

SEQ ID NO: 258670 - DNA, 15 bp, Homo sapiens
ccatatctcatgcct

SEQ ID NO: 258671 - DNA, 15 bp, Homo sapiens
gccatatctcatgcc

SEQ ID NO: 258672 - DNA, 15 bp, Homo sapiens
tgccatatctcatgc

SEQ ID NO: 258673 - DNA, 15 bp, Homo sapiens
gtgccatatctcatg

SEQ ID NO: 258674 - DNA, 15 bp, Homo sapiens
ggtgccatatctcat

SEQ ID NO: 258675 - DNA, 15 bp, Homo sapiens
aggtgccatatctca

SEQ ID NO: 258676 - DNA, 15 bp, Homo sapiens
caggtgccatatctc

SEQ ID NO: 258677 - DNA, 15 bp, Homo sapiens
ccaggtgccatatct

SEQ ID NO: 258678 - DNA, 15 bp, Homo sapiens
gccaggtgccatatc

SEQ ID NO: 258679 - DNA, 15 bp, Homo sapiens
ggccaggtgccatat

SEQ ID NO: 258680 - DNA, 15 bp, Homo sapiens
tggccaggtgccata

SEQ ID NO: 258681 - DNA, 15 bp, Homo sapiens
ctggccaggtgccat

SEQ ID NO: 258682 - DNA, 15 bp, Homo sapiens
cctggccaggtgcca

SEQ ID NO: 258683 - DNA, 15 bp, Homo sapiens
tcctggccaggtgcc

SEQ ID NO: 258684 - DNA, 15 bp, Homo sapiens
ttcctggccaggtgc

SEQ ID NO: 258685 - DNA, 15 bp, Homo sapiens
attcctggccaggtg

SEQ ID NO: 258686 - DNA, 15 bp, Homo sapiens
tattcctggccaggt

SEQ ID NO: 258687 - DNA, 15 bp, Homo sapiens
ttattcctggccagg

SEQ ID NO: 258688 - DNA, 15 bp, Homo sapiens
tttattcctggccag

SEQ ID NO: 258689 - DNA, 15 bp, Homo sapiens
ttttattcctggcca

SEQ ID NO: 258690 - DNA, 15 bp, Homo sapiens
cttttattcctggcc

SEQ ID NO: 258691 - DNA, 15 bp, Homo sapiens
acttttattcctggc

SEQ ID NO: 258692 - DNA, 15 bp, Homo sapiens
aacttttattcctgg

SEQ ID NO: 258693 - DNA, 15 bp, Homo sapiens
taacttttattcctg

SEQ ID NO: 258694 - DNA, 15 bp, Homo sapiens
ctaacttttattcct

SEQ ID NO: 258695 - DNA, 15 bp, Homo sapiens
gctaacttttattcc

SEQ ID NO: 258696 - DNA, 15 bp, Homo sapiens
tgctaacttttattc

SEQ ID NO: 258697 - DNA, 15 bp, Homo sapiens
ttgctaacttttatt

SEQ ID NO: 258698 - DNA, 15 bp, Homo sapiens
attgctaacttttat

SEQ ID NO: 258699 - DNA, 15 bp, Homo sapiens
tattgctaactttta

SEQ ID NO: 258700 - DNA, 15 bp, Homo sapiens
atattgctaactttt

SEQ ID NO: 258701 - DNA, 15 bp, Homo sapiens
tatattgctaacttt

SEQ ID NO: 258702 - DNA, 15 bp, Homo sapiens
gtatattgctaactt

SEQ ID NO: 258703 - DNA, 15 bp, Homo sapiens
agtatattgctaact

SEQ ID NO: 258704 - DNA, 15 bp, Homo sapiens
aagtatattgctaac

SEQ ID NO: 258705 - DNA, 15 bp, Homo sapiens
aaagtatattgctaa

SEQ ID NO: 258706 - DNA, 15 bp, Homo sapiens
caaagtatattgcta

SEQ ID NO: 258707 - DNA, 15 bp, Homo sapiens
tcaaagtatattgct

SEQ ID NO: 258708 - DNA, 15 bp, Homo sapiens
atcaaagtatattgc

SEQ ID NO: 258709 - DNA, 15 bp, Homo sapiens
aatcaaagtatattg

SEQ ID NO: 258710 - DNA, 15 bp, Homo sapiens
gaatcaaagtatatt

SEQ ID NO: 258711 - DNA, 15 bp, Homo sapiens
tgaatcaaagtatat

SEQ ID NO: 258712 - DNA, 15 bp, Homo sapiens
ttgaatcaaagtata

SEQ ID NO: 258713 - DNA, 15 bp, Homo sapiens
tttgaatcaaagtat

SEQ ID NO: 258714 - DNA, 15 bp, Homo sapiens
ctttgaatcaaagta

SEQ ID NO: 258715 - DNA, 15 bp, Homo sapiens
actttgaatcaaagt

SEQ ID NO: 258716 - DNA, 15 bp, Homo sapiens
tactttgaatcaaag

SEQ ID NO: 258717 - DNA, 15 bp, Homo sapiens
gtactttgaatcaaa

SEQ ID NO: 258718 - DNA, 15 bp, Homo sapiens
ggtactttgaatcaa

SEQ ID NO: 258719 - DNA, 15 bp, Homo sapiens
aggtactttgaatca

SEQ ID NO: 258720 - DNA, 15 bp, Homo sapiens
gaggtactttgaatc

SEQ ID NO: 258721 - DNA, 15 bp, Homo sapiens
agaggtactttgaat

SEQ ID NO: 258722 - DNA, 15 bp, Homo sapiens
cagaggtactttgaa

SEQ ID NO: 258723 - DNA, 15 bp, Homo sapiens
acagaggtactttga

SEQ ID NO: 258724 - DNA, 15 bp, Homo sapiens
tacagaggtactttg

SEQ ID NO: 258725 - DNA, 15 bp, Homo sapiens
atacagaggtacttt

SEQ ID NO: 258726 - DNA, 15 bp, Homo sapiens
aatacagaggtactt

SEQ ID NO: 258727 - DNA, 15 bp, Homo sapiens
taatacagaggtact

SEQ ID NO: 258728 - DNA, 15 bp, Homo sapiens
ataatacagaggtac

SEQ ID NO: 258729 - DNA, 15 bp, Homo sapiens
cataatacagaggta

SEQ ID NO: 258730 - DNA, 15 bp, Homo sapiens
tcataatacagaggt

SEQ ID NO: 258731 - DNA, 15 bp, Homo sapiens
ttcataatacagagg

SEQ ID NO: 258732 - DNA, 15 bp, Homo sapiens
attcataatacagag

SEQ ID NO: 258733 - DNA, 15 bp, Homo sapiens
tattcataatacaga

SEQ ID NO: 258734 - DNA, 15 bp, Homo sapiens
atattcataatacag

SEQ ID NO: 258735 - DNA, 15 bp, Homo sapiens
aatattcataataca

SEQ ID NO: 258736 - DNA, 15 bp, Homo sapiens
aaatattcataatac

SEQ ID NO: 258737 - DNA, 15 bp, Homo sapiens
aaaatattcataata

SEQ ID NO: 258738 - DNA, 15 bp, Homo sapiens
taaaatattcataat

SEQ ID NO: 258739 - DNA, 15 bp, Homo sapiens
gtaaaatattcataa

SEQ ID NO: 258740 - DNA, 15 bp, Homo sapiens
tgtaaaatattcata

SEQ ID NO: 258741 - DNA, 15 bp, Homo sapiens
ttgtaaaatattcat

SEQ ID NO: 258742 - DNA, 15 bp, Homo sapiens
attgtaaaatattca

SEQ ID NO: 258743 - DNA, 15 bp, Homo sapiens
aattgtaaaatattc

SEQ ID NO: 258744 - DNA, 15 bp, Homo sapiens
aaattgtaaaatatt

SEQ ID NO: 258745 - DNA, 15 bp, Homo sapiens
gaaattgtaaaatat

SEQ ID NO: 258746 - DNA, 15 bp, Homo sapiens
agaaattgtaaaata

SEQ ID NO: 258747 - DNA, 15 bp, Homo sapiens
tagaaattgtaaaat

SEQ ID NO: 258748 - DNA, 15 bp, Homo sapiens
atagaaattgtaaaa

SEQ ID NO: 258749 - DNA, 15 bp, Homo sapiens
gatagaaattgtaaa

SEQ ID NO: 258750 - DNA, 15 bp, Homo sapiens
tgatagaaattgtaa

SEQ ID NO: 258751 - DNA, 15 bp, Homo sapiens
atgatagaaattgta

SEQ ID NO: 258752 - DNA, 15 bp, Homo sapiens
aatgatagaaattgt

SEQ ID NO: 258753 - DNA, 15 bp, Homo sapiens
aaatgatagaaattg

SEQ ID NO: 258754 - DNA, 15 bp, Homo sapiens
aaaatgatagaaatt

SEQ ID NO: 258755 - DNA, 15 bp, Homo sapiens
aaaaatgatagaaat

SEQ ID NO: 258756 - DNA, 15 bp, Homo sapiens
aaaaaatgatagaaa

SEQ ID NO: 258757 - DNA, 15 bp, Homo sapiens
gaaaaaatgatagaa

SEQ ID NO: 258758 - DNA, 15 bp, Homo sapiens
ggaaaaaatgataga

SEQ ID NO: 258759 - DNA, 15 bp, Homo sapiens
aggaaaaaatgatag

SEQ ID NO: 258760 - DNA, 15 bp, Homo sapiens
caggaaaaaatgata

SEQ ID NO: 258761 - DNA, 15 bp, Homo sapiens
gcaggaaaaaatgat

SEQ ID NO: 258762 - DNA, 15 bp, Homo sapiens
tgcaggaaaaaatga

SEQ ID NO: 258763 - DNA, 15 bp, Homo sapiens
ctgcaggaaaaaatg

SEQ ID NO: 258764 - DNA, 15 bp, Homo sapiens
cctgcaggaaaaaat

SEQ ID NO: 258765 - DNA, 15 bp, Homo sapiens
acctgcaggaaaaaa

SEQ ID NO: 258766 - DNA, 15 bp, Homo sapiens
cacctgcaggaaaaa

SEQ ID NO: 258767 - DNA, 15 bp, Homo sapiens
tcacctgcaggaaaa

SEQ ID NO: 258768 - DNA, 15 bp, Homo sapiens
ttcacctgcaggaaa

SEQ ID NO: 258769 - DNA, 15 bp, Homo sapiens
cttcacctgcaggaa

SEQ ID NO: 258770 - DNA, 15 bp, Homo sapiens
tcttcacctgcagga

SEQ ID NO: 258771 - DNA, 15 bp, Homo sapiens
gtcttcacctgcagg

SEQ ID NO: 258772 - DNA, 15 bp, Homo sapiens
ggtcttcacctgcag

SEQ ID NO: 258773 - DNA, 15 bp, Homo sapiens
aggtcttcacctgca

SEQ ID NO: 258774 - DNA, 15 bp, Homo sapiens
caggtcttcacctgc

SEQ ID NO: 258775 - DNA, 15 bp, Homo sapiens
ccaggtcttcacctg

SEQ ID NO: 258776 - DNA, 15 bp, Homo sapiens
accaggtcttcacct

SEQ ID NO: 258777 - DNA, 15 bp, Homo sapiens
aaccaggtcttcacc

SEQ ID NO: 258778 - DNA, 15 bp, Homo sapiens
gaaccaggtcttcac

SEQ ID NO: 258779 - DNA, 15 bp, Homo sapiens
ggaaccaggtcttca

SEQ ID NO: 258780 - DNA, 15 bp, Homo sapiens
tggaaccaggtcttc

SEQ ID NO: 258781 - DNA, 15 bp, Homo sapiens
ctggaaccaggtctt

SEQ ID NO: 258782 - DNA, 15 bp, Homo sapiens
tctggaaccaggtct

SEQ ID NO: 258783 - DNA, 15 bp, Homo sapiens
ttctggaaccaggtc

SEQ ID NO: 258784 - DNA, 15 bp, Homo sapiens
gttctggaaccaggt

SEQ ID NO: 258785 - DNA, 15 bp, Homo sapiens
ggttctggaaccagg

SEQ ID NO: 258786 - DNA, 15 bp, Homo sapiens
tggttctggaaccag

SEQ ID NO: 258787 - DNA, 15 bp, Homo sapiens
ctggttctggaacca

SEQ ID NO: 258788 - DNA, 15 bp, Homo sapiens
tctggttctggaacc

SEQ ID NO: 258789 - DNA, 15 bp, Homo sapiens
ctctggttctggaac

SEQ ID NO: 258790 - DNA, 15 bp, Homo sapiens
tctctggttctggaa

SEQ ID NO: 258791 - DNA, 15 bp, Homo sapiens
ttctctggttctgga

SEQ ID NO: 258792 - DNA, 15 bp, Homo sapiens
attctctggttctgg

SEQ ID NO: 258793 - DNA, 15 bp, Homo sapiens
cattctctggttctg

SEQ ID NO: 258794 - DNA, 15 bp, Homo sapiens
tcattctctggttct

SEQ ID NO: 258795 - DNA, 15 bp, Homo sapiens
ttcattctctggttc

SEQ ID NO: 258796 - DNA, 15 bp, Homo sapiens
tttcattctctggtt

SEQ ID NO: 258797 - DNA, 15 bp, Homo sapiens
atttcattctctggt

SEQ ID NO: 258798 - DNA, 15 bp, Homo sapiens
gatttcattctctgg

SEQ ID NO: 258799 - DNA, 15 bp, Homo sapiens
agatttcattctctg

SEQ ID NO: 258800 - DNA, 15 bp, Homo sapiens
tagatttcattctct

SEQ ID NO: 258801 - DNA, 15 bp, Homo sapiens
ttagatttcattctc

SEQ ID NO: 258802 - DNA, 15 bp, Homo sapiens
cttagatttcattct

SEQ ID NO: 258803 - DNA, 15 bp, Homo sapiens
tcttagatttcattc

SEQ ID NO: 258804 - DNA, 15 bp, Homo sapiens
ctcttagatttcatt

SEQ ID NO: 258805 - DNA, 15 bp, Homo sapiens
cctcttagatttcat

SEQ ID NO: 258806 - DNA, 15 bp, Homo sapiens
acctcttagatttca

SEQ ID NO: 258807 - DNA, 15 bp, Homo sapiens
cacctcttagatttc

SEQ ID NO: 258808 - DNA, 15 bp, Homo sapiens
ccacctcttagattt

SEQ ID NO: 258809 - DNA, 15 bp, Homo sapiens
gccacctcttagatt

SEQ ID NO: 258810 - DNA, 15 bp, Homo sapiens
tgccacctcttagat

SEQ ID NO: 258811 - DNA, 15 bp, Homo sapiens
ctgccacctcttaga

SEQ ID NO: 258812 - DNA, 15 bp, Homo sapiens
tctgccacctcttag

SEQ ID NO: 258813 - DNA, 15 bp, Homo sapiens
ttctgccacctctta

SEQ ID NO: 258814 - DNA, 15 bp, Homo sapiens
tttctgccacctctt

SEQ ID NO: 258815 - DNA, 15 bp, Homo sapiens
ttttctgccacctct

SEQ ID NO: 258816 - DNA, 15 bp, Homo sapiens
tttttctgccacctc

SEQ ID NO: 258817 - DNA, 15 bp, Homo sapiens
gtttttctgccacct

SEQ ID NO: 258818 - DNA, 15 bp, Homo sapiens
tgtttttctgccacc

SEQ ID NO: 258819 - DNA, 15 bp, Homo sapiens
ttgtttttctgccac

SEQ ID NO: 258820 - DNA, 15 bp, Homo sapiens
gttgtttttctgcca

SEQ ID NO: 258821 - DNA, 15 bp, Homo sapiens
agttgtttttctgcc

SEQ ID NO: 258822 - DNA, 15 bp, Homo sapiens
cagttgtttttctgc

SEQ ID NO: 258823 - DNA, 15 bp, Homo sapiens
ccagttgtttttctg

SEQ ID NO: 258824 - DNA, 15 bp, Homo sapiens
gccagttgtttttct

SEQ ID NO: 258825 - DNA, 15 bp, Homo sapiens
ggccagttgtttttc

SEQ ID NO: 258826 - DNA, 15 bp, Homo sapiens
cggccagttgttttt

SEQ ID NO: 258827 - DNA, 15 bp, Homo sapiens
tcggccagttgtttt

SEQ ID NO: 258828 - DNA, 15 bp, Homo sapiens
ttcggccagttgttt

SEQ ID NO: 258829 - DNA, 15 bp, Homo sapiens
cttcggccagttgtt

SEQ ID NO: 258830 - DNA, 15 bp, Homo sapiens
tcttcggccagttgt

SEQ ID NO: 258831 - DNA, 15 bp, Homo sapiens
ttcttcggccagttg

SEQ ID NO: 258832 - DNA, 15 bp, Homo sapiens
attcttcggccagtt

SEQ ID NO: 258833 - DNA, 15 bp, Homo sapiens
tattcttcggccagt

SEQ ID NO: 258834 - DNA, 15 bp, Homo sapiens
ctattcttcggccag

SEQ ID NO: 258835 - DNA, 15 bp, Homo sapiens
gctattcttcggcca

SEQ ID NO: 258836 - DNA, 15 bp, Homo sapiens
tgctattcttcggcc

SEQ ID NO: 258837 - DNA, 15 bp, Homo sapiens
ttgctattcttcggc

SEQ ID NO: 258838 - DNA, 15 bp, Homo sapiens
attgctattcttcgg

SEQ ID NO: 258839 - DNA, 15 bp, Homo sapiens
cattgctattcttcg

SEQ ID NO: 258840 - DNA, 15 bp, Homo sapiens
ccattgctattcttc

SEQ ID NO: 258841 - DNA, 15 bp, Homo sapiens
accattgctattctt

SEQ ID NO: 258842 - DNA, 15 bp, Homo sapiens
caccattgctattct

SEQ ID NO: 258843 - DNA, 15 bp, Homo sapiens
acaccattgctattc

SEQ ID NO: 258844 - DNA, 15 bp, Homo sapiens
cacaccattgctatt

SEQ ID NO: 258845 - DNA, 15 bp, Homo sapiens
tcacaccattgctat

SEQ ID NO: 258846 - DNA, 15 bp, Homo sapiens
gtcacaccattgcta

SEQ ID NO: 258847 - DNA, 15 bp, Homo sapiens
cgtcacaccattgct

SEQ ID NO: 258848 - DNA, 15 bp, Homo sapiens
gcgtcacaccattgc

SEQ ID NO: 258849 - DNA, 15 bp, Homo sapiens
tgcgtcacaccattg

SEQ ID NO: 258850 - DNA, 15 bp, Homo sapiens
ctgcgtcacaccatt

SEQ ID NO: 258851 - DNA, 15 bp, Homo sapiens
cctgcgtcacaccat

SEQ ID NO: 258852 - DNA, 15 bp, Homo sapiens
acctgcgtcacacca

SEQ ID NO: 258853 - DNA, 15 bp, Homo sapiens
tacctgcgtcacacc

SEQ ID NO: 258854 - DNA, 15 bp, Homo sapiens
ttacctgcgtcacac

SEQ ID NO: 258855 - DNA, 15 bp, Homo sapiens
gttacctgcgtcaca

SEQ ID NO: 258856 - DNA, 15 bp, Homo sapiens
tgttacctgcgtcac

SEQ ID NO: 258857 - DNA, 15 bp, Homo sapiens
ctgttacctgcgtca

SEQ ID NO: 258858 - DNA, 15 bp, Homo sapiens
cctgttacctgcgtc

SEQ ID NO: 258859 - DNA, 15 bp, Homo sapiens
tcctgttacctgcgt

SEQ ID NO: 258860 - DNA, 15 bp, Homo sapiens
ttcctgttacctgcg

SEQ ID NO: 258861 - DNA, 15 bp, Homo sapiens
tttcctgttacctgc

SEQ ID NO: 258862 - DNA, 15 bp, Homo sapiens
gtttcctgttacctg

SEQ ID NO: 258863 - DNA, 15 bp, Homo sapiens
agtttcctgttacct

SEQ ID NO: 258864 - DNA, 15 bp, Homo sapiens
aagtttcctgttacc

SEQ ID NO: 258865 - DNA, 15 bp, Homo sapiens
gaagtttcctgttac

SEQ ID NO: 258866 - DNA, 15 bp, Homo sapiens
tgaagtttcctgtta

SEQ ID NO: 258867 - DNA, 15 bp, Homo sapiens
atgaagtttcctgtt

SEQ ID NO: 258868 - DNA, 15 bp, Homo sapiens
aatgaagtttcctgt

SEQ ID NO: 258869 - DNA, 15 bp, Homo sapiens
gaatgaagtttcctg

SEQ ID NO: 258870 - DNA, 15 bp, Homo sapiens
agaatgaagtttcct

SEQ ID NO: 258871 - DNA, 15 bp, Homo sapiens
cagaatgaagtttcc

SEQ ID NO: 258872 - DNA, 15 bp, Homo sapiens
acagaatgaagtttc

SEQ ID NO: 258873 - DNA, 15 bp, Homo sapiens
aacagaatgaagttt

SEQ ID NO: 258874 - DNA, 15 bp, Homo sapiens
gaacagaatgaagtt

SEQ ID NO: 258875 - DNA, 15 bp, Homo sapiens
agaacagaatgaagt

SEQ ID NO: 258876 - DNA, 15 bp, Homo sapiens
aagaacagaatgaag

SEQ ID NO: 258877 - DNA, 15 bp, Homo sapiens
aaagaacagaatgaa

SEQ ID NO: 258878 - DNA, 15 bp, Homo sapiens
gaaagaacagaatga

SEQ ID NO: 258879 - DNA, 15 bp, Homo sapiens
ggaaagaacagaatg

SEQ ID NO: 258880 - DNA, 15 bp, Homo sapiens
aggaaagaacagaat

SEQ ID NO: 258881 - DNA, 15 bp, Homo sapiens
aaggaaagaacagaa

SEQ ID NO: 258882 - DNA, 15 bp, Homo sapiens
aaaggaaagaacaga

SEQ ID NO: 258883 - DNA, 15 bp, Homo sapiens
gaaaggaaagaacag

SEQ ID NO: 258884 - DNA, 15 bp, Homo sapiens
tgaaaggaaagaaca

SEQ ID NO: 258885 - DNA, 15 bp, Homo sapiens
ctgaaaggaaagaac

SEQ ID NO: 258886 - DNA, 15 bp, Homo sapiens
actgaaaggaaagaa

SEQ ID NO: 258887 - DNA, 15 bp, Homo sapiens
cactgaaaggaaaga

SEQ ID NO: 258888 - DNA, 15 bp, Homo sapiens
tcactgaaaggaaag

SEQ ID NO: 258889 - DNA, 15 bp, Homo sapiens
atcactgaaaggaaa

SEQ ID NO: 258890 - DNA, 15 bp, Homo sapiens
gatcactgaaaggaa

SEQ ID NO: 258891 - DNA, 15 bp, Homo sapiens
agatcactgaaagga

SEQ ID NO: 258892 - DNA, 15 bp, Homo sapiens
aagatcactgaaagg

SEQ ID NO: 258893 - DNA, 15 bp, Homo sapiens
aaagatcactgaaag

SEQ ID NO: 258894 - DNA, 15 bp, Homo sapiens
gaaagatcactgaaa

SEQ ID NO: 258895 - DNA, 15 bp, Homo sapiens
tgaaagatcactgaa

SEQ ID NO: 258896 - DNA, 15 bp, Homo sapiens
ttgaaagatcactga

SEQ ID NO: 258897 - DNA, 15 bp, Homo sapiens
attgaaagatcactg

SEQ ID NO: 258898 - DNA, 15 bp, Homo sapiens
gattgaaagatcact

SEQ ID NO: 258899 - DNA, 15 bp, Homo sapiens
agattgaaagatcac

SEQ ID NO: 258900 - DNA, 15 bp, Homo sapiens
aagattgaaagatca

SEQ ID NO: 258901 - DNA, 15 bp, Homo sapiens
caagattgaaagatc

SEQ ID NO: 258902 - DNA, 15 bp, Homo sapiens
acaagattgaaagat

SEQ ID NO: 258903 - DNA, 15 bp, Homo sapiens
gacaagattgaaaga

SEQ ID NO: 258904 - DNA, 15 bp, Homo sapiens
ggacaagattgaaag

SEQ ID NO: 258905 - DNA, 15 bp, Homo sapiens
tggacaagattgaaa

SEQ ID NO: 258906 - DNA, 15 bp, Homo sapiens
atggacaagattgaa

SEQ ID NO: 258907 - DNA, 15 bp, Homo sapiens
gatggacaagattga

SEQ ID NO: 258908 - DNA, 15 bp, Homo sapiens
ggatggacaagattg

SEQ ID NO: 258909 - DNA, 15 bp, Homo sapiens
gggatggacaagatt

SEQ ID NO: 258910 - DNA, 15 bp, Homo sapiens
agggatggacaagat

SEQ ID NO: 258911 - DNA, 15 bp, Homo sapiens
cagggatggacaaga

SEQ ID NO: 258912 - DNA, 15 bp, Homo sapiens
tcagggatggacaag

SEQ ID NO: 258913 - DNA, 15 bp, Homo sapiens
ttcagggatggacaa

SEQ ID NO: 258914 - DNA, 15 bp, Homo sapiens
tttcagggatggaca

SEQ ID NO: 258915 - DNA, 15 bp, Homo sapiens
gtttcagggatggac

SEQ ID NO: 258916 - DNA, 15 bp, Homo sapiens
tgtttcagggatgga

SEQ ID NO: 258917 - DNA, 15 bp, Homo sapiens
gtgtttcagggatgg

SEQ ID NO: 258918 - DNA, 15 bp, Homo sapiens
tgtgtttcagggatg

SEQ ID NO: 258919 - DNA, 15 bp, Homo sapiens
gtgtgtttcagggat

SEQ ID NO: 258920 - DNA, 15 bp, Homo sapiens
tgtgtgtttcaggga

SEQ ID NO: 258921 - DNA, 15 bp, Homo sapiens
ttgtgtgtttcaggg

SEQ ID NO: 258922 - DNA, 15 bp, Homo sapiens
gttgtgtgtttcagg

SEQ ID NO: 258923 - DNA, 15 bp, Homo sapiens
agttgtgtgtttcag

SEQ ID NO: 258924 - DNA, 15 bp, Homo sapiens
gagttgtgtgtttca

SEQ ID NO: 258925 - DNA, 15 bp, Homo sapiens
ggagttgtgtgtttc

SEQ ID NO: 258926 - DNA, 15 bp, Homo sapiens
tggagttgtgtgttt

SEQ ID NO: 258927 - DNA, 15 bp, Homo sapiens
ctggagttgtgtgtt

SEQ ID NO: 258928 - DNA, 15 bp, Homo sapiens
actggagttgtgtgt

SEQ ID NO: 258929 - DNA, 15 bp, Homo sapiens
gactggagttgtgtg

SEQ ID NO: 258930 - DNA, 15 bp, Homo sapiens
tgactggagttgtgt

SEQ ID NO: 258931 - DNA, 15 bp, Homo sapiens
gtgactggagttgtg

SEQ ID NO: 258932 - DNA, 15 bp, Homo sapiens
tgtgactggagttgt

SEQ ID NO: 258933 - DNA, 15 bp, Homo sapiens
ctgtgactggagttg

SEQ ID NO: 258934 - DNA, 15 bp, Homo sapiens
tctgtgactggagtt

SEQ ID NO: 258935 - DNA, 15 bp, Homo sapiens
gtctgtgactggagt

SEQ ID NO: 258936 - DNA, 15 bp, Homo sapiens
tgtctgtgactggag

SEQ ID NO: 258937 - DNA, 15 bp, Homo sapiens
ctgtctgtgactgga

SEQ ID NO: 258938 - DNA, 15 bp, Homo sapiens
actgtctgtgactgg

SEQ ID NO: 258939 - DNA, 15 bp, Homo sapiens
aactgtctgtgactg

SEQ ID NO: 258940 - DNA, 15 bp, Homo sapiens
gaactgtctgtgact

SEQ ID NO: 258941 - DNA, 15 bp, Homo sapiens
agaactgtctgtgac

SEQ ID NO: 258942 - DNA, 15 bp, Homo sapiens
cagaactgtctgtga

SEQ ID NO: 258943 - DNA, 15 bp, Homo sapiens
ccagaactgtctgtg

SEQ ID NO: 258944 - DNA, 15 bp, Homo sapiens
accagaactgtctgt

SEQ ID NO: 258945 - DNA, 15 bp, Homo sapiens
aaccagaactgtctg

SEQ ID NO: 258946 - DNA, 15 bp, Homo sapiens
caaccagaactgtct

SEQ ID NO: 258947 - DNA, 15 bp, Homo sapiens
acaaccagaactgtc

SEQ ID NO: 258948 - DNA, 15 bp, Homo sapiens
gacaaccagaactgt

SEQ ID NO: 258949 - DNA, 15 bp, Homo sapiens
ggacaaccagaactg

SEQ ID NO: 258950 - DNA, 15 bp, Homo sapiens
aggacaaccagaact

SEQ ID NO: 258951 - DNA, 15 bp, Homo sapiens
aaggacaaccagaac

SEQ ID NO: 258952 - DNA, 15 bp, Homo sapiens
caaggacaaccagaa

SEQ ID NO: 258953 - DNA, 15 bp, Homo sapiens
acaaggacaaccaga

SEQ ID NO: 258954 - DNA, 15 bp, Homo sapiens
tacaaggacaaccag

SEQ ID NO: 258955 - DNA, 15 bp, Homo sapiens
gtacaaggacaacca

SEQ ID NO: 258956 - DNA, 15 bp, Homo sapiens
ggtacaaggacaacc

SEQ ID NO: 258957 - DNA, 15 bp, Homo sapiens
gggtacaaggacaac

SEQ ID NO: 258958 - DNA, 15 bp, Homo sapiens
agggtacaaggacaa

SEQ ID NO: 258959 - DNA, 15 bp, Homo sapiens
aagggtacaaggaca

SEQ ID NO: 258960 - DNA, 15 bp, Homo sapiens
aaagggtacaaggac

SEQ ID NO: 258961 - DNA, 15 bp, Homo sapiens
gaaagggtacaagga

SEQ ID NO: 258962 - DNA, 15 bp, Homo sapiens
agaaagggtacaagg

SEQ ID NO: 258963 - DNA, 15 bp, Homo sapiens
cagaaagggtacaag

SEQ ID NO: 258964 - DNA, 15 bp, Homo sapiens
acagaaagggtacaa

SEQ ID NO: 258965 - DNA, 15 bp, Homo sapiens
aacagaaagggtaca

SEQ ID NO: 258966 - DNA, 15 bp, Homo sapiens
taacagaaagggtac

SEQ ID NO: 258967 - DNA, 15 bp, Homo sapiens
ttaacagaaagggta

SEQ ID NO: 258968 - DNA, 15 bp, Homo sapiens
attaacagaaagggt

SEQ ID NO: 258969 - DNA, 15 bp, Homo sapiens
gattaacagaaaggg

SEQ ID NO: 258970 - DNA, 15 bp, Homo sapiens
ggattaacagaaagg

SEQ ID NO: 258971 - DNA, 15 bp, Homo sapiens
gggattaacagaaag

SEQ ID NO: 258972 - DNA, 15 bp, Homo sapiens
agggattaacagaaa

SEQ ID NO: 258973 - DNA, 15 bp, Homo sapiens
gagggattaacagaa

SEQ ID NO: 258974 - DNA, 15 bp, Homo sapiens
ggagggattaacaga

SEQ ID NO: 258975 - DNA, 15 bp, Homo sapiens
aggagggattaacag

SEQ ID NO: 258976 - DNA, 15 bp, Homo sapiens
aaggagggattaaca

SEQ ID NO: 258977 - DNA, 15 bp, Homo sapiens
gaaggagggattaac

SEQ ID NO: 258978 - DNA, 15 bp, Homo sapiens
agaaggagggattaa

SEQ ID NO: 258979 - DNA, 15 bp, Homo sapiens
gagaaggagggatta

SEQ ID NO: 258980 - DNA, 15 bp, Homo sapiens
agagaaggagggatt

SEQ ID NO: 258981 - DNA, 15 bp, Homo sapiens
aagagaaggagggat

SEQ ID NO: 258982 - DNA, 15 bp, Homo sapiens
aaagagaaggaggga

SEQ ID NO: 258983 - DNA, 15 bp, Homo sapiens
gaaagagaaggaggg

SEQ ID NO: 258984 - DNA, 15 bp, Homo sapiens
tgaaagagaaggagg

SEQ ID NO: 258985 - DNA, 15 bp, Homo sapiens
ctgaaagagaaggag

SEQ ID NO: 258986 - DNA, 15 bp, Homo sapiens
tctgaaagagaagga

SEQ ID NO: 258987 - DNA, 15 bp, Homo sapiens
ttctgaaagagaagg

SEQ ID NO: 258988 - DNA, 15 bp, Homo sapiens
cttctgaaagagaag

SEQ ID NO: 258989 - DNA, 15 bp, Homo sapiens
ccttctgaaagagaa

SEQ ID NO: 258990 - DNA, 15 bp, Homo sapiens
gccttctgaaagaga

SEQ ID NO: 258991 - DNA, 15 bp, Homo sapiens
ggccttctgaaagag

SEQ ID NO: 258992 - DNA, 15 bp, Homo sapiens
aggccttctgaaaga

SEQ ID NO: 258993 - DNA, 15 bp, Homo sapiens
gaggccttctgaaag

SEQ ID NO: 258994 - DNA, 15 bp, Homo sapiens
tgaggccttctgaaa

SEQ ID NO: 258995 - DNA, 15 bp, Homo sapiens
ctgaggccttctgaa

SEQ ID NO: 258996 - DNA, 15 bp, Homo sapiens
gctgaggccttctga

SEQ ID NO: 258997 - DNA, 15 bp, Homo sapiens
tgctgaggccttctg

SEQ ID NO: 258998 - DNA, 15 bp, Homo sapiens
gtgctgaggccttct

SEQ ID NO: 258999 - DNA, 15 bp, Homo sapiens
ggtgctgaggccttc

SEQ ID NO: 259000 - DNA, 15 bp, Homo sapiens
aggtgctgaggcctt

SEQ ID NO: 259001 - DNA, 15 bp, Homo sapiens
taggtgctgaggcct

SEQ ID NO: 259002 - DNA, 15 bp, Homo sapiens
gtaggtgctgaggcc

SEQ ID NO: 259003 - DNA, 15 bp, Homo sapiens
ggtaggtgctgaggc

SEQ ID NO: 259004 - DNA, 15 bp, Homo sapiens
aggtaggtgctgagg

SEQ ID NO: 259005 - DNA, 15 bp, Homo sapiens
taggtaggtgctgag

SEQ ID NO: 259006 - DNA, 15 bp, Homo sapiens
gtaggtaggtgctga

SEQ ID NO: 259007 - DNA, 15 bp, Homo sapiens
ggtaggtaggtgctg

SEQ ID NO: 259008 - DNA, 15 bp, Homo sapiens
gggtaggtaggtgct

SEQ ID NO: 259009 - DNA, 15 bp, Homo sapiens
ggggtaggtaggtgc

SEQ ID NO: 259010 - DNA, 15 bp, Homo sapiens
tggggtaggtaggtg

SEQ ID NO: 259011 - DNA, 15 bp, Homo sapiens
ctggggtaggtaggt

SEQ ID NO: 259012 - DNA, 15 bp, Homo sapiens
gctggggtaggtagg

SEQ ID NO: 259013 - DNA, 15 bp, Homo sapiens
ggctggggtaggtag

SEQ ID NO: 259014 - DNA, 15 bp, Homo sapiens
aggctggggtaggta

SEQ ID NO: 259015 - DNA, 15 bp, Homo sapiens
aaggctggggtaggt

SEQ ID NO: 259016 - DNA, 15 bp, Homo sapiens
aaaggctggggtagg

SEQ ID NO: 259017 - DNA, 15 bp, Homo sapiens
taaaggctggggtag

SEQ ID NO: 259018 - DNA, 15 bp, Homo sapiens
gtaaaggctggggta

SEQ ID NO: 259019 - DNA, 15 bp, Homo sapiens
agtaaaggctggggt

SEQ ID NO: 259020 - DNA, 15 bp, Homo sapiens
gagtaaaggctgggg

SEQ ID NO: 259021 - DNA, 15 bp, Homo sapiens
agagtaaaggctggg

SEQ ID NO: 259022 - DNA, 15 bp, Homo sapiens
aagagtaaaggctgg

SEQ ID NO: 259023 - DNA, 15 bp, Homo sapiens
gaagagtaaaggctg

SEQ ID NO: 259024 - DNA, 15 bp, Homo sapiens
ggaagagtaaaggct

SEQ ID NO: 259025 - DNA, 15 bp, Homo sapiens
aggaagagtaaaggc

SEQ ID NO: 259026 - DNA, 15 bp, Homo sapiens
taggaagagtaaagg

SEQ ID NO: 259027 - DNA, 15 bp, Homo sapiens
gtaggaagagtaaag

SEQ ID NO: 259028 - DNA, 15 bp, Homo sapiens
ggtaggaagagtaaa

SEQ ID NO: 259029 - DNA, 15 bp, Homo sapiens
tggtaggaagagtaa

SEQ ID NO: 259030 - DNA, 15 bp, Homo sapiens
gtggtaggaagagta

SEQ ID NO: 259031 - DNA, 15 bp, Homo sapiens
ggtggtaggaagagt

SEQ ID NO: 259032 - DNA, 15 bp, Homo sapiens
tggtggtaggaagag

SEQ ID NO: 259033 - DNA, 15 bp, Homo sapiens
ctggtggtaggaaga

SEQ ID NO: 259034 - DNA, 15 bp, Homo sapiens
cctggtggtaggaag

SEQ ID NO: 259035 - DNA, 15 bp, Homo sapiens
ccctggtggtaggaa

SEQ ID NO: 259036 - DNA, 15 bp, Homo sapiens
tccctggtggtagga

SEQ ID NO: 259037 - DNA, 15 bp, Homo sapiens
atccctggtggtagg

SEQ ID NO: 259038 - DNA, 15 bp, Homo sapiens
catccctggtggtag

SEQ ID NO: 259039 - DNA, 15 bp, Homo sapiens
gcatccctggtggta

SEQ ID NO: 259040 - DNA, 15 bp, Homo sapiens
ggcatccctggtggt

SEQ ID NO: 259041 - DNA, 15 bp, Homo sapiens
aggcatccctggtgg

SEQ ID NO: 259042 - DNA, 15 bp, Homo sapiens
caggcatccctggtg

SEQ ID NO: 259043 - DNA, 15 bp, Homo sapiens
ccaggcatccctggt

SEQ ID NO: 259044 - DNA, 15 bp, Homo sapiens
accaggcatccctgg

SEQ ID NO: 259045 - DNA, 15 bp, Homo sapiens
caccaggcatccctg

SEQ ID NO: 259046 - DNA, 15 bp, Homo sapiens
tcaccaggcatccct

SEQ ID NO: 259047 - DNA, 15 bp, Homo sapiens
ttcaccaggcatccc

SEQ ID NO: 259048 - DNA, 15 bp, Homo sapiens
gttcaccaggcatcc

SEQ ID NO: 259049 - DNA, 15 bp, Homo sapiens
ggttcaccaggcatc

SEQ ID NO: 259050 - DNA, 15 bp, Homo sapiens
gggttcaccaggcat

SEQ ID NO: 259051 - DNA, 15 bp, Homo sapiens
cgggttcaccaggca

SEQ ID NO: 259052 - DNA, 15 bp, Homo sapiens
tcgggttcaccaggc

SEQ ID NO: 259053 - DNA, 15 bp, Homo sapiens
gtcgggttcaccagg

SEQ ID NO: 259054 - DNA, 15 bp, Homo sapiens
agtcgggttcaccag

SEQ ID NO: 259055 - DNA, 15 bp, Homo sapiens
cagtcgggttcacca

SEQ ID NO: 259056 - DNA, 15 bp, Homo sapiens
ccagtcgggttcacc

SEQ ID NO: 259057 - DNA, 15 bp, Homo sapiens
cccagtcgggttcac

SEQ ID NO: 259058 - DNA, 15 bp, Homo sapiens
tcccagtcgggttca

SEQ ID NO: 259059 - DNA, 15 bp, Homo sapiens
ttcccagtcgggttc

SEQ ID NO: 259060 - DNA, 15 bp, Homo sapiens
gttcccagtcgggtt

SEQ ID NO: 259061 - DNA, 15 bp, Homo sapiens
ggttcccagtcgggt

SEQ ID NO: 259062 - DNA, 15 bp, Homo sapiens
aggttcccagtcggg

SEQ ID NO: 259063 - DNA, 15 bp, Homo sapiens
aaggttcccagtcgg

SEQ ID NO: 259064 - DNA, 15 bp, Homo sapiens
gaaggttcccagtcg

SEQ ID NO: 259065 - DNA, 15 bp, Homo sapiens
ggaaggttcccagtc

SEQ ID NO: 259066 - DNA, 15 bp, Homo sapiens
tggaaggttcccagt

SEQ ID NO: 259067 - DNA, 15 bp, Homo sapiens
ttggaaggttcccag

SEQ ID NO: 259068 - DNA, 15 bp, Homo sapiens
attggaaggttccca

SEQ ID NO: 259069 - DNA, 15 bp, Homo sapiens
cattggaaggttccc

SEQ ID NO: 259070 - DNA, 15 bp, Homo sapiens
acattggaaggttcc

SEQ ID NO: 259071 - DNA, 15 bp, Homo sapiens
cacattggaaggttc

SEQ ID NO: 259072 - DNA, 15 bp, Homo sapiens
ccacattggaaggtt

SEQ ID NO: 259073 - DNA, 15 bp, Homo sapiens
tccacattggaaggt

SEQ ID NO: 259074 - DNA, 15 bp, Homo sapiens
ctccacattggaagg

SEQ ID NO: 259075 - DNA, 15 bp, Homo sapiens
gctccacattggaag

SEQ ID NO: 259076 - DNA, 15 bp, Homo sapiens
tgctccacattggaa

SEQ ID NO: 259077 - DNA, 15 bp, Homo sapiens
ttgctccacattgga

SEQ ID NO: 259078 - DNA, 15 bp, Homo sapiens
gttgctccacattgg

SEQ ID NO: 259079 - DNA, 15 bp, Homo sapiens
ggttgctccacattg

SEQ ID NO: 259080 - DNA, 15 bp, Homo sapiens
tggttgctccacatt

SEQ ID NO: 259081 - DNA, 15 bp, Homo sapiens
ctggttgctccacat

SEQ ID NO: 259082 - DNA, 15 bp, Homo sapiens
tctggttgctccaca

SEQ ID NO: 259083 - DNA, 15 bp, Homo sapiens
gtctggttgctccac

SEQ ID NO: 259084 - DNA, 15 bp, Homo sapiens
ggtctggttgctcca

SEQ ID NO: 259085 - DNA, 15 bp, Homo sapiens
aggtctggttgctcc

SEQ ID NO: 259086 - DNA, 15 bp, Homo sapiens
caggtctggttgctc

SEQ ID NO: 259087 - DNA, 15 bp, Homo sapiens
ccaggtctggttgct

SEQ ID NO: 259088 - DNA, 15 bp, Homo sapiens
tccaggtctggttgc

SEQ ID NO: 259089 - DNA, 15 bp, Homo sapiens
ttccaggtctggttg

SEQ ID NO: 259090 - DNA, 15 bp, Homo sapiens
gttccaggtctggtt

SEQ ID NO: 259091 - DNA, 15 bp, Homo sapiens
tgttccaggtctggt

SEQ ID NO: 259092 - DNA, 15 bp, Homo sapiens
ttgttccaggtctgg

SEQ ID NO: 259093 - DNA, 15 bp, Homo sapiens
attgttccaggtctg

SEQ ID NO: 259094 - DNA, 15 bp, Homo sapiens
aattgttccaggtct

SEQ ID NO: 259095 - DNA, 15 bp, Homo sapiens
gaattgttccaggtc

SEQ ID NO: 259096 - DNA, 15 bp, Homo sapiens
tgaattgttccaggt

SEQ ID NO: 259097 - DNA, 15 bp, Homo sapiens
ttgaattgttccagg

SEQ ID NO: 259098 - DNA, 15 bp, Homo sapiens
gttgaattgttccag

SEQ ID NO: 259099 - DNA, 15 bp, Homo sapiens
ggttgaattgttcca

SEQ ID NO: 259100 - DNA, 15 bp, Homo sapiens
aggttgaattgttcc

SEQ ID NO: 259101 - DNA, 15 bp, Homo sapiens
caggttgaattgttc

SEQ ID NO: 259102 - DNA, 15 bp, Homo sapiens
ccaggttgaattgtt

SEQ ID NO: 259103 - DNA, 15 bp, Homo sapiens
tccaggttgaattgt

SEQ ID NO: 259104 - DNA, 15 bp, Homo sapiens
ctccaggttgaattg

SEQ ID NO: 259105 - DNA, 15 bp, Homo sapiens
gctccaggttgaatt

SEQ ID NO: 259106 - DNA, 15 bp, Homo sapiens
tgctccaggttgaat

SEQ ID NO: 259107 - DNA, 15 bp, Homo sapiens
ttgctccaggttgaa

SEQ ID NO: 259108 - DNA, 15 bp, Homo sapiens
gttgctccaggttga

SEQ ID NO: 259109 - DNA, 15 bp, Homo sapiens
ggttgctccaggttg

SEQ ID NO: 259110 - DNA, 15 bp, Homo sapiens
tggttgctccaggtt

SEQ ID NO: 259111 - DNA, 15 bp, Homo sapiens
ctggttgctccaggt

SEQ ID NO: 259112 - DNA, 15 bp, Homo sapiens
tctggttgctccagg

SEQ ID NO: 259113 - DNA, 15 bp, Homo sapiens
gtctggttgctccag

SEQ ID NO: 259114 - DNA, 15 bp, Homo sapiens
gggtctggttgctcc

SEQ ID NO: 259115 - DNA, 15 bp, Homo sapiens
tgggtctggttgctc

SEQ ID NO: 259116 - DNA, 15 bp, Homo sapiens
ctgggtctggttgct

SEQ ID NO: 259117 - DNA, 15 bp, Homo sapiens
tctgggtctggttgc

SEQ ID NO: 259118 - DNA, 15 bp, Homo sapiens
ttctgggtctggttg

SEQ ID NO: 259119 - DNA, 15 bp, Homo sapiens
gttctgggtctggtt

SEQ ID NO: 259120 - DNA, 15 bp, Homo sapiens
tgttctgggtctggt

SEQ ID NO: 259121 - DNA, 15 bp, Homo sapiens
atgttctgggtctgg

SEQ ID NO: 259122 - DNA, 15 bp, Homo sapiens
gatgttctgggtctg

SEQ ID NO: 259123 - DNA, 15 bp, Homo sapiens
ggatgttctgggtct

SEQ ID NO: 259124 - DNA, 15 bp, Homo sapiens
tggatgttctgggtc

SEQ ID NO: 259125 - DNA, 15 bp, Homo sapiens
ctggatgttctgggt

SEQ ID NO: 259126 - DNA, 15 bp, Homo sapiens
actggatgttctggg

SEQ ID NO: 259127 - DNA, 15 bp, Homo sapiens
gactggatgttctgg

SEQ ID NO: 259128 - DNA, 15 bp, Homo sapiens
ggactggatgttctg

SEQ ID NO: 259129 - DNA, 15 bp, Homo sapiens
aggactggatgttct

SEQ ID NO: 259130 - DNA, 15 bp, Homo sapiens
caggactggatgttc

SEQ ID NO: 259131 - DNA, 15 bp, Homo sapiens
ccaggactggatgtt

SEQ ID NO: 259132 - DNA, 15 bp, Homo sapiens
tccaggactggatgt

SEQ ID NO: 259133 - DNA, 15 bp, Homo sapiens
ctccaggactggatg

SEQ ID NO: 259134 - DNA, 15 bp, Homo sapiens
gctccaggactggat

SEQ ID NO: 259135 - DNA, 15 bp, Homo sapiens
tgctccaggactgga

SEQ ID NO: 259136 - DNA, 15 bp, Homo sapiens
ttgctccaggactgg

SEQ ID NO: 259137 - DNA, 15 bp, Homo sapiens
gttgctccaggactg

SEQ ID NO: 259138 - DNA, 15 bp, Homo sapiens
ggttgctccaggact

SEQ ID NO: 259139 - DNA, 15 bp, Homo sapiens
tggttgctccaggac

SEQ ID NO: 259140 - DNA, 15 bp, Homo sapiens
gtggttgctccagga

SEQ ID NO: 259141 - DNA, 15 bp, Homo sapiens
agtggttgctccagg

SEQ ID NO: 259142 - DNA, 15 bp, Homo sapiens
gagtggttgctccag

SEQ ID NO: 259143 - DNA, 15 bp, Homo sapiens
ggagtggttgctcca

SEQ ID NO: 259144 - DNA, 15 bp, Homo sapiens
aggagtggttgctcc

SEQ ID NO: 259145 - DNA, 15 bp, Homo sapiens
caggagtggttgctc

SEQ ID NO: 259146 - DNA, 15 bp, Homo sapiens
ccaggagtggttgct

SEQ ID NO: 259147 - DNA, 15 bp, Homo sapiens
tccaggagtggttgc

SEQ ID NO: 259148 - DNA, 15 bp, Homo sapiens
ttccaggagtggttg

SEQ ID NO: 259149 - DNA, 15 bp, Homo sapiens
gttccaggagtggtt

SEQ ID NO: 259150 - DNA, 15 bp, Homo sapiens
tgttccaggagtggt

SEQ ID NO: 259151 - DNA, 15 bp, Homo sapiens
gtgttccaggagtgg

SEQ ID NO: 259152 - DNA, 15 bp, Homo sapiens
agtgttccaggagtg

SEQ ID NO: 259153 - DNA, 15 bp, Homo sapiens
gagtgttccaggagt

SEQ ID NO: 259154 - DNA, 15 bp, Homo sapiens
tgagtgttccaggag

SEQ ID NO: 259155 - DNA, 15 bp, Homo sapiens
ctgagtgttccagga

SEQ ID NO: 259156 - DNA, 15 bp, Homo sapiens
tctgagtgttccagg

SEQ ID NO: 259157 - DNA, 15 bp, Homo sapiens
gtctgagtgttccag

SEQ ID NO: 259158 - DNA, 15 bp, Homo sapiens
ggtctgagtgttcca

SEQ ID NO: 259159 - DNA, 15 bp, Homo sapiens
aggtctgagtgttcc

SEQ ID NO: 259160 - DNA, 15 bp, Homo sapiens
caggtctgagtgttc

SEQ ID NO: 259161 - DNA, 15 bp, Homo sapiens
ccaggtctgagtgtt

SEQ ID NO: 259162 - DNA, 15 bp, Homo sapiens
accaggtctgagtgt

SEQ ID NO: 259163 - DNA, 15 bp, Homo sapiens
caccaggtctgagtg

SEQ ID NO: 259164 - DNA, 15 bp, Homo sapiens
gcaccaggtctgagt

SEQ ID NO: 259165 - DNA, 15 bp, Homo sapiens
tgcaccaggtctgag

SEQ ID NO: 259166 - DNA, 15 bp, Homo sapiens
gtgcaccaggtctga

SEQ ID NO: 259167 - DNA, 15 bp, Homo sapiens
ggtgcaccaggtctg

SEQ ID NO: 259168 - DNA, 15 bp, Homo sapiens
gggtgcaccaggtct

SEQ ID NO: 259169 - DNA, 15 bp, Homo sapiens
tgggtgcaccaggtc

SEQ ID NO: 259170 - DNA, 15 bp, Homo sapiens
ttgggtgcaccaggt

SEQ ID NO: 259171 - DNA, 15 bp, Homo sapiens
attgggtgcaccagg

SEQ ID NO: 259172 - DNA, 15 bp, Homo sapiens
gattgggtgcaccag

SEQ ID NO: 259173 - DNA, 15 bp, Homo sapiens
ggattgggtgcacca

SEQ ID NO: 259174 - DNA, 15 bp, Homo sapiens
aggattgggtgcacc

SEQ ID NO: 259175 - DNA, 15 bp, Homo sapiens
caggattgggtgcac

SEQ ID NO: 259176 - DNA, 15 bp, Homo sapiens
ccaggattgggtgca

SEQ ID NO: 259177 - DNA, 15 bp, Homo sapiens
tccaggattgggtgc

SEQ ID NO: 259178 - DNA, 15 bp, Homo sapiens
ttccaggattgggtg

SEQ ID NO: 259179 - DNA, 15 bp, Homo sapiens
gttccaggattgggt

SEQ ID NO: 259180 - DNA, 15 bp, Homo sapiens
tgttccaggattggg

SEQ ID NO: 259181 - DNA, 15 bp, Homo sapiens
ttgttccaggattgg

SEQ ID NO: 259182 - DNA, 15 bp, Homo sapiens
attgttccaggattg

SEQ ID NO: 259183 - DNA, 15 bp, Homo sapiens
gattgttccaggatt

SEQ ID NO: 259184 - DNA, 15 bp, Homo sapiens
tgattgttccaggat

SEQ ID NO: 259185 - DNA, 15 bp, Homo sapiens
ctgattgttccagga

SEQ ID NO: 259186 - DNA, 15 bp, Homo sapiens
cctgattgttccagg

SEQ ID NO: 259187 - DNA, 15 bp, Homo sapiens
gcctgattgttccag

SEQ ID NO: 259188 - DNA, 15 bp, Homo sapiens
ggcctgattgttcca

SEQ ID NO: 259189 - DNA, 15 bp, Homo sapiens
aggcctgattgttcc

SEQ ID NO: 259190 - DNA, 15 bp, Homo sapiens
caggcctgattgttc

SEQ ID NO: 259191 - DNA, 15 bp, Homo sapiens
ccaggcctgattgtt

SEQ ID NO: 259192 - DNA, 15 bp, Homo sapiens
tccaggcctgattgt

SEQ ID NO: 259193 - DNA, 15 bp, Homo sapiens
ttccaggcctgattg

SEQ ID NO: 259194 - DNA, 15 bp, Homo sapiens
gttccaggcctgatt

SEQ ID NO: 259195 - DNA, 15 bp, Homo sapiens
tgttccaggcctgat

SEQ ID NO: 259196 - DNA, 15 bp, Homo sapiens
ctgttccaggcctga

SEQ ID NO: 259197 - DNA, 15 bp, Homo sapiens
actgttccaggcctg

SEQ ID NO: 259198 - DNA, 15 bp, Homo sapiens
gactgttccaggcct

SEQ ID NO: 259199 - DNA, 15 bp, Homo sapiens
ggactgttccaggcc

SEQ ID NO: 259200 - DNA, 15 bp, Homo sapiens
gggactgttccaggc

SEQ ID NO: 259201 - DNA, 15 bp, Homo sapiens
agggactgttccagg

SEQ ID NO: 259202 - DNA, 15 bp, Homo sapiens
aagggactgttccag

SEQ ID NO: 259203 - DNA, 15 bp, Homo sapiens
gaagggactgttcca

SEQ ID NO: 259204 - DNA, 15 bp, Homo sapiens
agaagggactgttcc

SEQ ID NO: 259205 - DNA, 15 bp, Homo sapiens
tagaagggactgttc

SEQ ID NO: 259206 - DNA, 15 bp, Homo sapiens
atagaagggactgtt

SEQ ID NO: 259207 - DNA, 15 bp, Homo sapiens
tatagaagggactgt

SEQ ID NO: 259208 - DNA, 15 bp, Homo sapiens
ttatagaagggactg

SEQ ID NO: 259209 - DNA, 15 bp, Homo sapiens
gttatagaagggact

SEQ ID NO: 259210 - DNA, 15 bp, Homo sapiens
agttatagaagggac

SEQ ID NO: 259211 - DNA, 15 bp, Homo sapiens
cagttatagaaggga

SEQ ID NO: 259212 - DNA, 15 bp, Homo sapiens
acagttatagaaggg

SEQ ID NO: 259213 - DNA, 15 bp, Homo sapiens
cacagttatagaagg

SEQ ID NO: 259214 - DNA, 15 bp, Homo sapiens
ccacagttatagaag

SEQ ID NO: 259215 - DNA, 15 bp, Homo sapiens
tccacagttatagaa

SEQ ID NO: 259216 - DNA, 15 bp, Homo sapiens
ctccacagttataga

SEQ ID NO: 259217 - DNA, 15 bp, Homo sapiens
tctccacagttatag

SEQ ID NO: 259218 - DNA, 15 bp, Homo sapiens
ctctccacagttata

SEQ ID NO: 259219 - DNA, 15 bp, Homo sapiens
cctctccacagttat

SEQ ID NO: 259220 - DNA, 15 bp, Homo sapiens
tcctctccacagtta

SEQ ID NO: 259221 - DNA, 15 bp, Homo sapiens
ttcctctccacagtt

SEQ ID NO: 259222 - DNA, 15 bp, Homo sapiens
attcctctccacagt

SEQ ID NO: 259223 - DNA, 15 bp, Homo sapiens
gattcctctccacag

SEQ ID NO: 259224 - DNA, 15 bp, Homo sapiens
agattcctctccaca

SEQ ID NO: 259225 - DNA, 15 bp, Homo sapiens
gagattcctctccac

SEQ ID NO: 259226 - DNA, 15 bp, Homo sapiens
agagattcctctcca

SEQ ID NO: 259227 - DNA, 15 bp, Homo sapiens
cagagattcctctcc

SEQ ID NO: 259228 - DNA, 15 bp, Homo sapiens
gcagagattcctctc

SEQ ID NO: 259229 - DNA, 15 bp, Homo sapiens
tgcagagattcctct

SEQ ID NO: 259230 - DNA, 15 bp, Homo sapiens
ctgcagagattcctc

SEQ ID NO: 259231 - DNA, 15 bp, Homo sapiens
actgcagagattcct

SEQ ID NO: 259232 - DNA, 15 bp, Homo sapiens
gactgcagagattcc

SEQ ID NO: 259233 - DNA, 15 bp, Homo sapiens
ggactgcagagattc

SEQ ID NO: 259234 - DNA, 15 bp, Homo sapiens
aggactgcagagatt

SEQ ID NO: 259235 - DNA, 15 bp, Homo sapiens
caggactgcagagat

SEQ ID NO: 259236 - DNA, 15 bp, Homo sapiens
gcaggactgcagaga

SEQ ID NO: 259237 - DNA, 15 bp, Homo sapiens
tgcaggactgcagag

SEQ ID NO: 259238 - DNA, 15 bp, Homo sapiens
atgcaggactgcaga

SEQ ID NO: 259239 - DNA, 15 bp, Homo sapiens
catgcaggactgcag

SEQ ID NO: 259240 - DNA, 15 bp, Homo sapiens
gcatgcaggactgca

SEQ ID NO: 259241 - DNA, 15 bp, Homo sapiens
tgcatgcaggactgc

SEQ ID NO: 259242 - DNA, 15 bp, Homo sapiens
ctgcatgcaggactg

SEQ ID NO: 259243 - DNA, 15 bp, Homo sapiens
actgcatgcaggact

SEQ ID NO: 259244 - DNA, 15 bp, Homo sapiens
aactgcatgcaggac

SEQ ID NO: 259245 - DNA, 15 bp, Homo sapiens
gaactgcatgcagga

SEQ ID NO: 259246 - DNA, 15 bp, Homo sapiens
ggaactgcatgcagg

SEQ ID NO: 259247 - DNA, 15 bp, Homo sapiens
tggaactgcatgcag

SEQ ID NO: 259248 - DNA, 15 bp, Homo sapiens
ctggaactgcatgca

SEQ ID NO: 259249 - DNA, 15 bp, Homo sapiens
gctggaactgcatgc

SEQ ID NO: 259250 - DNA, 15 bp, Homo sapiens
ggctggaactgcatg

SEQ ID NO: 259251 - DNA, 15 bp, Homo sapiens
tggctggaactgcat

SEQ ID NO: 259252 - DNA, 15 bp, Homo sapiens
ttggctggaactgca

SEQ ID NO: 259253 - DNA, 15 bp, Homo sapiens
tttggctggaactgc

SEQ ID NO: 259254 - DNA, 15 bp, Homo sapiens
atttggctggaactg

SEQ ID NO: 259255 - DNA, 15 bp, Homo sapiens
aatttggctggaact

SEQ ID NO: 259256 - DNA, 15 bp, Homo sapiens
gaatttggctggaac

SEQ ID NO: 259257 - DNA, 15 bp, Homo sapiens
agaatttggctggaa

SEQ ID NO: 259258 - DNA, 15 bp, Homo sapiens
gagaatttggctgga

SEQ ID NO: 259259 - DNA, 15 bp, Homo sapiens
ggagaatttggctgg

SEQ ID NO: 259260 - DNA, 15 bp, Homo sapiens
aggagaatttggctg

SEQ ID NO: 259261 - DNA, 15 bp, Homo sapiens
caggagaatttggct

SEQ ID NO: 259262 - DNA, 15 bp, Homo sapiens
gcaggagaatttggc

SEQ ID NO: 259263 - DNA, 15 bp, Homo sapiens
ggcaggagaatttgg

SEQ ID NO: 259264 - DNA, 15 bp, Homo sapiens
tggcaggagaatttg

SEQ ID NO: 259265 - DNA, 15 bp, Homo sapiens
ctggcaggagaattt

SEQ ID NO: 259266 - DNA, 15 bp, Homo sapiens
actggcaggagaatt

SEQ ID NO: 259267 - DNA, 15 bp, Homo sapiens
cactggcaggagaat

SEQ ID NO: 259268 - DNA, 15 bp, Homo sapiens
tcactggcaggagaa

SEQ ID NO: 259269 - DNA, 15 bp, Homo sapiens
gtcactggcaggaga

SEQ ID NO: 259270 - DNA, 15 bp, Homo sapiens
agtcactggcaggag

SEQ ID NO: 259271 - DNA, 15 bp, Homo sapiens
aagtcactggcagga

SEQ ID NO: 259272 - DNA, 15 bp, Homo sapiens
caagtcactggcagg

SEQ ID NO: 259273 - DNA, 15 bp, Homo sapiens
ccaagtcactggcag

SEQ ID NO: 259274 - DNA, 15 bp, Homo sapiens
tccaagtcactggca

SEQ ID NO: 259275 - DNA, 15 bp, Homo sapiens
ctccaagtcactggc

SEQ ID NO: 259276 - DNA, 15 bp, Homo sapiens
cctccaagtcactgg

SEQ ID NO: 259277 - DNA, 15 bp, Homo sapiens
gcctccaagtcactg

SEQ ID NO: 259278 - DNA, 15 bp, Homo sapiens
agcctccaagtcact

SEQ ID NO: 259279 - DNA, 15 bp, Homo sapiens
cagcctccaagtcac

SEQ ID NO: 259280 - DNA, 15 bp, Homo sapiens
gcagcctccaagtca

SEQ ID NO: 259281 - DNA, 15 bp, Homo sapiens
ggcagcctccaagtc

SEQ ID NO: 259282 - DNA, 15 bp, Homo sapiens
aggcagcctccaagt

SEQ ID NO: 259283 - DNA, 15 bp, Homo sapiens
aaggcagcctccaag

SEQ ID NO: 259284 - DNA, 15 bp, Homo sapiens
caaggcagcctccaa

SEQ ID NO: 259285 - DNA, 15 bp, Homo sapiens
ccaaggcagcctcca

SEQ ID NO: 259286 - DNA, 15 bp, Homo sapiens
tccaaggcagcctcc

SEQ ID NO: 259287 - DNA, 15 bp, Homo sapiens
ttccaaggcagcctc

SEQ ID NO: 259288 - DNA, 15 bp, Homo sapiens
cttccaaggcagcct

SEQ ID NO: 259289 - DNA, 15 bp, Homo sapiens
gcttccaaggcagcc

SEQ ID NO: 259290 - DNA, 15 bp, Homo sapiens
agcttccaaggcagc

SEQ ID NO: 259291 - DNA, 15 bp, Homo sapiens
cagcttccaaggcag

SEQ ID NO: 259292 - DNA, 15 bp, Homo sapiens
gcagcttccaaggca

SEQ ID NO: 259293 - DNA, 15 bp, Homo sapiens
agcagcttccaaggc

SEQ ID NO: 259294 - DNA, 15 bp, Homo sapiens
cagcagcttccaagg

SEQ ID NO: 259295 - DNA, 15 bp, Homo sapiens
ccagcagcttccaag

SEQ ID NO: 259296 - DNA, 15 bp, Homo sapiens
cccagcagcttccaa

SEQ ID NO: 259297 - DNA, 15 bp, Homo sapiens
ccccagcagcttcca

SEQ ID NO: 259298 - DNA, 15 bp, Homo sapiens
tccccagcagcttcc

SEQ ID NO: 259299 - DNA, 15 bp, Homo sapiens
ttccccagcagcttc

SEQ ID NO: 259300 - DNA, 15 bp, Homo sapiens
cttccccagcagctt

SEQ ID NO: 259301 - DNA, 15 bp, Homo sapiens
ccttccccagcagct

SEQ ID NO: 259302 - DNA, 15 bp, Homo sapiens
gccttccccagcagc

SEQ ID NO: 259303 - DNA, 15 bp, Homo sapiens
ggccttccccagcag

SEQ ID NO: 259304 - DNA, 15 bp, Homo sapiens
aggccttccccagca

SEQ ID NO: 259305 - DNA, 15 bp, Homo sapiens
aaggccttccccagc

SEQ ID NO: 259306 - DNA, 15 bp, Homo sapiens
taaggccttccccag

SEQ ID NO: 259307 - DNA, 15 bp, Homo sapiens
ttaaggccttcccca

SEQ ID NO: 259308 - DNA, 15 bp, Homo sapiens
attaaggccttcccc

SEQ ID NO: 259309 - DNA, 15 bp, Homo sapiens
cattaaggccttccc

SEQ ID NO: 259310 - DNA, 15 bp, Homo sapiens
acattaaggccttcc

SEQ ID NO: 259311 - DNA, 15 bp, Homo sapiens
tacattaaggccttc

SEQ ID NO: 259312 - DNA, 15 bp, Homo sapiens
ttacattaaggcctt

SEQ ID NO: 259313 - DNA, 15 bp, Homo sapiens
attacattaaggcct

SEQ ID NO: 259314 - DNA, 15 bp, Homo sapiens
tattacattaaggcc

SEQ ID NO: 259315 - DNA, 15 bp, Homo sapiens
gtattacattaaggc

SEQ ID NO: 259316 - DNA, 15 bp, Homo sapiens
tgtattacattaagg

SEQ ID NO: 259317 - DNA, 15 bp, Homo sapiens
ctgtattacattaag

SEQ ID NO: 259318 - DNA, 15 bp, Homo sapiens
gctgtattacattaa

SEQ ID NO: 259319 - DNA, 15 bp, Homo sapiens
tgctgtattacatta

SEQ ID NO: 259320 - DNA, 15 bp, Homo sapiens
ctgctgtattacatt

SEQ ID NO: 259321 - DNA, 15 bp, Homo sapiens
tctgctgtattacat

SEQ ID NO: 259322 - DNA, 15 bp, Homo sapiens
gtctgctgtattaca

SEQ ID NO: 259323 - DNA, 15 bp, Homo sapiens
ggtctgctgtattac

SEQ ID NO: 259324 - DNA, 15 bp, Homo sapiens
tggtctgctgtatta

SEQ ID NO: 259325 - DNA, 15 bp, Homo sapiens
gtggtctgctgtatt

SEQ ID NO: 259326 - DNA, 15 bp, Homo sapiens
agtggtctgctgtat

SEQ ID NO: 259327 - DNA, 15 bp, Homo sapiens
tagtggtctgctgta

SEQ ID NO: 259328 - DNA, 15 bp, Homo sapiens
ctagtggtctgctgt

SEQ ID NO: 259329 - DNA, 15 bp, Homo sapiens
cctagtggtctgctg

SEQ ID NO: 259330 - DNA, 15 bp, Homo sapiens
acctagtggtctgct

SEQ ID NO: 259331 - DNA, 15 bp, Homo sapiens
tacctagtggtctgc

SEQ ID NO: 259332 - DNA, 15 bp, Homo sapiens
atacctagtggtctg

SEQ ID NO: 259333 - DNA, 15 bp, Homo sapiens
aatacctagtggtct

SEQ ID NO: 259334 - DNA, 15 bp, Homo sapiens
aaatacctagtggtc

SEQ ID NO: 259335 - DNA, 15 bp, Homo sapiens
aaaatacctagtggt

SEQ ID NO: 259336 - DNA, 15 bp, Homo sapiens
taaaatacctagtgg

SEQ ID NO: 259337 - DNA, 15 bp, Homo sapiens
ctaaaatacctagtg

SEQ ID NO: 259338 - DNA, 15 bp, Homo sapiens
actaaaatacctagt

SEQ ID NO: 259339 - DNA, 15 bp, Homo sapiens
tactaaaatacctag

SEQ ID NO: 259340 - DNA, 15 bp, Homo sapiens
gtactaaaataccta

SEQ ID NO: 259341 - DNA, 15 bp, Homo sapiens
agtactaaaatacct

SEQ ID NO: 259342 - DNA, 15 bp, Homo sapiens
gagtactaaaatacc

SEQ ID NO: 259343 - DNA, 15 bp, Homo sapiens
ggagtactaaaatac

SEQ ID NO: 259344 - DNA, 15 bp, Homo sapiens
tggagtactaaaata

SEQ ID NO: 259345 - DNA, 15 bp, Homo sapiens
gtggagtactaaaat

SEQ ID NO: 259346 - DNA, 15 bp, Homo sapiens
tgtggagtactaaaa

SEQ ID NO: 259347 - DNA, 15 bp, Homo sapiens
ttgtggagtactaaa

SEQ ID NO: 259348 - DNA, 15 bp, Homo sapiens
tttgtggagtactaa

SEQ ID NO: 259349 - DNA, 15 bp, Homo sapiens
gtttgtggagtacta

SEQ ID NO: 259350 - DNA, 15 bp, Homo sapiens
ggtttgtggagtact

SEQ ID NO: 259351 - DNA, 15 bp, Homo sapiens
tggtttgtggagtac

SEQ ID NO: 259352 - DNA, 15 bp, Homo sapiens
atggtttgtggagta

SEQ ID NO: 259353 - DNA, 15 bp, Homo sapiens
catggtttgtggagt

SEQ ID NO: 259354 - DNA, 15 bp, Homo sapiens
ccatggtttgtggag

SEQ ID NO: 259355 - DNA, 15 bp, Homo sapiens
tccatggtttgtgga

SEQ ID NO: 259356 - DNA, 15 bp, Homo sapiens
atccatggtttgtgg

SEQ ID NO: 259357 - DNA, 15 bp, Homo sapiens
aatccatggtttgtg

SEQ ID NO: 259358 - DNA, 15 bp, Homo sapiens
aaatccatggtttgt

SEQ ID NO: 259359 - DNA, 15 bp, Homo sapiens
taaatccatggtttg

SEQ ID NO: 259360 - DNA, 15 bp, Homo sapiens
ataaatccatggttt

SEQ ID NO: 259361 - DNA, 15 bp, Homo sapiens
aataaatccatggtt

SEQ ID NO: 259362 - DNA, 15 bp, Homo sapiens
gaataaatccatggt

SEQ ID NO: 259363 - DNA, 15 bp, Homo sapiens
ggaataaatccatgg

SEQ ID NO: 259364 - DNA, 15 bp, Homo sapiens
aggaataaatccatg

SEQ ID NO: 259365 - DNA, 15 bp, Homo sapiens
taggaataaatccat

SEQ ID NO: 259366 - DNA, 15 bp, Homo sapiens
ttaggaataaatcca

SEQ ID NO: 259367 - DNA, 15 bp, Homo sapiens
tttaggaataaatcc

SEQ ID NO: 259368 - DNA, 15 bp, Homo sapiens
gtttaggaataaatc

SEQ ID NO: 259369 - DNA, 15 bp, Homo sapiens
agtttaggaataaat

SEQ ID NO: 259370 - DNA, 15 bp, Homo sapiens
tagtttaggaataaa

SEQ ID NO: 259371 - DNA, 15 bp, Homo sapiens
gtagtttaggaataa

SEQ ID NO: 259372 - DNA, 15 bp, Homo sapiens
agtagtttaggaata

SEQ ID NO: 259373 - DNA, 15 bp, Homo sapiens
gagtagtttaggaat

SEQ ID NO: 259374 - DNA, 15 bp, Homo sapiens
ggagtagtttaggaa

SEQ ID NO: 259375 - DNA, 15 bp, Homo sapiens
tggagtagtttagga

SEQ ID NO: 259376 - DNA, 15 bp, Homo sapiens
atggagtagtttagg

SEQ ID NO: 259377 - DNA, 15 bp, Homo sapiens
catggagtagtttag

SEQ ID NO: 259378 - DNA, 15 bp, Homo sapiens
tcatggagtagttta

SEQ ID NO: 259379 - DNA, 15 bp, Homo sapiens
ttcatggagtagttt

SEQ ID NO: 259380 - DNA, 15 bp, Homo sapiens
gttcatggagtagtt

SEQ ID NO: 259381 - DNA, 15 bp, Homo sapiens
tgttcatggagtagt

SEQ ID NO: 259382 - DNA, 15 bp, Homo sapiens
atgttcatggagtag

SEQ ID NO: 259383 - DNA, 15 bp, Homo sapiens
catgttcatggagta

SEQ ID NO: 259384 - DNA, 15 bp, Homo sapiens
gcatgttcatggagt

SEQ ID NO: 259385 - DNA, 15 bp, Homo sapiens
tgcatgttcatggag

SEQ ID NO: 259386 - DNA, 15 bp, Homo sapiens
ttgcatgttcatgga

SEQ ID NO: 259387 - DNA, 15 bp, Homo sapiens
gttgcatgttcatgg

SEQ ID NO: 259388 - DNA, 15 bp, Homo sapiens
ggttgcatgttcatg

SEQ ID NO: 259389 - DNA, 15 bp, Homo sapiens
aggttgcatgttcat

SEQ ID NO: 259390 - DNA, 15 bp, Homo sapiens
caggttgcatgttca

SEQ ID NO: 259391 - DNA, 15 bp, Homo sapiens
tcaggttgcatgttc

SEQ ID NO: 259392 - DNA, 15 bp, Homo sapiens
ttcaggttgcatgtt

SEQ ID NO: 259393 - DNA, 15 bp, Homo sapiens
cttcaggttgcatgt

SEQ ID NO: 259394 - DNA, 15 bp, Homo sapiens
tcttcaggttgcatg

SEQ ID NO: 259395 - DNA, 15 bp, Homo sapiens
gtcttcaggttgcat

SEQ ID NO: 259396 - DNA, 15 bp, Homo sapiens
cgtcttcaggttgca

SEQ ID NO: 259397 - DNA, 15 bp, Homo sapiens
acgtcttcaggttgc

SEQ ID NO: 259398 - DNA, 15 bp, Homo sapiens
cacgtcttcaggttg

SEQ ID NO: 259399 - DNA, 15 bp, Homo sapiens
acacgtcttcaggtt

SEQ ID NO: 259400 - DNA, 15 bp, Homo sapiens
cacacgtcttcaggt

SEQ ID NO: 259401 - DNA, 15 bp, Homo sapiens
tcacacgtcttcagg

SEQ ID NO: 259402 - DNA, 15 bp, Homo sapiens
ttcacacgtcttcag

SEQ ID NO: 259403 - DNA, 15 bp, Homo sapiens
cttcacacgtcttca

SEQ ID NO: 259404 - DNA, 15 bp, Homo sapiens
tcttcacacgtcttc

SEQ ID NO: 259405 - DNA, 15 bp, Homo sapiens
atcttcacacgtctt

SEQ ID NO: 259406 - DNA, 15 bp, Homo sapiens
catcttcacacgtct

SEQ ID NO: 259407 - DNA, 15 bp, Homo sapiens
tcatcttcacacgtc

SEQ ID NO: 259408 - DNA, 15 bp, Homo sapiens
ctcatcttcacacgt

SEQ ID NO: 259409 - DNA, 15 bp, Homo sapiens
actcatcttcacacg

SEQ ID NO: 259410 - DNA, 15 bp, Homo sapiens
cactcatcttcacac

SEQ ID NO: 259411 - DNA, 15 bp, Homo sapiens
tcactcatcttcaca

SEQ ID NO: 259412 - DNA, 15 bp, Homo sapiens
ttcactcatcttcac

SEQ ID NO: 259413 - DNA, 15 bp, Homo sapiens
tttcactcatcttca

SEQ ID NO: 259414 - DNA, 15 bp, Homo sapiens
gtttcactcatcttc

SEQ ID NO: 259415 - DNA, 15 bp, Homo sapiens
agtttcactcatctt

SEQ ID NO: 259416 - DNA, 15 bp, Homo sapiens
cagtttcactcatct

SEQ ID NO: 259417 - DNA, 15 bp, Homo sapiens
tcagtttcactcatc

SEQ ID NO: 259418 - DNA, 15 bp, Homo sapiens
atcagtttcactcat

SEQ ID NO: 259419 - DNA, 15 bp, Homo sapiens
tatcagtttcactca

SEQ ID NO: 259420 - DNA, 15 bp, Homo sapiens
atatcagtttcactc

SEQ ID NO: 259421 - DNA, 15 bp, Homo sapiens
aatatcagtttcact

SEQ ID NO: 259422 - DNA, 15 bp, Homo sapiens
taatatcagtttcac

SEQ ID NO: 259423 - DNA, 15 bp, Homo sapiens
gtaatatcagtttca

SEQ ID NO: 259424 - DNA, 15 bp, Homo sapiens
agtaatatcagtttc

SEQ ID NO: 259425 - DNA, 15 bp, Homo sapiens
gagtaatatcagttt

SEQ ID NO: 259426 - DNA, 15 bp, Homo sapiens
tgagtaatatcagtt

SEQ ID NO: 259427 - DNA, 15 bp, Homo sapiens
ttgagtaatatcagt

SEQ ID NO: 259428 - DNA, 15 bp, Homo sapiens
attgagtaatatcag

SEQ ID NO: 259429 - DNA, 15 bp, Homo sapiens
aattgagtaatatca

SEQ ID NO: 259430 - DNA, 15 bp, Homo sapiens
aaattgagtaatatc

SEQ ID NO: 259431 - DNA, 15 bp, Homo sapiens
gaaattgagtaatat

SEQ ID NO: 259432 - DNA, 15 bp, Homo sapiens
tgaaattgagtaata

SEQ ID NO: 259433 - DNA, 15 bp, Homo sapiens
ctgaaattgagtaat

SEQ ID NO: 259434 - DNA, 15 bp, Homo sapiens
actgaaattgagtaa

SEQ ID NO: 259435 - DNA, 15 bp, Homo sapiens
gactgaaattgagta

SEQ ID NO: 259436 - DNA, 15 bp, Homo sapiens
agactgaaattgagt

SEQ ID NO: 259437 - DNA, 15 bp, Homo sapiens
cagactgaaattgag

SEQ ID NO: 259438 - DNA, 15 bp, Homo sapiens
ccagactgaaattga

SEQ ID NO: 259439 - DNA, 15 bp, Homo sapiens
tccagactgaaattg

SEQ ID NO: 259440 - DNA, 15 bp, Homo sapiens
gtccagactgaaatt

SEQ ID NO: 259441 - DNA, 15 bp, Homo sapiens
tgtccagactgaaat

SEQ ID NO: 259442 - DNA, 15 bp, Homo sapiens
gtgtccagactgaaa

SEQ ID NO: 259443 - DNA, 15 bp, Homo sapiens
agtgtccagactgaa

SEQ ID NO: 259444 - DNA, 15 bp, Homo sapiens
cagtgtccagactga

SEQ ID NO: 259445 - DNA, 15 bp, Homo sapiens
ccagtgtccagactg

SEQ ID NO: 259446 - DNA, 15 bp, Homo sapiens
gccagtgtccagact

SEQ ID NO: 259447 - DNA, 15 bp, Homo sapiens
agccagtgtccagac

SEQ ID NO: 259448 - DNA, 15 bp, Homo sapiens
cagccagtgtccaga

SEQ ID NO: 259449 - DNA, 15 bp, Homo sapiens
tcagccagtgtccag

SEQ ID NO: 259450 - DNA, 15 bp, Homo sapiens
ttcagccagtgtcca

SEQ ID NO: 259451 - DNA, 15 bp, Homo sapiens
attcagccagtgtcc

SEQ ID NO: 259452 - DNA, 15 bp, Homo sapiens
gattcagccagtgtc

SEQ ID NO: 259453 - DNA, 15 bp, Homo sapiens
ggattcagccagtgt

SEQ ID NO: 259454 - DNA, 15 bp, Homo sapiens
aggattcagccagtg

SEQ ID NO: 259455 - DNA, 15 bp, Homo sapiens
aaggattcagccagt

SEQ ID NO: 259456 - DNA, 15 bp, Homo sapiens
gaaggattcagccag

SEQ ID NO: 259457 - DNA, 15 bp, Homo sapiens
ggaaggattcagcca

SEQ ID NO: 259458 - DNA, 15 bp, Homo sapiens
aggaaggattcagcc

SEQ ID NO: 259459 - DNA, 15 bp, Homo sapiens
gaggaaggattcagc

SEQ ID NO: 259460 - DNA, 15 bp, Homo sapiens
agaggaaggattcag

SEQ ID NO: 259461 - DNA, 15 bp, Homo sapiens
gagaggaaggattca

SEQ ID NO: 259462 - DNA, 15 bp, Homo sapiens
ggagaggaaggattc

SEQ ID NO: 259463 - DNA, 15 bp, Homo sapiens
gggagaggaaggatt

SEQ ID NO: 259464 - DNA, 15 bp, Homo sapiens
ggggagaggaaggat

SEQ ID NO: 259465 - DNA, 15 bp, Homo sapiens
aggggagaggaagga

SEQ ID NO: 259466 - DNA, 15 bp, Homo sapiens
gaggggagaggaagg

SEQ ID NO: 259467 - DNA, 15 bp, Homo sapiens
ggaggggagaggaag

SEQ ID NO: 259468 - DNA, 15 bp, Homo sapiens
aggaggggagaggaa

SEQ ID NO: 259469 - DNA, 15 bp, Homo sapiens
gaggaggggagagga

SEQ ID NO: 259470 - DNA, 15 bp, Homo sapiens
ggaggaggggagagg

SEQ ID NO: 259471 - DNA, 15 bp, Homo sapiens
gggaggaggggagag

SEQ ID NO: 259472 - DNA, 15 bp, Homo sapiens
tgggaggaggggaga

SEQ ID NO: 259473 - DNA, 15 bp, Homo sapiens
atgggaggaggggag

SEQ ID NO: 259474 - DNA, 15 bp, Homo sapiens
gatgggaggagggga

SEQ ID NO: 259475 - DNA, 15 bp, Homo sapiens
ggatgggaggagggg

SEQ ID NO: 259476 - DNA, 15 bp, Homo sapiens
gggatgggaggaggg

SEQ ID NO: 259477 - DNA, 15 bp, Homo sapiens
agggatgggaggagg

SEQ ID NO: 259478 - DNA, 15 bp, Homo sapiens
gagggatgggaggag

SEQ ID NO: 259479 - DNA, 15 bp, Homo sapiens
tgagggatgggagga

SEQ ID NO: 259480 - DNA, 15 bp, Homo sapiens
atgagggatgggagg

SEQ ID NO: 259481 - DNA, 15 bp, Homo sapiens
tatgagggatgggag

SEQ ID NO: 259482 - DNA, 15 bp, Homo sapiens
ctatgagggatggga

SEQ ID NO: 259483 - DNA, 15 bp, Homo sapiens
cctatgagggatggg

SEQ ID NO: 259484 - DNA, 15 bp, Homo sapiens
tcctatgagggatgg

SEQ ID NO: 259485 - DNA, 15 bp, Homo sapiens
atcctatgagggatg

SEQ ID NO: 259486 - DNA, 15 bp, Homo sapiens
aatcctatgagggat

SEQ ID NO: 259487 - DNA, 15 bp, Homo sapiens
aaatcctatgaggga

SEQ ID NO: 259488 - DNA, 15 bp, Homo sapiens
aaaatcctatgaggg

SEQ ID NO: 259489 - DNA, 15 bp, Homo sapiens
aaaaatcctatgagg

SEQ ID NO: 259490 - DNA, 15 bp, Homo sapiens
gaaaaatcctatgag

SEQ ID NO: 259491 - DNA, 15 bp, Homo sapiens
agaaaaatcctatga

SEQ ID NO: 259492 - DNA, 15 bp, Homo sapiens
aagaaaaatcctatg

SEQ ID NO: 259493 - DNA, 15 bp, Homo sapiens
caagaaaaatcctat

SEQ ID NO: 259494 - DNA, 15 bp, Homo sapiens
acaagaaaaatccta

SEQ ID NO: 259495 - DNA, 15 bp, Homo sapiens
aacaagaaaaatcct

SEQ ID NO: 259496 - DNA, 15 bp, Homo sapiens
aaacaagaaaaatcc

SEQ ID NO: 259497 - DNA, 15 bp, Homo sapiens
caaacaagaaaaatc

SEQ ID NO: 259498 - DNA, 15 bp, Homo sapiens
ccaaacaagaaaaat

SEQ ID NO: 259499 - DNA, 15 bp, Homo sapiens
tccaaacaagaaaaa

SEQ ID NO: 259500 - DNA, 15 bp, Homo sapiens
ttccaaacaagaaaa

SEQ ID NO: 259501 - DNA, 15 bp, Homo sapiens
tttccaaacaagaaa

SEQ ID NO: 259502 - DNA, 15 bp, Homo sapiens
gtttccaaacaagaa

SEQ ID NO: 259503 - DNA, 15 bp, Homo sapiens
ggtttccaaacaaga

SEQ ID NO: 259504 - DNA, 15 bp, Homo sapiens
tggtttccaaacaag

SEQ ID NO: 259505 - DNA, 15 bp, Homo sapiens
gtggtttccaaacaa

SEQ ID NO: 259506 - DNA, 15 bp, Homo sapiens
cgtggtttccaaaca

SEQ ID NO: 259507 - DNA, 15 bp, Homo sapiens
acgtggtttccaaac

SEQ ID NO: 259508 - DNA, 15 bp, Homo sapiens
cacgtggtttccaaa

SEQ ID NO: 259509 - DNA, 15 bp, Homo sapiens
acacgtggtttccaa

SEQ ID NO: 259510 - DNA, 15 bp, Homo sapiens
aacacgtggtttcca

SEQ ID NO: 259511 - DNA, 15 bp, Homo sapiens
gaacacgtggtttcc

SEQ ID NO: 259512 - DNA, 15 bp, Homo sapiens
agaacacgtggtttc

SEQ ID NO: 259513 - DNA, 15 bp, Homo sapiens
cagaacacgtggttt

SEQ ID NO: 259514 - DNA, 15 bp, Homo sapiens
ccagaacacgtggtt

SEQ ID NO: 259515 - DNA, 15 bp, Homo sapiens
accagaacacgtggt

SEQ ID NO: 259516 - DNA, 15 bp, Homo sapiens
aaccagaacacgtgg

SEQ ID NO: 259517 - DNA, 15 bp, Homo sapiens
aaaccagaacacgtg

SEQ ID NO: 259518 - DNA, 15 bp, Homo sapiens
gaaaccagaacacgt

SEQ ID NO: 259519 - DNA, 15 bp, Homo sapiens
ggaaaccagaacacg

SEQ ID NO: 259520 - DNA, 15 bp, Homo sapiens
tggaaaccagaacac

SEQ ID NO: 259521 - DNA, 15 bp, Homo sapiens
atggaaaccagaaca

SEQ ID NO: 259522 - DNA, 15 bp, Homo sapiens
catggaaaccagaac

SEQ ID NO: 259523 - DNA, 15 bp, Homo sapiens
tcatggaaaccagaa

SEQ ID NO: 259524 - DNA, 15 bp, Homo sapiens
atcatggaaaccaga

SEQ ID NO: 259525 - DNA, 15 bp, Homo sapiens
catcatggaaaccag

SEQ ID NO: 259526 - DNA, 15 bp, Homo sapiens
gcatcatggaaacca

SEQ ID NO: 259527 - DNA, 15 bp, Homo sapiens
ggcatcatggaaacc

SEQ ID NO: 259528 - DNA, 15 bp, Homo sapiens
gggcatcatggaaac

SEQ ID NO: 259529 - DNA, 15 bp, Homo sapiens
tgggcatcatggaaa

SEQ ID NO: 259530 - DNA, 15 bp, Homo sapiens
atgggcatcatggaa

SEQ ID NO: 259531 - DNA, 15 bp, Homo sapiens
gatgggcatcatgga

SEQ ID NO: 259532 - DNA, 15 bp, Homo sapiens
ggatgggcatcatgg

SEQ ID NO: 259533 - DNA, 15 bp, Homo sapiens
tggatgggcatcatg

SEQ ID NO: 259534 - DNA, 15 bp, Homo sapiens
ctggatgggcatcat

SEQ ID NO: 259535 - DNA, 15 bp, Homo sapiens
actggatgggcatca

SEQ ID NO: 259536 - DNA, 15 bp, Homo sapiens
gactggatgggcatc

SEQ ID NO: 259537 - DNA, 15 bp, Homo sapiens
tgactggatgggcat

SEQ ID NO: 259538 - DNA, 15 bp, Homo sapiens
ttgactggatgggca

SEQ ID NO: 259539 - DNA, 15 bp, Homo sapiens
attgactggatgggc

SEQ ID NO: 259540 - DNA, 15 bp, Homo sapiens
gattgactggatggg

SEQ ID NO: 259541 - DNA, 15 bp, Homo sapiens
agattgactggatgg

SEQ ID NO: 259542 - DNA, 15 bp, Homo sapiens
gagattgactggatg

SEQ ID NO: 259543 - DNA, 15 bp, Homo sapiens
tgagattgactggat

SEQ ID NO: 259544 - DNA, 15 bp, Homo sapiens
atgagattgactgga

SEQ ID NO: 259545 - DNA, 15 bp, Homo sapiens
catgagattgactgg

SEQ ID NO: 259546 - DNA, 15 bp, Homo sapiens
ccatgagattgactg

SEQ ID NO: 259547 - DNA, 15 bp, Homo sapiens
tccatgagattgact

SEQ ID NO: 259548 - DNA, 15 bp, Homo sapiens
ctccatgagattgac

SEQ ID NO: 259549 - DNA, 15 bp, Homo sapiens
cctccatgagattga

SEQ ID NO: 259550 - DNA, 15 bp, Homo sapiens
ccctccatgagattg

SEQ ID NO: 259551 - DNA, 15 bp, Homo sapiens
accctccatgagatt

SEQ ID NO: 259552 - DNA, 15 bp, Homo sapiens
caccctccatgagat

SEQ ID NO: 259553 - DNA, 15 bp, Homo sapiens
ccaccctccatgaga

SEQ ID NO: 259554 - DNA, 15 bp, Homo sapiens
tccaccctccatgag

SEQ ID NO: 259555 - DNA, 15 bp, Homo sapiens
ctccaccctccatga

SEQ ID NO: 259556 - DNA, 15 bp, Homo sapiens
actccaccctccatg

SEQ ID NO: 259557 - DNA, 15 bp, Homo sapiens
tactccaccctccat

SEQ ID NO: 259558 - DNA, 15 bp, Homo sapiens
atactccaccctcca

SEQ ID NO: 259559 - DNA, 15 bp, Homo sapiens
catactccaccctcc

SEQ ID NO: 259560 - DNA, 15 bp, Homo sapiens
ccatactccaccctc

SEQ ID NO: 259561 - DNA, 15 bp, Homo sapiens
accatactccaccct

SEQ ID NO: 259562 - DNA, 15 bp, Homo sapiens
aaccatactccaccc

SEQ ID NO: 259563 - DNA, 15 bp, Homo sapiens
caaccatactccacc

SEQ ID NO: 259564 - DNA, 15 bp, Homo sapiens
ccaaccatactccac

SEQ ID NO: 259565 - DNA, 15 bp, Homo sapiens
tccaaccatactcca

SEQ ID NO: 259566 - DNA, 15 bp, Homo sapiens
ctccaaccatactcc

SEQ ID NO: 259567 - DNA, 15 bp, Homo sapiens
gctccaaccatactc

SEQ ID NO: 259568 - DNA, 15 bp, Homo sapiens
ggctccaaccatact

SEQ ID NO: 259569 - DNA, 15 bp, Homo sapiens
aggctccaaccatac

SEQ ID NO: 259570 - DNA, 15 bp, Homo sapiens
taggctccaaccata

SEQ ID NO: 259571 - DNA, 15 bp, Homo sapiens
ttaggctccaaccat

SEQ ID NO: 259572 - DNA, 15 bp, Homo sapiens
attaggctccaacca

SEQ ID NO: 259573 - DNA, 15 bp, Homo sapiens
gattaggctccaacc

SEQ ID NO: 259574 - DNA, 15 bp, Homo sapiens
tgattaggctccaac

SEQ ID NO: 259575 - DNA, 15 bp, Homo sapiens
ctgattaggctccaa

SEQ ID NO: 259576 - DNA, 15 bp, Homo sapiens
gctgattaggctcca

SEQ ID NO: 259577 - DNA, 15 bp, Homo sapiens
cgctgattaggctcc

SEQ ID NO: 259578 - DNA, 15 bp, Homo sapiens
tcgctgattaggctc

SEQ ID NO: 259579 - DNA, 15 bp, Homo sapiens
ctcgctgattaggct

SEQ ID NO: 259580 - DNA, 15 bp, Homo sapiens
cctcgctgattaggc

SEQ ID NO: 259581 - DNA, 15 bp, Homo sapiens
acctcgctgattagg

SEQ ID NO: 259582 - DNA, 15 bp, Homo sapiens
aacctcgctgattag

SEQ ID NO: 259583 - DNA, 15 bp, Homo sapiens
aaacctcgctgatta

SEQ ID NO: 259584 - DNA, 15 bp, Homo sapiens
gaaacctcgctgatt

SEQ ID NO: 259585 - DNA, 15 bp, Homo sapiens
agaaacctcgctgat

SEQ ID NO: 259586 - DNA, 15 bp, Homo sapiens
aagaaacctcgctga

SEQ ID NO: 259587 - DNA, 15 bp, Homo sapiens
aaagaaacctcgctg

SEQ ID NO: 259588 - DNA, 15 bp, Homo sapiens
aaaagaaacctcgct

SEQ ID NO: 259589 - DNA, 15 bp, Homo sapiens
aaaaagaaacctcgc

SEQ ID NO: 259590 - DNA, 15 bp, Homo sapiens
aaaaaagaaacctcg

SEQ ID NO: 259591 - DNA, 15 bp, Homo sapiens
aaaaaaagaaacctc

SEQ ID NO: 259592 - DNA, 15 bp, Homo sapiens
aaaaaaaagaaacct

SEQ ID NO: 259593 - DNA, 15 bp, Homo sapiens
aaaaaaaaagaaacc

SEQ ID NO: 259594 - DNA, 15 bp, Homo sapiens
gaaaaaaaaaaaaaa

SEQ ID NO: 259595 - DNA, 15 bp, Homo sapiens
ggaaaaaaaaaaaaa

SEQ ID NO: 259596 - DNA, 15 bp, Homo sapiens
aggaaaaaaaaaaaa

SEQ ID NO: 259597 - DNA, 15 bp, Homo sapiens
taggaaaaaaaaaaa

SEQ ID NO: 259598 - DNA, 15 bp, Homo sapiens
ataggaaaaaaaaaa

SEQ ID NO: 259599 - DNA, 15 bp, Homo sapiens
aataggaaaaaaaaa

SEQ ID NO: 259600 - DNA, 15 bp, Homo sapiens
caataggaaaaaaaa

SEQ ID NO: 259601 - DNA, 15 bp, Homo sapiens
ccaataggaaaaaaa

SEQ ID NO: 259602 - DNA, 15 bp, Homo sapiens
tccaataggaaaaaa

SEQ ID NO: 259603 - DNA, 15 bp, Homo sapiens
atccaataggaaaaa

SEQ ID NO: 259604 - DNA, 15 bp, Homo sapiens
gatccaataggaaaa

SEQ ID NO: 259605 - DNA, 15 bp, Homo sapiens
agatccaataggaaa

SEQ ID NO: 259606 - DNA, 15 bp, Homo sapiens
aagatccaataggaa

SEQ ID NO: 259607 - DNA, 15 bp, Homo sapiens
gaagatccaatagga

SEQ ID NO: 259608 - DNA, 15 bp, Homo sapiens
ggaagatccaatagg

SEQ ID NO: 259609 - DNA, 15 bp, Homo sapiens
aggaagatccaatag

SEQ ID NO: 259610 - DNA, 15 bp, Homo sapiens
caggaagatccaata

SEQ ID NO: 259611 - DNA, 15 bp, Homo sapiens
ccaggaagatccaat

SEQ ID NO: 259612 - DNA, 15 bp, Homo sapiens
tccaggaagatccaa

SEQ ID NO: 259613 - DNA, 15 bp, Homo sapiens
ctccaggaagatcca

SEQ ID NO: 259614 - DNA, 15 bp, Homo sapiens
tctccaggaagatcc

SEQ ID NO: 259615 - DNA, 15 bp, Homo sapiens
ttctccaggaagatc

SEQ ID NO: 259616 - DNA, 15 bp, Homo sapiens
tttctccaggaagat

SEQ ID NO: 259617 - DNA, 15 bp, Homo sapiens
ttttctccaggaaga

SEQ ID NO: 259618 - DNA, 15 bp, Homo sapiens
attttctccaggaag

SEQ ID NO: 259619 - DNA, 15 bp, Homo sapiens
tattttctccaggaa

SEQ ID NO: 259620 - DNA, 15 bp, Homo sapiens
gtattttctccagga

SEQ ID NO: 259621 - DNA, 15 bp, Homo sapiens
agtattttctccagg

SEQ ID NO: 259622 - DNA, 15 bp, Homo sapiens
aagtattttctccag

SEQ ID NO: 259623 - DNA, 15 bp, Homo sapiens
aaagtattttctcca

SEQ ID NO: 259624 - DNA, 15 bp, Homo sapiens
aaaagtattttctcc

SEQ ID NO: 259625 - DNA, 15 bp, Homo sapiens
aaaaagtattttctc

SEQ ID NO: 259626 - DNA, 15 bp, Homo sapiens
aaaaaagtattttct

SEQ ID NO: 259627 - DNA, 15 bp, Homo sapiens
aaaaaaagtattttc

SEQ ID NO: 259628 - DNA, 15 bp, Homo sapiens
aaaaaaaagtatttt

SEQ ID NO: 259629 - DNA, 15 bp, Homo sapiens
aaaaaaaaagtattt

SEQ ID NO: 259630 - DNA, 15 bp, Homo sapiens
aaaaaaaaaagtatt

SEQ ID NO: 259631 - DNA, 15 bp, Homo sapiens
aaaaaaaaaaagtat

SEQ ID NO: 259632 - DNA, 15 bp, Homo sapiens
aaaaaaaaaaaagta

SEQ ID NO: 259633 - DNA, 15 bp, Homo sapiens
aaaaaaaaaaaaagt

SEQ ID NO: 259634 - DNA, 15 bp, Homo sapiens
ttcaaaaaaaaaaaa

SEQ ID NO: 259635 - DNA, 15 bp, Homo sapiens
tttcaaaaaaaaaaa

SEQ ID NO: 259636 - DNA, 15 bp, Homo sapiens
gtttcaaaaaaaaaa

SEQ ID NO: 259637 - DNA, 15 bp, Homo sapiens
cgtttcaaaaaaaaa

SEQ ID NO: 259638 - DNA, 15 bp, Homo sapiens
ccgtttcaaaaaaaa

SEQ ID NO: 259639 - DNA, 15 bp, Homo sapiens
tccgtttcaaaaaaa

SEQ ID NO: 259640 - DNA, 15 bp, Homo sapiens
ctccgtttcaaaaaa

SEQ ID NO: 259641 - DNA, 15 bp, Homo sapiens
actccgtttcaaaaa

SEQ ID NO: 259642 - DNA, 15 bp, Homo sapiens
gactccgtttcaaaa

SEQ ID NO: 259643 - DNA, 15 bp, Homo sapiens
agactccgtttcaaa

SEQ ID NO: 259644 - DNA, 15 bp, Homo sapiens
aagactccgtttcaa

SEQ ID NO: 259645 - DNA, 15 bp, Homo sapiens
caagactccgtttca

SEQ ID NO: 259646 - DNA, 15 bp, Homo sapiens
gcaagactccgtttc

SEQ ID NO: 259647 - DNA, 15 bp, Homo sapiens
agcaagactccgttt

SEQ ID NO: 259648 - DNA, 15 bp, Homo sapiens
gagcaagactccgtt

SEQ ID NO: 259649 - DNA, 15 bp, Homo sapiens
agagcaagactccgt

SEQ ID NO: 259650 - DNA, 15 bp, Homo sapiens
cagagcaagactccg

SEQ ID NO: 259651 - DNA, 15 bp, Homo sapiens
acagagcaagactcc

SEQ ID NO: 259652 - DNA, 15 bp, Homo sapiens
gacagagcaagactc

SEQ ID NO: 259653 - DNA, 15 bp, Homo sapiens
cgacagagcaagact

SEQ ID NO: 259654 - DNA, 15 bp, Homo sapiens
gcgacagagcaagac

SEQ ID NO: 259655 - DNA, 15 bp, Homo sapiens
ggcgacagagcaaga

SEQ ID NO: 259656 - DNA, 15 bp, Homo sapiens
gggcgacagagcaag

SEQ ID NO: 259657 - DNA, 15 bp, Homo sapiens
tgggcgacagagcaa

SEQ ID NO: 259658 - DNA, 15 bp, Homo sapiens
ctgggcgacagagca

SEQ ID NO: 259659 - DNA, 15 bp, Homo sapiens
cctgggcgacagagc

SEQ ID NO: 259660 - DNA, 15 bp, Homo sapiens
agcctgggcgacaga

SEQ ID NO: 259661 - DNA, 15 bp, Homo sapiens
cagcctgggcgacag

SEQ ID NO: 259662 - DNA, 15 bp, Homo sapiens
ccagcctgggcgaca

SEQ ID NO: 259663 - DNA, 15 bp, Homo sapiens
tccagcctgggcgac

SEQ ID NO: 259664 - DNA, 15 bp, Homo sapiens
ctccagcctgggcga

SEQ ID NO: 259665 - DNA, 15 bp, Homo sapiens
actccagcctgggcg

SEQ ID NO: 259666 - DNA, 15 bp, Homo sapiens
cactccagcctgggc

SEQ ID NO: 259667 - DNA, 15 bp, Homo sapiens
gcgccactgcactcc

SEQ ID NO: 259668 - DNA, 15 bp, Homo sapiens
cgcgccactgcactc

SEQ ID NO: 259669 - DNA, 15 bp, Homo sapiens
ccgcgccactgcact

SEQ ID NO: 259670 - DNA, 15 bp, Homo sapiens
accgcgccactgcac

SEQ ID NO: 259671 - DNA, 15 bp, Homo sapiens
gaccgcgccactgca

SEQ ID NO: 259672 - DNA, 15 bp, Homo sapiens
agaccgcgccactgc

SEQ ID NO: 259673 - DNA, 15 bp, Homo sapiens
aagaccgcgccactg

SEQ ID NO: 259674 - DNA, 15 bp, Homo sapiens
caagaccgcgccact

SEQ ID NO: 259675 - DNA, 15 bp, Homo sapiens
ccaagaccgcgccac

SEQ ID NO: 259676 - DNA, 15 bp, Homo sapiens
gccaagaccgcgcca

SEQ ID NO: 259677 - DNA, 15 bp, Homo sapiens
agccaagaccgcgcc

SEQ ID NO: 259678 - DNA, 15 bp, Homo sapiens
gagccaagaccgcgc

SEQ ID NO: 259679 - DNA, 15 bp, Homo sapiens
tgagccaagaccgcg

SEQ ID NO: 259680 - DNA, 15 bp, Homo sapiens
gtgagccaagaccgc

SEQ ID NO: 259681 - DNA, 15 bp, Homo sapiens
agtgagccaagaccg

SEQ ID NO: 259682 - DNA, 15 bp, Homo sapiens
cagtgagccaagacc

SEQ ID NO: 259683 - DNA, 15 bp, Homo sapiens
gcagtgagccaagac

SEQ ID NO: 259684 - DNA, 15 bp, Homo sapiens
cttgcagtgagccaa

SEQ ID NO: 259685 - DNA, 15 bp, Homo sapiens
gcttgcagtgagcca

SEQ ID NO: 259686 - DNA, 15 bp, Homo sapiens
agcttgcagtgagcc

SEQ ID NO: 259687 - DNA, 15 bp, Homo sapiens
gagcttgcagtgagc

SEQ ID NO: 259688 - DNA, 15 bp, Homo sapiens
ggagcttgcagtgag

SEQ ID NO: 259689 - DNA, 15 bp, Homo sapiens
cggagcttgcagtga

SEQ ID NO: 259690 - DNA, 15 bp, Homo sapiens
acggagcttgcagtg

SEQ ID NO: 259691 - DNA, 15 bp, Homo sapiens
gacggagcttgcagt

SEQ ID NO: 259692 - DNA, 15 bp, Homo sapiens
agacggagcttgcag

SEQ ID NO: 259693 - DNA, 15 bp, Homo sapiens
gagacggagcttgca

SEQ ID NO: 259694 - DNA, 15 bp, Homo sapiens
ggagacggagcttgc

SEQ ID NO: 259695 - DNA, 15 bp, Homo sapiens
gggagacggagcttg

SEQ ID NO: 259696 - DNA, 15 bp, Homo sapiens
cgggagacggagctt

SEQ ID NO: 259697 - DNA, 15 bp, Homo sapiens
ccgggagacggagct

SEQ ID NO: 259698 - DNA, 15 bp, Homo sapiens
cccgggagacggagc

SEQ ID NO: 259699 - DNA, 15 bp, Homo sapiens
acccgggagacggag

SEQ ID NO: 259700 - DNA, 15 bp, Homo sapiens
aacccgggagacgga

SEQ ID NO: 259701 - DNA, 15 bp, Homo sapiens
gaacccgggagacgg

SEQ ID NO: 259702 - DNA, 15 bp, Homo sapiens
tgaacccgggagacg

SEQ ID NO: 259703 - DNA, 15 bp, Homo sapiens
gtgaacccgggagac

SEQ ID NO: 259704 - DNA, 15 bp, Homo sapiens
cgtgaacccgggaga

SEQ ID NO: 259705 - DNA, 15 bp, Homo sapiens
gcgtgaacccgggag

SEQ ID NO: 259706 - DNA, 15 bp, Homo sapiens
ggcgtgaacccggga

SEQ ID NO: 259707 - DNA, 15 bp, Homo sapiens
tggcgtgaacccggg

SEQ ID NO: 259708 - DNA, 15 bp, Homo sapiens
atggcgtgaacccgg

SEQ ID NO: 259709 - DNA, 15 bp, Homo sapiens
aatggcgtgaacccg

SEQ ID NO: 259710 - DNA, 15 bp, Homo sapiens
gaatggcgtgaaccc

SEQ ID NO: 259711 - DNA, 15 bp, Homo sapiens
agaatggcgtgaacc

SEQ ID NO: 259712 - DNA, 15 bp, Homo sapiens
gagaatggcgtgaac

SEQ ID NO: 259713 - DNA, 15 bp, Homo sapiens
ggagaatggcgtgaa

SEQ ID NO: 259714 - DNA, 15 bp, Homo sapiens
aggagaatggcgtga

SEQ ID NO: 259715 - DNA, 15 bp, Homo sapiens
caggagaatggcgtg

SEQ ID NO: 259716 - DNA, 15 bp, Homo sapiens
gcaggagaatggcgt

SEQ ID NO: 259717 - DNA, 15 bp, Homo sapiens
ggcaggagaatggcg

SEQ ID NO: 259718 - DNA, 15 bp, Homo sapiens
aggcaggagaatggc

SEQ ID NO: 259719 - DNA, 15 bp, Homo sapiens
gaggcaggagaatgg

SEQ ID NO: 259720 - DNA, 15 bp, Homo sapiens
tgaggcaggagaatg

SEQ ID NO: 259721 - DNA, 15 bp, Homo sapiens
cgggaggctgaggca

SEQ ID NO: 259722 - DNA, 15 bp, Homo sapiens
tcgggaggctgaggc

SEQ ID NO: 259723 - DNA, 15 bp, Homo sapiens
ctcgggaggctgagg

SEQ ID NO: 259724 - DNA, 15 bp, Homo sapiens
gctcgggaggctgag

SEQ ID NO: 259725 - DNA, 15 bp, Homo sapiens
tgctcgggaggctga

SEQ ID NO: 259726 - DNA, 15 bp, Homo sapiens
ctgctcgggaggctg

SEQ ID NO: 259727 - DNA, 15 bp, Homo sapiens
gctgctcgggaggct

SEQ ID NO: 259728 - DNA, 15 bp, Homo sapiens
agctgctcgggaggc

SEQ ID NO: 259729 - DNA, 15 bp, Homo sapiens
cagctgctcgggagg

SEQ ID NO: 259730 - DNA, 15 bp, Homo sapiens
ccagctgctcgggag

SEQ ID NO: 259731 - DNA, 15 bp, Homo sapiens
cccagctgctcggga

SEQ ID NO: 259732 - DNA, 15 bp, Homo sapiens
tcccagctgctcggg

SEQ ID NO: 259733 - DNA, 15 bp, Homo sapiens
gtcccagctgctcgg

SEQ ID NO: 259734 - DNA, 15 bp, Homo sapiens
agtcccagctgctcg

SEQ ID NO: 259735 - DNA, 15 bp, Homo sapiens
tagtcccagctgctc

SEQ ID NO: 259736 - DNA, 15 bp, Homo sapiens
gtagtcccagctgct

SEQ ID NO: 259737 - DNA, 15 bp, Homo sapiens
tgtagtcccagctgc

SEQ ID NO: 259738 - DNA, 15 bp, Homo sapiens
ctgtagtcccagctg

SEQ ID NO: 259739 - DNA, 15 bp, Homo sapiens
cctgtagtcccagct

SEQ ID NO: 259740 - DNA, 15 bp, Homo sapiens
gcctgtagtcccagc

SEQ ID NO: 259741 - DNA, 15 bp, Homo sapiens
cgcctgtagtcccag

SEQ ID NO: 259742 - DNA, 15 bp, Homo sapiens
gcgcctgtagtccca

SEQ ID NO: 259743 - DNA, 15 bp, Homo sapiens
ggcgcctgtagtccc

SEQ ID NO: 259744 - DNA, 15 bp, Homo sapiens
gggcgcctgtagtcc

SEQ ID NO: 259745 - DNA, 15 bp, Homo sapiens
cgggcgcctgtagtc

SEQ ID NO: 259746 - DNA, 15 bp, Homo sapiens
gcgggcgcctgtagt

SEQ ID NO: 259747 - DNA, 15 bp, Homo sapiens
ggcgggcgcctgtag

SEQ ID NO: 259748 - DNA, 15 bp, Homo sapiens
ggtggcgggcgcctg

SEQ ID NO: 259749 - DNA, 15 bp, Homo sapiens
aggtggcgggcgcct

SEQ ID NO: 259750 - DNA, 15 bp, Homo sapiens
gaggtggcgggcgcc

SEQ ID NO: 259751 - DNA, 15 bp, Homo sapiens
cgaggtggcgggcgc

SEQ ID NO: 259752 - DNA, 15 bp, Homo sapiens
gcgaggtggcgggcg

SEQ ID NO: 259753 - DNA, 15 bp, Homo sapiens
ggcgaggtggcgggc

SEQ ID NO: 259754 - DNA, 15 bp, Homo sapiens
gggcgaggtggcggg

SEQ ID NO: 259755 - DNA, 15 bp, Homo sapiens
cgggcgaggtggcgg

SEQ ID NO: 259756 - DNA, 15 bp, Homo sapiens
ccgggcgaggtggcg

SEQ ID NO: 259757 - DNA, 15 bp, Homo sapiens
gccgggcgaggtggc

SEQ ID NO: 259758 - DNA, 15 bp, Homo sapiens
agccgggcgaggtgg

SEQ ID NO: 259759 - DNA, 15 bp, Homo sapiens
tagccgggcgaggtg

SEQ ID NO: 259760 - DNA, 15 bp, Homo sapiens
ttagccgggcgaggt

SEQ ID NO: 259761 - DNA, 15 bp, Homo sapiens
attagccgggcgagg

SEQ ID NO: 259762 - DNA, 15 bp, Homo sapiens
tattagccgggcgag

SEQ ID NO: 259763 - DNA, 15 bp, Homo sapiens
atattagccgggcga

SEQ ID NO: 259764 - DNA, 15 bp, Homo sapiens
aatattagccgggcg

SEQ ID NO: 259765 - DNA, 15 bp, Homo sapiens
aaatattagccgggc

SEQ ID NO: 259766 - DNA, 15 bp, Homo sapiens
aaaatattagccggg

SEQ ID NO: 259767 - DNA, 15 bp, Homo sapiens
caaaatattagccgg

SEQ ID NO: 259768 - DNA, 15 bp, Homo sapiens
acaaaatattagccg

SEQ ID NO: 259769 - DNA, 15 bp, Homo sapiens
tacaaaatattagcc

SEQ ID NO: 259770 - DNA, 15 bp, Homo sapiens
atacaaaatattagc

SEQ ID NO: 259771 - DNA, 15 bp, Homo sapiens
aatacaaaatattag

SEQ ID NO: 259772 - DNA, 15 bp, Homo sapiens
aaatacaaaatatta

SEQ ID NO: 259773 - DNA, 15 bp, Homo sapiens
aaaatacaaaatatt

SEQ ID NO: 259774 - DNA, 15 bp, Homo sapiens
aaaaatacaaaatat

SEQ ID NO: 259775 - DNA, 15 bp, Homo sapiens
taaaaatacaaaata

SEQ ID NO: 259776 - DNA, 15 bp, Homo sapiens
ctaaaaatacaaaat

SEQ ID NO: 259777 - DNA, 15 bp, Homo sapiens
cgtctctactaaaaa

SEQ ID NO: 259778 - DNA, 15 bp, Homo sapiens
agtgaaaccccgtct

SEQ ID NO: 259779 - DNA, 15 bp, Homo sapiens
cagtgaaaccccgtc

SEQ ID NO: 259780 - DNA, 15 bp, Homo sapiens
acagtgaaaccccgt

SEQ ID NO: 259781 - DNA, 15 bp, Homo sapiens
cacagtgaaaccccg

SEQ ID NO: 259782 - DNA, 15 bp, Homo sapiens
acacagtgaaacccc

SEQ ID NO: 259783 - DNA, 15 bp, Homo sapiens
aacacagtgaaaccc

SEQ ID NO: 259784 - DNA, 15 bp, Homo sapiens
taacacagtgaaacc

SEQ ID NO: 259785 - DNA, 15 bp, Homo sapiens
ctaacacagtgaaac

SEQ ID NO: 259786 - DNA, 15 bp, Homo sapiens
gctaacacagtgaaa

SEQ ID NO: 259787 - DNA, 15 bp, Homo sapiens
ggctaacacagtgaa

SEQ ID NO: 259788 - DNA, 15 bp, Homo sapiens
tggctaacacagtga

SEQ ID NO: 259789 - DNA, 15 bp, Homo sapiens
ctggctaacacagtg

SEQ ID NO: 259790 - DNA, 15 bp, Homo sapiens
cctggctaacacagt

SEQ ID NO: 259791 - DNA, 15 bp, Homo sapiens
tcctggctaacacag

SEQ ID NO: 259792 - DNA, 15 bp, Homo sapiens
atcctggctaacaca

SEQ ID NO: 259793 - DNA, 15 bp, Homo sapiens
catcctggctaacac

SEQ ID NO: 259794 - DNA, 15 bp, Homo sapiens
ccatcctggctaaca

SEQ ID NO: 259795 - DNA, 15 bp, Homo sapiens
accatcctggctaac

SEQ ID NO: 259796 - DNA, 15 bp, Homo sapiens
gaccatcctggctaa

SEQ ID NO: 259797 - DNA, 15 bp, Homo sapiens
agaccatcctggcta

SEQ ID NO: 259798 - DNA, 15 bp, Homo sapiens
gagaccatcctggct

SEQ ID NO: 259799 - DNA, 15 bp, Homo sapiens
cgagaccatcctggc

SEQ ID NO: 259800 - DNA, 15 bp, Homo sapiens
tcgagaccatcctgg

SEQ ID NO: 259801 - DNA, 15 bp, Homo sapiens
atcgagaccatcctg

SEQ ID NO: 259802 - DNA, 15 bp, Homo sapiens
gatcgagaccatcct

SEQ ID NO: 259803 - DNA, 15 bp, Homo sapiens
agatcgagaccatcc

SEQ ID NO: 259804 - DNA, 15 bp, Homo sapiens
gagatcgagaccatc

SEQ ID NO: 259805 - DNA, 15 bp, Homo sapiens
ggagatcgagaccat

SEQ ID NO: 259806 - DNA, 15 bp, Homo sapiens
aggagatcgagacca

SEQ ID NO: 259807 - DNA, 15 bp, Homo sapiens
caggagatcgagacc

SEQ ID NO: 259808 - DNA, 15 bp, Homo sapiens
tcaggagatcgagac

SEQ ID NO: 259809 - DNA, 15 bp, Homo sapiens
gtcaggagatcgaga

SEQ ID NO: 259810 - DNA, 15 bp, Homo sapiens
ggtcaggagatcgag

SEQ ID NO: 259811 - DNA, 15 bp, Homo sapiens
aggtcaggagatcga

SEQ ID NO: 259812 - DNA, 15 bp, Homo sapiens
aaggtcaggagatcg

SEQ ID NO: 259813 - DNA, 15 bp, Homo sapiens
caaggtcaggagatc

SEQ ID NO: 259814 - DNA, 15 bp, Homo sapiens
acaaggtcaggagat

SEQ ID NO: 259815 - DNA, 15 bp, Homo sapiens
cacaaggtcaggaga

SEQ ID NO: 259816 - DNA, 15 bp, Homo sapiens
tcacaaggtcaggag

SEQ ID NO: 259817 - DNA, 15 bp, Homo sapiens
atcacaaggtcagga

SEQ ID NO: 259818 - DNA, 15 bp, Homo sapiens
gatcacaaggtcagg

SEQ ID NO: 259819 - DNA, 15 bp, Homo sapiens
ggatcacaaggtcag

SEQ ID NO: 259820 - DNA, 15 bp, Homo sapiens
tggatcacaaggtca

SEQ ID NO: 259821 - DNA, 15 bp, Homo sapiens
gtggatcacaaggtc

SEQ ID NO: 259822 - DNA, 15 bp, Homo sapiens
ggtggatcacaaggt

SEQ ID NO: 259823 - DNA, 15 bp, Homo sapiens
gggtggatcacaagg

SEQ ID NO: 259824 - DNA, 15 bp, Homo sapiens
cgggtggatcacaag

SEQ ID NO: 259825 - DNA, 15 bp, Homo sapiens
gcgggtggatcacaa

SEQ ID NO: 259826 - DNA, 15 bp, Homo sapiens
ggcgggtggatcaca

SEQ ID NO: 259827 - DNA, 15 bp, Homo sapiens
aggcgggtggatcac

SEQ ID NO: 259828 - DNA, 15 bp, Homo sapiens
gaggcgggtggatca

SEQ ID NO: 259829 - DNA, 15 bp, Homo sapiens
cgaggcgggtggatc

SEQ ID NO: 259830 - DNA, 15 bp, Homo sapiens
ccgaggcgggtggat

SEQ ID NO: 259831 - DNA, 15 bp, Homo sapiens
gccgaggcgggtgga

SEQ ID NO: 259832 - DNA, 15 bp, Homo sapiens
ggccgaggcgggtgg

SEQ ID NO: 259833 - DNA, 15 bp, Homo sapiens
aggccgaggcgggtg

SEQ ID NO: 259834 - DNA, 15 bp, Homo sapiens
gaggccgaggcgggt

SEQ ID NO: 259835 - DNA, 15 bp, Homo sapiens
agggaggccgaggcg

SEQ ID NO: 259836 - DNA, 15 bp, Homo sapiens
tagggaggccgaggc

SEQ ID NO: 259837 - DNA, 15 bp, Homo sapiens
ttagggaggccgagg

SEQ ID NO: 259838 - DNA, 15 bp, Homo sapiens
gttagggaggccgag

SEQ ID NO: 259839 - DNA, 15 bp, Homo sapiens
tgttagggaggccga

SEQ ID NO: 259840 - DNA, 15 bp, Homo sapiens
ctgttagggaggccg

SEQ ID NO: 259841 - DNA, 15 bp, Homo sapiens
gctgttagggaggcc

SEQ ID NO: 259842 - DNA, 15 bp, Homo sapiens
agctgttagggaggc

SEQ ID NO: 259843 - DNA, 15 bp, Homo sapiens
cagctgttagggagg

SEQ ID NO: 259844 - DNA, 15 bp, Homo sapiens
ccagctgttagggag

SEQ ID NO: 259845 - DNA, 15 bp, Homo sapiens
cccagctgttaggga

SEQ ID NO: 259846 - DNA, 15 bp, Homo sapiens
tcccagctgttaggg

SEQ ID NO: 259847 - DNA, 15 bp, Homo sapiens
atcccagctgttagg

SEQ ID NO: 259848 - DNA, 15 bp, Homo sapiens
aatcccagctgttag

SEQ ID NO: 259849 - DNA, 15 bp, Homo sapiens
aaatcccagctgtta

SEQ ID NO: 259850 - DNA, 15 bp, Homo sapiens
taaatcccagctgtt

SEQ ID NO: 259851 - DNA, 15 bp, Homo sapiens
gtaaatcccagctgt

SEQ ID NO: 259852 - DNA, 15 bp, Homo sapiens
tgtaaatcccagctg

SEQ ID NO: 259853 - DNA, 15 bp, Homo sapiens
ctgtaaatcccagct

SEQ ID NO: 259854 - DNA, 15 bp, Homo sapiens
cctgtaaatcccagc

SEQ ID NO: 259855 - DNA, 15 bp, Homo sapiens
gcctgtaaatcccag

SEQ ID NO: 259856 - DNA, 15 bp, Homo sapiens
cgcctgtaaatccca

SEQ ID NO: 259857 - DNA, 15 bp, Homo sapiens
acgcctgtaaatccc

SEQ ID NO: 259858 - DNA, 15 bp, Homo sapiens
cacgcctgtaaatcc

SEQ ID NO: 259859 - DNA, 15 bp, Homo sapiens
tcacgcctgtaaatc

SEQ ID NO: 259860 - DNA, 15 bp, Homo sapiens
ctcacgcctgtaaat

SEQ ID NO: 259861 - DNA, 15 bp, Homo sapiens
gctcacgcctgtaaa

SEQ ID NO: 259862 - DNA, 15 bp, Homo sapiens
ggtggctcacgcctg

SEQ ID NO: 259863 - DNA, 15 bp, Homo sapiens
cggtggctcacgcct

SEQ ID NO: 259864 - DNA, 15 bp, Homo sapiens
gcggtggctcacgcc

SEQ ID NO: 259865 - DNA, 15 bp, Homo sapiens
cgcggtggctcacgc

SEQ ID NO: 259866 - DNA, 15 bp, Homo sapiens
gcgcggtggctcacg

SEQ ID NO: 259867 - DNA, 15 bp, Homo sapiens
ggcgcggtggctcac

SEQ ID NO: 259868 - DNA, 15 bp, Homo sapiens
gggcgcggtggctca

SEQ ID NO: 259869 - DNA, 15 bp, Homo sapiens
agggcgcggtggctc

SEQ ID NO: 259870 - DNA, 15 bp, Homo sapiens
cagggcgcggtggct

SEQ ID NO: 259871 - DNA, 15 bp, Homo sapiens
gcagggcgcggtggc

SEQ ID NO: 259872 - DNA, 15 bp, Homo sapiens
ggcagggcgcggtgg

SEQ ID NO: 259873 - DNA, 15 bp, Homo sapiens
aggcagggcgcggtg

SEQ ID NO: 259874 - DNA, 15 bp, Homo sapiens
taggcagggcgcggt

SEQ ID NO: 259875 - DNA, 15 bp, Homo sapiens
ctaggcagggcgcgg

SEQ ID NO: 259876 - DNA, 15 bp, Homo sapiens
tctaggcagggcgcg

SEQ ID NO: 259877 - DNA, 15 bp, Homo sapiens
ttctaggcagggcgc

SEQ ID NO: 259878 - DNA, 15 bp, Homo sapiens
tttctaggcagggcg

SEQ ID NO: 259879 - DNA, 15 bp, Homo sapiens
ttttctaggcagggc

SEQ ID NO: 259880 - DNA, 15 bp, Homo sapiens
cttttctaggcaggg

SEQ ID NO: 259881 - DNA, 15 bp, Homo sapiens
tcttttctaggcagg

SEQ ID NO: 259882 - DNA, 15 bp, Homo sapiens
gtcttttctaggcag

SEQ ID NO: 259883 - DNA, 15 bp, Homo sapiens
tgtcttttctaggca

SEQ ID NO: 259884 - DNA, 15 bp, Homo sapiens
atgtcttttctaggc

SEQ ID NO: 259885 - DNA, 15 bp, Homo sapiens
aatgtcttttctagg

SEQ ID NO: 259886 - DNA, 15 bp, Homo sapiens
aaatgtcttttctag

SEQ ID NO: 259887 - DNA, 15 bp, Homo sapiens
aaaatgtcttttcta

SEQ ID NO: 259888 - DNA, 15 bp, Homo sapiens
taaaatgtcttttct

SEQ ID NO: 259889 - DNA, 15 bp, Homo sapiens
ttaaaatgtcttttc

SEQ ID NO: 259890 - DNA, 15 bp, Homo sapiens
attaaaatgtctttt

SEQ ID NO: 259891 - DNA, 15 bp, Homo sapiens
tattaaaatgtcttt

SEQ ID NO: 259892 - DNA, 15 bp, Homo sapiens
ttattaaaatgtctt

SEQ ID NO: 259893 - DNA, 15 bp, Homo sapiens
gttattaaaatgtct

SEQ ID NO: 259894 - DNA, 15 bp, Homo sapiens
ggttattaaaatgtc

SEQ ID NO: 259895 - DNA, 15 bp, Homo sapiens
aggttattaaaatgt

SEQ ID NO: 259896 - DNA, 15 bp, Homo sapiens
aaggttattaaaatg

SEQ ID NO: 259897 - DNA, 15 bp, Homo sapiens
caaggttattaaaat

SEQ ID NO: 259898 - DNA, 15 bp, Homo sapiens
ccaaggttattaaaa

SEQ ID NO: 259899 - DNA, 15 bp, Homo sapiens
gccaaggttattaaa

SEQ ID NO: 259900 - DNA, 15 bp, Homo sapiens
agccaaggttattaa

SEQ ID NO: 259901 - DNA, 15 bp, Homo sapiens
cagccaaggttatta

SEQ ID NO: 259902 - DNA, 15 bp, Homo sapiens
gcagccaaggttatt

SEQ ID NO: 259903 - DNA, 15 bp, Homo sapiens
ggcagccaaggttat

SEQ ID NO: 259904 - DNA, 15 bp, Homo sapiens
cggcagccaaggtta

SEQ ID NO: 259905 - DNA, 15 bp, Homo sapiens
acggcagccaaggtt

SEQ ID NO: 259906 - DNA, 15 bp, Homo sapiens
gacggcagccaaggt

SEQ ID NO: 259907 - DNA, 15 bp, Homo sapiens
agacggcagccaagg

SEQ ID NO: 259908 - DNA, 15 bp, Homo sapiens
gagacggcagccaag

SEQ ID NO: 259909 - DNA, 15 bp, Homo sapiens
agagacggcagccaa

SEQ ID NO: 259910 - DNA, 15 bp, Homo sapiens
cagagacggcagcca

SEQ ID NO: 259911 - DNA, 15 bp, Homo sapiens
ccagagacggcagcc

SEQ ID NO: 259912 - DNA, 15 bp, Homo sapiens
gccagagacggcagc

SEQ ID NO: 259913 - DNA, 15 bp, Homo sapiens
agccagagacggcag

SEQ ID NO: 259914 - DNA, 15 bp, Homo sapiens
tagccagagacggca

SEQ ID NO: 259915 - DNA, 15 bp, Homo sapiens
atagccagagacggc

SEQ ID NO: 259916 - DNA, 15 bp, Homo sapiens
tatagccagagacgg

SEQ ID NO: 259917 - DNA, 15 bp, Homo sapiens
ctatagccagagacg

SEQ ID NO: 259918 - DNA, 15 bp, Homo sapiens
tctatagccagagac

SEQ ID NO: 259919 - DNA, 15 bp, Homo sapiens
atctatagccagaga

SEQ ID NO: 259920 - DNA, 15 bp, Homo sapiens
tatctatagccagag

SEQ ID NO: 259921 - DNA, 15 bp, Homo sapiens
ttatctatagccaga

SEQ ID NO: 259922 - DNA, 15 bp, Homo sapiens
cttatctatagccag

SEQ ID NO: 259923 - DNA, 15 bp, Homo sapiens
acttatctatagcca

SEQ ID NO: 259924 - DNA, 15 bp, Homo sapiens
tacttatctatagcc

SEQ ID NO: 259925 - DNA, 15 bp, Homo sapiens
ctacttatctatagc

SEQ ID NO: 259926 - DNA, 15 bp, Homo sapiens
tctacttatctatag

SEQ ID NO: 259927 - DNA, 15 bp, Homo sapiens
atctacttatctata

SEQ ID NO: 259928 - DNA, 15 bp, Homo sapiens
gatctacttatctat

SEQ ID NO: 259929 - DNA, 15 bp, Homo sapiens
agatctacttatcta

SEQ ID NO: 259930 - DNA, 15 bp, Homo sapiens
tagatctacttatct

SEQ ID NO: 259931 - DNA, 15 bp, Homo sapiens
ttagatctacttatc

SEQ ID NO: 259932 - DNA, 15 bp, Homo sapiens
attagatctacttat

SEQ ID NO: 259933 - DNA, 15 bp, Homo sapiens
tattagatctactta

SEQ ID NO: 259934 - DNA, 15 bp, Homo sapiens
gtattagatctactt

SEQ ID NO: 259935 - DNA, 15 bp, Homo sapiens
agtattagatctact

SEQ ID NO: 259936 - DNA, 15 bp, Homo sapiens
tagtattagatctac

SEQ ID NO: 259937 - DNA, 15 bp, Homo sapiens
ctagtattagatcta

SEQ ID NO: 259938 - DNA, 15 bp, Homo sapiens
actagtattagatct

SEQ ID NO: 259939 - DNA, 15 bp, Homo sapiens
aactagtattagatc

SEQ ID NO: 259940 - DNA, 15 bp, Homo sapiens
aaactagtattagat

SEQ ID NO: 259941 - DNA, 15 bp, Homo sapiens
caaactagtattaga

SEQ ID NO: 259942 - DNA, 15 bp, Homo sapiens
ccaaactagtattag

SEQ ID NO: 259943 - DNA, 15 bp, Homo sapiens
tccaaactagtatta

SEQ ID NO: 259944 - DNA, 15 bp, Homo sapiens
atccaaactagtatt

SEQ ID NO: 259945 - DNA, 15 bp, Homo sapiens
tatccaaactagtat

SEQ ID NO: 259946 - DNA, 15 bp, Homo sapiens
atatccaaactagta

SEQ ID NO: 259947 - DNA, 15 bp, Homo sapiens
gatatccaaactagt

SEQ ID NO: 259948 - DNA, 15 bp, Homo sapiens
agatatccaaactag

SEQ ID NO: 259949 - DNA, 15 bp, Homo sapiens
aagatatccaaacta

SEQ ID NO: 259950 - DNA, 15 bp, Homo sapiens
aaagatatccaaact

SEQ ID NO: 259951 - DNA, 15 bp, Homo sapiens
taaagatatccaaac

SEQ ID NO: 259952 - DNA, 15 bp, Homo sapiens
ctaaagatatccaaa

SEQ ID NO: 259953 - DNA, 15 bp, Homo sapiens
cctaaagatatccaa

SEQ ID NO: 259954 - DNA, 15 bp, Homo sapiens
ccctaaagatatcca

SEQ ID NO: 259955 - DNA, 15 bp, Homo sapiens
accctaaagatatcc

SEQ ID NO: 259956 - DNA, 15 bp, Homo sapiens
aaccctaaagatatc

SEQ ID NO: 259957 - DNA, 15 bp, Homo sapiens
aaaccctaaagatat

SEQ ID NO: 259958 - DNA, 15 bp, Homo sapiens
taaaccctaaagata

SEQ ID NO: 259959 - DNA, 15 bp, Homo sapiens
ctaaaccctaaagat

SEQ ID NO: 259960 - DNA, 15 bp, Homo sapiens
tctaaaccctaaaga

SEQ ID NO: 259961 - DNA, 15 bp, Homo sapiens
ttctaaaccctaaag

SEQ ID NO: 259962 - DNA, 15 bp, Homo sapiens
attctaaaccctaaa

SEQ ID NO: 259963 - DNA, 15 bp, Homo sapiens
gattctaaaccctaa

SEQ ID NO: 259964 - DNA, 15 bp, Homo sapiens
agattctaaacccta

SEQ ID NO: 259965 - DNA, 15 bp, Homo sapiens
tagattctaaaccct

SEQ ID NO: 259966 - DNA, 15 bp, Homo sapiens
ttagattctaaaccc

SEQ ID NO: 259967 - DNA, 15 bp, Homo sapiens
gttagattctaaacc

SEQ ID NO: 259968 - DNA, 15 bp, Homo sapiens
ggttagattctaaac

SEQ ID NO: 259969 - DNA, 15 bp, Homo sapiens
aggttagattctaaa

SEQ ID NO: 259970 - DNA, 15 bp, Homo sapiens
gaggttagattctaa

SEQ ID NO: 259971 - DNA, 15 bp, Homo sapiens
tgaggttagattcta

SEQ ID NO: 259972 - DNA, 15 bp, Homo sapiens
ttgaggttagattct

SEQ ID NO: 259973 - DNA, 15 bp, Homo sapiens
cttgaggttagattc

SEQ ID NO: 259974 - DNA, 15 bp, Homo sapiens
tcttgaggttagatt

SEQ ID NO: 259975 - DNA, 15 bp, Homo sapiens
ttcttgaggttagat

SEQ ID NO: 259976 - DNA, 15 bp, Homo sapiens
attcttgaggttaga

SEQ ID NO: 259977 - DNA, 15 bp, Homo sapiens
tattcttgaggttag

SEQ ID NO: 259978 - DNA, 15 bp, Homo sapiens
ttattcttgaggtta

SEQ ID NO: 259979 - DNA, 15 bp, Homo sapiens
cttattcttgaggtt

SEQ ID NO: 259980 - DNA, 15 bp, Homo sapiens
tcttattcttgaggt

SEQ ID NO: 259981 - DNA, 15 bp, Homo sapiens
ttcttattcttgagg

SEQ ID NO: 259982 - DNA, 15 bp, Homo sapiens
tttcttattcttgag

SEQ ID NO: 259983 - DNA, 15 bp, Homo sapiens
atttcttattcttga

SEQ ID NO: 259984 - DNA, 15 bp, Homo sapiens
tatttcttattcttg

SEQ ID NO: 259985 - DNA, 15 bp, Homo sapiens
gtatttcttattctt

SEQ ID NO: 259986 - DNA, 15 bp, Homo sapiens
tgtatttcttattct

SEQ ID NO: 259987 - DNA, 15 bp, Homo sapiens
ttgtatttcttattc

SEQ ID NO: 259988 - DNA, 15 bp, Homo sapiens
cttgtatttcttatt

SEQ ID NO: 259989 - DNA, 15 bp, Homo sapiens
acttgtatttcttat

SEQ ID NO: 259990 - DNA, 15 bp, Homo sapiens
tacttgtatttctta

SEQ ID NO: 259991 - DNA, 15 bp, Homo sapiens
gtacttgtatttctt

SEQ ID NO: 259992 - DNA, 15 bp, Homo sapiens
tgtacttgtatttct

SEQ ID NO: 259993 - DNA, 15 bp, Homo sapiens
ttgtacttgtatttc

SEQ ID NO: 259994 - DNA, 15 bp, Homo sapiens
tttgtacttgtattt

SEQ ID NO: 259995 - DNA, 15 bp, Homo sapiens
atttgtacttgtatt

SEQ ID NO: 259996 - DNA, 15 bp, Homo sapiens
aatttgtacttgtat

SEQ ID NO: 259997 - DNA, 15 bp, Homo sapiens
caatttgtacttgta

SEQ ID NO: 259998 - DNA, 15 bp, Homo sapiens
ccaatttgtacttgt

SEQ ID NO: 259999 - DNA, 15 bp, Homo sapiens
accaatttgtacttg

SEQ ID NO: 260000 - DNA, 15 bp, Homo sapiens
caccaatttgtactt

SEQ ID NO: 260001 - DNA, 15 bp, Homo sapiens
tcaccaatttgtact

SEQ ID NO: 260002 - DNA, 15 bp, Homo sapiens
atcaccaatttgtac

SEQ ID NO: 260003 - DNA, 15 bp, Homo sapiens
catcaccaatttgta

SEQ ID NO: 260004 - DNA, 15 bp, Homo sapiens
tcatcaccaatttgt

SEQ ID NO: 260005 - DNA, 15 bp, Homo sapiens
ttcatcaccaatttg

SEQ ID NO: 260006 - DNA, 15 bp, Homo sapiens
cttcatcaccaattt

SEQ ID NO: 260007 - DNA, 15 bp, Homo sapiens
tcttcatcaccaatt

SEQ ID NO: 260008 - DNA, 15 bp, Homo sapiens
atcttcatcaccaat

SEQ ID NO: 260009 - DNA, 15 bp, Homo sapiens
catcttcatcaccaa

SEQ ID NO: 260010 - DNA, 15 bp, Homo sapiens
acatcttcatcacca

SEQ ID NO: 260011 - DNA, 15 bp, Homo sapiens
tacatcttcatcacc

SEQ ID NO: 260012 - DNA, 15 bp, Homo sapiens
atacatcttcatcac

SEQ ID NO: 260013 - DNA, 15 bp, Homo sapiens
aatacatcttcatca

SEQ ID NO: 260014 - DNA, 15 bp, Homo sapiens
gaatacatcttcatc

SEQ ID NO: 260015 - DNA, 15 bp, Homo sapiens
cgaatacatcttcat

SEQ ID NO: 260016 - DNA, 15 bp, Homo sapiens
acgaatacatcttca

SEQ ID NO: 260017 - DNA, 15 bp, Homo sapiens
tacgaatacatcttc

SEQ ID NO: 260018 - DNA, 15 bp, Homo sapiens
atacgaatacatctt

SEQ ID NO: 260019 - DNA, 15 bp, Homo sapiens
aatacgaatacatct

SEQ ID NO: 260020 - DNA, 15 bp, Homo sapiens
caatacgaatacatc

SEQ ID NO: 260021 - DNA, 15 bp, Homo sapiens
acaatacgaatacat

SEQ ID NO: 260022 - DNA, 15 bp, Homo sapiens
aacaatacgaataca

SEQ ID NO: 260023 - DNA, 15 bp, Homo sapiens
aaacaatacgaatac

SEQ ID NO: 260024 - DNA, 15 bp, Homo sapiens
caaacaatacgaata

SEQ ID NO: 260025 - DNA, 15 bp, Homo sapiens
ccaaacaatacgaat

SEQ ID NO: 260026 - DNA, 15 bp, Homo sapiens
cccaaacaatacgaa

SEQ ID NO: 260027 - DNA, 15 bp, Homo sapiens
tcccaaacaatacga

SEQ ID NO: 260028 - DNA, 15 bp, Homo sapiens
atcccaaacaatacg

SEQ ID NO: 260029 - DNA, 15 bp, Homo sapiens
aatcccaaacaatac

SEQ ID NO: 260030 - DNA, 15 bp, Homo sapiens
caatcccaaacaata

SEQ ID NO: 260031 - DNA, 15 bp, Homo sapiens
ccaatcccaaacaat

SEQ ID NO: 260032 - DNA, 15 bp, Homo sapiens
cccaatcccaaacaa

SEQ ID NO: 260033 - DNA, 15 bp, Homo sapiens
tcccaatcccaaaca

SEQ ID NO: 260034 - DNA, 15 bp, Homo sapiens
ctcccaatcccaaac

SEQ ID NO: 260035 - DNA, 15 bp, Homo sapiens
cctcccaatcccaaa

SEQ ID NO: 260036 - DNA, 15 bp, Homo sapiens
gcctcccaatcccaa

SEQ ID NO: 260037 - DNA, 15 bp, Homo sapiens
agcctcccaatccca

SEQ ID NO: 260038 - DNA, 15 bp, Homo sapiens
aagcctcccaatccc

SEQ ID NO: 260039 - DNA, 15 bp, Homo sapiens
aaagcctcccaatcc

SEQ ID NO: 260040 - DNA, 15 bp, Homo sapiens
caaagcctcccaatc

SEQ ID NO: 260041 - DNA, 15 bp, Homo sapiens
gcaaagcctcccaat

SEQ ID NO: 260042 - DNA, 15 bp, Homo sapiens
agcaaagcctcccaa

SEQ ID NO: 260043 - DNA, 15 bp, Homo sapiens
aagcaaagcctccca

SEQ ID NO: 260044 - DNA, 15 bp, Homo sapiens
taagcaaagcctccc

SEQ ID NO: 260045 - DNA, 15 bp, Homo sapiens
ataagcaaagcctcc

SEQ ID NO: 260046 - DNA, 15 bp, Homo sapiens
aataagcaaagcctc

SEQ ID NO: 260047 - DNA, 15 bp, Homo sapiens
aaataagcaaagcct

SEQ ID NO: 260048 - DNA, 15 bp, Homo sapiens
aaaataagcaaagcc

SEQ ID NO: 260049 - DNA, 15 bp, Homo sapiens
aaaaataagcaaagc

SEQ ID NO: 260050 - DNA, 15 bp, Homo sapiens
aaaaaataagcaaag

SEQ ID NO: 260051 - DNA, 15 bp, Homo sapiens
taaaaaataagcaaa

SEQ ID NO: 260052 - DNA, 15 bp, Homo sapiens
ttaaaaaataagcaa

SEQ ID NO: 260053 - DNA, 15 bp, Homo sapiens
tttaaaaaataagca

SEQ ID NO: 260054 - DNA, 15 bp, Homo sapiens
ttttaaaaaataagc

SEQ ID NO: 260055 - DNA, 15 bp, Homo sapiens
tttttaaaaaataag

SEQ ID NO: 260056 - DNA, 15 bp, Homo sapiens
gtttttaaaaaataa

SEQ ID NO: 260057 - DNA, 15 bp, Homo sapiens
agtttttaaaaaata

SEQ ID NO: 260058 - DNA, 15 bp, Homo sapiens
tagtttttaaaaaat

SEQ ID NO: 260059 - DNA, 15 bp, Homo sapiens
atagtttttaaaaaa

SEQ ID NO: 260060 - DNA, 15 bp, Homo sapiens
aatagtttttaaaaa

SEQ ID NO: 260061 - DNA, 15 bp, Homo sapiens
caatagtttttaaaa

SEQ ID NO: 260062 - DNA, 15 bp, Homo sapiens
tcaatagtttttaaa

SEQ ID NO: 260063 - DNA, 15 bp, Homo sapiens
ctcaatagtttttaa

SEQ ID NO: 260064 - DNA, 15 bp, Homo sapiens
cctcaatagttttta

SEQ ID NO: 260065 - DNA, 15 bp, Homo sapiens
acctcaatagttttt

SEQ ID NO: 260066 - DNA, 15 bp, Homo sapiens
tacctcaatagtttt

SEQ ID NO: 260067 - DNA, 15 bp, Homo sapiens
ttacctcaatagttt

SEQ ID NO: 260068 - DNA, 15 bp, Homo sapiens
tttacctcaatagtt

SEQ ID NO: 260069 - DNA, 15 bp, Homo sapiens
ctttacctcaatagt

SEQ ID NO: 260070 - DNA, 15 bp, Homo sapiens
cctttacctcaatag

SEQ ID NO: 260071 - DNA, 15 bp, Homo sapiens
ccctttacctcaata

SEQ ID NO: 260072 - DNA, 15 bp, Homo sapiens
accctttacctcaat

SEQ ID NO: 260073 - DNA, 15 bp, Homo sapiens
aaccctttacctcaa

SEQ ID NO: 260074 - DNA, 15 bp, Homo sapiens
taaccctttacctca

SEQ ID NO: 260075 - DNA, 15 bp, Homo sapiens
ttaaccctttacctc

SEQ ID NO: 260076 - DNA, 15 bp, Homo sapiens
cttaaccctttacct

SEQ ID NO: 260077 - DNA, 15 bp, Homo sapiens
gcttaaccctttacc

SEQ ID NO: 260078 - DNA, 15 bp, Homo sapiens
agcttaaccctttac

SEQ ID NO: 260079 - DNA, 15 bp, Homo sapiens
cagcttaacccttta

SEQ ID NO: 260080 - DNA, 15 bp, Homo sapiens
acagcttaacccttt

SEQ ID NO: 260081 - DNA, 15 bp, Homo sapiens
tacagcttaaccctt

SEQ ID NO: 260082 - DNA, 15 bp, Homo sapiens
ttacagcttaaccct

SEQ ID NO: 260083 - DNA, 15 bp, Homo sapiens
gttacagcttaaccc

SEQ ID NO: 260084 - DNA, 15 bp, Homo sapiens
tgttacagcttaacc

SEQ ID NO: 260085 - DNA, 15 bp, Homo sapiens
atgttacagcttaac

SEQ ID NO: 260086 - DNA, 15 bp, Homo sapiens
tatgttacagcttaa

SEQ ID NO: 260087 - DNA, 15 bp, Homo sapiens
gtatgttacagctta

SEQ ID NO: 260088 - DNA, 15 bp, Homo sapiens
agtatgttacagctt

SEQ ID NO: 260089 - DNA, 15 bp, Homo sapiens
aagtatgttacagct

SEQ ID NO: 260090 - DNA, 15 bp, Homo sapiens
taagtatgttacagc

SEQ ID NO: 260091 - DNA, 15 bp, Homo sapiens
ttaagtatgttacag

SEQ ID NO: 260092 - DNA, 15 bp, Homo sapiens
attaagtatgttaca

SEQ ID NO: 260093 - DNA, 15 bp, Homo sapiens
aattaagtatgttac

SEQ ID NO: 260094 - DNA, 15 bp, Homo sapiens
caattaagtatgtta

SEQ ID NO: 260095 - DNA, 15 bp, Homo sapiens
tcaattaagtatgtt

SEQ ID NO: 260096 - DNA, 15 bp, Homo sapiens
atcaattaagtatgt

SEQ ID NO: 260097 - DNA, 15 bp, Homo sapiens
aatcaattaagtatg

SEQ ID NO: 260098 - DNA, 15 bp, Homo sapiens
aaatcaattaagtat

SEQ ID NO: 260099 - DNA, 15 bp, Homo sapiens
gaaatcaattaagta

SEQ ID NO: 260100 - DNA, 15 bp, Homo sapiens
agaaatcaattaagt

SEQ ID NO: 260101 - DNA, 15 bp, Homo sapiens
aagaaatcaattaag

SEQ ID NO: 260102 - DNA, 15 bp, Homo sapiens
taagaaatcaattaa

SEQ ID NO: 260103 - DNA, 15 bp, Homo sapiens
gtaagaaatcaatta

SEQ ID NO: 260104 - DNA, 15 bp, Homo sapiens
ggtaagaaatcaatt

SEQ ID NO: 260105 - DNA, 15 bp, Homo sapiens
cggtaagaaatcaat

SEQ ID NO: 260106 - DNA, 15 bp, Homo sapiens
acggtaagaaatcaa

SEQ ID NO: 260107 - DNA, 15 bp, Homo sapiens
aacggtaagaaatca

SEQ ID NO: 260108 - DNA, 15 bp, Homo sapiens
aaacggtaagaaatc

SEQ ID NO: 260109 - DNA, 15 bp, Homo sapiens
aaaacggtaagaaat

SEQ ID NO: 260110 - DNA, 15 bp, Homo sapiens
aaaaacggtaagaaa

SEQ ID NO: 260111 - DNA, 15 bp, Homo sapiens
caaaaacggtaagaa

SEQ ID NO: 260112 - DNA, 15 bp, Homo sapiens
ccaaaaacggtaaga

SEQ ID NO: 260113 - DNA, 15 bp, Homo sapiens
gccaaaaacggtaag

SEQ ID NO: 260114 - DNA, 15 bp, Homo sapiens
agccaaaaacggtaa

SEQ ID NO: 260115 - DNA, 15 bp, Homo sapiens
gagccaaaaacggta

SEQ ID NO: 260116 - DNA, 15 bp, Homo sapiens
agagccaaaaacggt

SEQ ID NO: 260117 - DNA, 15 bp, Homo sapiens
cagagccaaaaacgg

SEQ ID NO: 260118 - DNA, 15 bp, Homo sapiens
acagagccaaaaacg

SEQ ID NO: 260119 - DNA, 15 bp, Homo sapiens
aacagagccaaaaac

SEQ ID NO: 260120 - DNA, 15 bp, Homo sapiens
aaacagagccaaaaa

SEQ ID NO: 260121 - DNA, 15 bp, Homo sapiens
aaaacagagccaaaa

SEQ ID NO: 260122 - DNA, 15 bp, Homo sapiens
caaaacagagccaaa

SEQ ID NO: 260123 - DNA, 15 bp, Homo sapiens
gcaaaacagagccaa

SEQ ID NO: 260124 - DNA, 15 bp, Homo sapiens
agcaaaacagagcca

SEQ ID NO: 260125 - DNA, 15 bp, Homo sapiens
tagcaaaacagagcc

SEQ ID NO: 260126 - DNA, 15 bp, Homo sapiens
atagcaaaacagagc

SEQ ID NO: 260127 - DNA, 15 bp, Homo sapiens
tatagcaaaacagag

SEQ ID NO: 260128 - DNA, 15 bp, Homo sapiens
atatagcaaaacaga

SEQ ID NO: 260129 - DNA, 15 bp, Homo sapiens
gatatagcaaaacag

SEQ ID NO: 260130 - DNA, 15 bp, Homo sapiens
ggatatagcaaaaca

SEQ ID NO: 260131 - DNA, 15 bp, Homo sapiens
gggatatagcaaaac

SEQ ID NO: 260132 - DNA, 15 bp, Homo sapiens
ggggatatagcaaaa

SEQ ID NO: 260133 - DNA, 15 bp, Homo sapiens
aggggatatagcaaa

SEQ ID NO: 260134 - DNA, 15 bp, Homo sapiens
taggggatatagcaa

SEQ ID NO: 260135 - DNA, 15 bp, Homo sapiens
ttaggggatatagca

SEQ ID NO: 260136 - DNA, 15 bp, Homo sapiens
attaggggatatagc

SEQ ID NO: 260137 - DNA, 15 bp, Homo sapiens
aattaggggatatag

SEQ ID NO: 260138 - DNA, 15 bp, Homo sapiens
aaattaggggatata

SEQ ID NO: 260139 - DNA, 15 bp, Homo sapiens
caaattaggggatat

SEQ ID NO: 260140 - DNA, 15 bp, Homo sapiens
acaaattaggggata

SEQ ID NO: 260141 - DNA, 15 bp, Homo sapiens
aacaaattaggggat

SEQ ID NO: 260142 - DNA, 15 bp, Homo sapiens
caacaaattagggga

SEQ ID NO: 260143 - DNA, 15 bp, Homo sapiens
ccaacaaattagggg

SEQ ID NO: 260144 - DNA, 15 bp, Homo sapiens
accaacaaattaggg

SEQ ID NO: 260145 - DNA, 15 bp, Homo sapiens
aaccaacaaattagg

SEQ ID NO: 260146 - DNA, 15 bp, Homo sapiens
caaccaacaaattag

SEQ ID NO: 260147 - DNA, 15 bp, Homo sapiens
acaaccaacaaatta

SEQ ID NO: 260148 - DNA, 15 bp, Homo sapiens
cacaaccaacaaatt

SEQ ID NO: 260149 - DNA, 15 bp, Homo sapiens
gcacaaccaacaaat

SEQ ID NO: 260150 - DNA, 15 bp, Homo sapiens
agcacaaccaacaaa

SEQ ID NO: 260151 - DNA, 15 bp, Homo sapiens
tagcacaaccaacaa

SEQ ID NO: 260152 - DNA, 15 bp, Homo sapiens
ttagcacaaccaaca

SEQ ID NO: 260153 - DNA, 15 bp, Homo sapiens
attagcacaaccaac

SEQ ID NO: 260154 - DNA, 15 bp, Homo sapiens
gattagcacaaccaa

SEQ ID NO: 260155 - DNA, 15 bp, Homo sapiens
agattagcacaacca

SEQ ID NO: 260156 - DNA, 15 bp, Homo sapiens
aagattagcacaacc

SEQ ID NO: 260157 - DNA, 15 bp, Homo sapiens
aaagattagcacaac

SEQ ID NO: 260158 - DNA, 15 bp, Homo sapiens
caaagattagcacaa

SEQ ID NO: 260159 - DNA, 15 bp, Homo sapiens
acaaagattagcaca

SEQ ID NO: 260160 - DNA, 15 bp, Homo sapiens
tacaaagattagcac

SEQ ID NO: 260161 - DNA, 15 bp, Homo sapiens
ctacaaagattagca

SEQ ID NO: 260162 - DNA, 15 bp, Homo sapiens
tctacaaagattagc

SEQ ID NO: 260163 - DNA, 15 bp, Homo sapiens
ttctacaaagattag

SEQ ID NO: 260164 - DNA, 15 bp, Homo sapiens
tttctacaaagatta

SEQ ID NO: 260165 - DNA, 15 bp, Homo sapiens
ctttctacaaagatt

SEQ ID NO: 260166 - DNA, 15 bp, Homo sapiens
tctttctacaaagat

SEQ ID NO: 260167 - DNA, 15 bp, Homo sapiens
ctctttctacaaaga

SEQ ID NO: 260168 - DNA, 15 bp, Homo sapiens
cctctttctacaaag

SEQ ID NO: 260169 - DNA, 15 bp, Homo sapiens
acctctttctacaaa

SEQ ID NO: 260170 - DNA, 15 bp, Homo sapiens
gacctctttctacaa

SEQ ID NO: 260171 - DNA, 15 bp, Homo sapiens
agacctctttctaca

SEQ ID NO: 260172 - DNA, 15 bp, Homo sapiens
gagacctctttctac

SEQ ID NO: 260173 - DNA, 15 bp, Homo sapiens
cgagacctctttcta

SEQ ID NO: 260174 - DNA, 15 bp, Homo sapiens
acgagacctctttct

SEQ ID NO: 260175 - DNA, 15 bp, Homo sapiens
tacgagacctctttc

SEQ ID NO: 260176 - DNA, 15 bp, Homo sapiens
atacgagacctcttt

SEQ ID NO: 260177 - DNA, 15 bp, Homo sapiens
aatacgagacctctt

SEQ ID NO: 260178 - DNA, 15 bp, Homo sapiens
aaatacgagacctct

SEQ ID NO: 260179 - DNA, 15 bp, Homo sapiens
caaatacgagacctc

SEQ ID NO: 260180 - DNA, 15 bp, Homo sapiens
gcaaatacgagacct

SEQ ID NO: 260181 - DNA, 15 bp, Homo sapiens
agcaaatacgagacc

SEQ ID NO: 260182 - DNA, 15 bp, Homo sapiens
cagcaaatacgagac

SEQ ID NO: 260183 - DNA, 15 bp, Homo sapiens
gcagcaaatacgaga

SEQ ID NO: 260184 - DNA, 15 bp, Homo sapiens
tgcagcaaatacgag

SEQ ID NO: 260185 - DNA, 15 bp, Homo sapiens
atgcagcaaatacga

SEQ ID NO: 260186 - DNA, 15 bp, Homo sapiens
gatgcagcaaatacg

SEQ ID NO: 260187 - DNA, 15 bp, Homo sapiens
cgatgcagcaaatac

SEQ ID NO: 260188 - DNA, 15 bp, Homo sapiens
acgatgcagcaaata

SEQ ID NO: 260189 - DNA, 15 bp, Homo sapiens
tacgatgcagcaaat

SEQ ID NO: 260190 - DNA, 15 bp, Homo sapiens
ttacgatgcagcaaa

SEQ ID NO: 260191 - DNA, 15 bp, Homo sapiens
attacgatgcagcaa

SEQ ID NO: 260192 - DNA, 15 bp, Homo sapiens
cattacgatgcagca

SEQ ID NO: 260193 - DNA, 15 bp, Homo sapiens
tcattacgatgcagc

SEQ ID NO: 260194 - DNA, 15 bp, Homo sapiens
gtcattacgatgcag

SEQ ID NO: 260195 - DNA, 15 bp, Homo sapiens
tgtcattacgatgca

SEQ ID NO: 260196 - DNA, 15 bp, Homo sapiens
atgtcattacgatgc

SEQ ID NO: 260197 - DNA, 15 bp, Homo sapiens
catgtcattacgatg

SEQ ID NO: 260198 - DNA, 15 bp, Homo sapiens
tcatgtcattacgat

SEQ ID NO: 260199 - DNA, 15 bp, Homo sapiens
ctcatgtcattacga

SEQ ID NO: 260200 - DNA, 15 bp, Homo sapiens
actcatgtcattacg

SEQ ID NO: 260201 - DNA, 15 bp, Homo sapiens
tactcatgtcattac

SEQ ID NO: 260202 - DNA, 15 bp, Homo sapiens
gtactcatgtcatta

SEQ ID NO: 260203 - DNA, 15 bp, Homo sapiens
agtactcatgtcatt

SEQ ID NO: 260204 - DNA, 15 bp, Homo sapiens
cagtactcatgtcat

SEQ ID NO: 260205 - DNA, 15 bp, Homo sapiens
gcagtactcatgtca

SEQ ID NO: 260206 - DNA, 15 bp, Homo sapiens
agcagtactcatgtc

SEQ ID NO: 260207 - DNA, 15 bp, Homo sapiens
aagcagtactcatgt

SEQ ID NO: 260208 - DNA, 15 bp, Homo sapiens
aaagcagtactcatg

SEQ ID NO: 260209 - DNA, 15 bp, Homo sapiens
taaagcagtactcat

SEQ ID NO: 260210 - DNA, 15 bp, Homo sapiens
ctaaagcagtactca

SEQ ID NO: 260211 - DNA, 15 bp, Homo sapiens
actaaagcagtactc

SEQ ID NO: 260212 - DNA, 15 bp, Homo sapiens
aactaaagcagtact

SEQ ID NO: 260213 - DNA, 15 bp, Homo sapiens
caactaaagcagtac

SEQ ID NO: 260214 - DNA, 15 bp, Homo sapiens
ccaactaaagcagta

SEQ ID NO: 260215 - DNA, 15 bp, Homo sapiens
accaactaaagcagt

SEQ ID NO: 260216 - DNA, 15 bp, Homo sapiens
aaccaactaaagcag

SEQ ID NO: 260217 - DNA, 15 bp, Homo sapiens
aaaccaactaaagca

SEQ ID NO: 260218 - DNA, 15 bp, Homo sapiens
taaaccaactaaagc

SEQ ID NO: 260219 - DNA, 15 bp, Homo sapiens
ttaaaccaactaaag

SEQ ID NO: 260220 - DNA, 15 bp, Homo sapiens
cttaaaccaactaaa

SEQ ID NO: 260221 - DNA, 15 bp, Homo sapiens
acttaaaccaactaa

SEQ ID NO: 260222 - DNA, 15 bp, Homo sapiens
aacttaaaccaacta

SEQ ID NO: 260223 - DNA, 15 bp, Homo sapiens
gaacttaaaccaact

SEQ ID NO: 260224 - DNA, 15 bp, Homo sapiens
tgaacttaaaccaac

SEQ ID NO: 260225 - DNA, 15 bp, Homo sapiens
ttgaacttaaaccaa

SEQ ID NO: 260226 - DNA, 15 bp, Homo sapiens
tttgaacttaaacca

SEQ ID NO: 260227 - DNA, 15 bp, Homo sapiens
atttgaacttaaacc

SEQ ID NO: 260228 - DNA, 15 bp, Homo sapiens
catttgaacttaaac

SEQ ID NO: 260229 - DNA, 15 bp, Homo sapiens
tcatttgaacttaaa

SEQ ID NO: 260230 - DNA, 15 bp, Homo sapiens
ttcatttgaacttaa

SEQ ID NO: 260231 - DNA, 15 bp, Homo sapiens
attcatttgaactta

SEQ ID NO: 260232 - DNA, 15 bp, Homo sapiens
cattcatttgaactt

SEQ ID NO: 260233 - DNA, 15 bp, Homo sapiens
tcattcatttgaact

SEQ ID NO: 260234 - DNA, 15 bp, Homo sapiens
ttcattcatttgaac

SEQ ID NO: 260235 - DNA, 15 bp, Homo sapiens
tttcattcatttgaa

SEQ ID NO: 260236 - DNA, 15 bp, Homo sapiens
gtttcattcatttga

SEQ ID NO: 260237 - DNA, 15 bp, Homo sapiens
tgtttcattcatttg

SEQ ID NO: 260238 - DNA, 15 bp, Homo sapiens
ttgtttcattcattt

SEQ ID NO: 260239 - DNA, 15 bp, Homo sapiens
gttgtttcattcatt

SEQ ID NO: 260240 - DNA, 15 bp, Homo sapiens
agttgtttcattcat

SEQ ID NO: 260241 - DNA, 15 bp, Homo sapiens
tagttgtttcattca

SEQ ID NO: 260242 - DNA, 15 bp, Homo sapiens
atagttgtttcattc

SEQ ID NO: 260243 - DNA, 15 bp, Homo sapiens
aatagttgtttcatt

SEQ ID NO: 260244 - DNA, 15 bp, Homo sapiens
aaatagttgtttcat

SEQ ID NO: 260245 - DNA, 15 bp, Homo sapiens
aaaatagttgtttca

SEQ ID NO: 260246 - DNA, 15 bp, Homo sapiens
aaaaatagttgtttc

SEQ ID NO: 260247 - DNA, 15 bp, Homo sapiens
gaaaaatagttgttt

SEQ ID NO: 260248 - DNA, 15 bp, Homo sapiens
ggaaaaatagttgtt

SEQ ID NO: 260249 - DNA, 15 bp, Homo sapiens
aggaaaaatagttgt

SEQ ID NO: 260250 - DNA, 15 bp, Homo sapiens
aaggaaaaatagttg

SEQ ID NO: 260251 - DNA, 15 bp, Homo sapiens
aaaggaaaaatagtt

SEQ ID NO: 260252 - DNA, 15 bp, Homo sapiens
taaaggaaaaatagt

SEQ ID NO: 260253 - DNA, 15 bp, Homo sapiens
ctaaaggaaaaatag

SEQ ID NO: 260254 - DNA, 15 bp, Homo sapiens
actaaaggaaaaata

SEQ ID NO: 260255 - DNA, 15 bp, Homo sapiens
aactaaaggaaaaat

SEQ ID NO: 260256 - DNA, 15 bp, Homo sapiens
caactaaaggaaaaa

SEQ ID NO: 260257 - DNA, 15 bp, Homo sapiens
tcaactaaaggaaaa

SEQ ID NO: 260258 - DNA, 15 bp, Homo sapiens
atcaactaaaggaaa

SEQ ID NO: 260259 - DNA, 15 bp, Homo sapiens
aatcaactaaaggaa

SEQ ID NO: 260260 - DNA, 15 bp, Homo sapiens
aaatcaactaaagga

SEQ ID NO: 260261 - DNA, 15 bp, Homo sapiens
aaaatcaactaaagg

SEQ ID NO: 260262 - DNA, 15 bp, Homo sapiens
taaaatcaactaaag

SEQ ID NO: 260263 - DNA, 15 bp, Homo sapiens
gtaaaatcaactaaa

SEQ ID NO: 260264 - DNA, 15 bp, Homo sapiens
ggtaaaatcaactaa

SEQ ID NO: 260265 - DNA, 15 bp, Homo sapiens
gggtaaaatcaacta

SEQ ID NO: 260266 - DNA, 15 bp, Homo sapiens
agggtaaaatcaact

SEQ ID NO: 260267 - DNA, 15 bp, Homo sapiens
cagggtaaaatcaac

SEQ ID NO: 260268 - DNA, 15 bp, Homo sapiens
tcagggtaaaatcaa

SEQ ID NO: 260269 - DNA, 15 bp, Homo sapiens
atcagggtaaaatca

SEQ ID NO: 260270 - DNA, 15 bp, Homo sapiens
aatcagggtaaaatc

SEQ ID NO: 260271 - DNA, 15 bp, Homo sapiens
aaatcagggtaaaat

SEQ ID NO: 260272 - DNA, 15 bp, Homo sapiens
gaaatcagggtaaaa

SEQ ID NO: 260273 - DNA, 15 bp, Homo sapiens
tgaaatcagggtaaa

SEQ ID NO: 260274 - DNA, 15 bp, Homo sapiens
gtgaaatcagggtaa

SEQ ID NO: 260275 - DNA, 15 bp, Homo sapiens
ggtgaaatcagggta

SEQ ID NO: 260276 - DNA, 15 bp, Homo sapiens
cggtgaaatcagggt

SEQ ID NO: 260277 - DNA, 15 bp, Homo sapiens
tcggtgaaatcaggg

SEQ ID NO: 260278 - DNA, 15 bp, Homo sapiens
ctcggtgaaatcagg

SEQ ID NO: 260279 - DNA, 15 bp, Homo sapiens
actcggtgaaatcag

SEQ ID NO: 260280 - DNA, 15 bp, Homo sapiens
cactcggtgaaatca

SEQ ID NO: 260281 - DNA, 15 bp, Homo sapiens
acactcggtgaaatc

SEQ ID NO: 260282 - DNA, 15 bp, Homo sapiens
aacactcggtgaaat

SEQ ID NO: 260283 - DNA, 15 bp, Homo sapiens
aaacactcggtgaaa

SEQ ID NO: 260284 - DNA, 15 bp, Homo sapiens
gaaacactcggtgaa

SEQ ID NO: 260285 - DNA, 15 bp, Homo sapiens
tgaaacactcggtga

SEQ ID NO: 260286 - DNA, 15 bp, Homo sapiens
ttgaaacactcggtg

SEQ ID NO: 260287 - DNA, 15 bp, Homo sapiens
attgaaacactcggt

SEQ ID NO: 260288 - DNA, 15 bp, Homo sapiens
cattgaaacactcgg

SEQ ID NO: 260289 - DNA, 15 bp, Homo sapiens
tcattgaaacactcg

SEQ ID NO: 260290 - DNA, 15 bp, Homo sapiens
ctcattgaaacactc

SEQ ID NO: 260291 - DNA, 15 bp, Homo sapiens
actcattgaaacact

SEQ ID NO: 260292 - DNA, 15 bp, Homo sapiens
tactcattgaaacac

SEQ ID NO: 260293 - DNA, 15 bp, Homo sapiens
ttactcattgaaaca

SEQ ID NO: 260294 - DNA, 15 bp, Homo sapiens
tttactcattgaaac

SEQ ID NO: 260295 - DNA, 15 bp, Homo sapiens
atttactcattgaaa

SEQ ID NO: 260296 - DNA, 15 bp, Homo sapiens
tatttactcattgaa

SEQ ID NO: 260297 - DNA, 15 bp, Homo sapiens
atatttactcattga

SEQ ID NO: 260298 - DNA, 15 bp, Homo sapiens
tatatttactcattg

SEQ ID NO: 260299 - DNA, 15 bp, Homo sapiens
gtatatttactcatt

SEQ ID NO: 260300 - DNA, 15 bp, Homo sapiens
tgtatatttactcat

SEQ ID NO: 260301 - DNA, 15 bp, Homo sapiens
ctgtatatttactca

SEQ ID NO: 260302 - DNA, 15 bp, Homo sapiens
gctgtatatttactc

SEQ ID NO: 260303 - DNA, 15 bp, Homo sapiens
agctgtatatttact

SEQ ID NO: 260304 - DNA, 15 bp, Homo sapiens
aagctgtatatttac

SEQ ID NO: 260305 - DNA, 15 bp, Homo sapiens
taagctgtatattta

SEQ ID NO: 260306 - DNA, 15 bp, Homo sapiens
ttaagctgtatattt

SEQ ID NO: 260307 - DNA, 15 bp, Homo sapiens
tttaagctgtatatt

SEQ ID NO: 260308 - DNA, 15 bp, Homo sapiens
gtttaagctgtatat

SEQ ID NO: 260309 - DNA, 15 bp, Homo sapiens
tgtttaagctgtata

SEQ ID NO: 260310 - DNA, 15 bp, Homo sapiens
atgtttaagctgtat

SEQ ID NO: 260311 - DNA, 15 bp, Homo sapiens
tatgtttaagctgta

SEQ ID NO: 260312 - DNA, 15 bp, Homo sapiens
ttatgtttaagctgt

SEQ ID NO: 260313 - DNA, 15 bp, Homo sapiens
tttatgtttaagctg

SEQ ID NO: 260314 - DNA, 15 bp, Homo sapiens
atttatgtttaagct

SEQ ID NO: 260315 - DNA, 15 bp, Homo sapiens
gatttatgtttaagc

SEQ ID NO: 260316 - DNA, 15 bp, Homo sapiens
agatttatgtttaag

SEQ ID NO: 260317 - DNA, 15 bp, Homo sapiens
aagatttatgtttaa

SEQ ID NO: 260318 - DNA, 15 bp, Homo sapiens
aaagatttatgttta

SEQ ID NO: 260319 - DNA, 15 bp, Homo sapiens
caaagatttatgttt

SEQ ID NO: 260320 - DNA, 15 bp, Homo sapiens
acaaagatttatgtt

SEQ ID NO: 260321 - DNA, 15 bp, Homo sapiens
aacaaagatttatgt

SEQ ID NO: 260322 - DNA, 15 bp, Homo sapiens
taacaaagatttatg

SEQ ID NO: 260323 - DNA, 15 bp, Homo sapiens
ttaacaaagatttat

SEQ ID NO: 260324 - DNA, 15 bp, Homo sapiens
tttaacaaagattta

SEQ ID NO: 260325 - DNA, 15 bp, Homo sapiens
atttaacaaagattt

SEQ ID NO: 260326 - DNA, 15 bp, Homo sapiens
aatttaacaaagatt

SEQ ID NO: 260327 - DNA, 15 bp, Homo sapiens
aaatttaacaaagat

SEQ ID NO: 260328 - DNA, 15 bp, Homo sapiens
aaaatttaacaaaga

SEQ ID NO: 260329 - DNA, 15 bp, Homo sapiens
aaaaatttaacaaag

SEQ ID NO: 260330 - DNA, 15 bp, Homo sapiens
caaaaatttaacaaa

SEQ ID NO: 260331 - DNA, 15 bp, Homo sapiens
ccaaaaatttaacaa

SEQ ID NO: 260332 - DNA, 15 bp, Homo sapiens
accaaaaatttaaca

SEQ ID NO: 260333 - DNA, 15 bp, Homo sapiens
aaccaaaaatttaac

SEQ ID NO: 260334 - DNA, 15 bp, Homo sapiens
caaccaaaaatttaa

SEQ ID NO: 260335 - DNA, 15 bp, Homo sapiens
ccaaccaaaaattta

SEQ ID NO: 260336 - DNA, 15 bp, Homo sapiens
cccaaccaaaaattt

SEQ ID NO: 260337 - DNA, 15 bp, Homo sapiens
ccccaaccaaaaatt

SEQ ID NO: 260338 - DNA, 15 bp, Homo sapiens
accccaaccaaaaat

SEQ ID NO: 260339 - DNA, 15 bp, Homo sapiens
caccccaaccaaaaa

SEQ ID NO: 260340 - DNA, 15 bp, Homo sapiens
ccaccccaaccaaaa

SEQ ID NO: 260341 - DNA, 15 bp, Homo sapiens
tccaccccaaccaaa

SEQ ID NO: 260342 - DNA, 15 bp, Homo sapiens
ctccaccccaaccaa

SEQ ID NO: 260343 - DNA, 15 bp, Homo sapiens
tctccaccccaacca

SEQ ID NO: 260344 - DNA, 15 bp, Homo sapiens
ttctccaccccaacc

SEQ ID NO: 260345 - DNA, 15 bp, Homo sapiens
cttctccaccccaac

SEQ ID NO: 260346 - DNA, 15 bp, Homo sapiens
ccttctccaccccaa

SEQ ID NO: 260347 - DNA, 15 bp, Homo sapiens
tccttctccacccca

SEQ ID NO: 260348 - DNA, 15 bp, Homo sapiens
ttccttctccacccc

SEQ ID NO: 260349 - DNA, 15 bp, Homo sapiens
tttccttctccaccc

SEQ ID NO: 260350 - DNA, 15 bp, Homo sapiens
atttccttctccacc

SEQ ID NO: 260351 - DNA, 15 bp, Homo sapiens
aatttccttctccac

SEQ ID NO: 260352 - DNA, 15 bp, Homo sapiens
taatttccttctcca

SEQ ID NO: 260353 - DNA, 15 bp, Homo sapiens
ctaatttccttctcc

SEQ ID NO: 260354 - DNA, 15 bp, Homo sapiens
gctaatttccttctc

SEQ ID NO: 260355 - DNA, 15 bp, Homo sapiens
agctaatttccttct

SEQ ID NO: 260356 - DNA, 15 bp, Homo sapiens
cagctaatttccttc

SEQ ID NO: 260357 - DNA, 15 bp, Homo sapiens
tcagctaatttcctt

SEQ ID NO: 260358 - DNA, 15 bp, Homo sapiens
ctcagctaatttcct

SEQ ID NO: 260359 - DNA, 15 bp, Homo sapiens
cctcagctaatttcc

SEQ ID NO: 260360 - DNA, 15 bp, Homo sapiens
tcctcagctaatttc

SEQ ID NO: 260361 - DNA, 15 bp, Homo sapiens
gtcctcagctaattt

SEQ ID NO: 260362 - DNA, 15 bp, Homo sapiens
tgtcctcagctaatt

SEQ ID NO: 260363 - DNA, 15 bp, Homo sapiens
gtgtcctcagctaat

SEQ ID NO: 260364 - DNA, 15 bp, Homo sapiens
agtgtcctcagctaa

SEQ ID NO: 260365 - DNA, 15 bp, Homo sapiens
cagtgtcctcagcta

SEQ ID NO: 260366 - DNA, 15 bp, Homo sapiens
gcagtgtcctcagct

SEQ ID NO: 260367 - DNA, 15 bp, Homo sapiens
agcagtgtcctcagc

SEQ ID NO: 260368 - DNA, 15 bp, Homo sapiens
tagcagtgtcctcag

SEQ ID NO: 260369 - DNA, 15 bp, Homo sapiens
atagcagtgtcctca

SEQ ID NO: 260370 - DNA, 15 bp, Homo sapiens
gatagcagtgtcctc

SEQ ID NO: 260371 - DNA, 15 bp, Homo sapiens
agatagcagtgtcct

SEQ ID NO: 260372 - DNA, 15 bp, Homo sapiens
aagatagcagtgtcc

SEQ ID NO: 260373 - DNA, 15 bp, Homo sapiens
taagatagcagtgtc

SEQ ID NO: 260374 - DNA, 15 bp, Homo sapiens
ctaagatagcagtgt

SEQ ID NO: 260375 - DNA, 15 bp, Homo sapiens
tctaagatagcagtg

SEQ ID NO: 260376 - DNA, 15 bp, Homo sapiens
ttctaagatagcagt

SEQ ID NO: 260377 - DNA, 15 bp, Homo sapiens
tttctaagatagcag

SEQ ID NO: 260378 - DNA, 15 bp, Homo sapiens
atttctaagatagca

SEQ ID NO: 260379 - DNA, 15 bp, Homo sapiens
catttctaagatagc

SEQ ID NO: 260380 - DNA, 15 bp, Homo sapiens
gcatttctaagatag

SEQ ID NO: 260381 - DNA, 15 bp, Homo sapiens
tgcatttctaagata

SEQ ID NO: 260382 - DNA, 15 bp, Homo sapiens
atgcatttctaagat

SEQ ID NO: 260383 - DNA, 15 bp, Homo sapiens
tatgcatttctaaga

SEQ ID NO: 260384 - DNA, 15 bp, Homo sapiens
ctatgcatttctaag

SEQ ID NO: 260385 - DNA, 15 bp, Homo sapiens
tctatgcatttctaa

SEQ ID NO: 260386 - DNA, 15 bp, Homo sapiens
ttctatgcatttcta

SEQ ID NO: 260387 - DNA, 15 bp, Homo sapiens
tttctatgcatttct

SEQ ID NO: 260388 - DNA, 15 bp, Homo sapiens
atttctatgcatttc

SEQ ID NO: 260389 - DNA, 15 bp, Homo sapiens
tatttctatgcattt

SEQ ID NO: 260390 - DNA, 15 bp, Homo sapiens
ctatttctatgcatt

SEQ ID NO: 260391 - DNA, 15 bp, Homo sapiens
gctatttctatgcat

SEQ ID NO: 260392 - DNA, 15 bp, Homo sapiens
agctatttctatgca

SEQ ID NO: 260393 - DNA, 15 bp, Homo sapiens
cagctatttctatgc

SEQ ID NO: 260394 - DNA, 15 bp, Homo sapiens
tcagctatttctatg

SEQ ID NO: 260395 - DNA, 15 bp, Homo sapiens
ctcagctatttctat

SEQ ID NO: 260396 - DNA, 15 bp, Homo sapiens
gctcagctatttcta

SEQ ID NO: 260397 - DNA, 15 bp, Homo sapiens
cgctcagctatttct

SEQ ID NO: 260398 - DNA, 15 bp, Homo sapiens
acgctcagctatttc

SEQ ID NO: 260399 - DNA, 15 bp, Homo sapiens
cacgctcagctattt

SEQ ID NO: 260400 - DNA, 15 bp, Homo sapiens
ccacgctcagctatt

SEQ ID NO: 260401 - DNA, 15 bp, Homo sapiens
accacgctcagctat

SEQ ID NO: 260402 - DNA, 15 bp, Homo sapiens
caccacgctcagcta

SEQ ID NO: 260403 - DNA, 15 bp, Homo sapiens
ccaccacgctcagct

SEQ ID NO: 260404 - DNA, 15 bp, Homo sapiens
gccaccacgctcagc

SEQ ID NO: 260405 - DNA, 15 bp, Homo sapiens
ggccaccacgctcag

SEQ ID NO: 260406 - DNA, 15 bp, Homo sapiens
aggccaccacgctca

SEQ ID NO: 260407 - DNA, 15 bp, Homo sapiens
taggccaccacgctc

SEQ ID NO: 260408 - DNA, 15 bp, Homo sapiens
ataggccaccacgct

SEQ ID NO: 260409 - DNA, 15 bp, Homo sapiens
cataggccaccacgc

SEQ ID NO: 260410 - DNA, 15 bp, Homo sapiens
gcataggccaccacg

SEQ ID NO: 260411 - DNA, 15 bp, Homo sapiens
ggcataggccaccac

SEQ ID NO: 260412 - DNA, 15 bp, Homo sapiens
aggcataggccacca

SEQ ID NO: 260413 - DNA, 15 bp, Homo sapiens
caggcataggccacc

SEQ ID NO: 260414 - DNA, 15 bp, Homo sapiens
acaggcataggccac

SEQ ID NO: 260415 - DNA, 15 bp, Homo sapiens
tacaggcataggcca

SEQ ID NO: 260416 - DNA, 15 bp, Homo sapiens
ctacaggcataggcc

SEQ ID NO: 260417 - DNA, 15 bp, Homo sapiens
actacaggcataggc

SEQ ID NO: 260418 - DNA, 15 bp, Homo sapiens
gactacaggcatagg

SEQ ID NO: 260419 - DNA, 15 bp, Homo sapiens
ggactacaggcatag

SEQ ID NO: 260420 - DNA, 15 bp, Homo sapiens
gggactacaggcata

SEQ ID NO: 260421 - DNA, 15 bp, Homo sapiens
tgggactacaggcat

SEQ ID NO: 260422 - DNA, 15 bp, Homo sapiens
ctgggactacaggca

SEQ ID NO: 260423 - DNA, 15 bp, Homo sapiens
gctgggactacaggc

SEQ ID NO: 260424 - DNA, 15 bp, Homo sapiens
agctgggactacagg

SEQ ID NO: 260425 - DNA, 15 bp, Homo sapiens
tagctgggactacag

SEQ ID NO: 260426 - DNA, 15 bp, Homo sapiens
atagctgggactaca

SEQ ID NO: 260427 - DNA, 15 bp, Homo sapiens
aatagctgggactac

SEQ ID NO: 260428 - DNA, 15 bp, Homo sapiens
aaatagctgggacta

SEQ ID NO: 260429 - DNA, 15 bp, Homo sapiens
caaatagctgggact

SEQ ID NO: 260430 - DNA, 15 bp, Homo sapiens
ccaaatagctgggac

SEQ ID NO: 260431 - DNA, 15 bp, Homo sapiens
cccaaatagctggga

SEQ ID NO: 260432 - DNA, 15 bp, Homo sapiens
tcccaaatagctggg

SEQ ID NO: 260433 - DNA, 15 bp, Homo sapiens
ctcccaaatagctgg

SEQ ID NO: 260434 - DNA, 15 bp, Homo sapiens
cctcccaaatagctg

SEQ ID NO: 260435 - DNA, 15 bp, Homo sapiens
gcctcccaaatagct

SEQ ID NO: 260436 - DNA, 15 bp, Homo sapiens
agcctcccaaatagc

SEQ ID NO: 260437 - DNA, 15 bp, Homo sapiens
cagcctcccaaatag

SEQ ID NO: 260438 - DNA, 15 bp, Homo sapiens
tcagcctcccaaata

SEQ ID NO: 260439 - DNA, 15 bp, Homo sapiens
gcctcagcctcccaa

SEQ ID NO: 260440 - DNA, 15 bp, Homo sapiens
tgcctcagcctccca

SEQ ID NO: 260441 - DNA, 15 bp, Homo sapiens
accaggttcaagcga

SEQ ID NO: 260442 - DNA, 15 bp, Homo sapiens
taccaggttcaagcg

SEQ ID NO: 260443 - DNA, 15 bp, Homo sapiens
ctaccaggttcaagc

SEQ ID NO: 260444 - DNA, 15 bp, Homo sapiens
cctaccaggttcaag

SEQ ID NO: 260445 - DNA, 15 bp, Homo sapiens
acctaccaggttcaa

SEQ ID NO: 260446 - DNA, 15 bp, Homo sapiens
cacctaccaggttca

SEQ ID NO: 260447 - DNA, 15 bp, Homo sapiens
ccacctaccaggttc

SEQ ID NO: 260448 - DNA, 15 bp, Homo sapiens
tccacctaccaggtt

SEQ ID NO: 260449 - DNA, 15 bp, Homo sapiens
ctccacctaccaggt

SEQ ID NO: 260450 - DNA, 15 bp, Homo sapiens
cctccacctaccagg

SEQ ID NO: 260451 - DNA, 15 bp, Homo sapiens
acctccacctaccag

SEQ ID NO: 260452 - DNA, 15 bp, Homo sapiens
aacctccacctacca

SEQ ID NO: 260453 - DNA, 15 bp, Homo sapiens
caacctccacctacc

SEQ ID NO: 260454 - DNA, 15 bp, Homo sapiens
acaacctccacctac

SEQ ID NO: 260455 - DNA, 15 bp, Homo sapiens
tacaacctccaccta

SEQ ID NO: 260456 - DNA, 15 bp, Homo sapiens
ctacaacctccacct

SEQ ID NO: 260457 - DNA, 15 bp, Homo sapiens
actacaacctccacc

SEQ ID NO: 260458 - DNA, 15 bp, Homo sapiens
cactacaacctccac

SEQ ID NO: 260459 - DNA, 15 bp, Homo sapiens
tcactacaacctcca

SEQ ID NO: 260460 - DNA, 15 bp, Homo sapiens
ctcactacaacctcc

SEQ ID NO: 260461 - DNA, 15 bp, Homo sapiens
gctcactacaacctc

SEQ ID NO: 260462 - DNA, 15 bp, Homo sapiens
ggctcactacaacct

SEQ ID NO: 260463 - DNA, 15 bp, Homo sapiens
tggctcactacaacc

SEQ ID NO: 260464 - DNA, 15 bp, Homo sapiens
ttggctcactacaac

SEQ ID NO: 260465 - DNA, 15 bp, Homo sapiens
attggctcactacaa

SEQ ID NO: 260466 - DNA, 15 bp, Homo sapiens
tattggctcactaca

SEQ ID NO: 260467 - DNA, 15 bp, Homo sapiens
atattggctcactac

SEQ ID NO: 260468 - DNA, 15 bp, Homo sapiens
gatattggctcacta

SEQ ID NO: 260469 - DNA, 15 bp, Homo sapiens
tgatattggctcact

SEQ ID NO: 260470 - DNA, 15 bp, Homo sapiens
gtgatattggctcac

SEQ ID NO: 260471 - DNA, 15 bp, Homo sapiens
tgtgatattggctca

SEQ ID NO: 260472 - DNA, 15 bp, Homo sapiens
gtgtgatattggctc

SEQ ID NO: 260473 - DNA, 15 bp, Homo sapiens
ggtgtgatattggct

SEQ ID NO: 260474 - DNA, 15 bp, Homo sapiens
tggtgtgatattggc

SEQ ID NO: 260475 - DNA, 15 bp, Homo sapiens
gtggtgtgatattgg

SEQ ID NO: 260476 - DNA, 15 bp, Homo sapiens
agtggtgtgatattg

SEQ ID NO: 260477 - DNA, 15 bp, Homo sapiens
cagtggtgtgatatt

SEQ ID NO: 260478 - DNA, 15 bp, Homo sapiens
gcagtggtgtgatat

SEQ ID NO: 260479 - DNA, 15 bp, Homo sapiens
tgcagtggtgtgata

SEQ ID NO: 260480 - DNA, 15 bp, Homo sapiens
gtgcagtggtgtgat

SEQ ID NO: 260481 - DNA, 15 bp, Homo sapiens
agtgcagtggtgtga

SEQ ID NO: 260482 - DNA, 15 bp, Homo sapiens
gagtgcagtggtgtg

SEQ ID NO: 260483 - DNA, 15 bp, Homo sapiens
ggagtgcagtggtgt

SEQ ID NO: 260484 - DNA, 15 bp, Homo sapiens
tggagtgcagtggtg

SEQ ID NO: 260485 - DNA, 15 bp, Homo sapiens
ctggagtgcagtggt

SEQ ID NO: 260486 - DNA, 15 bp, Homo sapiens
agctggagtgcagtg

SEQ ID NO: 260487 - DNA, 15 bp, Homo sapiens
aagctggagtgcagt

SEQ ID NO: 260488 - DNA, 15 bp, Homo sapiens
caagctggagtgcag

SEQ ID NO: 260489 - DNA, 15 bp, Homo sapiens
ccaagctggagtgca

SEQ ID NO: 260490 - DNA, 15 bp, Homo sapiens
cccaagctggagtgc

SEQ ID NO: 260491 - DNA, 15 bp, Homo sapiens
gcccaagctggagtg

SEQ ID NO: 260492 - DNA, 15 bp, Homo sapiens
cgcccaagctggagt

SEQ ID NO: 260493 - DNA, 15 bp, Homo sapiens
tcgcccaagctggag

SEQ ID NO: 260494 - DNA, 15 bp, Homo sapiens
gtcgcccaagctgga

SEQ ID NO: 260495 - DNA, 15 bp, Homo sapiens
tgtcgcccaagctgg

SEQ ID NO: 260496 - DNA, 15 bp, Homo sapiens
ttgtcgcccaagctg

SEQ ID NO: 260497 - DNA, 15 bp, Homo sapiens
cttgtcgcccaagct

SEQ ID NO: 260498 - DNA, 15 bp, Homo sapiens
tcttgtcgcccaagc

SEQ ID NO: 260499 - DNA, 15 bp, Homo sapiens
ctcttgtcgcccaag

SEQ ID NO: 260500 - DNA, 15 bp, Homo sapiens
gctcttgtcgcccaa

SEQ ID NO: 260501 - DNA, 15 bp, Homo sapiens
tgctcttgtcgccca

SEQ ID NO: 260502 - DNA, 15 bp, Homo sapiens
ttgctcttgtcgccc

SEQ ID NO: 260503 - DNA, 15 bp, Homo sapiens
tttgctcttgtcgcc

SEQ ID NO: 260504 - DNA, 15 bp, Homo sapiens
ttttgctcttgtcgc

SEQ ID NO: 260505 - DNA, 15 bp, Homo sapiens
gttttgctcttgtcg

SEQ ID NO: 260506 - DNA, 15 bp, Homo sapiens
agttttgctcttgtc

SEQ ID NO: 260507 - DNA, 15 bp, Homo sapiens
gggagttttgctctt

SEQ ID NO: 260508 - DNA, 15 bp, Homo sapiens
tgggagttttgctct

SEQ ID NO: 260509 - DNA, 15 bp, Homo sapiens
atgggagttttgctc

SEQ ID NO: 260510 - DNA, 15 bp, Homo sapiens
gatgggagttttgct

SEQ ID NO: 260511 - DNA, 15 bp, Homo sapiens
agatgggagttttgc

SEQ ID NO: 260512 - DNA, 15 bp, Homo sapiens
gagatgggagttttg

SEQ ID NO: 260513 - DNA, 15 bp, Homo sapiens
tgagatgggagtttt

SEQ ID NO: 260514 - DNA, 15 bp, Homo sapiens
ttgagatgggagttt

SEQ ID NO: 260515 - DNA, 15 bp, Homo sapiens
tttgagatgggagtt

SEQ ID NO: 260516 - DNA, 15 bp, Homo sapiens
ttttgagatgggagt

SEQ ID NO: 260517 - DNA, 15 bp, Homo sapiens
tttttgagatgggag

SEQ ID NO: 260518 - DNA, 15 bp, Homo sapiens
atttttgagatggga

SEQ ID NO: 260519 - DNA, 15 bp, Homo sapiens
tatttttgagatggg

SEQ ID NO: 260520 - DNA, 15 bp, Homo sapiens
ttatttttgagatgg

SEQ ID NO: 260521 - DNA, 15 bp, Homo sapiens
tttatttttgagatg

SEQ ID NO: 260522 - DNA, 15 bp, Homo sapiens
atttatttttgagat

SEQ ID NO: 260523 - DNA, 15 bp, Homo sapiens
tatttatttttgaga

SEQ ID NO: 260524 - DNA, 15 bp, Homo sapiens
ttatttatttttgag

SEQ ID NO: 260525 - DNA, 15 bp, Homo sapiens
tttatttatttttga

SEQ ID NO: 260526 - DNA, 15 bp, Homo sapiens
atttatttatttttg

SEQ ID NO: 260527 - DNA, 15 bp, Homo sapiens
tatttatttattttt

SEQ ID NO: 260528 - DNA, 15 bp, Homo sapiens
cttatttatttattt

SEQ ID NO: 260529 - DNA, 15 bp, Homo sapiens
acttatttatttatt

SEQ ID NO: 260530 - DNA, 15 bp, Homo sapiens
tacttatttatttat

SEQ ID NO: 260531 - DNA, 15 bp, Homo sapiens
ttacttatttattta

SEQ ID NO: 260532 - DNA, 15 bp, Homo sapiens
tttacttatttattt

SEQ ID NO: 260533 - DNA, 15 bp, Homo sapiens
atttacttatttatt

SEQ ID NO: 260534 - DNA, 15 bp, Homo sapiens
tatttacttatttat

SEQ ID NO: 260535 - DNA, 15 bp, Homo sapiens
ttatttacttattta

SEQ ID NO: 260536 - DNA, 15 bp, Homo sapiens
tttatttacttattt

SEQ ID NO: 260537 - DNA, 15 bp, Homo sapiens
atttatttacttatt

SEQ ID NO: 260538 - DNA, 15 bp, Homo sapiens
catttatttacttat

SEQ ID NO: 260539 - DNA, 15 bp, Homo sapiens
tcatttatttactta

SEQ ID NO: 260540 - DNA, 15 bp, Homo sapiens
ttcatttatttactt

SEQ ID NO: 260541 - DNA, 15 bp, Homo sapiens
attcatttatttact

SEQ ID NO: 260542 - DNA, 15 bp, Homo sapiens
tattcatttatttac

SEQ ID NO: 260543 - DNA, 15 bp, Homo sapiens
ttattcatttattta

SEQ ID NO: 260544 - DNA, 15 bp, Homo sapiens
attattcatttattt

SEQ ID NO: 260545 - DNA, 15 bp, Homo sapiens
tattattcatttatt

SEQ ID NO: 260546 - DNA, 15 bp, Homo sapiens
ttattattcatttat

SEQ ID NO: 260547 - DNA, 15 bp, Homo sapiens
tttattattcattta

SEQ ID NO: 260548 - DNA, 15 bp, Homo sapiens
atttattattcattt

SEQ ID NO: 260549 - DNA, 15 bp, Homo sapiens
tatttattattcatt

SEQ ID NO: 260550 - DNA, 15 bp, Homo sapiens
ttatttattattcat

SEQ ID NO: 260551 - DNA, 15 bp, Homo sapiens
tttatttattattca

SEQ ID NO: 260552 - DNA, 15 bp, Homo sapiens
atttatttattattc

SEQ ID NO: 260553 - DNA, 15 bp, Homo sapiens
tatttatttattatt

SEQ ID NO: 260554 - DNA, 15 bp, Homo sapiens
atatttatttattat

SEQ ID NO: 260555 - DNA, 15 bp, Homo sapiens
catatttatttatta

SEQ ID NO: 260556 - DNA, 15 bp, Homo sapiens
gcatatttatttatt

SEQ ID NO: 260557 - DNA, 15 bp, Homo sapiens
ggcatatttatttat

SEQ ID NO: 260558 - DNA, 15 bp, Homo sapiens
tggcatatttattta

SEQ ID NO: 260559 - DNA, 15 bp, Homo sapiens
ctggcatatttattt

SEQ ID NO: 260560 - DNA, 15 bp, Homo sapiens
actggcatatttatt

SEQ ID NO: 260561 - DNA, 15 bp, Homo sapiens
aactggcatatttat

SEQ ID NO: 260562 - DNA, 15 bp, Homo sapiens
aaactggcatattta

SEQ ID NO: 260563 - DNA, 15 bp, Homo sapiens
aaaactggcatattt

SEQ ID NO: 260564 - DNA, 15 bp, Homo sapiens
taaaactggcatatt

SEQ ID NO: 260565 - DNA, 15 bp, Homo sapiens
ctaaaactggcatat

SEQ ID NO: 260566 - DNA, 15 bp, Homo sapiens
tctaaaactggcata

SEQ ID NO: 260567 - DNA, 15 bp, Homo sapiens
ttctaaaactggcat

SEQ ID NO: 260568 - DNA, 15 bp, Homo sapiens
attctaaaactggca

SEQ ID NO: 260569 - DNA, 15 bp, Homo sapiens
cattctaaaactggc

SEQ ID NO: 260570 - DNA, 15 bp, Homo sapiens
tcattctaaaactgg

SEQ ID NO: 260571 - DNA, 15 bp, Homo sapiens
ttcattctaaaactg

SEQ ID NO: 260572 - DNA, 15 bp, Homo sapiens
attcattctaaaact

SEQ ID NO: 260573 - DNA, 15 bp, Homo sapiens
cattcattctaaaac

SEQ ID NO: 260574 - DNA, 15 bp, Homo sapiens
tcattcattctaaaa

SEQ ID NO: 260575 - DNA, 15 bp, Homo sapiens
ttcattcattctaaa

SEQ ID NO: 260576 - DNA, 15 bp, Homo sapiens
attcattcattctaa

SEQ ID NO: 260577 - DNA, 15 bp, Homo sapiens
tattcattcattcta

SEQ ID NO: 260578 - DNA, 15 bp, Homo sapiens
ttattcattcattct

SEQ ID NO: 260579 - DNA, 15 bp, Homo sapiens
attattcattcattc

SEQ ID NO: 260580 - DNA, 15 bp, Homo sapiens
tattattcattcatt

SEQ ID NO: 260581 - DNA, 15 bp, Homo sapiens
ttattattcattcat

SEQ ID NO: 260582 - DNA, 15 bp, Homo sapiens
tttattattcattca

SEQ ID NO: 260583 - DNA, 15 bp, Homo sapiens
atttattattcattc

SEQ ID NO: 260584 - DNA, 15 bp, Homo sapiens
atatttattattcat

SEQ ID NO: 260585 - DNA, 15 bp, Homo sapiens
catatttattattca

SEQ ID NO: 260586 - DNA, 15 bp, Homo sapiens
gcatatttattattc

SEQ ID NO: 260587 - DNA, 15 bp, Homo sapiens
ggcatatttattatt

SEQ ID NO: 260588 - DNA, 15 bp, Homo sapiens
tggcatatttattat

SEQ ID NO: 260589 - DNA, 15 bp, Homo sapiens
ctggcatatttatta

SEQ ID NO: 260590 - DNA, 15 bp, Homo sapiens
tttctaaaactggca

SEQ ID NO: 260591 - DNA, 15 bp, Homo sapiens
ttttctaaaactggc

SEQ ID NO: 260592 - DNA, 15 bp, Homo sapiens
tttttctaaaactgg

SEQ ID NO: 260593 - DNA, 15 bp, Homo sapiens
ttttttctaaaactg

SEQ ID NO: 260594 - DNA, 15 bp, Homo sapiens
cttttttctaaaact

SEQ ID NO: 260595 - DNA, 15 bp, Homo sapiens
ccttttttctaaaac

SEQ ID NO: 260596 - DNA, 15 bp, Homo sapiens
cccttttttctaaaa

SEQ ID NO: 260597 - DNA, 15 bp, Homo sapiens
gcccttttttctaaa

SEQ ID NO: 260598 - DNA, 15 bp, Homo sapiens
tgcccttttttctaa

SEQ ID NO: 260599 - DNA, 15 bp, Homo sapiens
gtgcccttttttcta

SEQ ID NO: 260600 - DNA, 15 bp, Homo sapiens
agtgcccttttttct

SEQ ID NO: 260601 - DNA, 15 bp, Homo sapiens
aagtgcccttttttc

SEQ ID NO: 260602 - DNA, 15 bp, Homo sapiens
taagtgccctttttt

SEQ ID NO: 260603 - DNA, 15 bp, Homo sapiens
gtaagtgcccttttt

SEQ ID NO: 260604 - DNA, 15 bp, Homo sapiens
cgtaagtgccctttt

SEQ ID NO: 260605 - DNA, 15 bp, Homo sapiens
acgtaagtgcccttt

SEQ ID NO: 260606 - DNA, 15 bp, Homo sapiens
cacgtaagtgccctt

SEQ ID NO: 260607 - DNA, 15 bp, Homo sapiens
gcacgtaagtgccct

SEQ ID NO: 260608 - DNA, 15 bp, Homo sapiens
tgcacgtaagtgccc

SEQ ID NO: 260609 - DNA, 15 bp, Homo sapiens
atgcacgtaagtgcc

SEQ ID NO: 260610 - DNA, 15 bp, Homo sapiens
aatgcacgtaagtgc

SEQ ID NO: 260611 - DNA, 15 bp, Homo sapiens
caatgcacgtaagtg

SEQ ID NO: 260612 - DNA, 15 bp, Homo sapiens
acaatgcacgtaagt

SEQ ID NO: 260613 - DNA, 15 bp, Homo sapiens
tacaatgcacgtaag

SEQ ID NO: 260614 - DNA, 15 bp, Homo sapiens
gtacaatgcacgtaa

SEQ ID NO: 260615 - DNA, 15 bp, Homo sapiens
tgtacaatgcacgta

SEQ ID NO: 260616 - DNA, 15 bp, Homo sapiens
atgtacaatgcacgt

SEQ ID NO: 260617 - DNA, 15 bp, Homo sapiens
catgtacaatgcacg

SEQ ID NO: 260618 - DNA, 15 bp, Homo sapiens
acatgtacaatgcac

SEQ ID NO: 260619 - DNA, 15 bp, Homo sapiens
cacatgtacaatgca

SEQ ID NO: 260620 - DNA, 15 bp, Homo sapiens
gcacatgtacaatgc

SEQ ID NO: 260621 - DNA, 15 bp, Homo sapiens
tgcacatgtacaatg

SEQ ID NO: 260622 - DNA, 15 bp, Homo sapiens
atgcacatgtacaat

SEQ ID NO: 260623 - DNA, 15 bp, Homo sapiens
gatgcacatgtacaa

SEQ ID NO: 260624 - DNA, 15 bp, Homo sapiens
agatgcacatgtaca

SEQ ID NO: 260625 - DNA, 15 bp, Homo sapiens
tagatgcacatgtac

SEQ ID NO: 260626 - DNA, 15 bp, Homo sapiens
gtagatgcacatgta

SEQ ID NO: 260627 - DNA, 15 bp, Homo sapiens
tgtagatgcacatgt

SEQ ID NO: 260628 - DNA, 15 bp, Homo sapiens
ttgtagatgcacatg

SEQ ID NO: 260629 - DNA, 15 bp, Homo sapiens
tttgtagatgcacat

SEQ ID NO: 260630 - DNA, 15 bp, Homo sapiens
atttgtagatgcaca

SEQ ID NO: 260631 - DNA, 15 bp, Homo sapiens
catttgtagatgcac

SEQ ID NO: 260632 - DNA, 15 bp, Homo sapiens
acatttgtagatgca

SEQ ID NO: 260633 - DNA, 15 bp, Homo sapiens
tacatttgtagatgc

SEQ ID NO: 260634 - DNA, 15 bp, Homo sapiens
ttacatttgtagatg

SEQ ID NO: 260635 - DNA, 15 bp, Homo sapiens
attacatttgtagat

SEQ ID NO: 260636 - DNA, 15 bp, Homo sapiens
cattacatttgtaga

SEQ ID NO: 260637 - DNA, 15 bp, Homo sapiens
ccattacatttgtag

SEQ ID NO: 260638 - DNA, 15 bp, Homo sapiens
cccattacatttgta

SEQ ID NO: 260639 - DNA, 15 bp, Homo sapiens
acccattacatttgt

SEQ ID NO: 260640 - DNA, 15 bp, Homo sapiens
aacccattacatttg

SEQ ID NO: 260641 - DNA, 15 bp, Homo sapiens
taacccattacattt

SEQ ID NO: 260642 - DNA, 15 bp, Homo sapiens
ataacccattacatt

SEQ ID NO: 260643 - DNA, 15 bp, Homo sapiens
aataacccattacat

SEQ ID NO: 260644 - DNA, 15 bp, Homo sapiens
aaataacccattaca

SEQ ID NO: 260645 - DNA, 15 bp, Homo sapiens
gaaataacccattac

SEQ ID NO: 260646 - DNA, 15 bp, Homo sapiens
ggaaataacccatta

SEQ ID NO: 260647 - DNA, 15 bp, Homo sapiens
cggaaataacccatt

SEQ ID NO: 260648 - DNA, 15 bp, Homo sapiens
acggaaataacccat

SEQ ID NO: 260649 - DNA, 15 bp, Homo sapiens
cacggaaataaccca

SEQ ID NO: 260650 - DNA, 15 bp, Homo sapiens
acacggaaataaccc

SEQ ID NO: 260651 - DNA, 15 bp, Homo sapiens
tacacggaaataacc

SEQ ID NO: 260652 - DNA, 15 bp, Homo sapiens
atacacggaaataac

SEQ ID NO: 260653 - DNA, 15 bp, Homo sapiens
catacacggaaataa

SEQ ID NO: 260654 - DNA, 15 bp, Homo sapiens
tcatacacggaaata

SEQ ID NO: 260655 - DNA, 15 bp, Homo sapiens
ttcatacacggaaat

SEQ ID NO: 260656 - DNA, 15 bp, Homo sapiens
attcatacacggaaa

SEQ ID NO: 260657 - DNA, 15 bp, Homo sapiens
gattcatacacggaa

SEQ ID NO: 260658 - DNA, 15 bp, Homo sapiens
agattcatacacgga

SEQ ID NO: 260659 - DNA, 15 bp, Homo sapiens
cagattcatacacgg

SEQ ID NO: 260660 - DNA, 15 bp, Homo sapiens
acagattcatacacg

SEQ ID NO: 260661 - DNA, 15 bp, Homo sapiens
tacagattcatacac

SEQ ID NO: 260662 - DNA, 15 bp, Homo sapiens
ttacagattcataca

SEQ ID NO: 260663 - DNA, 15 bp, Homo sapiens
attacagattcatac

SEQ ID NO: 260664 - DNA, 15 bp, Homo sapiens
aattacagattcata

SEQ ID NO: 260665 - DNA, 15 bp, Homo sapiens
caattacagattcat

SEQ ID NO: 260666 - DNA, 15 bp, Homo sapiens
tcaattacagattca

SEQ ID NO: 260667 - DNA, 15 bp, Homo sapiens
atcaattacagattc

SEQ ID NO: 260668 - DNA, 15 bp, Homo sapiens
catcaattacagatt

SEQ ID NO: 260669 - DNA, 15 bp, Homo sapiens
gcatcaattacagat

SEQ ID NO: 260670 - DNA, 15 bp, Homo sapiens
agcatcaattacaga

SEQ ID NO: 260671 - DNA, 15 bp, Homo sapiens
tagcatcaattacag

SEQ ID NO: 260672 - DNA, 15 bp, Homo sapiens
ttagcatcaattaca

SEQ ID NO: 260673 - DNA, 15 bp, Homo sapiens
gttagcatcaattac

SEQ ID NO: 260674 - DNA, 15 bp, Homo sapiens
tgttagcatcaatta

SEQ ID NO: 260675 - DNA, 15 bp, Homo sapiens
atgttagcatcaatt

SEQ ID NO: 260676 - DNA, 15 bp, Homo sapiens
aatgttagcatcaat

SEQ ID NO: 260677 - DNA, 15 bp, Homo sapiens
aaatgttagcatcaa

SEQ ID NO: 260678 - DNA, 15 bp, Homo sapiens
taaatgttagcatca

SEQ ID NO: 260679 - DNA, 15 bp, Homo sapiens
ttaaatgttagcatc

SEQ ID NO: 260680 - DNA, 15 bp, Homo sapiens
tttaaatgttagcat

SEQ ID NO: 260681 - DNA, 15 bp, Homo sapiens
ctttaaatgttagca

SEQ ID NO: 260682 - DNA, 15 bp, Homo sapiens
actttaaatgttagc

SEQ ID NO: 260683 - DNA, 15 bp, Homo sapiens
aactttaaatgttag

SEQ ID NO: 260684 - DNA, 15 bp, Homo sapiens
aaactttaaatgtta

SEQ ID NO: 260685 - DNA, 15 bp, Homo sapiens
gaaactttaaatgtt

SEQ ID NO: 260686 - DNA, 15 bp, Homo sapiens
tgaaactttaaatgt

SEQ ID NO: 260687 - DNA, 15 bp, Homo sapiens
atgaaactttaaatg

SEQ ID NO: 260688 - DNA, 15 bp, Homo sapiens
gatgaaactttaaat

SEQ ID NO: 260689 - DNA, 15 bp, Homo sapiens
tgatgaaactttaaa

SEQ ID NO: 260690 - DNA, 15 bp, Homo sapiens
ctgatgaaactttaa

SEQ ID NO: 260691 - DNA, 15 bp, Homo sapiens
tctgatgaaacttta

SEQ ID NO: 260692 - DNA, 15 bp, Homo sapiens
ctctgatgaaacttt

SEQ ID NO: 260693 - DNA, 15 bp, Homo sapiens
cctctgatgaaactt

SEQ ID NO: 260694 - DNA, 15 bp, Homo sapiens
gcctctgatgaaact

SEQ ID NO: 260695 - DNA, 15 bp, Homo sapiens
ggcctctgatgaaac

SEQ ID NO: 260696 - DNA, 15 bp, Homo sapiens
aggcctctgatgaaa

SEQ ID NO: 260697 - DNA, 15 bp, Homo sapiens
taggcctctgatgaa

SEQ ID NO: 260698 - DNA, 15 bp, Homo sapiens
ataggcctctgatga

SEQ ID NO: 260699 - DNA, 15 bp, Homo sapiens
tataggcctctgatg

SEQ ID NO: 260700 - DNA, 15 bp, Homo sapiens
atataggcctctgat

SEQ ID NO: 260701 - DNA, 15 bp, Homo sapiens
catataggcctctga

SEQ ID NO: 260702 - DNA, 15 bp, Homo sapiens
acatataggcctctg

SEQ ID NO: 260703 - DNA, 15 bp, Homo sapiens
tacatataggcctct

SEQ ID NO: 260704 - DNA, 15 bp, Homo sapiens
ttacatataggcctc

SEQ ID NO: 260705 - DNA, 15 bp, Homo sapiens
cttacatataggcct

SEQ ID NO: 260706 - DNA, 15 bp, Homo sapiens
acttacatataggcc

SEQ ID NO: 260707 - DNA, 15 bp, Homo sapiens
tacttacatataggc

SEQ ID NO: 260708 - DNA, 15 bp, Homo sapiens
ttacttacatatagg

SEQ ID NO: 260709 - DNA, 15 bp, Homo sapiens
tttacttacatatag

SEQ ID NO: 260710 - DNA, 15 bp, Homo sapiens
atttacttacatata

SEQ ID NO: 260711 - DNA, 15 bp, Homo sapiens
aatttacttacatat

SEQ ID NO: 260712 - DNA, 15 bp, Homo sapiens
gaatttacttacata

SEQ ID NO: 260713 - DNA, 15 bp, Homo sapiens
agaatttacttacat

SEQ ID NO: 260714 - DNA, 15 bp, Homo sapiens
tagaatttacttaca

SEQ ID NO: 260715 - DNA, 15 bp, Homo sapiens
ttagaatttacttac

SEQ ID NO: 260716 - DNA, 15 bp, Homo sapiens
cttagaatttactta

SEQ ID NO: 260717 - DNA, 15 bp, Homo sapiens
ccttagaatttactt

SEQ ID NO: 260718 - DNA, 15 bp, Homo sapiens
gccttagaatttact

SEQ ID NO: 260719 - DNA, 15 bp, Homo sapiens
agccttagaatttac

SEQ ID NO: 260720 - DNA, 15 bp, Homo sapiens
tagccttagaattta

SEQ ID NO: 260721 - DNA, 15 bp, Homo sapiens
ctagccttagaattt

SEQ ID NO: 260722 - DNA, 15 bp, Homo sapiens
actagccttagaatt

SEQ ID NO: 260723 - DNA, 15 bp, Homo sapiens
aactagccttagaat

SEQ ID NO: 260724 - DNA, 15 bp, Homo sapiens
caactagccttagaa

SEQ ID NO: 260725 - DNA, 15 bp, Homo sapiens
tcaactagccttaga

SEQ ID NO: 260726 - DNA, 15 bp, Homo sapiens
ttcaactagccttag

SEQ ID NO: 260727 - DNA, 15 bp, Homo sapiens
tttcaactagcctta

SEQ ID NO: 260728 - DNA, 15 bp, Homo sapiens
gtttcaactagcctt

SEQ ID NO: 260729 - DNA, 15 bp, Homo sapiens
tgtttcaactagcct

SEQ ID NO: 260730 - DNA, 15 bp, Homo sapiens
ctgtttcaactagcc

SEQ ID NO: 260731 - DNA, 15 bp, Homo sapiens
tctgtttcaactagc

SEQ ID NO: 260732 - DNA, 15 bp, Homo sapiens
atctgtttcaactag

SEQ ID NO: 260733 - DNA, 15 bp, Homo sapiens
aatctgtttcaacta

SEQ ID NO: 260734 - DNA, 15 bp, Homo sapiens
aaatctgtttcaact

SEQ ID NO: 260735 - DNA, 15 bp, Homo sapiens
taaatctgtttcaac

SEQ ID NO: 260736 - DNA, 15 bp, Homo sapiens
ataaatctgtttcaa

SEQ ID NO: 260737 - DNA, 15 bp, Homo sapiens
cataaatctgtttca

SEQ ID NO: 260738 - DNA, 15 bp, Homo sapiens
acataaatctgtttc

SEQ ID NO: 260739 - DNA, 15 bp, Homo sapiens
aacataaatctgttt

SEQ ID NO: 260740 - DNA, 15 bp, Homo sapiens
gaacataaatctgtt

SEQ ID NO: 260741 - DNA, 15 bp, Homo sapiens
agaacataaatctgt

SEQ ID NO: 260742 - DNA, 15 bp, Homo sapiens
gagaacataaatctg

SEQ ID NO: 260743 - DNA, 15 bp, Homo sapiens
tgagaacataaatct

SEQ ID NO: 260744 - DNA, 15 bp, Homo sapiens
gtgagaacataaatc

SEQ ID NO: 260745 - DNA, 15 bp, Homo sapiens
ggtgagaacataaat

SEQ ID NO: 260746 - DNA, 15 bp, Homo sapiens
aggtgagaacataaa

SEQ ID NO: 260747 - DNA, 15 bp, Homo sapiens
aaggtgagaacataa

SEQ ID NO: 260748 - DNA, 15 bp, Homo sapiens
taaggtgagaacata

SEQ ID NO: 260749 - DNA, 15 bp, Homo sapiens
ttaaggtgagaacat

SEQ ID NO: 260750 - DNA, 15 bp, Homo sapiens
cttaaggtgagaaca

SEQ ID NO: 260751 - DNA, 15 bp, Homo sapiens
tcttaaggtgagaac

SEQ ID NO: 260752 - DNA, 15 bp, Homo sapiens
ctcttaaggtgagaa

SEQ ID NO: 260753 - DNA, 15 bp, Homo sapiens
gctcttaaggtgaga

SEQ ID NO: 260754 - DNA, 15 bp, Homo sapiens
tgctcttaaggtgag

SEQ ID NO: 260755 - DNA, 15 bp, Homo sapiens
ctgctcttaaggtga

SEQ ID NO: 260756 - DNA, 15 bp, Homo sapiens
gctgctcttaaggtg

SEQ ID NO: 260757 - DNA, 15 bp, Homo sapiens
agctgctcttaaggt

SEQ ID NO: 260758 - DNA, 15 bp, Homo sapiens
tagctgctcttaagg

SEQ ID NO: 260759 - DNA, 15 bp, Homo sapiens
gtagctgctcttaag

SEQ ID NO: 260760 - DNA, 15 bp, Homo sapiens
cgtagctgctcttaa

SEQ ID NO: 260761 - DNA, 15 bp, Homo sapiens
gcgtagctgctctta

SEQ ID NO: 260762 - DNA, 15 bp, Homo sapiens
tgcgtagctgctctt

SEQ ID NO: 260763 - DNA, 15 bp, Homo sapiens
ctgcgtagctgctct

SEQ ID NO: 260764 - DNA, 15 bp, Homo sapiens
cctgcgtagctgctc

SEQ ID NO: 260765 - DNA, 15 bp, Homo sapiens
gcctgcgtagctgct

SEQ ID NO: 260766 - DNA, 15 bp, Homo sapiens
tgcctgcgtagctgc

SEQ ID NO: 260767 - DNA, 15 bp, Homo sapiens
atgcctgcgtagctg

SEQ ID NO: 260768 - DNA, 15 bp, Homo sapiens
gatgcctgcgtagct

SEQ ID NO: 260769 - DNA, 15 bp, Homo sapiens
agatgcctgcgtagc

SEQ ID NO: 260770 - DNA, 15 bp, Homo sapiens
cagatgcctgcgtag

SEQ ID NO: 260771 - DNA, 15 bp, Homo sapiens
acagatgcctgcgta

SEQ ID NO: 260772 - DNA, 15 bp, Homo sapiens
cacagatgcctgcgt

SEQ ID NO: 260773 - DNA, 15 bp, Homo sapiens
tcacagatgcctgcg

SEQ ID NO: 260774 - DNA, 15 bp, Homo sapiens
ttcacagatgcctgc

SEQ ID NO: 260775 - DNA, 15 bp, Homo sapiens
attcacagatgcctg

SEQ ID NO: 260776 - DNA, 15 bp, Homo sapiens
aattcacagatgcct

SEQ ID NO: 260777 - DNA, 15 bp, Homo sapiens
taattcacagatgcc

SEQ ID NO: 260778 - DNA, 15 bp, Homo sapiens
ataattcacagatgc

SEQ ID NO: 260779 - DNA, 15 bp, Homo sapiens
tataattcacagatg

SEQ ID NO: 260780 - DNA, 15 bp, Homo sapiens
gtataattcacagat

SEQ ID NO: 260781 - DNA, 15 bp, Homo sapiens
agtataattcacaga

SEQ ID NO: 260782 - DNA, 15 bp, Homo sapiens
tagtataattcacag

SEQ ID NO: 260783 - DNA, 15 bp, Homo sapiens
ttagtataattcaca

SEQ ID NO: 260784 - DNA, 15 bp, Homo sapiens
attagtataattcac

SEQ ID NO: 260785 - DNA, 15 bp, Homo sapiens
tattagtataattca

SEQ ID NO: 260786 - DNA, 15 bp, Homo sapiens
ttattagtataattc

SEQ ID NO: 260787 - DNA, 15 bp, Homo sapiens
attattagtataatt

SEQ ID NO: 260788 - DNA, 15 bp, Homo sapiens
gattattagtataat

SEQ ID NO: 260789 - DNA, 15 bp, Homo sapiens
ggattattagtataa

SEQ ID NO: 260790 - DNA, 15 bp, Homo sapiens
aggattattagtata

SEQ ID NO: 260791 - DNA, 15 bp, Homo sapiens
aaggattattagtat

SEQ ID NO: 260792 - DNA, 15 bp, Homo sapiens
aaaggattattagta

SEQ ID NO: 260793 - DNA, 15 bp, Homo sapiens
taaaggattattagt

SEQ ID NO: 260794 - DNA, 15 bp, Homo sapiens
gtaaaggattattag

SEQ ID NO: 260795 - DNA, 15 bp, Homo sapiens
agtaaaggattatta

SEQ ID NO: 260796 - DNA, 15 bp, Homo sapiens
cagtaaaggattatt

SEQ ID NO: 260797 - DNA, 15 bp, Homo sapiens
acagtaaaggattat

SEQ ID NO: 260798 - DNA, 15 bp, Homo sapiens
gacagtaaaggatta

SEQ ID NO: 260799 - DNA, 15 bp, Homo sapiens
ggacagtaaaggatt

SEQ ID NO: 260800 - DNA, 15 bp, Homo sapiens
aggacagtaaaggat

SEQ ID NO: 260801 - DNA, 15 bp, Homo sapiens
aaggacagtaaagga

SEQ ID NO: 260802 - DNA, 15 bp, Homo sapiens
aaaggacagtaaagg

SEQ ID NO: 260803 - DNA, 15 bp, Homo sapiens
aaaaggacagtaaag

SEQ ID NO: 260804 - DNA, 15 bp, Homo sapiens
gaaaaggacagtaaa

SEQ ID NO: 260805 - DNA, 15 bp, Homo sapiens
ggaaaaggacagtaa

SEQ ID NO: 260806 - DNA, 15 bp, Homo sapiens
gggaaaaggacagta

SEQ ID NO: 260807 - DNA, 15 bp, Homo sapiens
tgggaaaaggacagt

SEQ ID NO: 260808 - DNA, 15 bp, Homo sapiens
atgggaaaaggacag

SEQ ID NO: 260809 - DNA, 15 bp, Homo sapiens
gatgggaaaaggaca

SEQ ID NO: 260810 - DNA, 15 bp, Homo sapiens
agatgggaaaaggac

SEQ ID NO: 260811 - DNA, 15 bp, Homo sapiens
aagatgggaaaagga

SEQ ID NO: 260812 - DNA, 15 bp, Homo sapiens
caagatgggaaaagg

SEQ ID NO: 260813 - DNA, 15 bp, Homo sapiens
acaagatgggaaaag

SEQ ID NO: 260814 - DNA, 15 bp, Homo sapiens
cacaagatgggaaaa

SEQ ID NO: 260815 - DNA, 15 bp, Homo sapiens
gcacaagatgggaaa

SEQ ID NO: 260816 - DNA, 15 bp, Homo sapiens
ggcacaagatgggaa

SEQ ID NO: 260817 - DNA, 15 bp, Homo sapiens
aggcacaagatggga

SEQ ID NO: 260818 - DNA, 15 bp, Homo sapiens
caggcacaagatggg

SEQ ID NO: 260819 - DNA, 15 bp, Homo sapiens
gcaggcacaagatgg

SEQ ID NO: 260820 - DNA, 15 bp, Homo sapiens
ggcaggcacaagatg

SEQ ID NO: 260821 - DNA, 15 bp, Homo sapiens
gggcaggcacaagat

SEQ ID NO: 260822 - DNA, 15 bp, Homo sapiens
agggcaggcacaaga

SEQ ID NO: 260823 - DNA, 15 bp, Homo sapiens
tagggcaggcacaag

SEQ ID NO: 260824 - DNA, 15 bp, Homo sapiens
ttagggcaggcacaa

SEQ ID NO: 260825 - DNA, 15 bp, Homo sapiens
tttagggcaggcaca

SEQ ID NO: 260826 - DNA, 15 bp, Homo sapiens
atttagggcaggcac

SEQ ID NO: 260827 - DNA, 15 bp, Homo sapiens
catttagggcaggca

SEQ ID NO: 260828 - DNA, 15 bp, Homo sapiens
acatttagggcaggc

SEQ ID NO: 260829 - DNA, 15 bp, Homo sapiens
tacatttagggcagg

SEQ ID NO: 260830 - DNA, 15 bp, Homo sapiens
atacatttagggcag

SEQ ID NO: 260831 - DNA, 15 bp, Homo sapiens
gatacatttagggca

SEQ ID NO: 260832 - DNA, 15 bp, Homo sapiens
agatacatttagggc

SEQ ID NO: 260833 - DNA, 15 bp, Homo sapiens
cagatacatttaggg

SEQ ID NO: 260834 - DNA, 15 bp, Homo sapiens
tcagatacatttagg

SEQ ID NO: 260835 - DNA, 15 bp, Homo sapiens
atcagatacatttag

SEQ ID NO: 260836 - DNA, 15 bp, Homo sapiens
gatcagatacattta

SEQ ID NO: 260837 - DNA, 15 bp, Homo sapiens
agatcagatacattt

SEQ ID NO: 260838 - DNA, 15 bp, Homo sapiens
cagatcagatacatt

SEQ ID NO: 260839 - DNA, 15 bp, Homo sapiens
tcagatcagatacat

SEQ ID NO: 260840 - DNA, 15 bp, Homo sapiens
ctcagatcagataca

SEQ ID NO: 260841 - DNA, 15 bp, Homo sapiens
tctcagatcagatac

SEQ ID NO: 260842 - DNA, 15 bp, Homo sapiens
ctctcagatcagata

SEQ ID NO: 260843 - DNA, 15 bp, Homo sapiens
gctctcagatcagat

SEQ ID NO: 260844 - DNA, 15 bp, Homo sapiens
tgctctcagatcaga

SEQ ID NO: 260845 - DNA, 15 bp, Homo sapiens
gtgctctcagatcag

SEQ ID NO: 260846 - DNA, 15 bp, Homo sapiens
cgtgctctcagatca

SEQ ID NO: 260847 - DNA, 15 bp, Homo sapiens
acgtgctctcagatc

SEQ ID NO: 260848 - DNA, 15 bp, Homo sapiens
gacgtgctctcagat

SEQ ID NO: 260849 - DNA, 15 bp, Homo sapiens
ggacgtgctctcaga

SEQ ID NO: 260850 - DNA, 15 bp, Homo sapiens
gggacgtgctctcag

SEQ ID NO: 260851 - DNA, 15 bp, Homo sapiens
agggacgtgctctca

SEQ ID NO: 260852 - DNA, 15 bp, Homo sapiens
aagggacgtgctctc

SEQ ID NO: 260853 - DNA, 15 bp, Homo sapiens
gaagggacgtgctct

SEQ ID NO: 260854 - DNA, 15 bp, Homo sapiens
tgaagggacgtgctc

SEQ ID NO: 260855 - DNA, 15 bp, Homo sapiens
gtgaagggacgtgct

SEQ ID NO: 260856 - DNA, 15 bp, Homo sapiens
agtgaagggacgtgc

SEQ ID NO: 260857 - DNA, 15 bp, Homo sapiens
gagtgaagggacgtg

SEQ ID NO: 260858 - DNA, 15 bp, Homo sapiens
agagtgaagggacgt

SEQ ID NO: 260859 - DNA, 15 bp, Homo sapiens
cagagtgaagggacg

SEQ ID NO: 260860 - DNA, 15 bp, Homo sapiens
tcagagtgaagggac

SEQ ID NO: 260861 - DNA, 15 bp, Homo sapiens
ttcagagtgaaggga

SEQ ID NO: 260862 - DNA, 15 bp, Homo sapiens
cttcagagtgaaggg

SEQ ID NO: 260863 - DNA, 15 bp, Homo sapiens
gcttcagagtgaagg

SEQ ID NO: 260864 - DNA, 15 bp, Homo sapiens
tgcttcagagtgaag

SEQ ID NO: 260865 - DNA, 15 bp, Homo sapiens
ctgcttcagagtgaa

SEQ ID NO: 260866 - DNA, 15 bp, Homo sapiens
gctgcttcagagtga

SEQ ID NO: 260867 - DNA, 15 bp, Homo sapiens
tgctgcttcagagtg

SEQ ID NO: 260868 - DNA, 15 bp, Homo sapiens
atgctgcttcagagt

SEQ ID NO: 260869 - DNA, 15 bp, Homo sapiens
catgctgcttcagag

SEQ ID NO: 260870 - DNA, 15 bp, Homo sapiens
tcatgctgcttcaga

SEQ ID NO: 260871 - DNA, 15 bp, Homo sapiens
atcatgctgcttcag

SEQ ID NO: 260872 - DNA, 15 bp, Homo sapiens
catcatgctgcttca

SEQ ID NO: 260873 - DNA, 15 bp, Homo sapiens
gcatcatgctgcttc

SEQ ID NO: 260874 - DNA, 15 bp, Homo sapiens
tgcatcatgctgctt

SEQ ID NO: 260875 - DNA, 15 bp, Homo sapiens
ctgcatcatgctgct

SEQ ID NO: 260876 - DNA, 15 bp, Homo sapiens
cctgcatcatgctgc

SEQ ID NO: 260877 - DNA, 15 bp, Homo sapiens
acctgcatcatgctg

SEQ ID NO: 260878 - DNA, 15 bp, Homo sapiens
aacctgcatcatgct

SEQ ID NO: 260879 - DNA, 15 bp, Homo sapiens
taacctgcatcatgc

SEQ ID NO: 260880 - DNA, 15 bp, Homo sapiens
ataacctgcatcatg

SEQ ID NO: 260881 - DNA, 15 bp, Homo sapiens
gataacctgcatcat

SEQ ID NO: 260882 - DNA, 15 bp, Homo sapiens
tgataacctgcatca

SEQ ID NO: 260883 - DNA, 15 bp, Homo sapiens
ctgataacctgcatc

SEQ ID NO: 260884 - DNA, 15 bp, Homo sapiens
tctgataacctgcat

SEQ ID NO: 260885 - DNA, 15 bp, Homo sapiens
ctctgataacctgca

SEQ ID NO: 260886 - DNA, 15 bp, Homo sapiens
actctgataacctgc

SEQ ID NO: 260887 - DNA, 15 bp, Homo sapiens
cactctgataacctg

SEQ ID NO: 260888 - DNA, 15 bp, Homo sapiens
ccactctgataacct

SEQ ID NO: 260889 - DNA, 15 bp, Homo sapiens
accactctgataacc

SEQ ID NO: 260890 - DNA, 15 bp, Homo sapiens
aaccactctgataac

SEQ ID NO: 260891 - DNA, 15 bp, Homo sapiens
aaaccactctgataa

SEQ ID NO: 260892 - DNA, 15 bp, Homo sapiens
aaaaccactctgata

SEQ ID NO: 260893 - DNA, 15 bp, Homo sapiens
aaaaaccactctgat

SEQ ID NO: 260894 - DNA, 15 bp, Homo sapiens
aaaaaaccactctga

SEQ ID NO: 260895 - DNA, 15 bp, Homo sapiens
gaaaaaaccactctg

SEQ ID NO: 260896 - DNA, 15 bp, Homo sapiens
ggaaaaaaccactct

SEQ ID NO: 260897 - DNA, 15 bp, Homo sapiens
tggaaaaaaccactc

SEQ ID NO: 260898 - DNA, 15 bp, Homo sapiens
ctggaaaaaaccact

SEQ ID NO: 260899 - DNA, 15 bp, Homo sapiens
actggaaaaaaccac

SEQ ID NO: 260900 - DNA, 15 bp, Homo sapiens
gactggaaaaaacca

SEQ ID NO: 260901 - DNA, 15 bp, Homo sapiens
agactggaaaaaacc

SEQ ID NO: 260902 - DNA, 15 bp, Homo sapiens
aagactggaaaaaac

SEQ ID NO: 260903 - DNA, 15 bp, Homo sapiens
aaagactggaaaaaa

SEQ ID NO: 260904 - DNA, 15 bp, Homo sapiens
aaaagactggaaaaa

SEQ ID NO: 260905 - DNA, 15 bp, Homo sapiens
gaaaagactggaaaa

SEQ ID NO: 260906 - DNA, 15 bp, Homo sapiens
agaaaagactggaaa

SEQ ID NO: 260907 - DNA, 15 bp, Homo sapiens
gagaaaagactggaa

SEQ ID NO: 260908 - DNA, 15 bp, Homo sapiens
agagaaaagactgga

SEQ ID NO: 260909 - DNA, 15 bp, Homo sapiens
gagagaaaagactgg

SEQ ID NO: 260910 - DNA, 15 bp, Homo sapiens
tgagagaaaagactg

SEQ ID NO: 260911 - DNA, 15 bp, Homo sapiens
atgagagaaaagact

SEQ ID NO: 260912 - DNA, 15 bp, Homo sapiens
aatgagagaaaagac

SEQ ID NO: 260913 - DNA, 15 bp, Homo sapiens
taatgagagaaaaga

SEQ ID NO: 260914 - DNA, 15 bp, Homo sapiens
ataatgagagaaaag

SEQ ID NO: 260915 - DNA, 15 bp, Homo sapiens
aataatgagagaaaa

SEQ ID NO: 260916 - DNA, 15 bp, Homo sapiens
aaataatgagagaaa

SEQ ID NO: 260917 - DNA, 15 bp, Homo sapiens
gaaataatgagagaa

SEQ ID NO: 260918 - DNA, 15 bp, Homo sapiens
ggaaataatgagaga

SEQ ID NO: 260919 - DNA, 15 bp, Homo sapiens
gggaaataatgagag

SEQ ID NO: 260920 - DNA, 15 bp, Homo sapiens
ggggaaataatgaga

SEQ ID NO: 260921 - DNA, 15 bp, Homo sapiens
tggggaaataatgag

SEQ ID NO: 260922 - DNA, 15 bp, Homo sapiens
ttggggaaataatga

SEQ ID NO: 260923 - DNA, 15 bp, Homo sapiens
attggggaaataatg

SEQ ID NO: 260924 - DNA, 15 bp, Homo sapiens
aattggggaaataat

SEQ ID NO: 260925 - DNA, 15 bp, Homo sapiens
caattggggaaataa

SEQ ID NO: 260926 - DNA, 15 bp, Homo sapiens
acaattggggaaata

SEQ ID NO: 260927 - DNA, 15 bp, Homo sapiens
gacaattggggaaat

SEQ ID NO: 260928 - DNA, 15 bp, Homo sapiens
ggacaattggggaaa

SEQ ID NO: 260929 - DNA, 15 bp, Homo sapiens
tggacaattggggaa

SEQ ID NO: 260930 - DNA, 15 bp, Homo sapiens
ttggacaattgggga

SEQ ID NO: 260931 - DNA, 15 bp, Homo sapiens
attggacaattgggg

SEQ ID NO: 260932 - DNA, 15 bp, Homo sapiens
cattggacaattggg

SEQ ID NO: 260933 - DNA, 15 bp, Homo sapiens
acattggacaattgg

SEQ ID NO: 260934 - DNA, 15 bp, Homo sapiens
aacattggacaattg

SEQ ID NO: 260935 - DNA, 15 bp, Homo sapiens
taacattggacaatt

SEQ ID NO: 260936 - DNA, 15 bp, Homo sapiens
gtaacattggacaat

SEQ ID NO: 260937 - DNA, 15 bp, Homo sapiens
agtaacattggacaa

SEQ ID NO: 260938 - DNA, 15 bp, Homo sapiens
tagtaacattggaca

SEQ ID NO: 260939 - DNA, 15 bp, Homo sapiens
ttagtaacattggac

SEQ ID NO: 260940 - DNA, 15 bp, Homo sapiens
cttagtaacattgga

SEQ ID NO: 260941 - DNA, 15 bp, Homo sapiens
tcttagtaacattgg

SEQ ID NO: 260942 - DNA, 15 bp, Homo sapiens
gtcttagtaacattg

SEQ ID NO: 260943 - DNA, 15 bp, Homo sapiens
agtcttagtaacatt

SEQ ID NO: 260944 - DNA, 15 bp, Homo sapiens
tagtcttagtaacat

SEQ ID NO: 260945 - DNA, 15 bp, Homo sapiens
atagtcttagtaaca

SEQ ID NO: 260946 - DNA, 15 bp, Homo sapiens
gatagtcttagtaac

SEQ ID NO: 260947 - DNA, 15 bp, Homo sapiens
ggatagtcttagtaa

SEQ ID NO: 260948 - DNA, 15 bp, Homo sapiens
tggatagtcttagta

SEQ ID NO: 260949 - DNA, 15 bp, Homo sapiens
ctggatagtcttagt

SEQ ID NO: 260950 - DNA, 15 bp, Homo sapiens
actggatagtcttag

SEQ ID NO: 260951 - DNA, 15 bp, Homo sapiens
gactggatagtctta

SEQ ID NO: 260952 - DNA, 15 bp, Homo sapiens
agactggatagtctt

SEQ ID NO: 260953 - DNA, 15 bp, Homo sapiens
tagactggatagtct

SEQ ID NO: 260954 - DNA, 15 bp, Homo sapiens
ttagactggatagtc

SEQ ID NO: 260955 - DNA, 15 bp, Homo sapiens
attagactggatagt

SEQ ID NO: 260956 - DNA, 15 bp, Homo sapiens
aattagactggatag

SEQ ID NO: 260957 - DNA, 15 bp, Homo sapiens
gaattagactggata

SEQ ID NO: 260958 - DNA, 15 bp, Homo sapiens
ggaattagactggat

SEQ ID NO: 260959 - DNA, 15 bp, Homo sapiens
tggaattagactgga

SEQ ID NO: 260960 - DNA, 15 bp, Homo sapiens
ttggaattagactgg

SEQ ID NO: 260961 - DNA, 15 bp, Homo sapiens
cttggaattagactg

SEQ ID NO: 260962 - DNA, 15 bp, Homo sapiens
acttggaattagact

SEQ ID NO: 260963 - DNA, 15 bp, Homo sapiens
cacttggaattagac

SEQ ID NO: 260964 - DNA, 15 bp, Homo sapiens
acacttggaattaga

SEQ ID NO: 260965 - DNA, 15 bp, Homo sapiens
aacacttggaattag

SEQ ID NO: 260966 - DNA, 15 bp, Homo sapiens
aaacacttggaatta

SEQ ID NO: 260967 - DNA, 15 bp, Homo sapiens
aaaacacttggaatt

SEQ ID NO: 260968 - DNA, 15 bp, Homo sapiens
aaaaacacttggaat

SEQ ID NO: 260969 - DNA, 15 bp, Homo sapiens
aaaaaacacttggaa

SEQ ID NO: 260970 - DNA, 15 bp, Homo sapiens
aaaaaaacacttgga

SEQ ID NO: 260971 - DNA, 15 bp, Homo sapiens
aaaaaaaacacttgg

SEQ ID NO: 260972 - DNA, 15 bp, Homo sapiens
aaaaaaaaacacttg

SEQ ID NO: 260973 - DNA, 15 bp, Homo sapiens
aaaaaaaaaacactt

SEQ ID NO: 260974 - DNA, 15 bp, Homo sapiens
caaaaaaaaaacact

SEQ ID NO: 260975 - DNA, 15 bp, Homo sapiens
acaaaaaaaaaacac

SEQ ID NO: 260976 - DNA, 15 bp, Homo sapiens
aacaaaaaaaaaaca

SEQ ID NO: 260977 - DNA, 15 bp, Homo sapiens
aaacaaaaaaaaaac

SEQ ID NO: 260978 - DNA, 15 bp, Homo sapiens
aaaacaaaaaaaaaa

SEQ ID NO: 260979 - DNA, 15 bp, Homo sapiens
taaaacaaaaaaaaa

SEQ ID NO: 260980 - DNA, 15 bp, Homo sapiens
ataaaacaaaaaaaa

SEQ ID NO: 260981 - DNA, 15 bp, Homo sapiens
aataaaacaaaaaaa

SEQ ID NO: 260982 - DNA, 15 bp, Homo sapiens
aaataaaacaaaaaa

SEQ ID NO: 260983 - DNA, 15 bp, Homo sapiens
aaaataaaacaaaaa

SEQ ID NO: 260984 - DNA, 15 bp, Homo sapiens
caaaataaaacaaaa

SEQ ID NO: 260985 - DNA, 15 bp, Homo sapiens
acaaaataaaacaaa

SEQ ID NO: 260986 - DNA, 15 bp, Homo sapiens
aacaaaataaaacaa

SEQ ID NO: 260987 - DNA, 15 bp, Homo sapiens
aaacaaaataaaaca

SEQ ID NO: 260988 - DNA, 15 bp, Homo sapiens
aaaacaaaataaaac

SEQ ID NO: 260989 - DNA, 15 bp, Homo sapiens
aaaaacaaaataaaa

SEQ ID NO: 260990 - DNA, 15 bp, Homo sapiens
aaaaaacaaaataaa

SEQ ID NO: 260991 - DNA, 15 bp, Homo sapiens
aaaaaaacaaaataa

SEQ ID NO: 260992 - DNA, 15 bp, Homo sapiens
aaaaaaaacaaaata

SEQ ID NO: 260993 - DNA, 15 bp, Homo sapiens
aaaaaaaaacaaaat

SEQ ID NO: 260994 - DNA, 15 bp, Homo sapiens
taaaaaaaaacaaaa

SEQ ID NO: 260995 - DNA, 15 bp, Homo sapiens
ttaaaaaaaaacaaa

SEQ ID NO: 260996 - DNA, 15 bp, Homo sapiens
cttaaaaaaaaacaa

SEQ ID NO: 260997 - DNA, 15 bp, Homo sapiens
tcttaaaaaaaaaca

SEQ ID NO: 260998 - DNA, 15 bp, Homo sapiens
gtcttaaaaaaaaac

SEQ ID NO: 260999 - DNA, 15 bp, Homo sapiens
agtcttaaaaaaaaa

SEQ ID NO: 261000 - DNA, 15 bp, Homo sapiens
cagtcttaaaaaaaa

SEQ ID NO: 261001 - DNA, 15 bp, Homo sapiens
ccagtcttaaaaaaa

SEQ ID NO: 261002 - DNA, 15 bp, Homo sapiens
tccagtcttaaaaaa

SEQ ID NO: 261003 - DNA, 15 bp, Homo sapiens
ctccagtcttaaaaa

SEQ ID NO: 261004 - DNA, 15 bp, Homo sapiens
actccagtcttaaaa

SEQ ID NO: 261005 - DNA, 15 bp, Homo sapiens
gactccagtcttaaa

SEQ ID NO: 261006 - DNA, 15 bp, Homo sapiens
agactccagtcttaa

SEQ ID NO: 261007 - DNA, 15 bp, Homo sapiens
aagactccagtctta

SEQ ID NO: 261008 - DNA, 15 bp, Homo sapiens
taagactccagtctt

SEQ ID NO: 261009 - DNA, 15 bp, Homo sapiens
gtaagactccagtct

SEQ ID NO: 261010 - DNA, 15 bp, Homo sapiens
agtaagactccagtc

SEQ ID NO: 261011 - DNA, 15 bp, Homo sapiens
gagtaagactccagt

SEQ ID NO: 261012 - DNA, 15 bp, Homo sapiens
agagtaagactccag

SEQ ID NO: 261013 - DNA, 15 bp, Homo sapiens
cagagtaagactcca

SEQ ID NO: 261014 - DNA, 15 bp, Homo sapiens
acagagtaagactcc

SEQ ID NO: 261015 - DNA, 15 bp, Homo sapiens
aacagagtaagactc

SEQ ID NO: 261016 - DNA, 15 bp, Homo sapiens
caacagagtaagact

SEQ ID NO: 261017 - DNA, 15 bp, Homo sapiens
gcaacagagtaagac

SEQ ID NO: 261018 - DNA, 15 bp, Homo sapiens
ggcaacagagtaaga

SEQ ID NO: 261019 - DNA, 15 bp, Homo sapiens
gggcaacagagtaag

SEQ ID NO: 261020 - DNA, 15 bp, Homo sapiens
tgggcaacagagtaa

SEQ ID NO: 261021 - DNA, 15 bp, Homo sapiens
ctgggcaacagagta

SEQ ID NO: 261022 - DNA, 15 bp, Homo sapiens
cctgggcaacagagt

SEQ ID NO: 261023 - DNA, 15 bp, Homo sapiens
acactccagcctggg

SEQ ID NO: 261024 - DNA, 15 bp, Homo sapiens
tacactccagcctgg

SEQ ID NO: 261025 - DNA, 15 bp, Homo sapiens
ctacactccagcctg

SEQ ID NO: 261026 - DNA, 15 bp, Homo sapiens
actacactccagcct

SEQ ID NO: 261027 - DNA, 15 bp, Homo sapiens
cactacactccagcc

SEQ ID NO: 261028 - DNA, 15 bp, Homo sapiens
ccactacactccagc

SEQ ID NO: 261029 - DNA, 15 bp, Homo sapiens
tccactacactccag

SEQ ID NO: 261030 - DNA, 15 bp, Homo sapiens
ctccactacactcca

SEQ ID NO: 261031 - DNA, 15 bp, Homo sapiens
gctccactacactcc

SEQ ID NO: 261032 - DNA, 15 bp, Homo sapiens
cgctccactacactc

SEQ ID NO: 261033 - DNA, 15 bp, Homo sapiens
tcgctccactacact

SEQ ID NO: 261034 - DNA, 15 bp, Homo sapiens
atcgctccactacac

SEQ ID NO: 261035 - DNA, 15 bp, Homo sapiens
gatcgctccactaca

SEQ ID NO: 261036 - DNA, 15 bp, Homo sapiens
agatcgctccactac

SEQ ID NO: 261037 - DNA, 15 bp, Homo sapiens
gagatcgctccacta

SEQ ID NO: 261038 - DNA, 15 bp, Homo sapiens
cgagatcgctccact

SEQ ID NO: 261039 - DNA, 15 bp, Homo sapiens
ccgagatcgctccac

SEQ ID NO: 261040 - DNA, 15 bp, Homo sapiens
gccgagatcgctcca

SEQ ID NO: 261041 - DNA, 15 bp, Homo sapiens
agccgagatcgctcc

SEQ ID NO: 261042 - DNA, 15 bp, Homo sapiens
gagccgagatcgctc

SEQ ID NO: 261043 - DNA, 15 bp, Homo sapiens
tgagccgagatcgct

SEQ ID NO: 261044 - DNA, 15 bp, Homo sapiens
gtgagccgagatcgc

SEQ ID NO: 261045 - DNA, 15 bp, Homo sapiens
ggtgagccgagatcg

SEQ ID NO: 261046 - DNA, 15 bp, Homo sapiens
cggtgagccgagatc

SEQ ID NO: 261047 - DNA, 15 bp, Homo sapiens
gcggtgagccgagat

SEQ ID NO: 261048 - DNA, 15 bp, Homo sapiens
tgcggtgagccgaga

SEQ ID NO: 261049 - DNA, 15 bp, Homo sapiens
ttgcggtgagccgag

SEQ ID NO: 261050 - DNA, 15 bp, Homo sapiens
gttgcggtgagccga

SEQ ID NO: 261051 - DNA, 15 bp, Homo sapiens
ggttgcggtgagccg

SEQ ID NO: 261052 - DNA, 15 bp, Homo sapiens
ggaggttgcggtgag

SEQ ID NO: 261053 - DNA, 15 bp, Homo sapiens
cggaggttgcggtga

SEQ ID NO: 261054 - DNA, 15 bp, Homo sapiens
gcggaggttgcggtg

SEQ ID NO: 261055 - DNA, 15 bp, Homo sapiens
ggcggaggttgcggt

SEQ ID NO: 261056 - DNA, 15 bp, Homo sapiens
aggcggaggttgcgg

SEQ ID NO: 261057 - DNA, 15 bp, Homo sapiens
gaggcggaggttgcg

SEQ ID NO: 261058 - DNA, 15 bp, Homo sapiens
cgggaggcggaggtt

SEQ ID NO: 261059 - DNA, 15 bp, Homo sapiens
tcgggaggcggaggt

SEQ ID NO: 261060 - DNA, 15 bp, Homo sapiens
ctcgggaggcggagg

SEQ ID NO: 261061 - DNA, 15 bp, Homo sapiens
actcgggaggcggag

SEQ ID NO: 261062 - DNA, 15 bp, Homo sapiens
aactcgggaggcgga

SEQ ID NO: 261063 - DNA, 15 bp, Homo sapiens
gaactcgggaggcgg

SEQ ID NO: 261064 - DNA, 15 bp, Homo sapiens
tgaactcgggaggcg

SEQ ID NO: 261065 - DNA, 15 bp, Homo sapiens
ttgaactcgggaggc

SEQ ID NO: 261066 - DNA, 15 bp, Homo sapiens
cttgaactcgggagg

SEQ ID NO: 261067 - DNA, 15 bp, Homo sapiens
acttgaactcgggag

SEQ ID NO: 261068 - DNA, 15 bp, Homo sapiens
cacttgaactcggga

SEQ ID NO: 261069 - DNA, 15 bp, Homo sapiens
tcacttgaactcggg

SEQ ID NO: 261070 - DNA, 15 bp, Homo sapiens
atcacttgaactcgg

SEQ ID NO: 261071 - DNA, 15 bp, Homo sapiens
aatcacttgaactcg

SEQ ID NO: 261072 - DNA, 15 bp, Homo sapiens
gtcccagctacttgg

SEQ ID NO: 261073 - DNA, 15 bp, Homo sapiens
agtcccagctacttg

SEQ ID NO: 261074 - DNA, 15 bp, Homo sapiens
tagtcccagctactt

SEQ ID NO: 261075 - DNA, 15 bp, Homo sapiens
ccctgtagtcccagc

SEQ ID NO: 261076 - DNA, 15 bp, Homo sapiens
cccctgtagtcccag

SEQ ID NO: 261077 - DNA, 15 bp, Homo sapiens
acccctgtagtccca

SEQ ID NO: 261078 - DNA, 15 bp, Homo sapiens
cacccctgtagtccc

SEQ ID NO: 261079 - DNA, 15 bp, Homo sapiens
tcacccctgtagtcc

SEQ ID NO: 261080 - DNA, 15 bp, Homo sapiens
ctcacccctgtagtc

SEQ ID NO: 261081 - DNA, 15 bp, Homo sapiens
gctcacccctgtagt

SEQ ID NO: 261082 - DNA, 15 bp, Homo sapiens
ggctcacccctgtag

SEQ ID NO: 261083 - DNA, 15 bp, Homo sapiens
tggctcacccctgta

SEQ ID NO: 261084 - DNA, 15 bp, Homo sapiens
gtggctcacccctgt

SEQ ID NO: 261085 - DNA, 15 bp, Homo sapiens
ggtggctcacccctg

SEQ ID NO: 261086 - DNA, 15 bp, Homo sapiens
tggtggctcacccct

SEQ ID NO: 261087 - DNA, 15 bp, Homo sapiens
atggtggctcacccc

SEQ ID NO: 261088 - DNA, 15 bp, Homo sapiens
catggtggctcaccc

SEQ ID NO: 261089 - DNA, 15 bp, Homo sapiens
gcatggtggctcacc

SEQ ID NO: 261090 - DNA, 15 bp, Homo sapiens
ggcatggtggctcac

SEQ ID NO: 261091 - DNA, 15 bp, Homo sapiens
gggcatggtggctca

SEQ ID NO: 261092 - DNA, 15 bp, Homo sapiens
tgggcatggtggctc

SEQ ID NO: 261093 - DNA, 15 bp, Homo sapiens
ctgggcatggtggct

SEQ ID NO: 261094 - DNA, 15 bp, Homo sapiens
caattagctgggcat

SEQ ID NO: 261095 - DNA, 15 bp, Homo sapiens
acaattagctgggca

SEQ ID NO: 261096 - DNA, 15 bp, Homo sapiens
tacaattagctgggc

SEQ ID NO: 261097 - DNA, 15 bp, Homo sapiens
atacaattagctggg

SEQ ID NO: 261098 - DNA, 15 bp, Homo sapiens
aatacaattagctgg

SEQ ID NO: 261099 - DNA, 15 bp, Homo sapiens
aaatacaattagctg

SEQ ID NO: 261100 - DNA, 15 bp, Homo sapiens
aaaatacaattagct

SEQ ID NO: 261101 - DNA, 15 bp, Homo sapiens
aaaaatacaattagc

SEQ ID NO: 261102 - DNA, 15 bp, Homo sapiens
taaaaatacaattag

SEQ ID NO: 261103 - DNA, 15 bp, Homo sapiens
ctaaaaatacaatta

SEQ ID NO: 261104 - DNA, 15 bp, Homo sapiens
actaaaaatacaatt

SEQ ID NO: 261105 - DNA, 15 bp, Homo sapiens
tactaaaaatacaat

SEQ ID NO: 261106 - DNA, 15 bp, Homo sapiens
ccctgtctctactaa

SEQ ID NO: 261107 - DNA, 15 bp, Homo sapiens
accctgtctctacta

SEQ ID NO: 261108 - DNA, 15 bp, Homo sapiens
aaccctgtctctact

SEQ ID NO: 261109 - DNA, 15 bp, Homo sapiens
aaaccctgtctctac

SEQ ID NO: 261110 - DNA, 15 bp, Homo sapiens
gaaaccctgtctcta

SEQ ID NO: 261111 - DNA, 15 bp, Homo sapiens
tgaaaccctgtctct

SEQ ID NO: 261112 - DNA, 15 bp, Homo sapiens
gtgaaaccctgtctc

SEQ ID NO: 261113 - DNA, 15 bp, Homo sapiens
agtgaaaccctgtct

SEQ ID NO: 261114 - DNA, 15 bp, Homo sapiens
tagtgaaaccctgtc

SEQ ID NO: 261115 - DNA, 15 bp, Homo sapiens
atagtgaaaccctgt

SEQ ID NO: 261116 - DNA, 15 bp, Homo sapiens
catagtgaaaccctg

SEQ ID NO: 261117 - DNA, 15 bp, Homo sapiens
acatagtgaaaccct

SEQ ID NO: 261118 - DNA, 15 bp, Homo sapiens
aacatagtgaaaccc

SEQ ID NO: 261119 - DNA, 15 bp, Homo sapiens
caacatagtgaaacc

SEQ ID NO: 261120 - DNA, 15 bp, Homo sapiens
ccaacatagtgaaac

SEQ ID NO: 261121 - DNA, 15 bp, Homo sapiens
gccaacatagtgaaa

SEQ ID NO: 261122 - DNA, 15 bp, Homo sapiens
ggccaacatagtgaa

SEQ ID NO: 261123 - DNA, 15 bp, Homo sapiens
tggccaacatagtga

SEQ ID NO: 261124 - DNA, 15 bp, Homo sapiens
ctggccaacatagtg

SEQ ID NO: 261125 - DNA, 15 bp, Homo sapiens
cctggccaacatagt

SEQ ID NO: 261126 - DNA, 15 bp, Homo sapiens
gcctggccaacatag

SEQ ID NO: 261127 - DNA, 15 bp, Homo sapiens
agcctggccaacata

SEQ ID NO: 261128 - DNA, 15 bp, Homo sapiens
acaaacttacgtgtt

SEQ ID NO: 261129 - DNA, 15 bp, Homo sapiens
gacaaacttacgtgt

SEQ ID NO: 261130 - DNA, 15 bp, Homo sapiens
ggacaaacttacgtg

SEQ ID NO: 261131 - DNA, 15 bp, Homo sapiens
aggacaaacttacgt

SEQ ID NO: 261132 - DNA, 15 bp, Homo sapiens
aaggacaaacttacg

SEQ ID NO: 261133 - DNA, 15 bp, Homo sapiens
aaaggacaaacttac

SEQ ID NO: 261134 - DNA, 15 bp, Homo sapiens
caaaggacaaactta

SEQ ID NO: 261135 - DNA, 15 bp, Homo sapiens
ccaaaggacaaactt

SEQ ID NO: 261136 - DNA, 15 bp, Homo sapiens
accaaaggacaaact

SEQ ID NO: 261137 - DNA, 15 bp, Homo sapiens
aaccaaaggacaaac

SEQ ID NO: 261138 - DNA, 15 bp, Homo sapiens
caaccaaaggacaaa

SEQ ID NO: 261139 - DNA, 15 bp, Homo sapiens
gcaaccaaaggacaa

SEQ ID NO: 261140 - DNA, 15 bp, Homo sapiens
ggcaaccaaaggaca

SEQ ID NO: 261141 - DNA, 15 bp, Homo sapiens
aggcaaccaaaggac

SEQ ID NO: 261142 - DNA, 15 bp, Homo sapiens
gaggcaaccaaagga

SEQ ID NO: 261143 - DNA, 15 bp, Homo sapiens
tgaggcaaccaaagg

SEQ ID NO: 261144 - DNA, 15 bp, Homo sapiens
atgaggcaaccaaag

SEQ ID NO: 261145 - DNA, 15 bp, Homo sapiens
aatgaggcaaccaaa

SEQ ID NO: 261146 - DNA, 15 bp, Homo sapiens
taatgaggcaaccaa

SEQ ID NO: 261147 - DNA, 15 bp, Homo sapiens
ctaatgaggcaacca

SEQ ID NO: 261148 - DNA, 15 bp, Homo sapiens
cctaatgaggcaacc

SEQ ID NO: 261149 - DNA, 15 bp, Homo sapiens
tcctaatgaggcaac

SEQ ID NO: 261150 - DNA, 15 bp, Homo sapiens
ctcctaatgaggcaa

SEQ ID NO: 261151 - DNA, 15 bp, Homo sapiens
actcctaatgaggca

SEQ ID NO: 261152 - DNA, 15 bp, Homo sapiens
cactcctaatgaggc

SEQ ID NO: 261153 - DNA, 15 bp, Homo sapiens
ccactcctaatgagg

SEQ ID NO: 261154 - DNA, 15 bp, Homo sapiens
cccactcctaatgag

SEQ ID NO: 261155 - DNA, 15 bp, Homo sapiens
ccccactcctaatga

SEQ ID NO: 261156 - DNA, 15 bp, Homo sapiens
gccccactcctaatg

SEQ ID NO: 261157 - DNA, 15 bp, Homo sapiens
agccccactcctaat

SEQ ID NO: 261158 - DNA, 15 bp, Homo sapiens
cagccccactcctaa

SEQ ID NO: 261159 - DNA, 15 bp, Homo sapiens
ccagccccactccta

SEQ ID NO: 261160 - DNA, 15 bp, Homo sapiens
tccagccccactcct

SEQ ID NO: 261161 - DNA, 15 bp, Homo sapiens
atccagccccactcc

SEQ ID NO: 261162 - DNA, 15 bp, Homo sapiens
tatccagccccactc

SEQ ID NO: 261163 - DNA, 15 bp, Homo sapiens
gtatccagccccact

SEQ ID NO: 261164 - DNA, 15 bp, Homo sapiens
tgtatccagccccac

SEQ ID NO: 261165 - DNA, 15 bp, Homo sapiens
ctgtatccagcccca

SEQ ID NO: 261166 - DNA, 15 bp, Homo sapiens
actgtatccagcccc

SEQ ID NO: 261167 - DNA, 15 bp, Homo sapiens
aactgtatccagccc

SEQ ID NO: 261168 - DNA, 15 bp, Homo sapiens
taactgtatccagcc

SEQ ID NO: 261169 - DNA, 15 bp, Homo sapiens
ataactgtatccagc

SEQ ID NO: 261170 - DNA, 15 bp, Homo sapiens
gataactgtatccag

SEQ ID NO: 261171 - DNA, 15 bp, Homo sapiens
tgataactgtatcca

SEQ ID NO: 261172 - DNA, 15 bp, Homo sapiens
atgataactgtatcc

SEQ ID NO: 261173 - DNA, 15 bp, Homo sapiens
aatgataactgtatc

SEQ ID NO: 261174 - DNA, 15 bp, Homo sapiens
caatgataactgtat

SEQ ID NO: 261175 - DNA, 15 bp, Homo sapiens
acaatgataactgta

SEQ ID NO: 261176 - DNA, 15 bp, Homo sapiens
tacaatgataactgt

SEQ ID NO: 261177 - DNA, 15 bp, Homo sapiens
atacaatgataactg

SEQ ID NO: 261178 - DNA, 15 bp, Homo sapiens
tatacaatgataact

SEQ ID NO: 261179 - DNA, 15 bp, Homo sapiens
ctatacaatgataac

SEQ ID NO: 261180 - DNA, 15 bp, Homo sapiens
tctatacaatgataa

SEQ ID NO: 261181 - DNA, 15 bp, Homo sapiens
atctatacaatgata

SEQ ID NO: 261182 - DNA, 15 bp, Homo sapiens
aatctatacaatgat

SEQ ID NO: 261183 - DNA, 15 bp, Homo sapiens
aaatctatacaatga

SEQ ID NO: 261184 - DNA, 15 bp, Homo sapiens
caaatctatacaatg

SEQ ID NO: 261185 - DNA, 15 bp, Homo sapiens
acaaatctatacaat

SEQ ID NO: 261186 - DNA, 15 bp, Homo sapiens
cacaaatctatacaa

SEQ ID NO: 261187 - DNA, 15 bp, Homo sapiens
acacaaatctataca

SEQ ID NO: 261188 - DNA, 15 bp, Homo sapiens
gacacaaatctatac

SEQ ID NO: 261189 - DNA, 15 bp, Homo sapiens
agacacaaatctata

SEQ ID NO: 261190 - DNA, 15 bp, Homo sapiens
aagacacaaatctat

SEQ ID NO: 261191 - DNA, 15 bp, Homo sapiens
taagacacaaatcta

SEQ ID NO: 261192 - DNA, 15 bp, Homo sapiens
ataagacacaaatct

SEQ ID NO: 261193 - DNA, 15 bp, Homo sapiens
tataagacacaaatc

SEQ ID NO: 261194 - DNA, 15 bp, Homo sapiens
ttataagacacaaat

SEQ ID NO: 261195 - DNA, 15 bp, Homo sapiens
attataagacacaaa

SEQ ID NO: 261196 - DNA, 15 bp, Homo sapiens
cattataagacacaa

SEQ ID NO: 261197 - DNA, 15 bp, Homo sapiens
tcattataagacaca

SEQ ID NO: 261198 - DNA, 15 bp, Homo sapiens
ctcattataagacac

SEQ ID NO: 261199 - DNA, 15 bp, Homo sapiens
actcattataagaca

SEQ ID NO: 261200 - DNA, 15 bp, Homo sapiens
gactcattataagac

SEQ ID NO: 261201 - DNA, 15 bp, Homo sapiens
ggactcattataaga

SEQ ID NO: 261202 - DNA, 15 bp, Homo sapiens
gggactcattataag

SEQ ID NO: 261203 - DNA, 15 bp, Homo sapiens
tgggactcattataa

SEQ ID NO: 261204 - DNA, 15 bp, Homo sapiens
atgggactcattata

SEQ ID NO: 261205 - DNA, 15 bp, Homo sapiens
aatgggactcattat

SEQ ID NO: 261206 - DNA, 15 bp, Homo sapiens
taatgggactcatta

SEQ ID NO: 261207 - DNA, 15 bp, Homo sapiens
ttaatgggactcatt

SEQ ID NO: 261208 - DNA, 15 bp, Homo sapiens
attaatgggactcat

SEQ ID NO: 261209 - DNA, 15 bp, Homo sapiens
aattaatgggactca

SEQ ID NO: 261210 - DNA, 15 bp, Homo sapiens
aaattaatgggactc

SEQ ID NO: 261211 - DNA, 15 bp, Homo sapiens
gaaattaatgggact

SEQ ID NO: 261212 - DNA, 15 bp, Homo sapiens
agaaattaatgggac

SEQ ID NO: 261213 - DNA, 15 bp, Homo sapiens
gagaaattaatggga

SEQ ID NO: 261214 - DNA, 15 bp, Homo sapiens
ggagaaattaatggg

SEQ ID NO: 261215 - DNA, 15 bp, Homo sapiens
gggagaaattaatgg

SEQ ID NO: 261216 - DNA, 15 bp, Homo sapiens
agggagaaattaatg

SEQ ID NO: 261217 - DNA, 15 bp, Homo sapiens
gagggagaaattaat

SEQ ID NO: 261218 - DNA, 15 bp, Homo sapiens
ggagggagaaattaa

SEQ ID NO: 261219 - DNA, 15 bp, Homo sapiens
gggagggagaaatta

SEQ ID NO: 261220 - DNA, 15 bp, Homo sapiens
agggagggagaaatt

SEQ ID NO: 261221 - DNA, 15 bp, Homo sapiens
aagggagggagaaat

SEQ ID NO: 261222 - DNA, 15 bp, Homo sapiens
aaagggagggagaaa

SEQ ID NO: 261223 - DNA, 15 bp, Homo sapiens
gaaagggagggagaa

SEQ ID NO: 261224 - DNA, 15 bp, Homo sapiens
agaaagggagggaga

SEQ ID NO: 261225 - DNA, 15 bp, Homo sapiens
aagaaagggagggag

SEQ ID NO: 261226 - DNA, 15 bp, Homo sapiens
gaagaaagggaggga

SEQ ID NO: 261227 - DNA, 15 bp, Homo sapiens
cgaagaaagggaggg

SEQ ID NO: 261228 - DNA, 15 bp, Homo sapiens
acgaagaaagggagg

SEQ ID NO: 261229 - DNA, 15 bp, Homo sapiens
gacgaagaaagggag

SEQ ID NO: 261230 - DNA, 15 bp, Homo sapiens
agacgaagaaaggga

SEQ ID NO: 261231 - DNA, 15 bp, Homo sapiens
aagacgaagaaaggg

SEQ ID NO: 261232 - DNA, 15 bp, Homo sapiens
gaagacgaagaaagg

SEQ ID NO: 261233 - DNA, 15 bp, Homo sapiens
agaagacgaagaaag

SEQ ID NO: 261234 - DNA, 15 bp, Homo sapiens
aagaagacgaagaaa

SEQ ID NO: 261235 - DNA, 15 bp, Homo sapiens
caagaagacgaagaa

SEQ ID NO: 261236 - DNA, 15 bp, Homo sapiens
gcaagaagacgaaga

SEQ ID NO: 261237 - DNA, 15 bp, Homo sapiens
tgcaagaagacgaag

SEQ ID NO: 261238 - DNA, 15 bp, Homo sapiens
ctgcaagaagacgaa

SEQ ID NO: 261239 - DNA, 15 bp, Homo sapiens
gctgcaagaagacga

SEQ ID NO: 261240 - DNA, 15 bp, Homo sapiens
cgctgcaagaagacg

SEQ ID NO: 261241 - DNA, 15 bp, Homo sapiens
ccgctgcaagaagac

SEQ ID NO: 261242 - DNA, 15 bp, Homo sapiens
tccgctgcaagaaga

SEQ ID NO: 261243 - DNA, 15 bp, Homo sapiens
ttccgctgcaagaag

SEQ ID NO: 261244 - DNA, 15 bp, Homo sapiens
attccgctgcaagaa

SEQ ID NO: 261245 - DNA, 15 bp, Homo sapiens
aattccgctgcaaga

SEQ ID NO: 261246 - DNA, 15 bp, Homo sapiens
aaattccgctgcaag

SEQ ID NO: 261247 - DNA, 15 bp, Homo sapiens
aaaattccgctgcaa

SEQ ID NO: 261248 - DNA, 15 bp, Homo sapiens
aaaaattccgctgca

SEQ ID NO: 261249 - DNA, 15 bp, Homo sapiens
caaaaattccgctgc

SEQ ID NO: 261250 - DNA, 15 bp, Homo sapiens
tcaaaaattccgctg

SEQ ID NO: 261251 - DNA, 15 bp, Homo sapiens
gtcaaaaattccgct

SEQ ID NO: 261252 - DNA, 15 bp, Homo sapiens
tgtcaaaaattccgc

SEQ ID NO: 261253 - DNA, 15 bp, Homo sapiens
ttgtcaaaaattccg

SEQ ID NO: 261254 - DNA, 15 bp, Homo sapiens
cttgtcaaaaattcc

SEQ ID NO: 261255 - DNA, 15 bp, Homo sapiens
tcttgtcaaaaattc

SEQ ID NO: 261256 - DNA, 15 bp, Homo sapiens
ttcttgtcaaaaatt

SEQ ID NO: 261257 - DNA, 15 bp, Homo sapiens
attcttgtcaaaaat

SEQ ID NO: 261258 - DNA, 15 bp, Homo sapiens
tattcttgtcaaaaa

SEQ ID NO: 261259 - DNA, 15 bp, Homo sapiens
ttattcttgtcaaaa

SEQ ID NO: 261260 - DNA, 15 bp, Homo sapiens
tttattcttgtcaaa

SEQ ID NO: 261261 - DNA, 15 bp, Homo sapiens
ttttattcttgtcaa

SEQ ID NO: 261262 - DNA, 15 bp, Homo sapiens
attttattcttgtca

SEQ ID NO: 261263 - DNA, 15 bp, Homo sapiens
aattttattcttgtc

SEQ ID NO: 261264 - DNA, 15 bp, Homo sapiens
taattttattcttgt

SEQ ID NO: 261265 - DNA, 15 bp, Homo sapiens
ataattttattcttg

SEQ ID NO: 261266 - DNA, 15 bp, Homo sapiens
aataattttattctt

SEQ ID NO: 261267 - DNA, 15 bp, Homo sapiens
aaataattttattct

SEQ ID NO: 261268 - DNA, 15 bp, Homo sapiens
gaaataattttattc

SEQ ID NO: 261269 - DNA, 15 bp, Homo sapiens
agaaataattttatt

SEQ ID NO: 261270 - DNA, 15 bp, Homo sapiens
cagaaataattttat

SEQ ID NO: 261271 - DNA, 15 bp, Homo sapiens
tcagaaataatttta

SEQ ID NO: 261272 - DNA, 15 bp, Homo sapiens
ttcagaaataatttt

SEQ ID NO: 261273 - DNA, 15 bp, Homo sapiens
tttcagaaataattt

SEQ ID NO: 261274 - DNA, 15 bp, Homo sapiens
gtttcagaaataatt

SEQ ID NO: 261275 - DNA, 15 bp, Homo sapiens
ggtttcagaaataat

SEQ ID NO: 261276 - DNA, 15 bp, Homo sapiens
gggtttcagaaataa

SEQ ID NO: 261277 - DNA, 15 bp, Homo sapiens
tgggtttcagaaata

SEQ ID NO: 261278 - DNA, 15 bp, Homo sapiens
gtgggtttcagaaat

SEQ ID NO: 261279 - DNA, 15 bp, Homo sapiens
agtgggtttcagaaa

SEQ ID NO: 261280 - DNA, 15 bp, Homo sapiens
gagtgggtttcagaa

SEQ ID NO: 261281 - DNA, 15 bp, Homo sapiens
ggagtgggtttcaga

SEQ ID NO: 261282 - DNA, 15 bp, Homo sapiens
tggagtgggtttcag

SEQ ID NO: 261283 - DNA, 15 bp, Homo sapiens
ttggagtgggtttca

SEQ ID NO: 261284 - DNA, 15 bp, Homo sapiens
tttggagtgggtttc

SEQ ID NO: 261285 - DNA, 15 bp, Homo sapiens
gtttggagtgggttt

SEQ ID NO: 261286 - DNA, 15 bp, Homo sapiens
tgtttggagtgggtt

SEQ ID NO: 261287 - DNA, 15 bp, Homo sapiens
gtgtttggagtgggt

SEQ ID NO: 261288 - DNA, 15 bp, Homo sapiens
tgtgtttggagtggg

SEQ ID NO: 261289 - DNA, 15 bp, Homo sapiens
ctgtgtttggagtgg

SEQ ID NO: 261290 - DNA, 15 bp, Homo sapiens
actgtgtttggagtg

SEQ ID NO: 261291 - DNA, 15 bp, Homo sapiens
cactgtgtttggagt

SEQ ID NO: 261292 - DNA, 15 bp, Homo sapiens
gcactgtgtttggag

SEQ ID NO: 261293 - DNA, 15 bp, Homo sapiens
tgcactgtgtttgga

SEQ ID NO: 261294 - DNA, 15 bp, Homo sapiens
gtgcactgtgtttgg

SEQ ID NO: 261295 - DNA, 15 bp, Homo sapiens
agtgcactgtgtttg

SEQ ID NO: 261296 - DNA, 15 bp, Homo sapiens
tagtgcactgtgttt

SEQ ID NO: 261297 - DNA, 15 bp, Homo sapiens
gtagtgcactgtgtt

SEQ ID NO: 261298 - DNA, 15 bp, Homo sapiens
tgtagtgcactgtgt

SEQ ID NO: 261299 - DNA, 15 bp, Homo sapiens
atgtagtgcactgtg

SEQ ID NO: 261300 - DNA, 15 bp, Homo sapiens
tatgtagtgcactgt

SEQ ID NO: 261301 - DNA, 15 bp, Homo sapiens
gtatgtagtgcactg

SEQ ID NO: 261302 - DNA, 15 bp, Homo sapiens
agtatgtagtgcact

SEQ ID NO: 261303 - DNA, 15 bp, Homo sapiens
aagtatgtagtgcac

SEQ ID NO: 261304 - DNA, 15 bp, Homo sapiens
taagtatgtagtgca

SEQ ID NO: 261305 - DNA, 15 bp, Homo sapiens
gtaagtatgtagtgc

SEQ ID NO: 261306 - DNA, 15 bp, Homo sapiens
ggtaagtatgtagtg

SEQ ID NO: 261307 - DNA, 15 bp, Homo sapiens
gggtaagtatgtagt

SEQ ID NO: 261308 - DNA, 15 bp, Homo sapiens
tgggtaagtatgtag

SEQ ID NO: 261309 - DNA, 15 bp, Homo sapiens
gtgggtaagtatgta

SEQ ID NO: 261310 - DNA, 15 bp, Homo sapiens
agtgggtaagtatgt

SEQ ID NO: 261311 - DNA, 15 bp, Homo sapiens
aagtgggtaagtatg

SEQ ID NO: 261312 - DNA, 15 bp, Homo sapiens
gaagtgggtaagtat

SEQ ID NO: 261313 - DNA, 15 bp, Homo sapiens
tgaagtgggtaagta

SEQ ID NO: 261314 - DNA, 15 bp, Homo sapiens
ttgaagtgggtaagt

SEQ ID NO: 261315 - DNA, 15 bp, Homo sapiens
cttgaagtgggtaag

SEQ ID NO: 261316 - DNA, 15 bp, Homo sapiens
ccttgaagtgggtaa

SEQ ID NO: 261317 - DNA, 15 bp, Homo sapiens
cccttgaagtgggta

SEQ ID NO: 261318 - DNA, 15 bp, Homo sapiens
tcccttgaagtgggt

SEQ ID NO: 261319 - DNA, 15 bp, Homo sapiens
atcccttgaagtggg

SEQ ID NO: 261320 - DNA, 15 bp, Homo sapiens
aatcccttgaagtgg

SEQ ID NO: 261321 - DNA, 15 bp, Homo sapiens
aaatcccttgaagtg

SEQ ID NO: 261322 - DNA, 15 bp, Homo sapiens
aaaatcccttgaagt

SEQ ID NO: 261323 - DNA, 15 bp, Homo sapiens
caaaatcccttgaag

SEQ ID NO: 261324 - DNA, 15 bp, Homo sapiens
ccaaaatcccttgaa

SEQ ID NO: 261325 - DNA, 15 bp, Homo sapiens
tccaaaatcccttga

SEQ ID NO: 261326 - DNA, 15 bp, Homo sapiens
ttccaaaatcccttg

SEQ ID NO: 261327 - DNA, 15 bp, Homo sapiens
gttccaaaatccctt

SEQ ID NO: 261328 - DNA, 15 bp, Homo sapiens
cgttccaaaatccct

SEQ ID NO: 261329 - DNA, 15 bp, Homo sapiens
acgttccaaaatccc

SEQ ID NO: 261330 - DNA, 15 bp, Homo sapiens
aacgttccaaaatcc

SEQ ID NO: 261331 - DNA, 15 bp, Homo sapiens
caacgttccaaaatc

SEQ ID NO: 261332 - DNA, 15 bp, Homo sapiens
acaacgttccaaaat

SEQ ID NO: 261333 - DNA, 15 bp, Homo sapiens
cacaacgttccaaaa

SEQ ID NO: 261334 - DNA, 15 bp, Homo sapiens
tcacaacgttccaaa

SEQ ID NO: 261335 - DNA, 15 bp, Homo sapiens
ttcacaacgttccaa

SEQ ID NO: 261336 - DNA, 15 bp, Homo sapiens
attcacaacgttcca

SEQ ID NO: 261337 - DNA, 15 bp, Homo sapiens
tattcacaacgttcc

SEQ ID NO: 261338 - DNA, 15 bp, Homo sapiens
ttattcacaacgttc

SEQ ID NO: 261339 - DNA, 15 bp, Homo sapiens
gttattcacaacgtt

SEQ ID NO: 261340 - DNA, 15 bp, Homo sapiens
tgttattcacaacgt

SEQ ID NO: 261341 - DNA, 15 bp, Homo sapiens
atgttattcacaacg

SEQ ID NO: 261342 - DNA, 15 bp, Homo sapiens
aatgttattcacaac

SEQ ID NO: 261343 - DNA, 15 bp, Homo sapiens
gaatgttattcacaa

SEQ ID NO: 261344 - DNA, 15 bp, Homo sapiens
ggaatgttattcaca

SEQ ID NO: 261345 - DNA, 15 bp, Homo sapiens
gggaatgttattcac

SEQ ID NO: 261346 - DNA, 15 bp, Homo sapiens
agggaatgttattca

SEQ ID NO: 261347 - DNA, 15 bp, Homo sapiens
aagggaatgttattc

SEQ ID NO: 261348 - DNA, 15 bp, Homo sapiens
gaagggaatgttatt

SEQ ID NO: 261349 - DNA, 15 bp, Homo sapiens
ggaagggaatgttat

SEQ ID NO: 261350 - DNA, 15 bp, Homo sapiens
aggaagggaatgtta

SEQ ID NO: 261351 - DNA, 15 bp, Homo sapiens
aaggaagggaatgtt

SEQ ID NO: 261352 - DNA, 15 bp, Homo sapiens
gaaggaagggaatgt

SEQ ID NO: 261353 - DNA, 15 bp, Homo sapiens
cgaaggaagggaatg

SEQ ID NO: 261354 - DNA, 15 bp, Homo sapiens
tcgaaggaagggaat

SEQ ID NO: 261355 - DNA, 15 bp, Homo sapiens
ttcgaaggaagggaa

SEQ ID NO: 261356 - DNA, 15 bp, Homo sapiens
tttcgaaggaaggga

SEQ ID NO: 261357 - DNA, 15 bp, Homo sapiens
atttcgaaggaaggg

SEQ ID NO: 261358 - DNA, 15 bp, Homo sapiens
catttcgaaggaagg

SEQ ID NO: 261359 - DNA, 15 bp, Homo sapiens
gcatttcgaaggaag

SEQ ID NO: 261360 - DNA, 15 bp, Homo sapiens
tgcatttcgaaggaa

SEQ ID NO: 261361 - DNA, 15 bp, Homo sapiens
ttgcatttcgaagga

SEQ ID NO: 261362 - DNA, 15 bp, Homo sapiens
attgcatttcgaagg

SEQ ID NO: 261363 - DNA, 15 bp, Homo sapiens
aattgcatttcgaag

SEQ ID NO: 261364 - DNA, 15 bp, Homo sapiens
taattgcatttcgaa

SEQ ID NO: 261365 - DNA, 15 bp, Homo sapiens
ataattgcatttcga

SEQ ID NO: 261366 - DNA, 15 bp, Homo sapiens
cataattgcatttcg

SEQ ID NO: 261367 - DNA, 15 bp, Homo sapiens
tcataattgcatttc

SEQ ID NO: 261368 - DNA, 15 bp, Homo sapiens
ctcataattgcattt

SEQ ID NO: 261369 - DNA, 15 bp, Homo sapiens
actcataattgcatt

SEQ ID NO: 261370 - DNA, 15 bp, Homo sapiens
aactcataattgcat

SEQ ID NO: 261371 - DNA, 15 bp, Homo sapiens
taactcataattgca

SEQ ID NO: 261372 - DNA, 15 bp, Homo sapiens
ataactcataattgc

SEQ ID NO: 261373 - DNA, 15 bp, Homo sapiens
cataactcataattg

SEQ ID NO: 261374 - DNA, 15 bp, Homo sapiens
acataactcataatt

SEQ ID NO: 261375 - DNA, 15 bp, Homo sapiens
cacataactcataat

SEQ ID NO: 261376 - DNA, 15 bp, Homo sapiens
acacataactcataa

SEQ ID NO: 261377 - DNA, 15 bp, Homo sapiens
aacacataactcata

SEQ ID NO: 261378 - DNA, 15 bp, Homo sapiens
caacacataactcat

SEQ ID NO: 261379 - DNA, 15 bp, Homo sapiens
tcaacacataactca

SEQ ID NO: 261380 - DNA, 15 bp, Homo sapiens
gtcaacacataactc

SEQ ID NO: 261381 - DNA, 15 bp, Homo sapiens
tgtcaacacataact

SEQ ID NO: 261382 - DNA, 15 bp, Homo sapiens
atgtcaacacataac

SEQ ID NO: 261383 - DNA, 15 bp, Homo sapiens
catgtcaacacataa

SEQ ID NO: 261384 - DNA, 15 bp, Homo sapiens
acatgtcaacacata

SEQ ID NO: 261385 - DNA, 15 bp, Homo sapiens
tacatgtcaacacat

SEQ ID NO: 261386 - DNA, 15 bp, Homo sapiens
ttacatgtcaacaca

SEQ ID NO: 261387 - DNA, 15 bp, Homo sapiens
cttacatgtcaacac

SEQ ID NO: 261388 - DNA, 15 bp, Homo sapiens
acttacatgtcaaca

SEQ ID NO: 261389 - DNA, 15 bp, Homo sapiens
tacttacatgtcaac

SEQ ID NO: 261390 - DNA, 15 bp, Homo sapiens
gtacttacatgtcaa

SEQ ID NO: 261391 - DNA, 15 bp, Homo sapiens
tgtacttacatgtca

SEQ ID NO: 261392 - DNA, 15 bp, Homo sapiens
ttgtacttacatgtc

SEQ ID NO: 261393 - DNA, 15 bp, Homo sapiens
cttgtacttacatgt

SEQ ID NO: 261394 - DNA, 15 bp, Homo sapiens
acttgtacttacatg

SEQ ID NO: 261395 - DNA, 15 bp, Homo sapiens
cacttgtacttacat

SEQ ID NO: 261396 - DNA, 15 bp, Homo sapiens
acacttgtacttaca

SEQ ID NO: 261397 - DNA, 15 bp, Homo sapiens
gacacttgtacttac

SEQ ID NO: 261398 - DNA, 15 bp, Homo sapiens
agacacttgtactta

SEQ ID NO: 261399 - DNA, 15 bp, Homo sapiens
aagacacttgtactt

SEQ ID NO: 261400 - DNA, 15 bp, Homo sapiens
aaagacacttgtact

SEQ ID NO: 261401 - DNA, 15 bp, Homo sapiens
gaaagacacttgtac

SEQ ID NO: 261402 - DNA, 15 bp, Homo sapiens
agaaagacacttgta

SEQ ID NO: 261403 - DNA, 15 bp, Homo sapiens
tagaaagacacttgt

SEQ ID NO: 261404 - DNA, 15 bp, Homo sapiens
ttagaaagacacttg

SEQ ID NO: 261405 - DNA, 15 bp, Homo sapiens
cttagaaagacactt

SEQ ID NO: 261406 - DNA, 15 bp, Homo sapiens
ccttagaaagacact

SEQ ID NO: 261407 - DNA, 15 bp, Homo sapiens
accttagaaagacac

SEQ ID NO: 261408 - DNA, 15 bp, Homo sapiens
aaccttagaaagaca

SEQ ID NO: 261409 - DNA, 15 bp, Homo sapiens
aaaccttagaaagac

SEQ ID NO: 261410 - DNA, 15 bp, Homo sapiens
aaaaccttagaaaga

SEQ ID NO: 261411 - DNA, 15 bp, Homo sapiens
aaaaaccttagaaag

SEQ ID NO: 261412 - DNA, 15 bp, Homo sapiens
taaaaaccttagaaa

SEQ ID NO: 261413 - DNA, 15 bp, Homo sapiens
ctaaaaaccttagaa

SEQ ID NO: 261414 - DNA, 15 bp, Homo sapiens
gctaaaaaccttaga

SEQ ID NO: 261415 - DNA, 15 bp, Homo sapiens
ggctaaaaaccttag

SEQ ID NO: 261416 - DNA, 15 bp, Homo sapiens
aggctaaaaacctta

SEQ ID NO: 261417 - DNA, 15 bp, Homo sapiens
aaggctaaaaacctt

SEQ ID NO: 261418 - DNA, 15 bp, Homo sapiens
gaaggctaaaaacct

SEQ ID NO: 261419 - DNA, 15 bp, Homo sapiens
agaaggctaaaaacc

SEQ ID NO: 261420 - DNA, 15 bp, Homo sapiens
gagaaggctaaaaac

SEQ ID NO: 261421 - DNA, 15 bp, Homo sapiens
tgagaaggctaaaaa

SEQ ID NO: 261422 - DNA, 15 bp, Homo sapiens
ttgagaaggctaaaa

SEQ ID NO: 261423 - DNA, 15 bp, Homo sapiens
tttgagaaggctaaa

SEQ ID NO: 261424 - DNA, 15 bp, Homo sapiens
ctttgagaaggctaa

SEQ ID NO: 261425 - DNA, 15 bp, Homo sapiens
tctttgagaaggcta

SEQ ID NO: 261426 - DNA, 15 bp, Homo sapiens
ttctttgagaaggct

SEQ ID NO: 261427 - DNA, 15 bp, Homo sapiens
tttctttgagaaggc

SEQ ID NO: 261428 - DNA, 15 bp, Homo sapiens
ttttctttgagaagg

SEQ ID NO: 261429 - DNA, 15 bp, Homo sapiens
tttttctttgagaag

SEQ ID NO: 261430 - DNA, 15 bp, Homo sapiens
atttttctttgagaa

SEQ ID NO: 261431 - DNA, 15 bp, Homo sapiens
tatttttctttgaga

SEQ ID NO: 261432 - DNA, 15 bp, Homo sapiens
atatttttctttgag

SEQ ID NO: 261433 - DNA, 15 bp, Homo sapiens
catatttttctttga

SEQ ID NO: 261434 - DNA, 15 bp, Homo sapiens
gcatatttttctttg

SEQ ID NO: 261435 - DNA, 15 bp, Homo sapiens
agcatatttttcttt

SEQ ID NO: 261436 - DNA, 15 bp, Homo sapiens
aagcatatttttctt

SEQ ID NO: 261437 - DNA, 15 bp, Homo sapiens
aaagcatatttttct

SEQ ID NO: 261438 - DNA, 15 bp, Homo sapiens
taaagcatatttttc

SEQ ID NO: 261439 - DNA, 15 bp, Homo sapiens
ataaagcatattttt

SEQ ID NO: 261440 - DNA, 15 bp, Homo sapiens
tataaagcatatttt

SEQ ID NO: 261441 - DNA, 15 bp, Homo sapiens
ttataaagcatattt

SEQ ID NO: 261442 - DNA, 15 bp, Homo sapiens
attataaagcatatt

SEQ ID NO: 261443 - DNA, 15 bp, Homo sapiens
tattataaagcatat

SEQ ID NO: 261444 - DNA, 15 bp, Homo sapiens
gtattataaagcata

SEQ ID NO: 261445 - DNA, 15 bp, Homo sapiens
agtattataaagcat

SEQ ID NO: 261446 - DNA, 15 bp, Homo sapiens
cagtattataaagca

SEQ ID NO: 261447 - DNA, 15 bp, Homo sapiens
acagtattataaagc

SEQ ID NO: 261448 - DNA, 15 bp, Homo sapiens
tacagtattataaag

SEQ ID NO: 261449 - DNA, 15 bp, Homo sapiens
ttacagtattataaa

SEQ ID NO: 261450 - DNA, 15 bp, Homo sapiens
cttacagtattataa

SEQ ID NO: 261451 - DNA, 15 bp, Homo sapiens
gcttacagtattata

SEQ ID NO: 261452 - DNA, 15 bp, Homo sapiens
ggcttacagtattat

SEQ ID NO: 261453 - DNA, 15 bp, Homo sapiens
aggcttacagtatta

SEQ ID NO: 261454 - DNA, 15 bp, Homo sapiens
taggcttacagtatt

SEQ ID NO: 261455 - DNA, 15 bp, Homo sapiens
ttaggcttacagtat

SEQ ID NO: 261456 - DNA, 15 bp, Homo sapiens
attaggcttacagta

SEQ ID NO: 261457 - DNA, 15 bp, Homo sapiens
gattaggcttacagt

SEQ ID NO: 261458 - DNA, 15 bp, Homo sapiens
agattaggcttacag

SEQ ID NO: 261459 - DNA, 15 bp, Homo sapiens
tagattaggcttaca

SEQ ID NO: 261460 - DNA, 15 bp, Homo sapiens
ttagattaggcttac

SEQ ID NO: 261461 - DNA, 15 bp, Homo sapiens
tttagattaggctta

SEQ ID NO: 261462 - DNA, 15 bp, Homo sapiens
ttttagattaggctt

SEQ ID NO: 261463 - DNA, 15 bp, Homo sapiens
tttttagattaggct

SEQ ID NO: 261464 - DNA, 15 bp, Homo sapiens
gtttttagattaggc

SEQ ID NO: 261465 - DNA, 15 bp, Homo sapiens
tgtttttagattagg

SEQ ID NO: 261466 - DNA, 15 bp, Homo sapiens
atgtttttagattag

SEQ ID NO: 261467 - DNA, 15 bp, Homo sapiens
tatgtttttagatta

SEQ ID NO: 261468 - DNA, 15 bp, Homo sapiens
atatgtttttagatt

SEQ ID NO: 261469 - DNA, 15 bp, Homo sapiens
aatatgtttttagat

SEQ ID NO: 261470 - DNA, 15 bp, Homo sapiens
aaatatgtttttaga

SEQ ID NO: 261471 - DNA, 15 bp, Homo sapiens
gaaatatgtttttag

SEQ ID NO: 261472 - DNA, 15 bp, Homo sapiens
ggaaatatgttttta

SEQ ID NO: 261473 - DNA, 15 bp, Homo sapiens
tggaaatatgttttt

SEQ ID NO: 261474 - DNA, 15 bp, Homo sapiens
ttggaaatatgtttt

SEQ ID NO: 261475 - DNA, 15 bp, Homo sapiens
cttggaaatatgttt

SEQ ID NO: 261476 - DNA, 15 bp, Homo sapiens
gcttggaaatatgtt

SEQ ID NO: 261477 - DNA, 15 bp, Homo sapiens
agcttggaaatatgt

SEQ ID NO: 261478 - DNA, 15 bp, Homo sapiens
aagcttggaaatatg

SEQ ID NO: 261479 - DNA, 15 bp, Homo sapiens
taagcttggaaatat

SEQ ID NO: 261480 - DNA, 15 bp, Homo sapiens
ataagcttggaaata

SEQ ID NO: 261481 - DNA, 15 bp, Homo sapiens
gataagcttggaaat

SEQ ID NO: 261482 - DNA, 15 bp, Homo sapiens
tgataagcttggaaa

SEQ ID NO: 261483 - DNA, 15 bp, Homo sapiens
ttgataagcttggaa

SEQ ID NO: 261484 - DNA, 15 bp, Homo sapiens
tttgataagcttgga

SEQ ID NO: 261485 - DNA, 15 bp, Homo sapiens
ttttgataagcttgg

SEQ ID NO: 261486 - DNA, 15 bp, Homo sapiens
tttttgataagcttg

SEQ ID NO: 261487 - DNA, 15 bp, Homo sapiens
ctttttgataagctt

SEQ ID NO: 261488 - DNA, 15 bp, Homo sapiens
tctttttgataagct

SEQ ID NO: 261489 - DNA, 15 bp, Homo sapiens
gtctttttgataagc

SEQ ID NO: 261490 - DNA, 15 bp, Homo sapiens
agtctttttgataag

SEQ ID NO: 261491 - DNA, 15 bp, Homo sapiens
aagtctttttgataa

SEQ ID NO: 261492 - DNA, 15 bp, Homo sapiens
aaagtctttttgata

SEQ ID NO: 261493 - DNA, 15 bp, Homo sapiens
taaagtctttttgat

SEQ ID NO: 261494 - DNA, 15 bp, Homo sapiens
ttaaagtctttttga

SEQ ID NO: 261495 - DNA, 15 bp, Homo sapiens
cttaaagtctttttg

SEQ ID NO: 261496 - DNA, 15 bp, Homo sapiens
tcttaaagtcttttt

SEQ ID NO: 261497 - DNA, 15 bp, Homo sapiens
atcttaaagtctttt

SEQ ID NO: 261498 - DNA, 15 bp, Homo sapiens
tatcttaaagtcttt

SEQ ID NO: 261499 - DNA, 15 bp, Homo sapiens
ctatcttaaagtctt

SEQ ID NO: 261500 - DNA, 15 bp, Homo sapiens
gctatcttaaagtct

SEQ ID NO: 261501 - DNA, 15 bp, Homo sapiens
agctatcttaaagtc

SEQ ID NO: 261502 - DNA, 15 bp, Homo sapiens
aagctatcttaaagt

SEQ ID NO: 261503 - DNA, 15 bp, Homo sapiens
aaagctatcttaaag

SEQ ID NO: 261504 - DNA, 15 bp, Homo sapiens
aaaagctatcttaaa

SEQ ID NO: 261505 - DNA, 15 bp, Homo sapiens
taaaagctatcttaa

SEQ ID NO: 261506 - DNA, 15 bp, Homo sapiens
ttaaaagctatctta

SEQ ID NO: 261507 - DNA, 15 bp, Homo sapiens
cttaaaagctatctt

SEQ ID NO: 261508 - DNA, 15 bp, Homo sapiens
acttaaaagctatct

SEQ ID NO: 261509 - DNA, 15 bp, Homo sapiens
aacttaaaagctatc

SEQ ID NO: 261510 - DNA, 15 bp, Homo sapiens
aaacttaaaagctat

SEQ ID NO: 261511 - DNA, 15 bp, Homo sapiens
caaacttaaaagcta

SEQ ID NO: 261512 - DNA, 15 bp, Homo sapiens
gcaaacttaaaagct

SEQ ID NO: 261513 - DNA, 15 bp, Homo sapiens
ggcaaacttaaaagc

SEQ ID NO: 261514 - DNA, 15 bp, Homo sapiens
aggcaaacttaaaag

SEQ ID NO: 261515 - DNA, 15 bp, Homo sapiens
aaggcaaacttaaaa

SEQ ID NO: 261516 - DNA, 15 bp, Homo sapiens
gaaggcaaacttaaa

SEQ ID NO: 261517 - DNA, 15 bp, Homo sapiens
ggaaggcaaacttaa

SEQ ID NO: 261518 - DNA, 15 bp, Homo sapiens
tggaaggcaaactta

SEQ ID NO: 261519 - DNA, 15 bp, Homo sapiens
atggaaggcaaactt

SEQ ID NO: 261520 - DNA, 15 bp, Homo sapiens
gatggaaggcaaact

SEQ ID NO: 261521 - DNA, 15 bp, Homo sapiens
agatggaaggcaaac

SEQ ID NO: 261522 - DNA, 15 bp, Homo sapiens
aagatggaaggcaaa

SEQ ID NO: 261523 - DNA, 15 bp, Homo sapiens
taagatggaaggcaa

SEQ ID NO: 261524 - DNA, 15 bp, Homo sapiens
ttaagatggaaggca

SEQ ID NO: 261525 - DNA, 15 bp, Homo sapiens
attaagatggaaggc

SEQ ID NO: 261526 - DNA, 15 bp, Homo sapiens
gattaagatggaagg

SEQ ID NO: 261527 - DNA, 15 bp, Homo sapiens
cgattaagatggaag

SEQ ID NO: 261528 - DNA, 15 bp, Homo sapiens
gcgattaagatggaa

SEQ ID NO: 261529 - DNA, 15 bp, Homo sapiens
ggcgattaagatgga

SEQ ID NO: 261530 - DNA, 15 bp, Homo sapiens
tggcgattaagatgg

SEQ ID NO: 261531 - DNA, 15 bp, Homo sapiens
ttggcgattaagatg

SEQ ID NO: 261532 - DNA, 15 bp, Homo sapiens
tttggcgattaagat

SEQ ID NO: 261533 - DNA, 15 bp, Homo sapiens
ttttggcgattaaga

SEQ ID NO: 261534 - DNA, 15 bp, Homo sapiens
tttttggcgattaag

SEQ ID NO: 261535 - DNA, 15 bp, Homo sapiens
atttttggcgattaa

SEQ ID NO: 261536 - DNA, 15 bp, Homo sapiens
tatttttggcgatta

SEQ ID NO: 261537 - DNA, 15 bp, Homo sapiens
atatttttggcgatt

SEQ ID NO: 261538 - DNA, 15 bp, Homo sapiens
aatatttttggcgat

SEQ ID NO: 261539 - DNA, 15 bp, Homo sapiens
caatatttttggcga

SEQ ID NO: 261540 - DNA, 15 bp, Homo sapiens
tcaatatttttggcg

SEQ ID NO: 261541 - DNA, 15 bp, Homo sapiens
gtcaatatttttggc

SEQ ID NO: 261542 - DNA, 15 bp, Homo sapiens
tgtcaatatttttgg

SEQ ID NO: 261543 - DNA, 15 bp, Homo sapiens
atgtcaatatttttg

SEQ ID NO: 261544 - DNA, 15 bp, Homo sapiens
aatgtcaatattttt

SEQ ID NO: 261545 - DNA, 15 bp, Homo sapiens
aaatgtcaatatttt

SEQ ID NO: 261546 - DNA, 15 bp, Homo sapiens
taaatgtcaatattt

SEQ ID NO: 261547 - DNA, 15 bp, Homo sapiens
ctaaatgtcaatatt

SEQ ID NO: 261548 - DNA, 15 bp, Homo sapiens
actaaatgtcaatat

SEQ ID NO: 261549 - DNA, 15 bp, Homo sapiens
gactaaatgtcaata

SEQ ID NO: 261550 - DNA, 15 bp, Homo sapiens
ggactaaatgtcaat

SEQ ID NO: 261551 - DNA, 15 bp, Homo sapiens
gggactaaatgtcaa

SEQ ID NO: 261552 - DNA, 15 bp, Homo sapiens
tgggactaaatgtca

SEQ ID NO: 261553 - DNA, 15 bp, Homo sapiens
atgggactaaatgtc

SEQ ID NO: 261554 - DNA, 15 bp, Homo sapiens
gatgggactaaatgt

SEQ ID NO: 261555 - DNA, 15 bp, Homo sapiens
ggatgggactaaatg

SEQ ID NO: 261556 - DNA, 15 bp, Homo sapiens
tggatgggactaaat

SEQ ID NO: 261557 - DNA, 15 bp, Homo sapiens
ctggatgggactaaa

SEQ ID NO: 261558 - DNA, 15 bp, Homo sapiens
actggatgggactaa

SEQ ID NO: 261559 - DNA, 15 bp, Homo sapiens
aactggatgggacta

SEQ ID NO: 261560 - DNA, 15 bp, Homo sapiens
aaactggatgggact

SEQ ID NO: 261561 - DNA, 15 bp, Homo sapiens
taaactggatgggac

SEQ ID NO: 261562 - DNA, 15 bp, Homo sapiens
ataaactggatggga

SEQ ID NO: 261563 - DNA, 15 bp, Homo sapiens
tataaactggatggg

SEQ ID NO: 261564 - DNA, 15 bp, Homo sapiens
gtataaactggatgg

SEQ ID NO: 261565 - DNA, 15 bp, Homo sapiens
tgtataaactggatg

SEQ ID NO: 261566 - DNA, 15 bp, Homo sapiens
ctgtataaactggat

SEQ ID NO: 261567 - DNA, 15 bp, Homo sapiens
actgtataaactgga

SEQ ID NO: 261568 - DNA, 15 bp, Homo sapiens
gactgtataaactgg

SEQ ID NO: 261569 - DNA, 15 bp, Homo sapiens
agactgtataaactg

SEQ ID NO: 261570 - DNA, 15 bp, Homo sapiens
cagactgtataaact

SEQ ID NO: 261571 - DNA, 15 bp, Homo sapiens
gcagactgtataaac

SEQ ID NO: 261572 - DNA, 15 bp, Homo sapiens
agcagactgtataaa

SEQ ID NO: 261573 - DNA, 15 bp, Homo sapiens
gagcagactgtataa

SEQ ID NO: 261574 - DNA, 15 bp, Homo sapiens
tgagcagactgtata

SEQ ID NO: 261575 - DNA, 15 bp, Homo sapiens
gtgagcagactgtat

SEQ ID NO: 261576 - DNA, 15 bp, Homo sapiens
tgtgagcagactgta

SEQ ID NO: 261577 - DNA, 15 bp, Homo sapiens
ttgtgagcagactgt

SEQ ID NO: 261578 - DNA, 15 bp, Homo sapiens
gttgtgagcagactg

SEQ ID NO: 261579 - DNA, 15 bp, Homo sapiens
agttgtgagcagact

SEQ ID NO: 261580 - DNA, 15 bp, Homo sapiens
gagttgtgagcagac

SEQ ID NO: 261581 - DNA, 15 bp, Homo sapiens
agagttgtgagcaga

SEQ ID NO: 261582 - DNA, 15 bp, Homo sapiens
cagagttgtgagcag

SEQ ID NO: 261583 - DNA, 15 bp, Homo sapiens
acagagttgtgagca

SEQ ID NO: 261584 - DNA, 15 bp, Homo sapiens
tacagagttgtgagc

SEQ ID NO: 261585 - DNA, 15 bp, Homo sapiens
atacagagttgtgag

SEQ ID NO: 261586 - DNA, 15 bp, Homo sapiens
tatacagagttgtga

SEQ ID NO: 261587 - DNA, 15 bp, Homo sapiens
gtatacagagttgtg

SEQ ID NO: 261588 - DNA, 15 bp, Homo sapiens
ggtatacagagttgt

SEQ ID NO: 261589 - DNA, 15 bp, Homo sapiens
aggtatacagagttg

SEQ ID NO: 261590 - DNA, 15 bp, Homo sapiens
gaggtatacagagtt

SEQ ID NO: 261591 - DNA, 15 bp, Homo sapiens
agaggtatacagagt

SEQ ID NO: 261592 - DNA, 15 bp, Homo sapiens
aagaggtatacagag

SEQ ID NO: 261593 - DNA, 15 bp, Homo sapiens
gaagaggtatacaga

SEQ ID NO: 261594 - DNA, 15 bp, Homo sapiens
agaagaggtatacag

SEQ ID NO: 261595 - DNA, 15 bp, Homo sapiens
tagaagaggtataca

SEQ ID NO: 261596 - DNA, 15 bp, Homo sapiens
ttagaagaggtatac

SEQ ID NO: 261597 - DNA, 15 bp, Homo sapiens
gttagaagaggtata

SEQ ID NO: 261598 - DNA, 15 bp, Homo sapiens
ggttagaagaggtat

SEQ ID NO: 261599 - DNA, 15 bp, Homo sapiens
aggttagaagaggta

SEQ ID NO: 261600 - DNA, 15 bp, Homo sapiens
aaggttagaagaggt

SEQ ID NO: 261601 - DNA, 15 bp, Homo sapiens
aaaggttagaagagg

SEQ ID NO: 261602 - DNA, 15 bp, Homo sapiens
taaaggttagaagag

SEQ ID NO: 261603 - DNA, 15 bp, Homo sapiens
gtaaaggttagaaga

SEQ ID NO: 261604 - DNA, 15 bp, Homo sapiens
agtaaaggttagaag

SEQ ID NO: 261605 - DNA, 15 bp, Homo sapiens
cagtaaaggttagaa

SEQ ID NO: 261606 - DNA, 15 bp, Homo sapiens
acagtaaaggttaga

SEQ ID NO: 261607 - DNA, 15 bp, Homo sapiens
aacagtaaaggttag

SEQ ID NO: 261608 - DNA, 15 bp, Homo sapiens
aaacagtaaaggtta

SEQ ID NO: 261609 - DNA, 15 bp, Homo sapiens
caaacagtaaaggtt

SEQ ID NO: 261610 - DNA, 15 bp, Homo sapiens
ccaaacagtaaaggt

SEQ ID NO: 261611 - DNA, 15 bp, Homo sapiens
accaaacagtaaagg

SEQ ID NO: 261612 - DNA, 15 bp, Homo sapiens
gaccaaacagtaaag

SEQ ID NO: 261613 - DNA, 15 bp, Homo sapiens
tgaccaaacagtaaa

SEQ ID NO: 261614 - DNA, 15 bp, Homo sapiens
ctgaccaaacagtaa

SEQ ID NO: 261615 - DNA, 15 bp, Homo sapiens
actgaccaaacagta

SEQ ID NO: 261616 - DNA, 15 bp, Homo sapiens
aactgaccaaacagt

SEQ ID NO: 261617 - DNA, 15 bp, Homo sapiens
aaactgaccaaacag

SEQ ID NO: 261618 - DNA, 15 bp, Homo sapiens
caaactgaccaaaca

SEQ ID NO: 261619 - DNA, 15 bp, Homo sapiens
acaaactgaccaaac

SEQ ID NO: 261620 - DNA, 15 bp, Homo sapiens
cacaaactgaccaaa

SEQ ID NO: 261621 - DNA, 15 bp, Homo sapiens
ccacaaactgaccaa

SEQ ID NO: 261622 - DNA, 15 bp, Homo sapiens
tccacaaactgacca

SEQ ID NO: 261623 - DNA, 15 bp, Homo sapiens
ctccacaaactgacc

SEQ ID NO: 261624 - DNA, 15 bp, Homo sapiens
cctccacaaactgac

SEQ ID NO: 261625 - DNA, 15 bp, Homo sapiens
acctccacaaactga

SEQ ID NO: 261626 - DNA, 15 bp, Homo sapiens
tacctccacaaactg

SEQ ID NO: 261627 - DNA, 15 bp, Homo sapiens
ctacctccacaaact

SEQ ID NO: 261628 - DNA, 15 bp, Homo sapiens
gctacctccacaaac

SEQ ID NO: 261629 - DNA, 15 bp, Homo sapiens
tgctacctccacaaa

SEQ ID NO: 261630 - DNA, 15 bp, Homo sapiens
atgctacctccacaa

SEQ ID NO: 261631 - DNA, 15 bp, Homo sapiens
catgctacctccaca

SEQ ID NO: 261632 - DNA, 15 bp, Homo sapiens
ccatgctacctccac

SEQ ID NO: 261633 - DNA, 15 bp, Homo sapiens
accatgctacctcca

SEQ ID NO: 261634 - DNA, 15 bp, Homo sapiens
gaccatgctacctcc

SEQ ID NO: 261635 - DNA, 15 bp, Homo sapiens
ggaccatgctacctc

SEQ ID NO: 261636 - DNA, 15 bp, Homo sapiens
tggaccatgctacct

SEQ ID NO: 261637 - DNA, 15 bp, Homo sapiens
ctggaccatgctacc

SEQ ID NO: 261638 - DNA, 15 bp, Homo sapiens
gctggaccatgctac

SEQ ID NO: 261639 - DNA, 15 bp, Homo sapiens
agctggaccatgcta

SEQ ID NO: 261640 - DNA, 15 bp, Homo sapiens
cagctggaccatgct

SEQ ID NO: 261641 - DNA, 15 bp, Homo sapiens
acagctggaccatgc

SEQ ID NO: 261642 - DNA, 15 bp, Homo sapiens
aacagctggaccatg

SEQ ID NO: 261643 - DNA, 15 bp, Homo sapiens
aaacagctggaccat

SEQ ID NO: 261644 - DNA, 15 bp, Homo sapiens
taaacagctggacca

SEQ ID NO: 261645 - DNA, 15 bp, Homo sapiens
ataaacagctggacc

SEQ ID NO: 261646 - DNA, 15 bp, Homo sapiens
aataaacagctggac

SEQ ID NO: 261647 - DNA, 15 bp, Homo sapiens
caataaacagctgga

SEQ ID NO: 261648 - DNA, 15 bp, Homo sapiens
tcaataaacagctgg

SEQ ID NO: 261649 - DNA, 15 bp, Homo sapiens
ttcaataaacagctg

SEQ ID NO: 261650 - DNA, 15 bp, Homo sapiens
attcaataaacagct

SEQ ID NO: 261651 - DNA, 15 bp, Homo sapiens
cattcaataaacagc

SEQ ID NO: 261652 - DNA, 15 bp, Homo sapiens
gcattcaataaacag

SEQ ID NO: 261653 - DNA, 15 bp, Homo sapiens
ggcattcaataaaca

SEQ ID NO: 261654 - DNA, 15 bp, Homo sapiens
gggcattcaataaac

SEQ ID NO: 261655 - DNA, 15 bp, Homo sapiens
tgggcattcaataaa

SEQ ID NO: 261656 - DNA, 15 bp, Homo sapiens
atgggcattcaataa

SEQ ID NO: 261657 - DNA, 15 bp, Homo sapiens
catgggcattcaata

SEQ ID NO: 261658 - DNA, 15 bp, Homo sapiens
ccatgggcattcaat

SEQ ID NO: 261659 - DNA, 15 bp, Homo sapiens
cccatgggcattcaa

SEQ ID NO: 261660 - DNA, 15 bp, Homo sapiens
gcccatgggcattca

SEQ ID NO: 261661 - DNA, 15 bp, Homo sapiens
ggcccatgggcattc

SEQ ID NO: 261662 - DNA, 15 bp, Homo sapiens
tggcccatgggcatt

SEQ ID NO: 261663 - DNA, 15 bp, Homo sapiens
gtggcccatgggcat

SEQ ID NO: 261664 - DNA, 15 bp, Homo sapiens
tgtggcccatgggca

SEQ ID NO: 261665 - DNA, 15 bp, Homo sapiens
ctgtggcccatgggc

SEQ ID NO: 261666 - DNA, 15 bp, Homo sapiens
tctgtggcccatggg

SEQ ID NO: 261667 - DNA, 15 bp, Homo sapiens
ttctgtggcccatgg

SEQ ID NO: 261668 - DNA, 15 bp, Homo sapiens
attctgtggcccatg

SEQ ID NO: 261669 - DNA, 15 bp, Homo sapiens
aattctgtggcccat

SEQ ID NO: 261670 - DNA, 15 bp, Homo sapiens
caattctgtggccca

SEQ ID NO: 261671 - DNA, 15 bp, Homo sapiens
acaattctgtggccc

SEQ ID NO: 261672 - DNA, 15 bp, Homo sapiens
aacaattctgtggcc

SEQ ID NO: 261673 - DNA, 15 bp, Homo sapiens
gaacaattctgtggc

SEQ ID NO: 261674 - DNA, 15 bp, Homo sapiens
agaacaattctgtgg

SEQ ID NO: 261675 - DNA, 15 bp, Homo sapiens
cagaacaattctgtg

SEQ ID NO: 261676 - DNA, 15 bp, Homo sapiens
tcagaacaattctgt

SEQ ID NO: 261677 - DNA, 15 bp, Homo sapiens
ttcagaacaattctg

SEQ ID NO: 261678 - DNA, 15 bp, Homo sapiens
gttcagaacaattct

SEQ ID NO: 261679 - DNA, 15 bp, Homo sapiens
tgttcagaacaattc

SEQ ID NO: 261680 - DNA, 15 bp, Homo sapiens
atgttcagaacaatt

SEQ ID NO: 261681 - DNA, 15 bp, Homo sapiens
catgttcagaacaat

SEQ ID NO: 261682 - DNA, 15 bp, Homo sapiens
acatgttcagaacaa

SEQ ID NO: 261683 - DNA, 15 bp, Homo sapiens
tacatgttcagaaca

SEQ ID NO: 261684 - DNA, 15 bp, Homo sapiens
ctacatgttcagaac

SEQ ID NO: 261685 - DNA, 15 bp, Homo sapiens
gctacatgttcagaa

SEQ ID NO: 261686 - DNA, 15 bp, Homo sapiens
tgctacatgttcaga

SEQ ID NO: 261687 - DNA, 15 bp, Homo sapiens
gtgctacatgttcag

SEQ ID NO: 261688 - DNA, 15 bp, Homo sapiens
ggtgctacatgttca

SEQ ID NO: 261689 - DNA, 15 bp, Homo sapiens
gggtgctacatgttc

SEQ ID NO: 261690 - DNA, 15 bp, Homo sapiens
tgggtgctacatgtt

SEQ ID NO: 261691 - DNA, 15 bp, Homo sapiens
atgggtgctacatgt

SEQ ID NO: 261692 - DNA, 15 bp, Homo sapiens
aatgggtgctacatg

SEQ ID NO: 261693 - DNA, 15 bp, Homo sapiens
taatgggtgctacat

SEQ ID NO: 261694 - DNA, 15 bp, Homo sapiens
ttaatgggtgctaca

SEQ ID NO: 261695 - DNA, 15 bp, Homo sapiens
tttaatgggtgctac

SEQ ID NO: 261696 - DNA, 15 bp, Homo sapiens
ttttaatgggtgcta

SEQ ID NO: 261697 - DNA, 15 bp, Homo sapiens
attttaatgggtgct

SEQ ID NO: 261698 - DNA, 15 bp, Homo sapiens
tattttaatgggtgc

SEQ ID NO: 261699 - DNA, 15 bp, Homo sapiens
ttattttaatgggtg

SEQ ID NO: 261700 - DNA, 15 bp, Homo sapiens
tttattttaatgggt

SEQ ID NO: 261701 - DNA, 15 bp, Homo sapiens
atttattttaatggg

SEQ ID NO: 261702 - DNA, 15 bp, Homo sapiens
aatttattttaatgg

SEQ ID NO: 261703 - DNA, 15 bp, Homo sapiens
aaatttattttaatg

SEQ ID NO: 261704 - DNA, 15 bp, Homo sapiens
caaatttattttaat

SEQ ID NO: 261705 - DNA, 15 bp, Homo sapiens
ccaaatttattttaa

SEQ ID NO: 261706 - DNA, 15 bp, Homo sapiens
tccaaatttatttta

SEQ ID NO: 261707 - DNA, 15 bp, Homo sapiens
atccaaatttatttt

SEQ ID NO: 261708 - DNA, 15 bp, Homo sapiens
aatccaaatttattt

SEQ ID NO: 261709 - DNA, 15 bp, Homo sapiens
aaatccaaatttatt

SEQ ID NO: 261710 - DNA, 15 bp, Homo sapiens
caaatccaaatttat

SEQ ID NO: 261711 - DNA, 15 bp, Homo sapiens
ccaaatccaaattta

SEQ ID NO: 261712 - DNA, 15 bp, Homo sapiens
tccaaatccaaattt

SEQ ID NO: 261713 - DNA, 15 bp, Homo sapiens
atccaaatccaaatt

SEQ ID NO: 261714 - DNA, 15 bp, Homo sapiens
gatccaaatccaaat

SEQ ID NO: 261715 - DNA, 15 bp, Homo sapiens
tgatccaaatccaaa

SEQ ID NO: 261716 - DNA, 15 bp, Homo sapiens
ctgatccaaatccaa

SEQ ID NO: 261717 - DNA, 15 bp, Homo sapiens
gctgatccaaatcca

SEQ ID NO: 261718 - DNA, 15 bp, Homo sapiens
tgctgatccaaatcc

SEQ ID NO: 261719 - DNA, 15 bp, Homo sapiens
ttgctgatccaaatc

SEQ ID NO: 261720 - DNA, 15 bp, Homo sapiens
cttgctgatccaaat

SEQ ID NO: 261721 - DNA, 15 bp, Homo sapiens
tcttgctgatccaaa

SEQ ID NO: 261722 - DNA, 15 bp, Homo sapiens
ttcttgctgatccaa

SEQ ID NO: 261723 - DNA, 15 bp, Homo sapiens
tttcttgctgatcca

SEQ ID NO: 261724 - DNA, 15 bp, Homo sapiens
ttttcttgctgatcc

SEQ ID NO: 261725 - DNA, 15 bp, Homo sapiens
attttcttgctgatc

SEQ ID NO: 261726 - DNA, 15 bp, Homo sapiens
tattttcttgctgat

SEQ ID NO: 261727 - DNA, 15 bp, Homo sapiens
ttattttcttgctga

SEQ ID NO: 261728 - DNA, 15 bp, Homo sapiens
gttattttcttgctg

SEQ ID NO: 261729 - DNA, 15 bp, Homo sapiens
agttattttcttgct

SEQ ID NO: 261730 - DNA, 15 bp, Homo sapiens
aagttattttcttgc

SEQ ID NO: 261731 - DNA, 15 bp, Homo sapiens
aaagttattttcttg

SEQ ID NO: 261732 - DNA, 15 bp, Homo sapiens
gaaagttattttctt

SEQ ID NO: 261733 - DNA, 15 bp, Homo sapiens
ggaaagttattttct

SEQ ID NO: 261734 - DNA, 15 bp, Homo sapiens
tggaaagttattttc

SEQ ID NO: 261735 - DNA, 15 bp, Homo sapiens
atggaaagttatttt

SEQ ID NO: 261736 - DNA, 15 bp, Homo sapiens
catggaaagttattt

SEQ ID NO: 261737 - DNA, 15 bp, Homo sapiens
tcatggaaagttatt

SEQ ID NO: 261738 - DNA, 15 bp, Homo sapiens
atcatggaaagttat

SEQ ID NO: 261739 - DNA, 15 bp, Homo sapiens
aatcatggaaagtta

SEQ ID NO: 261740 - DNA, 15 bp, Homo sapiens
gaatcatggaaagtt

SEQ ID NO: 261741 - DNA, 15 bp, Homo sapiens
agaatcatggaaagt

SEQ ID NO: 261742 - DNA, 15 bp, Homo sapiens
tagaatcatggaaag

SEQ ID NO: 261743 - DNA, 15 bp, Homo sapiens
ttagaatcatggaaa

SEQ ID NO: 261744 - DNA, 15 bp, Homo sapiens
tttagaatcatggaa

SEQ ID NO: 261745 - DNA, 15 bp, Homo sapiens
ctttagaatcatgga

SEQ ID NO: 261746 - DNA, 15 bp, Homo sapiens
actttagaatcatgg

SEQ ID NO: 261747 - DNA, 15 bp, Homo sapiens
cactttagaatcatg

SEQ ID NO: 261748 - DNA, 15 bp, Homo sapiens
ccactttagaatcat

SEQ ID NO: 261749 - DNA, 15 bp, Homo sapiens
cccactttagaatca

SEQ ID NO: 261750 - DNA, 15 bp, Homo sapiens
acccactttagaatc

SEQ ID NO: 261751 - DNA, 15 bp, Homo sapiens
cacccactttagaat

SEQ ID NO: 261752 - DNA, 15 bp, Homo sapiens
gcacccactttagaa

SEQ ID NO: 261753 - DNA, 15 bp, Homo sapiens
ggcacccactttaga

SEQ ID NO: 261754 - DNA, 15 bp, Homo sapiens
tggcacccactttag

SEQ ID NO: 261755 - DNA, 15 bp, Homo sapiens
atggcacccacttta

SEQ ID NO: 261756 - DNA, 15 bp, Homo sapiens
tatggcacccacttt

SEQ ID NO: 261757 - DNA, 15 bp, Homo sapiens
gtatggcacccactt

SEQ ID NO: 261758 - DNA, 15 bp, Homo sapiens
agtatggcacccact

SEQ ID NO: 261759 - DNA, 15 bp, Homo sapiens
gagtatggcacccac

SEQ ID NO: 261760 - DNA, 15 bp, Homo sapiens
tgagtatggcaccca

SEQ ID NO: 261761 - DNA, 15 bp, Homo sapiens
ctgagtatggcaccc

SEQ ID NO: 261762 - DNA, 15 bp, Homo sapiens
gctgagtatggcacc

SEQ ID NO: 261763 - DNA, 15 bp, Homo sapiens
ggctgagtatggcac

SEQ ID NO: 261764 - DNA, 15 bp, Homo sapiens
tggctgagtatggca

SEQ ID NO: 261765 - DNA, 15 bp, Homo sapiens
atggctgagtatggc

SEQ ID NO: 261766 - DNA, 15 bp, Homo sapiens
aatggctgagtatgg

SEQ ID NO: 261767 - DNA, 15 bp, Homo sapiens
gaatggctgagtatg

SEQ ID NO: 261768 - DNA, 15 bp, Homo sapiens
ggaatggctgagtat

SEQ ID NO: 261769 - DNA, 15 bp, Homo sapiens
aggaatggctgagta

SEQ ID NO: 261770 - DNA, 15 bp, Homo sapiens
aaggaatggctgagt

SEQ ID NO: 261771 - DNA, 15 bp, Homo sapiens
aaaggaatggctgag

SEQ ID NO: 261772 - DNA, 15 bp, Homo sapiens
gaaaggaatggctga

SEQ ID NO: 261773 - DNA, 15 bp, Homo sapiens
tgaaaggaatggctg

SEQ ID NO: 261774 - DNA, 15 bp, Homo sapiens
atgaaaggaatggct

SEQ ID NO: 261775 - DNA, 15 bp, Homo sapiens
tatgaaaggaatggc

SEQ ID NO: 261776 - DNA, 15 bp, Homo sapiens
ctatgaaaggaatgg

SEQ ID NO: 261777 - DNA, 15 bp, Homo sapiens
cctatgaaaggaatg

SEQ ID NO: 261778 - DNA, 15 bp, Homo sapiens
gcctatgaaaggaat

SEQ ID NO: 261779 - DNA, 15 bp, Homo sapiens
ggcctatgaaaggaa

SEQ ID NO: 261780 - DNA, 15 bp, Homo sapiens
aggcctatgaaagga

SEQ ID NO: 261781 - DNA, 15 bp, Homo sapiens
gaggcctatgaaagg

SEQ ID NO: 261782 - DNA, 15 bp, Homo sapiens
agaggcctatgaaag

SEQ ID NO: 261783 - DNA, 15 bp, Homo sapiens
aagaggcctatgaaa

SEQ ID NO: 261784 - DNA, 15 bp, Homo sapiens
caagaggcctatgaa

SEQ ID NO: 261785 - DNA, 15 bp, Homo sapiens
ccaagaggcctatga

SEQ ID NO: 261786 - DNA, 15 bp, Homo sapiens
tccaagaggcctatg

SEQ ID NO: 261787 - DNA, 15 bp, Homo sapiens
atccaagaggcctat

SEQ ID NO: 261788 - DNA, 15 bp, Homo sapiens
tatccaagaggccta

SEQ ID NO: 261789 - DNA, 15 bp, Homo sapiens
ctatccaagaggcct

SEQ ID NO: 261790 - DNA, 15 bp, Homo sapiens
actatccaagaggcc

SEQ ID NO: 261791 - DNA, 15 bp, Homo sapiens
cactatccaagaggc

SEQ ID NO: 261792 - DNA, 15 bp, Homo sapiens
tcactatccaagagg

SEQ ID NO: 261793 - DNA, 15 bp, Homo sapiens
ctcactatccaagag

SEQ ID NO: 261794 - DNA, 15 bp, Homo sapiens
gctcactatccaaga

SEQ ID NO: 261795 - DNA, 15 bp, Homo sapiens
tgctcactatccaag

SEQ ID NO: 261796 - DNA, 15 bp, Homo sapiens
ctgctcactatccaa

SEQ ID NO: 261797 - DNA, 15 bp, Homo sapiens
tctgctcactatcca

SEQ ID NO: 261798 - DNA, 15 bp, Homo sapiens
atctgctcactatcc

SEQ ID NO: 261799 - DNA, 15 bp, Homo sapiens
catctgctcactatc

SEQ ID NO: 261800 - DNA, 15 bp, Homo sapiens
ccatctgctcactat

SEQ ID NO: 261801 - DNA, 15 bp, Homo sapiens
gccatctgctcacta

SEQ ID NO: 261802 - DNA, 15 bp, Homo sapiens
agccatctgctcact

SEQ ID NO: 261803 - DNA, 15 bp, Homo sapiens
tagccatctgctcac

SEQ ID NO: 261804 - DNA, 15 bp, Homo sapiens
gtagccatctgctca

SEQ ID NO: 261805 - DNA, 15 bp, Homo sapiens
ggtagccatctgctc

SEQ ID NO: 261806 - DNA, 15 bp, Homo sapiens
aggtagccatctgct

SEQ ID NO: 261807 - DNA, 15 bp, Homo sapiens
caggtagccatctgc

SEQ ID NO: 261808 - DNA, 15 bp, Homo sapiens
tcaggtagccatctg

SEQ ID NO: 261809 - DNA, 15 bp, Homo sapiens
ttcaggtagccatct

SEQ ID NO: 261810 - DNA, 15 bp, Homo sapiens
tttcaggtagccatc

SEQ ID NO: 261811 - DNA, 15 bp, Homo sapiens
ttttcaggtagccat

SEQ ID NO: 261812 - DNA, 15 bp, Homo sapiens
tttttcaggtagcca

SEQ ID NO: 261813 - DNA, 15 bp, Homo sapiens
atttttcaggtagcc

SEQ ID NO: 261814 - DNA, 15 bp, Homo sapiens
gatttttcaggtagc

SEQ ID NO: 261815 - DNA, 15 bp, Homo sapiens
tgatttttcaggtag

SEQ ID NO: 261816 - DNA, 15 bp, Homo sapiens
ttgatttttcaggta

SEQ ID NO: 261817 - DNA, 15 bp, Homo sapiens
attgatttttcaggt

SEQ ID NO: 261818 - DNA, 15 bp, Homo sapiens
tattgatttttcagg

SEQ ID NO: 261819 - DNA, 15 bp, Homo sapiens
atattgatttttcag

SEQ ID NO: 261820 - DNA, 15 bp, Homo sapiens
aatattgatttttca

SEQ ID NO: 261821 - DNA, 15 bp, Homo sapiens
caatattgatttttc

SEQ ID NO: 261822 - DNA, 15 bp, Homo sapiens
gcaatattgattttt

SEQ ID NO: 261823 - DNA, 15 bp, Homo sapiens
ggcaatattgatttt

SEQ ID NO: 261824 - DNA, 15 bp, Homo sapiens
tggcaatattgattt

SEQ ID NO: 261825 - DNA, 15 bp, Homo sapiens
ctggcaatattgatt

SEQ ID NO: 261826 - DNA, 15 bp, Homo sapiens
tctggcaatattgat

SEQ ID NO: 261827 - DNA, 15 bp, Homo sapiens
atctggcaatattga

SEQ ID NO: 261828 - DNA, 15 bp, Homo sapiens
aatctggcaatattg

SEQ ID NO: 261829 - DNA, 15 bp, Homo sapiens
taatctggcaatatt

SEQ ID NO: 261830 - DNA, 15 bp, Homo sapiens
ataatctggcaatat

SEQ ID NO: 261831 - DNA, 15 bp, Homo sapiens
tataatctggcaata

SEQ ID NO: 261832 - DNA, 15 bp, Homo sapiens
ttataatctggcaat

SEQ ID NO: 261833 - DNA, 15 bp, Homo sapiens
attataatctggcaa

SEQ ID NO: 261834 - DNA, 15 bp, Homo sapiens
cattataatctggca

SEQ ID NO: 261835 - DNA, 15 bp, Homo sapiens
acattataatctggc

SEQ ID NO: 261836 - DNA, 15 bp, Homo sapiens
cacattataatctgg

SEQ ID NO: 261837 - DNA, 15 bp, Homo sapiens
gcacattataatctg

SEQ ID NO: 261838 - DNA, 15 bp, Homo sapiens
tgcacattataatct

SEQ ID NO: 261839 - DNA, 15 bp, Homo sapiens
ctgcacattataatc

SEQ ID NO: 261840 - DNA, 15 bp, Homo sapiens
tctgcacattataat

SEQ ID NO: 261841 - DNA, 15 bp, Homo sapiens
ctctgcacattataa

SEQ ID NO: 261842 - DNA, 15 bp, Homo sapiens
actctgcacattata

SEQ ID NO: 261843 - DNA, 15 bp, Homo sapiens
tactctgcacattat

SEQ ID NO: 261844 - DNA, 15 bp, Homo sapiens
atactctgcacatta

SEQ ID NO: 261845 - DNA, 15 bp, Homo sapiens
tatactctgcacatt

SEQ ID NO: 261846 - DNA, 15 bp, Homo sapiens
atatactctgcacat

SEQ ID NO: 261847 - DNA, 15 bp, Homo sapiens
catatactctgcaca

SEQ ID NO: 261848 - DNA, 15 bp, Homo sapiens
acatatactctgcac

SEQ ID NO: 261849 - DNA, 15 bp, Homo sapiens
tacatatactctgca

SEQ ID NO: 261850 - DNA, 15 bp, Homo sapiens
atacatatactctgc

SEQ ID NO: 261851 - DNA, 15 bp, Homo sapiens
aatacatatactctg

SEQ ID NO: 261852 - DNA, 15 bp, Homo sapiens
aaatacatatactct

SEQ ID NO: 261853 - DNA, 15 bp, Homo sapiens
aaaatacatatactc

SEQ ID NO: 261854 - DNA, 15 bp, Homo sapiens
taaaatacatatact

SEQ ID NO: 261855 - DNA, 15 bp, Homo sapiens
ataaaatacatatac

SEQ ID NO: 261856 - DNA, 15 bp, Homo sapiens
aataaaatacatata

SEQ ID NO: 261857 - DNA, 15 bp, Homo sapiens
taataaaatacatat

SEQ ID NO: 261858 - DNA, 15 bp, Homo sapiens
ttaataaaatacata

SEQ ID NO: 261859 - DNA, 15 bp, Homo sapiens
tttaataaaatacat

SEQ ID NO: 261860 - DNA, 15 bp, Homo sapiens
ctttaataaaataca

SEQ ID NO: 261861 - DNA, 15 bp, Homo sapiens
tctttaataaaatac

SEQ ID NO: 261862 - DNA, 15 bp, Homo sapiens
atctttaataaaata

SEQ ID NO: 261863 - DNA, 15 bp, Homo sapiens
catctttaataaaat

SEQ ID NO: 261864 - DNA, 15 bp, Homo sapiens
acatctttaataaaa

SEQ ID NO: 261865 - DNA, 15 bp, Homo sapiens
tacatctttaataaa

SEQ ID NO: 261866 - DNA, 15 bp, Homo sapiens
atacatctttaataa

SEQ ID NO: 261867 - DNA, 15 bp, Homo sapiens
aatacatctttaata

SEQ ID NO: 261868 - DNA, 15 bp, Homo sapiens
aaatacatctttaat

SEQ ID NO: 261869 - DNA, 15 bp, Homo sapiens
gaaatacatctttaa

SEQ ID NO: 261870 - DNA, 15 bp, Homo sapiens
tgaaatacatcttta

SEQ ID NO: 261871 - DNA, 15 bp, Homo sapiens
ttgaaatacatcttt

SEQ ID NO: 261872 - DNA, 15 bp, Homo sapiens
cttgaaatacatctt

SEQ ID NO: 261873 - DNA, 15 bp, Homo sapiens
acttgaaatacatct

SEQ ID NO: 261874 - DNA, 15 bp, Homo sapiens
cacttgaaatacatc

SEQ ID NO: 261875 - DNA, 15 bp, Homo sapiens
ccacttgaaatacat

SEQ ID NO: 261876 - DNA, 15 bp, Homo sapiens
gccacttgaaataca

SEQ ID NO: 261877 - DNA, 15 bp, Homo sapiens
ggccacttgaaatac

SEQ ID NO: 261878 - DNA, 15 bp, Homo sapiens
tggccacttgaaata

SEQ ID NO: 261879 - DNA, 15 bp, Homo sapiens
atggccacttgaaat

SEQ ID NO: 261880 - DNA, 15 bp, Homo sapiens
aatggccacttgaaa

SEQ ID NO: 261881 - DNA, 15 bp, Homo sapiens
taatggccacttgaa

SEQ ID NO: 261882 - DNA, 15 bp, Homo sapiens
ctaatggccacttga

SEQ ID NO: 261883 - DNA, 15 bp, Homo sapiens
tctaatggccacttg

SEQ ID NO: 261884 - DNA, 15 bp, Homo sapiens
gtctaatggccactt

SEQ ID NO: 261885 - DNA, 15 bp, Homo sapiens
agtctaatggccact

SEQ ID NO: 261886 - DNA, 15 bp, Homo sapiens
tagtctaatggccac

SEQ ID NO: 261887 - DNA, 15 bp, Homo sapiens
atagtctaatggcca

SEQ ID NO: 261888 - DNA, 15 bp, Homo sapiens
tatagtctaatggcc

SEQ ID NO: 261889 - DNA, 15 bp, Homo sapiens
ttatagtctaatggc

SEQ ID NO: 261890 - DNA, 15 bp, Homo sapiens
tttatagtctaatgg

SEQ ID NO: 261891 - DNA, 15 bp, Homo sapiens
ctttatagtctaatg

SEQ ID NO: 261892 - DNA, 15 bp, Homo sapiens
actttatagtctaat

SEQ ID NO: 261893 - DNA, 15 bp, Homo sapiens
cactttatagtctaa

SEQ ID NO: 261894 - DNA, 15 bp, Homo sapiens
acactttatagtcta

SEQ ID NO: 261895 - DNA, 15 bp, Homo sapiens
tacactttatagtct

SEQ ID NO: 261896 - DNA, 15 bp, Homo sapiens
ctacactttatagtc

SEQ ID NO: 261897 - DNA, 15 bp, Homo sapiens
actacactttatagt

SEQ ID NO: 261898 - DNA, 15 bp, Homo sapiens
aactacactttatag

SEQ ID NO: 261899 - DNA, 15 bp, Homo sapiens
caactacactttata

SEQ ID NO: 261900 - DNA, 15 bp, Homo sapiens
acaactacactttat

SEQ ID NO: 261901 - DNA, 15 bp, Homo sapiens
aacaactacacttta

SEQ ID NO: 261902 - DNA, 15 bp, Homo sapiens
aaacaactacacttt

SEQ ID NO: 261903 - DNA, 15 bp, Homo sapiens
taaacaactacactt

SEQ ID NO: 261904 - DNA, 15 bp, Homo sapiens
ttaaacaactacact

SEQ ID NO: 261905 - DNA, 15 bp, Homo sapiens
tttaaacaactacac

SEQ ID NO: 261906 - DNA, 15 bp, Homo sapiens
ttttaaacaactaca

SEQ ID NO: 261907 - DNA, 15 bp, Homo sapiens
tttttaaacaactac

SEQ ID NO: 261908 - DNA, 15 bp, Homo sapiens
atttttaaacaacta

SEQ ID NO: 261909 - DNA, 15 bp, Homo sapiens
tatttttaaacaact

SEQ ID NO: 261910 - DNA, 15 bp, Homo sapiens
ctatttttaaacaac

SEQ ID NO: 261911 - DNA, 15 bp, Homo sapiens
tctatttttaaacaa

SEQ ID NO: 261912 - DNA, 15 bp, Homo sapiens
atctatttttaaaca

SEQ ID NO: 261913 - DNA, 15 bp, Homo sapiens
aatctatttttaaac

SEQ ID NO: 261914 - DNA, 15 bp, Homo sapiens
aaatctatttttaaa

SEQ ID NO: 261915 - DNA, 15 bp, Homo sapiens
aaaatctatttttaa

SEQ ID NO: 261916 - DNA, 15 bp, Homo sapiens
aaaaatctattttta

SEQ ID NO: 261917 - DNA, 15 bp, Homo sapiens
aaaaaatctattttt

SEQ ID NO: 261918 - DNA, 15 bp, Homo sapiens
aaaaaaatctatttt

SEQ ID NO: 261919 - DNA, 15 bp, Homo sapiens
aaaaaaaatctattt

SEQ ID NO: 261920 - DNA, 15 bp, Homo sapiens
taaaaaaaatctatt

SEQ ID NO: 261921 - DNA, 15 bp, Homo sapiens
ataaaaaaaatctat

SEQ ID NO: 261922 - DNA, 15 bp, Homo sapiens
aataaaaaaaatcta

SEQ ID NO: 261923 - DNA, 15 bp, Homo sapiens
aaataaaaaaaatct

SEQ ID NO: 261924 - DNA, 15 bp, Homo sapiens
aaaataaaaaaaatc

SEQ ID NO: 261925 - DNA, 15 bp, Homo sapiens
caaaataaaaaaaat

SEQ ID NO: 261926 - DNA, 15 bp, Homo sapiens
ccaaaataaaaaaaa

SEQ ID NO: 261927 - DNA, 15 bp, Homo sapiens
tccaaaataaaaaaa

SEQ ID NO: 261928 - DNA, 15 bp, Homo sapiens
ctccaaaataaaaaa

SEQ ID NO: 261929 - DNA, 15 bp, Homo sapiens
actccaaaataaaaa

SEQ ID NO: 261930 - DNA, 15 bp, Homo sapiens
aactccaaaataaaa

SEQ ID NO: 261931 - DNA, 15 bp, Homo sapiens
taactccaaaataaa

SEQ ID NO: 261932 - DNA, 15 bp, Homo sapiens
gtaactccaaaataa

SEQ ID NO: 261933 - DNA, 15 bp, Homo sapiens
tgtaactccaaaata

SEQ ID NO: 261934 - DNA, 15 bp, Homo sapiens
atgtaactccaaaat

SEQ ID NO: 261935 - DNA, 15 bp, Homo sapiens
aatgtaactccaaaa

SEQ ID NO: 261936 - DNA, 15 bp, Homo sapiens
gaatgtaactccaaa

SEQ ID NO: 261937 - DNA, 15 bp, Homo sapiens
tgaatgtaactccaa

SEQ ID NO: 261938 - DNA, 15 bp, Homo sapiens
ttgaatgtaactcca

SEQ ID NO: 261939 - DNA, 15 bp, Homo sapiens
gttgaatgtaactcc

SEQ ID NO: 261940 - DNA, 15 bp, Homo sapiens
ggttgaatgtaactc

SEQ ID NO: 261941 - DNA, 15 bp, Homo sapiens
aggttgaatgtaact

SEQ ID NO: 261942 - DNA, 15 bp, Homo sapiens
gaggttgaatgtaac

SEQ ID NO: 261943 - DNA, 15 bp, Homo sapiens
tgaggttgaatgtaa

SEQ ID NO: 261944 - DNA, 15 bp, Homo sapiens
ctgaggttgaatgta

SEQ ID NO: 261945 - DNA, 15 bp, Homo sapiens
cctgaggttgaatgt

SEQ ID NO: 261946 - DNA, 15 bp, Homo sapiens
acctgaggttgaatg

SEQ ID NO: 261947 - DNA, 15 bp, Homo sapiens
cacctgaggttgaat

SEQ ID NO: 261948 - DNA, 15 bp, Homo sapiens
gcacctgaggttgaa

SEQ ID NO: 261949 - DNA, 15 bp, Homo sapiens
ggcacctgaggttga

SEQ ID NO: 261950 - DNA, 15 bp, Homo sapiens
tggcacctgaggttg

SEQ ID NO: 261951 - DNA, 15 bp, Homo sapiens
gtggcacctgaggtt

SEQ ID NO: 261952 - DNA, 15 bp, Homo sapiens
agtggcacctgaggt

SEQ ID NO: 261953 - DNA, 15 bp, Homo sapiens
aagtggcacctgagg

SEQ ID NO: 261954 - DNA, 15 bp, Homo sapiens
aaagtggcacctgag

SEQ ID NO: 261955 - DNA, 15 bp, Homo sapiens
gaaagtggcacctga

SEQ ID NO: 261956 - DNA, 15 bp, Homo sapiens
ggaaagtggcacctg

SEQ ID NO: 261957 - DNA, 15 bp, Homo sapiens
tggaaagtggcacct

SEQ ID NO: 261958 - DNA, 15 bp, Homo sapiens
gtggaaagtggcacc

SEQ ID NO: 261959 - DNA, 15 bp, Homo sapiens
tgtggaaagtggcac

SEQ ID NO: 261960 - DNA, 15 bp, Homo sapiens
atgtggaaagtggca

SEQ ID NO: 261961 - DNA, 15 bp, Homo sapiens
aatgtggaaagtggc

SEQ ID NO: 261962 - DNA, 15 bp, Homo sapiens
aaatgtggaaagtgg

SEQ ID NO: 261963 - DNA, 15 bp, Homo sapiens
aaaatgtggaaagtg

SEQ ID NO: 261964 - DNA, 15 bp, Homo sapiens
taaaatgtggaaagt

SEQ ID NO: 261965 - DNA, 15 bp, Homo sapiens
gtaaaatgtggaaag

SEQ ID NO: 261966 - DNA, 15 bp, Homo sapiens
tgtaaaatgtggaaa

SEQ ID NO: 261967 - DNA, 15 bp, Homo sapiens
ttgtaaaatgtggaa

SEQ ID NO: 261968 - DNA, 15 bp, Homo sapiens
attgtaaaatgtgga

SEQ ID NO: 261969 - DNA, 15 bp, Homo sapiens
tattgtaaaatgtgg

SEQ ID NO: 261970 - DNA, 15 bp, Homo sapiens
ttattgtaaaatgtg

SEQ ID NO: 261971 - DNA, 15 bp, Homo sapiens
tttattgtaaaatgt

SEQ ID NO: 261972 - DNA, 15 bp, Homo sapiens
ttttattgtaaaatg

SEQ ID NO: 261973 - DNA, 15 bp, Homo sapiens
tttttattgtaaaat

SEQ ID NO: 261974 - DNA, 15 bp, Homo sapiens
atttttattgtaaaa

SEQ ID NO: 261975 - DNA, 15 bp, Homo sapiens
tatttttattgtaaa

SEQ ID NO: 261976 - DNA, 15 bp, Homo sapiens
ttatttttattgtaa

SEQ ID NO: 261977 - DNA, 15 bp, Homo sapiens
attatttttattgta

SEQ ID NO: 261978 - DNA, 15 bp, Homo sapiens
cattatttttattgt

SEQ ID NO: 261979 - DNA, 15 bp, Homo sapiens
ccattatttttattg

SEQ ID NO: 261980 - DNA, 15 bp, Homo sapiens
accattatttttatt

SEQ ID NO: 261981 - DNA, 15 bp, Homo sapiens
aaccattatttttat

SEQ ID NO: 261982 - DNA, 15 bp, Homo sapiens
caaccattattttta

SEQ ID NO: 261983 - DNA, 15 bp, Homo sapiens
tcaaccattattttt

SEQ ID NO: 261984 - DNA, 15 bp, Homo sapiens
atcaaccattatttt

SEQ ID NO: 261985 - DNA, 15 bp, Homo sapiens
aatcaaccattattt

SEQ ID NO: 261986 - DNA, 15 bp, Homo sapiens
aaatcaaccattatt

SEQ ID NO: 261987 - DNA, 15 bp, Homo sapiens
taaatcaaccattat

SEQ ID NO: 261988 - DNA, 15 bp, Homo sapiens
gtaaatcaaccatta

SEQ ID NO: 261989 - DNA, 15 bp, Homo sapiens
agtaaatcaaccatt

SEQ ID NO: 261990 - DNA, 15 bp, Homo sapiens
aagtaaatcaaccat

SEQ ID NO: 261991 - DNA, 15 bp, Homo sapiens
taagtaaatcaacca

SEQ ID NO: 261992 - DNA, 15 bp, Homo sapiens
ttaagtaaatcaacc

SEQ ID NO: 261993 - DNA, 15 bp, Homo sapiens
gttaagtaaatcaac

SEQ ID NO: 261994 - DNA, 15 bp, Homo sapiens
tgttaagtaaatcaa

SEQ ID NO: 261995 - DNA, 15 bp, Homo sapiens
ttgttaagtaaatca

SEQ ID NO: 261996 - DNA, 15 bp, Homo sapiens
tttgttaagtaaatc

SEQ ID NO: 261997 - DNA, 15 bp, Homo sapiens
atttgttaagtaaat

SEQ ID NO: 261998 - DNA, 15 bp, Homo sapiens
catttgttaagtaaa

SEQ ID NO: 261999 - DNA, 15 bp, Homo sapiens
tcatttgttaagtaa

SEQ ID NO: 262000 - DNA, 15 bp, Homo sapiens
ctcatttgttaagta

SEQ ID NO: 262001 - DNA, 15 bp, Homo sapiens
tctcatttgttaagt

SEQ ID NO: 262002 - DNA, 15 bp, Homo sapiens
ttctcatttgttaag

SEQ ID NO: 262003 - DNA, 15 bp, Homo sapiens
attctcatttgttaa

SEQ ID NO: 262004 - DNA, 15 bp, Homo sapiens
tattctcatttgtta

SEQ ID NO: 262005 - DNA, 15 bp, Homo sapiens
ttattctcatttgtt

SEQ ID NO: 262006 - DNA, 15 bp, Homo sapiens
tttattctcatttgt

SEQ ID NO: 262007 - DNA, 15 bp, Homo sapiens
atttattctcatttg

SEQ ID NO: 262008 - DNA, 15 bp, Homo sapiens
tatttattctcattt

SEQ ID NO: 262009 - DNA, 15 bp, Homo sapiens
ttatttattctcatt

SEQ ID NO: 262010 - DNA, 15 bp, Homo sapiens
tttatttattctcat

SEQ ID NO: 262011 - DNA, 15 bp, Homo sapiens
ttttatttattctca

SEQ ID NO: 262012 - DNA, 15 bp, Homo sapiens
gttttatttattctc

SEQ ID NO: 262013 - DNA, 15 bp, Homo sapiens
tgttttatttattct

SEQ ID NO: 262014 - DNA, 15 bp, Homo sapiens
atgttttatttattc

SEQ ID NO: 262015 - DNA, 15 bp, Homo sapiens
aatgttttatttatt

SEQ ID NO: 262016 - DNA, 15 bp, Homo sapiens
aaatgttttatttat

SEQ ID NO: 262017 - DNA, 15 bp, Homo sapiens
aaaatgttttattta

SEQ ID NO: 262018 - DNA, 15 bp, Homo sapiens
aaaaatgttttattt

SEQ ID NO: 262019 - DNA, 15 bp, Homo sapiens
aaaaaatgttttatt

SEQ ID NO: 262020 - DNA, 15 bp, Homo sapiens
aaaaaaatgttttat

SEQ ID NO: 262021 - DNA, 15 bp, Homo sapiens
gaaaaaaatgtttta

SEQ ID NO: 262022 - DNA, 15 bp, Homo sapiens
agaaaaaaatgtttt

SEQ ID NO: 262023 - DNA, 15 bp, Homo sapiens
aagaaaaaaatgttt

SEQ ID NO: 262024 - DNA, 15 bp, Homo sapiens
aaagaaaaaaatgtt

SEQ ID NO: 262025 - DNA, 15 bp, Homo sapiens
caaagaaaaaaatgt

SEQ ID NO: 262026 - DNA, 15 bp, Homo sapiens
tcaaagaaaaaaatg

SEQ ID NO: 262027 - DNA, 15 bp, Homo sapiens
ttcaaagaaaaaaat

SEQ ID NO: 262028 - DNA, 15 bp, Homo sapiens
tttcaaagaaaaaaa

SEQ ID NO: 262029 - DNA, 15 bp, Homo sapiens
ttttcaaagaaaaaa

SEQ ID NO: 262030 - DNA, 15 bp, Homo sapiens
attttcaaagaaaaa

SEQ ID NO: 262031 - DNA, 15 bp, Homo sapiens
aattttcaaagaaaa

SEQ ID NO: 262032 - DNA, 15 bp, Homo sapiens
aaattttcaaagaaa

SEQ ID NO: 262033 - DNA, 15 bp, Homo sapiens
gaaattttcaaagaa

SEQ ID NO: 262034 - DNA, 15 bp, Homo sapiens
tgaaattttcaaaga

SEQ ID NO: 262035 - DNA, 15 bp, Homo sapiens
ctgaaattttcaaag

SEQ ID NO: 262036 - DNA, 15 bp, Homo sapiens
gctgaaattttcaaa

SEQ ID NO: 262037 - DNA, 15 bp, Homo sapiens
ggctgaaattttcaa

SEQ ID NO: 262038 - DNA, 15 bp, Homo sapiens
tggctgaaattttca

SEQ ID NO: 262039 - DNA, 15 bp, Homo sapiens
ctggctgaaattttc

SEQ ID NO: 262040 - DNA, 15 bp, Homo sapiens
tctggctgaaatttt

SEQ ID NO: 262041 - DNA, 15 bp, Homo sapiens
atctggctgaaattt

SEQ ID NO: 262042 - DNA, 15 bp, Homo sapiens
gatctggctgaaatt

SEQ ID NO: 262043 - DNA, 15 bp, Homo sapiens
tgatctggctgaaat

SEQ ID NO: 262044 - DNA, 15 bp, Homo sapiens
gtgatctggctgaaa

SEQ ID NO: 262045 - DNA, 15 bp, Homo sapiens
tgtgatctggctgaa

SEQ ID NO: 262046 - DNA, 15 bp, Homo sapiens
atgtgatctggctga

SEQ ID NO: 262047 - DNA, 15 bp, Homo sapiens
aatgtgatctggctg

SEQ ID NO: 262048 - DNA, 15 bp, Homo sapiens
aaatgtgatctggct

SEQ ID NO: 262049 - DNA, 15 bp, Homo sapiens
caaatgtgatctggc

SEQ ID NO: 262050 - DNA, 15 bp, Homo sapiens
tcaaatgtgatctgg

SEQ ID NO: 262051 - DNA, 15 bp, Homo sapiens
atcaaatgtgatctg

SEQ ID NO: 262052 - DNA, 15 bp, Homo sapiens
aatcaaatgtgatct

SEQ ID NO: 262053 - DNA, 15 bp, Homo sapiens
caatcaaatgtgatc

SEQ ID NO: 262054 - DNA, 15 bp, Homo sapiens
tcaatcaaatgtgat

SEQ ID NO: 262055 - DNA, 15 bp, Homo sapiens
gtcaatcaaatgtga

SEQ ID NO: 262056 - DNA, 15 bp, Homo sapiens
tgtcaatcaaatgtg

SEQ ID NO: 262057 - DNA, 15 bp, Homo sapiens
ctgtcaatcaaatgt

SEQ ID NO: 262058 - DNA, 15 bp, Homo sapiens
actgtcaatcaaatg

SEQ ID NO: 262059 - DNA, 15 bp, Homo sapiens
gactgtcaatcaaat

SEQ ID NO: 262060 - DNA, 15 bp, Homo sapiens
ggactgtcaatcaaa

SEQ ID NO: 262061 - DNA, 15 bp, Homo sapiens
tggactgtcaatcaa

SEQ ID NO: 262062 - DNA, 15 bp, Homo sapiens
gtggactgtcaatca

SEQ ID NO: 262063 - DNA, 15 bp, Homo sapiens
ggtggactgtcaatc

SEQ ID NO: 262064 - DNA, 15 bp, Homo sapiens
tggtggactgtcaat

SEQ ID NO: 262065 - DNA, 15 bp, Homo sapiens
ttggtggactgtcaa

SEQ ID NO: 262066 - DNA, 15 bp, Homo sapiens
gttggtggactgtca

SEQ ID NO: 262067 - DNA, 15 bp, Homo sapiens
agttggtggactgtc

SEQ ID NO: 262068 - DNA, 15 bp, Homo sapiens
aagttggtggactgt

SEQ ID NO: 262069 - DNA, 15 bp, Homo sapiens
taagttggtggactg

SEQ ID NO: 262070 - DNA, 15 bp, Homo sapiens
gtaagttggtggact

SEQ ID NO: 262071 - DNA, 15 bp, Homo sapiens
tgtaagttggtggac

SEQ ID NO: 262072 - DNA, 15 bp, Homo sapiens
ttgtaagttggtgga

SEQ ID NO: 262073 - DNA, 15 bp, Homo sapiens
attgtaagttggtgg

SEQ ID NO: 262074 - DNA, 15 bp, Homo sapiens
cattgtaagttggtg

SEQ ID NO: 262075 - DNA, 15 bp, Homo sapiens
gcattgtaagttggt

SEQ ID NO: 262076 - DNA, 15 bp, Homo sapiens
agcattgtaagttgg

SEQ ID NO: 262077 - DNA, 15 bp, Homo sapiens
cagcattgtaagttg

SEQ ID NO: 262078 - DNA, 15 bp, Homo sapiens
tcagcattgtaagtt

SEQ ID NO: 262079 - DNA, 15 bp, Homo sapiens
gtcagcattgtaagt

SEQ ID NO: 262080 - DNA, 15 bp, Homo sapiens
agtcagcattgtaag

SEQ ID NO: 262081 - DNA, 15 bp, Homo sapiens
tagtcagcattgtaa

SEQ ID NO: 262082 - DNA, 15 bp, Homo sapiens
atagtcagcattgta

SEQ ID NO: 262083 - DNA, 15 bp, Homo sapiens
catagtcagcattgt

SEQ ID NO: 262084 - DNA, 15 bp, Homo sapiens
ccatagtcagcattg

SEQ ID NO: 262085 - DNA, 15 bp, Homo sapiens
gccatagtcagcatt

SEQ ID NO: 262086 - DNA, 15 bp, Homo sapiens
agccatagtcagcat

SEQ ID NO: 262087 - DNA, 15 bp, Homo sapiens
tagccatagtcagca

SEQ ID NO: 262088 - DNA, 15 bp, Homo sapiens
gtagccatagtcagc

SEQ ID NO: 262089 - DNA, 15 bp, Homo sapiens
tgtagccatagtcag

SEQ ID NO: 262090 - DNA, 15 bp, Homo sapiens
ttgtagccatagtca

SEQ ID NO: 262091 - DNA, 15 bp, Homo sapiens
tttgtagccatagtc

SEQ ID NO: 262092 - DNA, 15 bp, Homo sapiens
ttttgtagccatagt

SEQ ID NO: 262093 - DNA, 15 bp, Homo sapiens
cttttgtagccatag

SEQ ID NO: 262094 - DNA, 15 bp, Homo sapiens
gcttttgtagccata

SEQ ID NO: 262095 - DNA, 15 bp, Homo sapiens
agcttttgtagccat

SEQ ID NO: 262096 - DNA, 15 bp, Homo sapiens
cagcttttgtagcca

SEQ ID NO: 262097 - DNA, 15 bp, Homo sapiens
ccagcttttgtagcc

SEQ ID NO: 262098 - DNA, 15 bp, Homo sapiens
cccagcttttgtagc

SEQ ID NO: 262099 - DNA, 15 bp, Homo sapiens
tcccagcttttgtag

SEQ ID NO: 262100 - DNA, 15 bp, Homo sapiens
ttcccagcttttgta

SEQ ID NO: 262101 - DNA, 15 bp, Homo sapiens
cttcccagcttttgt

SEQ ID NO: 262102 - DNA, 15 bp, Homo sapiens
gcttcccagcttttg

SEQ ID NO: 262103 - DNA, 15 bp, Homo sapiens
ggcttcccagctttt

SEQ ID NO: 262104 - DNA, 15 bp, Homo sapiens
aggcttcccagcttt

SEQ ID NO: 262105 - DNA, 15 bp, Homo sapiens
aaggcttcccagctt

SEQ ID NO: 262106 - DNA, 15 bp, Homo sapiens
gaaggcttcccagct

SEQ ID NO: 262107 - DNA, 15 bp, Homo sapiens
agaaggcttcccagc

SEQ ID NO: 262108 - DNA, 15 bp, Homo sapiens
gagaaggcttcccag

SEQ ID NO: 262109 - DNA, 15 bp, Homo sapiens
agagaaggcttccca

SEQ ID NO: 262110 - DNA, 15 bp, Homo sapiens
tagagaaggcttccc

SEQ ID NO: 262111 - DNA, 15 bp, Homo sapiens
ttagagaaggcttcc

SEQ ID NO: 262112 - DNA, 15 bp, Homo sapiens
gttagagaaggcttc

SEQ ID NO: 262113 - DNA, 15 bp, Homo sapiens
ggttagagaaggctt

SEQ ID NO: 262114 - DNA, 15 bp, Homo sapiens
aggttagagaaggct

SEQ ID NO: 262115 - DNA, 15 bp, Homo sapiens
gaggttagagaaggc

SEQ ID NO: 262116 - DNA, 15 bp, Homo sapiens
agaggttagagaagg

SEQ ID NO: 262117 - DNA, 15 bp, Homo sapiens
gagaggttagagaag

SEQ ID NO: 262118 - DNA, 15 bp, Homo sapiens
ggagaggttagagaa

SEQ ID NO: 262119 - DNA, 15 bp, Homo sapiens
aggagaggttagaga

SEQ ID NO: 262120 - DNA, 15 bp, Homo sapiens
taggagaggttagag

SEQ ID NO: 262121 - DNA, 15 bp, Homo sapiens
ataggagaggttaga

SEQ ID NO: 262122 - DNA, 15 bp, Homo sapiens
aataggagaggttag

SEQ ID NO: 262123 - DNA, 15 bp, Homo sapiens
taataggagaggtta

SEQ ID NO: 262124 - DNA, 15 bp, Homo sapiens
ataataggagaggtt

SEQ ID NO: 262125 - DNA, 15 bp, Homo sapiens
tataataggagaggt

SEQ ID NO: 262126 - DNA, 15 bp, Homo sapiens
gtataataggagagg

SEQ ID NO: 262127 - DNA, 15 bp, Homo sapiens
agtataataggagag

SEQ ID NO: 262128 - DNA, 15 bp, Homo sapiens
tagtataataggaga

SEQ ID NO: 262129 - DNA, 15 bp, Homo sapiens
ctagtataataggag

SEQ ID NO: 262130 - DNA, 15 bp, Homo sapiens
tctagtataatagga

SEQ ID NO: 262131 - DNA, 15 bp, Homo sapiens
ctctagtataatagg

SEQ ID NO: 262132 - DNA, 15 bp, Homo sapiens
gctctagtataatag

SEQ ID NO: 262133 - DNA, 15 bp, Homo sapiens
ggctctagtataata

SEQ ID NO: 262134 - DNA, 15 bp, Homo sapiens
gggctctagtataat

SEQ ID NO: 262135 - DNA, 15 bp, Homo sapiens
agggctctagtataa

SEQ ID NO: 262136 - DNA, 15 bp, Homo sapiens
aagggctctagtata

SEQ ID NO: 262137 - DNA, 15 bp, Homo sapiens
gaagggctctagtat

SEQ ID NO: 262138 - DNA, 15 bp, Homo sapiens
ggaagggctctagta

SEQ ID NO: 262139 - DNA, 15 bp, Homo sapiens
aggaagggctctagt

SEQ ID NO: 262140 - DNA, 15 bp, Homo sapiens
gaggaagggctctag

SEQ ID NO: 262141 - DNA, 15 bp, Homo sapiens
ggaggaagggctcta

SEQ ID NO: 262142 - DNA, 15 bp, Homo sapiens
aggaggaagggctct

SEQ ID NO: 262143 - DNA, 15 bp, Homo sapiens
caggaggaagggctc

SEQ ID NO: 262144 - DNA, 15 bp, Homo sapiens
acaggaggaagggct

SEQ ID NO: 262145 - DNA, 15 bp, Homo sapiens
cacaggaggaagggc

SEQ ID NO: 262146 - DNA, 15 bp, Homo sapiens
gcacaggaggaaggg

SEQ ID NO: 262147 - DNA, 15 bp, Homo sapiens
ggcacaggaggaagg

SEQ ID NO: 262148 - DNA, 15 bp, Homo sapiens
aggcacaggaggaag

SEQ ID NO: 262149 - DNA, 15 bp, Homo sapiens
caggcacaggaggaa

SEQ ID NO: 262150 - DNA, 15 bp, Homo sapiens
tcaggcacaggagga

SEQ ID NO: 262151 - DNA, 15 bp, Homo sapiens
atcaggcacaggagg

SEQ ID NO: 262152 - DNA, 15 bp, Homo sapiens
catcaggcacaggag

SEQ ID NO: 262153 - DNA, 15 bp, Homo sapiens
tcatcaggcacagga

SEQ ID NO: 262154 - DNA, 15 bp, Homo sapiens
atcatcaggcacagg

SEQ ID NO: 262155 - DNA, 15 bp, Homo sapiens
aatcatcaggcacag

SEQ ID NO: 262156 - DNA, 15 bp, Homo sapiens
caatcatcaggcaca

SEQ ID NO: 262157 - DNA, 15 bp, Homo sapiens
gcaatcatcaggcac

SEQ ID NO: 262158 - DNA, 15 bp, Homo sapiens
ggcaatcatcaggca

SEQ ID NO: 262159 - DNA, 15 bp, Homo sapiens
gggcaatcatcaggc

SEQ ID NO: 262160 - DNA, 15 bp, Homo sapiens
cgggcaatcatcagg

SEQ ID NO: 262161 - DNA, 15 bp, Homo sapiens
tcgggcaatcatcag

SEQ ID NO: 262162 - DNA, 15 bp, Homo sapiens
gtcgggcaatcatca

SEQ ID NO: 262163 - DNA, 15 bp, Homo sapiens
agtcgggcaatcatc

SEQ ID NO: 262164 - DNA, 15 bp, Homo sapiens
gagtcgggcaatcat

SEQ ID NO: 262165 - DNA, 15 bp, Homo sapiens
ggagtcgggcaatca

SEQ ID NO: 262166 - DNA, 15 bp, Homo sapiens
gggagtcgggcaatc

SEQ ID NO: 262167 - DNA, 15 bp, Homo sapiens
agggagtcgggcaat

SEQ ID NO: 262168 - DNA, 15 bp, Homo sapiens
aagggagtcgggcaa

SEQ ID NO: 262169 - DNA, 15 bp, Homo sapiens
caagggagtcgggca

SEQ ID NO: 262170 - DNA, 15 bp, Homo sapiens
ccaagggagtcgggc

SEQ ID NO: 262171 - DNA, 15 bp, Homo sapiens
cccaagggagtcggg

SEQ ID NO: 262172 - DNA, 15 bp, Homo sapiens
acccaagggagtcgg

SEQ ID NO: 262173 - DNA, 15 bp, Homo sapiens
cacccaagggagtcg

SEQ ID NO: 262174 - DNA, 15 bp, Homo sapiens
acacccaagggagtc

SEQ ID NO: 262175 - DNA, 15 bp, Homo sapiens
gacacccaagggagt

SEQ ID NO: 262176 - DNA, 15 bp, Homo sapiens
tgacacccaagggag

SEQ ID NO: 262177 - DNA, 15 bp, Homo sapiens
ttgacacccaaggga

SEQ ID NO: 262178 - DNA, 15 bp, Homo sapiens
tttgacacccaaggg

SEQ ID NO: 262179 - DNA, 15 bp, Homo sapiens
ctttgacacccaagg

SEQ ID NO: 262180 - DNA, 15 bp, Homo sapiens
cctttgacacccaag

SEQ ID NO: 262181 - DNA, 15 bp, Homo sapiens
acctttgacacccaa

SEQ ID NO: 262182 - DNA, 15 bp, Homo sapiens
cacctttgacaccca

SEQ ID NO: 262183 - DNA, 15 bp, Homo sapiens
tcacctttgacaccc

SEQ ID NO: 262184 - DNA, 15 bp, Homo sapiens
ctcacctttgacacc

SEQ ID NO: 262185 - DNA, 15 bp, Homo sapiens
actcacctttgacac

SEQ ID NO: 262186 - DNA, 15 bp, Homo sapiens
tactcacctttgaca

SEQ ID NO: 262187 - DNA, 15 bp, Homo sapiens
ttactcacctttgac

SEQ ID NO: 262188 - DNA, 15 bp, Homo sapiens
cttactcacctttga

SEQ ID NO: 262189 - DNA, 15 bp, Homo sapiens
tcttactcacctttg

SEQ ID NO: 262190 - DNA, 15 bp, Homo sapiens
ttcttactcaccttt

SEQ ID NO: 262191 - DNA, 15 bp, Homo sapiens
cttcttactcacctt

SEQ ID NO: 262192 - DNA, 15 bp, Homo sapiens
tcttcttactcacct

SEQ ID NO: 262193 - DNA, 15 bp, Homo sapiens
ttcttcttactcacc

SEQ ID NO: 262194 - DNA, 15 bp, Homo sapiens
attcttcttactcac

SEQ ID NO: 262195 - DNA, 15 bp, Homo sapiens
gattcttcttactca

SEQ ID NO: 262196 - DNA, 15 bp, Homo sapiens
ggattcttcttactc

SEQ ID NO: 262197 - DNA, 15 bp, Homo sapiens
tggattcttcttact

SEQ ID NO: 262198 - DNA, 15 bp, Homo sapiens
atggattcttcttac

SEQ ID NO: 262199 - DNA, 15 bp, Homo sapiens
aatggattcttctta

SEQ ID NO: 262200 - DNA, 15 bp, Homo sapiens
taatggattcttctt

SEQ ID NO: 262201 - DNA, 15 bp, Homo sapiens
ctaatggattcttct

SEQ ID NO: 262202 - DNA, 15 bp, Homo sapiens
tctaatggattcttc

SEQ ID NO: 262203 - DNA, 15 bp, Homo sapiens
ctctaatggattctt

SEQ ID NO: 262204 - DNA, 15 bp, Homo sapiens
tctctaatggattct

SEQ ID NO: 262205 - DNA, 15 bp, Homo sapiens
atctctaatggattc

SEQ ID NO: 262206 - DNA, 15 bp, Homo sapiens
catctctaatggatt

SEQ ID NO: 262207 - DNA, 15 bp, Homo sapiens
acatctctaatggat

SEQ ID NO: 262208 - DNA, 15 bp, Homo sapiens
tacatctctaatgga

SEQ ID NO: 262209 - DNA, 15 bp, Homo sapiens
atacatctctaatgg

SEQ ID NO: 262210 - DNA, 15 bp, Homo sapiens
aatacatctctaatg

SEQ ID NO: 262211 - DNA, 15 bp, Homo sapiens
taatacatctctaat

SEQ ID NO: 262212 - DNA, 15 bp, Homo sapiens
ttaatacatctctaa

SEQ ID NO: 262213 - DNA, 15 bp, Homo sapiens
gttaatacatctcta

SEQ ID NO: 262214 - DNA, 15 bp, Homo sapiens
agttaatacatctct

SEQ ID NO: 262215 - DNA, 15 bp, Homo sapiens
tagttaatacatctc

SEQ ID NO: 262216 - DNA, 15 bp, Homo sapiens
atagttaatacatct

SEQ ID NO: 262217 - DNA, 15 bp, Homo sapiens
tatagttaatacatc

SEQ ID NO: 262218 - DNA, 15 bp, Homo sapiens
ttatagttaatacat

SEQ ID NO: 262219 - DNA, 15 bp, Homo sapiens
cttatagttaataca

SEQ ID NO: 262220 - DNA, 15 bp, Homo sapiens
tcttatagttaatac

SEQ ID NO: 262221 - DNA, 15 bp, Homo sapiens
gtcttatagttaata

SEQ ID NO: 262222 - DNA, 15 bp, Homo sapiens
cgtcttatagttaat

SEQ ID NO: 262223 - DNA, 15 bp, Homo sapiens
ccgtcttatagttaa

SEQ ID NO: 262224 - DNA, 15 bp, Homo sapiens
cccgtcttatagtta

SEQ ID NO: 262225 - DNA, 15 bp, Homo sapiens
gcccgtcttatagtt

SEQ ID NO: 262226 - DNA, 15 bp, Homo sapiens
agcccgtcttatagt

SEQ ID NO: 262227 - DNA, 15 bp, Homo sapiens
cagcccgtcttatag

SEQ ID NO: 262228 - DNA, 15 bp, Homo sapiens
gcagcccgtcttata

SEQ ID NO: 262229 - DNA, 15 bp, Homo sapiens
tgcagcccgtcttat

SEQ ID NO: 262230 - DNA, 15 bp, Homo sapiens
atgcagcccgtctta

SEQ ID NO: 262231 - DNA, 15 bp, Homo sapiens
aatgcagcccgtctt

SEQ ID NO: 262232 - DNA, 15 bp, Homo sapiens
caatgcagcccgtct

SEQ ID NO: 262233 - DNA, 15 bp, Homo sapiens
gcaatgcagcccgtc

SEQ ID NO: 262234 - DNA, 15 bp, Homo sapiens
agcaatgcagcccgt

SEQ ID NO: 262235 - DNA, 15 bp, Homo sapiens
cagcaatgcagcccg

SEQ ID NO: 262236 - DNA, 15 bp, Homo sapiens
gcagcaatgcagccc

SEQ ID NO: 262237 - DNA, 15 bp, Homo sapiens
ggcagcaatgcagcc

SEQ ID NO: 262238 - DNA, 15 bp, Homo sapiens
tggcagcaatgcagc

SEQ ID NO: 262239 - DNA, 15 bp, Homo sapiens
ttggcagcaatgcag

SEQ ID NO: 262240 - DNA, 15 bp, Homo sapiens
tttggcagcaatgca

SEQ ID NO: 262241 - DNA, 15 bp, Homo sapiens
ttttggcagcaatgc

SEQ ID NO: 262242 - DNA, 15 bp, Homo sapiens
tttttggcagcaatg

SEQ ID NO: 262243 - DNA, 15 bp, Homo sapiens
ttttttggcagcaat

SEQ ID NO: 262244 - DNA, 15 bp, Homo sapiens
tttttttggcagcaa

SEQ ID NO: 262245 - DNA, 15 bp, Homo sapiens
ttttttttggcagca

SEQ ID NO: 262246 - DNA, 15 bp, Homo sapiens
tttttttttggcagc

SEQ ID NO: 262247 - DNA, 15 bp, Homo sapiens
ttttttttttggcag

SEQ ID NO: 262248 - DNA, 15 bp, Homo sapiens
tttttttttttggca

SEQ ID NO: 262249 - DNA, 15 bp, Homo sapiens
atttttttttttggc

SEQ ID NO: 262250 - DNA, 15 bp, Homo sapiens
aatttttttttttgg

SEQ ID NO: 262251 - DNA, 15 bp, Homo sapiens
caatttttttttttg

SEQ ID NO: 262252 - DNA, 15 bp, Homo sapiens
tcaattttttttttt

SEQ ID NO: 262253 - DNA, 15 bp, Homo sapiens
gtcaatttttttttt

SEQ ID NO: 262254 - DNA, 15 bp, Homo sapiens
ggtcaattttttttt

SEQ ID NO: 262255 - DNA, 15 bp, Homo sapiens
aggtcaatttttttt

SEQ ID NO: 262256 - DNA, 15 bp, Homo sapiens
aaggtcaattttttt

SEQ ID NO: 262257 - DNA, 15 bp, Homo sapiens
taaggtcaatttttt

SEQ ID NO: 262258 - DNA, 15 bp, Homo sapiens
ctaaggtcaattttt

SEQ ID NO: 262259 - DNA, 15 bp, Homo sapiens
tctaaggtcaatttt

SEQ ID NO: 262260 - DNA, 15 bp, Homo sapiens
gtctaaggtcaattt

SEQ ID NO: 262261 - DNA, 15 bp, Homo sapiens
agtctaaggtcaatt

SEQ ID NO: 262262 - DNA, 15 bp, Homo sapiens
tagtctaaggtcaat

SEQ ID NO: 262263 - DNA, 15 bp, Homo sapiens
gtagtctaaggtcaa

SEQ ID NO: 262264 - DNA, 15 bp, Homo sapiens
ggtagtctaaggtca

SEQ ID NO: 262265 - DNA, 15 bp, Homo sapiens
tggtagtctaaggtc

SEQ ID NO: 262266 - DNA, 15 bp, Homo sapiens
atggtagtctaaggt

SEQ ID NO: 262267 - DNA, 15 bp, Homo sapiens
aatggtagtctaagg

SEQ ID NO: 262268 - DNA, 15 bp, Homo sapiens
aaatggtagtctaag

SEQ ID NO: 262269 - DNA, 15 bp, Homo sapiens
taaatggtagtctaa

SEQ ID NO: 262270 - DNA, 15 bp, Homo sapiens
ataaatggtagtcta

SEQ ID NO: 262271 - DNA, 15 bp, Homo sapiens
aataaatggtagtct

SEQ ID NO: 262272 - DNA, 15 bp, Homo sapiens
aaataaatggtagtc

SEQ ID NO: 262273 - DNA, 15 bp, Homo sapiens
taaataaatggtagt

SEQ ID NO: 262274 - DNA, 15 bp, Homo sapiens
ataaataaatggtag

SEQ ID NO: 262275 - DNA, 15 bp, Homo sapiens
aataaataaatggta

SEQ ID NO: 262276 - DNA, 15 bp, Homo sapiens
taataaataaatggt

SEQ ID NO: 262277 - DNA, 15 bp, Homo sapiens
ttaataaataaatgg

SEQ ID NO: 262278 - DNA, 15 bp, Homo sapiens
gttaataaataaatg

SEQ ID NO: 262279 - DNA, 15 bp, Homo sapiens
tgttaataaataaat

SEQ ID NO: 262280 - DNA, 15 bp, Homo sapiens
ttgttaataaataaa

SEQ ID NO: 262281 - DNA, 15 bp, Homo sapiens
tttgttaataaataa

SEQ ID NO: 262282 - DNA, 15 bp, Homo sapiens
ttttgttaataaata

SEQ ID NO: 262283 - DNA, 15 bp, Homo sapiens
cttttgttaataaat

SEQ ID NO: 262284 - DNA, 15 bp, Homo sapiens
gcttttgttaataaa

SEQ ID NO: 262285 - DNA, 15 bp, Homo sapiens
tgcttttgttaataa

SEQ ID NO: 262286 - DNA, 15 bp, Homo sapiens
ctgcttttgttaata

SEQ ID NO: 262287 - DNA, 15 bp, Homo sapiens
actgcttttgttaat

SEQ ID NO: 262288 - DNA, 15 bp, Homo sapiens
aactgcttttgttaa

SEQ ID NO: 262289 - DNA, 15 bp, Homo sapiens
aaactgcttttgtta

SEQ ID NO: 262290 - DNA, 15 bp, Homo sapiens
aaaactgcttttgtt

SEQ ID NO: 262291 - DNA, 15 bp, Homo sapiens
aaaaactgcttttgt

SEQ ID NO: 262292 - DNA, 15 bp, Homo sapiens
taaaaactgcttttg

SEQ ID NO: 262293 - DNA, 15 bp, Homo sapiens
gtaaaaactgctttt

SEQ ID NO: 262294 - DNA, 15 bp, Homo sapiens
agtaaaaactgcttt

SEQ ID NO: 262295 - DNA, 15 bp, Homo sapiens
aagtaaaaactgctt

SEQ ID NO: 262296 - DNA, 15 bp, Homo sapiens
aaagtaaaaactgct

SEQ ID NO: 262297 - DNA, 15 bp, Homo sapiens
aaaagtaaaaactgc

SEQ ID NO: 262298 - DNA, 15 bp, Homo sapiens
taaaagtaaaaactg

SEQ ID NO: 262299 - DNA, 15 bp, Homo sapiens
ctaaaagtaaaaact

SEQ ID NO: 262300 - DNA, 15 bp, Homo sapiens
gctaaaagtaaaaac

SEQ ID NO: 262301 - DNA, 15 bp, Homo sapiens
tgctaaaagtaaaaa

SEQ ID NO: 262302 - DNA, 15 bp, Homo sapiens
atgctaaaagtaaaa

SEQ ID NO: 262303 - DNA, 15 bp, Homo sapiens
catgctaaaagtaaa

SEQ ID NO: 262304 - DNA, 15 bp, Homo sapiens
ccatgctaaaagtaa

SEQ ID NO: 262305 - DNA, 15 bp, Homo sapiens
accatgctaaaagta

SEQ ID NO: 262306 - DNA, 15 bp, Homo sapiens
aaccatgctaaaagt

SEQ ID NO: 262307 - DNA, 15 bp, Homo sapiens
taaccatgctaaaag

SEQ ID NO: 262308 - DNA, 15 bp, Homo sapiens
ataaccatgctaaaa

SEQ ID NO: 262309 - DNA, 15 bp, Homo sapiens
gataaccatgctaaa

SEQ ID NO: 262310 - DNA, 15 bp, Homo sapiens
agataaccatgctaa

SEQ ID NO: 262311 - DNA, 15 bp, Homo sapiens
tagataaccatgcta

SEQ ID NO: 262312 - DNA, 15 bp, Homo sapiens
atagataaccatgct

SEQ ID NO: 262313 - DNA, 15 bp, Homo sapiens
catagataaccatgc

SEQ ID NO: 262314 - DNA, 15 bp, Homo sapiens
ccatagataaccatg

SEQ ID NO: 262315 - DNA, 15 bp, Homo sapiens
cccatagataaccat

SEQ ID NO: 262316 - DNA, 15 bp, Homo sapiens
acccatagataacca

SEQ ID NO: 262317 - DNA, 15 bp, Homo sapiens
tacccatagataacc

SEQ ID NO: 262318 - DNA, 15 bp, Homo sapiens
atacccatagataac

SEQ ID NO: 262319 - DNA, 15 bp, Homo sapiens
aatacccatagataa

SEQ ID NO: 262320 - DNA, 15 bp, Homo sapiens
aaatacccatagata

SEQ ID NO: 262321 - DNA, 15 bp, Homo sapiens
aaaatacccatagat

SEQ ID NO: 262322 - DNA, 15 bp, Homo sapiens
aaaaatacccataga

SEQ ID NO: 262323 - DNA, 15 bp, Homo sapiens
aaaaaatacccatag

SEQ ID NO: 262324 - DNA, 15 bp, Homo sapiens
taaaaaatacccata

SEQ ID NO: 262325 - DNA, 15 bp, Homo sapiens
ttaaaaaatacccat

SEQ ID NO: 262326 - DNA, 15 bp, Homo sapiens
tttaaaaaataccca

SEQ ID NO: 262327 - DNA, 15 bp, Homo sapiens
ctttaaaaaataccc

SEQ ID NO: 262328 - DNA, 15 bp, Homo sapiens
actttaaaaaatacc

SEQ ID NO: 262329 - DNA, 15 bp, Homo sapiens
tactttaaaaaatac

SEQ ID NO: 262330 - DNA, 15 bp, Homo sapiens
atactttaaaaaata

SEQ ID NO: 262331 - DNA, 15 bp, Homo sapiens
catactttaaaaaat

SEQ ID NO: 262332 - DNA, 15 bp, Homo sapiens
tcatactttaaaaaa

SEQ ID NO: 262333 - DNA, 15 bp, Homo sapiens
ctcatactttaaaaa

SEQ ID NO: 262334 - DNA, 15 bp, Homo sapiens
actcatactttaaaa

SEQ ID NO: 262335 - DNA, 15 bp, Homo sapiens
gactcatactttaaa

SEQ ID NO: 262336 - DNA, 15 bp, Homo sapiens
agactcatactttaa

SEQ ID NO: 262337 - DNA, 15 bp, Homo sapiens
tagactcatacttta

SEQ ID NO: 262338 - DNA, 15 bp, Homo sapiens
atagactcatacttt

SEQ ID NO: 262339 - DNA, 15 bp, Homo sapiens
tatagactcatactt

SEQ ID NO: 262340 - DNA, 15 bp, Homo sapiens
atatagactcatact

SEQ ID NO: 262341 - DNA, 15 bp, Homo sapiens
tatatagactcatac

SEQ ID NO: 262342 - DNA, 15 bp, Homo sapiens
ttatatagactcata

SEQ ID NO: 262343 - DNA, 15 bp, Homo sapiens
tttatatagactcat

SEQ ID NO: 262344 - DNA, 15 bp, Homo sapiens
gtttatatagactca

SEQ ID NO: 262345 - DNA, 15 bp, Homo sapiens
agtttatatagactc

SEQ ID NO: 262346 - DNA, 15 bp, Homo sapiens
tagtttatatagact

SEQ ID NO: 262347 - DNA, 15 bp, Homo sapiens
atagtttatatagac

SEQ ID NO: 262348 - DNA, 15 bp, Homo sapiens
aatagtttatataga

SEQ ID NO: 262349 - DNA, 15 bp, Homo sapiens
taatagtttatatag

SEQ ID NO: 262350 - DNA, 15 bp, Homo sapiens
ataatagtttatata

SEQ ID NO: 262351 - DNA, 15 bp, Homo sapiens
cataatagtttatat

SEQ ID NO: 262352 - DNA, 15 bp, Homo sapiens
acataatagtttata

SEQ ID NO: 262353 - DNA, 15 bp, Homo sapiens
tacataatagtttat

SEQ ID NO: 262354 - DNA, 15 bp, Homo sapiens
ttacataatagttta

SEQ ID NO: 262355 - DNA, 15 bp, Homo sapiens
tttacataatagttt

SEQ ID NO: 262356 - DNA, 15 bp, Homo sapiens
ttttacataatagtt

SEQ ID NO: 262357 - DNA, 15 bp, Homo sapiens
cttttacataatagt

SEQ ID NO: 262358 - DNA, 15 bp, Homo sapiens
gcttttacataatag

SEQ ID NO: 262359 - DNA, 15 bp, Homo sapiens
tgcttttacataata

SEQ ID NO: 262360 - DNA, 15 bp, Homo sapiens
ttgcttttacataat

SEQ ID NO: 262361 - DNA, 15 bp, Homo sapiens
tttgcttttacataa

SEQ ID NO: 262362 - DNA, 15 bp, Homo sapiens
atttgcttttacata

SEQ ID NO: 262363 - DNA, 15 bp, Homo sapiens
catttgcttttacat

SEQ ID NO: 262364 - DNA, 15 bp, Homo sapiens
tcatttgcttttaca

SEQ ID NO: 262365 - DNA, 15 bp, Homo sapiens
ctcatttgcttttac

SEQ ID NO: 262366 - DNA, 15 bp, Homo sapiens
gctcatttgctttta

SEQ ID NO: 262367 - DNA, 15 bp, Homo sapiens
cgctcatttgctttt

SEQ ID NO: 262368 - DNA, 15 bp, Homo sapiens
acgctcatttgcttt

SEQ ID NO: 262369 - DNA, 15 bp, Homo sapiens
gacgctcatttgctt

SEQ ID NO: 262370 - DNA, 15 bp, Homo sapiens
agacgctcatttgct

SEQ ID NO: 262371 - DNA, 15 bp, Homo sapiens
aagacgctcatttgc

SEQ ID NO: 262372 - DNA, 15 bp, Homo sapiens
caagacgctcatttg

SEQ ID NO: 262373 - DNA, 15 bp, Homo sapiens
ccaagacgctcattt

SEQ ID NO: 262374 - DNA, 15 bp, Homo sapiens
accaagacgctcatt

SEQ ID NO: 262375 - DNA, 15 bp, Homo sapiens
taccaagacgctcat

SEQ ID NO: 262376 - DNA, 15 bp, Homo sapiens
ataccaagacgctca

SEQ ID NO: 262377 - DNA, 15 bp, Homo sapiens
tataccaagacgctc

SEQ ID NO: 262378 - DNA, 15 bp, Homo sapiens
ttataccaagacgct

SEQ ID NO: 262379 - DNA, 15 bp, Homo sapiens
attataccaagacgc

SEQ ID NO: 262380 - DNA, 15 bp, Homo sapiens
cattataccaagacg

SEQ ID NO: 262381 - DNA, 15 bp, Homo sapiens
acattataccaagac

SEQ ID NO: 262382 - DNA, 15 bp, Homo sapiens
gacattataccaaga

SEQ ID NO: 262383 - DNA, 15 bp, Homo sapiens
agacattataccaag

SEQ ID NO: 262384 - DNA, 15 bp, Homo sapiens
aagacattataccaa

SEQ ID NO: 262385 - DNA, 15 bp, Homo sapiens
taagacattatacca

SEQ ID NO: 262386 - DNA, 15 bp, Homo sapiens
ttaagacattatacc

SEQ ID NO: 262387 - DNA, 15 bp, Homo sapiens
attaagacattatac

SEQ ID NO: 262388 - DNA, 15 bp, Homo sapiens
tattaagacattata

SEQ ID NO: 262389 - DNA, 15 bp, Homo sapiens
atattaagacattat

SEQ ID NO: 262390 - DNA, 15 bp, Homo sapiens
aatattaagacatta

SEQ ID NO: 262391 - DNA, 15 bp, Homo sapiens
aaatattaagacatt

SEQ ID NO: 262392 - DNA, 15 bp, Homo sapiens
aaaatattaagacat

SEQ ID NO: 262393 - DNA, 15 bp, Homo sapiens
gaaaatattaagaca

SEQ ID NO: 262394 - DNA, 15 bp, Homo sapiens
tgaaaatattaagac

SEQ ID NO: 262395 - DNA, 15 bp, Homo sapiens
ttgaaaatattaaga

SEQ ID NO: 262396 - DNA, 15 bp, Homo sapiens
tttgaaaatattaag

SEQ ID NO: 262397 - DNA, 15 bp, Homo sapiens
atttgaaaatattaa

SEQ ID NO: 262398 - DNA, 15 bp, Homo sapiens
aatttgaaaatatta

SEQ ID NO: 262399 - DNA, 15 bp, Homo sapiens
taatttgaaaatatt

SEQ ID NO: 262400 - DNA, 15 bp, Homo sapiens
ataatttgaaaatat

SEQ ID NO: 262401 - DNA, 15 bp, Homo sapiens
aataatttgaaaata

SEQ ID NO: 262402 - DNA, 15 bp, Homo sapiens
aaataatttgaaaat

SEQ ID NO: 262403 - DNA, 15 bp, Homo sapiens
gaaataatttgaaaa

SEQ ID NO: 262404 - DNA, 15 bp, Homo sapiens
agaaataatttgaaa

SEQ ID NO: 262405 - DNA, 15 bp, Homo sapiens
aagaaataatttgaa

SEQ ID NO: 262406 - DNA, 15 bp, Homo sapiens
aaagaaataatttga

SEQ ID NO: 262407 - DNA, 15 bp, Homo sapiens
taaagaaataatttg

SEQ ID NO: 262408 - DNA, 15 bp, Homo sapiens
ctaaagaaataattt

SEQ ID NO: 262409 - DNA, 15 bp, Homo sapiens
tctaaagaaataatt

SEQ ID NO: 262410 - DNA, 15 bp, Homo sapiens
ttctaaagaaataat

SEQ ID NO: 262411 - DNA, 15 bp, Homo sapiens
tttctaaagaaataa

SEQ ID NO: 262412 - DNA, 15 bp, Homo sapiens
atttctaaagaaata

SEQ ID NO: 262413 - DNA, 15 bp, Homo sapiens
catttctaaagaaat

SEQ ID NO: 262414 - DNA, 15 bp, Homo sapiens
tcatttctaaagaaa

SEQ ID NO: 262415 - DNA, 15 bp, Homo sapiens
ttcatttctaaagaa

SEQ ID NO: 262416 - DNA, 15 bp, Homo sapiens
tttcatttctaaaga

SEQ ID NO: 262417 - DNA, 15 bp, Homo sapiens
atttcatttctaaag

SEQ ID NO: 262418 - DNA, 15 bp, Homo sapiens
tatttcatttctaaa

SEQ ID NO: 262419 - DNA, 15 bp, Homo sapiens
ttatttcatttctaa

SEQ ID NO: 262420 - DNA, 15 bp, Homo sapiens
attatttcatttcta

SEQ ID NO: 262421 - DNA, 15 bp, Homo sapiens
aattatttcatttct

SEQ ID NO: 262422 - DNA, 15 bp, Homo sapiens
gaattatttcatttc

SEQ ID NO: 262423 - DNA, 15 bp, Homo sapiens
agaattatttcattt

SEQ ID NO: 262424 - DNA, 15 bp, Homo sapiens
tagaattatttcatt

SEQ ID NO: 262425 - DNA, 15 bp, Homo sapiens
ttagaattatttcat

SEQ ID NO: 262426 - DNA, 15 bp, Homo sapiens
attagaattatttca

SEQ ID NO: 262427 - DNA, 15 bp, Homo sapiens
aattagaattatttc

SEQ ID NO: 262428 - DNA, 15 bp, Homo sapiens
taattagaattattt

SEQ ID NO: 262429 - DNA, 15 bp, Homo sapiens
ttaattagaattatt

SEQ ID NO: 262430 - DNA, 15 bp, Homo sapiens
tttaattagaattat

SEQ ID NO: 262431 - DNA, 15 bp, Homo sapiens
ttttaattagaatta

SEQ ID NO: 262432 - DNA, 15 bp, Homo sapiens
attttaattagaatt

SEQ ID NO: 262433 - DNA, 15 bp, Homo sapiens
tattttaattagaat

SEQ ID NO: 262434 - DNA, 15 bp, Homo sapiens
ctattttaattagaa

SEQ ID NO: 262435 - DNA, 15 bp, Homo sapiens
tctattttaattaga

SEQ ID NO: 262436 - DNA, 15 bp, Homo sapiens
atctattttaattag

SEQ ID NO: 262437 - DNA, 15 bp, Homo sapiens
tatctattttaatta

SEQ ID NO: 262438 - DNA, 15 bp, Homo sapiens
ttatctattttaatt

SEQ ID NO: 262439 - DNA, 15 bp, Homo sapiens
tttatctattttaat

SEQ ID NO: 262440 - DNA, 15 bp, Homo sapiens
ttttatctattttaa

SEQ ID NO: 262441 - DNA, 15 bp, Homo sapiens
attttatctatttta

SEQ ID NO: 262442 - DNA, 15 bp, Homo sapiens
gattttatctatttt

SEQ ID NO: 262443 - DNA, 15 bp, Homo sapiens
tgattttatctattt

SEQ ID NO: 262444 - DNA, 15 bp, Homo sapiens
atgattttatctatt

SEQ ID NO: 262445 - DNA, 15 bp, Homo sapiens
aatgattttatctat

SEQ ID NO: 262446 - DNA, 15 bp, Homo sapiens
gaatgattttatcta

SEQ ID NO: 262447 - DNA, 15 bp, Homo sapiens
tgaatgattttatct

SEQ ID NO: 262448 - DNA, 15 bp, Homo sapiens
ctgaatgattttatc

SEQ ID NO: 262449 - DNA, 15 bp, Homo sapiens
actgaatgattttat

SEQ ID NO: 262450 - DNA, 15 bp, Homo sapiens
tactgaatgatttta

SEQ ID NO: 262451 - DNA, 15 bp, Homo sapiens
ttactgaatgatttt

SEQ ID NO: 262452 - DNA, 15 bp, Homo sapiens
cttactgaatgattt

SEQ ID NO: 262453 - DNA, 15 bp, Homo sapiens
tcttactgaatgatt

SEQ ID NO: 262454 - DNA, 15 bp, Homo sapiens
ttcttactgaatgat

SEQ ID NO: 262455 - DNA, 15 bp, Homo sapiens
cttcttactgaatga

SEQ ID NO: 262456 - DNA, 15 bp, Homo sapiens
acttcttactgaatg

SEQ ID NO: 262457 - DNA, 15 bp, Homo sapiens
aacttcttactgaat

SEQ ID NO: 262458 - DNA, 15 bp, Homo sapiens
caacttcttactgaa

SEQ ID NO: 262459 - DNA, 15 bp, Homo sapiens
acaacttcttactga

SEQ ID NO: 262460 - DNA, 15 bp, Homo sapiens
aacaacttcttactg

SEQ ID NO: 262461 - DNA, 15 bp, Homo sapiens
gaacaacttcttact

SEQ ID NO: 262462 - DNA, 15 bp, Homo sapiens
ggaacaacttcttac

SEQ ID NO: 262463 - DNA, 15 bp, Homo sapiens
tggaacaacttctta

SEQ ID NO: 262464 - DNA, 15 bp, Homo sapiens
gtggaacaacttctt

SEQ ID NO: 262465 - DNA, 15 bp, Homo sapiens
ggtggaacaacttct

SEQ ID NO: 262466 - DNA, 15 bp, Homo sapiens
tggtggaacaacttc

SEQ ID NO: 262467 - DNA, 15 bp, Homo sapiens
atggtggaacaactt

SEQ ID NO: 262468 - DNA, 15 bp, Homo sapiens
tatggtggaacaact

SEQ ID NO: 262469 - DNA, 15 bp, Homo sapiens
atatggtggaacaac

SEQ ID NO: 262470 - DNA, 15 bp, Homo sapiens
gatatggtggaacaa

SEQ ID NO: 262471 - DNA, 15 bp, Homo sapiens
agatatggtggaaca

SEQ ID NO: 262472 - DNA, 15 bp, Homo sapiens
aagatatggtggaac

SEQ ID NO: 262473 - DNA, 15 bp, Homo sapiens
taagatatggtggaa

SEQ ID NO: 262474 - DNA, 15 bp, Homo sapiens
ctaagatatggtgga

SEQ ID NO: 262475 - DNA, 15 bp, Homo sapiens
tctaagatatggtgg

SEQ ID NO: 262476 - DNA, 15 bp, Homo sapiens
ttctaagatatggtg

SEQ ID NO: 262477 - DNA, 15 bp, Homo sapiens
gttctaagatatggt

SEQ ID NO: 262478 - DNA, 15 bp, Homo sapiens
agttctaagatatgg

SEQ ID NO: 262479 - DNA, 15 bp, Homo sapiens
cagttctaagatatg

SEQ ID NO: 262480 - DNA, 15 bp, Homo sapiens
acagttctaagatat

SEQ ID NO: 262481 - DNA, 15 bp, Homo sapiens
aacagttctaagata

SEQ ID NO: 262482 - DNA, 15 bp, Homo sapiens
caacagttctaagat

SEQ ID NO: 262483 - DNA, 15 bp, Homo sapiens
acaacagttctaaga

SEQ ID NO: 262484 - DNA, 15 bp, Homo sapiens
aacaacagttctaag

SEQ ID NO: 262485 - DNA, 15 bp, Homo sapiens
aaacaacagttctaa

SEQ ID NO: 262486 - DNA, 15 bp, Homo sapiens
taaacaacagttcta

SEQ ID NO: 262487 - DNA, 15 bp, Homo sapiens
ataaacaacagttct

SEQ ID NO: 262488 - DNA, 15 bp, Homo sapiens
tataaacaacagttc

SEQ ID NO: 262489 - DNA, 15 bp, Homo sapiens
atataaacaacagtt

SEQ ID NO: 262490 - DNA, 15 bp, Homo sapiens
aatataaacaacagt

SEQ ID NO: 262491 - DNA, 15 bp, Homo sapiens
taatataaacaacag

SEQ ID NO: 262492 - DNA, 15 bp, Homo sapiens
ataatataaacaaca

SEQ ID NO: 262493 - DNA, 15 bp, Homo sapiens
cataatataaacaac

SEQ ID NO: 262494 - DNA, 15 bp, Homo sapiens
tcataatataaacaa

SEQ ID NO: 262495 - DNA, 15 bp, Homo sapiens
atcataatataaaca

SEQ ID NO: 262496 - DNA, 15 bp, Homo sapiens
gatcataatataaac

SEQ ID NO: 262497 - DNA, 15 bp, Homo sapiens
ggatcataatataaa

SEQ ID NO: 262498 - DNA, 15 bp, Homo sapiens
aggatcataatataa

SEQ ID NO: 262499 - DNA, 15 bp, Homo sapiens
taggatcataatata

SEQ ID NO: 262500 - DNA, 15 bp, Homo sapiens
ataggatcataatat

SEQ ID NO: 262501 - DNA, 15 bp, Homo sapiens
aataggatcataata

SEQ ID NO: 262502 - DNA, 15 bp, Homo sapiens
gaataggatcataat

SEQ ID NO: 262503 - DNA, 15 bp, Homo sapiens
tgaataggatcataa

SEQ ID NO: 262504 - DNA, 15 bp, Homo sapiens
gtgaataggatcata

SEQ ID NO: 262505 - DNA, 15 bp, Homo sapiens
tgtgaataggatcat

SEQ ID NO: 262506 - DNA, 15 bp, Homo sapiens
ttgtgaataggatca

SEQ ID NO: 262507 - DNA, 15 bp, Homo sapiens
attgtgaataggatc

SEQ ID NO: 262508 - DNA, 15 bp, Homo sapiens
aattgtgaataggat

SEQ ID NO: 262509 - DNA, 15 bp, Homo sapiens
caattgtgaatagga

SEQ ID NO: 262510 - DNA, 15 bp, Homo sapiens
acaattgtgaatagg

SEQ ID NO: 262511 - DNA, 15 bp, Homo sapiens
tacaattgtgaatag

SEQ ID NO: 262512 - DNA, 15 bp, Homo sapiens
ttacaattgtgaata

SEQ ID NO: 262513 - DNA, 15 bp, Homo sapiens
attacaattgtgaat

SEQ ID NO: 262514 - DNA, 15 bp, Homo sapiens
aattacaattgtgaa

SEQ ID NO: 262515 - DNA, 15 bp, Homo sapiens
gaattacaattgtga

SEQ ID NO: 262516 - DNA, 15 bp, Homo sapiens
agaattacaattgtg

SEQ ID NO: 262517 - DNA, 15 bp, Homo sapiens
gagaattacaattgt

SEQ ID NO: 262518 - DNA, 15 bp, Homo sapiens
tgagaattacaattg

SEQ ID NO: 262519 - DNA, 15 bp, Homo sapiens
atgagaattacaatt

SEQ ID NO: 262520 - DNA, 15 bp, Homo sapiens
tatgagaattacaat

SEQ ID NO: 262521 - DNA, 15 bp, Homo sapiens
atatgagaattacaa

SEQ ID NO: 262522 - DNA, 15 bp, Homo sapiens
tatatgagaattaca

SEQ ID NO: 262523 - DNA, 15 bp, Homo sapiens
ttatatgagaattac

SEQ ID NO: 262524 - DNA, 15 bp, Homo sapiens
tttatatgagaatta

SEQ ID NO: 262525 - DNA, 15 bp, Homo sapiens
atttatatgagaatt

SEQ ID NO: 262526 - DNA, 15 bp, Homo sapiens
catttatatgagaat

SEQ ID NO: 262527 - DNA, 15 bp, Homo sapiens
tcatttatatgagaa

SEQ ID NO: 262528 - DNA, 15 bp, Homo sapiens
ttcatttatatgaga

SEQ ID NO: 262529 - DNA, 15 bp, Homo sapiens
cttcatttatatgag

SEQ ID NO: 262530 - DNA, 15 bp, Homo sapiens
tcttcatttatatga

SEQ ID NO: 262531 - DNA, 15 bp, Homo sapiens
ttcttcatttatatg

SEQ ID NO: 262532 - DNA, 15 bp, Homo sapiens
attcttcatttatat

SEQ ID NO: 262533 - DNA, 15 bp, Homo sapiens
aattcttcatttata

SEQ ID NO: 262534 - DNA, 15 bp, Homo sapiens
gaattcttcatttat

SEQ ID NO: 262535 - DNA, 15 bp, Homo sapiens
agaattcttcattta

SEQ ID NO: 262536 - DNA, 15 bp, Homo sapiens
aagaattcttcattt

SEQ ID NO: 262537 - DNA, 15 bp, Homo sapiens
caagaattcttcatt

SEQ ID NO: 262538 - DNA, 15 bp, Homo sapiens
ccaagaattcttcat

SEQ ID NO: 262539 - DNA, 15 bp, Homo sapiens
accaagaattcttca

SEQ ID NO: 262540 - DNA, 15 bp, Homo sapiens
taccaagaattcttc

SEQ ID NO: 262541 - DNA, 15 bp, Homo sapiens
ctaccaagaattctt

SEQ ID NO: 262542 - DNA, 15 bp, Homo sapiens
tctaccaagaattct

SEQ ID NO: 262543 - DNA, 15 bp, Homo sapiens
atctaccaagaattc

SEQ ID NO: 262544 - DNA, 15 bp, Homo sapiens
aatctaccaagaatt

SEQ ID NO: 262545 - DNA, 15 bp, Homo sapiens
caatctaccaagaat

SEQ ID NO: 262546 - DNA, 15 bp, Homo sapiens
tcaatctaccaagaa

SEQ ID NO: 262547 - DNA, 15 bp, Homo sapiens
gtcaatctaccaaga

SEQ ID NO: 262548 - DNA, 15 bp, Homo sapiens
tgtcaatctaccaag

SEQ ID NO: 262549 - DNA, 15 bp, Homo sapiens
ctgtcaatctaccaa

SEQ ID NO: 262550 - DNA, 15 bp, Homo sapiens
actgtcaatctacca

SEQ ID NO: 262551 - DNA, 15 bp, Homo sapiens
gactgtcaatctacc

SEQ ID NO: 262552 - DNA, 15 bp, Homo sapiens
tgactgtcaatctac

SEQ ID NO: 262553 - DNA, 15 bp, Homo sapiens
gtgactgtcaatcta

SEQ ID NO: 262554 - DNA, 15 bp, Homo sapiens
ggtgactgtcaatct

SEQ ID NO: 262555 - DNA, 15 bp, Homo sapiens
tggtgactgtcaatc

SEQ ID NO: 262556 - DNA, 15 bp, Homo sapiens
atggtgactgtcaat

SEQ ID NO: 262557 - DNA, 15 bp, Homo sapiens
gatggtgactgtcaa

SEQ ID NO: 262558 - DNA, 15 bp, Homo sapiens
agatggtgactgtca

SEQ ID NO: 262559 - DNA, 15 bp, Homo sapiens
gagatggtgactgtc

SEQ ID NO: 262560 - DNA, 15 bp, Homo sapiens
ggagatggtgactgt

SEQ ID NO: 262561 - DNA, 15 bp, Homo sapiens
aggagatggtgactg

SEQ ID NO: 262562 - DNA, 15 bp, Homo sapiens
aaggagatggtgact

SEQ ID NO: 262563 - DNA, 15 bp, Homo sapiens
aaaggagatggtgac

SEQ ID NO: 262564 - DNA, 15 bp, Homo sapiens
gaaaggagatggtga

SEQ ID NO: 262565 - DNA, 15 bp, Homo sapiens
agaaaggagatggtg

SEQ ID NO: 262566 - DNA, 15 bp, Homo sapiens
aagaaaggagatggt

SEQ ID NO: 262567 - DNA, 15 bp, Homo sapiens
caagaaaggagatgg

SEQ ID NO: 262568 - DNA, 15 bp, Homo sapiens
tcaagaaaggagatg

SEQ ID NO: 262569 - DNA, 15 bp, Homo sapiens
ttcaagaaaggagat

SEQ ID NO: 262570 - DNA, 15 bp, Homo sapiens
attcaagaaaggaga

SEQ ID NO: 262571 - DNA, 15 bp, Homo sapiens
tattcaagaaaggag

SEQ ID NO: 262572 - DNA, 15 bp, Homo sapiens
gtattcaagaaagga

SEQ ID NO: 262573 - DNA, 15 bp, Homo sapiens
tgtattcaagaaagg

SEQ ID NO: 262574 - DNA, 15 bp, Homo sapiens
atgtattcaagaaag

SEQ ID NO: 262575 - DNA, 15 bp, Homo sapiens
tatgtattcaagaaa

SEQ ID NO: 262576 - DNA, 15 bp, Homo sapiens
ctatgtattcaagaa

SEQ ID NO: 262577 - DNA, 15 bp, Homo sapiens
tctatgtattcaaga

SEQ ID NO: 262578 - DNA, 15 bp, Homo sapiens
atctatgtattcaag

SEQ ID NO: 262579 - DNA, 15 bp, Homo sapiens
catctatgtattcaa

SEQ ID NO: 262580 - DNA, 15 bp, Homo sapiens
ccatctatgtattca

SEQ ID NO: 262581 - DNA, 15 bp, Homo sapiens
tccatctatgtattc

SEQ ID NO: 262582 - DNA, 15 bp, Homo sapiens
atccatctatgtatt

SEQ ID NO: 262583 - DNA, 15 bp, Homo sapiens
aatccatctatgtat

SEQ ID NO: 262584 - DNA, 15 bp, Homo sapiens
gaatccatctatgta

SEQ ID NO: 262585 - DNA, 15 bp, Homo sapiens
agaatccatctatgt

SEQ ID NO: 262586 - DNA, 15 bp, Homo sapiens
aagaatccatctatg

SEQ ID NO: 262587 - DNA, 15 bp, Homo sapiens
taagaatccatctat

SEQ ID NO: 262588 - DNA, 15 bp, Homo sapiens
gtaagaatccatcta

SEQ ID NO: 262589 - DNA, 15 bp, Homo sapiens
ggtaagaatccatct

SEQ ID NO: 262590 - DNA, 15 bp, Homo sapiens
aggtaagaatccatc

SEQ ID NO: 262591 - DNA, 15 bp, Homo sapiens
aaggtaagaatccat

SEQ ID NO: 262592 - DNA, 15 bp, Homo sapiens
taaggtaagaatcca

SEQ ID NO: 262593 - DNA, 15 bp, Homo sapiens
ctaaggtaagaatcc

SEQ ID NO: 262594 - DNA, 15 bp, Homo sapiens
gctaaggtaagaatc

SEQ ID NO: 262595 - DNA, 15 bp, Homo sapiens
agctaaggtaagaat

SEQ ID NO: 262596 - DNA, 15 bp, Homo sapiens
aagctaaggtaagaa

SEQ ID NO: 262597 - DNA, 15 bp, Homo sapiens
aaagctaaggtaaga

SEQ ID NO: 262598 - DNA, 15 bp, Homo sapiens
gaaagctaaggtaag

SEQ ID NO: 262599 - DNA, 15 bp, Homo sapiens
agaaagctaaggtaa

SEQ ID NO: 262600 - DNA, 15 bp, Homo sapiens
gagaaagctaaggta

SEQ ID NO: 262601 - DNA, 15 bp, Homo sapiens
tgagaaagctaaggt

SEQ ID NO: 262602 - DNA, 15 bp, Homo sapiens
atgagaaagctaagg

SEQ ID NO: 262603 - DNA, 15 bp, Homo sapiens
aatgagaaagctaag

SEQ ID NO: 262604 - DNA, 15 bp, Homo sapiens
aaatgagaaagctaa

SEQ ID NO: 262605 - DNA, 15 bp, Homo sapiens
aaaatgagaaagcta

SEQ ID NO: 262606 - DNA, 15 bp, Homo sapiens
aaaaatgagaaagct

SEQ ID NO: 262607 - DNA, 15 bp, Homo sapiens
gaaaaatgagaaagc

SEQ ID NO: 262608 - DNA, 15 bp, Homo sapiens
tgaaaaatgagaaag

SEQ ID NO: 262609 - DNA, 15 bp, Homo sapiens
ctgaaaaatgagaaa

SEQ ID NO: 262610 - DNA, 15 bp, Homo sapiens
cctgaaaaatgagaa

SEQ ID NO: 262611 - DNA, 15 bp, Homo sapiens
acctgaaaaatgaga

SEQ ID NO: 262612 - DNA, 15 bp, Homo sapiens
tacctgaaaaatgag

SEQ ID NO: 262613 - DNA, 15 bp, Homo sapiens
ttacctgaaaaatga

SEQ ID NO: 262614 - DNA, 15 bp, Homo sapiens
tttacctgaaaaatg

SEQ ID NO: 262615 - DNA, 15 bp, Homo sapiens
ttttacctgaaaaat

SEQ ID NO: 262616 - DNA, 15 bp, Homo sapiens
tttttacctgaaaaa

SEQ ID NO: 262617 - DNA, 15 bp, Homo sapiens
ctttttacctgaaaa

SEQ ID NO: 262618 - DNA, 15 bp, Homo sapiens
gctttttacctgaaa

SEQ ID NO: 262619 - DNA, 15 bp, Homo sapiens
tgctttttacctgaa

SEQ ID NO: 262620 - DNA, 15 bp, Homo sapiens
ctgctttttacctga

SEQ ID NO: 262621 - DNA, 15 bp, Homo sapiens
gctgctttttacctg

SEQ ID NO: 262622 - DNA, 15 bp, Homo sapiens
agctgctttttacct

SEQ ID NO: 262623 - DNA, 15 bp, Homo sapiens
aagctgctttttacc

SEQ ID NO: 262624 - DNA, 15 bp, Homo sapiens
gaagctgctttttac

SEQ ID NO: 262625 - DNA, 15 bp, Homo sapiens
ggaagctgcttttta

SEQ ID NO: 262626 - DNA, 15 bp, Homo sapiens
aggaagctgcttttt

SEQ ID NO: 262627 - DNA, 15 bp, Homo sapiens
caggaagctgctttt

SEQ ID NO: 262628 - DNA, 15 bp, Homo sapiens
tcaggaagctgcttt

SEQ ID NO: 262629 - DNA, 15 bp, Homo sapiens
atcaggaagctgctt

SEQ ID NO: 262630 - DNA, 15 bp, Homo sapiens
aatcaggaagctgct

SEQ ID NO: 262631 - DNA, 15 bp, Homo sapiens
gaatcaggaagctgc

SEQ ID NO: 262632 - DNA, 15 bp, Homo sapiens
tgaatcaggaagctg

SEQ ID NO: 262633 - DNA, 15 bp, Homo sapiens
ttgaatcaggaagct

SEQ ID NO: 262634 - DNA, 15 bp, Homo sapiens
tttgaatcaggaagc

SEQ ID NO: 262635 - DNA, 15 bp, Homo sapiens
atttgaatcaggaag

SEQ ID NO: 262636 - DNA, 15 bp, Homo sapiens
catttgaatcaggaa

SEQ ID NO: 262637 - DNA, 15 bp, Homo sapiens
tcatttgaatcagga

SEQ ID NO: 262638 - DNA, 15 bp, Homo sapiens
ctcatttgaatcagg

SEQ ID NO: 262639 - DNA, 15 bp, Homo sapiens
tctcatttgaatcag

SEQ ID NO: 262640 - DNA, 15 bp, Homo sapiens
atctcatttgaatca

SEQ ID NO: 262641 - DNA, 15 bp, Homo sapiens
aatctcatttgaatc

SEQ ID NO: 262642 - DNA, 15 bp, Homo sapiens
caatctcatttgaat

SEQ ID NO: 262643 - DNA, 15 bp, Homo sapiens
acaatctcatttgaa

SEQ ID NO: 262644 - DNA, 15 bp, Homo sapiens
cacaatctcatttga

SEQ ID NO: 262645 - DNA, 15 bp, Homo sapiens
ccacaatctcatttg

SEQ ID NO: 262646 - DNA, 15 bp, Homo sapiens
tccacaatctcattt

SEQ ID NO: 262647 - DNA, 15 bp, Homo sapiens
ttccacaatctcatt

SEQ ID NO: 262648 - DNA, 15 bp, Homo sapiens
tttccacaatctcat

SEQ ID NO: 262649 - DNA, 15 bp, Homo sapiens
ttttccacaatctca

SEQ ID NO: 262650 - DNA, 15 bp, Homo sapiens
tttttccacaatctc

SEQ ID NO: 262651 - DNA, 15 bp, Homo sapiens
atttttccacaatct

SEQ ID NO: 262652 - DNA, 15 bp, Homo sapiens
aatttttccacaatc

SEQ ID NO: 262653 - DNA, 15 bp, Homo sapiens
caatttttccacaat

SEQ ID NO: 262654 - DNA, 15 bp, Homo sapiens
gcaatttttccacaa

SEQ ID NO: 262655 - DNA, 15 bp, Homo sapiens
agcaatttttccaca

SEQ ID NO: 262656 - DNA, 15 bp, Homo sapiens
aagcaatttttccac

SEQ ID NO: 262657 - DNA, 15 bp, Homo sapiens
gaagcaatttttcca

SEQ ID NO: 262658 - DNA, 15 bp, Homo sapiens
agaagcaatttttcc

SEQ ID NO: 262659 - DNA, 15 bp, Homo sapiens
tagaagcaatttttc

SEQ ID NO: 262660 - DNA, 15 bp, Homo sapiens
ttagaagcaattttt

SEQ ID NO: 262661 - DNA, 15 bp, Homo sapiens
cttagaagcaatttt

SEQ ID NO: 262662 - DNA, 15 bp, Homo sapiens
tcttagaagcaattt

SEQ ID NO: 262663 - DNA, 15 bp, Homo sapiens
ttcttagaagcaatt

SEQ ID NO: 262664 - DNA, 15 bp, Homo sapiens
cttcttagaagcaat

SEQ ID NO: 262665 - DNA, 15 bp, Homo sapiens
tcttcttagaagcaa

SEQ ID NO: 262666 - DNA, 15 bp, Homo sapiens
ttcttcttagaagca

SEQ ID NO: 262667 - DNA, 15 bp, Homo sapiens
tttcttcttagaagc

SEQ ID NO: 262668 - DNA, 15 bp, Homo sapiens
ctttcttcttagaag

SEQ ID NO: 262669 - DNA, 15 bp, Homo sapiens
actttcttcttagaa

SEQ ID NO: 262670 - DNA, 15 bp, Homo sapiens
aactttcttcttaga

SEQ ID NO: 262671 - DNA, 15 bp, Homo sapiens
gaactttcttcttag

SEQ ID NO: 262672 - DNA, 15 bp, Homo sapiens
tgaactttcttctta

SEQ ID NO: 262673 - DNA, 15 bp, Homo sapiens
atgaactttcttctt

SEQ ID NO: 262674 - DNA, 15 bp, Homo sapiens
gatgaactttcttct

SEQ ID NO: 262675 - DNA, 15 bp, Homo sapiens
ggatgaactttcttc

SEQ ID NO: 262676 - DNA, 15 bp, Homo sapiens
gggatgaactttctt

SEQ ID NO: 262677 - DNA, 15 bp, Homo sapiens
agggatgaactttct

SEQ ID NO: 262678 - DNA, 15 bp, Homo sapiens
cagggatgaactttc

SEQ ID NO: 262679 - DNA, 15 bp, Homo sapiens
tcagggatgaacttt

SEQ ID NO: 262680 - DNA, 15 bp, Homo sapiens
atcagggatgaactt

SEQ ID NO: 262681 - DNA, 15 bp, Homo sapiens
gatcagggatgaact

SEQ ID NO: 262682 - DNA, 15 bp, Homo sapiens
ggatcagggatgaac

SEQ ID NO: 262683 - DNA, 15 bp, Homo sapiens
gggatcagggatgaa

SEQ ID NO: 262684 - DNA, 15 bp, Homo sapiens
ggggatcagggatga

SEQ ID NO: 262685 - DNA, 15 bp, Homo sapiens
tggggatcagggatg

SEQ ID NO: 262686 - DNA, 15 bp, Homo sapiens
ctggggatcagggat

SEQ ID NO: 262687 - DNA, 15 bp, Homo sapiens
cctggggatcaggga

SEQ ID NO: 262688 - DNA, 15 bp, Homo sapiens
ccctggggatcaggg

SEQ ID NO: 262689 - DNA, 15 bp, Homo sapiens
gccctggggatcagg

SEQ ID NO: 262690 - DNA, 15 bp, Homo sapiens
agccctggggatcag

SEQ ID NO: 262691 - DNA, 15 bp, Homo sapiens
gagccctggggatca

SEQ ID NO: 262692 - DNA, 15 bp, Homo sapiens
tgagccctggggatc

SEQ ID NO: 262693 - DNA, 15 bp, Homo sapiens
ttgagccctggggat

SEQ ID NO: 262694 - DNA, 15 bp, Homo sapiens
tttgagccctgggga

SEQ ID NO: 262695 - DNA, 15 bp, Homo sapiens
gtttgagccctgggg

SEQ ID NO: 262696 - DNA, 15 bp, Homo sapiens
tgtttgagccctggg

SEQ ID NO: 262697 - DNA, 15 bp, Homo sapiens
atgtttgagccctgg

SEQ ID NO: 262698 - DNA, 15 bp, Homo sapiens
catgtttgagccctg

SEQ ID NO: 262699 - DNA, 15 bp, Homo sapiens
tcatgtttgagccct

SEQ ID NO: 262700 - DNA, 15 bp, Homo sapiens
atcatgtttgagccc

SEQ ID NO: 262701 - DNA, 15 bp, Homo sapiens
catcatgtttgagcc

SEQ ID NO: 262702 - DNA, 15 bp, Homo sapiens
acatcatgtttgagc

SEQ ID NO: 262703 - DNA, 15 bp, Homo sapiens
aacatcatgtttgag

SEQ ID NO: 262704 - DNA, 15 bp, Homo sapiens
aaacatcatgtttga

SEQ ID NO: 262705 - DNA, 15 bp, Homo sapiens
caaacatcatgtttg

SEQ ID NO: 262706 - DNA, 15 bp, Homo sapiens
gcaaacatcatgttt

SEQ ID NO: 262707 - DNA, 15 bp, Homo sapiens
tgcaaacatcatgtt

SEQ ID NO: 262708 - DNA, 15 bp, Homo sapiens
atgcaaacatcatgt

SEQ ID NO: 262709 - DNA, 15 bp, Homo sapiens
aatgcaaacatcatg

SEQ ID NO: 262710 - DNA, 15 bp, Homo sapiens
gaatgcaaacatcat

SEQ ID NO: 262711 - DNA, 15 bp, Homo sapiens
agaatgcaaacatca

SEQ ID NO: 262712 - DNA, 15 bp, Homo sapiens
aagaatgcaaacatc

SEQ ID NO: 262713 - DNA, 15 bp, Homo sapiens
aaagaatgcaaacat

SEQ ID NO: 262714 - DNA, 15 bp, Homo sapiens
caaagaatgcaaaca

SEQ ID NO: 262715 - DNA, 15 bp, Homo sapiens
gcaaagaatgcaaac

SEQ ID NO: 262716 - DNA, 15 bp, Homo sapiens
ggcaaagaatgcaaa

SEQ ID NO: 262717 - DNA, 15 bp, Homo sapiens
gggcaaagaatgcaa

SEQ ID NO: 262718 - DNA, 15 bp, Homo sapiens
tgggcaaagaatgca

SEQ ID NO: 262719 - DNA, 15 bp, Homo sapiens
ctgggcaaagaatgc

SEQ ID NO: 262720 - DNA, 15 bp, Homo sapiens
gctgggcaaagaatg

SEQ ID NO: 262721 - DNA, 15 bp, Homo sapiens
tgctgggcaaagaat

SEQ ID NO: 262722 - DNA, 15 bp, Homo sapiens
gtgctgggcaaagaa

SEQ ID NO: 262723 - DNA, 15 bp, Homo sapiens
agtgctgggcaaaga

SEQ ID NO: 262724 - DNA, 15 bp, Homo sapiens
aagtgctgggcaaag

SEQ ID NO: 262725 - DNA, 15 bp, Homo sapiens
gaagtgctgggcaaa

SEQ ID NO: 262726 - DNA, 15 bp, Homo sapiens
tgaagtgctgggcaa

SEQ ID NO: 262727 - DNA, 15 bp, Homo sapiens
gtgaagtgctgggca

SEQ ID NO: 262728 - DNA, 15 bp, Homo sapiens
cgtgaagtgctgggc

SEQ ID NO: 262729 - DNA, 15 bp, Homo sapiens
gcgtgaagtgctggg

SEQ ID NO: 262730 - DNA, 15 bp, Homo sapiens
tgcgtgaagtgctgg

SEQ ID NO: 262731 - DNA, 15 bp, Homo sapiens
atgcgtgaagtgctg

SEQ ID NO: 262732 - DNA, 15 bp, Homo sapiens
gatgcgtgaagtgct

SEQ ID NO: 262733 - DNA, 15 bp, Homo sapiens
tgatgcgtgaagtgc

SEQ ID NO: 262734 - DNA, 15 bp, Homo sapiens
ctgatgcgtgaagtg

SEQ ID NO: 262735 - DNA, 15 bp, Homo sapiens
actgatgcgtgaagt

SEQ ID NO: 262736 - DNA, 15 bp, Homo sapiens
aactgatgcgtgaag

SEQ ID NO: 262737 - DNA, 15 bp, Homo sapiens
aaactgatgcgtgaa

SEQ ID NO: 262738 - DNA, 15 bp, Homo sapiens
aaaactgatgcgtga

SEQ ID NO: 262739 - DNA, 15 bp, Homo sapiens
aaaaactgatgcgtg

SEQ ID NO: 262740 - DNA, 15 bp, Homo sapiens
gaaaaactgatgcgt

SEQ ID NO: 262741 - DNA, 15 bp, Homo sapiens
tgaaaaactgatgcg

SEQ ID NO: 262742 - DNA, 15 bp, Homo sapiens
ttgaaaaactgatgc

SEQ ID NO: 262743 - DNA, 15 bp, Homo sapiens
cttgaaaaactgatg

SEQ ID NO: 262744 - DNA, 15 bp, Homo sapiens
tcttgaaaaactgat

SEQ ID NO: 262745 - DNA, 15 bp, Homo sapiens
gtcttgaaaaactga

SEQ ID NO: 262746 - DNA, 15 bp, Homo sapiens
tgtcttgaaaaactg

SEQ ID NO: 262747 - DNA, 15 bp, Homo sapiens
ctgtcttgaaaaact

SEQ ID NO: 262748 - DNA, 15 bp, Homo sapiens
tctgtcttgaaaaac

SEQ ID NO: 262749 - DNA, 15 bp, Homo sapiens
atctgtcttgaaaaa

SEQ ID NO: 262750 - DNA, 15 bp, Homo sapiens
gatctgtcttgaaaa

SEQ ID NO: 262751 - DNA, 15 bp, Homo sapiens
tgatctgtcttgaaa

SEQ ID NO: 262752 - DNA, 15 bp, Homo sapiens
atgatctgtcttgaa

SEQ ID NO: 262753 - DNA, 15 bp, Homo sapiens
tatgatctgtcttga

SEQ ID NO: 262754 - DNA, 15 bp, Homo sapiens
ttatgatctgtcttg

SEQ ID NO: 262755 - DNA, 15 bp, Homo sapiens
cttatgatctgtctt

SEQ ID NO: 262756 - DNA, 15 bp, Homo sapiens
gcttatgatctgtct

SEQ ID NO: 262757 - DNA, 15 bp, Homo sapiens
cgcttatgatctgtc

SEQ ID NO: 262758 - DNA, 15 bp, Homo sapiens
tcgcttatgatctgt

SEQ ID NO: 262759 - DNA, 15 bp, Homo sapiens
ctcgcttatgatctg

SEQ ID NO: 262760 - DNA, 15 bp, Homo sapiens
cctcgcttatgatct

SEQ ID NO: 262761 - DNA, 15 bp, Homo sapiens
ccctcgcttatgatc

SEQ ID NO: 262762 - DNA, 15 bp, Homo sapiens
gccctcgcttatgat

SEQ ID NO: 262763 - DNA, 15 bp, Homo sapiens
ggccctcgcttatga

SEQ ID NO: 262764 - DNA, 15 bp, Homo sapiens
tggccctcgcttatg

SEQ ID NO: 262765 - DNA, 15 bp, Homo sapiens
ctggccctcgcttat

SEQ ID NO: 262766 - DNA, 15 bp, Homo sapiens
gctggccctcgctta

SEQ ID NO: 262767 - DNA, 15 bp, Homo sapiens
agctggccctcgctt

SEQ ID NO: 262768 - DNA, 15 bp, Homo sapiens
aagctggccctcgct

SEQ ID NO: 262769 - DNA, 15 bp, Homo sapiens
aaagctggccctcgc

SEQ ID NO: 262770 - DNA, 15 bp, Homo sapiens
gaaagctggccctcg

SEQ ID NO: 262771 - DNA, 15 bp, Homo sapiens
tgaaagctggccctc

SEQ ID NO: 262772 - DNA, 15 bp, Homo sapiens
gtgaaagctggccct

SEQ ID NO: 262773 - DNA, 15 bp, Homo sapiens
ggtgaaagctggccc

SEQ ID NO: 262774 - DNA, 15 bp, Homo sapiens
tggtgaaagctggcc

SEQ ID NO: 262775 - DNA, 15 bp, Homo sapiens
ttggtgaaagctggc

SEQ ID NO: 262776 - DNA, 15 bp, Homo sapiens
gttggtgaaagctgg

SEQ ID NO: 262777 - DNA, 15 bp, Homo sapiens
cgttggtgaaagctg

SEQ ID NO: 262778 - DNA, 15 bp, Homo sapiens
ccgttggtgaaagct

SEQ ID NO: 262779 - DNA, 15 bp, Homo sapiens
cccgttggtgaaagc

SEQ ID NO: 262780 - DNA, 15 bp, Homo sapiens
gcccgttggtgaaag

SEQ ID NO: 262781 - DNA, 15 bp, Homo sapiens
agcccgttggtgaaa

SEQ ID NO: 262782 - DNA, 15 bp, Homo sapiens
cagcccgttggtgaa

SEQ ID NO: 262783 - DNA, 15 bp, Homo sapiens
ccagcccgttggtga

SEQ ID NO: 262784 - DNA, 15 bp, Homo sapiens
cccagcccgttggtg

SEQ ID NO: 262785 - DNA, 15 bp, Homo sapiens
gcccagcccgttggt

SEQ ID NO: 262786 - DNA, 15 bp, Homo sapiens
ggcccagcccgttgg

SEQ ID NO: 262787 - DNA, 15 bp, Homo sapiens
tggcccagcccgttg

SEQ ID NO: 262788 - DNA, 15 bp, Homo sapiens
atggcccagcccgtt

SEQ ID NO: 262789 - DNA, 15 bp, Homo sapiens
catggcccagcccgt

SEQ ID NO: 262790 - DNA, 15 bp, Homo sapiens
ccatggcccagcccg

SEQ ID NO: 262791 - DNA, 15 bp, Homo sapiens
cccatggcccagccc

SEQ ID NO: 262792 - DNA, 15 bp, Homo sapiens
ccccatggcccagcc

SEQ ID NO: 262793 - DNA, 15 bp, Homo sapiens
accccatggcccagc

SEQ ID NO: 262794 - DNA, 15 bp, Homo sapiens
taccccatggcccag

SEQ ID NO: 262795 - DNA, 15 bp, Homo sapiens
ttaccccatggccca

SEQ ID NO: 262796 - DNA, 15 bp, Homo sapiens
cttaccccatggccc

SEQ ID NO: 262797 - DNA, 15 bp, Homo sapiens
tcttaccccatggcc

SEQ ID NO: 262798 - DNA, 15 bp, Homo sapiens
atcttaccccatggc

SEQ ID NO: 262799 - DNA, 15 bp, Homo sapiens
tatcttaccccatgg

SEQ ID NO: 262800 - DNA, 15 bp, Homo sapiens
ctatcttaccccatg

SEQ ID NO: 262801 - DNA, 15 bp, Homo sapiens
tctatcttaccccat

SEQ ID NO: 262802 - DNA, 15 bp, Homo sapiens
ctctatcttacccca

SEQ ID NO: 262803 - DNA, 15 bp, Homo sapiens
actctatcttacccc

SEQ ID NO: 262804 - DNA, 15 bp, Homo sapiens
aactctatcttaccc

SEQ ID NO: 262805 - DNA, 15 bp, Homo sapiens
taactctatcttacc

SEQ ID NO: 262806 - DNA, 15 bp, Homo sapiens
ttaactctatcttac

SEQ ID NO: 262807 - DNA, 15 bp, Homo sapiens
attaactctatctta

SEQ ID NO: 262808 - DNA, 15 bp, Homo sapiens
tattaactctatctt

SEQ ID NO: 262809 - DNA, 15 bp, Homo sapiens
atattaactctatct

SEQ ID NO: 262810 - DNA, 15 bp, Homo sapiens
gatattaactctatc

SEQ ID NO: 262811 - DNA, 15 bp, Homo sapiens
agatattaactctat

SEQ ID NO: 262812 - DNA, 15 bp, Homo sapiens
aagatattaactcta

SEQ ID NO: 262813 - DNA, 15 bp, Homo sapiens
taagatattaactct

SEQ ID NO: 262814 - DNA, 15 bp, Homo sapiens
ctaagatattaactc

SEQ ID NO: 262815 - DNA, 15 bp, Homo sapiens
tctaagatattaact

SEQ ID NO: 262816 - DNA, 15 bp, Homo sapiens
ctctaagatattaac

SEQ ID NO: 262817 - DNA, 15 bp, Homo sapiens
actctaagatattaa

SEQ ID NO: 262818 - DNA, 15 bp, Homo sapiens
aactctaagatatta

SEQ ID NO: 262819 - DNA, 15 bp, Homo sapiens
taactctaagatatt

SEQ ID NO: 262820 - DNA, 15 bp, Homo sapiens
ctaactctaagatat

SEQ ID NO: 262821 - DNA, 15 bp, Homo sapiens
actaactctaagata

SEQ ID NO: 262822 - DNA, 15 bp, Homo sapiens
tactaactctaagat

SEQ ID NO: 262823 - DNA, 15 bp, Homo sapiens
ttactaactctaaga

SEQ ID NO: 262824 - DNA, 15 bp, Homo sapiens
tttactaactctaag

SEQ ID NO: 262825 - DNA, 15 bp, Homo sapiens
ttttactaactctaa

SEQ ID NO: 262826 - DNA, 15 bp, Homo sapiens
attttactaactcta

SEQ ID NO: 262827 - DNA, 15 bp, Homo sapiens
aattttactaactct

SEQ ID NO: 262828 - DNA, 15 bp, Homo sapiens
taattttactaactc

SEQ ID NO: 262829 - DNA, 15 bp, Homo sapiens
ataattttactaact

SEQ ID NO: 262830 - DNA, 15 bp, Homo sapiens
tataattttactaac

SEQ ID NO: 262831 - DNA, 15 bp, Homo sapiens
gtataattttactaa

SEQ ID NO: 262832 - DNA, 15 bp, Homo sapiens
ggtataattttacta

SEQ ID NO: 262833 - DNA, 15 bp, Homo sapiens
tggtataattttact

SEQ ID NO: 262834 - DNA, 15 bp, Homo sapiens
ttggtataattttac

SEQ ID NO: 262835 - DNA, 15 bp, Homo sapiens
tttggtataatttta

SEQ ID NO: 262836 - DNA, 15 bp, Homo sapiens
atttggtataatttt

SEQ ID NO: 262837 - DNA, 15 bp, Homo sapiens
gatttggtataattt

SEQ ID NO: 262838 - DNA, 15 bp, Homo sapiens
tgatttggtataatt

SEQ ID NO: 262839 - DNA, 15 bp, Homo sapiens
atgatttggtataat

SEQ ID NO: 262840 - DNA, 15 bp, Homo sapiens
tatgatttggtataa

SEQ ID NO: 262841 - DNA, 15 bp, Homo sapiens
ctatgatttggtata

SEQ ID NO: 262842 - DNA, 15 bp, Homo sapiens
actatgatttggtat

SEQ ID NO: 262843 - DNA, 15 bp, Homo sapiens
gactatgatttggta

SEQ ID NO: 262844 - DNA, 15 bp, Homo sapiens
tgactatgatttggt

SEQ ID NO: 262845 - DNA, 15 bp, Homo sapiens
ttgactatgatttgg

SEQ ID NO: 262846 - DNA, 15 bp, Homo sapiens
cttgactatgatttg

SEQ ID NO: 262847 - DNA, 15 bp, Homo sapiens
ccttgactatgattt

SEQ ID NO: 262848 - DNA, 15 bp, Homo sapiens
cccttgactatgatt

SEQ ID NO: 262849 - DNA, 15 bp, Homo sapiens
gcccttgactatgat

SEQ ID NO: 262850 - DNA, 15 bp, Homo sapiens
agcccttgactatga

SEQ ID NO: 262851 - DNA, 15 bp, Homo sapiens
tagcccttgactatg

SEQ ID NO: 262852 - DNA, 15 bp, Homo sapiens
ttagcccttgactat

SEQ ID NO: 262853 - DNA, 15 bp, Homo sapiens
gttagcccttgacta

SEQ ID NO: 262854 - DNA, 15 bp, Homo sapiens
tgttagcccttgact

SEQ ID NO: 262855 - DNA, 15 bp, Homo sapiens
atgttagcccttgac

SEQ ID NO: 262856 - DNA, 15 bp, Homo sapiens
aatgttagcccttga

SEQ ID NO: 262857 - DNA, 15 bp, Homo sapiens
taatgttagcccttg

SEQ ID NO: 262858 - DNA, 15 bp, Homo sapiens
ttaatgttagccctt

SEQ ID NO: 262859 - DNA, 15 bp, Homo sapiens
tttaatgttagccct

SEQ ID NO: 262860 - DNA, 15 bp, Homo sapiens
ctttaatgttagccc

SEQ ID NO: 262861 - DNA, 15 bp, Homo sapiens
cctttaatgttagcc

SEQ ID NO: 262862 - DNA, 15 bp, Homo sapiens
tcctttaatgttagc

SEQ ID NO: 262863 - DNA, 15 bp, Homo sapiens
ctcctttaatgttag

SEQ ID NO: 262864 - DNA, 15 bp, Homo sapiens
tctcctttaatgtta

SEQ ID NO: 262865 - DNA, 15 bp, Homo sapiens
atctcctttaatgtt

SEQ ID NO: 262866 - DNA, 15 bp, Homo sapiens
tatctcctttaatgt

SEQ ID NO: 262867 - DNA, 15 bp, Homo sapiens
atatctcctttaatg

SEQ ID NO: 262868 - DNA, 15 bp, Homo sapiens
tatatctcctttaat

SEQ ID NO: 262869 - DNA, 15 bp, Homo sapiens
gtatatctcctttaa

SEQ ID NO: 262870 - DNA, 15 bp, Homo sapiens
tgtatatctccttta

SEQ ID NO: 262871 - DNA, 15 bp, Homo sapiens
ctgtatatctccttt

SEQ ID NO: 262872 - DNA, 15 bp, Homo sapiens
tctgtatatctcctt

SEQ ID NO: 262873 - DNA, 15 bp, Homo sapiens
atctgtatatctcct

SEQ ID NO: 262874 - DNA, 15 bp, Homo sapiens
tatctgtatatctcc

SEQ ID NO: 262875 - DNA, 15 bp, Homo sapiens
ctatctgtatatctc

SEQ ID NO: 262876 - DNA, 15 bp, Homo sapiens
tctatctgtatatct

SEQ ID NO: 262877 - DNA, 15 bp, Homo sapiens
atctatctgtatatc

SEQ ID NO: 262878 - DNA, 15 bp, Homo sapiens
tatctatctgtatat

SEQ ID NO: 262879 - DNA, 15 bp, Homo sapiens
ctatctatctgtata

SEQ ID NO: 262880 - DNA, 15 bp, Homo sapiens
tctatctatctgtat

SEQ ID NO: 262881 - DNA, 15 bp, Homo sapiens
atctatctatctgta

SEQ ID NO: 262882 - DNA, 15 bp, Homo sapiens
gatctatctatctgt

SEQ ID NO: 262883 - DNA, 15 bp, Homo sapiens
ggatctatctatctg

SEQ ID NO: 262884 - DNA, 15 bp, Homo sapiens
tggatctatctatct

SEQ ID NO: 262885 - DNA, 15 bp, Homo sapiens
ttggatctatctatc

SEQ ID NO: 262886 - DNA, 15 bp, Homo sapiens
tttggatctatctat

SEQ ID NO: 262887 - DNA, 15 bp, Homo sapiens
atttggatctatcta

SEQ ID NO: 262888 - DNA, 15 bp, Homo sapiens
tatttggatctatct

SEQ ID NO: 262889 - DNA, 15 bp, Homo sapiens
ttatttggatctatc

SEQ ID NO: 262890 - DNA, 15 bp, Homo sapiens
gttatttggatctat

SEQ ID NO: 262891 - DNA, 15 bp, Homo sapiens
agttatttggatcta

SEQ ID NO: 262892 - DNA, 15 bp, Homo sapiens
aagttatttggatct

SEQ ID NO: 262893 - DNA, 15 bp, Homo sapiens
taagttatttggatc

SEQ ID NO: 262894 - DNA, 15 bp, Homo sapiens
ataagttatttggat

SEQ ID NO: 262895 - DNA, 15 bp, Homo sapiens
gataagttatttgga

SEQ ID NO: 262896 - DNA, 15 bp, Homo sapiens
ggataagttatttgg

SEQ ID NO: 262897 - DNA, 15 bp, Homo sapiens
tggataagttatttg

SEQ ID NO: 262898 - DNA, 15 bp, Homo sapiens
gtggataagttattt

SEQ ID NO: 262899 - DNA, 15 bp, Homo sapiens
agtggataagttatt

SEQ ID NO: 262900 - DNA, 15 bp, Homo sapiens
aagtggataagttat

SEQ ID NO: 262901 - DNA, 15 bp, Homo sapiens
aaagtggataagtta

SEQ ID NO: 262902 - DNA, 15 bp, Homo sapiens
aaaagtggataagtt

SEQ ID NO: 262903 - DNA, 15 bp, Homo sapiens
aaaaagtggataagt

SEQ ID NO: 262904 - DNA, 15 bp, Homo sapiens
aaaaaagtggataag

SEQ ID NO: 262905 - DNA, 15 bp, Homo sapiens
aaaaaaagtggataa

SEQ ID NO: 262906 - DNA, 15 bp, Homo sapiens
taaaaaaagtggata

SEQ ID NO: 262907 - DNA, 15 bp, Homo sapiens
ttaaaaaaagtggat

SEQ ID NO: 262908 - DNA, 15 bp, Homo sapiens
tttaaaaaaagtgga

SEQ ID NO: 262909 - DNA, 15 bp, Homo sapiens
ttttaaaaaaagtgg

SEQ ID NO: 262910 - DNA, 15 bp, Homo sapiens
tttttaaaaaaagtg

SEQ ID NO: 262911 - DNA, 15 bp, Homo sapiens
ctttttaaaaaaagt

SEQ ID NO: 262912 - DNA, 15 bp, Homo sapiens
tctttttaaaaaaag

SEQ ID NO: 262913 - DNA, 15 bp, Homo sapiens
ttctttttaaaaaaa

SEQ ID NO: 262914 - DNA, 15 bp, Homo sapiens
cttctttttaaaaaa

SEQ ID NO: 262915 - DNA, 15 bp, Homo sapiens
acttctttttaaaaa

SEQ ID NO: 262916 - DNA, 15 bp, Homo sapiens
gacttctttttaaaa

SEQ ID NO: 262917 - DNA, 15 bp, Homo sapiens
agacttctttttaaa

SEQ ID NO: 262918 - DNA, 15 bp, Homo sapiens
aagacttctttttaa

SEQ ID NO: 262919 - DNA, 15 bp, Homo sapiens
taagacttcttttta

SEQ ID NO: 262920 - DNA, 15 bp, Homo sapiens
ataagacttcttttt

SEQ ID NO: 262921 - DNA, 15 bp, Homo sapiens
gataagacttctttt

SEQ ID NO: 262922 - DNA, 15 bp, Homo sapiens
agataagacttcttt

SEQ ID NO: 262923 - DNA, 15 bp, Homo sapiens
tagataagacttctt

SEQ ID NO: 262924 - DNA, 15 bp, Homo sapiens
atagataagacttct

SEQ ID NO: 262925 - DNA, 15 bp, Homo sapiens
tatagataagacttc

SEQ ID NO: 262926 - DNA, 15 bp, Homo sapiens
ttatagataagactt

SEQ ID NO: 262927 - DNA, 15 bp, Homo sapiens
tttatagataagact

SEQ ID NO: 262928 - DNA, 15 bp, Homo sapiens
ttttatagataagac

SEQ ID NO: 262929 - DNA, 15 bp, Homo sapiens
tttttatagataaga

SEQ ID NO: 262930 - DNA, 15 bp, Homo sapiens
gtttttatagataag

SEQ ID NO: 262931 - DNA, 15 bp, Homo sapiens
ggtttttatagataa

SEQ ID NO: 262932 - DNA, 15 bp, Homo sapiens
aggtttttatagata

SEQ ID NO: 262933 - DNA, 15 bp, Homo sapiens
aaggtttttatagat

SEQ ID NO: 262934 - DNA, 15 bp, Homo sapiens
taaggtttttataga

SEQ ID NO: 262935 - DNA, 15 bp, Homo sapiens
ttaaggtttttatag

SEQ ID NO: 262936 - DNA, 15 bp, Homo sapiens
tttaaggtttttata

SEQ ID NO: 262937 - DNA, 15 bp, Homo sapiens
ctttaaggtttttat

SEQ ID NO: 262938 - DNA, 15 bp, Homo sapiens
cctttaaggttttta

SEQ ID NO: 262939 - DNA, 15 bp, Homo sapiens
tcctttaaggttttt

SEQ ID NO: 262940 - DNA, 15 bp, Homo sapiens
ttcctttaaggtttt

SEQ ID NO: 262941 - DNA, 15 bp, Homo sapiens
attcctttaaggttt

SEQ ID NO: 262942 - DNA, 15 bp, Homo sapiens
aattcctttaaggtt

SEQ ID NO: 262943 - DNA, 15 bp, Homo sapiens
aaattcctttaaggt

SEQ ID NO: 262944 - DNA, 15 bp, Homo sapiens
aaaattcctttaagg

SEQ ID NO: 262945 - DNA, 15 bp, Homo sapiens
gaaaattcctttaag

SEQ ID NO: 262946 - DNA, 15 bp, Homo sapiens
ggaaaattcctttaa

SEQ ID NO: 262947 - DNA, 15 bp, Homo sapiens
tggaaaattccttta

SEQ ID NO: 262948 - DNA, 15 bp, Homo sapiens
atggaaaattccttt

SEQ ID NO: 262949 - DNA, 15 bp, Homo sapiens
aatggaaaattcctt

SEQ ID NO: 262950 - DNA, 15 bp, Homo sapiens
aaatggaaaattcct

SEQ ID NO: 262951 - DNA, 15 bp, Homo sapiens
taaatggaaaattcc

SEQ ID NO: 262952 - DNA, 15 bp, Homo sapiens
gtaaatggaaaattc

SEQ ID NO: 262953 - DNA, 15 bp, Homo sapiens
agtaaatggaaaatt

SEQ ID NO: 262954 - DNA, 15 bp, Homo sapiens
aagtaaatggaaaat

SEQ ID NO: 262955 - DNA, 15 bp, Homo sapiens
gaagtaaatggaaaa

SEQ ID NO: 262956 - DNA, 15 bp, Homo sapiens
tgaagtaaatggaaa

SEQ ID NO: 262957 - DNA, 15 bp, Homo sapiens
gtgaagtaaatggaa

SEQ ID NO: 262958 - DNA, 15 bp, Homo sapiens
agtgaagtaaatgga

SEQ ID NO: 262959 - DNA, 15 bp, Homo sapiens
cagtgaagtaaatgg

SEQ ID NO: 262960 - DNA, 15 bp, Homo sapiens
ccagtgaagtaaatg

SEQ ID NO: 262961 - DNA, 15 bp, Homo sapiens
accagtgaagtaaat

SEQ ID NO: 262962 - DNA, 15 bp, Homo sapiens
gaccagtgaagtaaa

SEQ ID NO: 262963 - DNA, 15 bp, Homo sapiens
agaccagtgaagtaa

SEQ ID NO: 262964 - DNA, 15 bp, Homo sapiens
tagaccagtgaagta

SEQ ID NO: 262965 - DNA, 15 bp, Homo sapiens
ctagaccagtgaagt

SEQ ID NO: 262966 - DNA, 15 bp, Homo sapiens
actagaccagtgaag

SEQ ID NO: 262967 - DNA, 15 bp, Homo sapiens
tactagaccagtgaa

SEQ ID NO: 262968 - DNA, 15 bp, Homo sapiens
ttactagaccagtga

SEQ ID NO: 262969 - DNA, 15 bp, Homo sapiens
tttactagaccagtg

SEQ ID NO: 262970 - DNA, 15 bp, Homo sapiens
ttttactagaccagt

SEQ ID NO: 262971 - DNA, 15 bp, Homo sapiens
attttactagaccag

SEQ ID NO: 262972 - DNA, 15 bp, Homo sapiens
aattttactagacca

SEQ ID NO: 262973 - DNA, 15 bp, Homo sapiens
taattttactagacc

SEQ ID NO: 262974 - DNA, 15 bp, Homo sapiens
ataattttactagac

SEQ ID NO: 262975 - DNA, 15 bp, Homo sapiens
tataattttactaga

SEQ ID NO: 262976 - DNA, 15 bp, Homo sapiens
gtataattttactag

SEQ ID NO: 262977 - DNA, 15 bp, Homo sapiens
tgtataattttacta

SEQ ID NO: 262978 - DNA, 15 bp, Homo sapiens
gtgtataattttact

SEQ ID NO: 262979 - DNA, 15 bp, Homo sapiens
tgtgtataattttac

SEQ ID NO: 262980 - DNA, 15 bp, Homo sapiens
gtgtgtataatttta

SEQ ID NO: 262981 - DNA, 15 bp, Homo sapiens
tgtgtgtataatttt

SEQ ID NO: 262982 - DNA, 15 bp, Homo sapiens
gtgtgtgtataattt

SEQ ID NO: 262983 - DNA, 15 bp, Homo sapiens
tgtgtgtgtataatt

SEQ ID NO: 262984 - DNA, 15 bp, Homo sapiens
gtgtgtgtgtataat

SEQ ID NO: 262985 - DNA, 15 bp, Homo sapiens
tgtgtgtgtgtataa

SEQ ID NO: 262986 - DNA, 15 bp, Homo sapiens
ctgtgtgtgtgtata

SEQ ID NO: 262987 - DNA, 15 bp, Homo sapiens
tctgtgtgtgtgtat

SEQ ID NO: 262988 - DNA, 15 bp, Homo sapiens
gtctgtgtgtgtgta

SEQ ID NO: 262989 - DNA, 15 bp, Homo sapiens
tgtctgtgtgtgtgt

SEQ ID NO: 262990 - DNA, 15 bp, Homo sapiens
atgtctgtgtgtgtg

SEQ ID NO: 262991 - DNA, 15 bp, Homo sapiens
catgtctgtgtgtgt

SEQ ID NO: 262992 - DNA, 15 bp, Homo sapiens
gcatgtctgtgtgtg

SEQ ID NO: 262993 - DNA, 15 bp, Homo sapiens
tgcatgtctgtgtgt

SEQ ID NO: 262994 - DNA, 15 bp, Homo sapiens
gtgcatgtctgtgtg

SEQ ID NO: 262995 - DNA, 15 bp, Homo sapiens
tgtgcatgtctgtgt

SEQ ID NO: 262996 - DNA, 15 bp, Homo sapiens
gtgtgcatgtctgtg

SEQ ID NO: 262997 - DNA, 15 bp, Homo sapiens
tgtgtgcatgtctgt

SEQ ID NO: 262998 - DNA, 15 bp, Homo sapiens
gtgtgtgcatgtctg

SEQ ID NO: 262999 - DNA, 15 bp, Homo sapiens
tgtgtgtgcatgtct

SEQ ID NO: 263000 - DNA, 15 bp, Homo sapiens
atgtgtgtgcatgtc

SEQ ID NO: 263001 - DNA, 15 bp, Homo sapiens
tatgtgtgtgcatgt

SEQ ID NO: 263002 - DNA, 15 bp, Homo sapiens
atatgtgtgtgcatg

SEQ ID NO: 263003 - DNA, 15 bp, Homo sapiens
tatatgtgtgtgcat

SEQ ID NO: 263004 - DNA, 15 bp, Homo sapiens
atatatgtgtgtgca

SEQ ID NO: 263005 - DNA, 15 bp, Homo sapiens
tatatatgtgtgtgc

SEQ ID NO: 263006 - DNA, 15 bp, Homo sapiens
ttatatatgtgtgtg

SEQ ID NO: 263007 - DNA, 15 bp, Homo sapiens
tttatatatgtgtgt

SEQ ID NO: 263008 - DNA, 15 bp, Homo sapiens
gtttatatatgtgtg

SEQ ID NO: 263009 - DNA, 15 bp, Homo sapiens
tgtttatatatgtgt

SEQ ID NO: 263010 - DNA, 15 bp, Homo sapiens
atgtttatatatgtg

SEQ ID NO: 263011 - DNA, 15 bp, Homo sapiens
aatgtttatatatgt

SEQ ID NO: 263012 - DNA, 15 bp, Homo sapiens
gaatgtttatatatg

SEQ ID NO: 263013 - DNA, 15 bp, Homo sapiens
tgaatgtttatatat

SEQ ID NO: 263014 - DNA, 15 bp, Homo sapiens
gtgaatgtttatata

SEQ ID NO: 263015 - DNA, 15 bp, Homo sapiens
tgtgaatgtttatat

SEQ ID NO: 263016 - DNA, 15 bp, Homo sapiens
gtgtgaatgtttata

SEQ ID NO: 263017 - DNA, 15 bp, Homo sapiens
tgtgtgaatgtttat

SEQ ID NO: 263018 - DNA, 15 bp, Homo sapiens
gtgtgtgaatgttta

SEQ ID NO: 263019 - DNA, 15 bp, Homo sapiens
tgtgtgtgaatgttt

SEQ ID NO: 263020 - DNA, 15 bp, Homo sapiens
atgtgtgtgaatgtt

SEQ ID NO: 263021 - DNA, 15 bp, Homo sapiens
tatgtgtgtgaatgt

SEQ ID NO: 263022 - DNA, 15 bp, Homo sapiens
gtatgtgtgtgaatg

SEQ ID NO: 263023 - DNA, 15 bp, Homo sapiens
tgtatgtgtgtgaat

SEQ ID NO: 263024 - DNA, 15 bp, Homo sapiens
atgtatgtgtgtgaa

SEQ ID NO: 263025 - DNA, 15 bp, Homo sapiens
tatgtatgtgtgtga

SEQ ID NO: 263026 - DNA, 15 bp, Homo sapiens
atatgtatgtgtgtg

SEQ ID NO: 263027 - DNA, 15 bp, Homo sapiens
catatgtatgtgtgt

SEQ ID NO: 263028 - DNA, 15 bp, Homo sapiens
acatatgtatgtgtg

SEQ ID NO: 263029 - DNA, 15 bp, Homo sapiens
tacatatgtatgtgt

SEQ ID NO: 263030 - DNA, 15 bp, Homo sapiens
gtacatatgtatgtg

SEQ ID NO: 263031 - DNA, 15 bp, Homo sapiens
tgtacatatgtatgt

SEQ ID NO: 263032 - DNA, 15 bp, Homo sapiens
ctgtacatatgtatg

SEQ ID NO: 263033 - DNA, 15 bp, Homo sapiens
cctgtacatatgtat

SEQ ID NO: 263034 - DNA, 15 bp, Homo sapiens
acctgtacatatgta

SEQ ID NO: 263035 - DNA, 15 bp, Homo sapiens
tacctgtacatatgt

SEQ ID NO: 263036 - DNA, 15 bp, Homo sapiens
atacctgtacatatg

SEQ ID NO: 263037 - DNA, 15 bp, Homo sapiens
aatacctgtacatat

SEQ ID NO: 263038 - DNA, 15 bp, Homo sapiens
caatacctgtacata

SEQ ID NO: 263039 - DNA, 15 bp, Homo sapiens
acaatacctgtacat

SEQ ID NO: 263040 - DNA, 15 bp, Homo sapiens
aacaatacctgtaca

SEQ ID NO: 263041 - DNA, 15 bp, Homo sapiens
taacaatacctgtac

SEQ ID NO: 263042 - DNA, 15 bp, Homo sapiens
ataacaatacctgta

SEQ ID NO: 263043 - DNA, 15 bp, Homo sapiens
aataacaatacctgt

SEQ ID NO: 263044 - DNA, 15 bp, Homo sapiens
aaataacaatacctg

SEQ ID NO: 263045 - DNA, 15 bp, Homo sapiens
caaataacaatacct

SEQ ID NO: 263046 - DNA, 15 bp, Homo sapiens
acaaataacaatacc

SEQ ID NO: 263047 - DNA, 15 bp, Homo sapiens
tacaaataacaatac

SEQ ID NO: 263048 - DNA, 15 bp, Homo sapiens
ttacaaataacaata

SEQ ID NO: 263049 - DNA, 15 bp, Homo sapiens
attacaaataacaat

SEQ ID NO: 263050 - DNA, 15 bp, Homo sapiens
aattacaaataacaa

SEQ ID NO: 263051 - DNA, 15 bp, Homo sapiens
aaattacaaataaca

SEQ ID NO: 263052 - DNA, 15 bp, Homo sapiens
caaattacaaataac

SEQ ID NO: 263053 - DNA, 15 bp, Homo sapiens
tcaaattacaaataa

SEQ ID NO: 263054 - DNA, 15 bp, Homo sapiens
gtcaaattacaaata

SEQ ID NO: 263055 - DNA, 15 bp, Homo sapiens
ggtcaaattacaaat

SEQ ID NO: 263056 - DNA, 15 bp, Homo sapiens
gggtcaaattacaaa

SEQ ID NO: 263057 - DNA, 15 bp, Homo sapiens
agggtcaaattacaa

SEQ ID NO: 263058 - DNA, 15 bp, Homo sapiens
aagggtcaaattaca

SEQ ID NO: 263059 - DNA, 15 bp, Homo sapiens
caagggtcaaattac

SEQ ID NO: 263060 - DNA, 15 bp, Homo sapiens
acaagggtcaaatta

SEQ ID NO: 263061 - DNA, 15 bp, Homo sapiens
tacaagggtcaaatt

SEQ ID NO: 263062 - DNA, 15 bp, Homo sapiens
atacaagggtcaaat

SEQ ID NO: 263063 - DNA, 15 bp, Homo sapiens
aatacaagggtcaaa

SEQ ID NO: 263064 - DNA, 15 bp, Homo sapiens
aaatacaagggtcaa

SEQ ID NO: 263065 - DNA, 15 bp, Homo sapiens
aaaatacaagggtca

SEQ ID NO: 263066 - DNA, 15 bp, Homo sapiens
aaaaatacaagggtc

SEQ ID NO: 263067 - DNA, 15 bp, Homo sapiens
aaaaaatacaagggt

SEQ ID NO: 263068 - DNA, 15 bp, Homo sapiens
taaaaaatacaaggg

SEQ ID NO: 263069 - DNA, 15 bp, Homo sapiens
ctaaaaaatacaagg

SEQ ID NO: 263070 - DNA, 15 bp, Homo sapiens
actaaaaaatacaag

SEQ ID NO: 263071 - DNA, 15 bp, Homo sapiens
aactaaaaaatacaa

SEQ ID NO: 263072 - DNA, 15 bp, Homo sapiens
aaactaaaaaataca

SEQ ID NO: 263073 - DNA, 15 bp, Homo sapiens
taaactaaaaaatac

SEQ ID NO: 263074 - DNA, 15 bp, Homo sapiens
ttaaactaaaaaata

SEQ ID NO: 263075 - DNA, 15 bp, Homo sapiens
tttaaactaaaaaat

SEQ ID NO: 263076 - DNA, 15 bp, Homo sapiens
ttttaaactaaaaaa

SEQ ID NO: 263077 - DNA, 15 bp, Homo sapiens
attttaaactaaaaa

SEQ ID NO: 263078 - DNA, 15 bp, Homo sapiens
cattttaaactaaaa

SEQ ID NO: 263079 - DNA, 15 bp, Homo sapiens
acattttaaactaaa

SEQ ID NO: 263080 - DNA, 15 bp, Homo sapiens
aacattttaaactaa

SEQ ID NO: 263081 - DNA, 15 bp, Homo sapiens
taacattttaaacta

SEQ ID NO: 263082 - DNA, 15 bp, Homo sapiens
ctaacattttaaact

SEQ ID NO: 263083 - DNA, 15 bp, Homo sapiens
actaacattttaaac

SEQ ID NO: 263084 - DNA, 15 bp, Homo sapiens
tactaacattttaaa

SEQ ID NO: 263085 - DNA, 15 bp, Homo sapiens
gtactaacattttaa

SEQ ID NO: 263086 - DNA, 15 bp, Homo sapiens
agtactaacatttta

SEQ ID NO: 263087 - DNA, 15 bp, Homo sapiens
cagtactaacatttt

SEQ ID NO: 263088 - DNA, 15 bp, Homo sapiens
gcagtactaacattt

SEQ ID NO: 263089 - DNA, 15 bp, Homo sapiens
tgcagtactaacatt

SEQ ID NO: 263090 - DNA, 15 bp, Homo sapiens
ttgcagtactaacat

SEQ ID NO: 263091 - DNA, 15 bp, Homo sapiens
tttgcagtactaaca

SEQ ID NO: 263092 - DNA, 15 bp, Homo sapiens
ttttgcagtactaac

SEQ ID NO: 263093 - DNA, 15 bp, Homo sapiens
attttgcagtactaa

SEQ ID NO: 263094 - DNA, 15 bp, Homo sapiens
cattttgcagtacta

SEQ ID NO: 263095 - DNA, 15 bp, Homo sapiens
acattttgcagtact

SEQ ID NO: 263096 - DNA, 15 bp, Homo sapiens
aacattttgcagtac

SEQ ID NO: 263097 - DNA, 15 bp, Homo sapiens
taacattttgcagta

SEQ ID NO: 263098 - DNA, 15 bp, Homo sapiens
ataacattttgcagt

SEQ ID NO: 263099 - DNA, 15 bp, Homo sapiens
cataacattttgcag

SEQ ID NO: 263100 - DNA, 15 bp, Homo sapiens
acataacattttgca

SEQ ID NO: 263101 - DNA, 15 bp, Homo sapiens
gacataacattttgc

SEQ ID NO: 263102 - DNA, 15 bp, Homo sapiens
ggacataacattttg

SEQ ID NO: 263103 - DNA, 15 bp, Homo sapiens
aggacataacatttt

SEQ ID NO: 263104 - DNA, 15 bp, Homo sapiens
gaggacataacattt

SEQ ID NO: 263105 - DNA, 15 bp, Homo sapiens
tgaggacataacatt

SEQ ID NO: 263106 - DNA, 15 bp, Homo sapiens
ttgaggacataacat

SEQ ID NO: 263107 - DNA, 15 bp, Homo sapiens
tttgaggacataaca

SEQ ID NO: 263108 - DNA, 15 bp, Homo sapiens
ttttgaggacataac

SEQ ID NO: 263109 - DNA, 15 bp, Homo sapiens
tttttgaggacataa

SEQ ID NO: 263110 - DNA, 15 bp, Homo sapiens
gtttttgaggacata

SEQ ID NO: 263111 - DNA, 15 bp, Homo sapiens
tgtttttgaggacat

SEQ ID NO: 263112 - DNA, 15 bp, Homo sapiens
gtgtttttgaggaca

SEQ ID NO: 263113 - DNA, 15 bp, Homo sapiens
tgtgtttttgaggac

SEQ ID NO: 263114 - DNA, 15 bp, Homo sapiens
atgtgtttttgagga

SEQ ID NO: 263115 - DNA, 15 bp, Homo sapiens
aatgtgtttttgagg

SEQ ID NO: 263116 - DNA, 15 bp, Homo sapiens
caatgtgtttttgag

SEQ ID NO: 263117 - DNA, 15 bp, Homo sapiens
acaatgtgtttttga

SEQ ID NO: 263118 - DNA, 15 bp, Homo sapiens
tacaatgtgtttttg

SEQ ID NO: 263119 - DNA, 15 bp, Homo sapiens
gtacaatgtgttttt

SEQ ID NO: 263120 - DNA, 15 bp, Homo sapiens
ggtacaatgtgtttt

SEQ ID NO: 263121 - DNA, 15 bp, Homo sapiens
tggtacaatgtgttt

SEQ ID NO: 263122 - DNA, 15 bp, Homo sapiens
atggtacaatgtgtt

SEQ ID NO: 263123 - DNA, 15 bp, Homo sapiens
catggtacaatgtgt

SEQ ID NO: 263124 - DNA, 15 bp, Homo sapiens
tcatggtacaatgtg

SEQ ID NO: 263125 - DNA, 15 bp, Homo sapiens
atcatggtacaatgt

SEQ ID NO: 263126 - DNA, 15 bp, Homo sapiens
aatcatggtacaatg

SEQ ID NO: 263127 - DNA, 15 bp, Homo sapiens
taatcatggtacaat

SEQ ID NO: 263128 - DNA, 15 bp, Homo sapiens
ataatcatggtacaa

SEQ ID NO: 263129 - DNA, 15 bp, Homo sapiens
cataatcatggtaca

SEQ ID NO: 263130 - DNA, 15 bp, Homo sapiens
gcataatcatggtac

SEQ ID NO: 263131 - DNA, 15 bp, Homo sapiens
ggcataatcatggta

SEQ ID NO: 263132 - DNA, 15 bp, Homo sapiens
cggcataatcatggt

SEQ ID NO: 263133 - DNA, 15 bp, Homo sapiens
gcggcataatcatgg

SEQ ID NO: 263134 - DNA, 15 bp, Homo sapiens
agcggcataatcatg

SEQ ID NO: 263135 - DNA, 15 bp, Homo sapiens
aagcggcataatcat

SEQ ID NO: 263136 - DNA, 15 bp, Homo sapiens
aaagcggcataatca

SEQ ID NO: 263137 - DNA, 15 bp, Homo sapiens
gaaagcggcataatc

SEQ ID NO: 263138 - DNA, 15 bp, Homo sapiens
tgaaagcggcataat

SEQ ID NO: 263139 - DNA, 15 bp, Homo sapiens
ttgaaagcggcataa

SEQ ID NO: 263140 - DNA, 15 bp, Homo sapiens
attgaaagcggcata

SEQ ID NO: 263141 - DNA, 15 bp, Homo sapiens
tattgaaagcggcat

SEQ ID NO: 263142 - DNA, 15 bp, Homo sapiens
atattgaaagcggca

SEQ ID NO: 263143 - DNA, 15 bp, Homo sapiens
aatattgaaagcggc

SEQ ID NO: 263144 - DNA, 15 bp, Homo sapiens
caatattgaaagcgg

SEQ ID NO: 263145 - DNA, 15 bp, Homo sapiens
acaatattgaaagcg

SEQ ID NO: 263146 - DNA, 15 bp, Homo sapiens
tacaatattgaaagc

SEQ ID NO: 263147 - DNA, 15 bp, Homo sapiens
ttacaatattgaaag

SEQ ID NO: 263148 - DNA, 15 bp, Homo sapiens
tttacaatattgaaa

SEQ ID NO: 263149 - DNA, 15 bp, Homo sapiens
ctttacaatattgaa

SEQ ID NO: 263150 - DNA, 15 bp, Homo sapiens
actttacaatattga

SEQ ID NO: 263151 - DNA, 15 bp, Homo sapiens
cactttacaatattg

SEQ ID NO: 263152 - DNA, 15 bp, Homo sapiens
tcactttacaatatt

SEQ ID NO: 263153 - DNA, 15 bp, Homo sapiens
ctcactttacaatat

SEQ ID NO: 263154 - DNA, 15 bp, Homo sapiens
cctcactttacaata

SEQ ID NO: 263155 - DNA, 15 bp, Homo sapiens
acctcactttacaat

SEQ ID NO: 263156 - DNA, 15 bp, Homo sapiens
aacctcactttacaa

SEQ ID NO: 263157 - DNA, 15 bp, Homo sapiens
aaacctcactttaca

SEQ ID NO: 263158 - DNA, 15 bp, Homo sapiens
aaaacctcactttac

SEQ ID NO: 263159 - DNA, 15 bp, Homo sapiens
aaaaacctcacttta

SEQ ID NO: 263160 - DNA, 15 bp, Homo sapiens
caaaaacctcacttt

SEQ ID NO: 263161 - DNA, 15 bp, Homo sapiens
gcaaaaacctcactt

SEQ ID NO: 263162 - DNA, 15 bp, Homo sapiens
ggcaaaaacctcact

SEQ ID NO: 263163 - DNA, 15 bp, Homo sapiens
cggcaaaaacctcac

SEQ ID NO: 263164 - DNA, 15 bp, Homo sapiens
gcggcaaaaacctca

SEQ ID NO: 263165 - DNA, 15 bp, Homo sapiens
tgcggcaaaaacctc

SEQ ID NO: 263166 - DNA, 15 bp, Homo sapiens
atgcggcaaaaacct

SEQ ID NO: 263167 - DNA, 15 bp, Homo sapiens
aatgcggcaaaaacc

SEQ ID NO: 263168 - DNA, 15 bp, Homo sapiens
taatgcggcaaaaac

SEQ ID NO: 263169 - DNA, 15 bp, Homo sapiens
ataatgcggcaaaaa

SEQ ID NO: 263170 - DNA, 15 bp, Homo sapiens
aataatgcggcaaaa

SEQ ID NO: 263171 - DNA, 15 bp, Homo sapiens
taataatgcggcaaa

SEQ ID NO: 263172 - DNA, 15 bp, Homo sapiens
ataataatgcggcaa

SEQ ID NO: 263173 - DNA, 15 bp, Homo sapiens
aataataatgcggca

SEQ ID NO: 263174 - DNA, 15 bp, Homo sapiens
aaataataatgcggc

SEQ ID NO: 263175 - DNA, 15 bp, Homo sapiens
aaaataataatgcgg

SEQ ID NO: 263176 - DNA, 15 bp, Homo sapiens
aaaaataataatgcg

SEQ ID NO: 263177 - DNA, 15 bp, Homo sapiens
aaaaaataataatgc

SEQ ID NO: 263178 - DNA, 15 bp, Homo sapiens
caaaaaataataatg

SEQ ID NO: 263179 - DNA, 15 bp, Homo sapiens
ccaaaaaataataat

SEQ ID NO: 263180 - DNA, 15 bp, Homo sapiens
tccaaaaaataataa

SEQ ID NO: 263181 - DNA, 15 bp, Homo sapiens
atccaaaaaataata

SEQ ID NO: 263182 - DNA, 15 bp, Homo sapiens
aatccaaaaaataat

SEQ ID NO: 263183 - DNA, 15 bp, Homo sapiens
aaatccaaaaaataa

SEQ ID NO: 263184 - DNA, 15 bp, Homo sapiens
gaaatccaaaaaata

SEQ ID NO: 263185 - DNA, 15 bp, Homo sapiens
tgaaatccaaaaaat

SEQ ID NO: 263186 - DNA, 15 bp, Homo sapiens
ttgaaatccaaaaaa

SEQ ID NO: 263187 - DNA, 15 bp, Homo sapiens
attgaaatccaaaaa

SEQ ID NO: 263188 - DNA, 15 bp, Homo sapiens
tattgaaatccaaaa

SEQ ID NO: 263189 - DNA, 15 bp, Homo sapiens
ctattgaaatccaaa

SEQ ID NO: 263190 - DNA, 15 bp, Homo sapiens
gctattgaaatccaa

SEQ ID NO: 263191 - DNA, 15 bp, Homo sapiens
tgctattgaaatcca

SEQ ID NO: 263192 - DNA, 15 bp, Homo sapiens
atgctattgaaatcc

SEQ ID NO: 263193 - DNA, 15 bp, Homo sapiens
tatgctattgaaatc

SEQ ID NO: 263194 - DNA, 15 bp, Homo sapiens
ctatgctattgaaat

SEQ ID NO: 263195 - DNA, 15 bp, Homo sapiens
gctatgctattgaaa

SEQ ID NO: 263196 - DNA, 15 bp, Homo sapiens
agctatgctattgaa

SEQ ID NO: 263197 - DNA, 15 bp, Homo sapiens
aagctatgctattga

SEQ ID NO: 263198 - DNA, 15 bp, Homo sapiens
gaagctatgctattg

SEQ ID NO: 263199 - DNA, 15 bp, Homo sapiens
tgaagctatgctatt

SEQ ID NO: 263200 - DNA, 15 bp, Homo sapiens
ttgaagctatgctat

SEQ ID NO: 263201 - DNA, 15 bp, Homo sapiens
cttgaagctatgcta

SEQ ID NO: 263202 - DNA, 15 bp, Homo sapiens
acttgaagctatgct

SEQ ID NO: 263203 - DNA, 15 bp, Homo sapiens
aacttgaagctatgc

SEQ ID NO: 263204 - DNA, 15 bp, Homo sapiens
taacttgaagctatg

SEQ ID NO: 263205 - DNA, 15 bp, Homo sapiens
ataacttgaagctat

SEQ ID NO: 263206 - DNA, 15 bp, Homo sapiens
aataacttgaagcta

SEQ ID NO: 263207 - DNA, 15 bp, Homo sapiens
gaataacttgaagct

SEQ ID NO: 263208 - DNA, 15 bp, Homo sapiens
cgaataacttgaagc

SEQ ID NO: 263209 - DNA, 15 bp, Homo sapiens
acgaataacttgaag

SEQ ID NO: 263210 - DNA, 15 bp, Homo sapiens
tacgaataacttgaa

SEQ ID NO: 263211 - DNA, 15 bp, Homo sapiens
ttacgaataacttga

SEQ ID NO: 263212 - DNA, 15 bp, Homo sapiens
cttacgaataacttg

SEQ ID NO: 263213 - DNA, 15 bp, Homo sapiens
tcttacgaataactt

SEQ ID NO: 263214 - DNA, 15 bp, Homo sapiens
ttcttacgaataact

SEQ ID NO: 263215 - DNA, 15 bp, Homo sapiens
attcttacgaataac

SEQ ID NO: 263216 - DNA, 15 bp, Homo sapiens
aattcttacgaataa

SEQ ID NO: 263217 - DNA, 15 bp, Homo sapiens
aaattcttacgaata

SEQ ID NO: 263218 - DNA, 15 bp, Homo sapiens
aaaattcttacgaat

SEQ ID NO: 263219 - DNA, 15 bp, Homo sapiens
aaaaattcttacgaa

SEQ ID NO: 263220 - DNA, 15 bp, Homo sapiens
aaaaaattcttacga

SEQ ID NO: 263221 - DNA, 15 bp, Homo sapiens
taaaaaattcttacg

SEQ ID NO: 263222 - DNA, 15 bp, Homo sapiens
ataaaaaattcttac

SEQ ID NO: 263223 - DNA, 15 bp, Homo sapiens
tataaaaaattctta

SEQ ID NO: 263224 - DNA, 15 bp, Homo sapiens
ttataaaaaattctt

SEQ ID NO: 263225 - DNA, 15 bp, Homo sapiens
tttataaaaaattct

SEQ ID NO: 263226 - DNA, 15 bp, Homo sapiens
atttataaaaaattc

SEQ ID NO: 263227 - DNA, 15 bp, Homo sapiens
tatttataaaaaatt

SEQ ID NO: 263228 - DNA, 15 bp, Homo sapiens
ttatttataaaaaat

SEQ ID NO: 263229 - DNA, 15 bp, Homo sapiens
attatttataaaaaa

SEQ ID NO: 263230 - DNA, 15 bp, Homo sapiens
tattatttataaaaa

SEQ ID NO: 263231 - DNA, 15 bp, Homo sapiens
gtattatttataaaa

SEQ ID NO: 263232 - DNA, 15 bp, Homo sapiens
tgtattatttataaa

SEQ ID NO: 263233 - DNA, 15 bp, Homo sapiens
atgtattatttataa

SEQ ID NO: 263234 - DNA, 15 bp, Homo sapiens
aatgtattatttata

SEQ ID NO: 263235 - DNA, 15 bp, Homo sapiens
aaatgtattatttat

SEQ ID NO: 263236 - DNA, 15 bp, Homo sapiens
aaaatgtattattta

SEQ ID NO: 263237 - DNA, 15 bp, Homo sapiens
aaaaatgtattattt

SEQ ID NO: 263238 - DNA, 15 bp, Homo sapiens
taaaaatgtattatt

SEQ ID NO: 263239 - DNA, 15 bp, Homo sapiens
ataaaaatgtattat

SEQ ID NO: 263240 - DNA, 15 bp, Homo sapiens
tataaaaatgtatta

SEQ ID NO: 263241 - DNA, 15 bp, Homo sapiens
gtataaaaatgtatt

SEQ ID NO: 263242 - DNA, 15 bp, Homo sapiens
agtataaaaatgtat

SEQ ID NO: 263243 - DNA, 15 bp, Homo sapiens
aagtataaaaatgta

SEQ ID NO: 263244 - DNA, 15 bp, Homo sapiens
aaagtataaaaatgt

SEQ ID NO: 263245 - DNA, 15 bp, Homo sapiens
aaaagtataaaaatg

SEQ ID NO: 263246 - DNA, 15 bp, Homo sapiens
aaaaagtataaaaat

SEQ ID NO: 263247 - DNA, 15 bp, Homo sapiens
aaaaaagtataaaaa

SEQ ID NO: 263248 - DNA, 15 bp, Homo sapiens
taaaaaagtataaaa

SEQ ID NO: 263249 - DNA, 15 bp, Homo sapiens
ataaaaaagtataaa

SEQ ID NO: 263250 - DNA, 15 bp, Homo sapiens
tataaaaaagtataa

SEQ ID NO: 263251 - DNA, 15 bp, Homo sapiens
ttataaaaaagtata

SEQ ID NO: 263252 - DNA, 15 bp, Homo sapiens
attataaaaaagtat

SEQ ID NO: 263253 - DNA, 15 bp, Homo sapiens
aattataaaaaagta

SEQ ID NO: 263254 - DNA, 15 bp, Homo sapiens
taattataaaaaagt

SEQ ID NO: 263255 - DNA, 15 bp, Homo sapiens
gtaattataaaaaag

SEQ ID NO: 263256 - DNA, 15 bp, Homo sapiens
ggtaattataaaaaa

SEQ ID NO: 263257 - DNA, 15 bp, Homo sapiens
tggtaattataaaaa

SEQ ID NO: 263258 - DNA, 15 bp, Homo sapiens
atggtaattataaaa

SEQ ID NO: 263259 - DNA, 15 bp, Homo sapiens
tatggtaattataaa

SEQ ID NO: 263260 - DNA, 15 bp, Homo sapiens
atatggtaattataa

SEQ ID NO: 263261 - DNA, 15 bp, Homo sapiens
gatatggtaattata

SEQ ID NO: 263262 - DNA, 15 bp, Homo sapiens
tgatatggtaattat

SEQ ID NO: 263263 - DNA, 15 bp, Homo sapiens
atgatatggtaatta

SEQ ID NO: 263264 - DNA, 15 bp, Homo sapiens
gatgatatggtaatt

SEQ ID NO: 263265 - DNA, 15 bp, Homo sapiens
tgatgatatggtaat

SEQ ID NO: 263266 - DNA, 15 bp, Homo sapiens
atgatgatatggtaa

SEQ ID NO: 263267 - DNA, 15 bp, Homo sapiens
tatgatgatatggta

SEQ ID NO: 263268 - DNA, 15 bp, Homo sapiens
ctatgatgatatggt

SEQ ID NO: 263269 - DNA, 15 bp, Homo sapiens
actatgatgatatgg

SEQ ID NO: 263270 - DNA, 15 bp, Homo sapiens
cactatgatgatatg

SEQ ID NO: 263271 - DNA, 15 bp, Homo sapiens
tcactatgatgatat

SEQ ID NO: 263272 - DNA, 15 bp, Homo sapiens
ttcactatgatgata

SEQ ID NO: 263273 - DNA, 15 bp, Homo sapiens
cttcactatgatgat

SEQ ID NO: 263274 - DNA, 15 bp, Homo sapiens
acttcactatgatga

SEQ ID NO: 263275 - DNA, 15 bp, Homo sapiens
tacttcactatgatg

SEQ ID NO: 263276 - DNA, 15 bp, Homo sapiens
atacttcactatgat

SEQ ID NO: 263277 - DNA, 15 bp, Homo sapiens
tatacttcactatga

SEQ ID NO: 263278 - DNA, 15 bp, Homo sapiens
atatacttcactatg

SEQ ID NO: 263279 - DNA, 15 bp, Homo sapiens
tatatacttcactat

SEQ ID NO: 263280 - DNA, 15 bp, Homo sapiens
ttatatacttcacta

SEQ ID NO: 263281 - DNA, 15 bp, Homo sapiens
attatatacttcact

SEQ ID NO: 263282 - DNA, 15 bp, Homo sapiens
tattatatacttcac

SEQ ID NO: 263283 - DNA, 15 bp, Homo sapiens
atattatatacttca

SEQ ID NO: 263284 - DNA, 15 bp, Homo sapiens
tatattatatacttc

SEQ ID NO: 263285 - DNA, 15 bp, Homo sapiens
atatattatatactt

SEQ ID NO: 263286 - DNA, 15 bp, Homo sapiens
tatatattatatact

SEQ ID NO: 263287 - DNA, 15 bp, Homo sapiens
atatatattatatac

SEQ ID NO: 263288 - DNA, 15 bp, Homo sapiens
catatatattatata

SEQ ID NO: 263289 - DNA, 15 bp, Homo sapiens
tcatatatattatat

SEQ ID NO: 263290 - DNA, 15 bp, Homo sapiens
atcatatatattata

SEQ ID NO: 263291 - DNA, 15 bp, Homo sapiens
tatcatatatattat

SEQ ID NO: 263292 - DNA, 15 bp, Homo sapiens
atatcatatatatta

SEQ ID NO: 263293 - DNA, 15 bp, Homo sapiens
tatatcatatatatt

SEQ ID NO: 263294 - DNA, 15 bp, Homo sapiens
ttatatcatatatat

SEQ ID NO: 263295 - DNA, 15 bp, Homo sapiens
cttatatcatatata

SEQ ID NO: 263296 - DNA, 15 bp, Homo sapiens
gcttatatcatatat

SEQ ID NO: 263297 - DNA, 15 bp, Homo sapiens
agcttatatcatata

SEQ ID NO: 263298 - DNA, 15 bp, Homo sapiens
gagcttatatcatat

SEQ ID NO: 263299 - DNA, 15 bp, Homo sapiens
tgagcttatatcata

SEQ ID NO: 263300 - DNA, 15 bp, Homo sapiens
ttgagcttatatcat

SEQ ID NO: 263301 - DNA, 15 bp, Homo sapiens
attgagcttatatca

SEQ ID NO: 263302 - DNA, 15 bp, Homo sapiens
tattgagcttatatc

SEQ ID NO: 263303 - DNA, 15 bp, Homo sapiens
atattgagcttatat

SEQ ID NO: 263304 - DNA, 15 bp, Homo sapiens
tatattgagcttata

SEQ ID NO: 263305 - DNA, 15 bp, Homo sapiens
ctatattgagcttat

SEQ ID NO: 263306 - DNA, 15 bp, Homo sapiens
actatattgagctta

SEQ ID NO: 263307 - DNA, 15 bp, Homo sapiens
tactatattgagctt

SEQ ID NO: 263308 - DNA, 15 bp, Homo sapiens
atactatattgagct

SEQ ID NO: 263309 - DNA, 15 bp, Homo sapiens
tatactatattgagc

SEQ ID NO: 263310 - DNA, 15 bp, Homo sapiens
atatactatattgag

SEQ ID NO: 263311 - DNA, 15 bp, Homo sapiens
aatatactatattga

SEQ ID NO: 263312 - DNA, 15 bp, Homo sapiens
taatatactatattg

SEQ ID NO: 263313 - DNA, 15 bp, Homo sapiens
ttaatatactatatt

SEQ ID NO: 263314 - DNA, 15 bp, Homo sapiens
attaatatactatat

SEQ ID NO: 263315 - DNA, 15 bp, Homo sapiens
aattaatatactata

SEQ ID NO: 263316 - DNA, 15 bp, Homo sapiens
gaattaatatactat

SEQ ID NO: 263317 - DNA, 15 bp, Homo sapiens
ggaattaatatacta

SEQ ID NO: 263318 - DNA, 15 bp, Homo sapiens
cggaattaatatact

SEQ ID NO: 263319 - DNA, 15 bp, Homo sapiens
acggaattaatatac

SEQ ID NO: 263320 - DNA, 15 bp, Homo sapiens
aacggaattaatata

SEQ ID NO: 263321 - DNA, 15 bp, Homo sapiens
taacggaattaatat

SEQ ID NO: 263322 - DNA, 15 bp, Homo sapiens
ttaacggaattaata

SEQ ID NO: 263323 - DNA, 15 bp, Homo sapiens
tttaacggaattaat

SEQ ID NO: 263324 - DNA, 15 bp, Homo sapiens
gtttaacggaattaa

SEQ ID NO: 263325 - DNA, 15 bp, Homo sapiens
tgtttaacggaatta

SEQ ID NO: 263326 - DNA, 15 bp, Homo sapiens
gtgtttaacggaatt

SEQ ID NO: 263327 - DNA, 15 bp, Homo sapiens
tgtgtttaacggaat

SEQ ID NO: 263328 - DNA, 15 bp, Homo sapiens
ttgtgtttaacggaa

SEQ ID NO: 263329 - DNA, 15 bp, Homo sapiens
tttgtgtttaacgga

SEQ ID NO: 263330 - DNA, 15 bp, Homo sapiens
ctttgtgtttaacgg

SEQ ID NO: 263331 - DNA, 15 bp, Homo sapiens
tctttgtgtttaacg

SEQ ID NO: 263332 - DNA, 15 bp, Homo sapiens
gtctttgtgtttaac

SEQ ID NO: 263333 - DNA, 15 bp, Homo sapiens
tgtctttgtgtttaa

SEQ ID NO: 263334 - DNA, 15 bp, Homo sapiens
atgtctttgtgttta

SEQ ID NO: 263335 - DNA, 15 bp, Homo sapiens
tatgtctttgtgttt

SEQ ID NO: 263336 - DNA, 15 bp, Homo sapiens
atatgtctttgtgtt

SEQ ID NO: 263337 - DNA, 15 bp, Homo sapiens
gatatgtctttgtgt

SEQ ID NO: 263338 - DNA, 15 bp, Homo sapiens
tgatatgtctttgtg

SEQ ID NO: 263339 - DNA, 15 bp, Homo sapiens
ctgatatgtctttgt

SEQ ID NO: 263340 - DNA, 15 bp, Homo sapiens
actgatatgtctttg

SEQ ID NO: 263341 - DNA, 15 bp, Homo sapiens
aactgatatgtcttt

SEQ ID NO: 263342 - DNA, 15 bp, Homo sapiens
aaactgatatgtctt

SEQ ID NO: 263343 - DNA, 15 bp, Homo sapiens
caaactgatatgtct

SEQ ID NO: 263344 - DNA, 15 bp, Homo sapiens
acaaactgatatgtc

SEQ ID NO: 263345 - DNA, 15 bp, Homo sapiens
tacaaactgatatgt

SEQ ID NO: 263346 - DNA, 15 bp, Homo sapiens
ctacaaactgatatg

SEQ ID NO: 263347 - DNA, 15 bp, Homo sapiens
gctacaaactgatat

SEQ ID NO: 263348 - DNA, 15 bp, Homo sapiens
agctacaaactgata

SEQ ID NO: 263349 - DNA, 15 bp, Homo sapiens
aagctacaaactgat

SEQ ID NO: 263350 - DNA, 15 bp, Homo sapiens
aaagctacaaactga

SEQ ID NO: 263351 - DNA, 15 bp, Homo sapiens
caaagctacaaactg

SEQ ID NO: 263352 - DNA, 15 bp, Homo sapiens
ccaaagctacaaact

SEQ ID NO: 263353 - DNA, 15 bp, Homo sapiens
accaaagctacaaac

SEQ ID NO: 263354 - DNA, 15 bp, Homo sapiens
caccaaagctacaaa

SEQ ID NO: 263355 - DNA, 15 bp, Homo sapiens
ccaccaaagctacaa

SEQ ID NO: 263356 - DNA, 15 bp, Homo sapiens
tccaccaaagctaca

SEQ ID NO: 263357 - DNA, 15 bp, Homo sapiens
atccaccaaagctac

SEQ ID NO: 263358 - DNA, 15 bp, Homo sapiens
tatccaccaaagcta

SEQ ID NO: 263359 - DNA, 15 bp, Homo sapiens
ttatccaccaaagct

SEQ ID NO: 263360 - DNA, 15 bp, Homo sapiens
tttatccaccaaagc

SEQ ID NO: 263361 - DNA, 15 bp, Homo sapiens
gtttatccaccaaag

SEQ ID NO: 263362 - DNA, 15 bp, Homo sapiens
tgtttatccaccaaa

SEQ ID NO: 263363 - DNA, 15 bp, Homo sapiens
ttgtttatccaccaa

SEQ ID NO: 263364 - DNA, 15 bp, Homo sapiens
tttgtttatccacca

SEQ ID NO: 263365 - DNA, 15 bp, Homo sapiens
atttgtttatccacc

SEQ ID NO: 263366 - DNA, 15 bp, Homo sapiens
aatttgtttatccac

SEQ ID NO: 263367 - DNA, 15 bp, Homo sapiens
taatttgtttatcca

SEQ ID NO: 263368 - DNA, 15 bp, Homo sapiens
ttaatttgtttatcc

SEQ ID NO: 263369 - DNA, 15 bp, Homo sapiens
attaatttgtttatc

SEQ ID NO: 263370 - DNA, 15 bp, Homo sapiens
aattaatttgtttat

SEQ ID NO: 263371 - DNA, 15 bp, Homo sapiens
aaattaatttgttta

SEQ ID NO: 263372 - DNA, 15 bp, Homo sapiens
taaattaatttgttt

SEQ ID NO: 263373 - DNA, 15 bp, Homo sapiens
ctaaattaatttgtt

SEQ ID NO: 263374 - DNA, 15 bp, Homo sapiens
gctaaattaatttgt

SEQ ID NO: 263375 - DNA, 15 bp, Homo sapiens
tgctaaattaatttg

SEQ ID NO: 263376 - DNA, 15 bp, Homo sapiens
ttgctaaattaattt

SEQ ID NO: 263377 - DNA, 15 bp, Homo sapiens
attgctaaattaatt

SEQ ID NO: 263378 - DNA, 15 bp, Homo sapiens
aattgctaaattaat

SEQ ID NO: 263379 - DNA, 15 bp, Homo sapiens
gaattgctaaattaa

SEQ ID NO: 263380 - DNA, 15 bp, Homo sapiens
tgaattgctaaatta

SEQ ID NO: 263381 - DNA, 15 bp, Homo sapiens
atgaattgctaaatt

SEQ ID NO: 263382 - DNA, 15 bp, Homo sapiens
catgaattgctaaat

SEQ ID NO: 263383 - DNA, 15 bp, Homo sapiens
ccatgaattgctaaa

SEQ ID NO: 263384 - DNA, 15 bp, Homo sapiens
gccatgaattgctaa

SEQ ID NO: 263385 - DNA, 15 bp, Homo sapiens
agccatgaattgcta

SEQ ID NO: 263386 - DNA, 15 bp, Homo sapiens
tagccatgaattgct

SEQ ID NO: 263387 - DNA, 15 bp, Homo sapiens
atagccatgaattgc

SEQ ID NO: 263388 - DNA, 15 bp, Homo sapiens
catagccatgaattg

SEQ ID NO: 263389 - DNA, 15 bp, Homo sapiens
tcatagccatgaatt

SEQ ID NO: 263390 - DNA, 15 bp, Homo sapiens
ttcatagccatgaat

SEQ ID NO: 263391 - DNA, 15 bp, Homo sapiens
tttcatagccatgaa

SEQ ID NO: 263392 - DNA, 15 bp, Homo sapiens
ttttcatagccatga

SEQ ID NO: 263393 - DNA, 15 bp, Homo sapiens
tttttcatagccatg

SEQ ID NO: 263394 - DNA, 15 bp, Homo sapiens
atttttcatagccat

SEQ ID NO: 263395 - DNA, 15 bp, Homo sapiens
catttttcatagcca

SEQ ID NO: 263396 - DNA, 15 bp, Homo sapiens
acatttttcatagcc

SEQ ID NO: 263397 - DNA, 15 bp, Homo sapiens
tacatttttcatagc

SEQ ID NO: 263398 - DNA, 15 bp, Homo sapiens
atacatttttcatag

SEQ ID NO: 263399 - DNA, 15 bp, Homo sapiens
tatacatttttcata

SEQ ID NO: 263400 - DNA, 15 bp, Homo sapiens
atatacatttttcat

SEQ ID NO: 263401 - DNA, 15 bp, Homo sapiens
aatatacatttttca

SEQ ID NO: 263402 - DNA, 15 bp, Homo sapiens
aaatatacatttttc

SEQ ID NO: 263403 - DNA, 15 bp, Homo sapiens
aaaatatacattttt

SEQ ID NO: 263404 - DNA, 15 bp, Homo sapiens
taaaatatacatttt

SEQ ID NO: 263405 - DNA, 15 bp, Homo sapiens
ataaaatatacattt

SEQ ID NO: 263406 - DNA, 15 bp, Homo sapiens
aataaaatatacatt

SEQ ID NO: 263407 - DNA, 15 bp, Homo sapiens
aaataaaatatacat

SEQ ID NO: 263408 - DNA, 15 bp, Homo sapiens
taaataaaatataca

SEQ ID NO: 263409 - DNA, 15 bp, Homo sapiens
ttaaataaaatatac

SEQ ID NO: 263410 - DNA, 15 bp, Homo sapiens
tttaaataaaatata

SEQ ID NO: 263411 - DNA, 15 bp, Homo sapiens
ttttaaataaaatat

SEQ ID NO: 263412 - DNA, 15 bp, Homo sapiens
tttttaaataaaata

SEQ ID NO: 263413 - DNA, 15 bp, Homo sapiens
atttttaaataaaat

SEQ ID NO: 263414 - DNA, 15 bp, Homo sapiens
aatttttaaataaaa

SEQ ID NO: 263415 - DNA, 15 bp, Homo sapiens
aaatttttaaataaa

SEQ ID NO: 263416 - DNA, 15 bp, Homo sapiens
aaaatttttaaataa

SEQ ID NO: 263417 - DNA, 15 bp, Homo sapiens
taaaatttttaaata

SEQ ID NO: 263418 - DNA, 15 bp, Homo sapiens
ttaaaatttttaaat

SEQ ID NO: 263419 - DNA, 15 bp, Homo sapiens
tttaaaatttttaaa

SEQ ID NO: 263420 - DNA, 15 bp, Homo sapiens
ctttaaaatttttaa

SEQ ID NO: 263421 - DNA, 15 bp, Homo sapiens
tctttaaaattttta

SEQ ID NO: 263422 - DNA, 15 bp, Homo sapiens
ttctttaaaattttt

SEQ ID NO: 263423 - DNA, 15 bp, Homo sapiens
tttctttaaaatttt

SEQ ID NO: 263424 - DNA, 15 bp, Homo sapiens
ctttctttaaaattt

SEQ ID NO: 263425 - DNA, 15 bp, Homo sapiens
gctttctttaaaatt

SEQ ID NO: 263426 - DNA, 15 bp, Homo sapiens
agctttctttaaaat

SEQ ID NO: 263427 - DNA, 15 bp, Homo sapiens
tagctttctttaaaa

SEQ ID NO: 263428 - DNA, 15 bp, Homo sapiens
ttagctttctttaaa

SEQ ID NO: 263429 - DNA, 15 bp, Homo sapiens
tttagctttctttaa

SEQ ID NO: 263430 - DNA, 15 bp, Homo sapiens
atttagctttcttta

SEQ ID NO: 263431 - DNA, 15 bp, Homo sapiens
catttagctttcttt

SEQ ID NO: 263432 - DNA, 15 bp, Homo sapiens
tcatttagctttctt

SEQ ID NO: 263433 - DNA, 15 bp, Homo sapiens
atcatttagctttct

SEQ ID NO: 263434 - DNA, 15 bp, Homo sapiens
gatcatttagctttc

SEQ ID NO: 263435 - DNA, 15 bp, Homo sapiens
tgatcatttagcttt

SEQ ID NO: 263436 - DNA, 15 bp, Homo sapiens
ttgatcatttagctt

SEQ ID NO: 263437 - DNA, 15 bp, Homo sapiens
tttgatcatttagct

SEQ ID NO: 263438 - DNA, 15 bp, Homo sapiens
atttgatcatttagc

SEQ ID NO: 263439 - DNA, 15 bp, Homo sapiens
aatttgatcatttag

SEQ ID NO: 263440 - DNA, 15 bp, Homo sapiens
taatttgatcattta

SEQ ID NO: 263441 - DNA, 15 bp, Homo sapiens
ataatttgatcattt

SEQ ID NO: 263442 - DNA, 15 bp, Homo sapiens
aataatttgatcatt

SEQ ID NO: 263443 - DNA, 15 bp, Homo sapiens
aaataatttgatcat

SEQ ID NO: 263444 - DNA, 15 bp, Homo sapiens
taaataatttgatca

SEQ ID NO: 263445 - DNA, 15 bp, Homo sapiens
ttaaataatttgatc

SEQ ID NO: 263446 - DNA, 15 bp, Homo sapiens
attaaataatttgat

SEQ ID NO: 263447 - DNA, 15 bp, Homo sapiens
cattaaataatttga

SEQ ID NO: 263448 - DNA, 15 bp, Homo sapiens
tcattaaataatttg

SEQ ID NO: 263449 - DNA, 15 bp, Homo sapiens
atcattaaataattt

SEQ ID NO: 263450 - DNA, 15 bp, Homo sapiens
catcattaaataatt

SEQ ID NO: 263451 - DNA, 15 bp, Homo sapiens
tcatcattaaataat

SEQ ID NO: 263452 - DNA, 15 bp, Homo sapiens
ttcatcattaaataa

SEQ ID NO: 263453 - DNA, 15 bp, Homo sapiens
attcatcattaaata

SEQ ID NO: 263454 - DNA, 15 bp, Homo sapiens
aattcatcattaaat

SEQ ID NO: 263455 - DNA, 15 bp, Homo sapiens
taattcatcattaaa

SEQ ID NO: 263456 - DNA, 15 bp, Homo sapiens
ataattcatcattaa

SEQ ID NO: 263457 - DNA, 15 bp, Homo sapiens
tataattcatcatta

SEQ ID NO: 263458 - DNA, 15 bp, Homo sapiens
atataattcatcatt

SEQ ID NO: 263459 - DNA, 15 bp, Homo sapiens
catataattcatcat

SEQ ID NO: 263460 - DNA, 15 bp, Homo sapiens
tcatataattcatca

SEQ ID NO: 263461 - DNA, 15 bp, Homo sapiens
atcatataattcatc

SEQ ID NO: 263462 - DNA, 15 bp, Homo sapiens
tatcatataattcat

SEQ ID NO: 263463 - DNA, 15 bp, Homo sapiens
ctatcatataattca

SEQ ID NO: 263464 - DNA, 15 bp, Homo sapiens
tctatcatataattc

SEQ ID NO: 263465 - DNA, 15 bp, Homo sapiens
gtctatcatataatt

SEQ ID NO: 263466 - DNA, 15 bp, Homo sapiens
tgtctatcatataat

SEQ ID NO: 263467 - DNA, 15 bp, Homo sapiens
gtgtctatcatataa

SEQ ID NO: 263468 - DNA, 15 bp, Homo sapiens
agtgtctatcatata

SEQ ID NO: 263469 - DNA, 15 bp, Homo sapiens
aagtgtctatcatat

SEQ ID NO: 263470 - DNA, 15 bp, Homo sapiens
aaagtgtctatcata

SEQ ID NO: 263471 - DNA, 15 bp, Homo sapiens
taaagtgtctatcat

SEQ ID NO: 263472 - DNA, 15 bp, Homo sapiens
ataaagtgtctatca

SEQ ID NO: 263473 - DNA, 15 bp, Homo sapiens
tataaagtgtctatc

SEQ ID NO: 263474 - DNA, 15 bp, Homo sapiens
atataaagtgtctat

SEQ ID NO: 263475 - DNA, 15 bp, Homo sapiens
tatataaagtgtcta

SEQ ID NO: 263476 - DNA, 15 bp, Homo sapiens
ttatataaagtgtct

SEQ ID NO: 263477 - DNA, 15 bp, Homo sapiens
cttatataaagtgtc

SEQ ID NO: 263478 - DNA, 15 bp, Homo sapiens
tcttatataaagtgt

SEQ ID NO: 263479 - DNA, 15 bp, Homo sapiens
ttcttatataaagtg

SEQ ID NO: 263480 - DNA, 15 bp, Homo sapiens
tttcttatataaagt

SEQ ID NO: 263481 - DNA, 15 bp, Homo sapiens
ttttcttatataaag

SEQ ID NO: 263482 - DNA, 15 bp, Homo sapiens
tttttcttatataaa

SEQ ID NO: 263483 - DNA, 15 bp, Homo sapiens
gtttttcttatataa

SEQ ID NO: 263484 - DNA, 15 bp, Homo sapiens
agtttttcttatata

SEQ ID NO: 263485 - DNA, 15 bp, Homo sapiens
aagtttttcttatat

SEQ ID NO: 263486 - DNA, 15 bp, Homo sapiens
gaagtttttcttata

SEQ ID NO: 263487 - DNA, 15 bp, Homo sapiens
tgaagtttttcttat

SEQ ID NO: 263488 - DNA, 15 bp, Homo sapiens
ttgaagtttttctta

SEQ ID NO: 263489 - DNA, 15 bp, Homo sapiens
gttgaagtttttctt

SEQ ID NO: 263490 - DNA, 15 bp, Homo sapiens
tgttgaagtttttct

SEQ ID NO: 263491 - DNA, 15 bp, Homo sapiens
ctgttgaagtttttc

SEQ ID NO: 263492 - DNA, 15 bp, Homo sapiens
gctgttgaagttttt

SEQ ID NO: 263493 - DNA, 15 bp, Homo sapiens
tgctgttgaagtttt

SEQ ID NO: 263494 - DNA, 15 bp, Homo sapiens
ttgctgttgaagttt

SEQ ID NO: 263495 - DNA, 15 bp, Homo sapiens
gttgctgttgaagtt

SEQ ID NO: 263496 - DNA, 15 bp, Homo sapiens
tgttgctgttgaagt

SEQ ID NO: 263497 - DNA, 15 bp, Homo sapiens
ttgttgctgttgaag

SEQ ID NO: 263498 - DNA, 15 bp, Homo sapiens
tttgttgctgttgaa

SEQ ID NO: 263499 - DNA, 15 bp, Homo sapiens
atttgttgctgttga

SEQ ID NO: 263500 - DNA, 15 bp, Homo sapiens
aatttgttgctgttg

SEQ ID NO: 263501 - DNA, 15 bp, Homo sapiens
taatttgttgctgtt

SEQ ID NO: 263502 - DNA, 15 bp, Homo sapiens
ttaatttgttgctgt

SEQ ID NO: 263503 - DNA, 15 bp, Homo sapiens
tttaatttgttgctg

SEQ ID NO: 263504 - DNA, 15 bp, Homo sapiens
ttttaatttgttgct

SEQ ID NO: 263505 - DNA, 15 bp, Homo sapiens
attttaatttgttgc

SEQ ID NO: 263506 - DNA, 15 bp, Homo sapiens
aattttaatttgttg

SEQ ID NO: 263507 - DNA, 15 bp, Homo sapiens
aaattttaatttgtt

SEQ ID NO: 263508 - DNA, 15 bp, Homo sapiens
aaaattttaatttgt

SEQ ID NO: 263509 - DNA, 15 bp, Homo sapiens
aaaaattttaatttg

SEQ ID NO: 263510 - DNA, 15 bp, Homo sapiens
aaaaaattttaattt

SEQ ID NO: 263511 - DNA, 15 bp, Homo sapiens
gaaaaaattttaatt

SEQ ID NO: 263512 - DNA, 15 bp, Homo sapiens
tgaaaaaattttaat

SEQ ID NO: 263513 - DNA, 15 bp, Homo sapiens
atgaaaaaattttaa

SEQ ID NO: 263514 - DNA, 15 bp, Homo sapiens
gatgaaaaaatttta

SEQ ID NO: 263515 - DNA, 15 bp, Homo sapiens
tgatgaaaaaatttt

SEQ ID NO: 263516 - DNA, 15 bp, Homo sapiens
atgatgaaaaaattt

SEQ ID NO: 263517 - DNA, 15 bp, Homo sapiens
aatgatgaaaaaatt

SEQ ID NO: 263518 - DNA, 15 bp, Homo sapiens
aaatgatgaaaaaat

SEQ ID NO: 263519 - DNA, 15 bp, Homo sapiens
aaaatgatgaaaaaa

SEQ ID NO: 263520 - DNA, 15 bp, Homo sapiens
gaaaatgatgaaaaa

SEQ ID NO: 263521 - DNA, 15 bp, Homo sapiens
agaaaatgatgaaaa

SEQ ID NO: 263522 - DNA, 15 bp, Homo sapiens
tagaaaatgatgaaa

SEQ ID NO: 263523 - DNA, 15 bp, Homo sapiens
ctagaaaatgatgaa

SEQ ID NO: 263524 - DNA, 15 bp, Homo sapiens
cctagaaaatgatga

SEQ ID NO: 263525 - DNA, 15 bp, Homo sapiens
acctagaaaatgatg

SEQ ID NO: 263526 - DNA, 15 bp, Homo sapiens
cacctagaaaatgat

SEQ ID NO: 263527 - DNA, 15 bp, Homo sapiens
ccacctagaaaatga

SEQ ID NO: 263528 - DNA, 15 bp, Homo sapiens
tccacctagaaaatg

SEQ ID NO: 263529 - DNA, 15 bp, Homo sapiens
gtccacctagaaaat

SEQ ID NO: 263530 - DNA, 15 bp, Homo sapiens
agtccacctagaaaa

SEQ ID NO: 263531 - DNA, 15 bp, Homo sapiens
aagtccacctagaaa

SEQ ID NO: 263532 - DNA, 15 bp, Homo sapiens
taagtccacctagaa

SEQ ID NO: 263533 - DNA, 15 bp, Homo sapiens
ttaagtccacctaga

SEQ ID NO: 263534 - DNA, 15 bp, Homo sapiens
tttaagtccacctag

SEQ ID NO: 263535 - DNA, 15 bp, Homo sapiens
atttaagtccaccta

SEQ ID NO: 263536 - DNA, 15 bp, Homo sapiens
gatttaagtccacct

SEQ ID NO: 263537 - DNA, 15 bp, Homo sapiens
tgatttaagtccacc

SEQ ID NO: 263538 - DNA, 15 bp, Homo sapiens
atgatttaagtccac

SEQ ID NO: 263539 - DNA, 15 bp, Homo sapiens
tatgatttaagtcca

SEQ ID NO: 263540 - DNA, 15 bp, Homo sapiens
atatgatttaagtcc

SEQ ID NO: 263541 - DNA, 15 bp, Homo sapiens
aatatgatttaagtc

SEQ ID NO: 263542 - DNA, 15 bp, Homo sapiens
aaatatgatttaagt

SEQ ID NO: 263543 - DNA, 15 bp, Homo sapiens
taaatatgatttaag

SEQ ID NO: 263544 - DNA, 15 bp, Homo sapiens
gtaaatatgatttaa

SEQ ID NO: 263545 - DNA, 15 bp, Homo sapiens
cgtaaatatgattta

SEQ ID NO: 263546 - DNA, 15 bp, Homo sapiens
ccgtaaatatgattt

SEQ ID NO: 263547 - DNA, 15 bp, Homo sapiens
accgtaaatatgatt

SEQ ID NO: 263548 - DNA, 15 bp, Homo sapiens
caccgtaaatatgat

SEQ ID NO: 263549 - DNA, 15 bp, Homo sapiens
tcaccgtaaatatga

SEQ ID NO: 263550 - DNA, 15 bp, Homo sapiens
ttcaccgtaaatatg

SEQ ID NO: 263551 - DNA, 15 bp, Homo sapiens
tttcaccgtaaatat

SEQ ID NO: 263552 - DNA, 15 bp, Homo sapiens
gtttcaccgtaaata

SEQ ID NO: 263553 - DNA, 15 bp, Homo sapiens
agtttcaccgtaaat

SEQ ID NO: 263554 - DNA, 15 bp, Homo sapiens
gagtttcaccgtaaa

SEQ ID NO: 263555 - DNA, 15 bp, Homo sapiens
agagtttcaccgtaa

SEQ ID NO: 263556 - DNA, 15 bp, Homo sapiens
cagagtttcaccgta

SEQ ID NO: 263557 - DNA, 15 bp, Homo sapiens
ccagagtttcaccgt

SEQ ID NO: 263558 - DNA, 15 bp, Homo sapiens
gccagagtttcaccg

SEQ ID NO: 263559 - DNA, 15 bp, Homo sapiens
agccagagtttcacc

SEQ ID NO: 263560 - DNA, 15 bp, Homo sapiens
tagccagagtttcac

SEQ ID NO: 263561 - DNA, 15 bp, Homo sapiens
ctagccagagtttca

SEQ ID NO: 263562 - DNA, 15 bp, Homo sapiens
tctagccagagtttc

SEQ ID NO: 263563 - DNA, 15 bp, Homo sapiens
gtctagccagagttt

SEQ ID NO: 263564 - DNA, 15 bp, Homo sapiens
tgtctagccagagtt

SEQ ID NO: 263565 - DNA, 15 bp, Homo sapiens
ctgtctagccagagt

SEQ ID NO: 263566 - DNA, 15 bp, Homo sapiens
gctgtctagccagag

SEQ ID NO: 263567 - DNA, 15 bp, Homo sapiens
cgctgtctagccaga

SEQ ID NO: 263568 - DNA, 15 bp, Homo sapiens
acgctgtctagccag

SEQ ID NO: 263569 - DNA, 15 bp, Homo sapiens
tacgctgtctagcca

SEQ ID NO: 263570 - DNA, 15 bp, Homo sapiens
ttacgctgtctagcc

SEQ ID NO: 263571 - DNA, 15 bp, Homo sapiens
tttacgctgtctagc

SEQ ID NO: 263572 - DNA, 15 bp, Homo sapiens
gtttacgctgtctag

SEQ ID NO: 263573 - DNA, 15 bp, Homo sapiens
agtttacgctgtcta

SEQ ID NO: 263574 - DNA, 15 bp, Homo sapiens
cagtttacgctgtct

SEQ ID NO: 263575 - DNA, 15 bp, Homo sapiens
gcagtttacgctgtc

SEQ ID NO: 263576 - DNA, 15 bp, Homo sapiens
cgcagtttacgctgt

SEQ ID NO: 263577 - DNA, 15 bp, Homo sapiens
gcgcagtttacgctg

SEQ ID NO: 263578 - DNA, 15 bp, Homo sapiens
ggcgcagtttacgct

SEQ ID NO: 263579 - DNA, 15 bp, Homo sapiens
aggcgcagtttacgc

SEQ ID NO: 263580 - DNA, 15 bp, Homo sapiens
aaggcgcagtttacg

SEQ ID NO: 263581 - DNA, 15 bp, Homo sapiens
aaaggcgcagtttac

SEQ ID NO: 263582 - DNA, 15 bp, Homo sapiens
aaaaggcgcagttta

SEQ ID NO: 263583 - DNA, 15 bp, Homo sapiens
gaaaaggcgcagttt

SEQ ID NO: 263584 - DNA, 15 bp, Homo sapiens
tgaaaaggcgcagtt

SEQ ID NO: 263585 - DNA, 15 bp, Homo sapiens
ttgaaaaggcgcagt

SEQ ID NO: 263586 - DNA, 15 bp, Homo sapiens
cttgaaaaggcgcag

SEQ ID NO: 263587 - DNA, 15 bp, Homo sapiens
ccttgaaaaggcgca

SEQ ID NO: 263588 - DNA, 15 bp, Homo sapiens
tccttgaaaaggcgc

SEQ ID NO: 263589 - DNA, 15 bp, Homo sapiens
atccttgaaaaggcg

SEQ ID NO: 263590 - DNA, 15 bp, Homo sapiens
catccttgaaaaggc

SEQ ID NO: 263591 - DNA, 15 bp, Homo sapiens
ccatccttgaaaagg

SEQ ID NO: 263592 - DNA, 15 bp, Homo sapiens
tccatccttgaaaag

SEQ ID NO: 263593 - DNA, 15 bp, Homo sapiens
ttccatccttgaaaa

SEQ ID NO: 263594 - DNA, 15 bp, Homo sapiens
tttccatccttgaaa

SEQ ID NO: 263595 - DNA, 15 bp, Homo sapiens
ttttccatccttgaa

SEQ ID NO: 263596 - DNA, 15 bp, Homo sapiens
tttttccatccttga

SEQ ID NO: 263597 - DNA, 15 bp, Homo sapiens
atttttccatccttg

SEQ ID NO: 263598 - DNA, 15 bp, Homo sapiens
catttttccatcctt

SEQ ID NO: 263599 - DNA, 15 bp, Homo sapiens
tcatttttccatcct

SEQ ID NO: 263600 - DNA, 15 bp, Homo sapiens
ttcatttttccatcc

SEQ ID NO: 263601 - DNA, 15 bp, Homo sapiens
tttcatttttccatc

SEQ ID NO: 263602 - DNA, 15 bp, Homo sapiens
atttcatttttccat

SEQ ID NO: 263603 - DNA, 15 bp, Homo sapiens
tatttcatttttcca

SEQ ID NO: 263604 - DNA, 15 bp, Homo sapiens
atatttcatttttcc

SEQ ID NO: 263605 - DNA, 15 bp, Homo sapiens
gatatttcatttttc

SEQ ID NO: 263606 - DNA, 15 bp, Homo sapiens
tgatatttcattttt

SEQ ID NO: 263607 - DNA, 15 bp, Homo sapiens
ctgatatttcatttt

SEQ ID NO: 263608 - DNA, 15 bp, Homo sapiens
cctgatatttcattt

SEQ ID NO: 263609 - DNA, 15 bp, Homo sapiens
acctgatatttcatt

SEQ ID NO: 263610 - DNA, 15 bp, Homo sapiens
tacctgatatttcat

SEQ ID NO: 263611 - DNA, 15 bp, Homo sapiens
atacctgatatttca

SEQ ID NO: 263612 - DNA, 15 bp, Homo sapiens
catacctgatatttc

SEQ ID NO: 263613 - DNA, 15 bp, Homo sapiens
gcatacctgatattt

SEQ ID NO: 263614 - DNA, 15 bp, Homo sapiens
agcatacctgatatt

SEQ ID NO: 263615 - DNA, 15 bp, Homo sapiens
aagcatacctgatat

SEQ ID NO: 263616 - DNA, 15 bp, Homo sapiens
gaagcatacctgata

SEQ ID NO: 263617 - DNA, 15 bp, Homo sapiens
ggaagcatacctgat

SEQ ID NO: 263618 - DNA, 15 bp, Homo sapiens
aggaagcatacctga

SEQ ID NO: 263619 - DNA, 15 bp, Homo sapiens
aaggaagcatacctg

SEQ ID NO: 263620 - DNA, 15 bp, Homo sapiens
aaaggaagcatacct

SEQ ID NO: 263621 - DNA, 15 bp, Homo sapiens
caaaggaagcatacc

SEQ ID NO: 263622 - DNA, 15 bp, Homo sapiens
tcaaaggaagcatac

SEQ ID NO: 263623 - DNA, 15 bp, Homo sapiens
gtcaaaggaagcata

SEQ ID NO: 263624 - DNA, 15 bp, Homo sapiens
agtcaaaggaagcat

SEQ ID NO: 263625 - DNA, 15 bp, Homo sapiens
tagtcaaaggaagca

SEQ ID NO: 263626 - DNA, 15 bp, Homo sapiens
atagtcaaaggaagc

SEQ ID NO: 263627 - DNA, 15 bp, Homo sapiens
aatagtcaaaggaag

SEQ ID NO: 263628 - DNA, 15 bp, Homo sapiens
taatagtcaaaggaa

SEQ ID NO: 263629 - DNA, 15 bp, Homo sapiens
ttaatagtcaaagga

SEQ ID NO: 263630 - DNA, 15 bp, Homo sapiens
cttaatagtcaaagg

SEQ ID NO: 263631 - DNA, 15 bp, Homo sapiens
tcttaatagtcaaag

SEQ ID NO: 263632 - DNA, 15 bp, Homo sapiens
gtcttaatagtcaaa

SEQ ID NO: 263633 - DNA, 15 bp, Homo sapiens
agtcttaatagtcaa

SEQ ID NO: 263634 - DNA, 15 bp, Homo sapiens
aagtcttaatagtca

SEQ ID NO: 263635 - DNA, 15 bp, Homo sapiens
taagtcttaatagtc

SEQ ID NO: 263636 - DNA, 15 bp, Homo sapiens
ctaagtcttaatagt

SEQ ID NO: 263637 - DNA, 15 bp, Homo sapiens
actaagtcttaatag

SEQ ID NO: 263638 - DNA, 15 bp, Homo sapiens
aactaagtcttaata

SEQ ID NO: 263639 - DNA, 15 bp, Homo sapiens
taactaagtcttaat

SEQ ID NO: 263640 - DNA, 15 bp, Homo sapiens
ataactaagtcttaa

SEQ ID NO: 263641 - DNA, 15 bp, Homo sapiens
aataactaagtctta

SEQ ID NO: 263642 - DNA, 15 bp, Homo sapiens
taataactaagtctt

SEQ ID NO: 263643 - DNA, 15 bp, Homo sapiens
gtaataactaagtct

SEQ ID NO: 263644 - DNA, 15 bp, Homo sapiens
ggtaataactaagtc

SEQ ID NO: 263645 - DNA, 15 bp, Homo sapiens
cggtaataactaagt

SEQ ID NO: 263646 - DNA, 15 bp, Homo sapiens
gcggtaataactaag

SEQ ID NO: 263647 - DNA, 15 bp, Homo sapiens
agcggtaataactaa

SEQ ID NO: 263648 - DNA, 15 bp, Homo sapiens
aagcggtaataacta

SEQ ID NO: 263649 - DNA, 15 bp, Homo sapiens
taagcggtaataact

SEQ ID NO: 263650 - DNA, 15 bp, Homo sapiens
ataagcggtaataac

SEQ ID NO: 263651 - DNA, 15 bp, Homo sapiens
tataagcggtaataa

SEQ ID NO: 263652 - DNA, 15 bp, Homo sapiens
gtataagcggtaata

SEQ ID NO: 263653 - DNA, 15 bp, Homo sapiens
ggtataagcggtaat

SEQ ID NO: 263654 - DNA, 15 bp, Homo sapiens
gggtataagcggtaa

SEQ ID NO: 263655 - DNA, 15 bp, Homo sapiens
tgggtataagcggta

SEQ ID NO: 263656 - DNA, 15 bp, Homo sapiens
atgggtataagcggt

SEQ ID NO: 263657 - DNA, 15 bp, Homo sapiens
tatgggtataagcgg

SEQ ID NO: 263658 - DNA, 15 bp, Homo sapiens
atatgggtataagcg

SEQ ID NO: 263659 - DNA, 15 bp, Homo sapiens
aatatgggtataagc

SEQ ID NO: 263660 - DNA, 15 bp, Homo sapiens
aaatatgggtataag

SEQ ID NO: 263661 - DNA, 15 bp, Homo sapiens
aaaatatgggtataa

SEQ ID NO: 263662 - DNA, 15 bp, Homo sapiens
taaaatatgggtata

SEQ ID NO: 263663 - DNA, 15 bp, Homo sapiens
ttaaaatatgggtat

SEQ ID NO: 263664 - DNA, 15 bp, Homo sapiens
tttaaaatatgggta

SEQ ID NO: 263665 - DNA, 15 bp, Homo sapiens
ttttaaaatatgggt

SEQ ID NO: 263666 - DNA, 15 bp, Homo sapiens
attttaaaatatggg

SEQ ID NO: 263667 - DNA, 15 bp, Homo sapiens
gattttaaaatatgg

SEQ ID NO: 263668 - DNA, 15 bp, Homo sapiens
ggattttaaaatatg

SEQ ID NO: 263669 - DNA, 15 bp, Homo sapiens
gggattttaaaatat

SEQ ID NO: 263670 - DNA, 15 bp, Homo sapiens
agggattttaaaata

SEQ ID NO: 263671 - DNA, 15 bp, Homo sapiens
tagggattttaaaat

SEQ ID NO: 263672 - DNA, 15 bp, Homo sapiens
ttagggattttaaaa

SEQ ID NO: 263673 - DNA, 15 bp, Homo sapiens
tttagggattttaaa

SEQ ID NO: 263674 - DNA, 15 bp, Homo sapiens
ttttagggattttaa

SEQ ID NO: 263675 - DNA, 15 bp, Homo sapiens
tttttagggatttta

SEQ ID NO: 263676 - DNA, 15 bp, Homo sapiens
atttttagggatttt

SEQ ID NO: 263677 - DNA, 15 bp, Homo sapiens
catttttagggattt

SEQ ID NO: 263678 - DNA, 15 bp, Homo sapiens
acatttttagggatt

SEQ ID NO: 263679 - DNA, 15 bp, Homo sapiens
cacatttttagggat

SEQ ID NO: 263680 - DNA, 15 bp, Homo sapiens
acacatttttaggga

SEQ ID NO: 263681 - DNA, 15 bp, Homo sapiens
aacacatttttaggg

SEQ ID NO: 263682 - DNA, 15 bp, Homo sapiens
gaacacatttttagg

SEQ ID NO: 263683 - DNA, 15 bp, Homo sapiens
ggaacacatttttag

SEQ ID NO: 263684 - DNA, 15 bp, Homo sapiens
aggaacacattttta

SEQ ID NO: 263685 - DNA, 15 bp, Homo sapiens
aaggaacacattttt

SEQ ID NO: 263686 - DNA, 15 bp, Homo sapiens
taaggaacacatttt

SEQ ID NO: 263687 - DNA, 15 bp, Homo sapiens
ttaaggaacacattt

SEQ ID NO: 263688 - DNA, 15 bp, Homo sapiens
gttaaggaacacatt

SEQ ID NO: 263689 - DNA, 15 bp, Homo sapiens
agttaaggaacacat

SEQ ID NO: 263690 - DNA, 15 bp, Homo sapiens
aagttaaggaacaca

SEQ ID NO: 263691 - DNA, 15 bp, Homo sapiens
aaagttaaggaacac

SEQ ID NO: 263692 - DNA, 15 bp, Homo sapiens
aaaagttaaggaaca

SEQ ID NO: 263693 - DNA, 15 bp, Homo sapiens
aaaaagttaaggaac

SEQ ID NO: 263694 - DNA, 15 bp, Homo sapiens
taaaaagttaaggaa

SEQ ID NO: 263695 - DNA, 15 bp, Homo sapiens
ttaaaaagttaagga

SEQ ID NO: 263696 - DNA, 15 bp, Homo sapiens
gttaaaaagttaagg

SEQ ID NO: 263697 - DNA, 15 bp, Homo sapiens
agttaaaaagttaag

SEQ ID NO: 263698 - DNA, 15 bp, Homo sapiens
cagttaaaaagttaa

SEQ ID NO: 263699 - DNA, 15 bp, Homo sapiens
tcagttaaaaagtta

SEQ ID NO: 263700 - DNA, 15 bp, Homo sapiens
atcagttaaaaagtt

SEQ ID NO: 263701 - DNA, 15 bp, Homo sapiens
catcagttaaaaagt

SEQ ID NO: 263702 - DNA, 15 bp, Homo sapiens
acatcagttaaaaag

SEQ ID NO: 263703 - DNA, 15 bp, Homo sapiens
aacatcagttaaaaa

SEQ ID NO: 263704 - DNA, 15 bp, Homo sapiens
aaacatcagttaaaa

SEQ ID NO: 263705 - DNA, 15 bp, Homo sapiens
cacatcttgtcattt

SEQ ID NO: 263706 - DNA, 15 bp, Homo sapiens
ccacatcttgtcatt

SEQ ID NO: 263707 - DNA, 15 bp, Homo sapiens
accacatcttgtcat

SEQ ID NO: 263708 - DNA, 15 bp, Homo sapiens
taccacatcttgtca

SEQ ID NO: 263709 - DNA, 15 bp, Homo sapiens
ttaccacatcttgtc

SEQ ID NO: 263710 - DNA, 15 bp, Homo sapiens
tttaccacatcttgt

SEQ ID NO: 263711 - DNA, 15 bp, Homo sapiens
atttaccacatcttg

SEQ ID NO: 263712 - DNA, 15 bp, Homo sapiens
catttaccacatctt

SEQ ID NO: 263713 - DNA, 15 bp, Homo sapiens
tcatttaccacatct

SEQ ID NO: 263714 - DNA, 15 bp, Homo sapiens
ttcatttaccacatc

SEQ ID NO: 263715 - DNA, 15 bp, Homo sapiens
tttcatttaccacat

SEQ ID NO: 263716 - DNA, 15 bp, Homo sapiens
ttttcatttaccaca

SEQ ID NO: 263717 - DNA, 15 bp, Homo sapiens
gttttcatttaccac

SEQ ID NO: 263718 - DNA, 15 bp, Homo sapiens
agttttcatttacca

SEQ ID NO: 263719 - DNA, 15 bp, Homo sapiens
gagttttcatttacc

SEQ ID NO: 263720 - DNA, 15 bp, Homo sapiens
tgagttttcatttac

SEQ ID NO: 263721 - DNA, 15 bp, Homo sapiens
gtgagttttcattta

SEQ ID NO: 263722 - DNA, 15 bp, Homo sapiens
tgtgagttttcattt

SEQ ID NO: 263723 - DNA, 15 bp, Homo sapiens
gtgtgagttttcatt

SEQ ID NO: 263724 - DNA, 15 bp, Homo sapiens
tgtgtgagttttcat

SEQ ID NO: 263725 - DNA, 15 bp, Homo sapiens
atgtgtgagttttca

SEQ ID NO: 263726 - DNA, 15 bp, Homo sapiens
aatgtgtgagttttc

SEQ ID NO: 263727 - DNA, 15 bp, Homo sapiens
gaatgtgtgagtttt

SEQ ID NO: 263728 - DNA, 15 bp, Homo sapiens
agaatgtgtgagttt

SEQ ID NO: 263729 - DNA, 15 bp, Homo sapiens
tagaatgtgtgagtt

SEQ ID NO: 263730 - DNA, 15 bp, Homo sapiens
atagaatgtgtgagt

SEQ ID NO: 263731 - DNA, 15 bp, Homo sapiens
tatagaatgtgtgag

SEQ ID NO: 263732 - DNA, 15 bp, Homo sapiens
atatagaatgtgtga

SEQ ID NO: 263733 - DNA, 15 bp, Homo sapiens
tatatagaatgtgtg

SEQ ID NO: 263734 - DNA, 15 bp, Homo sapiens
gtatatagaatgtgt

SEQ ID NO: 263735 - DNA, 15 bp, Homo sapiens
tgtatatagaatgtg

SEQ ID NO: 263736 - DNA, 15 bp, Homo sapiens
atgtatatagaatgt

SEQ ID NO: 263737 - DNA, 15 bp, Homo sapiens
aatgtatatagaatg

SEQ ID NO: 263738 - DNA, 15 bp, Homo sapiens
taatgtatatagaat

SEQ ID NO: 263739 - DNA, 15 bp, Homo sapiens
ttaatgtatatagaa

SEQ ID NO: 263740 - DNA, 15 bp, Homo sapiens
tttaatgtatataga

SEQ ID NO: 263741 - DNA, 15 bp, Homo sapiens
atttaatgtatatag

SEQ ID NO: 263742 - DNA, 15 bp, Homo sapiens
tatttaatgtatata

SEQ ID NO: 263743 - DNA, 15 bp, Homo sapiens
atatttaatgtatat

SEQ ID NO: 263744 - DNA, 15 bp, Homo sapiens
catatttaatgtata

SEQ ID NO: 263745 - DNA, 15 bp, Homo sapiens
acatatttaatgtat

SEQ ID NO: 263746 - DNA, 15 bp, Homo sapiens
tacatatttaatgta

SEQ ID NO: 263747 - DNA, 15 bp, Homo sapiens
ttacatatttaatgt

SEQ ID NO: 263748 - DNA, 15 bp, Homo sapiens
cttacatatttaatg

SEQ ID NO: 263749 - DNA, 15 bp, Homo sapiens
gcttacatatttaat

SEQ ID NO: 263750 - DNA, 15 bp, Homo sapiens
tgcttacatatttaa

SEQ ID NO: 263751 - DNA, 15 bp, Homo sapiens
atgcttacatattta

SEQ ID NO: 263752 - DNA, 15 bp, Homo sapiens
catgcttacatattt

SEQ ID NO: 263753 - DNA, 15 bp, Homo sapiens
tcatgcttacatatt

SEQ ID NO: 263754 - DNA, 15 bp, Homo sapiens
gtcatgcttacatat

SEQ ID NO: 263755 - DNA, 15 bp, Homo sapiens
agtcatgcttacata

SEQ ID NO: 263756 - DNA, 15 bp, Homo sapiens
cagtcatgcttacat

SEQ ID NO: 263757 - DNA, 15 bp, Homo sapiens
tcagtcatgcttaca

SEQ ID NO: 263758 - DNA, 15 bp, Homo sapiens
atcagtcatgcttac

SEQ ID NO: 263759 - DNA, 15 bp, Homo sapiens
tatcagtcatgctta

SEQ ID NO: 263760 - DNA, 15 bp, Homo sapiens
ttatcagtcatgctt

SEQ ID NO: 263761 - DNA, 15 bp, Homo sapiens
tttatcagtcatgct

SEQ ID NO: 263762 - DNA, 15 bp, Homo sapiens
ttttatcagtcatgc

SEQ ID NO: 263763 - DNA, 15 bp, Homo sapiens
attttatcagtcatg

SEQ ID NO: 263764 - DNA, 15 bp, Homo sapiens
tattttatcagtcat

SEQ ID NO: 263765 - DNA, 15 bp, Homo sapiens
ctattttatcagtca

SEQ ID NO: 263766 - DNA, 15 bp, Homo sapiens
gctattttatcagtc

SEQ ID NO: 263767 - DNA, 15 bp, Homo sapiens
agctattttatcagt

SEQ ID NO: 263768 - DNA, 15 bp, Homo sapiens
tagctattttatcag

SEQ ID NO: 263769 - DNA, 15 bp, Homo sapiens
atagctattttatca

SEQ ID NO: 263770 - DNA, 15 bp, Homo sapiens
gatagctattttatc

SEQ ID NO: 263771 - DNA, 15 bp, Homo sapiens
agatagctattttat

SEQ ID NO: 263772 - DNA, 15 bp, Homo sapiens
aagatagctatttta

SEQ ID NO: 263773 - DNA, 15 bp, Homo sapiens
aaagatagctatttt

SEQ ID NO: 263774 - DNA, 15 bp, Homo sapiens
aaaagatagctattt

SEQ ID NO: 263775 - DNA, 15 bp, Homo sapiens
caaaagatagctatt

SEQ ID NO: 263776 - DNA, 15 bp, Homo sapiens
tcaaaagatagctat

SEQ ID NO: 263777 - DNA, 15 bp, Homo sapiens
atcaaaagatagcta

SEQ ID NO: 263778 - DNA, 15 bp, Homo sapiens
tatcaaaagatagct

SEQ ID NO: 263779 - DNA, 15 bp, Homo sapiens
gtatcaaaagatagc

SEQ ID NO: 263780 - DNA, 15 bp, Homo sapiens
agtatcaaaagatag

SEQ ID NO: 263781 - DNA, 15 bp, Homo sapiens
cagtatcaaaagata

SEQ ID NO: 263782 - DNA, 15 bp, Homo sapiens
tcagtatcaaaagat

SEQ ID NO: 263783 - DNA, 15 bp, Homo sapiens
gtcagtatcaaaaga

SEQ ID NO: 263784 - DNA, 15 bp, Homo sapiens
tgtcagtatcaaaag

SEQ ID NO: 263785 - DNA, 15 bp, Homo sapiens
ttgtcagtatcaaaa

SEQ ID NO: 263786 - DNA, 15 bp, Homo sapiens
cttgtcagtatcaaa

SEQ ID NO: 263787 - DNA, 15 bp, Homo sapiens
ccttgtcagtatcaa

SEQ ID NO: 263788 - DNA, 15 bp, Homo sapiens
tccttgtcagtatca

SEQ ID NO: 263789 - DNA, 15 bp, Homo sapiens
ttccttgtcagtatc

SEQ ID NO: 263790 - DNA, 15 bp, Homo sapiens
cttccttgtcagtat

SEQ ID NO: 263791 - DNA, 15 bp, Homo sapiens
tcttccttgtcagta

SEQ ID NO: 263792 - DNA, 15 bp, Homo sapiens
ttcttccttgtcagt

SEQ ID NO: 263793 - DNA, 15 bp, Homo sapiens
tttcttccttgtcag

SEQ ID NO: 263794 - DNA, 15 bp, Homo sapiens
ttttcttccttgtca

SEQ ID NO: 263795 - DNA, 15 bp, Homo sapiens
gttttcttccttgtc

SEQ ID NO: 263796 - DNA, 15 bp, Homo sapiens
tgttttcttccttgt

SEQ ID NO: 263797 - DNA, 15 bp, Homo sapiens
ctgttttcttccttg

SEQ ID NO: 263798 - DNA, 15 bp, Homo sapiens
tctgttttcttcctt

SEQ ID NO: 263799 - DNA, 15 bp, Homo sapiens
ttctgttttcttcct

SEQ ID NO: 263800 - DNA, 15 bp, Homo sapiens
tttctgttttcttcc

SEQ ID NO: 263801 - DNA, 15 bp, Homo sapiens
atttctgttttcttc

SEQ ID NO: 263802 - DNA, 15 bp, Homo sapiens
catttctgttttctt

SEQ ID NO: 263803 - DNA, 15 bp, Homo sapiens
tcatttctgttttct

SEQ ID NO: 263804 - DNA, 15 bp, Homo sapiens
ttcatttctgttttc

SEQ ID NO: 263805 - DNA, 15 bp, Homo sapiens
cttcatttctgtttt

SEQ ID NO: 263806 - DNA, 15 bp, Homo sapiens
ccttcatttctgttt

SEQ ID NO: 263807 - DNA, 15 bp, Homo sapiens
tccttcatttctgtt

SEQ ID NO: 263808 - DNA, 15 bp, Homo sapiens
ttccttcatttctgt

SEQ ID NO: 263809 - DNA, 15 bp, Homo sapiens
attccttcatttctg

SEQ ID NO: 263810 - DNA, 15 bp, Homo sapiens
tattccttcatttct

SEQ ID NO: 263811 - DNA, 15 bp, Homo sapiens
ctattccttcatttc

SEQ ID NO: 263812 - DNA, 15 bp, Homo sapiens
gctattccttcattt

SEQ ID NO: 263813 - DNA, 15 bp, Homo sapiens
tgctattccttcatt

SEQ ID NO: 263814 - DNA, 15 bp, Homo sapiens
ttgctattccttcat

SEQ ID NO: 263815 - DNA, 15 bp, Homo sapiens
tttgctattccttca

SEQ ID NO: 263816 - DNA, 15 bp, Homo sapiens
atttgctattccttc

SEQ ID NO: 263817 - DNA, 15 bp, Homo sapiens
aatttgctattcctt

SEQ ID NO: 263818 - DNA, 15 bp, Homo sapiens
aaatttgctattcct

SEQ ID NO: 263819 - DNA, 15 bp, Homo sapiens
aaaatttgctattcc

SEQ ID NO: 263820 - DNA, 15 bp, Homo sapiens
taaaatttgctattc

SEQ ID NO: 263821 - DNA, 15 bp, Homo sapiens
ttaaaatttgctatt

SEQ ID NO: 263822 - DNA, 15 bp, Homo sapiens
tttaaaatttgctat

SEQ ID NO: 263823 - DNA, 15 bp, Homo sapiens
ttttaaaatttgcta

SEQ ID NO: 263824 - DNA, 15 bp, Homo sapiens
tttttaaaatttgct

SEQ ID NO: 263825 - DNA, 15 bp, Homo sapiens
atttttaaaatttgc

SEQ ID NO: 263826 - DNA, 15 bp, Homo sapiens
aatttttaaaatttg

SEQ ID NO: 263827 - DNA, 15 bp, Homo sapiens
caatttttaaaattt

SEQ ID NO: 263828 - DNA, 15 bp, Homo sapiens
gcaatttttaaaatt

SEQ ID NO: 263829 - DNA, 15 bp, Homo sapiens
tgcaatttttaaaat

SEQ ID NO: 263830 - DNA, 15 bp, Homo sapiens
atgcaatttttaaaa

SEQ ID NO: 263831 - DNA, 15 bp, Homo sapiens
aatgcaatttttaaa

SEQ ID NO: 263832 - DNA, 15 bp, Homo sapiens
gaatgcaatttttaa

SEQ ID NO: 263833 - DNA, 15 bp, Homo sapiens
ggaatgcaattttta

SEQ ID NO: 263834 - DNA, 15 bp, Homo sapiens
tggaatgcaattttt

SEQ ID NO: 263835 - DNA, 15 bp, Homo sapiens
ctggaatgcaatttt

SEQ ID NO: 263836 - DNA, 15 bp, Homo sapiens
actggaatgcaattt

SEQ ID NO: 263837 - DNA, 15 bp, Homo sapiens
aactggaatgcaatt

SEQ ID NO: 263838 - DNA, 15 bp, Homo sapiens
caactggaatgcaat

SEQ ID NO: 263839 - DNA, 15 bp, Homo sapiens
gcaactggaatgcaa

SEQ ID NO: 263840 - DNA, 15 bp, Homo sapiens
agcaactggaatgca

SEQ ID NO: 263841 - DNA, 15 bp, Homo sapiens
aagcaactggaatgc

SEQ ID NO: 263842 - DNA, 15 bp, Homo sapiens
caagcaactggaatg

SEQ ID NO: 263843 - DNA, 15 bp, Homo sapiens
tcaagcaactggaat

SEQ ID NO: 263844 - DNA, 15 bp, Homo sapiens
ttcaagcaactggaa

SEQ ID NO: 263845 - DNA, 15 bp, Homo sapiens
tttcaagcaactgga

SEQ ID NO: 263846 - DNA, 15 bp, Homo sapiens
ctttcaagcaactgg

SEQ ID NO: 263847 - DNA, 15 bp, Homo sapiens
gctttcaagcaactg

SEQ ID NO: 263848 - DNA, 15 bp, Homo sapiens
agctttcaagcaact

SEQ ID NO: 263849 - DNA, 15 bp, Homo sapiens
aagctttcaagcaac

SEQ ID NO: 263850 - DNA, 15 bp, Homo sapiens
caagctttcaagcaa

SEQ ID NO: 263851 - DNA, 15 bp, Homo sapiens
acaagctttcaagca

SEQ ID NO: 263852 - DNA, 15 bp, Homo sapiens
cacaagctttcaagc

SEQ ID NO: 263853 - DNA, 15 bp, Homo sapiens
tcacaagctttcaag

SEQ ID NO: 263854 - DNA, 15 bp, Homo sapiens
atcacaagctttcaa

SEQ ID NO: 263855 - DNA, 15 bp, Homo sapiens
gatcacaagctttca

SEQ ID NO: 263856 - DNA, 15 bp, Homo sapiens
tgatcacaagctttc

SEQ ID NO: 263857 - DNA, 15 bp, Homo sapiens
ctgatcacaagcttt

SEQ ID NO: 263858 - DNA, 15 bp, Homo sapiens
tctgatcacaagctt

SEQ ID NO: 263859 - DNA, 15 bp, Homo sapiens
atctgatcacaagct

SEQ ID NO: 263860 - DNA, 15 bp, Homo sapiens
catctgatcacaagc

SEQ ID NO: 263861 - DNA, 15 bp, Homo sapiens
gcatctgatcacaag

SEQ ID NO: 263862 - DNA, 15 bp, Homo sapiens
tgcatctgatcacaa

SEQ ID NO: 263863 - DNA, 15 bp, Homo sapiens
ttgcatctgatcaca

SEQ ID NO: 263864 - DNA, 15 bp, Homo sapiens
attgcatctgatcac

SEQ ID NO: 263865 - DNA, 15 bp, Homo sapiens
tattgcatctgatca

SEQ ID NO: 263866 - DNA, 15 bp, Homo sapiens
ttattgcatctgatc

SEQ ID NO: 263867 - DNA, 15 bp, Homo sapiens
tttattgcatctgat

SEQ ID NO: 263868 - DNA, 15 bp, Homo sapiens
atttattgcatctga

SEQ ID NO: 263869 - DNA, 15 bp, Homo sapiens
catttattgcatctg

SEQ ID NO: 263870 - DNA, 15 bp, Homo sapiens
acatttattgcatct

SEQ ID NO: 263871 - DNA, 15 bp, Homo sapiens
aacatttattgcatc

SEQ ID NO: 263872 - DNA, 15 bp, Homo sapiens
aaacatttattgcat

SEQ ID NO: 263873 - DNA, 15 bp, Homo sapiens
aaaacatttattgca

SEQ ID NO: 263874 - DNA, 15 bp, Homo sapiens
aaaaacatttattgc

SEQ ID NO: 263875 - DNA, 15 bp, Homo sapiens
taaaaacatttattg

SEQ ID NO: 263876 - DNA, 15 bp, Homo sapiens
ataaaaacatttatt

SEQ ID NO: 263877 - DNA, 15 bp, Homo sapiens
aataaaaacatttat

SEQ ID NO: 263878 - DNA, 15 bp, Homo sapiens
taataaaaacattta

SEQ ID NO: 263879 - DNA, 15 bp, Homo sapiens
ataataaaaacattt

SEQ ID NO: 263880 - DNA, 15 bp, Homo sapiens
aataataaaaacatt

SEQ ID NO: 263881 - DNA, 15 bp, Homo sapiens
aaataataaaaacat

SEQ ID NO: 263882 - DNA, 15 bp, Homo sapiens
taaataataaaaaca

SEQ ID NO: 263883 - DNA, 15 bp, Homo sapiens
ataaataataaaaac

SEQ ID NO: 263884 - DNA, 15 bp, Homo sapiens
aataaataataaaaa

SEQ ID NO: 263885 - DNA, 15 bp, Homo sapiens
aaataaataataaaa

SEQ ID NO: 263886 - DNA, 15 bp, Homo sapiens
aaaataaataataaa

SEQ ID NO: 263887 - DNA, 15 bp, Homo sapiens
caaaataaataataa

SEQ ID NO: 263888 - DNA, 15 bp, Homo sapiens
acaaaataaataata

SEQ ID NO: 263889 - DNA, 15 bp, Homo sapiens
cacaaaataaataat

SEQ ID NO: 263890 - DNA, 15 bp, Homo sapiens
gcacaaaataaataa

SEQ ID NO: 263891 - DNA, 15 bp, Homo sapiens
tgcacaaaataaata

SEQ ID NO: 263892 - DNA, 15 bp, Homo sapiens
ttgcacaaaataaat

SEQ ID NO: 263893 - DNA, 15 bp, Homo sapiens
tttgcacaaaataaa

SEQ ID NO: 263894 - DNA, 15 bp, Homo sapiens
atttgcacaaaataa

SEQ ID NO: 263895 - DNA, 15 bp, Homo sapiens
tatttgcacaaaata

SEQ ID NO: 263896 - DNA, 15 bp, Homo sapiens
ctatttgcacaaaat

SEQ ID NO: 263897 - DNA, 15 bp, Homo sapiens
cctatttgcacaaaa

SEQ ID NO: 263898 - DNA, 15 bp, Homo sapiens
tcctatttgcacaaa

SEQ ID NO: 263899 - DNA, 15 bp, Homo sapiens
ctcctatttgcacaa

SEQ ID NO: 263900 - DNA, 15 bp, Homo sapiens
tctcctatttgcaca

SEQ ID NO: 263901 - DNA, 15 bp, Homo sapiens
ctctcctatttgcac

SEQ ID NO: 263902 - DNA, 15 bp, Homo sapiens
tctctcctatttgca

SEQ ID NO: 263903 - DNA, 15 bp, Homo sapiens
gtctctcctatttgc

SEQ ID NO: 263904 - DNA, 15 bp, Homo sapiens
agtctctcctatttg

SEQ ID NO: 263905 - DNA, 15 bp, Homo sapiens
tagtctctcctattt

SEQ ID NO: 263906 - DNA, 15 bp, Homo sapiens
atagtctctcctatt

SEQ ID NO: 263907 - DNA, 15 bp, Homo sapiens
aatagtctctcctat

SEQ ID NO: 263908 - DNA, 15 bp, Homo sapiens
taatagtctctccta

SEQ ID NO: 263909 - DNA, 15 bp, Homo sapiens
ttaatagtctctcct

SEQ ID NO: 263910 - DNA, 15 bp, Homo sapiens
cttaatagtctctcc

SEQ ID NO: 263911 - DNA, 15 bp, Homo sapiens
tcttaatagtctctc

SEQ ID NO: 263912 - DNA, 15 bp, Homo sapiens
atcttaatagtctct

SEQ ID NO: 263913 - DNA, 15 bp, Homo sapiens
aatcttaatagtctc

SEQ ID NO: 263914 - DNA, 15 bp, Homo sapiens
caatcttaatagtct

SEQ ID NO: 263915 - DNA, 15 bp, Homo sapiens
acaatcttaatagtc

SEQ ID NO: 263916 - DNA, 15 bp, Homo sapiens
cacaatcttaatagt

SEQ ID NO: 263917 - DNA, 15 bp, Homo sapiens
tcacaatcttaatag

SEQ ID NO: 263918 - DNA, 15 bp, Homo sapiens
atcacaatcttaata

SEQ ID NO: 263919 - DNA, 15 bp, Homo sapiens
aatcacaatcttaat

SEQ ID NO: 263920 - DNA, 15 bp, Homo sapiens
caatcacaatcttaa

SEQ ID NO: 263921 - DNA, 15 bp, Homo sapiens
tcaatcacaatctta

SEQ ID NO: 263922 - DNA, 15 bp, Homo sapiens
ttcaatcacaatctt

SEQ ID NO: 263923 - DNA, 15 bp, Homo sapiens
cttcaatcacaatct

SEQ ID NO: 263924 - DNA, 15 bp, Homo sapiens
tcttcaatcacaatc

SEQ ID NO: 263925 - DNA, 15 bp, Homo sapiens
atcttcaatcacaat

SEQ ID NO: 263926 - DNA, 15 bp, Homo sapiens
aatcttcaatcacaa

SEQ ID NO: 263927 - DNA, 15 bp, Homo sapiens
taatcttcaatcaca

SEQ ID NO: 263928 - DNA, 15 bp, Homo sapiens
ataatcttcaatcac

SEQ ID NO: 263929 - DNA, 15 bp, Homo sapiens
cataatcttcaatca

SEQ ID NO: 263930 - DNA, 15 bp, Homo sapiens
acataatcttcaatc

SEQ ID NO: 263931 - DNA, 15 bp, Homo sapiens
cacataatcttcaat

SEQ ID NO: 263932 - DNA, 15 bp, Homo sapiens
gcacataatcttcaa

SEQ ID NO: 263933 - DNA, 15 bp, Homo sapiens
tgcacataatcttca

SEQ ID NO: 263934 - DNA, 15 bp, Homo sapiens
ttgcacataatcttc

SEQ ID NO: 263935 - DNA, 15 bp, Homo sapiens
gttgcacataatctt

SEQ ID NO: 263936 - DNA, 15 bp, Homo sapiens
tgttgcacataatct

SEQ ID NO: 263937 - DNA, 15 bp, Homo sapiens
gtgttgcacataatc

SEQ ID NO: 263938 - DNA, 15 bp, Homo sapiens
agtgttgcacataat

SEQ ID NO: 263939 - DNA, 15 bp, Homo sapiens
aagtgttgcacataa

SEQ ID NO: 263940 - DNA, 15 bp, Homo sapiens
caagtgttgcacata

SEQ ID NO: 263941 - DNA, 15 bp, Homo sapiens
tcaagtgttgcacat

SEQ ID NO: 263942 - DNA, 15 bp, Homo sapiens
ctcaagtgttgcaca

SEQ ID NO: 263943 - DNA, 15 bp, Homo sapiens
actcaagtgttgcac

SEQ ID NO: 263944 - DNA, 15 bp, Homo sapiens
cactcaagtgttgca

SEQ ID NO: 263945 - DNA, 15 bp, Homo sapiens
ccactcaagtgttgc

SEQ ID NO: 263946 - DNA, 15 bp, Homo sapiens
gccactcaagtgttg

SEQ ID NO: 263947 - DNA, 15 bp, Homo sapiens
agccactcaagtgtt

SEQ ID NO: 263948 - DNA, 15 bp, Homo sapiens
tagccactcaagtgt

SEQ ID NO: 263949 - DNA, 15 bp, Homo sapiens
atagccactcaagtg

SEQ ID NO: 263950 - DNA, 15 bp, Homo sapiens
gatagccactcaagt

SEQ ID NO: 263951 - DNA, 15 bp, Homo sapiens
tgatagccactcaag

SEQ ID NO: 263952 - DNA, 15 bp, Homo sapiens
gtgatagccactcaa

SEQ ID NO: 263953 - DNA, 15 bp, Homo sapiens
agtgatagccactca

SEQ ID NO: 263954 - DNA, 15 bp, Homo sapiens
aagtgatagccactc

SEQ ID NO: 263955 - DNA, 15 bp, Homo sapiens
gaagtgatagccact

SEQ ID NO: 263956 - DNA, 15 bp, Homo sapiens
tgaagtgatagccac

SEQ ID NO: 263957 - DNA, 15 bp, Homo sapiens
ttgaagtgatagcca

SEQ ID NO: 263958 - DNA, 15 bp, Homo sapiens
tttgaagtgatagcc

SEQ ID NO: 263959 - DNA, 15 bp, Homo sapiens
gtttgaagtgatagc

SEQ ID NO: 263960 - DNA, 15 bp, Homo sapiens
agtttgaagtgatag

SEQ ID NO: 263961 - DNA, 15 bp, Homo sapiens
cagtttgaagtgata

SEQ ID NO: 263962 - DNA, 15 bp, Homo sapiens
tcagtttgaagtgat

SEQ ID NO: 263963 - DNA, 15 bp, Homo sapiens
ttcagtttgaagtga

SEQ ID NO: 263964 - DNA, 15 bp, Homo sapiens
tttcagtttgaagtg

SEQ ID NO: 263965 - DNA, 15 bp, Homo sapiens
atttcagtttgaagt

SEQ ID NO: 263966 - DNA, 15 bp, Homo sapiens
aatttcagtttgaag

SEQ ID NO: 263967 - DNA, 15 bp, Homo sapiens
aaatttcagtttgaa

SEQ ID NO: 263968 - DNA, 15 bp, Homo sapiens
caaatttcagtttga

SEQ ID NO: 263969 - DNA, 15 bp, Homo sapiens
tcaaatttcagtttg

SEQ ID NO: 263970 - DNA, 15 bp, Homo sapiens
gtcaaatttcagttt

SEQ ID NO: 263971 - DNA, 15 bp, Homo sapiens
ggtcaaatttcagtt

SEQ ID NO: 263972 - DNA, 15 bp, Homo sapiens
gggtcaaatttcagt

SEQ ID NO: 263973 - DNA, 15 bp, Homo sapiens
tgggtcaaatttcag

SEQ ID NO: 263974 - DNA, 15 bp, Homo sapiens
ctgggtcaaatttca

SEQ ID NO: 263975 - DNA, 15 bp, Homo sapiens
tctgggtcaaatttc

SEQ ID NO: 263976 - DNA, 15 bp, Homo sapiens
ttctgggtcaaattt

SEQ ID NO: 263977 - DNA, 15 bp, Homo sapiens
gttctgggtcaaatt

SEQ ID NO: 263978 - DNA, 15 bp, Homo sapiens
agttctgggtcaaat

SEQ ID NO: 263979 - DNA, 15 bp, Homo sapiens
tagttctgggtcaaa

SEQ ID NO: 263980 - DNA, 15 bp, Homo sapiens
gtagttctgggtcaa

SEQ ID NO: 263981 - DNA, 15 bp, Homo sapiens
agtagttctgggtca

SEQ ID NO: 263982 - DNA, 15 bp, Homo sapiens
aagtagttctgggtc

SEQ ID NO: 263983 - DNA, 15 bp, Homo sapiens
aaagtagttctgggt

SEQ ID NO: 263984 - DNA, 15 bp, Homo sapiens
aaaagtagttctggg

SEQ ID NO: 263985 - DNA, 15 bp, Homo sapiens
gaaaagtagttctgg

SEQ ID NO: 263986 - DNA, 15 bp, Homo sapiens
tgaaaagtagttctg

SEQ ID NO: 263987 - DNA, 15 bp, Homo sapiens
ttgaaaagtagttct

SEQ ID NO: 263988 - DNA, 15 bp, Homo sapiens
gttgaaaagtagttc

SEQ ID NO: 263989 - DNA, 15 bp, Homo sapiens
tgttgaaaagtagtt

SEQ ID NO: 263990 - DNA, 15 bp, Homo sapiens
ttgttgaaaagtagt

SEQ ID NO: 263991 - DNA, 15 bp, Homo sapiens
tttgttgaaaagtag

SEQ ID NO: 263992 - DNA, 15 bp, Homo sapiens
gtttgttgaaaagta

SEQ ID NO: 263993 - DNA, 15 bp, Homo sapiens
tgtttgttgaaaagt

SEQ ID NO: 263994 - DNA, 15 bp, Homo sapiens
ttgtttgttgaaaag

SEQ ID NO: 263995 - DNA, 15 bp, Homo sapiens
attgtttgttgaaaa

SEQ ID NO: 263996 - DNA, 15 bp, Homo sapiens
aattgtttgttgaaa

SEQ ID NO: 263997 - DNA, 15 bp, Homo sapiens
gaattgtttgttgaa

SEQ ID NO: 263998 - DNA, 15 bp, Homo sapiens
ggaattgtttgttga

SEQ ID NO: 263999 - DNA, 15 bp, Homo sapiens
tggaattgtttgttg

SEQ ID NO: 264000 - DNA, 15 bp, Homo sapiens
ctggaattgtttgtt

SEQ ID NO: 264001 - DNA, 15 bp, Homo sapiens
actggaattgtttgt

SEQ ID NO: 264002 - DNA, 15 bp, Homo sapiens
tactggaattgtttg

SEQ ID NO: 264003 - DNA, 15 bp, Homo sapiens
gtactggaattgttt

SEQ ID NO: 264004 - DNA, 15 bp, Homo sapiens
ggtactggaattgtt

SEQ ID NO: 264005 - DNA, 15 bp, Homo sapiens
tggtactggaattgt

SEQ ID NO: 264006 - DNA, 15 bp, Homo sapiens
ttggtactggaattg

SEQ ID NO: 264007 - DNA, 15 bp, Homo sapiens
tttggtactggaatt

SEQ ID NO: 264008 - DNA, 15 bp, Homo sapiens
ttttggtactggaat

SEQ ID NO: 264009 - DNA, 15 bp, Homo sapiens
attttggtactggaa

SEQ ID NO: 264010 - DNA, 15 bp, Homo sapiens
gattttggtactgga

SEQ ID NO: 264011 - DNA, 15 bp, Homo sapiens
cgattttggtactgg

SEQ ID NO: 264012 - DNA, 15 bp, Homo sapiens
acgattttggtactg

SEQ ID NO: 264013 - DNA, 15 bp, Homo sapiens
tacgattttggtact

SEQ ID NO: 264014 - DNA, 15 bp, Homo sapiens
atacgattttggtac

SEQ ID NO: 264015 - DNA, 15 bp, Homo sapiens
aatacgattttggta

SEQ ID NO: 264016 - DNA, 15 bp, Homo sapiens
caatacgattttggt

SEQ ID NO: 264017 - DNA, 15 bp, Homo sapiens
gcaatacgattttgg

SEQ ID NO: 264018 - DNA, 15 bp, Homo sapiens
agcaatacgattttg

SEQ ID NO: 264019 - DNA, 15 bp, Homo sapiens
cagcaatacgatttt

SEQ ID NO: 264020 - DNA, 15 bp, Homo sapiens
gcagcaatacgattt

SEQ ID NO: 264021 - DNA, 15 bp, Homo sapiens
agcagcaatacgatt

SEQ ID NO: 264022 - DNA, 15 bp, Homo sapiens
cagcagcaatacgat

SEQ ID NO: 264023 - DNA, 15 bp, Homo sapiens
tcagcagcaatacga

SEQ ID NO: 264024 - DNA, 15 bp, Homo sapiens
ttcagcagcaatacg

SEQ ID NO: 264025 - DNA, 15 bp, Homo sapiens
attcagcagcaatac

SEQ ID NO: 264026 - DNA, 15 bp, Homo sapiens
aattcagcagcaata

SEQ ID NO: 264027 - DNA, 15 bp, Homo sapiens
aaattcagcagcaat

SEQ ID NO: 264028 - DNA, 15 bp, Homo sapiens
taaattcagcagcaa

SEQ ID NO: 264029 - DNA, 15 bp, Homo sapiens
ttaaattcagcagca

SEQ ID NO: 264030 - DNA, 15 bp, Homo sapiens
gttaaattcagcagc

SEQ ID NO: 264031 - DNA, 15 bp, Homo sapiens
tgttaaattcagcag

SEQ ID NO: 264032 - DNA, 15 bp, Homo sapiens
gtgttaaattcagca

SEQ ID NO: 264033 - DNA, 15 bp, Homo sapiens
ggtgttaaattcagc

SEQ ID NO: 264034 - DNA, 15 bp, Homo sapiens
gggtgttaaattcag

SEQ ID NO: 264035 - DNA, 15 bp, Homo sapiens
agggtgttaaattca

SEQ ID NO: 264036 - DNA, 15 bp, Homo sapiens
gagggtgttaaattc

SEQ ID NO: 264037 - DNA, 15 bp, Homo sapiens
agagggtgttaaatt

SEQ ID NO: 264038 - DNA, 15 bp, Homo sapiens
tagagggtgttaaat

SEQ ID NO: 264039 - DNA, 15 bp, Homo sapiens
atagagggtgttaaa

SEQ ID NO: 264040 - DNA, 15 bp, Homo sapiens
gatagagggtgttaa

SEQ ID NO: 264041 - DNA, 15 bp, Homo sapiens
tgatagagggtgtta

SEQ ID NO: 264042 - DNA, 15 bp, Homo sapiens
gtgatagagggtgtt

SEQ ID NO: 264043 - DNA, 15 bp, Homo sapiens
agtgatagagggtgt

SEQ ID NO: 264044 - DNA, 15 bp, Homo sapiens
cagtgatagagggtg

SEQ ID NO: 264045 - DNA, 15 bp, Homo sapiens
ccagtgatagagggt

SEQ ID NO: 264046 - DNA, 15 bp, Homo sapiens
gccagtgatagaggg

SEQ ID NO: 264047 - DNA, 15 bp, Homo sapiens
tgccagtgatagagg

SEQ ID NO: 264048 - DNA, 15 bp, Homo sapiens
atgccagtgatagag

SEQ ID NO: 264049 - DNA, 15 bp, Homo sapiens
gatgccagtgataga

SEQ ID NO: 264050 - DNA, 15 bp, Homo sapiens
ggatgccagtgatag

SEQ ID NO: 264051 - DNA, 15 bp, Homo sapiens
gggatgccagtgata

SEQ ID NO: 264052 - DNA, 15 bp, Homo sapiens
ggggatgccagtgat

SEQ ID NO: 264053 - DNA, 15 bp, Homo sapiens
aggggatgccagtga

SEQ ID NO: 264054 - DNA, 15 bp, Homo sapiens
aaggggatgccagtg

SEQ ID NO: 264055 - DNA, 15 bp, Homo sapiens
gaaggggatgccagt

SEQ ID NO: 264056 - DNA, 15 bp, Homo sapiens
agaaggggatgccag

SEQ ID NO: 264057 - DNA, 15 bp, Homo sapiens
cctaaaatatttatt

SEQ ID NO: 264058 - DNA, 15 bp, Homo sapiens
gcctaaaatatttat

SEQ ID NO: 264059 - DNA, 15 bp, Homo sapiens
agcctaaaatattta

SEQ ID NO: 264060 - DNA, 15 bp, Homo sapiens
aagcctaaaatattt

SEQ ID NO: 264061 - DNA, 15 bp, Homo sapiens
caagcctaaaatatt

SEQ ID NO: 264062 - DNA, 15 bp, Homo sapiens
tcaagcctaaaatat

SEQ ID NO: 264063 - DNA, 15 bp, Homo sapiens
ttcaagcctaaaata

SEQ ID NO: 264064 - DNA, 15 bp, Homo sapiens
attcaagcctaaaat

SEQ ID NO: 264065 - DNA, 15 bp, Homo sapiens
tattcaagcctaaaa

SEQ ID NO: 264066 - DNA, 15 bp, Homo sapiens
gtattcaagcctaaa

SEQ ID NO: 264067 - DNA, 15 bp, Homo sapiens
agtattcaagcctaa

SEQ ID NO: 264068 - DNA, 15 bp, Homo sapiens
tagtattcaagccta

SEQ ID NO: 264069 - DNA, 15 bp, Homo sapiens
ctagtattcaagcct

SEQ ID NO: 264070 - DNA, 15 bp, Homo sapiens
actagtattcaagcc

SEQ ID NO: 264071 - DNA, 15 bp, Homo sapiens
cactagtattcaagc

SEQ ID NO: 264072 - DNA, 15 bp, Homo sapiens
acactagtattcaag

SEQ ID NO: 264073 - DNA, 15 bp, Homo sapiens
aacactagtattcaa

SEQ ID NO: 264074 - DNA, 15 bp, Homo sapiens
taacactagtattca

SEQ ID NO: 264075 - DNA, 15 bp, Homo sapiens
ataacactagtattc

SEQ ID NO: 264076 - DNA, 15 bp, Homo sapiens
aataacactagtatt

SEQ ID NO: 264077 - DNA, 15 bp, Homo sapiens
aaataacactagtat

SEQ ID NO: 264078 - DNA, 15 bp, Homo sapiens
aaaataacactagta

SEQ ID NO: 264079 - DNA, 15 bp, Homo sapiens
aaaaataacactagt

SEQ ID NO: 264080 - DNA, 15 bp, Homo sapiens
caaaaataacactag

SEQ ID NO: 264081 - DNA, 15 bp, Homo sapiens
tcaaaaataacacta

SEQ ID NO: 264082 - DNA, 15 bp, Homo sapiens
ttcaaaaataacact

SEQ ID NO: 264083 - DNA, 15 bp, Homo sapiens
tttcaaaaataacac

SEQ ID NO: 264084 - DNA, 15 bp, Homo sapiens
atttcaaaaataaca

SEQ ID NO: 264085 - DNA, 15 bp, Homo sapiens
catttcaaaaataac

SEQ ID NO: 264086 - DNA, 15 bp, Homo sapiens
acatttcaaaaataa

SEQ ID NO: 264087 - DNA, 15 bp, Homo sapiens
tacatttcaaaaata

SEQ ID NO: 264088 - DNA, 15 bp, Homo sapiens
ttacatttcaaaaat

SEQ ID NO: 264089 - DNA, 15 bp, Homo sapiens
tttacatttcaaaaa

SEQ ID NO: 264090 - DNA, 15 bp, Homo sapiens
ttttacatttcaaaa

SEQ ID NO: 264091 - DNA, 15 bp, Homo sapiens
tttttacatttcaaa

SEQ ID NO: 264092 - DNA, 15 bp, Homo sapiens
ctttttacatttcaa

SEQ ID NO: 264093 - DNA, 15 bp, Homo sapiens
cctttttacatttca

SEQ ID NO: 264094 - DNA, 15 bp, Homo sapiens
gcctttttacatttc

SEQ ID NO: 264095 - DNA, 15 bp, Homo sapiens
tgcctttttacattt

SEQ ID NO: 264096 - DNA, 15 bp, Homo sapiens
ttgcctttttacatt

SEQ ID NO: 264097 - DNA, 15 bp, Homo sapiens
tttgcctttttacat

SEQ ID NO: 264098 - DNA, 15 bp, Homo sapiens
atttgcctttttaca

SEQ ID NO: 264099 - DNA, 15 bp, Homo sapiens
aatttgcctttttac

SEQ ID NO: 264100 - DNA, 15 bp, Homo sapiens
taatttgccttttta

SEQ ID NO: 264101 - DNA, 15 bp, Homo sapiens
ctaatttgccttttt

SEQ ID NO: 264102 - DNA, 15 bp, Homo sapiens
actaatttgcctttt

SEQ ID NO: 264103 - DNA, 15 bp, Homo sapiens
aactaatttgccttt

SEQ ID NO: 264104 - DNA, 15 bp, Homo sapiens
gaactaatttgcctt

SEQ ID NO: 264105 - DNA, 15 bp, Homo sapiens
agaactaatttgcct

SEQ ID NO: 264106 - DNA, 15 bp, Homo sapiens
tagaactaatttgcc

SEQ ID NO: 264107 - DNA, 15 bp, Homo sapiens
ctagaactaatttgc

SEQ ID NO: 264108 - DNA, 15 bp, Homo sapiens
cctagaactaatttg

SEQ ID NO: 264109 - DNA, 15 bp, Homo sapiens
gcctagaactaattt

SEQ ID NO: 264110 - DNA, 15 bp, Homo sapiens
agcctagaactaatt

SEQ ID NO: 264111 - DNA, 15 bp, Homo sapiens
cagcctagaactaat

SEQ ID NO: 264112 - DNA, 15 bp, Homo sapiens
ccagcctagaactaa

SEQ ID NO: 264113 - DNA, 15 bp, Homo sapiens
accagcctagaacta

SEQ ID NO: 264114 - DNA, 15 bp, Homo sapiens
caccagcctagaact

SEQ ID NO: 264115 - DNA, 15 bp, Homo sapiens
acaccagcctagaac

SEQ ID NO: 264116 - DNA, 15 bp, Homo sapiens
gacaccagcctagaa

SEQ ID NO: 264117 - DNA, 15 bp, Homo sapiens
ggacaccagcctaga

SEQ ID NO: 264118 - DNA, 15 bp, Homo sapiens
gggacaccagcctag

SEQ ID NO: 264119 - DNA, 15 bp, Homo sapiens
tgggacaccagccta

SEQ ID NO: 264120 - DNA, 15 bp, Homo sapiens
atgggacaccagcct

SEQ ID NO: 264121 - DNA, 15 bp, Homo sapiens
aatgggacaccagcc

SEQ ID NO: 264122 - DNA, 15 bp, Homo sapiens
caatgggacaccagc

SEQ ID NO: 264123 - DNA, 15 bp, Homo sapiens
tcaatgggacaccag

SEQ ID NO: 264124 - DNA, 15 bp, Homo sapiens
ttcaatgggacacca

SEQ ID NO: 264125 - DNA, 15 bp, Homo sapiens
attcaatgggacacc

SEQ ID NO: 264126 - DNA, 15 bp, Homo sapiens
aattcaatgggacac

SEQ ID NO: 264127 - DNA, 15 bp, Homo sapiens
aaattcaatgggaca

SEQ ID NO: 264128 - DNA, 15 bp, Homo sapiens
aaaattcaatgggac

SEQ ID NO: 264129 - DNA, 15 bp, Homo sapiens
taaaattcaatggga

SEQ ID NO: 264130 - DNA, 15 bp, Homo sapiens
ttaaaattcaatggg

SEQ ID NO: 264131 - DNA, 15 bp, Homo sapiens
cttaaaattcaatgg

SEQ ID NO: 264132 - DNA, 15 bp, Homo sapiens
gcttaaaattcaatg

SEQ ID NO: 264133 - DNA, 15 bp, Homo sapiens
tgcttaaaattcaat

SEQ ID NO: 264134 - DNA, 15 bp, Homo sapiens
ctgcttaaaattcaa

SEQ ID NO: 264135 - DNA, 15 bp, Homo sapiens
tctgcttaaaattca

SEQ ID NO: 264136 - DNA, 15 bp, Homo sapiens
ctctgcttaaaattc

SEQ ID NO: 264137 - DNA, 15 bp, Homo sapiens
gctctgcttaaaatt

SEQ ID NO: 264138 - DNA, 15 bp, Homo sapiens
agctctgcttaaaat

SEQ ID NO: 264139 - DNA, 15 bp, Homo sapiens
gagctctgcttaaaa

SEQ ID NO: 264140 - DNA, 15 bp, Homo sapiens
ggagctctgcttaaa

SEQ ID NO: 264141 - DNA, 15 bp, Homo sapiens
aggagctctgcttaa

SEQ ID NO: 264142 - DNA, 15 bp, Homo sapiens
caggagctctgctta

SEQ ID NO: 264143 - DNA, 15 bp, Homo sapiens
acaggagctctgctt

SEQ ID NO: 264144 - DNA, 15 bp, Homo sapiens
aacaggagctctgct

SEQ ID NO: 264145 - DNA, 15 bp, Homo sapiens
caacaggagctctgc

SEQ ID NO: 264146 - DNA, 15 bp, Homo sapiens
tcaacaggagctctg

SEQ ID NO: 264147 - DNA, 15 bp, Homo sapiens
ttcaacaggagctct

SEQ ID NO: 264148 - DNA, 15 bp, Homo sapiens
tttcaacaggagctc

SEQ ID NO: 264149 - DNA, 15 bp, Homo sapiens
atttcaacaggagct

SEQ ID NO: 264150 - DNA, 15 bp, Homo sapiens
catttcaacaggagc

SEQ ID NO: 264151 - DNA, 15 bp, Homo sapiens
acatttcaacaggag

SEQ ID NO: 264152 - DNA, 15 bp, Homo sapiens
tacatttcaacagga

SEQ ID NO: 264153 - DNA, 15 bp, Homo sapiens
ctacatttcaacagg

SEQ ID NO: 264154 - DNA, 15 bp, Homo sapiens
cctacatttcaacag

SEQ ID NO: 264155 - DNA, 15 bp, Homo sapiens
acctacatttcaaca

SEQ ID NO: 264156 - DNA, 15 bp, Homo sapiens
tacctacatttcaac

SEQ ID NO: 264157 - DNA, 15 bp, Homo sapiens
ttacctacatttcaa

SEQ ID NO: 264158 - DNA, 15 bp, Homo sapiens
cttacctacatttca

SEQ ID NO: 264159 - DNA, 15 bp, Homo sapiens
gcttacctacatttc

SEQ ID NO: 264160 - DNA, 15 bp, Homo sapiens
tgcttacctacattt

SEQ ID NO: 264161 - DNA, 15 bp, Homo sapiens
atgcttacctacatt

SEQ ID NO: 264162 - DNA, 15 bp, Homo sapiens
gatgcttacctacat

SEQ ID NO: 264163 - DNA, 15 bp, Homo sapiens
agatgcttacctaca

SEQ ID NO: 264164 - DNA, 15 bp, Homo sapiens
aagatgcttacctac

SEQ ID NO: 264165 - DNA, 15 bp, Homo sapiens
aaagatgcttaccta

SEQ ID NO: 264166 - DNA, 15 bp, Homo sapiens
gaaagatgcttacct

SEQ ID NO: 264167 - DNA, 15 bp, Homo sapiens
ggaaagatgcttacc

SEQ ID NO: 264168 - DNA, 15 bp, Homo sapiens
tggaaagatgcttac

SEQ ID NO: 264169 - DNA, 15 bp, Homo sapiens
ctggaaagatgctta

SEQ ID NO: 264170 - DNA, 15 bp, Homo sapiens
gctggaaagatgctt

SEQ ID NO: 264171 - DNA, 15 bp, Homo sapiens
tgctggaaagatgct

SEQ ID NO: 264172 - DNA, 15 bp, Homo sapiens
ttgctggaaagatgc

SEQ ID NO: 264173 - DNA, 15 bp, Homo sapiens
tttgctggaaagatg

SEQ ID NO: 264174 - DNA, 15 bp, Homo sapiens
atttgctggaaagat

SEQ ID NO: 264175 - DNA, 15 bp, Homo sapiens
tatttgctggaaaga

SEQ ID NO: 264176 - DNA, 15 bp, Homo sapiens
ttatttgctggaaag

SEQ ID NO: 264177 - DNA, 15 bp, Homo sapiens
tttatttgctggaaa

SEQ ID NO: 264178 - DNA, 15 bp, Homo sapiens
ttttatttgctggaa

SEQ ID NO: 264179 - DNA, 15 bp, Homo sapiens
tttttatttgctgga

SEQ ID NO: 264180 - DNA, 15 bp, Homo sapiens
atttttatttgctgg

SEQ ID NO: 264181 - DNA, 15 bp, Homo sapiens
aatttttatttgctg

SEQ ID NO: 264182 - DNA, 15 bp, Homo sapiens
caatttttatttgct

SEQ ID NO: 264183 - DNA, 15 bp, Homo sapiens
acaatttttatttgc

SEQ ID NO: 264184 - DNA, 15 bp, Homo sapiens
gacaatttttatttg

SEQ ID NO: 264185 - DNA, 15 bp, Homo sapiens
agacaatttttattt

SEQ ID NO: 264186 - DNA, 15 bp, Homo sapiens
gagacaatttttatt

SEQ ID NO: 264187 - DNA, 15 bp, Homo sapiens
ggagacaatttttat

SEQ ID NO: 264188 - DNA, 15 bp, Homo sapiens
cggagacaattttta

SEQ ID NO: 264189 - DNA, 15 bp, Homo sapiens
gcggagacaattttt

SEQ ID NO: 264190 - DNA, 15 bp, Homo sapiens
agcggagacaatttt

SEQ ID NO: 264191 - DNA, 15 bp, Homo sapiens
cagcggagacaattt

SEQ ID NO: 264192 - DNA, 15 bp, Homo sapiens
ccagcggagacaatt

SEQ ID NO: 264193 - DNA, 15 bp, Homo sapiens
cccagcggagacaat

SEQ ID NO: 264194 - DNA, 15 bp, Homo sapiens
tcccagcggagacaa

SEQ ID NO: 264195 - DNA, 15 bp, Homo sapiens
ctcccagcggagaca

SEQ ID NO: 264196 - DNA, 15 bp, Homo sapiens
actcccagcggagac

SEQ ID NO: 264197 - DNA, 15 bp, Homo sapiens
aactcccagcggaga

SEQ ID NO: 264198 - DNA, 15 bp, Homo sapiens
aaactcccagcggag

SEQ ID NO: 264199 - DNA, 15 bp, Homo sapiens
gaaactcccagcgga

SEQ ID NO: 264200 - DNA, 15 bp, Homo sapiens
tgaaactcccagcgg

SEQ ID NO: 264201 - DNA, 15 bp, Homo sapiens
ctgaaactcccagcg

SEQ ID NO: 264202 - DNA, 15 bp, Homo sapiens
actgaaactcccagc

SEQ ID NO: 264203 - DNA, 15 bp, Homo sapiens
aactgaaactcccag

SEQ ID NO: 264204 - DNA, 15 bp, Homo sapiens
aaactgaaactccca

SEQ ID NO: 264205 - DNA, 15 bp, Homo sapiens
aaaactgaaactccc

SEQ ID NO: 264206 - DNA, 15 bp, Homo sapiens
taaaactgaaactcc

SEQ ID NO: 264207 - DNA, 15 bp, Homo sapiens
gtaaaactgaaactc

SEQ ID NO: 264208 - DNA, 15 bp, Homo sapiens
ggtaaaactgaaact

SEQ ID NO: 264209 - DNA, 15 bp, Homo sapiens
aggtaaaactgaaac

SEQ ID NO: 264210 - DNA, 15 bp, Homo sapiens
caggtaaaactgaaa

SEQ ID NO: 264211 - DNA, 15 bp, Homo sapiens
tcaggtaaaactgaa

SEQ ID NO: 264212 - DNA, 15 bp, Homo sapiens
atcaggtaaaactga

SEQ ID NO: 264213 - DNA, 15 bp, Homo sapiens
aatcaggtaaaactg

SEQ ID NO: 264214 - DNA, 15 bp, Homo sapiens
aaatcaggtaaaact

SEQ ID NO: 264215 - DNA, 15 bp, Homo sapiens
caaatcaggtaaaac

SEQ ID NO: 264216 - DNA, 15 bp, Homo sapiens
acaaatcaggtaaaa

SEQ ID NO: 264217 - DNA, 15 bp, Homo sapiens
tacaaatcaggtaaa

SEQ ID NO: 264218 - DNA, 15 bp, Homo sapiens
gtacaaatcaggtaa

SEQ ID NO: 264219 - DNA, 15 bp, Homo sapiens
ggtacaaatcaggta

SEQ ID NO: 264220 - DNA, 15 bp, Homo sapiens
aggtacaaatcaggt

SEQ ID NO: 264221 - DNA, 15 bp, Homo sapiens
taggtacaaatcagg

SEQ ID NO: 264222 - DNA, 15 bp, Homo sapiens
ttaggtacaaatcag

SEQ ID NO: 264223 - DNA, 15 bp, Homo sapiens
cttaggtacaaatca

SEQ ID NO: 264224 - DNA, 15 bp, Homo sapiens
ccttaggtacaaatc

SEQ ID NO: 264225 - DNA, 15 bp, Homo sapiens
gccttaggtacaaat

SEQ ID NO: 264226 - DNA, 15 bp, Homo sapiens
tgccttaggtacaaa

SEQ ID NO: 264227 - DNA, 15 bp, Homo sapiens
ttgccttaggtacaa

SEQ ID NO: 264228 - DNA, 15 bp, Homo sapiens
cttgccttaggtaca

SEQ ID NO: 264229 - DNA, 15 bp, Homo sapiens
gcttgccttaggtac

SEQ ID NO: 264230 - DNA, 15 bp, Homo sapiens
agcttgccttaggta

SEQ ID NO: 264231 - DNA, 15 bp, Homo sapiens
cagcttgccttaggt

SEQ ID NO: 264232 - DNA, 15 bp, Homo sapiens
tcagcttgccttagg

SEQ ID NO: 264233 - DNA, 15 bp, Homo sapiens
ttcagcttgccttag

SEQ ID NO: 264234 - DNA, 15 bp, Homo sapiens
attcagcttgcctta

SEQ ID NO: 264235 - DNA, 15 bp, Homo sapiens
tattcagcttgcctt

SEQ ID NO: 264236 - DNA, 15 bp, Homo sapiens
gtattcagcttgcct

SEQ ID NO: 264237 - DNA, 15 bp, Homo sapiens
tgtattcagcttgcc

SEQ ID NO: 264238 - DNA, 15 bp, Homo sapiens
ttgtattcagcttgc

SEQ ID NO: 264239 - DNA, 15 bp, Homo sapiens
tttgtattcagcttg

SEQ ID NO: 264240 - DNA, 15 bp, Homo sapiens
gtttgtattcagctt

SEQ ID NO: 264241 - DNA, 15 bp, Homo sapiens
tgtttgtattcagct

SEQ ID NO: 264242 - DNA, 15 bp, Homo sapiens
ctgtttgtattcagc

SEQ ID NO: 264243 - DNA, 15 bp, Homo sapiens
actgtttgtattcag

SEQ ID NO: 264244 - DNA, 15 bp, Homo sapiens
tactgtttgtattca

SEQ ID NO: 264245 - DNA, 15 bp, Homo sapiens
ttactgtttgtattc

SEQ ID NO: 264246 - DNA, 15 bp, Homo sapiens
tttactgtttgtatt

SEQ ID NO: 264247 - DNA, 15 bp, Homo sapiens
atttactgtttgtat

SEQ ID NO: 264248 - DNA, 15 bp, Homo sapiens
tatttactgtttgta

SEQ ID NO: 264249 - DNA, 15 bp, Homo sapiens
atatttactgtttgt

SEQ ID NO: 264250 - DNA, 15 bp, Homo sapiens
catatttactgtttg

SEQ ID NO: 264251 - DNA, 15 bp, Homo sapiens
gcatatttactgttt

SEQ ID NO: 264252 - DNA, 15 bp, Homo sapiens
ggcatatttactgtt

SEQ ID NO: 264253 - DNA, 15 bp, Homo sapiens
aggcatatttactgt

SEQ ID NO: 264254 - DNA, 15 bp, Homo sapiens
taggcatatttactg

SEQ ID NO: 264255 - DNA, 15 bp, Homo sapiens
ttaggcatatttact

SEQ ID NO: 264256 - DNA, 15 bp, Homo sapiens
tttaggcatatttac

SEQ ID NO: 264257 - DNA, 15 bp, Homo sapiens
ttttaggcatattta

SEQ ID NO: 264258 - DNA, 15 bp, Homo sapiens
attttaggcatattt

SEQ ID NO: 264259 - DNA, 15 bp, Homo sapiens
aattttaggcatatt

SEQ ID NO: 264260 - DNA, 15 bp, Homo sapiens
gaattttaggcatat

SEQ ID NO: 264261 - DNA, 15 bp, Homo sapiens
agaattttaggcata

SEQ ID NO: 264262 - DNA, 15 bp, Homo sapiens
aagaattttaggcat

SEQ ID NO: 264263 - DNA, 15 bp, Homo sapiens
caagaattttaggca

SEQ ID NO: 264264 - DNA, 15 bp, Homo sapiens
acaagaattttaggc

SEQ ID NO: 264265 - DNA, 15 bp, Homo sapiens
aacaagaattttagg

SEQ ID NO: 264266 - DNA, 15 bp, Homo sapiens
aaacaagaattttag

SEQ ID NO: 264267 - DNA, 15 bp, Homo sapiens
aaaacaagaatttta

SEQ ID NO: 264268 - DNA, 15 bp, Homo sapiens
taaaacaagaatttt

SEQ ID NO: 264269 - DNA, 15 bp, Homo sapiens
gtaaaacaagaattt

SEQ ID NO: 264270 - DNA, 15 bp, Homo sapiens
tgtaaaacaagaatt

SEQ ID NO: 264271 - DNA, 15 bp, Homo sapiens
ttgtaaaacaagaat

SEQ ID NO: 264272 - DNA, 15 bp, Homo sapiens
gttgtaaaacaagaa

SEQ ID NO: 264273 - DNA, 15 bp, Homo sapiens
agttgtaaaacaaga

SEQ ID NO: 264274 - DNA, 15 bp, Homo sapiens
tagttgtaaaacaag

SEQ ID NO: 264275 - DNA, 15 bp, Homo sapiens
ttagttgtaaaacaa

SEQ ID NO: 264276 - DNA, 15 bp, Homo sapiens
attagttgtaaaaca

SEQ ID NO: 264277 - DNA, 15 bp, Homo sapiens
aattagttgtaaaac

SEQ ID NO: 264278 - DNA, 15 bp, Homo sapiens
aaattagttgtaaaa

SEQ ID NO: 264279 - DNA, 15 bp, Homo sapiens
aaaattagttgtaaa

SEQ ID NO: 264280 - DNA, 15 bp, Homo sapiens
taaaattagttgtaa

SEQ ID NO: 264281 - DNA, 15 bp, Homo sapiens
gtaaaattagttgta

SEQ ID NO: 264282 - DNA, 15 bp, Homo sapiens
agtaaaattagttgt

SEQ ID NO: 264283 - DNA, 15 bp, Homo sapiens
aagtaaaattagttg

SEQ ID NO: 264284 - DNA, 15 bp, Homo sapiens
aaagtaaaattagtt

SEQ ID NO: 264285 - DNA, 15 bp, Homo sapiens
gaaagtaaaattagt

SEQ ID NO: 264286 - DNA, 15 bp, Homo sapiens
ggaaagtaaaattag

SEQ ID NO: 264287 - DNA, 15 bp, Homo sapiens
tggaaagtaaaatta

SEQ ID NO: 264288 - DNA, 15 bp, Homo sapiens
gtggaaagtaaaatt

SEQ ID NO: 264289 - DNA, 15 bp, Homo sapiens
tgtggaaagtaaaat

SEQ ID NO: 264290 - DNA, 15 bp, Homo sapiens
ctgtggaaagtaaaa

SEQ ID NO: 264291 - DNA, 15 bp, Homo sapiens
cctgtggaaagtaaa

SEQ ID NO: 264292 - DNA, 15 bp, Homo sapiens
acctgtggaaagtaa

SEQ ID NO: 264293 - DNA, 15 bp, Homo sapiens
aacctgtggaaagta

SEQ ID NO: 264294 - DNA, 15 bp, Homo sapiens
caacctgtggaaagt

SEQ ID NO: 264295 - DNA, 15 bp, Homo sapiens
gcaacctgtggaaag

SEQ ID NO: 264296 - DNA, 15 bp, Homo sapiens
agcaacctgtggaaa

SEQ ID NO: 264297 - DNA, 15 bp, Homo sapiens
cagcaacctgtggaa

SEQ ID NO: 264298 - DNA, 15 bp, Homo sapiens
ccagcaacctgtgga

SEQ ID NO: 264299 - DNA, 15 bp, Homo sapiens
accagcaacctgtgg

SEQ ID NO: 264300 - DNA, 15 bp, Homo sapiens
caccagcaacctgtg

SEQ ID NO: 264301 - DNA, 15 bp, Homo sapiens
ccaccagcaacctgt

SEQ ID NO: 264302 - DNA, 15 bp, Homo sapiens
accaccagcaacctg

SEQ ID NO: 264303 - DNA, 15 bp, Homo sapiens
taccaccagcaacct

SEQ ID NO: 264304 - DNA, 15 bp, Homo sapiens
ctaccaccagcaacc

SEQ ID NO: 264305 - DNA, 15 bp, Homo sapiens
cctaccaccagcaac

SEQ ID NO: 264306 - DNA, 15 bp, Homo sapiens
tcctaccaccagcaa

SEQ ID NO: 264307 - DNA, 15 bp, Homo sapiens
ttcctaccaccagca

SEQ ID NO: 264308 - DNA, 15 bp, Homo sapiens
attcctaccaccagc

SEQ ID NO: 264309 - DNA, 15 bp, Homo sapiens
cattcctaccaccag

SEQ ID NO: 264310 - DNA, 15 bp, Homo sapiens
acattcctaccacca

SEQ ID NO: 264311 - DNA, 15 bp, Homo sapiens
aacattcctaccacc

SEQ ID NO: 264312 - DNA, 15 bp, Homo sapiens
gaacattcctaccac

SEQ ID NO: 264313 - DNA, 15 bp, Homo sapiens
ggaacattcctacca

SEQ ID NO: 264314 - DNA, 15 bp, Homo sapiens
tggaacattcctacc

SEQ ID NO: 264315 - DNA, 15 bp, Homo sapiens
gtggaacattcctac

SEQ ID NO: 264316 - DNA, 15 bp, Homo sapiens
ggtggaacattccta

SEQ ID NO: 264317 - DNA, 15 bp, Homo sapiens
gggtggaacattcct

SEQ ID NO: 264318 - DNA, 15 bp, Homo sapiens
cgggtggaacattcc

SEQ ID NO: 264319 - DNA, 15 bp, Homo sapiens
gcgggtggaacattc

SEQ ID NO: 264320 - DNA, 15 bp, Homo sapiens
tgcgggtggaacatt

SEQ ID NO: 264321 - DNA, 15 bp, Homo sapiens
ctgcgggtggaacat

SEQ ID NO: 264322 - DNA, 15 bp, Homo sapiens
actgcgggtggaaca

SEQ ID NO: 264323 - DNA, 15 bp, Homo sapiens
tactgcgggtggaac

SEQ ID NO: 264324 - DNA, 15 bp, Homo sapiens
gtactgcgggtggaa

SEQ ID NO: 264325 - DNA, 15 bp, Homo sapiens
tgtactgcgggtgga

SEQ ID NO: 264326 - DNA, 15 bp, Homo sapiens
ctgtactgcgggtgg

SEQ ID NO: 264327 - DNA, 15 bp, Homo sapiens
tctgtactgcgggtg

SEQ ID NO: 264328 - DNA, 15 bp, Homo sapiens
ttctgtactgcgggt

SEQ ID NO: 264329 - DNA, 15 bp, Homo sapiens
tttctgtactgcggg

SEQ ID NO: 264330 - DNA, 15 bp, Homo sapiens
ctttctgtactgcgg

SEQ ID NO: 264331 - DNA, 15 bp, Homo sapiens
actttctgtactgcg

SEQ ID NO: 264332 - DNA, 15 bp, Homo sapiens
tactttctgtactgc

SEQ ID NO: 264333 - DNA, 15 bp, Homo sapiens
atactttctgtactg

SEQ ID NO: 264334 - DNA, 15 bp, Homo sapiens
gatactttctgtact

SEQ ID NO: 264335 - DNA, 15 bp, Homo sapiens
tgatactttctgtac

SEQ ID NO: 264336 - DNA, 15 bp, Homo sapiens
gtgatactttctgta

SEQ ID NO: 264337 - DNA, 15 bp, Homo sapiens
tgtgatactttctgt

SEQ ID NO: 264338 - DNA, 15 bp, Homo sapiens
ctgtgatactttctg

SEQ ID NO: 264339 - DNA, 15 bp, Homo sapiens
cctgtgatactttct

SEQ ID NO: 264340 - DNA, 15 bp, Homo sapiens
gcctgtgatactttc

SEQ ID NO: 264341 - DNA, 15 bp, Homo sapiens
agcctgtgatacttt

SEQ ID NO: 264342 - DNA, 15 bp, Homo sapiens
aagcctgtgatactt

SEQ ID NO: 264343 - DNA, 15 bp, Homo sapiens
gaagcctgtgatact

SEQ ID NO: 264344 - DNA, 15 bp, Homo sapiens
ggaagcctgtgatac

SEQ ID NO: 264345 - DNA, 15 bp, Homo sapiens
tggaagcctgtgata

SEQ ID NO: 264346 - DNA, 15 bp, Homo sapiens
atggaagcctgtgat

SEQ ID NO: 264347 - DNA, 15 bp, Homo sapiens
aatggaagcctgtga

SEQ ID NO: 264348 - DNA, 15 bp, Homo sapiens
caatggaagcctgtg

SEQ ID NO: 264349 - DNA, 15 bp, Homo sapiens
tcaatggaagcctgt

SEQ ID NO: 264350 - DNA, 15 bp, Homo sapiens
gtcaatggaagcctg

SEQ ID NO: 264351 - DNA, 15 bp, Homo sapiens
ggtcaatggaagcct

SEQ ID NO: 264352 - DNA, 15 bp, Homo sapiens
tggtcaatggaagcc

SEQ ID NO: 264353 - DNA, 15 bp, Homo sapiens
ctggtcaatggaagc

SEQ ID NO: 264354 - DNA, 15 bp, Homo sapiens
tctggtcaatggaag

SEQ ID NO: 264355 - DNA, 15 bp, Homo sapiens
ctctggtcaatggaa

SEQ ID NO: 264356 - DNA, 15 bp, Homo sapiens
gctctggtcaatgga

SEQ ID NO: 264357 - DNA, 15 bp, Homo sapiens
tgctctggtcaatgg

SEQ ID NO: 264358 - DNA, 15 bp, Homo sapiens
ctgctctggtcaatg

SEQ ID NO: 264359 - DNA, 15 bp, Homo sapiens
cctgctctggtcaat

SEQ ID NO: 264360 - DNA, 15 bp, Homo sapiens
gcctgctctggtcaa

SEQ ID NO: 264361 - DNA, 15 bp, Homo sapiens
tgcctgctctggtca

SEQ ID NO: 264362 - DNA, 15 bp, Homo sapiens
ctgcctgctctggtc

SEQ ID NO: 264363 - DNA, 15 bp, Homo sapiens
tctgcctgctctggt

SEQ ID NO: 264364 - DNA, 15 bp, Homo sapiens
atctgcctgctctgg

SEQ ID NO: 264365 - DNA, 15 bp, Homo sapiens
catctgcctgctctg

SEQ ID NO: 264366 - DNA, 15 bp, Homo sapiens
tcatctgcctgctct

SEQ ID NO: 264367 - DNA, 15 bp, Homo sapiens
ttcatctgcctgctc

SEQ ID NO: 264368 - DNA, 15 bp, Homo sapiens
tttcatctgcctgct

SEQ ID NO: 264369 - DNA, 15 bp, Homo sapiens
atttcatctgcctgc

SEQ ID NO: 264370 - DNA, 15 bp, Homo sapiens
tatttcatctgcctg

SEQ ID NO: 264371 - DNA, 15 bp, Homo sapiens
gtatttcatctgcct

SEQ ID NO: 264372 - DNA, 15 bp, Homo sapiens
ggtatttcatctgcc

SEQ ID NO: 264373 - DNA, 15 bp, Homo sapiens
tggtatttcatctgc

SEQ ID NO: 264374 - DNA, 15 bp, Homo sapiens
ctggtatttcatctg

SEQ ID NO: 264375 - DNA, 15 bp, Homo sapiens
actggtatttcatct

SEQ ID NO: 264376 - DNA, 15 bp, Homo sapiens
gactggtatttcatc

SEQ ID NO: 264377 - DNA, 15 bp, Homo sapiens
agactggtatttcat

SEQ ID NO: 264378 - DNA, 15 bp, Homo sapiens
aagactggtatttca

SEQ ID NO: 264379 - DNA, 15 bp, Homo sapiens
aaagactggtatttc

SEQ ID NO: 264380 - DNA, 15 bp, Homo sapiens
aaaagactggtattt

SEQ ID NO: 264381 - DNA, 15 bp, Homo sapiens
taaaagactggtatt

SEQ ID NO: 264382 - DNA, 15 bp, Homo sapiens
ttaaaagactggtat

SEQ ID NO: 264383 - DNA, 15 bp, Homo sapiens
attaaaagactggta

SEQ ID NO: 264384 - DNA, 15 bp, Homo sapiens
cattaaaagactggt

SEQ ID NO: 264385 - DNA, 15 bp, Homo sapiens
tcattaaaagactgg

SEQ ID NO: 264386 - DNA, 15 bp, Homo sapiens
ctcattaaaagactg

SEQ ID NO: 264387 - DNA, 15 bp, Homo sapiens
actcattaaaagact

SEQ ID NO: 264388 - DNA, 15 bp, Homo sapiens
tactcattaaaagac

SEQ ID NO: 264389 - DNA, 15 bp, Homo sapiens
gtactcattaaaaga

SEQ ID NO: 264390 - DNA, 15 bp, Homo sapiens
ggtactcattaaaag

SEQ ID NO: 264391 - DNA, 15 bp, Homo sapiens
cggtactcattaaaa

SEQ ID NO: 264392 - DNA, 15 bp, Homo sapiens
gcggtactcattaaa

SEQ ID NO: 264393 - DNA, 15 bp, Homo sapiens
tgcggtactcattaa

SEQ ID NO: 264394 - DNA, 15 bp, Homo sapiens
ttgcggtactcatta

SEQ ID NO: 264395 - DNA, 15 bp, Homo sapiens
tttgcggtactcatt

SEQ ID NO: 264396 - DNA, 15 bp, Homo sapiens
gtttgcggtactcat

SEQ ID NO: 264397 - DNA, 15 bp, Homo sapiens
cgtttgcggtactca

SEQ ID NO: 264398 - DNA, 15 bp, Homo sapiens
gcgtttgcggtactc

SEQ ID NO: 264399 - DNA, 15 bp, Homo sapiens
agcgtttgcggtact

SEQ ID NO: 264400 - DNA, 15 bp, Homo sapiens
aagcgtttgcggtac

SEQ ID NO: 264401 - DNA, 15 bp, Homo sapiens
aaagcgtttgcggta

SEQ ID NO: 264402 - DNA, 15 bp, Homo sapiens
taaagcgtttgcggt

SEQ ID NO: 264403 - DNA, 15 bp, Homo sapiens
ataaagcgtttgcgg

SEQ ID NO: 264404 - DNA, 15 bp, Homo sapiens
cataaagcgtttgcg

SEQ ID NO: 264405 - DNA, 15 bp, Homo sapiens
gcataaagcgtttgc

SEQ ID NO: 264406 - DNA, 15 bp, Homo sapiens
agcataaagcgtttg

SEQ ID NO: 264407 - DNA, 15 bp, Homo sapiens
cagcataaagcgttt

SEQ ID NO: 264408 - DNA, 15 bp, Homo sapiens
tcagcataaagcgtt

SEQ ID NO: 264409 - DNA, 15 bp, Homo sapiens
ttcagcataaagcgt

SEQ ID NO: 264410 - DNA, 15 bp, Homo sapiens
cttcagcataaagcg

SEQ ID NO: 264411 - DNA, 15 bp, Homo sapiens
gcttcagcataaagc

SEQ ID NO: 264412 - DNA, 15 bp, Homo sapiens
ggcttcagcataaag

SEQ ID NO: 264413 - DNA, 15 bp, Homo sapiens
gggcttcagcataaa

SEQ ID NO: 264414 - DNA, 15 bp, Homo sapiens
agggcttcagcataa

SEQ ID NO: 264415 - DNA, 15 bp, Homo sapiens
tagggcttcagcata

SEQ ID NO: 264416 - DNA, 15 bp, Homo sapiens
atagggcttcagcat

SEQ ID NO: 264417 - DNA, 15 bp, Homo sapiens
catagggcttcagca

SEQ ID NO: 264418 - DNA, 15 bp, Homo sapiens
tcatagggcttcagc

SEQ ID NO: 264419 - DNA, 15 bp, Homo sapiens
ttcatagggcttcag

SEQ ID NO: 264420 - DNA, 15 bp, Homo sapiens
attcatagggcttca

SEQ ID NO: 264421 - DNA, 15 bp, Homo sapiens
gattcatagggcttc

SEQ ID NO: 264422 - DNA, 15 bp, Homo sapiens
tgattcatagggctt

SEQ ID NO: 264423 - DNA, 15 bp, Homo sapiens
atgattcatagggct

SEQ ID NO: 264424 - DNA, 15 bp, Homo sapiens
aatgattcatagggc

SEQ ID NO: 264425 - DNA, 15 bp, Homo sapiens
aaatgattcataggg

SEQ ID NO: 264426 - DNA, 15 bp, Homo sapiens
caaatgattcatagg

SEQ ID NO: 264427 - DNA, 15 bp, Homo sapiens
tcaaatgattcatag

SEQ ID NO: 264428 - DNA, 15 bp, Homo sapiens
ttcaaatgattcata

SEQ ID NO: 264429 - DNA, 15 bp, Homo sapiens
cttcaaatgattcat

SEQ ID NO: 264430 - DNA, 15 bp, Homo sapiens
tcttcaaatgattca

SEQ ID NO: 264431 - DNA, 15 bp, Homo sapiens
ttcttcaaatgattc

SEQ ID NO: 264432 - DNA, 15 bp, Homo sapiens
gttcttcaaatgatt

SEQ ID NO: 264433 - DNA, 15 bp, Homo sapiens
agttcttcaaatgat

SEQ ID NO: 264434 - DNA, 15 bp, Homo sapiens
aagttcttcaaatga

SEQ ID NO: 264435 - DNA, 15 bp, Homo sapiens
taagttcttcaaatg

SEQ ID NO: 264436 - DNA, 15 bp, Homo sapiens
gtaagttcttcaaat

SEQ ID NO: 264437 - DNA, 15 bp, Homo sapiens
tgtaagttcttcaaa

SEQ ID NO: 264438 - DNA, 15 bp, Homo sapiens
ctgtaagttcttcaa

SEQ ID NO: 264439 - DNA, 15 bp, Homo sapiens
cctgtaagttcttca

SEQ ID NO: 264440 - DNA, 15 bp, Homo sapiens
acctgtaagttcttc

SEQ ID NO: 264441 - DNA, 15 bp, Homo sapiens
tacctgtaagttctt

SEQ ID NO: 264442 - DNA, 15 bp, Homo sapiens
ttacctgtaagttct

SEQ ID NO: 264443 - DNA, 15 bp, Homo sapiens
cttacctgtaagttc

SEQ ID NO: 264444 - DNA, 15 bp, Homo sapiens
tcttacctgtaagtt

SEQ ID NO: 264445 - DNA, 15 bp, Homo sapiens
ttcttacctgtaagt

SEQ ID NO: 264446 - DNA, 15 bp, Homo sapiens
tttcttacctgtaag

SEQ ID NO: 264447 - DNA, 15 bp, Homo sapiens
gtttcttacctgtaa

SEQ ID NO: 264448 - DNA, 15 bp, Homo sapiens
tgtttcttacctgta

SEQ ID NO: 264449 - DNA, 15 bp, Homo sapiens
ctgtttcttacctgt

SEQ ID NO: 264450 - DNA, 15 bp, Homo sapiens
actgtttcttacctg

SEQ ID NO: 264451 - DNA, 15 bp, Homo sapiens
aactgtttcttacct

SEQ ID NO: 264452 - DNA, 15 bp, Homo sapiens
aaactgtttcttacc

SEQ ID NO: 264453 - DNA, 15 bp, Homo sapiens
gaaactgtttcttac

SEQ ID NO: 264454 - DNA, 15 bp, Homo sapiens
agaaactgtttctta

SEQ ID NO: 264455 - DNA, 15 bp, Homo sapiens
tagaaactgtttctt

SEQ ID NO: 264456 - DNA, 15 bp, Homo sapiens
ttagaaactgtttct

SEQ ID NO: 264457 - DNA, 15 bp, Homo sapiens
tttagaaactgtttc

SEQ ID NO: 264458 - DNA, 15 bp, Homo sapiens
gtttagaaactgttt

SEQ ID NO: 264459 - DNA, 15 bp, Homo sapiens
agtttagaaactgtt

SEQ ID NO: 264460 - DNA, 15 bp, Homo sapiens
aagtttagaaactgt

SEQ ID NO: 264461 - DNA, 15 bp, Homo sapiens
gaagtttagaaactg

SEQ ID NO: 264462 - DNA, 15 bp, Homo sapiens
agaagtttagaaact

SEQ ID NO: 264463 - DNA, 15 bp, Homo sapiens
aagaagtttagaaac

SEQ ID NO: 264464 - DNA, 15 bp, Homo sapiens
gaagaagtttagaaa

SEQ ID NO: 264465 - DNA, 15 bp, Homo sapiens
cgaagaagtttagaa

SEQ ID NO: 264466 - DNA, 15 bp, Homo sapiens
acgaagaagtttaga

SEQ ID NO: 264467 - DNA, 15 bp, Homo sapiens
aacgaagaagtttag

SEQ ID NO: 264468 - DNA, 15 bp, Homo sapiens
aaacgaagaagttta

SEQ ID NO: 264469 - DNA, 15 bp, Homo sapiens
aaaacgaagaagttt

SEQ ID NO: 264470 - DNA, 15 bp, Homo sapiens
aaaaacgaagaagtt

SEQ ID NO: 264471 - DNA, 15 bp, Homo sapiens
aaaaaacgaagaagt

SEQ ID NO: 264472 - DNA, 15 bp, Homo sapiens
caaaaaacgaagaag

SEQ ID NO: 264473 - DNA, 15 bp, Homo sapiens
acaaaaaacgaagaa

SEQ ID NO: 264474 - DNA, 15 bp, Homo sapiens
aacaaaaaacgaaga

SEQ ID NO: 264475 - DNA, 15 bp, Homo sapiens
aaacaaaaaacgaag

SEQ ID NO: 264476 - DNA, 15 bp, Homo sapiens
caaacaaaaaacgaa

SEQ ID NO: 264477 - DNA, 15 bp, Homo sapiens
acaaacaaaaaacga

SEQ ID NO: 264478 - DNA, 15 bp, Homo sapiens
aacaaacaaaaaacg

SEQ ID NO: 264479 - DNA, 15 bp, Homo sapiens
aaacaaacaaaaaac

SEQ ID NO: 264480 - DNA, 15 bp, Homo sapiens
caaacaaacaaaaaa

SEQ ID NO: 264481 - DNA, 15 bp, Homo sapiens
acaaacaaacaaaaa

SEQ ID NO: 264482 - DNA, 15 bp, Homo sapiens
aacaaacaaacaaaa

SEQ ID NO: 264483 - DNA, 15 bp, Homo sapiens
aaacaaacaaacaaa

SEQ ID NO: 264484 - DNA, 15 bp, Homo sapiens
caaacaaacaaacaa

SEQ ID NO: 264485 - DNA, 15 bp, Homo sapiens
acaaacaaacaaaca

SEQ ID NO: 264486 - DNA, 15 bp, Homo sapiens
aacaaacaaacaaac

SEQ ID NO: 264487 - DNA, 15 bp, Homo sapiens
aaaacaaacaaacaa

SEQ ID NO: 264488 - DNA, 15 bp, Homo sapiens
aaaaacaaacaaaca

SEQ ID NO: 264489 - DNA, 15 bp, Homo sapiens
caaaaacaaacaaac

SEQ ID NO: 264490 - DNA, 15 bp, Homo sapiens
acaaaaacaaacaaa

SEQ ID NO: 264491 - DNA, 15 bp, Homo sapiens
aacaaaaacaaacaa

SEQ ID NO: 264492 - DNA, 15 bp, Homo sapiens
caacaaaaacaaaca

SEQ ID NO: 264493 - DNA, 15 bp, Homo sapiens
acaacaaaaacaaac

SEQ ID NO: 264494 - DNA, 15 bp, Homo sapiens
aacaacaaaaacaaa

SEQ ID NO: 264495 - DNA, 15 bp, Homo sapiens
aaacaacaaaaacaa

SEQ ID NO: 264496 - DNA, 15 bp, Homo sapiens
aaaacaacaaaaaca

SEQ ID NO: 264497 - DNA, 15 bp, Homo sapiens
aaaaacaacaaaaac

SEQ ID NO: 264498 - DNA, 15 bp, Homo sapiens
caaaaacaacaaaaa

SEQ ID NO: 264499 - DNA, 15 bp, Homo sapiens
ccaaaaacaacaaaa

SEQ ID NO: 264500 - DNA, 15 bp, Homo sapiens
accaaaaacaacaaa

SEQ ID NO: 264501 - DNA, 15 bp, Homo sapiens
aaccaaaaacaacaa

SEQ ID NO: 264502 - DNA, 15 bp, Homo sapiens
aaaccaaaaacaaca

SEQ ID NO: 264503 - DNA, 15 bp, Homo sapiens
aaaaccaaaaacaac

SEQ ID NO: 264504 - DNA, 15 bp, Homo sapiens
gaaaaccaaaaacaa

SEQ ID NO: 264505 - DNA, 15 bp, Homo sapiens
agaaaaccaaaaaca

SEQ ID NO: 264506 - DNA, 15 bp, Homo sapiens
aagaaaaccaaaaac

SEQ ID NO: 264507 - DNA, 15 bp, Homo sapiens
aaagaaaaccaaaaa

SEQ ID NO: 264508 - DNA, 15 bp, Homo sapiens
aaaagaaaaccaaaa

SEQ ID NO: 264509 - DNA, 15 bp, Homo sapiens
gaaaagaaaaccaaa

SEQ ID NO: 264510 - DNA, 15 bp, Homo sapiens
cgaaaagaaaaccaa

SEQ ID NO: 264511 - DNA, 15 bp, Homo sapiens
tcgaaaagaaaacca

SEQ ID NO: 264512 - DNA, 15 bp, Homo sapiens
ctcgaaaagaaaacc

SEQ ID NO: 264513 - DNA, 15 bp, Homo sapiens
tctcgaaaagaaaac

SEQ ID NO: 264514 - DNA, 15 bp, Homo sapiens
atctcgaaaagaaaa

SEQ ID NO: 264515 - DNA, 15 bp, Homo sapiens
catctcgaaaagaaa

SEQ ID NO: 264516 - DNA, 15 bp, Homo sapiens
ccatctcgaaaagaa

SEQ ID NO: 264517 - DNA, 15 bp, Homo sapiens
tccatctcgaaaaga

SEQ ID NO: 264518 - DNA, 15 bp, Homo sapiens
ctccatctcgaaaag

SEQ ID NO: 264519 - DNA, 15 bp, Homo sapiens
gctccatctcgaaaa

SEQ ID NO: 264520 - DNA, 15 bp, Homo sapiens
ggctccatctcgaaa

SEQ ID NO: 264521 - DNA, 15 bp, Homo sapiens
cggctccatctcgaa

SEQ ID NO: 264522 - DNA, 15 bp, Homo sapiens
gcggctccatctcga

SEQ ID NO: 264523 - DNA, 15 bp, Homo sapiens
ggcggctccatctcg

SEQ ID NO: 264524 - DNA, 15 bp, Homo sapiens
gggcggctccatctc

SEQ ID NO: 264525 - DNA, 15 bp, Homo sapiens
agggcggctccatct

SEQ ID NO: 264526 - DNA, 15 bp, Homo sapiens
gagggcggctccatc

SEQ ID NO: 264527 - DNA, 15 bp, Homo sapiens
agagggcggctccat

SEQ ID NO: 264528 - DNA, 15 bp, Homo sapiens
cagagggcggctcca

SEQ ID NO: 264529 - DNA, 15 bp, Homo sapiens
acagagggcggctcc

SEQ ID NO: 264530 - DNA, 15 bp, Homo sapiens
gacagagggcggctc

SEQ ID NO: 264531 - DNA, 15 bp, Homo sapiens
tgacagagggcggct

SEQ ID NO: 264532 - DNA, 15 bp, Homo sapiens
gtgacagagggcggc

SEQ ID NO: 264533 - DNA, 15 bp, Homo sapiens
ggtgacagagggcgg

SEQ ID NO: 264534 - DNA, 15 bp, Homo sapiens
gggtgacagagggcg

SEQ ID NO: 264535 - DNA, 15 bp, Homo sapiens
tgggtgacagagggc

SEQ ID NO: 264536 - DNA, 15 bp, Homo sapiens
ctgggtgacagaggg

SEQ ID NO: 264537 - DNA, 15 bp, Homo sapiens
cctgggtgacagagg

SEQ ID NO: 264538 - DNA, 15 bp, Homo sapiens
gcctgggtgacagag

SEQ ID NO: 264539 - DNA, 15 bp, Homo sapiens
agcctgggtgacaga

SEQ ID NO: 264540 - DNA, 15 bp, Homo sapiens
cagcctgggtgacag

SEQ ID NO: 264541 - DNA, 15 bp, Homo sapiens
ccagcctgggtgaca

SEQ ID NO: 264542 - DNA, 15 bp, Homo sapiens
tccagcctgggtgac

SEQ ID NO: 264543 - DNA, 15 bp, Homo sapiens
ctccagcctgggtga

SEQ ID NO: 264544 - DNA, 15 bp, Homo sapiens
actccagcctgggtg

SEQ ID NO: 264545 - DNA, 15 bp, Homo sapiens
cactccagcctgggt

SEQ ID NO: 264546 - DNA, 15 bp, Homo sapiens
gcactccagcctggg

SEQ ID NO: 264547 - DNA, 15 bp, Homo sapiens
tgcactccagcctgg

SEQ ID NO: 264548 - DNA, 15 bp, Homo sapiens
ctgcactccagcctg

SEQ ID NO: 264549 - DNA, 15 bp, Homo sapiens
actgcactccagcct

SEQ ID NO: 264550 - DNA, 15 bp, Homo sapiens
cactgcactccagcc

SEQ ID NO: 264551 - DNA, 15 bp, Homo sapiens
ccactgcactccagc

SEQ ID NO: 264552 - DNA, 15 bp, Homo sapiens
gccactgcactccag

SEQ ID NO: 264553 - DNA, 15 bp, Homo sapiens
cgccactgcactcca

SEQ ID NO: 264554 - DNA, 15 bp, Homo sapiens
gcgccactgcactcc

SEQ ID NO: 264555 - DNA, 15 bp, Homo sapiens
ggcgccactgcactc

SEQ ID NO: 264556 - DNA, 15 bp, Homo sapiens
tggcgccactgcact

SEQ ID NO: 264557 - DNA, 15 bp, Homo sapiens
atggcgccactgcac

SEQ ID NO: 264558 - DNA, 15 bp, Homo sapiens
gatggcgccactgca

SEQ ID NO: 264559 - DNA, 15 bp, Homo sapiens
agatggcgccactgc

SEQ ID NO: 264560 - DNA, 15 bp, Homo sapiens
gagatggcgccactg

SEQ ID NO: 264561 - DNA, 15 bp, Homo sapiens
cgagatggcgccact

SEQ ID NO: 264562 - DNA, 15 bp, Homo sapiens
ccgagatggcgccac

SEQ ID NO: 264563 - DNA, 15 bp, Homo sapiens
gccgagatggcgcca

SEQ ID NO: 264564 - DNA, 15 bp, Homo sapiens
agccgagatggcgcc

SEQ ID NO: 264565 - DNA, 15 bp, Homo sapiens
gagccgagatggcgc

SEQ ID NO: 264566 - DNA, 15 bp, Homo sapiens
tgagccgagatggcg

SEQ ID NO: 264567 - DNA, 15 bp, Homo sapiens
gtgagccgagatggc

SEQ ID NO: 264568 - DNA, 15 bp, Homo sapiens
agtgagccgagatgg

SEQ ID NO: 264569 - DNA, 15 bp, Homo sapiens
cagtgagccgagatg

SEQ ID NO: 264570 - DNA, 15 bp, Homo sapiens
gcagtgagccgagat

SEQ ID NO: 264571 - DNA, 15 bp, Homo sapiens
tgcagtgagccgaga

SEQ ID NO: 264572 - DNA, 15 bp, Homo sapiens
ttgcagtgagccgag

SEQ ID NO: 264573 - DNA, 15 bp, Homo sapiens
gttgcagtgagccga

SEQ ID NO: 264574 - DNA, 15 bp, Homo sapiens
ggttgcagtgagccg

SEQ ID NO: 264575 - DNA, 15 bp, Homo sapiens
aggttgcagtgagcc

SEQ ID NO: 264576 - DNA, 15 bp, Homo sapiens
gaggttgcagtgagc

SEQ ID NO: 264577 - DNA, 15 bp, Homo sapiens
ggaggttgcagtgag

SEQ ID NO: 264578 - DNA, 15 bp, Homo sapiens
cggaggttgcagtga

SEQ ID NO: 264579 - DNA, 15 bp, Homo sapiens
gcggaggttgcagtg

SEQ ID NO: 264580 - DNA, 15 bp, Homo sapiens
ggcggaggttgcagt

SEQ ID NO: 264581 - DNA, 15 bp, Homo sapiens
aggcggaggttgcag

SEQ ID NO: 264582 - DNA, 15 bp, Homo sapiens
gaggcggaggttgca

SEQ ID NO: 264583 - DNA, 15 bp, Homo sapiens
ggaggcggaggttgc

SEQ ID NO: 264584 - DNA, 15 bp, Homo sapiens
aggaggcggaggttg

SEQ ID NO: 264585 - DNA, 15 bp, Homo sapiens
caggaggcggaggtt

SEQ ID NO: 264586 - DNA, 15 bp, Homo sapiens
ccaggaggcggaggt

SEQ ID NO: 264587 - DNA, 15 bp, Homo sapiens
cccaggaggcggagg

SEQ ID NO: 264588 - DNA, 15 bp, Homo sapiens
acccaggaggcggag

SEQ ID NO: 264589 - DNA, 15 bp, Homo sapiens
aacccaggaggcgga

SEQ ID NO: 264590 - DNA, 15 bp, Homo sapiens
gaacccaggaggcgg

SEQ ID NO: 264591 - DNA, 15 bp, Homo sapiens
tgaacccaggaggcg

SEQ ID NO: 264592 - DNA, 15 bp, Homo sapiens
ttgaacccaggaggc

SEQ ID NO: 264593 - DNA, 15 bp, Homo sapiens
cttgaacccaggagg

SEQ ID NO: 264594 - DNA, 15 bp, Homo sapiens
gcttgaacccaggag

SEQ ID NO: 264595 - DNA, 15 bp, Homo sapiens
tgcttgaacccagga

SEQ ID NO: 264596 - DNA, 15 bp, Homo sapiens
ttgcttgaacccagg

SEQ ID NO: 264597 - DNA, 15 bp, Homo sapiens
attgcttgaacccag

SEQ ID NO: 264598 - DNA, 15 bp, Homo sapiens
aattgcttgaaccca

SEQ ID NO: 264599 - DNA, 15 bp, Homo sapiens
gaattgcttgaaccc

SEQ ID NO: 264600 - DNA, 15 bp, Homo sapiens
agaattgcttgaacc

SEQ ID NO: 264601 - DNA, 15 bp, Homo sapiens
gagaattgcttgaac

SEQ ID NO: 264602 - DNA, 15 bp, Homo sapiens
ggagaattgcttgaa

SEQ ID NO: 264603 - DNA, 15 bp, Homo sapiens
aggagaattgcttga

SEQ ID NO: 264604 - DNA, 15 bp, Homo sapiens
caggagaattgcttg

SEQ ID NO: 264605 - DNA, 15 bp, Homo sapiens
gcaggagaattgctt

SEQ ID NO: 264606 - DNA, 15 bp, Homo sapiens
ggcaggagaattgct

SEQ ID NO: 264607 - DNA, 15 bp, Homo sapiens
aggcaggagaattgc

SEQ ID NO: 264608 - DNA, 15 bp, Homo sapiens
gaggcaggagaattg

SEQ ID NO: 264609 - DNA, 15 bp, Homo sapiens
tgaggcaggagaatt

SEQ ID NO: 264610 - DNA, 15 bp, Homo sapiens
ttgaggcaggagaat

SEQ ID NO: 264611 - DNA, 15 bp, Homo sapiens
gttgaggcaggagaa

SEQ ID NO: 264612 - DNA, 15 bp, Homo sapiens
agttgaggcaggaga

SEQ ID NO: 264613 - DNA, 15 bp, Homo sapiens
aagttgaggcaggag

SEQ ID NO: 264614 - DNA, 15 bp, Homo sapiens
gaagttgaggcagga

SEQ ID NO: 264615 - DNA, 15 bp, Homo sapiens
ggaagttgaggcagg

SEQ ID NO: 264616 - DNA, 15 bp, Homo sapiens
aggaagttgaggcag

SEQ ID NO: 264617 - DNA, 15 bp, Homo sapiens
caggaagttgaggca

SEQ ID NO: 264618 - DNA, 15 bp, Homo sapiens
tcaggaagttgaggc

SEQ ID NO: 264619 - DNA, 15 bp, Homo sapiens
ctcaggaagttgagg

SEQ ID NO: 264620 - DNA, 15 bp, Homo sapiens
actcaggaagttgag

SEQ ID NO: 264621 - DNA, 15 bp, Homo sapiens
tactcaggaagttga

SEQ ID NO: 264622 - DNA, 15 bp, Homo sapiens
ctactcaggaagttg

SEQ ID NO: 264623 - DNA, 15 bp, Homo sapiens
gctactcaggaagtt

SEQ ID NO: 264624 - DNA, 15 bp, Homo sapiens
agctactcaggaagt

SEQ ID NO: 264625 - DNA, 15 bp, Homo sapiens
cagctactcaggaag

SEQ ID NO: 264626 - DNA, 15 bp, Homo sapiens
ccagctactcaggaa

SEQ ID NO: 264627 - DNA, 15 bp, Homo sapiens
cccagctactcagga

SEQ ID NO: 264628 - DNA, 15 bp, Homo sapiens
tcccagctactcagg

SEQ ID NO: 264629 - DNA, 15 bp, Homo sapiens
gtcccagctactcag

SEQ ID NO: 264630 - DNA, 15 bp, Homo sapiens
agtcccagctactca

SEQ ID NO: 264631 - DNA, 15 bp, Homo sapiens
tagtcccagctactc

SEQ ID NO: 264632 - DNA, 15 bp, Homo sapiens
gtagtcccagctact

SEQ ID NO: 264633 - DNA, 15 bp, Homo sapiens
tgtagtcccagctac

SEQ ID NO: 264634 - DNA, 15 bp, Homo sapiens
ctgtagtcccagcta

SEQ ID NO: 264635 - DNA, 15 bp, Homo sapiens
cctgtagtcccagct

SEQ ID NO: 264636 - DNA, 15 bp, Homo sapiens
gcctgtagtcccagc

SEQ ID NO: 264637 - DNA, 15 bp, Homo sapiens
agcctgtagtcccag

SEQ ID NO: 264638 - DNA, 15 bp, Homo sapiens
gagcctgtagtccca

SEQ ID NO: 264639 - DNA, 15 bp, Homo sapiens
tgagcctgtagtccc

SEQ ID NO: 264640 - DNA, 15 bp, Homo sapiens
gtgagcctgtagtcc

SEQ ID NO: 264641 - DNA, 15 bp, Homo sapiens
cgtgagcctgtagtc

SEQ ID NO: 264642 - DNA, 15 bp, Homo sapiens
acgtgagcctgtagt

SEQ ID NO: 264643 - DNA, 15 bp, Homo sapiens
gacgtgagcctgtag

SEQ ID NO: 264644 - DNA, 15 bp, Homo sapiens
cgacgtgagcctgta

SEQ ID NO: 264645 - DNA, 15 bp, Homo sapiens
gcgacgtgagcctgt

SEQ ID NO: 264646 - DNA, 15 bp, Homo sapiens
tgcgacgtgagcctg

SEQ ID NO: 264647 - DNA, 15 bp, Homo sapiens
gtgcgacgtgagcct

SEQ ID NO: 264648 - DNA, 15 bp, Homo sapiens
cgtgcgacgtgagcc

SEQ ID NO: 264649 - DNA, 15 bp, Homo sapiens
gcgtgcgacgtgagc

SEQ ID NO: 264650 - DNA, 15 bp, Homo sapiens
tgcgtgcgacgtgag

SEQ ID NO: 264651 - DNA, 15 bp, Homo sapiens
atgcgtgcgacgtga

SEQ ID NO: 264652 - DNA, 15 bp, Homo sapiens
catgcgtgcgacgtg

SEQ ID NO: 264653 - DNA, 15 bp, Homo sapiens
ccatgcgtgcgacgt

SEQ ID NO: 264654 - DNA, 15 bp, Homo sapiens
tccatgcgtgcgacg

SEQ ID NO: 264655 - DNA, 15 bp, Homo sapiens
atccatgcgtgcgac

SEQ ID NO: 264656 - DNA, 15 bp, Homo sapiens
tatccatgcgtgcga

SEQ ID NO: 264657 - DNA, 15 bp, Homo sapiens
ttatccatgcgtgcg

SEQ ID NO: 264658 - DNA, 15 bp, Homo sapiens
attatccatgcgtgc

SEQ ID NO: 264659 - DNA, 15 bp, Homo sapiens
aattatccatgcgtg

SEQ ID NO: 264660 - DNA, 15 bp, Homo sapiens
aaattatccatgcgt

SEQ ID NO: 264661 - DNA, 15 bp, Homo sapiens
aaaattatccatgcg

SEQ ID NO: 264662 - DNA, 15 bp, Homo sapiens
aaaaattatccatgc

SEQ ID NO: 264663 - DNA, 15 bp, Homo sapiens
aaaaaattatccatg

SEQ ID NO: 264664 - DNA, 15 bp, Homo sapiens
caaaaaattatccat

SEQ ID NO: 264665 - DNA, 15 bp, Homo sapiens
acaaaaaattatcca

SEQ ID NO: 264666 - DNA, 15 bp, Homo sapiens
tacaaaaaattatcc

SEQ ID NO: 264667 - DNA, 15 bp, Homo sapiens
atacaaaaaattatc

SEQ ID NO: 264668 - DNA, 15 bp, Homo sapiens
aatacaaaaaattat

SEQ ID NO: 264669 - DNA, 15 bp, Homo sapiens
aaatacaaaaaatta

SEQ ID NO: 264670 - DNA, 15 bp, Homo sapiens
aaaatacaaaaaatt

SEQ ID NO: 264671 - DNA, 15 bp, Homo sapiens
gaaaatacaaaaaat

SEQ ID NO: 264672 - DNA, 15 bp, Homo sapiens
tgaaaatacaaaaaa

SEQ ID NO: 264673 - DNA, 15 bp, Homo sapiens
ctgaaaatacaaaaa

SEQ ID NO: 264674 - DNA, 15 bp, Homo sapiens
actgaaaatacaaaa

SEQ ID NO: 264675 - DNA, 15 bp, Homo sapiens
tactgaaaatacaaa

SEQ ID NO: 264676 - DNA, 15 bp, Homo sapiens
atactgaaaatacaa

SEQ ID NO: 264677 - DNA, 15 bp, Homo sapiens
tatactgaaaataca

SEQ ID NO: 264678 - DNA, 15 bp, Homo sapiens
ctatactgaaaatac

SEQ ID NO: 264679 - DNA, 15 bp, Homo sapiens
tctatactgaaaata

SEQ ID NO: 264680 - DNA, 15 bp, Homo sapiens
gtctatactgaaaat

SEQ ID NO: 264681 - DNA, 15 bp, Homo sapiens
cgtctatactgaaaa

SEQ ID NO: 264682 - DNA, 15 bp, Homo sapiens
ccgtctatactgaaa

SEQ ID NO: 264683 - DNA, 15 bp, Homo sapiens
cccgtctatactgaa

SEQ ID NO: 264684 - DNA, 15 bp, Homo sapiens
ccccgtctatactga

SEQ ID NO: 264685 - DNA, 15 bp, Homo sapiens
accccgtctatactg

SEQ ID NO: 264686 - DNA, 15 bp, Homo sapiens
aaccccgtctatact

SEQ ID NO: 264687 - DNA, 15 bp, Homo sapiens
aaaccccgtctatac

SEQ ID NO: 264688 - DNA, 15 bp, Homo sapiens
gaaaccccgtctata

SEQ ID NO: 264689 - DNA, 15 bp, Homo sapiens
tgaaaccccgtctat

SEQ ID NO: 264690 - DNA, 15 bp, Homo sapiens
gtgaaaccccgtcta

SEQ ID NO: 264691 - DNA, 15 bp, Homo sapiens
ggtgaaaccccgtct

SEQ ID NO: 264692 - DNA, 15 bp, Homo sapiens
cggtgaaaccccgtc

SEQ ID NO: 264693 - DNA, 15 bp, Homo sapiens
acggtgaaaccccgt

SEQ ID NO: 264694 - DNA, 15 bp, Homo sapiens
cacggtgaaaccccg

SEQ ID NO: 264695 - DNA, 15 bp, Homo sapiens
acacggtgaaacccc

SEQ ID NO: 264696 - DNA, 15 bp, Homo sapiens
aacacggtgaaaccc

SEQ ID NO: 264697 - DNA, 15 bp, Homo sapiens
taacacggtgaaacc

SEQ ID NO: 264698 - DNA, 15 bp, Homo sapiens
ctaacacggtgaaac

SEQ ID NO: 264699 - DNA, 15 bp, Homo sapiens
gctaacacggtgaaa

SEQ ID NO: 264700 - DNA, 15 bp, Homo sapiens
ggctaacacggtgaa

SEQ ID NO: 264701 - DNA, 15 bp, Homo sapiens
tggctaacacggtga

SEQ ID NO: 264702 - DNA, 15 bp, Homo sapiens
ctggctaacacggtg

SEQ ID NO: 264703 - DNA, 15 bp, Homo sapiens
cctggctaacacggt

SEQ ID NO: 264704 - DNA, 15 bp, Homo sapiens
gcctggctaacacgg

SEQ ID NO: 264705 - DNA, 15 bp, Homo sapiens
agcctggctaacacg

SEQ ID NO: 264706 - DNA, 15 bp, Homo sapiens
cagcctggctaacac

SEQ ID NO: 264707 - DNA, 15 bp, Homo sapiens
ccagcctggctaaca

SEQ ID NO: 264708 - DNA, 15 bp, Homo sapiens
accagcctggctaac

SEQ ID NO: 264709 - DNA, 15 bp, Homo sapiens
gaccagcctggctaa

SEQ ID NO: 264710 - DNA, 15 bp, Homo sapiens
agaccagcctggcta

SEQ ID NO: 264711 - DNA, 15 bp, Homo sapiens
gagaccagcctggct

SEQ ID NO: 264712 - DNA, 15 bp, Homo sapiens
tgagaccagcctggc

SEQ ID NO: 264713 - DNA, 15 bp, Homo sapiens
ttgagaccagcctgg

SEQ ID NO: 264714 - DNA, 15 bp, Homo sapiens
tttgagaccagcctg

SEQ ID NO: 264715 - DNA, 15 bp, Homo sapiens
gtttgagaccagcct

SEQ ID NO: 264716 - DNA, 15 bp, Homo sapiens
agtttgagaccagcc

SEQ ID NO: 264717 - DNA, 15 bp, Homo sapiens
gagtttgagaccagc

SEQ ID NO: 264718 - DNA, 15 bp, Homo sapiens
ggagtttgagaccag

SEQ ID NO: 264719 - DNA, 15 bp, Homo sapiens
aggagtttgagacca

SEQ ID NO: 264720 - DNA, 15 bp, Homo sapiens
caggagtttgagacc

SEQ ID NO: 264721 - DNA, 15 bp, Homo sapiens
tcaggagtttgagac

SEQ ID NO: 264722 - DNA, 15 bp, Homo sapiens
gtcaggagtttgaga

SEQ ID NO: 264723 - DNA, 15 bp, Homo sapiens
ggtcaggagtttgag

SEQ ID NO: 264724 - DNA, 15 bp, Homo sapiens
aggtcaggagtttga

SEQ ID NO: 264725 - DNA, 15 bp, Homo sapiens
taggtcaggagtttg

SEQ ID NO: 264726 - DNA, 15 bp, Homo sapiens
ctaggtcaggagttt

SEQ ID NO: 264727 - DNA, 15 bp, Homo sapiens
actaggtcaggagtt

SEQ ID NO: 264728 - DNA, 15 bp, Homo sapiens
cactaggtcaggagt

SEQ ID NO: 264729 - DNA, 15 bp, Homo sapiens
tcactaggtcaggag

SEQ ID NO: 264730 - DNA, 15 bp, Homo sapiens
atcactaggtcagga

SEQ ID NO: 264731 - DNA, 15 bp, Homo sapiens
gatcactaggtcagg

SEQ ID NO: 264732 - DNA, 15 bp, Homo sapiens
ggatcactaggtcag

SEQ ID NO: 264733 - DNA, 15 bp, Homo sapiens
cggatcactaggtca

SEQ ID NO: 264734 - DNA, 15 bp, Homo sapiens
gcggatcactaggtc

SEQ ID NO: 264735 - DNA, 15 bp, Homo sapiens
ggcggatcactaggt

SEQ ID NO: 264736 - DNA, 15 bp, Homo sapiens
cggcggatcactagg

SEQ ID NO: 264737 - DNA, 15 bp, Homo sapiens
ccggcggatcactag

SEQ ID NO: 264738 - DNA, 15 bp, Homo sapiens
gccggcggatcacta

SEQ ID NO: 264739 - DNA, 15 bp, Homo sapiens
agccggcggatcact

SEQ ID NO: 264740 - DNA, 15 bp, Homo sapiens
aagccggcggatcac

SEQ ID NO: 264741 - DNA, 15 bp, Homo sapiens
gaagccggcggatca

SEQ ID NO: 264742 - DNA, 15 bp, Homo sapiens
cgaagccggcggatc

SEQ ID NO: 264743 - DNA, 15 bp, Homo sapiens
ccgaagccggcggat

SEQ ID NO: 264744 - DNA, 15 bp, Homo sapiens
gccgaagccggcgga

SEQ ID NO: 264745 - DNA, 15 bp, Homo sapiens
ggccgaagccggcgg

SEQ ID NO: 264746 - DNA, 15 bp, Homo sapiens
aggccgaagccggcg

SEQ ID NO: 264747 - DNA, 15 bp, Homo sapiens
gaggccgaagccggc

SEQ ID NO: 264748 - DNA, 15 bp, Homo sapiens
ggaggccgaagccgg

SEQ ID NO: 264749 - DNA, 15 bp, Homo sapiens
gggaggccgaagccg

SEQ ID NO: 264750 - DNA, 15 bp, Homo sapiens
cgggaggccgaagcc

SEQ ID NO: 264751 - DNA, 15 bp, Homo sapiens
tcgggaggccgaagc

SEQ ID NO: 264752 - DNA, 15 bp, Homo sapiens
ttcgggaggccgaag

SEQ ID NO: 264753 - DNA, 15 bp, Homo sapiens
cttcgggaggccgaa

SEQ ID NO: 264754 - DNA, 15 bp, Homo sapiens
acttcgggaggccga

SEQ ID NO: 264755 - DNA, 15 bp, Homo sapiens
cacttcgggaggccg

SEQ ID NO: 264756 - DNA, 15 bp, Homo sapiens
gcacttcgggaggcc

SEQ ID NO: 264757 - DNA, 15 bp, Homo sapiens
agcacttcgggaggc

SEQ ID NO: 264758 - DNA, 15 bp, Homo sapiens
cagcacttcgggagg

SEQ ID NO: 264759 - DNA, 15 bp, Homo sapiens
ccagcacttcgggag

SEQ ID NO: 264760 - DNA, 15 bp, Homo sapiens
cccagcacttcggga

SEQ ID NO: 264761 - DNA, 15 bp, Homo sapiens
tcccagcacttcggg

SEQ ID NO: 264762 - DNA, 15 bp, Homo sapiens
atcccagcacttcgg

SEQ ID NO: 264763 - DNA, 15 bp, Homo sapiens
aatcccagcacttcg

SEQ ID NO: 264764 - DNA, 15 bp, Homo sapiens
taatcccagcacttc

SEQ ID NO: 264765 - DNA, 15 bp, Homo sapiens
gtaatcccagcactt

SEQ ID NO: 264766 - DNA, 15 bp, Homo sapiens
tgtaatcccagcact

SEQ ID NO: 264767 - DNA, 15 bp, Homo sapiens
ctgtaatcccagcac

SEQ ID NO: 264768 - DNA, 15 bp, Homo sapiens
cctgtaatcccagca

SEQ ID NO: 264769 - DNA, 15 bp, Homo sapiens
gcctgtaatcccagc

SEQ ID NO: 264770 - DNA, 15 bp, Homo sapiens
cgcctgtaatcccag

SEQ ID NO: 264771 - DNA, 15 bp, Homo sapiens
acgcctgtaatccca

SEQ ID NO: 264772 - DNA, 15 bp, Homo sapiens
cacgcctgtaatccc

SEQ ID NO: 264773 - DNA, 15 bp, Homo sapiens
tcacgcctgtaatcc

SEQ ID NO: 264774 - DNA, 15 bp, Homo sapiens
ctcacgcctgtaatc

SEQ ID NO: 264775 - DNA, 15 bp, Homo sapiens
gctcacgcctgtaat

SEQ ID NO: 264776 - DNA, 15 bp, Homo sapiens
ggctcacgcctgtaa

SEQ ID NO: 264777 - DNA, 15 bp, Homo sapiens
tggctcacgcctgta

SEQ ID NO: 264778 - DNA, 15 bp, Homo sapiens
gtggctcacgcctgt

SEQ ID NO: 264779 - DNA, 15 bp, Homo sapiens
ggtggctcacgcctg

SEQ ID NO: 264780 - DNA, 15 bp, Homo sapiens
cggtggctcacgcct

SEQ ID NO: 264781 - DNA, 15 bp, Homo sapiens
gcggtggctcacgcc

SEQ ID NO: 264782 - DNA, 15 bp, Homo sapiens
cgcggtggctcacgc

SEQ ID NO: 264783 - DNA, 15 bp, Homo sapiens
gcgcggtggctcacg

SEQ ID NO: 264784 - DNA, 15 bp, Homo sapiens
ggcgcggtggctcac

SEQ ID NO: 264785 - DNA, 15 bp, Homo sapiens
aggcgcggtggctca

SEQ ID NO: 264786 - DNA, 15 bp, Homo sapiens
caggcgcggtggctc

SEQ ID NO: 264787 - DNA, 15 bp, Homo sapiens
ccaggcgcggtggct

SEQ ID NO: 264788 - DNA, 15 bp, Homo sapiens
gccaggcgcggtggc

SEQ ID NO: 264789 - DNA, 15 bp, Homo sapiens
ggccaggcgcggtgg

SEQ ID NO: 264790 - DNA, 15 bp, Homo sapiens
gggccaggcgcggtg

SEQ ID NO: 264791 - DNA, 15 bp, Homo sapiens
ggggccaggcgcggt

SEQ ID NO: 264792 - DNA, 15 bp, Homo sapiens
aggggccaggcgcgg

SEQ ID NO: 264793 - DNA, 15 bp, Homo sapiens
taggggccaggcgcg

SEQ ID NO: 264794 - DNA, 15 bp, Homo sapiens
ttaggggccaggcgc

SEQ ID NO: 264795 - DNA, 15 bp, Homo sapiens
tttaggggccaggcg

SEQ ID NO: 264796 - DNA, 15 bp, Homo sapiens
gtttaggggccaggc

SEQ ID NO: 264797 - DNA, 15 bp, Homo sapiens
agtttaggggccagg

SEQ ID NO: 264798 - DNA, 15 bp, Homo sapiens
aagtttaggggccag

SEQ ID NO: 264799 - DNA, 15 bp, Homo sapiens
gaagtttaggggcca

SEQ ID NO: 264800 - DNA, 15 bp, Homo sapiens
agaagtttaggggcc

SEQ ID NO: 264801 - DNA, 15 bp, Homo sapiens
aagaagtttaggggc

SEQ ID NO: 264802 - DNA, 15 bp, Homo sapiens
taagaagtttagggg

SEQ ID NO: 264803 - DNA, 15 bp, Homo sapiens
ttaagaagtttaggg

SEQ ID NO: 264804 - DNA, 15 bp, Homo sapiens
tttaagaagtttagg

SEQ ID NO: 264805 - DNA, 15 bp, Homo sapiens
ttttaagaagtttag

SEQ ID NO: 264806 - DNA, 15 bp, Homo sapiens
cttttaagaagttta

SEQ ID NO: 264807 - DNA, 15 bp, Homo sapiens
tcttttaagaagttt

SEQ ID NO: 264808 - DNA, 15 bp, Homo sapiens
ttcttttaagaagtt

SEQ ID NO: 264809 - DNA, 15 bp, Homo sapiens
attcttttaagaagt

SEQ ID NO: 264810 - DNA, 15 bp, Homo sapiens
gattcttttaagaag

SEQ ID NO: 264811 - DNA, 15 bp, Homo sapiens
tgattcttttaagaa

SEQ ID NO: 264812 - DNA, 15 bp, Homo sapiens
ctgattcttttaaga

SEQ ID NO: 264813 - DNA, 15 bp, Homo sapiens
cctgattcttttaag

SEQ ID NO: 264814 - DNA, 15 bp, Homo sapiens
ccctgattcttttaa

SEQ ID NO: 264815 - DNA, 15 bp, Homo sapiens
cccctgattctttta

SEQ ID NO: 264816 - DNA, 15 bp, Homo sapiens
acccctgattctttt

SEQ ID NO: 264817 - DNA, 15 bp, Homo sapiens
gacccctgattcttt

SEQ ID NO: 264818 - DNA, 15 bp, Homo sapiens
tgacccctgattctt

SEQ ID NO: 264819 - DNA, 15 bp, Homo sapiens
ttgacccctgattct

SEQ ID NO: 264820 - DNA, 15 bp, Homo sapiens
tttgacccctgattc

SEQ ID NO: 264821 - DNA, 15 bp, Homo sapiens
atttgacccctgatt

SEQ ID NO: 264822 - DNA, 15 bp, Homo sapiens
catttgacccctgat

SEQ ID NO: 264823 - DNA, 15 bp, Homo sapiens
ccatttgacccctga

SEQ ID NO: 264824 - DNA, 15 bp, Homo sapiens
tccatttgacccctg

SEQ ID NO: 264825 - DNA, 15 bp, Homo sapiens
ttccatttgacccct

SEQ ID NO: 264826 - DNA, 15 bp, Homo sapiens
tttccatttgacccc

SEQ ID NO: 264827 - DNA, 15 bp, Homo sapiens
gtttccatttgaccc

SEQ ID NO: 264828 - DNA, 15 bp, Homo sapiens
tgtttccatttgacc

SEQ ID NO: 264829 - DNA, 15 bp, Homo sapiens
ctgtttccatttgac

SEQ ID NO: 264830 - DNA, 15 bp, Homo sapiens
tctgtttccatttga

SEQ ID NO: 264831 - DNA, 15 bp, Homo sapiens
ctctgtttccatttg

SEQ ID NO: 264832 - DNA, 15 bp, Homo sapiens
tctctgtttccattt

SEQ ID NO: 264833 - DNA, 15 bp, Homo sapiens
ttctctgtttccatt

SEQ ID NO: 264834 - DNA, 15 bp, Homo sapiens
cttctctgtttccat

SEQ ID NO: 264835 - DNA, 15 bp, Homo sapiens
acttctctgtttcca

SEQ ID NO: 264836 - DNA, 15 bp, Homo sapiens
aacttctctgtttcc

SEQ ID NO: 264837 - DNA, 15 bp, Homo sapiens
caacttctctgtttc

SEQ ID NO: 264838 - DNA, 15 bp, Homo sapiens
ccaacttctctgttt

SEQ ID NO: 264839 - DNA, 15 bp, Homo sapiens
gccaacttctctgtt

SEQ ID NO: 264840 - DNA, 15 bp, Homo sapiens
tgccaacttctctgt

SEQ ID NO: 264841 - DNA, 15 bp, Homo sapiens
ctgccaacttctctg

SEQ ID NO: 264842 - DNA, 15 bp, Homo sapiens
gctgccaacttctct

SEQ ID NO: 264843 - DNA, 15 bp, Homo sapiens
tgctgccaacttctc

SEQ ID NO: 264844 - DNA, 15 bp, Homo sapiens
ttgctgccaacttct

SEQ ID NO: 264845 - DNA, 15 bp, Homo sapiens
tttgctgccaacttc

SEQ ID NO: 264846 - DNA, 15 bp, Homo sapiens
atttgctgccaactt

SEQ ID NO: 264847 - DNA, 15 bp, Homo sapiens
aatttgctgccaact

SEQ ID NO: 264848 - DNA, 15 bp, Homo sapiens
caatttgctgccaac

SEQ ID NO: 264849 - DNA, 15 bp, Homo sapiens
tcaatttgctgccaa

SEQ ID NO: 264850 - DNA, 15 bp, Homo sapiens
ctcaatttgctgcca

SEQ ID NO: 264851 - DNA, 15 bp, Homo sapiens
gctcaatttgctgcc

SEQ ID NO: 264852 - DNA, 15 bp, Homo sapiens
tgctcaatttgctgc

SEQ ID NO: 264853 - DNA, 15 bp, Homo sapiens
ttgctcaatttgctg

SEQ ID NO: 264854 - DNA, 15 bp, Homo sapiens
tttgctcaatttgct

SEQ ID NO: 264855 - DNA, 15 bp, Homo sapiens
ttttgctcaatttgc

SEQ ID NO: 264856 - DNA, 15 bp, Homo sapiens
cttttgctcaatttg

SEQ ID NO: 264857 - DNA, 15 bp, Homo sapiens
tcttttgctcaattt

SEQ ID NO: 264858 - DNA, 15 bp, Homo sapiens
ttcttttgctcaatt

SEQ ID NO: 264859 - DNA, 15 bp, Homo sapiens
attcttttgctcaat

SEQ ID NO: 264860 - DNA, 15 bp, Homo sapiens
gattcttttgctcaa

SEQ ID NO: 264861 - DNA, 15 bp, Homo sapiens
tgattcttttgctca

SEQ ID NO: 264862 - DNA, 15 bp, Homo sapiens
ttgattcttttgctc

SEQ ID NO: 264863 - DNA, 15 bp, Homo sapiens
tttgattcttttgct

SEQ ID NO: 264864 - DNA, 15 bp, Homo sapiens
gtttgattcttttgc

SEQ ID NO: 264865 - DNA, 15 bp, Homo sapiens
agtttgattcttttg

SEQ ID NO: 264866 - DNA, 15 bp, Homo sapiens
cagtttgattctttt

SEQ ID NO: 264867 - DNA, 15 bp, Homo sapiens
acagtttgattcttt

SEQ ID NO: 264868 - DNA, 15 bp, Homo sapiens
aacagtttgattctt

SEQ ID NO: 264869 - DNA, 15 bp, Homo sapiens
aaacagtttgattct

SEQ ID NO: 264870 - DNA, 15 bp, Homo sapiens
aaaacagtttgattc

SEQ ID NO: 264871 - DNA, 15 bp, Homo sapiens
aaaaacagtttgatt

SEQ ID NO: 264872 - DNA, 15 bp, Homo sapiens
aaaaaacagtttgat

SEQ ID NO: 264873 - DNA, 15 bp, Homo sapiens
taaaaaacagtttga

SEQ ID NO: 264874 - DNA, 15 bp, Homo sapiens
ataaaaaacagtttg

SEQ ID NO: 264875 - DNA, 15 bp, Homo sapiens
aataaaaaacagttt

SEQ ID NO: 264876 - DNA, 15 bp, Homo sapiens
aaataaaaaacagtt

SEQ ID NO: 264877 - DNA, 15 bp, Homo sapiens
aaaataaaaaacagt

SEQ ID NO: 264878 - DNA, 15 bp, Homo sapiens
caaaataaaaaacag

SEQ ID NO: 264879 - DNA, 15 bp, Homo sapiens
acaaaataaaaaaca

SEQ ID NO: 264880 - DNA, 15 bp, Homo sapiens
cacaaaataaaaaac

SEQ ID NO: 264881 - DNA, 15 bp, Homo sapiens
tcacaaaataaaaaa

SEQ ID NO: 264882 - DNA, 15 bp, Homo sapiens
ttcacaaaataaaaa

SEQ ID NO: 264883 - DNA, 15 bp, Homo sapiens
cttcacaaaataaaa

SEQ ID NO: 264884 - DNA, 15 bp, Homo sapiens
acttcacaaaataaa

SEQ ID NO: 264885 - DNA, 15 bp, Homo sapiens
aacttcacaaaataa

SEQ ID NO: 264886 - DNA, 15 bp, Homo sapiens
aaacttcacaaaata

SEQ ID NO: 264887 - DNA, 15 bp, Homo sapiens
caaacttcacaaaat

SEQ ID NO: 264888 - DNA, 15 bp, Homo sapiens
tcaaacttcacaaaa

SEQ ID NO: 264889 - DNA, 15 bp, Homo sapiens
gtcaaacttcacaaa

SEQ ID NO: 264890 - DNA, 15 bp, Homo sapiens
tgtcaaacttcacaa

SEQ ID NO: 264891 - DNA, 15 bp, Homo sapiens
atgtcaaacttcaca

SEQ ID NO: 264892 - DNA, 15 bp, Homo sapiens
aatgtcaaacttcac

SEQ ID NO: 264893 - DNA, 15 bp, Homo sapiens
caatgtcaaacttca

SEQ ID NO: 264894 - DNA, 15 bp, Homo sapiens
ccaatgtcaaacttc

SEQ ID NO: 264895 - DNA, 15 bp, Homo sapiens
accaatgtcaaactt

SEQ ID NO: 264896 - DNA, 15 bp, Homo sapiens
aaccaatgtcaaact

SEQ ID NO: 264897 - DNA, 15 bp, Homo sapiens
caaccaatgtcaaac

SEQ ID NO: 264898 - DNA, 15 bp, Homo sapiens
acaaccaatgtcaaa

SEQ ID NO: 264899 - DNA, 15 bp, Homo sapiens
tacaaccaatgtcaa

SEQ ID NO: 264900 - DNA, 15 bp, Homo sapiens
atacaaccaatgtca

SEQ ID NO: 264901 - DNA, 15 bp, Homo sapiens
gatacaaccaatgtc

SEQ ID NO: 264902 - DNA, 15 bp, Homo sapiens
agatacaaccaatgt

SEQ ID NO: 264903 - DNA, 15 bp, Homo sapiens
gagatacaaccaatg

SEQ ID NO: 264904 - DNA, 15 bp, Homo sapiens
agagatacaaccaat

SEQ ID NO: 264905 - DNA, 15 bp, Homo sapiens
cagagatacaaccaa

SEQ ID NO: 264906 - DNA, 15 bp, Homo sapiens
acagagatacaacca

SEQ ID NO: 264907 - DNA, 15 bp, Homo sapiens
gacagagatacaacc

SEQ ID NO: 264908 - DNA, 15 bp, Homo sapiens
agacagagatacaac

SEQ ID NO: 264909 - DNA, 15 bp, Homo sapiens
aagacagagatacaa

SEQ ID NO: 264910 - DNA, 15 bp, Homo sapiens
gaagacagagataca

SEQ ID NO: 264911 - DNA, 15 bp, Homo sapiens
tgaagacagagatac

SEQ ID NO: 264912 - DNA, 15 bp, Homo sapiens
atgaagacagagata

SEQ ID NO: 264913 - DNA, 15 bp, Homo sapiens
gatgaagacagagat

SEQ ID NO: 264914 - DNA, 15 bp, Homo sapiens
cgatgaagacagaga

SEQ ID NO: 264915 - DNA, 15 bp, Homo sapiens
gcgatgaagacagag

SEQ ID NO: 264916 - DNA, 15 bp, Homo sapiens
ggcgatgaagacaga

SEQ ID NO: 264917 - DNA, 15 bp, Homo sapiens
aggcgatgaagacag

SEQ ID NO: 264918 - DNA, 15 bp, Homo sapiens
aaggcgatgaagaca

SEQ ID NO: 264919 - DNA, 15 bp, Homo sapiens
gaaggcgatgaagac

SEQ ID NO: 264920 - DNA, 15 bp, Homo sapiens
tgaaggcgatgaaga

SEQ ID NO: 264921 - DNA, 15 bp, Homo sapiens
gtgaaggcgatgaag

SEQ ID NO: 264922 - DNA, 15 bp, Homo sapiens
tgtgaaggcgatgaa

SEQ ID NO: 264923 - DNA, 15 bp, Homo sapiens
ctgtgaaggcgatga

SEQ ID NO: 264924 - DNA, 15 bp, Homo sapiens
cctgtgaaggcgatg

SEQ ID NO: 264925 - DNA, 15 bp, Homo sapiens
tcctgtgaaggcgat

SEQ ID NO: 264926 - DNA, 15 bp, Homo sapiens
ctcctgtgaaggcga

SEQ ID NO: 264927 - DNA, 15 bp, Homo sapiens
tctcctgtgaaggcg

SEQ ID NO: 264928 - DNA, 15 bp, Homo sapiens
ttctcctgtgaaggc

SEQ ID NO: 264929 - DNA, 15 bp, Homo sapiens
tttctcctgtgaagg

SEQ ID NO: 264930 - DNA, 15 bp, Homo sapiens
ttttctcctgtgaag

SEQ ID NO: 264931 - DNA, 15 bp, Homo sapiens
cttttctcctgtgaa

SEQ ID NO: 264932 - DNA, 15 bp, Homo sapiens
ccttttctcctgtga

SEQ ID NO: 264933 - DNA, 15 bp, Homo sapiens
tccttttctcctgtg

SEQ ID NO: 264934 - DNA, 15 bp, Homo sapiens
ttccttttctcctgt

SEQ ID NO: 264935 - DNA, 15 bp, Homo sapiens
tttccttttctcctg

SEQ ID NO: 264936 - DNA, 15 bp, Homo sapiens
atttccttttctcct

SEQ ID NO: 264937 - DNA, 15 bp, Homo sapiens
catttccttttctcc

SEQ ID NO: 264938 - DNA, 15 bp, Homo sapiens
acatttccttttctc

SEQ ID NO: 264939 - DNA, 15 bp, Homo sapiens
gacatttccttttct

SEQ ID NO: 264940 - DNA, 15 bp, Homo sapiens
agacatttccttttc

SEQ ID NO: 264941 - DNA, 15 bp, Homo sapiens
cagacatttcctttt

SEQ ID NO: 264942 - DNA, 15 bp, Homo sapiens
gcagacatttccttt

SEQ ID NO: 264943 - DNA, 15 bp, Homo sapiens
tgcagacatttcctt

SEQ ID NO: 264944 - DNA, 15 bp, Homo sapiens
ctgcagacatttcct

SEQ ID NO: 264945 - DNA, 15 bp, Homo sapiens
tctgcagacatttcc

SEQ ID NO: 264946 - DNA, 15 bp, Homo sapiens
ctctgcagacatttc

SEQ ID NO: 264947 - DNA, 15 bp, Homo sapiens
actctgcagacattt

SEQ ID NO: 264948 - DNA, 15 bp, Homo sapiens
aactctgcagacatt

SEQ ID NO: 264949 - DNA, 15 bp, Homo sapiens
caactctgcagacat

SEQ ID NO: 264950 - DNA, 15 bp, Homo sapiens
ccaactctgcagaca

SEQ ID NO: 264951 - DNA, 15 bp, Homo sapiens
tccaactctgcagac

SEQ ID NO: 264952 - DNA, 15 bp, Homo sapiens
ttccaactctgcaga

SEQ ID NO: 264953 - DNA, 15 bp, Homo sapiens
cttccaactctgcag

SEQ ID NO: 264954 - DNA, 15 bp, Homo sapiens
gcttccaactctgca

SEQ ID NO: 264955 - DNA, 15 bp, Homo sapiens
tgcttccaactctgc

SEQ ID NO: 264956 - DNA, 15 bp, Homo sapiens
gtgcttccaactctg

SEQ ID NO: 264957 - DNA, 15 bp, Homo sapiens
agtgcttccaactct

SEQ ID NO: 264958 - DNA, 15 bp, Homo sapiens
gagtgcttccaactc

SEQ ID NO: 264959 - DNA, 15 bp, Homo sapiens
agagtgcttccaact

SEQ ID NO: 264960 - DNA, 15 bp, Homo sapiens
tagagtgcttccaac

SEQ ID NO: 264961 - DNA, 15 bp, Homo sapiens
atagagtgcttccaa

SEQ ID NO: 264962 - DNA, 15 bp, Homo sapiens
catagagtgcttcca

SEQ ID NO: 264963 - DNA, 15 bp, Homo sapiens
ccatagagtgcttcc

SEQ ID NO: 264964 - DNA, 15 bp, Homo sapiens
accatagagtgcttc

SEQ ID NO: 264965 - DNA, 15 bp, Homo sapiens
caccatagagtgctt

SEQ ID NO: 264966 - DNA, 15 bp, Homo sapiens
tcaccatagagtgct

SEQ ID NO: 264967 - DNA, 15 bp, Homo sapiens
gtcaccatagagtgc

SEQ ID NO: 264968 - DNA, 15 bp, Homo sapiens
tgtcaccatagagtg

SEQ ID NO: 264969 - DNA, 15 bp, Homo sapiens
atgtcaccatagagt

SEQ ID NO: 264970 - DNA, 15 bp, Homo sapiens
gatgtcaccatagag

SEQ ID NO: 264971 - DNA, 15 bp, Homo sapiens
cgatgtcaccataga

SEQ ID NO: 264972 - DNA, 15 bp, Homo sapiens
tcgatgtcaccatag

SEQ ID NO: 264973 - DNA, 15 bp, Homo sapiens
atcgatgtcaccata

SEQ ID NO: 264974 - DNA, 15 bp, Homo sapiens
catcgatgtcaccat

SEQ ID NO: 264975 - DNA, 15 bp, Homo sapiens
gcatcgatgtcacca

SEQ ID NO: 264976 - DNA, 15 bp, Homo sapiens
agcatcgatgtcacc

SEQ ID NO: 264977 - DNA, 15 bp, Homo sapiens
cagcatcgatgtcac

SEQ ID NO: 264978 - DNA, 15 bp, Homo sapiens
acagcatcgatgtca

SEQ ID NO: 264979 - DNA, 15 bp, Homo sapiens
cacagcatcgatgtc

SEQ ID NO: 264980 - DNA, 15 bp, Homo sapiens
ccacagcatcgatgt

SEQ ID NO: 264981 - DNA, 15 bp, Homo sapiens
tccacagcatcgatg

SEQ ID NO: 264982 - DNA, 15 bp, Homo sapiens
ctccacagcatcgat

SEQ ID NO: 264983 - DNA, 15 bp, Homo sapiens
gctccacagcatcga

SEQ ID NO: 264984 - DNA, 15 bp, Homo sapiens
agctccacagcatcg

SEQ ID NO: 264985 - DNA, 15 bp, Homo sapiens
cagctccacagcatc

SEQ ID NO: 264986 - DNA, 15 bp, Homo sapiens
acagctccacagcat

SEQ ID NO: 264987 - DNA, 15 bp, Homo sapiens
tacagctccacagca

SEQ ID NO: 264988 - DNA, 15 bp, Homo sapiens
atacagctccacagc

SEQ ID NO: 264989 - DNA, 15 bp, Homo sapiens
gatacagctccacag

SEQ ID NO: 264990 - DNA, 15 bp, Homo sapiens
ggatacagctccaca

SEQ ID NO: 264991 - DNA, 15 bp, Homo sapiens
aggatacagctccac

SEQ ID NO: 264992 - DNA, 15 bp, Homo sapiens
caggatacagctcca

SEQ ID NO: 264993 - DNA, 15 bp, Homo sapiens
gcaggatacagctcc

SEQ ID NO: 264994 - DNA, 15 bp, Homo sapiens
ggcaggatacagctc

SEQ ID NO: 264995 - DNA, 15 bp, Homo sapiens
gggcaggatacagct

SEQ ID NO: 264996 - DNA, 15 bp, Homo sapiens
agggcaggatacagc

SEQ ID NO: 264997 - DNA, 15 bp, Homo sapiens
aagggcaggatacag

SEQ ID NO: 264998 - DNA, 15 bp, Homo sapiens
gaagggcaggataca

SEQ ID NO: 264999 - DNA, 15 bp, Homo sapiens
agaagggcaggatac

SEQ ID NO: 265000 - DNA, 15 bp, Homo sapiens
cagaagggcaggata

SEQ ID NO: 265001 - DNA, 15 bp, Homo sapiens
ccagaagggcaggat

SEQ ID NO: 265002 - DNA, 15 bp, Homo sapiens
accagaagggcagga

SEQ ID NO: 265003 - DNA, 15 bp, Homo sapiens
taccagaagggcagg

SEQ ID NO: 265004 - DNA, 15 bp, Homo sapiens
ctaccagaagggcag

SEQ ID NO: 265005 - DNA, 15 bp, Homo sapiens
tctaccagaagggca

SEQ ID NO: 265006 - DNA, 15 bp, Homo sapiens
ttctaccagaagggc

SEQ ID NO: 265007 - DNA, 15 bp, Homo sapiens
tttctaccagaaggg

SEQ ID NO: 265008 - DNA, 15 bp, Homo sapiens
ttttctaccagaagg

SEQ ID NO: 265009 - DNA, 15 bp, Homo sapiens
cttttctaccagaag

SEQ ID NO: 265010 - DNA, 15 bp, Homo sapiens
gcttttctaccagaa

SEQ ID NO: 265011 - DNA, 15 bp, Homo sapiens
ggcttttctaccaga

SEQ ID NO: 265012 - DNA, 15 bp, Homo sapiens
aggcttttctaccag

SEQ ID NO: 265013 - DNA, 15 bp, Homo sapiens
gaggcttttctacca

SEQ ID NO: 265014 - DNA, 15 bp, Homo sapiens
cgaggcttttctacc

SEQ ID NO: 265015 - DNA, 15 bp, Homo sapiens
ccgaggcttttctac

SEQ ID NO: 265016 - DNA, 15 bp, Homo sapiens
gccgaggcttttcta

SEQ ID NO: 265017 - DNA, 15 bp, Homo sapiens
ggccgaggcttttct

SEQ ID NO: 265018 - DNA, 15 bp, Homo sapiens
tggccgaggcttttc

SEQ ID NO: 265019 - DNA, 15 bp, Homo sapiens
ctggccgaggctttt

SEQ ID NO: 265020 - DNA, 15 bp, Homo sapiens
tctggccgaggcttt

SEQ ID NO: 265021 - DNA, 15 bp, Homo sapiens
atctggccgaggctt

SEQ ID NO: 265022 - DNA, 15 bp, Homo sapiens
catctggccgaggct

SEQ ID NO: 265023 - DNA, 15 bp, Homo sapiens
gcatctggccgaggc

SEQ ID NO: 265024 - DNA, 15 bp, Homo sapiens
ggcatctggccgagg

SEQ ID NO: 265025 - DNA, 15 bp, Homo sapiens
tggcatctggccgag

SEQ ID NO: 265026 - DNA, 15 bp, Homo sapiens
atggcatctggccga

SEQ ID NO: 265027 - DNA, 15 bp, Homo sapiens
gatggcatctggccg

SEQ ID NO: 265028 - DNA, 15 bp, Homo sapiens
agatggcatctggcc

SEQ ID NO: 265029 - DNA, 15 bp, Homo sapiens
aagatggcatctggc

SEQ ID NO: 265030 - DNA, 15 bp, Homo sapiens
aaagatggcatctgg

SEQ ID NO: 265031 - DNA, 15 bp, Homo sapiens
caaagatggcatctg

SEQ ID NO: 265032 - DNA, 15 bp, Homo sapiens
ccaaagatggcatct

SEQ ID NO: 265033 - DNA, 15 bp, Homo sapiens
accaaagatggcatc

SEQ ID NO: 265034 - DNA, 15 bp, Homo sapiens
caccaaagatggcat

SEQ ID NO: 265035 - DNA, 15 bp, Homo sapiens
tcaccaaagatggca

SEQ ID NO: 265036 - DNA, 15 bp, Homo sapiens
ttcaccaaagatggc

SEQ ID NO: 265037 - DNA, 15 bp, Homo sapiens
tttcaccaaagatgg

SEQ ID NO: 265038 - DNA, 15 bp, Homo sapiens
gtttcaccaaagatg

SEQ ID NO: 265039 - DNA, 15 bp, Homo sapiens
ggtttcaccaaagat

SEQ ID NO: 265040 - DNA, 15 bp, Homo sapiens
tggtttcaccaaaga

SEQ ID NO: 265041 - DNA, 15 bp, Homo sapiens
atggtttcaccaaag

SEQ ID NO: 265042 - DNA, 15 bp, Homo sapiens
catggtttcaccaaa

SEQ ID NO: 265043 - DNA, 15 bp, Homo sapiens
ccatggtttcaccaa

SEQ ID NO: 265044 - DNA, 15 bp, Homo sapiens
accatggtttcacca

SEQ ID NO: 265045 - DNA, 15 bp, Homo sapiens
taccatggtttcacc

SEQ ID NO: 265046 - DNA, 15 bp, Homo sapiens
ctaccatggtttcac

SEQ ID NO: 265047 - DNA, 15 bp, Homo sapiens
tctaccatggtttca

SEQ ID NO: 265048 - DNA, 15 bp, Homo sapiens
ttctaccatggtttc

SEQ ID NO: 265049 - DNA, 15 bp, Homo sapiens
cttctaccatggttt

SEQ ID NO: 265050 - DNA, 15 bp, Homo sapiens
acttctaccatggtt

SEQ ID NO: 265051 - DNA, 15 bp, Homo sapiens
aacttctaccatggt

SEQ ID NO: 265052 - DNA, 15 bp, Homo sapiens
caacttctaccatgg

SEQ ID NO: 265053 - DNA, 15 bp, Homo sapiens
ccaacttctaccatg

SEQ ID NO: 265054 - DNA, 15 bp, Homo sapiens
tccaacttctaccat

SEQ ID NO: 265055 - DNA, 15 bp, Homo sapiens
ctccaacttctacca

SEQ ID NO: 265056 - DNA, 15 bp, Homo sapiens
gctccaacttctacc

SEQ ID NO: 265057 - DNA, 15 bp, Homo sapiens
tgctccaacttctac

SEQ ID NO: 265058 - DNA, 15 bp, Homo sapiens
gtgctccaacttcta

SEQ ID NO: 265059 - DNA, 15 bp, Homo sapiens
ggtgctccaacttct

SEQ ID NO: 265060 - DNA, 15 bp, Homo sapiens
tggtgctccaacttc

SEQ ID NO: 265061 - DNA, 15 bp, Homo sapiens
atggtgctccaactt

SEQ ID NO: 265062 - DNA, 15 bp, Homo sapiens
aatggtgctccaact

SEQ ID NO: 265063 - DNA, 15 bp, Homo sapiens
gaatggtgctccaac

SEQ ID NO: 265064 - DNA, 15 bp, Homo sapiens
agaatggtgctccaa

SEQ ID NO: 265065 - DNA, 15 bp, Homo sapiens
gagaatggtgctcca

SEQ ID NO: 265066 - DNA, 15 bp, Homo sapiens
ggagaatggtgctcc

SEQ ID NO: 265067 - DNA, 15 bp, Homo sapiens
aggagaatggtgctc

SEQ ID NO: 265068 - DNA, 15 bp, Homo sapiens
aaggagaatggtgct

SEQ ID NO: 265069 - DNA, 15 bp, Homo sapiens
caaggagaatggtgc

SEQ ID NO: 265070 - DNA, 15 bp, Homo sapiens
tcaaggagaatggtg

SEQ ID NO: 265071 - DNA, 15 bp, Homo sapiens
ttcaaggagaatggt

SEQ ID NO: 265072 - DNA, 15 bp, Homo sapiens
tttcaaggagaatgg

SEQ ID NO: 265073 - DNA, 15 bp, Homo sapiens
ctttcaaggagaatg

SEQ ID NO: 265074 - DNA, 15 bp, Homo sapiens
cctttcaaggagaat

SEQ ID NO: 265075 - DNA, 15 bp, Homo sapiens
tcctttcaaggagaa

SEQ ID NO: 265076 - DNA, 15 bp, Homo sapiens
gtcctttcaaggaga

SEQ ID NO: 265077 - DNA, 15 bp, Homo sapiens
agtcctttcaaggag

SEQ ID NO: 265078 - DNA, 15 bp, Homo sapiens
aagtcctttcaagga

SEQ ID NO: 265079 - DNA, 15 bp, Homo sapiens
taagtcctttcaagg

SEQ ID NO: 265080 - DNA, 15 bp, Homo sapiens
ataagtcctttcaag

SEQ ID NO: 265081 - DNA, 15 bp, Homo sapiens
cataagtcctttcaa

SEQ ID NO: 265082 - DNA, 15 bp, Homo sapiens
ccataagtcctttca

SEQ ID NO: 265083 - DNA, 15 bp, Homo sapiens
cccataagtcctttc

SEQ ID NO: 265084 - DNA, 15 bp, Homo sapiens
acccataagtccttt

SEQ ID NO: 265085 - DNA, 15 bp, Homo sapiens
tacccataagtcctt

SEQ ID NO: 265086 - DNA, 15 bp, Homo sapiens
ttacccataagtcct

SEQ ID NO: 265087 - DNA, 15 bp, Homo sapiens
attacccataagtcc

SEQ ID NO: 265088 - DNA, 15 bp, Homo sapiens
cattacccataagtc

SEQ ID NO: 265089 - DNA, 15 bp, Homo sapiens
acattacccataagt

SEQ ID NO: 265090 - DNA, 15 bp, Homo sapiens
aacattacccataag

SEQ ID NO: 265091 - DNA, 15 bp, Homo sapiens
taacattacccataa

SEQ ID NO: 265092 - DNA, 15 bp, Homo sapiens
ataacattacccata

SEQ ID NO: 265093 - DNA, 15 bp, Homo sapiens
tataacattacccat

SEQ ID NO: 265094 - DNA, 15 bp, Homo sapiens
atataacattaccca

SEQ ID NO: 265095 - DNA, 15 bp, Homo sapiens
catataacattaccc

SEQ ID NO: 265096 - DNA, 15 bp, Homo sapiens
acatataacattacc

SEQ ID NO: 265097 - DNA, 15 bp, Homo sapiens
aacatataacattac

SEQ ID NO: 265098 - DNA, 15 bp, Homo sapiens
gaacatataacatta

SEQ ID NO: 265099 - DNA, 15 bp, Homo sapiens
agaacatataacatt

SEQ ID NO: 265100 - DNA, 15 bp, Homo sapiens
gagaacatataacat

SEQ ID NO: 265101 - DNA, 15 bp, Homo sapiens
ggagaacatataaca

SEQ ID NO: 265102 - DNA, 15 bp, Homo sapiens
aggagaacatataac

SEQ ID NO: 265103 - DNA, 15 bp, Homo sapiens
caggagaacatataa

SEQ ID NO: 265104 - DNA, 15 bp, Homo sapiens
gcaggagaacatata

SEQ ID NO: 265105 - DNA, 15 bp, Homo sapiens
ggcaggagaacatat

SEQ ID NO: 265106 - DNA, 15 bp, Homo sapiens
aggcaggagaacata

SEQ ID NO: 265107 - DNA, 15 bp, Homo sapiens
taggcaggagaacat

SEQ ID NO: 265108 - DNA, 15 bp, Homo sapiens
gtaggcaggagaaca

SEQ ID NO: 265109 - DNA, 15 bp, Homo sapiens
agtaggcaggagaac

SEQ ID NO: 265110 - DNA, 15 bp, Homo sapiens
cagtaggcaggagaa

SEQ ID NO: 265111 - DNA, 15 bp, Homo sapiens
ccagtaggcaggaga

SEQ ID NO: 265112 - DNA, 15 bp, Homo sapiens
tccagtaggcaggag

SEQ ID NO: 265113 - DNA, 15 bp, Homo sapiens
ttccagtaggcagga

SEQ ID NO: 265114 - DNA, 15 bp, Homo sapiens
cttccagtaggcagg

SEQ ID NO: 265115 - DNA, 15 bp, Homo sapiens
gcttccagtaggcag

SEQ ID NO: 265116 - DNA, 15 bp, Homo sapiens
ggcttccagtaggca

SEQ ID NO: 265117 - DNA, 15 bp, Homo sapiens
tggcttccagtaggc

SEQ ID NO: 265118 - DNA, 15 bp, Homo sapiens
ttggcttccagtagg

SEQ ID NO: 265119 - DNA, 15 bp, Homo sapiens
cttggcttccagtag

SEQ ID NO: 265120 - DNA, 15 bp, Homo sapiens
gcttggcttccagta

SEQ ID NO: 265121 - DNA, 15 bp, Homo sapiens
tgcttggcttccagt

SEQ ID NO: 265122 - DNA, 15 bp, Homo sapiens
gtgcttggcttccag

SEQ ID NO: 265123 - DNA, 15 bp, Homo sapiens
agtgcttggcttcca

SEQ ID NO: 265124 - DNA, 15 bp, Homo sapiens
aagtgcttggcttcc

SEQ ID NO: 265125 - DNA, 15 bp, Homo sapiens
aaagtgcttggcttc

SEQ ID NO: 265126 - DNA, 15 bp, Homo sapiens
aaaagtgcttggctt

SEQ ID NO: 265127 - DNA, 15 bp, Homo sapiens
caaaagtgcttggct

SEQ ID NO: 265128 - DNA, 15 bp, Homo sapiens
ccaaaagtgcttggc

SEQ ID NO: 265129 - DNA, 15 bp, Homo sapiens
accaaaagtgcttgg

SEQ ID NO: 265130 - DNA, 15 bp, Homo sapiens
caccaaaagtgcttg

SEQ ID NO: 265131 - DNA, 15 bp, Homo sapiens
ccaccaaaagtgctt

SEQ ID NO: 265132 - DNA, 15 bp, Homo sapiens
tccaccaaaagtgct

SEQ ID NO: 265133 - DNA, 15 bp, Homo sapiens
ctccaccaaaagtgc

SEQ ID NO: 265134 - DNA, 15 bp, Homo sapiens
tctccaccaaaagtg

SEQ ID NO: 265135 - DNA, 15 bp, Homo sapiens
ttctccaccaaaagt

SEQ ID NO: 265136 - DNA, 15 bp, Homo sapiens
cttctccaccaaaag

SEQ ID NO: 265137 - DNA, 15 bp, Homo sapiens
acttctccaccaaaa

SEQ ID NO: 265138 - DNA, 15 bp, Homo sapiens
cacttctccaccaaa

SEQ ID NO: 265139 - DNA, 15 bp, Homo sapiens
ccacttctccaccaa

SEQ ID NO: 265140 - DNA, 15 bp, Homo sapiens
cccacttctccacca

SEQ ID NO: 265141 - DNA, 15 bp, Homo sapiens
acccacttctccacc

SEQ ID NO: 265142 - DNA, 15 bp, Homo sapiens
aacccacttctccac

SEQ ID NO: 265143 - DNA, 15 bp, Homo sapiens
aaacccacttctcca

SEQ ID NO: 265144 - DNA, 15 bp, Homo sapiens
aaaacccacttctcc

SEQ ID NO: 265145 - DNA, 15 bp, Homo sapiens
gaaaacccacttctc

SEQ ID NO: 265146 - DNA, 15 bp, Homo sapiens
tgaaaacccacttct

SEQ ID NO: 265147 - DNA, 15 bp, Homo sapiens
ttgaaaacccacttc

SEQ ID NO: 265148 - DNA, 15 bp, Homo sapiens
tttgaaaacccactt

SEQ ID NO: 265149 - DNA, 15 bp, Homo sapiens
atttgaaaacccact

SEQ ID NO: 265150 - DNA, 15 bp, Homo sapiens
gatttgaaaacccac

SEQ ID NO: 265151 - DNA, 15 bp, Homo sapiens
tgatttgaaaaccca

SEQ ID NO: 265152 - DNA, 15 bp, Homo sapiens
atgatttgaaaaccc

SEQ ID NO: 265153 - DNA, 15 bp, Homo sapiens
gatgatttgaaaacc

SEQ ID NO: 265154 - DNA, 15 bp, Homo sapiens
tgatgatttgaaaac

SEQ ID NO: 265155 - DNA, 15 bp, Homo sapiens
ttgatgatttgaaaa

SEQ ID NO: 265156 - DNA, 15 bp, Homo sapiens
gttgatgatttgaaa

SEQ ID NO: 265157 - DNA, 15 bp, Homo sapiens
tgttgatgatttgaa

SEQ ID NO: 265158 - DNA, 15 bp, Homo sapiens
gtgttgatgatttga

SEQ ID NO: 265159 - DNA, 15 bp, Homo sapiens
agtgttgatgatttg

SEQ ID NO: 265160 - DNA, 15 bp, Homo sapiens
cagtgttgatgattt

SEQ ID NO: 265161 - DNA, 15 bp, Homo sapiens
gcagtgttgatgatt

SEQ ID NO: 265162 - DNA, 15 bp, Homo sapiens
ggcagtgttgatgat

SEQ ID NO: 265163 - DNA, 15 bp, Homo sapiens
aggcagtgttgatga

SEQ ID NO: 265164 - DNA, 15 bp, Homo sapiens
gaggcagtgttgatg

SEQ ID NO: 265165 - DNA, 15 bp, Homo sapiens
tgaggcagtgttgat

SEQ ID NO: 265166 - DNA, 15 bp, Homo sapiens
ttgaggcagtgttga

SEQ ID NO: 265167 - DNA, 15 bp, Homo sapiens
attgaggcagtgttg

SEQ ID NO: 265168 - DNA, 15 bp, Homo sapiens
aattgaggcagtgtt

SEQ ID NO: 265169 - DNA, 15 bp, Homo sapiens
gaattgaggcagtgt

SEQ ID NO: 265170 - DNA, 15 bp, Homo sapiens
tgaattgaggcagtg

SEQ ID NO: 265171 - DNA, 15 bp, Homo sapiens
ctgaattgaggcagt

SEQ ID NO: 265172 - DNA, 15 bp, Homo sapiens
actgaattgaggcag

SEQ ID NO: 265173 - DNA, 15 bp, Homo sapiens
gactgaattgaggca

SEQ ID NO: 265174 - DNA, 15 bp, Homo sapiens
agactgaattgaggc

SEQ ID NO: 265175 - DNA, 15 bp, Homo sapiens
gagactgaattgagg

SEQ ID NO: 265176 - DNA, 15 bp, Homo sapiens
agagactgaattgag

SEQ ID NO: 265177 - DNA, 15 bp, Homo sapiens
gagagactgaattga

SEQ ID NO: 265178 - DNA, 15 bp, Homo sapiens
tgagagactgaattg

SEQ ID NO: 265179 - DNA, 15 bp, Homo sapiens
atgagagactgaatt

SEQ ID NO: 265180 - DNA, 15 bp, Homo sapiens
gatgagagactgaat

SEQ ID NO: 265181 - DNA, 15 bp, Homo sapiens
agatgagagactgaa

SEQ ID NO: 265182 - DNA, 15 bp, Homo sapiens
cagatgagagactga

SEQ ID NO: 265183 - DNA, 15 bp, Homo sapiens
gcagatgagagactg

SEQ ID NO: 265184 - DNA, 15 bp, Homo sapiens
tgcagatgagagact

SEQ ID NO: 265185 - DNA, 15 bp, Homo sapiens
ttgcagatgagagac

SEQ ID NO: 265186 - DNA, 15 bp, Homo sapiens
attgcagatgagaga

SEQ ID NO: 265187 - DNA, 15 bp, Homo sapiens
tattgcagatgagag

SEQ ID NO: 265188 - DNA, 15 bp, Homo sapiens
ttattgcagatgaga

SEQ ID NO: 265189 - DNA, 15 bp, Homo sapiens
gttattgcagatgag

SEQ ID NO: 265190 - DNA, 15 bp, Homo sapiens
cgttattgcagatga

SEQ ID NO: 265191 - DNA, 15 bp, Homo sapiens
acgttattgcagatg

SEQ ID NO: 265192 - DNA, 15 bp, Homo sapiens
cacgttattgcagat

SEQ ID NO: 265193 - DNA, 15 bp, Homo sapiens
tcacgttattgcaga

SEQ ID NO: 265194 - DNA, 15 bp, Homo sapiens
ttcacgttattgcag

SEQ ID NO: 265195 - DNA, 15 bp, Homo sapiens
cttcacgttattgca

SEQ ID NO: 265196 - DNA, 15 bp, Homo sapiens
ccttcacgttattgc

SEQ ID NO: 265197 - DNA, 15 bp, Homo sapiens
cccttcacgttattg

SEQ ID NO: 265198 - DNA, 15 bp, Homo sapiens
gcccttcacgttatt

SEQ ID NO: 265199 - DNA, 15 bp, Homo sapiens
agcccttcacgttat

SEQ ID NO: 265200 - DNA, 15 bp, Homo sapiens
cagcccttcacgtta

SEQ ID NO: 265201 - DNA, 15 bp, Homo sapiens
acagcccttcacgtt

SEQ ID NO: 265202 - DNA, 15 bp, Homo sapiens
gacagcccttcacgt

SEQ ID NO: 265203 - DNA, 15 bp, Homo sapiens
ggacagcccttcacg

SEQ ID NO: 265204 - DNA, 15 bp, Homo sapiens
gggacagcccttcac

SEQ ID NO: 265205 - DNA, 15 bp, Homo sapiens
agggacagcccttca

SEQ ID NO: 265206 - DNA, 15 bp, Homo sapiens
aagggacagcccttc

SEQ ID NO: 265207 - DNA, 15 bp, Homo sapiens
aaagggacagccctt

SEQ ID NO: 265208 - DNA, 15 bp, Homo sapiens
taaagggacagccct

SEQ ID NO: 265209 - DNA, 15 bp, Homo sapiens
gtaaagggacagccc

SEQ ID NO: 265210 - DNA, 15 bp, Homo sapiens
agtaaagggacagcc

SEQ ID NO: 265211 - DNA, 15 bp, Homo sapiens
aagtaaagggacagc

SEQ ID NO: 265212 - DNA, 15 bp, Homo sapiens
gaagtaaagggacag

SEQ ID NO: 265213 - DNA, 15 bp, Homo sapiens
tgaagtaaagggaca

SEQ ID NO: 265214 - DNA, 15 bp, Homo sapiens
atgaagtaaagggac

SEQ ID NO: 265215 - DNA, 15 bp, Homo sapiens
aatgaagtaaaggga

SEQ ID NO: 265216 - DNA, 15 bp, Homo sapiens
gaatgaagtaaaggg

SEQ ID NO: 265217 - DNA, 15 bp, Homo sapiens
tgaatgaagtaaagg

SEQ ID NO: 265218 - DNA, 15 bp, Homo sapiens
ctgaatgaagtaaag

SEQ ID NO: 265219 - DNA, 15 bp, Homo sapiens
actgaatgaagtaaa

SEQ ID NO: 265220 - DNA, 15 bp, Homo sapiens
cactgaatgaagtaa

SEQ ID NO: 265221 - DNA, 15 bp, Homo sapiens
acactgaatgaagta

SEQ ID NO: 265222 - DNA, 15 bp, Homo sapiens
aacactgaatgaagt

SEQ ID NO: 265223 - DNA, 15 bp, Homo sapiens
gaacactgaatgaag

SEQ ID NO: 265224 - DNA, 15 bp, Homo sapiens
ggaacactgaatgaa

SEQ ID NO: 265225 - DNA, 15 bp, Homo sapiens
tggaacactgaatga

SEQ ID NO: 265226 - DNA, 15 bp, Homo sapiens
ctggaacactgaatg

SEQ ID NO: 265227 - DNA, 15 bp, Homo sapiens
tctggaacactgaat

SEQ ID NO: 265228 - DNA, 15 bp, Homo sapiens
atctggaacactgaa

SEQ ID NO: 265229 - DNA, 15 bp, Homo sapiens
gatctggaacactga

SEQ ID NO: 265230 - DNA, 15 bp, Homo sapiens
ggatctggaacactg

SEQ ID NO: 265231 - DNA, 15 bp, Homo sapiens
tggatctggaacact

SEQ ID NO: 265232 - DNA, 15 bp, Homo sapiens
ctggatctggaacac

SEQ ID NO: 265233 - DNA, 15 bp, Homo sapiens
tctggatctggaaca

SEQ ID NO: 265234 - DNA, 15 bp, Homo sapiens
ctctggatctggaac

SEQ ID NO: 265235 - DNA, 15 bp, Homo sapiens
gctctggatctggaa

SEQ ID NO: 265236 - DNA, 15 bp, Homo sapiens
agctctggatctgga

SEQ ID NO: 265237 - DNA, 15 bp, Homo sapiens
gagctctggatctgg

SEQ ID NO: 265238 - DNA, 15 bp, Homo sapiens
tgagctctggatctg

SEQ ID NO: 265239 - DNA, 15 bp, Homo sapiens
atgagctctggatct

SEQ ID NO: 265240 - DNA, 15 bp, Homo sapiens
aatgagctctggatc

SEQ ID NO: 265241 - DNA, 15 bp, Homo sapiens
taatgagctctggat

SEQ ID NO: 265242 - DNA, 15 bp, Homo sapiens
ttaatgagctctgga

SEQ ID NO: 265243 - DNA, 15 bp, Homo sapiens
tttaatgagctctgg

SEQ ID NO: 265244 - DNA, 15 bp, Homo sapiens
ttttaatgagctctg

SEQ ID NO: 265245 - DNA, 15 bp, Homo sapiens
gttttaatgagctct

SEQ ID NO: 265246 - DNA, 15 bp, Homo sapiens
tgttttaatgagctc

SEQ ID NO: 265247 - DNA, 15 bp, Homo sapiens
ctgttttaatgagct

SEQ ID NO: 265248 - DNA, 15 bp, Homo sapiens
actgttttaatgagc

SEQ ID NO: 265249 - DNA, 15 bp, Homo sapiens
gactgttttaatgag

SEQ ID NO: 265250 - DNA, 15 bp, Homo sapiens
tgactgttttaatga

SEQ ID NO: 265251 - DNA, 15 bp, Homo sapiens
gtgactgttttaatg

SEQ ID NO: 265252 - DNA, 15 bp, Homo sapiens
ggtgactgttttaat

SEQ ID NO: 265253 - DNA, 15 bp, Homo sapiens
tggtgactgttttaa

SEQ ID NO: 265254 - DNA, 15 bp, Homo sapiens
atggtgactgtttta

SEQ ID NO: 265255 - DNA, 15 bp, Homo sapiens
gatggtgactgtttt

SEQ ID NO: 265256 - DNA, 15 bp, Homo sapiens
tgatggtgactgttt

SEQ ID NO: 265257 - DNA, 15 bp, Homo sapiens
ttgatggtgactgtt

SEQ ID NO: 265258 - DNA, 15 bp, Homo sapiens
attgatggtgactgt

SEQ ID NO: 265259 - DNA, 15 bp, Homo sapiens
cattgatggtgactg

SEQ ID NO: 265260 - DNA, 15 bp, Homo sapiens
gcattgatggtgact

SEQ ID NO: 265261 - DNA, 15 bp, Homo sapiens
tgcattgatggtgac

SEQ ID NO: 265262 - DNA, 15 bp, Homo sapiens
ttgcattgatggtga

SEQ ID NO: 265263 - DNA, 15 bp, Homo sapiens
cttgcattgatggtg

SEQ ID NO: 265264 - DNA, 15 bp, Homo sapiens
acttgcattgatggt

SEQ ID NO: 265265 - DNA, 15 bp, Homo sapiens
aacttgcattgatgg

SEQ ID NO: 265266 - DNA, 15 bp, Homo sapiens
gaacttgcattgatg

SEQ ID NO: 265267 - DNA, 15 bp, Homo sapiens
agaacttgcattgat

SEQ ID NO: 265268 - DNA, 15 bp, Homo sapiens
aagaacttgcattga

SEQ ID NO: 265269 - DNA, 15 bp, Homo sapiens
gaagaacttgcattg

SEQ ID NO: 265270 - DNA, 15 bp, Homo sapiens
ggaagaacttgcatt

SEQ ID NO: 265271 - DNA, 15 bp, Homo sapiens
gggaagaacttgcat

SEQ ID NO: 265272 - DNA, 15 bp, Homo sapiens
cgggaagaacttgca

SEQ ID NO: 265273 - DNA, 15 bp, Homo sapiens
gcgggaagaacttgc

SEQ ID NO: 265274 - DNA, 15 bp, Homo sapiens
agcgggaagaacttg

SEQ ID NO: 265275 - DNA, 15 bp, Homo sapiens
gagcgggaagaactt

SEQ ID NO: 265276 - DNA, 15 bp, Homo sapiens
ggagcgggaagaact

SEQ ID NO: 265277 - DNA, 15 bp, Homo sapiens
cggagcgggaagaac

SEQ ID NO: 265278 - DNA, 15 bp, Homo sapiens
ccggagcgggaagaa

SEQ ID NO: 265279 - DNA, 15 bp, Homo sapiens
tccggagcgggaaga

SEQ ID NO: 265280 - DNA, 15 bp, Homo sapiens
gtccggagcgggaag

SEQ ID NO: 265281 - DNA, 15 bp, Homo sapiens
agtccggagcgggaa

SEQ ID NO: 265282 - DNA, 15 bp, Homo sapiens
tagtccggagcggga

SEQ ID NO: 265283 - DNA, 15 bp, Homo sapiens
ctagtccggagcggg

SEQ ID NO: 265284 - DNA, 15 bp, Homo sapiens
tctagtccggagcgg

SEQ ID NO: 265285 - DNA, 15 bp, Homo sapiens
atctagtccggagcg

SEQ ID NO: 265286 - DNA, 15 bp, Homo sapiens
catctagtccggagc

SEQ ID NO: 265287 - DNA, 15 bp, Homo sapiens
tcatctagtccggag

SEQ ID NO: 265288 - DNA, 15 bp, Homo sapiens
atcatctagtccgga

SEQ ID NO: 265289 - DNA, 15 bp, Homo sapiens
tatcatctagtccgg

SEQ ID NO: 265290 - DNA, 15 bp, Homo sapiens
atatcatctagtccg

SEQ ID NO: 265291 - DNA, 15 bp, Homo sapiens
gatatcatctagtcc

SEQ ID NO: 265292 - DNA, 15 bp, Homo sapiens
tgatatcatctagtc

SEQ ID NO: 265293 - DNA, 15 bp, Homo sapiens
ttgatatcatctagt

SEQ ID NO: 265294 - DNA, 15 bp, Homo sapiens
attgatatcatctag

SEQ ID NO: 265295 - DNA, 15 bp, Homo sapiens
gattgatatcatcta

SEQ ID NO: 265296 - DNA, 15 bp, Homo sapiens
ggattgatatcatct

SEQ ID NO: 265297 - DNA, 15 bp, Homo sapiens
gggattgatatcatc

SEQ ID NO: 265298 - DNA, 15 bp, Homo sapiens
tgggattgatatcat

SEQ ID NO: 265299 - DNA, 15 bp, Homo sapiens
gtgggattgatatca

SEQ ID NO: 265300 - DNA, 15 bp, Homo sapiens
tgtgggattgatatc

SEQ ID NO: 265301 - DNA, 15 bp, Homo sapiens
ctgtgggattgatat

SEQ ID NO: 265302 - DNA, 15 bp, Homo sapiens
actgtgggattgata

SEQ ID NO: 265303 - DNA, 15 bp, Homo sapiens
tactgtgggattgat

SEQ ID NO: 265304 - DNA, 15 bp, Homo sapiens
gtactgtgggattga

SEQ ID NO: 265305 - DNA, 15 bp, Homo sapiens
agtactgtgggattg

SEQ ID NO: 265306 - DNA, 15 bp, Homo sapiens
tagtactgtgggatt

SEQ ID NO: 265307 - DNA, 15 bp, Homo sapiens
gtagtactgtgggat

SEQ ID NO: 265308 - DNA, 15 bp, Homo sapiens
agtagtactgtggga

SEQ ID NO: 265309 - DNA, 15 bp, Homo sapiens
tagtagtactgtggg

SEQ ID NO: 265310 - DNA, 15 bp, Homo sapiens
ttagtagtactgtgg

SEQ ID NO: 265311 - DNA, 15 bp, Homo sapiens
tttagtagtactgtg

SEQ ID NO: 265312 - DNA, 15 bp, Homo sapiens
ttttagtagtactgt

SEQ ID NO: 265313 - DNA, 15 bp, Homo sapiens
cttttagtagtactg

SEQ ID NO: 265314 - DNA, 15 bp, Homo sapiens
tcttttagtagtact

SEQ ID NO: 265315 - DNA, 15 bp, Homo sapiens
ttcttttagtagtac

SEQ ID NO: 265316 - DNA, 15 bp, Homo sapiens
gttcttttagtagta

SEQ ID NO: 265317 - DNA, 15 bp, Homo sapiens
cgttcttttagtagt

SEQ ID NO: 265318 - DNA, 15 bp, Homo sapiens
acgttcttttagtag

SEQ ID NO: 265319 - DNA, 15 bp, Homo sapiens
aacgttcttttagta

SEQ ID NO: 265320 - DNA, 15 bp, Homo sapiens
gaacgttcttttagt

SEQ ID NO: 265321 - DNA, 15 bp, Homo sapiens
cgaacgttcttttag

SEQ ID NO: 265322 - DNA, 15 bp, Homo sapiens
tcgaacgttctttta

SEQ ID NO: 265323 - DNA, 15 bp, Homo sapiens
gtcgaacgttctttt

SEQ ID NO: 265324 - DNA, 15 bp, Homo sapiens
agtcgaacgttcttt

SEQ ID NO: 265325 - DNA, 15 bp, Homo sapiens
cagtcgaacgttctt

SEQ ID NO: 265326 - DNA, 15 bp, Homo sapiens
tcagtcgaacgttct

SEQ ID NO: 265327 - DNA, 15 bp, Homo sapiens
ttcagtcgaacgttc

SEQ ID NO: 265328 - DNA, 15 bp, Homo sapiens
gttcagtcgaacgtt

SEQ ID NO: 265329 - DNA, 15 bp, Homo sapiens
agttcagtcgaacgt

SEQ ID NO: 265330 - DNA, 15 bp, Homo sapiens
cagttcagtcgaacg

SEQ ID NO: 265331 - DNA, 15 bp, Homo sapiens
acagttcagtcgaac

SEQ ID NO: 265332 - DNA, 15 bp, Homo sapiens
tacagttcagtcgaa

SEQ ID NO: 265333 - DNA, 15 bp, Homo sapiens
ctacagttcagtcga

SEQ ID NO: 265334 - DNA, 15 bp, Homo sapiens
tctacagttcagtcg

SEQ ID NO: 265335 - DNA, 15 bp, Homo sapiens
ttctacagttcagtc

SEQ ID NO: 265336 - DNA, 15 bp, Homo sapiens
cttctacagttcagt

SEQ ID NO: 265337 - DNA, 15 bp, Homo sapiens
acttctacagttcag

SEQ ID NO: 265338 - DNA, 15 bp, Homo sapiens
gacttctacagttca

SEQ ID NO: 265339 - DNA, 15 bp, Homo sapiens
agacttctacagttc

SEQ ID NO: 265340 - DNA, 15 bp, Homo sapiens
tagacttctacagtt

SEQ ID NO: 265341 - DNA, 15 bp, Homo sapiens
ttagacttctacagt

SEQ ID NO: 265342 - DNA, 15 bp, Homo sapiens
attagacttctacag

SEQ ID NO: 265343 - DNA, 15 bp, Homo sapiens
cattagacttctaca

SEQ ID NO: 265344 - DNA, 15 bp, Homo sapiens
tcattagacttctac

SEQ ID NO: 265345 - DNA, 15 bp, Homo sapiens
atcattagacttcta

SEQ ID NO: 265346 - DNA, 15 bp, Homo sapiens
gatcattagacttct

SEQ ID NO: 265347 - DNA, 15 bp, Homo sapiens
tgatcattagacttc

SEQ ID NO: 265348 - DNA, 15 bp, Homo sapiens
atgatcattagactt

SEQ ID NO: 265349 - DNA, 15 bp, Homo sapiens
tatgatcattagact

SEQ ID NO: 265350 - DNA, 15 bp, Homo sapiens
atatgatcattagac

SEQ ID NO: 265351 - DNA, 15 bp, Homo sapiens
aatatgatcattaga

SEQ ID NO: 265352 - DNA, 15 bp, Homo sapiens
aaatatgatcattag

SEQ ID NO: 265353 - DNA, 15 bp, Homo sapiens
taaatatgatcatta

SEQ ID NO: 265354 - DNA, 15 bp, Homo sapiens
ataaatatgatcatt

SEQ ID NO: 265355 - DNA, 15 bp, Homo sapiens
aataaatatgatcat

SEQ ID NO: 265356 - DNA, 15 bp, Homo sapiens
aaataaatatgatca

SEQ ID NO: 265357 - DNA, 15 bp, Homo sapiens
taaataaatatgatc

SEQ ID NO: 265358 - DNA, 15 bp, Homo sapiens
ataaataaatatgat

SEQ ID NO: 265359 - DNA, 15 bp, Homo sapiens
aataaataaatatga

SEQ ID NO: 265360 - DNA, 15 bp, Homo sapiens
aaataaataaatatg

SEQ ID NO: 265361 - DNA, 15 bp, Homo sapiens
taaataaataaatat

SEQ ID NO: 265362 - DNA, 15 bp, Homo sapiens
tataaataaataaat

SEQ ID NO: 265363 - DNA, 15 bp, Homo sapiens
atataaataaataaa

SEQ ID NO: 265364 - DNA, 15 bp, Homo sapiens
catataaataaataa

SEQ ID NO: 265365 - DNA, 15 bp, Homo sapiens
tcatataaataaata

SEQ ID NO: 265366 - DNA, 15 bp, Homo sapiens
ttcatataaataaat

SEQ ID NO: 265367 - DNA, 15 bp, Homo sapiens
gttcatataaataaa

SEQ ID NO: 265368 - DNA, 15 bp, Homo sapiens
ggttcatataaataa

SEQ ID NO: 265369 - DNA, 15 bp, Homo sapiens
tggttcatataaata

SEQ ID NO: 265370 - DNA, 15 bp, Homo sapiens
atggttcatataaat

SEQ ID NO: 265371 - DNA, 15 bp, Homo sapiens
catggttcatataaa

SEQ ID NO: 265372 - DNA, 15 bp, Homo sapiens
acatggttcatataa

SEQ ID NO: 265373 - DNA, 15 bp, Homo sapiens
gacatggttcatata

SEQ ID NO: 265374 - DNA, 15 bp, Homo sapiens
agacatggttcatat

SEQ ID NO: 265375 - DNA, 15 bp, Homo sapiens
tagacatggttcata

SEQ ID NO: 265376 - DNA, 15 bp, Homo sapiens
atagacatggttcat

SEQ ID NO: 265377 - DNA, 15 bp, Homo sapiens
aatagacatggttca

SEQ ID NO: 265378 - DNA, 15 bp, Homo sapiens
taatagacatggttc

SEQ ID NO: 265379 - DNA, 15 bp, Homo sapiens
ttaatagacatggtt

SEQ ID NO: 265380 - DNA, 15 bp, Homo sapiens
attaatagacatggt

SEQ ID NO: 265381 - DNA, 15 bp, Homo sapiens
aattaatagacatgg

SEQ ID NO: 265382 - DNA, 15 bp, Homo sapiens
aaattaatagacatg

SEQ ID NO: 265383 - DNA, 15 bp, Homo sapiens
taaattaatagacat

SEQ ID NO: 265384 - DNA, 15 bp, Homo sapiens
ttaaattaatagaca

SEQ ID NO: 265385 - DNA, 15 bp, Homo sapiens
attaaattaatagac

SEQ ID NO: 265386 - DNA, 15 bp, Homo sapiens
aattaaattaataga

SEQ ID NO: 265387 - DNA, 15 bp, Homo sapiens
taattaaattaatag

SEQ ID NO: 265388 - DNA, 15 bp, Homo sapiens
ataattaaattaata

SEQ ID NO: 265389 - DNA, 15 bp, Homo sapiens
aataattaaattaat

SEQ ID NO: 265390 - DNA, 15 bp, Homo sapiens
aaataattaaattaa

SEQ ID NO: 265391 - DNA, 15 bp, Homo sapiens
taaataattaaatta

SEQ ID NO: 265392 - DNA, 15 bp, Homo sapiens
ttaaataattaaatt

SEQ ID NO: 265393 - DNA, 15 bp, Homo sapiens
attaaataattaaat

SEQ ID NO: 265394 - DNA, 15 bp, Homo sapiens
tattaaataattaaa

SEQ ID NO: 265395 - DNA, 15 bp, Homo sapiens
ttattaaataattaa

SEQ ID NO: 265396 - DNA, 15 bp, Homo sapiens
attattaaataatta

SEQ ID NO: 265397 - DNA, 15 bp, Homo sapiens
tattattaaataatt

SEQ ID NO: 265398 - DNA, 15 bp, Homo sapiens
atattattaaataat

SEQ ID NO: 265399 - DNA, 15 bp, Homo sapiens
aatattattaaataa

SEQ ID NO: 265400 - DNA, 15 bp, Homo sapiens
aaatattattaaata

SEQ ID NO: 265401 - DNA, 15 bp, Homo sapiens
taaatattattaaat

SEQ ID NO: 265402 - DNA, 15 bp, Homo sapiens
ataaatattattaaa

SEQ ID NO: 265403 - DNA, 15 bp, Homo sapiens
tataaatattattaa

SEQ ID NO: 265404 - DNA, 15 bp, Homo sapiens
atataaatattatta

SEQ ID NO: 265405 - DNA, 15 bp, Homo sapiens
aatataaatattatt

SEQ ID NO: 265406 - DNA, 15 bp, Homo sapiens
taatataaatattat

SEQ ID NO: 265407 - DNA, 15 bp, Homo sapiens
ttaatataaatatta

SEQ ID NO: 265408 - DNA, 15 bp, Homo sapiens
tttaatataaatatt

SEQ ID NO: 265409 - DNA, 15 bp, Homo sapiens
gtttaatataaatat

SEQ ID NO: 265410 - DNA, 15 bp, Homo sapiens
agtttaatataaata

SEQ ID NO: 265411 - DNA, 15 bp, Homo sapiens
gagtttaatataaat

SEQ ID NO: 265412 - DNA, 15 bp, Homo sapiens
ggagtttaatataaa

SEQ ID NO: 265413 - DNA, 15 bp, Homo sapiens
aggagtttaatataa

SEQ ID NO: 265414 - DNA, 15 bp, Homo sapiens
aaggagtttaatata

SEQ ID NO: 265415 - DNA, 15 bp, Homo sapiens
taaggagtttaatat

SEQ ID NO: 265416 - DNA, 15 bp, Homo sapiens
ataaggagtttaata

SEQ ID NO: 265417 - DNA, 15 bp, Homo sapiens
cataaggagtttaat

SEQ ID NO: 265418 - DNA, 15 bp, Homo sapiens
acataaggagtttaa

SEQ ID NO: 265419 - DNA, 15 bp, Homo sapiens
aacataaggagttta

SEQ ID NO: 265420 - DNA, 15 bp, Homo sapiens
taacataaggagttt

SEQ ID NO: 265421 - DNA, 15 bp, Homo sapiens
gtaacataaggagtt

SEQ ID NO: 265422 - DNA, 15 bp, Homo sapiens
agtaacataaggagt

SEQ ID NO: 265423 - DNA, 15 bp, Homo sapiens
aagtaacataaggag

SEQ ID NO: 265424 - DNA, 15 bp, Homo sapiens
taagtaacataagga

SEQ ID NO: 265425 - DNA, 15 bp, Homo sapiens
ttaagtaacataagg

SEQ ID NO: 265426 - DNA, 15 bp, Homo sapiens
gttaagtaacataag

SEQ ID NO: 265427 - DNA, 15 bp, Homo sapiens
tgttaagtaacataa

SEQ ID NO: 265428 - DNA, 15 bp, Homo sapiens
atgttaagtaacata

SEQ ID NO: 265429 - DNA, 15 bp, Homo sapiens
gatgttaagtaacat

SEQ ID NO: 265430 - DNA, 15 bp, Homo sapiens
agatgttaagtaaca

SEQ ID NO: 265431 - DNA, 15 bp, Homo sapiens
aagatgttaagtaac

SEQ ID NO: 265432 - DNA, 15 bp, Homo sapiens
gaagatgttaagtaa

SEQ ID NO: 265433 - DNA, 15 bp, Homo sapiens
agaagatgttaagta

SEQ ID NO: 265434 - DNA, 15 bp, Homo sapiens
cagaagatgttaagt

SEQ ID NO: 265435 - DNA, 15 bp, Homo sapiens
acagaagatgttaag

SEQ ID NO: 265436 - DNA, 15 bp, Homo sapiens
tacagaagatgttaa

SEQ ID NO: 265437 - DNA, 15 bp, Homo sapiens
ttacagaagatgtta

SEQ ID NO: 265438 - DNA, 15 bp, Homo sapiens
gttacagaagatgtt

SEQ ID NO: 265439 - DNA, 15 bp, Homo sapiens
tgttacagaagatgt

SEQ ID NO: 265440 - DNA, 15 bp, Homo sapiens
ctgttacagaagatg

SEQ ID NO: 265441 - DNA, 15 bp, Homo sapiens
tctgttacagaagat

SEQ ID NO: 265442 - DNA, 15 bp, Homo sapiens
ttctgttacagaaga

SEQ ID NO: 265443 - DNA, 15 bp, Homo sapiens
cttctgttacagaag

SEQ ID NO: 265444 - DNA, 15 bp, Homo sapiens
acttctgttacagaa

SEQ ID NO: 265445 - DNA, 15 bp, Homo sapiens
gacttctgttacaga

SEQ ID NO: 265446 - DNA, 15 bp, Homo sapiens
tgacttctgttacag

SEQ ID NO: 265447 - DNA, 15 bp, Homo sapiens
ctgacttctgttaca

SEQ ID NO: 265448 - DNA, 15 bp, Homo sapiens
actgacttctgttac

SEQ ID NO: 265449 - DNA, 15 bp, Homo sapiens
tactgacttctgtta

SEQ ID NO: 265450 - DNA, 15 bp, Homo sapiens
gtactgacttctgtt

SEQ ID NO: 265451 - DNA, 15 bp, Homo sapiens
agtactgacttctgt

SEQ ID NO: 265452 - DNA, 15 bp, Homo sapiens
gagtactgacttctg

SEQ ID NO: 265453 - DNA, 15 bp, Homo sapiens
ggagtactgacttct

SEQ ID NO: 265454 - DNA, 15 bp, Homo sapiens
aggagtactgacttc

SEQ ID NO: 265455 - DNA, 15 bp, Homo sapiens
caggagtactgactt

SEQ ID NO: 265456 - DNA, 15 bp, Homo sapiens
acaggagtactgact

SEQ ID NO: 265457 - DNA, 15 bp, Homo sapiens
aacaggagtactgac

SEQ ID NO: 265458 - DNA, 15 bp, Homo sapiens
caacaggagtactga

SEQ ID NO: 265459 - DNA, 15 bp, Homo sapiens
gcaacaggagtactg

SEQ ID NO: 265460 - DNA, 15 bp, Homo sapiens
cgcaacaggagtact

SEQ ID NO: 265461 - DNA, 15 bp, Homo sapiens
ccgcaacaggagtac

SEQ ID NO: 265462 - DNA, 15 bp, Homo sapiens
tccgcaacaggagta

SEQ ID NO: 265463 - DNA, 15 bp, Homo sapiens
ctccgcaacaggagt

SEQ ID NO: 265464 - DNA, 15 bp, Homo sapiens
tctccgcaacaggag

SEQ ID NO: 265465 - DNA, 15 bp, Homo sapiens
ttctccgcaacagga

SEQ ID NO: 265466 - DNA, 15 bp, Homo sapiens
tttctccgcaacagg

SEQ ID NO: 265467 - DNA, 15 bp, Homo sapiens
ctttctccgcaacag

SEQ ID NO: 265468 - DNA, 15 bp, Homo sapiens
cctttctccgcaaca

SEQ ID NO: 265469 - DNA, 15 bp, Homo sapiens
tcctttctccgcaac

SEQ ID NO: 265470 - DNA, 15 bp, Homo sapiens
ctcctttctccgcaa

SEQ ID NO: 265471 - DNA, 15 bp, Homo sapiens
actcctttctccgca

SEQ ID NO: 265472 - DNA, 15 bp, Homo sapiens
gactcctttctccgc

SEQ ID NO: 265473 - DNA, 15 bp, Homo sapiens
tgactcctttctccg

SEQ ID NO: 265474 - DNA, 15 bp, Homo sapiens
atgactcctttctcc

SEQ ID NO: 265475 - DNA, 15 bp, Homo sapiens
tatgactcctttctc

SEQ ID NO: 265476 - DNA, 15 bp, Homo sapiens
gtatgactcctttct

SEQ ID NO: 265477 - DNA, 15 bp, Homo sapiens
agtatgactcctttc

SEQ ID NO: 265478 - DNA, 15 bp, Homo sapiens
aagtatgactccttt

SEQ ID NO: 265479 - DNA, 15 bp, Homo sapiens
caagtatgactcctt

SEQ ID NO: 265480 - DNA, 15 bp, Homo sapiens
acaagtatgactcct

SEQ ID NO: 265481 - DNA, 15 bp, Homo sapiens
cacaagtatgactcc

SEQ ID NO: 265482 - DNA, 15 bp, Homo sapiens
tcacaagtatgactc

SEQ ID NO: 265483 - DNA, 15 bp, Homo sapiens
ttcacaagtatgact

SEQ ID NO: 265484 - DNA, 15 bp, Homo sapiens
cttcacaagtatgac

SEQ ID NO: 265485 - DNA, 15 bp, Homo sapiens
tcttcacaagtatga

SEQ ID NO: 265486 - DNA, 15 bp, Homo sapiens
gtcttcacaagtatg

SEQ ID NO: 265487 - DNA, 15 bp, Homo sapiens
agtcttcacaagtat

SEQ ID NO: 265488 - DNA, 15 bp, Homo sapiens
aagtcttcacaagta

SEQ ID NO: 265489 - DNA, 15 bp, Homo sapiens
aaagtcttcacaagt

SEQ ID NO: 265490 - DNA, 15 bp, Homo sapiens
aaaagtcttcacaag

SEQ ID NO: 265491 - DNA, 15 bp, Homo sapiens
taaaagtcttcacaa

SEQ ID NO: 265492 - DNA, 15 bp, Homo sapiens
ataaaagtcttcaca

SEQ ID NO: 265493 - DNA, 15 bp, Homo sapiens
cataaaagtcttcac

SEQ ID NO: 265494 - DNA, 15 bp, Homo sapiens
acataaaagtcttca

SEQ ID NO: 265495 - DNA, 15 bp, Homo sapiens
gacataaaagtcttc

SEQ ID NO: 265496 - DNA, 15 bp, Homo sapiens
tgacataaaagtctt

SEQ ID NO: 265497 - DNA, 15 bp, Homo sapiens
gtgacataaaagtct

SEQ ID NO: 265498 - DNA, 15 bp, Homo sapiens
agtgacataaaagtc

SEQ ID NO: 265499 - DNA, 15 bp, Homo sapiens
tagtgacataaaagt

SEQ ID NO: 265500 - DNA, 15 bp, Homo sapiens
gtagtgacataaaag

SEQ ID NO: 265501 - DNA, 15 bp, Homo sapiens
agtagtgacataaaa

SEQ ID NO: 265502 - DNA, 15 bp, Homo sapiens
gagtagtgacataaa

SEQ ID NO: 265503 - DNA, 15 bp, Homo sapiens
agagtagtgacataa

SEQ ID NO: 265504 - DNA, 15 bp, Homo sapiens
tagagtagtgacata

SEQ ID NO: 265505 - DNA, 15 bp, Homo sapiens
ttagagtagtgacat

SEQ ID NO: 265506 - DNA, 15 bp, Homo sapiens
tttagagtagtgaca

SEQ ID NO: 265507 - DNA, 15 bp, Homo sapiens
ctttagagtagtgac

SEQ ID NO: 265508 - DNA, 15 bp, Homo sapiens
tctttagagtagtga

SEQ ID NO: 265509 - DNA, 15 bp, Homo sapiens
atctttagagtagtg

SEQ ID NO: 265510 - DNA, 15 bp, Homo sapiens
aatctttagagtagt

SEQ ID NO: 265511 - DNA, 15 bp, Homo sapiens
aaatctttagagtag

SEQ ID NO: 265512 - DNA, 15 bp, Homo sapiens
aaaatctttagagta

SEQ ID NO: 265513 - DNA, 15 bp, Homo sapiens
caaaatctttagagt

SEQ ID NO: 265514 - DNA, 15 bp, Homo sapiens
gcaaaatctttagag

SEQ ID NO: 265515 - DNA, 15 bp, Homo sapiens
agcaaaatctttaga

SEQ ID NO: 265516 - DNA, 15 bp, Homo sapiens
cagcaaaatctttag

SEQ ID NO: 265517 - DNA, 15 bp, Homo sapiens
acagcaaaatcttta

SEQ ID NO: 265518 - DNA, 15 bp, Homo sapiens
aacagcaaaatcttt

SEQ ID NO: 265519 - DNA, 15 bp, Homo sapiens
caacagcaaaatctt

SEQ ID NO: 265520 - DNA, 15 bp, Homo sapiens
gcaacagcaaaatct

SEQ ID NO: 265521 - DNA, 15 bp, Homo sapiens
agcaacagcaaaatc

SEQ ID NO: 265522 - DNA, 15 bp, Homo sapiens
cagcaacagcaaaat

SEQ ID NO: 265523 - DNA, 15 bp, Homo sapiens
acagcaacagcaaaa

SEQ ID NO: 265524 - DNA, 15 bp, Homo sapiens
aacagcaacagcaaa

SEQ ID NO: 265525 - DNA, 15 bp, Homo sapiens
taacagcaacagcaa

SEQ ID NO: 265526 - DNA, 15 bp, Homo sapiens
ttaacagcaacagca

SEQ ID NO: 265527 - DNA, 15 bp, Homo sapiens
cttaacagcaacagc

SEQ ID NO: 265528 - DNA, 15 bp, Homo sapiens
acttaacagcaacag

SEQ ID NO: 265529 - DNA, 15 bp, Homo sapiens
aacttaacagcaaca

SEQ ID NO: 265530 - DNA, 15 bp, Homo sapiens
aaacttaacagcaac

SEQ ID NO: 265531 - DNA, 15 bp, Homo sapiens
caaacttaacagcaa

SEQ ID NO: 265532 - DNA, 15 bp, Homo sapiens
ccaaacttaacagca

SEQ ID NO: 265533 - DNA, 15 bp, Homo sapiens
tccaaacttaacagc

SEQ ID NO: 265534 - DNA, 15 bp, Homo sapiens
ttccaaacttaacag

SEQ ID NO: 265535 - DNA, 15 bp, Homo sapiens
tttccaaacttaaca

SEQ ID NO: 265536 - DNA, 15 bp, Homo sapiens
ttttccaaacttaac

SEQ ID NO: 265537 - DNA, 15 bp, Homo sapiens
gttttccaaacttaa

SEQ ID NO: 265538 - DNA, 15 bp, Homo sapiens
tgttttccaaactta

SEQ ID NO: 265539 - DNA, 15 bp, Homo sapiens
ctgttttccaaactt

SEQ ID NO: 265540 - DNA, 15 bp, Homo sapiens
actgttttccaaact

SEQ ID NO: 265541 - DNA, 15 bp, Homo sapiens
aactgttttccaaac

SEQ ID NO: 265542 - DNA, 15 bp, Homo sapiens
aaactgttttccaaa

SEQ ID NO: 265543 - DNA, 15 bp, Homo sapiens
aaaactgttttccaa

SEQ ID NO: 265544 - DNA, 15 bp, Homo sapiens
aaaaactgttttcca

SEQ ID NO: 265545 - DNA, 15 bp, Homo sapiens
taaaaactgttttcc

SEQ ID NO: 265546 - DNA, 15 bp, Homo sapiens
ataaaaactgttttc

SEQ ID NO: 265547 - DNA, 15 bp, Homo sapiens
aataaaaactgtttt

SEQ ID NO: 265548 - DNA, 15 bp, Homo sapiens
gaataaaaactgttt

SEQ ID NO: 265549 - DNA, 15 bp, Homo sapiens
agaataaaaactgtt

SEQ ID NO: 265550 - DNA, 15 bp, Homo sapiens
cagaataaaaactgt

SEQ ID NO: 265551 - DNA, 15 bp, Homo sapiens
acagaataaaaactg

SEQ ID NO: 265552 - DNA, 15 bp, Homo sapiens
aacagaataaaaact

SEQ ID NO: 265553 - DNA, 15 bp, Homo sapiens
aaacagaataaaaac

SEQ ID NO: 265554 - DNA, 15 bp, Homo sapiens
aaaacagaataaaaa

SEQ ID NO: 265555 - DNA, 15 bp, Homo sapiens
taaaacagaataaaa

SEQ ID NO: 265556 - DNA, 15 bp, Homo sapiens
ataaaacagaataaa

SEQ ID NO: 265557 - DNA, 15 bp, Homo sapiens
tataaaacagaataa

SEQ ID NO: 265558 - DNA, 15 bp, Homo sapiens
ttataaaacagaata

SEQ ID NO: 265559 - DNA, 15 bp, Homo sapiens
tttataaaacagaat

SEQ ID NO: 265560 - DNA, 15 bp, Homo sapiens
gtttataaaacagaa

SEQ ID NO: 265561 - DNA, 15 bp, Homo sapiens
ggtttataaaacaga

SEQ ID NO: 265562 - DNA, 15 bp, Homo sapiens
tggtttataaaacag

SEQ ID NO: 265563 - DNA, 15 bp, Homo sapiens
ctggtttataaaaca

SEQ ID NO: 265564 - DNA, 15 bp, Homo sapiens
tctggtttataaaac

SEQ ID NO: 265565 - DNA, 15 bp, Homo sapiens
ctctggtttataaaa

SEQ ID NO: 265566 - DNA, 15 bp, Homo sapiens
tctctggtttataaa

SEQ ID NO: 265567 - DNA, 15 bp, Homo sapiens
ctctctggtttataa

SEQ ID NO: 265568 - DNA, 15 bp, Homo sapiens
tctctctggtttata

SEQ ID NO: 265569 - DNA, 15 bp, Homo sapiens
ttctctctggtttat

SEQ ID NO: 265570 - DNA, 15 bp, Homo sapiens
tttctctctggttta

SEQ ID NO: 265571 - DNA, 15 bp, Homo sapiens
atttctctctggttt

SEQ ID NO: 265572 - DNA, 15 bp, Homo sapiens
catttctctctggtt

SEQ ID NO: 265573 - DNA, 15 bp, Homo sapiens
tcatttctctctggt

SEQ ID NO: 265574 - DNA, 15 bp, Homo sapiens
ctcatttctctctgg

SEQ ID NO: 265575 - DNA, 15 bp, Homo sapiens
actcatttctctctg

SEQ ID NO: 265576 - DNA, 15 bp, Homo sapiens
aactcatttctctct

SEQ ID NO: 265577 - DNA, 15 bp, Homo sapiens
aaactcatttctctc

SEQ ID NO: 265578 - DNA, 15 bp, Homo sapiens
aaaactcatttctct

SEQ ID NO: 265579 - DNA, 15 bp, Homo sapiens
caaaactcatttctc

SEQ ID NO: 265580 - DNA, 15 bp, Homo sapiens
tcaaaactcatttct

SEQ ID NO: 265581 - DNA, 15 bp, Homo sapiens
gtcaaaactcatttc

SEQ ID NO: 265582 - DNA, 15 bp, Homo sapiens
cgtcaaaactcattt

SEQ ID NO: 265583 - DNA, 15 bp, Homo sapiens
acgtcaaaactcatt

SEQ ID NO: 265584 - DNA, 15 bp, Homo sapiens
gacgtcaaaactcat

SEQ ID NO: 265585 - DNA, 15 bp, Homo sapiens
agacgtcaaaactca

SEQ ID NO: 265586 - DNA, 15 bp, Homo sapiens
aagacgtcaaaactc

SEQ ID NO: 265587 - DNA, 15 bp, Homo sapiens
aaagacgtcaaaact

SEQ ID NO: 265588 - DNA, 15 bp, Homo sapiens
aaaagacgtcaaaac

SEQ ID NO: 265589 - DNA, 15 bp, Homo sapiens
aaaaagacgtcaaaa

SEQ ID NO: 265590 - DNA, 15 bp, Homo sapiens
taaaaagacgtcaaa

SEQ ID NO: 265591 - DNA, 15 bp, Homo sapiens
gtaaaaagacgtcaa

SEQ ID NO: 265592 - DNA, 15 bp, Homo sapiens
agtaaaaagacgtca

SEQ ID NO: 265593 - DNA, 15 bp, Homo sapiens
aagtaaaaagacgtc

SEQ ID NO: 265594 - DNA, 15 bp, Homo sapiens
caagtaaaaagacgt

SEQ ID NO: 265595 - DNA, 15 bp, Homo sapiens
tcaagtaaaaagacg

SEQ ID NO: 265596 - DNA, 15 bp, Homo sapiens
ttcaagtaaaaagac

SEQ ID NO: 265597 - DNA, 15 bp, Homo sapiens
attcaagtaaaaaga

SEQ ID NO: 265598 - DNA, 15 bp, Homo sapiens
aattcaagtaaaaag

SEQ ID NO: 265599 - DNA, 15 bp, Homo sapiens
aaattcaagtaaaaa

SEQ ID NO: 265600 - DNA, 15 bp, Homo sapiens
gaaattcaagtaaaa

SEQ ID NO: 265601 - DNA, 15 bp, Homo sapiens
tgaaattcaagtaaa

SEQ ID NO: 265602 - DNA, 15 bp, Homo sapiens
ttgaaattcaagtaa

SEQ ID NO: 265603 - DNA, 15 bp, Homo sapiens
gttgaaattcaagta

SEQ ID NO: 265604 - DNA, 15 bp, Homo sapiens
agttgaaattcaagt

SEQ ID NO: 265605 - DNA, 15 bp, Homo sapiens
aagttgaaattcaag

SEQ ID NO: 265606 - DNA, 15 bp, Homo sapiens
taagttgaaattcaa

SEQ ID NO: 265607 - DNA, 15 bp, Homo sapiens
ataagttgaaattca

SEQ ID NO: 265608 - DNA, 15 bp, Homo sapiens
tataagttgaaattc

SEQ ID NO: 265609 - DNA, 15 bp, Homo sapiens
atataagttgaaatt

SEQ ID NO: 265610 - DNA, 15 bp, Homo sapiens
aatataagttgaaat

SEQ ID NO: 265611 - DNA, 15 bp, Homo sapiens
taatataagttgaaa

SEQ ID NO: 265612 - DNA, 15 bp, Homo sapiens
ataatataagttgaa

SEQ ID NO: 265613 - DNA, 15 bp, Homo sapiens
tataatataagttga

SEQ ID NO: 265614 - DNA, 15 bp, Homo sapiens
ttataatataagttg

SEQ ID NO: 265615 - DNA, 15 bp, Homo sapiens
cttataatataagtt

SEQ ID NO: 265616 - DNA, 15 bp, Homo sapiens
tcttataatataagt

SEQ ID NO: 265617 - DNA, 15 bp, Homo sapiens
ttcttataatataag

SEQ ID NO: 265618 - DNA, 15 bp, Homo sapiens
gttcttataatataa

SEQ ID NO: 265619 - DNA, 15 bp, Homo sapiens
cgttcttataatata

SEQ ID NO: 265620 - DNA, 15 bp, Homo sapiens
tcgttcttataatat

SEQ ID NO: 265621 - DNA, 15 bp, Homo sapiens
ttcgttcttataata

SEQ ID NO: 265622 - DNA, 15 bp, Homo sapiens
tttcgttcttataat

SEQ ID NO: 265623 - DNA, 15 bp, Homo sapiens
ctttcgttcttataa

SEQ ID NO: 265624 - DNA, 15 bp, Homo sapiens
actttcgttcttata

SEQ ID NO: 265625 - DNA, 15 bp, Homo sapiens
tactttcgttcttat

SEQ ID NO: 265626 - DNA, 15 bp, Homo sapiens
ttactttcgttctta

SEQ ID NO: 265627 - DNA, 15 bp, Homo sapiens
tttactttcgttctt

SEQ ID NO: 265628 - DNA, 15 bp, Homo sapiens
ctttactttcgttct

SEQ ID NO: 265629 - DNA, 15 bp, Homo sapiens
tctttactttcgttc

SEQ ID NO: 265630 - DNA, 15 bp, Homo sapiens
atctttactttcgtt

SEQ ID NO: 265631 - DNA, 15 bp, Homo sapiens
catctttactttcgt

SEQ ID NO: 265632 - DNA, 15 bp, Homo sapiens
acatctttactttcg

SEQ ID NO: 265633 - DNA, 15 bp, Homo sapiens
aacatctttactttc

SEQ ID NO: 265634 - DNA, 15 bp, Homo sapiens
aaacatctttacttt

SEQ ID NO: 265635 - DNA, 15 bp, Homo sapiens
caaacatctttactt

SEQ ID NO: 265636 - DNA, 15 bp, Homo sapiens
tcaaacatctttact

SEQ ID NO: 265637 - DNA, 15 bp, Homo sapiens
ttcaaacatctttac

SEQ ID NO: 265638 - DNA, 15 bp, Homo sapiens
attcaaacatcttta

SEQ ID NO: 265639 - DNA, 15 bp, Homo sapiens
tattcaaacatcttt

SEQ ID NO: 265640 - DNA, 15 bp, Homo sapiens
gtattcaaacatctt

SEQ ID NO: 265641 - DNA, 15 bp, Homo sapiens
agtattcaaacatct

SEQ ID NO: 265642 - DNA, 15 bp, Homo sapiens
aagtattcaaacatc

SEQ ID NO: 265643 - DNA, 15 bp, Homo sapiens
taagtattcaaacat

SEQ ID NO: 265644 - DNA, 15 bp, Homo sapiens
ttaagtattcaaaca

SEQ ID NO: 265645 - DNA, 15 bp, Homo sapiens
tttaagtattcaaac

SEQ ID NO: 265646 - DNA, 15 bp, Homo sapiens
gtttaagtattcaaa

SEQ ID NO: 265647 - DNA, 15 bp, Homo sapiens
tgtttaagtattcaa

SEQ ID NO: 265648 - DNA, 15 bp, Homo sapiens
gtgtttaagtattca

SEQ ID NO: 265649 - DNA, 15 bp, Homo sapiens
agtgtttaagtattc

SEQ ID NO: 265650 - DNA, 15 bp, Homo sapiens
cagtgtttaagtatt

SEQ ID NO: 265651 - DNA, 15 bp, Homo sapiens
acagtgtttaagtat

SEQ ID NO: 265652 - DNA, 15 bp, Homo sapiens
gacagtgtttaagta

SEQ ID NO: 265653 - DNA, 15 bp, Homo sapiens
tgacagtgtttaagt

SEQ ID NO: 265654 - DNA, 15 bp, Homo sapiens
gtgacagtgtttaag

SEQ ID NO: 265655 - DNA, 15 bp, Homo sapiens
tgtgacagtgtttaa

SEQ ID NO: 265656 - DNA, 15 bp, Homo sapiens
ttgtgacagtgttta

SEQ ID NO: 265657 - DNA, 15 bp, Homo sapiens
cttgtgacagtgttt

SEQ ID NO: 265658 - DNA, 15 bp, Homo sapiens
tcttgtgacagtgtt

SEQ ID NO: 265659 - DNA, 15 bp, Homo sapiens
atcttgtgacagtgt

SEQ ID NO: 265660 - DNA, 15 bp, Homo sapiens
catcttgtgacagtg

SEQ ID NO: 265661 - DNA, 15 bp, Homo sapiens
ccatcttgtgacagt

SEQ ID NO: 265662 - DNA, 15 bp, Homo sapiens
gccatcttgtgacag

SEQ ID NO: 265663 - DNA, 15 bp, Homo sapiens
tgccatcttgtgaca

SEQ ID NO: 265664 - DNA, 15 bp, Homo sapiens
ttgccatcttgtgac

SEQ ID NO: 265665 - DNA, 15 bp, Homo sapiens
tttgccatcttgtga

SEQ ID NO: 265666 - DNA, 15 bp, Homo sapiens
ttttgccatcttgtg

SEQ ID NO: 265667 - DNA, 15 bp, Homo sapiens
attttgccatcttgt

SEQ ID NO: 265668 - DNA, 15 bp, Homo sapiens
cattttgccatcttg

SEQ ID NO: 265669 - DNA, 15 bp, Homo sapiens
gcattttgccatctt

SEQ ID NO: 265670 - DNA, 15 bp, Homo sapiens
agcattttgccatct

SEQ ID NO: 265671 - DNA, 15 bp, Homo sapiens
cagcattttgccatc

SEQ ID NO: 265672 - DNA, 15 bp, Homo sapiens
tcagcattttgccat

SEQ ID NO: 265673 - DNA, 15 bp, Homo sapiens
ttcagcattttgcca

SEQ ID NO: 265674 - DNA, 15 bp, Homo sapiens
tttcagcattttgcc

SEQ ID NO: 265675 - DNA, 15 bp, Homo sapiens
ctttcagcattttgc

SEQ ID NO: 265676 - DNA, 15 bp, Homo sapiens
actttcagcattttg

SEQ ID NO: 265677 - DNA, 15 bp, Homo sapiens
aactttcagcatttt

SEQ ID NO: 265678 - DNA, 15 bp, Homo sapiens
aaactttcagcattt

SEQ ID NO: 265679 - DNA, 15 bp, Homo sapiens
aaaactttcagcatt

SEQ ID NO: 265680 - DNA, 15 bp, Homo sapiens
aaaaactttcagcat

SEQ ID NO: 265681 - DNA, 15 bp, Homo sapiens
taaaaactttcagca

SEQ ID NO: 265682 - DNA, 15 bp, Homo sapiens
gtaaaaactttcagc

SEQ ID NO: 265683 - DNA, 15 bp, Homo sapiens
tgtaaaaactttcag

SEQ ID NO: 265684 - DNA, 15 bp, Homo sapiens
gtgtaaaaactttca

SEQ ID NO: 265685 - DNA, 15 bp, Homo sapiens
agtgtaaaaactttc

SEQ ID NO: 265686 - DNA, 15 bp, Homo sapiens
cagtgtaaaaacttt

SEQ ID NO: 265687 - DNA, 15 bp, Homo sapiens
acagtgtaaaaactt

SEQ ID NO: 265688 - DNA, 15 bp, Homo sapiens
gacagtgtaaaaact

SEQ ID NO: 265689 - DNA, 15 bp, Homo sapiens
cgacagtgtaaaaac

SEQ ID NO: 265690 - DNA, 15 bp, Homo sapiens
tcgacagtgtaaaaa

SEQ ID NO: 265691 - DNA, 15 bp, Homo sapiens
atcgacagtgtaaaa

SEQ ID NO: 265692 - DNA, 15 bp, Homo sapiens
catcgacagtgtaaa

SEQ ID NO: 265693 - DNA, 15 bp, Homo sapiens
acatcgacagtgtaa

SEQ ID NO: 265694 - DNA, 15 bp, Homo sapiens
aacatcgacagtgta

SEQ ID NO: 265695 - DNA, 15 bp, Homo sapiens
aaacatcgacagtgt

SEQ ID NO: 265696 - DNA, 15 bp, Homo sapiens
gaaacatcgacagtg

SEQ ID NO: 265697 - DNA, 15 bp, Homo sapiens
ggaaacatcgacagt

SEQ ID NO: 265698 - DNA, 15 bp, Homo sapiens
tggaaacatcgacag

SEQ ID NO: 265699 - DNA, 15 bp, Homo sapiens
ttggaaacatcgaca

SEQ ID NO: 265700 - DNA, 15 bp, Homo sapiens
attggaaacatcgac

SEQ ID NO: 265701 - DNA, 15 bp, Homo sapiens
cattggaaacatcga

SEQ ID NO: 265702 - DNA, 15 bp, Homo sapiens
gcattggaaacatcg

SEQ ID NO: 265703 - DNA, 15 bp, Homo sapiens
tgcattggaaacatc

SEQ ID NO: 265704 - DNA, 15 bp, Homo sapiens
atgcattggaaacat

SEQ ID NO: 265705 - DNA, 15 bp, Homo sapiens
gatgcattggaaaca

SEQ ID NO: 265706 - DNA, 15 bp, Homo sapiens
agatgcattggaaac

SEQ ID NO: 265707 - DNA, 15 bp, Homo sapiens
aagatgcattggaaa

SEQ ID NO: 265708 - DNA, 15 bp, Homo sapiens
gaagatgcattggaa

SEQ ID NO: 265709 - DNA, 15 bp, Homo sapiens
ggaagatgcattgga

SEQ ID NO: 265710 - DNA, 15 bp, Homo sapiens
tggaagatgcattgg

SEQ ID NO: 265711 - DNA, 15 bp, Homo sapiens
atggaagatgcattg

SEQ ID NO: 265712 - DNA, 15 bp, Homo sapiens
catggaagatgcatt

SEQ ID NO: 265713 - DNA, 15 bp, Homo sapiens
tcatggaagatgcat

SEQ ID NO: 265714 - DNA, 15 bp, Homo sapiens
atcatggaagatgca

SEQ ID NO: 265715 - DNA, 15 bp, Homo sapiens
catcatggaagatgc

SEQ ID NO: 265716 - DNA, 15 bp, Homo sapiens
gcatcatggaagatg

SEQ ID NO: 265717 - DNA, 15 bp, Homo sapiens
tgcatcatggaagat

SEQ ID NO: 265718 - DNA, 15 bp, Homo sapiens
atgcatcatggaaga

SEQ ID NO: 265719 - DNA, 15 bp, Homo sapiens
aatgcatcatggaag

SEQ ID NO: 265720 - DNA, 15 bp, Homo sapiens
taatgcatcatggaa

SEQ ID NO: 265721 - DNA, 15 bp, Homo sapiens
ctaatgcatcatgga

SEQ ID NO: 265722 - DNA, 15 bp, Homo sapiens
tctaatgcatcatgg

SEQ ID NO: 265723 - DNA, 15 bp, Homo sapiens
ttctaatgcatcatg

SEQ ID NO: 265724 - DNA, 15 bp, Homo sapiens
cttctaatgcatcat

SEQ ID NO: 265725 - DNA, 15 bp, Homo sapiens
acttctaatgcatca

SEQ ID NO: 265726 - DNA, 15 bp, Homo sapiens
tacttctaatgcatc

SEQ ID NO: 265727 - DNA, 15 bp, Homo sapiens
ttacttctaatgcat

SEQ ID NO: 265728 - DNA, 15 bp, Homo sapiens
gttacttctaatgca

SEQ ID NO: 265729 - DNA, 15 bp, Homo sapiens
agttacttctaatgc

SEQ ID NO: 265730 - DNA, 15 bp, Homo sapiens
tagttacttctaatg

SEQ ID NO: 265731 - DNA, 15 bp, Homo sapiens
ttagttacttctaat

SEQ ID NO: 265732 - DNA, 15 bp, Homo sapiens
attagttacttctaa

SEQ ID NO: 265733 - DNA, 15 bp, Homo sapiens
cattagttacttcta

SEQ ID NO: 265734 - DNA, 15 bp, Homo sapiens
acattagttacttct

SEQ ID NO: 265735 - DNA, 15 bp, Homo sapiens
aacattagttacttc

SEQ ID NO: 265736 - DNA, 15 bp, Homo sapiens
aaacattagttactt

SEQ ID NO: 265737 - DNA, 15 bp, Homo sapiens
caaacattagttact

SEQ ID NO: 265738 - DNA, 15 bp, Homo sapiens
tcaaacattagttac

SEQ ID NO: 265739 - DNA, 15 bp, Homo sapiens
ttcaaacattagtta

SEQ ID NO: 265740 - DNA, 15 bp, Homo sapiens
tttcaaacattagtt

SEQ ID NO: 265741 - DNA, 15 bp, Homo sapiens
atttcaaacattagt

SEQ ID NO: 265742 - DNA, 15 bp, Homo sapiens
aatttcaaacattag

SEQ ID NO: 265743 - DNA, 15 bp, Homo sapiens
aaatttcaaacatta

SEQ ID NO: 265744 - DNA, 15 bp, Homo sapiens
aaaatttcaaacatt

SEQ ID NO: 265745 - DNA, 15 bp, Homo sapiens
taaaatttcaaacat

SEQ ID NO: 265746 - DNA, 15 bp, Homo sapiens
ttaaaatttcaaaca

SEQ ID NO: 265747 - DNA, 15 bp, Homo sapiens
tttaaaatttcaaac

SEQ ID NO: 265748 - DNA, 15 bp, Homo sapiens
ctttaaaatttcaaa

SEQ ID NO: 265749 - DNA, 15 bp, Homo sapiens
actttaaaatttcaa

SEQ ID NO: 265750 - DNA, 15 bp, Homo sapiens
tactttaaaatttca

SEQ ID NO: 265751 - DNA, 15 bp, Homo sapiens
gtactttaaaatttc

SEQ ID NO: 265752 - DNA, 15 bp, Homo sapiens
agtactttaaaattt

SEQ ID NO: 265753 - DNA, 15 bp, Homo sapiens
aagtactttaaaatt

SEQ ID NO: 265754 - DNA, 15 bp, Homo sapiens
aaagtactttaaaat

SEQ ID NO: 265755 - DNA, 15 bp, Homo sapiens
aaaagtactttaaaa

SEQ ID NO: 265756 - DNA, 15 bp, Homo sapiens
caaaagtactttaaa

SEQ ID NO: 265757 - DNA, 15 bp, Homo sapiens
ccaaaagtactttaa

SEQ ID NO: 265758 - DNA, 15 bp, Homo sapiens
accaaaagtacttta

SEQ ID NO: 265759 - DNA, 15 bp, Homo sapiens
aaccaaaagtacttt

SEQ ID NO: 265760 - DNA, 15 bp, Homo sapiens
taaccaaaagtactt

SEQ ID NO: 265761 - DNA, 15 bp, Homo sapiens
ataaccaaaagtact

SEQ ID NO: 265762 - DNA, 15 bp, Homo sapiens
aataaccaaaagtac

SEQ ID NO: 265763 - DNA, 15 bp, Homo sapiens
aaataaccaaaagta

SEQ ID NO: 265764 - DNA, 15 bp, Homo sapiens
aaaataaccaaaagt

SEQ ID NO: 265765 - DNA, 15 bp, Homo sapiens
aaaaataaccaaaag

SEQ ID NO: 265766 - DNA, 15 bp, Homo sapiens
gaaaaataaccaaaa

SEQ ID NO: 265767 - DNA, 15 bp, Homo sapiens
agaaaaataaccaaa

SEQ ID NO: 265768 - DNA, 15 bp, Homo sapiens
cagaaaaataaccaa

SEQ ID NO: 265769 - DNA, 15 bp, Homo sapiens
acagaaaaataacca

SEQ ID NO: 265770 - DNA, 15 bp, Homo sapiens
gacagaaaaataacc

SEQ ID NO: 265771 - DNA, 15 bp, Homo sapiens
tgacagaaaaataac

SEQ ID NO: 265772 - DNA, 15 bp, Homo sapiens
atgacagaaaaataa

SEQ ID NO: 265773 - DNA, 15 bp, Homo sapiens
gatgacagaaaaata

SEQ ID NO: 265774 - DNA, 15 bp, Homo sapiens
tgatgacagaaaaat

SEQ ID NO: 265775 - DNA, 15 bp, Homo sapiens
ttgatgacagaaaaa

SEQ ID NO: 265776 - DNA, 15 bp, Homo sapiens
tttgatgacagaaaa

SEQ ID NO: 265777 - DNA, 15 bp, Homo sapiens
gtttgatgacagaaa

SEQ ID NO: 265778 - DNA, 15 bp, Homo sapiens
tgtttgatgacagaa

SEQ ID NO: 265779 - DNA, 15 bp, Homo sapiens
ttgtttgatgacaga

SEQ ID NO: 265780 - DNA, 15 bp, Homo sapiens
tttgtttgatgacag

SEQ ID NO: 265781 - DNA, 15 bp, Homo sapiens
ttttgtttgatgaca

SEQ ID NO: 265782 - DNA, 15 bp, Homo sapiens
tttttgtttgatgac

SEQ ID NO: 265783 - DNA, 15 bp, Homo sapiens
gtttttgtttgatga

SEQ ID NO: 265784 - DNA, 15 bp, Homo sapiens
tgtttttgtttgatg

SEQ ID NO: 265785 - DNA, 15 bp, Homo sapiens
ctgtttttgtttgat

SEQ ID NO: 265786 - DNA, 15 bp, Homo sapiens
cctgtttttgtttga

SEQ ID NO: 265787 - DNA, 15 bp, Homo sapiens
acctgtttttgtttg

SEQ ID NO: 265788 - DNA, 15 bp, Homo sapiens
tacctgtttttgttt

SEQ ID NO: 265789 - DNA, 15 bp, Homo sapiens
atacctgtttttgtt

SEQ ID NO: 265790 - DNA, 15 bp, Homo sapiens
gatacctgtttttgt

SEQ ID NO: 265791 - DNA, 15 bp, Homo sapiens
tgatacctgtttttg

SEQ ID NO: 265792 - DNA, 15 bp, Homo sapiens
ctgatacctgttttt

SEQ ID NO: 265793 - DNA, 15 bp, Homo sapiens
actgatacctgtttt

SEQ ID NO: 265794 - DNA, 15 bp, Homo sapiens
cactgatacctgttt

SEQ ID NO: 265795 - DNA, 15 bp, Homo sapiens
gcactgatacctgtt

SEQ ID NO: 265796 - DNA, 15 bp, Homo sapiens
tgcactgatacctgt

SEQ ID NO: 265797 - DNA, 15 bp, Homo sapiens
atgcactgatacctg

SEQ ID NO: 265798 - DNA, 15 bp, Homo sapiens
aatgcactgatacct

SEQ ID NO: 265799 - DNA, 15 bp, Homo sapiens
taatgcactgatacc

SEQ ID NO: 265800 - DNA, 15 bp, Homo sapiens
ataatgcactgatac

SEQ ID NO: 265801 - DNA, 15 bp, Homo sapiens
aataatgcactgata

SEQ ID NO: 265802 - DNA, 15 bp, Homo sapiens
taataatgcactgat

SEQ ID NO: 265803 - DNA, 15 bp, Homo sapiens
ttaataatgcactga

SEQ ID NO: 265804 - DNA, 15 bp, Homo sapiens
tttaataatgcactg

SEQ ID NO: 265805 - DNA, 15 bp, Homo sapiens
atttaataatgcact

SEQ ID NO: 265806 - DNA, 15 bp, Homo sapiens
catttaataatgcac

SEQ ID NO: 265807 - DNA, 15 bp, Homo sapiens
tcatttaataatgca

SEQ ID NO: 265808 - DNA, 15 bp, Homo sapiens
ttcatttaataatgc

SEQ ID NO: 265809 - DNA, 15 bp, Homo sapiens
attcatttaataatg

SEQ ID NO: 265810 - DNA, 15 bp, Homo sapiens
tattcatttaataat

SEQ ID NO: 265811 - DNA, 15 bp, Homo sapiens
atattcatttaataa

SEQ ID NO: 265812 - DNA, 15 bp, Homo sapiens
aatattcatttaata

SEQ ID NO: 265813 - DNA, 15 bp, Homo sapiens
aaatattcatttaat

SEQ ID NO: 265814 - DNA, 15 bp, Homo sapiens
taaatattcatttaa

SEQ ID NO: 265815 - DNA, 15 bp, Homo sapiens
ttaaatattcattta

SEQ ID NO: 265816 - DNA, 15 bp, Homo sapiens
tttaaatattcattt

SEQ ID NO: 265817 - DNA, 15 bp, Homo sapiens
atttaaatattcatt

SEQ ID NO: 265818 - DNA, 15 bp, Homo sapiens
aatttaaatattcat

SEQ ID NO: 265819 - DNA, 15 bp, Homo sapiens
taatttaaatattca

SEQ ID NO: 265820 - DNA, 15 bp, Homo sapiens
ctaatttaaatattc

SEQ ID NO: 265821 - DNA, 15 bp, Homo sapiens
tctaatttaaatatt

SEQ ID NO: 265822 - DNA, 15 bp, Homo sapiens
gtctaatttaaatat

SEQ ID NO: 265823 - DNA, 15 bp, Homo sapiens
tgtctaatttaaata

SEQ ID NO: 265824 - DNA, 15 bp, Homo sapiens
atgtctaatttaaat

SEQ ID NO: 265825 - DNA, 15 bp, Homo sapiens
aatgtctaatttaaa

SEQ ID NO: 265826 - DNA, 15 bp, Homo sapiens
taatgtctaatttaa

SEQ ID NO: 265827 - DNA, 15 bp, Homo sapiens
gtaatgtctaattta

SEQ ID NO: 265828 - DNA, 15 bp, Homo sapiens
ggtaatgtctaattt

SEQ ID NO: 265829 - DNA, 15 bp, Homo sapiens
tggtaatgtctaatt

SEQ ID NO: 265830 - DNA, 15 bp, Homo sapiens
ctggtaatgtctaat

SEQ ID NO: 265831 - DNA, 15 bp, Homo sapiens
actggtaatgtctaa

SEQ ID NO: 265832 - DNA, 15 bp, Homo sapiens
tactggtaatgtcta

SEQ ID NO: 265833 - DNA, 15 bp, Homo sapiens
ttactggtaatgtct

SEQ ID NO: 265834 - DNA, 15 bp, Homo sapiens
attactggtaatgtc

SEQ ID NO: 265835 - DNA, 15 bp, Homo sapiens
aattactggtaatgt

SEQ ID NO: 265836 - DNA, 15 bp, Homo sapiens
aaattactggtaatg

SEQ ID NO: 265837 - DNA, 15 bp, Homo sapiens
gaaattactggtaat

SEQ ID NO: 265838 - DNA, 15 bp, Homo sapiens
tgaaattactggtaa

SEQ ID NO: 265839 - DNA, 15 bp, Homo sapiens
atgaaattactggta

SEQ ID NO: 265840 - DNA, 15 bp, Homo sapiens
catgaaattactggt

SEQ ID NO: 265841 - DNA, 15 bp, Homo sapiens
acatgaaattactgg

SEQ ID NO: 265842 - DNA, 15 bp, Homo sapiens
gacatgaaattactg

SEQ ID NO: 265843 - DNA, 15 bp, Homo sapiens
agacatgaaattact

SEQ ID NO: 265844 - DNA, 15 bp, Homo sapiens
tagacatgaaattac

SEQ ID NO: 265845 - DNA, 15 bp, Homo sapiens
gtagacatgaaatta

SEQ ID NO: 265846 - DNA, 15 bp, Homo sapiens
agtagacatgaaatt

SEQ ID NO: 265847 - DNA, 15 bp, Homo sapiens
aagtagacatgaaat

SEQ ID NO: 265848 - DNA, 15 bp, Homo sapiens
aaagtagacatgaaa

SEQ ID NO: 265849 - DNA, 15 bp, Homo sapiens
aaaagtagacatgaa

SEQ ID NO: 265850 - DNA, 15 bp, Homo sapiens
aaaaagtagacatga

SEQ ID NO: 265851 - DNA, 15 bp, Homo sapiens
taaaaagtagacatg

SEQ ID NO: 265852 - DNA, 15 bp, Homo sapiens
ttaaaaagtagacat

SEQ ID NO: 265853 - DNA, 15 bp, Homo sapiens
tttaaaaagtagaca

SEQ ID NO: 265854 - DNA, 15 bp, Homo sapiens
ttttaaaaagtagac

SEQ ID NO: 265855 - DNA, 15 bp, Homo sapiens
attttaaaaagtaga

SEQ ID NO: 265856 - DNA, 15 bp, Homo sapiens
gattttaaaaagtag

SEQ ID NO: 265857 - DNA, 15 bp, Homo sapiens
tgattttaaaaagta

SEQ ID NO: 265858 - DNA, 15 bp, Homo sapiens
ctgattttaaaaagt

SEQ ID NO: 265859 - DNA, 15 bp, Homo sapiens
gctgattttaaaaag

SEQ ID NO: 265860 - DNA, 15 bp, Homo sapiens
tgctgattttaaaaa

SEQ ID NO: 265861 - DNA, 15 bp, Homo sapiens
ttgctgattttaaaa

SEQ ID NO: 265862 - DNA, 15 bp, Homo sapiens
attgctgattttaaa

SEQ ID NO: 265863 - DNA, 15 bp, Homo sapiens
cattgctgattttaa

SEQ ID NO: 265864 - DNA, 15 bp, Homo sapiens
tcattgctgatttta

SEQ ID NO: 265865 - DNA, 15 bp, Homo sapiens
ttcattgctgatttt

SEQ ID NO: 265866 - DNA, 15 bp, Homo sapiens
tttcattgctgattt

SEQ ID NO: 265867 - DNA, 15 bp, Homo sapiens
gtttcattgctgatt

SEQ ID NO: 265868 - DNA, 15 bp, Homo sapiens
tgtttcattgctgat

SEQ ID NO: 265869 - DNA, 15 bp, Homo sapiens
ttgtttcattgctga

SEQ ID NO: 265870 - DNA, 15 bp, Homo sapiens
attgtttcattgctg

SEQ ID NO: 265871 - DNA, 15 bp, Homo sapiens
tattgtttcattgct

SEQ ID NO: 265872 - DNA, 15 bp, Homo sapiens
ttattgtttcattgc

SEQ ID NO: 265873 - DNA, 15 bp, Homo sapiens
attattgtttcattg

SEQ ID NO: 265874 - DNA, 15 bp, Homo sapiens
aattattgtttcatt

SEQ ID NO: 265875 - DNA, 15 bp, Homo sapiens
aaattattgtttcat

SEQ ID NO: 265876 - DNA, 15 bp, Homo sapiens
caaattattgtttca

SEQ ID NO: 265877 - DNA, 15 bp, Homo sapiens
tcaaattattgtttc

SEQ ID NO: 265878 - DNA, 15 bp, Homo sapiens
ttcaaattattgttt

SEQ ID NO: 265879 - DNA, 15 bp, Homo sapiens
tttcaaattattgtt

SEQ ID NO: 265880 - DNA, 15 bp, Homo sapiens
atttcaaattattgt

SEQ ID NO: 265881 - DNA, 15 bp, Homo sapiens
aatttcaaattattg

SEQ ID NO: 265882 - DNA, 15 bp, Homo sapiens
aaatttcaaattatt

SEQ ID NO: 265883 - DNA, 15 bp, Homo sapiens
gaaatttcaaattat

SEQ ID NO: 265884 - DNA, 15 bp, Homo sapiens
agaaatttcaaatta

SEQ ID NO: 265885 - DNA, 15 bp, Homo sapiens
tagaaatttcaaatt

SEQ ID NO: 265886 - DNA, 15 bp, Homo sapiens
ttagaaatttcaaat

SEQ ID NO: 265887 - DNA, 15 bp, Homo sapiens
tttagaaatttcaaa

SEQ ID NO: 265888 - DNA, 15 bp, Homo sapiens
atttagaaatttcaa

SEQ ID NO: 265889 - DNA, 15 bp, Homo sapiens
aatttagaaatttca

SEQ ID NO: 265890 - DNA, 15 bp, Homo sapiens
gaatttagaaatttc

SEQ ID NO: 265891 - DNA, 15 bp, Homo sapiens
tgaatttagaaattt

SEQ ID NO: 265892 - DNA, 15 bp, Homo sapiens
atgaatttagaaatt

SEQ ID NO: 265893 - DNA, 15 bp, Homo sapiens
tatgaatttagaaat

SEQ ID NO: 265894 - DNA, 15 bp, Homo sapiens
ctatgaatttagaaa

SEQ ID NO: 265895 - DNA, 15 bp, Homo sapiens
cctatgaatttagaa

SEQ ID NO: 265896 - DNA, 15 bp, Homo sapiens
ccctatgaatttaga

SEQ ID NO: 265897 - DNA, 15 bp, Homo sapiens
accctatgaatttag

SEQ ID NO: 265898 - DNA, 15 bp, Homo sapiens
taccctatgaattta

SEQ ID NO: 265899 - DNA, 15 bp, Homo sapiens
ctaccctatgaattt

SEQ ID NO: 265900 - DNA, 15 bp, Homo sapiens
tctaccctatgaatt

SEQ ID NO: 265901 - DNA, 15 bp, Homo sapiens
ttctaccctatgaat

SEQ ID NO: 265902 - DNA, 15 bp, Homo sapiens
attctaccctatgaa

SEQ ID NO: 265903 - DNA, 15 bp, Homo sapiens
gattctaccctatga

SEQ ID NO: 265904 - DNA, 15 bp, Homo sapiens
tgattctaccctatg

SEQ ID NO: 265905 - DNA, 15 bp, Homo sapiens
gtgattctaccctat

SEQ ID NO: 265906 - DNA, 15 bp, Homo sapiens
ggtgattctacccta

SEQ ID NO: 265907 - DNA, 15 bp, Homo sapiens
aggtgattctaccct

SEQ ID NO: 265908 - DNA, 15 bp, Homo sapiens
caggtgattctaccc

SEQ ID NO: 265909 - DNA, 15 bp, Homo sapiens
acaggtgattctacc

SEQ ID NO: 265910 - DNA, 15 bp, Homo sapiens
tacaggtgattctac

SEQ ID NO: 265911 - DNA, 15 bp, Homo sapiens
ttacaggtgattcta

SEQ ID NO: 265912 - DNA, 15 bp, Homo sapiens
tttacaggtgattct

SEQ ID NO: 265913 - DNA, 15 bp, Homo sapiens
ttttacaggtgattc

SEQ ID NO: 265914 - DNA, 15 bp, Homo sapiens
cttttacaggtgatt

SEQ ID NO: 265915 - DNA, 15 bp, Homo sapiens
gcttttacaggtgat

SEQ ID NO: 265916 - DNA, 15 bp, Homo sapiens
agcttttacaggtga

SEQ ID NO: 265917 - DNA, 15 bp, Homo sapiens
aagcttttacaggtg

SEQ ID NO: 265918 - DNA, 15 bp, Homo sapiens
caagcttttacaggt

SEQ ID NO: 265919 - DNA, 15 bp, Homo sapiens
acaagcttttacagg

SEQ ID NO: 265920 - DNA, 15 bp, Homo sapiens
aacaagcttttacag

SEQ ID NO: 265921 - DNA, 15 bp, Homo sapiens
aaacaagcttttaca

SEQ ID NO: 265922 - DNA, 15 bp, Homo sapiens
caaacaagcttttac

SEQ ID NO: 265923 - DNA, 15 bp, Homo sapiens
tcaaacaagctttta

SEQ ID NO: 265924 - DNA, 15 bp, Homo sapiens
atcaaacaagctttt

SEQ ID NO: 265925 - DNA, 15 bp, Homo sapiens
aatcaaacaagcttt

SEQ ID NO: 265926 - DNA, 15 bp, Homo sapiens
aaatcaaacaagctt

SEQ ID NO: 265927 - DNA, 15 bp, Homo sapiens
gaaatcaaacaagct

SEQ ID NO: 265928 - DNA, 15 bp, Homo sapiens
agaaatcaaacaagc

SEQ ID NO: 265929 - DNA, 15 bp, Homo sapiens
aagaaatcaaacaag

SEQ ID NO: 265930 - DNA, 15 bp, Homo sapiens
taagaaatcaaacaa

SEQ ID NO: 265931 - DNA, 15 bp, Homo sapiens
ttaagaaatcaaaca

SEQ ID NO: 265932 - DNA, 15 bp, Homo sapiens
tttaagaaatcaaac

SEQ ID NO: 265933 - DNA, 15 bp, Homo sapiens
ctttaagaaatcaaa

SEQ ID NO: 265934 - DNA, 15 bp, Homo sapiens
actttaagaaatcaa

SEQ ID NO: 265935 - DNA, 15 bp, Homo sapiens
aactttaagaaatca

SEQ ID NO: 265936 - DNA, 15 bp, Homo sapiens
taactttaagaaatc

SEQ ID NO: 265937 - DNA, 15 bp, Homo sapiens
ataactttaagaaat

SEQ ID NO: 265938 - DNA, 15 bp, Homo sapiens
aataactttaagaaa

SEQ ID NO: 265939 - DNA, 15 bp, Homo sapiens
taataactttaagaa

SEQ ID NO: 265940 - DNA, 15 bp, Homo sapiens
ttaataactttaaga

SEQ ID NO: 265941 - DNA, 15 bp, Homo sapiens
tttaataactttaag

SEQ ID NO: 265942 - DNA, 15 bp, Homo sapiens
gtttaataactttaa

SEQ ID NO: 265943 - DNA, 15 bp, Homo sapiens
agtttaataacttta

SEQ ID NO: 265944 - DNA, 15 bp, Homo sapiens
aagtttaataacttt

SEQ ID NO: 265945 - DNA, 15 bp, Homo sapiens
caagtttaataactt

SEQ ID NO: 265946 - DNA, 15 bp, Homo sapiens
acaagtttaataact

SEQ ID NO: 265947 - DNA, 15 bp, Homo sapiens
tacaagtttaataac

SEQ ID NO: 265948 - DNA, 15 bp, Homo sapiens
gtacaagtttaataa

SEQ ID NO: 265949 - DNA, 15 bp, Homo sapiens
tgtacaagtttaata

SEQ ID NO: 265950 - DNA, 15 bp, Homo sapiens
atgtacaagtttaat

SEQ ID NO: 265951 - DNA, 15 bp, Homo sapiens
tatgtacaagtttaa

SEQ ID NO: 265952 - DNA, 15 bp, Homo sapiens
atatgtacaagttta

SEQ ID NO: 265953 - DNA, 15 bp, Homo sapiens
tatatgtacaagttt

SEQ ID NO: 265954 - DNA, 15 bp, Homo sapiens
gtatatgtacaagtt

SEQ ID NO: 265955 - DNA, 15 bp, Homo sapiens
ggtatatgtacaagt

SEQ ID NO: 265956 - DNA, 15 bp, Homo sapiens
tggtatatgtacaag

SEQ ID NO: 265957 - DNA, 15 bp, Homo sapiens
ttggtatatgtacaa

SEQ ID NO: 265958 - DNA, 15 bp, Homo sapiens
tttggtatatgtaca

SEQ ID NO: 265959 - DNA, 15 bp, Homo sapiens
ttttggtatatgtac

SEQ ID NO: 265960 - DNA, 15 bp, Homo sapiens
tttttggtatatgta

SEQ ID NO: 265961 - DNA, 15 bp, Homo sapiens
ctttttggtatatgt

SEQ ID NO: 265962 - DNA, 15 bp, Homo sapiens
tctttttggtatatg

SEQ ID NO: 265963 - DNA, 15 bp, Homo sapiens
ttctttttggtatat

SEQ ID NO: 265964 - DNA, 15 bp, Homo sapiens
cttctttttggtata

SEQ ID NO: 265965 - DNA, 15 bp, Homo sapiens
gcttctttttggtat

SEQ ID NO: 265966 - DNA, 15 bp, Homo sapiens
agcttctttttggta

SEQ ID NO: 265967 - DNA, 15 bp, Homo sapiens
cagcttctttttggt

SEQ ID NO: 265968 - DNA, 15 bp, Homo sapiens
acagcttctttttgg

SEQ ID NO: 265969 - DNA, 15 bp, Homo sapiens
gacagcttctttttg

SEQ ID NO: 265970 - DNA, 15 bp, Homo sapiens
agacagcttcttttt

SEQ ID NO: 265971 - DNA, 15 bp, Homo sapiens
aagacagcttctttt

SEQ ID NO: 265972 - DNA, 15 bp, Homo sapiens
caagacagcttcttt

SEQ ID NO: 265973 - DNA, 15 bp, Homo sapiens
ccaagacagcttctt

SEQ ID NO: 265974 - DNA, 15 bp, Homo sapiens
tccaagacagcttct

SEQ ID NO: 265975 - DNA, 15 bp, Homo sapiens
atccaagacagcttc

SEQ ID NO: 265976 - DNA, 15 bp, Homo sapiens
aatccaagacagctt

SEQ ID NO: 265977 - DNA, 15 bp, Homo sapiens
aaatccaagacagct

SEQ ID NO: 265978 - DNA, 15 bp, Homo sapiens
taaatccaagacagc

SEQ ID NO: 265979 - DNA, 15 bp, Homo sapiens
ttaaatccaagacag

SEQ ID NO: 265980 - DNA, 15 bp, Homo sapiens
tttaaatccaagaca

SEQ ID NO: 265981 - DNA, 15 bp, Homo sapiens
atttaaatccaagac

SEQ ID NO: 265982 - DNA, 15 bp, Homo sapiens
gatttaaatccaaga

SEQ ID NO: 265983 - DNA, 15 bp, Homo sapiens
agatttaaatccaag

SEQ ID NO: 265984 - DNA, 15 bp, Homo sapiens
cagatttaaatccaa

SEQ ID NO: 265985 - DNA, 15 bp, Homo sapiens
acagatttaaatcca

SEQ ID NO: 265986 - DNA, 15 bp, Homo sapiens
tacagatttaaatcc

SEQ ID NO: 265987 - DNA, 15 bp, Homo sapiens
ttacagatttaaatc

SEQ ID NO: 265988 - DNA, 15 bp, Homo sapiens
tttacagatttaaat

SEQ ID NO: 265989 - DNA, 15 bp, Homo sapiens
ttttacagatttaaa

SEQ ID NO: 265990 - DNA, 15 bp, Homo sapiens
attttacagatttaa

SEQ ID NO: 265991 - DNA, 15 bp, Homo sapiens
gattttacagattta

SEQ ID NO: 265992 - DNA, 15 bp, Homo sapiens
tgattttacagattt

SEQ ID NO: 265993 - DNA, 15 bp, Homo sapiens
ctgattttacagatt

SEQ ID NO: 265994 - DNA, 15 bp, Homo sapiens
actgattttacagat

SEQ ID NO: 265995 - DNA, 15 bp, Homo sapiens
tactgattttacaga

SEQ ID NO: 265996 - DNA, 15 bp, Homo sapiens
ctactgattttacag

SEQ ID NO: 265997 - DNA, 15 bp, Homo sapiens
tctactgattttaca

SEQ ID NO: 265998 - DNA, 15 bp, Homo sapiens
ttctactgattttac

SEQ ID NO: 265999 - DNA, 15 bp, Homo sapiens
tttctactgatttta

SEQ ID NO: 266000 - DNA, 15 bp, Homo sapiens
atttctactgatttt

SEQ ID NO: 266001 - DNA, 15 bp, Homo sapiens
aatttctactgattt

SEQ ID NO: 266002 - DNA, 15 bp, Homo sapiens
aaatttctactgatt

SEQ ID NO: 266003 - DNA, 15 bp, Homo sapiens
aaaatttctactgat

SEQ ID NO: 266004 - DNA, 15 bp, Homo sapiens
taaaatttctactga

SEQ ID NO: 266005 - DNA, 15 bp, Homo sapiens
gtaaaatttctactg

SEQ ID NO: 266006 - DNA, 15 bp, Homo sapiens
agtaaaatttctact

SEQ ID NO: 266007 - DNA, 15 bp, Homo sapiens
tagtaaaatttctac

SEQ ID NO: 266008 - DNA, 15 bp, Homo sapiens
gtagtaaaatttcta

SEQ ID NO: 266009 - DNA, 15 bp, Homo sapiens
tgtagtaaaatttct

SEQ ID NO: 266010 - DNA, 15 bp, Homo sapiens
ttgtagtaaaatttc

SEQ ID NO: 266011 - DNA, 15 bp, Homo sapiens
attgtagtaaaattt

SEQ ID NO: 266012 - DNA, 15 bp, Homo sapiens
aattgtagtaaaatt

SEQ ID NO: 266013 - DNA, 15 bp, Homo sapiens
caattgtagtaaaat

SEQ ID NO: 266014 - DNA, 15 bp, Homo sapiens
gcaattgtagtaaaa

SEQ ID NO: 266015 - DNA, 15 bp, Homo sapiens
agcaattgtagtaaa

SEQ ID NO: 266016 - DNA, 15 bp, Homo sapiens
aagcaattgtagtaa

SEQ ID NO: 266017 - DNA, 15 bp, Homo sapiens
caagcaattgtagta

SEQ ID NO: 266018 - DNA, 15 bp, Homo sapiens
acaagcaattgtagt

SEQ ID NO: 266019 - DNA, 15 bp, Homo sapiens
aacaagcaattgtag

SEQ ID NO: 266020 - DNA, 15 bp, Homo sapiens
taacaagcaattgta

SEQ ID NO: 266021 - DNA, 15 bp, Homo sapiens
ttaacaagcaattgt

SEQ ID NO: 266022 - DNA, 15 bp, Homo sapiens
tttaacaagcaattg

SEQ ID NO: 266023 - DNA, 15 bp, Homo sapiens
ttttaacaagcaatt

SEQ ID NO: 266024 - DNA, 15 bp, Homo sapiens
attttaacaagcaat

SEQ ID NO: 266025 - DNA, 15 bp, Homo sapiens
tattttaacaagcaa

SEQ ID NO: 266026 - DNA, 15 bp, Homo sapiens
atattttaacaagca

SEQ ID NO: 266027 - DNA, 15 bp, Homo sapiens
aatattttaacaagc

SEQ ID NO: 266028 - DNA, 15 bp, Homo sapiens
aaatattttaacaag

SEQ ID NO: 266029 - DNA, 15 bp, Homo sapiens
aaaatattttaacaa

SEQ ID NO: 266030 - DNA, 15 bp, Homo sapiens
taaaatattttaaca

SEQ ID NO: 266031 - DNA, 15 bp, Homo sapiens
ataaaatattttaac

SEQ ID NO: 266032 - DNA, 15 bp, Homo sapiens
tataaaatattttaa

SEQ ID NO: 266033 - DNA, 15 bp, Homo sapiens
ttataaaatatttta

SEQ ID NO: 266034 - DNA, 15 bp, Homo sapiens
cttataaaatatttt

SEQ ID NO: 266035 - DNA, 15 bp, Homo sapiens
acttataaaatattt

SEQ ID NO: 266036 - DNA, 15 bp, Homo sapiens
cacttataaaatatt

SEQ ID NO: 266037 - DNA, 15 bp, Homo sapiens
tcacttataaaatat

SEQ ID NO: 266038 - DNA, 15 bp, Homo sapiens
atcacttataaaata

SEQ ID NO: 266039 - DNA, 15 bp, Homo sapiens
catcacttataaaat

SEQ ID NO: 266040 - DNA, 15 bp, Homo sapiens
acatcacttataaaa

SEQ ID NO: 266041 - DNA, 15 bp, Homo sapiens
aacatcacttataaa

SEQ ID NO: 266042 - DNA, 15 bp, Homo sapiens
gaacatcacttataa

SEQ ID NO: 266043 - DNA, 15 bp, Homo sapiens
ggaacatcacttata

SEQ ID NO: 266044 - DNA, 15 bp, Homo sapiens
aggaacatcacttat

SEQ ID NO: 266045 - DNA, 15 bp, Homo sapiens
aaggaacatcactta

SEQ ID NO: 266046 - DNA, 15 bp, Homo sapiens
aaaggaacatcactt

SEQ ID NO: 266047 - DNA, 15 bp, Homo sapiens
aaaaggaacatcact

SEQ ID NO: 266048 - DNA, 15 bp, Homo sapiens
aaaaaggaacatcac

SEQ ID NO: 266049 - DNA, 15 bp, Homo sapiens
gaaaaaggaacatca

SEQ ID NO: 266050 - DNA, 15 bp, Homo sapiens
tgaaaaaggaacatc

SEQ ID NO: 266051 - DNA, 15 bp, Homo sapiens
gtgaaaaaggaacat

SEQ ID NO: 266052 - DNA, 15 bp, Homo sapiens
ggtgaaaaaggaaca

SEQ ID NO: 266053 - DNA, 15 bp, Homo sapiens
tggtgaaaaaggaac

SEQ ID NO: 266054 - DNA, 15 bp, Homo sapiens
ttggtgaaaaaggaa

SEQ ID NO: 266055 - DNA, 15 bp, Homo sapiens
cttggtgaaaaagga

SEQ ID NO: 266056 - DNA, 15 bp, Homo sapiens
tcttggtgaaaaagg

SEQ ID NO: 266057 - DNA, 15 bp, Homo sapiens
ctcttggtgaaaaag

SEQ ID NO: 266058 - DNA, 15 bp, Homo sapiens
actcttggtgaaaaa

SEQ ID NO: 266059 - DNA, 15 bp, Homo sapiens
tactcttggtgaaaa

SEQ ID NO: 266060 - DNA, 15 bp, Homo sapiens
atactcttggtgaaa

SEQ ID NO: 266061 - DNA, 15 bp, Homo sapiens
tatactcttggtgaa

SEQ ID NO: 266062 - DNA, 15 bp, Homo sapiens
ttatactcttggtga

SEQ ID NO: 266063 - DNA, 15 bp, Homo sapiens
tttatactcttggtg

SEQ ID NO: 266064 - DNA, 15 bp, Homo sapiens
gtttatactcttggt

SEQ ID NO: 266065 - DNA, 15 bp, Homo sapiens
ggtttatactcttgg

SEQ ID NO: 266066 - DNA, 15 bp, Homo sapiens
aggtttatactcttg

SEQ ID NO: 266067 - DNA, 15 bp, Homo sapiens
aaggtttatactctt

SEQ ID NO: 266068 - DNA, 15 bp, Homo sapiens
aaaggtttatactct

SEQ ID NO: 266069 - DNA, 15 bp, Homo sapiens
aaaaggtttatactc

SEQ ID NO: 266070 - DNA, 15 bp, Homo sapiens
aaaaaggtttatact

SEQ ID NO: 266071 - DNA, 15 bp, Homo sapiens
taaaaaggtttatac

SEQ ID NO: 266072 - DNA, 15 bp, Homo sapiens
ctaaaaaggtttata

SEQ ID NO: 266073 - DNA, 15 bp, Homo sapiens
actaaaaaggtttat

SEQ ID NO: 266074 - DNA, 15 bp, Homo sapiens
cactaaaaaggttta

SEQ ID NO: 266075 - DNA, 15 bp, Homo sapiens
acactaaaaaggttt

SEQ ID NO: 266076 - DNA, 15 bp, Homo sapiens
cacactaaaaaggtt

SEQ ID NO: 266077 - DNA, 15 bp, Homo sapiens
tcacactaaaaaggt

SEQ ID NO: 266078 - DNA, 15 bp, Homo sapiens
gtcacactaaaaagg

SEQ ID NO: 266079 - DNA, 15 bp, Homo sapiens
agtcacactaaaaag

SEQ ID NO: 266080 - DNA, 15 bp, Homo sapiens
cagtcacactaaaaa

SEQ ID NO: 266081 - DNA, 15 bp, Homo sapiens
acagtcacactaaaa

SEQ ID NO: 266082 - DNA, 15 bp, Homo sapiens
aacagtcacactaaa

SEQ ID NO: 266083 - DNA, 15 bp, Homo sapiens
taacagtcacactaa

SEQ ID NO: 266084 - DNA, 15 bp, Homo sapiens
ttaacagtcacacta

SEQ ID NO: 266085 - DNA, 15 bp, Homo sapiens
tttaacagtcacact

SEQ ID NO: 266086 - DNA, 15 bp, Homo sapiens
ttttaacagtcacac

SEQ ID NO: 266087 - DNA, 15 bp, Homo sapiens
gttttaacagtcaca

SEQ ID NO: 266088 - DNA, 15 bp, Homo sapiens
agttttaacagtcac

SEQ ID NO: 266089 - DNA, 15 bp, Homo sapiens
aagttttaacagtca

SEQ ID NO: 266090 - DNA, 15 bp, Homo sapiens
gaagttttaacagtc

SEQ ID NO: 266091 - DNA, 15 bp, Homo sapiens
ggaagttttaacagt

SEQ ID NO: 266092 - DNA, 15 bp, Homo sapiens
aggaagttttaacag

SEQ ID NO: 266093 - DNA, 15 bp, Homo sapiens
aaggaagttttaaca

SEQ ID NO: 266094 - DNA, 15 bp, Homo sapiens
aaaggaagttttaac

SEQ ID NO: 266095 - DNA, 15 bp, Homo sapiens
aaaaggaagttttaa

SEQ ID NO: 266096 - DNA, 15 bp, Homo sapiens
taaaaggaagtttta

SEQ ID NO: 266097 - DNA, 15 bp, Homo sapiens
ttaaaaggaagtttt

SEQ ID NO: 266098 - DNA, 15 bp, Homo sapiens
tttaaaaggaagttt

SEQ ID NO: 266099 - DNA, 15 bp, Homo sapiens
atttaaaaggaagtt

SEQ ID NO: 266100 - DNA, 15 bp, Homo sapiens
gatttaaaaggaagt

SEQ ID NO: 266101 - DNA, 15 bp, Homo sapiens
tgatttaaaaggaag

SEQ ID NO: 266102 - DNA, 15 bp, Homo sapiens
ttgatttaaaaggaa

SEQ ID NO: 266103 - DNA, 15 bp, Homo sapiens
tttgatttaaaagga

SEQ ID NO: 266104 - DNA, 15 bp, Homo sapiens
ttttgatttaaaagg

SEQ ID NO: 266105 - DNA, 15 bp, Homo sapiens
attttgatttaaaag

SEQ ID NO: 266106 - DNA, 15 bp, Homo sapiens
cattttgatttaaaa

SEQ ID NO: 266107 - DNA, 15 bp, Homo sapiens
gcattttgatttaaa

SEQ ID NO: 266108 - DNA, 15 bp, Homo sapiens
ggcattttgatttaa

SEQ ID NO: 266109 - DNA, 15 bp, Homo sapiens
tggcattttgattta

SEQ ID NO: 266110 - DNA, 15 bp, Homo sapiens
ttggcattttgattt

SEQ ID NO: 266111 - DNA, 15 bp, Homo sapiens
tttggcattttgatt

SEQ ID NO: 266112 - DNA, 15 bp, Homo sapiens
atttggcattttgat

SEQ ID NO: 266113 - DNA, 15 bp, Homo sapiens
aatttggcattttga

SEQ ID NO: 266114 - DNA, 15 bp, Homo sapiens
aaatttggcattttg

SEQ ID NO: 266115 - DNA, 15 bp, Homo sapiens
taaatttggcatttt

SEQ ID NO: 266116 - DNA, 15 bp, Homo sapiens
ataaatttggcattt

SEQ ID NO: 266117 - DNA, 15 bp, Homo sapiens
aataaatttggcatt

SEQ ID NO: 266118 - DNA, 15 bp, Homo sapiens
taataaatttggcat

SEQ ID NO: 266119 - DNA, 15 bp, Homo sapiens
ttaataaatttggca

SEQ ID NO: 266120 - DNA, 15 bp, Homo sapiens
cttaataaatttggc

SEQ ID NO: 266121 - DNA, 15 bp, Homo sapiens
ccttaataaatttgg

SEQ ID NO: 266122 - DNA, 15 bp, Homo sapiens
accttaataaatttg

SEQ ID NO: 266123 - DNA, 15 bp, Homo sapiens
caccttaataaattt

SEQ ID NO: 266124 - DNA, 15 bp, Homo sapiens
ccaccttaataaatt

SEQ ID NO: 266125 - DNA, 15 bp, Homo sapiens
accaccttaataaat

SEQ ID NO: 266126 - DNA, 15 bp, Homo sapiens
caccaccttaataaa

SEQ ID NO: 266127 - DNA, 15 bp, Homo sapiens
ccaccaccttaataa

SEQ ID NO: 266128 - DNA, 15 bp, Homo sapiens
tccaccaccttaata

SEQ ID NO: 266129 - DNA, 15 bp, Homo sapiens
ctccaccaccttaat

SEQ ID NO: 266130 - DNA, 15 bp, Homo sapiens
gctccaccaccttaa

SEQ ID NO: 266131 - DNA, 15 bp, Homo sapiens
ggctccaccacctta

SEQ ID NO: 266132 - DNA, 15 bp, Homo sapiens
tggctccaccacctt

SEQ ID NO: 266133 - DNA, 15 bp, Homo sapiens
gtggctccaccacct

SEQ ID NO: 266134 - DNA, 15 bp, Homo sapiens
agtggctccaccacc

SEQ ID NO: 266135 - DNA, 15 bp, Homo sapiens
cagtggctccaccac

SEQ ID NO: 266136 - DNA, 15 bp, Homo sapiens
gcagtggctccacca

SEQ ID NO: 266137 - DNA, 15 bp, Homo sapiens
tgcagtggctccacc

SEQ ID NO: 266138 - DNA, 15 bp, Homo sapiens
ctgcagtggctccac

SEQ ID NO: 266139 - DNA, 15 bp, Homo sapiens
actgcagtggctcca

SEQ ID NO: 266140 - DNA, 15 bp, Homo sapiens
cactgcagtggctcc

SEQ ID NO: 266141 - DNA, 15 bp, Homo sapiens
acactgcagtggctc

SEQ ID NO: 266142 - DNA, 15 bp, Homo sapiens
aacactgcagtggct

SEQ ID NO: 266143 - DNA, 15 bp, Homo sapiens
taacactgcagtggc

SEQ ID NO: 266144 - DNA, 15 bp, Homo sapiens
ataacactgcagtgg

SEQ ID NO: 266145 - DNA, 15 bp, Homo sapiens
gataacactgcagtg

SEQ ID NO: 266146 - DNA, 15 bp, Homo sapiens
agataacactgcagt

SEQ ID NO: 266147 - DNA, 15 bp, Homo sapiens
aagataacactgcag

SEQ ID NO: 266148 - DNA, 15 bp, Homo sapiens
taagataacactgca

SEQ ID NO: 266149 - DNA, 15 bp, Homo sapiens
ttaagataacactgc

SEQ ID NO: 266150 - DNA, 15 bp, Homo sapiens
tttaagataacactg

SEQ ID NO: 266151 - DNA, 15 bp, Homo sapiens
ttttaagataacact

SEQ ID NO: 266152 - DNA, 15 bp, Homo sapiens
attttaagataacac

SEQ ID NO: 266153 - DNA, 15 bp, Homo sapiens
tattttaagataaca

SEQ ID NO: 266154 - DNA, 15 bp, Homo sapiens
ttattttaagataac

SEQ ID NO: 266155 - DNA, 15 bp, Homo sapiens
cttattttaagataa

SEQ ID NO: 266156 - DNA, 15 bp, Homo sapiens
tcttattttaagata

SEQ ID NO: 266157 - DNA, 15 bp, Homo sapiens
ttcttattttaagat

SEQ ID NO: 266158 - DNA, 15 bp, Homo sapiens
attcttattttaaga

SEQ ID NO: 266159 - DNA, 15 bp, Homo sapiens
tattcttattttaag

SEQ ID NO: 266160 - DNA, 15 bp, Homo sapiens
atattcttattttaa

SEQ ID NO: 266161 - DNA, 15 bp, Homo sapiens
aatattcttatttta

SEQ ID NO: 266162 - DNA, 15 bp, Homo sapiens
aaatattcttatttt

SEQ ID NO: 266163 - DNA, 15 bp, Homo sapiens
aaaatattcttattt

SEQ ID NO: 266164 - DNA, 15 bp, Homo sapiens
caaaatattcttatt

SEQ ID NO: 266165 - DNA, 15 bp, Homo sapiens
acaaaatattcttat

SEQ ID NO: 266166 - DNA, 15 bp, Homo sapiens
aacaaaatattctta

SEQ ID NO: 266167 - DNA, 15 bp, Homo sapiens
caacaaaatattctt

SEQ ID NO: 266168 - DNA, 15 bp, Homo sapiens
tcaacaaaatattct

SEQ ID NO: 266169 - DNA, 15 bp, Homo sapiens
ctcaacaaaatattc

SEQ ID NO: 266170 - DNA, 15 bp, Homo sapiens
tctcaacaaaatatt

SEQ ID NO: 266171 - DNA, 15 bp, Homo sapiens
atctcaacaaaatat

SEQ ID NO: 266172 - DNA, 15 bp, Homo sapiens
tatctcaacaaaata

SEQ ID NO: 266173 - DNA, 15 bp, Homo sapiens
atatctcaacaaaat

SEQ ID NO: 266174 - DNA, 15 bp, Homo sapiens
aatatctcaacaaaa

SEQ ID NO: 266175 - DNA, 15 bp, Homo sapiens
gaatatctcaacaaa

SEQ ID NO: 266176 - DNA, 15 bp, Homo sapiens
ggaatatctcaacaa

SEQ ID NO: 266177 - DNA, 15 bp, Homo sapiens
tggaatatctcaaca

SEQ ID NO: 266178 - DNA, 15 bp, Homo sapiens
ctggaatatctcaac

SEQ ID NO: 266179 - DNA, 15 bp, Homo sapiens
tctggaatatctcaa

SEQ ID NO: 266180 - DNA, 15 bp, Homo sapiens
ttctggaatatctca

SEQ ID NO: 266181 - DNA, 15 bp, Homo sapiens
attctggaatatctc

SEQ ID NO: 266182 - DNA, 15 bp, Homo sapiens
aattctggaatatct

SEQ ID NO: 266183 - DNA, 15 bp, Homo sapiens
aaattctggaatatc

SEQ ID NO: 266184 - DNA, 15 bp, Homo sapiens
caaattctggaatat

SEQ ID NO: 266185 - DNA, 15 bp, Homo sapiens
acaaattctggaata

SEQ ID NO: 266186 - DNA, 15 bp, Homo sapiens
aacaaattctggaat

SEQ ID NO: 266187 - DNA, 15 bp, Homo sapiens
aaacaaattctggaa

SEQ ID NO: 266188 - DNA, 15 bp, Homo sapiens
taaacaaattctgga

SEQ ID NO: 266189 - DNA, 15 bp, Homo sapiens
ataaacaaattctgg

SEQ ID NO: 266190 - DNA, 15 bp, Homo sapiens
tataaacaaattctg

SEQ ID NO: 266191 - DNA, 15 bp, Homo sapiens
atataaacaaattct

SEQ ID NO: 266192 - DNA, 15 bp, Homo sapiens
catataaacaaattc

SEQ ID NO: 266193 - DNA, 15 bp, Homo sapiens
ccatataaacaaatt

SEQ ID NO: 266194 - DNA, 15 bp, Homo sapiens
gccatataaacaaat

SEQ ID NO: 266195 - DNA, 15 bp, Homo sapiens
agccatataaacaaa

SEQ ID NO: 266196 - DNA, 15 bp, Homo sapiens
cagccatataaacaa

SEQ ID NO: 266197 - DNA, 15 bp, Homo sapiens
ccagccatataaaca

SEQ ID NO: 266198 - DNA, 15 bp, Homo sapiens
accagccatataaac

SEQ ID NO: 266199 - DNA, 15 bp, Homo sapiens
taccagccatataaa

SEQ ID NO: 266200 - DNA, 15 bp, Homo sapiens
ttaccagccatataa

SEQ ID NO: 266201 - DNA, 15 bp, Homo sapiens
gttaccagccatata

SEQ ID NO: 266202 - DNA, 15 bp, Homo sapiens
tgttaccagccatat

SEQ ID NO: 266203 - DNA, 15 bp, Homo sapiens
atgttaccagccata

SEQ ID NO: 266204 - DNA, 15 bp, Homo sapiens
catgttaccagccat

SEQ ID NO: 266205 - DNA, 15 bp, Homo sapiens
acatgttaccagcca

SEQ ID NO: 266206 - DNA, 15 bp, Homo sapiens
tacatgttaccagcc

SEQ ID NO: 266207 - DNA, 15 bp, Homo sapiens
ttacatgttaccagc

SEQ ID NO: 266208 - DNA, 15 bp, Homo sapiens
tttacatgttaccag

SEQ ID NO: 266209 - DNA, 15 bp, Homo sapiens
ttttacatgttacca

SEQ ID NO: 266210 - DNA, 15 bp, Homo sapiens
attttacatgttacc

SEQ ID NO: 266211 - DNA, 15 bp, Homo sapiens
gattttacatgttac

SEQ ID NO: 266212 - DNA, 15 bp, Homo sapiens
agattttacatgtta

SEQ ID NO: 266213 - DNA, 15 bp, Homo sapiens
tagattttacatgtt

SEQ ID NO: 266214 - DNA, 15 bp, Homo sapiens
atagattttacatgt

SEQ ID NO: 266215 - DNA, 15 bp, Homo sapiens
tatagattttacatg

SEQ ID NO: 266216 - DNA, 15 bp, Homo sapiens
atatagattttacat

SEQ ID NO: 266217 - DNA, 15 bp, Homo sapiens
gatatagattttaca

SEQ ID NO: 266218 - DNA, 15 bp, Homo sapiens
tgatatagattttac

SEQ ID NO: 266219 - DNA, 15 bp, Homo sapiens
ctgatatagatttta

SEQ ID NO: 266220 - DNA, 15 bp, Homo sapiens
gctgatatagatttt

SEQ ID NO: 266221 - DNA, 15 bp, Homo sapiens
tgctgatatagattt

SEQ ID NO: 266222 - DNA, 15 bp, Homo sapiens
ttgctgatatagatt

SEQ ID NO: 266223 - DNA, 15 bp, Homo sapiens
tttgctgatatagat

SEQ ID NO: 266224 - DNA, 15 bp, Homo sapiens
ttttgctgatataga

SEQ ID NO: 266225 - DNA, 15 bp, Homo sapiens
cttttgctgatatag

SEQ ID NO: 266226 - DNA, 15 bp, Homo sapiens
ccttttgctgatata

SEQ ID NO: 266227 - DNA, 15 bp, Homo sapiens
cccttttgctgatat

SEQ ID NO: 266228 - DNA, 15 bp, Homo sapiens
acccttttgctgata

SEQ ID NO: 266229 - DNA, 15 bp, Homo sapiens
gacccttttgctgat

SEQ ID NO: 266230 - DNA, 15 bp, Homo sapiens
agacccttttgctga

SEQ ID NO: 266231 - DNA, 15 bp, Homo sapiens
tagacccttttgctg

SEQ ID NO: 266232 - DNA, 15 bp, Homo sapiens
gtagacccttttgct

SEQ ID NO: 266233 - DNA, 15 bp, Homo sapiens
ggtagacccttttgc

SEQ ID NO: 266234 - DNA, 15 bp, Homo sapiens
aggtagacccttttg

SEQ ID NO: 266235 - DNA, 15 bp, Homo sapiens
aaggtagaccctttt

SEQ ID NO: 266236 - DNA, 15 bp, Homo sapiens
aaaggtagacccttt

SEQ ID NO: 266237 - DNA, 15 bp, Homo sapiens
taaaggtagaccctt

SEQ ID NO: 266238 - DNA, 15 bp, Homo sapiens
ttaaaggtagaccct

SEQ ID NO: 266239 - DNA, 15 bp, Homo sapiens
tttaaaggtagaccc

SEQ ID NO: 266240 - DNA, 15 bp, Homo sapiens
ttttaaaggtagacc

SEQ ID NO: 266241 - DNA, 15 bp, Homo sapiens
attttaaaggtagac

SEQ ID NO: 266242 - DNA, 15 bp, Homo sapiens
tattttaaaggtaga

SEQ ID NO: 266243 - DNA, 15 bp, Homo sapiens
ttattttaaaggtag

SEQ ID NO: 266244 - DNA, 15 bp, Homo sapiens
cttattttaaaggta

SEQ ID NO: 266245 - DNA, 15 bp, Homo sapiens
gcttattttaaaggt

SEQ ID NO: 266246 - DNA, 15 bp, Homo sapiens
tgcttattttaaagg

SEQ ID NO: 266247 - DNA, 15 bp, Homo sapiens
ttgcttattttaaag

SEQ ID NO: 266248 - DNA, 15 bp, Homo sapiens
attgcttattttaaa

SEQ ID NO: 266249 - DNA, 15 bp, Homo sapiens
tattgcttattttaa

SEQ ID NO: 266250 - DNA, 15 bp, Homo sapiens
ttattgcttatttta

SEQ ID NO: 266251 - DNA, 15 bp, Homo sapiens
gttattgcttatttt

SEQ ID NO: 266252 - DNA, 15 bp, Homo sapiens
tgttattgcttattt

SEQ ID NO: 266253 - DNA, 15 bp, Homo sapiens
ttgttattgcttatt

SEQ ID NO: 266254 - DNA, 15 bp, Homo sapiens
tttgttattgcttat

SEQ ID NO: 266255 - DNA, 15 bp, Homo sapiens
ctttgttattgctta

SEQ ID NO: 266256 - DNA, 15 bp, Homo sapiens
tctttgttattgctt

SEQ ID NO: 266257 - DNA, 15 bp, Homo sapiens
ttctttgttattgct

SEQ ID NO: 266258 - DNA, 15 bp, Homo sapiens
cttctttgttattgc

SEQ ID NO: 266259 - DNA, 15 bp, Homo sapiens
tcttctttgttattg

SEQ ID NO: 266260 - DNA, 15 bp, Homo sapiens
ttcttctttgttatt

SEQ ID NO: 266261 - DNA, 15 bp, Homo sapiens
tttcttctttgttat

SEQ ID NO: 266262 - DNA, 15 bp, Homo sapiens
ttttcttctttgtta

SEQ ID NO: 266263 - DNA, 15 bp, Homo sapiens
gttttcttctttgtt

SEQ ID NO: 266264 - DNA, 15 bp, Homo sapiens
ggttttcttctttgt

SEQ ID NO: 266265 - DNA, 15 bp, Homo sapiens
tggttttcttctttg

SEQ ID NO: 266266 - DNA, 15 bp, Homo sapiens
ttggttttcttcttt

SEQ ID NO: 266267 - DNA, 15 bp, Homo sapiens
tttggttttcttctt

SEQ ID NO: 266268 - DNA, 15 bp, Homo sapiens
atttggttttcttct

SEQ ID NO: 266269 - DNA, 15 bp, Homo sapiens
aatttggttttcttc

SEQ ID NO: 266270 - DNA, 15 bp, Homo sapiens
taatttggttttctt

SEQ ID NO: 266271 - DNA, 15 bp, Homo sapiens
ataatttggttttct

SEQ ID NO: 266272 - DNA, 15 bp, Homo sapiens
aataatttggttttc

SEQ ID NO: 266273 - DNA, 15 bp, Homo sapiens
caataatttggtttt

SEQ ID NO: 266274 - DNA, 15 bp, Homo sapiens
acaataatttggttt

SEQ ID NO: 266275 - DNA, 15 bp, Homo sapiens
aacaataatttggtt

SEQ ID NO: 266276 - DNA, 15 bp, Homo sapiens
gaacaataatttggt

SEQ ID NO: 266277 - DNA, 15 bp, Homo sapiens
tgaacaataatttgg

SEQ ID NO: 266278 - DNA, 15 bp, Homo sapiens
ttgaacaataatttg

SEQ ID NO: 266279 - DNA, 15 bp, Homo sapiens
tttgaacaataattt

SEQ ID NO: 266280 - DNA, 15 bp, Homo sapiens
atttgaacaataatt

SEQ ID NO: 266281 - DNA, 15 bp, Homo sapiens
aatttgaacaataat

SEQ ID NO: 266282 - DNA, 15 bp, Homo sapiens
aaatttgaacaataa

SEQ ID NO: 266283 - DNA, 15 bp, Homo sapiens
taaatttgaacaata

SEQ ID NO: 266284 - DNA, 15 bp, Homo sapiens
ctaaatttgaacaat

SEQ ID NO: 266285 - DNA, 15 bp, Homo sapiens
cctaaatttgaacaa

SEQ ID NO: 266286 - DNA, 15 bp, Homo sapiens
acctaaatttgaaca

SEQ ID NO: 266287 - DNA, 15 bp, Homo sapiens
aacctaaatttgaac

SEQ ID NO: 266288 - DNA, 15 bp, Homo sapiens
aaacctaaatttgaa

SEQ ID NO: 266289 - DNA, 15 bp, Homo sapiens
taaacctaaatttga

SEQ ID NO: 266290 - DNA, 15 bp, Homo sapiens
ttaaacctaaatttg

SEQ ID NO: 266291 - DNA, 15 bp, Homo sapiens
tttaaacctaaattt

SEQ ID NO: 266292 - DNA, 15 bp, Homo sapiens
gtttaaacctaaatt

SEQ ID NO: 266293 - DNA, 15 bp, Homo sapiens
agtttaaacctaaat

SEQ ID NO: 266294 - DNA, 15 bp, Homo sapiens
aagtttaaacctaaa

SEQ ID NO: 266295 - DNA, 15 bp, Homo sapiens
aaagtttaaacctaa

SEQ ID NO: 266296 - DNA, 15 bp, Homo sapiens
aaaagtttaaaccta

SEQ ID NO: 266297 - DNA, 15 bp, Homo sapiens
caaaagtttaaacct

SEQ ID NO: 266298 - DNA, 15 bp, Homo sapiens
tcaaaagtttaaacc

SEQ ID NO: 266299 - DNA, 15 bp, Homo sapiens
ttcaaaagtttaaac

SEQ ID NO: 266300 - DNA, 15 bp, Homo sapiens
cttcaaaagtttaaa

SEQ ID NO: 266301 - DNA, 15 bp, Homo sapiens
gcttcaaaagtttaa

SEQ ID NO: 266302 - DNA, 15 bp, Homo sapiens
tgcttcaaaagttta

SEQ ID NO: 266303 - DNA, 15 bp, Homo sapiens
ttgcttcaaaagttt

SEQ ID NO: 266304 - DNA, 15 bp, Homo sapiens
tttgcttcaaaagtt

SEQ ID NO: 266305 - DNA, 15 bp, Homo sapiens
gtttgcttcaaaagt

SEQ ID NO: 266306 - DNA, 15 bp, Homo sapiens
agtttgcttcaaaag

SEQ ID NO: 266307 - DNA, 15 bp, Homo sapiens
aagtttgcttcaaaa

SEQ ID NO: 266308 - DNA, 15 bp, Homo sapiens
aaagtttgcttcaaa

SEQ ID NO: 266309 - DNA, 15 bp, Homo sapiens
aaaagtttgcttcaa

SEQ ID NO: 266310 - DNA, 15 bp, Homo sapiens
aaaaagtttgcttca

SEQ ID NO: 266311 - DNA, 15 bp, Homo sapiens
aaaaaagtttgcttc

SEQ ID NO: 266312 - DNA, 15 bp, Homo sapiens
aaaaaaagtttgctt

SEQ ID NO: 266313 - DNA, 15 bp, Homo sapiens
aaaaaaaagtttgct

SEQ ID NO: 266314 - DNA, 15 bp, Homo sapiens
taaaaaaaagtttgc

SEQ ID NO: 266315 - DNA, 15 bp, Homo sapiens
ataaaaaaaagtttg

SEQ ID NO: 266316 - DNA, 15 bp, Homo sapiens
gataaaaaaaagttt

SEQ ID NO: 266317 - DNA, 15 bp, Homo sapiens
ggataaaaaaaagtt

SEQ ID NO: 266318 - DNA, 15 bp, Homo sapiens
aggataaaaaaaagt

SEQ ID NO: 266319 - DNA, 15 bp, Homo sapiens
aaggataaaaaaaag

SEQ ID NO: 266320 - DNA, 15 bp, Homo sapiens
caaggataaaaaaaa

SEQ ID NO: 266321 - DNA, 15 bp, Homo sapiens
acaaggataaaaaaa

SEQ ID NO: 266322 - DNA, 15 bp, Homo sapiens
cacaaggataaaaaa

SEQ ID NO: 266323 - DNA, 15 bp, Homo sapiens
gcacaaggataaaaa

SEQ ID NO: 266324 - DNA, 15 bp, Homo sapiens
tgcacaaggataaaa

SEQ ID NO: 266325 - DNA, 15 bp, Homo sapiens
gtgcacaaggataaa

SEQ ID NO: 266326 - DNA, 15 bp, Homo sapiens
agtgcacaaggataa

SEQ ID NO: 266327 - DNA, 15 bp, Homo sapiens
cagtgcacaaggata

SEQ ID NO: 266328 - DNA, 15 bp, Homo sapiens
gcagtgcacaaggat

SEQ ID NO: 266329 - DNA, 15 bp, Homo sapiens
tgcagtgcacaagga

SEQ ID NO: 266330 - DNA, 15 bp, Homo sapiens
ctgcagtgcacaagg

SEQ ID NO: 266331 - DNA, 15 bp, Homo sapiens
cctgcagtgcacaag

SEQ ID NO: 266332 - DNA, 15 bp, Homo sapiens
gcctgcagtgcacaa

SEQ ID NO: 266333 - DNA, 15 bp, Homo sapiens
ggcctgcagtgcaca

SEQ ID NO: 266334 - DNA, 15 bp, Homo sapiens
aggcctgcagtgcac

SEQ ID NO: 266335 - DNA, 15 bp, Homo sapiens
caggcctgcagtgca

SEQ ID NO: 266336 - DNA, 15 bp, Homo sapiens
ccaggcctgcagtgc

SEQ ID NO: 266337 - DNA, 15 bp, Homo sapiens
accaggcctgcagtg

SEQ ID NO: 266338 - DNA, 15 bp, Homo sapiens
taccaggcctgcagt

SEQ ID NO: 266339 - DNA, 15 bp, Homo sapiens
gtaccaggcctgcag

SEQ ID NO: 266340 - DNA, 15 bp, Homo sapiens
agtaccaggcctgca

SEQ ID NO: 266341 - DNA, 15 bp, Homo sapiens
gagtaccaggcctgc

SEQ ID NO: 266342 - DNA, 15 bp, Homo sapiens
tgagtaccaggcctg

SEQ ID NO: 266343 - DNA, 15 bp, Homo sapiens
ctgagtaccaggcct

SEQ ID NO: 266344 - DNA, 15 bp, Homo sapiens
tctgagtaccaggcc

SEQ ID NO: 266345 - DNA, 15 bp, Homo sapiens
atctgagtaccaggc

SEQ ID NO: 266346 - DNA, 15 bp, Homo sapiens
aatctgagtaccagg

SEQ ID NO: 266347 - DNA, 15 bp, Homo sapiens
aaatctgagtaccag

SEQ ID NO: 266348 - DNA, 15 bp, Homo sapiens
aaaatctgagtacca

SEQ ID NO: 266349 - DNA, 15 bp, Homo sapiens
caaaatctgagtacc

SEQ ID NO: 266350 - DNA, 15 bp, Homo sapiens
gcaaaatctgagtac

SEQ ID NO: 266351 - DNA, 15 bp, Homo sapiens
agcaaaatctgagta

SEQ ID NO: 266352 - DNA, 15 bp, Homo sapiens
tagcaaaatctgagt

SEQ ID NO: 266353 - DNA, 15 bp, Homo sapiens
atagcaaaatctgag

SEQ ID NO: 266354 - DNA, 15 bp, Homo sapiens
catagcaaaatctga

SEQ ID NO: 266355 - DNA, 15 bp, Homo sapiens
tcatagcaaaatctg

SEQ ID NO: 266356 - DNA, 15 bp, Homo sapiens
ctcatagcaaaatct

SEQ ID NO: 266357 - DNA, 15 bp, Homo sapiens
cctcatagcaaaatc

SEQ ID NO: 266358 - DNA, 15 bp, Homo sapiens
acctcatagcaaaat

SEQ ID NO: 266359 - DNA, 15 bp, Homo sapiens
aacctcatagcaaaa

SEQ ID NO: 266360 - DNA, 15 bp, Homo sapiens
taacctcatagcaaa

SEQ ID NO: 266361 - DNA, 15 bp, Homo sapiens
ttaacctcatagcaa

SEQ ID NO: 266362 - DNA, 15 bp, Homo sapiens
attaacctcatagca

SEQ ID NO: 266363 - DNA, 15 bp, Homo sapiens
cattaacctcatagc

SEQ ID NO: 266364 - DNA, 15 bp, Homo sapiens
tcattaacctcatag

SEQ ID NO: 266365 - DNA, 15 bp, Homo sapiens
ttcattaacctcata

SEQ ID NO: 266366 - DNA, 15 bp, Homo sapiens
cttcattaacctcat

SEQ ID NO: 266367 - DNA, 15 bp, Homo sapiens
acttcattaacctca

SEQ ID NO: 266368 - DNA, 15 bp, Homo sapiens
tacttcattaacctc

SEQ ID NO: 266369 - DNA, 15 bp, Homo sapiens
gtacttcattaacct

SEQ ID NO: 266370 - DNA, 15 bp, Homo sapiens
ggtacttcattaacc

SEQ ID NO: 266371 - DNA, 15 bp, Homo sapiens
tggtacttcattaac

SEQ ID NO: 266372 - DNA, 15 bp, Homo sapiens
ttggtacttcattaa

SEQ ID NO: 266373 - DNA, 15 bp, Homo sapiens
cttggtacttcatta

SEQ ID NO: 266374 - DNA, 15 bp, Homo sapiens
gcttggtacttcatt

SEQ ID NO: 266375 - DNA, 15 bp, Homo sapiens
agcttggtacttcat

SEQ ID NO: 266376 - DNA, 15 bp, Homo sapiens
cagcttggtacttca

SEQ ID NO: 266377 - DNA, 15 bp, Homo sapiens
acagcttggtacttc

SEQ ID NO: 266378 - DNA, 15 bp, Homo sapiens
cacagcttggtactt

SEQ ID NO: 266379 - DNA, 15 bp, Homo sapiens
gcacagcttggtact

SEQ ID NO: 266380 - DNA, 15 bp, Homo sapiens
agcacagcttggtac

SEQ ID NO: 266381 - DNA, 15 bp, Homo sapiens
aagcacagcttggta

SEQ ID NO: 266382 - DNA, 15 bp, Homo sapiens
caagcacagcttggt

SEQ ID NO: 266383 - DNA, 15 bp, Homo sapiens
tcaagcacagcttgg

SEQ ID NO: 266384 - DNA, 15 bp, Homo sapiens
ttcaagcacagcttg

SEQ ID NO: 266385 - DNA, 15 bp, Homo sapiens
attcaagcacagctt

SEQ ID NO: 266386 - DNA, 15 bp, Homo sapiens
tattcaagcacagct

SEQ ID NO: 266387 - DNA, 15 bp, Homo sapiens
ttattcaagcacagc

SEQ ID NO: 266388 - DNA, 15 bp, Homo sapiens
attattcaagcacag

SEQ ID NO: 266389 - DNA, 15 bp, Homo sapiens
cattattcaagcaca

SEQ ID NO: 266390 - DNA, 15 bp, Homo sapiens
tcattattcaagcac

SEQ ID NO: 266391 - DNA, 15 bp, Homo sapiens
atcattattcaagca

SEQ ID NO: 266392 - DNA, 15 bp, Homo sapiens
tatcattattcaagc

SEQ ID NO: 266393 - DNA, 15 bp, Homo sapiens
atatcattattcaag

SEQ ID NO: 266394 - DNA, 15 bp, Homo sapiens
catatcattattcaa

SEQ ID NO: 266395 - DNA, 15 bp, Homo sapiens
acatatcattattca

SEQ ID NO: 266396 - DNA, 15 bp, Homo sapiens
aacatatcattattc

SEQ ID NO: 266397 - DNA, 15 bp, Homo sapiens
aaacatatcattatt

SEQ ID NO: 266398 - DNA, 15 bp, Homo sapiens
aaaacatatcattat

SEQ ID NO: 266399 - DNA, 15 bp, Homo sapiens
gaaaacatatcatta

SEQ ID NO: 266400 - DNA, 15 bp, Homo sapiens
agaaaacatatcatt

SEQ ID NO: 266401 - DNA, 15 bp, Homo sapiens
gagaaaacatatcat

SEQ ID NO: 266402 - DNA, 15 bp, Homo sapiens
tgagaaaacatatca

SEQ ID NO: 266403 - DNA, 15 bp, Homo sapiens
ctgagaaaacatatc

SEQ ID NO: 266404 - DNA, 15 bp, Homo sapiens
tctgagaaaacatat

SEQ ID NO: 266405 - DNA, 15 bp, Homo sapiens
atctgagaaaacata

SEQ ID NO: 266406 - DNA, 15 bp, Homo sapiens
aatctgagaaaacat

SEQ ID NO: 266407 - DNA, 15 bp, Homo sapiens
aaatctgagaaaaca

SEQ ID NO: 266408 - DNA, 15 bp, Homo sapiens
aaaatctgagaaaac

SEQ ID NO: 266409 - DNA, 15 bp, Homo sapiens
gaaaatctgagaaaa

SEQ ID NO: 266410 - DNA, 15 bp, Homo sapiens
agaaaatctgagaaa

SEQ ID NO: 266411 - DNA, 15 bp, Homo sapiens
cagaaaatctgagaa

SEQ ID NO: 266412 - DNA, 15 bp, Homo sapiens
acagaaaatctgaga

SEQ ID NO: 266413 - DNA, 15 bp, Homo sapiens
aacagaaaatctgag

SEQ ID NO: 266414 - DNA, 15 bp, Homo sapiens
caacagaaaatctga

SEQ ID NO: 266415 - DNA, 15 bp, Homo sapiens
acaacagaaaatctg

SEQ ID NO: 266416 - DNA, 15 bp, Homo sapiens
tacaacagaaaatct

SEQ ID NO: 266417 - DNA, 15 bp, Homo sapiens
gtacaacagaaaatc

SEQ ID NO: 266418 - DNA, 15 bp, Homo sapiens
tgtacaacagaaaat

SEQ ID NO: 266419 - DNA, 15 bp, Homo sapiens
ctgtacaacagaaaa

SEQ ID NO: 266420 - DNA, 15 bp, Homo sapiens
actgtacaacagaaa

SEQ ID NO: 266421 - DNA, 15 bp, Homo sapiens
aactgtacaacagaa

SEQ ID NO: 266422 - DNA, 15 bp, Homo sapiens
aaactgtacaacaga

SEQ ID NO: 266423 - DNA, 15 bp, Homo sapiens
taaactgtacaacag

SEQ ID NO: 266424 - DNA, 15 bp, Homo sapiens
ttaaactgtacaaca

SEQ ID NO: 266425 - DNA, 15 bp, Homo sapiens
attaaactgtacaac

SEQ ID NO: 266426 - DNA, 15 bp, Homo sapiens
aattaaactgtacaa

SEQ ID NO: 266427 - DNA, 15 bp, Homo sapiens
aaattaaactgtaca

SEQ ID NO: 266428 - DNA, 15 bp, Homo sapiens
taaattaaactgtac

SEQ ID NO: 266429 - DNA, 15 bp, Homo sapiens
ctaaattaaactgta

SEQ ID NO: 266430 - DNA, 15 bp, Homo sapiens
gctaaattaaactgt

SEQ ID NO: 266431 - DNA, 15 bp, Homo sapiens
tgctaaattaaactg

SEQ ID NO: 266432 - DNA, 15 bp, Homo sapiens
ctgctaaattaaact

SEQ ID NO: 266433 - DNA, 15 bp, Homo sapiens
actgctaaattaaac

SEQ ID NO: 266434 - DNA, 15 bp, Homo sapiens
gactgctaaattaaa

SEQ ID NO: 266435 - DNA, 15 bp, Homo sapiens
ggactgctaaattaa

SEQ ID NO: 266436 - DNA, 15 bp, Homo sapiens
tggactgctaaatta

SEQ ID NO: 266437 - DNA, 15 bp, Homo sapiens
atggactgctaaatt

SEQ ID NO: 266438 - DNA, 15 bp, Homo sapiens
tatggactgctaaat

SEQ ID NO: 266439 - DNA, 15 bp, Homo sapiens
atatggactgctaaa

SEQ ID NO: 266440 - DNA, 15 bp, Homo sapiens
gatatggactgctaa

SEQ ID NO: 266441 - DNA, 15 bp, Homo sapiens
tgatatggactgcta

SEQ ID NO: 266442 - DNA, 15 bp, Homo sapiens
gtgatatggactgct

SEQ ID NO: 266443 - DNA, 15 bp, Homo sapiens
tgtgatatggactgc

SEQ ID NO: 266444 - DNA, 15 bp, Homo sapiens
atgtgatatggactg

SEQ ID NO: 266445 - DNA, 15 bp, Homo sapiens
aatgtgatatggact

SEQ ID NO: 266446 - DNA, 15 bp, Homo sapiens
caatgtgatatggac

SEQ ID NO: 266447 - DNA, 15 bp, Homo sapiens
gcaatgtgatatgga

SEQ ID NO: 266448 - DNA, 15 bp, Homo sapiens
tgcaatgtgatatgg

SEQ ID NO: 266449 - DNA, 15 bp, Homo sapiens
ttgcaatgtgatatg

SEQ ID NO: 266450 - DNA, 15 bp, Homo sapiens
tttgcaatgtgatat

SEQ ID NO: 266451 - DNA, 15 bp, Homo sapiens
ttttgcaatgtgata

SEQ ID NO: 266452 - DNA, 15 bp, Homo sapiens
cttttgcaatgtgat

SEQ ID NO: 266453 - DNA, 15 bp, Homo sapiens
acttttgcaatgtga

SEQ ID NO: 266454 - DNA, 15 bp, Homo sapiens
tacttttgcaatgtg

SEQ ID NO: 266455 - DNA, 15 bp, Homo sapiens
ctacttttgcaatgt

SEQ ID NO: 266456 - DNA, 15 bp, Homo sapiens
gctacttttgcaatg

SEQ ID NO: 266457 - DNA, 15 bp, Homo sapiens
tgctacttttgcaat

SEQ ID NO: 266458 - DNA, 15 bp, Homo sapiens
ttgctacttttgcaa

SEQ ID NO: 266459 - DNA, 15 bp, Homo sapiens
attgctacttttgca

SEQ ID NO: 266460 - DNA, 15 bp, Homo sapiens
cattgctacttttgc

SEQ ID NO: 266461 - DNA, 15 bp, Homo sapiens
tcattgctacttttg

SEQ ID NO: 266462 - DNA, 15 bp, Homo sapiens
gtcattgctactttt

SEQ ID NO: 266463 - DNA, 15 bp, Homo sapiens
ggtcattgctacttt

SEQ ID NO: 266464 - DNA, 15 bp, Homo sapiens
aggtcattgctactt

SEQ ID NO: 266465 - DNA, 15 bp, Homo sapiens
gaggtcattgctact

SEQ ID NO: 266466 - DNA, 15 bp, Homo sapiens
tgaggtcattgctac

SEQ ID NO: 266467 - DNA, 15 bp, Homo sapiens
atgaggtcattgcta

SEQ ID NO: 266468 - DNA, 15 bp, Homo sapiens
tatgaggtcattgct

SEQ ID NO: 266469 - DNA, 15 bp, Homo sapiens
ttatgaggtcattgc

SEQ ID NO: 266470 - DNA, 15 bp, Homo sapiens
tttatgaggtcattg

SEQ ID NO: 266471 - DNA, 15 bp, Homo sapiens
ttttatgaggtcatt

SEQ ID NO: 266472 - DNA, 15 bp, Homo sapiens
attttatgaggtcat

SEQ ID NO: 266473 - DNA, 15 bp, Homo sapiens
tattttatgaggtca

SEQ ID NO: 266474 - DNA, 15 bp, Homo sapiens
gtattttatgaggtc

SEQ ID NO: 266475 - DNA, 15 bp, Homo sapiens
ggtattttatgaggt

SEQ ID NO: 266476 - DNA, 15 bp, Homo sapiens
aggtattttatgagg

SEQ ID NO: 266477 - DNA, 15 bp, Homo sapiens
gaggtattttatgag

SEQ ID NO: 266478 - DNA, 15 bp, Homo sapiens
agaggtattttatga

SEQ ID NO: 266479 - DNA, 15 bp, Homo sapiens
aagaggtattttatg

SEQ ID NO: 266480 - DNA, 15 bp, Homo sapiens
gaagaggtattttat

SEQ ID NO: 266481 - DNA, 15 bp, Homo sapiens
tgaagaggtatttta

SEQ ID NO: 266482 - DNA, 15 bp, Homo sapiens
ttgaagaggtatttt

SEQ ID NO: 266483 - DNA, 15 bp, Homo sapiens
tttgaagaggtattt

SEQ ID NO: 266484 - DNA, 15 bp, Homo sapiens
ttttgaagaggtatt

SEQ ID NO: 266485 - DNA, 15 bp, Homo sapiens
attttgaagaggtat

SEQ ID NO: 266486 - DNA, 15 bp, Homo sapiens
cattttgaagaggta

SEQ ID NO: 266487 - DNA, 15 bp, Homo sapiens
gcattttgaagaggt

SEQ ID NO: 266488 - DNA, 15 bp, Homo sapiens
agcattttgaagagg

SEQ ID NO: 266489 - DNA, 15 bp, Homo sapiens
aagcattttgaagag

SEQ ID NO: 266490 - DNA, 15 bp, Homo sapiens
taagcattttgaaga

SEQ ID NO: 266491 - DNA, 15 bp, Homo sapiens
ttaagcattttgaag

SEQ ID NO: 266492 - DNA, 15 bp, Homo sapiens
tttaagcattttgaa

SEQ ID NO: 266493 - DNA, 15 bp, Homo sapiens
atttaagcattttga

SEQ ID NO: 266494 - DNA, 15 bp, Homo sapiens
aatttaagcattttg

SEQ ID NO: 266495 - DNA, 15 bp, Homo sapiens
gaatttaagcatttt

SEQ ID NO: 266496 - DNA, 15 bp, Homo sapiens
tgaatttaagcattt

SEQ ID NO: 266497 - DNA, 15 bp, Homo sapiens
atgaatttaagcatt

SEQ ID NO: 266498 - DNA, 15 bp, Homo sapiens
aatgaatttaagcat

SEQ ID NO: 266499 - DNA, 15 bp, Homo sapiens
aaatgaatttaagca

SEQ ID NO: 266500 - DNA, 15 bp, Homo sapiens
gaaatgaatttaagc

SEQ ID NO: 266501 - DNA, 15 bp, Homo sapiens
tgaaatgaatttaag

SEQ ID NO: 266502 - DNA, 15 bp, Homo sapiens
gtgaaatgaatttaa

SEQ ID NO: 266503 - DNA, 15 bp, Homo sapiens
tgtgaaatgaattta

SEQ ID NO: 266504 - DNA, 15 bp, Homo sapiens
gtgtgaaatgaattt

SEQ ID NO: 266505 - DNA, 15 bp, Homo sapiens
tgtgtgaaatgaatt

SEQ ID NO: 266506 - DNA, 15 bp, Homo sapiens
atgtgtgaaatgaat

SEQ ID NO: 266507 - DNA, 15 bp, Homo sapiens
aatgtgtgaaatgaa

SEQ ID NO: 266508 - DNA, 15 bp, Homo sapiens
taatgtgtgaaatga

SEQ ID NO: 266509 - DNA, 15 bp, Homo sapiens
ttaatgtgtgaaatg

SEQ ID NO: 266510 - DNA, 15 bp, Homo sapiens
attaatgtgtgaaat

SEQ ID NO: 266511 - DNA, 15 bp, Homo sapiens
aattaatgtgtgaaa

SEQ ID NO: 266512 - DNA, 15 bp, Homo sapiens
aaattaatgtgtgaa

SEQ ID NO: 266513 - DNA, 15 bp, Homo sapiens
aaaattaatgtgtga

SEQ ID NO: 266514 - DNA, 15 bp, Homo sapiens
taaaattaatgtgtg

SEQ ID NO: 266515 - DNA, 15 bp, Homo sapiens
ataaaattaatgtgt

SEQ ID NO: 266516 - DNA, 15 bp, Homo sapiens
gataaaattaatgtg

SEQ ID NO: 266517 - DNA, 15 bp, Homo sapiens
agataaaattaatgt

SEQ ID NO: 266518 - DNA, 15 bp, Homo sapiens
gagataaaattaatg

SEQ ID NO: 266519 - DNA, 15 bp, Homo sapiens
tgagataaaattaat

SEQ ID NO: 266520 - DNA, 15 bp, Homo sapiens
ctgagataaaattaa

SEQ ID NO: 266521 - DNA, 15 bp, Homo sapiens
actgagataaaatta

SEQ ID NO: 266522 - DNA, 15 bp, Homo sapiens
gactgagataaaatt

SEQ ID NO: 266523 - DNA, 15 bp, Homo sapiens
agactgagataaaat

SEQ ID NO: 266524 - DNA, 15 bp, Homo sapiens
aagactgagataaaa

SEQ ID NO: 266525 - DNA, 15 bp, Homo sapiens
caagactgagataaa

SEQ ID NO: 266526 - DNA, 15 bp, Homo sapiens
tcaagactgagataa

SEQ ID NO: 266527 - DNA, 15 bp, Homo sapiens
ttcaagactgagata

SEQ ID NO: 266528 - DNA, 15 bp, Homo sapiens
cttcaagactgagat

SEQ ID NO: 266529 - DNA, 15 bp, Homo sapiens
gcttcaagactgaga

SEQ ID NO: 266530 - DNA, 15 bp, Homo sapiens
ggcttcaagactgag

SEQ ID NO: 266531 - DNA, 15 bp, Homo sapiens
tggcttcaagactga

SEQ ID NO: 266532 - DNA, 15 bp, Homo sapiens
ttggcttcaagactg

SEQ ID NO: 266533 - DNA, 15 bp, Homo sapiens
attggcttcaagact

SEQ ID NO: 266534 - DNA, 15 bp, Homo sapiens
aattggcttcaagac

SEQ ID NO: 266535 - DNA, 15 bp, Homo sapiens
gaattggcttcaaga

SEQ ID NO: 266536 - DNA, 15 bp, Homo sapiens
tgaattggcttcaag

SEQ ID NO: 266537 - DNA, 15 bp, Homo sapiens
ctgaattggcttcaa

SEQ ID NO: 266538 - DNA, 15 bp, Homo sapiens
actgaattggcttca

SEQ ID NO: 266539 - DNA, 15 bp, Homo sapiens
tactgaattggcttc

SEQ ID NO: 266540 - DNA, 15 bp, Homo sapiens
ctactgaattggctt

SEQ ID NO: 266541 - DNA, 15 bp, Homo sapiens
cctactgaattggct

SEQ ID NO: 266542 - DNA, 15 bp, Homo sapiens
acctactgaattggc

SEQ ID NO: 266543 - DNA, 15 bp, Homo sapiens
cacctactgaattgg

SEQ ID NO: 266544 - DNA, 15 bp, Homo sapiens
gcacctactgaattg

SEQ ID NO: 266545 - DNA, 15 bp, Homo sapiens
tgcacctactgaatt

SEQ ID NO: 266546 - DNA, 15 bp, Homo sapiens
atgcacctactgaat

SEQ ID NO: 266547 - DNA, 15 bp, Homo sapiens
aatgcacctactgaa

SEQ ID NO: 266548 - DNA, 15 bp, Homo sapiens
caatgcacctactga

SEQ ID NO: 266549 - DNA, 15 bp, Homo sapiens
ccaatgcacctactg

SEQ ID NO: 266550 - DNA, 15 bp, Homo sapiens
tccaatgcacctact

SEQ ID NO: 266551 - DNA, 15 bp, Homo sapiens
ttccaatgcacctac

SEQ ID NO: 266552 - DNA, 15 bp, Homo sapiens
attccaatgcaccta

SEQ ID NO: 266553 - DNA, 15 bp, Homo sapiens
gattccaatgcacct

SEQ ID NO: 266554 - DNA, 15 bp, Homo sapiens
tgattccaatgcacc

SEQ ID NO: 266555 - DNA, 15 bp, Homo sapiens
ttgattccaatgcac

SEQ ID NO: 266556 - DNA, 15 bp, Homo sapiens
cttgattccaatgca

SEQ ID NO: 266557 - DNA, 15 bp, Homo sapiens
gcttgattccaatgc

SEQ ID NO: 266558 - DNA, 15 bp, Homo sapiens
ggcttgattccaatg

SEQ ID NO: 266559 - DNA, 15 bp, Homo sapiens
aggcttgattccaat

SEQ ID NO: 266560 - DNA, 15 bp, Homo sapiens
caggcttgattccaa

SEQ ID NO: 266561 - DNA, 15 bp, Homo sapiens
ccaggcttgattcca

SEQ ID NO: 266562 - DNA, 15 bp, Homo sapiens
gccaggcttgattcc

SEQ ID NO: 266563 - DNA, 15 bp, Homo sapiens
agccaggcttgattc

SEQ ID NO: 266564 - DNA, 15 bp, Homo sapiens
tagccaggcttgatt

SEQ ID NO: 266565 - DNA, 15 bp, Homo sapiens
gtagccaggcttgat

SEQ ID NO: 266566 - DNA, 15 bp, Homo sapiens
ggtagccaggcttga

SEQ ID NO: 266567 - DNA, 15 bp, Homo sapiens
aggtagccaggcttg

SEQ ID NO: 266568 - DNA, 15 bp, Homo sapiens
caggtagccaggctt

SEQ ID NO: 266569 - DNA, 15 bp, Homo sapiens
gcaggtagccaggct

SEQ ID NO: 266570 - DNA, 15 bp, Homo sapiens
tgcaggtagccaggc

SEQ ID NO: 266571 - DNA, 15 bp, Homo sapiens
atgcaggtagccagg

SEQ ID NO: 266572 - DNA, 15 bp, Homo sapiens
catgcaggtagccag

SEQ ID NO: 266573 - DNA, 15 bp, Homo sapiens
gcatgcaggtagcca

SEQ ID NO: 266574 - DNA, 15 bp, Homo sapiens
agcatgcaggtagcc

SEQ ID NO: 266575 - DNA, 15 bp, Homo sapiens
cagcatgcaggtagc

SEQ ID NO: 266576 - DNA, 15 bp, Homo sapiens
acagcatgcaggtag

SEQ ID NO: 266577 - DNA, 15 bp, Homo sapiens
aacagcatgcaggta

SEQ ID NO: 266578 - DNA, 15 bp, Homo sapiens
gaacagcatgcaggt

SEQ ID NO: 266579 - DNA, 15 bp, Homo sapiens
ggaacagcatgcagg

SEQ ID NO: 266580 - DNA, 15 bp, Homo sapiens
aggaacagcatgcag

SEQ ID NO: 266581 - DNA, 15 bp, Homo sapiens
aaggaacagcatgca

SEQ ID NO: 266582 - DNA, 15 bp, Homo sapiens
aaaggaacagcatgc

SEQ ID NO: 266583 - DNA, 15 bp, Homo sapiens
aaaaggaacagcatg

SEQ ID NO: 266584 - DNA, 15 bp, Homo sapiens
gaaaaggaacagcat

SEQ ID NO: 266585 - DNA, 15 bp, Homo sapiens
agaaaaggaacagca

SEQ ID NO: 266586 - DNA, 15 bp, Homo sapiens
aagaaaaggaacagc

SEQ ID NO: 266587 - DNA, 15 bp, Homo sapiens
aaagaaaaggaacag

SEQ ID NO: 266588 - DNA, 15 bp, Homo sapiens
aaaagaaaaggaaca

SEQ ID NO: 266589 - DNA, 15 bp, Homo sapiens
gaaaagaaaaggaac

SEQ ID NO: 266590 - DNA, 15 bp, Homo sapiens
agaaaagaaaaggaa

SEQ ID NO: 266591 - DNA, 15 bp, Homo sapiens
aagaaaagaaaagga

SEQ ID NO: 266592 - DNA, 15 bp, Homo sapiens
gaagaaaagaaaagg

SEQ ID NO: 266593 - DNA, 15 bp, Homo sapiens
agaagaaaagaaaag

SEQ ID NO: 266594 - DNA, 15 bp, Homo sapiens
aagaagaaaagaaaa

SEQ ID NO: 266595 - DNA, 15 bp, Homo sapiens
aaagaagaaaagaaa

SEQ ID NO: 266596 - DNA, 15 bp, Homo sapiens
aaaagaagaaaagaa

SEQ ID NO: 266597 - DNA, 15 bp, Homo sapiens
taaaagaagaaaaga

SEQ ID NO: 266598 - DNA, 15 bp, Homo sapiens
ctaaaagaagaaaag

SEQ ID NO: 266599 - DNA, 15 bp, Homo sapiens
gctaaaagaagaaaa

SEQ ID NO: 266600 - DNA, 15 bp, Homo sapiens
ggctaaaagaagaaa

SEQ ID NO: 266601 - DNA, 15 bp, Homo sapiens
tggctaaaagaagaa

SEQ ID NO: 266602 - DNA, 15 bp, Homo sapiens
atggctaaaagaaga

SEQ ID NO: 266603 - DNA, 15 bp, Homo sapiens
aatggctaaaagaag

SEQ ID NO: 266604 - DNA, 15 bp, Homo sapiens
aaatggctaaaagaa

SEQ ID NO: 266605 - DNA, 15 bp, Homo sapiens
aaaatggctaaaaga

SEQ ID NO: 266606 - DNA, 15 bp, Homo sapiens
caaaatggctaaaag

SEQ ID NO: 266607 - DNA, 15 bp, Homo sapiens
gcaaaatggctaaaa

SEQ ID NO: 266608 - DNA, 15 bp, Homo sapiens
agcaaaatggctaaa

SEQ ID NO: 266609 - DNA, 15 bp, Homo sapiens
tagcaaaatggctaa

SEQ ID NO: 266610 - DNA, 15 bp, Homo sapiens
ttagcaaaatggcta

SEQ ID NO: 266611 - DNA, 15 bp, Homo sapiens
cttagcaaaatggct

SEQ ID NO: 266612 - DNA, 15 bp, Homo sapiens
tcttagcaaaatggc

SEQ ID NO: 266613 - DNA, 15 bp, Homo sapiens
ctcttagcaaaatgg

SEQ ID NO: 266614 - DNA, 15 bp, Homo sapiens
tctcttagcaaaatg

SEQ ID NO: 266615 - DNA, 15 bp, Homo sapiens
gtctcttagcaaaat

SEQ ID NO: 266616 - DNA, 15 bp, Homo sapiens
tgtctcttagcaaaa

SEQ ID NO: 266617 - DNA, 15 bp, Homo sapiens
gtgtctcttagcaaa

SEQ ID NO: 266618 - DNA, 15 bp, Homo sapiens
tgtgtctcttagcaa

SEQ ID NO: 266619 - DNA, 15 bp, Homo sapiens
ctgtgtctcttagca

SEQ ID NO: 266620 - DNA, 15 bp, Homo sapiens
actgtgtctcttagc

SEQ ID NO: 266621 - DNA, 15 bp, Homo sapiens
gactgtgtctcttag

SEQ ID NO: 266622 - DNA, 15 bp, Homo sapiens
agactgtgtctctta

SEQ ID NO: 266623 - DNA, 15 bp, Homo sapiens
aagactgtgtctctt

SEQ ID NO: 266624 - DNA, 15 bp, Homo sapiens
gaagactgtgtctct

SEQ ID NO: 266625 - DNA, 15 bp, Homo sapiens
agaagactgtgtctc

SEQ ID NO: 266626 - DNA, 15 bp, Homo sapiens
gagaagactgtgtct

SEQ ID NO: 266627 - DNA, 15 bp, Homo sapiens
tgagaagactgtgtc

SEQ ID NO: 266628 - DNA, 15 bp, Homo sapiens
atgagaagactgtgt

SEQ ID NO: 266629 - DNA, 15 bp, Homo sapiens
gatgagaagactgtg

SEQ ID NO: 266630 - DNA, 15 bp, Homo sapiens
tgatgagaagactgt

SEQ ID NO: 266631 - DNA, 15 bp, Homo sapiens
gtgatgagaagactg

SEQ ID NO: 266632 - DNA, 15 bp, Homo sapiens
agtgatgagaagact

SEQ ID NO: 266633 - DNA, 15 bp, Homo sapiens
aagtgatgagaagac

SEQ ID NO: 266634 - DNA, 15 bp, Homo sapiens
gaagtgatgagaaga

SEQ ID NO: 266635 - DNA, 15 bp, Homo sapiens
cgaagtgatgagaag

SEQ ID NO: 266636 - DNA, 15 bp, Homo sapiens
acgaagtgatgagaa

SEQ ID NO: 266637 - DNA, 15 bp, Homo sapiens
aacgaagtgatgaga

SEQ ID NO: 266638 - DNA, 15 bp, Homo sapiens
aaacgaagtgatgag

SEQ ID NO: 266639 - DNA, 15 bp, Homo sapiens
gaaacgaagtgatga

SEQ ID NO: 266640 - DNA, 15 bp, Homo sapiens
agaaacgaagtgatg

SEQ ID NO: 266641 - DNA, 15 bp, Homo sapiens
gagaaacgaagtgat

SEQ ID NO: 266642 - DNA, 15 bp, Homo sapiens
ggagaaacgaagtga

SEQ ID NO: 266643 - DNA, 15 bp, Homo sapiens
aggagaaacgaagtg

SEQ ID NO: 266644 - DNA, 15 bp, Homo sapiens
taggagaaacgaagt

SEQ ID NO: 266645 - DNA, 15 bp, Homo sapiens
ataggagaaacgaag

SEQ ID NO: 266646 - DNA, 15 bp, Homo sapiens
aataggagaaacgaa

SEQ ID NO: 266647 - DNA, 15 bp, Homo sapiens
aaataggagaaacga

SEQ ID NO: 266648 - DNA, 15 bp, Homo sapiens
aaaataggagaaacg

SEQ ID NO: 266649 - DNA, 15 bp, Homo sapiens
caaaataggagaaac

SEQ ID NO: 266650 - DNA, 15 bp, Homo sapiens
acaaaataggagaaa

SEQ ID NO: 266651 - DNA, 15 bp, Homo sapiens
aacaaaataggagaa

SEQ ID NO: 266652 - DNA, 15 bp, Homo sapiens
aaacaaaataggaga

SEQ ID NO: 266653 - DNA, 15 bp, Homo sapiens
aaaacaaaataggag

SEQ ID NO: 266654 - DNA, 15 bp, Homo sapiens
taaaacaaaatagga

SEQ ID NO: 266655 - DNA, 15 bp, Homo sapiens
gtaaaacaaaatagg

SEQ ID NO: 266656 - DNA, 15 bp, Homo sapiens
agtaaaacaaaatag

SEQ ID NO: 266657 - DNA, 15 bp, Homo sapiens
tagtaaaacaaaata

SEQ ID NO: 266658 - DNA, 15 bp, Homo sapiens
ctagtaaaacaaaat

SEQ ID NO: 266659 - DNA, 15 bp, Homo sapiens
actagtaaaacaaaa

SEQ ID NO: 266660 - DNA, 15 bp, Homo sapiens
aactagtaaaacaaa

SEQ ID NO: 266661 - DNA, 15 bp, Homo sapiens
aaactagtaaaacaa

SEQ ID NO: 266662 - DNA, 15 bp, Homo sapiens
aaaactagtaaaaca

SEQ ID NO: 266663 - DNA, 15 bp, Homo sapiens
taaaactagtaaaac

SEQ ID NO: 266664 - DNA, 15 bp, Homo sapiens
ttaaaactagtaaaa

SEQ ID NO: 266665 - DNA, 15 bp, Homo sapiens
cttaaaactagtaaa

SEQ ID NO: 266666 - DNA, 15 bp, Homo sapiens
tcttaaaactagtaa

SEQ ID NO: 266667 - DNA, 15 bp, Homo sapiens
atcttaaaactagta

SEQ ID NO: 266668 - DNA, 15 bp, Homo sapiens
gatcttaaaactagt

SEQ ID NO: 266669 - DNA, 15 bp, Homo sapiens
tgatcttaaaactag

SEQ ID NO: 266670 - DNA, 15 bp, Homo sapiens
ctgatcttaaaacta

SEQ ID NO: 266671 - DNA, 15 bp, Homo sapiens
tctgatcttaaaact

SEQ ID NO: 266672 - DNA, 15 bp, Homo sapiens
ctctgatcttaaaac

SEQ ID NO: 266673 - DNA, 15 bp, Homo sapiens
actctgatcttaaaa

SEQ ID NO: 266674 - DNA, 15 bp, Homo sapiens
aactctgatcttaaa

SEQ ID NO: 266675 - DNA, 15 bp, Homo sapiens
gaactctgatcttaa

SEQ ID NO: 266676 - DNA, 15 bp, Homo sapiens
tgaactctgatctta

SEQ ID NO: 266677 - DNA, 15 bp, Homo sapiens
gtgaactctgatctt

SEQ ID NO: 266678 - DNA, 15 bp, Homo sapiens
agtgaactctgatct

SEQ ID NO: 266679 - DNA, 15 bp, Homo sapiens
aagtgaactctgatc

SEQ ID NO: 266680 - DNA, 15 bp, Homo sapiens
aaagtgaactctgat

SEQ ID NO: 266681 - DNA, 15 bp, Homo sapiens
gaaagtgaactctga

SEQ ID NO: 266682 - DNA, 15 bp, Homo sapiens
agaaagtgaactctg
